United States Patent Application Publication US 2005/0136395 A1 - sequence listing, part 4

SEQ ID NO: 119402 - DNA, 25 bp, SARS Virus
gagaaggtatatgcgtcgagaggga

SEQ ID NO: 119403 - DNA, 25 bp, SARS Virus
agaaggtatatcggtcgagagggat

SEQ ID NO: 119404 - DNA, 25 bp, SARS Virus
gaaggtatatccgtcgagagggatc

SEQ ID NO: 119405 - DNA, 25 bp, SARS Virus
aaggtatatccggcgagagggatcg

SEQ ID NO: 119406 - DNA, 25 bp, SARS Virus
aggtatatccgtggagagggatcgt

SEQ ID NO: 119407 - DNA, 25 bp, SARS Virus
ggtatatccgtcgagagggatcgta

SEQ ID NO: 119408 - DNA, 25 bp, SARS Virus
gtatatccgtcgggagggatcgtaa

SEQ ID NO: 119409 - DNA, 25 bp, SARS Virus
tatatccgtcgagagggatcgtaat

SEQ ID NO: 119410 - DNA, 25 bp, SARS Virus
atatccgtcgagggggatcgtaata

SEQ ID NO: 119411 - DNA, 25 bp, SARS Virus
tatccgtcgagagggatcgtaataa

SEQ ID NO: 119412 - DNA, 25 bp, SARS Virus
atccgtcgagagggatcgtaataag

SEQ ID NO: 119413 - DNA, 25 bp, SARS Virus
tccgtcgagagggatcgtaataagt

SEQ ID NO: 119414 - DNA, 25 bp, SARS Virus
ccgtcgagaggggtcgtaataagtg

SEQ ID NO: 119415 - DNA, 25 bp, SARS Virus
cgtcgagagggagcgtaataagtga

SEQ ID NO: 119416 - DNA, 25 bp, SARS Virus
gtcgagagggatggtaataagtgac

SEQ ID NO: 119417 - DNA, 25 bp, SARS Virus
tcgagagggatcgtaataagtgaca

SEQ ID NO: 119418 - DNA, 25 bp, SARS Virus
cgagagggatcggaataagtgacat

SEQ ID NO: 119419 - DNA, 25 bp, SARS Virus
gagagggatcgtgataagtgacatg

SEQ ID NO: 119420 - DNA, 25 bp, SARS Virus
agagggatcgtagtaagtgacatgg

SEQ ID NO: 119421 - DNA, 25 bp, SARS Virus
gagggatcgtaagaagtgacatggg

SEQ ID NO: 119422 - DNA, 25 bp, SARS Virus
agggatcgtaatgagtgacatggga

SEQ ID NO: 119423 - DNA, 25 bp, SARS Virus
gggatcgtaataggtgacatgggag

SEQ ID NO: 119424 - DNA, 25 bp, SARS Virus
ggatcgtaataagtgacatgggagc

SEQ ID NO: 119425 - DNA, 25 bp, SARS Virus
gatcgtaataagggacatgggagct

SEQ ID NO: 119426 - DNA, 25 bp, SARS Virus
atcgtaataagtgacatgggagcta

SEQ ID NO: 119427 - DNA, 25 bp, SARS Virus
tcgtaataagtggcatgggagctag

SEQ ID NO: 119428 - DNA, 25 bp, SARS Virus
cgtaataagtgagatgggagctagc

SEQ ID NO: 119429 - DNA, 25 bp, SARS Virus
gtaataagtgacgtgggagctagca

SEQ ID NO: 119430 - DNA, 25 bp, SARS Virus
taataagtgacaggggagctagcat

SEQ ID NO: 119431 - DNA, 25 bp, SARS Virus
aataagtgacatgggagctagcatg

SEQ ID NO: 119432 - DNA, 25 bp, SARS Virus
ataagtgacatgggagctagcatga

SEQ ID NO: 119433 - DNA, 25 bp, SARS Virus
taagtgacatgggagctagcatgag

SEQ ID NO: 119434 - DNA, 25 bp, SARS Virus
aagtgacatgggggctagcatgagg

SEQ ID NO: 119435 - DNA, 25 bp, SARS Virus
agtgacatgggagctagcatgaggc

SEQ ID NO: 119436 - DNA, 25 bp, SARS Virus
gtgacatgggaggtagcatgaggcg

SEQ ID NO: 119437 - DNA, 25 bp, SARS Virus
tgacatgggagcgagcatgaggcgc

SEQ ID NO: 119438 - DNA, 25 bp, SARS Virus
gacatgggagctggcatgaggcgca

SEQ ID NO: 119439 - DNA, 25 bp, SARS Virus
acatgggagctagcatgaggcgcac

SEQ ID NO: 119440 - DNA, 25 bp, SARS Virus
catgggagctaggatgaggcgcacc

SEQ ID NO: 119441 - DNA, 25 bp, SARS Virus
atgggagctagcgtgaggcgcaccg

SEQ ID NO: 119442 - DNA, 25 bp, SARS Virus
tgggagctagcaggaggcgcaccgg

SEQ ID NO: 119443 - DNA, 25 bp, SARS Virus
gggagctagcatgaggcgcaccgga

SEQ ID NO: 119444 - DNA, 25 bp, SARS Virus
ggagctagcatggggcgcaccggag

SEQ ID NO: 119445 - DNA, 25 bp, SARS Virus
gagctagcatgaggcgcaccggagc

SEQ ID NO: 119446 - DNA, 25 bp, SARS Virus
agctagcatgaggcgcaccggagct

SEQ ID NO: 119447 - DNA, 25 bp, SARS Virus
gctagcatgaggggcaccggagcta

SEQ ID NO: 119448 - DNA, 25 bp, SARS Virus
ctagcatgaggcgcaccggagctac

SEQ ID NO: 119449 - DNA, 25 bp, SARS Virus
tagcatgaggcggaccggagctact

SEQ ID NO: 119450 - DNA, 25 bp, SARS Virus
agcatgaggcgcgccggagctactt

SEQ ID NO: 119451 - DNA, 25 bp, SARS Virus
gcatgaggcgcagcggagctacttt

SEQ ID NO: 119452 - DNA, 25 bp, SARS Virus
catgaggcgcacgggagctactttt

SEQ ID NO: 119453 - DNA, 25 bp, SARS Virus
atgaggcgcaccggagctactttta

SEQ ID NO: 119454 - DNA, 25 bp, SARS Virus
tgaggcgcaccggagctacttttac

SEQ ID NO: 119455 - DNA, 25 bp, SARS Virus
gaggcgcaccggggctacttttaca

SEQ ID NO: 119456 - DNA, 25 bp, SARS Virus
aggcgcaccggagctacttttacac

SEQ ID NO: 119457 - DNA, 25 bp, SARS Virus
ggcgcaccggaggtacttttacacc

SEQ ID NO: 119458 - DNA, 25 bp, SARS Virus
gcgcaccggagcgacttttacacca

SEQ ID NO: 119459 - DNA, 25 bp, SARS Virus
cgcaccggagctgcttttacaccac

SEQ ID NO: 119460 - DNA, 25 bp, SARS Virus
gcaccggagctagttttacaccacc

SEQ ID NO: 119461 - DNA, 25 bp, SARS Virus
caccggagctacgtttacaccaccg

SEQ ID NO: 119462 - DNA, 25 bp, SARS Virus
accggagctactgttacaccaccga

SEQ ID NO: 119463 - DNA, 25 bp, SARS Virus
ccggagctacttgtacaccaccgag

SEQ ID NO: 119464 - DNA, 25 bp, SARS Virus
cggagctactttgacaccaccgaga

SEQ ID NO: 119465 - DNA, 25 bp, SARS Virus
ggagctacttttgcaccaccgagaa

SEQ ID NO: 119466 - DNA, 25 bp, SARS Virus
gagctacttttagaccaccgagaaa

SEQ ID NO: 119467 - DNA, 25 bp, SARS Virus
agctacttttacgccaccgagaaag

SEQ ID NO: 119468 - DNA, 25 bp, SARS Virus
gctacttttacagcaccgagaaagt

SEQ ID NO: 119469 - DNA, 25 bp, SARS Virus
ctacttttacacgaccgagaaagtt

SEQ ID NO: 119470 - DNA, 25 bp, SARS Virus
tacttttacaccgccgagaaagttc

SEQ ID NO: 119471 - DNA, 25 bp, SARS Virus
acttttacaccagcgagaaagttca

SEQ ID NO: 119472 - DNA, 25 bp, SARS Virus
cttttacaccacggagaaagttcag

SEQ ID NO: 119473 - DNA, 25 bp, SARS Virus
ttttacaccaccgagaaagttcagg

SEQ ID NO: 119474 - DNA, 25 bp, SARS Virus
tttacaccaccgggaaagttcagga

SEQ ID NO: 119475 - DNA, 25 bp, SARS Virus
ttacaccaccgagaaagttcaggag

SEQ ID NO: 119476 - DNA, 25 bp, SARS Virus
tacaccaccgaggaagttcaggagg

SEQ ID NO: 119477 - DNA, 25 bp, SARS Virus
acaccaccgagagagttcaggaggg

SEQ ID NO: 119478 - DNA, 25 bp, SARS Virus
caccaccgagaaggttcaggaggga

SEQ ID NO: 119479 - DNA, 25 bp, SARS Virus
accaccgagaaagttcaggagggat

SEQ ID NO: 119480 - DNA, 25 bp, SARS Virus
ccaccgagaaaggtcaggagggatt

SEQ ID NO: 119481 - DNA, 25 bp, SARS Virus
caccgagaaagtgcaggagggatta

SEQ ID NO: 119482 - DNA, 25 bp, SARS Virus
accgagaaagttgaggagggattac

SEQ ID NO: 119483 - DNA, 25 bp, SARS Virus
ccgagaaagttcgggagggattaca

SEQ ID NO: 119484 - DNA, 25 bp, SARS Virus
cgagaaagttcaggagggattacaa

SEQ ID NO: 119485 - DNA, 25 bp, SARS Virus
gagaaagttcaggagggattacaat

SEQ ID NO: 119486 - DNA, 25 bp, SARS Virus
agaaagttcaggggggattacaatg

SEQ ID NO: 119487 - DNA, 25 bp, SARS Virus
gaaagttcaggagggattacaatgt

SEQ ID NO: 119488 - DNA, 25 bp, SARS Virus
aaagttcaggagggattacaatgtg

SEQ ID NO: 119489 - DNA, 25 bp, SARS Virus
aagttcaggagggattacaatgtgt

SEQ ID NO: 119490 - DNA, 25 bp, SARS Virus
agttcaggaggggttacaatgtgta

SEQ ID NO: 119491 - DNA, 25 bp, SARS Virus
gttcaggagggagtacaatgtgtaa

SEQ ID NO: 119492 - DNA, 25 bp, SARS Virus
ttcaggagggatgacaatgtgtaac

SEQ ID NO: 119493 - DNA, 25 bp, SARS Virus
tcaggagggattgcaatgtgtaact

SEQ ID NO: 119494 - DNA, 25 bp, SARS Virus
caggagggattagaatgtgtaacta

SEQ ID NO: 119495 - DNA, 25 bp, SARS Virus
aggagggattacgatgtgtaactaa

SEQ ID NO: 119496 - DNA, 25 bp, SARS Virus
ggagggattacagtgtgtaactaat

SEQ ID NO: 119497 - DNA, 25 bp, SARS Virus
gagggattacaaggtgtaactaatt

SEQ ID NO: 119498 - DNA, 25 bp, SARS Virus
agggattacaatgtgtaactaattt

SEQ ID NO: 119499 - DNA, 25 bp, SARS Virus
gggattacaatgggtaactaatttc

SEQ ID NO: 119500 - DNA, 25 bp, SARS Virus
ggattacaatgtgtaactaatttct

SEQ ID NO: 119501 - DNA, 25 bp, SARS Virus
gattacaatgtggaactaatttcta

SEQ ID NO: 119502 - DNA, 25 bp, SARS Virus
attacaatgtgtgactaatttctaa

SEQ ID NO: 119503 - DNA, 25 bp, SARS Virus
ttacaatgtgtagctaatttctaac

SEQ ID NO: 119504 - DNA, 25 bp, SARS Virus
tacaatgtgtaagtaatttctaacg

SEQ ID NO: 119505 - DNA, 25 bp, SARS Virus
acaatgtgtaacgaatttctaacga

SEQ ID NO: 119506 - DNA, 25 bp, SARS Virus
caatgtgtaactgatttctaacgat

SEQ ID NO: 119507 - DNA, 25 bp, SARS Virus
aatgtgtaactagtttctaacgata

SEQ ID NO: 119508 - DNA, 25 bp, SARS Virus
atgtgtaactaagttctaacgatac

SEQ ID NO: 119509 - DNA, 25 bp, SARS Virus
tgtgtaactaatgtctaacgataca

SEQ ID NO: 119510 - DNA, 25 bp, SARS Virus
gtgtaactaattgctaacgatacac

SEQ ID NO: 119511 - DNA, 25 bp, SARS Virus
tgtaactaatttgtaacgatacact

SEQ ID NO: 119512 - DNA, 25 bp, SARS Virus
gtaactaatttcgaacgatacactc

SEQ ID NO: 119513 - DNA, 25 bp, SARS Virus
taactaatttctgacgatacactct

SEQ ID NO: 119514 - DNA, 25 bp, SARS Virus
aactaatttctagcgatacactcta

SEQ ID NO: 119515 - DNA, 25 bp, SARS Virus
actaatttctaaggatacactctaa

SEQ ID NO: 119516 - DNA, 25 bp, SARS Virus
ctaatttctaacgatacactctaat

SEQ ID NO: 119517 - DNA, 25 bp, SARS Virus
taatttctaacggtacactctaatt

SEQ ID NO: 119518 - DNA, 25 bp, SARS Virus
aatttctaacgagacactctaattt

SEQ ID NO: 119519 - DNA, 25 bp, SARS Virus
atttctaacgatgcactctaatttc

SEQ ID NO: 119520 - DNA, 25 bp, SARS Virus
tttctaacgatagactctaatttca

SEQ ID NO: 119521 - DNA, 25 bp, SARS Virus
ttctaacgatacgctctaatttcaa

SEQ ID NO: 119522 - DNA, 25 bp, SARS Virus
tctaacgatacagtctaatttcaat

SEQ ID NO: 119523 - DNA, 25 bp, SARS Virus
ctaacgatacacgctaatttcaatt

SEQ ID NO: 119524 - DNA, 25 bp, SARS Virus
taacgatacactgtaatttcaattg

SEQ ID NO: 119525 - DNA, 25 bp, SARS Virus
aacgatacactcgaatttcaattga

SEQ ID NO: 119526 - DNA, 25 bp, SARS Virus
acgatacactctgatttcaattgat

SEQ ID NO: 119527 - DNA, 25 bp, SARS Virus
cgatacactctagtttcaattgatt

SEQ ID NO: 119528 - DNA, 25 bp, SARS Virus
gatacactctaagttcaattgattt

SEQ ID NO: 119529 - DNA, 25 bp, SARS Virus
atacactctaatgtcaattgatttg

SEQ ID NO: 119530 - DNA, 25 bp, SARS Virus
tacactctaattgcaattgatttgg

SEQ ID NO: 119531 - DNA, 25 bp, SARS Virus
acactctaatttgaattgatttgga

SEQ ID NO: 119532 - DNA, 25 bp, SARS Virus
cactctaatttcgattgatttggat

SEQ ID NO: 119533 - DNA, 25 bp, SARS Virus
actctaatttcagttgatttggatg

SEQ ID NO: 119534 - DNA, 25 bp, SARS Virus
ctctaatttcaagtgatttggatga

SEQ ID NO: 119535 - DNA, 25 bp, SARS Virus
tctaatttcaatggatttggatgaa

SEQ ID NO: 119536 - DNA, 25 bp, SARS Virus
ctaatttcaattgatttggatgaac

SEQ ID NO: 119537 - DNA, 25 bp, SARS Virus
taatttcaattggtttggatgaaca

SEQ ID NO: 119538 - DNA, 25 bp, SARS Virus
aatttcaattgagttggatgaacac

SEQ ID NO: 119539 - DNA, 25 bp, SARS Virus
atttcaattgatgtggatgaacacg

SEQ ID NO: 119540 - DNA, 25 bp, SARS Virus
tttcaattgattgggatgaacacga

SEQ ID NO: 119541 - DNA, 25 bp, SARS Virus
ttcaattgatttggatgaacacgac

SEQ ID NO: 119542 - DNA, 25 bp, SARS Virus
tcaattgatttggatgaacacgaca

SEQ ID NO: 119543 - DNA, 25 bp, SARS Virus
caattgatttgggtgaacacgacaa

SEQ ID NO: 119544 - DNA, 25 bp, SARS Virus
aattgatttggaggaacacgacaaa

SEQ ID NO: 119545 - DNA, 25 bp, SARS Virus
attgatttggatgaacacgacaaat

SEQ ID NO: 119546 - DNA, 25 bp, SARS Virus
ttgatttggatggacacgacaaatc

SEQ ID NO: 119547 - DNA, 25 bp, SARS Virus
tgatttggatgagcacgacaaatca

SEQ ID NO: 119548 - DNA, 25 bp, SARS Virus
gatttggatgaagacgacaaatcaa

SEQ ID NO: 119549 - DNA, 25 bp, SARS Virus
atttggatgaacgcgacaaatcaat

SEQ ID NO: 119550 - DNA, 25 bp, SARS Virus
tttggatgaacaggacaaatcaatg

SEQ ID NO: 119551 - DNA, 25 bp, SARS Virus
ttggatgaacacgacaaatcaatgc

SEQ ID NO: 119552 - DNA, 25 bp, SARS Virus
tggatgaacacggcaaatcaatgct

SEQ ID NO: 119553 - DNA, 25 bp, SARS Virus
ggatgaacacgagaaatcaatgctc

SEQ ID NO: 119554 - DNA, 25 bp, SARS Virus
gatgaacacgacgaatcaatgctct

SEQ ID NO: 119555 - DNA, 25 bp, SARS Virus
atgaacacgacagatcaatgctctt

SEQ ID NO: 119556 - DNA, 25 bp, SARS Virus
tgaacacgacaagtcaatgctctta

SEQ ID NO: 119557 - DNA, 25 bp, SARS Virus
gaacacgacaaagcaatgctcttaa

SEQ ID NO: 119558 - DNA, 25 bp, SARS Virus
aacacgacaaatgaatgctcttaag

SEQ ID NO: 119559 - DNA, 25 bp, SARS Virus
acacgacaaatcgatgctcttaagt

SEQ ID NO: 119560 - DNA, 25 bp, SARS Virus
cacgacaaatcagtgctcttaagta

SEQ ID NO: 119561 - DNA, 25 bp, SARS Virus
acgacaaatcaaggctcttaagtaa

SEQ ID NO: 119562 - DNA, 25 bp, SARS Virus
cgacaaatcaatgctcttaagtaag

SEQ ID NO: 119563 - DNA, 25 bp, SARS Virus
gacaaatcaatggtcttaagtaaga

SEQ ID NO: 119564 - DNA, 25 bp, SARS Virus
acaaatcaatgcgcttaagtaagac

SEQ ID NO: 119565 - DNA, 25 bp, SARS Virus
caaatcaatgctgttaagtaagacg

SEQ ID NO: 119566 - DNA, 25 bp, SARS Virus
aaatcaatgctcgtaagtaagacgt

SEQ ID NO: 119567 - DNA, 25 bp, SARS Virus
aatcaatgctctgaagtaagacgtg

SEQ ID NO: 119568 - DNA, 25 bp, SARS Virus
atcaatgctcttgagtaagacgtgt

SEQ ID NO: 119569 - DNA, 25 bp, SARS Virus
tcaatgctcttaggtaagacgtgtt

SEQ ID NO: 119570 - DNA, 25 bp, SARS Virus
caatgctcttaagtaagacgtgttc

SEQ ID NO: 119571 - DNA, 25 bp, SARS Virus
aatgctcttaaggaagacgtgttct

SEQ ID NO: 119572 - DNA, 25 bp, SARS Virus
atgctcttaagtgagacgtgttctc

SEQ ID NO: 119573 - DNA, 25 bp, SARS Virus
tgctcttaagtaggacgtgttctca

SEQ ID NO: 119574 - DNA, 25 bp, SARS Virus
gctcttaagtaagacgtgttctcat

SEQ ID NO: 119575 - DNA, 25 bp, SARS Virus
ctcttaagtaaggcgtgttctcatc

SEQ ID NO: 119576 - DNA, 25 bp, SARS Virus
tcttaagtaagaggtgttctcatct

SEQ ID NO: 119577 - DNA, 25 bp, SARS Virus
cttaagtaagacgtgttctcatctg

SEQ ID NO: 119578 - DNA, 25 bp, SARS Virus
ttaagtaagacgggttctcatctga

SEQ ID NO: 119579 - DNA, 25 bp, SARS Virus
taagtaagacgtgttctcatctgat

SEQ ID NO: 119580 - DNA, 25 bp, SARS Virus
aagtaagacgtggtctcatctgata

SEQ ID NO: 119581 - DNA, 25 bp, SARS Virus
agtaagacgtgtgctcatctgatac

SEQ ID NO: 119582 - DNA, 25 bp, SARS Virus
gtaagacgtgttgtcatctgataca

SEQ ID NO: 119583 - DNA, 25 bp, SARS Virus
taagacgtgttcgcatctgatacat

SEQ ID NO: 119584 - DNA, 25 bp, SARS Virus
aagacgtgttctgatctgatacata

SEQ ID NO: 119585 - DNA, 25 bp, SARS Virus
agacgtgttctcgtctgatacatag

SEQ ID NO: 119586 - DNA, 25 bp, SARS Virus
gacgtgttctcagctgatacatagc

SEQ ID NO: 119587 - DNA, 25 bp, SARS Virus
acgtgttctcatgtgatacatagca

SEQ ID NO: 119588 - DNA, 25 bp, SARS Virus
cgtgttctcatcggatacatagcat

SEQ ID NO: 119589 - DNA, 25 bp, SARS Virus
gtgttctcatctgatacatagcatt

SEQ ID NO: 119590 - DNA, 25 bp, SARS Virus
tgttctcatctggtacatagcattt

SEQ ID NO: 119591 - DNA, 25 bp, SARS Virus
gttctcatctgagacatagcatttg

SEQ ID NO: 119592 - DNA, 25 bp, SARS Virus
ttctcatctgatgcatagcatttgc

SEQ ID NO: 119593 - DNA, 25 bp, SARS Virus
tctcatctgatagatagcatttgcc

SEQ ID NO: 119594 - DNA, 25 bp, SARS Virus
ctcatctgatacgtagcatttgcct

SEQ ID NO: 119595 - DNA, 25 bp, SARS Virus
tcatctgatacagagcatttgcctt

SEQ ID NO: 119596 - DNA, 25 bp, SARS Virus
catctgatacatggcatttgcctta

SEQ ID NO: 119597 - DNA, 25 bp, SARS Virus
atctgatacatagcatttgccttaa

SEQ ID NO: 119598 - DNA, 25 bp, SARS Virus
tctgatacataggatttgccttaac

SEQ ID NO: 119599 - DNA, 25 bp, SARS Virus
ctgatacatagcgtttgccttaacg

SEQ ID NO: 119600 - DNA, 25 bp, SARS Virus
tgatacatagcagttgccttaacgc

SEQ ID NO: 119601 - DNA, 25 bp, SARS Virus
gatacatagcatgtgccttaacgct

SEQ ID NO: 119602 - DNA, 25 bp, SARS Virus
atacatagcattggccttaacgctt

SEQ ID NO: 119603 - DNA, 25 bp, SARS Virus
tacatagcatttgccttaacgcttt

SEQ ID NO: 119604 - DNA, 25 bp, SARS Virus
acatagcatttggcttaacgctttt

SEQ ID NO: 119605 - DNA, 25 bp, SARS Virus
catagcatttgcgttaacgcttttg

SEQ ID NO: 119606 - DNA, 25 bp, SARS Virus
atagcatttgccgtaacgcttttgc

SEQ ID NO: 119607 - DNA, 25 bp, SARS Virus
tagcatttgcctgaacgcttttgca

SEQ ID NO: 119608 - DNA, 25 bp, SARS Virus
agcatttgccttgacgcttttgcaa

SEQ ID NO: 119609 - DNA, 25 bp, SARS Virus
gcatttgccttagcgcttttgcaaa

SEQ ID NO: 119610 - DNA, 25 bp, SARS Virus
catttgccttaaggcttttgcaaat

SEQ ID NO: 119611 - DNA, 25 bp, SARS Virus
atttgccttaacgcttttgcaaatg

SEQ ID NO: 119612 - DNA, 25 bp, SARS Virus
tttgccttaacggttttgcaaatgt

SEQ ID NO: 119613 - DNA, 25 bp, SARS Virus
ttgccttaacgcgtttgcaaatgta

SEQ ID NO: 119614 - DNA, 25 bp, SARS Virus
tgccttaacgctgttgcaaatgtat

SEQ ID NO: 119615 - DNA, 25 bp, SARS Virus
gccttaacgcttgtgcaaatgtatc

SEQ ID NO: 119616 - DNA, 25 bp, SARS Virus
ccttaacgctttggcaaatgtatcg

SEQ ID NO: 119617 - DNA, 25 bp, SARS Virus
cacattgtaatctctcctgaacttt

SEQ ID NO: 119618 - DNA, 25 bp, SARS Virus
acattgtaatccttcctgaactttc

SEQ ID NO: 119619 - DNA, 25 bp, SARS Virus
cattgtaatccctcctgaactttct

SEQ ID NO: 119620 - DNA, 25 bp, SARS Virus
attgtaatcccttctgaactttctc

SEQ ID NO: 119621 - DNA, 25 bp, SARS Virus
ttgtaatccctcttgaactttctcg

SEQ ID NO: 119622 - DNA, 25 bp, SARS Virus
tgtaatccctcctgaactttctcgg

SEQ ID NO: 119623 - DNA, 25 bp, SARS Virus
gtaatccctccttaactttctcggt

SEQ ID NO: 119624 - DNA, 25 bp, SARS Virus
taatccctcctgtactttctcggtg

SEQ ID NO: 119625 - DNA, 25 bp, SARS Virus
aatccctcctgatctttctcggtgg

SEQ ID NO: 119626 - DNA, 25 bp, SARS Virus
atccctcctgaattttctcggtggt

SEQ ID NO: 119627 - DNA, 25 bp, SARS Virus
tccctcctgaactttctcggtggtg

SEQ ID NO: 119628 - DNA, 25 bp, SARS Virus
ccctcctgaactttctcggtggtgt

SEQ ID NO: 119629 - DNA, 25 bp, SARS Virus
cctcctgaactttctcggtggtgta

SEQ ID NO: 119630 - DNA, 25 bp, SARS Virus
ctcctgaactttttcggtggtgtaa

SEQ ID NO: 119631 - DNA, 25 bp, SARS Virus
tcctgaactttctcggtggtgtaaa

SEQ ID NO: 119632 - DNA, 25 bp, SARS Virus
cctgaactttcttggtggtgtaaaa

SEQ ID NO: 119633 - DNA, 25 bp, SARS Virus
ctgaactttctctgtggtgtaaaag

SEQ ID NO: 119634 - DNA, 25 bp, SARS Virus
tgaactttctcgttggtgtaaaagt

SEQ ID NO: 119635 - DNA, 25 bp, SARS Virus
gaactttctcggtggtgtaaaagta

SEQ ID NO: 119636 - DNA, 25 bp, SARS Virus
aactttctcggttgtgtaaaagtag

SEQ ID NO: 119637 - DNA, 25 bp, SARS Virus
actttctcggtgttgtaaaagtagc

SEQ ID NO: 119638 - DNA, 25 bp, SARS Virus
ctttctcggtggtgtaaaagtagct

SEQ ID NO: 119639 - DNA, 25 bp, SARS Virus
tttctcggtggtttaaaagtagctc

SEQ ID NO: 119640 - DNA, 25 bp, SARS Virus
ttctcggtggtgtaaaagtagctcc

SEQ ID NO: 119641 - DNA, 25 bp, SARS Virus
tctcggtggtgttaaagtagctccg

SEQ ID NO: 119642 - DNA, 25 bp, SARS Virus
ctcggtggtgtataagtagctccgg

SEQ ID NO: 119643 - DNA, 25 bp, SARS Virus
tcggtggtgtaatagtagctccggt

SEQ ID NO: 119644 - DNA, 25 bp, SARS Virus
cggtggtgtaaatgtagctccggtg

SEQ ID NO: 119645 - DNA, 25 bp, SARS Virus
ggtggtgtaaaattagctccggtgc

SEQ ID NO: 119646 - DNA, 25 bp, SARS Virus
gtggtgtaaaagtagctccggtgcg

SEQ ID NO: 119647 - DNA, 25 bp, SARS Virus
tggtgtaaaagttgctccggtgcgc

SEQ ID NO: 119648 - DNA, 25 bp, SARS Virus
ggtgtaaaagtatctccggtgcgcc

SEQ ID NO: 119649 - DNA, 25 bp, SARS Virus
gtgtaaaagtagttccggtgcgcct

SEQ ID NO: 119650 - DNA, 25 bp, SARS Virus
tgtaaaagtagctccggtgcgcctc

SEQ ID NO: 119651 - DNA, 25 bp, SARS Virus
gtaaaagtagcttcggtgcgcctca

SEQ ID NO: 119652 - DNA, 25 bp, SARS Virus
taaaagtagctctggtgcgcctcat

SEQ ID NO: 119653 - DNA, 25 bp, SARS Virus
aaaagtagctcctgtgcgcctcatg

SEQ ID NO: 119654 - DNA, 25 bp, SARS Virus
aaagtagctccgttgcgcctcatgc

SEQ ID NO: 119655 - DNA, 25 bp, SARS Virus
aagtagctccggtgcgcctcatgct

SEQ ID NO: 119656 - DNA, 25 bp, SARS Virus
agtagctccggttcgcctcatgcta

SEQ ID NO: 119657 - DNA, 25 bp, SARS Virus
gtagctccggtgtgcctcatgctag

SEQ ID NO: 119658 - DNA, 25 bp, SARS Virus
tagctccggtgctcctcatgctagc

SEQ ID NO: 119659 - DNA, 25 bp, SARS Virus
agctccggtgcgtctcatgctagct

SEQ ID NO: 119660 - DNA, 25 bp, SARS Virus
gctccggtgcgcttcatgctagctc

SEQ ID NO: 119661 - DNA, 25 bp, SARS Virus
ctccggtgcgcctcatgctagctcc

SEQ ID NO: 119662 - DNA, 25 bp, SARS Virus
tccggtgcgccttatgctagctccc

SEQ ID NO: 119663 - DNA, 25 bp, SARS Virus
ccggtgcgcctcttgctagctccca

SEQ ID NO: 119664 - DNA, 25 bp, SARS Virus
cggtgcgcctcatgctagctcccat

SEQ ID NO: 119665 - DNA, 25 bp, SARS Virus
ggtgcgcctcattctagctcccatg

SEQ ID NO: 119666 - DNA, 25 bp, SARS Virus
gtgcgcctcatgttagctcccatgt

SEQ ID NO: 119667 - DNA, 25 bp, SARS Virus
tgcgcctcatgctagctcccatgtc

SEQ ID NO: 119668 - DNA, 25 bp, SARS Virus
gcgcctcatgcttgctcccatgtca

SEQ ID NO: 119669 - DNA, 25 bp, SARS Virus
cgcctcatgctatctcccatgtcac

SEQ ID NO: 119670 - DNA, 25 bp, SARS Virus
gcctcatgctagttcccatgtcact

SEQ ID NO: 119671 - DNA, 25 bp, SARS Virus
cctcatgctagctcccatgtcactt

SEQ ID NO: 119672 - DNA, 25 bp, SARS Virus
ctcatgctagcttccatgtcactta

SEQ ID NO: 119673 - DNA, 25 bp, SARS Virus
tcatgctagctctcatgtcacttat

SEQ ID NO: 119674 - DNA, 25 bp, SARS Virus
catgctagctcctatgtcacttatt

SEQ ID NO: 119675 - DNA, 25 bp, SARS Virus
atgctagctcccttgtcacttatta

SEQ ID NO: 119676 - DNA, 25 bp, SARS Virus
tgctagctcccatgtcacttattac

SEQ ID NO: 119677 - DNA, 25 bp, SARS Virus
gctagctcccatttcacttattacg

SEQ ID NO: 119678 - DNA, 25 bp, SARS Virus
ctagctcccatgtcacttattacga

SEQ ID NO: 119679 - DNA, 25 bp, SARS Virus
tagctcccatgttacttattacgat

SEQ ID NO: 119680 - DNA, 25 bp, SARS Virus
agctcccatgtctcttattacgatc

SEQ ID NO: 119681 - DNA, 25 bp, SARS Virus
gctcccatgtcatttattacgatcc

SEQ ID NO: 119682 - DNA, 25 bp, SARS Virus
ctcccatgtcacttattacgatccc

SEQ ID NO: 119683 - DNA, 25 bp, SARS Virus
tcccatgtcacttattacgatccct

SEQ ID NO: 119684 - DNA, 25 bp, SARS Virus
cccatgtcactttttacgatccctc

SEQ ID NO: 119685 - DNA, 25 bp, SARS Virus
ccatgtcacttattacgatccctct

SEQ ID NO: 119686 - DNA, 25 bp, SARS Virus
catgtcacttattacgatccctctc

SEQ ID NO: 119687 - DNA, 25 bp, SARS Virus
atgtcacttatttcgatccctctcg

SEQ ID NO: 119688 - DNA, 25 bp, SARS Virus
tgtcacttattatgatccctctcga

SEQ ID NO: 119689 - DNA, 25 bp, SARS Virus
gtcacttattactatccctctcgac

SEQ ID NO: 119690 - DNA, 25 bp, SARS Virus
tcacttattacgttccctctcgacg

SEQ ID NO: 119691 - DNA, 25 bp, SARS Virus
cacttattacgatccctctcgacgg

SEQ ID NO: 119692 - DNA, 25 bp, SARS Virus
acttattacgattcctctcgacgga

SEQ ID NO: 119693 - DNA, 25 bp, SARS Virus
cttattacgatctctctcgacggat

SEQ ID NO: 119694 - DNA, 25 bp, SARS Virus
ttattacgatccttctcgacggata

SEQ ID NO: 119695 - DNA, 25 bp, SARS Virus
tattacgatccctctcgacggatat

SEQ ID NO: 119696 - DNA, 25 bp, SARS Virus
attacgatccctttcgacggatata

SEQ ID NO: 119697 - DNA, 25 bp, SARS Virus
ttacgatccctctcgacggatatac

SEQ ID NO: 119698 - DNA, 25 bp, SARS Virus
tacgatccctcttgacggatatacc

SEQ ID NO: 119699 - DNA, 25 bp, SARS Virus
acgatccctctctacggatatacct

SEQ ID NO: 119700 - DNA, 25 bp, SARS Virus
cgatccctctcgtcggatatacctt

SEQ ID NO: 119701 - DNA, 25 bp, SARS Virus
gatccctctcgatggatataccttc

SEQ ID NO: 119702 - DNA, 25 bp, SARS Virus
atccctctcgactgatataccttct

SEQ ID NO: 119703 - DNA, 25 bp, SARS Virus
tccctctcgacgtatataccttctc

SEQ ID NO: 119704 - DNA, 25 bp, SARS Virus
ccctctcgacggttataccttctcg

SEQ ID NO: 119705 - DNA, 25 bp, SARS Virus
cctctcgacggatataccttctcgg

SEQ ID NO: 119706 - DNA, 25 bp, SARS Virus
ctctcgacggatttaccttctcggg

SEQ ID NO: 119707 - DNA, 25 bp, SARS Virus
tctcgacggatataccttctcggga

SEQ ID NO: 119708 - DNA, 25 bp, SARS Virus
ctcgacggatattccttctcgggat

SEQ ID NO: 119709 - DNA, 25 bp, SARS Virus
tcgacggatatatcttctcgggatt

SEQ ID NO: 119710 - DNA, 25 bp, SARS Virus
cgacggatatactttctcgggatta

SEQ ID NO: 119711 - DNA, 25 bp, SARS Virus
gacggatataccttctcgggattac

SEQ ID NO: 119712 - DNA, 25 bp, SARS Virus
acggatataccttctcgggattaca

SEQ ID NO: 119713 - DNA, 25 bp, SARS Virus
cggatataccttttcgggattacac

SEQ ID NO: 119714 - DNA, 25 bp, SARS Virus
ggatataccttctcgggattacaca

SEQ ID NO: 119715 - DNA, 25 bp, SARS Virus
gatataccttcttgggattacacat

SEQ ID NO: 119716 - DNA, 25 bp, SARS Virus
atataccttctctggattacacatt

SEQ ID NO: 119717 - DNA, 25 bp, SARS Virus
tataccttctcgtgattacacattt

SEQ ID NO: 119718 - DNA, 25 bp, SARS Virus
ataccttctcggtattacacatttt

SEQ ID NO: 119719 - DNA, 25 bp, SARS Virus
taccttctcgggtttacacatttta

SEQ ID NO: 119720 - DNA, 25 bp, SARS Virus
accttctcgggattacacattttaa

SEQ ID NO: 119721 - DNA, 25 bp, SARS Virus
ccttctcgggattacacattttaat

SEQ ID NO: 119722 - DNA, 25 bp, SARS Virus
cttctcgggatttcacattttaatt

SEQ ID NO: 119723 - DNA, 25 bp, SARS Virus
ttctcgggattatacattttaatta

SEQ ID NO: 119724 - DNA, 25 bp, SARS Virus
tctcgggattactcattttaattaa

SEQ ID NO: 119725 - DNA, 25 bp, SARS Virus
ctcgggattacatattttaattaaa

SEQ ID NO: 119726 - DNA, 25 bp, SARS Virus
tcgggattacactttttaattaaaa

SEQ ID NO: 119727 - DNA, 25 bp, SARS Virus
cgggattacacattttaattaaaat

SEQ ID NO: 119728 - DNA, 25 bp, SARS Virus
gggattacacattttaattaaaatc

SEQ ID NO: 119729 - DNA, 25 bp, SARS Virus
ggattacacattttaattaaaatca

SEQ ID NO: 119730 - DNA, 25 bp, SARS Virus
gattacacattttaattaaaatcat

SEQ ID NO: 119731 - DNA, 25 bp, SARS Virus
attacacatttttattaaaatcatc

SEQ ID NO: 119732 - DNA, 25 bp, SARS Virus
ttacacattttatttaaaatcatca

SEQ ID NO: 119733 - DNA, 25 bp, SARS Virus
tacacattttaattaaaatcatcac

SEQ ID NO: 119734 - DNA, 25 bp, SARS Virus
acacattttaattaaaatcatcacg

SEQ ID NO: 119735 - DNA, 25 bp, SARS Virus
cacattttaatttaaatcatcacga

SEQ ID NO: 119736 - DNA, 25 bp, SARS Virus
acattttaattataatcatcacgat

SEQ ID NO: 119737 - DNA, 25 bp, SARS Virus
cattttaattaatatcatcacgata

SEQ ID NO: 119738 - DNA, 25 bp, SARS Virus
attttaattaaattcatcacgatag

SEQ ID NO: 119739 - DNA, 25 bp, SARS Virus
ttttaattaaaatcatcacgatagg

SEQ ID NO: 119740 - DNA, 25 bp, SARS Virus
tttaattaaaattatcacgataggg

SEQ ID NO: 119741 - DNA, 25 bp, SARS Virus
ttaattaaaatcttcacgatagggg

SEQ ID NO: 119742 - DNA, 25 bp, SARS Virus
taattaaaatcatcacgataggggt

SEQ ID NO: 119743 - DNA, 25 bp, SARS Virus
aattaaaatcattacgataggggta

SEQ ID NO: 119744 - DNA, 25 bp, SARS Virus
attaaaatcatctcgataggggtac

SEQ ID NO: 119745 - DNA, 25 bp, SARS Virus
ttaaaatcatcatgataggggtaca

SEQ ID NO: 119746 - DNA, 25 bp, SARS Virus
taaaatcatcactataggggtacac

SEQ ID NO: 119747 - DNA, 25 bp, SARS Virus
aaaatcatcacgttaggggtacact

SEQ ID NO: 119748 - DNA, 25 bp, SARS Virus
aaatcatcacgataggggtacacta

SEQ ID NO: 119749 - DNA, 25 bp, SARS Virus
aatcatcacgattggggtacactaa

SEQ ID NO: 119750 - DNA, 25 bp, SARS Virus
atcatcacgatatgggtacactaaa

SEQ ID NO: 119751 - DNA, 25 bp, SARS Virus
tcatcacgatagtggtacactaaaa

SEQ ID NO: 119752 - DNA, 25 bp, SARS Virus
catcacgataggtgtacactaaaat

SEQ ID NO: 119753 - DNA, 25 bp, SARS Virus
atcacgatagggttacactaaaatt

SEQ ID NO: 119754 - DNA, 25 bp, SARS Virus
tcacgataggggtacactaaaatta

SEQ ID NO: 119755 - DNA, 25 bp, SARS Virus
cacgataggggttcactaaaattat

SEQ ID NO: 119756 - DNA, 25 bp, SARS Virus
acgataggggtatactaaaattatc

SEQ ID NO: 119757 - DNA, 25 bp, SARS Virus
cgataggggtactctaaaattatcg

SEQ ID NO: 119758 - DNA, 25 bp, SARS Virus
gataggggtacattaaaattatcga

SEQ ID NO: 119759 - DNA, 25 bp, SARS Virus
ataggggtacactaaaattatcgaa

SEQ ID NO: 119760 - DNA, 25 bp, SARS Virus
taggggtacacttaaattatcgaag

SEQ ID NO: 119761 - DNA, 25 bp, SARS Virus
aggggtacactataattatcgaaga

SEQ ID NO: 119762 - DNA, 25 bp, SARS Virus
ggggtacactaatattatcgaagaa

SEQ ID NO: 119763 - DNA, 25 bp, SARS Virus
gggtacactaaatttatcgaagaat

SEQ ID NO: 119764 - DNA, 25 bp, SARS Virus
ggtacactaaaattatcgaagaatc

SEQ ID NO: 119765 - DNA, 25 bp, SARS Virus
gtacactaaaattatcgaagaatcc

SEQ ID NO: 119766 - DNA, 25 bp, SARS Virus
tacactaaaattttcgaagaatcct

SEQ ID NO: 119767 - DNA, 25 bp, SARS Virus
acactaaaattatcgaagaatcctc

SEQ ID NO: 119768 - DNA, 25 bp, SARS Virus
cactaaaattattgaagaatcctct

SEQ ID NO: 119769 - DNA, 25 bp, SARS Virus
actaaaattatctaagaatcctctt

SEQ ID NO: 119770 - DNA, 25 bp, SARS Virus
ctaaaattatcgtagaatcctctta

SEQ ID NO: 119771 - DNA, 25 bp, SARS Virus
taaaattatcgatgaatcctcttac

SEQ ID NO: 119772 - DNA, 25 bp, SARS Virus
aaaattatcgaataatcctcttact

SEQ ID NO: 119773 - DNA, 25 bp, SARS Virus
aaattatcgaagtatcctcttactg

SEQ ID NO: 119774 - DNA, 25 bp, SARS Virus
aattatcgaagattcctcttactgt

SEQ ID NO: 119775 - DNA, 25 bp, SARS Virus
attatcgaagaatcctcttactgtt

SEQ ID NO: 119776 - DNA, 25 bp, SARS Virus
ttatcgaagaattctcttactgttt

SEQ ID NO: 119777 - DNA, 25 bp, SARS Virus
tatcgaagaatcttcttactgtttt

SEQ ID NO: 119778 - DNA, 25 bp, SARS Virus
atcgaagaatcctcttactgttttt

SEQ ID NO: 119779 - DNA, 25 bp, SARS Virus
tcgaagaatccttttactgtttttt

SEQ ID NO: 119780 - DNA, 25 bp, SARS Virus
cgaagaatcctcttactgttttttt

SEQ ID NO: 119781 - DNA, 25 bp, SARS Virus
gaagaatcctcttactgtttttttt

SEQ ID NO: 119782 - DNA, 25 bp, SARS Virus
aagaatcctctttctgttttttttt

SEQ ID NO: 119783 - DNA, 25 bp, SARS Virus
agaatcctcttattgtttttttttt

SEQ ID NO: 119784 - DNA, 25 bp, SARS Virus
gaatcctcttactgttttttttttt

SEQ ID NO: 119785 - DNA, 25 bp, SARS Virus
aaaaaaaaaaactgtaagaggattc

SEQ ID NO: 119786 - DNA, 25 bp, SARS Virus
aaaaaaaaaacattaagaggattct

SEQ ID NO: 119787 - DNA, 25 bp, SARS Virus
aaaaaaaaacagtaagaggattctt

SEQ ID NO: 119788 - DNA, 25 bp, SARS Virus
aaaaaaaacagttagaggattcttc

SEQ ID NO: 119789 - DNA, 25 bp, SARS Virus
aaaaaaacagtatgaggattcttcg

SEQ ID NO: 119790 - DNA, 25 bp, SARS Virus
aaaaaacagtaataggattcttcga

SEQ ID NO: 119791 - DNA, 25 bp, SARS Virus
aaaaacagtaagtggattcttcgat

SEQ ID NO: 119792 - DNA, 25 bp, SARS Virus
aaaacagtaagatgattcttcgata

SEQ ID NO: 119793 - DNA, 25 bp, SARS Virus
aaacagtaagagtattcttcgataa

SEQ ID NO: 119794 - DNA, 25 bp, SARS Virus
aacagtaagaggtttcttcgataat

SEQ ID NO: 119795 - DNA, 25 bp, SARS Virus
acagtaagaggattcttcgataatt

SEQ ID NO: 119796 - DNA, 25 bp, SARS Virus
cagtaagaggattcttcgataattt

SEQ ID NO: 119797 - DNA, 25 bp, SARS Virus
agtaagaggatttttcgataatttt

SEQ ID NO: 119798 - DNA, 25 bp, SARS Virus
gtaagaggattcttcgataatttta

SEQ ID NO: 119799 - DNA, 25 bp, SARS Virus
taagaggattcttcgataattttag

SEQ ID NO: 119800 - DNA, 25 bp, SARS Virus
aagaggattctttgataattttagt

SEQ ID NO: 119801 - DNA, 25 bp, SARS Virus
agaggattcttctataattttagtg

SEQ ID NO: 119802 - DNA, 25 bp, SARS Virus
gaggattcttcgttaattttagtgt

SEQ ID NO: 119803 - DNA, 25 bp, SARS Virus
aggattcttcgataattttagtgta

SEQ ID NO: 119804 - DNA, 25 bp, SARS Virus
ggattcttcgattattttagtgtac

SEQ ID NO: 119805 - DNA, 25 bp, SARS Virus
gattcttcgatatttttagtgtacc

SEQ ID NO: 119806 - DNA, 25 bp, SARS Virus
attcttcgataattttagtgtaccc

SEQ ID NO: 119807 - DNA, 25 bp, SARS Virus
ttcttcgataattttagtgtacccc

SEQ ID NO: 119808 - DNA, 25 bp, SARS Virus
tcttcgataattttagtgtacccct

SEQ ID NO: 119809 - DNA, 25 bp, SARS Virus
cttcgataattttagtgtaccccta

SEQ ID NO: 119810 - DNA, 25 bp, SARS Virus
ttcgataatttttgtgtacccctat

SEQ ID NO: 119811 - DNA, 25 bp, SARS Virus
tcgataattttattgtacccctatc

SEQ ID NO: 119812 - DNA, 25 bp, SARS Virus
cgataattttagtgtacccctatcg

SEQ ID NO: 119813 - DNA, 25 bp, SARS Virus
gataattttagtttacccctatcgt

SEQ ID NO: 119814 - DNA, 25 bp, SARS Virus
ataattttagtgtacccctatcgtg

SEQ ID NO: 119815 - DNA, 25 bp, SARS Virus
taattttagtgttcccctatcgtga

SEQ ID NO: 119816 - DNA, 25 bp, SARS Virus
aattttagtgtatccctatcgtgat

SEQ ID NO: 119817 - DNA, 25 bp, SARS Virus
attttagtgtactcctatcgtgatg

SEQ ID NO: 119818 - DNA, 25 bp, SARS Virus
ttttagtgtacctctatcgtgatga

SEQ ID NO: 119819 - DNA, 25 bp, SARS Virus
tttagtgtacccttatcgtgatgat

SEQ ID NO: 119820 - DNA, 25 bp, SARS Virus
ttagtgtacccctatcgtgatgatt

SEQ ID NO: 119821 - DNA, 25 bp, SARS Virus
tagtgtacccctttcgtgatgattt

SEQ ID NO: 119822 - DNA, 25 bp, SARS Virus
agtgtacccctatcgtgatgatttt

SEQ ID NO: 119823 - DNA, 25 bp, SARS Virus
gtgtacccctattgtgatgatttta

SEQ ID NO: 119824 - DNA, 25 bp, SARS Virus
tgtacccctatcttgatgattttaa

SEQ ID NO: 119825 - DNA, 25 bp, SARS Virus
gtacccctatcgtgatgattttaat

SEQ ID NO: 119826 - DNA, 25 bp, SARS Virus
tacccctatcgttatgattttaatt

SEQ ID NO: 119827 - DNA, 25 bp, SARS Virus
acccctatcgtgttgattttaatta

SEQ ID NO: 119828 - DNA, 25 bp, SARS Virus
cccctatcgtgatgattttaattaa

SEQ ID NO: 119829 - DNA, 25 bp, SARS Virus
ccctatcgtgattattttaattaaa

SEQ ID NO: 119830 - DNA, 25 bp, SARS Virus
cctatcgtgatgtttttaattaaaa

SEQ ID NO: 119831 - DNA, 25 bp, SARS Virus
ctatcgtgatgattttaattaaaat

SEQ ID NO: 119832 - DNA, 25 bp, SARS Virus
tatcgtgatgattttaattaaaatg

SEQ ID NO: 119833 - DNA, 25 bp, SARS Virus
atcgtgatgattttaattaaaatgt

SEQ ID NO: 119834 - DNA, 25 bp, SARS Virus
tcgtgatgattttaattaaaatgtg

SEQ ID NO: 119835 - DNA, 25 bp, SARS Virus
cgtgatgatttttattaaaatgtgt

SEQ ID NO: 119836 - DNA, 25 bp, SARS Virus
gtgatgattttatttaaaatgtgta

SEQ ID NO: 119837 - DNA, 25 bp, SARS Virus
tgatgattttaattaaaatgtgtaa

SEQ ID NO: 119838 - DNA, 25 bp, SARS Virus
gatgattttaattaaaatgtgtaat

SEQ ID NO: 119839 - DNA, 25 bp, SARS Virus
atgattttaatttaaatgtgtaatc

SEQ ID NO: 119840 - DNA, 25 bp, SARS Virus
tgattttaattataatgtgtaatcc

SEQ ID NO: 119841 - DNA, 25 bp, SARS Virus
gattttaattaatatgtgtaatccc

SEQ ID NO: 119842 - DNA, 25 bp, SARS Virus
attttaattaaattgtgtaatcccg

SEQ ID NO: 119843 - DNA, 25 bp, SARS Virus
ttttaattaaaatgtgtaatcccga

SEQ ID NO: 119844 - DNA, 25 bp, SARS Virus
tttaattaaaatttgtaatcccgag

SEQ ID NO: 119845 - DNA, 25 bp, SARS Virus
ttaattaaaatgtgtaatcccgaga

SEQ ID NO: 119846 - DNA, 25 bp, SARS Virus
taattaaaatgtttaatcccgagaa

SEQ ID NO: 119847 - DNA, 25 bp, SARS Virus
aattaaaatgtgtaatcccgagaag

SEQ ID NO: 119848 - DNA, 25 bp, SARS Virus
attaaaatgtgttatcccgagaagg

SEQ ID NO: 119849 - DNA, 25 bp, SARS Virus
ttaaaatgtgtattcccgagaaggt

SEQ ID NO: 119850 - DNA, 25 bp, SARS Virus
taaaatgtgtaatcccgagaaggta

SEQ ID NO: 119851 - DNA, 25 bp, SARS Virus
aaaatgtgtaattccgagaaggtat

SEQ ID NO: 119852 - DNA, 25 bp, SARS Virus
aaatgtgtaatctcgagaaggtata

SEQ ID NO: 119853 - DNA, 25 bp, SARS Virus
aatgtgtaatcctgagaaggtatat

SEQ ID NO: 119854 - DNA, 25 bp, SARS Virus
atgtgtaatccctagaaggtatatc

SEQ ID NO: 119855 - DNA, 25 bp, SARS Virus
tgtgtaatcccgtgaaggtatatcc

SEQ ID NO: 119856 - DNA, 25 bp, SARS Virus
gtgtaatcccgataaggtatatccg

SEQ ID NO: 119857 - DNA, 25 bp, SARS Virus
tgtaatcccgagtaggtatatccgt

SEQ ID NO: 119858 - DNA, 25 bp, SARS Virus
gtaatcccgagatggtatatccgtc

SEQ ID NO: 119859 - DNA, 25 bp, SARS Virus
taatcccgagaatgtatatccgtcg

SEQ ID NO: 119860 - DNA, 25 bp, SARS Virus
aatcccgagaagttatatccgtcga

SEQ ID NO: 119861 - DNA, 25 bp, SARS Virus
atcccgagaaggtatatccgtcgag

SEQ ID NO: 119862 - DNA, 25 bp, SARS Virus
tcccgagaaggtttatccgtcgaga

SEQ ID NO: 119863 - DNA, 25 bp, SARS Virus
cccgagaaggtatatccgtcgagag

SEQ ID NO: 119864 - DNA, 25 bp, SARS Virus
ccgagaaggtatttccgtcgagagg

SEQ ID NO: 119865 - DNA, 25 bp, SARS Virus
cgagaaggtatatccgtcgagaggg

SEQ ID NO: 119866 - DNA, 25 bp, SARS Virus
gagaaggtatattcgtcgagaggga

SEQ ID NO: 119867 - DNA, 25 bp, SARS Virus
agaaggtatatctgtcgagagggat

SEQ ID NO: 119868 - DNA, 25 bp, SARS Virus
gaaggtatatccttcgagagggatc

SEQ ID NO: 119869 - DNA, 25 bp, SARS Virus
aaggtatatccgtcgagagggatcg

SEQ ID NO: 119870 - DNA, 25 bp, SARS Virus
aggtatatccgttgagagggatcgt

SEQ ID NO: 119871 - DNA, 25 bp, SARS Virus
ggtatatccgtctagagggatcgta

SEQ ID NO: 119872 - DNA, 25 bp, SARS Virus
gtatatccgtcgtgagggatcgtaa

SEQ ID NO: 119873 - DNA, 25 bp, SARS Virus
tatatccgtcgatagggatcgtaat

SEQ ID NO: 119874 - DNA, 25 bp, SARS Virus
atatccgtcgagtgggatcgtaata

SEQ ID NO: 119875 - DNA, 25 bp, SARS Virus
tatccgtcgagatggatcgtaataa

SEQ ID NO: 119876 - DNA, 25 bp, SARS Virus
atccgtcgagagtgatcgtaataag

SEQ ID NO: 119877 - DNA, 25 bp, SARS Virus
tccgtcgagaggtatcgtaataagt

SEQ ID NO: 119878 - DNA, 25 bp, SARS Virus
ccgtcgagagggttcgtaataagtg

SEQ ID NO: 119879 - DNA, 25 bp, SARS Virus
cgtcgagagggatcgtaataagtga

SEQ ID NO: 119880 - DNA, 25 bp, SARS Virus
gtcgagagggattgtaataagtgac

SEQ ID NO: 119881 - DNA, 25 bp, SARS Virus
tcgagagggatcttaataagtgaca

SEQ ID NO: 119882 - DNA, 25 bp, SARS Virus
cgagagggatcgtaataagtgacat

SEQ ID NO: 119883 - DNA, 25 bp, SARS Virus
gagagggatcgttataagtgacatg

SEQ ID NO: 119884 - DNA, 25 bp, SARS Virus
agagggatcgtattaagtgacatgg

SEQ ID NO: 119885 - DNA, 25 bp, SARS Virus
gagggatcgtaataagtgacatggg

SEQ ID NO: 119886 - DNA, 25 bp, SARS Virus
agggatcgtaattagtgacatggga

SEQ ID NO: 119887 - DNA, 25 bp, SARS Virus
gggatcgtaatatgtgacatgggag

SEQ ID NO: 119888 - DNA, 25 bp, SARS Virus
ggatcgtaataattgacatgggagc

SEQ ID NO: 119889 - DNA, 25 bp, SARS Virus
gatcgtaataagtgacatgggagct

SEQ ID NO: 119890 - DNA, 25 bp, SARS Virus
atcgtaataagttacatgggagcta

SEQ ID NO: 119891 - DNA, 25 bp, SARS Virus
tcgtaataagtgtcatgggagctag

SEQ ID NO: 119892 - DNA, 25 bp, SARS Virus
cgtaataagtgatatgggagctagc

SEQ ID NO: 119893 - DNA, 25 bp, SARS Virus
gtaataagtgacttgggagctagca

SEQ ID NO: 119894 - DNA, 25 bp, SARS Virus
taataagtgacatgggagctagcat

SEQ ID NO: 119895 - DNA, 25 bp, SARS Virus
aataagtgacattggagctagcatg

SEQ ID NO: 119896 - DNA, 25 bp, SARS Virus
ataagtgacatgtgagctagcatga

SEQ ID NO: 119897 - DNA, 25 bp, SARS Virus
taagtgacatggtagctagcatgag

SEQ ID NO: 119898 - DNA, 25 bp, SARS Virus
aagtgacatgggtgctagcatgagg

SEQ ID NO: 119899 - DNA, 25 bp, SARS Virus
agtgacatgggatctagcatgaggc

SEQ ID NO: 119900 - DNA, 25 bp, SARS Virus
gtgacatgggagttagcatgaggcg

SEQ ID NO: 119901 - DNA, 25 bp, SARS Virus
tgacatgggagctagcatgaggcgc

SEQ ID NO: 119902 - DNA, 25 bp, SARS Virus
gacatgggagcttgcatgaggcgca

SEQ ID NO: 119903 - DNA, 25 bp, SARS Virus
acatgggagctatcatgaggcgcac

SEQ ID NO: 119904 - DNA, 25 bp, SARS Virus
catgggagctagtatgaggcgcacc

SEQ ID NO: 119905 - DNA, 25 bp, SARS Virus
atgggagctagcttgaggcgcaccg

SEQ ID NO: 119906 - DNA, 25 bp, SARS Virus
tgggagctagcatgaggcgcaccgg

SEQ ID NO: 119907 - DNA, 25 bp, SARS Virus
gggagctagcattaggcgcaccgga

SEQ ID NO: 119908 - DNA, 25 bp, SARS Virus
ggagctagcatgtggcgcaccggag

SEQ ID NO: 119909 - DNA, 25 bp, SARS Virus
gagctagcatgatgcgcaccggagc

SEQ ID NO: 119910 - DNA, 25 bp, SARS Virus
agctagcatgagtcgcaccggagct

SEQ ID NO: 119911 - DNA, 25 bp, SARS Virus
gctagcatgaggtgcaccggagcta

SEQ ID NO: 119912 - DNA, 25 bp, SARS Virus
ctagcatgaggctcaccggagctac

SEQ ID NO: 119913 - DNA, 25 bp, SARS Virus
tagcatgaggcgtaccggagctact

SEQ ID NO: 119914 - DNA, 25 bp, SARS Virus
agcatgaggcgctccggagctactt

SEQ ID NO: 119915 - DNA, 25 bp, SARS Virus
gcatgaggcgcatcggagctacttt

SEQ ID NO: 119916 - DNA, 25 bp, SARS Virus
catgaggcgcactggagctactttt

SEQ ID NO: 119917 - DNA, 25 bp, SARS Virus
atgaggcgcacctgagctactttta

SEQ ID NO: 119918 - DNA, 25 bp, SARS Virus
tgaggcgcaccgtagctacttttac

SEQ ID NO: 119919 - DNA, 25 bp, SARS Virus
gaggcgcaccggtgctacttttaca

SEQ ID NO: 119920 - DNA, 25 bp, SARS Virus
aggcgcaccggatctacttttacac

SEQ ID NO: 119921 - DNA, 25 bp, SARS Virus
ggcgcaccggagttacttttacacc

SEQ ID NO: 119922 - DNA, 25 bp, SARS Virus
gcgcaccggagctacttttacacca

SEQ ID NO: 119923 - DNA, 25 bp, SARS Virus
cgcaccggagcttcttttacaccac

SEQ ID NO: 119924 - DNA, 25 bp, SARS Virus
gcaccggagctatttttacaccacc

SEQ ID NO: 119925 - DNA, 25 bp, SARS Virus
caccggagctacttttacaccaccg

SEQ ID NO: 119926 - DNA, 25 bp, SARS Virus
accggagctacttttacaccaccga

SEQ ID NO: 119927 - DNA, 25 bp, SARS Virus
ccggagctacttttacaccaccgag

SEQ ID NO: 119928 - DNA, 25 bp, SARS Virus
cggagctacttttacaccaccgaga

SEQ ID NO: 119929 - DNA, 25 bp, SARS Virus
ggagctactttttcaccaccgagaa

SEQ ID NO: 119930 - DNA, 25 bp, SARS Virus
gagctacttttataccaccgagaaa

SEQ ID NO: 119931 - DNA, 25 bp, SARS Virus
agctacttttactccaccgagaaag

SEQ ID NO: 119932 - DNA, 25 bp, SARS Virus
gctacttttacatcaccgagaaagt

SEQ ID NO: 119933 - DNA, 25 bp, SARS Virus
ctacttttacactaccgagaaagtt

SEQ ID NO: 119934 - DNA, 25 bp, SARS Virus
tacttttacacctccgagaaagttc

SEQ ID NO: 119935 - DNA, 25 bp, SARS Virus
acttttacaccatcgagaaagttca

SEQ ID NO: 119936 - DNA, 25 bp, SARS Virus
cttttacaccactgagaaagttcag

SEQ ID NO: 119937 - DNA, 25 bp, SARS Virus
ttttacaccacctagaaagttcagg

SEQ ID NO: 119938 - DNA, 25 bp, SARS Virus
tttacaccaccgtgaaagttcagga

SEQ ID NO: 119939 - DNA, 25 bp, SARS Virus
ttacaccaccgataaagttcaggag

SEQ ID NO: 119940 - DNA, 25 bp, SARS Virus
tacaccaccgagtaagttcaggagg

SEQ ID NO: 119941 - DNA, 25 bp, SARS Virus
acaccaccgagatagttcaggaggg

SEQ ID NO: 119942 - DNA, 25 bp, SARS Virus
caccaccgagaatgttcaggaggga

SEQ ID NO: 119943 - DNA, 25 bp, SARS Virus
accaccgagaaatttcaggagggat

SEQ ID NO: 119944 - DNA, 25 bp, SARS Virus
ccaccgagaaagttcaggagggatt

SEQ ID NO: 119945 - DNA, 25 bp, SARS Virus
caccgagaaagttcaggagggatta

SEQ ID NO: 119946 - DNA, 25 bp, SARS Virus
accgagaaagtttaggagggattac

SEQ ID NO: 119947 - DNA, 25 bp, SARS Virus
ccgagaaagttctggagggattaca

SEQ ID NO: 119948 - DNA, 25 bp, SARS Virus
cgagaaagttcatgagggattacaa

SEQ ID NO: 119949 - DNA, 25 bp, SARS Virus
gagaaagttcagtagggattacaat

SEQ ID NO: 119950 - DNA, 25 bp, SARS Virus
agaaagttcaggtgggattacaatg

SEQ ID NO: 119951 - DNA, 25 bp, SARS Virus
gaaagttcaggatggattacaatgt

SEQ ID NO: 119952 - DNA, 25 bp, SARS Virus
aaagttcaggagtgattacaatgtg

SEQ ID NO: 119953 - DNA, 25 bp, SARS Virus
aagttcaggaggtattacaatgtgt

SEQ ID NO: 119954 - DNA, 25 bp, SARS Virus
agttcaggagggtttacaatgtgta

SEQ ID NO: 119955 - DNA, 25 bp, SARS Virus
gttcaggagggattacaatgtgtaa

SEQ ID NO: 119956 - DNA, 25 bp, SARS Virus
ttcaggagggattacaatgtgtaac

SEQ ID NO: 119957 - DNA, 25 bp, SARS Virus
tcaggagggatttcaatgtgtaact

SEQ ID NO: 119958 - DNA, 25 bp, SARS Virus
caggagggattataatgtgtaacta

SEQ ID NO: 119959 - DNA, 25 bp, SARS Virus
aggagggattactatgtgtaactaa

SEQ ID NO: 119960 - DNA, 25 bp, SARS Virus
ggagggattacattgtgtaactaat

SEQ ID NO: 119961 - DNA, 25 bp, SARS Virus
gagggattacaatgtgtaactaatt

SEQ ID NO: 119962 - DNA, 25 bp, SARS Virus
agggattacaatttgtaactaattt

SEQ ID NO: 119963 - DNA, 25 bp, SARS Virus
gggattacaatgtgtaactaatttc

SEQ ID NO: 119964 - DNA, 25 bp, SARS Virus
ggattacaatgtttaactaatttct

SEQ ID NO: 119965 - DNA, 25 bp, SARS Virus
gattacaatgtgtaactaatttcta

SEQ ID NO: 119966 - DNA, 25 bp, SARS Virus
attacaatgtgttactaatttctaa

SEQ ID NO: 119967 - DNA, 25 bp, SARS Virus
ttacaatgtgtatctaatttctaac

SEQ ID NO: 119968 - DNA, 25 bp, SARS Virus
tacaatgtgtaattaatttctaacg

SEQ ID NO: 119969 - DNA, 25 bp, SARS Virus
acaatgtgtaactaatttctaacga

SEQ ID NO: 119970 - DNA, 25 bp, SARS Virus
caatgtgtaacttatttctaacgat

SEQ ID NO: 119971 - DNA, 25 bp, SARS Virus
aatgtgtaactattttctaacgata

SEQ ID NO: 119972 - DNA, 25 bp, SARS Virus
atgtgtaactaatttctaacgatac

SEQ ID NO: 119973 - DNA, 25 bp, SARS Virus
tgtgtaactaatttctaacgataca

SEQ ID NO: 119974 - DNA, 25 bp, SARS Virus
gtgtaactaatttctaacgatacac

SEQ ID NO: 119975 - DNA, 25 bp, SARS Virus
tgtaactaatttttaacgatacact

SEQ ID NO: 119976 - DNA, 25 bp, SARS Virus
gtaactaatttctaacgatacactc

SEQ ID NO: 119977 - DNA, 25 bp, SARS Virus
taactaatttcttacgatacactct

SEQ ID NO: 119978 - DNA, 25 bp, SARS Virus
aactaatttctatcgatacactcta

SEQ ID NO: 119979 - DNA, 25 bp, SARS Virus
actaatttctaatgatacactctaa

SEQ ID NO: 119980 - DNA, 25 bp, SARS Virus
ctaatttctaactatacactctaat

SEQ ID NO: 119981 - DNA, 25 bp, SARS Virus
taatttctaacgttacactctaatt

SEQ ID NO: 119982 - DNA, 25 bp, SARS Virus
aatttctaacgatacactctaattt

SEQ ID NO: 119983 - DNA, 25 bp, SARS Virus
atttctaacgattcactctaatttc

SEQ ID NO: 119984 - DNA, 25 bp, SARS Virus
tttctaacgatatactctaatttca

SEQ ID NO: 119985 - DNA, 25 bp, SARS Virus
ttctaacgatactctctaatttcaa

SEQ ID NO: 119986 - DNA, 25 bp, SARS Virus
tctaacgatacattctaatttcaat

SEQ ID NO: 119987 - DNA, 25 bp, SARS Virus
ctaacgatacactctaatttcaatt

SEQ ID NO: 119988 - DNA, 25 bp, SARS Virus
taacgatacactttaatttcaattg

SEQ ID NO: 119989 - DNA, 25 bp, SARS Virus
aacgatacactctaatttcaattga

SEQ ID NO: 119990 - DNA, 25 bp, SARS Virus
acgatacactcttatttcaattgat

SEQ ID NO: 119991 - DNA, 25 bp, SARS Virus
cgatacactctattttcaattgatt

SEQ ID NO: 119992 - DNA, 25 bp, SARS Virus
gatacactctaatttcaattgattt

SEQ ID NO: 119993 - DNA, 25 bp, SARS Virus
atacactctaatttcaattgatttg

SEQ ID NO: 119994 - DNA, 25 bp, SARS Virus
tacactctaatttcaattgatttgg

SEQ ID NO: 119995 - DNA, 25 bp, SARS Virus
acactctaattttaattgatttgga

SEQ ID NO: 119996 - DNA, 25 bp, SARS Virus
cactctaatttctattgatttggat

SEQ ID NO: 119997 - DNA, 25 bp, SARS Virus
actctaatttcatttgatttggatg

SEQ ID NO: 119998 - DNA, 25 bp, SARS Virus
ctctaatttcaattgatttggatga

SEQ ID NO: 119999 - DNA, 25 bp, SARS Virus
tctaatttcaattgatttggatgaa

SEQ ID NO: 120000 - DNA, 25 bp, SARS Virus
ctaatttcaatttatttggatgaac

SEQ ID NO: 120001 - DNA, 25 bp, SARS Virus
taatttcaattgttttggatgaaca

SEQ ID NO: 120002 - DNA, 25 bp, SARS Virus
aatttcaattgatttggatgaacac

SEQ ID NO: 120003 - DNA, 25 bp, SARS Virus
atttcaattgatttggatgaacacg

SEQ ID NO: 120004 - DNA, 25 bp, SARS Virus
tttcaattgatttggatgaacacga

SEQ ID NO: 120005 - DNA, 25 bp, SARS Virus
ttcaattgattttgatgaacacgac

SEQ ID NO: 120006 - DNA, 25 bp, SARS Virus
tcaattgatttgtatgaacacgaca

SEQ ID NO: 120007 - DNA, 25 bp, SARS Virus
caattgatttggttgaacacgacaa

SEQ ID NO: 120008 - DNA, 25 bp, SARS Virus
aattgatttggatgaacacgacaaa

SEQ ID NO: 120009 - DNA, 25 bp, SARS Virus
attgatttggattaacacgacaaat

SEQ ID NO: 120010 - DNA, 25 bp, SARS Virus
ttgatttggatgtacacgacaaatc

SEQ ID NO: 120011 - DNA, 25 bp, SARS Virus
tgatttggatgatcacgacaaatca

SEQ ID NO: 120012 - DNA, 25 bp, SARS Virus
gatttggatgaatacgacaaatcaa

SEQ ID NO: 120013 - DNA, 25 bp, SARS Virus
atttggatgaactcgacaaatcaat

SEQ ID NO: 120014 - DNA, 25 bp, SARS Virus
tttggatgaacatgacaaatcaatg

SEQ ID NO: 120015 - DNA, 25 bp, SARS Virus
ttggatgaacactacaaatcaatgc

SEQ ID NO: 120016 - DNA, 25 bp, SARS Virus
tggatgaacacgtcaaatcaatgct

SEQ ID NO: 120017 - DNA, 25 bp, SARS Virus
ggatgaacacgataaatcaatgctc

SEQ ID NO: 120018 - DNA, 25 bp, SARS Virus
gatgaacacgactaatcaatgctct

SEQ ID NO: 120019 - DNA, 25 bp, SARS Virus
atgaacacgacatatcaatgctctt

SEQ ID NO: 120020 - DNA, 25 bp, SARS Virus
tgaacacgacaattcaatgctctta

SEQ ID NO: 120021 - DNA, 25 bp, SARS Virus
gaacacgacaaatcaatgctcttaa

SEQ ID NO: 120022 - DNA, 25 bp, SARS Virus
aacacgacaaattaatgctcttaag

SEQ ID NO: 120023 - DNA, 25 bp, SARS Virus
acacgacaaatctatgctcttaagt

SEQ ID NO: 120024 - DNA, 25 bp, SARS Virus
cacgacaaatcattgctcttaagta

SEQ ID NO: 120025 - DNA, 25 bp, SARS Virus
acgacaaatcaatgctcttaagtaa

SEQ ID NO: 120026 - DNA, 25 bp, SARS Virus
cgacaaatcaattctcttaagtaag

SEQ ID NO: 120027 - DNA, 25 bp, SARS Virus
gacaaatcaatgttcttaagtaaga

SEQ ID NO: 120028 - DNA, 25 bp, SARS Virus
acaaatcaatgctcttaagtaagac

SEQ ID NO: 120029 - DNA, 25 bp, SARS Virus
caaatcaatgcttttaagtaagacg

SEQ ID NO: 120030 - DNA, 25 bp, SARS Virus
aaatcaatgctcttaagtaagacgt

SEQ ID NO: 120031 - DNA, 25 bp, SARS Virus
aatcaatgctcttaagtaagacgtg

SEQ ID NO: 120032 - DNA, 25 bp, SARS Virus
atcaatgctctttagtaagacgtgt

SEQ ID NO: 120033 - DNA, 25 bp, SARS Virus
tcaatgctcttatgtaagacgtgtt

SEQ ID NO: 120034 - DNA, 25 bp, SARS Virus
caatgctcttaattaagacgtgttc

SEQ ID NO: 120035 - DNA, 25 bp, SARS Virus
aatgctcttaagtaagacgtgttct

SEQ ID NO: 120036 - DNA, 25 bp, SARS Virus
atgctcttaagttagacgtgttctc

SEQ ID NO: 120037 - DNA, 25 bp, SARS Virus
tgctcttaagtatgacgtgttctca

SEQ ID NO: 120038 - DNA, 25 bp, SARS Virus
gctcttaagtaatacgtgttctcat

SEQ ID NO: 120039 - DNA, 25 bp, SARS Virus
ctcttaagtaagtcgtgttctcatc

SEQ ID NO: 120040 - DNA, 25 bp, SARS Virus
tcttaagtaagatgtgttctcatct

SEQ ID NO: 120041 - DNA, 25 bp, SARS Virus
cttaagtaagacttgttctcatctg

SEQ ID NO: 120042 - DNA, 25 bp, SARS Virus
ttaagtaagacgtgttctcatctga

SEQ ID NO: 120043 - DNA, 25 bp, SARS Virus
taagtaagacgttttctcatctgat

SEQ ID NO: 120044 - DNA, 25 bp, SARS Virus
aagtaagacgtgttctcatctgata

SEQ ID NO: 120045 - DNA, 25 bp, SARS Virus
agtaagacgtgttctcatctgatac

SEQ ID NO: 120046 - DNA, 25 bp, SARS Virus
gtaagacgtgttttcatctgataca

SEQ ID NO: 120047 - DNA, 25 bp, SARS Virus
taagacgtgttctcatctgatacat

SEQ ID NO: 120048 - DNA, 25 bp, SARS Virus
aagacgtgttcttatctgatacata

SEQ ID NO: 120049 - DNA, 25 bp, SARS Virus
agacgtgttctcttctgatacatag

SEQ ID NO: 120050 - DNA, 25 bp, SARS Virus
gacgtgttctcatctgatacatagc

SEQ ID NO: 120051 - DNA, 25 bp, SARS Virus
acgtgttctcatttgatacatagca

SEQ ID NO: 120052 - DNA, 25 bp, SARS Virus
cgtgttctcatctgatacatagcat

SEQ ID NO: 120053 - DNA, 25 bp, SARS Virus
gtgttctcatcttatacatagcatt

SEQ ID NO: 120054 - DNA, 25 bp, SARS Virus
tgttctcatctgttacatagcattt

SEQ ID NO: 120055 - DNA, 25 bp, SARS Virus
gttctcatctgatacatagcatttg

SEQ ID NO: 120056 - DNA, 25 bp, SARS Virus
ttctcatctgattcatagcatttgc

SEQ ID NO: 120057 - DNA, 25 bp, SARS Virus
tctcatctgatatatagcatttgcc

SEQ ID NO: 120058 - DNA, 25 bp, SARS Virus
ctcatctgatacttagcatttgcct

SEQ ID NO: 120059 - DNA, 25 bp, SARS Virus
tcatctgatacatagcatttgcctt

SEQ ID NO: 120060 - DNA, 25 bp, SARS Virus
catctgatacattgcatttgcctta

SEQ ID NO: 120061 - DNA, 25 bp, SARS Virus
atctgatacatatcatttgccttaa

SEQ ID NO: 120062 - DNA, 25 bp, SARS Virus
tctgatacatagtatttgccttaac

SEQ ID NO: 120063 - DNA, 25 bp, SARS Virus
ctgatacatagcttttgccttaacg

SEQ ID NO: 120064 - DNA, 25 bp, SARS Virus
tgatacatagcatttgccttaacgc

SEQ ID NO: 120065 - DNA, 25 bp, SARS Virus
gatacatagcatttgccttaacgct

SEQ ID NO: 120066 - DNA, 25 bp, SARS Virus
atacatagcatttgccttaacgctt

SEQ ID NO: 120067 - DNA, 25 bp, SARS Virus
tacatagcattttccttaacgcttt

SEQ ID NO: 120068 - DNA, 25 bp, SARS Virus
acatagcatttgtcttaacgctttt

SEQ ID NO: 120069 - DNA, 25 bp, SARS Virus
catagcatttgctttaacgcttttg

SEQ ID NO: 120070 - DNA, 25 bp, SARS Virus
atagcatttgccttaacgcttttgc

SEQ ID NO: 120071 - DNA, 25 bp, SARS Virus
tagcatttgccttaacgcttttgca

SEQ ID NO: 120072 - DNA, 25 bp, SARS Virus
agcatttgcctttacgcttttgcaa

SEQ ID NO: 120073 - DNA, 25 bp, SARS Virus
gcatttgccttatcgcttttgcaaa

SEQ ID NO: 120074 - DNA, 25 bp, SARS Virus
catttgccttaatgcttttgcaaat

SEQ ID NO: 120075 - DNA, 25 bp, SARS Virus
atttgccttaactcttttgcaaatg

SEQ ID NO: 120076 - DNA, 25 bp, SARS Virus
tttgccttaacgtttttgcaaatgt

SEQ ID NO: 120077 - DNA, 25 bp, SARS Virus
ttgccttaacgcttttgcaaatgta

SEQ ID NO: 120078 - DNA, 25 bp, SARS Virus
tgccttaacgcttttgcaaatgtat

SEQ ID NO: 120079 - DNA, 25 bp, SARS Virus
gccttaacgcttttgcaaatgtatc

SEQ ID NO: 120080 - DNA, 25 bp, SARS Virus
ccttaacgcttttgcaaatgtatcg

SEQ ID NO: 120081 - DNA, 25 bp, SARS Virus
cttaacgcttttacaaatgtatcgg

SEQ ID NO: 120082 - DNA, 25 bp, SARS Virus
ttaacgcttttgaaaatgtatcggg

SEQ ID NO: 120083 - DNA, 25 bp, SARS Virus
taacgcttttgcaaatgtatcgggt

SEQ ID NO: 120084 - DNA, 25 bp, SARS Virus
aacgcttttgcaaatgtatcgggta

SEQ ID NO: 120085 - DNA, 25 bp, SARS Virus
acgcttttgcaaatgtatcgggtag

SEQ ID NO: 120086 - DNA, 25 bp, SARS Virus
cgcttttgcaaaagtatcgggtaga

SEQ ID NO: 120087 - DNA, 25 bp, SARS Virus
gcttttgcaaatatatcgggtagac

SEQ ID NO: 120088 - DNA, 25 bp, SARS Virus
cttttgcaaatgaatcgggtagacg

SEQ ID NO: 120089 - DNA, 25 bp, SARS Virus
ttttgcaaatgtatcgggtagacgg

SEQ ID NO: 120090 - DNA, 25 bp, SARS Virus
tttgcaaatgtaacgggtagacgga

SEQ ID NO: 120091 - DNA, 25 bp, SARS Virus
ttgcaaatgtatagggtagacggaa

SEQ ID NO: 120092 - DNA, 25 bp, SARS Virus
tgcaaatgtatcaggtagacggaac

SEQ ID NO: 120093 - DNA, 25 bp, SARS Virus
gcaaatgtatcgagtagacggaaca

SEQ ID NO: 120094 - DNA, 25 bp, SARS Virus
caaatgtatcggatagacggaacac

SEQ ID NO: 120095 - DNA, 25 bp, SARS Virus
aaatgtatcgggaagacggaacaca

SEQ ID NO: 120096 - DNA, 25 bp, SARS Virus
aatgtatcgggtagacggaacacac

SEQ ID NO: 120097 - DNA, 25 bp, SARS Virus
atgtatcgggtaaacggaacacacc

SEQ ID NO: 120098 - DNA, 25 bp, SARS Virus
tgtatcgggtagacggaacacacca

SEQ ID NO: 120099 - DNA, 25 bp, SARS Virus
gtatcgggtagaaggaacacaccag

SEQ ID NO: 120100 - DNA, 25 bp, SARS Virus
tatcgggtagacagaacacaccagt

SEQ ID NO: 120101 - DNA, 25 bp, SARS Virus
atcgggtagacgaaacacaccagta

SEQ ID NO: 120102 - DNA, 25 bp, SARS Virus
tcgggtagacggaacacaccagtag

SEQ ID NO: 120103 - DNA, 25 bp, SARS Virus
cgggtagacggaacacaccagtagt

SEQ ID NO: 120104 - DNA, 25 bp, SARS Virus
gggtagacggaaaacaccagtagta

SEQ ID NO: 120105 - DNA, 25 bp, SARS Virus
ggtagacggaacacaccagtagtac

SEQ ID NO: 120106 - DNA, 25 bp, SARS Virus
gtagacggaacaaaccagtagtact

SEQ ID NO: 120107 - DNA, 25 bp, SARS Virus
tagacggaacacaccagtagtactc

SEQ ID NO: 120108 - DNA, 25 bp, SARS Virus
agacggaacacaacagtagtactca

SEQ ID NO: 120109 - DNA, 25 bp, SARS Virus
gacggaacacacaagtagtactcac

SEQ ID NO: 120110 - DNA, 25 bp, SARS Virus
acggaacacaccagtagtactcaca

SEQ ID NO: 120111 - DNA, 25 bp, SARS Virus
cggaacacaccaatagtactcacaa

SEQ ID NO: 120112 - DNA, 25 bp, SARS Virus
ggaacacaccagaagtactcacaaa

SEQ ID NO: 120113 - DNA, 25 bp, SARS Virus
gaacacaccagtagtactcacaaat

SEQ ID NO: 120114 - DNA, 25 bp, SARS Virus
aacacaccagtaatactcacaaata

SEQ ID NO: 120115 - DNA, 25 bp, SARS Virus
acacaccagtagaactcacaaatac

SEQ ID NO: 120116 - DNA, 25 bp, SARS Virus
cacaccagtagtactcacaaatacg

SEQ ID NO: 120117 - DNA, 25 bp, SARS Virus
acaccagtagtaatcacaaatacgg

SEQ ID NO: 120118 - DNA, 25 bp, SARS Virus
caccagtagtacacacaaatacgga

SEQ ID NO: 120119 - DNA, 25 bp, SARS Virus
accagtagtactaacaaatacggac

SEQ ID NO: 120120 - DNA, 25 bp, SARS Virus
ccagtagtactcacaaatacggact

SEQ ID NO: 120121 - DNA, 25 bp, SARS Virus
cagtagtactcaaaaatacggactc

SEQ ID NO: 120122 - DNA, 25 bp, SARS Virus
agtagtactcacaaatacggactca

SEQ ID NO: 120123 - DNA, 25 bp, SARS Virus
gtagtactcacaaatacggactcaa

SEQ ID NO: 120124 - DNA, 25 bp, SARS Virus
tagtactcacaaatacggactcaac

SEQ ID NO: 120125 - DNA, 25 bp, SARS Virus
agtactcacaaaaacggactcaact

SEQ ID NO: 120126 - DNA, 25 bp, SARS Virus
gtactcacaaatacggactcaactt

SEQ ID NO: 120127 - DNA, 25 bp, SARS Virus
tactcacaaataaggactcaactta

SEQ ID NO: 120128 - DNA, 25 bp, SARS Virus
actcacaaatacagactcaacttag

SEQ ID NO: 120129 - DNA, 25 bp, SARS Virus
ctcacaaatacgaactcaacttagt

SEQ ID NO: 120130 - DNA, 25 bp, SARS Virus
tcacaaatacggactcaacttagtc

SEQ ID NO: 120131 - DNA, 25 bp, SARS Virus
cacaaatacggaatcaacttagtcg

SEQ ID NO: 120132 - DNA, 25 bp, SARS Virus
acaaatacggacacaacttagtcgt

SEQ ID NO: 120133 - DNA, 25 bp, SARS Virus
caaatacggactaaacttagtcgtc

SEQ ID NO: 120134 - DNA, 25 bp, SARS Virus
aaatacggactcaacttagtcgtct

SEQ ID NO: 120135 - DNA, 25 bp, SARS Virus
aatacggactcaacttagtcgtctt

SEQ ID NO: 120136 - DNA, 25 bp, SARS Virus
atacggactcaaattagtcgtcttc

SEQ ID NO: 120137 - DNA, 25 bp, SARS Virus
tacggactcaacatagtcgtcttcg

SEQ ID NO: 120138 - DNA, 25 bp, SARS Virus
acggactcaactaagtcgtcttcga

SEQ ID NO: 120139 - DNA, 25 bp, SARS Virus
cggactcaacttagtcgtcttcgag

SEQ ID NO: 120140 - DNA, 25 bp, SARS Virus
ggactcaacttaatcgtcttcgagg

SEQ ID NO: 120141 - DNA, 25 bp, SARS Virus
gactcaacttagacgtcttcgaggt

SEQ ID NO: 120142 - DNA, 25 bp, SARS Virus
actcaacttagtagtcttcgaggtg

SEQ ID NO: 120143 - DNA, 25 bp, SARS Virus
ctcaacttagtcatcttcgaggtga

SEQ ID NO: 120144 - DNA, 25 bp, SARS Virus
tcaacttagtcgacttcgaggtgag

SEQ ID NO: 120145 - DNA, 25 bp, SARS Virus
caacttagtcgtattcgaggtgagt

SEQ ID NO: 120146 - DNA, 25 bp, SARS Virus
aacttagtcgtcatcgaggtgagta

SEQ ID NO: 120147 - DNA, 25 bp, SARS Virus
acttagtcgtctacgaggtgagtac

SEQ ID NO: 120148 - DNA, 25 bp, SARS Virus
cttagtcgtcttagaggtgagtacc

SEQ ID NO: 120149 - DNA, 25 bp, SARS Virus
ttagtcgtcttcaaggtgagtacct

SEQ ID NO: 120150 - DNA, 25 bp, SARS Virus
tagtcgtcttcgaggtgagtacctt

SEQ ID NO: 120151 - DNA, 25 bp, SARS Virus
agtcgtcttcgaagtgagtacctta

SEQ ID NO: 120152 - DNA, 25 bp, SARS Virus
gtcgtcttcgagatgagtaccttaa

SEQ ID NO: 120153 - DNA, 25 bp, SARS Virus
tcgtcttcgaggagagtaccttaaa

SEQ ID NO: 120154 - DNA, 25 bp, SARS Virus
cgtcttcgaggtaagtaccttaaaa

SEQ ID NO: 120155 - DNA, 25 bp, SARS Virus
gtcttcgaggtgagtaccttaaaac

SEQ ID NO: 120156 - DNA, 25 bp, SARS Virus
tcttcgaggtgaataccttaaaact

SEQ ID NO: 120157 - DNA, 25 bp, SARS Virus
cttcgaggtgagaaccttaaaactt

SEQ ID NO: 120158 - DNA, 25 bp, SARS Virus
ttcgaggtgagtaccttaaaacttc

SEQ ID NO: 120159 - DNA, 25 bp, SARS Virus
tcgaggtgagtaacttaaaacttca

SEQ ID NO: 120160 - DNA, 25 bp, SARS Virus
cgaggtgagtacattaaaacttcaa

SEQ ID NO: 120161 - DNA, 25 bp, SARS Virus
gaggtgagtaccataaaacttcaac

SEQ ID NO: 120162 - DNA, 25 bp, SARS Virus
aggtgagtacctaaaaacttcaaca

SEQ ID NO: 120163 - DNA, 25 bp, SARS Virus
ggtgagtaccttaaaacttcaacag

SEQ ID NO: 120164 - DNA, 25 bp, SARS Virus
gtgagtaccttaaaacttcaacaga

SEQ ID NO: 120165 - DNA, 25 bp, SARS Virus
tgagtaccttaaaacttcaacagac

SEQ ID NO: 120166 - DNA, 25 bp, SARS Virus
gagtaccttaaaacttcaacagacc

SEQ ID NO: 120167 - DNA, 25 bp, SARS Virus
agtaccttaaaaattcaacagacct

SEQ ID NO: 120168 - DNA, 25 bp, SARS Virus
gtaccttaaaacatcaacagacctc

SEQ ID NO: 120169 - DNA, 25 bp, SARS Virus
taccttaaaactacaacagacctct

SEQ ID NO: 120170 - DNA, 25 bp, SARS Virus
accttaaaacttaaacagacctctt

SEQ ID NO: 120171 - DNA, 25 bp, SARS Virus
ccttaaaacttcaacagacctcttt

SEQ ID NO: 120172 - DNA, 25 bp, SARS Virus
cttaaaacttcaacagacctcttta

SEQ ID NO: 120173 - DNA, 25 bp, SARS Virus
ttaaaacttcaaaagacctctttag

SEQ ID NO: 120174 - DNA, 25 bp, SARS Virus
taaaacttcaacagacctctttagt

SEQ ID NO: 120175 - DNA, 25 bp, SARS Virus
aaaacttcaacaaacctctttagta

SEQ ID NO: 120176 - DNA, 25 bp, SARS Virus
aaacttcaacagacctctttagtag

SEQ ID NO: 120177 - DNA, 25 bp, SARS Virus
aacttcaacagaactctttagtagg

SEQ ID NO: 120178 - DNA, 25 bp, SARS Virus
acttcaacagacatctttagtaggt

SEQ ID NO: 120179 - DNA, 25 bp, SARS Virus
cttcaacagaccactttagtaggta

SEQ ID NO: 120180 - DNA, 25 bp, SARS Virus
ttcaacagacctatttagtaggtac

SEQ ID NO: 120181 - DNA, 25 bp, SARS Virus
tcaacagacctcattagtaggtaca

SEQ ID NO: 120182 - DNA, 25 bp, SARS Virus
caacagacctctatagtaggtacag

SEQ ID NO: 120183 - DNA, 25 bp, SARS Virus
aacagacctcttaagtaggtacagt

SEQ ID NO: 120184 - DNA, 25 bp, SARS Virus
acagacctctttagtaggtacagtc

SEQ ID NO: 120185 - DNA, 25 bp, SARS Virus
cagacctctttaataggtacagtcg

SEQ ID NO: 120186 - DNA, 25 bp, SARS Virus
agacctctttagaaggtacagtcgg

SEQ ID NO: 120187 - DNA, 25 bp, SARS Virus
gacctctttagtaggtacagtcggc

SEQ ID NO: 120188 - DNA, 25 bp, SARS Virus
acctctttagtaagtacagtcggcg

SEQ ID NO: 120189 - DNA, 25 bp, SARS Virus
cctctttagtagatacagtcggcgt

SEQ ID NO: 120190 - DNA, 25 bp, SARS Virus
ctctttagtaggaacagtcggcgtc

SEQ ID NO: 120191 - DNA, 25 bp, SARS Virus
tctttagtaggtacagtcggcgtcc

SEQ ID NO: 120192 - DNA, 25 bp, SARS Virus
ctttagtaggtaaagtcggcgtcct

SEQ ID NO: 120193 - DNA, 25 bp, SARS Virus
tttagtaggtacagtcggcgtcctt

SEQ ID NO: 120194 - DNA, 25 bp, SARS Virus
ttagtaggtacaatcggcgtccttc

SEQ ID NO: 120195 - DNA, 25 bp, SARS Virus
tagtaggtacagacggcgtccttct

SEQ ID NO: 120196 - DNA, 25 bp, SARS Virus
agtaggtacagtaggcgtccttctt

SEQ ID NO: 120197 - DNA, 25 bp, SARS Virus
gtaggtacagtcagcgtccttcttc

SEQ ID NO: 120198 - DNA, 25 bp, SARS Virus
taggtacagtcgacgtccttcttct

SEQ ID NO: 120199 - DNA, 25 bp, SARS Virus
aggtacagtcggagtccttcttctc

SEQ ID NO: 120200 - DNA, 25 bp, SARS Virus
ggtacagtcggcatccttcttctca

SEQ ID NO: 120201 - DNA, 25 bp, SARS Virus
gtacagtcggcgaccttcttctcag

SEQ ID NO: 120202 - DNA, 25 bp, SARS Virus
tacagtcggcgtacttcttctcagt

SEQ ID NO: 120203 - DNA, 25 bp, SARS Virus
acagtcggcgtcattcttctcagtg

SEQ ID NO: 120204 - DNA, 25 bp, SARS Virus
cagtcggcgtccatcttctcagtgt

SEQ ID NO: 120205 - DNA, 25 bp, SARS Virus
agtcggcgtcctacttctcagtgtc

SEQ ID NO: 120206 - DNA, 25 bp, SARS Virus
gtcggcgtccttattctcagtgtca

SEQ ID NO: 120207 - DNA, 25 bp, SARS Virus
tcggcgtccttcatctcagtgtcac

SEQ ID NO: 120208 - DNA, 25 bp, SARS Virus
cggcgtccttctactcagtgtcacc

SEQ ID NO: 120209 - DNA, 25 bp, SARS Virus
ggcgtccttcttatcagtgtcaccc

SEQ ID NO: 120210 - DNA, 25 bp, SARS Virus
gcgtccttcttcacagtgtcacccg

SEQ ID NO: 120211 - DNA, 25 bp, SARS Virus
cgtccttcttctaagtgtcacccga

SEQ ID NO: 120212 - DNA, 25 bp, SARS Virus
gtccttcttctcagtgtcacccgac

SEQ ID NO: 120213 - DNA, 25 bp, SARS Virus
tccttcttctcaatgtcacccgacg

SEQ ID NO: 120214 - DNA, 25 bp, SARS Virus
ccttcttctcagagtcacccgacga

SEQ ID NO: 120215 - DNA, 25 bp, SARS Virus
cttcttctcagtatcacccgacgaa

SEQ ID NO: 120216 - DNA, 25 bp, SARS Virus
ttcttctcagtgacacccgacgaag

SEQ ID NO: 120217 - DNA, 25 bp, SARS Virus
tcttctcagtgtaacccgacgaaga

SEQ ID NO: 120218 - DNA, 25 bp, SARS Virus
cttctcagtgtcacccgacgaagaa

SEQ ID NO: 120219 - DNA, 25 bp, SARS Virus
ttctcagtgtcaaccgacgaagaaa

SEQ ID NO: 120220 - DNA, 25 bp, SARS Virus
tctcagtgtcacacgacgaagaaaa

SEQ ID NO: 120221 - DNA, 25 bp, SARS Virus
ctcagtgtcaccagacgaagaaaac

SEQ ID NO: 120222 - DNA, 25 bp, SARS Virus
tcagtgtcacccaacgaagaaaaca

SEQ ID NO: 120223 - DNA, 25 bp, SARS Virus
cagtgtcacccgacgaagaaaacag

SEQ ID NO: 120224 - DNA, 25 bp, SARS Virus
agtgtcacccgaagaagaaaacaga

SEQ ID NO: 120225 - DNA, 25 bp, SARS Virus
gtgtcacccgacaaagaaaacagag

SEQ ID NO: 120226 - DNA, 25 bp, SARS Virus
tgtcacccgacgaagaaaacagaga

SEQ ID NO: 120227 - DNA, 25 bp, SARS Virus
gtcacccgacgaagaaaacagagac

SEQ ID NO: 120228 - DNA, 25 bp, SARS Virus
tcacccgacgaaaaaaacagagacg

SEQ ID NO: 120229 - DNA, 25 bp, SARS Virus
cacccgacgaagaaaacagagacgc

SEQ ID NO: 120230 - DNA, 25 bp, SARS Virus
acccgacgaagaaaacagagacgcc

SEQ ID NO: 120231 - DNA, 25 bp, SARS Virus
cccgacgaagaaaacagagacgccg

SEQ ID NO: 120232 - DNA, 25 bp, SARS Virus
ccgacgaagaaaacagagacgccgt

SEQ ID NO: 120233 - DNA, 25 bp, SARS Virus
cgacgaagaaaaaagagacgccgtt

SEQ ID NO: 120234 - DNA, 25 bp, SARS Virus
gacgaagaaaacagagacgccgttt

SEQ ID NO: 120235 - DNA, 25 bp, SARS Virus
acgaagaaaacaaagacgccgtttc

SEQ ID NO: 120236 - DNA, 25 bp, SARS Virus
cgaagaaaacagagacgccgtttcc

SEQ ID NO: 120237 - DNA, 25 bp, SARS Virus
gaagaaaacagaaacgccgtttccg

SEQ ID NO: 120238 - DNA, 25 bp, SARS Virus
aagaaaacagagacgccgtttccga

SEQ ID NO: 120239 - DNA, 25 bp, SARS Virus
agaaaacagagaagccgtttccgac

SEQ ID NO: 120240 - DNA, 25 bp, SARS Virus
gaaaacagagacaccgtttccgact

SEQ ID NO: 120241 - DNA, 25 bp, SARS Virus
aaaacagagacgacgtttccgactc

SEQ ID NO: 120242 - DNA, 25 bp, SARS Virus
aaacagagacgcagtttccgactcg

SEQ ID NO: 120243 - DNA, 25 bp, SARS Virus
aacagagacgccatttccgactcga

SEQ ID NO: 120244 - DNA, 25 bp, SARS Virus
acagagacgccgattccgactcgaa

SEQ ID NO: 120245 - DNA, 25 bp, SARS Virus
cagagacgccgtatccgactcgaag

SEQ ID NO: 120246 - DNA, 25 bp, SARS Virus
agagacgccgttaccgactcgaagt

SEQ ID NO: 120247 - DNA, 25 bp, SARS Virus
gagacgccgtttacgactcgaagta

SEQ ID NO: 120248 - DNA, 25 bp, SARS Virus
agacgccgtttcagactcgaagtag

SEQ ID NO: 120249 - DNA, 25 bp, SARS Virus
gacgccgtttccaactcgaagtagt

SEQ ID NO: 120250 - DNA, 25 bp, SARS Virus
acgccgtttccgactcgaagtagtc

SEQ ID NO: 120251 - DNA, 25 bp, SARS Virus
cgccgtttccgaatcgaagtagtca

SEQ ID NO: 120252 - DNA, 25 bp, SARS Virus
gccgtttccgacacgaagtagtcag

SEQ ID NO: 120253 - DNA, 25 bp, SARS Virus
ccgtttccgactagaagtagtcaga

SEQ ID NO: 120254 - DNA, 25 bp, SARS Virus
cgtttccgactcaaagtagtcagaa

SEQ ID NO: 120255 - DNA, 25 bp, SARS Virus
gtttccgactcgaagtagtcagaaa

SEQ ID NO: 120256 - DNA, 25 bp, SARS Virus
tttccgactcgaagtagtcagaaaa

SEQ ID NO: 120257 - DNA, 25 bp, SARS Virus
ttccgactcgaaatagtcagaaaaa

SEQ ID NO: 120258 - DNA, 25 bp, SARS Virus
tccgactcgaagaagtcagaaaaag

SEQ ID NO: 120259 - DNA, 25 bp, SARS Virus
ccgactcgaagtagtcagaaaaaga

SEQ ID NO: 120260 - DNA, 25 bp, SARS Virus
cgactcgaagtaatcagaaaaagaa

SEQ ID NO: 120261 - DNA, 25 bp, SARS Virus
gactcgaagtagacagaaaaagaaa

SEQ ID NO: 120262 - DNA, 25 bp, SARS Virus
actcgaagtagtaagaaaaagaaaa

SEQ ID NO: 120263 - DNA, 25 bp, SARS Virus
ctcgaagtagtcagaaaaagaaaaa

SEQ ID NO: 120264 - DNA, 25 bp, SARS Virus
tcgaagtagtcaaaaaaagaaaaac

SEQ ID NO: 120265 - DNA, 25 bp, SARS Virus
cgaagtagtcagaaaaagaaaaaca

SEQ ID NO: 120266 - DNA, 25 bp, SARS Virus
gaagtagtcagaaaaagaaaaacag

SEQ ID NO: 120267 - DNA, 25 bp, SARS Virus
aagtagtcagaaaaagaaaaacagg

SEQ ID NO: 120268 - DNA, 25 bp, SARS Virus
agtagtcagaaaaagaaaaacagga

SEQ ID NO: 120269 - DNA, 25 bp, SARS Virus
gtagtcagaaaaagaaaaacaggaa

SEQ ID NO: 120270 - DNA, 25 bp, SARS Virus
tagtcagaaaaaaaaaaacaggaaa

SEQ ID NO: 120271 - DNA, 25 bp, SARS Virus
agtcagaaaaagaaaaacaggaaaa

SEQ ID NO: 120272 - DNA, 25 bp, SARS Virus
gtcagaaaaagaaaaacaggaaaaa

SEQ ID NO: 120273 - DNA, 25 bp, SARS Virus
tcagaaaaagaaaaacaggaaaaat

SEQ ID NO: 120274 - DNA, 25 bp, SARS Virus
cagaaaaagaaaaacaggaaaaatc

SEQ ID NO: 120275 - DNA, 25 bp, SARS Virus
agaaaaagaaaaacaggaaaaatcc

SEQ ID NO: 120276 - DNA, 25 bp, SARS Virus
gaaaaagaaaaaaaggaaaaatccg

SEQ ID NO: 120277 - DNA, 25 bp, SARS Virus
aaaaagaaaaacaggaaaaatccga

SEQ ID NO: 120278 - DNA, 25 bp, SARS Virus
aaaagaaaaacaagaaaaatccgag

SEQ ID NO: 120279 - DNA, 25 bp, SARS Virus
aaagaaaaacagaaaaaatccgaga

SEQ ID NO: 120280 - DNA, 25 bp, SARS Virus
aagaaaaacaggaaaaatccgagac

SEQ ID NO: 120281 - DNA, 25 bp, SARS Virus
agaaaaacaggaaaaatccgagaca

SEQ ID NO: 120282 - DNA, 25 bp, SARS Virus
gaaaaacaggaaaaatccgagacaa

SEQ ID NO: 120283 - DNA, 25 bp, SARS Virus
aaaaacaggaaaaatccgagacaac

SEQ ID NO: 120284 - DNA, 25 bp, SARS Virus
aaaacaggaaaaatccgagacaacc

SEQ ID NO: 120285 - DNA, 25 bp, SARS Virus
aaacaggaaaaaaccgagacaacca

SEQ ID NO: 120286 - DNA, 25 bp, SARS Virus
aacaggaaaaatacgagacaaccac

SEQ ID NO: 120287 - DNA, 25 bp, SARS Virus
acaggaaaaatcagagacaaccacc

SEQ ID NO: 120288 - DNA, 25 bp, SARS Virus
caggaaaaatccaagacaaccaccc

SEQ ID NO: 120289 - DNA, 25 bp, SARS Virus
aggaaaaatccgagacaaccaccct

SEQ ID NO: 120290 - DNA, 25 bp, SARS Virus
ggaaaaatccgaaacaaccaccctt

SEQ ID NO: 120291 - DNA, 25 bp, SARS Virus
gaaaaatccgagacaaccaccctta

SEQ ID NO: 120292 - DNA, 25 bp, SARS Virus
aaaaatccgagaaaaccacccttac

SEQ ID NO: 120293 - DNA, 25 bp, SARS Virus
aaaatccgagacaaccacccttaca

SEQ ID NO: 120294 - DNA, 25 bp, SARS Virus
aaatccgagacaaccacccttacaa

SEQ ID NO: 120295 - DNA, 25 bp, SARS Virus
aatccgagacaaacacccttacaaa

SEQ ID NO: 120296 - DNA, 25 bp, SARS Virus
atccgagacaacaacccttacaaaa

SEQ ID NO: 120297 - DNA, 25 bp, SARS Virus
tccgagacaaccacccttacaaaac

SEQ ID NO: 120298 - DNA, 25 bp, SARS Virus
ccgagacaaccaaccttacaaaaca

SEQ ID NO: 120299 - DNA, 25 bp, SARS Virus
cgagacaaccacacttacaaaacat

SEQ ID NO: 120300 - DNA, 25 bp, SARS Virus
gagacaaccaccattacaaaacata

SEQ ID NO: 120301 - DNA, 25 bp, SARS Virus
agacaaccacccatacaaaacatac

SEQ ID NO: 120302 - DNA, 25 bp, SARS Virus
gacaaccaccctaacaaaacatacg

SEQ ID NO: 120303 - DNA, 25 bp, SARS Virus
acaaccacccttacaaaacatacgc

SEQ ID NO: 120304 - DNA, 25 bp, SARS Virus
caaccacccttaaaaaacatacgca

SEQ ID NO: 120305 - DNA, 25 bp, SARS Virus
aaccacccttacaaaacatacgcag

SEQ ID NO: 120306 - DNA, 25 bp, SARS Virus
accacccttacaaaacatacgcagt

SEQ ID NO: 120307 - DNA, 25 bp, SARS Virus
ccacccttacaaaacatacgcagtt

SEQ ID NO: 120308 - DNA, 25 bp, SARS Virus
cacccttacaaaacatacgcagtta

SEQ ID NO: 120309 - DNA, 25 bp, SARS Virus
acccttacaaaaaatacgcagttac

SEQ ID NO: 120310 - DNA, 25 bp, SARS Virus
cccttacaaaacatacgcagttaca

SEQ ID NO: 120311 - DNA, 25 bp, SARS Virus
ccttacaaaacaaacgcagttacac

SEQ ID NO: 120312 - DNA, 25 bp, SARS Virus
cttacaaaacatacgcagttacacg

SEQ ID NO: 120313 - DNA, 25 bp, SARS Virus
ttacaaaacataagcagttacacga

SEQ ID NO: 120314 - DNA, 25 bp, SARS Virus
tacaaaacatacacagttacacgaa

SEQ ID NO: 120315 - DNA, 25 bp, SARS Virus
acaaaacatacgaagttacacgaac

SEQ ID NO: 120316 - DNA, 25 bp, SARS Virus
caaaacatacgcagttacacgaaca

SEQ ID NO: 120317 - DNA, 25 bp, SARS Virus
aaaacatacgcaattacacgaacaa

SEQ ID NO: 120318 - DNA, 25 bp, SARS Virus
aaacatacgcagatacacgaacaag

SEQ ID NO: 120319 - DNA, 25 bp, SARS Virus
aacatacgcagtaacacgaacaagt

SEQ ID NO: 120320 - DNA, 25 bp, SARS Virus
acatacgcagttacacgaacaagtc

SEQ ID NO: 120321 - DNA, 25 bp, SARS Virus
catacgcagttaaacgaacaagtcg

SEQ ID NO: 120322 - DNA, 25 bp, SARS Virus
atacgcagttacacgaacaagtcgt

SEQ ID NO: 120323 - DNA, 25 bp, SARS Virus
tacgcagttacaagaacaagtcgtc

SEQ ID NO: 120324 - DNA, 25 bp, SARS Virus
acgcagttacacaaacaagtcgtca

SEQ ID NO: 120325 - DNA, 25 bp, SARS Virus
cgcagttacacgaacaagtcgtcat

SEQ ID NO: 120326 - DNA, 25 bp, SARS Virus
gcagttacacgaacaagtcgtcata

SEQ ID NO: 120327 - DNA, 25 bp, SARS Virus
cagttacacgaaaaagtcgtcatac

SEQ ID NO: 120328 - DNA, 25 bp, SARS Virus
agttacacgaacaagtcgtcatact

SEQ ID NO: 120329 - DNA, 25 bp, SARS Virus
gttacacgaacaagtcgtcatactg

SEQ ID NO: 120330 - DNA, 25 bp, SARS Virus
ttacacgaacaaatcgtcatactgc

SEQ ID NO: 120331 - DNA, 25 bp, SARS Virus
tacacgaacaagacgtcatactgca

SEQ ID NO: 120332 - DNA, 25 bp, SARS Virus
acacgaacaagtagtcatactgcaa

SEQ ID NO: 120333 - DNA, 25 bp, SARS Virus
cacgaacaagtcatcatactgcaac

SEQ ID NO: 120334 - DNA, 25 bp, SARS Virus
acgaacaagtcgacatactgcaaca

SEQ ID NO: 120335 - DNA, 25 bp, SARS Virus
cgaacaagtcgtaatactgcaacag

SEQ ID NO: 120336 - DNA, 25 bp, SARS Virus
gaacaagtcgtcatactgcaacaga

SEQ ID NO: 120337 - DNA, 25 bp, SARS Virus
aacaagtcgtcaaactgcaacagaa

SEQ ID NO: 120338 - DNA, 25 bp, SARS Virus
acaagtcgtcatactgcaacagaaa

SEQ ID NO: 120339 - DNA, 25 bp, SARS Virus
caagtcgtcataatgcaacagaaac

SEQ ID NO: 120340 - DNA, 25 bp, SARS Virus
aagtcgtcatacagcaacagaaact

SEQ ID NO: 120341 - DNA, 25 bp, SARS Virus
agtcgtcatactacaacagaaactt

SEQ ID NO: 120342 - DNA, 25 bp, SARS Virus
gtcgtcatactgaaacagaaactta

SEQ ID NO: 120343 - DNA, 25 bp, SARS Virus
tcgtcatactgcaacagaaacttaa

SEQ ID NO: 120344 - DNA, 25 bp, SARS Virus
cgtcatactgcaacagaaacttaac

SEQ ID NO: 120345 - DNA, 25 bp, SARS Virus
gtcatactgcaaaagaaacttaaca

SEQ ID NO: 120346 - DNA, 25 bp, SARS Virus
tcatactgcaacagaaacttaacac

SEQ ID NO: 120347 - DNA, 25 bp, SARS Virus
catactgcaacaaaaacttaacacc

SEQ ID NO: 120348 - DNA, 25 bp, SARS Virus
atactgcaacagaaacttaacacct

SEQ ID NO: 120349 - DNA, 25 bp, SARS Virus
tactgcaacagaaacttaacaccta

SEQ ID NO: 120350 - DNA, 25 bp, SARS Virus
actgcaacagaaacttaacacctag

SEQ ID NO: 120351 - DNA, 25 bp, SARS Virus
ctgcaacagaaaattaacacctaga

SEQ ID NO: 120352 - DNA, 25 bp, SARS Virus
tgcaacagaaacataacacctagaa

SEQ ID NO: 120353 - DNA, 25 bp, SARS Virus
gcaacagaaactaaacacctagaaa

SEQ ID NO: 120354 - DNA, 25 bp, SARS Virus
caacagaaacttaacacctagaaac

SEQ ID NO: 120355 - DNA, 25 bp, SARS Virus
aacagaaacttaacacctagaaaca

SEQ ID NO: 120356 - DNA, 25 bp, SARS Virus
acagaaacttaaaacctagaaacag

SEQ ID NO: 120357 - DNA, 25 bp, SARS Virus
cagaaacttaacacctagaaacagt

SEQ ID NO: 120358 - DNA, 25 bp, SARS Virus
agaaacttaacaactagaaacagta

SEQ ID NO: 120359 - DNA, 25 bp, SARS Virus
gaaacttaacacatagaaacagtag

SEQ ID NO: 120360 - DNA, 25 bp, SARS Virus
aaacttaacaccaagaaacagtagg

SEQ ID NO: 120361 - DNA, 25 bp, SARS Virus
aacttaacacctagaaacagtaggt

SEQ ID NO: 120362 - DNA, 25 bp, SARS Virus
acttaacacctaaaaacagtaggtt

SEQ ID NO: 120363 - DNA, 25 bp, SARS Virus
cttaacacctagaaacagtaggtta

SEQ ID NO: 120364 - DNA, 25 bp, SARS Virus
ttaacacctagaaacagtaggttaa

SEQ ID NO: 120365 - DNA, 25 bp, SARS Virus
taacacctagaaacagtaggttaaa

SEQ ID NO: 120366 - DNA, 25 bp, SARS Virus
aacacctagaaaaagtaggttaaat

SEQ ID NO: 120367 - DNA, 25 bp, SARS Virus
acacctagaaacagtaggttaaatt

SEQ ID NO: 120368 - DNA, 25 bp, SARS Virus
cacctagaaacaataggttaaatta

SEQ ID NO: 120369 - DNA, 25 bp, SARS Virus
acctagaaacagaaggttaaattac

SEQ ID NO: 120370 - DNA, 25 bp, SARS Virus
cctagaaacagtaggttaaattacc

SEQ ID NO: 120371 - DNA, 25 bp, SARS Virus
ctagaaacagtaagttaaattaccg

SEQ ID NO: 120372 - DNA, 25 bp, SARS Virus
tagaaacagtagattaaattaccga

SEQ ID NO: 120373 - DNA, 25 bp, SARS Virus
agaaacagtaggataaattaccgag

SEQ ID NO: 120374 - DNA, 25 bp, SARS Virus
gaaacagtaggtaaaattaccgagg

SEQ ID NO: 120375 - DNA, 25 bp, SARS Virus
aaacagtaggttaaattaccgaggt

SEQ ID NO: 120376 - DNA, 25 bp, SARS Virus
aacagtaggttaaattaccgaggta

SEQ ID NO: 120377 - DNA, 25 bp, SARS Virus
acagtaggttaaattaccgaggtac

SEQ ID NO: 120378 - DNA, 25 bp, SARS Virus
cagtaggttaaaataccgaggtact

SEQ ID NO: 120379 - DNA, 25 bp, SARS Virus
agtaggttaaataaccgaggtacta

SEQ ID NO: 120380 - DNA, 25 bp, SARS Virus
gtaggttaaattaccgaggtactat

SEQ ID NO: 120381 - DNA, 25 bp, SARS Virus
taggttaaattaacgaggtactatt

SEQ ID NO: 120382 - DNA, 25 bp, SARS Virus
aggttaaattacagaggtactattc

SEQ ID NO: 120383 - DNA, 25 bp, SARS Virus
ggttaaattaccaaggtactattca

SEQ ID NO: 120384 - DNA, 25 bp, SARS Virus
gttaaattaccgaggtactattcag

SEQ ID NO: 120385 - DNA, 25 bp, SARS Virus
ttaaattaccgaagtactattcagt

SEQ ID NO: 120386 - DNA, 25 bp, SARS Virus
taaattaccgagatactattcagtc

SEQ ID NO: 120387 - DNA, 25 bp, SARS Virus
aaattaccgaggaactattcagtcg

SEQ ID NO: 120388 - DNA, 25 bp, SARS Virus
aattaccgaggtactattcagtcgg

SEQ ID NO: 120389 - DNA, 25 bp, SARS Virus
attaccgaggtaatattcagtcggt

SEQ ID NO: 120390 - DNA, 25 bp, SARS Virus
ttaccgaggtacaattcagtcggta

SEQ ID NO: 120391 - DNA, 25 bp, SARS Virus
taccgaggtactattcagtcggtac

SEQ ID NO: 120392 - DNA, 25 bp, SARS Virus
accgaggtactaatcagtcggtaca

SEQ ID NO: 120393 - DNA, 25 bp, SARS Virus
ccgaggtactatacagtcggtacaa

SEQ ID NO: 120394 - DNA, 25 bp, SARS Virus
cgaggtactattaagtcggtacaag

SEQ ID NO: 120395 - DNA, 25 bp, SARS Virus
gaggtactattcagtcggtacaagg

SEQ ID NO: 120396 - DNA, 25 bp, SARS Virus
aggtactattcaatcggtacaaggg

SEQ ID NO: 120397 - DNA, 25 bp, SARS Virus
ggtactattcagacggtacaagggc

SEQ ID NO: 120398 - DNA, 25 bp, SARS Virus
gtactattcagtaggtacaagggct

SEQ ID NO: 120399 - DNA, 25 bp, SARS Virus
tactattcagtcagtacaagggctt

SEQ ID NO: 120400 - DNA, 25 bp, SARS Virus
actattcagtcgatacaagggcttc

SEQ ID NO: 120401 - DNA, 25 bp, SARS Virus
ctattcagtcggaacaagggcttcc

SEQ ID NO: 120402 - DNA, 25 bp, SARS Virus
tattcagtcggtacaagggcttcca

SEQ ID NO: 120403 - DNA, 25 bp, SARS Virus
attcagtcggtaaaagggcttccac

SEQ ID NO: 120404 - DNA, 25 bp, SARS Virus
ttcagtcggtacaagggcttccaca

SEQ ID NO: 120405 - DNA, 25 bp, SARS Virus
tcagtcggtacaagggcttccacac

SEQ ID NO: 120406 - DNA, 25 bp, SARS Virus
cagtcggtacaaaggcttccacact

SEQ ID NO: 120407 - DNA, 25 bp, SARS Virus
agtcggtacaagagcttccacactg

SEQ ID NO: 120408 - DNA, 25 bp, SARS Virus
gtcggtacaaggacttccacactga

SEQ ID NO: 120409 - DNA, 25 bp, SARS Virus
tcggtacaagggattccacactgaa

SEQ ID NO: 120410 - DNA, 25 bp, SARS Virus
cggtacaagggcatccacactgaag

SEQ ID NO: 120411 - DNA, 25 bp, SARS Virus
ggtacaagggctaccacactgaagg

SEQ ID NO: 120412 - DNA, 25 bp, SARS Virus
gtacaagggcttacacactgaaggt

SEQ ID NO: 120413 - DNA, 25 bp, SARS Virus
tacaagggcttcaacactgaaggta

SEQ ID NO: 120414 - DNA, 25 bp, SARS Virus
acaagggcttccacactgaaggtac

SEQ ID NO: 120415 - DNA, 25 bp, SARS Virus
caagggcttccaaactgaaggtacg

SEQ ID NO: 120416 - DNA, 25 bp, SARS Virus
aagggcttccacactgaaggtacgg

SEQ ID NO: 120417 - DNA, 25 bp, SARS Virus
agggcttccacaatgaaggtacggt

SEQ ID NO: 120418 - DNA, 25 bp, SARS Virus
gggcttccacacagaaggtacggtt

SEQ ID NO: 120419 - DNA, 25 bp, SARS Virus
ggcttccacactaaaggtacggtta

SEQ ID NO: 120420 - DNA, 25 bp, SARS Virus
gcttccacactgaaggtacggttac

SEQ ID NO: 120421 - DNA, 25 bp, SARS Virus
cttccacactgaaggtacggttacg

SEQ ID NO: 120422 - DNA, 25 bp, SARS Virus
ttccacactgaaagtacggttacgc

SEQ ID NO: 120423 - DNA, 25 bp, SARS Virus
tccacactgaagatacggttacgca

SEQ ID NO: 120424 - DNA, 25 bp, SARS Virus
ccacactgaaggaacggttacgcac

SEQ ID NO: 120425 - DNA, 25 bp, SARS Virus
cacactgaaggtacggttacgcact

SEQ ID NO: 120426 - DNA, 25 bp, SARS Virus
acactgaaggtaaggttacgcactg

SEQ ID NO: 120427 - DNA, 25 bp, SARS Virus
cactgaaggtacagttacgcactgt

SEQ ID NO: 120428 - DNA, 25 bp, SARS Virus
actgaaggtacgattacgcactgta

SEQ ID NO: 120429 - DNA, 25 bp, SARS Virus
ctgaaggtacggatacgcactgtaa

SEQ ID NO: 120430 - DNA, 25 bp, SARS Virus
tgaaggtacggtaacgcactgtaag

SEQ ID NO: 120431 - DNA, 25 bp, SARS Virus
gaaggtacggttacgcactgtaagg

SEQ ID NO: 120432 - DNA, 25 bp, SARS Virus
aaggtacggttaagcactgtaaggt

SEQ ID NO: 120433 - DNA, 25 bp, SARS Virus
aggtacggttacacactgtaaggtt

SEQ ID NO: 120434 - DNA, 25 bp, SARS Virus
ggtacggttacgaactgtaaggttt

SEQ ID NO: 120435 - DNA, 25 bp, SARS Virus
gtacggttacgcactgtaaggtttc

SEQ ID NO: 120436 - DNA, 25 bp, SARS Virus
tacggttacgcaatgtaaggtttct

SEQ ID NO: 120437 - DNA, 25 bp, SARS Virus
acggttacgcacagtaaggtttctt

SEQ ID NO: 120438 - DNA, 25 bp, SARS Virus
cggttacgcactataaggtttctta

SEQ ID NO: 120439 - DNA, 25 bp, SARS Virus
ggttacgcactgaaaggtttcttac

SEQ ID NO: 120440 - DNA, 25 bp, SARS Virus
gttacgcactgtaaggtttcttacg

SEQ ID NO: 120441 - DNA, 25 bp, SARS Virus
ttacgcactgtaaggtttcttacgt

SEQ ID NO: 120442 - DNA, 25 bp, SARS Virus
tacgcactgtaaagtttcttacgtc

SEQ ID NO: 120443 - DNA, 25 bp, SARS Virus
acgcactgtaagatttcttacgtct

SEQ ID NO: 120444 - DNA, 25 bp, SARS Virus
cgcactgtaaggattcttacgtctc

SEQ ID NO: 120445 - DNA, 25 bp, SARS Virus
gcactgtaaggtatcttacgtctcc

SEQ ID NO: 120446 - DNA, 25 bp, SARS Virus
cactgtaaggttacttacgtctccg

SEQ ID NO: 120447 - DNA, 25 bp, SARS Virus
actgtaaggtttattacgtctccgt

SEQ ID NO: 120448 - DNA, 25 bp, SARS Virus
ctgtaaggtttcatacgtctccgtg

SEQ ID NO: 120449 - DNA, 25 bp, SARS Virus
tgtaaggtttctaacgtctccgtga

SEQ ID NO: 120450 - DNA, 25 bp, SARS Virus
gtaaggtttcttacgtctccgtgaa

SEQ ID NO: 120451 - DNA, 25 bp, SARS Virus
taaggtttcttaagtctccgtgaac

SEQ ID NO: 120452 - DNA, 25 bp, SARS Virus
aaggtttcttacatctccgtgaacc

SEQ ID NO: 120453 - DNA, 25 bp, SARS Virus
aggtttcttacgactccgtgaacct

SEQ ID NO: 120454 - DNA, 25 bp, SARS Virus
ggtttcttacgtatccgtgaacctc

SEQ ID NO: 120455 - DNA, 25 bp, SARS Virus
gtttcttacgtcaccgtgaacctcg

SEQ ID NO: 120456 - DNA, 25 bp, SARS Virus
tttcttacgtctacgtgaacctcgt

SEQ ID NO: 120457 - DNA, 25 bp, SARS Virus
ttcttacgtctcagtgaacctcgtt

SEQ ID NO: 120458 - DNA, 25 bp, SARS Virus
tcttacgtctccatgaacctcgttt

SEQ ID NO: 120459 - DNA, 25 bp, SARS Virus
cttacgtctccgagaacctcgttta

SEQ ID NO: 120460 - DNA, 25 bp, SARS Virus
ttacgtctccgtaaacctcgtttaa

SEQ ID NO: 120461 - DNA, 25 bp, SARS Virus
tacgtctccgtgaacctcgtttaac

SEQ ID NO: 120462 - DNA, 25 bp, SARS Virus
acgtctccgtgaacctcgtttaaca

SEQ ID NO: 120463 - DNA, 25 bp, SARS Virus
cgtctccgtgaaactcgtttaacac

SEQ ID NO: 120464 - DNA, 25 bp, SARS Virus
gtctccgtgaacatcgtttaacacg

SEQ ID NO: 120465 - DNA, 25 bp, SARS Virus
tctccgtgaaccacgtttaacacgt

SEQ ID NO: 120466 - DNA, 25 bp, SARS Virus
ctccgtgaacctagtttaacacgtt

SEQ ID NO: 120467 - DNA, 25 bp, SARS Virus
tccgtgaacctcatttaacacgtta

SEQ ID NO: 120468 - DNA, 25 bp, SARS Virus
ccgtgaacctcgattaacacgttaa

SEQ ID NO: 120469 - DNA, 25 bp, SARS Virus
cgtgaacctcgtataacacgttaaa

SEQ ID NO: 120470 - DNA, 25 bp, SARS Virus
gtgaacctcgttaaacacgttaaac

SEQ ID NO: 120471 - DNA, 25 bp, SARS Virus
tgaacctcgtttaacacgttaaacg

SEQ ID NO: 120472 - DNA, 25 bp, SARS Virus
gaacctcgtttaacacgttaaacgc

SEQ ID NO: 120473 - DNA, 25 bp, SARS Virus
aacctcgtttaaaacgttaaacgcc

SEQ ID NO: 120474 - DNA, 25 bp, SARS Virus
acctcgtttaacacgttaaacgccg

SEQ ID NO: 120475 - DNA, 25 bp, SARS Virus
cctcgtttaacaagttaaacgccgg

SEQ ID NO: 120476 - DNA, 25 bp, SARS Virus
ctcgtttaacacattaaacgccggt

SEQ ID NO: 120477 - DNA, 25 bp, SARS Virus
tcgtttaacacgataaacgccggtt

SEQ ID NO: 120478 - DNA, 25 bp, SARS Virus
cgtttaacacgtaaaacgccggtta

SEQ ID NO: 120479 - DNA, 25 bp, SARS Virus
gtttaacacgttaaacgccggttac

SEQ ID NO: 120480 - DNA, 25 bp, SARS Virus
tttaacacgttaaacgccggttaca

SEQ ID NO: 120481 - DNA, 25 bp, SARS Virus
ttaacacgttaaacgccggttacaa

SEQ ID NO: 120482 - DNA, 25 bp, SARS Virus
taacacgttaaaagccggttacaaa

SEQ ID NO: 120483 - DNA, 25 bp, SARS Virus
aacacgttaaacaccggttacaaac

SEQ ID NO: 120484 - DNA, 25 bp, SARS Virus
acacgttaaacgacggttacaaaca

SEQ ID NO: 120485 - DNA, 25 bp, SARS Virus
cacgttaaacgcaggttacaaacat

SEQ ID NO: 120486 - DNA, 25 bp, SARS Virus
acgttaaacgccagttacaaacatt

SEQ ID NO: 120487 - DNA, 25 bp, SARS Virus
cgttaaacgccgattacaaacatta

SEQ ID NO: 120488 - DNA, 25 bp, SARS Virus
gttaaacgccggatacaaacattag

SEQ ID NO: 120489 - DNA, 25 bp, SARS Virus
ttaaacgccggtaacaaacattagt

SEQ ID NO: 120490 - DNA, 25 bp, SARS Virus
taaacgccggttacaaacattagtc

SEQ ID NO: 120491 - DNA, 25 bp, SARS Virus
aaacgccggttaaaaacattagtca

SEQ ID NO: 120492 - DNA, 25 bp, SARS Virus
aacgccggttacaaacattagtcaa

SEQ ID NO: 120493 - DNA, 25 bp, SARS Virus
acgccggttacaaacattagtcaag

SEQ ID NO: 120494 - DNA, 25 bp, SARS Virus
cgccggttacaaacattagtcaagg

SEQ ID NO: 120495 - DNA, 25 bp, SARS Virus
gccggttacaaaaattagtcaagga

SEQ ID NO: 120496 - DNA, 25 bp, SARS Virus
ccggttacaaacattagtcaaggaa

SEQ ID NO: 120497 - DNA, 25 bp, SARS Virus
cggttacaaacaatagtcaaggaac

SEQ ID NO: 120498 - DNA, 25 bp, SARS Virus
ggttacaaacataagtcaaggaaca

SEQ ID NO: 120499 - DNA, 25 bp, SARS Virus
gttacaaacattagtcaaggaacag

SEQ ID NO: 120500 - DNA, 25 bp, SARS Virus
ttacaaacattaatcaaggaacaga

SEQ ID NO: 120501 - DNA, 25 bp, SARS Virus
tacaaacattagacaaggaacagac

SEQ ID NO: 120502 - DNA, 25 bp, SARS Virus
acaaacattagtaaaggaacagact

SEQ ID NO: 120503 - DNA, 25 bp, SARS Virus
caaacattagtcaaggaacagacta

SEQ ID NO: 120504 - DNA, 25 bp, SARS Virus
aaacattagtcaaggaacagactaa

SEQ ID NO: 120505 - DNA, 25 bp, SARS Virus
aacattagtcaaagaacagactaat

SEQ ID NO: 120506 - DNA, 25 bp, SARS Virus
acattagtcaagaaacagactaatc

SEQ ID NO: 120507 - DNA, 25 bp, SARS Virus
cattagtcaaggaacagactaatcc

SEQ ID NO: 120508 - DNA, 25 bp, SARS Virus
attagtcaaggaacagactaatcca

SEQ ID NO: 120509 - DNA, 25 bp, SARS Virus
ttagtcaaggaaaagactaatccag

SEQ ID NO: 120510 - DNA, 25 bp, SARS Virus
tagtcaaggaacagactaatccaga

SEQ ID NO: 120511 - DNA, 25 bp, SARS Virus
agtcaaggaacaaactaatccagaa

SEQ ID NO: 120512 - DNA, 25 bp, SARS Virus
gtcaaggaacagactaatccagaac

SEQ ID NO: 120513 - DNA, 25 bp, SARS Virus
tcaaggaacagaataatccagaacc

SEQ ID NO: 120514 - DNA, 25 bp, SARS Virus
caaggaacagacaaatccagaacca

SEQ ID NO: 120515 - DNA, 25 bp, SARS Virus
aaggaacagactaatccagaaccag

SEQ ID NO: 120516 - DNA, 25 bp, SARS Virus
aggaacagactaatccagaaccagg

SEQ ID NO: 120517 - DNA, 25 bp, SARS Virus
ggaacagactaaaccagaaccaggg

SEQ ID NO: 120518 - DNA, 25 bp, SARS Virus
gaacagactaatacagaaccagggg

SEQ ID NO: 120519 - DNA, 25 bp, SARS Virus
aacagactaatcaagaaccaggggc

SEQ ID NO: 120520 - DNA, 25 bp, SARS Virus
acagactaatccagaaccaggggct

SEQ ID NO: 120521 - DNA, 25 bp, SARS Virus
cagactaatccaaaaccaggggctt

SEQ ID NO: 120522 - DNA, 25 bp, SARS Virus
agactaatccagaaccaggggcttt

SEQ ID NO: 120523 - DNA, 25 bp, SARS Virus
gactaatccagaaccaggggcttta

SEQ ID NO: 120524 - DNA, 25 bp, SARS Virus
actaatccagaaacaggggctttaa

SEQ ID NO: 120525 - DNA, 25 bp, SARS Virus
ctaatccagaacaaggggctttaaa

SEQ ID NO: 120526 - DNA, 25 bp, SARS Virus
taatccagaaccaggggctttaaag

SEQ ID NO: 120527 - DNA, 25 bp, SARS Virus
aatccagaaccaagggctttaaagg

SEQ ID NO: 120528 - DNA, 25 bp, SARS Virus
atccagaaccagaggctttaaagga

SEQ ID NO: 120529 - DNA, 25 bp, SARS Virus
tccagaaccaggagctttaaaggaa

SEQ ID NO: 120530 - DNA, 25 bp, SARS Virus
ccagaaccagggactttaaaggaac

SEQ ID NO: 120531 - DNA, 25 bp, SARS Virus
cagaaccaggggatttaaaggaacc

SEQ ID NO: 120532 - DNA, 25 bp, SARS Virus
agaaccaggggcattaaaggaaccc

SEQ ID NO: 120533 - DNA, 25 bp, SARS Virus
gaaccaggggctataaaggaaccca

SEQ ID NO: 120534 - DNA, 25 bp, SARS Virus
aaccaggggcttaaaaggaacccaa

SEQ ID NO: 120535 - DNA, 25 bp, SARS Virus
accaggggctttaaaggaacccaaa

SEQ ID NO: 120536 - DNA, 25 bp, SARS Virus
ccaggggctttaaaggaacccaaac

SEQ ID NO: 120537 - DNA, 25 bp, SARS Virus
caggggctttaaaggaacccaaaca

SEQ ID NO: 120538 - DNA, 25 bp, SARS Virus
aggggctttaaaagaacccaaacaa

SEQ ID NO: 120539 - DNA, 25 bp, SARS Virus
ggggctttaaagaaacccaaacaag

SEQ ID NO: 120540 - DNA, 25 bp, SARS Virus
gggctttaaaggaacccaaacaaga

SEQ ID NO: 120541 - DNA, 25 bp, SARS Virus
ggctttaaaggaacccaaacaagac

SEQ ID NO: 120542 - DNA, 25 bp, SARS Virus
gctttaaaggaaaccaaacaagacc

SEQ ID NO: 120543 - DNA, 25 bp, SARS Virus
ctttaaaggaacacaaacaagacct

SEQ ID NO: 120544 - DNA, 25 bp, SARS Virus
tttaaaggaaccaaaacaagacctg

SEQ ID NO: 120545 - DNA, 25 bp, SARS Virus
ttaaaggaacccaaacaagacctgg

SEQ ID NO: 120546 - DNA, 25 bp, SARS Virus
taaaggaacccaaacaagacctggt

SEQ ID NO: 120547 - DNA, 25 bp, SARS Virus
aaaggaacccaaacaagacctggtg

SEQ ID NO: 120548 - DNA, 25 bp, SARS Virus
aaggaacccaaaaaagacctggtgc

SEQ ID NO: 120549 - DNA, 25 bp, SARS Virus
aggaacccaaacaagacctggtgca

SEQ ID NO: 120550 - DNA, 25 bp, SARS Virus
ggaacccaaacaagacctggtgcag

SEQ ID NO: 120551 - DNA, 25 bp, SARS Virus
gaacccaaacaaaacctggtgcaga

SEQ ID NO: 120552 - DNA, 25 bp, SARS Virus
aacccaaacaagacctggtgcagag

SEQ ID NO: 120553 - DNA, 25 bp, SARS Virus
acccaaacaagaactggtgcagagg

SEQ ID NO: 120554 - DNA, 25 bp, SARS Virus
cccaaacaagacatggtgcagaggg

SEQ ID NO: 120555 - DNA, 25 bp, SARS Virus
ccaaacaagaccaggtgcagagggt

SEQ ID NO: 120556 - DNA, 25 bp, SARS Virus
caaacaagacctagtgcagagggtt

SEQ ID NO: 120557 - DNA, 25 bp, SARS Virus
aaacaagacctgatgcagagggttt

SEQ ID NO: 120558 - DNA, 25 bp, SARS Virus
aacaagacctggagcagagggttta

SEQ ID NO: 120559 - DNA, 25 bp, SARS Virus
acaagacctggtacagagggtttac

SEQ ID NO: 120560 - DNA, 25 bp, SARS Virus
caagacctggtgaagagggtttacg

SEQ ID NO: 120561 - DNA, 25 bp, SARS Virus
aagacctggtgcagagggtttacga

SEQ ID NO: 120562 - DNA, 25 bp, SARS Virus
agacctggtgcaaagggtttacgaa

SEQ ID NO: 120563 - DNA, 25 bp, SARS Virus
gacctggtgcagagggtttacgaac

SEQ ID NO: 120564 - DNA, 25 bp, SARS Virus
acctggtgcagaaggtttacgaact

SEQ ID NO: 120565 - DNA, 25 bp, SARS Virus
cctggtgcagagagtttacgaactc

SEQ ID NO: 120566 - DNA, 25 bp, SARS Virus
ctggtgcagaggatttacgaactca

SEQ ID NO: 120567 - DNA, 25 bp, SARS Virus
tggtgcagagggattacgaactcac

SEQ ID NO: 120568 - DNA, 25 bp, SARS Virus
ggtgcagagggtatacgaactcact

SEQ ID NO: 120569 - DNA, 25 bp, SARS Virus
cttaacgcttttccaaatgtatcgg

SEQ ID NO: 120570 - DNA, 25 bp, SARS Virus
ttaacgcttttgcaaatgtatcggg

SEQ ID NO: 120571 - DNA, 25 bp, SARS Virus
taacgcttttgccaatgtatcgggt

SEQ ID NO: 120572 - DNA, 25 bp, SARS Virus
aacgcttttgcacatgtatcgggta

SEQ ID NO: 120573 - DNA, 25 bp, SARS Virus
acgcttttgcaactgtatcgggtag

SEQ ID NO: 120574 - DNA, 25 bp, SARS Virus
cgcttttgcaaacgtatcgggtaga

SEQ ID NO: 120575 - DNA, 25 bp, SARS Virus
gcttttgcaaatctatcgggtagac

SEQ ID NO: 120576 - DNA, 25 bp, SARS Virus
cttttgcaaatgcatcgggtagacg

SEQ ID NO: 120577 - DNA, 25 bp, SARS Virus
ttttgcaaatgtctcgggtagacgg

SEQ ID NO: 120578 - DNA, 25 bp, SARS Virus
tttgcaaatgtaccgggtagacgga

SEQ ID NO: 120579 - DNA, 25 bp, SARS Virus
ttgcaaatgtatcgggtagacggaa

SEQ ID NO: 120580 - DNA, 25 bp, SARS Virus
tgcaaatgtatccggtagacggaac

SEQ ID NO: 120581 - DNA, 25 bp, SARS Virus
gcaaatgtatcgcgtagacggaaca

SEQ ID NO: 120582 - DNA, 25 bp, SARS Virus
caaatgtatcggctagacggaacac

SEQ ID NO: 120583 - DNA, 25 bp, SARS Virus
aaatgtatcgggcagacggaacaca

SEQ ID NO: 120584 - DNA, 25 bp, SARS Virus
aatgtatcgggtcgacggaacacac

SEQ ID NO: 120585 - DNA, 25 bp, SARS Virus
atgtatcgggtacacggaacacacc

SEQ ID NO: 120586 - DNA, 25 bp, SARS Virus
tgtatcgggtagccggaacacacca

SEQ ID NO: 120587 - DNA, 25 bp, SARS Virus
gtatcgggtagacggaacacaccag

SEQ ID NO: 120588 - DNA, 25 bp, SARS Virus
tatcgggtagaccgaacacaccagt

SEQ ID NO: 120589 - DNA, 25 bp, SARS Virus
atcgggtagacgcaacacaccagta

SEQ ID NO: 120590 - DNA, 25 bp, SARS Virus
tcgggtagacggcacacaccagtag

SEQ ID NO: 120591 - DNA, 25 bp, SARS Virus
cgggtagacggaccacaccagtagt

SEQ ID NO: 120592 - DNA, 25 bp, SARS Virus
gggtagacggaacacaccagtagta

SEQ ID NO: 120593 - DNA, 25 bp, SARS Virus
ggtagacggaacccaccagtagtac

SEQ ID NO: 120594 - DNA, 25 bp, SARS Virus
gtagacggaacacaccagtagtact

SEQ ID NO: 120595 - DNA, 25 bp, SARS Virus
tagacggaacaccccagtagtactc

SEQ ID NO: 120596 - DNA, 25 bp, SARS Virus
agacggaacacaccagtagtactca

SEQ ID NO: 120597 - DNA, 25 bp, SARS Virus
gacggaacacaccagtagtactcac

SEQ ID NO: 120598 - DNA, 25 bp, SARS Virus
acggaacacacccgtagtactcaca

SEQ ID NO: 120599 - DNA, 25 bp, SARS Virus
cggaacacaccactagtactcacaa

SEQ ID NO: 120600 - DNA, 25 bp, SARS Virus
ggaacacaccagcagtactcacaaa

SEQ ID NO: 120601 - DNA, 25 bp, SARS Virus
gaacacaccagtcgtactcacaaat

SEQ ID NO: 120602 - DNA, 25 bp, SARS Virus
aacacaccagtactactcacaaata

SEQ ID NO: 120603 - DNA, 25 bp, SARS Virus
acacaccagtagcactcacaaatac

SEQ ID NO: 120604 - DNA, 25 bp, SARS Virus
cacaccagtagtcctcacaaatacg

SEQ ID NO: 120605 - DNA, 25 bp, SARS Virus
acaccagtagtactcacaaatacgg

SEQ ID NO: 120606 - DNA, 25 bp, SARS Virus
caccagtagtacccacaaatacgga

SEQ ID NO: 120607 - DNA, 25 bp, SARS Virus
accagtagtactcacaaatacggac

SEQ ID NO: 120608 - DNA, 25 bp, SARS Virus
ccagtagtactcccaaatacggact

SEQ ID NO: 120609 - DNA, 25 bp, SARS Virus
cagtagtactcacaaatacggactc

SEQ ID NO: 120610 - DNA, 25 bp, SARS Virus
agtagtactcaccaatacggactca

SEQ ID NO: 120611 - DNA, 25 bp, SARS Virus
gtagtactcacacatacggactcaa

SEQ ID NO: 120612 - DNA, 25 bp, SARS Virus
tagtactcacaactacggactcaac

SEQ ID NO: 120613 - DNA, 25 bp, SARS Virus
agtactcacaaacacggactcaact

SEQ ID NO: 120614 - DNA, 25 bp, SARS Virus
gtactcacaaatccggactcaactt

SEQ ID NO: 120615 - DNA, 25 bp, SARS Virus
tactcacaaatacggactcaactta

SEQ ID NO: 120616 - DNA, 25 bp, SARS Virus
actcacaaataccgactcaacttag

SEQ ID NO: 120617 - DNA, 25 bp, SARS Virus
ctcacaaatacgcactcaacttagt

SEQ ID NO: 120618 - DNA, 25 bp, SARS Virus
tcacaaatacggcctcaacttagtc

SEQ ID NO: 120619 - DNA, 25 bp, SARS Virus
cacaaatacggactcaacttagtcg

SEQ ID NO: 120620 - DNA, 25 bp, SARS Virus
acaaatacggacccaacttagtcgt

SEQ ID NO: 120621 - DNA, 25 bp, SARS Virus
caaatacggactcaacttagtcgtc

SEQ ID NO: 120622 - DNA, 25 bp, SARS Virus
aaatacggactccacttagtcgtct

SEQ ID NO: 120623 - DNA, 25 bp, SARS Virus
aatacggactcaccttagtcgtctt

SEQ ID NO: 120624 - DNA, 25 bp, SARS Virus
atacggactcaacttagtcgtcttc

SEQ ID NO: 120625 - DNA, 25 bp, SARS Virus
tacggactcaacctagtcgtcttcg

SEQ ID NO: 120626 - DNA, 25 bp, SARS Virus
acggactcaactcagtcgtcttcga

SEQ ID NO: 120627 - DNA, 25 bp, SARS Virus
cggactcaacttcgtcgtcttcgag

SEQ ID NO: 120628 - DNA, 25 bp, SARS Virus
ggactcaacttactcgtcttcgagg

SEQ ID NO: 120629 - DNA, 25 bp, SARS Virus
gactcaacttagccgtcttcgaggt

SEQ ID NO: 120630 - DNA, 25 bp, SARS Virus
actcaacttagtcgtcttcgaggtg

SEQ ID NO: 120631 - DNA, 25 bp, SARS Virus
ctcaacttagtcctcttcgaggtga

SEQ ID NO: 120632 - DNA, 25 bp, SARS Virus
tcaacttagtcgccttcgaggtgag

SEQ ID NO: 120633 - DNA, 25 bp, SARS Virus
caacttagtcgtcttcgaggtgagt

SEQ ID NO: 120634 - DNA, 25 bp, SARS Virus
aacttagtcgtcctcgaggtgagta

SEQ ID NO: 120635 - DNA, 25 bp, SARS Virus
acttagtcgtctccgaggtgagtac

SEQ ID NO: 120636 - DNA, 25 bp, SARS Virus
cttagtcgtcttcgaggtgagtacc

SEQ ID NO: 120637 - DNA, 25 bp, SARS Virus
ttagtcgtcttccaggtgagtacct

SEQ ID NO: 120638 - DNA, 25 bp, SARS Virus
tagtcgtcttcgcggtgagtacctt

SEQ ID NO: 120639 - DNA, 25 bp, SARS Virus
agtcgtcttcgacgtgagtacctta

SEQ ID NO: 120640 - DNA, 25 bp, SARS Virus
gtcgtcttcgagctgagtaccttaa

SEQ ID NO: 120641 - DNA, 25 bp, SARS Virus
tcgtcttcgaggcgagtaccttaaa

SEQ ID NO: 120642 - DNA, 25 bp, SARS Virus
cgtcttcgaggtcagtaccttaaaa

SEQ ID NO: 120643 - DNA, 25 bp, SARS Virus
gtcttcgaggtgcgtaccttaaaac

SEQ ID NO: 120644 - DNA, 25 bp, SARS Virus
tcttcgaggtgactaccttaaaact

SEQ ID NO: 120645 - DNA, 25 bp, SARS Virus
cttcgaggtgagcaccttaaaactt

SEQ ID NO: 120646 - DNA, 25 bp, SARS Virus
ttcgaggtgagtcccttaaaacttc

SEQ ID NO: 120647 - DNA, 25 bp, SARS Virus
tcgaggtgagtaccttaaaacttca

SEQ ID NO: 120648 - DNA, 25 bp, SARS Virus
cgaggtgagtaccttaaaacttcaa

SEQ ID NO: 120649 - DNA, 25 bp, SARS Virus
gaggtgagtaccctaaaacttcaac

SEQ ID NO: 120650 - DNA, 25 bp, SARS Virus
aggtgagtacctcaaaacttcaaca

SEQ ID NO: 120651 - DNA, 25 bp, SARS Virus
ggtgagtaccttcaaacttcaacag

SEQ ID NO: 120652 - DNA, 25 bp, SARS Virus
gtgagtaccttacaacttcaacaga

SEQ ID NO: 120653 - DNA, 25 bp, SARS Virus
tgagtaccttaacacttcaacagac

SEQ ID NO: 120654 - DNA, 25 bp, SARS Virus
gagtaccttaaaccttcaacagacc

SEQ ID NO: 120655 - DNA, 25 bp, SARS Virus
agtaccttaaaacttcaacagacct

SEQ ID NO: 120656 - DNA, 25 bp, SARS Virus
gtaccttaaaacctcaacagacctc

SEQ ID NO: 120657 - DNA, 25 bp, SARS Virus
taccttaaaactccaacagacctct

SEQ ID NO: 120658 - DNA, 25 bp, SARS Virus
accttaaaacttcaacagacctctt

SEQ ID NO: 120659 - DNA, 25 bp, SARS Virus
ccttaaaacttccacagacctcttt

SEQ ID NO: 120660 - DNA, 25 bp, SARS Virus
cttaaaacttcaccagacctcttta

SEQ ID NO: 120661 - DNA, 25 bp, SARS Virus
ttaaaacttcaacagacctctttag

SEQ ID NO: 120662 - DNA, 25 bp, SARS Virus
taaaacttcaaccgacctctttagt

SEQ ID NO: 120663 - DNA, 25 bp, SARS Virus
aaaacttcaacacacctctttagta

SEQ ID NO: 120664 - DNA, 25 bp, SARS Virus
aaacttcaacagccctctttagtag

SEQ ID NO: 120665 - DNA, 25 bp, SARS Virus
aacttcaacagacctctttagtagg

SEQ ID NO: 120666 - DNA, 25 bp, SARS Virus
acttcaacagacctctttagtaggt

SEQ ID NO: 120667 - DNA, 25 bp, SARS Virus
cttcaacagacccctttagtaggta

SEQ ID NO: 120668 - DNA, 25 bp, SARS Virus
ttcaacagacctctttagtaggtac

SEQ ID NO: 120669 - DNA, 25 bp, SARS Virus
tcaacagacctccttagtaggtaca

SEQ ID NO: 120670 - DNA, 25 bp, SARS Virus
caacagacctctctagtaggtacag

SEQ ID NO: 120671 - DNA, 25 bp, SARS Virus
aacagacctcttcagtaggtacagt

SEQ ID NO: 120672 - DNA, 25 bp, SARS Virus
acagacctctttcgtaggtacagtc

SEQ ID NO: 120673 - DNA, 25 bp, SARS Virus
cagacctctttactaggtacagtcg

SEQ ID NO: 120674 - DNA, 25 bp, SARS Virus
agacctctttagcaggtacagtcgg

SEQ ID NO: 120675 - DNA, 25 bp, SARS Virus
gacctctttagtcggtacagtcggc

SEQ ID NO: 120676 - DNA, 25 bp, SARS Virus
acctctttagtacgtacagtcggcg

SEQ ID NO: 120677 - DNA, 25 bp, SARS Virus
cctctttagtagctacagtcggcgt

SEQ ID NO: 120678 - DNA, 25 bp, SARS Virus
ctctttagtaggcacagtcggcgtc

SEQ ID NO: 120679 - DNA, 25 bp, SARS Virus
tctttagtaggtccagtcggcgtcc

SEQ ID NO: 120680 - DNA, 25 bp, SARS Virus
ctttagtaggtacagtcggcgtcct

SEQ ID NO: 120681 - DNA, 25 bp, SARS Virus
tttagtaggtaccgtcggcgtcctt

SEQ ID NO: 120682 - DNA, 25 bp, SARS Virus
ttagtaggtacactcggcgtccttc

SEQ ID NO: 120683 - DNA, 25 bp, SARS Virus
tagtaggtacagccggcgtccttct

SEQ ID NO: 120684 - DNA, 25 bp, SARS Virus
agtaggtacagtcggcgtccttctt

SEQ ID NO: 120685 - DNA, 25 bp, SARS Virus
gtaggtacagtccgcgtccttcttc

SEQ ID NO: 120686 - DNA, 25 bp, SARS Virus
taggtacagtcgccgtccttcttct

SEQ ID NO: 120687 - DNA, 25 bp, SARS Virus
aggtacagtcggcgtccttcttctc

SEQ ID NO: 120688 - DNA, 25 bp, SARS Virus
ggtacagtcggcctccttcttctca

SEQ ID NO: 120689 - DNA, 25 bp, SARS Virus
gtacagtcggcgcccttcttctcag

SEQ ID NO: 120690 - DNA, 25 bp, SARS Virus
tacagtcggcgtccttcttctcagt

SEQ ID NO: 120691 - DNA, 25 bp, SARS Virus
acagtcggcgtccttcttctcagtg

SEQ ID NO: 120692 - DNA, 25 bp, SARS Virus
cagtcggcgtccctcttctcagtgt

SEQ ID NO: 120693 - DNA, 25 bp, SARS Virus
agtcggcgtcctccttctcagtgtc

SEQ ID NO: 120694 - DNA, 25 bp, SARS Virus
gtcggcgtccttcttctcagtgtca

SEQ ID NO: 120695 - DNA, 25 bp, SARS Virus
tcggcgtccttcctctcagtgtcac

SEQ ID NO: 120696 - DNA, 25 bp, SARS Virus
cggcgtccttctcctcagtgtcacc

SEQ ID NO: 120697 - DNA, 25 bp, SARS Virus
ggcgtccttcttctcagtgtcaccc

SEQ ID NO: 120698 - DNA, 25 bp, SARS Virus
gcgtccttcttcccagtgtcacccg

SEQ ID NO: 120699 - DNA, 25 bp, SARS Virus
cgtccttcttctcagtgtcacccga

SEQ ID NO: 120700 - DNA, 25 bp, SARS Virus
gtccttcttctccgtgtcacccgac

SEQ ID NO: 120701 - DNA, 25 bp, SARS Virus
tccttcttctcactgtcacccgacg

SEQ ID NO: 120702 - DNA, 25 bp, SARS Virus
ccttcttctcagcgtcacccgacga

SEQ ID NO: 120703 - DNA, 25 bp, SARS Virus
cttcttctcagtctcacccgacgaa

SEQ ID NO: 120704 - DNA, 25 bp, SARS Virus
ttcttctcagtgccacccgacgaag

SEQ ID NO: 120705 - DNA, 25 bp, SARS Virus
tcttctcagtgtcacccgacgaaga

SEQ ID NO: 120706 - DNA, 25 bp, SARS Virus
cttctcagtgtcccccgacgaagaa

SEQ ID NO: 120707 - DNA, 25 bp, SARS Virus
ttctcagtgtcacccgacgaagaaa

SEQ ID NO: 120708 - DNA, 25 bp, SARS Virus
tctcagtgtcacccgacgaagaaaa

SEQ ID NO: 120709 - DNA, 25 bp, SARS Virus
ctcagtgtcacccgacgaagaaaac

SEQ ID NO: 120710 - DNA, 25 bp, SARS Virus
tcagtgtcaccccacgaagaaaaca

SEQ ID NO: 120711 - DNA, 25 bp, SARS Virus
cagtgtcacccgccgaagaaaacag

SEQ ID NO: 120712 - DNA, 25 bp, SARS Virus
agtgtcacccgacgaagaaaacaga

SEQ ID NO: 120713 - DNA, 25 bp, SARS Virus
gtgtcacccgaccaagaaaacagag

SEQ ID NO: 120714 - DNA, 25 bp, SARS Virus
tgtcacccgacgcagaaaacagaga

SEQ ID NO: 120715 - DNA, 25 bp, SARS Virus
gtcacccgacgacgaaaacagagac

SEQ ID NO: 120716 - DNA, 25 bp, SARS Virus
tcacccgacgaacaaaacagagacg

SEQ ID NO: 120717 - DNA, 25 bp, SARS Virus
cacccgacgaagcaaacagagacgc

SEQ ID NO: 120718 - DNA, 25 bp, SARS Virus
acccgacgaagacaacagagacgcc

SEQ ID NO: 120719 - DNA, 25 bp, SARS Virus
cccgacgaagaacacagagacgccg

SEQ ID NO: 120720 - DNA, 25 bp, SARS Virus
ccgacgaagaaaccagagacgccgt

SEQ ID NO: 120721 - DNA, 25 bp, SARS Virus
cgacgaagaaaacagagacgccgtt

SEQ ID NO: 120722 - DNA, 25 bp, SARS Virus
gacgaagaaaaccgagacgccgttt

SEQ ID NO: 120723 - DNA, 25 bp, SARS Virus
acgaagaaaacacagacgccgtttc

SEQ ID NO: 120724 - DNA, 25 bp, SARS Virus
cgaagaaaacagcgacgccgtttcc

SEQ ID NO: 120725 - DNA, 25 bp, SARS Virus
gaagaaaacagacacgccgtttccg

SEQ ID NO: 120726 - DNA, 25 bp, SARS Virus
aagaaaacagagccgccgtttccga

SEQ ID NO: 120727 - DNA, 25 bp, SARS Virus
agaaaacagagacgccgtttccgac

SEQ ID NO: 120728 - DNA, 25 bp, SARS Virus
gaaaacagagaccccgtttccgact

SEQ ID NO: 120729 - DNA, 25 bp, SARS Virus
aaaacagagacgccgtttccgactc

SEQ ID NO: 120730 - DNA, 25 bp, SARS Virus
aaacagagacgccgtttccgactcg

SEQ ID NO: 120731 - DNA, 25 bp, SARS Virus
aacagagacgccctttccgactcga

SEQ ID NO: 120732 - DNA, 25 bp, SARS Virus
acagagacgccgcttccgactcgaa

SEQ ID NO: 120733 - DNA, 25 bp, SARS Virus
cagagacgccgtctccgactcgaag

SEQ ID NO: 120734 - DNA, 25 bp, SARS Virus
agagacgccgttcccgactcgaagt

SEQ ID NO: 120735 - DNA, 25 bp, SARS Virus
gagacgccgtttccgactcgaagta

SEQ ID NO: 120736 - DNA, 25 bp, SARS Virus
agacgccgtttccgactcgaagtag

SEQ ID NO: 120737 - DNA, 25 bp, SARS Virus
gacgccgtttcccactcgaagtagt

SEQ ID NO: 120738 - DNA, 25 bp, SARS Virus
acgccgtttccgcctcgaagtagtc

SEQ ID NO: 120739 - DNA, 25 bp, SARS Virus
cgccgtttccgactcgaagtagtca

SEQ ID NO: 120740 - DNA, 25 bp, SARS Virus
gccgtttccgacccgaagtagtcag

SEQ ID NO: 120741 - DNA, 25 bp, SARS Virus
ccgtttccgactcgaagtagtcaga

SEQ ID NO: 120742 - DNA, 25 bp, SARS Virus
cgtttccgactccaagtagtcagaa

SEQ ID NO: 120743 - DNA, 25 bp, SARS Virus
gtttccgactcgcagtagtcagaaa

SEQ ID NO: 120744 - DNA, 25 bp, SARS Virus
tttccgactcgacgtagtcagaaaa

SEQ ID NO: 120745 - DNA, 25 bp, SARS Virus
ttccgactcgaactagtcagaaaaa

SEQ ID NO: 120746 - DNA, 25 bp, SARS Virus
tccgactcgaagcagtcagaaaaag

SEQ ID NO: 120747 - DNA, 25 bp, SARS Virus
ccgactcgaagtcgtcagaaaaaga

SEQ ID NO: 120748 - DNA, 25 bp, SARS Virus
cgactcgaagtactcagaaaaagaa

SEQ ID NO: 120749 - DNA, 25 bp, SARS Virus
gactcgaagtagccagaaaaagaaa

SEQ ID NO: 120750 - DNA, 25 bp, SARS Virus
actcgaagtagtcagaaaaagaaaa

SEQ ID NO: 120751 - DNA, 25 bp, SARS Virus
ctcgaagtagtccgaaaaagaaaaa

SEQ ID NO: 120752 - DNA, 25 bp, SARS Virus
tcgaagtagtcacaaaaagaaaaac

SEQ ID NO: 120753 - DNA, 25 bp, SARS Virus
cgaagtagtcagcaaaagaaaaaca

SEQ ID NO: 120754 - DNA, 25 bp, SARS Virus
gaagtagtcagacaaagaaaaacag

SEQ ID NO: 120755 - DNA, 25 bp, SARS Virus
aagtagtcagaacaagaaaaacagg

SEQ ID NO: 120756 - DNA, 25 bp, SARS Virus
agtagtcagaaacagaaaaacagga

SEQ ID NO: 120757 - DNA, 25 bp, SARS Virus
gtagtcagaaaacgaaaaacaggaa

SEQ ID NO: 120758 - DNA, 25 bp, SARS Virus
tagtcagaaaaacaaaaacaggaaa

SEQ ID NO: 120759 - DNA, 25 bp, SARS Virus
agtcagaaaaagcaaaacaggaaaa

SEQ ID NO: 120760 - DNA, 25 bp, SARS Virus
gtcagaaaaagacaaacaggaaaaa

SEQ ID NO: 120761 - DNA, 25 bp, SARS Virus
tcagaaaaagaacaacaggaaaaat

SEQ ID NO: 120762 - DNA, 25 bp, SARS Virus
cagaaaaagaaacacaggaaaaatc

SEQ ID NO: 120763 - DNA, 25 bp, SARS Virus
agaaaaagaaaaccaggaaaaatcc

SEQ ID NO: 120764 - DNA, 25 bp, SARS Virus
gaaaaagaaaaacaggaaaaatccg

SEQ ID NO: 120765 - DNA, 25 bp, SARS Virus
aaaaagaaaaaccggaaaaatccga

SEQ ID NO: 120766 - DNA, 25 bp, SARS Virus
aaaagaaaaacacgaaaaatccgag

SEQ ID NO: 120767 - DNA, 25 bp, SARS Virus
aaagaaaaacagcaaaaatccgaga

SEQ ID NO: 120768 - DNA, 25 bp, SARS Virus
aagaaaaacaggcaaaatccgagac

SEQ ID NO: 120769 - DNA, 25 bp, SARS Virus
agaaaaacaggacaaatccgagaca

SEQ ID NO: 120770 - DNA, 25 bp, SARS Virus
gaaaaacaggaacaatccgagacaa

SEQ ID NO: 120771 - DNA, 25 bp, SARS Virus
aaaaacaggaaacatccgagacaac

SEQ ID NO: 120772 - DNA, 25 bp, SARS Virus
aaaacaggaaaactccgagacaacc

SEQ ID NO: 120773 - DNA, 25 bp, SARS Virus
aaacaggaaaaacccgagacaacca

SEQ ID NO: 120774 - DNA, 25 bp, SARS Virus
aacaggaaaaatccgagacaaccac

SEQ ID NO: 120775 - DNA, 25 bp, SARS Virus
acaggaaaaatccgagacaaccacc

SEQ ID NO: 120776 - DNA, 25 bp, SARS Virus
caggaaaaatcccagacaaccaccc

SEQ ID NO: 120777 - DNA, 25 bp, SARS Virus
aggaaaaatccgcgacaaccaccct

SEQ ID NO: 120778 - DNA, 25 bp, SARS Virus
ggaaaaatccgacacaaccaccctt

SEQ ID NO: 120779 - DNA, 25 bp, SARS Virus
gaaaaatccgagccaaccaccctta

SEQ ID NO: 120780 - DNA, 25 bp, SARS Virus
aaaaatccgagacaaccacccttac

SEQ ID NO: 120781 - DNA, 25 bp, SARS Virus
aaaatccgagaccaccacccttaca

SEQ ID NO: 120782 - DNA, 25 bp, SARS Virus
aaatccgagacacccacccttacaa

SEQ ID NO: 120783 - DNA, 25 bp, SARS Virus
aatccgagacaaccacccttacaaa

SEQ ID NO: 120784 - DNA, 25 bp, SARS Virus
atccgagacaaccacccttacaaaa

SEQ ID NO: 120785 - DNA, 25 bp, SARS Virus
tccgagacaaccccccttacaaaac

SEQ ID NO: 120786 - DNA, 25 bp, SARS Virus
ccgagacaaccacccttacaaaaca

SEQ ID NO: 120787 - DNA, 25 bp, SARS Virus
cgagacaaccacccttacaaaacat

SEQ ID NO: 120788 - DNA, 25 bp, SARS Virus
gagacaaccacccttacaaaacata

SEQ ID NO: 120789 - DNA, 25 bp, SARS Virus
agacaaccacccctacaaaacatac

SEQ ID NO: 120790 - DNA, 25 bp, SARS Virus
gacaaccaccctcacaaaacatacg

SEQ ID NO: 120791 - DNA, 25 bp, SARS Virus
acaaccacccttccaaaacatacgc

SEQ ID NO: 120792 - DNA, 25 bp, SARS Virus
caaccacccttacaaaacatacgca

SEQ ID NO: 120793 - DNA, 25 bp, SARS Virus
aaccacccttaccaaacatacgcag

SEQ ID NO: 120794 - DNA, 25 bp, SARS Virus
accacccttacacaacatacgcagt

SEQ ID NO: 120795 - DNA, 25 bp, SARS Virus
ccacccttacaacacatacgcagtt

SEQ ID NO: 120796 - DNA, 25 bp, SARS Virus
cacccttacaaaccatacgcagtta

SEQ ID NO: 120797 - DNA, 25 bp, SARS Virus
acccttacaaaacatacgcagttac

SEQ ID NO: 120798 - DNA, 25 bp, SARS Virus
cccttacaaaacctacgcagttaca

SEQ ID NO: 120799 - DNA, 25 bp, SARS Virus
ccttacaaaacacacgcagttacac

SEQ ID NO: 120800 - DNA, 25 bp, SARS Virus
cttacaaaacatccgcagttacacg

SEQ ID NO: 120801 - DNA, 25 bp, SARS Virus
ttacaaaacatacgcagttacacga

SEQ ID NO: 120802 - DNA, 25 bp, SARS Virus
tacaaaacatacccagttacacgaa

SEQ ID NO: 120803 - DNA, 25 bp, SARS Virus
acaaaacatacgcagttacacgaac

SEQ ID NO: 120804 - DNA, 25 bp, SARS Virus
caaaacatacgccgttacacgaaca

SEQ ID NO: 120805 - DNA, 25 bp, SARS Virus
aaaacatacgcacttacacgaacaa

SEQ ID NO: 120806 - DNA, 25 bp, SARS Virus
aaacatacgcagctacacgaacaag

SEQ ID NO: 120807 - DNA, 25 bp, SARS Virus
aacatacgcagtcacacgaacaagt

SEQ ID NO: 120808 - DNA, 25 bp, SARS Virus
acatacgcagttccacgaacaagtc

SEQ ID NO: 120809 - DNA, 25 bp, SARS Virus
catacgcagttacacgaacaagtcg

SEQ ID NO: 120810 - DNA, 25 bp, SARS Virus
atacgcagttacccgaacaagtcgt

SEQ ID NO: 120811 - DNA, 25 bp, SARS Virus
tacgcagttacacgaacaagtcgtc

SEQ ID NO: 120812 - DNA, 25 bp, SARS Virus
acgcagttacaccaacaagtcgtca

SEQ ID NO: 120813 - DNA, 25 bp, SARS Virus
cgcagttacacgcacaagtcgtcat

SEQ ID NO: 120814 - DNA, 25 bp, SARS Virus
gcagttacacgaccaagtcgtcata

SEQ ID NO: 120815 - DNA, 25 bp, SARS Virus
cagttacacgaacaagtcgtcatac

SEQ ID NO: 120816 - DNA, 25 bp, SARS Virus
agttacacgaaccagtcgtcatact

SEQ ID NO: 120817 - DNA, 25 bp, SARS Virus
gttacacgaacacgtcgtcatactg

SEQ ID NO: 120818 - DNA, 25 bp, SARS Virus
ttacacgaacaactcgtcatactgc

SEQ ID NO: 120819 - DNA, 25 bp, SARS Virus
tacacgaacaagccgtcatactgca

SEQ ID NO: 120820 - DNA, 25 bp, SARS Virus
acacgaacaagtcgtcatactgcaa

SEQ ID NO: 120821 - DNA, 25 bp, SARS Virus
cacgaacaagtcctcatactgcaac

SEQ ID NO: 120822 - DNA, 25 bp, SARS Virus
acgaacaagtcgccatactgcaaca

SEQ ID NO: 120823 - DNA, 25 bp, SARS Virus
cgaacaagtcgtcatactgcaacag

SEQ ID NO: 120824 - DNA, 25 bp, SARS Virus
gaacaagtcgtcctactgcaacaga

SEQ ID NO: 120825 - DNA, 25 bp, SARS Virus
aacaagtcgtcacactgcaacagaa

SEQ ID NO: 120826 - DNA, 25 bp, SARS Virus
acaagtcgtcatcctgcaacagaaa

SEQ ID NO: 120827 - DNA, 25 bp, SARS Virus
caagtcgtcatactgcaacagaaac

SEQ ID NO: 120828 - DNA, 25 bp, SARS Virus
aagtcgtcataccgcaacagaaact

SEQ ID NO: 120829 - DNA, 25 bp, SARS Virus
agtcgtcatactccaacagaaactt

SEQ ID NO: 120830 - DNA, 25 bp, SARS Virus
gtcgtcatactgcaacagaaactta

SEQ ID NO: 120831 - DNA, 25 bp, SARS Virus
tcgtcatactgccacagaaacttaa

SEQ ID NO: 120832 - DNA, 25 bp, SARS Virus
cgtcatactgcaccagaaacttaac

SEQ ID NO: 120833 - DNA, 25 bp, SARS Virus
gtcatactgcaacagaaacttaaca

SEQ ID NO: 120834 - DNA, 25 bp, SARS Virus
tcatactgcaaccgaaacttaacac

SEQ ID NO: 120835 - DNA, 25 bp, SARS Virus
catactgcaacacaaacttaacacc

SEQ ID NO: 120836 - DNA, 25 bp, SARS Virus
atactgcaacagcaacttaacacct

SEQ ID NO: 120837 - DNA, 25 bp, SARS Virus
tactgcaacagacacttaacaccta

SEQ ID NO: 120838 - DNA, 25 bp, SARS Virus
actgcaacagaaccttaacacctag

SEQ ID NO: 120839 - DNA, 25 bp, SARS Virus
ctgcaacagaaacttaacacctaga

SEQ ID NO: 120840 - DNA, 25 bp, SARS Virus
tgcaacagaaacctaacacctagaa

SEQ ID NO: 120841 - DNA, 25 bp, SARS Virus
gcaacagaaactcaacacctagaaa

SEQ ID NO: 120842 - DNA, 25 bp, SARS Virus
caacagaaacttcacacctagaaac

SEQ ID NO: 120843 - DNA, 25 bp, SARS Virus
aacagaaacttaccacctagaaaca

SEQ ID NO: 120844 - DNA, 25 bp, SARS Virus
acagaaacttaacacctagaaacag

SEQ ID NO: 120845 - DNA, 25 bp, SARS Virus
cagaaacttaacccctagaaacagt

SEQ ID NO: 120846 - DNA, 25 bp, SARS Virus
agaaacttaacacctagaaacagta

SEQ ID NO: 120847 - DNA, 25 bp, SARS Virus
gaaacttaacacctagaaacagtag

SEQ ID NO: 120848 - DNA, 25 bp, SARS Virus
aaacttaacacccagaaacagtagg

SEQ ID NO: 120849 - DNA, 25 bp, SARS Virus
aacttaacacctcgaaacagtaggt

SEQ ID NO: 120850 - DNA, 25 bp, SARS Virus
acttaacacctacaaacagtaggtt

SEQ ID NO: 120851 - DNA, 25 bp, SARS Virus
cttaacacctagcaacagtaggtta

SEQ ID NO: 120852 - DNA, 25 bp, SARS Virus
ttaacacctagacacagtaggttaa

SEQ ID NO: 120853 - DNA, 25 bp, SARS Virus
taacacctagaaccagtaggttaaa

SEQ ID NO: 120854 - DNA, 25 bp, SARS Virus
aacacctagaaacagtaggttaaat

SEQ ID NO: 120855 - DNA, 25 bp, SARS Virus
acacctagaaaccgtaggttaaatt

SEQ ID NO: 120856 - DNA, 25 bp, SARS Virus
cacctagaaacactaggttaaatta

SEQ ID NO: 120857 - DNA, 25 bp, SARS Virus
acctagaaacagcaggttaaattac

SEQ ID NO: 120858 - DNA, 25 bp, SARS Virus
cctagaaacagtcggttaaattacc

SEQ ID NO: 120859 - DNA, 25 bp, SARS Virus
ctagaaacagtacgttaaattaccg

SEQ ID NO: 120860 - DNA, 25 bp, SARS Virus
tagaaacagtagcttaaattaccga

SEQ ID NO: 120861 - DNA, 25 bp, SARS Virus
agaaacagtaggctaaattaccgag

SEQ ID NO: 120862 - DNA, 25 bp, SARS Virus
gaaacagtaggtcaaattaccgagg

SEQ ID NO: 120863 - DNA, 25 bp, SARS Virus
aaacagtaggttcaattaccgaggt

SEQ ID NO: 120864 - DNA, 25 bp, SARS Virus
aacagtaggttacattaccgaggta

SEQ ID NO: 120865 - DNA, 25 bp, SARS Virus
acagtaggttaacttaccgaggtac

SEQ ID NO: 120866 - DNA, 25 bp, SARS Virus
cagtaggttaaactaccgaggtact

SEQ ID NO: 120867 - DNA, 25 bp, SARS Virus
agtaggttaaatcaccgaggtacta

SEQ ID NO: 120868 - DNA, 25 bp, SARS Virus
gtaggttaaattcccgaggtactat

SEQ ID NO: 120869 - DNA, 25 bp, SARS Virus
taggttaaattaccgaggtactatt

SEQ ID NO: 120870 - DNA, 25 bp, SARS Virus
aggttaaattaccgaggtactattc

SEQ ID NO: 120871 - DNA, 25 bp, SARS Virus
ggttaaattacccaggtactattca

SEQ ID NO: 120872 - DNA, 25 bp, SARS Virus
gttaaattaccgcggtactattcag

SEQ ID NO: 120873 - DNA, 25 bp, SARS Virus
ttaaattaccgacgtactattcagt

SEQ ID NO: 120874 - DNA, 25 bp, SARS Virus
taaattaccgagctactattcagtc

SEQ ID NO: 120875 - DNA, 25 bp, SARS Virus
aaattaccgaggcactattcagtcg

SEQ ID NO: 120876 - DNA, 25 bp, SARS Virus
aattaccgaggtcctattcagtcgg

SEQ ID NO: 120877 - DNA, 25 bp, SARS Virus
attaccgaggtactattcagtcggt

SEQ ID NO: 120878 - DNA, 25 bp, SARS Virus
ttaccgaggtaccattcagtcggta

SEQ ID NO: 120879 - DNA, 25 bp, SARS Virus
taccgaggtactcttcagtcggtac

SEQ ID NO: 120880 - DNA, 25 bp, SARS Virus
accgaggtactactcagtcggtaca

SEQ ID NO: 120881 - DNA, 25 bp, SARS Virus
ccgaggtactatccagtcggtacaa

SEQ ID NO: 120882 - DNA, 25 bp, SARS Virus
cgaggtactattcagtcggtacaag

SEQ ID NO: 120883 - DNA, 25 bp, SARS Virus
gaggtactattccgtcggtacaagg

SEQ ID NO: 120884 - DNA, 25 bp, SARS Virus
aggtactattcactcggtacaaggg

SEQ ID NO: 120885 - DNA, 25 bp, SARS Virus
ggtactattcagccggtacaagggc

SEQ ID NO: 120886 - DNA, 25 bp, SARS Virus
gtactattcagtcggtacaagggct

SEQ ID NO: 120887 - DNA, 25 bp, SARS Virus
tactattcagtccgtacaagggctt

SEQ ID NO: 120888 - DNA, 25 bp, SARS Virus
actattcagtcgctacaagggcttc

SEQ ID NO: 120889 - DNA, 25 bp, SARS Virus
ctattcagtcggcacaagggcttcc

SEQ ID NO: 120890 - DNA, 25 bp, SARS Virus
tattcagtcggtccaagggcttcca

SEQ ID NO: 120891 - DNA, 25 bp, SARS Virus
attcagtcggtacaagggcttccac

SEQ ID NO: 120892 - DNA, 25 bp, SARS Virus
ttcagtcggtaccagggcttccaca

SEQ ID NO: 120893 - DNA, 25 bp, SARS Virus
tcagtcggtacacgggcttccacac

SEQ ID NO: 120894 - DNA, 25 bp, SARS Virus
cagtcggtacaacggcttccacact

SEQ ID NO: 120895 - DNA, 25 bp, SARS Virus
agtcggtacaagcgcttccacactg

SEQ ID NO: 120896 - DNA, 25 bp, SARS Virus
gtcggtacaaggccttccacactga

SEQ ID NO: 120897 - DNA, 25 bp, SARS Virus
tcggtacaagggcttccacactgaa

SEQ ID NO: 120898 - DNA, 25 bp, SARS Virus
cggtacaagggcctccacactgaag

SEQ ID NO: 120899 - DNA, 25 bp, SARS Virus
ggtacaagggctcccacactgaagg

SEQ ID NO: 120900 - DNA, 25 bp, SARS Virus
gtacaagggcttccacactgaaggt

SEQ ID NO: 120901 - DNA, 25 bp, SARS Virus
tacaagggcttccacactgaaggta

SEQ ID NO: 120902 - DNA, 25 bp, SARS Virus
acaagggcttccccactgaaggtac

SEQ ID NO: 120903 - DNA, 25 bp, SARS Virus
caagggcttccacactgaaggtacg

SEQ ID NO: 120904 - DNA, 25 bp, SARS Virus
aagggcttccaccctgaaggtacgg

SEQ ID NO: 120905 - DNA, 25 bp, SARS Virus
agggcttccacactgaaggtacggt

SEQ ID NO: 120906 - DNA, 25 bp, SARS Virus
gggcttccacaccgaaggtacggtt

SEQ ID NO: 120907 - DNA, 25 bp, SARS Virus
ggcttccacactcaaggtacggtta

SEQ ID NO: 120908 - DNA, 25 bp, SARS Virus
gcttccacactgcaggtacggttac

SEQ ID NO: 120909 - DNA, 25 bp, SARS Virus
cttccacactgacggtacggttacg

SEQ ID NO: 120910 - DNA, 25 bp, SARS Virus
ttccacactgaacgtacggttacgc

SEQ ID NO: 120911 - DNA, 25 bp, SARS Virus
tccacactgaagctacggttacgca

SEQ ID NO: 120912 - DNA, 25 bp, SARS Virus
ccacactgaaggcacggttacgcac

SEQ ID NO: 120913 - DNA, 25 bp, SARS Virus
cacactgaaggtccggttacgcact

SEQ ID NO: 120914 - DNA, 25 bp, SARS Virus
acactgaaggtacggttacgcactg

SEQ ID NO: 120915 - DNA, 25 bp, SARS Virus
cactgaaggtaccgttacgcactgt

SEQ ID NO: 120916 - DNA, 25 bp, SARS Virus
actgaaggtacgcttacgcactgta

SEQ ID NO: 120917 - DNA, 25 bp, SARS Virus
ctgaaggtacggctacgcactgtaa

SEQ ID NO: 120918 - DNA, 25 bp, SARS Virus
tgaaggtacggtcacgcactgtaag

SEQ ID NO: 120919 - DNA, 25 bp, SARS Virus
gaaggtacggttccgcactgtaagg

SEQ ID NO: 120920 - DNA, 25 bp, SARS Virus
aaggtacggttacgcactgtaaggt

SEQ ID NO: 120921 - DNA, 25 bp, SARS Virus
aggtacggttacccactgtaaggtt

SEQ ID NO: 120922 - DNA, 25 bp, SARS Virus
ggtacggttacgcactgtaaggttt

SEQ ID NO: 120923 - DNA, 25 bp, SARS Virus
gtacggttacgccctgtaaggtttc

SEQ ID NO: 120924 - DNA, 25 bp, SARS Virus
tacggttacgcactgtaaggtttct

SEQ ID NO: 120925 - DNA, 25 bp, SARS Virus
acggttacgcaccgtaaggtttctt

SEQ ID NO: 120926 - DNA, 25 bp, SARS Virus
cggttacgcactctaaggtttctta

SEQ ID NO: 120927 - DNA, 25 bp, SARS Virus
ggttacgcactgcaaggtttcttac

SEQ ID NO: 120928 - DNA, 25 bp, SARS Virus
gttacgcactgtcaggtttcttacg

SEQ ID NO: 120929 - DNA, 25 bp, SARS Virus
ttacgcactgtacggtttcttacgt

SEQ ID NO: 120930 - DNA, 25 bp, SARS Virus
tacgcactgtaacgtttcttacgtc

SEQ ID NO: 120931 - DNA, 25 bp, SARS Virus
acgcactgtaagctttcttacgtct

SEQ ID NO: 120932 - DNA, 25 bp, SARS Virus
cgcactgtaaggcttcttacgtctc

SEQ ID NO: 120933 - DNA, 25 bp, SARS Virus
gcactgtaaggtctcttacgtctcc

SEQ ID NO: 120934 - DNA, 25 bp, SARS Virus
cactgtaaggttccttacgtctccg

SEQ ID NO: 120935 - DNA, 25 bp, SARS Virus
actgtaaggtttcttacgtctccgt

SEQ ID NO: 120936 - DNA, 25 bp, SARS Virus
ctgtaaggtttcctacgtctccgtg

SEQ ID NO: 120937 - DNA, 25 bp, SARS Virus
tgtaaggtttctcacgtctccgtga

SEQ ID NO: 120938 - DNA, 25 bp, SARS Virus
gtaaggtttcttccgtctccgtgaa

SEQ ID NO: 120939 - DNA, 25 bp, SARS Virus
taaggtttcttacgtctccgtgaac

SEQ ID NO: 120940 - DNA, 25 bp, SARS Virus
aaggtttcttacctctccgtgaacc

SEQ ID NO: 120941 - DNA, 25 bp, SARS Virus
aggtttcttacgcctccgtgaacct

SEQ ID NO: 120942 - DNA, 25 bp, SARS Virus
ggtttcttacgtctccgtgaacctc

SEQ ID NO: 120943 - DNA, 25 bp, SARS Virus
gtttcttacgtccccgtgaacctcg

SEQ ID NO: 120944 - DNA, 25 bp, SARS Virus
tttcttacgtctccgtgaacctcgt

SEQ ID NO: 120945 - DNA, 25 bp, SARS Virus
ttcttacgtctccgtgaacctcgtt

SEQ ID NO: 120946 - DNA, 25 bp, SARS Virus
tcttacgtctccctgaacctcgttt

SEQ ID NO: 120947 - DNA, 25 bp, SARS Virus
cttacgtctccgcgaacctcgttta

SEQ ID NO: 120948 - DNA, 25 bp, SARS Virus
ttacgtctccgtcaacctcgtttaa

SEQ ID NO: 120949 - DNA, 25 bp, SARS Virus
tacgtctccgtgcacctcgtttaac

SEQ ID NO: 120950 - DNA, 25 bp, SARS Virus
acgtctccgtgaccctcgtttaaca

SEQ ID NO: 120951 - DNA, 25 bp, SARS Virus
cgtctccgtgaacctcgtttaacac

SEQ ID NO: 120952 - DNA, 25 bp, SARS Virus
gtctccgtgaacctcgtttaacacg

SEQ ID NO: 120953 - DNA, 25 bp, SARS Virus
tctccgtgaaccccgtttaacacgt

SEQ ID NO: 120954 - DNA, 25 bp, SARS Virus
ctccgtgaacctcgtttaacacgtt

SEQ ID NO: 120955 - DNA, 25 bp, SARS Virus
tccgtgaacctcctttaacacgtta

SEQ ID NO: 120956 - DNA, 25 bp, SARS Virus
ccgtgaacctcgcttaacacgttaa

SEQ ID NO: 120957 - DNA, 25 bp, SARS Virus
cgtgaacctcgtctaacacgttaaa

SEQ ID NO: 120958 - DNA, 25 bp, SARS Virus
gtgaacctcgttcaacacgttaaac

SEQ ID NO: 120959 - DNA, 25 bp, SARS Virus
tgaacctcgtttcacacgttaaacg

SEQ ID NO: 120960 - DNA, 25 bp, SARS Virus
gaacctcgtttaccacgttaaacgc

SEQ ID NO: 120961 - DNA, 25 bp, SARS Virus
aacctcgtttaacacgttaaacgcc

SEQ ID NO: 120962 - DNA, 25 bp, SARS Virus
acctcgtttaacccgttaaacgccg

SEQ ID NO: 120963 - DNA, 25 bp, SARS Virus
cctcgtttaacacgttaaacgccgg

SEQ ID NO: 120964 - DNA, 25 bp, SARS Virus
ctcgtttaacaccttaaacgccggt

SEQ ID NO: 120965 - DNA, 25 bp, SARS Virus
tcgtttaacacgctaaacgccggtt

SEQ ID NO: 120966 - DNA, 25 bp, SARS Virus
cgtttaacacgtcaaacgccggtta

SEQ ID NO: 120967 - DNA, 25 bp, SARS Virus
gtttaacacgttcaacgccggttac

SEQ ID NO: 120968 - DNA, 25 bp, SARS Virus
tttaacacgttacacgccggttaca

SEQ ID NO: 120969 - DNA, 25 bp, SARS Virus
ttaacacgttaaccgccggttacaa

SEQ ID NO: 120970 - DNA, 25 bp, SARS Virus
taacacgttaaacgccggttacaaa

SEQ ID NO: 120971 - DNA, 25 bp, SARS Virus
aacacgttaaaccccggttacaaac

SEQ ID NO: 120972 - DNA, 25 bp, SARS Virus
acacgttaaacgccggttacaaaca

SEQ ID NO: 120973 - DNA, 25 bp, SARS Virus
cacgttaaacgccggttacaaacat

SEQ ID NO: 120974 - DNA, 25 bp, SARS Virus
acgttaaacgcccgttacaaacatt

SEQ ID NO: 120975 - DNA, 25 bp, SARS Virus
cgttaaacgccgcttacaaacatta

SEQ ID NO: 120976 - DNA, 25 bp, SARS Virus
gttaaacgccggctacaaacattag

SEQ ID NO: 120977 - DNA, 25 bp, SARS Virus
ttaaacgccggtcacaaacattagt

SEQ ID NO: 120978 - DNA, 25 bp, SARS Virus
taaacgccggttccaaacattagtc

SEQ ID NO: 120979 - DNA, 25 bp, SARS Virus
aaacgccggttacaaacattagtca

SEQ ID NO: 120980 - DNA, 25 bp, SARS Virus
aacgccggttaccaacattagtcaa

SEQ ID NO: 120981 - DNA, 25 bp, SARS Virus
acgccggttacacacattagtcaag

SEQ ID NO: 120982 - DNA, 25 bp, SARS Virus
cgccggttacaaccattagtcaagg

SEQ ID NO: 120983 - DNA, 25 bp, SARS Virus
gccggttacaaacattagtcaagga

SEQ ID NO: 120984 - DNA, 25 bp, SARS Virus
ccggttacaaaccttagtcaaggaa

SEQ ID NO: 120985 - DNA, 25 bp, SARS Virus
cggttacaaacactagtcaaggaac

SEQ ID NO: 120986 - DNA, 25 bp, SARS Virus
ggttacaaacatcagtcaaggaaca

SEQ ID NO: 120987 - DNA, 25 bp, SARS Virus
gttacaaacattcgtcaaggaacag

SEQ ID NO: 120988 - DNA, 25 bp, SARS Virus
ttacaaacattactcaaggaacaga

SEQ ID NO: 120989 - DNA, 25 bp, SARS Virus
tacaaacattagccaaggaacagac

SEQ ID NO: 120990 - DNA, 25 bp, SARS Virus
acaaacattagtcaaggaacagact

SEQ ID NO: 120991 - DNA, 25 bp, SARS Virus
caaacattagtccaggaacagacta

SEQ ID NO: 120992 - DNA, 25 bp, SARS Virus
aaacattagtcacggaacagactaa

SEQ ID NO: 120993 - DNA, 25 bp, SARS Virus
aacattagtcaacgaacagactaat

SEQ ID NO: 120994 - DNA, 25 bp, SARS Virus
acattagtcaagcaacagactaatc

SEQ ID NO: 120995 - DNA, 25 bp, SARS Virus
cattagtcaaggcacagactaatcc

SEQ ID NO: 120996 - DNA, 25 bp, SARS Virus
attagtcaaggaccagactaatcca

SEQ ID NO: 120997 - DNA, 25 bp, SARS Virus
ttagtcaaggaacagactaatccag

SEQ ID NO: 120998 - DNA, 25 bp, SARS Virus
tagtcaaggaaccgactaatccaga

SEQ ID NO: 120999 - DNA, 25 bp, SARS Virus
agtcaaggaacacactaatccagaa

SEQ ID NO: 121000 - DNA, 25 bp, SARS Virus
gtcaaggaacagcctaatccagaac

SEQ ID NO: 121001 - DNA, 25 bp, SARS Virus
tcaaggaacagactaatccagaacc

SEQ ID NO: 121002 - DNA, 25 bp, SARS Virus
caaggaacagaccaatccagaacca

SEQ ID NO: 121003 - DNA, 25 bp, SARS Virus
aaggaacagactcatccagaaccag

SEQ ID NO: 121004 - DNA, 25 bp, SARS Virus
aggaacagactactccagaaccagg

SEQ ID NO: 121005 - DNA, 25 bp, SARS Virus
ggaacagactaacccagaaccaggg

SEQ ID NO: 121006 - DNA, 25 bp, SARS Virus
gaacagactaatccagaaccagggg

SEQ ID NO: 121007 - DNA, 25 bp, SARS Virus
aacagactaatccagaaccaggggc

SEQ ID NO: 121008 - DNA, 25 bp, SARS Virus
acagactaatcccgaaccaggggct

SEQ ID NO: 121009 - DNA, 25 bp, SARS Virus
cagactaatccacaaccaggggctt

SEQ ID NO: 121010 - DNA, 25 bp, SARS Virus
agactaatccagcaccaggggcttt

SEQ ID NO: 121011 - DNA, 25 bp, SARS Virus
gactaatccagacccaggggcttta

SEQ ID NO: 121012 - DNA, 25 bp, SARS Virus
actaatccagaaccaggggctttaa

SEQ ID NO: 121013 - DNA, 25 bp, SARS Virus
ctaatccagaaccaggggctttaaa

SEQ ID NO: 121014 - DNA, 25 bp, SARS Virus
taatccagaacccggggctttaaag

SEQ ID NO: 121015 - DNA, 25 bp, SARS Virus
aatccagaaccacgggctttaaagg

SEQ ID NO: 121016 - DNA, 25 bp, SARS Virus
atccagaaccagcggctttaaagga

SEQ ID NO: 121017 - DNA, 25 bp, SARS Virus
tccagaaccaggcgctttaaaggaa

SEQ ID NO: 121018 - DNA, 25 bp, SARS Virus
ccagaaccagggcctttaaaggaac

SEQ ID NO: 121019 - DNA, 25 bp, SARS Virus
cagaaccaggggctttaaaggaacc

SEQ ID NO: 121020 - DNA, 25 bp, SARS Virus
agaaccaggggccttaaaggaaccc

SEQ ID NO: 121021 - DNA, 25 bp, SARS Virus
gaaccaggggctctaaaggaaccca

SEQ ID NO: 121022 - DNA, 25 bp, SARS Virus
aaccaggggcttcaaaggaacccaa

SEQ ID NO: 121023 - DNA, 25 bp, SARS Virus
accaggggctttcaaggaacccaaa

SEQ ID NO: 121024 - DNA, 25 bp, SARS Virus
ccaggggctttacaggaacccaaac

SEQ ID NO: 121025 - DNA, 25 bp, SARS Virus
caggggctttaacggaacccaaaca

SEQ ID NO: 121026 - DNA, 25 bp, SARS Virus
aggggctttaaacgaacccaaacaa

SEQ ID NO: 121027 - DNA, 25 bp, SARS Virus
ggggctttaaagcaacccaaacaag

SEQ ID NO: 121028 - DNA, 25 bp, SARS Virus
gggctttaaaggcacccaaacaaga

SEQ ID NO: 121029 - DNA, 25 bp, SARS Virus
ggctttaaaggaccccaaacaagac

SEQ ID NO: 121030 - DNA, 25 bp, SARS Virus
gctttaaaggaacccaaacaagacc

SEQ ID NO: 121031 - DNA, 25 bp, SARS Virus
ctttaaaggaacccaaacaagacct

SEQ ID NO: 121032 - DNA, 25 bp, SARS Virus
tttaaaggaacccaaacaagacctg

SEQ ID NO: 121033 - DNA, 25 bp, SARS Virus
ttaaaggaaccccaacaagacctgg

SEQ ID NO: 121034 - DNA, 25 bp, SARS Virus
taaaggaacccacacaagacctggt

SEQ ID NO: 121035 - DNA, 25 bp, SARS Virus
aaaggaacccaaccaagacctggtg

SEQ ID NO: 121036 - DNA, 25 bp, SARS Virus
aaggaacccaaacaagacctggtgc

SEQ ID NO: 121037 - DNA, 25 bp, SARS Virus
aggaacccaaaccagacctggtgca

SEQ ID NO: 121038 - DNA, 25 bp, SARS Virus
ggaacccaaacacgacctggtgcag

SEQ ID NO: 121039 - DNA, 25 bp, SARS Virus
gaacccaaacaacacctggtgcaga

SEQ ID NO: 121040 - DNA, 25 bp, SARS Virus
aacccaaacaagccctggtgcagag

SEQ ID NO: 121041 - DNA, 25 bp, SARS Virus
acccaaacaagacctggtgcagagg

SEQ ID NO: 121042 - DNA, 25 bp, SARS Virus
cccaaacaagacctggtgcagaggg

SEQ ID NO: 121043 - DNA, 25 bp, SARS Virus
ccaaacaagacccggtgcagagggt

SEQ ID NO: 121044 - DNA, 25 bp, SARS Virus
caaacaagacctcgtgcagagggtt

SEQ ID NO: 121045 - DNA, 25 bp, SARS Virus
aaacaagacctgctgcagagggttt

SEQ ID NO: 121046 - DNA, 25 bp, SARS Virus
aacaagacctggcgcagagggttta

SEQ ID NO: 121047 - DNA, 25 bp, SARS Virus
acaagacctggtccagagggtttac

SEQ ID NO: 121048 - DNA, 25 bp, SARS Virus
caagacctggtgcagagggtttacg

SEQ ID NO: 121049 - DNA, 25 bp, SARS Virus
aagacctggtgccgagggtttacga

SEQ ID NO: 121050 - DNA, 25 bp, SARS Virus
agacctggtgcacagggtttacgaa

SEQ ID NO: 121051 - DNA, 25 bp, SARS Virus
gacctggtgcagcgggtttacgaac

SEQ ID NO: 121052 - DNA, 25 bp, SARS Virus
acctggtgcagacggtttacgaact

SEQ ID NO: 121053 - DNA, 25 bp, SARS Virus
cctggtgcagagcgtttacgaactc

SEQ ID NO: 121054 - DNA, 25 bp, SARS Virus
ctggtgcagaggctttacgaactca

SEQ ID NO: 121055 - DNA, 25 bp, SARS Virus
tggtgcagagggcttacgaactcac

SEQ ID NO: 121056 - DNA, 25 bp, SARS Virus
ggtgcagagggtctacgaactcact

SEQ ID NO: 121057 - DNA, 25 bp, SARS Virus
cttaacgcttttgcaaatgtatcgg

SEQ ID NO: 121058 - DNA, 25 bp, SARS Virus
ttaacgcttttggaaatgtatcggg

SEQ ID NO: 121059 - DNA, 25 bp, SARS Virus
taacgcttttgcgaatgtatcgggt

SEQ ID NO: 121060 - DNA, 25 bp, SARS Virus
aacgcttttgcagatgtatcgggta

SEQ ID NO: 121061 - DNA, 25 bp, SARS Virus
acgcttttgcaagtgtatcgggtag

SEQ ID NO: 121062 - DNA, 25 bp, SARS Virus
cgcttttgcaaaggtatcgggtaga

SEQ ID NO: 121063 - DNA, 25 bp, SARS Virus
gcttttgcaaatgtatcgggtagac

SEQ ID NO: 121064 - DNA, 25 bp, SARS Virus
cttttgcaaatggatcgggtagacg

SEQ ID NO: 121065 - DNA, 25 bp, SARS Virus
ttttgcaaatgtgtcgggtagacgg

SEQ ID NO: 121066 - DNA, 25 bp, SARS Virus
tttgcaaatgtagcgggtagacgga

SEQ ID NO: 121067 - DNA, 25 bp, SARS Virus
ttgcaaatgtatggggtagacggaa

SEQ ID NO: 121068 - DNA, 25 bp, SARS Virus
tgcaaatgtatcgggtagacggaac

SEQ ID NO: 121069 - DNA, 25 bp, SARS Virus
gcaaatgtatcgggtagacggaaca

SEQ ID NO: 121070 - DNA, 25 bp, SARS Virus
caaatgtatcgggtagacggaacac

SEQ ID NO: 121071 - DNA, 25 bp, SARS Virus
aaatgtatcggggagacggaacaca

SEQ ID NO: 121072 - DNA, 25 bp, SARS Virus
aatgtatcgggtggacggaacacac

SEQ ID NO: 121073 - DNA, 25 bp, SARS Virus
atgtatcgggtagacggaacacacc

SEQ ID NO: 121074 - DNA, 25 bp, SARS Virus
tgtatcgggtaggcggaacacacca

SEQ ID NO: 121075 - DNA, 25 bp, SARS Virus
gtatcgggtagagggaacacaccag

SEQ ID NO: 121076 - DNA, 25 bp, SARS Virus
tatcgggtagacggaacacaccagt

SEQ ID NO: 121077 - DNA, 25 bp, SARS Virus
atcgggtagacggaacacaccagta

SEQ ID NO: 121078 - DNA, 25 bp, SARS Virus
tcgggtagacgggacacaccagtag

SEQ ID NO: 121079 - DNA, 25 bp, SARS Virus
cgggtagacggagcacaccagtagt

SEQ ID NO: 121080 - DNA, 25 bp, SARS Virus
gggtagacggaagacaccagtagta

SEQ ID NO: 121081 - DNA, 25 bp, SARS Virus
ggtagacggaacgcaccagtagtac

SEQ ID NO: 121082 - DNA, 25 bp, SARS Virus
gtagacggaacagaccagtagtact

SEQ ID NO: 121083 - DNA, 25 bp, SARS Virus
tagacggaacacgccagtagtactc

SEQ ID NO: 121084 - DNA, 25 bp, SARS Virus
agacggaacacagcagtagtactca

SEQ ID NO: 121085 - DNA, 25 bp, SARS Virus
gacggaacacacgagtagtactcac

SEQ ID NO: 121086 - DNA, 25 bp, SARS Virus
acggaacacaccggtagtactcaca

SEQ ID NO: 121087 - DNA, 25 bp, SARS Virus
cggaacacaccagtagtactcacaa

SEQ ID NO: 121088 - DNA, 25 bp, SARS Virus
ggaacacaccaggagtactcacaaa

SEQ ID NO: 121089 - DNA, 25 bp, SARS Virus
gaacacaccagtggtactcacaaat

SEQ ID NO: 121090 - DNA, 25 bp, SARS Virus
aacacaccagtagtactcacaaata

SEQ ID NO: 121091 - DNA, 25 bp, SARS Virus
acacaccagtaggactcacaaatac

SEQ ID NO: 121092 - DNA, 25 bp, SARS Virus
cacaccagtagtgctcacaaatacg

SEQ ID NO: 121093 - DNA, 25 bp, SARS Virus
acaccagtagtagtcacaaatacgg

SEQ ID NO: 121094 - DNA, 25 bp, SARS Virus
caccagtagtacgcacaaatacgga

SEQ ID NO: 121095 - DNA, 25 bp, SARS Virus
accagtagtactgacaaatacggac

SEQ ID NO: 121096 - DNA, 25 bp, SARS Virus
ccagtagtactcgcaaatacggact

SEQ ID NO: 121097 - DNA, 25 bp, SARS Virus
cagtagtactcagaaatacggactc

SEQ ID NO: 121098 - DNA, 25 bp, SARS Virus
agtagtactcacgaatacggactca

SEQ ID NO: 121099 - DNA, 25 bp, SARS Virus
gtagtactcacagatacggactcaa

SEQ ID NO: 121100 - DNA, 25 bp, SARS Virus
tagtactcacaagtacggactcaac

SEQ ID NO: 121101 - DNA, 25 bp, SARS Virus
agtactcacaaagacggactcaact

SEQ ID NO: 121102 - DNA, 25 bp, SARS Virus
gtactcacaaatgcggactcaactt

SEQ ID NO: 121103 - DNA, 25 bp, SARS Virus
tactcacaaatagggactcaactta

SEQ ID NO: 121104 - DNA, 25 bp, SARS Virus
actcacaaatacggactcaacttag

SEQ ID NO: 121105 - DNA, 25 bp, SARS Virus
ctcacaaatacggactcaacttagt

SEQ ID NO: 121106 - DNA, 25 bp, SARS Virus
tcacaaatacgggctcaacttagtc

SEQ ID NO: 121107 - DNA, 25 bp, SARS Virus
cacaaatacggagtcaacttagtcg

SEQ ID NO: 121108 - DNA, 25 bp, SARS Virus
acaaatacggacgcaacttagtcgt

SEQ ID NO: 121109 - DNA, 25 bp, SARS Virus
caaatacggactgaacttagtcgtc

SEQ ID NO: 121110 - DNA, 25 bp, SARS Virus
aaatacggactcgacttagtcgtct

SEQ ID NO: 121111 - DNA, 25 bp, SARS Virus
aatacggactcagcttagtcgtctt

SEQ ID NO: 121112 - DNA, 25 bp, SARS Virus
atacggactcaagttagtcgtcttc

SEQ ID NO: 121113 - DNA, 25 bp, SARS Virus
tacggactcaacgtagtcgtcttcg

SEQ ID NO: 121114 - DNA, 25 bp, SARS Virus
acggactcaactgagtcgtcttcga

SEQ ID NO: 121115 - DNA, 25 bp, SARS Virus
cggactcaacttggtcgtcttcgag

SEQ ID NO: 121116 - DNA, 25 bp, SARS Virus
ggactcaacttagtcgtcttcgagg

SEQ ID NO: 121117 - DNA, 25 bp, SARS Virus
gactcaacttaggcgtcttcgaggt

SEQ ID NO: 121118 - DNA, 25 bp, SARS Virus
actcaacttagtggtcttcgaggtg

SEQ ID NO: 121119 - DNA, 25 bp, SARS Virus
ctcaacttagtcgtcttcgaggtga

SEQ ID NO: 121120 - DNA, 25 bp, SARS Virus
tcaacttagtcggcttcgaggtgag

SEQ ID NO: 121121 - DNA, 25 bp, SARS Virus
caacttagtcgtgttcgaggtgagt

SEQ ID NO: 121122 - DNA, 25 bp, SARS Virus
aacttagtcgtcgtcgaggtgagta

SEQ ID NO: 121123 - DNA, 25 bp, SARS Virus
acttagtcgtctgcgaggtgagtac

SEQ ID NO: 121124 - DNA, 25 bp, SARS Virus
cttagtcgtcttggaggtgagtacc

SEQ ID NO: 121125 - DNA, 25 bp, SARS Virus
ttagtcgtcttcgaggtgagtacct

SEQ ID NO: 121126 - DNA, 25 bp, SARS Virus
tagtcgtcttcggggtgagtacctt

SEQ ID NO: 121127 - DNA, 25 bp, SARS Virus
agtcgtcttcgaggtgagtacctta

SEQ ID NO: 121128 - DNA, 25 bp, SARS Virus
gtcgtcttcgaggtgagtaccttaa

SEQ ID NO: 121129 - DNA, 25 bp, SARS Virus
tcgtcttcgaggggagtaccttaaa

SEQ ID NO: 121130 - DNA, 25 bp, SARS Virus
cgtcttcgaggtgagtaccttaaaa

SEQ ID NO: 121131 - DNA, 25 bp, SARS Virus
gtcttcgaggtgggtaccttaaaac

SEQ ID NO: 121132 - DNA, 25 bp, SARS Virus
tcttcgaggtgagtaccttaaaact

SEQ ID NO: 121133 - DNA, 25 bp, SARS Virus
cttcgaggtgaggaccttaaaactt

SEQ ID NO: 121134 - DNA, 25 bp, SARS Virus
ttcgaggtgagtgccttaaaacttc

SEQ ID NO: 121135 - DNA, 25 bp, SARS Virus
tcgaggtgagtagcttaaaacttca

SEQ ID NO: 121136 - DNA, 25 bp, SARS Virus
cgaggtgagtacgttaaaacttcaa

SEQ ID NO: 121137 - DNA, 25 bp, SARS Virus
gaggtgagtaccgtaaaacttcaac

SEQ ID NO: 121138 - DNA, 25 bp, SARS Virus
aggtgagtacctgaaaacttcaaca

SEQ ID NO: 121139 - DNA, 25 bp, SARS Virus
ggtgagtaccttgaaacttcaacag

SEQ ID NO: 121140 - DNA, 25 bp, SARS Virus
gtgagtaccttagaacttcaacaga

SEQ ID NO: 121141 - DNA, 25 bp, SARS Virus
tgagtaccttaagacttcaacagac

SEQ ID NO: 121142 - DNA, 25 bp, SARS Virus
gagtaccttaaagcttcaacagacc

SEQ ID NO: 121143 - DNA, 25 bp, SARS Virus
agtaccttaaaagttcaacagacct

SEQ ID NO: 121144 - DNA, 25 bp, SARS Virus
gtaccttaaaacgtcaacagacctc

SEQ ID NO: 121145 - DNA, 25 bp, SARS Virus
taccttaaaactgcaacagacctct

SEQ ID NO: 121146 - DNA, 25 bp, SARS Virus
accttaaaacttgaacagacctctt

SEQ ID NO: 121147 - DNA, 25 bp, SARS Virus
ccttaaaacttcgacagacctcttt

SEQ ID NO: 121148 - DNA, 25 bp, SARS Virus
cttaaaacttcagcagacctcttta

SEQ ID NO: 121149 - DNA, 25 bp, SARS Virus
ttaaaacttcaagagacctctttag

SEQ ID NO: 121150 - DNA, 25 bp, SARS Virus
taaaacttcaacggacctctttagt

SEQ ID NO: 121151 - DNA, 25 bp, SARS Virus
aaaacttcaacagacctctttagta

SEQ ID NO: 121152 - DNA, 25 bp, SARS Virus
aaacttcaacaggcctctttagtag

SEQ ID NO: 121153 - DNA, 25 bp, SARS Virus
aacttcaacagagctctttagtagg

SEQ ID NO: 121154 - DNA, 25 bp, SARS Virus
acttcaacagacgtctttagtaggt

SEQ ID NO: 121155 - DNA, 25 bp, SARS Virus
cttcaacagaccgctttagtaggta

SEQ ID NO: 121156 - DNA, 25 bp, SARS Virus
ttcaacagacctgtttagtaggtac

SEQ ID NO: 121157 - DNA, 25 bp, SARS Virus
tcaacagacctcgttagtaggtaca

SEQ ID NO: 121158 - DNA, 25 bp, SARS Virus
caacagacctctgtagtaggtacag

SEQ ID NO: 121159 - DNA, 25 bp, SARS Virus
aacagacctcttgagtaggtacagt

SEQ ID NO: 121160 - DNA, 25 bp, SARS Virus
acagacctctttggtaggtacagtc

SEQ ID NO: 121161 - DNA, 25 bp, SARS Virus
cagacctctttagtaggtacagtcg

SEQ ID NO: 121162 - DNA, 25 bp, SARS Virus
agacctctttaggaggtacagtcgg

SEQ ID NO: 121163 - DNA, 25 bp, SARS Virus
gacctctttagtgggtacagtcggc

SEQ ID NO: 121164 - DNA, 25 bp, SARS Virus
acctctttagtaggtacagtcggcg

SEQ ID NO: 121165 - DNA, 25 bp, SARS Virus
cctctttagtaggtacagtcggcgt

SEQ ID NO: 121166 - DNA, 25 bp, SARS Virus
ctctttagtagggacagtcggcgtc

SEQ ID NO: 121167 - DNA, 25 bp, SARS Virus
tctttagtaggtgcagtcggcgtcc

SEQ ID NO: 121168 - DNA, 25 bp, SARS Virus
ctttagtaggtagagtcggcgtcct

SEQ ID NO: 121169 - DNA, 25 bp, SARS Virus
tttagtaggtacggtcggcgtcctt

SEQ ID NO: 121170 - DNA, 25 bp, SARS Virus
ttagtaggtacagtcggcgtccttc

SEQ ID NO: 121171 - DNA, 25 bp, SARS Virus
tagtaggtacaggcggcgtccttct

SEQ ID NO: 121172 - DNA, 25 bp, SARS Virus
agtaggtacagtgggcgtccttctt

SEQ ID NO: 121173 - DNA, 25 bp, SARS Virus
gtaggtacagtcggcgtccttcttc

SEQ ID NO: 121174 - DNA, 25 bp, SARS Virus
taggtacagtcggcgtccttcttct

SEQ ID NO: 121175 - DNA, 25 bp, SARS Virus
aggtacagtcggggtccttcttctc

SEQ ID NO: 121176 - DNA, 25 bp, SARS Virus
ggtacagtcggcgtccttcttctca

SEQ ID NO: 121177 - DNA, 25 bp, SARS Virus
gtacagtcggcggccttcttctcag

SEQ ID NO: 121178 - DNA, 25 bp, SARS Virus
tacagtcggcgtgcttcttctcagt

SEQ ID NO: 121179 - DNA, 25 bp, SARS Virus
acagtcggcgtcgttcttctcagtg

SEQ ID NO: 121180 - DNA, 25 bp, SARS Virus
cagtcggcgtccgtcttctcagtgt

SEQ ID NO: 121181 - DNA, 25 bp, SARS Virus
agtcggcgtcctgcttctcagtgtc

SEQ ID NO: 121182 - DNA, 25 bp, SARS Virus
gtcggcgtccttgttctcagtgtca

SEQ ID NO: 121183 - DNA, 25 bp, SARS Virus
tcggcgtccttcgtctcagtgtcac

SEQ ID NO: 121184 - DNA, 25 bp, SARS Virus
cggcgtccttctgctcagtgtcacc

SEQ ID NO: 121185 - DNA, 25 bp, SARS Virus
ggcgtccttcttgtcagtgtcaccc

SEQ ID NO: 121186 - DNA, 25 bp, SARS Virus
gcgtccttcttcgcagtgtcacccg

SEQ ID NO: 121187 - DNA, 25 bp, SARS Virus
cgtccttcttctgagtgtcacccga

SEQ ID NO: 121188 - DNA, 25 bp, SARS Virus
gtccttcttctcggtgtcacccgac

SEQ ID NO: 121189 - DNA, 25 bp, SARS Virus
tccttcttctcagtgtcacccgacg

SEQ ID NO: 121190 - DNA, 25 bp, SARS Virus
ccttcttctcagggtcacccgacga

SEQ ID NO: 121191 - DNA, 25 bp, SARS Virus
cttcttctcagtgtcacccgacgaa

SEQ ID NO: 121192 - DNA, 25 bp, SARS Virus
ttcttctcagtggcacccgacgaag

SEQ ID NO: 121193 - DNA, 25 bp, SARS Virus
tcttctcagtgtgacccgacgaaga

SEQ ID NO: 121194 - DNA, 25 bp, SARS Virus
cttctcagtgtcgcccgacgaagaa

SEQ ID NO: 121195 - DNA, 25 bp, SARS Virus
ttctcagtgtcagccgacgaagaaa

SEQ ID NO: 121196 - DNA, 25 bp, SARS Virus
tctcagtgtcacgcgacgaagaaaa

SEQ ID NO: 121197 - DNA, 25 bp, SARS Virus
ctcagtgtcaccggacgaagaaaac

SEQ ID NO: 121198 - DNA, 25 bp, SARS Virus
tcagtgtcacccgacgaagaaaaca

SEQ ID NO: 121199 - DNA, 25 bp, SARS Virus
cagtgtcacccggcgaagaaaacag

SEQ ID NO: 121200 - DNA, 25 bp, SARS Virus
agtgtcacccgaggaagaaaacaga

SEQ ID NO: 121201 - DNA, 25 bp, SARS Virus
gtgtcacccgacgaagaaaacagag

SEQ ID NO: 121202 - DNA, 25 bp, SARS Virus
tgtcacccgacggagaaaacagaga

SEQ ID NO: 121203 - DNA, 25 bp, SARS Virus
gtcacccgacgaggaaaacagagac

SEQ ID NO: 121204 - DNA, 25 bp, SARS Virus
tcacccgacgaagaaaacagagacg

SEQ ID NO: 121205 - DNA, 25 bp, SARS Virus
cacccgacgaaggaaacagagacgc

SEQ ID NO: 121206 - DNA, 25 bp, SARS Virus
acccgacgaagagaacagagacgcc

SEQ ID NO: 121207 - DNA, 25 bp, SARS Virus
cccgacgaagaagacagagacgccg

SEQ ID NO: 121208 - DNA, 25 bp, SARS Virus
ccgacgaagaaagcagagacgccgt

SEQ ID NO: 121209 - DNA, 25 bp, SARS Virus
cgacgaagaaaagagagacgccgtt

SEQ ID NO: 121210 - DNA, 25 bp, SARS Virus
gacgaagaaaacggagacgccgttt

SEQ ID NO: 121211 - DNA, 25 bp, SARS Virus
acgaagaaaacagagacgccgtttc

SEQ ID NO: 121212 - DNA, 25 bp, SARS Virus
cgaagaaaacagggacgccgtttcc

SEQ ID NO: 121213 - DNA, 25 bp, SARS Virus
gaagaaaacagagacgccgtttccg

SEQ ID NO: 121214 - DNA, 25 bp, SARS Virus
aagaaaacagaggcgccgtttccga

SEQ ID NO: 121215 - DNA, 25 bp, SARS Virus
agaaaacagagaggccgtttccgac

SEQ ID NO: 121216 - DNA, 25 bp, SARS Virus
gaaaacagagacgccgtttccgact

SEQ ID NO: 121217 - DNA, 25 bp, SARS Virus
aaaacagagacggcgtttccgactc

SEQ ID NO: 121218 - DNA, 25 bp, SARS Virus
aaacagagacgcggtttccgactcg

SEQ ID NO: 121219 - DNA, 25 bp, SARS Virus
aacagagacgccgtttccgactcga

SEQ ID NO: 121220 - DNA, 25 bp, SARS Virus
acagagacgccggttccgactcgaa

SEQ ID NO: 121221 - DNA, 25 bp, SARS Virus
cagagacgccgtgtccgactcgaag

SEQ ID NO: 121222 - DNA, 25 bp, SARS Virus
agagacgccgttgccgactcgaagt

SEQ ID NO: 121223 - DNA, 25 bp, SARS Virus
gagacgccgtttgcgactcgaagta

SEQ ID NO: 121224 - DNA, 25 bp, SARS Virus
agacgccgtttcggactcgaagtag

SEQ ID NO: 121225 - DNA, 25 bp, SARS Virus
gacgccgtttccgactcgaagtagt

SEQ ID NO: 121226 - DNA, 25 bp, SARS Virus
acgccgtttccggctcgaagtagtc

SEQ ID NO: 121227 - DNA, 25 bp, SARS Virus
cgccgtttccgagtcgaagtagtca

SEQ ID NO: 121228 - DNA, 25 bp, SARS Virus
gccgtttccgacgcgaagtagtcag

SEQ ID NO: 121229 - DNA, 25 bp, SARS Virus
ccgtttccgactggaagtagtcaga

SEQ ID NO: 121230 - DNA, 25 bp, SARS Virus
cgtttccgactcgaagtagtcagaa

SEQ ID NO: 121231 - DNA, 25 bp, SARS Virus
gtttccgactcggagtagtcagaaa

SEQ ID NO: 121232 - DNA, 25 bp, SARS Virus
tttccgactcgaggtagtcagaaaa

SEQ ID NO: 121233 - DNA, 25 bp, SARS Virus
ttccgactcgaagtagtcagaaaaa

SEQ ID NO: 121234 - DNA, 25 bp, SARS Virus
tccgactcgaaggagtcagaaaaag

SEQ ID NO: 121235 - DNA, 25 bp, SARS Virus
ccgactcgaagtggtcagaaaaaga

SEQ ID NO: 121236 - DNA, 25 bp, SARS Virus
cgactcgaagtagtcagaaaaagaa

SEQ ID NO: 121237 - DNA, 25 bp, SARS Virus
gactcgaagtaggcagaaaaagaaa

SEQ ID NO: 121238 - DNA, 25 bp, SARS Virus
actcgaagtagtgagaaaaagaaaa

SEQ ID NO: 121239 - DNA, 25 bp, SARS Virus
ctcgaagtagtcggaaaaagaaaaa

SEQ ID NO: 121240 - DNA, 25 bp, SARS Virus
tcgaagtagtcagaaaaagaaaaac

SEQ ID NO: 121241 - DNA, 25 bp, SARS Virus
cgaagtagtcaggaaaagaaaaaca

SEQ ID NO: 121242 - DNA, 25 bp, SARS Virus
gaagtagtcagagaaagaaaaacag

SEQ ID NO: 121243 - DNA, 25 bp, SARS Virus
aagtagtcagaagaagaaaaacagg

SEQ ID NO: 121244 - DNA, 25 bp, SARS Virus
agtagtcagaaagagaaaaacagga

SEQ ID NO: 121245 - DNA, 25 bp, SARS Virus
gtagtcagaaaaggaaaaacaggaa

SEQ ID NO: 121246 - DNA, 25 bp, SARS Virus
tagtcagaaaaagaaaaacaggaaa

SEQ ID NO: 121247 - DNA, 25 bp, SARS Virus
agtcagaaaaaggaaaacaggaaaa

SEQ ID NO: 121248 - DNA, 25 bp, SARS Virus
gtcagaaaaagagaaacaggaaaaa

SEQ ID NO: 121249 - DNA, 25 bp, SARS Virus
tcagaaaaagaagaacaggaaaaat

SEQ ID NO: 121250 - DNA, 25 bp, SARS Virus
cagaaaaagaaagacaggaaaaatc

SEQ ID NO: 121251 - DNA, 25 bp, SARS Virus
agaaaaagaaaagcaggaaaaatcc

SEQ ID NO: 121252 - DNA, 25 bp, SARS Virus
gaaaaagaaaaagaggaaaaatccg

SEQ ID NO: 121253 - DNA, 25 bp, SARS Virus
aaaaagaaaaacgggaaaaatccga

SEQ ID NO: 121254 - DNA, 25 bp, SARS Virus
aaaagaaaaacaggaaaaatccgag

SEQ ID NO: 121255 - DNA, 25 bp, SARS Virus
aaagaaaaacaggaaaaatccgaga

SEQ ID NO: 121256 - DNA, 25 bp, SARS Virus
aagaaaaacagggaaaatccgagac

SEQ ID NO: 121257 - DNA, 25 bp, SARS Virus
agaaaaacaggagaaatccgagaca

SEQ ID NO: 121258 - DNA, 25 bp, SARS Virus
gaaaaacaggaagaatccgagacaa

SEQ ID NO: 121259 - DNA, 25 bp, SARS Virus
aaaaacaggaaagatccgagacaac

SEQ ID NO: 121260 - DNA, 25 bp, SARS Virus
aaaacaggaaaagtccgagacaacc

SEQ ID NO: 121261 - DNA, 25 bp, SARS Virus
aaacaggaaaaagccgagacaacca

SEQ ID NO: 121262 - DNA, 25 bp, SARS Virus
aacaggaaaaatgcgagacaaccac

SEQ ID NO: 121263 - DNA, 25 bp, SARS Virus
acaggaaaaatcggagacaaccacc

SEQ ID NO: 121264 - DNA, 25 bp, SARS Virus
caggaaaaatccgagacaaccaccc

SEQ ID NO: 121265 - DNA, 25 bp, SARS Virus
aggaaaaatccgggacaaccaccct

SEQ ID NO: 121266 - DNA, 25 bp, SARS Virus
ggaaaaatccgagacaaccaccctt

SEQ ID NO: 121267 - DNA, 25 bp, SARS Virus
gaaaaatccgaggcaaccaccctta

SEQ ID NO: 121268 - DNA, 25 bp, SARS Virus
aaaaatccgagagaaccacccttac

SEQ ID NO: 121269 - DNA, 25 bp, SARS Virus
aaaatccgagacgaccacccttaca

SEQ ID NO: 121270 - DNA, 25 bp, SARS Virus
aaatccgagacagccacccttacaa

SEQ ID NO: 121271 - DNA, 25 bp, SARS Virus
aatccgagacaagcacccttacaaa

SEQ ID NO: 121272 - DNA, 25 bp, SARS Virus
atccgagacaacgacccttacaaaa

SEQ ID NO: 121273 - DNA, 25 bp, SARS Virus
tccgagacaaccgcccttacaaaac

SEQ ID NO: 121274 - DNA, 25 bp, SARS Virus
ccgagacaaccagccttacaaaaca

SEQ ID NO: 121275 - DNA, 25 bp, SARS Virus
cgagacaaccacgcttacaaaacat

SEQ ID NO: 121276 - DNA, 25 bp, SARS Virus
gagacaaccaccgttacaaaacata

SEQ ID NO: 121277 - DNA, 25 bp, SARS Virus
agacaaccacccgtacaaaacatac

SEQ ID NO: 121278 - DNA, 25 bp, SARS Virus
gacaaccaccctgacaaaacatacg

SEQ ID NO: 121279 - DNA, 25 bp, SARS Virus
acaaccacccttgcaaaacatacgc

SEQ ID NO: 121280 - DNA, 25 bp, SARS Virus
caaccacccttagaaaacatacgca

SEQ ID NO: 121281 - DNA, 25 bp, SARS Virus
aaccacccttacgaaacatacgcag

SEQ ID NO: 121282 - DNA, 25 bp, SARS Virus
accacccttacagaacatacgcagt

SEQ ID NO: 121283 - DNA, 25 bp, SARS Virus
ccacccttacaagacatacgcagtt

SEQ ID NO: 121284 - DNA, 25 bp, SARS Virus
cacccttacaaagcatacgcagtta

SEQ ID NO: 121285 - DNA, 25 bp, SARS Virus
acccttacaaaagatacgcagttac

SEQ ID NO: 121286 - DNA, 25 bp, SARS Virus
cccttacaaaacgtacgcagttaca

SEQ ID NO: 121287 - DNA, 25 bp, SARS Virus
ccttacaaaacagacgcagttacac

SEQ ID NO: 121288 - DNA, 25 bp, SARS Virus
cttacaaaacatgcgcagttacacg

SEQ ID NO: 121289 - DNA, 25 bp, SARS Virus
ttacaaaacataggcagttacacga

SEQ ID NO: 121290 - DNA, 25 bp, SARS Virus
tacaaaacatacgcagttacacgaa

SEQ ID NO: 121291 - DNA, 25 bp, SARS Virus
acaaaacatacggagttacacgaac

SEQ ID NO: 121292 - DNA, 25 bp, SARS Virus
caaaacatacgcggttacacgaaca

SEQ ID NO: 121293 - DNA, 25 bp, SARS Virus
aaaacatacgcagttacacgaacaa

SEQ ID NO: 121294 - DNA, 25 bp, SARS Virus
aaacatacgcaggtacacgaacaag

SEQ ID NO: 121295 - DNA, 25 bp, SARS Virus
aacatacgcagtgacacgaacaagt

SEQ ID NO: 121296 - DNA, 25 bp, SARS Virus
acatacgcagttgcacgaacaagtc

SEQ ID NO: 121297 - DNA, 25 bp, SARS Virus
catacgcagttagacgaacaagtcg

SEQ ID NO: 121298 - DNA, 25 bp, SARS Virus
atacgcagttacgcgaacaagtcgt

SEQ ID NO: 121299 - DNA, 25 bp, SARS Virus
tacgcagttacaggaacaagtcgtc

SEQ ID NO: 121300 - DNA, 25 bp, SARS Virus
acgcagttacacgaacaagtcgtca

SEQ ID NO: 121301 - DNA, 25 bp, SARS Virus
cgcagttacacggacaagtcgtcat

SEQ ID NO: 121302 - DNA, 25 bp, SARS Virus
gcagttacacgagcaagtcgtcata

SEQ ID NO: 121303 - DNA, 25 bp, SARS Virus
cagttacacgaagaagtcgtcatac

SEQ ID NO: 121304 - DNA, 25 bp, SARS Virus
agttacacgaacgagtcgtcatact

SEQ ID NO: 121305 - DNA, 25 bp, SARS Virus
gttacacgaacaggtcgtcatactg

SEQ ID NO: 121306 - DNA, 25 bp, SARS Virus
ttacacgaacaagtcgtcatactgc

SEQ ID NO: 121307 - DNA, 25 bp, SARS Virus
tacacgaacaaggcgtcatactgca

SEQ ID NO: 121308 - DNA, 25 bp, SARS Virus
acacgaacaagtggtcatactgcaa

SEQ ID NO: 121309 - DNA, 25 bp, SARS Virus
cacgaacaagtcgtcatactgcaac

SEQ ID NO: 121310 - DNA, 25 bp, SARS Virus
acgaacaagtcggcatactgcaaca

SEQ ID NO: 121311 - DNA, 25 bp, SARS Virus
cgaacaagtcgtgatactgcaacag

SEQ ID NO: 121312 - DNA, 25 bp, SARS Virus
gaacaagtcgtcgtactgcaacaga

SEQ ID NO: 121313 - DNA, 25 bp, SARS Virus
aacaagtcgtcagactgcaacagaa

SEQ ID NO: 121314 - DNA, 25 bp, SARS Virus
acaagtcgtcatgctgcaacagaaa

SEQ ID NO: 121315 - DNA, 25 bp, SARS Virus
caagtcgtcatagtgcaacagaaac

SEQ ID NO: 121316 - DNA, 25 bp, SARS Virus
aagtcgtcatacggcaacagaaact

SEQ ID NO: 121317 - DNA, 25 bp, SARS Virus
agtcgtcatactgcaacagaaactt

SEQ ID NO: 121318 - DNA, 25 bp, SARS Virus
gtcgtcatactggaacagaaactta

SEQ ID NO: 121319 - DNA, 25 bp, SARS Virus
tcgtcatactgcgacagaaacttaa

SEQ ID NO: 121320 - DNA, 25 bp, SARS Virus
cgtcatactgcagcagaaacttaac

SEQ ID NO: 121321 - DNA, 25 bp, SARS Virus
gtcatactgcaagagaaacttaaca

SEQ ID NO: 121322 - DNA, 25 bp, SARS Virus
tcatactgcaacggaaacttaacac

SEQ ID NO: 121323 - DNA, 25 bp, SARS Virus
catactgcaacagaaacttaacacc

SEQ ID NO: 121324 - DNA, 25 bp, SARS Virus
atactgcaacaggaacttaacacct

SEQ ID NO: 121325 - DNA, 25 bp, SARS Virus
tactgcaacagagacttaacaccta

SEQ ID NO: 121326 - DNA, 25 bp, SARS Virus
actgcaacagaagcttaacacctag

SEQ ID NO: 121327 - DNA, 25 bp, SARS Virus
ctgcaacagaaagttaacacctaga

SEQ ID NO: 121328 - DNA, 25 bp, SARS Virus
tgcaacagaaacgtaacacctagaa

SEQ ID NO: 121329 - DNA, 25 bp, SARS Virus
gcaacagaaactgaacacctagaaa

SEQ ID NO: 121330 - DNA, 25 bp, SARS Virus
caacagaaacttgacacctagaaac

SEQ ID NO: 121331 - DNA, 25 bp, SARS Virus
aacagaaacttagcacctagaaaca

SEQ ID NO: 121332 - DNA, 25 bp, SARS Virus
acagaaacttaagacctagaaacag

SEQ ID NO: 121333 - DNA, 25 bp, SARS Virus
cagaaacttaacgcctagaaacagt

SEQ ID NO: 121334 - DNA, 25 bp, SARS Virus
agaaacttaacagctagaaacagta

SEQ ID NO: 121335 - DNA, 25 bp, SARS Virus
gaaacttaacacgtagaaacagtag

SEQ ID NO: 121336 - DNA, 25 bp, SARS Virus
aaacttaacaccgagaaacagtagg

SEQ ID NO: 121337 - DNA, 25 bp, SARS Virus
aacttaacacctggaaacagtaggt

SEQ ID NO: 121338 - DNA, 25 bp, SARS Virus
acttaacacctagaaacagtaggtt

SEQ ID NO: 121339 - DNA, 25 bp, SARS Virus
cttaacacctaggaacagtaggtta

SEQ ID NO: 121340 - DNA, 25 bp, SARS Virus
ttaacacctagagacagtaggttaa

SEQ ID NO: 121341 - DNA, 25 bp, SARS Virus
taacacctagaagcagtaggttaaa

SEQ ID NO: 121342 - DNA, 25 bp, SARS Virus
aacacctagaaagagtaggttaaat

SEQ ID NO: 121343 - DNA, 25 bp, SARS Virus
acacctagaaacggtaggttaaatt

SEQ ID NO: 121344 - DNA, 25 bp, SARS Virus
cacctagaaacagtaggttaaatta

SEQ ID NO: 121345 - DNA, 25 bp, SARS Virus
acctagaaacaggaggttaaattac

SEQ ID NO: 121346 - DNA, 25 bp, SARS Virus
cctagaaacagtgggttaaattacc

SEQ ID NO: 121347 - DNA, 25 bp, SARS Virus
ctagaaacagtaggttaaattaccg

SEQ ID NO: 121348 - DNA, 25 bp, SARS Virus
tagaaacagtaggttaaattaccga

SEQ ID NO: 121349 - DNA, 25 bp, SARS Virus
agaaacagtagggtaaattaccgag

SEQ ID NO: 121350 - DNA, 25 bp, SARS Virus
gaaacagtaggtgaaattaccgagg

SEQ ID NO: 121351 - DNA, 25 bp, SARS Virus
aaacagtaggttgaattaccgaggt

SEQ ID NO: 121352 - DNA, 25 bp, SARS Virus
aacagtaggttagattaccgaggta

SEQ ID NO: 121353 - DNA, 25 bp, SARS Virus
acagtaggttaagttaccgaggtac

SEQ ID NO: 121354 - DNA, 25 bp, SARS Virus
cagtaggttaaagtaccgaggtact

SEQ ID NO: 121355 - DNA, 25 bp, SARS Virus
agtaggttaaatgaccgaggtacta

SEQ ID NO: 121356 - DNA, 25 bp, SARS Virus
gtaggttaaattgccgaggtactat

SEQ ID NO: 121357 - DNA, 25 bp, SARS Virus
taggttaaattagcgaggtactatt

SEQ ID NO: 121358 - DNA, 25 bp, SARS Virus
aggttaaattacggaggtactattc

SEQ ID NO: 121359 - DNA, 25 bp, SARS Virus
ggttaaattaccgaggtactattca

SEQ ID NO: 121360 - DNA, 25 bp, SARS Virus
gttaaattaccggggtactattcag

SEQ ID NO: 121361 - DNA, 25 bp, SARS Virus
ttaaattaccgaggtactattcagt

SEQ ID NO: 121362 - DNA, 25 bp, SARS Virus
taaattaccgaggtactattcagtc

SEQ ID NO: 121363 - DNA, 25 bp, SARS Virus
aaattaccgagggactattcagtcg

SEQ ID NO: 121364 - DNA, 25 bp, SARS Virus
aattaccgaggtgctattcagtcgg

SEQ ID NO: 121365 - DNA, 25 bp, SARS Virus
attaccgaggtagtattcagtcggt

SEQ ID NO: 121366 - DNA, 25 bp, SARS Virus
ttaccgaggtacgattcagtcggta

SEQ ID NO: 121367 - DNA, 25 bp, SARS Virus
taccgaggtactgttcagtcggtac

SEQ ID NO: 121368 - DNA, 25 bp, SARS Virus
accgaggtactagtcagtcggtaca

SEQ ID NO: 121369 - DNA, 25 bp, SARS Virus
ccgaggtactatgcagtcggtacaa

SEQ ID NO: 121370 - DNA, 25 bp, SARS Virus
cgaggtactattgagtcggtacaag

SEQ ID NO: 121371 - DNA, 25 bp, SARS Virus
gaggtactattcggtcggtacaagg

SEQ ID NO: 121372 - DNA, 25 bp, SARS Virus
aggtactattcagtcggtacaaggg

SEQ ID NO: 121373 - DNA, 25 bp, SARS Virus
ggtactattcaggcggtacaagggc

SEQ ID NO: 121374 - DNA, 25 bp, SARS Virus
gtactattcagtgggtacaagggct

SEQ ID NO: 121375 - DNA, 25 bp, SARS Virus
tactattcagtcggtacaagggctt

SEQ ID NO: 121376 - DNA, 25 bp, SARS Virus
actattcagtcggtacaagggcttc

SEQ ID NO: 121377 - DNA, 25 bp, SARS Virus
ctattcagtcgggacaagggcttcc

SEQ ID NO: 121378 - DNA, 25 bp, SARS Virus
tattcagtcggtgcaagggcttcca

SEQ ID NO: 121379 - DNA, 25 bp, SARS Virus
attcagtcggtagaagggcttccac

SEQ ID NO: 121380 - DNA, 25 bp, SARS Virus
ttcagtcggtacgagggcttccaca

SEQ ID NO: 121381 - DNA, 25 bp, SARS Virus
tcagtcggtacaggggcttccacac

SEQ ID NO: 121382 - DNA, 25 bp, SARS Virus
cagtcggtacaagggcttccacact

SEQ ID NO: 121383 - DNA, 25 bp, SARS Virus
agtcggtacaagggcttccacactg

SEQ ID NO: 121384 - DNA, 25 bp, SARS Virus
gtcggtacaagggcttccacactga

SEQ ID NO: 121385 - DNA, 25 bp, SARS Virus
tcggtacaaggggttccacactgaa

SEQ ID NO: 121386 - DNA, 25 bp, SARS Virus
cggtacaagggcgtccacactgaag

SEQ ID NO: 121387 - DNA, 25 bp, SARS Virus
ggtacaagggctgccacactgaagg

SEQ ID NO: 121388 - DNA, 25 bp, SARS Virus
gtacaagggcttgcacactgaaggt

SEQ ID NO: 121389 - DNA, 25 bp, SARS Virus
tacaagggcttcgacactgaaggta

SEQ ID NO: 121390 - DNA, 25 bp, SARS Virus
acaagggcttccgcactgaaggtac

SEQ ID NO: 121391 - DNA, 25 bp, SARS Virus
caagggcttccagactgaaggtacg

SEQ ID NO: 121392 - DNA, 25 bp, SARS Virus
aagggcttccacgctgaaggtacgg

SEQ ID NO: 121393 - DNA, 25 bp, SARS Virus
agggcttccacagtgaaggtacggt

SEQ ID NO: 121394 - DNA, 25 bp, SARS Virus
gggcttccacacggaaggtacggtt

SEQ ID NO: 121395 - DNA, 25 bp, SARS Virus
ggcttccacactgaaggtacggtta

SEQ ID NO: 121396 - DNA, 25 bp, SARS Virus
gcttccacactggaggtacggttac

SEQ ID NO: 121397 - DNA, 25 bp, SARS Virus
cttccacactgagggtacggttacg

SEQ ID NO: 121398 - DNA, 25 bp, SARS Virus
ttccacactgaaggtacggttacgc

SEQ ID NO: 121399 - DNA, 25 bp, SARS Virus
tccacactgaaggtacggttacgca

SEQ ID NO: 121400 - DNA, 25 bp, SARS Virus
ccacactgaagggacggttacgcac

SEQ ID NO: 121401 - DNA, 25 bp, SARS Virus
cacactgaaggtgcggttacgcact

SEQ ID NO: 121402 - DNA, 25 bp, SARS Virus
acactgaaggtagggttacgcactg

SEQ ID NO: 121403 - DNA, 25 bp, SARS Virus
cactgaaggtacggttacgcactgt

SEQ ID NO: 121404 - DNA, 25 bp, SARS Virus
actgaaggtacggttacgcactgta

SEQ ID NO: 121405 - DNA, 25 bp, SARS Virus
ctgaaggtacgggtacgcactgtaa

SEQ ID NO: 121406 - DNA, 25 bp, SARS Virus
tgaaggtacggtgacgcactgtaag

SEQ ID NO: 121407 - DNA, 25 bp, SARS Virus
gaaggtacggttgcgcactgtaagg

SEQ ID NO: 121408 - DNA, 25 bp, SARS Virus
aaggtacggttaggcactgtaaggt

SEQ ID NO: 121409 - DNA, 25 bp, SARS Virus
aggtacggttacgcactgtaaggtt

SEQ ID NO: 121410 - DNA, 25 bp, SARS Virus
ggtacggttacggactgtaaggttt

SEQ ID NO: 121411 - DNA, 25 bp, SARS Virus
gtacggttacgcgctgtaaggtttc

SEQ ID NO: 121412 - DNA, 25 bp, SARS Virus
tacggttacgcagtgtaaggtttct

SEQ ID NO: 121413 - DNA, 25 bp, SARS Virus
acggttacgcacggtaaggtttctt

SEQ ID NO: 121414 - DNA, 25 bp, SARS Virus
cggttacgcactgtaaggtttctta

SEQ ID NO: 121415 - DNA, 25 bp, SARS Virus
ggttacgcactggaaggtttcttac

SEQ ID NO: 121416 - DNA, 25 bp, SARS Virus
gttacgcactgtgaggtttcttacg

SEQ ID NO: 121417 - DNA, 25 bp, SARS Virus
ttacgcactgtagggtttcttacgt

SEQ ID NO: 121418 - DNA, 25 bp, SARS Virus
tacgcactgtaaggtttcttacgtc

SEQ ID NO: 121419 - DNA, 25 bp, SARS Virus
acgcactgtaaggtttcttacgtct

SEQ ID NO: 121420 - DNA, 25 bp, SARS Virus
cgcactgtaagggttcttacgtctc

SEQ ID NO: 121421 - DNA, 25 bp, SARS Virus
gcactgtaaggtgtcttacgtctcc

SEQ ID NO: 121422 - DNA, 25 bp, SARS Virus
cactgtaaggttgcttacgtctccg

SEQ ID NO: 121423 - DNA, 25 bp, SARS Virus
actgtaaggtttgttacgtctccgt

SEQ ID NO: 121424 - DNA, 25 bp, SARS Virus
ctgtaaggtttcgtacgtctccgtg

SEQ ID NO: 121425 - DNA, 25 bp, SARS Virus
tgtaaggtttctgacgtctccgtga

SEQ ID NO: 121426 - DNA, 25 bp, SARS Virus
gtaaggtttcttgcgtctccgtgaa

SEQ ID NO: 121427 - DNA, 25 bp, SARS Virus
taaggtttcttaggtctccgtgaac

SEQ ID NO: 121428 - DNA, 25 bp, SARS Virus
aaggtttcttacgtctccgtgaacc

SEQ ID NO: 121429 - DNA, 25 bp, SARS Virus
aggtttcttacggctccgtgaacct

SEQ ID NO: 121430 - DNA, 25 bp, SARS Virus
ggtttcttacgtgtccgtgaacctc

SEQ ID NO: 121431 - DNA, 25 bp, SARS Virus
gtttcttacgtcgccgtgaacctcg

SEQ ID NO: 121432 - DNA, 25 bp, SARS Virus
tttcttacgtctgcgtgaacctcgt

SEQ ID NO: 121433 - DNA, 25 bp, SARS Virus
ttcttacgtctcggtgaacctcgtt

SEQ ID NO: 121434 - DNA, 25 bp, SARS Virus
tcttacgtctccgtgaacctcgttt

SEQ ID NO: 121435 - DNA, 25 bp, SARS Virus
cttacgtctccgggaacctcgttta

SEQ ID NO: 121436 - DNA, 25 bp, SARS Virus
ttacgtctccgtgaacctcgtttaa

SEQ ID NO: 121437 - DNA, 25 bp, SARS Virus
tacgtctccgtggacctcgtttaac

SEQ ID NO: 121438 - DNA, 25 bp, SARS Virus
acgtctccgtgagcctcgtttaaca

SEQ ID NO: 121439 - DNA, 25 bp, SARS Virus
cgtctccgtgaagctcgtttaacac

SEQ ID NO: 121440 - DNA, 25 bp, SARS Virus
gtctccgtgaacgtcgtttaacacg

SEQ ID NO: 121441 - DNA, 25 bp, SARS Virus
tctccgtgaaccgcgtttaacacgt

SEQ ID NO: 121442 - DNA, 25 bp, SARS Virus
ctccgtgaacctggtttaacacgtt

SEQ ID NO: 121443 - DNA, 25 bp, SARS Virus
tccgtgaacctcgtttaacacgtta

SEQ ID NO: 121444 - DNA, 25 bp, SARS Virus
ccgtgaacctcggttaacacgttaa

SEQ ID NO: 121445 - DNA, 25 bp, SARS Virus
cgtgaacctcgtgtaacacgttaaa

SEQ ID NO: 121446 - DNA, 25 bp, SARS Virus
gtgaacctcgttgaacacgttaaac

SEQ ID NO: 121447 - DNA, 25 bp, SARS Virus
tgaacctcgtttgacacgttaaacg

SEQ ID NO: 121448 - DNA, 25 bp, SARS Virus
gaacctcgtttagcacgttaaacgc

SEQ ID NO: 121449 - DNA, 25 bp, SARS Virus
aacctcgtttaagacgttaaacgcc

SEQ ID NO: 121450 - DNA, 25 bp, SARS Virus
acctcgtttaacgcgttaaacgccg

SEQ ID NO: 121451 - DNA, 25 bp, SARS Virus
cctcgtttaacaggttaaacgccgg

SEQ ID NO: 121452 - DNA, 25 bp, SARS Virus
ctcgtttaacacgttaaacgccggt

SEQ ID NO: 121453 - DNA, 25 bp, SARS Virus
tcgtttaacacggtaaacgccggtt

SEQ ID NO: 121454 - DNA, 25 bp, SARS Virus
cgtttaacacgtgaaacgccggtta

SEQ ID NO: 121455 - DNA, 25 bp, SARS Virus
gtttaacacgttgaacgccggttac

SEQ ID NO: 121456 - DNA, 25 bp, SARS Virus
tttaacacgttagacgccggttaca

SEQ ID NO: 121457 - DNA, 25 bp, SARS Virus
ttaacacgttaagcgccggttacaa

SEQ ID NO: 121458 - DNA, 25 bp, SARS Virus
taacacgttaaaggccggttacaaa

SEQ ID NO: 121459 - DNA, 25 bp, SARS Virus
aacacgttaaacgccggttacaaac

SEQ ID NO: 121460 - DNA, 25 bp, SARS Virus
acacgttaaacggcggttacaaaca

SEQ ID NO: 121461 - DNA, 25 bp, SARS Virus
cacgttaaacgcgggttacaaacat

SEQ ID NO: 121462 - DNA, 25 bp, SARS Virus
acgttaaacgccggttacaaacatt

SEQ ID NO: 121463 - DNA, 25 bp, SARS Virus
cgttaaacgccggttacaaacatta

SEQ ID NO: 121464 - DNA, 25 bp, SARS Virus
gttaaacgccgggtacaaacattag

SEQ ID NO: 121465 - DNA, 25 bp, SARS Virus
ttaaacgccggtgacaaacattagt

SEQ ID NO: 121466 - DNA, 25 bp, SARS Virus
taaacgccggttgcaaacattagtc

SEQ ID NO: 121467 - DNA, 25 bp, SARS Virus
aaacgccggttagaaacattagtca

SEQ ID NO: 121468 - DNA, 25 bp, SARS Virus
aacgccggttacgaacattagtcaa

SEQ ID NO: 121469 - DNA, 25 bp, SARS Virus
acgccggttacagacattagtcaag

SEQ ID NO: 121470 - DNA, 25 bp, SARS Virus
cgccggttacaagcattagtcaagg

SEQ ID NO: 121471 - DNA, 25 bp, SARS Virus
gccggttacaaagattagtcaagga

SEQ ID NO: 121472 - DNA, 25 bp, SARS Virus
ccggttacaaacgttagtcaaggaa

SEQ ID NO: 121473 - DNA, 25 bp, SARS Virus
cggttacaaacagtagtcaaggaac

SEQ ID NO: 121474 - DNA, 25 bp, SARS Virus
ggttacaaacatgagtcaaggaaca

SEQ ID NO: 121475 - DNA, 25 bp, SARS Virus
gttacaaacattggtcaaggaacag

SEQ ID NO: 121476 - DNA, 25 bp, SARS Virus
ttacaaacattagtcaaggaacaga

SEQ ID NO: 121477 - DNA, 25 bp, SARS Virus
tacaaacattaggcaaggaacagac

SEQ ID NO: 121478 - DNA, 25 bp, SARS Virus
acaaacattagtgaaggaacagact

SEQ ID NO: 121479 - DNA, 25 bp, SARS Virus
caaacattagtcgaggaacagacta

SEQ ID NO: 121480 - DNA, 25 bp, SARS Virus
aaacattagtcagggaacagactaa

SEQ ID NO: 121481 - DNA, 25 bp, SARS Virus
aacattagtcaaggaacagactaat

SEQ ID NO: 121482 - DNA, 25 bp, SARS Virus
acattagtcaaggaacagactaatc

SEQ ID NO: 121483 - DNA, 25 bp, SARS Virus
cattagtcaagggacagactaatcc

SEQ ID NO: 121484 - DNA, 25 bp, SARS Virus
attagtcaaggagcagactaatcca

SEQ ID NO: 121485 - DNA, 25 bp, SARS Virus
ttagtcaaggaagagactaatccag

SEQ ID NO: 121486 - DNA, 25 bp, SARS Virus
tagtcaaggaacggactaatccaga

SEQ ID NO: 121487 - DNA, 25 bp, SARS Virus
agtcaaggaacagactaatccagaa

SEQ ID NO: 121488 - DNA, 25 bp, SARS Virus
gtcaaggaacaggctaatccagaac

SEQ ID NO: 121489 - DNA, 25 bp, SARS Virus
tcaaggaacagagtaatccagaacc

SEQ ID NO: 121490 - DNA, 25 bp, SARS Virus
caaggaacagacgaatccagaacca

SEQ ID NO: 121491 - DNA, 25 bp, SARS Virus
aaggaacagactgatccagaaccag

SEQ ID NO: 121492 - DNA, 25 bp, SARS Virus
aggaacagactagtccagaaccagg

SEQ ID NO: 121493 - DNA, 25 bp, SARS Virus
ggaacagactaagccagaaccaggg

SEQ ID NO: 121494 - DNA, 25 bp, SARS Virus
gaacagactaatgcagaaccagggg

SEQ ID NO: 121495 - DNA, 25 bp, SARS Virus
aacagactaatcgagaaccaggggc

SEQ ID NO: 121496 - DNA, 25 bp, SARS Virus
acagactaatccggaaccaggggct

SEQ ID NO: 121497 - DNA, 25 bp, SARS Virus
cagactaatccagaaccaggggctt

SEQ ID NO: 121498 - DNA, 25 bp, SARS Virus
agactaatccaggaccaggggcttt

SEQ ID NO: 121499 - DNA, 25 bp, SARS Virus
gactaatccagagccaggggcttta

SEQ ID NO: 121500 - DNA, 25 bp, SARS Virus
actaatccagaagcaggggctttaa

SEQ ID NO: 121501 - DNA, 25 bp, SARS Virus
ctaatccagaacgaggggctttaaa

SEQ ID NO: 121502 - DNA, 25 bp, SARS Virus
taatccagaaccgggggctttaaag

SEQ ID NO: 121503 - DNA, 25 bp, SARS Virus
aatccagaaccaggggctttaaagg

SEQ ID NO: 121504 - DNA, 25 bp, SARS Virus
atccagaaccaggggctttaaagga

SEQ ID NO: 121505 - DNA, 25 bp, SARS Virus
tccagaaccaggggctttaaaggaa

SEQ ID NO: 121506 - DNA, 25 bp, SARS Virus
ccagaaccaggggctttaaaggaac

SEQ ID NO: 121507 - DNA, 25 bp, SARS Virus
cagaaccagggggtttaaaggaacc

SEQ ID NO: 121508 - DNA, 25 bp, SARS Virus
agaaccaggggcgttaaaggaaccc

SEQ ID NO: 121509 - DNA, 25 bp, SARS Virus
gaaccaggggctgtaaaggaaccca

SEQ ID NO: 121510 - DNA, 25 bp, SARS Virus
aaccaggggcttgaaaggaacccaa

SEQ ID NO: 121511 - DNA, 25 bp, SARS Virus
accaggggctttgaaggaacccaaa

SEQ ID NO: 121512 - DNA, 25 bp, SARS Virus
ccaggggctttagaggaacccaaac

SEQ ID NO: 121513 - DNA, 25 bp, SARS Virus
caggggctttaagggaacccaaaca

SEQ ID NO: 121514 - DNA, 25 bp, SARS Virus
aggggctttaaaggaacccaaacaa

SEQ ID NO: 121515 - DNA, 25 bp, SARS Virus
ggggctttaaaggaacccaaacaag

SEQ ID NO: 121516 - DNA, 25 bp, SARS Virus
gggctttaaagggacccaaacaaga

SEQ ID NO: 121517 - DNA, 25 bp, SARS Virus
ggctttaaaggagcccaaacaagac

SEQ ID NO: 121518 - DNA, 25 bp, SARS Virus
gctttaaaggaagccaaacaagacc

SEQ ID NO: 121519 - DNA, 25 bp, SARS Virus
ctttaaaggaacgcaaacaagacct

SEQ ID NO: 121520 - DNA, 25 bp, SARS Virus
tttaaaggaaccgaaacaagacctg

SEQ ID NO: 121521 - DNA, 25 bp, SARS Virus
ttaaaggaacccgaacaagacctgg

SEQ ID NO: 121522 - DNA, 25 bp, SARS Virus
taaaggaacccagacaagacctggt

SEQ ID NO: 121523 - DNA, 25 bp, SARS Virus
aaaggaacccaagcaagacctggtg

SEQ ID NO: 121524 - DNA, 25 bp, SARS Virus
aaggaacccaaagaagacctggtgc

SEQ ID NO: 121525 - DNA, 25 bp, SARS Virus
aggaacccaaacgagacctggtgca

SEQ ID NO: 121526 - DNA, 25 bp, SARS Virus
ggaacccaaacaggacctggtgcag

SEQ ID NO: 121527 - DNA, 25 bp, SARS Virus
gaacccaaacaagacctggtgcaga

SEQ ID NO: 121528 - DNA, 25 bp, SARS Virus
aacccaaacaaggcctggtgcagag

SEQ ID NO: 121529 - DNA, 25 bp, SARS Virus
acccaaacaagagctggtgcagagg

SEQ ID NO: 121530 - DNA, 25 bp, SARS Virus
cccaaacaagacgtggtgcagaggg

SEQ ID NO: 121531 - DNA, 25 bp, SARS Virus
ccaaacaagaccgggtgcagagggt

SEQ ID NO: 121532 - DNA, 25 bp, SARS Virus
caaacaagacctggtgcagagggtt

SEQ ID NO: 121533 - DNA, 25 bp, SARS Virus
aaacaagacctggtgcagagggttt

SEQ ID NO: 121534 - DNA, 25 bp, SARS Virus
aacaagacctggggcagagggttta

SEQ ID NO: 121535 - DNA, 25 bp, SARS Virus
acaagacctggtgcagagggtttac

SEQ ID NO: 121536 - DNA, 25 bp, SARS Virus
caagacctggtggagagggtttacg

SEQ ID NO: 121537 - DNA, 25 bp, SARS Virus
aagacctggtgcggagggtttacga

SEQ ID NO: 121538 - DNA, 25 bp, SARS Virus
agacctggtgcagagggtttacgaa

SEQ ID NO: 121539 - DNA, 25 bp, SARS Virus
gacctggtgcagggggtttacgaac

SEQ ID NO: 121540 - DNA, 25 bp, SARS Virus
acctggtgcagagggtttacgaact

SEQ ID NO: 121541 - DNA, 25 bp, SARS Virus
cctggtgcagagggtttacgaactc

SEQ ID NO: 121542 - DNA, 25 bp, SARS Virus
ctggtgcagagggtttacgaactca

SEQ ID NO: 121543 - DNA, 25 bp, SARS Virus
tggtgcagaggggttacgaactcac

SEQ ID NO: 121544 - DNA, 25 bp, SARS Virus
ggtgcagagggtgtacgaactcact

SEQ ID NO: 121545 - DNA, 25 bp, SARS Virus
cttaacgctttttcaaatgtatcgg

SEQ ID NO: 121546 - DNA, 25 bp, SARS Virus
ttaacgcttttgtaaatgtatcggg

SEQ ID NO: 121547 - DNA, 25 bp, SARS Virus
taacgcttttgctaatgtatcgggt

SEQ ID NO: 121548 - DNA, 25 bp, SARS Virus
aacgcttttgcatatgtatcgggta

SEQ ID NO: 121549 - DNA, 25 bp, SARS Virus
acgcttttgcaattgtatcgggtag

SEQ ID NO: 121550 - DNA, 25 bp, SARS Virus
cgcttttgcaaatgtatcgggtaga

SEQ ID NO: 121551 - DNA, 25 bp, SARS Virus
gcttttgcaaatttatcgggtagac

SEQ ID NO: 121552 - DNA, 25 bp, SARS Virus
cttttgcaaatgtatcgggtagacg

SEQ ID NO: 121553 - DNA, 25 bp, SARS Virus
ttttgcaaatgtttcgggtagacgg

SEQ ID NO: 121554 - DNA, 25 bp, SARS Virus
tttgcaaatgtatcgggtagacgga

SEQ ID NO: 121555 - DNA, 25 bp, SARS Virus
ttgcaaatgtattgggtagacggaa

SEQ ID NO: 121556 - DNA, 25 bp, SARS Virus
tgcaaatgtatctggtagacggaac

SEQ ID NO: 121557 - DNA, 25 bp, SARS Virus
gcaaatgtatcgtgtagacggaaca

SEQ ID NO: 121558 - DNA, 25 bp, SARS Virus
caaatgtatcggttagacggaacac

SEQ ID NO: 121559 - DNA, 25 bp, SARS Virus
aaatgtatcgggtagacggaacaca

SEQ ID NO: 121560 - DNA, 25 bp, SARS Virus
aatgtatcgggttgacggaacacac

SEQ ID NO: 121561 - DNA, 25 bp, SARS Virus
atgtatcgggtatacggaacacacc

SEQ ID NO: 121562 - DNA, 25 bp, SARS Virus
tgtatcgggtagtcggaacacacca

SEQ ID NO: 121563 - DNA, 25 bp, SARS Virus
gtatcgggtagatggaacacaccag

SEQ ID NO: 121564 - DNA, 25 bp, SARS Virus
tatcgggtagactgaacacaccagt

SEQ ID NO: 121565 - DNA, 25 bp, SARS Virus
atcgggtagacgtaacacaccagta

SEQ ID NO: 121566 - DNA, 25 bp, SARS Virus
tcgggtagacggtacacaccagtag

SEQ ID NO: 121567 - DNA, 25 bp, SARS Virus
cgggtagacggatcacaccagtagt

SEQ ID NO: 121568 - DNA, 25 bp, SARS Virus
gggtagacggaatacaccagtagta

SEQ ID NO: 121569 - DNA, 25 bp, SARS Virus
ggtagacggaactcaccagtagtac

SEQ ID NO: 121570 - DNA, 25 bp, SARS Virus
gtagacggaacataccagtagtact

SEQ ID NO: 121571 - DNA, 25 bp, SARS Virus
tagacggaacactccagtagtactc

SEQ ID NO: 121572 - DNA, 25 bp, SARS Virus
agacggaacacatcagtagtactca

SEQ ID NO: 121573 - DNA, 25 bp, SARS Virus
gacggaacacactagtagtactcac

SEQ ID NO: 121574 - DNA, 25 bp, SARS Virus
acggaacacacctgtagtactcaca

SEQ ID NO: 121575 - DNA, 25 bp, SARS Virus
cggaacacaccattagtactcacaa

SEQ ID NO: 121576 - DNA, 25 bp, SARS Virus
ggaacacaccagtagtactcacaaa

SEQ ID NO: 121577 - DNA, 25 bp, SARS Virus
gaacacaccagttgtactcacaaat

SEQ ID NO: 121578 - DNA, 25 bp, SARS Virus
aacacaccagtattactcacaaata

SEQ ID NO: 121579 - DNA, 25 bp, SARS Virus
acacaccagtagtactcacaaatac

SEQ ID NO: 121580 - DNA, 25 bp, SARS Virus
cacaccagtagttctcacaaatacg

SEQ ID NO: 121581 - DNA, 25 bp, SARS Virus
acaccagtagtattcacaaatacgg

SEQ ID NO: 121582 - DNA, 25 bp, SARS Virus
caccagtagtactcacaaatacgga

SEQ ID NO: 121583 - DNA, 25 bp, SARS Virus
accagtagtacttacaaatacggac

SEQ ID NO: 121584 - DNA, 25 bp, SARS Virus
ccagtagtactctcaaatacggact

SEQ ID NO: 121585 - DNA, 25 bp, SARS Virus
cagtagtactcataaatacggactc

SEQ ID NO: 121586 - DNA, 25 bp, SARS Virus
agtagtactcactaatacggactca

SEQ ID NO: 121587 - DNA, 25 bp, SARS Virus
gtagtactcacatatacggactcaa

SEQ ID NO: 121588 - DNA, 25 bp, SARS Virus
tagtactcacaattacggactcaac

SEQ ID NO: 121589 - DNA, 25 bp, SARS Virus
agtactcacaaatacggactcaact

SEQ ID NO: 121590 - DNA, 25 bp, SARS Virus
gtactcacaaattcggactcaactt

SEQ ID NO: 121591 - DNA, 25 bp, SARS Virus
tactcacaaatatggactcaactta

SEQ ID NO: 121592 - DNA, 25 bp, SARS Virus
actcacaaatactgactcaacttag

SEQ ID NO: 121593 - DNA, 25 bp, SARS Virus
ctcacaaatacgtactcaacttagt

SEQ ID NO: 121594 - DNA, 25 bp, SARS Virus
tcacaaatacggtctcaacttagtc

SEQ ID NO: 121595 - DNA, 25 bp, SARS Virus
cacaaatacggattcaacttagtcg

SEQ ID NO: 121596 - DNA, 25 bp, SARS Virus
acaaatacggactcaacttagtcgt

SEQ ID NO: 121597 - DNA, 25 bp, SARS Virus
caaatacggacttaacttagtcgtc

SEQ ID NO: 121598 - DNA, 25 bp, SARS Virus
aaatacggactctacttagtcgtct

SEQ ID NO: 121599 - DNA, 25 bp, SARS Virus
aatacggactcatcttagtcgtctt

SEQ ID NO: 121600 - DNA, 25 bp, SARS Virus
atacggactcaatttagtcgtcttc

SEQ ID NO: 121601 - DNA, 25 bp, SARS Virus
tacggactcaacttagtcgtcttcg

SEQ ID NO: 121602 - DNA, 25 bp, SARS Virus
acggactcaacttagtcgtcttcga

SEQ ID NO: 121603 - DNA, 25 bp, SARS Virus
cggactcaactttgtcgtcttcgag

SEQ ID NO: 121604 - DNA, 25 bp, SARS Virus
ggactcaacttattcgtcttcgagg

SEQ ID NO: 121605 - DNA, 25 bp, SARS Virus
gactcaacttagtcgtcttcgaggt

SEQ ID NO: 121606 - DNA, 25 bp, SARS Virus
actcaacttagttgtcttcgaggtg

SEQ ID NO: 121607 - DNA, 25 bp, SARS Virus
ctcaacttagtcttcttcgaggtga

SEQ ID NO: 121608 - DNA, 25 bp, SARS Virus
tcaacttagtcgtcttcgaggtgag

SEQ ID NO: 121609 - DNA, 25 bp, SARS Virus
caacttagtcgttttcgaggtgagt

SEQ ID NO: 121610 - DNA, 25 bp, SARS Virus
aacttagtcgtcttcgaggtgagta

SEQ ID NO: 121611 - DNA, 25 bp, SARS Virus
acttagtcgtcttcgaggtgagtac

SEQ ID NO: 121612 - DNA, 25 bp, SARS Virus
cttagtcgtctttgaggtgagtacc

SEQ ID NO: 121613 - DNA, 25 bp, SARS Virus
ttagtcgtcttctaggtgagtacct

SEQ ID NO: 121614 - DNA, 25 bp, SARS Virus
tagtcgtcttcgtggtgagtacctt

SEQ ID NO: 121615 - DNA, 25 bp, SARS Virus
agtcgtcttcgatgtgagtacctta

SEQ ID NO: 121616 - DNA, 25 bp, SARS Virus
gtcgtcttcgagttgagtaccttaa

SEQ ID NO: 121617 - DNA, 25 bp, SARS Virus
tcgtcttcgaggtgagtaccttaaa

SEQ ID NO: 121618 - DNA, 25 bp, SARS Virus
cgtcttcgaggttagtaccttaaaa

SEQ ID NO: 121619 - DNA, 25 bp, SARS Virus
gtcttcgaggtgtgtaccttaaaac

SEQ ID NO: 121620 - DNA, 25 bp, SARS Virus
tcttcgaggtgattaccttaaaact

SEQ ID NO: 121621 - DNA, 25 bp, SARS Virus
cttcgaggtgagtaccttaaaactt

SEQ ID NO: 121622 - DNA, 25 bp, SARS Virus
ttcgaggtgagttccttaaaacttc

SEQ ID NO: 121623 - DNA, 25 bp, SARS Virus
tcgaggtgagtatcttaaaacttca

SEQ ID NO: 121624 - DNA, 25 bp, SARS Virus
cgaggtgagtactttaaaacttcaa

SEQ ID NO: 121625 - DNA, 25 bp, SARS Virus
gaggtgagtaccttaaaacttcaac

SEQ ID NO: 121626 - DNA, 25 bp, SARS Virus
aggtgagtaccttaaaacttcaaca

SEQ ID NO: 121627 - DNA, 25 bp, SARS Virus
ggtgagtacctttaaacttcaacag

SEQ ID NO: 121628 - DNA, 25 bp, SARS Virus
gtgagtaccttataacttcaacaga

SEQ ID NO: 121629 - DNA, 25 bp, SARS Virus
tgagtaccttaatacttcaacagac

SEQ ID NO: 121630 - DNA, 25 bp, SARS Virus
gagtaccttaaatcttcaacagacc

SEQ ID NO: 121631 - DNA, 25 bp, SARS Virus
agtaccttaaaatttcaacagacct

SEQ ID NO: 121632 - DNA, 25 bp, SARS Virus
gtaccttaaaacttcaacagacctc

SEQ ID NO: 121633 - DNA, 25 bp, SARS Virus
taccttaaaacttcaacagacctct

SEQ ID NO: 121634 - DNA, 25 bp, SARS Virus
accttaaaactttaacagacctctt

SEQ ID NO: 121635 - DNA, 25 bp, SARS Virus
ccttaaaacttctacagacctcttt

SEQ ID NO: 121636 - DNA, 25 bp, SARS Virus
cttaaaacttcatcagacctcttta

SEQ ID NO: 121637 - DNA, 25 bp, SARS Virus
ttaaaacttcaatagacctctttag

SEQ ID NO: 121638 - DNA, 25 bp, SARS Virus
taaaacttcaactgacctctttagt

SEQ ID NO: 121639 - DNA, 25 bp, SARS Virus
aaaacttcaacatacctctttagta

SEQ ID NO: 121640 - DNA, 25 bp, SARS Virus
aaacttcaacagtcctctttagtag

SEQ ID NO: 121641 - DNA, 25 bp, SARS Virus
aacttcaacagatctctttagtagg

SEQ ID NO: 121642 - DNA, 25 bp, SARS Virus
acttcaacagacttctttagtaggt

SEQ ID NO: 121643 - DNA, 25 bp, SARS Virus
cttcaacagacctctttagtaggta

SEQ ID NO: 121644 - DNA, 25 bp, SARS Virus
ttcaacagacctttttagtaggtac

SEQ ID NO: 121645 - DNA, 25 bp, SARS Virus
tcaacagacctctttagtaggtaca

SEQ ID NO: 121646 - DNA, 25 bp, SARS Virus
caacagacctctttagtaggtacag

SEQ ID NO: 121647 - DNA, 25 bp, SARS Virus
aacagacctctttagtaggtacagt

SEQ ID NO: 121648 - DNA, 25 bp, SARS Virus
acagacctcttttgtaggtacagtc

SEQ ID NO: 121649 - DNA, 25 bp, SARS Virus
cagacctctttattaggtacagtcg

SEQ ID NO: 121650 - DNA, 25 bp, SARS Virus
agacctctttagtaggtacagtcgg

SEQ ID NO: 121651 - DNA, 25 bp, SARS Virus
gacctctttagttggtacagtcggc

SEQ ID NO: 121652 - DNA, 25 bp, SARS Virus
acctctttagtatgtacagtcggcg

SEQ ID NO: 121653 - DNA, 25 bp, SARS Virus
cctctttagtagttacagtcggcgt

SEQ ID NO: 121654 - DNA, 25 bp, SARS Virus
ctctttagtaggtacagtcggcgtc

SEQ ID NO: 121655 - DNA, 25 bp, SARS Virus
tctttagtaggttcagtcggcgtcc

SEQ ID NO: 121656 - DNA, 25 bp, SARS Virus
ctttagtaggtatagtcggcgtcct

SEQ ID NO: 121657 - DNA, 25 bp, SARS Virus
tttagtaggtactgtcggcgtcctt

SEQ ID NO: 121658 - DNA, 25 bp, SARS Virus
ttagtaggtacattcggcgtccttc

SEQ ID NO: 121659 - DNA, 25 bp, SARS Virus
tagtaggtacagtcggcgtccttct

SEQ ID NO: 121660 - DNA, 25 bp, SARS Virus
agtaggtacagttggcgtccttctt

SEQ ID NO: 121661 - DNA, 25 bp, SARS Virus
gtaggtacagtctgcgtccttcttc

SEQ ID NO: 121662 - DNA, 25 bp, SARS Virus
taggtacagtcgtcgtccttcttct

SEQ ID NO: 121663 - DNA, 25 bp, SARS Virus
aggtacagtcggtgtccttcttctc

SEQ ID NO: 121664 - DNA, 25 bp, SARS Virus
ggtacagtcggcttccttcttctca

SEQ ID NO: 121665 - DNA, 25 bp, SARS Virus
gtacagtcggcgtccttcttctcag

SEQ ID NO: 121666 - DNA, 25 bp, SARS Virus
tacagtcggcgttcttcttctcagt

SEQ ID NO: 121667 - DNA, 25 bp, SARS Virus
acagtcggcgtctttcttctcagtg

SEQ ID NO: 121668 - DNA, 25 bp, SARS Virus
cagtcggcgtccttcttctcagtgt

SEQ ID NO: 121669 - DNA, 25 bp, SARS Virus
agtcggcgtccttcttctcagtgtc

SEQ ID NO: 121670 - DNA, 25 bp, SARS Virus
gtcggcgtcctttttctcagtgtca

SEQ ID NO: 121671 - DNA, 25 bp, SARS Virus
tcggcgtccttcttctcagtgtcac

SEQ ID NO: 121672 - DNA, 25 bp, SARS Virus
cggcgtccttcttctcagtgtcacc

SEQ ID NO: 121673 - DNA, 25 bp, SARS Virus
ggcgtccttcttttcagtgtcaccc

SEQ ID NO: 121674 - DNA, 25 bp, SARS Virus
gcgtccttcttctcagtgtcacccg

SEQ ID NO: 121675 - DNA, 25 bp, SARS Virus
cgtccttcttcttagtgtcacccga

SEQ ID NO: 121676 - DNA, 25 bp, SARS Virus
gtccttcttctctgtgtcacccgac

SEQ ID NO: 121677 - DNA, 25 bp, SARS Virus
tccttcttctcattgtcacccgacg

SEQ ID NO: 121678 - DNA, 25 bp, SARS Virus
ccttcttctcagtgtcacccgacga

SEQ ID NO: 121679 - DNA, 25 bp, SARS Virus
cttcttctcagtttcacccgacgaa

SEQ ID NO: 121680 - DNA, 25 bp, SARS Virus
ttcttctcagtgtcacccgacgaag

SEQ ID NO: 121681 - DNA, 25 bp, SARS Virus
tcttctcagtgttacccgacgaaga

SEQ ID NO: 121682 - DNA, 25 bp, SARS Virus
cttctcagtgtctcccgacgaagaa

SEQ ID NO: 121683 - DNA, 25 bp, SARS Virus
ttctcagtgtcatccgacgaagaaa

SEQ ID NO: 121684 - DNA, 25 bp, SARS Virus
tctcagtgtcactcgacgaagaaaa

SEQ ID NO: 121685 - DNA, 25 bp, SARS Virus
ctcagtgtcacctgacgaagaaaac

SEQ ID NO: 121686 - DNA, 25 bp, SARS Virus
tcagtgtcaccctacgaagaaaaca

SEQ ID NO: 121687 - DNA, 25 bp, SARS Virus
cagtgtcacccgtcgaagaaaacag

SEQ ID NO: 121688 - DNA, 25 bp, SARS Virus
agtgtcacccgatgaagaaaacaga

SEQ ID NO: 121689 - DNA, 25 bp, SARS Virus
gtgtcacccgactaagaaaacagag

SEQ ID NO: 121690 - DNA, 25 bp, SARS Virus
tgtcacccgacgtagaaaacagaga

SEQ ID NO: 121691 - DNA, 25 bp, SARS Virus
gtcacccgacgatgaaaacagagac

SEQ ID NO: 121692 - DNA, 25 bp, SARS Virus
tcacccgacgaataaaacagagacg

SEQ ID NO: 121693 - DNA, 25 bp, SARS Virus
cacccgacgaagtaaacagagacgc

SEQ ID NO: 121694 - DNA, 25 bp, SARS Virus
acccgacgaagataacagagacgcc

SEQ ID NO: 121695 - DNA, 25 bp, SARS Virus
cccgacgaagaatacagagacgccg

SEQ ID NO: 121696 - DNA, 25 bp, SARS Virus
ccgacgaagaaatcagagacgccgt

SEQ ID NO: 121697 - DNA, 25 bp, SARS Virus
cgacgaagaaaatagagacgccgtt

SEQ ID NO: 121698 - DNA, 25 bp, SARS Virus
gacgaagaaaactgagacgccgttt

SEQ ID NO: 121699 - DNA, 25 bp, SARS Virus
acgaagaaaacatagacgccgtttc

SEQ ID NO: 121700 - DNA, 25 bp, SARS Virus
cgaagaaaacagtgacgccgtttcc

SEQ ID NO: 121701 - DNA, 25 bp, SARS Virus
gaagaaaacagatacgccgtttccg

SEQ ID NO: 121702 - DNA, 25 bp, SARS Virus
aagaaaacagagtcgccgtttccga

SEQ ID NO: 121703 - DNA, 25 bp, SARS Virus
agaaaacagagatgccgtttccgac

SEQ ID NO: 121704 - DNA, 25 bp, SARS Virus
gaaaacagagactccgtttccgact

SEQ ID NO: 121705 - DNA, 25 bp, SARS Virus
aaaacagagacgtcgtttccgactc

SEQ ID NO: 121706 - DNA, 25 bp, SARS Virus
aaacagagacgctgtttccgactcg

SEQ ID NO: 121707 - DNA, 25 bp, SARS Virus
aacagagacgccttttccgactcga

SEQ ID NO: 121708 - DNA, 25 bp, SARS Virus
acagagacgccgtttccgactcgaa

SEQ ID NO: 121709 - DNA, 25 bp, SARS Virus
cagagacgccgtttccgactcgaag

SEQ ID NO: 121710 - DNA, 25 bp, SARS Virus
agagacgccgtttccgactcgaagt

SEQ ID NO: 121711 - DNA, 25 bp, SARS Virus
gagacgccgttttcgactcgaagta

SEQ ID NO: 121712 - DNA, 25 bp, SARS Virus
agacgccgtttctgactcgaagtag

SEQ ID NO: 121713 - DNA, 25 bp, SARS Virus
gacgccgtttcctactcgaagtagt

SEQ ID NO: 121714 - DNA, 25 bp, SARS Virus
acgccgtttccgtctcgaagtagtc

SEQ ID NO: 121715 - DNA, 25 bp, SARS Virus
cgccgtttccgattcgaagtagtca

SEQ ID NO: 121716 - DNA, 25 bp, SARS Virus
gccgtttccgactcgaagtagtcag

SEQ ID NO: 121717 - DNA, 25 bp, SARS Virus
ccgtttccgacttgaagtagtcaga

SEQ ID NO: 121718 - DNA, 25 bp, SARS Virus
cgtttccgactctaagtagtcagaa

SEQ ID NO: 121719 - DNA, 25 bp, SARS Virus
gtttccgactcgtagtagtcagaaa

SEQ ID NO: 121720 - DNA, 25 bp, SARS Virus
tttccgactcgatgtagtcagaaaa

SEQ ID NO: 121721 - DNA, 25 bp, SARS Virus
ttccgactcgaattagtcagaaaaa

SEQ ID NO: 121722 - DNA, 25 bp, SARS Virus
tccgactcgaagtagtcagaaaaag

SEQ ID NO: 121723 - DNA, 25 bp, SARS Virus
ccgactcgaagttgtcagaaaaaga

SEQ ID NO: 121724 - DNA, 25 bp, SARS Virus
cgactcgaagtattcagaaaaagaa

SEQ ID NO: 121725 - DNA, 25 bp, SARS Virus
gactcgaagtagtcagaaaaagaaa

SEQ ID NO: 121726 - DNA, 25 bp, SARS Virus
actcgaagtagttagaaaaagaaaa

SEQ ID NO: 121727 - DNA, 25 bp, SARS Virus
ctcgaagtagtctgaaaaagaaaaa

SEQ ID NO: 121728 - DNA, 25 bp, SARS Virus
tcgaagtagtcataaaaagaaaaac

SEQ ID NO: 121729 - DNA, 25 bp, SARS Virus
cgaagtagtcagtaaaagaaaaaca

SEQ ID NO: 121730 - DNA, 25 bp, SARS Virus
gaagtagtcagataaagaaaaacag

SEQ ID NO: 121731 - DNA, 25 bp, SARS Virus
aagtagtcagaataagaaaaacagg

SEQ ID NO: 121732 - DNA, 25 bp, SARS Virus
agtagtcagaaatagaaaaacagga

SEQ ID NO: 121733 - DNA, 25 bp, SARS Virus
gtagtcagaaaatgaaaaacaggaa

SEQ ID NO: 121734 - DNA, 25 bp, SARS Virus
tagtcagaaaaataaaaacaggaaa

SEQ ID NO: 121735 - DNA, 25 bp, SARS Virus
agtcagaaaaagtaaaacaggaaaa

SEQ ID NO: 121736 - DNA, 25 bp, SARS Virus
gtcagaaaaagataaacaggaaaaa

SEQ ID NO: 121737 - DNA, 25 bp, SARS Virus
tcagaaaaagaataacaggaaaaat

SEQ ID NO: 121738 - DNA, 25 bp, SARS Virus
cagaaaaagaaatacaggaaaaatc

SEQ ID NO: 121739 - DNA, 25 bp, SARS Virus
agaaaaagaaaatcaggaaaaatcc

SEQ ID NO: 121740 - DNA, 25 bp, SARS Virus
gaaaaagaaaaataggaaaaatccg

SEQ ID NO: 121741 - DNA, 25 bp, SARS Virus
aaaaagaaaaactggaaaaatccga

SEQ ID NO: 121742 - DNA, 25 bp, SARS Virus
aaaagaaaaacatgaaaaatccgag

SEQ ID NO: 121743 - DNA, 25 bp, SARS Virus
aaagaaaaacagtaaaaatccgaga

SEQ ID NO: 121744 - DNA, 25 bp, SARS Virus
aagaaaaacaggtaaaatccgagac

SEQ ID NO: 121745 - DNA, 25 bp, SARS Virus
agaaaaacaggataaatccgagaca

SEQ ID NO: 121746 - DNA, 25 bp, SARS Virus
gaaaaacaggaataatccgagacaa

SEQ ID NO: 121747 - DNA, 25 bp, SARS Virus
aaaaacaggaaatatccgagacaac

SEQ ID NO: 121748 - DNA, 25 bp, SARS Virus
aaaacaggaaaattccgagacaacc

SEQ ID NO: 121749 - DNA, 25 bp, SARS Virus
aaacaggaaaaatccgagacaacca

SEQ ID NO: 121750 - DNA, 25 bp, SARS Virus
aacaggaaaaattcgagacaaccac

SEQ ID NO: 121751 - DNA, 25 bp, SARS Virus
acaggaaaaatctgagacaaccacc

SEQ ID NO: 121752 - DNA, 25 bp, SARS Virus
caggaaaaatcctagacaaccaccc

SEQ ID NO: 121753 - DNA, 25 bp, SARS Virus
aggaaaaatccgtgacaaccaccct

SEQ ID NO: 121754 - DNA, 25 bp, SARS Virus
ggaaaaatccgatacaaccaccctt

SEQ ID NO: 121755 - DNA, 25 bp, SARS Virus
gaaaaatccgagtcaaccaccctta

SEQ ID NO: 121756 - DNA, 25 bp, SARS Virus
aaaaatccgagataaccacccttac

SEQ ID NO: 121757 - DNA, 25 bp, SARS Virus
aaaatccgagactaccacccttaca

SEQ ID NO: 121758 - DNA, 25 bp, SARS Virus
aaatccgagacatccacccttacaa

SEQ ID NO: 121759 - DNA, 25 bp, SARS Virus
aatccgagacaatcacccttacaaa

SEQ ID NO: 121760 - DNA, 25 bp, SARS Virus
atccgagacaactacccttacaaaa

SEQ ID NO: 121761 - DNA, 25 bp, SARS Virus
tccgagacaacctcccttacaaaac

SEQ ID NO: 121762 - DNA, 25 bp, SARS Virus
ccgagacaaccatccttacaaaaca

SEQ ID NO: 121763 - DNA, 25 bp, SARS Virus
cgagacaaccactcttacaaaacat

SEQ ID NO: 121764 - DNA, 25 bp, SARS Virus
gagacaaccacctttacaaaacata

SEQ ID NO: 121765 - DNA, 25 bp, SARS Virus
agacaaccacccttacaaaacatac

SEQ ID NO: 121766 - DNA, 25 bp, SARS Virus
gacaaccacccttacaaaacatacg

SEQ ID NO: 121767 - DNA, 25 bp, SARS Virus
acaaccaccctttcaaaacatacgc

SEQ ID NO: 121768 - DNA, 25 bp, SARS Virus
caaccacccttataaaacatacgca

SEQ ID NO: 121769 - DNA, 25 bp, SARS Virus
aaccacccttactaaacatacgcag

SEQ ID NO: 121770 - DNA, 25 bp, SARS Virus
accacccttacataacatacgcagt

SEQ ID NO: 121771 - DNA, 25 bp, SARS Virus
ccacccttacaatacatacgcagtt

SEQ ID NO: 121772 - DNA, 25 bp, SARS Virus
cacccttacaaatcatacgcagtta

SEQ ID NO: 121773 - DNA, 25 bp, SARS Virus
acccttacaaaatatacgcagttac

SEQ ID NO: 121774 - DNA, 25 bp, SARS Virus
cccttacaaaacttacgcagttaca

SEQ ID NO: 121775 - DNA, 25 bp, SARS Virus
ccttacaaaacatacgcagttacac

SEQ ID NO: 121776 - DNA, 25 bp, SARS Virus
cttacaaaacattcgcagttacacg

SEQ ID NO: 121777 - DNA, 25 bp, SARS Virus
ttacaaaacatatgcagttacacga

SEQ ID NO: 121778 - DNA, 25 bp, SARS Virus
tacaaaacatactcagttacacgaa

SEQ ID NO: 121779 - DNA, 25 bp, SARS Virus
acaaaacatacgtagttacacgaac

SEQ ID NO: 121780 - DNA, 25 bp, SARS Virus
caaaacatacgctgttacacgaaca

SEQ ID NO: 121781 - DNA, 25 bp, SARS Virus
aaaacatacgcatttacacgaacaa

SEQ ID NO: 121782 - DNA, 25 bp, SARS Virus
aaacatacgcagttacacgaacaag

SEQ ID NO: 121783 - DNA, 25 bp, SARS Virus
aacatacgcagttacacgaacaagt

SEQ ID NO: 121784 - DNA, 25 bp, SARS Virus
acatacgcagtttcacgaacaagtc

SEQ ID NO: 121785 - DNA, 25 bp, SARS Virus
catacgcagttatacgaacaagtcg

SEQ ID NO: 121786 - DNA, 25 bp, SARS Virus
atacgcagttactcgaacaagtcgt

SEQ ID NO: 121787 - DNA, 25 bp, SARS Virus
tacgcagttacatgaacaagtcgtc

SEQ ID NO: 121788 - DNA, 25 bp, SARS Virus
acgcagttacactaacaagtcgtca

SEQ ID NO: 121789 - DNA, 25 bp, SARS Virus
cgcagttacacgtacaagtcgtcat

SEQ ID NO: 121790 - DNA, 25 bp, SARS Virus
gcagttacacgatcaagtcgtcata

SEQ ID NO: 121791 - DNA, 25 bp, SARS Virus
cagttacacgaataagtcgtcatac

SEQ ID NO: 121792 - DNA, 25 bp, SARS Virus
agttacacgaactagtcgtcatact

SEQ ID NO: 121793 - DNA, 25 bp, SARS Virus
gttacacgaacatgtcgtcatactg

SEQ ID NO: 121794 - DNA, 25 bp, SARS Virus
ttacacgaacaattcgtcatactgc

SEQ ID NO: 121795 - DNA, 25 bp, SARS Virus
tacacgaacaagtcgtcatactgca

SEQ ID NO: 121796 - DNA, 25 bp, SARS Virus
acacgaacaagttgtcatactgcaa

SEQ ID NO: 121797 - DNA, 25 bp, SARS Virus
cacgaacaagtcttcatactgcaac

SEQ ID NO: 121798 - DNA, 25 bp, SARS Virus
acgaacaagtcgtcatactgcaaca

SEQ ID NO: 121799 - DNA, 25 bp, SARS Virus
cgaacaagtcgttatactgcaacag

SEQ ID NO: 121800 - DNA, 25 bp, SARS Virus
gaacaagtcgtcttactgcaacaga

SEQ ID NO: 121801 - DNA, 25 bp, SARS Virus
aacaagtcgtcatactgcaacagaa

SEQ ID NO: 121802 - DNA, 25 bp, SARS Virus
acaagtcgtcattctgcaacagaaa

SEQ ID NO: 121803 - DNA, 25 bp, SARS Virus
caagtcgtcatattgcaacagaaac

SEQ ID NO: 121804 - DNA, 25 bp, SARS Virus
aagtcgtcatactgcaacagaaact

SEQ ID NO: 121805 - DNA, 25 bp, SARS Virus
agtcgtcatacttcaacagaaactt

SEQ ID NO: 121806 - DNA, 25 bp, SARS Virus
gtcgtcatactgtaacagaaactta

SEQ ID NO: 121807 - DNA, 25 bp, SARS Virus
tcgtcatactgctacagaaacttaa

SEQ ID NO: 121808 - DNA, 25 bp, SARS Virus
cgtcatactgcatcagaaacttaac

SEQ ID NO: 121809 - DNA, 25 bp, SARS Virus
gtcatactgcaatagaaacttaaca

SEQ ID NO: 121810 - DNA, 25 bp, SARS Virus
tcatactgcaactgaaacttaacac

SEQ ID NO: 121811 - DNA, 25 bp, SARS Virus
catactgcaacataaacttaacacc

SEQ ID NO: 121812 - DNA, 25 bp, SARS Virus
atactgcaacagtaacttaacacct

SEQ ID NO: 121813 - DNA, 25 bp, SARS Virus
tactgcaacagatacttaacaccta

SEQ ID NO: 121814 - DNA, 25 bp, SARS Virus
actgcaacagaatcttaacacctag

SEQ ID NO: 121815 - DNA, 25 bp, SARS Virus
ctgcaacagaaatttaacacctaga

SEQ ID NO: 121816 - DNA, 25 bp, SARS Virus
tgcaacagaaacttaacacctagaa

SEQ ID NO: 121817 - DNA, 25 bp, SARS Virus
gcaacagaaacttaacacctagaaa

SEQ ID NO: 121818 - DNA, 25 bp, SARS Virus
caacagaaactttacacctagaaac

SEQ ID NO: 121819 - DNA, 25 bp, SARS Virus
aacagaaacttatcacctagaaaca

SEQ ID NO: 121820 - DNA, 25 bp, SARS Virus
acagaaacttaatacctagaaacag

SEQ ID NO: 121821 - DNA, 25 bp, SARS Virus
cagaaacttaactcctagaaacagt

SEQ ID NO: 121822 - DNA, 25 bp, SARS Virus
agaaacttaacatctagaaacagta

SEQ ID NO: 121823 - DNA, 25 bp, SARS Virus
gaaacttaacacttagaaacagtag

SEQ ID NO: 121824 - DNA, 25 bp, SARS Virus
aaacttaacacctagaaacagtagg

SEQ ID NO: 121825 - DNA, 25 bp, SARS Virus
aacttaacaccttgaaacagtaggt

SEQ ID NO: 121826 - DNA, 25 bp, SARS Virus
acttaacacctataaacagtaggtt

SEQ ID NO: 121827 - DNA, 25 bp, SARS Virus
cttaacacctagtaacagtaggtta

SEQ ID NO: 121828 - DNA, 25 bp, SARS Virus
ttaacacctagatacagtaggttaa

SEQ ID NO: 121829 - DNA, 25 bp, SARS Virus
taacacctagaatcagtaggttaaa

SEQ ID NO: 121830 - DNA, 25 bp, SARS Virus
aacacctagaaatagtaggttaaat

SEQ ID NO: 121831 - DNA, 25 bp, SARS Virus
acacctagaaactgtaggttaaatt

SEQ ID NO: 121832 - DNA, 25 bp, SARS Virus
cacctagaaacattaggttaaatta

SEQ ID NO: 121833 - DNA, 25 bp, SARS Virus
acctagaaacagtaggttaaattac

SEQ ID NO: 121834 - DNA, 25 bp, SARS Virus
cctagaaacagttggttaaattacc

SEQ ID NO: 121835 - DNA, 25 bp, SARS Virus
ctagaaacagtatgttaaattaccg

SEQ ID NO: 121836 - DNA, 25 bp, SARS Virus
tagaaacagtagtttaaattaccga

SEQ ID NO: 121837 - DNA, 25 bp, SARS Virus
agaaacagtaggttaaattaccgag

SEQ ID NO: 121838 - DNA, 25 bp, SARS Virus
gaaacagtaggttaaattaccgagg

SEQ ID NO: 121839 - DNA, 25 bp, SARS Virus
aaacagtaggtttaattaccgaggt

SEQ ID NO: 121840 - DNA, 25 bp, SARS Virus
aacagtaggttatattaccgaggta

SEQ ID NO: 121841 - DNA, 25 bp, SARS Virus
acagtaggttaatttaccgaggtac

SEQ ID NO: 121842 - DNA, 25 bp, SARS Virus
cagtaggttaaattaccgaggtact

SEQ ID NO: 121843 - DNA, 25 bp, SARS Virus
agtaggttaaattaccgaggtacta

SEQ ID NO: 121844 - DNA, 25 bp, SARS Virus
gtaggttaaatttccgaggtactat

SEQ ID NO: 121845 - DNA, 25 bp, SARS Virus
taggttaaattatcgaggtactatt

SEQ ID NO: 121846 - DNA, 25 bp, SARS Virus
aggttaaattactgaggtactattc

SEQ ID NO: 121847 - DNA, 25 bp, SARS Virus
ggttaaattacctaggtactattca

SEQ ID NO: 121848 - DNA, 25 bp, SARS Virus
gttaaattaccgtggtactattcag

SEQ ID NO: 121849 - DNA, 25 bp, SARS Virus
ttaaattaccgatgtactattcagt

SEQ ID NO: 121850 - DNA, 25 bp, SARS Virus
taaattaccgagttactattcagtc

SEQ ID NO: 121851 - DNA, 25 bp, SARS Virus
aaattaccgaggtactattcagtcg

SEQ ID NO: 121852 - DNA, 25 bp, SARS Virus
aattaccgaggttctattcagtcgg

SEQ ID NO: 121853 - DNA, 25 bp, SARS Virus
attaccgaggtattattcagtcggt

SEQ ID NO: 121854 - DNA, 25 bp, SARS Virus
ttaccgaggtactattcagtcggta

SEQ ID NO: 121855 - DNA, 25 bp, SARS Virus
taccgaggtacttttcagtcggtac

SEQ ID NO: 121856 - DNA, 25 bp, SARS Virus
accgaggtactattcagtcggtaca

SEQ ID NO: 121857 - DNA, 25 bp, SARS Virus
ccgaggtactattcagtcggtacaa

SEQ ID NO: 121858 - DNA, 25 bp, SARS Virus
cgaggtactatttagtcggtacaag

SEQ ID NO: 121859 - DNA, 25 bp, SARS Virus
gaggtactattctgtcggtacaagg

SEQ ID NO: 121860 - DNA, 25 bp, SARS Virus
aggtactattcattcggtacaaggg

SEQ ID NO: 121861 - DNA, 25 bp, SARS Virus
ggtactattcagtcggtacaagggc

SEQ ID NO: 121862 - DNA, 25 bp, SARS Virus
gtactattcagttggtacaagggct

SEQ ID NO: 121863 - DNA, 25 bp, SARS Virus
tactattcagtctgtacaagggctt

SEQ ID NO: 121864 - DNA, 25 bp, SARS Virus
actattcagtcgttacaagggcttc

SEQ ID NO: 121865 - DNA, 25 bp, SARS Virus
ctattcagtcggtacaagggcttcc

SEQ ID NO: 121866 - DNA, 25 bp, SARS Virus
tattcagtcggttcaagggcttcca

SEQ ID NO: 121867 - DNA, 25 bp, SARS Virus
attcagtcggtataagggcttccac

SEQ ID NO: 121868 - DNA, 25 bp, SARS Virus
ttcagtcggtactagggcttccaca

SEQ ID NO: 121869 - DNA, 25 bp, SARS Virus
tcagtcggtacatgggcttccacac

SEQ ID NO: 121870 - DNA, 25 bp, SARS Virus
cagtcggtacaatggcttccacact

SEQ ID NO: 121871 - DNA, 25 bp, SARS Virus
agtcggtacaagtgcttccacactg

SEQ ID NO: 121872 - DNA, 25 bp, SARS Virus
gtcggtacaaggtcttccacactga

SEQ ID NO: 121873 - DNA, 25 bp, SARS Virus
tcggtacaagggtttccacactgaa

SEQ ID NO: 121874 - DNA, 25 bp, SARS Virus
cggtacaagggcttccacactgaag

SEQ ID NO: 121875 - DNA, 25 bp, SARS Virus
ggtacaagggcttccacactgaagg

SEQ ID NO: 121876 - DNA, 25 bp, SARS Virus
gtacaagggctttcacactgaaggt

SEQ ID NO: 121877 - DNA, 25 bp, SARS Virus
tacaagggcttctacactgaaggta

SEQ ID NO: 121878 - DNA, 25 bp, SARS Virus
acaagggcttcctcactgaaggtac

SEQ ID NO: 121879 - DNA, 25 bp, SARS Virus
caagggcttccatactgaaggtacg

SEQ ID NO: 121880 - DNA, 25 bp, SARS Virus
aagggcttccactctgaaggtacgg

SEQ ID NO: 121881 - DNA, 25 bp, SARS Virus
agggcttccacattgaaggtacggt

SEQ ID NO: 121882 - DNA, 25 bp, SARS Virus
gggcttccacactgaaggtacggtt

SEQ ID NO: 121883 - DNA, 25 bp, SARS Virus
ggcttccacacttaaggtacggtta

SEQ ID NO: 121884 - DNA, 25 bp, SARS Virus
gcttccacactgtaggtacggttac

SEQ ID NO: 121885 - DNA, 25 bp, SARS Virus
cttccacactgatggtacggttacg

SEQ ID NO: 121886 - DNA, 25 bp, SARS Virus
ttccacactgaatgtacggttacgc

SEQ ID NO: 121887 - DNA, 25 bp, SARS Virus
tccacactgaagttacggttacgca

SEQ ID NO: 121888 - DNA, 25 bp, SARS Virus
ccacactgaaggtacggttacgcac

SEQ ID NO: 121889 - DNA, 25 bp, SARS Virus
cacactgaaggttcggttacgcact

SEQ ID NO: 121890 - DNA, 25 bp, SARS Virus
acactgaaggtatggttacgcactg

SEQ ID NO: 121891 - DNA, 25 bp, SARS Virus
cactgaaggtactgttacgcactgt

SEQ ID NO: 121892 - DNA, 25 bp, SARS Virus
actgaaggtacgtttacgcactgta

SEQ ID NO: 121893 - DNA, 25 bp, SARS Virus
ctgaaggtacggttacgcactgtaa

SEQ ID NO: 121894 - DNA, 25 bp, SARS Virus
tgaaggtacggttacgcactgtaag

SEQ ID NO: 121895 - DNA, 25 bp, SARS Virus
gaaggtacggtttcgcactgtaagg

SEQ ID NO: 121896 - DNA, 25 bp, SARS Virus
aaggtacggttatgcactgtaaggt

SEQ ID NO: 121897 - DNA, 25 bp, SARS Virus
aggtacggttactcactgtaaggtt

SEQ ID NO: 121898 - DNA, 25 bp, SARS Virus
ggtacggttacgtactgtaaggttt

SEQ ID NO: 121899 - DNA, 25 bp, SARS Virus
gtacggttacgctctgtaaggtttc

SEQ ID NO: 121900 - DNA, 25 bp, SARS Virus
tacggttacgcattgtaaggtttct

SEQ ID NO: 121901 - DNA, 25 bp, SARS Virus
acggttacgcactgtaaggtttctt

SEQ ID NO: 121902 - DNA, 25 bp, SARS Virus
cggttacgcactttaaggtttctta

SEQ ID NO: 121903 - DNA, 25 bp, SARS Virus
ggttacgcactgtaaggtttcttac

SEQ ID NO: 121904 - DNA, 25 bp, SARS Virus
gttacgcactgttaggtttcttacg

SEQ ID NO: 121905 - DNA, 25 bp, SARS Virus
ttacgcactgtatggtttcttacgt

SEQ ID NO: 121906 - DNA, 25 bp, SARS Virus
tacgcactgtaatgtttcttacgtc

SEQ ID NO: 121907 - DNA, 25 bp, SARS Virus
acgcactgtaagttttcttacgtct

SEQ ID NO: 121908 - DNA, 25 bp, SARS Virus
cgcactgtaaggtttcttacgtctc

SEQ ID NO: 121909 - DNA, 25 bp, SARS Virus
gcactgtaaggtttcttacgtctcc

SEQ ID NO: 121910 - DNA, 25 bp, SARS Virus
cactgtaaggtttcttacgtctccg

SEQ ID NO: 121911 - DNA, 25 bp, SARS Virus
actgtaaggttttttacgtctccgt

SEQ ID NO: 121912 - DNA, 25 bp, SARS Virus
ctgtaaggtttcttacgtctccgtg

SEQ ID NO: 121913 - DNA, 25 bp, SARS Virus
tgtaaggtttcttacgtctccgtga

SEQ ID NO: 121914 - DNA, 25 bp, SARS Virus
gtaaggtttctttcgtctccgtgaa

SEQ ID NO: 121915 - DNA, 25 bp, SARS Virus
taaggtttcttatgtctccgtgaac

SEQ ID NO: 121916 - DNA, 25 bp, SARS Virus
aaggtttcttacttctccgtgaacc

SEQ ID NO: 121917 - DNA, 25 bp, SARS Virus
aggtttcttacgtctccgtgaacct

SEQ ID NO: 121918 - DNA, 25 bp, SARS Virus
ggtttcttacgtttccgtgaacctc

SEQ ID NO: 121919 - DNA, 25 bp, SARS Virus
gtttcttacgtctccgtgaacctcg

SEQ ID NO: 121920 - DNA, 25 bp, SARS Virus
tttcttacgtcttcgtgaacctcgt

SEQ ID NO: 121921 - DNA, 25 bp, SARS Virus
ttcttacgtctctgtgaacctcgtt

SEQ ID NO: 121922 - DNA, 25 bp, SARS Virus
tcttacgtctccttgaacctcgttt

SEQ ID NO: 121923 - DNA, 25 bp, SARS Virus
cttacgtctccgtgaacctcgttta

SEQ ID NO: 121924 - DNA, 25 bp, SARS Virus
ttacgtctccgttaacctcgtttaa

SEQ ID NO: 121925 - DNA, 25 bp, SARS Virus
tacgtctccgtgtacctcgtttaac

SEQ ID NO: 121926 - DNA, 25 bp, SARS Virus
acgtctccgtgatcctcgtttaaca

SEQ ID NO: 121927 - DNA, 25 bp, SARS Virus
cgtctccgtgaatctcgtttaacac

SEQ ID NO: 121928 - DNA, 25 bp, SARS Virus
gtctccgtgaacttcgtttaacacg

SEQ ID NO: 121929 - DNA, 25 bp, SARS Virus
tctccgtgaacctcgtttaacacgt

SEQ ID NO: 121930 - DNA, 25 bp, SARS Virus
ctccgtgaaccttgtttaacacgtt

SEQ ID NO: 121931 - DNA, 25 bp, SARS Virus
tccgtgaacctcttttaacacgtta

SEQ ID NO: 121932 - DNA, 25 bp, SARS Virus
ccgtgaacctcgtttaacacgttaa

SEQ ID NO: 121933 - DNA, 25 bp, SARS Virus
cgtgaacctcgtttaacacgttaaa

SEQ ID NO: 121934 - DNA, 25 bp, SARS Virus
gtgaacctcgtttaacacgttaaac

SEQ ID NO: 121935 - DNA, 25 bp, SARS Virus
tgaacctcgttttacacgttaaacg

SEQ ID NO: 121936 - DNA, 25 bp, SARS Virus
gaacctcgtttatcacgttaaacgc

SEQ ID NO: 121937 - DNA, 25 bp, SARS Virus
aacctcgtttaatacgttaaacgcc

SEQ ID NO: 121938 - DNA, 25 bp, SARS Virus
acctcgtttaactcgttaaacgccg

SEQ ID NO: 121939 - DNA, 25 bp, SARS Virus
cctcgtttaacatgttaaacgccgg

SEQ ID NO: 121940 - DNA, 25 bp, SARS Virus
ctcgtttaacactttaaacgccggt

SEQ ID NO: 121941 - DNA, 25 bp, SARS Virus
tcgtttaacacgttaaacgccggtt

SEQ ID NO: 121942 - DNA, 25 bp, SARS Virus
cgtttaacacgttaaacgccggtta

SEQ ID NO: 121943 - DNA, 25 bp, SARS Virus
gtttaacacgtttaacgccggttac

SEQ ID NO: 121944 - DNA, 25 bp, SARS Virus
tttaacacgttatacgccggttaca

SEQ ID NO: 121945 - DNA, 25 bp, SARS Virus
ttaacacgttaatcgccggttacaa

SEQ ID NO: 121946 - DNA, 25 bp, SARS Virus
taacacgttaaatgccggttacaaa

SEQ ID NO: 121947 - DNA, 25 bp, SARS Virus
aacacgttaaactccggttacaaac

SEQ ID NO: 121948 - DNA, 25 bp, SARS Virus
acacgttaaacgtcggttacaaaca

SEQ ID NO: 121949 - DNA, 25 bp, SARS Virus
cacgttaaacgctggttacaaacat

SEQ ID NO: 121950 - DNA, 25 bp, SARS Virus
acgttaaacgcctgttacaaacatt

SEQ ID NO: 121951 - DNA, 25 bp, SARS Virus
cgttaaacgccgtttacaaacatta

SEQ ID NO: 121952 - DNA, 25 bp, SARS Virus
gttaaacgccggttacaaacattag

SEQ ID NO: 121953 - DNA, 25 bp, SARS Virus
ttaaacgccggttacaaacattagt

SEQ ID NO: 121954 - DNA, 25 bp, SARS Virus
taaacgccggtttcaaacattagtc

SEQ ID NO: 121955 - DNA, 25 bp, SARS Virus
aaacgccggttataaacattagtca

SEQ ID NO: 121956 - DNA, 25 bp, SARS Virus
aacgccggttactaacattagtcaa

SEQ ID NO: 121957 - DNA, 25 bp, SARS Virus
acgccggttacatacattagtcaag

SEQ ID NO: 121958 - DNA, 25 bp, SARS Virus
cgccggttacaatcattagtcaagg

SEQ ID NO: 121959 - DNA, 25 bp, SARS Virus
gccggttacaaatattagtcaagga

SEQ ID NO: 121960 - DNA, 25 bp, SARS Virus
ccggttacaaactttagtcaaggaa

SEQ ID NO: 121961 - DNA, 25 bp, SARS Virus
cggttacaaacattagtcaaggaac

SEQ ID NO: 121962 - DNA, 25 bp, SARS Virus
ggttacaaacattagtcaaggaaca

SEQ ID NO: 121963 - DNA, 25 bp, SARS Virus
gttacaaacatttgtcaaggaacag

SEQ ID NO: 121964 - DNA, 25 bp, SARS Virus
ttacaaacattattcaaggaacaga

SEQ ID NO: 121965 - DNA, 25 bp, SARS Virus
tacaaacattagtcaaggaacagac

SEQ ID NO: 121966 - DNA, 25 bp, SARS Virus
acaaacattagttaaggaacagact

SEQ ID NO: 121967 - DNA, 25 bp, SARS Virus
caaacattagtctaggaacagacta

SEQ ID NO: 121968 - DNA, 25 bp, SARS Virus
aaacattagtcatggaacagactaa

SEQ ID NO: 121969 - DNA, 25 bp, SARS Virus
aacattagtcaatgaacagactaat

SEQ ID NO: 121970 - DNA, 25 bp, SARS Virus
acattagtcaagtaacagactaatc

SEQ ID NO: 121971 - DNA, 25 bp, SARS Virus
cattagtcaaggtacagactaatcc

SEQ ID NO: 121972 - DNA, 25 bp, SARS Virus
attagtcaaggatcagactaatcca

SEQ ID NO: 121973 - DNA, 25 bp, SARS Virus
ttagtcaaggaatagactaatccag

SEQ ID NO: 121974 - DNA, 25 bp, SARS Virus
tagtcaaggaactgactaatccaga

SEQ ID NO: 121975 - DNA, 25 bp, SARS Virus
agtcaaggaacatactaatccagaa

SEQ ID NO: 121976 - DNA, 25 bp, SARS Virus
gtcaaggaacagtctaatccagaac

SEQ ID NO: 121977 - DNA, 25 bp, SARS Virus
tcaaggaacagattaatccagaacc

SEQ ID NO: 121978 - DNA, 25 bp, SARS Virus
caaggaacagactaatccagaacca

SEQ ID NO: 121979 - DNA, 25 bp, SARS Virus
aaggaacagacttatccagaaccag

SEQ ID NO: 121980 - DNA, 25 bp, SARS Virus
aggaacagactattccagaaccagg

SEQ ID NO: 121981 - DNA, 25 bp, SARS Virus
ggaacagactaatccagaaccaggg

SEQ ID NO: 121982 - DNA, 25 bp, SARS Virus
gaacagactaattcagaaccagggg

SEQ ID NO: 121983 - DNA, 25 bp, SARS Virus
aacagactaatctagaaccaggggc

SEQ ID NO: 121984 - DNA, 25 bp, SARS Virus
acagactaatcctgaaccaggggct

SEQ ID NO: 121985 - DNA, 25 bp, SARS Virus
cagactaatccataaccaggggctt

SEQ ID NO: 121986 - DNA, 25 bp, SARS Virus
agactaatccagtaccaggggcttt

SEQ ID NO: 121987 - DNA, 25 bp, SARS Virus
gactaatccagatccaggggcttta

SEQ ID NO: 121988 - DNA, 25 bp, SARS Virus
actaatccagaatcaggggctttaa

SEQ ID NO: 121989 - DNA, 25 bp, SARS Virus
ctaatccagaactaggggctttaaa

SEQ ID NO: 121990 - DNA, 25 bp, SARS Virus
taatccagaacctggggctttaaag

SEQ ID NO: 121991 - DNA, 25 bp, SARS Virus
aatccagaaccatgggctttaaagg

SEQ ID NO: 121992 - DNA, 25 bp, SARS Virus
atccagaaccagtggctttaaagga

SEQ ID NO: 121993 - DNA, 25 bp, SARS Virus
tccagaaccaggtgctttaaaggaa

SEQ ID NO: 121994 - DNA, 25 bp, SARS Virus
ccagaaccagggtctttaaaggaac

SEQ ID NO: 121995 - DNA, 25 bp, SARS Virus
cagaaccaggggttttaaaggaacc

SEQ ID NO: 121996 - DNA, 25 bp, SARS Virus
agaaccaggggctttaaaggaaccc

SEQ ID NO: 121997 - DNA, 25 bp, SARS Virus
gaaccaggggctttaaaggaaccca

SEQ ID NO: 121998 - DNA, 25 bp, SARS Virus
aaccaggggctttaaaggaacccaa

SEQ ID NO: 121999 - DNA, 25 bp, SARS Virus
accaggggcttttaaggaacccaaa

SEQ ID NO: 122000 - DNA, 25 bp, SARS Virus
ccaggggctttataggaacccaaac

SEQ ID NO: 122001 - DNA, 25 bp, SARS Virus
caggggctttaatggaacccaaaca

SEQ ID NO: 122002 - DNA, 25 bp, SARS Virus
aggggctttaaatgaacccaaacaa

SEQ ID NO: 122003 - DNA, 25 bp, SARS Virus
ggggctttaaagtaacccaaacaag

SEQ ID NO: 122004 - DNA, 25 bp, SARS Virus
gggctttaaaggtacccaaacaaga

SEQ ID NO: 122005 - DNA, 25 bp, SARS Virus
ggctttaaaggatcccaaacaagac

SEQ ID NO: 122006 - DNA, 25 bp, SARS Virus
gctttaaaggaatccaaacaagacc

SEQ ID NO: 122007 - DNA, 25 bp, SARS Virus
ctttaaaggaactcaaacaagacct

SEQ ID NO: 122008 - DNA, 25 bp, SARS Virus
tttaaaggaacctaaacaagacctg

SEQ ID NO: 122009 - DNA, 25 bp, SARS Virus
ttaaaggaaccctaacaagacctgg

SEQ ID NO: 122010 - DNA, 25 bp, SARS Virus
taaaggaacccatacaagacctggt

SEQ ID NO: 122011 - DNA, 25 bp, SARS Virus
aaaggaacccaatcaagacctggtg

SEQ ID NO: 122012 - DNA, 25 bp, SARS Virus
aaggaacccaaataagacctggtgc

SEQ ID NO: 122013 - DNA, 25 bp, SARS Virus
aggaacccaaactagacctggtgca

SEQ ID NO: 122014 - DNA, 25 bp, SARS Virus
ggaacccaaacatgacctggtgcag

SEQ ID NO: 122015 - DNA, 25 bp, SARS Virus
gaacccaaacaatacctggtgcaga

SEQ ID NO: 122016 - DNA, 25 bp, SARS Virus
aacccaaacaagtcctggtgcagag

SEQ ID NO: 122017 - DNA, 25 bp, SARS Virus
acccaaacaagatctggtgcagagg

SEQ ID NO: 122018 - DNA, 25 bp, SARS Virus
cccaaacaagacttggtgcagaggg

SEQ ID NO: 122019 - DNA, 25 bp, SARS Virus
ccaaacaagacctggtgcagagggt

SEQ ID NO: 122020 - DNA, 25 bp, SARS Virus
caaacaagaccttgtgcagagggtt

SEQ ID NO: 122021 - DNA, 25 bp, SARS Virus
aaacaagacctgttgcagagggttt

SEQ ID NO: 122022 - DNA, 25 bp, SARS Virus
aacaagacctggtgcagagggttta

SEQ ID NO: 122023 - DNA, 25 bp, SARS Virus
acaagacctggttcagagggtttac

SEQ ID NO: 122024 - DNA, 25 bp, SARS Virus
caagacctggtgtagagggtttacg

SEQ ID NO: 122025 - DNA, 25 bp, SARS Virus
aagacctggtgctgagggtttacga

SEQ ID NO: 122026 - DNA, 25 bp, SARS Virus
agacctggtgcatagggtttacgaa

SEQ ID NO: 122027 - DNA, 25 bp, SARS Virus
gacctggtgcagtgggtttacgaac

SEQ ID NO: 122028 - DNA, 25 bp, SARS Virus
acctggtgcagatggtttacgaact

SEQ ID NO: 122029 - DNA, 25 bp, SARS Virus
cctggtgcagagtgtttacgaactc

SEQ ID NO: 122030 - DNA, 25 bp, SARS Virus
ctggtgcagaggttttacgaactca

SEQ ID NO: 122031 - DNA, 25 bp, SARS Virus
tggtgcagagggtttacgaactcac

SEQ ID NO: 122032 - DNA, 25 bp, SARS Virus
ggtgcagagggtttacgaactcact

SEQ ID NO: 122033 - DNA, 25 bp, SARS Virus
gtgcagagggttaacgaactcactg

SEQ ID NO: 122034 - DNA, 25 bp, SARS Virus
tgcagagggtttacgaactcactgc

SEQ ID NO: 122035 - DNA, 25 bp, SARS Virus
gcagagggtttaagaactcactgca

SEQ ID NO: 122036 - DNA, 25 bp, SARS Virus
cagagggtttacaaactcactgcaa

SEQ ID NO: 122037 - DNA, 25 bp, SARS Virus
agagggtttacgaactcactgcaac

SEQ ID NO: 122038 - DNA, 25 bp, SARS Virus
gagggtttacgaactcactgcaaca

SEQ ID NO: 122039 - DNA, 25 bp, SARS Virus
agggtttacgaaatcactgcaacat

SEQ ID NO: 122040 - DNA, 25 bp, SARS Virus
gggtttacgaacacactgcaacatg

SEQ ID NO: 122041 - DNA, 25 bp, SARS Virus
ggtttacgaactaactgcaacatga

SEQ ID NO: 122042 - DNA, 25 bp, SARS Virus
gtttacgaactcactgcaacatgac

SEQ ID NO: 122043 - DNA, 25 bp, SARS Virus
tttacgaactcaatgcaacatgaca

SEQ ID NO: 122044 - DNA, 25 bp, SARS Virus
ttacgaactcacagcaacatgacaa

SEQ ID NO: 122045 - DNA, 25 bp, SARS Virus
tacgaactcactacaacatgacaaa

SEQ ID NO: 122046 - DNA, 25 bp, SARS Virus
acgaactcactgaaacatgacaaaa

SEQ ID NO: 122047 - DNA, 25 bp, SARS Virus
cgaactcactgcaacatgacaaaac

SEQ ID NO: 122048 - DNA, 25 bp, SARS Virus
gaactcactgcaacatgacaaaaca

SEQ ID NO: 122049 - DNA, 25 bp, SARS Virus
aactcactgcaaaatgacaaaacac

SEQ ID NO: 122050 - DNA, 25 bp, SARS Virus
actcactgcaacatgacaaaacacc

SEQ ID NO: 122051 - DNA, 25 bp, SARS Virus
ctcactgcaacaagacaaaacaccg

SEQ ID NO: 122052 - DNA, 25 bp, SARS Virus
tcactgcaacataacaaaacaccgt

SEQ ID NO: 122053 - DNA, 25 bp, SARS Virus
cactgcaacatgacaaaacaccgtc

SEQ ID NO: 122054 - DNA, 25 bp, SARS Virus
actgcaacatgaaaaaacaccgtca

SEQ ID NO: 122055 - DNA, 25 bp, SARS Virus
ctgcaacatgacaaaacaccgtcat

SEQ ID NO: 122056 - DNA, 25 bp, SARS Virus
tgcaacatgacaaaacaccgtcatg

SEQ ID NO: 122057 - DNA, 25 bp, SARS Virus
gcaacatgacaaaacaccgtcatgc

SEQ ID NO: 122058 - DNA, 25 bp, SARS Virus
caacatgacaaaacaccgtcatgca

SEQ ID NO: 122059 - DNA, 25 bp, SARS Virus
aacatgacaaaaaaccgtcatgcaa

SEQ ID NO: 122060 - DNA, 25 bp, SARS Virus
acatgacaaaacaccgtcatgcaaa

SEQ ID NO: 122061 - DNA, 25 bp, SARS Virus
catgacaaaacaacgtcatgcaaaa

SEQ ID NO: 122062 - DNA, 25 bp, SARS Virus
atgacaaaacacagtcatgcaaaaa

SEQ ID NO: 122063 - DNA, 25 bp, SARS Virus
tgacaaaacaccatcatgcaaaaac

SEQ ID NO: 122064 - DNA, 25 bp, SARS Virus
gacaaaacaccgacatgcaaaaacc

SEQ ID NO: 122065 - DNA, 25 bp, SARS Virus
acaaaacaccgtaatgcaaaaaccg

SEQ ID NO: 122066 - DNA, 25 bp, SARS Virus
caaaacaccgtcatgcaaaaaccgc

SEQ ID NO: 122067 - DNA, 25 bp, SARS Virus
aaaacaccgtcaagcaaaaaccgct

SEQ ID NO: 122068 - DNA, 25 bp, SARS Virus
aaacaccgtcatacaaaaaccgctc

SEQ ID NO: 122069 - DNA, 25 bp, SARS Virus
aacaccgtcatgaaaaaaccgctcc

SEQ ID NO: 122070 - DNA, 25 bp, SARS Virus
acaccgtcatgcaaaaaccgctccg

SEQ ID NO: 122071 - DNA, 25 bp, SARS Virus
caccgtcatgcaaaaaccgctccga

SEQ ID NO: 122072 - DNA, 25 bp, SARS Virus
accgtcatgcaaaaaccgctccgaa

SEQ ID NO: 122073 - DNA, 25 bp, SARS Virus
ccgtcatgcaaaaaccgctccgaaa

SEQ ID NO: 122074 - DNA, 25 bp, SARS Virus
cgtcatgcaaaaaccgctccgaaaa

SEQ ID NO: 122075 - DNA, 25 bp, SARS Virus
gtcatgcaaaaaacgctccgaaaaa

SEQ ID NO: 122076 - DNA, 25 bp, SARS Virus
tcatgcaaaaacagctccgaaaaat

SEQ ID NO: 122077 - DNA, 25 bp, SARS Virus
catgcaaaaaccactccgaaaaatc

SEQ ID NO: 122078 - DNA, 25 bp, SARS Virus
atgcaaaaaccgatccgaaaaatct

SEQ ID NO: 122079 - DNA, 25 bp, SARS Virus
tgcaaaaaccgcaccgaaaaatcta

SEQ ID NO: 122080 - DNA, 25 bp, SARS Virus
gcaaaaaccgctacgaaaaatctac

SEQ ID NO: 122081 - DNA, 25 bp, SARS Virus
caaaaaccgctcagaaaaatctacg

SEQ ID NO: 122082 - DNA, 25 bp, SARS Virus
aaaaaccgctccaaaaaatctacgg

SEQ ID NO: 122083 - DNA, 25 bp, SARS Virus
aaaaccgctccgaaaaatctacgga

SEQ ID NO: 122084 - DNA, 25 bp, SARS Virus
aaaccgctccgaaaaatctacggag

SEQ ID NO: 122085 - DNA, 25 bp, SARS Virus
aaccgctccgaaaaatctacggagt

SEQ ID NO: 122086 - DNA, 25 bp, SARS Virus
accgctccgaaaaatctacggagtc

SEQ ID NO: 122087 - DNA, 25 bp, SARS Virus
ccgctccgaaaaatctacggagtcg

SEQ ID NO: 122088 - DNA, 25 bp, SARS Virus
cgctccgaaaaaactacggagtcgt

SEQ ID NO: 122089 - DNA, 25 bp, SARS Virus
gctccgaaaaatatacggagtcgtc

SEQ ID NO: 122090 - DNA, 25 bp, SARS Virus
ctccgaaaaatcaacggagtcgtcg

SEQ ID NO: 122091 - DNA, 25 bp, SARS Virus
tccgaaaaatctacggagtcgtcgt

SEQ ID NO: 122092 - DNA, 25 bp, SARS Virus
ccgaaaaatctaaggagtcgtcgtc

SEQ ID NO: 122093 - DNA, 25 bp, SARS Virus
cgaaaaatctacagagtcgtcgtct

SEQ ID NO: 122094 - DNA, 25 bp, SARS Virus
gaaaaatctacgaagtcgtcgtcta

SEQ ID NO: 122095 - DNA, 25 bp, SARS Virus
aaaaatctacggagtcgtcgtctaa

SEQ ID NO: 122096 - DNA, 25 bp, SARS Virus
aaaatctacggaatcgtcgtctaaa

SEQ ID NO: 122097 - DNA, 25 bp, SARS Virus
aaatctacggagacgtcgtctaaag

SEQ ID NO: 122098 - DNA, 25 bp, SARS Virus
aatctacggagtagtcgtctaaaga

SEQ ID NO: 122099 - DNA, 25 bp, SARS Virus
atctacggagtcatcgtctaaagaa

SEQ ID NO: 122100 - DNA, 25 bp, SARS Virus
tctacggagtcgacgtctaaagaat

SEQ ID NO: 122101 - DNA, 25 bp, SARS Virus
ctacggagtcgtagtctaaagaatc

SEQ ID NO: 122102 - DNA, 25 bp, SARS Virus
tacggagtcgtcatctaaagaatca

SEQ ID NO: 122103 - DNA, 25 bp, SARS Virus
acggagtcgtcgactaaagaatcac

SEQ ID NO: 122104 - DNA, 25 bp, SARS Virus
cggagtcgtcgtataaagaatcact

SEQ ID NO: 122105 - DNA, 25 bp, SARS Virus
ggagtcgtcgtcaaaagaatcactg

SEQ ID NO: 122106 - DNA, 25 bp, SARS Virus
gagtcgtcgtctaaagaatcactgt

SEQ ID NO: 122107 - DNA, 25 bp, SARS Virus
agtcgtcgtctaaagaatcactgtc

SEQ ID NO: 122108 - DNA, 25 bp, SARS Virus
gtcgtcgtctaaagaatcactgtca

SEQ ID NO: 122109 - DNA, 25 bp, SARS Virus
tcgtcgtctaaaaaatcactgtcaa

SEQ ID NO: 122110 - DNA, 25 bp, SARS Virus
cgtcgtctaaagaatcactgtcaaa

SEQ ID NO: 122111 - DNA, 25 bp, SARS Virus
gtcgtctaaagaatcactgtcaaac

SEQ ID NO: 122112 - DNA, 25 bp, SARS Virus
tcgtctaaagaaacactgtcaaacc

SEQ ID NO: 122113 - DNA, 25 bp, SARS Virus
cgtctaaagaataactgtcaaaccg

SEQ ID NO: 122114 - DNA, 25 bp, SARS Virus
gtctaaagaatcactgtcaaaccgg

SEQ ID NO: 122115 - DNA, 25 bp, SARS Virus
tctaaagaatcaatgtcaaaccgga

SEQ ID NO: 122116 - DNA, 25 bp, SARS Virus
ctaaagaatcacagtcaaaccggaa

SEQ ID NO: 122117 - DNA, 25 bp, SARS Virus
taaagaatcactatcaaaccggaac

SEQ ID NO: 122118 - DNA, 25 bp, SARS Virus
aaagaatcactgacaaaccggaaca

SEQ ID NO: 122119 - DNA, 25 bp, SARS Virus
aagaatcactgtaaaaccggaacaa

SEQ ID NO: 122120 - DNA, 25 bp, SARS Virus
agaatcactgtcaaaccggaacaac

SEQ ID NO: 122121 - DNA, 25 bp, SARS Virus
gaatcactgtcaaaccggaacaaca

SEQ ID NO: 122122 - DNA, 25 bp, SARS Virus
aatcactgtcaaaccggaacaacaa

SEQ ID NO: 122123 - DNA, 25 bp, SARS Virus
atcactgtcaaaacggaacaacaac

SEQ ID NO: 122124 - DNA, 25 bp, SARS Virus
tcactgtcaaacaggaacaacaaca

SEQ ID NO: 122125 - DNA, 25 bp, SARS Virus
cactgtcaaaccagaacaacaacaa

SEQ ID NO: 122126 - DNA, 25 bp, SARS Virus
actgtcaaaccgaaacaacaacaac

SEQ ID NO: 122127 - DNA, 25 bp, SARS Virus
ctgtcaaaccggaacaacaacaacc

SEQ ID NO: 122128 - DNA, 25 bp, SARS Virus
tgtcaaaccggaacaacaacaaccg

SEQ ID NO: 122129 - DNA, 25 bp, SARS Virus
gtcaaaccggaaaaacaacaaccgg

SEQ ID NO: 122130 - DNA, 25 bp, SARS Virus
tcaaaccggaacaacaacaaccgga

SEQ ID NO: 122131 - DNA, 25 bp, SARS Virus
caaaccggaacaacaacaaccggaa

SEQ ID NO: 122132 - DNA, 25 bp, SARS Virus
aaaccggaacaaaaacaaccggaaa

SEQ ID NO: 122133 - DNA, 25 bp, SARS Virus
aaccggaacaacaacaaccggaaat

SEQ ID NO: 122134 - DNA, 25 bp, SARS Virus
accggaacaacaacaaccggaaatg

SEQ ID NO: 122135 - DNA, 25 bp, SARS Virus
ccggaacaacaaaaaccggaaatgg

SEQ ID NO: 122136 - DNA, 25 bp, SARS Virus
cggaacaacaacaaccggaaatggt

SEQ ID NO: 122137 - DNA, 25 bp, SARS Virus
ggaacaacaacaaccggaaatggtc

SEQ ID NO: 122138 - DNA, 25 bp, SARS Virus
gaacaacaacaaacggaaatggtct

SEQ ID NO: 122139 - DNA, 25 bp, SARS Virus
aacaacaacaacaggaaatggtctt

SEQ ID NO: 122140 - DNA, 25 bp, SARS Virus
acaacaacaaccagaaatggtcttt

SEQ ID NO: 122141 - DNA, 25 bp, SARS Virus
caacaacaaccgaaaatggtctttg

SEQ ID NO: 122142 - DNA, 25 bp, SARS Virus
aacaacaaccggaaatggtctttga

SEQ ID NO: 122143 - DNA, 25 bp, SARS Virus
acaacaaccggaaatggtctttgaa

SEQ ID NO: 122144 - DNA, 25 bp, SARS Virus
caacaaccggaaatggtctttgaaa

SEQ ID NO: 122145 - DNA, 25 bp, SARS Virus
aacaaccggaaaaggtctttgaaac

SEQ ID NO: 122146 - DNA, 25 bp, SARS Virus
acaaccggaaatagtctttgaaacg

SEQ ID NO: 122147 - DNA, 25 bp, SARS Virus
caaccggaaatgatctttgaaacga

SEQ ID NO: 122148 - DNA, 25 bp, SARS Virus
aaccggaaatggactttgaaacgag

SEQ ID NO: 122149 - DNA, 25 bp, SARS Virus
accggaaatggtatttgaaacgaga

SEQ ID NO: 122150 - DNA, 25 bp, SARS Virus
ccggaaatggtcattgaaacgagag

SEQ ID NO: 122151 - DNA, 25 bp, SARS Virus
cggaaatggtctatgaaacgagagt

SEQ ID NO: 122152 - DNA, 25 bp, SARS Virus
ggaaatggtcttagaaacgagagtt

SEQ ID NO: 122153 - DNA, 25 bp, SARS Virus
gaaatggtctttaaaacgagagttc

SEQ ID NO: 122154 - DNA, 25 bp, SARS Virus
aaatggtctttgaaacgagagttcg

SEQ ID NO: 122155 - DNA, 25 bp, SARS Virus
aatggtctttgaaacgagagttcga

SEQ ID NO: 122156 - DNA, 25 bp, SARS Virus
atggtctttgaaacgagagttcgac

SEQ ID NO: 122157 - DNA, 25 bp, SARS Virus
tggtctttgaaaagagagttcgacc

SEQ ID NO: 122158 - DNA, 25 bp, SARS Virus
ggtctttgaaacaagagttcgacca

SEQ ID NO: 122159 - DNA, 25 bp, SARS Virus
gtctttgaaacgagagttcgaccaa

SEQ ID NO: 122160 - DNA, 25 bp, SARS Virus
tctttgaaacgaaagttcgaccaag

SEQ ID NO: 122161 - DNA, 25 bp, SARS Virus
ctttgaaacgagagttcgaccaagt

SEQ ID NO: 122162 - DNA, 25 bp, SARS Virus
tttgaaacgagaattcgaccaagtt

SEQ ID NO: 122163 - DNA, 25 bp, SARS Virus
ttgaaacgagagatcgaccaagtta

SEQ ID NO: 122164 - DNA, 25 bp, SARS Virus
tgaaacgagagtacgaccaagttag

SEQ ID NO: 122165 - DNA, 25 bp, SARS Virus
gaaacgagagttagaccaagttaga

SEQ ID NO: 122166 - DNA, 25 bp, SARS Virus
aaacgagagttcaaccaagttagac

SEQ ID NO: 122167 - DNA, 25 bp, SARS Virus
aacgagagttcgaccaagttagaca

SEQ ID NO: 122168 - DNA, 25 bp, SARS Virus
acgagagttcgaacaagttagacag

SEQ ID NO: 122169 - DNA, 25 bp, SARS Virus
cgagagttcgacaaagttagacaga

SEQ ID NO: 122170 - DNA, 25 bp, SARS Virus
gagagttcgaccaagttagacagat

SEQ ID NO: 122171 - DNA, 25 bp, SARS Virus
agagttcgaccaagttagacagatc

SEQ ID NO: 122172 - DNA, 25 bp, SARS Virus
gagttcgaccaaattagacagatcg

SEQ ID NO: 122173 - DNA, 25 bp, SARS Virus
agttcgaccaagatagacagatcgt

SEQ ID NO: 122174 - DNA, 25 bp, SARS Virus
gttcgaccaagtaagacagatcgtc

SEQ ID NO: 122175 - DNA, 25 bp, SARS Virus
ttcgaccaagttagacagatcgtcg

SEQ ID NO: 122176 - DNA, 25 bp, SARS Virus
tcgaccaagttaaacagatcgtcgt

SEQ ID NO: 122177 - DNA, 25 bp, SARS Virus
cgaccaagttagacagatcgtcgtt

SEQ ID NO: 122178 - DNA, 25 bp, SARS Virus
gaccaagttagaaagatcgtcgtta

SEQ ID NO: 122179 - DNA, 25 bp, SARS Virus
accaagttagacagatcgtcgttat

SEQ ID NO: 122180 - DNA, 25 bp, SARS Virus
ccaagttagacaaatcgtcgttatc

SEQ ID NO: 122181 - DNA, 25 bp, SARS Virus
caagttagacagatcgtcgttatcg

SEQ ID NO: 122182 - DNA, 25 bp, SARS Virus
aagttagacagaacgtcgttatcgc

SEQ ID NO: 122183 - DNA, 25 bp, SARS Virus
agttagacagatagtcgttatcgcg

SEQ ID NO: 122184 - DNA, 25 bp, SARS Virus
gttagacagatcatcgttatcgcgc

SEQ ID NO: 122185 - DNA, 25 bp, SARS Virus
ttagacagatcgacgttatcgcgct

SEQ ID NO: 122186 - DNA, 25 bp, SARS Virus
tagacagatcgtagttatcgcgctc

SEQ ID NO: 122187 - DNA, 25 bp, SARS Virus
agacagatcgtcattatcgcgctcc

SEQ ID NO: 122188 - DNA, 25 bp, SARS Virus
gacagatcgtcgatatcgcgctccc

SEQ ID NO: 122189 - DNA, 25 bp, SARS Virus
acagatcgtcgtaatcgcgctcccg

SEQ ID NO: 122190 - DNA, 25 bp, SARS Virus
cagatcgtcgttatcgcgctcccgt

SEQ ID NO: 122191 - DNA, 25 bp, SARS Virus
agatcgtcgttaacgcgctcccgtc

SEQ ID NO: 122192 - DNA, 25 bp, SARS Virus
gatcgtcgttatagcgctcccgtca

SEQ ID NO: 122193 - DNA, 25 bp, SARS Virus
atcgtcgttatcacgctcccgtcaa

SEQ ID NO: 122194 - DNA, 25 bp, SARS Virus
tcgtcgttatcgagctcccgtcaaa

SEQ ID NO: 122195 - DNA, 25 bp, SARS Virus
cgtcgttatcgcactcccgtcaaag

SEQ ID NO: 122196 - DNA, 25 bp, SARS Virus
gtcgttatcgcgatcccgtcaaagt

SEQ ID NO: 122197 - DNA, 25 bp, SARS Virus
tcgttatcgcgcacccgtcaaagtg

SEQ ID NO: 122198 - DNA, 25 bp, SARS Virus
cgttatcgcgctaccgtcaaagtgg

SEQ ID NO: 122199 - DNA, 25 bp, SARS Virus
gttatcgcgctcacgtcaaagtggt

SEQ ID NO: 122200 - DNA, 25 bp, SARS Virus
ttatcgcgctccagtcaaagtggtg

SEQ ID NO: 122201 - DNA, 25 bp, SARS Virus
tatcgcgctcccatcaaagtggtgg

SEQ ID NO: 122202 - DNA, 25 bp, SARS Virus
atcgcgctcccgacaaagtggtgga

SEQ ID NO: 122203 - DNA, 25 bp, SARS Virus
tcgcgctcccgtaaaagtggtggag

SEQ ID NO: 122204 - DNA, 25 bp, SARS Virus
cgcgctcccgtcaaagtggtggagg

SEQ ID NO: 122205 - DNA, 25 bp, SARS Virus
gcgctcccgtcaaagtggtggaggc

SEQ ID NO: 122206 - DNA, 25 bp, SARS Virus
cgctcccgtcaaagtggtggaggcg

SEQ ID NO: 122207 - DNA, 25 bp, SARS Virus
gctcccgtcaaaatggtggaggcga

SEQ ID NO: 122208 - DNA, 25 bp, SARS Virus
ctcccgtcaaagaggtggaggcgat

SEQ ID NO: 122209 - DNA, 25 bp, SARS Virus
tcccgtcaaagtagtggaggcgatc

SEQ ID NO: 122210 - DNA, 25 bp, SARS Virus
cccgtcaaagtgatggaggcgatcg

SEQ ID NO: 122211 - DNA, 25 bp, SARS Virus
ccgtcaaagtggaggaggcgatcgg

SEQ ID NO: 122212 - DNA, 25 bp, SARS Virus
cgtcaaagtggtagaggcgatcggt

SEQ ID NO: 122213 - DNA, 25 bp, SARS Virus
gtcaaagtggtgaaggcgatcggta

SEQ ID NO: 122214 - DNA, 25 bp, SARS Virus
tcaaagtggtggaggcgatcggtaa

SEQ ID NO: 122215 - DNA, 25 bp, SARS Virus
caaagtggtggaagcgatcggtaag

SEQ ID NO: 122216 - DNA, 25 bp, SARS Virus
aaagtggtggagacgatcggtaagc

SEQ ID NO: 122217 - DNA, 25 bp, SARS Virus
aagtggtggaggagatcggtaagct

SEQ ID NO: 122218 - DNA, 25 bp, SARS Virus
agtggtggaggcaatcggtaagctc

SEQ ID NO: 122219 - DNA, 25 bp, SARS Virus
gtggtggaggcgatcggtaagctcg

SEQ ID NO: 122220 - DNA, 25 bp, SARS Virus
tggtggaggcgaacggtaagctcgt

SEQ ID NO: 122221 - DNA, 25 bp, SARS Virus
ggtggaggcgataggtaagctcgtc

SEQ ID NO: 122222 - DNA, 25 bp, SARS Virus
gtggaggcgatcagtaagctcgtcc

SEQ ID NO: 122223 - DNA, 25 bp, SARS Virus
tggaggcgatcgataagctcgtcct

SEQ ID NO: 122224 - DNA, 25 bp, SARS Virus
ggaggcgatcggaaagctcgtcctc

SEQ ID NO: 122225 - DNA, 25 bp, SARS Virus
gaggcgatcggtaagctcgtcctct

SEQ ID NO: 122226 - DNA, 25 bp, SARS Virus
aggcgatcggtaagctcgtcctctt

SEQ ID NO: 122227 - DNA, 25 bp, SARS Virus
ggcgatcggtaaactcgtcctctta

SEQ ID NO: 122228 - DNA, 25 bp, SARS Virus
gcgatcggtaagatcgtcctcttaa

SEQ ID NO: 122229 - DNA, 25 bp, SARS Virus
cgatcggtaagcacgtcctcttaaa

SEQ ID NO: 122230 - DNA, 25 bp, SARS Virus
gatcggtaagctagtcctcttaaag

SEQ ID NO: 122231 - DNA, 25 bp, SARS Virus
atcggtaagctcatcctcttaaagg

SEQ ID NO: 122232 - DNA, 25 bp, SARS Virus
tcggtaagctcgacctcttaaaggg

SEQ ID NO: 122233 - DNA, 25 bp, SARS Virus
cggtaagctcgtactcttaaagggg

SEQ ID NO: 122234 - DNA, 25 bp, SARS Virus
ggtaagctcgtcatcttaaagggga

SEQ ID NO: 122235 - DNA, 25 bp, SARS Virus
gtaagctcgtccacttaaaggggat

SEQ ID NO: 122236 - DNA, 25 bp, SARS Virus
taagctcgtcctattaaaggggatg

SEQ ID NO: 122237 - DNA, 25 bp, SARS Virus
aagctcgtcctcataaaggggatga

SEQ ID NO: 122238 - DNA, 25 bp, SARS Virus
agctcgtcctctaaaaggggatgac

SEQ ID NO: 122239 - DNA, 25 bp, SARS Virus
gctcgtcctcttaaaggggatgacg

SEQ ID NO: 122240 - DNA, 25 bp, SARS Virus
ctcgtcctcttaaaggggatgacga

SEQ ID NO: 122241 - DNA, 25 bp, SARS Virus
tcgtcctcttaaaggggatgacgac

SEQ ID NO: 122242 - DNA, 25 bp, SARS Virus
cgtcctcttaaaagggatgacgacg

SEQ ID NO: 122243 - DNA, 25 bp, SARS Virus
gtcctcttaaagaggatgacgacgg

SEQ ID NO: 122244 - DNA, 25 bp, SARS Virus
tcctcttaaaggagatgacgacggt

SEQ ID NO: 122245 - DNA, 25 bp, SARS Virus
cctcttaaagggaatgacgacggtc

SEQ ID NO: 122246 - DNA, 25 bp, SARS Virus
ctcttaaaggggatgacgacggtcc

SEQ ID NO: 122247 - DNA, 25 bp, SARS Virus
tcttaaaggggaagacgacggtcct

SEQ ID NO: 122248 - DNA, 25 bp, SARS Virus
cttaaaggggataacgacggtcctc

SEQ ID NO: 122249 - DNA, 25 bp, SARS Virus
ttaaaggggatgacgacggtcctca

SEQ ID NO: 122250 - DNA, 25 bp, SARS Virus
taaaggggatgaagacggtcctcaa

SEQ ID NO: 122251 - DNA, 25 bp, SARS Virus
aaaggggatgacaacggtcctcaac

SEQ ID NO: 122252 - DNA, 25 bp, SARS Virus
aaggggatgacgacggtcctcaact

SEQ ID NO: 122253 - DNA, 25 bp, SARS Virus
aggggatgacgaaggtcctcaactt

SEQ ID NO: 122254 - DNA, 25 bp, SARS Virus
ggggatgacgacagtcctcaactta

SEQ ID NO: 122255 - DNA, 25 bp, SARS Virus
gggatgacgacgatcctcaacttaa

SEQ ID NO: 122256 - DNA, 25 bp, SARS Virus
ggatgacgacggacctcaacttaaa

SEQ ID NO: 122257 - DNA, 25 bp, SARS Virus
gatgacgacggtactcaacttaaag

SEQ ID NO: 122258 - DNA, 25 bp, SARS Virus
atgacgacggtcatcaacttaaaga

SEQ ID NO: 122259 - DNA, 25 bp, SARS Virus
tgacgacggtccacaacttaaagaa

SEQ ID NO: 122260 - DNA, 25 bp, SARS Virus
gacgacggtcctaaacttaaagaac

SEQ ID NO: 122261 - DNA, 25 bp, SARS Virus
acgacggtcctcaacttaaagaact

SEQ ID NO: 122262 - DNA, 25 bp, SARS Virus
cgacggtcctcaacttaaagaactt

SEQ ID NO: 122263 - DNA, 25 bp, SARS Virus
gacggtcctcaaattaaagaactta

SEQ ID NO: 122264 - DNA, 25 bp, SARS Virus
acggtcctcaacataaagaacttaa

SEQ ID NO: 122265 - DNA, 25 bp, SARS Virus
cggtcctcaactaaaagaacttaat

SEQ ID NO: 122266 - DNA, 25 bp, SARS Virus
ggtcctcaacttaaagaacttaatg

SEQ ID NO: 122267 - DNA, 25 bp, SARS Virus
gtcctcaacttaaagaacttaatgg

SEQ ID NO: 122268 - DNA, 25 bp, SARS Virus
tcctcaacttaaagaacttaatggc

SEQ ID NO: 122269 - DNA, 25 bp, SARS Virus
cctcaacttaaaaaacttaatggcg

SEQ ID NO: 122270 - DNA, 25 bp, SARS Virus
ctcaacttaaagaacttaatggcgc

SEQ ID NO: 122271 - DNA, 25 bp, SARS Virus
tcaacttaaagaacttaatggcgct

SEQ ID NO: 122272 - DNA, 25 bp, SARS Virus
caacttaaagaaattaatggcgctg

SEQ ID NO: 122273 - DNA, 25 bp, SARS Virus
aacttaaagaacataatggcgctga

SEQ ID NO: 122274 - DNA, 25 bp, SARS Virus
acttaaagaactaaatggcgctgat

SEQ ID NO: 122275 - DNA, 25 bp, SARS Virus
cttaaagaacttaatggcgctgatg

SEQ ID NO: 122276 - DNA, 25 bp, SARS Virus
ttaaagaacttaatggcgctgatgc

SEQ ID NO: 122277 - DNA, 25 bp, SARS Virus
taaagaacttaaaggcgctgatgca

SEQ ID NO: 122278 - DNA, 25 bp, SARS Virus
aaagaacttaatagcgctgatgcac

SEQ ID NO: 122279 - DNA, 25 bp, SARS Virus
aagaacttaatgacgctgatgcact

SEQ ID NO: 122280 - DNA, 25 bp, SARS Virus
agaacttaatggagctgatgcacta

SEQ ID NO: 122281 - DNA, 25 bp, SARS Virus
gaacttaatggcactgatgcactac

SEQ ID NO: 122282 - DNA, 25 bp, SARS Virus
aacttaatggcgatgatgcactact

SEQ ID NO: 122283 - DNA, 25 bp, SARS Virus
acttaatggcgcagatgcactactc

SEQ ID NO: 122284 - DNA, 25 bp, SARS Virus
cttaatggcgctaatgcactactcc

SEQ ID NO: 122285 - DNA, 25 bp, SARS Virus
ttaatggcgctgatgcactactcct

SEQ ID NO: 122286 - DNA, 25 bp, SARS Virus
taatggcgctgaagcactactcctc

SEQ ID NO: 122287 - DNA, 25 bp, SARS Virus
aatggcgctgatacactactcctcg

SEQ ID NO: 122288 - DNA, 25 bp, SARS Virus
atggcgctgatgaactactcctcgc

SEQ ID NO: 122289 - DNA, 25 bp, SARS Virus
tggcgctgatgcactactcctcgct

SEQ ID NO: 122290 - DNA, 25 bp, SARS Virus
ggcgctgatgcaatactcctcgctc

SEQ ID NO: 122291 - DNA, 25 bp, SARS Virus
gcgctgatgcacaactcctcgctct

SEQ ID NO: 122292 - DNA, 25 bp, SARS Virus
cgctgatgcactactcctcgctctt

SEQ ID NO: 122293 - DNA, 25 bp, SARS Virus
gctgatgcactaatcctcgctcttc

SEQ ID NO: 122294 - DNA, 25 bp, SARS Virus
ctgatgcactacacctcgctcttct

SEQ ID NO: 122295 - DNA, 25 bp, SARS Virus
tgatgcactactactcgctcttctc

SEQ ID NO: 122296 - DNA, 25 bp, SARS Virus
gatgcactactcatcgctcttctcc

SEQ ID NO: 122297 - DNA, 25 bp, SARS Virus
atgcactactccacgctcttctccg

SEQ ID NO: 122298 - DNA, 25 bp, SARS Virus
tgcactactcctagctcttctccga

SEQ ID NO: 122299 - DNA, 25 bp, SARS Virus
gcactactcctcactcttctccgaa

SEQ ID NO: 122300 - DNA, 25 bp, SARS Virus
cactactcctcgatcttctccgaac

SEQ ID NO: 122301 - DNA, 25 bp, SARS Virus
actactcctcgcacttctccgaact

SEQ ID NO: 122302 - DNA, 25 bp, SARS Virus
ctactcctcgctattctccgaactg

SEQ ID NO: 122303 - DNA, 25 bp, SARS Virus
tactcctcgctcatctccgaactga

SEQ ID NO: 122304 - DNA, 25 bp, SARS Virus
actcctcgctctactccgaactgac

SEQ ID NO: 122305 - DNA, 25 bp, SARS Virus
ctcctcgctcttatccgaactgacg

SEQ ID NO: 122306 - DNA, 25 bp, SARS Virus
tcctcgctcttcaccgaactgacgg

SEQ ID NO: 122307 - DNA, 25 bp, SARS Virus
cctcgctcttctacgaactgacggc

SEQ ID NO: 122308 - DNA, 25 bp, SARS Virus
ctcgctcttctcagaactgacggcg

SEQ ID NO: 122309 - DNA, 25 bp, SARS Virus
tcgctcttctccaaactgacggcgg

SEQ ID NO: 122310 - DNA, 25 bp, SARS Virus
cgctcttctccgaactgacggcgga

SEQ ID NO: 122311 - DNA, 25 bp, SARS Virus
gctcttctccgaactgacggcggag

SEQ ID NO: 122312 - DNA, 25 bp, SARS Virus
ctcttctccgaaatgacggcggaga

SEQ ID NO: 122313 - DNA, 25 bp, SARS Virus
tcttctccgaacagacggcggagac

SEQ ID NO: 122314 - DNA, 25 bp, SARS Virus
cttctccgaactaacggcggagacg

SEQ ID NO: 122315 - DNA, 25 bp, SARS Virus
ttctccgaactgacggcggagacga

SEQ ID NO: 122316 - DNA, 25 bp, SARS Virus
tctccgaactgaaggcggagacgaa

SEQ ID NO: 122317 - DNA, 25 bp, SARS Virus
ctccgaactgacagcggagacgaag

SEQ ID NO: 122318 - DNA, 25 bp, SARS Virus
tccgaactgacgacggagacgaagg

SEQ ID NO: 122319 - DNA, 25 bp, SARS Virus
ccgaactgacggaggagacgaaggg

SEQ ID NO: 122320 - DNA, 25 bp, SARS Virus
cgaactgacggcagagacgaaggga

SEQ ID NO: 122321 - DNA, 25 bp, SARS Virus
gaactgacggcgaagacgaagggag

SEQ ID NO: 122322 - DNA, 25 bp, SARS Virus
aactgacggcggagacgaagggaga

SEQ ID NO: 122323 - DNA, 25 bp, SARS Virus
actgacggcggaaacgaagggagac

SEQ ID NO: 122324 - DNA, 25 bp, SARS Virus
ctgacggcggagacgaagggagacg

SEQ ID NO: 122325 - DNA, 25 bp, SARS Virus
tgacggcggagaagaagggagacgc

SEQ ID NO: 122326 - DNA, 25 bp, SARS Virus
gacggcggagacaaagggagacgca

SEQ ID NO: 122327 - DNA, 25 bp, SARS Virus
acggcggagacgaagggagacgcat

SEQ ID NO: 122328 - DNA, 25 bp, SARS Virus
cggcggagacgaagggagacgcatc

SEQ ID NO: 122329 - DNA, 25 bp, SARS Virus
ggcggagacgaaaggagacgcatct

SEQ ID NO: 122330 - DNA, 25 bp, SARS Virus
gcggagacgaagagagacgcatctt

SEQ ID NO: 122331 - DNA, 25 bp, SARS Virus
cggagacgaaggaagacgcatcttc

SEQ ID NO: 122332 - DNA, 25 bp, SARS Virus
ggagacgaagggagacgcatcttcg

SEQ ID NO: 122333 - DNA, 25 bp, SARS Virus
gagacgaagggaaacgcatcttcgg

SEQ ID NO: 122334 - DNA, 25 bp, SARS Virus
agacgaagggagacgcatcttcgga

SEQ ID NO: 122335 - DNA, 25 bp, SARS Virus
gacgaagggagaagcatcttcggaa

SEQ ID NO: 122336 - DNA, 25 bp, SARS Virus
acgaagggagacacatcttcggaaa

SEQ ID NO: 122337 - DNA, 25 bp, SARS Virus
cgaagggagacgaatcttcggaaaa

SEQ ID NO: 122338 - DNA, 25 bp, SARS Virus
gaagggagacgcatcttcggaaaac

SEQ ID NO: 122339 - DNA, 25 bp, SARS Virus
aagggagacgcaacttcggaaaacc

SEQ ID NO: 122340 - DNA, 25 bp, SARS Virus
agggagacgcatattcggaaaaccg

SEQ ID NO: 122341 - DNA, 25 bp, SARS Virus
gggagacgcatcatcggaaaaccgt

SEQ ID NO: 122342 - DNA, 25 bp, SARS Virus
ggagacgcatctacggaaaaccgtt

SEQ ID NO: 122343 - DNA, 25 bp, SARS Virus
gagacgcatcttaggaaaaccgtta

SEQ ID NO: 122344 - DNA, 25 bp, SARS Virus
agacgcatcttcagaaaaccgttac

SEQ ID NO: 122345 - DNA, 25 bp, SARS Virus
gacgcatcttcgaaaaaccgttaca

SEQ ID NO: 122346 - DNA, 25 bp, SARS Virus
acgcatcttcggaaaaccgttacaa

SEQ ID NO: 122347 - DNA, 25 bp, SARS Virus
cgcatcttcggaaaaccgttacaac

SEQ ID NO: 122348 - DNA, 25 bp, SARS Virus
gcatcttcggaaaaccgttacaaca

SEQ ID NO: 122349 - DNA, 25 bp, SARS Virus
catcttcggaaaaccgttacaacaa

SEQ ID NO: 122350 - DNA, 25 bp, SARS Virus
atcttcggaaaaacgttacaacaag

SEQ ID NO: 122351 - DNA, 25 bp, SARS Virus
tcttcggaaaacagttacaacaagg

SEQ ID NO: 122352 - DNA, 25 bp, SARS Virus
cttcggaaaaccattacaacaagga

SEQ ID NO: 122353 - DNA, 25 bp, SARS Virus
ttcggaaaaccgatacaacaaggaa

SEQ ID NO: 122354 - DNA, 25 bp, SARS Virus
tcggaaaaccgtaacaacaaggaac

SEQ ID NO: 122355 - DNA, 25 bp, SARS Virus
cggaaaaccgttacaacaaggaact

SEQ ID NO: 122356 - DNA, 25 bp, SARS Virus
ggaaaaccgttaaaacaaggaactc

SEQ ID NO: 122357 - DNA, 25 bp, SARS Virus
gaaaaccgttacaacaaggaactcc

SEQ ID NO: 122358 - DNA, 25 bp, SARS Virus
aaaaccgttacaacaaggaactcct

SEQ ID NO: 122359 - DNA, 25 bp, SARS Virus
aaaccgttacaaaaaggaactcctt

SEQ ID NO: 122360 - DNA, 25 bp, SARS Virus
aaccgttacaacaaggaactccttc

SEQ ID NO: 122361 - DNA, 25 bp, SARS Virus
accgttacaacaaggaactccttca

SEQ ID NO: 122362 - DNA, 25 bp, SARS Virus
ccgttacaacaaagaactccttcaa

SEQ ID NO: 122363 - DNA, 25 bp, SARS Virus
cgttacaacaagaaactccttcaac

SEQ ID NO: 122364 - DNA, 25 bp, SARS Virus
gttacaacaaggaactccttcaaca

SEQ ID NO: 122365 - DNA, 25 bp, SARS Virus
ttacaacaaggaactccttcaacat

SEQ ID NO: 122366 - DNA, 25 bp, SARS Virus
tacaacaaggaaatccttcaacatc

SEQ ID NO: 122367 - DNA, 25 bp, SARS Virus
acaacaaggaacaccttcaacatcg

SEQ ID NO: 122368 - DNA, 25 bp, SARS Virus
caacaaggaactacttcaacatcgt

SEQ ID NO: 122369 - DNA, 25 bp, SARS Virus
aacaaggaactcattcaacatcgtg

SEQ ID NO: 122370 - DNA, 25 bp, SARS Virus
acaaggaactccatcaacatcgtgc

SEQ ID NO: 122371 - DNA, 25 bp, SARS Virus
caaggaactcctacaacatcgtgcc

SEQ ID NO: 122372 - DNA, 25 bp, SARS Virus
aaggaactccttaaacatcgtgcca

SEQ ID NO: 122373 - DNA, 25 bp, SARS Virus
aggaactccttcaacatcgtgccac

SEQ ID NO: 122374 - DNA, 25 bp, SARS Virus
ggaactccttcaacatcgtgccacc

SEQ ID NO: 122375 - DNA, 25 bp, SARS Virus
gaactccttcaaaatcgtgccaccg

SEQ ID NO: 122376 - DNA, 25 bp, SARS Virus
aactccttcaacatcgtgccaccgt

SEQ ID NO: 122377 - DNA, 25 bp, SARS Virus
actccttcaacaacgtgccaccgtc

SEQ ID NO: 122378 - DNA, 25 bp, SARS Virus
ctccttcaacatagtgccaccgtcg

SEQ ID NO: 122379 - DNA, 25 bp, SARS Virus
tccttcaacatcatgccaccgtcgt

SEQ ID NO: 122380 - DNA, 25 bp, SARS Virus
ccttcaacatcgagccaccgtcgta

SEQ ID NO: 122381 - DNA, 25 bp, SARS Virus
cttcaacatcgtaccaccgtcgtaa

SEQ ID NO: 122382 - DNA, 25 bp, SARS Virus
ttcaacatcgtgacaccgtcgtaac

SEQ ID NO: 122383 - DNA, 25 bp, SARS Virus
tcaacatcgtgcaaccgtcgtaaca

SEQ ID NO: 122384 - DNA, 25 bp, SARS Virus
caacatcgtgccaccgtcgtaacaa

SEQ ID NO: 122385 - DNA, 25 bp, SARS Virus
aacatcgtgccaacgtcgtaacaat

SEQ ID NO: 122386 - DNA, 25 bp, SARS Virus
acatcgtgccacagtcgtaacaata

SEQ ID NO: 122387 - DNA, 25 bp, SARS Virus
catcgtgccaccatcgtaacaataa

SEQ ID NO: 122388 - DNA, 25 bp, SARS Virus
atcgtgccaccgacgtaacaataat

SEQ ID NO: 122389 - DNA, 25 bp, SARS Virus
tcgtgccaccgtagtaacaataatc

SEQ ID NO: 122390 - DNA, 25 bp, SARS Virus
cgtgccaccgtcataacaataatcc

SEQ ID NO: 122391 - DNA, 25 bp, SARS Virus
gtgccaccgtcgaaacaataatcct

SEQ ID NO: 122392 - DNA, 25 bp, SARS Virus
tgccaccgtcgtaacaataatccta

SEQ ID NO: 122393 - DNA, 25 bp, SARS Virus
gccaccgtcgtaacaataatcctaa

SEQ ID NO: 122394 - DNA, 25 bp, SARS Virus
ccaccgtcgtaaaaataatcctaac

SEQ ID NO: 122395 - DNA, 25 bp, SARS Virus
caccgtcgtaacaataatcctaacg

SEQ ID NO: 122396 - DNA, 25 bp, SARS Virus
accgtcgtaacaataatcctaacgc

SEQ ID NO: 122397 - DNA, 25 bp, SARS Virus
ccgtcgtaacaaaaatcctaacgcc

SEQ ID NO: 122398 - DNA, 25 bp, SARS Virus
cgtcgtaacaataatcctaacgccc

SEQ ID NO: 122399 - DNA, 25 bp, SARS Virus
gtcgtaacaataatcctaacgccca

SEQ ID NO: 122400 - DNA, 25 bp, SARS Virus
tcgtaacaataaacctaacgcccac

SEQ ID NO: 122401 - DNA, 25 bp, SARS Virus
cgtaacaataatactaacgcccacg

SEQ ID NO: 122402 - DNA, 25 bp, SARS Virus
gtaacaataatcataacgcccacgg

SEQ ID NO: 122403 - DNA, 25 bp, SARS Virus
taacaataatccaaacgcccacggt

SEQ ID NO: 122404 - DNA, 25 bp, SARS Virus
aacaataatcctaacgcccacggtt

SEQ ID NO: 122405 - DNA, 25 bp, SARS Virus
acaataatcctaacgcccacggtta

SEQ ID NO: 122406 - DNA, 25 bp, SARS Virus
caataatcctaaagcccacggttac

SEQ ID NO: 122407 - DNA, 25 bp, SARS Virus
aataatcctaacacccacggttaca

SEQ ID NO: 122408 - DNA, 25 bp, SARS Virus
ataatcctaacgaccacggttacac

SEQ ID NO: 122409 - DNA, 25 bp, SARS Virus
taatcctaacgcacacggttacacc

SEQ ID NO: 122410 - DNA, 25 bp, SARS Virus
aatcctaacgccaacggttacacca

SEQ ID NO: 122411 - DNA, 25 bp, SARS Virus
atcctaacgcccacggttacaccag

SEQ ID NO: 122412 - DNA, 25 bp, SARS Virus
tcctaacgcccaaggttacaccaga

SEQ ID NO: 122413 - DNA, 25 bp, SARS Virus
cctaacgcccacagttacaccagaa

SEQ ID NO: 122414 - DNA, 25 bp, SARS Virus
ctaacgcccacgattacaccagaaa

SEQ ID NO: 122415 - DNA, 25 bp, SARS Virus
taacgcccacggatacaccagaaac

SEQ ID NO: 122416 - DNA, 25 bp, SARS Virus
aacgcccacggtaacaccagaaacc

SEQ ID NO: 122417 - DNA, 25 bp, SARS Virus
acgcccacggttacaccagaaaccc

SEQ ID NO: 122418 - DNA, 25 bp, SARS Virus
cgcccacggttaaaccagaaaccca

SEQ ID NO: 122419 - DNA, 25 bp, SARS Virus
gcccacggttacaccagaaacccac

SEQ ID NO: 122420 - DNA, 25 bp, SARS Virus
cccacggttacaacagaaacccaca

SEQ ID NO: 122421 - DNA, 25 bp, SARS Virus
ccacggttacacaagaaacccacat

SEQ ID NO: 122422 - DNA, 25 bp, SARS Virus
cacggttacaccagaaacccacata

SEQ ID NO: 122423 - DNA, 25 bp, SARS Virus
acggttacaccaaaaacccacataa

SEQ ID NO: 122424 - DNA, 25 bp, SARS Virus
cggttacaccagaaacccacataag

SEQ ID NO: 122425 - DNA, 25 bp, SARS Virus
ggttacaccagaaacccacataagt

SEQ ID NO: 122426 - DNA, 25 bp, SARS Virus
gttacaccagaaacccacataagtt

SEQ ID NO: 122427 - DNA, 25 bp, SARS Virus
ttacaccagaaaaccacataagttc

SEQ ID NO: 122428 - DNA, 25 bp, SARS Virus
tacaccagaaacacacataagttcc

SEQ ID NO: 122429 - DNA, 25 bp, SARS Virus
acaccagaaaccaacataagttccg

SEQ ID NO: 122430 - DNA, 25 bp, SARS Virus
caccagaaacccacataagttccga

SEQ ID NO: 122431 - DNA, 25 bp, SARS Virus
accagaaacccaaataagttccgag

SEQ ID NO: 122432 - DNA, 25 bp, SARS Virus
ccagaaacccacataagttccgagg

SEQ ID NO: 122433 - DNA, 25 bp, SARS Virus
cagaaacccacaaaagttccgaggg

SEQ ID NO: 122434 - DNA, 25 bp, SARS Virus
agaaacccacataagttccgaggga

SEQ ID NO: 122435 - DNA, 25 bp, SARS Virus
gaaacccacataagttccgagggag

SEQ ID NO: 122436 - DNA, 25 bp, SARS Virus
aaacccacataaattccgagggagt

SEQ ID NO: 122437 - DNA, 25 bp, SARS Virus
aacccacataagatccgagggagtc

SEQ ID NO: 122438 - DNA, 25 bp, SARS Virus
acccacataagtaccgagggagtca

SEQ ID NO: 122439 - DNA, 25 bp, SARS Virus
cccacataagttacgagggagtcaa

SEQ ID NO: 122440 - DNA, 25 bp, SARS Virus
ccacataagttcagagggagtcaac

SEQ ID NO: 122441 - DNA, 25 bp, SARS Virus
cacataagttccaagggagtcaacg

SEQ ID NO: 122442 - DNA, 25 bp, SARS Virus
acataagttccgagggagtcaacgt

SEQ ID NO: 122443 - DNA, 25 bp, SARS Virus
cataagttccgaaggagtcaacgtt

SEQ ID NO: 122444 - DNA, 25 bp, SARS Virus
ataagttccgagagagtcaacgttg

SEQ ID NO: 122445 - DNA, 25 bp, SARS Virus
taagttccgaggaagtcaacgttgg

SEQ ID NO: 122446 - DNA, 25 bp, SARS Virus
aagttccgagggagtcaacgttggg

SEQ ID NO: 122447 - DNA, 25 bp, SARS Virus
agttccgagggaatcaacgttgggt

SEQ ID NO: 122448 - DNA, 25 bp, SARS Virus
gttccgagggagacaacgttgggta

SEQ ID NO: 122449 - DNA, 25 bp, SARS Virus
ttccgagggagtaaacgttgggtat

SEQ ID NO: 122450 - DNA, 25 bp, SARS Virus
tccgagggagtcaacgttgggtatg

SEQ ID NO: 122451 - DNA, 25 bp, SARS Virus
ccgagggagtcaacgttgggtatgc

SEQ ID NO: 122452 - DNA, 25 bp, SARS Virus
cgagggagtcaaagttgggtatgct

SEQ ID NO: 122453 - DNA, 25 bp, SARS Virus
gagggagtcaacattgggtatgcta

SEQ ID NO: 122454 - DNA, 25 bp, SARS Virus
agggagtcaacgatgggtatgctac

SEQ ID NO: 122455 - DNA, 25 bp, SARS Virus
gggagtcaacgtagggtatgctacg

SEQ ID NO: 122456 - DNA, 25 bp, SARS Virus
ggagtcaacgttaggtatgctacgg

SEQ ID NO: 122457 - DNA, 25 bp, SARS Virus
gagtcaacgttgagtatgctacgga

SEQ ID NO: 122458 - DNA, 25 bp, SARS Virus
agtcaacgttggatatgctacggaa

SEQ ID NO: 122459 - DNA, 25 bp, SARS Virus
gtcaacgttgggaatgctacggaag

SEQ ID NO: 122460 - DNA, 25 bp, SARS Virus
tcaacgttgggtatgctacggaaga

SEQ ID NO: 122461 - DNA, 25 bp, SARS Virus
caacgttgggtaagctacggaagaa

SEQ ID NO: 122462 - DNA, 25 bp, SARS Virus
aacgttgggtatactacggaagaaa

SEQ ID NO: 122463 - DNA, 25 bp, SARS Virus
acgttgggtatgatacggaagaaac

SEQ ID NO: 122464 - DNA, 25 bp, SARS Virus
cgttgggtatgcaacggaagaaaca

SEQ ID NO: 122465 - DNA, 25 bp, SARS Virus
gttgggtatgctacggaagaaacaa

SEQ ID NO: 122466 - DNA, 25 bp, SARS Virus
ttgggtatgctaaggaagaaacaat

SEQ ID NO: 122467 - DNA, 25 bp, SARS Virus
tgggtatgctacagaagaaacaatc

SEQ ID NO: 122468 - DNA, 25 bp, SARS Virus
gggtatgctacgaaagaaacaatcg

SEQ ID NO: 122469 - DNA, 25 bp, SARS Virus
ggtatgctacggaagaaacaatcgc

SEQ ID NO: 122470 - DNA, 25 bp, SARS Virus
gtatgctacggaagaaacaatcgcg

SEQ ID NO: 122471 - DNA, 25 bp, SARS Virus
tatgctacggaaaaaacaatcgcgg

SEQ ID NO: 122472 - DNA, 25 bp, SARS Virus
atgctacggaagaaacaatcgcggc

SEQ ID NO: 122473 - DNA, 25 bp, SARS Virus
tgctacggaagaaacaatcgcggca

SEQ ID NO: 122474 - DNA, 25 bp, SARS Virus
gctacggaagaaacaatcgcggcat

SEQ ID NO: 122475 - DNA, 25 bp, SARS Virus
ctacggaagaaaaaatcgcggcatc

SEQ ID NO: 122476 - DNA, 25 bp, SARS Virus
tacggaagaaacaatcgcggcatcc

SEQ ID NO: 122477 - DNA, 25 bp, SARS Virus
acggaagaaacaatcgcggcatccc

SEQ ID NO: 122478 - DNA, 25 bp, SARS Virus
cggaagaaacaaacgcggcatccct

SEQ ID NO: 122479 - DNA, 25 bp, SARS Virus
ggaagaaacaatagcggcatccctt

SEQ ID NO: 122480 - DNA, 25 bp, SARS Virus
gaagaaacaatcacggcatcccttc

SEQ ID NO: 122481 - DNA, 25 bp, SARS Virus
aagaaacaatcgaggcatcccttca

SEQ ID NO: 122482 - DNA, 25 bp, SARS Virus
agaaacaatcgcagcatcccttcac

SEQ ID NO: 122483 - DNA, 25 bp, SARS Virus
gaaacaatcgcgacatcccttcact

SEQ ID NO: 122484 - DNA, 25 bp, SARS Virus
aaacaatcgcggaatcccttcactt

SEQ ID NO: 122485 - DNA, 25 bp, SARS Virus
aacaatcgcggcatcccttcacttc

SEQ ID NO: 122486 - DNA, 25 bp, SARS Virus
acaatcgcggcaacccttcacttcg

SEQ ID NO: 122487 - DNA, 25 bp, SARS Virus
caatcgcggcataccttcacttcga

SEQ ID NO: 122488 - DNA, 25 bp, SARS Virus
aatcgcggcatcacttcacttcgaa

SEQ ID NO: 122489 - DNA, 25 bp, SARS Virus
atcgcggcatccattcacttcgaag

SEQ ID NO: 122490 - DNA, 25 bp, SARS Virus
tcgcggcatcccatcacttcgaaga

SEQ ID NO: 122491 - DNA, 25 bp, SARS Virus
cgcggcatccctacacttcgaagac

SEQ ID NO: 122492 - DNA, 25 bp, SARS Virus
gcggcatcccttaacttcgaagacc

SEQ ID NO: 122493 - DNA, 25 bp, SARS Virus
cggcatcccttcacttcgaagaccc

SEQ ID NO: 122494 - DNA, 25 bp, SARS Virus
ggcatcccttcaattcgaagacccg

SEQ ID NO: 122495 - DNA, 25 bp, SARS Virus
gcatcccttcacatcgaagacccgg

SEQ ID NO: 122496 - DNA, 25 bp, SARS Virus
catcccttcactacgaagacccggt

SEQ ID NO: 122497 - DNA, 25 bp, SARS Virus
atcccttcacttagaagacccggtc

SEQ ID NO: 122498 - DNA, 25 bp, SARS Virus
tcccttcacttcaaagacccggtca

SEQ ID NO: 122499 - DNA, 25 bp, SARS Virus
cccttcacttcgaagacccggtcaa

SEQ ID NO: 122500 - DNA, 25 bp, SARS Virus
ccttcacttcgaagacccggtcaag

SEQ ID NO: 122501 - DNA, 25 bp, SARS Virus
cttcacttcgaaaacccggtcaagg

SEQ ID NO: 122502 - DNA, 25 bp, SARS Virus
ttcacttcgaagacccggtcaagga

SEQ ID NO: 122503 - DNA, 25 bp, SARS Virus
tcacttcgaagaaccggtcaaggat

SEQ ID NO: 122504 - DNA, 25 bp, SARS Virus
cacttcgaagacacggtcaaggatc

SEQ ID NO: 122505 - DNA, 25 bp, SARS Virus
acttcgaagaccaggtcaaggatcc

SEQ ID NO: 122506 - DNA, 25 bp, SARS Virus
cttcgaagacccagtcaaggatcca

SEQ ID NO: 122507 - DNA, 25 bp, SARS Virus
ttcgaagacccgatcaaggatccat

SEQ ID NO: 122508 - DNA, 25 bp, SARS Virus
tcgaagacccggacaaggatccatt

SEQ ID NO: 122509 - DNA, 25 bp, SARS Virus
cgaagacccggtaaaggatccatta

SEQ ID NO: 122510 - DNA, 25 bp, SARS Virus
gaagacccggtcaaggatccattat

SEQ ID NO: 122511 - DNA, 25 bp, SARS Virus
aagacccggtcaaggatccattatc

SEQ ID NO: 122512 - DNA, 25 bp, SARS Virus
agacccggtcaaagatccattatct

SEQ ID NO: 122513 - DNA, 25 bp, SARS Virus
gacccggtcaagaatccattatctt

SEQ ID NO: 122514 - DNA, 25 bp, SARS Virus
acccggtcaaggatccattatcttc

SEQ ID NO: 122515 - DNA, 25 bp, SARS Virus
cccggtcaaggaaccattatcttca

SEQ ID NO: 122516 - DNA, 25 bp, SARS Virus
ccggtcaaggatacattatcttcat

SEQ ID NO: 122517 - DNA, 25 bp, SARS Virus
cggtcaaggatcaattatcttcatg

SEQ ID NO: 122518 - DNA, 25 bp, SARS Virus
ggtcaaggatccattatcttcatgg

SEQ ID NO: 122519 - DNA, 25 bp, SARS Virus
gtcaaggatccaatatcttcatggt

SEQ ID NO: 122520 - DNA, 25 bp, SARS Virus
tcaaggatccataatcttcatggta

SEQ ID NO: 122521 - DNA, 25 bp, SARS Virus
gtgcagagggttcacgaactcactg

SEQ ID NO: 122522 - DNA, 25 bp, SARS Virus
tgcagagggtttccgaactcactgc

SEQ ID NO: 122523 - DNA, 25 bp, SARS Virus
gcagagggtttacgaactcactgca

SEQ ID NO: 122524 - DNA, 25 bp, SARS Virus
cagagggtttaccaactcactgcaa

SEQ ID NO: 122525 - DNA, 25 bp, SARS Virus
agagggtttacgcactcactgcaac

SEQ ID NO: 122526 - DNA, 25 bp, SARS Virus
gagggtttacgacctcactgcaaca

SEQ ID NO: 122527 - DNA, 25 bp, SARS Virus
agggtttacgaactcactgcaacat

SEQ ID NO: 122528 - DNA, 25 bp, SARS Virus
gggtttacgaacccactgcaacatg

SEQ ID NO: 122529 - DNA, 25 bp, SARS Virus
ggtttacgaactcactgcaacatga

SEQ ID NO: 122530 - DNA, 25 bp, SARS Virus
gtttacgaactccctgcaacatgac

SEQ ID NO: 122531 - DNA, 25 bp, SARS Virus
tttacgaactcactgcaacatgaca

SEQ ID NO: 122532 - DNA, 25 bp, SARS Virus
ttacgaactcaccgcaacatgacaa

SEQ ID NO: 122533 - DNA, 25 bp, SARS Virus
tacgaactcactccaacatgacaaa

SEQ ID NO: 122534 - DNA, 25 bp, SARS Virus
acgaactcactgcaacatgacaaaa

SEQ ID NO: 122535 - DNA, 25 bp, SARS Virus
cgaactcactgccacatgacaaaac

SEQ ID NO: 122536 - DNA, 25 bp, SARS Virus
gaactcactgcaccatgacaaaaca

SEQ ID NO: 122537 - DNA, 25 bp, SARS Virus
aactcactgcaacatgacaaaacac

SEQ ID NO: 122538 - DNA, 25 bp, SARS Virus
actcactgcaacctgacaaaacacc

SEQ ID NO: 122539 - DNA, 25 bp, SARS Virus
ctcactgcaacacgacaaaacaccg

SEQ ID NO: 122540 - DNA, 25 bp, SARS Virus
tcactgcaacatcacaaaacaccgt

SEQ ID NO: 122541 - DNA, 25 bp, SARS Virus
cactgcaacatgccaaaacaccgtc

SEQ ID NO: 122542 - DNA, 25 bp, SARS Virus
actgcaacatgacaaaacaccgtca

SEQ ID NO: 122543 - DNA, 25 bp, SARS Virus
ctgcaacatgaccaaacaccgtcat

SEQ ID NO: 122544 - DNA, 25 bp, SARS Virus
tgcaacatgacacaacaccgtcatg

SEQ ID NO: 122545 - DNA, 25 bp, SARS Virus
gcaacatgacaacacaccgtcatgc

SEQ ID NO: 122546 - DNA, 25 bp, SARS Virus
caacatgacaaaccaccgtcatgca

SEQ ID NO: 122547 - DNA, 25 bp, SARS Virus
aacatgacaaaacaccgtcatgcaa

SEQ ID NO: 122548 - DNA, 25 bp, SARS Virus
acatgacaaaaccccgtcatgcaaa

SEQ ID NO: 122549 - DNA, 25 bp, SARS Virus
catgacaaaacaccgtcatgcaaaa

SEQ ID NO: 122550 - DNA, 25 bp, SARS Virus
atgacaaaacaccgtcatgcaaaaa

SEQ ID NO: 122551 - DNA, 25 bp, SARS Virus
tgacaaaacaccctcatgcaaaaac

SEQ ID NO: 122552 - DNA, 25 bp, SARS Virus
gacaaaacaccgccatgcaaaaacc

SEQ ID NO: 122553 - DNA, 25 bp, SARS Virus
acaaaacaccgtcatgcaaaaaccg

SEQ ID NO: 122554 - DNA, 25 bp, SARS Virus
caaaacaccgtcctgcaaaaaccgc

SEQ ID NO: 122555 - DNA, 25 bp, SARS Virus
aaaacaccgtcacgcaaaaaccgct

SEQ ID NO: 122556 - DNA, 25 bp, SARS Virus
aaacaccgtcatccaaaaaccgctc

SEQ ID NO: 122557 - DNA, 25 bp, SARS Virus
aacaccgtcatgcaaaaaccgctcc

SEQ ID NO: 122558 - DNA, 25 bp, SARS Virus
acaccgtcatgccaaaaccgctccg

SEQ ID NO: 122559 - DNA, 25 bp, SARS Virus
caccgtcatgcacaaaccgctccga

SEQ ID NO: 122560 - DNA, 25 bp, SARS Virus
accgtcatgcaacaaccgctccgaa

SEQ ID NO: 122561 - DNA, 25 bp, SARS Virus
ccgtcatgcaaacaccgctccgaaa

SEQ ID NO: 122562 - DNA, 25 bp, SARS Virus
cgtcatgcaaaacccgctccgaaaa

SEQ ID NO: 122563 - DNA, 25 bp, SARS Virus
gtcatgcaaaaaccgctccgaaaaa

SEQ ID NO: 122564 - DNA, 25 bp, SARS Virus
tcatgcaaaaaccgctccgaaaaat

SEQ ID NO: 122565 - DNA, 25 bp, SARS Virus
catgcaaaaacccctccgaaaaatc

SEQ ID NO: 122566 - DNA, 25 bp, SARS Virus
atgcaaaaaccgctccgaaaaatct

SEQ ID NO: 122567 - DNA, 25 bp, SARS Virus
tgcaaaaaccgccccgaaaaatcta

SEQ ID NO: 122568 - DNA, 25 bp, SARS Virus
gcaaaaaccgctccgaaaaatctac

SEQ ID NO: 122569 - DNA, 25 bp, SARS Virus
caaaaaccgctccgaaaaatctacg

SEQ ID NO: 122570 - DNA, 25 bp, SARS Virus
aaaaaccgctcccaaaaatctacgg

SEQ ID NO: 122571 - DNA, 25 bp, SARS Virus
aaaaccgctccgcaaaatctacgga

SEQ ID NO: 122572 - DNA, 25 bp, SARS Virus
aaaccgctccgacaaatctacggag

SEQ ID NO: 122573 - DNA, 25 bp, SARS Virus
aaccgctccgaacaatctacggagt

SEQ ID NO: 122574 - DNA, 25 bp, SARS Virus
accgctccgaaacatctacggagtc

SEQ ID NO: 122575 - DNA, 25 bp, SARS Virus
ccgctccgaaaactctacggagtcg

SEQ ID NO: 122576 - DNA, 25 bp, SARS Virus
cgctccgaaaaacctacggagtcgt

SEQ ID NO: 122577 - DNA, 25 bp, SARS Virus
gctccgaaaaatctacggagtcgtc

SEQ ID NO: 122578 - DNA, 25 bp, SARS Virus
ctccgaaaaatccacggagtcgtcg

SEQ ID NO: 122579 - DNA, 25 bp, SARS Virus
tccgaaaaatctccggagtcgtcgt

SEQ ID NO: 122580 - DNA, 25 bp, SARS Virus
ccgaaaaatctacggagtcgtcgtc

SEQ ID NO: 122581 - DNA, 25 bp, SARS Virus
cgaaaaatctaccgagtcgtcgtct

SEQ ID NO: 122582 - DNA, 25 bp, SARS Virus
gaaaaatctacgcagtcgtcgtcta

SEQ ID NO: 122583 - DNA, 25 bp, SARS Virus
aaaaatctacggcgtcgtcgtctaa

SEQ ID NO: 122584 - DNA, 25 bp, SARS Virus
aaaatctacggactcgtcgtctaaa

SEQ ID NO: 122585 - DNA, 25 bp, SARS Virus
aaatctacggagccgtcgtctaaag

SEQ ID NO: 122586 - DNA, 25 bp, SARS Virus
aatctacggagtcgtcgtctaaaga

SEQ ID NO: 122587 - DNA, 25 bp, SARS Virus
atctacggagtcctcgtctaaagaa

SEQ ID NO: 122588 - DNA, 25 bp, SARS Virus
tctacggagtcgccgtctaaagaat

SEQ ID NO: 122589 - DNA, 25 bp, SARS Virus
ctacggagtcgtcgtctaaagaatc

SEQ ID NO: 122590 - DNA, 25 bp, SARS Virus
tacggagtcgtcctctaaagaatca

SEQ ID NO: 122591 - DNA, 25 bp, SARS Virus
acggagtcgtcgcctaaagaatcac

SEQ ID NO: 122592 - DNA, 25 bp, SARS Virus
cggagtcgtcgtctaaagaatcact

SEQ ID NO: 122593 - DNA, 25 bp, SARS Virus
ggagtcgtcgtccaaagaatcactg

SEQ ID NO: 122594 - DNA, 25 bp, SARS Virus
gagtcgtcgtctcaagaatcactgt

SEQ ID NO: 122595 - DNA, 25 bp, SARS Virus
agtcgtcgtctacagaatcactgtc

SEQ ID NO: 122596 - DNA, 25 bp, SARS Virus
gtcgtcgtctaacgaatcactgtca

SEQ ID NO: 122597 - DNA, 25 bp, SARS Virus
tcgtcgtctaaacaatcactgtcaa

SEQ ID NO: 122598 - DNA, 25 bp, SARS Virus
cgtcgtctaaagcatcactgtcaaa

SEQ ID NO: 122599 - DNA, 25 bp, SARS Virus
gtcgtctaaagactcactgtcaaac

SEQ ID NO: 122600 - DNA, 25 bp, SARS Virus
tcgtctaaagaaccactgtcaaacc

SEQ ID NO: 122601 - DNA, 25 bp, SARS Virus
cgtctaaagaatcactgtcaaaccg

SEQ ID NO: 122602 - DNA, 25 bp, SARS Virus
gtctaaagaatccctgtcaaaccgg

SEQ ID NO: 122603 - DNA, 25 bp, SARS Virus
tctaaagaatcactgtcaaaccgga

SEQ ID NO: 122604 - DNA, 25 bp, SARS Virus
ctaaagaatcaccgtcaaaccggaa

SEQ ID NO: 122605 - DNA, 25 bp, SARS Virus
taaagaatcactctcaaaccggaac

SEQ ID NO: 122606 - DNA, 25 bp, SARS Virus
aaagaatcactgccaaaccggaaca

SEQ ID NO: 122607 - DNA, 25 bp, SARS Virus
aagaatcactgtcaaaccggaacaa

SEQ ID NO: 122608 - DNA, 25 bp, SARS Virus
agaatcactgtccaaccggaacaac

SEQ ID NO: 122609 - DNA, 25 bp, SARS Virus
gaatcactgtcacaccggaacaaca

SEQ ID NO: 122610 - DNA, 25 bp, SARS Virus
aatcactgtcaacccggaacaacaa

SEQ ID NO: 122611 - DNA, 25 bp, SARS Virus
atcactgtcaaaccggaacaacaac

SEQ ID NO: 122612 - DNA, 25 bp, SARS Virus
tcactgtcaaaccggaacaacaaca

SEQ ID NO: 122613 - DNA, 25 bp, SARS Virus
cactgtcaaacccgaacaacaacaa

SEQ ID NO: 122614 - DNA, 25 bp, SARS Virus
actgtcaaaccgcaacaacaacaac

SEQ ID NO: 122615 - DNA, 25 bp, SARS Virus
ctgtcaaaccggcacaacaacaacc

SEQ ID NO: 122616 - DNA, 25 bp, SARS Virus
tgtcaaaccggaccaacaacaaccg

SEQ ID NO: 122617 - DNA, 25 bp, SARS Virus
gtcaaaccggaacaacaacaaccgg

SEQ ID NO: 122618 - DNA, 25 bp, SARS Virus
tcaaaccggaaccacaacaaccgga

SEQ ID NO: 122619 - DNA, 25 bp, SARS Virus
caaaccggaacaccaacaaccggaa

SEQ ID NO: 122620 - DNA, 25 bp, SARS Virus
aaaccggaacaacaacaaccggaaa

SEQ ID NO: 122621 - DNA, 25 bp, SARS Virus
aaccggaacaaccacaaccggaaat

SEQ ID NO: 122622 - DNA, 25 bp, SARS Virus
accggaacaacaccaaccggaaatg

SEQ ID NO: 122623 - DNA, 25 bp, SARS Virus
ccggaacaacaacaaccggaaatgg

SEQ ID NO: 122624 - DNA, 25 bp, SARS Virus
cggaacaacaaccaccggaaatggt

SEQ ID NO: 122625 - DNA, 25 bp, SARS Virus
ggaacaacaacacccggaaatggtc

SEQ ID NO: 122626 - DNA, 25 bp, SARS Virus
gaacaacaacaaccggaaatggtct

SEQ ID NO: 122627 - DNA, 25 bp, SARS Virus
aacaacaacaaccggaaatggtctt

SEQ ID NO: 122628 - DNA, 25 bp, SARS Virus
acaacaacaacccgaaatggtcttt

SEQ ID NO: 122629 - DNA, 25 bp, SARS Virus
caacaacaaccgcaaatggtctttg

SEQ ID NO: 122630 - DNA, 25 bp, SARS Virus
aacaacaaccggcaatggtctttga

SEQ ID NO: 122631 - DNA, 25 bp, SARS Virus
acaacaaccggacatggtctttgaa

SEQ ID NO: 122632 - DNA, 25 bp, SARS Virus
caacaaccggaactggtctttgaaa

SEQ ID NO: 122633 - DNA, 25 bp, SARS Virus
aacaaccggaaacggtctttgaaac

SEQ ID NO: 122634 - DNA, 25 bp, SARS Virus
acaaccggaaatcgtctttgaaacg

SEQ ID NO: 122635 - DNA, 25 bp, SARS Virus
caaccggaaatgctctttgaaacga

SEQ ID NO: 122636 - DNA, 25 bp, SARS Virus
aaccggaaatggcctttgaaacgag

SEQ ID NO: 122637 - DNA, 25 bp, SARS Virus
accggaaatggtctttgaaacgaga

SEQ ID NO: 122638 - DNA, 25 bp, SARS Virus
ccggaaatggtccttgaaacgagag

SEQ ID NO: 122639 - DNA, 25 bp, SARS Virus
cggaaatggtctctgaaacgagagt

SEQ ID NO: 122640 - DNA, 25 bp, SARS Virus
ggaaatggtcttcgaaacgagagtt

SEQ ID NO: 122641 - DNA, 25 bp, SARS Virus
gaaatggtctttcaaacgagagttc

SEQ ID NO: 122642 - DNA, 25 bp, SARS Virus
aaatggtctttgcaacgagagttcg

SEQ ID NO: 122643 - DNA, 25 bp, SARS Virus
aatggtctttgacacgagagttcga

SEQ ID NO: 122644 - DNA, 25 bp, SARS Virus
atggtctttgaaccgagagttcgac

SEQ ID NO: 122645 - DNA, 25 bp, SARS Virus
tggtctttgaaacgagagttcgacc

SEQ ID NO: 122646 - DNA, 25 bp, SARS Virus
ggtctttgaaaccagagttcgacca

SEQ ID NO: 122647 - DNA, 25 bp, SARS Virus
gtctttgaaacgcgagttcgaccaa

SEQ ID NO: 122648 - DNA, 25 bp, SARS Virus
tctttgaaacgacagttcgaccaag

SEQ ID NO: 122649 - DNA, 25 bp, SARS Virus
ctttgaaacgagcgttcgaccaagt

SEQ ID NO: 122650 - DNA, 25 bp, SARS Virus
tttgaaacgagacttcgaccaagtt

SEQ ID NO: 122651 - DNA, 25 bp, SARS Virus
ttgaaacgagagctcgaccaagtta

SEQ ID NO: 122652 - DNA, 25 bp, SARS Virus
tgaaacgagagtccgaccaagttag

SEQ ID NO: 122653 - DNA, 25 bp, SARS Virus
gaaacgagagttcgaccaagttaga

SEQ ID NO: 122654 - DNA, 25 bp, SARS Virus
aaacgagagttccaccaagttagac

SEQ ID NO: 122655 - DNA, 25 bp, SARS Virus
aacgagagttcgcccaagttagaca

SEQ ID NO: 122656 - DNA, 25 bp, SARS Virus
acgagagttcgaccaagttagacag

SEQ ID NO: 122657 - DNA, 25 bp, SARS Virus
cgagagttcgaccaagttagacaga

SEQ ID NO: 122658 - DNA, 25 bp, SARS Virus
gagagttcgacccagttagacagat

SEQ ID NO: 122659 - DNA, 25 bp, SARS Virus
agagttcgaccacgttagacagatc

SEQ ID NO: 122660 - DNA, 25 bp, SARS Virus
gagttcgaccaacttagacagatcg

SEQ ID NO: 122661 - DNA, 25 bp, SARS Virus
agttcgaccaagctagacagatcgt

SEQ ID NO: 122662 - DNA, 25 bp, SARS Virus
gttcgaccaagtcagacagatcgtc

SEQ ID NO: 122663 - DNA, 25 bp, SARS Virus
ttcgaccaagttcgacagatcgtcg

SEQ ID NO: 122664 - DNA, 25 bp, SARS Virus
tcgaccaagttacacagatcgtcgt

SEQ ID NO: 122665 - DNA, 25 bp, SARS Virus
cgaccaagttagccagatcgtcgtt

SEQ ID NO: 122666 - DNA, 25 bp, SARS Virus
gaccaagttagacagatcgtcgtta

SEQ ID NO: 122667 - DNA, 25 bp, SARS Virus
accaagttagaccgatcgtcgttat

SEQ ID NO: 122668 - DNA, 25 bp, SARS Virus
ccaagttagacacatcgtcgttatc

SEQ ID NO: 122669 - DNA, 25 bp, SARS Virus
caagttagacagctcgtcgttatcg

SEQ ID NO: 122670 - DNA, 25 bp, SARS Virus
aagttagacagaccgtcgttatcgc

SEQ ID NO: 122671 - DNA, 25 bp, SARS Virus
agttagacagatcgtcgttatcgcg

SEQ ID NO: 122672 - DNA, 25 bp, SARS Virus
gttagacagatcctcgttatcgcgc

SEQ ID NO: 122673 - DNA, 25 bp, SARS Virus
ttagacagatcgccgttatcgcgct

SEQ ID NO: 122674 - DNA, 25 bp, SARS Virus
tagacagatcgtcgttatcgcgctc

SEQ ID NO: 122675 - DNA, 25 bp, SARS Virus
agacagatcgtccttatcgcgctcc

SEQ ID NO: 122676 - DNA, 25 bp, SARS Virus
gacagatcgtcgctatcgcgctccc

SEQ ID NO: 122677 - DNA, 25 bp, SARS Virus
acagatcgtcgtcatcgcgctcccg

SEQ ID NO: 122678 - DNA, 25 bp, SARS Virus
cagatcgtcgttctcgcgctcccgt

SEQ ID NO: 122679 - DNA, 25 bp, SARS Virus
agatcgtcgttaccgcgctcccgtc

SEQ ID NO: 122680 - DNA, 25 bp, SARS Virus
gatcgtcgttatcgcgctcccgtca

SEQ ID NO: 122681 - DNA, 25 bp, SARS Virus
atcgtcgttatcccgctcccgtcaa

SEQ ID NO: 122682 - DNA, 25 bp, SARS Virus
tcgtcgttatcgcgctcccgtcaaa

SEQ ID NO: 122683 - DNA, 25 bp, SARS Virus
cgtcgttatcgccctcccgtcaaag

SEQ ID NO: 122684 - DNA, 25 bp, SARS Virus
gtcgttatcgcgctcccgtcaaagt

SEQ ID NO: 122685 - DNA, 25 bp, SARS Virus
tcgttatcgcgcccccgtcaaagtg

SEQ ID NO: 122686 - DNA, 25 bp, SARS Virus
cgttatcgcgctcccgtcaaagtgg

SEQ ID NO: 122687 - DNA, 25 bp, SARS Virus
gttatcgcgctcccgtcaaagtggt

SEQ ID NO: 122688 - DNA, 25 bp, SARS Virus
ttatcgcgctcccgtcaaagtggtg

SEQ ID NO: 122689 - DNA, 25 bp, SARS Virus
tatcgcgctcccctcaaagtggtgg

SEQ ID NO: 122690 - DNA, 25 bp, SARS Virus
atcgcgctcccgccaaagtggtgga

SEQ ID NO: 122691 - DNA, 25 bp, SARS Virus
tcgcgctcccgtcaaagtggtggag

SEQ ID NO: 122692 - DNA, 25 bp, SARS Virus
cgcgctcccgtccaagtggtggagg

SEQ ID NO: 122693 - DNA, 25 bp, SARS Virus
gcgctcccgtcacagtggtggaggc

SEQ ID NO: 122694 - DNA, 25 bp, SARS Virus
cgctcccgtcaacgtggtggaggcg

SEQ ID NO: 122695 - DNA, 25 bp, SARS Virus
gctcccgtcaaactggtggaggcga

SEQ ID NO: 122696 - DNA, 25 bp, SARS Virus
ctcccgtcaaagcggtggaggcgat

SEQ ID NO: 122697 - DNA, 25 bp, SARS Virus
tcccgtcaaagtcgtggaggcgatc

SEQ ID NO: 122698 - DNA, 25 bp, SARS Virus
cccgtcaaagtgctggaggcgatcg

SEQ ID NO: 122699 - DNA, 25 bp, SARS Virus
ccgtcaaagtggcggaggcgatcgg

SEQ ID NO: 122700 - DNA, 25 bp, SARS Virus
cgtcaaagtggtcgaggcgatcggt

SEQ ID NO: 122701 - DNA, 25 bp, SARS Virus
gtcaaagtggtgcaggcgatcggta

SEQ ID NO: 122702 - DNA, 25 bp, SARS Virus
tcaaagtggtggcggcgatcggtaa

SEQ ID NO: 122703 - DNA, 25 bp, SARS Virus
caaagtggtggacgcgatcggtaag

SEQ ID NO: 122704 - DNA, 25 bp, SARS Virus
aaagtggtggagccgatcggtaagc

SEQ ID NO: 122705 - DNA, 25 bp, SARS Virus
aagtggtggaggcgatcggtaagct

SEQ ID NO: 122706 - DNA, 25 bp, SARS Virus
agtggtggaggccatcggtaagctc

SEQ ID NO: 122707 - DNA, 25 bp, SARS Virus
gtggtggaggcgctcggtaagctcg

SEQ ID NO: 122708 - DNA, 25 bp, SARS Virus
tggtggaggcgaccggtaagctcgt

SEQ ID NO: 122709 - DNA, 25 bp, SARS Virus
ggtggaggcgatcggtaagctcgtc

SEQ ID NO: 122710 - DNA, 25 bp, SARS Virus
gtggaggcgatccgtaagctcgtcc

SEQ ID NO: 122711 - DNA, 25 bp, SARS Virus
tggaggcgatcgctaagctcgtcct

SEQ ID NO: 122712 - DNA, 25 bp, SARS Virus
ggaggcgatcggcaagctcgtcctc

SEQ ID NO: 122713 - DNA, 25 bp, SARS Virus
gaggcgatcggtcagctcgtcctct

SEQ ID NO: 122714 - DNA, 25 bp, SARS Virus
aggcgatcggtacgctcgtcctctt

SEQ ID NO: 122715 - DNA, 25 bp, SARS Virus
ggcgatcggtaacctcgtcctctta

SEQ ID NO: 122716 - DNA, 25 bp, SARS Virus
gcgatcggtaagctcgtcctcttaa

SEQ ID NO: 122717 - DNA, 25 bp, SARS Virus
cgatcggtaagcccgtcctcttaaa

SEQ ID NO: 122718 - DNA, 25 bp, SARS Virus
gatcggtaagctcgtcctcttaaag

SEQ ID NO: 122719 - DNA, 25 bp, SARS Virus
atcggtaagctcctcctcttaaagg

SEQ ID NO: 122720 - DNA, 25 bp, SARS Virus
tcggtaagctcgccctcttaaaggg

SEQ ID NO: 122721 - DNA, 25 bp, SARS Virus
cggtaagctcgtcctcttaaagggg

SEQ ID NO: 122722 - DNA, 25 bp, SARS Virus
ggtaagctcgtcctcttaaagggga

SEQ ID NO: 122723 - DNA, 25 bp, SARS Virus
gtaagctcgtccccttaaaggggat

SEQ ID NO: 122724 - DNA, 25 bp, SARS Virus
taagctcgtcctcttaaaggggatg

SEQ ID NO: 122725 - DNA, 25 bp, SARS Virus
aagctcgtcctcctaaaggggatga

SEQ ID NO: 122726 - DNA, 25 bp, SARS Virus
agctcgtcctctcaaaggggatgac

SEQ ID NO: 122727 - DNA, 25 bp, SARS Virus
gctcgtcctcttcaaggggatgacg

SEQ ID NO: 122728 - DNA, 25 bp, SARS Virus
ctcgtcctcttacaggggatgacga

SEQ ID NO: 122729 - DNA, 25 bp, SARS Virus
tcgtcctcttaacggggatgacgac

SEQ ID NO: 122730 - DNA, 25 bp, SARS Virus
cgtcctcttaaacgggatgacgacg

SEQ ID NO: 122731 - DNA, 25 bp, SARS Virus
gtcctcttaaagcggatgacgacgg

SEQ ID NO: 122732 - DNA, 25 bp, SARS Virus
tcctcttaaaggcgatgacgacggt

SEQ ID NO: 122733 - DNA, 25 bp, SARS Virus
cctcttaaagggcatgacgacggtc

SEQ ID NO: 122734 - DNA, 25 bp, SARS Virus
ctcttaaaggggctgacgacggtcc

SEQ ID NO: 122735 - DNA, 25 bp, SARS Virus
tcttaaaggggacgacgacggtcct

SEQ ID NO: 122736 - DNA, 25 bp, SARS Virus
cttaaaggggatcacgacggtcctc

SEQ ID NO: 122737 - DNA, 25 bp, SARS Virus
ttaaaggggatgccgacggtcctca

SEQ ID NO: 122738 - DNA, 25 bp, SARS Virus
taaaggggatgacgacggtcctcaa

SEQ ID NO: 122739 - DNA, 25 bp, SARS Virus
aaaggggatgaccacggtcctcaac

SEQ ID NO: 122740 - DNA, 25 bp, SARS Virus
aaggggatgacgccggtcctcaact

SEQ ID NO: 122741 - DNA, 25 bp, SARS Virus
aggggatgacgacggtcctcaactt

SEQ ID NO: 122742 - DNA, 25 bp, SARS Virus
ggggatgacgaccgtcctcaactta

SEQ ID NO: 122743 - DNA, 25 bp, SARS Virus
gggatgacgacgctcctcaacttaa

SEQ ID NO: 122744 - DNA, 25 bp, SARS Virus
ggatgacgacggccctcaacttaaa

SEQ ID NO: 122745 - DNA, 25 bp, SARS Virus
gatgacgacggtcctcaacttaaag

SEQ ID NO: 122746 - DNA, 25 bp, SARS Virus
atgacgacggtcctcaacttaaaga

SEQ ID NO: 122747 - DNA, 25 bp, SARS Virus
tgacgacggtccccaacttaaagaa

SEQ ID NO: 122748 - DNA, 25 bp, SARS Virus
gacgacggtcctcaacttaaagaac

SEQ ID NO: 122749 - DNA, 25 bp, SARS Virus
acgacggtcctccacttaaagaact

SEQ ID NO: 122750 - DNA, 25 bp, SARS Virus
cgacggtcctcaccttaaagaactt

SEQ ID NO: 122751 - DNA, 25 bp, SARS Virus
gacggtcctcaacttaaagaactta

SEQ ID NO: 122752 - DNA, 25 bp, SARS Virus
acggtcctcaacctaaagaacttaa

SEQ ID NO: 122753 - DNA, 25 bp, SARS Virus
cggtcctcaactcaaagaacttaat

SEQ ID NO: 122754 - DNA, 25 bp, SARS Virus
ggtcctcaacttcaagaacttaatg

SEQ ID NO: 122755 - DNA, 25 bp, SARS Virus
gtcctcaacttacagaacttaatgg

SEQ ID NO: 122756 - DNA, 25 bp, SARS Virus
tcctcaacttaacgaacttaatggc

SEQ ID NO: 122757 - DNA, 25 bp, SARS Virus
cctcaacttaaacaacttaatggcg

SEQ ID NO: 122758 - DNA, 25 bp, SARS Virus
ctcaacttaaagcacttaatggcgc

SEQ ID NO: 122759 - DNA, 25 bp, SARS Virus
tcaacttaaagaccttaatggcgct

SEQ ID NO: 122760 - DNA, 25 bp, SARS Virus
caacttaaagaacttaatggcgctg

SEQ ID NO: 122761 - DNA, 25 bp, SARS Virus
aacttaaagaacctaatggcgctga

SEQ ID NO: 122762 - DNA, 25 bp, SARS Virus
acttaaagaactcaatggcgctgat

SEQ ID NO: 122763 - DNA, 25 bp, SARS Virus
cttaaagaacttcatggcgctgatg

SEQ ID NO: 122764 - DNA, 25 bp, SARS Virus
ttaaagaacttactggcgctgatgc

SEQ ID NO: 122765 - DNA, 25 bp, SARS Virus
taaagaacttaacggcgctgatgca

SEQ ID NO: 122766 - DNA, 25 bp, SARS Virus
aaagaacttaatcgcgctgatgcac

SEQ ID NO: 122767 - DNA, 25 bp, SARS Virus
aagaacttaatgccgctgatgcact

SEQ ID NO: 122768 - DNA, 25 bp, SARS Virus
agaacttaatggcgctgatgcacta

SEQ ID NO: 122769 - DNA, 25 bp, SARS Virus
gaacttaatggccctgatgcactac

SEQ ID NO: 122770 - DNA, 25 bp, SARS Virus
aacttaatggcgctgatgcactact

SEQ ID NO: 122771 - DNA, 25 bp, SARS Virus
acttaatggcgccgatgcactactc

SEQ ID NO: 122772 - DNA, 25 bp, SARS Virus
cttaatggcgctcatgcactactcc

SEQ ID NO: 122773 - DNA, 25 bp, SARS Virus
ttaatggcgctgctgcactactcct

SEQ ID NO: 122774 - DNA, 25 bp, SARS Virus
taatggcgctgacgcactactcctc

SEQ ID NO: 122775 - DNA, 25 bp, SARS Virus
aatggcgctgatccactactcctcg

SEQ ID NO: 122776 - DNA, 25 bp, SARS Virus
atggcgctgatgcactactcctcgc

SEQ ID NO: 122777 - DNA, 25 bp, SARS Virus
tggcgctgatgccctactcctcgct

SEQ ID NO: 122778 - DNA, 25 bp, SARS Virus
ggcgctgatgcactactcctcgctc

SEQ ID NO: 122779 - DNA, 25 bp, SARS Virus
gcgctgatgcaccactcctcgctct

SEQ ID NO: 122780 - DNA, 25 bp, SARS Virus
cgctgatgcactcctcctcgctctt

SEQ ID NO: 122781 - DNA, 25 bp, SARS Virus
gctgatgcactactcctcgctcttc

SEQ ID NO: 122782 - DNA, 25 bp, SARS Virus
ctgatgcactacccctcgctcttct

SEQ ID NO: 122783 - DNA, 25 bp, SARS Virus
tgatgcactactcctcgctcttctc

SEQ ID NO: 122784 - DNA, 25 bp, SARS Virus
gatgcactactcctcgctcttctcc

SEQ ID NO: 122785 - DNA, 25 bp, SARS Virus
atgcactactccccgctcttctccg

SEQ ID NO: 122786 - DNA, 25 bp, SARS Virus
tgcactactcctcgctcttctccga

SEQ ID NO: 122787 - DNA, 25 bp, SARS Virus
gcactactcctccctcttctccgaa

SEQ ID NO: 122788 - DNA, 25 bp, SARS Virus
cactactcctcgctcttctccgaac

SEQ ID NO: 122789 - DNA, 25 bp, SARS Virus
actactcctcgcccttctccgaact

SEQ ID NO: 122790 - DNA, 25 bp, SARS Virus
ctactcctcgctcttctccgaactg

SEQ ID NO: 122791 - DNA, 25 bp, SARS Virus
tactcctcgctcctctccgaactga

SEQ ID NO: 122792 - DNA, 25 bp, SARS Virus
actcctcgctctcctccgaactgac

SEQ ID NO: 122793 - DNA, 25 bp, SARS Virus
ctcctcgctcttctccgaactgacg

SEQ ID NO: 122794 - DNA, 25 bp, SARS Virus
tcctcgctcttccccgaactgacgg

SEQ ID NO: 122795 - DNA, 25 bp, SARS Virus
cctcgctcttctccgaactgacggc

SEQ ID NO: 122796 - DNA, 25 bp, SARS Virus
ctcgctcttctccgaactgacggcg

SEQ ID NO: 122797 - DNA, 25 bp, SARS Virus
tcgctcttctcccaactgacggcgg

SEQ ID NO: 122798 - DNA, 25 bp, SARS Virus
cgctcttctccgcactgacggcgga

SEQ ID NO: 122799 - DNA, 25 bp, SARS Virus
gctcttctccgacctgacggcggag

SEQ ID NO: 122800 - DNA, 25 bp, SARS Virus
ctcttctccgaactgacggcggaga

SEQ ID NO: 122801 - DNA, 25 bp, SARS Virus
tcttctccgaaccgacggcggagac

SEQ ID NO: 122802 - DNA, 25 bp, SARS Virus
cttctccgaactcacggcggagacg

SEQ ID NO: 122803 - DNA, 25 bp, SARS Virus
ttctccgaactgccggcggagacga

SEQ ID NO: 122804 - DNA, 25 bp, SARS Virus
tctccgaactgacggcggagacgaa

SEQ ID NO: 122805 - DNA, 25 bp, SARS Virus
ctccgaactgaccgcggagacgaag

SEQ ID NO: 122806 - DNA, 25 bp, SARS Virus
tccgaactgacgccggagacgaagg

SEQ ID NO: 122807 - DNA, 25 bp, SARS Virus
ccgaactgacggcggagacgaaggg

SEQ ID NO: 122808 - DNA, 25 bp, SARS Virus
cgaactgacggccgagacgaaggga

SEQ ID NO: 122809 - DNA, 25 bp, SARS Virus
gaactgacggcgcagacgaagggag

SEQ ID NO: 122810 - DNA, 25 bp, SARS Virus
aactgacggcggcgacgaagggaga

SEQ ID NO: 122811 - DNA, 25 bp, SARS Virus
actgacggcggacacgaagggagac

SEQ ID NO: 122812 - DNA, 25 bp, SARS Virus
ctgacggcggagccgaagggagacg

SEQ ID NO: 122813 - DNA, 25 bp, SARS Virus
tgacggcggagacgaagggagacgc

SEQ ID NO: 122814 - DNA, 25 bp, SARS Virus
gacggcggagaccaagggagacgca

SEQ ID NO: 122815 - DNA, 25 bp, SARS Virus
acggcggagacgcagggagacgcat

SEQ ID NO: 122816 - DNA, 25 bp, SARS Virus
cggcggagacgacgggagacgcatc

SEQ ID NO: 122817 - DNA, 25 bp, SARS Virus
ggcggagacgaacggagacgcatct

SEQ ID NO: 122818 - DNA, 25 bp, SARS Virus
gcggagacgaagcgagacgcatctt

SEQ ID NO: 122819 - DNA, 25 bp, SARS Virus
cggagacgaaggcagacgcatcttc

SEQ ID NO: 122820 - DNA, 25 bp, SARS Virus
ggagacgaagggcgacgcatcttcg

SEQ ID NO: 122821 - DNA, 25 bp, SARS Virus
gagacgaagggacacgcatcttcgg

SEQ ID NO: 122822 - DNA, 25 bp, SARS Virus
agacgaagggagccgcatcttcgga

SEQ ID NO: 122823 - DNA, 25 bp, SARS Virus
gacgaagggagacgcatcttcggaa

SEQ ID NO: 122824 - DNA, 25 bp, SARS Virus
acgaagggagacccatcttcggaaa

SEQ ID NO: 122825 - DNA, 25 bp, SARS Virus
cgaagggagacgcatcttcggaaaa

SEQ ID NO: 122826 - DNA, 25 bp, SARS Virus
gaagggagacgcctcttcggaaaac

SEQ ID NO: 122827 - DNA, 25 bp, SARS Virus
aagggagacgcaccttcggaaaacc

SEQ ID NO: 122828 - DNA, 25 bp, SARS Virus
agggagacgcatcttcggaaaaccg

SEQ ID NO: 122829 - DNA, 25 bp, SARS Virus
gggagacgcatcctcggaaaaccgt

SEQ ID NO: 122830 - DNA, 25 bp, SARS Virus
ggagacgcatctccggaaaaccgtt

SEQ ID NO: 122831 - DNA, 25 bp, SARS Virus
gagacgcatcttcggaaaaccgtta

SEQ ID NO: 122832 - DNA, 25 bp, SARS Virus
agacgcatcttccgaaaaccgttac

SEQ ID NO: 122833 - DNA, 25 bp, SARS Virus
gacgcatcttcgcaaaaccgttaca

SEQ ID NO: 122834 - DNA, 25 bp, SARS Virus
acgcatcttcggcaaaccgttacaa

SEQ ID NO: 122835 - DNA, 25 bp, SARS Virus
cgcatcttcggacaaccgttacaac

SEQ ID NO: 122836 - DNA, 25 bp, SARS Virus
gcatcttcggaacaccgttacaaca

SEQ ID NO: 122837 - DNA, 25 bp, SARS Virus
catcttcggaaacccgttacaacaa

SEQ ID NO: 122838 - DNA, 25 bp, SARS Virus
atcttcggaaaaccgttacaacaag

SEQ ID NO: 122839 - DNA, 25 bp, SARS Virus
tcttcggaaaaccgttacaacaagg

SEQ ID NO: 122840 - DNA, 25 bp, SARS Virus
cttcggaaaacccttacaacaagga

SEQ ID NO: 122841 - DNA, 25 bp, SARS Virus
ttcggaaaaccgctacaacaaggaa

SEQ ID NO: 122842 - DNA, 25 bp, SARS Virus
tcggaaaaccgtcacaacaaggaac

SEQ ID NO: 122843 - DNA, 25 bp, SARS Virus
cggaaaaccgttccaacaaggaact

SEQ ID NO: 122844 - DNA, 25 bp, SARS Virus
ggaaaaccgttacaacaaggaactc

SEQ ID NO: 122845 - DNA, 25 bp, SARS Virus
gaaaaccgttaccacaaggaactcc

SEQ ID NO: 122846 - DNA, 25 bp, SARS Virus
aaaaccgttacaccaaggaactcct

SEQ ID NO: 122847 - DNA, 25 bp, SARS Virus
aaaccgttacaacaaggaactcctt

SEQ ID NO: 122848 - DNA, 25 bp, SARS Virus
aaccgttacaaccaggaactccttc

SEQ ID NO: 122849 - DNA, 25 bp, SARS Virus
accgttacaacacggaactccttca

SEQ ID NO: 122850 - DNA, 25 bp, SARS Virus
ccgttacaacaacgaactccttcaa

SEQ ID NO: 122851 - DNA, 25 bp, SARS Virus
cgttacaacaagcaactccttcaac

SEQ ID NO: 122852 - DNA, 25 bp, SARS Virus
gttacaacaaggcactccttcaaca

SEQ ID NO: 122853 - DNA, 25 bp, SARS Virus
ttacaacaaggacctccttcaacat

SEQ ID NO: 122854 - DNA, 25 bp, SARS Virus
tacaacaaggaactccttcaacatc

SEQ ID NO: 122855 - DNA, 25 bp, SARS Virus
acaacaaggaaccccttcaacatcg

SEQ ID NO: 122856 - DNA, 25 bp, SARS Virus
caacaaggaactccttcaacatcgt

SEQ ID NO: 122857 - DNA, 25 bp, SARS Virus
aacaaggaactccttcaacatcgtg

SEQ ID NO: 122858 - DNA, 25 bp, SARS Virus
acaaggaactccctcaacatcgtgc

SEQ ID NO: 122859 - DNA, 25 bp, SARS Virus
caaggaactcctccaacatcgtgcc

SEQ ID NO: 122860 - DNA, 25 bp, SARS Virus
aaggaactccttcaacatcgtgcca

SEQ ID NO: 122861 - DNA, 25 bp, SARS Virus
aggaactccttccacatcgtgccac

SEQ ID NO: 122862 - DNA, 25 bp, SARS Virus
ggaactccttcaccatcgtgccacc

SEQ ID NO: 122863 - DNA, 25 bp, SARS Virus
gaactccttcaacatcgtgccaccg

SEQ ID NO: 122864 - DNA, 25 bp, SARS Virus
aactccttcaacctcgtgccaccgt

SEQ ID NO: 122865 - DNA, 25 bp, SARS Virus
actccttcaacaccgtgccaccgtc

SEQ ID NO: 122866 - DNA, 25 bp, SARS Virus
ctccttcaacatcgtgccaccgtcg

SEQ ID NO: 122867 - DNA, 25 bp, SARS Virus
tccttcaacatcctgccaccgtcgt

SEQ ID NO: 122868 - DNA, 25 bp, SARS Virus
ccttcaacatcgcgccaccgtcgta

SEQ ID NO: 122869 - DNA, 25 bp, SARS Virus
cttcaacatcgtcccaccgtcgtaa

SEQ ID NO: 122870 - DNA, 25 bp, SARS Virus
ttcaacatcgtgccaccgtcgtaac

SEQ ID NO: 122871 - DNA, 25 bp, SARS Virus
tcaacatcgtgccaccgtcgtaaca

SEQ ID NO: 122872 - DNA, 25 bp, SARS Virus
caacatcgtgcccccgtcgtaacaa

SEQ ID NO: 122873 - DNA, 25 bp, SARS Virus
aacatcgtgccaccgtcgtaacaat

SEQ ID NO: 122874 - DNA, 25 bp, SARS Virus
acatcgtgccaccgtcgtaacaata

SEQ ID NO: 122875 - DNA, 25 bp, SARS Virus
catcgtgccaccctcgtaacaataa

SEQ ID NO: 122876 - DNA, 25 bp, SARS Virus
atcgtgccaccgccgtaacaataat

SEQ ID NO: 122877 - DNA, 25 bp, SARS Virus
tcgtgccaccgtcgtaacaataatc

SEQ ID NO: 122878 - DNA, 25 bp, SARS Virus
cgtgccaccgtcctaacaataatcc

SEQ ID NO: 122879 - DNA, 25 bp, SARS Virus
gtgccaccgtcgcaacaataatcct

SEQ ID NO: 122880 - DNA, 25 bp, SARS Virus
tgccaccgtcgtcacaataatccta

SEQ ID NO: 122881 - DNA, 25 bp, SARS Virus
gccaccgtcgtaccaataatcctaa

SEQ ID NO: 122882 - DNA, 25 bp, SARS Virus
ccaccgtcgtaacaataatcctaac

SEQ ID NO: 122883 - DNA, 25 bp, SARS Virus
caccgtcgtaaccataatcctaacg

SEQ ID NO: 122884 - DNA, 25 bp, SARS Virus
accgtcgtaacactaatcctaacgc

SEQ ID NO: 122885 - DNA, 25 bp, SARS Virus
ccgtcgtaacaacaatcctaacgcc

SEQ ID NO: 122886 - DNA, 25 bp, SARS Virus
cgtcgtaacaatcatcctaacgccc

SEQ ID NO: 122887 - DNA, 25 bp, SARS Virus
gtcgtaacaatactcctaacgccca

SEQ ID NO: 122888 - DNA, 25 bp, SARS Virus
tcgtaacaataaccctaacgcccac

SEQ ID NO: 122889 - DNA, 25 bp, SARS Virus
cgtaacaataatcctaacgcccacg

SEQ ID NO: 122890 - DNA, 25 bp, SARS Virus
gtaacaataatcctaacgcccacgg

SEQ ID NO: 122891 - DNA, 25 bp, SARS Virus
taacaataatcccaacgcccacggt

SEQ ID NO: 122892 - DNA, 25 bp, SARS Virus
aacaataatcctcacgcccacggtt

SEQ ID NO: 122893 - DNA, 25 bp, SARS Virus
acaataatcctaccgcccacggtta

SEQ ID NO: 122894 - DNA, 25 bp, SARS Virus
caataatcctaacgcccacggttac

SEQ ID NO: 122895 - DNA, 25 bp, SARS Virus
aataatcctaacccccacggttaca

SEQ ID NO: 122896 - DNA, 25 bp, SARS Virus
ataatcctaacgcccacggttacac

SEQ ID NO: 122897 - DNA, 25 bp, SARS Virus
taatcctaacgcccacggttacacc

SEQ ID NO: 122898 - DNA, 25 bp, SARS Virus
aatcctaacgcccacggttacacca

SEQ ID NO: 122899 - DNA, 25 bp, SARS Virus
atcctaacgcccccggttacaccag

SEQ ID NO: 122900 - DNA, 25 bp, SARS Virus
tcctaacgcccacggttacaccaga

SEQ ID NO: 122901 - DNA, 25 bp, SARS Virus
cctaacgcccaccgttacaccagaa

SEQ ID NO: 122902 - DNA, 25 bp, SARS Virus
ctaacgcccacgcttacaccagaaa

SEQ ID NO: 122903 - DNA, 25 bp, SARS Virus
taacgcccacggctacaccagaaac

SEQ ID NO: 122904 - DNA, 25 bp, SARS Virus
aacgcccacggtcacaccagaaacc

SEQ ID NO: 122905 - DNA, 25 bp, SARS Virus
acgcccacggttccaccagaaaccc

SEQ ID NO: 122906 - DNA, 25 bp, SARS Virus
cgcccacggttacaccagaaaccca

SEQ ID NO: 122907 - DNA, 25 bp, SARS Virus
gcccacggttaccccagaaacccac

SEQ ID NO: 122908 - DNA, 25 bp, SARS Virus
cccacggttacaccagaaacccaca

SEQ ID NO: 122909 - DNA, 25 bp, SARS Virus
ccacggttacaccagaaacccacat

SEQ ID NO: 122910 - DNA, 25 bp, SARS Virus
cacggttacacccgaaacccacata

SEQ ID NO: 122911 - DNA, 25 bp, SARS Virus
acggttacaccacaaacccacataa

SEQ ID NO: 122912 - DNA, 25 bp, SARS Virus
cggttacaccagcaacccacataag

SEQ ID NO: 122913 - DNA, 25 bp, SARS Virus
ggttacaccagacacccacataagt

SEQ ID NO: 122914 - DNA, 25 bp, SARS Virus
gttacaccagaaccccacataagtt

SEQ ID NO: 122915 - DNA, 25 bp, SARS Virus
ttacaccagaaacccacataagttc

SEQ ID NO: 122916 - DNA, 25 bp, SARS Virus
tacaccagaaacccacataagttcc

SEQ ID NO: 122917 - DNA, 25 bp, SARS Virus
acaccagaaacccacataagttccg

SEQ ID NO: 122918 - DNA, 25 bp, SARS Virus
caccagaaacccccataagttccga

SEQ ID NO: 122919 - DNA, 25 bp, SARS Virus
accagaaacccacataagttccgag

SEQ ID NO: 122920 - DNA, 25 bp, SARS Virus
ccagaaacccacctaagttccgagg

SEQ ID NO: 122921 - DNA, 25 bp, SARS Virus
cagaaacccacacaagttccgaggg

SEQ ID NO: 122922 - DNA, 25 bp, SARS Virus
agaaacccacatcagttccgaggga

SEQ ID NO: 122923 - DNA, 25 bp, SARS Virus
gaaacccacatacgttccgagggag

SEQ ID NO: 122924 - DNA, 25 bp, SARS Virus
aaacccacataacttccgagggagt

SEQ ID NO: 122925 - DNA, 25 bp, SARS Virus
aacccacataagctccgagggagtc

SEQ ID NO: 122926 - DNA, 25 bp, SARS Virus
acccacataagtcccgagggagtca

SEQ ID NO: 122927 - DNA, 25 bp, SARS Virus
cccacataagttccgagggagtcaa

SEQ ID NO: 122928 - DNA, 25 bp, SARS Virus
ccacataagttccgagggagtcaac

SEQ ID NO: 122929 - DNA, 25 bp, SARS Virus
cacataagttcccagggagtcaacg

SEQ ID NO: 122930 - DNA, 25 bp, SARS Virus
acataagttccgcgggagtcaacgt

SEQ ID NO: 122931 - DNA, 25 bp, SARS Virus
cataagttccgacggagtcaacgtt

SEQ ID NO: 122932 - DNA, 25 bp, SARS Virus
ataagttccgagcgagtcaacgttg

SEQ ID NO: 122933 - DNA, 25 bp, SARS Virus
taagttccgaggcagtcaacgttgg

SEQ ID NO: 122934 - DNA, 25 bp, SARS Virus
aagttccgagggcgtcaacgttggg

SEQ ID NO: 122935 - DNA, 25 bp, SARS Virus
agttccgagggactcaacgttgggt

SEQ ID NO: 122936 - DNA, 25 bp, SARS Virus
gttccgagggagccaacgttgggta

SEQ ID NO: 122937 - DNA, 25 bp, SARS Virus
ttccgagggagtcaacgttgggtat

SEQ ID NO: 122938 - DNA, 25 bp, SARS Virus
tccgagggagtccacgttgggtatg

SEQ ID NO: 122939 - DNA, 25 bp, SARS Virus
ccgagggagtcaccgttgggtatgc

SEQ ID NO: 122940 - DNA, 25 bp, SARS Virus
cgagggagtcaacgttgggtatgct

SEQ ID NO: 122941 - DNA, 25 bp, SARS Virus
gagggagtcaaccttgggtatgcta

SEQ ID NO: 122942 - DNA, 25 bp, SARS Virus
agggagtcaacgctgggtatgctac

SEQ ID NO: 122943 - DNA, 25 bp, SARS Virus
gggagtcaacgtcgggtatgctacg

SEQ ID NO: 122944 - DNA, 25 bp, SARS Virus
ggagtcaacgttcggtatgctacgg

SEQ ID NO: 122945 - DNA, 25 bp, SARS Virus
gagtcaacgttgcgtatgctacgga

SEQ ID NO: 122946 - DNA, 25 bp, SARS Virus
agtcaacgttggctatgctacggaa

SEQ ID NO: 122947 - DNA, 25 bp, SARS Virus
gtcaacgttgggcatgctacggaag

SEQ ID NO: 122948 - DNA, 25 bp, SARS Virus
tcaacgttgggtctgctacggaaga

SEQ ID NO: 122949 - DNA, 25 bp, SARS Virus
caacgttgggtacgctacggaagaa

SEQ ID NO: 122950 - DNA, 25 bp, SARS Virus
aacgttgggtatcctacggaagaaa

SEQ ID NO: 122951 - DNA, 25 bp, SARS Virus
acgttgggtatgctacggaagaaac

SEQ ID NO: 122952 - DNA, 25 bp, SARS Virus
cgttgggtatgccacggaagaaaca

SEQ ID NO: 122953 - DNA, 25 bp, SARS Virus
gttgggtatgctccggaagaaacaa

SEQ ID NO: 122954 - DNA, 25 bp, SARS Virus
ttgggtatgctacggaagaaacaat

SEQ ID NO: 122955 - DNA, 25 bp, SARS Virus
tgggtatgctaccgaagaaacaatc

SEQ ID NO: 122956 - DNA, 25 bp, SARS Virus
gggtatgctacgcaagaaacaatcg

SEQ ID NO: 122957 - DNA, 25 bp, SARS Virus
ggtatgctacggcagaaacaatcgc

SEQ ID NO: 122958 - DNA, 25 bp, SARS Virus
gtatgctacggacgaaacaatcgcg

SEQ ID NO: 122959 - DNA, 25 bp, SARS Virus
tatgctacggaacaaacaatcgcgg

SEQ ID NO: 122960 - DNA, 25 bp, SARS Virus
atgctacggaagcaacaatcgcggc

SEQ ID NO: 122961 - DNA, 25 bp, SARS Virus
tgctacggaagacacaatcgcggca

SEQ ID NO: 122962 - DNA, 25 bp, SARS Virus
gctacggaagaaccaatcgcggcat

SEQ ID NO: 122963 - DNA, 25 bp, SARS Virus
ctacggaagaaacaatcgcggcatc

SEQ ID NO: 122964 - DNA, 25 bp, SARS Virus
tacggaagaaaccatcgcggcatcc

SEQ ID NO: 122965 - DNA, 25 bp, SARS Virus
acggaagaaacactcgcggcatccc

SEQ ID NO: 122966 - DNA, 25 bp, SARS Virus
cggaagaaacaaccgcggcatccct

SEQ ID NO: 122967 - DNA, 25 bp, SARS Virus
ggaagaaacaatcgcggcatccctt

SEQ ID NO: 122968 - DNA, 25 bp, SARS Virus
gaagaaacaatcccggcatcccttc

SEQ ID NO: 122969 - DNA, 25 bp, SARS Virus
aagaaacaatcgcggcatcccttca

SEQ ID NO: 122970 - DNA, 25 bp, SARS Virus
agaaacaatcgccgcatcccttcac

SEQ ID NO: 122971 - DNA, 25 bp, SARS Virus
gaaacaatcgcgccatcccttcact

SEQ ID NO: 122972 - DNA, 25 bp, SARS Virus
aaacaatcgcggcatcccttcactt

SEQ ID NO: 122973 - DNA, 25 bp, SARS Virus
aacaatcgcggcctcccttcacttc

SEQ ID NO: 122974 - DNA, 25 bp, SARS Virus
acaatcgcggcaccccttcacttcg

SEQ ID NO: 122975 - DNA, 25 bp, SARS Virus
caatcgcggcatcccttcacttcga

SEQ ID NO: 122976 - DNA, 25 bp, SARS Virus
aatcgcggcatcccttcacttcgaa

SEQ ID NO: 122977 - DNA, 25 bp, SARS Virus
atcgcggcatcccttcacttcgaag

SEQ ID NO: 122978 - DNA, 25 bp, SARS Virus
tcgcggcatcccctcacttcgaaga

SEQ ID NO: 122979 - DNA, 25 bp, SARS Virus
cgcggcatccctccacttcgaagac

SEQ ID NO: 122980 - DNA, 25 bp, SARS Virus
gcggcatcccttcacttcgaagacc

SEQ ID NO: 122981 - DNA, 25 bp, SARS Virus
cggcatcccttcccttcgaagaccc

SEQ ID NO: 122982 - DNA, 25 bp, SARS Virus
ggcatcccttcacttcgaagacccg

SEQ ID NO: 122983 - DNA, 25 bp, SARS Virus
gcatcccttcacctcgaagacccgg

SEQ ID NO: 122984 - DNA, 25 bp, SARS Virus
catcccttcactccgaagacccggt

SEQ ID NO: 122985 - DNA, 25 bp, SARS Virus
atcccttcacttcgaagacccggtc

SEQ ID NO: 122986 - DNA, 25 bp, SARS Virus
tcccttcacttccaagacccggtca

SEQ ID NO: 122987 - DNA, 25 bp, SARS Virus
cccttcacttcgcagacccggtcaa

SEQ ID NO: 122988 - DNA, 25 bp, SARS Virus
ccttcacttcgacgacccggtcaag

SEQ ID NO: 122989 - DNA, 25 bp, SARS Virus
cttcacttcgaacacccggtcaagg

SEQ ID NO: 122990 - DNA, 25 bp, SARS Virus
ttcacttcgaagccccggtcaagga

SEQ ID NO: 122991 - DNA, 25 bp, SARS Virus
tcacttcgaagacccggtcaaggat

SEQ ID NO: 122992 - DNA, 25 bp, SARS Virus
cacttcgaagacccggtcaaggatc

SEQ ID NO: 122993 - DNA, 25 bp, SARS Virus
acttcgaagacccggtcaaggatcc

SEQ ID NO: 122994 - DNA, 25 bp, SARS Virus
cttcgaagaccccgtcaaggatcca

SEQ ID NO: 122995 - DNA, 25 bp, SARS Virus
ttcgaagacccgctcaaggatccat

SEQ ID NO: 122996 - DNA, 25 bp, SARS Virus
tcgaagacccggccaaggatccatt

SEQ ID NO: 122997 - DNA, 25 bp, SARS Virus
cgaagacccggtcaaggatccatta

SEQ ID NO: 122998 - DNA, 25 bp, SARS Virus
gaagacccggtccaggatccattat

SEQ ID NO: 122999 - DNA, 25 bp, SARS Virus
aagacccggtcacggatccattatc

SEQ ID NO: 123000 - DNA, 25 bp, SARS Virus
agacccggtcaacgatccattatct

SEQ ID NO: 123001 - DNA, 25 bp, SARS Virus
gacccggtcaagcatccattatctt

SEQ ID NO: 123002 - DNA, 25 bp, SARS Virus
acccggtcaaggctccattatcttc

SEQ ID NO: 123003 - DNA, 25 bp, SARS Virus
cccggtcaaggacccattatcttca

SEQ ID NO: 123004 - DNA, 25 bp, SARS Virus
ccggtcaaggatccattatcttcat

SEQ ID NO: 123005 - DNA, 25 bp, SARS Virus
cggtcaaggatccattatcttcatg

SEQ ID NO: 123006 - DNA, 25 bp, SARS Virus
ggtcaaggatcccttatcttcatgg

SEQ ID NO: 123007 - DNA, 25 bp, SARS Virus
gtcaaggatccactatcttcatggt

SEQ ID NO: 123008 - DNA, 25 bp, SARS Virus
tcaaggatccatcatcttcatggta

SEQ ID NO: 123009 - DNA, 25 bp, SARS Virus
gtgcagagggttgacgaactcactg

SEQ ID NO: 123010 - DNA, 25 bp, SARS Virus
tgcagagggtttgcgaactcactgc

SEQ ID NO: 123011 - DNA, 25 bp, SARS Virus
gcagagggtttaggaactcactgca

SEQ ID NO: 123012 - DNA, 25 bp, SARS Virus
cagagggtttacgaactcactgcaa

SEQ ID NO: 123013 - DNA, 25 bp, SARS Virus
agagggtttacggactcactgcaac

SEQ ID NO: 123014 - DNA, 25 bp, SARS Virus
gagggtttacgagctcactgcaaca

SEQ ID NO: 123015 - DNA, 25 bp, SARS Virus
agggtttacgaagtcactgcaacat

SEQ ID NO: 123016 - DNA, 25 bp, SARS Virus
gggtttacgaacgcactgcaacatg

SEQ ID NO: 123017 - DNA, 25 bp, SARS Virus
ggtttacgaactgactgcaacatga

SEQ ID NO: 123018 - DNA, 25 bp, SARS Virus
gtttacgaactcgctgcaacatgac

SEQ ID NO: 123019 - DNA, 25 bp, SARS Virus
tttacgaactcagtgcaacatgaca

SEQ ID NO: 123020 - DNA, 25 bp, SARS Virus
ttacgaactcacggcaacatgacaa

SEQ ID NO: 123021 - DNA, 25 bp, SARS Virus
tacgaactcactgcaacatgacaaa

SEQ ID NO: 123022 - DNA, 25 bp, SARS Virus
acgaactcactggaacatgacaaaa

SEQ ID NO: 123023 - DNA, 25 bp, SARS Virus
cgaactcactgcgacatgacaaaac

SEQ ID NO: 123024 - DNA, 25 bp, SARS Virus
gaactcactgcagcatgacaaaaca

SEQ ID NO: 123025 - DNA, 25 bp, SARS Virus
aactcactgcaagatgacaaaacac

SEQ ID NO: 123026 - DNA, 25 bp, SARS Virus
actcactgcaacgtgacaaaacacc

SEQ ID NO: 123027 - DNA, 25 bp, SARS Virus
ctcactgcaacaggacaaaacaccg

SEQ ID NO: 123028 - DNA, 25 bp, SARS Virus
tcactgcaacatgacaaaacaccgt

SEQ ID NO: 123029 - DNA, 25 bp, SARS Virus
cactgcaacatggcaaaacaccgtc

SEQ ID NO: 123030 - DNA, 25 bp, SARS Virus
actgcaacatgagaaaacaccgtca

SEQ ID NO: 123031 - DNA, 25 bp, SARS Virus
ctgcaacatgacgaaacaccgtcat

SEQ ID NO: 123032 - DNA, 25 bp, SARS Virus
tgcaacatgacagaacaccgtcatg

SEQ ID NO: 123033 - DNA, 25 bp, SARS Virus
gcaacatgacaagacaccgtcatgc

SEQ ID NO: 123034 - DNA, 25 bp, SARS Virus
caacatgacaaagcaccgtcatgca

SEQ ID NO: 123035 - DNA, 25 bp, SARS Virus
aacatgacaaaagaccgtcatgcaa

SEQ ID NO: 123036 - DNA, 25 bp, SARS Virus
acatgacaaaacgccgtcatgcaaa

SEQ ID NO: 123037 - DNA, 25 bp, SARS Virus
catgacaaaacagcgtcatgcaaaa

SEQ ID NO: 123038 - DNA, 25 bp, SARS Virus
atgacaaaacacggtcatgcaaaaa

SEQ ID NO: 123039 - DNA, 25 bp, SARS Virus
tgacaaaacaccgtcatgcaaaaac

SEQ ID NO: 123040 - DNA, 25 bp, SARS Virus
gacaaaacaccggcatgcaaaaacc

SEQ ID NO: 123041 - DNA, 25 bp, SARS Virus
acaaaacaccgtgatgcaaaaaccg

SEQ ID NO: 123042 - DNA, 25 bp, SARS Virus
caaaacaccgtcgtgcaaaaaccgc

SEQ ID NO: 123043 - DNA, 25 bp, SARS Virus
aaaacaccgtcaggcaaaaaccgct

SEQ ID NO: 123044 - DNA, 25 bp, SARS Virus
aaacaccgtcatgcaaaaaccgctc

SEQ ID NO: 123045 - DNA, 25 bp, SARS Virus
aacaccgtcatggaaaaaccgctcc

SEQ ID NO: 123046 - DNA, 25 bp, SARS Virus
acaccgtcatgcgaaaaccgctccg

SEQ ID NO: 123047 - DNA, 25 bp, SARS Virus
caccgtcatgcagaaaccgctccga

SEQ ID NO: 123048 - DNA, 25 bp, SARS Virus
accgtcatgcaagaaccgctccgaa

SEQ ID NO: 123049 - DNA, 25 bp, SARS Virus
ccgtcatgcaaagaccgctccgaaa

SEQ ID NO: 123050 - DNA, 25 bp, SARS Virus
cgtcatgcaaaagccgctccgaaaa

SEQ ID NO: 123051 - DNA, 25 bp, SARS Virus
gtcatgcaaaaagcgctccgaaaaa

SEQ ID NO: 123052 - DNA, 25 bp, SARS Virus
tcatgcaaaaacggctccgaaaaat

SEQ ID NO: 123053 - DNA, 25 bp, SARS Virus
catgcaaaaaccgctccgaaaaatc

SEQ ID NO: 123054 - DNA, 25 bp, SARS Virus
atgcaaaaaccggtccgaaaaatct

SEQ ID NO: 123055 - DNA, 25 bp, SARS Virus
tgcaaaaaccgcgccgaaaaatcta

SEQ ID NO: 123056 - DNA, 25 bp, SARS Virus
gcaaaaaccgctgcgaaaaatctac

SEQ ID NO: 123057 - DNA, 25 bp, SARS Virus
caaaaaccgctcggaaaaatctacg

SEQ ID NO: 123058 - DNA, 25 bp, SARS Virus
aaaaaccgctccgaaaaatctacgg

SEQ ID NO: 123059 - DNA, 25 bp, SARS Virus
aaaaccgctccggaaaatctacgga

SEQ ID NO: 123060 - DNA, 25 bp, SARS Virus
aaaccgctccgagaaatctacggag

SEQ ID NO: 123061 - DNA, 25 bp, SARS Virus
aaccgctccgaagaatctacggagt

SEQ ID NO: 123062 - DNA, 25 bp, SARS Virus
accgctccgaaagatctacggagtc

SEQ ID NO: 123063 - DNA, 25 bp, SARS Virus
ccgctccgaaaagtctacggagtcg

SEQ ID NO: 123064 - DNA, 25 bp, SARS Virus
cgctccgaaaaagctacggagtcgt

SEQ ID NO: 123065 - DNA, 25 bp, SARS Virus
gctccgaaaaatgtacggagtcgtc

SEQ ID NO: 123066 - DNA, 25 bp, SARS Virus
ctccgaaaaatcgacggagtcgtcg

SEQ ID NO: 123067 - DNA, 25 bp, SARS Virus
tccgaaaaatctgcggagtcgtcgt

SEQ ID NO: 123068 - DNA, 25 bp, SARS Virus
ccgaaaaatctagggagtcgtcgtc

SEQ ID NO: 123069 - DNA, 25 bp, SARS Virus
cgaaaaatctacggagtcgtcgtct

SEQ ID NO: 123070 - DNA, 25 bp, SARS Virus
gaaaaatctacggagtcgtcgtcta

SEQ ID NO: 123071 - DNA, 25 bp, SARS Virus
aaaaatctacggggtcgtcgtctaa

SEQ ID NO: 123072 - DNA, 25 bp, SARS Virus
aaaatctacggagtcgtcgtctaaa

SEQ ID NO: 123073 - DNA, 25 bp, SARS Virus
aaatctacggaggcgtcgtctaaag

SEQ ID NO: 123074 - DNA, 25 bp, SARS Virus
aatctacggagtggtcgtctaaaga

SEQ ID NO: 123075 - DNA, 25 bp, SARS Virus
atctacggagtcgtcgtctaaagaa

SEQ ID NO: 123076 - DNA, 25 bp, SARS Virus
tctacggagtcggcgtctaaagaat

SEQ ID NO: 123077 - DNA, 25 bp, SARS Virus
ctacggagtcgtggtctaaagaatc

SEQ ID NO: 123078 - DNA, 25 bp, SARS Virus
tacggagtcgtcgtctaaagaatca

SEQ ID NO: 123079 - DNA, 25 bp, SARS Virus
acggagtcgtcggctaaagaatcac

SEQ ID NO: 123080 - DNA, 25 bp, SARS Virus
cggagtcgtcgtgtaaagaatcact

SEQ ID NO: 123081 - DNA, 25 bp, SARS Virus
ggagtcgtcgtcgaaagaatcactg

SEQ ID NO: 123082 - DNA, 25 bp, SARS Virus
gagtcgtcgtctgaagaatcactgt

SEQ ID NO: 123083 - DNA, 25 bp, SARS Virus
agtcgtcgtctagagaatcactgtc

SEQ ID NO: 123084 - DNA, 25 bp, SARS Virus
gtcgtcgtctaaggaatcactgtca

SEQ ID NO: 123085 - DNA, 25 bp, SARS Virus
tcgtcgtctaaagaatcactgtcaa

SEQ ID NO: 123086 - DNA, 25 bp, SARS Virus
cgtcgtctaaaggatcactgtcaaa

SEQ ID NO: 123087 - DNA, 25 bp, SARS Virus
gtcgtctaaagagtcactgtcaaac

SEQ ID NO: 123088 - DNA, 25 bp, SARS Virus
tcgtctaaagaagcactgtcaaacc

SEQ ID NO: 123089 - DNA, 25 bp, SARS Virus
cgtctaaagaatgactgtcaaaccg

SEQ ID NO: 123090 - DNA, 25 bp, SARS Virus
gtctaaagaatcgctgtcaaaccgg

SEQ ID NO: 123091 - DNA, 25 bp, SARS Virus
tctaaagaatcagtgtcaaaccgga

SEQ ID NO: 123092 - DNA, 25 bp, SARS Virus
ctaaagaatcacggtcaaaccggaa

SEQ ID NO: 123093 - DNA, 25 bp, SARS Virus
taaagaatcactgtcaaaccggaac

SEQ ID NO: 123094 - DNA, 25 bp, SARS Virus
aaagaatcactggcaaaccggaaca

SEQ ID NO: 123095 - DNA, 25 bp, SARS Virus
aagaatcactgtgaaaccggaacaa

SEQ ID NO: 123096 - DNA, 25 bp, SARS Virus
agaatcactgtcgaaccggaacaac

SEQ ID NO: 123097 - DNA, 25 bp, SARS Virus
gaatcactgtcagaccggaacaaca

SEQ ID NO: 123098 - DNA, 25 bp, SARS Virus
aatcactgtcaagccggaacaacaa

SEQ ID NO: 123099 - DNA, 25 bp, SARS Virus
atcactgtcaaagcggaacaacaac

SEQ ID NO: 123100 - DNA, 25 bp, SARS Virus
tcactgtcaaacgggaacaacaaca

SEQ ID NO: 123101 - DNA, 25 bp, SARS Virus
cactgtcaaaccggaacaacaacaa

SEQ ID NO: 123102 - DNA, 25 bp, SARS Virus
actgtcaaaccggaacaacaacaac

SEQ ID NO: 123103 - DNA, 25 bp, SARS Virus
ctgtcaaaccgggacaacaacaacc

SEQ ID NO: 123104 - DNA, 25 bp, SARS Virus
tgtcaaaccggagcaacaacaaccg

SEQ ID NO: 123105 - DNA, 25 bp, SARS Virus
gtcaaaccggaagaacaacaaccgg

SEQ ID NO: 123106 - DNA, 25 bp, SARS Virus
tcaaaccggaacgacaacaaccgga

SEQ ID NO: 123107 - DNA, 25 bp, SARS Virus
caaaccggaacagcaacaaccggaa

SEQ ID NO: 123108 - DNA, 25 bp, SARS Virus
aaaccggaacaagaacaaccggaaa

SEQ ID NO: 123109 - DNA, 25 bp, SARS Virus
aaccggaacaacgacaaccggaaat

SEQ ID NO: 123110 - DNA, 25 bp, SARS Virus
accggaacaacagcaaccggaaatg

SEQ ID NO: 123111 - DNA, 25 bp, SARS Virus
ccggaacaacaagaaccggaaatgg

SEQ ID NO: 123112 - DNA, 25 bp, SARS Virus
cggaacaacaacgaccggaaatggt

SEQ ID NO: 123113 - DNA, 25 bp, SARS Virus
ggaacaacaacagccggaaatggtc

SEQ ID NO: 123114 - DNA, 25 bp, SARS Virus
gaacaacaacaagcggaaatggtct

SEQ ID NO: 123115 - DNA, 25 bp, SARS Virus
aacaacaacaacgggaaatggtctt

SEQ ID NO: 123116 - DNA, 25 bp, SARS Virus
acaacaacaaccggaaatggtcttt

SEQ ID NO: 123117 - DNA, 25 bp, SARS Virus
caacaacaaccggaaatggtctttg

SEQ ID NO: 123118 - DNA, 25 bp, SARS Virus
aacaacaaccgggaatggtctttga

SEQ ID NO: 123119 - DNA, 25 bp, SARS Virus
acaacaaccggagatggtctttgaa

SEQ ID NO: 123120 - DNA, 25 bp, SARS Virus
caacaaccggaagtggtctttgaaa

SEQ ID NO: 123121 - DNA, 25 bp, SARS Virus
aacaaccggaaagggtctttgaaac

SEQ ID NO: 123122 - DNA, 25 bp, SARS Virus
acaaccggaaatggtctttgaaacg

SEQ ID NO: 123123 - DNA, 25 bp, SARS Virus
caaccggaaatggtctttgaaacga

SEQ ID NO: 123124 - DNA, 25 bp, SARS Virus
aaccggaaatgggctttgaaacgag

SEQ ID NO: 123125 - DNA, 25 bp, SARS Virus
accggaaatggtgtttgaaacgaga

SEQ ID NO: 123126 - DNA, 25 bp, SARS Virus
ccggaaatggtcgttgaaacgagag

SEQ ID NO: 123127 - DNA, 25 bp, SARS Virus
cggaaatggtctgtgaaacgagagt

SEQ ID NO: 123128 - DNA, 25 bp, SARS Virus
ggaaatggtcttggaaacgagagtt

SEQ ID NO: 123129 - DNA, 25 bp, SARS Virus
gaaatggtctttgaaacgagagttc

SEQ ID NO: 123130 - DNA, 25 bp, SARS Virus
aaatggtctttggaacgagagttcg

SEQ ID NO: 123131 - DNA, 25 bp, SARS Virus
aatggtctttgagacgagagttcga

SEQ ID NO: 123132 - DNA, 25 bp, SARS Virus
atggtctttgaagcgagagttcgac

SEQ ID NO: 123133 - DNA, 25 bp, SARS Virus
tggtctttgaaaggagagttcgacc

SEQ ID NO: 123134 - DNA, 25 bp, SARS Virus
ggtctttgaaacgagagttcgacca

SEQ ID NO: 123135 - DNA, 25 bp, SARS Virus
gtctttgaaacgggagttcgaccaa

SEQ ID NO: 123136 - DNA, 25 bp, SARS Virus
tctttgaaacgagagttcgaccaag

SEQ ID NO: 123137 - DNA, 25 bp, SARS Virus
ctttgaaacgagggttcgaccaagt

SEQ ID NO: 123138 - DNA, 25 bp, SARS Virus
tttgaaacgagagttcgaccaagtt

SEQ ID NO: 123139 - DNA, 25 bp, SARS Virus
ttgaaacgagaggtcgaccaagtta

SEQ ID NO: 123140 - DNA, 25 bp, SARS Virus
tgaaacgagagtgcgaccaagttag

SEQ ID NO: 123141 - DNA, 25 bp, SARS Virus
gaaacgagagttggaccaagttaga

SEQ ID NO: 123142 - DNA, 25 bp, SARS Virus
aaacgagagttcgaccaagttagac

SEQ ID NO: 123143 - DNA, 25 bp, SARS Virus
aacgagagttcggccaagttagaca

SEQ ID NO: 123144 - DNA, 25 bp, SARS Virus
acgagagttcgagcaagttagacag

SEQ ID NO: 123145 - DNA, 25 bp, SARS Virus
cgagagttcgacgaagttagacaga

SEQ ID NO: 123146 - DNA, 25 bp, SARS Virus
gagagttcgaccgagttagacagat

SEQ ID NO: 123147 - DNA, 25 bp, SARS Virus
agagttcgaccaggttagacagatc

SEQ ID NO: 123148 - DNA, 25 bp, SARS Virus
gagttcgaccaagttagacagatcg

SEQ ID NO: 123149 - DNA, 25 bp, SARS Virus
agttcgaccaaggtagacagatcgt

SEQ ID NO: 123150 - DNA, 25 bp, SARS Virus
gttcgaccaagtgagacagatcgtc

SEQ ID NO: 123151 - DNA, 25 bp, SARS Virus
ttcgaccaagttggacagatcgtcg

SEQ ID NO: 123152 - DNA, 25 bp, SARS Virus
tcgaccaagttagacagatcgtcgt

SEQ ID NO: 123153 - DNA, 25 bp, SARS Virus
cgaccaagttaggcagatcgtcgtt

SEQ ID NO: 123154 - DNA, 25 bp, SARS Virus
gaccaagttagagagatcgtcgtta

SEQ ID NO: 123155 - DNA, 25 bp, SARS Virus
accaagttagacggatcgtcgttat

SEQ ID NO: 123156 - DNA, 25 bp, SARS Virus
ccaagttagacagatcgtcgttatc

SEQ ID NO: 123157 - DNA, 25 bp, SARS Virus
caagttagacaggtcgtcgttatcg

SEQ ID NO: 123158 - DNA, 25 bp, SARS Virus
aagttagacagagcgtcgttatcgc

SEQ ID NO: 123159 - DNA, 25 bp, SARS Virus
agttagacagatggtcgttatcgcg

SEQ ID NO: 123160 - DNA, 25 bp, SARS Virus
gttagacagatcgtcgttatcgcgc

SEQ ID NO: 123161 - DNA, 25 bp, SARS Virus
ttagacagatcggcgttatcgcgct

SEQ ID NO: 123162 - DNA, 25 bp, SARS Virus
tagacagatcgtggttatcgcgctc

SEQ ID NO: 123163 - DNA, 25 bp, SARS Virus
agacagatcgtcgttatcgcgctcc

SEQ ID NO: 123164 - DNA, 25 bp, SARS Virus
gacagatcgtcggtatcgcgctccc

SEQ ID NO: 123165 - DNA, 25 bp, SARS Virus
acagatcgtcgtgatcgcgctcccg

SEQ ID NO: 123166 - DNA, 25 bp, SARS Virus
cagatcgtcgttgtcgcgctcccgt

SEQ ID NO: 123167 - DNA, 25 bp, SARS Virus
agatcgtcgttagcgcgctcccgtc

SEQ ID NO: 123168 - DNA, 25 bp, SARS Virus
gatcgtcgttatggcgctcccgtca

SEQ ID NO: 123169 - DNA, 25 bp, SARS Virus
atcgtcgttatcgcgctcccgtcaa

SEQ ID NO: 123170 - DNA, 25 bp, SARS Virus
tcgtcgttatcgggctcccgtcaaa

SEQ ID NO: 123171 - DNA, 25 bp, SARS Virus
cgtcgttatcgcgctcccgtcaaag

SEQ ID NO: 123172 - DNA, 25 bp, SARS Virus
gtcgttatcgcggtcccgtcaaagt

SEQ ID NO: 123173 - DNA, 25 bp, SARS Virus
tcgttatcgcgcgcccgtcaaagtg

SEQ ID NO: 123174 - DNA, 25 bp, SARS Virus
cgttatcgcgctgccgtcaaagtgg

SEQ ID NO: 123175 - DNA, 25 bp, SARS Virus
gttatcgcgctcgcgtcaaagtggt

SEQ ID NO: 123176 - DNA, 25 bp, SARS Virus
ttatcgcgctccggtcaaagtggtg

SEQ ID NO: 123177 - DNA, 25 bp, SARS Virus
tatcgcgctcccgtcaaagtggtgg

SEQ ID NO: 123178 - DNA, 25 bp, SARS Virus
atcgcgctcccggcaaagtggtgga

SEQ ID NO: 123179 - DNA, 25 bp, SARS Virus
tcgcgctcccgtgaaagtggtggag

SEQ ID NO: 123180 - DNA, 25 bp, SARS Virus
cgcgctcccgtcgaagtggtggagg

SEQ ID NO: 123181 - DNA, 25 bp, SARS Virus
gcgctcccgtcagagtggtggaggc

SEQ ID NO: 123182 - DNA, 25 bp, SARS Virus
cgctcccgtcaaggtggtggaggcg

SEQ ID NO: 123183 - DNA, 25 bp, SARS Virus
gctcccgtcaaagtggtggaggcga

SEQ ID NO: 123184 - DNA, 25 bp, SARS Virus
ctcccgtcaaaggggtggaggcgat

SEQ ID NO: 123185 - DNA, 25 bp, SARS Virus
tcccgtcaaagtggtggaggcgatc

SEQ ID NO: 123186 - DNA, 25 bp, SARS Virus
cccgtcaaagtggtggaggcgatcg

SEQ ID NO: 123187 - DNA, 25 bp, SARS Virus
ccgtcaaagtgggggaggcgatcgg

SEQ ID NO: 123188 - DNA, 25 bp, SARS Virus
cgtcaaagtggtggaggcgatcggt

SEQ ID NO: 123189 - DNA, 25 bp, SARS Virus
gtcaaagtggtggaggcgatcggta

SEQ ID NO: 123190 - DNA, 25 bp, SARS Virus
tcaaagtggtgggggcgatcggtaa

SEQ ID NO: 123191 - DNA, 25 bp, SARS Virus
caaagtggtggaggcgatcggtaag

SEQ ID NO: 123192 - DNA, 25 bp, SARS Virus
aaagtggtggaggcgatcggtaagc

SEQ ID NO: 123193 - DNA, 25 bp, SARS Virus
aagtggtggaggggatcggtaagct

SEQ ID NO: 123194 - DNA, 25 bp, SARS Virus
agtggtggaggcgatcggtaagctc

SEQ ID NO: 123195 - DNA, 25 bp, SARS Virus
gtggtggaggcggtcggtaagctcg

SEQ ID NO: 123196 - DNA, 25 bp, SARS Virus
tggtggaggcgagcggtaagctcgt

SEQ ID NO: 123197 - DNA, 25 bp, SARS Virus
ggtggaggcgatgggtaagctcgtc

SEQ ID NO: 123198 - DNA, 25 bp, SARS Virus
gtggaggcgatcggtaagctcgtcc

SEQ ID NO: 123199 - DNA, 25 bp, SARS Virus
tggaggcgatcggtaagctcgtcct

SEQ ID NO: 123200 - DNA, 25 bp, SARS Virus
ggaggcgatcgggaagctcgtcctc

SEQ ID NO: 123201 - DNA, 25 bp, SARS Virus
gaggcgatcggtgagctcgtcctct

SEQ ID NO: 123202 - DNA, 25 bp, SARS Virus
aggcgatcggtaggctcgtcctctt

SEQ ID NO: 123203 - DNA, 25 bp, SARS Virus
ggcgatcggtaagctcgtcctctta

SEQ ID NO: 123204 - DNA, 25 bp, SARS Virus
gcgatcggtaaggtcgtcctcttaa

SEQ ID NO: 123205 - DNA, 25 bp, SARS Virus
cgatcggtaagcgcgtcctcttaaa

SEQ ID NO: 123206 - DNA, 25 bp, SARS Virus
gatcggtaagctggtcctcttaaag

SEQ ID NO: 123207 - DNA, 25 bp, SARS Virus
atcggtaagctcgtcctcttaaagg

SEQ ID NO: 123208 - DNA, 25 bp, SARS Virus
tcggtaagctcggcctcttaaaggg

SEQ ID NO: 123209 - DNA, 25 bp, SARS Virus
cggtaagctcgtgctcttaaagggg

SEQ ID NO: 123210 - DNA, 25 bp, SARS Virus
ggtaagctcgtcgtcttaaagggga

SEQ ID NO: 123211 - DNA, 25 bp, SARS Virus
gtaagctcgtccgcttaaaggggat

SEQ ID NO: 123212 - DNA, 25 bp, SARS Virus
taagctcgtcctgttaaaggggatg

SEQ ID NO: 123213 - DNA, 25 bp, SARS Virus
aagctcgtcctcgtaaaggggatga

SEQ ID NO: 123214 - DNA, 25 bp, SARS Virus
agctcgtcctctgaaaggggatgac

SEQ ID NO: 123215 - DNA, 25 bp, SARS Virus
gctcgtcctcttgaaggggatgacg

SEQ ID NO: 123216 - DNA, 25 bp, SARS Virus
ctcgtcctcttagaggggatgacga

SEQ ID NO: 123217 - DNA, 25 bp, SARS Virus
tcgtcctcttaagggggatgacgac

SEQ ID NO: 123218 - DNA, 25 bp, SARS Virus
cgtcctcttaaaggggatgacgacg

SEQ ID NO: 123219 - DNA, 25 bp, SARS Virus
gtcctcttaaaggggatgacgacgg

SEQ ID NO: 123220 - DNA, 25 bp, SARS Virus
tcctcttaaaggggatgacgacggt

SEQ ID NO: 123221 - DNA, 25 bp, SARS Virus
cctcttaaaggggatgacgacggtc

SEQ ID NO: 123222 - DNA, 25 bp, SARS Virus
ctcttaaagggggtgacgacggtcc

SEQ ID NO: 123223 - DNA, 25 bp, SARS Virus
tcttaaaggggaggacgacggtcct

SEQ ID NO: 123224 - DNA, 25 bp, SARS Virus
cttaaaggggatgacgacggtcctc

SEQ ID NO: 123225 - DNA, 25 bp, SARS Virus
ttaaaggggatggcgacggtcctca

SEQ ID NO: 123226 - DNA, 25 bp, SARS Virus
taaaggggatgaggacggtcctcaa

SEQ ID NO: 123227 - DNA, 25 bp, SARS Virus
aaaggggatgacgacggtcctcaac

SEQ ID NO: 123228 - DNA, 25 bp, SARS Virus
aaggggatgacggcggtcctcaact

SEQ ID NO: 123229 - DNA, 25 bp, SARS Virus
aggggatgacgagggtcctcaactt

SEQ ID NO: 123230 - DNA, 25 bp, SARS Virus
ggggatgacgacggtcctcaactta

SEQ ID NO: 123231 - DNA, 25 bp, SARS Virus
gggatgacgacggtcctcaacttaa

SEQ ID NO: 123232 - DNA, 25 bp, SARS Virus
ggatgacgacgggcctcaacttaaa

SEQ ID NO: 123233 - DNA, 25 bp, SARS Virus
gatgacgacggtgctcaacttaaag

SEQ ID NO: 123234 - DNA, 25 bp, SARS Virus
atgacgacggtcgtcaacttaaaga

SEQ ID NO: 123235 - DNA, 25 bp, SARS Virus
tgacgacggtccgcaacttaaagaa

SEQ ID NO: 123236 - DNA, 25 bp, SARS Virus
gacgacggtcctgaacttaaagaac

SEQ ID NO: 123237 - DNA, 25 bp, SARS Virus
acgacggtcctcgacttaaagaact

SEQ ID NO: 123238 - DNA, 25 bp, SARS Virus
cgacggtcctcagcttaaagaactt

SEQ ID NO: 123239 - DNA, 25 bp, SARS Virus
gacggtcctcaagttaaagaactta

SEQ ID NO: 123240 - DNA, 25 bp, SARS Virus
acggtcctcaacgtaaagaacttaa

SEQ ID NO: 123241 - DNA, 25 bp, SARS Virus
cggtcctcaactgaaagaacttaat

SEQ ID NO: 123242 - DNA, 25 bp, SARS Virus
ggtcctcaacttgaagaacttaatg

SEQ ID NO: 123243 - DNA, 25 bp, SARS Virus
gtcctcaacttagagaacttaatgg

SEQ ID NO: 123244 - DNA, 25 bp, SARS Virus
tcctcaacttaaggaacttaatggc

SEQ ID NO: 123245 - DNA, 25 bp, SARS Virus
cctcaacttaaagaacttaatggcg

SEQ ID NO: 123246 - DNA, 25 bp, SARS Virus
ctcaacttaaaggacttaatggcgc

SEQ ID NO: 123247 - DNA, 25 bp, SARS Virus
tcaacttaaagagcttaatggcgct

SEQ ID NO: 123248 - DNA, 25 bp, SARS Virus
caacttaaagaagttaatggcgctg

SEQ ID NO: 123249 - DNA, 25 bp, SARS Virus
aacttaaagaacgtaatggcgctga

SEQ ID NO: 123250 - DNA, 25 bp, SARS Virus
acttaaagaactgaatggcgctgat

SEQ ID NO: 123251 - DNA, 25 bp, SARS Virus
cttaaagaacttgatggcgctgatg

SEQ ID NO: 123252 - DNA, 25 bp, SARS Virus
ttaaagaacttagtggcgctgatgc

SEQ ID NO: 123253 - DNA, 25 bp, SARS Virus
taaagaacttaagggcgctgatgca

SEQ ID NO: 123254 - DNA, 25 bp, SARS Virus
aaagaacttaatggcgctgatgcac

SEQ ID NO: 123255 - DNA, 25 bp, SARS Virus
aagaacttaatggcgctgatgcact

SEQ ID NO: 123256 - DNA, 25 bp, SARS Virus
agaacttaatggggctgatgcacta

SEQ ID NO: 123257 - DNA, 25 bp, SARS Virus
gaacttaatggcgctgatgcactac

SEQ ID NO: 123258 - DNA, 25 bp, SARS Virus
aacttaatggcggtgatgcactact

SEQ ID NO: 123259 - DNA, 25 bp, SARS Virus
acttaatggcgcggatgcactactc

SEQ ID NO: 123260 - DNA, 25 bp, SARS Virus
cttaatggcgctgatgcactactcc

SEQ ID NO: 123261 - DNA, 25 bp, SARS Virus
ttaatggcgctggtgcactactcct

SEQ ID NO: 123262 - DNA, 25 bp, SARS Virus
taatggcgctgaggcactactcctc

SEQ ID NO: 123263 - DNA, 25 bp, SARS Virus
aatggcgctgatgcactactcctcg

SEQ ID NO: 123264 - DNA, 25 bp, SARS Virus
atggcgctgatggactactcctcgc

SEQ ID NO: 123265 - DNA, 25 bp, SARS Virus
tggcgctgatgcgctactcctcgct

SEQ ID NO: 123266 - DNA, 25 bp, SARS Virus
ggcgctgatgcagtactcctcgctc

SEQ ID NO: 123267 - DNA, 25 bp, SARS Virus
gcgctgatgcacgactcctcgctct

SEQ ID NO: 123268 - DNA, 25 bp, SARS Virus
cgctgatgcactgctcctcgctctt

SEQ ID NO: 123269 - DNA, 25 bp, SARS Virus
gctgatgcactagtcctcgctcttc

SEQ ID NO: 123270 - DNA, 25 bp, SARS Virus
ctgatgcactacgcctcgctcttct

SEQ ID NO: 123271 - DNA, 25 bp, SARS Virus
tgatgcactactgctcgctcttctc

SEQ ID NO: 123272 - DNA, 25 bp, SARS Virus
gatgcactactcgtcgctcttctcc

SEQ ID NO: 123273 - DNA, 25 bp, SARS Virus
atgcactactccgcgctcttctccg

SEQ ID NO: 123274 - DNA, 25 bp, SARS Virus
tgcactactcctggctcttctccga

SEQ ID NO: 123275 - DNA, 25 bp, SARS Virus
gcactactcctcgctcttctccgaa

SEQ ID NO: 123276 - DNA, 25 bp, SARS Virus
cactactcctcggtcttctccgaac

SEQ ID NO: 123277 - DNA, 25 bp, SARS Virus
actactcctcgcgcttctccgaact

SEQ ID NO: 123278 - DNA, 25 bp, SARS Virus
ctactcctcgctgttctccgaactg

SEQ ID NO: 123279 - DNA, 25 bp, SARS Virus
tactcctcgctcgtctccgaactga

SEQ ID NO: 123280 - DNA, 25 bp, SARS Virus
actcctcgctctgctccgaactgac

SEQ ID NO: 123281 - DNA, 25 bp, SARS Virus
ctcctcgctcttgtccgaactgacg

SEQ ID NO: 123282 - DNA, 25 bp, SARS Virus
tcctcgctcttcgccgaactgacgg

SEQ ID NO: 123283 - DNA, 25 bp, SARS Virus
cctcgctcttctgcgaactgacggc

SEQ ID NO: 123284 - DNA, 25 bp, SARS Virus
ctcgctcttctcggaactgacggcg

SEQ ID NO: 123285 - DNA, 25 bp, SARS Virus
tcgctcttctccgaactgacggcgg

SEQ ID NO: 123286 - DNA, 25 bp, SARS Virus
cgctcttctccggactgacggcgga

SEQ ID NO: 123287 - DNA, 25 bp, SARS Virus
gctcttctccgagctgacggcggag

SEQ ID NO: 123288 - DNA, 25 bp, SARS Virus
ctcttctccgaagtgacggcggaga

SEQ ID NO: 123289 - DNA, 25 bp, SARS Virus
tcttctccgaacggacggcggagac

SEQ ID NO: 123290 - DNA, 25 bp, SARS Virus
cttctccgaactgacggcggagacg

SEQ ID NO: 123291 - DNA, 25 bp, SARS Virus
ttctccgaactggcggcggagacga

SEQ ID NO: 123292 - DNA, 25 bp, SARS Virus
tctccgaactgagggcggagacgaa

SEQ ID NO: 123293 - DNA, 25 bp, SARS Virus
ctccgaactgacggcggagacgaag

SEQ ID NO: 123294 - DNA, 25 bp, SARS Virus
tccgaactgacggcggagacgaagg

SEQ ID NO: 123295 - DNA, 25 bp, SARS Virus
ccgaactgacgggggagacgaaggg

SEQ ID NO: 123296 - DNA, 25 bp, SARS Virus
cgaactgacggcggagacgaaggga

SEQ ID NO: 123297 - DNA, 25 bp, SARS Virus
gaactgacggcggagacgaagggag

SEQ ID NO: 123298 - DNA, 25 bp, SARS Virus
aactgacggcggggacgaagggaga

SEQ ID NO: 123299 - DNA, 25 bp, SARS Virus
actgacggcggagacgaagggagac

SEQ ID NO: 123300 - DNA, 25 bp, SARS Virus
ctgacggcggaggcgaagggagacg

SEQ ID NO: 123301 - DNA, 25 bp, SARS Virus
tgacggcggagaggaagggagacgc

SEQ ID NO: 123302 - DNA, 25 bp, SARS Virus
gacggcggagacgaagggagacgca

SEQ ID NO: 123303 - DNA, 25 bp, SARS Virus
acggcggagacggagggagacgcat

SEQ ID NO: 123304 - DNA, 25 bp, SARS Virus
cggcggagacgaggggagacgcatc

SEQ ID NO: 123305 - DNA, 25 bp, SARS Virus
ggcggagacgaagggagacgcatct

SEQ ID NO: 123306 - DNA, 25 bp, SARS Virus
gcggagacgaagggagacgcatctt

SEQ ID NO: 123307 - DNA, 25 bp, SARS Virus
cggagacgaagggagacgcatcttc

SEQ ID NO: 123308 - DNA, 25 bp, SARS Virus
ggagacgaagggggacgcatcttcg

SEQ ID NO: 123309 - DNA, 25 bp, SARS Virus
gagacgaagggagacgcatcttcgg

SEQ ID NO: 123310 - DNA, 25 bp, SARS Virus
agacgaagggaggcgcatcttcgga

SEQ ID NO: 123311 - DNA, 25 bp, SARS Virus
gacgaagggagaggcatcttcggaa

SEQ ID NO: 123312 - DNA, 25 bp, SARS Virus
acgaagggagacgcatcttcggaaa

SEQ ID NO: 123313 - DNA, 25 bp, SARS Virus
cgaagggagacggatcttcggaaaa

SEQ ID NO: 123314 - DNA, 25 bp, SARS Virus
gaagggagacgcgtcttcggaaaac

SEQ ID NO: 123315 - DNA, 25 bp, SARS Virus
aagggagacgcagcttcggaaaacc

SEQ ID NO: 123316 - DNA, 25 bp, SARS Virus
agggagacgcatgttcggaaaaccg

SEQ ID NO: 123317 - DNA, 25 bp, SARS Virus
gggagacgcatcgtcggaaaaccgt

SEQ ID NO: 123318 - DNA, 25 bp, SARS Virus
ggagacgcatctgcggaaaaccgtt

SEQ ID NO: 123319 - DNA, 25 bp, SARS Virus
gagacgcatcttgggaaaaccgtta

SEQ ID NO: 123320 - DNA, 25 bp, SARS Virus
agacgcatcttcggaaaaccgttac

SEQ ID NO: 123321 - DNA, 25 bp, SARS Virus
gacgcatcttcggaaaaccgttaca

SEQ ID NO: 123322 - DNA, 25 bp, SARS Virus
acgcatcttcgggaaaccgttacaa

SEQ ID NO: 123323 - DNA, 25 bp, SARS Virus
cgcatcttcggagaaccgttacaac

SEQ ID NO: 123324 - DNA, 25 bp, SARS Virus
gcatcttcggaagaccgttacaaca

SEQ ID NO: 123325 - DNA, 25 bp, SARS Virus
catcttcggaaagccgttacaacaa

SEQ ID NO: 123326 - DNA, 25 bp, SARS Virus
atcttcggaaaagcgttacaacaag

SEQ ID NO: 123327 - DNA, 25 bp, SARS Virus
tcttcggaaaacggttacaacaagg

SEQ ID NO: 123328 - DNA, 25 bp, SARS Virus
cttcggaaaaccgttacaacaagga

SEQ ID NO: 123329 - DNA, 25 bp, SARS Virus
ttcggaaaaccggtacaacaaggaa

SEQ ID NO: 123330 - DNA, 25 bp, SARS Virus
tcggaaaaccgtgacaacaaggaac

SEQ ID NO: 123331 - DNA, 25 bp, SARS Virus
cggaaaaccgttgcaacaaggaact

SEQ ID NO: 123332 - DNA, 25 bp, SARS Virus
ggaaaaccgttagaacaaggaactc

SEQ ID NO: 123333 - DNA, 25 bp, SARS Virus
gaaaaccgttacgacaaggaactcc

SEQ ID NO: 123334 - DNA, 25 bp, SARS Virus
aaaaccgttacagcaaggaactcct

SEQ ID NO: 123335 - DNA, 25 bp, SARS Virus
aaaccgttacaagaaggaactcctt

SEQ ID NO: 123336 - DNA, 25 bp, SARS Virus
aaccgttacaacgaggaactccttc

SEQ ID NO: 123337 - DNA, 25 bp, SARS Virus
accgttacaacagggaactccttca

SEQ ID NO: 123338 - DNA, 25 bp, SARS Virus
ccgttacaacaaggaactccttcaa

SEQ ID NO: 123339 - DNA, 25 bp, SARS Virus
cgttacaacaaggaactccttcaac

SEQ ID NO: 123340 - DNA, 25 bp, SARS Virus
gttacaacaagggactccttcaaca

SEQ ID NO: 123341 - DNA, 25 bp, SARS Virus
ttacaacaaggagctccttcaacat

SEQ ID NO: 123342 - DNA, 25 bp, SARS Virus
tacaacaaggaagtccttcaacatc

SEQ ID NO: 123343 - DNA, 25 bp, SARS Virus
acaacaaggaacgccttcaacatcg

SEQ ID NO: 123344 - DNA, 25 bp, SARS Virus
caacaaggaactgcttcaacatcgt

SEQ ID NO: 123345 - DNA, 25 bp, SARS Virus
aacaaggaactcgttcaacatcgtg

SEQ ID NO: 123346 - DNA, 25 bp, SARS Virus
acaaggaactccgtcaacatcgtgc

SEQ ID NO: 123347 - DNA, 25 bp, SARS Virus
caaggaactcctgcaacatcgtgcc

SEQ ID NO: 123348 - DNA, 25 bp, SARS Virus
aaggaactccttgaacatcgtgcca

SEQ ID NO: 123349 - DNA, 25 bp, SARS Virus
aggaactccttcgacatcgtgccac

SEQ ID NO: 123350 - DNA, 25 bp, SARS Virus
ggaactccttcagcatcgtgccacc

SEQ ID NO: 123351 - DNA, 25 bp, SARS Virus
gaactccttcaagatcgtgccaccg

SEQ ID NO: 123352 - DNA, 25 bp, SARS Virus
aactccttcaacgtcgtgccaccgt

SEQ ID NO: 123353 - DNA, 25 bp, SARS Virus
actccttcaacagcgtgccaccgtc

SEQ ID NO: 123354 - DNA, 25 bp, SARS Virus
ctccttcaacatggtgccaccgtcg

SEQ ID NO: 123355 - DNA, 25 bp, SARS Virus
tccttcaacatcgtgccaccgtcgt

SEQ ID NO: 123356 - DNA, 25 bp, SARS Virus
ccttcaacatcgggccaccgtcgta

SEQ ID NO: 123357 - DNA, 25 bp, SARS Virus
cttcaacatcgtgccaccgtcgtaa

SEQ ID NO: 123358 - DNA, 25 bp, SARS Virus
ttcaacatcgtggcaccgtcgtaac

SEQ ID NO: 123359 - DNA, 25 bp, SARS Virus
tcaacatcgtgcgaccgtcgtaaca

SEQ ID NO: 123360 - DNA, 25 bp, SARS Virus
caacatcgtgccgccgtcgtaacaa

SEQ ID NO: 123361 - DNA, 25 bp, SARS Virus
aacatcgtgccagcgtcgtaacaat

SEQ ID NO: 123362 - DNA, 25 bp, SARS Virus
acatcgtgccacggtcgtaacaata

SEQ ID NO: 123363 - DNA, 25 bp, SARS Virus
catcgtgccaccgtcgtaacaataa

SEQ ID NO: 123364 - DNA, 25 bp, SARS Virus
atcgtgccaccggcgtaacaataat

SEQ ID NO: 123365 - DNA, 25 bp, SARS Virus
tcgtgccaccgtggtaacaataatc

SEQ ID NO: 123366 - DNA, 25 bp, SARS Virus
cgtgccaccgtcgtaacaataatcc

SEQ ID NO: 123367 - DNA, 25 bp, SARS Virus
gtgccaccgtcggaacaataatcct

SEQ ID NO: 123368 - DNA, 25 bp, SARS Virus
tgccaccgtcgtgacaataatccta

SEQ ID NO: 123369 - DNA, 25 bp, SARS Virus
gccaccgtcgtagcaataatcctaa

SEQ ID NO: 123370 - DNA, 25 bp, SARS Virus
ccaccgtcgtaagaataatcctaac

SEQ ID NO: 123371 - DNA, 25 bp, SARS Virus
caccgtcgtaacgataatcctaacg

SEQ ID NO: 123372 - DNA, 25 bp, SARS Virus
accgtcgtaacagtaatcctaacgc

SEQ ID NO: 123373 - DNA, 25 bp, SARS Virus
ccgtcgtaacaagaatcctaacgcc

SEQ ID NO: 123374 - DNA, 25 bp, SARS Virus
cgtcgtaacaatgatcctaacgccc

SEQ ID NO: 123375 - DNA, 25 bp, SARS Virus
gtcgtaacaatagtcctaacgccca

SEQ ID NO: 123376 - DNA, 25 bp, SARS Virus
tcgtaacaataagcctaacgcccac

SEQ ID NO: 123377 - DNA, 25 bp, SARS Virus
cgtaacaataatgctaacgcccacg

SEQ ID NO: 123378 - DNA, 25 bp, SARS Virus
gtaacaataatcgtaacgcccacgg

SEQ ID NO: 123379 - DNA, 25 bp, SARS Virus
taacaataatccgaacgcccacggt

SEQ ID NO: 123380 - DNA, 25 bp, SARS Virus
aacaataatcctgacgcccacggtt

SEQ ID NO: 123381 - DNA, 25 bp, SARS Virus
acaataatcctagcgcccacggtta

SEQ ID NO: 123382 - DNA, 25 bp, SARS Virus
caataatcctaaggcccacggttac

SEQ ID NO: 123383 - DNA, 25 bp, SARS Virus
aataatcctaacgcccacggttaca

SEQ ID NO: 123384 - DNA, 25 bp, SARS Virus
ataatcctaacggccacggttacac

SEQ ID NO: 123385 - DNA, 25 bp, SARS Virus
taatcctaacgcgcacggttacacc

SEQ ID NO: 123386 - DNA, 25 bp, SARS Virus
aatcctaacgccgacggttacacca

SEQ ID NO: 123387 - DNA, 25 bp, SARS Virus
atcctaacgcccgcggttacaccag

SEQ ID NO: 123388 - DNA, 25 bp, SARS Virus
tcctaacgcccagggttacaccaga

SEQ ID NO: 123389 - DNA, 25 bp, SARS Virus
cctaacgcccacggttacaccagaa

SEQ ID NO: 123390 - DNA, 25 bp, SARS Virus
ctaacgcccacggttacaccagaaa

SEQ ID NO: 123391 - DNA, 25 bp, SARS Virus
taacgcccacgggtacaccagaaac

SEQ ID NO: 123392 - DNA, 25 bp, SARS Virus
aacgcccacggtgacaccagaaacc

SEQ ID NO: 123393 - DNA, 25 bp, SARS Virus
acgcccacggttgcaccagaaaccc

SEQ ID NO: 123394 - DNA, 25 bp, SARS Virus
cgcccacggttagaccagaaaccca

SEQ ID NO: 123395 - DNA, 25 bp, SARS Virus
gcccacggttacgccagaaacccac

SEQ ID NO: 123396 - DNA, 25 bp, SARS Virus
cccacggttacagcagaaacccaca

SEQ ID NO: 123397 - DNA, 25 bp, SARS Virus
ccacggttacacgagaaacccacat

SEQ ID NO: 123398 - DNA, 25 bp, SARS Virus
cacggttacaccggaaacccacata

SEQ ID NO: 123399 - DNA, 25 bp, SARS Virus
acggttacaccagaaacccacataa

SEQ ID NO: 123400 - DNA, 25 bp, SARS Virus
cggttacaccaggaacccacataag

SEQ ID NO: 123401 - DNA, 25 bp, SARS Virus
ggttacaccagagacccacataagt

SEQ ID NO: 123402 - DNA, 25 bp, SARS Virus
gttacaccagaagcccacataagtt

SEQ ID NO: 123403 - DNA, 25 bp, SARS Virus
ttacaccagaaagccacataagttc

SEQ ID NO: 123404 - DNA, 25 bp, SARS Virus
tacaccagaaacgcacataagttcc

SEQ ID NO: 123405 - DNA, 25 bp, SARS Virus
acaccagaaaccgacataagttccg

SEQ ID NO: 123406 - DNA, 25 bp, SARS Virus
caccagaaacccgcataagttccga

SEQ ID NO: 123407 - DNA, 25 bp, SARS Virus
accagaaacccagataagttccgag

SEQ ID NO: 123408 - DNA, 25 bp, SARS Virus
ccagaaacccacgtaagttccgagg

SEQ ID NO: 123409 - DNA, 25 bp, SARS Virus
cagaaacccacagaagttccgaggg

SEQ ID NO: 123410 - DNA, 25 bp, SARS Virus
agaaacccacatgagttccgaggga

SEQ ID NO: 123411 - DNA, 25 bp, SARS Virus
gaaacccacataggttccgagggag

SEQ ID NO: 123412 - DNA, 25 bp, SARS Virus
aaacccacataagttccgagggagt

SEQ ID NO: 123413 - DNA, 25 bp, SARS Virus
aacccacataaggtccgagggagtc

SEQ ID NO: 123414 - DNA, 25 bp, SARS Virus
acccacataagtgccgagggagtca

SEQ ID NO: 123415 - DNA, 25 bp, SARS Virus
cccacataagttgcgagggagtcaa

SEQ ID NO: 123416 - DNA, 25 bp, SARS Virus
ccacataagttcggagggagtcaac

SEQ ID NO: 123417 - DNA, 25 bp, SARS Virus
cacataagttccgagggagtcaacg

SEQ ID NO: 123418 - DNA, 25 bp, SARS Virus
acataagttccgggggagtcaacgt

SEQ ID NO: 123419 - DNA, 25 bp, SARS Virus
cataagttccgagggagtcaacgtt

SEQ ID NO: 123420 - DNA, 25 bp, SARS Virus
ataagttccgagggagtcaacgttg

SEQ ID NO: 123421 - DNA, 25 bp, SARS Virus
taagttccgagggagtcaacgttgg

SEQ ID NO: 123422 - DNA, 25 bp, SARS Virus
aagttccgagggggtcaacgttggg

SEQ ID NO: 123423 - DNA, 25 bp, SARS Virus
agttccgagggagtcaacgttgggt

SEQ ID NO: 123424 - DNA, 25 bp, SARS Virus
gttccgagggaggcaacgttgggta

SEQ ID NO: 123425 - DNA, 25 bp, SARS Virus
ttccgagggagtgaacgttgggtat

SEQ ID NO: 123426 - DNA, 25 bp, SARS Virus
tccgagggagtcgacgttgggtatg

SEQ ID NO: 123427 - DNA, 25 bp, SARS Virus
ccgagggagtcagcgttgggtatgc

SEQ ID NO: 123428 - DNA, 25 bp, SARS Virus
cgagggagtcaaggttgggtatgct

SEQ ID NO: 123429 - DNA, 25 bp, SARS Virus
gagggagtcaacgttgggtatgcta

SEQ ID NO: 123430 - DNA, 25 bp, SARS Virus
agggagtcaacggtgggtatgctac

SEQ ID NO: 123431 - DNA, 25 bp, SARS Virus
gggagtcaacgtggggtatgctacg

SEQ ID NO: 123432 - DNA, 25 bp, SARS Virus
ggagtcaacgttgggtatgctacgg

SEQ ID NO: 123433 - DNA, 25 bp, SARS Virus
gagtcaacgttgggtatgctacgga

SEQ ID NO: 123434 - DNA, 25 bp, SARS Virus
agtcaacgttgggtatgctacggaa

SEQ ID NO: 123435 - DNA, 25 bp, SARS Virus
gtcaacgttggggatgctacggaag

SEQ ID NO: 123436 - DNA, 25 bp, SARS Virus
tcaacgttgggtgtgctacggaaga

SEQ ID NO: 123437 - DNA, 25 bp, SARS Virus
caacgttgggtaggctacggaagaa

SEQ ID NO: 123438 - DNA, 25 bp, SARS Virus
aacgttgggtatgctacggaagaaa

SEQ ID NO: 123439 - DNA, 25 bp, SARS Virus
acgttgggtatggtacggaagaaac

SEQ ID NO: 123440 - DNA, 25 bp, SARS Virus
cgttgggtatgcgacggaagaaaca

SEQ ID NO: 123441 - DNA, 25 bp, SARS Virus
gttgggtatgctgcggaagaaacaa

SEQ ID NO: 123442 - DNA, 25 bp, SARS Virus
ttgggtatgctagggaagaaacaat

SEQ ID NO: 123443 - DNA, 25 bp, SARS Virus
tgggtatgctacggaagaaacaatc

SEQ ID NO: 123444 - DNA, 25 bp, SARS Virus
gggtatgctacggaagaaacaatcg

SEQ ID NO: 123445 - DNA, 25 bp, SARS Virus
ggtatgctacgggagaaacaatcgc

SEQ ID NO: 123446 - DNA, 25 bp, SARS Virus
gtatgctacggaggaaacaatcgcg

SEQ ID NO: 123447 - DNA, 25 bp, SARS Virus
tatgctacggaagaaacaatcgcgg

SEQ ID NO: 123448 - DNA, 25 bp, SARS Virus
atgctacggaaggaacaatcgcggc

SEQ ID NO: 123449 - DNA, 25 bp, SARS Virus
tgctacggaagagacaatcgcggca

SEQ ID NO: 123450 - DNA, 25 bp, SARS Virus
gctacggaagaagcaatcgcggcat

SEQ ID NO: 123451 - DNA, 25 bp, SARS Virus
ctacggaagaaagaatcgcggcatc

SEQ ID NO: 123452 - DNA, 25 bp, SARS Virus
tacggaagaaacgatcgcggcatcc

SEQ ID NO: 123453 - DNA, 25 bp, SARS Virus
acggaagaaacagtcgcggcatccc

SEQ ID NO: 123454 - DNA, 25 bp, SARS Virus
cggaagaaacaagcgcggcatccct

SEQ ID NO: 123455 - DNA, 25 bp, SARS Virus
ggaagaaacaatggcggcatccctt

SEQ ID NO: 123456 - DNA, 25 bp, SARS Virus
gaagaaacaatcgcggcatcccttc

SEQ ID NO: 123457 - DNA, 25 bp, SARS Virus
aagaaacaatcggggcatcccttca

SEQ ID NO: 123458 - DNA, 25 bp, SARS Virus
agaaacaatcgcggcatcccttcac

SEQ ID NO: 123459 - DNA, 25 bp, SARS Virus
gaaacaatcgcggcatcccttcact

SEQ ID NO: 123460 - DNA, 25 bp, SARS Virus
aaacaatcgcgggatcccttcactt

SEQ ID NO: 123461 - DNA, 25 bp, SARS Virus
aacaatcgcggcgtcccttcacttc

SEQ ID NO: 123462 - DNA, 25 bp, SARS Virus
acaatcgcggcagcccttcacttcg

SEQ ID NO: 123463 - DNA, 25 bp, SARS Virus
caatcgcggcatgccttcacttcga

SEQ ID NO: 123464 - DNA, 25 bp, SARS Virus
aatcgcggcatcgcttcacttcgaa

SEQ ID NO: 123465 - DNA, 25 bp, SARS Virus
atcgcggcatccgttcacttcgaag

SEQ ID NO: 123466 - DNA, 25 bp, SARS Virus
tcgcggcatcccgtcacttcgaaga

SEQ ID NO: 123467 - DNA, 25 bp, SARS Virus
cgcggcatccctgcacttcgaagac

SEQ ID NO: 123468 - DNA, 25 bp, SARS Virus
gcggcatcccttgacttcgaagacc

SEQ ID NO: 123469 - DNA, 25 bp, SARS Virus
cggcatcccttcgcttcgaagaccc

SEQ ID NO: 123470 - DNA, 25 bp, SARS Virus
ggcatcccttcagttcgaagacccg

SEQ ID NO: 123471 - DNA, 25 bp, SARS Virus
gcatcccttcacgtcgaagacccgg

SEQ ID NO: 123472 - DNA, 25 bp, SARS Virus
catcccttcactgcgaagacccggt

SEQ ID NO: 123473 - DNA, 25 bp, SARS Virus
atcccttcacttggaagacccggtc

SEQ ID NO: 123474 - DNA, 25 bp, SARS Virus
tcccttcacttcgaagacccggtca

SEQ ID NO: 123475 - DNA, 25 bp, SARS Virus
cccttcacttcggagacccggtcaa

SEQ ID NO: 123476 - DNA, 25 bp, SARS Virus
ccttcacttcgaggacccggtcaag

SEQ ID NO: 123477 - DNA, 25 bp, SARS Virus
cttcacttcgaagacccggtcaagg

SEQ ID NO: 123478 - DNA, 25 bp, SARS Virus
ttcacttcgaaggcccggtcaagga

SEQ ID NO: 123479 - DNA, 25 bp, SARS Virus
tcacttcgaagagccggtcaaggat

SEQ ID NO: 123480 - DNA, 25 bp, SARS Virus
cacttcgaagacgcggtcaaggatc

SEQ ID NO: 123481 - DNA, 25 bp, SARS Virus
acttcgaagaccgggtcaaggatcc

SEQ ID NO: 123482 - DNA, 25 bp, SARS Virus
cttcgaagacccggtcaaggatcca

SEQ ID NO: 123483 - DNA, 25 bp, SARS Virus
ttcgaagacccggtcaaggatccat

SEQ ID NO: 123484 - DNA, 25 bp, SARS Virus
tcgaagacccgggcaaggatccatt

SEQ ID NO: 123485 - DNA, 25 bp, SARS Virus
cgaagacccggtgaaggatccatta

SEQ ID NO: 123486 - DNA, 25 bp, SARS Virus
gaagacccggtcgaggatccattat

SEQ ID NO: 123487 - DNA, 25 bp, SARS Virus
aagacccggtcagggatccattatc

SEQ ID NO: 123488 - DNA, 25 bp, SARS Virus
agacccggtcaaggatccattatct

SEQ ID NO: 123489 - DNA, 25 bp, SARS Virus
gacccggtcaaggatccattatctt

SEQ ID NO: 123490 - DNA, 25 bp, SARS Virus
acccggtcaagggtccattatcttc

SEQ ID NO: 123491 - DNA, 25 bp, SARS Virus
cccggtcaaggagccattatcttca

SEQ ID NO: 123492 - DNA, 25 bp, SARS Virus
ccggtcaaggatgcattatcttcat

SEQ ID NO: 123493 - DNA, 25 bp, SARS Virus
cggtcaaggatcgattatcttcatg

SEQ ID NO: 123494 - DNA, 25 bp, SARS Virus
ggtcaaggatccgttatcttcatgg

SEQ ID NO: 123495 - DNA, 25 bp, SARS Virus
gtcaaggatccagtatcttcatggt

SEQ ID NO: 123496 - DNA, 25 bp, SARS Virus
tcaaggatccatgatcttcatggta

SEQ ID NO: 123497 - DNA, 25 bp, SARS Virus
gtgcagagggtttacgaactcactg

SEQ ID NO: 123498 - DNA, 25 bp, SARS Virus
tgcagagggttttcgaactcactgc

SEQ ID NO: 123499 - DNA, 25 bp, SARS Virus
gcagagggtttatgaactcactgca

SEQ ID NO: 123500 - DNA, 25 bp, SARS Virus
cagagggtttactaactcactgcaa

SEQ ID NO: 123501 - DNA, 25 bp, SARS Virus
agagggtttacgtactcactgcaac

SEQ ID NO: 123502 - DNA, 25 bp, SARS Virus
gagggtttacgatctcactgcaaca

SEQ ID NO: 123503 - DNA, 25 bp, SARS Virus
agggtttacgaattcactgcaacat

SEQ ID NO: 123504 - DNA, 25 bp, SARS Virus
gggtttacgaactcactgcaacatg

SEQ ID NO: 123505 - DNA, 25 bp, SARS Virus
ggtttacgaacttactgcaacatga

SEQ ID NO: 123506 - DNA, 25 bp, SARS Virus
gtttacgaactctctgcaacatgac

SEQ ID NO: 123507 - DNA, 25 bp, SARS Virus
tttacgaactcattgcaacatgaca

SEQ ID NO: 123508 - DNA, 25 bp, SARS Virus
ttacgaactcactgcaacatgacaa

SEQ ID NO: 123509 - DNA, 25 bp, SARS Virus
tacgaactcacttcaacatgacaaa

SEQ ID NO: 123510 - DNA, 25 bp, SARS Virus
acgaactcactgtaacatgacaaaa

SEQ ID NO: 123511 - DNA, 25 bp, SARS Virus
cgaactcactgctacatgacaaaac

SEQ ID NO: 123512 - DNA, 25 bp, SARS Virus
gaactcactgcatcatgacaaaaca

SEQ ID NO: 123513 - DNA, 25 bp, SARS Virus
aactcactgcaatatgacaaaacac

SEQ ID NO: 123514 - DNA, 25 bp, SARS Virus
actcactgcaacttgacaaaacacc

SEQ ID NO: 123515 - DNA, 25 bp, SARS Virus
ctcactgcaacatgacaaaacaccg

SEQ ID NO: 123516 - DNA, 25 bp, SARS Virus
tcactgcaacattacaaaacaccgt

SEQ ID NO: 123517 - DNA, 25 bp, SARS Virus
cactgcaacatgtcaaaacaccgtc

SEQ ID NO: 123518 - DNA, 25 bp, SARS Virus
actgcaacatgataaaacaccgtca

SEQ ID NO: 123519 - DNA, 25 bp, SARS Virus
ctgcaacatgactaaacaccgtcat

SEQ ID NO: 123520 - DNA, 25 bp, SARS Virus
tgcaacatgacataacaccgtcatg

SEQ ID NO: 123521 - DNA, 25 bp, SARS Virus
gcaacatgacaatacaccgtcatgc

SEQ ID NO: 123522 - DNA, 25 bp, SARS Virus
caacatgacaaatcaccgtcatgca

SEQ ID NO: 123523 - DNA, 25 bp, SARS Virus
aacatgacaaaataccgtcatgcaa

SEQ ID NO: 123524 - DNA, 25 bp, SARS Virus
acatgacaaaactccgtcatgcaaa

SEQ ID NO: 123525 - DNA, 25 bp, SARS Virus
catgacaaaacatcgtcatgcaaaa

SEQ ID NO: 123526 - DNA, 25 bp, SARS Virus
atgacaaaacactgtcatgcaaaaa

SEQ ID NO: 123527 - DNA, 25 bp, SARS Virus
tgacaaaacaccttcatgcaaaaac

SEQ ID NO: 123528 - DNA, 25 bp, SARS Virus
gacaaaacaccgtcatgcaaaaacc

SEQ ID NO: 123529 - DNA, 25 bp, SARS Virus
acaaaacaccgttatgcaaaaaccg

SEQ ID NO: 123530 - DNA, 25 bp, SARS Virus
caaaacaccgtcttgcaaaaaccgc

SEQ ID NO: 123531 - DNA, 25 bp, SARS Virus
aaaacaccgtcatgcaaaaaccgct

SEQ ID NO: 123532 - DNA, 25 bp, SARS Virus
aaacaccgtcattcaaaaaccgctc

SEQ ID NO: 123533 - DNA, 25 bp, SARS Virus
aacaccgtcatgtaaaaaccgctcc

SEQ ID NO: 123534 - DNA, 25 bp, SARS Virus
acaccgtcatgctaaaaccgctccg

SEQ ID NO: 123535 - DNA, 25 bp, SARS Virus
caccgtcatgcataaaccgctccga

SEQ ID NO: 123536 - DNA, 25 bp, SARS Virus
accgtcatgcaataaccgctccgaa

SEQ ID NO: 123537 - DNA, 25 bp, SARS Virus
ccgtcatgcaaataccgctccgaaa

SEQ ID NO: 123538 - DNA, 25 bp, SARS Virus
cgtcatgcaaaatccgctccgaaaa

SEQ ID NO: 123539 - DNA, 25 bp, SARS Virus
gtcatgcaaaaatcgctccgaaaaa

SEQ ID NO: 123540 - DNA, 25 bp, SARS Virus
tcatgcaaaaactgctccgaaaaat

SEQ ID NO: 123541 - DNA, 25 bp, SARS Virus
catgcaaaaacctctccgaaaaatc

SEQ ID NO: 123542 - DNA, 25 bp, SARS Virus
atgcaaaaaccgttccgaaaaatct

SEQ ID NO: 123543 - DNA, 25 bp, SARS Virus
tgcaaaaaccgctccgaaaaatcta

SEQ ID NO: 123544 - DNA, 25 bp, SARS Virus
gcaaaaaccgcttcgaaaaatctac

SEQ ID NO: 123545 - DNA, 25 bp, SARS Virus
caaaaaccgctctgaaaaatctacg

SEQ ID NO: 123546 - DNA, 25 bp, SARS Virus
aaaaaccgctcctaaaaatctacgg

SEQ ID NO: 123547 - DNA, 25 bp, SARS Virus
aaaaccgctccgtaaaatctacgga

SEQ ID NO: 123548 - DNA, 25 bp, SARS Virus
aaaccgctccgataaatctacggag

SEQ ID NO: 123549 - DNA, 25 bp, SARS Virus
aaccgctccgaataatctacggagt

SEQ ID NO: 123550 - DNA, 25 bp, SARS Virus
accgctccgaaatatctacggagtc

SEQ ID NO: 123551 - DNA, 25 bp, SARS Virus
ccgctccgaaaattctacggagtcg

SEQ ID NO: 123552 - DNA, 25 bp, SARS Virus
cgctccgaaaaatctacggagtcgt

SEQ ID NO: 123553 - DNA, 25 bp, SARS Virus
gctccgaaaaatttacggagtcgtc

SEQ ID NO: 123554 - DNA, 25 bp, SARS Virus
ctccgaaaaatctacggagtcgtcg

SEQ ID NO: 123555 - DNA, 25 bp, SARS Virus
tccgaaaaatcttcggagtcgtcgt

SEQ ID NO: 123556 - DNA, 25 bp, SARS Virus
ccgaaaaatctatggagtcgtcgtc

SEQ ID NO: 123557 - DNA, 25 bp, SARS Virus
cgaaaaatctactgagtcgtcgtct

SEQ ID NO: 123558 - DNA, 25 bp, SARS Virus
gaaaaatctacgtagtcgtcgtcta

SEQ ID NO: 123559 - DNA, 25 bp, SARS Virus
aaaaatctacggtgtcgtcgtctaa

SEQ ID NO: 123560 - DNA, 25 bp, SARS Virus
aaaatctacggattcgtcgtctaaa

SEQ ID NO: 123561 - DNA, 25 bp, SARS Virus
aaatctacggagtcgtcgtctaaag

SEQ ID NO: 123562 - DNA, 25 bp, SARS Virus
aatctacggagttgtcgtctaaaga

SEQ ID NO: 123563 - DNA, 25 bp, SARS Virus
atctacggagtcttcgtctaaagaa

SEQ ID NO: 123564 - DNA, 25 bp, SARS Virus
tctacggagtcgtcgtctaaagaat

SEQ ID NO: 123565 - DNA, 25 bp, SARS Virus
ctacggagtcgttgtctaaagaatc

SEQ ID NO: 123566 - DNA, 25 bp, SARS Virus
tacggagtcgtcttctaaagaatca

SEQ ID NO: 123567 - DNA, 25 bp, SARS Virus
acggagtcgtcgtctaaagaatcac

SEQ ID NO: 123568 - DNA, 25 bp, SARS Virus
cggagtcgtcgtttaaagaatcact

SEQ ID NO: 123569 - DNA, 25 bp, SARS Virus
ggagtcgtcgtctaaagaatcactg

SEQ ID NO: 123570 - DNA, 25 bp, SARS Virus
gagtcgtcgtcttaagaatcactgt

SEQ ID NO: 123571 - DNA, 25 bp, SARS Virus
agtcgtcgtctatagaatcactgtc

SEQ ID NO: 123572 - DNA, 25 bp, SARS Virus
gtcgtcgtctaatgaatcactgtca

SEQ ID NO: 123573 - DNA, 25 bp, SARS Virus
tcgtcgtctaaataatcactgtcaa

SEQ ID NO: 123574 - DNA, 25 bp, SARS Virus
cgtcgtctaaagtatcactgtcaaa

SEQ ID NO: 123575 - DNA, 25 bp, SARS Virus
gtcgtctaaagattcactgtcaaac

SEQ ID NO: 123576 - DNA, 25 bp, SARS Virus
tcgtctaaagaatcactgtcaaacc

SEQ ID NO: 123577 - DNA, 25 bp, SARS Virus
cgtctaaagaattactgtcaaaccg

SEQ ID NO: 123578 - DNA, 25 bp, SARS Virus
gtctaaagaatctctgtcaaaccgg

SEQ ID NO: 123579 - DNA, 25 bp, SARS Virus
tctaaagaatcattgtcaaaccgga

SEQ ID NO: 123580 - DNA, 25 bp, SARS Virus
ctaaagaatcactgtcaaaccggaa

SEQ ID NO: 123581 - DNA, 25 bp, SARS Virus
taaagaatcactttcaaaccggaac

SEQ ID NO: 123582 - DNA, 25 bp, SARS Virus
aaagaatcactgtcaaaccggaaca

SEQ ID NO: 123583 - DNA, 25 bp, SARS Virus
aagaatcactgttaaaccggaacaa

SEQ ID NO: 123584 - DNA, 25 bp, SARS Virus
agaatcactgtctaaccggaacaac

SEQ ID NO: 123585 - DNA, 25 bp, SARS Virus
gaatcactgtcataccggaacaaca

SEQ ID NO: 123586 - DNA, 25 bp, SARS Virus
aatcactgtcaatccggaacaacaa

SEQ ID NO: 123587 - DNA, 25 bp, SARS Virus
atcactgtcaaatcggaacaacaac

SEQ ID NO: 123588 - DNA, 25 bp, SARS Virus
tcactgtcaaactggaacaacaaca

SEQ ID NO: 123589 - DNA, 25 bp, SARS Virus
cactgtcaaacctgaacaacaacaa

SEQ ID NO: 123590 - DNA, 25 bp, SARS Virus
actgtcaaaccgtaacaacaacaac

SEQ ID NO: 123591 - DNA, 25 bp, SARS Virus
ctgtcaaaccggtacaacaacaacc

SEQ ID NO: 123592 - DNA, 25 bp, SARS Virus
tgtcaaaccggatcaacaacaaccg

SEQ ID NO: 123593 - DNA, 25 bp, SARS Virus
gtcaaaccggaataacaacaaccgg

SEQ ID NO: 123594 - DNA, 25 bp, SARS Virus
tcaaaccggaactacaacaaccgga

SEQ ID NO: 123595 - DNA, 25 bp, SARS Virus
caaaccggaacatcaacaaccggaa

SEQ ID NO: 123596 - DNA, 25 bp, SARS Virus
aaaccggaacaataacaaccggaaa

SEQ ID NO: 123597 - DNA, 25 bp, SARS Virus
aaccggaacaactacaaccggaaat

SEQ ID NO: 123598 - DNA, 25 bp, SARS Virus
accggaacaacatcaaccggaaatg

SEQ ID NO: 123599 - DNA, 25 bp, SARS Virus
ccggaacaacaataaccggaaatgg

SEQ ID NO: 123600 - DNA, 25 bp, SARS Virus
cggaacaacaactaccggaaatggt

SEQ ID NO: 123601 - DNA, 25 bp, SARS Virus
ggaacaacaacatccggaaatggtc

SEQ ID NO: 123602 - DNA, 25 bp, SARS Virus
gaacaacaacaatcggaaatggtct

SEQ ID NO: 123603 - DNA, 25 bp, SARS Virus
aacaacaacaactggaaatggtctt

SEQ ID NO: 123604 - DNA, 25 bp, SARS Virus
acaacaacaacctgaaatggtcttt

SEQ ID NO: 123605 - DNA, 25 bp, SARS Virus
caacaacaaccgtaaatggtctttg

SEQ ID NO: 123606 - DNA, 25 bp, SARS Virus
aacaacaaccggtaatggtctttga

SEQ ID NO: 123607 - DNA, 25 bp, SARS Virus
acaacaaccggatatggtctttgaa

SEQ ID NO: 123608 - DNA, 25 bp, SARS Virus
caacaaccggaattggtctttgaaa

SEQ ID NO: 123609 - DNA, 25 bp, SARS Virus
aacaaccggaaatggtctttgaaac

SEQ ID NO: 123610 - DNA, 25 bp, SARS Virus
acaaccggaaattgtctttgaaacg

SEQ ID NO: 123611 - DNA, 25 bp, SARS Virus
caaccggaaatgttctttgaaacga

SEQ ID NO: 123612 - DNA, 25 bp, SARS Virus
aaccggaaatggtctttgaaacgag

SEQ ID NO: 123613 - DNA, 25 bp, SARS Virus
accggaaatggtttttgaaacgaga

SEQ ID NO: 123614 - DNA, 25 bp, SARS Virus
ccggaaatggtctttgaaacgagag

SEQ ID NO: 123615 - DNA, 25 bp, SARS Virus
cggaaatggtctttgaaacgagagt

SEQ ID NO: 123616 - DNA, 25 bp, SARS Virus
ggaaatggtctttgaaacgagagtt

SEQ ID NO: 123617 - DNA, 25 bp, SARS Virus
gaaatggtcttttaaacgagagttc

SEQ ID NO: 123618 - DNA, 25 bp, SARS Virus
aaatggtctttgtaacgagagttcg

SEQ ID NO: 123619 - DNA, 25 bp, SARS Virus
aatggtctttgatacgagagttcga

SEQ ID NO: 123620 - DNA, 25 bp, SARS Virus
atggtctttgaatcgagagttcgac

SEQ ID NO: 123621 - DNA, 25 bp, SARS Virus
tggtctttgaaatgagagttcgacc

SEQ ID NO: 123622 - DNA, 25 bp, SARS Virus
ggtctttgaaactagagttcgacca

SEQ ID NO: 123623 - DNA, 25 bp, SARS Virus
gtctttgaaacgtgagttcgaccaa

SEQ ID NO: 123624 - DNA, 25 bp, SARS Virus
tctttgaaacgatagttcgaccaag

SEQ ID NO: 123625 - DNA, 25 bp, SARS Virus
ctttgaaacgagtgttcgaccaagt

SEQ ID NO: 123626 - DNA, 25 bp, SARS Virus
tttgaaacgagatttcgaccaagtt

SEQ ID NO: 123627 - DNA, 25 bp, SARS Virus
ttgaaacgagagttcgaccaagtta

SEQ ID NO: 123628 - DNA, 25 bp, SARS Virus
tgaaacgagagttcgaccaagttag

SEQ ID NO: 123629 - DNA, 25 bp, SARS Virus
gaaacgagagtttgaccaagttaga

SEQ ID NO: 123630 - DNA, 25 bp, SARS Virus
aaacgagagttctaccaagttagac

SEQ ID NO: 123631 - DNA, 25 bp, SARS Virus
aacgagagttcgtccaagttagaca

SEQ ID NO: 123632 - DNA, 25 bp, SARS Virus
acgagagttcgatcaagttagacag

SEQ ID NO: 123633 - DNA, 25 bp, SARS Virus
cgagagttcgactaagttagacaga

SEQ ID NO: 123634 - DNA, 25 bp, SARS Virus
gagagttcgacctagttagacagat

SEQ ID NO: 123635 - DNA, 25 bp, SARS Virus
agagttcgaccatgttagacagatc

SEQ ID NO: 123636 - DNA, 25 bp, SARS Virus
gagttcgaccaatttagacagatcg

SEQ ID NO: 123637 - DNA, 25 bp, SARS Virus
agttcgaccaagttagacagatcgt

SEQ ID NO: 123638 - DNA, 25 bp, SARS Virus
gttcgaccaagttagacagatcgtc

SEQ ID NO: 123639 - DNA, 25 bp, SARS Virus
ttcgaccaagtttgacagatcgtcg

SEQ ID NO: 123640 - DNA, 25 bp, SARS Virus
tcgaccaagttatacagatcgtcgt

SEQ ID NO: 123641 - DNA, 25 bp, SARS Virus
cgaccaagttagtcagatcgtcgtt

SEQ ID NO: 123642 - DNA, 25 bp, SARS Virus
gaccaagttagatagatcgtcgtta

SEQ ID NO: 123643 - DNA, 25 bp, SARS Virus
accaagttagactgatcgtcgttat

SEQ ID NO: 123644 - DNA, 25 bp, SARS Virus
ccaagttagacatatcgtcgttatc

SEQ ID NO: 123645 - DNA, 25 bp, SARS Virus
caagttagacagttcgtcgttatcg

SEQ ID NO: 123646 - DNA, 25 bp, SARS Virus
aagttagacagatcgtcgttatcgc

SEQ ID NO: 123647 - DNA, 25 bp, SARS Virus
agttagacagattgtcgttatcgcg

SEQ ID NO: 123648 - DNA, 25 bp, SARS Virus
gttagacagatcttcgttatcgcgc

SEQ ID NO: 123649 - DNA, 25 bp, SARS Virus
ttagacagatcgtcgttatcgcgct

SEQ ID NO: 123650 - DNA, 25 bp, SARS Virus
tagacagatcgttgttatcgcgctc

SEQ ID NO: 123651 - DNA, 25 bp, SARS Virus
agacagatcgtctttatcgcgctcc

SEQ ID NO: 123652 - DNA, 25 bp, SARS Virus
gacagatcgtcgttatcgcgctccc

SEQ ID NO: 123653 - DNA, 25 bp, SARS Virus
acagatcgtcgttatcgcgctcccg

SEQ ID NO: 123654 - DNA, 25 bp, SARS Virus
cagatcgtcgttttcgcgctcccgt

SEQ ID NO: 123655 - DNA, 25 bp, SARS Virus
agatcgtcgttatcgcgctcccgtc

SEQ ID NO: 123656 - DNA, 25 bp, SARS Virus
gatcgtcgttattgcgctcccgtca

SEQ ID NO: 123657 - DNA, 25 bp, SARS Virus
atcgtcgttatctcgctcccgtcaa

SEQ ID NO: 123658 - DNA, 25 bp, SARS Virus
tcgtcgttatcgtgctcccgtcaaa

SEQ ID NO: 123659 - DNA, 25 bp, SARS Virus
cgtcgttatcgctctcccgtcaaag

SEQ ID NO: 123660 - DNA, 25 bp, SARS Virus
gtcgttatcgcgttcccgtcaaagt

SEQ ID NO: 123661 - DNA, 25 bp, SARS Virus
tcgttatcgcgctcccgtcaaagtg

SEQ ID NO: 123662 - DNA, 25 bp, SARS Virus
cgttatcgcgcttccgtcaaagtgg

SEQ ID NO: 123663 - DNA, 25 bp, SARS Virus
gttatcgcgctctcgtcaaagtggt

SEQ ID NO: 123664 - DNA, 25 bp, SARS Virus
ttatcgcgctcctgtcaaagtggtg

SEQ ID NO: 123665 - DNA, 25 bp, SARS Virus
tatcgcgctcccttcaaagtggtgg

SEQ ID NO: 123666 - DNA, 25 bp, SARS Virus
atcgcgctcccgtcaaagtggtgga

SEQ ID NO: 123667 - DNA, 25 bp, SARS Virus
tcgcgctcccgttaaagtggtggag

SEQ ID NO: 123668 - DNA, 25 bp, SARS Virus
cgcgctcccgtctaagtggtggagg

SEQ ID NO: 123669 - DNA, 25 bp, SARS Virus
gcgctcccgtcatagtggtggaggc

SEQ ID NO: 123670 - DNA, 25 bp, SARS Virus
cgctcccgtcaatgtggtggaggcg

SEQ ID NO: 123671 - DNA, 25 bp, SARS Virus
gctcccgtcaaattggtggaggcga

SEQ ID NO: 123672 - DNA, 25 bp, SARS Virus
ctcccgtcaaagtggtggaggcgat

SEQ ID NO: 123673 - DNA, 25 bp, SARS Virus
tcccgtcaaagttgtggaggcgatc

SEQ ID NO: 123674 - DNA, 25 bp, SARS Virus
cccgtcaaagtgttggaggcgatcg

SEQ ID NO: 123675 - DNA, 25 bp, SARS Virus
ccgtcaaagtggtggaggcgatcgg

SEQ ID NO: 123676 - DNA, 25 bp, SARS Virus
cgtcaaagtggttgaggcgatcggt

SEQ ID NO: 123677 - DNA, 25 bp, SARS Virus
gtcaaagtggtgtaggcgatcggta

SEQ ID NO: 123678 - DNA, 25 bp, SARS Virus
tcaaagtggtggtggcgatcggtaa

SEQ ID NO: 123679 - DNA, 25 bp, SARS Virus
caaagtggtggatgcgatcggtaag

SEQ ID NO: 123680 - DNA, 25 bp, SARS Virus
aaagtggtggagtcgatcggtaagc

SEQ ID NO: 123681 - DNA, 25 bp, SARS Virus
aagtggtggaggtgatcggtaagct

SEQ ID NO: 123682 - DNA, 25 bp, SARS Virus
agtggtggaggctatcggtaagctc

SEQ ID NO: 123683 - DNA, 25 bp, SARS Virus
gtggtggaggcgttcggtaagctcg

SEQ ID NO: 123684 - DNA, 25 bp, SARS Virus
tggtggaggcgatcggtaagctcgt

SEQ ID NO: 123685 - DNA, 25 bp, SARS Virus
ggtggaggcgattggtaagctcgtc

SEQ ID NO: 123686 - DNA, 25 bp, SARS Virus
gtggaggcgatctgtaagctcgtcc

SEQ ID NO: 123687 - DNA, 25 bp, SARS Virus
tggaggcgatcgttaagctcgtcct

SEQ ID NO: 123688 - DNA, 25 bp, SARS Virus
ggaggcgatcggtaagctcgtcctc

SEQ ID NO: 123689 - DNA, 25 bp, SARS Virus
gaggcgatcggttagctcgtcctct

SEQ ID NO: 123690 - DNA, 25 bp, SARS Virus
aggcgatcggtatgctcgtcctctt

SEQ ID NO: 123691 - DNA, 25 bp, SARS Virus
ggcgatcggtaatctcgtcctctta

SEQ ID NO: 123692 - DNA, 25 bp, SARS Virus
gcgatcggtaagttcgtcctcttaa

SEQ ID NO: 123693 - DNA, 25 bp, SARS Virus
cgatcggtaagctcgtcctcttaaa

SEQ ID NO: 123694 - DNA, 25 bp, SARS Virus
gatcggtaagcttgtcctcttaaag

SEQ ID NO: 123695 - DNA, 25 bp, SARS Virus
atcggtaagctcttcctcttaaagg

SEQ ID NO: 123696 - DNA, 25 bp, SARS Virus
tcggtaagctcgtcctcttaaaggg

SEQ ID NO: 123697 - DNA, 25 bp, SARS Virus
cggtaagctcgttctcttaaagggg

SEQ ID NO: 123698 - DNA, 25 bp, SARS Virus
ggtaagctcgtcttcttaaagggga

SEQ ID NO: 123699 - DNA, 25 bp, SARS Virus
gtaagctcgtcctcttaaaggggat

SEQ ID NO: 123700 - DNA, 25 bp, SARS Virus
taagctcgtccttttaaaggggatg

SEQ ID NO: 123701 - DNA, 25 bp, SARS Virus
aagctcgtcctcttaaaggggatga

SEQ ID NO: 123702 - DNA, 25 bp, SARS Virus
agctcgtcctcttaaaggggatgac

SEQ ID NO: 123703 - DNA, 25 bp, SARS Virus
gctcgtcctctttaaggggatgacg

SEQ ID NO: 123704 - DNA, 25 bp, SARS Virus
ctcgtcctcttataggggatgacga

SEQ ID NO: 123705 - DNA, 25 bp, SARS Virus
tcgtcctcttaatggggatgacgac

SEQ ID NO: 123706 - DNA, 25 bp, SARS Virus
cgtcctcttaaatgggatgacgacg

SEQ ID NO: 123707 - DNA, 25 bp, SARS Virus
gtcctcttaaagtggatgacgacgg

SEQ ID NO: 123708 - DNA, 25 bp, SARS Virus
tcctcttaaaggtgatgacgacggt

SEQ ID NO: 123709 - DNA, 25 bp, SARS Virus
cctcttaaagggtatgacgacggtc

SEQ ID NO: 123710 - DNA, 25 bp, SARS Virus
ctcttaaaggggttgacgacggtcc

SEQ ID NO: 123711 - DNA, 25 bp, SARS Virus
tcttaaaggggatgacgacggtcct

SEQ ID NO: 123712 - DNA, 25 bp, SARS Virus
cttaaaggggattacgacggtcctc

SEQ ID NO: 123713 - DNA, 25 bp, SARS Virus
ttaaaggggatgtcgacggtcctca

SEQ ID NO: 123714 - DNA, 25 bp, SARS Virus
taaaggggatgatgacggtcctcaa

SEQ ID NO: 123715 - DNA, 25 bp, SARS Virus
aaaggggatgactacggtcctcaac

SEQ ID NO: 123716 - DNA, 25 bp, SARS Virus
aaggggatgacgtcggtcctcaact

SEQ ID NO: 123717 - DNA, 25 bp, SARS Virus
aggggatgacgatggtcctcaactt

SEQ ID NO: 123718 - DNA, 25 bp, SARS Virus
ggggatgacgactgtcctcaactta

SEQ ID NO: 123719 - DNA, 25 bp, SARS Virus
gggatgacgacgttcctcaacttaa

SEQ ID NO: 123720 - DNA, 25 bp, SARS Virus
ggatgacgacggtcctcaacttaaa

SEQ ID NO: 123721 - DNA, 25 bp, SARS Virus
gatgacgacggttctcaacttaaag

SEQ ID NO: 123722 - DNA, 25 bp, SARS Virus
atgacgacggtcttcaacttaaaga

SEQ ID NO: 123723 - DNA, 25 bp, SARS Virus
tgacgacggtcctcaacttaaagaa

SEQ ID NO: 123724 - DNA, 25 bp, SARS Virus
gacgacggtccttaacttaaagaac

SEQ ID NO: 123725 - DNA, 25 bp, SARS Virus
acgacggtcctctacttaaagaact

SEQ ID NO: 123726 - DNA, 25 bp, SARS Virus
cgacggtcctcatcttaaagaactt

SEQ ID NO: 123727 - DNA, 25 bp, SARS Virus
gacggtcctcaatttaaagaactta

SEQ ID NO: 123728 - DNA, 25 bp, SARS Virus
acggtcctcaacttaaagaacttaa

SEQ ID NO: 123729 - DNA, 25 bp, SARS Virus
cggtcctcaacttaaagaacttaat

SEQ ID NO: 123730 - DNA, 25 bp, SARS Virus
ggtcctcaactttaagaacttaatg

SEQ ID NO: 123731 - DNA, 25 bp, SARS Virus
gtcctcaacttatagaacttaatgg

SEQ ID NO: 123732 - DNA, 25 bp, SARS Virus
tcctcaacttaatgaacttaatggc

SEQ ID NO: 123733 - DNA, 25 bp, SARS Virus
cctcaacttaaataacttaatggcg

SEQ ID NO: 123734 - DNA, 25 bp, SARS Virus
ctcaacttaaagtacttaatggcgc

SEQ ID NO: 123735 - DNA, 25 bp, SARS Virus
tcaacttaaagatcttaatggcgct

SEQ ID NO: 123736 - DNA, 25 bp, SARS Virus
caacttaaagaatttaatggcgctg

SEQ ID NO: 123737 - DNA, 25 bp, SARS Virus
aacttaaagaacttaatggcgctga

SEQ ID NO: 123738 - DNA, 25 bp, SARS Virus
acttaaagaacttaatggcgctgat

SEQ ID NO: 123739 - DNA, 25 bp, SARS Virus
cttaaagaactttatggcgctgatg

SEQ ID NO: 123740 - DNA, 25 bp, SARS Virus
ttaaagaacttattggcgctgatgc

SEQ ID NO: 123741 - DNA, 25 bp, SARS Virus
taaagaacttaatggcgctgatgca

SEQ ID NO: 123742 - DNA, 25 bp, SARS Virus
aaagaacttaattgcgctgatgcac

SEQ ID NO: 123743 - DNA, 25 bp, SARS Virus
aagaacttaatgtcgctgatgcact

SEQ ID NO: 123744 - DNA, 25 bp, SARS Virus
agaacttaatggtgctgatgcacta

SEQ ID NO: 123745 - DNA, 25 bp, SARS Virus
gaacttaatggctctgatgcactac

SEQ ID NO: 123746 - DNA, 25 bp, SARS Virus
aacttaatggcgttgatgcactact

SEQ ID NO: 123747 - DNA, 25 bp, SARS Virus
acttaatggcgctgatgcactactc

SEQ ID NO: 123748 - DNA, 25 bp, SARS Virus
cttaatggcgcttatgcactactcc

SEQ ID NO: 123749 - DNA, 25 bp, SARS Virus
ttaatggcgctgttgcactactcct

SEQ ID NO: 123750 - DNA, 25 bp, SARS Virus
taatggcgctgatgcactactcctc

SEQ ID NO: 123751 - DNA, 25 bp, SARS Virus
aatggcgctgattcactactcctcg

SEQ ID NO: 123752 - DNA, 25 bp, SARS Virus
atggcgctgatgtactactcctcgc

SEQ ID NO: 123753 - DNA, 25 bp, SARS Virus
tggcgctgatgctctactcctcgct

SEQ ID NO: 123754 - DNA, 25 bp, SARS Virus
ggcgctgatgcattactcctcgctc

SEQ ID NO: 123755 - DNA, 25 bp, SARS Virus
gcgctgatgcactactcctcgctct

SEQ ID NO: 123756 - DNA, 25 bp, SARS Virus
cgctgatgcacttctcctcgctctt

SEQ ID NO: 123757 - DNA, 25 bp, SARS Virus
gctgatgcactattcctcgctcttc

SEQ ID NO: 123758 - DNA, 25 bp, SARS Virus
ctgatgcactactcctcgctcttct

SEQ ID NO: 123759 - DNA, 25 bp, SARS Virus
tgatgcactacttctcgctcttctc

SEQ ID NO: 123760 - DNA, 25 bp, SARS Virus
gatgcactactcttcgctcttctcc

SEQ ID NO: 123761 - DNA, 25 bp, SARS Virus
atgcactactcctcgctcttctccg

SEQ ID NO: 123762 - DNA, 25 bp, SARS Virus
tgcactactccttgctcttctccga

SEQ ID NO: 123763 - DNA, 25 bp, SARS Virus
gcactactcctctctcttctccgaa

SEQ ID NO: 123764 - DNA, 25 bp, SARS Virus
cactactcctcgttcttctccgaac

SEQ ID NO: 123765 - DNA, 25 bp, SARS Virus
actactcctcgctcttctccgaact

SEQ ID NO: 123766 - DNA, 25 bp, SARS Virus
ctactcctcgcttttctccgaactg

SEQ ID NO: 123767 - DNA, 25 bp, SARS Virus
tactcctcgctcttctccgaactga

SEQ ID NO: 123768 - DNA, 25 bp, SARS Virus
actcctcgctcttctccgaactgac

SEQ ID NO: 123769 - DNA, 25 bp, SARS Virus
ctcctcgctcttttccgaactgacg

SEQ ID NO: 123770 - DNA, 25 bp, SARS Virus
tcctcgctcttctccgaactgacgg

SEQ ID NO: 123771 - DNA, 25 bp, SARS Virus
cctcgctcttcttcgaactgacggc

SEQ ID NO: 123772 - DNA, 25 bp, SARS Virus
ctcgctcttctctgaactgacggcg

SEQ ID NO: 123773 - DNA, 25 bp, SARS Virus
tcgctcttctcctaactgacggcgg

SEQ ID NO: 123774 - DNA, 25 bp, SARS Virus
cgctcttctccgtactgacggcgga

SEQ ID NO: 123775 - DNA, 25 bp, SARS Virus
gctcttctccgatctgacggcggag

SEQ ID NO: 123776 - DNA, 25 bp, SARS Virus
ctcttctccgaattgacggcggaga

SEQ ID NO: 123777 - DNA, 25 bp, SARS Virus
tcttctccgaactgacggcggagac

SEQ ID NO: 123778 - DNA, 25 bp, SARS Virus
cttctccgaacttacggcggagacg

SEQ ID NO: 123779 - DNA, 25 bp, SARS Virus
ttctccgaactgtcggcggagacga

SEQ ID NO: 123780 - DNA, 25 bp, SARS Virus
tctccgaactgatggcggagacgaa

SEQ ID NO: 123781 - DNA, 25 bp, SARS Virus
ctccgaactgactgcggagacgaag

SEQ ID NO: 123782 - DNA, 25 bp, SARS Virus
tccgaactgacgtcggagacgaagg

SEQ ID NO: 123783 - DNA, 25 bp, SARS Virus
ccgaactgacggtggagacgaaggg

SEQ ID NO: 123784 - DNA, 25 bp, SARS Virus
cgaactgacggctgagacgaaggga

SEQ ID NO: 123785 - DNA, 25 bp, SARS Virus
gaactgacggcgtagacgaagggag

SEQ ID NO: 123786 - DNA, 25 bp, SARS Virus
aactgacggcggtgacgaagggaga

SEQ ID NO: 123787 - DNA, 25 bp, SARS Virus
actgacggcggatacgaagggagac

SEQ ID NO: 123788 - DNA, 25 bp, SARS Virus
ctgacggcggagtcgaagggagacg

SEQ ID NO: 123789 - DNA, 25 bp, SARS Virus
tgacggcggagatgaagggagacgc

SEQ ID NO: 123790 - DNA, 25 bp, SARS Virus
gacggcggagactaagggagacgca

SEQ ID NO: 123791 - DNA, 25 bp, SARS Virus
acggcggagacgtagggagacgcat

SEQ ID NO: 123792 - DNA, 25 bp, SARS Virus
cggcggagacgatgggagacgcatc

SEQ ID NO: 123793 - DNA, 25 bp, SARS Virus
ggcggagacgaatggagacgcatct

SEQ ID NO: 123794 - DNA, 25 bp, SARS Virus
gcggagacgaagtgagacgcatctt

SEQ ID NO: 123795 - DNA, 25 bp, SARS Virus
cggagacgaaggtagacgcatcttc

SEQ ID NO: 123796 - DNA, 25 bp, SARS Virus
ggagacgaagggtgacgcatcttcg

SEQ ID NO: 123797 - DNA, 25 bp, SARS Virus
gagacgaagggatacgcatcttcgg

SEQ ID NO: 123798 - DNA, 25 bp, SARS Virus
agacgaagggagtcgcatcttcgga

SEQ ID NO: 123799 - DNA, 25 bp, SARS Virus
gacgaagggagatgcatcttcggaa

SEQ ID NO: 123800 - DNA, 25 bp, SARS Virus
acgaagggagactcatcttcggaaa

SEQ ID NO: 123801 - DNA, 25 bp, SARS Virus
cgaagggagacgtatcttcggaaaa

SEQ ID NO: 123802 - DNA, 25 bp, SARS Virus
gaagggagacgcttcttcggaaaac

SEQ ID NO: 123803 - DNA, 25 bp, SARS Virus
aagggagacgcatcttcggaaaacc

SEQ ID NO: 123804 - DNA, 25 bp, SARS Virus
agggagacgcattttcggaaaaccg

SEQ ID NO: 123805 - DNA, 25 bp, SARS Virus
gggagacgcatcttcggaaaaccgt

SEQ ID NO: 123806 - DNA, 25 bp, SARS Virus
ggagacgcatcttcggaaaaccgtt

SEQ ID NO: 123807 - DNA, 25 bp, SARS Virus
gagacgcatctttggaaaaccgtta

SEQ ID NO: 123808 - DNA, 25 bp, SARS Virus
agacgcatcttctgaaaaccgttac

SEQ ID NO: 123809 - DNA, 25 bp, SARS Virus
gacgcatcttcgtaaaaccgttaca

SEQ ID NO: 123810 - DNA, 25 bp, SARS Virus
acgcatcttcggtaaaccgttacaa

SEQ ID NO: 123811 - DNA, 25 bp, SARS Virus
cgcatcttcggataaccgttacaac

SEQ ID NO: 123812 - DNA, 25 bp, SARS Virus
gcatcttcggaataccgttacaaca

SEQ ID NO: 123813 - DNA, 25 bp, SARS Virus
catcttcggaaatccgttacaacaa

SEQ ID NO: 123814 - DNA, 25 bp, SARS Virus
atcttcggaaaatcgttacaacaag

SEQ ID NO: 123815 - DNA, 25 bp, SARS Virus
tcttcggaaaactgttacaacaagg

SEQ ID NO: 123816 - DNA, 25 bp, SARS Virus
cttcggaaaacctttacaacaagga

SEQ ID NO: 123817 - DNA, 25 bp, SARS Virus
ttcggaaaaccgttacaacaaggaa

SEQ ID NO: 123818 - DNA, 25 bp, SARS Virus
tcggaaaaccgttacaacaaggaac

SEQ ID NO: 123819 - DNA, 25 bp, SARS Virus
cggaaaaccgtttcaacaaggaact

SEQ ID NO: 123820 - DNA, 25 bp, SARS Virus
ggaaaaccgttataacaaggaactc

SEQ ID NO: 123821 - DNA, 25 bp, SARS Virus
gaaaaccgttactacaaggaactcc

SEQ ID NO: 123822 - DNA, 25 bp, SARS Virus
aaaaccgttacatcaaggaactcct

SEQ ID NO: 123823 - DNA, 25 bp, SARS Virus
aaaccgttacaataaggaactcctt

SEQ ID NO: 123824 - DNA, 25 bp, SARS Virus
aaccgttacaactaggaactccttc

SEQ ID NO: 123825 - DNA, 25 bp, SARS Virus
accgttacaacatggaactccttca

SEQ ID NO: 123826 - DNA, 25 bp, SARS Virus
ccgttacaacaatgaactccttcaa

SEQ ID NO: 123827 - DNA, 25 bp, SARS Virus
cgttacaacaagtaactccttcaac

SEQ ID NO: 123828 - DNA, 25 bp, SARS Virus
gttacaacaaggtactccttcaaca

SEQ ID NO: 123829 - DNA, 25 bp, SARS Virus
ttacaacaaggatctccttcaacat

SEQ ID NO: 123830 - DNA, 25 bp, SARS Virus
tacaacaaggaattccttcaacatc

SEQ ID NO: 123831 - DNA, 25 bp, SARS Virus
acaacaaggaactccttcaacatcg

SEQ ID NO: 123832 - DNA, 25 bp, SARS Virus
caacaaggaacttcttcaacatcgt

SEQ ID NO: 123833 - DNA, 25 bp, SARS Virus
aacaaggaactctttcaacatcgtg

SEQ ID NO: 123834 - DNA, 25 bp, SARS Virus
acaaggaactccttcaacatcgtgc

SEQ ID NO: 123835 - DNA, 25 bp, SARS Virus
caaggaactccttcaacatcgtgcc

SEQ ID NO: 123836 - DNA, 25 bp, SARS Virus
aaggaactcctttaacatcgtgcca

SEQ ID NO: 123837 - DNA, 25 bp, SARS Virus
aggaactccttctacatcgtgccac

SEQ ID NO: 123838 - DNA, 25 bp, SARS Virus
ggaactccttcatcatcgtgccacc

SEQ ID NO: 123839 - DNA, 25 bp, SARS Virus
gaactccttcaatatcgtgccaccg

SEQ ID NO: 123840 - DNA, 25 bp, SARS Virus
aactccttcaacttcgtgccaccgt

SEQ ID NO: 123841 - DNA, 25 bp, SARS Virus
actccttcaacatcgtgccaccgtc

SEQ ID NO: 123842 - DNA, 25 bp, SARS Virus
ctccttcaacattgtgccaccgtcg

SEQ ID NO: 123843 - DNA, 25 bp, SARS Virus
tccttcaacatcttgccaccgtcgt

SEQ ID NO: 123844 - DNA, 25 bp, SARS Virus
ccttcaacatcgtgccaccgtcgta

SEQ ID NO: 123845 - DNA, 25 bp, SARS Virus
cttcaacatcgttccaccgtcgtaa

SEQ ID NO: 123846 - DNA, 25 bp, SARS Virus
ttcaacatcgtgtcaccgtcgtaac

SEQ ID NO: 123847 - DNA, 25 bp, SARS Virus
tcaacatcgtgctaccgtcgtaaca

SEQ ID NO: 123848 - DNA, 25 bp, SARS Virus
caacatcgtgcctccgtcgtaacaa

SEQ ID NO: 123849 - DNA, 25 bp, SARS Virus
aacatcgtgccatcgtcgtaacaat

SEQ ID NO: 123850 - DNA, 25 bp, SARS Virus
acatcgtgccactgtcgtaacaata

SEQ ID NO: 123851 - DNA, 25 bp, SARS Virus
catcgtgccaccttcgtaacaataa

SEQ ID NO: 123852 - DNA, 25 bp, SARS Virus
atcgtgccaccgtcgtaacaataat

SEQ ID NO: 123853 - DNA, 25 bp, SARS Virus
tcgtgccaccgttgtaacaataatc

SEQ ID NO: 123854 - DNA, 25 bp, SARS Virus
cgtgccaccgtcttaacaataatcc

SEQ ID NO: 123855 - DNA, 25 bp, SARS Virus
gtgccaccgtcgtaacaataatcct

SEQ ID NO: 123856 - DNA, 25 bp, SARS Virus
tgccaccgtcgttacaataatccta

SEQ ID NO: 123857 - DNA, 25 bp, SARS Virus
gccaccgtcgtatcaataatcctaa

SEQ ID NO: 123858 - DNA, 25 bp, SARS Virus
ccaccgtcgtaataataatcctaac

SEQ ID NO: 123859 - DNA, 25 bp, SARS Virus
caccgtcgtaactataatcctaacg

SEQ ID NO: 123860 - DNA, 25 bp, SARS Virus
accgtcgtaacattaatcctaacgc

SEQ ID NO: 123861 - DNA, 25 bp, SARS Virus
ccgtcgtaacaataatcctaacgcc

SEQ ID NO: 123862 - DNA, 25 bp, SARS Virus
cgtcgtaacaattatcctaacgccc

SEQ ID NO: 123863 - DNA, 25 bp, SARS Virus
gtcgtaacaatattcctaacgccca

SEQ ID NO: 123864 - DNA, 25 bp, SARS Virus
tcgtaacaataatcctaacgcccac

SEQ ID NO: 123865 - DNA, 25 bp, SARS Virus
cgtaacaataattctaacgcccacg

SEQ ID NO: 123866 - DNA, 25 bp, SARS Virus
gtaacaataatcttaacgcccacgg

SEQ ID NO: 123867 - DNA, 25 bp, SARS Virus
taacaataatcctaacgcccacggt

SEQ ID NO: 123868 - DNA, 25 bp, SARS Virus
aacaataatccttacgcccacggtt

SEQ ID NO: 123869 - DNA, 25 bp, SARS Virus
acaataatcctatcgcccacggtta

SEQ ID NO: 123870 - DNA, 25 bp, SARS Virus
caataatcctaatgcccacggttac

SEQ ID NO: 123871 - DNA, 25 bp, SARS Virus
aataatcctaactcccacggttaca

SEQ ID NO: 123872 - DNA, 25 bp, SARS Virus
ataatcctaacgtccacggttacac

SEQ ID NO: 123873 - DNA, 25 bp, SARS Virus
taatcctaacgctcacggttacacc

SEQ ID NO: 123874 - DNA, 25 bp, SARS Virus
aatcctaacgcctacggttacacca

SEQ ID NO: 123875 - DNA, 25 bp, SARS Virus
atcctaacgccctcggttacaccag

SEQ ID NO: 123876 - DNA, 25 bp, SARS Virus
tcctaacgcccatggttacaccaga

SEQ ID NO: 123877 - DNA, 25 bp, SARS Virus
cctaacgcccactgttacaccagaa

SEQ ID NO: 123878 - DNA, 25 bp, SARS Virus
ctaacgcccacgtttacaccagaaa

SEQ ID NO: 123879 - DNA, 25 bp, SARS Virus
taacgcccacggttacaccagaaac

SEQ ID NO: 123880 - DNA, 25 bp, SARS Virus
aacgcccacggttacaccagaaacc

SEQ ID NO: 123881 - DNA, 25 bp, SARS Virus
acgcccacggtttcaccagaaaccc

SEQ ID NO: 123882 - DNA, 25 bp, SARS Virus
cgcccacggttataccagaaaccca

SEQ ID NO: 123883 - DNA, 25 bp, SARS Virus
gcccacggttactccagaaacccac

SEQ ID NO: 123884 - DNA, 25 bp, SARS Virus
cccacggttacatcagaaacccaca

SEQ ID NO: 123885 - DNA, 25 bp, SARS Virus
ccacggttacactagaaacccacat

SEQ ID NO: 123886 - DNA, 25 bp, SARS Virus
cacggttacacctgaaacccacata

SEQ ID NO: 123887 - DNA, 25 bp, SARS Virus
acggttacaccataaacccacataa

SEQ ID NO: 123888 - DNA, 25 bp, SARS Virus
cggttacaccagtaacccacataag

SEQ ID NO: 123889 - DNA, 25 bp, SARS Virus
ggttacaccagatacccacataagt

SEQ ID NO: 123890 - DNA, 25 bp, SARS Virus
gttacaccagaatcccacataagtt

SEQ ID NO: 123891 - DNA, 25 bp, SARS Virus
ttacaccagaaatccacataagttc

SEQ ID NO: 123892 - DNA, 25 bp, SARS Virus
tacaccagaaactcacataagttcc

SEQ ID NO: 123893 - DNA, 25 bp, SARS Virus
acaccagaaacctacataagttccg

SEQ ID NO: 123894 - DNA, 25 bp, SARS Virus
caccagaaaccctcataagttccga

SEQ ID NO: 123895 - DNA, 25 bp, SARS Virus
accagaaacccatataagttccgag

SEQ ID NO: 123896 - DNA, 25 bp, SARS Virus
ccagaaacccacttaagttccgagg

SEQ ID NO: 123897 - DNA, 25 bp, SARS Virus
cagaaacccacataagttccgaggg

SEQ ID NO: 123898 - DNA, 25 bp, SARS Virus
agaaacccacattagttccgaggga

SEQ ID NO: 123899 - DNA, 25 bp, SARS Virus
gaaacccacatatgttccgagggag

SEQ ID NO: 123900 - DNA, 25 bp, SARS Virus
aaacccacataatttccgagggagt

SEQ ID NO: 123901 - DNA, 25 bp, SARS Virus
aacccacataagttccgagggagtc

SEQ ID NO: 123902 - DNA, 25 bp, SARS Virus
acccacataagttccgagggagtca

SEQ ID NO: 123903 - DNA, 25 bp, SARS Virus
cccacataagtttcgagggagtcaa

SEQ ID NO: 123904 - DNA, 25 bp, SARS Virus
ccacataagttctgagggagtcaac

SEQ ID NO: 123905 - DNA, 25 bp, SARS Virus
cacataagttcctagggagtcaacg

SEQ ID NO: 123906 - DNA, 25 bp, SARS Virus
acataagttccgtgggagtcaacgt

SEQ ID NO: 123907 - DNA, 25 bp, SARS Virus
cataagttccgatggagtcaacgtt

SEQ ID NO: 123908 - DNA, 25 bp, SARS Virus
ataagttccgagtgagtcaacgttg

SEQ ID NO: 123909 - DNA, 25 bp, SARS Virus
taagttccgaggtagtcaacgttgg

SEQ ID NO: 123910 - DNA, 25 bp, SARS Virus
aagttccgagggtgtcaacgttggg

SEQ ID NO: 123911 - DNA, 25 bp, SARS Virus
agttccgagggattcaacgttgggt

SEQ ID NO: 123912 - DNA, 25 bp, SARS Virus
gttccgagggagtcaacgttgggta

SEQ ID NO: 123913 - DNA, 25 bp, SARS Virus
ttccgagggagttaacgttgggtat

SEQ ID NO: 123914 - DNA, 25 bp, SARS Virus
tccgagggagtctacgttgggtatg

SEQ ID NO: 123915 - DNA, 25 bp, SARS Virus
ccgagggagtcatcgttgggtatgc

SEQ ID NO: 123916 - DNA, 25 bp, SARS Virus
cgagggagtcaatgttgggtatgct

SEQ ID NO: 123917 - DNA, 25 bp, SARS Virus
gagggagtcaactttgggtatgcta

SEQ ID NO: 123918 - DNA, 25 bp, SARS Virus
agggagtcaacgttgggtatgctac

SEQ ID NO: 123919 - DNA, 25 bp, SARS Virus
gggagtcaacgttgggtatgctacg

SEQ ID NO: 123920 - DNA, 25 bp, SARS Virus
ggagtcaacgtttggtatgctacgg

SEQ ID NO: 123921 - DNA, 25 bp, SARS Virus
gagtcaacgttgtgtatgctacgga

SEQ ID NO: 123922 - DNA, 25 bp, SARS Virus
agtcaacgttggttatgctacggaa

SEQ ID NO: 123923 - DNA, 25 bp, SARS Virus
gtcaacgttgggtatgctacggaag

SEQ ID NO: 123924 - DNA, 25 bp, SARS Virus
tcaacgttgggtttgctacggaaga

SEQ ID NO: 123925 - DNA, 25 bp, SARS Virus
caacgttgggtatgctacggaagaa

SEQ ID NO: 123926 - DNA, 25 bp, SARS Virus
aacgttgggtattctacggaagaaa

SEQ ID NO: 123927 - DNA, 25 bp, SARS Virus
acgttgggtatgttacggaagaaac

SEQ ID NO: 123928 - DNA, 25 bp, SARS Virus
cgttgggtatgctacggaagaaaca

SEQ ID NO: 123929 - DNA, 25 bp, SARS Virus
gttgggtatgcttcggaagaaacaa

SEQ ID NO: 123930 - DNA, 25 bp, SARS Virus
ttgggtatgctatggaagaaacaat

SEQ ID NO: 123931 - DNA, 25 bp, SARS Virus
tgggtatgctactgaagaaacaatc

SEQ ID NO: 123932 - DNA, 25 bp, SARS Virus
gggtatgctacgtaagaaacaatcg

SEQ ID NO: 123933 - DNA, 25 bp, SARS Virus
ggtatgctacggtagaaacaatcgc

SEQ ID NO: 123934 - DNA, 25 bp, SARS Virus
gtatgctacggatgaaacaatcgcg

SEQ ID NO: 123935 - DNA, 25 bp, SARS Virus
tatgctacggaataaacaatcgcgg

SEQ ID NO: 123936 - DNA, 25 bp, SARS Virus
atgctacggaagtaacaatcgcggc

SEQ ID NO: 123937 - DNA, 25 bp, SARS Virus
tgctacggaagatacaatcgcggca

SEQ ID NO: 123938 - DNA, 25 bp, SARS Virus
gctacggaagaatcaatcgcggcat

SEQ ID NO: 123939 - DNA, 25 bp, SARS Virus
ctacggaagaaataatcgcggcatc

SEQ ID NO: 123940 - DNA, 25 bp, SARS Virus
tacggaagaaactatcgcggcatcc

SEQ ID NO: 123941 - DNA, 25 bp, SARS Virus
acggaagaaacattcgcggcatccc

SEQ ID NO: 123942 - DNA, 25 bp, SARS Virus
cggaagaaacaatcgcggcatccct

SEQ ID NO: 123943 - DNA, 25 bp, SARS Virus
ggaagaaacaattgcggcatccctt

SEQ ID NO: 123944 - DNA, 25 bp, SARS Virus
gaagaaacaatctcggcatcccttc

SEQ ID NO: 123945 - DNA, 25 bp, SARS Virus
aagaaacaatcgtggcatcccttca

SEQ ID NO: 123946 - DNA, 25 bp, SARS Virus
agaaacaatcgctgcatcccttcac

SEQ ID NO: 123947 - DNA, 25 bp, SARS Virus
gaaacaatcgcgtcatcccttcact

SEQ ID NO: 123948 - DNA, 25 bp, SARS Virus
aaacaatcgcggtatcccttcactt

SEQ ID NO: 123949 - DNA, 25 bp, SARS Virus
aacaatcgcggcttcccttcacttc

SEQ ID NO: 123950 - DNA, 25 bp, SARS Virus
acaatcgcggcatcccttcacttcg

SEQ ID NO: 123951 - DNA, 25 bp, SARS Virus
caatcgcggcattccttcacttcga

SEQ ID NO: 123952 - DNA, 25 bp, SARS Virus
aatcgcggcatctcttcacttcgaa

SEQ ID NO: 123953 - DNA, 25 bp, SARS Virus
atcgcggcatcctttcacttcgaag

SEQ ID NO: 123954 - DNA, 25 bp, SARS Virus
tcgcggcatcccttcacttcgaaga

SEQ ID NO: 123955 - DNA, 25 bp, SARS Virus
cgcggcatcccttcacttcgaagac

SEQ ID NO: 123956 - DNA, 25 bp, SARS Virus
gcggcatccctttacttcgaagacc

SEQ ID NO: 123957 - DNA, 25 bp, SARS Virus
cggcatcccttctcttcgaagaccc

SEQ ID NO: 123958 - DNA, 25 bp, SARS Virus
ggcatcccttcatttcgaagacccg

SEQ ID NO: 123959 - DNA, 25 bp, SARS Virus
gcatcccttcacttcgaagacccgg

SEQ ID NO: 123960 - DNA, 25 bp, SARS Virus
catcccttcacttcgaagacccggt

SEQ ID NO: 123961 - DNA, 25 bp, SARS Virus
atcccttcactttgaagacccggtc

SEQ ID NO: 123962 - DNA, 25 bp, SARS Virus
tcccttcacttctaagacccggtca

SEQ ID NO: 123963 - DNA, 25 bp, SARS Virus
cccttcacttcgtagacccggtcaa

SEQ ID NO: 123964 - DNA, 25 bp, SARS Virus
ccttcacttcgatgacccggtcaag

SEQ ID NO: 123965 - DNA, 25 bp, SARS Virus
cttcacttcgaatacccggtcaagg

SEQ ID NO: 123966 - DNA, 25 bp, SARS Virus
ttcacttcgaagtcccggtcaagga

SEQ ID NO: 123967 - DNA, 25 bp, SARS Virus
tcacttcgaagatccggtcaaggat

SEQ ID NO: 123968 - DNA, 25 bp, SARS Virus
cacttcgaagactcggtcaaggatc

SEQ ID NO: 123969 - DNA, 25 bp, SARS Virus
acttcgaagacctggtcaaggatcc

SEQ ID NO: 123970 - DNA, 25 bp, SARS Virus
cttcgaagaccctgtcaaggatcca

SEQ ID NO: 123971 - DNA, 25 bp, SARS Virus
ttcgaagacccgttcaaggatccat

SEQ ID NO: 123972 - DNA, 25 bp, SARS Virus
tcgaagacccggtcaaggatccatt

SEQ ID NO: 123973 - DNA, 25 bp, SARS Virus
cgaagacccggttaaggatccatta

SEQ ID NO: 123974 - DNA, 25 bp, SARS Virus
gaagacccggtctaggatccattat

SEQ ID NO: 123975 - DNA, 25 bp, SARS Virus
aagacccggtcatggatccattatc

SEQ ID NO: 123976 - DNA, 25 bp, SARS Virus
agacccggtcaatgatccattatct

SEQ ID NO: 123977 - DNA, 25 bp, SARS Virus
gacccggtcaagtatccattatctt

SEQ ID NO: 123978 - DNA, 25 bp, SARS Virus
acccggtcaaggttccattatcttc

SEQ ID NO: 123979 - DNA, 25 bp, SARS Virus
cccggtcaaggatccattatcttca

SEQ ID NO: 123980 - DNA, 25 bp, SARS Virus
ccggtcaaggattcattatcttcat

SEQ ID NO: 123981 - DNA, 25 bp, SARS Virus
cggtcaaggatctattatcttcatg

SEQ ID NO: 123982 - DNA, 25 bp, SARS Virus
ggtcaaggatcctttatcttcatgg

SEQ ID NO: 123983 - DNA, 25 bp, SARS Virus
gtcaaggatccattatcttcatggt

SEQ ID NO: 123984 - DNA, 25 bp, SARS Virus
tcaaggatccattatcttcatggta

SEQ ID NO: 123985 - DNA, 25 bp, SARS Virus
caaggatccattatcttcatggtag

SEQ ID NO: 123986 - DNA, 25 bp, SARS Virus
aaggatccattaacttcatggtaga

SEQ ID NO: 123987 - DNA, 25 bp, SARS Virus
aggatccattatattcatggtagac

SEQ ID NO: 123988 - DNA, 25 bp, SARS Virus
ggatccattatcatcatggtagacc

SEQ ID NO: 123989 - DNA, 25 bp, SARS Virus
gatccattatctacatggtagaccc

SEQ ID NO: 123990 - DNA, 25 bp, SARS Virus
atccattatcttaatggtagacccc

SEQ ID NO: 123991 - DNA, 25 bp, SARS Virus
tccattatcttcatggtagaccccg

SEQ ID NO: 123992 - DNA, 25 bp, SARS Virus
ccattatcttcaaggtagaccccga

SEQ ID NO: 123993 - DNA, 25 bp, SARS Virus
cattatcttcatagtagaccccgac

SEQ ID NO: 123994 - DNA, 25 bp, SARS Virus
attatcttcatgatagaccccgact

SEQ ID NO: 123995 - DNA, 25 bp, SARS Virus
ttatcttcatggaagaccccgactc

SEQ ID NO: 123996 - DNA, 25 bp, SARS Virus
tatcttcatggtagaccccgactcg

SEQ ID NO: 123997 - DNA, 25 bp, SARS Virus
atcttcatggtaaaccccgactcga

SEQ ID NO: 123998 - DNA, 25 bp, SARS Virus
tcttcatggtagaccccgactcgag

SEQ ID NO: 123999 - DNA, 25 bp, SARS Virus
cttcatggtagaacccgactcgaga

SEQ ID NO: 124000 - DNA, 25 bp, SARS Virus
ttcatggtagacaccgactcgagaa

SEQ ID NO: 124001 - DNA, 25 bp, SARS Virus
tcatggtagaccacgactcgagaaa

SEQ ID NO: 124002 - DNA, 25 bp, SARS Virus
catggtagacccagactcgagaaag

SEQ ID NO: 124003 - DNA, 25 bp, SARS Virus
atggtagaccccaactcgagaaagt

SEQ ID NO: 124004 - DNA, 25 bp, SARS Virus
tggtagaccccgactcgagaaagta

SEQ ID NO: 124005 - DNA, 25 bp, SARS Virus
ggtagaccccgaatcgagaaagtaa

SEQ ID NO: 124006 - DNA, 25 bp, SARS Virus
gtagaccccgacacgagaaagtaaa

SEQ ID NO: 124007 - DNA, 25 bp, SARS Virus
tagaccccgactagagaaagtaaaa

SEQ ID NO: 124008 - DNA, 25 bp, SARS Virus
agaccccgactcaagaaagtaaaac

SEQ ID NO: 124009 - DNA, 25 bp, SARS Virus
gaccccgactcgagaaagtaaaacg

SEQ ID NO: 124010 - DNA, 25 bp, SARS Virus
accccgactcgaaaaagtaaaacgg

SEQ ID NO: 124011 - DNA, 25 bp, SARS Virus
ccccgactcgagaaagtaaaacggc

SEQ ID NO: 124012 - DNA, 25 bp, SARS Virus
cccgactcgagaaagtaaaacggca

SEQ ID NO: 124013 - DNA, 25 bp, SARS Virus
ccgactcgagaaagtaaaacggcag

SEQ ID NO: 124014 - DNA, 25 bp, SARS Virus
cgactcgagaaaataaaacggcagt

SEQ ID NO: 124015 - DNA, 25 bp, SARS Virus
gactcgagaaagaaaaacggcagtg

SEQ ID NO: 124016 - DNA, 25 bp, SARS Virus
actcgagaaagtaaaacggcagtgg

SEQ ID NO: 124017 - DNA, 25 bp, SARS Virus
ctcgagaaagtaaaacggcagtggt

SEQ ID NO: 124018 - DNA, 25 bp, SARS Virus
tcgagaaagtaaaacggcagtggtg

SEQ ID NO: 124019 - DNA, 25 bp, SARS Virus
cgagaaagtaaaacggcagtggtgg

SEQ ID NO: 124020 - DNA, 25 bp, SARS Virus
gagaaagtaaaaaggcagtggtggt

SEQ ID NO: 124021 - DNA, 25 bp, SARS Virus
agaaagtaaaacagcagtggtggtg

SEQ ID NO: 124022 - DNA, 25 bp, SARS Virus
gaaagtaaaacgacagtggtggtgc

SEQ ID NO: 124023 - DNA, 25 bp, SARS Virus
aaagtaaaacggaagtggtggtgct

SEQ ID NO: 124024 - DNA, 25 bp, SARS Virus
aagtaaaacggcagtggtggtgctt

SEQ ID NO: 124025 - DNA, 25 bp, SARS Virus
agtaaaacggcaatggtggtgcttg

SEQ ID NO: 124026 - DNA, 25 bp, SARS Virus
gtaaaacggcagaggtggtgcttga

SEQ ID NO: 124027 - DNA, 25 bp, SARS Virus
taaaacggcagtagtggtgcttgag

SEQ ID NO: 124028 - DNA, 25 bp, SARS Virus
aaaacggcagtgatggtgcttgagc

SEQ ID NO: 124029 - DNA, 25 bp, SARS Virus
aaacggcagtggaggtgcttgagca

SEQ ID NO: 124030 - DNA, 25 bp, SARS Virus
aacggcagtggtagtgcttgagcag

SEQ ID NO: 124031 - DNA, 25 bp, SARS Virus
acggcagtggtgatgcttgagcagc

SEQ ID NO: 124032 - DNA, 25 bp, SARS Virus
cggcagtggtggagcttgagcagcc

SEQ ID NO: 124033 - DNA, 25 bp, SARS Virus
ggcagtggtggtacttgagcagccc

SEQ ID NO: 124034 - DNA, 25 bp, SARS Virus
gcagtggtggtgattgagcagccca

SEQ ID NO: 124035 - DNA, 25 bp, SARS Virus
cagtggtggtgcatgagcagcccat

SEQ ID NO: 124036 - DNA, 25 bp, SARS Virus
agtggtggtgctagagcagcccatc

SEQ ID NO: 124037 - DNA, 25 bp, SARS Virus
gtggtggtgcttaagcagcccatcg

SEQ ID NO: 124038 - DNA, 25 bp, SARS Virus
tggtggtgcttgagcagcccatcga

SEQ ID NO: 124039 - DNA, 25 bp, SARS Virus
ggtggtgcttgaacagcccatcgag

SEQ ID NO: 124040 - DNA, 25 bp, SARS Virus
gtggtgcttgagaagcccatcgaga

SEQ ID NO: 124041 - DNA, 25 bp, SARS Virus
tggtgcttgagcagcccatcgagaa

SEQ ID NO: 124042 - DNA, 25 bp, SARS Virus
ggtgcttgagcaacccatcgagaag

SEQ ID NO: 124043 - DNA, 25 bp, SARS Virus
gtgcttgagcagaccatcgagaagc

SEQ ID NO: 124044 - DNA, 25 bp, SARS Virus
tgcttgagcagcacatcgagaagcc

SEQ ID NO: 124045 - DNA, 25 bp, SARS Virus
gcttgagcagccaatcgagaagcca

SEQ ID NO: 124046 - DNA, 25 bp, SARS Virus
cttgagcagcccatcgagaagccat

SEQ ID NO: 124047 - DNA, 25 bp, SARS Virus
ttgagcagcccaacgagaagccatc

SEQ ID NO: 124048 - DNA, 25 bp, SARS Virus
tgagcagcccatagagaagccatca

SEQ ID NO: 124049 - DNA, 25 bp, SARS Virus
gagcagcccatcaagaagccatcat

SEQ ID NO: 124050 - DNA, 25 bp, SARS Virus
agcagcccatcgagaagccatcatc

SEQ ID NO: 124051 - DNA, 25 bp, SARS Virus
gcagcccatcgaaaagccatcatcg

SEQ ID NO: 124052 - DNA, 25 bp, SARS Virus
cagcccatcgagaagccatcatcgg

SEQ ID NO: 124053 - DNA, 25 bp, SARS Virus
agcccatcgagaagccatcatcggt

SEQ ID NO: 124054 - DNA, 25 bp, SARS Virus
gcccatcgagaaaccatcatcggtt

SEQ ID NO: 124055 - DNA, 25 bp, SARS Virus
cccatcgagaagacatcatcggtta

SEQ ID NO: 124056 - DNA, 25 bp, SARS Virus
ccatcgagaagcaatcatcggttaa

SEQ ID NO: 124057 - DNA, 25 bp, SARS Virus
catcgagaagccatcatcggttaaa

SEQ ID NO: 124058 - DNA, 25 bp, SARS Virus
atcgagaagccaacatcggttaaac

SEQ ID NO: 124059 - DNA, 25 bp, SARS Virus
tcgagaagccataatcggttaaacc

SEQ ID NO: 124060 - DNA, 25 bp, SARS Virus
cgagaagccatcatcggttaaacca

SEQ ID NO: 124061 - DNA, 25 bp, SARS Virus
gagaagccatcaacggttaaaccag

SEQ ID NO: 124062 - DNA, 25 bp, SARS Virus
agaagccatcataggttaaaccagt

SEQ ID NO: 124063 - DNA, 25 bp, SARS Virus
gaagccatcatcagttaaaccagta

SEQ ID NO: 124064 - DNA, 25 bp, SARS Virus
aagccatcatcgattaaaccagtag

SEQ ID NO: 124065 - DNA, 25 bp, SARS Virus
agccatcatcggataaaccagtaga

SEQ ID NO: 124066 - DNA, 25 bp, SARS Virus
gccatcatcggtaaaaccagtagac

SEQ ID NO: 124067 - DNA, 25 bp, SARS Virus
ccatcatcggttaaaccagtagacc

SEQ ID NO: 124068 - DNA, 25 bp, SARS Virus
catcatcggttaaaccagtagacct

SEQ ID NO: 124069 - DNA, 25 bp, SARS Virus
atcatcggttaaaccagtagacctg

SEQ ID NO: 124070 - DNA, 25 bp, SARS Virus
tcatcggttaaaacagtagacctgg

SEQ ID NO: 124071 - DNA, 25 bp, SARS Virus
catcggttaaacaagtagacctggt

SEQ ID NO: 124072 - DNA, 25 bp, SARS Virus
atcggttaaaccagtagacctggtg

SEQ ID NO: 124073 - DNA, 25 bp, SARS Virus
tcggttaaaccaatagacctggtga

SEQ ID NO: 124074 - DNA, 25 bp, SARS Virus
cggttaaaccagaagacctggtgat

SEQ ID NO: 124075 - DNA, 25 bp, SARS Virus
ggttaaaccagtagacctggtgata

SEQ ID NO: 124076 - DNA, 25 bp, SARS Virus
gttaaaccagtaaacctggtgataa

SEQ ID NO: 124077 - DNA, 25 bp, SARS Virus
ttaaaccagtagacctggtgataac

SEQ ID NO: 124078 - DNA, 25 bp, SARS Virus
taaaccagtagaactggtgataacc

SEQ ID NO: 124079 - DNA, 25 bp, SARS Virus
aaaccagtagacatggtgataacca

SEQ ID NO: 124080 - DNA, 25 bp, SARS Virus
aaccagtagaccaggtgataaccac

SEQ ID NO: 124081 - DNA, 25 bp, SARS Virus
accagtagacctagtgataaccaca

SEQ ID NO: 124082 - DNA, 25 bp, SARS Virus
ccagtagacctgatgataaccacaa

SEQ ID NO: 124083 - DNA, 25 bp, SARS Virus
cagtagacctggagataaccacaac

SEQ ID NO: 124084 - DNA, 25 bp, SARS Virus
agtagacctggtaataaccacaact

SEQ ID NO: 124085 - DNA, 25 bp, SARS Virus
gtagacctggtgataaccacaacta

SEQ ID NO: 124086 - DNA, 25 bp, SARS Virus
tagacctggtgaaaaccacaactaa

SEQ ID NO: 124087 - DNA, 25 bp, SARS Virus
agacctggtgataaccacaactaac

SEQ ID NO: 124088 - DNA, 25 bp, SARS Virus
gacctggtgataaccacaactaacc

SEQ ID NO: 124089 - DNA, 25 bp, SARS Virus
acctggtgataaacacaactaacct

SEQ ID NO: 124090 - DNA, 25 bp, SARS Virus
cctggtgataacaacaactaacctt

SEQ ID NO: 124091 - DNA, 25 bp, SARS Virus
ctggtgataaccacaactaaccttg

SEQ ID NO: 124092 - DNA, 25 bp, SARS Virus
tggtgataaccaaaactaaccttgc

SEQ ID NO: 124093 - DNA, 25 bp, SARS Virus
ggtgataaccacaactaaccttgcg

SEQ ID NO: 124094 - DNA, 25 bp, SARS Virus
gtgataaccacaactaaccttgcgg

SEQ ID NO: 124095 - DNA, 25 bp, SARS Virus
tgataaccacaaataaccttgcggg

SEQ ID NO: 124096 - DNA, 25 bp, SARS Virus
gataaccacaacaaaccttgcggga

SEQ ID NO: 124097 - DNA, 25 bp, SARS Virus
ataaccacaactaaccttgcgggac

SEQ ID NO: 124098 - DNA, 25 bp, SARS Virus
taaccacaactaaccttgcgggacc

SEQ ID NO: 124099 - DNA, 25 bp, SARS Virus
aaccacaactaaacttgcgggaccg

SEQ ID NO: 124100 - DNA, 25 bp, SARS Virus
accacaactaacattgcgggaccgg

SEQ ID NO: 124101 - DNA, 25 bp, SARS Virus
ccacaactaaccatgcgggaccgga

SEQ ID NO: 124102 - DNA, 25 bp, SARS Virus
cacaactaacctagcgggaccggag

SEQ ID NO: 124103 - DNA, 25 bp, SARS Virus
acaactaaccttacgggaccggagc

SEQ ID NO: 124104 - DNA, 25 bp, SARS Virus
caactaaccttgagggaccggagct

SEQ ID NO: 124105 - DNA, 25 bp, SARS Virus
aactaaccttgcaggaccggagctc

SEQ ID NO: 124106 - DNA, 25 bp, SARS Virus
actaaccttgcgagaccggagctcc

SEQ ID NO: 124107 - DNA, 25 bp, SARS Virus
ctaaccttgcggaaccggagctccc

SEQ ID NO: 124108 - DNA, 25 bp, SARS Virus
taaccttgcgggaccggagctccct

SEQ ID NO: 124109 - DNA, 25 bp, SARS Virus
aaccttgcgggaacggagctccctt

SEQ ID NO: 124110 - DNA, 25 bp, SARS Virus
accttgcgggacaggagctccctta

SEQ ID NO: 124111 - DNA, 25 bp, SARS Virus
ccttgcgggaccagagctcccttag

SEQ ID NO: 124112 - DNA, 25 bp, SARS Virus
cttgcgggaccgaagctcccttaga

SEQ ID NO: 124113 - DNA, 25 bp, SARS Virus
ttgcgggaccggagctcccttagat

SEQ ID NO: 124114 - DNA, 25 bp, SARS Virus
tgcgggaccggaactcccttagatt

SEQ ID NO: 124115 - DNA, 25 bp, SARS Virus
gcgggaccggagatcccttagattc

SEQ ID NO: 124116 - DNA, 25 bp, SARS Virus
cgggaccggagcacccttagattca

SEQ ID NO: 124117 - DNA, 25 bp, SARS Virus
gggaccggagctaccttagattcaa

SEQ ID NO: 124118 - DNA, 25 bp, SARS Virus
ggaccggagctcacttagattcaag

SEQ ID NO: 124119 - DNA, 25 bp, SARS Virus
gaccggagctccattagattcaagg

SEQ ID NO: 124120 - DNA, 25 bp, SARS Virus
accggagctcccatagattcaagga

SEQ ID NO: 124121 - DNA, 25 bp, SARS Virus
ccggagctccctaagattcaaggag

SEQ ID NO: 124122 - DNA, 25 bp, SARS Virus
cggagctcccttagattcaaggagg

SEQ ID NO: 124123 - DNA, 25 bp, SARS Virus
ggagctcccttaaattcaaggagga

SEQ ID NO: 124124 - DNA, 25 bp, SARS Virus
gagctcccttagattcaaggaggaa

SEQ ID NO: 124125 - DNA, 25 bp, SARS Virus
agctcccttagaatcaaggaggaac

SEQ ID NO: 124126 - DNA, 25 bp, SARS Virus
gctcccttagatacaaggaggaacg

SEQ ID NO: 124127 - DNA, 25 bp, SARS Virus
ctcccttagattaaaggaggaacgg

SEQ ID NO: 124128 - DNA, 25 bp, SARS Virus
tcccttagattcaaggaggaacggt

SEQ ID NO: 124129 - DNA, 25 bp, SARS Virus
cccttagattcaaggaggaacggta

SEQ ID NO: 124130 - DNA, 25 bp, SARS Virus
ccttagattcaaagaggaacggtac

SEQ ID NO: 124131 - DNA, 25 bp, SARS Virus
cttagattcaagaaggaacggtacg

SEQ ID NO: 124132 - DNA, 25 bp, SARS Virus
ttagattcaaggaggaacggtacga

SEQ ID NO: 124133 - DNA, 25 bp, SARS Virus
tagattcaaggaagaacggtacgac

SEQ ID NO: 124134 - DNA, 25 bp, SARS Virus
agattcaaggagaaacggtacgact

SEQ ID NO: 124135 - DNA, 25 bp, SARS Virus
gattcaaggaggaacggtacgactc

SEQ ID NO: 124136 - DNA, 25 bp, SARS Virus
attcaaggaggaacggtacgactca

SEQ ID NO: 124137 - DNA, 25 bp, SARS Virus
ttcaaggaggaaaggtacgactcac

SEQ ID NO: 124138 - DNA, 25 bp, SARS Virus
tcaaggaggaacagtacgactcact

SEQ ID NO: 124139 - DNA, 25 bp, SARS Virus
caaggaggaacgatacgactcactc

SEQ ID NO: 124140 - DNA, 25 bp, SARS Virus
aaggaggaacggaacgactcactct

SEQ ID NO: 124141 - DNA, 25 bp, SARS Virus
aggaggaacggtacgactcactctc

SEQ ID NO: 124142 - DNA, 25 bp, SARS Virus
ggaggaacggtaagactcactctcg

SEQ ID NO: 124143 - DNA, 25 bp, SARS Virus
gaggaacggtacaactcactctcga

SEQ ID NO: 124144 - DNA, 25 bp, SARS Virus
aggaacggtacgactcactctcgac

SEQ ID NO: 124145 - DNA, 25 bp, SARS Virus
ggaacggtacgaatcactctcgaca

SEQ ID NO: 124146 - DNA, 25 bp, SARS Virus
gaacggtacgacacactctcgacac

SEQ ID NO: 124147 - DNA, 25 bp, SARS Virus
aacggtacgactaactctcgacact

SEQ ID NO: 124148 - DNA, 25 bp, SARS Virus
acggtacgactcactctcgacactt

SEQ ID NO: 124149 - DNA, 25 bp, SARS Virus
cggtacgactcaatctcgacacttg

SEQ ID NO: 124150 - DNA, 25 bp, SARS Virus
ggtacgactcacactcgacacttgg

SEQ ID NO: 124151 - DNA, 25 bp, SARS Virus
gtacgactcactatcgacacttggt

SEQ ID NO: 124152 - DNA, 25 bp, SARS Virus
tacgactcactcacgacacttggtt

SEQ ID NO: 124153 - DNA, 25 bp, SARS Virus
acgactcactctagacacttggttc

SEQ ID NO: 124154 - DNA, 25 bp, SARS Virus
cgactcactctcaacacttggttct

SEQ ID NO: 124155 - DNA, 25 bp, SARS Virus
gactcactctcgacacttggttctg

SEQ ID NO: 124156 - DNA, 25 bp, SARS Virus
actcactctcgaaacttggttctgc

SEQ ID NO: 124157 - DNA, 25 bp, SARS Virus
ctcactctcgacacttggttctgcg

SEQ ID NO: 124158 - DNA, 25 bp, SARS Virus
tcactctcgacaattggttctgcgt

SEQ ID NO: 124159 - DNA, 25 bp, SARS Virus
cactctcgacacatggttctgcgtc

SEQ ID NO: 124160 - DNA, 25 bp, SARS Virus
actctcgacactaggttctgcgtca

SEQ ID NO: 124161 - DNA, 25 bp, SARS Virus
ctctcgacacttagttctgcgtcat

SEQ ID NO: 124162 - DNA, 25 bp, SARS Virus
tctcgacacttgattctgcgtcata

SEQ ID NO: 124163 - DNA, 25 bp, SARS Virus
ctcgacacttggatctgcgtcataa

SEQ ID NO: 124164 - DNA, 25 bp, SARS Virus
tcgacacttggtactgcgtcataat

SEQ ID NO: 124165 - DNA, 25 bp, SARS Virus
cgacacttggttatgcgtcataata

SEQ ID NO: 124166 - DNA, 25 bp, SARS Virus
gacacttggttcagcgtcataataa

SEQ ID NO: 124167 - DNA, 25 bp, SARS Virus
acacttggttctacgtcataataac

SEQ ID NO: 124168 - DNA, 25 bp, SARS Virus
cacttggttctgagtcataataacc

SEQ ID NO: 124169 - DNA, 25 bp, SARS Virus
acttggttctgcatcataataaccc

SEQ ID NO: 124170 - DNA, 25 bp, SARS Virus
cttggttctgcgacataataaccca

SEQ ID NO: 124171 - DNA, 25 bp, SARS Virus
ttggttctgcgtaataataacccat

SEQ ID NO: 124172 - DNA, 25 bp, SARS Virus
tggttctgcgtcataataacccatt

SEQ ID NO: 124173 - DNA, 25 bp, SARS Virus
ggttctgcgtcaaaataacccattt

SEQ ID NO: 124174 - DNA, 25 bp, SARS Virus
gttctgcgtcataataacccatttg

SEQ ID NO: 124175 - DNA, 25 bp, SARS Virus
ttctgcgtcataataacccatttgg

SEQ ID NO: 124176 - DNA, 25 bp, SARS Virus
tctgcgtcataaaaacccatttgga

SEQ ID NO: 124177 - DNA, 25 bp, SARS Virus
ctgcgtcataataacccatttggaa

SEQ ID NO: 124178 - DNA, 25 bp, SARS Virus
tgcgtcataataacccatttggaac

SEQ ID NO: 124179 - DNA, 25 bp, SARS Virus
gcgtcataataaaccatttggaacc

SEQ ID NO: 124180 - DNA, 25 bp, SARS Virus
cgtcataataacacatttggaaccc

SEQ ID NO: 124181 - DNA, 25 bp, SARS Virus
gtcataataaccaatttggaacccc

SEQ ID NO: 124182 - DNA, 25 bp, SARS Virus
tcataataacccatttggaacccca

SEQ ID NO: 124183 - DNA, 25 bp, SARS Virus
cataataacccaattggaaccccag

SEQ ID NO: 124184 - DNA, 25 bp, SARS Virus
ataataacccatatggaaccccagc

SEQ ID NO: 124185 - DNA, 25 bp, SARS Virus
taataacccattaggaaccccagcc

SEQ ID NO: 124186 - DNA, 25 bp, SARS Virus
aataacccatttagaaccccagccg

SEQ ID NO: 124187 - DNA, 25 bp, SARS Virus
ataacccatttgaaaccccagccgc

SEQ ID NO: 124188 - DNA, 25 bp, SARS Virus
taacccatttggaaccccagccgcg

SEQ ID NO: 124189 - DNA, 25 bp, SARS Virus
aacccatttggaaccccagccgcga

SEQ ID NO: 124190 - DNA, 25 bp, SARS Virus
acccatttggaaacccagccgcgac

SEQ ID NO: 124191 - DNA, 25 bp, SARS Virus
cccatttggaacaccagccgcgaca

SEQ ID NO: 124192 - DNA, 25 bp, SARS Virus
ccatttggaaccacagccgcgacaa

SEQ ID NO: 124193 - DNA, 25 bp, SARS Virus
catttggaacccaagccgcgacaaa

SEQ ID NO: 124194 - DNA, 25 bp, SARS Virus
atttggaaccccagccgcgacaaaa

SEQ ID NO: 124195 - DNA, 25 bp, SARS Virus
tttggaaccccaaccgcgacaaaac

SEQ ID NO: 124196 - DNA, 25 bp, SARS Virus
ttggaaccccagacgcgacaaaacc

SEQ ID NO: 124197 - DNA, 25 bp, SARS Virus
tggaaccccagcagcgacaaaaccg

SEQ ID NO: 124198 - DNA, 25 bp, SARS Virus
ggaaccccagccacgacaaaaccgg

SEQ ID NO: 124199 - DNA, 25 bp, SARS Virus
gaaccccagccgagacaaaaccgga

SEQ ID NO: 124200 - DNA, 25 bp, SARS Virus
aaccccagccgcaacaaaaccggaa

SEQ ID NO: 124201 - DNA, 25 bp, SARS Virus
accccagccgcgacaaaaccggaac

SEQ ID NO: 124202 - DNA, 25 bp, SARS Virus
ccccagccgcgaaaaaaccggaacg

SEQ ID NO: 124203 - DNA, 25 bp, SARS Virus
cccagccgcgacaaaaccggaacgg

SEQ ID NO: 124204 - DNA, 25 bp, SARS Virus
ccagccgcgacaaaaccggaacggg

SEQ ID NO: 124205 - DNA, 25 bp, SARS Virus
cagccgcgacaaaaccggaacgggg

SEQ ID NO: 124206 - DNA, 25 bp, SARS Virus
agccgcgacaaaaccggaacggggt

SEQ ID NO: 124207 - DNA, 25 bp, SARS Virus
gccgcgacaaaaacggaacggggta

SEQ ID NO: 124208 - DNA, 25 bp, SARS Virus
ccgcgacaaaacaggaacggggtaa

SEQ ID NO: 124209 - DNA, 25 bp, SARS Virus
cgcgacaaaaccagaacggggtaac

SEQ ID NO: 124210 - DNA, 25 bp, SARS Virus
gcgacaaaaccgaaacggggtaacg

SEQ ID NO: 124211 - DNA, 25 bp, SARS Virus
cgacaaaaccggaacggggtaacgc

SEQ ID NO: 124212 - DNA, 25 bp, SARS Virus
gacaaaaccggaacggggtaacgca

SEQ ID NO: 124213 - DNA, 25 bp, SARS Virus
acaaaaccggaaaggggtaacgcag

SEQ ID NO: 124214 - DNA, 25 bp, SARS Virus
caaaaccggaacagggtaacgcagg

SEQ ID NO: 124215 - DNA, 25 bp, SARS Virus
aaaaccggaacgaggtaacgcagga

SEQ ID NO: 124216 - DNA, 25 bp, SARS Virus
aaaccggaacggagtaacgcaggag

SEQ ID NO: 124217 - DNA, 25 bp, SARS Virus
aaccggaacgggataacgcaggagg

SEQ ID NO: 124218 - DNA, 25 bp, SARS Virus
accggaacggggaaacgcaggaggt

SEQ ID NO: 124219 - DNA, 25 bp, SARS Virus
ccggaacggggtaacgcaggaggta

SEQ ID NO: 124220 - DNA, 25 bp, SARS Virus
cggaacggggtaacgcaggaggtaa

SEQ ID NO: 124221 - DNA, 25 bp, SARS Virus
ggaacggggtaaagcaggaggtaag

SEQ ID NO: 124222 - DNA, 25 bp, SARS Virus
gaacggggtaacacaggaggtaaga

SEQ ID NO: 124223 - DNA, 25 bp, SARS Virus
aacggggtaacgaaggaggtaagac

SEQ ID NO: 124224 - DNA, 25 bp, SARS Virus
acggggtaacgcaggaggtaagacc

SEQ ID NO: 124225 - DNA, 25 bp, SARS Virus
cggggtaacgcaagaggtaagacca

SEQ ID NO: 124226 - DNA, 25 bp, SARS Virus
ggggtaacgcagaaggtaagaccaa

SEQ ID NO: 124227 - DNA, 25 bp, SARS Virus
gggtaacgcaggaggtaagaccaat

SEQ ID NO: 124228 - DNA, 25 bp, SARS Virus
ggtaacgcaggaagtaagaccaata

SEQ ID NO: 124229 - DNA, 25 bp, SARS Virus
gtaacgcaggagataagaccaataa

SEQ ID NO: 124230 - DNA, 25 bp, SARS Virus
taacgcaggaggaaagaccaataac

SEQ ID NO: 124231 - DNA, 25 bp, SARS Virus
aacgcaggaggtaagaccaataaca

SEQ ID NO: 124232 - DNA, 25 bp, SARS Virus
acgcaggaggtaagaccaataacag

SEQ ID NO: 124233 - DNA, 25 bp, SARS Virus
cgcaggaggtaaaaccaataacagt

SEQ ID NO: 124234 - DNA, 25 bp, SARS Virus
gcaggaggtaagaccaataacagtc

SEQ ID NO: 124235 - DNA, 25 bp, SARS Virus
caggaggtaagaacaataacagtca

SEQ ID NO: 124236 - DNA, 25 bp, SARS Virus
aggaggtaagacaaataacagtcaa

SEQ ID NO: 124237 - DNA, 25 bp, SARS Virus
ggaggtaagaccaataacagtcaac

SEQ ID NO: 124238 - DNA, 25 bp, SARS Virus
gaggtaagaccaataacagtcaact

SEQ ID NO: 124239 - DNA, 25 bp, SARS Virus
aggtaagaccaaaaacagtcaactt

SEQ ID NO: 124240 - DNA, 25 bp, SARS Virus
ggtaagaccaataacagtcaactta

SEQ ID NO: 124241 - DNA, 25 bp, SARS Virus
gtaagaccaataacagtcaacttag

SEQ ID NO: 124242 - DNA, 25 bp, SARS Virus
taagaccaataaaagtcaacttaga

SEQ ID NO: 124243 - DNA, 25 bp, SARS Virus
aagaccaataacagtcaacttagac

SEQ ID NO: 124244 - DNA, 25 bp, SARS Virus
agaccaataacaatcaacttagaca

SEQ ID NO: 124245 - DNA, 25 bp, SARS Virus
gaccaataacagacaacttagacac

SEQ ID NO: 124246 - DNA, 25 bp, SARS Virus
accaataacagtaaacttagacacc

SEQ ID NO: 124247 - DNA, 25 bp, SARS Virus
ccaataacagtcaacttagacaccc

SEQ ID NO: 124248 - DNA, 25 bp, SARS Virus
caataacagtcaacttagacaccca

SEQ ID NO: 124249 - DNA, 25 bp, SARS Virus
aataacagtcaaattagacacccag

SEQ ID NO: 124250 - DNA, 25 bp, SARS Virus
ataacagtcaacatagacacccagg

SEQ ID NO: 124251 - DNA, 25 bp, SARS Virus
taacagtcaactaagacacccaggt

SEQ ID NO: 124252 - DNA, 25 bp, SARS Virus
aacagtcaacttagacacccaggtg

SEQ ID NO: 124253 - DNA, 25 bp, SARS Virus
acagtcaacttaaacacccaggtgg

SEQ ID NO: 124254 - DNA, 25 bp, SARS Virus
cagtcaacttagacacccaggtggt

SEQ ID NO: 124255 - DNA, 25 bp, SARS Virus
agtcaacttagaaacccaggtggtt

SEQ ID NO: 124256 - DNA, 25 bp, SARS Virus
gtcaacttagacacccaggtggttt

SEQ ID NO: 124257 - DNA, 25 bp, SARS Virus
tcaacttagacaaccaggtggttta

SEQ ID NO: 124258 - DNA, 25 bp, SARS Virus
caacttagacacacaggtggtttac

SEQ ID NO: 124259 - DNA, 25 bp, SARS Virus
aacttagacaccaaggtggtttaca

SEQ ID NO: 124260 - DNA, 25 bp, SARS Virus
acttagacacccaggtggtttacat

SEQ ID NO: 124261 - DNA, 25 bp, SARS Virus
cttagacacccaagtggtttacatt

SEQ ID NO: 124262 - DNA, 25 bp, SARS Virus
ttagacacccagatggtttacatta

SEQ ID NO: 124263 - DNA, 25 bp, SARS Virus
tagacacccaggaggtttacattac

SEQ ID NO: 124264 - DNA, 25 bp, SARS Virus
agacacccaggtagtttacattacg

SEQ ID NO: 124265 - DNA, 25 bp, SARS Virus
gacacccaggtgatttacattacgc

SEQ ID NO: 124266 - DNA, 25 bp, SARS Virus
acacccaggtggattacattacgcc

SEQ ID NO: 124267 - DNA, 25 bp, SARS Virus
cacccaggtggtatacattacgccc

SEQ ID NO: 124268 - DNA, 25 bp, SARS Virus
acccaggtggttaacattacgcccc

SEQ ID NO: 124269 - DNA, 25 bp, SARS Virus
cccaggtggtttacattacgccccc

SEQ ID NO: 124270 - DNA, 25 bp, SARS Virus
ccaggtggtttaaattacgcccccc

SEQ ID NO: 124271 - DNA, 25 bp, SARS Virus
caggtggtttacattacgccccccg

SEQ ID NO: 124272 - DNA, 25 bp, SARS Virus
aggtggtttacaatacgccccccgt

SEQ ID NO: 124273 - DNA, 25 bp, SARS Virus
ggtggtttacataacgccccccgtg

SEQ ID NO: 124274 - DNA, 25 bp, SARS Virus
gtggtttacattacgccccccgtga

SEQ ID NO: 124275 - DNA, 25 bp, SARS Virus
tggtttacattaagccccccgtgat

SEQ ID NO: 124276 - DNA, 25 bp, SARS Virus
ggtttacattacaccccccgtgatg

SEQ ID NO: 124277 - DNA, 25 bp, SARS Virus
gtttacattacgacccccgtgatgc

SEQ ID NO: 124278 - DNA, 25 bp, SARS Virus
tttacattacgcaccccgtgatgca

SEQ ID NO: 124279 - DNA, 25 bp, SARS Virus
ttacattacgccacccgtgatgcaa

SEQ ID NO: 124280 - DNA, 25 bp, SARS Virus
tacattacgcccaccgtgatgcaac

SEQ ID NO: 124281 - DNA, 25 bp, SARS Virus
acattacgccccacgtgatgcaacc

SEQ ID NO: 124282 - DNA, 25 bp, SARS Virus
cattacgcccccagtgatgcaacca

SEQ ID NO: 124283 - DNA, 25 bp, SARS Virus
attacgccccccatgatgcaaccaa

SEQ ID NO: 124284 - DNA, 25 bp, SARS Virus
ttacgccccccgagatgcaaccaaa

SEQ ID NO: 124285 - DNA, 25 bp, SARS Virus
tacgccccccgtaatgcaaccaaac

SEQ ID NO: 124286 - DNA, 25 bp, SARS Virus
acgccccccgtgatgcaaccaaact

SEQ ID NO: 124287 - DNA, 25 bp, SARS Virus
cgccccccgtgaagcaaccaaacta

SEQ ID NO: 124288 - DNA, 25 bp, SARS Virus
gccccccgtgatacaaccaaactaa

SEQ ID NO: 124289 - DNA, 25 bp, SARS Virus
ccccccgtgatgaaaccaaactaac

SEQ ID NO: 124290 - DNA, 25 bp, SARS Virus
cccccgtgatgcaaccaaactaacc

SEQ ID NO: 124291 - DNA, 25 bp, SARS Virus
ccccgtgatgcaaccaaactaaccc

SEQ ID NO: 124292 - DNA, 25 bp, SARS Virus
cccgtgatgcaaacaaactaacccc

SEQ ID NO: 124293 - DNA, 25 bp, SARS Virus
ccgtgatgcaacaaaactaacccca

SEQ ID NO: 124294 - DNA, 25 bp, SARS Virus
cgtgatgcaaccaaactaaccccag

SEQ ID NO: 124295 - DNA, 25 bp, SARS Virus
gtgatgcaaccaaactaaccccagg

SEQ ID NO: 124296 - DNA, 25 bp, SARS Virus
tgatgcaaccaaactaaccccaggt

SEQ ID NO: 124297 - DNA, 25 bp, SARS Virus
gatgcaaccaaaataaccccaggta

SEQ ID NO: 124298 - DNA, 25 bp, SARS Virus
atgcaaccaaacaaaccccaggtaa

SEQ ID NO: 124299 - DNA, 25 bp, SARS Virus
tgcaaccaaactaaccccaggtaat

SEQ ID NO: 124300 - DNA, 25 bp, SARS Virus
gcaaccaaactaaccccaggtaata

SEQ ID NO: 124301 - DNA, 25 bp, SARS Virus
caaccaaactaaacccaggtaatag

SEQ ID NO: 124302 - DNA, 25 bp, SARS Virus
aaccaaactaacaccaggtaatagt

SEQ ID NO: 124303 - DNA, 25 bp, SARS Virus
accaaactaaccacaggtaatagtc

SEQ ID NO: 124304 - DNA, 25 bp, SARS Virus
ccaaactaacccaaggtaatagtct

SEQ ID NO: 124305 - DNA, 25 bp, SARS Virus
caaactaaccccaggtaatagtctg

SEQ ID NO: 124306 - DNA, 25 bp, SARS Virus
aaactaaccccaagtaatagtctgt

SEQ ID NO: 124307 - DNA, 25 bp, SARS Virus
aactaaccccagataatagtctgta

SEQ ID NO: 124308 - DNA, 25 bp, SARS Virus
actaaccccaggaaatagtctgtaa

SEQ ID NO: 124309 - DNA, 25 bp, SARS Virus
ctaaccccaggtaatagtctgtaaa

SEQ ID NO: 124310 - DNA, 25 bp, SARS Virus
taaccccaggtaatagtctgtaaaa

SEQ ID NO: 124311 - DNA, 25 bp, SARS Virus
aaccccaggtaaaagtctgtaaaat

SEQ ID NO: 124312 - DNA, 25 bp, SARS Virus
accccaggtaatagtctgtaaaatt

SEQ ID NO: 124313 - DNA, 25 bp, SARS Virus
ccccaggtaataatctgtaaaatta

SEQ ID NO: 124314 - DNA, 25 bp, SARS Virus
cccaggtaatagactgtaaaattaa

SEQ ID NO: 124315 - DNA, 25 bp, SARS Virus
ccaggtaatagtatgtaaaattaaa

SEQ ID NO: 124316 - DNA, 25 bp, SARS Virus
caggtaatagtcagtaaaattaaac

SEQ ID NO: 124317 - DNA, 25 bp, SARS Virus
aggtaatagtctataaaattaaaca

SEQ ID NO: 124318 - DNA, 25 bp, SARS Virus
ggtaatagtctgaaaaattaaacaa

SEQ ID NO: 124319 - DNA, 25 bp, SARS Virus
gtaatagtctgtaaaattaaacaag

SEQ ID NO: 124320 - DNA, 25 bp, SARS Virus
taatagtctgtaaaattaaacaagc

SEQ ID NO: 124321 - DNA, 25 bp, SARS Virus
aatagtctgtaaaattaaacaagca

SEQ ID NO: 124322 - DNA, 25 bp, SARS Virus
atagtctgtaaaattaaacaagcaa

SEQ ID NO: 124323 - DNA, 25 bp, SARS Virus
tagtctgtaaaaataaacaagcaaa

SEQ ID NO: 124324 - DNA, 25 bp, SARS Virus
agtctgtaaaataaaacaagcaaat

SEQ ID NO: 124325 - DNA, 25 bp, SARS Virus
gtctgtaaaattaaacaagcaaata

SEQ ID NO: 124326 - DNA, 25 bp, SARS Virus
tctgtaaaattaaacaagcaaataa

SEQ ID NO: 124327 - DNA, 25 bp, SARS Virus
ctgtaaaattaaacaagcaaataaa

SEQ ID NO: 124328 - DNA, 25 bp, SARS Virus
tgtaaaattaaaaaagcaaataaat

SEQ ID NO: 124329 - DNA, 25 bp, SARS Virus
gtaaaattaaacaagcaaataaatt

SEQ ID NO: 124330 - DNA, 25 bp, SARS Virus
taaaattaaacaagcaaataaattt

SEQ ID NO: 124331 - DNA, 25 bp, SARS Virus
aaaattaaacaaacaaataaatttt

SEQ ID NO: 124332 - DNA, 25 bp, SARS Virus
aaattaaacaagaaaataaattttg

SEQ ID NO: 124333 - DNA, 25 bp, SARS Virus
aattaaacaagcaaataaattttgt

SEQ ID NO: 124334 - DNA, 25 bp, SARS Virus
attaaacaagcaaataaattttgtt

SEQ ID NO: 124335 - DNA, 25 bp, SARS Virus
ttaaacaagcaaataaattttgttg

SEQ ID NO: 124336 - DNA, 25 bp, SARS Virus
taaacaagcaaaaaaattttgttgt

SEQ ID NO: 124337 - DNA, 25 bp, SARS Virus
aaacaagcaaataaattttgttgtt

SEQ ID NO: 124338 - DNA, 25 bp, SARS Virus
aacaagcaaataaattttgttgttc

SEQ ID NO: 124339 - DNA, 25 bp, SARS Virus
acaagcaaataaattttgttgttca

SEQ ID NO: 124340 - DNA, 25 bp, SARS Virus
caagcaaataaaatttgttgttcat

SEQ ID NO: 124341 - DNA, 25 bp, SARS Virus
aagcaaataaatattgttgttcatg

SEQ ID NO: 124342 - DNA, 25 bp, SARS Virus
agcaaataaattatgttgttcatgc

SEQ ID NO: 124343 - DNA, 25 bp, SARS Virus
gcaaataaatttagttgttcatgca

SEQ ID NO: 124344 - DNA, 25 bp, SARS Virus
caaataaattttattgttcatgcag

SEQ ID NO: 124345 - DNA, 25 bp, SARS Virus
aaataaattttgatgttcatgcaga

SEQ ID NO: 124346 - DNA, 25 bp, SARS Virus
aataaattttgtagttcatgcagag

SEQ ID NO: 124347 - DNA, 25 bp, SARS Virus
ataaattttgttattcatgcagaga

SEQ ID NO: 124348 - DNA, 25 bp, SARS Virus
taaattttgttgatcatgcagagat

SEQ ID NO: 124349 - DNA, 25 bp, SARS Virus
aaattttgttgtacatgcagagatt

SEQ ID NO: 124350 - DNA, 25 bp, SARS Virus
aattttgttgttaatgcagagattt

SEQ ID NO: 124351 - DNA, 25 bp, SARS Virus
attttgttgttcatgcagagattta

SEQ ID NO: 124352 - DNA, 25 bp, SARS Virus
ttttgttgttcaagcagagatttac

SEQ ID NO: 124353 - DNA, 25 bp, SARS Virus
tttgttgttcatacagagatttacg

SEQ ID NO: 124354 - DNA, 25 bp, SARS Virus
ttgttgttcatgaagagatttacgt

SEQ ID NO: 124355 - DNA, 25 bp, SARS Virus
tgttgttcatgcagagatttacgtc

SEQ ID NO: 124356 - DNA, 25 bp, SARS Virus
gttgttcatgcaaagatttacgtcg

SEQ ID NO: 124357 - DNA, 25 bp, SARS Virus
ttgttcatgcagagatttacgtcgt

SEQ ID NO: 124358 - DNA, 25 bp, SARS Virus
tgttcatgcagaaatttacgtcgtc

SEQ ID NO: 124359 - DNA, 25 bp, SARS Virus
gttcatgcagagatttacgtcgtca

SEQ ID NO: 124360 - DNA, 25 bp, SARS Virus
ttcatgcagagaattacgtcgtcaa

SEQ ID NO: 124361 - DNA, 25 bp, SARS Virus
tcatgcagagatatacgtcgtcaaa

SEQ ID NO: 124362 - DNA, 25 bp, SARS Virus
catgcagagattaacgtcgtcaaac

SEQ ID NO: 124363 - DNA, 25 bp, SARS Virus
atgcagagatttacgtcgtcaaacc

SEQ ID NO: 124364 - DNA, 25 bp, SARS Virus
tgcagagatttaagtcgtcaaacca

SEQ ID NO: 124365 - DNA, 25 bp, SARS Virus
gcagagatttacatcgtcaaaccac

SEQ ID NO: 124366 - DNA, 25 bp, SARS Virus
cagagatttacgacgtcaaaccact

SEQ ID NO: 124367 - DNA, 25 bp, SARS Virus
agagatttacgtagtcaaaccactg

SEQ ID NO: 124368 - DNA, 25 bp, SARS Virus
gagatttacgtcatcaaaccactgg

SEQ ID NO: 124369 - DNA, 25 bp, SARS Virus
agatttacgtcgacaaaccactgga

SEQ ID NO: 124370 - DNA, 25 bp, SARS Virus
gatttacgtcgtaaaaccactggaa

SEQ ID NO: 124371 - DNA, 25 bp, SARS Virus
atttacgtcgtcaaaccactggaag

SEQ ID NO: 124372 - DNA, 25 bp, SARS Virus
tttacgtcgtcaaaccactggaagt

SEQ ID NO: 124373 - DNA, 25 bp, SARS Virus
ttacgtcgtcaaaccactggaagta

SEQ ID NO: 124374 - DNA, 25 bp, SARS Virus
tacgtcgtcaaaacactggaagtac

SEQ ID NO: 124375 - DNA, 25 bp, SARS Virus
acgtcgtcaaacaactggaagtact

SEQ ID NO: 124376 - DNA, 25 bp, SARS Virus
cgtcgtcaaaccactggaagtactt

SEQ ID NO: 124377 - DNA, 25 bp, SARS Virus
gtcgtcaaaccaatggaagtacttc

SEQ ID NO: 124378 - DNA, 25 bp, SARS Virus
tcgtcaaaccacaggaagtacttcc

SEQ ID NO: 124379 - DNA, 25 bp, SARS Virus
cgtcaaaccactagaagtacttcca

SEQ ID NO: 124380 - DNA, 25 bp, SARS Virus
gtcaaaccactgaaagtacttccat

SEQ ID NO: 124381 - DNA, 25 bp, SARS Virus
tcaaaccactggaagtacttccatg

SEQ ID NO: 124382 - DNA, 25 bp, SARS Virus
caaaccactggaagtacttccatgg

SEQ ID NO: 124383 - DNA, 25 bp, SARS Virus
aaaccactggaaatacttccatggt

SEQ ID NO: 124384 - DNA, 25 bp, SARS Virus
aaccactggaagaacttccatggtt

SEQ ID NO: 124385 - DNA, 25 bp, SARS Virus
accactggaagtacttccatggttg

SEQ ID NO: 124386 - DNA, 25 bp, SARS Virus
ccactggaagtaattccatggttgt

SEQ ID NO: 124387 - DNA, 25 bp, SARS Virus
cactggaagtacatccatggttgtg

SEQ ID NO: 124388 - DNA, 25 bp, SARS Virus
actggaagtactaccatggttgtgg

SEQ ID NO: 124389 - DNA, 25 bp, SARS Virus
ctggaagtacttacatggttgtgga

SEQ ID NO: 124390 - DNA, 25 bp, SARS Virus
tggaagtacttcaatggttgtggat

SEQ ID NO: 124391 - DNA, 25 bp, SARS Virus
ggaagtacttccatggttgtggatc

SEQ ID NO: 124392 - DNA, 25 bp, SARS Virus
gaagtacttccaaggttgtggatcg

SEQ ID NO: 124393 - DNA, 25 bp, SARS Virus
aagtacttccatagttgtggatcga

SEQ ID NO: 124394 - DNA, 25 bp, SARS Virus
agtacttccatgattgtggatcgat

SEQ ID NO: 124395 - DNA, 25 bp, SARS Virus
gtacttccatggatgtggatcgata

SEQ ID NO: 124396 - DNA, 25 bp, SARS Virus
tacttccatggtagtggatcgatat

SEQ ID NO: 124397 - DNA, 25 bp, SARS Virus
acttccatggttatggatcgatatt

SEQ ID NO: 124398 - DNA, 25 bp, SARS Virus
cttccatggttgaggatcgatattc

SEQ ID NO: 124399 - DNA, 25 bp, SARS Virus
ttccatggttgtagatcgatattcg

SEQ ID NO: 124400 - DNA, 25 bp, SARS Virus
tccatggttgtgaatcgatattcgc

SEQ ID NO: 124401 - DNA, 25 bp, SARS Virus
ccatggttgtggatcgatattcgcg

SEQ ID NO: 124402 - DNA, 25 bp, SARS Virus
catggttgtggaacgatattcgcgt

SEQ ID NO: 124403 - DNA, 25 bp, SARS Virus
atggttgtggatagatattcgcgtg

SEQ ID NO: 124404 - DNA, 25 bp, SARS Virus
tggttgtggatcaatattcgcgtgg

SEQ ID NO: 124405 - DNA, 25 bp, SARS Virus
ggttgtggatcgatattcgcgtggt

SEQ ID NO: 124406 - DNA, 25 bp, SARS Virus
gttgtggatcgaaattcgcgtggtg

SEQ ID NO: 124407 - DNA, 25 bp, SARS Virus
ttgtggatcgatattcgcgtggtgg

SEQ ID NO: 124408 - DNA, 25 bp, SARS Virus
tgtggatcgataatcgcgtggtggt

SEQ ID NO: 124409 - DNA, 25 bp, SARS Virus
gtggatcgatatacgcgtggtggtc

SEQ ID NO: 124410 - DNA, 25 bp, SARS Virus
tggatcgatattagcgtggtggtcg

SEQ ID NO: 124411 - DNA, 25 bp, SARS Virus
ggatcgatattcacgtggtggtcga

SEQ ID NO: 124412 - DNA, 25 bp, SARS Virus
gatcgatattcgagtggtggtcgac

SEQ ID NO: 124413 - DNA, 25 bp, SARS Virus
atcgatattcgcatggtggtcgacc

SEQ ID NO: 124414 - DNA, 25 bp, SARS Virus
tcgatattcgcgaggtggtcgacct

SEQ ID NO: 124415 - DNA, 25 bp, SARS Virus
cgatattcgcgtagtggtcgaccta

SEQ ID NO: 124416 - DNA, 25 bp, SARS Virus
gatattcgcgtgatggtcgacctag

SEQ ID NO: 124417 - DNA, 25 bp, SARS Virus
atattcgcgtggaggtcgacctaga

SEQ ID NO: 124418 - DNA, 25 bp, SARS Virus
tattcgcgtggtagtcgacctagaa

SEQ ID NO: 124419 - DNA, 25 bp, SARS Virus
attcgcgtggtgatcgacctagaac

SEQ ID NO: 124420 - DNA, 25 bp, SARS Virus
ttcgcgtggtggacgacctagaact

SEQ ID NO: 124421 - DNA, 25 bp, SARS Virus
tcgcgtggtggtagacctagaactg

SEQ ID NO: 124422 - DNA, 25 bp, SARS Virus
cgcgtggtggtcaacctagaactgt

SEQ ID NO: 124423 - DNA, 25 bp, SARS Virus
gcgtggtggtcgacctagaactgtc

SEQ ID NO: 124424 - DNA, 25 bp, SARS Virus
cgtggtggtcgaactagaactgtca

SEQ ID NO: 124425 - DNA, 25 bp, SARS Virus
gtggtggtcgacatagaactgtcaa

SEQ ID NO: 124426 - DNA, 25 bp, SARS Virus
tggtggtcgaccaagaactgtcaac

SEQ ID NO: 124427 - DNA, 25 bp, SARS Virus
ggtggtcgacctagaactgtcaact

SEQ ID NO: 124428 - DNA, 25 bp, SARS Virus
gtggtcgacctaaaactgtcaacta

SEQ ID NO: 124429 - DNA, 25 bp, SARS Virus
tggtcgacctagaactgtcaactat

SEQ ID NO: 124430 - DNA, 25 bp, SARS Virus
ggtcgacctagaactgtcaactatc

SEQ ID NO: 124431 - DNA, 25 bp, SARS Virus
gtcgacctagaaatgtcaactatca

SEQ ID NO: 124432 - DNA, 25 bp, SARS Virus
tcgacctagaacagtcaactatcat

SEQ ID NO: 124433 - DNA, 25 bp, SARS Virus
cgacctagaactatcaactatcatt

SEQ ID NO: 124434 - DNA, 25 bp, SARS Virus
gacctagaactgacaactatcattg

SEQ ID NO: 124435 - DNA, 25 bp, SARS Virus
acctagaactgtaaactatcattgt

SEQ ID NO: 124436 - DNA, 25 bp, SARS Virus
cctagaactgtcaactatcattgta

SEQ ID NO: 124437 - DNA, 25 bp, SARS Virus
ctagaactgtcaactatcattgtaa

SEQ ID NO: 124438 - DNA, 25 bp, SARS Virus
tagaactgtcaaatatcattgtaat

SEQ ID NO: 124439 - DNA, 25 bp, SARS Virus
agaactgtcaacaatcattgtaatc

SEQ ID NO: 124440 - DNA, 25 bp, SARS Virus
gaactgtcaactatcattgtaatcc

SEQ ID NO: 124441 - DNA, 25 bp, SARS Virus
aactgtcaactaacattgtaatcca

SEQ ID NO: 124442 - DNA, 25 bp, SARS Virus
actgtcaactataattgtaatccac

SEQ ID NO: 124443 - DNA, 25 bp, SARS Virus
ctgtcaactatcattgtaatccaca

SEQ ID NO: 124444 - DNA, 25 bp, SARS Virus
tgtcaactatcaatgtaatccacac

SEQ ID NO: 124445 - DNA, 25 bp, SARS Virus
gtcaactatcatagtaatccacacg

SEQ ID NO: 124446 - DNA, 25 bp, SARS Virus
tcaactatcattataatccacacgt

SEQ ID NO: 124447 - DNA, 25 bp, SARS Virus
caactatcattgaaatccacacgta

SEQ ID NO: 124448 - DNA, 25 bp, SARS Virus
aactatcattgtaatccacacgtac

SEQ ID NO: 124449 - DNA, 25 bp, SARS Virus
actatcattgtaatccacacgtaca

SEQ ID NO: 124450 - DNA, 25 bp, SARS Virus
ctatcattgtaaaccacacgtacaa

SEQ ID NO: 124451 - DNA, 25 bp, SARS Virus
tatcattgtaatacacacgtacaaa

SEQ ID NO: 124452 - DNA, 25 bp, SARS Virus
atcattgtaatcaacacgtacaaac

SEQ ID NO: 124453 - DNA, 25 bp, SARS Virus
tcattgtaatccacacgtacaaact

SEQ ID NO: 124454 - DNA, 25 bp, SARS Virus
cattgtaatccaaacgtacaaactt

SEQ ID NO: 124455 - DNA, 25 bp, SARS Virus
attgtaatccacacgtacaaacttg

SEQ ID NO: 124456 - DNA, 25 bp, SARS Virus
ttgtaatccacaagtacaaacttgg

SEQ ID NO: 124457 - DNA, 25 bp, SARS Virus
tgtaatccacacatacaaacttggt

SEQ ID NO: 124458 - DNA, 25 bp, SARS Virus
gtaatccacacgaacaaacttggta

SEQ ID NO: 124459 - DNA, 25 bp, SARS Virus
taatccacacgtacaaacttggtat

SEQ ID NO: 124460 - DNA, 25 bp, SARS Virus
aatccacacgtaaaaacttggtatc

SEQ ID NO: 124461 - DNA, 25 bp, SARS Virus
atccacacgtacaaacttggtatca

SEQ ID NO: 124462 - DNA, 25 bp, SARS Virus
tccacacgtacaaacttggtatcac

SEQ ID NO: 124463 - DNA, 25 bp, SARS Virus
ccacacgtacaaacttggtatcaca

SEQ ID NO: 124464 - DNA, 25 bp, SARS Virus
cacacgtacaaaattggtatcacac

SEQ ID NO: 124465 - DNA, 25 bp, SARS Virus
acacgtacaaacatggtatcacacg

SEQ ID NO: 124466 - DNA, 25 bp, SARS Virus
cacgtacaaactaggtatcacacgg

SEQ ID NO: 124467 - DNA, 25 bp, SARS Virus
acgtacaaacttagtatcacacggt

SEQ ID NO: 124468 - DNA, 25 bp, SARS Virus
cgtacaaacttgatatcacacggta

SEQ ID NO: 124469 - DNA, 25 bp, SARS Virus
gtacaaacttggaatcacacggtag

SEQ ID NO: 124470 - DNA, 25 bp, SARS Virus
tacaaacttggtatcacacggtaga

SEQ ID NO: 124471 - DNA, 25 bp, SARS Virus
acaaacttggtaacacacggtagat

SEQ ID NO: 124472 - DNA, 25 bp, SARS Virus
caaacttggtataacacggtagata

SEQ ID NO: 124473 - DNA, 25 bp, SARS Virus
caaggatccattctcttcatggtag

SEQ ID NO: 124474 - DNA, 25 bp, SARS Virus
aaggatccattaccttcatggtaga

SEQ ID NO: 124475 - DNA, 25 bp, SARS Virus
aggatccattatcttcatggtagac

SEQ ID NO: 124476 - DNA, 25 bp, SARS Virus
ggatccattatcctcatggtagacc

SEQ ID NO: 124477 - DNA, 25 bp, SARS Virus
gatccattatctccatggtagaccc

SEQ ID NO: 124478 - DNA, 25 bp, SARS Virus
atccattatcttcatggtagacccc

SEQ ID NO: 124479 - DNA, 25 bp, SARS Virus
tccattatcttcctggtagaccccg

SEQ ID NO: 124480 - DNA, 25 bp, SARS Virus
ccattatcttcacggtagaccccga

SEQ ID NO: 124481 - DNA, 25 bp, SARS Virus
cattatcttcatcgtagaccccgac

SEQ ID NO: 124482 - DNA, 25 bp, SARS Virus
attatcttcatgctagaccccgact

SEQ ID NO: 124483 - DNA, 25 bp, SARS Virus
ttatcttcatggcagaccccgactc

SEQ ID NO: 124484 - DNA, 25 bp, SARS Virus
tatcttcatggtcgaccccgactcg

SEQ ID NO: 124485 - DNA, 25 bp, SARS Virus
atcttcatggtacaccccgactcga

SEQ ID NO: 124486 - DNA, 25 bp, SARS Virus
tcttcatggtagcccccgactcgag

SEQ ID NO: 124487 - DNA, 25 bp, SARS Virus
cttcatggtagaccccgactcgaga

SEQ ID NO: 124488 - DNA, 25 bp, SARS Virus
ttcatggtagaccccgactcgagaa

SEQ ID NO: 124489 - DNA, 25 bp, SARS Virus
tcatggtagaccccgactcgagaaa

SEQ ID NO: 124490 - DNA, 25 bp, SARS Virus
catggtagaccccgactcgagaaag

SEQ ID NO: 124491 - DNA, 25 bp, SARS Virus
atggtagacccccactcgagaaagt

SEQ ID NO: 124492 - DNA, 25 bp, SARS Virus
tggtagaccccgcctcgagaaagta

SEQ ID NO: 124493 - DNA, 25 bp, SARS Virus
ggtagaccccgactcgagaaagtaa

SEQ ID NO: 124494 - DNA, 25 bp, SARS Virus
gtagaccccgacccgagaaagtaaa

SEQ ID NO: 124495 - DNA, 25 bp, SARS Virus
tagaccccgactcgagaaagtaaaa

SEQ ID NO: 124496 - DNA, 25 bp, SARS Virus
agaccccgactccagaaagtaaaac

SEQ ID NO: 124497 - DNA, 25 bp, SARS Virus
gaccccgactcgcgaaagtaaaacg

SEQ ID NO: 124498 - DNA, 25 bp, SARS Virus
accccgactcgacaaagtaaaacgg

SEQ ID NO: 124499 - DNA, 25 bp, SARS Virus
ccccgactcgagcaagtaaaacggc

SEQ ID NO: 124500 - DNA, 25 bp, SARS Virus
cccgactcgagacagtaaaacggca

SEQ ID NO: 124501 - DNA, 25 bp, SARS Virus
ccgactcgagaacgtaaaacggcag

SEQ ID NO: 124502 - DNA, 25 bp, SARS Virus
cgactcgagaaactaaaacggcagt

SEQ ID NO: 124503 - DNA, 25 bp, SARS Virus
gactcgagaaagcaaaacggcagtg

SEQ ID NO: 124504 - DNA, 25 bp, SARS Virus
actcgagaaagtcaaacggcagtgg

SEQ ID NO: 124505 - DNA, 25 bp, SARS Virus
ctcgagaaagtacaacggcagtggt

SEQ ID NO: 124506 - DNA, 25 bp, SARS Virus
tcgagaaagtaacacggcagtggtg

SEQ ID NO: 124507 - DNA, 25 bp, SARS Virus
cgagaaagtaaaccggcagtggtgg

SEQ ID NO: 124508 - DNA, 25 bp, SARS Virus
gagaaagtaaaacggcagtggtggt

SEQ ID NO: 124509 - DNA, 25 bp, SARS Virus
agaaagtaaaaccgcagtggtggtg

SEQ ID NO: 124510 - DNA, 25 bp, SARS Virus
gaaagtaaaacgccagtggtggtgc

SEQ ID NO: 124511 - DNA, 25 bp, SARS Virus
aaagtaaaacggcagtggtggtgct

SEQ ID NO: 124512 - DNA, 25 bp, SARS Virus
aagtaaaacggccgtggtggtgctt

SEQ ID NO: 124513 - DNA, 25 bp, SARS Virus
agtaaaacggcactggtggtgcttg

SEQ ID NO: 124514 - DNA, 25 bp, SARS Virus
gtaaaacggcagcggtggtgcttga

SEQ ID NO: 124515 - DNA, 25 bp, SARS Virus
taaaacggcagtcgtggtgcttgag

SEQ ID NO: 124516 - DNA, 25 bp, SARS Virus
aaaacggcagtgctggtgcttgagc

SEQ ID NO: 124517 - DNA, 25 bp, SARS Virus
aaacggcagtggcggtgcttgagca

SEQ ID NO: 124518 - DNA, 25 bp, SARS Virus
aacggcagtggtcgtgcttgagcag

SEQ ID NO: 124519 - DNA, 25 bp, SARS Virus
acggcagtggtgctgcttgagcagc

SEQ ID NO: 124520 - DNA, 25 bp, SARS Virus
cggcagtggtggcgcttgagcagcc

SEQ ID NO: 124521 - DNA, 25 bp, SARS Virus
ggcagtggtggtccttgagcagccc

SEQ ID NO: 124522 - DNA, 25 bp, SARS Virus
gcagtggtggtgcttgagcagccca

SEQ ID NO: 124523 - DNA, 25 bp, SARS Virus
cagtggtggtgcctgagcagcccat

SEQ ID NO: 124524 - DNA, 25 bp, SARS Virus
agtggtggtgctcgagcagcccatc

SEQ ID NO: 124525 - DNA, 25 bp, SARS Virus
gtggtggtgcttcagcagcccatcg

SEQ ID NO: 124526 - DNA, 25 bp, SARS Virus
tggtggtgcttgcgcagcccatcga

SEQ ID NO: 124527 - DNA, 25 bp, SARS Virus
ggtggtgcttgaccagcccatcgag

SEQ ID NO: 124528 - DNA, 25 bp, SARS Virus
gtggtgcttgagcagcccatcgaga

SEQ ID NO: 124529 - DNA, 25 bp, SARS Virus
tggtgcttgagccgcccatcgagaa

SEQ ID NO: 124530 - DNA, 25 bp, SARS Virus
ggtgcttgagcaccccatcgagaag

SEQ ID NO: 124531 - DNA, 25 bp, SARS Virus
gtgcttgagcagcccatcgagaagc

SEQ ID NO: 124532 - DNA, 25 bp, SARS Virus
tgcttgagcagcccatcgagaagcc

SEQ ID NO: 124533 - DNA, 25 bp, SARS Virus
gcttgagcagcccatcgagaagcca

SEQ ID NO: 124534 - DNA, 25 bp, SARS Virus
cttgagcagcccctcgagaagccat

SEQ ID NO: 124535 - DNA, 25 bp, SARS Virus
ttgagcagcccaccgagaagccatc

SEQ ID NO: 124536 - DNA, 25 bp, SARS Virus
tgagcagcccatcgagaagccatca

SEQ ID NO: 124537 - DNA, 25 bp, SARS Virus
gagcagcccatccagaagccatcat

SEQ ID NO: 124538 - DNA, 25 bp, SARS Virus
agcagcccatcgcgaagccatcatc

SEQ ID NO: 124539 - DNA, 25 bp, SARS Virus
gcagcccatcgacaagccatcatcg

SEQ ID NO: 124540 - DNA, 25 bp, SARS Virus
cagcccatcgagcagccatcatcgg

SEQ ID NO: 124541 - DNA, 25 bp, SARS Virus
agcccatcgagacgccatcatcggt

SEQ ID NO: 124542 - DNA, 25 bp, SARS Virus
gcccatcgagaacccatcatcggtt

SEQ ID NO: 124543 - DNA, 25 bp, SARS Virus
cccatcgagaagccatcatcggtta

SEQ ID NO: 124544 - DNA, 25 bp, SARS Virus
ccatcgagaagccatcatcggttaa

SEQ ID NO: 124545 - DNA, 25 bp, SARS Virus
catcgagaagccctcatcggttaaa

SEQ ID NO: 124546 - DNA, 25 bp, SARS Virus
atcgagaagccaccatcggttaaac

SEQ ID NO: 124547 - DNA, 25 bp, SARS Virus
tcgagaagccatcatcggttaaacc

SEQ ID NO: 124548 - DNA, 25 bp, SARS Virus
cgagaagccatcctcggttaaacca

SEQ ID NO: 124549 - DNA, 25 bp, SARS Virus
gagaagccatcaccggttaaaccag

SEQ ID NO: 124550 - DNA, 25 bp, SARS Virus
agaagccatcatcggttaaaccagt

SEQ ID NO: 124551 - DNA, 25 bp, SARS Virus
gaagccatcatccgttaaaccagta

SEQ ID NO: 124552 - DNA, 25 bp, SARS Virus
aagccatcatcgcttaaaccagtag

SEQ ID NO: 124553 - DNA, 25 bp, SARS Virus
agccatcatcggctaaaccagtaga

SEQ ID NO: 124554 - DNA, 25 bp, SARS Virus
gccatcatcggtcaaaccagtagac

SEQ ID NO: 124555 - DNA, 25 bp, SARS Virus
ccatcatcggttcaaccagtagacc

SEQ ID NO: 124556 - DNA, 25 bp, SARS Virus
catcatcggttacaccagtagacct

SEQ ID NO: 124557 - DNA, 25 bp, SARS Virus
atcatcggttaacccagtagacctg

SEQ ID NO: 124558 - DNA, 25 bp, SARS Virus
tcatcggttaaaccagtagacctgg

SEQ ID NO: 124559 - DNA, 25 bp, SARS Virus
catcggttaaaccagtagacctggt

SEQ ID NO: 124560 - DNA, 25 bp, SARS Virus
atcggttaaacccgtagacctggtg

SEQ ID NO: 124561 - DNA, 25 bp, SARS Virus
tcggttaaaccactagacctggtga

SEQ ID NO: 124562 - DNA, 25 bp, SARS Virus
cggttaaaccagcagacctggtgat

SEQ ID NO: 124563 - DNA, 25 bp, SARS Virus
ggttaaaccagtcgacctggtgata

SEQ ID NO: 124564 - DNA, 25 bp, SARS Virus
gttaaaccagtacacctggtgataa

SEQ ID NO: 124565 - DNA, 25 bp, SARS Virus
ttaaaccagtagccctggtgataac

SEQ ID NO: 124566 - DNA, 25 bp, SARS Virus
taaaccagtagacctggtgataacc

SEQ ID NO: 124567 - DNA, 25 bp, SARS Virus
aaaccagtagacctggtgataacca

SEQ ID NO: 124568 - DNA, 25 bp, SARS Virus
aaccagtagacccggtgataaccac

SEQ ID NO: 124569 - DNA, 25 bp, SARS Virus
accagtagacctcgtgataaccaca

SEQ ID NO: 124570 - DNA, 25 bp, SARS Virus
ccagtagacctgctgataaccacaa

SEQ ID NO: 124571 - DNA, 25 bp, SARS Virus
cagtagacctggcgataaccacaac

SEQ ID NO: 124572 - DNA, 25 bp, SARS Virus
agtagacctggtcataaccacaact

SEQ ID NO: 124573 - DNA, 25 bp, SARS Virus
gtagacctggtgctaaccacaacta

SEQ ID NO: 124574 - DNA, 25 bp, SARS Virus
tagacctggtgacaaccacaactaa

SEQ ID NO: 124575 - DNA, 25 bp, SARS Virus
agacctggtgatcaccacaactaac

SEQ ID NO: 124576 - DNA, 25 bp, SARS Virus
gacctggtgatacccacaactaacc

SEQ ID NO: 124577 - DNA, 25 bp, SARS Virus
acctggtgataaccacaactaacct

SEQ ID NO: 124578 - DNA, 25 bp, SARS Virus
cctggtgataaccacaactaacctt

SEQ ID NO: 124579 - DNA, 25 bp, SARS Virus
ctggtgataaccccaactaaccttg

SEQ ID NO: 124580 - DNA, 25 bp, SARS Virus
tggtgataaccacaactaaccttgc

SEQ ID NO: 124581 - DNA, 25 bp, SARS Virus
ggtgataaccaccactaaccttgcg

SEQ ID NO: 124582 - DNA, 25 bp, SARS Virus
gtgataaccacacctaaccttgcgg

SEQ ID NO: 124583 - DNA, 25 bp, SARS Virus
tgataaccacaactaaccttgcggg

SEQ ID NO: 124584 - DNA, 25 bp, SARS Virus
gataaccacaaccaaccttgcggga

SEQ ID NO: 124585 - DNA, 25 bp, SARS Virus
ataaccacaactcaccttgcgggac

SEQ ID NO: 124586 - DNA, 25 bp, SARS Virus
taaccacaactacccttgcgggacc

SEQ ID NO: 124587 - DNA, 25 bp, SARS Virus
aaccacaactaaccttgcgggaccg

SEQ ID NO: 124588 - DNA, 25 bp, SARS Virus
accacaactaaccttgcgggaccgg

SEQ ID NO: 124589 - DNA, 25 bp, SARS Virus
ccacaactaaccctgcgggaccgga

SEQ ID NO: 124590 - DNA, 25 bp, SARS Virus
cacaactaacctcgcgggaccggag

SEQ ID NO: 124591 - DNA, 25 bp, SARS Virus
acaactaaccttccgggaccggagc

SEQ ID NO: 124592 - DNA, 25 bp, SARS Virus
caactaaccttgcgggaccggagct

SEQ ID NO: 124593 - DNA, 25 bp, SARS Virus
aactaaccttgccggaccggagctc

SEQ ID NO: 124594 - DNA, 25 bp, SARS Virus
actaaccttgcgcgaccggagctcc

SEQ ID NO: 124595 - DNA, 25 bp, SARS Virus
ctaaccttgcggcaccggagctccc

SEQ ID NO: 124596 - DNA, 25 bp, SARS Virus
taaccttgcgggcccggagctccct

SEQ ID NO: 124597 - DNA, 25 bp, SARS Virus
aaccttgcgggaccggagctccctt

SEQ ID NO: 124598 - DNA, 25 bp, SARS Virus
accttgcgggaccggagctccctta

SEQ ID NO: 124599 - DNA, 25 bp, SARS Virus
ccttgcgggacccgagctcccttag

SEQ ID NO: 124600 - DNA, 25 bp, SARS Virus
cttgcgggaccgcagctcccttaga

SEQ ID NO: 124601 - DNA, 25 bp, SARS Virus
ttgcgggaccggcgctcccttagat

SEQ ID NO: 124602 - DNA, 25 bp, SARS Virus
tgcgggaccggacctcccttagatt

SEQ ID NO: 124603 - DNA, 25 bp, SARS Virus
gcgggaccggagctcccttagattc

SEQ ID NO: 124604 - DNA, 25 bp, SARS Virus
cgggaccggagcccccttagattca

SEQ ID NO: 124605 - DNA, 25 bp, SARS Virus
gggaccggagctcccttagattcaa

SEQ ID NO: 124606 - DNA, 25 bp, SARS Virus
ggaccggagctcccttagattcaag

SEQ ID NO: 124607 - DNA, 25 bp, SARS Virus
gaccggagctcccttagattcaagg

SEQ ID NO: 124608 - DNA, 25 bp, SARS Virus
accggagctcccctagattcaagga

SEQ ID NO: 124609 - DNA, 25 bp, SARS Virus
ccggagctccctcagattcaaggag

SEQ ID NO: 124610 - DNA, 25 bp, SARS Virus
cggagctcccttcgattcaaggagg

SEQ ID NO: 124611 - DNA, 25 bp, SARS Virus
ggagctcccttacattcaaggagga

SEQ ID NO: 124612 - DNA, 25 bp, SARS Virus
gagctcccttagcttcaaggaggaa

SEQ ID NO: 124613 - DNA, 25 bp, SARS Virus
agctcccttagactcaaggaggaac

SEQ ID NO: 124614 - DNA, 25 bp, SARS Virus
gctcccttagatccaaggaggaacg

SEQ ID NO: 124615 - DNA, 25 bp, SARS Virus
ctcccttagattcaaggaggaacgg

SEQ ID NO: 124616 - DNA, 25 bp, SARS Virus
tcccttagattccaggaggaacggt

SEQ ID NO: 124617 - DNA, 25 bp, SARS Virus
cccttagattcacggaggaacggta

SEQ ID NO: 124618 - DNA, 25 bp, SARS Virus
ccttagattcaacgaggaacggtac

SEQ ID NO: 124619 - DNA, 25 bp, SARS Virus
cttagattcaagcaggaacggtacg

SEQ ID NO: 124620 - DNA, 25 bp, SARS Virus
ttagattcaaggcggaacggtacga

SEQ ID NO: 124621 - DNA, 25 bp, SARS Virus
tagattcaaggacgaacggtacgac

SEQ ID NO: 124622 - DNA, 25 bp, SARS Virus
agattcaaggagcaacggtacgact

SEQ ID NO: 124623 - DNA, 25 bp, SARS Virus
gattcaaggaggcacggtacgactc

SEQ ID NO: 124624 - DNA, 25 bp, SARS Virus
attcaaggaggaccggtacgactca

SEQ ID NO: 124625 - DNA, 25 bp, SARS Virus
ttcaaggaggaacggtacgactcac

SEQ ID NO: 124626 - DNA, 25 bp, SARS Virus
tcaaggaggaaccgtacgactcact

SEQ ID NO: 124627 - DNA, 25 bp, SARS Virus
caaggaggaacgctacgactcactc

SEQ ID NO: 124628 - DNA, 25 bp, SARS Virus
aaggaggaacggcacgactcactct

SEQ ID NO: 124629 - DNA, 25 bp, SARS Virus
aggaggaacggtccgactcactctc

SEQ ID NO: 124630 - DNA, 25 bp, SARS Virus
ggaggaacggtacgactcactctcg

SEQ ID NO: 124631 - DNA, 25 bp, SARS Virus
gaggaacggtaccactcactctcga

SEQ ID NO: 124632 - DNA, 25 bp, SARS Virus
aggaacggtacgcctcactctcgac

SEQ ID NO: 124633 - DNA, 25 bp, SARS Virus
ggaacggtacgactcactctcgaca

SEQ ID NO: 124634 - DNA, 25 bp, SARS Virus
gaacggtacgacccactctcgacac

SEQ ID NO: 124635 - DNA, 25 bp, SARS Virus
aacggtacgactcactctcgacact

SEQ ID NO: 124636 - DNA, 25 bp, SARS Virus
acggtacgactccctctcgacactt

SEQ ID NO: 124637 - DNA, 25 bp, SARS Virus
cggtacgactcactctcgacacttg

SEQ ID NO: 124638 - DNA, 25 bp, SARS Virus
ggtacgactcaccctcgacacttgg

SEQ ID NO: 124639 - DNA, 25 bp, SARS Virus
gtacgactcactctcgacacttggt

SEQ ID NO: 124640 - DNA, 25 bp, SARS Virus
tacgactcactcccgacacttggtt

SEQ ID NO: 124641 - DNA, 25 bp, SARS Virus
acgactcactctcgacacttggttc

SEQ ID NO: 124642 - DNA, 25 bp, SARS Virus
cgactcactctccacacttggttct

SEQ ID NO: 124643 - DNA, 25 bp, SARS Virus
gactcactctcgccacttggttctg

SEQ ID NO: 124644 - DNA, 25 bp, SARS Virus
actcactctcgacacttggttctgc

SEQ ID NO: 124645 - DNA, 25 bp, SARS Virus
ctcactctcgacccttggttctgcg

SEQ ID NO: 124646 - DNA, 25 bp, SARS Virus
tcactctcgacacttggttctgcgt

SEQ ID NO: 124647 - DNA, 25 bp, SARS Virus
cactctcgacacctggttctgcgtc

SEQ ID NO: 124648 - DNA, 25 bp, SARS Virus
actctcgacactcggttctgcgtca

SEQ ID NO: 124649 - DNA, 25 bp, SARS Virus
ctctcgacacttcgttctgcgtcat

SEQ ID NO: 124650 - DNA, 25 bp, SARS Virus
tctcgacacttgcttctgcgtcata

SEQ ID NO: 124651 - DNA, 25 bp, SARS Virus
ctcgacacttggctctgcgtcataa

SEQ ID NO: 124652 - DNA, 25 bp, SARS Virus
tcgacacttggtcctgcgtcataat

SEQ ID NO: 124653 - DNA, 25 bp, SARS Virus
cgacacttggttctgcgtcataata

SEQ ID NO: 124654 - DNA, 25 bp, SARS Virus
gacacttggttccgcgtcataataa

SEQ ID NO: 124655 - DNA, 25 bp, SARS Virus
acacttggttctccgtcataataac

SEQ ID NO: 124656 - DNA, 25 bp, SARS Virus
cacttggttctgcgtcataataacc

SEQ ID NO: 124657 - DNA, 25 bp, SARS Virus
acttggttctgcctcataataaccc

SEQ ID NO: 124658 - DNA, 25 bp, SARS Virus
cttggttctgcgccataataaccca

SEQ ID NO: 124659 - DNA, 25 bp, SARS Virus
ttggttctgcgtcataataacccat

SEQ ID NO: 124660 - DNA, 25 bp, SARS Virus
tggttctgcgtcctaataacccatt

SEQ ID NO: 124661 - DNA, 25 bp, SARS Virus
ggttctgcgtcacaataacccattt

SEQ ID NO: 124662 - DNA, 25 bp, SARS Virus
gttctgcgtcatcataacccatttg

SEQ ID NO: 124663 - DNA, 25 bp, SARS Virus
ttctgcgtcatactaacccatttgg

SEQ ID NO: 124664 - DNA, 25 bp, SARS Virus
tctgcgtcataacaacccatttgga

SEQ ID NO: 124665 - DNA, 25 bp, SARS Virus
ctgcgtcataatcacccatttggaa

SEQ ID NO: 124666 - DNA, 25 bp, SARS Virus
tgcgtcataataccccatttggaac

SEQ ID NO: 124667 - DNA, 25 bp, SARS Virus
gcgtcataataacccatttggaacc

SEQ ID NO: 124668 - DNA, 25 bp, SARS Virus
cgtcataataacccatttggaaccc

SEQ ID NO: 124669 - DNA, 25 bp, SARS Virus
gtcataataacccatttggaacccc

SEQ ID NO: 124670 - DNA, 25 bp, SARS Virus
tcataataacccctttggaacccca

SEQ ID NO: 124671 - DNA, 25 bp, SARS Virus
cataataacccacttggaaccccag

SEQ ID NO: 124672 - DNA, 25 bp, SARS Virus
ataataacccatctggaaccccagc

SEQ ID NO: 124673 - DNA, 25 bp, SARS Virus
taataacccattcggaaccccagcc

SEQ ID NO: 124674 - DNA, 25 bp, SARS Virus
aataacccatttcgaaccccagccg

SEQ ID NO: 124675 - DNA, 25 bp, SARS Virus
ataacccatttgcaaccccagccgc

SEQ ID NO: 124676 - DNA, 25 bp, SARS Virus
taacccatttggcaccccagccgcg

SEQ ID NO: 124677 - DNA, 25 bp, SARS Virus
aacccatttggacccccagccgcga

SEQ ID NO: 124678 - DNA, 25 bp, SARS Virus
acccatttggaaccccagccgcgac

SEQ ID NO: 124679 - DNA, 25 bp, SARS Virus
cccatttggaaccccagccgcgaca

SEQ ID NO: 124680 - DNA, 25 bp, SARS Virus
ccatttggaaccccagccgcgacaa

SEQ ID NO: 124681 - DNA, 25 bp, SARS Virus
catttggaaccccagccgcgacaaa

SEQ ID NO: 124682 - DNA, 25 bp, SARS Virus
atttggaacccccgccgcgacaaaa

SEQ ID NO: 124683 - DNA, 25 bp, SARS Virus
tttggaaccccacccgcgacaaaac

SEQ ID NO: 124684 - DNA, 25 bp, SARS Virus
ttggaaccccagccgcgacaaaacc

SEQ ID NO: 124685 - DNA, 25 bp, SARS Virus
tggaaccccagccgcgacaaaaccg

SEQ ID NO: 124686 - DNA, 25 bp, SARS Virus
ggaaccccagccccgacaaaaccgg

SEQ ID NO: 124687 - DNA, 25 bp, SARS Virus
gaaccccagccgcgacaaaaccgga

SEQ ID NO: 124688 - DNA, 25 bp, SARS Virus
aaccccagccgccacaaaaccggaa

SEQ ID NO: 124689 - DNA, 25 bp, SARS Virus
accccagccgcgccaaaaccggaac

SEQ ID NO: 124690 - DNA, 25 bp, SARS Virus
ccccagccgcgacaaaaccggaacg

SEQ ID NO: 124691 - DNA, 25 bp, SARS Virus
cccagccgcgaccaaaccggaacgg

SEQ ID NO: 124692 - DNA, 25 bp, SARS Virus
ccagccgcgacacaaccggaacggg

SEQ ID NO: 124693 - DNA, 25 bp, SARS Virus
cagccgcgacaacaccggaacgggg

SEQ ID NO: 124694 - DNA, 25 bp, SARS Virus
agccgcgacaaacccggaacggggt

SEQ ID NO: 124695 - DNA, 25 bp, SARS Virus
gccgcgacaaaaccggaacggggta

SEQ ID NO: 124696 - DNA, 25 bp, SARS Virus
ccgcgacaaaaccggaacggggtaa

SEQ ID NO: 124697 - DNA, 25 bp, SARS Virus
cgcgacaaaacccgaacggggtaac

SEQ ID NO: 124698 - DNA, 25 bp, SARS Virus
gcgacaaaaccgcaacggggtaacg

SEQ ID NO: 124699 - DNA, 25 bp, SARS Virus
cgacaaaaccggcacggggtaacgc

SEQ ID NO: 124700 - DNA, 25 bp, SARS Virus
gacaaaaccggaccggggtaacgca

SEQ ID NO: 124701 - DNA, 25 bp, SARS Virus
acaaaaccggaacggggtaacgcag

SEQ ID NO: 124702 - DNA, 25 bp, SARS Virus
caaaaccggaaccgggtaacgcagg

SEQ ID NO: 124703 - DNA, 25 bp, SARS Virus
aaaaccggaacgcggtaacgcagga

SEQ ID NO: 124704 - DNA, 25 bp, SARS Virus
aaaccggaacggcgtaacgcaggag

SEQ ID NO: 124705 - DNA, 25 bp, SARS Virus
aaccggaacgggctaacgcaggagg

SEQ ID NO: 124706 - DNA, 25 bp, SARS Virus
accggaacggggcaacgcaggaggt

SEQ ID NO: 124707 - DNA, 25 bp, SARS Virus
ccggaacggggtcacgcaggaggta

SEQ ID NO: 124708 - DNA, 25 bp, SARS Virus
cggaacggggtaccgcaggaggtaa

SEQ ID NO: 124709 - DNA, 25 bp, SARS Virus
ggaacggggtaacgcaggaggtaag

SEQ ID NO: 124710 - DNA, 25 bp, SARS Virus
gaacggggtaacccaggaggtaaga

SEQ ID NO: 124711 - DNA, 25 bp, SARS Virus
aacggggtaacgcaggaggtaagac

SEQ ID NO: 124712 - DNA, 25 bp, SARS Virus
acggggtaacgccggaggtaagacc

SEQ ID NO: 124713 - DNA, 25 bp, SARS Virus
cggggtaacgcacgaggtaagacca

SEQ ID NO: 124714 - DNA, 25 bp, SARS Virus
ggggtaacgcagcaggtaagaccaa

SEQ ID NO: 124715 - DNA, 25 bp, SARS Virus
gggtaacgcaggcggtaagaccaat

SEQ ID NO: 124716 - DNA, 25 bp, SARS Virus
ggtaacgcaggacgtaagaccaata

SEQ ID NO: 124717 - DNA, 25 bp, SARS Virus
gtaacgcaggagctaagaccaataa

SEQ ID NO: 124718 - DNA, 25 bp, SARS Virus
taacgcaggaggcaagaccaataac

SEQ ID NO: 124719 - DNA, 25 bp, SARS Virus
aacgcaggaggtcagaccaataaca

SEQ ID NO: 124720 - DNA, 25 bp, SARS Virus
acgcaggaggtacgaccaataacag

SEQ ID NO: 124721 - DNA, 25 bp, SARS Virus
cgcaggaggtaacaccaataacagt

SEQ ID NO: 124722 - DNA, 25 bp, SARS Virus
gcaggaggtaagcccaataacagtc

SEQ ID NO: 124723 - DNA, 25 bp, SARS Virus
caggaggtaagaccaataacagtca

SEQ ID NO: 124724 - DNA, 25 bp, SARS Virus
aggaggtaagaccaataacagtcaa

SEQ ID NO: 124725 - DNA, 25 bp, SARS Virus
ggaggtaagacccataacagtcaac

SEQ ID NO: 124726 - DNA, 25 bp, SARS Virus
gaggtaagaccactaacagtcaact

SEQ ID NO: 124727 - DNA, 25 bp, SARS Virus
aggtaagaccaacaacagtcaactt

SEQ ID NO: 124728 - DNA, 25 bp, SARS Virus
ggtaagaccaatcacagtcaactta

SEQ ID NO: 124729 - DNA, 25 bp, SARS Virus
gtaagaccaataccagtcaacttag

SEQ ID NO: 124730 - DNA, 25 bp, SARS Virus
taagaccaataacagtcaacttaga

SEQ ID NO: 124731 - DNA, 25 bp, SARS Virus
aagaccaataaccgtcaacttagac

SEQ ID NO: 124732 - DNA, 25 bp, SARS Virus
agaccaataacactcaacttagaca

SEQ ID NO: 124733 - DNA, 25 bp, SARS Virus
gaccaataacagccaacttagacac

SEQ ID NO: 124734 - DNA, 25 bp, SARS Virus
accaataacagtcaacttagacacc

SEQ ID NO: 124735 - DNA, 25 bp, SARS Virus
ccaataacagtccacttagacaccc

SEQ ID NO: 124736 - DNA, 25 bp, SARS Virus
caataacagtcaccttagacaccca

SEQ ID NO: 124737 - DNA, 25 bp, SARS Virus
aataacagtcaacttagacacccag

SEQ ID NO: 124738 - DNA, 25 bp, SARS Virus
ataacagtcaacctagacacccagg

SEQ ID NO: 124739 - DNA, 25 bp, SARS Virus
taacagtcaactcagacacccaggt

SEQ ID NO: 124740 - DNA, 25 bp, SARS Virus
aacagtcaacttcgacacccaggtg

SEQ ID NO: 124741 - DNA, 25 bp, SARS Virus
acagtcaacttacacacccaggtgg

SEQ ID NO: 124742 - DNA, 25 bp, SARS Virus
cagtcaacttagccacccaggtggt

SEQ ID NO: 124743 - DNA, 25 bp, SARS Virus
agtcaacttagacacccaggtggtt

SEQ ID NO: 124744 - DNA, 25 bp, SARS Virus
gtcaacttagacccccaggtggttt

SEQ ID NO: 124745 - DNA, 25 bp, SARS Virus
tcaacttagacacccaggtggttta

SEQ ID NO: 124746 - DNA, 25 bp, SARS Virus
caacttagacacccaggtggtttac

SEQ ID NO: 124747 - DNA, 25 bp, SARS Virus
aacttagacacccaggtggtttaca

SEQ ID NO: 124748 - DNA, 25 bp, SARS Virus
acttagacaccccggtggtttacat

SEQ ID NO: 124749 - DNA, 25 bp, SARS Virus
cttagacacccacgtggtttacatt

SEQ ID NO: 124750 - DNA, 25 bp, SARS Virus
ttagacacccagctggtttacatta

SEQ ID NO: 124751 - DNA, 25 bp, SARS Virus
tagacacccaggcggtttacattac

SEQ ID NO: 124752 - DNA, 25 bp, SARS Virus
agacacccaggtcgtttacattacg

SEQ ID NO: 124753 - DNA, 25 bp, SARS Virus
gacacccaggtgctttacattacgc

SEQ ID NO: 124754 - DNA, 25 bp, SARS Virus
acacccaggtggcttacattacgcc

SEQ ID NO: 124755 - DNA, 25 bp, SARS Virus
cacccaggtggtctacattacgccc

SEQ ID NO: 124756 - DNA, 25 bp, SARS Virus
acccaggtggttcacattacgcccc

SEQ ID NO: 124757 - DNA, 25 bp, SARS Virus
cccaggtggtttccattacgccccc

SEQ ID NO: 124758 - DNA, 25 bp, SARS Virus
ccaggtggtttacattacgcccccc

SEQ ID NO: 124759 - DNA, 25 bp, SARS Virus
caggtggtttaccttacgccccccg

SEQ ID NO: 124760 - DNA, 25 bp, SARS Virus
aggtggtttacactacgccccccgt

SEQ ID NO: 124761 - DNA, 25 bp, SARS Virus
ggtggtttacatcacgccccccgtg

SEQ ID NO: 124762 - DNA, 25 bp, SARS Virus
gtggtttacattccgccccccgtga

SEQ ID NO: 124763 - DNA, 25 bp, SARS Virus
tggtttacattacgccccccgtgat

SEQ ID NO: 124764 - DNA, 25 bp, SARS Virus
ggtttacattaccccccccgtgatg

SEQ ID NO: 124765 - DNA, 25 bp, SARS Virus
gtttacattacgccccccgtgatgc

SEQ ID NO: 124766 - DNA, 25 bp, SARS Virus
tttacattacgccccccgtgatgca

SEQ ID NO: 124767 - DNA, 25 bp, SARS Virus
ttacattacgccccccgtgatgcaa

SEQ ID NO: 124768 - DNA, 25 bp, SARS Virus
tacattacgccccccgtgatgcaac

SEQ ID NO: 124769 - DNA, 25 bp, SARS Virus
acattacgccccccgtgatgcaacc

SEQ ID NO: 124770 - DNA, 25 bp, SARS Virus
cattacgccccccgtgatgcaacca

SEQ ID NO: 124771 - DNA, 25 bp, SARS Virus
attacgccccccctgatgcaaccaa

SEQ ID NO: 124772 - DNA, 25 bp, SARS Virus
ttacgccccccgcgatgcaaccaaa

SEQ ID NO: 124773 - DNA, 25 bp, SARS Virus
tacgccccccgtcatgcaaccaaac

SEQ ID NO: 124774 - DNA, 25 bp, SARS Virus
acgccccccgtgctgcaaccaaact

SEQ ID NO: 124775 - DNA, 25 bp, SARS Virus
cgccccccgtgacgcaaccaaacta

SEQ ID NO: 124776 - DNA, 25 bp, SARS Virus
gccccccgtgatccaaccaaactaa

SEQ ID NO: 124777 - DNA, 25 bp, SARS Virus
ccccccgtgatgcaaccaaactaac

SEQ ID NO: 124778 - DNA, 25 bp, SARS Virus
cccccgtgatgccaccaaactaacc

SEQ ID NO: 124779 - DNA, 25 bp, SARS Virus
ccccgtgatgcacccaaactaaccc

SEQ ID NO: 124780 - DNA, 25 bp, SARS Virus
cccgtgatgcaaccaaactaacccc

SEQ ID NO: 124781 - DNA, 25 bp, SARS Virus
ccgtgatgcaaccaaactaacccca

SEQ ID NO: 124782 - DNA, 25 bp, SARS Virus
cgtgatgcaacccaactaaccccag

SEQ ID NO: 124783 - DNA, 25 bp, SARS Virus
gtgatgcaaccacactaaccccagg

SEQ ID NO: 124784 - DNA, 25 bp, SARS Virus
tgatgcaaccaacctaaccccaggt

SEQ ID NO: 124785 - DNA, 25 bp, SARS Virus
gatgcaaccaaactaaccccaggta

SEQ ID NO: 124786 - DNA, 25 bp, SARS Virus
atgcaaccaaaccaaccccaggtaa

SEQ ID NO: 124787 - DNA, 25 bp, SARS Virus
tgcaaccaaactcaccccaggtaat

SEQ ID NO: 124788 - DNA, 25 bp, SARS Virus
gcaaccaaactacccccaggtaata

SEQ ID NO: 124789 - DNA, 25 bp, SARS Virus
caaccaaactaaccccaggtaatag

SEQ ID NO: 124790 - DNA, 25 bp, SARS Virus
aaccaaactaaccccaggtaatagt

SEQ ID NO: 124791 - DNA, 25 bp, SARS Virus
accaaactaaccccaggtaatagtc

SEQ ID NO: 124792 - DNA, 25 bp, SARS Virus
ccaaactaaccccaggtaatagtct

SEQ ID NO: 124793 - DNA, 25 bp, SARS Virus
caaactaacccccggtaatagtctg

SEQ ID NO: 124794 - DNA, 25 bp, SARS Virus
aaactaaccccacgtaatagtctgt

SEQ ID NO: 124795 - DNA, 25 bp, SARS Virus
aactaaccccagctaatagtctgta

SEQ ID NO: 124796 - DNA, 25 bp, SARS Virus
actaaccccaggcaatagtctgtaa

SEQ ID NO: 124797 - DNA, 25 bp, SARS Virus
ctaaccccaggtcatagtctgtaaa

SEQ ID NO: 124798 - DNA, 25 bp, SARS Virus
taaccccaggtactagtctgtaaaa

SEQ ID NO: 124799 - DNA, 25 bp, SARS Virus
aaccccaggtaacagtctgtaaaat

SEQ ID NO: 124800 - DNA, 25 bp, SARS Virus
accccaggtaatcgtctgtaaaatt

SEQ ID NO: 124801 - DNA, 25 bp, SARS Virus
ccccaggtaatactctgtaaaatta

SEQ ID NO: 124802 - DNA, 25 bp, SARS Virus
cccaggtaatagcctgtaaaattaa

SEQ ID NO: 124803 - DNA, 25 bp, SARS Virus
ccaggtaatagtctgtaaaattaaa

SEQ ID NO: 124804 - DNA, 25 bp, SARS Virus
caggtaatagtccgtaaaattaaac

SEQ ID NO: 124805 - DNA, 25 bp, SARS Virus
aggtaatagtctctaaaattaaaca

SEQ ID NO: 124806 - DNA, 25 bp, SARS Virus
ggtaatagtctgcaaaattaaacaa

SEQ ID NO: 124807 - DNA, 25 bp, SARS Virus
gtaatagtctgtcaaattaaacaag

SEQ ID NO: 124808 - DNA, 25 bp, SARS Virus
taatagtctgtacaattaaacaagc

SEQ ID NO: 124809 - DNA, 25 bp, SARS Virus
aatagtctgtaacattaaacaagca

SEQ ID NO: 124810 - DNA, 25 bp, SARS Virus
atagtctgtaaacttaaacaagcaa

SEQ ID NO: 124811 - DNA, 25 bp, SARS Virus
tagtctgtaaaactaaacaagcaaa

SEQ ID NO: 124812 - DNA, 25 bp, SARS Virus
agtctgtaaaatcaaacaagcaaat

SEQ ID NO: 124813 - DNA, 25 bp, SARS Virus
gtctgtaaaattcaacaagcaaata

SEQ ID NO: 124814 - DNA, 25 bp, SARS Virus
tctgtaaaattacacaagcaaataa

SEQ ID NO: 124815 - DNA, 25 bp, SARS Virus
ctgtaaaattaaccaagcaaataaa

SEQ ID NO: 124816 - DNA, 25 bp, SARS Virus
tgtaaaattaaacaagcaaataaat

SEQ ID NO: 124817 - DNA, 25 bp, SARS Virus
gtaaaattaaaccagcaaataaatt

SEQ ID NO: 124818 - DNA, 25 bp, SARS Virus
taaaattaaacacgcaaataaattt

SEQ ID NO: 124819 - DNA, 25 bp, SARS Virus
aaaattaaacaaccaaataaatttt

SEQ ID NO: 124820 - DNA, 25 bp, SARS Virus
aaattaaacaagcaaataaattttg

SEQ ID NO: 124821 - DNA, 25 bp, SARS Virus
aattaaacaagccaataaattttgt

SEQ ID NO: 124822 - DNA, 25 bp, SARS Virus
attaaacaagcacataaattttgtt

SEQ ID NO: 124823 - DNA, 25 bp, SARS Virus
ttaaacaagcaactaaattttgttg

SEQ ID NO: 124824 - DNA, 25 bp, SARS Virus
taaacaagcaaacaaattttgttgt

SEQ ID NO: 124825 - DNA, 25 bp, SARS Virus
aaacaagcaaatcaattttgttgtt

SEQ ID NO: 124826 - DNA, 25 bp, SARS Virus
aacaagcaaatacattttgttgttc

SEQ ID NO: 124827 - DNA, 25 bp, SARS Virus
acaagcaaataacttttgttgttca

SEQ ID NO: 124828 - DNA, 25 bp, SARS Virus
caagcaaataaactttgttgttcat

SEQ ID NO: 124829 - DNA, 25 bp, SARS Virus
aagcaaataaatcttgttgttcatg

SEQ ID NO: 124830 - DNA, 25 bp, SARS Virus
agcaaataaattctgttgttcatgc

SEQ ID NO: 124831 - DNA, 25 bp, SARS Virus
gcaaataaatttcgttgttcatgca

SEQ ID NO: 124832 - DNA, 25 bp, SARS Virus
caaataaattttcttgttcatgcag

SEQ ID NO: 124833 - DNA, 25 bp, SARS Virus
aaataaattttgctgttcatgcaga

SEQ ID NO: 124834 - DNA, 25 bp, SARS Virus
aataaattttgtcgttcatgcagag

SEQ ID NO: 124835 - DNA, 25 bp, SARS Virus
ataaattttgttcttcatgcagaga

SEQ ID NO: 124836 - DNA, 25 bp, SARS Virus
taaattttgttgctcatgcagagat

SEQ ID NO: 124837 - DNA, 25 bp, SARS Virus
aaattttgttgtccatgcagagatt

SEQ ID NO: 124838 - DNA, 25 bp, SARS Virus
aattttgttgttcatgcagagattt

SEQ ID NO: 124839 - DNA, 25 bp, SARS Virus
attttgttgttcctgcagagattta

SEQ ID NO: 124840 - DNA, 25 bp, SARS Virus
ttttgttgttcacgcagagatttac

SEQ ID NO: 124841 - DNA, 25 bp, SARS Virus
tttgttgttcatccagagatttacg

SEQ ID NO: 124842 - DNA, 25 bp, SARS Virus
ttgttgttcatgcagagatttacgt

SEQ ID NO: 124843 - DNA, 25 bp, SARS Virus
tgttgttcatgccgagatttacgtc

SEQ ID NO: 124844 - DNA, 25 bp, SARS Virus
gttgttcatgcacagatttacgtcg

SEQ ID NO: 124845 - DNA, 25 bp, SARS Virus
ttgttcatgcagcgatttacgtcgt

SEQ ID NO: 124846 - DNA, 25 bp, SARS Virus
tgttcatgcagacatttacgtcgtc

SEQ ID NO: 124847 - DNA, 25 bp, SARS Virus
gttcatgcagagctttacgtcgtca

SEQ ID NO: 124848 - DNA, 25 bp, SARS Virus
ttcatgcagagacttacgtcgtcaa

SEQ ID NO: 124849 - DNA, 25 bp, SARS Virus
tcatgcagagatctacgtcgtcaaa

SEQ ID NO: 124850 - DNA, 25 bp, SARS Virus
catgcagagattcacgtcgtcaaac

SEQ ID NO: 124851 - DNA, 25 bp, SARS Virus
atgcagagatttccgtcgtcaaacc

SEQ ID NO: 124852 - DNA, 25 bp, SARS Virus
tgcagagatttacgtcgtcaaacca

SEQ ID NO: 124853 - DNA, 25 bp, SARS Virus
gcagagatttacctcgtcaaaccac

SEQ ID NO: 124854 - DNA, 25 bp, SARS Virus
cagagatttacgccgtcaaaccact

SEQ ID NO: 124855 - DNA, 25 bp, SARS Virus
agagatttacgtcgtcaaaccactg

SEQ ID NO: 124856 - DNA, 25 bp, SARS Virus
gagatttacgtcctcaaaccactgg

SEQ ID NO: 124857 - DNA, 25 bp, SARS Virus
agatttacgtcgccaaaccactgga

SEQ ID NO: 124858 - DNA, 25 bp, SARS Virus
gatttacgtcgtcaaaccactggaa

SEQ ID NO: 124859 - DNA, 25 bp, SARS Virus
atttacgtcgtccaaccactggaag

SEQ ID NO: 124860 - DNA, 25 bp, SARS Virus
tttacgtcgtcacaccactggaagt

SEQ ID NO: 124861 - DNA, 25 bp, SARS Virus
ttacgtcgtcaacccactggaagta

SEQ ID NO: 124862 - DNA, 25 bp, SARS Virus
tacgtcgtcaaaccactggaagtac

SEQ ID NO: 124863 - DNA, 25 bp, SARS Virus
acgtcgtcaaaccactggaagtact

SEQ ID NO: 124864 - DNA, 25 bp, SARS Virus
cgtcgtcaaacccctggaagtactt

SEQ ID NO: 124865 - DNA, 25 bp, SARS Virus
gtcgtcaaaccactggaagtacttc

SEQ ID NO: 124866 - DNA, 25 bp, SARS Virus
tcgtcaaaccaccggaagtacttcc

SEQ ID NO: 124867 - DNA, 25 bp, SARS Virus
cgtcaaaccactcgaagtacttcca

SEQ ID NO: 124868 - DNA, 25 bp, SARS Virus
gtcaaaccactgcaagtacttccat

SEQ ID NO: 124869 - DNA, 25 bp, SARS Virus
tcaaaccactggcagtacttccatg

SEQ ID NO: 124870 - DNA, 25 bp, SARS Virus
caaaccactggacgtacttccatgg

SEQ ID NO: 124871 - DNA, 25 bp, SARS Virus
aaaccactggaactacttccatggt

SEQ ID NO: 124872 - DNA, 25 bp, SARS Virus
aaccactggaagcacttccatggtt

SEQ ID NO: 124873 - DNA, 25 bp, SARS Virus
accactggaagtccttccatggttg

SEQ ID NO: 124874 - DNA, 25 bp, SARS Virus
ccactggaagtacttccatggttgt

SEQ ID NO: 124875 - DNA, 25 bp, SARS Virus
cactggaagtacctccatggttgtg

SEQ ID NO: 124876 - DNA, 25 bp, SARS Virus
actggaagtactcccatggttgtgg

SEQ ID NO: 124877 - DNA, 25 bp, SARS Virus
ctggaagtacttccatggttgtgga

SEQ ID NO: 124878 - DNA, 25 bp, SARS Virus
tggaagtacttccatggttgtggat

SEQ ID NO: 124879 - DNA, 25 bp, SARS Virus
ggaagtacttccctggttgtggatc

SEQ ID NO: 124880 - DNA, 25 bp, SARS Virus
gaagtacttccacggttgtggatcg

SEQ ID NO: 124881 - DNA, 25 bp, SARS Virus
aagtacttccatcgttgtggatcga

SEQ ID NO: 124882 - DNA, 25 bp, SARS Virus
agtacttccatgcttgtggatcgat

SEQ ID NO: 124883 - DNA, 25 bp, SARS Virus
gtacttccatggctgtggatcgata

SEQ ID NO: 124884 - DNA, 25 bp, SARS Virus
tacttccatggtcgtggatcgatat

SEQ ID NO: 124885 - DNA, 25 bp, SARS Virus
acttccatggttctggatcgatatt

SEQ ID NO: 124886 - DNA, 25 bp, SARS Virus
cttccatggttgcggatcgatattc

SEQ ID NO: 124887 - DNA, 25 bp, SARS Virus
ttccatggttgtcgatcgatattcg

SEQ ID NO: 124888 - DNA, 25 bp, SARS Virus
tccatggttgtgcatcgatattcgc

SEQ ID NO: 124889 - DNA, 25 bp, SARS Virus
ccatggttgtggctcgatattcgcg

SEQ ID NO: 124890 - DNA, 25 bp, SARS Virus
catggttgtggaccgatattcgcgt

SEQ ID NO: 124891 - DNA, 25 bp, SARS Virus
atggttgtggatcgatattcgcgtg

SEQ ID NO: 124892 - DNA, 25 bp, SARS Virus
tggttgtggatccatattcgcgtgg

SEQ ID NO: 124893 - DNA, 25 bp, SARS Virus
ggttgtggatcgctattcgcgtggt

SEQ ID NO: 124894 - DNA, 25 bp, SARS Virus
gttgtggatcgacattcgcgtggtg

SEQ ID NO: 124895 - DNA, 25 bp, SARS Virus
ttgtggatcgatcttcgcgtggtgg

SEQ ID NO: 124896 - DNA, 25 bp, SARS Virus
tgtggatcgatactcgcgtggtggt

SEQ ID NO: 124897 - DNA, 25 bp, SARS Virus
gtggatcgatatccgcgtggtggtc

SEQ ID NO: 124898 - DNA, 25 bp, SARS Virus
tggatcgatattcgcgtggtggtcg

SEQ ID NO: 124899 - DNA, 25 bp, SARS Virus
ggatcgatattcccgtggtggtcga

SEQ ID NO: 124900 - DNA, 25 bp, SARS Virus
gatcgatattcgcgtggtggtcgac

SEQ ID NO: 124901 - DNA, 25 bp, SARS Virus
atcgatattcgcctggtggtcgacc

SEQ ID NO: 124902 - DNA, 25 bp, SARS Virus
tcgatattcgcgcggtggtcgacct

SEQ ID NO: 124903 - DNA, 25 bp, SARS Virus
cgatattcgcgtcgtggtcgaccta

SEQ ID NO: 124904 - DNA, 25 bp, SARS Virus
gatattcgcgtgctggtcgacctag

SEQ ID NO: 124905 - DNA, 25 bp, SARS Virus
atattcgcgtggcggtcgacctaga

SEQ ID NO: 124906 - DNA, 25 bp, SARS Virus
tattcgcgtggtcgtcgacctagaa

SEQ ID NO: 124907 - DNA, 25 bp, SARS Virus
attcgcgtggtgctcgacctagaac

SEQ ID NO: 124908 - DNA, 25 bp, SARS Virus
ttcgcgtggtggccgacctagaact

SEQ ID NO: 124909 - DNA, 25 bp, SARS Virus
tcgcgtggtggtcgacctagaactg

SEQ ID NO: 124910 - DNA, 25 bp, SARS Virus
cgcgtggtggtccacctagaactgt

SEQ ID NO: 124911 - DNA, 25 bp, SARS Virus
gcgtggtggtcgccctagaactgtc

SEQ ID NO: 124912 - DNA, 25 bp, SARS Virus
cgtggtggtcgacctagaactgtca

SEQ ID NO: 124913 - DNA, 25 bp, SARS Virus
gtggtggtcgacctagaactgtcaa

SEQ ID NO: 124914 - DNA, 25 bp, SARS Virus
tggtggtcgacccagaactgtcaac

SEQ ID NO: 124915 - DNA, 25 bp, SARS Virus
ggtggtcgacctcgaactgtcaact

SEQ ID NO: 124916 - DNA, 25 bp, SARS Virus
gtggtcgacctacaactgtcaacta

SEQ ID NO: 124917 - DNA, 25 bp, SARS Virus
tggtcgacctagcactgtcaactat

SEQ ID NO: 124918 - DNA, 25 bp, SARS Virus
ggtcgacctagacctgtcaactatc

SEQ ID NO: 124919 - DNA, 25 bp, SARS Virus
gtcgacctagaactgtcaactatca

SEQ ID NO: 124920 - DNA, 25 bp, SARS Virus
tcgacctagaaccgtcaactatcat

SEQ ID NO: 124921 - DNA, 25 bp, SARS Virus
cgacctagaactctcaactatcatt

SEQ ID NO: 124922 - DNA, 25 bp, SARS Virus
gacctagaactgccaactatcattg

SEQ ID NO: 124923 - DNA, 25 bp, SARS Virus
acctagaactgtcaactatcattgt

SEQ ID NO: 124924 - DNA, 25 bp, SARS Virus
cctagaactgtccactatcattgta

SEQ ID NO: 124925 - DNA, 25 bp, SARS Virus
ctagaactgtcacctatcattgtaa

SEQ ID NO: 124926 - DNA, 25 bp, SARS Virus
tagaactgtcaactatcattgtaat

SEQ ID NO: 124927 - DNA, 25 bp, SARS Virus
agaactgtcaaccatcattgtaatc

SEQ ID NO: 124928 - DNA, 25 bp, SARS Virus
gaactgtcaactctcattgtaatcc

SEQ ID NO: 124929 - DNA, 25 bp, SARS Virus
aactgtcaactaccattgtaatcca

SEQ ID NO: 124930 - DNA, 25 bp, SARS Virus
actgtcaactatcattgtaatccac

SEQ ID NO: 124931 - DNA, 25 bp, SARS Virus
ctgtcaactatccttgtaatccaca

SEQ ID NO: 124932 - DNA, 25 bp, SARS Virus
tgtcaactatcactgtaatccacac

SEQ ID NO: 124933 - DNA, 25 bp, SARS Virus
gtcaactatcatcgtaatccacacg

SEQ ID NO: 124934 - DNA, 25 bp, SARS Virus
tcaactatcattctaatccacacgt

SEQ ID NO: 124935 - DNA, 25 bp, SARS Virus
caactatcattgcaatccacacgta

SEQ ID NO: 124936 - DNA, 25 bp, SARS Virus
aactatcattgtcatccacacgtac

SEQ ID NO: 124937 - DNA, 25 bp, SARS Virus
actatcattgtactccacacgtaca

SEQ ID NO: 124938 - DNA, 25 bp, SARS Virus
ctatcattgtaacccacacgtacaa

SEQ ID NO: 124939 - DNA, 25 bp, SARS Virus
tatcattgtaatccacacgtacaaa

SEQ ID NO: 124940 - DNA, 25 bp, SARS Virus
atcattgtaatccacacgtacaaac

SEQ ID NO: 124941 - DNA, 25 bp, SARS Virus
tcattgtaatccccacgtacaaact

SEQ ID NO: 124942 - DNA, 25 bp, SARS Virus
cattgtaatccacacgtacaaactt

SEQ ID NO: 124943 - DNA, 25 bp, SARS Virus
attgtaatccacccgtacaaacttg

SEQ ID NO: 124944 - DNA, 25 bp, SARS Virus
ttgtaatccacacgtacaaacttgg

SEQ ID NO: 124945 - DNA, 25 bp, SARS Virus
tgtaatccacacctacaaacttggt

SEQ ID NO: 124946 - DNA, 25 bp, SARS Virus
gtaatccacacgcacaaacttggta

SEQ ID NO: 124947 - DNA, 25 bp, SARS Virus
taatccacacgtccaaacttggtat

SEQ ID NO: 124948 - DNA, 25 bp, SARS Virus
aatccacacgtacaaacttggtatc

SEQ ID NO: 124949 - DNA, 25 bp, SARS Virus
atccacacgtaccaacttggtatca

SEQ ID NO: 124950 - DNA, 25 bp, SARS Virus
tccacacgtacacacttggtatcac

SEQ ID NO: 124951 - DNA, 25 bp, SARS Virus
ccacacgtacaaccttggtatcaca

SEQ ID NO: 124952 - DNA, 25 bp, SARS Virus
cacacgtacaaacttggtatcacac

SEQ ID NO: 124953 - DNA, 25 bp, SARS Virus
acacgtacaaacctggtatcacacg

SEQ ID NO: 124954 - DNA, 25 bp, SARS Virus
cacgtacaaactcggtatcacacgg

SEQ ID NO: 124955 - DNA, 25 bp, SARS Virus
acgtacaaacttcgtatcacacggt

SEQ ID NO: 124956 - DNA, 25 bp, SARS Virus
cgtacaaacttgctatcacacggta

SEQ ID NO: 124957 - DNA, 25 bp, SARS Virus
gtacaaacttggcatcacacggtag

SEQ ID NO: 124958 - DNA, 25 bp, SARS Virus
tacaaacttggtctcacacggtaga

SEQ ID NO: 124959 - DNA, 25 bp, SARS Virus
acaaacttggtaccacacggtagat

SEQ ID NO: 124960 - DNA, 25 bp, SARS Virus
caaacttggtatcacacggtagata

SEQ ID NO: 124961 - DNA, 25 bp, SARS Virus
caaggatccattgtcttcatggtag

SEQ ID NO: 124962 - DNA, 25 bp, SARS Virus
aaggatccattagcttcatggtaga

SEQ ID NO: 124963 - DNA, 25 bp, SARS Virus
aggatccattatgttcatggtagac

SEQ ID NO: 124964 - DNA, 25 bp, SARS Virus
ggatccattatcgtcatggtagacc

SEQ ID NO: 124965 - DNA, 25 bp, SARS Virus
gatccattatctgcatggtagaccc

SEQ ID NO: 124966 - DNA, 25 bp, SARS Virus
atccattatcttgatggtagacccc

SEQ ID NO: 124967 - DNA, 25 bp, SARS Virus
tccattatcttcgtggtagaccccg

SEQ ID NO: 124968 - DNA, 25 bp, SARS Virus
ccattatcttcagggtagaccccga

SEQ ID NO: 124969 - DNA, 25 bp, SARS Virus
cattatcttcatggtagaccccgac

SEQ ID NO: 124970 - DNA, 25 bp, SARS Virus
attatcttcatggtagaccccgact

SEQ ID NO: 124971 - DNA, 25 bp, SARS Virus
ttatcttcatgggagaccccgactc

SEQ ID NO: 124972 - DNA, 25 bp, SARS Virus
tatcttcatggtggaccccgactcg

SEQ ID NO: 124973 - DNA, 25 bp, SARS Virus
atcttcatggtagaccccgactcga

SEQ ID NO: 124974 - DNA, 25 bp, SARS Virus
tcttcatggtaggccccgactcgag

SEQ ID NO: 124975 - DNA, 25 bp, SARS Virus
cttcatggtagagcccgactcgaga

SEQ ID NO: 124976 - DNA, 25 bp, SARS Virus
ttcatggtagacgccgactcgagaa

SEQ ID NO: 124977 - DNA, 25 bp, SARS Virus
tcatggtagaccgcgactcgagaaa

SEQ ID NO: 124978 - DNA, 25 bp, SARS Virus
catggtagacccggactcgagaaag

SEQ ID NO: 124979 - DNA, 25 bp, SARS Virus
atggtagaccccgactcgagaaagt

SEQ ID NO: 124980 - DNA, 25 bp, SARS Virus
tggtagaccccggctcgagaaagta

SEQ ID NO: 124981 - DNA, 25 bp, SARS Virus
ggtagaccccgagtcgagaaagtaa

SEQ ID NO: 124982 - DNA, 25 bp, SARS Virus
gtagaccccgacgcgagaaagtaaa

SEQ ID NO: 124983 - DNA, 25 bp, SARS Virus
tagaccccgactggagaaagtaaaa

SEQ ID NO: 124984 - DNA, 25 bp, SARS Virus
agaccccgactcgagaaagtaaaac

SEQ ID NO: 124985 - DNA, 25 bp, SARS Virus
gaccccgactcgggaaagtaaaacg

SEQ ID NO: 124986 - DNA, 25 bp, SARS Virus
accccgactcgagaaagtaaaacgg

SEQ ID NO: 124987 - DNA, 25 bp, SARS Virus
ccccgactcgaggaagtaaaacggc

SEQ ID NO: 124988 - DNA, 25 bp, SARS Virus
cccgactcgagagagtaaaacggca

SEQ ID NO: 124989 - DNA, 25 bp, SARS Virus
ccgactcgagaaggtaaaacggcag

SEQ ID NO: 124990 - DNA, 25 bp, SARS Virus
cgactcgagaaagtaaaacggcagt

SEQ ID NO: 124991 - DNA, 25 bp, SARS Virus
gactcgagaaaggaaaacggcagtg

SEQ ID NO: 124992 - DNA, 25 bp, SARS Virus
actcgagaaagtgaaacggcagtgg

SEQ ID NO: 124993 - DNA, 25 bp, SARS Virus
ctcgagaaagtagaacggcagtggt

SEQ ID NO: 124994 - DNA, 25 bp, SARS Virus
tcgagaaagtaagacggcagtggtg

SEQ ID NO: 124995 - DNA, 25 bp, SARS Virus
cgagaaagtaaagcggcagtggtgg

SEQ ID NO: 124996 - DNA, 25 bp, SARS Virus
gagaaagtaaaagggcagtggtggt

SEQ ID NO: 124997 - DNA, 25 bp, SARS Virus
agaaagtaaaacggcagtggtggtg

SEQ ID NO: 124998 - DNA, 25 bp, SARS Virus
gaaagtaaaacggcagtggtggtgc

SEQ ID NO: 124999 - DNA, 25 bp, SARS Virus
aaagtaaaacgggagtggtggtgct

SEQ ID NO: 125000 - DNA, 25 bp, SARS Virus
aagtaaaacggcggtggtggtgctt

SEQ ID NO: 125001 - DNA, 25 bp, SARS Virus
agtaaaacggcagtggtggtgcttg

SEQ ID NO: 125002 - DNA, 25 bp, SARS Virus
gtaaaacggcaggggtggtgcttga

SEQ ID NO: 125003 - DNA, 25 bp, SARS Virus
taaaacggcagtggtggtgcttgag

SEQ ID NO: 125004 - DNA, 25 bp, SARS Virus
aaaacggcagtggtggtgcttgagc

SEQ ID NO: 125005 - DNA, 25 bp, SARS Virus
aaacggcagtgggggtgcttgagca

SEQ ID NO: 125006 - DNA, 25 bp, SARS Virus
aacggcagtggtggtgcttgagcag

SEQ ID NO: 125007 - DNA, 25 bp, SARS Virus
acggcagtggtggtgcttgagcagc

SEQ ID NO: 125008 - DNA, 25 bp, SARS Virus
cggcagtggtggggcttgagcagcc

SEQ ID NO: 125009 - DNA, 25 bp, SARS Virus
ggcagtggtggtgcttgagcagccc

SEQ ID NO: 125010 - DNA, 25 bp, SARS Virus
gcagtggtggtggttgagcagccca

SEQ ID NO: 125011 - DNA, 25 bp, SARS Virus
cagtggtggtgcgtgagcagcccat

SEQ ID NO: 125012 - DNA, 25 bp, SARS Virus
agtggtggtgctggagcagcccatc

SEQ ID NO: 125013 - DNA, 25 bp, SARS Virus
gtggtggtgcttgagcagcccatcg

SEQ ID NO: 125014 - DNA, 25 bp, SARS Virus
tggtggtgcttgggcagcccatcga

SEQ ID NO: 125015 - DNA, 25 bp, SARS Virus
ggtggtgcttgagcagcccatcgag

SEQ ID NO: 125016 - DNA, 25 bp, SARS Virus
gtggtgcttgaggagcccatcgaga

SEQ ID NO: 125017 - DNA, 25 bp, SARS Virus
tggtgcttgagcggcccatcgagaa

SEQ ID NO: 125018 - DNA, 25 bp, SARS Virus
ggtgcttgagcagcccatcgagaag

SEQ ID NO: 125019 - DNA, 25 bp, SARS Virus
gtgcttgagcaggccatcgagaagc

SEQ ID NO: 125020 - DNA, 25 bp, SARS Virus
tgcttgagcagcgcatcgagaagcc

SEQ ID NO: 125021 - DNA, 25 bp, SARS Virus
gcttgagcagccgatcgagaagcca

SEQ ID NO: 125022 - DNA, 25 bp, SARS Virus
cttgagcagcccgtcgagaagccat

SEQ ID NO: 125023 - DNA, 25 bp, SARS Virus
ttgagcagcccagcgagaagccatc

SEQ ID NO: 125024 - DNA, 25 bp, SARS Virus
tgagcagcccatggagaagccatca

SEQ ID NO: 125025 - DNA, 25 bp, SARS Virus
gagcagcccatcgagaagccatcat

SEQ ID NO: 125026 - DNA, 25 bp, SARS Virus
agcagcccatcgggaagccatcatc

SEQ ID NO: 125027 - DNA, 25 bp, SARS Virus
gcagcccatcgagaagccatcatcg

SEQ ID NO: 125028 - DNA, 25 bp, SARS Virus
cagcccatcgaggagccatcatcgg

SEQ ID NO: 125029 - DNA, 25 bp, SARS Virus
agcccatcgagaggccatcatcggt

SEQ ID NO: 125030 - DNA, 25 bp, SARS Virus
gcccatcgagaagccatcatcggtt

SEQ ID NO: 125031 - DNA, 25 bp, SARS Virus
cccatcgagaaggcatcatcggtta

SEQ ID NO: 125032 - DNA, 25 bp, SARS Virus
ccatcgagaagcgatcatcggttaa

SEQ ID NO: 125033 - DNA, 25 bp, SARS Virus
catcgagaagccgtcatcggttaaa

SEQ ID NO: 125034 - DNA, 25 bp, SARS Virus
atcgagaagccagcatcggttaaac

SEQ ID NO: 125035 - DNA, 25 bp, SARS Virus
tcgagaagccatgatcggttaaacc

SEQ ID NO: 125036 - DNA, 25 bp, SARS Virus
cgagaagccatcgtcggttaaacca

SEQ ID NO: 125037 - DNA, 25 bp, SARS Virus
gagaagccatcagcggttaaaccag

SEQ ID NO: 125038 - DNA, 25 bp, SARS Virus
agaagccatcatgggttaaaccagt

SEQ ID NO: 125039 - DNA, 25 bp, SARS Virus
gaagccatcatcggttaaaccagta

SEQ ID NO: 125040 - DNA, 25 bp, SARS Virus
aagccatcatcggttaaaccagtag

SEQ ID NO: 125041 - DNA, 25 bp, SARS Virus
agccatcatcgggtaaaccagtaga

SEQ ID NO: 125042 - DNA, 25 bp, SARS Virus
gccatcatcggtgaaaccagtagac

SEQ ID NO: 125043 - DNA, 25 bp, SARS Virus
ccatcatcggttgaaccagtagacc

SEQ ID NO: 125044 - DNA, 25 bp, SARS Virus
catcatcggttagaccagtagacct

SEQ ID NO: 125045 - DNA, 25 bp, SARS Virus
atcatcggttaagccagtagacctg

SEQ ID NO: 125046 - DNA, 25 bp, SARS Virus
tcatcggttaaagcagtagacctgg

SEQ ID NO: 125047 - DNA, 25 bp, SARS Virus
catcggttaaacgagtagacctggt

SEQ ID NO: 125048 - DNA, 25 bp, SARS Virus
atcggttaaaccggtagacctggtg

SEQ ID NO: 125049 - DNA, 25 bp, SARS Virus
tcggttaaaccagtagacctggtga

SEQ ID NO: 125050 - DNA, 25 bp, SARS Virus
cggttaaaccaggagacctggtgat

SEQ ID NO: 125051 - DNA, 25 bp, SARS Virus
ggttaaaccagtggacctggtgata

SEQ ID NO: 125052 - DNA, 25 bp, SARS Virus
gttaaaccagtagacctggtgataa

SEQ ID NO: 125053 - DNA, 25 bp, SARS Virus
ttaaaccagtaggcctggtgataac

SEQ ID NO: 125054 - DNA, 25 bp, SARS Virus
taaaccagtagagctggtgataacc

SEQ ID NO: 125055 - DNA, 25 bp, SARS Virus
aaaccagtagacgtggtgataacca

SEQ ID NO: 125056 - DNA, 25 bp, SARS Virus
aaccagtagaccgggtgataaccac

SEQ ID NO: 125057 - DNA, 25 bp, SARS Virus
accagtagacctggtgataaccaca

SEQ ID NO: 125058 - DNA, 25 bp, SARS Virus
ccagtagacctggtgataaccacaa

SEQ ID NO: 125059 - DNA, 25 bp, SARS Virus
cagtagacctggggataaccacaac

SEQ ID NO: 125060 - DNA, 25 bp, SARS Virus
agtagacctggtgataaccacaact

SEQ ID NO: 125061 - DNA, 25 bp, SARS Virus
gtagacctggtggtaaccacaacta

SEQ ID NO: 125062 - DNA, 25 bp, SARS Virus
tagacctggtgagaaccacaactaa

SEQ ID NO: 125063 - DNA, 25 bp, SARS Virus
agacctggtgatgaccacaactaac

SEQ ID NO: 125064 - DNA, 25 bp, SARS Virus
gacctggtgatagccacaactaacc

SEQ ID NO: 125065 - DNA, 25 bp, SARS Virus
acctggtgataagcacaactaacct

SEQ ID NO: 125066 - DNA, 25 bp, SARS Virus
cctggtgataacgacaactaacctt

SEQ ID NO: 125067 - DNA, 25 bp, SARS Virus
ctggtgataaccgcaactaaccttg

SEQ ID NO: 125068 - DNA, 25 bp, SARS Virus
tggtgataaccagaactaaccttgc

SEQ ID NO: 125069 - DNA, 25 bp, SARS Virus
ggtgataaccacgactaaccttgcg

SEQ ID NO: 125070 - DNA, 25 bp, SARS Virus
gtgataaccacagctaaccttgcgg

SEQ ID NO: 125071 - DNA, 25 bp, SARS Virus
tgataaccacaagtaaccttgcggg

SEQ ID NO: 125072 - DNA, 25 bp, SARS Virus
gataaccacaacgaaccttgcggga

SEQ ID NO: 125073 - DNA, 25 bp, SARS Virus
ataaccacaactgaccttgcgggac

SEQ ID NO: 125074 - DNA, 25 bp, SARS Virus
taaccacaactagccttgcgggacc

SEQ ID NO: 125075 - DNA, 25 bp, SARS Virus
aaccacaactaagcttgcgggaccg

SEQ ID NO: 125076 - DNA, 25 bp, SARS Virus
accacaactaacgttgcgggaccgg

SEQ ID NO: 125077 - DNA, 25 bp, SARS Virus
ccacaactaaccgtgcgggaccgga

SEQ ID NO: 125078 - DNA, 25 bp, SARS Virus
cacaactaacctggcgggaccggag

SEQ ID NO: 125079 - DNA, 25 bp, SARS Virus
acaactaaccttgcgggaccggagc

SEQ ID NO: 125080 - DNA, 25 bp, SARS Virus
caactaaccttgggggaccggagct

SEQ ID NO: 125081 - DNA, 25 bp, SARS Virus
aactaaccttgcgggaccggagctc

SEQ ID NO: 125082 - DNA, 25 bp, SARS Virus
actaaccttgcgggaccggagctcc

SEQ ID NO: 125083 - DNA, 25 bp, SARS Virus
ctaaccttgcgggaccggagctccc

SEQ ID NO: 125084 - DNA, 25 bp, SARS Virus
taaccttgcggggccggagctccct

SEQ ID NO: 125085 - DNA, 25 bp, SARS Virus
aaccttgcgggagcggagctccctt

SEQ ID NO: 125086 - DNA, 25 bp, SARS Virus
accttgcgggacgggagctccctta

SEQ ID NO: 125087 - DNA, 25 bp, SARS Virus
ccttgcgggaccggagctcccttag

SEQ ID NO: 125088 - DNA, 25 bp, SARS Virus
cttgcgggaccggagctcccttaga

SEQ ID NO: 125089 - DNA, 25 bp, SARS Virus
ttgcgggaccggggctcccttagat

SEQ ID NO: 125090 - DNA, 25 bp, SARS Virus
tgcgggaccggagctcccttagatt

SEQ ID NO: 125091 - DNA, 25 bp, SARS Virus
gcgggaccggaggtcccttagattc

SEQ ID NO: 125092 - DNA, 25 bp, SARS Virus
cgggaccggagcgcccttagattca

SEQ ID NO: 125093 - DNA, 25 bp, SARS Virus
gggaccggagctgccttagattcaa

SEQ ID NO: 125094 - DNA, 25 bp, SARS Virus
ggaccggagctcgcttagattcaag

SEQ ID NO: 125095 - DNA, 25 bp, SARS Virus
gaccggagctccgttagattcaagg

SEQ ID NO: 125096 - DNA, 25 bp, SARS Virus
accggagctcccgtagattcaagga

SEQ ID NO: 125097 - DNA, 25 bp, SARS Virus
ccggagctccctgagattcaaggag

SEQ ID NO: 125098 - DNA, 25 bp, SARS Virus
cggagctcccttggattcaaggagg

SEQ ID NO: 125099 - DNA, 25 bp, SARS Virus
ggagctcccttagattcaaggagga

SEQ ID NO: 125100 - DNA, 25 bp, SARS Virus
gagctcccttaggttcaaggaggaa

SEQ ID NO: 125101 - DNA, 25 bp, SARS Virus
agctcccttagagtcaaggaggaac

SEQ ID NO: 125102 - DNA, 25 bp, SARS Virus
gctcccttagatgcaaggaggaacg

SEQ ID NO: 125103 - DNA, 25 bp, SARS Virus
ctcccttagattgaaggaggaacgg

SEQ ID NO: 125104 - DNA, 25 bp, SARS Virus
tcccttagattcgaggaggaacggt

SEQ ID NO: 125105 - DNA, 25 bp, SARS Virus
cccttagattcagggaggaacggta

SEQ ID NO: 125106 - DNA, 25 bp, SARS Virus
ccttagattcaaggaggaacggtac

SEQ ID NO: 125107 - DNA, 25 bp, SARS Virus
cttagattcaaggaggaacggtacg

SEQ ID NO: 125108 - DNA, 25 bp, SARS Virus
ttagattcaagggggaacggtacga

SEQ ID NO: 125109 - DNA, 25 bp, SARS Virus
tagattcaaggaggaacggtacgac

SEQ ID NO: 125110 - DNA, 25 bp, SARS Virus
agattcaaggaggaacggtacgact

SEQ ID NO: 125111 - DNA, 25 bp, SARS Virus
gattcaaggagggacggtacgactc

SEQ ID NO: 125112 - DNA, 25 bp, SARS Virus
attcaaggaggagcggtacgactca

SEQ ID NO: 125113 - DNA, 25 bp, SARS Virus
ttcaaggaggaagggtacgactcac

SEQ ID NO: 125114 - DNA, 25 bp, SARS Virus
tcaaggaggaacggtacgactcact

SEQ ID NO: 125115 - DNA, 25 bp, SARS Virus
caaggaggaacggtacgactcactc

SEQ ID NO: 125116 - DNA, 25 bp, SARS Virus
aaggaggaacgggacgactcactct

SEQ ID NO: 125117 - DNA, 25 bp, SARS Virus
aggaggaacggtgcgactcactctc

SEQ ID NO: 125118 - DNA, 25 bp, SARS Virus
ggaggaacggtaggactcactctcg

SEQ ID NO: 125119 - DNA, 25 bp, SARS Virus
gaggaacggtacgactcactctcga

SEQ ID NO: 125120 - DNA, 25 bp, SARS Virus
aggaacggtacggctcactctcgac

SEQ ID NO: 125121 - DNA, 25 bp, SARS Virus
ggaacggtacgagtcactctcgaca

SEQ ID NO: 125122 - DNA, 25 bp, SARS Virus
gaacggtacgacgcactctcgacac

SEQ ID NO: 125123 - DNA, 25 bp, SARS Virus
aacggtacgactgactctcgacact

SEQ ID NO: 125124 - DNA, 25 bp, SARS Virus
acggtacgactcgctctcgacactt

SEQ ID NO: 125125 - DNA, 25 bp, SARS Virus
cggtacgactcagtctcgacacttg

SEQ ID NO: 125126 - DNA, 25 bp, SARS Virus
ggtacgactcacgctcgacacttgg

SEQ ID NO: 125127 - DNA, 25 bp, SARS Virus
gtacgactcactgtcgacacttggt

SEQ ID NO: 125128 - DNA, 25 bp, SARS Virus
tacgactcactcgcgacacttggtt

SEQ ID NO: 125129 - DNA, 25 bp, SARS Virus
acgactcactctggacacttggttc

SEQ ID NO: 125130 - DNA, 25 bp, SARS Virus
cgactcactctcgacacttggttct

SEQ ID NO: 125131 - DNA, 25 bp, SARS Virus
gactcactctcggcacttggttctg

SEQ ID NO: 125132 - DNA, 25 bp, SARS Virus
actcactctcgagacttggttctgc

SEQ ID NO: 125133 - DNA, 25 bp, SARS Virus
ctcactctcgacgcttggttctgcg

SEQ ID NO: 125134 - DNA, 25 bp, SARS Virus
tcactctcgacagttggttctgcgt

SEQ ID NO: 125135 - DNA, 25 bp, SARS Virus
cactctcgacacgtggttctgcgtc

SEQ ID NO: 125136 - DNA, 25 bp, SARS Virus
actctcgacactgggttctgcgtca

SEQ ID NO: 125137 - DNA, 25 bp, SARS Virus
ctctcgacacttggttctgcgtcat

SEQ ID NO: 125138 - DNA, 25 bp, SARS Virus
tctcgacacttggttctgcgtcata

SEQ ID NO: 125139 - DNA, 25 bp, SARS Virus
ctcgacacttgggtctgcgtcataa

SEQ ID NO: 125140 - DNA, 25 bp, SARS Virus
tcgacacttggtgctgcgtcataat

SEQ ID NO: 125141 - DNA, 25 bp, SARS Virus
cgacacttggttgtgcgtcataata

SEQ ID NO: 125142 - DNA, 25 bp, SARS Virus
gacacttggttcggcgtcataataa

SEQ ID NO: 125143 - DNA, 25 bp, SARS Virus
acacttggttctgcgtcataataac

SEQ ID NO: 125144 - DNA, 25 bp, SARS Virus
cacttggttctgggtcataataacc

SEQ ID NO: 125145 - DNA, 25 bp, SARS Virus
acttggttctgcgtcataataaccc

SEQ ID NO: 125146 - DNA, 25 bp, SARS Virus
cttggttctgcggcataataaccca

SEQ ID NO: 125147 - DNA, 25 bp, SARS Virus
ttggttctgcgtgataataacccat

SEQ ID NO: 125148 - DNA, 25 bp, SARS Virus
tggttctgcgtcgtaataacccatt

SEQ ID NO: 125149 - DNA, 25 bp, SARS Virus
ggttctgcgtcagaataacccattt

SEQ ID NO: 125150 - DNA, 25 bp, SARS Virus
gttctgcgtcatgataacccatttg

SEQ ID NO: 125151 - DNA, 25 bp, SARS Virus
ttctgcgtcatagtaacccatttgg

SEQ ID NO: 125152 - DNA, 25 bp, SARS Virus
tctgcgtcataagaacccatttgga

SEQ ID NO: 125153 - DNA, 25 bp, SARS Virus
ctgcgtcataatgacccatttggaa

SEQ ID NO: 125154 - DNA, 25 bp, SARS Virus
tgcgtcataatagcccatttggaac

SEQ ID NO: 125155 - DNA, 25 bp, SARS Virus
gcgtcataataagccatttggaacc

SEQ ID NO: 125156 - DNA, 25 bp, SARS Virus
cgtcataataacgcatttggaaccc

SEQ ID NO: 125157 - DNA, 25 bp, SARS Virus
gtcataataaccgatttggaacccc

SEQ ID NO: 125158 - DNA, 25 bp, SARS Virus
tcataataacccgtttggaacccca

SEQ ID NO: 125159 - DNA, 25 bp, SARS Virus
cataataacccagttggaaccccag

SEQ ID NO: 125160 - DNA, 25 bp, SARS Virus
ataataacccatgtggaaccccagc

SEQ ID NO: 125161 - DNA, 25 bp, SARS Virus
taataacccattgggaaccccagcc

SEQ ID NO: 125162 - DNA, 25 bp, SARS Virus
aataacccatttggaaccccagccg

SEQ ID NO: 125163 - DNA, 25 bp, SARS Virus
ataacccatttggaaccccagccgc

SEQ ID NO: 125164 - DNA, 25 bp, SARS Virus
taacccatttgggaccccagccgcg

SEQ ID NO: 125165 - DNA, 25 bp, SARS Virus
aacccatttggagccccagccgcga

SEQ ID NO: 125166 - DNA, 25 bp, SARS Virus
acccatttggaagcccagccgcgac

SEQ ID NO: 125167 - DNA, 25 bp, SARS Virus
cccatttggaacgccagccgcgaca

SEQ ID NO: 125168 - DNA, 25 bp, SARS Virus
ccatttggaaccgcagccgcgacaa

SEQ ID NO: 125169 - DNA, 25 bp, SARS Virus
catttggaacccgagccgcgacaaa

SEQ ID NO: 125170 - DNA, 25 bp, SARS Virus
atttggaaccccggccgcgacaaaa

SEQ ID NO: 125171 - DNA, 25 bp, SARS Virus
tttggaaccccagccgcgacaaaac

SEQ ID NO: 125172 - DNA, 25 bp, SARS Virus
ttggaaccccaggcgcgacaaaacc

SEQ ID NO: 125173 - DNA, 25 bp, SARS Virus
tggaaccccagcggcgacaaaaccg

SEQ ID NO: 125174 - DNA, 25 bp, SARS Virus
ggaaccccagccgcgacaaaaccgg

SEQ ID NO: 125175 - DNA, 25 bp, SARS Virus
gaaccccagccgggacaaaaccgga

SEQ ID NO: 125176 - DNA, 25 bp, SARS Virus
aaccccagccgcgacaaaaccggaa

SEQ ID NO: 125177 - DNA, 25 bp, SARS Virus
accccagccgcggcaaaaccggaac

SEQ ID NO: 125178 - DNA, 25 bp, SARS Virus
ccccagccgcgagaaaaccggaacg

SEQ ID NO: 125179 - DNA, 25 bp, SARS Virus
cccagccgcgacgaaaccggaacgg

SEQ ID NO: 125180 - DNA, 25 bp, SARS Virus
ccagccgcgacagaaccggaacggg

SEQ ID NO: 125181 - DNA, 25 bp, SARS Virus
cagccgcgacaagaccggaacgggg

SEQ ID NO: 125182 - DNA, 25 bp, SARS Virus
agccgcgacaaagccggaacggggt

SEQ ID NO: 125183 - DNA, 25 bp, SARS Virus
gccgcgacaaaagcggaacggggta

SEQ ID NO: 125184 - DNA, 25 bp, SARS Virus
ccgcgacaaaacgggaacggggtaa

SEQ ID NO: 125185 - DNA, 25 bp, SARS Virus
cgcgacaaaaccggaacggggtaac

SEQ ID NO: 125186 - DNA, 25 bp, SARS Virus
gcgacaaaaccggaacggggtaacg

SEQ ID NO: 125187 - DNA, 25 bp, SARS Virus
cgacaaaaccgggacggggtaacgc

SEQ ID NO: 125188 - DNA, 25 bp, SARS Virus
gacaaaaccggagcggggtaacgca

SEQ ID NO: 125189 - DNA, 25 bp, SARS Virus
acaaaaccggaagggggtaacgcag

SEQ ID NO: 125190 - DNA, 25 bp, SARS Virus
caaaaccggaacggggtaacgcagg

SEQ ID NO: 125191 - DNA, 25 bp, SARS Virus
aaaaccggaacggggtaacgcagga

SEQ ID NO: 125192 - DNA, 25 bp, SARS Virus
aaaccggaacggggtaacgcaggag

SEQ ID NO: 125193 - DNA, 25 bp, SARS Virus
aaccggaacggggtaacgcaggagg

SEQ ID NO: 125194 - DNA, 25 bp, SARS Virus
accggaacgggggaacgcaggaggt

SEQ ID NO: 125195 - DNA, 25 bp, SARS Virus
ccggaacggggtgacgcaggaggta

SEQ ID NO: 125196 - DNA, 25 bp, SARS Virus
cggaacggggtagcgcaggaggtaa

SEQ ID NO: 125197 - DNA, 25 bp, SARS Virus
ggaacggggtaaggcaggaggtaag

SEQ ID NO: 125198 - DNA, 25 bp, SARS Virus
gaacggggtaacgcaggaggtaaga

SEQ ID NO: 125199 - DNA, 25 bp, SARS Virus
aacggggtaacggaggaggtaagac

SEQ ID NO: 125200 - DNA, 25 bp, SARS Virus
acggggtaacgcgggaggtaagacc

SEQ ID NO: 125201 - DNA, 25 bp, SARS Virus
cggggtaacgcaggaggtaagacca

SEQ ID NO: 125202 - DNA, 25 bp, SARS Virus
ggggtaacgcaggaggtaagaccaa

SEQ ID NO: 125203 - DNA, 25 bp, SARS Virus
gggtaacgcagggggtaagaccaat

SEQ ID NO: 125204 - DNA, 25 bp, SARS Virus
ggtaacgcaggaggtaagaccaata

SEQ ID NO: 125205 - DNA, 25 bp, SARS Virus
gtaacgcaggaggtaagaccaataa

SEQ ID NO: 125206 - DNA, 25 bp, SARS Virus
taacgcaggagggaagaccaataac

SEQ ID NO: 125207 - DNA, 25 bp, SARS Virus
aacgcaggaggtgagaccaataaca

SEQ ID NO: 125208 - DNA, 25 bp, SARS Virus
acgcaggaggtaggaccaataacag

SEQ ID NO: 125209 - DNA, 25 bp, SARS Virus
cgcaggaggtaagaccaataacagt

SEQ ID NO: 125210 - DNA, 25 bp, SARS Virus
gcaggaggtaaggccaataacagtc

SEQ ID NO: 125211 - DNA, 25 bp, SARS Virus
caggaggtaagagcaataacagtca

SEQ ID NO: 125212 - DNA, 25 bp, SARS Virus
aggaggtaagacgaataacagtcaa

SEQ ID NO: 125213 - DNA, 25 bp, SARS Virus
ggaggtaagaccgataacagtcaac

SEQ ID NO: 125214 - DNA, 25 bp, SARS Virus
gaggtaagaccagtaacagtcaact

SEQ ID NO: 125215 - DNA, 25 bp, SARS Virus
aggtaagaccaagaacagtcaactt

SEQ ID NO: 125216 - DNA, 25 bp, SARS Virus
ggtaagaccaatgacagtcaactta

SEQ ID NO: 125217 - DNA, 25 bp, SARS Virus
gtaagaccaatagcagtcaacttag

SEQ ID NO: 125218 - DNA, 25 bp, SARS Virus
taagaccaataagagtcaacttaga

SEQ ID NO: 125219 - DNA, 25 bp, SARS Virus
aagaccaataacggtcaacttagac

SEQ ID NO: 125220 - DNA, 25 bp, SARS Virus
agaccaataacagtcaacttagaca

SEQ ID NO: 125221 - DNA, 25 bp, SARS Virus
gaccaataacaggcaacttagacac

SEQ ID NO: 125222 - DNA, 25 bp, SARS Virus
accaataacagtgaacttagacacc

SEQ ID NO: 125223 - DNA, 25 bp, SARS Virus
ccaataacagtcgacttagacaccc

SEQ ID NO: 125224 - DNA, 25 bp, SARS Virus
caataacagtcagcttagacaccca

SEQ ID NO: 125225 - DNA, 25 bp, SARS Virus
aataacagtcaagttagacacccag

SEQ ID NO: 125226 - DNA, 25 bp, SARS Virus
ataacagtcaacgtagacacccagg

SEQ ID NO: 125227 - DNA, 25 bp, SARS Virus
taacagtcaactgagacacccaggt

SEQ ID NO: 125228 - DNA, 25 bp, SARS Virus
aacagtcaacttggacacccaggtg

SEQ ID NO: 125229 - DNA, 25 bp, SARS Virus
acagtcaacttagacacccaggtgg

SEQ ID NO: 125230 - DNA, 25 bp, SARS Virus
cagtcaacttaggcacccaggtggt

SEQ ID NO: 125231 - DNA, 25 bp, SARS Virus
agtcaacttagagacccaggtggtt

SEQ ID NO: 125232 - DNA, 25 bp, SARS Virus
gtcaacttagacgcccaggtggttt

SEQ ID NO: 125233 - DNA, 25 bp, SARS Virus
tcaacttagacagccaggtggttta

SEQ ID NO: 125234 - DNA, 25 bp, SARS Virus
caacttagacacgcaggtggtttac

SEQ ID NO: 125235 - DNA, 25 bp, SARS Virus
aacttagacaccgaggtggtttaca

SEQ ID NO: 125236 - DNA, 25 bp, SARS Virus
acttagacacccgggtggtttacat

SEQ ID NO: 125237 - DNA, 25 bp, SARS Virus
cttagacacccaggtggtttacatt

SEQ ID NO: 125238 - DNA, 25 bp, SARS Virus
ttagacacccaggtggtttacatta

SEQ ID NO: 125239 - DNA, 25 bp, SARS Virus
tagacacccagggggtttacattac

SEQ ID NO: 125240 - DNA, 25 bp, SARS Virus
agacacccaggtggtttacattacg

SEQ ID NO: 125241 - DNA, 25 bp, SARS Virus
gacacccaggtggtttacattacgc

SEQ ID NO: 125242 - DNA, 25 bp, SARS Virus
acacccaggtgggttacattacgcc

SEQ ID NO: 125243 - DNA, 25 bp, SARS Virus
cacccaggtggtgtacattacgccc

SEQ ID NO: 125244 - DNA, 25 bp, SARS Virus
acccaggtggttgacattacgcccc

SEQ ID NO: 125245 - DNA, 25 bp, SARS Virus
cccaggtggtttgcattacgccccc

SEQ ID NO: 125246 - DNA, 25 bp, SARS Virus
ccaggtggtttagattacgcccccc

SEQ ID NO: 125247 - DNA, 25 bp, SARS Virus
caggtggtttacgttacgccccccg

SEQ ID NO: 125248 - DNA, 25 bp, SARS Virus
aggtggtttacagtacgccccccgt

SEQ ID NO: 125249 - DNA, 25 bp, SARS Virus
ggtggtttacatgacgccccccgtg

SEQ ID NO: 125250 - DNA, 25 bp, SARS Virus
gtggtttacattgcgccccccgtga

SEQ ID NO: 125251 - DNA, 25 bp, SARS Virus
tggtttacattaggccccccgtgat

SEQ ID NO: 125252 - DNA, 25 bp, SARS Virus
ggtttacattacgccccccgtgatg

SEQ ID NO: 125253 - DNA, 25 bp, SARS Virus
gtttacattacggcccccgtgatgc

SEQ ID NO: 125254 - DNA, 25 bp, SARS Virus
tttacattacgcgccccgtgatgca

SEQ ID NO: 125255 - DNA, 25 bp, SARS Virus
ttacattacgccgcccgtgatgcaa

SEQ ID NO: 125256 - DNA, 25 bp, SARS Virus
tacattacgcccgccgtgatgcaac

SEQ ID NO: 125257 - DNA, 25 bp, SARS Virus
acattacgccccgcgtgatgcaacc

SEQ ID NO: 125258 - DNA, 25 bp, SARS Virus
cattacgcccccggtgatgcaacca

SEQ ID NO: 125259 - DNA, 25 bp, SARS Virus
attacgccccccgtgatgcaaccaa

SEQ ID NO: 125260 - DNA, 25 bp, SARS Virus
ttacgccccccgggatgcaaccaaa

SEQ ID NO: 125261 - DNA, 25 bp, SARS Virus
tacgccccccgtgatgcaaccaaac

SEQ ID NO: 125262 - DNA, 25 bp, SARS Virus
acgccccccgtggtgcaaccaaact

SEQ ID NO: 125263 - DNA, 25 bp, SARS Virus
cgccccccgtgaggcaaccaaacta

SEQ ID NO: 125264 - DNA, 25 bp, SARS Virus
gccccccgtgatgcaaccaaactaa

SEQ ID NO: 125265 - DNA, 25 bp, SARS Virus
ccccccgtgatggaaccaaactaac

SEQ ID NO: 125266 - DNA, 25 bp, SARS Virus
cccccgtgatgcgaccaaactaacc

SEQ ID NO: 125267 - DNA, 25 bp, SARS Virus
ccccgtgatgcagccaaactaaccc

SEQ ID NO: 125268 - DNA, 25 bp, SARS Virus
cccgtgatgcaagcaaactaacccc

SEQ ID NO: 125269 - DNA, 25 bp, SARS Virus
ccgtgatgcaacgaaactaacccca

SEQ ID NO: 125270 - DNA, 25 bp, SARS Virus
cgtgatgcaaccgaactaaccccag

SEQ ID NO: 125271 - DNA, 25 bp, SARS Virus
gtgatgcaaccagactaaccccagg

SEQ ID NO: 125272 - DNA, 25 bp, SARS Virus
tgatgcaaccaagctaaccccaggt

SEQ ID NO: 125273 - DNA, 25 bp, SARS Virus
gatgcaaccaaagtaaccccaggta

SEQ ID NO: 125274 - DNA, 25 bp, SARS Virus
atgcaaccaaacgaaccccaggtaa

SEQ ID NO: 125275 - DNA, 25 bp, SARS Virus
tgcaaccaaactgaccccaggtaat

SEQ ID NO: 125276 - DNA, 25 bp, SARS Virus
gcaaccaaactagccccaggtaata

SEQ ID NO: 125277 - DNA, 25 bp, SARS Virus
caaccaaactaagcccaggtaatag

SEQ ID NO: 125278 - DNA, 25 bp, SARS Virus
aaccaaactaacgccaggtaatagt

SEQ ID NO: 125279 - DNA, 25 bp, SARS Virus
accaaactaaccgcaggtaatagtc

SEQ ID NO: 125280 - DNA, 25 bp, SARS Virus
ccaaactaacccgaggtaatagtct

SEQ ID NO: 125281 - DNA, 25 bp, SARS Virus
caaactaaccccgggtaatagtctg

SEQ ID NO: 125282 - DNA, 25 bp, SARS Virus
aaactaaccccaggtaatagtctgt

SEQ ID NO: 125283 - DNA, 25 bp, SARS Virus
aactaaccccaggtaatagtctgta

SEQ ID NO: 125284 - DNA, 25 bp, SARS Virus
actaaccccagggaatagtctgtaa

SEQ ID NO: 125285 - DNA, 25 bp, SARS Virus
ctaaccccaggtgatagtctgtaaa

SEQ ID NO: 125286 - DNA, 25 bp, SARS Virus
taaccccaggtagtagtctgtaaaa

SEQ ID NO: 125287 - DNA, 25 bp, SARS Virus
aaccccaggtaagagtctgtaaaat

SEQ ID NO: 125288 - DNA, 25 bp, SARS Virus
accccaggtaatggtctgtaaaatt

SEQ ID NO: 125289 - DNA, 25 bp, SARS Virus
ccccaggtaatagtctgtaaaatta

SEQ ID NO: 125290 - DNA, 25 bp, SARS Virus
cccaggtaataggctgtaaaattaa

SEQ ID NO: 125291 - DNA, 25 bp, SARS Virus
ccaggtaatagtgtgtaaaattaaa

SEQ ID NO: 125292 - DNA, 25 bp, SARS Virus
caggtaatagtcggtaaaattaaac

SEQ ID NO: 125293 - DNA, 25 bp, SARS Virus
aggtaatagtctgtaaaattaaaca

SEQ ID NO: 125294 - DNA, 25 bp, SARS Virus
ggtaatagtctggaaaattaaacaa

SEQ ID NO: 125295 - DNA, 25 bp, SARS Virus
gtaatagtctgtgaaattaaacaag

SEQ ID NO: 125296 - DNA, 25 bp, SARS Virus
taatagtctgtagaattaaacaagc

SEQ ID NO: 125297 - DNA, 25 bp, SARS Virus
aatagtctgtaagattaaacaagca

SEQ ID NO: 125298 - DNA, 25 bp, SARS Virus
atagtctgtaaagttaaacaagcaa

SEQ ID NO: 125299 - DNA, 25 bp, SARS Virus
tagtctgtaaaagtaaacaagcaaa

SEQ ID NO: 125300 - DNA, 25 bp, SARS Virus
agtctgtaaaatgaaacaagcaaat

SEQ ID NO: 125301 - DNA, 25 bp, SARS Virus
gtctgtaaaattgaacaagcaaata

SEQ ID NO: 125302 - DNA, 25 bp, SARS Virus
tctgtaaaattagacaagcaaataa

SEQ ID NO: 125303 - DNA, 25 bp, SARS Virus
ctgtaaaattaagcaagcaaataaa

SEQ ID NO: 125304 - DNA, 25 bp, SARS Virus
tgtaaaattaaagaagcaaataaat

SEQ ID NO: 125305 - DNA, 25 bp, SARS Virus
gtaaaattaaacgagcaaataaatt

SEQ ID NO: 125306 - DNA, 25 bp, SARS Virus
taaaattaaacaggcaaataaattt

SEQ ID NO: 125307 - DNA, 25 bp, SARS Virus
aaaattaaacaagcaaataaatttt

SEQ ID NO: 125308 - DNA, 25 bp, SARS Virus
aaattaaacaaggaaataaattttg

SEQ ID NO: 125309 - DNA, 25 bp, SARS Virus
aattaaacaagcgaataaattttgt

SEQ ID NO: 125310 - DNA, 25 bp, SARS Virus
attaaacaagcagataaattttgtt

SEQ ID NO: 125311 - DNA, 25 bp, SARS Virus
ttaaacaagcaagtaaattttgttg

SEQ ID NO: 125312 - DNA, 25 bp, SARS Virus
taaacaagcaaagaaattttgttgt

SEQ ID NO: 125313 - DNA, 25 bp, SARS Virus
aaacaagcaaatgaattttgttgtt

SEQ ID NO: 125314 - DNA, 25 bp, SARS Virus
aacaagcaaatagattttgttgttc

SEQ ID NO: 125315 - DNA, 25 bp, SARS Virus
acaagcaaataagttttgttgttca

SEQ ID NO: 125316 - DNA, 25 bp, SARS Virus
caagcaaataaagtttgttgttcat

SEQ ID NO: 125317 - DNA, 25 bp, SARS Virus
aagcaaataaatgttgttgttcatg

SEQ ID NO: 125318 - DNA, 25 bp, SARS Virus
agcaaataaattgtgttgttcatgc

SEQ ID NO: 125319 - DNA, 25 bp, SARS Virus
gcaaataaatttggttgttcatgca

SEQ ID NO: 125320 - DNA, 25 bp, SARS Virus
caaataaattttgttgttcatgcag

SEQ ID NO: 125321 - DNA, 25 bp, SARS Virus
aaataaattttggtgttcatgcaga

SEQ ID NO: 125322 - DNA, 25 bp, SARS Virus
aataaattttgtggttcatgcagag

SEQ ID NO: 125323 - DNA, 25 bp, SARS Virus
ataaattttgttgttcatgcagaga

SEQ ID NO: 125324 - DNA, 25 bp, SARS Virus
taaattttgttggtcatgcagagat

SEQ ID NO: 125325 - DNA, 25 bp, SARS Virus
aaattttgttgtgcatgcagagatt

SEQ ID NO: 125326 - DNA, 25 bp, SARS Virus
aattttgttgttgatgcagagattt

SEQ ID NO: 125327 - DNA, 25 bp, SARS Virus
attttgttgttcgtgcagagattta

SEQ ID NO: 125328 - DNA, 25 bp, SARS Virus
ttttgttgttcaggcagagatttac

SEQ ID NO: 125329 - DNA, 25 bp, SARS Virus
tttgttgttcatgcagagatttacg

SEQ ID NO: 125330 - DNA, 25 bp, SARS Virus
ttgttgttcatggagagatttacgt

SEQ ID NO: 125331 - DNA, 25 bp, SARS Virus
tgttgttcatgcggagatttacgtc

SEQ ID NO: 125332 - DNA, 25 bp, SARS Virus
gttgttcatgcagagatttacgtcg

SEQ ID NO: 125333 - DNA, 25 bp, SARS Virus
ttgttcatgcagggatttacgtcgt

SEQ ID NO: 125334 - DNA, 25 bp, SARS Virus
tgttcatgcagagatttacgtcgtc

SEQ ID NO: 125335 - DNA, 25 bp, SARS Virus
gttcatgcagaggtttacgtcgtca

SEQ ID NO: 125336 - DNA, 25 bp, SARS Virus
ttcatgcagagagttacgtcgtcaa

SEQ ID NO: 125337 - DNA, 25 bp, SARS Virus
tcatgcagagatgtacgtcgtcaaa

SEQ ID NO: 125338 - DNA, 25 bp, SARS Virus
catgcagagattgacgtcgtcaaac

SEQ ID NO: 125339 - DNA, 25 bp, SARS Virus
atgcagagatttgcgtcgtcaaacc

SEQ ID NO: 125340 - DNA, 25 bp, SARS Virus
tgcagagatttaggtcgtcaaacca

SEQ ID NO: 125341 - DNA, 25 bp, SARS Virus
gcagagatttacgtcgtcaaaccac

SEQ ID NO: 125342 - DNA, 25 bp, SARS Virus
cagagatttacggcgtcaaaccact

SEQ ID NO: 125343 - DNA, 25 bp, SARS Virus
agagatttacgtggtcaaaccactg

SEQ ID NO: 125344 - DNA, 25 bp, SARS Virus
gagatttacgtcgtcaaaccactgg

SEQ ID NO: 125345 - DNA, 25 bp, SARS Virus
agatttacgtcggcaaaccactgga

SEQ ID NO: 125346 - DNA, 25 bp, SARS Virus
gatttacgtcgtgaaaccactggaa

SEQ ID NO: 125347 - DNA, 25 bp, SARS Virus
atttacgtcgtcgaaccactggaag

SEQ ID NO: 125348 - DNA, 25 bp, SARS Virus
tttacgtcgtcagaccactggaagt

SEQ ID NO: 125349 - DNA, 25 bp, SARS Virus
ttacgtcgtcaagccactggaagta

SEQ ID NO: 125350 - DNA, 25 bp, SARS Virus
tacgtcgtcaaagcactggaagtac

SEQ ID NO: 125351 - DNA, 25 bp, SARS Virus
acgtcgtcaaacgactggaagtact

SEQ ID NO: 125352 - DNA, 25 bp, SARS Virus
cgtcgtcaaaccgctggaagtactt

SEQ ID NO: 125353 - DNA, 25 bp, SARS Virus
gtcgtcaaaccagtggaagtacttc

SEQ ID NO: 125354 - DNA, 25 bp, SARS Virus
tcgtcaaaccacgggaagtacttcc

SEQ ID NO: 125355 - DNA, 25 bp, SARS Virus
cgtcaaaccactggaagtacttcca

SEQ ID NO: 125356 - DNA, 25 bp, SARS Virus
gtcaaaccactggaagtacttccat

SEQ ID NO: 125357 - DNA, 25 bp, SARS Virus
tcaaaccactgggagtacttccatg

SEQ ID NO: 125358 - DNA, 25 bp, SARS Virus
caaaccactggaggtacttccatgg

SEQ ID NO: 125359 - DNA, 25 bp, SARS Virus
aaaccactggaagtacttccatggt

SEQ ID NO: 125360 - DNA, 25 bp, SARS Virus
aaccactggaaggacttccatggtt

SEQ ID NO: 125361 - DNA, 25 bp, SARS Virus
accactggaagtgcttccatggttg

SEQ ID NO: 125362 - DNA, 25 bp, SARS Virus
ccactggaagtagttccatggttgt

SEQ ID NO: 125363 - DNA, 25 bp, SARS Virus
cactggaagtacgtccatggttgtg

SEQ ID NO: 125364 - DNA, 25 bp, SARS Virus
actggaagtactgccatggttgtgg

SEQ ID NO: 125365 - DNA, 25 bp, SARS Virus
ctggaagtacttgcatggttgtgga

SEQ ID NO: 125366 - DNA, 25 bp, SARS Virus
tggaagtacttcgatggttgtggat

SEQ ID NO: 125367 - DNA, 25 bp, SARS Virus
ggaagtacttccgtggttgtggatc

SEQ ID NO: 125368 - DNA, 25 bp, SARS Virus
gaagtacttccagggttgtggatcg

SEQ ID NO: 125369 - DNA, 25 bp, SARS Virus
aagtacttccatggttgtggatcga

SEQ ID NO: 125370 - DNA, 25 bp, SARS Virus
agtacttccatggttgtggatcgat

SEQ ID NO: 125371 - DNA, 25 bp, SARS Virus
gtacttccatgggtgtggatcgata

SEQ ID NO: 125372 - DNA, 25 bp, SARS Virus
tacttccatggtggtggatcgatat

SEQ ID NO: 125373 - DNA, 25 bp, SARS Virus
acttccatggttgtggatcgatatt

SEQ ID NO: 125374 - DNA, 25 bp, SARS Virus
cttccatggttggggatcgatattc

SEQ ID NO: 125375 - DNA, 25 bp, SARS Virus
ttccatggttgtggatcgatattcg

SEQ ID NO: 125376 - DNA, 25 bp, SARS Virus
tccatggttgtggatcgatattcgc

SEQ ID NO: 125377 - DNA, 25 bp, SARS Virus
ccatggttgtgggtcgatattcgcg

SEQ ID NO: 125378 - DNA, 25 bp, SARS Virus
catggttgtggagcgatattcgcgt

SEQ ID NO: 125379 - DNA, 25 bp, SARS Virus
atggttgtggatggatattcgcgtg

SEQ ID NO: 125380 - DNA, 25 bp, SARS Virus
tggttgtggatcgatattcgcgtgg

SEQ ID NO: 125381 - DNA, 25 bp, SARS Virus
ggttgtggatcggtattcgcgtggt

SEQ ID NO: 125382 - DNA, 25 bp, SARS Virus
gttgtggatcgagattcgcgtggtg

SEQ ID NO: 125383 - DNA, 25 bp, SARS Virus
ttgtggatcgatgttcgcgtggtgg

SEQ ID NO: 125384 - DNA, 25 bp, SARS Virus
tgtggatcgatagtcgcgtggtggt

SEQ ID NO: 125385 - DNA, 25 bp, SARS Virus
gtggatcgatatgcgcgtggtggtc

SEQ ID NO: 125386 - DNA, 25 bp, SARS Virus
tggatcgatattggcgtggtggtcg

SEQ ID NO: 125387 - DNA, 25 bp, SARS Virus
ggatcgatattcgcgtggtggtcga

SEQ ID NO: 125388 - DNA, 25 bp, SARS Virus
gatcgatattcgggtggtggtcgac

SEQ ID NO: 125389 - DNA, 25 bp, SARS Virus
atcgatattcgcgtggtggtcgacc

SEQ ID NO: 125390 - DNA, 25 bp, SARS Virus
tcgatattcgcggggtggtcgacct

SEQ ID NO: 125391 - DNA, 25 bp, SARS Virus
cgatattcgcgtggtggtcgaccta

SEQ ID NO: 125392 - DNA, 25 bp, SARS Virus
gatattcgcgtggtggtcgacctag

SEQ ID NO: 125393 - DNA, 25 bp, SARS Virus
atattcgcgtgggggtcgacctaga

SEQ ID NO: 125394 - DNA, 25 bp, SARS Virus
tattcgcgtggtggtcgacctagaa

SEQ ID NO: 125395 - DNA, 25 bp, SARS Virus
attcgcgtggtggtcgacctagaac

SEQ ID NO: 125396 - DNA, 25 bp, SARS Virus
ttcgcgtggtgggcgacctagaact

SEQ ID NO: 125397 - DNA, 25 bp, SARS Virus
tcgcgtggtggtggacctagaactg

SEQ ID NO: 125398 - DNA, 25 bp, SARS Virus
cgcgtggtggtcgacctagaactgt

SEQ ID NO: 125399 - DNA, 25 bp, SARS Virus
gcgtggtggtcggcctagaactgtc

SEQ ID NO: 125400 - DNA, 25 bp, SARS Virus
cgtggtggtcgagctagaactgtca

SEQ ID NO: 125401 - DNA, 25 bp, SARS Virus
gtggtggtcgacgtagaactgtcaa

SEQ ID NO: 125402 - DNA, 25 bp, SARS Virus
tggtggtcgaccgagaactgtcaac

SEQ ID NO: 125403 - DNA, 25 bp, SARS Virus
ggtggtcgacctggaactgtcaact

SEQ ID NO: 125404 - DNA, 25 bp, SARS Virus
gtggtcgacctagaactgtcaacta

SEQ ID NO: 125405 - DNA, 25 bp, SARS Virus
tggtcgacctaggactgtcaactat

SEQ ID NO: 125406 - DNA, 25 bp, SARS Virus
ggtcgacctagagctgtcaactatc

SEQ ID NO: 125407 - DNA, 25 bp, SARS Virus
gtcgacctagaagtgtcaactatca

SEQ ID NO: 125408 - DNA, 25 bp, SARS Virus
tcgacctagaacggtcaactatcat

SEQ ID NO: 125409 - DNA, 25 bp, SARS Virus
cgacctagaactgtcaactatcatt

SEQ ID NO: 125410 - DNA, 25 bp, SARS Virus
gacctagaactggcaactatcattg

SEQ ID NO: 125411 - DNA, 25 bp, SARS Virus
acctagaactgtgaactatcattgt

SEQ ID NO: 125412 - DNA, 25 bp, SARS Virus
cctagaactgtcgactatcattgta

SEQ ID NO: 125413 - DNA, 25 bp, SARS Virus
ctagaactgtcagctatcattgtaa

SEQ ID NO: 125414 - DNA, 25 bp, SARS Virus
tagaactgtcaagtatcattgtaat

SEQ ID NO: 125415 - DNA, 25 bp, SARS Virus
agaactgtcaacgatcattgtaatc

SEQ ID NO: 125416 - DNA, 25 bp, SARS Virus
gaactgtcaactgtcattgtaatcc

SEQ ID NO: 125417 - DNA, 25 bp, SARS Virus
aactgtcaactagcattgtaatcca

SEQ ID NO: 125418 - DNA, 25 bp, SARS Virus
actgtcaactatgattgtaatccac

SEQ ID NO: 125419 - DNA, 25 bp, SARS Virus
ctgtcaactatcgttgtaatccaca

SEQ ID NO: 125420 - DNA, 25 bp, SARS Virus
tgtcaactatcagtgtaatccacac

SEQ ID NO: 125421 - DNA, 25 bp, SARS Virus
gtcaactatcatggtaatccacacg

SEQ ID NO: 125422 - DNA, 25 bp, SARS Virus
tcaactatcattgtaatccacacgt

SEQ ID NO: 125423 - DNA, 25 bp, SARS Virus
caactatcattggaatccacacgta

SEQ ID NO: 125424 - DNA, 25 bp, SARS Virus
aactatcattgtgatccacacgtac

SEQ ID NO: 125425 - DNA, 25 bp, SARS Virus
actatcattgtagtccacacgtaca

SEQ ID NO: 125426 - DNA, 25 bp, SARS Virus
ctatcattgtaagccacacgtacaa

SEQ ID NO: 125427 - DNA, 25 bp, SARS Virus
tatcattgtaatgcacacgtacaaa

SEQ ID NO: 125428 - DNA, 25 bp, SARS Virus
atcattgtaatcgacacgtacaaac

SEQ ID NO: 125429 - DNA, 25 bp, SARS Virus
tcattgtaatccgcacgtacaaact

SEQ ID NO: 125430 - DNA, 25 bp, SARS Virus
cattgtaatccagacgtacaaactt

SEQ ID NO: 125431 - DNA, 25 bp, SARS Virus
attgtaatccacgcgtacaaacttg

SEQ ID NO: 125432 - DNA, 25 bp, SARS Virus
ttgtaatccacaggtacaaacttgg

SEQ ID NO: 125433 - DNA, 25 bp, SARS Virus
tgtaatccacacgtacaaacttggt

SEQ ID NO: 125434 - DNA, 25 bp, SARS Virus
gtaatccacacggacaaacttggta

SEQ ID NO: 125435 - DNA, 25 bp, SARS Virus
taatccacacgtgcaaacttggtat

SEQ ID NO: 125436 - DNA, 25 bp, SARS Virus
aatccacacgtagaaacttggtatc

SEQ ID NO: 125437 - DNA, 25 bp, SARS Virus
atccacacgtacgaacttggtatca

SEQ ID NO: 125438 - DNA, 25 bp, SARS Virus
tccacacgtacagacttggtatcac

SEQ ID NO: 125439 - DNA, 25 bp, SARS Virus
ccacacgtacaagcttggtatcaca

SEQ ID NO: 125440 - DNA, 25 bp, SARS Virus
cacacgtacaaagttggtatcacac

SEQ ID NO: 125441 - DNA, 25 bp, SARS Virus
acacgtacaaacgtggtatcacacg

SEQ ID NO: 125442 - DNA, 25 bp, SARS Virus
cacgtacaaactgggtatcacacgg

SEQ ID NO: 125443 - DNA, 25 bp, SARS Virus
acgtacaaacttggtatcacacggt

SEQ ID NO: 125444 - DNA, 25 bp, SARS Virus
cgtacaaacttggtatcacacggta

SEQ ID NO: 125445 - DNA, 25 bp, SARS Virus
gtacaaacttgggatcacacggtag

SEQ ID NO: 125446 - DNA, 25 bp, SARS Virus
tacaaacttggtgtcacacggtaga

SEQ ID NO: 125447 - DNA, 25 bp, SARS Virus
acaaacttggtagcacacggtagat

SEQ ID NO: 125448 - DNA, 25 bp, SARS Virus
caaacttggtatgacacggtagata

SEQ ID NO: 125449 - DNA, 25 bp, SARS Virus
caaggatccattttcttcatggtag

SEQ ID NO: 125450 - DNA, 25 bp, SARS Virus
aaggatccattatcttcatggtaga

SEQ ID NO: 125451 - DNA, 25 bp, SARS Virus
aggatccattattttcatggtagac

SEQ ID NO: 125452 - DNA, 25 bp, SARS Virus
ggatccattatcttcatggtagacc

SEQ ID NO: 125453 - DNA, 25 bp, SARS Virus
gatccattatcttcatggtagaccc

SEQ ID NO: 125454 - DNA, 25 bp, SARS Virus
atccattatctttatggtagacccc

SEQ ID NO: 125455 - DNA, 25 bp, SARS Virus
tccattatcttcttggtagaccccg

SEQ ID NO: 125456 - DNA, 25 bp, SARS Virus
ccattatcttcatggtagaccccga

SEQ ID NO: 125457 - DNA, 25 bp, SARS Virus
cattatcttcattgtagaccccgac

SEQ ID NO: 125458 - DNA, 25 bp, SARS Virus
attatcttcatgttagaccccgact

SEQ ID NO: 125459 - DNA, 25 bp, SARS Virus
ttatcttcatggtagaccccgactc

SEQ ID NO: 125460 - DNA, 25 bp, SARS Virus
tatcttcatggttgaccccgactcg

SEQ ID NO: 125461 - DNA, 25 bp, SARS Virus
atcttcatggtataccccgactcga

SEQ ID NO: 125462 - DNA, 25 bp, SARS Virus
tcttcatggtagtccccgactcgag

SEQ ID NO: 125463 - DNA, 25 bp, SARS Virus
cttcatggtagatcccgactcgaga

SEQ ID NO: 125464 - DNA, 25 bp, SARS Virus
ttcatggtagactccgactcgagaa

SEQ ID NO: 125465 - DNA, 25 bp, SARS Virus
tcatggtagacctcgactcgagaaa

SEQ ID NO: 125466 - DNA, 25 bp, SARS Virus
catggtagaccctgactcgagaaag

SEQ ID NO: 125467 - DNA, 25 bp, SARS Virus
atggtagacccctactcgagaaagt

SEQ ID NO: 125468 - DNA, 25 bp, SARS Virus
tggtagaccccgtctcgagaaagta

SEQ ID NO: 125469 - DNA, 25 bp, SARS Virus
ggtagaccccgattcgagaaagtaa

SEQ ID NO: 125470 - DNA, 25 bp, SARS Virus
gtagaccccgactcgagaaagtaaa

SEQ ID NO: 125471 - DNA, 25 bp, SARS Virus
tagaccccgacttgagaaagtaaaa

SEQ ID NO: 125472 - DNA, 25 bp, SARS Virus
agaccccgactctagaaagtaaaac

SEQ ID NO: 125473 - DNA, 25 bp, SARS Virus
gaccccgactcgtgaaagtaaaacg

SEQ ID NO: 125474 - DNA, 25 bp, SARS Virus
accccgactcgataaagtaaaacgg

SEQ ID NO: 125475 - DNA, 25 bp, SARS Virus
ccccgactcgagtaagtaaaacggc

SEQ ID NO: 125476 - DNA, 25 bp, SARS Virus
cccgactcgagatagtaaaacggca

SEQ ID NO: 125477 - DNA, 25 bp, SARS Virus
ccgactcgagaatgtaaaacggcag

SEQ ID NO: 125478 - DNA, 25 bp, SARS Virus
cgactcgagaaattaaaacggcagt

SEQ ID NO: 125479 - DNA, 25 bp, SARS Virus
gactcgagaaagtaaaacggcagtg

SEQ ID NO: 125480 - DNA, 25 bp, SARS Virus
actcgagaaagttaaacggcagtgg

SEQ ID NO: 125481 - DNA, 25 bp, SARS Virus
ctcgagaaagtataacggcagtggt

SEQ ID NO: 125482 - DNA, 25 bp, SARS Virus
tcgagaaagtaatacggcagtggtg

SEQ ID NO: 125483 - DNA, 25 bp, SARS Virus
cgagaaagtaaatcggcagtggtgg

SEQ ID NO: 125484 - DNA, 25 bp, SARS Virus
gagaaagtaaaatggcagtggtggt

SEQ ID NO: 125485 - DNA, 25 bp, SARS Virus
agaaagtaaaactgcagtggtggtg

SEQ ID NO: 125486 - DNA, 25 bp, SARS Virus
gaaagtaaaacgtcagtggtggtgc

SEQ ID NO: 125487 - DNA, 25 bp, SARS Virus
aaagtaaaacggtagtggtggtgct

SEQ ID NO: 125488 - DNA, 25 bp, SARS Virus
aagtaaaacggctgtggtggtgctt

SEQ ID NO: 125489 - DNA, 25 bp, SARS Virus
agtaaaacggcattggtggtgcttg

SEQ ID NO: 125490 - DNA, 25 bp, SARS Virus
gtaaaacggcagtggtggtgcttga

SEQ ID NO: 125491 - DNA, 25 bp, SARS Virus
taaaacggcagttgtggtgcttgag

SEQ ID NO: 125492 - DNA, 25 bp, SARS Virus
aaaacggcagtgttggtgcttgagc

SEQ ID NO: 125493 - DNA, 25 bp, SARS Virus
aaacggcagtggtggtgcttgagca

SEQ ID NO: 125494 - DNA, 25 bp, SARS Virus
aacggcagtggttgtgcttgagcag

SEQ ID NO: 125495 - DNA, 25 bp, SARS Virus
acggcagtggtgttgcttgagcagc

SEQ ID NO: 125496 - DNA, 25 bp, SARS Virus
cggcagtggtggtgcttgagcagcc

SEQ ID NO: 125497 - DNA, 25 bp, SARS Virus
ggcagtggtggttcttgagcagccc

SEQ ID NO: 125498 - DNA, 25 bp, SARS Virus
gcagtggtggtgtttgagcagccca

SEQ ID NO: 125499 - DNA, 25 bp, SARS Virus
cagtggtggtgcttgagcagcccat

SEQ ID NO: 125500 - DNA, 25 bp, SARS Virus
agtggtggtgcttgagcagcccatc

SEQ ID NO: 125501 - DNA, 25 bp, SARS Virus
gtggtggtgctttagcagcccatcg

SEQ ID NO: 125502 - DNA, 25 bp, SARS Virus
tggtggtgcttgtgcagcccatcga

SEQ ID NO: 125503 - DNA, 25 bp, SARS Virus
ggtggtgcttgatcagcccatcgag

SEQ ID NO: 125504 - DNA, 25 bp, SARS Virus
gtggtgcttgagtagcccatcgaga

SEQ ID NO: 125505 - DNA, 25 bp, SARS Virus
tggtgcttgagctgcccatcgagaa

SEQ ID NO: 125506 - DNA, 25 bp, SARS Virus
ggtgcttgagcatcccatcgagaag

SEQ ID NO: 125507 - DNA, 25 bp, SARS Virus
gtgcttgagcagtccatcgagaagc

SEQ ID NO: 125508 - DNA, 25 bp, SARS Virus
tgcttgagcagctcatcgagaagcc

SEQ ID NO: 125509 - DNA, 25 bp, SARS Virus
gcttgagcagcctatcgagaagcca

SEQ ID NO: 125510 - DNA, 25 bp, SARS Virus
cttgagcagcccttcgagaagccat

SEQ ID NO: 125511 - DNA, 25 bp, SARS Virus
ttgagcagcccatcgagaagccatc

SEQ ID NO: 125512 - DNA, 25 bp, SARS Virus
tgagcagcccattgagaagccatca

SEQ ID NO: 125513 - DNA, 25 bp, SARS Virus
gagcagcccatctagaagccatcat

SEQ ID NO: 125514 - DNA, 25 bp, SARS Virus
agcagcccatcgtgaagccatcatc

SEQ ID NO: 125515 - DNA, 25 bp, SARS Virus
gcagcccatcgataagccatcatcg

SEQ ID NO: 125516 - DNA, 25 bp, SARS Virus
cagcccatcgagtagccatcatcgg

SEQ ID NO: 125517 - DNA, 25 bp, SARS Virus
agcccatcgagatgccatcatcggt

SEQ ID NO: 125518 - DNA, 25 bp, SARS Virus
gcccatcgagaatccatcatcggtt

SEQ ID NO: 125519 - DNA, 25 bp, SARS Virus
cccatcgagaagtcatcatcggtta

SEQ ID NO: 125520 - DNA, 25 bp, SARS Virus
ccatcgagaagctatcatcggttaa

SEQ ID NO: 125521 - DNA, 25 bp, SARS Virus
catcgagaagccttcatcggttaaa

SEQ ID NO: 125522 - DNA, 25 bp, SARS Virus
atcgagaagccatcatcggttaaac

SEQ ID NO: 125523 - DNA, 25 bp, SARS Virus
tcgagaagccattatcggttaaacc

SEQ ID NO: 125524 - DNA, 25 bp, SARS Virus
cgagaagccatcttcggttaaacca

SEQ ID NO: 125525 - DNA, 25 bp, SARS Virus
gagaagccatcatcggttaaaccag

SEQ ID NO: 125526 - DNA, 25 bp, SARS Virus
agaagccatcattggttaaaccagt

SEQ ID NO: 125527 - DNA, 25 bp, SARS Virus
gaagccatcatctgttaaaccagta

SEQ ID NO: 125528 - DNA, 25 bp, SARS Virus
aagccatcatcgtttaaaccagtag

SEQ ID NO: 125529 - DNA, 25 bp, SARS Virus
agccatcatcggttaaaccagtaga

SEQ ID NO: 125530 - DNA, 25 bp, SARS Virus
gccatcatcggttaaaccagtagac

SEQ ID NO: 125531 - DNA, 25 bp, SARS Virus
ccatcatcggtttaaccagtagacc

SEQ ID NO: 125532 - DNA, 25 bp, SARS Virus
catcatcggttataccagtagacct

SEQ ID NO: 125533 - DNA, 25 bp, SARS Virus
atcatcggttaatccagtagacctg

SEQ ID NO: 125534 - DNA, 25 bp, SARS Virus
tcatcggttaaatcagtagacctgg

SEQ ID NO: 125535 - DNA, 25 bp, SARS Virus
catcggttaaactagtagacctggt

SEQ ID NO: 125536 - DNA, 25 bp, SARS Virus
atcggttaaacctgtagacctggtg

SEQ ID NO: 125537 - DNA, 25 bp, SARS Virus
tcggttaaaccattagacctggtga

SEQ ID NO: 125538 - DNA, 25 bp, SARS Virus
cggttaaaccagtagacctggtgat

SEQ ID NO: 125539 - DNA, 25 bp, SARS Virus
ggttaaaccagttgacctggtgata

SEQ ID NO: 125540 - DNA, 25 bp, SARS Virus
gttaaaccagtatacctggtgataa

SEQ ID NO: 125541 - DNA, 25 bp, SARS Virus
ttaaaccagtagtcctggtgataac

SEQ ID NO: 125542 - DNA, 25 bp, SARS Virus
taaaccagtagatctggtgataacc

SEQ ID NO: 125543 - DNA, 25 bp, SARS Virus
aaaccagtagacttggtgataacca

SEQ ID NO: 125544 - DNA, 25 bp, SARS Virus
aaccagtagacctggtgataaccac

SEQ ID NO: 125545 - DNA, 25 bp, SARS Virus
accagtagaccttgtgataaccaca

SEQ ID NO: 125546 - DNA, 25 bp, SARS Virus
ccagtagacctgttgataaccacaa

SEQ ID NO: 125547 - DNA, 25 bp, SARS Virus
cagtagacctggtgataaccacaac

SEQ ID NO: 125548 - DNA, 25 bp, SARS Virus
agtagacctggttataaccacaact

SEQ ID NO: 125549 - DNA, 25 bp, SARS Virus
gtagacctggtgttaaccacaacta

SEQ ID NO: 125550 - DNA, 25 bp, SARS Virus
tagacctggtgataaccacaactaa

SEQ ID NO: 125551 - DNA, 25 bp, SARS Virus
agacctggtgattaccacaactaac

SEQ ID NO: 125552 - DNA, 25 bp, SARS Virus
gacctggtgatatccacaactaacc

SEQ ID NO: 125553 - DNA, 25 bp, SARS Virus
acctggtgataatcacaactaacct

SEQ ID NO: 125554 - DNA, 25 bp, SARS Virus
cctggtgataactacaactaacctt

SEQ ID NO: 125555 - DNA, 25 bp, SARS Virus
ctggtgataacctcaactaaccttg

SEQ ID NO: 125556 - DNA, 25 bp, SARS Virus
tggtgataaccataactaaccttgc

SEQ ID NO: 125557 - DNA, 25 bp, SARS Virus
ggtgataaccactactaaccttgcg

SEQ ID NO: 125558 - DNA, 25 bp, SARS Virus
gtgataaccacatctaaccttgcgg

SEQ ID NO: 125559 - DNA, 25 bp, SARS Virus
tgataaccacaattaaccttgcggg

SEQ ID NO: 125560 - DNA, 25 bp, SARS Virus
gataaccacaactaaccttgcggga

SEQ ID NO: 125561 - DNA, 25 bp, SARS Virus
ataaccacaacttaccttgcgggac

SEQ ID NO: 125562 - DNA, 25 bp, SARS Virus
taaccacaactatccttgcgggacc

SEQ ID NO: 125563 - DNA, 25 bp, SARS Virus
aaccacaactaatcttgcgggaccg

SEQ ID NO: 125564 - DNA, 25 bp, SARS Virus
accacaactaactttgcgggaccgg

SEQ ID NO: 125565 - DNA, 25 bp, SARS Virus
ccacaactaaccttgcgggaccgga

SEQ ID NO: 125566 - DNA, 25 bp, SARS Virus
cacaactaaccttgcgggaccggag

SEQ ID NO: 125567 - DNA, 25 bp, SARS Virus
acaactaacctttcgggaccggagc

SEQ ID NO: 125568 - DNA, 25 bp, SARS Virus
caactaaccttgtgggaccggagct

SEQ ID NO: 125569 - DNA, 25 bp, SARS Virus
aactaaccttgctggaccggagctc

SEQ ID NO: 125570 - DNA, 25 bp, SARS Virus
actaaccttgcgtgaccggagctcc

SEQ ID NO: 125571 - DNA, 25 bp, SARS Virus
ctaaccttgcggtaccggagctccc

SEQ ID NO: 125572 - DNA, 25 bp, SARS Virus
taaccttgcgggtccggagctccct

SEQ ID NO: 125573 - DNA, 25 bp, SARS Virus
aaccttgcgggatcggagctccctt

SEQ ID NO: 125574 - DNA, 25 bp, SARS Virus
accttgcgggactggagctccctta

SEQ ID NO: 125575 - DNA, 25 bp, SARS Virus
ccttgcgggacctgagctcccttag

SEQ ID NO: 125576 - DNA, 25 bp, SARS Virus
cttgcgggaccgtagctcccttaga

SEQ ID NO: 125577 - DNA, 25 bp, SARS Virus
ttgcgggaccggtgctcccttagat

SEQ ID NO: 125578 - DNA, 25 bp, SARS Virus
tgcgggaccggatctcccttagatt

SEQ ID NO: 125579 - DNA, 25 bp, SARS Virus
gcgggaccggagttcccttagattc

SEQ ID NO: 125580 - DNA, 25 bp, SARS Virus
cgggaccggagctcccttagattca

SEQ ID NO: 125581 - DNA, 25 bp, SARS Virus
gggaccggagcttccttagattcaa

SEQ ID NO: 125582 - DNA, 25 bp, SARS Virus
ggaccggagctctcttagattcaag

SEQ ID NO: 125583 - DNA, 25 bp, SARS Virus
gaccggagctcctttagattcaagg

SEQ ID NO: 125584 - DNA, 25 bp, SARS Virus
accggagctcccttagattcaagga

SEQ ID NO: 125585 - DNA, 25 bp, SARS Virus
ccggagctcccttagattcaaggag

SEQ ID NO: 125586 - DNA, 25 bp, SARS Virus
cggagctccctttgattcaaggagg

SEQ ID NO: 125587 - DNA, 25 bp, SARS Virus
ggagctcccttatattcaaggagga

SEQ ID NO: 125588 - DNA, 25 bp, SARS Virus
gagctcccttagtttcaaggaggaa

SEQ ID NO: 125589 - DNA, 25 bp, SARS Virus
agctcccttagattcaaggaggaac

SEQ ID NO: 125590 - DNA, 25 bp, SARS Virus
gctcccttagattcaaggaggaacg

SEQ ID NO: 125591 - DNA, 25 bp, SARS Virus
ctcccttagatttaaggaggaacgg

SEQ ID NO: 125592 - DNA, 25 bp, SARS Virus
tcccttagattctaggaggaacggt

SEQ ID NO: 125593 - DNA, 25 bp, SARS Virus
cccttagattcatggaggaacggta

SEQ ID NO: 125594 - DNA, 25 bp, SARS Virus
ccttagattcaatgaggaacggtac

SEQ ID NO: 125595 - DNA, 25 bp, SARS Virus
cttagattcaagtaggaacggtacg

SEQ ID NO: 125596 - DNA, 25 bp, SARS Virus
ttagattcaaggtggaacggtacga

SEQ ID NO: 125597 - DNA, 25 bp, SARS Virus
tagattcaaggatgaacggtacgac

SEQ ID NO: 125598 - DNA, 25 bp, SARS Virus
agattcaaggagtaacggtacgact

SEQ ID NO: 125599 - DNA, 25 bp, SARS Virus
gattcaaggaggtacggtacgactc

SEQ ID NO: 125600 - DNA, 25 bp, SARS Virus
attcaaggaggatcggtacgactca

SEQ ID NO: 125601 - DNA, 25 bp, SARS Virus
ttcaaggaggaatggtacgactcac

SEQ ID NO: 125602 - DNA, 25 bp, SARS Virus
tcaaggaggaactgtacgactcact

SEQ ID NO: 125603 - DNA, 25 bp, SARS Virus
caaggaggaacgttacgactcactc

SEQ ID NO: 125604 - DNA, 25 bp, SARS Virus
aaggaggaacggtacgactcactct

SEQ ID NO: 125605 - DNA, 25 bp, SARS Virus
aggaggaacggttcgactcactctc

SEQ ID NO: 125606 - DNA, 25 bp, SARS Virus
ggaggaacggtatgactcactctcg

SEQ ID NO: 125607 - DNA, 25 bp, SARS Virus
gaggaacggtactactcactctcga

SEQ ID NO: 125608 - DNA, 25 bp, SARS Virus
aggaacggtacgtctcactctcgac

SEQ ID NO: 125609 - DNA, 25 bp, SARS Virus
ggaacggtacgattcactctcgaca

SEQ ID NO: 125610 - DNA, 25 bp, SARS Virus
gaacggtacgactcactctcgacac

SEQ ID NO: 125611 - DNA, 25 bp, SARS Virus
aacggtacgacttactctcgacact

SEQ ID NO: 125612 - DNA, 25 bp, SARS Virus
acggtacgactctctctcgacactt

SEQ ID NO: 125613 - DNA, 25 bp, SARS Virus
cggtacgactcattctcgacacttg

SEQ ID NO: 125614 - DNA, 25 bp, SARS Virus
ggtacgactcactctcgacacttgg

SEQ ID NO: 125615 - DNA, 25 bp, SARS Virus
gtacgactcactttcgacacttggt

SEQ ID NO: 125616 - DNA, 25 bp, SARS Virus
tacgactcactctcgacacttggtt

SEQ ID NO: 125617 - DNA, 25 bp, SARS Virus
acgactcactcttgacacttggttc

SEQ ID NO: 125618 - DNA, 25 bp, SARS Virus
cgactcactctctacacttggttct

SEQ ID NO: 125619 - DNA, 25 bp, SARS Virus
gactcactctcgtcacttggttctg

SEQ ID NO: 125620 - DNA, 25 bp, SARS Virus
actcactctcgatacttggttctgc

SEQ ID NO: 125621 - DNA, 25 bp, SARS Virus
ctcactctcgactcttggttctgcg

SEQ ID NO: 125622 - DNA, 25 bp, SARS Virus
tcactctcgacatttggttctgcgt

SEQ ID NO: 125623 - DNA, 25 bp, SARS Virus
cactctcgacacttggttctgcgtc

SEQ ID NO: 125624 - DNA, 25 bp, SARS Virus
actctcgacacttggttctgcgtca

SEQ ID NO: 125625 - DNA, 25 bp, SARS Virus
ctctcgacactttgttctgcgtcat

SEQ ID NO: 125626 - DNA, 25 bp, SARS Virus
tctcgacacttgtttctgcgtcata

SEQ ID NO: 125627 - DNA, 25 bp, SARS Virus
ctcgacacttggttctgcgtcataa

SEQ ID NO: 125628 - DNA, 25 bp, SARS Virus
tcgacacttggttctgcgtcataat

SEQ ID NO: 125629 - DNA, 25 bp, SARS Virus
cgacacttggttttgcgtcataata

SEQ ID NO: 125630 - DNA, 25 bp, SARS Virus
gacacttggttctgcgtcataataa

SEQ ID NO: 125631 - DNA, 25 bp, SARS Virus
acacttggttcttcgtcataataac

SEQ ID NO: 125632 - DNA, 25 bp, SARS Virus
cacttggttctgtgtcataataacc

SEQ ID NO: 125633 - DNA, 25 bp, SARS Virus
acttggttctgcttcataataaccc

SEQ ID NO: 125634 - DNA, 25 bp, SARS Virus
cttggttctgcgtcataataaccca

SEQ ID NO: 125635 - DNA, 25 bp, SARS Virus
ttggttctgcgttataataacccat

SEQ ID NO: 125636 - DNA, 25 bp, SARS Virus
tggttctgcgtcttaataacccatt

SEQ ID NO: 125637 - DNA, 25 bp, SARS Virus
ggttctgcgtcataataacccattt

SEQ ID NO: 125638 - DNA, 25 bp, SARS Virus
gttctgcgtcattataacccatttg

SEQ ID NO: 125639 - DNA, 25 bp, SARS Virus
ttctgcgtcatattaacccatttgg

SEQ ID NO: 125640 - DNA, 25 bp, SARS Virus
tctgcgtcataataacccatttgga

SEQ ID NO: 125641 - DNA, 25 bp, SARS Virus
ctgcgtcataattacccatttggaa

SEQ ID NO: 125642 - DNA, 25 bp, SARS Virus
tgcgtcataatatcccatttggaac

SEQ ID NO: 125643 - DNA, 25 bp, SARS Virus
gcgtcataataatccatttggaacc

SEQ ID NO: 125644 - DNA, 25 bp, SARS Virus
cgtcataataactcatttggaaccc

SEQ ID NO: 125645 - DNA, 25 bp, SARS Virus
gtcataataacctatttggaacccc

SEQ ID NO: 125646 - DNA, 25 bp, SARS Virus
tcataataacccttttggaacccca

SEQ ID NO: 125647 - DNA, 25 bp, SARS Virus
cataataacccatttggaaccccag

SEQ ID NO: 125648 - DNA, 25 bp, SARS Virus
ataataacccatttggaaccccagc

SEQ ID NO: 125649 - DNA, 25 bp, SARS Virus
taataacccatttggaaccccagcc

SEQ ID NO: 125650 - DNA, 25 bp, SARS Virus
aataacccattttgaaccccagccg

SEQ ID NO: 125651 - DNA, 25 bp, SARS Virus
ataacccatttgtaaccccagccgc

SEQ ID NO: 125652 - DNA, 25 bp, SARS Virus
taacccatttggtaccccagccgcg

SEQ ID NO: 125653 - DNA, 25 bp, SARS Virus
aacccatttggatccccagccgcga

SEQ ID NO: 125654 - DNA, 25 bp, SARS Virus
acccatttggaatcccagccgcgac

SEQ ID NO: 125655 - DNA, 25 bp, SARS Virus
cccatttggaactccagccgcgaca

SEQ ID NO: 125656 - DNA, 25 bp, SARS Virus
ccatttggaacctcagccgcgacaa

SEQ ID NO: 125657 - DNA, 25 bp, SARS Virus
catttggaaccctagccgcgacaaa

SEQ ID NO: 125658 - DNA, 25 bp, SARS Virus
atttggaacccctgccgcgacaaaa

SEQ ID NO: 125659 - DNA, 25 bp, SARS Virus
tttggaaccccatccgcgacaaaac

SEQ ID NO: 125660 - DNA, 25 bp, SARS Virus
ttggaaccccagtcgcgacaaaacc

SEQ ID NO: 125661 - DNA, 25 bp, SARS Virus
tggaaccccagctgcgacaaaaccg

SEQ ID NO: 125662 - DNA, 25 bp, SARS Virus
ggaaccccagcctcgacaaaaccgg

SEQ ID NO: 125663 - DNA, 25 bp, SARS Virus
gaaccccagccgtgacaaaaccgga

SEQ ID NO: 125664 - DNA, 25 bp, SARS Virus
aaccccagccgctacaaaaccggaa

SEQ ID NO: 125665 - DNA, 25 bp, SARS Virus
accccagccgcgtcaaaaccggaac

SEQ ID NO: 125666 - DNA, 25 bp, SARS Virus
ccccagccgcgataaaaccggaacg

SEQ ID NO: 125667 - DNA, 25 bp, SARS Virus
cccagccgcgactaaaccggaacgg

SEQ ID NO: 125668 - DNA, 25 bp, SARS Virus
ccagccgcgacataaccggaacggg

SEQ ID NO: 125669 - DNA, 25 bp, SARS Virus
cagccgcgacaataccggaacgggg

SEQ ID NO: 125670 - DNA, 25 bp, SARS Virus
agccgcgacaaatccggaacggggt

SEQ ID NO: 125671 - DNA, 25 bp, SARS Virus
gccgcgacaaaatcggaacggggta

SEQ ID NO: 125672 - DNA, 25 bp, SARS Virus
ccgcgacaaaactggaacggggtaa

SEQ ID NO: 125673 - DNA, 25 bp, SARS Virus
cgcgacaaaacctgaacggggtaac

SEQ ID NO: 125674 - DNA, 25 bp, SARS Virus
gcgacaaaaccgtaacggggtaacg

SEQ ID NO: 125675 - DNA, 25 bp, SARS Virus
cgacaaaaccggtacggggtaacgc

SEQ ID NO: 125676 - DNA, 25 bp, SARS Virus
gacaaaaccggatcggggtaacgca

SEQ ID NO: 125677 - DNA, 25 bp, SARS Virus
acaaaaccggaatggggtaacgcag

SEQ ID NO: 125678 - DNA, 25 bp, SARS Virus
caaaaccggaactgggtaacgcagg

SEQ ID NO: 125679 - DNA, 25 bp, SARS Virus
aaaaccggaacgtggtaacgcagga

SEQ ID NO: 125680 - DNA, 25 bp, SARS Virus
aaaccggaacggtgtaacgcaggag

SEQ ID NO: 125681 - DNA, 25 bp, SARS Virus
aaccggaacgggttaacgcaggagg

SEQ ID NO: 125682 - DNA, 25 bp, SARS Virus
accggaacggggtaacgcaggaggt

SEQ ID NO: 125683 - DNA, 25 bp, SARS Virus
ccggaacggggttacgcaggaggta

SEQ ID NO: 125684 - DNA, 25 bp, SARS Virus
cggaacggggtatcgcaggaggtaa

SEQ ID NO: 125685 - DNA, 25 bp, SARS Virus
ggaacggggtaatgcaggaggtaag

SEQ ID NO: 125686 - DNA, 25 bp, SARS Virus
gaacggggtaactcaggaggtaaga

SEQ ID NO: 125687 - DNA, 25 bp, SARS Virus
aacggggtaacgtaggaggtaagac

SEQ ID NO: 125688 - DNA, 25 bp, SARS Virus
acggggtaacgctggaggtaagacc

SEQ ID NO: 125689 - DNA, 25 bp, SARS Virus
cggggtaacgcatgaggtaagacca

SEQ ID NO: 125690 - DNA, 25 bp, SARS Virus
ggggtaacgcagtaggtaagaccaa

SEQ ID NO: 125691 - DNA, 25 bp, SARS Virus
gggtaacgcaggtggtaagaccaat

SEQ ID NO: 125692 - DNA, 25 bp, SARS Virus
ggtaacgcaggatgtaagaccaata

SEQ ID NO: 125693 - DNA, 25 bp, SARS Virus
gtaacgcaggagttaagaccaataa

SEQ ID NO: 125694 - DNA, 25 bp, SARS Virus
taacgcaggaggtaagaccaataac

SEQ ID NO: 125695 - DNA, 25 bp, SARS Virus
aacgcaggaggttagaccaataaca

SEQ ID NO: 125696 - DNA, 25 bp, SARS Virus
acgcaggaggtatgaccaataacag

SEQ ID NO: 125697 - DNA, 25 bp, SARS Virus
cgcaggaggtaataccaataacagt

SEQ ID NO: 125698 - DNA, 25 bp, SARS Virus
gcaggaggtaagtccaataacagtc

SEQ ID NO: 125699 - DNA, 25 bp, SARS Virus
caggaggtaagatcaataacagtca

SEQ ID NO: 125700 - DNA, 25 bp, SARS Virus
aggaggtaagactaataacagtcaa

SEQ ID NO: 125701 - DNA, 25 bp, SARS Virus
ggaggtaagacctataacagtcaac

SEQ ID NO: 125702 - DNA, 25 bp, SARS Virus
gaggtaagaccattaacagtcaact

SEQ ID NO: 125703 - DNA, 25 bp, SARS Virus
aggtaagaccaataacagtcaactt

SEQ ID NO: 125704 - DNA, 25 bp, SARS Virus
ggtaagaccaattacagtcaactta

SEQ ID NO: 125705 - DNA, 25 bp, SARS Virus
gtaagaccaatatcagtcaacttag

SEQ ID NO: 125706 - DNA, 25 bp, SARS Virus
taagaccaataatagtcaacttaga

SEQ ID NO: 125707 - DNA, 25 bp, SARS Virus
aagaccaataactgtcaacttagac

SEQ ID NO: 125708 - DNA, 25 bp, SARS Virus
agaccaataacattcaacttagaca

SEQ ID NO: 125709 - DNA, 25 bp, SARS Virus
gaccaataacagtcaacttagacac

SEQ ID NO: 125710 - DNA, 25 bp, SARS Virus
accaataacagttaacttagacacc

SEQ ID NO: 125711 - DNA, 25 bp, SARS Virus
ccaataacagtctacttagacaccc

SEQ ID NO: 125712 - DNA, 25 bp, SARS Virus
caataacagtcatcttagacaccca

SEQ ID NO: 125713 - DNA, 25 bp, SARS Virus
aataacagtcaatttagacacccag

SEQ ID NO: 125714 - DNA, 25 bp, SARS Virus
ataacagtcaacttagacacccagg

SEQ ID NO: 125715 - DNA, 25 bp, SARS Virus
taacagtcaacttagacacccaggt

SEQ ID NO: 125716 - DNA, 25 bp, SARS Virus
aacagtcaactttgacacccaggtg

SEQ ID NO: 125717 - DNA, 25 bp, SARS Virus
acagtcaacttatacacccaggtgg

SEQ ID NO: 125718 - DNA, 25 bp, SARS Virus
cagtcaacttagtcacccaggtggt

SEQ ID NO: 125719 - DNA, 25 bp, SARS Virus
agtcaacttagatacccaggtggtt

SEQ ID NO: 125720 - DNA, 25 bp, SARS Virus
gtcaacttagactcccaggtggttt

SEQ ID NO: 125721 - DNA, 25 bp, SARS Virus
tcaacttagacatccaggtggttta

SEQ ID NO: 125722 - DNA, 25 bp, SARS Virus
caacttagacactcaggtggtttac

SEQ ID NO: 125723 - DNA, 25 bp, SARS Virus
aacttagacacctaggtggtttaca

SEQ ID NO: 125724 - DNA, 25 bp, SARS Virus
acttagacaccctggtggtttacat

SEQ ID NO: 125725 - DNA, 25 bp, SARS Virus
cttagacacccatgtggtttacatt

SEQ ID NO: 125726 - DNA, 25 bp, SARS Virus
ttagacacccagttggtttacatta

SEQ ID NO: 125727 - DNA, 25 bp, SARS Virus
tagacacccaggtggtttacattac

SEQ ID NO: 125728 - DNA, 25 bp, SARS Virus
agacacccaggttgtttacattacg

SEQ ID NO: 125729 - DNA, 25 bp, SARS Virus
gacacccaggtgttttacattacgc

SEQ ID NO: 125730 - DNA, 25 bp, SARS Virus
acacccaggtggtttacattacgcc

SEQ ID NO: 125731 - DNA, 25 bp, SARS Virus
cacccaggtggtttacattacgccc

SEQ ID NO: 125732 - DNA, 25 bp, SARS Virus
acccaggtggtttacattacgcccc

SEQ ID NO: 125733 - DNA, 25 bp, SARS Virus
cccaggtggttttcattacgccccc

SEQ ID NO: 125734 - DNA, 25 bp, SARS Virus
ccaggtggtttatattacgcccccc

SEQ ID NO: 125735 - DNA, 25 bp, SARS Virus
caggtggtttactttacgccccccg

SEQ ID NO: 125736 - DNA, 25 bp, SARS Virus
aggtggtttacattacgccccccgt

SEQ ID NO: 125737 - DNA, 25 bp, SARS Virus
ggtggtttacattacgccccccgtg

SEQ ID NO: 125738 - DNA, 25 bp, SARS Virus
gtggtttacatttcgccccccgtga

SEQ ID NO: 125739 - DNA, 25 bp, SARS Virus
tggtttacattatgccccccgtgat

SEQ ID NO: 125740 - DNA, 25 bp, SARS Virus
ggtttacattactccccccgtgatg

SEQ ID NO: 125741 - DNA, 25 bp, SARS Virus
gtttacattacgtcccccgtgatgc

SEQ ID NO: 125742 - DNA, 25 bp, SARS Virus
tttacattacgctccccgtgatgca

SEQ ID NO: 125743 - DNA, 25 bp, SARS Virus
ttacattacgcctcccgtgatgcaa

SEQ ID NO: 125744 - DNA, 25 bp, SARS Virus
tacattacgccctccgtgatgcaac

SEQ ID NO: 125745 - DNA, 25 bp, SARS Virus
acattacgcccctcgtgatgcaacc

SEQ ID NO: 125746 - DNA, 25 bp, SARS Virus
cattacgccccctgtgatgcaacca

SEQ ID NO: 125747 - DNA, 25 bp, SARS Virus
attacgccccccttgatgcaaccaa

SEQ ID NO: 125748 - DNA, 25 bp, SARS Virus
ttacgccccccgtgatgcaaccaaa

SEQ ID NO: 125749 - DNA, 25 bp, SARS Virus
tacgccccccgttatgcaaccaaac

SEQ ID NO: 125750 - DNA, 25 bp, SARS Virus
acgccccccgtgttgcaaccaaact

SEQ ID NO: 125751 - DNA, 25 bp, SARS Virus
cgccccccgtgatgcaaccaaacta

SEQ ID NO: 125752 - DNA, 25 bp, SARS Virus
gccccccgtgattcaaccaaactaa

SEQ ID NO: 125753 - DNA, 25 bp, SARS Virus
ccccccgtgatgtaaccaaactaac

SEQ ID NO: 125754 - DNA, 25 bp, SARS Virus
cccccgtgatgctaccaaactaacc

SEQ ID NO: 125755 - DNA, 25 bp, SARS Virus
ccccgtgatgcatccaaactaaccc

SEQ ID NO: 125756 - DNA, 25 bp, SARS Virus
cccgtgatgcaatcaaactaacccc

SEQ ID NO: 125757 - DNA, 25 bp, SARS Virus
ccgtgatgcaactaaactaacccca

SEQ ID NO: 125758 - DNA, 25 bp, SARS Virus
cgtgatgcaacctaactaaccccag

SEQ ID NO: 125759 - DNA, 25 bp, SARS Virus
gtgatgcaaccatactaaccccagg

SEQ ID NO: 125760 - DNA, 25 bp, SARS Virus
tgatgcaaccaatctaaccccaggt

SEQ ID NO: 125761 - DNA, 25 bp, SARS Virus
gatgcaaccaaattaaccccaggta

SEQ ID NO: 125762 - DNA, 25 bp, SARS Virus
atgcaaccaaactaaccccaggtaa

SEQ ID NO: 125763 - DNA, 25 bp, SARS Virus
tgcaaccaaacttaccccaggtaat

SEQ ID NO: 125764 - DNA, 25 bp, SARS Virus
gcaaccaaactatccccaggtaata

SEQ ID NO: 125765 - DNA, 25 bp, SARS Virus
caaccaaactaatcccaggtaatag

SEQ ID NO: 125766 - DNA, 25 bp, SARS Virus
aaccaaactaactccaggtaatagt

SEQ ID NO: 125767 - DNA, 25 bp, SARS Virus
accaaactaacctcaggtaatagtc

SEQ ID NO: 125768 - DNA, 25 bp, SARS Virus
ccaaactaaccctaggtaatagtct

SEQ ID NO: 125769 - DNA, 25 bp, SARS Virus
caaactaacccctggtaatagtctg

SEQ ID NO: 125770 - DNA, 25 bp, SARS Virus
aaactaaccccatgtaatagtctgt

SEQ ID NO: 125771 - DNA, 25 bp, SARS Virus
aactaaccccagttaatagtctgta

SEQ ID NO: 125772 - DNA, 25 bp, SARS Virus
actaaccccaggtaatagtctgtaa

SEQ ID NO: 125773 - DNA, 25 bp, SARS Virus
ctaaccccaggttatagtctgtaaa

SEQ ID NO: 125774 - DNA, 25 bp, SARS Virus
taaccccaggtattagtctgtaaaa

SEQ ID NO: 125775 - DNA, 25 bp, SARS Virus
aaccccaggtaatagtctgtaaaat

SEQ ID NO: 125776 - DNA, 25 bp, SARS Virus
accccaggtaattgtctgtaaaatt

SEQ ID NO: 125777 - DNA, 25 bp, SARS Virus
ccccaggtaatattctgtaaaatta

SEQ ID NO: 125778 - DNA, 25 bp, SARS Virus
cccaggtaatagtctgtaaaattaa

SEQ ID NO: 125779 - DNA, 25 bp, SARS Virus
ccaggtaatagtttgtaaaattaaa

SEQ ID NO: 125780 - DNA, 25 bp, SARS Virus
caggtaatagtctgtaaaattaaac

SEQ ID NO: 125781 - DNA, 25 bp, SARS Virus
aggtaatagtctttaaaattaaaca

SEQ ID NO: 125782 - DNA, 25 bp, SARS Virus
ggtaatagtctgtaaaattaaacaa

SEQ ID NO: 125783 - DNA, 25 bp, SARS Virus
gtaatagtctgttaaattaaacaag

SEQ ID NO: 125784 - DNA, 25 bp, SARS Virus
taatagtctgtataattaaacaagc

SEQ ID NO: 125785 - DNA, 25 bp, SARS Virus
aatagtctgtaatattaaacaagca

SEQ ID NO: 125786 - DNA, 25 bp, SARS Virus
atagtctgtaaatttaaacaagcaa

SEQ ID NO: 125787 - DNA, 25 bp, SARS Virus
tagtctgtaaaattaaacaagcaaa

SEQ ID NO: 125788 - DNA, 25 bp, SARS Virus
agtctgtaaaattaaacaagcaaat

SEQ ID NO: 125789 - DNA, 25 bp, SARS Virus
gtctgtaaaatttaacaagcaaata

SEQ ID NO: 125790 - DNA, 25 bp, SARS Virus
tctgtaaaattatacaagcaaataa

SEQ ID NO: 125791 - DNA, 25 bp, SARS Virus
ctgtaaaattaatcaagcaaataaa

SEQ ID NO: 125792 - DNA, 25 bp, SARS Virus
tgtaaaattaaataagcaaataaat

SEQ ID NO: 125793 - DNA, 25 bp, SARS Virus
gtaaaattaaactagcaaataaatt

SEQ ID NO: 125794 - DNA, 25 bp, SARS Virus
taaaattaaacatgcaaataaattt

SEQ ID NO: 125795 - DNA, 25 bp, SARS Virus
aaaattaaacaatcaaataaatttt

SEQ ID NO: 125796 - DNA, 25 bp, SARS Virus
aaattaaacaagtaaataaattttg

SEQ ID NO: 125797 - DNA, 25 bp, SARS Virus
aattaaacaagctaataaattttgt

SEQ ID NO: 125798 - DNA, 25 bp, SARS Virus
attaaacaagcatataaattttgtt

SEQ ID NO: 125799 - DNA, 25 bp, SARS Virus
ttaaacaagcaattaaattttgttg

SEQ ID NO: 125800 - DNA, 25 bp, SARS Virus
taaacaagcaaataaattttgttgt

SEQ ID NO: 125801 - DNA, 25 bp, SARS Virus
aaacaagcaaattaattttgttgtt

SEQ ID NO: 125802 - DNA, 25 bp, SARS Virus
aacaagcaaatatattttgttgttc

SEQ ID NO: 125803 - DNA, 25 bp, SARS Virus
acaagcaaataatttttgttgttca

SEQ ID NO: 125804 - DNA, 25 bp, SARS Virus
caagcaaataaattttgttgttcat

SEQ ID NO: 125805 - DNA, 25 bp, SARS Virus
aagcaaataaattttgttgttcatg

SEQ ID NO: 125806 - DNA, 25 bp, SARS Virus
agcaaataaattttgttgttcatgc

SEQ ID NO: 125807 - DNA, 25 bp, SARS Virus
gcaaataaattttgttgttcatgca

SEQ ID NO: 125808 - DNA, 25 bp, SARS Virus
caaataaatttttttgttcatgcag

SEQ ID NO: 125809 - DNA, 25 bp, SARS Virus
aaataaattttgttgttcatgcaga

SEQ ID NO: 125810 - DNA, 25 bp, SARS Virus
aataaattttgttgttcatgcagag

SEQ ID NO: 125811 - DNA, 25 bp, SARS Virus
ataaattttgtttttcatgcagaga

SEQ ID NO: 125812 - DNA, 25 bp, SARS Virus
taaattttgttgttcatgcagagat

SEQ ID NO: 125813 - DNA, 25 bp, SARS Virus
aaattttgttgttcatgcagagatt

SEQ ID NO: 125814 - DNA, 25 bp, SARS Virus
aattttgttgtttatgcagagattt

SEQ ID NO: 125815 - DNA, 25 bp, SARS Virus
attttgttgttcttgcagagattta

SEQ ID NO: 125816 - DNA, 25 bp, SARS Virus
ttttgttgttcatgcagagatttac

SEQ ID NO: 125817 - DNA, 25 bp, SARS Virus
tttgttgttcattcagagatttacg

SEQ ID NO: 125818 - DNA, 25 bp, SARS Virus
ttgttgttcatgtagagatttacgt

SEQ ID NO: 125819 - DNA, 25 bp, SARS Virus
tgttgttcatgctgagatttacgtc

SEQ ID NO: 125820 - DNA, 25 bp, SARS Virus
gttgttcatgcatagatttacgtcg

SEQ ID NO: 125821 - DNA, 25 bp, SARS Virus
ttgttcatgcagtgatttacgtcgt

SEQ ID NO: 125822 - DNA, 25 bp, SARS Virus
tgttcatgcagatatttacgtcgtc

SEQ ID NO: 125823 - DNA, 25 bp, SARS Virus
gttcatgcagagttttacgtcgtca

SEQ ID NO: 125824 - DNA, 25 bp, SARS Virus
ttcatgcagagatttacgtcgtcaa

SEQ ID NO: 125825 - DNA, 25 bp, SARS Virus
tcatgcagagatttacgtcgtcaaa

SEQ ID NO: 125826 - DNA, 25 bp, SARS Virus
catgcagagatttacgtcgtcaaac

SEQ ID NO: 125827 - DNA, 25 bp, SARS Virus
atgcagagattttcgtcgtcaaacc

SEQ ID NO: 125828 - DNA, 25 bp, SARS Virus
tgcagagatttatgtcgtcaaacca

SEQ ID NO: 125829 - DNA, 25 bp, SARS Virus
gcagagatttacttcgtcaaaccac

SEQ ID NO: 125830 - DNA, 25 bp, SARS Virus
cagagatttacgtcgtcaaaccact

SEQ ID NO: 125831 - DNA, 25 bp, SARS Virus
agagatttacgttgtcaaaccactg

SEQ ID NO: 125832 - DNA, 25 bp, SARS Virus
gagatttacgtcttcaaaccactgg

SEQ ID NO: 125833 - DNA, 25 bp, SARS Virus
agatttacgtcgtcaaaccactgga

SEQ ID NO: 125834 - DNA, 25 bp, SARS Virus
gatttacgtcgttaaaccactggaa

SEQ ID NO: 125835 - DNA, 25 bp, SARS Virus
atttacgtcgtctaaccactggaag

SEQ ID NO: 125836 - DNA, 25 bp, SARS Virus
tttacgtcgtcataccactggaagt

SEQ ID NO: 125837 - DNA, 25 bp, SARS Virus
ttacgtcgtcaatccactggaagta

SEQ ID NO: 125838 - DNA, 25 bp, SARS Virus
tacgtcgtcaaatcactggaagtac

SEQ ID NO: 125839 - DNA, 25 bp, SARS Virus
acgtcgtcaaactactggaagtact

SEQ ID NO: 125840 - DNA, 25 bp, SARS Virus
cgtcgtcaaacctctggaagtactt

SEQ ID NO: 125841 - DNA, 25 bp, SARS Virus
gtcgtcaaaccattggaagtacttc

SEQ ID NO: 125842 - DNA, 25 bp, SARS Virus
tcgtcaaaccactggaagtacttcc

SEQ ID NO: 125843 - DNA, 25 bp, SARS Virus
cgtcaaaccacttgaagtacttcca

SEQ ID NO: 125844 - DNA, 25 bp, SARS Virus
gtcaaaccactgtaagtacttccat

SEQ ID NO: 125845 - DNA, 25 bp, SARS Virus
tcaaaccactggtagtacttccatg

SEQ ID NO: 125846 - DNA, 25 bp, SARS Virus
caaaccactggatgtacttccatgg

SEQ ID NO: 125847 - DNA, 25 bp, SARS Virus
aaaccactggaattacttccatggt

SEQ ID NO: 125848 - DNA, 25 bp, SARS Virus
aaccactggaagtacttccatggtt

SEQ ID NO: 125849 - DNA, 25 bp, SARS Virus
accactggaagttcttccatggttg

SEQ ID NO: 125850 - DNA, 25 bp, SARS Virus
ccactggaagtatttccatggttgt

SEQ ID NO: 125851 - DNA, 25 bp, SARS Virus
cactggaagtacttccatggttgtg

SEQ ID NO: 125852 - DNA, 25 bp, SARS Virus
actggaagtacttccatggttgtgg

SEQ ID NO: 125853 - DNA, 25 bp, SARS Virus
ctggaagtactttcatggttgtgga

SEQ ID NO: 125854 - DNA, 25 bp, SARS Virus
tggaagtacttctatggttgtggat

SEQ ID NO: 125855 - DNA, 25 bp, SARS Virus
ggaagtacttccttggttgtggatc

SEQ ID NO: 125856 - DNA, 25 bp, SARS Virus
gaagtacttccatggttgtggatcg

SEQ ID NO: 125857 - DNA, 25 bp, SARS Virus
aagtacttccattgttgtggatcga

SEQ ID NO: 125858 - DNA, 25 bp, SARS Virus
agtacttccatgtttgtggatcgat

SEQ ID NO: 125859 - DNA, 25 bp, SARS Virus
gtacttccatggttgtggatcgata

SEQ ID NO: 125860 - DNA, 25 bp, SARS Virus
tacttccatggttgtggatcgatat

SEQ ID NO: 125861 - DNA, 25 bp, SARS Virus
acttccatggttttggatcgatatt

SEQ ID NO: 125862 - DNA, 25 bp, SARS Virus
cttccatggttgtggatcgatattc

SEQ ID NO: 125863 - DNA, 25 bp, SARS Virus
ttccatggttgttgatcgatattcg

SEQ ID NO: 125864 - DNA, 25 bp, SARS Virus
tccatggttgtgtatcgatattcgc

SEQ ID NO: 125865 - DNA, 25 bp, SARS Virus
ccatggttgtggttcgatattcgcg

SEQ ID NO: 125866 - DNA, 25 bp, SARS Virus
catggttgtggatcgatattcgcgt

SEQ ID NO: 125867 - DNA, 25 bp, SARS Virus
atggttgtggattgatattcgcgtg

SEQ ID NO: 125868 - DNA, 25 bp, SARS Virus
tggttgtggatctatattcgcgtgg

SEQ ID NO: 125869 - DNA, 25 bp, SARS Virus
ggttgtggatcgttattcgcgtggt

SEQ ID NO: 125870 - DNA, 25 bp, SARS Virus
gttgtggatcgatattcgcgtggtg

SEQ ID NO: 125871 - DNA, 25 bp, SARS Virus
ttgtggatcgattttcgcgtggtgg

SEQ ID NO: 125872 - DNA, 25 bp, SARS Virus
tgtggatcgatattcgcgtggtggt

SEQ ID NO: 125873 - DNA, 25 bp, SARS Virus
gtggatcgatattcgcgtggtggtc

SEQ ID NO: 125874 - DNA, 25 bp, SARS Virus
tggatcgatatttgcgtggtggtcg

SEQ ID NO: 125875 - DNA, 25 bp, SARS Virus
ggatcgatattctcgtggtggtcga

SEQ ID NO: 125876 - DNA, 25 bp, SARS Virus
gatcgatattcgtgtggtggtcgac

SEQ ID NO: 125877 - DNA, 25 bp, SARS Virus
atcgatattcgcttggtggtcgacc

SEQ ID NO: 125878 - DNA, 25 bp, SARS Virus
tcgatattcgcgtggtggtcgacct

SEQ ID NO: 125879 - DNA, 25 bp, SARS Virus
cgatattcgcgttgtggtcgaccta

SEQ ID NO: 125880 - DNA, 25 bp, SARS Virus
gatattcgcgtgttggtcgacctag

SEQ ID NO: 125881 - DNA, 25 bp, SARS Virus
atattcgcgtggtggtcgacctaga

SEQ ID NO: 125882 - DNA, 25 bp, SARS Virus
tattcgcgtggttgtcgacctagaa

SEQ ID NO: 125883 - DNA, 25 bp, SARS Virus
attcgcgtggtgttcgacctagaac

SEQ ID NO: 125884 - DNA, 25 bp, SARS Virus
ttcgcgtggtggtcgacctagaact

SEQ ID NO: 125885 - DNA, 25 bp, SARS Virus
tcgcgtggtggttgacctagaactg

SEQ ID NO: 125886 - DNA, 25 bp, SARS Virus
cgcgtggtggtctacctagaactgt

SEQ ID NO: 125887 - DNA, 25 bp, SARS Virus
gcgtggtggtcgtcctagaactgtc

SEQ ID NO: 125888 - DNA, 25 bp, SARS Virus
cgtggtggtcgatctagaactgtca

SEQ ID NO: 125889 - DNA, 25 bp, SARS Virus
gtggtggtcgacttagaactgtcaa

SEQ ID NO: 125890 - DNA, 25 bp, SARS Virus
tggtggtcgacctagaactgtcaac

SEQ ID NO: 125891 - DNA, 25 bp, SARS Virus
ggtggtcgaccttgaactgtcaact

SEQ ID NO: 125892 - DNA, 25 bp, SARS Virus
gtggtcgacctataactgtcaacta

SEQ ID NO: 125893 - DNA, 25 bp, SARS Virus
tggtcgacctagtactgtcaactat

SEQ ID NO: 125894 - DNA, 25 bp, SARS Virus
ggtcgacctagatctgtcaactatc

SEQ ID NO: 125895 - DNA, 25 bp, SARS Virus
gtcgacctagaattgtcaactatca

SEQ ID NO: 125896 - DNA, 25 bp, SARS Virus
tcgacctagaactgtcaactatcat

SEQ ID NO: 125897 - DNA, 25 bp, SARS Virus
cgacctagaactttcaactatcatt

SEQ ID NO: 125898 - DNA, 25 bp, SARS Virus
gacctagaactgtcaactatcattg

SEQ ID NO: 125899 - DNA, 25 bp, SARS Virus
acctagaactgttaactatcattgt

SEQ ID NO: 125900 - DNA, 25 bp, SARS Virus
cctagaactgtctactatcattgta

SEQ ID NO: 125901 - DNA, 25 bp, SARS Virus
ctagaactgtcatctatcattgtaa

SEQ ID NO: 125902 - DNA, 25 bp, SARS Virus
tagaactgtcaattatcattgtaat

SEQ ID NO: 125903 - DNA, 25 bp, SARS Virus
agaactgtcaactatcattgtaatc

SEQ ID NO: 125904 - DNA, 25 bp, SARS Virus
gaactgtcaactttcattgtaatcc

SEQ ID NO: 125905 - DNA, 25 bp, SARS Virus
aactgtcaactatcattgtaatcca

SEQ ID NO: 125906 - DNA, 25 bp, SARS Virus
actgtcaactattattgtaatccac

SEQ ID NO: 125907 - DNA, 25 bp, SARS Virus
ctgtcaactatctttgtaatccaca

SEQ ID NO: 125908 - DNA, 25 bp, SARS Virus
tgtcaactatcattgtaatccacac

SEQ ID NO: 125909 - DNA, 25 bp, SARS Virus
gtcaactatcattgtaatccacacg

SEQ ID NO: 125910 - DNA, 25 bp, SARS Virus
tcaactatcattttaatccacacgt

SEQ ID NO: 125911 - DNA, 25 bp, SARS Virus
caactatcattgtaatccacacgta

SEQ ID NO: 125912 - DNA, 25 bp, SARS Virus
aactatcattgttatccacacgtac

SEQ ID NO: 125913 - DNA, 25 bp, SARS Virus
actatcattgtattccacacgtaca

SEQ ID NO: 125914 - DNA, 25 bp, SARS Virus
ctatcattgtaatccacacgtacaa

SEQ ID NO: 125915 - DNA, 25 bp, SARS Virus
tatcattgtaattcacacgtacaaa

SEQ ID NO: 125916 - DNA, 25 bp, SARS Virus
atcattgtaatctacacgtacaaac

SEQ ID NO: 125917 - DNA, 25 bp, SARS Virus
tcattgtaatcctcacgtacaaact

SEQ ID NO: 125918 - DNA, 25 bp, SARS Virus
cattgtaatccatacgtacaaactt

SEQ ID NO: 125919 - DNA, 25 bp, SARS Virus
attgtaatccactcgtacaaacttg

SEQ ID NO: 125920 - DNA, 25 bp, SARS Virus
ttgtaatccacatgtacaaacttgg

SEQ ID NO: 125921 - DNA, 25 bp, SARS Virus
tgtaatccacacttacaaacttggt

SEQ ID NO: 125922 - DNA, 25 bp, SARS Virus
gtaatccacacgtacaaacttggta

SEQ ID NO: 125923 - DNA, 25 bp, SARS Virus
taatccacacgttcaaacttggtat

SEQ ID NO: 125924 - DNA, 25 bp, SARS Virus
aatccacacgtataaacttggtatc

SEQ ID NO: 125925 - DNA, 25 bp, SARS Virus
atccacacgtactaacttggtatca

SEQ ID NO: 125926 - DNA, 25 bp, SARS Virus
tccacacgtacatacttggtatcac

SEQ ID NO: 125927 - DNA, 25 bp, SARS Virus
ccacacgtacaatcttggtatcaca

SEQ ID NO: 125928 - DNA, 25 bp, SARS Virus
cacacgtacaaatttggtatcacac

SEQ ID NO: 125929 - DNA, 25 bp, SARS Virus
acacgtacaaacttggtatcacacg

SEQ ID NO: 125930 - DNA, 25 bp, SARS Virus
cacgtacaaacttggtatcacacgg

SEQ ID NO: 125931 - DNA, 25 bp, SARS Virus
acgtacaaactttgtatcacacggt

SEQ ID NO: 125932 - DNA, 25 bp, SARS Virus
cgtacaaacttgttatcacacggta

SEQ ID NO: 125933 - DNA, 25 bp, SARS Virus
gtacaaacttggtatcacacggtag

SEQ ID NO: 125934 - DNA, 25 bp, SARS Virus
tacaaacttggtttcacacggtaga

SEQ ID NO: 125935 - DNA, 25 bp, SARS Virus
acaaacttggtatcacacggtagat

SEQ ID NO: 125936 - DNA, 25 bp, SARS Virus
caaacttggtattacacggtagata

SEQ ID NO: 125937 - DNA, 25 bp, SARS Virus
aaacttggtatcacacggtagatac

SEQ ID NO: 125938 - DNA, 25 bp, SARS Virus
aacttggtatcaaacggtagatact

SEQ ID NO: 125939 - DNA, 25 bp, SARS Virus
acttggtatcacacggtagatactt

SEQ ID NO: 125940 - DNA, 25 bp, SARS Virus
cttggtatcacaaggtagatacttt

SEQ ID NO: 125941 - DNA, 25 bp, SARS Virus
ttggtatcacacagtagatactttt

SEQ ID NO: 125942 - DNA, 25 bp, SARS Virus
tggtatcacacgatagatacttttc

SEQ ID NO: 125943 - DNA, 25 bp, SARS Virus
ggtatcacacggaagatacttttcc

SEQ ID NO: 125944 - DNA, 25 bp, SARS Virus
gtatcacacggtagatacttttcca

SEQ ID NO: 125945 - DNA, 25 bp, SARS Virus
tatcacacggtaaatacttttccat

SEQ ID NO: 125946 - DNA, 25 bp, SARS Virus
atcacacggtagatacttttccatt

SEQ ID NO: 125947 - DNA, 25 bp, SARS Virus
tcacacggtagaaacttttccattt

SEQ ID NO: 125948 - DNA, 25 bp, SARS Virus
cacacggtagatacttttccatttt

SEQ ID NO: 125949 - DNA, 25 bp, SARS Virus
acacggtagataattttccattttg

SEQ ID NO: 125950 - DNA, 25 bp, SARS Virus
cacggtagatacatttccattttgg

SEQ ID NO: 125951 - DNA, 25 bp, SARS Virus
acggtagatactattccattttgga

SEQ ID NO: 125952 - DNA, 25 bp, SARS Virus
cggtagatacttatccattttggaa

SEQ ID NO: 125953 - DNA, 25 bp, SARS Virus
ggtagatactttaccattttggaaa

SEQ ID NO: 125954 - DNA, 25 bp, SARS Virus
gtagatacttttacattttggaaag

SEQ ID NO: 125955 - DNA, 25 bp, SARS Virus
tagatacttttcaattttggaaagg

SEQ ID NO: 125956 - DNA, 25 bp, SARS Virus
agatacttttccattttggaaagga

SEQ ID NO: 125957 - DNA, 25 bp, SARS Virus
gatacttttccaatttggaaaggat

SEQ ID NO: 125958 - DNA, 25 bp, SARS Virus
atacttttccatattggaaaggatc

SEQ ID NO: 125959 - DNA, 25 bp, SARS Virus
tacttttccattatggaaaggatct

SEQ ID NO: 125960 - DNA, 25 bp, SARS Virus
acttttccatttaggaaaggatctc

SEQ ID NO: 125961 - DNA, 25 bp, SARS Virus
cttttccattttagaaaggatctcg

SEQ ID NO: 125962 - DNA, 25 bp, SARS Virus
ttttccattttgaaaaggatctcgt

SEQ ID NO: 125963 - DNA, 25 bp, SARS Virus
tttccattttggaaaggatctcgtg

SEQ ID NO: 125964 - DNA, 25 bp, SARS Virus
ttccattttggaaaggatctcgtgt

SEQ ID NO: 125965 - DNA, 25 bp, SARS Virus
tccattttggaaaggatctcgtgtt

SEQ ID NO: 125966 - DNA, 25 bp, SARS Virus
ccattttggaaaagatctcgtgttt

SEQ ID NO: 125967 - DNA, 25 bp, SARS Virus
cattttggaaagaatctcgtgtttc

SEQ ID NO: 125968 - DNA, 25 bp, SARS Virus
attttggaaaggatctcgtgtttcg

SEQ ID NO: 125969 - DNA, 25 bp, SARS Virus
ttttggaaaggaactcgtgtttcgg

SEQ ID NO: 125970 - DNA, 25 bp, SARS Virus
tttggaaaggatatcgtgtttcggt

SEQ ID NO: 125971 - DNA, 25 bp, SARS Virus
ttggaaaggatcacgtgtttcggtt

SEQ ID NO: 125972 - DNA, 25 bp, SARS Virus
tggaaaggatctagtgtttcggttc

SEQ ID NO: 125973 - DNA, 25 bp, SARS Virus
ggaaaggatctcatgtttcggttcg

SEQ ID NO: 125974 - DNA, 25 bp, SARS Virus
gaaaggatctcgagtttcggttcgt

SEQ ID NO: 125975 - DNA, 25 bp, SARS Virus
aaaggatctcgtatttcggttcgtc

SEQ ID NO: 125976 - DNA, 25 bp, SARS Virus
aaggatctcgtgattcggttcgtca

SEQ ID NO: 125977 - DNA, 25 bp, SARS Virus
aggatctcgtgtatcggttcgtcac

SEQ ID NO: 125978 - DNA, 25 bp, SARS Virus
ggatctcgtgttacggttcgtcacg

SEQ ID NO: 125979 - DNA, 25 bp, SARS Virus
gatctcgtgtttaggttcgtcacga

SEQ ID NO: 125980 - DNA, 25 bp, SARS Virus
atctcgtgtttcagttcgtcacgat

SEQ ID NO: 125981 - DNA, 25 bp, SARS Virus
tctcgtgtttcgattcgtcacgata

SEQ ID NO: 125982 - DNA, 25 bp, SARS Virus
ctcgtgtttcggatcgtcacgatat

SEQ ID NO: 125983 - DNA, 25 bp, SARS Virus
tcgtgtttcggtacgtcacgatatt

SEQ ID NO: 125984 - DNA, 25 bp, SARS Virus
cgtgtttcggttagtcacgatattc

SEQ ID NO: 125985 - DNA, 25 bp, SARS Virus
gtgtttcggttcatcacgatattca

SEQ ID NO: 125986 - DNA, 25 bp, SARS Virus
tgtttcggttcgacacgatattcat

SEQ ID NO: 125987 - DNA, 25 bp, SARS Virus
gtttcggttcgtaacgatattcata

SEQ ID NO: 125988 - DNA, 25 bp, SARS Virus
tttcggttcgtcacgatattcataa

SEQ ID NO: 125989 - DNA, 25 bp, SARS Virus
ttcggttcgtcaagatattcataat

SEQ ID NO: 125990 - DNA, 25 bp, SARS Virus
tcggttcgtcacaatattcataatg

SEQ ID NO: 125991 - DNA, 25 bp, SARS Virus
cggttcgtcacgatattcataatgg

SEQ ID NO: 125992 - DNA, 25 bp, SARS Virus
ggttcgtcacgaaattcataatggg

SEQ ID NO: 125993 - DNA, 25 bp, SARS Virus
gttcgtcacgatattcataatgggg

SEQ ID NO: 125994 - DNA, 25 bp, SARS Virus
ttcgtcacgataatcataatgggga

SEQ ID NO: 125995 - DNA, 25 bp, SARS Virus
tcgtcacgatatacataatggggat

SEQ ID NO: 125996 - DNA, 25 bp, SARS Virus
cgtcacgatattaataatggggatc

SEQ ID NO: 125997 - DNA, 25 bp, SARS Virus
gtcacgatattcataatggggatca

SEQ ID NO: 125998 - DNA, 25 bp, SARS Virus
tcacgatattcaaaatggggatcac

SEQ ID NO: 125999 - DNA, 25 bp, SARS Virus
cacgatattcataatggggatcaca

SEQ ID NO: 126000 - DNA, 25 bp, SARS Virus
acgatattcataatggggatcacaa

SEQ ID NO: 126001 - DNA, 25 bp, SARS Virus
cgatattcataaaggggatcacaac

SEQ ID NO: 126002 - DNA, 25 bp, SARS Virus
gatattcataatagggatcacaaca

SEQ ID NO: 126003 - DNA, 25 bp, SARS Virus
atattcataatgaggatcacaacat

SEQ ID NO: 126004 - DNA, 25 bp, SARS Virus
tattcataatggagatcacaacatg

SEQ ID NO: 126005 - DNA, 25 bp, SARS Virus
attcataatgggaatcacaacatgg

SEQ ID NO: 126006 - DNA, 25 bp, SARS Virus
ttcataatggggatcacaacatgga

SEQ ID NO: 126007 - DNA, 25 bp, SARS Virus
tcataatggggaacacaacatggaa

SEQ ID NO: 126008 - DNA, 25 bp, SARS Virus
cataatggggataacaacatggaat

SEQ ID NO: 126009 - DNA, 25 bp, SARS Virus
ataatggggatcacaacatggaatg

SEQ ID NO: 126010 - DNA, 25 bp, SARS Virus
taatggggatcaaaacatggaatgt

SEQ ID NO: 126011 - DNA, 25 bp, SARS Virus
aatggggatcacaacatggaatgtt

SEQ ID NO: 126012 - DNA, 25 bp, SARS Virus
atggggatcacaacatggaatgttc

SEQ ID NO: 126013 - DNA, 25 bp, SARS Virus
tggggatcacaaaatggaatgttcc

SEQ ID NO: 126014 - DNA, 25 bp, SARS Virus
ggggatcacaacatggaatgttcct

SEQ ID NO: 126015 - DNA, 25 bp, SARS Virus
gggatcacaacaaggaatgttccta

SEQ ID NO: 126016 - DNA, 25 bp, SARS Virus
ggatcacaacatagaatgttcctag

SEQ ID NO: 126017 - DNA, 25 bp, SARS Virus
gatcacaacatgaaatgttcctaga

SEQ ID NO: 126018 - DNA, 25 bp, SARS Virus
atcacaacatggaatgttcctagaa

SEQ ID NO: 126019 - DNA, 25 bp, SARS Virus
tcacaacatggaatgttcctagaag

SEQ ID NO: 126020 - DNA, 25 bp, SARS Virus
cacaacatggaaagttcctagaagt

SEQ ID NO: 126021 - DNA, 25 bp, SARS Virus
acaacatggaatattcctagaagtt

SEQ ID NO: 126022 - DNA, 25 bp, SARS Virus
caacatggaatgatcctagaagttc

SEQ ID NO: 126023 - DNA, 25 bp, SARS Virus
aacatggaatgtacctagaagttcg

SEQ ID NO: 126024 - DNA, 25 bp, SARS Virus
acatggaatgttactagaagttcgt

SEQ ID NO: 126025 - DNA, 25 bp, SARS Virus
catggaatgttcatagaagttcgtg

SEQ ID NO: 126026 - DNA, 25 bp, SARS Virus
atggaatgttccaagaagttcgtgt

SEQ ID NO: 126027 - DNA, 25 bp, SARS Virus
tggaatgttcctagaagttcgtgta

SEQ ID NO: 126028 - DNA, 25 bp, SARS Virus
ggaatgttcctaaaagttcgtgtac

SEQ ID NO: 126029 - DNA, 25 bp, SARS Virus
gaatgttcctagaagttcgtgtact

SEQ ID NO: 126030 - DNA, 25 bp, SARS Virus
aatgttcctagaagttcgtgtactc

SEQ ID NO: 126031 - DNA, 25 bp, SARS Virus
atgttcctagaaattcgtgtactcc

SEQ ID NO: 126032 - DNA, 25 bp, SARS Virus
tgttcctagaagatcgtgtactcca

SEQ ID NO: 126033 - DNA, 25 bp, SARS Virus
gttcctagaagtacgtgtactccaa

SEQ ID NO: 126034 - DNA, 25 bp, SARS Virus
ttcctagaagttagtgtactccaaa

SEQ ID NO: 126035 - DNA, 25 bp, SARS Virus
tcctagaagttcatgtactccaaat

SEQ ID NO: 126036 - DNA, 25 bp, SARS Virus
cctagaagttcgagtactccaaata

SEQ ID NO: 126037 - DNA, 25 bp, SARS Virus
ctagaagttcgtatactccaaataa

SEQ ID NO: 126038 - DNA, 25 bp, SARS Virus
tagaagttcgtgaactccaaataat

SEQ ID NO: 126039 - DNA, 25 bp, SARS Virus
agaagttcgtgtactccaaataatc

SEQ ID NO: 126040 - DNA, 25 bp, SARS Virus
gaagttcgtgtaatccaaataatct

SEQ ID NO: 126041 - DNA, 25 bp, SARS Virus
aagttcgtgtacaccaaataatcta

SEQ ID NO: 126042 - DNA, 25 bp, SARS Virus
agttcgtgtactacaaataatctac

SEQ ID NO: 126043 - DNA, 25 bp, SARS Virus
gttcgtgtactcaaaataatctacg

SEQ ID NO: 126044 - DNA, 25 bp, SARS Virus
ttcgtgtactccaaataatctacgt

SEQ ID NO: 126045 - DNA, 25 bp, SARS Virus
tcgtgtactccaaataatctacgtg

SEQ ID NO: 126046 - DNA, 25 bp, SARS Virus
cgtgtactccaaataatctacgtgt

SEQ ID NO: 126047 - DNA, 25 bp, SARS Virus
gtgtactccaaaaaatctacgtgtc

SEQ ID NO: 126048 - DNA, 25 bp, SARS Virus
tgtactccaaataatctacgtgtcg

SEQ ID NO: 126049 - DNA, 25 bp, SARS Virus
gtactccaaataatctacgtgtcgc

SEQ ID NO: 126050 - DNA, 25 bp, SARS Virus
tactccaaataaactacgtgtcgcg

SEQ ID NO: 126051 - DNA, 25 bp, SARS Virus
actccaaataatatacgtgtcgcga

SEQ ID NO: 126052 - DNA, 25 bp, SARS Virus
ctccaaataatcaacgtgtcgcgac

SEQ ID NO: 126053 - DNA, 25 bp, SARS Virus
tccaaataatctacgtgtcgcgaca

SEQ ID NO: 126054 - DNA, 25 bp, SARS Virus
ccaaataatctaagtgtcgcgacat

SEQ ID NO: 126055 - DNA, 25 bp, SARS Virus
caaataatctacatgtcgcgacatg

SEQ ID NO: 126056 - DNA, 25 bp, SARS Virus
aaataatctacgagtcgcgacatga

SEQ ID NO: 126057 - DNA, 25 bp, SARS Virus
aataatctacgtatcgcgacatgat

SEQ ID NO: 126058 - DNA, 25 bp, SARS Virus
ataatctacgtgacgcgacatgatg

SEQ ID NO: 126059 - DNA, 25 bp, SARS Virus
taatctacgtgtagcgacatgatgt

SEQ ID NO: 126060 - DNA, 25 bp, SARS Virus
aatctacgtgtcacgacatgatgtc

SEQ ID NO: 126061 - DNA, 25 bp, SARS Virus
atctacgtgtcgagacatgatgtca

SEQ ID NO: 126062 - DNA, 25 bp, SARS Virus
tctacgtgtcgcaacatgatgtcac

SEQ ID NO: 126063 - DNA, 25 bp, SARS Virus
ctacgtgtcgcgacatgatgtcacg

SEQ ID NO: 126064 - DNA, 25 bp, SARS Virus
tacgtgtcgcgaaatgatgtcacgt

SEQ ID NO: 126065 - DNA, 25 bp, SARS Virus
acgtgtcgcgacatgatgtcacgta

SEQ ID NO: 126066 - DNA, 25 bp, SARS Virus
cgtgtcgcgacaagatgtcacgtat

SEQ ID NO: 126067 - DNA, 25 bp, SARS Virus
gtgtcgcgacataatgtcacgtata

SEQ ID NO: 126068 - DNA, 25 bp, SARS Virus
tgtcgcgacatgatgtcacgtatac

SEQ ID NO: 126069 - DNA, 25 bp, SARS Virus
gtcgcgacatgaagtcacgtatacg

SEQ ID NO: 126070 - DNA, 25 bp, SARS Virus
tcgcgacatgatatcacgtatacgt

SEQ ID NO: 126071 - DNA, 25 bp, SARS Virus
cgcgacatgatgacacgtatacgtt

SEQ ID NO: 126072 - DNA, 25 bp, SARS Virus
gcgacatgatgtaacgtatacgttg

SEQ ID NO: 126073 - DNA, 25 bp, SARS Virus
cgacatgatgtcacgtatacgttga

SEQ ID NO: 126074 - DNA, 25 bp, SARS Virus
gacatgatgtcaagtatacgttgac

SEQ ID NO: 126075 - DNA, 25 bp, SARS Virus
acatgatgtcacatatacgttgacg

SEQ ID NO: 126076 - DNA, 25 bp, SARS Virus
catgatgtcacgaatacgttgacgt

SEQ ID NO: 126077 - DNA, 25 bp, SARS Virus
atgatgtcacgtatacgttgacgta

SEQ ID NO: 126078 - DNA, 25 bp, SARS Virus
tgatgtcacgtaaacgttgacgtat

SEQ ID NO: 126079 - DNA, 25 bp, SARS Virus
gatgtcacgtatacgttgacgtatc

SEQ ID NO: 126080 - DNA, 25 bp, SARS Virus
atgtcacgtataagttgacgtatct

SEQ ID NO: 126081 - DNA, 25 bp, SARS Virus
tgtcacgtatacattgacgtatctc

SEQ ID NO: 126082 - DNA, 25 bp, SARS Virus
gtcacgtatacgatgacgtatctct

SEQ ID NO: 126083 - DNA, 25 bp, SARS Virus
tcacgtatacgtagacgtatctctt

SEQ ID NO: 126084 - DNA, 25 bp, SARS Virus
cacgtatacgttaacgtatctcttt

SEQ ID NO: 126085 - DNA, 25 bp, SARS Virus
acgtatacgttgacgtatctcttta

SEQ ID NO: 126086 - DNA, 25 bp, SARS Virus
cgtatacgttgaagtatctctttat

SEQ ID NO: 126087 - DNA, 25 bp, SARS Virus
gtatacgttgacatatctctttatg

SEQ ID NO: 126088 - DNA, 25 bp, SARS Virus
tatacgttgacgaatctctttatgt

SEQ ID NO: 126089 - DNA, 25 bp, SARS Virus
atacgttgacgtatctctttatgtt

SEQ ID NO: 126090 - DNA, 25 bp, SARS Virus
tacgttgacgtaactctttatgttc

SEQ ID NO: 126091 - DNA, 25 bp, SARS Virus
acgttgacgtatatctttatgttca

SEQ ID NO: 126092 - DNA, 25 bp, SARS Virus
cgttgacgtatcactttatgttcag

SEQ ID NO: 126093 - DNA, 25 bp, SARS Virus
gttgacgtatctatttatgttcagt

SEQ ID NO: 126094 - DNA, 25 bp, SARS Virus
ttgacgtatctcattatgttcagtt

SEQ ID NO: 126095 - DNA, 25 bp, SARS Virus
tgacgtatctctatatgttcagttt

SEQ ID NO: 126096 - DNA, 25 bp, SARS Virus
gacgtatctcttaatgttcagtttt

SEQ ID NO: 126097 - DNA, 25 bp, SARS Virus
acgtatctctttatgttcagttttg

SEQ ID NO: 126098 - DNA, 25 bp, SARS Virus
cgtatctctttaagttcagttttgt

SEQ ID NO: 126099 - DNA, 25 bp, SARS Virus
gtatctctttatattcagttttgtt

SEQ ID NO: 126100 - DNA, 25 bp, SARS Virus
tatctctttatgatcagttttgtta

SEQ ID NO: 126101 - DNA, 25 bp, SARS Virus
atctctttatgtacagttttgttac

SEQ ID NO: 126102 - DNA, 25 bp, SARS Virus
tctctttatgttaagttttgttact

SEQ ID NO: 126103 - DNA, 25 bp, SARS Virus
ctctttatgttcagttttgttactc

SEQ ID NO: 126104 - DNA, 25 bp, SARS Virus
tctttatgttcaattttgttactct

SEQ ID NO: 126105 - DNA, 25 bp, SARS Virus
ctttatgttcagatttgttactctt

SEQ ID NO: 126106 - DNA, 25 bp, SARS Virus
tttatgttcagtattgttactcttc

SEQ ID NO: 126107 - DNA, 25 bp, SARS Virus
ttatgttcagttatgttactcttca

SEQ ID NO: 126108 - DNA, 25 bp, SARS Virus
tatgttcagtttagttactcttcaa

SEQ ID NO: 126109 - DNA, 25 bp, SARS Virus
atgttcagttttattactcttcaaa

SEQ ID NO: 126110 - DNA, 25 bp, SARS Virus
tgttcagttttgatactcttcaaag

SEQ ID NO: 126111 - DNA, 25 bp, SARS Virus
gttcagttttgtaactcttcaaagt

SEQ ID NO: 126112 - DNA, 25 bp, SARS Virus
ttcagttttgttactcttcaaagta

SEQ ID NO: 126113 - DNA, 25 bp, SARS Virus
tcagttttgttaatcttcaaagtac

SEQ ID NO: 126114 - DNA, 25 bp, SARS Virus
cagttttgttacacttcaaagtaca

SEQ ID NO: 126115 - DNA, 25 bp, SARS Virus
agttttgttactattcaaagtacaa

SEQ ID NO: 126116 - DNA, 25 bp, SARS Virus
gttttgttactcatcaaagtacaag

SEQ ID NO: 126117 - DNA, 25 bp, SARS Virus
ttttgttactctacaaagtacaagc

SEQ ID NO: 126118 - DNA, 25 bp, SARS Virus
tttgttactcttaaaagtacaagca

SEQ ID NO: 126119 - DNA, 25 bp, SARS Virus
ttgttactcttcaaagtacaagcaa

SEQ ID NO: 126120 - DNA, 25 bp, SARS Virus
tgttactcttcaaagtacaagcaaa

SEQ ID NO: 126121 - DNA, 25 bp, SARS Virus
gttactcttcaaagtacaagcaaat

SEQ ID NO: 126122 - DNA, 25 bp, SARS Virus
ttactcttcaaaatacaagcaaatc

SEQ ID NO: 126123 - DNA, 25 bp, SARS Virus
tactcttcaaagaacaagcaaatct

SEQ ID NO: 126124 - DNA, 25 bp, SARS Virus
actcttcaaagtacaagcaaatctg

SEQ ID NO: 126125 - DNA, 25 bp, SARS Virus
ctcttcaaagtaaaagcaaatctga

SEQ ID NO: 126126 - DNA, 25 bp, SARS Virus
tcttcaaagtacaagcaaatctgaa

SEQ ID NO: 126127 - DNA, 25 bp, SARS Virus
cttcaaagtacaagcaaatctgaaa

SEQ ID NO: 126128 - DNA, 25 bp, SARS Virus
ttcaaagtacaaacaaatctgaaac

SEQ ID NO: 126129 - DNA, 25 bp, SARS Virus
tcaaagtacaagaaaatctgaaacc

SEQ ID NO: 126130 - DNA, 25 bp, SARS Virus
caaagtacaagcaaatctgaaacca

SEQ ID NO: 126131 - DNA, 25 bp, SARS Virus
aaagtacaagcaaatctgaaaccat

SEQ ID NO: 126132 - DNA, 25 bp, SARS Virus
aagtacaagcaaatctgaaaccatg

SEQ ID NO: 126133 - DNA, 25 bp, SARS Virus
agtacaagcaaaactgaaaccatgt

SEQ ID NO: 126134 - DNA, 25 bp, SARS Virus
gtacaagcaaatatgaaaccatgtt

SEQ ID NO: 126135 - DNA, 25 bp, SARS Virus
tacaagcaaatcagaaaccatgttc

SEQ ID NO: 126136 - DNA, 25 bp, SARS Virus
acaagcaaatctaaaaccatgttcc

SEQ ID NO: 126137 - DNA, 25 bp, SARS Virus
caagcaaatctgaaaccatgttcca

SEQ ID NO: 126138 - DNA, 25 bp, SARS Virus
aagcaaatctgaaaccatgttccaa

SEQ ID NO: 126139 - DNA, 25 bp, SARS Virus
agcaaatctgaaaccatgttccaag

SEQ ID NO: 126140 - DNA, 25 bp, SARS Virus
gcaaatctgaaaacatgttccaaga

SEQ ID NO: 126141 - DNA, 25 bp, SARS Virus
caaatctgaaacaatgttccaagaa

SEQ ID NO: 126142 - DNA, 25 bp, SARS Virus
aaatctgaaaccatgttccaagaag

SEQ ID NO: 126143 - DNA, 25 bp, SARS Virus
aatctgaaaccaagttccaagaaga

SEQ ID NO: 126144 - DNA, 25 bp, SARS Virus
atctgaaaccatattccaagaagat

SEQ ID NO: 126145 - DNA, 25 bp, SARS Virus
tctgaaaccatgatccaagaagatc

SEQ ID NO: 126146 - DNA, 25 bp, SARS Virus
ctgaaaccatgtaccaagaagatct

SEQ ID NO: 126147 - DNA, 25 bp, SARS Virus
tgaaaccatgttacaagaagatcta

SEQ ID NO: 126148 - DNA, 25 bp, SARS Virus
gaaaccatgttcaaagaagatctag

SEQ ID NO: 126149 - DNA, 25 bp, SARS Virus
aaaccatgttccaagaagatctagg

SEQ ID NO: 126150 - DNA, 25 bp, SARS Virus
aaccatgttccaagaagatctagga

SEQ ID NO: 126151 - DNA, 25 bp, SARS Virus
accatgttccaaaaagatctaggac

SEQ ID NO: 126152 - DNA, 25 bp, SARS Virus
ccatgttccaagaagatctaggacc

SEQ ID NO: 126153 - DNA, 25 bp, SARS Virus
catgttccaagaagatctaggacct

SEQ ID NO: 126154 - DNA, 25 bp, SARS Virus
atgttccaagaaaatctaggaccta

SEQ ID NO: 126155 - DNA, 25 bp, SARS Virus
tgttccaagaagatctaggacctaa

SEQ ID NO: 126156 - DNA, 25 bp, SARS Virus
gttccaagaagaactaggacctaaa

SEQ ID NO: 126157 - DNA, 25 bp, SARS Virus
ttccaagaagatataggacctaaag

SEQ ID NO: 126158 - DNA, 25 bp, SARS Virus
tccaagaagatcaaggacctaaagc

SEQ ID NO: 126159 - DNA, 25 bp, SARS Virus
ccaagaagatctaggacctaaagct

SEQ ID NO: 126160 - DNA, 25 bp, SARS Virus
caagaagatctaagacctaaagctc

SEQ ID NO: 126161 - DNA, 25 bp, SARS Virus
aagaagatctagaacctaaagctca

SEQ ID NO: 126162 - DNA, 25 bp, SARS Virus
agaagatctaggacctaaagctcac

SEQ ID NO: 126163 - DNA, 25 bp, SARS Virus
gaagatctaggaactaaagctcact

SEQ ID NO: 126164 - DNA, 25 bp, SARS Virus
aagatctaggacataaagctcactt

SEQ ID NO: 126165 - DNA, 25 bp, SARS Virus
agatctaggaccaaaagctcacttt

SEQ ID NO: 126166 - DNA, 25 bp, SARS Virus
gatctaggacctaaagctcactttt

SEQ ID NO: 126167 - DNA, 25 bp, SARS Virus
atctaggacctaaagctcacttttg

SEQ ID NO: 126168 - DNA, 25 bp, SARS Virus
tctaggacctaaagctcacttttgg

SEQ ID NO: 126169 - DNA, 25 bp, SARS Virus
ctaggacctaaaactcacttttggt

SEQ ID NO: 126170 - DNA, 25 bp, SARS Virus
taggacctaaagatcacttttggtt

SEQ ID NO: 126171 - DNA, 25 bp, SARS Virus
aggacctaaagcacacttttggttt

SEQ ID NO: 126172 - DNA, 25 bp, SARS Virus
ggacctaaagctaacttttggtttt

SEQ ID NO: 126173 - DNA, 25 bp, SARS Virus
gacctaaagctcacttttggtttta

SEQ ID NO: 126174 - DNA, 25 bp, SARS Virus
acctaaagctcaattttggttttat

SEQ ID NO: 126175 - DNA, 25 bp, SARS Virus
cctaaagctcacatttggttttata

SEQ ID NO: 126176 - DNA, 25 bp, SARS Virus
ctaaagctcactattggttttatat

SEQ ID NO: 126177 - DNA, 25 bp, SARS Virus
taaagctcacttatggttttatatt

SEQ ID NO: 126178 - DNA, 25 bp, SARS Virus
aaagctcactttaggttttatatta

SEQ ID NO: 126179 - DNA, 25 bp, SARS Virus
aagctcacttttagttttatattat

SEQ ID NO: 126180 - DNA, 25 bp, SARS Virus
agctcacttttgattttatattatt

SEQ ID NO: 126181 - DNA, 25 bp, SARS Virus
gctcacttttggatttatattattc

SEQ ID NO: 126182 - DNA, 25 bp, SARS Virus
ctcacttttggtattatattattcg

SEQ ID NO: 126183 - DNA, 25 bp, SARS Virus
tcacttttggttatatattattcgt

SEQ ID NO: 126184 - DNA, 25 bp, SARS Virus
cacttttggtttaatattattcgta

SEQ ID NO: 126185 - DNA, 25 bp, SARS Virus
acttttggttttatattattcgtaa

SEQ ID NO: 126186 - DNA, 25 bp, SARS Virus
cttttggttttaaattattcgtaat

SEQ ID NO: 126187 - DNA, 25 bp, SARS Virus
ttttggttttatattattcgtaata

SEQ ID NO: 126188 - DNA, 25 bp, SARS Virus
tttggttttataatattcgtaataa

SEQ ID NO: 126189 - DNA, 25 bp, SARS Virus
ttggttttatataattcgtaataat

SEQ ID NO: 126190 - DNA, 25 bp, SARS Virus
tggttttatattattcgtaataatt

SEQ ID NO: 126191 - DNA, 25 bp, SARS Virus
ggttttatattaatcgtaataattt

SEQ ID NO: 126192 - DNA, 25 bp, SARS Virus
gttttatattatacgtaataatttt

SEQ ID NO: 126193 - DNA, 25 bp, SARS Virus
ttttatattattagtaataattttg

SEQ ID NO: 126194 - DNA, 25 bp, SARS Virus
tttatattattcataataattttgt

SEQ ID NO: 126195 - DNA, 25 bp, SARS Virus
ttatattattcgaaataattttgtt

SEQ ID NO: 126196 - DNA, 25 bp, SARS Virus
tatattattcgtaataattttgttc

SEQ ID NO: 126197 - DNA, 25 bp, SARS Virus
atattattcgtaataattttgttcc

SEQ ID NO: 126198 - DNA, 25 bp, SARS Virus
tattattcgtaaaaattttgttcct

SEQ ID NO: 126199 - DNA, 25 bp, SARS Virus
attattcgtaataattttgttcctt

SEQ ID NO: 126200 - DNA, 25 bp, SARS Virus
ttattcgtaataattttgttcctta

SEQ ID NO: 126201 - DNA, 25 bp, SARS Virus
tattcgtaataaatttgttccttat

SEQ ID NO: 126202 - DNA, 25 bp, SARS Virus
attcgtaataatattgttccttatc

SEQ ID NO: 126203 - DNA, 25 bp, SARS Virus
ttcgtaataattatgttccttatcg

SEQ ID NO: 126204 - DNA, 25 bp, SARS Virus
tcgtaataatttagttccttatcgt

SEQ ID NO: 126205 - DNA, 25 bp, SARS Virus
cgtaataattttattccttatcgtc

SEQ ID NO: 126206 - DNA, 25 bp, SARS Virus
gtaataattttgatccttatcgtct

SEQ ID NO: 126207 - DNA, 25 bp, SARS Virus
taataattttgtaccttatcgtctt

SEQ ID NO: 126208 - DNA, 25 bp, SARS Virus
aataattttgttacttatcgtcttt

SEQ ID NO: 126209 - DNA, 25 bp, SARS Virus
ataattttgttcattatcgtctttc

SEQ ID NO: 126210 - DNA, 25 bp, SARS Virus
taattttgttccatatcgtctttcc

SEQ ID NO: 126211 - DNA, 25 bp, SARS Virus
aattttgttcctaatcgtctttccg

SEQ ID NO: 126212 - DNA, 25 bp, SARS Virus
attttgttccttatcgtctttccga

SEQ ID NO: 126213 - DNA, 25 bp, SARS Virus
ttttgttccttaacgtctttccgat

SEQ ID NO: 126214 - DNA, 25 bp, SARS Virus
tttgttccttatagtctttccgatt

SEQ ID NO: 126215 - DNA, 25 bp, SARS Virus
ttgttccttatcatctttccgattt

SEQ ID NO: 126216 - DNA, 25 bp, SARS Virus
tgttccttatcgactttccgatttt

SEQ ID NO: 126217 - DNA, 25 bp, SARS Virus
gttccttatcgtatttccgattttt

SEQ ID NO: 126218 - DNA, 25 bp, SARS Virus
ttccttatcgtcattccgatttttc

SEQ ID NO: 126219 - DNA, 25 bp, SARS Virus
tccttatcgtctatccgatttttcg

SEQ ID NO: 126220 - DNA, 25 bp, SARS Virus
ccttatcgtcttaccgatttttcgt

SEQ ID NO: 126221 - DNA, 25 bp, SARS Virus
cttatcgtctttacgatttttcgtg

SEQ ID NO: 126222 - DNA, 25 bp, SARS Virus
ttatcgtctttcagatttttcgtgt

SEQ ID NO: 126223 - DNA, 25 bp, SARS Virus
tatcgtctttccaatttttcgtgtt

SEQ ID NO: 126224 - DNA, 25 bp, SARS Virus
atcgtctttccgatttttcgtgttt

SEQ ID NO: 126225 - DNA, 25 bp, SARS Virus
tcgtctttccgaattttcgtgttta

SEQ ID NO: 126226 - DNA, 25 bp, SARS Virus
cgtctttccgatatttcgtgtttat

SEQ ID NO: 126227 - DNA, 25 bp, SARS Virus
gtctttccgattattcgtgtttatc

SEQ ID NO: 126228 - DNA, 25 bp, SARS Virus
tctttccgatttatcgtgtttatct

SEQ ID NO: 126229 - DNA, 25 bp, SARS Virus
ctttccgattttacgtgtttatctt

SEQ ID NO: 126230 - DNA, 25 bp, SARS Virus
tttccgatttttagtgtttatcttc

SEQ ID NO: 126231 - DNA, 25 bp, SARS Virus
ttccgatttttcatgtttatcttca

SEQ ID NO: 126232 - DNA, 25 bp, SARS Virus
tccgatttttcgagtttatcttcag

SEQ ID NO: 126233 - DNA, 25 bp, SARS Virus
ccgatttttcgtatttatcttcagt

SEQ ID NO: 126234 - DNA, 25 bp, SARS Virus
cgatttttcgtgattatcttcagtt

SEQ ID NO: 126235 - DNA, 25 bp, SARS Virus
gatttttcgtgtatatcttcagtta

SEQ ID NO: 126236 - DNA, 25 bp, SARS Virus
atttttcgtgttaatcttcagttaa

SEQ ID NO: 126237 - DNA, 25 bp, SARS Virus
tttttcgtgtttatcttcagttaat

SEQ ID NO: 126238 - DNA, 25 bp, SARS Virus
ttttcgtgtttaacttcagttaatt

SEQ ID NO: 126239 - DNA, 25 bp, SARS Virus
tttcgtgtttatattcagttaattt

SEQ ID NO: 126240 - DNA, 25 bp, SARS Virus
ttcgtgtttatcatcagttaatttc

SEQ ID NO: 126241 - DNA, 25 bp, SARS Virus
tcgtgtttatctacagttaatttca

SEQ ID NO: 126242 - DNA, 25 bp, SARS Virus
cgtgtttatcttaagttaatttcac

SEQ ID NO: 126243 - DNA, 25 bp, SARS Virus
gtgtttatcttcagttaatttcact

SEQ ID NO: 126244 - DNA, 25 bp, SARS Virus
tgtttatcttcaattaatttcactc

SEQ ID NO: 126245 - DNA, 25 bp, SARS Virus
gtttatcttcagataatttcactcg

SEQ ID NO: 126246 - DNA, 25 bp, SARS Virus
tttatcttcagtaaatttcactcga

SEQ ID NO: 126247 - DNA, 25 bp, SARS Virus
ttatcttcagttaatttcactcgag

SEQ ID NO: 126248 - DNA, 25 bp, SARS Virus
tatcttcagttaatttcactcgagt

SEQ ID NO: 126249 - DNA, 25 bp, SARS Virus
atcttcagttaaattcactcgagta

SEQ ID NO: 126250 - DNA, 25 bp, SARS Virus
tcttcagttaatatcactcgagtaa

SEQ ID NO: 126251 - DNA, 25 bp, SARS Virus
cttcagttaattacactcgagtaag

SEQ ID NO: 126252 - DNA, 25 bp, SARS Virus
ttcagttaatttaactcgagtaagt

SEQ ID NO: 126253 - DNA, 25 bp, SARS Virus
tcagttaatttcactcgagtaagta

SEQ ID NO: 126254 - DNA, 25 bp, SARS Virus
cagttaatttcaatcgagtaagtaa

SEQ ID NO: 126255 - DNA, 25 bp, SARS Virus
agttaatttcacacgagtaagtaag

SEQ ID NO: 126256 - DNA, 25 bp, SARS Virus
gttaatttcactagagtaagtaaga

SEQ ID NO: 126257 - DNA, 25 bp, SARS Virus
ttaatttcactcaagtaagtaagac

SEQ ID NO: 126258 - DNA, 25 bp, SARS Virus
taatttcactcgagtaagtaagaca

SEQ ID NO: 126259 - DNA, 25 bp, SARS Virus
aatttcactcgaataagtaagacag

SEQ ID NO: 126260 - DNA, 25 bp, SARS Virus
atttcactcgagaaagtaagacaga

SEQ ID NO: 126261 - DNA, 25 bp, SARS Virus
tttcactcgagtaagtaagacagaa

SEQ ID NO: 126262 - DNA, 25 bp, SARS Virus
ttcactcgagtaagtaagacagaaa

SEQ ID NO: 126263 - DNA, 25 bp, SARS Virus
tcactcgagtaaataagacagaaag

SEQ ID NO: 126264 - DNA, 25 bp, SARS Virus
cactcgagtaagaaagacagaaaga

SEQ ID NO: 126265 - DNA, 25 bp, SARS Virus
actcgagtaagtaagacagaaagag

SEQ ID NO: 126266 - DNA, 25 bp, SARS Virus
ctcgagtaagtaagacagaaagaga

SEQ ID NO: 126267 - DNA, 25 bp, SARS Virus
tcgagtaagtaaaacagaaagagaa

SEQ ID NO: 126268 - DNA, 25 bp, SARS Virus
cgagtaagtaagacagaaagagaat

SEQ ID NO: 126269 - DNA, 25 bp, SARS Virus
gagtaagtaagaaagaaagagaatt

SEQ ID NO: 126270 - DNA, 25 bp, SARS Virus
agtaagtaagacagaaagagaatta

SEQ ID NO: 126271 - DNA, 25 bp, SARS Virus
gtaagtaagacaaaaagagaattac

SEQ ID NO: 126272 - DNA, 25 bp, SARS Virus
taagtaagacagaaagagaattacc

SEQ ID NO: 126273 - DNA, 25 bp, SARS Virus
aagtaagacagaaagagaattacca

SEQ ID NO: 126274 - DNA, 25 bp, SARS Virus
agtaagacagaaagagaattaccac

SEQ ID NO: 126275 - DNA, 25 bp, SARS Virus
gtaagacagaaaaagaattaccact

SEQ ID NO: 126276 - DNA, 25 bp, SARS Virus
taagacagaaagagaattaccactt

SEQ ID NO: 126277 - DNA, 25 bp, SARS Virus
aagacagaaagaaaattaccacttc

SEQ ID NO: 126278 - DNA, 25 bp, SARS Virus
agacagaaagagaattaccacttcg

SEQ ID NO: 126279 - DNA, 25 bp, SARS Virus
gacagaaagagaattaccacttcgt

SEQ ID NO: 126280 - DNA, 25 bp, SARS Virus
acagaaagagaaataccacttcgtt

SEQ ID NO: 126281 - DNA, 25 bp, SARS Virus
cagaaagagaataaccacttcgttt

SEQ ID NO: 126282 - DNA, 25 bp, SARS Virus
agaaagagaattaccacttcgtttc

SEQ ID NO: 126283 - DNA, 25 bp, SARS Virus
gaaagagaattaacacttcgtttca

SEQ ID NO: 126284 - DNA, 25 bp, SARS Virus
aaagagaattacaacttcgtttcat

SEQ ID NO: 126285 - DNA, 25 bp, SARS Virus
aagagaattaccacttcgtttcata

SEQ ID NO: 126286 - DNA, 25 bp, SARS Virus
agagaattaccaattcgtttcataa

SEQ ID NO: 126287 - DNA, 25 bp, SARS Virus
gagaattaccacatcgtttcataat

SEQ ID NO: 126288 - DNA, 25 bp, SARS Virus
agaattaccactacgtttcataatt

SEQ ID NO: 126289 - DNA, 25 bp, SARS Virus
gaattaccacttagtttcataattt

SEQ ID NO: 126290 - DNA, 25 bp, SARS Virus
aattaccacttcatttcataatttt

SEQ ID NO: 126291 - DNA, 25 bp, SARS Virus
attaccacttcgattcataattttt

SEQ ID NO: 126292 - DNA, 25 bp, SARS Virus
ttaccacttcgtatcataattttta

SEQ ID NO: 126293 - DNA, 25 bp, SARS Virus
taccacttcgttacataatttttat

SEQ ID NO: 126294 - DNA, 25 bp, SARS Virus
accacttcgtttaataatttttatg

SEQ ID NO: 126295 - DNA, 25 bp, SARS Virus
ccacttcgtttcataatttttatga

SEQ ID NO: 126296 - DNA, 25 bp, SARS Virus
cacttcgtttcaaaatttttatgat

SEQ ID NO: 126297 - DNA, 25 bp, SARS Virus
acttcgtttcataatttttatgatc

SEQ ID NO: 126298 - DNA, 25 bp, SARS Virus
cttcgtttcataatttttatgatct

SEQ ID NO: 126299 - DNA, 25 bp, SARS Virus
ttcgtttcataaattttatgatctc

SEQ ID NO: 126300 - DNA, 25 bp, SARS Virus
tcgtttcataatatttatgatctcg

SEQ ID NO: 126301 - DNA, 25 bp, SARS Virus
cgtttcataattattatgatctcgt

SEQ ID NO: 126302 - DNA, 25 bp, SARS Virus
gtttcataatttatatgatctcgtc

SEQ ID NO: 126303 - DNA, 25 bp, SARS Virus
tttcataattttaatgatctcgtcg

SEQ ID NO: 126304 - DNA, 25 bp, SARS Virus
ttcataatttttatgatctcgtcgt

SEQ ID NO: 126305 - DNA, 25 bp, SARS Virus
tcataatttttaagatctcgtcgtt

SEQ ID NO: 126306 - DNA, 25 bp, SARS Virus
cataatttttataatctcgtcgttg

SEQ ID NO: 126307 - DNA, 25 bp, SARS Virus
ataatttttatgatctcgtcgttgt

SEQ ID NO: 126308 - DNA, 25 bp, SARS Virus
taatttttatgaactcgtcgttgtt

SEQ ID NO: 126309 - DNA, 25 bp, SARS Virus
aatttttatgatatcgtcgttgtta

SEQ ID NO: 126310 - DNA, 25 bp, SARS Virus
atttttatgatcacgtcgttgttac

SEQ ID NO: 126311 - DNA, 25 bp, SARS Virus
tttttatgatctagtcgttgttact

SEQ ID NO: 126312 - DNA, 25 bp, SARS Virus
ttttatgatctcatcgttgttactc

SEQ ID NO: 126313 - DNA, 25 bp, SARS Virus
tttatgatctcgacgttgttactct

SEQ ID NO: 126314 - DNA, 25 bp, SARS Virus
ttatgatctcgtagttgttactctt

SEQ ID NO: 126315 - DNA, 25 bp, SARS Virus
tatgatctcgtcattgttactcttt

SEQ ID NO: 126316 - DNA, 25 bp, SARS Virus
atgatctcgtcgatgttactctttt

SEQ ID NO: 126317 - DNA, 25 bp, SARS Virus
tgatctcgtcgtagttactcttttt

SEQ ID NO: 126318 - DNA, 25 bp, SARS Virus
gatctcgtcgttattactctttttc

SEQ ID NO: 126319 - DNA, 25 bp, SARS Virus
atctcgtcgttgatactctttttca

SEQ ID NO: 126320 - DNA, 25 bp, SARS Virus
tctcgtcgttgtaactctttttcac

SEQ ID NO: 126321 - DNA, 25 bp, SARS Virus
ctcgtcgttgttactctttttcacc

SEQ ID NO: 126322 - DNA, 25 bp, SARS Virus
tcgtcgttgttaatctttttcaccg

SEQ ID NO: 126323 - DNA, 25 bp, SARS Virus
cgtcgttgttacactttttcaccgc

SEQ ID NO: 126324 - DNA, 25 bp, SARS Virus
gtcgttgttactatttttcaccgct

SEQ ID NO: 126325 - DNA, 25 bp, SARS Virus
tcgttgttactcattttcaccgctc

SEQ ID NO: 126326 - DNA, 25 bp, SARS Virus
cgttgttactctatttcaccgctca

SEQ ID NO: 126327 - DNA, 25 bp, SARS Virus
gttgttactcttattcaccgctcat

SEQ ID NO: 126328 - DNA, 25 bp, SARS Virus
ttgttactctttatcaccgctcatc

SEQ ID NO: 126329 - DNA, 25 bp, SARS Virus
tgttactcttttacaccgctcatct

SEQ ID NO: 126330 - DNA, 25 bp, SARS Virus
gttactctttttaaccgctcatctc

SEQ ID NO: 126331 - DNA, 25 bp, SARS Virus
ttactctttttcaccgctcatctcg

SEQ ID NO: 126332 - DNA, 25 bp, SARS Virus
tactctttttcaacgctcatctcga

SEQ ID NO: 126333 - DNA, 25 bp, SARS Virus
actctttttcacagctcatctcgag

SEQ ID NO: 126334 - DNA, 25 bp, SARS Virus
ctctttttcaccactcatctcgaga

SEQ ID NO: 126335 - DNA, 25 bp, SARS Virus
tctttttcaccgatcatctcgagaa

SEQ ID NO: 126336 - DNA, 25 bp, SARS Virus
ctttttcaccgcacatctcgagaac

SEQ ID NO: 126337 - DNA, 25 bp, SARS Virus
tttttcaccgctaatctcgagaaca

SEQ ID NO: 126338 - DNA, 25 bp, SARS Virus
ttttcaccgctcatctcgagaacaa

SEQ ID NO: 126339 - DNA, 25 bp, SARS Virus
tttcaccgctcaactcgagaacaac

SEQ ID NO: 126340 - DNA, 25 bp, SARS Virus
ttcaccgctcatatcgagaacaact

SEQ ID NO: 126341 - DNA, 25 bp, SARS Virus
tcaccgctcatcacgagaacaactt

SEQ ID NO: 126342 - DNA, 25 bp, SARS Virus
caccgctcatctagagaacaacttg

SEQ ID NO: 126343 - DNA, 25 bp, SARS Virus
accgctcatctcaagaacaacttgg

SEQ ID NO: 126344 - DNA, 25 bp, SARS Virus
ccgctcatctcgagaacaacttgga

SEQ ID NO: 126345 - DNA, 25 bp, SARS Virus
cgctcatctcgaaaacaacttggag

SEQ ID NO: 126346 - DNA, 25 bp, SARS Virus
gctcatctcgagaacaacttggagg

SEQ ID NO: 126347 - DNA, 25 bp, SARS Virus
ctcatctcgagaacaacttggagga

SEQ ID NO: 126348 - DNA, 25 bp, SARS Virus
tcatctcgagaaaaacttggaggag

SEQ ID NO: 126349 - DNA, 25 bp, SARS Virus
catctcgagaacaacttggaggaga

SEQ ID NO: 126350 - DNA, 25 bp, SARS Virus
atctcgagaacaacttggaggagaa

SEQ ID NO: 126351 - DNA, 25 bp, SARS Virus
tctcgagaacaaattggaggagaac

SEQ ID NO: 126352 - DNA, 25 bp, SARS Virus
ctcgagaacaacatggaggagaaca

SEQ ID NO: 126353 - DNA, 25 bp, SARS Virus
tcgagaacaactaggaggagaacag

SEQ ID NO: 126354 - DNA, 25 bp, SARS Virus
cgagaacaacttagaggagaacaga

SEQ ID NO: 126355 - DNA, 25 bp, SARS Virus
gagaacaacttgaaggagaacagac

SEQ ID NO: 126356 - DNA, 25 bp, SARS Virus
agaacaacttggaggagaacagact

SEQ ID NO: 126357 - DNA, 25 bp, SARS Virus
gaacaacttggaagagaacagacta

SEQ ID NO: 126358 - DNA, 25 bp, SARS Virus
aacaacttggagaagaacagactac

SEQ ID NO: 126359 - DNA, 25 bp, SARS Virus
acaacttggaggagaacagactact

SEQ ID NO: 126360 - DNA, 25 bp, SARS Virus
caacttggaggaaaacagactactt

SEQ ID NO: 126361 - DNA, 25 bp, SARS Virus
aacttggaggagaacagactacttt

SEQ ID NO: 126362 - DNA, 25 bp, SARS Virus
acttggaggagaacagactactttt

SEQ ID NO: 126363 - DNA, 25 bp, SARS Virus
cttggaggagaaaagactacttttc

SEQ ID NO: 126364 - DNA, 25 bp, SARS Virus
ttggaggagaacagactacttttca

SEQ ID NO: 126365 - DNA, 25 bp, SARS Virus
tggaggagaacaaactacttttcaa

SEQ ID NO: 126366 - DNA, 25 bp, SARS Virus
ggaggagaacagactacttttcaaa

SEQ ID NO: 126367 - DNA, 25 bp, SARS Virus
gaggagaacagaatacttttcaaaa

SEQ ID NO: 126368 - DNA, 25 bp, SARS Virus
aggagaacagacaacttttcaaaac

SEQ ID NO: 126369 - DNA, 25 bp, SARS Virus
ggagaacagactacttttcaaaacc

SEQ ID NO: 126370 - DNA, 25 bp, SARS Virus
gagaacagactaattttcaaaacca

SEQ ID NO: 126371 - DNA, 25 bp, SARS Virus
agaacagactacatttcaaaaccac

SEQ ID NO: 126372 - DNA, 25 bp, SARS Virus
gaacagactactattcaaaaccact

SEQ ID NO: 126373 - DNA, 25 bp, SARS Virus
aacagactacttatcaaaaccactt

SEQ ID NO: 126374 - DNA, 25 bp, SARS Virus
acagactactttacaaaaccacttt

SEQ ID NO: 126375 - DNA, 25 bp, SARS Virus
cagactacttttaaaaaccactttg

SEQ ID NO: 126376 - DNA, 25 bp, SARS Virus
agactacttttcaaaaccactttga

SEQ ID NO: 126377 - DNA, 25 bp, SARS Virus
gactacttttcaaaaccactttgac

SEQ ID NO: 126378 - DNA, 25 bp, SARS Virus
actacttttcaaaaccactttgact

SEQ ID NO: 126379 - DNA, 25 bp, SARS Virus
ctacttttcaaaaccactttgacta

SEQ ID NO: 126380 - DNA, 25 bp, SARS Virus
tacttttcaaaaacactttgactag

SEQ ID NO: 126381 - DNA, 25 bp, SARS Virus
acttttcaaaacaactttgactaga

SEQ ID NO: 126382 - DNA, 25 bp, SARS Virus
cttttcaaaaccactttgactagaa

SEQ ID NO: 126383 - DNA, 25 bp, SARS Virus
ttttcaaaaccaatttgactagaac

SEQ ID NO: 126384 - DNA, 25 bp, SARS Virus
tttcaaaaccacattgactagaacg

SEQ ID NO: 126385 - DNA, 25 bp, SARS Virus
ttcaaaaccactatgactagaacgt

SEQ ID NO: 126386 - DNA, 25 bp, SARS Virus
tcaaaaccacttagactagaacgtg

SEQ ID NO: 126387 - DNA, 25 bp, SARS Virus
caaaaccactttaactagaacgtgc

SEQ ID NO: 126388 - DNA, 25 bp, SARS Virus
aaaaccactttgactagaacgtgcg

SEQ ID NO: 126389 - DNA, 25 bp, SARS Virus
aaaccactttgaatagaacgtgcgt

SEQ ID NO: 126390 - DNA, 25 bp, SARS Virus
aaccactttgacaagaacgtgcgtc

SEQ ID NO: 126391 - DNA, 25 bp, SARS Virus
accactttgactagaacgtgcgtcg

SEQ ID NO: 126392 - DNA, 25 bp, SARS Virus
ccactttgactaaaacgtgcgtcga

SEQ ID NO: 126393 - DNA, 25 bp, SARS Virus
cactttgactagaacgtgcgtcgac

SEQ ID NO: 126394 - DNA, 25 bp, SARS Virus
actttgactagaacgtgcgtcgact

SEQ ID NO: 126395 - DNA, 25 bp, SARS Virus
ctttgactagaaagtgcgtcgacta

SEQ ID NO: 126396 - DNA, 25 bp, SARS Virus
tttgactagaacatgcgtcgactat

SEQ ID NO: 126397 - DNA, 25 bp, SARS Virus
ttgactagaacgagcgtcgactatc

SEQ ID NO: 126398 - DNA, 25 bp, SARS Virus
tgactagaacgtacgtcgactatcc

SEQ ID NO: 126399 - DNA, 25 bp, SARS Virus
gactagaacgtgagtcgactatcca

SEQ ID NO: 126400 - DNA, 25 bp, SARS Virus
actagaacgtgcatcgactatccat

SEQ ID NO: 126401 - DNA, 25 bp, SARS Virus
ctagaacgtgcgacgactatccata

SEQ ID NO: 126402 - DNA, 25 bp, SARS Virus
tagaacgtgcgtagactatccatac

SEQ ID NO: 126403 - DNA, 25 bp, SARS Virus
agaacgtgcgtcaactatccataca

SEQ ID NO: 126404 - DNA, 25 bp, SARS Virus
gaacgtgcgtcgactatccatacag

SEQ ID NO: 126405 - DNA, 25 bp, SARS Virus
aacgtgcgtcgaatatccatacagc

SEQ ID NO: 126406 - DNA, 25 bp, SARS Virus
acgtgcgtcgacaatccatacagct

SEQ ID NO: 126407 - DNA, 25 bp, SARS Virus
cgtgcgtcgactatccatacagctc

SEQ ID NO: 126408 - DNA, 25 bp, SARS Virus
gtgcgtcgactaaccatacagctca

SEQ ID NO: 126409 - DNA, 25 bp, SARS Virus
tgcgtcgactatacatacagctcat

SEQ ID NO: 126410 - DNA, 25 bp, SARS Virus
gcgtcgactatcaatacagctcatg

SEQ ID NO: 126411 - DNA, 25 bp, SARS Virus
cgtcgactatccatacagctcatgg

SEQ ID NO: 126412 - DNA, 25 bp, SARS Virus
gtcgactatccaaacagctcatggc

SEQ ID NO: 126413 - DNA, 25 bp, SARS Virus
tcgactatccatacagctcatggca

SEQ ID NO: 126414 - DNA, 25 bp, SARS Virus
cgactatccataaagctcatggcag

SEQ ID NO: 126415 - DNA, 25 bp, SARS Virus
gactatccatacagctcatggcagt

SEQ ID NO: 126416 - DNA, 25 bp, SARS Virus
actatccatacaactcatggcagtc

SEQ ID NO: 126417 - DNA, 25 bp, SARS Virus
ctatccatacagatcatggcagtcg

SEQ ID NO: 126418 - DNA, 25 bp, SARS Virus
tatccatacagcacatggcagtcgt

SEQ ID NO: 126419 - DNA, 25 bp, SARS Virus
atccatacagctaatggcagtcgtg

SEQ ID NO: 126420 - DNA, 25 bp, SARS Virus
tccatacagctcatggcagtcgtgt

SEQ ID NO: 126421 - DNA, 25 bp, SARS Virus
ccatacagctcaaggcagtcgtgtt

SEQ ID NO: 126422 - DNA, 25 bp, SARS Virus
catacagctcatagcagtcgtgttc

SEQ ID NO: 126423 - DNA, 25 bp, SARS Virus
atacagctcatgacagtcgtgttcg

SEQ ID NO: 126424 - DNA, 25 bp, SARS Virus
tacagctcatggaagtcgtgttcgt

SEQ ID NO: 126425 - DNA, 25 bp, SARS Virus
aaacttggtatcccacggtagatac

SEQ ID NO: 126426 - DNA, 25 bp, SARS Virus
aacttggtatcacacggtagatact

SEQ ID NO: 126427 - DNA, 25 bp, SARS Virus
acttggtatcacccggtagatactt

SEQ ID NO: 126428 - DNA, 25 bp, SARS Virus
cttggtatcacacggtagatacttt

SEQ ID NO: 126429 - DNA, 25 bp, SARS Virus
ttggtatcacaccgtagatactttt

SEQ ID NO: 126430 - DNA, 25 bp, SARS Virus
tggtatcacacgctagatacttttc

SEQ ID NO: 126431 - DNA, 25 bp, SARS Virus
ggtatcacacggcagatacttttcc

SEQ ID NO: 126432 - DNA, 25 bp, SARS Virus
gtatcacacggtcgatacttttcca

SEQ ID NO: 126433 - DNA, 25 bp, SARS Virus
tatcacacggtacatacttttccat

SEQ ID NO: 126434 - DNA, 25 bp, SARS Virus
atcacacggtagctacttttccatt

SEQ ID NO: 126435 - DNA, 25 bp, SARS Virus
tcacacggtagacacttttccattt

SEQ ID NO: 126436 - DNA, 25 bp, SARS Virus
cacacggtagatccttttccatttt

SEQ ID NO: 126437 - DNA, 25 bp, SARS Virus
acacggtagatacttttccattttg

SEQ ID NO: 126438 - DNA, 25 bp, SARS Virus
cacggtagatacctttccattttgg

SEQ ID NO: 126439 - DNA, 25 bp, SARS Virus
acggtagatactcttccattttgga

SEQ ID NO: 126440 - DNA, 25 bp, SARS Virus
cggtagatacttctccattttggaa

SEQ ID NO: 126441 - DNA, 25 bp, SARS Virus
ggtagatactttcccattttggaaa

SEQ ID NO: 126442 - DNA, 25 bp, SARS Virus
gtagatacttttccattttggaaag

SEQ ID NO: 126443 - DNA, 25 bp, SARS Virus
tagatacttttccattttggaaagg

SEQ ID NO: 126444 - DNA, 25 bp, SARS Virus
agatacttttcccttttggaaagga

SEQ ID NO: 126445 - DNA, 25 bp, SARS Virus
gatacttttccactttggaaaggat

SEQ ID NO: 126446 - DNA, 25 bp, SARS Virus
atacttttccatcttggaaaggatc

SEQ ID NO: 126447 - DNA, 25 bp, SARS Virus
tacttttccattctggaaaggatct

SEQ ID NO: 126448 - DNA, 25 bp, SARS Virus
acttttccatttcggaaaggatctc

SEQ ID NO: 126449 - DNA, 25 bp, SARS Virus
cttttccattttcgaaaggatctcg

SEQ ID NO: 126450 - DNA, 25 bp, SARS Virus
ttttccattttgcaaaggatctcgt

SEQ ID NO: 126451 - DNA, 25 bp, SARS Virus
tttccattttggcaaggatctcgtg

SEQ ID NO: 126452 - DNA, 25 bp, SARS Virus
ttccattttggacaggatctcgtgt

SEQ ID NO: 126453 - DNA, 25 bp, SARS Virus
tccattttggaacggatctcgtgtt

SEQ ID NO: 126454 - DNA, 25 bp, SARS Virus
ccattttggaaacgatctcgtgttt

SEQ ID NO: 126455 - DNA, 25 bp, SARS Virus
cattttggaaagcatctcgtgtttc

SEQ ID NO: 126456 - DNA, 25 bp, SARS Virus
attttggaaaggctctcgtgtttcg

SEQ ID NO: 126457 - DNA, 25 bp, SARS Virus
ttttggaaaggacctcgtgtttcgg

SEQ ID NO: 126458 - DNA, 25 bp, SARS Virus
tttggaaaggatctcgtgtttcggt

SEQ ID NO: 126459 - DNA, 25 bp, SARS Virus
ttggaaaggatcccgtgtttcggtt

SEQ ID NO: 126460 - DNA, 25 bp, SARS Virus
tggaaaggatctcgtgtttcggttc

SEQ ID NO: 126461 - DNA, 25 bp, SARS Virus
ggaaaggatctcctgtttcggttcg

SEQ ID NO: 126462 - DNA, 25 bp, SARS Virus
gaaaggatctcgcgtttcggttcgt

SEQ ID NO: 126463 - DNA, 25 bp, SARS Virus
aaaggatctcgtctttcggttcgtc

SEQ ID NO: 126464 - DNA, 25 bp, SARS Virus
aaggatctcgtgcttcggttcgtca

SEQ ID NO: 126465 - DNA, 25 bp, SARS Virus
aggatctcgtgtctcggttcgtcac

SEQ ID NO: 126466 - DNA, 25 bp, SARS Virus
ggatctcgtgttccggttcgtcacg

SEQ ID NO: 126467 - DNA, 25 bp, SARS Virus
gatctcgtgtttcggttcgtcacga

SEQ ID NO: 126468 - DNA, 25 bp, SARS Virus
atctcgtgtttccgttcgtcacgat

SEQ ID NO: 126469 - DNA, 25 bp, SARS Virus
tctcgtgtttcgcttcgtcacgata

SEQ ID NO: 126470 - DNA, 25 bp, SARS Virus
ctcgtgtttcggctcgtcacgatat

SEQ ID NO: 126471 - DNA, 25 bp, SARS Virus
tcgtgtttcggtccgtcacgatatt

SEQ ID NO: 126472 - DNA, 25 bp, SARS Virus
cgtgtttcggttcgtcacgatattc

SEQ ID NO: 126473 - DNA, 25 bp, SARS Virus
gtgtttcggttcctcacgatattca

SEQ ID NO: 126474 - DNA, 25 bp, SARS Virus
tgtttcggttcgccacgatattcat

SEQ ID NO: 126475 - DNA, 25 bp, SARS Virus
gtttcggttcgtcacgatattcata

SEQ ID NO: 126476 - DNA, 25 bp, SARS Virus
tttcggttcgtcccgatattcataa

SEQ ID NO: 126477 - DNA, 25 bp, SARS Virus
ttcggttcgtcacgatattcataat

SEQ ID NO: 126478 - DNA, 25 bp, SARS Virus
tcggttcgtcaccatattcataatg

SEQ ID NO: 126479 - DNA, 25 bp, SARS Virus
cggttcgtcacgctattcataatgg

SEQ ID NO: 126480 - DNA, 25 bp, SARS Virus
ggttcgtcacgacattcataatggg

SEQ ID NO: 126481 - DNA, 25 bp, SARS Virus
gttcgtcacgatcttcataatgggg

SEQ ID NO: 126482 - DNA, 25 bp, SARS Virus
ttcgtcacgatactcataatgggga

SEQ ID NO: 126483 - DNA, 25 bp, SARS Virus
tcgtcacgatatccataatggggat

SEQ ID NO: 126484 - DNA, 25 bp, SARS Virus
cgtcacgatattcataatggggatc

SEQ ID NO: 126485 - DNA, 25 bp, SARS Virus
gtcacgatattcctaatggggatca

SEQ ID NO: 126486 - DNA, 25 bp, SARS Virus
tcacgatattcacaatggggatcac

SEQ ID NO: 126487 - DNA, 25 bp, SARS Virus
cacgatattcatcatggggatcaca

SEQ ID NO: 126488 - DNA, 25 bp, SARS Virus
acgatattcatactggggatcacaa

SEQ ID NO: 126489 - DNA, 25 bp, SARS Virus
cgatattcataacggggatcacaac

SEQ ID NO: 126490 - DNA, 25 bp, SARS Virus
gatattcataatcgggatcacaaca

SEQ ID NO: 126491 - DNA, 25 bp, SARS Virus
atattcataatgcggatcacaacat

SEQ ID NO: 126492 - DNA, 25 bp, SARS Virus
tattcataatggcgatcacaacatg

SEQ ID NO: 126493 - DNA, 25 bp, SARS Virus
attcataatgggcatcacaacatgg

SEQ ID NO: 126494 - DNA, 25 bp, SARS Virus
ttcataatggggctcacaacatgga

SEQ ID NO: 126495 - DNA, 25 bp, SARS Virus
tcataatggggaccacaacatggaa

SEQ ID NO: 126496 - DNA, 25 bp, SARS Virus
cataatggggatcacaacatggaat

SEQ ID NO: 126497 - DNA, 25 bp, SARS Virus
ataatggggatcccaacatggaatg

SEQ ID NO: 126498 - DNA, 25 bp, SARS Virus
taatggggatcacaacatggaatgt

SEQ ID NO: 126499 - DNA, 25 bp, SARS Virus
aatggggatcaccacatggaatgtt

SEQ ID NO: 126500 - DNA, 25 bp, SARS Virus
atggggatcacaccatggaatgttc

SEQ ID NO: 126501 - DNA, 25 bp, SARS Virus
tggggatcacaacatggaatgttcc

SEQ ID NO: 126502 - DNA, 25 bp, SARS Virus
ggggatcacaacctggaatgttcct

SEQ ID NO: 126503 - DNA, 25 bp, SARS Virus
gggatcacaacacggaatgttccta

SEQ ID NO: 126504 - DNA, 25 bp, SARS Virus
ggatcacaacatcgaatgttcctag

SEQ ID NO: 126505 - DNA, 25 bp, SARS Virus
gatcacaacatgcaatgttcctaga

SEQ ID NO: 126506 - DNA, 25 bp, SARS Virus
atcacaacatggcatgttcctagaa

SEQ ID NO: 126507 - DNA, 25 bp, SARS Virus
tcacaacatggactgttcctagaag

SEQ ID NO: 126508 - DNA, 25 bp, SARS Virus
cacaacatggaacgttcctagaagt

SEQ ID NO: 126509 - DNA, 25 bp, SARS Virus
acaacatggaatcttcctagaagtt

SEQ ID NO: 126510 - DNA, 25 bp, SARS Virus
caacatggaatgctcctagaagttc

SEQ ID NO: 126511 - DNA, 25 bp, SARS Virus
aacatggaatgtccctagaagttcg

SEQ ID NO: 126512 - DNA, 25 bp, SARS Virus
acatggaatgttcctagaagttcgt

SEQ ID NO: 126513 - DNA, 25 bp, SARS Virus
catggaatgttcctagaagttcgtg

SEQ ID NO: 126514 - DNA, 25 bp, SARS Virus
atggaatgttcccagaagttcgtgt

SEQ ID NO: 126515 - DNA, 25 bp, SARS Virus
tggaatgttcctcgaagttcgtgta

SEQ ID NO: 126516 - DNA, 25 bp, SARS Virus
ggaatgttcctacaagttcgtgtac

SEQ ID NO: 126517 - DNA, 25 bp, SARS Virus
gaatgttcctagcagttcgtgtact

SEQ ID NO: 126518 - DNA, 25 bp, SARS Virus
aatgttcctagacgttcgtgtactc

SEQ ID NO: 126519 - DNA, 25 bp, SARS Virus
atgttcctagaacttcgtgtactcc

SEQ ID NO: 126520 - DNA, 25 bp, SARS Virus
tgttcctagaagctcgtgtactcca

SEQ ID NO: 126521 - DNA, 25 bp, SARS Virus
gttcctagaagtccgtgtactccaa

SEQ ID NO: 126522 - DNA, 25 bp, SARS Virus
ttcctagaagttcgtgtactccaaa

SEQ ID NO: 126523 - DNA, 25 bp, SARS Virus
tcctagaagttcctgtactccaaat

SEQ ID NO: 126524 - DNA, 25 bp, SARS Virus
cctagaagttcgcgtactccaaata

SEQ ID NO: 126525 - DNA, 25 bp, SARS Virus
ctagaagttcgtctactccaaataa

SEQ ID NO: 126526 - DNA, 25 bp, SARS Virus
tagaagttcgtgcactccaaataat

SEQ ID NO: 126527 - DNA, 25 bp, SARS Virus
agaagttcgtgtcctccaaataatc

SEQ ID NO: 126528 - DNA, 25 bp, SARS Virus
gaagttcgtgtactccaaataatct

SEQ ID NO: 126529 - DNA, 25 bp, SARS Virus
aagttcgtgtaccccaaataatcta

SEQ ID NO: 126530 - DNA, 25 bp, SARS Virus
agttcgtgtactccaaataatctac

SEQ ID NO: 126531 - DNA, 25 bp, SARS Virus
gttcgtgtactccaaataatctacg

SEQ ID NO: 126532 - DNA, 25 bp, SARS Virus
ttcgtgtactcccaataatctacgt

SEQ ID NO: 126533 - DNA, 25 bp, SARS Virus
tcgtgtactccacataatctacgtg

SEQ ID NO: 126534 - DNA, 25 bp, SARS Virus
cgtgtactccaactaatctacgtgt

SEQ ID NO: 126535 - DNA, 25 bp, SARS Virus
gtgtactccaaacaatctacgtgtc

SEQ ID NO: 126536 - DNA, 25 bp, SARS Virus
tgtactccaaatcatctacgtgtcg

SEQ ID NO: 126537 - DNA, 25 bp, SARS Virus
gtactccaaatactctacgtgtcgc

SEQ ID NO: 126538 - DNA, 25 bp, SARS Virus
tactccaaataacctacgtgtcgcg

SEQ ID NO: 126539 - DNA, 25 bp, SARS Virus
actccaaataatctacgtgtcgcga

SEQ ID NO: 126540 - DNA, 25 bp, SARS Virus
ctccaaataatccacgtgtcgcgac

SEQ ID NO: 126541 - DNA, 25 bp, SARS Virus
tccaaataatctccgtgtcgcgaca

SEQ ID NO: 126542 - DNA, 25 bp, SARS Virus
ccaaataatctacgtgtcgcgacat

SEQ ID NO: 126543 - DNA, 25 bp, SARS Virus
caaataatctacctgtcgcgacatg

SEQ ID NO: 126544 - DNA, 25 bp, SARS Virus
aaataatctacgcgtcgcgacatga

SEQ ID NO: 126545 - DNA, 25 bp, SARS Virus
aataatctacgtctcgcgacatgat

SEQ ID NO: 126546 - DNA, 25 bp, SARS Virus
ataatctacgtgccgcgacatgatg

SEQ ID NO: 126547 - DNA, 25 bp, SARS Virus
taatctacgtgtcgcgacatgatgt

SEQ ID NO: 126548 - DNA, 25 bp, SARS Virus
aatctacgtgtcccgacatgatgtc

SEQ ID NO: 126549 - DNA, 25 bp, SARS Virus
atctacgtgtcgcgacatgatgtca

SEQ ID NO: 126550 - DNA, 25 bp, SARS Virus
tctacgtgtcgccacatgatgtcac

SEQ ID NO: 126551 - DNA, 25 bp, SARS Virus
ctacgtgtcgcgccatgatgtcacg

SEQ ID NO: 126552 - DNA, 25 bp, SARS Virus
tacgtgtcgcgacatgatgtcacgt

SEQ ID NO: 126553 - DNA, 25 bp, SARS Virus
acgtgtcgcgacctgatgtcacgta

SEQ ID NO: 126554 - DNA, 25 bp, SARS Virus
cgtgtcgcgacacgatgtcacgtat

SEQ ID NO: 126555 - DNA, 25 bp, SARS Virus
gtgtcgcgacatcatgtcacgtata

SEQ ID NO: 126556 - DNA, 25 bp, SARS Virus
tgtcgcgacatgctgtcacgtatac

SEQ ID NO: 126557 - DNA, 25 bp, SARS Virus
gtcgcgacatgacgtcacgtatacg

SEQ ID NO: 126558 - DNA, 25 bp, SARS Virus
tcgcgacatgatctcacgtatacgt

SEQ ID NO: 126559 - DNA, 25 bp, SARS Virus
cgcgacatgatgccacgtatacgtt

SEQ ID NO: 126560 - DNA, 25 bp, SARS Virus
gcgacatgatgtcacgtatacgttg

SEQ ID NO: 126561 - DNA, 25 bp, SARS Virus
cgacatgatgtcccgtatacgttga

SEQ ID NO: 126562 - DNA, 25 bp, SARS Virus
gacatgatgtcacgtatacgttgac

SEQ ID NO: 126563 - DNA, 25 bp, SARS Virus
acatgatgtcacctatacgttgacg

SEQ ID NO: 126564 - DNA, 25 bp, SARS Virus
catgatgtcacgcatacgttgacgt

SEQ ID NO: 126565 - DNA, 25 bp, SARS Virus
atgatgtcacgtctacgttgacgta

SEQ ID NO: 126566 - DNA, 25 bp, SARS Virus
tgatgtcacgtacacgttgacgtat

SEQ ID NO: 126567 - DNA, 25 bp, SARS Virus
gatgtcacgtatccgttgacgtatc

SEQ ID NO: 126568 - DNA, 25 bp, SARS Virus
atgtcacgtatacgttgacgtatct

SEQ ID NO: 126569 - DNA, 25 bp, SARS Virus
tgtcacgtataccttgacgtatctc

SEQ ID NO: 126570 - DNA, 25 bp, SARS Virus
gtcacgtatacgctgacgtatctct

SEQ ID NO: 126571 - DNA, 25 bp, SARS Virus
tcacgtatacgtcgacgtatctctt

SEQ ID NO: 126572 - DNA, 25 bp, SARS Virus
cacgtatacgttcacgtatctcttt

SEQ ID NO: 126573 - DNA, 25 bp, SARS Virus
acgtatacgttgccgtatctcttta

SEQ ID NO: 126574 - DNA, 25 bp, SARS Virus
cgtatacgttgacgtatctctttat

SEQ ID NO: 126575 - DNA, 25 bp, SARS Virus
gtatacgttgacctatctctttatg

SEQ ID NO: 126576 - DNA, 25 bp, SARS Virus
tatacgttgacgcatctctttatgt

SEQ ID NO: 126577 - DNA, 25 bp, SARS Virus
atacgttgacgtctctctttatgtt

SEQ ID NO: 126578 - DNA, 25 bp, SARS Virus
tacgttgacgtacctctttatgttc

SEQ ID NO: 126579 - DNA, 25 bp, SARS Virus
acgttgacgtatctctttatgttca

SEQ ID NO: 126580 - DNA, 25 bp, SARS Virus
cgttgacgtatccctttatgttcag

SEQ ID NO: 126581 - DNA, 25 bp, SARS Virus
gttgacgtatctctttatgttcagt

SEQ ID NO: 126582 - DNA, 25 bp, SARS Virus
ttgacgtatctccttatgttcagtt

SEQ ID NO: 126583 - DNA, 25 bp, SARS Virus
tgacgtatctctctatgttcagttt

SEQ ID NO: 126584 - DNA, 25 bp, SARS Virus
gacgtatctcttcatgttcagtttt

SEQ ID NO: 126585 - DNA, 25 bp, SARS Virus
acgtatctctttctgttcagttttg

SEQ ID NO: 126586 - DNA, 25 bp, SARS Virus
cgtatctctttacgttcagttttgt

SEQ ID NO: 126587 - DNA, 25 bp, SARS Virus
gtatctctttatcttcagttttgtt

SEQ ID NO: 126588 - DNA, 25 bp, SARS Virus
tatctctttatgctcagttttgtta

SEQ ID NO: 126589 - DNA, 25 bp, SARS Virus
atctctttatgtccagttttgttac

SEQ ID NO: 126590 - DNA, 25 bp, SARS Virus
tctctttatgttcagttttgttact

SEQ ID NO: 126591 - DNA, 25 bp, SARS Virus
ctctttatgttccgttttgttactc

SEQ ID NO: 126592 - DNA, 25 bp, SARS Virus
tctttatgttcacttttgttactct

SEQ ID NO: 126593 - DNA, 25 bp, SARS Virus
ctttatgttcagctttgttactctt

SEQ ID NO: 126594 - DNA, 25 bp, SARS Virus
tttatgttcagtcttgttactcttc

SEQ ID NO: 126595 - DNA, 25 bp, SARS Virus
ttatgttcagttctgttactcttca

SEQ ID NO: 126596 - DNA, 25 bp, SARS Virus
tatgttcagtttcgttactcttcaa

SEQ ID NO: 126597 - DNA, 25 bp, SARS Virus
atgttcagttttcttactcttcaaa

SEQ ID NO: 126598 - DNA, 25 bp, SARS Virus
tgttcagttttgctactcttcaaag

SEQ ID NO: 126599 - DNA, 25 bp, SARS Virus
gttcagttttgtcactcttcaaagt

SEQ ID NO: 126600 - DNA, 25 bp, SARS Virus
ttcagttttgttcctcttcaaagta

SEQ ID NO: 126601 - DNA, 25 bp, SARS Virus
tcagttttgttactcttcaaagtac

SEQ ID NO: 126602 - DNA, 25 bp, SARS Virus
cagttttgttacccttcaaagtaca

SEQ ID NO: 126603 - DNA, 25 bp, SARS Virus
agttttgttactcttcaaagtacaa

SEQ ID NO: 126604 - DNA, 25 bp, SARS Virus
gttttgttactcctcaaagtacaag

SEQ ID NO: 126605 - DNA, 25 bp, SARS Virus
ttttgttactctccaaagtacaagc

SEQ ID NO: 126606 - DNA, 25 bp, SARS Virus
tttgttactcttcaaagtacaagca

SEQ ID NO: 126607 - DNA, 25 bp, SARS Virus
ttgttactcttccaagtacaagcaa

SEQ ID NO: 126608 - DNA, 25 bp, SARS Virus
tgttactcttcacagtacaagcaaa

SEQ ID NO: 126609 - DNA, 25 bp, SARS Virus
gttactcttcaacgtacaagcaaat

SEQ ID NO: 126610 - DNA, 25 bp, SARS Virus
ttactcttcaaactacaagcaaatc

SEQ ID NO: 126611 - DNA, 25 bp, SARS Virus
tactcttcaaagcacaagcaaatct

SEQ ID NO: 126612 - DNA, 25 bp, SARS Virus
actcttcaaagtccaagcaaatctg

SEQ ID NO: 126613 - DNA, 25 bp, SARS Virus
ctcttcaaagtacaagcaaatctga

SEQ ID NO: 126614 - DNA, 25 bp, SARS Virus
tcttcaaagtaccagcaaatctgaa

SEQ ID NO: 126615 - DNA, 25 bp, SARS Virus
cttcaaagtacacgcaaatctgaaa

SEQ ID NO: 126616 - DNA, 25 bp, SARS Virus
ttcaaagtacaaccaaatctgaaac

SEQ ID NO: 126617 - DNA, 25 bp, SARS Virus
tcaaagtacaagcaaatctgaaacc

SEQ ID NO: 126618 - DNA, 25 bp, SARS Virus
caaagtacaagccaatctgaaacca

SEQ ID NO: 126619 - DNA, 25 bp, SARS Virus
aaagtacaagcacatctgaaaccat

SEQ ID NO: 126620 - DNA, 25 bp, SARS Virus
aagtacaagcaactctgaaaccatg

SEQ ID NO: 126621 - DNA, 25 bp, SARS Virus
agtacaagcaaacctgaaaccatgt

SEQ ID NO: 126622 - DNA, 25 bp, SARS Virus
gtacaagcaaatctgaaaccatgtt

SEQ ID NO: 126623 - DNA, 25 bp, SARS Virus
tacaagcaaatccgaaaccatgttc

SEQ ID NO: 126624 - DNA, 25 bp, SARS Virus
acaagcaaatctcaaaccatgttcc

SEQ ID NO: 126625 - DNA, 25 bp, SARS Virus
caagcaaatctgcaaccatgttcca

SEQ ID NO: 126626 - DNA, 25 bp, SARS Virus
aagcaaatctgacaccatgttccaa

SEQ ID NO: 126627 - DNA, 25 bp, SARS Virus
agcaaatctgaacccatgttccaag

SEQ ID NO: 126628 - DNA, 25 bp, SARS Virus
gcaaatctgaaaccatgttccaaga

SEQ ID NO: 126629 - DNA, 25 bp, SARS Virus
caaatctgaaaccatgttccaagaa

SEQ ID NO: 126630 - DNA, 25 bp, SARS Virus
aaatctgaaaccctgttccaagaag

SEQ ID NO: 126631 - DNA, 25 bp, SARS Virus
aatctgaaaccacgttccaagaaga

SEQ ID NO: 126632 - DNA, 25 bp, SARS Virus
atctgaaaccatcttccaagaagat

SEQ ID NO: 126633 - DNA, 25 bp, SARS Virus
tctgaaaccatgctccaagaagatc

SEQ ID NO: 126634 - DNA, 25 bp, SARS Virus
ctgaaaccatgtcccaagaagatct

SEQ ID NO: 126635 - DNA, 25 bp, SARS Virus
tgaaaccatgttccaagaagatcta

SEQ ID NO: 126636 - DNA, 25 bp, SARS Virus
gaaaccatgttccaagaagatctag

SEQ ID NO: 126637 - DNA, 25 bp, SARS Virus
aaaccatgttcccagaagatctagg

SEQ ID NO: 126638 - DNA, 25 bp, SARS Virus
aaccatgttccacgaagatctagga

SEQ ID NO: 126639 - DNA, 25 bp, SARS Virus
accatgttccaacaagatctaggac

SEQ ID NO: 126640 - DNA, 25 bp, SARS Virus
ccatgttccaagcagatctaggacc

SEQ ID NO: 126641 - DNA, 25 bp, SARS Virus
catgttccaagacgatctaggacct

SEQ ID NO: 126642 - DNA, 25 bp, SARS Virus
atgttccaagaacatctaggaccta

SEQ ID NO: 126643 - DNA, 25 bp, SARS Virus
tgttccaagaagctctaggacctaa

SEQ ID NO: 126644 - DNA, 25 bp, SARS Virus
gttccaagaagacctaggacctaaa

SEQ ID NO: 126645 - DNA, 25 bp, SARS Virus
ttccaagaagatctaggacctaaag

SEQ ID NO: 126646 - DNA, 25 bp, SARS Virus
tccaagaagatccaggacctaaagc

SEQ ID NO: 126647 - DNA, 25 bp, SARS Virus
ccaagaagatctcggacctaaagct

SEQ ID NO: 126648 - DNA, 25 bp, SARS Virus
caagaagatctacgacctaaagctc

SEQ ID NO: 126649 - DNA, 25 bp, SARS Virus
aagaagatctagcacctaaagctca

SEQ ID NO: 126650 - DNA, 25 bp, SARS Virus
agaagatctaggccctaaagctcac

SEQ ID NO: 126651 - DNA, 25 bp, SARS Virus
gaagatctaggacctaaagctcact

SEQ ID NO: 126652 - DNA, 25 bp, SARS Virus
aagatctaggacctaaagctcactt

SEQ ID NO: 126653 - DNA, 25 bp, SARS Virus
agatctaggacccaaagctcacttt

SEQ ID NO: 126654 - DNA, 25 bp, SARS Virus
gatctaggacctcaagctcactttt

SEQ ID NO: 126655 - DNA, 25 bp, SARS Virus
atctaggacctacagctcacttttg

SEQ ID NO: 126656 - DNA, 25 bp, SARS Virus
tctaggacctaacgctcacttttgg

SEQ ID NO: 126657 - DNA, 25 bp, SARS Virus
ctaggacctaaacctcacttttggt

SEQ ID NO: 126658 - DNA, 25 bp, SARS Virus
taggacctaaagctcacttttggtt

SEQ ID NO: 126659 - DNA, 25 bp, SARS Virus
aggacctaaagcccacttttggttt

SEQ ID NO: 126660 - DNA, 25 bp, SARS Virus
ggacctaaagctcacttttggtttt

SEQ ID NO: 126661 - DNA, 25 bp, SARS Virus
gacctaaagctcccttttggtttta

SEQ ID NO: 126662 - DNA, 25 bp, SARS Virus
acctaaagctcacttttggttttat

SEQ ID NO: 126663 - DNA, 25 bp, SARS Virus
cctaaagctcacctttggttttata

SEQ ID NO: 126664 - DNA, 25 bp, SARS Virus
ctaaagctcactcttggttttatat

SEQ ID NO: 126665 - DNA, 25 bp, SARS Virus
taaagctcacttctggttttatatt

SEQ ID NO: 126666 - DNA, 25 bp, SARS Virus
aaagctcactttcggttttatatta

SEQ ID NO: 126667 - DNA, 25 bp, SARS Virus
aagctcacttttcgttttatattat

SEQ ID NO: 126668 - DNA, 25 bp, SARS Virus
agctcacttttgcttttatattatt

SEQ ID NO: 126669 - DNA, 25 bp, SARS Virus
gctcacttttggctttatattattc

SEQ ID NO: 126670 - DNA, 25 bp, SARS Virus
ctcacttttggtcttatattattcg

SEQ ID NO: 126671 - DNA, 25 bp, SARS Virus
tcacttttggttctatattattcgt

SEQ ID NO: 126672 - DNA, 25 bp, SARS Virus
cacttttggtttcatattattcgta

SEQ ID NO: 126673 - DNA, 25 bp, SARS Virus
acttttggttttctattattcgtaa

SEQ ID NO: 126674 - DNA, 25 bp, SARS Virus
cttttggttttacattattcgtaat

SEQ ID NO: 126675 - DNA, 25 bp, SARS Virus
ttttggttttatcttattcgtaata

SEQ ID NO: 126676 - DNA, 25 bp, SARS Virus
tttggttttatactattcgtaataa

SEQ ID NO: 126677 - DNA, 25 bp, SARS Virus
ttggttttatatcattcgtaataat

SEQ ID NO: 126678 - DNA, 25 bp, SARS Virus
tggttttatattcttcgtaataatt

SEQ ID NO: 126679 - DNA, 25 bp, SARS Virus
ggttttatattactcgtaataattt

SEQ ID NO: 126680 - DNA, 25 bp, SARS Virus
gttttatattatccgtaataatttt

SEQ ID NO: 126681 - DNA, 25 bp, SARS Virus
ttttatattattcgtaataattttg

SEQ ID NO: 126682 - DNA, 25 bp, SARS Virus
tttatattattcctaataattttgt

SEQ ID NO: 126683 - DNA, 25 bp, SARS Virus
ttatattattcgcaataattttgtt

SEQ ID NO: 126684 - DNA, 25 bp, SARS Virus
tatattattcgtcataattttgttc

SEQ ID NO: 126685 - DNA, 25 bp, SARS Virus
atattattcgtactaattttgttcc

SEQ ID NO: 126686 - DNA, 25 bp, SARS Virus
tattattcgtaacaattttgttcct

SEQ ID NO: 126687 - DNA, 25 bp, SARS Virus
attattcgtaatcattttgttcctt

SEQ ID NO: 126688 - DNA, 25 bp, SARS Virus
ttattcgtaatacttttgttcctta

SEQ ID NO: 126689 - DNA, 25 bp, SARS Virus
tattcgtaataactttgttccttat

SEQ ID NO: 126690 - DNA, 25 bp, SARS Virus
attcgtaataatcttgttccttatc

SEQ ID NO: 126691 - DNA, 25 bp, SARS Virus
ttcgtaataattctgttccttatcg

SEQ ID NO: 126692 - DNA, 25 bp, SARS Virus
tcgtaataatttcgttccttatcgt

SEQ ID NO: 126693 - DNA, 25 bp, SARS Virus
cgtaataattttcttccttatcgtc

SEQ ID NO: 126694 - DNA, 25 bp, SARS Virus
gtaataattttgctccttatcgtct

SEQ ID NO: 126695 - DNA, 25 bp, SARS Virus
taataattttgtcccttatcgtctt

SEQ ID NO: 126696 - DNA, 25 bp, SARS Virus
aataattttgttccttatcgtcttt

SEQ ID NO: 126697 - DNA, 25 bp, SARS Virus
ataattttgttccttatcgtctttc

SEQ ID NO: 126698 - DNA, 25 bp, SARS Virus
taattttgttccctatcgtctttcc

SEQ ID NO: 126699 - DNA, 25 bp, SARS Virus
aattttgttcctcatcgtctttccg

SEQ ID NO: 126700 - DNA, 25 bp, SARS Virus
attttgttccttctcgtctttccga

SEQ ID NO: 126701 - DNA, 25 bp, SARS Virus
ttttgttccttaccgtctttccgat

SEQ ID NO: 126702 - DNA, 25 bp, SARS Virus
tttgttccttatcgtctttccgatt

SEQ ID NO: 126703 - DNA, 25 bp, SARS Virus
ttgttccttatcctctttccgattt

SEQ ID NO: 126704 - DNA, 25 bp, SARS Virus
tgttccttatcgcctttccgatttt

SEQ ID NO: 126705 - DNA, 25 bp, SARS Virus
gttccttatcgtctttccgattttt

SEQ ID NO: 126706 - DNA, 25 bp, SARS Virus
ttccttatcgtccttccgatttttc

SEQ ID NO: 126707 - DNA, 25 bp, SARS Virus
tccttatcgtctctccgatttttcg

SEQ ID NO: 126708 - DNA, 25 bp, SARS Virus
ccttatcgtcttcccgatttttcgt

SEQ ID NO: 126709 - DNA, 25 bp, SARS Virus
cttatcgtctttccgatttttcgtg

SEQ ID NO: 126710 - DNA, 25 bp, SARS Virus
ttatcgtctttccgatttttcgtgt

SEQ ID NO: 126711 - DNA, 25 bp, SARS Virus
tatcgtctttcccatttttcgtgtt

SEQ ID NO: 126712 - DNA, 25 bp, SARS Virus
atcgtctttccgctttttcgtgttt

SEQ ID NO: 126713 - DNA, 25 bp, SARS Virus
tcgtctttccgacttttcgtgttta

SEQ ID NO: 126714 - DNA, 25 bp, SARS Virus
cgtctttccgatctttcgtgtttat

SEQ ID NO: 126715 - DNA, 25 bp, SARS Virus
gtctttccgattcttcgtgtttatc

SEQ ID NO: 126716 - DNA, 25 bp, SARS Virus
tctttccgatttctcgtgtttatct

SEQ ID NO: 126717 - DNA, 25 bp, SARS Virus
ctttccgattttccgtgtttatctt

SEQ ID NO: 126718 - DNA, 25 bp, SARS Virus
tttccgatttttcgtgtttatcttc

SEQ ID NO: 126719 - DNA, 25 bp, SARS Virus
ttccgatttttcctgtttatcttca

SEQ ID NO: 126720 - DNA, 25 bp, SARS Virus
tccgatttttcgcgtttatcttcag

SEQ ID NO: 126721 - DNA, 25 bp, SARS Virus
ccgatttttcgtctttatcttcagt

SEQ ID NO: 126722 - DNA, 25 bp, SARS Virus
cgatttttcgtgcttatcttcagtt

SEQ ID NO: 126723 - DNA, 25 bp, SARS Virus
gatttttcgtgtctatcttcagtta

SEQ ID NO: 126724 - DNA, 25 bp, SARS Virus
atttttcgtgttcatcttcagttaa

SEQ ID NO: 126725 - DNA, 25 bp, SARS Virus
tttttcgtgtttctcttcagttaat

SEQ ID NO: 126726 - DNA, 25 bp, SARS Virus
ttttcgtgtttaccttcagttaatt

SEQ ID NO: 126727 - DNA, 25 bp, SARS Virus
tttcgtgtttatcttcagttaattt

SEQ ID NO: 126728 - DNA, 25 bp, SARS Virus
ttcgtgtttatcctcagttaatttc

SEQ ID NO: 126729 - DNA, 25 bp, SARS Virus
tcgtgtttatctccagttaatttca

SEQ ID NO: 126730 - DNA, 25 bp, SARS Virus
cgtgtttatcttcagttaatttcac

SEQ ID NO: 126731 - DNA, 25 bp, SARS Virus
gtgtttatcttccgttaatttcact

SEQ ID NO: 126732 - DNA, 25 bp, SARS Virus
tgtttatcttcacttaatttcactc

SEQ ID NO: 126733 - DNA, 25 bp, SARS Virus
gtttatcttcagctaatttcactcg

SEQ ID NO: 126734 - DNA, 25 bp, SARS Virus
tttatcttcagtcaatttcactcga

SEQ ID NO: 126735 - DNA, 25 bp, SARS Virus
ttatcttcagttcatttcactcgag

SEQ ID NO: 126736 - DNA, 25 bp, SARS Virus
tatcttcagttactttcactcgagt

SEQ ID NO: 126737 - DNA, 25 bp, SARS Virus
atcttcagttaacttcactcgagta

SEQ ID NO: 126738 - DNA, 25 bp, SARS Virus
tcttcagttaatctcactcgagtaa

SEQ ID NO: 126739 - DNA, 25 bp, SARS Virus
cttcagttaattccactcgagtaag

SEQ ID NO: 126740 - DNA, 25 bp, SARS Virus
ttcagttaatttcactcgagtaagt

SEQ ID NO: 126741 - DNA, 25 bp, SARS Virus
tcagttaatttccctcgagtaagta

SEQ ID NO: 126742 - DNA, 25 bp, SARS Virus
cagttaatttcactcgagtaagtaa

SEQ ID NO: 126743 - DNA, 25 bp, SARS Virus
agttaatttcacccgagtaagtaag

SEQ ID NO: 126744 - DNA, 25 bp, SARS Virus
gttaatttcactcgagtaagtaaga

SEQ ID NO: 126745 - DNA, 25 bp, SARS Virus
ttaatttcactccagtaagtaagac

SEQ ID NO: 126746 - DNA, 25 bp, SARS Virus
taatttcactcgcgtaagtaagaca

SEQ ID NO: 126747 - DNA, 25 bp, SARS Virus
aatttcactcgactaagtaagacag

SEQ ID NO: 126748 - DNA, 25 bp, SARS Virus
atttcactcgagcaagtaagacaga

SEQ ID NO: 126749 - DNA, 25 bp, SARS Virus
tttcactcgagtcagtaagacagaa

SEQ ID NO: 126750 - DNA, 25 bp, SARS Virus
ttcactcgagtacgtaagacagaaa

SEQ ID NO: 126751 - DNA, 25 bp, SARS Virus
tcactcgagtaactaagacagaaag

SEQ ID NO: 126752 - DNA, 25 bp, SARS Virus
cactcgagtaagcaagacagaaaga

SEQ ID NO: 126753 - DNA, 25 bp, SARS Virus
actcgagtaagtcagacagaaagag

SEQ ID NO: 126754 - DNA, 25 bp, SARS Virus
ctcgagtaagtacgacagaaagaga

SEQ ID NO: 126755 - DNA, 25 bp, SARS Virus
tcgagtaagtaacacagaaagagaa

SEQ ID NO: 126756 - DNA, 25 bp, SARS Virus
cgagtaagtaagccagaaagagaat

SEQ ID NO: 126757 - DNA, 25 bp, SARS Virus
gagtaagtaagacagaaagagaatt

SEQ ID NO: 126758 - DNA, 25 bp, SARS Virus
agtaagtaagaccgaaagagaatta

SEQ ID NO: 126759 - DNA, 25 bp, SARS Virus
gtaagtaagacacaaagagaattac

SEQ ID NO: 126760 - DNA, 25 bp, SARS Virus
taagtaagacagcaagagaattacc

SEQ ID NO: 126761 - DNA, 25 bp, SARS Virus
aagtaagacagacagagaattacca

SEQ ID NO: 126762 - DNA, 25 bp, SARS Virus
agtaagacagaacgagaattaccac

SEQ ID NO: 126763 - DNA, 25 bp, SARS Virus
gtaagacagaaacagaattaccact

SEQ ID NO: 126764 - DNA, 25 bp, SARS Virus
taagacagaaagcgaattaccactt

SEQ ID NO: 126765 - DNA, 25 bp, SARS Virus
aagacagaaagacaattaccacttc

SEQ ID NO: 126766 - DNA, 25 bp, SARS Virus
agacagaaagagcattaccacttcg

SEQ ID NO: 126767 - DNA, 25 bp, SARS Virus
gacagaaagagacttaccacttcgt

SEQ ID NO: 126768 - DNA, 25 bp, SARS Virus
acagaaagagaactaccacttcgtt

SEQ ID NO: 126769 - DNA, 25 bp, SARS Virus
cagaaagagaatcaccacttcgttt

SEQ ID NO: 126770 - DNA, 25 bp, SARS Virus
agaaagagaattcccacttcgtttc

SEQ ID NO: 126771 - DNA, 25 bp, SARS Virus
gaaagagaattaccacttcgtttca

SEQ ID NO: 126772 - DNA, 25 bp, SARS Virus
aaagagaattaccacttcgtttcat

SEQ ID NO: 126773 - DNA, 25 bp, SARS Virus
aagagaattaccccttcgtttcata

SEQ ID NO: 126774 - DNA, 25 bp, SARS Virus
agagaattaccacttcgtttcataa

SEQ ID NO: 126775 - DNA, 25 bp, SARS Virus
gagaattaccacctcgtttcataat

SEQ ID NO: 126776 - DNA, 25 bp, SARS Virus
agaattaccactccgtttcataatt

SEQ ID NO: 126777 - DNA, 25 bp, SARS Virus
gaattaccacttcgtttcataattt

SEQ ID NO: 126778 - DNA, 25 bp, SARS Virus
aattaccacttcctttcataatttt

SEQ ID NO: 126779 - DNA, 25 bp, SARS Virus
attaccacttcgcttcataattttt

SEQ ID NO: 126780 - DNA, 25 bp, SARS Virus
ttaccacttcgtctcataattttta

SEQ ID NO: 126781 - DNA, 25 bp, SARS Virus
taccacttcgttccataatttttat

SEQ ID NO: 126782 - DNA, 25 bp, SARS Virus
accacttcgtttcataatttttatg

SEQ ID NO: 126783 - DNA, 25 bp, SARS Virus
ccacttcgtttcctaatttttatga

SEQ ID NO: 126784 - DNA, 25 bp, SARS Virus
cacttcgtttcacaatttttatgat

SEQ ID NO: 126785 - DNA, 25 bp, SARS Virus
acttcgtttcatcatttttatgatc

SEQ ID NO: 126786 - DNA, 25 bp, SARS Virus
cttcgtttcatactttttatgatct

SEQ ID NO: 126787 - DNA, 25 bp, SARS Virus
ttcgtttcataacttttatgatctc

SEQ ID NO: 126788 - DNA, 25 bp, SARS Virus
tcgtttcataatctttatgatctcg

SEQ ID NO: 126789 - DNA, 25 bp, SARS Virus
cgtttcataattcttatgatctcgt

SEQ ID NO: 126790 - DNA, 25 bp, SARS Virus
gtttcataatttctatgatctcgtc

SEQ ID NO: 126791 - DNA, 25 bp, SARS Virus
tttcataattttcatgatctcgtcg

SEQ ID NO: 126792 - DNA, 25 bp, SARS Virus
ttcataatttttctgatctcgtcgt

SEQ ID NO: 126793 - DNA, 25 bp, SARS Virus
tcataatttttacgatctcgtcgtt

SEQ ID NO: 126794 - DNA, 25 bp, SARS Virus
cataatttttatcatctcgtcgttg

SEQ ID NO: 126795 - DNA, 25 bp, SARS Virus
ataatttttatgctctcgtcgttgt

SEQ ID NO: 126796 - DNA, 25 bp, SARS Virus
taatttttatgacctcgtcgttgtt

SEQ ID NO: 126797 - DNA, 25 bp, SARS Virus
aatttttatgatctcgtcgttgtta

SEQ ID NO: 126798 - DNA, 25 bp, SARS Virus
atttttatgatcccgtcgttgttac

SEQ ID NO: 126799 - DNA, 25 bp, SARS Virus
tttttatgatctcgtcgttgttact

SEQ ID NO: 126800 - DNA, 25 bp, SARS Virus
ttttatgatctcctcgttgttactc

SEQ ID NO: 126801 - DNA, 25 bp, SARS Virus
tttatgatctcgccgttgttactct

SEQ ID NO: 126802 - DNA, 25 bp, SARS Virus
ttatgatctcgtcgttgttactctt

SEQ ID NO: 126803 - DNA, 25 bp, SARS Virus
tatgatctcgtccttgttactcttt

SEQ ID NO: 126804 - DNA, 25 bp, SARS Virus
atgatctcgtcgctgttactctttt

SEQ ID NO: 126805 - DNA, 25 bp, SARS Virus
tgatctcgtcgtcgttactcttttt

SEQ ID NO: 126806 - DNA, 25 bp, SARS Virus
gatctcgtcgttcttactctttttc

SEQ ID NO: 126807 - DNA, 25 bp, SARS Virus
atctcgtcgttgctactctttttca

SEQ ID NO: 126808 - DNA, 25 bp, SARS Virus
tctcgtcgttgtcactctttttcac

SEQ ID NO: 126809 - DNA, 25 bp, SARS Virus
ctcgtcgttgttcctctttttcacc

SEQ ID NO: 126810 - DNA, 25 bp, SARS Virus
tcgtcgttgttactctttttcaccg

SEQ ID NO: 126811 - DNA, 25 bp, SARS Virus
cgtcgttgttaccctttttcaccgc

SEQ ID NO: 126812 - DNA, 25 bp, SARS Virus
gtcgttgttactctttttcaccgct

SEQ ID NO: 126813 - DNA, 25 bp, SARS Virus
tcgttgttactccttttcaccgctc

SEQ ID NO: 126814 - DNA, 25 bp, SARS Virus
cgttgttactctctttcaccgctca

SEQ ID NO: 126815 - DNA, 25 bp, SARS Virus
gttgttactcttcttcaccgctcat

SEQ ID NO: 126816 - DNA, 25 bp, SARS Virus
ttgttactctttctcaccgctcatc

SEQ ID NO: 126817 - DNA, 25 bp, SARS Virus
tgttactcttttccaccgctcatct

SEQ ID NO: 126818 - DNA, 25 bp, SARS Virus
gttactctttttcaccgctcatctc

SEQ ID NO: 126819 - DNA, 25 bp, SARS Virus
ttactctttttccccgctcatctcg

SEQ ID NO: 126820 - DNA, 25 bp, SARS Virus
tactctttttcaccgctcatctcga

SEQ ID NO: 126821 - DNA, 25 bp, SARS Virus
actctttttcaccgctcatctcgag

SEQ ID NO: 126822 - DNA, 25 bp, SARS Virus
ctctttttcacccctcatctcgaga

SEQ ID NO: 126823 - DNA, 25 bp, SARS Virus
tctttttcaccgctcatctcgagaa

SEQ ID NO: 126824 - DNA, 25 bp, SARS Virus
ctttttcaccgcccatctcgagaac

SEQ ID NO: 126825 - DNA, 25 bp, SARS Virus
tttttcaccgctcatctcgagaaca

SEQ ID NO: 126826 - DNA, 25 bp, SARS Virus
ttttcaccgctcctctcgagaacaa

SEQ ID NO: 126827 - DNA, 25 bp, SARS Virus
tttcaccgctcacctcgagaacaac

SEQ ID NO: 126828 - DNA, 25 bp, SARS Virus
ttcaccgctcatctcgagaacaact

SEQ ID NO: 126829 - DNA, 25 bp, SARS Virus
tcaccgctcatcccgagaacaactt

SEQ ID NO: 126830 - DNA, 25 bp, SARS Virus
caccgctcatctcgagaacaacttg

SEQ ID NO: 126831 - DNA, 25 bp, SARS Virus
accgctcatctccagaacaacttgg

SEQ ID NO: 126832 - DNA, 25 bp, SARS Virus
ccgctcatctcgcgaacaacttgga

SEQ ID NO: 126833 - DNA, 25 bp, SARS Virus
cgctcatctcgacaacaacttggag

SEQ ID NO: 126834 - DNA, 25 bp, SARS Virus
gctcatctcgagcacaacttggagg

SEQ ID NO: 126835 - DNA, 25 bp, SARS Virus
ctcatctcgagaccaacttggagga

SEQ ID NO: 126836 - DNA, 25 bp, SARS Virus
tcatctcgagaacaacttggaggag

SEQ ID NO: 126837 - DNA, 25 bp, SARS Virus
catctcgagaaccacttggaggaga

SEQ ID NO: 126838 - DNA, 25 bp, SARS Virus
atctcgagaacaccttggaggagaa

SEQ ID NO: 126839 - DNA, 25 bp, SARS Virus
tctcgagaacaacttggaggagaac

SEQ ID NO: 126840 - DNA, 25 bp, SARS Virus
ctcgagaacaacctggaggagaaca

SEQ ID NO: 126841 - DNA, 25 bp, SARS Virus
tcgagaacaactcggaggagaacag

SEQ ID NO: 126842 - DNA, 25 bp, SARS Virus
cgagaacaacttcgaggagaacaga

SEQ ID NO: 126843 - DNA, 25 bp, SARS Virus
gagaacaacttgcaggagaacagac

SEQ ID NO: 126844 - DNA, 25 bp, SARS Virus
agaacaacttggcggagaacagact

SEQ ID NO: 126845 - DNA, 25 bp, SARS Virus
gaacaacttggacgagaacagacta

SEQ ID NO: 126846 - DNA, 25 bp, SARS Virus
aacaacttggagcagaacagactac

SEQ ID NO: 126847 - DNA, 25 bp, SARS Virus
acaacttggaggcgaacagactact

SEQ ID NO: 126848 - DNA, 25 bp, SARS Virus
caacttggaggacaacagactactt

SEQ ID NO: 126849 - DNA, 25 bp, SARS Virus
aacttggaggagcacagactacttt

SEQ ID NO: 126850 - DNA, 25 bp, SARS Virus
acttggaggagaccagactactttt

SEQ ID NO: 126851 - DNA, 25 bp, SARS Virus
cttggaggagaacagactacttttc

SEQ ID NO: 126852 - DNA, 25 bp, SARS Virus
ttggaggagaaccgactacttttca

SEQ ID NO: 126853 - DNA, 25 bp, SARS Virus
tggaggagaacacactacttttcaa

SEQ ID NO: 126854 - DNA, 25 bp, SARS Virus
ggaggagaacagcctacttttcaaa

SEQ ID NO: 126855 - DNA, 25 bp, SARS Virus
gaggagaacagactacttttcaaaa

SEQ ID NO: 126856 - DNA, 25 bp, SARS Virus
aggagaacagaccacttttcaaaac

SEQ ID NO: 126857 - DNA, 25 bp, SARS Virus
ggagaacagactccttttcaaaacc

SEQ ID NO: 126858 - DNA, 25 bp, SARS Virus
gagaacagactacttttcaaaacca

SEQ ID NO: 126859 - DNA, 25 bp, SARS Virus
agaacagactacctttcaaaaccac

SEQ ID NO: 126860 - DNA, 25 bp, SARS Virus
gaacagactactcttcaaaaccact

SEQ ID NO: 126861 - DNA, 25 bp, SARS Virus
aacagactacttctcaaaaccactt

SEQ ID NO: 126862 - DNA, 25 bp, SARS Virus
acagactactttccaaaaccacttt

SEQ ID NO: 126863 - DNA, 25 bp, SARS Virus
cagactacttttcaaaaccactttg

SEQ ID NO: 126864 - DNA, 25 bp, SARS Virus
agactacttttccaaaccactttga

SEQ ID NO: 126865 - DNA, 25 bp, SARS Virus
gactacttttcacaaccactttgac

SEQ ID NO: 126866 - DNA, 25 bp, SARS Virus
actacttttcaacaccactttgact

SEQ ID NO: 126867 - DNA, 25 bp, SARS Virus
ctacttttcaaacccactttgacta

SEQ ID NO: 126868 - DNA, 25 bp, SARS Virus
tacttttcaaaaccactttgactag

SEQ ID NO: 126869 - DNA, 25 bp, SARS Virus
acttttcaaaaccactttgactaga

SEQ ID NO: 126870 - DNA, 25 bp, SARS Virus
cttttcaaaacccctttgactagaa

SEQ ID NO: 126871 - DNA, 25 bp, SARS Virus
ttttcaaaaccactttgactagaac

SEQ ID NO: 126872 - DNA, 25 bp, SARS Virus
tttcaaaaccaccttgactagaacg

SEQ ID NO: 126873 - DNA, 25 bp, SARS Virus
ttcaaaaccactctgactagaacgt

SEQ ID NO: 126874 - DNA, 25 bp, SARS Virus
tcaaaaccacttcgactagaacgtg

SEQ ID NO: 126875 - DNA, 25 bp, SARS Virus
caaaaccactttcactagaacgtgc

SEQ ID NO: 126876 - DNA, 25 bp, SARS Virus
aaaaccactttgcctagaacgtgcg

SEQ ID NO: 126877 - DNA, 25 bp, SARS Virus
aaaccactttgactagaacgtgcgt

SEQ ID NO: 126878 - DNA, 25 bp, SARS Virus
aaccactttgaccagaacgtgcgtc

SEQ ID NO: 126879 - DNA, 25 bp, SARS Virus
accactttgactcgaacgtgcgtcg

SEQ ID NO: 126880 - DNA, 25 bp, SARS Virus
ccactttgactacaacgtgcgtcga

SEQ ID NO: 126881 - DNA, 25 bp, SARS Virus
cactttgactagcacgtgcgtcgac

SEQ ID NO: 126882 - DNA, 25 bp, SARS Virus
actttgactagaccgtgcgtcgact

SEQ ID NO: 126883 - DNA, 25 bp, SARS Virus
ctttgactagaacgtgcgtcgacta

SEQ ID NO: 126884 - DNA, 25 bp, SARS Virus
tttgactagaacctgcgtcgactat

SEQ ID NO: 126885 - DNA, 25 bp, SARS Virus
ttgactagaacgcgcgtcgactatc

SEQ ID NO: 126886 - DNA, 25 bp, SARS Virus
tgactagaacgtccgtcgactatcc

SEQ ID NO: 126887 - DNA, 25 bp, SARS Virus
gactagaacgtgcgtcgactatcca

SEQ ID NO: 126888 - DNA, 25 bp, SARS Virus
actagaacgtgcctcgactatccat

SEQ ID NO: 126889 - DNA, 25 bp, SARS Virus
ctagaacgtgcgccgactatccata

SEQ ID NO: 126890 - DNA, 25 bp, SARS Virus
tagaacgtgcgtcgactatccatac

SEQ ID NO: 126891 - DNA, 25 bp, SARS Virus
agaacgtgcgtccactatccataca

SEQ ID NO: 126892 - DNA, 25 bp, SARS Virus
gaacgtgcgtcgcctatccatacag

SEQ ID NO: 126893 - DNA, 25 bp, SARS Virus
aacgtgcgtcgactatccatacagc

SEQ ID NO: 126894 - DNA, 25 bp, SARS Virus
acgtgcgtcgaccatccatacagct

SEQ ID NO: 126895 - DNA, 25 bp, SARS Virus
cgtgcgtcgactctccatacagctc

SEQ ID NO: 126896 - DNA, 25 bp, SARS Virus
gtgcgtcgactacccatacagctca

SEQ ID NO: 126897 - DNA, 25 bp, SARS Virus
tgcgtcgactatccatacagctcat

SEQ ID NO: 126898 - DNA, 25 bp, SARS Virus
gcgtcgactatccatacagctcatg

SEQ ID NO: 126899 - DNA, 25 bp, SARS Virus
cgtcgactatccctacagctcatgg

SEQ ID NO: 126900 - DNA, 25 bp, SARS Virus
gtcgactatccacacagctcatggc

SEQ ID NO: 126901 - DNA, 25 bp, SARS Virus
tcgactatccatccagctcatggca

SEQ ID NO: 126902 - DNA, 25 bp, SARS Virus
cgactatccatacagctcatggcag

SEQ ID NO: 126903 - DNA, 25 bp, SARS Virus
gactatccataccgctcatggcagt

SEQ ID NO: 126904 - DNA, 25 bp, SARS Virus
actatccatacacctcatggcagtc

SEQ ID NO: 126905 - DNA, 25 bp, SARS Virus
ctatccatacagctcatggcagtcg

SEQ ID NO: 126906 - DNA, 25 bp, SARS Virus
tatccatacagcccatggcagtcgt

SEQ ID NO: 126907 - DNA, 25 bp, SARS Virus
atccatacagctcatggcagtcgtg

SEQ ID NO: 126908 - DNA, 25 bp, SARS Virus
tccatacagctcctggcagtcgtgt

SEQ ID NO: 126909 - DNA, 25 bp, SARS Virus
ccatacagctcacggcagtcgtgtt

SEQ ID NO: 126910 - DNA, 25 bp, SARS Virus
catacagctcatcgcagtcgtgttc

SEQ ID NO: 126911 - DNA, 25 bp, SARS Virus
atacagctcatgccagtcgtgttcg

SEQ ID NO: 126912 - DNA, 25 bp, SARS Virus
tacagctcatggcagtcgtgttcgt

SEQ ID NO: 126913 - DNA, 25 bp, SARS Virus
aaacttggtatcgcacggtagatac

SEQ ID NO: 126914 - DNA, 25 bp, SARS Virus
aacttggtatcagacggtagatact

SEQ ID NO: 126915 - DNA, 25 bp, SARS Virus
acttggtatcacgcggtagatactt

SEQ ID NO: 126916 - DNA, 25 bp, SARS Virus
cttggtatcacagggtagatacttt

SEQ ID NO: 126917 - DNA, 25 bp, SARS Virus
ttggtatcacacggtagatactttt

SEQ ID NO: 126918 - DNA, 25 bp, SARS Virus
tggtatcacacggtagatacttttc

SEQ ID NO: 126919 - DNA, 25 bp, SARS Virus
ggtatcacacgggagatacttttcc

SEQ ID NO: 126920 - DNA, 25 bp, SARS Virus
gtatcacacggtggatacttttcca

SEQ ID NO: 126921 - DNA, 25 bp, SARS Virus
tatcacacggtagatacttttccat

SEQ ID NO: 126922 - DNA, 25 bp, SARS Virus
atcacacggtaggtacttttccatt

SEQ ID NO: 126923 - DNA, 25 bp, SARS Virus
tcacacggtagagacttttccattt

SEQ ID NO: 126924 - DNA, 25 bp, SARS Virus
cacacggtagatgcttttccatttt

SEQ ID NO: 126925 - DNA, 25 bp, SARS Virus
acacggtagatagttttccattttg

SEQ ID NO: 126926 - DNA, 25 bp, SARS Virus
cacggtagatacgtttccattttgg

SEQ ID NO: 126927 - DNA, 25 bp, SARS Virus
acggtagatactgttccattttgga

SEQ ID NO: 126928 - DNA, 25 bp, SARS Virus
cggtagatacttgtccattttggaa

SEQ ID NO: 126929 - DNA, 25 bp, SARS Virus
ggtagatactttgccattttggaaa

SEQ ID NO: 126930 - DNA, 25 bp, SARS Virus
gtagatacttttgcattttggaaag

SEQ ID NO: 126931 - DNA, 25 bp, SARS Virus
tagatacttttcgattttggaaagg

SEQ ID NO: 126932 - DNA, 25 bp, SARS Virus
agatacttttccgttttggaaagga

SEQ ID NO: 126933 - DNA, 25 bp, SARS Virus
gatacttttccagtttggaaaggat

SEQ ID NO: 126934 - DNA, 25 bp, SARS Virus
atacttttccatgttggaaaggatc

SEQ ID NO: 126935 - DNA, 25 bp, SARS Virus
tacttttccattgtggaaaggatct

SEQ ID NO: 126936 - DNA, 25 bp, SARS Virus
acttttccatttgggaaaggatctc

SEQ ID NO: 126937 - DNA, 25 bp, SARS Virus
cttttccattttggaaaggatctcg

SEQ ID NO: 126938 - DNA, 25 bp, SARS Virus
ttttccattttggaaaggatctcgt

SEQ ID NO: 126939 - DNA, 25 bp, SARS Virus
tttccattttgggaaggatctcgtg

SEQ ID NO: 126940 - DNA, 25 bp, SARS Virus
ttccattttggagaggatctcgtgt

SEQ ID NO: 126941 - DNA, 25 bp, SARS Virus
tccattttggaagggatctcgtgtt

SEQ ID NO: 126942 - DNA, 25 bp, SARS Virus
ccattttggaaaggatctcgtgttt

SEQ ID NO: 126943 - DNA, 25 bp, SARS Virus
cattttggaaaggatctcgtgtttc

SEQ ID NO: 126944 - DNA, 25 bp, SARS Virus
attttggaaagggtctcgtgtttcg

SEQ ID NO: 126945 - DNA, 25 bp, SARS Virus
ttttggaaaggagctcgtgtttcgg

SEQ ID NO: 126946 - DNA, 25 bp, SARS Virus
tttggaaaggatgtcgtgtttcggt

SEQ ID NO: 126947 - DNA, 25 bp, SARS Virus
ttggaaaggatcgcgtgtttcggtt

SEQ ID NO: 126948 - DNA, 25 bp, SARS Virus
tggaaaggatctggtgtttcggttc

SEQ ID NO: 126949 - DNA, 25 bp, SARS Virus
ggaaaggatctcgtgtttcggttcg

SEQ ID NO: 126950 - DNA, 25 bp, SARS Virus
gaaaggatctcgggtttcggttcgt

SEQ ID NO: 126951 - DNA, 25 bp, SARS Virus
aaaggatctcgtgtttcggttcgtc

SEQ ID NO: 126952 - DNA, 25 bp, SARS Virus
aaggatctcgtggttcggttcgtca

SEQ ID NO: 126953 - DNA, 25 bp, SARS Virus
aggatctcgtgtgtcggttcgtcac

SEQ ID NO: 126954 - DNA, 25 bp, SARS Virus
ggatctcgtgttgcggttcgtcacg

SEQ ID NO: 126955 - DNA, 25 bp, SARS Virus
gatctcgtgtttgggttcgtcacga

SEQ ID NO: 126956 - DNA, 25 bp, SARS Virus
atctcgtgtttcggttcgtcacgat

SEQ ID NO: 126957 - DNA, 25 bp, SARS Virus
tctcgtgtttcggttcgtcacgata

SEQ ID NO: 126958 - DNA, 25 bp, SARS Virus
ctcgtgtttcgggtcgtcacgatat

SEQ ID NO: 126959 - DNA, 25 bp, SARS Virus
tcgtgtttcggtgcgtcacgatatt

SEQ ID NO: 126960 - DNA, 25 bp, SARS Virus
cgtgtttcggttggtcacgatattc

SEQ ID NO: 126961 - DNA, 25 bp, SARS Virus
gtgtttcggttcgtcacgatattca

SEQ ID NO: 126962 - DNA, 25 bp, SARS Virus
tgtttcggttcggcacgatattcat

SEQ ID NO: 126963 - DNA, 25 bp, SARS Virus
gtttcggttcgtgacgatattcata

SEQ ID NO: 126964 - DNA, 25 bp, SARS Virus
tttcggttcgtcgcgatattcataa

SEQ ID NO: 126965 - DNA, 25 bp, SARS Virus
ttcggttcgtcaggatattcataat

SEQ ID NO: 126966 - DNA, 25 bp, SARS Virus
tcggttcgtcacgatattcataatg

SEQ ID NO: 126967 - DNA, 25 bp, SARS Virus
cggttcgtcacggtattcataatgg

SEQ ID NO: 126968 - DNA, 25 bp, SARS Virus
ggttcgtcacgagattcataatggg

SEQ ID NO: 126969 - DNA, 25 bp, SARS Virus
gttcgtcacgatgttcataatgggg

SEQ ID NO: 126970 - DNA, 25 bp, SARS Virus
ttcgtcacgatagtcataatgggga

SEQ ID NO: 126971 - DNA, 25 bp, SARS Virus
tcgtcacgatatgcataatggggat

SEQ ID NO: 126972 - DNA, 25 bp, SARS Virus
cgtcacgatattgataatggggatc

SEQ ID NO: 126973 - DNA, 25 bp, SARS Virus
gtcacgatattcgtaatggggatca

SEQ ID NO: 126974 - DNA, 25 bp, SARS Virus
tcacgatattcagaatggggatcac

SEQ ID NO: 126975 - DNA, 25 bp, SARS Virus
cacgatattcatgatggggatcaca

SEQ ID NO: 126976 - DNA, 25 bp, SARS Virus
acgatattcatagtggggatcacaa

SEQ ID NO: 126977 - DNA, 25 bp, SARS Virus
cgatattcataagggggatcacaac

SEQ ID NO: 126978 - DNA, 25 bp, SARS Virus
gatattcataatggggatcacaaca

SEQ ID NO: 126979 - DNA, 25 bp, SARS Virus
atattcataatggggatcacaacat

SEQ ID NO: 126980 - DNA, 25 bp, SARS Virus
tattcataatggggatcacaacatg

SEQ ID NO: 126981 - DNA, 25 bp, SARS Virus
attcataatggggatcacaacatgg

SEQ ID NO: 126982 - DNA, 25 bp, SARS Virus
ttcataatgggggtcacaacatgga

SEQ ID NO: 126983 - DNA, 25 bp, SARS Virus
tcataatggggagcacaacatggaa

SEQ ID NO: 126984 - DNA, 25 bp, SARS Virus
cataatggggatgacaacatggaat

SEQ ID NO: 126985 - DNA, 25 bp, SARS Virus
ataatggggatcgcaacatggaatg

SEQ ID NO: 126986 - DNA, 25 bp, SARS Virus
taatggggatcagaacatggaatgt

SEQ ID NO: 126987 - DNA, 25 bp, SARS Virus
aatggggatcacgacatggaatgtt

SEQ ID NO: 126988 - DNA, 25 bp, SARS Virus
atggggatcacagcatggaatgttc

SEQ ID NO: 126989 - DNA, 25 bp, SARS Virus
tggggatcacaagatggaatgttcc

SEQ ID NO: 126990 - DNA, 25 bp, SARS Virus
ggggatcacaacgtggaatgttcct

SEQ ID NO: 126991 - DNA, 25 bp, SARS Virus
gggatcacaacagggaatgttccta

SEQ ID NO: 126992 - DNA, 25 bp, SARS Virus
ggatcacaacatggaatgttcctag

SEQ ID NO: 126993 - DNA, 25 bp, SARS Virus
gatcacaacatggaatgttcctaga

SEQ ID NO: 126994 - DNA, 25 bp, SARS Virus
atcacaacatgggatgttcctagaa

SEQ ID NO: 126995 - DNA, 25 bp, SARS Virus
tcacaacatggagtgttcctagaag

SEQ ID NO: 126996 - DNA, 25 bp, SARS Virus
cacaacatggaaggttcctagaagt

SEQ ID NO: 126997 - DNA, 25 bp, SARS Virus
acaacatggaatgttcctagaagtt

SEQ ID NO: 126998 - DNA, 25 bp, SARS Virus
caacatggaatggtcctagaagttc

SEQ ID NO: 126999 - DNA, 25 bp, SARS Virus
aacatggaatgtgcctagaagttcg

SEQ ID NO: 127000 - DNA, 25 bp, SARS Virus
acatggaatgttgctagaagttcgt

SEQ ID NO: 127001 - DNA, 25 bp, SARS Virus
catggaatgttcgtagaagttcgtg

SEQ ID NO: 127002 - DNA, 25 bp, SARS Virus
atggaatgttccgagaagttcgtgt

SEQ ID NO: 127003 - DNA, 25 bp, SARS Virus
tggaatgttcctggaagttcgtgta

SEQ ID NO: 127004 - DNA, 25 bp, SARS Virus
ggaatgttcctagaagttcgtgtac

SEQ ID NO: 127005 - DNA, 25 bp, SARS Virus
gaatgttcctaggagttcgtgtact

SEQ ID NO: 127006 - DNA, 25 bp, SARS Virus
aatgttcctagaggttcgtgtactc

SEQ ID NO: 127007 - DNA, 25 bp, SARS Virus
atgttcctagaagttcgtgtactcc

SEQ ID NO: 127008 - DNA, 25 bp, SARS Virus
tgttcctagaaggtcgtgtactcca

SEQ ID NO: 127009 - DNA, 25 bp, SARS Virus
gttcctagaagtgcgtgtactccaa

SEQ ID NO: 127010 - DNA, 25 bp, SARS Virus
ttcctagaagttggtgtactccaaa

SEQ ID NO: 127011 - DNA, 25 bp, SARS Virus
tcctagaagttcgtgtactccaaat

SEQ ID NO: 127012 - DNA, 25 bp, SARS Virus
cctagaagttcgggtactccaaata

SEQ ID NO: 127013 - DNA, 25 bp, SARS Virus
ctagaagttcgtgtactccaaataa

SEQ ID NO: 127014 - DNA, 25 bp, SARS Virus
tagaagttcgtggactccaaataat

SEQ ID NO: 127015 - DNA, 25 bp, SARS Virus
agaagttcgtgtgctccaaataatc

SEQ ID NO: 127016 - DNA, 25 bp, SARS Virus
gaagttcgtgtagtccaaataatct

SEQ ID NO: 127017 - DNA, 25 bp, SARS Virus
aagttcgtgtacgccaaataatcta

SEQ ID NO: 127018 - DNA, 25 bp, SARS Virus
agttcgtgtactgcaaataatctac

SEQ ID NO: 127019 - DNA, 25 bp, SARS Virus
gttcgtgtactcgaaataatctacg

SEQ ID NO: 127020 - DNA, 25 bp, SARS Virus
ttcgtgtactccgaataatctacgt

SEQ ID NO: 127021 - DNA, 25 bp, SARS Virus
tcgtgtactccagataatctacgtg

SEQ ID NO: 127022 - DNA, 25 bp, SARS Virus
cgtgtactccaagtaatctacgtgt

SEQ ID NO: 127023 - DNA, 25 bp, SARS Virus
gtgtactccaaagaatctacgtgtc

SEQ ID NO: 127024 - DNA, 25 bp, SARS Virus
tgtactccaaatgatctacgtgtcg

SEQ ID NO: 127025 - DNA, 25 bp, SARS Virus
gtactccaaatagtctacgtgtcgc

SEQ ID NO: 127026 - DNA, 25 bp, SARS Virus
tactccaaataagctacgtgtcgcg

SEQ ID NO: 127027 - DNA, 25 bp, SARS Virus
actccaaataatgtacgtgtcgcga

SEQ ID NO: 127028 - DNA, 25 bp, SARS Virus
ctccaaataatcgacgtgtcgcgac

SEQ ID NO: 127029 - DNA, 25 bp, SARS Virus
tccaaataatctgcgtgtcgcgaca

SEQ ID NO: 127030 - DNA, 25 bp, SARS Virus
ccaaataatctaggtgtcgcgacat

SEQ ID NO: 127031 - DNA, 25 bp, SARS Virus
caaataatctacgtgtcgcgacatg

SEQ ID NO: 127032 - DNA, 25 bp, SARS Virus
aaataatctacgggtcgcgacatga

SEQ ID NO: 127033 - DNA, 25 bp, SARS Virus
aataatctacgtgtcgcgacatgat

SEQ ID NO: 127034 - DNA, 25 bp, SARS Virus
ataatctacgtggcgcgacatgatg

SEQ ID NO: 127035 - DNA, 25 bp, SARS Virus
taatctacgtgtggcgacatgatgt

SEQ ID NO: 127036 - DNA, 25 bp, SARS Virus
aatctacgtgtcgcgacatgatgtc

SEQ ID NO: 127037 - DNA, 25 bp, SARS Virus
atctacgtgtcgggacatgatgtca

SEQ ID NO: 127038 - DNA, 25 bp, SARS Virus
tctacgtgtcgcgacatgatgtcac

SEQ ID NO: 127039 - DNA, 25 bp, SARS Virus
ctacgtgtcgcggcatgatgtcacg

SEQ ID NO: 127040 - DNA, 25 bp, SARS Virus
tacgtgtcgcgagatgatgtcacgt

SEQ ID NO: 127041 - DNA, 25 bp, SARS Virus
acgtgtcgcgacgtgatgtcacgta

SEQ ID NO: 127042 - DNA, 25 bp, SARS Virus
cgtgtcgcgacaggatgtcacgtat

SEQ ID NO: 127043 - DNA, 25 bp, SARS Virus
gtgtcgcgacatgatgtcacgtata

SEQ ID NO: 127044 - DNA, 25 bp, SARS Virus
tgtcgcgacatggtgtcacgtatac

SEQ ID NO: 127045 - DNA, 25 bp, SARS Virus
gtcgcgacatgaggtcacgtatacg

SEQ ID NO: 127046 - DNA, 25 bp, SARS Virus
tcgcgacatgatgtcacgtatacgt

SEQ ID NO: 127047 - DNA, 25 bp, SARS Virus
cgcgacatgatggcacgtatacgtt

SEQ ID NO: 127048 - DNA, 25 bp, SARS Virus
gcgacatgatgtgacgtatacgttg

SEQ ID NO: 127049 - DNA, 25 bp, SARS Virus
cgacatgatgtcgcgtatacgttga

SEQ ID NO: 127050 - DNA, 25 bp, SARS Virus
gacatgatgtcaggtatacgttgac

SEQ ID NO: 127051 - DNA, 25 bp, SARS Virus
acatgatgtcacgtatacgttgacg

SEQ ID NO: 127052 - DNA, 25 bp, SARS Virus
catgatgtcacggatacgttgacgt

SEQ ID NO: 127053 - DNA, 25 bp, SARS Virus
atgatgtcacgtgtacgttgacgta

SEQ ID NO: 127054 - DNA, 25 bp, SARS Virus
tgatgtcacgtagacgttgacgtat

SEQ ID NO: 127055 - DNA, 25 bp, SARS Virus
gatgtcacgtatgcgttgacgtatc

SEQ ID NO: 127056 - DNA, 25 bp, SARS Virus
atgtcacgtataggttgacgtatct

SEQ ID NO: 127057 - DNA, 25 bp, SARS Virus
tgtcacgtatacgttgacgtatctc

SEQ ID NO: 127058 - DNA, 25 bp, SARS Virus
gtcacgtatacggtgacgtatctct

SEQ ID NO: 127059 - DNA, 25 bp, SARS Virus
tcacgtatacgtggacgtatctctt

SEQ ID NO: 127060 - DNA, 25 bp, SARS Virus
cacgtatacgttgacgtatctcttt

SEQ ID NO: 127061 - DNA, 25 bp, SARS Virus
acgtatacgttggcgtatctcttta

SEQ ID NO: 127062 - DNA, 25 bp, SARS Virus
cgtatacgttgaggtatctctttat

SEQ ID NO: 127063 - DNA, 25 bp, SARS Virus
gtatacgttgacgtatctctttatg

SEQ ID NO: 127064 - DNA, 25 bp, SARS Virus
tatacgttgacggatctctttatgt

SEQ ID NO: 127065 - DNA, 25 bp, SARS Virus
atacgttgacgtgtctctttatgtt

SEQ ID NO: 127066 - DNA, 25 bp, SARS Virus
tacgttgacgtagctctttatgttc

SEQ ID NO: 127067 - DNA, 25 bp, SARS Virus
acgttgacgtatgtctttatgttca

SEQ ID NO: 127068 - DNA, 25 bp, SARS Virus
cgttgacgtatcgctttatgttcag

SEQ ID NO: 127069 - DNA, 25 bp, SARS Virus
gttgacgtatctgtttatgttcagt

SEQ ID NO: 127070 - DNA, 25 bp, SARS Virus
ttgacgtatctcgttatgttcagtt

SEQ ID NO: 127071 - DNA, 25 bp, SARS Virus
tgacgtatctctgtatgttcagttt

SEQ ID NO: 127072 - DNA, 25 bp, SARS Virus
gacgtatctcttgatgttcagtttt

SEQ ID NO: 127073 - DNA, 25 bp, SARS Virus
acgtatctctttgtgttcagttttg

SEQ ID NO: 127074 - DNA, 25 bp, SARS Virus
cgtatctctttaggttcagttttgt

SEQ ID NO: 127075 - DNA, 25 bp, SARS Virus
gtatctctttatgttcagttttgtt

SEQ ID NO: 127076 - DNA, 25 bp, SARS Virus
tatctctttatggtcagttttgtta

SEQ ID NO: 127077 - DNA, 25 bp, SARS Virus
atctctttatgtgcagttttgttac

SEQ ID NO: 127078 - DNA, 25 bp, SARS Virus
tctctttatgttgagttttgttact

SEQ ID NO: 127079 - DNA, 25 bp, SARS Virus
ctctttatgttcggttttgttactc

SEQ ID NO: 127080 - DNA, 25 bp, SARS Virus
tctttatgttcagttttgttactct

SEQ ID NO: 127081 - DNA, 25 bp, SARS Virus
ctttatgttcaggtttgttactctt

SEQ ID NO: 127082 - DNA, 25 bp, SARS Virus
tttatgttcagtgttgttactcttc

SEQ ID NO: 127083 - DNA, 25 bp, SARS Virus
ttatgttcagttgtgttactcttca

SEQ ID NO: 127084 - DNA, 25 bp, SARS Virus
tatgttcagtttggttactcttcaa

SEQ ID NO: 127085 - DNA, 25 bp, SARS Virus
atgttcagttttgttactcttcaaa

SEQ ID NO: 127086 - DNA, 25 bp, SARS Virus
tgttcagttttggtactcttcaaag

SEQ ID NO: 127087 - DNA, 25 bp, SARS Virus
gttcagttttgtgactcttcaaagt

SEQ ID NO: 127088 - DNA, 25 bp, SARS Virus
ttcagttttgttgctcttcaaagta

SEQ ID NO: 127089 - DNA, 25 bp, SARS Virus
tcagttttgttagtcttcaaagtac

SEQ ID NO: 127090 - DNA, 25 bp, SARS Virus
cagttttgttacgcttcaaagtaca

SEQ ID NO: 127091 - DNA, 25 bp, SARS Virus
agttttgttactgttcaaagtacaa

SEQ ID NO: 127092 - DNA, 25 bp, SARS Virus
gttttgttactcgtcaaagtacaag

SEQ ID NO: 127093 - DNA, 25 bp, SARS Virus
ttttgttactctgcaaagtacaagc

SEQ ID NO: 127094 - DNA, 25 bp, SARS Virus
tttgttactcttgaaagtacaagca

SEQ ID NO: 127095 - DNA, 25 bp, SARS Virus
ttgttactcttcgaagtacaagcaa

SEQ ID NO: 127096 - DNA, 25 bp, SARS Virus
tgttactcttcagagtacaagcaaa

SEQ ID NO: 127097 - DNA, 25 bp, SARS Virus
gttactcttcaaggtacaagcaaat

SEQ ID NO: 127098 - DNA, 25 bp, SARS Virus
ttactcttcaaagtacaagcaaatc

SEQ ID NO: 127099 - DNA, 25 bp, SARS Virus
tactcttcaaaggacaagcaaatct

SEQ ID NO: 127100 - DNA, 25 bp, SARS Virus
actcttcaaagtgcaagcaaatctg

SEQ ID NO: 127101 - DNA, 25 bp, SARS Virus
ctcttcaaagtagaagcaaatctga

SEQ ID NO: 127102 - DNA, 25 bp, SARS Virus
tcttcaaagtacgagcaaatctgaa

SEQ ID NO: 127103 - DNA, 25 bp, SARS Virus
cttcaaagtacaggcaaatctgaaa

SEQ ID NO: 127104 - DNA, 25 bp, SARS Virus
ttcaaagtacaagcaaatctgaaac

SEQ ID NO: 127105 - DNA, 25 bp, SARS Virus
tcaaagtacaaggaaatctgaaacc

SEQ ID NO: 127106 - DNA, 25 bp, SARS Virus
caaagtacaagcgaatctgaaacca

SEQ ID NO: 127107 - DNA, 25 bp, SARS Virus
aaagtacaagcagatctgaaaccat

SEQ ID NO: 127108 - DNA, 25 bp, SARS Virus
aagtacaagcaagtctgaaaccatg

SEQ ID NO: 127109 - DNA, 25 bp, SARS Virus
agtacaagcaaagctgaaaccatgt

SEQ ID NO: 127110 - DNA, 25 bp, SARS Virus
gtacaagcaaatgtgaaaccatgtt

SEQ ID NO: 127111 - DNA, 25 bp, SARS Virus
tacaagcaaatcggaaaccatgttc

SEQ ID NO: 127112 - DNA, 25 bp, SARS Virus
acaagcaaatctgaaaccatgttcc

SEQ ID NO: 127113 - DNA, 25 bp, SARS Virus
caagcaaatctggaaccatgttcca

SEQ ID NO: 127114 - DNA, 25 bp, SARS Virus
aagcaaatctgagaccatgttccaa

SEQ ID NO: 127115 - DNA, 25 bp, SARS Virus
agcaaatctgaagccatgttccaag

SEQ ID NO: 127116 - DNA, 25 bp, SARS Virus
gcaaatctgaaagcatgttccaaga

SEQ ID NO: 127117 - DNA, 25 bp, SARS Virus
caaatctgaaacgatgttccaagaa

SEQ ID NO: 127118 - DNA, 25 bp, SARS Virus
aaatctgaaaccgtgttccaagaag

SEQ ID NO: 127119 - DNA, 25 bp, SARS Virus
aatctgaaaccaggttccaagaaga

SEQ ID NO: 127120 - DNA, 25 bp, SARS Virus
atctgaaaccatgttccaagaagat

SEQ ID NO: 127121 - DNA, 25 bp, SARS Virus
tctgaaaccatggtccaagaagatc

SEQ ID NO: 127122 - DNA, 25 bp, SARS Virus
ctgaaaccatgtgccaagaagatct

SEQ ID NO: 127123 - DNA, 25 bp, SARS Virus
tgaaaccatgttgcaagaagatcta

SEQ ID NO: 127124 - DNA, 25 bp, SARS Virus
gaaaccatgttcgaagaagatctag

SEQ ID NO: 127125 - DNA, 25 bp, SARS Virus
aaaccatgttccgagaagatctagg

SEQ ID NO: 127126 - DNA, 25 bp, SARS Virus
aaccatgttccaggaagatctagga

SEQ ID NO: 127127 - DNA, 25 bp, SARS Virus
accatgttccaagaagatctaggac

SEQ ID NO: 127128 - DNA, 25 bp, SARS Virus
ccatgttccaaggagatctaggacc

SEQ ID NO: 127129 - DNA, 25 bp, SARS Virus
catgttccaagaggatctaggacct

SEQ ID NO: 127130 - DNA, 25 bp, SARS Virus
atgttccaagaagatctaggaccta

SEQ ID NO: 127131 - DNA, 25 bp, SARS Virus
tgttccaagaaggtctaggacctaa

SEQ ID NO: 127132 - DNA, 25 bp, SARS Virus
gttccaagaagagctaggacctaaa

SEQ ID NO: 127133 - DNA, 25 bp, SARS Virus
ttccaagaagatgtaggacctaaag

SEQ ID NO: 127134 - DNA, 25 bp, SARS Virus
tccaagaagatcgaggacctaaagc

SEQ ID NO: 127135 - DNA, 25 bp, SARS Virus
ccaagaagatctgggacctaaagct

SEQ ID NO: 127136 - DNA, 25 bp, SARS Virus
caagaagatctaggacctaaagctc

SEQ ID NO: 127137 - DNA, 25 bp, SARS Virus
aagaagatctaggacctaaagctca

SEQ ID NO: 127138 - DNA, 25 bp, SARS Virus
agaagatctagggcctaaagctcac

SEQ ID NO: 127139 - DNA, 25 bp, SARS Virus
gaagatctaggagctaaagctcact

SEQ ID NO: 127140 - DNA, 25 bp, SARS Virus
aagatctaggacgtaaagctcactt

SEQ ID NO: 127141 - DNA, 25 bp, SARS Virus
agatctaggaccgaaagctcacttt

SEQ ID NO: 127142 - DNA, 25 bp, SARS Virus
gatctaggacctgaagctcactttt

SEQ ID NO: 127143 - DNA, 25 bp, SARS Virus
atctaggacctagagctcacttttg

SEQ ID NO: 127144 - DNA, 25 bp, SARS Virus
tctaggacctaaggctcacttttgg

SEQ ID NO: 127145 - DNA, 25 bp, SARS Virus
ctaggacctaaagctcacttttggt

SEQ ID NO: 127146 - DNA, 25 bp, SARS Virus
taggacctaaaggtcacttttggtt

SEQ ID NO: 127147 - DNA, 25 bp, SARS Virus
aggacctaaagcgcacttttggttt

SEQ ID NO: 127148 - DNA, 25 bp, SARS Virus
ggacctaaagctgacttttggtttt

SEQ ID NO: 127149 - DNA, 25 bp, SARS Virus
gacctaaagctcgcttttggtttta

SEQ ID NO: 127150 - DNA, 25 bp, SARS Virus
acctaaagctcagttttggttttat

SEQ ID NO: 127151 - DNA, 25 bp, SARS Virus
cctaaagctcacgtttggttttata

SEQ ID NO: 127152 - DNA, 25 bp, SARS Virus
ctaaagctcactgttggttttatat

SEQ ID NO: 127153 - DNA, 25 bp, SARS Virus
taaagctcacttgtggttttatatt

SEQ ID NO: 127154 - DNA, 25 bp, SARS Virus
aaagctcactttgggttttatatta

SEQ ID NO: 127155 - DNA, 25 bp, SARS Virus
aagctcacttttggttttatattat

SEQ ID NO: 127156 - DNA, 25 bp, SARS Virus
agctcacttttggttttatattatt

SEQ ID NO: 127157 - DNA, 25 bp, SARS Virus
gctcacttttgggtttatattattc

SEQ ID NO: 127158 - DNA, 25 bp, SARS Virus
ctcacttttggtgttatattattcg

SEQ ID NO: 127159 - DNA, 25 bp, SARS Virus
tcacttttggttgtatattattcgt

SEQ ID NO: 127160 - DNA, 25 bp, SARS Virus
cacttttggtttgatattattcgta

SEQ ID NO: 127161 - DNA, 25 bp, SARS Virus
acttttggttttgtattattcgtaa

SEQ ID NO: 127162 - DNA, 25 bp, SARS Virus
cttttggttttagattattcgtaat

SEQ ID NO: 127163 - DNA, 25 bp, SARS Virus
ttttggttttatgttattcgtaata

SEQ ID NO: 127164 - DNA, 25 bp, SARS Virus
tttggttttatagtattcgtaataa

SEQ ID NO: 127165 - DNA, 25 bp, SARS Virus
ttggttttatatgattcgtaataat

SEQ ID NO: 127166 - DNA, 25 bp, SARS Virus
tggttttatattgttcgtaataatt

SEQ ID NO: 127167 - DNA, 25 bp, SARS Virus
ggttttatattagtcgtaataattt

SEQ ID NO: 127168 - DNA, 25 bp, SARS Virus
gttttatattatgcgtaataatttt

SEQ ID NO: 127169 - DNA, 25 bp, SARS Virus
ttttatattattggtaataattttg

SEQ ID NO: 127170 - DNA, 25 bp, SARS Virus
tttatattattcgtaataattttgt

SEQ ID NO: 127171 - DNA, 25 bp, SARS Virus
ttatattattcggaataattttgtt

SEQ ID NO: 127172 - DNA, 25 bp, SARS Virus
tatattattcgtgataattttgttc

SEQ ID NO: 127173 - DNA, 25 bp, SARS Virus
atattattcgtagtaattttgttcc

SEQ ID NO: 127174 - DNA, 25 bp, SARS Virus
tattattcgtaagaattttgttcct

SEQ ID NO: 127175 - DNA, 25 bp, SARS Virus
attattcgtaatgattttgttcctt

SEQ ID NO: 127176 - DNA, 25 bp, SARS Virus
ttattcgtaatagttttgttcctta

SEQ ID NO: 127177 - DNA, 25 bp, SARS Virus
tattcgtaataagtttgttccttat

SEQ ID NO: 127178 - DNA, 25 bp, SARS Virus
attcgtaataatgttgttccttatc

SEQ ID NO: 127179 - DNA, 25 bp, SARS Virus
ttcgtaataattgtgttccttatcg

SEQ ID NO: 127180 - DNA, 25 bp, SARS Virus
tcgtaataatttggttccttatcgt

SEQ ID NO: 127181 - DNA, 25 bp, SARS Virus
cgtaataattttgttccttatcgtc

SEQ ID NO: 127182 - DNA, 25 bp, SARS Virus
gtaataattttggtccttatcgtct

SEQ ID NO: 127183 - DNA, 25 bp, SARS Virus
taataattttgtgccttatcgtctt

SEQ ID NO: 127184 - DNA, 25 bp, SARS Virus
aataattttgttgcttatcgtcttt

SEQ ID NO: 127185 - DNA, 25 bp, SARS Virus
ataattttgttcgttatcgtctttc

SEQ ID NO: 127186 - DNA, 25 bp, SARS Virus
taattttgttccgtatcgtctttcc

SEQ ID NO: 127187 - DNA, 25 bp, SARS Virus
aattttgttcctgatcgtctttccg

SEQ ID NO: 127188 - DNA, 25 bp, SARS Virus
attttgttccttgtcgtctttccga

SEQ ID NO: 127189 - DNA, 25 bp, SARS Virus
ttttgttccttagcgtctttccgat

SEQ ID NO: 127190 - DNA, 25 bp, SARS Virus
tttgttccttatggtctttccgatt

SEQ ID NO: 127191 - DNA, 25 bp, SARS Virus
ttgttccttatcgtctttccgattt

SEQ ID NO: 127192 - DNA, 25 bp, SARS Virus
tgttccttatcggctttccgatttt

SEQ ID NO: 127193 - DNA, 25 bp, SARS Virus
gttccttatcgtgtttccgattttt

SEQ ID NO: 127194 - DNA, 25 bp, SARS Virus
ttccttatcgtcgttccgatttttc

SEQ ID NO: 127195 - DNA, 25 bp, SARS Virus
tccttatcgtctgtccgatttttcg

SEQ ID NO: 127196 - DNA, 25 bp, SARS Virus
ccttatcgtcttgccgatttttcgt

SEQ ID NO: 127197 - DNA, 25 bp, SARS Virus
cttatcgtctttgcgatttttcgtg

SEQ ID NO: 127198 - DNA, 25 bp, SARS Virus
ttatcgtctttcggatttttcgtgt

SEQ ID NO: 127199 - DNA, 25 bp, SARS Virus
tatcgtctttccgatttttcgtgtt

SEQ ID NO: 127200 - DNA, 25 bp, SARS Virus
atcgtctttccggtttttcgtgttt

SEQ ID NO: 127201 - DNA, 25 bp, SARS Virus
tcgtctttccgagttttcgtgttta

SEQ ID NO: 127202 - DNA, 25 bp, SARS Virus
cgtctttccgatgtttcgtgtttat

SEQ ID NO: 127203 - DNA, 25 bp, SARS Virus
gtctttccgattgttcgtgtttatc

SEQ ID NO: 127204 - DNA, 25 bp, SARS Virus
tctttccgatttgtcgtgtttatct

SEQ ID NO: 127205 - DNA, 25 bp, SARS Virus
ctttccgattttgcgtgtttatctt

SEQ ID NO: 127206 - DNA, 25 bp, SARS Virus
tttccgatttttggtgtttatcttc

SEQ ID NO: 127207 - DNA, 25 bp, SARS Virus
ttccgatttttcgtgtttatcttca

SEQ ID NO: 127208 - DNA, 25 bp, SARS Virus
tccgatttttcgggtttatcttcag

SEQ ID NO: 127209 - DNA, 25 bp, SARS Virus
ccgatttttcgtgtttatcttcagt

SEQ ID NO: 127210 - DNA, 25 bp, SARS Virus
cgatttttcgtggttatcttcagtt

SEQ ID NO: 127211 - DNA, 25 bp, SARS Virus
gatttttcgtgtgtatcttcagtta

SEQ ID NO: 127212 - DNA, 25 bp, SARS Virus
atttttcgtgttgatcttcagttaa

SEQ ID NO: 127213 - DNA, 25 bp, SARS Virus
tttttcgtgtttgtcttcagttaat

SEQ ID NO: 127214 - DNA, 25 bp, SARS Virus
ttttcgtgtttagcttcagttaatt

SEQ ID NO: 127215 - DNA, 25 bp, SARS Virus
tttcgtgtttatgttcagttaattt

SEQ ID NO: 127216 - DNA, 25 bp, SARS Virus
ttcgtgtttatcgtcagttaatttc

SEQ ID NO: 127217 - DNA, 25 bp, SARS Virus
tcgtgtttatctgcagttaatttca

SEQ ID NO: 127218 - DNA, 25 bp, SARS Virus
cgtgtttatcttgagttaatttcac

SEQ ID NO: 127219 - DNA, 25 bp, SARS Virus
gtgtttatcttcggttaatttcact

SEQ ID NO: 127220 - DNA, 25 bp, SARS Virus
tgtttatcttcagttaatttcactc

SEQ ID NO: 127221 - DNA, 25 bp, SARS Virus
gtttatcttcaggtaatttcactcg

SEQ ID NO: 127222 - DNA, 25 bp, SARS Virus
tttatcttcagtgaatttcactcga

SEQ ID NO: 127223 - DNA, 25 bp, SARS Virus
ttatcttcagttgatttcactcgag

SEQ ID NO: 127224 - DNA, 25 bp, SARS Virus
tatcttcagttagtttcactcgagt

SEQ ID NO: 127225 - DNA, 25 bp, SARS Virus
atcttcagttaagttcactcgagta

SEQ ID NO: 127226 - DNA, 25 bp, SARS Virus
tcttcagttaatgtcactcgagtaa

SEQ ID NO: 127227 - DNA, 25 bp, SARS Virus
cttcagttaattgcactcgagtaag

SEQ ID NO: 127228 - DNA, 25 bp, SARS Virus
ttcagttaatttgactcgagtaagt

SEQ ID NO: 127229 - DNA, 25 bp, SARS Virus
tcagttaatttcgctcgagtaagta

SEQ ID NO: 127230 - DNA, 25 bp, SARS Virus
cagttaatttcagtcgagtaagtaa

SEQ ID NO: 127231 - DNA, 25 bp, SARS Virus
agttaatttcacgcgagtaagtaag

SEQ ID NO: 127232 - DNA, 25 bp, SARS Virus
gttaatttcactggagtaagtaaga

SEQ ID NO: 127233 - DNA, 25 bp, SARS Virus
ttaatttcactcgagtaagtaagac

SEQ ID NO: 127234 - DNA, 25 bp, SARS Virus
taatttcactcgggtaagtaagaca

SEQ ID NO: 127235 - DNA, 25 bp, SARS Virus
aatttcactcgagtaagtaagacag

SEQ ID NO: 127236 - DNA, 25 bp, SARS Virus
atttcactcgaggaagtaagacaga

SEQ ID NO: 127237 - DNA, 25 bp, SARS Virus
tttcactcgagtgagtaagacagaa

SEQ ID NO: 127238 - DNA, 25 bp, SARS Virus
ttcactcgagtaggtaagacagaaa

SEQ ID NO: 127239 - DNA, 25 bp, SARS Virus
tcactcgagtaagtaagacagaaag

SEQ ID NO: 127240 - DNA, 25 bp, SARS Virus
cactcgagtaaggaagacagaaaga

SEQ ID NO: 127241 - DNA, 25 bp, SARS Virus
actcgagtaagtgagacagaaagag

SEQ ID NO: 127242 - DNA, 25 bp, SARS Virus
ctcgagtaagtaggacagaaagaga

SEQ ID NO: 127243 - DNA, 25 bp, SARS Virus
tcgagtaagtaagacagaaagagaa

SEQ ID NO: 127244 - DNA, 25 bp, SARS Virus
cgagtaagtaaggcagaaagagaat

SEQ ID NO: 127245 - DNA, 25 bp, SARS Virus
gagtaagtaagagagaaagagaatt

SEQ ID NO: 127246 - DNA, 25 bp, SARS Virus
agtaagtaagacggaaagagaatta

SEQ ID NO: 127247 - DNA, 25 bp, SARS Virus
gtaagtaagacagaaagagaattac

SEQ ID NO: 127248 - DNA, 25 bp, SARS Virus
taagtaagacaggaagagaattacc

SEQ ID NO: 127249 - DNA, 25 bp, SARS Virus
aagtaagacagagagagaattacca

SEQ ID NO: 127250 - DNA, 25 bp, SARS Virus
agtaagacagaaggagaattaccac

SEQ ID NO: 127251 - DNA, 25 bp, SARS Virus
gtaagacagaaagagaattaccact

SEQ ID NO: 127252 - DNA, 25 bp, SARS Virus
taagacagaaagggaattaccactt

SEQ ID NO: 127253 - DNA, 25 bp, SARS Virus
aagacagaaagagaattaccacttc

SEQ ID NO: 127254 - DNA, 25 bp, SARS Virus
agacagaaagaggattaccacttcg

SEQ ID NO: 127255 - DNA, 25 bp, SARS Virus
gacagaaagagagttaccacttcgt

SEQ ID NO: 127256 - DNA, 25 bp, SARS Virus
acagaaagagaagtaccacttcgtt

SEQ ID NO: 127257 - DNA, 25 bp, SARS Virus
cagaaagagaatgaccacttcgttt

SEQ ID NO: 127258 - DNA, 25 bp, SARS Virus
agaaagagaattgccacttcgtttc

SEQ ID NO: 127259 - DNA, 25 bp, SARS Virus
gaaagagaattagcacttcgtttca

SEQ ID NO: 127260 - DNA, 25 bp, SARS Virus
aaagagaattacgacttcgtttcat

SEQ ID NO: 127261 - DNA, 25 bp, SARS Virus
aagagaattaccgcttcgtttcata

SEQ ID NO: 127262 - DNA, 25 bp, SARS Virus
agagaattaccagttcgtttcataa

SEQ ID NO: 127263 - DNA, 25 bp, SARS Virus
gagaattaccacgtcgtttcataat

SEQ ID NO: 127264 - DNA, 25 bp, SARS Virus
agaattaccactgcgtttcataatt

SEQ ID NO: 127265 - DNA, 25 bp, SARS Virus
gaattaccacttggtttcataattt

SEQ ID NO: 127266 - DNA, 25 bp, SARS Virus
aattaccacttcgtttcataatttt

SEQ ID NO: 127267 - DNA, 25 bp, SARS Virus
attaccacttcggttcataattttt

SEQ ID NO: 127268 - DNA, 25 bp, SARS Virus
ttaccacttcgtgtcataattttta

SEQ ID NO: 127269 - DNA, 25 bp, SARS Virus
taccacttcgttgcataatttttat

SEQ ID NO: 127270 - DNA, 25 bp, SARS Virus
accacttcgtttgataatttttatg

SEQ ID NO: 127271 - DNA, 25 bp, SARS Virus
ccacttcgtttcgtaatttttatga

SEQ ID NO: 127272 - DNA, 25 bp, SARS Virus
cacttcgtttcagaatttttatgat

SEQ ID NO: 127273 - DNA, 25 bp, SARS Virus
acttcgtttcatgatttttatgatc

SEQ ID NO: 127274 - DNA, 25 bp, SARS Virus
cttcgtttcatagtttttatgatct

SEQ ID NO: 127275 - DNA, 25 bp, SARS Virus
ttcgtttcataagttttatgatctc

SEQ ID NO: 127276 - DNA, 25 bp, SARS Virus
tcgtttcataatgtttatgatctcg

SEQ ID NO: 127277 - DNA, 25 bp, SARS Virus
cgtttcataattgttatgatctcgt

SEQ ID NO: 127278 - DNA, 25 bp, SARS Virus
gtttcataatttgtatgatctcgtc

SEQ ID NO: 127279 - DNA, 25 bp, SARS Virus
tttcataattttgatgatctcgtcg

SEQ ID NO: 127280 - DNA, 25 bp, SARS Virus
ttcataatttttgtgatctcgtcgt

SEQ ID NO: 127281 - DNA, 25 bp, SARS Virus
tcataatttttaggatctcgtcgtt

SEQ ID NO: 127282 - DNA, 25 bp, SARS Virus
cataatttttatgatctcgtcgttg

SEQ ID NO: 127283 - DNA, 25 bp, SARS Virus
ataatttttatggtctcgtcgttgt

SEQ ID NO: 127284 - DNA, 25 bp, SARS Virus
taatttttatgagctcgtcgttgtt

SEQ ID NO: 127285 - DNA, 25 bp, SARS Virus
aatttttatgatgtcgtcgttgtta

SEQ ID NO: 127286 - DNA, 25 bp, SARS Virus
atttttatgatcgcgtcgttgttac

SEQ ID NO: 127287 - DNA, 25 bp, SARS Virus
tttttatgatctggtcgttgttact

SEQ ID NO: 127288 - DNA, 25 bp, SARS Virus
ttttatgatctcgtcgttgttactc

SEQ ID NO: 127289 - DNA, 25 bp, SARS Virus
tttatgatctcggcgttgttactct

SEQ ID NO: 127290 - DNA, 25 bp, SARS Virus
ttatgatctcgtggttgttactctt

SEQ ID NO: 127291 - DNA, 25 bp, SARS Virus
tatgatctcgtcgttgttactcttt

SEQ ID NO: 127292 - DNA, 25 bp, SARS Virus
atgatctcgtcggtgttactctttt

SEQ ID NO: 127293 - DNA, 25 bp, SARS Virus
tgatctcgtcgtggttactcttttt

SEQ ID NO: 127294 - DNA, 25 bp, SARS Virus
gatctcgtcgttgttactctttttc

SEQ ID NO: 127295 - DNA, 25 bp, SARS Virus
atctcgtcgttggtactctttttca

SEQ ID NO: 127296 - DNA, 25 bp, SARS Virus
tctcgtcgttgtgactctttttcac

SEQ ID NO: 127297 - DNA, 25 bp, SARS Virus
ctcgtcgttgttgctctttttcacc

SEQ ID NO: 127298 - DNA, 25 bp, SARS Virus
tcgtcgttgttagtctttttcaccg

SEQ ID NO: 127299 - DNA, 25 bp, SARS Virus
cgtcgttgttacgctttttcaccgc

SEQ ID NO: 127300 - DNA, 25 bp, SARS Virus
gtcgttgttactgtttttcaccgct

SEQ ID NO: 127301 - DNA, 25 bp, SARS Virus
tcgttgttactcgttttcaccgctc

SEQ ID NO: 127302 - DNA, 25 bp, SARS Virus
cgttgttactctgtttcaccgctca

SEQ ID NO: 127303 - DNA, 25 bp, SARS Virus
gttgttactcttgttcaccgctcat

SEQ ID NO: 127304 - DNA, 25 bp, SARS Virus
ttgttactctttgtcaccgctcatc

SEQ ID NO: 127305 - DNA, 25 bp, SARS Virus
tgttactcttttgcaccgctcatct

SEQ ID NO: 127306 - DNA, 25 bp, SARS Virus
gttactctttttgaccgctcatctc

SEQ ID NO: 127307 - DNA, 25 bp, SARS Virus
ttactctttttcgccgctcatctcg

SEQ ID NO: 127308 - DNA, 25 bp, SARS Virus
tactctttttcagcgctcatctcga

SEQ ID NO: 127309 - DNA, 25 bp, SARS Virus
actctttttcacggctcatctcgag

SEQ ID NO: 127310 - DNA, 25 bp, SARS Virus
ctctttttcaccgctcatctcgaga

SEQ ID NO: 127311 - DNA, 25 bp, SARS Virus
tctttttcaccggtcatctcgagaa

SEQ ID NO: 127312 - DNA, 25 bp, SARS Virus
ctttttcaccgcgcatctcgagaac

SEQ ID NO: 127313 - DNA, 25 bp, SARS Virus
tttttcaccgctgatctcgagaaca

SEQ ID NO: 127314 - DNA, 25 bp, SARS Virus
ttttcaccgctcgtctcgagaacaa

SEQ ID NO: 127315 - DNA, 25 bp, SARS Virus
tttcaccgctcagctcgagaacaac

SEQ ID NO: 127316 - DNA, 25 bp, SARS Virus
ttcaccgctcatgtcgagaacaact

SEQ ID NO: 127317 - DNA, 25 bp, SARS Virus
tcaccgctcatcgcgagaacaactt

SEQ ID NO: 127318 - DNA, 25 bp, SARS Virus
caccgctcatctggagaacaacttg

SEQ ID NO: 127319 - DNA, 25 bp, SARS Virus
accgctcatctcgagaacaacttgg

SEQ ID NO: 127320 - DNA, 25 bp, SARS Virus
ccgctcatctcgggaacaacttgga

SEQ ID NO: 127321 - DNA, 25 bp, SARS Virus
cgctcatctcgagaacaacttggag

SEQ ID NO: 127322 - DNA, 25 bp, SARS Virus
gctcatctcgaggacaacttggagg

SEQ ID NO: 127323 - DNA, 25 bp, SARS Virus
ctcatctcgagagcaacttggagga

SEQ ID NO: 127324 - DNA, 25 bp, SARS Virus
tcatctcgagaagaacttggaggag

SEQ ID NO: 127325 - DNA, 25 bp, SARS Virus
catctcgagaacgacttggaggaga

SEQ ID NO: 127326 - DNA, 25 bp, SARS Virus
atctcgagaacagcttggaggagaa

SEQ ID NO: 127327 - DNA, 25 bp, SARS Virus
tctcgagaacaagttggaggagaac

SEQ ID NO: 127328 - DNA, 25 bp, SARS Virus
ctcgagaacaacgtggaggagaaca

SEQ ID NO: 127329 - DNA, 25 bp, SARS Virus
tcgagaacaactgggaggagaacag

SEQ ID NO: 127330 - DNA, 25 bp, SARS Virus
cgagaacaacttggaggagaacaga

SEQ ID NO: 127331 - DNA, 25 bp, SARS Virus
gagaacaacttggaggagaacagac

SEQ ID NO: 127332 - DNA, 25 bp, SARS Virus
agaacaacttgggggagaacagact

SEQ ID NO: 127333 - DNA, 25 bp, SARS Virus
gaacaacttggaggagaacagacta

SEQ ID NO: 127334 - DNA, 25 bp, SARS Virus
aacaacttggaggagaacagactac

SEQ ID NO: 127335 - DNA, 25 bp, SARS Virus
acaacttggaggggaacagactact

SEQ ID NO: 127336 - DNA, 25 bp, SARS Virus
caacttggaggagaacagactactt

SEQ ID NO: 127337 - DNA, 25 bp, SARS Virus
aacttggaggaggacagactacttt

SEQ ID NO: 127338 - DNA, 25 bp, SARS Virus
acttggaggagagcagactactttt

SEQ ID NO: 127339 - DNA, 25 bp, SARS Virus
cttggaggagaagagactacttttc

SEQ ID NO: 127340 - DNA, 25 bp, SARS Virus
ttggaggagaacggactacttttca

SEQ ID NO: 127341 - DNA, 25 bp, SARS Virus
tggaggagaacagactacttttcaa

SEQ ID NO: 127342 - DNA, 25 bp, SARS Virus
ggaggagaacaggctacttttcaaa

SEQ ID NO: 127343 - DNA, 25 bp, SARS Virus
gaggagaacagagtacttttcaaaa

SEQ ID NO: 127344 - DNA, 25 bp, SARS Virus
aggagaacagacgacttttcaaaac

SEQ ID NO: 127345 - DNA, 25 bp, SARS Virus
ggagaacagactgcttttcaaaacc

SEQ ID NO: 127346 - DNA, 25 bp, SARS Virus
gagaacagactagttttcaaaacca

SEQ ID NO: 127347 - DNA, 25 bp, SARS Virus
agaacagactacgtttcaaaaccac

SEQ ID NO: 127348 - DNA, 25 bp, SARS Virus
gaacagactactgttcaaaaccact

SEQ ID NO: 127349 - DNA, 25 bp, SARS Virus
aacagactacttgtcaaaaccactt

SEQ ID NO: 127350 - DNA, 25 bp, SARS Virus
acagactactttgcaaaaccacttt

SEQ ID NO: 127351 - DNA, 25 bp, SARS Virus
cagactacttttgaaaaccactttg

SEQ ID NO: 127352 - DNA, 25 bp, SARS Virus
agactacttttcgaaaccactttga

SEQ ID NO: 127353 - DNA, 25 bp, SARS Virus
gactacttttcagaaccactttgac

SEQ ID NO: 127354 - DNA, 25 bp, SARS Virus
actacttttcaagaccactttgact

SEQ ID NO: 127355 - DNA, 25 bp, SARS Virus
ctacttttcaaagccactttgacta

SEQ ID NO: 127356 - DNA, 25 bp, SARS Virus
tacttttcaaaagcactttgactag

SEQ ID NO: 127357 - DNA, 25 bp, SARS Virus
acttttcaaaacgactttgactaga

SEQ ID NO: 127358 - DNA, 25 bp, SARS Virus
cttttcaaaaccgctttgactagaa

SEQ ID NO: 127359 - DNA, 25 bp, SARS Virus
ttttcaaaaccagtttgactagaac

SEQ ID NO: 127360 - DNA, 25 bp, SARS Virus
tttcaaaaccacgttgactagaacg

SEQ ID NO: 127361 - DNA, 25 bp, SARS Virus
ttcaaaaccactgtgactagaacgt

SEQ ID NO: 127362 - DNA, 25 bp, SARS Virus
tcaaaaccacttggactagaacgtg

SEQ ID NO: 127363 - DNA, 25 bp, SARS Virus
caaaaccactttgactagaacgtgc

SEQ ID NO: 127364 - DNA, 25 bp, SARS Virus
aaaaccactttggctagaacgtgcg

SEQ ID NO: 127365 - DNA, 25 bp, SARS Virus
aaaccactttgagtagaacgtgcgt

SEQ ID NO: 127366 - DNA, 25 bp, SARS Virus
aaccactttgacgagaacgtgcgtc

SEQ ID NO: 127367 - DNA, 25 bp, SARS Virus
accactttgactggaacgtgcgtcg

SEQ ID NO: 127368 - DNA, 25 bp, SARS Virus
ccactttgactagaacgtgcgtcga

SEQ ID NO: 127369 - DNA, 25 bp, SARS Virus
cactttgactaggacgtgcgtcgac

SEQ ID NO: 127370 - DNA, 25 bp, SARS Virus
actttgactagagcgtgcgtcgact

SEQ ID NO: 127371 - DNA, 25 bp, SARS Virus
ctttgactagaaggtgcgtcgacta

SEQ ID NO: 127372 - DNA, 25 bp, SARS Virus
tttgactagaacgtgcgtcgactat

SEQ ID NO: 127373 - DNA, 25 bp, SARS Virus
ttgactagaacgggcgtcgactatc

SEQ ID NO: 127374 - DNA, 25 bp, SARS Virus
tgactagaacgtgcgtcgactatcc

SEQ ID NO: 127375 - DNA, 25 bp, SARS Virus
gactagaacgtgggtcgactatcca

SEQ ID NO: 127376 - DNA, 25 bp, SARS Virus
actagaacgtgcgtcgactatccat

SEQ ID NO: 127377 - DNA, 25 bp, SARS Virus
ctagaacgtgcggcgactatccata

SEQ ID NO: 127378 - DNA, 25 bp, SARS Virus
tagaacgtgcgtggactatccatac

SEQ ID NO: 127379 - DNA, 25 bp, SARS Virus
agaacgtgcgtcgactatccataca

SEQ ID NO: 127380 - DNA, 25 bp, SARS Virus
gaacgtgcgtcggctatccatacag

SEQ ID NO: 127381 - DNA, 25 bp, SARS Virus
aacgtgcgtcgagtatccatacagc

SEQ ID NO: 127382 - DNA, 25 bp, SARS Virus
acgtgcgtcgacgatccatacagct

SEQ ID NO: 127383 - DNA, 25 bp, SARS Virus
cgtgcgtcgactgtccatacagctc

SEQ ID NO: 127384 - DNA, 25 bp, SARS Virus
gtgcgtcgactagccatacagctca

SEQ ID NO: 127385 - DNA, 25 bp, SARS Virus
tgcgtcgactatgcatacagctcat

SEQ ID NO: 127386 - DNA, 25 bp, SARS Virus
gcgtcgactatcgatacagctcatg

SEQ ID NO: 127387 - DNA, 25 bp, SARS Virus
cgtcgactatccgtacagctcatgg

SEQ ID NO: 127388 - DNA, 25 bp, SARS Virus
gtcgactatccagacagctcatggc

SEQ ID NO: 127389 - DNA, 25 bp, SARS Virus
tcgactatccatgcagctcatggca

SEQ ID NO: 127390 - DNA, 25 bp, SARS Virus
cgactatccatagagctcatggcag

SEQ ID NO: 127391 - DNA, 25 bp, SARS Virus
gactatccatacggctcatggcagt

SEQ ID NO: 127392 - DNA, 25 bp, SARS Virus
actatccatacagctcatggcagtc

SEQ ID NO: 127393 - DNA, 25 bp, SARS Virus
ctatccatacaggtcatggcagtcg

SEQ ID NO: 127394 - DNA, 25 bp, SARS Virus
tatccatacagcgcatggcagtcgt

SEQ ID NO: 127395 - DNA, 25 bp, SARS Virus
atccatacagctgatggcagtcgtg

SEQ ID NO: 127396 - DNA, 25 bp, SARS Virus
tccatacagctcgtggcagtcgtgt

SEQ ID NO: 127397 - DNA, 25 bp, SARS Virus
ccatacagctcagggcagtcgtgtt

SEQ ID NO: 127398 - DNA, 25 bp, SARS Virus
catacagctcatggcagtcgtgttc

SEQ ID NO: 127399 - DNA, 25 bp, SARS Virus
atacagctcatggcagtcgtgttcg

SEQ ID NO: 127400 - DNA, 25 bp, SARS Virus
tacagctcatgggagtcgtgttcgt

SEQ ID NO: 127401 - DNA, 25 bp, SARS Virus
aaacttggtatctcacggtagatac

SEQ ID NO: 127402 - DNA, 25 bp, SARS Virus
aacttggtatcatacggtagatact

SEQ ID NO: 127403 - DNA, 25 bp, SARS Virus
acttggtatcactcggtagatactt

SEQ ID NO: 127404 - DNA, 25 bp, SARS Virus
cttggtatcacatggtagatacttt

SEQ ID NO: 127405 - DNA, 25 bp, SARS Virus
ttggtatcacactgtagatactttt

SEQ ID NO: 127406 - DNA, 25 bp, SARS Virus
tggtatcacacgttagatacttttc

SEQ ID NO: 127407 - DNA, 25 bp, SARS Virus
ggtatcacacggtagatacttttcc

SEQ ID NO: 127408 - DNA, 25 bp, SARS Virus
gtatcacacggttgatacttttcca

SEQ ID NO: 127409 - DNA, 25 bp, SARS Virus
tatcacacggtatatacttttccat

SEQ ID NO: 127410 - DNA, 25 bp, SARS Virus
atcacacggtagttacttttccatt

SEQ ID NO: 127411 - DNA, 25 bp, SARS Virus
tcacacggtagatacttttccattt

SEQ ID NO: 127412 - DNA, 25 bp, SARS Virus
cacacggtagattcttttccatttt

SEQ ID NO: 127413 - DNA, 25 bp, SARS Virus
acacggtagatatttttccattttg

SEQ ID NO: 127414 - DNA, 25 bp, SARS Virus
cacggtagatacttttccattttgg

SEQ ID NO: 127415 - DNA, 25 bp, SARS Virus
acggtagatacttttccattttgga

SEQ ID NO: 127416 - DNA, 25 bp, SARS Virus
cggtagatacttttccattttggaa

SEQ ID NO: 127417 - DNA, 25 bp, SARS Virus
ggtagatacttttccattttggaaa

SEQ ID NO: 127418 - DNA, 25 bp, SARS Virus
gtagatactttttcattttggaaag

SEQ ID NO: 127419 - DNA, 25 bp, SARS Virus
tagatacttttctattttggaaagg

SEQ ID NO: 127420 - DNA, 25 bp, SARS Virus
agatacttttcctttttggaaagga

SEQ ID NO: 127421 - DNA, 25 bp, SARS Virus
gatacttttccattttggaaaggat

SEQ ID NO: 127422 - DNA, 25 bp, SARS Virus
atacttttccattttggaaaggatc

SEQ ID NO: 127423 - DNA, 25 bp, SARS Virus
tacttttccattttggaaaggatct

SEQ ID NO: 127424 - DNA, 25 bp, SARS Virus
acttttccattttggaaaggatctc

SEQ ID NO: 127425 - DNA, 25 bp, SARS Virus
cttttccatttttgaaaggatctcg

SEQ ID NO: 127426 - DNA, 25 bp, SARS Virus
ttttccattttgtaaaggatctcgt

SEQ ID NO: 127427 - DNA, 25 bp, SARS Virus
tttccattttggtaaggatctcgtg

SEQ ID NO: 127428 - DNA, 25 bp, SARS Virus
ttccattttggataggatctcgtgt

SEQ ID NO: 127429 - DNA, 25 bp, SARS Virus
tccattttggaatggatctcgtgtt

SEQ ID NO: 127430 - DNA, 25 bp, SARS Virus
ccattttggaaatgatctcgtgttt

SEQ ID NO: 127431 - DNA, 25 bp, SARS Virus
cattttggaaagtatctcgtgtttc

SEQ ID NO: 127432 - DNA, 25 bp, SARS Virus
attttggaaaggttctcgtgtttcg

SEQ ID NO: 127433 - DNA, 25 bp, SARS Virus
ttttggaaaggatctcgtgtttcgg

SEQ ID NO: 127434 - DNA, 25 bp, SARS Virus
tttggaaaggatttcgtgtttcggt

SEQ ID NO: 127435 - DNA, 25 bp, SARS Virus
ttggaaaggatctcgtgtttcggtt

SEQ ID NO: 127436 - DNA, 25 bp, SARS Virus
tggaaaggatcttgtgtttcggttc

SEQ ID NO: 127437 - DNA, 25 bp, SARS Virus
ggaaaggatctcttgtttcggttcg

SEQ ID NO: 127438 - DNA, 25 bp, SARS Virus
gaaaggatctcgtgtttcggttcgt

SEQ ID NO: 127439 - DNA, 25 bp, SARS Virus
aaaggatctcgtttttcggttcgtc

SEQ ID NO: 127440 - DNA, 25 bp, SARS Virus
aaggatctcgtgtttcggttcgtca

SEQ ID NO: 127441 - DNA, 25 bp, SARS Virus
aggatctcgtgtttcggttcgtcac

SEQ ID NO: 127442 - DNA, 25 bp, SARS Virus
ggatctcgtgtttcggttcgtcacg

SEQ ID NO: 127443 - DNA, 25 bp, SARS Virus
gatctcgtgttttggttcgtcacga

SEQ ID NO: 127444 - DNA, 25 bp, SARS Virus
atctcgtgtttctgttcgtcacgat

SEQ ID NO: 127445 - DNA, 25 bp, SARS Virus
tctcgtgtttcgtttcgtcacgata

SEQ ID NO: 127446 - DNA, 25 bp, SARS Virus
ctcgtgtttcggttcgtcacgatat

SEQ ID NO: 127447 - DNA, 25 bp, SARS Virus
tcgtgtttcggttcgtcacgatatt

SEQ ID NO: 127448 - DNA, 25 bp, SARS Virus
cgtgtttcggtttgtcacgatattc

SEQ ID NO: 127449 - DNA, 25 bp, SARS Virus
gtgtttcggttcttcacgatattca

SEQ ID NO: 127450 - DNA, 25 bp, SARS Virus
tgtttcggttcgtcacgatattcat

SEQ ID NO: 127451 - DNA, 25 bp, SARS Virus
gtttcggttcgttacgatattcata

SEQ ID NO: 127452 - DNA, 25 bp, SARS Virus
tttcggttcgtctcgatattcataa

SEQ ID NO: 127453 - DNA, 25 bp, SARS Virus
ttcggttcgtcatgatattcataat

SEQ ID NO: 127454 - DNA, 25 bp, SARS Virus
tcggttcgtcactatattcataatg

SEQ ID NO: 127455 - DNA, 25 bp, SARS Virus
cggttcgtcacgttattcataatgg

SEQ ID NO: 127456 - DNA, 25 bp, SARS Virus
ggttcgtcacgatattcataatggg

SEQ ID NO: 127457 - DNA, 25 bp, SARS Virus
gttcgtcacgattttcataatgggg

SEQ ID NO: 127458 - DNA, 25 bp, SARS Virus
ttcgtcacgatattcataatgggga

SEQ ID NO: 127459 - DNA, 25 bp, SARS Virus
tcgtcacgatattcataatggggat

SEQ ID NO: 127460 - DNA, 25 bp, SARS Virus
cgtcacgatatttataatggggatc

SEQ ID NO: 127461 - DNA, 25 bp, SARS Virus
gtcacgatattcttaatggggatca

SEQ ID NO: 127462 - DNA, 25 bp, SARS Virus
tcacgatattcataatggggatcac

SEQ ID NO: 127463 - DNA, 25 bp, SARS Virus
cacgatattcattatggggatcaca

SEQ ID NO: 127464 - DNA, 25 bp, SARS Virus
acgatattcatattggggatcacaa

SEQ ID NO: 127465 - DNA, 25 bp, SARS Virus
cgatattcataatggggatcacaac

SEQ ID NO: 127466 - DNA, 25 bp, SARS Virus
gatattcataattgggatcacaaca

SEQ ID NO: 127467 - DNA, 25 bp, SARS Virus
atattcataatgtggatcacaacat

SEQ ID NO: 127468 - DNA, 25 bp, SARS Virus
tattcataatggtgatcacaacatg

SEQ ID NO: 127469 - DNA, 25 bp, SARS Virus
attcataatgggtatcacaacatgg

SEQ ID NO: 127470 - DNA, 25 bp, SARS Virus
ttcataatggggttcacaacatgga

SEQ ID NO: 127471 - DNA, 25 bp, SARS Virus
tcataatggggatcacaacatggaa

SEQ ID NO: 127472 - DNA, 25 bp, SARS Virus
cataatggggattacaacatggaat

SEQ ID NO: 127473 - DNA, 25 bp, SARS Virus
ataatggggatctcaacatggaatg

SEQ ID NO: 127474 - DNA, 25 bp, SARS Virus
taatggggatcataacatggaatgt

SEQ ID NO: 127475 - DNA, 25 bp, SARS Virus
aatggggatcactacatggaatgtt

SEQ ID NO: 127476 - DNA, 25 bp, SARS Virus
atggggatcacatcatggaatgttc

SEQ ID NO: 127477 - DNA, 25 bp, SARS Virus
tggggatcacaatatggaatgttcc

SEQ ID NO: 127478 - DNA, 25 bp, SARS Virus
ggggatcacaacttggaatgttcct

SEQ ID NO: 127479 - DNA, 25 bp, SARS Virus
gggatcacaacatggaatgttccta

SEQ ID NO: 127480 - DNA, 25 bp, SARS Virus
ggatcacaacattgaatgttcctag

SEQ ID NO: 127481 - DNA, 25 bp, SARS Virus
gatcacaacatgtaatgttcctaga

SEQ ID NO: 127482 - DNA, 25 bp, SARS Virus
atcacaacatggtatgttcctagaa

SEQ ID NO: 127483 - DNA, 25 bp, SARS Virus
tcacaacatggattgttcctagaag

SEQ ID NO: 127484 - DNA, 25 bp, SARS Virus
cacaacatggaatgttcctagaagt

SEQ ID NO: 127485 - DNA, 25 bp, SARS Virus
acaacatggaattttcctagaagtt

SEQ ID NO: 127486 - DNA, 25 bp, SARS Virus
caacatggaatgttcctagaagttc

SEQ ID NO: 127487 - DNA, 25 bp, SARS Virus
aacatggaatgttcctagaagttcg

SEQ ID NO: 127488 - DNA, 25 bp, SARS Virus
acatggaatgtttctagaagttcgt

SEQ ID NO: 127489 - DNA, 25 bp, SARS Virus
catggaatgttcttagaagttcgtg

SEQ ID NO: 127490 - DNA, 25 bp, SARS Virus
atggaatgttcctagaagttcgtgt

SEQ ID NO: 127491 - DNA, 25 bp, SARS Virus
tggaatgttccttgaagttcgtgta

SEQ ID NO: 127492 - DNA, 25 bp, SARS Virus
ggaatgttcctataagttcgtgtac

SEQ ID NO: 127493 - DNA, 25 bp, SARS Virus
gaatgttcctagtagttcgtgtact

SEQ ID NO: 127494 - DNA, 25 bp, SARS Virus
aatgttcctagatgttcgtgtactc

SEQ ID NO: 127495 - DNA, 25 bp, SARS Virus
atgttcctagaatttcgtgtactcc

SEQ ID NO: 127496 - DNA, 25 bp, SARS Virus
tgttcctagaagttcgtgtactcca

SEQ ID NO: 127497 - DNA, 25 bp, SARS Virus
gttcctagaagttcgtgtactccaa

SEQ ID NO: 127498 - DNA, 25 bp, SARS Virus
ttcctagaagtttgtgtactccaaa

SEQ ID NO: 127499 - DNA, 25 bp, SARS Virus
tcctagaagttcttgtactccaaat

SEQ ID NO: 127500 - DNA, 25 bp, SARS Virus
cctagaagttcgtgtactccaaata

SEQ ID NO: 127501 - DNA, 25 bp, SARS Virus
ctagaagttcgtttactccaaataa

SEQ ID NO: 127502 - DNA, 25 bp, SARS Virus
tagaagttcgtgtactccaaataat

SEQ ID NO: 127503 - DNA, 25 bp, SARS Virus
agaagttcgtgttctccaaataatc

SEQ ID NO: 127504 - DNA, 25 bp, SARS Virus
gaagttcgtgtattccaaataatct

SEQ ID NO: 127505 - DNA, 25 bp, SARS Virus
aagttcgtgtactccaaataatcta

SEQ ID NO: 127506 - DNA, 25 bp, SARS Virus
agttcgtgtacttcaaataatctac

SEQ ID NO: 127507 - DNA, 25 bp, SARS Virus
gttcgtgtactctaaataatctacg

SEQ ID NO: 127508 - DNA, 25 bp, SARS Virus
ttcgtgtactcctaataatctacgt

SEQ ID NO: 127509 - DNA, 25 bp, SARS Virus
tcgtgtactccatataatctacgtg

SEQ ID NO: 127510 - DNA, 25 bp, SARS Virus
cgtgtactccaattaatctacgtgt

SEQ ID NO: 127511 - DNA, 25 bp, SARS Virus
gtgtactccaaataatctacgtgtc

SEQ ID NO: 127512 - DNA, 25 bp, SARS Virus
tgtactccaaattatctacgtgtcg

SEQ ID NO: 127513 - DNA, 25 bp, SARS Virus
gtactccaaatattctacgtgtcgc

SEQ ID NO: 127514 - DNA, 25 bp, SARS Virus
tactccaaataatctacgtgtcgcg

SEQ ID NO: 127515 - DNA, 25 bp, SARS Virus
actccaaataatttacgtgtcgcga

SEQ ID NO: 127516 - DNA, 25 bp, SARS Virus
ctccaaataatctacgtgtcgcgac

SEQ ID NO: 127517 - DNA, 25 bp, SARS Virus
tccaaataatcttcgtgtcgcgaca

SEQ ID NO: 127518 - DNA, 25 bp, SARS Virus
ccaaataatctatgtgtcgcgacat

SEQ ID NO: 127519 - DNA, 25 bp, SARS Virus
caaataatctacttgtcgcgacatg

SEQ ID NO: 127520 - DNA, 25 bp, SARS Virus
aaataatctacgtgtcgcgacatga

SEQ ID NO: 127521 - DNA, 25 bp, SARS Virus
aataatctacgtttcgcgacatgat

SEQ ID NO: 127522 - DNA, 25 bp, SARS Virus
ataatctacgtgtcgcgacatgatg

SEQ ID NO: 127523 - DNA, 25 bp, SARS Virus
taatctacgtgttgcgacatgatgt

SEQ ID NO: 127524 - DNA, 25 bp, SARS Virus
aatctacgtgtctcgacatgatgtc

SEQ ID NO: 127525 - DNA, 25 bp, SARS Virus
atctacgtgtcgtgacatgatgtca

SEQ ID NO: 127526 - DNA, 25 bp, SARS Virus
tctacgtgtcgctacatgatgtcac

SEQ ID NO: 127527 - DNA, 25 bp, SARS Virus
ctacgtgtcgcgtcatgatgtcacg

SEQ ID NO: 127528 - DNA, 25 bp, SARS Virus
tacgtgtcgcgatatgatgtcacgt

SEQ ID NO: 127529 - DNA, 25 bp, SARS Virus
acgtgtcgcgacttgatgtcacgta

SEQ ID NO: 127530 - DNA, 25 bp, SARS Virus
cgtgtcgcgacatgatgtcacgtat

SEQ ID NO: 127531 - DNA, 25 bp, SARS Virus
gtgtcgcgacattatgtcacgtata

SEQ ID NO: 127532 - DNA, 25 bp, SARS Virus
tgtcgcgacatgttgtcacgtatac

SEQ ID NO: 127533 - DNA, 25 bp, SARS Virus
gtcgcgacatgatgtcacgtatacg

SEQ ID NO: 127534 - DNA, 25 bp, SARS Virus
tcgcgacatgatttcacgtatacgt

SEQ ID NO: 127535 - DNA, 25 bp, SARS Virus
cgcgacatgatgtcacgtatacgtt

SEQ ID NO: 127536 - DNA, 25 bp, SARS Virus
gcgacatgatgttacgtatacgttg

SEQ ID NO: 127537 - DNA, 25 bp, SARS Virus
cgacatgatgtctcgtatacgttga

SEQ ID NO: 127538 - DNA, 25 bp, SARS Virus
gacatgatgtcatgtatacgttgac

SEQ ID NO: 127539 - DNA, 25 bp, SARS Virus
acatgatgtcacttatacgttgacg

SEQ ID NO: 127540 - DNA, 25 bp, SARS Virus
catgatgtcacgtatacgttgacgt

SEQ ID NO: 127541 - DNA, 25 bp, SARS Virus
atgatgtcacgtttacgttgacgta

SEQ ID NO: 127542 - DNA, 25 bp, SARS Virus
tgatgtcacgtatacgttgacgtat

SEQ ID NO: 127543 - DNA, 25 bp, SARS Virus
gatgtcacgtattcgttgacgtatc

SEQ ID NO: 127544 - DNA, 25 bp, SARS Virus
atgtcacgtatatgttgacgtatct

SEQ ID NO: 127545 - DNA, 25 bp, SARS Virus
tgtcacgtatactttgacgtatctc

SEQ ID NO: 127546 - DNA, 25 bp, SARS Virus
gtcacgtatacgttgacgtatctct

SEQ ID NO: 127547 - DNA, 25 bp, SARS Virus
tcacgtatacgttgacgtatctctt

SEQ ID NO: 127548 - DNA, 25 bp, SARS Virus
cacgtatacgtttacgtatctcttt

SEQ ID NO: 127549 - DNA, 25 bp, SARS Virus
acgtatacgttgtcgtatctcttta

SEQ ID NO: 127550 - DNA, 25 bp, SARS Virus
cgtatacgttgatgtatctctttat

SEQ ID NO: 127551 - DNA, 25 bp, SARS Virus
gtatacgttgacttatctctttatg

SEQ ID NO: 127552 - DNA, 25 bp, SARS Virus
tatacgttgacgtatctctttatgt

SEQ ID NO: 127553 - DNA, 25 bp, SARS Virus
atacgttgacgtttctctttatgtt

SEQ ID NO: 127554 - DNA, 25 bp, SARS Virus
tacgttgacgtatctctttatgttc

SEQ ID NO: 127555 - DNA, 25 bp, SARS Virus
acgttgacgtatttctttatgttca

SEQ ID NO: 127556 - DNA, 25 bp, SARS Virus
cgttgacgtatctctttatgttcag

SEQ ID NO: 127557 - DNA, 25 bp, SARS Virus
gttgacgtatctttttatgttcagt

SEQ ID NO: 127558 - DNA, 25 bp, SARS Virus
ttgacgtatctctttatgttcagtt

SEQ ID NO: 127559 - DNA, 25 bp, SARS Virus
tgacgtatctctttatgttcagttt

SEQ ID NO: 127560 - DNA, 25 bp, SARS Virus
gacgtatctctttatgttcagtttt

SEQ ID NO: 127561 - DNA, 25 bp, SARS Virus
acgtatctctttttgttcagttttg

SEQ ID NO: 127562 - DNA, 25 bp, SARS Virus
cgtatctctttatgttcagttttgt

SEQ ID NO: 127563 - DNA, 25 bp, SARS Virus
gtatctctttattttcagttttgtt

SEQ ID NO: 127564 - DNA, 25 bp, SARS Virus
tatctctttatgttcagttttgtta

SEQ ID NO: 127565 - DNA, 25 bp, SARS Virus
atctctttatgttcagttttgttac

SEQ ID NO: 127566 - DNA, 25 bp, SARS Virus
tctctttatgtttagttttgttact

SEQ ID NO: 127567 - DNA, 25 bp, SARS Virus
ctctttatgttctgttttgttactc

SEQ ID NO: 127568 - DNA, 25 bp, SARS Virus
tctttatgttcatttttgttactct

SEQ ID NO: 127569 - DNA, 25 bp, SARS Virus
ctttatgttcagttttgttactctt

SEQ ID NO: 127570 - DNA, 25 bp, SARS Virus
tttatgttcagttttgttactcttc

SEQ ID NO: 127571 - DNA, 25 bp, SARS Virus
ttatgttcagttttgttactcttca

SEQ ID NO: 127572 - DNA, 25 bp, SARS Virus
tatgttcagttttgttactcttcaa

SEQ ID NO: 127573 - DNA, 25 bp, SARS Virus
atgttcagtttttttactcttcaaa

SEQ ID NO: 127574 - DNA, 25 bp, SARS Virus
tgttcagttttgttactcttcaaag

SEQ ID NO: 127575 - DNA, 25 bp, SARS Virus
gttcagttttgttactcttcaaagt

SEQ ID NO: 127576 - DNA, 25 bp, SARS Virus
ttcagttttgtttctcttcaaagta

SEQ ID NO: 127577 - DNA, 25 bp, SARS Virus
tcagttttgttattcttcaaagtac

SEQ ID NO: 127578 - DNA, 25 bp, SARS Virus
cagttttgttactcttcaaagtaca

SEQ ID NO: 127579 - DNA, 25 bp, SARS Virus
agttttgttacttttcaaagtacaa

SEQ ID NO: 127580 - DNA, 25 bp, SARS Virus
gttttgttactcttcaaagtacaag

SEQ ID NO: 127581 - DNA, 25 bp, SARS Virus
ttttgttactcttcaaagtacaagc

SEQ ID NO: 127582 - DNA, 25 bp, SARS Virus
tttgttactctttaaagtacaagca

SEQ ID NO: 127583 - DNA, 25 bp, SARS Virus
ttgttactcttctaagtacaagcaa

SEQ ID NO: 127584 - DNA, 25 bp, SARS Virus
tgttactcttcatagtacaagcaaa

SEQ ID NO: 127585 - DNA, 25 bp, SARS Virus
gttactcttcaatgtacaagcaaat

SEQ ID NO: 127586 - DNA, 25 bp, SARS Virus
ttactcttcaaattacaagcaaatc

SEQ ID NO: 127587 - DNA, 25 bp, SARS Virus
tactcttcaaagtacaagcaaatct

SEQ ID NO: 127588 - DNA, 25 bp, SARS Virus
actcttcaaagttcaagcaaatctg

SEQ ID NO: 127589 - DNA, 25 bp, SARS Virus
ctcttcaaagtataagcaaatctga

SEQ ID NO: 127590 - DNA, 25 bp, SARS Virus
tcttcaaagtactagcaaatctgaa

SEQ ID NO: 127591 - DNA, 25 bp, SARS Virus
cttcaaagtacatgcaaatctgaaa

SEQ ID NO: 127592 - DNA, 25 bp, SARS Virus
ttcaaagtacaatcaaatctgaaac

SEQ ID NO: 127593 - DNA, 25 bp, SARS Virus
tcaaagtacaagtaaatctgaaacc

SEQ ID NO: 127594 - DNA, 25 bp, SARS Virus
caaagtacaagctaatctgaaacca

SEQ ID NO: 127595 - DNA, 25 bp, SARS Virus
aaagtacaagcatatctgaaaccat

SEQ ID NO: 127596 - DNA, 25 bp, SARS Virus
aagtacaagcaattctgaaaccatg

SEQ ID NO: 127597 - DNA, 25 bp, SARS Virus
agtacaagcaaatctgaaaccatgt

SEQ ID NO: 127598 - DNA, 25 bp, SARS Virus
gtacaagcaaatttgaaaccatgtt

SEQ ID NO: 127599 - DNA, 25 bp, SARS Virus
tacaagcaaatctgaaaccatgttc

SEQ ID NO: 127600 - DNA, 25 bp, SARS Virus
acaagcaaatcttaaaccatgttcc

SEQ ID NO: 127601 - DNA, 25 bp, SARS Virus
caagcaaatctgtaaccatgttcca

SEQ ID NO: 127602 - DNA, 25 bp, SARS Virus
aagcaaatctgataccatgttccaa

SEQ ID NO: 127603 - DNA, 25 bp, SARS Virus
agcaaatctgaatccatgttccaag

SEQ ID NO: 127604 - DNA, 25 bp, SARS Virus
gcaaatctgaaatcatgttccaaga

SEQ ID NO: 127605 - DNA, 25 bp, SARS Virus
caaatctgaaactatgttccaagaa

SEQ ID NO: 127606 - DNA, 25 bp, SARS Virus
aaatctgaaaccttgttccaagaag

SEQ ID NO: 127607 - DNA, 25 bp, SARS Virus
aatctgaaaccatgttccaagaaga

SEQ ID NO: 127608 - DNA, 25 bp, SARS Virus
atctgaaaccattttccaagaagat

SEQ ID NO: 127609 - DNA, 25 bp, SARS Virus
tctgaaaccatgttccaagaagatc

SEQ ID NO: 127610 - DNA, 25 bp, SARS Virus
ctgaaaccatgttccaagaagatct

SEQ ID NO: 127611 - DNA, 25 bp, SARS Virus
tgaaaccatgtttcaagaagatcta

SEQ ID NO: 127612 - DNA, 25 bp, SARS Virus
gaaaccatgttctaagaagatctag

SEQ ID NO: 127613 - DNA, 25 bp, SARS Virus
aaaccatgttcctagaagatctagg

SEQ ID NO: 127614 - DNA, 25 bp, SARS Virus
aaccatgttccatgaagatctagga

SEQ ID NO: 127615 - DNA, 25 bp, SARS Virus
accatgttccaataagatctaggac

SEQ ID NO: 127616 - DNA, 25 bp, SARS Virus
ccatgttccaagtagatctaggacc

SEQ ID NO: 127617 - DNA, 25 bp, SARS Virus
catgttccaagatgatctaggacct

SEQ ID NO: 127618 - DNA, 25 bp, SARS Virus
atgttccaagaatatctaggaccta

SEQ ID NO: 127619 - DNA, 25 bp, SARS Virus
tgttccaagaagttctaggacctaa

SEQ ID NO: 127620 - DNA, 25 bp, SARS Virus
gttccaagaagatctaggacctaaa

SEQ ID NO: 127621 - DNA, 25 bp, SARS Virus
ttccaagaagatttaggacctaaag

SEQ ID NO: 127622 - DNA, 25 bp, SARS Virus
tccaagaagatctaggacctaaagc

SEQ ID NO: 127623 - DNA, 25 bp, SARS Virus
ccaagaagatcttggacctaaagct

SEQ ID NO: 127624 - DNA, 25 bp, SARS Virus
caagaagatctatgacctaaagctc

SEQ ID NO: 127625 - DNA, 25 bp, SARS Virus
aagaagatctagtacctaaagctca

SEQ ID NO: 127626 - DNA, 25 bp, SARS Virus
agaagatctaggtcctaaagctcac

SEQ ID NO: 127627 - DNA, 25 bp, SARS Virus
gaagatctaggatctaaagctcact

SEQ ID NO: 127628 - DNA, 25 bp, SARS Virus
aagatctaggacttaaagctcactt

SEQ ID NO: 127629 - DNA, 25 bp, SARS Virus
agatctaggacctaaagctcacttt

SEQ ID NO: 127630 - DNA, 25 bp, SARS Virus
gatctaggaccttaagctcactttt

SEQ ID NO: 127631 - DNA, 25 bp, SARS Virus
atctaggacctatagctcacttttg

SEQ ID NO: 127632 - DNA, 25 bp, SARS Virus
tctaggacctaatgctcacttttgg

SEQ ID NO: 127633 - DNA, 25 bp, SARS Virus
ctaggacctaaatctcacttttggt

SEQ ID NO: 127634 - DNA, 25 bp, SARS Virus
taggacctaaagttcacttttggtt

SEQ ID NO: 127635 - DNA, 25 bp, SARS Virus
aggacctaaagctcacttttggttt

SEQ ID NO: 127636 - DNA, 25 bp, SARS Virus
ggacctaaagcttacttttggtttt

SEQ ID NO: 127637 - DNA, 25 bp, SARS Virus
gacctaaagctctcttttggtttta

SEQ ID NO: 127638 - DNA, 25 bp, SARS Virus
acctaaagctcatttttggttttat

SEQ ID NO: 127639 - DNA, 25 bp, SARS Virus
cctaaagctcacttttggttttata

SEQ ID NO: 127640 - DNA, 25 bp, SARS Virus
ctaaagctcacttttggttttatat

SEQ ID NO: 127641 - DNA, 25 bp, SARS Virus
taaagctcacttttggttttatatt

SEQ ID NO: 127642 - DNA, 25 bp, SARS Virus
aaagctcacttttggttttatatta

SEQ ID NO: 127643 - DNA, 25 bp, SARS Virus
aagctcactttttgttttatattat

SEQ ID NO: 127644 - DNA, 25 bp, SARS Virus
agctcacttttgtttttatattatt

SEQ ID NO: 127645 - DNA, 25 bp, SARS Virus
gctcacttttggttttatattattc

SEQ ID NO: 127646 - DNA, 25 bp, SARS Virus
ctcacttttggttttatattattcg

SEQ ID NO: 127647 - DNA, 25 bp, SARS Virus
tcacttttggttttatattattcgt

SEQ ID NO: 127648 - DNA, 25 bp, SARS Virus
cacttttggttttatattattcgta

SEQ ID NO: 127649 - DNA, 25 bp, SARS Virus
acttttggttttttattattcgtaa

SEQ ID NO: 127650 - DNA, 25 bp, SARS Virus
cttttggttttatattattcgtaat

SEQ ID NO: 127651 - DNA, 25 bp, SARS Virus
ttttggttttattttattcgtaata

SEQ ID NO: 127652 - DNA, 25 bp, SARS Virus
tttggttttatattattcgtaataa

SEQ ID NO: 127653 - DNA, 25 bp, SARS Virus
ttggttttatattattcgtaataat

SEQ ID NO: 127654 - DNA, 25 bp, SARS Virus
tggttttatatttttcgtaataatt

SEQ ID NO: 127655 - DNA, 25 bp, SARS Virus
ggttttatattattcgtaataattt

SEQ ID NO: 127656 - DNA, 25 bp, SARS Virus
gttttatattattcgtaataatttt

SEQ ID NO: 127657 - DNA, 25 bp, SARS Virus
ttttatattatttgtaataattttg

SEQ ID NO: 127658 - DNA, 25 bp, SARS Virus
tttatattattcttaataattttgt

SEQ ID NO: 127659 - DNA, 25 bp, SARS Virus
ttatattattcgtaataattttgtt

SEQ ID NO: 127660 - DNA, 25 bp, SARS Virus
tatattattcgttataattttgttc

SEQ ID NO: 127661 - DNA, 25 bp, SARS Virus
atattattcgtattaattttgttcc

SEQ ID NO: 127662 - DNA, 25 bp, SARS Virus
tattattcgtaataattttgttcct

SEQ ID NO: 127663 - DNA, 25 bp, SARS Virus
attattcgtaattattttgttcctt

SEQ ID NO: 127664 - DNA, 25 bp, SARS Virus
ttattcgtaatatttttgttcctta

SEQ ID NO: 127665 - DNA, 25 bp, SARS Virus
tattcgtaataattttgttccttat

SEQ ID NO: 127666 - DNA, 25 bp, SARS Virus
attcgtaataattttgttccttatc

SEQ ID NO: 127667 - DNA, 25 bp, SARS Virus
ttcgtaataattttgttccttatcg

SEQ ID NO: 127668 - DNA, 25 bp, SARS Virus
tcgtaataattttgttccttatcgt

SEQ ID NO: 127669 - DNA, 25 bp, SARS Virus
cgtaataatttttttccttatcgtc

SEQ ID NO: 127670 - DNA, 25 bp, SARS Virus
gtaataattttgttccttatcgtct

SEQ ID NO: 127671 - DNA, 25 bp, SARS Virus
taataattttgttccttatcgtctt

SEQ ID NO: 127672 - DNA, 25 bp, SARS Virus
aataattttgtttcttatcgtcttt

SEQ ID NO: 127673 - DNA, 25 bp, SARS Virus
ataattttgttctttatcgtctttc

SEQ ID NO: 127674 - DNA, 25 bp, SARS Virus
taattttgttccttatcgtctttcc

SEQ ID NO: 127675 - DNA, 25 bp, SARS Virus
aattttgttccttatcgtctttccg

SEQ ID NO: 127676 - DNA, 25 bp, SARS Virus
attttgttccttttcgtctttccga

SEQ ID NO: 127677 - DNA, 25 bp, SARS Virus
ttttgttccttatcgtctttccgat

SEQ ID NO: 127678 - DNA, 25 bp, SARS Virus
tttgttccttattgtctttccgatt

SEQ ID NO: 127679 - DNA, 25 bp, SARS Virus
ttgttccttatcttctttccgattt

SEQ ID NO: 127680 - DNA, 25 bp, SARS Virus
tgttccttatcgtctttccgatttt

SEQ ID NO: 127681 - DNA, 25 bp, SARS Virus
gttccttatcgtttttccgattttt

SEQ ID NO: 127682 - DNA, 25 bp, SARS Virus
ttccttatcgtctttccgatttttc

SEQ ID NO: 127683 - DNA, 25 bp, SARS Virus
tccttatcgtctttccgatttttcg

SEQ ID NO: 127684 - DNA, 25 bp, SARS Virus
ccttatcgtctttccgatttttcgt

SEQ ID NO: 127685 - DNA, 25 bp, SARS Virus
cttatcgtcttttcgatttttcgtg

SEQ ID NO: 127686 - DNA, 25 bp, SARS Virus
ttatcgtctttctgatttttcgtgt

SEQ ID NO: 127687 - DNA, 25 bp, SARS Virus
tatcgtctttcctatttttcgtgtt

SEQ ID NO: 127688 - DNA, 25 bp, SARS Virus
atcgtctttccgttttttcgtgttt

SEQ ID NO: 127689 - DNA, 25 bp, SARS Virus
tcgtctttccgatttttcgtgttta

SEQ ID NO: 127690 - DNA, 25 bp, SARS Virus
cgtctttccgatttttcgtgtttat

SEQ ID NO: 127691 - DNA, 25 bp, SARS Virus
gtctttccgatttttcgtgtttatc

SEQ ID NO: 127692 - DNA, 25 bp, SARS Virus
tctttccgatttttcgtgtttatct

SEQ ID NO: 127693 - DNA, 25 bp, SARS Virus
ctttccgatttttcgtgtttatctt

SEQ ID NO: 127694 - DNA, 25 bp, SARS Virus
tttccgattttttgtgtttatcttc

SEQ ID NO: 127695 - DNA, 25 bp, SARS Virus
ttccgatttttcttgtttatcttca

SEQ ID NO: 127696 - DNA, 25 bp, SARS Virus
tccgatttttcgtgtttatcttcag

SEQ ID NO: 127697 - DNA, 25 bp, SARS Virus
ccgatttttcgtttttatcttcagt

SEQ ID NO: 127698 - DNA, 25 bp, SARS Virus
cgatttttcgtgtttatcttcagtt

SEQ ID NO: 127699 - DNA, 25 bp, SARS Virus
gatttttcgtgtttatcttcagtta

SEQ ID NO: 127700 - DNA, 25 bp, SARS Virus
atttttcgtgtttatcttcagttaa

SEQ ID NO: 127701 - DNA, 25 bp, SARS Virus
tttttcgtgtttttcttcagttaat

SEQ ID NO: 127702 - DNA, 25 bp, SARS Virus
ttttcgtgtttatcttcagttaatt

SEQ ID NO: 127703 - DNA, 25 bp, SARS Virus
tttcgtgtttattttcagttaattt

SEQ ID NO: 127704 - DNA, 25 bp, SARS Virus
ttcgtgtttatcttcagttaatttc

SEQ ID NO: 127705 - DNA, 25 bp, SARS Virus
tcgtgtttatcttcagttaatttca

SEQ ID NO: 127706 - DNA, 25 bp, SARS Virus
cgtgtttatctttagttaatttcac

SEQ ID NO: 127707 - DNA, 25 bp, SARS Virus
gtgtttatcttctgttaatttcact

SEQ ID NO: 127708 - DNA, 25 bp, SARS Virus
tgtttatcttcatttaatttcactc

SEQ ID NO: 127709 - DNA, 25 bp, SARS Virus
gtttatcttcagttaatttcactcg

SEQ ID NO: 127710 - DNA, 25 bp, SARS Virus
tttatcttcagttaatttcactcga

SEQ ID NO: 127711 - DNA, 25 bp, SARS Virus
ttatcttcagtttatttcactcgag

SEQ ID NO: 127712 - DNA, 25 bp, SARS Virus
tatcttcagttattttcactcgagt

SEQ ID NO: 127713 - DNA, 25 bp, SARS Virus
atcttcagttaatttcactcgagta

SEQ ID NO: 127714 - DNA, 25 bp, SARS Virus
tcttcagttaatttcactcgagtaa

SEQ ID NO: 127715 - DNA, 25 bp, SARS Virus
cttcagttaatttcactcgagtaag

SEQ ID NO: 127716 - DNA, 25 bp, SARS Virus
ttcagttaattttactcgagtaagt

SEQ ID NO: 127717 - DNA, 25 bp, SARS Virus
tcagttaatttctctcgagtaagta

SEQ ID NO: 127718 - DNA, 25 bp, SARS Virus
cagttaatttcattcgagtaagtaa

SEQ ID NO: 127719 - DNA, 25 bp, SARS Virus
agttaatttcactcgagtaagtaag

SEQ ID NO: 127720 - DNA, 25 bp, SARS Virus
gttaatttcacttgagtaagtaaga

SEQ ID NO: 127721 - DNA, 25 bp, SARS Virus
ttaatttcactctagtaagtaagac

SEQ ID NO: 127722 - DNA, 25 bp, SARS Virus
taatttcactcgtgtaagtaagaca

SEQ ID NO: 127723 - DNA, 25 bp, SARS Virus
aatttcactcgattaagtaagacag

SEQ ID NO: 127724 - DNA, 25 bp, SARS Virus
atttcactcgagtaagtaagacaga

SEQ ID NO: 127725 - DNA, 25 bp, SARS Virus
tttcactcgagttagtaagacagaa

SEQ ID NO: 127726 - DNA, 25 bp, SARS Virus
ttcactcgagtatgtaagacagaaa

SEQ ID NO: 127727 - DNA, 25 bp, SARS Virus
tcactcgagtaattaagacagaaag

SEQ ID NO: 127728 - DNA, 25 bp, SARS Virus
cactcgagtaagtaagacagaaaga

SEQ ID NO: 127729 - DNA, 25 bp, SARS Virus
actcgagtaagttagacagaaagag

SEQ ID NO: 127730 - DNA, 25 bp, SARS Virus
ctcgagtaagtatgacagaaagaga

SEQ ID NO: 127731 - DNA, 25 bp, SARS Virus
tcgagtaagtaatacagaaagagaa

SEQ ID NO: 127732 - DNA, 25 bp, SARS Virus
cgagtaagtaagtcagaaagagaat

SEQ ID NO: 127733 - DNA, 25 bp, SARS Virus
gagtaagtaagatagaaagagaatt

SEQ ID NO: 127734 - DNA, 25 bp, SARS Virus
agtaagtaagactgaaagagaatta

SEQ ID NO: 127735 - DNA, 25 bp, SARS Virus
gtaagtaagacataaagagaattac

SEQ ID NO: 127736 - DNA, 25 bp, SARS Virus
taagtaagacagtaagagaattacc

SEQ ID NO: 127737 - DNA, 25 bp, SARS Virus
aagtaagacagatagagaattacca

SEQ ID NO: 127738 - DNA, 25 bp, SARS Virus
agtaagacagaatgagaattaccac

SEQ ID NO: 127739 - DNA, 25 bp, SARS Virus
gtaagacagaaatagaattaccact

SEQ ID NO: 127740 - DNA, 25 bp, SARS Virus
taagacagaaagtgaattaccactt

SEQ ID NO: 127741 - DNA, 25 bp, SARS Virus
aagacagaaagataattaccacttc

SEQ ID NO: 127742 - DNA, 25 bp, SARS Virus
agacagaaagagtattaccacttcg

SEQ ID NO: 127743 - DNA, 25 bp, SARS Virus
gacagaaagagatttaccacttcgt

SEQ ID NO: 127744 - DNA, 25 bp, SARS Virus
acagaaagagaattaccacttcgtt

SEQ ID NO: 127745 - DNA, 25 bp, SARS Virus
cagaaagagaattaccacttcgttt

SEQ ID NO: 127746 - DNA, 25 bp, SARS Virus
agaaagagaatttccacttcgtttc

SEQ ID NO: 127747 - DNA, 25 bp, SARS Virus
gaaagagaattatcacttcgtttca

SEQ ID NO: 127748 - DNA, 25 bp, SARS Virus
aaagagaattactacttcgtttcat

SEQ ID NO: 127749 - DNA, 25 bp, SARS Virus
aagagaattacctcttcgtttcata

SEQ ID NO: 127750 - DNA, 25 bp, SARS Virus
agagaattaccatttcgtttcataa

SEQ ID NO: 127751 - DNA, 25 bp, SARS Virus
gagaattaccacttcgtttcataat

SEQ ID NO: 127752 - DNA, 25 bp, SARS Virus
agaattaccacttcgtttcataatt

SEQ ID NO: 127753 - DNA, 25 bp, SARS Virus
gaattaccactttgtttcataattt

SEQ ID NO: 127754 - DNA, 25 bp, SARS Virus
aattaccacttcttttcataatttt

SEQ ID NO: 127755 - DNA, 25 bp, SARS Virus
attaccacttcgtttcataattttt

SEQ ID NO: 127756 - DNA, 25 bp, SARS Virus
ttaccacttcgtttcataattttta

SEQ ID NO: 127757 - DNA, 25 bp, SARS Virus
taccacttcgtttcataatttttat

SEQ ID NO: 127758 - DNA, 25 bp, SARS Virus
accacttcgttttataatttttatg

SEQ ID NO: 127759 - DNA, 25 bp, SARS Virus
ccacttcgtttcttaatttttatga

SEQ ID NO: 127760 - DNA, 25 bp, SARS Virus
cacttcgtttcataatttttatgat

SEQ ID NO: 127761 - DNA, 25 bp, SARS Virus
acttcgtttcattatttttatgatc

SEQ ID NO: 127762 - DNA, 25 bp, SARS Virus
cttcgtttcatattttttatgatct

SEQ ID NO: 127763 - DNA, 25 bp, SARS Virus
ttcgtttcataatttttatgatctc

SEQ ID NO: 127764 - DNA, 25 bp, SARS Virus
tcgtttcataatttttatgatctcg

SEQ ID NO: 127765 - DNA, 25 bp, SARS Virus
cgtttcataatttttatgatctcgt

SEQ ID NO: 127766 - DNA, 25 bp, SARS Virus
gtttcataatttttatgatctcgtc

SEQ ID NO: 127767 - DNA, 25 bp, SARS Virus
tttcataatttttatgatctcgtcg

SEQ ID NO: 127768 - DNA, 25 bp, SARS Virus
ttcataatttttttgatctcgtcgt

SEQ ID NO: 127769 - DNA, 25 bp, SARS Virus
tcataatttttatgatctcgtcgtt

SEQ ID NO: 127770 - DNA, 25 bp, SARS Virus
cataatttttattatctcgtcgttg

SEQ ID NO: 127771 - DNA, 25 bp, SARS Virus
ataatttttatgttctcgtcgttgt

SEQ ID NO: 127772 - DNA, 25 bp, SARS Virus
taatttttatgatctcgtcgttgtt

SEQ ID NO: 127773 - DNA, 25 bp, SARS Virus
aatttttatgatttcgtcgttgtta

SEQ ID NO: 127774 - DNA, 25 bp, SARS Virus
atttttatgatctcgtcgttgttac

SEQ ID NO: 127775 - DNA, 25 bp, SARS Virus
tttttatgatcttgtcgttgttact

SEQ ID NO: 127776 - DNA, 25 bp, SARS Virus
ttttatgatctcttcgttgttactc

SEQ ID NO: 127777 - DNA, 25 bp, SARS Virus
tttatgatctcgtcgttgttactct

SEQ ID NO: 127778 - DNA, 25 bp, SARS Virus
ttatgatctcgttgttgttactctt

SEQ ID NO: 127779 - DNA, 25 bp, SARS Virus
tatgatctcgtctttgttactcttt

SEQ ID NO: 127780 - DNA, 25 bp, SARS Virus
atgatctcgtcgttgttactctttt

SEQ ID NO: 127781 - DNA, 25 bp, SARS Virus
tgatctcgtcgttgttactcttttt

SEQ ID NO: 127782 - DNA, 25 bp, SARS Virus
gatctcgtcgtttttactctttttc

SEQ ID NO: 127783 - DNA, 25 bp, SARS Virus
atctcgtcgttgttactctttttca

SEQ ID NO: 127784 - DNA, 25 bp, SARS Virus
tctcgtcgttgttactctttttcac

SEQ ID NO: 127785 - DNA, 25 bp, SARS Virus
ctcgtcgttgtttctctttttcacc

SEQ ID NO: 127786 - DNA, 25 bp, SARS Virus
tcgtcgttgttattctttttcaccg

SEQ ID NO: 127787 - DNA, 25 bp, SARS Virus
cgtcgttgttactctttttcaccgc

SEQ ID NO: 127788 - DNA, 25 bp, SARS Virus
gtcgttgttactttttttcaccgct

SEQ ID NO: 127789 - DNA, 25 bp, SARS Virus
tcgttgttactctttttcaccgctc

SEQ ID NO: 127790 - DNA, 25 bp, SARS Virus
cgttgttactctttttcaccgctca

SEQ ID NO: 127791 - DNA, 25 bp, SARS Virus
gttgttactctttttcaccgctcat

SEQ ID NO: 127792 - DNA, 25 bp, SARS Virus
ttgttactctttttcaccgctcatc

SEQ ID NO: 127793 - DNA, 25 bp, SARS Virus
tgttactctttttcaccgctcatct

SEQ ID NO: 127794 - DNA, 25 bp, SARS Virus
gttactcttttttaccgctcatctc

SEQ ID NO: 127795 - DNA, 25 bp, SARS Virus
ttactctttttctccgctcatctcg

SEQ ID NO: 127796 - DNA, 25 bp, SARS Virus
tactctttttcatcgctcatctcga

SEQ ID NO: 127797 - DNA, 25 bp, SARS Virus
actctttttcactgctcatctcgag

SEQ ID NO: 127798 - DNA, 25 bp, SARS Virus
ctctttttcacctctcatctcgaga

SEQ ID NO: 127799 - DNA, 25 bp, SARS Virus
tctttttcaccgttcatctcgagaa

SEQ ID NO: 127800 - DNA, 25 bp, SARS Virus
ctttttcaccgctcatctcgagaac

SEQ ID NO: 127801 - DNA, 25 bp, SARS Virus
tttttcaccgcttatctcgagaaca

SEQ ID NO: 127802 - DNA, 25 bp, SARS Virus
ttttcaccgctcttctcgagaacaa

SEQ ID NO: 127803 - DNA, 25 bp, SARS Virus
tttcaccgctcatctcgagaacaac

SEQ ID NO: 127804 - DNA, 25 bp, SARS Virus
ttcaccgctcatttcgagaacaact

SEQ ID NO: 127805 - DNA, 25 bp, SARS Virus
tcaccgctcatctcgagaacaactt

SEQ ID NO: 127806 - DNA, 25 bp, SARS Virus
caccgctcatcttgagaacaacttg

SEQ ID NO: 127807 - DNA, 25 bp, SARS Virus
accgctcatctctagaacaacttgg

SEQ ID NO: 127808 - DNA, 25 bp, SARS Virus
ccgctcatctcgtgaacaacttgga

SEQ ID NO: 127809 - DNA, 25 bp, SARS Virus
cgctcatctcgataacaacttggag

SEQ ID NO: 127810 - DNA, 25 bp, SARS Virus
gctcatctcgagtacaacttggagg

SEQ ID NO: 127811 - DNA, 25 bp, SARS Virus
ctcatctcgagatcaacttggagga

SEQ ID NO: 127812 - DNA, 25 bp, SARS Virus
tcatctcgagaataacttggaggag

SEQ ID NO: 127813 - DNA, 25 bp, SARS Virus
catctcgagaactacttggaggaga

SEQ ID NO: 127814 - DNA, 25 bp, SARS Virus
atctcgagaacatcttggaggagaa

SEQ ID NO: 127815 - DNA, 25 bp, SARS Virus
tctcgagaacaatttggaggagaac

SEQ ID NO: 127816 - DNA, 25 bp, SARS Virus
ctcgagaacaacttggaggagaaca

SEQ ID NO: 127817 - DNA, 25 bp, SARS Virus
tcgagaacaacttggaggagaacag

SEQ ID NO: 127818 - DNA, 25 bp, SARS Virus
cgagaacaactttgaggagaacaga

SEQ ID NO: 127819 - DNA, 25 bp, SARS Virus
gagaacaacttgtaggagaacagac

SEQ ID NO: 127820 - DNA, 25 bp, SARS Virus
agaacaacttggtggagaacagact

SEQ ID NO: 127821 - DNA, 25 bp, SARS Virus
gaacaacttggatgagaacagacta

SEQ ID NO: 127822 - DNA, 25 bp, SARS Virus
aacaacttggagtagaacagactac

SEQ ID NO: 127823 - DNA, 25 bp, SARS Virus
acaacttggaggtgaacagactact

SEQ ID NO: 127824 - DNA, 25 bp, SARS Virus
caacttggaggataacagactactt

SEQ ID NO: 127825 - DNA, 25 bp, SARS Virus
aacttggaggagtacagactacttt

SEQ ID NO: 127826 - DNA, 25 bp, SARS Virus
acttggaggagatcagactactttt

SEQ ID NO: 127827 - DNA, 25 bp, SARS Virus
cttggaggagaatagactacttttc

SEQ ID NO: 127828 - DNA, 25 bp, SARS Virus
ttggaggagaactgactacttttca

SEQ ID NO: 127829 - DNA, 25 bp, SARS Virus
tggaggagaacatactacttttcaa

SEQ ID NO: 127830 - DNA, 25 bp, SARS Virus
ggaggagaacagtctacttttcaaa

SEQ ID NO: 127831 - DNA, 25 bp, SARS Virus
gaggagaacagattacttttcaaaa

SEQ ID NO: 127832 - DNA, 25 bp, SARS Virus
aggagaacagactacttttcaaaac

SEQ ID NO: 127833 - DNA, 25 bp, SARS Virus
ggagaacagacttcttttcaaaacc

SEQ ID NO: 127834 - DNA, 25 bp, SARS Virus
gagaacagactatttttcaaaacca

SEQ ID NO: 127835 - DNA, 25 bp, SARS Virus
agaacagactacttttcaaaaccac

SEQ ID NO: 127836 - DNA, 25 bp, SARS Virus
gaacagactacttttcaaaaccact

SEQ ID NO: 127837 - DNA, 25 bp, SARS Virus
aacagactacttttcaaaaccactt

SEQ ID NO: 127838 - DNA, 25 bp, SARS Virus
acagactacttttcaaaaccacttt

SEQ ID NO: 127839 - DNA, 25 bp, SARS Virus
cagactactttttaaaaccactttg

SEQ ID NO: 127840 - DNA, 25 bp, SARS Virus
agactacttttctaaaccactttga

SEQ ID NO: 127841 - DNA, 25 bp, SARS Virus
gactacttttcataaccactttgac

SEQ ID NO: 127842 - DNA, 25 bp, SARS Virus
actacttttcaataccactttgact

SEQ ID NO: 127843 - DNA, 25 bp, SARS Virus
ctacttttcaaatccactttgacta

SEQ ID NO: 127844 - DNA, 25 bp, SARS Virus
tacttttcaaaatcactttgactag

SEQ ID NO: 127845 - DNA, 25 bp, SARS Virus
acttttcaaaactactttgactaga

SEQ ID NO: 127846 - DNA, 25 bp, SARS Virus
cttttcaaaacctctttgactagaa

SEQ ID NO: 127847 - DNA, 25 bp, SARS Virus
ttttcaaaaccattttgactagaac

SEQ ID NO: 127848 - DNA, 25 bp, SARS Virus
tttcaaaaccactttgactagaacg

SEQ ID NO: 127849 - DNA, 25 bp, SARS Virus
ttcaaaaccactttgactagaacgt

SEQ ID NO: 127850 - DNA, 25 bp, SARS Virus
tcaaaaccactttgactagaacgtg

SEQ ID NO: 127851 - DNA, 25 bp, SARS Virus
caaaaccacttttactagaacgtgc

SEQ ID NO: 127852 - DNA, 25 bp, SARS Virus
aaaaccactttgtctagaacgtgcg

SEQ ID NO: 127853 - DNA, 25 bp, SARS Virus
aaaccactttgattagaacgtgcgt

SEQ ID NO: 127854 - DNA, 25 bp, SARS Virus
aaccactttgactagaacgtgcgtc

SEQ ID NO: 127855 - DNA, 25 bp, SARS Virus
accactttgacttgaacgtgcgtcg

SEQ ID NO: 127856 - DNA, 25 bp, SARS Virus
ccactttgactataacgtgcgtcga

SEQ ID NO: 127857 - DNA, 25 bp, SARS Virus
cactttgactagtacgtgcgtcgac

SEQ ID NO: 127858 - DNA, 25 bp, SARS Virus
actttgactagatcgtgcgtcgact

SEQ ID NO: 127859 - DNA, 25 bp, SARS Virus
ctttgactagaatgtgcgtcgacta

SEQ ID NO: 127860 - DNA, 25 bp, SARS Virus
tttgactagaacttgcgtcgactat

SEQ ID NO: 127861 - DNA, 25 bp, SARS Virus
ttgactagaacgtgcgtcgactatc

SEQ ID NO: 127862 - DNA, 25 bp, SARS Virus
tgactagaacgttcgtcgactatcc

SEQ ID NO: 127863 - DNA, 25 bp, SARS Virus
gactagaacgtgtgtcgactatcca

SEQ ID NO: 127864 - DNA, 25 bp, SARS Virus
actagaacgtgcttcgactatccat

SEQ ID NO: 127865 - DNA, 25 bp, SARS Virus
ctagaacgtgcgtcgactatccata

SEQ ID NO: 127866 - DNA, 25 bp, SARS Virus
tagaacgtgcgttgactatccatac

SEQ ID NO: 127867 - DNA, 25 bp, SARS Virus
agaacgtgcgtctactatccataca

SEQ ID NO: 127868 - DNA, 25 bp, SARS Virus
gaacgtgcgtcgtctatccatacag

SEQ ID NO: 127869 - DNA, 25 bp, SARS Virus
aacgtgcgtcgattatccatacagc

SEQ ID NO: 127870 - DNA, 25 bp, SARS Virus
acgtgcgtcgactatccatacagct

SEQ ID NO: 127871 - DNA, 25 bp, SARS Virus
cgtgcgtcgactttccatacagctc

SEQ ID NO: 127872 - DNA, 25 bp, SARS Virus
gtgcgtcgactatccatacagctca

SEQ ID NO: 127873 - DNA, 25 bp, SARS Virus
tgcgtcgactattcatacagctcat

SEQ ID NO: 127874 - DNA, 25 bp, SARS Virus
gcgtcgactatctatacagctcatg

SEQ ID NO: 127875 - DNA, 25 bp, SARS Virus
cgtcgactatccttacagctcatgg

SEQ ID NO: 127876 - DNA, 25 bp, SARS Virus
gtcgactatccatacagctcatggc

SEQ ID NO: 127877 - DNA, 25 bp, SARS Virus
tcgactatccattcagctcatggca

SEQ ID NO: 127878 - DNA, 25 bp, SARS Virus
cgactatccatatagctcatggcag

SEQ ID NO: 127879 - DNA, 25 bp, SARS Virus
gactatccatactgctcatggcagt

SEQ ID NO: 127880 - DNA, 25 bp, SARS Virus
actatccatacatctcatggcagtc

SEQ ID NO: 127881 - DNA, 25 bp, SARS Virus
ctatccatacagttcatggcagtcg

SEQ ID NO: 127882 - DNA, 25 bp, SARS Virus
tatccatacagctcatggcagtcgt

SEQ ID NO: 127883 - DNA, 25 bp, SARS Virus
atccatacagcttatggcagtcgtg

SEQ ID NO: 127884 - DNA, 25 bp, SARS Virus
tccatacagctcttggcagtcgtgt

SEQ ID NO: 127885 - DNA, 25 bp, SARS Virus
ccatacagctcatggcagtcgtgtt

SEQ ID NO: 127886 - DNA, 25 bp, SARS Virus
catacagctcattgcagtcgtgttc

SEQ ID NO: 127887 - DNA, 25 bp, SARS Virus
atacagctcatgtcagtcgtgttcg

SEQ ID NO: 127888 - DNA, 25 bp, SARS Virus
tacagctcatggtagtcgtgttcgt

SEQ ID NO: 127889 - DNA, 25 bp, SARS Virus
acagctcatggcagtcgtgttcgtt

SEQ ID NO: 127890 - DNA, 25 bp, SARS Virus
cagctcatggcaatcgtgttcgttt

SEQ ID NO: 127891 - DNA, 25 bp, SARS Virus
agctcatggcagacgtgttcgtttt

SEQ ID NO: 127892 - DNA, 25 bp, SARS Virus
gctcatggcagtagtgttcgttttc

SEQ ID NO: 127893 - DNA, 25 bp, SARS Virus
ctcatggcagtcatgttcgttttcg

SEQ ID NO: 127894 - DNA, 25 bp, SARS Virus
tcatggcagtcgagttcgttttcgt

SEQ ID NO: 127895 - DNA, 25 bp, SARS Virus
catggcagtcgtattcgttttcgtt

SEQ ID NO: 127896 - DNA, 25 bp, SARS Virus
atggcagtcgtgatcgttttcgttt

SEQ ID NO: 127897 - DNA, 25 bp, SARS Virus
tggcagtcgtgtacgttttcgtttc

SEQ ID NO: 127898 - DNA, 25 bp, SARS Virus
ggcagtcgtgttagttttcgtttca

SEQ ID NO: 127899 - DNA, 25 bp, SARS Virus
gcagtcgtgttcattttcgtttcac

SEQ ID NO: 127900 - DNA, 25 bp, SARS Virus
cagtcgtgttcgatttcgtttcaca

SEQ ID NO: 127901 - DNA, 25 bp, SARS Virus
agtcgtgttcgtattcgtttcacac

SEQ ID NO: 127902 - DNA, 25 bp, SARS Virus
gtcgtgttcgttatcgtttcacaca

SEQ ID NO: 127903 - DNA, 25 bp, SARS Virus
tcgtgttcgtttacgtttcacacac

SEQ ID NO: 127904 - DNA, 25 bp, SARS Virus
cgtgttcgttttagtttcacacacg

SEQ ID NO: 127905 - DNA, 25 bp, SARS Virus
gtgttcgttttcatttcacacacga

SEQ ID NO: 127906 - DNA, 25 bp, SARS Virus
tgttcgttttcgattcacacacgat

SEQ ID NO: 127907 - DNA, 25 bp, SARS Virus
gttcgttttcgtatcacacacgatc

SEQ ID NO: 127908 - DNA, 25 bp, SARS Virus
ttcgttttcgttacacacacgatca

SEQ ID NO: 127909 - DNA, 25 bp, SARS Virus
tcgttttcgtttaacacacgatcac

SEQ ID NO: 127910 - DNA, 25 bp, SARS Virus
cgttttcgtttcacacacgatcacg

SEQ ID NO: 127911 - DNA, 25 bp, SARS Virus
gttttcgtttcaaacacgatcacgt

SEQ ID NO: 127912 - DNA, 25 bp, SARS Virus
ttttcgtttcacacacgatcacgtt

SEQ ID NO: 127913 - DNA, 25 bp, SARS Virus
tttcgtttcacaaacgatcacgttc

SEQ ID NO: 127914 - DNA, 25 bp, SARS Virus
ttcgtttcacacacgatcacgttca

SEQ ID NO: 127915 - DNA, 25 bp, SARS Virus
tcgtttcacacaagatcacgttcaa

SEQ ID NO: 127916 - DNA, 25 bp, SARS Virus
cgtttcacacacaatcacgttcaat

SEQ ID NO: 127917 - DNA, 25 bp, SARS Virus
gtttcacacacgatcacgttcaatc

SEQ ID NO: 127918 - DNA, 25 bp, SARS Virus
tttcacacacgaacacgttcaatca

SEQ ID NO: 127919 - DNA, 25 bp, SARS Virus
ttcacacacgataacgttcaatcac

SEQ ID NO: 127920 - DNA, 25 bp, SARS Virus
tcacacacgatcacgttcaatcacg

SEQ ID NO: 127921 - DNA, 25 bp, SARS Virus
cacacacgatcaagttcaatcacgt

SEQ ID NO: 127922 - DNA, 25 bp, SARS Virus
acacacgatcacattcaatcacgtt

SEQ ID NO: 127923 - DNA, 25 bp, SARS Virus
cacacgatcacgatcaatcacgttt

SEQ ID NO: 127924 - DNA, 25 bp, SARS Virus
acacgatcacgtacaatcacgttta

SEQ ID NO: 127925 - DNA, 25 bp, SARS Virus
cacgatcacgttaaatcacgtttaa

SEQ ID NO: 127926 - DNA, 25 bp, SARS Virus
acgatcacgttcaatcacgtttaaa

SEQ ID NO: 127927 - DNA, 25 bp, SARS Virus
cgatcacgttcaatcacgtttaaat

SEQ ID NO: 127928 - DNA, 25 bp, SARS Virus
gatcacgttcaaacacgtttaaata

SEQ ID NO: 127929 - DNA, 25 bp, SARS Virus
atcacgttcaataacgtttaaataa

SEQ ID NO: 127930 - DNA, 25 bp, SARS Virus
tcacgttcaatcacgtttaaataac

SEQ ID NO: 127931 - DNA, 25 bp, SARS Virus
cacgttcaatcaagtttaaataaca

SEQ ID NO: 127932 - DNA, 25 bp, SARS Virus
acgttcaatcacatttaaataacag

SEQ ID NO: 127933 - DNA, 25 bp, SARS Virus
cgttcaatcacgattaaataacagt

SEQ ID NO: 127934 - DNA, 25 bp, SARS Virus
gttcaatcacgtataaataacagtc

SEQ ID NO: 127935 - DNA, 25 bp, SARS Virus
ttcaatcacgttaaaataacagtcg

SEQ ID NO: 127936 - DNA, 25 bp, SARS Virus
tcaatcacgtttaaataacagtcgt

SEQ ID NO: 127937 - DNA, 25 bp, SARS Virus
caatcacgtttaaataacagtcgtt

SEQ ID NO: 127938 - DNA, 25 bp, SARS Virus
aatcacgtttaaataacagtcgttc

SEQ ID NO: 127939 - DNA, 25 bp, SARS Virus
atcacgtttaaaaaacagtcgttct

SEQ ID NO: 127940 - DNA, 25 bp, SARS Virus
tcacgtttaaataacagtcgttctc

SEQ ID NO: 127941 - DNA, 25 bp, SARS Virus
cacgtttaaataacagtcgttctcc

SEQ ID NO: 127942 - DNA, 25 bp, SARS Virus
acgtttaaataaaagtcgttctccc

SEQ ID NO: 127943 - DNA, 25 bp, SARS Virus
cgtttaaataacagtcgttctccca

SEQ ID NO: 127944 - DNA, 25 bp, SARS Virus
gtttaaataacaatcgttctcccac

SEQ ID NO: 127945 - DNA, 25 bp, SARS Virus
tttaaataacagacgttctcccact

SEQ ID NO: 127946 - DNA, 25 bp, SARS Virus
ttaaataacagtagttctcccactt

SEQ ID NO: 127947 - DNA, 25 bp, SARS Virus
taaataacagtcattctcccacttt

SEQ ID NO: 127948 - DNA, 25 bp, SARS Virus
aaataacagtcgatctcccacttta

SEQ ID NO: 127949 - DNA, 25 bp, SARS Virus
aataacagtcgtactcccactttac

SEQ ID NO: 127950 - DNA, 25 bp, SARS Virus
ataacagtcgttatcccactttacc

SEQ ID NO: 127951 - DNA, 25 bp, SARS Virus
taacagtcgttcacccactttacca

SEQ ID NO: 127952 - DNA, 25 bp, SARS Virus
aacagtcgttctaccactttaccac

SEQ ID NO: 127953 - DNA, 25 bp, SARS Virus
acagtcgttctcacactttaccact

SEQ ID NO: 127954 - DNA, 25 bp, SARS Virus
cagtcgttctccaactttaccactt

SEQ ID NO: 127955 - DNA, 25 bp, SARS Virus
agtcgttctcccactttaccactta

SEQ ID NO: 127956 - DNA, 25 bp, SARS Virus
gtcgttctcccaatttaccacttaa

SEQ ID NO: 127957 - DNA, 25 bp, SARS Virus
tcgttctcccacattaccacttaac

SEQ ID NO: 127958 - DNA, 25 bp, SARS Virus
cgttctcccactataccacttaacg

SEQ ID NO: 127959 - DNA, 25 bp, SARS Virus
gttctcccacttaaccacttaacgg

SEQ ID NO: 127960 - DNA, 25 bp, SARS Virus
ttctcccactttaccacttaacggg

SEQ ID NO: 127961 - DNA, 25 bp, SARS Virus
tctcccactttaacacttaacggga

SEQ ID NO: 127962 - DNA, 25 bp, SARS Virus
ctcccactttacaacttaacgggag

SEQ ID NO: 127963 - DNA, 25 bp, SARS Virus
tcccactttaccacttaacgggagc

SEQ ID NO: 127964 - DNA, 25 bp, SARS Virus
cccactttaccaattaacgggagca

SEQ ID NO: 127965 - DNA, 25 bp, SARS Virus
ccactttaccacataacgggagcat

SEQ ID NO: 127966 - DNA, 25 bp, SARS Virus
cactttaccactaaacgggagcata

SEQ ID NO: 127967 - DNA, 25 bp, SARS Virus
actttaccacttaacgggagcatac

SEQ ID NO: 127968 - DNA, 25 bp, SARS Virus
ctttaccacttaacgggagcataca

SEQ ID NO: 127969 - DNA, 25 bp, SARS Virus
tttaccacttaaagggagcatacaa

SEQ ID NO: 127970 - DNA, 25 bp, SARS Virus
ttaccacttaacaggagcatacaag

SEQ ID NO: 127971 - DNA, 25 bp, SARS Virus
taccacttaacgagagcatacaagg

SEQ ID NO: 127972 - DNA, 25 bp, SARS Virus
accacttaacggaagcatacaagga

SEQ ID NO: 127973 - DNA, 25 bp, SARS Virus
ccacttaacgggagcatacaaggac

SEQ ID NO: 127974 - DNA, 25 bp, SARS Virus
cacttaacgggaacatacaaggact

SEQ ID NO: 127975 - DNA, 25 bp, SARS Virus
acttaacgggagaatacaaggacta

SEQ ID NO: 127976 - DNA, 25 bp, SARS Virus
cttaacgggagcatacaaggactac

SEQ ID NO: 127977 - DNA, 25 bp, SARS Virus
ttaacgggagcaaacaaggactacc

SEQ ID NO: 127978 - DNA, 25 bp, SARS Virus
taacgggagcatacaaggactaccc

SEQ ID NO: 127979 - DNA, 25 bp, SARS Virus
aacgggagcataaaaggactacccg

SEQ ID NO: 127980 - DNA, 25 bp, SARS Virus
acgggagcatacaaggactacccgt

SEQ ID NO: 127981 - DNA, 25 bp, SARS Virus
cgggagcatacaaggactacccgtt

SEQ ID NO: 127982 - DNA, 25 bp, SARS Virus
gggagcatacaaagactacccgttc

SEQ ID NO: 127983 - DNA, 25 bp, SARS Virus
ggagcatacaagaactacccgttcc

SEQ ID NO: 127984 - DNA, 25 bp, SARS Virus
gagcatacaaggactacccgttcca

SEQ ID NO: 127985 - DNA, 25 bp, SARS Virus
agcatacaaggaatacccgttccaa

SEQ ID NO: 127986 - DNA, 25 bp, SARS Virus
gcatacaaggacaacccgttccaag

SEQ ID NO: 127987 - DNA, 25 bp, SARS Virus
catacaaggactacccgttccaaga

SEQ ID NO: 127988 - DNA, 25 bp, SARS Virus
atacaaggactaaccgttccaagaa

SEQ ID NO: 127989 - DNA, 25 bp, SARS Virus
tacaaggactacacgttccaagaaa

SEQ ID NO: 127990 - DNA, 25 bp, SARS Virus
acaaggactaccagttccaagaaaa

SEQ ID NO: 127991 - DNA, 25 bp, SARS Virus
caaggactacccattccaagaaaat

SEQ ID NO: 127992 - DNA, 25 bp, SARS Virus
aaggactacccgatccaagaaaatc

SEQ ID NO: 127993 - DNA, 25 bp, SARS Virus
aggactacccgtaccaagaaaatca

SEQ ID NO: 127994 - DNA, 25 bp, SARS Virus
ggactacccgttacaagaaaatcat

SEQ ID NO: 127995 - DNA, 25 bp, SARS Virus
gactacccgttcaaagaaaatcatc

SEQ ID NO: 127996 - DNA, 25 bp, SARS Virus
actacccgttccaagaaaatcatca

SEQ ID NO: 127997 - DNA, 25 bp, SARS Virus
ctacccgttccaagaaaatcatcat

SEQ ID NO: 127998 - DNA, 25 bp, SARS Virus
tacccgttccaaaaaaatcatcatg

SEQ ID NO: 127999 - DNA, 25 bp, SARS Virus
acccgttccaagaaaatcatcatgt

SEQ ID NO: 128000 - DNA, 25 bp, SARS Virus
cccgttccaagaaaatcatcatgtc

SEQ ID NO: 128001 - DNA, 25 bp, SARS Virus
ccgttccaagaaaatcatcatgtca

SEQ ID NO: 128002 - DNA, 25 bp, SARS Virus
cgttccaagaaaatcatcatgtcag

SEQ ID NO: 128003 - DNA, 25 bp, SARS Virus
gttccaagaaaaacatcatgtcagc

SEQ ID NO: 128004 - DNA, 25 bp, SARS Virus
ttccaagaaaataatcatgtcagca

SEQ ID NO: 128005 - DNA, 25 bp, SARS Virus
tccaagaaaatcatcatgtcagcat

SEQ ID NO: 128006 - DNA, 25 bp, SARS Virus
ccaagaaaatcaacatgtcagcatg

SEQ ID NO: 128007 - DNA, 25 bp, SARS Virus
caagaaaatcataatgtcagcatgg

SEQ ID NO: 128008 - DNA, 25 bp, SARS Virus
aagaaaatcatcatgtcagcatgga

SEQ ID NO: 128009 - DNA, 25 bp, SARS Virus
agaaaatcatcaagtcagcatggag

SEQ ID NO: 128010 - DNA, 25 bp, SARS Virus
gaaaatcatcatatcagcatggaga

SEQ ID NO: 128011 - DNA, 25 bp, SARS Virus
aaaatcatcatgacagcatggagat

SEQ ID NO: 128012 - DNA, 25 bp, SARS Virus
aaatcatcatgtaagcatggagatt

SEQ ID NO: 128013 - DNA, 25 bp, SARS Virus
aatcatcatgtcagcatggagattg

SEQ ID NO: 128014 - DNA, 25 bp, SARS Virus
atcatcatgtcaacatggagattgt

SEQ ID NO: 128015 - DNA, 25 bp, SARS Virus
tcatcatgtcagaatggagattgtg

SEQ ID NO: 128016 - DNA, 25 bp, SARS Virus
catcatgtcagcatggagattgtgt

SEQ ID NO: 128017 - DNA, 25 bp, SARS Virus
atcatgtcagcaaggagattgtgtg

SEQ ID NO: 128018 - DNA, 25 bp, SARS Virus
tcatgtcagcatagagattgtgtga

SEQ ID NO: 128019 - DNA, 25 bp, SARS Virus
catgtcagcatgaagattgtgtgag

SEQ ID NO: 128020 - DNA, 25 bp, SARS Virus
atgtcagcatggagattgtgtgagg

SEQ ID NO: 128021 - DNA, 25 bp, SARS Virus
tgtcagcatggaaattgtgtgagga

SEQ ID NO: 128022 - DNA, 25 bp, SARS Virus
gtcagcatggagattgtgtgaggac

SEQ ID NO: 128023 - DNA, 25 bp, SARS Virus
tcagcatggagaatgtgtgaggact

SEQ ID NO: 128024 - DNA, 25 bp, SARS Virus
cagcatggagatagtgtgaggacta

SEQ ID NO: 128025 - DNA, 25 bp, SARS Virus
agcatggagattatgtgaggactat

SEQ ID NO: 128026 - DNA, 25 bp, SARS Virus
gcatggagattgagtgaggactatc

SEQ ID NO: 128027 - DNA, 25 bp, SARS Virus
catggagattgtatgaggactatca

SEQ ID NO: 128028 - DNA, 25 bp, SARS Virus
atggagattgtgagaggactatcac

SEQ ID NO: 128029 - DNA, 25 bp, SARS Virus
tggagattgtgtaaggactatcact

SEQ ID NO: 128030 - DNA, 25 bp, SARS Virus
ggagattgtgtgaggactatcacta

SEQ ID NO: 128031 - DNA, 25 bp, SARS Virus
gagattgtgtgaagactatcactat

SEQ ID NO: 128032 - DNA, 25 bp, SARS Virus
agattgtgtgagaactatcactata

SEQ ID NO: 128033 - DNA, 25 bp, SARS Virus
gattgtgtgaggactatcactatat

SEQ ID NO: 128034 - DNA, 25 bp, SARS Virus
attgtgtgaggaatatcactatatc

SEQ ID NO: 128035 - DNA, 25 bp, SARS Virus
ttgtgtgaggacaatcactatatcg

SEQ ID NO: 128036 - DNA, 25 bp, SARS Virus
tgtgtgaggactatcactatatcga

SEQ ID NO: 128037 - DNA, 25 bp, SARS Virus
gtgtgaggactaacactatatcgag

SEQ ID NO: 128038 - DNA, 25 bp, SARS Virus
tgtgaggactataactatatcgagc

SEQ ID NO: 128039 - DNA, 25 bp, SARS Virus
gtgaggactatcactatatcgagcg

SEQ ID NO: 128040 - DNA, 25 bp, SARS Virus
tgaggactatcaatatatcgagcgt

SEQ ID NO: 128041 - DNA, 25 bp, SARS Virus
gaggactatcacaatatcgagcgtt

SEQ ID NO: 128042 - DNA, 25 bp, SARS Virus
aggactatcactatatcgagcgttc

SEQ ID NO: 128043 - DNA, 25 bp, SARS Virus
ggactatcactaaatcgagcgttct

SEQ ID NO: 128044 - DNA, 25 bp, SARS Virus
gactatcactatatcgagcgttcta

SEQ ID NO: 128045 - DNA, 25 bp, SARS Virus
actatcactataacgagcgttctac

SEQ ID NO: 128046 - DNA, 25 bp, SARS Virus
ctatcactatatagagcgttctaca

SEQ ID NO: 128047 - DNA, 25 bp, SARS Virus
tatcactatatcaagcgttctacat

SEQ ID NO: 128048 - DNA, 25 bp, SARS Virus
atcactatatcgagcgttctacatt

SEQ ID NO: 128049 - DNA, 25 bp, SARS Virus
tcactatatcgaacgttctacattt

SEQ ID NO: 128050 - DNA, 25 bp, SARS Virus
cactatatcgagagttctacattta

SEQ ID NO: 128051 - DNA, 25 bp, SARS Virus
actatatcgagcattctacatttat

SEQ ID NO: 128052 - DNA, 25 bp, SARS Virus
ctatatcgagcgatctacatttatg

SEQ ID NO: 128053 - DNA, 25 bp, SARS Virus
tatatcgagcgtactacatttatgt

SEQ ID NO: 128054 - DNA, 25 bp, SARS Virus
atatcgagcgttatacatttatgtt

SEQ ID NO: 128055 - DNA, 25 bp, SARS Virus
tatcgagcgttcaacatttatgtta

SEQ ID NO: 128056 - DNA, 25 bp, SARS Virus
atcgagcgttctacatttatgttag

SEQ ID NO: 128057 - DNA, 25 bp, SARS Virus
tcgagcgttctaaatttatgttagt

SEQ ID NO: 128058 - DNA, 25 bp, SARS Virus
cgagcgttctacatttatgttagtt

SEQ ID NO: 128059 - DNA, 25 bp, SARS Virus
gagcgttctacaattatgttagtta

SEQ ID NO: 128060 - DNA, 25 bp, SARS Virus
agcgttctacatatatgttagttac

SEQ ID NO: 128061 - DNA, 25 bp, SARS Virus
gcgttctacattaatgttagttaca

SEQ ID NO: 128062 - DNA, 25 bp, SARS Virus
cgttctacatttatgttagttacag

SEQ ID NO: 128063 - DNA, 25 bp, SARS Virus
gttctacatttaagttagttacagt

SEQ ID NO: 128064 - DNA, 25 bp, SARS Virus
ttctacatttatattagttacagtc

SEQ ID NO: 128065 - DNA, 25 bp, SARS Virus
tctacatttatgatagttacagtcc

SEQ ID NO: 128066 - DNA, 25 bp, SARS Virus
ctacatttatgtaagttacagtcct

SEQ ID NO: 128067 - DNA, 25 bp, SARS Virus
tacatttatgttagttacagtcctt

SEQ ID NO: 128068 - DNA, 25 bp, SARS Virus
acatttatgttaattacagtccttc

SEQ ID NO: 128069 - DNA, 25 bp, SARS Virus
catttatgttagatacagtccttct

SEQ ID NO: 128070 - DNA, 25 bp, SARS Virus
atttatgttagtaacagtccttctc

SEQ ID NO: 128071 - DNA, 25 bp, SARS Virus
tttatgttagttacagtccttctct

SEQ ID NO: 128072 - DNA, 25 bp, SARS Virus
ttatgttagttaaagtccttctctt

SEQ ID NO: 128073 - DNA, 25 bp, SARS Virus
tatgttagttacagtccttctctta

SEQ ID NO: 128074 - DNA, 25 bp, SARS Virus
atgttagttacaatccttctcttat

SEQ ID NO: 128075 - DNA, 25 bp, SARS Virus
tgttagttacagaccttctcttatt

SEQ ID NO: 128076 - DNA, 25 bp, SARS Virus
gttagttacagtacttctcttatta

SEQ ID NO: 128077 - DNA, 25 bp, SARS Virus
ttagttacagtcattctcttattaa

SEQ ID NO: 128078 - DNA, 25 bp, SARS Virus
tagttacagtccatctcttattaaa

SEQ ID NO: 128079 - DNA, 25 bp, SARS Virus
agttacagtcctactcttattaaaa

SEQ ID NO: 128080 - DNA, 25 bp, SARS Virus
gttacagtccttatcttattaaaag

SEQ ID NO: 128081 - DNA, 25 bp, SARS Virus
ttacagtccttcacttattaaaagt

SEQ ID NO: 128082 - DNA, 25 bp, SARS Virus
tacagtccttctattattaaaagta

SEQ ID NO: 128083 - DNA, 25 bp, SARS Virus
acagtccttctcatattaaaagtac

SEQ ID NO: 128084 - DNA, 25 bp, SARS Virus
cagtccttctctaattaaaagtaca

SEQ ID NO: 128085 - DNA, 25 bp, SARS Virus
agtccttctcttattaaaagtacaa

SEQ ID NO: 128086 - DNA, 25 bp, SARS Virus
gtccttctcttaataaaagtacaag

SEQ ID NO: 128087 - DNA, 25 bp, SARS Virus
tccttctcttataaaaagtacaagc

SEQ ID NO: 128088 - DNA, 25 bp, SARS Virus
ccttctcttattaaaagtacaagca

SEQ ID NO: 128089 - DNA, 25 bp, SARS Virus
cttctcttattaaaagtacaagcaa

SEQ ID NO: 128090 - DNA, 25 bp, SARS Virus
ttctcttattaaaagtacaagcaaa

SEQ ID NO: 128091 - DNA, 25 bp, SARS Virus
tctcttattaaaagtacaagcaaaa

SEQ ID NO: 128092 - DNA, 25 bp, SARS Virus
ctcttattaaaaatacaagcaaaat

SEQ ID NO: 128093 - DNA, 25 bp, SARS Virus
tcttattaaaagaacaagcaaaata

SEQ ID NO: 128094 - DNA, 25 bp, SARS Virus
cttattaaaagtacaagcaaaatac

SEQ ID NO: 128095 - DNA, 25 bp, SARS Virus
ttattaaaagtaaaagcaaaatacc

SEQ ID NO: 128096 - DNA, 25 bp, SARS Virus
tattaaaagtacaagcaaaatacct

SEQ ID NO: 128097 - DNA, 25 bp, SARS Virus
attaaaagtacaagcaaaataccta

SEQ ID NO: 128098 - DNA, 25 bp, SARS Virus
ttaaaagtacaaacaaaatacctat

SEQ ID NO: 128099 - DNA, 25 bp, SARS Virus
taaaagtacaagaaaaatacctatt

SEQ ID NO: 128100 - DNA, 25 bp, SARS Virus
aaaagtacaagcaaaatacctatta

SEQ ID NO: 128101 - DNA, 25 bp, SARS Virus
aaagtacaagcaaaatacctattag

SEQ ID NO: 128102 - DNA, 25 bp, SARS Virus
aagtacaagcaaaatacctattaga

SEQ ID NO: 128103 - DNA, 25 bp, SARS Virus
agtacaagcaaaatacctattagat

SEQ ID NO: 128104 - DNA, 25 bp, SARS Virus
gtacaagcaaaaaacctattagatt

SEQ ID NO: 128105 - DNA, 25 bp, SARS Virus
tacaagcaaaatacctattagattg

SEQ ID NO: 128106 - DNA, 25 bp, SARS Virus
acaagcaaaataactattagattga

SEQ ID NO: 128107 - DNA, 25 bp, SARS Virus
caagcaaaatacatattagattgag

SEQ ID NO: 128108 - DNA, 25 bp, SARS Virus
aagcaaaataccaattagattgagg

SEQ ID NO: 128109 - DNA, 25 bp, SARS Virus
agcaaaatacctattagattgaggt

SEQ ID NO: 128110 - DNA, 25 bp, SARS Virus
gcaaaatacctaatagattgaggta

SEQ ID NO: 128111 - DNA, 25 bp, SARS Virus
caaaatacctataagattgaggtat

SEQ ID NO: 128112 - DNA, 25 bp, SARS Virus
aaaatacctattagattgaggtatc

SEQ ID NO: 128113 - DNA, 25 bp, SARS Virus
aaatacctattaaattgaggtatcc

SEQ ID NO: 128114 - DNA, 25 bp, SARS Virus
aatacctattagattgaggtatcca

SEQ ID NO: 128115 - DNA, 25 bp, SARS Virus
atacctattagaatgaggtatccaa

SEQ ID NO: 128116 - DNA, 25 bp, SARS Virus
tacctattagatagaggtatccaag

SEQ ID NO: 128117 - DNA, 25 bp, SARS Virus
acctattagattaaggtatccaaga

SEQ ID NO: 128118 - DNA, 25 bp, SARS Virus
cctattagattgaggtatccaagaa

SEQ ID NO: 128119 - DNA, 25 bp, SARS Virus
ctattagattgaagtatccaagaag

SEQ ID NO: 128120 - DNA, 25 bp, SARS Virus
tattagattgagatatccaagaagt

SEQ ID NO: 128121 - DNA, 25 bp, SARS Virus
attagattgaggaatccaagaagta

SEQ ID NO: 128122 - DNA, 25 bp, SARS Virus
ttagattgaggtatccaagaagtag

SEQ ID NO: 128123 - DNA, 25 bp, SARS Virus
tagattgaggtaaccaagaagtagt

SEQ ID NO: 128124 - DNA, 25 bp, SARS Virus
agattgaggtatacaagaagtagta

SEQ ID NO: 128125 - DNA, 25 bp, SARS Virus
gattgaggtatcaaagaagtagtag

SEQ ID NO: 128126 - DNA, 25 bp, SARS Virus
attgaggtatccaagaagtagtaga

SEQ ID NO: 128127 - DNA, 25 bp, SARS Virus
ttgaggtatccaagaagtagtagat

SEQ ID NO: 128128 - DNA, 25 bp, SARS Virus
tgaggtatccaaaaagtagtagatt

SEQ ID NO: 128129 - DNA, 25 bp, SARS Virus
gaggtatccaagaagtagtagattg

SEQ ID NO: 128130 - DNA, 25 bp, SARS Virus
aggtatccaagaagtagtagattga

SEQ ID NO: 128131 - DNA, 25 bp, SARS Virus
ggtatccaagaaatagtagattgag

SEQ ID NO: 128132 - DNA, 25 bp, SARS Virus
gtatccaagaagaagtagattgagg

SEQ ID NO: 128133 - DNA, 25 bp, SARS Virus
tatccaagaagtagtagattgaggc

SEQ ID NO: 128134 - DNA, 25 bp, SARS Virus
atccaagaagtaatagattgaggct

SEQ ID NO: 128135 - DNA, 25 bp, SARS Virus
tccaagaagtagaagattgaggctt

SEQ ID NO: 128136 - DNA, 25 bp, SARS Virus
ccaagaagtagtagattgaggctta

SEQ ID NO: 128137 - DNA, 25 bp, SARS Virus
caagaagtagtaaattgaggcttat

SEQ ID NO: 128138 - DNA, 25 bp, SARS Virus
aagaagtagtagattgaggcttatt

SEQ ID NO: 128139 - DNA, 25 bp, SARS Virus
agaagtagtagaatgaggcttatta

SEQ ID NO: 128140 - DNA, 25 bp, SARS Virus
gaagtagtagatagaggcttattaa

SEQ ID NO: 128141 - DNA, 25 bp, SARS Virus
aagtagtagattaaggcttattaag

SEQ ID NO: 128142 - DNA, 25 bp, SARS Virus
agtagtagattgaggcttattaaga

SEQ ID NO: 128143 - DNA, 25 bp, SARS Virus
gtagtagattgaagcttattaagaa

SEQ ID NO: 128144 - DNA, 25 bp, SARS Virus
tagtagattgagacttattaagaag

SEQ ID NO: 128145 - DNA, 25 bp, SARS Virus
agtagattgaggattattaagaaga

SEQ ID NO: 128146 - DNA, 25 bp, SARS Virus
gtagattgaggcatattaagaagaa

SEQ ID NO: 128147 - DNA, 25 bp, SARS Virus
tagattgaggctaattaagaagaat

SEQ ID NO: 128148 - DNA, 25 bp, SARS Virus
agattgaggcttattaagaagaatc

SEQ ID NO: 128149 - DNA, 25 bp, SARS Virus
gattgaggcttaataagaagaatca

SEQ ID NO: 128150 - DNA, 25 bp, SARS Virus
attgaggcttataaagaagaatcaa

SEQ ID NO: 128151 - DNA, 25 bp, SARS Virus
ttgaggcttattaagaagaatcaat

SEQ ID NO: 128152 - DNA, 25 bp, SARS Virus
tgaggcttattaagaagaatcaatc

SEQ ID NO: 128153 - DNA, 25 bp, SARS Virus
gaggcttattaaaaagaatcaatct

SEQ ID NO: 128154 - DNA, 25 bp, SARS Virus
aggcttattaagaagaatcaatctc

SEQ ID NO: 128155 - DNA, 25 bp, SARS Virus
ggcttattaagaagaatcaatctcc

SEQ ID NO: 128156 - DNA, 25 bp, SARS Virus
gcttattaagaaaaatcaatctccg

SEQ ID NO: 128157 - DNA, 25 bp, SARS Virus
cttattaagaagaatcaatctccga

SEQ ID NO: 128158 - DNA, 25 bp, SARS Virus
ttattaagaagaatcaatctccgaa

SEQ ID NO: 128159 - DNA, 25 bp, SARS Virus
tattaagaagaaacaatctccgaat

SEQ ID NO: 128160 - DNA, 25 bp, SARS Virus
attaagaagaataaatctccgaatt

SEQ ID NO: 128161 - DNA, 25 bp, SARS Virus
ttaagaagaatcaatctccgaattt

SEQ ID NO: 128162 - DNA, 25 bp, SARS Virus
taagaagaatcaatctccgaattta

SEQ ID NO: 128163 - DNA, 25 bp, SARS Virus
aagaagaatcaaactccgaatttat

SEQ ID NO: 128164 - DNA, 25 bp, SARS Virus
agaagaatcaatatccgaatttatt

SEQ ID NO: 128165 - DNA, 25 bp, SARS Virus
gaagaatcaatcaccgaatttatta

SEQ ID NO: 128166 - DNA, 25 bp, SARS Virus
aagaatcaatctacgaatttattaa

SEQ ID NO: 128167 - DNA, 25 bp, SARS Virus
agaatcaatctcagaatttattaac

SEQ ID NO: 128168 - DNA, 25 bp, SARS Virus
gaatcaatctccaaatttattaaca

SEQ ID NO: 128169 - DNA, 25 bp, SARS Virus
aatcaatctccgaatttattaacag

SEQ ID NO: 128170 - DNA, 25 bp, SARS Virus
atcaatctccgaatttattaacaga

SEQ ID NO: 128171 - DNA, 25 bp, SARS Virus
tcaatctccgaaattattaacagag

SEQ ID NO: 128172 - DNA, 25 bp, SARS Virus
caatctccgaatatattaacagagt

SEQ ID NO: 128173 - DNA, 25 bp, SARS Virus
aatctccgaattaattaacagagtg

SEQ ID NO: 128174 - DNA, 25 bp, SARS Virus
atctccgaatttattaacagagtga

SEQ ID NO: 128175 - DNA, 25 bp, SARS Virus
tctccgaatttaataacagagtgat

SEQ ID NO: 128176 - DNA, 25 bp, SARS Virus
ctccgaatttataaacagagtgata

SEQ ID NO: 128177 - DNA, 25 bp, SARS Virus
tccgaatttattaacagagtgataa

SEQ ID NO: 128178 - DNA, 25 bp, SARS Virus
ccgaatttattaacagagtgataac

SEQ ID NO: 128179 - DNA, 25 bp, SARS Virus
cgaatttattaaaagagtgataact

SEQ ID NO: 128180 - DNA, 25 bp, SARS Virus
gaatttattaacagagtgataactt

SEQ ID NO: 128181 - DNA, 25 bp, SARS Virus
aatttattaacaaagtgataacttg

SEQ ID NO: 128182 - DNA, 25 bp, SARS Virus
atttattaacagagtgataacttga

SEQ ID NO: 128183 - DNA, 25 bp, SARS Virus
tttattaacagaatgataacttgaa

SEQ ID NO: 128184 - DNA, 25 bp, SARS Virus
ttattaacagagagataacttgaat

SEQ ID NO: 128185 - DNA, 25 bp, SARS Virus
tattaacagagtaataacttgaata

SEQ ID NO: 128186 - DNA, 25 bp, SARS Virus
attaacagagtgataacttgaataa

SEQ ID NO: 128187 - DNA, 25 bp, SARS Virus
ttaacagagtgaaaacttgaataat

SEQ ID NO: 128188 - DNA, 25 bp, SARS Virus
taacagagtgataacttgaataata

SEQ ID NO: 128189 - DNA, 25 bp, SARS Virus
aacagagtgataacttgaataatat

SEQ ID NO: 128190 - DNA, 25 bp, SARS Virus
acagagtgataaattgaataatatt

SEQ ID NO: 128191 - DNA, 25 bp, SARS Virus
cagagtgataacatgaataatattg

SEQ ID NO: 128192 - DNA, 25 bp, SARS Virus
agagtgataactagaataatattgc

SEQ ID NO: 128193 - DNA, 25 bp, SARS Virus
gagtgataacttaaataatattgca

SEQ ID NO: 128194 - DNA, 25 bp, SARS Virus
agtgataacttgaataatattgcag

SEQ ID NO: 128195 - DNA, 25 bp, SARS Virus
gtgataacttgaataatattgcagt

SEQ ID NO: 128196 - DNA, 25 bp, SARS Virus
tgataacttgaaaaatattgcagtt

SEQ ID NO: 128197 - DNA, 25 bp, SARS Virus
gataacttgaataatattgcagttc

SEQ ID NO: 128198 - DNA, 25 bp, SARS Virus
ataacttgaataatattgcagttct

SEQ ID NO: 128199 - DNA, 25 bp, SARS Virus
taacttgaataaaattgcagttcta

SEQ ID NO: 128200 - DNA, 25 bp, SARS Virus
aacttgaataatattgcagttctaa

SEQ ID NO: 128201 - DNA, 25 bp, SARS Virus
acttgaataataatgcagttctaag

SEQ ID NO: 128202 - DNA, 25 bp, SARS Virus
cttgaataatatagcagttctaagg

SEQ ID NO: 128203 - DNA, 25 bp, SARS Virus
ttgaataatattacagttctaaggt

SEQ ID NO: 128204 - DNA, 25 bp, SARS Virus
tgaataatattgaagttctaaggtt

SEQ ID NO: 128205 - DNA, 25 bp, SARS Virus
gaataatattgcagttctaaggttt

SEQ ID NO: 128206 - DNA, 25 bp, SARS Virus
aataatattgcaattctaaggttta

SEQ ID NO: 128207 - DNA, 25 bp, SARS Virus
ataatattgcagatctaaggtttat

SEQ ID NO: 128208 - DNA, 25 bp, SARS Virus
taatattgcagtactaaggtttatc

SEQ ID NO: 128209 - DNA, 25 bp, SARS Virus
aatattgcagttataaggtttatcg

SEQ ID NO: 128210 - DNA, 25 bp, SARS Virus
atattgcagttcaaaggtttatcgt

SEQ ID NO: 128211 - DNA, 25 bp, SARS Virus
tattgcagttctaaggtttatcgtt

SEQ ID NO: 128212 - DNA, 25 bp, SARS Virus
attgcagttctaaggtttatcgtta

SEQ ID NO: 128213 - DNA, 25 bp, SARS Virus
ttgcagttctaaagtttatcgttag

SEQ ID NO: 128214 - DNA, 25 bp, SARS Virus
tgcagttctaagatttatcgttagg

SEQ ID NO: 128215 - DNA, 25 bp, SARS Virus
gcagttctaaggattatcgttagga

SEQ ID NO: 128216 - DNA, 25 bp, SARS Virus
cagttctaaggtatatcgttaggac

SEQ ID NO: 128217 - DNA, 25 bp, SARS Virus
agttctaaggttaatcgttaggact

SEQ ID NO: 128218 - DNA, 25 bp, SARS Virus
gttctaaggtttatcgttaggactt

SEQ ID NO: 128219 - DNA, 25 bp, SARS Virus
ttctaaggtttaacgttaggacttt

SEQ ID NO: 128220 - DNA, 25 bp, SARS Virus
tctaaggtttatagttaggactttc

SEQ ID NO: 128221 - DNA, 25 bp, SARS Virus
ctaaggtttatcattaggactttca

SEQ ID NO: 128222 - DNA, 25 bp, SARS Virus
taaggtttatcgataggactttcag

SEQ ID NO: 128223 - DNA, 25 bp, SARS Virus
aaggtttatcgtaaggactttcagg

SEQ ID NO: 128224 - DNA, 25 bp, SARS Virus
aggtttatcgttaggactttcagga

SEQ ID NO: 128225 - DNA, 25 bp, SARS Virus
ggtttatcgttaagactttcaggag

SEQ ID NO: 128226 - DNA, 25 bp, SARS Virus
gtttatcgttagaactttcaggagt

SEQ ID NO: 128227 - DNA, 25 bp, SARS Virus
tttatcgttaggactttcaggagta

SEQ ID NO: 128228 - DNA, 25 bp, SARS Virus
ttatcgttaggaatttcaggagtat

SEQ ID NO: 128229 - DNA, 25 bp, SARS Virus
tatcgttaggacattcaggagtatt

SEQ ID NO: 128230 - DNA, 25 bp, SARS Virus
atcgttaggactatcaggagtatta

SEQ ID NO: 128231 - DNA, 25 bp, SARS Virus
tcgttaggacttacaggagtattac

SEQ ID NO: 128232 - DNA, 25 bp, SARS Virus
cgttaggactttaaggagtattact

SEQ ID NO: 128233 - DNA, 25 bp, SARS Virus
gttaggactttcaggagtattacta

SEQ ID NO: 128234 - DNA, 25 bp, SARS Virus
ttaggactttcaagagtattactat

SEQ ID NO: 128235 - DNA, 25 bp, SARS Virus
taggactttcagaagtattactatt

SEQ ID NO: 128236 - DNA, 25 bp, SARS Virus
aggactttcaggagtattactatta

SEQ ID NO: 128237 - DNA, 25 bp, SARS Virus
ggactttcaggaatattactattag

SEQ ID NO: 128238 - DNA, 25 bp, SARS Virus
gactttcaggagaattactattagt

SEQ ID NO: 128239 - DNA, 25 bp, SARS Virus
actttcaggagtattactattagtt

SEQ ID NO: 128240 - DNA, 25 bp, SARS Virus
ctttcaggagtaatactattagtta

SEQ ID NO: 128241 - DNA, 25 bp, SARS Virus
tttcaggagtataactattagttat

SEQ ID NO: 128242 - DNA, 25 bp, SARS Virus
ttcaggagtattactattagttata

SEQ ID NO: 128243 - DNA, 25 bp, SARS Virus
tcaggagtattaatattagttatag

SEQ ID NO: 128244 - DNA, 25 bp, SARS Virus
caggagtattacaattagttataga

SEQ ID NO: 128245 - DNA, 25 bp, SARS Virus
aggagtattactattagttatagag

SEQ ID NO: 128246 - DNA, 25 bp, SARS Virus
ggagtattactaatagttatagaga

SEQ ID NO: 128247 - DNA, 25 bp, SARS Virus
gagtattactataagttatagagac

SEQ ID NO: 128248 - DNA, 25 bp, SARS Virus
agtattactattagttatagagacg

SEQ ID NO: 128249 - DNA, 25 bp, SARS Virus
gtattactattaattatagagacga

SEQ ID NO: 128250 - DNA, 25 bp, SARS Virus
tattactattagatatagagacgat

SEQ ID NO: 128251 - DNA, 25 bp, SARS Virus
attactattagtaatagagacgata

SEQ ID NO: 128252 - DNA, 25 bp, SARS Virus
ttactattagttatagagacgataa

SEQ ID NO: 128253 - DNA, 25 bp, SARS Virus
tactattagttaaagagacgataac

SEQ ID NO: 128254 - DNA, 25 bp, SARS Virus
actattagttatagagacgataaca

SEQ ID NO: 128255 - DNA, 25 bp, SARS Virus
ctattagttataaagacgataacat

SEQ ID NO: 128256 - DNA, 25 bp, SARS Virus
tattagttatagagacgataacatt

SEQ ID NO: 128257 - DNA, 25 bp, SARS Virus
attagttatagaaacgataacattg

SEQ ID NO: 128258 - DNA, 25 bp, SARS Virus
ttagttatagagacgataacattgg

SEQ ID NO: 128259 - DNA, 25 bp, SARS Virus
tagttatagagaagataacattgga

SEQ ID NO: 128260 - DNA, 25 bp, SARS Virus
agttatagagacaataacattggac

SEQ ID NO: 128261 - DNA, 25 bp, SARS Virus
gttatagagacgataacattggacc

SEQ ID NO: 128262 - DNA, 25 bp, SARS Virus
ttatagagacgaaaacattggacct

SEQ ID NO: 128263 - DNA, 25 bp, SARS Virus
tatagagacgataacattggacctt

SEQ ID NO: 128264 - DNA, 25 bp, SARS Virus
atagagacgataacattggaccttc

SEQ ID NO: 128265 - DNA, 25 bp, SARS Virus
tagagacgataaaattggaccttca

SEQ ID NO: 128266 - DNA, 25 bp, SARS Virus
agagacgataacattggaccttcag

SEQ ID NO: 128267 - DNA, 25 bp, SARS Virus
gagacgataacaatggaccttcagt

SEQ ID NO: 128268 - DNA, 25 bp, SARS Virus
agacgataacataggaccttcagtt

SEQ ID NO: 128269 - DNA, 25 bp, SARS Virus
gacgataacattagaccttcagttg

SEQ ID NO: 128270 - DNA, 25 bp, SARS Virus
acgataacattgaaccttcagttgt

SEQ ID NO: 128271 - DNA, 25 bp, SARS Virus
cgataacattggaccttcagttgtt

SEQ ID NO: 128272 - DNA, 25 bp, SARS Virus
gataacattggaacttcagttgttc

SEQ ID NO: 128273 - DNA, 25 bp, SARS Virus
ataacattggacattcagttgttct

SEQ ID NO: 128274 - DNA, 25 bp, SARS Virus
taacattggaccatcagttgttcta

SEQ ID NO: 128275 - DNA, 25 bp, SARS Virus
aacattggacctacagttgttctac

SEQ ID NO: 128276 - DNA, 25 bp, SARS Virus
acattggaccttaagttgttctact

SEQ ID NO: 128277 - DNA, 25 bp, SARS Virus
cattggaccttcagttgttctactt

SEQ ID NO: 128278 - DNA, 25 bp, SARS Virus
attggaccttcaattgttctacttt

SEQ ID NO: 128279 - DNA, 25 bp, SARS Virus
ttggaccttcagatgttctactttg

SEQ ID NO: 128280 - DNA, 25 bp, SARS Virus
tggaccttcagtagttctactttgt

SEQ ID NO: 128281 - DNA, 25 bp, SARS Virus
ggaccttcagttattctactttgta

SEQ ID NO: 128282 - DNA, 25 bp, SARS Virus
gaccttcagttgatctactttgtag

SEQ ID NO: 128283 - DNA, 25 bp, SARS Virus
accttcagttgtactactttgtaga

SEQ ID NO: 128284 - DNA, 25 bp, SARS Virus
ccttcagttgttatactttgtagac

SEQ ID NO: 128285 - DNA, 25 bp, SARS Virus
cttcagttgttcaactttgtagaca

SEQ ID NO: 128286 - DNA, 25 bp, SARS Virus
ttcagttgttctactttgtagacaa

SEQ ID NO: 128287 - DNA, 25 bp, SARS Virus
tcagttgttctaatttgtagacaac

SEQ ID NO: 128288 - DNA, 25 bp, SARS Virus
cagttgttctacattgtagacaaca

SEQ ID NO: 128289 - DNA, 25 bp, SARS Virus
agttgttctactatgtagacaacag

SEQ ID NO: 128290 - DNA, 25 bp, SARS Virus
gttgttctacttagtagacaacagt

SEQ ID NO: 128291 - DNA, 25 bp, SARS Virus
ttgttctactttatagacaacagtg

SEQ ID NO: 128292 - DNA, 25 bp, SARS Virus
tgttctactttgaagacaacagtga

SEQ ID NO: 128293 - DNA, 25 bp, SARS Virus
gttctactttgtagacaacagtgaa

SEQ ID NO: 128294 - DNA, 25 bp, SARS Virus
ttctactttgtaaacaacagtgaat

SEQ ID NO: 128295 - DNA, 25 bp, SARS Virus
tctactttgtagacaacagtgaatg

SEQ ID NO: 128296 - DNA, 25 bp, SARS Virus
ctactttgtagaaaacagtgaatga

SEQ ID NO: 128297 - DNA, 25 bp, SARS Virus
tactttgtagacaacagtgaatgac

SEQ ID NO: 128298 - DNA, 25 bp, SARS Virus
actttgtagacaacagtgaatgaca

SEQ ID NO: 128299 - DNA, 25 bp, SARS Virus
ctttgtagacaaaagtgaatgacat

SEQ ID NO: 128300 - DNA, 25 bp, SARS Virus
tttgtagacaacagtgaatgacatg

SEQ ID NO: 128301 - DNA, 25 bp, SARS Virus
ttgtagacaacaatgaatgacatga

SEQ ID NO: 128302 - DNA, 25 bp, SARS Virus
tgtagacaacagagaatgacatgat

SEQ ID NO: 128303 - DNA, 25 bp, SARS Virus
gtagacaacagtaaatgacatgatc

SEQ ID NO: 128304 - DNA, 25 bp, SARS Virus
tagacaacagtgaatgacatgatcg

SEQ ID NO: 128305 - DNA, 25 bp, SARS Virus
agacaacagtgaatgacatgatcgt

SEQ ID NO: 128306 - DNA, 25 bp, SARS Virus
gacaacagtgaaagacatgatcgtt

SEQ ID NO: 128307 - DNA, 25 bp, SARS Virus
acaacagtgaataacatgatcgttt

SEQ ID NO: 128308 - DNA, 25 bp, SARS Virus
caacagtgaatgacatgatcgtttc

SEQ ID NO: 128309 - DNA, 25 bp, SARS Virus
aacagtgaatgaaatgatcgtttcg

SEQ ID NO: 128310 - DNA, 25 bp, SARS Virus
acagtgaatgacatgatcgtttcgt

SEQ ID NO: 128311 - DNA, 25 bp, SARS Virus
cagtgaatgacaagatcgtttcgtt

SEQ ID NO: 128312 - DNA, 25 bp, SARS Virus
agtgaatgacataatcgtttcgtta

SEQ ID NO: 128313 - DNA, 25 bp, SARS Virus
gtgaatgacatgatcgtttcgttat

SEQ ID NO: 128314 - DNA, 25 bp, SARS Virus
tgaatgacatgaacgtttcgttata

SEQ ID NO: 128315 - DNA, 25 bp, SARS Virus
gaatgacatgatagtttcgttataa

SEQ ID NO: 128316 - DNA, 25 bp, SARS Virus
aatgacatgatcatttcgttataac

SEQ ID NO: 128317 - DNA, 25 bp, SARS Virus
atgacatgatcgattcgttataaca

SEQ ID NO: 128318 - DNA, 25 bp, SARS Virus
tgacatgatcgtatcgttataacag

SEQ ID NO: 128319 - DNA, 25 bp, SARS Virus
gacatgatcgttacgttataacagc

SEQ ID NO: 128320 - DNA, 25 bp, SARS Virus
acatgatcgtttagttataacagca

SEQ ID NO: 128321 - DNA, 25 bp, SARS Virus
catgatcgtttcattataacagcaa

SEQ ID NO: 128322 - DNA, 25 bp, SARS Virus
atgatcgtttcgatataacagcaac

SEQ ID NO: 128323 - DNA, 25 bp, SARS Virus
tgatcgtttcgtaataacagcaacg

SEQ ID NO: 128324 - DNA, 25 bp, SARS Virus
gatcgtttcgttataacagcaacga

SEQ ID NO: 128325 - DNA, 25 bp, SARS Virus
atcgtttcgttaaaacagcaacgat

SEQ ID NO: 128326 - DNA, 25 bp, SARS Virus
tcgtttcgttataacagcaacgatg

SEQ ID NO: 128327 - DNA, 25 bp, SARS Virus
cgtttcgttataacagcaacgatgg

SEQ ID NO: 128328 - DNA, 25 bp, SARS Virus
gtttcgttataaaagcaacgatggc

SEQ ID NO: 128329 - DNA, 25 bp, SARS Virus
tttcgttataacagcaacgatggcc

SEQ ID NO: 128330 - DNA, 25 bp, SARS Virus
ttcgttataacaacaacgatggccg

SEQ ID NO: 128331 - DNA, 25 bp, SARS Virus
tcgttataacagaaacgatggccgc

SEQ ID NO: 128332 - DNA, 25 bp, SARS Virus
cgttataacagcaacgatggccgca

SEQ ID NO: 128333 - DNA, 25 bp, SARS Virus
gttataacagcaacgatggccgcac

SEQ ID NO: 128334 - DNA, 25 bp, SARS Virus
ttataacagcaaagatggccgcacc

SEQ ID NO: 128335 - DNA, 25 bp, SARS Virus
tataacagcaacaatggccgcacca

SEQ ID NO: 128336 - DNA, 25 bp, SARS Virus
ataacagcaacgatggccgcaccag

SEQ ID NO: 128337 - DNA, 25 bp, SARS Virus
taacagcaacgaaggccgcaccaga

SEQ ID NO: 128338 - DNA, 25 bp, SARS Virus
aacagcaacgatagccgcaccagac

SEQ ID NO: 128339 - DNA, 25 bp, SARS Virus
acagcaacgatgaccgcaccagaca

SEQ ID NO: 128340 - DNA, 25 bp, SARS Virus
cagcaacgatggacgcaccagacat

SEQ ID NO: 128341 - DNA, 25 bp, SARS Virus
agcaacgatggcagcaccagacata

SEQ ID NO: 128342 - DNA, 25 bp, SARS Virus
gcaacgatggccacaccagacataa

SEQ ID NO: 128343 - DNA, 25 bp, SARS Virus
caacgatggccgaaccagacataaa

SEQ ID NO: 128344 - DNA, 25 bp, SARS Virus
aacgatggccgcaccagacataaat

SEQ ID NO: 128345 - DNA, 25 bp, SARS Virus
acgatggccgcaacagacataaatt

SEQ ID NO: 128346 - DNA, 25 bp, SARS Virus
cgatggccgcacaagacataaatta

SEQ ID NO: 128347 - DNA, 25 bp, SARS Virus
gatggccgcaccagacataaattaa

SEQ ID NO: 128348 - DNA, 25 bp, SARS Virus
atggccgcaccaaacataaattaaa

SEQ ID NO: 128349 - DNA, 25 bp, SARS Virus
tggccgcaccagacataaattaaat

SEQ ID NO: 128350 - DNA, 25 bp, SARS Virus
ggccgcaccagaaataaattaaata

SEQ ID NO: 128351 - DNA, 25 bp, SARS Virus
gccgcaccagacataaattaaatat

SEQ ID NO: 128352 - DNA, 25 bp, SARS Virus
ccgcaccagacaaaaattaaatatc

SEQ ID NO: 128353 - DNA, 25 bp, SARS Virus
cgcaccagacataaattaaatatca

SEQ ID NO: 128354 - DNA, 25 bp, SARS Virus
gcaccagacataaattaaatatcaa

SEQ ID NO: 128355 - DNA, 25 bp, SARS Virus
caccagacataaattaaatatcaaa

SEQ ID NO: 128356 - DNA, 25 bp, SARS Virus
accagacataaaataaatatcaaag

SEQ ID NO: 128357 - DNA, 25 bp, SARS Virus
ccagacataaataaaatatcaaagg

SEQ ID NO: 128358 - DNA, 25 bp, SARS Virus
cagacataaattaaatatcaaaggt

SEQ ID NO: 128359 - DNA, 25 bp, SARS Virus
agacataaattaaatatcaaaggtt

SEQ ID NO: 128360 - DNA, 25 bp, SARS Virus
gacataaattaaatatcaaaggtta

SEQ ID NO: 128361 - DNA, 25 bp, SARS Virus
acataaattaaaaatcaaaggttat

SEQ ID NO: 128362 - DNA, 25 bp, SARS Virus
cataaattaaatatcaaaggttatg

SEQ ID NO: 128363 - DNA, 25 bp, SARS Virus
ataaattaaataacaaaggttatgc

SEQ ID NO: 128364 - DNA, 25 bp, SARS Virus
taaattaaatataaaaggttatgcc

SEQ ID NO: 128365 - DNA, 25 bp, SARS Virus
aaattaaatatcaaaggttatgcca

SEQ ID NO: 128366 - DNA, 25 bp, SARS Virus
aattaaatatcaaaggttatgccat

SEQ ID NO: 128367 - DNA, 25 bp, SARS Virus
attaaatatcaaaggttatgccatc

SEQ ID NO: 128368 - DNA, 25 bp, SARS Virus
ttaaatatcaaaagttatgccatcg

SEQ ID NO: 128369 - DNA, 25 bp, SARS Virus
taaatatcaaagattatgccatcgc

SEQ ID NO: 128370 - DNA, 25 bp, SARS Virus
aaatatcaaaggatatgccatcgcc

SEQ ID NO: 128371 - DNA, 25 bp, SARS Virus
aatatcaaaggtaatgccatcgcca

SEQ ID NO: 128372 - DNA, 25 bp, SARS Virus
atatcaaaggttatgccatcgccaa

SEQ ID NO: 128373 - DNA, 25 bp, SARS Virus
tatcaaaggttaagccatcgccaac

SEQ ID NO: 128374 - DNA, 25 bp, SARS Virus
atcaaaggttataccatcgccaaca

SEQ ID NO: 128375 - DNA, 25 bp, SARS Virus
tcaaaggttatgacatcgccaacat

SEQ ID NO: 128376 - DNA, 25 bp, SARS Virus
caaaggttatgcaatcgccaacata

SEQ ID NO: 128377 - DNA, 25 bp, SARS Virus
acagctcatggccgtcgtgttcgtt

SEQ ID NO: 128378 - DNA, 25 bp, SARS Virus
cagctcatggcactcgtgttcgttt

SEQ ID NO: 128379 - DNA, 25 bp, SARS Virus
agctcatggcagccgtgttcgtttt

SEQ ID NO: 128380 - DNA, 25 bp, SARS Virus
gctcatggcagtcgtgttcgttttc

SEQ ID NO: 128381 - DNA, 25 bp, SARS Virus
ctcatggcagtcctgttcgttttcg

SEQ ID NO: 128382 - DNA, 25 bp, SARS Virus
tcatggcagtcgcgttcgttttcgt

SEQ ID NO: 128383 - DNA, 25 bp, SARS Virus
catggcagtcgtcttcgttttcgtt

SEQ ID NO: 128384 - DNA, 25 bp, SARS Virus
atggcagtcgtgctcgttttcgttt

SEQ ID NO: 128385 - DNA, 25 bp, SARS Virus
tggcagtcgtgtccgttttcgtttc

SEQ ID NO: 128386 - DNA, 25 bp, SARS Virus
ggcagtcgtgttcgttttcgtttca

SEQ ID NO: 128387 - DNA, 25 bp, SARS Virus
gcagtcgtgttccttttcgtttcac

SEQ ID NO: 128388 - DNA, 25 bp, SARS Virus
cagtcgtgttcgctttcgtttcaca

SEQ ID NO: 128389 - DNA, 25 bp, SARS Virus
agtcgtgttcgtcttcgtttcacac

SEQ ID NO: 128390 - DNA, 25 bp, SARS Virus
gtcgtgttcgttctcgtttcacaca

SEQ ID NO: 128391 - DNA, 25 bp, SARS Virus
tcgtgttcgtttccgtttcacacac

SEQ ID NO: 128392 - DNA, 25 bp, SARS Virus
cgtgttcgttttcgtttcacacacg

SEQ ID NO: 128393 - DNA, 25 bp, SARS Virus
gtgttcgttttcctttcacacacga

SEQ ID NO: 128394 - DNA, 25 bp, SARS Virus
tgttcgttttcgcttcacacacgat

SEQ ID NO: 128395 - DNA, 25 bp, SARS Virus
gttcgttttcgtctcacacacgatc

SEQ ID NO: 128396 - DNA, 25 bp, SARS Virus
ttcgttttcgttccacacacgatca

SEQ ID NO: 128397 - DNA, 25 bp, SARS Virus
tcgttttcgtttcacacacgatcac

SEQ ID NO: 128398 - DNA, 25 bp, SARS Virus
cgttttcgtttcccacacgatcacg

SEQ ID NO: 128399 - DNA, 25 bp, SARS Virus
gttttcgtttcacacacgatcacgt

SEQ ID NO: 128400 - DNA, 25 bp, SARS Virus
ttttcgtttcacccacgatcacgtt

SEQ ID NO: 128401 - DNA, 25 bp, SARS Virus
tttcgtttcacacacgatcacgttc

SEQ ID NO: 128402 - DNA, 25 bp, SARS Virus
ttcgtttcacacccgatcacgttca

SEQ ID NO: 128403 - DNA, 25 bp, SARS Virus
tcgtttcacacacgatcacgttcaa

SEQ ID NO: 128404 - DNA, 25 bp, SARS Virus
cgtttcacacaccatcacgttcaat

SEQ ID NO: 128405 - DNA, 25 bp, SARS Virus
gtttcacacacgctcacgttcaatc

SEQ ID NO: 128406 - DNA, 25 bp, SARS Virus
tttcacacacgaccacgttcaatca

SEQ ID NO: 128407 - DNA, 25 bp, SARS Virus
ttcacacacgatcacgttcaatcac

SEQ ID NO: 128408 - DNA, 25 bp, SARS Virus
tcacacacgatcccgttcaatcacg

SEQ ID NO: 128409 - DNA, 25 bp, SARS Virus
cacacacgatcacgttcaatcacgt

SEQ ID NO: 128410 - DNA, 25 bp, SARS Virus
acacacgatcaccttcaatcacgtt

SEQ ID NO: 128411 - DNA, 25 bp, SARS Virus
cacacgatcacgctcaatcacgttt

SEQ ID NO: 128412 - DNA, 25 bp, SARS Virus
acacgatcacgtccaatcacgttta

SEQ ID NO: 128413 - DNA, 25 bp, SARS Virus
cacgatcacgttcaatcacgtttaa

SEQ ID NO: 128414 - DNA, 25 bp, SARS Virus
acgatcacgttccatcacgtttaaa

SEQ ID NO: 128415 - DNA, 25 bp, SARS Virus
cgatcacgttcactcacgtttaaat

SEQ ID NO: 128416 - DNA, 25 bp, SARS Virus
gatcacgttcaaccacgtttaaata

SEQ ID NO: 128417 - DNA, 25 bp, SARS Virus
atcacgttcaatcacgtttaaataa

SEQ ID NO: 128418 - DNA, 25 bp, SARS Virus
tcacgttcaatcccgtttaaataac

SEQ ID NO: 128419 - DNA, 25 bp, SARS Virus
cacgttcaatcacgtttaaataaca

SEQ ID NO: 128420 - DNA, 25 bp, SARS Virus
acgttcaatcacctttaaataacag

SEQ ID NO: 128421 - DNA, 25 bp, SARS Virus
cgttcaatcacgcttaaataacagt

SEQ ID NO: 128422 - DNA, 25 bp, SARS Virus
gttcaatcacgtctaaataacagtc

SEQ ID NO: 128423 - DNA, 25 bp, SARS Virus
ttcaatcacgttcaaataacagtcg

SEQ ID NO: 128424 - DNA, 25 bp, SARS Virus
tcaatcacgtttcaataacagtcgt

SEQ ID NO: 128425 - DNA, 25 bp, SARS Virus
caatcacgtttacataacagtcgtt

SEQ ID NO: 128426 - DNA, 25 bp, SARS Virus
aatcacgtttaactaacagtcgttc

SEQ ID NO: 128427 - DNA, 25 bp, SARS Virus
atcacgtttaaacaacagtcgttct

SEQ ID NO: 128428 - DNA, 25 bp, SARS Virus
tcacgtttaaatcacagtcgttctc

SEQ ID NO: 128429 - DNA, 25 bp, SARS Virus
cacgtttaaataccagtcgttctcc

SEQ ID NO: 128430 - DNA, 25 bp, SARS Virus
acgtttaaataacagtcgttctccc

SEQ ID NO: 128431 - DNA, 25 bp, SARS Virus
cgtttaaataaccgtcgttctccca

SEQ ID NO: 128432 - DNA, 25 bp, SARS Virus
gtttaaataacactcgttctcccac

SEQ ID NO: 128433 - DNA, 25 bp, SARS Virus
tttaaataacagccgttctcccact

SEQ ID NO: 128434 - DNA, 25 bp, SARS Virus
ttaaataacagtcgttctcccactt

SEQ ID NO: 128435 - DNA, 25 bp, SARS Virus
taaataacagtccttctcccacttt

SEQ ID NO: 128436 - DNA, 25 bp, SARS Virus
aaataacagtcgctctcccacttta

SEQ ID NO: 128437 - DNA, 25 bp, SARS Virus
aataacagtcgtcctcccactttac

SEQ ID NO: 128438 - DNA, 25 bp, SARS Virus
ataacagtcgttctcccactttacc

SEQ ID NO: 128439 - DNA, 25 bp, SARS Virus
taacagtcgttcccccactttacca

SEQ ID NO: 128440 - DNA, 25 bp, SARS Virus
aacagtcgttctcccactttaccac

SEQ ID NO: 128441 - DNA, 25 bp, SARS Virus
acagtcgttctcccactttaccact

SEQ ID NO: 128442 - DNA, 25 bp, SARS Virus
cagtcgttctcccactttaccactt

SEQ ID NO: 128443 - DNA, 25 bp, SARS Virus
agtcgttctccccctttaccactta

SEQ ID NO: 128444 - DNA, 25 bp, SARS Virus
gtcgttctcccactttaccacttaa

SEQ ID NO: 128445 - DNA, 25 bp, SARS Virus
tcgttctcccaccttaccacttaac

SEQ ID NO: 128446 - DNA, 25 bp, SARS Virus
cgttctcccactctaccacttaacg

SEQ ID NO: 128447 - DNA, 25 bp, SARS Virus
gttctcccacttcaccacttaacgg

SEQ ID NO: 128448 - DNA, 25 bp, SARS Virus
ttctcccactttcccacttaacggg

SEQ ID NO: 128449 - DNA, 25 bp, SARS Virus
tctcccactttaccacttaacggga

SEQ ID NO: 128450 - DNA, 25 bp, SARS Virus
ctcccactttaccacttaacgggag

SEQ ID NO: 128451 - DNA, 25 bp, SARS Virus
tcccactttaccccttaacgggagc

SEQ ID NO: 128452 - DNA, 25 bp, SARS Virus
cccactttaccacttaacgggagca

SEQ ID NO: 128453 - DNA, 25 bp, SARS Virus
ccactttaccacctaacgggagcat

SEQ ID NO: 128454 - DNA, 25 bp, SARS Virus
cactttaccactcaacgggagcata

SEQ ID NO: 128455 - DNA, 25 bp, SARS Virus
actttaccacttcacgggagcatac

SEQ ID NO: 128456 - DNA, 25 bp, SARS Virus
ctttaccacttaccgggagcataca

SEQ ID NO: 128457 - DNA, 25 bp, SARS Virus
tttaccacttaacgggagcatacaa

SEQ ID NO: 128458 - DNA, 25 bp, SARS Virus
ttaccacttaaccggagcatacaag

SEQ ID NO: 128459 - DNA, 25 bp, SARS Virus
taccacttaacgcgagcatacaagg

SEQ ID NO: 128460 - DNA, 25 bp, SARS Virus
accacttaacggcagcatacaagga

SEQ ID NO: 128461 - DNA, 25 bp, SARS Virus
ccacttaacgggcgcatacaaggac

SEQ ID NO: 128462 - DNA, 25 bp, SARS Virus
cacttaacgggaccatacaaggact

SEQ ID NO: 128463 - DNA, 25 bp, SARS Virus
acttaacgggagcatacaaggacta

SEQ ID NO: 128464 - DNA, 25 bp, SARS Virus
cttaacgggagcctacaaggactac

SEQ ID NO: 128465 - DNA, 25 bp, SARS Virus
ttaacgggagcacacaaggactacc

SEQ ID NO: 128466 - DNA, 25 bp, SARS Virus
taacgggagcatccaaggactaccc

SEQ ID NO: 128467 - DNA, 25 bp, SARS Virus
aacgggagcatacaaggactacccg

SEQ ID NO: 128468 - DNA, 25 bp, SARS Virus
acgggagcataccaggactacccgt

SEQ ID NO: 128469 - DNA, 25 bp, SARS Virus
cgggagcatacacggactacccgtt

SEQ ID NO: 128470 - DNA, 25 bp, SARS Virus
gggagcatacaacgactacccgttc

SEQ ID NO: 128471 - DNA, 25 bp, SARS Virus
ggagcatacaagcactacccgttcc

SEQ ID NO: 128472 - DNA, 25 bp, SARS Virus
gagcatacaaggcctacccgttcca

SEQ ID NO: 128473 - DNA, 25 bp, SARS Virus
agcatacaaggactacccgttccaa

SEQ ID NO: 128474 - DNA, 25 bp, SARS Virus
gcatacaaggaccacccgttccaag

SEQ ID NO: 128475 - DNA, 25 bp, SARS Virus
catacaaggactccccgttccaaga

SEQ ID NO: 128476 - DNA, 25 bp, SARS Virus
atacaaggactacccgttccaagaa

SEQ ID NO: 128477 - DNA, 25 bp, SARS Virus
tacaaggactacccgttccaagaaa

SEQ ID NO: 128478 - DNA, 25 bp, SARS Virus
acaaggactacccgttccaagaaaa

SEQ ID NO: 128479 - DNA, 25 bp, SARS Virus
caaggactaccccttccaagaaaat

SEQ ID NO: 128480 - DNA, 25 bp, SARS Virus
aaggactacccgctccaagaaaatc

SEQ ID NO: 128481 - DNA, 25 bp, SARS Virus
aggactacccgtcccaagaaaatca

SEQ ID NO: 128482 - DNA, 25 bp, SARS Virus
ggactacccgttccaagaaaatcat

SEQ ID NO: 128483 - DNA, 25 bp, SARS Virus
gactacccgttccaagaaaatcatc

SEQ ID NO: 128484 - DNA, 25 bp, SARS Virus
actacccgttcccagaaaatcatca

SEQ ID NO: 128485 - DNA, 25 bp, SARS Virus
ctacccgttccacgaaaatcatcat

SEQ ID NO: 128486 - DNA, 25 bp, SARS Virus
tacccgttccaacaaaatcatcatg

SEQ ID NO: 128487 - DNA, 25 bp, SARS Virus
acccgttccaagcaaatcatcatgt

SEQ ID NO: 128488 - DNA, 25 bp, SARS Virus
cccgttccaagacaatcatcatgtc

SEQ ID NO: 128489 - DNA, 25 bp, SARS Virus
ccgttccaagaacatcatcatgtca

SEQ ID NO: 128490 - DNA, 25 bp, SARS Virus
cgttccaagaaactcatcatgtcag

SEQ ID NO: 128491 - DNA, 25 bp, SARS Virus
gttccaagaaaaccatcatgtcagc

SEQ ID NO: 128492 - DNA, 25 bp, SARS Virus
ttccaagaaaatcatcatgtcagca

SEQ ID NO: 128493 - DNA, 25 bp, SARS Virus
tccaagaaaatcctcatgtcagcat

SEQ ID NO: 128494 - DNA, 25 bp, SARS Virus
ccaagaaaatcaccatgtcagcatg

SEQ ID NO: 128495 - DNA, 25 bp, SARS Virus
caagaaaatcatcatgtcagcatgg

SEQ ID NO: 128496 - DNA, 25 bp, SARS Virus
aagaaaatcatcctgtcagcatgga

SEQ ID NO: 128497 - DNA, 25 bp, SARS Virus
agaaaatcatcacgtcagcatggag

SEQ ID NO: 128498 - DNA, 25 bp, SARS Virus
gaaaatcatcatctcagcatggaga

SEQ ID NO: 128499 - DNA, 25 bp, SARS Virus
aaaatcatcatgccagcatggagat

SEQ ID NO: 128500 - DNA, 25 bp, SARS Virus
aaatcatcatgtcagcatggagatt

SEQ ID NO: 128501 - DNA, 25 bp, SARS Virus
aatcatcatgtccgcatggagattg

SEQ ID NO: 128502 - DNA, 25 bp, SARS Virus
atcatcatgtcaccatggagattgt

SEQ ID NO: 128503 - DNA, 25 bp, SARS Virus
tcatcatgtcagcatggagattgtg

SEQ ID NO: 128504 - DNA, 25 bp, SARS Virus
catcatgtcagcctggagattgtgt

SEQ ID NO: 128505 - DNA, 25 bp, SARS Virus
atcatgtcagcacggagattgtgtg

SEQ ID NO: 128506 - DNA, 25 bp, SARS Virus
tcatgtcagcatcgagattgtgtga

SEQ ID NO: 128507 - DNA, 25 bp, SARS Virus
catgtcagcatgcagattgtgtgag

SEQ ID NO: 128508 - DNA, 25 bp, SARS Virus
atgtcagcatggcgattgtgtgagg

SEQ ID NO: 128509 - DNA, 25 bp, SARS Virus
tgtcagcatggacattgtgtgagga

SEQ ID NO: 128510 - DNA, 25 bp, SARS Virus
gtcagcatggagcttgtgtgaggac

SEQ ID NO: 128511 - DNA, 25 bp, SARS Virus
tcagcatggagactgtgtgaggact

SEQ ID NO: 128512 - DNA, 25 bp, SARS Virus
cagcatggagatcgtgtgaggacta

SEQ ID NO: 128513 - DNA, 25 bp, SARS Virus
agcatggagattctgtgaggactat

SEQ ID NO: 128514 - DNA, 25 bp, SARS Virus
gcatggagattgcgtgaggactatc

SEQ ID NO: 128515 - DNA, 25 bp, SARS Virus
catggagattgtctgaggactatca

SEQ ID NO: 128516 - DNA, 25 bp, SARS Virus
atggagattgtgcgaggactatcac

SEQ ID NO: 128517 - DNA, 25 bp, SARS Virus
tggagattgtgtcaggactatcact

SEQ ID NO: 128518 - DNA, 25 bp, SARS Virus
ggagattgtgtgcggactatcacta

SEQ ID NO: 128519 - DNA, 25 bp, SARS Virus
gagattgtgtgacgactatcactat

SEQ ID NO: 128520 - DNA, 25 bp, SARS Virus
agattgtgtgagcactatcactata

SEQ ID NO: 128521 - DNA, 25 bp, SARS Virus
gattgtgtgaggcctatcactatat

SEQ ID NO: 128522 - DNA, 25 bp, SARS Virus
attgtgtgaggactatcactatatc

SEQ ID NO: 128523 - DNA, 25 bp, SARS Virus
ttgtgtgaggaccatcactatatcg

SEQ ID NO: 128524 - DNA, 25 bp, SARS Virus
tgtgtgaggactctcactatatcga

SEQ ID NO: 128525 - DNA, 25 bp, SARS Virus
gtgtgaggactaccactatatcgag

SEQ ID NO: 128526 - DNA, 25 bp, SARS Virus
tgtgaggactatcactatatcgagc

SEQ ID NO: 128527 - DNA, 25 bp, SARS Virus
gtgaggactatccctatatcgagcg

SEQ ID NO: 128528 - DNA, 25 bp, SARS Virus
tgaggactatcactatatcgagcgt

SEQ ID NO: 128529 - DNA, 25 bp, SARS Virus
gaggactatcaccatatcgagcgtt

SEQ ID NO: 128530 - DNA, 25 bp, SARS Virus
aggactatcactctatcgagcgttc

SEQ ID NO: 128531 - DNA, 25 bp, SARS Virus
ggactatcactacatcgagcgttct

SEQ ID NO: 128532 - DNA, 25 bp, SARS Virus
gactatcactatctcgagcgttcta

SEQ ID NO: 128533 - DNA, 25 bp, SARS Virus
actatcactataccgagcgttctac

SEQ ID NO: 128534 - DNA, 25 bp, SARS Virus
ctatcactatatcgagcgttctaca

SEQ ID NO: 128535 - DNA, 25 bp, SARS Virus
tatcactatatccagcgttctacat

SEQ ID NO: 128536 - DNA, 25 bp, SARS Virus
atcactatatcgcgcgttctacatt

SEQ ID NO: 128537 - DNA, 25 bp, SARS Virus
tcactatatcgaccgttctacattt

SEQ ID NO: 128538 - DNA, 25 bp, SARS Virus
cactatatcgagcgttctacattta

SEQ ID NO: 128539 - DNA, 25 bp, SARS Virus
actatatcgagccttctacatttat

SEQ ID NO: 128540 - DNA, 25 bp, SARS Virus
ctatatcgagcgctctacatttatg

SEQ ID NO: 128541 - DNA, 25 bp, SARS Virus
tatatcgagcgtcctacatttatgt

SEQ ID NO: 128542 - DNA, 25 bp, SARS Virus
atatcgagcgttctacatttatgtt

SEQ ID NO: 128543 - DNA, 25 bp, SARS Virus
tatcgagcgttccacatttatgtta

SEQ ID NO: 128544 - DNA, 25 bp, SARS Virus
atcgagcgttctccatttatgttag

SEQ ID NO: 128545 - DNA, 25 bp, SARS Virus
tcgagcgttctacatttatgttagt

SEQ ID NO: 128546 - DNA, 25 bp, SARS Virus
cgagcgttctacctttatgttagtt

SEQ ID NO: 128547 - DNA, 25 bp, SARS Virus
gagcgttctacacttatgttagtta

SEQ ID NO: 128548 - DNA, 25 bp, SARS Virus
agcgttctacatctatgttagttac

SEQ ID NO: 128549 - DNA, 25 bp, SARS Virus
gcgttctacattcatgttagttaca

SEQ ID NO: 128550 - DNA, 25 bp, SARS Virus
cgttctacatttctgttagttacag

SEQ ID NO: 128551 - DNA, 25 bp, SARS Virus
gttctacatttacgttagttacagt

SEQ ID NO: 128552 - DNA, 25 bp, SARS Virus
ttctacatttatcttagttacagtc

SEQ ID NO: 128553 - DNA, 25 bp, SARS Virus
tctacatttatgctagttacagtcc

SEQ ID NO: 128554 - DNA, 25 bp, SARS Virus
ctacatttatgtcagttacagtcct

SEQ ID NO: 128555 - DNA, 25 bp, SARS Virus
tacatttatgttcgttacagtcctt

SEQ ID NO: 128556 - DNA, 25 bp, SARS Virus
acatttatgttacttacagtccttc

SEQ ID NO: 128557 - DNA, 25 bp, SARS Virus
catttatgttagctacagtccttct

SEQ ID NO: 128558 - DNA, 25 bp, SARS Virus
atttatgttagtcacagtccttctc

SEQ ID NO: 128559 - DNA, 25 bp, SARS Virus
tttatgttagttccagtccttctct

SEQ ID NO: 128560 - DNA, 25 bp, SARS Virus
ttatgttagttacagtccttctctt

SEQ ID NO: 128561 - DNA, 25 bp, SARS Virus
tatgttagttaccgtccttctctta

SEQ ID NO: 128562 - DNA, 25 bp, SARS Virus
atgttagttacactccttctcttat

SEQ ID NO: 128563 - DNA, 25 bp, SARS Virus
tgttagttacagcccttctcttatt

SEQ ID NO: 128564 - DNA, 25 bp, SARS Virus
gttagttacagtccttctcttatta

SEQ ID NO: 128565 - DNA, 25 bp, SARS Virus
ttagttacagtccttctcttattaa

SEQ ID NO: 128566 - DNA, 25 bp, SARS Virus
tagttacagtccctctcttattaaa

SEQ ID NO: 128567 - DNA, 25 bp, SARS Virus
agttacagtcctcctcttattaaaa

SEQ ID NO: 128568 - DNA, 25 bp, SARS Virus
gttacagtccttctcttattaaaag

SEQ ID NO: 128569 - DNA, 25 bp, SARS Virus
ttacagtccttcccttattaaaagt

SEQ ID NO: 128570 - DNA, 25 bp, SARS Virus
tacagtccttctcttattaaaagta

SEQ ID NO: 128571 - DNA, 25 bp, SARS Virus
acagtccttctcctattaaaagtac

SEQ ID NO: 128572 - DNA, 25 bp, SARS Virus
cagtccttctctcattaaaagtaca

SEQ ID NO: 128573 - DNA, 25 bp, SARS Virus
agtccttctcttcttaaaagtacaa

SEQ ID NO: 128574 - DNA, 25 bp, SARS Virus
gtccttctcttactaaaagtacaag

SEQ ID NO: 128575 - DNA, 25 bp, SARS Virus
tccttctcttatcaaaagtacaagc

SEQ ID NO: 128576 - DNA, 25 bp, SARS Virus
ccttctcttattcaaagtacaagca

SEQ ID NO: 128577 - DNA, 25 bp, SARS Virus
cttctcttattacaagtacaagcaa

SEQ ID NO: 128578 - DNA, 25 bp, SARS Virus
ttctcttattaacagtacaagcaaa

SEQ ID NO: 128579 - DNA, 25 bp, SARS Virus
tctcttattaaacgtacaagcaaaa

SEQ ID NO: 128580 - DNA, 25 bp, SARS Virus
ctcttattaaaactacaagcaaaat

SEQ ID NO: 128581 - DNA, 25 bp, SARS Virus
tcttattaaaagcacaagcaaaata

SEQ ID NO: 128582 - DNA, 25 bp, SARS Virus
cttattaaaagtccaagcaaaatac

SEQ ID NO: 128583 - DNA, 25 bp, SARS Virus
ttattaaaagtacaagcaaaatacc

SEQ ID NO: 128584 - DNA, 25 bp, SARS Virus
tattaaaagtaccagcaaaatacct

SEQ ID NO: 128585 - DNA, 25 bp, SARS Virus
attaaaagtacacgcaaaataccta

SEQ ID NO: 128586 - DNA, 25 bp, SARS Virus
ttaaaagtacaaccaaaatacctat

SEQ ID NO: 128587 - DNA, 25 bp, SARS Virus
taaaagtacaagcaaaatacctatt

SEQ ID NO: 128588 - DNA, 25 bp, SARS Virus
aaaagtacaagccaaatacctatta

SEQ ID NO: 128589 - DNA, 25 bp, SARS Virus
aaagtacaagcacaatacctattag

SEQ ID NO: 128590 - DNA, 25 bp, SARS Virus
aagtacaagcaacatacctattaga

SEQ ID NO: 128591 - DNA, 25 bp, SARS Virus
agtacaagcaaactacctattagat

SEQ ID NO: 128592 - DNA, 25 bp, SARS Virus
gtacaagcaaaacacctattagatt

SEQ ID NO: 128593 - DNA, 25 bp, SARS Virus
tacaagcaaaatccctattagattg

SEQ ID NO: 128594 - DNA, 25 bp, SARS Virus
acaagcaaaatacctattagattga

SEQ ID NO: 128595 - DNA, 25 bp, SARS Virus
caagcaaaatacctattagattgag

SEQ ID NO: 128596 - DNA, 25 bp, SARS Virus
aagcaaaatacccattagattgagg

SEQ ID NO: 128597 - DNA, 25 bp, SARS Virus
agcaaaatacctcttagattgaggt

SEQ ID NO: 128598 - DNA, 25 bp, SARS Virus
gcaaaatacctactagattgaggta

SEQ ID NO: 128599 - DNA, 25 bp, SARS Virus
caaaatacctatcagattgaggtat

SEQ ID NO: 128600 - DNA, 25 bp, SARS Virus
aaaatacctattcgattgaggtatc

SEQ ID NO: 128601 - DNA, 25 bp, SARS Virus
aaatacctattacattgaggtatcc

SEQ ID NO: 128602 - DNA, 25 bp, SARS Virus
aatacctattagcttgaggtatcca

SEQ ID NO: 128603 - DNA, 25 bp, SARS Virus
atacctattagactgaggtatccaa

SEQ ID NO: 128604 - DNA, 25 bp, SARS Virus
tacctattagatcgaggtatccaag

SEQ ID NO: 128605 - DNA, 25 bp, SARS Virus
acctattagattcaggtatccaaga

SEQ ID NO: 128606 - DNA, 25 bp, SARS Virus
cctattagattgcggtatccaagaa

SEQ ID NO: 128607 - DNA, 25 bp, SARS Virus
ctattagattgacgtatccaagaag

SEQ ID NO: 128608 - DNA, 25 bp, SARS Virus
tattagattgagctatccaagaagt

SEQ ID NO: 128609 - DNA, 25 bp, SARS Virus
attagattgaggcatccaagaagta

SEQ ID NO: 128610 - DNA, 25 bp, SARS Virus
ttagattgaggtctccaagaagtag

SEQ ID NO: 128611 - DNA, 25 bp, SARS Virus
tagattgaggtacccaagaagtagt

SEQ ID NO: 128612 - DNA, 25 bp, SARS Virus
agattgaggtatccaagaagtagta

SEQ ID NO: 128613 - DNA, 25 bp, SARS Virus
gattgaggtatccaagaagtagtag

SEQ ID NO: 128614 - DNA, 25 bp, SARS Virus
attgaggtatcccagaagtagtaga

SEQ ID NO: 128615 - DNA, 25 bp, SARS Virus
ttgaggtatccacgaagtagtagat

SEQ ID NO: 128616 - DNA, 25 bp, SARS Virus
tgaggtatccaacaagtagtagatt

SEQ ID NO: 128617 - DNA, 25 bp, SARS Virus
gaggtatccaagcagtagtagattg

SEQ ID NO: 128618 - DNA, 25 bp, SARS Virus
aggtatccaagacgtagtagattga

SEQ ID NO: 128619 - DNA, 25 bp, SARS Virus
ggtatccaagaactagtagattgag

SEQ ID NO: 128620 - DNA, 25 bp, SARS Virus
gtatccaagaagcagtagattgagg

SEQ ID NO: 128621 - DNA, 25 bp, SARS Virus
tatccaagaagtcgtagattgaggc

SEQ ID NO: 128622 - DNA, 25 bp, SARS Virus
atccaagaagtactagattgaggct

SEQ ID NO: 128623 - DNA, 25 bp, SARS Virus
tccaagaagtagcagattgaggctt

SEQ ID NO: 128624 - DNA, 25 bp, SARS Virus
ccaagaagtagtcgattgaggctta

SEQ ID NO: 128625 - DNA, 25 bp, SARS Virus
caagaagtagtacattgaggcttat

SEQ ID NO: 128626 - DNA, 25 bp, SARS Virus
aagaagtagtagcttgaggcttatt

SEQ ID NO: 128627 - DNA, 25 bp, SARS Virus
agaagtagtagactgaggcttatta

SEQ ID NO: 128628 - DNA, 25 bp, SARS Virus
gaagtagtagatcgaggcttattaa

SEQ ID NO: 128629 - DNA, 25 bp, SARS Virus
aagtagtagattcaggcttattaag

SEQ ID NO: 128630 - DNA, 25 bp, SARS Virus
agtagtagattgcggcttattaaga

SEQ ID NO: 128631 - DNA, 25 bp, SARS Virus
gtagtagattgacgcttattaagaa

SEQ ID NO: 128632 - DNA, 25 bp, SARS Virus
tagtagattgagccttattaagaag

SEQ ID NO: 128633 - DNA, 25 bp, SARS Virus
agtagattgaggcttattaagaaga

SEQ ID NO: 128634 - DNA, 25 bp, SARS Virus
gtagattgaggcctattaagaagaa

SEQ ID NO: 128635 - DNA, 25 bp, SARS Virus
tagattgaggctcattaagaagaat

SEQ ID NO: 128636 - DNA, 25 bp, SARS Virus
agattgaggcttcttaagaagaatc

SEQ ID NO: 128637 - DNA, 25 bp, SARS Virus
gattgaggcttactaagaagaatca

SEQ ID NO: 128638 - DNA, 25 bp, SARS Virus
attgaggcttatcaagaagaatcaa

SEQ ID NO: 128639 - DNA, 25 bp, SARS Virus
ttgaggcttattcagaagaatcaat

SEQ ID NO: 128640 - DNA, 25 bp, SARS Virus
tgaggcttattacgaagaatcaatc

SEQ ID NO: 128641 - DNA, 25 bp, SARS Virus
gaggcttattaacaagaatcaatct

SEQ ID NO: 128642 - DNA, 25 bp, SARS Virus
aggcttattaagcagaatcaatctc

SEQ ID NO: 128643 - DNA, 25 bp, SARS Virus
ggcttattaagacgaatcaatctcc

SEQ ID NO: 128644 - DNA, 25 bp, SARS Virus
gcttattaagaacaatcaatctccg

SEQ ID NO: 128645 - DNA, 25 bp, SARS Virus
cttattaagaagcatcaatctccga

SEQ ID NO: 128646 - DNA, 25 bp, SARS Virus
ttattaagaagactcaatctccgaa

SEQ ID NO: 128647 - DNA, 25 bp, SARS Virus
tattaagaagaaccaatctccgaat

SEQ ID NO: 128648 - DNA, 25 bp, SARS Virus
attaagaagaatcaatctccgaatt

SEQ ID NO: 128649 - DNA, 25 bp, SARS Virus
ttaagaagaatccatctccgaattt

SEQ ID NO: 128650 - DNA, 25 bp, SARS Virus
taagaagaatcactctccgaattta

SEQ ID NO: 128651 - DNA, 25 bp, SARS Virus
aagaagaatcaacctccgaatttat

SEQ ID NO: 128652 - DNA, 25 bp, SARS Virus
agaagaatcaatctccgaatttatt

SEQ ID NO: 128653 - DNA, 25 bp, SARS Virus
gaagaatcaatccccgaatttatta

SEQ ID NO: 128654 - DNA, 25 bp, SARS Virus
aagaatcaatctccgaatttattaa

SEQ ID NO: 128655 - DNA, 25 bp, SARS Virus
agaatcaatctccgaatttattaac

SEQ ID NO: 128656 - DNA, 25 bp, SARS Virus
gaatcaatctcccaatttattaaca

SEQ ID NO: 128657 - DNA, 25 bp, SARS Virus
aatcaatctccgcatttattaacag

SEQ ID NO: 128658 - DNA, 25 bp, SARS Virus
atcaatctccgactttattaacaga

SEQ ID NO: 128659 - DNA, 25 bp, SARS Virus
tcaatctccgaacttattaacagag

SEQ ID NO: 128660 - DNA, 25 bp, SARS Virus
caatctccgaatctattaacagagt

SEQ ID NO: 128661 - DNA, 25 bp, SARS Virus
aatctccgaattcattaacagagtg

SEQ ID NO: 128662 - DNA, 25 bp, SARS Virus
atctccgaatttcttaacagagtga

SEQ ID NO: 128663 - DNA, 25 bp, SARS Virus
tctccgaatttactaacagagtgat

SEQ ID NO: 128664 - DNA, 25 bp, SARS Virus
ctccgaatttatcaacagagtgata

SEQ ID NO: 128665 - DNA, 25 bp, SARS Virus
tccgaatttattcacagagtgataa

SEQ ID NO: 128666 - DNA, 25 bp, SARS Virus
ccgaatttattaccagagtgataac

SEQ ID NO: 128667 - DNA, 25 bp, SARS Virus
cgaatttattaacagagtgataact

SEQ ID NO: 128668 - DNA, 25 bp, SARS Virus
gaatttattaaccgagtgataactt

SEQ ID NO: 128669 - DNA, 25 bp, SARS Virus
aatttattaacacagtgataacttg

SEQ ID NO: 128670 - DNA, 25 bp, SARS Virus
atttattaacagcgtgataacttga

SEQ ID NO: 128671 - DNA, 25 bp, SARS Virus
tttattaacagactgataacttgaa

SEQ ID NO: 128672 - DNA, 25 bp, SARS Virus
ttattaacagagcgataacttgaat

SEQ ID NO: 128673 - DNA, 25 bp, SARS Virus
tattaacagagtcataacttgaata

SEQ ID NO: 128674 - DNA, 25 bp, SARS Virus
attaacagagtgctaacttgaataa

SEQ ID NO: 128675 - DNA, 25 bp, SARS Virus
ttaacagagtgacaacttgaataat

SEQ ID NO: 128676 - DNA, 25 bp, SARS Virus
taacagagtgatcacttgaataata

SEQ ID NO: 128677 - DNA, 25 bp, SARS Virus
aacagagtgataccttgaataatat

SEQ ID NO: 128678 - DNA, 25 bp, SARS Virus
acagagtgataacttgaataatatt

SEQ ID NO: 128679 - DNA, 25 bp, SARS Virus
cagagtgataacctgaataatattg

SEQ ID NO: 128680 - DNA, 25 bp, SARS Virus
agagtgataactcgaataatattgc

SEQ ID NO: 128681 - DNA, 25 bp, SARS Virus
gagtgataacttcaataatattgca

SEQ ID NO: 128682 - DNA, 25 bp, SARS Virus
agtgataacttgcataatattgcag

SEQ ID NO: 128683 - DNA, 25 bp, SARS Virus
gtgataacttgactaatattgcagt

SEQ ID NO: 128684 - DNA, 25 bp, SARS Virus
tgataacttgaacaatattgcagtt

SEQ ID NO: 128685 - DNA, 25 bp, SARS Virus
gataacttgaatcatattgcagttc

SEQ ID NO: 128686 - DNA, 25 bp, SARS Virus
ataacttgaatactattgcagttct

SEQ ID NO: 128687 - DNA, 25 bp, SARS Virus
taacttgaataacattgcagttcta

SEQ ID NO: 128688 - DNA, 25 bp, SARS Virus
aacttgaataatcttgcagttctaa

SEQ ID NO: 128689 - DNA, 25 bp, SARS Virus
acttgaataatactgcagttctaag

SEQ ID NO: 128690 - DNA, 25 bp, SARS Virus
cttgaataatatcgcagttctaagg

SEQ ID NO: 128691 - DNA, 25 bp, SARS Virus
ttgaataatattccagttctaaggt

SEQ ID NO: 128692 - DNA, 25 bp, SARS Virus
tgaataatattgcagttctaaggtt

SEQ ID NO: 128693 - DNA, 25 bp, SARS Virus
gaataatattgccgttctaaggttt

SEQ ID NO: 128694 - DNA, 25 bp, SARS Virus
aataatattgcacttctaaggttta

SEQ ID NO: 128695 - DNA, 25 bp, SARS Virus
ataatattgcagctctaaggtttat

SEQ ID NO: 128696 - DNA, 25 bp, SARS Virus
taatattgcagtcctaaggtttatc

SEQ ID NO: 128697 - DNA, 25 bp, SARS Virus
aatattgcagttctaaggtttatcg

SEQ ID NO: 128698 - DNA, 25 bp, SARS Virus
atattgcagttccaaggtttatcgt

SEQ ID NO: 128699 - DNA, 25 bp, SARS Virus
tattgcagttctcaggtttatcgtt

SEQ ID NO: 128700 - DNA, 25 bp, SARS Virus
attgcagttctacggtttatcgtta

SEQ ID NO: 128701 - DNA, 25 bp, SARS Virus
ttgcagttctaacgtttatcgttag

SEQ ID NO: 128702 - DNA, 25 bp, SARS Virus
tgcagttctaagctttatcgttagg

SEQ ID NO: 128703 - DNA, 25 bp, SARS Virus
gcagttctaaggcttatcgttagga

SEQ ID NO: 128704 - DNA, 25 bp, SARS Virus
cagttctaaggtctatcgttaggac

SEQ ID NO: 128705 - DNA, 25 bp, SARS Virus
agttctaaggttcatcgttaggact

SEQ ID NO: 128706 - DNA, 25 bp, SARS Virus
gttctaaggtttctcgttaggactt

SEQ ID NO: 128707 - DNA, 25 bp, SARS Virus
ttctaaggtttaccgttaggacttt

SEQ ID NO: 128708 - DNA, 25 bp, SARS Virus
tctaaggtttatcgttaggactttc

SEQ ID NO: 128709 - DNA, 25 bp, SARS Virus
ctaaggtttatccttaggactttca

SEQ ID NO: 128710 - DNA, 25 bp, SARS Virus
taaggtttatcgctaggactttcag

SEQ ID NO: 128711 - DNA, 25 bp, SARS Virus
aaggtttatcgtcaggactttcagg

SEQ ID NO: 128712 - DNA, 25 bp, SARS Virus
aggtttatcgttcggactttcagga

SEQ ID NO: 128713 - DNA, 25 bp, SARS Virus
ggtttatcgttacgactttcaggag

SEQ ID NO: 128714 - DNA, 25 bp, SARS Virus
gtttatcgttagcactttcaggagt

SEQ ID NO: 128715 - DNA, 25 bp, SARS Virus
tttatcgttaggcctttcaggagta

SEQ ID NO: 128716 - DNA, 25 bp, SARS Virus
ttatcgttaggactttcaggagtat

SEQ ID NO: 128717 - DNA, 25 bp, SARS Virus
tatcgttaggaccttcaggagtatt

SEQ ID NO: 128718 - DNA, 25 bp, SARS Virus
atcgttaggactctcaggagtatta

SEQ ID NO: 128719 - DNA, 25 bp, SARS Virus
tcgttaggacttccaggagtattac

SEQ ID NO: 128720 - DNA, 25 bp, SARS Virus
cgttaggactttcaggagtattact

SEQ ID NO: 128721 - DNA, 25 bp, SARS Virus
gttaggactttccggagtattacta

SEQ ID NO: 128722 - DNA, 25 bp, SARS Virus
ttaggactttcacgagtattactat

SEQ ID NO: 128723 - DNA, 25 bp, SARS Virus
taggactttcagcagtattactatt

SEQ ID NO: 128724 - DNA, 25 bp, SARS Virus
aggactttcaggcgtattactatta

SEQ ID NO: 128725 - DNA, 25 bp, SARS Virus
ggactttcaggactattactattag

SEQ ID NO: 128726 - DNA, 25 bp, SARS Virus
gactttcaggagcattactattagt

SEQ ID NO: 128727 - DNA, 25 bp, SARS Virus
actttcaggagtcttactattagtt

SEQ ID NO: 128728 - DNA, 25 bp, SARS Virus
ctttcaggagtactactattagtta

SEQ ID NO: 128729 - DNA, 25 bp, SARS Virus
tttcaggagtatcactattagttat

SEQ ID NO: 128730 - DNA, 25 bp, SARS Virus
ttcaggagtattcctattagttata

SEQ ID NO: 128731 - DNA, 25 bp, SARS Virus
tcaggagtattactattagttatag

SEQ ID NO: 128732 - DNA, 25 bp, SARS Virus
caggagtattaccattagttataga

SEQ ID NO: 128733 - DNA, 25 bp, SARS Virus
aggagtattactcttagttatagag

SEQ ID NO: 128734 - DNA, 25 bp, SARS Virus
ggagtattactactagttatagaga

SEQ ID NO: 128735 - DNA, 25 bp, SARS Virus
gagtattactatcagttatagagac

SEQ ID NO: 128736 - DNA, 25 bp, SARS Virus
agtattactattcgttatagagacg

SEQ ID NO: 128737 - DNA, 25 bp, SARS Virus
gtattactattacttatagagacga

SEQ ID NO: 128738 - DNA, 25 bp, SARS Virus
tattactattagctatagagacgat

SEQ ID NO: 128739 - DNA, 25 bp, SARS Virus
attactattagtcatagagacgata

SEQ ID NO: 128740 - DNA, 25 bp, SARS Virus
ttactattagttctagagacgataa

SEQ ID NO: 128741 - DNA, 25 bp, SARS Virus
tactattagttacagagacgataac

SEQ ID NO: 128742 - DNA, 25 bp, SARS Virus
actattagttatcgagacgataaca

SEQ ID NO: 128743 - DNA, 25 bp, SARS Virus
ctattagttatacagacgataacat

SEQ ID NO: 128744 - DNA, 25 bp, SARS Virus
tattagttatagcgacgataacatt

SEQ ID NO: 128745 - DNA, 25 bp, SARS Virus
attagttatagacacgataacattg

SEQ ID NO: 128746 - DNA, 25 bp, SARS Virus
ttagttatagagccgataacattgg

SEQ ID NO: 128747 - DNA, 25 bp, SARS Virus
tagttatagagacgataacattgga

SEQ ID NO: 128748 - DNA, 25 bp, SARS Virus
agttatagagaccataacattggac

SEQ ID NO: 128749 - DNA, 25 bp, SARS Virus
gttatagagacgctaacattggacc

SEQ ID NO: 128750 - DNA, 25 bp, SARS Virus
ttatagagacgacaacattggacct

SEQ ID NO: 128751 - DNA, 25 bp, SARS Virus
tatagagacgatcacattggacctt

SEQ ID NO: 128752 - DNA, 25 bp, SARS Virus
atagagacgataccattggaccttc

SEQ ID NO: 128753 - DNA, 25 bp, SARS Virus
tagagacgataacattggaccttca

SEQ ID NO: 128754 - DNA, 25 bp, SARS Virus
agagacgataaccttggaccttcag

SEQ ID NO: 128755 - DNA, 25 bp, SARS Virus
gagacgataacactggaccttcagt

SEQ ID NO: 128756 - DNA, 25 bp, SARS Virus
agacgataacatcggaccttcagtt

SEQ ID NO: 128757 - DNA, 25 bp, SARS Virus
gacgataacattcgaccttcagttg

SEQ ID NO: 128758 - DNA, 25 bp, SARS Virus
acgataacattgcaccttcagttgt

SEQ ID NO: 128759 - DNA, 25 bp, SARS Virus
cgataacattggcccttcagttgtt

SEQ ID NO: 128760 - DNA, 25 bp, SARS Virus
gataacattggaccttcagttgttc

SEQ ID NO: 128761 - DNA, 25 bp, SARS Virus
ataacattggaccttcagttgttct

SEQ ID NO: 128762 - DNA, 25 bp, SARS Virus
taacattggaccctcagttgttcta

SEQ ID NO: 128763 - DNA, 25 bp, SARS Virus
aacattggacctccagttgttctac

SEQ ID NO: 128764 - DNA, 25 bp, SARS Virus
acattggaccttcagttgttctact

SEQ ID NO: 128765 - DNA, 25 bp, SARS Virus
cattggaccttccgttgttctactt

SEQ ID NO: 128766 - DNA, 25 bp, SARS Virus
attggaccttcacttgttctacttt

SEQ ID NO: 128767 - DNA, 25 bp, SARS Virus
ttggaccttcagctgttctactttg

SEQ ID NO: 128768 - DNA, 25 bp, SARS Virus
tggaccttcagtcgttctactttgt

SEQ ID NO: 128769 - DNA, 25 bp, SARS Virus
ggaccttcagttcttctactttgta

SEQ ID NO: 128770 - DNA, 25 bp, SARS Virus
gaccttcagttgctctactttgtag

SEQ ID NO: 128771 - DNA, 25 bp, SARS Virus
accttcagttgtcctactttgtaga

SEQ ID NO: 128772 - DNA, 25 bp, SARS Virus
ccttcagttgttctactttgtagac

SEQ ID NO: 128773 - DNA, 25 bp, SARS Virus
cttcagttgttccactttgtagaca

SEQ ID NO: 128774 - DNA, 25 bp, SARS Virus
ttcagttgttctcctttgtagacaa

SEQ ID NO: 128775 - DNA, 25 bp, SARS Virus
tcagttgttctactttgtagacaac

SEQ ID NO: 128776 - DNA, 25 bp, SARS Virus
cagttgttctaccttgtagacaaca

SEQ ID NO: 128777 - DNA, 25 bp, SARS Virus
agttgttctactctgtagacaacag

SEQ ID NO: 128778 - DNA, 25 bp, SARS Virus
gttgttctacttcgtagacaacagt

SEQ ID NO: 128779 - DNA, 25 bp, SARS Virus
ttgttctactttctagacaacagtg

SEQ ID NO: 128780 - DNA, 25 bp, SARS Virus
tgttctactttgcagacaacagtga

SEQ ID NO: 128781 - DNA, 25 bp, SARS Virus
gttctactttgtcgacaacagtgaa

SEQ ID NO: 128782 - DNA, 25 bp, SARS Virus
ttctactttgtacacaacagtgaat

SEQ ID NO: 128783 - DNA, 25 bp, SARS Virus
tctactttgtagccaacagtgaatg

SEQ ID NO: 128784 - DNA, 25 bp, SARS Virus
ctactttgtagacaacagtgaatga

SEQ ID NO: 128785 - DNA, 25 bp, SARS Virus
tactttgtagaccacagtgaatgac

SEQ ID NO: 128786 - DNA, 25 bp, SARS Virus
actttgtagacaccagtgaatgaca

SEQ ID NO: 128787 - DNA, 25 bp, SARS Virus
ctttgtagacaacagtgaatgacat

SEQ ID NO: 128788 - DNA, 25 bp, SARS Virus
tttgtagacaaccgtgaatgacatg

SEQ ID NO: 128789 - DNA, 25 bp, SARS Virus
ttgtagacaacactgaatgacatga

SEQ ID NO: 128790 - DNA, 25 bp, SARS Virus
tgtagacaacagcgaatgacatgat

SEQ ID NO: 128791 - DNA, 25 bp, SARS Virus
gtagacaacagtcaatgacatgatc

SEQ ID NO: 128792 - DNA, 25 bp, SARS Virus
tagacaacagtgcatgacatgatcg

SEQ ID NO: 128793 - DNA, 25 bp, SARS Virus
agacaacagtgactgacatgatcgt

SEQ ID NO: 128794 - DNA, 25 bp, SARS Virus
gacaacagtgaacgacatgatcgtt

SEQ ID NO: 128795 - DNA, 25 bp, SARS Virus
acaacagtgaatcacatgatcgttt

SEQ ID NO: 128796 - DNA, 25 bp, SARS Virus
caacagtgaatgccatgatcgtttc

SEQ ID NO: 128797 - DNA, 25 bp, SARS Virus
aacagtgaatgacatgatcgtttcg

SEQ ID NO: 128798 - DNA, 25 bp, SARS Virus
acagtgaatgacctgatcgtttcgt

SEQ ID NO: 128799 - DNA, 25 bp, SARS Virus
cagtgaatgacacgatcgtttcgtt

SEQ ID NO: 128800 - DNA, 25 bp, SARS Virus
agtgaatgacatcatcgtttcgtta

SEQ ID NO: 128801 - DNA, 25 bp, SARS Virus
gtgaatgacatgctcgtttcgttat

SEQ ID NO: 128802 - DNA, 25 bp, SARS Virus
tgaatgacatgaccgtttcgttata

SEQ ID NO: 128803 - DNA, 25 bp, SARS Virus
gaatgacatgatcgtttcgttataa

SEQ ID NO: 128804 - DNA, 25 bp, SARS Virus
aatgacatgatcctttcgttataac

SEQ ID NO: 128805 - DNA, 25 bp, SARS Virus
atgacatgatcgcttcgttataaca

SEQ ID NO: 128806 - DNA, 25 bp, SARS Virus
tgacatgatcgtctcgttataacag

SEQ ID NO: 128807 - DNA, 25 bp, SARS Virus
gacatgatcgttccgttataacagc

SEQ ID NO: 128808 - DNA, 25 bp, SARS Virus
acatgatcgtttcgttataacagca

SEQ ID NO: 128809 - DNA, 25 bp, SARS Virus
catgatcgtttccttataacagcaa

SEQ ID NO: 128810 - DNA, 25 bp, SARS Virus
atgatcgtttcgctataacagcaac

SEQ ID NO: 128811 - DNA, 25 bp, SARS Virus
tgatcgtttcgtcataacagcaacg

SEQ ID NO: 128812 - DNA, 25 bp, SARS Virus
gatcgtttcgttctaacagcaacga

SEQ ID NO: 128813 - DNA, 25 bp, SARS Virus
atcgtttcgttacaacagcaacgat

SEQ ID NO: 128814 - DNA, 25 bp, SARS Virus
tcgtttcgttatcacagcaacgatg

SEQ ID NO: 128815 - DNA, 25 bp, SARS Virus
cgtttcgttataccagcaacgatgg

SEQ ID NO: 128816 - DNA, 25 bp, SARS Virus
gtttcgttataacagcaacgatggc

SEQ ID NO: 128817 - DNA, 25 bp, SARS Virus
tttcgttataaccgcaacgatggcc

SEQ ID NO: 128818 - DNA, 25 bp, SARS Virus
ttcgttataacaccaacgatggccg

SEQ ID NO: 128819 - DNA, 25 bp, SARS Virus
tcgttataacagcaacgatggccgc

SEQ ID NO: 128820 - DNA, 25 bp, SARS Virus
cgttataacagccacgatggccgca

SEQ ID NO: 128821 - DNA, 25 bp, SARS Virus
gttataacagcaccgatggccgcac

SEQ ID NO: 128822 - DNA, 25 bp, SARS Virus
ttataacagcaacgatggccgcacc

SEQ ID NO: 128823 - DNA, 25 bp, SARS Virus
tataacagcaaccatggccgcacca

SEQ ID NO: 128824 - DNA, 25 bp, SARS Virus
ataacagcaacgctggccgcaccag

SEQ ID NO: 128825 - DNA, 25 bp, SARS Virus
taacagcaacgacggccgcaccaga

SEQ ID NO: 128826 - DNA, 25 bp, SARS Virus
aacagcaacgatcgccgcaccagac

SEQ ID NO: 128827 - DNA, 25 bp, SARS Virus
acagcaacgatgcccgcaccagaca

SEQ ID NO: 128828 - DNA, 25 bp, SARS Virus
cagcaacgatggccgcaccagacat

SEQ ID NO: 128829 - DNA, 25 bp, SARS Virus
agcaacgatggccgcaccagacata

SEQ ID NO: 128830 - DNA, 25 bp, SARS Virus
gcaacgatggccccaccagacataa

SEQ ID NO: 128831 - DNA, 25 bp, SARS Virus
caacgatggccgcaccagacataaa

SEQ ID NO: 128832 - DNA, 25 bp, SARS Virus
aacgatggccgccccagacataaat

SEQ ID NO: 128833 - DNA, 25 bp, SARS Virus
acgatggccgcaccagacataaatt

SEQ ID NO: 128834 - DNA, 25 bp, SARS Virus
cgatggccgcaccagacataaatta

SEQ ID NO: 128835 - DNA, 25 bp, SARS Virus
gatggccgcacccgacataaattaa

SEQ ID NO: 128836 - DNA, 25 bp, SARS Virus
atggccgcaccacacataaattaaa

SEQ ID NO: 128837 - DNA, 25 bp, SARS Virus
tggccgcaccagccataaattaaat

SEQ ID NO: 128838 - DNA, 25 bp, SARS Virus
ggccgcaccagacataaattaaata

SEQ ID NO: 128839 - DNA, 25 bp, SARS Virus
gccgcaccagacctaaattaaatat

SEQ ID NO: 128840 - DNA, 25 bp, SARS Virus
ccgcaccagacacaaattaaatatc

SEQ ID NO: 128841 - DNA, 25 bp, SARS Virus
cgcaccagacatcaattaaatatca

SEQ ID NO: 128842 - DNA, 25 bp, SARS Virus
gcaccagacatacattaaatatcaa

SEQ ID NO: 128843 - DNA, 25 bp, SARS Virus
caccagacataacttaaatatcaaa

SEQ ID NO: 128844 - DNA, 25 bp, SARS Virus
accagacataaactaaatatcaaag

SEQ ID NO: 128845 - DNA, 25 bp, SARS Virus
ccagacataaatcaaatatcaaagg

SEQ ID NO: 128846 - DNA, 25 bp, SARS Virus
cagacataaattcaatatcaaaggt

SEQ ID NO: 128847 - DNA, 25 bp, SARS Virus
agacataaattacatatcaaaggtt

SEQ ID NO: 128848 - DNA, 25 bp, SARS Virus
gacataaattaactatcaaaggtta

SEQ ID NO: 128849 - DNA, 25 bp, SARS Virus
acataaattaaacatcaaaggttat

SEQ ID NO: 128850 - DNA, 25 bp, SARS Virus
cataaattaaatctcaaaggttatg

SEQ ID NO: 128851 - DNA, 25 bp, SARS Virus
ataaattaaataccaaaggttatgc

SEQ ID NO: 128852 - DNA, 25 bp, SARS Virus
taaattaaatatcaaaggttatgcc

SEQ ID NO: 128853 - DNA, 25 bp, SARS Virus
aaattaaatatccaaggttatgcca

SEQ ID NO: 128854 - DNA, 25 bp, SARS Virus
aattaaatatcacaggttatgccat

SEQ ID NO: 128855 - DNA, 25 bp, SARS Virus
attaaatatcaacggttatgccatc

SEQ ID NO: 128856 - DNA, 25 bp, SARS Virus
ttaaatatcaaacgttatgccatcg

SEQ ID NO: 128857 - DNA, 25 bp, SARS Virus
taaatatcaaagcttatgccatcgc

SEQ ID NO: 128858 - DNA, 25 bp, SARS Virus
aaatatcaaaggctatgccatcgcc

SEQ ID NO: 128859 - DNA, 25 bp, SARS Virus
aatatcaaaggtcatgccatcgcca

SEQ ID NO: 128860 - DNA, 25 bp, SARS Virus
atatcaaaggttctgccatcgccaa

SEQ ID NO: 128861 - DNA, 25 bp, SARS Virus
tatcaaaggttacgccatcgccaac

SEQ ID NO: 128862 - DNA, 25 bp, SARS Virus
atcaaaggttatcccatcgccaaca

SEQ ID NO: 128863 - DNA, 25 bp, SARS Virus
tcaaaggttatgccatcgccaacat

SEQ ID NO: 128864 - DNA, 25 bp, SARS Virus
caaaggttatgccatcgccaacata

SEQ ID NO: 128865 - DNA, 25 bp, SARS Virus
acagctcatggcggtcgtgttcgtt

SEQ ID NO: 128866 - DNA, 25 bp, SARS Virus
cagctcatggcagtcgtgttcgttt

SEQ ID NO: 128867 - DNA, 25 bp, SARS Virus
agctcatggcaggcgtgttcgtttt

SEQ ID NO: 128868 - DNA, 25 bp, SARS Virus
gctcatggcagtggtgttcgttttc

SEQ ID NO: 128869 - DNA, 25 bp, SARS Virus
ctcatggcagtcgtgttcgttttcg

SEQ ID NO: 128870 - DNA, 25 bp, SARS Virus
tcatggcagtcgggttcgttttcgt

SEQ ID NO: 128871 - DNA, 25 bp, SARS Virus
catggcagtcgtgttcgttttcgtt

SEQ ID NO: 128872 - DNA, 25 bp, SARS Virus
atggcagtcgtggtcgttttcgttt

SEQ ID NO: 128873 - DNA, 25 bp, SARS Virus
tggcagtcgtgtgcgttttcgtttc

SEQ ID NO: 128874 - DNA, 25 bp, SARS Virus
ggcagtcgtgttggttttcgtttca

SEQ ID NO: 128875 - DNA, 25 bp, SARS Virus
gcagtcgtgttcgttttcgtttcac

SEQ ID NO: 128876 - DNA, 25 bp, SARS Virus
cagtcgtgttcggtttcgtttcaca

SEQ ID NO: 128877 - DNA, 25 bp, SARS Virus
agtcgtgttcgtgttcgtttcacac

SEQ ID NO: 128878 - DNA, 25 bp, SARS Virus
gtcgtgttcgttgtcgtttcacaca

SEQ ID NO: 128879 - DNA, 25 bp, SARS Virus
tcgtgttcgtttgcgtttcacacac

SEQ ID NO: 128880 - DNA, 25 bp, SARS Virus
cgtgttcgttttggtttcacacacg

SEQ ID NO: 128881 - DNA, 25 bp, SARS Virus
gtgttcgttttcgtttcacacacga

SEQ ID NO: 128882 - DNA, 25 bp, SARS Virus
tgttcgttttcggttcacacacgat

SEQ ID NO: 128883 - DNA, 25 bp, SARS Virus
gttcgttttcgtgtcacacacgatc

SEQ ID NO: 128884 - DNA, 25 bp, SARS Virus
ttcgttttcgttgcacacacgatca

SEQ ID NO: 128885 - DNA, 25 bp, SARS Virus
tcgttttcgtttgacacacgatcac

SEQ ID NO: 128886 - DNA, 25 bp, SARS Virus
cgttttcgtttcgcacacgatcacg

SEQ ID NO: 128887 - DNA, 25 bp, SARS Virus
gttttcgtttcagacacgatcacgt

SEQ ID NO: 128888 - DNA, 25 bp, SARS Virus
ttttcgtttcacgcacgatcacgtt

SEQ ID NO: 128889 - DNA, 25 bp, SARS Virus
tttcgtttcacagacgatcacgttc

SEQ ID NO: 128890 - DNA, 25 bp, SARS Virus
ttcgtttcacacgcgatcacgttca

SEQ ID NO: 128891 - DNA, 25 bp, SARS Virus
tcgtttcacacaggatcacgttcaa

SEQ ID NO: 128892 - DNA, 25 bp, SARS Virus
cgtttcacacacgatcacgttcaat

SEQ ID NO: 128893 - DNA, 25 bp, SARS Virus
gtttcacacacggtcacgttcaatc

SEQ ID NO: 128894 - DNA, 25 bp, SARS Virus
tttcacacacgagcacgttcaatca

SEQ ID NO: 128895 - DNA, 25 bp, SARS Virus
ttcacacacgatgacgttcaatcac

SEQ ID NO: 128896 - DNA, 25 bp, SARS Virus
tcacacacgatcgcgttcaatcacg

SEQ ID NO: 128897 - DNA, 25 bp, SARS Virus
cacacacgatcaggttcaatcacgt

SEQ ID NO: 128898 - DNA, 25 bp, SARS Virus
acacacgatcacgttcaatcacgtt

SEQ ID NO: 128899 - DNA, 25 bp, SARS Virus
cacacgatcacggtcaatcacgttt

SEQ ID NO: 128900 - DNA, 25 bp, SARS Virus
acacgatcacgtgcaatcacgttta

SEQ ID NO: 128901 - DNA, 25 bp, SARS Virus
cacgatcacgttgaatcacgtttaa

SEQ ID NO: 128902 - DNA, 25 bp, SARS Virus
acgatcacgttcgatcacgtttaaa

SEQ ID NO: 128903 - DNA, 25 bp, SARS Virus
cgatcacgttcagtcacgtttaaat

SEQ ID NO: 128904 - DNA, 25 bp, SARS Virus
gatcacgttcaagcacgtttaaata

SEQ ID NO: 128905 - DNA, 25 bp, SARS Virus
atcacgttcaatgacgtttaaataa

SEQ ID NO: 128906 - DNA, 25 bp, SARS Virus
tcacgttcaatcgcgtttaaataac

SEQ ID NO: 128907 - DNA, 25 bp, SARS Virus
cacgttcaatcaggtttaaataaca

SEQ ID NO: 128908 - DNA, 25 bp, SARS Virus
acgttcaatcacgtttaaataacag

SEQ ID NO: 128909 - DNA, 25 bp, SARS Virus
cgttcaatcacggttaaataacagt

SEQ ID NO: 128910 - DNA, 25 bp, SARS Virus
gttcaatcacgtgtaaataacagtc

SEQ ID NO: 128911 - DNA, 25 bp, SARS Virus
ttcaatcacgttgaaataacagtcg

SEQ ID NO: 128912 - DNA, 25 bp, SARS Virus
tcaatcacgtttgaataacagtcgt

SEQ ID NO: 128913 - DNA, 25 bp, SARS Virus
caatcacgtttagataacagtcgtt

SEQ ID NO: 128914 - DNA, 25 bp, SARS Virus
aatcacgtttaagtaacagtcgttc

SEQ ID NO: 128915 - DNA, 25 bp, SARS Virus
atcacgtttaaagaacagtcgttct

SEQ ID NO: 128916 - DNA, 25 bp, SARS Virus
tcacgtttaaatgacagtcgttctc

SEQ ID NO: 128917 - DNA, 25 bp, SARS Virus
cacgtttaaatagcagtcgttctcc

SEQ ID NO: 128918 - DNA, 25 bp, SARS Virus
acgtttaaataagagtcgttctccc

SEQ ID NO: 128919 - DNA, 25 bp, SARS Virus
cgtttaaataacggtcgttctccca

SEQ ID NO: 128920 - DNA, 25 bp, SARS Virus
gtttaaataacagtcgttctcccac

SEQ ID NO: 128921 - DNA, 25 bp, SARS Virus
tttaaataacaggcgttctcccact

SEQ ID NO: 128922 - DNA, 25 bp, SARS Virus
ttaaataacagtggttctcccactt

SEQ ID NO: 128923 - DNA, 25 bp, SARS Virus
taaataacagtcgttctcccacttt

SEQ ID NO: 128924 - DNA, 25 bp, SARS Virus
aaataacagtcggtctcccacttta

SEQ ID NO: 128925 - DNA, 25 bp, SARS Virus
aataacagtcgtgctcccactttac

SEQ ID NO: 128926 - DNA, 25 bp, SARS Virus
ataacagtcgttgtcccactttacc

SEQ ID NO: 128927 - DNA, 25 bp, SARS Virus
taacagtcgttcgcccactttacca

SEQ ID NO: 128928 - DNA, 25 bp, SARS Virus
aacagtcgttctgccactttaccac

SEQ ID NO: 128929 - DNA, 25 bp, SARS Virus
acagtcgttctcgcactttaccact

SEQ ID NO: 128930 - DNA, 25 bp, SARS Virus
cagtcgttctccgactttaccactt

SEQ ID NO: 128931 - DNA, 25 bp, SARS Virus
agtcgttctcccgctttaccactta

SEQ ID NO: 128932 - DNA, 25 bp, SARS Virus
gtcgttctcccagtttaccacttaa

SEQ ID NO: 128933 - DNA, 25 bp, SARS Virus
tcgttctcccacgttaccacttaac

SEQ ID NO: 128934 - DNA, 25 bp, SARS Virus
cgttctcccactgtaccacttaacg

SEQ ID NO: 128935 - DNA, 25 bp, SARS Virus
gttctcccacttgaccacttaacgg

SEQ ID NO: 128936 - DNA, 25 bp, SARS Virus
ttctcccactttgccacttaacggg

SEQ ID NO: 128937 - DNA, 25 bp, SARS Virus
tctcccactttagcacttaacggga

SEQ ID NO: 128938 - DNA, 25 bp, SARS Virus
ctcccactttacgacttaacgggag

SEQ ID NO: 128939 - DNA, 25 bp, SARS Virus
tcccactttaccgcttaacgggagc

SEQ ID NO: 128940 - DNA, 25 bp, SARS Virus
cccactttaccagttaacgggagca

SEQ ID NO: 128941 - DNA, 25 bp, SARS Virus
ccactttaccacgtaacgggagcat

SEQ ID NO: 128942 - DNA, 25 bp, SARS Virus
cactttaccactgaacgggagcata

SEQ ID NO: 128943 - DNA, 25 bp, SARS Virus
actttaccacttgacgggagcatac

SEQ ID NO: 128944 - DNA, 25 bp, SARS Virus
ctttaccacttagcgggagcataca

SEQ ID NO: 128945 - DNA, 25 bp, SARS Virus
tttaccacttaaggggagcatacaa

SEQ ID NO: 128946 - DNA, 25 bp, SARS Virus
ttaccacttaacgggagcatacaag

SEQ ID NO: 128947 - DNA, 25 bp, SARS Virus
taccacttaacgggagcatacaagg

SEQ ID NO: 128948 - DNA, 25 bp, SARS Virus
accacttaacgggagcatacaagga

SEQ ID NO: 128949 - DNA, 25 bp, SARS Virus
ccacttaacgggggcatacaaggac

SEQ ID NO: 128950 - DNA, 25 bp, SARS Virus
cacttaacgggagcatacaaggact

SEQ ID NO: 128951 - DNA, 25 bp, SARS Virus
acttaacgggaggatacaaggacta

SEQ ID NO: 128952 - DNA, 25 bp, SARS Virus
cttaacgggagcgtacaaggactac

SEQ ID NO: 128953 - DNA, 25 bp, SARS Virus
ttaacgggagcagacaaggactacc

SEQ ID NO: 128954 - DNA, 25 bp, SARS Virus
taacgggagcatgcaaggactaccc

SEQ ID NO: 128955 - DNA, 25 bp, SARS Virus
aacgggagcatagaaggactacccg

SEQ ID NO: 128956 - DNA, 25 bp, SARS Virus
acgggagcatacgaggactacccgt

SEQ ID NO: 128957 - DNA, 25 bp, SARS Virus
cgggagcatacagggactacccgtt

SEQ ID NO: 128958 - DNA, 25 bp, SARS Virus
gggagcatacaaggactacccgttc

SEQ ID NO: 128959 - DNA, 25 bp, SARS Virus
ggagcatacaaggactacccgttcc

SEQ ID NO: 128960 - DNA, 25 bp, SARS Virus
gagcatacaagggctacccgttcca

SEQ ID NO: 128961 - DNA, 25 bp, SARS Virus
agcatacaaggagtacccgttccaa

SEQ ID NO: 128962 - DNA, 25 bp, SARS Virus
gcatacaaggacgacccgttccaag

SEQ ID NO: 128963 - DNA, 25 bp, SARS Virus
catacaaggactgcccgttccaaga

SEQ ID NO: 128964 - DNA, 25 bp, SARS Virus
atacaaggactagccgttccaagaa

SEQ ID NO: 128965 - DNA, 25 bp, SARS Virus
tacaaggactacgcgttccaagaaa

SEQ ID NO: 128966 - DNA, 25 bp, SARS Virus
acaaggactaccggttccaagaaaa

SEQ ID NO: 128967 - DNA, 25 bp, SARS Virus
caaggactacccgttccaagaaaat

SEQ ID NO: 128968 - DNA, 25 bp, SARS Virus
aaggactacccggtccaagaaaatc

SEQ ID NO: 128969 - DNA, 25 bp, SARS Virus
aggactacccgtgccaagaaaatca

SEQ ID NO: 128970 - DNA, 25 bp, SARS Virus
ggactacccgttgcaagaaaatcat

SEQ ID NO: 128971 - DNA, 25 bp, SARS Virus
gactacccgttcgaagaaaatcatc

SEQ ID NO: 128972 - DNA, 25 bp, SARS Virus
actacccgttccgagaaaatcatca

SEQ ID NO: 128973 - DNA, 25 bp, SARS Virus
ctacccgttccaggaaaatcatcat

SEQ ID NO: 128974 - DNA, 25 bp, SARS Virus
tacccgttccaagaaaatcatcatg

SEQ ID NO: 128975 - DNA, 25 bp, SARS Virus
acccgttccaaggaaatcatcatgt

SEQ ID NO: 128976 - DNA, 25 bp, SARS Virus
cccgttccaagagaatcatcatgtc

SEQ ID NO: 128977 - DNA, 25 bp, SARS Virus
ccgttccaagaagatcatcatgtca

SEQ ID NO: 128978 - DNA, 25 bp, SARS Virus
cgttccaagaaagtcatcatgtcag

SEQ ID NO: 128979 - DNA, 25 bp, SARS Virus
gttccaagaaaagcatcatgtcagc

SEQ ID NO: 128980 - DNA, 25 bp, SARS Virus
ttccaagaaaatgatcatgtcagca

SEQ ID NO: 128981 - DNA, 25 bp, SARS Virus
tccaagaaaatcgtcatgtcagcat

SEQ ID NO: 128982 - DNA, 25 bp, SARS Virus
ccaagaaaatcagcatgtcagcatg

SEQ ID NO: 128983 - DNA, 25 bp, SARS Virus
caagaaaatcatgatgtcagcatgg

SEQ ID NO: 128984 - DNA, 25 bp, SARS Virus
aagaaaatcatcgtgtcagcatgga

SEQ ID NO: 128985 - DNA, 25 bp, SARS Virus
agaaaatcatcaggtcagcatggag

SEQ ID NO: 128986 - DNA, 25 bp, SARS Virus
gaaaatcatcatgtcagcatggaga

SEQ ID NO: 128987 - DNA, 25 bp, SARS Virus
aaaatcatcatggcagcatggagat

SEQ ID NO: 128988 - DNA, 25 bp, SARS Virus
aaatcatcatgtgagcatggagatt

SEQ ID NO: 128989 - DNA, 25 bp, SARS Virus
aatcatcatgtcggcatggagattg

SEQ ID NO: 128990 - DNA, 25 bp, SARS Virus
atcatcatgtcagcatggagattgt

SEQ ID NO: 128991 - DNA, 25 bp, SARS Virus
tcatcatgtcaggatggagattgtg

SEQ ID NO: 128992 - DNA, 25 bp, SARS Virus
catcatgtcagcgtggagattgtgt

SEQ ID NO: 128993 - DNA, 25 bp, SARS Virus
atcatgtcagcagggagattgtgtg

SEQ ID NO: 128994 - DNA, 25 bp, SARS Virus
tcatgtcagcatggagattgtgtga

SEQ ID NO: 128995 - DNA, 25 bp, SARS Virus
catgtcagcatggagattgtgtgag

SEQ ID NO: 128996 - DNA, 25 bp, SARS Virus
atgtcagcatggggattgtgtgagg

SEQ ID NO: 128997 - DNA, 25 bp, SARS Virus
tgtcagcatggagattgtgtgagga

SEQ ID NO: 128998 - DNA, 25 bp, SARS Virus
gtcagcatggaggttgtgtgaggac

SEQ ID NO: 128999 - DNA, 25 bp, SARS Virus
tcagcatggagagtgtgtgaggact

SEQ ID NO: 129000 - DNA, 25 bp, SARS Virus
cagcatggagatggtgtgaggacta

SEQ ID NO: 129001 - DNA, 25 bp, SARS Virus
agcatggagattgtgtgaggactat

SEQ ID NO: 129002 - DNA, 25 bp, SARS Virus
gcatggagattgggtgaggactatc

SEQ ID NO: 129003 - DNA, 25 bp, SARS Virus
catggagattgtgtgaggactatca

SEQ ID NO: 129004 - DNA, 25 bp, SARS Virus
atggagattgtgggaggactatcac

SEQ ID NO: 129005 - DNA, 25 bp, SARS Virus
tggagattgtgtgaggactatcact

SEQ ID NO: 129006 - DNA, 25 bp, SARS Virus
ggagattgtgtggggactatcacta

SEQ ID NO: 129007 - DNA, 25 bp, SARS Virus
gagattgtgtgaggactatcactat

SEQ ID NO: 129008 - DNA, 25 bp, SARS Virus
agattgtgtgaggactatcactata

SEQ ID NO: 129009 - DNA, 25 bp, SARS Virus
gattgtgtgagggctatcactatat

SEQ ID NO: 129010 - DNA, 25 bp, SARS Virus
attgtgtgaggagtatcactatatc

SEQ ID NO: 129011 - DNA, 25 bp, SARS Virus
ttgtgtgaggacgatcactatatcg

SEQ ID NO: 129012 - DNA, 25 bp, SARS Virus
tgtgtgaggactgtcactatatcga

SEQ ID NO: 129013 - DNA, 25 bp, SARS Virus
gtgtgaggactagcactatatcgag

SEQ ID NO: 129014 - DNA, 25 bp, SARS Virus
tgtgaggactatgactatatcgagc

SEQ ID NO: 129015 - DNA, 25 bp, SARS Virus
gtgaggactatcgctatatcgagcg

SEQ ID NO: 129016 - DNA, 25 bp, SARS Virus
tgaggactatcagtatatcgagcgt

SEQ ID NO: 129017 - DNA, 25 bp, SARS Virus
gaggactatcacgatatcgagcgtt

SEQ ID NO: 129018 - DNA, 25 bp, SARS Virus
aggactatcactgtatcgagcgttc

SEQ ID NO: 129019 - DNA, 25 bp, SARS Virus
ggactatcactagatcgagcgttct

SEQ ID NO: 129020 - DNA, 25 bp, SARS Virus
gactatcactatgtcgagcgttcta

SEQ ID NO: 129021 - DNA, 25 bp, SARS Virus
actatcactatagcgagcgttctac

SEQ ID NO: 129022 - DNA, 25 bp, SARS Virus
ctatcactatatggagcgttctaca

SEQ ID NO: 129023 - DNA, 25 bp, SARS Virus
tatcactatatcgagcgttctacat

SEQ ID NO: 129024 - DNA, 25 bp, SARS Virus
atcactatatcgggcgttctacatt

SEQ ID NO: 129025 - DNA, 25 bp, SARS Virus
tcactatatcgagcgttctacattt

SEQ ID NO: 129026 - DNA, 25 bp, SARS Virus
cactatatcgagggttctacattta

SEQ ID NO: 129027 - DNA, 25 bp, SARS Virus
actatatcgagcgttctacatttat

SEQ ID NO: 129028 - DNA, 25 bp, SARS Virus
ctatatcgagcggtctacatttatg

SEQ ID NO: 129029 - DNA, 25 bp, SARS Virus
tatatcgagcgtgctacatttatgt

SEQ ID NO: 129030 - DNA, 25 bp, SARS Virus
atatcgagcgttgtacatttatgtt

SEQ ID NO: 129031 - DNA, 25 bp, SARS Virus
tatcgagcgttcgacatttatgtta

SEQ ID NO: 129032 - DNA, 25 bp, SARS Virus
atcgagcgttctgcatttatgttag

SEQ ID NO: 129033 - DNA, 25 bp, SARS Virus
tcgagcgttctagatttatgttagt

SEQ ID NO: 129034 - DNA, 25 bp, SARS Virus
cgagcgttctacgtttatgttagtt

SEQ ID NO: 129035 - DNA, 25 bp, SARS Virus
gagcgttctacagttatgttagtta

SEQ ID NO: 129036 - DNA, 25 bp, SARS Virus
agcgttctacatgtatgttagttac

SEQ ID NO: 129037 - DNA, 25 bp, SARS Virus
gcgttctacattgatgttagttaca

SEQ ID NO: 129038 - DNA, 25 bp, SARS Virus
cgttctacatttgtgttagttacag

SEQ ID NO: 129039 - DNA, 25 bp, SARS Virus
gttctacatttaggttagttacagt

SEQ ID NO: 129040 - DNA, 25 bp, SARS Virus
ttctacatttatgttagttacagtc

SEQ ID NO: 129041 - DNA, 25 bp, SARS Virus
tctacatttatggtagttacagtcc

SEQ ID NO: 129042 - DNA, 25 bp, SARS Virus
ctacatttatgtgagttacagtcct

SEQ ID NO: 129043 - DNA, 25 bp, SARS Virus
tacatttatgttggttacagtcctt

SEQ ID NO: 129044 - DNA, 25 bp, SARS Virus
acatttatgttagttacagtccttc

SEQ ID NO: 129045 - DNA, 25 bp, SARS Virus
catttatgttaggtacagtccttct

SEQ ID NO: 129046 - DNA, 25 bp, SARS Virus
atttatgttagtgacagtccttctc

SEQ ID NO: 129047 - DNA, 25 bp, SARS Virus
tttatgttagttgcagtccttctct

SEQ ID NO: 129048 - DNA, 25 bp, SARS Virus
ttatgttagttagagtccttctctt

SEQ ID NO: 129049 - DNA, 25 bp, SARS Virus
tatgttagttacggtccttctctta

SEQ ID NO: 129050 - DNA, 25 bp, SARS Virus
atgttagttacagtccttctcttat

SEQ ID NO: 129051 - DNA, 25 bp, SARS Virus
tgttagttacaggccttctcttatt

SEQ ID NO: 129052 - DNA, 25 bp, SARS Virus
gttagttacagtgcttctcttatta

SEQ ID NO: 129053 - DNA, 25 bp, SARS Virus
ttagttacagtcgttctcttattaa

SEQ ID NO: 129054 - DNA, 25 bp, SARS Virus
tagttacagtccgtctcttattaaa

SEQ ID NO: 129055 - DNA, 25 bp, SARS Virus
agttacagtcctgctcttattaaaa

SEQ ID NO: 129056 - DNA, 25 bp, SARS Virus
gttacagtccttgtcttattaaaag

SEQ ID NO: 129057 - DNA, 25 bp, SARS Virus
ttacagtccttcgcttattaaaagt

SEQ ID NO: 129058 - DNA, 25 bp, SARS Virus
tacagtccttctgttattaaaagta

SEQ ID NO: 129059 - DNA, 25 bp, SARS Virus
acagtccttctcgtattaaaagtac

SEQ ID NO: 129060 - DNA, 25 bp, SARS Virus
cagtccttctctgattaaaagtaca

SEQ ID NO: 129061 - DNA, 25 bp, SARS Virus
agtccttctcttgttaaaagtacaa

SEQ ID NO: 129062 - DNA, 25 bp, SARS Virus
gtccttctcttagtaaaagtacaag

SEQ ID NO: 129063 - DNA, 25 bp, SARS Virus
tccttctcttatgaaaagtacaagc

SEQ ID NO: 129064 - DNA, 25 bp, SARS Virus
ccttctcttattgaaagtacaagca

SEQ ID NO: 129065 - DNA, 25 bp, SARS Virus
cttctcttattagaagtacaagcaa

SEQ ID NO: 129066 - DNA, 25 bp, SARS Virus
ttctcttattaagagtacaagcaaa

SEQ ID NO: 129067 - DNA, 25 bp, SARS Virus
tctcttattaaaggtacaagcaaaa

SEQ ID NO: 129068 - DNA, 25 bp, SARS Virus
ctcttattaaaagtacaagcaaaat

SEQ ID NO: 129069 - DNA, 25 bp, SARS Virus
tcttattaaaaggacaagcaaaata

SEQ ID NO: 129070 - DNA, 25 bp, SARS Virus
cttattaaaagtgcaagcaaaatac

SEQ ID NO: 129071 - DNA, 25 bp, SARS Virus
ttattaaaagtagaagcaaaatacc

SEQ ID NO: 129072 - DNA, 25 bp, SARS Virus
tattaaaagtacgagcaaaatacct

SEQ ID NO: 129073 - DNA, 25 bp, SARS Virus
attaaaagtacaggcaaaataccta

SEQ ID NO: 129074 - DNA, 25 bp, SARS Virus
ttaaaagtacaagcaaaatacctat

SEQ ID NO: 129075 - DNA, 25 bp, SARS Virus
taaaagtacaaggaaaatacctatt

SEQ ID NO: 129076 - DNA, 25 bp, SARS Virus
aaaagtacaagcgaaatacctatta

SEQ ID NO: 129077 - DNA, 25 bp, SARS Virus
aaagtacaagcagaatacctattag

SEQ ID NO: 129078 - DNA, 25 bp, SARS Virus
aagtacaagcaagatacctattaga

SEQ ID NO: 129079 - DNA, 25 bp, SARS Virus
agtacaagcaaagtacctattagat

SEQ ID NO: 129080 - DNA, 25 bp, SARS Virus
gtacaagcaaaagacctattagatt

SEQ ID NO: 129081 - DNA, 25 bp, SARS Virus
tacaagcaaaatgcctattagattg

SEQ ID NO: 129082 - DNA, 25 bp, SARS Virus
acaagcaaaatagctattagattga

SEQ ID NO: 129083 - DNA, 25 bp, SARS Virus
caagcaaaatacgtattagattgag

SEQ ID NO: 129084 - DNA, 25 bp, SARS Virus
aagcaaaataccgattagattgagg

SEQ ID NO: 129085 - DNA, 25 bp, SARS Virus
agcaaaatacctgttagattgaggt

SEQ ID NO: 129086 - DNA, 25 bp, SARS Virus
gcaaaatacctagtagattgaggta

SEQ ID NO: 129087 - DNA, 25 bp, SARS Virus
caaaatacctatgagattgaggtat

SEQ ID NO: 129088 - DNA, 25 bp, SARS Virus
aaaatacctattggattgaggtatc

SEQ ID NO: 129089 - DNA, 25 bp, SARS Virus
aaatacctattagattgaggtatcc

SEQ ID NO: 129090 - DNA, 25 bp, SARS Virus
aatacctattaggttgaggtatcca

SEQ ID NO: 129091 - DNA, 25 bp, SARS Virus
atacctattagagtgaggtatccaa

SEQ ID NO: 129092 - DNA, 25 bp, SARS Virus
tacctattagatggaggtatccaag

SEQ ID NO: 129093 - DNA, 25 bp, SARS Virus
acctattagattgaggtatccaaga

SEQ ID NO: 129094 - DNA, 25 bp, SARS Virus
cctattagattggggtatccaagaa

SEQ ID NO: 129095 - DNA, 25 bp, SARS Virus
ctattagattgaggtatccaagaag

SEQ ID NO: 129096 - DNA, 25 bp, SARS Virus
tattagattgaggtatccaagaagt

SEQ ID NO: 129097 - DNA, 25 bp, SARS Virus
attagattgagggatccaagaagta

SEQ ID NO: 129098 - DNA, 25 bp, SARS Virus
ttagattgaggtgtccaagaagtag

SEQ ID NO: 129099 - DNA, 25 bp, SARS Virus
tagattgaggtagccaagaagtagt

SEQ ID NO: 129100 - DNA, 25 bp, SARS Virus
agattgaggtatgcaagaagtagta

SEQ ID NO: 129101 - DNA, 25 bp, SARS Virus
gattgaggtatcgaagaagtagtag

SEQ ID NO: 129102 - DNA, 25 bp, SARS Virus
attgaggtatccgagaagtagtaga

SEQ ID NO: 129103 - DNA, 25 bp, SARS Virus
ttgaggtatccaggaagtagtagat

SEQ ID NO: 129104 - DNA, 25 bp, SARS Virus
tgaggtatccaagaagtagtagatt

SEQ ID NO: 129105 - DNA, 25 bp, SARS Virus
gaggtatccaaggagtagtagattg

SEQ ID NO: 129106 - DNA, 25 bp, SARS Virus
aggtatccaagaggtagtagattga

SEQ ID NO: 129107 - DNA, 25 bp, SARS Virus
ggtatccaagaagtagtagattgag

SEQ ID NO: 129108 - DNA, 25 bp, SARS Virus
gtatccaagaaggagtagattgagg

SEQ ID NO: 129109 - DNA, 25 bp, SARS Virus
tatccaagaagtggtagattgaggc

SEQ ID NO: 129110 - DNA, 25 bp, SARS Virus
atccaagaagtagtagattgaggct

SEQ ID NO: 129111 - DNA, 25 bp, SARS Virus
tccaagaagtaggagattgaggctt

SEQ ID NO: 129112 - DNA, 25 bp, SARS Virus
ccaagaagtagtggattgaggctta

SEQ ID NO: 129113 - DNA, 25 bp, SARS Virus
caagaagtagtagattgaggcttat

SEQ ID NO: 129114 - DNA, 25 bp, SARS Virus
aagaagtagtaggttgaggcttatt

SEQ ID NO: 129115 - DNA, 25 bp, SARS Virus
agaagtagtagagtgaggcttatta

SEQ ID NO: 129116 - DNA, 25 bp, SARS Virus
gaagtagtagatggaggcttattaa

SEQ ID NO: 129117 - DNA, 25 bp, SARS Virus
aagtagtagattgaggcttattaag

SEQ ID NO: 129118 - DNA, 25 bp, SARS Virus
agtagtagattggggcttattaaga

SEQ ID NO: 129119 - DNA, 25 bp, SARS Virus
gtagtagattgaggcttattaagaa

SEQ ID NO: 129120 - DNA, 25 bp, SARS Virus
tagtagattgaggcttattaagaag

SEQ ID NO: 129121 - DNA, 25 bp, SARS Virus
agtagattgagggttattaagaaga

SEQ ID NO: 129122 - DNA, 25 bp, SARS Virus
gtagattgaggcgtattaagaagaa

SEQ ID NO: 129123 - DNA, 25 bp, SARS Virus
tagattgaggctgattaagaagaat

SEQ ID NO: 129124 - DNA, 25 bp, SARS Virus
agattgaggcttgttaagaagaatc

SEQ ID NO: 129125 - DNA, 25 bp, SARS Virus
gattgaggcttagtaagaagaatca

SEQ ID NO: 129126 - DNA, 25 bp, SARS Virus
attgaggcttatgaagaagaatcaa

SEQ ID NO: 129127 - DNA, 25 bp, SARS Virus
ttgaggcttattgagaagaatcaat

SEQ ID NO: 129128 - DNA, 25 bp, SARS Virus
tgaggcttattaggaagaatcaatc

SEQ ID NO: 129129 - DNA, 25 bp, SARS Virus
gaggcttattaagaagaatcaatct

SEQ ID NO: 129130 - DNA, 25 bp, SARS Virus
aggcttattaaggagaatcaatctc

SEQ ID NO: 129131 - DNA, 25 bp, SARS Virus
ggcttattaagaggaatcaatctcc

SEQ ID NO: 129132 - DNA, 25 bp, SARS Virus
gcttattaagaagaatcaatctccg

SEQ ID NO: 129133 - DNA, 25 bp, SARS Virus
cttattaagaaggatcaatctccga

SEQ ID NO: 129134 - DNA, 25 bp, SARS Virus
ttattaagaagagtcaatctccgaa

SEQ ID NO: 129135 - DNA, 25 bp, SARS Virus
tattaagaagaagcaatctccgaat

SEQ ID NO: 129136 - DNA, 25 bp, SARS Virus
attaagaagaatgaatctccgaatt

SEQ ID NO: 129137 - DNA, 25 bp, SARS Virus
ttaagaagaatcgatctccgaattt

SEQ ID NO: 129138 - DNA, 25 bp, SARS Virus
taagaagaatcagtctccgaattta

SEQ ID NO: 129139 - DNA, 25 bp, SARS Virus
aagaagaatcaagctccgaatttat

SEQ ID NO: 129140 - DNA, 25 bp, SARS Virus
agaagaatcaatgtccgaatttatt

SEQ ID NO: 129141 - DNA, 25 bp, SARS Virus
gaagaatcaatcgccgaatttatta

SEQ ID NO: 129142 - DNA, 25 bp, SARS Virus
aagaatcaatctgcgaatttattaa

SEQ ID NO: 129143 - DNA, 25 bp, SARS Virus
agaatcaatctcggaatttattaac

SEQ ID NO: 129144 - DNA, 25 bp, SARS Virus
gaatcaatctccgaatttattaaca

SEQ ID NO: 129145 - DNA, 25 bp, SARS Virus
aatcaatctccggatttattaacag

SEQ ID NO: 129146 - DNA, 25 bp, SARS Virus
atcaatctccgagtttattaacaga

SEQ ID NO: 129147 - DNA, 25 bp, SARS Virus
tcaatctccgaagttattaacagag

SEQ ID NO: 129148 - DNA, 25 bp, SARS Virus
caatctccgaatgtattaacagagt

SEQ ID NO: 129149 - DNA, 25 bp, SARS Virus
aatctccgaattgattaacagagtg

SEQ ID NO: 129150 - DNA, 25 bp, SARS Virus
atctccgaatttgttaacagagtga

SEQ ID NO: 129151 - DNA, 25 bp, SARS Virus
tctccgaatttagtaacagagtgat

SEQ ID NO: 129152 - DNA, 25 bp, SARS Virus
ctccgaatttatgaacagagtgata

SEQ ID NO: 129153 - DNA, 25 bp, SARS Virus
tccgaatttattgacagagtgataa

SEQ ID NO: 129154 - DNA, 25 bp, SARS Virus
ccgaatttattagcagagtgataac

SEQ ID NO: 129155 - DNA, 25 bp, SARS Virus
cgaatttattaagagagtgataact

SEQ ID NO: 129156 - DNA, 25 bp, SARS Virus
gaatttattaacggagtgataactt

SEQ ID NO: 129157 - DNA, 25 bp, SARS Virus
aatttattaacagagtgataacttg

SEQ ID NO: 129158 - DNA, 25 bp, SARS Virus
atttattaacagggtgataacttga

SEQ ID NO: 129159 - DNA, 25 bp, SARS Virus
tttattaacagagtgataacttgaa

SEQ ID NO: 129160 - DNA, 25 bp, SARS Virus
ttattaacagagggataacttgaat

SEQ ID NO: 129161 - DNA, 25 bp, SARS Virus
tattaacagagtgataacttgaata

SEQ ID NO: 129162 - DNA, 25 bp, SARS Virus
attaacagagtggtaacttgaataa

SEQ ID NO: 129163 - DNA, 25 bp, SARS Virus
ttaacagagtgagaacttgaataat

SEQ ID NO: 129164 - DNA, 25 bp, SARS Virus
taacagagtgatgacttgaataata

SEQ ID NO: 129165 - DNA, 25 bp, SARS Virus
aacagagtgatagcttgaataatat

SEQ ID NO: 129166 - DNA, 25 bp, SARS Virus
acagagtgataagttgaataatatt

SEQ ID NO: 129167 - DNA, 25 bp, SARS Virus
cagagtgataacgtgaataatattg

SEQ ID NO: 129168 - DNA, 25 bp, SARS Virus
agagtgataactggaataatattgc

SEQ ID NO: 129169 - DNA, 25 bp, SARS Virus
gagtgataacttgaataatattgca

SEQ ID NO: 129170 - DNA, 25 bp, SARS Virus
agtgataacttggataatattgcag

SEQ ID NO: 129171 - DNA, 25 bp, SARS Virus
gtgataacttgagtaatattgcagt

SEQ ID NO: 129172 - DNA, 25 bp, SARS Virus
tgataacttgaagaatattgcagtt

SEQ ID NO: 129173 - DNA, 25 bp, SARS Virus
gataacttgaatgatattgcagttc

SEQ ID NO: 129174 - DNA, 25 bp, SARS Virus
ataacttgaatagtattgcagttct

SEQ ID NO: 129175 - DNA, 25 bp, SARS Virus
taacttgaataagattgcagttcta

SEQ ID NO: 129176 - DNA, 25 bp, SARS Virus
aacttgaataatgttgcagttctaa

SEQ ID NO: 129177 - DNA, 25 bp, SARS Virus
acttgaataatagtgcagttctaag

SEQ ID NO: 129178 - DNA, 25 bp, SARS Virus
cttgaataatatggcagttctaagg

SEQ ID NO: 129179 - DNA, 25 bp, SARS Virus
ttgaataatattgcagttctaaggt

SEQ ID NO: 129180 - DNA, 25 bp, SARS Virus
tgaataatattggagttctaaggtt

SEQ ID NO: 129181 - DNA, 25 bp, SARS Virus
gaataatattgcggttctaaggttt

SEQ ID NO: 129182 - DNA, 25 bp, SARS Virus
aataatattgcagttctaaggttta

SEQ ID NO: 129183 - DNA, 25 bp, SARS Virus
ataatattgcaggtctaaggtttat

SEQ ID NO: 129184 - DNA, 25 bp, SARS Virus
taatattgcagtgctaaggtttatc

SEQ ID NO: 129185 - DNA, 25 bp, SARS Virus
aatattgcagttgtaaggtttatcg

SEQ ID NO: 129186 - DNA, 25 bp, SARS Virus
atattgcagttcgaaggtttatcgt

SEQ ID NO: 129187 - DNA, 25 bp, SARS Virus
tattgcagttctgaggtttatcgtt

SEQ ID NO: 129188 - DNA, 25 bp, SARS Virus
attgcagttctagggtttatcgtta

SEQ ID NO: 129189 - DNA, 25 bp, SARS Virus
ttgcagttctaaggtttatcgttag

SEQ ID NO: 129190 - DNA, 25 bp, SARS Virus
tgcagttctaaggtttatcgttagg

SEQ ID NO: 129191 - DNA, 25 bp, SARS Virus
gcagttctaagggttatcgttagga

SEQ ID NO: 129192 - DNA, 25 bp, SARS Virus
cagttctaaggtgtatcgttaggac

SEQ ID NO: 129193 - DNA, 25 bp, SARS Virus
agttctaaggttgatcgttaggact

SEQ ID NO: 129194 - DNA, 25 bp, SARS Virus
gttctaaggtttgtcgttaggactt

SEQ ID NO: 129195 - DNA, 25 bp, SARS Virus
ttctaaggtttagcgttaggacttt

SEQ ID NO: 129196 - DNA, 25 bp, SARS Virus
tctaaggtttatggttaggactttc

SEQ ID NO: 129197 - DNA, 25 bp, SARS Virus
ctaaggtttatcgttaggactttca

SEQ ID NO: 129198 - DNA, 25 bp, SARS Virus
taaggtttatcggtaggactttcag

SEQ ID NO: 129199 - DNA, 25 bp, SARS Virus
aaggtttatcgtgaggactttcagg

SEQ ID NO: 129200 - DNA, 25 bp, SARS Virus
aggtttatcgttgggactttcagga

SEQ ID NO: 129201 - DNA, 25 bp, SARS Virus
ggtttatcgttaggactttcaggag

SEQ ID NO: 129202 - DNA, 25 bp, SARS Virus
gtttatcgttaggactttcaggagt

SEQ ID NO: 129203 - DNA, 25 bp, SARS Virus
tttatcgttagggctttcaggagta

SEQ ID NO: 129204 - DNA, 25 bp, SARS Virus
ttatcgttaggagtttcaggagtat

SEQ ID NO: 129205 - DNA, 25 bp, SARS Virus
tatcgttaggacgttcaggagtatt

SEQ ID NO: 129206 - DNA, 25 bp, SARS Virus
atcgttaggactgtcaggagtatta

SEQ ID NO: 129207 - DNA, 25 bp, SARS Virus
tcgttaggacttgcaggagtattac

SEQ ID NO: 129208 - DNA, 25 bp, SARS Virus
cgttaggactttgaggagtattact

SEQ ID NO: 129209 - DNA, 25 bp, SARS Virus
gttaggactttcgggagtattacta

SEQ ID NO: 129210 - DNA, 25 bp, SARS Virus
ttaggactttcaggagtattactat

SEQ ID NO: 129211 - DNA, 25 bp, SARS Virus
taggactttcaggagtattactatt

SEQ ID NO: 129212 - DNA, 25 bp, SARS Virus
aggactttcaggggtattactatta

SEQ ID NO: 129213 - DNA, 25 bp, SARS Virus
ggactttcaggagtattactattag

SEQ ID NO: 129214 - DNA, 25 bp, SARS Virus
gactttcaggaggattactattagt

SEQ ID NO: 129215 - DNA, 25 bp, SARS Virus
actttcaggagtgttactattagtt

SEQ ID NO: 129216 - DNA, 25 bp, SARS Virus
ctttcaggagtagtactattagtta

SEQ ID NO: 129217 - DNA, 25 bp, SARS Virus
tttcaggagtatgactattagttat

SEQ ID NO: 129218 - DNA, 25 bp, SARS Virus
ttcaggagtattgctattagttata

SEQ ID NO: 129219 - DNA, 25 bp, SARS Virus
tcaggagtattagtattagttatag

SEQ ID NO: 129220 - DNA, 25 bp, SARS Virus
caggagtattacgattagttataga

SEQ ID NO: 129221 - DNA, 25 bp, SARS Virus
aggagtattactgttagttatagag

SEQ ID NO: 129222 - DNA, 25 bp, SARS Virus
ggagtattactagtagttatagaga

SEQ ID NO: 129223 - DNA, 25 bp, SARS Virus
gagtattactatgagttatagagac

SEQ ID NO: 129224 - DNA, 25 bp, SARS Virus
agtattactattggttatagagacg

SEQ ID NO: 129225 - DNA, 25 bp, SARS Virus
gtattactattagttatagagacga

SEQ ID NO: 129226 - DNA, 25 bp, SARS Virus
tattactattaggtatagagacgat

SEQ ID NO: 129227 - DNA, 25 bp, SARS Virus
attactattagtgatagagacgata

SEQ ID NO: 129228 - DNA, 25 bp, SARS Virus
ttactattagttgtagagacgataa

SEQ ID NO: 129229 - DNA, 25 bp, SARS Virus
tactattagttagagagacgataac

SEQ ID NO: 129230 - DNA, 25 bp, SARS Virus
actattagttatggagacgataaca

SEQ ID NO: 129231 - DNA, 25 bp, SARS Virus
ctattagttatagagacgataacat

SEQ ID NO: 129232 - DNA, 25 bp, SARS Virus
tattagttatagggacgataacatt

SEQ ID NO: 129233 - DNA, 25 bp, SARS Virus
attagttatagagacgataacattg

SEQ ID NO: 129234 - DNA, 25 bp, SARS Virus
ttagttatagaggcgataacattgg

SEQ ID NO: 129235 - DNA, 25 bp, SARS Virus
tagttatagagaggataacattgga

SEQ ID NO: 129236 - DNA, 25 bp, SARS Virus
agttatagagacgataacattggac

SEQ ID NO: 129237 - DNA, 25 bp, SARS Virus
gttatagagacggtaacattggacc

SEQ ID NO: 129238 - DNA, 25 bp, SARS Virus
ttatagagacgagaacattggacct

SEQ ID NO: 129239 - DNA, 25 bp, SARS Virus
tatagagacgatgacattggacctt

SEQ ID NO: 129240 - DNA, 25 bp, SARS Virus
atagagacgatagcattggaccttc

SEQ ID NO: 129241 - DNA, 25 bp, SARS Virus
tagagacgataagattggaccttca

SEQ ID NO: 129242 - DNA, 25 bp, SARS Virus
agagacgataacgttggaccttcag

SEQ ID NO: 129243 - DNA, 25 bp, SARS Virus
gagacgataacagtggaccttcagt

SEQ ID NO: 129244 - DNA, 25 bp, SARS Virus
agacgataacatgggaccttcagtt

SEQ ID NO: 129245 - DNA, 25 bp, SARS Virus
gacgataacattggaccttcagttg

SEQ ID NO: 129246 - DNA, 25 bp, SARS Virus
acgataacattggaccttcagttgt

SEQ ID NO: 129247 - DNA, 25 bp, SARS Virus
cgataacattgggccttcagttgtt

SEQ ID NO: 129248 - DNA, 25 bp, SARS Virus
gataacattggagcttcagttgttc

SEQ ID NO: 129249 - DNA, 25 bp, SARS Virus
ataacattggacgttcagttgttct

SEQ ID NO: 129250 - DNA, 25 bp, SARS Virus
taacattggaccgtcagttgttcta

SEQ ID NO: 129251 - DNA, 25 bp, SARS Virus
aacattggacctgcagttgttctac

SEQ ID NO: 129252 - DNA, 25 bp, SARS Virus
acattggaccttgagttgttctact

SEQ ID NO: 129253 - DNA, 25 bp, SARS Virus
cattggaccttcggttgttctactt

SEQ ID NO: 129254 - DNA, 25 bp, SARS Virus
attggaccttcagttgttctacttt

SEQ ID NO: 129255 - DNA, 25 bp, SARS Virus
ttggaccttcaggtgttctactttg

SEQ ID NO: 129256 - DNA, 25 bp, SARS Virus
tggaccttcagtggttctactttgt

SEQ ID NO: 129257 - DNA, 25 bp, SARS Virus
ggaccttcagttgttctactttgta

SEQ ID NO: 129258 - DNA, 25 bp, SARS Virus
gaccttcagttggtctactttgtag

SEQ ID NO: 129259 - DNA, 25 bp, SARS Virus
accttcagttgtgctactttgtaga

SEQ ID NO: 129260 - DNA, 25 bp, SARS Virus
ccttcagttgttgtactttgtagac

SEQ ID NO: 129261 - DNA, 25 bp, SARS Virus
cttcagttgttcgactttgtagaca

SEQ ID NO: 129262 - DNA, 25 bp, SARS Virus
ttcagttgttctgctttgtagacaa

SEQ ID NO: 129263 - DNA, 25 bp, SARS Virus
tcagttgttctagtttgtagacaac

SEQ ID NO: 129264 - DNA, 25 bp, SARS Virus
cagttgttctacgttgtagacaaca

SEQ ID NO: 129265 - DNA, 25 bp, SARS Virus
agttgttctactgtgtagacaacag

SEQ ID NO: 129266 - DNA, 25 bp, SARS Virus
gttgttctacttggtagacaacagt

SEQ ID NO: 129267 - DNA, 25 bp, SARS Virus
ttgttctactttgtagacaacagtg

SEQ ID NO: 129268 - DNA, 25 bp, SARS Virus
tgttctactttggagacaacagtga

SEQ ID NO: 129269 - DNA, 25 bp, SARS Virus
gttctactttgtggacaacagtgaa

SEQ ID NO: 129270 - DNA, 25 bp, SARS Virus
ttctactttgtagacaacagtgaat

SEQ ID NO: 129271 - DNA, 25 bp, SARS Virus
tctactttgtaggcaacagtgaatg

SEQ ID NO: 129272 - DNA, 25 bp, SARS Virus
ctactttgtagagaacagtgaatga

SEQ ID NO: 129273 - DNA, 25 bp, SARS Virus
tactttgtagacgacagtgaatgac

SEQ ID NO: 129274 - DNA, 25 bp, SARS Virus
actttgtagacagcagtgaatgaca

SEQ ID NO: 129275 - DNA, 25 bp, SARS Virus
ctttgtagacaagagtgaatgacat

SEQ ID NO: 129276 - DNA, 25 bp, SARS Virus
tttgtagacaacggtgaatgacatg

SEQ ID NO: 129277 - DNA, 25 bp, SARS Virus
ttgtagacaacagtgaatgacatga

SEQ ID NO: 129278 - DNA, 25 bp, SARS Virus
tgtagacaacagggaatgacatgat

SEQ ID NO: 129279 - DNA, 25 bp, SARS Virus
gtagacaacagtgaatgacatgatc

SEQ ID NO: 129280 - DNA, 25 bp, SARS Virus
tagacaacagtggatgacatgatcg

SEQ ID NO: 129281 - DNA, 25 bp, SARS Virus
agacaacagtgagtgacatgatcgt

SEQ ID NO: 129282 - DNA, 25 bp, SARS Virus
gacaacagtgaaggacatgatcgtt

SEQ ID NO: 129283 - DNA, 25 bp, SARS Virus
acaacagtgaatgacatgatcgttt

SEQ ID NO: 129284 - DNA, 25 bp, SARS Virus
caacagtgaatggcatgatcgtttc

SEQ ID NO: 129285 - DNA, 25 bp, SARS Virus
aacagtgaatgagatgatcgtttcg

SEQ ID NO: 129286 - DNA, 25 bp, SARS Virus
acagtgaatgacgtgatcgtttcgt

SEQ ID NO: 129287 - DNA, 25 bp, SARS Virus
cagtgaatgacaggatcgtttcgtt

SEQ ID NO: 129288 - DNA, 25 bp, SARS Virus
agtgaatgacatgatcgtttcgtta

SEQ ID NO: 129289 - DNA, 25 bp, SARS Virus
gtgaatgacatggtcgtttcgttat

SEQ ID NO: 129290 - DNA, 25 bp, SARS Virus
tgaatgacatgagcgtttcgttata

SEQ ID NO: 129291 - DNA, 25 bp, SARS Virus
gaatgacatgatggtttcgttataa

SEQ ID NO: 129292 - DNA, 25 bp, SARS Virus
aatgacatgatcgtttcgttataac

SEQ ID NO: 129293 - DNA, 25 bp, SARS Virus
atgacatgatcggttcgttataaca

SEQ ID NO: 129294 - DNA, 25 bp, SARS Virus
tgacatgatcgtgtcgttataacag

SEQ ID NO: 129295 - DNA, 25 bp, SARS Virus
gacatgatcgttgcgttataacagc

SEQ ID NO: 129296 - DNA, 25 bp, SARS Virus
acatgatcgtttggttataacagca

SEQ ID NO: 129297 - DNA, 25 bp, SARS Virus
catgatcgtttcgttataacagcaa

SEQ ID NO: 129298 - DNA, 25 bp, SARS Virus
atgatcgtttcggtataacagcaac

SEQ ID NO: 129299 - DNA, 25 bp, SARS Virus
tgatcgtttcgtgataacagcaacg

SEQ ID NO: 129300 - DNA, 25 bp, SARS Virus
gatcgtttcgttgtaacagcaacga

SEQ ID NO: 129301 - DNA, 25 bp, SARS Virus
atcgtttcgttagaacagcaacgat

SEQ ID NO: 129302 - DNA, 25 bp, SARS Virus
tcgtttcgttatgacagcaacgatg

SEQ ID NO: 129303 - DNA, 25 bp, SARS Virus
cgtttcgttatagcagcaacgatgg

SEQ ID NO: 129304 - DNA, 25 bp, SARS Virus
gtttcgttataagagcaacgatggc

SEQ ID NO: 129305 - DNA, 25 bp, SARS Virus
tttcgttataacggcaacgatggcc

SEQ ID NO: 129306 - DNA, 25 bp, SARS Virus
ttcgttataacagcaacgatggccg

SEQ ID NO: 129307 - DNA, 25 bp, SARS Virus
tcgttataacaggaacgatggccgc

SEQ ID NO: 129308 - DNA, 25 bp, SARS Virus
cgttataacagcgacgatggccgca

SEQ ID NO: 129309 - DNA, 25 bp, SARS Virus
gttataacagcagcgatggccgcac

SEQ ID NO: 129310 - DNA, 25 bp, SARS Virus
ttataacagcaaggatggccgcacc

SEQ ID NO: 129311 - DNA, 25 bp, SARS Virus
tataacagcaacgatggccgcacca

SEQ ID NO: 129312 - DNA, 25 bp, SARS Virus
ataacagcaacggtggccgcaccag

SEQ ID NO: 129313 - DNA, 25 bp, SARS Virus
taacagcaacgagggccgcaccaga

SEQ ID NO: 129314 - DNA, 25 bp, SARS Virus
aacagcaacgatggccgcaccagac

SEQ ID NO: 129315 - DNA, 25 bp, SARS Virus
acagcaacgatggccgcaccagaca

SEQ ID NO: 129316 - DNA, 25 bp, SARS Virus
cagcaacgatgggcgcaccagacat

SEQ ID NO: 129317 - DNA, 25 bp, SARS Virus
agcaacgatggcggcaccagacata

SEQ ID NO: 129318 - DNA, 25 bp, SARS Virus
gcaacgatggccgcaccagacataa

SEQ ID NO: 129319 - DNA, 25 bp, SARS Virus
caacgatggccggaccagacataaa

SEQ ID NO: 129320 - DNA, 25 bp, SARS Virus
aacgatggccgcgccagacataaat

SEQ ID NO: 129321 - DNA, 25 bp, SARS Virus
acgatggccgcagcagacataaatt

SEQ ID NO: 129322 - DNA, 25 bp, SARS Virus
cgatggccgcacgagacataaatta

SEQ ID NO: 129323 - DNA, 25 bp, SARS Virus
gatggccgcaccggacataaattaa

SEQ ID NO: 129324 - DNA, 25 bp, SARS Virus
atggccgcaccagacataaattaaa

SEQ ID NO: 129325 - DNA, 25 bp, SARS Virus
tggccgcaccaggcataaattaaat

SEQ ID NO: 129326 - DNA, 25 bp, SARS Virus
ggccgcaccagagataaattaaata

SEQ ID NO: 129327 - DNA, 25 bp, SARS Virus
gccgcaccagacgtaaattaaatat

SEQ ID NO: 129328 - DNA, 25 bp, SARS Virus
ccgcaccagacagaaattaaatatc

SEQ ID NO: 129329 - DNA, 25 bp, SARS Virus
cgcaccagacatgaattaaatatca

SEQ ID NO: 129330 - DNA, 25 bp, SARS Virus
gcaccagacatagattaaatatcaa

SEQ ID NO: 129331 - DNA, 25 bp, SARS Virus
caccagacataagttaaatatcaaa

SEQ ID NO: 129332 - DNA, 25 bp, SARS Virus
accagacataaagtaaatatcaaag

SEQ ID NO: 129333 - DNA, 25 bp, SARS Virus
ccagacataaatgaaatatcaaagg

SEQ ID NO: 129334 - DNA, 25 bp, SARS Virus
cagacataaattgaatatcaaaggt

SEQ ID NO: 129335 - DNA, 25 bp, SARS Virus
agacataaattagatatcaaaggtt

SEQ ID NO: 129336 - DNA, 25 bp, SARS Virus
gacataaattaagtatcaaaggtta

SEQ ID NO: 129337 - DNA, 25 bp, SARS Virus
acataaattaaagatcaaaggttat

SEQ ID NO: 129338 - DNA, 25 bp, SARS Virus
cataaattaaatgtcaaaggttatg

SEQ ID NO: 129339 - DNA, 25 bp, SARS Virus
ataaattaaatagcaaaggttatgc

SEQ ID NO: 129340 - DNA, 25 bp, SARS Virus
taaattaaatatgaaaggttatgcc

SEQ ID NO: 129341 - DNA, 25 bp, SARS Virus
aaattaaatatcgaaggttatgcca

SEQ ID NO: 129342 - DNA, 25 bp, SARS Virus
aattaaatatcagaggttatgccat

SEQ ID NO: 129343 - DNA, 25 bp, SARS Virus
attaaatatcaagggttatgccatc

SEQ ID NO: 129344 - DNA, 25 bp, SARS Virus
ttaaatatcaaaggttatgccatcg

SEQ ID NO: 129345 - DNA, 25 bp, SARS Virus
taaatatcaaaggttatgccatcgc

SEQ ID NO: 129346 - DNA, 25 bp, SARS Virus
aaatatcaaagggtatgccatcgcc

SEQ ID NO: 129347 - DNA, 25 bp, SARS Virus
aatatcaaaggtgatgccatcgcca

SEQ ID NO: 129348 - DNA, 25 bp, SARS Virus
atatcaaaggttgtgccatcgccaa

SEQ ID NO: 129349 - DNA, 25 bp, SARS Virus
tatcaaaggttaggccatcgccaac

SEQ ID NO: 129350 - DNA, 25 bp, SARS Virus
atcaaaggttatgccatcgccaaca

SEQ ID NO: 129351 - DNA, 25 bp, SARS Virus
tcaaaggttatggcatcgccaacat

SEQ ID NO: 129352 - DNA, 25 bp, SARS Virus
caaaggttatgcgatcgccaacata

SEQ ID NO: 129353 - DNA, 25 bp, SARS Virus
acagctcatggctgtcgtgttcgtt

SEQ ID NO: 129354 - DNA, 25 bp, SARS Virus
cagctcatggcattcgtgttcgttt

SEQ ID NO: 129355 - DNA, 25 bp, SARS Virus
agctcatggcagtcgtgttcgtttt

SEQ ID NO: 129356 - DNA, 25 bp, SARS Virus
gctcatggcagttgtgttcgttttc

SEQ ID NO: 129357 - DNA, 25 bp, SARS Virus
ctcatggcagtcttgttcgttttcg

SEQ ID NO: 129358 - DNA, 25 bp, SARS Virus
tcatggcagtcgtgttcgttttcgt

SEQ ID NO: 129359 - DNA, 25 bp, SARS Virus
catggcagtcgttttcgttttcgtt

SEQ ID NO: 129360 - DNA, 25 bp, SARS Virus
atggcagtcgtgttcgttttcgttt

SEQ ID NO: 129361 - DNA, 25 bp, SARS Virus
tggcagtcgtgttcgttttcgtttc

SEQ ID NO: 129362 - DNA, 25 bp, SARS Virus
ggcagtcgtgtttgttttcgtttca

SEQ ID NO: 129363 - DNA, 25 bp, SARS Virus
gcagtcgtgttctttttcgtttcac

SEQ ID NO: 129364 - DNA, 25 bp, SARS Virus
cagtcgtgttcgttttcgtttcaca

SEQ ID NO: 129365 - DNA, 25 bp, SARS Virus
agtcgtgttcgttttcgtttcacac

SEQ ID NO: 129366 - DNA, 25 bp, SARS Virus
gtcgtgttcgttttcgtttcacaca

SEQ ID NO: 129367 - DNA, 25 bp, SARS Virus
tcgtgttcgttttcgtttcacacac

SEQ ID NO: 129368 - DNA, 25 bp, SARS Virus
cgtgttcgtttttgtttcacacacg

SEQ ID NO: 129369 - DNA, 25 bp, SARS Virus
gtgttcgttttcttttcacacacga

SEQ ID NO: 129370 - DNA, 25 bp, SARS Virus
tgttcgttttcgtttcacacacgat

SEQ ID NO: 129371 - DNA, 25 bp, SARS Virus
gttcgttttcgtttcacacacgatc

SEQ ID NO: 129372 - DNA, 25 bp, SARS Virus
ttcgttttcgtttcacacacgatca

SEQ ID NO: 129373 - DNA, 25 bp, SARS Virus
tcgttttcgttttacacacgatcac

SEQ ID NO: 129374 - DNA, 25 bp, SARS Virus
cgttttcgtttctcacacgatcacg

SEQ ID NO: 129375 - DNA, 25 bp, SARS Virus
gttttcgtttcatacacgatcacgt

SEQ ID NO: 129376 - DNA, 25 bp, SARS Virus
ttttcgtttcactcacgatcacgtt

SEQ ID NO: 129377 - DNA, 25 bp, SARS Virus
tttcgtttcacatacgatcacgttc

SEQ ID NO: 129378 - DNA, 25 bp, SARS Virus
ttcgtttcacactcgatcacgttca

SEQ ID NO: 129379 - DNA, 25 bp, SARS Virus
tcgtttcacacatgatcacgttcaa

SEQ ID NO: 129380 - DNA, 25 bp, SARS Virus
cgtttcacacactatcacgttcaat

SEQ ID NO: 129381 - DNA, 25 bp, SARS Virus
gtttcacacacgttcacgttcaatc

SEQ ID NO: 129382 - DNA, 25 bp, SARS Virus
tttcacacacgatcacgttcaatca

SEQ ID NO: 129383 - DNA, 25 bp, SARS Virus
ttcacacacgattacgttcaatcac

SEQ ID NO: 129384 - DNA, 25 bp, SARS Virus
tcacacacgatctcgttcaatcacg

SEQ ID NO: 129385 - DNA, 25 bp, SARS Virus
cacacacgatcatgttcaatcacgt

SEQ ID NO: 129386 - DNA, 25 bp, SARS Virus
acacacgatcactttcaatcacgtt

SEQ ID NO: 129387 - DNA, 25 bp, SARS Virus
cacacgatcacgttcaatcacgttt

SEQ ID NO: 129388 - DNA, 25 bp, SARS Virus
acacgatcacgttcaatcacgttta

SEQ ID NO: 129389 - DNA, 25 bp, SARS Virus
cacgatcacgtttaatcacgtttaa

SEQ ID NO: 129390 - DNA, 25 bp, SARS Virus
acgatcacgttctatcacgtttaaa

SEQ ID NO: 129391 - DNA, 25 bp, SARS Virus
cgatcacgttcattcacgtttaaat

SEQ ID NO: 129392 - DNA, 25 bp, SARS Virus
gatcacgttcaatcacgtttaaata

SEQ ID NO: 129393 - DNA, 25 bp, SARS Virus
atcacgttcaattacgtttaaataa

SEQ ID NO: 129394 - DNA, 25 bp, SARS Virus
tcacgttcaatctcgtttaaataac

SEQ ID NO: 129395 - DNA, 25 bp, SARS Virus
cacgttcaatcatgtttaaataaca

SEQ ID NO: 129396 - DNA, 25 bp, SARS Virus
acgttcaatcacttttaaataacag

SEQ ID NO: 129397 - DNA, 25 bp, SARS Virus
cgttcaatcacgtttaaataacagt

SEQ ID NO: 129398 - DNA, 25 bp, SARS Virus
gttcaatcacgtttaaataacagtc

SEQ ID NO: 129399 - DNA, 25 bp, SARS Virus
ttcaatcacgtttaaataacagtcg

SEQ ID NO: 129400 - DNA, 25 bp, SARS Virus
tcaatcacgttttaataacagtcgt

SEQ ID NO: 129401 - DNA, 25 bp, SARS Virus
caatcacgtttatataacagtcgtt

SEQ ID NO: 129402 - DNA, 25 bp, SARS Virus
aatcacgtttaattaacagtcgttc

SEQ ID NO: 129403 - DNA, 25 bp, SARS Virus
atcacgtttaaataacagtcgttct

SEQ ID NO: 129404 - DNA, 25 bp, SARS Virus
tcacgtttaaattacagtcgttctc

SEQ ID NO: 129405 - DNA, 25 bp, SARS Virus
cacgtttaaatatcagtcgttctcc

SEQ ID NO: 129406 - DNA, 25 bp, SARS Virus
acgtttaaataatagtcgttctccc

SEQ ID NO: 129407 - DNA, 25 bp, SARS Virus
cgtttaaataactgtcgttctccca

SEQ ID NO: 129408 - DNA, 25 bp, SARS Virus
gtttaaataacattcgttctcccac

SEQ ID NO: 129409 - DNA, 25 bp, SARS Virus
tttaaataacagtcgttctcccact

SEQ ID NO: 129410 - DNA, 25 bp, SARS Virus
ttaaataacagttgttctcccactt

SEQ ID NO: 129411 - DNA, 25 bp, SARS Virus
taaataacagtctttctcccacttt

SEQ ID NO: 129412 - DNA, 25 bp, SARS Virus
aaataacagtcgttctcccacttta

SEQ ID NO: 129413 - DNA, 25 bp, SARS Virus
aataacagtcgttctcccactttac

SEQ ID NO: 129414 - DNA, 25 bp, SARS Virus
ataacagtcgttttcccactttacc

SEQ ID NO: 129415 - DNA, 25 bp, SARS Virus
taacagtcgttctcccactttacca

SEQ ID NO: 129416 - DNA, 25 bp, SARS Virus
aacagtcgttcttccactttaccac

SEQ ID NO: 129417 - DNA, 25 bp, SARS Virus
acagtcgttctctcactttaccact

SEQ ID NO: 129418 - DNA, 25 bp, SARS Virus
cagtcgttctcctactttaccactt

SEQ ID NO: 129419 - DNA, 25 bp, SARS Virus
agtcgttctccctctttaccactta

SEQ ID NO: 129420 - DNA, 25 bp, SARS Virus
gtcgttctcccattttaccacttaa

SEQ ID NO: 129421 - DNA, 25 bp, SARS Virus
tcgttctcccactttaccacttaac

SEQ ID NO: 129422 - DNA, 25 bp, SARS Virus
cgttctcccactttaccacttaacg

SEQ ID NO: 129423 - DNA, 25 bp, SARS Virus
gttctcccactttaccacttaacgg

SEQ ID NO: 129424 - DNA, 25 bp, SARS Virus
ttctcccacttttccacttaacggg

SEQ ID NO: 129425 - DNA, 25 bp, SARS Virus
tctcccactttatcacttaacggga

SEQ ID NO: 129426 - DNA, 25 bp, SARS Virus
ctcccactttactacttaacgggag

SEQ ID NO: 129427 - DNA, 25 bp, SARS Virus
tcccactttacctcttaacgggagc

SEQ ID NO: 129428 - DNA, 25 bp, SARS Virus
cccactttaccatttaacgggagca

SEQ ID NO: 129429 - DNA, 25 bp, SARS Virus
ccactttaccacttaacgggagcat

SEQ ID NO: 129430 - DNA, 25 bp, SARS Virus
cactttaccacttaacgggagcata

SEQ ID NO: 129431 - DNA, 25 bp, SARS Virus
actttaccactttacgggagcatac

SEQ ID NO: 129432 - DNA, 25 bp, SARS Virus
ctttaccacttatcgggagcataca

SEQ ID NO: 129433 - DNA, 25 bp, SARS Virus
tttaccacttaatgggagcatacaa

SEQ ID NO: 129434 - DNA, 25 bp, SARS Virus
ttaccacttaactggagcatacaag

SEQ ID NO: 129435 - DNA, 25 bp, SARS Virus
taccacttaacgtgagcatacaagg

SEQ ID NO: 129436 - DNA, 25 bp, SARS Virus
accacttaacggtagcatacaagga

SEQ ID NO: 129437 - DNA, 25 bp, SARS Virus
ccacttaacgggtgcatacaaggac

SEQ ID NO: 129438 - DNA, 25 bp, SARS Virus
cacttaacgggatcatacaaggact

SEQ ID NO: 129439 - DNA, 25 bp, SARS Virus
acttaacgggagtatacaaggacta

SEQ ID NO: 129440 - DNA, 25 bp, SARS Virus
cttaacgggagcttacaaggactac

SEQ ID NO: 129441 - DNA, 25 bp, SARS Virus
ttaacgggagcatacaaggactacc

SEQ ID NO: 129442 - DNA, 25 bp, SARS Virus
taacgggagcattcaaggactaccc

SEQ ID NO: 129443 - DNA, 25 bp, SARS Virus
aacgggagcatataaggactacccg

SEQ ID NO: 129444 - DNA, 25 bp, SARS Virus
acgggagcatactaggactacccgt

SEQ ID NO: 129445 - DNA, 25 bp, SARS Virus
cgggagcatacatggactacccgtt

SEQ ID NO: 129446 - DNA, 25 bp, SARS Virus
gggagcatacaatgactacccgttc

SEQ ID NO: 129447 - DNA, 25 bp, SARS Virus
ggagcatacaagtactacccgttcc

SEQ ID NO: 129448 - DNA, 25 bp, SARS Virus
gagcatacaaggtctacccgttcca

SEQ ID NO: 129449 - DNA, 25 bp, SARS Virus
agcatacaaggattacccgttccaa

SEQ ID NO: 129450 - DNA, 25 bp, SARS Virus
gcatacaaggactacccgttccaag

SEQ ID NO: 129451 - DNA, 25 bp, SARS Virus
catacaaggacttcccgttccaaga

SEQ ID NO: 129452 - DNA, 25 bp, SARS Virus
atacaaggactatccgttccaagaa

SEQ ID NO: 129453 - DNA, 25 bp, SARS Virus
tacaaggactactcgttccaagaaa

SEQ ID NO: 129454 - DNA, 25 bp, SARS Virus
acaaggactacctgttccaagaaaa

SEQ ID NO: 129455 - DNA, 25 bp, SARS Virus
caaggactaccctttccaagaaaat

SEQ ID NO: 129456 - DNA, 25 bp, SARS Virus
aaggactacccgttccaagaaaatc

SEQ ID NO: 129457 - DNA, 25 bp, SARS Virus
aggactacccgttccaagaaaatca

SEQ ID NO: 129458 - DNA, 25 bp, SARS Virus
ggactacccgtttcaagaaaatcat

SEQ ID NO: 129459 - DNA, 25 bp, SARS Virus
gactacccgttctaagaaaatcatc

SEQ ID NO: 129460 - DNA, 25 bp, SARS Virus
actacccgttcctagaaaatcatca

SEQ ID NO: 129461 - DNA, 25 bp, SARS Virus
ctacccgttccatgaaaatcatcat

SEQ ID NO: 129462 - DNA, 25 bp, SARS Virus
tacccgttccaataaaatcatcatg

SEQ ID NO: 129463 - DNA, 25 bp, SARS Virus
acccgttccaagtaaatcatcatgt

SEQ ID NO: 129464 - DNA, 25 bp, SARS Virus
cccgttccaagataatcatcatgtc

SEQ ID NO: 129465 - DNA, 25 bp, SARS Virus
ccgttccaagaatatcatcatgtca

SEQ ID NO: 129466 - DNA, 25 bp, SARS Virus
cgttccaagaaattcatcatgtcag

SEQ ID NO: 129467 - DNA, 25 bp, SARS Virus
gttccaagaaaatcatcatgtcagc

SEQ ID NO: 129468 - DNA, 25 bp, SARS Virus
ttccaagaaaattatcatgtcagca

SEQ ID NO: 129469 - DNA, 25 bp, SARS Virus
tccaagaaaatcttcatgtcagcat

SEQ ID NO: 129470 - DNA, 25 bp, SARS Virus
ccaagaaaatcatcatgtcagcatg

SEQ ID NO: 129471 - DNA, 25 bp, SARS Virus
caagaaaatcattatgtcagcatgg

SEQ ID NO: 129472 - DNA, 25 bp, SARS Virus
aagaaaatcatcttgtcagcatgga

SEQ ID NO: 129473 - DNA, 25 bp, SARS Virus
agaaaatcatcatgtcagcatggag

SEQ ID NO: 129474 - DNA, 25 bp, SARS Virus
gaaaatcatcatttcagcatggaga

SEQ ID NO: 129475 - DNA, 25 bp, SARS Virus
aaaatcatcatgtcagcatggagat

SEQ ID NO: 129476 - DNA, 25 bp, SARS Virus
aaatcatcatgttagcatggagatt

SEQ ID NO: 129477 - DNA, 25 bp, SARS Virus
aatcatcatgtctgcatggagattg

SEQ ID NO: 129478 - DNA, 25 bp, SARS Virus
atcatcatgtcatcatggagattgt

SEQ ID NO: 129479 - DNA, 25 bp, SARS Virus
tcatcatgtcagtatggagattgtg

SEQ ID NO: 129480 - DNA, 25 bp, SARS Virus
catcatgtcagcttggagattgtgt

SEQ ID NO: 129481 - DNA, 25 bp, SARS Virus
atcatgtcagcatggagattgtgtg

SEQ ID NO: 129482 - DNA, 25 bp, SARS Virus
tcatgtcagcattgagattgtgtga

SEQ ID NO: 129483 - DNA, 25 bp, SARS Virus
catgtcagcatgtagattgtgtgag

SEQ ID NO: 129484 - DNA, 25 bp, SARS Virus
atgtcagcatggtgattgtgtgagg

SEQ ID NO: 129485 - DNA, 25 bp, SARS Virus
tgtcagcatggatattgtgtgagga

SEQ ID NO: 129486 - DNA, 25 bp, SARS Virus
gtcagcatggagtttgtgtgaggac

SEQ ID NO: 129487 - DNA, 25 bp, SARS Virus
tcagcatggagattgtgtgaggact

SEQ ID NO: 129488 - DNA, 25 bp, SARS Virus
cagcatggagattgtgtgaggacta

SEQ ID NO: 129489 - DNA, 25 bp, SARS Virus
agcatggagattttgtgaggactat

SEQ ID NO: 129490 - DNA, 25 bp, SARS Virus
gcatggagattgtgtgaggactatc

SEQ ID NO: 129491 - DNA, 25 bp, SARS Virus
catggagattgtttgaggactatca

SEQ ID NO: 129492 - DNA, 25 bp, SARS Virus
atggagattgtgtgaggactatcac

SEQ ID NO: 129493 - DNA, 25 bp, SARS Virus
tggagattgtgttaggactatcact

SEQ ID NO: 129494 - DNA, 25 bp, SARS Virus
ggagattgtgtgtggactatcacta

SEQ ID NO: 129495 - DNA, 25 bp, SARS Virus
gagattgtgtgatgactatcactat

SEQ ID NO: 129496 - DNA, 25 bp, SARS Virus
agattgtgtgagtactatcactata

SEQ ID NO: 129497 - DNA, 25 bp, SARS Virus
gattgtgtgaggtctatcactatat

SEQ ID NO: 129498 - DNA, 25 bp, SARS Virus
attgtgtgaggattatcactatatc

SEQ ID NO: 129499 - DNA, 25 bp, SARS Virus
ttgtgtgaggactatcactatatcg

SEQ ID NO: 129500 - DNA, 25 bp, SARS Virus
tgtgtgaggactttcactatatcga

SEQ ID NO: 129501 - DNA, 25 bp, SARS Virus
gtgtgaggactatcactatatcgag

SEQ ID NO: 129502 - DNA, 25 bp, SARS Virus
tgtgaggactattactatatcgagc

SEQ ID NO: 129503 - DNA, 25 bp, SARS Virus
gtgaggactatctctatatcgagcg

SEQ ID NO: 129504 - DNA, 25 bp, SARS Virus
tgaggactatcattatatcgagcgt

SEQ ID NO: 129505 - DNA, 25 bp, SARS Virus
gaggactatcactatatcgagcgtt

SEQ ID NO: 129506 - DNA, 25 bp, SARS Virus
aggactatcactttatcgagcgttc

SEQ ID NO: 129507 - DNA, 25 bp, SARS Virus
ggactatcactatatcgagcgttct

SEQ ID NO: 129508 - DNA, 25 bp, SARS Virus
gactatcactatttcgagcgttcta

SEQ ID NO: 129509 - DNA, 25 bp, SARS Virus
actatcactatatcgagcgttctac

SEQ ID NO: 129510 - DNA, 25 bp, SARS Virus
ctatcactatattgagcgttctaca

SEQ ID NO: 129511 - DNA, 25 bp, SARS Virus
tatcactatatctagcgttctacat

SEQ ID NO: 129512 - DNA, 25 bp, SARS Virus
atcactatatcgtgcgttctacatt

SEQ ID NO: 129513 - DNA, 25 bp, SARS Virus
tcactatatcgatcgttctacattt

SEQ ID NO: 129514 - DNA, 25 bp, SARS Virus
cactatatcgagtgttctacattta

SEQ ID NO: 129515 - DNA, 25 bp, SARS Virus
actatatcgagctttctacatttat

SEQ ID NO: 129516 - DNA, 25 bp, SARS Virus
ctatatcgagcgttctacatttatg

SEQ ID NO: 129517 - DNA, 25 bp, SARS Virus
tatatcgagcgttctacatttatgt

SEQ ID NO: 129518 - DNA, 25 bp, SARS Virus
atatcgagcgttttacatttatgtt

SEQ ID NO: 129519 - DNA, 25 bp, SARS Virus
tatcgagcgttctacatttatgtta

SEQ ID NO: 129520 - DNA, 25 bp, SARS Virus
atcgagcgttcttcatttatgttag

SEQ ID NO: 129521 - DNA, 25 bp, SARS Virus
tcgagcgttctatatttatgttagt

SEQ ID NO: 129522 - DNA, 25 bp, SARS Virus
cgagcgttctacttttatgttagtt

SEQ ID NO: 129523 - DNA, 25 bp, SARS Virus
gagcgttctacatttatgttagtta

SEQ ID NO: 129524 - DNA, 25 bp, SARS Virus
agcgttctacatttatgttagttac

SEQ ID NO: 129525 - DNA, 25 bp, SARS Virus
gcgttctacatttatgttagttaca

SEQ ID NO: 129526 - DNA, 25 bp, SARS Virus
cgttctacatttttgttagttacag

SEQ ID NO: 129527 - DNA, 25 bp, SARS Virus
gttctacatttatgttagttacagt

SEQ ID NO: 129528 - DNA, 25 bp, SARS Virus
ttctacatttattttagttacagtc

SEQ ID NO: 129529 - DNA, 25 bp, SARS Virus
tctacatttatgttagttacagtcc

SEQ ID NO: 129530 - DNA, 25 bp, SARS Virus
ctacatttatgttagttacagtcct

SEQ ID NO: 129531 - DNA, 25 bp, SARS Virus
tacatttatgtttgttacagtcctt

SEQ ID NO: 129532 - DNA, 25 bp, SARS Virus
acatttatgttatttacagtccttc

SEQ ID NO: 129533 - DNA, 25 bp, SARS Virus
catttatgttagttacagtccttct

SEQ ID NO: 129534 - DNA, 25 bp, SARS Virus
atttatgttagttacagtccttctc

SEQ ID NO: 129535 - DNA, 25 bp, SARS Virus
tttatgttagtttcagtccttctct

SEQ ID NO: 129536 - DNA, 25 bp, SARS Virus
ttatgttagttatagtccttctctt

SEQ ID NO: 129537 - DNA, 25 bp, SARS Virus
tatgttagttactgtccttctctta

SEQ ID NO: 129538 - DNA, 25 bp, SARS Virus
atgttagttacattccttctcttat

SEQ ID NO: 129539 - DNA, 25 bp, SARS Virus
tgttagttacagtccttctcttatt

SEQ ID NO: 129540 - DNA, 25 bp, SARS Virus
gttagttacagttcttctcttatta

SEQ ID NO: 129541 - DNA, 25 bp, SARS Virus
ttagttacagtctttctcttattaa

SEQ ID NO: 129542 - DNA, 25 bp, SARS Virus
tagttacagtccttctcttattaaa

SEQ ID NO: 129543 - DNA, 25 bp, SARS Virus
agttacagtccttctcttattaaaa

SEQ ID NO: 129544 - DNA, 25 bp, SARS Virus
gttacagtccttttcttattaaaag

SEQ ID NO: 129545 - DNA, 25 bp, SARS Virus
ttacagtccttctcttattaaaagt

SEQ ID NO: 129546 - DNA, 25 bp, SARS Virus
tacagtccttcttttattaaaagta

SEQ ID NO: 129547 - DNA, 25 bp, SARS Virus
acagtccttctcttattaaaagtac

SEQ ID NO: 129548 - DNA, 25 bp, SARS Virus
cagtccttctcttattaaaagtaca

SEQ ID NO: 129549 - DNA, 25 bp, SARS Virus
agtccttctctttttaaaagtacaa

SEQ ID NO: 129550 - DNA, 25 bp, SARS Virus
gtccttctcttattaaaagtacaag

SEQ ID NO: 129551 - DNA, 25 bp, SARS Virus
tccttctcttattaaaagtacaagc

SEQ ID NO: 129552 - DNA, 25 bp, SARS Virus
ccttctcttatttaaagtacaagca

SEQ ID NO: 129553 - DNA, 25 bp, SARS Virus
cttctcttattataagtacaagcaa

SEQ ID NO: 129554 - DNA, 25 bp, SARS Virus
ttctcttattaatagtacaagcaaa

SEQ ID NO: 129555 - DNA, 25 bp, SARS Virus
tctcttattaaatgtacaagcaaaa

SEQ ID NO: 129556 - DNA, 25 bp, SARS Virus
ctcttattaaaattacaagcaaaat

SEQ ID NO: 129557 - DNA, 25 bp, SARS Virus
tcttattaaaagtacaagcaaaata

SEQ ID NO: 129558 - DNA, 25 bp, SARS Virus
cttattaaaagttcaagcaaaatac

SEQ ID NO: 129559 - DNA, 25 bp, SARS Virus
ttattaaaagtataagcaaaatacc

SEQ ID NO: 129560 - DNA, 25 bp, SARS Virus
tattaaaagtactagcaaaatacct

SEQ ID NO: 129561 - DNA, 25 bp, SARS Virus
attaaaagtacatgcaaaataccta

SEQ ID NO: 129562 - DNA, 25 bp, SARS Virus
ttaaaagtacaatcaaaatacctat

SEQ ID NO: 129563 - DNA, 25 bp, SARS Virus
taaaagtacaagtaaaatacctatt

SEQ ID NO: 129564 - DNA, 25 bp, SARS Virus
aaaagtacaagctaaatacctatta

SEQ ID NO: 129565 - DNA, 25 bp, SARS Virus
aaagtacaagcataatacctattag

SEQ ID NO: 129566 - DNA, 25 bp, SARS Virus
aagtacaagcaatatacctattaga

SEQ ID NO: 129567 - DNA, 25 bp, SARS Virus
agtacaagcaaattacctattagat

SEQ ID NO: 129568 - DNA, 25 bp, SARS Virus
gtacaagcaaaatacctattagatt

SEQ ID NO: 129569 - DNA, 25 bp, SARS Virus
tacaagcaaaattcctattagattg

SEQ ID NO: 129570 - DNA, 25 bp, SARS Virus
acaagcaaaatatctattagattga

SEQ ID NO: 129571 - DNA, 25 bp, SARS Virus
caagcaaaatacttattagattgag

SEQ ID NO: 129572 - DNA, 25 bp, SARS Virus
aagcaaaatacctattagattgagg

SEQ ID NO: 129573 - DNA, 25 bp, SARS Virus
agcaaaataccttttagattgaggt

SEQ ID NO: 129574 - DNA, 25 bp, SARS Virus
gcaaaatacctattagattgaggta

SEQ ID NO: 129575 - DNA, 25 bp, SARS Virus
caaaatacctattagattgaggtat

SEQ ID NO: 129576 - DNA, 25 bp, SARS Virus
aaaatacctatttgattgaggtatc

SEQ ID NO: 129577 - DNA, 25 bp, SARS Virus
aaatacctattatattgaggtatcc

SEQ ID NO: 129578 - DNA, 25 bp, SARS Virus
aatacctattagtttgaggtatcca

SEQ ID NO: 129579 - DNA, 25 bp, SARS Virus
atacctattagattgaggtatccaa

SEQ ID NO: 129580 - DNA, 25 bp, SARS Virus
tacctattagattgaggtatccaag

SEQ ID NO: 129581 - DNA, 25 bp, SARS Virus
acctattagatttaggtatccaaga

SEQ ID NO: 129582 - DNA, 25 bp, SARS Virus
cctattagattgtggtatccaagaa

SEQ ID NO: 129583 - DNA, 25 bp, SARS Virus
ctattagattgatgtatccaagaag

SEQ ID NO: 129584 - DNA, 25 bp, SARS Virus
tattagattgagttatccaagaagt

SEQ ID NO: 129585 - DNA, 25 bp, SARS Virus
attagattgaggtatccaagaagta

SEQ ID NO: 129586 - DNA, 25 bp, SARS Virus
ttagattgaggtttccaagaagtag

SEQ ID NO: 129587 - DNA, 25 bp, SARS Virus
tagattgaggtatccaagaagtagt

SEQ ID NO: 129588 - DNA, 25 bp, SARS Virus
agattgaggtattcaagaagtagta

SEQ ID NO: 129589 - DNA, 25 bp, SARS Virus
gattgaggtatctaagaagtagtag

SEQ ID NO: 129590 - DNA, 25 bp, SARS Virus
attgaggtatcctagaagtagtaga

SEQ ID NO: 129591 - DNA, 25 bp, SARS Virus
ttgaggtatccatgaagtagtagat

SEQ ID NO: 129592 - DNA, 25 bp, SARS Virus
tgaggtatccaataagtagtagatt

SEQ ID NO: 129593 - DNA, 25 bp, SARS Virus
gaggtatccaagtagtagtagattg

SEQ ID NO: 129594 - DNA, 25 bp, SARS Virus
aggtatccaagatgtagtagattga

SEQ ID NO: 129595 - DNA, 25 bp, SARS Virus
ggtatccaagaattagtagattgag

SEQ ID NO: 129596 - DNA, 25 bp, SARS Virus
gtatccaagaagtagtagattgagg

SEQ ID NO: 129597 - DNA, 25 bp, SARS Virus
tatccaagaagttgtagattgaggc

SEQ ID NO: 129598 - DNA, 25 bp, SARS Virus
atccaagaagtattagattgaggct

SEQ ID NO: 129599 - DNA, 25 bp, SARS Virus
tccaagaagtagtagattgaggctt

SEQ ID NO: 129600 - DNA, 25 bp, SARS Virus
ccaagaagtagttgattgaggctta

SEQ ID NO: 129601 - DNA, 25 bp, SARS Virus
caagaagtagtatattgaggcttat

SEQ ID NO: 129602 - DNA, 25 bp, SARS Virus
aagaagtagtagtttgaggcttatt

SEQ ID NO: 129603 - DNA, 25 bp, SARS Virus
agaagtagtagattgaggcttatta

SEQ ID NO: 129604 - DNA, 25 bp, SARS Virus
gaagtagtagattgaggcttattaa

SEQ ID NO: 129605 - DNA, 25 bp, SARS Virus
aagtagtagatttaggcttattaag

SEQ ID NO: 129606 - DNA, 25 bp, SARS Virus
agtagtagattgtggcttattaaga

SEQ ID NO: 129607 - DNA, 25 bp, SARS Virus
gtagtagattgatgcttattaagaa

SEQ ID NO: 129608 - DNA, 25 bp, SARS Virus
tagtagattgagtcttattaagaag

SEQ ID NO: 129609 - DNA, 25 bp, SARS Virus
agtagattgaggtttattaagaaga

SEQ ID NO: 129610 - DNA, 25 bp, SARS Virus
gtagattgaggcttattaagaagaa

SEQ ID NO: 129611 - DNA, 25 bp, SARS Virus
tagattgaggcttattaagaagaat

SEQ ID NO: 129612 - DNA, 25 bp, SARS Virus
agattgaggctttttaagaagaatc

SEQ ID NO: 129613 - DNA, 25 bp, SARS Virus
gattgaggcttattaagaagaatca

SEQ ID NO: 129614 - DNA, 25 bp, SARS Virus
attgaggcttattaagaagaatcaa

SEQ ID NO: 129615 - DNA, 25 bp, SARS Virus
ttgaggcttatttagaagaatcaat

SEQ ID NO: 129616 - DNA, 25 bp, SARS Virus
tgaggcttattatgaagaatcaatc

SEQ ID NO: 129617 - DNA, 25 bp, SARS Virus
gaggcttattaataagaatcaatct

SEQ ID NO: 129618 - DNA, 25 bp, SARS Virus
aggcttattaagtagaatcaatctc

SEQ ID NO: 129619 - DNA, 25 bp, SARS Virus
ggcttattaagatgaatcaatctcc

SEQ ID NO: 129620 - DNA, 25 bp, SARS Virus
gcttattaagaataatcaatctccg

SEQ ID NO: 129621 - DNA, 25 bp, SARS Virus
cttattaagaagtatcaatctccga

SEQ ID NO: 129622 - DNA, 25 bp, SARS Virus
ttattaagaagattcaatctccgaa

SEQ ID NO: 129623 - DNA, 25 bp, SARS Virus
tattaagaagaatcaatctccgaat

SEQ ID NO: 129624 - DNA, 25 bp, SARS Virus
attaagaagaattaatctccgaatt

SEQ ID NO: 129625 - DNA, 25 bp, SARS Virus
ttaagaagaatctatctccgaattt

SEQ ID NO: 129626 - DNA, 25 bp, SARS Virus
taagaagaatcattctccgaattta

SEQ ID NO: 129627 - DNA, 25 bp, SARS Virus
aagaagaatcaatctccgaatttat

SEQ ID NO: 129628 - DNA, 25 bp, SARS Virus
agaagaatcaatttccgaatttatt

SEQ ID NO: 129629 - DNA, 25 bp, SARS Virus
gaagaatcaatctccgaatttatta

SEQ ID NO: 129630 - DNA, 25 bp, SARS Virus
aagaatcaatcttcgaatttattaa

SEQ ID NO: 129631 - DNA, 25 bp, SARS Virus
agaatcaatctctgaatttattaac

SEQ ID NO: 129632 - DNA, 25 bp, SARS Virus
gaatcaatctcctaatttattaaca

SEQ ID NO: 129633 - DNA, 25 bp, SARS Virus
aatcaatctccgtatttattaacag

SEQ ID NO: 129634 - DNA, 25 bp, SARS Virus
atcaatctccgattttattaacaga

SEQ ID NO: 129635 - DNA, 25 bp, SARS Virus
tcaatctccgaatttattaacagag

SEQ ID NO: 129636 - DNA, 25 bp, SARS Virus
caatctccgaatttattaacagagt

SEQ ID NO: 129637 - DNA, 25 bp, SARS Virus
aatctccgaatttattaacagagtg

SEQ ID NO: 129638 - DNA, 25 bp, SARS Virus
atctccgaattttttaacagagtga

SEQ ID NO: 129639 - DNA, 25 bp, SARS Virus
tctccgaatttattaacagagtgat

SEQ ID NO: 129640 - DNA, 25 bp, SARS Virus
ctccgaatttattaacagagtgata

SEQ ID NO: 129641 - DNA, 25 bp, SARS Virus
tccgaatttatttacagagtgataa

SEQ ID NO: 129642 - DNA, 25 bp, SARS Virus
ccgaatttattatcagagtgataac

SEQ ID NO: 129643 - DNA, 25 bp, SARS Virus
cgaatttattaatagagtgataact

SEQ ID NO: 129644 - DNA, 25 bp, SARS Virus
gaatttattaactgagtgataactt

SEQ ID NO: 129645 - DNA, 25 bp, SARS Virus
aatttattaacatagtgataacttg

SEQ ID NO: 129646 - DNA, 25 bp, SARS Virus
atttattaacagtgtgataacttga

SEQ ID NO: 129647 - DNA, 25 bp, SARS Virus
tttattaacagattgataacttgaa

SEQ ID NO: 129648 - DNA, 25 bp, SARS Virus
ttattaacagagtgataacttgaat

SEQ ID NO: 129649 - DNA, 25 bp, SARS Virus
tattaacagagttataacttgaata

SEQ ID NO: 129650 - DNA, 25 bp, SARS Virus
attaacagagtgttaacttgaataa

SEQ ID NO: 129651 - DNA, 25 bp, SARS Virus
ttaacagagtgataacttgaataat

SEQ ID NO: 129652 - DNA, 25 bp, SARS Virus
taacagagtgattacttgaataata

SEQ ID NO: 129653 - DNA, 25 bp, SARS Virus
aacagagtgatatcttgaataatat

SEQ ID NO: 129654 - DNA, 25 bp, SARS Virus
acagagtgataatttgaataatatt

SEQ ID NO: 129655 - DNA, 25 bp, SARS Virus
cagagtgataacttgaataatattg

SEQ ID NO: 129656 - DNA, 25 bp, SARS Virus
agagtgataacttgaataatattgc

SEQ ID NO: 129657 - DNA, 25 bp, SARS Virus
gagtgataactttaataatattgca

SEQ ID NO: 129658 - DNA, 25 bp, SARS Virus
agtgataacttgtataatattgcag

SEQ ID NO: 129659 - DNA, 25 bp, SARS Virus
gtgataacttgattaatattgcagt

SEQ ID NO: 129660 - DNA, 25 bp, SARS Virus
tgataacttgaataatattgcagtt

SEQ ID NO: 129661 - DNA, 25 bp, SARS Virus
gataacttgaattatattgcagttc

SEQ ID NO: 129662 - DNA, 25 bp, SARS Virus
ataacttgaatattattgcagttct

SEQ ID NO: 129663 - DNA, 25 bp, SARS Virus
taacttgaataatattgcagttcta

SEQ ID NO: 129664 - DNA, 25 bp, SARS Virus
aacttgaataattttgcagttctaa

SEQ ID NO: 129665 - DNA, 25 bp, SARS Virus
acttgaataatattgcagttctaag

SEQ ID NO: 129666 - DNA, 25 bp, SARS Virus
cttgaataatattgcagttctaagg

SEQ ID NO: 129667 - DNA, 25 bp, SARS Virus
ttgaataatatttcagttctaaggt

SEQ ID NO: 129668 - DNA, 25 bp, SARS Virus
tgaataatattgtagttctaaggtt

SEQ ID NO: 129669 - DNA, 25 bp, SARS Virus
gaataatattgctgttctaaggttt

SEQ ID NO: 129670 - DNA, 25 bp, SARS Virus
aataatattgcatttctaaggttta

SEQ ID NO: 129671 - DNA, 25 bp, SARS Virus
ataatattgcagttctaaggtttat

SEQ ID NO: 129672 - DNA, 25 bp, SARS Virus
taatattgcagttctaaggtttatc

SEQ ID NO: 129673 - DNA, 25 bp, SARS Virus
aatattgcagttttaaggtttatcg

SEQ ID NO: 129674 - DNA, 25 bp, SARS Virus
atattgcagttctaaggtttatcgt

SEQ ID NO: 129675 - DNA, 25 bp, SARS Virus
tattgcagttcttaggtttatcgtt

SEQ ID NO: 129676 - DNA, 25 bp, SARS Virus
attgcagttctatggtttatcgtta

SEQ ID NO: 129677 - DNA, 25 bp, SARS Virus
ttgcagttctaatgtttatcgttag

SEQ ID NO: 129678 - DNA, 25 bp, SARS Virus
tgcagttctaagttttatcgttagg

SEQ ID NO: 129679 - DNA, 25 bp, SARS Virus
gcagttctaaggtttatcgttagga

SEQ ID NO: 129680 - DNA, 25 bp, SARS Virus
cagttctaaggtttatcgttaggac

SEQ ID NO: 129681 - DNA, 25 bp, SARS Virus
agttctaaggtttatcgttaggact

SEQ ID NO: 129682 - DNA, 25 bp, SARS Virus
gttctaaggtttttcgttaggactt

SEQ ID NO: 129683 - DNA, 25 bp, SARS Virus
ttctaaggtttatcgttaggacttt

SEQ ID NO: 129684 - DNA, 25 bp, SARS Virus
tctaaggtttattgttaggactttc

SEQ ID NO: 129685 - DNA, 25 bp, SARS Virus
ctaaggtttatctttaggactttca

SEQ ID NO: 129686 - DNA, 25 bp, SARS Virus
taaggtttatcgttaggactttcag

SEQ ID NO: 129687 - DNA, 25 bp, SARS Virus
aaggtttatcgttaggactttcagg

SEQ ID NO: 129688 - DNA, 25 bp, SARS Virus
aggtttatcgtttggactttcagga

SEQ ID NO: 129689 - DNA, 25 bp, SARS Virus
ggtttatcgttatgactttcaggag

SEQ ID NO: 129690 - DNA, 25 bp, SARS Virus
gtttatcgttagtactttcaggagt

SEQ ID NO: 129691 - DNA, 25 bp, SARS Virus
tttatcgttaggtctttcaggagta

SEQ ID NO: 129692 - DNA, 25 bp, SARS Virus
ttatcgttaggattttcaggagtat

SEQ ID NO: 129693 - DNA, 25 bp, SARS Virus
tatcgttaggactttcaggagtatt

SEQ ID NO: 129694 - DNA, 25 bp, SARS Virus
atcgttaggactttcaggagtatta

SEQ ID NO: 129695 - DNA, 25 bp, SARS Virus
tcgttaggactttcaggagtattac

SEQ ID NO: 129696 - DNA, 25 bp, SARS Virus
cgttaggacttttaggagtattact

SEQ ID NO: 129697 - DNA, 25 bp, SARS Virus
gttaggactttctggagtattacta

SEQ ID NO: 129698 - DNA, 25 bp, SARS Virus
ttaggactttcatgagtattactat

SEQ ID NO: 129699 - DNA, 25 bp, SARS Virus
taggactttcagtagtattactatt

SEQ ID NO: 129700 - DNA, 25 bp, SARS Virus
aggactttcaggtgtattactatta

SEQ ID NO: 129701 - DNA, 25 bp, SARS Virus
ggactttcaggattattactattag

SEQ ID NO: 129702 - DNA, 25 bp, SARS Virus
gactttcaggagtattactattagt

SEQ ID NO: 129703 - DNA, 25 bp, SARS Virus
actttcaggagttttactattagtt

SEQ ID NO: 129704 - DNA, 25 bp, SARS Virus
ctttcaggagtattactattagtta

SEQ ID NO: 129705 - DNA, 25 bp, SARS Virus
tttcaggagtattactattagttat

SEQ ID NO: 129706 - DNA, 25 bp, SARS Virus
ttcaggagtatttctattagttata

SEQ ID NO: 129707 - DNA, 25 bp, SARS Virus
tcaggagtattattattagttatag

SEQ ID NO: 129708 - DNA, 25 bp, SARS Virus
caggagtattactattagttataga

SEQ ID NO: 129709 - DNA, 25 bp, SARS Virus
aggagtattacttttagttatagag

SEQ ID NO: 129710 - DNA, 25 bp, SARS Virus
ggagtattactattagttatagaga

SEQ ID NO: 129711 - DNA, 25 bp, SARS Virus
gagtattactattagttatagagac

SEQ ID NO: 129712 - DNA, 25 bp, SARS Virus
agtattactatttgttatagagacg

SEQ ID NO: 129713 - DNA, 25 bp, SARS Virus
gtattactattatttatagagacga

SEQ ID NO: 129714 - DNA, 25 bp, SARS Virus
tattactattagttatagagacgat

SEQ ID NO: 129715 - DNA, 25 bp, SARS Virus
attactattagttatagagacgata

SEQ ID NO: 129716 - DNA, 25 bp, SARS Virus
ttactattagttttagagacgataa

SEQ ID NO: 129717 - DNA, 25 bp, SARS Virus
tactattagttatagagacgataac

SEQ ID NO: 129718 - DNA, 25 bp, SARS Virus
actattagttattgagacgataaca

SEQ ID NO: 129719 - DNA, 25 bp, SARS Virus
ctattagttatatagacgataacat

SEQ ID NO: 129720 - DNA, 25 bp, SARS Virus
tattagttatagtgacgataacatt

SEQ ID NO: 129721 - DNA, 25 bp, SARS Virus
attagttatagatacgataacattg

SEQ ID NO: 129722 - DNA, 25 bp, SARS Virus
ttagttatagagtcgataacattgg

SEQ ID NO: 129723 - DNA, 25 bp, SARS Virus
tagttatagagatgataacattgga

SEQ ID NO: 129724 - DNA, 25 bp, SARS Virus
agttatagagactataacattggac

SEQ ID NO: 129725 - DNA, 25 bp, SARS Virus
gttatagagacgttaacattggacc

SEQ ID NO: 129726 - DNA, 25 bp, SARS Virus
ttatagagacgataacattggacct

SEQ ID NO: 129727 - DNA, 25 bp, SARS Virus
tatagagacgattacattggacctt

SEQ ID NO: 129728 - DNA, 25 bp, SARS Virus
atagagacgatatcattggaccttc

SEQ ID NO: 129729 - DNA, 25 bp, SARS Virus
tagagacgataatattggaccttca

SEQ ID NO: 129730 - DNA, 25 bp, SARS Virus
agagacgataactttggaccttcag

SEQ ID NO: 129731 - DNA, 25 bp, SARS Virus
gagacgataacattggaccttcagt

SEQ ID NO: 129732 - DNA, 25 bp, SARS Virus
agacgataacattggaccttcagtt

SEQ ID NO: 129733 - DNA, 25 bp, SARS Virus
gacgataacatttgaccttcagttg

SEQ ID NO: 129734 - DNA, 25 bp, SARS Virus
acgataacattgtaccttcagttgt

SEQ ID NO: 129735 - DNA, 25 bp, SARS Virus
cgataacattggtccttcagttgtt

SEQ ID NO: 129736 - DNA, 25 bp, SARS Virus
gataacattggatcttcagttgttc

SEQ ID NO: 129737 - DNA, 25 bp, SARS Virus
ataacattggactttcagttgttct

SEQ ID NO: 129738 - DNA, 25 bp, SARS Virus
taacattggaccttcagttgttcta

SEQ ID NO: 129739 - DNA, 25 bp, SARS Virus
aacattggaccttcagttgttctac

SEQ ID NO: 129740 - DNA, 25 bp, SARS Virus
acattggacctttagttgttctact

SEQ ID NO: 129741 - DNA, 25 bp, SARS Virus
cattggaccttctgttgttctactt

SEQ ID NO: 129742 - DNA, 25 bp, SARS Virus
attggaccttcatttgttctacttt

SEQ ID NO: 129743 - DNA, 25 bp, SARS Virus
ttggaccttcagttgttctactttg

SEQ ID NO: 129744 - DNA, 25 bp, SARS Virus
tggaccttcagttgttctactttgt

SEQ ID NO: 129745 - DNA, 25 bp, SARS Virus
ggaccttcagtttttctactttgta

SEQ ID NO: 129746 - DNA, 25 bp, SARS Virus
gaccttcagttgttctactttgtag

SEQ ID NO: 129747 - DNA, 25 bp, SARS Virus
accttcagttgttctactttgtaga

SEQ ID NO: 129748 - DNA, 25 bp, SARS Virus
ccttcagttgttttactttgtagac

SEQ ID NO: 129749 - DNA, 25 bp, SARS Virus
cttcagttgttctactttgtagaca

SEQ ID NO: 129750 - DNA, 25 bp, SARS Virus
ttcagttgttcttctttgtagacaa

SEQ ID NO: 129751 - DNA, 25 bp, SARS Virus
tcagttgttctattttgtagacaac

SEQ ID NO: 129752 - DNA, 25 bp, SARS Virus
cagttgttctactttgtagacaaca

SEQ ID NO: 129753 - DNA, 25 bp, SARS Virus
agttgttctactttgtagacaacag

SEQ ID NO: 129754 - DNA, 25 bp, SARS Virus
gttgttctactttgtagacaacagt

SEQ ID NO: 129755 - DNA, 25 bp, SARS Virus
ttgttctactttttagacaacagtg

SEQ ID NO: 129756 - DNA, 25 bp, SARS Virus
tgttctactttgtagacaacagtga

SEQ ID NO: 129757 - DNA, 25 bp, SARS Virus
gttctactttgttgacaacagtgaa

SEQ ID NO: 129758 - DNA, 25 bp, SARS Virus
ttctactttgtatacaacagtgaat

SEQ ID NO: 129759 - DNA, 25 bp, SARS Virus
tctactttgtagtcaacagtgaatg

SEQ ID NO: 129760 - DNA, 25 bp, SARS Virus
ctactttgtagataacagtgaatga

SEQ ID NO: 129761 - DNA, 25 bp, SARS Virus
tactttgtagactacagtgaatgac

SEQ ID NO: 129762 - DNA, 25 bp, SARS Virus
actttgtagacatcagtgaatgaca

SEQ ID NO: 129763 - DNA, 25 bp, SARS Virus
ctttgtagacaatagtgaatgacat

SEQ ID NO: 129764 - DNA, 25 bp, SARS Virus
tttgtagacaactgtgaatgacatg

SEQ ID NO: 129765 - DNA, 25 bp, SARS Virus
ttgtagacaacattgaatgacatga

SEQ ID NO: 129766 - DNA, 25 bp, SARS Virus
tgtagacaacagtgaatgacatgat

SEQ ID NO: 129767 - DNA, 25 bp, SARS Virus
gtagacaacagttaatgacatgatc

SEQ ID NO: 129768 - DNA, 25 bp, SARS Virus
tagacaacagtgtatgacatgatcg

SEQ ID NO: 129769 - DNA, 25 bp, SARS Virus
agacaacagtgattgacatgatcgt

SEQ ID NO: 129770 - DNA, 25 bp, SARS Virus
gacaacagtgaatgacatgatcgtt

SEQ ID NO: 129771 - DNA, 25 bp, SARS Virus
acaacagtgaattacatgatcgttt

SEQ ID NO: 129772 - DNA, 25 bp, SARS Virus
caacagtgaatgtcatgatcgtttc

SEQ ID NO: 129773 - DNA, 25 bp, SARS Virus
aacagtgaatgatatgatcgtttcg

SEQ ID NO: 129774 - DNA, 25 bp, SARS Virus
acagtgaatgacttgatcgtttcgt

SEQ ID NO: 129775 - DNA, 25 bp, SARS Virus
cagtgaatgacatgatcgtttcgtt

SEQ ID NO: 129776 - DNA, 25 bp, SARS Virus
agtgaatgacattatcgtttcgtta

SEQ ID NO: 129777 - DNA, 25 bp, SARS Virus
gtgaatgacatgttcgtttcgttat

SEQ ID NO: 129778 - DNA, 25 bp, SARS Virus
tgaatgacatgatcgtttcgttata

SEQ ID NO: 129779 - DNA, 25 bp, SARS Virus
gaatgacatgattgtttcgttataa

SEQ ID NO: 129780 - DNA, 25 bp, SARS Virus
aatgacatgatcttttcgttataac

SEQ ID NO: 129781 - DNA, 25 bp, SARS Virus
atgacatgatcgtttcgttataaca

SEQ ID NO: 129782 - DNA, 25 bp, SARS Virus
tgacatgatcgtttcgttataacag

SEQ ID NO: 129783 - DNA, 25 bp, SARS Virus
gacatgatcgtttcgttataacagc

SEQ ID NO: 129784 - DNA, 25 bp, SARS Virus
acatgatcgttttgttataacagca

SEQ ID NO: 129785 - DNA, 25 bp, SARS Virus
catgatcgtttctttataacagcaa

SEQ ID NO: 129786 - DNA, 25 bp, SARS Virus
atgatcgtttcgttataacagcaac

SEQ ID NO: 129787 - DNA, 25 bp, SARS Virus
tgatcgtttcgttataacagcaacg

SEQ ID NO: 129788 - DNA, 25 bp, SARS Virus
gatcgtttcgttttaacagcaacga

SEQ ID NO: 129789 - DNA, 25 bp, SARS Virus
atcgtttcgttataacagcaacgat

SEQ ID NO: 129790 - DNA, 25 bp, SARS Virus
tcgtttcgttattacagcaacgatg

SEQ ID NO: 129791 - DNA, 25 bp, SARS Virus
cgtttcgttatatcagcaacgatgg

SEQ ID NO: 129792 - DNA, 25 bp, SARS Virus
gtttcgttataatagcaacgatggc

SEQ ID NO: 129793 - DNA, 25 bp, SARS Virus
tttcgttataactgcaacgatggcc

SEQ ID NO: 129794 - DNA, 25 bp, SARS Virus
ttcgttataacatcaacgatggccg

SEQ ID NO: 129795 - DNA, 25 bp, SARS Virus
tcgttataacagtaacgatggccgc

SEQ ID NO: 129796 - DNA, 25 bp, SARS Virus
cgttataacagctacgatggccgca

SEQ ID NO: 129797 - DNA, 25 bp, SARS Virus
gttataacagcatcgatggccgcac

SEQ ID NO: 129798 - DNA, 25 bp, SARS Virus
ttataacagcaatgatggccgcacc

SEQ ID NO: 129799 - DNA, 25 bp, SARS Virus
tataacagcaactatggccgcacca

SEQ ID NO: 129800 - DNA, 25 bp, SARS Virus
ataacagcaacgttggccgcaccag

SEQ ID NO: 129801 - DNA, 25 bp, SARS Virus
taacagcaacgatggccgcaccaga

SEQ ID NO: 129802 - DNA, 25 bp, SARS Virus
aacagcaacgattgccgcaccagac

SEQ ID NO: 129803 - DNA, 25 bp, SARS Virus
acagcaacgatgtccgcaccagaca

SEQ ID NO: 129804 - DNA, 25 bp, SARS Virus
cagcaacgatggtcgcaccagacat

SEQ ID NO: 129805 - DNA, 25 bp, SARS Virus
agcaacgatggctgcaccagacata

SEQ ID NO: 129806 - DNA, 25 bp, SARS Virus
gcaacgatggcctcaccagacataa

SEQ ID NO: 129807 - DNA, 25 bp, SARS Virus
caacgatggccgtaccagacataaa

SEQ ID NO: 129808 - DNA, 25 bp, SARS Virus
aacgatggccgctccagacataaat

SEQ ID NO: 129809 - DNA, 25 bp, SARS Virus
acgatggccgcatcagacataaatt

SEQ ID NO: 129810 - DNA, 25 bp, SARS Virus
cgatggccgcactagacataaatta

SEQ ID NO: 129811 - DNA, 25 bp, SARS Virus
gatggccgcacctgacataaattaa

SEQ ID NO: 129812 - DNA, 25 bp, SARS Virus
atggccgcaccatacataaattaaa

SEQ ID NO: 129813 - DNA, 25 bp, SARS Virus
tggccgcaccagtcataaattaaat

SEQ ID NO: 129814 - DNA, 25 bp, SARS Virus
ggccgcaccagatataaattaaata

SEQ ID NO: 129815 - DNA, 25 bp, SARS Virus
gccgcaccagacttaaattaaatat

SEQ ID NO: 129816 - DNA, 25 bp, SARS Virus
ccgcaccagacataaattaaatatc

SEQ ID NO: 129817 - DNA, 25 bp, SARS Virus
cgcaccagacattaattaaatatca

SEQ ID NO: 129818 - DNA, 25 bp, SARS Virus
gcaccagacatatattaaatatcaa

SEQ ID NO: 129819 - DNA, 25 bp, SARS Virus
caccagacataatttaaatatcaaa

SEQ ID NO: 129820 - DNA, 25 bp, SARS Virus
accagacataaattaaatatcaaag

SEQ ID NO: 129821 - DNA, 25 bp, SARS Virus
ccagacataaattaaatatcaaagg

SEQ ID NO: 129822 - DNA, 25 bp, SARS Virus
cagacataaatttaatatcaaaggt

SEQ ID NO: 129823 - DNA, 25 bp, SARS Virus
agacataaattatatatcaaaggtt

SEQ ID NO: 129824 - DNA, 25 bp, SARS Virus
gacataaattaattatcaaaggtta

SEQ ID NO: 129825 - DNA, 25 bp, SARS Virus
acataaattaaatatcaaaggttat

SEQ ID NO: 129826 - DNA, 25 bp, SARS Virus
cataaattaaatttcaaaggttatg

SEQ ID NO: 129827 - DNA, 25 bp, SARS Virus
ataaattaaatatcaaaggttatgc

SEQ ID NO: 129828 - DNA, 25 bp, SARS Virus
taaattaaatattaaaggttatgcc

SEQ ID NO: 129829 - DNA, 25 bp, SARS Virus
aaattaaatatctaaggttatgcca

SEQ ID NO: 129830 - DNA, 25 bp, SARS Virus
aattaaatatcataggttatgccat

SEQ ID NO: 129831 - DNA, 25 bp, SARS Virus
attaaatatcaatggttatgccatc

SEQ ID NO: 129832 - DNA, 25 bp, SARS Virus
ttaaatatcaaatgttatgccatcg

SEQ ID NO: 129833 - DNA, 25 bp, SARS Virus
taaatatcaaagtttatgccatcgc

SEQ ID NO: 129834 - DNA, 25 bp, SARS Virus
aaatatcaaaggttatgccatcgcc

SEQ ID NO: 129835 - DNA, 25 bp, SARS Virus
aatatcaaaggttatgccatcgcca

SEQ ID NO: 129836 - DNA, 25 bp, SARS Virus
atatcaaaggttttgccatcgccaa

SEQ ID NO: 129837 - DNA, 25 bp, SARS Virus
tatcaaaggttatgccatcgccaac

SEQ ID NO: 129838 - DNA, 25 bp, SARS Virus
atcaaaggttattccatcgccaaca

SEQ ID NO: 129839 - DNA, 25 bp, SARS Virus
tcaaaggttatgtcatcgccaacat

SEQ ID NO: 129840 - DNA, 25 bp, SARS Virus
caaaggttatgctatcgccaacata

SEQ ID NO: 129841 - DNA, 25 bp, SARS Virus
aaaggttatgccatcgccaacatac

SEQ ID NO: 129842 - DNA, 25 bp, SARS Virus
aaggttatgccaacgccaacatacg

SEQ ID NO: 129843 - DNA, 25 bp, SARS Virus
aggttatgccatagccaacatacgt

SEQ ID NO: 129844 - DNA, 25 bp, SARS Virus
ggttatgccatcaccaacatacgtc

SEQ ID NO: 129845 - DNA, 25 bp, SARS Virus
gttatgccatcgacaacatacgtcg

SEQ ID NO: 129846 - DNA, 25 bp, SARS Virus
ttatgccatcgcaaacatacgtcgt

SEQ ID NO: 129847 - DNA, 25 bp, SARS Virus
tatgccatcgccaacatacgtcgtt

SEQ ID NO: 129848 - DNA, 25 bp, SARS Virus
atgccatcgccaacatacgtcgttt

SEQ ID NO: 129849 - DNA, 25 bp, SARS Virus
tgccatcgccaaaatacgtcgtttt

SEQ ID NO: 129850 - DNA, 25 bp, SARS Virus
gccatcgccaacatacgtcgttttg

SEQ ID NO: 129851 - DNA, 25 bp, SARS Virus
ccatcgccaacaaacgtcgttttgg

SEQ ID NO: 129852 - DNA, 25 bp, SARS Virus
catcgccaacatacgtcgttttgga

SEQ ID NO: 129853 - DNA, 25 bp, SARS Virus
atcgccaacataagtcgttttggac

SEQ ID NO: 129854 - DNA, 25 bp, SARS Virus
tcgccaacatacatcgttttggact

SEQ ID NO: 129855 - DNA, 25 bp, SARS Virus
cgccaacatacgacgttttggactt

SEQ ID NO: 129856 - DNA, 25 bp, SARS Virus
gccaacatacgtagttttggactta

SEQ ID NO: 129857 - DNA, 25 bp, SARS Virus
ccaacatacgtcattttggacttag

SEQ ID NO: 129858 - DNA, 25 bp, SARS Virus
caacatacgtcgatttggacttagt

SEQ ID NO: 129859 - DNA, 25 bp, SARS Virus
aacatacgtcgtattggacttagtc

SEQ ID NO: 129860 - DNA, 25 bp, SARS Virus
acatacgtcgttatggacttagtca

SEQ ID NO: 129861 - DNA, 25 bp, SARS Virus
catacgtcgtttaggacttagtcac

SEQ ID NO: 129862 - DNA, 25 bp, SARS Virus
atacgtcgttttagacttagtcacg

SEQ ID NO: 129863 - DNA, 25 bp, SARS Virus
tacgtcgttttgaacttagtcacgg

SEQ ID NO: 129864 - DNA, 25 bp, SARS Virus
acgtcgttttggacttagtcacgga

SEQ ID NO: 129865 - DNA, 25 bp, SARS Virus
cgtcgttttggaattagtcacggat

SEQ ID NO: 129866 - DNA, 25 bp, SARS Virus
gtcgttttggacatagtcacggatg

SEQ ID NO: 129867 - DNA, 25 bp, SARS Virus
tcgttttggactaagtcacggatgt

SEQ ID NO: 129868 - DNA, 25 bp, SARS Virus
cgttttggacttagtcacggatgtg

SEQ ID NO: 129869 - DNA, 25 bp, SARS Virus
gttttggacttaatcacggatgtgc

SEQ ID NO: 129870 - DNA, 25 bp, SARS Virus
ttttggacttagacacggatgtgcg

SEQ ID NO: 129871 - DNA, 25 bp, SARS Virus
tttggacttagtaacggatgtgcga

SEQ ID NO: 129872 - DNA, 25 bp, SARS Virus
ttggacttagtcacggatgtgcgac

SEQ ID NO: 129873 - DNA, 25 bp, SARS Virus
tggacttagtcaaggatgtgcgacg

SEQ ID NO: 129874 - DNA, 25 bp, SARS Virus
ggacttagtcacagatgtgcgacgc

SEQ ID NO: 129875 - DNA, 25 bp, SARS Virus
gacttagtcacgaatgtgcgacgct

SEQ ID NO: 129876 - DNA, 25 bp, SARS Virus
acttagtcacggatgtgcgacgctg

SEQ ID NO: 129877 - DNA, 25 bp, SARS Virus
cttagtcacggaagtgcgacgctgc

SEQ ID NO: 129878 - DNA, 25 bp, SARS Virus
ttagtcacggatatgcgacgctgcg

SEQ ID NO: 129879 - DNA, 25 bp, SARS Virus
tagtcacggatgagcgacgctgcga

SEQ ID NO: 129880 - DNA, 25 bp, SARS Virus
agtcacggatgtacgacgctgcgag

SEQ ID NO: 129881 - DNA, 25 bp, SARS Virus
gtcacggatgtgagacgctgcgagg

SEQ ID NO: 129882 - DNA, 25 bp, SARS Virus
tcacggatgtgcaacgctgcgagga

SEQ ID NO: 129883 - DNA, 25 bp, SARS Virus
cacggatgtgcgacgctgcgaggat

SEQ ID NO: 129884 - DNA, 25 bp, SARS Virus
acggatgtgcgaagctgcgaggatt

SEQ ID NO: 129885 - DNA, 25 bp, SARS Virus
cggatgtgcgacactgcgaggatta

SEQ ID NO: 129886 - DNA, 25 bp, SARS Virus
ggatgtgcgacgatgcgaggattaa

SEQ ID NO: 129887 - DNA, 25 bp, SARS Virus
gatgtgcgacgcagcgaggattaaa

SEQ ID NO: 129888 - DNA, 25 bp, SARS Virus
atgtgcgacgctacgaggattaaac

SEQ ID NO: 129889 - DNA, 25 bp, SARS Virus
tgtgcgacgctgagaggattaaaca

SEQ ID NO: 129890 - DNA, 25 bp, SARS Virus
gtgcgacgctgcaaggattaaacat

SEQ ID NO: 129891 - DNA, 25 bp, SARS Virus
tgcgacgctgcgaggattaaacatt

SEQ ID NO: 129892 - DNA, 25 bp, SARS Virus
gcgacgctgcgaagattaaacatta

SEQ ID NO: 129893 - DNA, 25 bp, SARS Virus
cgacgctgcgagaattaaacattat

SEQ ID NO: 129894 - DNA, 25 bp, SARS Virus
gacgctgcgaggattaaacattatt

SEQ ID NO: 129895 - DNA, 25 bp, SARS Virus
acgctgcgaggaataaacattattc

SEQ ID NO: 129896 - DNA, 25 bp, SARS Virus
cgctgcgaggataaaacattattct

SEQ ID NO: 129897 - DNA, 25 bp, SARS Virus
gctgcgaggattaaacattattctt

SEQ ID NO: 129898 - DNA, 25 bp, SARS Virus
ctgcgaggattaaacattattcttt

SEQ ID NO: 129899 - DNA, 25 bp, SARS Virus
tgcgaggattaaacattattctttc

SEQ ID NO: 129900 - DNA, 25 bp, SARS Virus
gcgaggattaaaaattattctttcg

SEQ ID NO: 129901 - DNA, 25 bp, SARS Virus
cgaggattaaacattattctttcgc

SEQ ID NO: 129902 - DNA, 25 bp, SARS Virus
gaggattaaacaatattctttcgca

SEQ ID NO: 129903 - DNA, 25 bp, SARS Virus
aggattaaacataattctttcgcaa

SEQ ID NO: 129904 - DNA, 25 bp, SARS Virus
ggattaaacattattctttcgcaag

SEQ ID NO: 129905 - DNA, 25 bp, SARS Virus
gattaaacattaatctttcgcaagc

SEQ ID NO: 129906 - DNA, 25 bp, SARS Virus
attaaacattatactttcgcaagca

SEQ ID NO: 129907 - DNA, 25 bp, SARS Virus
ttaaacattattatttcgcaagcac

SEQ ID NO: 129908 - DNA, 25 bp, SARS Virus
taaacattattcattcgcaagcact

SEQ ID NO: 129909 - DNA, 25 bp, SARS Virus
aaacattattctatcgcaagcacta

SEQ ID NO: 129910 - DNA, 25 bp, SARS Virus
aacattattcttacgcaagcactac

SEQ ID NO: 129911 - DNA, 25 bp, SARS Virus
acattattctttagcaagcactaca

SEQ ID NO: 129912 - DNA, 25 bp, SARS Virus
cattattctttcacaagcactacat

SEQ ID NO: 129913 - DNA, 25 bp, SARS Virus
attattctttcgaaagcactacatc

SEQ ID NO: 129914 - DNA, 25 bp, SARS Virus
ttattctttcgcaagcactacatcg

SEQ ID NO: 129915 - DNA, 25 bp, SARS Virus
tattctttcgcaagcactacatcgg

SEQ ID NO: 129916 - DNA, 25 bp, SARS Virus
attctttcgcaaacactacatcggt

SEQ ID NO: 129917 - DNA, 25 bp, SARS Virus
ttctttcgcaagaactacatcggtg

SEQ ID NO: 129918 - DNA, 25 bp, SARS Virus
tctttcgcaagcactacatcggtgt

SEQ ID NO: 129919 - DNA, 25 bp, SARS Virus
ctttcgcaagcaatacatcggtgtc

SEQ ID NO: 129920 - DNA, 25 bp, SARS Virus
tttcgcaagcacaacatcggtgtca

SEQ ID NO: 129921 - DNA, 25 bp, SARS Virus
ttcgcaagcactacatcggtgtcac

SEQ ID NO: 129922 - DNA, 25 bp, SARS Virus
tcgcaagcactaaatcggtgtcact

SEQ ID NO: 129923 - DNA, 25 bp, SARS Virus
cgcaagcactacatcggtgtcacta

SEQ ID NO: 129924 - DNA, 25 bp, SARS Virus
gcaagcactacaacggtgtcactag

SEQ ID NO: 129925 - DNA, 25 bp, SARS Virus
caagcactacataggtgtcactaga

SEQ ID NO: 129926 - DNA, 25 bp, SARS Virus
aagcactacatcagtgtcactagag

SEQ ID NO: 129927 - DNA, 25 bp, SARS Virus
agcactacatcgatgtcactagaga

SEQ ID NO: 129928 - DNA, 25 bp, SARS Virus
gcactacatcggagtcactagagaa

SEQ ID NO: 129929 - DNA, 25 bp, SARS Virus
cactacatcggtatcactagagaaa

SEQ ID NO: 129930 - DNA, 25 bp, SARS Virus
actacatcggtgacactagagaaaa

SEQ ID NO: 129931 - DNA, 25 bp, SARS Virus
ctacatcggtgtaactagagaaaac

SEQ ID NO: 129932 - DNA, 25 bp, SARS Virus
tacatcggtgtcactagagaaaacc

SEQ ID NO: 129933 - DNA, 25 bp, SARS Virus
acatcggtgtcaatagagaaaaccg

SEQ ID NO: 129934 - DNA, 25 bp, SARS Virus
catcggtgtcacaagagaaaaccgt

SEQ ID NO: 129935 - DNA, 25 bp, SARS Virus
atcggtgtcactagagaaaaccgtc

SEQ ID NO: 129936 - DNA, 25 bp, SARS Virus
tcggtgtcactaaagaaaaccgtcc

SEQ ID NO: 129937 - DNA, 25 bp, SARS Virus
cggtgtcactagagaaaaccgtcca

SEQ ID NO: 129938 - DNA, 25 bp, SARS Virus
ggtgtcactagaaaaaaccgtccag

SEQ ID NO: 129939 - DNA, 25 bp, SARS Virus
gtgtcactagagaaaaccgtccagg

SEQ ID NO: 129940 - DNA, 25 bp, SARS Virus
tgtcactagagaaaaccgtccagga

SEQ ID NO: 129941 - DNA, 25 bp, SARS Virus
gtcactagagaaaaccgtccaggaa

SEQ ID NO: 129942 - DNA, 25 bp, SARS Virus
tcactagagaaaaccgtccaggaat

SEQ ID NO: 129943 - DNA, 25 bp, SARS Virus
cactagagaaaaacgtccaggaatt

SEQ ID NO: 129944 - DNA, 25 bp, SARS Virus
actagagaaaacagtccaggaatta

SEQ ID NO: 129945 - DNA, 25 bp, SARS Virus
ctagagaaaaccatccaggaattac

SEQ ID NO: 129946 - DNA, 25 bp, SARS Virus
tagagaaaaccgaccaggaattaca

SEQ ID NO: 129947 - DNA, 25 bp, SARS Virus
agagaaaaccgtacaggaattacag

SEQ ID NO: 129948 - DNA, 25 bp, SARS Virus
gagaaaaccgtcaaggaattacagt

SEQ ID NO: 129949 - DNA, 25 bp, SARS Virus
agaaaaccgtccaggaattacagtg

SEQ ID NO: 129950 - DNA, 25 bp, SARS Virus
gaaaaccgtccaagaattacagtgt

SEQ ID NO: 129951 - DNA, 25 bp, SARS Virus
aaaaccgtccagaaattacagtgtc

SEQ ID NO: 129952 - DNA, 25 bp, SARS Virus
aaaccgtccaggaattacagtgtcg

SEQ ID NO: 129953 - DNA, 25 bp, SARS Virus
aaccgtccaggaattacagtgtcgc

SEQ ID NO: 129954 - DNA, 25 bp, SARS Virus
accgtccaggaaatacagtgtcgcg

SEQ ID NO: 129955 - DNA, 25 bp, SARS Virus
ccgtccaggaataacagtgtcgcgg

SEQ ID NO: 129956 - DNA, 25 bp, SARS Virus
cgtccaggaattacagtgtcgcggg

SEQ ID NO: 129957 - DNA, 25 bp, SARS Virus
gtccaggaattaaagtgtcgcggga

SEQ ID NO: 129958 - DNA, 25 bp, SARS Virus
tccaggaattacagtgtcgcgggat

SEQ ID NO: 129959 - DNA, 25 bp, SARS Virus
ccaggaattacaatgtcgcgggatc

SEQ ID NO: 129960 - DNA, 25 bp, SARS Virus
caggaattacagagtcgcgggatcc

SEQ ID NO: 129961 - DNA, 25 bp, SARS Virus
aggaattacagtatcgcgggatccc

SEQ ID NO: 129962 - DNA, 25 bp, SARS Virus
ggaattacagtgacgcgggatccct

SEQ ID NO: 129963 - DNA, 25 bp, SARS Virus
gaattacagtgtagcgggatccctc

SEQ ID NO: 129964 - DNA, 25 bp, SARS Virus
aattacagtgtcacgggatccctca

SEQ ID NO: 129965 - DNA, 25 bp, SARS Virus
attacagtgtcgagggatccctcac

SEQ ID NO: 129966 - DNA, 25 bp, SARS Virus
ttacagtgtcgcaggatccctcaca

SEQ ID NO: 129967 - DNA, 25 bp, SARS Virus
tacagtgtcgcgagatccctcacag

SEQ ID NO: 129968 - DNA, 25 bp, SARS Virus
acagtgtcgcggaatccctcacagg

SEQ ID NO: 129969 - DNA, 25 bp, SARS Virus
cagtgtcgcgggatccctcacaggc

SEQ ID NO: 129970 - DNA, 25 bp, SARS Virus
agtgtcgcgggaaccctcacaggcc

SEQ ID NO: 129971 - DNA, 25 bp, SARS Virus
gtgtcgcgggatacctcacaggccg

SEQ ID NO: 129972 - DNA, 25 bp, SARS Virus
tgtcgcgggatcactcacaggccgg

SEQ ID NO: 129973 - DNA, 25 bp, SARS Virus
gtcgcgggatccatcacaggccggt

SEQ ID NO: 129974 - DNA, 25 bp, SARS Virus
tcgcgggatcccacacaggccggta

SEQ ID NO: 129975 - DNA, 25 bp, SARS Virus
cgcgggatccctaacaggccggtaa

SEQ ID NO: 129976 - DNA, 25 bp, SARS Virus
gcgggatccctcacaggccggtaag

SEQ ID NO: 129977 - DNA, 25 bp, SARS Virus
cgggatccctcaaaggccggtaagc

SEQ ID NO: 129978 - DNA, 25 bp, SARS Virus
gggatccctcacaggccggtaagcg

SEQ ID NO: 129979 - DNA, 25 bp, SARS Virus
ggatccctcacaagccggtaagcgt

SEQ ID NO: 129980 - DNA, 25 bp, SARS Virus
gatccctcacagaccggtaagcgtt

SEQ ID NO: 129981 - DNA, 25 bp, SARS Virus
atccctcacaggacggtaagcgttc

SEQ ID NO: 129982 - DNA, 25 bp, SARS Virus
tccctcacaggcaggtaagcgttca

SEQ ID NO: 129983 - DNA, 25 bp, SARS Virus
ccctcacaggccagtaagcgttcac

SEQ ID NO: 129984 - DNA, 25 bp, SARS Virus
cctcacaggccgataagcgttcact

SEQ ID NO: 129985 - DNA, 25 bp, SARS Virus
ctcacaggccggaaagcgttcactg

SEQ ID NO: 129986 - DNA, 25 bp, SARS Virus
tcacaggccggtaagcgttcactgg

SEQ ID NO: 129987 - DNA, 25 bp, SARS Virus
cacaggccggtaagcgttcactggt

SEQ ID NO: 129988 - DNA, 25 bp, SARS Virus
acaggccggtaaacgttcactggtg

SEQ ID NO: 129989 - DNA, 25 bp, SARS Virus
caggccggtaagagttcactggtgc

SEQ ID NO: 129990 - DNA, 25 bp, SARS Virus
aggccggtaagcattcactggtgct

SEQ ID NO: 129991 - DNA, 25 bp, SARS Virus
ggccggtaagcgatcactggtgctt

SEQ ID NO: 129992 - DNA, 25 bp, SARS Virus
gccggtaagcgtacactggtgctta

SEQ ID NO: 129993 - DNA, 25 bp, SARS Virus
ccggtaagcgttaactggtgcttac

SEQ ID NO: 129994 - DNA, 25 bp, SARS Virus
cggtaagcgttcactggtgcttact

SEQ ID NO: 129995 - DNA, 25 bp, SARS Virus
ggtaagcgttcaatggtgcttacta

SEQ ID NO: 129996 - DNA, 25 bp, SARS Virus
gtaagcgttcacaggtgcttactag

SEQ ID NO: 129997 - DNA, 25 bp, SARS Virus
taagcgttcactagtgcttactagt

SEQ ID NO: 129998 - DNA, 25 bp, SARS Virus
aagcgttcactgatgcttactagtg

SEQ ID NO: 129999 - DNA, 25 bp, SARS Virus
agcgttcactggagcttactagtgt

SEQ ID NO: 130000 - DNA, 25 bp, SARS Virus
gcgttcactggtacttactagtgtc

SEQ ID NO: 130001 - DNA, 25 bp, SARS Virus
cgttcactggtgattactagtgtcg

SEQ ID NO: 130002 - DNA, 25 bp, SARS Virus
gttcactggtgcatactagtgtcgt

SEQ ID NO: 130003 - DNA, 25 bp, SARS Virus
ttcactggtgctaactagtgtcgtg

SEQ ID NO: 130004 - DNA, 25 bp, SARS Virus
tcactggtgcttactagtgtcgtgg

SEQ ID NO: 130005 - DNA, 25 bp, SARS Virus
cactggtgcttaatagtgtcgtggt

SEQ ID NO: 130006 - DNA, 25 bp, SARS Virus
actggtgcttacaagtgtcgtggtt

SEQ ID NO: 130007 - DNA, 25 bp, SARS Virus
ctggtgcttactagtgtcgtggtta

SEQ ID NO: 130008 - DNA, 25 bp, SARS Virus
tggtgcttactaatgtcgtggttac

SEQ ID NO: 130009 - DNA, 25 bp, SARS Virus
ggtgcttactagagtcgtggttact

SEQ ID NO: 130010 - DNA, 25 bp, SARS Virus
gtgcttactagtatcgtggttactg

SEQ ID NO: 130011 - DNA, 25 bp, SARS Virus
tgcttactagtgacgtggttactgt

SEQ ID NO: 130012 - DNA, 25 bp, SARS Virus
gcttactagtgtagtggttactgtt

SEQ ID NO: 130013 - DNA, 25 bp, SARS Virus
cttactagtgtcatggttactgttc

SEQ ID NO: 130014 - DNA, 25 bp, SARS Virus
ttactagtgtcgaggttactgttca

SEQ ID NO: 130015 - DNA, 25 bp, SARS Virus
tactagtgtcgtagttactgttcaa

SEQ ID NO: 130016 - DNA, 25 bp, SARS Virus
actagtgtcgtgattactgttcaag

SEQ ID NO: 130017 - DNA, 25 bp, SARS Virus
ctagtgtcgtggatactgttcaagt

SEQ ID NO: 130018 - DNA, 25 bp, SARS Virus
tagtgtcgtggtaactgttcaagtg

SEQ ID NO: 130019 - DNA, 25 bp, SARS Virus
agtgtcgtggttactgttcaagtga

SEQ ID NO: 130020 - DNA, 25 bp, SARS Virus
gtgtcgtggttaatgttcaagtgaa

SEQ ID NO: 130021 - DNA, 25 bp, SARS Virus
tgtcgtggttacagttcaagtgaaa

SEQ ID NO: 130022 - DNA, 25 bp, SARS Virus
gtcgtggttactattcaagtgaaag

SEQ ID NO: 130023 - DNA, 25 bp, SARS Virus
tcgtggttactgatcaagtgaaagg

SEQ ID NO: 130024 - DNA, 25 bp, SARS Virus
cgtggttactgtacaagtgaaaggt

SEQ ID NO: 130025 - DNA, 25 bp, SARS Virus
gtggttactgttaaagtgaaaggta

SEQ ID NO: 130026 - DNA, 25 bp, SARS Virus
tggttactgttcaagtgaaaggtac

SEQ ID NO: 130027 - DNA, 25 bp, SARS Virus
ggttactgttcaagtgaaaggtact

SEQ ID NO: 130028 - DNA, 25 bp, SARS Virus
gttactgttcaaatgaaaggtactc

SEQ ID NO: 130029 - DNA, 25 bp, SARS Virus
ttactgttcaagagaaaggtactcg

SEQ ID NO: 130030 - DNA, 25 bp, SARS Virus
tactgttcaagtaaaaggtactcgc

SEQ ID NO: 130031 - DNA, 25 bp, SARS Virus
actgttcaagtgaaaggtactcgcc

SEQ ID NO: 130032 - DNA, 25 bp, SARS Virus
ctgttcaagtgaaaggtactcgcca

SEQ ID NO: 130033 - DNA, 25 bp, SARS Virus
tgttcaagtgaaaggtactcgccag

SEQ ID NO: 130034 - DNA, 25 bp, SARS Virus
gttcaagtgaaaagtactcgccaga

SEQ ID NO: 130035 - DNA, 25 bp, SARS Virus
ttcaagtgaaagatactcgccagac

SEQ ID NO: 130036 - DNA, 25 bp, SARS Virus
tcaagtgaaaggaactcgccagacc

SEQ ID NO: 130037 - DNA, 25 bp, SARS Virus
caagtgaaaggtactcgccagacca

SEQ ID NO: 130038 - DNA, 25 bp, SARS Virus
aagtgaaaggtaatcgccagaccag

SEQ ID NO: 130039 - DNA, 25 bp, SARS Virus
agtgaaaggtacacgccagaccagt

SEQ ID NO: 130040 - DNA, 25 bp, SARS Virus
gtgaaaggtactagccagaccagtg

SEQ ID NO: 130041 - DNA, 25 bp, SARS Virus
tgaaaggtactcaccagaccagtgt

SEQ ID NO: 130042 - DNA, 25 bp, SARS Virus
gaaaggtactcgacagaccagtgtt

SEQ ID NO: 130043 - DNA, 25 bp, SARS Virus
aaaggtactcgcaagaccagtgtta

SEQ ID NO: 130044 - DNA, 25 bp, SARS Virus
aaggtactcgccagaccagtgttaa

SEQ ID NO: 130045 - DNA, 25 bp, SARS Virus
aggtactcgccaaaccagtgttaac

SEQ ID NO: 130046 - DNA, 25 bp, SARS Virus
ggtactcgccagaccagtgttaaca

SEQ ID NO: 130047 - DNA, 25 bp, SARS Virus
gtactcgccagaacagtgttaacag

SEQ ID NO: 130048 - DNA, 25 bp, SARS Virus
tactcgccagacaagtgttaacagg

SEQ ID NO: 130049 - DNA, 25 bp, SARS Virus
actcgccagaccagtgttaacaggg

SEQ ID NO: 130050 - DNA, 25 bp, SARS Virus
ctcgccagaccaatgttaacagggg

SEQ ID NO: 130051 - DNA, 25 bp, SARS Virus
tcgccagaccagagttaacaggggg

SEQ ID NO: 130052 - DNA, 25 bp, SARS Virus
cgccagaccagtattaacagggggc

SEQ ID NO: 130053 - DNA, 25 bp, SARS Virus
gccagaccagtgataacagggggcc

SEQ ID NO: 130054 - DNA, 25 bp, SARS Virus
ccagaccagtgtaaacagggggcct

SEQ ID NO: 130055 - DNA, 25 bp, SARS Virus
cagaccagtgttaacagggggcctc

SEQ ID NO: 130056 - DNA, 25 bp, SARS Virus
agaccagtgttaacagggggcctct

SEQ ID NO: 130057 - DNA, 25 bp, SARS Virus
gaccagtgttaaaagggggcctctc

SEQ ID NO: 130058 - DNA, 25 bp, SARS Virus
accagtgttaacagggggcctctcc

SEQ ID NO: 130059 - DNA, 25 bp, SARS Virus
ccagtgttaacaaggggcctctccg

SEQ ID NO: 130060 - DNA, 25 bp, SARS Virus
cagtgttaacagagggcctctccgt

SEQ ID NO: 130061 - DNA, 25 bp, SARS Virus
agtgttaacaggaggcctctccgtg

SEQ ID NO: 130062 - DNA, 25 bp, SARS Virus
gtgttaacagggagcctctccgtgt

SEQ ID NO: 130063 - DNA, 25 bp, SARS Virus
tgttaacaggggacctctccgtgta

SEQ ID NO: 130064 - DNA, 25 bp, SARS Virus
gttaacagggggactctccgtgtaa

SEQ ID NO: 130065 - DNA, 25 bp, SARS Virus
ttaacagggggcatctccgtgtaac

SEQ ID NO: 130066 - DNA, 25 bp, SARS Virus
taacagggggccactccgtgtaact

SEQ ID NO: 130067 - DNA, 25 bp, SARS Virus
aacagggggcctatccgtgtaactc

SEQ ID NO: 130068 - DNA, 25 bp, SARS Virus
acagggggcctcaccgtgtaactct

SEQ ID NO: 130069 - DNA, 25 bp, SARS Virus
cagggggcctctacgtgtaactctt

SEQ ID NO: 130070 - DNA, 25 bp, SARS Virus
agggggcctctcagtgtaactcttc

SEQ ID NO: 130071 - DNA, 25 bp, SARS Virus
gggggcctctccatgtaactcttct

SEQ ID NO: 130072 - DNA, 25 bp, SARS Virus
ggggcctctccgagtaactcttctt

SEQ ID NO: 130073 - DNA, 25 bp, SARS Virus
gggcctctccgtataactcttctta

SEQ ID NO: 130074 - DNA, 25 bp, SARS Virus
ggcctctccgtgaaactcttcttac

SEQ ID NO: 130075 - DNA, 25 bp, SARS Virus
gcctctccgtgtaactcttcttaca

SEQ ID NO: 130076 - DNA, 25 bp, SARS Virus
cctctccgtgtaactcttcttacaa

SEQ ID NO: 130077 - DNA, 25 bp, SARS Virus
ctctccgtgtaaatcttcttacaaa

SEQ ID NO: 130078 - DNA, 25 bp, SARS Virus
tctccgtgtaacacttcttacaaac

SEQ ID NO: 130079 - DNA, 25 bp, SARS Virus
ctccgtgtaactattcttacaaaca

SEQ ID NO: 130080 - DNA, 25 bp, SARS Virus
tccgtgtaactcatcttacaaacaa

SEQ ID NO: 130081 - DNA, 25 bp, SARS Virus
ccgtgtaactctacttacaaacaaa

SEQ ID NO: 130082 - DNA, 25 bp, SARS Virus
cgtgtaactcttattacaaacaaag

SEQ ID NO: 130083 - DNA, 25 bp, SARS Virus
gtgtaactcttcatacaaacaaaga

SEQ ID NO: 130084 - DNA, 25 bp, SARS Virus
tgtaactcttctaacaaacaaagac

SEQ ID NO: 130085 - DNA, 25 bp, SARS Virus
gtaactcttcttacaaacaaagacc

SEQ ID NO: 130086 - DNA, 25 bp, SARS Virus
taactcttcttaaaaacaaagaccc

SEQ ID NO: 130087 - DNA, 25 bp, SARS Virus
aactcttcttacaaacaaagaccca

SEQ ID NO: 130088 - DNA, 25 bp, SARS Virus
actcttcttacaaacaaagacccaa

SEQ ID NO: 130089 - DNA, 25 bp, SARS Virus
ctcttcttacaaacaaagacccaac

SEQ ID NO: 130090 - DNA, 25 bp, SARS Virus
tcttcttacaaaaaaagacccaact

SEQ ID NO: 130091 - DNA, 25 bp, SARS Virus
cttcttacaaacaaagacccaactt

SEQ ID NO: 130092 - DNA, 25 bp, SARS Virus
ttcttacaaacaaagacccaactta

SEQ ID NO: 130093 - DNA, 25 bp, SARS Virus
tcttacaaacaaagacccaacttac

SEQ ID NO: 130094 - DNA, 25 bp, SARS Virus
cttacaaacaaaaacccaacttact

SEQ ID NO: 130095 - DNA, 25 bp, SARS Virus
ttacaaacaaagacccaacttactg

SEQ ID NO: 130096 - DNA, 25 bp, SARS Virus
tacaaacaaagaaccaacttactgg

SEQ ID NO: 130097 - DNA, 25 bp, SARS Virus
acaaacaaagacacaacttactggt

SEQ ID NO: 130098 - DNA, 25 bp, SARS Virus
caaacaaagaccaaacttactggtg

SEQ ID NO: 130099 - DNA, 25 bp, SARS Virus
aaacaaagacccaacttactggtgt

SEQ ID NO: 130100 - DNA, 25 bp, SARS Virus
aacaaagacccaacttactggtgta

SEQ ID NO: 130101 - DNA, 25 bp, SARS Virus
acaaagacccaaattactggtgtaa

SEQ ID NO: 130102 - DNA, 25 bp, SARS Virus
caaagacccaacatactggtgtaac

SEQ ID NO: 130103 - DNA, 25 bp, SARS Virus
aaagacccaactaactggtgtaact

SEQ ID NO: 130104 - DNA, 25 bp, SARS Virus
aagacccaacttactggtgtaactc

SEQ ID NO: 130105 - DNA, 25 bp, SARS Virus
agacccaacttaatggtgtaactcg

SEQ ID NO: 130106 - DNA, 25 bp, SARS Virus
gacccaacttacaggtgtaactcgc

SEQ ID NO: 130107 - DNA, 25 bp, SARS Virus
acccaacttactagtgtaactcgcc

SEQ ID NO: 130108 - DNA, 25 bp, SARS Virus
cccaacttactgatgtaactcgccc

SEQ ID NO: 130109 - DNA, 25 bp, SARS Virus
ccaacttactggagtaactcgccca

SEQ ID NO: 130110 - DNA, 25 bp, SARS Virus
caacttactggtataactcgcccat

SEQ ID NO: 130111 - DNA, 25 bp, SARS Virus
aacttactggtgaaactcgcccatg

SEQ ID NO: 130112 - DNA, 25 bp, SARS Virus
acttactggtgtaactcgcccatgc

SEQ ID NO: 130113 - DNA, 25 bp, SARS Virus
cttactggtgtaactcgcccatgct

SEQ ID NO: 130114 - DNA, 25 bp, SARS Virus
ttactggtgtaaatcgcccatgctc

SEQ ID NO: 130115 - DNA, 25 bp, SARS Virus
tactggtgtaacacgcccatgctcg

SEQ ID NO: 130116 - DNA, 25 bp, SARS Virus
actggtgtaactagcccatgctcgt

SEQ ID NO: 130117 - DNA, 25 bp, SARS Virus
ctggtgtaactcacccatgctcgtt

SEQ ID NO: 130118 - DNA, 25 bp, SARS Virus
tggtgtaactcgaccatgctcgttt

SEQ ID NO: 130119 - DNA, 25 bp, SARS Virus
ggtgtaactcgcacatgctcgtttg

SEQ ID NO: 130120 - DNA, 25 bp, SARS Virus
gtgtaactcgccaatgctcgtttgt

SEQ ID NO: 130121 - DNA, 25 bp, SARS Virus
tgtaactcgcccatgctcgtttgtc

SEQ ID NO: 130122 - DNA, 25 bp, SARS Virus
gtaactcgcccaagctcgtttgtcg

SEQ ID NO: 130123 - DNA, 25 bp, SARS Virus
taactcgcccatactcgtttgtcgg

SEQ ID NO: 130124 - DNA, 25 bp, SARS Virus
aactcgcccatgatcgtttgtcgga

SEQ ID NO: 130125 - DNA, 25 bp, SARS Virus
actcgcccatgcacgtttgtcggac

SEQ ID NO: 130126 - DNA, 25 bp, SARS Virus
ctcgcccatgctagtttgtcggact

SEQ ID NO: 130127 - DNA, 25 bp, SARS Virus
tcgcccatgctcatttgtcggactt

SEQ ID NO: 130128 - DNA, 25 bp, SARS Virus
cgcccatgctcgattgtcggacttc

SEQ ID NO: 130129 - DNA, 25 bp, SARS Virus
gcccatgctcgtatgtcggacttcc

SEQ ID NO: 130130 - DNA, 25 bp, SARS Virus
cccatgctcgttagtcggacttcct

SEQ ID NO: 130131 - DNA, 25 bp, SARS Virus
ccatgctcgtttatcggacttcctt

SEQ ID NO: 130132 - DNA, 25 bp, SARS Virus
catgctcgtttgacggacttccttc

SEQ ID NO: 130133 - DNA, 25 bp, SARS Virus
atgctcgtttgtaggacttccttcg

SEQ ID NO: 130134 - DNA, 25 bp, SARS Virus
tgctcgtttgtcagacttccttcgt

SEQ ID NO: 130135 - DNA, 25 bp, SARS Virus
gctcgtttgtcgaacttccttcgtt

SEQ ID NO: 130136 - DNA, 25 bp, SARS Virus
ctcgtttgtcggacttccttcgttg

SEQ ID NO: 130137 - DNA, 25 bp, SARS Virus
tcgtttgtcggaattccttcgttgc

SEQ ID NO: 130138 - DNA, 25 bp, SARS Virus
cgtttgtcggacatccttcgttgct

SEQ ID NO: 130139 - DNA, 25 bp, SARS Virus
gtttgtcggactaccttcgttgctt

SEQ ID NO: 130140 - DNA, 25 bp, SARS Virus
tttgtcggacttacttcgttgcttc

SEQ ID NO: 130141 - DNA, 25 bp, SARS Virus
ttgtcggacttcattcgttgcttca

SEQ ID NO: 130142 - DNA, 25 bp, SARS Virus
tgtcggacttccatcgttgcttcat

SEQ ID NO: 130143 - DNA, 25 bp, SARS Virus
gtcggacttcctacgttgcttcatc

SEQ ID NO: 130144 - DNA, 25 bp, SARS Virus
tcggacttccttagttgcttcatcg

SEQ ID NO: 130145 - DNA, 25 bp, SARS Virus
cggacttccttcattgcttcatcga

SEQ ID NO: 130146 - DNA, 25 bp, SARS Virus
ggacttccttcgatgcttcatcgat

SEQ ID NO: 130147 - DNA, 25 bp, SARS Virus
gacttccttcgtagcttcatcgatt

SEQ ID NO: 130148 - DNA, 25 bp, SARS Virus
acttccttcgttacttcatcgattc

SEQ ID NO: 130149 - DNA, 25 bp, SARS Virus
cttccttcgttgattcatcgattcg

SEQ ID NO: 130150 - DNA, 25 bp, SARS Virus
ttccttcgttgcatcatcgattcgg

SEQ ID NO: 130151 - DNA, 25 bp, SARS Virus
tccttcgttgctacatcgattcggt

SEQ ID NO: 130152 - DNA, 25 bp, SARS Virus
ccttcgttgcttaatcgattcggtg

SEQ ID NO: 130153 - DNA, 25 bp, SARS Virus
cttcgttgcttcatcgattcggtgt

SEQ ID NO: 130154 - DNA, 25 bp, SARS Virus
ttcgttgcttcaacgattcggtgta

SEQ ID NO: 130155 - DNA, 25 bp, SARS Virus
tcgttgcttcatagattcggtgtag

SEQ ID NO: 130156 - DNA, 25 bp, SARS Virus
cgttgcttcatcaattcggtgtagt

SEQ ID NO: 130157 - DNA, 25 bp, SARS Virus
gttgcttcatcgattcggtgtagtt

SEQ ID NO: 130158 - DNA, 25 bp, SARS Virus
ttgcttcatcgaatcggtgtagttc

SEQ ID NO: 130159 - DNA, 25 bp, SARS Virus
tgcttcatcgatacggtgtagttcg

SEQ ID NO: 130160 - DNA, 25 bp, SARS Virus
gcttcatcgattaggtgtagttcgg

SEQ ID NO: 130161 - DNA, 25 bp, SARS Virus
cttcatcgattcagtgtagttcgga

SEQ ID NO: 130162 - DNA, 25 bp, SARS Virus
ttcatcgattcgatgtagttcggat

SEQ ID NO: 130163 - DNA, 25 bp, SARS Virus
tcatcgattcggagtagttcggatg

SEQ ID NO: 130164 - DNA, 25 bp, SARS Virus
catcgattcggtatagttcggatgt

SEQ ID NO: 130165 - DNA, 25 bp, SARS Virus
atcgattcggtgaagttcggatgtt

SEQ ID NO: 130166 - DNA, 25 bp, SARS Virus
tcgattcggtgtagttcggatgtta

SEQ ID NO: 130167 - DNA, 25 bp, SARS Virus
cgattcggtgtaattcggatgttat

SEQ ID NO: 130168 - DNA, 25 bp, SARS Virus
gattcggtgtagatcggatgttatg

SEQ ID NO: 130169 - DNA, 25 bp, SARS Virus
attcggtgtagtacggatgttatgt

SEQ ID NO: 130170 - DNA, 25 bp, SARS Virus
ttcggtgtagttaggatgttatgtt

SEQ ID NO: 130171 - DNA, 25 bp, SARS Virus
tcggtgtagttcagatgttatgttc

SEQ ID NO: 130172 - DNA, 25 bp, SARS Virus
cggtgtagttcgaatgttatgttcg

SEQ ID NO: 130173 - DNA, 25 bp, SARS Virus
ggtgtagttcggatgttatgttcgg

SEQ ID NO: 130174 - DNA, 25 bp, SARS Virus
gtgtagttcggaagttatgttcggt

SEQ ID NO: 130175 - DNA, 25 bp, SARS Virus
tgtagttcggatattatgttcggta

SEQ ID NO: 130176 - DNA, 25 bp, SARS Virus
gtagttcggatgatatgttcggtaa

SEQ ID NO: 130177 - DNA, 25 bp, SARS Virus
tagttcggatgtaatgttcggtaac

SEQ ID NO: 130178 - DNA, 25 bp, SARS Virus
agttcggatgttatgttcggtaacg

SEQ ID NO: 130179 - DNA, 25 bp, SARS Virus
gttcggatgttaagttcggtaacgt

SEQ ID NO: 130180 - DNA, 25 bp, SARS Virus
ttcggatgttatattcggtaacgtt

SEQ ID NO: 130181 - DNA, 25 bp, SARS Virus
tcggatgttatgatcggtaacgtta

SEQ ID NO: 130182 - DNA, 25 bp, SARS Virus
cggatgttatgtacggtaacgttag

SEQ ID NO: 130183 - DNA, 25 bp, SARS Virus
ggatgttatgttaggtaacgttagc

SEQ ID NO: 130184 - DNA, 25 bp, SARS Virus
gatgttatgttcagtaacgttagcg

SEQ ID NO: 130185 - DNA, 25 bp, SARS Virus
atgttatgttcgataacgttagcgt

SEQ ID NO: 130186 - DNA, 25 bp, SARS Virus
tgttatgttcggaaacgttagcgtt

SEQ ID NO: 130187 - DNA, 25 bp, SARS Virus
gttatgttcggtaacgttagcgtta

SEQ ID NO: 130188 - DNA, 25 bp, SARS Virus
ttatgttcggtaacgttagcgttag

SEQ ID NO: 130189 - DNA, 25 bp, SARS Virus
tatgttcggtaaagttagcgttagg

SEQ ID NO: 130190 - DNA, 25 bp, SARS Virus
atgttcggtaacattagcgttaggg

SEQ ID NO: 130191 - DNA, 25 bp, SARS Virus
tgttcggtaacgatagcgttagggc

SEQ ID NO: 130192 - DNA, 25 bp, SARS Virus
gttcggtaacgtaagcgttagggcg

SEQ ID NO: 130193 - DNA, 25 bp, SARS Virus
ttcggtaacgttagcgttagggcgg

SEQ ID NO: 130194 - DNA, 25 bp, SARS Virus
tcggtaacgttaacgttagggcggt

SEQ ID NO: 130195 - DNA, 25 bp, SARS Virus
cggtaacgttagagttagggcggtc

SEQ ID NO: 130196 - DNA, 25 bp, SARS Virus
ggtaacgttagcattagggcggtca

SEQ ID NO: 130197 - DNA, 25 bp, SARS Virus
gtaacgttagcgatagggcggtcag

SEQ ID NO: 130198 - DNA, 25 bp, SARS Virus
taacgttagcgtaagggcggtcagt

SEQ ID NO: 130199 - DNA, 25 bp, SARS Virus
aacgttagcgttagggcggtcagtg

SEQ ID NO: 130200 - DNA, 25 bp, SARS Virus
acgttagcgttaaggcggtcagtgg

SEQ ID NO: 130201 - DNA, 25 bp, SARS Virus
cgttagcgttagagcggtcagtggg

SEQ ID NO: 130202 - DNA, 25 bp, SARS Virus
gttagcgttaggacggtcagtgggt

SEQ ID NO: 130203 - DNA, 25 bp, SARS Virus
ttagcgttagggaggtcagtgggtt

SEQ ID NO: 130204 - DNA, 25 bp, SARS Virus
tagcgttagggcagtcagtgggtta

SEQ ID NO: 130205 - DNA, 25 bp, SARS Virus
agcgttagggcgatcagtgggttaa

SEQ ID NO: 130206 - DNA, 25 bp, SARS Virus
gcgttagggcggacagtgggttaat

SEQ ID NO: 130207 - DNA, 25 bp, SARS Virus
cgttagggcggtaagtgggttaatt

SEQ ID NO: 130208 - DNA, 25 bp, SARS Virus
gttagggcggtcagtgggttaatta

SEQ ID NO: 130209 - DNA, 25 bp, SARS Virus
ttagggcggtcaatgggttaattaa

SEQ ID NO: 130210 - DNA, 25 bp, SARS Virus
tagggcggtcagagggttaattaag

SEQ ID NO: 130211 - DNA, 25 bp, SARS Virus
agggcggtcagtaggttaattaaga

SEQ ID NO: 130212 - DNA, 25 bp, SARS Virus
gggcggtcagtgagttaattaagac

SEQ ID NO: 130213 - DNA, 25 bp, SARS Virus
ggcggtcagtggattaattaagaca

SEQ ID NO: 130214 - DNA, 25 bp, SARS Virus
gcggtcagtgggataattaagacat

SEQ ID NO: 130215 - DNA, 25 bp, SARS Virus
cggtcagtgggtaaattaagacatc

SEQ ID NO: 130216 - DNA, 25 bp, SARS Virus
ggtcagtgggttaattaagacatct

SEQ ID NO: 130217 - DNA, 25 bp, SARS Virus
gtcagtgggttaattaagacatctg

SEQ ID NO: 130218 - DNA, 25 bp, SARS Virus
tcagtgggttaaataagacatctgt

SEQ ID NO: 130219 - DNA, 25 bp, SARS Virus
cagtgggttaataaagacatctgtc

SEQ ID NO: 130220 - DNA, 25 bp, SARS Virus
agtgggttaattaagacatctgtcg

SEQ ID NO: 130221 - DNA, 25 bp, SARS Virus
gtgggttaattaagacatctgtcgt

SEQ ID NO: 130222 - DNA, 25 bp, SARS Virus
tgggttaattaaaacatctgtcgtc

SEQ ID NO: 130223 - DNA, 25 bp, SARS Virus
gggttaattaagacatctgtcgtcg

SEQ ID NO: 130224 - DNA, 25 bp, SARS Virus
ggttaattaagaaatctgtcgtcgt

SEQ ID NO: 130225 - DNA, 25 bp, SARS Virus
gttaattaagacatctgtcgtcgtt

SEQ ID NO: 130226 - DNA, 25 bp, SARS Virus
ttaattaagacaactgtcgtcgttc

SEQ ID NO: 130227 - DNA, 25 bp, SARS Virus
taattaagacatatgtcgtcgttcg

SEQ ID NO: 130228 - DNA, 25 bp, SARS Virus
aattaagacatcagtcgtcgttcgt

SEQ ID NO: 130229 - DNA, 25 bp, SARS Virus
attaagacatctatcgtcgttcgtg

SEQ ID NO: 130230 - DNA, 25 bp, SARS Virus
ttaagacatctgacgtcgttcgtgt

SEQ ID NO: 130231 - DNA, 25 bp, SARS Virus
taagacatctgtagtcgttcgtgtt

SEQ ID NO: 130232 - DNA, 25 bp, SARS Virus
aagacatctgtcatcgttcgtgttt

SEQ ID NO: 130233 - DNA, 25 bp, SARS Virus
agacatctgtcgacgttcgtgtttt

SEQ ID NO: 130234 - DNA, 25 bp, SARS Virus
gacatctgtcgtagttcgtgttttg

SEQ ID NO: 130235 - DNA, 25 bp, SARS Virus
acatctgtcgtcattcgtgttttgt

SEQ ID NO: 130236 - DNA, 25 bp, SARS Virus
catctgtcgtcgatcgtgttttgtt

SEQ ID NO: 130237 - DNA, 25 bp, SARS Virus
atctgtcgtcgtacgtgttttgttc

SEQ ID NO: 130238 - DNA, 25 bp, SARS Virus
tctgtcgtcgttagtgttttgttcg

SEQ ID NO: 130239 - DNA, 25 bp, SARS Virus
ctgtcgtcgttcatgttttgttcgt

SEQ ID NO: 130240 - DNA, 25 bp, SARS Virus
tgtcgtcgttcgagttttgttcgtt

SEQ ID NO: 130241 - DNA, 25 bp, SARS Virus
gtcgtcgttcgtattttgttcgttc

SEQ ID NO: 130242 - DNA, 25 bp, SARS Virus
tcgtcgttcgtgatttgttcgttca

SEQ ID NO: 130243 - DNA, 25 bp, SARS Virus
cgtcgttcgtgtattgttcgttcac

SEQ ID NO: 130244 - DNA, 25 bp, SARS Virus
gtcgttcgtgttatgttcgttcaca

SEQ ID NO: 130245 - DNA, 25 bp, SARS Virus
tcgttcgtgtttagttcgttcacaa

SEQ ID NO: 130246 - DNA, 25 bp, SARS Virus
cgttcgtgttttattcgttcacaat

SEQ ID NO: 130247 - DNA, 25 bp, SARS Virus
gttcgtgttttgatcgttcacaatg

SEQ ID NO: 130248 - DNA, 25 bp, SARS Virus
ttcgtgttttgtacgttcacaatga

SEQ ID NO: 130249 - DNA, 25 bp, SARS Virus
tcgtgttttgttagttcacaatgac

SEQ ID NO: 130250 - DNA, 25 bp, SARS Virus
cgtgttttgttcattcacaatgacc

SEQ ID NO: 130251 - DNA, 25 bp, SARS Virus
gtgttttgttcgatcacaatgaccg

SEQ ID NO: 130252 - DNA, 25 bp, SARS Virus
tgttttgttcgtacacaatgaccgg

SEQ ID NO: 130253 - DNA, 25 bp, SARS Virus
gttttgttcgttaacaatgaccggt

SEQ ID NO: 130254 - DNA, 25 bp, SARS Virus
ttttgttcgttcacaatgaccggtg

SEQ ID NO: 130255 - DNA, 25 bp, SARS Virus
tttgttcgttcaaaatgaccggtgt

SEQ ID NO: 130256 - DNA, 25 bp, SARS Virus
ttgttcgttcacaatgaccggtgtt

SEQ ID NO: 130257 - DNA, 25 bp, SARS Virus
tgttcgttcacaatgaccggtgttc

SEQ ID NO: 130258 - DNA, 25 bp, SARS Virus
gttcgttcacaaagaccggtgttct

SEQ ID NO: 130259 - DNA, 25 bp, SARS Virus
ttcgttcacaataaccggtgttctc

SEQ ID NO: 130260 - DNA, 25 bp, SARS Virus
tcgttcacaatgaccggtgttctcg

SEQ ID NO: 130261 - DNA, 25 bp, SARS Virus
cgttcacaatgaacggtgttctcgg

SEQ ID NO: 130262 - DNA, 25 bp, SARS Virus
gttcacaatgacaggtgttctcggt

SEQ ID NO: 130263 - DNA, 25 bp, SARS Virus
ttcacaatgaccagtgttctcggtc

SEQ ID NO: 130264 - DNA, 25 bp, SARS Virus
tcacaatgaccgatgttctcggtct

SEQ ID NO: 130265 - DNA, 25 bp, SARS Virus
cacaatgaccggagttctcggtctc

SEQ ID NO: 130266 - DNA, 25 bp, SARS Virus
acaatgaccggtattctcggtctcc

SEQ ID NO: 130267 - DNA, 25 bp, SARS Virus
caatgaccggtgatctcggtctcct

SEQ ID NO: 130268 - DNA, 25 bp, SARS Virus
aatgaccggtgtactcggtctcctt

SEQ ID NO: 130269 - DNA, 25 bp, SARS Virus
atgaccggtgttatcggtctccttt

SEQ ID NO: 130270 - DNA, 25 bp, SARS Virus
tgaccggtgttcacggtctcctttt

SEQ ID NO: 130271 - DNA, 25 bp, SARS Virus
gaccggtgttctaggtctccttttg

SEQ ID NO: 130272 - DNA, 25 bp, SARS Virus
accggtgttctcagtctccttttgt

SEQ ID NO: 130273 - DNA, 25 bp, SARS Virus
ccggtgttctcgatctccttttgtt

SEQ ID NO: 130274 - DNA, 25 bp, SARS Virus
cggtgttctcggactccttttgttc

SEQ ID NO: 130275 - DNA, 25 bp, SARS Virus
ggtgttctcggtatccttttgttcg

SEQ ID NO: 130276 - DNA, 25 bp, SARS Virus
gtgttctcggtcaccttttgttcga

SEQ ID NO: 130277 - DNA, 25 bp, SARS Virus
tgttctcggtctacttttgttcgaa

SEQ ID NO: 130278 - DNA, 25 bp, SARS Virus
gttctcggtctcattttgttcgaaa

SEQ ID NO: 130279 - DNA, 25 bp, SARS Virus
ttctcggtctccatttgttcgaaat

SEQ ID NO: 130280 - DNA, 25 bp, SARS Virus
tctcggtctcctattgttcgaaata

SEQ ID NO: 130281 - DNA, 25 bp, SARS Virus
ctcggtctccttatgttcgaaataa

SEQ ID NO: 130282 - DNA, 25 bp, SARS Virus
tcggtctcctttagttcgaaataat

SEQ ID NO: 130283 - DNA, 25 bp, SARS Virus
cggtctccttttattcgaaataata

SEQ ID NO: 130284 - DNA, 25 bp, SARS Virus
ggtctccttttgatcgaaataatac

SEQ ID NO: 130285 - DNA, 25 bp, SARS Virus
gtctccttttgtacgaaataataca

SEQ ID NO: 130286 - DNA, 25 bp, SARS Virus
tctccttttgttagaaataatacat

SEQ ID NO: 130287 - DNA, 25 bp, SARS Virus
ctccttttgttcaaaataatacatg

SEQ ID NO: 130288 - DNA, 25 bp, SARS Virus
tccttttgttcgaaataatacatgt

SEQ ID NO: 130289 - DNA, 25 bp, SARS Virus
ccttttgttcgaaataatacatgtt

SEQ ID NO: 130290 - DNA, 25 bp, SARS Virus
cttttgttcgaaataatacatgttt

SEQ ID NO: 130291 - DNA, 25 bp, SARS Virus
ttttgttcgaaaaaatacatgtttt

SEQ ID NO: 130292 - DNA, 25 bp, SARS Virus
tttgttcgaaataatacatgttttt

SEQ ID NO: 130293 - DNA, 25 bp, SARS Virus
ttgttcgaaataatacatgtttttg

SEQ ID NO: 130294 - DNA, 25 bp, SARS Virus
tgttcgaaataaaacatgtttttgg

SEQ ID NO: 130295 - DNA, 25 bp, SARS Virus
gttcgaaataatacatgtttttgga

SEQ ID NO: 130296 - DNA, 25 bp, SARS Virus
ttcgaaataataaatgtttttggac

SEQ ID NO: 130297 - DNA, 25 bp, SARS Virus
tcgaaataatacatgtttttggaca

SEQ ID NO: 130298 - DNA, 25 bp, SARS Virus
cgaaataatacaagtttttggacaa

SEQ ID NO: 130299 - DNA, 25 bp, SARS Virus
gaaataatacatatttttggacaag

SEQ ID NO: 130300 - DNA, 25 bp, SARS Virus
aaataatacatgattttggacaagg

SEQ ID NO: 130301 - DNA, 25 bp, SARS Virus
aataatacatgtatttggacaaggc

SEQ ID NO: 130302 - DNA, 25 bp, SARS Virus
ataatacatgttattggacaaggct

SEQ ID NO: 130303 - DNA, 25 bp, SARS Virus
taatacatgtttatggacaaggcta

SEQ ID NO: 130304 - DNA, 25 bp, SARS Virus
aatacatgttttaggacaaggctaa

SEQ ID NO: 130305 - DNA, 25 bp, SARS Virus
atacatgtttttagacaaggctaat

SEQ ID NO: 130306 - DNA, 25 bp, SARS Virus
tacatgtttttgaacaaggctaatc

SEQ ID NO: 130307 - DNA, 25 bp, SARS Virus
acatgtttttggacaaggctaatct

SEQ ID NO: 130308 - DNA, 25 bp, SARS Virus
catgtttttggaaaaggctaatctt

SEQ ID NO: 130309 - DNA, 25 bp, SARS Virus
atgtttttggacaaggctaatctta

SEQ ID NO: 130310 - DNA, 25 bp, SARS Virus
tgtttttggacaaggctaatcttat

SEQ ID NO: 130311 - DNA, 25 bp, SARS Virus
gtttttggacaaagctaatcttatc

SEQ ID NO: 130312 - DNA, 25 bp, SARS Virus
tttttggacaagactaatcttatcc

SEQ ID NO: 130313 - DNA, 25 bp, SARS Virus
ttttggacaaggataatcttatccg

SEQ ID NO: 130314 - DNA, 25 bp, SARS Virus
tttggacaaggcaaatcttatccgt

SEQ ID NO: 130315 - DNA, 25 bp, SARS Virus
ttggacaaggctaatcttatccgtt

SEQ ID NO: 130316 - DNA, 25 bp, SARS Virus
tggacaaggctaatcttatccgttt

SEQ ID NO: 130317 - DNA, 25 bp, SARS Virus
ggacaaggctaaacttatccgttta

SEQ ID NO: 130318 - DNA, 25 bp, SARS Virus
gacaaggctaatattatccgtttaa

SEQ ID NO: 130319 - DNA, 25 bp, SARS Virus
acaaggctaatcatatccgtttaac

SEQ ID NO: 130320 - DNA, 25 bp, SARS Virus
caaggctaatctaatccgtttaaca

SEQ ID NO: 130321 - DNA, 25 bp, SARS Virus
aaggctaatcttatccgtttaacat

SEQ ID NO: 130322 - DNA, 25 bp, SARS Virus
aggctaatcttaaccgtttaacatc

SEQ ID NO: 130323 - DNA, 25 bp, SARS Virus
ggctaatcttatacgtttaacatca

SEQ ID NO: 130324 - DNA, 25 bp, SARS Virus
gctaatcttatcagtttaacatcat

SEQ ID NO: 130325 - DNA, 25 bp, SARS Virus
ctaatcttatccatttaacatcatt

SEQ ID NO: 130326 - DNA, 25 bp, SARS Virus
taatcttatccgattaacatcattg

SEQ ID NO: 130327 - DNA, 25 bp, SARS Virus
aatcttatccgtataacatcattgt

SEQ ID NO: 130328 - DNA, 25 bp, SARS Virus
atcttatccgttaaacatcattgta

SEQ ID NO: 130329 - DNA, 25 bp, SARS Virus
aaaggttatgccctcgccaacatac

SEQ ID NO: 130330 - DNA, 25 bp, SARS Virus
aaggttatgccaccgccaacatacg

SEQ ID NO: 130331 - DNA, 25 bp, SARS Virus
aggttatgccatcgccaacatacgt

SEQ ID NO: 130332 - DNA, 25 bp, SARS Virus
ggttatgccatccccaacatacgtc

SEQ ID NO: 130333 - DNA, 25 bp, SARS Virus
gttatgccatcgccaacatacgtcg

SEQ ID NO: 130334 - DNA, 25 bp, SARS Virus
ttatgccatcgccaacatacgtcgt

SEQ ID NO: 130335 - DNA, 25 bp, SARS Virus
tatgccatcgcccacatacgtcgtt

SEQ ID NO: 130336 - DNA, 25 bp, SARS Virus
atgccatcgccaccatacgtcgttt

SEQ ID NO: 130337 - DNA, 25 bp, SARS Virus
tgccatcgccaacatacgtcgtttt

SEQ ID NO: 130338 - DNA, 25 bp, SARS Virus
gccatcgccaacctacgtcgttttg

SEQ ID NO: 130339 - DNA, 25 bp, SARS Virus
ccatcgccaacacacgtcgttttgg

SEQ ID NO: 130340 - DNA, 25 bp, SARS Virus
catcgccaacatccgtcgttttgga

SEQ ID NO: 130341 - DNA, 25 bp, SARS Virus
atcgccaacatacgtcgttttggac

SEQ ID NO: 130342 - DNA, 25 bp, SARS Virus
tcgccaacatacctcgttttggact

SEQ ID NO: 130343 - DNA, 25 bp, SARS Virus
cgccaacatacgccgttttggactt

SEQ ID NO: 130344 - DNA, 25 bp, SARS Virus
gccaacatacgtcgttttggactta

SEQ ID NO: 130345 - DNA, 25 bp, SARS Virus
ccaacatacgtccttttggacttag

SEQ ID NO: 130346 - DNA, 25 bp, SARS Virus
caacatacgtcgctttggacttagt

SEQ ID NO: 130347 - DNA, 25 bp, SARS Virus
aacatacgtcgtcttggacttagtc

SEQ ID NO: 130348 - DNA, 25 bp, SARS Virus
acatacgtcgttctggacttagtca

SEQ ID NO: 130349 - DNA, 25 bp, SARS Virus
catacgtcgtttcggacttagtcac

SEQ ID NO: 130350 - DNA, 25 bp, SARS Virus
atacgtcgttttcgacttagtcacg

SEQ ID NO: 130351 - DNA, 25 bp, SARS Virus
tacgtcgttttgcacttagtcacgg

SEQ ID NO: 130352 - DNA, 25 bp, SARS Virus
acgtcgttttggccttagtcacgga

SEQ ID NO: 130353 - DNA, 25 bp, SARS Virus
cgtcgttttggacttagtcacggat

SEQ ID NO: 130354 - DNA, 25 bp, SARS Virus
gtcgttttggacctagtcacggatg

SEQ ID NO: 130355 - DNA, 25 bp, SARS Virus
tcgttttggactcagtcacggatgt

SEQ ID NO: 130356 - DNA, 25 bp, SARS Virus
cgttttggacttcgtcacggatgtg

SEQ ID NO: 130357 - DNA, 25 bp, SARS Virus
gttttggacttactcacggatgtgc

SEQ ID NO: 130358 - DNA, 25 bp, SARS Virus
ttttggacttagccacggatgtgcg

SEQ ID NO: 130359 - DNA, 25 bp, SARS Virus
tttggacttagtcacggatgtgcga

SEQ ID NO: 130360 - DNA, 25 bp, SARS Virus
ttggacttagtcccggatgtgcgac

SEQ ID NO: 130361 - DNA, 25 bp, SARS Virus
tggacttagtcacggatgtgcgacg

SEQ ID NO: 130362 - DNA, 25 bp, SARS Virus
ggacttagtcaccgatgtgcgacgc

SEQ ID NO: 130363 - DNA, 25 bp, SARS Virus
gacttagtcacgcatgtgcgacgct

SEQ ID NO: 130364 - DNA, 25 bp, SARS Virus
acttagtcacggctgtgcgacgctg

SEQ ID NO: 130365 - DNA, 25 bp, SARS Virus
cttagtcacggacgtgcgacgctgc

SEQ ID NO: 130366 - DNA, 25 bp, SARS Virus
ttagtcacggatctgcgacgctgcg

SEQ ID NO: 130367 - DNA, 25 bp, SARS Virus
tagtcacggatgcgcgacgctgcga

SEQ ID NO: 130368 - DNA, 25 bp, SARS Virus
agtcacggatgtccgacgctgcgag

SEQ ID NO: 130369 - DNA, 25 bp, SARS Virus
gtcacggatgtgcgacgctgcgagg

SEQ ID NO: 130370 - DNA, 25 bp, SARS Virus
tcacggatgtgccacgctgcgagga

SEQ ID NO: 130371 - DNA, 25 bp, SARS Virus
cacggatgtgcgccgctgcgaggat

SEQ ID NO: 130372 - DNA, 25 bp, SARS Virus
acggatgtgcgacgctgcgaggatt

SEQ ID NO: 130373 - DNA, 25 bp, SARS Virus
cggatgtgcgaccctgcgaggatta

SEQ ID NO: 130374 - DNA, 25 bp, SARS Virus
ggatgtgcgacgctgcgaggattaa

SEQ ID NO: 130375 - DNA, 25 bp, SARS Virus
gatgtgcgacgccgcgaggattaaa

SEQ ID NO: 130376 - DNA, 25 bp, SARS Virus
atgtgcgacgctccgaggattaaac

SEQ ID NO: 130377 - DNA, 25 bp, SARS Virus
tgtgcgacgctgcgaggattaaaca

SEQ ID NO: 130378 - DNA, 25 bp, SARS Virus
gtgcgacgctgccaggattaaacat

SEQ ID NO: 130379 - DNA, 25 bp, SARS Virus
tgcgacgctgcgcggattaaacatt

SEQ ID NO: 130380 - DNA, 25 bp, SARS Virus
gcgacgctgcgacgattaaacatta

SEQ ID NO: 130381 - DNA, 25 bp, SARS Virus
cgacgctgcgagcattaaacattat

SEQ ID NO: 130382 - DNA, 25 bp, SARS Virus
gacgctgcgaggcttaaacattatt

SEQ ID NO: 130383 - DNA, 25 bp, SARS Virus
acgctgcgaggactaaacattattc

SEQ ID NO: 130384 - DNA, 25 bp, SARS Virus
cgctgcgaggatcaaacattattct

SEQ ID NO: 130385 - DNA, 25 bp, SARS Virus
gctgcgaggattcaacattattctt

SEQ ID NO: 130386 - DNA, 25 bp, SARS Virus
ctgcgaggattacacattattcttt

SEQ ID NO: 130387 - DNA, 25 bp, SARS Virus
tgcgaggattaaccattattctttc

SEQ ID NO: 130388 - DNA, 25 bp, SARS Virus
gcgaggattaaacattattctttcg

SEQ ID NO: 130389 - DNA, 25 bp, SARS Virus
cgaggattaaaccttattctttcgc

SEQ ID NO: 130390 - DNA, 25 bp, SARS Virus
gaggattaaacactattctttcgca

SEQ ID NO: 130391 - DNA, 25 bp, SARS Virus
aggattaaacatcattctttcgcaa

SEQ ID NO: 130392 - DNA, 25 bp, SARS Virus
ggattaaacattcttctttcgcaag

SEQ ID NO: 130393 - DNA, 25 bp, SARS Virus
gattaaacattactctttcgcaagc

SEQ ID NO: 130394 - DNA, 25 bp, SARS Virus
attaaacattatcctttcgcaagca

SEQ ID NO: 130395 - DNA, 25 bp, SARS Virus
ttaaacattattctttcgcaagcac

SEQ ID NO: 130396 - DNA, 25 bp, SARS Virus
taaacattattccttcgcaagcact

SEQ ID NO: 130397 - DNA, 25 bp, SARS Virus
aaacattattctctcgcaagcacta

SEQ ID NO: 130398 - DNA, 25 bp, SARS Virus
aacattattcttccgcaagcactac

SEQ ID NO: 130399 - DNA, 25 bp, SARS Virus
acattattctttcgcaagcactaca

SEQ ID NO: 130400 - DNA, 25 bp, SARS Virus
cattattctttcccaagcactacat

SEQ ID NO: 130401 - DNA, 25 bp, SARS Virus
attattctttcgcaagcactacatc

SEQ ID NO: 130402 - DNA, 25 bp, SARS Virus
ttattctttcgccagcactacatcg

SEQ ID NO: 130403 - DNA, 25 bp, SARS Virus
tattctttcgcacgcactacatcgg

SEQ ID NO: 130404 - DNA, 25 bp, SARS Virus
attctttcgcaaccactacatcggt

SEQ ID NO: 130405 - DNA, 25 bp, SARS Virus
ttctttcgcaagcactacatcggtg

SEQ ID NO: 130406 - DNA, 25 bp, SARS Virus
tctttcgcaagccctacatcggtgt

SEQ ID NO: 130407 - DNA, 25 bp, SARS Virus
ctttcgcaagcactacatcggtgtc

SEQ ID NO: 130408 - DNA, 25 bp, SARS Virus
tttcgcaagcaccacatcggtgtca

SEQ ID NO: 130409 - DNA, 25 bp, SARS Virus
ttcgcaagcactccatcggtgtcac

SEQ ID NO: 130410 - DNA, 25 bp, SARS Virus
tcgcaagcactacatcggtgtcact

SEQ ID NO: 130411 - DNA, 25 bp, SARS Virus
cgcaagcactacctcggtgtcacta

SEQ ID NO: 130412 - DNA, 25 bp, SARS Virus
gcaagcactacaccggtgtcactag

SEQ ID NO: 130413 - DNA, 25 bp, SARS Virus
caagcactacatcggtgtcactaga

SEQ ID NO: 130414 - DNA, 25 bp, SARS Virus
aagcactacatccgtgtcactagag

SEQ ID NO: 130415 - DNA, 25 bp, SARS Virus
agcactacatcgctgtcactagaga

SEQ ID NO: 130416 - DNA, 25 bp, SARS Virus
gcactacatcggcgtcactagagaa

SEQ ID NO: 130417 - DNA, 25 bp, SARS Virus
cactacatcggtctcactagagaaa

SEQ ID NO: 130418 - DNA, 25 bp, SARS Virus
actacatcggtgccactagagaaaa

SEQ ID NO: 130419 - DNA, 25 bp, SARS Virus
ctacatcggtgtcactagagaaaac

SEQ ID NO: 130420 - DNA, 25 bp, SARS Virus
tacatcggtgtccctagagaaaacc

SEQ ID NO: 130421 - DNA, 25 bp, SARS Virus
acatcggtgtcactagagaaaaccg

SEQ ID NO: 130422 - DNA, 25 bp, SARS Virus
catcggtgtcaccagagaaaaccgt

SEQ ID NO: 130423 - DNA, 25 bp, SARS Virus
atcggtgtcactcgagaaaaccgtc

SEQ ID NO: 130424 - DNA, 25 bp, SARS Virus
tcggtgtcactacagaaaaccgtcc

SEQ ID NO: 130425 - DNA, 25 bp, SARS Virus
cggtgtcactagcgaaaaccgtcca

SEQ ID NO: 130426 - DNA, 25 bp, SARS Virus
ggtgtcactagacaaaaccgtccag

SEQ ID NO: 130427 - DNA, 25 bp, SARS Virus
gtgtcactagagcaaaccgtccagg

SEQ ID NO: 130428 - DNA, 25 bp, SARS Virus
tgtcactagagacaaccgtccagga

SEQ ID NO: 130429 - DNA, 25 bp, SARS Virus
gtcactagagaacaccgtccaggaa

SEQ ID NO: 130430 - DNA, 25 bp, SARS Virus
tcactagagaaacccgtccaggaat

SEQ ID NO: 130431 - DNA, 25 bp, SARS Virus
cactagagaaaaccgtccaggaatt

SEQ ID NO: 130432 - DNA, 25 bp, SARS Virus
actagagaaaaccgtccaggaatta

SEQ ID NO: 130433 - DNA, 25 bp, SARS Virus
ctagagaaaaccctccaggaattac

SEQ ID NO: 130434 - DNA, 25 bp, SARS Virus
tagagaaaaccgcccaggaattaca

SEQ ID NO: 130435 - DNA, 25 bp, SARS Virus
agagaaaaccgtccaggaattacag

SEQ ID NO: 130436 - DNA, 25 bp, SARS Virus
gagaaaaccgtccaggaattacagt

SEQ ID NO: 130437 - DNA, 25 bp, SARS Virus
agaaaaccgtcccggaattacagtg

SEQ ID NO: 130438 - DNA, 25 bp, SARS Virus
gaaaaccgtccacgaattacagtgt

SEQ ID NO: 130439 - DNA, 25 bp, SARS Virus
aaaaccgtccagcaattacagtgtc

SEQ ID NO: 130440 - DNA, 25 bp, SARS Virus
aaaccgtccaggcattacagtgtcg

SEQ ID NO: 130441 - DNA, 25 bp, SARS Virus
aaccgtccaggacttacagtgtcgc

SEQ ID NO: 130442 - DNA, 25 bp, SARS Virus
accgtccaggaactacagtgtcgcg

SEQ ID NO: 130443 - DNA, 25 bp, SARS Virus
ccgtccaggaatcacagtgtcgcgg

SEQ ID NO: 130444 - DNA, 25 bp, SARS Virus
cgtccaggaattccagtgtcgcggg

SEQ ID NO: 130445 - DNA, 25 bp, SARS Virus
gtccaggaattacagtgtcgcggga

SEQ ID NO: 130446 - DNA, 25 bp, SARS Virus
tccaggaattaccgtgtcgcgggat

SEQ ID NO: 130447 - DNA, 25 bp, SARS Virus
ccaggaattacactgtcgcgggatc

SEQ ID NO: 130448 - DNA, 25 bp, SARS Virus
caggaattacagcgtcgcgggatcc

SEQ ID NO: 130449 - DNA, 25 bp, SARS Virus
aggaattacagtctcgcgggatccc

SEQ ID NO: 130450 - DNA, 25 bp, SARS Virus
ggaattacagtgccgcgggatccct

SEQ ID NO: 130451 - DNA, 25 bp, SARS Virus
gaattacagtgtcgcgggatccctc

SEQ ID NO: 130452 - DNA, 25 bp, SARS Virus
aattacagtgtcccgggatccctca

SEQ ID NO: 130453 - DNA, 25 bp, SARS Virus
attacagtgtcgcgggatccctcac

SEQ ID NO: 130454 - DNA, 25 bp, SARS Virus
ttacagtgtcgccggatccctcaca

SEQ ID NO: 130455 - DNA, 25 bp, SARS Virus
tacagtgtcgcgcgatccctcacag

SEQ ID NO: 130456 - DNA, 25 bp, SARS Virus
acagtgtcgcggcatccctcacagg

SEQ ID NO: 130457 - DNA, 25 bp, SARS Virus
cagtgtcgcgggctccctcacaggc

SEQ ID NO: 130458 - DNA, 25 bp, SARS Virus
agtgtcgcgggacccctcacaggcc

SEQ ID NO: 130459 - DNA, 25 bp, SARS Virus
gtgtcgcgggatccctcacaggccg

SEQ ID NO: 130460 - DNA, 25 bp, SARS Virus
tgtcgcgggatccctcacaggccgg

SEQ ID NO: 130461 - DNA, 25 bp, SARS Virus
gtcgcgggatccctcacaggccggt

SEQ ID NO: 130462 - DNA, 25 bp, SARS Virus
tcgcgggatcccccacaggccggta

SEQ ID NO: 130463 - DNA, 25 bp, SARS Virus
cgcgggatccctcacaggccggtaa

SEQ ID NO: 130464 - DNA, 25 bp, SARS Virus
gcgggatccctcccaggccggtaag

SEQ ID NO: 130465 - DNA, 25 bp, SARS Virus
cgggatccctcacaggccggtaagc

SEQ ID NO: 130466 - DNA, 25 bp, SARS Virus
gggatccctcaccggccggtaagcg

SEQ ID NO: 130467 - DNA, 25 bp, SARS Virus
ggatccctcacacgccggtaagcgt

SEQ ID NO: 130468 - DNA, 25 bp, SARS Virus
gatccctcacagcccggtaagcgtt

SEQ ID NO: 130469 - DNA, 25 bp, SARS Virus
atccctcacaggccggtaagcgttc

SEQ ID NO: 130470 - DNA, 25 bp, SARS Virus
tccctcacaggccggtaagcgttca

SEQ ID NO: 130471 - DNA, 25 bp, SARS Virus
ccctcacaggcccgtaagcgttcac

SEQ ID NO: 130472 - DNA, 25 bp, SARS Virus
cctcacaggccgctaagcgttcact

SEQ ID NO: 130473 - DNA, 25 bp, SARS Virus
ctcacaggccggcaagcgttcactg

SEQ ID NO: 130474 - DNA, 25 bp, SARS Virus
tcacaggccggtcagcgttcactgg

SEQ ID NO: 130475 - DNA, 25 bp, SARS Virus
cacaggccggtacgcgttcactggt

SEQ ID NO: 130476 - DNA, 25 bp, SARS Virus
acaggccggtaaccgttcactggtg

SEQ ID NO: 130477 - DNA, 25 bp, SARS Virus
caggccggtaagcgttcactggtgc

SEQ ID NO: 130478 - DNA, 25 bp, SARS Virus
aggccggtaagccttcactggtgct

SEQ ID NO: 130479 - DNA, 25 bp, SARS Virus
ggccggtaagcgctcactggtgctt

SEQ ID NO: 130480 - DNA, 25 bp, SARS Virus
gccggtaagcgtccactggtgctta

SEQ ID NO: 130481 - DNA, 25 bp, SARS Virus
ccggtaagcgttcactggtgcttac

SEQ ID NO: 130482 - DNA, 25 bp, SARS Virus
cggtaagcgttccctggtgcttact

SEQ ID NO: 130483 - DNA, 25 bp, SARS Virus
ggtaagcgttcactggtgcttacta

SEQ ID NO: 130484 - DNA, 25 bp, SARS Virus
gtaagcgttcaccggtgcttactag

SEQ ID NO: 130485 - DNA, 25 bp, SARS Virus
taagcgttcactcgtgcttactagt

SEQ ID NO: 130486 - DNA, 25 bp, SARS Virus
aagcgttcactgctgcttactagtg

SEQ ID NO: 130487 - DNA, 25 bp, SARS Virus
agcgttcactggcgcttactagtgt

SEQ ID NO: 130488 - DNA, 25 bp, SARS Virus
gcgttcactggtccttactagtgtc

SEQ ID NO: 130489 - DNA, 25 bp, SARS Virus
cgttcactggtgcttactagtgtcg

SEQ ID NO: 130490 - DNA, 25 bp, SARS Virus
gttcactggtgcctactagtgtcgt

SEQ ID NO: 130491 - DNA, 25 bp, SARS Virus
ttcactggtgctcactagtgtcgtg

SEQ ID NO: 130492 - DNA, 25 bp, SARS Virus
tcactggtgcttcctagtgtcgtgg

SEQ ID NO: 130493 - DNA, 25 bp, SARS Virus
cactggtgcttactagtgtcgtggt

SEQ ID NO: 130494 - DNA, 25 bp, SARS Virus
actggtgcttaccagtgtcgtggtt

SEQ ID NO: 130495 - DNA, 25 bp, SARS Virus
ctggtgcttactcgtgtcgtggtta

SEQ ID NO: 130496 - DNA, 25 bp, SARS Virus
tggtgcttactactgtcgtggttac

SEQ ID NO: 130497 - DNA, 25 bp, SARS Virus
ggtgcttactagcgtcgtggttact

SEQ ID NO: 130498 - DNA, 25 bp, SARS Virus
gtgcttactagtctcgtggttactg

SEQ ID NO: 130499 - DNA, 25 bp, SARS Virus
tgcttactagtgccgtggttactgt

SEQ ID NO: 130500 - DNA, 25 bp, SARS Virus
gcttactagtgtcgtggttactgtt

SEQ ID NO: 130501 - DNA, 25 bp, SARS Virus
cttactagtgtcctggttactgttc

SEQ ID NO: 130502 - DNA, 25 bp, SARS Virus
ttactagtgtcgcggttactgttca

SEQ ID NO: 130503 - DNA, 25 bp, SARS Virus
tactagtgtcgtcgttactgttcaa

SEQ ID NO: 130504 - DNA, 25 bp, SARS Virus
actagtgtcgtgcttactgttcaag

SEQ ID NO: 130505 - DNA, 25 bp, SARS Virus
ctagtgtcgtggctactgttcaagt

SEQ ID NO: 130506 - DNA, 25 bp, SARS Virus
tagtgtcgtggtcactgttcaagtg

SEQ ID NO: 130507 - DNA, 25 bp, SARS Virus
agtgtcgtggttcctgttcaagtga

SEQ ID NO: 130508 - DNA, 25 bp, SARS Virus
gtgtcgtggttactgttcaagtgaa

SEQ ID NO: 130509 - DNA, 25 bp, SARS Virus
tgtcgtggttaccgttcaagtgaaa

SEQ ID NO: 130510 - DNA, 25 bp, SARS Virus
gtcgtggttactcttcaagtgaaag

SEQ ID NO: 130511 - DNA, 25 bp, SARS Virus
tcgtggttactgctcaagtgaaagg

SEQ ID NO: 130512 - DNA, 25 bp, SARS Virus
cgtggttactgtccaagtgaaaggt

SEQ ID NO: 130513 - DNA, 25 bp, SARS Virus
gtggttactgttcaagtgaaaggta

SEQ ID NO: 130514 - DNA, 25 bp, SARS Virus
tggttactgttccagtgaaaggtac

SEQ ID NO: 130515 - DNA, 25 bp, SARS Virus
ggttactgttcacgtgaaaggtact

SEQ ID NO: 130516 - DNA, 25 bp, SARS Virus
gttactgttcaactgaaaggtactc

SEQ ID NO: 130517 - DNA, 25 bp, SARS Virus
ttactgttcaagcgaaaggtactcg

SEQ ID NO: 130518 - DNA, 25 bp, SARS Virus
tactgttcaagtcaaaggtactcgc

SEQ ID NO: 130519 - DNA, 25 bp, SARS Virus
actgttcaagtgcaaggtactcgcc

SEQ ID NO: 130520 - DNA, 25 bp, SARS Virus
ctgttcaagtgacaggtactcgcca

SEQ ID NO: 130521 - DNA, 25 bp, SARS Virus
tgttcaagtgaacggtactcgccag

SEQ ID NO: 130522 - DNA, 25 bp, SARS Virus
gttcaagtgaaacgtactcgccaga

SEQ ID NO: 130523 - DNA, 25 bp, SARS Virus
ttcaagtgaaagctactcgccagac

SEQ ID NO: 130524 - DNA, 25 bp, SARS Virus
tcaagtgaaaggcactcgccagacc

SEQ ID NO: 130525 - DNA, 25 bp, SARS Virus
caagtgaaaggtcctcgccagacca

SEQ ID NO: 130526 - DNA, 25 bp, SARS Virus
aagtgaaaggtactcgccagaccag

SEQ ID NO: 130527 - DNA, 25 bp, SARS Virus
agtgaaaggtacccgccagaccagt

SEQ ID NO: 130528 - DNA, 25 bp, SARS Virus
gtgaaaggtactcgccagaccagtg

SEQ ID NO: 130529 - DNA, 25 bp, SARS Virus
tgaaaggtactccccagaccagtgt

SEQ ID NO: 130530 - DNA, 25 bp, SARS Virus
gaaaggtactcgccagaccagtgtt

SEQ ID NO: 130531 - DNA, 25 bp, SARS Virus
aaaggtactcgccagaccagtgtta

SEQ ID NO: 130532 - DNA, 25 bp, SARS Virus
aaggtactcgcccgaccagtgttaa

SEQ ID NO: 130533 - DNA, 25 bp, SARS Virus
aggtactcgccacaccagtgttaac

SEQ ID NO: 130534 - DNA, 25 bp, SARS Virus
ggtactcgccagcccagtgttaaca

SEQ ID NO: 130535 - DNA, 25 bp, SARS Virus
gtactcgccagaccagtgttaacag

SEQ ID NO: 130536 - DNA, 25 bp, SARS Virus
tactcgccagaccagtgttaacagg

SEQ ID NO: 130537 - DNA, 25 bp, SARS Virus
actcgccagacccgtgttaacaggg

SEQ ID NO: 130538 - DNA, 25 bp, SARS Virus
ctcgccagaccactgttaacagggg

SEQ ID NO: 130539 - DNA, 25 bp, SARS Virus
tcgccagaccagcgttaacaggggg

SEQ ID NO: 130540 - DNA, 25 bp, SARS Virus
cgccagaccagtcttaacagggggc

SEQ ID NO: 130541 - DNA, 25 bp, SARS Virus
gccagaccagtgctaacagggggcc

SEQ ID NO: 130542 - DNA, 25 bp, SARS Virus
ccagaccagtgtcaacagggggcct

SEQ ID NO: 130543 - DNA, 25 bp, SARS Virus
cagaccagtgttcacagggggcctc

SEQ ID NO: 130544 - DNA, 25 bp, SARS Virus
agaccagtgttaccagggggcctct

SEQ ID NO: 130545 - DNA, 25 bp, SARS Virus
gaccagtgttaacagggggcctctc

SEQ ID NO: 130546 - DNA, 25 bp, SARS Virus
accagtgttaaccgggggcctctcc

SEQ ID NO: 130547 - DNA, 25 bp, SARS Virus
ccagtgttaacacggggcctctccg

SEQ ID NO: 130548 - DNA, 25 bp, SARS Virus
cagtgttaacagcgggcctctccgt

SEQ ID NO: 130549 - DNA, 25 bp, SARS Virus
agtgttaacaggcggcctctccgtg

SEQ ID NO: 130550 - DNA, 25 bp, SARS Virus
gtgttaacagggcgcctctccgtgt

SEQ ID NO: 130551 - DNA, 25 bp, SARS Virus
tgttaacaggggccctctccgtgta

SEQ ID NO: 130552 - DNA, 25 bp, SARS Virus
gttaacagggggcctctccgtgtaa

SEQ ID NO: 130553 - DNA, 25 bp, SARS Virus
ttaacagggggcctctccgtgtaac

SEQ ID NO: 130554 - DNA, 25 bp, SARS Virus
taacagggggcccctccgtgtaact

SEQ ID NO: 130555 - DNA, 25 bp, SARS Virus
aacagggggcctctccgtgtaactc

SEQ ID NO: 130556 - DNA, 25 bp, SARS Virus
acagggggcctccccgtgtaactct

SEQ ID NO: 130557 - DNA, 25 bp, SARS Virus
cagggggcctctccgtgtaactctt

SEQ ID NO: 130558 - DNA, 25 bp, SARS Virus
agggggcctctccgtgtaactcttc

SEQ ID NO: 130559 - DNA, 25 bp, SARS Virus
gggggcctctccctgtaactcttct

SEQ ID NO: 130560 - DNA, 25 bp, SARS Virus
ggggcctctccgcgtaactcttctt

SEQ ID NO: 130561 - DNA, 25 bp, SARS Virus
gggcctctccgtctaactcttctta

SEQ ID NO: 130562 - DNA, 25 bp, SARS Virus
ggcctctccgtgcaactcttcttac

SEQ ID NO: 130563 - DNA, 25 bp, SARS Virus
gcctctccgtgtcactcttcttaca

SEQ ID NO: 130564 - DNA, 25 bp, SARS Virus
cctctccgtgtacctcttcttacaa

SEQ ID NO: 130565 - DNA, 25 bp, SARS Virus
ctctccgtgtaactcttcttacaaa

SEQ ID NO: 130566 - DNA, 25 bp, SARS Virus
tctccgtgtaacccttcttacaaac

SEQ ID NO: 130567 - DNA, 25 bp, SARS Virus
ctccgtgtaactcttcttacaaaca

SEQ ID NO: 130568 - DNA, 25 bp, SARS Virus
tccgtgtaactcctcttacaaacaa

SEQ ID NO: 130569 - DNA, 25 bp, SARS Virus
ccgtgtaactctccttacaaacaaa

SEQ ID NO: 130570 - DNA, 25 bp, SARS Virus
cgtgtaactcttcttacaaacaaag

SEQ ID NO: 130571 - DNA, 25 bp, SARS Virus
gtgtaactcttcctacaaacaaaga

SEQ ID NO: 130572 - DNA, 25 bp, SARS Virus
tgtaactcttctcacaaacaaagac

SEQ ID NO: 130573 - DNA, 25 bp, SARS Virus
gtaactcttcttccaaacaaagacc

SEQ ID NO: 130574 - DNA, 25 bp, SARS Virus
taactcttcttacaaacaaagaccc

SEQ ID NO: 130575 - DNA, 25 bp, SARS Virus
aactcttcttaccaacaaagaccca

SEQ ID NO: 130576 - DNA, 25 bp, SARS Virus
actcttcttacacacaaagacccaa

SEQ ID NO: 130577 - DNA, 25 bp, SARS Virus
ctcttcttacaaccaaagacccaac

SEQ ID NO: 130578 - DNA, 25 bp, SARS Virus
tcttcttacaaacaaagacccaact

SEQ ID NO: 130579 - DNA, 25 bp, SARS Virus
cttcttacaaaccaagacccaactt

SEQ ID NO: 130580 - DNA, 25 bp, SARS Virus
ttcttacaaacacagacccaactta

SEQ ID NO: 130581 - DNA, 25 bp, SARS Virus
tcttacaaacaacgacccaacttac

SEQ ID NO: 130582 - DNA, 25 bp, SARS Virus
cttacaaacaaacacccaacttact

SEQ ID NO: 130583 - DNA, 25 bp, SARS Virus
ttacaaacaaagccccaacttactg

SEQ ID NO: 130584 - DNA, 25 bp, SARS Virus
tacaaacaaagacccaacttactgg

SEQ ID NO: 130585 - DNA, 25 bp, SARS Virus
acaaacaaagacccaacttactggt

SEQ ID NO: 130586 - DNA, 25 bp, SARS Virus
caaacaaagacccaacttactggtg

SEQ ID NO: 130587 - DNA, 25 bp, SARS Virus
aaacaaagaccccacttactggtgt

SEQ ID NO: 130588 - DNA, 25 bp, SARS Virus
aacaaagacccaccttactggtgta

SEQ ID NO: 130589 - DNA, 25 bp, SARS Virus
acaaagacccaacttactggtgtaa

SEQ ID NO: 130590 - DNA, 25 bp, SARS Virus
caaagacccaacctactggtgtaac

SEQ ID NO: 130591 - DNA, 25 bp, SARS Virus
aaagacccaactcactggtgtaact

SEQ ID NO: 130592 - DNA, 25 bp, SARS Virus
aagacccaacttcctggtgtaactc

SEQ ID NO: 130593 - DNA, 25 bp, SARS Virus
agacccaacttactggtgtaactcg

SEQ ID NO: 130594 - DNA, 25 bp, SARS Virus
gacccaacttaccggtgtaactcgc

SEQ ID NO: 130595 - DNA, 25 bp, SARS Virus
acccaacttactcgtgtaactcgcc

SEQ ID NO: 130596 - DNA, 25 bp, SARS Virus
cccaacttactgctgtaactcgccc

SEQ ID NO: 130597 - DNA, 25 bp, SARS Virus
ccaacttactggcgtaactcgccca

SEQ ID NO: 130598 - DNA, 25 bp, SARS Virus
caacttactggtctaactcgcccat

SEQ ID NO: 130599 - DNA, 25 bp, SARS Virus
aacttactggtgcaactcgcccatg

SEQ ID NO: 130600 - DNA, 25 bp, SARS Virus
acttactggtgtcactcgcccatgc

SEQ ID NO: 130601 - DNA, 25 bp, SARS Virus
cttactggtgtacctcgcccatgct

SEQ ID NO: 130602 - DNA, 25 bp, SARS Virus
ttactggtgtaactcgcccatgctc

SEQ ID NO: 130603 - DNA, 25 bp, SARS Virus
tactggtgtaacccgcccatgctcg

SEQ ID NO: 130604 - DNA, 25 bp, SARS Virus
actggtgtaactcgcccatgctcgt

SEQ ID NO: 130605 - DNA, 25 bp, SARS Virus
ctggtgtaactcccccatgctcgtt

SEQ ID NO: 130606 - DNA, 25 bp, SARS Virus
tggtgtaactcgcccatgctcgttt

SEQ ID NO: 130607 - DNA, 25 bp, SARS Virus
ggtgtaactcgcccatgctcgtttg

SEQ ID NO: 130608 - DNA, 25 bp, SARS Virus
gtgtaactcgcccatgctcgtttgt

SEQ ID NO: 130609 - DNA, 25 bp, SARS Virus
tgtaactcgcccctgctcgtttgtc

SEQ ID NO: 130610 - DNA, 25 bp, SARS Virus
gtaactcgcccacgctcgtttgtcg

SEQ ID NO: 130611 - DNA, 25 bp, SARS Virus
taactcgcccatcctcgtttgtcgg

SEQ ID NO: 130612 - DNA, 25 bp, SARS Virus
aactcgcccatgctcgtttgtcgga

SEQ ID NO: 130613 - DNA, 25 bp, SARS Virus
actcgcccatgcccgtttgtcggac

SEQ ID NO: 130614 - DNA, 25 bp, SARS Virus
ctcgcccatgctcgtttgtcggact

SEQ ID NO: 130615 - DNA, 25 bp, SARS Virus
tcgcccatgctcctttgtcggactt

SEQ ID NO: 130616 - DNA, 25 bp, SARS Virus
cgcccatgctcgcttgtcggacttc

SEQ ID NO: 130617 - DNA, 25 bp, SARS Virus
gcccatgctcgtctgtcggacttcc

SEQ ID NO: 130618 - DNA, 25 bp, SARS Virus
cccatgctcgttcgtcggacttcct

SEQ ID NO: 130619 - DNA, 25 bp, SARS Virus
ccatgctcgtttctcggacttcctt

SEQ ID NO: 130620 - DNA, 25 bp, SARS Virus
catgctcgtttgccggacttccttc

SEQ ID NO: 130621 - DNA, 25 bp, SARS Virus
atgctcgtttgtcggacttccttcg

SEQ ID NO: 130622 - DNA, 25 bp, SARS Virus
tgctcgtttgtccgacttccttcgt

SEQ ID NO: 130623 - DNA, 25 bp, SARS Virus
gctcgtttgtcgcacttccttcgtt

SEQ ID NO: 130624 - DNA, 25 bp, SARS Virus
ctcgtttgtcggccttccttcgttg

SEQ ID NO: 130625 - DNA, 25 bp, SARS Virus
tcgtttgtcggacttccttcgttgc

SEQ ID NO: 130626 - DNA, 25 bp, SARS Virus
cgtttgtcggacctccttcgttgct

SEQ ID NO: 130627 - DNA, 25 bp, SARS Virus
gtttgtcggactcccttcgttgctt

SEQ ID NO: 130628 - DNA, 25 bp, SARS Virus
tttgtcggacttccttcgttgcttc

SEQ ID NO: 130629 - DNA, 25 bp, SARS Virus
ttgtcggacttccttcgttgcttca

SEQ ID NO: 130630 - DNA, 25 bp, SARS Virus
tgtcggacttccctcgttgcttcat

SEQ ID NO: 130631 - DNA, 25 bp, SARS Virus
gtcggacttcctccgttgcttcatc

SEQ ID NO: 130632 - DNA, 25 bp, SARS Virus
tcggacttccttcgttgcttcatcg

SEQ ID NO: 130633 - DNA, 25 bp, SARS Virus
cggacttccttccttgcttcatcga

SEQ ID NO: 130634 - DNA, 25 bp, SARS Virus
ggacttccttcgctgcttcatcgat

SEQ ID NO: 130635 - DNA, 25 bp, SARS Virus
gacttccttcgtcgcttcatcgatt

SEQ ID NO: 130636 - DNA, 25 bp, SARS Virus
acttccttcgttccttcatcgattc

SEQ ID NO: 130637 - DNA, 25 bp, SARS Virus
cttccttcgttgcttcatcgattcg

SEQ ID NO: 130638 - DNA, 25 bp, SARS Virus
ttccttcgttgcctcatcgattcgg

SEQ ID NO: 130639 - DNA, 25 bp, SARS Virus
tccttcgttgctccatcgattcggt

SEQ ID NO: 130640 - DNA, 25 bp, SARS Virus
ccttcgttgcttcatcgattcggtg

SEQ ID NO: 130641 - DNA, 25 bp, SARS Virus
cttcgttgcttcctcgattcggtgt

SEQ ID NO: 130642 - DNA, 25 bp, SARS Virus
ttcgttgcttcaccgattcggtgta

SEQ ID NO: 130643 - DNA, 25 bp, SARS Virus
tcgttgcttcatcgattcggtgtag

SEQ ID NO: 130644 - DNA, 25 bp, SARS Virus
cgttgcttcatccattcggtgtagt

SEQ ID NO: 130645 - DNA, 25 bp, SARS Virus
gttgcttcatcgcttcggtgtagtt

SEQ ID NO: 130646 - DNA, 25 bp, SARS Virus
ttgcttcatcgactcggtgtagttc

SEQ ID NO: 130647 - DNA, 25 bp, SARS Virus
tgcttcatcgatccggtgtagttcg

SEQ ID NO: 130648 - DNA, 25 bp, SARS Virus
gcttcatcgattcggtgtagttcgg

SEQ ID NO: 130649 - DNA, 25 bp, SARS Virus
cttcatcgattccgtgtagttcgga

SEQ ID NO: 130650 - DNA, 25 bp, SARS Virus
ttcatcgattcgctgtagttcggat

SEQ ID NO: 130651 - DNA, 25 bp, SARS Virus
tcatcgattcggcgtagttcggatg

SEQ ID NO: 130652 - DNA, 25 bp, SARS Virus
catcgattcggtctagttcggatgt

SEQ ID NO: 130653 - DNA, 25 bp, SARS Virus
atcgattcggtgcagttcggatgtt

SEQ ID NO: 130654 - DNA, 25 bp, SARS Virus
tcgattcggtgtcgttcggatgtta

SEQ ID NO: 130655 - DNA, 25 bp, SARS Virus
cgattcggtgtacttcggatgttat

SEQ ID NO: 130656 - DNA, 25 bp, SARS Virus
gattcggtgtagctcggatgttatg

SEQ ID NO: 130657 - DNA, 25 bp, SARS Virus
attcggtgtagtccggatgttatgt

SEQ ID NO: 130658 - DNA, 25 bp, SARS Virus
ttcggtgtagttcggatgttatgtt

SEQ ID NO: 130659 - DNA, 25 bp, SARS Virus
tcggtgtagttccgatgttatgttc

SEQ ID NO: 130660 - DNA, 25 bp, SARS Virus
cggtgtagttcgcatgttatgttcg

SEQ ID NO: 130661 - DNA, 25 bp, SARS Virus
ggtgtagttcggctgttatgttcgg

SEQ ID NO: 130662 - DNA, 25 bp, SARS Virus
gtgtagttcggacgttatgttcggt

SEQ ID NO: 130663 - DNA, 25 bp, SARS Virus
tgtagttcggatcttatgttcggta

SEQ ID NO: 130664 - DNA, 25 bp, SARS Virus
gtagttcggatgctatgttcggtaa

SEQ ID NO: 130665 - DNA, 25 bp, SARS Virus
tagttcggatgtcatgttcggtaac

SEQ ID NO: 130666 - DNA, 25 bp, SARS Virus
agttcggatgttctgttcggtaacg

SEQ ID NO: 130667 - DNA, 25 bp, SARS Virus
gttcggatgttacgttcggtaacgt

SEQ ID NO: 130668 - DNA, 25 bp, SARS Virus
ttcggatgttatcttcggtaacgtt

SEQ ID NO: 130669 - DNA, 25 bp, SARS Virus
tcggatgttatgctcggtaacgtta

SEQ ID NO: 130670 - DNA, 25 bp, SARS Virus
cggatgttatgtccggtaacgttag

SEQ ID NO: 130671 - DNA, 25 bp, SARS Virus
ggatgttatgttcggtaacgttagc

SEQ ID NO: 130672 - DNA, 25 bp, SARS Virus
gatgttatgttccgtaacgttagcg

SEQ ID NO: 130673 - DNA, 25 bp, SARS Virus
atgttatgttcgctaacgttagcgt

SEQ ID NO: 130674 - DNA, 25 bp, SARS Virus
tgttatgttcggcaacgttagcgtt

SEQ ID NO: 130675 - DNA, 25 bp, SARS Virus
gttatgttcggtcacgttagcgtta

SEQ ID NO: 130676 - DNA, 25 bp, SARS Virus
ttatgttcggtaccgttagcgttag

SEQ ID NO: 130677 - DNA, 25 bp, SARS Virus
tatgttcggtaacgttagcgttagg

SEQ ID NO: 130678 - DNA, 25 bp, SARS Virus
atgttcggtaaccttagcgttaggg

SEQ ID NO: 130679 - DNA, 25 bp, SARS Virus
tgttcggtaacgctagcgttagggc

SEQ ID NO: 130680 - DNA, 25 bp, SARS Virus
gttcggtaacgtcagcgttagggcg

SEQ ID NO: 130681 - DNA, 25 bp, SARS Virus
ttcggtaacgttcgcgttagggcgg

SEQ ID NO: 130682 - DNA, 25 bp, SARS Virus
tcggtaacgttaccgttagggcggt

SEQ ID NO: 130683 - DNA, 25 bp, SARS Virus
cggtaacgttagcgttagggcggtc

SEQ ID NO: 130684 - DNA, 25 bp, SARS Virus
ggtaacgttagccttagggcggtca

SEQ ID NO: 130685 - DNA, 25 bp, SARS Virus
gtaacgttagcgctagggcggtcag

SEQ ID NO: 130686 - DNA, 25 bp, SARS Virus
taacgttagcgtcagggcggtcagt

SEQ ID NO: 130687 - DNA, 25 bp, SARS Virus
aacgttagcgttcgggcggtcagtg

SEQ ID NO: 130688 - DNA, 25 bp, SARS Virus
acgttagcgttacggcggtcagtgg

SEQ ID NO: 130689 - DNA, 25 bp, SARS Virus
cgttagcgttagcgcggtcagtggg

SEQ ID NO: 130690 - DNA, 25 bp, SARS Virus
gttagcgttaggccggtcagtgggt

SEQ ID NO: 130691 - DNA, 25 bp, SARS Virus
ttagcgttagggcggtcagtgggtt

SEQ ID NO: 130692 - DNA, 25 bp, SARS Virus
tagcgttagggccgtcagtgggtta

SEQ ID NO: 130693 - DNA, 25 bp, SARS Virus
agcgttagggcgctcagtgggttaa

SEQ ID NO: 130694 - DNA, 25 bp, SARS Virus
gcgttagggcggccagtgggttaat

SEQ ID NO: 130695 - DNA, 25 bp, SARS Virus
cgttagggcggtcagtgggttaatt

SEQ ID NO: 130696 - DNA, 25 bp, SARS Virus
gttagggcggtccgtgggttaatta

SEQ ID NO: 130697 - DNA, 25 bp, SARS Virus
ttagggcggtcactgggttaattaa

SEQ ID NO: 130698 - DNA, 25 bp, SARS Virus
tagggcggtcagcgggttaattaag

SEQ ID NO: 130699 - DNA, 25 bp, SARS Virus
agggcggtcagtcggttaattaaga

SEQ ID NO: 130700 - DNA, 25 bp, SARS Virus
gggcggtcagtgcgttaattaagac

SEQ ID NO: 130701 - DNA, 25 bp, SARS Virus
ggcggtcagtggcttaattaagaca

SEQ ID NO: 130702 - DNA, 25 bp, SARS Virus
gcggtcagtgggctaattaagacat

SEQ ID NO: 130703 - DNA, 25 bp, SARS Virus
cggtcagtgggtcaattaagacatc

SEQ ID NO: 130704 - DNA, 25 bp, SARS Virus
ggtcagtgggttcattaagacatct

SEQ ID NO: 130705 - DNA, 25 bp, SARS Virus
gtcagtgggttacttaagacatctg

SEQ ID NO: 130706 - DNA, 25 bp, SARS Virus
tcagtgggttaactaagacatctgt

SEQ ID NO: 130707 - DNA, 25 bp, SARS Virus
cagtgggttaatcaagacatctgtc

SEQ ID NO: 130708 - DNA, 25 bp, SARS Virus
agtgggttaattcagacatctgtcg

SEQ ID NO: 130709 - DNA, 25 bp, SARS Virus
gtgggttaattacgacatctgtcgt

SEQ ID NO: 130710 - DNA, 25 bp, SARS Virus
tgggttaattaacacatctgtcgtc

SEQ ID NO: 130711 - DNA, 25 bp, SARS Virus
gggttaattaagccatctgtcgtcg

SEQ ID NO: 130712 - DNA, 25 bp, SARS Virus
ggttaattaagacatctgtcgtcgt

SEQ ID NO: 130713 - DNA, 25 bp, SARS Virus
gttaattaagacctctgtcgtcgtt

SEQ ID NO: 130714 - DNA, 25 bp, SARS Virus
ttaattaagacacctgtcgtcgttc

SEQ ID NO: 130715 - DNA, 25 bp, SARS Virus
taattaagacatctgtcgtcgttcg

SEQ ID NO: 130716 - DNA, 25 bp, SARS Virus
aattaagacatccgtcgtcgttcgt

SEQ ID NO: 130717 - DNA, 25 bp, SARS Virus
attaagacatctctcgtcgttcgtg

SEQ ID NO: 130718 - DNA, 25 bp, SARS Virus
ttaagacatctgccgtcgttcgtgt

SEQ ID NO: 130719 - DNA, 25 bp, SARS Virus
taagacatctgtcgtcgttcgtgtt

SEQ ID NO: 130720 - DNA, 25 bp, SARS Virus
aagacatctgtcctcgttcgtgttt

SEQ ID NO: 130721 - DNA, 25 bp, SARS Virus
agacatctgtcgccgttcgtgtttt

SEQ ID NO: 130722 - DNA, 25 bp, SARS Virus
gacatctgtcgtcgttcgtgttttg

SEQ ID NO: 130723 - DNA, 25 bp, SARS Virus
acatctgtcgtccttcgtgttttgt

SEQ ID NO: 130724 - DNA, 25 bp, SARS Virus
catctgtcgtcgctcgtgttttgtt

SEQ ID NO: 130725 - DNA, 25 bp, SARS Virus
atctgtcgtcgtccgtgttttgttc

SEQ ID NO: 130726 - DNA, 25 bp, SARS Virus
tctgtcgtcgttcgtgttttgttcg

SEQ ID NO: 130727 - DNA, 25 bp, SARS Virus
ctgtcgtcgttcctgttttgttcgt

SEQ ID NO: 130728 - DNA, 25 bp, SARS Virus
tgtcgtcgttcgcgttttgttcgtt

SEQ ID NO: 130729 - DNA, 25 bp, SARS Virus
gtcgtcgttcgtcttttgttcgttc

SEQ ID NO: 130730 - DNA, 25 bp, SARS Virus
tcgtcgttcgtgctttgttcgttca

SEQ ID NO: 130731 - DNA, 25 bp, SARS Virus
cgtcgttcgtgtcttgttcgttcac

SEQ ID NO: 130732 - DNA, 25 bp, SARS Virus
gtcgttcgtgttctgttcgttcaca

SEQ ID NO: 130733 - DNA, 25 bp, SARS Virus
tcgttcgtgtttcgttcgttcacaa

SEQ ID NO: 130734 - DNA, 25 bp, SARS Virus
cgttcgtgttttcttcgttcacaat

SEQ ID NO: 130735 - DNA, 25 bp, SARS Virus
gttcgtgttttgctcgttcacaatg

SEQ ID NO: 130736 - DNA, 25 bp, SARS Virus
ttcgtgttttgtccgttcacaatga

SEQ ID NO: 130737 - DNA, 25 bp, SARS Virus
tcgtgttttgttcgttcacaatgac

SEQ ID NO: 130738 - DNA, 25 bp, SARS Virus
cgtgttttgttccttcacaatgacc

SEQ ID NO: 130739 - DNA, 25 bp, SARS Virus
gtgttttgttcgctcacaatgaccg

SEQ ID NO: 130740 - DNA, 25 bp, SARS Virus
tgttttgttcgtccacaatgaccgg

SEQ ID NO: 130741 - DNA, 25 bp, SARS Virus
gttttgttcgttcacaatgaccggt

SEQ ID NO: 130742 - DNA, 25 bp, SARS Virus
ttttgttcgttcccaatgaccggtg

SEQ ID NO: 130743 - DNA, 25 bp, SARS Virus
tttgttcgttcacaatgaccggtgt

SEQ ID NO: 130744 - DNA, 25 bp, SARS Virus
ttgttcgttcaccatgaccggtgtt

SEQ ID NO: 130745 - DNA, 25 bp, SARS Virus
tgttcgttcacactgaccggtgttc

SEQ ID NO: 130746 - DNA, 25 bp, SARS Virus
gttcgttcacaacgaccggtgttct

SEQ ID NO: 130747 - DNA, 25 bp, SARS Virus
ttcgttcacaatcaccggtgttctc

SEQ ID NO: 130748 - DNA, 25 bp, SARS Virus
tcgttcacaatgcccggtgttctcg

SEQ ID NO: 130749 - DNA, 25 bp, SARS Virus
cgttcacaatgaccggtgttctcgg

SEQ ID NO: 130750 - DNA, 25 bp, SARS Virus
gttcacaatgaccggtgttctcggt

SEQ ID NO: 130751 - DNA, 25 bp, SARS Virus
ttcacaatgacccgtgttctcggtc

SEQ ID NO: 130752 - DNA, 25 bp, SARS Virus
tcacaatgaccgctgttctcggtct

SEQ ID NO: 130753 - DNA, 25 bp, SARS Virus
cacaatgaccggcgttctcggtctc

SEQ ID NO: 130754 - DNA, 25 bp, SARS Virus
acaatgaccggtcttctcggtctcc

SEQ ID NO: 130755 - DNA, 25 bp, SARS Virus
caatgaccggtgctctcggtctcct

SEQ ID NO: 130756 - DNA, 25 bp, SARS Virus
aatgaccggtgtcctcggtctcctt

SEQ ID NO: 130757 - DNA, 25 bp, SARS Virus
atgaccggtgttctcggtctccttt

SEQ ID NO: 130758 - DNA, 25 bp, SARS Virus
tgaccggtgttcccggtctcctttt

SEQ ID NO: 130759 - DNA, 25 bp, SARS Virus
gaccggtgttctcggtctccttttg

SEQ ID NO: 130760 - DNA, 25 bp, SARS Virus
accggtgttctccgtctccttttgt

SEQ ID NO: 130761 - DNA, 25 bp, SARS Virus
ccggtgttctcgctctccttttgtt

SEQ ID NO: 130762 - DNA, 25 bp, SARS Virus
cggtgttctcggcctccttttgttc

SEQ ID NO: 130763 - DNA, 25 bp, SARS Virus
ggtgttctcggtctccttttgttcg

SEQ ID NO: 130764 - DNA, 25 bp, SARS Virus
gtgttctcggtccccttttgttcga

SEQ ID NO: 130765 - DNA, 25 bp, SARS Virus
tgttctcggtctccttttgttcgaa

SEQ ID NO: 130766 - DNA, 25 bp, SARS Virus
gttctcggtctccttttgttcgaaa

SEQ ID NO: 130767 - DNA, 25 bp, SARS Virus
ttctcggtctccctttgttcgaaat

SEQ ID NO: 130768 - DNA, 25 bp, SARS Virus
tctcggtctcctcttgttcgaaata

SEQ ID NO: 130769 - DNA, 25 bp, SARS Virus
ctcggtctccttctgttcgaaataa

SEQ ID NO: 130770 - DNA, 25 bp, SARS Virus
tcggtctcctttcgttcgaaataat

SEQ ID NO: 130771 - DNA, 25 bp, SARS Virus
cggtctccttttcttcgaaataata

SEQ ID NO: 130772 - DNA, 25 bp, SARS Virus
ggtctccttttgctcgaaataatac

SEQ ID NO: 130773 - DNA, 25 bp, SARS Virus
gtctccttttgtccgaaataataca

SEQ ID NO: 130774 - DNA, 25 bp, SARS Virus
tctccttttgttcgaaataatacat

SEQ ID NO: 130775 - DNA, 25 bp, SARS Virus
ctccttttgttccaaataatacatg

SEQ ID NO: 130776 - DNA, 25 bp, SARS Virus
tccttttgttcgcaataatacatgt

SEQ ID NO: 130777 - DNA, 25 bp, SARS Virus
ccttttgttcgacataatacatgtt

SEQ ID NO: 130778 - DNA, 25 bp, SARS Virus
cttttgttcgaactaatacatgttt

SEQ ID NO: 130779 - DNA, 25 bp, SARS Virus
ttttgttcgaaacaatacatgtttt

SEQ ID NO: 130780 - DNA, 25 bp, SARS Virus
tttgttcgaaatcatacatgttttt

SEQ ID NO: 130781 - DNA, 25 bp, SARS Virus
ttgttcgaaatactacatgtttttg

SEQ ID NO: 130782 - DNA, 25 bp, SARS Virus
tgttcgaaataacacatgtttttgg

SEQ ID NO: 130783 - DNA, 25 bp, SARS Virus
gttcgaaataatccatgtttttgga

SEQ ID NO: 130784 - DNA, 25 bp, SARS Virus
ttcgaaataatacatgtttttggac

SEQ ID NO: 130785 - DNA, 25 bp, SARS Virus
tcgaaataatacctgtttttggaca

SEQ ID NO: 130786 - DNA, 25 bp, SARS Virus
cgaaataatacacgtttttggacaa

SEQ ID NO: 130787 - DNA, 25 bp, SARS Virus
gaaataatacatctttttggacaag

SEQ ID NO: 130788 - DNA, 25 bp, SARS Virus
aaataatacatgcttttggacaagg

SEQ ID NO: 130789 - DNA, 25 bp, SARS Virus
aataatacatgtctttggacaaggc

SEQ ID NO: 130790 - DNA, 25 bp, SARS Virus
ataatacatgttcttggacaaggct

SEQ ID NO: 130791 - DNA, 25 bp, SARS Virus
taatacatgtttctggacaaggcta

SEQ ID NO: 130792 - DNA, 25 bp, SARS Virus
aatacatgttttcggacaaggctaa

SEQ ID NO: 130793 - DNA, 25 bp, SARS Virus
atacatgtttttcgacaaggctaat

SEQ ID NO: 130794 - DNA, 25 bp, SARS Virus
tacatgtttttgcacaaggctaatc

SEQ ID NO: 130795 - DNA, 25 bp, SARS Virus
acatgtttttggccaaggctaatct

SEQ ID NO: 130796 - DNA, 25 bp, SARS Virus
catgtttttggacaaggctaatctt

SEQ ID NO: 130797 - DNA, 25 bp, SARS Virus
atgtttttggaccaggctaatctta

SEQ ID NO: 130798 - DNA, 25 bp, SARS Virus
tgtttttggacacggctaatcttat

SEQ ID NO: 130799 - DNA, 25 bp, SARS Virus
gtttttggacaacgctaatcttatc

SEQ ID NO: 130800 - DNA, 25 bp, SARS Virus
tttttggacaagcctaatcttatcc

SEQ ID NO: 130801 - DNA, 25 bp, SARS Virus
ttttggacaaggctaatcttatccg

SEQ ID NO: 130802 - DNA, 25 bp, SARS Virus
tttggacaaggccaatcttatccgt

SEQ ID NO: 130803 - DNA, 25 bp, SARS Virus
ttggacaaggctcatcttatccgtt

SEQ ID NO: 130804 - DNA, 25 bp, SARS Virus
tggacaaggctactcttatccgttt

SEQ ID NO: 130805 - DNA, 25 bp, SARS Virus
ggacaaggctaaccttatccgttta

SEQ ID NO: 130806 - DNA, 25 bp, SARS Virus
gacaaggctaatcttatccgtttaa

SEQ ID NO: 130807 - DNA, 25 bp, SARS Virus
acaaggctaatcctatccgtttaac

SEQ ID NO: 130808 - DNA, 25 bp, SARS Virus
caaggctaatctcatccgtttaaca

SEQ ID NO: 130809 - DNA, 25 bp, SARS Virus
aaggctaatcttctccgtttaacat

SEQ ID NO: 130810 - DNA, 25 bp, SARS Virus
aggctaatcttacccgtttaacatc

SEQ ID NO: 130811 - DNA, 25 bp, SARS Virus
ggctaatcttatccgtttaacatca

SEQ ID NO: 130812 - DNA, 25 bp, SARS Virus
gctaatcttatccgtttaacatcat

SEQ ID NO: 130813 - DNA, 25 bp, SARS Virus
ctaatcttatccctttaacatcatt

SEQ ID NO: 130814 - DNA, 25 bp, SARS Virus
taatcttatccgcttaacatcattg

SEQ ID NO: 130815 - DNA, 25 bp, SARS Virus
aatcttatccgtctaacatcattgt

SEQ ID NO: 130816 - DNA, 25 bp, SARS Virus
atcttatccgttcaacatcattgta

SEQ ID NO: 130817 - DNA, 25 bp, SARS Virus
aaaggttatgccgtcgccaacatac

SEQ ID NO: 130818 - DNA, 25 bp, SARS Virus
aaggttatgccagcgccaacatacg

SEQ ID NO: 130819 - DNA, 25 bp, SARS Virus
aggttatgccatggccaacatacgt

SEQ ID NO: 130820 - DNA, 25 bp, SARS Virus
ggttatgccatcgccaacatacgtc

SEQ ID NO: 130821 - DNA, 25 bp, SARS Virus
gttatgccatcggcaacatacgtcg

SEQ ID NO: 130822 - DNA, 25 bp, SARS Virus
ttatgccatcgcgaacatacgtcgt

SEQ ID NO: 130823 - DNA, 25 bp, SARS Virus
tatgccatcgccgacatacgtcgtt

SEQ ID NO: 130824 - DNA, 25 bp, SARS Virus
atgccatcgccagcatacgtcgttt

SEQ ID NO: 130825 - DNA, 25 bp, SARS Virus
tgccatcgccaagatacgtcgtttt

SEQ ID NO: 130826 - DNA, 25 bp, SARS Virus
gccatcgccaacgtacgtcgttttg

SEQ ID NO: 130827 - DNA, 25 bp, SARS Virus
ccatcgccaacagacgtcgttttgg

SEQ ID NO: 130828 - DNA, 25 bp, SARS Virus
catcgccaacatgcgtcgttttgga

SEQ ID NO: 130829 - DNA, 25 bp, SARS Virus
atcgccaacataggtcgttttggac

SEQ ID NO: 130830 - DNA, 25 bp, SARS Virus
tcgccaacatacgtcgttttggact

SEQ ID NO: 130831 - DNA, 25 bp, SARS Virus
cgccaacatacggcgttttggactt

SEQ ID NO: 130832 - DNA, 25 bp, SARS Virus
gccaacatacgtggttttggactta

SEQ ID NO: 130833 - DNA, 25 bp, SARS Virus
ccaacatacgtcgttttggacttag

SEQ ID NO: 130834 - DNA, 25 bp, SARS Virus
caacatacgtcggtttggacttagt

SEQ ID NO: 130835 - DNA, 25 bp, SARS Virus
aacatacgtcgtgttggacttagtc

SEQ ID NO: 130836 - DNA, 25 bp, SARS Virus
acatacgtcgttgtggacttagtca

SEQ ID NO: 130837 - DNA, 25 bp, SARS Virus
catacgtcgtttgggacttagtcac

SEQ ID NO: 130838 - DNA, 25 bp, SARS Virus
atacgtcgttttggacttagtcacg

SEQ ID NO: 130839 - DNA, 25 bp, SARS Virus
tacgtcgttttggacttagtcacgg

SEQ ID NO: 130840 - DNA, 25 bp, SARS Virus
acgtcgttttgggcttagtcacgga

SEQ ID NO: 130841 - DNA, 25 bp, SARS Virus
cgtcgttttggagttagtcacggat

SEQ ID NO: 130842 - DNA, 25 bp, SARS Virus
gtcgttttggacgtagtcacggatg

SEQ ID NO: 130843 - DNA, 25 bp, SARS Virus
tcgttttggactgagtcacggatgt

SEQ ID NO: 130844 - DNA, 25 bp, SARS Virus
cgttttggacttggtcacggatgtg

SEQ ID NO: 130845 - DNA, 25 bp, SARS Virus
gttttggacttagtcacggatgtgc

SEQ ID NO: 130846 - DNA, 25 bp, SARS Virus
ttttggacttaggcacggatgtgcg

SEQ ID NO: 130847 - DNA, 25 bp, SARS Virus
tttggacttagtgacggatgtgcga

SEQ ID NO: 130848 - DNA, 25 bp, SARS Virus
ttggacttagtcgcggatgtgcgac

SEQ ID NO: 130849 - DNA, 25 bp, SARS Virus
tggacttagtcagggatgtgcgacg

SEQ ID NO: 130850 - DNA, 25 bp, SARS Virus
ggacttagtcacggatgtgcgacgc

SEQ ID NO: 130851 - DNA, 25 bp, SARS Virus
gacttagtcacggatgtgcgacgct

SEQ ID NO: 130852 - DNA, 25 bp, SARS Virus
acttagtcacgggtgtgcgacgctg

SEQ ID NO: 130853 - DNA, 25 bp, SARS Virus
cttagtcacggaggtgcgacgctgc

SEQ ID NO: 130854 - DNA, 25 bp, SARS Virus
ttagtcacggatgtgcgacgctgcg

SEQ ID NO: 130855 - DNA, 25 bp, SARS Virus
tagtcacggatgggcgacgctgcga

SEQ ID NO: 130856 - DNA, 25 bp, SARS Virus
agtcacggatgtgcgacgctgcgag

SEQ ID NO: 130857 - DNA, 25 bp, SARS Virus
gtcacggatgtgggacgctgcgagg

SEQ ID NO: 130858 - DNA, 25 bp, SARS Virus
tcacggatgtgcgacgctgcgagga

SEQ ID NO: 130859 - DNA, 25 bp, SARS Virus
cacggatgtgcggcgctgcgaggat

SEQ ID NO: 130860 - DNA, 25 bp, SARS Virus
acggatgtgcgaggctgcgaggatt

SEQ ID NO: 130861 - DNA, 25 bp, SARS Virus
cggatgtgcgacgctgcgaggatta

SEQ ID NO: 130862 - DNA, 25 bp, SARS Virus
ggatgtgcgacggtgcgaggattaa

SEQ ID NO: 130863 - DNA, 25 bp, SARS Virus
gatgtgcgacgcggcgaggattaaa

SEQ ID NO: 130864 - DNA, 25 bp, SARS Virus
atgtgcgacgctgcgaggattaaac

SEQ ID NO: 130865 - DNA, 25 bp, SARS Virus
tgtgcgacgctgggaggattaaaca

SEQ ID NO: 130866 - DNA, 25 bp, SARS Virus
gtgcgacgctgcgaggattaaacat

SEQ ID NO: 130867 - DNA, 25 bp, SARS Virus
tgcgacgctgcggggattaaacatt

SEQ ID NO: 130868 - DNA, 25 bp, SARS Virus
gcgacgctgcgaggattaaacatta

SEQ ID NO: 130869 - DNA, 25 bp, SARS Virus
cgacgctgcgaggattaaacattat

SEQ ID NO: 130870 - DNA, 25 bp, SARS Virus
gacgctgcgagggttaaacattatt

SEQ ID NO: 130871 - DNA, 25 bp, SARS Virus
acgctgcgaggagtaaacattattc

SEQ ID NO: 130872 - DNA, 25 bp, SARS Virus
cgctgcgaggatgaaacattattct

SEQ ID NO: 130873 - DNA, 25 bp, SARS Virus
gctgcgaggattgaacattattctt

SEQ ID NO: 130874 - DNA, 25 bp, SARS Virus
ctgcgaggattagacattattcttt

SEQ ID NO: 130875 - DNA, 25 bp, SARS Virus
tgcgaggattaagcattattctttc

SEQ ID NO: 130876 - DNA, 25 bp, SARS Virus
gcgaggattaaagattattctttcg

SEQ ID NO: 130877 - DNA, 25 bp, SARS Virus
cgaggattaaacgttattctttcgc

SEQ ID NO: 130878 - DNA, 25 bp, SARS Virus
gaggattaaacagtattctttcgca

SEQ ID NO: 130879 - DNA, 25 bp, SARS Virus
aggattaaacatgattctttcgcaa

SEQ ID NO: 130880 - DNA, 25 bp, SARS Virus
ggattaaacattgttctttcgcaag

SEQ ID NO: 130881 - DNA, 25 bp, SARS Virus
gattaaacattagtctttcgcaagc

SEQ ID NO: 130882 - DNA, 25 bp, SARS Virus
attaaacattatgctttcgcaagca

SEQ ID NO: 130883 - DNA, 25 bp, SARS Virus
ttaaacattattgtttcgcaagcac

SEQ ID NO: 130884 - DNA, 25 bp, SARS Virus
taaacattattcgttcgcaagcact

SEQ ID NO: 130885 - DNA, 25 bp, SARS Virus
aaacattattctgtcgcaagcacta

SEQ ID NO: 130886 - DNA, 25 bp, SARS Virus
aacattattcttgcgcaagcactac

SEQ ID NO: 130887 - DNA, 25 bp, SARS Virus
acattattctttggcaagcactaca

SEQ ID NO: 130888 - DNA, 25 bp, SARS Virus
cattattctttcgcaagcactacat

SEQ ID NO: 130889 - DNA, 25 bp, SARS Virus
attattctttcggaagcactacatc

SEQ ID NO: 130890 - DNA, 25 bp, SARS Virus
ttattctttcgcgagcactacatcg

SEQ ID NO: 130891 - DNA, 25 bp, SARS Virus
tattctttcgcaggcactacatcgg

SEQ ID NO: 130892 - DNA, 25 bp, SARS Virus
attctttcgcaagcactacatcggt

SEQ ID NO: 130893 - DNA, 25 bp, SARS Virus
ttctttcgcaaggactacatcggtg

SEQ ID NO: 130894 - DNA, 25 bp, SARS Virus
tctttcgcaagcgctacatcggtgt

SEQ ID NO: 130895 - DNA, 25 bp, SARS Virus
ctttcgcaagcagtacatcggtgtc

SEQ ID NO: 130896 - DNA, 25 bp, SARS Virus
tttcgcaagcacgacatcggtgtca

SEQ ID NO: 130897 - DNA, 25 bp, SARS Virus
ttcgcaagcactgcatcggtgtcac

SEQ ID NO: 130898 - DNA, 25 bp, SARS Virus
tcgcaagcactagatcggtgtcact

SEQ ID NO: 130899 - DNA, 25 bp, SARS Virus
cgcaagcactacgtcggtgtcacta

SEQ ID NO: 130900 - DNA, 25 bp, SARS Virus
gcaagcactacagcggtgtcactag

SEQ ID NO: 130901 - DNA, 25 bp, SARS Virus
caagcactacatgggtgtcactaga

SEQ ID NO: 130902 - DNA, 25 bp, SARS Virus
aagcactacatcggtgtcactagag

SEQ ID NO: 130903 - DNA, 25 bp, SARS Virus
agcactacatcggtgtcactagaga

SEQ ID NO: 130904 - DNA, 25 bp, SARS Virus
gcactacatcggggtcactagagaa

SEQ ID NO: 130905 - DNA, 25 bp, SARS Virus
cactacatcggtgtcactagagaaa

SEQ ID NO: 130906 - DNA, 25 bp, SARS Virus
actacatcggtggcactagagaaaa

SEQ ID NO: 130907 - DNA, 25 bp, SARS Virus
ctacatcggtgtgactagagaaaac

SEQ ID NO: 130908 - DNA, 25 bp, SARS Virus
tacatcggtgtcgctagagaaaacc

SEQ ID NO: 130909 - DNA, 25 bp, SARS Virus
acatcggtgtcagtagagaaaaccg

SEQ ID NO: 130910 - DNA, 25 bp, SARS Virus
catcggtgtcacgagagaaaaccgt

SEQ ID NO: 130911 - DNA, 25 bp, SARS Virus
atcggtgtcactggagaaaaccgtc

SEQ ID NO: 130912 - DNA, 25 bp, SARS Virus
tcggtgtcactagagaaaaccgtcc

SEQ ID NO: 130913 - DNA, 25 bp, SARS Virus
cggtgtcactagggaaaaccgtcca

SEQ ID NO: 130914 - DNA, 25 bp, SARS Virus
ggtgtcactagagaaaaccgtccag

SEQ ID NO: 130915 - DNA, 25 bp, SARS Virus
gtgtcactagaggaaaccgtccagg

SEQ ID NO: 130916 - DNA, 25 bp, SARS Virus
tgtcactagagagaaccgtccagga

SEQ ID NO: 130917 - DNA, 25 bp, SARS Virus
gtcactagagaagaccgtccaggaa

SEQ ID NO: 130918 - DNA, 25 bp, SARS Virus
tcactagagaaagccgtccaggaat

SEQ ID NO: 130919 - DNA, 25 bp, SARS Virus
cactagagaaaagcgtccaggaatt

SEQ ID NO: 130920 - DNA, 25 bp, SARS Virus
actagagaaaacggtccaggaatta

SEQ ID NO: 130921 - DNA, 25 bp, SARS Virus
ctagagaaaaccgtccaggaattac

SEQ ID NO: 130922 - DNA, 25 bp, SARS Virus
tagagaaaaccggccaggaattaca

SEQ ID NO: 130923 - DNA, 25 bp, SARS Virus
agagaaaaccgtgcaggaattacag

SEQ ID NO: 130924 - DNA, 25 bp, SARS Virus
gagaaaaccgtcgaggaattacagt

SEQ ID NO: 130925 - DNA, 25 bp, SARS Virus
agaaaaccgtccgggaattacagtg

SEQ ID NO: 130926 - DNA, 25 bp, SARS Virus
gaaaaccgtccaggaattacagtgt

SEQ ID NO: 130927 - DNA, 25 bp, SARS Virus
aaaaccgtccaggaattacagtgtc

SEQ ID NO: 130928 - DNA, 25 bp, SARS Virus
aaaccgtccagggattacagtgtcg

SEQ ID NO: 130929 - DNA, 25 bp, SARS Virus
aaccgtccaggagttacagtgtcgc

SEQ ID NO: 130930 - DNA, 25 bp, SARS Virus
accgtccaggaagtacagtgtcgcg

SEQ ID NO: 130931 - DNA, 25 bp, SARS Virus
ccgtccaggaatgacagtgtcgcgg

SEQ ID NO: 130932 - DNA, 25 bp, SARS Virus
cgtccaggaattgcagtgtcgcggg

SEQ ID NO: 130933 - DNA, 25 bp, SARS Virus
gtccaggaattagagtgtcgcggga

SEQ ID NO: 130934 - DNA, 25 bp, SARS Virus
tccaggaattacggtgtcgcgggat

SEQ ID NO: 130935 - DNA, 25 bp, SARS Virus
ccaggaattacagtgtcgcgggatc

SEQ ID NO: 130936 - DNA, 25 bp, SARS Virus
caggaattacagggtcgcgggatcc

SEQ ID NO: 130937 - DNA, 25 bp, SARS Virus
aggaattacagtgtcgcgggatccc

SEQ ID NO: 130938 - DNA, 25 bp, SARS Virus
ggaattacagtggcgcgggatccct

SEQ ID NO: 130939 - DNA, 25 bp, SARS Virus
gaattacagtgtggcgggatccctc

SEQ ID NO: 130940 - DNA, 25 bp, SARS Virus
aattacagtgtcgcgggatccctca

SEQ ID NO: 130941 - DNA, 25 bp, SARS Virus
attacagtgtcgggggatccctcac

SEQ ID NO: 130942 - DNA, 25 bp, SARS Virus
ttacagtgtcgcgggatccctcaca

SEQ ID NO: 130943 - DNA, 25 bp, SARS Virus
tacagtgtcgcgggatccctcacag

SEQ ID NO: 130944 - DNA, 25 bp, SARS Virus
acagtgtcgcgggatccctcacagg

SEQ ID NO: 130945 - DNA, 25 bp, SARS Virus
cagtgtcgcggggtccctcacaggc

SEQ ID NO: 130946 - DNA, 25 bp, SARS Virus
agtgtcgcgggagccctcacaggcc

SEQ ID NO: 130947 - DNA, 25 bp, SARS Virus
gtgtcgcgggatgcctcacaggccg

SEQ ID NO: 130948 - DNA, 25 bp, SARS Virus
tgtcgcgggatcgctcacaggccgg

SEQ ID NO: 130949 - DNA, 25 bp, SARS Virus
gtcgcgggatccgtcacaggccggt

SEQ ID NO: 130950 - DNA, 25 bp, SARS Virus
tcgcgggatcccgcacaggccggta

SEQ ID NO: 130951 - DNA, 25 bp, SARS Virus
cgcgggatccctgacaggccggtaa

SEQ ID NO: 130952 - DNA, 25 bp, SARS Virus
gcgggatccctcgcaggccggtaag

SEQ ID NO: 130953 - DNA, 25 bp, SARS Virus
cgggatccctcagaggccggtaagc

SEQ ID NO: 130954 - DNA, 25 bp, SARS Virus
gggatccctcacgggccggtaagcg

SEQ ID NO: 130955 - DNA, 25 bp, SARS Virus
ggatccctcacaggccggtaagcgt

SEQ ID NO: 130956 - DNA, 25 bp, SARS Virus
gatccctcacaggccggtaagcgtt

SEQ ID NO: 130957 - DNA, 25 bp, SARS Virus
atccctcacagggcggtaagcgttc

SEQ ID NO: 130958 - DNA, 25 bp, SARS Virus
tccctcacaggcgggtaagcgttca

SEQ ID NO: 130959 - DNA, 25 bp, SARS Virus
ccctcacaggccggtaagcgttcac

SEQ ID NO: 130960 - DNA, 25 bp, SARS Virus
cctcacaggccggtaagcgttcact

SEQ ID NO: 130961 - DNA, 25 bp, SARS Virus
ctcacaggccgggaagcgttcactg

SEQ ID NO: 130962 - DNA, 25 bp, SARS Virus
tcacaggccggtgagcgttcactgg

SEQ ID NO: 130963 - DNA, 25 bp, SARS Virus
cacaggccggtaggcgttcactggt

SEQ ID NO: 130964 - DNA, 25 bp, SARS Virus
acaggccggtaagcgttcactggtg

SEQ ID NO: 130965 - DNA, 25 bp, SARS Virus
caggccggtaagggttcactggtgc

SEQ ID NO: 130966 - DNA, 25 bp, SARS Virus
aggccggtaagcgttcactggtgct

SEQ ID NO: 130967 - DNA, 25 bp, SARS Virus
ggccggtaagcggtcactggtgctt

SEQ ID NO: 130968 - DNA, 25 bp, SARS Virus
gccggtaagcgtgcactggtgctta

SEQ ID NO: 130969 - DNA, 25 bp, SARS Virus
ccggtaagcgttgactggtgcttac

SEQ ID NO: 130970 - DNA, 25 bp, SARS Virus
cggtaagcgttcgctggtgcttact

SEQ ID NO: 130971 - DNA, 25 bp, SARS Virus
ggtaagcgttcagtggtgcttacta

SEQ ID NO: 130972 - DNA, 25 bp, SARS Virus
gtaagcgttcacgggtgcttactag

SEQ ID NO: 130973 - DNA, 25 bp, SARS Virus
taagcgttcactggtgcttactagt

SEQ ID NO: 130974 - DNA, 25 bp, SARS Virus
aagcgttcactggtgcttactagtg

SEQ ID NO: 130975 - DNA, 25 bp, SARS Virus
agcgttcactggggcttactagtgt

SEQ ID NO: 130976 - DNA, 25 bp, SARS Virus
gcgttcactggtgcttactagtgtc

SEQ ID NO: 130977 - DNA, 25 bp, SARS Virus
cgttcactggtggttactagtgtcg

SEQ ID NO: 130978 - DNA, 25 bp, SARS Virus
gttcactggtgcgtactagtgtcgt

SEQ ID NO: 130979 - DNA, 25 bp, SARS Virus
ttcactggtgctgactagtgtcgtg

SEQ ID NO: 130980 - DNA, 25 bp, SARS Virus
tcactggtgcttgctagtgtcgtgg

SEQ ID NO: 130981 - DNA, 25 bp, SARS Virus
cactggtgcttagtagtgtcgtggt

SEQ ID NO: 130982 - DNA, 25 bp, SARS Virus
actggtgcttacgagtgtcgtggtt

SEQ ID NO: 130983 - DNA, 25 bp, SARS Virus
ctggtgcttactggtgtcgtggtta

SEQ ID NO: 130984 - DNA, 25 bp, SARS Virus
tggtgcttactagtgtcgtggttac

SEQ ID NO: 130985 - DNA, 25 bp, SARS Virus
ggtgcttactagggtcgtggttact

SEQ ID NO: 130986 - DNA, 25 bp, SARS Virus
gtgcttactagtgtcgtggttactg

SEQ ID NO: 130987 - DNA, 25 bp, SARS Virus
tgcttactagtggcgtggttactgt

SEQ ID NO: 130988 - DNA, 25 bp, SARS Virus
gcttactagtgtggtggttactgtt

SEQ ID NO: 130989 - DNA, 25 bp, SARS Virus
cttactagtgtcgtggttactgttc

SEQ ID NO: 130990 - DNA, 25 bp, SARS Virus
ttactagtgtcggggttactgttca

SEQ ID NO: 130991 - DNA, 25 bp, SARS Virus
tactagtgtcgtggttactgttcaa

SEQ ID NO: 130992 - DNA, 25 bp, SARS Virus
actagtgtcgtggttactgttcaag

SEQ ID NO: 130993 - DNA, 25 bp, SARS Virus
ctagtgtcgtgggtactgttcaagt

SEQ ID NO: 130994 - DNA, 25 bp, SARS Virus
tagtgtcgtggtgactgttcaagtg

SEQ ID NO: 130995 - DNA, 25 bp, SARS Virus
agtgtcgtggttgctgttcaagtga

SEQ ID NO: 130996 - DNA, 25 bp, SARS Virus
gtgtcgtggttagtgttcaagtgaa

SEQ ID NO: 130997 - DNA, 25 bp, SARS Virus
tgtcgtggttacggttcaagtgaaa

SEQ ID NO: 130998 - DNA, 25 bp, SARS Virus
gtcgtggttactgttcaagtgaaag

SEQ ID NO: 130999 - DNA, 25 bp, SARS Virus
tcgtggttactggtcaagtgaaagg

SEQ ID NO: 131000 - DNA, 25 bp, SARS Virus
cgtggttactgtgcaagtgaaaggt

SEQ ID NO: 131001 - DNA, 25 bp, SARS Virus
gtggttactgttgaagtgaaaggta

SEQ ID NO: 131002 - DNA, 25 bp, SARS Virus
tggttactgttcgagtgaaaggtac

SEQ ID NO: 131003 - DNA, 25 bp, SARS Virus
ggttactgttcaggtgaaaggtact

SEQ ID NO: 131004 - DNA, 25 bp, SARS Virus
gttactgttcaagtgaaaggtactc

SEQ ID NO: 131005 - DNA, 25 bp, SARS Virus
ttactgttcaagggaaaggtactcg

SEQ ID NO: 131006 - DNA, 25 bp, SARS Virus
tactgttcaagtgaaaggtactcgc

SEQ ID NO: 131007 - DNA, 25 bp, SARS Virus
actgttcaagtggaaggtactcgcc

SEQ ID NO: 131008 - DNA, 25 bp, SARS Virus
ctgttcaagtgagaggtactcgcca

SEQ ID NO: 131009 - DNA, 25 bp, SARS Virus
tgttcaagtgaagggtactcgccag

SEQ ID NO: 131010 - DNA, 25 bp, SARS Virus
gttcaagtgaaaggtactcgccaga

SEQ ID NO: 131011 - DNA, 25 bp, SARS Virus
ttcaagtgaaaggtactcgccagac

SEQ ID NO: 131012 - DNA, 25 bp, SARS Virus
tcaagtgaaagggactcgccagacc

SEQ ID NO: 131013 - DNA, 25 bp, SARS Virus
caagtgaaaggtgctcgccagacca

SEQ ID NO: 131014 - DNA, 25 bp, SARS Virus
aagtgaaaggtagtcgccagaccag

SEQ ID NO: 131015 - DNA, 25 bp, SARS Virus
agtgaaaggtacgcgccagaccagt

SEQ ID NO: 131016 - DNA, 25 bp, SARS Virus
gtgaaaggtactggccagaccagtg

SEQ ID NO: 131017 - DNA, 25 bp, SARS Virus
tgaaaggtactcgccagaccagtgt

SEQ ID NO: 131018 - DNA, 25 bp, SARS Virus
gaaaggtactcggcagaccagtgtt

SEQ ID NO: 131019 - DNA, 25 bp, SARS Virus
aaaggtactcgcgagaccagtgtta

SEQ ID NO: 131020 - DNA, 25 bp, SARS Virus
aaggtactcgccggaccagtgttaa

SEQ ID NO: 131021 - DNA, 25 bp, SARS Virus
aggtactcgccagaccagtgttaac

SEQ ID NO: 131022 - DNA, 25 bp, SARS Virus
ggtactcgccaggccagtgttaaca

SEQ ID NO: 131023 - DNA, 25 bp, SARS Virus
gtactcgccagagcagtgttaacag

SEQ ID NO: 131024 - DNA, 25 bp, SARS Virus
tactcgccagacgagtgttaacagg

SEQ ID NO: 131025 - DNA, 25 bp, SARS Virus
actcgccagaccggtgttaacaggg

SEQ ID NO: 131026 - DNA, 25 bp, SARS Virus
ctcgccagaccagtgttaacagggg

SEQ ID NO: 131027 - DNA, 25 bp, SARS Virus
tcgccagaccagggttaacaggggg

SEQ ID NO: 131028 - DNA, 25 bp, SARS Virus
cgccagaccagtgttaacagggggc

SEQ ID NO: 131029 - DNA, 25 bp, SARS Virus
gccagaccagtggtaacagggggcc

SEQ ID NO: 131030 - DNA, 25 bp, SARS Virus
ccagaccagtgtgaacagggggcct

SEQ ID NO: 131031 - DNA, 25 bp, SARS Virus
cagaccagtgttgacagggggcctc

SEQ ID NO: 131032 - DNA, 25 bp, SARS Virus
agaccagtgttagcagggggcctct

SEQ ID NO: 131033 - DNA, 25 bp, SARS Virus
gaccagtgttaagagggggcctctc

SEQ ID NO: 131034 - DNA, 25 bp, SARS Virus
accagtgttaacggggggcctctcc

SEQ ID NO: 131035 - DNA, 25 bp, SARS Virus
ccagtgttaacagggggcctctccg

SEQ ID NO: 131036 - DNA, 25 bp, SARS Virus
cagtgttaacagggggcctctccgt

SEQ ID NO: 131037 - DNA, 25 bp, SARS Virus
agtgttaacagggggcctctccgtg

SEQ ID NO: 131038 - DNA, 25 bp, SARS Virus
gtgttaacagggggcctctccgtgt

SEQ ID NO: 131039 - DNA, 25 bp, SARS Virus
tgttaacagggggcctctccgtgta

SEQ ID NO: 131040 - DNA, 25 bp, SARS Virus
gttaacaggggggctctccgtgtaa

SEQ ID NO: 131041 - DNA, 25 bp, SARS Virus
ttaacagggggcgtctccgtgtaac

SEQ ID NO: 131042 - DNA, 25 bp, SARS Virus
taacagggggccgctccgtgtaact

SEQ ID NO: 131043 - DNA, 25 bp, SARS Virus
aacagggggcctgtccgtgtaactc

SEQ ID NO: 131044 - DNA, 25 bp, SARS Virus
acagggggcctcgccgtgtaactct

SEQ ID NO: 131045 - DNA, 25 bp, SARS Virus
cagggggcctctgcgtgtaactctt

SEQ ID NO: 131046 - DNA, 25 bp, SARS Virus
agggggcctctcggtgtaactcttc

SEQ ID NO: 131047 - DNA, 25 bp, SARS Virus
gggggcctctccgtgtaactcttct

SEQ ID NO: 131048 - DNA, 25 bp, SARS Virus
ggggcctctccgggtaactcttctt

SEQ ID NO: 131049 - DNA, 25 bp, SARS Virus
gggcctctccgtgtaactcttctta

SEQ ID NO: 131050 - DNA, 25 bp, SARS Virus
ggcctctccgtggaactcttcttac

SEQ ID NO: 131051 - DNA, 25 bp, SARS Virus
gcctctccgtgtgactcttcttaca

SEQ ID NO: 131052 - DNA, 25 bp, SARS Virus
cctctccgtgtagctcttcttacaa

SEQ ID NO: 131053 - DNA, 25 bp, SARS Virus
ctctccgtgtaagtcttcttacaaa

SEQ ID NO: 131054 - DNA, 25 bp, SARS Virus
tctccgtgtaacgcttcttacaaac

SEQ ID NO: 131055 - DNA, 25 bp, SARS Virus
ctccgtgtaactgttcttacaaaca

SEQ ID NO: 131056 - DNA, 25 bp, SARS Virus
tccgtgtaactcgtcttacaaacaa

SEQ ID NO: 131057 - DNA, 25 bp, SARS Virus
ccgtgtaactctgcttacaaacaaa

SEQ ID NO: 131058 - DNA, 25 bp, SARS Virus
cgtgtaactcttgttacaaacaaag

SEQ ID NO: 131059 - DNA, 25 bp, SARS Virus
gtgtaactcttcgtacaaacaaaga

SEQ ID NO: 131060 - DNA, 25 bp, SARS Virus
tgtaactcttctgacaaacaaagac

SEQ ID NO: 131061 - DNA, 25 bp, SARS Virus
gtaactcttcttgcaaacaaagacc

SEQ ID NO: 131062 - DNA, 25 bp, SARS Virus
taactcttcttagaaacaaagaccc

SEQ ID NO: 131063 - DNA, 25 bp, SARS Virus
aactcttcttacgaacaaagaccca

SEQ ID NO: 131064 - DNA, 25 bp, SARS Virus
actcttcttacagacaaagacccaa

SEQ ID NO: 131065 - DNA, 25 bp, SARS Virus
ctcttcttacaagcaaagacccaac

SEQ ID NO: 131066 - DNA, 25 bp, SARS Virus
tcttcttacaaagaaagacccaact

SEQ ID NO: 131067 - DNA, 25 bp, SARS Virus
cttcttacaaacgaagacccaactt

SEQ ID NO: 131068 - DNA, 25 bp, SARS Virus
ttcttacaaacagagacccaactta

SEQ ID NO: 131069 - DNA, 25 bp, SARS Virus
tcttacaaacaaggacccaacttac

SEQ ID NO: 131070 - DNA, 25 bp, SARS Virus
cttacaaacaaagacccaacttact

SEQ ID NO: 131071 - DNA, 25 bp, SARS Virus
ttacaaacaaaggcccaacttactg

SEQ ID NO: 131072 - DNA, 25 bp, SARS Virus
tacaaacaaagagccaacttactgg

SEQ ID NO: 131073 - DNA, 25 bp, SARS Virus
acaaacaaagacgcaacttactggt

SEQ ID NO: 131074 - DNA, 25 bp, SARS Virus
caaacaaagaccgaacttactggtg

SEQ ID NO: 131075 - DNA, 25 bp, SARS Virus
aaacaaagacccgacttactggtgt

SEQ ID NO: 131076 - DNA, 25 bp, SARS Virus
aacaaagacccagcttactggtgta

SEQ ID NO: 131077 - DNA, 25 bp, SARS Virus
acaaagacccaagttactggtgtaa

SEQ ID NO: 131078 - DNA, 25 bp, SARS Virus
caaagacccaacgtactggtgtaac

SEQ ID NO: 131079 - DNA, 25 bp, SARS Virus
aaagacccaactgactggtgtaact

SEQ ID NO: 131080 - DNA, 25 bp, SARS Virus
aagacccaacttgctggtgtaactc

SEQ ID NO: 131081 - DNA, 25 bp, SARS Virus
agacccaacttagtggtgtaactcg

SEQ ID NO: 131082 - DNA, 25 bp, SARS Virus
gacccaacttacgggtgtaactcgc

SEQ ID NO: 131083 - DNA, 25 bp, SARS Virus
acccaacttactggtgtaactcgcc

SEQ ID NO: 131084 - DNA, 25 bp, SARS Virus
cccaacttactggtgtaactcgccc

SEQ ID NO: 131085 - DNA, 25 bp, SARS Virus
ccaacttactggggtaactcgccca

SEQ ID NO: 131086 - DNA, 25 bp, SARS Virus
caacttactggtgtaactcgcccat

SEQ ID NO: 131087 - DNA, 25 bp, SARS Virus
aacttactggtggaactcgcccatg

SEQ ID NO: 131088 - DNA, 25 bp, SARS Virus
acttactggtgtgactcgcccatgc

SEQ ID NO: 131089 - DNA, 25 bp, SARS Virus
cttactggtgtagctcgcccatgct

SEQ ID NO: 131090 - DNA, 25 bp, SARS Virus
ttactggtgtaagtcgcccatgctc

SEQ ID NO: 131091 - DNA, 25 bp, SARS Virus
tactggtgtaacgcgcccatgctcg

SEQ ID NO: 131092 - DNA, 25 bp, SARS Virus
actggtgtaactggcccatgctcgt

SEQ ID NO: 131093 - DNA, 25 bp, SARS Virus
ctggtgtaactcgcccatgctcgtt

SEQ ID NO: 131094 - DNA, 25 bp, SARS Virus
tggtgtaactcggccatgctcgttt

SEQ ID NO: 131095 - DNA, 25 bp, SARS Virus
ggtgtaactcgcgcatgctcgtttg

SEQ ID NO: 131096 - DNA, 25 bp, SARS Virus
gtgtaactcgccgatgctcgtttgt

SEQ ID NO: 131097 - DNA, 25 bp, SARS Virus
tgtaactcgcccgtgctcgtttgtc

SEQ ID NO: 131098 - DNA, 25 bp, SARS Virus
gtaactcgcccaggctcgtttgtcg

SEQ ID NO: 131099 - DNA, 25 bp, SARS Virus
taactcgcccatgctcgtttgtcgg

SEQ ID NO: 131100 - DNA, 25 bp, SARS Virus
aactcgcccatggtcgtttgtcgga

SEQ ID NO: 131101 - DNA, 25 bp, SARS Virus
actcgcccatgcgcgtttgtcggac

SEQ ID NO: 131102 - DNA, 25 bp, SARS Virus
ctcgcccatgctggtttgtcggact

SEQ ID NO: 131103 - DNA, 25 bp, SARS Virus
tcgcccatgctcgtttgtcggactt

SEQ ID NO: 131104 - DNA, 25 bp, SARS Virus
cgcccatgctcggttgtcggacttc

SEQ ID NO: 131105 - DNA, 25 bp, SARS Virus
gcccatgctcgtgtgtcggacttcc

SEQ ID NO: 131106 - DNA, 25 bp, SARS Virus
cccatgctcgttggtcggacttcct

SEQ ID NO: 131107 - DNA, 25 bp, SARS Virus
ccatgctcgtttgtcggacttcctt

SEQ ID NO: 131108 - DNA, 25 bp, SARS Virus
catgctcgtttggcggacttccttc

SEQ ID NO: 131109 - DNA, 25 bp, SARS Virus
atgctcgtttgtgggacttccttcg

SEQ ID NO: 131110 - DNA, 25 bp, SARS Virus
tgctcgtttgtcggacttccttcgt

SEQ ID NO: 131111 - DNA, 25 bp, SARS Virus
gctcgtttgtcggacttccttcgtt

SEQ ID NO: 131112 - DNA, 25 bp, SARS Virus
ctcgtttgtcgggcttccttcgttg

SEQ ID NO: 131113 - DNA, 25 bp, SARS Virus
tcgtttgtcggagttccttcgttgc

SEQ ID NO: 131114 - DNA, 25 bp, SARS Virus
cgtttgtcggacgtccttcgttgct

SEQ ID NO: 131115 - DNA, 25 bp, SARS Virus
gtttgtcggactgccttcgttgctt

SEQ ID NO: 131116 - DNA, 25 bp, SARS Virus
tttgtcggacttgcttcgttgcttc

SEQ ID NO: 131117 - DNA, 25 bp, SARS Virus
ttgtcggacttcgttcgttgcttca

SEQ ID NO: 131118 - DNA, 25 bp, SARS Virus
tgtcggacttccgtcgttgcttcat

SEQ ID NO: 131119 - DNA, 25 bp, SARS Virus
gtcggacttcctgcgttgcttcatc

SEQ ID NO: 131120 - DNA, 25 bp, SARS Virus
tcggacttccttggttgcttcatcg

SEQ ID NO: 131121 - DNA, 25 bp, SARS Virus
cggacttccttcgttgcttcatcga

SEQ ID NO: 131122 - DNA, 25 bp, SARS Virus
ggacttccttcggtgcttcatcgat

SEQ ID NO: 131123 - DNA, 25 bp, SARS Virus
gacttccttcgtggcttcatcgatt

SEQ ID NO: 131124 - DNA, 25 bp, SARS Virus
acttccttcgttgcttcatcgattc

SEQ ID NO: 131125 - DNA, 25 bp, SARS Virus
cttccttcgttggttcatcgattcg

SEQ ID NO: 131126 - DNA, 25 bp, SARS Virus
ttccttcgttgcgtcatcgattcgg

SEQ ID NO: 131127 - DNA, 25 bp, SARS Virus
tccttcgttgctgcatcgattcggt

SEQ ID NO: 131128 - DNA, 25 bp, SARS Virus
ccttcgttgcttgatcgattcggtg

SEQ ID NO: 131129 - DNA, 25 bp, SARS Virus
cttcgttgcttcgtcgattcggtgt

SEQ ID NO: 131130 - DNA, 25 bp, SARS Virus
ttcgttgcttcagcgattcggtgta

SEQ ID NO: 131131 - DNA, 25 bp, SARS Virus
tcgttgcttcatggattcggtgtag

SEQ ID NO: 131132 - DNA, 25 bp, SARS Virus
cgttgcttcatcgattcggtgtagt

SEQ ID NO: 131133 - DNA, 25 bp, SARS Virus
gttgcttcatcggttcggtgtagtt

SEQ ID NO: 131134 - DNA, 25 bp, SARS Virus
ttgcttcatcgagtcggtgtagttc

SEQ ID NO: 131135 - DNA, 25 bp, SARS Virus
tgcttcatcgatgcggtgtagttcg

SEQ ID NO: 131136 - DNA, 25 bp, SARS Virus
gcttcatcgattgggtgtagttcgg

SEQ ID NO: 131137 - DNA, 25 bp, SARS Virus
cttcatcgattcggtgtagttcgga

SEQ ID NO: 131138 - DNA, 25 bp, SARS Virus
ttcatcgattcggtgtagttcggat

SEQ ID NO: 131139 - DNA, 25 bp, SARS Virus
tcatcgattcggggtagttcggatg

SEQ ID NO: 131140 - DNA, 25 bp, SARS Virus
catcgattcggtgtagttcggatgt

SEQ ID NO: 131141 - DNA, 25 bp, SARS Virus
atcgattcggtggagttcggatgtt

SEQ ID NO: 131142 - DNA, 25 bp, SARS Virus
tcgattcggtgtggttcggatgtta

SEQ ID NO: 131143 - DNA, 25 bp, SARS Virus
cgattcggtgtagttcggatgttat

SEQ ID NO: 131144 - DNA, 25 bp, SARS Virus
gattcggtgtaggtcggatgttatg

SEQ ID NO: 131145 - DNA, 25 bp, SARS Virus
attcggtgtagtgcggatgttatgt

SEQ ID NO: 131146 - DNA, 25 bp, SARS Virus
ttcggtgtagttgggatgttatgtt

SEQ ID NO: 131147 - DNA, 25 bp, SARS Virus
tcggtgtagttcggatgttatgttc

SEQ ID NO: 131148 - DNA, 25 bp, SARS Virus
cggtgtagttcggatgttatgttcg

SEQ ID NO: 131149 - DNA, 25 bp, SARS Virus
ggtgtagttcgggtgttatgttcgg

SEQ ID NO: 131150 - DNA, 25 bp, SARS Virus
gtgtagttcggaggttatgttcggt

SEQ ID NO: 131151 - DNA, 25 bp, SARS Virus
tgtagttcggatgttatgttcggta

SEQ ID NO: 131152 - DNA, 25 bp, SARS Virus
gtagttcggatggtatgttcggtaa

SEQ ID NO: 131153 - DNA, 25 bp, SARS Virus
tagttcggatgtgatgttcggtaac

SEQ ID NO: 131154 - DNA, 25 bp, SARS Virus
agttcggatgttgtgttcggtaacg

SEQ ID NO: 131155 - DNA, 25 bp, SARS Virus
gttcggatgttaggttcggtaacgt

SEQ ID NO: 131156 - DNA, 25 bp, SARS Virus
ttcggatgttatgttcggtaacgtt

SEQ ID NO: 131157 - DNA, 25 bp, SARS Virus
tcggatgttatggtcggtaacgtta

SEQ ID NO: 131158 - DNA, 25 bp, SARS Virus
cggatgttatgtgcggtaacgttag

SEQ ID NO: 131159 - DNA, 25 bp, SARS Virus
ggatgttatgttgggtaacgttagc

SEQ ID NO: 131160 - DNA, 25 bp, SARS Virus
gatgttatgttcggtaacgttagcg

SEQ ID NO: 131161 - DNA, 25 bp, SARS Virus
atgttatgttcggtaacgttagcgt

SEQ ID NO: 131162 - DNA, 25 bp, SARS Virus
tgttatgttcgggaacgttagcgtt

SEQ ID NO: 131163 - DNA, 25 bp, SARS Virus
gttatgttcggtgacgttagcgtta

SEQ ID NO: 131164 - DNA, 25 bp, SARS Virus
ttatgttcggtagcgttagcgttag

SEQ ID NO: 131165 - DNA, 25 bp, SARS Virus
tatgttcggtaaggttagcgttagg

SEQ ID NO: 131166 - DNA, 25 bp, SARS Virus
atgttcggtaacgttagcgttaggg

SEQ ID NO: 131167 - DNA, 25 bp, SARS Virus
tgttcggtaacggtagcgttagggc

SEQ ID NO: 131168 - DNA, 25 bp, SARS Virus
gttcggtaacgtgagcgttagggcg

SEQ ID NO: 131169 - DNA, 25 bp, SARS Virus
ttcggtaacgttggcgttagggcgg

SEQ ID NO: 131170 - DNA, 25 bp, SARS Virus
tcggtaacgttagcgttagggcggt

SEQ ID NO: 131171 - DNA, 25 bp, SARS Virus
cggtaacgttagggttagggcggtc

SEQ ID NO: 131172 - DNA, 25 bp, SARS Virus
ggtaacgttagcgttagggcggtca

SEQ ID NO: 131173 - DNA, 25 bp, SARS Virus
gtaacgttagcggtagggcggtcag

SEQ ID NO: 131174 - DNA, 25 bp, SARS Virus
taacgttagcgtgagggcggtcagt

SEQ ID NO: 131175 - DNA, 25 bp, SARS Virus
aacgttagcgttggggcggtcagtg

SEQ ID NO: 131176 - DNA, 25 bp, SARS Virus
acgttagcgttagggcggtcagtgg

SEQ ID NO: 131177 - DNA, 25 bp, SARS Virus
cgttagcgttagggcggtcagtggg

SEQ ID NO: 131178 - DNA, 25 bp, SARS Virus
gttagcgttagggcggtcagtgggt

SEQ ID NO: 131179 - DNA, 25 bp, SARS Virus
ttagcgttaggggggtcagtgggtt

SEQ ID NO: 131180 - DNA, 25 bp, SARS Virus
tagcgttagggcggtcagtgggtta

SEQ ID NO: 131181 - DNA, 25 bp, SARS Virus
agcgttagggcggtcagtgggttaa

SEQ ID NO: 131182 - DNA, 25 bp, SARS Virus
gcgttagggcgggcagtgggttaat

SEQ ID NO: 131183 - DNA, 25 bp, SARS Virus
cgttagggcggtgagtgggttaatt

SEQ ID NO: 131184 - DNA, 25 bp, SARS Virus
gttagggcggtcggtgggttaatta

SEQ ID NO: 131185 - DNA, 25 bp, SARS Virus
ttagggcggtcagtgggttaattaa

SEQ ID NO: 131186 - DNA, 25 bp, SARS Virus
tagggcggtcagggggttaattaag

SEQ ID NO: 131187 - DNA, 25 bp, SARS Virus
agggcggtcagtgggttaattaaga

SEQ ID NO: 131188 - DNA, 25 bp, SARS Virus
gggcggtcagtgggttaattaagac

SEQ ID NO: 131189 - DNA, 25 bp, SARS Virus
ggcggtcagtgggttaattaagaca

SEQ ID NO: 131190 - DNA, 25 bp, SARS Virus
gcggtcagtggggtaattaagacat

SEQ ID NO: 131191 - DNA, 25 bp, SARS Virus
cggtcagtgggtgaattaagacatc

SEQ ID NO: 131192 - DNA, 25 bp, SARS Virus
ggtcagtgggttgattaagacatct

SEQ ID NO: 131193 - DNA, 25 bp, SARS Virus
gtcagtgggttagttaagacatctg

SEQ ID NO: 131194 - DNA, 25 bp, SARS Virus
tcagtgggttaagtaagacatctgt

SEQ ID NO: 131195 - DNA, 25 bp, SARS Virus
cagtgggttaatgaagacatctgtc

SEQ ID NO: 131196 - DNA, 25 bp, SARS Virus
agtgggttaattgagacatctgtcg

SEQ ID NO: 131197 - DNA, 25 bp, SARS Virus
gtgggttaattaggacatctgtcgt

SEQ ID NO: 131198 - DNA, 25 bp, SARS Virus
tgggttaattaagacatctgtcgtc

SEQ ID NO: 131199 - DNA, 25 bp, SARS Virus
gggttaattaaggcatctgtcgtcg

SEQ ID NO: 131200 - DNA, 25 bp, SARS Virus
ggttaattaagagatctgtcgtcgt

SEQ ID NO: 131201 - DNA, 25 bp, SARS Virus
gttaattaagacgtctgtcgtcgtt

SEQ ID NO: 131202 - DNA, 25 bp, SARS Virus
ttaattaagacagctgtcgtcgttc

SEQ ID NO: 131203 - DNA, 25 bp, SARS Virus
taattaagacatgtgtcgtcgttcg

SEQ ID NO: 131204 - DNA, 25 bp, SARS Virus
aattaagacatcggtcgtcgttcgt

SEQ ID NO: 131205 - DNA, 25 bp, SARS Virus
attaagacatctgtcgtcgttcgtg

SEQ ID NO: 131206 - DNA, 25 bp, SARS Virus
ttaagacatctggcgtcgttcgtgt

SEQ ID NO: 131207 - DNA, 25 bp, SARS Virus
taagacatctgtggtcgttcgtgtt

SEQ ID NO: 131208 - DNA, 25 bp, SARS Virus
aagacatctgtcgtcgttcgtgttt

SEQ ID NO: 131209 - DNA, 25 bp, SARS Virus
agacatctgtcggcgttcgtgtttt

SEQ ID NO: 131210 - DNA, 25 bp, SARS Virus
gacatctgtcgtggttcgtgttttg

SEQ ID NO: 131211 - DNA, 25 bp, SARS Virus
acatctgtcgtcgttcgtgttttgt

SEQ ID NO: 131212 - DNA, 25 bp, SARS Virus
catctgtcgtcggtcgtgttttgtt

SEQ ID NO: 131213 - DNA, 25 bp, SARS Virus
atctgtcgtcgtgcgtgttttgttc

SEQ ID NO: 131214 - DNA, 25 bp, SARS Virus
tctgtcgtcgttggtgttttgttcg

SEQ ID NO: 131215 - DNA, 25 bp, SARS Virus
ctgtcgtcgttcgtgttttgttcgt

SEQ ID NO: 131216 - DNA, 25 bp, SARS Virus
tgtcgtcgttcgggttttgttcgtt

SEQ ID NO: 131217 - DNA, 25 bp, SARS Virus
gtcgtcgttcgtgttttgttcgttc

SEQ ID NO: 131218 - DNA, 25 bp, SARS Virus
tcgtcgttcgtggtttgttcgttca

SEQ ID NO: 131219 - DNA, 25 bp, SARS Virus
cgtcgttcgtgtgttgttcgttcac

SEQ ID NO: 131220 - DNA, 25 bp, SARS Virus
gtcgttcgtgttgtgttcgttcaca

SEQ ID NO: 131221 - DNA, 25 bp, SARS Virus
tcgttcgtgtttggttcgttcacaa

SEQ ID NO: 131222 - DNA, 25 bp, SARS Virus
cgttcgtgttttgttcgttcacaat

SEQ ID NO: 131223 - DNA, 25 bp, SARS Virus
gttcgtgttttggtcgttcacaatg

SEQ ID NO: 131224 - DNA, 25 bp, SARS Virus
ttcgtgttttgtgcgttcacaatga

SEQ ID NO: 131225 - DNA, 25 bp, SARS Virus
tcgtgttttgttggttcacaatgac

SEQ ID NO: 131226 - DNA, 25 bp, SARS Virus
cgtgttttgttcgttcacaatgacc

SEQ ID NO: 131227 - DNA, 25 bp, SARS Virus
gtgttttgttcggtcacaatgaccg

SEQ ID NO: 131228 - DNA, 25 bp, SARS Virus
tgttttgttcgtgcacaatgaccgg

SEQ ID NO: 131229 - DNA, 25 bp, SARS Virus
gttttgttcgttgacaatgaccggt

SEQ ID NO: 131230 - DNA, 25 bp, SARS Virus
ttttgttcgttcgcaatgaccggtg

SEQ ID NO: 131231 - DNA, 25 bp, SARS Virus
tttgttcgttcagaatgaccggtgt

SEQ ID NO: 131232 - DNA, 25 bp, SARS Virus
ttgttcgttcacgatgaccggtgtt

SEQ ID NO: 131233 - DNA, 25 bp, SARS Virus
tgttcgttcacagtgaccggtgttc

SEQ ID NO: 131234 - DNA, 25 bp, SARS Virus
gttcgttcacaaggaccggtgttct

SEQ ID NO: 131235 - DNA, 25 bp, SARS Virus
ttcgttcacaatgaccggtgttctc

SEQ ID NO: 131236 - DNA, 25 bp, SARS Virus
tcgttcacaatggccggtgttctcg

SEQ ID NO: 131237 - DNA, 25 bp, SARS Virus
cgttcacaatgagcggtgttctcgg

SEQ ID NO: 131238 - DNA, 25 bp, SARS Virus
gttcacaatgacgggtgttctcggt

SEQ ID NO: 131239 - DNA, 25 bp, SARS Virus
ttcacaatgaccggtgttctcggtc

SEQ ID NO: 131240 - DNA, 25 bp, SARS Virus
tcacaatgaccggtgttctcggtct

SEQ ID NO: 131241 - DNA, 25 bp, SARS Virus
cacaatgaccggggttctcggtctc

SEQ ID NO: 131242 - DNA, 25 bp, SARS Virus
acaatgaccggtgttctcggtctcc

SEQ ID NO: 131243 - DNA, 25 bp, SARS Virus
caatgaccggtggtctcggtctcct

SEQ ID NO: 131244 - DNA, 25 bp, SARS Virus
aatgaccggtgtgctcggtctcctt

SEQ ID NO: 131245 - DNA, 25 bp, SARS Virus
atgaccggtgttgtcggtctccttt

SEQ ID NO: 131246 - DNA, 25 bp, SARS Virus
tgaccggtgttcgcggtctcctttt

SEQ ID NO: 131247 - DNA, 25 bp, SARS Virus
gaccggtgttctgggtctccttttg

SEQ ID NO: 131248 - DNA, 25 bp, SARS Virus
accggtgttctcggtctccttttgt

SEQ ID NO: 131249 - DNA, 25 bp, SARS Virus
ccggtgttctcggtctccttttgtt

SEQ ID NO: 131250 - DNA, 25 bp, SARS Virus
cggtgttctcgggctccttttgttc

SEQ ID NO: 131251 - DNA, 25 bp, SARS Virus
ggtgttctcggtgtccttttgttcg

SEQ ID NO: 131252 - DNA, 25 bp, SARS Virus
gtgttctcggtcgccttttgttcga

SEQ ID NO: 131253 - DNA, 25 bp, SARS Virus
tgttctcggtctgcttttgttcgaa

SEQ ID NO: 131254 - DNA, 25 bp, SARS Virus
gttctcggtctcgttttgttcgaaa

SEQ ID NO: 131255 - DNA, 25 bp, SARS Virus
ttctcggtctccgtttgttcgaaat

SEQ ID NO: 131256 - DNA, 25 bp, SARS Virus
tctcggtctcctgttgttcgaaata

SEQ ID NO: 131257 - DNA, 25 bp, SARS Virus
ctcggtctccttgtgttcgaaataa

SEQ ID NO: 131258 - DNA, 25 bp, SARS Virus
tcggtctcctttggttcgaaataat

SEQ ID NO: 131259 - DNA, 25 bp, SARS Virus
cggtctccttttgttcgaaataata

SEQ ID NO: 131260 - DNA, 25 bp, SARS Virus
ggtctccttttggtcgaaataatac

SEQ ID NO: 131261 - DNA, 25 bp, SARS Virus
gtctccttttgtgcgaaataataca

SEQ ID NO: 131262 - DNA, 25 bp, SARS Virus
tctccttttgttggaaataatacat

SEQ ID NO: 131263 - DNA, 25 bp, SARS Virus
ctccttttgttcgaaataatacatg

SEQ ID NO: 131264 - DNA, 25 bp, SARS Virus
tccttttgttcggaataatacatgt

SEQ ID NO: 131265 - DNA, 25 bp, SARS Virus
ccttttgttcgagataatacatgtt

SEQ ID NO: 131266 - DNA, 25 bp, SARS Virus
cttttgttcgaagtaatacatgttt

SEQ ID NO: 131267 - DNA, 25 bp, SARS Virus
ttttgttcgaaagaatacatgtttt

SEQ ID NO: 131268 - DNA, 25 bp, SARS Virus
tttgttcgaaatgatacatgttttt

SEQ ID NO: 131269 - DNA, 25 bp, SARS Virus
ttgttcgaaatagtacatgtttttg

SEQ ID NO: 131270 - DNA, 25 bp, SARS Virus
tgttcgaaataagacatgtttttgg

SEQ ID NO: 131271 - DNA, 25 bp, SARS Virus
gttcgaaataatgcatgtttttgga

SEQ ID NO: 131272 - DNA, 25 bp, SARS Virus
ttcgaaataatagatgtttttggac

SEQ ID NO: 131273 - DNA, 25 bp, SARS Virus
tcgaaataatacgtgtttttggaca

SEQ ID NO: 131274 - DNA, 25 bp, SARS Virus
cgaaataatacaggtttttggacaa

SEQ ID NO: 131275 - DNA, 25 bp, SARS Virus
gaaataatacatgtttttggacaag

SEQ ID NO: 131276 - DNA, 25 bp, SARS Virus
aaataatacatggttttggacaagg

SEQ ID NO: 131277 - DNA, 25 bp, SARS Virus
aataatacatgtgtttggacaaggc

SEQ ID NO: 131278 - DNA, 25 bp, SARS Virus
ataatacatgttgttggacaaggct

SEQ ID NO: 131279 - DNA, 25 bp, SARS Virus
taatacatgtttgtggacaaggcta

SEQ ID NO: 131280 - DNA, 25 bp, SARS Virus
aatacatgttttgggacaaggctaa

SEQ ID NO: 131281 - DNA, 25 bp, SARS Virus
atacatgtttttggacaaggctaat

SEQ ID NO: 131282 - DNA, 25 bp, SARS Virus
tacatgtttttggacaaggctaatc

SEQ ID NO: 131283 - DNA, 25 bp, SARS Virus
acatgtttttgggcaaggctaatct

SEQ ID NO: 131284 - DNA, 25 bp, SARS Virus
catgtttttggagaaggctaatctt

SEQ ID NO: 131285 - DNA, 25 bp, SARS Virus
atgtttttggacgaggctaatctta

SEQ ID NO: 131286 - DNA, 25 bp, SARS Virus
tgtttttggacagggctaatcttat

SEQ ID NO: 131287 - DNA, 25 bp, SARS Virus
gtttttggacaaggctaatcttatc

SEQ ID NO: 131288 - DNA, 25 bp, SARS Virus
tttttggacaaggctaatcttatcc

SEQ ID NO: 131289 - DNA, 25 bp, SARS Virus
ttttggacaagggtaatcttatccg

SEQ ID NO: 131290 - DNA, 25 bp, SARS Virus
tttggacaaggcgaatcttatccgt

SEQ ID NO: 131291 - DNA, 25 bp, SARS Virus
ttggacaaggctgatcttatccgtt

SEQ ID NO: 131292 - DNA, 25 bp, SARS Virus
tggacaaggctagtcttatccgttt

SEQ ID NO: 131293 - DNA, 25 bp, SARS Virus
ggacaaggctaagcttatccgttta

SEQ ID NO: 131294 - DNA, 25 bp, SARS Virus
gacaaggctaatgttatccgtttaa

SEQ ID NO: 131295 - DNA, 25 bp, SARS Virus
acaaggctaatcgtatccgtttaac

SEQ ID NO: 131296 - DNA, 25 bp, SARS Virus
caaggctaatctgatccgtttaaca

SEQ ID NO: 131297 - DNA, 25 bp, SARS Virus
aaggctaatcttgtccgtttaacat

SEQ ID NO: 131298 - DNA, 25 bp, SARS Virus
aggctaatcttagccgtttaacatc

SEQ ID NO: 131299 - DNA, 25 bp, SARS Virus
ggctaatcttatgcgtttaacatca

SEQ ID NO: 131300 - DNA, 25 bp, SARS Virus
gctaatcttatcggtttaacatcat

SEQ ID NO: 131301 - DNA, 25 bp, SARS Virus
ctaatcttatccgtttaacatcatt

SEQ ID NO: 131302 - DNA, 25 bp, SARS Virus
taatcttatccggttaacatcattg

SEQ ID NO: 131303 - DNA, 25 bp, SARS Virus
aatcttatccgtgtaacatcattgt

SEQ ID NO: 131304 - DNA, 25 bp, SARS Virus
atcttatccgttgaacatcattgta

SEQ ID NO: 131305 - DNA, 25 bp, SARS Virus
aaaggttatgccttcgccaacatac

SEQ ID NO: 131306 - DNA, 25 bp, SARS Virus
aaggttatgccatcgccaacatacg

SEQ ID NO: 131307 - DNA, 25 bp, SARS Virus
aggttatgccattgccaacatacgt

SEQ ID NO: 131308 - DNA, 25 bp, SARS Virus
ggttatgccatctccaacatacgtc

SEQ ID NO: 131309 - DNA, 25 bp, SARS Virus
gttatgccatcgtcaacatacgtcg

SEQ ID NO: 131310 - DNA, 25 bp, SARS Virus
ttatgccatcgctaacatacgtcgt

SEQ ID NO: 131311 - DNA, 25 bp, SARS Virus
tatgccatcgcctacatacgtcgtt

SEQ ID NO: 131312 - DNA, 25 bp, SARS Virus
atgccatcgccatcatacgtcgttt

SEQ ID NO: 131313 - DNA, 25 bp, SARS Virus
tgccatcgccaatatacgtcgtttt

SEQ ID NO: 131314 - DNA, 25 bp, SARS Virus
gccatcgccaacttacgtcgttttg

SEQ ID NO: 131315 - DNA, 25 bp, SARS Virus
ccatcgccaacatacgtcgttttgg

SEQ ID NO: 131316 - DNA, 25 bp, SARS Virus
catcgccaacattcgtcgttttgga

SEQ ID NO: 131317 - DNA, 25 bp, SARS Virus
atcgccaacatatgtcgttttggac

SEQ ID NO: 131318 - DNA, 25 bp, SARS Virus
tcgccaacatacttcgttttggact

SEQ ID NO: 131319 - DNA, 25 bp, SARS Virus
cgccaacatacgtcgttttggactt

SEQ ID NO: 131320 - DNA, 25 bp, SARS Virus
gccaacatacgttgttttggactta

SEQ ID NO: 131321 - DNA, 25 bp, SARS Virus
ccaacatacgtctttttggacttag

SEQ ID NO: 131322 - DNA, 25 bp, SARS Virus
caacatacgtcgttttggacttagt

SEQ ID NO: 131323 - DNA, 25 bp, SARS Virus
aacatacgtcgttttggacttagtc

SEQ ID NO: 131324 - DNA, 25 bp, SARS Virus
acatacgtcgttttggacttagtca

SEQ ID NO: 131325 - DNA, 25 bp, SARS Virus
catacgtcgttttggacttagtcac

SEQ ID NO: 131326 - DNA, 25 bp, SARS Virus
atacgtcgtttttgacttagtcacg

SEQ ID NO: 131327 - DNA, 25 bp, SARS Virus
tacgtcgttttgtacttagtcacgg

SEQ ID NO: 131328 - DNA, 25 bp, SARS Virus
acgtcgttttggtcttagtcacgga

SEQ ID NO: 131329 - DNA, 25 bp, SARS Virus
cgtcgttttggatttagtcacggat

SEQ ID NO: 131330 - DNA, 25 bp, SARS Virus
gtcgttttggacttagtcacggatg

SEQ ID NO: 131331 - DNA, 25 bp, SARS Virus
tcgttttggacttagtcacggatgt

SEQ ID NO: 131332 - DNA, 25 bp, SARS Virus
cgttttggactttgtcacggatgtg

SEQ ID NO: 131333 - DNA, 25 bp, SARS Virus
gttttggacttattcacggatgtgc

SEQ ID NO: 131334 - DNA, 25 bp, SARS Virus
ttttggacttagtcacggatgtgcg

SEQ ID NO: 131335 - DNA, 25 bp, SARS Virus
tttggacttagttacggatgtgcga

SEQ ID NO: 131336 - DNA, 25 bp, SARS Virus
ttggacttagtctcggatgtgcgac

SEQ ID NO: 131337 - DNA, 25 bp, SARS Virus
tggacttagtcatggatgtgcgacg

SEQ ID NO: 131338 - DNA, 25 bp, SARS Virus
ggacttagtcactgatgtgcgacgc

SEQ ID NO: 131339 - DNA, 25 bp, SARS Virus
gacttagtcacgtatgtgcgacgct

SEQ ID NO: 131340 - DNA, 25 bp, SARS Virus
acttagtcacggttgtgcgacgctg

SEQ ID NO: 131341 - DNA, 25 bp, SARS Virus
cttagtcacggatgtgcgacgctgc

SEQ ID NO: 131342 - DNA, 25 bp, SARS Virus
ttagtcacggatttgcgacgctgcg

SEQ ID NO: 131343 - DNA, 25 bp, SARS Virus
tagtcacggatgtgcgacgctgcga

SEQ ID NO: 131344 - DNA, 25 bp, SARS Virus
agtcacggatgttcgacgctgcgag

SEQ ID NO: 131345 - DNA, 25 bp, SARS Virus
gtcacggatgtgtgacgctgcgagg

SEQ ID NO: 131346 - DNA, 25 bp, SARS Virus
tcacggatgtgctacgctgcgagga

SEQ ID NO: 131347 - DNA, 25 bp, SARS Virus
cacggatgtgcgtcgctgcgaggat

SEQ ID NO: 131348 - DNA, 25 bp, SARS Virus
acggatgtgcgatgctgcgaggatt

SEQ ID NO: 131349 - DNA, 25 bp, SARS Virus
cggatgtgcgactctgcgaggatta

SEQ ID NO: 131350 - DNA, 25 bp, SARS Virus
ggatgtgcgacgttgcgaggattaa

SEQ ID NO: 131351 - DNA, 25 bp, SARS Virus
gatgtgcgacgctgcgaggattaaa

SEQ ID NO: 131352 - DNA, 25 bp, SARS Virus
atgtgcgacgcttcgaggattaaac

SEQ ID NO: 131353 - DNA, 25 bp, SARS Virus
tgtgcgacgctgtgaggattaaaca

SEQ ID NO: 131354 - DNA, 25 bp, SARS Virus
gtgcgacgctgctaggattaaacat

SEQ ID NO: 131355 - DNA, 25 bp, SARS Virus
tgcgacgctgcgtggattaaacatt

SEQ ID NO: 131356 - DNA, 25 bp, SARS Virus
gcgacgctgcgatgattaaacatta

SEQ ID NO: 131357 - DNA, 25 bp, SARS Virus
cgacgctgcgagtattaaacattat

SEQ ID NO: 131358 - DNA, 25 bp, SARS Virus
gacgctgcgaggtttaaacattatt

SEQ ID NO: 131359 - DNA, 25 bp, SARS Virus
acgctgcgaggattaaacattattc

SEQ ID NO: 131360 - DNA, 25 bp, SARS Virus
cgctgcgaggattaaacattattct

SEQ ID NO: 131361 - DNA, 25 bp, SARS Virus
gctgcgaggatttaacattattctt

SEQ ID NO: 131362 - DNA, 25 bp, SARS Virus
ctgcgaggattatacattattcttt

SEQ ID NO: 131363 - DNA, 25 bp, SARS Virus
tgcgaggattaatcattattctttc

SEQ ID NO: 131364 - DNA, 25 bp, SARS Virus
gcgaggattaaatattattctttcg

SEQ ID NO: 131365 - DNA, 25 bp, SARS Virus
cgaggattaaactttattctttcgc

SEQ ID NO: 131366 - DNA, 25 bp, SARS Virus
gaggattaaacattattctttcgca

SEQ ID NO: 131367 - DNA, 25 bp, SARS Virus
aggattaaacattattctttcgcaa

SEQ ID NO: 131368 - DNA, 25 bp, SARS Virus
ggattaaacatttttctttcgcaag

SEQ ID NO: 131369 - DNA, 25 bp, SARS Virus
gattaaacattattctttcgcaagc

SEQ ID NO: 131370 - DNA, 25 bp, SARS Virus
attaaacattattctttcgcaagca

SEQ ID NO: 131371 - DNA, 25 bp, SARS Virus
ttaaacattattttttcgcaagcac

SEQ ID NO: 131372 - DNA, 25 bp, SARS Virus
taaacattattctttcgcaagcact

SEQ ID NO: 131373 - DNA, 25 bp, SARS Virus
aaacattattctttcgcaagcacta

SEQ ID NO: 131374 - DNA, 25 bp, SARS Virus
aacattattctttcgcaagcactac

SEQ ID NO: 131375 - DNA, 25 bp, SARS Virus
acattattcttttgcaagcactaca

SEQ ID NO: 131376 - DNA, 25 bp, SARS Virus
cattattctttctcaagcactacat

SEQ ID NO: 131377 - DNA, 25 bp, SARS Virus
attattctttcgtaagcactacatc

SEQ ID NO: 131378 - DNA, 25 bp, SARS Virus
ttattctttcgctagcactacatcg

SEQ ID NO: 131379 - DNA, 25 bp, SARS Virus
tattctttcgcatgcactacatcgg

SEQ ID NO: 131380 - DNA, 25 bp, SARS Virus
attctttcgcaatcactacatcggt

SEQ ID NO: 131381 - DNA, 25 bp, SARS Virus
ttctttcgcaagtactacatcggtg

SEQ ID NO: 131382 - DNA, 25 bp, SARS Virus
tctttcgcaagctctacatcggtgt

SEQ ID NO: 131383 - DNA, 25 bp, SARS Virus
ctttcgcaagcattacatcggtgtc

SEQ ID NO: 131384 - DNA, 25 bp, SARS Virus
tttcgcaagcactacatcggtgtca

SEQ ID NO: 131385 - DNA, 25 bp, SARS Virus
ttcgcaagcacttcatcggtgtcac

SEQ ID NO: 131386 - DNA, 25 bp, SARS Virus
tcgcaagcactatatcggtgtcact

SEQ ID NO: 131387 - DNA, 25 bp, SARS Virus
cgcaagcactacttcggtgtcacta

SEQ ID NO: 131388 - DNA, 25 bp, SARS Virus
gcaagcactacatcggtgtcactag

SEQ ID NO: 131389 - DNA, 25 bp, SARS Virus
caagcactacattggtgtcactaga

SEQ ID NO: 131390 - DNA, 25 bp, SARS Virus
aagcactacatctgtgtcactagag

SEQ ID NO: 131391 - DNA, 25 bp, SARS Virus
agcactacatcgttgtcactagaga

SEQ ID NO: 131392 - DNA, 25 bp, SARS Virus
gcactacatcggtgtcactagagaa

SEQ ID NO: 131393 - DNA, 25 bp, SARS Virus
cactacatcggtttcactagagaaa

SEQ ID NO: 131394 - DNA, 25 bp, SARS Virus
actacatcggtgtcactagagaaaa

SEQ ID NO: 131395 - DNA, 25 bp, SARS Virus
ctacatcggtgttactagagaaaac

SEQ ID NO: 131396 - DNA, 25 bp, SARS Virus
tacatcggtgtctctagagaaaacc

SEQ ID NO: 131397 - DNA, 25 bp, SARS Virus
acatcggtgtcattagagaaaaccg

SEQ ID NO: 131398 - DNA, 25 bp, SARS Virus
catcggtgtcactagagaaaaccgt

SEQ ID NO: 131399 - DNA, 25 bp, SARS Virus
atcggtgtcacttgagaaaaccgtc

SEQ ID NO: 131400 - DNA, 25 bp, SARS Virus
tcggtgtcactatagaaaaccgtcc

SEQ ID NO: 131401 - DNA, 25 bp, SARS Virus
cggtgtcactagtgaaaaccgtcca

SEQ ID NO: 131402 - DNA, 25 bp, SARS Virus
ggtgtcactagataaaaccgtccag

SEQ ID NO: 131403 - DNA, 25 bp, SARS Virus
gtgtcactagagtaaaccgtccagg

SEQ ID NO: 131404 - DNA, 25 bp, SARS Virus
tgtcactagagataaccgtccagga

SEQ ID NO: 131405 - DNA, 25 bp, SARS Virus
gtcactagagaataccgtccaggaa

SEQ ID NO: 131406 - DNA, 25 bp, SARS Virus
tcactagagaaatccgtccaggaat

SEQ ID NO: 131407 - DNA, 25 bp, SARS Virus
cactagagaaaatcgtccaggaatt

SEQ ID NO: 131408 - DNA, 25 bp, SARS Virus
actagagaaaactgtccaggaatta

SEQ ID NO: 131409 - DNA, 25 bp, SARS Virus
ctagagaaaaccttccaggaattac

SEQ ID NO: 131410 - DNA, 25 bp, SARS Virus
tagagaaaaccgtccaggaattaca

SEQ ID NO: 131411 - DNA, 25 bp, SARS Virus
agagaaaaccgttcaggaattacag

SEQ ID NO: 131412 - DNA, 25 bp, SARS Virus
gagaaaaccgtctaggaattacagt

SEQ ID NO: 131413 - DNA, 25 bp, SARS Virus
agaaaaccgtcctggaattacagtg

SEQ ID NO: 131414 - DNA, 25 bp, SARS Virus
gaaaaccgtccatgaattacagtgt

SEQ ID NO: 131415 - DNA, 25 bp, SARS Virus
aaaaccgtccagtaattacagtgtc

SEQ ID NO: 131416 - DNA, 25 bp, SARS Virus
aaaccgtccaggtattacagtgtcg

SEQ ID NO: 131417 - DNA, 25 bp, SARS Virus
aaccgtccaggatttacagtgtcgc

SEQ ID NO: 131418 - DNA, 25 bp, SARS Virus
accgtccaggaattacagtgtcgcg

SEQ ID NO: 131419 - DNA, 25 bp, SARS Virus
ccgtccaggaattacagtgtcgcgg

SEQ ID NO: 131420 - DNA, 25 bp, SARS Virus
cgtccaggaatttcagtgtcgcggg

SEQ ID NO: 131421 - DNA, 25 bp, SARS Virus
gtccaggaattatagtgtcgcggga

SEQ ID NO: 131422 - DNA, 25 bp, SARS Virus
tccaggaattactgtgtcgcgggat

SEQ ID NO: 131423 - DNA, 25 bp, SARS Virus
ccaggaattacattgtcgcgggatc

SEQ ID NO: 131424 - DNA, 25 bp, SARS Virus
caggaattacagtgtcgcgggatcc

SEQ ID NO: 131425 - DNA, 25 bp, SARS Virus
aggaattacagtttcgcgggatccc

SEQ ID NO: 131426 - DNA, 25 bp, SARS Virus
ggaattacagtgtcgcgggatccct

SEQ ID NO: 131427 - DNA, 25 bp, SARS Virus
gaattacagtgttgcgggatccctc

SEQ ID NO: 131428 - DNA, 25 bp, SARS Virus
aattacagtgtctcgggatccctca

SEQ ID NO: 131429 - DNA, 25 bp, SARS Virus
attacagtgtcgtgggatccctcac

SEQ ID NO: 131430 - DNA, 25 bp, SARS Virus
ttacagtgtcgctggatccctcaca

SEQ ID NO: 131431 - DNA, 25 bp, SARS Virus
tacagtgtcgcgtgatccctcacag

SEQ ID NO: 131432 - DNA, 25 bp, SARS Virus
acagtgtcgcggtatccctcacagg

SEQ ID NO: 131433 - DNA, 25 bp, SARS Virus
cagtgtcgcgggttccctcacaggc

SEQ ID NO: 131434 - DNA, 25 bp, SARS Virus
agtgtcgcgggatccctcacaggcc

SEQ ID NO: 131435 - DNA, 25 bp, SARS Virus
gtgtcgcgggattcctcacaggccg

SEQ ID NO: 131436 - DNA, 25 bp, SARS Virus
tgtcgcgggatctctcacaggccgg

SEQ ID NO: 131437 - DNA, 25 bp, SARS Virus
gtcgcgggatccttcacaggccggt

SEQ ID NO: 131438 - DNA, 25 bp, SARS Virus
tcgcgggatccctcacaggccggta

SEQ ID NO: 131439 - DNA, 25 bp, SARS Virus
cgcgggatcccttacaggccggtaa

SEQ ID NO: 131440 - DNA, 25 bp, SARS Virus
gcgggatccctctcaggccggtaag

SEQ ID NO: 131441 - DNA, 25 bp, SARS Virus
cgggatccctcataggccggtaagc

SEQ ID NO: 131442 - DNA, 25 bp, SARS Virus
gggatccctcactggccggtaagcg

SEQ ID NO: 131443 - DNA, 25 bp, SARS Virus
ggatccctcacatgccggtaagcgt

SEQ ID NO: 131444 - DNA, 25 bp, SARS Virus
gatccctcacagtccggtaagcgtt

SEQ ID NO: 131445 - DNA, 25 bp, SARS Virus
atccctcacaggtcggtaagcgttc

SEQ ID NO: 131446 - DNA, 25 bp, SARS Virus
tccctcacaggctggtaagcgttca

SEQ ID NO: 131447 - DNA, 25 bp, SARS Virus
ccctcacaggcctgtaagcgttcac

SEQ ID NO: 131448 - DNA, 25 bp, SARS Virus
cctcacaggccgttaagcgttcact

SEQ ID NO: 131449 - DNA, 25 bp, SARS Virus
ctcacaggccggtaagcgttcactg

SEQ ID NO: 131450 - DNA, 25 bp, SARS Virus
tcacaggccggttagcgttcactgg

SEQ ID NO: 131451 - DNA, 25 bp, SARS Virus
cacaggccggtatgcgttcactggt

SEQ ID NO: 131452 - DNA, 25 bp, SARS Virus
acaggccggtaatcgttcactggtg

SEQ ID NO: 131453 - DNA, 25 bp, SARS Virus
caggccggtaagtgttcactggtgc

SEQ ID NO: 131454 - DNA, 25 bp, SARS Virus
aggccggtaagctttcactggtgct

SEQ ID NO: 131455 - DNA, 25 bp, SARS Virus
ggccggtaagcgttcactggtgctt

SEQ ID NO: 131456 - DNA, 25 bp, SARS Virus
gccggtaagcgttcactggtgctta

SEQ ID NO: 131457 - DNA, 25 bp, SARS Virus
ccggtaagcgtttactggtgcttac

SEQ ID NO: 131458 - DNA, 25 bp, SARS Virus
cggtaagcgttctctggtgcttact

SEQ ID NO: 131459 - DNA, 25 bp, SARS Virus
ggtaagcgttcattggtgcttacta

SEQ ID NO: 131460 - DNA, 25 bp, SARS Virus
gtaagcgttcactggtgcttactag

SEQ ID NO: 131461 - DNA, 25 bp, SARS Virus
taagcgttcacttgtgcttactagt

SEQ ID NO: 131462 - DNA, 25 bp, SARS Virus
aagcgttcactgttgcttactagtg

SEQ ID NO: 131463 - DNA, 25 bp, SARS Virus
agcgttcactggtgcttactagtgt

SEQ ID NO: 131464 - DNA, 25 bp, SARS Virus
gcgttcactggttcttactagtgtc

SEQ ID NO: 131465 - DNA, 25 bp, SARS Virus
cgttcactggtgtttactagtgtcg

SEQ ID NO: 131466 - DNA, 25 bp, SARS Virus
gttcactggtgcttactagtgtcgt

SEQ ID NO: 131467 - DNA, 25 bp, SARS Virus
ttcactggtgcttactagtgtcgtg

SEQ ID NO: 131468 - DNA, 25 bp, SARS Virus
tcactggtgctttctagtgtcgtgg

SEQ ID NO: 131469 - DNA, 25 bp, SARS Virus
cactggtgcttattagtgtcgtggt

SEQ ID NO: 131470 - DNA, 25 bp, SARS Virus
actggtgcttactagtgtcgtggtt

SEQ ID NO: 131471 - DNA, 25 bp, SARS Virus
ctggtgcttacttgtgtcgtggtta

SEQ ID NO: 131472 - DNA, 25 bp, SARS Virus
tggtgcttactattgtcgtggttac

SEQ ID NO: 131473 - DNA, 25 bp, SARS Virus
ggtgcttactagtgtcgtggttact

SEQ ID NO: 131474 - DNA, 25 bp, SARS Virus
gtgcttactagtttcgtggttactg

SEQ ID NO: 131475 - DNA, 25 bp, SARS Virus
tgcttactagtgtcgtggttactgt

SEQ ID NO: 131476 - DNA, 25 bp, SARS Virus
gcttactagtgttgtggttactgtt

SEQ ID NO: 131477 - DNA, 25 bp, SARS Virus
cttactagtgtcttggttactgttc

SEQ ID NO: 131478 - DNA, 25 bp, SARS Virus
ttactagtgtcgtggttactgttca

SEQ ID NO: 131479 - DNA, 25 bp, SARS Virus
tactagtgtcgttgttactgttcaa

SEQ ID NO: 131480 - DNA, 25 bp, SARS Virus
actagtgtcgtgtttactgttcaag

SEQ ID NO: 131481 - DNA, 25 bp, SARS Virus
ctagtgtcgtggttactgttcaagt

SEQ ID NO: 131482 - DNA, 25 bp, SARS Virus
tagtgtcgtggttactgttcaagtg

SEQ ID NO: 131483 - DNA, 25 bp, SARS Virus
agtgtcgtggtttctgttcaagtga

SEQ ID NO: 131484 - DNA, 25 bp, SARS Virus
gtgtcgtggttattgttcaagtgaa

SEQ ID NO: 131485 - DNA, 25 bp, SARS Virus
tgtcgtggttactgttcaagtgaaa

SEQ ID NO: 131486 - DNA, 25 bp, SARS Virus
gtcgtggttacttttcaagtgaaag

SEQ ID NO: 131487 - DNA, 25 bp, SARS Virus
tcgtggttactgttcaagtgaaagg

SEQ ID NO: 131488 - DNA, 25 bp, SARS Virus
cgtggttactgttcaagtgaaaggt

SEQ ID NO: 131489 - DNA, 25 bp, SARS Virus
gtggttactgtttaagtgaaaggta

SEQ ID NO: 131490 - DNA, 25 bp, SARS Virus
tggttactgttctagtgaaaggtac

SEQ ID NO: 131491 - DNA, 25 bp, SARS Virus
ggttactgttcatgtgaaaggtact

SEQ ID NO: 131492 - DNA, 25 bp, SARS Virus
gttactgttcaattgaaaggtactc

SEQ ID NO: 131493 - DNA, 25 bp, SARS Virus
ttactgttcaagtgaaaggtactcg

SEQ ID NO: 131494 - DNA, 25 bp, SARS Virus
tactgttcaagttaaaggtactcgc

SEQ ID NO: 131495 - DNA, 25 bp, SARS Virus
actgttcaagtgtaaggtactcgcc

SEQ ID NO: 131496 - DNA, 25 bp, SARS Virus
ctgttcaagtgataggtactcgcca

SEQ ID NO: 131497 - DNA, 25 bp, SARS Virus
tgttcaagtgaatggtactcgccag

SEQ ID NO: 131498 - DNA, 25 bp, SARS Virus
gttcaagtgaaatgtactcgccaga

SEQ ID NO: 131499 - DNA, 25 bp, SARS Virus
ttcaagtgaaagttactcgccagac

SEQ ID NO: 131500 - DNA, 25 bp, SARS Virus
tcaagtgaaaggtactcgccagacc

SEQ ID NO: 131501 - DNA, 25 bp, SARS Virus
caagtgaaaggttctcgccagacca

SEQ ID NO: 131502 - DNA, 25 bp, SARS Virus
aagtgaaaggtattcgccagaccag

SEQ ID NO: 131503 - DNA, 25 bp, SARS Virus
agtgaaaggtactcgccagaccagt

SEQ ID NO: 131504 - DNA, 25 bp, SARS Virus
gtgaaaggtacttgccagaccagtg

SEQ ID NO: 131505 - DNA, 25 bp, SARS Virus
tgaaaggtactctccagaccagtgt

SEQ ID NO: 131506 - DNA, 25 bp, SARS Virus
gaaaggtactcgtcagaccagtgtt

SEQ ID NO: 131507 - DNA, 25 bp, SARS Virus
aaaggtactcgctagaccagtgtta

SEQ ID NO: 131508 - DNA, 25 bp, SARS Virus
aaggtactcgcctgaccagtgttaa

SEQ ID NO: 131509 - DNA, 25 bp, SARS Virus
aggtactcgccataccagtgttaac

SEQ ID NO: 131510 - DNA, 25 bp, SARS Virus
ggtactcgccagtccagtgttaaca

SEQ ID NO: 131511 - DNA, 25 bp, SARS Virus
gtactcgccagatcagtgttaacag

SEQ ID NO: 131512 - DNA, 25 bp, SARS Virus
tactcgccagactagtgttaacagg

SEQ ID NO: 131513 - DNA, 25 bp, SARS Virus
actcgccagacctgtgttaacaggg

SEQ ID NO: 131514 - DNA, 25 bp, SARS Virus
ctcgccagaccattgttaacagggg

SEQ ID NO: 131515 - DNA, 25 bp, SARS Virus
tcgccagaccagtgttaacaggggg

SEQ ID NO: 131516 - DNA, 25 bp, SARS Virus
cgccagaccagttttaacagggggc

SEQ ID NO: 131517 - DNA, 25 bp, SARS Virus
gccagaccagtgttaacagggggcc

SEQ ID NO: 131518 - DNA, 25 bp, SARS Virus
ccagaccagtgttaacagggggcct

SEQ ID NO: 131519 - DNA, 25 bp, SARS Virus
cagaccagtgtttacagggggcctc

SEQ ID NO: 131520 - DNA, 25 bp, SARS Virus
agaccagtgttatcagggggcctct

SEQ ID NO: 131521 - DNA, 25 bp, SARS Virus
gaccagtgttaatagggggcctctc

SEQ ID NO: 131522 - DNA, 25 bp, SARS Virus
accagtgttaactgggggcctctcc

SEQ ID NO: 131523 - DNA, 25 bp, SARS Virus
ccagtgttaacatggggcctctccg

SEQ ID NO: 131524 - DNA, 25 bp, SARS Virus
cagtgttaacagtgggcctctccgt

SEQ ID NO: 131525 - DNA, 25 bp, SARS Virus
agtgttaacaggtggcctctccgtg

SEQ ID NO: 131526 - DNA, 25 bp, SARS Virus
gtgttaacagggtgcctctccgtgt

SEQ ID NO: 131527 - DNA, 25 bp, SARS Virus
tgttaacaggggtcctctccgtgta

SEQ ID NO: 131528 - DNA, 25 bp, SARS Virus
gttaacagggggtctctccgtgtaa

SEQ ID NO: 131529 - DNA, 25 bp, SARS Virus
ttaacagggggcttctccgtgtaac

SEQ ID NO: 131530 - DNA, 25 bp, SARS Virus
taacagggggcctctccgtgtaact

SEQ ID NO: 131531 - DNA, 25 bp, SARS Virus
aacagggggcctttccgtgtaactc

SEQ ID NO: 131532 - DNA, 25 bp, SARS Virus
acagggggcctctccgtgtaactct

SEQ ID NO: 131533 - DNA, 25 bp, SARS Virus
cagggggcctcttcgtgtaactctt

SEQ ID NO: 131534 - DNA, 25 bp, SARS Virus
agggggcctctctgtgtaactcttc

SEQ ID NO: 131535 - DNA, 25 bp, SARS Virus
gggggcctctccttgtaactcttct

SEQ ID NO: 131536 - DNA, 25 bp, SARS Virus
ggggcctctccgtgtaactcttctt

SEQ ID NO: 131537 - DNA, 25 bp, SARS Virus
gggcctctccgtttaactcttctta

SEQ ID NO: 131538 - DNA, 25 bp, SARS Virus
ggcctctccgtgtaactcttcttac

SEQ ID NO: 131539 - DNA, 25 bp, SARS Virus
gcctctccgtgttactcttcttaca

SEQ ID NO: 131540 - DNA, 25 bp, SARS Virus
cctctccgtgtatctcttcttacaa

SEQ ID NO: 131541 - DNA, 25 bp, SARS Virus
ctctccgtgtaattcttcttacaaa

SEQ ID NO: 131542 - DNA, 25 bp, SARS Virus
tctccgtgtaactcttcttacaaac

SEQ ID NO: 131543 - DNA, 25 bp, SARS Virus
ctccgtgtaacttttcttacaaaca

SEQ ID NO: 131544 - DNA, 25 bp, SARS Virus
tccgtgtaactcttcttacaaacaa

SEQ ID NO: 131545 - DNA, 25 bp, SARS Virus
ccgtgtaactcttcttacaaacaaa

SEQ ID NO: 131546 - DNA, 25 bp, SARS Virus
cgtgtaactctttttacaaacaaag

SEQ ID NO: 131547 - DNA, 25 bp, SARS Virus
gtgtaactcttcttacaaacaaaga

SEQ ID NO: 131548 - DNA, 25 bp, SARS Virus
tgtaactcttcttacaaacaaagac

SEQ ID NO: 131549 - DNA, 25 bp, SARS Virus
gtaactcttctttcaaacaaagacc

SEQ ID NO: 131550 - DNA, 25 bp, SARS Virus
taactcttcttataaacaaagaccc

SEQ ID NO: 131551 - DNA, 25 bp, SARS Virus
aactcttcttactaacaaagaccca

SEQ ID NO: 131552 - DNA, 25 bp, SARS Virus
actcttcttacatacaaagacccaa

SEQ ID NO: 131553 - DNA, 25 bp, SARS Virus
ctcttcttacaatcaaagacccaac

SEQ ID NO: 131554 - DNA, 25 bp, SARS Virus
tcttcttacaaataaagacccaact

SEQ ID NO: 131555 - DNA, 25 bp, SARS Virus
cttcttacaaactaagacccaactt

SEQ ID NO: 131556 - DNA, 25 bp, SARS Virus
ttcttacaaacatagacccaactta

SEQ ID NO: 131557 - DNA, 25 bp, SARS Virus
tcttacaaacaatgacccaacttac

SEQ ID NO: 131558 - DNA, 25 bp, SARS Virus
cttacaaacaaatacccaacttact

SEQ ID NO: 131559 - DNA, 25 bp, SARS Virus
ttacaaacaaagtcccaacttactg

SEQ ID NO: 131560 - DNA, 25 bp, SARS Virus
tacaaacaaagatccaacttactgg

SEQ ID NO: 131561 - DNA, 25 bp, SARS Virus
acaaacaaagactcaacttactggt

SEQ ID NO: 131562 - DNA, 25 bp, SARS Virus
caaacaaagacctaacttactggtg

SEQ ID NO: 131563 - DNA, 25 bp, SARS Virus
aaacaaagaccctacttactggtgt

SEQ ID NO: 131564 - DNA, 25 bp, SARS Virus
aacaaagacccatcttactggtgta

SEQ ID NO: 131565 - DNA, 25 bp, SARS Virus
acaaagacccaatttactggtgtaa

SEQ ID NO: 131566 - DNA, 25 bp, SARS Virus
caaagacccaacttactggtgtaac

SEQ ID NO: 131567 - DNA, 25 bp, SARS Virus
aaagacccaacttactggtgtaact

SEQ ID NO: 131568 - DNA, 25 bp, SARS Virus
aagacccaactttctggtgtaactc

SEQ ID NO: 131569 - DNA, 25 bp, SARS Virus
agacccaacttattggtgtaactcg

SEQ ID NO: 131570 - DNA, 25 bp, SARS Virus
gacccaacttactggtgtaactcgc

SEQ ID NO: 131571 - DNA, 25 bp, SARS Virus
acccaacttacttgtgtaactcgcc

SEQ ID NO: 131572 - DNA, 25 bp, SARS Virus
cccaacttactgttgtaactcgccc

SEQ ID NO: 131573 - DNA, 25 bp, SARS Virus
ccaacttactggtgtaactcgccca

SEQ ID NO: 131574 - DNA, 25 bp, SARS Virus
caacttactggtttaactcgcccat

SEQ ID NO: 131575 - DNA, 25 bp, SARS Virus
aacttactggtgtaactcgcccatg

SEQ ID NO: 131576 - DNA, 25 bp, SARS Virus
acttactggtgttactcgcccatgc

SEQ ID NO: 131577 - DNA, 25 bp, SARS Virus
cttactggtgtatctcgcccatgct

SEQ ID NO: 131578 - DNA, 25 bp, SARS Virus
ttactggtgtaattcgcccatgctc

SEQ ID NO: 131579 - DNA, 25 bp, SARS Virus
tactggtgtaactcgcccatgctcg

SEQ ID NO: 131580 - DNA, 25 bp, SARS Virus
actggtgtaacttgcccatgctcgt

SEQ ID NO: 131581 - DNA, 25 bp, SARS Virus
ctggtgtaactctcccatgctcgtt

SEQ ID NO: 131582 - DNA, 25 bp, SARS Virus
tggtgtaactcgtccatgctcgttt

SEQ ID NO: 131583 - DNA, 25 bp, SARS Virus
ggtgtaactcgctcatgctcgtttg

SEQ ID NO: 131584 - DNA, 25 bp, SARS Virus
gtgtaactcgcctatgctcgtttgt

SEQ ID NO: 131585 - DNA, 25 bp, SARS Virus
tgtaactcgcccttgctcgtttgtc

SEQ ID NO: 131586 - DNA, 25 bp, SARS Virus
gtaactcgcccatgctcgtttgtcg

SEQ ID NO: 131587 - DNA, 25 bp, SARS Virus
taactcgcccattctcgtttgtcgg

SEQ ID NO: 131588 - DNA, 25 bp, SARS Virus
aactcgcccatgttcgtttgtcgga

SEQ ID NO: 131589 - DNA, 25 bp, SARS Virus
actcgcccatgctcgtttgtcggac

SEQ ID NO: 131590 - DNA, 25 bp, SARS Virus
ctcgcccatgcttgtttgtcggact

SEQ ID NO: 131591 - DNA, 25 bp, SARS Virus
tcgcccatgctcttttgtcggactt

SEQ ID NO: 131592 - DNA, 25 bp, SARS Virus
cgcccatgctcgtttgtcggacttc

SEQ ID NO: 131593 - DNA, 25 bp, SARS Virus
gcccatgctcgtttgtcggacttcc

SEQ ID NO: 131594 - DNA, 25 bp, SARS Virus
cccatgctcgtttgtcggacttcct

SEQ ID NO: 131595 - DNA, 25 bp, SARS Virus
ccatgctcgtttttcggacttcctt

SEQ ID NO: 131596 - DNA, 25 bp, SARS Virus
catgctcgtttgtcggacttccttc

SEQ ID NO: 131597 - DNA, 25 bp, SARS Virus
atgctcgtttgttggacttccttcg

SEQ ID NO: 131598 - DNA, 25 bp, SARS Virus
tgctcgtttgtctgacttccttcgt

SEQ ID NO: 131599 - DNA, 25 bp, SARS Virus
gctcgtttgtcgtacttccttcgtt

SEQ ID NO: 131600 - DNA, 25 bp, SARS Virus
ctcgtttgtcggtcttccttcgttg

SEQ ID NO: 131601 - DNA, 25 bp, SARS Virus
tcgtttgtcggatttccttcgttgc

SEQ ID NO: 131602 - DNA, 25 bp, SARS Virus
cgtttgtcggacttccttcgttgct

SEQ ID NO: 131603 - DNA, 25 bp, SARS Virus
gtttgtcggacttccttcgttgctt

SEQ ID NO: 131604 - DNA, 25 bp, SARS Virus
tttgtcggactttcttcgttgcttc

SEQ ID NO: 131605 - DNA, 25 bp, SARS Virus
ttgtcggacttctttcgttgcttca

SEQ ID NO: 131606 - DNA, 25 bp, SARS Virus
tgtcggacttccttcgttgcttcat

SEQ ID NO: 131607 - DNA, 25 bp, SARS Virus
gtcggacttccttcgttgcttcatc

SEQ ID NO: 131608 - DNA, 25 bp, SARS Virus
tcggacttcctttgttgcttcatcg

SEQ ID NO: 131609 - DNA, 25 bp, SARS Virus
cggacttccttctttgcttcatcga

SEQ ID NO: 131610 - DNA, 25 bp, SARS Virus
ggacttccttcgttgcttcatcgat

SEQ ID NO: 131611 - DNA, 25 bp, SARS Virus
gacttccttcgttgcttcatcgatt

SEQ ID NO: 131612 - DNA, 25 bp, SARS Virus
acttccttcgtttcttcatcgattc

SEQ ID NO: 131613 - DNA, 25 bp, SARS Virus
cttccttcgttgtttcatcgattcg

SEQ ID NO: 131614 - DNA, 25 bp, SARS Virus
ttccttcgttgcttcatcgattcgg

SEQ ID NO: 131615 - DNA, 25 bp, SARS Virus
tccttcgttgcttcatcgattcggt

SEQ ID NO: 131616 - DNA, 25 bp, SARS Virus
ccttcgttgctttatcgattcggtg

SEQ ID NO: 131617 - DNA, 25 bp, SARS Virus
cttcgttgcttcttcgattcggtgt

SEQ ID NO: 131618 - DNA, 25 bp, SARS Virus
ttcgttgcttcatcgattcggtgta

SEQ ID NO: 131619 - DNA, 25 bp, SARS Virus
tcgttgcttcattgattcggtgtag

SEQ ID NO: 131620 - DNA, 25 bp, SARS Virus
cgttgcttcatctattcggtgtagt

SEQ ID NO: 131621 - DNA, 25 bp, SARS Virus
gttgcttcatcgtttcggtgtagtt

SEQ ID NO: 131622 - DNA, 25 bp, SARS Virus
ttgcttcatcgattcggtgtagttc

SEQ ID NO: 131623 - DNA, 25 bp, SARS Virus
tgcttcatcgattcggtgtagttcg

SEQ ID NO: 131624 - DNA, 25 bp, SARS Virus
gcttcatcgatttggtgtagttcgg

SEQ ID NO: 131625 - DNA, 25 bp, SARS Virus
cttcatcgattctgtgtagttcgga

SEQ ID NO: 131626 - DNA, 25 bp, SARS Virus
ttcatcgattcgttgtagttcggat

SEQ ID NO: 131627 - DNA, 25 bp, SARS Virus
tcatcgattcggtgtagttcggatg

SEQ ID NO: 131628 - DNA, 25 bp, SARS Virus
catcgattcggtttagttcggatgt

SEQ ID NO: 131629 - DNA, 25 bp, SARS Virus
atcgattcggtgtagttcggatgtt

SEQ ID NO: 131630 - DNA, 25 bp, SARS Virus
tcgattcggtgttgttcggatgtta

SEQ ID NO: 131631 - DNA, 25 bp, SARS Virus
cgattcggtgtatttcggatgttat

SEQ ID NO: 131632 - DNA, 25 bp, SARS Virus
gattcggtgtagttcggatgttatg

SEQ ID NO: 131633 - DNA, 25 bp, SARS Virus
attcggtgtagttcggatgttatgt

SEQ ID NO: 131634 - DNA, 25 bp, SARS Virus
ttcggtgtagtttggatgttatgtt

SEQ ID NO: 131635 - DNA, 25 bp, SARS Virus
tcggtgtagttctgatgttatgttc

SEQ ID NO: 131636 - DNA, 25 bp, SARS Virus
cggtgtagttcgtatgttatgttcg

SEQ ID NO: 131637 - DNA, 25 bp, SARS Virus
ggtgtagttcggttgttatgttcgg

SEQ ID NO: 131638 - DNA, 25 bp, SARS Virus
gtgtagttcggatgttatgttcggt

SEQ ID NO: 131639 - DNA, 25 bp, SARS Virus
tgtagttcggattttatgttcggta

SEQ ID NO: 131640 - DNA, 25 bp, SARS Virus
gtagttcggatgttatgttcggtaa

SEQ ID NO: 131641 - DNA, 25 bp, SARS Virus
tagttcggatgttatgttcggtaac

SEQ ID NO: 131642 - DNA, 25 bp, SARS Virus
agttcggatgttttgttcggtaacg

SEQ ID NO: 131643 - DNA, 25 bp, SARS Virus
gttcggatgttatgttcggtaacgt

SEQ ID NO: 131644 - DNA, 25 bp, SARS Virus
ttcggatgttattttcggtaacgtt

SEQ ID NO: 131645 - DNA, 25 bp, SARS Virus
tcggatgttatgttcggtaacgtta

SEQ ID NO: 131646 - DNA, 25 bp, SARS Virus
cggatgttatgttcggtaacgttag

SEQ ID NO: 131647 - DNA, 25 bp, SARS Virus
ggatgttatgtttggtaacgttagc

SEQ ID NO: 131648 - DNA, 25 bp, SARS Virus
gatgttatgttctgtaacgttagcg

SEQ ID NO: 131649 - DNA, 25 bp, SARS Virus
atgttatgttcgttaacgttagcgt

SEQ ID NO: 131650 - DNA, 25 bp, SARS Virus
tgttatgttcggtaacgttagcgtt

SEQ ID NO: 131651 - DNA, 25 bp, SARS Virus
gttatgttcggttacgttagcgtta

SEQ ID NO: 131652 - DNA, 25 bp, SARS Virus
ttatgttcggtatcgttagcgttag

SEQ ID NO: 131653 - DNA, 25 bp, SARS Virus
tatgttcggtaatgttagcgttagg

SEQ ID NO: 131654 - DNA, 25 bp, SARS Virus
atgttcggtaactttagcgttaggg

SEQ ID NO: 131655 - DNA, 25 bp, SARS Virus
tgttcggtaacgttagcgttagggc

SEQ ID NO: 131656 - DNA, 25 bp, SARS Virus
gttcggtaacgttagcgttagggcg

SEQ ID NO: 131657 - DNA, 25 bp, SARS Virus
ttcggtaacgtttgcgttagggcgg

SEQ ID NO: 131658 - DNA, 25 bp, SARS Virus
tcggtaacgttatcgttagggcggt

SEQ ID NO: 131659 - DNA, 25 bp, SARS Virus
cggtaacgttagtgttagggcggtc

SEQ ID NO: 131660 - DNA, 25 bp, SARS Virus
ggtaacgttagctttagggcggtca

SEQ ID NO: 131661 - DNA, 25 bp, SARS Virus
gtaacgttagcgttagggcggtcag

SEQ ID NO: 131662 - DNA, 25 bp, SARS Virus
taacgttagcgttagggcggtcagt

SEQ ID NO: 131663 - DNA, 25 bp, SARS Virus
aacgttagcgtttgggcggtcagtg

SEQ ID NO: 131664 - DNA, 25 bp, SARS Virus
acgttagcgttatggcggtcagtgg

SEQ ID NO: 131665 - DNA, 25 bp, SARS Virus
cgttagcgttagtgcggtcagtggg

SEQ ID NO: 131666 - DNA, 25 bp, SARS Virus
gttagcgttaggtcggtcagtgggt

SEQ ID NO: 131667 - DNA, 25 bp, SARS Virus
ttagcgttagggtggtcagtgggtt

SEQ ID NO: 131668 - DNA, 25 bp, SARS Virus
tagcgttagggctgtcagtgggtta

SEQ ID NO: 131669 - DNA, 25 bp, SARS Virus
agcgttagggcgttcagtgggttaa

SEQ ID NO: 131670 - DNA, 25 bp, SARS Virus
gcgttagggcggtcagtgggttaat

SEQ ID NO: 131671 - DNA, 25 bp, SARS Virus
cgttagggcggttagtgggttaatt

SEQ ID NO: 131672 - DNA, 25 bp, SARS Virus
gttagggcggtctgtgggttaatta

SEQ ID NO: 131673 - DNA, 25 bp, SARS Virus
ttagggcggtcattgggttaattaa

SEQ ID NO: 131674 - DNA, 25 bp, SARS Virus
tagggcggtcagtgggttaattaag

SEQ ID NO: 131675 - DNA, 25 bp, SARS Virus
agggcggtcagttggttaattaaga

SEQ ID NO: 131676 - DNA, 25 bp, SARS Virus
gggcggtcagtgtgttaattaagac

SEQ ID NO: 131677 - DNA, 25 bp, SARS Virus
ggcggtcagtggtttaattaagaca

SEQ ID NO: 131678 - DNA, 25 bp, SARS Virus
gcggtcagtgggttaattaagacat

SEQ ID NO: 131679 - DNA, 25 bp, SARS Virus
cggtcagtgggttaattaagacatc

SEQ ID NO: 131680 - DNA, 25 bp, SARS Virus
ggtcagtgggtttattaagacatct

SEQ ID NO: 131681 - DNA, 25 bp, SARS Virus
gtcagtgggttatttaagacatctg

SEQ ID NO: 131682 - DNA, 25 bp, SARS Virus
tcagtgggttaattaagacatctgt

SEQ ID NO: 131683 - DNA, 25 bp, SARS Virus
cagtgggttaattaagacatctgtc

SEQ ID NO: 131684 - DNA, 25 bp, SARS Virus
agtgggttaatttagacatctgtcg

SEQ ID NO: 131685 - DNA, 25 bp, SARS Virus
gtgggttaattatgacatctgtcgt

SEQ ID NO: 131686 - DNA, 25 bp, SARS Virus
tgggttaattaatacatctgtcgtc

SEQ ID NO: 131687 - DNA, 25 bp, SARS Virus
gggttaattaagtcatctgtcgtcg

SEQ ID NO: 131688 - DNA, 25 bp, SARS Virus
ggttaattaagatatctgtcgtcgt

SEQ ID NO: 131689 - DNA, 25 bp, SARS Virus
gttaattaagacttctgtcgtcgtt

SEQ ID NO: 131690 - DNA, 25 bp, SARS Virus
ttaattaagacatctgtcgtcgttc

SEQ ID NO: 131691 - DNA, 25 bp, SARS Virus
taattaagacatttgtcgtcgttcg

SEQ ID NO: 131692 - DNA, 25 bp, SARS Virus
aattaagacatctgtcgtcgttcgt

SEQ ID NO: 131693 - DNA, 25 bp, SARS Virus
attaagacatctttcgtcgttcgtg

SEQ ID NO: 131694 - DNA, 25 bp, SARS Virus
ttaagacatctgtcgtcgttcgtgt

SEQ ID NO: 131695 - DNA, 25 bp, SARS Virus
taagacatctgttgtcgttcgtgtt

SEQ ID NO: 131696 - DNA, 25 bp, SARS Virus
aagacatctgtcttcgttcgtgttt

SEQ ID NO: 131697 - DNA, 25 bp, SARS Virus
agacatctgtcgtcgttcgtgtttt

SEQ ID NO: 131698 - DNA, 25 bp, SARS Virus
gacatctgtcgttgttcgtgttttg

SEQ ID NO: 131699 - DNA, 25 bp, SARS Virus
acatctgtcgtctttcgtgttttgt

SEQ ID NO: 131700 - DNA, 25 bp, SARS Virus
catctgtcgtcgttcgtgttttgtt

SEQ ID NO: 131701 - DNA, 25 bp, SARS Virus
atctgtcgtcgttcgtgttttgttc

SEQ ID NO: 131702 - DNA, 25 bp, SARS Virus
tctgtcgtcgtttgtgttttgttcg

SEQ ID NO: 131703 - DNA, 25 bp, SARS Virus
ctgtcgtcgttcttgttttgttcgt

SEQ ID NO: 131704 - DNA, 25 bp, SARS Virus
tgtcgtcgttcgtgttttgttcgtt

SEQ ID NO: 131705 - DNA, 25 bp, SARS Virus
gtcgtcgttcgttttttgttcgttc

SEQ ID NO: 131706 - DNA, 25 bp, SARS Virus
tcgtcgttcgtgttttgttcgttca

SEQ ID NO: 131707 - DNA, 25 bp, SARS Virus
cgtcgttcgtgttttgttcgttcac

SEQ ID NO: 131708 - DNA, 25 bp, SARS Virus
gtcgttcgtgttttgttcgttcaca

SEQ ID NO: 131709 - DNA, 25 bp, SARS Virus
tcgttcgtgttttgttcgttcacaa

SEQ ID NO: 131710 - DNA, 25 bp, SARS Virus
cgttcgtgtttttttcgttcacaat

SEQ ID NO: 131711 - DNA, 25 bp, SARS Virus
gttcgtgttttgttcgttcacaatg

SEQ ID NO: 131712 - DNA, 25 bp, SARS Virus
ttcgtgttttgttcgttcacaatga

SEQ ID NO: 131713 - DNA, 25 bp, SARS Virus
tcgtgttttgtttgttcacaatgac

SEQ ID NO: 131714 - DNA, 25 bp, SARS Virus
cgtgttttgttctttcacaatgacc

SEQ ID NO: 131715 - DNA, 25 bp, SARS Virus
gtgttttgttcgttcacaatgaccg

SEQ ID NO: 131716 - DNA, 25 bp, SARS Virus
tgttttgttcgttcacaatgaccgg

SEQ ID NO: 131717 - DNA, 25 bp, SARS Virus
gttttgttcgtttacaatgaccggt

SEQ ID NO: 131718 - DNA, 25 bp, SARS Virus
ttttgttcgttctcaatgaccggtg

SEQ ID NO: 131719 - DNA, 25 bp, SARS Virus
tttgttcgttcataatgaccggtgt

SEQ ID NO: 131720 - DNA, 25 bp, SARS Virus
ttgttcgttcactatgaccggtgtt

SEQ ID NO: 131721 - DNA, 25 bp, SARS Virus
tgttcgttcacattgaccggtgttc

SEQ ID NO: 131722 - DNA, 25 bp, SARS Virus
gttcgttcacaatgaccggtgttct

SEQ ID NO: 131723 - DNA, 25 bp, SARS Virus
ttcgttcacaattaccggtgttctc

SEQ ID NO: 131724 - DNA, 25 bp, SARS Virus
tcgttcacaatgtccggtgttctcg

SEQ ID NO: 131725 - DNA, 25 bp, SARS Virus
cgttcacaatgatcggtgttctcgg

SEQ ID NO: 131726 - DNA, 25 bp, SARS Virus
gttcacaatgactggtgttctcggt

SEQ ID NO: 131727 - DNA, 25 bp, SARS Virus
ttcacaatgacctgtgttctcggtc

SEQ ID NO: 131728 - DNA, 25 bp, SARS Virus
tcacaatgaccgttgttctcggtct

SEQ ID NO: 131729 - DNA, 25 bp, SARS Virus
cacaatgaccggtgttctcggtctc

SEQ ID NO: 131730 - DNA, 25 bp, SARS Virus
acaatgaccggttttctcggtctcc

SEQ ID NO: 131731 - DNA, 25 bp, SARS Virus
caatgaccggtgttctcggtctcct

SEQ ID NO: 131732 - DNA, 25 bp, SARS Virus
aatgaccggtgttctcggtctcctt

SEQ ID NO: 131733 - DNA, 25 bp, SARS Virus
atgaccggtgttttcggtctccttt

SEQ ID NO: 131734 - DNA, 25 bp, SARS Virus
tgaccggtgttctcggtctcctttt

SEQ ID NO: 131735 - DNA, 25 bp, SARS Virus
gaccggtgttcttggtctccttttg

SEQ ID NO: 131736 - DNA, 25 bp, SARS Virus
accggtgttctctgtctccttttgt

SEQ ID NO: 131737 - DNA, 25 bp, SARS Virus
ccggtgttctcgttctccttttgtt

SEQ ID NO: 131738 - DNA, 25 bp, SARS Virus
cggtgttctcggtctccttttgttc

SEQ ID NO: 131739 - DNA, 25 bp, SARS Virus
ggtgttctcggtttccttttgttcg

SEQ ID NO: 131740 - DNA, 25 bp, SARS Virus
gtgttctcggtctccttttgttcga

SEQ ID NO: 131741 - DNA, 25 bp, SARS Virus
tgttctcggtcttcttttgttcgaa

SEQ ID NO: 131742 - DNA, 25 bp, SARS Virus
gttctcggtctctttttgttcgaaa

SEQ ID NO: 131743 - DNA, 25 bp, SARS Virus
ttctcggtctccttttgttcgaaat

SEQ ID NO: 131744 - DNA, 25 bp, SARS Virus
tctcggtctccttttgttcgaaata

SEQ ID NO: 131745 - DNA, 25 bp, SARS Virus
ctcggtctccttttgttcgaaataa

SEQ ID NO: 131746 - DNA, 25 bp, SARS Virus
tcggtctccttttgttcgaaataat

SEQ ID NO: 131747 - DNA, 25 bp, SARS Virus
cggtctcctttttttcgaaataata

SEQ ID NO: 131748 - DNA, 25 bp, SARS Virus
ggtctccttttgttcgaaataatac

SEQ ID NO: 131749 - DNA, 25 bp, SARS Virus
gtctccttttgttcgaaataataca

SEQ ID NO: 131750 - DNA, 25 bp, SARS Virus
tctccttttgtttgaaataatacat

SEQ ID NO: 131751 - DNA, 25 bp, SARS Virus
ctccttttgttctaaataatacatg

SEQ ID NO: 131752 - DNA, 25 bp, SARS Virus
tccttttgttcgtaataatacatgt

SEQ ID NO: 131753 - DNA, 25 bp, SARS Virus
ccttttgttcgatataatacatgtt

SEQ ID NO: 131754 - DNA, 25 bp, SARS Virus
cttttgttcgaattaatacatgttt

SEQ ID NO: 131755 - DNA, 25 bp, SARS Virus
ttttgttcgaaataatacatgtttt

SEQ ID NO: 131756 - DNA, 25 bp, SARS Virus
tttgttcgaaattatacatgttttt

SEQ ID NO: 131757 - DNA, 25 bp, SARS Virus
ttgttcgaaatattacatgtttttg

SEQ ID NO: 131758 - DNA, 25 bp, SARS Virus
tgttcgaaataatacatgtttttgg

SEQ ID NO: 131759 - DNA, 25 bp, SARS Virus
gttcgaaataattcatgtttttgga

SEQ ID NO: 131760 - DNA, 25 bp, SARS Virus
ttcgaaataatatatgtttttggac

SEQ ID NO: 131761 - DNA, 25 bp, SARS Virus
tcgaaataatacttgtttttggaca

SEQ ID NO: 131762 - DNA, 25 bp, SARS Virus
cgaaataatacatgtttttggacaa

SEQ ID NO: 131763 - DNA, 25 bp, SARS Virus
gaaataatacatttttttggacaag

SEQ ID NO: 131764 - DNA, 25 bp, SARS Virus
aaataatacatgtttttggacaagg

SEQ ID NO: 131765 - DNA, 25 bp, SARS Virus
aataatacatgtttttggacaaggc

SEQ ID NO: 131766 - DNA, 25 bp, SARS Virus
ataatacatgtttttggacaaggct

SEQ ID NO: 131767 - DNA, 25 bp, SARS Virus
taatacatgtttttggacaaggcta

SEQ ID NO: 131768 - DNA, 25 bp, SARS Virus
aatacatgtttttggacaaggctaa

SEQ ID NO: 131769 - DNA, 25 bp, SARS Virus
atacatgttttttgacaaggctaat

SEQ ID NO: 131770 - DNA, 25 bp, SARS Virus
tacatgtttttgtacaaggctaatc

SEQ ID NO: 131771 - DNA, 25 bp, SARS Virus
acatgtttttggtcaaggctaatct

SEQ ID NO: 131772 - DNA, 25 bp, SARS Virus
catgtttttggataaggctaatctt

SEQ ID NO: 131773 - DNA, 25 bp, SARS Virus
atgtttttggactaggctaatctta

SEQ ID NO: 131774 - DNA, 25 bp, SARS Virus
tgtttttggacatggctaatcttat

SEQ ID NO: 131775 - DNA, 25 bp, SARS Virus
gtttttggacaatgctaatcttatc

SEQ ID NO: 131776 - DNA, 25 bp, SARS Virus
tttttggacaagtctaatcttatcc

SEQ ID NO: 131777 - DNA, 25 bp, SARS Virus
ttttggacaaggttaatcttatccg

SEQ ID NO: 131778 - DNA, 25 bp, SARS Virus
tttggacaaggctaatcttatccgt

SEQ ID NO: 131779 - DNA, 25 bp, SARS Virus
ttggacaaggcttatcttatccgtt

SEQ ID NO: 131780 - DNA, 25 bp, SARS Virus
tggacaaggctattcttatccgttt

SEQ ID NO: 131781 - DNA, 25 bp, SARS Virus
ggacaaggctaatcttatccgttta

SEQ ID NO: 131782 - DNA, 25 bp, SARS Virus
gacaaggctaattttatccgtttaa

SEQ ID NO: 131783 - DNA, 25 bp, SARS Virus
acaaggctaatcttatccgtttaac

SEQ ID NO: 131784 - DNA, 25 bp, SARS Virus
caaggctaatcttatccgtttaaca

SEQ ID NO: 131785 - DNA, 25 bp, SARS Virus
aaggctaatcttttccgtttaacat

SEQ ID NO: 131786 - DNA, 25 bp, SARS Virus
aggctaatcttatccgtttaacatc

SEQ ID NO: 131787 - DNA, 25 bp, SARS Virus
ggctaatcttattcgtttaacatca

SEQ ID NO: 131788 - DNA, 25 bp, SARS Virus
gctaatcttatctgtttaacatcat

SEQ ID NO: 131789 - DNA, 25 bp, SARS Virus
ctaatcttatccttttaacatcatt

SEQ ID NO: 131790 - DNA, 25 bp, SARS Virus
taatcttatccgtttaacatcattg

SEQ ID NO: 131791 - DNA, 25 bp, SARS Virus
aatcttatccgtttaacatcattgt

SEQ ID NO: 131792 - DNA, 25 bp, SARS Virus
atcttatccgtttaacatcattgta

SEQ ID NO: 131793 - DNA, 25 bp, SARS Virus
tcttatccgtttaacatcattgtat

SEQ ID NO: 131794 - DNA, 25 bp, SARS Virus
cttatccgtttaacatcattgtatt

SEQ ID NO: 131795 - DNA, 25 bp, SARS Virus
ttatccgtttaaaatcattgtatta

SEQ ID NO: 131796 - DNA, 25 bp, SARS Virus
tatccgtttaacatcattgtattag

SEQ ID NO: 131797 - DNA, 25 bp, SARS Virus
atccgtttaacaacattgtattagg

SEQ ID NO: 131798 - DNA, 25 bp, SARS Virus
tccgtttaacataattgtattaggt

SEQ ID NO: 131799 - DNA, 25 bp, SARS Virus
ccgtttaacatcattgtattaggtc

SEQ ID NO: 131800 - DNA, 25 bp, SARS Virus
cgtttaacatcaatgtattaggtcc

SEQ ID NO: 131801 - DNA, 25 bp, SARS Virus
gtttaacatcatagtattaggtccg

SEQ ID NO: 131802 - DNA, 25 bp, SARS Virus
tttaacatcattatattaggtccga

SEQ ID NO: 131803 - DNA, 25 bp, SARS Virus
ttaacatcattgaattaggtccgat

SEQ ID NO: 131804 - DNA, 25 bp, SARS Virus
taacatcattgtattaggtccgatc

SEQ ID NO: 131805 - DNA, 25 bp, SARS Virus
aacatcattgtaataggtccgatcc

SEQ ID NO: 131806 - DNA, 25 bp, SARS Virus
acatcattgtataaggtccgatcct

SEQ ID NO: 131807 - DNA, 25 bp, SARS Virus
catcattgtattaggtccgatcctt

SEQ ID NO: 131808 - DNA, 25 bp, SARS Virus
atcattgtattaagtccgatcctta

SEQ ID NO: 131809 - DNA, 25 bp, SARS Virus
tcattgtattagatccgatccttat

SEQ ID NO: 131810 - DNA, 25 bp, SARS Virus
cattgtattaggaccgatccttatc

SEQ ID NO: 131811 - DNA, 25 bp, SARS Virus
attgtattaggtacgatccttatcc

SEQ ID NO: 131812 - DNA, 25 bp, SARS Virus
ttgtattaggtcagatccttatcct

SEQ ID NO: 131813 - DNA, 25 bp, SARS Virus
tgtattaggtccaatccttatcctt

SEQ ID NO: 131814 - DNA, 25 bp, SARS Virus
gtattaggtccgatccttatccttt

SEQ ID NO: 131815 - DNA, 25 bp, SARS Virus
tattaggtccgaaccttatcctttg

SEQ ID NO: 131816 - DNA, 25 bp, SARS Virus
attaggtccgatacttatcctttgg

SEQ ID NO: 131817 - DNA, 25 bp, SARS Virus
ttaggtccgatcattatcctttgga

SEQ ID NO: 131818 - DNA, 25 bp, SARS Virus
taggtccgatccatatcctttggat

SEQ ID NO: 131819 - DNA, 25 bp, SARS Virus
aggtccgatcctaatcctttggata

SEQ ID NO: 131820 - DNA, 25 bp, SARS Virus
ggtccgatccttatcctttggataa

SEQ ID NO: 131821 - DNA, 25 bp, SARS Virus
gtccgatccttaacctttggataat

SEQ ID NO: 131822 - DNA, 25 bp, SARS Virus
tccgatccttatactttggataatg

SEQ ID NO: 131823 - DNA, 25 bp, SARS Virus
ccgatccttatcatttggataatga

SEQ ID NO: 131824 - DNA, 25 bp, SARS Virus
cgatccttatccattggataatgat

SEQ ID NO: 131825 - DNA, 25 bp, SARS Virus
gatccttatcctatggataatgatc

SEQ ID NO: 131826 - DNA, 25 bp, SARS Virus
atccttatccttaggataatgatcc

SEQ ID NO: 131827 - DNA, 25 bp, SARS Virus
tccttatcctttagataatgatcca

SEQ ID NO: 131828 - DNA, 25 bp, SARS Virus
ccttatcctttgaataatgatccaa

SEQ ID NO: 131829 - DNA, 25 bp, SARS Virus
cttatcctttggataatgatccaag

SEQ ID NO: 131830 - DNA, 25 bp, SARS Virus
ttatcctttggaaaatgatccaagg

SEQ ID NO: 131831 - DNA, 25 bp, SARS Virus
tatcctttggataatgatccaaggt

SEQ ID NO: 131832 - DNA, 25 bp, SARS Virus
atcctttggataatgatccaaggta

SEQ ID NO: 131833 - DNA, 25 bp, SARS Virus
tcctttggataaagatccaaggtaa

SEQ ID NO: 131834 - DNA, 25 bp, SARS Virus
cctttggataataatccaaggtaac

SEQ ID NO: 131835 - DNA, 25 bp, SARS Virus
ctttggataatgatccaaggtaaca

SEQ ID NO: 131836 - DNA, 25 bp, SARS Virus
tttggataatgaaccaaggtaacaa

SEQ ID NO: 131837 - DNA, 25 bp, SARS Virus
ttggataatgatacaaggtaacaag

SEQ ID NO: 131838 - DNA, 25 bp, SARS Virus
tggataatgatcaaaggtaacaagg

SEQ ID NO: 131839 - DNA, 25 bp, SARS Virus
ggataatgatccaaggtaacaaggt

SEQ ID NO: 131840 - DNA, 25 bp, SARS Virus
gataatgatccaaggtaacaaggtc

SEQ ID NO: 131841 - DNA, 25 bp, SARS Virus
ataatgatccaaagtaacaaggtcc

SEQ ID NO: 131842 - DNA, 25 bp, SARS Virus
taatgatccaagataacaaggtcct

SEQ ID NO: 131843 - DNA, 25 bp, SARS Virus
aatgatccaaggaaacaaggtcctc

SEQ ID NO: 131844 - DNA, 25 bp, SARS Virus
atgatccaaggtaacaaggtcctca

SEQ ID NO: 131845 - DNA, 25 bp, SARS Virus
tgatccaaggtaacaaggtcctcaa

SEQ ID NO: 131846 - DNA, 25 bp, SARS Virus
gatccaaggtaaaaaggtcctcaac

SEQ ID NO: 131847 - DNA, 25 bp, SARS Virus
atccaaggtaacaaggtcctcaaca

SEQ ID NO: 131848 - DNA, 25 bp, SARS Virus
tccaaggtaacaaggtcctcaacaa

SEQ ID NO: 131849 - DNA, 25 bp, SARS Virus
ccaaggtaacaaagtcctcaacaaa

SEQ ID NO: 131850 - DNA, 25 bp, SARS Virus
caaggtaacaagatcctcaacaaat

SEQ ID NO: 131851 - DNA, 25 bp, SARS Virus
aaggtaacaaggacctcaacaaatt

SEQ ID NO: 131852 - DNA, 25 bp, SARS Virus
aggtaacaaggtactcaacaaattc

SEQ ID NO: 131853 - DNA, 25 bp, SARS Virus
ggtaacaaggtcatcaacaaattcg

SEQ ID NO: 131854 - DNA, 25 bp, SARS Virus
gtaacaaggtccacaacaaattcga

SEQ ID NO: 131855 - DNA, 25 bp, SARS Virus
taacaaggtcctaaacaaattcgag

SEQ ID NO: 131856 - DNA, 25 bp, SARS Virus
aacaaggtcctcaacaaattcgagg

SEQ ID NO: 131857 - DNA, 25 bp, SARS Virus
acaaggtcctcaacaaattcgagga

SEQ ID NO: 131858 - DNA, 25 bp, SARS Virus
caaggtcctcaaaaaattcgaggag

SEQ ID NO: 131859 - DNA, 25 bp, SARS Virus
aaggtcctcaacaaattcgaggagt

SEQ ID NO: 131860 - DNA, 25 bp, SARS Virus
aggtcctcaacaaattcgaggagtt

SEQ ID NO: 131861 - DNA, 25 bp, SARS Virus
ggtcctcaacaaattcgaggagttg

SEQ ID NO: 131862 - DNA, 25 bp, SARS Virus
gtcctcaacaaaatcgaggagttgc

SEQ ID NO: 131863 - DNA, 25 bp, SARS Virus
tcctcaacaaatacgaggagttgcc

SEQ ID NO: 131864 - DNA, 25 bp, SARS Virus
cctcaacaaattagaggagttgcca

SEQ ID NO: 131865 - DNA, 25 bp, SARS Virus
ctcaacaaattcaaggagttgccat

SEQ ID NO: 131866 - DNA, 25 bp, SARS Virus
tcaacaaattcgaggagttgccatt

SEQ ID NO: 131867 - DNA, 25 bp, SARS Virus
caacaaattcgaagagttgccatta

SEQ ID NO: 131868 - DNA, 25 bp, SARS Virus
aacaaattcgagaagttgccattat

SEQ ID NO: 131869 - DNA, 25 bp, SARS Virus
acaaattcgaggagttgccattatc

SEQ ID NO: 131870 - DNA, 25 bp, SARS Virus
caaattcgaggaattgccattatca

SEQ ID NO: 131871 - DNA, 25 bp, SARS Virus
aaattcgaggagatgccattatcat

SEQ ID NO: 131872 - DNA, 25 bp, SARS Virus
aattcgaggagtagccattatcatg

SEQ ID NO: 131873 - DNA, 25 bp, SARS Virus
attcgaggagttaccattatcatgg

SEQ ID NO: 131874 - DNA, 25 bp, SARS Virus
ttcgaggagttgacattatcatggc

SEQ ID NO: 131875 - DNA, 25 bp, SARS Virus
tcgaggagttgcaattatcatggca

SEQ ID NO: 131876 - DNA, 25 bp, SARS Virus
cgaggagttgccattatcatggcaa

SEQ ID NO: 131877 - DNA, 25 bp, SARS Virus
gaggagttgccaatatcatggcaac

SEQ ID NO: 131878 - DNA, 25 bp, SARS Virus
aggagttgccataatcatggcaaca

SEQ ID NO: 131879 - DNA, 25 bp, SARS Virus
ggagttgccattatcatggcaacag

SEQ ID NO: 131880 - DNA, 25 bp, SARS Virus
gagttgccattaacatggcaacaga

SEQ ID NO: 131881 - DNA, 25 bp, SARS Virus
agttgccattataatggcaacagac

SEQ ID NO: 131882 - DNA, 25 bp, SARS Virus
gttgccattatcatggcaacagacg

SEQ ID NO: 131883 - DNA, 25 bp, SARS Virus
ttgccattatcaaggcaacagacgg

SEQ ID NO: 131884 - DNA, 25 bp, SARS Virus
tgccattatcatagcaacagacggt

SEQ ID NO: 131885 - DNA, 25 bp, SARS Virus
gccattatcatgacaacagacggta

SEQ ID NO: 131886 - DNA, 25 bp, SARS Virus
ccattatcatggaaacagacggtac

SEQ ID NO: 131887 - DNA, 25 bp, SARS Virus
cattatcatggcaacagacggtact

SEQ ID NO: 131888 - DNA, 25 bp, SARS Virus
attatcatggcaacagacggtacta

SEQ ID NO: 131889 - DNA, 25 bp, SARS Virus
ttatcatggcaaaagacggtactat

SEQ ID NO: 131890 - DNA, 25 bp, SARS Virus
tatcatggcaacagacggtactatt

SEQ ID NO: 131891 - DNA, 25 bp, SARS Virus
atcatggcaacaaacggtactattc

SEQ ID NO: 131892 - DNA, 25 bp, SARS Virus
tcatggcaacagacggtactattcg

SEQ ID NO: 131893 - DNA, 25 bp, SARS Virus
catggcaacagaaggtactattcgt

SEQ ID NO: 131894 - DNA, 25 bp, SARS Virus
atggcaacagacagtactattcgtt

SEQ ID NO: 131895 - DNA, 25 bp, SARS Virus
tggcaacagacgatactattcgtta

SEQ ID NO: 131896 - DNA, 25 bp, SARS Virus
ggcaacagacggaactattcgttac

SEQ ID NO: 131897 - DNA, 25 bp, SARS Virus
gcaacagacggtactattcgttaca

SEQ ID NO: 131898 - DNA, 25 bp, SARS Virus
caacagacggtaatattcgttacaa

SEQ ID NO: 131899 - DNA, 25 bp, SARS Virus
aacagacggtacaattcgttacaat

SEQ ID NO: 131900 - DNA, 25 bp, SARS Virus
acagacggtactattcgttacaatt

SEQ ID NO: 131901 - DNA, 25 bp, SARS Virus
cagacggtactaatcgttacaattt

SEQ ID NO: 131902 - DNA, 25 bp, SARS Virus
agacggtactatacgttacaatttc

SEQ ID NO: 131903 - DNA, 25 bp, SARS Virus
gacggtactattagttacaatttca

SEQ ID NO: 131904 - DNA, 25 bp, SARS Virus
acggtactattcattacaatttcaa

SEQ ID NO: 131905 - DNA, 25 bp, SARS Virus
cggtactattcgatacaatttcaag

SEQ ID NO: 131906 - DNA, 25 bp, SARS Virus
ggtactattcgtaacaatttcaagg

SEQ ID NO: 131907 - DNA, 25 bp, SARS Virus
gtactattcgttacaatttcaaggt

SEQ ID NO: 131908 - DNA, 25 bp, SARS Virus
tactattcgttaaaatttcaaggtt

SEQ ID NO: 131909 - DNA, 25 bp, SARS Virus
actattcgttacaatttcaaggttt

SEQ ID NO: 131910 - DNA, 25 bp, SARS Virus
ctattcgttacaatttcaaggtttg

SEQ ID NO: 131911 - DNA, 25 bp, SARS Virus
tattcgttacaaattcaaggtttgt

SEQ ID NO: 131912 - DNA, 25 bp, SARS Virus
attcgttacaatatcaaggtttgtc

SEQ ID NO: 131913 - DNA, 25 bp, SARS Virus
ttcgttacaattacaaggtttgtct

SEQ ID NO: 131914 - DNA, 25 bp, SARS Virus
tcgttacaatttaaaggtttgtctt

SEQ ID NO: 131915 - DNA, 25 bp, SARS Virus
cgttacaatttcaaggtttgtctta

SEQ ID NO: 131916 - DNA, 25 bp, SARS Virus
gttacaatttcaaggtttgtcttat

SEQ ID NO: 131917 - DNA, 25 bp, SARS Virus
ttacaatttcaaagtttgtcttatt

SEQ ID NO: 131918 - DNA, 25 bp, SARS Virus
tacaatttcaagatttgtcttatta

SEQ ID NO: 131919 - DNA, 25 bp, SARS Virus
acaatttcaaggattgtcttattat

SEQ ID NO: 131920 - DNA, 25 bp, SARS Virus
caatttcaaggtatgtcttattatt

SEQ ID NO: 131921 - DNA, 25 bp, SARS Virus
aatttcaaggttagtcttattatta

SEQ ID NO: 131922 - DNA, 25 bp, SARS Virus
atttcaaggtttatcttattattat

SEQ ID NO: 131923 - DNA, 25 bp, SARS Virus
tttcaaggtttgacttattattatt

SEQ ID NO: 131924 - DNA, 25 bp, SARS Virus
ttcaaggtttgtattattattatta

SEQ ID NO: 131925 - DNA, 25 bp, SARS Virus
tcaaggtttgtcatattattattat

SEQ ID NO: 131926 - DNA, 25 bp, SARS Virus
caaggtttgtctaattattattatc

SEQ ID NO: 131927 - DNA, 25 bp, SARS Virus
aaggtttgtcttattattattatca

SEQ ID NO: 131928 - DNA, 25 bp, SARS Virus
aggtttgtcttaatattattatcaa

SEQ ID NO: 131929 - DNA, 25 bp, SARS Virus
ggtttgtcttataattattatcaat

SEQ ID NO: 131930 - DNA, 25 bp, SARS Virus
gtttgtcttattattattatcaatc

SEQ ID NO: 131931 - DNA, 25 bp, SARS Virus
tttgtcttattaatattatcaatca

SEQ ID NO: 131932 - DNA, 25 bp, SARS Virus
ttgtcttattataattatcaatcaa

SEQ ID NO: 131933 - DNA, 25 bp, SARS Virus
tgtcttattattattatcaatcaag

SEQ ID NO: 131934 - DNA, 25 bp, SARS Virus
gtcttattattaatatcaatcaagc

SEQ ID NO: 131935 - DNA, 25 bp, SARS Virus
tcttattattataatcaatcaagca

SEQ ID NO: 131936 - DNA, 25 bp, SARS Virus
cttattattattatcaatcaagcaa

SEQ ID NO: 131937 - DNA, 25 bp, SARS Virus
ttattattattaacaatcaagcaaa

SEQ ID NO: 131938 - DNA, 25 bp, SARS Virus
tattattattataaatcaagcaaat

SEQ ID NO: 131939 - DNA, 25 bp, SARS Virus
attattattatcaatcaagcaaatc

SEQ ID NO: 131940 - DNA, 25 bp, SARS Virus
ttattattatcaatcaagcaaatct

SEQ ID NO: 131941 - DNA, 25 bp, SARS Virus
tattattatcaaacaagcaaatctg

SEQ ID NO: 131942 - DNA, 25 bp, SARS Virus
attattatcaataaagcaaatctgg

SEQ ID NO: 131943 - DNA, 25 bp, SARS Virus
ttattatcaatcaagcaaatctggt

SEQ ID NO: 131944 - DNA, 25 bp, SARS Virus
tattatcaatcaagcaaatctggtc

SEQ ID NO: 131945 - DNA, 25 bp, SARS Virus
attatcaatcaaacaaatctggtct

SEQ ID NO: 131946 - DNA, 25 bp, SARS Virus
ttatcaatcaagaaaatctggtctt

SEQ ID NO: 131947 - DNA, 25 bp, SARS Virus
tatcaatcaagcaaatctggtcttc

SEQ ID NO: 131948 - DNA, 25 bp, SARS Virus
atcaatcaagcaaatctggtcttct

SEQ ID NO: 131949 - DNA, 25 bp, SARS Virus
tcaatcaagcaaatctggtcttcta

SEQ ID NO: 131950 - DNA, 25 bp, SARS Virus
caatcaagcaaaactggtcttctag

SEQ ID NO: 131951 - DNA, 25 bp, SARS Virus
aatcaagcaaatatggtcttctagt

SEQ ID NO: 131952 - DNA, 25 bp, SARS Virus
atcaagcaaatcaggtcttctagtc

SEQ ID NO: 131953 - DNA, 25 bp, SARS Virus
tcaagcaaatctagtcttctagtcc

SEQ ID NO: 131954 - DNA, 25 bp, SARS Virus
caagcaaatctgatcttctagtcct

SEQ ID NO: 131955 - DNA, 25 bp, SARS Virus
aagcaaatctggacttctagtcctt

SEQ ID NO: 131956 - DNA, 25 bp, SARS Virus
agcaaatctggtattctagtccttg

SEQ ID NO: 131957 - DNA, 25 bp, SARS Virus
gcaaatctggtcatctagtccttga

SEQ ID NO: 131958 - DNA, 25 bp, SARS Virus
caaatctggtctactagtccttgag

SEQ ID NO: 131959 - DNA, 25 bp, SARS Virus
aaatctggtcttatagtccttgagg

SEQ ID NO: 131960 - DNA, 25 bp, SARS Virus
aatctggtcttcaagtccttgagga

SEQ ID NO: 131961 - DNA, 25 bp, SARS Virus
atctggtcttctagtccttgaggaa

SEQ ID NO: 131962 - DNA, 25 bp, SARS Virus
tctggtcttctaatccttgaggaag

SEQ ID NO: 131963 - DNA, 25 bp, SARS Virus
ctggtcttctagaccttgaggaagt

SEQ ID NO: 131964 - DNA, 25 bp, SARS Virus
tggtcttctagtacttgaggaagtc

SEQ ID NO: 131965 - DNA, 25 bp, SARS Virus
ggtcttctagtcattgaggaagtct

SEQ ID NO: 131966 - DNA, 25 bp, SARS Virus
gtcttctagtccatgaggaagtctt

SEQ ID NO: 131967 - DNA, 25 bp, SARS Virus
tcttctagtcctagaggaagtcttc

SEQ ID NO: 131968 - DNA, 25 bp, SARS Virus
cttctagtccttaaggaagtcttct

SEQ ID NO: 131969 - DNA, 25 bp, SARS Virus
ttctagtccttgaggaagtcttctc

SEQ ID NO: 131970 - DNA, 25 bp, SARS Virus
tctagtccttgaagaagtcttctca

SEQ ID NO: 131971 - DNA, 25 bp, SARS Virus
ctagtccttgagaaagtcttctcaa

SEQ ID NO: 131972 - DNA, 25 bp, SARS Virus
tagtccttgaggaagtcttctcaag

SEQ ID NO: 131973 - DNA, 25 bp, SARS Virus
agtccttgaggaagtcttctcaagt

SEQ ID NO: 131974 - DNA, 25 bp, SARS Virus
gtccttgaggaaatcttctcaagtc

SEQ ID NO: 131975 - DNA, 25 bp, SARS Virus
tccttgaggaagacttctcaagtct

SEQ ID NO: 131976 - DNA, 25 bp, SARS Virus
ccttgaggaagtattctcaagtcta

SEQ ID NO: 131977 - DNA, 25 bp, SARS Virus
cttgaggaagtcatctcaagtctaa

SEQ ID NO: 131978 - DNA, 25 bp, SARS Virus
ttgaggaagtctactcaagtctaaa

SEQ ID NO: 131979 - DNA, 25 bp, SARS Virus
tgaggaagtcttatcaagtctaaaa

SEQ ID NO: 131980 - DNA, 25 bp, SARS Virus
gaggaagtcttcacaagtctaaaaa

SEQ ID NO: 131981 - DNA, 25 bp, SARS Virus
aggaagtcttctaaagtctaaaaat

SEQ ID NO: 131982 - DNA, 25 bp, SARS Virus
ggaagtcttctcaagtctaaaaatt

SEQ ID NO: 131983 - DNA, 25 bp, SARS Virus
gaagtcttctcaagtctaaaaattg

SEQ ID NO: 131984 - DNA, 25 bp, SARS Virus
aagtcttctcaaatctaaaaattgt

SEQ ID NO: 131985 - DNA, 25 bp, SARS Virus
agtcttctcaagactaaaaattgtg

SEQ ID NO: 131986 - DNA, 25 bp, SARS Virus
gtcttctcaagtataaaaattgtgc

SEQ ID NO: 131987 - DNA, 25 bp, SARS Virus
tcttctcaagtcaaaaaattgtgcg

SEQ ID NO: 131988 - DNA, 25 bp, SARS Virus
cttctcaagtctaaaaattgtgcgc

SEQ ID NO: 131989 - DNA, 25 bp, SARS Virus
ttctcaagtctaaaaattgtgcgct

SEQ ID NO: 131990 - DNA, 25 bp, SARS Virus
tctcaagtctaaaaattgtgcgctc

SEQ ID NO: 131991 - DNA, 25 bp, SARS Virus
ctcaagtctaaaaattgtgcgctca

SEQ ID NO: 131992 - DNA, 25 bp, SARS Virus
tcaagtctaaaaattgtgcgctcat

SEQ ID NO: 131993 - DNA, 25 bp, SARS Virus
caagtctaaaaaatgtgcgctcatc

SEQ ID NO: 131994 - DNA, 25 bp, SARS Virus
aagtctaaaaatagtgcgctcatct

SEQ ID NO: 131995 - DNA, 25 bp, SARS Virus
agtctaaaaattatgcgctcatctg

SEQ ID NO: 131996 - DNA, 25 bp, SARS Virus
gtctaaaaattgagcgctcatctgc

SEQ ID NO: 131997 - DNA, 25 bp, SARS Virus
tctaaaaattgtacgctcatctgca

SEQ ID NO: 131998 - DNA, 25 bp, SARS Virus
ctaaaaattgtgagctcatctgcat

SEQ ID NO: 131999 - DNA, 25 bp, SARS Virus
taaaaattgtgcactcatctgcatt

SEQ ID NO: 132000 - DNA, 25 bp, SARS Virus
aaaaattgtgcgatcatctgcattt

SEQ ID NO: 132001 - DNA, 25 bp, SARS Virus
aaaattgtgcgcacatctgcatttg

SEQ ID NO: 132002 - DNA, 25 bp, SARS Virus
aaattgtgcgctaatctgcatttgg

SEQ ID NO: 132003 - DNA, 25 bp, SARS Virus
aattgtgcgctcatctgcatttggc

SEQ ID NO: 132004 - DNA, 25 bp, SARS Virus
attgtgcgctcaactgcatttggca

SEQ ID NO: 132005 - DNA, 25 bp, SARS Virus
ttgtgcgctcatatgcatttggcaa

SEQ ID NO: 132006 - DNA, 25 bp, SARS Virus
tgtgcgctcatcagcatttggcaac

SEQ ID NO: 132007 - DNA, 25 bp, SARS Virus
gtgcgctcatctacatttggcaacc

SEQ ID NO: 132008 - DNA, 25 bp, SARS Virus
tgcgctcatctgaatttggcaacca

SEQ ID NO: 132009 - DNA, 25 bp, SARS Virus
gcgctcatctgcatttggcaaccaa

SEQ ID NO: 132010 - DNA, 25 bp, SARS Virus
cgctcatctgcaattggcaaccaaa

SEQ ID NO: 132011 - DNA, 25 bp, SARS Virus
gctcatctgcatatggcaaccaaaa

SEQ ID NO: 132012 - DNA, 25 bp, SARS Virus
ctcatctgcattaggcaaccaaaat

SEQ ID NO: 132013 - DNA, 25 bp, SARS Virus
tcatctgcatttagcaaccaaaatg

SEQ ID NO: 132014 - DNA, 25 bp, SARS Virus
catctgcatttgacaaccaaaatga

SEQ ID NO: 132015 - DNA, 25 bp, SARS Virus
atctgcatttggaaaccaaaatgat

SEQ ID NO: 132016 - DNA, 25 bp, SARS Virus
tctgcatttggcaaccaaaatgatt

SEQ ID NO: 132017 - DNA, 25 bp, SARS Virus
ctgcatttggcaaccaaaatgattt

SEQ ID NO: 132018 - DNA, 25 bp, SARS Virus
tgcatttggcaaacaaaatgatttg

SEQ ID NO: 132019 - DNA, 25 bp, SARS Virus
gcatttggcaacaaaaatgatttga

SEQ ID NO: 132020 - DNA, 25 bp, SARS Virus
catttggcaaccaaaatgatttgag

SEQ ID NO: 132021 - DNA, 25 bp, SARS Virus
atttggcaaccaaaatgatttgagt

SEQ ID NO: 132022 - DNA, 25 bp, SARS Virus
tttggcaaccaaaatgatttgagtg

SEQ ID NO: 132023 - DNA, 25 bp, SARS Virus
ttggcaaccaaaatgatttgagtgc

SEQ ID NO: 132024 - DNA, 25 bp, SARS Virus
tggcaaccaaaaagatttgagtgca

SEQ ID NO: 132025 - DNA, 25 bp, SARS Virus
ggcaaccaaaataatttgagtgcaa

SEQ ID NO: 132026 - DNA, 25 bp, SARS Virus
gcaaccaaaatgatttgagtgcaat

SEQ ID NO: 132027 - DNA, 25 bp, SARS Virus
caaccaaaatgaattgagtgcaatt

SEQ ID NO: 132028 - DNA, 25 bp, SARS Virus
aaccaaaatgatatgagtgcaattg

SEQ ID NO: 132029 - DNA, 25 bp, SARS Virus
accaaaatgattagagtgcaattgt

SEQ ID NO: 132030 - DNA, 25 bp, SARS Virus
ccaaaatgatttaagtgcaattgtt

SEQ ID NO: 132031 - DNA, 25 bp, SARS Virus
caaaatgatttgagtgcaattgtta

SEQ ID NO: 132032 - DNA, 25 bp, SARS Virus
aaaatgatttgaatgcaattgttat

SEQ ID NO: 132033 - DNA, 25 bp, SARS Virus
aaatgatttgagagcaattgttata

SEQ ID NO: 132034 - DNA, 25 bp, SARS Virus
aatgatttgagtacaattgttataa

SEQ ID NO: 132035 - DNA, 25 bp, SARS Virus
atgatttgagtgaaattgttataac

SEQ ID NO: 132036 - DNA, 25 bp, SARS Virus
tgatttgagtgcaattgttataacg

SEQ ID NO: 132037 - DNA, 25 bp, SARS Virus
gatttgagtgcaattgttataacgt

SEQ ID NO: 132038 - DNA, 25 bp, SARS Virus
atttgagtgcaaatgttataacgtc

SEQ ID NO: 132039 - DNA, 25 bp, SARS Virus
tttgagtgcaatagttataacgtcg

SEQ ID NO: 132040 - DNA, 25 bp, SARS Virus
ttgagtgcaattattataacgtcgt

SEQ ID NO: 132041 - DNA, 25 bp, SARS Virus
tgagtgcaattgatataacgtcgtc

SEQ ID NO: 132042 - DNA, 25 bp, SARS Virus
gagtgcaattgtaataacgtcgtca

SEQ ID NO: 132043 - DNA, 25 bp, SARS Virus
agtgcaattgttataacgtcgtcat

SEQ ID NO: 132044 - DNA, 25 bp, SARS Virus
gtgcaattgttaaaacgtcgtcatg

SEQ ID NO: 132045 - DNA, 25 bp, SARS Virus
tgcaattgttataacgtcgtcatgc

SEQ ID NO: 132046 - DNA, 25 bp, SARS Virus
gcaattgttataacgtcgtcatgcg

SEQ ID NO: 132047 - DNA, 25 bp, SARS Virus
caattgttataaagtcgtcatgcgt

SEQ ID NO: 132048 - DNA, 25 bp, SARS Virus
aattgttataacatcgtcatgcgtg

SEQ ID NO: 132049 - DNA, 25 bp, SARS Virus
attgttataacgacgtcatgcgtgt

SEQ ID NO: 132050 - DNA, 25 bp, SARS Virus
ttgttataacgtagtcatgcgtgtg

SEQ ID NO: 132051 - DNA, 25 bp, SARS Virus
tgttataacgtcatcatgcgtgtgt

SEQ ID NO: 132052 - DNA, 25 bp, SARS Virus
gttataacgtcgacatgcgtgtgtt

SEQ ID NO: 132053 - DNA, 25 bp, SARS Virus
ttataacgtcgtaatgcgtgtgtta

SEQ ID NO: 132054 - DNA, 25 bp, SARS Virus
tataacgtcgtcatgcgtgtgttag

SEQ ID NO: 132055 - DNA, 25 bp, SARS Virus
ataacgtcgtcaagcgtgtgttagc

SEQ ID NO: 132056 - DNA, 25 bp, SARS Virus
taacgtcgtcatacgtgtgttagct

SEQ ID NO: 132057 - DNA, 25 bp, SARS Virus
aacgtcgtcatgagtgtgttagctt

SEQ ID NO: 132058 - DNA, 25 bp, SARS Virus
acgtcgtcatgcatgtgttagcttc

SEQ ID NO: 132059 - DNA, 25 bp, SARS Virus
cgtcgtcatgcgagtgttagcttcg

SEQ ID NO: 132060 - DNA, 25 bp, SARS Virus
gtcgtcatgcgtatgttagcttcgc

SEQ ID NO: 132061 - DNA, 25 bp, SARS Virus
tcgtcatgcgtgagttagcttcgcg

SEQ ID NO: 132062 - DNA, 25 bp, SARS Virus
cgtcatgcgtgtattagcttcgcgt

SEQ ID NO: 132063 - DNA, 25 bp, SARS Virus
gtcatgcgtgtgatagcttcgcgtc

SEQ ID NO: 132064 - DNA, 25 bp, SARS Virus
tcatgcgtgtgtaagcttcgcgtca

SEQ ID NO: 132065 - DNA, 25 bp, SARS Virus
catgcgtgtgttagcttcgcgtcat

SEQ ID NO: 132066 - DNA, 25 bp, SARS Virus
atgcgtgtgttaacttcgcgtcatt

SEQ ID NO: 132067 - DNA, 25 bp, SARS Virus
tgcgtgtgttagattcgcgtcattc

SEQ ID NO: 132068 - DNA, 25 bp, SARS Virus
gcgtgtgttagcatcgcgtcattcc

SEQ ID NO: 132069 - DNA, 25 bp, SARS Virus
cgtgtgttagctacgcgtcattcct

SEQ ID NO: 132070 - DNA, 25 bp, SARS Virus
gtgtgttagcttagcgtcattccta

SEQ ID NO: 132071 - DNA, 25 bp, SARS Virus
tgtgttagcttcacgtcattcctac

SEQ ID NO: 132072 - DNA, 25 bp, SARS Virus
gtgttagcttcgagtcattcctacc

SEQ ID NO: 132073 - DNA, 25 bp, SARS Virus
tgttagcttcgcatcattcctaccg

SEQ ID NO: 132074 - DNA, 25 bp, SARS Virus
gttagcttcgcgacattcctaccga

SEQ ID NO: 132075 - DNA, 25 bp, SARS Virus
ttagcttcgcgtaattcctaccgat

SEQ ID NO: 132076 - DNA, 25 bp, SARS Virus
tagcttcgcgtcattcctaccgatc

SEQ ID NO: 132077 - DNA, 25 bp, SARS Virus
agcttcgcgtcaatcctaccgatca

SEQ ID NO: 132078 - DNA, 25 bp, SARS Virus
gcttcgcgtcatacctaccgatcac

SEQ ID NO: 132079 - DNA, 25 bp, SARS Virus
cttcgcgtcattactaccgatcaca

SEQ ID NO: 132080 - DNA, 25 bp, SARS Virus
ttcgcgtcattcataccgatcacac

SEQ ID NO: 132081 - DNA, 25 bp, SARS Virus
tcgcgtcattccaaccgatcacact

SEQ ID NO: 132082 - DNA, 25 bp, SARS Virus
cgcgtcattcctaccgatcacactg

SEQ ID NO: 132083 - DNA, 25 bp, SARS Virus
gcgtcattcctaacgatcacactga

SEQ ID NO: 132084 - DNA, 25 bp, SARS Virus
cgtcattcctacagatcacactgat

SEQ ID NO: 132085 - DNA, 25 bp, SARS Virus
gtcattcctaccaatcacactgatc

SEQ ID NO: 132086 - DNA, 25 bp, SARS Virus
tcattcctaccgatcacactgatcg

SEQ ID NO: 132087 - DNA, 25 bp, SARS Virus
cattcctaccgaacacactgatcgt

SEQ ID NO: 132088 - DNA, 25 bp, SARS Virus
attcctaccgataacactgatcgtt

SEQ ID NO: 132089 - DNA, 25 bp, SARS Virus
ttcctaccgatcacactgatcgttc

SEQ ID NO: 132090 - DNA, 25 bp, SARS Virus
tcctaccgatcaaactgatcgttct

SEQ ID NO: 132091 - DNA, 25 bp, SARS Virus
cctaccgatcacactgatcgttctt

SEQ ID NO: 132092 - DNA, 25 bp, SARS Virus
ctaccgatcacaatgatcgttctta

SEQ ID NO: 132093 - DNA, 25 bp, SARS Virus
taccgatcacacagatcgttcttat

SEQ ID NO: 132094 - DNA, 25 bp, SARS Virus
accgatcacactaatcgttcttatg

SEQ ID NO: 132095 - DNA, 25 bp, SARS Virus
ccgatcacactgatcgttcttatgg

SEQ ID NO: 132096 - DNA, 25 bp, SARS Virus
cgatcacactgaacgttcttatggt

SEQ ID NO: 132097 - DNA, 25 bp, SARS Virus
gatcacactgatagttcttatggtg

SEQ ID NO: 132098 - DNA, 25 bp, SARS Virus
atcacactgatcattcttatggtgc

SEQ ID NO: 132099 - DNA, 25 bp, SARS Virus
tcacactgatcgatcttatggtgct

SEQ ID NO: 132100 - DNA, 25 bp, SARS Virus
cacactgatcgtacttatggtgctt

SEQ ID NO: 132101 - DNA, 25 bp, SARS Virus
acactgatcgttattatggtgcttt

SEQ ID NO: 132102 - DNA, 25 bp, SARS Virus
cactgatcgttcatatggtgctttc

SEQ ID NO: 132103 - DNA, 25 bp, SARS Virus
actgatcgttctaatggtgctttcg

SEQ ID NO: 132104 - DNA, 25 bp, SARS Virus
ctgatcgttcttatggtgctttcgt

SEQ ID NO: 132105 - DNA, 25 bp, SARS Virus
tgatcgttcttaaggtgctttcgtt

SEQ ID NO: 132106 - DNA, 25 bp, SARS Virus
gatcgttcttatagtgctttcgttc

SEQ ID NO: 132107 - DNA, 25 bp, SARS Virus
atcgttcttatgatgctttcgttct

SEQ ID NO: 132108 - DNA, 25 bp, SARS Virus
tcgttcttatggagctttcgttctt

SEQ ID NO: 132109 - DNA, 25 bp, SARS Virus
cgttcttatggtactttcgttcttt

SEQ ID NO: 132110 - DNA, 25 bp, SARS Virus
gttcttatggtgatttcgttctttt

SEQ ID NO: 132111 - DNA, 25 bp, SARS Virus
ttcttatggtgcattcgttcttttt

SEQ ID NO: 132112 - DNA, 25 bp, SARS Virus
tcttatggtgctatcgttctttttc

SEQ ID NO: 132113 - DNA, 25 bp, SARS Virus
cttatggtgcttacgttctttttct

SEQ ID NO: 132114 - DNA, 25 bp, SARS Virus
ttatggtgctttagttctttttctt

SEQ ID NO: 132115 - DNA, 25 bp, SARS Virus
tatggtgctttcattctttttcttc

SEQ ID NO: 132116 - DNA, 25 bp, SARS Virus
atggtgctttcgatctttttcttca

SEQ ID NO: 132117 - DNA, 25 bp, SARS Virus
tggtgctttcgtactttttcttcat

SEQ ID NO: 132118 - DNA, 25 bp, SARS Virus
ggtgctttcgttatttttcttcatg

SEQ ID NO: 132119 - DNA, 25 bp, SARS Virus
gtgctttcgttcattttcttcatgc

SEQ ID NO: 132120 - DNA, 25 bp, SARS Virus
tgctttcgttctatttcttcatgcg

SEQ ID NO: 132121 - DNA, 25 bp, SARS Virus
gctttcgttcttattcttcatgcga

SEQ ID NO: 132122 - DNA, 25 bp, SARS Virus
ctttcgttctttatcttcatgcgat

SEQ ID NO: 132123 - DNA, 25 bp, SARS Virus
tttcgttcttttacttcatgcgata

SEQ ID NO: 132124 - DNA, 25 bp, SARS Virus
ttcgttctttttattcatgcgataa

SEQ ID NO: 132125 - DNA, 25 bp, SARS Virus
tcgttctttttcatcatgcgataat

SEQ ID NO: 132126 - DNA, 25 bp, SARS Virus
cgttctttttctacatgcgataatt

SEQ ID NO: 132127 - DNA, 25 bp, SARS Virus
gttctttttcttaatgcgataattg

SEQ ID NO: 132128 - DNA, 25 bp, SARS Virus
ttctttttcttcatgcgataattga

SEQ ID NO: 132129 - DNA, 25 bp, SARS Virus
tctttttcttcaagcgataattgat

SEQ ID NO: 132130 - DNA, 25 bp, SARS Virus
ctttttcttcatacgataattgata

SEQ ID NO: 132131 - DNA, 25 bp, SARS Virus
tttttcttcatgagataattgataa

SEQ ID NO: 132132 - DNA, 25 bp, SARS Virus
ttttcttcatgcaataattgataat

SEQ ID NO: 132133 - DNA, 25 bp, SARS Virus
tttcttcatgcgataattgataatt

SEQ ID NO: 132134 - DNA, 25 bp, SARS Virus
ttcttcatgcgaaaattgataattg

SEQ ID NO: 132135 - DNA, 25 bp, SARS Virus
tcttcatgcgataattgataattgc

SEQ ID NO: 132136 - DNA, 25 bp, SARS Virus
cttcatgcgataattgataattgca

SEQ ID NO: 132137 - DNA, 25 bp, SARS Virus
ttcatgcgataaatgataattgcat

SEQ ID NO: 132138 - DNA, 25 bp, SARS Virus
tcatgcgataatagataattgcatg

SEQ ID NO: 132139 - DNA, 25 bp, SARS Virus
catgcgataattaataattgcatgg

SEQ ID NO: 132140 - DNA, 25 bp, SARS Virus
atgcgataattgataattgcatgga

SEQ ID NO: 132141 - DNA, 25 bp, SARS Virus
tgcgataattgaaaattgcatggac

SEQ ID NO: 132142 - DNA, 25 bp, SARS Virus
gcgataattgataattgcatggaca

SEQ ID NO: 132143 - DNA, 25 bp, SARS Virus
cgataattgataattgcatggacaa

SEQ ID NO: 132144 - DNA, 25 bp, SARS Virus
gataattgataaatgcatggacaaa

SEQ ID NO: 132145 - DNA, 25 bp, SARS Virus
ataattgataatagcatggacaaag

SEQ ID NO: 132146 - DNA, 25 bp, SARS Virus
taattgataattacatggacaaaga

SEQ ID NO: 132147 - DNA, 25 bp, SARS Virus
aattgataattgaatggacaaagaa

SEQ ID NO: 132148 - DNA, 25 bp, SARS Virus
attgataattgcatggacaaagaag

SEQ ID NO: 132149 - DNA, 25 bp, SARS Virus
ttgataattgcaaggacaaagaagg

SEQ ID NO: 132150 - DNA, 25 bp, SARS Virus
tgataattgcatagacaaagaaggc

SEQ ID NO: 132151 - DNA, 25 bp, SARS Virus
gataattgcatgaacaaagaaggct

SEQ ID NO: 132152 - DNA, 25 bp, SARS Virus
ataattgcatggacaaagaaggctt

SEQ ID NO: 132153 - DNA, 25 bp, SARS Virus
taattgcatggaaaaagaaggcttt

SEQ ID NO: 132154 - DNA, 25 bp, SARS Virus
aattgcatggacaaagaaggctttg

SEQ ID NO: 132155 - DNA, 25 bp, SARS Virus
attgcatggacaaagaaggctttgc

SEQ ID NO: 132156 - DNA, 25 bp, SARS Virus
ttgcatggacaaagaaggctttgct

SEQ ID NO: 132157 - DNA, 25 bp, SARS Virus
tgcatggacaaaaaaggctttgctt

SEQ ID NO: 132158 - DNA, 25 bp, SARS Virus
gcatggacaaagaaggctttgctta

SEQ ID NO: 132159 - DNA, 25 bp, SARS Virus
catggacaaagaaggctttgcttac

SEQ ID NO: 132160 - DNA, 25 bp, SARS Virus
atggacaaagaaagctttgcttact

SEQ ID NO: 132161 - DNA, 25 bp, SARS Virus
tggacaaagaagactttgcttactc

SEQ ID NO: 132162 - DNA, 25 bp, SARS Virus
ggacaaagaaggatttgcttactca

SEQ ID NO: 132163 - DNA, 25 bp, SARS Virus
gacaaagaaggcattgcttactcat

SEQ ID NO: 132164 - DNA, 25 bp, SARS Virus
acaaagaaggctatgcttactcatg

SEQ ID NO: 132165 - DNA, 25 bp, SARS Virus
caaagaaggcttagcttactcatgt

SEQ ID NO: 132166 - DNA, 25 bp, SARS Virus
aaagaaggctttacttactcatgta

SEQ ID NO: 132167 - DNA, 25 bp, SARS Virus
aagaaggctttgattactcatgtat

SEQ ID NO: 132168 - DNA, 25 bp, SARS Virus
agaaggctttgcatactcatgtatt

SEQ ID NO: 132169 - DNA, 25 bp, SARS Virus
gaaggctttgctaactcatgtattc

SEQ ID NO: 132170 - DNA, 25 bp, SARS Virus
aaggctttgcttactcatgtattca

SEQ ID NO: 132171 - DNA, 25 bp, SARS Virus
aggctttgcttaatcatgtattcaa

SEQ ID NO: 132172 - DNA, 25 bp, SARS Virus
ggctttgcttacacatgtattcaag

SEQ ID NO: 132173 - DNA, 25 bp, SARS Virus
gctttgcttactaatgtattcaagc

SEQ ID NO: 132174 - DNA, 25 bp, SARS Virus
ctttgcttactcatgtattcaagca

SEQ ID NO: 132175 - DNA, 25 bp, SARS Virus
tttgcttactcaagtattcaagcat

SEQ ID NO: 132176 - DNA, 25 bp, SARS Virus
ttgcttactcatatattcaagcatg

SEQ ID NO: 132177 - DNA, 25 bp, SARS Virus
tgcttactcatgaattcaagcatga

SEQ ID NO: 132178 - DNA, 25 bp, SARS Virus
gcttactcatgtattcaagcatgag

SEQ ID NO: 132179 - DNA, 25 bp, SARS Virus
cttactcatgtaatcaagcatgagt

SEQ ID NO: 132180 - DNA, 25 bp, SARS Virus
ttactcatgtatacaagcatgagtg

SEQ ID NO: 132181 - DNA, 25 bp, SARS Virus
tactcatgtattaaagcatgagtga

SEQ ID NO: 132182 - DNA, 25 bp, SARS Virus
actcatgtattcaagcatgagtgaa

SEQ ID NO: 132183 - DNA, 25 bp, SARS Virus
ctcatgtattcaagcatgagtgaaa

SEQ ID NO: 132184 - DNA, 25 bp, SARS Virus
tcatgtattcaaacatgagtgaaag

SEQ ID NO: 132185 - DNA, 25 bp, SARS Virus
catgtattcaagaatgagtgaaaga

SEQ ID NO: 132186 - DNA, 25 bp, SARS Virus
atgtattcaagcatgagtgaaagaa

SEQ ID NO: 132187 - DNA, 25 bp, SARS Virus
tgtattcaagcaagagtgaaagaac

SEQ ID NO: 132188 - DNA, 25 bp, SARS Virus
gtattcaagcataagtgaaagaaca

SEQ ID NO: 132189 - DNA, 25 bp, SARS Virus
tattcaagcatgagtgaaagaacac

SEQ ID NO: 132190 - DNA, 25 bp, SARS Virus
attcaagcatgaatgaaagaacacg

SEQ ID NO: 132191 - DNA, 25 bp, SARS Virus
ttcaagcatgagagaaagaacacga

SEQ ID NO: 132192 - DNA, 25 bp, SARS Virus
tcaagcatgagtaaaagaacacgaa

SEQ ID NO: 132193 - DNA, 25 bp, SARS Virus
caagcatgagtgaaagaacacgaat

SEQ ID NO: 132194 - DNA, 25 bp, SARS Virus
aagcatgagtgaaagaacacgaatg

SEQ ID NO: 132195 - DNA, 25 bp, SARS Virus
agcatgagtgaaagaacacgaatgt

SEQ ID NO: 132196 - DNA, 25 bp, SARS Virus
gcatgagtgaaaaaacacgaatgtt

SEQ ID NO: 132197 - DNA, 25 bp, SARS Virus
catgagtgaaagaacacgaatgttt

SEQ ID NO: 132198 - DNA, 25 bp, SARS Virus
atgagtgaaagaacacgaatgtttc

SEQ ID NO: 132199 - DNA, 25 bp, SARS Virus
tgagtgaaagaaaacgaatgtttcc

SEQ ID NO: 132200 - DNA, 25 bp, SARS Virus
gagtgaaagaacacgaatgtttccg

SEQ ID NO: 132201 - DNA, 25 bp, SARS Virus
agtgaaagaacaagaatgtttccgt

SEQ ID NO: 132202 - DNA, 25 bp, SARS Virus
gtgaaagaacacaaatgtttccgtg

SEQ ID NO: 132203 - DNA, 25 bp, SARS Virus
tgaaagaacacgaatgtttccgtgc

SEQ ID NO: 132204 - DNA, 25 bp, SARS Virus
gaaagaacacgaatgtttccgtgcg

SEQ ID NO: 132205 - DNA, 25 bp, SARS Virus
aaagaacacgaaagtttccgtgcga

SEQ ID NO: 132206 - DNA, 25 bp, SARS Virus
aagaacacgaatatttccgtgcgat

SEQ ID NO: 132207 - DNA, 25 bp, SARS Virus
agaacacgaatgattccgtgcgatc

SEQ ID NO: 132208 - DNA, 25 bp, SARS Virus
gaacacgaatgtatccgtgcgatca

SEQ ID NO: 132209 - DNA, 25 bp, SARS Virus
aacacgaatgttaccgtgcgatcat

SEQ ID NO: 132210 - DNA, 25 bp, SARS Virus
acacgaatgtttacgtgcgatcatc

SEQ ID NO: 132211 - DNA, 25 bp, SARS Virus
cacgaatgtttcagtgcgatcatca

SEQ ID NO: 132212 - DNA, 25 bp, SARS Virus
acgaatgtttccatgcgatcatcag

SEQ ID NO: 132213 - DNA, 25 bp, SARS Virus
cgaatgtttccgagcgatcatcagc

SEQ ID NO: 132214 - DNA, 25 bp, SARS Virus
gaatgtttccgtacgatcatcagca

SEQ ID NO: 132215 - DNA, 25 bp, SARS Virus
aatgtttccgtgagatcatcagcag

SEQ ID NO: 132216 - DNA, 25 bp, SARS Virus
atgtttccgtgcaatcatcagcagc

SEQ ID NO: 132217 - DNA, 25 bp, SARS Virus
tgtttccgtgcgatcatcagcagca

SEQ ID NO: 132218 - DNA, 25 bp, SARS Virus
gtttccgtgcgaacatcagcagcag

SEQ ID NO: 132219 - DNA, 25 bp, SARS Virus
tttccgtgcgataatcagcagcagc

SEQ ID NO: 132220 - DNA, 25 bp, SARS Virus
ttccgtgcgatcatcagcagcagcc

SEQ ID NO: 132221 - DNA, 25 bp, SARS Virus
tccgtgcgatcaacagcagcagccg

SEQ ID NO: 132222 - DNA, 25 bp, SARS Virus
ccgtgcgatcataagcagcagccga

SEQ ID NO: 132223 - DNA, 25 bp, SARS Virus
cgtgcgatcatcagcagcagccgag

SEQ ID NO: 132224 - DNA, 25 bp, SARS Virus
gtgcgatcatcaacagcagccgagt

SEQ ID NO: 132225 - DNA, 25 bp, SARS Virus
tgcgatcatcagaagcagccgagta

SEQ ID NO: 132226 - DNA, 25 bp, SARS Virus
gcgatcatcagcagcagccgagtag

SEQ ID NO: 132227 - DNA, 25 bp, SARS Virus
cgatcatcagcaacagccgagtagt

SEQ ID NO: 132228 - DNA, 25 bp, SARS Virus
gatcatcagcagaagccgagtagta

SEQ ID NO: 132229 - DNA, 25 bp, SARS Virus
atcatcagcagcagccgagtagtat

SEQ ID NO: 132230 - DNA, 25 bp, SARS Virus
tcatcagcagcaaccgagtagtatt

SEQ ID NO: 132231 - DNA, 25 bp, SARS Virus
catcagcagcagacgagtagtattt

SEQ ID NO: 132232 - DNA, 25 bp, SARS Virus
atcagcagcagcagagtagtattta

SEQ ID NO: 132233 - DNA, 25 bp, SARS Virus
tcagcagcagccaagtagtatttaa

SEQ ID NO: 132234 - DNA, 25 bp, SARS Virus
cagcagcagccgagtagtatttaac

SEQ ID NO: 132235 - DNA, 25 bp, SARS Virus
agcagcagccgaatagtatttaacc

SEQ ID NO: 132236 - DNA, 25 bp, SARS Virus
gcagcagccgagaagtatttaacct

SEQ ID NO: 132237 - DNA, 25 bp, SARS Virus
cagcagccgagtagtatttaaccta

SEQ ID NO: 132238 - DNA, 25 bp, SARS Virus
agcagccgagtaatatttaacctag

SEQ ID NO: 132239 - DNA, 25 bp, SARS Virus
gcagccgagtagaatttaacctagg

SEQ ID NO: 132240 - DNA, 25 bp, SARS Virus
cagccgagtagtatttaacctaggt

SEQ ID NO: 132241 - DNA, 25 bp, SARS Virus
agccgagtagtaattaacctaggta

SEQ ID NO: 132242 - DNA, 25 bp, SARS Virus
gccgagtagtatataacctaggtaa

SEQ ID NO: 132243 - DNA, 25 bp, SARS Virus
ccgagtagtattaaacctaggtaac

SEQ ID NO: 132244 - DNA, 25 bp, SARS Virus
cgagtagtatttaacctaggtaacg

SEQ ID NO: 132245 - DNA, 25 bp, SARS Virus
gagtagtatttaacctaggtaacga

SEQ ID NO: 132246 - DNA, 25 bp, SARS Virus
agtagtatttaaactaggtaacgac

SEQ ID NO: 132247 - DNA, 25 bp, SARS Virus
gtagtatttaacataggtaacgacc

SEQ ID NO: 132248 - DNA, 25 bp, SARS Virus
tagtatttaaccaaggtaacgacct

SEQ ID NO: 132249 - DNA, 25 bp, SARS Virus
agtatttaacctaggtaacgaccta

SEQ ID NO: 132250 - DNA, 25 bp, SARS Virus
gtatttaacctaagtaacgacctaa

SEQ ID NO: 132251 - DNA, 25 bp, SARS Virus
tatttaacctagataacgacctaat

SEQ ID NO: 132252 - DNA, 25 bp, SARS Virus
atttaacctaggaaacgacctaatc

SEQ ID NO: 132253 - DNA, 25 bp, SARS Virus
tttaacctaggtaacgacctaatcg

SEQ ID NO: 132254 - DNA, 25 bp, SARS Virus
ttaacctaggtaacgacctaatcgt

SEQ ID NO: 132255 - DNA, 25 bp, SARS Virus
taacctaggtaaagacctaatcgtt

SEQ ID NO: 132256 - DNA, 25 bp, SARS Virus
aacctaggtaacaacctaatcgttg

SEQ ID NO: 132257 - DNA, 25 bp, SARS Virus
acctaggtaacgacctaatcgttga

SEQ ID NO: 132258 - DNA, 25 bp, SARS Virus
cctaggtaacgaactaatcgttgag

SEQ ID NO: 132259 - DNA, 25 bp, SARS Virus
ctaggtaacgacataatcgttgagg

SEQ ID NO: 132260 - DNA, 25 bp, SARS Virus
taggtaacgaccaaatcgttgagga

SEQ ID NO: 132261 - DNA, 25 bp, SARS Virus
aggtaacgacctaatcgttgaggac

SEQ ID NO: 132262 - DNA, 25 bp, SARS Virus
ggtaacgacctaatcgttgaggact

SEQ ID NO: 132263 - DNA, 25 bp, SARS Virus
gtaacgacctaaacgttgaggactt

SEQ ID NO: 132264 - DNA, 25 bp, SARS Virus
taacgacctaatagttgaggacttc

SEQ ID NO: 132265 - DNA, 25 bp, SARS Virus
aacgacctaatcattgaggacttct

SEQ ID NO: 132266 - DNA, 25 bp, SARS Virus
acgacctaatcgatgaggacttctc

SEQ ID NO: 132267 - DNA, 25 bp, SARS Virus
cgacctaatcgtagaggacttctcg

SEQ ID NO: 132268 - DNA, 25 bp, SARS Virus
gacctaatcgttaaggacttctcgg

SEQ ID NO: 132269 - DNA, 25 bp, SARS Virus
acctaatcgttgaggacttctcggc

SEQ ID NO: 132270 - DNA, 25 bp, SARS Virus
cctaatcgttgaagacttctcggca

SEQ ID NO: 132271 - DNA, 25 bp, SARS Virus
ctaatcgttgagaacttctcggcag

SEQ ID NO: 132272 - DNA, 25 bp, SARS Virus
taatcgttgaggacttctcggcagc

SEQ ID NO: 132273 - DNA, 25 bp, SARS Virus
aatcgttgaggaattctcggcagct

SEQ ID NO: 132274 - DNA, 25 bp, SARS Virus
atcgttgaggacatctcggcagcta

SEQ ID NO: 132275 - DNA, 25 bp, SARS Virus
tcgttgaggactactcggcagctaa

SEQ ID NO: 132276 - DNA, 25 bp, SARS Virus
cgttgaggacttatcggcagctaac

SEQ ID NO: 132277 - DNA, 25 bp, SARS Virus
gttgaggacttcacggcagctaaca

SEQ ID NO: 132278 - DNA, 25 bp, SARS Virus
ttgaggacttctaggcagctaacac

SEQ ID NO: 132279 - DNA, 25 bp, SARS Virus
tgaggacttctcagcagctaacaca

SEQ ID NO: 132280 - DNA, 25 bp, SARS Virus
gaggacttctcgacagctaacacac

SEQ ID NO: 132281 - DNA, 25 bp, SARS Virus
tcttatccgtttcacatcattgtat

SEQ ID NO: 132282 - DNA, 25 bp, SARS Virus
cttatccgtttaccatcattgtatt

SEQ ID NO: 132283 - DNA, 25 bp, SARS Virus
ttatccgtttaacatcattgtatta

SEQ ID NO: 132284 - DNA, 25 bp, SARS Virus
tatccgtttaacctcattgtattag

SEQ ID NO: 132285 - DNA, 25 bp, SARS Virus
atccgtttaacaccattgtattagg

SEQ ID NO: 132286 - DNA, 25 bp, SARS Virus
tccgtttaacatcattgtattaggt

SEQ ID NO: 132287 - DNA, 25 bp, SARS Virus
ccgtttaacatccttgtattaggtc

SEQ ID NO: 132288 - DNA, 25 bp, SARS Virus
cgtttaacatcactgtattaggtcc

SEQ ID NO: 132289 - DNA, 25 bp, SARS Virus
gtttaacatcatcgtattaggtccg

SEQ ID NO: 132290 - DNA, 25 bp, SARS Virus
tttaacatcattctattaggtccga

SEQ ID NO: 132291 - DNA, 25 bp, SARS Virus
ttaacatcattgcattaggtccgat

SEQ ID NO: 132292 - DNA, 25 bp, SARS Virus
taacatcattgtcttaggtccgatc

SEQ ID NO: 132293 - DNA, 25 bp, SARS Virus
aacatcattgtactaggtccgatcc

SEQ ID NO: 132294 - DNA, 25 bp, SARS Virus
acatcattgtatcaggtccgatcct

SEQ ID NO: 132295 - DNA, 25 bp, SARS Virus
catcattgtattcggtccgatcctt

SEQ ID NO: 132296 - DNA, 25 bp, SARS Virus
atcattgtattacgtccgatcctta

SEQ ID NO: 132297 - DNA, 25 bp, SARS Virus
tcattgtattagctccgatccttat

SEQ ID NO: 132298 - DNA, 25 bp, SARS Virus
cattgtattaggcccgatccttatc

SEQ ID NO: 132299 - DNA, 25 bp, SARS Virus
attgtattaggtccgatccttatcc

SEQ ID NO: 132300 - DNA, 25 bp, SARS Virus
ttgtattaggtccgatccttatcct

SEQ ID NO: 132301 - DNA, 25 bp, SARS Virus
tgtattaggtcccatccttatcctt

SEQ ID NO: 132302 - DNA, 25 bp, SARS Virus
gtattaggtccgctccttatccttt

SEQ ID NO: 132303 - DNA, 25 bp, SARS Virus
tattaggtccgacccttatcctttg

SEQ ID NO: 132304 - DNA, 25 bp, SARS Virus
attaggtccgatccttatcctttgg

SEQ ID NO: 132305 - DNA, 25 bp, SARS Virus
ttaggtccgatccttatcctttgga

SEQ ID NO: 132306 - DNA, 25 bp, SARS Virus
taggtccgatccctatcctttggat

SEQ ID NO: 132307 - DNA, 25 bp, SARS Virus
aggtccgatcctcatcctttggata

SEQ ID NO: 132308 - DNA, 25 bp, SARS Virus
ggtccgatccttctcctttggataa

SEQ ID NO: 132309 - DNA, 25 bp, SARS Virus
gtccgatccttaccctttggataat

SEQ ID NO: 132310 - DNA, 25 bp, SARS Virus
tccgatccttatcctttggataatg

SEQ ID NO: 132311 - DNA, 25 bp, SARS Virus
ccgatccttatcctttggataatga

SEQ ID NO: 132312 - DNA, 25 bp, SARS Virus
cgatccttatcccttggataatgat

SEQ ID NO: 132313 - DNA, 25 bp, SARS Virus
gatccttatcctctggataatgatc

SEQ ID NO: 132314 - DNA, 25 bp, SARS Virus
atccttatccttcggataatgatcc

SEQ ID NO: 132315 - DNA, 25 bp, SARS Virus
tccttatcctttcgataatgatcca

SEQ ID NO: 132316 - DNA, 25 bp, SARS Virus
ccttatcctttgcataatgatccaa

SEQ ID NO: 132317 - DNA, 25 bp, SARS Virus
cttatcctttggctaatgatccaag

SEQ ID NO: 132318 - DNA, 25 bp, SARS Virus
ttatcctttggacaatgatccaagg

SEQ ID NO: 132319 - DNA, 25 bp, SARS Virus
tatcctttggatcatgatccaaggt

SEQ ID NO: 132320 - DNA, 25 bp, SARS Virus
atcctttggatactgatccaaggta

SEQ ID NO: 132321 - DNA, 25 bp, SARS Virus
tcctttggataacgatccaaggtaa

SEQ ID NO: 132322 - DNA, 25 bp, SARS Virus
cctttggataatcatccaaggtaac

SEQ ID NO: 132323 - DNA, 25 bp, SARS Virus
ctttggataatgctccaaggtaaca

SEQ ID NO: 132324 - DNA, 25 bp, SARS Virus
tttggataatgacccaaggtaacaa

SEQ ID NO: 132325 - DNA, 25 bp, SARS Virus
ttggataatgatccaaggtaacaag

SEQ ID NO: 132326 - DNA, 25 bp, SARS Virus
tggataatgatccaaggtaacaagg

SEQ ID NO: 132327 - DNA, 25 bp, SARS Virus
ggataatgatcccaggtaacaaggt

SEQ ID NO: 132328 - DNA, 25 bp, SARS Virus
gataatgatccacggtaacaaggtc

SEQ ID NO: 132329 - DNA, 25 bp, SARS Virus
ataatgatccaacgtaacaaggtcc

SEQ ID NO: 132330 - DNA, 25 bp, SARS Virus
taatgatccaagctaacaaggtcct

SEQ ID NO: 132331 - DNA, 25 bp, SARS Virus
aatgatccaaggcaacaaggtcctc

SEQ ID NO: 132332 - DNA, 25 bp, SARS Virus
atgatccaaggtcacaaggtcctca

SEQ ID NO: 132333 - DNA, 25 bp, SARS Virus
tgatccaaggtaccaaggtcctcaa

SEQ ID NO: 132334 - DNA, 25 bp, SARS Virus
gatccaaggtaacaaggtcctcaac

SEQ ID NO: 132335 - DNA, 25 bp, SARS Virus
atccaaggtaaccaggtcctcaaca

SEQ ID NO: 132336 - DNA, 25 bp, SARS Virus
tccaaggtaacacggtcctcaacaa

SEQ ID NO: 132337 - DNA, 25 bp, SARS Virus
ccaaggtaacaacgtcctcaacaaa

SEQ ID NO: 132338 - DNA, 25 bp, SARS Virus
caaggtaacaagctcctcaacaaat

SEQ ID NO: 132339 - DNA, 25 bp, SARS Virus
aaggtaacaaggccctcaacaaatt

SEQ ID NO: 132340 - DNA, 25 bp, SARS Virus
aggtaacaaggtcctcaacaaattc

SEQ ID NO: 132341 - DNA, 25 bp, SARS Virus
ggtaacaaggtcctcaacaaattcg

SEQ ID NO: 132342 - DNA, 25 bp, SARS Virus
gtaacaaggtccccaacaaattcga

SEQ ID NO: 132343 - DNA, 25 bp, SARS Virus
taacaaggtcctcaacaaattcgag

SEQ ID NO: 132344 - DNA, 25 bp, SARS Virus
aacaaggtcctccacaaattcgagg

SEQ ID NO: 132345 - DNA, 25 bp, SARS Virus
acaaggtcctcaccaaattcgagga

SEQ ID NO: 132346 - DNA, 25 bp, SARS Virus
caaggtcctcaacaaattcgaggag

SEQ ID NO: 132347 - DNA, 25 bp, SARS Virus
aaggtcctcaaccaattcgaggagt

SEQ ID NO: 132348 - DNA, 25 bp, SARS Virus
aggtcctcaacacattcgaggagtt

SEQ ID NO: 132349 - DNA, 25 bp, SARS Virus
ggtcctcaacaacttcgaggagttg

SEQ ID NO: 132350 - DNA, 25 bp, SARS Virus
gtcctcaacaaactcgaggagttgc

SEQ ID NO: 132351 - DNA, 25 bp, SARS Virus
tcctcaacaaatccgaggagttgcc

SEQ ID NO: 132352 - DNA, 25 bp, SARS Virus
cctcaacaaattcgaggagttgcca

SEQ ID NO: 132353 - DNA, 25 bp, SARS Virus
ctcaacaaattccaggagttgccat

SEQ ID NO: 132354 - DNA, 25 bp, SARS Virus
tcaacaaattcgcggagttgccatt

SEQ ID NO: 132355 - DNA, 25 bp, SARS Virus
caacaaattcgacgagttgccatta

SEQ ID NO: 132356 - DNA, 25 bp, SARS Virus
aacaaattcgagcagttgccattat

SEQ ID NO: 132357 - DNA, 25 bp, SARS Virus
acaaattcgaggcgttgccattatc

SEQ ID NO: 132358 - DNA, 25 bp, SARS Virus
caaattcgaggacttgccattatca

SEQ ID NO: 132359 - DNA, 25 bp, SARS Virus
aaattcgaggagctgccattatcat

SEQ ID NO: 132360 - DNA, 25 bp, SARS Virus
aattcgaggagtcgccattatcatg

SEQ ID NO: 132361 - DNA, 25 bp, SARS Virus
attcgaggagttcccattatcatgg

SEQ ID NO: 132362 - DNA, 25 bp, SARS Virus
ttcgaggagttgccattatcatggc

SEQ ID NO: 132363 - DNA, 25 bp, SARS Virus
tcgaggagttgccattatcatggca

SEQ ID NO: 132364 - DNA, 25 bp, SARS Virus
cgaggagttgcccttatcatggcaa

SEQ ID NO: 132365 - DNA, 25 bp, SARS Virus
gaggagttgccactatcatggcaac

SEQ ID NO: 132366 - DNA, 25 bp, SARS Virus
aggagttgccatcatcatggcaaca

SEQ ID NO: 132367 - DNA, 25 bp, SARS Virus
ggagttgccattctcatggcaacag

SEQ ID NO: 132368 - DNA, 25 bp, SARS Virus
gagttgccattaccatggcaacaga

SEQ ID NO: 132369 - DNA, 25 bp, SARS Virus
agttgccattatcatggcaacagac

SEQ ID NO: 132370 - DNA, 25 bp, SARS Virus
gttgccattatcctggcaacagacg

SEQ ID NO: 132371 - DNA, 25 bp, SARS Virus
ttgccattatcacggcaacagacgg

SEQ ID NO: 132372 - DNA, 25 bp, SARS Virus
tgccattatcatcgcaacagacggt

SEQ ID NO: 132373 - DNA, 25 bp, SARS Virus
gccattatcatgccaacagacggta

SEQ ID NO: 132374 - DNA, 25 bp, SARS Virus
ccattatcatggcaacagacggtac

SEQ ID NO: 132375 - DNA, 25 bp, SARS Virus
cattatcatggccacagacggtact

SEQ ID NO: 132376 - DNA, 25 bp, SARS Virus
attatcatggcaccagacggtacta

SEQ ID NO: 132377 - DNA, 25 bp, SARS Virus
ttatcatggcaacagacggtactat

SEQ ID NO: 132378 - DNA, 25 bp, SARS Virus
tatcatggcaaccgacggtactatt

SEQ ID NO: 132379 - DNA, 25 bp, SARS Virus
atcatggcaacacacggtactattc

SEQ ID NO: 132380 - DNA, 25 bp, SARS Virus
tcatggcaacagccggtactattcg

SEQ ID NO: 132381 - DNA, 25 bp, SARS Virus
catggcaacagacggtactattcgt

SEQ ID NO: 132382 - DNA, 25 bp, SARS Virus
atggcaacagaccgtactattcgtt

SEQ ID NO: 132383 - DNA, 25 bp, SARS Virus
tggcaacagacgctactattcgtta

SEQ ID NO: 132384 - DNA, 25 bp, SARS Virus
ggcaacagacggcactattcgttac

SEQ ID NO: 132385 - DNA, 25 bp, SARS Virus
gcaacagacggtcctattcgttaca

SEQ ID NO: 132386 - DNA, 25 bp, SARS Virus
caacagacggtactattcgttacaa

SEQ ID NO: 132387 - DNA, 25 bp, SARS Virus
aacagacggtaccattcgttacaat

SEQ ID NO: 132388 - DNA, 25 bp, SARS Virus
acagacggtactcttcgttacaatt

SEQ ID NO: 132389 - DNA, 25 bp, SARS Virus
cagacggtactactcgttacaattt

SEQ ID NO: 132390 - DNA, 25 bp, SARS Virus
agacggtactatccgttacaatttc

SEQ ID NO: 132391 - DNA, 25 bp, SARS Virus
gacggtactattcgttacaatttca

SEQ ID NO: 132392 - DNA, 25 bp, SARS Virus
acggtactattccttacaatttcaa

SEQ ID NO: 132393 - DNA, 25 bp, SARS Virus
cggtactattcgctacaatttcaag

SEQ ID NO: 132394 - DNA, 25 bp, SARS Virus
ggtactattcgtcacaatttcaagg

SEQ ID NO: 132395 - DNA, 25 bp, SARS Virus
gtactattcgttccaatttcaaggt

SEQ ID NO: 132396 - DNA, 25 bp, SARS Virus
tactattcgttacaatttcaaggtt

SEQ ID NO: 132397 - DNA, 25 bp, SARS Virus
actattcgttaccatttcaaggttt

SEQ ID NO: 132398 - DNA, 25 bp, SARS Virus
ctattcgttacactttcaaggtttg

SEQ ID NO: 132399 - DNA, 25 bp, SARS Virus
tattcgttacaacttcaaggtttgt

SEQ ID NO: 132400 - DNA, 25 bp, SARS Virus
attcgttacaatctcaaggtttgtc

SEQ ID NO: 132401 - DNA, 25 bp, SARS Virus
ttcgttacaattccaaggtttgtct

SEQ ID NO: 132402 - DNA, 25 bp, SARS Virus
tcgttacaatttcaaggtttgtctt

SEQ ID NO: 132403 - DNA, 25 bp, SARS Virus
cgttacaatttccaggtttgtctta

SEQ ID NO: 132404 - DNA, 25 bp, SARS Virus
gttacaatttcacggtttgtcttat

SEQ ID NO: 132405 - DNA, 25 bp, SARS Virus
ttacaatttcaacgtttgtcttatt

SEQ ID NO: 132406 - DNA, 25 bp, SARS Virus
tacaatttcaagctttgtcttatta

SEQ ID NO: 132407 - DNA, 25 bp, SARS Virus
acaatttcaaggcttgtcttattat

SEQ ID NO: 132408 - DNA, 25 bp, SARS Virus
caatttcaaggtctgtcttattatt

SEQ ID NO: 132409 - DNA, 25 bp, SARS Virus
aatttcaaggttcgtcttattatta

SEQ ID NO: 132410 - DNA, 25 bp, SARS Virus
atttcaaggtttctcttattattat

SEQ ID NO: 132411 - DNA, 25 bp, SARS Virus
tttcaaggtttgccttattattatt

SEQ ID NO: 132412 - DNA, 25 bp, SARS Virus
ttcaaggtttgtcttattattatta

SEQ ID NO: 132413 - DNA, 25 bp, SARS Virus
tcaaggtttgtcctattattattat

SEQ ID NO: 132414 - DNA, 25 bp, SARS Virus
caaggtttgtctcattattattatc

SEQ ID NO: 132415 - DNA, 25 bp, SARS Virus
aaggtttgtcttcttattattatca

SEQ ID NO: 132416 - DNA, 25 bp, SARS Virus
aggtttgtcttactattattatcaa

SEQ ID NO: 132417 - DNA, 25 bp, SARS Virus
ggtttgtcttatcattattatcaat

SEQ ID NO: 132418 - DNA, 25 bp, SARS Virus
gtttgtcttattcttattatcaatc

SEQ ID NO: 132419 - DNA, 25 bp, SARS Virus
tttgtcttattactattatcaatca

SEQ ID NO: 132420 - DNA, 25 bp, SARS Virus
ttgtcttattatcattatcaatcaa

SEQ ID NO: 132421 - DNA, 25 bp, SARS Virus
tgtcttattattcttatcaatcaag

SEQ ID NO: 132422 - DNA, 25 bp, SARS Virus
gtcttattattactatcaatcaagc

SEQ ID NO: 132423 - DNA, 25 bp, SARS Virus
tcttattattatcatcaatcaagca

SEQ ID NO: 132424 - DNA, 25 bp, SARS Virus
cttattattattctcaatcaagcaa

SEQ ID NO: 132425 - DNA, 25 bp, SARS Virus
ttattattattaccaatcaagcaaa

SEQ ID NO: 132426 - DNA, 25 bp, SARS Virus
tattattattatcaatcaagcaaat

SEQ ID NO: 132427 - DNA, 25 bp, SARS Virus
attattattatccatcaagcaaatc

SEQ ID NO: 132428 - DNA, 25 bp, SARS Virus
ttattattatcactcaagcaaatct

SEQ ID NO: 132429 - DNA, 25 bp, SARS Virus
tattattatcaaccaagcaaatctg

SEQ ID NO: 132430 - DNA, 25 bp, SARS Virus
attattatcaatcaagcaaatctgg

SEQ ID NO: 132431 - DNA, 25 bp, SARS Virus
ttattatcaatccagcaaatctggt

SEQ ID NO: 132432 - DNA, 25 bp, SARS Virus
tattatcaatcacgcaaatctggtc

SEQ ID NO: 132433 - DNA, 25 bp, SARS Virus
attatcaatcaaccaaatctggtct

SEQ ID NO: 132434 - DNA, 25 bp, SARS Virus
ttatcaatcaagcaaatctggtctt

SEQ ID NO: 132435 - DNA, 25 bp, SARS Virus
tatcaatcaagccaatctggtcttc

SEQ ID NO: 132436 - DNA, 25 bp, SARS Virus
atcaatcaagcacatctggtcttct

SEQ ID NO: 132437 - DNA, 25 bp, SARS Virus
tcaatcaagcaactctggtcttcta

SEQ ID NO: 132438 - DNA, 25 bp, SARS Virus
caatcaagcaaacctggtcttctag

SEQ ID NO: 132439 - DNA, 25 bp, SARS Virus
aatcaagcaaatctggtcttctagt

SEQ ID NO: 132440 - DNA, 25 bp, SARS Virus
atcaagcaaatccggtcttctagtc

SEQ ID NO: 132441 - DNA, 25 bp, SARS Virus
tcaagcaaatctcgtcttctagtcc

SEQ ID NO: 132442 - DNA, 25 bp, SARS Virus
caagcaaatctgctcttctagtcct

SEQ ID NO: 132443 - DNA, 25 bp, SARS Virus
aagcaaatctggccttctagtcctt

SEQ ID NO: 132444 - DNA, 25 bp, SARS Virus
agcaaatctggtcttctagtccttg

SEQ ID NO: 132445 - DNA, 25 bp, SARS Virus
gcaaatctggtcctctagtccttga

SEQ ID NO: 132446 - DNA, 25 bp, SARS Virus
caaatctggtctcctagtccttgag

SEQ ID NO: 132447 - DNA, 25 bp, SARS Virus
aaatctggtcttctagtccttgagg

SEQ ID NO: 132448 - DNA, 25 bp, SARS Virus
aatctggtcttccagtccttgagga

SEQ ID NO: 132449 - DNA, 25 bp, SARS Virus
atctggtcttctcgtccttgaggaa

SEQ ID NO: 132450 - DNA, 25 bp, SARS Virus
tctggtcttctactccttgaggaag

SEQ ID NO: 132451 - DNA, 25 bp, SARS Virus
ctggtcttctagcccttgaggaagt

SEQ ID NO: 132452 - DNA, 25 bp, SARS Virus
tggtcttctagtccttgaggaagtc

SEQ ID NO: 132453 - DNA, 25 bp, SARS Virus
ggtcttctagtccttgaggaagtct

SEQ ID NO: 132454 - DNA, 25 bp, SARS Virus
gtcttctagtccctgaggaagtctt

SEQ ID NO: 132455 - DNA, 25 bp, SARS Virus
tcttctagtcctcgaggaagtcttc

SEQ ID NO: 132456 - DNA, 25 bp, SARS Virus
cttctagtccttcaggaagtcttct

SEQ ID NO: 132457 - DNA, 25 bp, SARS Virus
ttctagtccttgcggaagtcttctc

SEQ ID NO: 132458 - DNA, 25 bp, SARS Virus
tctagtccttgacgaagtcttctca

SEQ ID NO: 132459 - DNA, 25 bp, SARS Virus
ctagtccttgagcaagtcttctcaa

SEQ ID NO: 132460 - DNA, 25 bp, SARS Virus
tagtccttgaggcagtcttctcaag

SEQ ID NO: 132461 - DNA, 25 bp, SARS Virus
agtccttgaggacgtcttctcaagt

SEQ ID NO: 132462 - DNA, 25 bp, SARS Virus
gtccttgaggaactcttctcaagtc

SEQ ID NO: 132463 - DNA, 25 bp, SARS Virus
tccttgaggaagccttctcaagtct

SEQ ID NO: 132464 - DNA, 25 bp, SARS Virus
ccttgaggaagtcttctcaagtcta

SEQ ID NO: 132465 - DNA, 25 bp, SARS Virus
cttgaggaagtcctctcaagtctaa

SEQ ID NO: 132466 - DNA, 25 bp, SARS Virus
ttgaggaagtctcctcaagtctaaa

SEQ ID NO: 132467 - DNA, 25 bp, SARS Virus
tgaggaagtcttctcaagtctaaaa

SEQ ID NO: 132468 - DNA, 25 bp, SARS Virus
gaggaagtcttcccaagtctaaaaa

SEQ ID NO: 132469 - DNA, 25 bp, SARS Virus
aggaagtcttctcaagtctaaaaat

SEQ ID NO: 132470 - DNA, 25 bp, SARS Virus
ggaagtcttctccagtctaaaaatt

SEQ ID NO: 132471 - DNA, 25 bp, SARS Virus
gaagtcttctcacgtctaaaaattg

SEQ ID NO: 132472 - DNA, 25 bp, SARS Virus
aagtcttctcaactctaaaaattgt

SEQ ID NO: 132473 - DNA, 25 bp, SARS Virus
agtcttctcaagcctaaaaattgtg

SEQ ID NO: 132474 - DNA, 25 bp, SARS Virus
gtcttctcaagtctaaaaattgtgc

SEQ ID NO: 132475 - DNA, 25 bp, SARS Virus
tcttctcaagtccaaaaattgtgcg

SEQ ID NO: 132476 - DNA, 25 bp, SARS Virus
cttctcaagtctcaaaattgtgcgc

SEQ ID NO: 132477 - DNA, 25 bp, SARS Virus
ttctcaagtctacaaattgtgcgct

SEQ ID NO: 132478 - DNA, 25 bp, SARS Virus
tctcaagtctaacaattgtgcgctc

SEQ ID NO: 132479 - DNA, 25 bp, SARS Virus
ctcaagtctaaacattgtgcgctca

SEQ ID NO: 132480 - DNA, 25 bp, SARS Virus
tcaagtctaaaacttgtgcgctcat

SEQ ID NO: 132481 - DNA, 25 bp, SARS Virus
caagtctaaaaactgtgcgctcatc

SEQ ID NO: 132482 - DNA, 25 bp, SARS Virus
aagtctaaaaatcgtgcgctcatct

SEQ ID NO: 132483 - DNA, 25 bp, SARS Virus
agtctaaaaattctgcgctcatctg

SEQ ID NO: 132484 - DNA, 25 bp, SARS Virus
gtctaaaaattgcgcgctcatctgc

SEQ ID NO: 132485 - DNA, 25 bp, SARS Virus
tctaaaaattgtccgctcatctgca

SEQ ID NO: 132486 - DNA, 25 bp, SARS Virus
ctaaaaattgtgcgctcatctgcat

SEQ ID NO: 132487 - DNA, 25 bp, SARS Virus
taaaaattgtgccctcatctgcatt

SEQ ID NO: 132488 - DNA, 25 bp, SARS Virus
aaaaattgtgcgctcatctgcattt

SEQ ID NO: 132489 - DNA, 25 bp, SARS Virus
aaaattgtgcgcccatctgcatttg

SEQ ID NO: 132490 - DNA, 25 bp, SARS Virus
aaattgtgcgctcatctgcatttgg

SEQ ID NO: 132491 - DNA, 25 bp, SARS Virus
aattgtgcgctcctctgcatttggc

SEQ ID NO: 132492 - DNA, 25 bp, SARS Virus
attgtgcgctcacctgcatttggca

SEQ ID NO: 132493 - DNA, 25 bp, SARS Virus
ttgtgcgctcatctgcatttggcaa

SEQ ID NO: 132494 - DNA, 25 bp, SARS Virus
tgtgcgctcatccgcatttggcaac

SEQ ID NO: 132495 - DNA, 25 bp, SARS Virus
gtgcgctcatctccatttggcaacc

SEQ ID NO: 132496 - DNA, 25 bp, SARS Virus
tgcgctcatctgcatttggcaacca

SEQ ID NO: 132497 - DNA, 25 bp, SARS Virus
gcgctcatctgcctttggcaaccaa

SEQ ID NO: 132498 - DNA, 25 bp, SARS Virus
cgctcatctgcacttggcaaccaaa

SEQ ID NO: 132499 - DNA, 25 bp, SARS Virus
gctcatctgcatctggcaaccaaaa

SEQ ID NO: 132500 - DNA, 25 bp, SARS Virus
ctcatctgcattcggcaaccaaaat

SEQ ID NO: 132501 - DNA, 25 bp, SARS Virus
tcatctgcatttcgcaaccaaaatg

SEQ ID NO: 132502 - DNA, 25 bp, SARS Virus
catctgcatttgccaaccaaaatga

SEQ ID NO: 132503 - DNA, 25 bp, SARS Virus
atctgcatttggcaaccaaaatgat

SEQ ID NO: 132504 - DNA, 25 bp, SARS Virus
tctgcatttggccaccaaaatgatt

SEQ ID NO: 132505 - DNA, 25 bp, SARS Virus
ctgcatttggcacccaaaatgattt

SEQ ID NO: 132506 - DNA, 25 bp, SARS Virus
tgcatttggcaaccaaaatgatttg

SEQ ID NO: 132507 - DNA, 25 bp, SARS Virus
gcatttggcaaccaaaatgatttga

SEQ ID NO: 132508 - DNA, 25 bp, SARS Virus
catttggcaacccaaatgatttgag

SEQ ID NO: 132509 - DNA, 25 bp, SARS Virus
atttggcaaccacaatgatttgagt

SEQ ID NO: 132510 - DNA, 25 bp, SARS Virus
tttggcaaccaacatgatttgagtg

SEQ ID NO: 132511 - DNA, 25 bp, SARS Virus
ttggcaaccaaactgatttgagtgc

SEQ ID NO: 132512 - DNA, 25 bp, SARS Virus
tggcaaccaaaacgatttgagtgca

SEQ ID NO: 132513 - DNA, 25 bp, SARS Virus
ggcaaccaaaatcatttgagtgcaa

SEQ ID NO: 132514 - DNA, 25 bp, SARS Virus
gcaaccaaaatgctttgagtgcaat

SEQ ID NO: 132515 - DNA, 25 bp, SARS Virus
caaccaaaatgacttgagtgcaatt

SEQ ID NO: 132516 - DNA, 25 bp, SARS Virus
aaccaaaatgatctgagtgcaattg

SEQ ID NO: 132517 - DNA, 25 bp, SARS Virus
accaaaatgattcgagtgcaattgt

SEQ ID NO: 132518 - DNA, 25 bp, SARS Virus
ccaaaatgatttcagtgcaattgtt

SEQ ID NO: 132519 - DNA, 25 bp, SARS Virus
caaaatgatttgcgtgcaattgtta

SEQ ID NO: 132520 - DNA, 25 bp, SARS Virus
aaaatgatttgactgcaattgttat

SEQ ID NO: 132521 - DNA, 25 bp, SARS Virus
aaatgatttgagcgcaattgttata

SEQ ID NO: 132522 - DNA, 25 bp, SARS Virus
aatgatttgagtccaattgttataa

SEQ ID NO: 132523 - DNA, 25 bp, SARS Virus
atgatttgagtgcaattgttataac

SEQ ID NO: 132524 - DNA, 25 bp, SARS Virus
tgatttgagtgccattgttataacg

SEQ ID NO: 132525 - DNA, 25 bp, SARS Virus
gatttgagtgcacttgttataacgt

SEQ ID NO: 132526 - DNA, 25 bp, SARS Virus
atttgagtgcaactgttataacgtc

SEQ ID NO: 132527 - DNA, 25 bp, SARS Virus
tttgagtgcaatcgttataacgtcg

SEQ ID NO: 132528 - DNA, 25 bp, SARS Virus
ttgagtgcaattcttataacgtcgt

SEQ ID NO: 132529 - DNA, 25 bp, SARS Virus
tgagtgcaattgctataacgtcgtc

SEQ ID NO: 132530 - DNA, 25 bp, SARS Virus
gagtgcaattgtcataacgtcgtca

SEQ ID NO: 132531 - DNA, 25 bp, SARS Virus
agtgcaattgttctaacgtcgtcat

SEQ ID NO: 132532 - DNA, 25 bp, SARS Virus
gtgcaattgttacaacgtcgtcatg

SEQ ID NO: 132533 - DNA, 25 bp, SARS Virus
tgcaattgttatcacgtcgtcatgc

SEQ ID NO: 132534 - DNA, 25 bp, SARS Virus
gcaattgttataccgtcgtcatgcg

SEQ ID NO: 132535 - DNA, 25 bp, SARS Virus
caattgttataacgtcgtcatgcgt

SEQ ID NO: 132536 - DNA, 25 bp, SARS Virus
aattgttataacctcgtcatgcgtg

SEQ ID NO: 132537 - DNA, 25 bp, SARS Virus
attgttataacgccgtcatgcgtgt

SEQ ID NO: 132538 - DNA, 25 bp, SARS Virus
ttgttataacgtcgtcatgcgtgtg

SEQ ID NO: 132539 - DNA, 25 bp, SARS Virus
tgttataacgtcctcatgcgtgtgt

SEQ ID NO: 132540 - DNA, 25 bp, SARS Virus
gttataacgtcgccatgcgtgtgtt

SEQ ID NO: 132541 - DNA, 25 bp, SARS Virus
ttataacgtcgtcatgcgtgtgtta

SEQ ID NO: 132542 - DNA, 25 bp, SARS Virus
tataacgtcgtcctgcgtgtgttag

SEQ ID NO: 132543 - DNA, 25 bp, SARS Virus
ataacgtcgtcacgcgtgtgttagc

SEQ ID NO: 132544 - DNA, 25 bp, SARS Virus
taacgtcgtcatccgtgtgttagct

SEQ ID NO: 132545 - DNA, 25 bp, SARS Virus
aacgtcgtcatgcgtgtgttagctt

SEQ ID NO: 132546 - DNA, 25 bp, SARS Virus
acgtcgtcatgcctgtgttagcttc

SEQ ID NO: 132547 - DNA, 25 bp, SARS Virus
cgtcgtcatgcgcgtgttagcttcg

SEQ ID NO: 132548 - DNA, 25 bp, SARS Virus
gtcgtcatgcgtctgttagcttcgc

SEQ ID NO: 132549 - DNA, 25 bp, SARS Virus
tcgtcatgcgtgcgttagcttcgcg

SEQ ID NO: 132550 - DNA, 25 bp, SARS Virus
cgtcatgcgtgtcttagcttcgcgt

SEQ ID NO: 132551 - DNA, 25 bp, SARS Virus
gtcatgcgtgtgctagcttcgcgtc

SEQ ID NO: 132552 - DNA, 25 bp, SARS Virus
tcatgcgtgtgtcagcttcgcgtca

SEQ ID NO: 132553 - DNA, 25 bp, SARS Virus
catgcgtgtgttcgcttcgcgtcat

SEQ ID NO: 132554 - DNA, 25 bp, SARS Virus
atgcgtgtgttaccttcgcgtcatt

SEQ ID NO: 132555 - DNA, 25 bp, SARS Virus
tgcgtgtgttagcttcgcgtcattc

SEQ ID NO: 132556 - DNA, 25 bp, SARS Virus
gcgtgtgttagcctcgcgtcattcc

SEQ ID NO: 132557 - DNA, 25 bp, SARS Virus
cgtgtgttagctccgcgtcattcct

SEQ ID NO: 132558 - DNA, 25 bp, SARS Virus
gtgtgttagcttcgcgtcattccta

SEQ ID NO: 132559 - DNA, 25 bp, SARS Virus
tgtgttagcttcccgtcattcctac

SEQ ID NO: 132560 - DNA, 25 bp, SARS Virus
gtgttagcttcgcgtcattcctacc

SEQ ID NO: 132561 - DNA, 25 bp, SARS Virus
tgttagcttcgcctcattcctaccg

SEQ ID NO: 132562 - DNA, 25 bp, SARS Virus
gttagcttcgcgccattcctaccga

SEQ ID NO: 132563 - DNA, 25 bp, SARS Virus
ttagcttcgcgtcattcctaccgat

SEQ ID NO: 132564 - DNA, 25 bp, SARS Virus
tagcttcgcgtccttcctaccgatc

SEQ ID NO: 132565 - DNA, 25 bp, SARS Virus
agcttcgcgtcactcctaccgatca

SEQ ID NO: 132566 - DNA, 25 bp, SARS Virus
gcttcgcgtcatccctaccgatcac

SEQ ID NO: 132567 - DNA, 25 bp, SARS Virus
cttcgcgtcattcctaccgatcaca

SEQ ID NO: 132568 - DNA, 25 bp, SARS Virus
ttcgcgtcattcctaccgatcacac

SEQ ID NO: 132569 - DNA, 25 bp, SARS Virus
tcgcgtcattcccaccgatcacact

SEQ ID NO: 132570 - DNA, 25 bp, SARS Virus
cgcgtcattcctcccgatcacactg

SEQ ID NO: 132571 - DNA, 25 bp, SARS Virus
gcgtcattcctaccgatcacactga

SEQ ID NO: 132572 - DNA, 25 bp, SARS Virus
cgtcattcctaccgatcacactgat

SEQ ID NO: 132573 - DNA, 25 bp, SARS Virus
gtcattcctacccatcacactgatc

SEQ ID NO: 132574 - DNA, 25 bp, SARS Virus
tcattcctaccgctcacactgatcg

SEQ ID NO: 132575 - DNA, 25 bp, SARS Virus
cattcctaccgaccacactgatcgt

SEQ ID NO: 132576 - DNA, 25 bp, SARS Virus
attcctaccgatcacactgatcgtt

SEQ ID NO: 132577 - DNA, 25 bp, SARS Virus
ttcctaccgatcccactgatcgttc

SEQ ID NO: 132578 - DNA, 25 bp, SARS Virus
tcctaccgatcacactgatcgttct

SEQ ID NO: 132579 - DNA, 25 bp, SARS Virus
cctaccgatcaccctgatcgttctt

SEQ ID NO: 132580 - DNA, 25 bp, SARS Virus
ctaccgatcacactgatcgttctta

SEQ ID NO: 132581 - DNA, 25 bp, SARS Virus
taccgatcacaccgatcgttcttat

SEQ ID NO: 132582 - DNA, 25 bp, SARS Virus
accgatcacactcatcgttcttatg

SEQ ID NO: 132583 - DNA, 25 bp, SARS Virus
ccgatcacactgctcgttcttatgg

SEQ ID NO: 132584 - DNA, 25 bp, SARS Virus
cgatcacactgaccgttcttatggt

SEQ ID NO: 132585 - DNA, 25 bp, SARS Virus
gatcacactgatcgttcttatggtg

SEQ ID NO: 132586 - DNA, 25 bp, SARS Virus
atcacactgatccttcttatggtgc

SEQ ID NO: 132587 - DNA, 25 bp, SARS Virus
tcacactgatcgctcttatggtgct

SEQ ID NO: 132588 - DNA, 25 bp, SARS Virus
cacactgatcgtccttatggtgctt

SEQ ID NO: 132589 - DNA, 25 bp, SARS Virus
acactgatcgttcttatggtgcttt

SEQ ID NO: 132590 - DNA, 25 bp, SARS Virus
cactgatcgttcctatggtgctttc

SEQ ID NO: 132591 - DNA, 25 bp, SARS Virus
actgatcgttctcatggtgctttcg

SEQ ID NO: 132592 - DNA, 25 bp, SARS Virus
ctgatcgttcttctggtgctttcgt

SEQ ID NO: 132593 - DNA, 25 bp, SARS Virus
tgatcgttcttacggtgctttcgtt

SEQ ID NO: 132594 - DNA, 25 bp, SARS Virus
gatcgttcttatcgtgctttcgttc

SEQ ID NO: 132595 - DNA, 25 bp, SARS Virus
atcgttcttatgctgctttcgttct

SEQ ID NO: 132596 - DNA, 25 bp, SARS Virus
tcgttcttatggcgctttcgttctt

SEQ ID NO: 132597 - DNA, 25 bp, SARS Virus
cgttcttatggtcctttcgttcttt

SEQ ID NO: 132598 - DNA, 25 bp, SARS Virus
gttcttatggtgctttcgttctttt

SEQ ID NO: 132599 - DNA, 25 bp, SARS Virus
ttcttatggtgccttcgttcttttt

SEQ ID NO: 132600 - DNA, 25 bp, SARS Virus
tcttatggtgctctcgttctttttc

SEQ ID NO: 132601 - DNA, 25 bp, SARS Virus
cttatggtgcttccgttctttttct

SEQ ID NO: 132602 - DNA, 25 bp, SARS Virus
ttatggtgctttcgttctttttctt

SEQ ID NO: 132603 - DNA, 25 bp, SARS Virus
tatggtgctttccttctttttcttc

SEQ ID NO: 132604 - DNA, 25 bp, SARS Virus
atggtgctttcgctctttttcttca

SEQ ID NO: 132605 - DNA, 25 bp, SARS Virus
tggtgctttcgtcctttttcttcat

SEQ ID NO: 132606 - DNA, 25 bp, SARS Virus
ggtgctttcgttctttttcttcatg

SEQ ID NO: 132607 - DNA, 25 bp, SARS Virus
gtgctttcgttccttttcttcatgc

SEQ ID NO: 132608 - DNA, 25 bp, SARS Virus
tgctttcgttctctttcttcatgcg

SEQ ID NO: 132609 - DNA, 25 bp, SARS Virus
gctttcgttcttcttcttcatgcga

SEQ ID NO: 132610 - DNA, 25 bp, SARS Virus
ctttcgttctttctcttcatgcgat

SEQ ID NO: 132611 - DNA, 25 bp, SARS Virus
tttcgttcttttccttcatgcgata

SEQ ID NO: 132612 - DNA, 25 bp, SARS Virus
ttcgttctttttcttcatgcgataa

SEQ ID NO: 132613 - DNA, 25 bp, SARS Virus
tcgttctttttcctcatgcgataat

SEQ ID NO: 132614 - DNA, 25 bp, SARS Virus
cgttctttttctccatgcgataatt

SEQ ID NO: 132615 - DNA, 25 bp, SARS Virus
gttctttttcttcatgcgataattg

SEQ ID NO: 132616 - DNA, 25 bp, SARS Virus
ttctttttcttcctgcgataattga

SEQ ID NO: 132617 - DNA, 25 bp, SARS Virus
tctttttcttcacgcgataattgat

SEQ ID NO: 132618 - DNA, 25 bp, SARS Virus
ctttttcttcatccgataattgata

SEQ ID NO: 132619 - DNA, 25 bp, SARS Virus
tttttcttcatgcgataattgataa

SEQ ID NO: 132620 - DNA, 25 bp, SARS Virus
ttttcttcatgccataattgataat

SEQ ID NO: 132621 - DNA, 25 bp, SARS Virus
tttcttcatgcgctaattgataatt

SEQ ID NO: 132622 - DNA, 25 bp, SARS Virus
ttcttcatgcgacaattgataattg

SEQ ID NO: 132623 - DNA, 25 bp, SARS Virus
tcttcatgcgatcattgataattgc

SEQ ID NO: 132624 - DNA, 25 bp, SARS Virus
cttcatgcgatacttgataattgca

SEQ ID NO: 132625 - DNA, 25 bp, SARS Virus
ttcatgcgataactgataattgcat

SEQ ID NO: 132626 - DNA, 25 bp, SARS Virus
tcatgcgataatcgataattgcatg

SEQ ID NO: 132627 - DNA, 25 bp, SARS Virus
catgcgataattcataattgcatgg

SEQ ID NO: 132628 - DNA, 25 bp, SARS Virus
atgcgataattgctaattgcatgga

SEQ ID NO: 132629 - DNA, 25 bp, SARS Virus
tgcgataattgacaattgcatggac

SEQ ID NO: 132630 - DNA, 25 bp, SARS Virus
gcgataattgatcattgcatggaca

SEQ ID NO: 132631 - DNA, 25 bp, SARS Virus
cgataattgatacttgcatggacaa

SEQ ID NO: 132632 - DNA, 25 bp, SARS Virus
gataattgataactgcatggacaaa

SEQ ID NO: 132633 - DNA, 25 bp, SARS Virus
ataattgataatcgcatggacaaag

SEQ ID NO: 132634 - DNA, 25 bp, SARS Virus
taattgataattccatggacaaaga

SEQ ID NO: 132635 - DNA, 25 bp, SARS Virus
aattgataattgcatggacaaagaa

SEQ ID NO: 132636 - DNA, 25 bp, SARS Virus
attgataattgcctggacaaagaag

SEQ ID NO: 132637 - DNA, 25 bp, SARS Virus
ttgataattgcacggacaaagaagg

SEQ ID NO: 132638 - DNA, 25 bp, SARS Virus
tgataattgcatcgacaaagaaggc

SEQ ID NO: 132639 - DNA, 25 bp, SARS Virus
gataattgcatgcacaaagaaggct

SEQ ID NO: 132640 - DNA, 25 bp, SARS Virus
ataattgcatggccaaagaaggctt

SEQ ID NO: 132641 - DNA, 25 bp, SARS Virus
taattgcatggacaaagaaggcttt

SEQ ID NO: 132642 - DNA, 25 bp, SARS Virus
aattgcatggaccaagaaggctttg

SEQ ID NO: 132643 - DNA, 25 bp, SARS Virus
attgcatggacacagaaggctttgc

SEQ ID NO: 132644 - DNA, 25 bp, SARS Virus
ttgcatggacaacgaaggctttgct

SEQ ID NO: 132645 - DNA, 25 bp, SARS Virus
tgcatggacaaacaaggctttgctt

SEQ ID NO: 132646 - DNA, 25 bp, SARS Virus
gcatggacaaagcaggctttgctta

SEQ ID NO: 132647 - DNA, 25 bp, SARS Virus
catggacaaagacggctttgcttac

SEQ ID NO: 132648 - DNA, 25 bp, SARS Virus
atggacaaagaacgctttgcttact

SEQ ID NO: 132649 - DNA, 25 bp, SARS Virus
tggacaaagaagcctttgcttactc

SEQ ID NO: 132650 - DNA, 25 bp, SARS Virus
ggacaaagaaggctttgcttactca

SEQ ID NO: 132651 - DNA, 25 bp, SARS Virus
gacaaagaaggccttgcttactcat

SEQ ID NO: 132652 - DNA, 25 bp, SARS Virus
acaaagaaggctctgcttactcatg

SEQ ID NO: 132653 - DNA, 25 bp, SARS Virus
caaagaaggcttcgcttactcatgt

SEQ ID NO: 132654 - DNA, 25 bp, SARS Virus
aaagaaggctttccttactcatgta

SEQ ID NO: 132655 - DNA, 25 bp, SARS Virus
aagaaggctttgcttactcatgtat

SEQ ID NO: 132656 - DNA, 25 bp, SARS Virus
agaaggctttgcctactcatgtatt

SEQ ID NO: 132657 - DNA, 25 bp, SARS Virus
gaaggctttgctcactcatgtattc

SEQ ID NO: 132658 - DNA, 25 bp, SARS Virus
aaggctttgcttcctcatgtattca

SEQ ID NO: 132659 - DNA, 25 bp, SARS Virus
aggctttgcttactcatgtattcaa

SEQ ID NO: 132660 - DNA, 25 bp, SARS Virus
ggctttgcttacccatgtattcaag

SEQ ID NO: 132661 - DNA, 25 bp, SARS Virus
gctttgcttactcatgtattcaagc

SEQ ID NO: 132662 - DNA, 25 bp, SARS Virus
ctttgcttactcctgtattcaagca

SEQ ID NO: 132663 - DNA, 25 bp, SARS Virus
tttgcttactcacgtattcaagcat

SEQ ID NO: 132664 - DNA, 25 bp, SARS Virus
ttgcttactcatctattcaagcatg

SEQ ID NO: 132665 - DNA, 25 bp, SARS Virus
tgcttactcatgcattcaagcatga

SEQ ID NO: 132666 - DNA, 25 bp, SARS Virus
gcttactcatgtcttcaagcatgag

SEQ ID NO: 132667 - DNA, 25 bp, SARS Virus
cttactcatgtactcaagcatgagt

SEQ ID NO: 132668 - DNA, 25 bp, SARS Virus
ttactcatgtatccaagcatgagtg

SEQ ID NO: 132669 - DNA, 25 bp, SARS Virus
tactcatgtattcaagcatgagtga

SEQ ID NO: 132670 - DNA, 25 bp, SARS Virus
actcatgtattccagcatgagtgaa

SEQ ID NO: 132671 - DNA, 25 bp, SARS Virus
ctcatgtattcacgcatgagtgaaa

SEQ ID NO: 132672 - DNA, 25 bp, SARS Virus
tcatgtattcaaccatgagtgaaag

SEQ ID NO: 132673 - DNA, 25 bp, SARS Virus
catgtattcaagcatgagtgaaaga

SEQ ID NO: 132674 - DNA, 25 bp, SARS Virus
atgtattcaagcctgagtgaaagaa

SEQ ID NO: 132675 - DNA, 25 bp, SARS Virus
tgtattcaagcacgagtgaaagaac

SEQ ID NO: 132676 - DNA, 25 bp, SARS Virus
gtattcaagcatcagtgaaagaaca

SEQ ID NO: 132677 - DNA, 25 bp, SARS Virus
tattcaagcatgcgtgaaagaacac

SEQ ID NO: 132678 - DNA, 25 bp, SARS Virus
attcaagcatgactgaaagaacacg

SEQ ID NO: 132679 - DNA, 25 bp, SARS Virus
ttcaagcatgagcgaaagaacacga

SEQ ID NO: 132680 - DNA, 25 bp, SARS Virus
tcaagcatgagtcaaagaacacgaa

SEQ ID NO: 132681 - DNA, 25 bp, SARS Virus
caagcatgagtgcaagaacacgaat

SEQ ID NO: 132682 - DNA, 25 bp, SARS Virus
aagcatgagtgacagaacacgaatg

SEQ ID NO: 132683 - DNA, 25 bp, SARS Virus
agcatgagtgaacgaacacgaatgt

SEQ ID NO: 132684 - DNA, 25 bp, SARS Virus
gcatgagtgaaacaacacgaatgtt

SEQ ID NO: 132685 - DNA, 25 bp, SARS Virus
catgagtgaaagcacacgaatgttt

SEQ ID NO: 132686 - DNA, 25 bp, SARS Virus
atgagtgaaagaccacgaatgtttc

SEQ ID NO: 132687 - DNA, 25 bp, SARS Virus
tgagtgaaagaacacgaatgtttcc

SEQ ID NO: 132688 - DNA, 25 bp, SARS Virus
gagtgaaagaacccgaatgtttccg

SEQ ID NO: 132689 - DNA, 25 bp, SARS Virus
agtgaaagaacacgaatgtttccgt

SEQ ID NO: 132690 - DNA, 25 bp, SARS Virus
gtgaaagaacaccaatgtttccgtg

SEQ ID NO: 132691 - DNA, 25 bp, SARS Virus
tgaaagaacacgcatgtttccgtgc

SEQ ID NO: 132692 - DNA, 25 bp, SARS Virus
gaaagaacacgactgtttccgtgcg

SEQ ID NO: 132693 - DNA, 25 bp, SARS Virus
aaagaacacgaacgtttccgtgcga

SEQ ID NO: 132694 - DNA, 25 bp, SARS Virus
aagaacacgaatctttccgtgcgat

SEQ ID NO: 132695 - DNA, 25 bp, SARS Virus
agaacacgaatgcttccgtgcgatc

SEQ ID NO: 132696 - DNA, 25 bp, SARS Virus
gaacacgaatgtctccgtgcgatca

SEQ ID NO: 132697 - DNA, 25 bp, SARS Virus
aacacgaatgttcccgtgcgatcat

SEQ ID NO: 132698 - DNA, 25 bp, SARS Virus
acacgaatgtttccgtgcgatcatc

SEQ ID NO: 132699 - DNA, 25 bp, SARS Virus
cacgaatgtttccgtgcgatcatca

SEQ ID NO: 132700 - DNA, 25 bp, SARS Virus
acgaatgtttccctgcgatcatcag

SEQ ID NO: 132701 - DNA, 25 bp, SARS Virus
cgaatgtttccgcgcgatcatcagc

SEQ ID NO: 132702 - DNA, 25 bp, SARS Virus
gaatgtttccgtccgatcatcagca

SEQ ID NO: 132703 - DNA, 25 bp, SARS Virus
aatgtttccgtgcgatcatcagcag

SEQ ID NO: 132704 - DNA, 25 bp, SARS Virus
atgtttccgtgccatcatcagcagc

SEQ ID NO: 132705 - DNA, 25 bp, SARS Virus
tgtttccgtgcgctcatcagcagca

SEQ ID NO: 132706 - DNA, 25 bp, SARS Virus
gtttccgtgcgaccatcagcagcag

SEQ ID NO: 132707 - DNA, 25 bp, SARS Virus
tttccgtgcgatcatcagcagcagc

SEQ ID NO: 132708 - DNA, 25 bp, SARS Virus
ttccgtgcgatcctcagcagcagcc

SEQ ID NO: 132709 - DNA, 25 bp, SARS Virus
tccgtgcgatcaccagcagcagccg

SEQ ID NO: 132710 - DNA, 25 bp, SARS Virus
ccgtgcgatcatcagcagcagccga

SEQ ID NO: 132711 - DNA, 25 bp, SARS Virus
cgtgcgatcatccgcagcagccgag

SEQ ID NO: 132712 - DNA, 25 bp, SARS Virus
gtgcgatcatcaccagcagccgagt

SEQ ID NO: 132713 - DNA, 25 bp, SARS Virus
tgcgatcatcagcagcagccgagta

SEQ ID NO: 132714 - DNA, 25 bp, SARS Virus
gcgatcatcagccgcagccgagtag

SEQ ID NO: 132715 - DNA, 25 bp, SARS Virus
cgatcatcagcaccagccgagtagt

SEQ ID NO: 132716 - DNA, 25 bp, SARS Virus
gatcatcagcagcagccgagtagta

SEQ ID NO: 132717 - DNA, 25 bp, SARS Virus
atcatcagcagccgccgagtagtat

SEQ ID NO: 132718 - DNA, 25 bp, SARS Virus
tcatcagcagcacccgagtagtatt

SEQ ID NO: 132719 - DNA, 25 bp, SARS Virus
catcagcagcagccgagtagtattt

SEQ ID NO: 132720 - DNA, 25 bp, SARS Virus
atcagcagcagccgagtagtattta

SEQ ID NO: 132721 - DNA, 25 bp, SARS Virus
tcagcagcagcccagtagtatttaa

SEQ ID NO: 132722 - DNA, 25 bp, SARS Virus
cagcagcagccgcgtagtatttaac

SEQ ID NO: 132723 - DNA, 25 bp, SARS Virus
agcagcagccgactagtatttaacc

SEQ ID NO: 132724 - DNA, 25 bp, SARS Virus
gcagcagccgagcagtatttaacct

SEQ ID NO: 132725 - DNA, 25 bp, SARS Virus
cagcagccgagtcgtatttaaccta

SEQ ID NO: 132726 - DNA, 25 bp, SARS Virus
agcagccgagtactatttaacctag

SEQ ID NO: 132727 - DNA, 25 bp, SARS Virus
gcagccgagtagcatttaacctagg

SEQ ID NO: 132728 - DNA, 25 bp, SARS Virus
cagccgagtagtctttaacctaggt

SEQ ID NO: 132729 - DNA, 25 bp, SARS Virus
agccgagtagtacttaacctaggta

SEQ ID NO: 132730 - DNA, 25 bp, SARS Virus
gccgagtagtatctaacctaggtaa

SEQ ID NO: 132731 - DNA, 25 bp, SARS Virus
ccgagtagtattcaacctaggtaac

SEQ ID NO: 132732 - DNA, 25 bp, SARS Virus
cgagtagtatttcacctaggtaacg

SEQ ID NO: 132733 - DNA, 25 bp, SARS Virus
gagtagtatttaccctaggtaacga

SEQ ID NO: 132734 - DNA, 25 bp, SARS Virus
agtagtatttaacctaggtaacgac

SEQ ID NO: 132735 - DNA, 25 bp, SARS Virus
gtagtatttaacctaggtaacgacc

SEQ ID NO: 132736 - DNA, 25 bp, SARS Virus
tagtatttaacccaggtaacgacct

SEQ ID NO: 132737 - DNA, 25 bp, SARS Virus
agtatttaacctcggtaacgaccta

SEQ ID NO: 132738 - DNA, 25 bp, SARS Virus
gtatttaacctacgtaacgacctaa

SEQ ID NO: 132739 - DNA, 25 bp, SARS Virus
tatttaacctagctaacgacctaat

SEQ ID NO: 132740 - DNA, 25 bp, SARS Virus
atttaacctaggcaacgacctaatc

SEQ ID NO: 132741 - DNA, 25 bp, SARS Virus
tttaacctaggtcacgacctaatcg

SEQ ID NO: 132742 - DNA, 25 bp, SARS Virus
ttaacctaggtaccgacctaatcgt

SEQ ID NO: 132743 - DNA, 25 bp, SARS Virus
taacctaggtaacgacctaatcgtt

SEQ ID NO: 132744 - DNA, 25 bp, SARS Virus
aacctaggtaaccacctaatcgttg

SEQ ID NO: 132745 - DNA, 25 bp, SARS Virus
acctaggtaacgccctaatcgttga

SEQ ID NO: 132746 - DNA, 25 bp, SARS Virus
cctaggtaacgacctaatcgttgag

SEQ ID NO: 132747 - DNA, 25 bp, SARS Virus
ctaggtaacgacctaatcgttgagg

SEQ ID NO: 132748 - DNA, 25 bp, SARS Virus
taggtaacgacccaatcgttgagga

SEQ ID NO: 132749 - DNA, 25 bp, SARS Virus
aggtaacgacctcatcgttgaggac

SEQ ID NO: 132750 - DNA, 25 bp, SARS Virus
ggtaacgacctactcgttgaggact

SEQ ID NO: 132751 - DNA, 25 bp, SARS Virus
gtaacgacctaaccgttgaggactt

SEQ ID NO: 132752 - DNA, 25 bp, SARS Virus
taacgacctaatcgttgaggacttc

SEQ ID NO: 132753 - DNA, 25 bp, SARS Virus
aacgacctaatccttgaggacttct

SEQ ID NO: 132754 - DNA, 25 bp, SARS Virus
acgacctaatcgctgaggacttctc

SEQ ID NO: 132755 - DNA, 25 bp, SARS Virus
cgacctaatcgtcgaggacttctcg

SEQ ID NO: 132756 - DNA, 25 bp, SARS Virus
gacctaatcgttcaggacttctcgg

SEQ ID NO: 132757 - DNA, 25 bp, SARS Virus
acctaatcgttgcggacttctcggc

SEQ ID NO: 132758 - DNA, 25 bp, SARS Virus
cctaatcgttgacgacttctcggca

SEQ ID NO: 132759 - DNA, 25 bp, SARS Virus
ctaatcgttgagcacttctcggcag

SEQ ID NO: 132760 - DNA, 25 bp, SARS Virus
taatcgttgaggccttctcggcagc

SEQ ID NO: 132761 - DNA, 25 bp, SARS Virus
aatcgttgaggacttctcggcagct

SEQ ID NO: 132762 - DNA, 25 bp, SARS Virus
atcgttgaggacctctcggcagcta

SEQ ID NO: 132763 - DNA, 25 bp, SARS Virus
tcgttgaggactcctcggcagctaa

SEQ ID NO: 132764 - DNA, 25 bp, SARS Virus
cgttgaggacttctcggcagctaac

SEQ ID NO: 132765 - DNA, 25 bp, SARS Virus
gttgaggacttcccggcagctaaca

SEQ ID NO: 132766 - DNA, 25 bp, SARS Virus
ttgaggacttctcggcagctaacac

SEQ ID NO: 132767 - DNA, 25 bp, SARS Virus
tgaggacttctccgcagctaacaca

SEQ ID NO: 132768 - DNA, 25 bp, SARS Virus
gaggacttctcgccagctaacacac

SEQ ID NO: 132769 - DNA, 25 bp, SARS Virus
tcttatccgtttgacatcattgtat

SEQ ID NO: 132770 - DNA, 25 bp, SARS Virus
cttatccgtttagcatcattgtatt

SEQ ID NO: 132771 - DNA, 25 bp, SARS Virus
ttatccgtttaagatcattgtatta

SEQ ID NO: 132772 - DNA, 25 bp, SARS Virus
tatccgtttaacgtcattgtattag

SEQ ID NO: 132773 - DNA, 25 bp, SARS Virus
atccgtttaacagcattgtattagg

SEQ ID NO: 132774 - DNA, 25 bp, SARS Virus
tccgtttaacatgattgtattaggt

SEQ ID NO: 132775 - DNA, 25 bp, SARS Virus
ccgtttaacatcgttgtattaggtc

SEQ ID NO: 132776 - DNA, 25 bp, SARS Virus
cgtttaacatcagtgtattaggtcc

SEQ ID NO: 132777 - DNA, 25 bp, SARS Virus
gtttaacatcatggtattaggtccg

SEQ ID NO: 132778 - DNA, 25 bp, SARS Virus
tttaacatcattgtattaggtccga

SEQ ID NO: 132779 - DNA, 25 bp, SARS Virus
ttaacatcattggattaggtccgat

SEQ ID NO: 132780 - DNA, 25 bp, SARS Virus
taacatcattgtgttaggtccgatc

SEQ ID NO: 132781 - DNA, 25 bp, SARS Virus
aacatcattgtagtaggtccgatcc

SEQ ID NO: 132782 - DNA, 25 bp, SARS Virus
acatcattgtatgaggtccgatcct

SEQ ID NO: 132783 - DNA, 25 bp, SARS Virus
catcattgtattgggtccgatcctt

SEQ ID NO: 132784 - DNA, 25 bp, SARS Virus
atcattgtattaggtccgatcctta

SEQ ID NO: 132785 - DNA, 25 bp, SARS Virus
tcattgtattaggtccgatccttat

SEQ ID NO: 132786 - DNA, 25 bp, SARS Virus
cattgtattagggccgatccttatc

SEQ ID NO: 132787 - DNA, 25 bp, SARS Virus
attgtattaggtgcgatccttatcc

SEQ ID NO: 132788 - DNA, 25 bp, SARS Virus
ttgtattaggtcggatccttatcct

SEQ ID NO: 132789 - DNA, 25 bp, SARS Virus
tgtattaggtccgatccttatcctt

SEQ ID NO: 132790 - DNA, 25 bp, SARS Virus
gtattaggtccggtccttatccttt

SEQ ID NO: 132791 - DNA, 25 bp, SARS Virus
tattaggtccgagccttatcctttg

SEQ ID NO: 132792 - DNA, 25 bp, SARS Virus
attaggtccgatgcttatcctttgg

SEQ ID NO: 132793 - DNA, 25 bp, SARS Virus
ttaggtccgatcgttatcctttgga

SEQ ID NO: 132794 - DNA, 25 bp, SARS Virus
taggtccgatccgtatcctttggat

SEQ ID NO: 132795 - DNA, 25 bp, SARS Virus
aggtccgatcctgatcctttggata

SEQ ID NO: 132796 - DNA, 25 bp, SARS Virus
ggtccgatccttgtcctttggataa

SEQ ID NO: 132797 - DNA, 25 bp, SARS Virus
gtccgatccttagcctttggataat

SEQ ID NO: 132798 - DNA, 25 bp, SARS Virus
tccgatccttatgctttggataatg

SEQ ID NO: 132799 - DNA, 25 bp, SARS Virus
ccgatccttatcgtttggataatga

SEQ ID NO: 132800 - DNA, 25 bp, SARS Virus
cgatccttatccgttggataatgat

SEQ ID NO: 132801 - DNA, 25 bp, SARS Virus
gatccttatcctgtggataatgatc

SEQ ID NO: 132802 - DNA, 25 bp, SARS Virus
atccttatccttgggataatgatcc

SEQ ID NO: 132803 - DNA, 25 bp, SARS Virus
tccttatcctttggataatgatcca

SEQ ID NO: 132804 - DNA, 25 bp, SARS Virus
ccttatcctttggataatgatccaa

SEQ ID NO: 132805 - DNA, 25 bp, SARS Virus
cttatcctttgggtaatgatccaag

SEQ ID NO: 132806 - DNA, 25 bp, SARS Virus
ttatcctttggagaatgatccaagg

SEQ ID NO: 132807 - DNA, 25 bp, SARS Virus
tatcctttggatgatgatccaaggt

SEQ ID NO: 132808 - DNA, 25 bp, SARS Virus
atcctttggatagtgatccaaggta

SEQ ID NO: 132809 - DNA, 25 bp, SARS Virus
tcctttggataaggatccaaggtaa

SEQ ID NO: 132810 - DNA, 25 bp, SARS Virus
cctttggataatgatccaaggtaac

SEQ ID NO: 132811 - DNA, 25 bp, SARS Virus
ctttggataatggtccaaggtaaca

SEQ ID NO: 132812 - DNA, 25 bp, SARS Virus
tttggataatgagccaaggtaacaa

SEQ ID NO: 132813 - DNA, 25 bp, SARS Virus
ttggataatgatgcaaggtaacaag

SEQ ID NO: 132814 - DNA, 25 bp, SARS Virus
tggataatgatcgaaggtaacaagg

SEQ ID NO: 132815 - DNA, 25 bp, SARS Virus
ggataatgatccgaggtaacaaggt

SEQ ID NO: 132816 - DNA, 25 bp, SARS Virus
gataatgatccagggtaacaaggtc

SEQ ID NO: 132817 - DNA, 25 bp, SARS Virus
ataatgatccaaggtaacaaggtcc

SEQ ID NO: 132818 - DNA, 25 bp, SARS Virus
taatgatccaaggtaacaaggtcct

SEQ ID NO: 132819 - DNA, 25 bp, SARS Virus
aatgatccaagggaacaaggtcctc

SEQ ID NO: 132820 - DNA, 25 bp, SARS Virus
atgatccaaggtgacaaggtcctca

SEQ ID NO: 132821 - DNA, 25 bp, SARS Virus
tgatccaaggtagcaaggtcctcaa

SEQ ID NO: 132822 - DNA, 25 bp, SARS Virus
gatccaaggtaagaaggtcctcaac

SEQ ID NO: 132823 - DNA, 25 bp, SARS Virus
atccaaggtaacgaggtcctcaaca

SEQ ID NO: 132824 - DNA, 25 bp, SARS Virus
tccaaggtaacagggtcctcaacaa

SEQ ID NO: 132825 - DNA, 25 bp, SARS Virus
ccaaggtaacaaggtcctcaacaaa

SEQ ID NO: 132826 - DNA, 25 bp, SARS Virus
caaggtaacaaggtcctcaacaaat

SEQ ID NO: 132827 - DNA, 25 bp, SARS Virus
aaggtaacaagggcctcaacaaatt

SEQ ID NO: 132828 - DNA, 25 bp, SARS Virus
aggtaacaaggtgctcaacaaattc

SEQ ID NO: 132829 - DNA, 25 bp, SARS Virus
ggtaacaaggtcgtcaacaaattcg

SEQ ID NO: 132830 - DNA, 25 bp, SARS Virus
gtaacaaggtccgcaacaaattcga

SEQ ID NO: 132831 - DNA, 25 bp, SARS Virus
taacaaggtcctgaacaaattcgag

SEQ ID NO: 132832 - DNA, 25 bp, SARS Virus
aacaaggtcctcgacaaattcgagg

SEQ ID NO: 132833 - DNA, 25 bp, SARS Virus
acaaggtcctcagcaaattcgagga

SEQ ID NO: 132834 - DNA, 25 bp, SARS Virus
caaggtcctcaagaaattcgaggag

SEQ ID NO: 132835 - DNA, 25 bp, SARS Virus
aaggtcctcaacgaattcgaggagt

SEQ ID NO: 132836 - DNA, 25 bp, SARS Virus
aggtcctcaacagattcgaggagtt

SEQ ID NO: 132837 - DNA, 25 bp, SARS Virus
ggtcctcaacaagttcgaggagttg

SEQ ID NO: 132838 - DNA, 25 bp, SARS Virus
gtcctcaacaaagtcgaggagttgc

SEQ ID NO: 132839 - DNA, 25 bp, SARS Virus
tcctcaacaaatgcgaggagttgcc

SEQ ID NO: 132840 - DNA, 25 bp, SARS Virus
cctcaacaaattggaggagttgcca

SEQ ID NO: 132841 - DNA, 25 bp, SARS Virus
ctcaacaaattcgaggagttgccat

SEQ ID NO: 132842 - DNA, 25 bp, SARS Virus
tcaacaaattcggggagttgccatt

SEQ ID NO: 132843 - DNA, 25 bp, SARS Virus
caacaaattcgaggagttgccatta

SEQ ID NO: 132844 - DNA, 25 bp, SARS Virus
aacaaattcgaggagttgccattat

SEQ ID NO: 132845 - DNA, 25 bp, SARS Virus
acaaattcgaggggttgccattatc

SEQ ID NO: 132846 - DNA, 25 bp, SARS Virus
caaattcgaggagttgccattatca

SEQ ID NO: 132847 - DNA, 25 bp, SARS Virus
aaattcgaggaggtgccattatcat

SEQ ID NO: 132848 - DNA, 25 bp, SARS Virus
aattcgaggagtggccattatcatg

SEQ ID NO: 132849 - DNA, 25 bp, SARS Virus
attcgaggagttgccattatcatgg

SEQ ID NO: 132850 - DNA, 25 bp, SARS Virus
ttcgaggagttggcattatcatggc

SEQ ID NO: 132851 - DNA, 25 bp, SARS Virus
tcgaggagttgcgattatcatggca

SEQ ID NO: 132852 - DNA, 25 bp, SARS Virus
cgaggagttgccgttatcatggcaa

SEQ ID NO: 132853 - DNA, 25 bp, SARS Virus
gaggagttgccagtatcatggcaac

SEQ ID NO: 132854 - DNA, 25 bp, SARS Virus
aggagttgccatgatcatggcaaca

SEQ ID NO: 132855 - DNA, 25 bp, SARS Virus
ggagttgccattgtcatggcaacag

SEQ ID NO: 132856 - DNA, 25 bp, SARS Virus
gagttgccattagcatggcaacaga

SEQ ID NO: 132857 - DNA, 25 bp, SARS Virus
agttgccattatgatggcaacagac

SEQ ID NO: 132858 - DNA, 25 bp, SARS Virus
gttgccattatcgtggcaacagacg

SEQ ID NO: 132859 - DNA, 25 bp, SARS Virus
ttgccattatcagggcaacagacgg

SEQ ID NO: 132860 - DNA, 25 bp, SARS Virus
tgccattatcatggcaacagacggt

SEQ ID NO: 132861 - DNA, 25 bp, SARS Virus
gccattatcatggcaacagacggta

SEQ ID NO: 132862 - DNA, 25 bp, SARS Virus
ccattatcatgggaacagacggtac

SEQ ID NO: 132863 - DNA, 25 bp, SARS Virus
cattatcatggcgacagacggtact

SEQ ID NO: 132864 - DNA, 25 bp, SARS Virus
attatcatggcagcagacggtacta

SEQ ID NO: 132865 - DNA, 25 bp, SARS Virus
ttatcatggcaagagacggtactat

SEQ ID NO: 132866 - DNA, 25 bp, SARS Virus
tatcatggcaacggacggtactatt

SEQ ID NO: 132867 - DNA, 25 bp, SARS Virus
atcatggcaacagacggtactattc

SEQ ID NO: 132868 - DNA, 25 bp, SARS Virus
tcatggcaacaggcggtactattcg

SEQ ID NO: 132869 - DNA, 25 bp, SARS Virus
catggcaacagagggtactattcgt

SEQ ID NO: 132870 - DNA, 25 bp, SARS Virus
atggcaacagacggtactattcgtt

SEQ ID NO: 132871 - DNA, 25 bp, SARS Virus
tggcaacagacggtactattcgtta

SEQ ID NO: 132872 - DNA, 25 bp, SARS Virus
ggcaacagacgggactattcgttac

SEQ ID NO: 132873 - DNA, 25 bp, SARS Virus
gcaacagacggtgctattcgttaca

SEQ ID NO: 132874 - DNA, 25 bp, SARS Virus
caacagacggtagtattcgttacaa

SEQ ID NO: 132875 - DNA, 25 bp, SARS Virus
aacagacggtacgattcgttacaat

SEQ ID NO: 132876 - DNA, 25 bp, SARS Virus
acagacggtactgttcgttacaatt

SEQ ID NO: 132877 - DNA, 25 bp, SARS Virus
cagacggtactagtcgttacaattt

SEQ ID NO: 132878 - DNA, 25 bp, SARS Virus
agacggtactatgcgttacaatttc

SEQ ID NO: 132879 - DNA, 25 bp, SARS Virus
gacggtactattggttacaatttca

SEQ ID NO: 132880 - DNA, 25 bp, SARS Virus
acggtactattcgttacaatttcaa

SEQ ID NO: 132881 - DNA, 25 bp, SARS Virus
cggtactattcggtacaatttcaag

SEQ ID NO: 132882 - DNA, 25 bp, SARS Virus
ggtactattcgtgacaatttcaagg

SEQ ID NO: 132883 - DNA, 25 bp, SARS Virus
gtactattcgttgcaatttcaaggt

SEQ ID NO: 132884 - DNA, 25 bp, SARS Virus
tactattcgttagaatttcaaggtt

SEQ ID NO: 132885 - DNA, 25 bp, SARS Virus
actattcgttacgatttcaaggttt

SEQ ID NO: 132886 - DNA, 25 bp, SARS Virus
ctattcgttacagtttcaaggtttg

SEQ ID NO: 132887 - DNA, 25 bp, SARS Virus
tattcgttacaagttcaaggtttgt

SEQ ID NO: 132888 - DNA, 25 bp, SARS Virus
attcgttacaatgtcaaggtttgtc

SEQ ID NO: 132889 - DNA, 25 bp, SARS Virus
ttcgttacaattgcaaggtttgtct

SEQ ID NO: 132890 - DNA, 25 bp, SARS Virus
tcgttacaatttgaaggtttgtctt

SEQ ID NO: 132891 - DNA, 25 bp, SARS Virus
cgttacaatttcgaggtttgtctta

SEQ ID NO: 132892 - DNA, 25 bp, SARS Virus
gttacaatttcagggtttgtcttat

SEQ ID NO: 132893 - DNA, 25 bp, SARS Virus
ttacaatttcaaggtttgtcttatt

SEQ ID NO: 132894 - DNA, 25 bp, SARS Virus
tacaatttcaaggtttgtcttatta

SEQ ID NO: 132895 - DNA, 25 bp, SARS Virus
acaatttcaagggttgtcttattat

SEQ ID NO: 132896 - DNA, 25 bp, SARS Virus
caatttcaaggtgtgtcttattatt

SEQ ID NO: 132897 - DNA, 25 bp, SARS Virus
aatttcaaggttggtcttattatta

SEQ ID NO: 132898 - DNA, 25 bp, SARS Virus
atttcaaggtttgtcttattattat

SEQ ID NO: 132899 - DNA, 25 bp, SARS Virus
tttcaaggtttggcttattattatt

SEQ ID NO: 132900 - DNA, 25 bp, SARS Virus
ttcaaggtttgtgttattattatta

SEQ ID NO: 132901 - DNA, 25 bp, SARS Virus
tcaaggtttgtcgtattattattat

SEQ ID NO: 132902 - DNA, 25 bp, SARS Virus
caaggtttgtctgattattattatc

SEQ ID NO: 132903 - DNA, 25 bp, SARS Virus
aaggtttgtcttgttattattatca

SEQ ID NO: 132904 - DNA, 25 bp, SARS Virus
aggtttgtcttagtattattatcaa

SEQ ID NO: 132905 - DNA, 25 bp, SARS Virus
ggtttgtcttatgattattatcaat

SEQ ID NO: 132906 - DNA, 25 bp, SARS Virus
gtttgtcttattgttattatcaatc

SEQ ID NO: 132907 - DNA, 25 bp, SARS Virus
tttgtcttattagtattatcaatca

SEQ ID NO: 132908 - DNA, 25 bp, SARS Virus
ttgtcttattatgattatcaatcaa

SEQ ID NO: 132909 - DNA, 25 bp, SARS Virus
tgtcttattattgttatcaatcaag

SEQ ID NO: 132910 - DNA, 25 bp, SARS Virus
gtcttattattagtatcaatcaagc

SEQ ID NO: 132911 - DNA, 25 bp, SARS Virus
tcttattattatgatcaatcaagca

SEQ ID NO: 132912 - DNA, 25 bp, SARS Virus
cttattattattgtcaatcaagcaa

SEQ ID NO: 132913 - DNA, 25 bp, SARS Virus
ttattattattagcaatcaagcaaa

SEQ ID NO: 132914 - DNA, 25 bp, SARS Virus
tattattattatgaatcaagcaaat

SEQ ID NO: 132915 - DNA, 25 bp, SARS Virus
attattattatcgatcaagcaaatc

SEQ ID NO: 132916 - DNA, 25 bp, SARS Virus
ttattattatcagtcaagcaaatct

SEQ ID NO: 132917 - DNA, 25 bp, SARS Virus
tattattatcaagcaagcaaatctg

SEQ ID NO: 132918 - DNA, 25 bp, SARS Virus
attattatcaatgaagcaaatctgg

SEQ ID NO: 132919 - DNA, 25 bp, SARS Virus
ttattatcaatcgagcaaatctggt

SEQ ID NO: 132920 - DNA, 25 bp, SARS Virus
tattatcaatcaggcaaatctggtc

SEQ ID NO: 132921 - DNA, 25 bp, SARS Virus
attatcaatcaagcaaatctggtct

SEQ ID NO: 132922 - DNA, 25 bp, SARS Virus
ttatcaatcaaggaaatctggtctt

SEQ ID NO: 132923 - DNA, 25 bp, SARS Virus
tatcaatcaagcgaatctggtcttc

SEQ ID NO: 132924 - DNA, 25 bp, SARS Virus
atcaatcaagcagatctggtcttct

SEQ ID NO: 132925 - DNA, 25 bp, SARS Virus
tcaatcaagcaagtctggtcttcta

SEQ ID NO: 132926 - DNA, 25 bp, SARS Virus
caatcaagcaaagctggtcttctag

SEQ ID NO: 132927 - DNA, 25 bp, SARS Virus
aatcaagcaaatgtggtcttctagt

SEQ ID NO: 132928 - DNA, 25 bp, SARS Virus
atcaagcaaatcgggtcttctagtc

SEQ ID NO: 132929 - DNA, 25 bp, SARS Virus
tcaagcaaatctggtcttctagtcc

SEQ ID NO: 132930 - DNA, 25 bp, SARS Virus
caagcaaatctggtcttctagtcct

SEQ ID NO: 132931 - DNA, 25 bp, SARS Virus
aagcaaatctgggcttctagtcctt

SEQ ID NO: 132932 - DNA, 25 bp, SARS Virus
agcaaatctggtgttctagtccttg

SEQ ID NO: 132933 - DNA, 25 bp, SARS Virus
gcaaatctggtcgtctagtccttga

SEQ ID NO: 132934 - DNA, 25 bp, SARS Virus
caaatctggtctgctagtccttgag

SEQ ID NO: 132935 - DNA, 25 bp, SARS Virus
aaatctggtcttgtagtccttgagg

SEQ ID NO: 132936 - DNA, 25 bp, SARS Virus
aatctggtcttcgagtccttgagga

SEQ ID NO: 132937 - DNA, 25 bp, SARS Virus
atctggtcttctggtccttgaggaa

SEQ ID NO: 132938 - DNA, 25 bp, SARS Virus
tctggtcttctagtccttgaggaag

SEQ ID NO: 132939 - DNA, 25 bp, SARS Virus
ctggtcttctaggccttgaggaagt

SEQ ID NO: 132940 - DNA, 25 bp, SARS Virus
tggtcttctagtgcttgaggaagtc

SEQ ID NO: 132941 - DNA, 25 bp, SARS Virus
ggtcttctagtcgttgaggaagtct

SEQ ID NO: 132942 - DNA, 25 bp, SARS Virus
gtcttctagtccgtgaggaagtctt

SEQ ID NO: 132943 - DNA, 25 bp, SARS Virus
tcttctagtcctggaggaagtcttc

SEQ ID NO: 132944 - DNA, 25 bp, SARS Virus
cttctagtccttgaggaagtcttct

SEQ ID NO: 132945 - DNA, 25 bp, SARS Virus
ttctagtccttggggaagtcttctc

SEQ ID NO: 132946 - DNA, 25 bp, SARS Virus
tctagtccttgaggaagtcttctca

SEQ ID NO: 132947 - DNA, 25 bp, SARS Virus
ctagtccttgaggaagtcttctcaa

SEQ ID NO: 132948 - DNA, 25 bp, SARS Virus
tagtccttgagggagtcttctcaag

SEQ ID NO: 132949 - DNA, 25 bp, SARS Virus
agtccttgaggaggtcttctcaagt

SEQ ID NO: 132950 - DNA, 25 bp, SARS Virus
gtccttgaggaagtcttctcaagtc

SEQ ID NO: 132951 - DNA, 25 bp, SARS Virus
tccttgaggaaggcttctcaagtct

SEQ ID NO: 132952 - DNA, 25 bp, SARS Virus
ccttgaggaagtgttctcaagtcta

SEQ ID NO: 132953 - DNA, 25 bp, SARS Virus
cttgaggaagtcgtctcaagtctaa

SEQ ID NO: 132954 - DNA, 25 bp, SARS Virus
ttgaggaagtctgctcaagtctaaa

SEQ ID NO: 132955 - DNA, 25 bp, SARS Virus
tgaggaagtcttgtcaagtctaaaa

SEQ ID NO: 132956 - DNA, 25 bp, SARS Virus
gaggaagtcttcgcaagtctaaaaa

SEQ ID NO: 132957 - DNA, 25 bp, SARS Virus
aggaagtcttctgaagtctaaaaat

SEQ ID NO: 132958 - DNA, 25 bp, SARS Virus
ggaagtcttctcgagtctaaaaatt

SEQ ID NO: 132959 - DNA, 25 bp, SARS Virus
gaagtcttctcaggtctaaaaattg

SEQ ID NO: 132960 - DNA, 25 bp, SARS Virus
aagtcttctcaagtctaaaaattgt

SEQ ID NO: 132961 - DNA, 25 bp, SARS Virus
agtcttctcaaggctaaaaattgtg

SEQ ID NO: 132962 - DNA, 25 bp, SARS Virus
gtcttctcaagtgtaaaaattgtgc

SEQ ID NO: 132963 - DNA, 25 bp, SARS Virus
tcttctcaagtcgaaaaattgtgcg

SEQ ID NO: 132964 - DNA, 25 bp, SARS Virus
cttctcaagtctgaaaattgtgcgc

SEQ ID NO: 132965 - DNA, 25 bp, SARS Virus
ttctcaagtctagaaattgtgcgct

SEQ ID NO: 132966 - DNA, 25 bp, SARS Virus
tctcaagtctaagaattgtgcgctc

SEQ ID NO: 132967 - DNA, 25 bp, SARS Virus
ctcaagtctaaagattgtgcgctca

SEQ ID NO: 132968 - DNA, 25 bp, SARS Virus
tcaagtctaaaagttgtgcgctcat

SEQ ID NO: 132969 - DNA, 25 bp, SARS Virus
caagtctaaaaagtgtgcgctcatc

SEQ ID NO: 132970 - DNA, 25 bp, SARS Virus
aagtctaaaaatggtgcgctcatct

SEQ ID NO: 132971 - DNA, 25 bp, SARS Virus
agtctaaaaattgtgcgctcatctg

SEQ ID NO: 132972 - DNA, 25 bp, SARS Virus
gtctaaaaattgggcgctcatctgc

SEQ ID NO: 132973 - DNA, 25 bp, SARS Virus
tctaaaaattgtgcgctcatctgca

SEQ ID NO: 132974 - DNA, 25 bp, SARS Virus
ctaaaaattgtgggctcatctgcat

SEQ ID NO: 132975 - DNA, 25 bp, SARS Virus
taaaaattgtgcgctcatctgcatt

SEQ ID NO: 132976 - DNA, 25 bp, SARS Virus
aaaaattgtgcggtcatctgcattt

SEQ ID NO: 132977 - DNA, 25 bp, SARS Virus
aaaattgtgcgcgcatctgcatttg

SEQ ID NO: 132978 - DNA, 25 bp, SARS Virus
aaattgtgcgctgatctgcatttgg

SEQ ID NO: 132979 - DNA, 25 bp, SARS Virus
aattgtgcgctcgtctgcatttggc

SEQ ID NO: 132980 - DNA, 25 bp, SARS Virus
attgtgcgctcagctgcatttggca

SEQ ID NO: 132981 - DNA, 25 bp, SARS Virus
ttgtgcgctcatgtgcatttggcaa

SEQ ID NO: 132982 - DNA, 25 bp, SARS Virus
tgtgcgctcatcggcatttggcaac

SEQ ID NO: 132983 - DNA, 25 bp, SARS Virus
gtgcgctcatctgcatttggcaacc

SEQ ID NO: 132984 - DNA, 25 bp, SARS Virus
tgcgctcatctggatttggcaacca

SEQ ID NO: 132985 - DNA, 25 bp, SARS Virus
gcgctcatctgcgtttggcaaccaa

SEQ ID NO: 132986 - DNA, 25 bp, SARS Virus
cgctcatctgcagttggcaaccaaa

SEQ ID NO: 132987 - DNA, 25 bp, SARS Virus
gctcatctgcatgtggcaaccaaaa

SEQ ID NO: 132988 - DNA, 25 bp, SARS Virus
ctcatctgcattgggcaaccaaaat

SEQ ID NO: 132989 - DNA, 25 bp, SARS Virus
tcatctgcatttggcaaccaaaatg

SEQ ID NO: 132990 - DNA, 25 bp, SARS Virus
catctgcatttggcaaccaaaatga

SEQ ID NO: 132991 - DNA, 25 bp, SARS Virus
atctgcatttgggaaccaaaatgat

SEQ ID NO: 132992 - DNA, 25 bp, SARS Virus
tctgcatttggcgaccaaaatgatt

SEQ ID NO: 132993 - DNA, 25 bp, SARS Virus
ctgcatttggcagccaaaatgattt

SEQ ID NO: 132994 - DNA, 25 bp, SARS Virus
tgcatttggcaagcaaaatgatttg

SEQ ID NO: 132995 - DNA, 25 bp, SARS Virus
gcatttggcaacgaaaatgatttga

SEQ ID NO: 132996 - DNA, 25 bp, SARS Virus
catttggcaaccgaaatgatttgag

SEQ ID NO: 132997 - DNA, 25 bp, SARS Virus
atttggcaaccagaatgatttgagt

SEQ ID NO: 132998 - DNA, 25 bp, SARS Virus
tttggcaaccaagatgatttgagtg

SEQ ID NO: 132999 - DNA, 25 bp, SARS Virus
ttggcaaccaaagtgatttgagtgc

SEQ ID NO: 133000 - DNA, 25 bp, SARS Virus
tggcaaccaaaaggatttgagtgca

SEQ ID NO: 133001 - DNA, 25 bp, SARS Virus
ggcaaccaaaatgatttgagtgcaa

SEQ ID NO: 133002 - DNA, 25 bp, SARS Virus
gcaaccaaaatggtttgagtgcaat

SEQ ID NO: 133003 - DNA, 25 bp, SARS Virus
caaccaaaatgagttgagtgcaatt

SEQ ID NO: 133004 - DNA, 25 bp, SARS Virus
aaccaaaatgatgtgagtgcaattg

SEQ ID NO: 133005 - DNA, 25 bp, SARS Virus
accaaaatgattggagtgcaattgt

SEQ ID NO: 133006 - DNA, 25 bp, SARS Virus
ccaaaatgatttgagtgcaattgtt

SEQ ID NO: 133007 - DNA, 25 bp, SARS Virus
caaaatgatttgggtgcaattgtta

SEQ ID NO: 133008 - DNA, 25 bp, SARS Virus
aaaatgatttgagtgcaattgttat

SEQ ID NO: 133009 - DNA, 25 bp, SARS Virus
aaatgatttgagggcaattgttata

SEQ ID NO: 133010 - DNA, 25 bp, SARS Virus
aatgatttgagtgcaattgttataa

SEQ ID NO: 133011 - DNA, 25 bp, SARS Virus
atgatttgagtggaattgttataac

SEQ ID NO: 133012 - DNA, 25 bp, SARS Virus
tgatttgagtgcgattgttataacg

SEQ ID NO: 133013 - DNA, 25 bp, SARS Virus
gatttgagtgcagttgttataacgt

SEQ ID NO: 133014 - DNA, 25 bp, SARS Virus
atttgagtgcaagtgttataacgtc

SEQ ID NO: 133015 - DNA, 25 bp, SARS Virus
tttgagtgcaatggttataacgtcg

SEQ ID NO: 133016 - DNA, 25 bp, SARS Virus
ttgagtgcaattgttataacgtcgt

SEQ ID NO: 133017 - DNA, 25 bp, SARS Virus
tgagtgcaattggtataacgtcgtc

SEQ ID NO: 133018 - DNA, 25 bp, SARS Virus
gagtgcaattgtgataacgtcgtca

SEQ ID NO: 133019 - DNA, 25 bp, SARS Virus
agtgcaattgttgtaacgtcgtcat

SEQ ID NO: 133020 - DNA, 25 bp, SARS Virus
gtgcaattgttagaacgtcgtcatg

SEQ ID NO: 133021 - DNA, 25 bp, SARS Virus
tgcaattgttatgacgtcgtcatgc

SEQ ID NO: 133022 - DNA, 25 bp, SARS Virus
gcaattgttatagcgtcgtcatgcg

SEQ ID NO: 133023 - DNA, 25 bp, SARS Virus
caattgttataaggtcgtcatgcgt

SEQ ID NO: 133024 - DNA, 25 bp, SARS Virus
aattgttataacgtcgtcatgcgtg

SEQ ID NO: 133025 - DNA, 25 bp, SARS Virus
attgttataacggcgtcatgcgtgt

SEQ ID NO: 133026 - DNA, 25 bp, SARS Virus
ttgttataacgtggtcatgcgtgtg

SEQ ID NO: 133027 - DNA, 25 bp, SARS Virus
tgttataacgtcgtcatgcgtgtgt

SEQ ID NO: 133028 - DNA, 25 bp, SARS Virus
gttataacgtcggcatgcgtgtgtt

SEQ ID NO: 133029 - DNA, 25 bp, SARS Virus
ttataacgtcgtgatgcgtgtgtta

SEQ ID NO: 133030 - DNA, 25 bp, SARS Virus
tataacgtcgtcgtgcgtgtgttag

SEQ ID NO: 133031 - DNA, 25 bp, SARS Virus
ataacgtcgtcaggcgtgtgttagc

SEQ ID NO: 133032 - DNA, 25 bp, SARS Virus
taacgtcgtcatgcgtgtgttagct

SEQ ID NO: 133033 - DNA, 25 bp, SARS Virus
aacgtcgtcatgggtgtgttagctt

SEQ ID NO: 133034 - DNA, 25 bp, SARS Virus
acgtcgtcatgcgtgtgttagcttc

SEQ ID NO: 133035 - DNA, 25 bp, SARS Virus
cgtcgtcatgcgggtgttagcttcg

SEQ ID NO: 133036 - DNA, 25 bp, SARS Virus
gtcgtcatgcgtgtgttagcttcgc

SEQ ID NO: 133037 - DNA, 25 bp, SARS Virus
tcgtcatgcgtgggttagcttcgcg

SEQ ID NO: 133038 - DNA, 25 bp, SARS Virus
cgtcatgcgtgtgttagcttcgcgt

SEQ ID NO: 133039 - DNA, 25 bp, SARS Virus
gtcatgcgtgtggtagcttcgcgtc

SEQ ID NO: 133040 - DNA, 25 bp, SARS Virus
tcatgcgtgtgtgagcttcgcgtca

SEQ ID NO: 133041 - DNA, 25 bp, SARS Virus
catgcgtgtgttggcttcgcgtcat

SEQ ID NO: 133042 - DNA, 25 bp, SARS Virus
atgcgtgtgttagcttcgcgtcatt

SEQ ID NO: 133043 - DNA, 25 bp, SARS Virus
tgcgtgtgttaggttcgcgtcattc

SEQ ID NO: 133044 - DNA, 25 bp, SARS Virus
gcgtgtgttagcgtcgcgtcattcc

SEQ ID NO: 133045 - DNA, 25 bp, SARS Virus
cgtgtgttagctgcgcgtcattcct

SEQ ID NO: 133046 - DNA, 25 bp, SARS Virus
gtgtgttagcttggcgtcattccta

SEQ ID NO: 133047 - DNA, 25 bp, SARS Virus
tgtgttagcttcgcgtcattcctac

SEQ ID NO: 133048 - DNA, 25 bp, SARS Virus
gtgttagcttcgggtcattcctacc

SEQ ID NO: 133049 - DNA, 25 bp, SARS Virus
tgttagcttcgcgtcattcctaccg

SEQ ID NO: 133050 - DNA, 25 bp, SARS Virus
gttagcttcgcggcattcctaccga

SEQ ID NO: 133051 - DNA, 25 bp, SARS Virus
ttagcttcgcgtgattcctaccgat

SEQ ID NO: 133052 - DNA, 25 bp, SARS Virus
tagcttcgcgtcgttcctaccgatc

SEQ ID NO: 133053 - DNA, 25 bp, SARS Virus
agcttcgcgtcagtcctaccgatca

SEQ ID NO: 133054 - DNA, 25 bp, SARS Virus
gcttcgcgtcatgcctaccgatcac

SEQ ID NO: 133055 - DNA, 25 bp, SARS Virus
cttcgcgtcattgctaccgatcaca

SEQ ID NO: 133056 - DNA, 25 bp, SARS Virus
ttcgcgtcattcgtaccgatcacac

SEQ ID NO: 133057 - DNA, 25 bp, SARS Virus
tcgcgtcattccgaccgatcacact

SEQ ID NO: 133058 - DNA, 25 bp, SARS Virus
cgcgtcattcctgccgatcacactg

SEQ ID NO: 133059 - DNA, 25 bp, SARS Virus
gcgtcattcctagcgatcacactga

SEQ ID NO: 133060 - DNA, 25 bp, SARS Virus
cgtcattcctacggatcacactgat

SEQ ID NO: 133061 - DNA, 25 bp, SARS Virus
gtcattcctaccgatcacactgatc

SEQ ID NO: 133062 - DNA, 25 bp, SARS Virus
tcattcctaccggtcacactgatcg

SEQ ID NO: 133063 - DNA, 25 bp, SARS Virus
cattcctaccgagcacactgatcgt

SEQ ID NO: 133064 - DNA, 25 bp, SARS Virus
attcctaccgatgacactgatcgtt

SEQ ID NO: 133065 - DNA, 25 bp, SARS Virus
ttcctaccgatcgcactgatcgttc

SEQ ID NO: 133066 - DNA, 25 bp, SARS Virus
tcctaccgatcagactgatcgttct

SEQ ID NO: 133067 - DNA, 25 bp, SARS Virus
cctaccgatcacgctgatcgttctt

SEQ ID NO: 133068 - DNA, 25 bp, SARS Virus
ctaccgatcacagtgatcgttctta

SEQ ID NO: 133069 - DNA, 25 bp, SARS Virus
taccgatcacacggatcgttcttat

SEQ ID NO: 133070 - DNA, 25 bp, SARS Virus
accgatcacactgatcgttcttatg

SEQ ID NO: 133071 - DNA, 25 bp, SARS Virus
ccgatcacactggtcgttcttatgg

SEQ ID NO: 133072 - DNA, 25 bp, SARS Virus
cgatcacactgagcgttcttatggt

SEQ ID NO: 133073 - DNA, 25 bp, SARS Virus
gatcacactgatggttcttatggtg

SEQ ID NO: 133074 - DNA, 25 bp, SARS Virus
atcacactgatcgttcttatggtgc

SEQ ID NO: 133075 - DNA, 25 bp, SARS Virus
tcacactgatcggtcttatggtgct

SEQ ID NO: 133076 - DNA, 25 bp, SARS Virus
cacactgatcgtgcttatggtgctt

SEQ ID NO: 133077 - DNA, 25 bp, SARS Virus
acactgatcgttgttatggtgcttt

SEQ ID NO: 133078 - DNA, 25 bp, SARS Virus
cactgatcgttcgtatggtgctttc

SEQ ID NO: 133079 - DNA, 25 bp, SARS Virus
actgatcgttctgatggtgctttcg

SEQ ID NO: 133080 - DNA, 25 bp, SARS Virus
ctgatcgttcttgtggtgctttcgt

SEQ ID NO: 133081 - DNA, 25 bp, SARS Virus
tgatcgttcttagggtgctttcgtt

SEQ ID NO: 133082 - DNA, 25 bp, SARS Virus
gatcgttcttatggtgctttcgttc

SEQ ID NO: 133083 - DNA, 25 bp, SARS Virus
atcgttcttatggtgctttcgttct

SEQ ID NO: 133084 - DNA, 25 bp, SARS Virus
tcgttcttatggggctttcgttctt

SEQ ID NO: 133085 - DNA, 25 bp, SARS Virus
cgttcttatggtgctttcgttcttt

SEQ ID NO: 133086 - DNA, 25 bp, SARS Virus
gttcttatggtggtttcgttctttt

SEQ ID NO: 133087 - DNA, 25 bp, SARS Virus
ttcttatggtgcgttcgttcttttt

SEQ ID NO: 133088 - DNA, 25 bp, SARS Virus
tcttatggtgctgtcgttctttttc

SEQ ID NO: 133089 - DNA, 25 bp, SARS Virus
cttatggtgcttgcgttctttttct

SEQ ID NO: 133090 - DNA, 25 bp, SARS Virus
ttatggtgctttggttctttttctt

SEQ ID NO: 133091 - DNA, 25 bp, SARS Virus
tatggtgctttcgttctttttcttc

SEQ ID NO: 133092 - DNA, 25 bp, SARS Virus
atggtgctttcggtctttttcttca

SEQ ID NO: 133093 - DNA, 25 bp, SARS Virus
tggtgctttcgtgctttttcttcat

SEQ ID NO: 133094 - DNA, 25 bp, SARS Virus
ggtgctttcgttgtttttcttcatg

SEQ ID NO: 133095 - DNA, 25 bp, SARS Virus
gtgctttcgttcgttttcttcatgc

SEQ ID NO: 133096 - DNA, 25 bp, SARS Virus
tgctttcgttctgtttcttcatgcg

SEQ ID NO: 133097 - DNA, 25 bp, SARS Virus
gctttcgttcttgttcttcatgcga

SEQ ID NO: 133098 - DNA, 25 bp, SARS Virus
ctttcgttctttgtcttcatgcgat

SEQ ID NO: 133099 - DNA, 25 bp, SARS Virus
tttcgttcttttgcttcatgcgata

SEQ ID NO: 133100 - DNA, 25 bp, SARS Virus
ttcgttctttttgttcatgcgataa

SEQ ID NO: 133101 - DNA, 25 bp, SARS Virus
tcgttctttttcgtcatgcgataat

SEQ ID NO: 133102 - DNA, 25 bp, SARS Virus
cgttctttttctgcatgcgataatt

SEQ ID NO: 133103 - DNA, 25 bp, SARS Virus
gttctttttcttgatgcgataattg

SEQ ID NO: 133104 - DNA, 25 bp, SARS Virus
ttctttttcttcgtgcgataattga

SEQ ID NO: 133105 - DNA, 25 bp, SARS Virus
tctttttcttcaggcgataattgat

SEQ ID NO: 133106 - DNA, 25 bp, SARS Virus
ctttttcttcatgcgataattgata

SEQ ID NO: 133107 - DNA, 25 bp, SARS Virus
tttttcttcatgggataattgataa

SEQ ID NO: 133108 - DNA, 25 bp, SARS Virus
ttttcttcatgcgataattgataat

SEQ ID NO: 133109 - DNA, 25 bp, SARS Virus
tttcttcatgcggtaattgataatt

SEQ ID NO: 133110 - DNA, 25 bp, SARS Virus
ttcttcatgcgagaattgataattg

SEQ ID NO: 133111 - DNA, 25 bp, SARS Virus
tcttcatgcgatgattgataattgc

SEQ ID NO: 133112 - DNA, 25 bp, SARS Virus
cttcatgcgatagttgataattgca

SEQ ID NO: 133113 - DNA, 25 bp, SARS Virus
ttcatgcgataagtgataattgcat

SEQ ID NO: 133114 - DNA, 25 bp, SARS Virus
tcatgcgataatggataattgcatg

SEQ ID NO: 133115 - DNA, 25 bp, SARS Virus
catgcgataattgataattgcatgg

SEQ ID NO: 133116 - DNA, 25 bp, SARS Virus
atgcgataattggtaattgcatgga

SEQ ID NO: 133117 - DNA, 25 bp, SARS Virus
tgcgataattgagaattgcatggac

SEQ ID NO: 133118 - DNA, 25 bp, SARS Virus
gcgataattgatgattgcatggaca

SEQ ID NO: 133119 - DNA, 25 bp, SARS Virus
cgataattgatagttgcatggacaa

SEQ ID NO: 133120 - DNA, 25 bp, SARS Virus
gataattgataagtgcatggacaaa

SEQ ID NO: 133121 - DNA, 25 bp, SARS Virus
ataattgataatggcatggacaaag

SEQ ID NO: 133122 - DNA, 25 bp, SARS Virus
taattgataattgcatggacaaaga

SEQ ID NO: 133123 - DNA, 25 bp, SARS Virus
aattgataattggatggacaaagaa

SEQ ID NO: 133124 - DNA, 25 bp, SARS Virus
attgataattgcgtggacaaagaag

SEQ ID NO: 133125 - DNA, 25 bp, SARS Virus
ttgataattgcagggacaaagaagg

SEQ ID NO: 133126 - DNA, 25 bp, SARS Virus
tgataattgcatggacaaagaaggc

SEQ ID NO: 133127 - DNA, 25 bp, SARS Virus
gataattgcatggacaaagaaggct

SEQ ID NO: 133128 - DNA, 25 bp, SARS Virus
ataattgcatgggcaaagaaggctt

SEQ ID NO: 133129 - DNA, 25 bp, SARS Virus
taattgcatggagaaagaaggcttt

SEQ ID NO: 133130 - DNA, 25 bp, SARS Virus
aattgcatggacgaagaaggctttg

SEQ ID NO: 133131 - DNA, 25 bp, SARS Virus
attgcatggacagagaaggctttgc

SEQ ID NO: 133132 - DNA, 25 bp, SARS Virus
ttgcatggacaaggaaggctttgct

SEQ ID NO: 133133 - DNA, 25 bp, SARS Virus
tgcatggacaaagaaggctttgctt

SEQ ID NO: 133134 - DNA, 25 bp, SARS Virus
gcatggacaaaggaggctttgctta

SEQ ID NO: 133135 - DNA, 25 bp, SARS Virus
catggacaaagagggctttgcttac

SEQ ID NO: 133136 - DNA, 25 bp, SARS Virus
atggacaaagaaggctttgcttact

SEQ ID NO: 133137 - DNA, 25 bp, SARS Virus
tggacaaagaaggctttgcttactc

SEQ ID NO: 133138 - DNA, 25 bp, SARS Virus
ggacaaagaagggtttgcttactca

SEQ ID NO: 133139 - DNA, 25 bp, SARS Virus
gacaaagaaggcgttgcttactcat

SEQ ID NO: 133140 - DNA, 25 bp, SARS Virus
acaaagaaggctgtgcttactcatg

SEQ ID NO: 133141 - DNA, 25 bp, SARS Virus
caaagaaggcttggcttactcatgt

SEQ ID NO: 133142 - DNA, 25 bp, SARS Virus
aaagaaggctttgcttactcatgta

SEQ ID NO: 133143 - DNA, 25 bp, SARS Virus
aagaaggctttggttactcatgtat

SEQ ID NO: 133144 - DNA, 25 bp, SARS Virus
agaaggctttgcgtactcatgtatt

SEQ ID NO: 133145 - DNA, 25 bp, SARS Virus
gaaggctttgctgactcatgtattc

SEQ ID NO: 133146 - DNA, 25 bp, SARS Virus
aaggctttgcttgctcatgtattca

SEQ ID NO: 133147 - DNA, 25 bp, SARS Virus
aggctttgcttagtcatgtattcaa

SEQ ID NO: 133148 - DNA, 25 bp, SARS Virus
ggctttgcttacgcatgtattcaag

SEQ ID NO: 133149 - DNA, 25 bp, SARS Virus
gctttgcttactgatgtattcaagc

SEQ ID NO: 133150 - DNA, 25 bp, SARS Virus
ctttgcttactcgtgtattcaagca

SEQ ID NO: 133151 - DNA, 25 bp, SARS Virus
tttgcttactcaggtattcaagcat

SEQ ID NO: 133152 - DNA, 25 bp, SARS Virus
ttgcttactcatgtattcaagcatg

SEQ ID NO: 133153 - DNA, 25 bp, SARS Virus
tgcttactcatggattcaagcatga

SEQ ID NO: 133154 - DNA, 25 bp, SARS Virus
gcttactcatgtgttcaagcatgag

SEQ ID NO: 133155 - DNA, 25 bp, SARS Virus
cttactcatgtagtcaagcatgagt

SEQ ID NO: 133156 - DNA, 25 bp, SARS Virus
ttactcatgtatgcaagcatgagtg

SEQ ID NO: 133157 - DNA, 25 bp, SARS Virus
tactcatgtattgaagcatgagtga

SEQ ID NO: 133158 - DNA, 25 bp, SARS Virus
actcatgtattcgagcatgagtgaa

SEQ ID NO: 133159 - DNA, 25 bp, SARS Virus
ctcatgtattcaggcatgagtgaaa

SEQ ID NO: 133160 - DNA, 25 bp, SARS Virus
tcatgtattcaagcatgagtgaaag

SEQ ID NO: 133161 - DNA, 25 bp, SARS Virus
catgtattcaaggatgagtgaaaga

SEQ ID NO: 133162 - DNA, 25 bp, SARS Virus
atgtattcaagcgtgagtgaaagaa

SEQ ID NO: 133163 - DNA, 25 bp, SARS Virus
tgtattcaagcaggagtgaaagaac

SEQ ID NO: 133164 - DNA, 25 bp, SARS Virus
gtattcaagcatgagtgaaagaaca

SEQ ID NO: 133165 - DNA, 25 bp, SARS Virus
tattcaagcatgggtgaaagaacac

SEQ ID NO: 133166 - DNA, 25 bp, SARS Virus
attcaagcatgagtgaaagaacacg

SEQ ID NO: 133167 - DNA, 25 bp, SARS Virus
ttcaagcatgagggaaagaacacga

SEQ ID NO: 133168 - DNA, 25 bp, SARS Virus
tcaagcatgagtgaaagaacacgaa

SEQ ID NO: 133169 - DNA, 25 bp, SARS Virus
caagcatgagtggaagaacacgaat

SEQ ID NO: 133170 - DNA, 25 bp, SARS Virus
aagcatgagtgagagaacacgaatg

SEQ ID NO: 133171 - DNA, 25 bp, SARS Virus
agcatgagtgaaggaacacgaatgt

SEQ ID NO: 133172 - DNA, 25 bp, SARS Virus
gcatgagtgaaagaacacgaatgtt

SEQ ID NO: 133173 - DNA, 25 bp, SARS Virus
catgagtgaaaggacacgaatgttt

SEQ ID NO: 133174 - DNA, 25 bp, SARS Virus
atgagtgaaagagcacgaatgtttc

SEQ ID NO: 133175 - DNA, 25 bp, SARS Virus
tgagtgaaagaagacgaatgtttcc

SEQ ID NO: 133176 - DNA, 25 bp, SARS Virus
gagtgaaagaacgcgaatgtttccg

SEQ ID NO: 133177 - DNA, 25 bp, SARS Virus
agtgaaagaacaggaatgtttccgt

SEQ ID NO: 133178 - DNA, 25 bp, SARS Virus
gtgaaagaacacgaatgtttccgtg

SEQ ID NO: 133179 - DNA, 25 bp, SARS Virus
tgaaagaacacggatgtttccgtgc

SEQ ID NO: 133180 - DNA, 25 bp, SARS Virus
gaaagaacacgagtgtttccgtgcg

SEQ ID NO: 133181 - DNA, 25 bp, SARS Virus
aaagaacacgaaggtttccgtgcga

SEQ ID NO: 133182 - DNA, 25 bp, SARS Virus
aagaacacgaatgtttccgtgcgat

SEQ ID NO: 133183 - DNA, 25 bp, SARS Virus
agaacacgaatggttccgtgcgatc

SEQ ID NO: 133184 - DNA, 25 bp, SARS Virus
gaacacgaatgtgtccgtgcgatca

SEQ ID NO: 133185 - DNA, 25 bp, SARS Virus
aacacgaatgttgccgtgcgatcat

SEQ ID NO: 133186 - DNA, 25 bp, SARS Virus
acacgaatgtttgcgtgcgatcatc

SEQ ID NO: 133187 - DNA, 25 bp, SARS Virus
cacgaatgtttcggtgcgatcatca

SEQ ID NO: 133188 - DNA, 25 bp, SARS Virus
acgaatgtttccgtgcgatcatcag

SEQ ID NO: 133189 - DNA, 25 bp, SARS Virus
cgaatgtttccgggcgatcatcagc

SEQ ID NO: 133190 - DNA, 25 bp, SARS Virus
gaatgtttccgtgcgatcatcagca

SEQ ID NO: 133191 - DNA, 25 bp, SARS Virus
aatgtttccgtgggatcatcagcag

SEQ ID NO: 133192 - DNA, 25 bp, SARS Virus
atgtttccgtgcgatcatcagcagc

SEQ ID NO: 133193 - DNA, 25 bp, SARS Virus
tgtttccgtgcggtcatcagcagca

SEQ ID NO: 133194 - DNA, 25 bp, SARS Virus
gtttccgtgcgagcatcagcagcag

SEQ ID NO: 133195 - DNA, 25 bp, SARS Virus
tttccgtgcgatgatcagcagcagc

SEQ ID NO: 133196 - DNA, 25 bp, SARS Virus
ttccgtgcgatcgtcagcagcagcc

SEQ ID NO: 133197 - DNA, 25 bp, SARS Virus
tccgtgcgatcagcagcagcagccg

SEQ ID NO: 133198 - DNA, 25 bp, SARS Virus
ccgtgcgatcatgagcagcagccga

SEQ ID NO: 133199 - DNA, 25 bp, SARS Virus
cgtgcgatcatcggcagcagccgag

SEQ ID NO: 133200 - DNA, 25 bp, SARS Virus
gtgcgatcatcagcagcagccgagt

SEQ ID NO: 133201 - DNA, 25 bp, SARS Virus
tgcgatcatcaggagcagccgagta

SEQ ID NO: 133202 - DNA, 25 bp, SARS Virus
gcgatcatcagcggcagccgagtag

SEQ ID NO: 133203 - DNA, 25 bp, SARS Virus
cgatcatcagcagcagccgagtagt

SEQ ID NO: 133204 - DNA, 25 bp, SARS Virus
gatcatcagcaggagccgagtagta

SEQ ID NO: 133205 - DNA, 25 bp, SARS Virus
atcatcagcagcggccgagtagtat

SEQ ID NO: 133206 - DNA, 25 bp, SARS Virus
tcatcagcagcagccgagtagtatt

SEQ ID NO: 133207 - DNA, 25 bp, SARS Virus
catcagcagcaggcgagtagtattt

SEQ ID NO: 133208 - DNA, 25 bp, SARS Virus
atcagcagcagcggagtagtattta

SEQ ID NO: 133209 - DNA, 25 bp, SARS Virus
tcagcagcagccgagtagtatttaa

SEQ ID NO: 133210 - DNA, 25 bp, SARS Virus
cagcagcagccgggtagtatttaac

SEQ ID NO: 133211 - DNA, 25 bp, SARS Virus
agcagcagccgagtagtatttaacc

SEQ ID NO: 133212 - DNA, 25 bp, SARS Virus
gcagcagccgaggagtatttaacct

SEQ ID NO: 133213 - DNA, 25 bp, SARS Virus
cagcagccgagtggtatttaaccta

SEQ ID NO: 133214 - DNA, 25 bp, SARS Virus
agcagccgagtagtatttaacctag

SEQ ID NO: 133215 - DNA, 25 bp, SARS Virus
gcagccgagtaggatttaacctagg

SEQ ID NO: 133216 - DNA, 25 bp, SARS Virus
cagccgagtagtgtttaacctaggt

SEQ ID NO: 133217 - DNA, 25 bp, SARS Virus
agccgagtagtagttaacctaggta

SEQ ID NO: 133218 - DNA, 25 bp, SARS Virus
gccgagtagtatgtaacctaggtaa

SEQ ID NO: 133219 - DNA, 25 bp, SARS Virus
ccgagtagtattgaacctaggtaac

SEQ ID NO: 133220 - DNA, 25 bp, SARS Virus
cgagtagtatttgacctaggtaacg

SEQ ID NO: 133221 - DNA, 25 bp, SARS Virus
gagtagtatttagcctaggtaacga

SEQ ID NO: 133222 - DNA, 25 bp, SARS Virus
agtagtatttaagctaggtaacgac

SEQ ID NO: 133223 - DNA, 25 bp, SARS Virus
gtagtatttaacgtaggtaacgacc

SEQ ID NO: 133224 - DNA, 25 bp, SARS Virus
tagtatttaaccgaggtaacgacct

SEQ ID NO: 133225 - DNA, 25 bp, SARS Virus
agtatttaacctgggtaacgaccta

SEQ ID NO: 133226 - DNA, 25 bp, SARS Virus
gtatttaacctaggtaacgacctaa

SEQ ID NO: 133227 - DNA, 25 bp, SARS Virus
tatttaacctaggtaacgacctaat

SEQ ID NO: 133228 - DNA, 25 bp, SARS Virus
atttaacctagggaacgacctaatc

SEQ ID NO: 133229 - DNA, 25 bp, SARS Virus
tttaacctaggtgacgacctaatcg

SEQ ID NO: 133230 - DNA, 25 bp, SARS Virus
ttaacctaggtagcgacctaatcgt

SEQ ID NO: 133231 - DNA, 25 bp, SARS Virus
taacctaggtaaggacctaatcgtt

SEQ ID NO: 133232 - DNA, 25 bp, SARS Virus
aacctaggtaacgacctaatcgttg

SEQ ID NO: 133233 - DNA, 25 bp, SARS Virus
acctaggtaacggcctaatcgttga

SEQ ID NO: 133234 - DNA, 25 bp, SARS Virus
cctaggtaacgagctaatcgttgag

SEQ ID NO: 133235 - DNA, 25 bp, SARS Virus
ctaggtaacgacgtaatcgttgagg

SEQ ID NO: 133236 - DNA, 25 bp, SARS Virus
taggtaacgaccgaatcgttgagga

SEQ ID NO: 133237 - DNA, 25 bp, SARS Virus
aggtaacgacctgatcgttgaggac

SEQ ID NO: 133238 - DNA, 25 bp, SARS Virus
ggtaacgacctagtcgttgaggact

SEQ ID NO: 133239 - DNA, 25 bp, SARS Virus
gtaacgacctaagcgttgaggactt

SEQ ID NO: 133240 - DNA, 25 bp, SARS Virus
taacgacctaatggttgaggacttc

SEQ ID NO: 133241 - DNA, 25 bp, SARS Virus
aacgacctaatcgttgaggacttct

SEQ ID NO: 133242 - DNA, 25 bp, SARS Virus
acgacctaatcggtgaggacttctc

SEQ ID NO: 133243 - DNA, 25 bp, SARS Virus
cgacctaatcgtggaggacttctcg

SEQ ID NO: 133244 - DNA, 25 bp, SARS Virus
gacctaatcgttgaggacttctcgg

SEQ ID NO: 133245 - DNA, 25 bp, SARS Virus
acctaatcgttggggacttctcggc

SEQ ID NO: 133246 - DNA, 25 bp, SARS Virus
cctaatcgttgaggacttctcggca

SEQ ID NO: 133247 - DNA, 25 bp, SARS Virus
ctaatcgttgaggacttctcggcag

SEQ ID NO: 133248 - DNA, 25 bp, SARS Virus
taatcgttgagggcttctcggcagc

SEQ ID NO: 133249 - DNA, 25 bp, SARS Virus
aatcgttgaggagttctcggcagct

SEQ ID NO: 133250 - DNA, 25 bp, SARS Virus
atcgttgaggacgtctcggcagcta

SEQ ID NO: 133251 - DNA, 25 bp, SARS Virus
tcgttgaggactgctcggcagctaa

SEQ ID NO: 133252 - DNA, 25 bp, SARS Virus
cgttgaggacttgtcggcagctaac

SEQ ID NO: 133253 - DNA, 25 bp, SARS Virus
gttgaggacttcgcggcagctaaca

SEQ ID NO: 133254 - DNA, 25 bp, SARS Virus
ttgaggacttctgggcagctaacac

SEQ ID NO: 133255 - DNA, 25 bp, SARS Virus
tgaggacttctcggcagctaacaca

SEQ ID NO: 133256 - DNA, 25 bp, SARS Virus
gaggacttctcggcagctaacacac

SEQ ID NO: 133257 - DNA, 25 bp, SARS Virus
tcttatccgttttacatcattgtat

SEQ ID NO: 133258 - DNA, 25 bp, SARS Virus
cttatccgtttatcatcattgtatt

SEQ ID NO: 133259 - DNA, 25 bp, SARS Virus
ttatccgtttaatatcattgtatta

SEQ ID NO: 133260 - DNA, 25 bp, SARS Virus
tatccgtttaacttcattgtattag

SEQ ID NO: 133261 - DNA, 25 bp, SARS Virus
atccgtttaacatcattgtattagg

SEQ ID NO: 133262 - DNA, 25 bp, SARS Virus
tccgtttaacattattgtattaggt

SEQ ID NO: 133263 - DNA, 25 bp, SARS Virus
ccgtttaacatctttgtattaggtc

SEQ ID NO: 133264 - DNA, 25 bp, SARS Virus
cgtttaacatcattgtattaggtcc

SEQ ID NO: 133265 - DNA, 25 bp, SARS Virus
gtttaacatcattgtattaggtccg

SEQ ID NO: 133266 - DNA, 25 bp, SARS Virus
tttaacatcattttattaggtccga

SEQ ID NO: 133267 - DNA, 25 bp, SARS Virus
ttaacatcattgtattaggtccgat

SEQ ID NO: 133268 - DNA, 25 bp, SARS Virus
taacatcattgttttaggtccgatc

SEQ ID NO: 133269 - DNA, 25 bp, SARS Virus
aacatcattgtattaggtccgatcc

SEQ ID NO: 133270 - DNA, 25 bp, SARS Virus
acatcattgtattaggtccgatcct

SEQ ID NO: 133271 - DNA, 25 bp, SARS Virus
catcattgtatttggtccgatcctt

SEQ ID NO: 133272 - DNA, 25 bp, SARS Virus
atcattgtattatgtccgatcctta

SEQ ID NO: 133273 - DNA, 25 bp, SARS Virus
tcattgtattagttccgatccttat

SEQ ID NO: 133274 - DNA, 25 bp, SARS Virus
cattgtattaggtccgatccttatc

SEQ ID NO: 133275 - DNA, 25 bp, SARS Virus
attgtattaggttcgatccttatcc

SEQ ID NO: 133276 - DNA, 25 bp, SARS Virus
ttgtattaggtctgatccttatcct

SEQ ID NO: 133277 - DNA, 25 bp, SARS Virus
tgtattaggtcctatccttatcctt

SEQ ID NO: 133278 - DNA, 25 bp, SARS Virus
gtattaggtccgttccttatccttt

SEQ ID NO: 133279 - DNA, 25 bp, SARS Virus
tattaggtccgatccttatcctttg

SEQ ID NO: 133280 - DNA, 25 bp, SARS Virus
attaggtccgattcttatcctttgg

SEQ ID NO: 133281 - DNA, 25 bp, SARS Virus
ttaggtccgatctttatcctttgga

SEQ ID NO: 133282 - DNA, 25 bp, SARS Virus
taggtccgatccttatcctttggat

SEQ ID NO: 133283 - DNA, 25 bp, SARS Virus
aggtccgatccttatcctttggata

SEQ ID NO: 133284 - DNA, 25 bp, SARS Virus
ggtccgatccttttcctttggataa

SEQ ID NO: 133285 - DNA, 25 bp, SARS Virus
gtccgatccttatcctttggataat

SEQ ID NO: 133286 - DNA, 25 bp, SARS Virus
tccgatccttattctttggataatg

SEQ ID NO: 133287 - DNA, 25 bp, SARS Virus
ccgatccttatcttttggataatga

SEQ ID NO: 133288 - DNA, 25 bp, SARS Virus
cgatccttatcctttggataatgat

SEQ ID NO: 133289 - DNA, 25 bp, SARS Virus
gatccttatcctttggataatgatc

SEQ ID NO: 133290 - DNA, 25 bp, SARS Virus
atccttatcctttggataatgatcc

SEQ ID NO: 133291 - DNA, 25 bp, SARS Virus
tccttatccttttgataatgatcca

SEQ ID NO: 133292 - DNA, 25 bp, SARS Virus
ccttatcctttgtataatgatccaa

SEQ ID NO: 133293 - DNA, 25 bp, SARS Virus
cttatcctttggttaatgatccaag

SEQ ID NO: 133294 - DNA, 25 bp, SARS Virus
ttatcctttggataatgatccaagg

SEQ ID NO: 133295 - DNA, 25 bp, SARS Virus
tatcctttggattatgatccaaggt

SEQ ID NO: 133296 - DNA, 25 bp, SARS Virus
atcctttggatattgatccaaggta

SEQ ID NO: 133297 - DNA, 25 bp, SARS Virus
tcctttggataatgatccaaggtaa

SEQ ID NO: 133298 - DNA, 25 bp, SARS Virus
cctttggataattatccaaggtaac

SEQ ID NO: 133299 - DNA, 25 bp, SARS Virus
ctttggataatgttccaaggtaaca

SEQ ID NO: 133300 - DNA, 25 bp, SARS Virus
tttggataatgatccaaggtaacaa

SEQ ID NO: 133301 - DNA, 25 bp, SARS Virus
ttggataatgattcaaggtaacaag

SEQ ID NO: 133302 - DNA, 25 bp, SARS Virus
tggataatgatctaaggtaacaagg

SEQ ID NO: 133303 - DNA, 25 bp, SARS Virus
ggataatgatcctaggtaacaaggt

SEQ ID NO: 133304 - DNA, 25 bp, SARS Virus
gataatgatccatggtaacaaggtc

SEQ ID NO: 133305 - DNA, 25 bp, SARS Virus
ataatgatccaatgtaacaaggtcc

SEQ ID NO: 133306 - DNA, 25 bp, SARS Virus
taatgatccaagttaacaaggtcct

SEQ ID NO: 133307 - DNA, 25 bp, SARS Virus
aatgatccaaggtaacaaggtcctc

SEQ ID NO: 133308 - DNA, 25 bp, SARS Virus
atgatccaaggttacaaggtcctca

SEQ ID NO: 133309 - DNA, 25 bp, SARS Virus
tgatccaaggtatcaaggtcctcaa

SEQ ID NO: 133310 - DNA, 25 bp, SARS Virus
gatccaaggtaataaggtcctcaac

SEQ ID NO: 133311 - DNA, 25 bp, SARS Virus
atccaaggtaactaggtcctcaaca

SEQ ID NO: 133312 - DNA, 25 bp, SARS Virus
tccaaggtaacatggtcctcaacaa

SEQ ID NO: 133313 - DNA, 25 bp, SARS Virus
ccaaggtaacaatgtcctcaacaaa

SEQ ID NO: 133314 - DNA, 25 bp, SARS Virus
caaggtaacaagttcctcaacaaat

SEQ ID NO: 133315 - DNA, 25 bp, SARS Virus
aaggtaacaaggtcctcaacaaatt

SEQ ID NO: 133316 - DNA, 25 bp, SARS Virus
aggtaacaaggttctcaacaaattc

SEQ ID NO: 133317 - DNA, 25 bp, SARS Virus
ggtaacaaggtcttcaacaaattcg

SEQ ID NO: 133318 - DNA, 25 bp, SARS Virus
gtaacaaggtcctcaacaaattcga

SEQ ID NO: 133319 - DNA, 25 bp, SARS Virus
taacaaggtccttaacaaattcgag

SEQ ID NO: 133320 - DNA, 25 bp, SARS Virus
aacaaggtcctctacaaattcgagg

SEQ ID NO: 133321 - DNA, 25 bp, SARS Virus
acaaggtcctcatcaaattcgagga

SEQ ID NO: 133322 - DNA, 25 bp, SARS Virus
caaggtcctcaataaattcgaggag

SEQ ID NO: 133323 - DNA, 25 bp, SARS Virus
aaggtcctcaactaattcgaggagt

SEQ ID NO: 133324 - DNA, 25 bp, SARS Virus
aggtcctcaacatattcgaggagtt

SEQ ID NO: 133325 - DNA, 25 bp, SARS Virus
ggtcctcaacaatttcgaggagttg

SEQ ID NO: 133326 - DNA, 25 bp, SARS Virus
gtcctcaacaaattcgaggagttgc

SEQ ID NO: 133327 - DNA, 25 bp, SARS Virus
tcctcaacaaattcgaggagttgcc

SEQ ID NO: 133328 - DNA, 25 bp, SARS Virus
cctcaacaaatttgaggagttgcca

SEQ ID NO: 133329 - DNA, 25 bp, SARS Virus
ctcaacaaattctaggagttgccat

SEQ ID NO: 133330 - DNA, 25 bp, SARS Virus
tcaacaaattcgtggagttgccatt

SEQ ID NO: 133331 - DNA, 25 bp, SARS Virus
caacaaattcgatgagttgccatta

SEQ ID NO: 133332 - DNA, 25 bp, SARS Virus
aacaaattcgagtagttgccattat

SEQ ID NO: 133333 - DNA, 25 bp, SARS Virus
acaaattcgaggtgttgccattatc

SEQ ID NO: 133334 - DNA, 25 bp, SARS Virus
caaattcgaggatttgccattatca

SEQ ID NO: 133335 - DNA, 25 bp, SARS Virus
aaattcgaggagttgccattatcat

SEQ ID NO: 133336 - DNA, 25 bp, SARS Virus
aattcgaggagttgccattatcatg

SEQ ID NO: 133337 - DNA, 25 bp, SARS Virus
attcgaggagtttccattatcatgg

SEQ ID NO: 133338 - DNA, 25 bp, SARS Virus
ttcgaggagttgtcattatcatggc

SEQ ID NO: 133339 - DNA, 25 bp, SARS Virus
tcgaggagttgctattatcatggca

SEQ ID NO: 133340 - DNA, 25 bp, SARS Virus
cgaggagttgcctttatcatggcaa

SEQ ID NO: 133341 - DNA, 25 bp, SARS Virus
gaggagttgccattatcatggcaac

SEQ ID NO: 133342 - DNA, 25 bp, SARS Virus
aggagttgccattatcatggcaaca

SEQ ID NO: 133343 - DNA, 25 bp, SARS Virus
ggagttgccattttcatggcaacag

SEQ ID NO: 133344 - DNA, 25 bp, SARS Virus
gagttgccattatcatggcaacaga

SEQ ID NO: 133345 - DNA, 25 bp, SARS Virus
agttgccattattatggcaacagac

SEQ ID NO: 133346 - DNA, 25 bp, SARS Virus
gttgccattatcttggcaacagacg

SEQ ID NO: 133347 - DNA, 25 bp, SARS Virus
ttgccattatcatggcaacagacgg

SEQ ID NO: 133348 - DNA, 25 bp, SARS Virus
tgccattatcattgcaacagacggt

SEQ ID NO: 133349 - DNA, 25 bp, SARS Virus
gccattatcatgtcaacagacggta

SEQ ID NO: 133350 - DNA, 25 bp, SARS Virus
ccattatcatggtaacagacggtac

SEQ ID NO: 133351 - DNA, 25 bp, SARS Virus
cattatcatggctacagacggtact

SEQ ID NO: 133352 - DNA, 25 bp, SARS Virus
attatcatggcatcagacggtacta

SEQ ID NO: 133353 - DNA, 25 bp, SARS Virus
ttatcatggcaatagacggtactat

SEQ ID NO: 133354 - DNA, 25 bp, SARS Virus
tatcatggcaactgacggtactatt

SEQ ID NO: 133355 - DNA, 25 bp, SARS Virus
atcatggcaacatacggtactattc

SEQ ID NO: 133356 - DNA, 25 bp, SARS Virus
tcatggcaacagtcggtactattcg

SEQ ID NO: 133357 - DNA, 25 bp, SARS Virus
catggcaacagatggtactattcgt

SEQ ID NO: 133358 - DNA, 25 bp, SARS Virus
atggcaacagactgtactattcgtt

SEQ ID NO: 133359 - DNA, 25 bp, SARS Virus
tggcaacagacgttactattcgtta

SEQ ID NO: 133360 - DNA, 25 bp, SARS Virus
ggcaacagacggtactattcgttac

SEQ ID NO: 133361 - DNA, 25 bp, SARS Virus
gcaacagacggttctattcgttaca

SEQ ID NO: 133362 - DNA, 25 bp, SARS Virus
caacagacggtattattcgttacaa

SEQ ID NO: 133363 - DNA, 25 bp, SARS Virus
aacagacggtactattcgttacaat

SEQ ID NO: 133364 - DNA, 25 bp, SARS Virus
acagacggtacttttcgttacaatt

SEQ ID NO: 133365 - DNA, 25 bp, SARS Virus
cagacggtactattcgttacaattt

SEQ ID NO: 133366 - DNA, 25 bp, SARS Virus
agacggtactattcgttacaatttc

SEQ ID NO: 133367 - DNA, 25 bp, SARS Virus
gacggtactatttgttacaatttca

SEQ ID NO: 133368 - DNA, 25 bp, SARS Virus
acggtactattctttacaatttcaa

SEQ ID NO: 133369 - DNA, 25 bp, SARS Virus
cggtactattcgttacaatttcaag

SEQ ID NO: 133370 - DNA, 25 bp, SARS Virus
ggtactattcgttacaatttcaagg

SEQ ID NO: 133371 - DNA, 25 bp, SARS Virus
gtactattcgtttcaatttcaaggt

SEQ ID NO: 133372 - DNA, 25 bp, SARS Virus
tactattcgttataatttcaaggtt

SEQ ID NO: 133373 - DNA, 25 bp, SARS Virus
actattcgttactatttcaaggttt

SEQ ID NO: 133374 - DNA, 25 bp, SARS Virus
ctattcgttacattttcaaggtttg

SEQ ID NO: 133375 - DNA, 25 bp, SARS Virus
tattcgttacaatttcaaggtttgt

SEQ ID NO: 133376 - DNA, 25 bp, SARS Virus
attcgttacaatttcaaggtttgtc

SEQ ID NO: 133377 - DNA, 25 bp, SARS Virus
ttcgttacaatttcaaggtttgtct

SEQ ID NO: 133378 - DNA, 25 bp, SARS Virus
tcgttacaattttaaggtttgtctt

SEQ ID NO: 133379 - DNA, 25 bp, SARS Virus
cgttacaatttctaggtttgtctta

SEQ ID NO: 133380 - DNA, 25 bp, SARS Virus
gttacaatttcatggtttgtcttat

SEQ ID NO: 133381 - DNA, 25 bp, SARS Virus
ttacaatttcaatgtttgtcttatt

SEQ ID NO: 133382 - DNA, 25 bp, SARS Virus
tacaatttcaagttttgtcttatta

SEQ ID NO: 133383 - DNA, 25 bp, SARS Virus
acaatttcaaggtttgtcttattat

SEQ ID NO: 133384 - DNA, 25 bp, SARS Virus
caatttcaaggtttgtcttattatt

SEQ ID NO: 133385 - DNA, 25 bp, SARS Virus
aatttcaaggtttgtcttattatta

SEQ ID NO: 133386 - DNA, 25 bp, SARS Virus
atttcaaggtttttcttattattat

SEQ ID NO: 133387 - DNA, 25 bp, SARS Virus
tttcaaggtttgtcttattattatt

SEQ ID NO: 133388 - DNA, 25 bp, SARS Virus
ttcaaggtttgttttattattatta

SEQ ID NO: 133389 - DNA, 25 bp, SARS Virus
tcaaggtttgtcttattattattat

SEQ ID NO: 133390 - DNA, 25 bp, SARS Virus
caaggtttgtcttattattattatc

SEQ ID NO: 133391 - DNA, 25 bp, SARS Virus
aaggtttgtctttttattattatca

SEQ ID NO: 133392 - DNA, 25 bp, SARS Virus
aggtttgtcttattattattatcaa

SEQ ID NO: 133393 - DNA, 25 bp, SARS Virus
ggtttgtcttattattattatcaat

SEQ ID NO: 133394 - DNA, 25 bp, SARS Virus
gtttgtcttatttttattatcaatc

SEQ ID NO: 133395 - DNA, 25 bp, SARS Virus
tttgtcttattattattatcaatca

SEQ ID NO: 133396 - DNA, 25 bp, SARS Virus
ttgtcttattattattatcaatcaa

SEQ ID NO: 133397 - DNA, 25 bp, SARS Virus
tgtcttattatttttatcaatcaag

SEQ ID NO: 133398 - DNA, 25 bp, SARS Virus
gtcttattattattatcaatcaagc

SEQ ID NO: 133399 - DNA, 25 bp, SARS Virus
tcttattattattatcaatcaagca

SEQ ID NO: 133400 - DNA, 25 bp, SARS Virus
cttattattattttcaatcaagcaa

SEQ ID NO: 133401 - DNA, 25 bp, SARS Virus
ttattattattatcaatcaagcaaa

SEQ ID NO: 133402 - DNA, 25 bp, SARS Virus
tattattattattaatcaagcaaat

SEQ ID NO: 133403 - DNA, 25 bp, SARS Virus
attattattatctatcaagcaaatc

SEQ ID NO: 133404 - DNA, 25 bp, SARS Virus
ttattattatcattcaagcaaatct

SEQ ID NO: 133405 - DNA, 25 bp, SARS Virus
tattattatcaatcaagcaaatctg

SEQ ID NO: 133406 - DNA, 25 bp, SARS Virus
attattatcaattaagcaaatctgg

SEQ ID NO: 133407 - DNA, 25 bp, SARS Virus
ttattatcaatctagcaaatctggt

SEQ ID NO: 133408 - DNA, 25 bp, SARS Virus
tattatcaatcatgcaaatctggtc

SEQ ID NO: 133409 - DNA, 25 bp, SARS Virus
attatcaatcaatcaaatctggtct

SEQ ID NO: 133410 - DNA, 25 bp, SARS Virus
ttatcaatcaagtaaatctggtctt

SEQ ID NO: 133411 - DNA, 25 bp, SARS Virus
tatcaatcaagctaatctggtcttc

SEQ ID NO: 133412 - DNA, 25 bp, SARS Virus
atcaatcaagcatatctggtcttct

SEQ ID NO: 133413 - DNA, 25 bp, SARS Virus
tcaatcaagcaattctggtcttcta

SEQ ID NO: 133414 - DNA, 25 bp, SARS Virus
caatcaagcaaatctggtcttctag

SEQ ID NO: 133415 - DNA, 25 bp, SARS Virus
aatcaagcaaatttggtcttctagt

SEQ ID NO: 133416 - DNA, 25 bp, SARS Virus
atcaagcaaatctggtcttctagtc

SEQ ID NO: 133417 - DNA, 25 bp, SARS Virus
tcaagcaaatcttgtcttctagtcc

SEQ ID NO: 133418 - DNA, 25 bp, SARS Virus
caagcaaatctgttcttctagtcct

SEQ ID NO: 133419 - DNA, 25 bp, SARS Virus
aagcaaatctggtcttctagtcctt

SEQ ID NO: 133420 - DNA, 25 bp, SARS Virus
agcaaatctggttttctagtccttg

SEQ ID NO: 133421 - DNA, 25 bp, SARS Virus
gcaaatctggtcttctagtccttga

SEQ ID NO: 133422 - DNA, 25 bp, SARS Virus
caaatctggtcttctagtccttgag

SEQ ID NO: 133423 - DNA, 25 bp, SARS Virus
aaatctggtcttttagtccttgagg

SEQ ID NO: 133424 - DNA, 25 bp, SARS Virus
aatctggtcttctagtccttgagga

SEQ ID NO: 133425 - DNA, 25 bp, SARS Virus
atctggtcttcttgtccttgaggaa

SEQ ID NO: 133426 - DNA, 25 bp, SARS Virus
tctggtcttctattccttgaggaag

SEQ ID NO: 133427 - DNA, 25 bp, SARS Virus
ctggtcttctagtccttgaggaagt

SEQ ID NO: 133428 - DNA, 25 bp, SARS Virus
tggtcttctagttcttgaggaagtc

SEQ ID NO: 133429 - DNA, 25 bp, SARS Virus
ggtcttctagtctttgaggaagtct

SEQ ID NO: 133430 - DNA, 25 bp, SARS Virus
gtcttctagtccttgaggaagtctt

SEQ ID NO: 133431 - DNA, 25 bp, SARS Virus
tcttctagtccttgaggaagtcttc

SEQ ID NO: 133432 - DNA, 25 bp, SARS Virus
cttctagtcctttaggaagtcttct

SEQ ID NO: 133433 - DNA, 25 bp, SARS Virus
ttctagtccttgtggaagtcttctc

SEQ ID NO: 133434 - DNA, 25 bp, SARS Virus
tctagtccttgatgaagtcttctca

SEQ ID NO: 133435 - DNA, 25 bp, SARS Virus
ctagtccttgagtaagtcttctcaa

SEQ ID NO: 133436 - DNA, 25 bp, SARS Virus
tagtccttgaggtagtcttctcaag

SEQ ID NO: 133437 - DNA, 25 bp, SARS Virus
agtccttgaggatgtcttctcaagt

SEQ ID NO: 133438 - DNA, 25 bp, SARS Virus
gtccttgaggaattcttctcaagtc

SEQ ID NO: 133439 - DNA, 25 bp, SARS Virus
tccttgaggaagtcttctcaagtct

SEQ ID NO: 133440 - DNA, 25 bp, SARS Virus
ccttgaggaagttttctcaagtcta

SEQ ID NO: 133441 - DNA, 25 bp, SARS Virus
cttgaggaagtcttctcaagtctaa

SEQ ID NO: 133442 - DNA, 25 bp, SARS Virus
ttgaggaagtcttctcaagtctaaa

SEQ ID NO: 133443 - DNA, 25 bp, SARS Virus
tgaggaagtcttttcaagtctaaaa

SEQ ID NO: 133444 - DNA, 25 bp, SARS Virus
gaggaagtcttctcaagtctaaaaa

SEQ ID NO: 133445 - DNA, 25 bp, SARS Virus
aggaagtcttcttaagtctaaaaat

SEQ ID NO: 133446 - DNA, 25 bp, SARS Virus
ggaagtcttctctagtctaaaaatt

SEQ ID NO: 133447 - DNA, 25 bp, SARS Virus
gaagtcttctcatgtctaaaaattg

SEQ ID NO: 133448 - DNA, 25 bp, SARS Virus
aagtcttctcaattctaaaaattgt

SEQ ID NO: 133449 - DNA, 25 bp, SARS Virus
agtcttctcaagtctaaaaattgtg

SEQ ID NO: 133450 - DNA, 25 bp, SARS Virus
gtcttctcaagtttaaaaattgtgc

SEQ ID NO: 133451 - DNA, 25 bp, SARS Virus
tcttctcaagtctaaaaattgtgcg

SEQ ID NO: 133452 - DNA, 25 bp, SARS Virus
cttctcaagtcttaaaattgtgcgc

SEQ ID NO: 133453 - DNA, 25 bp, SARS Virus
ttctcaagtctataaattgtgcgct

SEQ ID NO: 133454 - DNA, 25 bp, SARS Virus
tctcaagtctaataattgtgcgctc

SEQ ID NO: 133455 - DNA, 25 bp, SARS Virus
ctcaagtctaaatattgtgcgctca

SEQ ID NO: 133456 - DNA, 25 bp, SARS Virus
tcaagtctaaaatttgtgcgctcat

SEQ ID NO: 133457 - DNA, 25 bp, SARS Virus
caagtctaaaaattgtgcgctcatc

SEQ ID NO: 133458 - DNA, 25 bp, SARS Virus
aagtctaaaaattgtgcgctcatct

SEQ ID NO: 133459 - DNA, 25 bp, SARS Virus
agtctaaaaattttgcgctcatctg

SEQ ID NO: 133460 - DNA, 25 bp, SARS Virus
gtctaaaaattgtgcgctcatctgc

SEQ ID NO: 133461 - DNA, 25 bp, SARS Virus
tctaaaaattgttcgctcatctgca

SEQ ID NO: 133462 - DNA, 25 bp, SARS Virus
ctaaaaattgtgtgctcatctgcat

SEQ ID NO: 133463 - DNA, 25 bp, SARS Virus
taaaaattgtgctctcatctgcatt

SEQ ID NO: 133464 - DNA, 25 bp, SARS Virus
aaaaattgtgcgttcatctgcattt

SEQ ID NO: 133465 - DNA, 25 bp, SARS Virus
aaaattgtgcgctcatctgcatttg

SEQ ID NO: 133466 - DNA, 25 bp, SARS Virus
aaattgtgcgcttatctgcatttgg

SEQ ID NO: 133467 - DNA, 25 bp, SARS Virus
aattgtgcgctcttctgcatttggc

SEQ ID NO: 133468 - DNA, 25 bp, SARS Virus
attgtgcgctcatctgcatttggca

SEQ ID NO: 133469 - DNA, 25 bp, SARS Virus
ttgtgcgctcatttgcatttggcaa

SEQ ID NO: 133470 - DNA, 25 bp, SARS Virus
tgtgcgctcatctgcatttggcaac

SEQ ID NO: 133471 - DNA, 25 bp, SARS Virus
gtgcgctcatcttcatttggcaacc

SEQ ID NO: 133472 - DNA, 25 bp, SARS Virus
tgcgctcatctgtatttggcaacca

SEQ ID NO: 133473 - DNA, 25 bp, SARS Virus
gcgctcatctgcttttggcaaccaa

SEQ ID NO: 133474 - DNA, 25 bp, SARS Virus
cgctcatctgcatttggcaaccaaa

SEQ ID NO: 133475 - DNA, 25 bp, SARS Virus
gctcatctgcatttggcaaccaaaa

SEQ ID NO: 133476 - DNA, 25 bp, SARS Virus
ctcatctgcatttggcaaccaaaat

SEQ ID NO: 133477 - DNA, 25 bp, SARS Virus
tcatctgcattttgcaaccaaaatg

SEQ ID NO: 133478 - DNA, 25 bp, SARS Virus
catctgcatttgtcaaccaaaatga

SEQ ID NO: 133479 - DNA, 25 bp, SARS Virus
atctgcatttggtaaccaaaatgat

SEQ ID NO: 133480 - DNA, 25 bp, SARS Virus
tctgcatttggctaccaaaatgatt

SEQ ID NO: 133481 - DNA, 25 bp, SARS Virus
ctgcatttggcatccaaaatgattt

SEQ ID NO: 133482 - DNA, 25 bp, SARS Virus
tgcatttggcaatcaaaatgatttg

SEQ ID NO: 133483 - DNA, 25 bp, SARS Virus
gcatttggcaactaaaatgatttga

SEQ ID NO: 133484 - DNA, 25 bp, SARS Virus
catttggcaacctaaatgatttgag

SEQ ID NO: 133485 - DNA, 25 bp, SARS Virus
atttggcaaccataatgatttgagt

SEQ ID NO: 133486 - DNA, 25 bp, SARS Virus
tttggcaaccaatatgatttgagtg

SEQ ID NO: 133487 - DNA, 25 bp, SARS Virus
ttggcaaccaaattgatttgagtgc

SEQ ID NO: 133488 - DNA, 25 bp, SARS Virus
tggcaaccaaaatgatttgagtgca

SEQ ID NO: 133489 - DNA, 25 bp, SARS Virus
ggcaaccaaaattatttgagtgcaa

SEQ ID NO: 133490 - DNA, 25 bp, SARS Virus
gcaaccaaaatgttttgagtgcaat

SEQ ID NO: 133491 - DNA, 25 bp, SARS Virus
caaccaaaatgatttgagtgcaatt

SEQ ID NO: 133492 - DNA, 25 bp, SARS Virus
aaccaaaatgatttgagtgcaattg

SEQ ID NO: 133493 - DNA, 25 bp, SARS Virus
accaaaatgatttgagtgcaattgt

SEQ ID NO: 133494 - DNA, 25 bp, SARS Virus
ccaaaatgattttagtgcaattgtt

SEQ ID NO: 133495 - DNA, 25 bp, SARS Virus
caaaatgatttgtgtgcaattgtta

SEQ ID NO: 133496 - DNA, 25 bp, SARS Virus
aaaatgatttgattgcaattgttat

SEQ ID NO: 133497 - DNA, 25 bp, SARS Virus
aaatgatttgagtgcaattgttata

SEQ ID NO: 133498 - DNA, 25 bp, SARS Virus
aatgatttgagttcaattgttataa

SEQ ID NO: 133499 - DNA, 25 bp, SARS Virus
atgatttgagtgtaattgttataac

SEQ ID NO: 133500 - DNA, 25 bp, SARS Virus
tgatttgagtgctattgttataacg

SEQ ID NO: 133501 - DNA, 25 bp, SARS Virus
gatttgagtgcatttgttataacgt

SEQ ID NO: 133502 - DNA, 25 bp, SARS Virus
atttgagtgcaattgttataacgtc

SEQ ID NO: 133503 - DNA, 25 bp, SARS Virus
tttgagtgcaattgttataacgtcg

SEQ ID NO: 133504 - DNA, 25 bp, SARS Virus
ttgagtgcaatttttataacgtcgt

SEQ ID NO: 133505 - DNA, 25 bp, SARS Virus
tgagtgcaattgttataacgtcgtc

SEQ ID NO: 133506 - DNA, 25 bp, SARS Virus
gagtgcaattgttataacgtcgtca

SEQ ID NO: 133507 - DNA, 25 bp, SARS Virus
agtgcaattgttttaacgtcgtcat

SEQ ID NO: 133508 - DNA, 25 bp, SARS Virus
gtgcaattgttataacgtcgtcatg

SEQ ID NO: 133509 - DNA, 25 bp, SARS Virus
tgcaattgttattacgtcgtcatgc

SEQ ID NO: 133510 - DNA, 25 bp, SARS Virus
gcaattgttatatcgtcgtcatgcg

SEQ ID NO: 133511 - DNA, 25 bp, SARS Virus
caattgttataatgtcgtcatgcgt

SEQ ID NO: 133512 - DNA, 25 bp, SARS Virus
aattgttataacttcgtcatgcgtg

SEQ ID NO: 133513 - DNA, 25 bp, SARS Virus
attgttataacgtcgtcatgcgtgt

SEQ ID NO: 133514 - DNA, 25 bp, SARS Virus
ttgttataacgttgtcatgcgtgtg

SEQ ID NO: 133515 - DNA, 25 bp, SARS Virus
tgttataacgtcttcatgcgtgtgt

SEQ ID NO: 133516 - DNA, 25 bp, SARS Virus
gttataacgtcgtcatgcgtgtgtt

SEQ ID NO: 133517 - DNA, 25 bp, SARS Virus
ttataacgtcgttatgcgtgtgtta

SEQ ID NO: 133518 - DNA, 25 bp, SARS Virus
tataacgtcgtcttgcgtgtgttag

SEQ ID NO: 133519 - DNA, 25 bp, SARS Virus
ataacgtcgtcatgcgtgtgttagc

SEQ ID NO: 133520 - DNA, 25 bp, SARS Virus
taacgtcgtcattcgtgtgttagct

SEQ ID NO: 133521 - DNA, 25 bp, SARS Virus
aacgtcgtcatgtgtgtgttagctt

SEQ ID NO: 133522 - DNA, 25 bp, SARS Virus
acgtcgtcatgcttgtgttagcttc

SEQ ID NO: 133523 - DNA, 25 bp, SARS Virus
cgtcgtcatgcgtgtgttagcttcg

SEQ ID NO: 133524 - DNA, 25 bp, SARS Virus
gtcgtcatgcgtttgttagcttcgc

SEQ ID NO: 133525 - DNA, 25 bp, SARS Virus
tcgtcatgcgtgtgttagcttcgcg

SEQ ID NO: 133526 - DNA, 25 bp, SARS Virus
cgtcatgcgtgttttagcttcgcgt

SEQ ID NO: 133527 - DNA, 25 bp, SARS Virus
gtcatgcgtgtgttagcttcgcgtc

SEQ ID NO: 133528 - DNA, 25 bp, SARS Virus
tcatgcgtgtgttagcttcgcgtca

SEQ ID NO: 133529 - DNA, 25 bp, SARS Virus
catgcgtgtgtttgcttcgcgtcat

SEQ ID NO: 133530 - DNA, 25 bp, SARS Virus
atgcgtgtgttatcttcgcgtcatt

SEQ ID NO: 133531 - DNA, 25 bp, SARS Virus
tgcgtgtgttagtttcgcgtcattc

SEQ ID NO: 133532 - DNA, 25 bp, SARS Virus
gcgtgtgttagcttcgcgtcattcc

SEQ ID NO: 133533 - DNA, 25 bp, SARS Virus
cgtgtgttagcttcgcgtcattcct

SEQ ID NO: 133534 - DNA, 25 bp, SARS Virus
gtgtgttagctttgcgtcattccta

SEQ ID NO: 133535 - DNA, 25 bp, SARS Virus
tgtgttagcttctcgtcattcctac

SEQ ID NO: 133536 - DNA, 25 bp, SARS Virus
gtgttagcttcgtgtcattcctacc

SEQ ID NO: 133537 - DNA, 25 bp, SARS Virus
tgttagcttcgcttcattcctaccg

SEQ ID NO: 133538 - DNA, 25 bp, SARS Virus
gttagcttcgcgtcattcctaccga

SEQ ID NO: 133539 - DNA, 25 bp, SARS Virus
ttagcttcgcgttattcctaccgat

SEQ ID NO: 133540 - DNA, 25 bp, SARS Virus
tagcttcgcgtctttcctaccgatc

SEQ ID NO: 133541 - DNA, 25 bp, SARS Virus
agcttcgcgtcattcctaccgatca

SEQ ID NO: 133542 - DNA, 25 bp, SARS Virus
gcttcgcgtcattcctaccgatcac

SEQ ID NO: 133543 - DNA, 25 bp, SARS Virus
cttcgcgtcatttctaccgatcaca

SEQ ID NO: 133544 - DNA, 25 bp, SARS Virus
ttcgcgtcattcttaccgatcacac

SEQ ID NO: 133545 - DNA, 25 bp, SARS Virus
tcgcgtcattcctaccgatcacact

SEQ ID NO: 133546 - DNA, 25 bp, SARS Virus
cgcgtcattccttccgatcacactg

SEQ ID NO: 133547 - DNA, 25 bp, SARS Virus
gcgtcattcctatcgatcacactga

SEQ ID NO: 133548 - DNA, 25 bp, SARS Virus
cgtcattcctactgatcacactgat

SEQ ID NO: 133549 - DNA, 25 bp, SARS Virus
gtcattcctacctatcacactgatc

SEQ ID NO: 133550 - DNA, 25 bp, SARS Virus
tcattcctaccgttcacactgatcg

SEQ ID NO: 133551 - DNA, 25 bp, SARS Virus
cattcctaccgatcacactgatcgt

SEQ ID NO: 133552 - DNA, 25 bp, SARS Virus
attcctaccgattacactgatcgtt

SEQ ID NO: 133553 - DNA, 25 bp, SARS Virus
ttcctaccgatctcactgatcgttc

SEQ ID NO: 133554 - DNA, 25 bp, SARS Virus
tcctaccgatcatactgatcgttct

SEQ ID NO: 133555 - DNA, 25 bp, SARS Virus
cctaccgatcactctgatcgttctt

SEQ ID NO: 133556 - DNA, 25 bp, SARS Virus
ctaccgatcacattgatcgttctta

SEQ ID NO: 133557 - DNA, 25 bp, SARS Virus
taccgatcacactgatcgttcttat

SEQ ID NO: 133558 - DNA, 25 bp, SARS Virus
accgatcacacttatcgttcttatg

SEQ ID NO: 133559 - DNA, 25 bp, SARS Virus
ccgatcacactgttcgttcttatgg

SEQ ID NO: 133560 - DNA, 25 bp, SARS Virus
cgatcacactgatcgttcttatggt

SEQ ID NO: 133561 - DNA, 25 bp, SARS Virus
gatcacactgattgttcttatggtg

SEQ ID NO: 133562 - DNA, 25 bp, SARS Virus
atcacactgatctttcttatggtgc

SEQ ID NO: 133563 - DNA, 25 bp, SARS Virus
tcacactgatcgttcttatggtgct

SEQ ID NO: 133564 - DNA, 25 bp, SARS Virus
cacactgatcgttcttatggtgctt

SEQ ID NO: 133565 - DNA, 25 bp, SARS Virus
acactgatcgtttttatggtgcttt

SEQ ID NO: 133566 - DNA, 25 bp, SARS Virus
cactgatcgttcttatggtgctttc

SEQ ID NO: 133567 - DNA, 25 bp, SARS Virus
actgatcgttcttatggtgctttcg

SEQ ID NO: 133568 - DNA, 25 bp, SARS Virus
ctgatcgttcttttggtgctttcgt

SEQ ID NO: 133569 - DNA, 25 bp, SARS Virus
tgatcgttcttatggtgctttcgtt

SEQ ID NO: 133570 - DNA, 25 bp, SARS Virus
gatcgttcttattgtgctttcgttc

SEQ ID NO: 133571 - DNA, 25 bp, SARS Virus
atcgttcttatgttgctttcgttct

SEQ ID NO: 133572 - DNA, 25 bp, SARS Virus
tcgttcttatggtgctttcgttctt

SEQ ID NO: 133573 - DNA, 25 bp, SARS Virus
cgttcttatggttctttcgttcttt

SEQ ID NO: 133574 - DNA, 25 bp, SARS Virus
gttcttatggtgttttcgttctttt

SEQ ID NO: 133575 - DNA, 25 bp, SARS Virus
ttcttatggtgctttcgttcttttt

SEQ ID NO: 133576 - DNA, 25 bp, SARS Virus
tcttatggtgctttcgttctttttc

SEQ ID NO: 133577 - DNA, 25 bp, SARS Virus
cttatggtgctttcgttctttttct

SEQ ID NO: 133578 - DNA, 25 bp, SARS Virus
ttatggtgcttttgttctttttctt

SEQ ID NO: 133579 - DNA, 25 bp, SARS Virus
tatggtgctttctttctttttcttc

SEQ ID NO: 133580 - DNA, 25 bp, SARS Virus
atggtgctttcgttctttttcttca

SEQ ID NO: 133581 - DNA, 25 bp, SARS Virus
tggtgctttcgttctttttcttcat

SEQ ID NO: 133582 - DNA, 25 bp, SARS Virus
ggtgctttcgttttttttcttcatg

SEQ ID NO: 133583 - DNA, 25 bp, SARS Virus
gtgctttcgttctttttcttcatgc

SEQ ID NO: 133584 - DNA, 25 bp, SARS Virus
tgctttcgttctttttcttcatgcg

SEQ ID NO: 133585 - DNA, 25 bp, SARS Virus
gctttcgttctttttcttcatgcga

SEQ ID NO: 133586 - DNA, 25 bp, SARS Virus
ctttcgttctttttcttcatgcgat

SEQ ID NO: 133587 - DNA, 25 bp, SARS Virus
tttcgttctttttcttcatgcgata

SEQ ID NO: 133588 - DNA, 25 bp, SARS Virus
ttcgttcttttttttcatgcgataa

SEQ ID NO: 133589 - DNA, 25 bp, SARS Virus
tcgttctttttcttcatgcgataat

SEQ ID NO: 133590 - DNA, 25 bp, SARS Virus
cgttctttttcttcatgcgataatt

SEQ ID NO: 133591 - DNA, 25 bp, SARS Virus
gttctttttctttatgcgataattg

SEQ ID NO: 133592 - DNA, 25 bp, SARS Virus
ttctttttcttcttgcgataattga

SEQ ID NO: 133593 - DNA, 25 bp, SARS Virus
tctttttcttcatgcgataattgat

SEQ ID NO: 133594 - DNA, 25 bp, SARS Virus
ctttttcttcattcgataattgata

SEQ ID NO: 133595 - DNA, 25 bp, SARS Virus
tttttcttcatgtgataattgataa

SEQ ID NO: 133596 - DNA, 25 bp, SARS Virus
ttttcttcatgctataattgataat

SEQ ID NO: 133597 - DNA, 25 bp, SARS Virus
tttcttcatgcgttaattgataatt

SEQ ID NO: 133598 - DNA, 25 bp, SARS Virus
ttcttcatgcgataattgataattg

SEQ ID NO: 133599 - DNA, 25 bp, SARS Virus
tcttcatgcgattattgataattgc

SEQ ID NO: 133600 - DNA, 25 bp, SARS Virus
cttcatgcgatatttgataattgca

SEQ ID NO: 133601 - DNA, 25 bp, SARS Virus
ttcatgcgataattgataattgcat

SEQ ID NO: 133602 - DNA, 25 bp, SARS Virus
tcatgcgataattgataattgcatg

SEQ ID NO: 133603 - DNA, 25 bp, SARS Virus
catgcgataatttataattgcatgg

SEQ ID NO: 133604 - DNA, 25 bp, SARS Virus
atgcgataattgttaattgcatgga

SEQ ID NO: 133605 - DNA, 25 bp, SARS Virus
tgcgataattgataattgcatggac

SEQ ID NO: 133606 - DNA, 25 bp, SARS Virus
gcgataattgattattgcatggaca

SEQ ID NO: 133607 - DNA, 25 bp, SARS Virus
cgataattgatatttgcatggacaa

SEQ ID NO: 133608 - DNA, 25 bp, SARS Virus
gataattgataattgcatggacaaa

SEQ ID NO: 133609 - DNA, 25 bp, SARS Virus
ataattgataattgcatggacaaag

SEQ ID NO: 133610 - DNA, 25 bp, SARS Virus
taattgataatttcatggacaaaga

SEQ ID NO: 133611 - DNA, 25 bp, SARS Virus
aattgataattgtatggacaaagaa

SEQ ID NO: 133612 - DNA, 25 bp, SARS Virus
attgataattgcttggacaaagaag

SEQ ID NO: 133613 - DNA, 25 bp, SARS Virus
ttgataattgcatggacaaagaagg

SEQ ID NO: 133614 - DNA, 25 bp, SARS Virus
tgataattgcattgacaaagaaggc

SEQ ID NO: 133615 - DNA, 25 bp, SARS Virus
gataattgcatgtacaaagaaggct

SEQ ID NO: 133616 - DNA, 25 bp, SARS Virus
ataattgcatggtcaaagaaggctt

SEQ ID NO: 133617 - DNA, 25 bp, SARS Virus
taattgcatggataaagaaggcttt

SEQ ID NO: 133618 - DNA, 25 bp, SARS Virus
aattgcatggactaagaaggctttg

SEQ ID NO: 133619 - DNA, 25 bp, SARS Virus
attgcatggacatagaaggctttgc

SEQ ID NO: 133620 - DNA, 25 bp, SARS Virus
ttgcatggacaatgaaggctttgct

SEQ ID NO: 133621 - DNA, 25 bp, SARS Virus
tgcatggacaaataaggctttgctt

SEQ ID NO: 133622 - DNA, 25 bp, SARS Virus
gcatggacaaagtaggctttgctta

SEQ ID NO: 133623 - DNA, 25 bp, SARS Virus
catggacaaagatggctttgcttac

SEQ ID NO: 133624 - DNA, 25 bp, SARS Virus
atggacaaagaatgctttgcttact

SEQ ID NO: 133625 - DNA, 25 bp, SARS Virus
tggacaaagaagtctttgcttactc

SEQ ID NO: 133626 - DNA, 25 bp, SARS Virus
ggacaaagaaggttttgcttactca

SEQ ID NO: 133627 - DNA, 25 bp, SARS Virus
gacaaagaaggctttgcttactcat

SEQ ID NO: 133628 - DNA, 25 bp, SARS Virus
acaaagaaggctttgcttactcatg

SEQ ID NO: 133629 - DNA, 25 bp, SARS Virus
caaagaaggctttgcttactcatgt

SEQ ID NO: 133630 - DNA, 25 bp, SARS Virus
aaagaaggcttttcttactcatgta

SEQ ID NO: 133631 - DNA, 25 bp, SARS Virus
aagaaggctttgtttactcatgtat

SEQ ID NO: 133632 - DNA, 25 bp, SARS Virus
agaaggctttgcttactcatgtatt

SEQ ID NO: 133633 - DNA, 25 bp, SARS Virus
gaaggctttgcttactcatgtattc

SEQ ID NO: 133634 - DNA, 25 bp, SARS Virus
aaggctttgctttctcatgtattca

SEQ ID NO: 133635 - DNA, 25 bp, SARS Virus
aggctttgcttattcatgtattcaa

SEQ ID NO: 133636 - DNA, 25 bp, SARS Virus
ggctttgcttactcatgtattcaag

SEQ ID NO: 133637 - DNA, 25 bp, SARS Virus
gctttgcttacttatgtattcaagc

SEQ ID NO: 133638 - DNA, 25 bp, SARS Virus
ctttgcttactcttgtattcaagca

SEQ ID NO: 133639 - DNA, 25 bp, SARS Virus
tttgcttactcatgtattcaagcat

SEQ ID NO: 133640 - DNA, 25 bp, SARS Virus
ttgcttactcatttattcaagcatg

SEQ ID NO: 133641 - DNA, 25 bp, SARS Virus
tgcttactcatgtattcaagcatga

SEQ ID NO: 133642 - DNA, 25 bp, SARS Virus
gcttactcatgttttcaagcatgag

SEQ ID NO: 133643 - DNA, 25 bp, SARS Virus
cttactcatgtattcaagcatgagt

SEQ ID NO: 133644 - DNA, 25 bp, SARS Virus
ttactcatgtattcaagcatgagtg

SEQ ID NO: 133645 - DNA, 25 bp, SARS Virus
tactcatgtatttaagcatgagtga

SEQ ID NO: 133646 - DNA, 25 bp, SARS Virus
actcatgtattctagcatgagtgaa

SEQ ID NO: 133647 - DNA, 25 bp, SARS Virus
ctcatgtattcatgcatgagtgaaa

SEQ ID NO: 133648 - DNA, 25 bp, SARS Virus
tcatgtattcaatcatgagtgaaag

SEQ ID NO: 133649 - DNA, 25 bp, SARS Virus
catgtattcaagtatgagtgaaaga

SEQ ID NO: 133650 - DNA, 25 bp, SARS Virus
atgtattcaagcttgagtgaaagaa

SEQ ID NO: 133651 - DNA, 25 bp, SARS Virus
tgtattcaagcatgagtgaaagaac

SEQ ID NO: 133652 - DNA, 25 bp, SARS Virus
gtattcaagcattagtgaaagaaca

SEQ ID NO: 133653 - DNA, 25 bp, SARS Virus
tattcaagcatgtgtgaaagaacac

SEQ ID NO: 133654 - DNA, 25 bp, SARS Virus
attcaagcatgattgaaagaacacg

SEQ ID NO: 133655 - DNA, 25 bp, SARS Virus
ttcaagcatgagtgaaagaacacga

SEQ ID NO: 133656 - DNA, 25 bp, SARS Virus
tcaagcatgagttaaagaacacgaa

SEQ ID NO: 133657 - DNA, 25 bp, SARS Virus
caagcatgagtgtaagaacacgaat

SEQ ID NO: 133658 - DNA, 25 bp, SARS Virus
aagcatgagtgatagaacacgaatg

SEQ ID NO: 133659 - DNA, 25 bp, SARS Virus
agcatgagtgaatgaacacgaatgt

SEQ ID NO: 133660 - DNA, 25 bp, SARS Virus
gcatgagtgaaataacacgaatgtt

SEQ ID NO: 133661 - DNA, 25 bp, SARS Virus
catgagtgaaagtacacgaatgttt

SEQ ID NO: 133662 - DNA, 25 bp, SARS Virus
atgagtgaaagatcacgaatgtttc

SEQ ID NO: 133663 - DNA, 25 bp, SARS Virus
tgagtgaaagaatacgaatgtttcc

SEQ ID NO: 133664 - DNA, 25 bp, SARS Virus
gagtgaaagaactcgaatgtttccg

SEQ ID NO: 133665 - DNA, 25 bp, SARS Virus
agtgaaagaacatgaatgtttccgt

SEQ ID NO: 133666 - DNA, 25 bp, SARS Virus
gtgaaagaacactaatgtttccgtg

SEQ ID NO: 133667 - DNA, 25 bp, SARS Virus
tgaaagaacacgtatgtttccgtgc

SEQ ID NO: 133668 - DNA, 25 bp, SARS Virus
gaaagaacacgattgtttccgtgcg

SEQ ID NO: 133669 - DNA, 25 bp, SARS Virus
aaagaacacgaatgtttccgtgcga

SEQ ID NO: 133670 - DNA, 25 bp, SARS Virus
aagaacacgaatttttccgtgcgat

SEQ ID NO: 133671 - DNA, 25 bp, SARS Virus
agaacacgaatgtttccgtgcgatc

SEQ ID NO: 133672 - DNA, 25 bp, SARS Virus
gaacacgaatgtttccgtgcgatca

SEQ ID NO: 133673 - DNA, 25 bp, SARS Virus
aacacgaatgtttccgtgcgatcat

SEQ ID NO: 133674 - DNA, 25 bp, SARS Virus
acacgaatgttttcgtgcgatcatc

SEQ ID NO: 133675 - DNA, 25 bp, SARS Virus
cacgaatgtttctgtgcgatcatca

SEQ ID NO: 133676 - DNA, 25 bp, SARS Virus
acgaatgtttccttgcgatcatcag

SEQ ID NO: 133677 - DNA, 25 bp, SARS Virus
cgaatgtttccgtgcgatcatcagc

SEQ ID NO: 133678 - DNA, 25 bp, SARS Virus
gaatgtttccgttcgatcatcagca

SEQ ID NO: 133679 - DNA, 25 bp, SARS Virus
aatgtttccgtgtgatcatcagcag

SEQ ID NO: 133680 - DNA, 25 bp, SARS Virus
atgtttccgtgctatcatcagcagc

SEQ ID NO: 133681 - DNA, 25 bp, SARS Virus
tgtttccgtgcgttcatcagcagca

SEQ ID NO: 133682 - DNA, 25 bp, SARS Virus
gtttccgtgcgatcatcagcagcag

SEQ ID NO: 133683 - DNA, 25 bp, SARS Virus
tttccgtgcgattatcagcagcagc

SEQ ID NO: 133684 - DNA, 25 bp, SARS Virus
ttccgtgcgatcttcagcagcagcc

SEQ ID NO: 133685 - DNA, 25 bp, SARS Virus
tccgtgcgatcatcagcagcagccg

SEQ ID NO: 133686 - DNA, 25 bp, SARS Virus
ccgtgcgatcattagcagcagccga

SEQ ID NO: 133687 - DNA, 25 bp, SARS Virus
cgtgcgatcatctgcagcagccgag

SEQ ID NO: 133688 - DNA, 25 bp, SARS Virus
gtgcgatcatcatcagcagccgagt

SEQ ID NO: 133689 - DNA, 25 bp, SARS Virus
tgcgatcatcagtagcagccgagta

SEQ ID NO: 133690 - DNA, 25 bp, SARS Virus
gcgatcatcagctgcagccgagtag

SEQ ID NO: 133691 - DNA, 25 bp, SARS Virus
cgatcatcagcatcagccgagtagt

SEQ ID NO: 133692 - DNA, 25 bp, SARS Virus
gatcatcagcagtagccgagtagta

SEQ ID NO: 133693 - DNA, 25 bp, SARS Virus
atcatcagcagctgccgagtagtat

SEQ ID NO: 133694 - DNA, 25 bp, SARS Virus
tcatcagcagcatccgagtagtatt

SEQ ID NO: 133695 - DNA, 25 bp, SARS Virus
catcagcagcagtcgagtagtattt

SEQ ID NO: 133696 - DNA, 25 bp, SARS Virus
atcagcagcagctgagtagtattta

SEQ ID NO: 133697 - DNA, 25 bp, SARS Virus
tcagcagcagcctagtagtatttaa

SEQ ID NO: 133698 - DNA, 25 bp, SARS Virus
cagcagcagccgtgtagtatttaac

SEQ ID NO: 133699 - DNA, 25 bp, SARS Virus
agcagcagccgattagtatttaacc

SEQ ID NO: 133700 - DNA, 25 bp, SARS Virus
gcagcagccgagtagtatttaacct

SEQ ID NO: 133701 - DNA, 25 bp, SARS Virus
cagcagccgagttgtatttaaccta

SEQ ID NO: 133702 - DNA, 25 bp, SARS Virus
agcagccgagtattatttaacctag

SEQ ID NO: 133703 - DNA, 25 bp, SARS Virus
gcagccgagtagtatttaacctagg

SEQ ID NO: 133704 - DNA, 25 bp, SARS Virus
cagccgagtagtttttaacctaggt

SEQ ID NO: 133705 - DNA, 25 bp, SARS Virus
agccgagtagtatttaacctaggta

SEQ ID NO: 133706 - DNA, 25 bp, SARS Virus
gccgagtagtatttaacctaggtaa

SEQ ID NO: 133707 - DNA, 25 bp, SARS Virus
ccgagtagtatttaacctaggtaac

SEQ ID NO: 133708 - DNA, 25 bp, SARS Virus
cgagtagtattttacctaggtaacg

SEQ ID NO: 133709 - DNA, 25 bp, SARS Virus
gagtagtatttatcctaggtaacga

SEQ ID NO: 133710 - DNA, 25 bp, SARS Virus
agtagtatttaatctaggtaacgac

SEQ ID NO: 133711 - DNA, 25 bp, SARS Virus
gtagtatttaacttaggtaacgacc

SEQ ID NO: 133712 - DNA, 25 bp, SARS Virus
tagtatttaacctaggtaacgacct

SEQ ID NO: 133713 - DNA, 25 bp, SARS Virus
agtatttaaccttggtaacgaccta

SEQ ID NO: 133714 - DNA, 25 bp, SARS Virus
gtatttaacctatgtaacgacctaa

SEQ ID NO: 133715 - DNA, 25 bp, SARS Virus
tatttaacctagttaacgacctaat

SEQ ID NO: 133716 - DNA, 25 bp, SARS Virus
atttaacctaggtaacgacctaatc

SEQ ID NO: 133717 - DNA, 25 bp, SARS Virus
tttaacctaggttacgacctaatcg

SEQ ID NO: 133718 - DNA, 25 bp, SARS Virus
ttaacctaggtatcgacctaatcgt

SEQ ID NO: 133719 - DNA, 25 bp, SARS Virus
taacctaggtaatgacctaatcgtt

SEQ ID NO: 133720 - DNA, 25 bp, SARS Virus
aacctaggtaactacctaatcgttg

SEQ ID NO: 133721 - DNA, 25 bp, SARS Virus
acctaggtaacgtcctaatcgttga

SEQ ID NO: 133722 - DNA, 25 bp, SARS Virus
cctaggtaacgatctaatcgttgag

SEQ ID NO: 133723 - DNA, 25 bp, SARS Virus
ctaggtaacgacttaatcgttgagg

SEQ ID NO: 133724 - DNA, 25 bp, SARS Virus
taggtaacgacctaatcgttgagga

SEQ ID NO: 133725 - DNA, 25 bp, SARS Virus
aggtaacgaccttatcgttgaggac

SEQ ID NO: 133726 - DNA, 25 bp, SARS Virus
ggtaacgacctattcgttgaggact

SEQ ID NO: 133727 - DNA, 25 bp, SARS Virus
gtaacgacctaatcgttgaggactt

SEQ ID NO: 133728 - DNA, 25 bp, SARS Virus
taacgacctaattgttgaggacttc

SEQ ID NO: 133729 - DNA, 25 bp, SARS Virus
aacgacctaatctttgaggacttct

SEQ ID NO: 133730 - DNA, 25 bp, SARS Virus
acgacctaatcgttgaggacttctc

SEQ ID NO: 133731 - DNA, 25 bp, SARS Virus
cgacctaatcgttgaggacttctcg

SEQ ID NO: 133732 - DNA, 25 bp, SARS Virus
gacctaatcgtttaggacttctcgg

SEQ ID NO: 133733 - DNA, 25 bp, SARS Virus
acctaatcgttgtggacttctcggc

SEQ ID NO: 133734 - DNA, 25 bp, SARS Virus
cctaatcgttgatgacttctcggca

SEQ ID NO: 133735 - DNA, 25 bp, SARS Virus
ctaatcgttgagtacttctcggcag

SEQ ID NO: 133736 - DNA, 25 bp, SARS Virus
taatcgttgaggtcttctcggcagc

SEQ ID NO: 133737 - DNA, 25 bp, SARS Virus
aatcgttgaggatttctcggcagct

SEQ ID NO: 133738 - DNA, 25 bp, SARS Virus
atcgttgaggacttctcggcagcta

SEQ ID NO: 133739 - DNA, 25 bp, SARS Virus
tcgttgaggacttctcggcagctaa

SEQ ID NO: 133740 - DNA, 25 bp, SARS Virus
cgttgaggacttttcggcagctaac

SEQ ID NO: 133741 - DNA, 25 bp, SARS Virus
gttgaggacttctcggcagctaaca

SEQ ID NO: 133742 - DNA, 25 bp, SARS Virus
ttgaggacttcttggcagctaacac

SEQ ID NO: 133743 - DNA, 25 bp, SARS Virus
tgaggacttctctgcagctaacaca

SEQ ID NO: 133744 - DNA, 25 bp, SARS Virus
gaggacttctcgtcagctaacacac

SEQ ID NO: 133745 - DNA, 25 bp, SARS Virus
aggacttctcggaagctaacacaca

SEQ ID NO: 133746 - DNA, 25 bp, SARS Virus
ggacttctcggcagctaacacacat

SEQ ID NO: 133747 - DNA, 25 bp, SARS Virus
gacttctcggcaactaacacacata

SEQ ID NO: 133748 - DNA, 25 bp, SARS Virus
acttctcggcagataacacacataa

SEQ ID NO: 133749 - DNA, 25 bp, SARS Virus
cttctcggcagcaaacacacataaa

SEQ ID NO: 133750 - DNA, 25 bp, SARS Virus
ttctcggcagctaacacacataaac

SEQ ID NO: 133751 - DNA, 25 bp, SARS Virus
tctcggcagctaacacacataaacg

SEQ ID NO: 133752 - DNA, 25 bp, SARS Virus
ctcggcagctaaaacacataaacgt

SEQ ID NO: 133753 - DNA, 25 bp, SARS Virus
tcggcagctaacacacataaacgtg

SEQ ID NO: 133754 - DNA, 25 bp, SARS Virus
cggcagctaacaaacataaacgtgt

SEQ ID NO: 133755 - DNA, 25 bp, SARS Virus
ggcagctaacacacataaacgtgta

SEQ ID NO: 133756 - DNA, 25 bp, SARS Virus
gcagctaacacaaataaacgtgtaa

SEQ ID NO: 133757 - DNA, 25 bp, SARS Virus
cagctaacacacataaacgtgtaag

SEQ ID NO: 133758 - DNA, 25 bp, SARS Virus
agctaacacacaaaaacgtgtaagc

SEQ ID NO: 133759 - DNA, 25 bp, SARS Virus
gctaacacacataaacgtgtaagcc

SEQ ID NO: 133760 - DNA, 25 bp, SARS Virus
ctaacacacataaacgtgtaagcca

SEQ ID NO: 133761 - DNA, 25 bp, SARS Virus
taacacacataaacgtgtaagccac

SEQ ID NO: 133762 - DNA, 25 bp, SARS Virus
aacacacataaaagtgtaagccacc

SEQ ID NO: 133763 - DNA, 25 bp, SARS Virus
acacacataaacatgtaagccaccc

SEQ ID NO: 133764 - DNA, 25 bp, SARS Virus
cacacataaacgagtaagccaccca

SEQ ID NO: 133765 - DNA, 25 bp, SARS Virus
acacataaacgtataagccacccag

SEQ ID NO: 133766 - DNA, 25 bp, SARS Virus
cacataaacgtgaaagccacccaga

SEQ ID NO: 133767 - DNA, 25 bp, SARS Virus
acataaacgtgtaagccacccagaa

SEQ ID NO: 133768 - DNA, 25 bp, SARS Virus
cataaacgtgtaagccacccagaaa

SEQ ID NO: 133769 - DNA, 25 bp, SARS Virus
ataaacgtgtaaaccacccagaaat

SEQ ID NO: 133770 - DNA, 25 bp, SARS Virus
taaacgtgtaagacacccagaaatt

SEQ ID NO: 133771 - DNA, 25 bp, SARS Virus
aaacgtgtaagcaacccagaaattg

SEQ ID NO: 133772 - DNA, 25 bp, SARS Virus
aacgtgtaagccacccagaaattgt

SEQ ID NO: 133773 - DNA, 25 bp, SARS Virus
acgtgtaagccaaccagaaattgtt

SEQ ID NO: 133774 - DNA, 25 bp, SARS Virus
cgtgtaagccacacagaaattgttc

SEQ ID NO: 133775 - DNA, 25 bp, SARS Virus
gtgtaagccaccaagaaattgttcg

SEQ ID NO: 133776 - DNA, 25 bp, SARS Virus
tgtaagccacccagaaattgttcga

SEQ ID NO: 133777 - DNA, 25 bp, SARS Virus
gtaagccacccaaaaattgttcgaa

SEQ ID NO: 133778 - DNA, 25 bp, SARS Virus
taagccacccagaaattgttcgaac

SEQ ID NO: 133779 - DNA, 25 bp, SARS Virus
aagccacccagaaattgttcgaaca

SEQ ID NO: 133780 - DNA, 25 bp, SARS Virus
agccacccagaaattgttcgaacaa

SEQ ID NO: 133781 - DNA, 25 bp, SARS Virus
gccacccagaaaatgttcgaacaat

SEQ ID NO: 133782 - DNA, 25 bp, SARS Virus
ccacccagaaatagttcgaacaatt

SEQ ID NO: 133783 - DNA, 25 bp, SARS Virus
cacccagaaattattcgaacaattt

SEQ ID NO: 133784 - DNA, 25 bp, SARS Virus
acccagaaattgatcgaacaatttc

SEQ ID NO: 133785 - DNA, 25 bp, SARS Virus
cccagaaattgtacgaacaatttct

SEQ ID NO: 133786 - DNA, 25 bp, SARS Virus
ccagaaattgttagaacaatttcta

SEQ ID NO: 133787 - DNA, 25 bp, SARS Virus
cagaaattgttcaaacaatttctac

SEQ ID NO: 133788 - DNA, 25 bp, SARS Virus
agaaattgttcgaacaatttctact

SEQ ID NO: 133789 - DNA, 25 bp, SARS Virus
gaaattgttcgaacaatttctactt

SEQ ID NO: 133790 - DNA, 25 bp, SARS Virus
aaattgttcgaaaaatttctacttc

SEQ ID NO: 133791 - DNA, 25 bp, SARS Virus
aattgttcgaacaatttctacttct

SEQ ID NO: 133792 - DNA, 25 bp, SARS Virus
attgttcgaacaatttctacttctt

SEQ ID NO: 133793 - DNA, 25 bp, SARS Virus
ttgttcgaacaaattctacttctta

SEQ ID NO: 133794 - DNA, 25 bp, SARS Virus
tgttcgaacaatatctacttcttac

SEQ ID NO: 133795 - DNA, 25 bp, SARS Virus
gttcgaacaattactacttcttaca

SEQ ID NO: 133796 - DNA, 25 bp, SARS Virus
ttcgaacaatttatacttcttacat

SEQ ID NO: 133797 - DNA, 25 bp, SARS Virus
tcgaacaatttcaacttcttacatc

SEQ ID NO: 133798 - DNA, 25 bp, SARS Virus
cgaacaatttctacttcttacatcg

SEQ ID NO: 133799 - DNA, 25 bp, SARS Virus
gaacaatttctaattcttacatcgt

SEQ ID NO: 133800 - DNA, 25 bp, SARS Virus
aacaatttctacatcttacatcgta

SEQ ID NO: 133801 - DNA, 25 bp, SARS Virus
acaatttctactacttacatcgtaa

SEQ ID NO: 133802 - DNA, 25 bp, SARS Virus
caatttctacttattacatcgtaaa

SEQ ID NO: 133803 - DNA, 25 bp, SARS Virus
aatttctacttcatacatcgtaaaa

SEQ ID NO: 133804 - DNA, 25 bp, SARS Virus
atttctacttctaacatcgtaaaag

SEQ ID NO: 133805 - DNA, 25 bp, SARS Virus
tttctacttcttacatcgtaaaagt

SEQ ID NO: 133806 - DNA, 25 bp, SARS Virus
ttctacttcttaaatcgtaaaagtt

SEQ ID NO: 133807 - DNA, 25 bp, SARS Virus
tctacttcttacatcgtaaaagtta

SEQ ID NO: 133808 - DNA, 25 bp, SARS Virus
ctacttcttacaacgtaaaagttat

SEQ ID NO: 133809 - DNA, 25 bp, SARS Virus
tacttcttacatagtaaaagttatg

SEQ ID NO: 133810 - DNA, 25 bp, SARS Virus
acttcttacatcataaaagttatgg

SEQ ID NO: 133811 - DNA, 25 bp, SARS Virus
cttcttacatcgaaaaagttatggt

SEQ ID NO: 133812 - DNA, 25 bp, SARS Virus
ttcttacatcgtaaaagttatggtc

SEQ ID NO: 133813 - DNA, 25 bp, SARS Virus
tcttacatcgtaaaagttatggtca

SEQ ID NO: 133814 - DNA, 25 bp, SARS Virus
cttacatcgtaaaagttatggtcac

SEQ ID NO: 133815 - DNA, 25 bp, SARS Virus
ttacatcgtaaaagttatggtcaca

SEQ ID NO: 133816 - DNA, 25 bp, SARS Virus
tacatcgtaaaaattatggtcacag

SEQ ID NO: 133817 - DNA, 25 bp, SARS Virus
acatcgtaaaagatatggtcacaga

SEQ ID NO: 133818 - DNA, 25 bp, SARS Virus
catcgtaaaagtaatggtcacagac

SEQ ID NO: 133819 - DNA, 25 bp, SARS Virus
atcgtaaaagttatggtcacagaca

SEQ ID NO: 133820 - DNA, 25 bp, SARS Virus
tcgtaaaagttaaggtcacagacat

SEQ ID NO: 133821 - DNA, 25 bp, SARS Virus
cgtaaaagttatagtcacagacatc

SEQ ID NO: 133822 - DNA, 25 bp, SARS Virus
gtaaaagttatgatcacagacatca

SEQ ID NO: 133823 - DNA, 25 bp, SARS Virus
taaaagttatggacacagacatcat

SEQ ID NO: 133824 - DNA, 25 bp, SARS Virus
aaaagttatggtaacagacatcatt

SEQ ID NO: 133825 - DNA, 25 bp, SARS Virus
aaagttatggtcacagacatcatta

SEQ ID NO: 133826 - DNA, 25 bp, SARS Virus
aagttatggtcaaagacatcattaa

SEQ ID NO: 133827 - DNA, 25 bp, SARS Virus
agttatggtcacagacatcattaaa

SEQ ID NO: 133828 - DNA, 25 bp, SARS Virus
gttatggtcacaaacatcattaaac

SEQ ID NO: 133829 - DNA, 25 bp, SARS Virus
ttatggtcacagacatcattaaaca

SEQ ID NO: 133830 - DNA, 25 bp, SARS Virus
tatggtcacagaaatcattaaacac

SEQ ID NO: 133831 - DNA, 25 bp, SARS Virus
atggtcacagacatcattaaacaca

SEQ ID NO: 133832 - DNA, 25 bp, SARS Virus
tggtcacagacaacattaaacacat

SEQ ID NO: 133833 - DNA, 25 bp, SARS Virus
ggtcacagacataattaaacacatc

SEQ ID NO: 133834 - DNA, 25 bp, SARS Virus
gtcacagacatcattaaacacatct

SEQ ID NO: 133835 - DNA, 25 bp, SARS Virus
tcacagacatcaataaacacatctg

SEQ ID NO: 133836 - DNA, 25 bp, SARS Virus
cacagacatcataaaacacatctga

SEQ ID NO: 133837 - DNA, 25 bp, SARS Virus
acagacatcattaaacacatctgag

SEQ ID NO: 133838 - DNA, 25 bp, SARS Virus
cagacatcattaaacacatctgagt

SEQ ID NO: 133839 - DNA, 25 bp, SARS Virus
agacatcattaaacacatctgagtt

SEQ ID NO: 133840 - DNA, 25 bp, SARS Virus
gacatcattaaaaacatctgagttc

SEQ ID NO: 133841 - DNA, 25 bp, SARS Virus
acatcattaaacacatctgagttcg

SEQ ID NO: 133842 - DNA, 25 bp, SARS Virus
catcattaaacaaatctgagttcga

SEQ ID NO: 133843 - DNA, 25 bp, SARS Virus
atcattaaacacatctgagttcgac

SEQ ID NO: 133844 - DNA, 25 bp, SARS Virus
tcattaaacacaactgagttcgacc

SEQ ID NO: 133845 - DNA, 25 bp, SARS Virus
cattaaacacatatgagttcgacca

SEQ ID NO: 133846 - DNA, 25 bp, SARS Virus
attaaacacatcagagttcgaccat

SEQ ID NO: 133847 - DNA, 25 bp, SARS Virus
ttaaacacatctaagttcgaccatc

SEQ ID NO: 133848 - DNA, 25 bp, SARS Virus
taaacacatctgagttcgaccatca

SEQ ID NO: 133849 - DNA, 25 bp, SARS Virus
aaacacatctgaattcgaccatcat

SEQ ID NO: 133850 - DNA, 25 bp, SARS Virus
aacacatctgagatcgaccatcatt

SEQ ID NO: 133851 - DNA, 25 bp, SARS Virus
acacatctgagtacgaccatcattt

SEQ ID NO: 133852 - DNA, 25 bp, SARS Virus
cacatctgagttagaccatcatttg

SEQ ID NO: 133853 - DNA, 25 bp, SARS Virus
acatctgagttcaaccatcatttga

SEQ ID NO: 133854 - DNA, 25 bp, SARS Virus
catctgagttcgaccatcatttgaa

SEQ ID NO: 133855 - DNA, 25 bp, SARS Virus
atctgagttcgaacatcatttgaag

SEQ ID NO: 133856 - DNA, 25 bp, SARS Virus
tctgagttcgacaatcatttgaagc

SEQ ID NO: 133857 - DNA, 25 bp, SARS Virus
ctgagttcgaccatcatttgaagcc

SEQ ID NO: 133858 - DNA, 25 bp, SARS Virus
tgagttcgaccaacatttgaagcca

SEQ ID NO: 133859 - DNA, 25 bp, SARS Virus
gagttcgaccataatttgaagccac

SEQ ID NO: 133860 - DNA, 25 bp, SARS Virus
agttcgaccatcatttgaagccact

SEQ ID NO: 133861 - DNA, 25 bp, SARS Virus
gttcgaccatcaattgaagccactt

SEQ ID NO: 133862 - DNA, 25 bp, SARS Virus
ttcgaccatcatatgaagccacttt

SEQ ID NO: 133863 - DNA, 25 bp, SARS Virus
tcgaccatcattagaagccacttta

SEQ ID NO: 133864 - DNA, 25 bp, SARS Virus
cgaccatcatttaaagccactttat

SEQ ID NO: 133865 - DNA, 25 bp, SARS Virus
gaccatcatttgaagccactttatc

SEQ ID NO: 133866 - DNA, 25 bp, SARS Virus
accatcatttgaagccactttatcg

SEQ ID NO: 133867 - DNA, 25 bp, SARS Virus
ccatcatttgaaaccactttatcgg

SEQ ID NO: 133868 - DNA, 25 bp, SARS Virus
catcatttgaagacactttatcggt

SEQ ID NO: 133869 - DNA, 25 bp, SARS Virus
atcatttgaagcaactttatcggta

SEQ ID NO: 133870 - DNA, 25 bp, SARS Virus
tcatttgaagccactttatcggtac

SEQ ID NO: 133871 - DNA, 25 bp, SARS Virus
catttgaagccaatttatcggtaca

SEQ ID NO: 133872 - DNA, 25 bp, SARS Virus
atttgaagccacattatcggtacat

SEQ ID NO: 133873 - DNA, 25 bp, SARS Virus
tttgaagccactatatcggtacatg

SEQ ID NO: 133874 - DNA, 25 bp, SARS Virus
ttgaagccacttaatcggtacatgt

SEQ ID NO: 133875 - DNA, 25 bp, SARS Virus
tgaagccactttatcggtacatgtt

SEQ ID NO: 133876 - DNA, 25 bp, SARS Virus
gaagccactttaacggtacatgttg

SEQ ID NO: 133877 - DNA, 25 bp, SARS Virus
aagccactttataggtacatgttgc

SEQ ID NO: 133878 - DNA, 25 bp, SARS Virus
agccactttatcagtacatgttgct

SEQ ID NO: 133879 - DNA, 25 bp, SARS Virus
gccactttatcgatacatgttgctg

SEQ ID NO: 133880 - DNA, 25 bp, SARS Virus
ccactttatcggaacatgttgctgt

SEQ ID NO: 133881 - DNA, 25 bp, SARS Virus
cactttatcggtacatgttgctgta

SEQ ID NO: 133882 - DNA, 25 bp, SARS Virus
actttatcggtaaatgttgctgtat

SEQ ID NO: 133883 - DNA, 25 bp, SARS Virus
ctttatcggtacatgttgctgtatc

SEQ ID NO: 133884 - DNA, 25 bp, SARS Virus
tttatcggtacaagttgctgtatca

SEQ ID NO: 133885 - DNA, 25 bp, SARS Virus
ttatcggtacatattgctgtatcag

SEQ ID NO: 133886 - DNA, 25 bp, SARS Virus
tatcggtacatgatgctgtatcaga

SEQ ID NO: 133887 - DNA, 25 bp, SARS Virus
atcggtacatgtagctgtatcagaa

SEQ ID NO: 133888 - DNA, 25 bp, SARS Virus
tcggtacatgttactgtatcagaaa

SEQ ID NO: 133889 - DNA, 25 bp, SARS Virus
cggtacatgttgatgtatcagaaat

SEQ ID NO: 133890 - DNA, 25 bp, SARS Virus
ggtacatgttgcagtatcagaaatt

SEQ ID NO: 133891 - DNA, 25 bp, SARS Virus
gtacatgttgctatatcagaaattg

SEQ ID NO: 133892 - DNA, 25 bp, SARS Virus
tacatgttgctgaatcagaaattgt

SEQ ID NO: 133893 - DNA, 25 bp, SARS Virus
acatgttgctgtatcagaaattgtg

SEQ ID NO: 133894 - DNA, 25 bp, SARS Virus
catgttgctgtaacagaaattgtgg

SEQ ID NO: 133895 - DNA, 25 bp, SARS Virus
atgttgctgtataagaaattgtgga

SEQ ID NO: 133896 - DNA, 25 bp, SARS Virus
tgttgctgtatcagaaattgtggac

SEQ ID NO: 133897 - DNA, 25 bp, SARS Virus
gttgctgtatcaaaaattgtggact

SEQ ID NO: 133898 - DNA, 25 bp, SARS Virus
ttgctgtatcagaaattgtggactc

SEQ ID NO: 133899 - DNA, 25 bp, SARS Virus
tgctgtatcagaaattgtggactca

SEQ ID NO: 133900 - DNA, 25 bp, SARS Virus
gctgtatcagaaattgtggactcac

SEQ ID NO: 133901 - DNA, 25 bp, SARS Virus
ctgtatcagaaaatgtggactcacg

SEQ ID NO: 133902 - DNA, 25 bp, SARS Virus
tgtatcagaaatagtggactcacgg

SEQ ID NO: 133903 - DNA, 25 bp, SARS Virus
gtatcagaaattatggactcacgga

SEQ ID NO: 133904 - DNA, 25 bp, SARS Virus
tatcagaaattgaggactcacggat

SEQ ID NO: 133905 - DNA, 25 bp, SARS Virus
atcagaaattgtagactcacggata

SEQ ID NO: 133906 - DNA, 25 bp, SARS Virus
tcagaaattgtgaactcacggatag

SEQ ID NO: 133907 - DNA, 25 bp, SARS Virus
cagaaattgtggactcacggatagg

SEQ ID NO: 133908 - DNA, 25 bp, SARS Virus
agaaattgtggaatcacggatagga

SEQ ID NO: 133909 - DNA, 25 bp, SARS Virus
gaaattgtggacacacggataggag

SEQ ID NO: 133910 - DNA, 25 bp, SARS Virus
aaattgtggactaacggataggagt

SEQ ID NO: 133911 - DNA, 25 bp, SARS Virus
aattgtggactcacggataggagtc

SEQ ID NO: 133912 - DNA, 25 bp, SARS Virus
attgtggactcaaggataggagtct

SEQ ID NO: 133913 - DNA, 25 bp, SARS Virus
ttgtggactcacagataggagtctt

SEQ ID NO: 133914 - DNA, 25 bp, SARS Virus
tgtggactcacgaataggagtctta

SEQ ID NO: 133915 - DNA, 25 bp, SARS Virus
gtggactcacggataggagtcttat

SEQ ID NO: 133916 - DNA, 25 bp, SARS Virus
tggactcacggaaaggagtcttatt

SEQ ID NO: 133917 - DNA, 25 bp, SARS Virus
ggactcacggataggagtcttattg

SEQ ID NO: 133918 - DNA, 25 bp, SARS Virus
gactcacggataagagtcttattgg

SEQ ID NO: 133919 - DNA, 25 bp, SARS Virus
actcacggatagaagtcttattggt

SEQ ID NO: 133920 - DNA, 25 bp, SARS Virus
ctcacggataggagtcttattggtg

SEQ ID NO: 133921 - DNA, 25 bp, SARS Virus
tcacggataggaatcttattggtgg

SEQ ID NO: 133922 - DNA, 25 bp, SARS Virus
cacggataggagacttattggtggt

SEQ ID NO: 133923 - DNA, 25 bp, SARS Virus
acggataggagtattattggtggtt

SEQ ID NO: 133924 - DNA, 25 bp, SARS Virus
cggataggagtcatattggtggtta

SEQ ID NO: 133925 - DNA, 25 bp, SARS Virus
ggataggagtctaattggtggttaa

SEQ ID NO: 133926 - DNA, 25 bp, SARS Virus
gataggagtcttattggtggttaaa

SEQ ID NO: 133927 - DNA, 25 bp, SARS Virus
ataggagtcttaatggtggttaaac

SEQ ID NO: 133928 - DNA, 25 bp, SARS Virus
taggagtcttataggtggttaaacc

SEQ ID NO: 133929 - DNA, 25 bp, SARS Virus
aggagtcttattagtggttaaacca

SEQ ID NO: 133930 - DNA, 25 bp, SARS Virus
ggagtcttattgatggttaaaccat

SEQ ID NO: 133931 - DNA, 25 bp, SARS Virus
gagtcttattggaggttaaaccatc

SEQ ID NO: 133932 - DNA, 25 bp, SARS Virus
agtcttattggtagttaaaccatca

SEQ ID NO: 133933 - DNA, 25 bp, SARS Virus
gtcttattggtgattaaaccatcag

SEQ ID NO: 133934 - DNA, 25 bp, SARS Virus
tcttattggtggataaaccatcaga

SEQ ID NO: 133935 - DNA, 25 bp, SARS Virus
cttattggtggtaaaaccatcagaa

SEQ ID NO: 133936 - DNA, 25 bp, SARS Virus
ttattggtggttaaaccatcagaag

SEQ ID NO: 133937 - DNA, 25 bp, SARS Virus
tattggtggttaaaccatcagaaga

SEQ ID NO: 133938 - DNA, 25 bp, SARS Virus
attggtggttaaaccatcagaagaa

SEQ ID NO: 133939 - DNA, 25 bp, SARS Virus
ttggtggttaaaacatcagaagaaa

SEQ ID NO: 133940 - DNA, 25 bp, SARS Virus
tggtggttaaacaatcagaagaaac

SEQ ID NO: 133941 - DNA, 25 bp, SARS Virus
ggtggttaaaccatcagaagaaact

SEQ ID NO: 133942 - DNA, 25 bp, SARS Virus
gtggttaaaccaacagaagaaactc

SEQ ID NO: 133943 - DNA, 25 bp, SARS Virus
tggttaaaccataagaagaaactca

SEQ ID NO: 133944 - DNA, 25 bp, SARS Virus
ggttaaaccatcagaagaaactcaa

SEQ ID NO: 133945 - DNA, 25 bp, SARS Virus
gttaaaccatcaaaagaaactcaaa

SEQ ID NO: 133946 - DNA, 25 bp, SARS Virus
ttaaaccatcagaagaaactcaaaa

SEQ ID NO: 133947 - DNA, 25 bp, SARS Virus
taaaccatcagaagaaactcaaaac

SEQ ID NO: 133948 - DNA, 25 bp, SARS Virus
aaaccatcagaaaaaactcaaaacc

SEQ ID NO: 133949 - DNA, 25 bp, SARS Virus
aaccatcagaagaaactcaaaacca

SEQ ID NO: 133950 - DNA, 25 bp, SARS Virus
accatcagaagaaactcaaaaccac

SEQ ID NO: 133951 - DNA, 25 bp, SARS Virus
ccatcagaagaaactcaaaaccaca

SEQ ID NO: 133952 - DNA, 25 bp, SARS Virus
catcagaagaaaatcaaaaccacaa

SEQ ID NO: 133953 - DNA, 25 bp, SARS Virus
atcagaagaaacacaaaaccacaac

SEQ ID NO: 133954 - DNA, 25 bp, SARS Virus
tcagaagaaactaaaaaccacaact

SEQ ID NO: 133955 - DNA, 25 bp, SARS Virus
cagaagaaactcaaaaccacaactt

SEQ ID NO: 133956 - DNA, 25 bp, SARS Virus
agaagaaactcaaaaccacaacttt

SEQ ID NO: 133957 - DNA, 25 bp, SARS Virus
gaagaaactcaaaaccacaacttta

SEQ ID NO: 133958 - DNA, 25 bp, SARS Virus
aagaaactcaaaaccacaactttac

SEQ ID NO: 133959 - DNA, 25 bp, SARS Virus
agaaactcaaaaacacaactttacg

SEQ ID NO: 133960 - DNA, 25 bp, SARS Virus
gaaactcaaaacaacaactttacgg

SEQ ID NO: 133961 - DNA, 25 bp, SARS Virus
aaactcaaaaccacaactttacggc

SEQ ID NO: 133962 - DNA, 25 bp, SARS Virus
aactcaaaaccaaaactttacggca

SEQ ID NO: 133963 - DNA, 25 bp, SARS Virus
actcaaaaccacaactttacggcag

SEQ ID NO: 133964 - DNA, 25 bp, SARS Virus
ctcaaaaccacaactttacggcagt

SEQ ID NO: 133965 - DNA, 25 bp, SARS Virus
tcaaaaccacaaatttacggcagtg

SEQ ID NO: 133966 - DNA, 25 bp, SARS Virus
caaaaccacaacattacggcagtgg

SEQ ID NO: 133967 - DNA, 25 bp, SARS Virus
aaaaccacaactatacggcagtgga

SEQ ID NO: 133968 - DNA, 25 bp, SARS Virus
aaaccacaacttaacggcagtggaa

SEQ ID NO: 133969 - DNA, 25 bp, SARS Virus
aaccacaactttacggcagtggaag

SEQ ID NO: 133970 - DNA, 25 bp, SARS Virus
accacaactttaaggcagtggaagt

SEQ ID NO: 133971 - DNA, 25 bp, SARS Virus
ccacaactttacagcagtggaagtc

SEQ ID NO: 133972 - DNA, 25 bp, SARS Virus
cacaactttacgacagtggaagtca

SEQ ID NO: 133973 - DNA, 25 bp, SARS Virus
acaactttacggaagtggaagtcat

SEQ ID NO: 133974 - DNA, 25 bp, SARS Virus
caactttacggcagtggaagtcatt

SEQ ID NO: 133975 - DNA, 25 bp, SARS Virus
aactttacggcaatggaagtcattg

SEQ ID NO: 133976 - DNA, 25 bp, SARS Virus
actttacggcagaggaagtcattgc

SEQ ID NO: 133977 - DNA, 25 bp, SARS Virus
ctttacggcagtagaagtcattgct

SEQ ID NO: 133978 - DNA, 25 bp, SARS Virus
tttacggcagtgaaagtcattgctg

SEQ ID NO: 133979 - DNA, 25 bp, SARS Virus
ttacggcagtggaagtcattgctgt

SEQ ID NO: 133980 - DNA, 25 bp, SARS Virus
tacggcagtggaagtcattgctgtt

SEQ ID NO: 133981 - DNA, 25 bp, SARS Virus
acggcagtggaaatcattgctgtta

SEQ ID NO: 133982 - DNA, 25 bp, SARS Virus
cggcagtggaagacattgctgttaa

SEQ ID NO: 133983 - DNA, 25 bp, SARS Virus
ggcagtggaagtaattgctgttaac

SEQ ID NO: 133984 - DNA, 25 bp, SARS Virus
gcagtggaagtcattgctgttaaca

SEQ ID NO: 133985 - DNA, 25 bp, SARS Virus
cagtggaagtcaatgctgttaacat

SEQ ID NO: 133986 - DNA, 25 bp, SARS Virus
agtggaagtcatagctgttaacata

SEQ ID NO: 133987 - DNA, 25 bp, SARS Virus
gtggaagtcattactgttaacatag

SEQ ID NO: 133988 - DNA, 25 bp, SARS Virus
tggaagtcattgatgttaacataga

SEQ ID NO: 133989 - DNA, 25 bp, SARS Virus
ggaagtcattgcagttaacatagac

SEQ ID NO: 133990 - DNA, 25 bp, SARS Virus
gaagtcattgctattaacatagaca

SEQ ID NO: 133991 - DNA, 25 bp, SARS Virus
aagtcattgctgataacatagacac

SEQ ID NO: 133992 - DNA, 25 bp, SARS Virus
agtcattgctgtaaacatagacact

SEQ ID NO: 133993 - DNA, 25 bp, SARS Virus
gtcattgctgttaacatagacactg

SEQ ID NO: 133994 - DNA, 25 bp, SARS Virus
tcattgctgttaacatagacactgt

SEQ ID NO: 133995 - DNA, 25 bp, SARS Virus
cattgctgttaaaatagacactgtg

SEQ ID NO: 133996 - DNA, 25 bp, SARS Virus
attgctgttaacatagacactgtga

SEQ ID NO: 133997 - DNA, 25 bp, SARS Virus
ttgctgttaacaaagacactgtgac

SEQ ID NO: 133998 - DNA, 25 bp, SARS Virus
tgctgttaacatagacactgtgaca

SEQ ID NO: 133999 - DNA, 25 bp, SARS Virus
gctgttaacataaacactgtgacaa

SEQ ID NO: 134000 - DNA, 25 bp, SARS Virus
ctgttaacatagacactgtgacaat

SEQ ID NO: 134001 - DNA, 25 bp, SARS Virus
tgttaacatagaaactgtgacaata

SEQ ID NO: 134002 - DNA, 25 bp, SARS Virus
gttaacatagacactgtgacaatat

SEQ ID NO: 134003 - DNA, 25 bp, SARS Virus
ttaacatagacaatgtgacaatata

SEQ ID NO: 134004 - DNA, 25 bp, SARS Virus
taacatagacacagtgacaatatac

SEQ ID NO: 134005 - DNA, 25 bp, SARS Virus
aacatagacactatgacaatatacc

SEQ ID NO: 134006 - DNA, 25 bp, SARS Virus
acatagacactgagacaatatacca

SEQ ID NO: 134007 - DNA, 25 bp, SARS Virus
catagacactgtaacaatataccat

SEQ ID NO: 134008 - DNA, 25 bp, SARS Virus
atagacactgtgacaatataccata

SEQ ID NO: 134009 - DNA, 25 bp, SARS Virus
tagacactgtgaaaatataccatat

SEQ ID NO: 134010 - DNA, 25 bp, SARS Virus
agacactgtgacaatataccatatg

SEQ ID NO: 134011 - DNA, 25 bp, SARS Virus
gacactgtgacaatataccatatgt

SEQ ID NO: 134012 - DNA, 25 bp, SARS Virus
acactgtgacaaaataccatatgtc

SEQ ID NO: 134013 - DNA, 25 bp, SARS Virus
cactgtgacaatataccatatgtca

SEQ ID NO: 134014 - DNA, 25 bp, SARS Virus
actgtgacaataaaccatatgtcat

SEQ ID NO: 134015 - DNA, 25 bp, SARS Virus
ctgtgacaatataccatatgtcatc

SEQ ID NO: 134016 - DNA, 25 bp, SARS Virus
tgtgacaatataacatatgtcatca

SEQ ID NO: 134017 - DNA, 25 bp, SARS Virus
gtgacaatatacaatatgtcatcag

SEQ ID NO: 134018 - DNA, 25 bp, SARS Virus
tgacaatataccatatgtcatcagt

SEQ ID NO: 134019 - DNA, 25 bp, SARS Virus
gacaatataccaaatgtcatcagta

SEQ ID NO: 134020 - DNA, 25 bp, SARS Virus
acaatataccatatgtcatcagtat

SEQ ID NO: 134021 - DNA, 25 bp, SARS Virus
caatataccataagtcatcagtatc

SEQ ID NO: 134022 - DNA, 25 bp, SARS Virus
aatataccatatatcatcagtatca

SEQ ID NO: 134023 - DNA, 25 bp, SARS Virus
atataccatatgacatcagtatcaa

SEQ ID NO: 134024 - DNA, 25 bp, SARS Virus
tataccatatgtaatcagtatcaat

SEQ ID NO: 134025 - DNA, 25 bp, SARS Virus
ataccatatgtcatcagtatcaata

SEQ ID NO: 134026 - DNA, 25 bp, SARS Virus
taccatatgtcaacagtatcaatac

SEQ ID NO: 134027 - DNA, 25 bp, SARS Virus
accatatgtcataagtatcaataca

SEQ ID NO: 134028 - DNA, 25 bp, SARS Virus
ccatatgtcatcagtatcaatacac

SEQ ID NO: 134029 - DNA, 25 bp, SARS Virus
catatgtcatcaatatcaatacaca

SEQ ID NO: 134030 - DNA, 25 bp, SARS Virus
atatgtcatcagaatcaatacacac

SEQ ID NO: 134031 - DNA, 25 bp, SARS Virus
tatgtcatcagtatcaatacacaca

SEQ ID NO: 134032 - DNA, 25 bp, SARS Virus
atgtcatcagtaacaatacacacac

SEQ ID NO: 134033 - DNA, 25 bp, SARS Virus
tgtcatcagtataaatacacacacg

SEQ ID NO: 134034 - DNA, 25 bp, SARS Virus
gtcatcagtatcaatacacacacgg

SEQ ID NO: 134035 - DNA, 25 bp, SARS Virus
tcatcagtatcaatacacacacggt

SEQ ID NO: 134036 - DNA, 25 bp, SARS Virus
catcagtatcaaaacacacacggtc

SEQ ID NO: 134037 - DNA, 25 bp, SARS Virus
atcagtatcaatacacacacggtcg

SEQ ID NO: 134038 - DNA, 25 bp, SARS Virus
tcagtatcaataaacacacggtcgt

SEQ ID NO: 134039 - DNA, 25 bp, SARS Virus
cagtatcaatacacacacggtcgtt

SEQ ID NO: 134040 - DNA, 25 bp, SARS Virus
agtatcaatacaaacacggtcgttt

SEQ ID NO: 134041 - DNA, 25 bp, SARS Virus
gtatcaatacacacacggtcgtttg

SEQ ID NO: 134042 - DNA, 25 bp, SARS Virus
tatcaatacacaaacggtcgtttgt

SEQ ID NO: 134043 - DNA, 25 bp, SARS Virus
atcaatacacacacggtcgtttgtt

SEQ ID NO: 134044 - DNA, 25 bp, SARS Virus
tcaatacacacaaggtcgtttgttt

SEQ ID NO: 134045 - DNA, 25 bp, SARS Virus
caatacacacacagtcgtttgtttc

SEQ ID NO: 134046 - DNA, 25 bp, SARS Virus
aatacacacacgatcgtttgtttca

SEQ ID NO: 134047 - DNA, 25 bp, SARS Virus
atacacacacggacgtttgtttcat

SEQ ID NO: 134048 - DNA, 25 bp, SARS Virus
tacacacacggtagtttgtttcatc

SEQ ID NO: 134049 - DNA, 25 bp, SARS Virus
acacacacggtcatttgtttcatca

SEQ ID NO: 134050 - DNA, 25 bp, SARS Virus
cacacacggtcgattgtttcatcaa

SEQ ID NO: 134051 - DNA, 25 bp, SARS Virus
acacacggtcgtatgtttcatcaac

SEQ ID NO: 134052 - DNA, 25 bp, SARS Virus
cacacggtcgttagtttcatcaacc

SEQ ID NO: 134053 - DNA, 25 bp, SARS Virus
acacggtcgtttatttcatcaaccg

SEQ ID NO: 134054 - DNA, 25 bp, SARS Virus
cacggtcgtttgattcatcaaccgt

SEQ ID NO: 134055 - DNA, 25 bp, SARS Virus
acggtcgtttgtatcatcaaccgta

SEQ ID NO: 134056 - DNA, 25 bp, SARS Virus
cggtcgtttgttacatcaaccgtag

SEQ ID NO: 134057 - DNA, 25 bp, SARS Virus
ggtcgtttgtttaatcaaccgtagt

SEQ ID NO: 134058 - DNA, 25 bp, SARS Virus
gtcgtttgtttcatcaaccgtagta

SEQ ID NO: 134059 - DNA, 25 bp, SARS Virus
tcgtttgtttcaacaaccgtagtat

SEQ ID NO: 134060 - DNA, 25 bp, SARS Virus
cgtttgtttcataaaccgtagtatt

SEQ ID NO: 134061 - DNA, 25 bp, SARS Virus
gtttgtttcatcaaccgtagtattt

SEQ ID NO: 134062 - DNA, 25 bp, SARS Virus
tttgtttcatcaaccgtagtatttc

SEQ ID NO: 134063 - DNA, 25 bp, SARS Virus
ttgtttcatcaaacgtagtatttca

SEQ ID NO: 134064 - DNA, 25 bp, SARS Virus
tgtttcatcaacagtagtatttcat

SEQ ID NO: 134065 - DNA, 25 bp, SARS Virus
gtttcatcaaccatagtatttcatt

SEQ ID NO: 134066 - DNA, 25 bp, SARS Virus
tttcatcaaccgaagtatttcatta

SEQ ID NO: 134067 - DNA, 25 bp, SARS Virus
ttcatcaaccgtagtatttcattac

SEQ ID NO: 134068 - DNA, 25 bp, SARS Virus
tcatcaaccgtaatatttcattacc

SEQ ID NO: 134069 - DNA, 25 bp, SARS Virus
catcaaccgtagaatttcattaccc

SEQ ID NO: 134070 - DNA, 25 bp, SARS Virus
atcaaccgtagtatttcattaccca

SEQ ID NO: 134071 - DNA, 25 bp, SARS Virus
tcaaccgtagtaattcattacccaa

SEQ ID NO: 134072 - DNA, 25 bp, SARS Virus
caaccgtagtatatcattacccaag

SEQ ID NO: 134073 - DNA, 25 bp, SARS Virus
aaccgtagtattacattacccaaga

SEQ ID NO: 134074 - DNA, 25 bp, SARS Virus
accgtagtatttaattacccaagaa

SEQ ID NO: 134075 - DNA, 25 bp, SARS Virus
ccgtagtatttcattacccaagaac

SEQ ID NO: 134076 - DNA, 25 bp, SARS Virus
cgtagtatttcaatacccaagaacc

SEQ ID NO: 134077 - DNA, 25 bp, SARS Virus
gtagtatttcataacccaagaacct

SEQ ID NO: 134078 - DNA, 25 bp, SARS Virus
tagtatttcattacccaagaaccta

SEQ ID NO: 134079 - DNA, 25 bp, SARS Virus
agtatttcattaaccaagaacctaa

SEQ ID NO: 134080 - DNA, 25 bp, SARS Virus
gtatttcattacacaagaacctaaa

SEQ ID NO: 134081 - DNA, 25 bp, SARS Virus
tatttcattaccaaagaacctaaac

SEQ ID NO: 134082 - DNA, 25 bp, SARS Virus
atttcattacccaagaacctaaacg

SEQ ID NO: 134083 - DNA, 25 bp, SARS Virus
tttcattacccaagaacctaaacgt

SEQ ID NO: 134084 - DNA, 25 bp, SARS Virus
ttcattacccaaaaacctaaacgtg

SEQ ID NO: 134085 - DNA, 25 bp, SARS Virus
tcattacccaagaacctaaacgtga

SEQ ID NO: 134086 - DNA, 25 bp, SARS Virus
cattacccaagaacctaaacgtgaa

SEQ ID NO: 134087 - DNA, 25 bp, SARS Virus
attacccaagaaactaaacgtgaag

SEQ ID NO: 134088 - DNA, 25 bp, SARS Virus
ttacccaagaacataaacgtgaagg

SEQ ID NO: 134089 - DNA, 25 bp, SARS Virus
tacccaagaaccaaaacgtgaaggt

SEQ ID NO: 134090 - DNA, 25 bp, SARS Virus
acccaagaacctaaacgtgaaggtt

SEQ ID NO: 134091 - DNA, 25 bp, SARS Virus
cccaagaacctaaacgtgaaggttg

SEQ ID NO: 134092 - DNA, 25 bp, SARS Virus
ccaagaacctaaacgtgaaggttgt

SEQ ID NO: 134093 - DNA, 25 bp, SARS Virus
caagaacctaaaagtgaaggttgtt

SEQ ID NO: 134094 - DNA, 25 bp, SARS Virus
aagaacctaaacatgaaggttgttt

SEQ ID NO: 134095 - DNA, 25 bp, SARS Virus
agaacctaaacgagaaggttgtttc

SEQ ID NO: 134096 - DNA, 25 bp, SARS Virus
gaacctaaacgtaaaggttgtttcg

SEQ ID NO: 134097 - DNA, 25 bp, SARS Virus
aacctaaacgtgaaggttgtttcgg

SEQ ID NO: 134098 - DNA, 25 bp, SARS Virus
acctaaacgtgaaggttgtttcggt

SEQ ID NO: 134099 - DNA, 25 bp, SARS Virus
cctaaacgtgaaagttgtttcggtt

SEQ ID NO: 134100 - DNA, 25 bp, SARS Virus
ctaaacgtgaagattgtttcggttg

SEQ ID NO: 134101 - DNA, 25 bp, SARS Virus
taaacgtgaaggatgtttcggttgt

SEQ ID NO: 134102 - DNA, 25 bp, SARS Virus
aaacgtgaaggtagtttcggttgta

SEQ ID NO: 134103 - DNA, 25 bp, SARS Virus
aacgtgaaggttatttcggttgtag

SEQ ID NO: 134104 - DNA, 25 bp, SARS Virus
acgtgaaggttgattcggttgtaga

SEQ ID NO: 134105 - DNA, 25 bp, SARS Virus
cgtgaaggttgtatcggttgtagag

SEQ ID NO: 134106 - DNA, 25 bp, SARS Virus
gtgaaggttgttacggttgtagagt

SEQ ID NO: 134107 - DNA, 25 bp, SARS Virus
tgaaggttgtttaggttgtagagta

SEQ ID NO: 134108 - DNA, 25 bp, SARS Virus
gaaggttgtttcagttgtagagtat

SEQ ID NO: 134109 - DNA, 25 bp, SARS Virus
aaggttgtttcgattgtagagtatt

SEQ ID NO: 134110 - DNA, 25 bp, SARS Virus
aggttgtttcggatgtagagtatta

SEQ ID NO: 134111 - DNA, 25 bp, SARS Virus
ggttgtttcggtagtagagtattat

SEQ ID NO: 134112 - DNA, 25 bp, SARS Virus
gttgtttcggttatagagtattatt

SEQ ID NO: 134113 - DNA, 25 bp, SARS Virus
ttgtttcggttgaagagtattatta

SEQ ID NO: 134114 - DNA, 25 bp, SARS Virus
tgtttcggttgtagagtattattaa

SEQ ID NO: 134115 - DNA, 25 bp, SARS Virus
gtttcggttgtaaagtattattaag

SEQ ID NO: 134116 - DNA, 25 bp, SARS Virus
tttcggttgtagagtattattaaga

SEQ ID NO: 134117 - DNA, 25 bp, SARS Virus
ttcggttgtagaatattattaagat

SEQ ID NO: 134118 - DNA, 25 bp, SARS Virus
tcggttgtagagaattattaagatg

SEQ ID NO: 134119 - DNA, 25 bp, SARS Virus
cggttgtagagtattattaagatgt

SEQ ID NO: 134120 - DNA, 25 bp, SARS Virus
ggttgtagagtaatattaagatgta

SEQ ID NO: 134121 - DNA, 25 bp, SARS Virus
gttgtagagtataattaagatgtac

SEQ ID NO: 134122 - DNA, 25 bp, SARS Virus
ttgtagagtattattaagatgtacg

SEQ ID NO: 134123 - DNA, 25 bp, SARS Virus
tgtagagtattaataagatgtacgc

SEQ ID NO: 134124 - DNA, 25 bp, SARS Virus
gtagagtattataaagatgtacgca

SEQ ID NO: 134125 - DNA, 25 bp, SARS Virus
tagagtattattaagatgtacgcaa

SEQ ID NO: 134126 - DNA, 25 bp, SARS Virus
agagtattattaagatgtacgcaac

SEQ ID NO: 134127 - DNA, 25 bp, SARS Virus
gagtattattaaaatgtacgcaact

SEQ ID NO: 134128 - DNA, 25 bp, SARS Virus
agtattattaagatgtacgcaacta

SEQ ID NO: 134129 - DNA, 25 bp, SARS Virus
gtattattaagaagtacgcaactac

SEQ ID NO: 134130 - DNA, 25 bp, SARS Virus
tattattaagatatacgcaactacg

SEQ ID NO: 134131 - DNA, 25 bp, SARS Virus
attattaagatgaacgcaactacgt

SEQ ID NO: 134132 - DNA, 25 bp, SARS Virus
ttattaagatgtacgcaactacgta

SEQ ID NO: 134133 - DNA, 25 bp, SARS Virus
tattaagatgtaagcaactacgtaa

SEQ ID NO: 134134 - DNA, 25 bp, SARS Virus
attaagatgtacacaactacgtaac

SEQ ID NO: 134135 - DNA, 25 bp, SARS Virus
ttaagatgtacgaaactacgtaaca

SEQ ID NO: 134136 - DNA, 25 bp, SARS Virus
taagatgtacgcaactacgtaacat

SEQ ID NO: 134137 - DNA, 25 bp, SARS Virus
aagatgtacgcaactacgtaacatc

SEQ ID NO: 134138 - DNA, 25 bp, SARS Virus
agatgtacgcaaatacgtaacatct

SEQ ID NO: 134139 - DNA, 25 bp, SARS Virus
gatgtacgcaacaacgtaacatctt

SEQ ID NO: 134140 - DNA, 25 bp, SARS Virus
atgtacgcaactacgtaacatcttt

SEQ ID NO: 134141 - DNA, 25 bp, SARS Virus
tgtacgcaactaagtaacatctttt

SEQ ID NO: 134142 - DNA, 25 bp, SARS Virus
gtacgcaactacataacatctttta

SEQ ID NO: 134143 - DNA, 25 bp, SARS Virus
tacgcaactacgaaacatcttttat

SEQ ID NO: 134144 - DNA, 25 bp, SARS Virus
acgcaactacgtaacatcttttata

SEQ ID NO: 134145 - DNA, 25 bp, SARS Virus
cgcaactacgtaacatcttttatat

SEQ ID NO: 134146 - DNA, 25 bp, SARS Virus
gcaactacgtaaaatcttttatata

SEQ ID NO: 134147 - DNA, 25 bp, SARS Virus
caactacgtaacatcttttatatag

SEQ ID NO: 134148 - DNA, 25 bp, SARS Virus
aactacgtaacaacttttatatagt

SEQ ID NO: 134149 - DNA, 25 bp, SARS Virus
actacgtaacatattttatatagtt

SEQ ID NO: 134150 - DNA, 25 bp, SARS Virus
ctacgtaacatcatttatatagttc

SEQ ID NO: 134151 - DNA, 25 bp, SARS Virus
tacgtaacatctattatatagttcc

SEQ ID NO: 134152 - DNA, 25 bp, SARS Virus
acgtaacatcttatatatagttccg

SEQ ID NO: 134153 - DNA, 25 bp, SARS Virus
cgtaacatctttaatatagttccgt

SEQ ID NO: 134154 - DNA, 25 bp, SARS Virus
gtaacatcttttatatagttccgta

SEQ ID NO: 134155 - DNA, 25 bp, SARS Virus
taacatcttttaaatagttccgtat

SEQ ID NO: 134156 - DNA, 25 bp, SARS Virus
aacatcttttatatagttccgtatc

SEQ ID NO: 134157 - DNA, 25 bp, SARS Virus
acatcttttataaagttccgtatct

SEQ ID NO: 134158 - DNA, 25 bp, SARS Virus
catcttttatatagttccgtatctc

SEQ ID NO: 134159 - DNA, 25 bp, SARS Virus
atcttttatataattccgtatctcc

SEQ ID NO: 134160 - DNA, 25 bp, SARS Virus
tcttttatatagatccgtatctcca

SEQ ID NO: 134161 - DNA, 25 bp, SARS Virus
cttttatatagtaccgtatctccat

SEQ ID NO: 134162 - DNA, 25 bp, SARS Virus
ttttatatagttacgtatctccatg

SEQ ID NO: 134163 - DNA, 25 bp, SARS Virus
tttatatagttcagtatctccatgt

SEQ ID NO: 134164 - DNA, 25 bp, SARS Virus
ttatatagttccatatctccatgtt

SEQ ID NO: 134165 - DNA, 25 bp, SARS Virus
tatatagttccgaatctccatgttt

SEQ ID NO: 134166 - DNA, 25 bp, SARS Virus
atatagttccgtatctccatgtttt

SEQ ID NO: 134167 - DNA, 25 bp, SARS Virus
tatagttccgtaactccatgttttt

SEQ ID NO: 134168 - DNA, 25 bp, SARS Virus
atagttccgtatatccatgttttta

SEQ ID NO: 134169 - DNA, 25 bp, SARS Virus
tagttccgtatcaccatgtttttaa

SEQ ID NO: 134170 - DNA, 25 bp, SARS Virus
agttccgtatctacatgtttttaac

SEQ ID NO: 134171 - DNA, 25 bp, SARS Virus
gttccgtatctcaatgtttttaacg

SEQ ID NO: 134172 - DNA, 25 bp, SARS Virus
ttccgtatctccatgtttttaacgc

SEQ ID NO: 134173 - DNA, 25 bp, SARS Virus
tccgtatctccaagtttttaacgcg

SEQ ID NO: 134174 - DNA, 25 bp, SARS Virus
ccgtatctccatatttttaacgcgg

SEQ ID NO: 134175 - DNA, 25 bp, SARS Virus
cgtatctccatgattttaacgcgga

SEQ ID NO: 134176 - DNA, 25 bp, SARS Virus
gtatctccatgtatttaacgcggag

SEQ ID NO: 134177 - DNA, 25 bp, SARS Virus
tatctccatgttattaacgcggagg

SEQ ID NO: 134178 - DNA, 25 bp, SARS Virus
atctccatgtttataacgcggaggt

SEQ ID NO: 134179 - DNA, 25 bp, SARS Virus
tctccatgttttaaacgcggaggta

SEQ ID NO: 134180 - DNA, 25 bp, SARS Virus
ctccatgtttttaacgcggaggtat

SEQ ID NO: 134181 - DNA, 25 bp, SARS Virus
tccatgtttttaacgcggaggtatg

SEQ ID NO: 134182 - DNA, 25 bp, SARS Virus
ccatgtttttaaagcggaggtatgg

SEQ ID NO: 134183 - DNA, 25 bp, SARS Virus
catgtttttaacacggaggtatgga

SEQ ID NO: 134184 - DNA, 25 bp, SARS Virus
atgtttttaacgaggaggtatggac

SEQ ID NO: 134185 - DNA, 25 bp, SARS Virus
tgtttttaacgcagaggtatggacg

SEQ ID NO: 134186 - DNA, 25 bp, SARS Virus
gtttttaacgcgaaggtatggacgt

SEQ ID NO: 134187 - DNA, 25 bp, SARS Virus
tttttaacgcggaggtatggacgtc

SEQ ID NO: 134188 - DNA, 25 bp, SARS Virus
ttttaacgcggaagtatggacgtcg

SEQ ID NO: 134189 - DNA, 25 bp, SARS Virus
tttaacgcggagatatggacgtcgc

SEQ ID NO: 134190 - DNA, 25 bp, SARS Virus
ttaacgcggaggaatggacgtcgct

SEQ ID NO: 134191 - DNA, 25 bp, SARS Virus
taacgcggaggtatggacgtcgctg

SEQ ID NO: 134192 - DNA, 25 bp, SARS Virus
aacgcggaggtaaggacgtcgctgt

SEQ ID NO: 134193 - DNA, 25 bp, SARS Virus
acgcggaggtatagacgtcgctgtt

SEQ ID NO: 134194 - DNA, 25 bp, SARS Virus
cgcggaggtatgaacgtcgctgttc

SEQ ID NO: 134195 - DNA, 25 bp, SARS Virus
gcggaggtatggacgtcgctgttcg

SEQ ID NO: 134196 - DNA, 25 bp, SARS Virus
cggaggtatggaagtcgctgttcgt

SEQ ID NO: 134197 - DNA, 25 bp, SARS Virus
ggaggtatggacatcgctgttcgtt

SEQ ID NO: 134198 - DNA, 25 bp, SARS Virus
gaggtatggacgacgctgttcgttt

SEQ ID NO: 134199 - DNA, 25 bp, SARS Virus
aggtatggacgtagctgttcgtttt

SEQ ID NO: 134200 - DNA, 25 bp, SARS Virus
ggtatggacgtcactgttcgttttc

SEQ ID NO: 134201 - DNA, 25 bp, SARS Virus
gtatggacgtcgatgttcgttttct

SEQ ID NO: 134202 - DNA, 25 bp, SARS Virus
tatggacgtcgcagttcgttttcta

SEQ ID NO: 134203 - DNA, 25 bp, SARS Virus
atggacgtcgctattcgttttctac

SEQ ID NO: 134204 - DNA, 25 bp, SARS Virus
tggacgtcgctgatcgttttctaca

SEQ ID NO: 134205 - DNA, 25 bp, SARS Virus
ggacgtcgctgtacgttttctacac

SEQ ID NO: 134206 - DNA, 25 bp, SARS Virus
gacgtcgctgttagttttctacact

SEQ ID NO: 134207 - DNA, 25 bp, SARS Virus
acgtcgctgttcattttctacactt

SEQ ID NO: 134208 - DNA, 25 bp, SARS Virus
cgtcgctgttcgatttctacactta

SEQ ID NO: 134209 - DNA, 25 bp, SARS Virus
gtcgctgttcgtattctacacttat

SEQ ID NO: 134210 - DNA, 25 bp, SARS Virus
tcgctgttcgttatctacacttatc

SEQ ID NO: 134211 - DNA, 25 bp, SARS Virus
cgctgttcgtttactacacttatct

SEQ ID NO: 134212 - DNA, 25 bp, SARS Virus
gctgttcgttttatacacttatcta

SEQ ID NO: 134213 - DNA, 25 bp, SARS Virus
ctgttcgttttcaacacttatctac

SEQ ID NO: 134214 - DNA, 25 bp, SARS Virus
tgttcgttttctacacttatctacc

SEQ ID NO: 134215 - DNA, 25 bp, SARS Virus
gttcgttttctaaacttatctacca

SEQ ID NO: 134216 - DNA, 25 bp, SARS Virus
ttcgttttctacacttatctaccat

SEQ ID NO: 134217 - DNA, 25 bp, SARS Virus
tcgttttctacaattatctaccatt

SEQ ID NO: 134218 - DNA, 25 bp, SARS Virus
cgttttctacacatatctaccattg

SEQ ID NO: 134219 - DNA, 25 bp, SARS Virus
gttttctacactaatctaccattgt

SEQ ID NO: 134220 - DNA, 25 bp, SARS Virus
ttttctacacttatctaccattgtt

SEQ ID NO: 134221 - DNA, 25 bp, SARS Virus
tttctacacttaactaccattgttt

SEQ ID NO: 134222 - DNA, 25 bp, SARS Virus
ttctacacttatataccattgttta

SEQ ID NO: 134223 - DNA, 25 bp, SARS Virus
tctacacttatcaaccattgtttat

SEQ ID NO: 134224 - DNA, 25 bp, SARS Virus
ctacacttatctaccattgtttatc

SEQ ID NO: 134225 - DNA, 25 bp, SARS Virus
tacacttatctaacattgtttatcg

SEQ ID NO: 134226 - DNA, 25 bp, SARS Virus
acacttatctacaattgtttatcgt

SEQ ID NO: 134227 - DNA, 25 bp, SARS Virus
cacttatctaccattgtttatcgtc

SEQ ID NO: 134228 - DNA, 25 bp, SARS Virus
acttatctaccaatgtttatcgtcg

SEQ ID NO: 134229 - DNA, 25 bp, SARS Virus
cttatctaccatagtttatcgtcgt

SEQ ID NO: 134230 - DNA, 25 bp, SARS Virus
ttatctaccattatttatcgtcgtc

SEQ ID NO: 134231 - DNA, 25 bp, SARS Virus
tatctaccattgattatcgtcgtca

SEQ ID NO: 134232 - DNA, 25 bp, SARS Virus
atctaccattgtatatcgtcgtcat

SEQ ID NO: 134233 - DNA, 25 bp, SARS Virus
aggacttctcggcagctaacacaca

SEQ ID NO: 134234 - DNA, 25 bp, SARS Virus
ggacttctcggccgctaacacacat

SEQ ID NO: 134235 - DNA, 25 bp, SARS Virus
gacttctcggcacctaacacacata

SEQ ID NO: 134236 - DNA, 25 bp, SARS Virus
acttctcggcagctaacacacataa

SEQ ID NO: 134237 - DNA, 25 bp, SARS Virus
cttctcggcagccaacacacataaa

SEQ ID NO: 134238 - DNA, 25 bp, SARS Virus
ttctcggcagctcacacacataaac

SEQ ID NO: 134239 - DNA, 25 bp, SARS Virus
tctcggcagctaccacacataaacg

SEQ ID NO: 134240 - DNA, 25 bp, SARS Virus
ctcggcagctaacacacataaacgt

SEQ ID NO: 134241 - DNA, 25 bp, SARS Virus
tcggcagctaacccacataaacgtg

SEQ ID NO: 134242 - DNA, 25 bp, SARS Virus
cggcagctaacacacataaacgtgt

SEQ ID NO: 134243 - DNA, 25 bp, SARS Virus
ggcagctaacacccataaacgtgta

SEQ ID NO: 134244 - DNA, 25 bp, SARS Virus
gcagctaacacacataaacgtgtaa

SEQ ID NO: 134245 - DNA, 25 bp, SARS Virus
cagctaacacacctaaacgtgtaag

SEQ ID NO: 134246 - DNA, 25 bp, SARS Virus
agctaacacacacaaacgtgtaagc

SEQ ID NO: 134247 - DNA, 25 bp, SARS Virus
gctaacacacatcaacgtgtaagcc

SEQ ID NO: 134248 - DNA, 25 bp, SARS Virus
ctaacacacatacacgtgtaagcca

SEQ ID NO: 134249 - DNA, 25 bp, SARS Virus
taacacacataaccgtgtaagccac

SEQ ID NO: 134250 - DNA, 25 bp, SARS Virus
aacacacataaacgtgtaagccacc

SEQ ID NO: 134251 - DNA, 25 bp, SARS Virus
acacacataaacctgtaagccaccc

SEQ ID NO: 134252 - DNA, 25 bp, SARS Virus
cacacataaacgcgtaagccaccca

SEQ ID NO: 134253 - DNA, 25 bp, SARS Virus
acacataaacgtctaagccacccag

SEQ ID NO: 134254 - DNA, 25 bp, SARS Virus
cacataaacgtgcaagccacccaga

SEQ ID NO: 134255 - DNA, 25 bp, SARS Virus
acataaacgtgtcagccacccagaa

SEQ ID NO: 134256 - DNA, 25 bp, SARS Virus
cataaacgtgtacgccacccagaaa

SEQ ID NO: 134257 - DNA, 25 bp, SARS Virus
ataaacgtgtaacccacccagaaat

SEQ ID NO: 134258 - DNA, 25 bp, SARS Virus
taaacgtgtaagccacccagaaatt

SEQ ID NO: 134259 - DNA, 25 bp, SARS Virus
aaacgtgtaagccacccagaaattg

SEQ ID NO: 134260 - DNA, 25 bp, SARS Virus
aacgtgtaagccccccagaaattgt

SEQ ID NO: 134261 - DNA, 25 bp, SARS Virus
acgtgtaagccacccagaaattgtt

SEQ ID NO: 134262 - DNA, 25 bp, SARS Virus
cgtgtaagccacccagaaattgttc

SEQ ID NO: 134263 - DNA, 25 bp, SARS Virus
gtgtaagccacccagaaattgttcg

SEQ ID NO: 134264 - DNA, 25 bp, SARS Virus
tgtaagccaccccgaaattgttcga

SEQ ID NO: 134265 - DNA, 25 bp, SARS Virus
gtaagccacccacaaattgttcgaa

SEQ ID NO: 134266 - DNA, 25 bp, SARS Virus
taagccacccagcaattgttcgaac

SEQ ID NO: 134267 - DNA, 25 bp, SARS Virus
aagccacccagacattgttcgaaca

SEQ ID NO: 134268 - DNA, 25 bp, SARS Virus
agccacccagaacttgttcgaacaa

SEQ ID NO: 134269 - DNA, 25 bp, SARS Virus
gccacccagaaactgttcgaacaat

SEQ ID NO: 134270 - DNA, 25 bp, SARS Virus
ccacccagaaatcgttcgaacaatt

SEQ ID NO: 134271 - DNA, 25 bp, SARS Virus
cacccagaaattcttcgaacaattt

SEQ ID NO: 134272 - DNA, 25 bp, SARS Virus
acccagaaattgctcgaacaatttc

SEQ ID NO: 134273 - DNA, 25 bp, SARS Virus
cccagaaattgtccgaacaatttct

SEQ ID NO: 134274 - DNA, 25 bp, SARS Virus
ccagaaattgttcgaacaatttcta

SEQ ID NO: 134275 - DNA, 25 bp, SARS Virus
cagaaattgttccaacaatttctac

SEQ ID NO: 134276 - DNA, 25 bp, SARS Virus
agaaattgttcgcacaatttctact

SEQ ID NO: 134277 - DNA, 25 bp, SARS Virus
gaaattgttcgaccaatttctactt

SEQ ID NO: 134278 - DNA, 25 bp, SARS Virus
aaattgttcgaacaatttctacttc

SEQ ID NO: 134279 - DNA, 25 bp, SARS Virus
aattgttcgaaccatttctacttct

SEQ ID NO: 134280 - DNA, 25 bp, SARS Virus
attgttcgaacactttctacttctt

SEQ ID NO: 134281 - DNA, 25 bp, SARS Virus
ttgttcgaacaacttctacttctta

SEQ ID NO: 134282 - DNA, 25 bp, SARS Virus
tgttcgaacaatctctacttcttac

SEQ ID NO: 134283 - DNA, 25 bp, SARS Virus
gttcgaacaattcctacttcttaca

SEQ ID NO: 134284 - DNA, 25 bp, SARS Virus
ttcgaacaatttctacttcttacat

SEQ ID NO: 134285 - DNA, 25 bp, SARS Virus
tcgaacaatttccacttcttacatc

SEQ ID NO: 134286 - DNA, 25 bp, SARS Virus
cgaacaatttctccttcttacatcg

SEQ ID NO: 134287 - DNA, 25 bp, SARS Virus
gaacaatttctacttcttacatcgt

SEQ ID NO: 134288 - DNA, 25 bp, SARS Virus
aacaatttctacctcttacatcgta

SEQ ID NO: 134289 - DNA, 25 bp, SARS Virus
acaatttctactccttacatcgtaa

SEQ ID NO: 134290 - DNA, 25 bp, SARS Virus
caatttctacttcttacatcgtaaa

SEQ ID NO: 134291 - DNA, 25 bp, SARS Virus
aatttctacttcctacatcgtaaaa

SEQ ID NO: 134292 - DNA, 25 bp, SARS Virus
atttctacttctcacatcgtaaaag

SEQ ID NO: 134293 - DNA, 25 bp, SARS Virus
tttctacttcttccatcgtaaaagt

SEQ ID NO: 134294 - DNA, 25 bp, SARS Virus
ttctacttcttacatcgtaaaagtt

SEQ ID NO: 134295 - DNA, 25 bp, SARS Virus
tctacttcttacctcgtaaaagtta

SEQ ID NO: 134296 - DNA, 25 bp, SARS Virus
ctacttcttacaccgtaaaagttat

SEQ ID NO: 134297 - DNA, 25 bp, SARS Virus
tacttcttacatcgtaaaagttatg

SEQ ID NO: 134298 - DNA, 25 bp, SARS Virus
acttcttacatcctaaaagttatgg

SEQ ID NO: 134299 - DNA, 25 bp, SARS Virus
cttcttacatcgcaaaagttatggt

SEQ ID NO: 134300 - DNA, 25 bp, SARS Virus
ttcttacatcgtcaaagttatggtc

SEQ ID NO: 134301 - DNA, 25 bp, SARS Virus
tcttacatcgtacaagttatggtca

SEQ ID NO: 134302 - DNA, 25 bp, SARS Virus
cttacatcgtaacagttatggtcac

SEQ ID NO: 134303 - DNA, 25 bp, SARS Virus
ttacatcgtaaacgttatggtcaca

SEQ ID NO: 134304 - DNA, 25 bp, SARS Virus
tacatcgtaaaacttatggtcacag

SEQ ID NO: 134305 - DNA, 25 bp, SARS Virus
acatcgtaaaagctatggtcacaga

SEQ ID NO: 134306 - DNA, 25 bp, SARS Virus
catcgtaaaagtcatggtcacagac

SEQ ID NO: 134307 - DNA, 25 bp, SARS Virus
atcgtaaaagttctggtcacagaca

SEQ ID NO: 134308 - DNA, 25 bp, SARS Virus
tcgtaaaagttacggtcacagacat

SEQ ID NO: 134309 - DNA, 25 bp, SARS Virus
cgtaaaagttatcgtcacagacatc

SEQ ID NO: 134310 - DNA, 25 bp, SARS Virus
gtaaaagttatgctcacagacatca

SEQ ID NO: 134311 - DNA, 25 bp, SARS Virus
taaaagttatggccacagacatcat

SEQ ID NO: 134312 - DNA, 25 bp, SARS Virus
aaaagttatggtcacagacatcatt

SEQ ID NO: 134313 - DNA, 25 bp, SARS Virus
aaagttatggtcccagacatcatta

SEQ ID NO: 134314 - DNA, 25 bp, SARS Virus
aagttatggtcacagacatcattaa

SEQ ID NO: 134315 - DNA, 25 bp, SARS Virus
agttatggtcaccgacatcattaaa

SEQ ID NO: 134316 - DNA, 25 bp, SARS Virus
gttatggtcacacacatcattaaac

SEQ ID NO: 134317 - DNA, 25 bp, SARS Virus
ttatggtcacagccatcattaaaca

SEQ ID NO: 134318 - DNA, 25 bp, SARS Virus
tatggtcacagacatcattaaacac

SEQ ID NO: 134319 - DNA, 25 bp, SARS Virus
atggtcacagacctcattaaacaca

SEQ ID NO: 134320 - DNA, 25 bp, SARS Virus
tggtcacagacaccattaaacacat

SEQ ID NO: 134321 - DNA, 25 bp, SARS Virus
ggtcacagacatcattaaacacatc

SEQ ID NO: 134322 - DNA, 25 bp, SARS Virus
gtcacagacatccttaaacacatct

SEQ ID NO: 134323 - DNA, 25 bp, SARS Virus
tcacagacatcactaaacacatctg

SEQ ID NO: 134324 - DNA, 25 bp, SARS Virus
cacagacatcatcaaacacatctga

SEQ ID NO: 134325 - DNA, 25 bp, SARS Virus
acagacatcattcaacacatctgag

SEQ ID NO: 134326 - DNA, 25 bp, SARS Virus
cagacatcattacacacatctgagt

SEQ ID NO: 134327 - DNA, 25 bp, SARS Virus
agacatcattaaccacatctgagtt

SEQ ID NO: 134328 - DNA, 25 bp, SARS Virus
gacatcattaaacacatctgagttc

SEQ ID NO: 134329 - DNA, 25 bp, SARS Virus
acatcattaaacccatctgagttcg

SEQ ID NO: 134330 - DNA, 25 bp, SARS Virus
catcattaaacacatctgagttcga

SEQ ID NO: 134331 - DNA, 25 bp, SARS Virus
atcattaaacacctctgagttcgac

SEQ ID NO: 134332 - DNA, 25 bp, SARS Virus
tcattaaacacacctgagttcgacc

SEQ ID NO: 134333 - DNA, 25 bp, SARS Virus
cattaaacacatctgagttcgacca

SEQ ID NO: 134334 - DNA, 25 bp, SARS Virus
attaaacacatccgagttcgaccat

SEQ ID NO: 134335 - DNA, 25 bp, SARS Virus
ttaaacacatctcagttcgaccatc

SEQ ID NO: 134336 - DNA, 25 bp, SARS Virus
taaacacatctgcgttcgaccatca

SEQ ID NO: 134337 - DNA, 25 bp, SARS Virus
aaacacatctgacttcgaccatcat

SEQ ID NO: 134338 - DNA, 25 bp, SARS Virus
aacacatctgagctcgaccatcatt

SEQ ID NO: 134339 - DNA, 25 bp, SARS Virus
acacatctgagtccgaccatcattt

SEQ ID NO: 134340 - DNA, 25 bp, SARS Virus
cacatctgagttcgaccatcatttg

SEQ ID NO: 134341 - DNA, 25 bp, SARS Virus
acatctgagttccaccatcatttga

SEQ ID NO: 134342 - DNA, 25 bp, SARS Virus
catctgagttcgcccatcatttgaa

SEQ ID NO: 134343 - DNA, 25 bp, SARS Virus
atctgagttcgaccatcatttgaag

SEQ ID NO: 134344 - DNA, 25 bp, SARS Virus
tctgagttcgaccatcatttgaagc

SEQ ID NO: 134345 - DNA, 25 bp, SARS Virus
ctgagttcgaccctcatttgaagcc

SEQ ID NO: 134346 - DNA, 25 bp, SARS Virus
tgagttcgaccaccatttgaagcca

SEQ ID NO: 134347 - DNA, 25 bp, SARS Virus
gagttcgaccatcatttgaagccac

SEQ ID NO: 134348 - DNA, 25 bp, SARS Virus
agttcgaccatcctttgaagccact

SEQ ID NO: 134349 - DNA, 25 bp, SARS Virus
gttcgaccatcacttgaagccactt

SEQ ID NO: 134350 - DNA, 25 bp, SARS Virus
ttcgaccatcatctgaagccacttt

SEQ ID NO: 134351 - DNA, 25 bp, SARS Virus
tcgaccatcattcgaagccacttta

SEQ ID NO: 134352 - DNA, 25 bp, SARS Virus
cgaccatcatttcaagccactttat

SEQ ID NO: 134353 - DNA, 25 bp, SARS Virus
gaccatcatttgcagccactttatc

SEQ ID NO: 134354 - DNA, 25 bp, SARS Virus
accatcatttgacgccactttatcg

SEQ ID NO: 134355 - DNA, 25 bp, SARS Virus
ccatcatttgaacccactttatcgg

SEQ ID NO: 134356 - DNA, 25 bp, SARS Virus
catcatttgaagccactttatcggt

SEQ ID NO: 134357 - DNA, 25 bp, SARS Virus
atcatttgaagccactttatcggta

SEQ ID NO: 134358 - DNA, 25 bp, SARS Virus
tcatttgaagcccctttatcggtac

SEQ ID NO: 134359 - DNA, 25 bp, SARS Virus
catttgaagccactttatcggtaca

SEQ ID NO: 134360 - DNA, 25 bp, SARS Virus
atttgaagccaccttatcggtacat

SEQ ID NO: 134361 - DNA, 25 bp, SARS Virus
tttgaagccactctatcggtacatg

SEQ ID NO: 134362 - DNA, 25 bp, SARS Virus
ttgaagccacttcatcggtacatgt

SEQ ID NO: 134363 - DNA, 25 bp, SARS Virus
tgaagccactttctcggtacatgtt

SEQ ID NO: 134364 - DNA, 25 bp, SARS Virus
gaagccactttaccggtacatgttg

SEQ ID NO: 134365 - DNA, 25 bp, SARS Virus
aagccactttatcggtacatgttgc

SEQ ID NO: 134366 - DNA, 25 bp, SARS Virus
agccactttatccgtacatgttgct

SEQ ID NO: 134367 - DNA, 25 bp, SARS Virus
gccactttatcgctacatgttgctg

SEQ ID NO: 134368 - DNA, 25 bp, SARS Virus
ccactttatcggcacatgttgctgt

SEQ ID NO: 134369 - DNA, 25 bp, SARS Virus
cactttatcggtccatgttgctgta

SEQ ID NO: 134370 - DNA, 25 bp, SARS Virus
actttatcggtacatgttgctgtat

SEQ ID NO: 134371 - DNA, 25 bp, SARS Virus
ctttatcggtacctgttgctgtatc

SEQ ID NO: 134372 - DNA, 25 bp, SARS Virus
tttatcggtacacgttgctgtatca

SEQ ID NO: 134373 - DNA, 25 bp, SARS Virus
ttatcggtacatcttgctgtatcag

SEQ ID NO: 134374 - DNA, 25 bp, SARS Virus
tatcggtacatgctgctgtatcaga

SEQ ID NO: 134375 - DNA, 25 bp, SARS Virus
atcggtacatgtcgctgtatcagaa

SEQ ID NO: 134376 - DNA, 25 bp, SARS Virus
tcggtacatgttcctgtatcagaaa

SEQ ID NO: 134377 - DNA, 25 bp, SARS Virus
cggtacatgttgctgtatcagaaat

SEQ ID NO: 134378 - DNA, 25 bp, SARS Virus
ggtacatgttgccgtatcagaaatt

SEQ ID NO: 134379 - DNA, 25 bp, SARS Virus
gtacatgttgctctatcagaaattg

SEQ ID NO: 134380 - DNA, 25 bp, SARS Virus
tacatgttgctgcatcagaaattgt

SEQ ID NO: 134381 - DNA, 25 bp, SARS Virus
acatgttgctgtctcagaaattgtg

SEQ ID NO: 134382 - DNA, 25 bp, SARS Virus
catgttgctgtaccagaaattgtgg

SEQ ID NO: 134383 - DNA, 25 bp, SARS Virus
atgttgctgtatcagaaattgtgga

SEQ ID NO: 134384 - DNA, 25 bp, SARS Virus
tgttgctgtatccgaaattgtggac

SEQ ID NO: 134385 - DNA, 25 bp, SARS Virus
gttgctgtatcacaaattgtggact

SEQ ID NO: 134386 - DNA, 25 bp, SARS Virus
ttgctgtatcagcaattgtggactc

SEQ ID NO: 134387 - DNA, 25 bp, SARS Virus
tgctgtatcagacattgtggactca

SEQ ID NO: 134388 - DNA, 25 bp, SARS Virus
gctgtatcagaacttgtggactcac

SEQ ID NO: 134389 - DNA, 25 bp, SARS Virus
ctgtatcagaaactgtggactcacg

SEQ ID NO: 134390 - DNA, 25 bp, SARS Virus
tgtatcagaaatcgtggactcacgg

SEQ ID NO: 134391 - DNA, 25 bp, SARS Virus
gtatcagaaattctggactcacgga

SEQ ID NO: 134392 - DNA, 25 bp, SARS Virus
tatcagaaattgcggactcacggat

SEQ ID NO: 134393 - DNA, 25 bp, SARS Virus
atcagaaattgtcgactcacggata

SEQ ID NO: 134394 - DNA, 25 bp, SARS Virus
tcagaaattgtgcactcacggatag

SEQ ID NO: 134395 - DNA, 25 bp, SARS Virus
cagaaattgtggcctcacggatagg

SEQ ID NO: 134396 - DNA, 25 bp, SARS Virus
agaaattgtggactcacggatagga

SEQ ID NO: 134397 - DNA, 25 bp, SARS Virus
gaaattgtggacccacggataggag

SEQ ID NO: 134398 - DNA, 25 bp, SARS Virus
aaattgtggactcacggataggagt

SEQ ID NO: 134399 - DNA, 25 bp, SARS Virus
aattgtggactcccggataggagtc

SEQ ID NO: 134400 - DNA, 25 bp, SARS Virus
attgtggactcacggataggagtct

SEQ ID NO: 134401 - DNA, 25 bp, SARS Virus
ttgtggactcaccgataggagtctt

SEQ ID NO: 134402 - DNA, 25 bp, SARS Virus
tgtggactcacgcataggagtctta

SEQ ID NO: 134403 - DNA, 25 bp, SARS Virus
gtggactcacggctaggagtcttat

SEQ ID NO: 134404 - DNA, 25 bp, SARS Virus
tggactcacggacaggagtcttatt

SEQ ID NO: 134405 - DNA, 25 bp, SARS Virus
ggactcacggatcggagtcttattg

SEQ ID NO: 134406 - DNA, 25 bp, SARS Virus
gactcacggatacgagtcttattgg

SEQ ID NO: 134407 - DNA, 25 bp, SARS Virus
actcacggatagcagtcttattggt

SEQ ID NO: 134408 - DNA, 25 bp, SARS Virus
ctcacggataggcgtcttattggtg

SEQ ID NO: 134409 - DNA, 25 bp, SARS Virus
tcacggataggactcttattggtgg

SEQ ID NO: 134410 - DNA, 25 bp, SARS Virus
cacggataggagccttattggtggt

SEQ ID NO: 134411 - DNA, 25 bp, SARS Virus
acggataggagtcttattggtggtt

SEQ ID NO: 134412 - DNA, 25 bp, SARS Virus
cggataggagtcctattggtggtta

SEQ ID NO: 134413 - DNA, 25 bp, SARS Virus
ggataggagtctcattggtggttaa

SEQ ID NO: 134414 - DNA, 25 bp, SARS Virus
gataggagtcttcttggtggttaaa

SEQ ID NO: 134415 - DNA, 25 bp, SARS Virus
ataggagtcttactggtggttaaac

SEQ ID NO: 134416 - DNA, 25 bp, SARS Virus
taggagtcttatcggtggttaaacc

SEQ ID NO: 134417 - DNA, 25 bp, SARS Virus
aggagtcttattcgtggttaaacca

SEQ ID NO: 134418 - DNA, 25 bp, SARS Virus
ggagtcttattgctggttaaaccat

SEQ ID NO: 134419 - DNA, 25 bp, SARS Virus
gagtcttattggcggttaaaccatc

SEQ ID NO: 134420 - DNA, 25 bp, SARS Virus
agtcttattggtcgttaaaccatca

SEQ ID NO: 134421 - DNA, 25 bp, SARS Virus
gtcttattggtgcttaaaccatcag

SEQ ID NO: 134422 - DNA, 25 bp, SARS Virus
tcttattggtggctaaaccatcaga

SEQ ID NO: 134423 - DNA, 25 bp, SARS Virus
cttattggtggtcaaaccatcagaa

SEQ ID NO: 134424 - DNA, 25 bp, SARS Virus
ttattggtggttcaaccatcagaag

SEQ ID NO: 134425 - DNA, 25 bp, SARS Virus
tattggtggttacaccatcagaaga

SEQ ID NO: 134426 - DNA, 25 bp, SARS Virus
attggtggttaacccatcagaagaa

SEQ ID NO: 134427 - DNA, 25 bp, SARS Virus
ttggtggttaaaccatcagaagaaa

SEQ ID NO: 134428 - DNA, 25 bp, SARS Virus
tggtggttaaaccatcagaagaaac

SEQ ID NO: 134429 - DNA, 25 bp, SARS Virus
ggtggttaaaccctcagaagaaact

SEQ ID NO: 134430 - DNA, 25 bp, SARS Virus
gtggttaaaccaccagaagaaactc

SEQ ID NO: 134431 - DNA, 25 bp, SARS Virus
tggttaaaccatcagaagaaactca

SEQ ID NO: 134432 - DNA, 25 bp, SARS Virus
ggttaaaccatccgaagaaactcaa

SEQ ID NO: 134433 - DNA, 25 bp, SARS Virus
gttaaaccatcacaagaaactcaaa

SEQ ID NO: 134434 - DNA, 25 bp, SARS Virus
ttaaaccatcagcagaaactcaaaa

SEQ ID NO: 134435 - DNA, 25 bp, SARS Virus
taaaccatcagacgaaactcaaaac

SEQ ID NO: 134436 - DNA, 25 bp, SARS Virus
aaaccatcagaacaaactcaaaacc

SEQ ID NO: 134437 - DNA, 25 bp, SARS Virus
aaccatcagaagcaactcaaaacca

SEQ ID NO: 134438 - DNA, 25 bp, SARS Virus
accatcagaagacactcaaaaccac

SEQ ID NO: 134439 - DNA, 25 bp, SARS Virus
ccatcagaagaacctcaaaaccaca

SEQ ID NO: 134440 - DNA, 25 bp, SARS Virus
catcagaagaaactcaaaaccacaa

SEQ ID NO: 134441 - DNA, 25 bp, SARS Virus
atcagaagaaacccaaaaccacaac

SEQ ID NO: 134442 - DNA, 25 bp, SARS Virus
tcagaagaaactcaaaaccacaact

SEQ ID NO: 134443 - DNA, 25 bp, SARS Virus
cagaagaaactccaaaccacaactt

SEQ ID NO: 134444 - DNA, 25 bp, SARS Virus
agaagaaactcacaaccacaacttt

SEQ ID NO: 134445 - DNA, 25 bp, SARS Virus
gaagaaactcaacaccacaacttta

SEQ ID NO: 134446 - DNA, 25 bp, SARS Virus
aagaaactcaaacccacaactttac

SEQ ID NO: 134447 - DNA, 25 bp, SARS Virus
agaaactcaaaaccacaactttacg

SEQ ID NO: 134448 - DNA, 25 bp, SARS Virus
gaaactcaaaaccacaactttacgg

SEQ ID NO: 134449 - DNA, 25 bp, SARS Virus
aaactcaaaaccccaactttacggc

SEQ ID NO: 134450 - DNA, 25 bp, SARS Virus
aactcaaaaccacaactttacggca

SEQ ID NO: 134451 - DNA, 25 bp, SARS Virus
actcaaaaccaccactttacggcag

SEQ ID NO: 134452 - DNA, 25 bp, SARS Virus
ctcaaaaccacacctttacggcagt

SEQ ID NO: 134453 - DNA, 25 bp, SARS Virus
tcaaaaccacaactttacggcagtg

SEQ ID NO: 134454 - DNA, 25 bp, SARS Virus
caaaaccacaaccttacggcagtgg

SEQ ID NO: 134455 - DNA, 25 bp, SARS Virus
aaaaccacaactctacggcagtgga

SEQ ID NO: 134456 - DNA, 25 bp, SARS Virus
aaaccacaacttcacggcagtggaa

SEQ ID NO: 134457 - DNA, 25 bp, SARS Virus
aaccacaactttccggcagtggaag

SEQ ID NO: 134458 - DNA, 25 bp, SARS Virus
accacaactttacggcagtggaagt

SEQ ID NO: 134459 - DNA, 25 bp, SARS Virus
ccacaactttaccgcagtggaagtc

SEQ ID NO: 134460 - DNA, 25 bp, SARS Virus
cacaactttacgccagtggaagtca

SEQ ID NO: 134461 - DNA, 25 bp, SARS Virus
acaactttacggcagtggaagtcat

SEQ ID NO: 134462 - DNA, 25 bp, SARS Virus
caactttacggccgtggaagtcatt

SEQ ID NO: 134463 - DNA, 25 bp, SARS Virus
aactttacggcactggaagtcattg

SEQ ID NO: 134464 - DNA, 25 bp, SARS Virus
actttacggcagcggaagtcattgc

SEQ ID NO: 134465 - DNA, 25 bp, SARS Virus
ctttacggcagtcgaagtcattgct

SEQ ID NO: 134466 - DNA, 25 bp, SARS Virus
tttacggcagtgcaagtcattgctg

SEQ ID NO: 134467 - DNA, 25 bp, SARS Virus
ttacggcagtggcagtcattgctgt

SEQ ID NO: 134468 - DNA, 25 bp, SARS Virus
tacggcagtggacgtcattgctgtt

SEQ ID NO: 134469 - DNA, 25 bp, SARS Virus
acggcagtggaactcattgctgtta

SEQ ID NO: 134470 - DNA, 25 bp, SARS Virus
cggcagtggaagccattgctgttaa

SEQ ID NO: 134471 - DNA, 25 bp, SARS Virus
ggcagtggaagtcattgctgttaac

SEQ ID NO: 134472 - DNA, 25 bp, SARS Virus
gcagtggaagtccttgctgttaaca

SEQ ID NO: 134473 - DNA, 25 bp, SARS Virus
cagtggaagtcactgctgttaacat

SEQ ID NO: 134474 - DNA, 25 bp, SARS Virus
agtggaagtcatcgctgttaacata

SEQ ID NO: 134475 - DNA, 25 bp, SARS Virus
gtggaagtcattcctgttaacatag

SEQ ID NO: 134476 - DNA, 25 bp, SARS Virus
tggaagtcattgctgttaacataga

SEQ ID NO: 134477 - DNA, 25 bp, SARS Virus
ggaagtcattgccgttaacatagac

SEQ ID NO: 134478 - DNA, 25 bp, SARS Virus
gaagtcattgctcttaacatagaca

SEQ ID NO: 134479 - DNA, 25 bp, SARS Virus
aagtcattgctgctaacatagacac

SEQ ID NO: 134480 - DNA, 25 bp, SARS Virus
agtcattgctgtcaacatagacact

SEQ ID NO: 134481 - DNA, 25 bp, SARS Virus
gtcattgctgttcacatagacactg

SEQ ID NO: 134482 - DNA, 25 bp, SARS Virus
tcattgctgttaccatagacactgt

SEQ ID NO: 134483 - DNA, 25 bp, SARS Virus
cattgctgttaacatagacactgtg

SEQ ID NO: 134484 - DNA, 25 bp, SARS Virus
attgctgttaacctagacactgtga

SEQ ID NO: 134485 - DNA, 25 bp, SARS Virus
ttgctgttaacacagacactgtgac

SEQ ID NO: 134486 - DNA, 25 bp, SARS Virus
tgctgttaacatcgacactgtgaca

SEQ ID NO: 134487 - DNA, 25 bp, SARS Virus
gctgttaacatacacactgtgacaa

SEQ ID NO: 134488 - DNA, 25 bp, SARS Virus
ctgttaacatagccactgtgacaat

SEQ ID NO: 134489 - DNA, 25 bp, SARS Virus
tgttaacatagacactgtgacaata

SEQ ID NO: 134490 - DNA, 25 bp, SARS Virus
gttaacatagaccctgtgacaatat

SEQ ID NO: 134491 - DNA, 25 bp, SARS Virus
ttaacatagacactgtgacaatata

SEQ ID NO: 134492 - DNA, 25 bp, SARS Virus
taacatagacaccgtgacaatatac

SEQ ID NO: 134493 - DNA, 25 bp, SARS Virus
aacatagacactctgacaatatacc

SEQ ID NO: 134494 - DNA, 25 bp, SARS Virus
acatagacactgcgacaatatacca

SEQ ID NO: 134495 - DNA, 25 bp, SARS Virus
catagacactgtcacaatataccat

SEQ ID NO: 134496 - DNA, 25 bp, SARS Virus
atagacactgtgccaatataccata

SEQ ID NO: 134497 - DNA, 25 bp, SARS Virus
tagacactgtgacaatataccatat

SEQ ID NO: 134498 - DNA, 25 bp, SARS Virus
agacactgtgaccatataccatatg

SEQ ID NO: 134499 - DNA, 25 bp, SARS Virus
gacactgtgacactataccatatgt

SEQ ID NO: 134500 - DNA, 25 bp, SARS Virus
acactgtgacaacataccatatgtc

SEQ ID NO: 134501 - DNA, 25 bp, SARS Virus
cactgtgacaatctaccatatgtca

SEQ ID NO: 134502 - DNA, 25 bp, SARS Virus
actgtgacaatacaccatatgtcat

SEQ ID NO: 134503 - DNA, 25 bp, SARS Virus
ctgtgacaatatcccatatgtcatc

SEQ ID NO: 134504 - DNA, 25 bp, SARS Virus
tgtgacaatataccatatgtcatca

SEQ ID NO: 134505 - DNA, 25 bp, SARS Virus
gtgacaatataccatatgtcatcag

SEQ ID NO: 134506 - DNA, 25 bp, SARS Virus
tgacaatataccctatgtcatcagt

SEQ ID NO: 134507 - DNA, 25 bp, SARS Virus
gacaatataccacatgtcatcagta

SEQ ID NO: 134508 - DNA, 25 bp, SARS Virus
acaatataccatctgtcatcagtat

SEQ ID NO: 134509 - DNA, 25 bp, SARS Virus
caatataccatacgtcatcagtatc

SEQ ID NO: 134510 - DNA, 25 bp, SARS Virus
aatataccatatctcatcagtatca

SEQ ID NO: 134511 - DNA, 25 bp, SARS Virus
atataccatatgccatcagtatcaa

SEQ ID NO: 134512 - DNA, 25 bp, SARS Virus
tataccatatgtcatcagtatcaat

SEQ ID NO: 134513 - DNA, 25 bp, SARS Virus
ataccatatgtcctcagtatcaata

SEQ ID NO: 134514 - DNA, 25 bp, SARS Virus
taccatatgtcaccagtatcaatac

SEQ ID NO: 134515 - DNA, 25 bp, SARS Virus
accatatgtcatcagtatcaataca

SEQ ID NO: 134516 - DNA, 25 bp, SARS Virus
ccatatgtcatccgtatcaatacac

SEQ ID NO: 134517 - DNA, 25 bp, SARS Virus
catatgtcatcactatcaatacaca

SEQ ID NO: 134518 - DNA, 25 bp, SARS Virus
atatgtcatcagcatcaatacacac

SEQ ID NO: 134519 - DNA, 25 bp, SARS Virus
tatgtcatcagtctcaatacacaca

SEQ ID NO: 134520 - DNA, 25 bp, SARS Virus
atgtcatcagtaccaatacacacac

SEQ ID NO: 134521 - DNA, 25 bp, SARS Virus
tgtcatcagtatcaatacacacacg

SEQ ID NO: 134522 - DNA, 25 bp, SARS Virus
gtcatcagtatccatacacacacgg

SEQ ID NO: 134523 - DNA, 25 bp, SARS Virus
tcatcagtatcactacacacacggt

SEQ ID NO: 134524 - DNA, 25 bp, SARS Virus
catcagtatcaacacacacacggtc

SEQ ID NO: 134525 - DNA, 25 bp, SARS Virus
atcagtatcaatccacacacggtcg

SEQ ID NO: 134526 - DNA, 25 bp, SARS Virus
tcagtatcaatacacacacggtcgt

SEQ ID NO: 134527 - DNA, 25 bp, SARS Virus
cagtatcaatacccacacggtcgtt

SEQ ID NO: 134528 - DNA, 25 bp, SARS Virus
agtatcaatacacacacggtcgttt

SEQ ID NO: 134529 - DNA, 25 bp, SARS Virus
gtatcaatacacccacggtcgtttg

SEQ ID NO: 134530 - DNA, 25 bp, SARS Virus
tatcaatacacacacggtcgtttgt

SEQ ID NO: 134531 - DNA, 25 bp, SARS Virus
atcaatacacacccggtcgtttgtt

SEQ ID NO: 134532 - DNA, 25 bp, SARS Virus
tcaatacacacacggtcgtttgttt

SEQ ID NO: 134533 - DNA, 25 bp, SARS Virus
caatacacacaccgtcgtttgtttc

SEQ ID NO: 134534 - DNA, 25 bp, SARS Virus
aatacacacacgctcgtttgtttca

SEQ ID NO: 134535 - DNA, 25 bp, SARS Virus
atacacacacggccgtttgtttcat

SEQ ID NO: 134536 - DNA, 25 bp, SARS Virus
tacacacacggtcgtttgtttcatc

SEQ ID NO: 134537 - DNA, 25 bp, SARS Virus
acacacacggtcctttgtttcatca

SEQ ID NO: 134538 - DNA, 25 bp, SARS Virus
cacacacggtcgcttgtttcatcaa

SEQ ID NO: 134539 - DNA, 25 bp, SARS Virus
acacacggtcgtctgtttcatcaac

SEQ ID NO: 134540 - DNA, 25 bp, SARS Virus
cacacggtcgttcgtttcatcaacc

SEQ ID NO: 134541 - DNA, 25 bp, SARS Virus
acacggtcgtttctttcatcaaccg

SEQ ID NO: 134542 - DNA, 25 bp, SARS Virus
cacggtcgtttgcttcatcaaccgt

SEQ ID NO: 134543 - DNA, 25 bp, SARS Virus
acggtcgtttgtctcatcaaccgta

SEQ ID NO: 134544 - DNA, 25 bp, SARS Virus
cggtcgtttgttccatcaaccgtag

SEQ ID NO: 134545 - DNA, 25 bp, SARS Virus
ggtcgtttgtttcatcaaccgtagt

SEQ ID NO: 134546 - DNA, 25 bp, SARS Virus
gtcgtttgtttcctcaaccgtagta

SEQ ID NO: 134547 - DNA, 25 bp, SARS Virus
tcgtttgtttcaccaaccgtagtat

SEQ ID NO: 134548 - DNA, 25 bp, SARS Virus
cgtttgtttcatcaaccgtagtatt

SEQ ID NO: 134549 - DNA, 25 bp, SARS Virus
gtttgtttcatccaccgtagtattt

SEQ ID NO: 134550 - DNA, 25 bp, SARS Virus
tttgtttcatcacccgtagtatttc

SEQ ID NO: 134551 - DNA, 25 bp, SARS Virus
ttgtttcatcaaccgtagtatttca

SEQ ID NO: 134552 - DNA, 25 bp, SARS Virus
tgtttcatcaaccgtagtatttcat

SEQ ID NO: 134553 - DNA, 25 bp, SARS Virus
gtttcatcaaccctagtatttcatt

SEQ ID NO: 134554 - DNA, 25 bp, SARS Virus
tttcatcaaccgcagtatttcatta

SEQ ID NO: 134555 - DNA, 25 bp, SARS Virus
ttcatcaaccgtcgtatttcattac

SEQ ID NO: 134556 - DNA, 25 bp, SARS Virus
tcatcaaccgtactatttcattacc

SEQ ID NO: 134557 - DNA, 25 bp, SARS Virus
catcaaccgtagcatttcattaccc

SEQ ID NO: 134558 - DNA, 25 bp, SARS Virus
atcaaccgtagtctttcattaccca

SEQ ID NO: 134559 - DNA, 25 bp, SARS Virus
tcaaccgtagtacttcattacccaa

SEQ ID NO: 134560 - DNA, 25 bp, SARS Virus
caaccgtagtatctcattacccaag

SEQ ID NO: 134561 - DNA, 25 bp, SARS Virus
aaccgtagtattccattacccaaga

SEQ ID NO: 134562 - DNA, 25 bp, SARS Virus
accgtagtatttcattacccaagaa

SEQ ID NO: 134563 - DNA, 25 bp, SARS Virus
ccgtagtatttccttacccaagaac

SEQ ID NO: 134564 - DNA, 25 bp, SARS Virus
cgtagtatttcactacccaagaacc

SEQ ID NO: 134565 - DNA, 25 bp, SARS Virus
gtagtatttcatcacccaagaacct

SEQ ID NO: 134566 - DNA, 25 bp, SARS Virus
tagtatttcattccccaagaaccta

SEQ ID NO: 134567 - DNA, 25 bp, SARS Virus
agtatttcattacccaagaacctaa

SEQ ID NO: 134568 - DNA, 25 bp, SARS Virus
gtatttcattacccaagaacctaaa

SEQ ID NO: 134569 - DNA, 25 bp, SARS Virus
tatttcattacccaagaacctaaac

SEQ ID NO: 134570 - DNA, 25 bp, SARS Virus
atttcattaccccagaacctaaacg

SEQ ID NO: 134571 - DNA, 25 bp, SARS Virus
tttcattacccacgaacctaaacgt

SEQ ID NO: 134572 - DNA, 25 bp, SARS Virus
ttcattacccaacaacctaaacgtg

SEQ ID NO: 134573 - DNA, 25 bp, SARS Virus
tcattacccaagcacctaaacgtga

SEQ ID NO: 134574 - DNA, 25 bp, SARS Virus
cattacccaagaccctaaacgtgaa

SEQ ID NO: 134575 - DNA, 25 bp, SARS Virus
attacccaagaacctaaacgtgaag

SEQ ID NO: 134576 - DNA, 25 bp, SARS Virus
ttacccaagaacctaaacgtgaagg

SEQ ID NO: 134577 - DNA, 25 bp, SARS Virus
tacccaagaacccaaacgtgaaggt

SEQ ID NO: 134578 - DNA, 25 bp, SARS Virus
acccaagaacctcaacgtgaaggtt

SEQ ID NO: 134579 - DNA, 25 bp, SARS Virus
cccaagaacctacacgtgaaggttg

SEQ ID NO: 134580 - DNA, 25 bp, SARS Virus
ccaagaacctaaccgtgaaggttgt

SEQ ID NO: 134581 - DNA, 25 bp, SARS Virus
caagaacctaaacgtgaaggttgtt

SEQ ID NO: 134582 - DNA, 25 bp, SARS Virus
aagaacctaaacctgaaggttgttt

SEQ ID NO: 134583 - DNA, 25 bp, SARS Virus
agaacctaaacgcgaaggttgtttc

SEQ ID NO: 134584 - DNA, 25 bp, SARS Virus
gaacctaaacgtcaaggttgtttcg

SEQ ID NO: 134585 - DNA, 25 bp, SARS Virus
aacctaaacgtgcaggttgtttcgg

SEQ ID NO: 134586 - DNA, 25 bp, SARS Virus
acctaaacgtgacggttgtttcggt

SEQ ID NO: 134587 - DNA, 25 bp, SARS Virus
cctaaacgtgaacgttgtttcggtt

SEQ ID NO: 134588 - DNA, 25 bp, SARS Virus
ctaaacgtgaagcttgtttcggttg

SEQ ID NO: 134589 - DNA, 25 bp, SARS Virus
taaacgtgaaggctgtttcggttgt

SEQ ID NO: 134590 - DNA, 25 bp, SARS Virus
aaacgtgaaggtcgtttcggttgta

SEQ ID NO: 134591 - DNA, 25 bp, SARS Virus
aacgtgaaggttctttcggttgtag

SEQ ID NO: 134592 - DNA, 25 bp, SARS Virus
acgtgaaggttgcttcggttgtaga

SEQ ID NO: 134593 - DNA, 25 bp, SARS Virus
cgtgaaggttgtctcggttgtagag

SEQ ID NO: 134594 - DNA, 25 bp, SARS Virus
gtgaaggttgttccggttgtagagt

SEQ ID NO: 134595 - DNA, 25 bp, SARS Virus
tgaaggttgtttcggttgtagagta

SEQ ID NO: 134596 - DNA, 25 bp, SARS Virus
gaaggttgtttccgttgtagagtat

SEQ ID NO: 134597 - DNA, 25 bp, SARS Virus
aaggttgtttcgcttgtagagtatt

SEQ ID NO: 134598 - DNA, 25 bp, SARS Virus
aggttgtttcggctgtagagtatta

SEQ ID NO: 134599 - DNA, 25 bp, SARS Virus
ggttgtttcggtcgtagagtattat

SEQ ID NO: 134600 - DNA, 25 bp, SARS Virus
gttgtttcggttctagagtattatt

SEQ ID NO: 134601 - DNA, 25 bp, SARS Virus
ttgtttcggttgcagagtattatta

SEQ ID NO: 134602 - DNA, 25 bp, SARS Virus
tgtttcggttgtcgagtattattaa

SEQ ID NO: 134603 - DNA, 25 bp, SARS Virus
gtttcggttgtacagtattattaag

SEQ ID NO: 134604 - DNA, 25 bp, SARS Virus
tttcggttgtagcgtattattaaga

SEQ ID NO: 134605 - DNA, 25 bp, SARS Virus
ttcggttgtagactattattaagat

SEQ ID NO: 134606 - DNA, 25 bp, SARS Virus
tcggttgtagagcattattaagatg

SEQ ID NO: 134607 - DNA, 25 bp, SARS Virus
cggttgtagagtcttattaagatgt

SEQ ID NO: 134608 - DNA, 25 bp, SARS Virus
ggttgtagagtactattaagatgta

SEQ ID NO: 134609 - DNA, 25 bp, SARS Virus
gttgtagagtatcattaagatgtac

SEQ ID NO: 134610 - DNA, 25 bp, SARS Virus
ttgtagagtattcttaagatgtacg

SEQ ID NO: 134611 - DNA, 25 bp, SARS Virus
tgtagagtattactaagatgtacgc

SEQ ID NO: 134612 - DNA, 25 bp, SARS Virus
gtagagtattatcaagatgtacgca

SEQ ID NO: 134613 - DNA, 25 bp, SARS Virus
tagagtattattcagatgtacgcaa

SEQ ID NO: 134614 - DNA, 25 bp, SARS Virus
agagtattattacgatgtacgcaac

SEQ ID NO: 134615 - DNA, 25 bp, SARS Virus
gagtattattaacatgtacgcaact

SEQ ID NO: 134616 - DNA, 25 bp, SARS Virus
agtattattaagctgtacgcaacta

SEQ ID NO: 134617 - DNA, 25 bp, SARS Virus
gtattattaagacgtacgcaactac

SEQ ID NO: 134618 - DNA, 25 bp, SARS Virus
tattattaagatctacgcaactacg

SEQ ID NO: 134619 - DNA, 25 bp, SARS Virus
attattaagatgcacgcaactacgt

SEQ ID NO: 134620 - DNA, 25 bp, SARS Virus
ttattaagatgtccgcaactacgta

SEQ ID NO: 134621 - DNA, 25 bp, SARS Virus
tattaagatgtacgcaactacgtaa

SEQ ID NO: 134622 - DNA, 25 bp, SARS Virus
attaagatgtacccaactacgtaac

SEQ ID NO: 134623 - DNA, 25 bp, SARS Virus
ttaagatgtacgcaactacgtaaca

SEQ ID NO: 134624 - DNA, 25 bp, SARS Virus
taagatgtacgccactacgtaacat

SEQ ID NO: 134625 - DNA, 25 bp, SARS Virus
aagatgtacgcacctacgtaacatc

SEQ ID NO: 134626 - DNA, 25 bp, SARS Virus
agatgtacgcaactacgtaacatct

SEQ ID NO: 134627 - DNA, 25 bp, SARS Virus
gatgtacgcaaccacgtaacatctt

SEQ ID NO: 134628 - DNA, 25 bp, SARS Virus
atgtacgcaactccgtaacatcttt

SEQ ID NO: 134629 - DNA, 25 bp, SARS Virus
tgtacgcaactacgtaacatctttt

SEQ ID NO: 134630 - DNA, 25 bp, SARS Virus
gtacgcaactacctaacatctttta

SEQ ID NO: 134631 - DNA, 25 bp, SARS Virus
tacgcaactacgcaacatcttttat

SEQ ID NO: 134632 - DNA, 25 bp, SARS Virus
acgcaactacgtcacatcttttata

SEQ ID NO: 134633 - DNA, 25 bp, SARS Virus
cgcaactacgtaccatcttttatat

SEQ ID NO: 134634 - DNA, 25 bp, SARS Virus
gcaactacgtaacatcttttatata

SEQ ID NO: 134635 - DNA, 25 bp, SARS Virus
caactacgtaacctcttttatatag

SEQ ID NO: 134636 - DNA, 25 bp, SARS Virus
aactacgtaacaccttttatatagt

SEQ ID NO: 134637 - DNA, 25 bp, SARS Virus
actacgtaacatcttttatatagtt

SEQ ID NO: 134638 - DNA, 25 bp, SARS Virus
ctacgtaacatcctttatatagttc

SEQ ID NO: 134639 - DNA, 25 bp, SARS Virus
tacgtaacatctcttatatagttcc

SEQ ID NO: 134640 - DNA, 25 bp, SARS Virus
acgtaacatcttctatatagttccg

SEQ ID NO: 134641 - DNA, 25 bp, SARS Virus
cgtaacatctttcatatagttccgt

SEQ ID NO: 134642 - DNA, 25 bp, SARS Virus
gtaacatcttttctatagttccgta

SEQ ID NO: 134643 - DNA, 25 bp, SARS Virus
taacatcttttacatagttccgtat

SEQ ID NO: 134644 - DNA, 25 bp, SARS Virus
aacatcttttatctagttccgtatc

SEQ ID NO: 134645 - DNA, 25 bp, SARS Virus
acatcttttatacagttccgtatct

SEQ ID NO: 134646 - DNA, 25 bp, SARS Virus
catcttttatatcgttccgtatctc

SEQ ID NO: 134647 - DNA, 25 bp, SARS Virus
atcttttatatacttccgtatctcc

SEQ ID NO: 134648 - DNA, 25 bp, SARS Virus
tcttttatatagctccgtatctcca

SEQ ID NO: 134649 - DNA, 25 bp, SARS Virus
cttttatatagtcccgtatctccat

SEQ ID NO: 134650 - DNA, 25 bp, SARS Virus
ttttatatagttccgtatctccatg

SEQ ID NO: 134651 - DNA, 25 bp, SARS Virus
tttatatagttccgtatctccatgt

SEQ ID NO: 134652 - DNA, 25 bp, SARS Virus
ttatatagttccctatctccatgtt

SEQ ID NO: 134653 - DNA, 25 bp, SARS Virus
tatatagttccgcatctccatgttt

SEQ ID NO: 134654 - DNA, 25 bp, SARS Virus
atatagttccgtctctccatgtttt

SEQ ID NO: 134655 - DNA, 25 bp, SARS Virus
tatagttccgtacctccatgttttt

SEQ ID NO: 134656 - DNA, 25 bp, SARS Virus
atagttccgtatctccatgttttta

SEQ ID NO: 134657 - DNA, 25 bp, SARS Virus
tagttccgtatccccatgtttttaa

SEQ ID NO: 134658 - DNA, 25 bp, SARS Virus
agttccgtatctccatgtttttaac

SEQ ID NO: 134659 - DNA, 25 bp, SARS Virus
gttccgtatctccatgtttttaacg

SEQ ID NO: 134660 - DNA, 25 bp, SARS Virus
ttccgtatctccctgtttttaacgc

SEQ ID NO: 134661 - DNA, 25 bp, SARS Virus
tccgtatctccacgtttttaacgcg

SEQ ID NO: 134662 - DNA, 25 bp, SARS Virus
ccgtatctccatctttttaacgcgg

SEQ ID NO: 134663 - DNA, 25 bp, SARS Virus
cgtatctccatgcttttaacgcgga

SEQ ID NO: 134664 - DNA, 25 bp, SARS Virus
gtatctccatgtctttaacgcggag

SEQ ID NO: 134665 - DNA, 25 bp, SARS Virus
tatctccatgttcttaacgcggagg

SEQ ID NO: 134666 - DNA, 25 bp, SARS Virus
atctccatgtttctaacgcggaggt

SEQ ID NO: 134667 - DNA, 25 bp, SARS Virus
tctccatgttttcaacgcggaggta

SEQ ID NO: 134668 - DNA, 25 bp, SARS Virus
ctccatgtttttcacgcggaggtat

SEQ ID NO: 134669 - DNA, 25 bp, SARS Virus
tccatgtttttaccgcggaggtatg

SEQ ID NO: 134670 - DNA, 25 bp, SARS Virus
ccatgtttttaacgcggaggtatgg

SEQ ID NO: 134671 - DNA, 25 bp, SARS Virus
catgtttttaacccggaggtatgga

SEQ ID NO: 134672 - DNA, 25 bp, SARS Virus
atgtttttaacgcggaggtatggac

SEQ ID NO: 134673 - DNA, 25 bp, SARS Virus
tgtttttaacgccgaggtatggacg

SEQ ID NO: 134674 - DNA, 25 bp, SARS Virus
gtttttaacgcgcaggtatggacgt

SEQ ID NO: 134675 - DNA, 25 bp, SARS Virus
tttttaacgcggcggtatggacgtc

SEQ ID NO: 134676 - DNA, 25 bp, SARS Virus
ttttaacgcggacgtatggacgtcg

SEQ ID NO: 134677 - DNA, 25 bp, SARS Virus
tttaacgcggagctatggacgtcgc

SEQ ID NO: 134678 - DNA, 25 bp, SARS Virus
ttaacgcggaggcatggacgtcgct

SEQ ID NO: 134679 - DNA, 25 bp, SARS Virus
taacgcggaggtctggacgtcgctg

SEQ ID NO: 134680 - DNA, 25 bp, SARS Virus
aacgcggaggtacggacgtcgctgt

SEQ ID NO: 134681 - DNA, 25 bp, SARS Virus
acgcggaggtatcgacgtcgctgtt

SEQ ID NO: 134682 - DNA, 25 bp, SARS Virus
cgcggaggtatgcacgtcgctgttc

SEQ ID NO: 134683 - DNA, 25 bp, SARS Virus
gcggaggtatggccgtcgctgttcg

SEQ ID NO: 134684 - DNA, 25 bp, SARS Virus
cggaggtatggacgtcgctgttcgt

SEQ ID NO: 134685 - DNA, 25 bp, SARS Virus
ggaggtatggacctcgctgttcgtt

SEQ ID NO: 134686 - DNA, 25 bp, SARS Virus
gaggtatggacgccgctgttcgttt

SEQ ID NO: 134687 - DNA, 25 bp, SARS Virus
aggtatggacgtcgctgttcgtttt

SEQ ID NO: 134688 - DNA, 25 bp, SARS Virus
ggtatggacgtccctgttcgttttc

SEQ ID NO: 134689 - DNA, 25 bp, SARS Virus
gtatggacgtcgctgttcgttttct

SEQ ID NO: 134690 - DNA, 25 bp, SARS Virus
tatggacgtcgccgttcgttttcta

SEQ ID NO: 134691 - DNA, 25 bp, SARS Virus
atggacgtcgctcttcgttttctac

SEQ ID NO: 134692 - DNA, 25 bp, SARS Virus
tggacgtcgctgctcgttttctaca

SEQ ID NO: 134693 - DNA, 25 bp, SARS Virus
ggacgtcgctgtccgttttctacac

SEQ ID NO: 134694 - DNA, 25 bp, SARS Virus
gacgtcgctgttcgttttctacact

SEQ ID NO: 134695 - DNA, 25 bp, SARS Virus
acgtcgctgttccttttctacactt

SEQ ID NO: 134696 - DNA, 25 bp, SARS Virus
cgtcgctgttcgctttctacactta

SEQ ID NO: 134697 - DNA, 25 bp, SARS Virus
gtcgctgttcgtcttctacacttat

SEQ ID NO: 134698 - DNA, 25 bp, SARS Virus
tcgctgttcgttctctacacttatc

SEQ ID NO: 134699 - DNA, 25 bp, SARS Virus
cgctgttcgtttcctacacttatct

SEQ ID NO: 134700 - DNA, 25 bp, SARS Virus
gctgttcgttttctacacttatcta

SEQ ID NO: 134701 - DNA, 25 bp, SARS Virus
ctgttcgttttccacacttatctac

SEQ ID NO: 134702 - DNA, 25 bp, SARS Virus
tgttcgttttctccacttatctacc

SEQ ID NO: 134703 - DNA, 25 bp, SARS Virus
gttcgttttctacacttatctacca

SEQ ID NO: 134704 - DNA, 25 bp, SARS Virus
ttcgttttctacccttatctaccat

SEQ ID NO: 134705 - DNA, 25 bp, SARS Virus
tcgttttctacacttatctaccatt

SEQ ID NO: 134706 - DNA, 25 bp, SARS Virus
cgttttctacacctatctaccattg

SEQ ID NO: 134707 - DNA, 25 bp, SARS Virus
gttttctacactcatctaccattgt

SEQ ID NO: 134708 - DNA, 25 bp, SARS Virus
ttttctacacttctctaccattgtt

SEQ ID NO: 134709 - DNA, 25 bp, SARS Virus
tttctacacttacctaccattgttt

SEQ ID NO: 134710 - DNA, 25 bp, SARS Virus
ttctacacttatctaccattgttta

SEQ ID NO: 134711 - DNA, 25 bp, SARS Virus
tctacacttatccaccattgtttat

SEQ ID NO: 134712 - DNA, 25 bp, SARS Virus
ctacacttatctcccattgtttatc

SEQ ID NO: 134713 - DNA, 25 bp, SARS Virus
tacacttatctaccattgtttatcg

SEQ ID NO: 134714 - DNA, 25 bp, SARS Virus
acacttatctaccattgtttatcgt

SEQ ID NO: 134715 - DNA, 25 bp, SARS Virus
cacttatctacccttgtttatcgtc

SEQ ID NO: 134716 - DNA, 25 bp, SARS Virus
acttatctaccactgtttatcgtcg

SEQ ID NO: 134717 - DNA, 25 bp, SARS Virus
cttatctaccatcgtttatcgtcgt

SEQ ID NO: 134718 - DNA, 25 bp, SARS Virus
ttatctaccattctttatcgtcgtc

SEQ ID NO: 134719 - DNA, 25 bp, SARS Virus
tatctaccattgcttatcgtcgtca

SEQ ID NO: 134720 - DNA, 25 bp, SARS Virus
atctaccattgtctatcgtcgtcat

SEQ ID NO: 134721 - DNA, 25 bp, SARS Virus
aggacttctcgggagctaacacaca

SEQ ID NO: 134722 - DNA, 25 bp, SARS Virus
ggacttctcggcggctaacacacat

SEQ ID NO: 134723 - DNA, 25 bp, SARS Virus
gacttctcggcagctaacacacata

SEQ ID NO: 134724 - DNA, 25 bp, SARS Virus
acttctcggcaggtaacacacataa

SEQ ID NO: 134725 - DNA, 25 bp, SARS Virus
cttctcggcagcgaacacacataaa

SEQ ID NO: 134726 - DNA, 25 bp, SARS Virus
ttctcggcagctgacacacataaac

SEQ ID NO: 134727 - DNA, 25 bp, SARS Virus
tctcggcagctagcacacataaacg

SEQ ID NO: 134728 - DNA, 25 bp, SARS Virus
ctcggcagctaagacacataaacgt

SEQ ID NO: 134729 - DNA, 25 bp, SARS Virus
tcggcagctaacgcacataaacgtg

SEQ ID NO: 134730 - DNA, 25 bp, SARS Virus
cggcagctaacagacataaacgtgt

SEQ ID NO: 134731 - DNA, 25 bp, SARS Virus
ggcagctaacacgcataaacgtgta

SEQ ID NO: 134732 - DNA, 25 bp, SARS Virus
gcagctaacacagataaacgtgtaa

SEQ ID NO: 134733 - DNA, 25 bp, SARS Virus
cagctaacacacgtaaacgtgtaag

SEQ ID NO: 134734 - DNA, 25 bp, SARS Virus
agctaacacacagaaacgtgtaagc

SEQ ID NO: 134735 - DNA, 25 bp, SARS Virus
gctaacacacatgaacgtgtaagcc

SEQ ID NO: 134736 - DNA, 25 bp, SARS Virus
ctaacacacatagacgtgtaagcca

SEQ ID NO: 134737 - DNA, 25 bp, SARS Virus
taacacacataagcgtgtaagccac

SEQ ID NO: 134738 - DNA, 25 bp, SARS Virus
aacacacataaaggtgtaagccacc

SEQ ID NO: 134739 - DNA, 25 bp, SARS Virus
acacacataaacgtgtaagccaccc

SEQ ID NO: 134740 - DNA, 25 bp, SARS Virus
cacacataaacgggtaagccaccca

SEQ ID NO: 134741 - DNA, 25 bp, SARS Virus
acacataaacgtgtaagccacccag

SEQ ID NO: 134742 - DNA, 25 bp, SARS Virus
cacataaacgtggaagccacccaga

SEQ ID NO: 134743 - DNA, 25 bp, SARS Virus
acataaacgtgtgagccacccagaa

SEQ ID NO: 134744 - DNA, 25 bp, SARS Virus
cataaacgtgtaggccacccagaaa

SEQ ID NO: 134745 - DNA, 25 bp, SARS Virus
ataaacgtgtaagccacccagaaat

SEQ ID NO: 134746 - DNA, 25 bp, SARS Virus
taaacgtgtaaggcacccagaaatt

SEQ ID NO: 134747 - DNA, 25 bp, SARS Virus
aaacgtgtaagcgacccagaaattg

SEQ ID NO: 134748 - DNA, 25 bp, SARS Virus
aacgtgtaagccgcccagaaattgt

SEQ ID NO: 134749 - DNA, 25 bp, SARS Virus
acgtgtaagccagccagaaattgtt

SEQ ID NO: 134750 - DNA, 25 bp, SARS Virus
cgtgtaagccacgcagaaattgttc

SEQ ID NO: 134751 - DNA, 25 bp, SARS Virus
gtgtaagccaccgagaaattgttcg

SEQ ID NO: 134752 - DNA, 25 bp, SARS Virus
tgtaagccacccggaaattgttcga

SEQ ID NO: 134753 - DNA, 25 bp, SARS Virus
gtaagccacccagaaattgttcgaa

SEQ ID NO: 134754 - DNA, 25 bp, SARS Virus
taagccacccaggaattgttcgaac

SEQ ID NO: 134755 - DNA, 25 bp, SARS Virus
aagccacccagagattgttcgaaca

SEQ ID NO: 134756 - DNA, 25 bp, SARS Virus
agccacccagaagttgttcgaacaa

SEQ ID NO: 134757 - DNA, 25 bp, SARS Virus
gccacccagaaagtgttcgaacaat

SEQ ID NO: 134758 - DNA, 25 bp, SARS Virus
ccacccagaaatggttcgaacaatt

SEQ ID NO: 134759 - DNA, 25 bp, SARS Virus
cacccagaaattgttcgaacaattt

SEQ ID NO: 134760 - DNA, 25 bp, SARS Virus
acccagaaattggtcgaacaatttc

SEQ ID NO: 134761 - DNA, 25 bp, SARS Virus
cccagaaattgtgcgaacaatttct

SEQ ID NO: 134762 - DNA, 25 bp, SARS Virus
ccagaaattgttggaacaatttcta

SEQ ID NO: 134763 - DNA, 25 bp, SARS Virus
cagaaattgttcgaacaatttctac

SEQ ID NO: 134764 - DNA, 25 bp, SARS Virus
agaaattgttcggacaatttctact

SEQ ID NO: 134765 - DNA, 25 bp, SARS Virus
gaaattgttcgagcaatttctactt

SEQ ID NO: 134766 - DNA, 25 bp, SARS Virus
aaattgttcgaagaatttctacttc

SEQ ID NO: 134767 - DNA, 25 bp, SARS Virus
aattgttcgaacgatttctacttct

SEQ ID NO: 134768 - DNA, 25 bp, SARS Virus
attgttcgaacagtttctacttctt

SEQ ID NO: 134769 - DNA, 25 bp, SARS Virus
ttgttcgaacaagttctacttctta

SEQ ID NO: 134770 - DNA, 25 bp, SARS Virus
tgttcgaacaatgtctacttcttac

SEQ ID NO: 134771 - DNA, 25 bp, SARS Virus
gttcgaacaattgctacttcttaca

SEQ ID NO: 134772 - DNA, 25 bp, SARS Virus
ttcgaacaatttgtacttcttacat

SEQ ID NO: 134773 - DNA, 25 bp, SARS Virus
tcgaacaatttcgacttcttacatc

SEQ ID NO: 134774 - DNA, 25 bp, SARS Virus
cgaacaatttctgcttcttacatcg

SEQ ID NO: 134775 - DNA, 25 bp, SARS Virus
gaacaatttctagttcttacatcgt

SEQ ID NO: 134776 - DNA, 25 bp, SARS Virus
aacaatttctacgtcttacatcgta

SEQ ID NO: 134777 - DNA, 25 bp, SARS Virus
acaatttctactgcttacatcgtaa

SEQ ID NO: 134778 - DNA, 25 bp, SARS Virus
caatttctacttgttacatcgtaaa

SEQ ID NO: 134779 - DNA, 25 bp, SARS Virus
aatttctacttcgtacatcgtaaaa

SEQ ID NO: 134780 - DNA, 25 bp, SARS Virus
atttctacttctgacatcgtaaaag

SEQ ID NO: 134781 - DNA, 25 bp, SARS Virus
tttctacttcttgcatcgtaaaagt

SEQ ID NO: 134782 - DNA, 25 bp, SARS Virus
ttctacttcttagatcgtaaaagtt

SEQ ID NO: 134783 - DNA, 25 bp, SARS Virus
tctacttcttacgtcgtaaaagtta

SEQ ID NO: 134784 - DNA, 25 bp, SARS Virus
ctacttcttacagcgtaaaagttat

SEQ ID NO: 134785 - DNA, 25 bp, SARS Virus
tacttcttacatggtaaaagttatg

SEQ ID NO: 134786 - DNA, 25 bp, SARS Virus
acttcttacatcgtaaaagttatgg

SEQ ID NO: 134787 - DNA, 25 bp, SARS Virus
cttcttacatcggaaaagttatggt

SEQ ID NO: 134788 - DNA, 25 bp, SARS Virus
ttcttacatcgtgaaagttatggtc

SEQ ID NO: 134789 - DNA, 25 bp, SARS Virus
tcttacatcgtagaagttatggtca

SEQ ID NO: 134790 - DNA, 25 bp, SARS Virus
cttacatcgtaagagttatggtcac

SEQ ID NO: 134791 - DNA, 25 bp, SARS Virus
ttacatcgtaaaggttatggtcaca

SEQ ID NO: 134792 - DNA, 25 bp, SARS Virus
tacatcgtaaaagttatggtcacag

SEQ ID NO: 134793 - DNA, 25 bp, SARS Virus
acatcgtaaaaggtatggtcacaga

SEQ ID NO: 134794 - DNA, 25 bp, SARS Virus
catcgtaaaagtgatggtcacagac

SEQ ID NO: 134795 - DNA, 25 bp, SARS Virus
atcgtaaaagttgtggtcacagaca

SEQ ID NO: 134796 - DNA, 25 bp, SARS Virus
tcgtaaaagttagggtcacagacat

SEQ ID NO: 134797 - DNA, 25 bp, SARS Virus
cgtaaaagttatggtcacagacatc

SEQ ID NO: 134798 - DNA, 25 bp, SARS Virus
gtaaaagttatggtcacagacatca

SEQ ID NO: 134799 - DNA, 25 bp, SARS Virus
taaaagttatgggcacagacatcat

SEQ ID NO: 134800 - DNA, 25 bp, SARS Virus
aaaagttatggtgacagacatcatt

SEQ ID NO: 134801 - DNA, 25 bp, SARS Virus
aaagttatggtcgcagacatcatta

SEQ ID NO: 134802 - DNA, 25 bp, SARS Virus
aagttatggtcagagacatcattaa

SEQ ID NO: 134803 - DNA, 25 bp, SARS Virus
agttatggtcacggacatcattaaa

SEQ ID NO: 134804 - DNA, 25 bp, SARS Virus
gttatggtcacagacatcattaaac

SEQ ID NO: 134805 - DNA, 25 bp, SARS Virus
ttatggtcacaggcatcattaaaca

SEQ ID NO: 134806 - DNA, 25 bp, SARS Virus
tatggtcacagagatcattaaacac

SEQ ID NO: 134807 - DNA, 25 bp, SARS Virus
atggtcacagacgtcattaaacaca

SEQ ID NO: 134808 - DNA, 25 bp, SARS Virus
tggtcacagacagcattaaacacat

SEQ ID NO: 134809 - DNA, 25 bp, SARS Virus
ggtcacagacatgattaaacacatc

SEQ ID NO: 134810 - DNA, 25 bp, SARS Virus
gtcacagacatcgttaaacacatct

SEQ ID NO: 134811 - DNA, 25 bp, SARS Virus
tcacagacatcagtaaacacatctg

SEQ ID NO: 134812 - DNA, 25 bp, SARS Virus
cacagacatcatgaaacacatctga

SEQ ID NO: 134813 - DNA, 25 bp, SARS Virus
acagacatcattgaacacatctgag

SEQ ID NO: 134814 - DNA, 25 bp, SARS Virus
cagacatcattagacacatctgagt

SEQ ID NO: 134815 - DNA, 25 bp, SARS Virus
agacatcattaagcacatctgagtt

SEQ ID NO: 134816 - DNA, 25 bp, SARS Virus
gacatcattaaagacatctgagttc

SEQ ID NO: 134817 - DNA, 25 bp, SARS Virus
acatcattaaacgcatctgagttcg

SEQ ID NO: 134818 - DNA, 25 bp, SARS Virus
catcattaaacagatctgagttcga

SEQ ID NO: 134819 - DNA, 25 bp, SARS Virus
atcattaaacacgtctgagttcgac

SEQ ID NO: 134820 - DNA, 25 bp, SARS Virus
tcattaaacacagctgagttcgacc

SEQ ID NO: 134821 - DNA, 25 bp, SARS Virus
cattaaacacatgtgagttcgacca

SEQ ID NO: 134822 - DNA, 25 bp, SARS Virus
attaaacacatcggagttcgaccat

SEQ ID NO: 134823 - DNA, 25 bp, SARS Virus
ttaaacacatctgagttcgaccatc

SEQ ID NO: 134824 - DNA, 25 bp, SARS Virus
taaacacatctgggttcgaccatca

SEQ ID NO: 134825 - DNA, 25 bp, SARS Virus
aaacacatctgagttcgaccatcat

SEQ ID NO: 134826 - DNA, 25 bp, SARS Virus
aacacatctgaggtcgaccatcatt

SEQ ID NO: 134827 - DNA, 25 bp, SARS Virus
acacatctgagtgcgaccatcattt

SEQ ID NO: 134828 - DNA, 25 bp, SARS Virus
cacatctgagttggaccatcatttg

SEQ ID NO: 134829 - DNA, 25 bp, SARS Virus
acatctgagttcgaccatcatttga

SEQ ID NO: 134830 - DNA, 25 bp, SARS Virus
catctgagttcggccatcatttgaa

SEQ ID NO: 134831 - DNA, 25 bp, SARS Virus
atctgagttcgagcatcatttgaag

SEQ ID NO: 134832 - DNA, 25 bp, SARS Virus
tctgagttcgacgatcatttgaagc

SEQ ID NO: 134833 - DNA, 25 bp, SARS Virus
ctgagttcgaccgtcatttgaagcc

SEQ ID NO: 134834 - DNA, 25 bp, SARS Virus
tgagttcgaccagcatttgaagcca

SEQ ID NO: 134835 - DNA, 25 bp, SARS Virus
gagttcgaccatgatttgaagccac

SEQ ID NO: 134836 - DNA, 25 bp, SARS Virus
agttcgaccatcgtttgaagccact

SEQ ID NO: 134837 - DNA, 25 bp, SARS Virus
gttcgaccatcagttgaagccactt

SEQ ID NO: 134838 - DNA, 25 bp, SARS Virus
ttcgaccatcatgtgaagccacttt

SEQ ID NO: 134839 - DNA, 25 bp, SARS Virus
tcgaccatcattggaagccacttta

SEQ ID NO: 134840 - DNA, 25 bp, SARS Virus
cgaccatcatttgaagccactttat

SEQ ID NO: 134841 - DNA, 25 bp, SARS Virus
gaccatcatttggagccactttatc

SEQ ID NO: 134842 - DNA, 25 bp, SARS Virus
accatcatttgaggccactttatcg

SEQ ID NO: 134843 - DNA, 25 bp, SARS Virus
ccatcatttgaagccactttatcgg

SEQ ID NO: 134844 - DNA, 25 bp, SARS Virus
catcatttgaaggcactttatcggt

SEQ ID NO: 134845 - DNA, 25 bp, SARS Virus
atcatttgaagcgactttatcggta

SEQ ID NO: 134846 - DNA, 25 bp, SARS Virus
tcatttgaagccgctttatcggtac

SEQ ID NO: 134847 - DNA, 25 bp, SARS Virus
catttgaagccagtttatcggtaca

SEQ ID NO: 134848 - DNA, 25 bp, SARS Virus
atttgaagccacgttatcggtacat

SEQ ID NO: 134849 - DNA, 25 bp, SARS Virus
tttgaagccactgtatcggtacatg

SEQ ID NO: 134850 - DNA, 25 bp, SARS Virus
ttgaagccacttgatcggtacatgt

SEQ ID NO: 134851 - DNA, 25 bp, SARS Virus
tgaagccactttgtcggtacatgtt

SEQ ID NO: 134852 - DNA, 25 bp, SARS Virus
gaagccactttagcggtacatgttg

SEQ ID NO: 134853 - DNA, 25 bp, SARS Virus
aagccactttatgggtacatgttgc

SEQ ID NO: 134854 - DNA, 25 bp, SARS Virus
agccactttatcggtacatgttgct

SEQ ID NO: 134855 - DNA, 25 bp, SARS Virus
gccactttatcggtacatgttgctg

SEQ ID NO: 134856 - DNA, 25 bp, SARS Virus
ccactttatcgggacatgttgctgt

SEQ ID NO: 134857 - DNA, 25 bp, SARS Virus
cactttatcggtgcatgttgctgta

SEQ ID NO: 134858 - DNA, 25 bp, SARS Virus
actttatcggtagatgttgctgtat

SEQ ID NO: 134859 - DNA, 25 bp, SARS Virus
ctttatcggtacgtgttgctgtatc

SEQ ID NO: 134860 - DNA, 25 bp, SARS Virus
tttatcggtacaggttgctgtatca

SEQ ID NO: 134861 - DNA, 25 bp, SARS Virus
ttatcggtacatgttgctgtatcag

SEQ ID NO: 134862 - DNA, 25 bp, SARS Virus
tatcggtacatggtgctgtatcaga

SEQ ID NO: 134863 - DNA, 25 bp, SARS Virus
atcggtacatgtggctgtatcagaa

SEQ ID NO: 134864 - DNA, 25 bp, SARS Virus
tcggtacatgttgctgtatcagaaa

SEQ ID NO: 134865 - DNA, 25 bp, SARS Virus
cggtacatgttggtgtatcagaaat

SEQ ID NO: 134866 - DNA, 25 bp, SARS Virus
ggtacatgttgcggtatcagaaatt

SEQ ID NO: 134867 - DNA, 25 bp, SARS Virus
gtacatgttgctgtatcagaaattg

SEQ ID NO: 134868 - DNA, 25 bp, SARS Virus
tacatgttgctggatcagaaattgt

SEQ ID NO: 134869 - DNA, 25 bp, SARS Virus
acatgttgctgtgtcagaaattgtg

SEQ ID NO: 134870 - DNA, 25 bp, SARS Virus
catgttgctgtagcagaaattgtgg

SEQ ID NO: 134871 - DNA, 25 bp, SARS Virus
atgttgctgtatgagaaattgtgga

SEQ ID NO: 134872 - DNA, 25 bp, SARS Virus
tgttgctgtatcggaaattgtggac

SEQ ID NO: 134873 - DNA, 25 bp, SARS Virus
gttgctgtatcagaaattgtggact

SEQ ID NO: 134874 - DNA, 25 bp, SARS Virus
ttgctgtatcaggaattgtggactc

SEQ ID NO: 134875 - DNA, 25 bp, SARS Virus
tgctgtatcagagattgtggactca

SEQ ID NO: 134876 - DNA, 25 bp, SARS Virus
gctgtatcagaagttgtggactcac

SEQ ID NO: 134877 - DNA, 25 bp, SARS Virus
ctgtatcagaaagtgtggactcacg

SEQ ID NO: 134878 - DNA, 25 bp, SARS Virus
tgtatcagaaatggtggactcacgg

SEQ ID NO: 134879 - DNA, 25 bp, SARS Virus
gtatcagaaattgtggactcacgga

SEQ ID NO: 134880 - DNA, 25 bp, SARS Virus
tatcagaaattggggactcacggat

SEQ ID NO: 134881 - DNA, 25 bp, SARS Virus
atcagaaattgtggactcacggata

SEQ ID NO: 134882 - DNA, 25 bp, SARS Virus
tcagaaattgtggactcacggatag

SEQ ID NO: 134883 - DNA, 25 bp, SARS Virus
cagaaattgtgggctcacggatagg

SEQ ID NO: 134884 - DNA, 25 bp, SARS Virus
agaaattgtggagtcacggatagga

SEQ ID NO: 134885 - DNA, 25 bp, SARS Virus
gaaattgtggacgcacggataggag

SEQ ID NO: 134886 - DNA, 25 bp, SARS Virus
aaattgtggactgacggataggagt

SEQ ID NO: 134887 - DNA, 25 bp, SARS Virus
aattgtggactcgcggataggagtc

SEQ ID NO: 134888 - DNA, 25 bp, SARS Virus
attgtggactcagggataggagtct

SEQ ID NO: 134889 - DNA, 25 bp, SARS Virus
ttgtggactcacggataggagtctt

SEQ ID NO: 134890 - DNA, 25 bp, SARS Virus
tgtggactcacggataggagtctta

SEQ ID NO: 134891 - DNA, 25 bp, SARS Virus
gtggactcacgggtaggagtcttat

SEQ ID NO: 134892 - DNA, 25 bp, SARS Virus
tggactcacggagaggagtcttatt

SEQ ID NO: 134893 - DNA, 25 bp, SARS Virus
ggactcacggatgggagtcttattg

SEQ ID NO: 134894 - DNA, 25 bp, SARS Virus
gactcacggataggagtcttattgg

SEQ ID NO: 134895 - DNA, 25 bp, SARS Virus
actcacggataggagtcttattggt

SEQ ID NO: 134896 - DNA, 25 bp, SARS Virus
ctcacggataggggtcttattggtg

SEQ ID NO: 134897 - DNA, 25 bp, SARS Virus
tcacggataggagtcttattggtgg

SEQ ID NO: 134898 - DNA, 25 bp, SARS Virus
cacggataggaggcttattggtggt

SEQ ID NO: 134899 - DNA, 25 bp, SARS Virus
acggataggagtgttattggtggtt

SEQ ID NO: 134900 - DNA, 25 bp, SARS Virus
cggataggagtcgtattggtggtta

SEQ ID NO: 134901 - DNA, 25 bp, SARS Virus
ggataggagtctgattggtggttaa

SEQ ID NO: 134902 - DNA, 25 bp, SARS Virus
gataggagtcttgttggtggttaaa

SEQ ID NO: 134903 - DNA, 25 bp, SARS Virus
ataggagtcttagtggtggttaaac

SEQ ID NO: 134904 - DNA, 25 bp, SARS Virus
taggagtcttatgggtggttaaacc

SEQ ID NO: 134905 - DNA, 25 bp, SARS Virus
aggagtcttattggtggttaaacca

SEQ ID NO: 134906 - DNA, 25 bp, SARS Virus
ggagtcttattggtggttaaaccat

SEQ ID NO: 134907 - DNA, 25 bp, SARS Virus
gagtcttattgggggttaaaccatc

SEQ ID NO: 134908 - DNA, 25 bp, SARS Virus
agtcttattggtggttaaaccatca

SEQ ID NO: 134909 - DNA, 25 bp, SARS Virus
gtcttattggtggttaaaccatcag

SEQ ID NO: 134910 - DNA, 25 bp, SARS Virus
tcttattggtgggtaaaccatcaga

SEQ ID NO: 134911 - DNA, 25 bp, SARS Virus
cttattggtggtgaaaccatcagaa

SEQ ID NO: 134912 - DNA, 25 bp, SARS Virus
ttattggtggttgaaccatcagaag

SEQ ID NO: 134913 - DNA, 25 bp, SARS Virus
tattggtggttagaccatcagaaga

SEQ ID NO: 134914 - DNA, 25 bp, SARS Virus
attggtggttaagccatcagaagaa

SEQ ID NO: 134915 - DNA, 25 bp, SARS Virus
ttggtggttaaagcatcagaagaaa

SEQ ID NO: 134916 - DNA, 25 bp, SARS Virus
tggtggttaaacgatcagaagaaac

SEQ ID NO: 134917 - DNA, 25 bp, SARS Virus
ggtggttaaaccgtcagaagaaact

SEQ ID NO: 134918 - DNA, 25 bp, SARS Virus
gtggttaaaccagcagaagaaactc

SEQ ID NO: 134919 - DNA, 25 bp, SARS Virus
tggttaaaccatgagaagaaactca

SEQ ID NO: 134920 - DNA, 25 bp, SARS Virus
ggttaaaccatcggaagaaactcaa

SEQ ID NO: 134921 - DNA, 25 bp, SARS Virus
gttaaaccatcagaagaaactcaaa

SEQ ID NO: 134922 - DNA, 25 bp, SARS Virus
ttaaaccatcaggagaaactcaaaa

SEQ ID NO: 134923 - DNA, 25 bp, SARS Virus
taaaccatcagaggaaactcaaaac

SEQ ID NO: 134924 - DNA, 25 bp, SARS Virus
aaaccatcagaagaaactcaaaacc

SEQ ID NO: 134925 - DNA, 25 bp, SARS Virus
aaccatcagaaggaactcaaaacca

SEQ ID NO: 134926 - DNA, 25 bp, SARS Virus
accatcagaagagactcaaaaccac

SEQ ID NO: 134927 - DNA, 25 bp, SARS Virus
ccatcagaagaagctcaaaaccaca

SEQ ID NO: 134928 - DNA, 25 bp, SARS Virus
catcagaagaaagtcaaaaccacaa

SEQ ID NO: 134929 - DNA, 25 bp, SARS Virus
atcagaagaaacgcaaaaccacaac

SEQ ID NO: 134930 - DNA, 25 bp, SARS Virus
tcagaagaaactgaaaaccacaact

SEQ ID NO: 134931 - DNA, 25 bp, SARS Virus
cagaagaaactcgaaaccacaactt

SEQ ID NO: 134932 - DNA, 25 bp, SARS Virus
agaagaaactcagaaccacaacttt

SEQ ID NO: 134933 - DNA, 25 bp, SARS Virus
gaagaaactcaagaccacaacttta

SEQ ID NO: 134934 - DNA, 25 bp, SARS Virus
aagaaactcaaagccacaactttac

SEQ ID NO: 134935 - DNA, 25 bp, SARS Virus
agaaactcaaaagcacaactttacg

SEQ ID NO: 134936 - DNA, 25 bp, SARS Virus
gaaactcaaaacgacaactttacgg

SEQ ID NO: 134937 - DNA, 25 bp, SARS Virus
aaactcaaaaccgcaactttacggc

SEQ ID NO: 134938 - DNA, 25 bp, SARS Virus
aactcaaaaccagaactttacggca

SEQ ID NO: 134939 - DNA, 25 bp, SARS Virus
actcaaaaccacgactttacggcag

SEQ ID NO: 134940 - DNA, 25 bp, SARS Virus
ctcaaaaccacagctttacggcagt

SEQ ID NO: 134941 - DNA, 25 bp, SARS Virus
tcaaaaccacaagtttacggcagtg

SEQ ID NO: 134942 - DNA, 25 bp, SARS Virus
caaaaccacaacgttacggcagtgg

SEQ ID NO: 134943 - DNA, 25 bp, SARS Virus
aaaaccacaactgtacggcagtgga

SEQ ID NO: 134944 - DNA, 25 bp, SARS Virus
aaaccacaacttgacggcagtggaa

SEQ ID NO: 134945 - DNA, 25 bp, SARS Virus
aaccacaactttgcggcagtggaag

SEQ ID NO: 134946 - DNA, 25 bp, SARS Virus
accacaactttagggcagtggaagt

SEQ ID NO: 134947 - DNA, 25 bp, SARS Virus
ccacaactttacggcagtggaagtc

SEQ ID NO: 134948 - DNA, 25 bp, SARS Virus
cacaactttacggcagtggaagtca

SEQ ID NO: 134949 - DNA, 25 bp, SARS Virus
acaactttacgggagtggaagtcat

SEQ ID NO: 134950 - DNA, 25 bp, SARS Virus
caactttacggcggtggaagtcatt

SEQ ID NO: 134951 - DNA, 25 bp, SARS Virus
aactttacggcagtggaagtcattg

SEQ ID NO: 134952 - DNA, 25 bp, SARS Virus
actttacggcaggggaagtcattgc

SEQ ID NO: 134953 - DNA, 25 bp, SARS Virus
ctttacggcagtggaagtcattgct

SEQ ID NO: 134954 - DNA, 25 bp, SARS Virus
tttacggcagtggaagtcattgctg

SEQ ID NO: 134955 - DNA, 25 bp, SARS Virus
ttacggcagtgggagtcattgctgt

SEQ ID NO: 134956 - DNA, 25 bp, SARS Virus
tacggcagtggaggtcattgctgtt

SEQ ID NO: 134957 - DNA, 25 bp, SARS Virus
acggcagtggaagtcattgctgtta

SEQ ID NO: 134958 - DNA, 25 bp, SARS Virus
cggcagtggaaggcattgctgttaa

SEQ ID NO: 134959 - DNA, 25 bp, SARS Virus
ggcagtggaagtgattgctgttaac

SEQ ID NO: 134960 - DNA, 25 bp, SARS Virus
gcagtggaagtcgttgctgttaaca

SEQ ID NO: 134961 - DNA, 25 bp, SARS Virus
cagtggaagtcagtgctgttaacat

SEQ ID NO: 134962 - DNA, 25 bp, SARS Virus
agtggaagtcatggctgttaacata

SEQ ID NO: 134963 - DNA, 25 bp, SARS Virus
gtggaagtcattgctgttaacatag

SEQ ID NO: 134964 - DNA, 25 bp, SARS Virus
tggaagtcattggtgttaacataga

SEQ ID NO: 134965 - DNA, 25 bp, SARS Virus
ggaagtcattgcggttaacatagac

SEQ ID NO: 134966 - DNA, 25 bp, SARS Virus
gaagtcattgctgttaacatagaca

SEQ ID NO: 134967 - DNA, 25 bp, SARS Virus
aagtcattgctggtaacatagacac

SEQ ID NO: 134968 - DNA, 25 bp, SARS Virus
agtcattgctgtgaacatagacact

SEQ ID NO: 134969 - DNA, 25 bp, SARS Virus
gtcattgctgttgacatagacactg

SEQ ID NO: 134970 - DNA, 25 bp, SARS Virus
tcattgctgttagcatagacactgt

SEQ ID NO: 134971 - DNA, 25 bp, SARS Virus
cattgctgttaagatagacactgtg

SEQ ID NO: 134972 - DNA, 25 bp, SARS Virus
attgctgttaacgtagacactgtga

SEQ ID NO: 134973 - DNA, 25 bp, SARS Virus
ttgctgttaacagagacactgtgac

SEQ ID NO: 134974 - DNA, 25 bp, SARS Virus
tgctgttaacatggacactgtgaca

SEQ ID NO: 134975 - DNA, 25 bp, SARS Virus
gctgttaacatagacactgtgacaa

SEQ ID NO: 134976 - DNA, 25 bp, SARS Virus
ctgttaacataggcactgtgacaat

SEQ ID NO: 134977 - DNA, 25 bp, SARS Virus
tgttaacatagagactgtgacaata

SEQ ID NO: 134978 - DNA, 25 bp, SARS Virus
gttaacatagacgctgtgacaatat

SEQ ID NO: 134979 - DNA, 25 bp, SARS Virus
ttaacatagacagtgtgacaatata

SEQ ID NO: 134980 - DNA, 25 bp, SARS Virus
taacatagacacggtgacaatatac

SEQ ID NO: 134981 - DNA, 25 bp, SARS Virus
aacatagacactgtgacaatatacc

SEQ ID NO: 134982 - DNA, 25 bp, SARS Virus
acatagacactgggacaatatacca

SEQ ID NO: 134983 - DNA, 25 bp, SARS Virus
catagacactgtgacaatataccat

SEQ ID NO: 134984 - DNA, 25 bp, SARS Virus
atagacactgtggcaatataccata

SEQ ID NO: 134985 - DNA, 25 bp, SARS Virus
tagacactgtgagaatataccatat

SEQ ID NO: 134986 - DNA, 25 bp, SARS Virus
agacactgtgacgatataccatatg

SEQ ID NO: 134987 - DNA, 25 bp, SARS Virus
gacactgtgacagtataccatatgt

SEQ ID NO: 134988 - DNA, 25 bp, SARS Virus
acactgtgacaagataccatatgtc

SEQ ID NO: 134989 - DNA, 25 bp, SARS Virus
cactgtgacaatgtaccatatgtca

SEQ ID NO: 134990 - DNA, 25 bp, SARS Virus
actgtgacaatagaccatatgtcat

SEQ ID NO: 134991 - DNA, 25 bp, SARS Virus
ctgtgacaatatgccatatgtcatc

SEQ ID NO: 134992 - DNA, 25 bp, SARS Virus
tgtgacaatatagcatatgtcatca

SEQ ID NO: 134993 - DNA, 25 bp, SARS Virus
gtgacaatatacgatatgtcatcag

SEQ ID NO: 134994 - DNA, 25 bp, SARS Virus
tgacaatataccgtatgtcatcagt

SEQ ID NO: 134995 - DNA, 25 bp, SARS Virus
gacaatataccagatgtcatcagta

SEQ ID NO: 134996 - DNA, 25 bp, SARS Virus
acaatataccatgtgtcatcagtat

SEQ ID NO: 134997 - DNA, 25 bp, SARS Virus
caatataccataggtcatcagtatc

SEQ ID NO: 134998 - DNA, 25 bp, SARS Virus
aatataccatatgtcatcagtatca

SEQ ID NO: 134999 - DNA, 25 bp, SARS Virus
atataccatatggcatcagtatcaa

SEQ ID NO: 135000 - DNA, 25 bp, SARS Virus
tataccatatgtgatcagtatcaat

SEQ ID NO: 135001 - DNA, 25 bp, SARS Virus
ataccatatgtcgtcagtatcaata

SEQ ID NO: 135002 - DNA, 25 bp, SARS Virus
taccatatgtcagcagtatcaatac

SEQ ID NO: 135003 - DNA, 25 bp, SARS Virus
accatatgtcatgagtatcaataca

SEQ ID NO: 135004 - DNA, 25 bp, SARS Virus
ccatatgtcatcggtatcaatacac

SEQ ID NO: 135005 - DNA, 25 bp, SARS Virus
catatgtcatcagtatcaatacaca

SEQ ID NO: 135006 - DNA, 25 bp, SARS Virus
atatgtcatcaggatcaatacacac

SEQ ID NO: 135007 - DNA, 25 bp, SARS Virus
tatgtcatcagtgtcaatacacaca

SEQ ID NO: 135008 - DNA, 25 bp, SARS Virus
atgtcatcagtagcaatacacacac

SEQ ID NO: 135009 - DNA, 25 bp, SARS Virus
tgtcatcagtatgaatacacacacg

SEQ ID NO: 135010 - DNA, 25 bp, SARS Virus
gtcatcagtatcgatacacacacgg

SEQ ID NO: 135011 - DNA, 25 bp, SARS Virus
tcatcagtatcagtacacacacggt

SEQ ID NO: 135012 - DNA, 25 bp, SARS Virus
catcagtatcaagacacacacggtc

SEQ ID NO: 135013 - DNA, 25 bp, SARS Virus
atcagtatcaatgcacacacggtcg

SEQ ID NO: 135014 - DNA, 25 bp, SARS Virus
tcagtatcaatagacacacggtcgt

SEQ ID NO: 135015 - DNA, 25 bp, SARS Virus
cagtatcaatacgcacacggtcgtt

SEQ ID NO: 135016 - DNA, 25 bp, SARS Virus
agtatcaatacagacacggtcgttt

SEQ ID NO: 135017 - DNA, 25 bp, SARS Virus
gtatcaatacacgcacggtcgtttg

SEQ ID NO: 135018 - DNA, 25 bp, SARS Virus
tatcaatacacagacggtcgtttgt

SEQ ID NO: 135019 - DNA, 25 bp, SARS Virus
atcaatacacacgcggtcgtttgtt

SEQ ID NO: 135020 - DNA, 25 bp, SARS Virus
tcaatacacacagggtcgtttgttt

SEQ ID NO: 135021 - DNA, 25 bp, SARS Virus
caatacacacacggtcgtttgtttc

SEQ ID NO: 135022 - DNA, 25 bp, SARS Virus
aatacacacacggtcgtttgtttca

SEQ ID NO: 135023 - DNA, 25 bp, SARS Virus
atacacacacgggcgtttgtttcat

SEQ ID NO: 135024 - DNA, 25 bp, SARS Virus
tacacacacggtggtttgtttcatc

SEQ ID NO: 135025 - DNA, 25 bp, SARS Virus
acacacacggtcgtttgtttcatca

SEQ ID NO: 135026 - DNA, 25 bp, SARS Virus
cacacacggtcggttgtttcatcaa

SEQ ID NO: 135027 - DNA, 25 bp, SARS Virus
acacacggtcgtgtgtttcatcaac

SEQ ID NO: 135028 - DNA, 25 bp, SARS Virus
cacacggtcgttggtttcatcaacc

SEQ ID NO: 135029 - DNA, 25 bp, SARS Virus
acacggtcgtttgtttcatcaaccg

SEQ ID NO: 135030 - DNA, 25 bp, SARS Virus
cacggtcgtttggttcatcaaccgt

SEQ ID NO: 135031 - DNA, 25 bp, SARS Virus
acggtcgtttgtgtcatcaaccgta

SEQ ID NO: 135032 - DNA, 25 bp, SARS Virus
cggtcgtttgttgcatcaaccgtag

SEQ ID NO: 135033 - DNA, 25 bp, SARS Virus
ggtcgtttgtttgatcaaccgtagt

SEQ ID NO: 135034 - DNA, 25 bp, SARS Virus
gtcgtttgtttcgtcaaccgtagta

SEQ ID NO: 135035 - DNA, 25 bp, SARS Virus
tcgtttgtttcagcaaccgtagtat

SEQ ID NO: 135036 - DNA, 25 bp, SARS Virus
cgtttgtttcatgaaccgtagtatt

SEQ ID NO: 135037 - DNA, 25 bp, SARS Virus
gtttgtttcatcgaccgtagtattt

SEQ ID NO: 135038 - DNA, 25 bp, SARS Virus
tttgtttcatcagccgtagtatttc

SEQ ID NO: 135039 - DNA, 25 bp, SARS Virus
ttgtttcatcaagcgtagtatttca

SEQ ID NO: 135040 - DNA, 25 bp, SARS Virus
tgtttcatcaacggtagtatttcat

SEQ ID NO: 135041 - DNA, 25 bp, SARS Virus
gtttcatcaaccgtagtatttcatt

SEQ ID NO: 135042 - DNA, 25 bp, SARS Virus
tttcatcaaccggagtatttcatta

SEQ ID NO: 135043 - DNA, 25 bp, SARS Virus
ttcatcaaccgtggtatttcattac

SEQ ID NO: 135044 - DNA, 25 bp, SARS Virus
tcatcaaccgtagtatttcattacc

SEQ ID NO: 135045 - DNA, 25 bp, SARS Virus
catcaaccgtaggatttcattaccc

SEQ ID NO: 135046 - DNA, 25 bp, SARS Virus
atcaaccgtagtgtttcattaccca

SEQ ID NO: 135047 - DNA, 25 bp, SARS Virus
tcaaccgtagtagttcattacccaa

SEQ ID NO: 135048 - DNA, 25 bp, SARS Virus
caaccgtagtatgtcattacccaag

SEQ ID NO: 135049 - DNA, 25 bp, SARS Virus
aaccgtagtattgcattacccaaga

SEQ ID NO: 135050 - DNA, 25 bp, SARS Virus
accgtagtatttgattacccaagaa

SEQ ID NO: 135051 - DNA, 25 bp, SARS Virus
ccgtagtatttcgttacccaagaac

SEQ ID NO: 135052 - DNA, 25 bp, SARS Virus
cgtagtatttcagtacccaagaacc

SEQ ID NO: 135053 - DNA, 25 bp, SARS Virus
gtagtatttcatgacccaagaacct

SEQ ID NO: 135054 - DNA, 25 bp, SARS Virus
tagtatttcattgcccaagaaccta

SEQ ID NO: 135055 - DNA, 25 bp, SARS Virus
agtatttcattagccaagaacctaa

SEQ ID NO: 135056 - DNA, 25 bp, SARS Virus
gtatttcattacgcaagaacctaaa

SEQ ID NO: 135057 - DNA, 25 bp, SARS Virus
tatttcattaccgaagaacctaaac

SEQ ID NO: 135058 - DNA, 25 bp, SARS Virus
atttcattacccgagaacctaaacg

SEQ ID NO: 135059 - DNA, 25 bp, SARS Virus
tttcattacccaggaacctaaacgt

SEQ ID NO: 135060 - DNA, 25 bp, SARS Virus
ttcattacccaagaacctaaacgtg

SEQ ID NO: 135061 - DNA, 25 bp, SARS Virus
tcattacccaaggacctaaacgtga

SEQ ID NO: 135062 - DNA, 25 bp, SARS Virus
cattacccaagagcctaaacgtgaa

SEQ ID NO: 135063 - DNA, 25 bp, SARS Virus
attacccaagaagctaaacgtgaag

SEQ ID NO: 135064 - DNA, 25 bp, SARS Virus
ttacccaagaacgtaaacgtgaagg

SEQ ID NO: 135065 - DNA, 25 bp, SARS Virus
tacccaagaaccgaaacgtgaaggt

SEQ ID NO: 135066 - DNA, 25 bp, SARS Virus
acccaagaacctgaacgtgaaggtt

SEQ ID NO: 135067 - DNA, 25 bp, SARS Virus
cccaagaacctagacgtgaaggttg

SEQ ID NO: 135068 - DNA, 25 bp, SARS Virus
ccaagaacctaagcgtgaaggttgt

SEQ ID NO: 135069 - DNA, 25 bp, SARS Virus
caagaacctaaaggtgaaggttgtt

SEQ ID NO: 135070 - DNA, 25 bp, SARS Virus
aagaacctaaacgtgaaggttgttt

SEQ ID NO: 135071 - DNA, 25 bp, SARS Virus
agaacctaaacgggaaggttgtttc

SEQ ID NO: 135072 - DNA, 25 bp, SARS Virus
gaacctaaacgtgaaggttgtttcg

SEQ ID NO: 135073 - DNA, 25 bp, SARS Virus
aacctaaacgtggaggttgtttcgg

SEQ ID NO: 135074 - DNA, 25 bp, SARS Virus
acctaaacgtgagggttgtttcggt

SEQ ID NO: 135075 - DNA, 25 bp, SARS Virus
cctaaacgtgaaggttgtttcggtt

SEQ ID NO: 135076 - DNA, 25 bp, SARS Virus
ctaaacgtgaaggttgtttcggttg

SEQ ID NO: 135077 - DNA, 25 bp, SARS Virus
taaacgtgaagggtgtttcggttgt

SEQ ID NO: 135078 - DNA, 25 bp, SARS Virus
aaacgtgaaggtggtttcggttgta

SEQ ID NO: 135079 - DNA, 25 bp, SARS Virus
aacgtgaaggttgtttcggttgtag

SEQ ID NO: 135080 - DNA, 25 bp, SARS Virus
acgtgaaggttggttcggttgtaga

SEQ ID NO: 135081 - DNA, 25 bp, SARS Virus
cgtgaaggttgtgtcggttgtagag

SEQ ID NO: 135082 - DNA, 25 bp, SARS Virus
gtgaaggttgttgcggttgtagagt

SEQ ID NO: 135083 - DNA, 25 bp, SARS Virus
tgaaggttgtttgggttgtagagta

SEQ ID NO: 135084 - DNA, 25 bp, SARS Virus
gaaggttgtttcggttgtagagtat

SEQ ID NO: 135085 - DNA, 25 bp, SARS Virus
aaggttgtttcggttgtagagtatt

SEQ ID NO: 135086 - DNA, 25 bp, SARS Virus
aggttgtttcgggtgtagagtatta

SEQ ID NO: 135087 - DNA, 25 bp, SARS Virus
ggttgtttcggtggtagagtattat

SEQ ID NO: 135088 - DNA, 25 bp, SARS Virus
gttgtttcggttgtagagtattatt

SEQ ID NO: 135089 - DNA, 25 bp, SARS Virus
ttgtttcggttggagagtattatta

SEQ ID NO: 135090 - DNA, 25 bp, SARS Virus
tgtttcggttgtggagtattattaa

SEQ ID NO: 135091 - DNA, 25 bp, SARS Virus
gtttcggttgtagagtattattaag

SEQ ID NO: 135092 - DNA, 25 bp, SARS Virus
tttcggttgtagggtattattaaga

SEQ ID NO: 135093 - DNA, 25 bp, SARS Virus
ttcggttgtagagtattattaagat

SEQ ID NO: 135094 - DNA, 25 bp, SARS Virus
tcggttgtagaggattattaagatg

SEQ ID NO: 135095 - DNA, 25 bp, SARS Virus
cggttgtagagtgttattaagatgt

SEQ ID NO: 135096 - DNA, 25 bp, SARS Virus
ggttgtagagtagtattaagatgta

SEQ ID NO: 135097 - DNA, 25 bp, SARS Virus
gttgtagagtatgattaagatgtac

SEQ ID NO: 135098 - DNA, 25 bp, SARS Virus
ttgtagagtattgttaagatgtacg

SEQ ID NO: 135099 - DNA, 25 bp, SARS Virus
tgtagagtattagtaagatgtacgc

SEQ ID NO: 135100 - DNA, 25 bp, SARS Virus
gtagagtattatgaagatgtacgca

SEQ ID NO: 135101 - DNA, 25 bp, SARS Virus
tagagtattattgagatgtacgcaa

SEQ ID NO: 135102 - DNA, 25 bp, SARS Virus
agagtattattaggatgtacgcaac

SEQ ID NO: 135103 - DNA, 25 bp, SARS Virus
gagtattattaagatgtacgcaact

SEQ ID NO: 135104 - DNA, 25 bp, SARS Virus
agtattattaaggtgtacgcaacta

SEQ ID NO: 135105 - DNA, 25 bp, SARS Virus
gtattattaagaggtacgcaactac

SEQ ID NO: 135106 - DNA, 25 bp, SARS Virus
tattattaagatgtacgcaactacg

SEQ ID NO: 135107 - DNA, 25 bp, SARS Virus
attattaagatggacgcaactacgt

SEQ ID NO: 135108 - DNA, 25 bp, SARS Virus
ttattaagatgtgcgcaactacgta

SEQ ID NO: 135109 - DNA, 25 bp, SARS Virus
tattaagatgtaggcaactacgtaa

SEQ ID NO: 135110 - DNA, 25 bp, SARS Virus
attaagatgtacgcaactacgtaac

SEQ ID NO: 135111 - DNA, 25 bp, SARS Virus
ttaagatgtacggaactacgtaaca

SEQ ID NO: 135112 - DNA, 25 bp, SARS Virus
taagatgtacgcgactacgtaacat

SEQ ID NO: 135113 - DNA, 25 bp, SARS Virus
aagatgtacgcagctacgtaacatc

SEQ ID NO: 135114 - DNA, 25 bp, SARS Virus
agatgtacgcaagtacgtaacatct

SEQ ID NO: 135115 - DNA, 25 bp, SARS Virus
gatgtacgcaacgacgtaacatctt

SEQ ID NO: 135116 - DNA, 25 bp, SARS Virus
atgtacgcaactgcgtaacatcttt

SEQ ID NO: 135117 - DNA, 25 bp, SARS Virus
tgtacgcaactaggtaacatctttt

SEQ ID NO: 135118 - DNA, 25 bp, SARS Virus
gtacgcaactacgtaacatctttta

SEQ ID NO: 135119 - DNA, 25 bp, SARS Virus
tacgcaactacggaacatcttttat

SEQ ID NO: 135120 - DNA, 25 bp, SARS Virus
acgcaactacgtgacatcttttata

SEQ ID NO: 135121 - DNA, 25 bp, SARS Virus
cgcaactacgtagcatcttttatat

SEQ ID NO: 135122 - DNA, 25 bp, SARS Virus
gcaactacgtaagatcttttatata

SEQ ID NO: 135123 - DNA, 25 bp, SARS Virus
caactacgtaacgtcttttatatag

SEQ ID NO: 135124 - DNA, 25 bp, SARS Virus
aactacgtaacagcttttatatagt

SEQ ID NO: 135125 - DNA, 25 bp, SARS Virus
actacgtaacatgttttatatagtt

SEQ ID NO: 135126 - DNA, 25 bp, SARS Virus
ctacgtaacatcgtttatatagttc

SEQ ID NO: 135127 - DNA, 25 bp, SARS Virus
tacgtaacatctgttatatagttcc

SEQ ID NO: 135128 - DNA, 25 bp, SARS Virus
acgtaacatcttgtatatagttccg

SEQ ID NO: 135129 - DNA, 25 bp, SARS Virus
cgtaacatctttgatatagttccgt

SEQ ID NO: 135130 - DNA, 25 bp, SARS Virus
gtaacatcttttgtatagttccgta

SEQ ID NO: 135131 - DNA, 25 bp, SARS Virus
taacatcttttagatagttccgtat

SEQ ID NO: 135132 - DNA, 25 bp, SARS Virus
aacatcttttatgtagttccgtatc

SEQ ID NO: 135133 - DNA, 25 bp, SARS Virus
acatcttttatagagttccgtatct

SEQ ID NO: 135134 - DNA, 25 bp, SARS Virus
catcttttatatggttccgtatctc

SEQ ID NO: 135135 - DNA, 25 bp, SARS Virus
atcttttatatagttccgtatctcc

SEQ ID NO: 135136 - DNA, 25 bp, SARS Virus
tcttttatataggtccgtatctcca

SEQ ID NO: 135137 - DNA, 25 bp, SARS Virus
cttttatatagtgccgtatctccat

SEQ ID NO: 135138 - DNA, 25 bp, SARS Virus
ttttatatagttgcgtatctccatg

SEQ ID NO: 135139 - DNA, 25 bp, SARS Virus
tttatatagttcggtatctccatgt

SEQ ID NO: 135140 - DNA, 25 bp, SARS Virus
ttatatagttccgtatctccatgtt

SEQ ID NO: 135141 - DNA, 25 bp, SARS Virus
tatatagttccggatctccatgttt

SEQ ID NO: 135142 - DNA, 25 bp, SARS Virus
atatagttccgtgtctccatgtttt

SEQ ID NO: 135143 - DNA, 25 bp, SARS Virus
tatagttccgtagctccatgttttt

SEQ ID NO: 135144 - DNA, 25 bp, SARS Virus
atagttccgtatgtccatgttttta

SEQ ID NO: 135145 - DNA, 25 bp, SARS Virus
tagttccgtatcgccatgtttttaa

SEQ ID NO: 135146 - DNA, 25 bp, SARS Virus
agttccgtatctgcatgtttttaac

SEQ ID NO: 135147 - DNA, 25 bp, SARS Virus
gttccgtatctcgatgtttttaacg

SEQ ID NO: 135148 - DNA, 25 bp, SARS Virus
ttccgtatctccgtgtttttaacgc

SEQ ID NO: 135149 - DNA, 25 bp, SARS Virus
tccgtatctccaggtttttaacgcg

SEQ ID NO: 135150 - DNA, 25 bp, SARS Virus
ccgtatctccatgtttttaacgcgg

SEQ ID NO: 135151 - DNA, 25 bp, SARS Virus
cgtatctccatggttttaacgcgga

SEQ ID NO: 135152 - DNA, 25 bp, SARS Virus
gtatctccatgtgtttaacgcggag

SEQ ID NO: 135153 - DNA, 25 bp, SARS Virus
tatctccatgttgttaacgcggagg

SEQ ID NO: 135154 - DNA, 25 bp, SARS Virus
atctccatgtttgtaacgcggaggt

SEQ ID NO: 135155 - DNA, 25 bp, SARS Virus
tctccatgttttgaacgcggaggta

SEQ ID NO: 135156 - DNA, 25 bp, SARS Virus
ctccatgtttttgacgcggaggtat

SEQ ID NO: 135157 - DNA, 25 bp, SARS Virus
tccatgtttttagcgcggaggtatg

SEQ ID NO: 135158 - DNA, 25 bp, SARS Virus
ccatgtttttaaggcggaggtatgg

SEQ ID NO: 135159 - DNA, 25 bp, SARS Virus
catgtttttaacgcggaggtatgga

SEQ ID NO: 135160 - DNA, 25 bp, SARS Virus
atgtttttaacggggaggtatggac

SEQ ID NO: 135161 - DNA, 25 bp, SARS Virus
tgtttttaacgcggaggtatggacg

SEQ ID NO: 135162 - DNA, 25 bp, SARS Virus
gtttttaacgcggaggtatggacgt

SEQ ID NO: 135163 - DNA, 25 bp, SARS Virus
tttttaacgcgggggtatggacgtc

SEQ ID NO: 135164 - DNA, 25 bp, SARS Virus
ttttaacgcggaggtatggacgtcg

SEQ ID NO: 135165 - DNA, 25 bp, SARS Virus
tttaacgcggaggtatggacgtcgc

SEQ ID NO: 135166 - DNA, 25 bp, SARS Virus
ttaacgcggagggatggacgtcgct

SEQ ID NO: 135167 - DNA, 25 bp, SARS Virus
taacgcggaggtgtggacgtcgctg

SEQ ID NO: 135168 - DNA, 25 bp, SARS Virus
aacgcggaggtagggacgtcgctgt

SEQ ID NO: 135169 - DNA, 25 bp, SARS Virus
acgcggaggtatggacgtcgctgtt

SEQ ID NO: 135170 - DNA, 25 bp, SARS Virus
cgcggaggtatggacgtcgctgttc

SEQ ID NO: 135171 - DNA, 25 bp, SARS Virus
gcggaggtatgggcgtcgctgttcg

SEQ ID NO: 135172 - DNA, 25 bp, SARS Virus
cggaggtatggaggtcgctgttcgt

SEQ ID NO: 135173 - DNA, 25 bp, SARS Virus
ggaggtatggacgtcgctgttcgtt

SEQ ID NO: 135174 - DNA, 25 bp, SARS Virus
gaggtatggacggcgctgttcgttt

SEQ ID NO: 135175 - DNA, 25 bp, SARS Virus
aggtatggacgtggctgttcgtttt

SEQ ID NO: 135176 - DNA, 25 bp, SARS Virus
ggtatggacgtcgctgttcgttttc

SEQ ID NO: 135177 - DNA, 25 bp, SARS Virus
gtatggacgtcggtgttcgttttct

SEQ ID NO: 135178 - DNA, 25 bp, SARS Virus
tatggacgtcgcggttcgttttcta

SEQ ID NO: 135179 - DNA, 25 bp, SARS Virus
atggacgtcgctgttcgttttctac

SEQ ID NO: 135180 - DNA, 25 bp, SARS Virus
tggacgtcgctggtcgttttctaca

SEQ ID NO: 135181 - DNA, 25 bp, SARS Virus
ggacgtcgctgtgcgttttctacac

SEQ ID NO: 135182 - DNA, 25 bp, SARS Virus
gacgtcgctgttggttttctacact

SEQ ID NO: 135183 - DNA, 25 bp, SARS Virus
acgtcgctgttcgttttctacactt

SEQ ID NO: 135184 - DNA, 25 bp, SARS Virus
cgtcgctgttcggtttctacactta

SEQ ID NO: 135185 - DNA, 25 bp, SARS Virus
gtcgctgttcgtgttctacacttat

SEQ ID NO: 135186 - DNA, 25 bp, SARS Virus
tcgctgttcgttgtctacacttatc

SEQ ID NO: 135187 - DNA, 25 bp, SARS Virus
cgctgttcgtttgctacacttatct

SEQ ID NO: 135188 - DNA, 25 bp, SARS Virus
gctgttcgttttgtacacttatcta

SEQ ID NO: 135189 - DNA, 25 bp, SARS Virus
ctgttcgttttcgacacttatctac

SEQ ID NO: 135190 - DNA, 25 bp, SARS Virus
tgttcgttttctgcacttatctacc

SEQ ID NO: 135191 - DNA, 25 bp, SARS Virus
gttcgttttctagacttatctacca

SEQ ID NO: 135192 - DNA, 25 bp, SARS Virus
ttcgttttctacgcttatctaccat

SEQ ID NO: 135193 - DNA, 25 bp, SARS Virus
tcgttttctacagttatctaccatt

SEQ ID NO: 135194 - DNA, 25 bp, SARS Virus
cgttttctacacgtatctaccattg

SEQ ID NO: 135195 - DNA, 25 bp, SARS Virus
gttttctacactgatctaccattgt

SEQ ID NO: 135196 - DNA, 25 bp, SARS Virus
ttttctacacttgtctaccattgtt

SEQ ID NO: 135197 - DNA, 25 bp, SARS Virus
tttctacacttagctaccattgttt

SEQ ID NO: 135198 - DNA, 25 bp, SARS Virus
ttctacacttatgtaccattgttta

SEQ ID NO: 135199 - DNA, 25 bp, SARS Virus
tctacacttatcgaccattgtttat

SEQ ID NO: 135200 - DNA, 25 bp, SARS Virus
ctacacttatctgccattgtttatc

SEQ ID NO: 135201 - DNA, 25 bp, SARS Virus
tacacttatctagcattgtttatcg

SEQ ID NO: 135202 - DNA, 25 bp, SARS Virus
acacttatctacgattgtttatcgt

SEQ ID NO: 135203 - DNA, 25 bp, SARS Virus
cacttatctaccgttgtttatcgtc

SEQ ID NO: 135204 - DNA, 25 bp, SARS Virus
acttatctaccagtgtttatcgtcg

SEQ ID NO: 135205 - DNA, 25 bp, SARS Virus
cttatctaccatggtttatcgtcgt

SEQ ID NO: 135206 - DNA, 25 bp, SARS Virus
ttatctaccattgtttatcgtcgtc

SEQ ID NO: 135207 - DNA, 25 bp, SARS Virus
tatctaccattggttatcgtcgtca

SEQ ID NO: 135208 - DNA, 25 bp, SARS Virus
atctaccattgtgtatcgtcgtcat

SEQ ID NO: 135209 - DNA, 25 bp, SARS Virus
aggacttctcggtagctaacacaca

SEQ ID NO: 135210 - DNA, 25 bp, SARS Virus
ggacttctcggctgctaacacacat

SEQ ID NO: 135211 - DNA, 25 bp, SARS Virus
gacttctcggcatctaacacacata

SEQ ID NO: 135212 - DNA, 25 bp, SARS Virus
acttctcggcagttaacacacataa

SEQ ID NO: 135213 - DNA, 25 bp, SARS Virus
cttctcggcagctaacacacataaa

SEQ ID NO: 135214 - DNA, 25 bp, SARS Virus
ttctcggcagcttacacacataaac

SEQ ID NO: 135215 - DNA, 25 bp, SARS Virus
tctcggcagctatcacacataaacg

SEQ ID NO: 135216 - DNA, 25 bp, SARS Virus
ctcggcagctaatacacataaacgt

SEQ ID NO: 135217 - DNA, 25 bp, SARS Virus
tcggcagctaactcacataaacgtg

SEQ ID NO: 135218 - DNA, 25 bp, SARS Virus
cggcagctaacatacataaacgtgt

SEQ ID NO: 135219 - DNA, 25 bp, SARS Virus
ggcagctaacactcataaacgtgta

SEQ ID NO: 135220 - DNA, 25 bp, SARS Virus
gcagctaacacatataaacgtgtaa

SEQ ID NO: 135221 - DNA, 25 bp, SARS Virus
cagctaacacacttaaacgtgtaag

SEQ ID NO: 135222 - DNA, 25 bp, SARS Virus
agctaacacacataaacgtgtaagc

SEQ ID NO: 135223 - DNA, 25 bp, SARS Virus
gctaacacacattaacgtgtaagcc

SEQ ID NO: 135224 - DNA, 25 bp, SARS Virus
ctaacacacatatacgtgtaagcca

SEQ ID NO: 135225 - DNA, 25 bp, SARS Virus
taacacacataatcgtgtaagccac

SEQ ID NO: 135226 - DNA, 25 bp, SARS Virus
aacacacataaatgtgtaagccacc

SEQ ID NO: 135227 - DNA, 25 bp, SARS Virus
acacacataaacttgtaagccaccc

SEQ ID NO: 135228 - DNA, 25 bp, SARS Virus
cacacataaacgtgtaagccaccca

SEQ ID NO: 135229 - DNA, 25 bp, SARS Virus
acacataaacgtttaagccacccag

SEQ ID NO: 135230 - DNA, 25 bp, SARS Virus
cacataaacgtgtaagccacccaga

SEQ ID NO: 135231 - DNA, 25 bp, SARS Virus
acataaacgtgttagccacccagaa

SEQ ID NO: 135232 - DNA, 25 bp, SARS Virus
cataaacgtgtatgccacccagaaa

SEQ ID NO: 135233 - DNA, 25 bp, SARS Virus
ataaacgtgtaatccacccagaaat

SEQ ID NO: 135234 - DNA, 25 bp, SARS Virus
taaacgtgtaagtcacccagaaatt

SEQ ID NO: 135235 - DNA, 25 bp, SARS Virus
aaacgtgtaagctacccagaaattg

SEQ ID NO: 135236 - DNA, 25 bp, SARS Virus
aacgtgtaagcctcccagaaattgt

SEQ ID NO: 135237 - DNA, 25 bp, SARS Virus
acgtgtaagccatccagaaattgtt

SEQ ID NO: 135238 - DNA, 25 bp, SARS Virus
cgtgtaagccactcagaaattgttc

SEQ ID NO: 135239 - DNA, 25 bp, SARS Virus
gtgtaagccacctagaaattgttcg

SEQ ID NO: 135240 - DNA, 25 bp, SARS Virus
tgtaagccaccctgaaattgttcga

SEQ ID NO: 135241 - DNA, 25 bp, SARS Virus
gtaagccacccataaattgttcgaa

SEQ ID NO: 135242 - DNA, 25 bp, SARS Virus
taagccacccagtaattgttcgaac

SEQ ID NO: 135243 - DNA, 25 bp, SARS Virus
aagccacccagatattgttcgaaca

SEQ ID NO: 135244 - DNA, 25 bp, SARS Virus
agccacccagaatttgttcgaacaa

SEQ ID NO: 135245 - DNA, 25 bp, SARS Virus
gccacccagaaattgttcgaacaat

SEQ ID NO: 135246 - DNA, 25 bp, SARS Virus
ccacccagaaattgttcgaacaatt

SEQ ID NO: 135247 - DNA, 25 bp, SARS Virus
cacccagaaatttttcgaacaattt

SEQ ID NO: 135248 - DNA, 25 bp, SARS Virus
acccagaaattgttcgaacaatttc

SEQ ID NO: 135249 - DNA, 25 bp, SARS Virus
cccagaaattgttcgaacaatttct

SEQ ID NO: 135250 - DNA, 25 bp, SARS Virus
ccagaaattgtttgaacaatttcta

SEQ ID NO: 135251 - DNA, 25 bp, SARS Virus
cagaaattgttctaacaatttctac

SEQ ID NO: 135252 - DNA, 25 bp, SARS Virus
agaaattgttcgtacaatttctact

SEQ ID NO: 135253 - DNA, 25 bp, SARS Virus
gaaattgttcgatcaatttctactt

SEQ ID NO: 135254 - DNA, 25 bp, SARS Virus
aaattgttcgaataatttctacttc

SEQ ID NO: 135255 - DNA, 25 bp, SARS Virus
aattgttcgaactatttctacttct

SEQ ID NO: 135256 - DNA, 25 bp, SARS Virus
attgttcgaacattttctacttctt

SEQ ID NO: 135257 - DNA, 25 bp, SARS Virus
ttgttcgaacaatttctacttctta

SEQ ID NO: 135258 - DNA, 25 bp, SARS Virus
tgttcgaacaatttctacttcttac

SEQ ID NO: 135259 - DNA, 25 bp, SARS Virus
gttcgaacaatttctacttcttaca

SEQ ID NO: 135260 - DNA, 25 bp, SARS Virus
ttcgaacaatttttacttcttacat

SEQ ID NO: 135261 - DNA, 25 bp, SARS Virus
tcgaacaatttctacttcttacatc

SEQ ID NO: 135262 - DNA, 25 bp, SARS Virus
cgaacaatttcttcttcttacatcg

SEQ ID NO: 135263 - DNA, 25 bp, SARS Virus
gaacaatttctatttcttacatcgt

SEQ ID NO: 135264 - DNA, 25 bp, SARS Virus
aacaatttctacttcttacatcgta

SEQ ID NO: 135265 - DNA, 25 bp, SARS Virus
acaatttctacttcttacatcgtaa

SEQ ID NO: 135266 - DNA, 25 bp, SARS Virus
caatttctactttttacatcgtaaa

SEQ ID NO: 135267 - DNA, 25 bp, SARS Virus
aatttctacttcttacatcgtaaaa

SEQ ID NO: 135268 - DNA, 25 bp, SARS Virus
atttctacttcttacatcgtaaaag

SEQ ID NO: 135269 - DNA, 25 bp, SARS Virus
tttctacttctttcatcgtaaaagt

SEQ ID NO: 135270 - DNA, 25 bp, SARS Virus
ttctacttcttatatcgtaaaagtt

SEQ ID NO: 135271 - DNA, 25 bp, SARS Virus
tctacttcttacttcgtaaaagtta

SEQ ID NO: 135272 - DNA, 25 bp, SARS Virus
ctacttcttacatcgtaaaagttat

SEQ ID NO: 135273 - DNA, 25 bp, SARS Virus
tacttcttacattgtaaaagttatg

SEQ ID NO: 135274 - DNA, 25 bp, SARS Virus
acttcttacatcttaaaagttatgg

SEQ ID NO: 135275 - DNA, 25 bp, SARS Virus
cttcttacatcgtaaaagttatggt

SEQ ID NO: 135276 - DNA, 25 bp, SARS Virus
ttcttacatcgttaaagttatggtc

SEQ ID NO: 135277 - DNA, 25 bp, SARS Virus
tcttacatcgtataagttatggtca

SEQ ID NO: 135278 - DNA, 25 bp, SARS Virus
cttacatcgtaatagttatggtcac

SEQ ID NO: 135279 - DNA, 25 bp, SARS Virus
ttacatcgtaaatgttatggtcaca

SEQ ID NO: 135280 - DNA, 25 bp, SARS Virus
tacatcgtaaaatttatggtcacag

SEQ ID NO: 135281 - DNA, 25 bp, SARS Virus
acatcgtaaaagttatggtcacaga

SEQ ID NO: 135282 - DNA, 25 bp, SARS Virus
catcgtaaaagttatggtcacagac

SEQ ID NO: 135283 - DNA, 25 bp, SARS Virus
atcgtaaaagttttggtcacagaca

SEQ ID NO: 135284 - DNA, 25 bp, SARS Virus
tcgtaaaagttatggtcacagacat

SEQ ID NO: 135285 - DNA, 25 bp, SARS Virus
cgtaaaagttattgtcacagacatc

SEQ ID NO: 135286 - DNA, 25 bp, SARS Virus
gtaaaagttatgttcacagacatca

SEQ ID NO: 135287 - DNA, 25 bp, SARS Virus
taaaagttatggtcacagacatcat

SEQ ID NO: 135288 - DNA, 25 bp, SARS Virus
aaaagttatggttacagacatcatt

SEQ ID NO: 135289 - DNA, 25 bp, SARS Virus
aaagttatggtctcagacatcatta

SEQ ID NO: 135290 - DNA, 25 bp, SARS Virus
aagttatggtcatagacatcattaa

SEQ ID NO: 135291 - DNA, 25 bp, SARS Virus
agttatggtcactgacatcattaaa

SEQ ID NO: 135292 - DNA, 25 bp, SARS Virus
gttatggtcacatacatcattaaac

SEQ ID NO: 135293 - DNA, 25 bp, SARS Virus
ttatggtcacagtcatcattaaaca

SEQ ID NO: 135294 - DNA, 25 bp, SARS Virus
tatggtcacagatatcattaaacac

SEQ ID NO: 135295 - DNA, 25 bp, SARS Virus
atggtcacagacttcattaaacaca

SEQ ID NO: 135296 - DNA, 25 bp, SARS Virus
tggtcacagacatcattaaacacat

SEQ ID NO: 135297 - DNA, 25 bp, SARS Virus
ggtcacagacattattaaacacatc

SEQ ID NO: 135298 - DNA, 25 bp, SARS Virus
gtcacagacatctttaaacacatct

SEQ ID NO: 135299 - DNA, 25 bp, SARS Virus
tcacagacatcattaaacacatctg

SEQ ID NO: 135300 - DNA, 25 bp, SARS Virus
cacagacatcattaaacacatctga

SEQ ID NO: 135301 - DNA, 25 bp, SARS Virus
acagacatcatttaacacatctgag

SEQ ID NO: 135302 - DNA, 25 bp, SARS Virus
cagacatcattatacacatctgagt

SEQ ID NO: 135303 - DNA, 25 bp, SARS Virus
agacatcattaatcacatctgagtt

SEQ ID NO: 135304 - DNA, 25 bp, SARS Virus
gacatcattaaatacatctgagttc

SEQ ID NO: 135305 - DNA, 25 bp, SARS Virus
acatcattaaactcatctgagttcg

SEQ ID NO: 135306 - DNA, 25 bp, SARS Virus
catcattaaacatatctgagttcga

SEQ ID NO: 135307 - DNA, 25 bp, SARS Virus
atcattaaacacttctgagttcgac

SEQ ID NO: 135308 - DNA, 25 bp, SARS Virus
tcattaaacacatctgagttcgacc

SEQ ID NO: 135309 - DNA, 25 bp, SARS Virus
cattaaacacatttgagttcgacca

SEQ ID NO: 135310 - DNA, 25 bp, SARS Virus
attaaacacatctgagttcgaccat

SEQ ID NO: 135311 - DNA, 25 bp, SARS Virus
ttaaacacatcttagttcgaccatc

SEQ ID NO: 135312 - DNA, 25 bp, SARS Virus
taaacacatctgtgttcgaccatca

SEQ ID NO: 135313 - DNA, 25 bp, SARS Virus
aaacacatctgatttcgaccatcat

SEQ ID NO: 135314 - DNA, 25 bp, SARS Virus
aacacatctgagttcgaccatcatt

SEQ ID NO: 135315 - DNA, 25 bp, SARS Virus
acacatctgagttcgaccatcattt

SEQ ID NO: 135316 - DNA, 25 bp, SARS Virus
cacatctgagtttgaccatcatttg

SEQ ID NO: 135317 - DNA, 25 bp, SARS Virus
acatctgagttctaccatcatttga

SEQ ID NO: 135318 - DNA, 25 bp, SARS Virus
catctgagttcgtccatcatttgaa

SEQ ID NO: 135319 - DNA, 25 bp, SARS Virus
atctgagttcgatcatcatttgaag

SEQ ID NO: 135320 - DNA, 25 bp, SARS Virus
tctgagttcgactatcatttgaagc

SEQ ID NO: 135321 - DNA, 25 bp, SARS Virus
ctgagttcgaccttcatttgaagcc

SEQ ID NO: 135322 - DNA, 25 bp, SARS Virus
tgagttcgaccatcatttgaagcca

SEQ ID NO: 135323 - DNA, 25 bp, SARS Virus
gagttcgaccattatttgaagccac

SEQ ID NO: 135324 - DNA, 25 bp, SARS Virus
agttcgaccatcttttgaagccact

SEQ ID NO: 135325 - DNA, 25 bp, SARS Virus
gttcgaccatcatttgaagccactt

SEQ ID NO: 135326 - DNA, 25 bp, SARS Virus
ttcgaccatcatttgaagccacttt

SEQ ID NO: 135327 - DNA, 25 bp, SARS Virus
tcgaccatcatttgaagccacttta

SEQ ID NO: 135328 - DNA, 25 bp, SARS Virus
cgaccatcattttaagccactttat

SEQ ID NO: 135329 - DNA, 25 bp, SARS Virus
gaccatcatttgtagccactttatc

SEQ ID NO: 135330 - DNA, 25 bp, SARS Virus
accatcatttgatgccactttatcg

SEQ ID NO: 135331 - DNA, 25 bp, SARS Virus
ccatcatttgaatccactttatcgg

SEQ ID NO: 135332 - DNA, 25 bp, SARS Virus
catcatttgaagtcactttatcggt

SEQ ID NO: 135333 - DNA, 25 bp, SARS Virus
atcatttgaagctactttatcggta

SEQ ID NO: 135334 - DNA, 25 bp, SARS Virus
tcatttgaagcctctttatcggtac

SEQ ID NO: 135335 - DNA, 25 bp, SARS Virus
catttgaagccattttatcggtaca

SEQ ID NO: 135336 - DNA, 25 bp, SARS Virus
atttgaagccactttatcggtacat

SEQ ID NO: 135337 - DNA, 25 bp, SARS Virus
tttgaagccactttatcggtacatg

SEQ ID NO: 135338 - DNA, 25 bp, SARS Virus
ttgaagccactttatcggtacatgt

SEQ ID NO: 135339 - DNA, 25 bp, SARS Virus
tgaagccactttttcggtacatgtt

SEQ ID NO: 135340 - DNA, 25 bp, SARS Virus
gaagccactttatcggtacatgttg

SEQ ID NO: 135341 - DNA, 25 bp, SARS Virus
aagccactttattggtacatgttgc

SEQ ID NO: 135342 - DNA, 25 bp, SARS Virus
agccactttatctgtacatgttgct

SEQ ID NO: 135343 - DNA, 25 bp, SARS Virus
gccactttatcgttacatgttgctg

SEQ ID NO: 135344 - DNA, 25 bp, SARS Virus
ccactttatcggtacatgttgctgt

SEQ ID NO: 135345 - DNA, 25 bp, SARS Virus
cactttatcggttcatgttgctgta

SEQ ID NO: 135346 - DNA, 25 bp, SARS Virus
actttatcggtatatgttgctgtat

SEQ ID NO: 135347 - DNA, 25 bp, SARS Virus
ctttatcggtacttgttgctgtatc

SEQ ID NO: 135348 - DNA, 25 bp, SARS Virus
tttatcggtacatgttgctgtatca

SEQ ID NO: 135349 - DNA, 25 bp, SARS Virus
ttatcggtacattttgctgtatcag

SEQ ID NO: 135350 - DNA, 25 bp, SARS Virus
tatcggtacatgttgctgtatcaga

SEQ ID NO: 135351 - DNA, 25 bp, SARS Virus
atcggtacatgttgctgtatcagaa

SEQ ID NO: 135352 - DNA, 25 bp, SARS Virus
tcggtacatgtttctgtatcagaaa

SEQ ID NO: 135353 - DNA, 25 bp, SARS Virus
cggtacatgttgttgtatcagaaat

SEQ ID NO: 135354 - DNA, 25 bp, SARS Virus
ggtacatgttgctgtatcagaaatt

SEQ ID NO: 135355 - DNA, 25 bp, SARS Virus
gtacatgttgctttatcagaaattg

SEQ ID NO: 135356 - DNA, 25 bp, SARS Virus
tacatgttgctgtatcagaaattgt

SEQ ID NO: 135357 - DNA, 25 bp, SARS Virus
acatgttgctgtttcagaaattgtg

SEQ ID NO: 135358 - DNA, 25 bp, SARS Virus
catgttgctgtatcagaaattgtgg

SEQ ID NO: 135359 - DNA, 25 bp, SARS Virus
atgttgctgtattagaaattgtgga

SEQ ID NO: 135360 - DNA, 25 bp, SARS Virus
tgttgctgtatctgaaattgtggac

SEQ ID NO: 135361 - DNA, 25 bp, SARS Virus
gttgctgtatcataaattgtggact

SEQ ID NO: 135362 - DNA, 25 bp, SARS Virus
ttgctgtatcagtaattgtggactc

SEQ ID NO: 135363 - DNA, 25 bp, SARS Virus
tgctgtatcagatattgtggactca

SEQ ID NO: 135364 - DNA, 25 bp, SARS Virus
gctgtatcagaatttgtggactcac

SEQ ID NO: 135365 - DNA, 25 bp, SARS Virus
ctgtatcagaaattgtggactcacg

SEQ ID NO: 135366 - DNA, 25 bp, SARS Virus
tgtatcagaaattgtggactcacgg

SEQ ID NO: 135367 - DNA, 25 bp, SARS Virus
gtatcagaaattttggactcacgga

SEQ ID NO: 135368 - DNA, 25 bp, SARS Virus
tatcagaaattgtggactcacggat

SEQ ID NO: 135369 - DNA, 25 bp, SARS Virus
atcagaaattgttgactcacggata

SEQ ID NO: 135370 - DNA, 25 bp, SARS Virus
tcagaaattgtgtactcacggatag

SEQ ID NO: 135371 - DNA, 25 bp, SARS Virus
cagaaattgtggtctcacggatagg

SEQ ID NO: 135372 - DNA, 25 bp, SARS Virus
agaaattgtggattcacggatagga

SEQ ID NO: 135373 - DNA, 25 bp, SARS Virus
gaaattgtggactcacggataggag

SEQ ID NO: 135374 - DNA, 25 bp, SARS Virus
aaattgtggacttacggataggagt

SEQ ID NO: 135375 - DNA, 25 bp, SARS Virus
aattgtggactctcggataggagtc

SEQ ID NO: 135376 - DNA, 25 bp, SARS Virus
attgtggactcatggataggagtct

SEQ ID NO: 135377 - DNA, 25 bp, SARS Virus
ttgtggactcactgataggagtctt

SEQ ID NO: 135378 - DNA, 25 bp, SARS Virus
tgtggactcacgtataggagtctta

SEQ ID NO: 135379 - DNA, 25 bp, SARS Virus
gtggactcacggttaggagtcttat

SEQ ID NO: 135380 - DNA, 25 bp, SARS Virus
tggactcacggataggagtcttatt

SEQ ID NO: 135381 - DNA, 25 bp, SARS Virus
ggactcacggattggagtcttattg

SEQ ID NO: 135382 - DNA, 25 bp, SARS Virus
gactcacggatatgagtcttattgg

SEQ ID NO: 135383 - DNA, 25 bp, SARS Virus
actcacggatagtagtcttattggt

SEQ ID NO: 135384 - DNA, 25 bp, SARS Virus
ctcacggataggtgtcttattggtg

SEQ ID NO: 135385 - DNA, 25 bp, SARS Virus
tcacggataggattcttattggtgg

SEQ ID NO: 135386 - DNA, 25 bp, SARS Virus
cacggataggagtcttattggtggt

SEQ ID NO: 135387 - DNA, 25 bp, SARS Virus
acggataggagttttattggtggtt

SEQ ID NO: 135388 - DNA, 25 bp, SARS Virus
cggataggagtcttattggtggtta

SEQ ID NO: 135389 - DNA, 25 bp, SARS Virus
ggataggagtcttattggtggttaa

SEQ ID NO: 135390 - DNA, 25 bp, SARS Virus
gataggagtctttttggtggttaaa

SEQ ID NO: 135391 - DNA, 25 bp, SARS Virus
ataggagtcttattggtggttaaac

SEQ ID NO: 135392 - DNA, 25 bp, SARS Virus
taggagtcttattggtggttaaacc

SEQ ID NO: 135393 - DNA, 25 bp, SARS Virus
aggagtcttatttgtggttaaacca

SEQ ID NO: 135394 - DNA, 25 bp, SARS Virus
ggagtcttattgttggttaaaccat

SEQ ID NO: 135395 - DNA, 25 bp, SARS Virus
gagtcttattggtggttaaaccatc

SEQ ID NO: 135396 - DNA, 25 bp, SARS Virus
agtcttattggttgttaaaccatca

SEQ ID NO: 135397 - DNA, 25 bp, SARS Virus
gtcttattggtgtttaaaccatcag

SEQ ID NO: 135398 - DNA, 25 bp, SARS Virus
tcttattggtggttaaaccatcaga

SEQ ID NO: 135399 - DNA, 25 bp, SARS Virus
cttattggtggttaaaccatcagaa

SEQ ID NO: 135400 - DNA, 25 bp, SARS Virus
ttattggtggtttaaccatcagaag

SEQ ID NO: 135401 - DNA, 25 bp, SARS Virus
tattggtggttataccatcagaaga

SEQ ID NO: 135402 - DNA, 25 bp, SARS Virus
attggtggttaatccatcagaagaa

SEQ ID NO: 135403 - DNA, 25 bp, SARS Virus
ttggtggttaaatcatcagaagaaa

SEQ ID NO: 135404 - DNA, 25 bp, SARS Virus
tggtggttaaactatcagaagaaac

SEQ ID NO: 135405 - DNA, 25 bp, SARS Virus
ggtggttaaaccttcagaagaaact

SEQ ID NO: 135406 - DNA, 25 bp, SARS Virus
gtggttaaaccatcagaagaaactc

SEQ ID NO: 135407 - DNA, 25 bp, SARS Virus
tggttaaaccattagaagaaactca

SEQ ID NO: 135408 - DNA, 25 bp, SARS Virus
ggttaaaccatctgaagaaactcaa

SEQ ID NO: 135409 - DNA, 25 bp, SARS Virus
gttaaaccatcataagaaactcaaa

SEQ ID NO: 135410 - DNA, 25 bp, SARS Virus
ttaaaccatcagtagaaactcaaaa

SEQ ID NO: 135411 - DNA, 25 bp, SARS Virus
taaaccatcagatgaaactcaaaac

SEQ ID NO: 135412 - DNA, 25 bp, SARS Virus
aaaccatcagaataaactcaaaacc

SEQ ID NO: 135413 - DNA, 25 bp, SARS Virus
aaccatcagaagtaactcaaaacca

SEQ ID NO: 135414 - DNA, 25 bp, SARS Virus
accatcagaagatactcaaaaccac

SEQ ID NO: 135415 - DNA, 25 bp, SARS Virus
ccatcagaagaatctcaaaaccaca

SEQ ID NO: 135416 - DNA, 25 bp, SARS Virus
catcagaagaaattcaaaaccacaa

SEQ ID NO: 135417 - DNA, 25 bp, SARS Virus
atcagaagaaactcaaaaccacaac

SEQ ID NO: 135418 - DNA, 25 bp, SARS Virus
tcagaagaaacttaaaaccacaact

SEQ ID NO: 135419 - DNA, 25 bp, SARS Virus
cagaagaaactctaaaccacaactt

SEQ ID NO: 135420 - DNA, 25 bp, SARS Virus
agaagaaactcataaccacaacttt

SEQ ID NO: 135421 - DNA, 25 bp, SARS Virus
gaagaaactcaataccacaacttta

SEQ ID NO: 135422 - DNA, 25 bp, SARS Virus
aagaaactcaaatccacaactttac

SEQ ID NO: 135423 - DNA, 25 bp, SARS Virus
agaaactcaaaatcacaactttacg

SEQ ID NO: 135424 - DNA, 25 bp, SARS Virus
gaaactcaaaactacaactttacgg

SEQ ID NO: 135425 - DNA, 25 bp, SARS Virus
aaactcaaaacctcaactttacggc

SEQ ID NO: 135426 - DNA, 25 bp, SARS Virus
aactcaaaaccataactttacggca

SEQ ID NO: 135427 - DNA, 25 bp, SARS Virus
actcaaaaccactactttacggcag

SEQ ID NO: 135428 - DNA, 25 bp, SARS Virus
ctcaaaaccacatctttacggcagt

SEQ ID NO: 135429 - DNA, 25 bp, SARS Virus
tcaaaaccacaattttacggcagtg

SEQ ID NO: 135430 - DNA, 25 bp, SARS Virus
caaaaccacaactttacggcagtgg

SEQ ID NO: 135431 - DNA, 25 bp, SARS Virus
aaaaccacaactttacggcagtgga

SEQ ID NO: 135432 - DNA, 25 bp, SARS Virus
aaaccacaactttacggcagtggaa

SEQ ID NO: 135433 - DNA, 25 bp, SARS Virus
aaccacaacttttcggcagtggaag

SEQ ID NO: 135434 - DNA, 25 bp, SARS Virus
accacaactttatggcagtggaagt

SEQ ID NO: 135435 - DNA, 25 bp, SARS Virus
ccacaactttactgcagtggaagtc

SEQ ID NO: 135436 - DNA, 25 bp, SARS Virus
cacaactttacgtcagtggaagtca

SEQ ID NO: 135437 - DNA, 25 bp, SARS Virus
acaactttacggtagtggaagtcat

SEQ ID NO: 135438 - DNA, 25 bp, SARS Virus
caactttacggctgtggaagtcatt

SEQ ID NO: 135439 - DNA, 25 bp, SARS Virus
aactttacggcattggaagtcattg

SEQ ID NO: 135440 - DNA, 25 bp, SARS Virus
actttacggcagtggaagtcattgc

SEQ ID NO: 135441 - DNA, 25 bp, SARS Virus
ctttacggcagttgaagtcattgct

SEQ ID NO: 135442 - DNA, 25 bp, SARS Virus
tttacggcagtgtaagtcattgctg

SEQ ID NO: 135443 - DNA, 25 bp, SARS Virus
ttacggcagtggtagtcattgctgt

SEQ ID NO: 135444 - DNA, 25 bp, SARS Virus
tacggcagtggatgtcattgctgtt

SEQ ID NO: 135445 - DNA, 25 bp, SARS Virus
acggcagtggaattcattgctgtta

SEQ ID NO: 135446 - DNA, 25 bp, SARS Virus
cggcagtggaagtcattgctgttaa

SEQ ID NO: 135447 - DNA, 25 bp, SARS Virus
ggcagtggaagttattgctgttaac

SEQ ID NO: 135448 - DNA, 25 bp, SARS Virus
gcagtggaagtctttgctgttaaca

SEQ ID NO: 135449 - DNA, 25 bp, SARS Virus
cagtggaagtcattgctgttaacat

SEQ ID NO: 135450 - DNA, 25 bp, SARS Virus
agtggaagtcattgctgttaacata

SEQ ID NO: 135451 - DNA, 25 bp, SARS Virus
gtggaagtcatttctgttaacatag

SEQ ID NO: 135452 - DNA, 25 bp, SARS Virus
tggaagtcattgttgttaacataga

SEQ ID NO: 135453 - DNA, 25 bp, SARS Virus
ggaagtcattgctgttaacatagac

SEQ ID NO: 135454 - DNA, 25 bp, SARS Virus
gaagtcattgcttttaacatagaca

SEQ ID NO: 135455 - DNA, 25 bp, SARS Virus
aagtcattgctgttaacatagacac

SEQ ID NO: 135456 - DNA, 25 bp, SARS Virus
agtcattgctgttaacatagacact

SEQ ID NO: 135457 - DNA, 25 bp, SARS Virus
gtcattgctgtttacatagacactg

SEQ ID NO: 135458 - DNA, 25 bp, SARS Virus
tcattgctgttatcatagacactgt

SEQ ID NO: 135459 - DNA, 25 bp, SARS Virus
cattgctgttaatatagacactgtg

SEQ ID NO: 135460 - DNA, 25 bp, SARS Virus
attgctgttaacttagacactgtga

SEQ ID NO: 135461 - DNA, 25 bp, SARS Virus
ttgctgttaacatagacactgtgac

SEQ ID NO: 135462 - DNA, 25 bp, SARS Virus
tgctgttaacattgacactgtgaca

SEQ ID NO: 135463 - DNA, 25 bp, SARS Virus
gctgttaacatatacactgtgacaa

SEQ ID NO: 135464 - DNA, 25 bp, SARS Virus
ctgttaacatagtcactgtgacaat

SEQ ID NO: 135465 - DNA, 25 bp, SARS Virus
tgttaacatagatactgtgacaata

SEQ ID NO: 135466 - DNA, 25 bp, SARS Virus
gttaacatagactctgtgacaatat

SEQ ID NO: 135467 - DNA, 25 bp, SARS Virus
ttaacatagacattgtgacaatata

SEQ ID NO: 135468 - DNA, 25 bp, SARS Virus
taacatagacactgtgacaatatac

SEQ ID NO: 135469 - DNA, 25 bp, SARS Virus
aacatagacactttgacaatatacc

SEQ ID NO: 135470 - DNA, 25 bp, SARS Virus
acatagacactgtgacaatatacca

SEQ ID NO: 135471 - DNA, 25 bp, SARS Virus
catagacactgttacaatataccat

SEQ ID NO: 135472 - DNA, 25 bp, SARS Virus
atagacactgtgtcaatataccata

SEQ ID NO: 135473 - DNA, 25 bp, SARS Virus
tagacactgtgataatataccatat

SEQ ID NO: 135474 - DNA, 25 bp, SARS Virus
agacactgtgactatataccatatg

SEQ ID NO: 135475 - DNA, 25 bp, SARS Virus
gacactgtgacattataccatatgt

SEQ ID NO: 135476 - DNA, 25 bp, SARS Virus
acactgtgacaatataccatatgtc

SEQ ID NO: 135477 - DNA, 25 bp, SARS Virus
cactgtgacaatttaccatatgtca

SEQ ID NO: 135478 - DNA, 25 bp, SARS Virus
actgtgacaatataccatatgtcat

SEQ ID NO: 135479 - DNA, 25 bp, SARS Virus
ctgtgacaatattccatatgtcatc

SEQ ID NO: 135480 - DNA, 25 bp, SARS Virus
tgtgacaatatatcatatgtcatca

SEQ ID NO: 135481 - DNA, 25 bp, SARS Virus
gtgacaatatactatatgtcatcag

SEQ ID NO: 135482 - DNA, 25 bp, SARS Virus
tgacaatataccttatgtcatcagt

SEQ ID NO: 135483 - DNA, 25 bp, SARS Virus
gacaatataccatatgtcatcagta

SEQ ID NO: 135484 - DNA, 25 bp, SARS Virus
acaatataccatttgtcatcagtat

SEQ ID NO: 135485 - DNA, 25 bp, SARS Virus
caatataccatatgtcatcagtatc

SEQ ID NO: 135486 - DNA, 25 bp, SARS Virus
aatataccatatttcatcagtatca

SEQ ID NO: 135487 - DNA, 25 bp, SARS Virus
atataccatatgtcatcagtatcaa

SEQ ID NO: 135488 - DNA, 25 bp, SARS Virus
tataccatatgttatcagtatcaat

SEQ ID NO: 135489 - DNA, 25 bp, SARS Virus
ataccatatgtcttcagtatcaata

SEQ ID NO: 135490 - DNA, 25 bp, SARS Virus
taccatatgtcatcagtatcaatac

SEQ ID NO: 135491 - DNA, 25 bp, SARS Virus
accatatgtcattagtatcaataca

SEQ ID NO: 135492 - DNA, 25 bp, SARS Virus
ccatatgtcatctgtatcaatacac

SEQ ID NO: 135493 - DNA, 25 bp, SARS Virus
catatgtcatcattatcaatacaca

SEQ ID NO: 135494 - DNA, 25 bp, SARS Virus
atatgtcatcagtatcaatacacac

SEQ ID NO: 135495 - DNA, 25 bp, SARS Virus
tatgtcatcagtttcaatacacaca

SEQ ID NO: 135496 - DNA, 25 bp, SARS Virus
atgtcatcagtatcaatacacacac

SEQ ID NO: 135497 - DNA, 25 bp, SARS Virus
tgtcatcagtattaatacacacacg

SEQ ID NO: 135498 - DNA, 25 bp, SARS Virus
gtcatcagtatctatacacacacgg

SEQ ID NO: 135499 - DNA, 25 bp, SARS Virus
tcatcagtatcattacacacacggt

SEQ ID NO: 135500 - DNA, 25 bp, SARS Virus
catcagtatcaatacacacacggtc

SEQ ID NO: 135501 - DNA, 25 bp, SARS Virus
atcagtatcaattcacacacggtcg

SEQ ID NO: 135502 - DNA, 25 bp, SARS Virus
tcagtatcaatatacacacggtcgt

SEQ ID NO: 135503 - DNA, 25 bp, SARS Virus
cagtatcaatactcacacggtcgtt

SEQ ID NO: 135504 - DNA, 25 bp, SARS Virus
agtatcaatacatacacggtcgttt

SEQ ID NO: 135505 - DNA, 25 bp, SARS Virus
gtatcaatacactcacggtcgtttg

SEQ ID NO: 135506 - DNA, 25 bp, SARS Virus
tatcaatacacatacggtcgtttgt

SEQ ID NO: 135507 - DNA, 25 bp, SARS Virus
atcaatacacactcggtcgtttgtt

SEQ ID NO: 135508 - DNA, 25 bp, SARS Virus
tcaatacacacatggtcgtttgttt

SEQ ID NO: 135509 - DNA, 25 bp, SARS Virus
caatacacacactgtcgtttgtttc

SEQ ID NO: 135510 - DNA, 25 bp, SARS Virus
aatacacacacgttcgtttgtttca

SEQ ID NO: 135511 - DNA, 25 bp, SARS Virus
atacacacacggtcgtttgtttcat

SEQ ID NO: 135512 - DNA, 25 bp, SARS Virus
tacacacacggttgtttgtttcatc

SEQ ID NO: 135513 - DNA, 25 bp, SARS Virus
acacacacggtcttttgtttcatca

SEQ ID NO: 135514 - DNA, 25 bp, SARS Virus
cacacacggtcgtttgtttcatcaa

SEQ ID NO: 135515 - DNA, 25 bp, SARS Virus
acacacggtcgtttgtttcatcaac

SEQ ID NO: 135516 - DNA, 25 bp, SARS Virus
cacacggtcgtttgtttcatcaacc

SEQ ID NO: 135517 - DNA, 25 bp, SARS Virus
acacggtcgtttttttcatcaaccg

SEQ ID NO: 135518 - DNA, 25 bp, SARS Virus
cacggtcgtttgtttcatcaaccgt

SEQ ID NO: 135519 - DNA, 25 bp, SARS Virus
acggtcgtttgtttcatcaaccgta

SEQ ID NO: 135520 - DNA, 25 bp, SARS Virus
cggtcgtttgtttcatcaaccgtag

SEQ ID NO: 135521 - DNA, 25 bp, SARS Virus
ggtcgtttgttttatcaaccgtagt

SEQ ID NO: 135522 - DNA, 25 bp, SARS Virus
gtcgtttgtttcttcaaccgtagta

SEQ ID NO: 135523 - DNA, 25 bp, SARS Virus
tcgtttgtttcatcaaccgtagtat

SEQ ID NO: 135524 - DNA, 25 bp, SARS Virus
cgtttgtttcattaaccgtagtatt

SEQ ID NO: 135525 - DNA, 25 bp, SARS Virus
gtttgtttcatctaccgtagtattt

SEQ ID NO: 135526 - DNA, 25 bp, SARS Virus
tttgtttcatcatccgtagtatttc

SEQ ID NO: 135527 - DNA, 25 bp, SARS Virus
ttgtttcatcaatcgtagtatttca

SEQ ID NO: 135528 - DNA, 25 bp, SARS Virus
tgtttcatcaactgtagtatttcat

SEQ ID NO: 135529 - DNA, 25 bp, SARS Virus
gtttcatcaaccttagtatttcatt

SEQ ID NO: 135530 - DNA, 25 bp, SARS Virus
tttcatcaaccgtagtatttcatta

SEQ ID NO: 135531 - DNA, 25 bp, SARS Virus
ttcatcaaccgttgtatttcattac

SEQ ID NO: 135532 - DNA, 25 bp, SARS Virus
tcatcaaccgtattatttcattacc

SEQ ID NO: 135533 - DNA, 25 bp, SARS Virus
catcaaccgtagtatttcattaccc

SEQ ID NO: 135534 - DNA, 25 bp, SARS Virus
atcaaccgtagtttttcattaccca

SEQ ID NO: 135535 - DNA, 25 bp, SARS Virus
tcaaccgtagtatttcattacccaa

SEQ ID NO: 135536 - DNA, 25 bp, SARS Virus
caaccgtagtatttcattacccaag

SEQ ID NO: 135537 - DNA, 25 bp, SARS Virus
aaccgtagtatttcattacccaaga

SEQ ID NO: 135538 - DNA, 25 bp, SARS Virus
accgtagtattttattacccaagaa

SEQ ID NO: 135539 - DNA, 25 bp, SARS Virus
ccgtagtatttctttacccaagaac

SEQ ID NO: 135540 - DNA, 25 bp, SARS Virus
cgtagtatttcattacccaagaacc

SEQ ID NO: 135541 - DNA, 25 bp, SARS Virus
gtagtatttcattacccaagaacct

SEQ ID NO: 135542 - DNA, 25 bp, SARS Virus
tagtatttcatttcccaagaaccta

SEQ ID NO: 135543 - DNA, 25 bp, SARS Virus
agtatttcattatccaagaacctaa

SEQ ID NO: 135544 - DNA, 25 bp, SARS Virus
gtatttcattactcaagaacctaaa

SEQ ID NO: 135545 - DNA, 25 bp, SARS Virus
tatttcattacctaagaacctaaac

SEQ ID NO: 135546 - DNA, 25 bp, SARS Virus
atttcattaccctagaacctaaacg

SEQ ID NO: 135547 - DNA, 25 bp, SARS Virus
tttcattacccatgaacctaaacgt

SEQ ID NO: 135548 - DNA, 25 bp, SARS Virus
ttcattacccaataacctaaacgtg

SEQ ID NO: 135549 - DNA, 25 bp, SARS Virus
tcattacccaagtacctaaacgtga

SEQ ID NO: 135550 - DNA, 25 bp, SARS Virus
cattacccaagatcctaaacgtgaa

SEQ ID NO: 135551 - DNA, 25 bp, SARS Virus
attacccaagaatctaaacgtgaag

SEQ ID NO: 135552 - DNA, 25 bp, SARS Virus
ttacccaagaacttaaacgtgaagg

SEQ ID NO: 135553 - DNA, 25 bp, SARS Virus
tacccaagaacctaaacgtgaaggt

SEQ ID NO: 135554 - DNA, 25 bp, SARS Virus
acccaagaaccttaacgtgaaggtt

SEQ ID NO: 135555 - DNA, 25 bp, SARS Virus
cccaagaacctatacgtgaaggttg

SEQ ID NO: 135556 - DNA, 25 bp, SARS Virus
ccaagaacctaatcgtgaaggttgt

SEQ ID NO: 135557 - DNA, 25 bp, SARS Virus
caagaacctaaatgtgaaggttgtt

SEQ ID NO: 135558 - DNA, 25 bp, SARS Virus
aagaacctaaacttgaaggttgttt

SEQ ID NO: 135559 - DNA, 25 bp, SARS Virus
agaacctaaacgtgaaggttgtttc

SEQ ID NO: 135560 - DNA, 25 bp, SARS Virus
gaacctaaacgttaaggttgtttcg

SEQ ID NO: 135561 - DNA, 25 bp, SARS Virus
aacctaaacgtgtaggttgtttcgg

SEQ ID NO: 135562 - DNA, 25 bp, SARS Virus
acctaaacgtgatggttgtttcggt

SEQ ID NO: 135563 - DNA, 25 bp, SARS Virus
cctaaacgtgaatgttgtttcggtt

SEQ ID NO: 135564 - DNA, 25 bp, SARS Virus
ctaaacgtgaagtttgtttcggttg

SEQ ID NO: 135565 - DNA, 25 bp, SARS Virus
taaacgtgaaggttgtttcggttgt

SEQ ID NO: 135566 - DNA, 25 bp, SARS Virus
aaacgtgaaggttgtttcggttgta

SEQ ID NO: 135567 - DNA, 25 bp, SARS Virus
aacgtgaaggttttttcggttgtag

SEQ ID NO: 135568 - DNA, 25 bp, SARS Virus
acgtgaaggttgtttcggttgtaga

SEQ ID NO: 135569 - DNA, 25 bp, SARS Virus
cgtgaaggttgtttcggttgtagag

SEQ ID NO: 135570 - DNA, 25 bp, SARS Virus
gtgaaggttgtttcggttgtagagt

SEQ ID NO: 135571 - DNA, 25 bp, SARS Virus
tgaaggttgttttggttgtagagta

SEQ ID NO: 135572 - DNA, 25 bp, SARS Virus
gaaggttgtttctgttgtagagtat

SEQ ID NO: 135573 - DNA, 25 bp, SARS Virus
aaggttgtttcgtttgtagagtatt

SEQ ID NO: 135574 - DNA, 25 bp, SARS Virus
aggttgtttcggttgtagagtatta

SEQ ID NO: 135575 - DNA, 25 bp, SARS Virus
ggttgtttcggttgtagagtattat

SEQ ID NO: 135576 - DNA, 25 bp, SARS Virus
gttgtttcggttttagagtattatt

SEQ ID NO: 135577 - DNA, 25 bp, SARS Virus
ttgtttcggttgtagagtattatta

SEQ ID NO: 135578 - DNA, 25 bp, SARS Virus
tgtttcggttgttgagtattattaa

SEQ ID NO: 135579 - DNA, 25 bp, SARS Virus
gtttcggttgtatagtattattaag

SEQ ID NO: 135580 - DNA, 25 bp, SARS Virus
tttcggttgtagtgtattattaaga

SEQ ID NO: 135581 - DNA, 25 bp, SARS Virus
ttcggttgtagattattattaagat

SEQ ID NO: 135582 - DNA, 25 bp, SARS Virus
tcggttgtagagtattattaagatg

SEQ ID NO: 135583 - DNA, 25 bp, SARS Virus
cggttgtagagttttattaagatgt

SEQ ID NO: 135584 - DNA, 25 bp, SARS Virus
ggttgtagagtattattaagatgta

SEQ ID NO: 135585 - DNA, 25 bp, SARS Virus
gttgtagagtattattaagatgtac

SEQ ID NO: 135586 - DNA, 25 bp, SARS Virus
ttgtagagtatttttaagatgtacg

SEQ ID NO: 135587 - DNA, 25 bp, SARS Virus
tgtagagtattattaagatgtacgc

SEQ ID NO: 135588 - DNA, 25 bp, SARS Virus
gtagagtattattaagatgtacgca

SEQ ID NO: 135589 - DNA, 25 bp, SARS Virus
tagagtattatttagatgtacgcaa

SEQ ID NO: 135590 - DNA, 25 bp, SARS Virus
agagtattattatgatgtacgcaac

SEQ ID NO: 135591 - DNA, 25 bp, SARS Virus
gagtattattaatatgtacgcaact

SEQ ID NO: 135592 - DNA, 25 bp, SARS Virus
agtattattaagttgtacgcaacta

SEQ ID NO: 135593 - DNA, 25 bp, SARS Virus
gtattattaagatgtacgcaactac

SEQ ID NO: 135594 - DNA, 25 bp, SARS Virus
tattattaagatttacgcaactacg

SEQ ID NO: 135595 - DNA, 25 bp, SARS Virus
attattaagatgtacgcaactacgt

SEQ ID NO: 135596 - DNA, 25 bp, SARS Virus
ttattaagatgttcgcaactacgta

SEQ ID NO: 135597 - DNA, 25 bp, SARS Virus
tattaagatgtatgcaactacgtaa

SEQ ID NO: 135598 - DNA, 25 bp, SARS Virus
attaagatgtactcaactacgtaac

SEQ ID NO: 135599 - DNA, 25 bp, SARS Virus
ttaagatgtacgtaactacgtaaca

SEQ ID NO: 135600 - DNA, 25 bp, SARS Virus
taagatgtacgctactacgtaacat

SEQ ID NO: 135601 - DNA, 25 bp, SARS Virus
aagatgtacgcatctacgtaacatc

SEQ ID NO: 135602 - DNA, 25 bp, SARS Virus
agatgtacgcaattacgtaacatct

SEQ ID NO: 135603 - DNA, 25 bp, SARS Virus
gatgtacgcaactacgtaacatctt

SEQ ID NO: 135604 - DNA, 25 bp, SARS Virus
atgtacgcaacttcgtaacatcttt

SEQ ID NO: 135605 - DNA, 25 bp, SARS Virus
tgtacgcaactatgtaacatctttt

SEQ ID NO: 135606 - DNA, 25 bp, SARS Virus
gtacgcaactacttaacatctttta

SEQ ID NO: 135607 - DNA, 25 bp, SARS Virus
tacgcaactacgtaacatcttttat

SEQ ID NO: 135608 - DNA, 25 bp, SARS Virus
acgcaactacgttacatcttttata

SEQ ID NO: 135609 - DNA, 25 bp, SARS Virus
cgcaactacgtatcatcttttatat

SEQ ID NO: 135610 - DNA, 25 bp, SARS Virus
gcaactacgtaatatcttttatata

SEQ ID NO: 135611 - DNA, 25 bp, SARS Virus
caactacgtaacttcttttatatag

SEQ ID NO: 135612 - DNA, 25 bp, SARS Virus
aactacgtaacatcttttatatagt

SEQ ID NO: 135613 - DNA, 25 bp, SARS Virus
actacgtaacattttttatatagtt

SEQ ID NO: 135614 - DNA, 25 bp, SARS Virus
ctacgtaacatcttttatatagttc

SEQ ID NO: 135615 - DNA, 25 bp, SARS Virus
tacgtaacatcttttatatagttcc

SEQ ID NO: 135616 - DNA, 25 bp, SARS Virus
acgtaacatcttttatatagttccg

SEQ ID NO: 135617 - DNA, 25 bp, SARS Virus
cgtaacatcttttatatagttccgt

SEQ ID NO: 135618 - DNA, 25 bp, SARS Virus
gtaacatcttttttatagttccgta

SEQ ID NO: 135619 - DNA, 25 bp, SARS Virus
taacatcttttatatagttccgtat

SEQ ID NO: 135620 - DNA, 25 bp, SARS Virus
aacatcttttatttagttccgtatc

SEQ ID NO: 135621 - DNA, 25 bp, SARS Virus
acatcttttatatagttccgtatct

SEQ ID NO: 135622 - DNA, 25 bp, SARS Virus
catcttttatattgttccgtatctc

SEQ ID NO: 135623 - DNA, 25 bp, SARS Virus
atcttttatatatttccgtatctcc

SEQ ID NO: 135624 - DNA, 25 bp, SARS Virus
tcttttatatagttccgtatctcca

SEQ ID NO: 135625 - DNA, 25 bp, SARS Virus
cttttatatagttccgtatctccat

SEQ ID NO: 135626 - DNA, 25 bp, SARS Virus
ttttatatagtttcgtatctccatg

SEQ ID NO: 135627 - DNA, 25 bp, SARS Virus
tttatatagttctgtatctccatgt

SEQ ID NO: 135628 - DNA, 25 bp, SARS Virus
ttatatagttccttatctccatgtt

SEQ ID NO: 135629 - DNA, 25 bp, SARS Virus
tatatagttccgtatctccatgttt

SEQ ID NO: 135630 - DNA, 25 bp, SARS Virus
atatagttccgtttctccatgtttt

SEQ ID NO: 135631 - DNA, 25 bp, SARS Virus
tatagttccgtatctccatgttttt

SEQ ID NO: 135632 - DNA, 25 bp, SARS Virus
atagttccgtatttccatgttttta

SEQ ID NO: 135633 - DNA, 25 bp, SARS Virus
tagttccgtatctccatgtttttaa

SEQ ID NO: 135634 - DNA, 25 bp, SARS Virus
agttccgtatcttcatgtttttaac

SEQ ID NO: 135635 - DNA, 25 bp, SARS Virus
gttccgtatctctatgtttttaacg

SEQ ID NO: 135636 - DNA, 25 bp, SARS Virus
ttccgtatctccttgtttttaacgc

SEQ ID NO: 135637 - DNA, 25 bp, SARS Virus
tccgtatctccatgtttttaacgcg

SEQ ID NO: 135638 - DNA, 25 bp, SARS Virus
ccgtatctccatttttttaacgcgg

SEQ ID NO: 135639 - DNA, 25 bp, SARS Virus
cgtatctccatgtttttaacgcgga

SEQ ID NO: 135640 - DNA, 25 bp, SARS Virus
gtatctccatgtttttaacgcggag

SEQ ID NO: 135641 - DNA, 25 bp, SARS Virus
tatctccatgtttttaacgcggagg

SEQ ID NO: 135642 - DNA, 25 bp, SARS Virus
atctccatgtttttaacgcggaggt

SEQ ID NO: 135643 - DNA, 25 bp, SARS Virus
tctccatgtttttaacgcggaggta

SEQ ID NO: 135644 - DNA, 25 bp, SARS Virus
ctccatgttttttacgcggaggtat

SEQ ID NO: 135645 - DNA, 25 bp, SARS Virus
tccatgtttttatcgcggaggtatg

SEQ ID NO: 135646 - DNA, 25 bp, SARS Virus
ccatgtttttaatgcggaggtatgg

SEQ ID NO: 135647 - DNA, 25 bp, SARS Virus
catgtttttaactcggaggtatgga

SEQ ID NO: 135648 - DNA, 25 bp, SARS Virus
atgtttttaacgtggaggtatggac

SEQ ID NO: 135649 - DNA, 25 bp, SARS Virus
tgtttttaacgctgaggtatggacg

SEQ ID NO: 135650 - DNA, 25 bp, SARS Virus
gtttttaacgcgtaggtatggacgt

SEQ ID NO: 135651 - DNA, 25 bp, SARS Virus
tttttaacgcggtggtatggacgtc

SEQ ID NO: 135652 - DNA, 25 bp, SARS Virus
ttttaacgcggatgtatggacgtcg

SEQ ID NO: 135653 - DNA, 25 bp, SARS Virus
tttaacgcggagttatggacgtcgc

SEQ ID NO: 135654 - DNA, 25 bp, SARS Virus
ttaacgcggaggtatggacgtcgct

SEQ ID NO: 135655 - DNA, 25 bp, SARS Virus
taacgcggaggtttggacgtcgctg

SEQ ID NO: 135656 - DNA, 25 bp, SARS Virus
aacgcggaggtatggacgtcgctgt

SEQ ID NO: 135657 - DNA, 25 bp, SARS Virus
acgcggaggtattgacgtcgctgtt

SEQ ID NO: 135658 - DNA, 25 bp, SARS Virus
cgcggaggtatgtacgtcgctgttc

SEQ ID NO: 135659 - DNA, 25 bp, SARS Virus
gcggaggtatggtcgtcgctgttcg

SEQ ID NO: 135660 - DNA, 25 bp, SARS Virus
cggaggtatggatgtcgctgttcgt

SEQ ID NO: 135661 - DNA, 25 bp, SARS Virus
ggaggtatggacttcgctgttcgtt

SEQ ID NO: 135662 - DNA, 25 bp, SARS Virus
gaggtatggacgtcgctgttcgttt

SEQ ID NO: 135663 - DNA, 25 bp, SARS Virus
aggtatggacgttgctgttcgtttt

SEQ ID NO: 135664 - DNA, 25 bp, SARS Virus
ggtatggacgtctctgttcgttttc

SEQ ID NO: 135665 - DNA, 25 bp, SARS Virus
gtatggacgtcgttgttcgttttct

SEQ ID NO: 135666 - DNA, 25 bp, SARS Virus
tatggacgtcgctgttcgttttcta

SEQ ID NO: 135667 - DNA, 25 bp, SARS Virus
atggacgtcgcttttcgttttctac

SEQ ID NO: 135668 - DNA, 25 bp, SARS Virus
tggacgtcgctgttcgttttctaca

SEQ ID NO: 135669 - DNA, 25 bp, SARS Virus
ggacgtcgctgttcgttttctacac

SEQ ID NO: 135670 - DNA, 25 bp, SARS Virus
gacgtcgctgtttgttttctacact

SEQ ID NO: 135671 - DNA, 25 bp, SARS Virus
acgtcgctgttctttttctacactt

SEQ ID NO: 135672 - DNA, 25 bp, SARS Virus
cgtcgctgttcgttttctacactta

SEQ ID NO: 135673 - DNA, 25 bp, SARS Virus
gtcgctgttcgttttctacacttat

SEQ ID NO: 135674 - DNA, 25 bp, SARS Virus
tcgctgttcgttttctacacttatc

SEQ ID NO: 135675 - DNA, 25 bp, SARS Virus
cgctgttcgttttctacacttatct

SEQ ID NO: 135676 - DNA, 25 bp, SARS Virus
gctgttcgttttttacacttatcta

SEQ ID NO: 135677 - DNA, 25 bp, SARS Virus
ctgttcgttttctacacttatctac

SEQ ID NO: 135678 - DNA, 25 bp, SARS Virus
tgttcgttttcttcacttatctacc

SEQ ID NO: 135679 - DNA, 25 bp, SARS Virus
gttcgttttctatacttatctacca

SEQ ID NO: 135680 - DNA, 25 bp, SARS Virus
ttcgttttctactcttatctaccat

SEQ ID NO: 135681 - DNA, 25 bp, SARS Virus
tcgttttctacatttatctaccatt

SEQ ID NO: 135682 - DNA, 25 bp, SARS Virus
cgttttctacacttatctaccattg

SEQ ID NO: 135683 - DNA, 25 bp, SARS Virus
gttttctacacttatctaccattgt

SEQ ID NO: 135684 - DNA, 25 bp, SARS Virus
ttttctacacttttctaccattgtt

SEQ ID NO: 135685 - DNA, 25 bp, SARS Virus
tttctacacttatctaccattgttt

SEQ ID NO: 135686 - DNA, 25 bp, SARS Virus
ttctacacttatttaccattgttta

SEQ ID NO: 135687 - DNA, 25 bp, SARS Virus
tctacacttatctaccattgtttat

SEQ ID NO: 135688 - DNA, 25 bp, SARS Virus
ctacacttatcttccattgtttatc

SEQ ID NO: 135689 - DNA, 25 bp, SARS Virus
tacacttatctatcattgtttatcg

SEQ ID NO: 135690 - DNA, 25 bp, SARS Virus
acacttatctactattgtttatcgt

SEQ ID NO: 135691 - DNA, 25 bp, SARS Virus
cacttatctacctttgtttatcgtc

SEQ ID NO: 135692 - DNA, 25 bp, SARS Virus
acttatctaccattgtttatcgtcg

SEQ ID NO: 135693 - DNA, 25 bp, SARS Virus
cttatctaccattgtttatcgtcgt

SEQ ID NO: 135694 - DNA, 25 bp, SARS Virus
ttatctaccattttttatcgtcgtc

SEQ ID NO: 135695 - DNA, 25 bp, SARS Virus
tatctaccattgtttatcgtcgtca

SEQ ID NO: 135696 - DNA, 25 bp, SARS Virus
atctaccattgtttatcgtcgtcat

SEQ ID NO: 135697 - DNA, 25 bp, SARS Virus
tctaccattgttaatcgtcgtcatt

SEQ ID NO: 135698 - DNA, 25 bp, SARS Virus
ctaccattgtttatcgtcgtcattt

SEQ ID NO: 135699 - DNA, 25 bp, SARS Virus
taccattgtttaacgtcgtcattta

SEQ ID NO: 135700 - DNA, 25 bp, SARS Virus
accattgtttatagtcgtcatttaa

SEQ ID NO: 135701 - DNA, 25 bp, SARS Virus
ccattgtttatcatcgtcatttaac

SEQ ID NO: 135702 - DNA, 25 bp, SARS Virus
cattgtttatcgacgtcatttaacg

SEQ ID NO: 135703 - DNA, 25 bp, SARS Virus
attgtttatcgtagtcatttaacgt

SEQ ID NO: 135704 - DNA, 25 bp, SARS Virus
ttgtttatcgtcatcatttaacgtt

SEQ ID NO: 135705 - DNA, 25 bp, SARS Virus
tgtttatcgtcgacatttaacgttt

SEQ ID NO: 135706 - DNA, 25 bp, SARS Virus
gtttatcgtcgtaatttaacgttta

SEQ ID NO: 135707 - DNA, 25 bp, SARS Virus
tttatcgtcgtcatttaacgtttac

SEQ ID NO: 135708 - DNA, 25 bp, SARS Virus
ttatcgtcgtcaattaacgtttact

SEQ ID NO: 135709 - DNA, 25 bp, SARS Virus
tatcgtcgtcatataacgtttactt

SEQ ID NO: 135710 - DNA, 25 bp, SARS Virus
atcgtcgtcattaaacgtttacttg

SEQ ID NO: 135711 - DNA, 25 bp, SARS Virus
tcgtcgtcatttaacgtttacttga

SEQ ID NO: 135712 - DNA, 25 bp, SARS Virus
cgtcgtcatttaacgtttacttgac

SEQ ID NO: 135713 - DNA, 25 bp, SARS Virus
gtcgtcatttaaagtttacttgacc

SEQ ID NO: 135714 - DNA, 25 bp, SARS Virus
tcgtcatttaacatttacttgacct

SEQ ID NO: 135715 - DNA, 25 bp, SARS Virus
cgtcatttaacgattacttgacctt

SEQ ID NO: 135716 - DNA, 25 bp, SARS Virus
gtcatttaacgtatacttgaccttc

SEQ ID NO: 135717 - DNA, 25 bp, SARS Virus
tcatttaacgttaacttgaccttcg

SEQ ID NO: 135718 - DNA, 25 bp, SARS Virus
catttaacgtttacttgaccttcgg

SEQ ID NO: 135719 - DNA, 25 bp, SARS Virus
atttaacgtttaattgaccttcggg

SEQ ID NO: 135720 - DNA, 25 bp, SARS Virus
tttaacgtttacatgaccttcggga

SEQ ID NO: 135721 - DNA, 25 bp, SARS Virus
ttaacgtttactagaccttcgggaa

SEQ ID NO: 135722 - DNA, 25 bp, SARS Virus
taacgtttacttaaccttcgggaat

SEQ ID NO: 135723 - DNA, 25 bp, SARS Virus
aacgtttacttgaccttcgggaata

SEQ ID NO: 135724 - DNA, 25 bp, SARS Virus
acgtttacttgaacttcgggaatat

SEQ ID NO: 135725 - DNA, 25 bp, SARS Virus
cgtttacttgacattcgggaatatt

SEQ ID NO: 135726 - DNA, 25 bp, SARS Virus
gtttacttgaccatcgggaatattt

SEQ ID NO: 135727 - DNA, 25 bp, SARS Virus
tttacttgacctacgggaatatttc

SEQ ID NO: 135728 - DNA, 25 bp, SARS Virus
ttacttgaccttagggaatatttcc

SEQ ID NO: 135729 - DNA, 25 bp, SARS Virus
tacttgaccttcaggaatatttccc

SEQ ID NO: 135730 - DNA, 25 bp, SARS Virus
acttgaccttcgagaatatttcccg

SEQ ID NO: 135731 - DNA, 25 bp, SARS Virus
cttgaccttcggaaatatttcccga

SEQ ID NO: 135732 - DNA, 25 bp, SARS Virus
ttgaccttcgggaatatttcccgat

SEQ ID NO: 135733 - DNA, 25 bp, SARS Virus
tgaccttcgggaatatttcccgatc

SEQ ID NO: 135734 - DNA, 25 bp, SARS Virus
gaccttcgggaaaatttcccgatcg

SEQ ID NO: 135735 - DNA, 25 bp, SARS Virus
accttcgggaatatttcccgatcga

SEQ ID NO: 135736 - DNA, 25 bp, SARS Virus
ccttcgggaataattcccgatcgac

SEQ ID NO: 135737 - DNA, 25 bp, SARS Virus
cttcgggaatatatcccgatcgacg

SEQ ID NO: 135738 - DNA, 25 bp, SARS Virus
ttcgggaatattacccgatcgacgg

SEQ ID NO: 135739 - DNA, 25 bp, SARS Virus
tcgggaatatttaccgatcgacggt

SEQ ID NO: 135740 - DNA, 25 bp, SARS Virus
cgggaatatttcacgatcgacggta

SEQ ID NO: 135741 - DNA, 25 bp, SARS Virus
gggaatatttccagatcgacggtag

SEQ ID NO: 135742 - DNA, 25 bp, SARS Virus
ggaatatttcccaatcgacggtaga

SEQ ID NO: 135743 - DNA, 25 bp, SARS Virus
gaatatttcccgatcgacggtagaa

SEQ ID NO: 135744 - DNA, 25 bp, SARS Virus
aatatttcccgaacgacggtagaaa

SEQ ID NO: 135745 - DNA, 25 bp, SARS Virus
atatttcccgatagacggtagaaaa

SEQ ID NO: 135746 - DNA, 25 bp, SARS Virus
tatttcccgatcaacggtagaaaat

SEQ ID NO: 135747 - DNA, 25 bp, SARS Virus
atttcccgatcgacggtagaaaata

SEQ ID NO: 135748 - DNA, 25 bp, SARS Virus
tttcccgatcgaaggtagaaaataa

SEQ ID NO: 135749 - DNA, 25 bp, SARS Virus
ttcccgatcgacagtagaaaataac

SEQ ID NO: 135750 - DNA, 25 bp, SARS Virus
tcccgatcgacgatagaaaataact

SEQ ID NO: 135751 - DNA, 25 bp, SARS Virus
cccgatcgacggaagaaaataactc

SEQ ID NO: 135752 - DNA, 25 bp, SARS Virus
ccgatcgacggtagaaaataactcg

SEQ ID NO: 135753 - DNA, 25 bp, SARS Virus
cgatcgacggtaaaaaataactcgc

SEQ ID NO: 135754 - DNA, 25 bp, SARS Virus
gatcgacggtagaaaataactcgcg

SEQ ID NO: 135755 - DNA, 25 bp, SARS Virus
atcgacggtagaaaataactcgcgt

SEQ ID NO: 135756 - DNA, 25 bp, SARS Virus
tcgacggtagaaaataactcgcgtt

SEQ ID NO: 135757 - DNA, 25 bp, SARS Virus
cgacggtagaaaataactcgcgtta

SEQ ID NO: 135758 - DNA, 25 bp, SARS Virus
gacggtagaaaaaaactcgcgttaa

SEQ ID NO: 135759 - DNA, 25 bp, SARS Virus
acggtagaaaataactcgcgttaat

SEQ ID NO: 135760 - DNA, 25 bp, SARS Virus
cggtagaaaataactcgcgttaata

SEQ ID NO: 135761 - DNA, 25 bp, SARS Virus
ggtagaaaataaatcgcgttaataa

SEQ ID NO: 135762 - DNA, 25 bp, SARS Virus
gtagaaaataacacgcgttaataaa

SEQ ID NO: 135763 - DNA, 25 bp, SARS Virus
tagaaaataactagcgttaataaaa

SEQ ID NO: 135764 - DNA, 25 bp, SARS Virus
agaaaataactcacgttaataaaac

SEQ ID NO: 135765 - DNA, 25 bp, SARS Virus
gaaaataactcgagttaataaaacc

SEQ ID NO: 135766 - DNA, 25 bp, SARS Virus
aaaataactcgcattaataaaacca

SEQ ID NO: 135767 - DNA, 25 bp, SARS Virus
aaataactcgcgataataaaaccat

SEQ ID NO: 135768 - DNA, 25 bp, SARS Virus
aataactcgcgtaaataaaaccatc

SEQ ID NO: 135769 - DNA, 25 bp, SARS Virus
ataactcgcgttaataaaaccatcg

SEQ ID NO: 135770 - DNA, 25 bp, SARS Virus
taactcgcgttaataaaaccatcgc

SEQ ID NO: 135771 - DNA, 25 bp, SARS Virus
aactcgcgttaaaaaaaccatcgcg

SEQ ID NO: 135772 - DNA, 25 bp, SARS Virus
actcgcgttaataaaaccatcgcga

SEQ ID NO: 135773 - DNA, 25 bp, SARS Virus
ctcgcgttaataaaaccatcgcgag

SEQ ID NO: 135774 - DNA, 25 bp, SARS Virus
tcgcgttaataaaaccatcgcgaga

SEQ ID NO: 135775 - DNA, 25 bp, SARS Virus
cgcgttaataaaaccatcgcgagac

SEQ ID NO: 135776 - DNA, 25 bp, SARS Virus
gcgttaataaaaacatcgcgagact

SEQ ID NO: 135777 - DNA, 25 bp, SARS Virus
cgttaataaaacaatcgcgagactt

SEQ ID NO: 135778 - DNA, 25 bp, SARS Virus
gttaataaaaccatcgcgagacttt

SEQ ID NO: 135779 - DNA, 25 bp, SARS Virus
ttaataaaaccaacgcgagactttt

SEQ ID NO: 135780 - DNA, 25 bp, SARS Virus
taataaaaccatagcgagacttttt

SEQ ID NO: 135781 - DNA, 25 bp, SARS Virus
aataaaaccatcacgagactttttg

SEQ ID NO: 135782 - DNA, 25 bp, SARS Virus
ataaaaccatcgagagactttttgt

SEQ ID NO: 135783 - DNA, 25 bp, SARS Virus
taaaaccatcgcaagactttttgtc

SEQ ID NO: 135784 - DNA, 25 bp, SARS Virus
aaaaccatcgcgagactttttgtcg

SEQ ID NO: 135785 - DNA, 25 bp, SARS Virus
aaaccatcgcgaaactttttgtcgt

SEQ ID NO: 135786 - DNA, 25 bp, SARS Virus
aaccatcgcgagactttttgtcgtt

SEQ ID NO: 135787 - DNA, 25 bp, SARS Virus
accatcgcgagaatttttgtcgttc

SEQ ID NO: 135788 - DNA, 25 bp, SARS Virus
ccatcgcgagacattttgtcgttct

SEQ ID NO: 135789 - DNA, 25 bp, SARS Virus
catcgcgagactatttgtcgttctt

SEQ ID NO: 135790 - DNA, 25 bp, SARS Virus
atcgcgagacttattgtcgttcttt

SEQ ID NO: 135791 - DNA, 25 bp, SARS Virus
tcgcgagactttatgtcgttcttta

SEQ ID NO: 135792 - DNA, 25 bp, SARS Virus
cgcgagacttttagtcgttctttac

SEQ ID NO: 135793 - DNA, 25 bp, SARS Virus
gcgagactttttatcgttctttacg

SEQ ID NO: 135794 - DNA, 25 bp, SARS Virus
cgagactttttgacgttctttacgt

SEQ ID NO: 135795 - DNA, 25 bp, SARS Virus
gagactttttgtagttctttacgtt

SEQ ID NO: 135796 - DNA, 25 bp, SARS Virus
agactttttgtcattctttacgttg

SEQ ID NO: 135797 - DNA, 25 bp, SARS Virus
gactttttgtcgatctttacgttgc

SEQ ID NO: 135798 - DNA, 25 bp, SARS Virus
actttttgtcgtactttacgttgcg

SEQ ID NO: 135799 - DNA, 25 bp, SARS Virus
ctttttgtcgttatttacgttgcgg

SEQ ID NO: 135800 - DNA, 25 bp, SARS Virus
tttttgtcgttcattacgttgcggt

SEQ ID NO: 135801 - DNA, 25 bp, SARS Virus
ttttgtcgttctatacgttgcggtt

SEQ ID NO: 135802 - DNA, 25 bp, SARS Virus
tttgtcgttcttaacgttgcggtta

SEQ ID NO: 135803 - DNA, 25 bp, SARS Virus
ttgtcgttctttacgttgcggttat

SEQ ID NO: 135804 - DNA, 25 bp, SARS Virus
tgtcgttctttaagttgcggttatt

SEQ ID NO: 135805 - DNA, 25 bp, SARS Virus
gtcgttctttacattgcggttattg

SEQ ID NO: 135806 - DNA, 25 bp, SARS Virus
tcgttctttacgatgcggttattgt

SEQ ID NO: 135807 - DNA, 25 bp, SARS Virus
cgttctttacgtagcggttattgtt

SEQ ID NO: 135808 - DNA, 25 bp, SARS Virus
gttctttacgttacggttattgttc

SEQ ID NO: 135809 - DNA, 25 bp, SARS Virus
ttctttacgttgaggttattgttcg

SEQ ID NO: 135810 - DNA, 25 bp, SARS Virus
tctttacgttgcagttattgttcgg

SEQ ID NO: 135811 - DNA, 25 bp, SARS Virus
ctttacgttgcgattattgttcggt

SEQ ID NO: 135812 - DNA, 25 bp, SARS Virus
tttacgttgcggatattgttcggta

SEQ ID NO: 135813 - DNA, 25 bp, SARS Virus
ttacgttgcggtaattgttcggtag

SEQ ID NO: 135814 - DNA, 25 bp, SARS Virus
tacgttgcggttattgttcggtagg

SEQ ID NO: 135815 - DNA, 25 bp, SARS Virus
acgttgcggttaatgttcggtaggc

SEQ ID NO: 135816 - DNA, 25 bp, SARS Virus
cgttgcggttatagttcggtaggct

SEQ ID NO: 135817 - DNA, 25 bp, SARS Virus
gttgcggttattattcggtaggctt

SEQ ID NO: 135818 - DNA, 25 bp, SARS Virus
ttgcggttattgatcggtaggcttt

SEQ ID NO: 135819 - DNA, 25 bp, SARS Virus
tgcggttattgtacggtaggctttc

SEQ ID NO: 135820 - DNA, 25 bp, SARS Virus
gcggttattgttaggtaggctttcc

SEQ ID NO: 135821 - DNA, 25 bp, SARS Virus
cggttattgttcagtaggctttccc

SEQ ID NO: 135822 - DNA, 25 bp, SARS Virus
ggttattgttcgataggctttccct

SEQ ID NO: 135823 - DNA, 25 bp, SARS Virus
gttattgttcggaaggctttccctc

SEQ ID NO: 135824 - DNA, 25 bp, SARS Virus
ttattgttcggtaggctttccctca

SEQ ID NO: 135825 - DNA, 25 bp, SARS Virus
tattgttcggtaagctttccctcac

SEQ ID NO: 135826 - DNA, 25 bp, SARS Virus
attgttcggtagactttccctcact

SEQ ID NO: 135827 - DNA, 25 bp, SARS Virus
ttgttcggtaggatttccctcactc

SEQ ID NO: 135828 - DNA, 25 bp, SARS Virus
tgttcggtaggcattccctcactcc

SEQ ID NO: 135829 - DNA, 25 bp, SARS Virus
gttcggtaggctatccctcactccg

SEQ ID NO: 135830 - DNA, 25 bp, SARS Virus
ttcggtaggcttaccctcactccga

SEQ ID NO: 135831 - DNA, 25 bp, SARS Virus
tcggtaggctttacctcactccgaa

SEQ ID NO: 135832 - DNA, 25 bp, SARS Virus
cggtaggctttcactcactccgaac

SEQ ID NO: 135833 - DNA, 25 bp, SARS Virus
ggtaggctttccatcactccgaaca

SEQ ID NO: 135834 - DNA, 25 bp, SARS Virus
gtaggctttcccacactccgaacat

SEQ ID NO: 135835 - DNA, 25 bp, SARS Virus
taggctttccctaactccgaacatc

SEQ ID NO: 135836 - DNA, 25 bp, SARS Virus
aggctttccctcactccgaacatcg

SEQ ID NO: 135837 - DNA, 25 bp, SARS Virus
ggctttccctcaatccgaacatcgc

SEQ ID NO: 135838 - DNA, 25 bp, SARS Virus
gctttccctcacaccgaacatcgcc

SEQ ID NO: 135839 - DNA, 25 bp, SARS Virus
ctttccctcactacgaacatcgcca

SEQ ID NO: 135840 - DNA, 25 bp, SARS Virus
tttccctcactcagaacatcgccat

SEQ ID NO: 135841 - DNA, 25 bp, SARS Virus
ttccctcactccaaacatcgccata

SEQ ID NO: 135842 - DNA, 25 bp, SARS Virus
tccctcactccgaacatcgccatag

SEQ ID NO: 135843 - DNA, 25 bp, SARS Virus
ccctcactccgaacatcgccatagc

SEQ ID NO: 135844 - DNA, 25 bp, SARS Virus
cctcactccgaaaatcgccatagca

SEQ ID NO: 135845 - DNA, 25 bp, SARS Virus
ctcactccgaacatcgccatagcaa

SEQ ID NO: 135846 - DNA, 25 bp, SARS Virus
tcactccgaacaacgccatagcaac

SEQ ID NO: 135847 - DNA, 25 bp, SARS Virus
cactccgaacatagccatagcaacg

SEQ ID NO: 135848 - DNA, 25 bp, SARS Virus
actccgaacatcaccatagcaacga

SEQ ID NO: 135849 - DNA, 25 bp, SARS Virus
ctccgaacatcgacatagcaacgac

SEQ ID NO: 135850 - DNA, 25 bp, SARS Virus
tccgaacatcgcaatagcaacgaca

SEQ ID NO: 135851 - DNA, 25 bp, SARS Virus
ccgaacatcgccatagcaacgacat

SEQ ID NO: 135852 - DNA, 25 bp, SARS Virus
cgaacatcgccaaagcaacgacatc

SEQ ID NO: 135853 - DNA, 25 bp, SARS Virus
gaacatcgccatagcaacgacatcg

SEQ ID NO: 135854 - DNA, 25 bp, SARS Virus
aacatcgccataacaacgacatcgt

SEQ ID NO: 135855 - DNA, 25 bp, SARS Virus
acatcgccatagaaacgacatcgta

SEQ ID NO: 135856 - DNA, 25 bp, SARS Virus
catcgccatagcaacgacatcgtac

SEQ ID NO: 135857 - DNA, 25 bp, SARS Virus
atcgccatagcaacgacatcgtact

SEQ ID NO: 135858 - DNA, 25 bp, SARS Virus
tcgccatagcaaagacatcgtactt

SEQ ID NO: 135859 - DNA, 25 bp, SARS Virus
cgccatagcaacaacatcgtacttg

SEQ ID NO: 135860 - DNA, 25 bp, SARS Virus
gccatagcaacgacatcgtacttgt

SEQ ID NO: 135861 - DNA, 25 bp, SARS Virus
ccatagcaacgaaatcgtacttgtc

SEQ ID NO: 135862 - DNA, 25 bp, SARS Virus
catagcaacgacatcgtacttgtca

SEQ ID NO: 135863 - DNA, 25 bp, SARS Virus
atagcaacgacaacgtacttgtcat

SEQ ID NO: 135864 - DNA, 25 bp, SARS Virus
tagcaacgacatagtacttgtcatg

SEQ ID NO: 135865 - DNA, 25 bp, SARS Virus
agcaacgacatcatacttgtcatga

SEQ ID NO: 135866 - DNA, 25 bp, SARS Virus
gcaacgacatcgaacttgtcatgaa

SEQ ID NO: 135867 - DNA, 25 bp, SARS Virus
caacgacatcgtacttgtcatgaac

SEQ ID NO: 135868 - DNA, 25 bp, SARS Virus
aacgacatcgtaattgtcatgaacg

SEQ ID NO: 135869 - DNA, 25 bp, SARS Virus
acgacatcgtacatgtcatgaacgt

SEQ ID NO: 135870 - DNA, 25 bp, SARS Virus
cgacatcgtactagtcatgaacgtc

SEQ ID NO: 135871 - DNA, 25 bp, SARS Virus
gacatcgtacttatcatgaacgtcc

SEQ ID NO: 135872 - DNA, 25 bp, SARS Virus
acatcgtacttgacatgaacgtcct

SEQ ID NO: 135873 - DNA, 25 bp, SARS Virus
catcgtacttgtaatgaacgtcctc

SEQ ID NO: 135874 - DNA, 25 bp, SARS Virus
atcgtacttgtcatgaacgtcctct

SEQ ID NO: 135875 - DNA, 25 bp, SARS Virus
tcgtacttgtcaagaacgtcctctt

SEQ ID NO: 135876 - DNA, 25 bp, SARS Virus
cgtacttgtcataaacgtcctcttc

SEQ ID NO: 135877 - DNA, 25 bp, SARS Virus
gtacttgtcatgaacgtcctcttcg

SEQ ID NO: 135878 - DNA, 25 bp, SARS Virus
tacttgtcatgaacgtcctcttcgt

SEQ ID NO: 135879 - DNA, 25 bp, SARS Virus
acttgtcatgaaagtcctcttcgta

SEQ ID NO: 135880 - DNA, 25 bp, SARS Virus
cttgtcatgaacatcctcttcgtaa

SEQ ID NO: 135881 - DNA, 25 bp, SARS Virus
ttgtcatgaacgacctcttcgtaac

SEQ ID NO: 135882 - DNA, 25 bp, SARS Virus
tgtcatgaacgtactcttcgtaaca

SEQ ID NO: 135883 - DNA, 25 bp, SARS Virus
gtcatgaacgtcatcttcgtaacag

SEQ ID NO: 135884 - DNA, 25 bp, SARS Virus
tcatgaacgtccacttcgtaacagt

SEQ ID NO: 135885 - DNA, 25 bp, SARS Virus
catgaacgtcctattcgtaacagtt

SEQ ID NO: 135886 - DNA, 25 bp, SARS Virus
atgaacgtcctcatcgtaacagtta

SEQ ID NO: 135887 - DNA, 25 bp, SARS Virus
tgaacgtcctctacgtaacagttaa

SEQ ID NO: 135888 - DNA, 25 bp, SARS Virus
gaacgtcctcttagtaacagttaaa

SEQ ID NO: 135889 - DNA, 25 bp, SARS Virus
aacgtcctcttcataacagttaaaa

SEQ ID NO: 135890 - DNA, 25 bp, SARS Virus
acgtcctcttcgaaacagttaaaaa

SEQ ID NO: 135891 - DNA, 25 bp, SARS Virus
cgtcctcttcgtaacagttaaaaat

SEQ ID NO: 135892 - DNA, 25 bp, SARS Virus
gtcctcttcgtaacagttaaaaatg

SEQ ID NO: 135893 - DNA, 25 bp, SARS Virus
tcctcttcgtaaaagttaaaaatga

SEQ ID NO: 135894 - DNA, 25 bp, SARS Virus
cctcttcgtaacagttaaaaatgac

SEQ ID NO: 135895 - DNA, 25 bp, SARS Virus
ctcttcgtaacaattaaaaatgacc

SEQ ID NO: 135896 - DNA, 25 bp, SARS Virus
tcttcgtaacagataaaaatgaccg

SEQ ID NO: 135897 - DNA, 25 bp, SARS Virus
cttcgtaacagtaaaaaatgaccga

SEQ ID NO: 135898 - DNA, 25 bp, SARS Virus
ttcgtaacagttaaaaatgaccgac

SEQ ID NO: 135899 - DNA, 25 bp, SARS Virus
tcgtaacagttaaaaatgaccgaca

SEQ ID NO: 135900 - DNA, 25 bp, SARS Virus
cgtaacagttaaaaatgaccgacac

SEQ ID NO: 135901 - DNA, 25 bp, SARS Virus
gtaacagttaaaaatgaccgacacg

SEQ ID NO: 135902 - DNA, 25 bp, SARS Virus
taacagttaaaaatgaccgacacgt

SEQ ID NO: 135903 - DNA, 25 bp, SARS Virus
aacagttaaaaaagaccgacacgtc

SEQ ID NO: 135904 - DNA, 25 bp, SARS Virus
acagttaaaaataaccgacacgtca

SEQ ID NO: 135905 - DNA, 25 bp, SARS Virus
cagttaaaaatgaccgacacgtcat

SEQ ID NO: 135906 - DNA, 25 bp, SARS Virus
agttaaaaatgaacgacacgtcatt

SEQ ID NO: 135907 - DNA, 25 bp, SARS Virus
gttaaaaatgacagacacgtcatta

SEQ ID NO: 135908 - DNA, 25 bp, SARS Virus
ttaaaaatgaccaacacgtcattaa

SEQ ID NO: 135909 - DNA, 25 bp, SARS Virus
taaaaatgaccgacacgtcattaac

SEQ ID NO: 135910 - DNA, 25 bp, SARS Virus
aaaaatgaccgaaacgtcattaact

SEQ ID NO: 135911 - DNA, 25 bp, SARS Virus
aaaatgaccgacacgtcattaacta

SEQ ID NO: 135912 - DNA, 25 bp, SARS Virus
aaatgaccgacaagtcattaactag

SEQ ID NO: 135913 - DNA, 25 bp, SARS Virus
aatgaccgacacatcattaactaga

SEQ ID NO: 135914 - DNA, 25 bp, SARS Virus
atgaccgacacgacattaactagat

SEQ ID NO: 135915 - DNA, 25 bp, SARS Virus
tgaccgacacgtaattaactagatt

SEQ ID NO: 135916 - DNA, 25 bp, SARS Virus
gaccgacacgtcattaactagattc

SEQ ID NO: 135917 - DNA, 25 bp, SARS Virus
accgacacgtcaataactagattct

SEQ ID NO: 135918 - DNA, 25 bp, SARS Virus
ccgacacgtcataaactagattctc

SEQ ID NO: 135919 - DNA, 25 bp, SARS Virus
cgacacgtcattaactagattctca

SEQ ID NO: 135920 - DNA, 25 bp, SARS Virus
gacacgtcattaactagattctcat

SEQ ID NO: 135921 - DNA, 25 bp, SARS Virus
acacgtcattaaatagattctcatt

SEQ ID NO: 135922 - DNA, 25 bp, SARS Virus
cacgtcattaacaagattctcattt

SEQ ID NO: 135923 - DNA, 25 bp, SARS Virus
acgtcattaactagattctcatttt

SEQ ID NO: 135924 - DNA, 25 bp, SARS Virus
cgtcattaactaaattctcattttt

SEQ ID NO: 135925 - DNA, 25 bp, SARS Virus
gtcattaactagattctcatttttt

SEQ ID NO: 135926 - DNA, 25 bp, SARS Virus
tcattaactagaatctcatttttta

SEQ ID NO: 135927 - DNA, 25 bp, SARS Virus
cattaactagatactcattttttag

SEQ ID NO: 135928 - DNA, 25 bp, SARS Virus
attaactagattatcattttttaga

SEQ ID NO: 135929 - DNA, 25 bp, SARS Virus
ttaactagattcacattttttagag

SEQ ID NO: 135930 - DNA, 25 bp, SARS Virus
taactagattctaattttttagagt

SEQ ID NO: 135931 - DNA, 25 bp, SARS Virus
aactagattctcattttttagagta

SEQ ID NO: 135932 - DNA, 25 bp, SARS Virus
actagattctcaatttttagagtat

SEQ ID NO: 135933 - DNA, 25 bp, SARS Virus
ctagattctcatattttagagtatt

SEQ ID NO: 135934 - DNA, 25 bp, SARS Virus
tagattctcattatttagagtattt

SEQ ID NO: 135935 - DNA, 25 bp, SARS Virus
agattctcatttattagagtatttg

SEQ ID NO: 135936 - DNA, 25 bp, SARS Virus
gattctcattttatagagtatttgt

SEQ ID NO: 135937 - DNA, 25 bp, SARS Virus
attctcatttttaagagtatttgtt

SEQ ID NO: 135938 - DNA, 25 bp, SARS Virus
ttctcattttttagagtatttgttt

SEQ ID NO: 135939 - DNA, 25 bp, SARS Virus
tctcattttttaaagtatttgttta

SEQ ID NO: 135940 - DNA, 25 bp, SARS Virus
ctcattttttagagtatttgtttag

SEQ ID NO: 135941 - DNA, 25 bp, SARS Virus
tcattttttagaatatttgtttagg

SEQ ID NO: 135942 - DNA, 25 bp, SARS Virus
cattttttagagaatttgtttaggt

SEQ ID NO: 135943 - DNA, 25 bp, SARS Virus
attttttagagtatttgtttaggta

SEQ ID NO: 135944 - DNA, 25 bp, SARS Virus
ttttttagagtaattgtttaggtat

SEQ ID NO: 135945 - DNA, 25 bp, SARS Virus
tttttagagtatatgtttaggtatt

SEQ ID NO: 135946 - DNA, 25 bp, SARS Virus
ttttagagtattagtttaggtattc

SEQ ID NO: 135947 - DNA, 25 bp, SARS Virus
tttagagtatttatttaggtattca

SEQ ID NO: 135948 - DNA, 25 bp, SARS Virus
ttagagtatttgattaggtattcaa

SEQ ID NO: 135949 - DNA, 25 bp, SARS Virus
tagagtatttgtataggtattcaag

SEQ ID NO: 135950 - DNA, 25 bp, SARS Virus
agagtatttgttaaggtattcaagc

SEQ ID NO: 135951 - DNA, 25 bp, SARS Virus
gagtatttgtttaggtattcaagca

SEQ ID NO: 135952 - DNA, 25 bp, SARS Virus
agtatttgtttaagtattcaagcaa

SEQ ID NO: 135953 - DNA, 25 bp, SARS Virus
gtatttgtttagatattcaagcaaa

SEQ ID NO: 135954 - DNA, 25 bp, SARS Virus
tatttgtttaggaattcaagcaaat

SEQ ID NO: 135955 - DNA, 25 bp, SARS Virus
atttgtttaggtattcaagcaaata

SEQ ID NO: 135956 - DNA, 25 bp, SARS Virus
tttgtttaggtaatcaagcaaatac

SEQ ID NO: 135957 - DNA, 25 bp, SARS Virus
ttgtttaggtatacaagcaaataca

SEQ ID NO: 135958 - DNA, 25 bp, SARS Virus
tgtttaggtattaaagcaaatacac

SEQ ID NO: 135959 - DNA, 25 bp, SARS Virus
gtttaggtattcaagcaaatacaca

SEQ ID NO: 135960 - DNA, 25 bp, SARS Virus
tttaggtattcaagcaaatacacat

SEQ ID NO: 135961 - DNA, 25 bp, SARS Virus
ttaggtattcaaacaaatacacatt

SEQ ID NO: 135962 - DNA, 25 bp, SARS Virus
taggtattcaagaaaatacacatta

SEQ ID NO: 135963 - DNA, 25 bp, SARS Virus
aggtattcaagcaaatacacattac

SEQ ID NO: 135964 - DNA, 25 bp, SARS Virus
ggtattcaagcaaatacacattaca

SEQ ID NO: 135965 - DNA, 25 bp, SARS Virus
gtattcaagcaaatacacattacat

SEQ ID NO: 135966 - DNA, 25 bp, SARS Virus
tattcaagcaaaaacacattacatt

SEQ ID NO: 135967 - DNA, 25 bp, SARS Virus
attcaagcaaatacacattacatta

SEQ ID NO: 135968 - DNA, 25 bp, SARS Virus
ttcaagcaaataaacattacattaa

SEQ ID NO: 135969 - DNA, 25 bp, SARS Virus
tcaagcaaatacacattacattaaa

SEQ ID NO: 135970 - DNA, 25 bp, SARS Virus
caagcaaatacaaattacattaaac

SEQ ID NO: 135971 - DNA, 25 bp, SARS Virus
aagcaaatacacattacattaaact

SEQ ID NO: 135972 - DNA, 25 bp, SARS Virus
agcaaatacacaatacattaaactg

SEQ ID NO: 135973 - DNA, 25 bp, SARS Virus
gcaaatacacataacattaaactgt

SEQ ID NO: 135974 - DNA, 25 bp, SARS Virus
caaatacacattacattaaactgtg

SEQ ID NO: 135975 - DNA, 25 bp, SARS Virus
aaatacacattaaattaaactgtgg

SEQ ID NO: 135976 - DNA, 25 bp, SARS Virus
aatacacattacattaaactgtggg

SEQ ID NO: 135977 - DNA, 25 bp, SARS Virus
atacacattacaataaactgtggga

SEQ ID NO: 135978 - DNA, 25 bp, SARS Virus
tacacattacataaaactgtgggaa

SEQ ID NO: 135979 - DNA, 25 bp, SARS Virus
acacattacattaaactgtgggaac

SEQ ID NO: 135980 - DNA, 25 bp, SARS Virus
cacattacattaaactgtgggaact

SEQ ID NO: 135981 - DNA, 25 bp, SARS Virus
acattacattaaactgtgggaactc

SEQ ID NO: 135982 - DNA, 25 bp, SARS Virus
cattacattaaaatgtgggaactct

SEQ ID NO: 135983 - DNA, 25 bp, SARS Virus
attacattaaacagtgggaactctt

SEQ ID NO: 135984 - DNA, 25 bp, SARS Virus
ttacattaaactatgggaactcttg

SEQ ID NO: 135985 - DNA, 25 bp, SARS Virus
tacattaaactgagggaactcttga

SEQ ID NO: 135986 - DNA, 25 bp, SARS Virus
acattaaactgtaggaactcttgac

SEQ ID NO: 135987 - DNA, 25 bp, SARS Virus
cattaaactgtgagaactcttgacc

SEQ ID NO: 135988 - DNA, 25 bp, SARS Virus
attaaactgtggaaactcttgaccg

SEQ ID NO: 135989 - DNA, 25 bp, SARS Virus
ttaaactgtgggaactcttgaccga

SEQ ID NO: 135990 - DNA, 25 bp, SARS Virus
taaactgtgggaactcttgaccgag

SEQ ID NO: 135991 - DNA, 25 bp, SARS Virus
aaactgtgggaaatcttgaccgagt

SEQ ID NO: 135992 - DNA, 25 bp, SARS Virus
aactgtgggaacacttgaccgagtc

SEQ ID NO: 135993 - DNA, 25 bp, SARS Virus
actgtgggaactattgaccgagtct

SEQ ID NO: 135994 - DNA, 25 bp, SARS Virus
ctgtgggaactcatgaccgagtctc

SEQ ID NO: 135995 - DNA, 25 bp, SARS Virus
tgtgggaactctagaccgagtctca

SEQ ID NO: 135996 - DNA, 25 bp, SARS Virus
gtgggaactcttaaccgagtctcag

SEQ ID NO: 135997 - DNA, 25 bp, SARS Virus
tgggaactcttgaccgagtctcagt

SEQ ID NO: 135998 - DNA, 25 bp, SARS Virus
gggaactcttgaacgagtctcagta

SEQ ID NO: 135999 - DNA, 25 bp, SARS Virus
ggaactcttgacagagtctcagtag

SEQ ID NO: 136000 - DNA, 25 bp, SARS Virus
gaactcttgaccaagtctcagtagg

SEQ ID NO: 136001 - DNA, 25 bp, SARS Virus
aactcttgaccgagtctcagtagga

SEQ ID NO: 136002 - DNA, 25 bp, SARS Virus
actcttgaccgaatctcagtaggag

SEQ ID NO: 136003 - DNA, 25 bp, SARS Virus
ctcttgaccgagactcagtaggagt

SEQ ID NO: 136004 - DNA, 25 bp, SARS Virus
tcttgaccgagtatcagtaggagta

SEQ ID NO: 136005 - DNA, 25 bp, SARS Virus
cttgaccgagtcacagtaggagtag

SEQ ID NO: 136006 - DNA, 25 bp, SARS Virus
ttgaccgagtctaagtaggagtagt

SEQ ID NO: 136007 - DNA, 25 bp, SARS Virus
tgaccgagtctcagtaggagtagtt

SEQ ID NO: 136008 - DNA, 25 bp, SARS Virus
gaccgagtctcaataggagtagttt

SEQ ID NO: 136009 - DNA, 25 bp, SARS Virus
accgagtctcagaaggagtagtttg

SEQ ID NO: 136010 - DNA, 25 bp, SARS Virus
ccgagtctcagtaggagtagtttga

SEQ ID NO: 136011 - DNA, 25 bp, SARS Virus
cgagtctcagtaagagtagtttgaa

SEQ ID NO: 136012 - DNA, 25 bp, SARS Virus
gagtctcagtagaagtagtttgaac

SEQ ID NO: 136013 - DNA, 25 bp, SARS Virus
agtctcagtaggagtagtttgaacg

SEQ ID NO: 136014 - DNA, 25 bp, SARS Virus
gtctcagtaggaatagtttgaacgt

SEQ ID NO: 136015 - DNA, 25 bp, SARS Virus
tctcagtaggagaagtttgaacgtc

SEQ ID NO: 136016 - DNA, 25 bp, SARS Virus
ctcagtaggagtagtttgaacgtcg

SEQ ID NO: 136017 - DNA, 25 bp, SARS Virus
tcagtaggagtaatttgaacgtcgt

SEQ ID NO: 136018 - DNA, 25 bp, SARS Virus
cagtaggagtagattgaacgtcgtt

SEQ ID NO: 136019 - DNA, 25 bp, SARS Virus
agtaggagtagtatgaacgtcgttc

SEQ ID NO: 136020 - DNA, 25 bp, SARS Virus
gtaggagtagttagaacgtcgttct

SEQ ID NO: 136021 - DNA, 25 bp, SARS Virus
taggagtagtttaaacgtcgttctt

SEQ ID NO: 136022 - DNA, 25 bp, SARS Virus
aggagtagtttgaacgtcgttcttg

SEQ ID NO: 136023 - DNA, 25 bp, SARS Virus
ggagtagtttgaacgtcgttcttgg

SEQ ID NO: 136024 - DNA, 25 bp, SARS Virus
gagtagtttgaaagtcgttcttggt

SEQ ID NO: 136025 - DNA, 25 bp, SARS Virus
agtagtttgaacatcgttcttggtg

SEQ ID NO: 136026 - DNA, 25 bp, SARS Virus
gtagtttgaacgacgttcttggtgt

SEQ ID NO: 136027 - DNA, 25 bp, SARS Virus
tagtttgaacgtagttcttggtgtt

SEQ ID NO: 136028 - DNA, 25 bp, SARS Virus
agtttgaacgtcattcttggtgttc

SEQ ID NO: 136029 - DNA, 25 bp, SARS Virus
gtttgaacgtcgatcttggtgttct

SEQ ID NO: 136030 - DNA, 25 bp, SARS Virus
tttgaacgtcgtacttggtgttctc

SEQ ID NO: 136031 - DNA, 25 bp, SARS Virus
ttgaacgtcgttattggtgttctcg

SEQ ID NO: 136032 - DNA, 25 bp, SARS Virus
tgaacgtcgttcatggtgttctcgt

SEQ ID NO: 136033 - DNA, 25 bp, SARS Virus
gaacgtcgttctaggtgttctcgta

SEQ ID NO: 136034 - DNA, 25 bp, SARS Virus
aacgtcgttcttagtgttctcgtac

SEQ ID NO: 136035 - DNA, 25 bp, SARS Virus
acgtcgttcttgatgttctcgtacg

SEQ ID NO: 136036 - DNA, 25 bp, SARS Virus
cgtcgttcttggagttctcgtacgt

SEQ ID NO: 136037 - DNA, 25 bp, SARS Virus
gtcgttcttggtattctcgtacgtg

SEQ ID NO: 136038 - DNA, 25 bp, SARS Virus
tcgttcttggtgatctcgtacgtgg

SEQ ID NO: 136039 - DNA, 25 bp, SARS Virus
cgttcttggtgtactcgtacgtggg

SEQ ID NO: 136040 - DNA, 25 bp, SARS Virus
gttcttggtgttatcgtacgtggga

SEQ ID NO: 136041 - DNA, 25 bp, SARS Virus
ttcttggtgttcacgtacgtgggaa

SEQ ID NO: 136042 - DNA, 25 bp, SARS Virus
tcttggtgttctagtacgtgggaac

SEQ ID NO: 136043 - DNA, 25 bp, SARS Virus
cttggtgttctcatacgtgggaact

SEQ ID NO: 136044 - DNA, 25 bp, SARS Virus
ttggtgttctcgaacgtgggaactc

SEQ ID NO: 136045 - DNA, 25 bp, SARS Virus
tggtgttctcgtacgtgggaactcc

SEQ ID NO: 136046 - DNA, 25 bp, SARS Virus
ggtgttctcgtaagtgggaactccg

SEQ ID NO: 136047 - DNA, 25 bp, SARS Virus
gtgttctcgtacatgggaactccgt

SEQ ID NO: 136048 - DNA, 25 bp, SARS Virus
tgttctcgtacgagggaactccgtt

SEQ ID NO: 136049 - DNA, 25 bp, SARS Virus
gttctcgtacgtaggaactccgttg

SEQ ID NO: 136050 - DNA, 25 bp, SARS Virus
ttctcgtacgtgagaactccgttga

SEQ ID NO: 136051 - DNA, 25 bp, SARS Virus
tctcgtacgtggaaactccgttgac

SEQ ID NO: 136052 - DNA, 25 bp, SARS Virus
ctcgtacgtgggaactccgttgacg

SEQ ID NO: 136053 - DNA, 25 bp, SARS Virus
tcgtacgtgggaactccgttgacgt

SEQ ID NO: 136054 - DNA, 25 bp, SARS Virus
cgtacgtgggaaatccgttgacgtt

SEQ ID NO: 136055 - DNA, 25 bp, SARS Virus
gtacgtgggaacaccgttgacgttg

SEQ ID NO: 136056 - DNA, 25 bp, SARS Virus
tacgtgggaactacgttgacgttgt

SEQ ID NO: 136057 - DNA, 25 bp, SARS Virus
acgtgggaactcagttgacgttgtt

SEQ ID NO: 136058 - DNA, 25 bp, SARS Virus
cgtgggaactccattgacgttgttg

SEQ ID NO: 136059 - DNA, 25 bp, SARS Virus
gtgggaactccgatgacgttgttga

SEQ ID NO: 136060 - DNA, 25 bp, SARS Virus
tgggaactccgtagacgttgttgat

SEQ ID NO: 136061 - DNA, 25 bp, SARS Virus
gggaactccgttaacgttgttgatc

SEQ ID NO: 136062 - DNA, 25 bp, SARS Virus
ggaactccgttgacgttgttgatca

SEQ ID NO: 136063 - DNA, 25 bp, SARS Virus
gaactccgttgaagttgttgatcag

SEQ ID NO: 136064 - DNA, 25 bp, SARS Virus
aactccgttgacattgttgatcagt

SEQ ID NO: 136065 - DNA, 25 bp, SARS Virus
actccgttgacgatgttgatcagta

SEQ ID NO: 136066 - DNA, 25 bp, SARS Virus
ctccgttgacgtagttgatcagtac

SEQ ID NO: 136067 - DNA, 25 bp, SARS Virus
tccgttgacgttattgatcagtacg

SEQ ID NO: 136068 - DNA, 25 bp, SARS Virus
ccgttgacgttgatgatcagtacgt

SEQ ID NO: 136069 - DNA, 25 bp, SARS Virus
cgttgacgttgtagatcagtacgtt

SEQ ID NO: 136070 - DNA, 25 bp, SARS Virus
gttgacgttgttaatcagtacgttg

SEQ ID NO: 136071 - DNA, 25 bp, SARS Virus
ttgacgttgttgatcagtacgttgt

SEQ ID NO: 136072 - DNA, 25 bp, SARS Virus
tgacgttgttgaacagtacgttgtt

SEQ ID NO: 136073 - DNA, 25 bp, SARS Virus
gacgttgttgataagtacgttgttt

SEQ ID NO: 136074 - DNA, 25 bp, SARS Virus
acgttgttgatcagtacgttgtttc

SEQ ID NO: 136075 - DNA, 25 bp, SARS Virus
cgttgttgatcaatacgttgtttcg

SEQ ID NO: 136076 - DNA, 25 bp, SARS Virus
gttgttgatcagaacgttgtttcgt

SEQ ID NO: 136077 - DNA, 25 bp, SARS Virus
ttgttgatcagtacgttgtttcgtt

SEQ ID NO: 136078 - DNA, 25 bp, SARS Virus
tgttgatcagtaagttgtttcgttc

SEQ ID NO: 136079 - DNA, 25 bp, SARS Virus
gttgatcagtacattgtttcgttct

SEQ ID NO: 136080 - DNA, 25 bp, SARS Virus
ttgatcagtacgatgtttcgttcta

SEQ ID NO: 136081 - DNA, 25 bp, SARS Virus
tgatcagtacgtagtttcgttctaa

SEQ ID NO: 136082 - DNA, 25 bp, SARS Virus
gatcagtacgttatttcgttctaac

SEQ ID NO: 136083 - DNA, 25 bp, SARS Virus
atcagtacgttgattcgttctaaca

SEQ ID NO: 136084 - DNA, 25 bp, SARS Virus
tcagtacgttgtatcgttctaacat

SEQ ID NO: 136085 - DNA, 25 bp, SARS Virus
cagtacgttgttacgttctaacatt

SEQ ID NO: 136086 - DNA, 25 bp, SARS Virus
agtacgttgtttagttctaacattg

SEQ ID NO: 136087 - DNA, 25 bp, SARS Virus
gtacgttgtttcattctaacattgg

SEQ ID NO: 136088 - DNA, 25 bp, SARS Virus
tacgttgtttcgatctaacattggt

SEQ ID NO: 136089 - DNA, 25 bp, SARS Virus
acgttgtttcgtactaacattggta

SEQ ID NO: 136090 - DNA, 25 bp, SARS Virus
cgttgtttcgttataacattggtac

SEQ ID NO: 136091 - DNA, 25 bp, SARS Virus
gttgtttcgttcaaacattggtact

SEQ ID NO: 136092 - DNA, 25 bp, SARS Virus
ttgtttcgttctaacattggtactg

SEQ ID NO: 136093 - DNA, 25 bp, SARS Virus
tgtttcgttctaacattggtactgc

SEQ ID NO: 136094 - DNA, 25 bp, SARS Virus
gtttcgttctaaaattggtactgct

SEQ ID NO: 136095 - DNA, 25 bp, SARS Virus
tttcgttctaacattggtactgcta

SEQ ID NO: 136096 - DNA, 25 bp, SARS Virus
ttcgttctaacaatggtactgctac

SEQ ID NO: 136097 - DNA, 25 bp, SARS Virus
tcgttctaacataggtactgctacc

SEQ ID NO: 136098 - DNA, 25 bp, SARS Virus
cgttctaacattagtactgctaccg

SEQ ID NO: 136099 - DNA, 25 bp, SARS Virus
gttctaacattgatactgctaccgt

SEQ ID NO: 136100 - DNA, 25 bp, SARS Virus
ttctaacattggaactgctaccgtt

SEQ ID NO: 136101 - DNA, 25 bp, SARS Virus
tctaacattggtactgctaccgtta

SEQ ID NO: 136102 - DNA, 25 bp, SARS Virus
ctaacattggtaatgctaccgttaa

SEQ ID NO: 136103 - DNA, 25 bp, SARS Virus
taacattggtacagctaccgttaat

SEQ ID NO: 136104 - DNA, 25 bp, SARS Virus
aacattggtactactaccgttaatc

SEQ ID NO: 136105 - DNA, 25 bp, SARS Virus
acattggtactgataccgttaatca

SEQ ID NO: 136106 - DNA, 25 bp, SARS Virus
cattggtactgcaaccgttaatcag

SEQ ID NO: 136107 - DNA, 25 bp, SARS Virus
attggtactgctaccgttaatcagg

SEQ ID NO: 136108 - DNA, 25 bp, SARS Virus
ttggtactgctaacgttaatcaggt

SEQ ID NO: 136109 - DNA, 25 bp, SARS Virus
tggtactgctacagttaatcaggtc

SEQ ID NO: 136110 - DNA, 25 bp, SARS Virus
ggtactgctaccattaatcaggtcg

SEQ ID NO: 136111 - DNA, 25 bp, SARS Virus
gtactgctaccgataatcaggtcgt

SEQ ID NO: 136112 - DNA, 25 bp, SARS Virus
tactgctaccgtaaatcaggtcgtt

SEQ ID NO: 136113 - DNA, 25 bp, SARS Virus
actgctaccgttaatcaggtcgtta

SEQ ID NO: 136114 - DNA, 25 bp, SARS Virus
ctgctaccgttaatcaggtcgttac

SEQ ID NO: 136115 - DNA, 25 bp, SARS Virus
tgctaccgttaaacaggtcgttact

SEQ ID NO: 136116 - DNA, 25 bp, SARS Virus
gctaccgttaataaggtcgttactt

SEQ ID NO: 136117 - DNA, 25 bp, SARS Virus
ctaccgttaatcaggtcgttacttc

SEQ ID NO: 136118 - DNA, 25 bp, SARS Virus
taccgttaatcaagtcgttacttcg

SEQ ID NO: 136119 - DNA, 25 bp, SARS Virus
accgttaatcagatcgttacttcgg

SEQ ID NO: 136120 - DNA, 25 bp, SARS Virus
ccgttaatcaggacgttacttcggc

SEQ ID NO: 136121 - DNA, 25 bp, SARS Virus
cgttaatcaggtagttacttcggct

SEQ ID NO: 136122 - DNA, 25 bp, SARS Virus
gttaatcaggtcattacttcggctc

SEQ ID NO: 136123 - DNA, 25 bp, SARS Virus
ttaatcaggtcgatacttcggctcg

SEQ ID NO: 136124 - DNA, 25 bp, SARS Virus
taatcaggtcgtaacttcggctcgg

SEQ ID NO: 136125 - DNA, 25 bp, SARS Virus
aatcaggtcgttacttcggctcggt

SEQ ID NO: 136126 - DNA, 25 bp, SARS Virus
atcaggtcgttaattcggctcggtt

SEQ ID NO: 136127 - DNA, 25 bp, SARS Virus
tcaggtcgttacatcggctcggttt

SEQ ID NO: 136128 - DNA, 25 bp, SARS Virus
caggtcgttactacggctcggtttg

SEQ ID NO: 136129 - DNA, 25 bp, SARS Virus
aggtcgttacttaggctcggtttgt

SEQ ID NO: 136130 - DNA, 25 bp, SARS Virus
ggtcgttacttcagctcggtttgta

SEQ ID NO: 136131 - DNA, 25 bp, SARS Virus
gtcgttacttcgactcggtttgtat

SEQ ID NO: 136132 - DNA, 25 bp, SARS Virus
tcgttacttcggatcggtttgtatg

SEQ ID NO: 136133 - DNA, 25 bp, SARS Virus
cgttacttcggcacggtttgtatgg

SEQ ID NO: 136134 - DNA, 25 bp, SARS Virus
gttacttcggctaggtttgtatggt

SEQ ID NO: 136135 - DNA, 25 bp, SARS Virus
ttacttcggctcagtttgtatggtt

SEQ ID NO: 136136 - DNA, 25 bp, SARS Virus
tacttcggctcgatttgtatggttc

SEQ ID NO: 136137 - DNA, 25 bp, SARS Virus
acttcggctcggattgtatggttcc

SEQ ID NO: 136138 - DNA, 25 bp, SARS Virus
cttcggctcggtatgtatggttccg

SEQ ID NO: 136139 - DNA, 25 bp, SARS Virus
ttcggctcggttagtatggttccgg

SEQ ID NO: 136140 - DNA, 25 bp, SARS Virus
tcggctcggtttatatggttccggt

SEQ ID NO: 136141 - DNA, 25 bp, SARS Virus
cggctcggtttgaatggttccggta

SEQ ID NO: 136142 - DNA, 25 bp, SARS Virus
ggctcggtttgtatggttccggtaa

SEQ ID NO: 136143 - DNA, 25 bp, SARS Virus
gctcggtttgtaaggttccggtaaa

SEQ ID NO: 136144 - DNA, 25 bp, SARS Virus
ctcggtttgtatagttccggtaaat

SEQ ID NO: 136145 - DNA, 25 bp, SARS Virus
tcggtttgtatgattccggtaaatt

SEQ ID NO: 136146 - DNA, 25 bp, SARS Virus
cggtttgtatggatccggtaaatta

SEQ ID NO: 136147 - DNA, 25 bp, SARS Virus
ggtttgtatggtaccggtaaattat

SEQ ID NO: 136148 - DNA, 25 bp, SARS Virus
gtttgtatggttacggtaaattata

SEQ ID NO: 136149 - DNA, 25 bp, SARS Virus
tttgtatggttcaggtaaattatat

SEQ ID NO: 136150 - DNA, 25 bp, SARS Virus
ttgtatggttccagtaaattatata

SEQ ID NO: 136151 - DNA, 25 bp, SARS Virus
tgtatggttccgataaattatataa

SEQ ID NO: 136152 - DNA, 25 bp, SARS Virus
gtatggttccggaaaattatataac

SEQ ID NO: 136153 - DNA, 25 bp, SARS Virus
tatggttccggtaaattatataacg

SEQ ID NO: 136154 - DNA, 25 bp, SARS Virus
atggttccggtaaattatataacga

SEQ ID NO: 136155 - DNA, 25 bp, SARS Virus
tggttccggtaaattatataacgag

SEQ ID NO: 136156 - DNA, 25 bp, SARS Virus
ggttccggtaaaatatataacgagt

SEQ ID NO: 136157 - DNA, 25 bp, SARS Virus
gttccggtaaataatataacgagta

SEQ ID NO: 136158 - DNA, 25 bp, SARS Virus
ttccggtaaattatataacgagtat

SEQ ID NO: 136159 - DNA, 25 bp, SARS Virus
tccggtaaattaaataacgagtata

SEQ ID NO: 136160 - DNA, 25 bp, SARS Virus
ccggtaaattatataacgagtataa

SEQ ID NO: 136161 - DNA, 25 bp, SARS Virus
cggtaaattataaaacgagtataaa

SEQ ID NO: 136162 - DNA, 25 bp, SARS Virus
ggtaaattatataacgagtataaaa

SEQ ID NO: 136163 - DNA, 25 bp, SARS Virus
gtaaattatataacgagtataaaag

SEQ ID NO: 136164 - DNA, 25 bp, SARS Virus
taaattatataaagagtataaaagg

SEQ ID NO: 136165 - DNA, 25 bp, SARS Virus
aaattatataacaagtataaaaggg

SEQ ID NO: 136166 - DNA, 25 bp, SARS Virus
aattatataacgagtataaaagggt

SEQ ID NO: 136167 - DNA, 25 bp, SARS Virus
attatataacgaatataaaagggtt

SEQ ID NO: 136168 - DNA, 25 bp, SARS Virus
ttatataacgagaataaaagggtta

SEQ ID NO: 136169 - DNA, 25 bp, SARS Virus
tatataacgagtataaaagggttaa

SEQ ID NO: 136170 - DNA, 25 bp, SARS Virus
atataacgagtaaaaaagggttaag

SEQ ID NO: 136171 - DNA, 25 bp, SARS Virus
tataacgagtataaaagggttaaga

SEQ ID NO: 136172 - DNA, 25 bp, SARS Virus
ataacgagtataaaagggttaagaa

SEQ ID NO: 136173 - DNA, 25 bp, SARS Virus
taacgagtataaaagggttaagaac

SEQ ID NO: 136174 - DNA, 25 bp, SARS Virus
aacgagtataaaagggttaagaact

SEQ ID NO: 136175 - DNA, 25 bp, SARS Virus
acgagtataaaaaggttaagaactt

SEQ ID NO: 136176 - DNA, 25 bp, SARS Virus
cgagtataaaagagttaagaacttc

SEQ ID NO: 136177 - DNA, 25 bp, SARS Virus
gagtataaaaggattaagaacttcc

SEQ ID NO: 136178 - DNA, 25 bp, SARS Virus
agtataaaagggataagaacttcca

SEQ ID NO: 136179 - DNA, 25 bp, SARS Virus
gtataaaagggtaaagaacttccag

SEQ ID NO: 136180 - DNA, 25 bp, SARS Virus
tataaaagggttaagaacttccagt

SEQ ID NO: 136181 - DNA, 25 bp, SARS Virus
ataaaagggttaagaacttccagtt

SEQ ID NO: 136182 - DNA, 25 bp, SARS Virus
taaaagggttaaaaacttccagtta

SEQ ID NO: 136183 - DNA, 25 bp, SARS Virus
aaaagggttaagaacttccagttac

SEQ ID NO: 136184 - DNA, 25 bp, SARS Virus
aaagggttaagaacttccagttact

SEQ ID NO: 136185 - DNA, 25 bp, SARS Virus
tctaccattgttcatcgtcgtcatt

SEQ ID NO: 136186 - DNA, 25 bp, SARS Virus
ctaccattgtttctcgtcgtcattt

SEQ ID NO: 136187 - DNA, 25 bp, SARS Virus
taccattgtttaccgtcgtcattta

SEQ ID NO: 136188 - DNA, 25 bp, SARS Virus
accattgtttatcgtcgtcatttaa

SEQ ID NO: 136189 - DNA, 25 bp, SARS Virus
ccattgtttatcctcgtcatttaac

SEQ ID NO: 136190 - DNA, 25 bp, SARS Virus
cattgtttatcgccgtcatttaacg

SEQ ID NO: 136191 - DNA, 25 bp, SARS Virus
attgtttatcgtcgtcatttaacgt

SEQ ID NO: 136192 - DNA, 25 bp, SARS Virus
ttgtttatcgtcctcatttaacgtt

SEQ ID NO: 136193 - DNA, 25 bp, SARS Virus
tgtttatcgtcgccatttaacgttt

SEQ ID NO: 136194 - DNA, 25 bp, SARS Virus
gtttatcgtcgtcatttaacgttta

SEQ ID NO: 136195 - DNA, 25 bp, SARS Virus
tttatcgtcgtcctttaacgtttac

SEQ ID NO: 136196 - DNA, 25 bp, SARS Virus
ttatcgtcgtcacttaacgtttact

SEQ ID NO: 136197 - DNA, 25 bp, SARS Virus
tatcgtcgtcatctaacgtttactt

SEQ ID NO: 136198 - DNA, 25 bp, SARS Virus
atcgtcgtcattcaacgtttacttg

SEQ ID NO: 136199 - DNA, 25 bp, SARS Virus
tcgtcgtcatttcacgtttacttga

SEQ ID NO: 136200 - DNA, 25 bp, SARS Virus
cgtcgtcatttaccgtttacttgac

SEQ ID NO: 136201 - DNA, 25 bp, SARS Virus
gtcgtcatttaacgtttacttgacc

SEQ ID NO: 136202 - DNA, 25 bp, SARS Virus
tcgtcatttaacctttacttgacct

SEQ ID NO: 136203 - DNA, 25 bp, SARS Virus
cgtcatttaacgcttacttgacctt

SEQ ID NO: 136204 - DNA, 25 bp, SARS Virus
gtcatttaacgtctacttgaccttc

SEQ ID NO: 136205 - DNA, 25 bp, SARS Virus
tcatttaacgttcacttgaccttcg

SEQ ID NO: 136206 - DNA, 25 bp, SARS Virus
catttaacgtttccttgaccttcgg

SEQ ID NO: 136207 - DNA, 25 bp, SARS Virus
atttaacgtttacttgaccttcggg

SEQ ID NO: 136208 - DNA, 25 bp, SARS Virus
tttaacgtttacctgaccttcggga

SEQ ID NO: 136209 - DNA, 25 bp, SARS Virus
ttaacgtttactcgaccttcgggaa

SEQ ID NO: 136210 - DNA, 25 bp, SARS Virus
taacgtttacttcaccttcgggaat

SEQ ID NO: 136211 - DNA, 25 bp, SARS Virus
aacgtttacttgcccttcgggaata

SEQ ID NO: 136212 - DNA, 25 bp, SARS Virus
acgtttacttgaccttcgggaatat

SEQ ID NO: 136213 - DNA, 25 bp, SARS Virus
cgtttacttgaccttcgggaatatt

SEQ ID NO: 136214 - DNA, 25 bp, SARS Virus
gtttacttgaccctcgggaatattt

SEQ ID NO: 136215 - DNA, 25 bp, SARS Virus
tttacttgacctccgggaatatttc

SEQ ID NO: 136216 - DNA, 25 bp, SARS Virus
ttacttgaccttcgggaatatttcc

SEQ ID NO: 136217 - DNA, 25 bp, SARS Virus
tacttgaccttccggaatatttccc

SEQ ID NO: 136218 - DNA, 25 bp, SARS Virus
acttgaccttcgcgaatatttcccg

SEQ ID NO: 136219 - DNA, 25 bp, SARS Virus
cttgaccttcggcaatatttcccga

SEQ ID NO: 136220 - DNA, 25 bp, SARS Virus
ttgaccttcgggcatatttcccgat

SEQ ID NO: 136221 - DNA, 25 bp, SARS Virus
tgaccttcgggactatttcccgatc

SEQ ID NO: 136222 - DNA, 25 bp, SARS Virus
gaccttcgggaacatttcccgatcg

SEQ ID NO: 136223 - DNA, 25 bp, SARS Virus
accttcgggaatctttcccgatcga

SEQ ID NO: 136224 - DNA, 25 bp, SARS Virus
ccttcgggaatacttcccgatcgac

SEQ ID NO: 136225 - DNA, 25 bp, SARS Virus
cttcgggaatatctcccgatcgacg

SEQ ID NO: 136226 - DNA, 25 bp, SARS Virus
ttcgggaatattccccgatcgacgg

SEQ ID NO: 136227 - DNA, 25 bp, SARS Virus
tcgggaatatttcccgatcgacggt

SEQ ID NO: 136228 - DNA, 25 bp, SARS Virus
cgggaatatttcccgatcgacggta

SEQ ID NO: 136229 - DNA, 25 bp, SARS Virus
gggaatatttcccgatcgacggtag

SEQ ID NO: 136230 - DNA, 25 bp, SARS Virus
ggaatatttccccatcgacggtaga

SEQ ID NO: 136231 - DNA, 25 bp, SARS Virus
gaatatttcccgctcgacggtagaa

SEQ ID NO: 136232 - DNA, 25 bp, SARS Virus
aatatttcccgaccgacggtagaaa

SEQ ID NO: 136233 - DNA, 25 bp, SARS Virus
atatttcccgatcgacggtagaaaa

SEQ ID NO: 136234 - DNA, 25 bp, SARS Virus
tatttcccgatccacggtagaaaat

SEQ ID NO: 136235 - DNA, 25 bp, SARS Virus
atttcccgatcgccggtagaaaata

SEQ ID NO: 136236 - DNA, 25 bp, SARS Virus
tttcccgatcgacggtagaaaataa

SEQ ID NO: 136237 - DNA, 25 bp, SARS Virus
ttcccgatcgaccgtagaaaataac

SEQ ID NO: 136238 - DNA, 25 bp, SARS Virus
tcccgatcgacgctagaaaataact

SEQ ID NO: 136239 - DNA, 25 bp, SARS Virus
cccgatcgacggcagaaaataactc

SEQ ID NO: 136240 - DNA, 25 bp, SARS Virus
ccgatcgacggtcgaaaataactcg

SEQ ID NO: 136241 - DNA, 25 bp, SARS Virus
cgatcgacggtacaaaataactcgc

SEQ ID NO: 136242 - DNA, 25 bp, SARS Virus
gatcgacggtagcaaataactcgcg

SEQ ID NO: 136243 - DNA, 25 bp, SARS Virus
atcgacggtagacaataactcgcgt

SEQ ID NO: 136244 - DNA, 25 bp, SARS Virus
tcgacggtagaacataactcgcgtt

SEQ ID NO: 136245 - DNA, 25 bp, SARS Virus
cgacggtagaaactaactcgcgtta

SEQ ID NO: 136246 - DNA, 25 bp, SARS Virus
gacggtagaaaacaactcgcgttaa

SEQ ID NO: 136247 - DNA, 25 bp, SARS Virus
acggtagaaaatcactcgcgttaat

SEQ ID NO: 136248 - DNA, 25 bp, SARS Virus
cggtagaaaatacctcgcgttaata

SEQ ID NO: 136249 - DNA, 25 bp, SARS Virus
ggtagaaaataactcgcgttaataa

SEQ ID NO: 136250 - DNA, 25 bp, SARS Virus
gtagaaaataacccgcgttaataaa

SEQ ID NO: 136251 - DNA, 25 bp, SARS Virus
tagaaaataactcgcgttaataaaa

SEQ ID NO: 136252 - DNA, 25 bp, SARS Virus
agaaaataactcccgttaataaaac

SEQ ID NO: 136253 - DNA, 25 bp, SARS Virus
gaaaataactcgcgttaataaaacc

SEQ ID NO: 136254 - DNA, 25 bp, SARS Virus
aaaataactcgccttaataaaacca

SEQ ID NO: 136255 - DNA, 25 bp, SARS Virus
aaataactcgcgctaataaaaccat

SEQ ID NO: 136256 - DNA, 25 bp, SARS Virus
aataactcgcgtcaataaaaccatc

SEQ ID NO: 136257 - DNA, 25 bp, SARS Virus
ataactcgcgttcataaaaccatcg

SEQ ID NO: 136258 - DNA, 25 bp, SARS Virus
taactcgcgttactaaaaccatcgc

SEQ ID NO: 136259 - DNA, 25 bp, SARS Virus
aactcgcgttaacaaaaccatcgcg

SEQ ID NO: 136260 - DNA, 25 bp, SARS Virus
actcgcgttaatcaaaccatcgcga

SEQ ID NO: 136261 - DNA, 25 bp, SARS Virus
ctcgcgttaatacaaccatcgcgag

SEQ ID NO: 136262 - DNA, 25 bp, SARS Virus
tcgcgttaataacaccatcgcgaga

SEQ ID NO: 136263 - DNA, 25 bp, SARS Virus
cgcgttaataaacccatcgcgagac

SEQ ID NO: 136264 - DNA, 25 bp, SARS Virus
gcgttaataaaaccatcgcgagact

SEQ ID NO: 136265 - DNA, 25 bp, SARS Virus
cgttaataaaaccatcgcgagactt

SEQ ID NO: 136266 - DNA, 25 bp, SARS Virus
gttaataaaaccctcgcgagacttt

SEQ ID NO: 136267 - DNA, 25 bp, SARS Virus
ttaataaaaccaccgcgagactttt

SEQ ID NO: 136268 - DNA, 25 bp, SARS Virus
taataaaaccatcgcgagacttttt

SEQ ID NO: 136269 - DNA, 25 bp, SARS Virus
aataaaaccatcccgagactttttg

SEQ ID NO: 136270 - DNA, 25 bp, SARS Virus
ataaaaccatcgcgagactttttgt

SEQ ID NO: 136271 - DNA, 25 bp, SARS Virus
taaaaccatcgccagactttttgtc

SEQ ID NO: 136272 - DNA, 25 bp, SARS Virus
aaaaccatcgcgcgactttttgtcg

SEQ ID NO: 136273 - DNA, 25 bp, SARS Virus
aaaccatcgcgacactttttgtcgt

SEQ ID NO: 136274 - DNA, 25 bp, SARS Virus
aaccatcgcgagcctttttgtcgtt

SEQ ID NO: 136275 - DNA, 25 bp, SARS Virus
accatcgcgagactttttgtcgttc

SEQ ID NO: 136276 - DNA, 25 bp, SARS Virus
ccatcgcgagaccttttgtcgttct

SEQ ID NO: 136277 - DNA, 25 bp, SARS Virus
catcgcgagactctttgtcgttctt

SEQ ID NO: 136278 - DNA, 25 bp, SARS Virus
atcgcgagacttcttgtcgttcttt

SEQ ID NO: 136279 - DNA, 25 bp, SARS Virus
tcgcgagactttctgtcgttcttta

SEQ ID NO: 136280 - DNA, 25 bp, SARS Virus
cgcgagacttttcgtcgttctttac

SEQ ID NO: 136281 - DNA, 25 bp, SARS Virus
gcgagactttttctcgttctttacg

SEQ ID NO: 136282 - DNA, 25 bp, SARS Virus
cgagactttttgccgttctttacgt

SEQ ID NO: 136283 - DNA, 25 bp, SARS Virus
gagactttttgtcgttctttacgtt

SEQ ID NO: 136284 - DNA, 25 bp, SARS Virus
agactttttgtccttctttacgttg

SEQ ID NO: 136285 - DNA, 25 bp, SARS Virus
gactttttgtcgctctttacgttgc

SEQ ID NO: 136286 - DNA, 25 bp, SARS Virus
actttttgtcgtcctttacgttgcg

SEQ ID NO: 136287 - DNA, 25 bp, SARS Virus
ctttttgtcgttctttacgttgcgg

SEQ ID NO: 136288 - DNA, 25 bp, SARS Virus
tttttgtcgttccttacgttgcggt

SEQ ID NO: 136289 - DNA, 25 bp, SARS Virus
ttttgtcgttctctacgttgcggtt

SEQ ID NO: 136290 - DNA, 25 bp, SARS Virus
tttgtcgttcttcacgttgcggtta

SEQ ID NO: 136291 - DNA, 25 bp, SARS Virus
ttgtcgttctttccgttgcggttat

SEQ ID NO: 136292 - DNA, 25 bp, SARS Virus
tgtcgttctttacgttgcggttatt

SEQ ID NO: 136293 - DNA, 25 bp, SARS Virus
gtcgttctttaccttgcggttattg

SEQ ID NO: 136294 - DNA, 25 bp, SARS Virus
tcgttctttacgctgcggttattgt

SEQ ID NO: 136295 - DNA, 25 bp, SARS Virus
cgttctttacgtcgcggttattgtt

SEQ ID NO: 136296 - DNA, 25 bp, SARS Virus
gttctttacgttccggttattgttc

SEQ ID NO: 136297 - DNA, 25 bp, SARS Virus
ttctttacgttgcggttattgttcg

SEQ ID NO: 136298 - DNA, 25 bp, SARS Virus
tctttacgttgccgttattgttcgg

SEQ ID NO: 136299 - DNA, 25 bp, SARS Virus
ctttacgttgcgcttattgttcggt

SEQ ID NO: 136300 - DNA, 25 bp, SARS Virus
tttacgttgcggctattgttcggta

SEQ ID NO: 136301 - DNA, 25 bp, SARS Virus
ttacgttgcggtcattgttcggtag

SEQ ID NO: 136302 - DNA, 25 bp, SARS Virus
tacgttgcggttcttgttcggtagg

SEQ ID NO: 136303 - DNA, 25 bp, SARS Virus
acgttgcggttactgttcggtaggc

SEQ ID NO: 136304 - DNA, 25 bp, SARS Virus
cgttgcggttatcgttcggtaggct

SEQ ID NO: 136305 - DNA, 25 bp, SARS Virus
gttgcggttattcttcggtaggctt

SEQ ID NO: 136306 - DNA, 25 bp, SARS Virus
ttgcggttattgctcggtaggcttt

SEQ ID NO: 136307 - DNA, 25 bp, SARS Virus
tgcggttattgtccggtaggctttc

SEQ ID NO: 136308 - DNA, 25 bp, SARS Virus
gcggttattgttcggtaggctttcc

SEQ ID NO: 136309 - DNA, 25 bp, SARS Virus
cggttattgttccgtaggctttccc

SEQ ID NO: 136310 - DNA, 25 bp, SARS Virus
ggttattgttcgctaggctttccct

SEQ ID NO: 136311 - DNA, 25 bp, SARS Virus
gttattgttcggcaggctttccctc

SEQ ID NO: 136312 - DNA, 25 bp, SARS Virus
ttattgttcggtcggctttccctca

SEQ ID NO: 136313 - DNA, 25 bp, SARS Virus
tattgttcggtacgctttccctcac

SEQ ID NO: 136314 - DNA, 25 bp, SARS Virus
attgttcggtagcctttccctcact

SEQ ID NO: 136315 - DNA, 25 bp, SARS Virus
ttgttcggtaggctttccctcactc

SEQ ID NO: 136316 - DNA, 25 bp, SARS Virus
tgttcggtaggccttccctcactcc

SEQ ID NO: 136317 - DNA, 25 bp, SARS Virus
gttcggtaggctctccctcactccg

SEQ ID NO: 136318 - DNA, 25 bp, SARS Virus
ttcggtaggcttcccctcactccga

SEQ ID NO: 136319 - DNA, 25 bp, SARS Virus
tcggtaggctttccctcactccgaa

SEQ ID NO: 136320 - DNA, 25 bp, SARS Virus
cggtaggctttccctcactccgaac

SEQ ID NO: 136321 - DNA, 25 bp, SARS Virus
ggtaggctttccctcactccgaaca

SEQ ID NO: 136322 - DNA, 25 bp, SARS Virus
gtaggctttcccccactccgaacat

SEQ ID NO: 136323 - DNA, 25 bp, SARS Virus
taggctttccctcactccgaacatc

SEQ ID NO: 136324 - DNA, 25 bp, SARS Virus
aggctttccctccctccgaacatcg

SEQ ID NO: 136325 - DNA, 25 bp, SARS Virus
ggctttccctcactccgaacatcgc

SEQ ID NO: 136326 - DNA, 25 bp, SARS Virus
gctttccctcaccccgaacatcgcc

SEQ ID NO: 136327 - DNA, 25 bp, SARS Virus
ctttccctcactccgaacatcgcca

SEQ ID NO: 136328 - DNA, 25 bp, SARS Virus
tttccctcactccgaacatcgccat

SEQ ID NO: 136329 - DNA, 25 bp, SARS Virus
ttccctcactcccaacatcgccata

SEQ ID NO: 136330 - DNA, 25 bp, SARS Virus
tccctcactccgcacatcgccatag

SEQ ID NO: 136331 - DNA, 25 bp, SARS Virus
ccctcactccgaccatcgccatagc

SEQ ID NO: 136332 - DNA, 25 bp, SARS Virus
cctcactccgaacatcgccatagca

SEQ ID NO: 136333 - DNA, 25 bp, SARS Virus
ctcactccgaacctcgccatagcaa

SEQ ID NO: 136334 - DNA, 25 bp, SARS Virus
tcactccgaacaccgccatagcaac

SEQ ID NO: 136335 - DNA, 25 bp, SARS Virus
cactccgaacatcgccatagcaacg

SEQ ID NO: 136336 - DNA, 25 bp, SARS Virus
actccgaacatccccatagcaacga

SEQ ID NO: 136337 - DNA, 25 bp, SARS Virus
ctccgaacatcgccatagcaacgac

SEQ ID NO: 136338 - DNA, 25 bp, SARS Virus
tccgaacatcgccatagcaacgaca

SEQ ID NO: 136339 - DNA, 25 bp, SARS Virus
ccgaacatcgccctagcaacgacat

SEQ ID NO: 136340 - DNA, 25 bp, SARS Virus
cgaacatcgccacagcaacgacatc

SEQ ID NO: 136341 - DNA, 25 bp, SARS Virus
gaacatcgccatcgcaacgacatcg

SEQ ID NO: 136342 - DNA, 25 bp, SARS Virus
aacatcgccataccaacgacatcgt

SEQ ID NO: 136343 - DNA, 25 bp, SARS Virus
acatcgccatagcaacgacatcgta

SEQ ID NO: 136344 - DNA, 25 bp, SARS Virus
catcgccatagccacgacatcgtac

SEQ ID NO: 136345 - DNA, 25 bp, SARS Virus
atcgccatagcaccgacatcgtact

SEQ ID NO: 136346 - DNA, 25 bp, SARS Virus
tcgccatagcaacgacatcgtactt

SEQ ID NO: 136347 - DNA, 25 bp, SARS Virus
cgccatagcaaccacatcgtacttg

SEQ ID NO: 136348 - DNA, 25 bp, SARS Virus
gccatagcaacgccatcgtacttgt

SEQ ID NO: 136349 - DNA, 25 bp, SARS Virus
ccatagcaacgacatcgtacttgtc

SEQ ID NO: 136350 - DNA, 25 bp, SARS Virus
catagcaacgacctcgtacttgtca

SEQ ID NO: 136351 - DNA, 25 bp, SARS Virus
atagcaacgacaccgtacttgtcat

SEQ ID NO: 136352 - DNA, 25 bp, SARS Virus
tagcaacgacatcgtacttgtcatg

SEQ ID NO: 136353 - DNA, 25 bp, SARS Virus
agcaacgacatcctacttgtcatga

SEQ ID NO: 136354 - DNA, 25 bp, SARS Virus
gcaacgacatcgcacttgtcatgaa

SEQ ID NO: 136355 - DNA, 25 bp, SARS Virus
caacgacatcgtccttgtcatgaac

SEQ ID NO: 136356 - DNA, 25 bp, SARS Virus
aacgacatcgtacttgtcatgaacg

SEQ ID NO: 136357 - DNA, 25 bp, SARS Virus
acgacatcgtacctgtcatgaacgt

SEQ ID NO: 136358 - DNA, 25 bp, SARS Virus
cgacatcgtactcgtcatgaacgtc

SEQ ID NO: 136359 - DNA, 25 bp, SARS Virus
gacatcgtacttctcatgaacgtcc

SEQ ID NO: 136360 - DNA, 25 bp, SARS Virus
acatcgtacttgccatgaacgtcct

SEQ ID NO: 136361 - DNA, 25 bp, SARS Virus
catcgtacttgtcatgaacgtcctc

SEQ ID NO: 136362 - DNA, 25 bp, SARS Virus
atcgtacttgtcctgaacgtcctct

SEQ ID NO: 136363 - DNA, 25 bp, SARS Virus
tcgtacttgtcacgaacgtcctctt

SEQ ID NO: 136364 - DNA, 25 bp, SARS Virus
cgtacttgtcatcaacgtcctcttc

SEQ ID NO: 136365 - DNA, 25 bp, SARS Virus
gtacttgtcatgcacgtcctcttcg

SEQ ID NO: 136366 - DNA, 25 bp, SARS Virus
tacttgtcatgaccgtcctcttcgt

SEQ ID NO: 136367 - DNA, 25 bp, SARS Virus
acttgtcatgaacgtcctcttcgta

SEQ ID NO: 136368 - DNA, 25 bp, SARS Virus
cttgtcatgaacctcctcttcgtaa

SEQ ID NO: 136369 - DNA, 25 bp, SARS Virus
ttgtcatgaacgccctcttcgtaac

SEQ ID NO: 136370 - DNA, 25 bp, SARS Virus
tgtcatgaacgtcctcttcgtaaca

SEQ ID NO: 136371 - DNA, 25 bp, SARS Virus
gtcatgaacgtcctcttcgtaacag

SEQ ID NO: 136372 - DNA, 25 bp, SARS Virus
tcatgaacgtccccttcgtaacagt

SEQ ID NO: 136373 - DNA, 25 bp, SARS Virus
catgaacgtcctcttcgtaacagtt

SEQ ID NO: 136374 - DNA, 25 bp, SARS Virus
atgaacgtcctcctcgtaacagtta

SEQ ID NO: 136375 - DNA, 25 bp, SARS Virus
tgaacgtcctctccgtaacagttaa

SEQ ID NO: 136376 - DNA, 25 bp, SARS Virus
gaacgtcctcttcgtaacagttaaa

SEQ ID NO: 136377 - DNA, 25 bp, SARS Virus
aacgtcctcttcctaacagttaaaa

SEQ ID NO: 136378 - DNA, 25 bp, SARS Virus
acgtcctcttcgcaacagttaaaaa

SEQ ID NO: 136379 - DNA, 25 bp, SARS Virus
cgtcctcttcgtcacagttaaaaat

SEQ ID NO: 136380 - DNA, 25 bp, SARS Virus
gtcctcttcgtaccagttaaaaatg

SEQ ID NO: 136381 - DNA, 25 bp, SARS Virus
tcctcttcgtaacagttaaaaatga

SEQ ID NO: 136382 - DNA, 25 bp, SARS Virus
cctcttcgtaaccgttaaaaatgac

SEQ ID NO: 136383 - DNA, 25 bp, SARS Virus
ctcttcgtaacacttaaaaatgacc

SEQ ID NO: 136384 - DNA, 25 bp, SARS Virus
tcttcgtaacagctaaaaatgaccg

SEQ ID NO: 136385 - DNA, 25 bp, SARS Virus
cttcgtaacagtcaaaaatgaccga

SEQ ID NO: 136386 - DNA, 25 bp, SARS Virus
ttcgtaacagttcaaaatgaccgac

SEQ ID NO: 136387 - DNA, 25 bp, SARS Virus
tcgtaacagttacaaatgaccgaca

SEQ ID NO: 136388 - DNA, 25 bp, SARS Virus
cgtaacagttaacaatgaccgacac

SEQ ID NO: 136389 - DNA, 25 bp, SARS Virus
gtaacagttaaacatgaccgacacg

SEQ ID NO: 136390 - DNA, 25 bp, SARS Virus
taacagttaaaactgaccgacacgt

SEQ ID NO: 136391 - DNA, 25 bp, SARS Virus
aacagttaaaaacgaccgacacgtc

SEQ ID NO: 136392 - DNA, 25 bp, SARS Virus
acagttaaaaatcaccgacacgtca

SEQ ID NO: 136393 - DNA, 25 bp, SARS Virus
cagttaaaaatgcccgacacgtcat

SEQ ID NO: 136394 - DNA, 25 bp, SARS Virus
agttaaaaatgaccgacacgtcatt

SEQ ID NO: 136395 - DNA, 25 bp, SARS Virus
gttaaaaatgaccgacacgtcatta

SEQ ID NO: 136396 - DNA, 25 bp, SARS Virus
ttaaaaatgacccacacgtcattaa

SEQ ID NO: 136397 - DNA, 25 bp, SARS Virus
taaaaatgaccgccacgtcattaac

SEQ ID NO: 136398 - DNA, 25 bp, SARS Virus
aaaaatgaccgacacgtcattaact

SEQ ID NO: 136399 - DNA, 25 bp, SARS Virus
aaaatgaccgacccgtcattaacta

SEQ ID NO: 136400 - DNA, 25 bp, SARS Virus
aaatgaccgacacgtcattaactag

SEQ ID NO: 136401 - DNA, 25 bp, SARS Virus
aatgaccgacacctcattaactaga

SEQ ID NO: 136402 - DNA, 25 bp, SARS Virus
atgaccgacacgccattaactagat

SEQ ID NO: 136403 - DNA, 25 bp, SARS Virus
tgaccgacacgtcattaactagatt

SEQ ID NO: 136404 - DNA, 25 bp, SARS Virus
gaccgacacgtccttaactagattc

SEQ ID NO: 136405 - DNA, 25 bp, SARS Virus
accgacacgtcactaactagattct

SEQ ID NO: 136406 - DNA, 25 bp, SARS Virus
ccgacacgtcatcaactagattctc

SEQ ID NO: 136407 - DNA, 25 bp, SARS Virus
cgacacgtcattcactagattctca

SEQ ID NO: 136408 - DNA, 25 bp, SARS Virus
gacacgtcattacctagattctcat

SEQ ID NO: 136409 - DNA, 25 bp, SARS Virus
acacgtcattaactagattctcatt

SEQ ID NO: 136410 - DNA, 25 bp, SARS Virus
cacgtcattaaccagattctcattt

SEQ ID NO: 136411 - DNA, 25 bp, SARS Virus
acgtcattaactcgattctcatttt

SEQ ID NO: 136412 - DNA, 25 bp, SARS Virus
cgtcattaactacattctcattttt

SEQ ID NO: 136413 - DNA, 25 bp, SARS Virus
gtcattaactagcttctcatttttt

SEQ ID NO: 136414 - DNA, 25 bp, SARS Virus
tcattaactagactctcatttttta

SEQ ID NO: 136415 - DNA, 25 bp, SARS Virus
cattaactagatcctcattttttag

SEQ ID NO: 136416 - DNA, 25 bp, SARS Virus
attaactagattctcattttttaga

SEQ ID NO: 136417 - DNA, 25 bp, SARS Virus
ttaactagattcccattttttagag

SEQ ID NO: 136418 - DNA, 25 bp, SARS Virus
taactagattctcattttttagagt

SEQ ID NO: 136419 - DNA, 25 bp, SARS Virus
aactagattctccttttttagagta

SEQ ID NO: 136420 - DNA, 25 bp, SARS Virus
actagattctcactttttagagtat

SEQ ID NO: 136421 - DNA, 25 bp, SARS Virus
ctagattctcatcttttagagtatt

SEQ ID NO: 136422 - DNA, 25 bp, SARS Virus
tagattctcattctttagagtattt

SEQ ID NO: 136423 - DNA, 25 bp, SARS Virus
agattctcatttcttagagtatttg

SEQ ID NO: 136424 - DNA, 25 bp, SARS Virus
gattctcattttctagagtatttgt

SEQ ID NO: 136425 - DNA, 25 bp, SARS Virus
attctcatttttcagagtatttgtt

SEQ ID NO: 136426 - DNA, 25 bp, SARS Virus
ttctcattttttcgagtatttgttt

SEQ ID NO: 136427 - DNA, 25 bp, SARS Virus
tctcattttttacagtatttgttta

SEQ ID NO: 136428 - DNA, 25 bp, SARS Virus
ctcattttttagcgtatttgtttag

SEQ ID NO: 136429 - DNA, 25 bp, SARS Virus
tcattttttagactatttgtttagg

SEQ ID NO: 136430 - DNA, 25 bp, SARS Virus
cattttttagagcatttgtttaggt

SEQ ID NO: 136431 - DNA, 25 bp, SARS Virus
attttttagagtctttgtttaggta

SEQ ID NO: 136432 - DNA, 25 bp, SARS Virus
ttttttagagtacttgtttaggtat

SEQ ID NO: 136433 - DNA, 25 bp, SARS Virus
tttttagagtatctgtttaggtatt

SEQ ID NO: 136434 - DNA, 25 bp, SARS Virus
ttttagagtattcgtttaggtattc

SEQ ID NO: 136435 - DNA, 25 bp, SARS Virus
tttagagtatttctttaggtattca

SEQ ID NO: 136436 - DNA, 25 bp, SARS Virus
ttagagtatttgcttaggtattcaa

SEQ ID NO: 136437 - DNA, 25 bp, SARS Virus
tagagtatttgtctaggtattcaag

SEQ ID NO: 136438 - DNA, 25 bp, SARS Virus
agagtatttgttcaggtattcaagc

SEQ ID NO: 136439 - DNA, 25 bp, SARS Virus
gagtatttgtttcggtattcaagca

SEQ ID NO: 136440 - DNA, 25 bp, SARS Virus
agtatttgtttacgtattcaagcaa

SEQ ID NO: 136441 - DNA, 25 bp, SARS Virus
gtatttgtttagctattcaagcaaa

SEQ ID NO: 136442 - DNA, 25 bp, SARS Virus
tatttgtttaggcattcaagcaaat

SEQ ID NO: 136443 - DNA, 25 bp, SARS Virus
atttgtttaggtcttcaagcaaata

SEQ ID NO: 136444 - DNA, 25 bp, SARS Virus
tttgtttaggtactcaagcaaatac

SEQ ID NO: 136445 - DNA, 25 bp, SARS Virus
ttgtttaggtatccaagcaaataca

SEQ ID NO: 136446 - DNA, 25 bp, SARS Virus
tgtttaggtattcaagcaaatacac

SEQ ID NO: 136447 - DNA, 25 bp, SARS Virus
gtttaggtattccagcaaatacaca

SEQ ID NO: 136448 - DNA, 25 bp, SARS Virus
tttaggtattcacgcaaatacacat

SEQ ID NO: 136449 - DNA, 25 bp, SARS Virus
ttaggtattcaaccaaatacacatt

SEQ ID NO: 136450 - DNA, 25 bp, SARS Virus
taggtattcaagcaaatacacatta

SEQ ID NO: 136451 - DNA, 25 bp, SARS Virus
aggtattcaagccaatacacattac

SEQ ID NO: 136452 - DNA, 25 bp, SARS Virus
ggtattcaagcacatacacattaca

SEQ ID NO: 136453 - DNA, 25 bp, SARS Virus
gtattcaagcaactacacattacat

SEQ ID NO: 136454 - DNA, 25 bp, SARS Virus
tattcaagcaaacacacattacatt

SEQ ID NO: 136455 - DNA, 25 bp, SARS Virus
attcaagcaaatccacattacatta

SEQ ID NO: 136456 - DNA, 25 bp, SARS Virus
ttcaagcaaatacacattacattaa

SEQ ID NO: 136457 - DNA, 25 bp, SARS Virus
tcaagcaaatacccattacattaaa

SEQ ID NO: 136458 - DNA, 25 bp, SARS Virus
caagcaaatacacattacattaaac

SEQ ID NO: 136459 - DNA, 25 bp, SARS Virus
aagcaaatacaccttacattaaact

SEQ ID NO: 136460 - DNA, 25 bp, SARS Virus
agcaaatacacactacattaaactg

SEQ ID NO: 136461 - DNA, 25 bp, SARS Virus
gcaaatacacatcacattaaactgt

SEQ ID NO: 136462 - DNA, 25 bp, SARS Virus
caaatacacattccattaaactgtg

SEQ ID NO: 136463 - DNA, 25 bp, SARS Virus
aaatacacattacattaaactgtgg

SEQ ID NO: 136464 - DNA, 25 bp, SARS Virus
aatacacattaccttaaactgtggg

SEQ ID NO: 136465 - DNA, 25 bp, SARS Virus
atacacattacactaaactgtggga

SEQ ID NO: 136466 - DNA, 25 bp, SARS Virus
tacacattacatcaaactgtgggaa

SEQ ID NO: 136467 - DNA, 25 bp, SARS Virus
acacattacattcaactgtgggaac

SEQ ID NO: 136468 - DNA, 25 bp, SARS Virus
cacattacattacactgtgggaact

SEQ ID NO: 136469 - DNA, 25 bp, SARS Virus
acattacattaacctgtgggaactc

SEQ ID NO: 136470 - DNA, 25 bp, SARS Virus
cattacattaaactgtgggaactct

SEQ ID NO: 136471 - DNA, 25 bp, SARS Virus
attacattaaaccgtgggaactctt

SEQ ID NO: 136472 - DNA, 25 bp, SARS Virus
ttacattaaactctgggaactcttg

SEQ ID NO: 136473 - DNA, 25 bp, SARS Virus
tacattaaactgcgggaactcttga

SEQ ID NO: 136474 - DNA, 25 bp, SARS Virus
acattaaactgtcggaactcttgac

SEQ ID NO: 136475 - DNA, 25 bp, SARS Virus
cattaaactgtgcgaactcttgacc

SEQ ID NO: 136476 - DNA, 25 bp, SARS Virus
attaaactgtggcaactcttgaccg

SEQ ID NO: 136477 - DNA, 25 bp, SARS Virus
ttaaactgtgggcactcttgaccga

SEQ ID NO: 136478 - DNA, 25 bp, SARS Virus
taaactgtgggacctcttgaccgag

SEQ ID NO: 136479 - DNA, 25 bp, SARS Virus
aaactgtgggaactcttgaccgagt

SEQ ID NO: 136480 - DNA, 25 bp, SARS Virus
aactgtgggaacccttgaccgagtc

SEQ ID NO: 136481 - DNA, 25 bp, SARS Virus
actgtgggaactcttgaccgagtct

SEQ ID NO: 136482 - DNA, 25 bp, SARS Virus
ctgtgggaactcctgaccgagtctc

SEQ ID NO: 136483 - DNA, 25 bp, SARS Virus
tgtgggaactctcgaccgagtctca

SEQ ID NO: 136484 - DNA, 25 bp, SARS Virus
gtgggaactcttcaccgagtctcag

SEQ ID NO: 136485 - DNA, 25 bp, SARS Virus
tgggaactcttgcccgagtctcagt

SEQ ID NO: 136486 - DNA, 25 bp, SARS Virus
gggaactcttgaccgagtctcagta

SEQ ID NO: 136487 - DNA, 25 bp, SARS Virus
ggaactcttgaccgagtctcagtag

SEQ ID NO: 136488 - DNA, 25 bp, SARS Virus
gaactcttgacccagtctcagtagg

SEQ ID NO: 136489 - DNA, 25 bp, SARS Virus
aactcttgaccgcgtctcagtagga

SEQ ID NO: 136490 - DNA, 25 bp, SARS Virus
actcttgaccgactctcagtaggag

SEQ ID NO: 136491 - DNA, 25 bp, SARS Virus
ctcttgaccgagcctcagtaggagt

SEQ ID NO: 136492 - DNA, 25 bp, SARS Virus
tcttgaccgagtctcagtaggagta

SEQ ID NO: 136493 - DNA, 25 bp, SARS Virus
cttgaccgagtcccagtaggagtag

SEQ ID NO: 136494 - DNA, 25 bp, SARS Virus
ttgaccgagtctcagtaggagtagt

SEQ ID NO: 136495 - DNA, 25 bp, SARS Virus
tgaccgagtctccgtaggagtagtt

SEQ ID NO: 136496 - DNA, 25 bp, SARS Virus
gaccgagtctcactaggagtagttt

SEQ ID NO: 136497 - DNA, 25 bp, SARS Virus
accgagtctcagcaggagtagtttg

SEQ ID NO: 136498 - DNA, 25 bp, SARS Virus
ccgagtctcagtcggagtagtttga

SEQ ID NO: 136499 - DNA, 25 bp, SARS Virus
cgagtctcagtacgagtagtttgaa

SEQ ID NO: 136500 - DNA, 25 bp, SARS Virus
gagtctcagtagcagtagtttgaac

SEQ ID NO: 136501 - DNA, 25 bp, SARS Virus
agtctcagtaggcgtagtttgaacg

SEQ ID NO: 136502 - DNA, 25 bp, SARS Virus
gtctcagtaggactagtttgaacgt

SEQ ID NO: 136503 - DNA, 25 bp, SARS Virus
tctcagtaggagcagtttgaacgtc

SEQ ID NO: 136504 - DNA, 25 bp, SARS Virus
ctcagtaggagtcgtttgaacgtcg

SEQ ID NO: 136505 - DNA, 25 bp, SARS Virus
tcagtaggagtactttgaacgtcgt

SEQ ID NO: 136506 - DNA, 25 bp, SARS Virus
cagtaggagtagcttgaacgtcgtt

SEQ ID NO: 136507 - DNA, 25 bp, SARS Virus
agtaggagtagtctgaacgtcgttc

SEQ ID NO: 136508 - DNA, 25 bp, SARS Virus
gtaggagtagttcgaacgtcgttct

SEQ ID NO: 136509 - DNA, 25 bp, SARS Virus
taggagtagtttcaacgtcgttctt

SEQ ID NO: 136510 - DNA, 25 bp, SARS Virus
aggagtagtttgcacgtcgttcttg

SEQ ID NO: 136511 - DNA, 25 bp, SARS Virus
ggagtagtttgaccgtcgttcttgg

SEQ ID NO: 136512 - DNA, 25 bp, SARS Virus
gagtagtttgaacgtcgttcttggt

SEQ ID NO: 136513 - DNA, 25 bp, SARS Virus
agtagtttgaacctcgttcttggtg

SEQ ID NO: 136514 - DNA, 25 bp, SARS Virus
gtagtttgaacgccgttcttggtgt

SEQ ID NO: 136515 - DNA, 25 bp, SARS Virus
tagtttgaacgtcgttcttggtgtt

SEQ ID NO: 136516 - DNA, 25 bp, SARS Virus
agtttgaacgtccttcttggtgttc

SEQ ID NO: 136517 - DNA, 25 bp, SARS Virus
gtttgaacgtcgctcttggtgttct

SEQ ID NO: 136518 - DNA, 25 bp, SARS Virus
tttgaacgtcgtccttggtgttctc

SEQ ID NO: 136519 - DNA, 25 bp, SARS Virus
ttgaacgtcgttcttggtgttctcg

SEQ ID NO: 136520 - DNA, 25 bp, SARS Virus
tgaacgtcgttcctggtgttctcgt

SEQ ID NO: 136521 - DNA, 25 bp, SARS Virus
gaacgtcgttctcggtgttctcgta

SEQ ID NO: 136522 - DNA, 25 bp, SARS Virus
aacgtcgttcttcgtgttctcgtac

SEQ ID NO: 136523 - DNA, 25 bp, SARS Virus
acgtcgttcttgctgttctcgtacg

SEQ ID NO: 136524 - DNA, 25 bp, SARS Virus
cgtcgttcttggcgttctcgtacgt

SEQ ID NO: 136525 - DNA, 25 bp, SARS Virus
gtcgttcttggtcttctcgtacgtg

SEQ ID NO: 136526 - DNA, 25 bp, SARS Virus
tcgttcttggtgctctcgtacgtgg

SEQ ID NO: 136527 - DNA, 25 bp, SARS Virus
cgttcttggtgtcctcgtacgtggg

SEQ ID NO: 136528 - DNA, 25 bp, SARS Virus
gttcttggtgttctcgtacgtggga

SEQ ID NO: 136529 - DNA, 25 bp, SARS Virus
ttcttggtgttcccgtacgtgggaa

SEQ ID NO: 136530 - DNA, 25 bp, SARS Virus
tcttggtgttctcgtacgtgggaac

SEQ ID NO: 136531 - DNA, 25 bp, SARS Virus
cttggtgttctcctacgtgggaact

SEQ ID NO: 136532 - DNA, 25 bp, SARS Virus
ttggtgttctcgcacgtgggaactc

SEQ ID NO: 136533 - DNA, 25 bp, SARS Virus
tggtgttctcgtccgtgggaactcc

SEQ ID NO: 136534 - DNA, 25 bp, SARS Virus
ggtgttctcgtacgtgggaactccg

SEQ ID NO: 136535 - DNA, 25 bp, SARS Virus
gtgttctcgtacctgggaactccgt

SEQ ID NO: 136536 - DNA, 25 bp, SARS Virus
tgttctcgtacgcgggaactccgtt

SEQ ID NO: 136537 - DNA, 25 bp, SARS Virus
gttctcgtacgtcggaactccgttg

SEQ ID NO: 136538 - DNA, 25 bp, SARS Virus
ttctcgtacgtgcgaactccgttga

SEQ ID NO: 136539 - DNA, 25 bp, SARS Virus
tctcgtacgtggcaactccgttgac

SEQ ID NO: 136540 - DNA, 25 bp, SARS Virus
ctcgtacgtgggcactccgttgacg

SEQ ID NO: 136541 - DNA, 25 bp, SARS Virus
tcgtacgtgggacctccgttgacgt

SEQ ID NO: 136542 - DNA, 25 bp, SARS Virus
cgtacgtgggaactccgttgacgtt

SEQ ID NO: 136543 - DNA, 25 bp, SARS Virus
gtacgtgggaaccccgttgacgttg

SEQ ID NO: 136544 - DNA, 25 bp, SARS Virus
tacgtgggaactccgttgacgttgt

SEQ ID NO: 136545 - DNA, 25 bp, SARS Virus
acgtgggaactccgttgacgttgtt

SEQ ID NO: 136546 - DNA, 25 bp, SARS Virus
cgtgggaactcccttgacgttgttg

SEQ ID NO: 136547 - DNA, 25 bp, SARS Virus
gtgggaactccgctgacgttgttga

SEQ ID NO: 136548 - DNA, 25 bp, SARS Virus
tgggaactccgtcgacgttgttgat

SEQ ID NO: 136549 - DNA, 25 bp, SARS Virus
gggaactccgttcacgttgttgatc

SEQ ID NO: 136550 - DNA, 25 bp, SARS Virus
ggaactccgttgccgttgttgatca

SEQ ID NO: 136551 - DNA, 25 bp, SARS Virus
gaactccgttgacgttgttgatcag

SEQ ID NO: 136552 - DNA, 25 bp, SARS Virus
aactccgttgaccttgttgatcagt

SEQ ID NO: 136553 - DNA, 25 bp, SARS Virus
actccgttgacgctgttgatcagta

SEQ ID NO: 136554 - DNA, 25 bp, SARS Virus
ctccgttgacgtcgttgatcagtac

SEQ ID NO: 136555 - DNA, 25 bp, SARS Virus
tccgttgacgttcttgatcagtacg

SEQ ID NO: 136556 - DNA, 25 bp, SARS Virus
ccgttgacgttgctgatcagtacgt

SEQ ID NO: 136557 - DNA, 25 bp, SARS Virus
cgttgacgttgtcgatcagtacgtt

SEQ ID NO: 136558 - DNA, 25 bp, SARS Virus
gttgacgttgttcatcagtacgttg

SEQ ID NO: 136559 - DNA, 25 bp, SARS Virus
ttgacgttgttgctcagtacgttgt

SEQ ID NO: 136560 - DNA, 25 bp, SARS Virus
tgacgttgttgaccagtacgttgtt

SEQ ID NO: 136561 - DNA, 25 bp, SARS Virus
gacgttgttgatcagtacgttgttt

SEQ ID NO: 136562 - DNA, 25 bp, SARS Virus
acgttgttgatccgtacgttgtttc

SEQ ID NO: 136563 - DNA, 25 bp, SARS Virus
cgttgttgatcactacgttgtttcg

SEQ ID NO: 136564 - DNA, 25 bp, SARS Virus
gttgttgatcagcacgttgtttcgt

SEQ ID NO: 136565 - DNA, 25 bp, SARS Virus
ttgttgatcagtccgttgtttcgtt

SEQ ID NO: 136566 - DNA, 25 bp, SARS Virus
tgttgatcagtacgttgtttcgttc

SEQ ID NO: 136567 - DNA, 25 bp, SARS Virus
gttgatcagtaccttgtttcgttct

SEQ ID NO: 136568 - DNA, 25 bp, SARS Virus
ttgatcagtacgctgtttcgttcta

SEQ ID NO: 136569 - DNA, 25 bp, SARS Virus
tgatcagtacgtcgtttcgttctaa

SEQ ID NO: 136570 - DNA, 25 bp, SARS Virus
gatcagtacgttctttcgttctaac

SEQ ID NO: 136571 - DNA, 25 bp, SARS Virus
atcagtacgttgcttcgttctaaca

SEQ ID NO: 136572 - DNA, 25 bp, SARS Virus
tcagtacgttgtctcgttctaacat

SEQ ID NO: 136573 - DNA, 25 bp, SARS Virus
cagtacgttgttccgttctaacatt

SEQ ID NO: 136574 - DNA, 25 bp, SARS Virus
agtacgttgtttcgttctaacattg

SEQ ID NO: 136575 - DNA, 25 bp, SARS Virus
gtacgttgtttccttctaacattgg

SEQ ID NO: 136576 - DNA, 25 bp, SARS Virus
tacgttgtttcgctctaacattggt

SEQ ID NO: 136577 - DNA, 25 bp, SARS Virus
acgttgtttcgtcctaacattggta

SEQ ID NO: 136578 - DNA, 25 bp, SARS Virus
cgttgtttcgttctaacattggtac

SEQ ID NO: 136579 - DNA, 25 bp, SARS Virus
gttgtttcgttccaacattggtact

SEQ ID NO: 136580 - DNA, 25 bp, SARS Virus
ttgtttcgttctcacattggtactg

SEQ ID NO: 136581 - DNA, 25 bp, SARS Virus
tgtttcgttctaccattggtactgc

SEQ ID NO: 136582 - DNA, 25 bp, SARS Virus
gtttcgttctaacattggtactgct

SEQ ID NO: 136583 - DNA, 25 bp, SARS Virus
tttcgttctaaccttggtactgcta

SEQ ID NO: 136584 - DNA, 25 bp, SARS Virus
ttcgttctaacactggtactgctac

SEQ ID NO: 136585 - DNA, 25 bp, SARS Virus
tcgttctaacatcggtactgctacc

SEQ ID NO: 136586 - DNA, 25 bp, SARS Virus
cgttctaacattcgtactgctaccg

SEQ ID NO: 136587 - DNA, 25 bp, SARS Virus
gttctaacattgctactgctaccgt

SEQ ID NO: 136588 - DNA, 25 bp, SARS Virus
ttctaacattggcactgctaccgtt

SEQ ID NO: 136589 - DNA, 25 bp, SARS Virus
tctaacattggtcctgctaccgtta

SEQ ID NO: 136590 - DNA, 25 bp, SARS Virus
ctaacattggtactgctaccgttaa

SEQ ID NO: 136591 - DNA, 25 bp, SARS Virus
taacattggtaccgctaccgttaat

SEQ ID NO: 136592 - DNA, 25 bp, SARS Virus
aacattggtactcctaccgttaatc

SEQ ID NO: 136593 - DNA, 25 bp, SARS Virus
acattggtactgctaccgttaatca

SEQ ID NO: 136594 - DNA, 25 bp, SARS Virus
cattggtactgccaccgttaatcag

SEQ ID NO: 136595 - DNA, 25 bp, SARS Virus
attggtactgctcccgttaatcagg

SEQ ID NO: 136596 - DNA, 25 bp, SARS Virus
ttggtactgctaccgttaatcaggt

SEQ ID NO: 136597 - DNA, 25 bp, SARS Virus
tggtactgctaccgttaatcaggtc

SEQ ID NO: 136598 - DNA, 25 bp, SARS Virus
ggtactgctacccttaatcaggtcg

SEQ ID NO: 136599 - DNA, 25 bp, SARS Virus
gtactgctaccgctaatcaggtcgt

SEQ ID NO: 136600 - DNA, 25 bp, SARS Virus
tactgctaccgtcaatcaggtcgtt

SEQ ID NO: 136601 - DNA, 25 bp, SARS Virus
actgctaccgttcatcaggtcgtta

SEQ ID NO: 136602 - DNA, 25 bp, SARS Virus
ctgctaccgttactcaggtcgttac

SEQ ID NO: 136603 - DNA, 25 bp, SARS Virus
tgctaccgttaaccaggtcgttact

SEQ ID NO: 136604 - DNA, 25 bp, SARS Virus
gctaccgttaatcaggtcgttactt

SEQ ID NO: 136605 - DNA, 25 bp, SARS Virus
ctaccgttaatccggtcgttacttc

SEQ ID NO: 136606 - DNA, 25 bp, SARS Virus
taccgttaatcacgtcgttacttcg

SEQ ID NO: 136607 - DNA, 25 bp, SARS Virus
accgttaatcagctcgttacttcgg

SEQ ID NO: 136608 - DNA, 25 bp, SARS Virus
ccgttaatcaggccgttacttcggc

SEQ ID NO: 136609 - DNA, 25 bp, SARS Virus
cgttaatcaggtcgttacttcggct

SEQ ID NO: 136610 - DNA, 25 bp, SARS Virus
gttaatcaggtccttacttcggctc

SEQ ID NO: 136611 - DNA, 25 bp, SARS Virus
ttaatcaggtcgctacttcggctcg

SEQ ID NO: 136612 - DNA, 25 bp, SARS Virus
taatcaggtcgtcacttcggctcgg

SEQ ID NO: 136613 - DNA, 25 bp, SARS Virus
aatcaggtcgttccttcggctcggt

SEQ ID NO: 136614 - DNA, 25 bp, SARS Virus
atcaggtcgttacttcggctcggtt

SEQ ID NO: 136615 - DNA, 25 bp, SARS Virus
tcaggtcgttacctcggctcggttt

SEQ ID NO: 136616 - DNA, 25 bp, SARS Virus
caggtcgttactccggctcggtttg

SEQ ID NO: 136617 - DNA, 25 bp, SARS Virus
aggtcgttacttcggctcggtttgt

SEQ ID NO: 136618 - DNA, 25 bp, SARS Virus
ggtcgttacttccgctcggtttgta

SEQ ID NO: 136619 - DNA, 25 bp, SARS Virus
gtcgttacttcgcctcggtttgtat

SEQ ID NO: 136620 - DNA, 25 bp, SARS Virus
tcgttacttcggctcggtttgtatg

SEQ ID NO: 136621 - DNA, 25 bp, SARS Virus
cgttacttcggcccggtttgtatgg

SEQ ID NO: 136622 - DNA, 25 bp, SARS Virus
gttacttcggctcggtttgtatggt

SEQ ID NO: 136623 - DNA, 25 bp, SARS Virus
ttacttcggctccgtttgtatggtt

SEQ ID NO: 136624 - DNA, 25 bp, SARS Virus
tacttcggctcgctttgtatggttc

SEQ ID NO: 136625 - DNA, 25 bp, SARS Virus
acttcggctcggcttgtatggttcc

SEQ ID NO: 136626 - DNA, 25 bp, SARS Virus
cttcggctcggtctgtatggttccg

SEQ ID NO: 136627 - DNA, 25 bp, SARS Virus
ttcggctcggttcgtatggttccgg

SEQ ID NO: 136628 - DNA, 25 bp, SARS Virus
tcggctcggtttctatggttccggt

SEQ ID NO: 136629 - DNA, 25 bp, SARS Virus
cggctcggtttgcatggttccggta

SEQ ID NO: 136630 - DNA, 25 bp, SARS Virus
ggctcggtttgtctggttccggtaa

SEQ ID NO: 136631 - DNA, 25 bp, SARS Virus
gctcggtttgtacggttccggtaaa

SEQ ID NO: 136632 - DNA, 25 bp, SARS Virus
ctcggtttgtatcgttccggtaaat

SEQ ID NO: 136633 - DNA, 25 bp, SARS Virus
tcggtttgtatgcttccggtaaatt

SEQ ID NO: 136634 - DNA, 25 bp, SARS Virus
cggtttgtatggctccggtaaatta

SEQ ID NO: 136635 - DNA, 25 bp, SARS Virus
ggtttgtatggtcccggtaaattat

SEQ ID NO: 136636 - DNA, 25 bp, SARS Virus
gtttgtatggttccggtaaattata

SEQ ID NO: 136637 - DNA, 25 bp, SARS Virus
tttgtatggttccggtaaattatat

SEQ ID NO: 136638 - DNA, 25 bp, SARS Virus
ttgtatggttcccgtaaattatata

SEQ ID NO: 136639 - DNA, 25 bp, SARS Virus
tgtatggttccgctaaattatataa

SEQ ID NO: 136640 - DNA, 25 bp, SARS Virus
gtatggttccggcaaattatataac

SEQ ID NO: 136641 - DNA, 25 bp, SARS Virus
tatggttccggtcaattatataacg

SEQ ID NO: 136642 - DNA, 25 bp, SARS Virus
atggttccggtacattatataacga

SEQ ID NO: 136643 - DNA, 25 bp, SARS Virus
tggttccggtaacttatataacgag

SEQ ID NO: 136644 - DNA, 25 bp, SARS Virus
ggttccggtaaactatataacgagt

SEQ ID NO: 136645 - DNA, 25 bp, SARS Virus
gttccggtaaatcatataacgagta

SEQ ID NO: 136646 - DNA, 25 bp, SARS Virus
ttccggtaaattctataacgagtat

SEQ ID NO: 136647 - DNA, 25 bp, SARS Virus
tccggtaaattacataacgagtata

SEQ ID NO: 136648 - DNA, 25 bp, SARS Virus
ccggtaaattatctaacgagtataa

SEQ ID NO: 136649 - DNA, 25 bp, SARS Virus
cggtaaattatacaacgagtataaa

SEQ ID NO: 136650 - DNA, 25 bp, SARS Virus
ggtaaattatatcacgagtataaaa

SEQ ID NO: 136651 - DNA, 25 bp, SARS Virus
gtaaattatataccgagtataaaag

SEQ ID NO: 136652 - DNA, 25 bp, SARS Virus
taaattatataacgagtataaaagg

SEQ ID NO: 136653 - DNA, 25 bp, SARS Virus
aaattatataaccagtataaaaggg

SEQ ID NO: 136654 - DNA, 25 bp, SARS Virus
aattatataacgcgtataaaagggt

SEQ ID NO: 136655 - DNA, 25 bp, SARS Virus
attatataacgactataaaagggtt

SEQ ID NO: 136656 - DNA, 25 bp, SARS Virus
ttatataacgagcataaaagggtta

SEQ ID NO: 136657 - DNA, 25 bp, SARS Virus
tatataacgagtctaaaagggttaa

SEQ ID NO: 136658 - DNA, 25 bp, SARS Virus
atataacgagtacaaaagggttaag

SEQ ID NO: 136659 - DNA, 25 bp, SARS Virus
tataacgagtatcaaagggttaaga

SEQ ID NO: 136660 - DNA, 25 bp, SARS Virus
ataacgagtatacaagggttaagaa

SEQ ID NO: 136661 - DNA, 25 bp, SARS Virus
taacgagtataacagggttaagaac

SEQ ID NO: 136662 - DNA, 25 bp, SARS Virus
aacgagtataaacgggttaagaact

SEQ ID NO: 136663 - DNA, 25 bp, SARS Virus
acgagtataaaacggttaagaactt

SEQ ID NO: 136664 - DNA, 25 bp, SARS Virus
cgagtataaaagcgttaagaacttc

SEQ ID NO: 136665 - DNA, 25 bp, SARS Virus
gagtataaaaggcttaagaacttcc

SEQ ID NO: 136666 - DNA, 25 bp, SARS Virus
agtataaaagggctaagaacttcca

SEQ ID NO: 136667 - DNA, 25 bp, SARS Virus
gtataaaagggtcaagaacttccag

SEQ ID NO: 136668 - DNA, 25 bp, SARS Virus
tataaaagggttcagaacttccagt

SEQ ID NO: 136669 - DNA, 25 bp, SARS Virus
ataaaagggttacgaacttccagtt

SEQ ID NO: 136670 - DNA, 25 bp, SARS Virus
taaaagggttaacaacttccagtta

SEQ ID NO: 136671 - DNA, 25 bp, SARS Virus
aaaagggttaagcacttccagttac

SEQ ID NO: 136672 - DNA, 25 bp, SARS Virus
aaagggttaagaccttccagttact

SEQ ID NO: 136673 - DNA, 25 bp, SARS Virus
tctaccattgttgatcgtcgtcatt

SEQ ID NO: 136674 - DNA, 25 bp, SARS Virus
ctaccattgtttgtcgtcgtcattt

SEQ ID NO: 136675 - DNA, 25 bp, SARS Virus
taccattgtttagcgtcgtcattta

SEQ ID NO: 136676 - DNA, 25 bp, SARS Virus
accattgtttatggtcgtcatttaa

SEQ ID NO: 136677 - DNA, 25 bp, SARS Virus
ccattgtttatcgtcgtcatttaac

SEQ ID NO: 136678 - DNA, 25 bp, SARS Virus
cattgtttatcggcgtcatttaacg

SEQ ID NO: 136679 - DNA, 25 bp, SARS Virus
attgtttatcgtggtcatttaacgt

SEQ ID NO: 136680 - DNA, 25 bp, SARS Virus
ttgtttatcgtcgtcatttaacgtt

SEQ ID NO: 136681 - DNA, 25 bp, SARS Virus
tgtttatcgtcggcatttaacgttt

SEQ ID NO: 136682 - DNA, 25 bp, SARS Virus
gtttatcgtcgtgatttaacgttta

SEQ ID NO: 136683 - DNA, 25 bp, SARS Virus
tttatcgtcgtcgtttaacgtttac

SEQ ID NO: 136684 - DNA, 25 bp, SARS Virus
ttatcgtcgtcagttaacgtttact

SEQ ID NO: 136685 - DNA, 25 bp, SARS Virus
tatcgtcgtcatgtaacgtttactt

SEQ ID NO: 136686 - DNA, 25 bp, SARS Virus
atcgtcgtcattgaacgtttacttg

SEQ ID NO: 136687 - DNA, 25 bp, SARS Virus
tcgtcgtcatttgacgtttacttga

SEQ ID NO: 136688 - DNA, 25 bp, SARS Virus
cgtcgtcatttagcgtttacttgac

SEQ ID NO: 136689 - DNA, 25 bp, SARS Virus
gtcgtcatttaaggtttacttgacc

SEQ ID NO: 136690 - DNA, 25 bp, SARS Virus
tcgtcatttaacgtttacttgacct

SEQ ID NO: 136691 - DNA, 25 bp, SARS Virus
cgtcatttaacggttacttgacctt

SEQ ID NO: 136692 - DNA, 25 bp, SARS Virus
gtcatttaacgtgtacttgaccttc

SEQ ID NO: 136693 - DNA, 25 bp, SARS Virus
tcatttaacgttgacttgaccttcg

SEQ ID NO: 136694 - DNA, 25 bp, SARS Virus
catttaacgtttgcttgaccttcgg

SEQ ID NO: 136695 - DNA, 25 bp, SARS Virus
atttaacgtttagttgaccttcggg

SEQ ID NO: 136696 - DNA, 25 bp, SARS Virus
tttaacgtttacgtgaccttcggga

SEQ ID NO: 136697 - DNA, 25 bp, SARS Virus
ttaacgtttactggaccttcgggaa

SEQ ID NO: 136698 - DNA, 25 bp, SARS Virus
taacgtttacttgaccttcgggaat

SEQ ID NO: 136699 - DNA, 25 bp, SARS Virus
aacgtttacttggccttcgggaata

SEQ ID NO: 136700 - DNA, 25 bp, SARS Virus
acgtttacttgagcttcgggaatat

SEQ ID NO: 136701 - DNA, 25 bp, SARS Virus
cgtttacttgacgttcgggaatatt

SEQ ID NO: 136702 - DNA, 25 bp, SARS Virus
gtttacttgaccgtcgggaatattt

SEQ ID NO: 136703 - DNA, 25 bp, SARS Virus
tttacttgacctgcgggaatatttc

SEQ ID NO: 136704 - DNA, 25 bp, SARS Virus
ttacttgaccttggggaatatttcc

SEQ ID NO: 136705 - DNA, 25 bp, SARS Virus
tacttgaccttcgggaatatttccc

SEQ ID NO: 136706 - DNA, 25 bp, SARS Virus
acttgaccttcgggaatatttcccg

SEQ ID NO: 136707 - DNA, 25 bp, SARS Virus
cttgaccttcgggaatatttcccga

SEQ ID NO: 136708 - DNA, 25 bp, SARS Virus
ttgaccttcggggatatttcccgat

SEQ ID NO: 136709 - DNA, 25 bp, SARS Virus
tgaccttcgggagtatttcccgatc

SEQ ID NO: 136710 - DNA, 25 bp, SARS Virus
gaccttcgggaagatttcccgatcg

SEQ ID NO: 136711 - DNA, 25 bp, SARS Virus
accttcgggaatgtttcccgatcga

SEQ ID NO: 136712 - DNA, 25 bp, SARS Virus
ccttcgggaatagttcccgatcgac

SEQ ID NO: 136713 - DNA, 25 bp, SARS Virus
cttcgggaatatgtcccgatcgacg

SEQ ID NO: 136714 - DNA, 25 bp, SARS Virus
ttcgggaatattgcccgatcgacgg

SEQ ID NO: 136715 - DNA, 25 bp, SARS Virus
tcgggaatatttgccgatcgacggt

SEQ ID NO: 136716 - DNA, 25 bp, SARS Virus
cgggaatatttcgcgatcgacggta

SEQ ID NO: 136717 - DNA, 25 bp, SARS Virus
gggaatatttccggatcgacggtag

SEQ ID NO: 136718 - DNA, 25 bp, SARS Virus
ggaatatttcccgatcgacggtaga

SEQ ID NO: 136719 - DNA, 25 bp, SARS Virus
gaatatttcccggtcgacggtagaa

SEQ ID NO: 136720 - DNA, 25 bp, SARS Virus
aatatttcccgagcgacggtagaaa

SEQ ID NO: 136721 - DNA, 25 bp, SARS Virus
atatttcccgatggacggtagaaaa

SEQ ID NO: 136722 - DNA, 25 bp, SARS Virus
tatttcccgatcgacggtagaaaat

SEQ ID NO: 136723 - DNA, 25 bp, SARS Virus
atttcccgatcggcggtagaaaata

SEQ ID NO: 136724 - DNA, 25 bp, SARS Virus
tttcccgatcgagggtagaaaataa

SEQ ID NO: 136725 - DNA, 25 bp, SARS Virus
ttcccgatcgacggtagaaaataac

SEQ ID NO: 136726 - DNA, 25 bp, SARS Virus
tcccgatcgacggtagaaaataact

SEQ ID NO: 136727 - DNA, 25 bp, SARS Virus
cccgatcgacgggagaaaataactc

SEQ ID NO: 136728 - DNA, 25 bp, SARS Virus
ccgatcgacggtggaaaataactcg

SEQ ID NO: 136729 - DNA, 25 bp, SARS Virus
cgatcgacggtagaaaataactcgc

SEQ ID NO: 136730 - DNA, 25 bp, SARS Virus
gatcgacggtaggaaataactcgcg

SEQ ID NO: 136731 - DNA, 25 bp, SARS Virus
atcgacggtagagaataactcgcgt

SEQ ID NO: 136732 - DNA, 25 bp, SARS Virus
tcgacggtagaagataactcgcgtt

SEQ ID NO: 136733 - DNA, 25 bp, SARS Virus
cgacggtagaaagtaactcgcgtta

SEQ ID NO: 136734 - DNA, 25 bp, SARS Virus
gacggtagaaaagaactcgcgttaa

SEQ ID NO: 136735 - DNA, 25 bp, SARS Virus
acggtagaaaatgactcgcgttaat

SEQ ID NO: 136736 - DNA, 25 bp, SARS Virus
cggtagaaaatagctcgcgttaata

SEQ ID NO: 136737 - DNA, 25 bp, SARS Virus
ggtagaaaataagtcgcgttaataa

SEQ ID NO: 136738 - DNA, 25 bp, SARS Virus
gtagaaaataacgcgcgttaataaa

SEQ ID NO: 136739 - DNA, 25 bp, SARS Virus
tagaaaataactggcgttaataaaa

SEQ ID NO: 136740 - DNA, 25 bp, SARS Virus
agaaaataactcgcgttaataaaac

SEQ ID NO: 136741 - DNA, 25 bp, SARS Virus
gaaaataactcgggttaataaaacc

SEQ ID NO: 136742 - DNA, 25 bp, SARS Virus
aaaataactcgcgttaataaaacca

SEQ ID NO: 136743 - DNA, 25 bp, SARS Virus
aaataactcgcggtaataaaaccat

SEQ ID NO: 136744 - DNA, 25 bp, SARS Virus
aataactcgcgtgaataaaaccatc

SEQ ID NO: 136745 - DNA, 25 bp, SARS Virus
ataactcgcgttgataaaaccatcg

SEQ ID NO: 136746 - DNA, 25 bp, SARS Virus
taactcgcgttagtaaaaccatcgc

SEQ ID NO: 136747 - DNA, 25 bp, SARS Virus
aactcgcgttaagaaaaccatcgcg

SEQ ID NO: 136748 - DNA, 25 bp, SARS Virus
actcgcgttaatgaaaccatcgcga

SEQ ID NO: 136749 - DNA, 25 bp, SARS Virus
ctcgcgttaatagaaccatcgcgag

SEQ ID NO: 136750 - DNA, 25 bp, SARS Virus
tcgcgttaataagaccatcgcgaga

SEQ ID NO: 136751 - DNA, 25 bp, SARS Virus
cgcgttaataaagccatcgcgagac

SEQ ID NO: 136752 - DNA, 25 bp, SARS Virus
gcgttaataaaagcatcgcgagact

SEQ ID NO: 136753 - DNA, 25 bp, SARS Virus
cgttaataaaacgatcgcgagactt

SEQ ID NO: 136754 - DNA, 25 bp, SARS Virus
gttaataaaaccgtcgcgagacttt

SEQ ID NO: 136755 - DNA, 25 bp, SARS Virus
ttaataaaaccagcgcgagactttt

SEQ ID NO: 136756 - DNA, 25 bp, SARS Virus
taataaaaccatggcgagacttttt

SEQ ID NO: 136757 - DNA, 25 bp, SARS Virus
aataaaaccatcgcgagactttttg

SEQ ID NO: 136758 - DNA, 25 bp, SARS Virus
ataaaaccatcgggagactttttgt

SEQ ID NO: 136759 - DNA, 25 bp, SARS Virus
taaaaccatcgcgagactttttgtc

SEQ ID NO: 136760 - DNA, 25 bp, SARS Virus
aaaaccatcgcgggactttttgtcg

SEQ ID NO: 136761 - DNA, 25 bp, SARS Virus
aaaccatcgcgagactttttgtcgt

SEQ ID NO: 136762 - DNA, 25 bp, SARS Virus
aaccatcgcgaggctttttgtcgtt

SEQ ID NO: 136763 - DNA, 25 bp, SARS Virus
accatcgcgagagtttttgtcgttc

SEQ ID NO: 136764 - DNA, 25 bp, SARS Virus
ccatcgcgagacgttttgtcgttct

SEQ ID NO: 136765 - DNA, 25 bp, SARS Virus
catcgcgagactgtttgtcgttctt

SEQ ID NO: 136766 - DNA, 25 bp, SARS Virus
atcgcgagacttgttgtcgttcttt

SEQ ID NO: 136767 - DNA, 25 bp, SARS Virus
tcgcgagactttgtgtcgttcttta

SEQ ID NO: 136768 - DNA, 25 bp, SARS Virus
cgcgagacttttggtcgttctttac

SEQ ID NO: 136769 - DNA, 25 bp, SARS Virus
gcgagactttttgtcgttctttacg

SEQ ID NO: 136770 - DNA, 25 bp, SARS Virus
cgagactttttggcgttctttacgt

SEQ ID NO: 136771 - DNA, 25 bp, SARS Virus
gagactttttgtggttctttacgtt

SEQ ID NO: 136772 - DNA, 25 bp, SARS Virus
agactttttgtcgttctttacgttg

SEQ ID NO: 136773 - DNA, 25 bp, SARS Virus
gactttttgtcggtctttacgttgc

SEQ ID NO: 136774 - DNA, 25 bp, SARS Virus
actttttgtcgtgctttacgttgcg

SEQ ID NO: 136775 - DNA, 25 bp, SARS Virus
ctttttgtcgttgtttacgttgcgg

SEQ ID NO: 136776 - DNA, 25 bp, SARS Virus
tttttgtcgttcgttacgttgcggt

SEQ ID NO: 136777 - DNA, 25 bp, SARS Virus
ttttgtcgttctgtacgttgcggtt

SEQ ID NO: 136778 - DNA, 25 bp, SARS Virus
tttgtcgttcttgacgttgcggtta

SEQ ID NO: 136779 - DNA, 25 bp, SARS Virus
ttgtcgttctttgcgttgcggttat

SEQ ID NO: 136780 - DNA, 25 bp, SARS Virus
tgtcgttctttaggttgcggttatt

SEQ ID NO: 136781 - DNA, 25 bp, SARS Virus
gtcgttctttacgttgcggttattg

SEQ ID NO: 136782 - DNA, 25 bp, SARS Virus
tcgttctttacggtgcggttattgt

SEQ ID NO: 136783 - DNA, 25 bp, SARS Virus
cgttctttacgtggcggttattgtt

SEQ ID NO: 136784 - DNA, 25 bp, SARS Virus
gttctttacgttgcggttattgttc

SEQ ID NO: 136785 - DNA, 25 bp, SARS Virus
ttctttacgttggggttattgttcg

SEQ ID NO: 136786 - DNA, 25 bp, SARS Virus
tctttacgttgcggttattgttcgg

SEQ ID NO: 136787 - DNA, 25 bp, SARS Virus
ctttacgttgcggttattgttcggt

SEQ ID NO: 136788 - DNA, 25 bp, SARS Virus
tttacgttgcgggtattgttcggta

SEQ ID NO: 136789 - DNA, 25 bp, SARS Virus
ttacgttgcggtgattgttcggtag

SEQ ID NO: 136790 - DNA, 25 bp, SARS Virus
tacgttgcggttgttgttcggtagg

SEQ ID NO: 136791 - DNA, 25 bp, SARS Virus
acgttgcggttagtgttcggtaggc

SEQ ID NO: 136792 - DNA, 25 bp, SARS Virus
cgttgcggttatggttcggtaggct

SEQ ID NO: 136793 - DNA, 25 bp, SARS Virus
gttgcggttattgttcggtaggctt

SEQ ID NO: 136794 - DNA, 25 bp, SARS Virus
ttgcggttattggtcggtaggcttt

SEQ ID NO: 136795 - DNA, 25 bp, SARS Virus
tgcggttattgtgcggtaggctttc

SEQ ID NO: 136796 - DNA, 25 bp, SARS Virus
gcggttattgttgggtaggctttcc

SEQ ID NO: 136797 - DNA, 25 bp, SARS Virus
cggttattgttcggtaggctttccc

SEQ ID NO: 136798 - DNA, 25 bp, SARS Virus
ggttattgttcggtaggctttccct

SEQ ID NO: 136799 - DNA, 25 bp, SARS Virus
gttattgttcgggaggctttccctc

SEQ ID NO: 136800 - DNA, 25 bp, SARS Virus
ttattgttcggtgggctttccctca

SEQ ID NO: 136801 - DNA, 25 bp, SARS Virus
tattgttcggtaggctttccctcac

SEQ ID NO: 136802 - DNA, 25 bp, SARS Virus
attgttcggtaggctttccctcact

SEQ ID NO: 136803 - DNA, 25 bp, SARS Virus
ttgttcggtagggtttccctcactc

SEQ ID NO: 136804 - DNA, 25 bp, SARS Virus
tgttcggtaggcgttccctcactcc

SEQ ID NO: 136805 - DNA, 25 bp, SARS Virus
gttcggtaggctgtccctcactccg

SEQ ID NO: 136806 - DNA, 25 bp, SARS Virus
ttcggtaggcttgccctcactccga

SEQ ID NO: 136807 - DNA, 25 bp, SARS Virus
tcggtaggctttgcctcactccgaa

SEQ ID NO: 136808 - DNA, 25 bp, SARS Virus
cggtaggctttcgctcactccgaac

SEQ ID NO: 136809 - DNA, 25 bp, SARS Virus
ggtaggctttccgtcactccgaaca

SEQ ID NO: 136810 - DNA, 25 bp, SARS Virus
gtaggctttcccgcactccgaacat

SEQ ID NO: 136811 - DNA, 25 bp, SARS Virus
taggctttccctgactccgaacatc

SEQ ID NO: 136812 - DNA, 25 bp, SARS Virus
aggctttccctcgctccgaacatcg

SEQ ID NO: 136813 - DNA, 25 bp, SARS Virus
ggctttccctcagtccgaacatcgc

SEQ ID NO: 136814 - DNA, 25 bp, SARS Virus
gctttccctcacgccgaacatcgcc

SEQ ID NO: 136815 - DNA, 25 bp, SARS Virus
ctttccctcactgcgaacatcgcca

SEQ ID NO: 136816 - DNA, 25 bp, SARS Virus
tttccctcactcggaacatcgccat

SEQ ID NO: 136817 - DNA, 25 bp, SARS Virus
ttccctcactccgaacatcgccata

SEQ ID NO: 136818 - DNA, 25 bp, SARS Virus
tccctcactccggacatcgccatag

SEQ ID NO: 136819 - DNA, 25 bp, SARS Virus
ccctcactccgagcatcgccatagc

SEQ ID NO: 136820 - DNA, 25 bp, SARS Virus
cctcactccgaagatcgccatagca

SEQ ID NO: 136821 - DNA, 25 bp, SARS Virus
ctcactccgaacgtcgccatagcaa

SEQ ID NO: 136822 - DNA, 25 bp, SARS Virus
tcactccgaacagcgccatagcaac

SEQ ID NO: 136823 - DNA, 25 bp, SARS Virus
cactccgaacatggccatagcaacg

SEQ ID NO: 136824 - DNA, 25 bp, SARS Virus
actccgaacatcgccatagcaacga

SEQ ID NO: 136825 - DNA, 25 bp, SARS Virus
ctccgaacatcggcatagcaacgac

SEQ ID NO: 136826 - DNA, 25 bp, SARS Virus
tccgaacatcgcgatagcaacgaca

SEQ ID NO: 136827 - DNA, 25 bp, SARS Virus
ccgaacatcgccgtagcaacgacat

SEQ ID NO: 136828 - DNA, 25 bp, SARS Virus
cgaacatcgccagagcaacgacatc

SEQ ID NO: 136829 - DNA, 25 bp, SARS Virus
gaacatcgccatggcaacgacatcg

SEQ ID NO: 136830 - DNA, 25 bp, SARS Virus
aacatcgccatagcaacgacatcgt

SEQ ID NO: 136831 - DNA, 25 bp, SARS Virus
acatcgccataggaacgacatcgta

SEQ ID NO: 136832 - DNA, 25 bp, SARS Virus
catcgccatagcgacgacatcgtac

SEQ ID NO: 136833 - DNA, 25 bp, SARS Virus
atcgccatagcagcgacatcgtact

SEQ ID NO: 136834 - DNA, 25 bp, SARS Virus
tcgccatagcaaggacatcgtactt

SEQ ID NO: 136835 - DNA, 25 bp, SARS Virus
cgccatagcaacgacatcgtacttg

SEQ ID NO: 136836 - DNA, 25 bp, SARS Virus
gccatagcaacggcatcgtacttgt

SEQ ID NO: 136837 - DNA, 25 bp, SARS Virus
ccatagcaacgagatcgtacttgtc

SEQ ID NO: 136838 - DNA, 25 bp, SARS Virus
catagcaacgacgtcgtacttgtca

SEQ ID NO: 136839 - DNA, 25 bp, SARS Virus
atagcaacgacagcgtacttgtcat

SEQ ID NO: 136840 - DNA, 25 bp, SARS Virus
tagcaacgacatggtacttgtcatg

SEQ ID NO: 136841 - DNA, 25 bp, SARS Virus
agcaacgacatcgtacttgtcatga

SEQ ID NO: 136842 - DNA, 25 bp, SARS Virus
gcaacgacatcggacttgtcatgaa

SEQ ID NO: 136843 - DNA, 25 bp, SARS Virus
caacgacatcgtgcttgtcatgaac

SEQ ID NO: 136844 - DNA, 25 bp, SARS Virus
aacgacatcgtagttgtcatgaacg

SEQ ID NO: 136845 - DNA, 25 bp, SARS Virus
acgacatcgtacgtgtcatgaacgt

SEQ ID NO: 136846 - DNA, 25 bp, SARS Virus
cgacatcgtactggtcatgaacgtc

SEQ ID NO: 136847 - DNA, 25 bp, SARS Virus
gacatcgtacttgtcatgaacgtcc

SEQ ID NO: 136848 - DNA, 25 bp, SARS Virus
acatcgtacttggcatgaacgtcct

SEQ ID NO: 136849 - DNA, 25 bp, SARS Virus
catcgtacttgtgatgaacgtcctc

SEQ ID NO: 136850 - DNA, 25 bp, SARS Virus
atcgtacttgtcgtgaacgtcctct

SEQ ID NO: 136851 - DNA, 25 bp, SARS Virus
tcgtacttgtcaggaacgtcctctt

SEQ ID NO: 136852 - DNA, 25 bp, SARS Virus
cgtacttgtcatgaacgtcctcttc

SEQ ID NO: 136853 - DNA, 25 bp, SARS Virus
gtacttgtcatggacgtcctcttcg

SEQ ID NO: 136854 - DNA, 25 bp, SARS Virus
tacttgtcatgagcgtcctcttcgt

SEQ ID NO: 136855 - DNA, 25 bp, SARS Virus
acttgtcatgaaggtcctcttcgta

SEQ ID NO: 136856 - DNA, 25 bp, SARS Virus
cttgtcatgaacgtcctcttcgtaa

SEQ ID NO: 136857 - DNA, 25 bp, SARS Virus
ttgtcatgaacggcctcttcgtaac

SEQ ID NO: 136858 - DNA, 25 bp, SARS Virus
tgtcatgaacgtgctcttcgtaaca

SEQ ID NO: 136859 - DNA, 25 bp, SARS Virus
gtcatgaacgtcgtcttcgtaacag

SEQ ID NO: 136860 - DNA, 25 bp, SARS Virus
tcatgaacgtccgcttcgtaacagt

SEQ ID NO: 136861 - DNA, 25 bp, SARS Virus
catgaacgtcctgttcgtaacagtt

SEQ ID NO: 136862 - DNA, 25 bp, SARS Virus
atgaacgtcctcgtcgtaacagtta

SEQ ID NO: 136863 - DNA, 25 bp, SARS Virus
tgaacgtcctctgcgtaacagttaa

SEQ ID NO: 136864 - DNA, 25 bp, SARS Virus
gaacgtcctcttggtaacagttaaa

SEQ ID NO: 136865 - DNA, 25 bp, SARS Virus
aacgtcctcttcgtaacagttaaaa

SEQ ID NO: 136866 - DNA, 25 bp, SARS Virus
acgtcctcttcggaacagttaaaaa

SEQ ID NO: 136867 - DNA, 25 bp, SARS Virus
cgtcctcttcgtgacagttaaaaat

SEQ ID NO: 136868 - DNA, 25 bp, SARS Virus
gtcctcttcgtagcagttaaaaatg

SEQ ID NO: 136869 - DNA, 25 bp, SARS Virus
tcctcttcgtaagagttaaaaatga

SEQ ID NO: 136870 - DNA, 25 bp, SARS Virus
cctcttcgtaacggttaaaaatgac

SEQ ID NO: 136871 - DNA, 25 bp, SARS Virus
ctcttcgtaacagttaaaaatgacc

SEQ ID NO: 136872 - DNA, 25 bp, SARS Virus
tcttcgtaacaggtaaaaatgaccg

SEQ ID NO: 136873 - DNA, 25 bp, SARS Virus
cttcgtaacagtgaaaaatgaccga

SEQ ID NO: 136874 - DNA, 25 bp, SARS Virus
ttcgtaacagttgaaaatgaccgac

SEQ ID NO: 136875 - DNA, 25 bp, SARS Virus
tcgtaacagttagaaatgaccgaca

SEQ ID NO: 136876 - DNA, 25 bp, SARS Virus
cgtaacagttaagaatgaccgacac

SEQ ID NO: 136877 - DNA, 25 bp, SARS Virus
gtaacagttaaagatgaccgacacg

SEQ ID NO: 136878 - DNA, 25 bp, SARS Virus
taacagttaaaagtgaccgacacgt

SEQ ID NO: 136879 - DNA, 25 bp, SARS Virus
aacagttaaaaaggaccgacacgtc

SEQ ID NO: 136880 - DNA, 25 bp, SARS Virus
acagttaaaaatgaccgacacgtca

SEQ ID NO: 136881 - DNA, 25 bp, SARS Virus
cagttaaaaatggccgacacgtcat

SEQ ID NO: 136882 - DNA, 25 bp, SARS Virus
agttaaaaatgagcgacacgtcatt

SEQ ID NO: 136883 - DNA, 25 bp, SARS Virus
gttaaaaatgacggacacgtcatta

SEQ ID NO: 136884 - DNA, 25 bp, SARS Virus
ttaaaaatgaccgacacgtcattaa

SEQ ID NO: 136885 - DNA, 25 bp, SARS Virus
taaaaatgaccggcacgtcattaac

SEQ ID NO: 136886 - DNA, 25 bp, SARS Virus
aaaaatgaccgagacgtcattaact

SEQ ID NO: 136887 - DNA, 25 bp, SARS Virus
aaaatgaccgacgcgtcattaacta

SEQ ID NO: 136888 - DNA, 25 bp, SARS Virus
aaatgaccgacaggtcattaactag

SEQ ID NO: 136889 - DNA, 25 bp, SARS Virus
aatgaccgacacgtcattaactaga

SEQ ID NO: 136890 - DNA, 25 bp, SARS Virus
atgaccgacacggcattaactagat

SEQ ID NO: 136891 - DNA, 25 bp, SARS Virus
tgaccgacacgtgattaactagatt

SEQ ID NO: 136892 - DNA, 25 bp, SARS Virus
gaccgacacgtcgttaactagattc

SEQ ID NO: 136893 - DNA, 25 bp, SARS Virus
accgacacgtcagtaactagattct

SEQ ID NO: 136894 - DNA, 25 bp, SARS Virus
ccgacacgtcatgaactagattctc

SEQ ID NO: 136895 - DNA, 25 bp, SARS Virus
cgacacgtcattgactagattctca

SEQ ID NO: 136896 - DNA, 25 bp, SARS Virus
gacacgtcattagctagattctcat

SEQ ID NO: 136897 - DNA, 25 bp, SARS Virus
acacgtcattaagtagattctcatt

SEQ ID NO: 136898 - DNA, 25 bp, SARS Virus
cacgtcattaacgagattctcattt

SEQ ID NO: 136899 - DNA, 25 bp, SARS Virus
acgtcattaactggattctcatttt

SEQ ID NO: 136900 - DNA, 25 bp, SARS Virus
cgtcattaactagattctcattttt

SEQ ID NO: 136901 - DNA, 25 bp, SARS Virus
gtcattaactaggttctcatttttt

SEQ ID NO: 136902 - DNA, 25 bp, SARS Virus
tcattaactagagtctcatttttta

SEQ ID NO: 136903 - DNA, 25 bp, SARS Virus
cattaactagatgctcattttttag

SEQ ID NO: 136904 - DNA, 25 bp, SARS Virus
attaactagattgtcattttttaga

SEQ ID NO: 136905 - DNA, 25 bp, SARS Virus
ttaactagattcgcattttttagag

SEQ ID NO: 136906 - DNA, 25 bp, SARS Virus
taactagattctgattttttagagt

SEQ ID NO: 136907 - DNA, 25 bp, SARS Virus
aactagattctcgttttttagagta

SEQ ID NO: 136908 - DNA, 25 bp, SARS Virus
actagattctcagtttttagagtat

SEQ ID NO: 136909 - DNA, 25 bp, SARS Virus
ctagattctcatgttttagagtatt

SEQ ID NO: 136910 - DNA, 25 bp, SARS Virus
tagattctcattgtttagagtattt

SEQ ID NO: 136911 - DNA, 25 bp, SARS Virus
agattctcatttgttagagtatttg

SEQ ID NO: 136912 - DNA, 25 bp, SARS Virus
gattctcattttgtagagtatttgt

SEQ ID NO: 136913 - DNA, 25 bp, SARS Virus
attctcatttttgagagtatttgtt

SEQ ID NO: 136914 - DNA, 25 bp, SARS Virus
ttctcattttttggagtatttgttt

SEQ ID NO: 136915 - DNA, 25 bp, SARS Virus
tctcattttttagagtatttgttta

SEQ ID NO: 136916 - DNA, 25 bp, SARS Virus
ctcattttttagggtatttgtttag

SEQ ID NO: 136917 - DNA, 25 bp, SARS Virus
tcattttttagagtatttgtttagg

SEQ ID NO: 136918 - DNA, 25 bp, SARS Virus
cattttttagaggatttgtttaggt

SEQ ID NO: 136919 - DNA, 25 bp, SARS Virus
attttttagagtgtttgtttaggta

SEQ ID NO: 136920 - DNA, 25 bp, SARS Virus
ttttttagagtagttgtttaggtat

SEQ ID NO: 136921 - DNA, 25 bp, SARS Virus
tttttagagtatgtgtttaggtatt

SEQ ID NO: 136922 - DNA, 25 bp, SARS Virus
ttttagagtattggtttaggtattc

SEQ ID NO: 136923 - DNA, 25 bp, SARS Virus
tttagagtatttgtttaggtattca

SEQ ID NO: 136924 - DNA, 25 bp, SARS Virus
ttagagtatttggttaggtattcaa

SEQ ID NO: 136925 - DNA, 25 bp, SARS Virus
tagagtatttgtgtaggtattcaag

SEQ ID NO: 136926 - DNA, 25 bp, SARS Virus
agagtatttgttgaggtattcaagc

SEQ ID NO: 136927 - DNA, 25 bp, SARS Virus
gagtatttgtttgggtattcaagca

SEQ ID NO: 136928 - DNA, 25 bp, SARS Virus
agtatttgtttaggtattcaagcaa

SEQ ID NO: 136929 - DNA, 25 bp, SARS Virus
gtatttgtttaggtattcaagcaaa

SEQ ID NO: 136930 - DNA, 25 bp, SARS Virus
tatttgtttagggattcaagcaaat

SEQ ID NO: 136931 - DNA, 25 bp, SARS Virus
atttgtttaggtgttcaagcaaata

SEQ ID NO: 136932 - DNA, 25 bp, SARS Virus
tttgtttaggtagtcaagcaaatac

SEQ ID NO: 136933 - DNA, 25 bp, SARS Virus
ttgtttaggtatgcaagcaaataca

SEQ ID NO: 136934 - DNA, 25 bp, SARS Virus
tgtttaggtattgaagcaaatacac

SEQ ID NO: 136935 - DNA, 25 bp, SARS Virus
gtttaggtattcgagcaaatacaca

SEQ ID NO: 136936 - DNA, 25 bp, SARS Virus
tttaggtattcaggcaaatacacat

SEQ ID NO: 136937 - DNA, 25 bp, SARS Virus
ttaggtattcaagcaaatacacatt

SEQ ID NO: 136938 - DNA, 25 bp, SARS Virus
taggtattcaaggaaatacacatta

SEQ ID NO: 136939 - DNA, 25 bp, SARS Virus
aggtattcaagcgaatacacattac

SEQ ID NO: 136940 - DNA, 25 bp, SARS Virus
ggtattcaagcagatacacattaca

SEQ ID NO: 136941 - DNA, 25 bp, SARS Virus
gtattcaagcaagtacacattacat

SEQ ID NO: 136942 - DNA, 25 bp, SARS Virus
tattcaagcaaagacacattacatt

SEQ ID NO: 136943 - DNA, 25 bp, SARS Virus
attcaagcaaatgcacattacatta

SEQ ID NO: 136944 - DNA, 25 bp, SARS Virus
ttcaagcaaatagacattacattaa

SEQ ID NO: 136945 - DNA, 25 bp, SARS Virus
tcaagcaaatacgcattacattaaa

SEQ ID NO: 136946 - DNA, 25 bp, SARS Virus
caagcaaatacagattacattaaac

SEQ ID NO: 136947 - DNA, 25 bp, SARS Virus
aagcaaatacacgttacattaaact

SEQ ID NO: 136948 - DNA, 25 bp, SARS Virus
agcaaatacacagtacattaaactg

SEQ ID NO: 136949 - DNA, 25 bp, SARS Virus
gcaaatacacatgacattaaactgt

SEQ ID NO: 136950 - DNA, 25 bp, SARS Virus
caaatacacattgcattaaactgtg

SEQ ID NO: 136951 - DNA, 25 bp, SARS Virus
aaatacacattagattaaactgtgg

SEQ ID NO: 136952 - DNA, 25 bp, SARS Virus
aatacacattacgttaaactgtggg

SEQ ID NO: 136953 - DNA, 25 bp, SARS Virus
atacacattacagtaaactgtggga

SEQ ID NO: 136954 - DNA, 25 bp, SARS Virus
tacacattacatgaaactgtgggaa

SEQ ID NO: 136955 - DNA, 25 bp, SARS Virus
acacattacattgaactgtgggaac

SEQ ID NO: 136956 - DNA, 25 bp, SARS Virus
cacattacattagactgtgggaact

SEQ ID NO: 136957 - DNA, 25 bp, SARS Virus
acattacattaagctgtgggaactc

SEQ ID NO: 136958 - DNA, 25 bp, SARS Virus
cattacattaaagtgtgggaactct

SEQ ID NO: 136959 - DNA, 25 bp, SARS Virus
attacattaaacggtgggaactctt

SEQ ID NO: 136960 - DNA, 25 bp, SARS Virus
ttacattaaactgtgggaactcttg

SEQ ID NO: 136961 - DNA, 25 bp, SARS Virus
tacattaaactgggggaactcttga

SEQ ID NO: 136962 - DNA, 25 bp, SARS Virus
acattaaactgtgggaactcttgac

SEQ ID NO: 136963 - DNA, 25 bp, SARS Virus
cattaaactgtgggaactcttgacc

SEQ ID NO: 136964 - DNA, 25 bp, SARS Virus
attaaactgtgggaactcttgaccg

SEQ ID NO: 136965 - DNA, 25 bp, SARS Virus
ttaaactgtggggactcttgaccga

SEQ ID NO: 136966 - DNA, 25 bp, SARS Virus
taaactgtgggagctcttgaccgag

SEQ ID NO: 136967 - DNA, 25 bp, SARS Virus
aaactgtgggaagtcttgaccgagt

SEQ ID NO: 136968 - DNA, 25 bp, SARS Virus
aactgtgggaacgcttgaccgagtc

SEQ ID NO: 136969 - DNA, 25 bp, SARS Virus
actgtgggaactgttgaccgagtct

SEQ ID NO: 136970 - DNA, 25 bp, SARS Virus
ctgtgggaactcgtgaccgagtctc

SEQ ID NO: 136971 - DNA, 25 bp, SARS Virus
tgtgggaactctggaccgagtctca

SEQ ID NO: 136972 - DNA, 25 bp, SARS Virus
gtgggaactcttgaccgagtctcag

SEQ ID NO: 136973 - DNA, 25 bp, SARS Virus
tgggaactcttggccgagtctcagt

SEQ ID NO: 136974 - DNA, 25 bp, SARS Virus
gggaactcttgagcgagtctcagta

SEQ ID NO: 136975 - DNA, 25 bp, SARS Virus
ggaactcttgacggagtctcagtag

SEQ ID NO: 136976 - DNA, 25 bp, SARS Virus
gaactcttgaccgagtctcagtagg

SEQ ID NO: 136977 - DNA, 25 bp, SARS Virus
aactcttgaccgggtctcagtagga

SEQ ID NO: 136978 - DNA, 25 bp, SARS Virus
actcttgaccgagtctcagtaggag

SEQ ID NO: 136979 - DNA, 25 bp, SARS Virus
ctcttgaccgaggctcagtaggagt

SEQ ID NO: 136980 - DNA, 25 bp, SARS Virus
tcttgaccgagtgtcagtaggagta

SEQ ID NO: 136981 - DNA, 25 bp, SARS Virus
cttgaccgagtcgcagtaggagtag

SEQ ID NO: 136982 - DNA, 25 bp, SARS Virus
ttgaccgagtctgagtaggagtagt

SEQ ID NO: 136983 - DNA, 25 bp, SARS Virus
tgaccgagtctcggtaggagtagtt

SEQ ID NO: 136984 - DNA, 25 bp, SARS Virus
gaccgagtctcagtaggagtagttt

SEQ ID NO: 136985 - DNA, 25 bp, SARS Virus
accgagtctcaggaggagtagtttg

SEQ ID NO: 136986 - DNA, 25 bp, SARS Virus
ccgagtctcagtgggagtagtttga

SEQ ID NO: 136987 - DNA, 25 bp, SARS Virus
cgagtctcagtaggagtagtttgaa

SEQ ID NO: 136988 - DNA, 25 bp, SARS Virus
gagtctcagtaggagtagtttgaac

SEQ ID NO: 136989 - DNA, 25 bp, SARS Virus
agtctcagtaggggtagtttgaacg

SEQ ID NO: 136990 - DNA, 25 bp, SARS Virus
gtctcagtaggagtagtttgaacgt

SEQ ID NO: 136991 - DNA, 25 bp, SARS Virus
tctcagtaggaggagtttgaacgtc

SEQ ID NO: 136992 - DNA, 25 bp, SARS Virus
ctcagtaggagtggtttgaacgtcg

SEQ ID NO: 136993 - DNA, 25 bp, SARS Virus
tcagtaggagtagtttgaacgtcgt

SEQ ID NO: 136994 - DNA, 25 bp, SARS Virus
cagtaggagtaggttgaacgtcgtt

SEQ ID NO: 136995 - DNA, 25 bp, SARS Virus
agtaggagtagtgtgaacgtcgttc

SEQ ID NO: 136996 - DNA, 25 bp, SARS Virus
gtaggagtagttggaacgtcgttct

SEQ ID NO: 136997 - DNA, 25 bp, SARS Virus
taggagtagtttgaacgtcgttctt

SEQ ID NO: 136998 - DNA, 25 bp, SARS Virus
aggagtagtttggacgtcgttcttg

SEQ ID NO: 136999 - DNA, 25 bp, SARS Virus
ggagtagtttgagcgtcgttcttgg

SEQ ID NO: 137000 - DNA, 25 bp, SARS Virus
gagtagtttgaaggtcgttcttggt

SEQ ID NO: 137001 - DNA, 25 bp, SARS Virus
agtagtttgaacgtcgttcttggtg

SEQ ID NO: 137002 - DNA, 25 bp, SARS Virus
gtagtttgaacggcgttcttggtgt

SEQ ID NO: 137003 - DNA, 25 bp, SARS Virus
tagtttgaacgtggttcttggtgtt

SEQ ID NO: 137004 - DNA, 25 bp, SARS Virus
agtttgaacgtcgttcttggtgttc

SEQ ID NO: 137005 - DNA, 25 bp, SARS Virus
gtttgaacgtcggtcttggtgttct

SEQ ID NO: 137006 - DNA, 25 bp, SARS Virus
tttgaacgtcgtgcttggtgttctc

SEQ ID NO: 137007 - DNA, 25 bp, SARS Virus
ttgaacgtcgttgttggtgttctcg

SEQ ID NO: 137008 - DNA, 25 bp, SARS Virus
tgaacgtcgttcgtggtgttctcgt

SEQ ID NO: 137009 - DNA, 25 bp, SARS Virus
gaacgtcgttctgggtgttctcgta

SEQ ID NO: 137010 - DNA, 25 bp, SARS Virus
aacgtcgttcttggtgttctcgtac

SEQ ID NO: 137011 - DNA, 25 bp, SARS Virus
acgtcgttcttggtgttctcgtacg

SEQ ID NO: 137012 - DNA, 25 bp, SARS Virus
cgtcgttcttggggttctcgtacgt

SEQ ID NO: 137013 - DNA, 25 bp, SARS Virus
gtcgttcttggtgttctcgtacgtg

SEQ ID NO: 137014 - DNA, 25 bp, SARS Virus
tcgttcttggtggtctcgtacgtgg

SEQ ID NO: 137015 - DNA, 25 bp, SARS Virus
cgttcttggtgtgctcgtacgtggg

SEQ ID NO: 137016 - DNA, 25 bp, SARS Virus
gttcttggtgttgtcgtacgtggga

SEQ ID NO: 137017 - DNA, 25 bp, SARS Virus
ttcttggtgttcgcgtacgtgggaa

SEQ ID NO: 137018 - DNA, 25 bp, SARS Virus
tcttggtgttctggtacgtgggaac

SEQ ID NO: 137019 - DNA, 25 bp, SARS Virus
cttggtgttctcgtacgtgggaact

SEQ ID NO: 137020 - DNA, 25 bp, SARS Virus
ttggtgttctcggacgtgggaactc

SEQ ID NO: 137021 - DNA, 25 bp, SARS Virus
tggtgttctcgtgcgtgggaactcc

SEQ ID NO: 137022 - DNA, 25 bp, SARS Virus
ggtgttctcgtaggtgggaactccg

SEQ ID NO: 137023 - DNA, 25 bp, SARS Virus
gtgttctcgtacgtgggaactccgt

SEQ ID NO: 137024 - DNA, 25 bp, SARS Virus
tgttctcgtacgggggaactccgtt

SEQ ID NO: 137025 - DNA, 25 bp, SARS Virus
gttctcgtacgtgggaactccgttg

SEQ ID NO: 137026 - DNA, 25 bp, SARS Virus
ttctcgtacgtgggaactccgttga

SEQ ID NO: 137027 - DNA, 25 bp, SARS Virus
tctcgtacgtgggaactccgttgac

SEQ ID NO: 137028 - DNA, 25 bp, SARS Virus
ctcgtacgtggggactccgttgacg

SEQ ID NO: 137029 - DNA, 25 bp, SARS Virus
tcgtacgtgggagctccgttgacgt

SEQ ID NO: 137030 - DNA, 25 bp, SARS Virus
cgtacgtgggaagtccgttgacgtt

SEQ ID NO: 137031 - DNA, 25 bp, SARS Virus
gtacgtgggaacgccgttgacgttg

SEQ ID NO: 137032 - DNA, 25 bp, SARS Virus
tacgtgggaactgcgttgacgttgt

SEQ ID NO: 137033 - DNA, 25 bp, SARS Virus
acgtgggaactcggttgacgttgtt

SEQ ID NO: 137034 - DNA, 25 bp, SARS Virus
cgtgggaactccgttgacgttgttg

SEQ ID NO: 137035 - DNA, 25 bp, SARS Virus
gtgggaactccggtgacgttgttga

SEQ ID NO: 137036 - DNA, 25 bp, SARS Virus
tgggaactccgtggacgttgttgat

SEQ ID NO: 137037 - DNA, 25 bp, SARS Virus
gggaactccgttgacgttgttgatc

SEQ ID NO: 137038 - DNA, 25 bp, SARS Virus
ggaactccgttggcgttgttgatca

SEQ ID NO: 137039 - DNA, 25 bp, SARS Virus
gaactccgttgaggttgttgatcag

SEQ ID NO: 137040 - DNA, 25 bp, SARS Virus
aactccgttgacgttgttgatcagt

SEQ ID NO: 137041 - DNA, 25 bp, SARS Virus
actccgttgacggtgttgatcagta

SEQ ID NO: 137042 - DNA, 25 bp, SARS Virus
ctccgttgacgtggttgatcagtac

SEQ ID NO: 137043 - DNA, 25 bp, SARS Virus
tccgttgacgttgttgatcagtacg

SEQ ID NO: 137044 - DNA, 25 bp, SARS Virus
ccgttgacgttggtgatcagtacgt

SEQ ID NO: 137045 - DNA, 25 bp, SARS Virus
cgttgacgttgtggatcagtacgtt

SEQ ID NO: 137046 - DNA, 25 bp, SARS Virus
gttgacgttgttgatcagtacgttg

SEQ ID NO: 137047 - DNA, 25 bp, SARS Virus
ttgacgttgttggtcagtacgttgt

SEQ ID NO: 137048 - DNA, 25 bp, SARS Virus
tgacgttgttgagcagtacgttgtt

SEQ ID NO: 137049 - DNA, 25 bp, SARS Virus
gacgttgttgatgagtacgttgttt

SEQ ID NO: 137050 - DNA, 25 bp, SARS Virus
acgttgttgatcggtacgttgtttc

SEQ ID NO: 137051 - DNA, 25 bp, SARS Virus
cgttgttgatcagtacgttgtttcg

SEQ ID NO: 137052 - DNA, 25 bp, SARS Virus
gttgttgatcaggacgttgtttcgt

SEQ ID NO: 137053 - DNA, 25 bp, SARS Virus
ttgttgatcagtgcgttgtttcgtt

SEQ ID NO: 137054 - DNA, 25 bp, SARS Virus
tgttgatcagtaggttgtttcgttc

SEQ ID NO: 137055 - DNA, 25 bp, SARS Virus
gttgatcagtacgttgtttcgttct

SEQ ID NO: 137056 - DNA, 25 bp, SARS Virus
ttgatcagtacggtgtttcgttcta

SEQ ID NO: 137057 - DNA, 25 bp, SARS Virus
tgatcagtacgtggtttcgttctaa

SEQ ID NO: 137058 - DNA, 25 bp, SARS Virus
gatcagtacgttgtttcgttctaac

SEQ ID NO: 137059 - DNA, 25 bp, SARS Virus
atcagtacgttggttcgttctaaca

SEQ ID NO: 137060 - DNA, 25 bp, SARS Virus
tcagtacgttgtgtcgttctaacat

SEQ ID NO: 137061 - DNA, 25 bp, SARS Virus
cagtacgttgttgcgttctaacatt

SEQ ID NO: 137062 - DNA, 25 bp, SARS Virus
agtacgttgtttggttctaacattg

SEQ ID NO: 137063 - DNA, 25 bp, SARS Virus
gtacgttgtttcgttctaacattgg

SEQ ID NO: 137064 - DNA, 25 bp, SARS Virus
tacgttgtttcggtctaacattggt

SEQ ID NO: 137065 - DNA, 25 bp, SARS Virus
acgttgtttcgtgctaacattggta

SEQ ID NO: 137066 - DNA, 25 bp, SARS Virus
cgttgtttcgttgtaacattggtac

SEQ ID NO: 137067 - DNA, 25 bp, SARS Virus
gttgtttcgttcgaacattggtact

SEQ ID NO: 137068 - DNA, 25 bp, SARS Virus
ttgtttcgttctgacattggtactg

SEQ ID NO: 137069 - DNA, 25 bp, SARS Virus
tgtttcgttctagcattggtactgc

SEQ ID NO: 137070 - DNA, 25 bp, SARS Virus
gtttcgttctaagattggtactgct

SEQ ID NO: 137071 - DNA, 25 bp, SARS Virus
tttcgttctaacgttggtactgcta

SEQ ID NO: 137072 - DNA, 25 bp, SARS Virus
ttcgttctaacagtggtactgctac

SEQ ID NO: 137073 - DNA, 25 bp, SARS Virus
tcgttctaacatgggtactgctacc

SEQ ID NO: 137074 - DNA, 25 bp, SARS Virus
cgttctaacattggtactgctaccg

SEQ ID NO: 137075 - DNA, 25 bp, SARS Virus
gttctaacattggtactgctaccgt

SEQ ID NO: 137076 - DNA, 25 bp, SARS Virus
ttctaacattgggactgctaccgtt

SEQ ID NO: 137077 - DNA, 25 bp, SARS Virus
tctaacattggtgctgctaccgtta

SEQ ID NO: 137078 - DNA, 25 bp, SARS Virus
ctaacattggtagtgctaccgttaa

SEQ ID NO: 137079 - DNA, 25 bp, SARS Virus
taacattggtacggctaccgttaat

SEQ ID NO: 137080 - DNA, 25 bp, SARS Virus
aacattggtactgctaccgttaatc

SEQ ID NO: 137081 - DNA, 25 bp, SARS Virus
acattggtactggtaccgttaatca

SEQ ID NO: 137082 - DNA, 25 bp, SARS Virus
cattggtactgcgaccgttaatcag

SEQ ID NO: 137083 - DNA, 25 bp, SARS Virus
attggtactgctgccgttaatcagg

SEQ ID NO: 137084 - DNA, 25 bp, SARS Virus
ttggtactgctagcgttaatcaggt

SEQ ID NO: 137085 - DNA, 25 bp, SARS Virus
tggtactgctacggttaatcaggtc

SEQ ID NO: 137086 - DNA, 25 bp, SARS Virus
ggtactgctaccgttaatcaggtcg

SEQ ID NO: 137087 - DNA, 25 bp, SARS Virus
gtactgctaccggtaatcaggtcgt

SEQ ID NO: 137088 - DNA, 25 bp, SARS Virus
tactgctaccgtgaatcaggtcgtt

SEQ ID NO: 137089 - DNA, 25 bp, SARS Virus
actgctaccgttgatcaggtcgtta

SEQ ID NO: 137090 - DNA, 25 bp, SARS Virus
ctgctaccgttagtcaggtcgttac

SEQ ID NO: 137091 - DNA, 25 bp, SARS Virus
tgctaccgttaagcaggtcgttact

SEQ ID NO: 137092 - DNA, 25 bp, SARS Virus
gctaccgttaatgaggtcgttactt

SEQ ID NO: 137093 - DNA, 25 bp, SARS Virus
ctaccgttaatcgggtcgttacttc

SEQ ID NO: 137094 - DNA, 25 bp, SARS Virus
taccgttaatcaggtcgttacttcg

SEQ ID NO: 137095 - DNA, 25 bp, SARS Virus
accgttaatcaggtcgttacttcgg

SEQ ID NO: 137096 - DNA, 25 bp, SARS Virus
ccgttaatcagggcgttacttcggc

SEQ ID NO: 137097 - DNA, 25 bp, SARS Virus
cgttaatcaggtggttacttcggct

SEQ ID NO: 137098 - DNA, 25 bp, SARS Virus
gttaatcaggtcgttacttcggctc

SEQ ID NO: 137099 - DNA, 25 bp, SARS Virus
ttaatcaggtcggtacttcggctcg

SEQ ID NO: 137100 - DNA, 25 bp, SARS Virus
taatcaggtcgtgacttcggctcgg

SEQ ID NO: 137101 - DNA, 25 bp, SARS Virus
aatcaggtcgttgcttcggctcggt

SEQ ID NO: 137102 - DNA, 25 bp, SARS Virus
atcaggtcgttagttcggctcggtt

SEQ ID NO: 137103 - DNA, 25 bp, SARS Virus
tcaggtcgttacgtcggctcggttt

SEQ ID NO: 137104 - DNA, 25 bp, SARS Virus
caggtcgttactgcggctcggtttg

SEQ ID NO: 137105 - DNA, 25 bp, SARS Virus
aggtcgttacttgggctcggtttgt

SEQ ID NO: 137106 - DNA, 25 bp, SARS Virus
ggtcgttacttcggctcggtttgta

SEQ ID NO: 137107 - DNA, 25 bp, SARS Virus
gtcgttacttcggctcggtttgtat

SEQ ID NO: 137108 - DNA, 25 bp, SARS Virus
tcgttacttcgggtcggtttgtatg

SEQ ID NO: 137109 - DNA, 25 bp, SARS Virus
cgttacttcggcgcggtttgtatgg

SEQ ID NO: 137110 - DNA, 25 bp, SARS Virus
gttacttcggctgggtttgtatggt

SEQ ID NO: 137111 - DNA, 25 bp, SARS Virus
ttacttcggctcggtttgtatggtt

SEQ ID NO: 137112 - DNA, 25 bp, SARS Virus
tacttcggctcggtttgtatggttc

SEQ ID NO: 137113 - DNA, 25 bp, SARS Virus
acttcggctcgggttgtatggttcc

SEQ ID NO: 137114 - DNA, 25 bp, SARS Virus
cttcggctcggtgtgtatggttccg

SEQ ID NO: 137115 - DNA, 25 bp, SARS Virus
ttcggctcggttggtatggttccgg

SEQ ID NO: 137116 - DNA, 25 bp, SARS Virus
tcggctcggtttgtatggttccggt

SEQ ID NO: 137117 - DNA, 25 bp, SARS Virus
cggctcggtttggatggttccggta

SEQ ID NO: 137118 - DNA, 25 bp, SARS Virus
ggctcggtttgtgtggttccggtaa

SEQ ID NO: 137119 - DNA, 25 bp, SARS Virus
gctcggtttgtagggttccggtaaa

SEQ ID NO: 137120 - DNA, 25 bp, SARS Virus
ctcggtttgtatggttccggtaaat

SEQ ID NO: 137121 - DNA, 25 bp, SARS Virus
tcggtttgtatggttccggtaaatt

SEQ ID NO: 137122 - DNA, 25 bp, SARS Virus
cggtttgtatgggtccggtaaatta

SEQ ID NO: 137123 - DNA, 25 bp, SARS Virus
ggtttgtatggtgccggtaaattat

SEQ ID NO: 137124 - DNA, 25 bp, SARS Virus
gtttgtatggttgcggtaaattata

SEQ ID NO: 137125 - DNA, 25 bp, SARS Virus
tttgtatggttcgggtaaattatat

SEQ ID NO: 137126 - DNA, 25 bp, SARS Virus
ttgtatggttccggtaaattatata

SEQ ID NO: 137127 - DNA, 25 bp, SARS Virus
tgtatggttccggtaaattatataa

SEQ ID NO: 137128 - DNA, 25 bp, SARS Virus
gtatggttccgggaaattatataac

SEQ ID NO: 137129 - DNA, 25 bp, SARS Virus
tatggttccggtgaattatataacg

SEQ ID NO: 137130 - DNA, 25 bp, SARS Virus
atggttccggtagattatataacga

SEQ ID NO: 137131 - DNA, 25 bp, SARS Virus
tggttccggtaagttatataacgag

SEQ ID NO: 137132 - DNA, 25 bp, SARS Virus
ggttccggtaaagtatataacgagt

SEQ ID NO: 137133 - DNA, 25 bp, SARS Virus
gttccggtaaatgatataacgagta

SEQ ID NO: 137134 - DNA, 25 bp, SARS Virus
ttccggtaaattgtataacgagtat

SEQ ID NO: 137135 - DNA, 25 bp, SARS Virus
tccggtaaattagataacgagtata

SEQ ID NO: 137136 - DNA, 25 bp, SARS Virus
ccggtaaattatgtaacgagtataa

SEQ ID NO: 137137 - DNA, 25 bp, SARS Virus
cggtaaattatagaacgagtataaa

SEQ ID NO: 137138 - DNA, 25 bp, SARS Virus
ggtaaattatatgacgagtataaaa

SEQ ID NO: 137139 - DNA, 25 bp, SARS Virus
gtaaattatatagcgagtataaaag

SEQ ID NO: 137140 - DNA, 25 bp, SARS Virus
taaattatataaggagtataaaagg

SEQ ID NO: 137141 - DNA, 25 bp, SARS Virus
aaattatataacgagtataaaaggg

SEQ ID NO: 137142 - DNA, 25 bp, SARS Virus
aattatataacgggtataaaagggt

SEQ ID NO: 137143 - DNA, 25 bp, SARS Virus
attatataacgagtataaaagggtt

SEQ ID NO: 137144 - DNA, 25 bp, SARS Virus
ttatataacgaggataaaagggtta

SEQ ID NO: 137145 - DNA, 25 bp, SARS Virus
tatataacgagtgtaaaagggttaa

SEQ ID NO: 137146 - DNA, 25 bp, SARS Virus
atataacgagtagaaaagggttaag

SEQ ID NO: 137147 - DNA, 25 bp, SARS Virus
tataacgagtatgaaagggttaaga

SEQ ID NO: 137148 - DNA, 25 bp, SARS Virus
ataacgagtatagaagggttaagaa

SEQ ID NO: 137149 - DNA, 25 bp, SARS Virus
taacgagtataagagggttaagaac

SEQ ID NO: 137150 - DNA, 25 bp, SARS Virus
aacgagtataaaggggttaagaact

SEQ ID NO: 137151 - DNA, 25 bp, SARS Virus
acgagtataaaagggttaagaactt

SEQ ID NO: 137152 - DNA, 25 bp, SARS Virus
cgagtataaaagggttaagaacttc

SEQ ID NO: 137153 - DNA, 25 bp, SARS Virus
gagtataaaagggttaagaacttcc

SEQ ID NO: 137154 - DNA, 25 bp, SARS Virus
agtataaaaggggtaagaacttcca

SEQ ID NO: 137155 - DNA, 25 bp, SARS Virus
gtataaaagggtgaagaacttccag

SEQ ID NO: 137156 - DNA, 25 bp, SARS Virus
tataaaagggttgagaacttccagt

SEQ ID NO: 137157 - DNA, 25 bp, SARS Virus
ataaaagggttaggaacttccagtt

SEQ ID NO: 137158 - DNA, 25 bp, SARS Virus
taaaagggttaagaacttccagtta

SEQ ID NO: 137159 - DNA, 25 bp, SARS Virus
aaaagggttaaggacttccagttac

SEQ ID NO: 137160 - DNA, 25 bp, SARS Virus
aaagggttaagagcttccagttact

SEQ ID NO: 137161 - DNA, 25 bp, SARS Virus
tctaccattgtttatcgtcgtcatt

SEQ ID NO: 137162 - DNA, 25 bp, SARS Virus
ctaccattgtttttcgtcgtcattt

SEQ ID NO: 137163 - DNA, 25 bp, SARS Virus
taccattgtttatcgtcgtcattta

SEQ ID NO: 137164 - DNA, 25 bp, SARS Virus
accattgtttattgtcgtcatttaa

SEQ ID NO: 137165 - DNA, 25 bp, SARS Virus
ccattgtttatcttcgtcatttaac

SEQ ID NO: 137166 - DNA, 25 bp, SARS Virus
cattgtttatcgtcgtcatttaacg

SEQ ID NO: 137167 - DNA, 25 bp, SARS Virus
attgtttatcgttgtcatttaacgt

SEQ ID NO: 137168 - DNA, 25 bp, SARS Virus
ttgtttatcgtcttcatttaacgtt

SEQ ID NO: 137169 - DNA, 25 bp, SARS Virus
tgtttatcgtcgtcatttaacgttt

SEQ ID NO: 137170 - DNA, 25 bp, SARS Virus
gtttatcgtcgttatttaacgttta

SEQ ID NO: 137171 - DNA, 25 bp, SARS Virus
tttatcgtcgtcttttaacgtttac

SEQ ID NO: 137172 - DNA, 25 bp, SARS Virus
ttatcgtcgtcatttaacgtttact

SEQ ID NO: 137173 - DNA, 25 bp, SARS Virus
tatcgtcgtcatttaacgtttactt

SEQ ID NO: 137174 - DNA, 25 bp, SARS Virus
atcgtcgtcatttaacgtttacttg

SEQ ID NO: 137175 - DNA, 25 bp, SARS Virus
tcgtcgtcattttacgtttacttga

SEQ ID NO: 137176 - DNA, 25 bp, SARS Virus
cgtcgtcatttatcgtttacttgac

SEQ ID NO: 137177 - DNA, 25 bp, SARS Virus
gtcgtcatttaatgtttacttgacc

SEQ ID NO: 137178 - DNA, 25 bp, SARS Virus
tcgtcatttaacttttacttgacct

SEQ ID NO: 137179 - DNA, 25 bp, SARS Virus
cgtcatttaacgtttacttgacctt

SEQ ID NO: 137180 - DNA, 25 bp, SARS Virus
gtcatttaacgtttacttgaccttc

SEQ ID NO: 137181 - DNA, 25 bp, SARS Virus
tcatttaacgtttacttgaccttcg

SEQ ID NO: 137182 - DNA, 25 bp, SARS Virus
catttaacgttttcttgaccttcgg

SEQ ID NO: 137183 - DNA, 25 bp, SARS Virus
atttaacgtttatttgaccttcggg

SEQ ID NO: 137184 - DNA, 25 bp, SARS Virus
tttaacgtttacttgaccttcggga

SEQ ID NO: 137185 - DNA, 25 bp, SARS Virus
ttaacgtttacttgaccttcgggaa

SEQ ID NO: 137186 - DNA, 25 bp, SARS Virus
taacgtttactttaccttcgggaat

SEQ ID NO: 137187 - DNA, 25 bp, SARS Virus
aacgtttacttgtccttcgggaata

SEQ ID NO: 137188 - DNA, 25 bp, SARS Virus
acgtttacttgatcttcgggaatat

SEQ ID NO: 137189 - DNA, 25 bp, SARS Virus
cgtttacttgactttcgggaatatt

SEQ ID NO: 137190 - DNA, 25 bp, SARS Virus
gtttacttgaccttcgggaatattt

SEQ ID NO: 137191 - DNA, 25 bp, SARS Virus
tttacttgaccttcgggaatatttc

SEQ ID NO: 137192 - DNA, 25 bp, SARS Virus
ttacttgacctttgggaatatttcc

SEQ ID NO: 137193 - DNA, 25 bp, SARS Virus
tacttgaccttctggaatatttccc

SEQ ID NO: 137194 - DNA, 25 bp, SARS Virus
acttgaccttcgtgaatatttcccg

SEQ ID NO: 137195 - DNA, 25 bp, SARS Virus
cttgaccttcggtaatatttcccga

SEQ ID NO: 137196 - DNA, 25 bp, SARS Virus
ttgaccttcgggtatatttcccgat

SEQ ID NO: 137197 - DNA, 25 bp, SARS Virus
tgaccttcgggattatttcccgatc

SEQ ID NO: 137198 - DNA, 25 bp, SARS Virus
gaccttcgggaatatttcccgatcg

SEQ ID NO: 137199 - DNA, 25 bp, SARS Virus
accttcgggaatttttcccgatcga

SEQ ID NO: 137200 - DNA, 25 bp, SARS Virus
ccttcgggaatatttcccgatcgac

SEQ ID NO: 137201 - DNA, 25 bp, SARS Virus
cttcgggaatatttcccgatcgacg

SEQ ID NO: 137202 - DNA, 25 bp, SARS Virus
ttcgggaatatttcccgatcgacgg

SEQ ID NO: 137203 - DNA, 25 bp, SARS Virus
tcgggaatattttccgatcgacggt

SEQ ID NO: 137204 - DNA, 25 bp, SARS Virus
cgggaatatttctcgatcgacggta

SEQ ID NO: 137205 - DNA, 25 bp, SARS Virus
gggaatatttcctgatcgacggtag

SEQ ID NO: 137206 - DNA, 25 bp, SARS Virus
ggaatatttccctatcgacggtaga

SEQ ID NO: 137207 - DNA, 25 bp, SARS Virus
gaatatttcccgttcgacggtagaa

SEQ ID NO: 137208 - DNA, 25 bp, SARS Virus
aatatttcccgatcgacggtagaaa

SEQ ID NO: 137209 - DNA, 25 bp, SARS Virus
atatttcccgattgacggtagaaaa

SEQ ID NO: 137210 - DNA, 25 bp, SARS Virus
tatttcccgatctacggtagaaaat

SEQ ID NO: 137211 - DNA, 25 bp, SARS Virus
atttcccgatcgtcggtagaaaata

SEQ ID NO: 137212 - DNA, 25 bp, SARS Virus
tttcccgatcgatggtagaaaataa

SEQ ID NO: 137213 - DNA, 25 bp, SARS Virus
ttcccgatcgactgtagaaaataac

SEQ ID NO: 137214 - DNA, 25 bp, SARS Virus
tcccgatcgacgttagaaaataact

SEQ ID NO: 137215 - DNA, 25 bp, SARS Virus
cccgatcgacggtagaaaataactc

SEQ ID NO: 137216 - DNA, 25 bp, SARS Virus
ccgatcgacggttgaaaataactcg

SEQ ID NO: 137217 - DNA, 25 bp, SARS Virus
cgatcgacggtataaaataactcgc

SEQ ID NO: 137218 - DNA, 25 bp, SARS Virus
gatcgacggtagtaaataactcgcg

SEQ ID NO: 137219 - DNA, 25 bp, SARS Virus
atcgacggtagataataactcgcgt

SEQ ID NO: 137220 - DNA, 25 bp, SARS Virus
tcgacggtagaatataactcgcgtt

SEQ ID NO: 137221 - DNA, 25 bp, SARS Virus
cgacggtagaaattaactcgcgtta

SEQ ID NO: 137222 - DNA, 25 bp, SARS Virus
gacggtagaaaataactcgcgttaa

SEQ ID NO: 137223 - DNA, 25 bp, SARS Virus
acggtagaaaattactcgcgttaat

SEQ ID NO: 137224 - DNA, 25 bp, SARS Virus
cggtagaaaatatctcgcgttaata

SEQ ID NO: 137225 - DNA, 25 bp, SARS Virus
ggtagaaaataattcgcgttaataa

SEQ ID NO: 137226 - DNA, 25 bp, SARS Virus
gtagaaaataactcgcgttaataaa

SEQ ID NO: 137227 - DNA, 25 bp, SARS Virus
tagaaaataacttgcgttaataaaa

SEQ ID NO: 137228 - DNA, 25 bp, SARS Virus
agaaaataactctcgttaataaaac

SEQ ID NO: 137229 - DNA, 25 bp, SARS Virus
gaaaataactcgtgttaataaaacc

SEQ ID NO: 137230 - DNA, 25 bp, SARS Virus
aaaataactcgctttaataaaacca

SEQ ID NO: 137231 - DNA, 25 bp, SARS Virus
aaataactcgcgttaataaaaccat

SEQ ID NO: 137232 - DNA, 25 bp, SARS Virus
aataactcgcgttaataaaaccatc

SEQ ID NO: 137233 - DNA, 25 bp, SARS Virus
ataactcgcgtttataaaaccatcg

SEQ ID NO: 137234 - DNA, 25 bp, SARS Virus
taactcgcgttattaaaaccatcgc

SEQ ID NO: 137235 - DNA, 25 bp, SARS Virus
aactcgcgttaataaaaccatcgcg

SEQ ID NO: 137236 - DNA, 25 bp, SARS Virus
actcgcgttaattaaaccatcgcga

SEQ ID NO: 137237 - DNA, 25 bp, SARS Virus
ctcgcgttaatataaccatcgcgag

SEQ ID NO: 137238 - DNA, 25 bp, SARS Virus
tcgcgttaataataccatcgcgaga

SEQ ID NO: 137239 - DNA, 25 bp, SARS Virus
cgcgttaataaatccatcgcgagac

SEQ ID NO: 137240 - DNA, 25 bp, SARS Virus
gcgttaataaaatcatcgcgagact

SEQ ID NO: 137241 - DNA, 25 bp, SARS Virus
cgttaataaaactatcgcgagactt

SEQ ID NO: 137242 - DNA, 25 bp, SARS Virus
gttaataaaaccttcgcgagacttt

SEQ ID NO: 137243 - DNA, 25 bp, SARS Virus
ttaataaaaccatcgcgagactttt

SEQ ID NO: 137244 - DNA, 25 bp, SARS Virus
taataaaaccattgcgagacttttt

SEQ ID NO: 137245 - DNA, 25 bp, SARS Virus
aataaaaccatctcgagactttttg

SEQ ID NO: 137246 - DNA, 25 bp, SARS Virus
ataaaaccatcgtgagactttttgt

SEQ ID NO: 137247 - DNA, 25 bp, SARS Virus
taaaaccatcgctagactttttgtc

SEQ ID NO: 137248 - DNA, 25 bp, SARS Virus
aaaaccatcgcgtgactttttgtcg

SEQ ID NO: 137249 - DNA, 25 bp, SARS Virus
aaaccatcgcgatactttttgtcgt

SEQ ID NO: 137250 - DNA, 25 bp, SARS Virus
aaccatcgcgagtctttttgtcgtt

SEQ ID NO: 137251 - DNA, 25 bp, SARS Virus
accatcgcgagattttttgtcgttc

SEQ ID NO: 137252 - DNA, 25 bp, SARS Virus
ccatcgcgagactttttgtcgttct

SEQ ID NO: 137253 - DNA, 25 bp, SARS Virus
catcgcgagactttttgtcgttctt

SEQ ID NO: 137254 - DNA, 25 bp, SARS Virus
atcgcgagactttttgtcgttcttt

SEQ ID NO: 137255 - DNA, 25 bp, SARS Virus
tcgcgagactttttgtcgttcttta

SEQ ID NO: 137256 - DNA, 25 bp, SARS Virus
cgcgagactttttgtcgttctttac

SEQ ID NO: 137257 - DNA, 25 bp, SARS Virus
gcgagactttttttcgttctttacg

SEQ ID NO: 137258 - DNA, 25 bp, SARS Virus
cgagactttttgtcgttctttacgt

SEQ ID NO: 137259 - DNA, 25 bp, SARS Virus
gagactttttgttgttctttacgtt

SEQ ID NO: 137260 - DNA, 25 bp, SARS Virus
agactttttgtctttctttacgttg

SEQ ID NO: 137261 - DNA, 25 bp, SARS Virus
gactttttgtcgttctttacgttgc

SEQ ID NO: 137262 - DNA, 25 bp, SARS Virus
actttttgtcgttctttacgttgcg

SEQ ID NO: 137263 - DNA, 25 bp, SARS Virus
ctttttgtcgttttttacgttgcgg

SEQ ID NO: 137264 - DNA, 25 bp, SARS Virus
tttttgtcgttctttacgttgcggt

SEQ ID NO: 137265 - DNA, 25 bp, SARS Virus
ttttgtcgttctttacgttgcggtt

SEQ ID NO: 137266 - DNA, 25 bp, SARS Virus
tttgtcgttctttacgttgcggtta

SEQ ID NO: 137267 - DNA, 25 bp, SARS Virus
ttgtcgttcttttcgttgcggttat

SEQ ID NO: 137268 - DNA, 25 bp, SARS Virus
tgtcgttctttatgttgcggttatt

SEQ ID NO: 137269 - DNA, 25 bp, SARS Virus
gtcgttctttactttgcggttattg

SEQ ID NO: 137270 - DNA, 25 bp, SARS Virus
tcgttctttacgttgcggttattgt

SEQ ID NO: 137271 - DNA, 25 bp, SARS Virus
cgttctttacgttgcggttattgtt

SEQ ID NO: 137272 - DNA, 25 bp, SARS Virus
gttctttacgtttcggttattgttc

SEQ ID NO: 137273 - DNA, 25 bp, SARS Virus
ttctttacgttgtggttattgttcg

SEQ ID NO: 137274 - DNA, 25 bp, SARS Virus
tctttacgttgctgttattgttcgg

SEQ ID NO: 137275 - DNA, 25 bp, SARS Virus
ctttacgttgcgtttattgttcggt

SEQ ID NO: 137276 - DNA, 25 bp, SARS Virus
tttacgttgcggttattgttcggta

SEQ ID NO: 137277 - DNA, 25 bp, SARS Virus
ttacgttgcggttattgttcggtag

SEQ ID NO: 137278 - DNA, 25 bp, SARS Virus
tacgttgcggtttttgttcggtagg

SEQ ID NO: 137279 - DNA, 25 bp, SARS Virus
acgttgcggttattgttcggtaggc

SEQ ID NO: 137280 - DNA, 25 bp, SARS Virus
cgttgcggttattgttcggtaggct

SEQ ID NO: 137281 - DNA, 25 bp, SARS Virus
gttgcggttatttttcggtaggctt

SEQ ID NO: 137282 - DNA, 25 bp, SARS Virus
ttgcggttattgttcggtaggcttt

SEQ ID NO: 137283 - DNA, 25 bp, SARS Virus
tgcggttattgttcggtaggctttc

SEQ ID NO: 137284 - DNA, 25 bp, SARS Virus
gcggttattgtttggtaggctttcc

SEQ ID NO: 137285 - DNA, 25 bp, SARS Virus
cggttattgttctgtaggctttccc

SEQ ID NO: 137286 - DNA, 25 bp, SARS Virus
ggttattgttcgttaggctttccct

SEQ ID NO: 137287 - DNA, 25 bp, SARS Virus
gttattgttcggtaggctttccctc

SEQ ID NO: 137288 - DNA, 25 bp, SARS Virus
ttattgttcggttggctttccctca

SEQ ID NO: 137289 - DNA, 25 bp, SARS Virus
tattgttcggtatgctttccctcac

SEQ ID NO: 137290 - DNA, 25 bp, SARS Virus
attgttcggtagtctttccctcact

SEQ ID NO: 137291 - DNA, 25 bp, SARS Virus
ttgttcggtaggttttccctcactc

SEQ ID NO: 137292 - DNA, 25 bp, SARS Virus
tgttcggtaggctttccctcactcc

SEQ ID NO: 137293 - DNA, 25 bp, SARS Virus
gttcggtaggctttccctcactccg

SEQ ID NO: 137294 - DNA, 25 bp, SARS Virus
ttcggtaggctttccctcactccga

SEQ ID NO: 137295 - DNA, 25 bp, SARS Virus
tcggtaggcttttcctcactccgaa

SEQ ID NO: 137296 - DNA, 25 bp, SARS Virus
cggtaggctttctctcactccgaac

SEQ ID NO: 137297 - DNA, 25 bp, SARS Virus
ggtaggctttccttcactccgaaca

SEQ ID NO: 137298 - DNA, 25 bp, SARS Virus
gtaggctttccctcactccgaacat

SEQ ID NO: 137299 - DNA, 25 bp, SARS Virus
taggctttcccttactccgaacatc

SEQ ID NO: 137300 - DNA, 25 bp, SARS Virus
aggctttccctctctccgaacatcg

SEQ ID NO: 137301 - DNA, 25 bp, SARS Virus
ggctttccctcattccgaacatcgc

SEQ ID NO: 137302 - DNA, 25 bp, SARS Virus
gctttccctcactccgaacatcgcc

SEQ ID NO: 137303 - DNA, 25 bp, SARS Virus
ctttccctcacttcgaacatcgcca

SEQ ID NO: 137304 - DNA, 25 bp, SARS Virus
tttccctcactctgaacatcgccat

SEQ ID NO: 137305 - DNA, 25 bp, SARS Virus
ttccctcactcctaacatcgccata

SEQ ID NO: 137306 - DNA, 25 bp, SARS Virus
tccctcactccgtacatcgccatag

SEQ ID NO: 137307 - DNA, 25 bp, SARS Virus
ccctcactccgatcatcgccatagc

SEQ ID NO: 137308 - DNA, 25 bp, SARS Virus
cctcactccgaatatcgccatagca

SEQ ID NO: 137309 - DNA, 25 bp, SARS Virus
ctcactccgaacttcgccatagcaa

SEQ ID NO: 137310 - DNA, 25 bp, SARS Virus
tcactccgaacatcgccatagcaac

SEQ ID NO: 137311 - DNA, 25 bp, SARS Virus
cactccgaacattgccatagcaacg

SEQ ID NO: 137312 - DNA, 25 bp, SARS Virus
actccgaacatctccatagcaacga

SEQ ID NO: 137313 - DNA, 25 bp, SARS Virus
ctccgaacatcgtcatagcaacgac

SEQ ID NO: 137314 - DNA, 25 bp, SARS Virus
tccgaacatcgctatagcaacgaca

SEQ ID NO: 137315 - DNA, 25 bp, SARS Virus
ccgaacatcgccttagcaacgacat

SEQ ID NO: 137316 - DNA, 25 bp, SARS Virus
cgaacatcgccatagcaacgacatc

SEQ ID NO: 137317 - DNA, 25 bp, SARS Virus
gaacatcgccattgcaacgacatcg

SEQ ID NO: 137318 - DNA, 25 bp, SARS Virus
aacatcgccatatcaacgacatcgt

SEQ ID NO: 137319 - DNA, 25 bp, SARS Virus
acatcgccatagtaacgacatcgta

SEQ ID NO: 137320 - DNA, 25 bp, SARS Virus
catcgccatagctacgacatcgtac

SEQ ID NO: 137321 - DNA, 25 bp, SARS Virus
atcgccatagcatcgacatcgtact

SEQ ID NO: 137322 - DNA, 25 bp, SARS Virus
tcgccatagcaatgacatcgtactt

SEQ ID NO: 137323 - DNA, 25 bp, SARS Virus
cgccatagcaactacatcgtacttg

SEQ ID NO: 137324 - DNA, 25 bp, SARS Virus
gccatagcaacgtcatcgtacttgt

SEQ ID NO: 137325 - DNA, 25 bp, SARS Virus
ccatagcaacgatatcgtacttgtc

SEQ ID NO: 137326 - DNA, 25 bp, SARS Virus
catagcaacgacttcgtacttgtca

SEQ ID NO: 137327 - DNA, 25 bp, SARS Virus
atagcaacgacatcgtacttgtcat

SEQ ID NO: 137328 - DNA, 25 bp, SARS Virus
tagcaacgacattgtacttgtcatg

SEQ ID NO: 137329 - DNA, 25 bp, SARS Virus
agcaacgacatcttacttgtcatga

SEQ ID NO: 137330 - DNA, 25 bp, SARS Virus
gcaacgacatcgtacttgtcatgaa

SEQ ID NO: 137331 - DNA, 25 bp, SARS Virus
caacgacatcgttcttgtcatgaac

SEQ ID NO: 137332 - DNA, 25 bp, SARS Virus
aacgacatcgtatttgtcatgaacg

SEQ ID NO: 137333 - DNA, 25 bp, SARS Virus
acgacatcgtacttgtcatgaacgt

SEQ ID NO: 137334 - DNA, 25 bp, SARS Virus
cgacatcgtacttgtcatgaacgtc

SEQ ID NO: 137335 - DNA, 25 bp, SARS Virus
gacatcgtacttttcatgaacgtcc

SEQ ID NO: 137336 - DNA, 25 bp, SARS Virus
acatcgtacttgtcatgaacgtcct

SEQ ID NO: 137337 - DNA, 25 bp, SARS Virus
catcgtacttgttatgaacgtcctc

SEQ ID NO: 137338 - DNA, 25 bp, SARS Virus
atcgtacttgtcttgaacgtcctct

SEQ ID NO: 137339 - DNA, 25 bp, SARS Virus
tcgtacttgtcatgaacgtcctctt

SEQ ID NO: 137340 - DNA, 25 bp, SARS Virus
cgtacttgtcattaacgtcctcttc

SEQ ID NO: 137341 - DNA, 25 bp, SARS Virus
gtacttgtcatgtacgtcctcttcg

SEQ ID NO: 137342 - DNA, 25 bp, SARS Virus
tacttgtcatgatcgtcctcttcgt

SEQ ID NO: 137343 - DNA, 25 bp, SARS Virus
acttgtcatgaatgtcctcttcgta

SEQ ID NO: 137344 - DNA, 25 bp, SARS Virus
cttgtcatgaacttcctcttcgtaa

SEQ ID NO: 137345 - DNA, 25 bp, SARS Virus
ttgtcatgaacgtcctcttcgtaac

SEQ ID NO: 137346 - DNA, 25 bp, SARS Virus
tgtcatgaacgttctcttcgtaaca

SEQ ID NO: 137347 - DNA, 25 bp, SARS Virus
gtcatgaacgtcttcttcgtaacag

SEQ ID NO: 137348 - DNA, 25 bp, SARS Virus
tcatgaacgtcctcttcgtaacagt

SEQ ID NO: 137349 - DNA, 25 bp, SARS Virus
catgaacgtccttttcgtaacagtt

SEQ ID NO: 137350 - DNA, 25 bp, SARS Virus
atgaacgtcctcttcgtaacagtta

SEQ ID NO: 137351 - DNA, 25 bp, SARS Virus
tgaacgtcctcttcgtaacagttaa

SEQ ID NO: 137352 - DNA, 25 bp, SARS Virus
gaacgtcctctttgtaacagttaaa

SEQ ID NO: 137353 - DNA, 25 bp, SARS Virus
aacgtcctcttcttaacagttaaaa

SEQ ID NO: 137354 - DNA, 25 bp, SARS Virus
acgtcctcttcgtaacagttaaaaa

SEQ ID NO: 137355 - DNA, 25 bp, SARS Virus
cgtcctcttcgttacagttaaaaat

SEQ ID NO: 137356 - DNA, 25 bp, SARS Virus
gtcctcttcgtatcagttaaaaatg

SEQ ID NO: 137357 - DNA, 25 bp, SARS Virus
tcctcttcgtaatagttaaaaatga

SEQ ID NO: 137358 - DNA, 25 bp, SARS Virus
cctcttcgtaactgttaaaaatgac

SEQ ID NO: 137359 - DNA, 25 bp, SARS Virus
ctcttcgtaacatttaaaaatgacc

SEQ ID NO: 137360 - DNA, 25 bp, SARS Virus
tcttcgtaacagttaaaaatgaccg

SEQ ID NO: 137361 - DNA, 25 bp, SARS Virus
cttcgtaacagttaaaaatgaccga

SEQ ID NO: 137362 - DNA, 25 bp, SARS Virus
ttcgtaacagtttaaaatgaccgac

SEQ ID NO: 137363 - DNA, 25 bp, SARS Virus
tcgtaacagttataaatgaccgaca

SEQ ID NO: 137364 - DNA, 25 bp, SARS Virus
cgtaacagttaataatgaccgacac

SEQ ID NO: 137365 - DNA, 25 bp, SARS Virus
gtaacagttaaatatgaccgacacg

SEQ ID NO: 137366 - DNA, 25 bp, SARS Virus
taacagttaaaattgaccgacacgt

SEQ ID NO: 137367 - DNA, 25 bp, SARS Virus
aacagttaaaaatgaccgacacgtc

SEQ ID NO: 137368 - DNA, 25 bp, SARS Virus
acagttaaaaattaccgacacgtca

SEQ ID NO: 137369 - DNA, 25 bp, SARS Virus
cagttaaaaatgtccgacacgtcat

SEQ ID NO: 137370 - DNA, 25 bp, SARS Virus
agttaaaaatgatcgacacgtcatt

SEQ ID NO: 137371 - DNA, 25 bp, SARS Virus
gttaaaaatgactgacacgtcatta

SEQ ID NO: 137372 - DNA, 25 bp, SARS Virus
ttaaaaatgacctacacgtcattaa

SEQ ID NO: 137373 - DNA, 25 bp, SARS Virus
taaaaatgaccgtcacgtcattaac

SEQ ID NO: 137374 - DNA, 25 bp, SARS Virus
aaaaatgaccgatacgtcattaact

SEQ ID NO: 137375 - DNA, 25 bp, SARS Virus
aaaatgaccgactcgtcattaacta

SEQ ID NO: 137376 - DNA, 25 bp, SARS Virus
aaatgaccgacatgtcattaactag

SEQ ID NO: 137377 - DNA, 25 bp, SARS Virus
aatgaccgacacttcattaactaga

SEQ ID NO: 137378 - DNA, 25 bp, SARS Virus
atgaccgacacgtcattaactagat

SEQ ID NO: 137379 - DNA, 25 bp, SARS Virus
tgaccgacacgttattaactagatt

SEQ ID NO: 137380 - DNA, 25 bp, SARS Virus
gaccgacacgtctttaactagattc

SEQ ID NO: 137381 - DNA, 25 bp, SARS Virus
accgacacgtcattaactagattct

SEQ ID NO: 137382 - DNA, 25 bp, SARS Virus
ccgacacgtcattaactagattctc

SEQ ID NO: 137383 - DNA, 25 bp, SARS Virus
cgacacgtcatttactagattctca

SEQ ID NO: 137384 - DNA, 25 bp, SARS Virus
gacacgtcattatctagattctcat

SEQ ID NO: 137385 - DNA, 25 bp, SARS Virus
acacgtcattaattagattctcatt

SEQ ID NO: 137386 - DNA, 25 bp, SARS Virus
cacgtcattaactagattctcattt

SEQ ID NO: 137387 - DNA, 25 bp, SARS Virus
acgtcattaacttgattctcatttt

SEQ ID NO: 137388 - DNA, 25 bp, SARS Virus
cgtcattaactatattctcattttt

SEQ ID NO: 137389 - DNA, 25 bp, SARS Virus
gtcattaactagtttctcatttttt

SEQ ID NO: 137390 - DNA, 25 bp, SARS Virus
tcattaactagattctcatttttta

SEQ ID NO: 137391 - DNA, 25 bp, SARS Virus
cattaactagattctcattttttag

SEQ ID NO: 137392 - DNA, 25 bp, SARS Virus
attaactagattttcattttttaga

SEQ ID NO: 137393 - DNA, 25 bp, SARS Virus
ttaactagattctcattttttagag

SEQ ID NO: 137394 - DNA, 25 bp, SARS Virus
taactagattcttattttttagagt

SEQ ID NO: 137395 - DNA, 25 bp, SARS Virus
aactagattctctttttttagagta

SEQ ID NO: 137396 - DNA, 25 bp, SARS Virus
actagattctcattttttagagtat

SEQ ID NO: 137397 - DNA, 25 bp, SARS Virus
ctagattctcattttttagagtatt

SEQ ID NO: 137398 - DNA, 25 bp, SARS Virus
tagattctcattttttagagtattt

SEQ ID NO: 137399 - DNA, 25 bp, SARS Virus
agattctcattttttagagtatttg

SEQ ID NO: 137400 - DNA, 25 bp, SARS Virus
gattctcattttttagagtatttgt

SEQ ID NO: 137401 - DNA, 25 bp, SARS Virus
attctcattttttagagtatttgtt

SEQ ID NO: 137402 - DNA, 25 bp, SARS Virus
ttctcatttttttgagtatttgttt

SEQ ID NO: 137403 - DNA, 25 bp, SARS Virus
tctcattttttatagtatttgttta

SEQ ID NO: 137404 - DNA, 25 bp, SARS Virus
ctcattttttagtgtatttgtttag

SEQ ID NO: 137405 - DNA, 25 bp, SARS Virus
tcattttttagattatttgtttagg

SEQ ID NO: 137406 - DNA, 25 bp, SARS Virus
cattttttagagtatttgtttaggt

SEQ ID NO: 137407 - DNA, 25 bp, SARS Virus
attttttagagtttttgtttaggta

SEQ ID NO: 137408 - DNA, 25 bp, SARS Virus
ttttttagagtatttgtttaggtat

SEQ ID NO: 137409 - DNA, 25 bp, SARS Virus
tttttagagtatttgtttaggtatt

SEQ ID NO: 137410 - DNA, 25 bp, SARS Virus
ttttagagtatttgtttaggtattc

SEQ ID NO: 137411 - DNA, 25 bp, SARS Virus
tttagagtatttttttaggtattca

SEQ ID NO: 137412 - DNA, 25 bp, SARS Virus
ttagagtatttgtttaggtattcaa

SEQ ID NO: 137413 - DNA, 25 bp, SARS Virus
tagagtatttgtttaggtattcaag

SEQ ID NO: 137414 - DNA, 25 bp, SARS Virus
agagtatttgtttaggtattcaagc

SEQ ID NO: 137415 - DNA, 25 bp, SARS Virus
gagtatttgttttggtattcaagca

SEQ ID NO: 137416 - DNA, 25 bp, SARS Virus
agtatttgtttatgtattcaagcaa

SEQ ID NO: 137417 - DNA, 25 bp, SARS Virus
gtatttgtttagttattcaagcaaa

SEQ ID NO: 137418 - DNA, 25 bp, SARS Virus
tatttgtttaggtattcaagcaaat

SEQ ID NO: 137419 - DNA, 25 bp, SARS Virus
atttgtttaggttttcaagcaaata

SEQ ID NO: 137420 - DNA, 25 bp, SARS Virus
tttgtttaggtattcaagcaaatac

SEQ ID NO: 137421 - DNA, 25 bp, SARS Virus
ttgtttaggtattcaagcaaataca

SEQ ID NO: 137422 - DNA, 25 bp, SARS Virus
tgtttaggtatttaagcaaatacac

SEQ ID NO: 137423 - DNA, 25 bp, SARS Virus
gtttaggtattctagcaaatacaca

SEQ ID NO: 137424 - DNA, 25 bp, SARS Virus
tttaggtattcatgcaaatacacat

SEQ ID NO: 137425 - DNA, 25 bp, SARS Virus
ttaggtattcaatcaaatacacatt

SEQ ID NO: 137426 - DNA, 25 bp, SARS Virus
taggtattcaagtaaatacacatta

SEQ ID NO: 137427 - DNA, 25 bp, SARS Virus
aggtattcaagctaatacacattac

SEQ ID NO: 137428 - DNA, 25 bp, SARS Virus
ggtattcaagcatatacacattaca

SEQ ID NO: 137429 - DNA, 25 bp, SARS Virus
gtattcaagcaattacacattacat

SEQ ID NO: 137430 - DNA, 25 bp, SARS Virus
tattcaagcaaatacacattacatt

SEQ ID NO: 137431 - DNA, 25 bp, SARS Virus
attcaagcaaattcacattacatta

SEQ ID NO: 137432 - DNA, 25 bp, SARS Virus
ttcaagcaaatatacattacattaa

SEQ ID NO: 137433 - DNA, 25 bp, SARS Virus
tcaagcaaatactcattacattaaa

SEQ ID NO: 137434 - DNA, 25 bp, SARS Virus
caagcaaatacatattacattaaac

SEQ ID NO: 137435 - DNA, 25 bp, SARS Virus
aagcaaatacactttacattaaact

SEQ ID NO: 137436 - DNA, 25 bp, SARS Virus
agcaaatacacattacattaaactg

SEQ ID NO: 137437 - DNA, 25 bp, SARS Virus
gcaaatacacattacattaaactgt

SEQ ID NO: 137438 - DNA, 25 bp, SARS Virus
caaatacacatttcattaaactgtg

SEQ ID NO: 137439 - DNA, 25 bp, SARS Virus
aaatacacattatattaaactgtgg

SEQ ID NO: 137440 - DNA, 25 bp, SARS Virus
aatacacattactttaaactgtggg

SEQ ID NO: 137441 - DNA, 25 bp, SARS Virus
atacacattacattaaactgtggga

SEQ ID NO: 137442 - DNA, 25 bp, SARS Virus
tacacattacattaaactgtgggaa

SEQ ID NO: 137443 - DNA, 25 bp, SARS Virus
acacattacatttaactgtgggaac

SEQ ID NO: 137444 - DNA, 25 bp, SARS Virus
cacattacattatactgtgggaact

SEQ ID NO: 137445 - DNA, 25 bp, SARS Virus
acattacattaatctgtgggaactc

SEQ ID NO: 137446 - DNA, 25 bp, SARS Virus
cattacattaaattgtgggaactct

SEQ ID NO: 137447 - DNA, 25 bp, SARS Virus
attacattaaactgtgggaactctt

SEQ ID NO: 137448 - DNA, 25 bp, SARS Virus
ttacattaaactttgggaactcttg

SEQ ID NO: 137449 - DNA, 25 bp, SARS Virus
tacattaaactgtgggaactcttga

SEQ ID NO: 137450 - DNA, 25 bp, SARS Virus
acattaaactgttggaactcttgac

SEQ ID NO: 137451 - DNA, 25 bp, SARS Virus
cattaaactgtgtgaactcttgacc

SEQ ID NO: 137452 - DNA, 25 bp, SARS Virus
attaaactgtggtaactcttgaccg

SEQ ID NO: 137453 - DNA, 25 bp, SARS Virus
ttaaactgtgggtactcttgaccga

SEQ ID NO: 137454 - DNA, 25 bp, SARS Virus
taaactgtgggatctcttgaccgag

SEQ ID NO: 137455 - DNA, 25 bp, SARS Virus
aaactgtgggaattcttgaccgagt

SEQ ID NO: 137456 - DNA, 25 bp, SARS Virus
aactgtgggaactcttgaccgagtc

SEQ ID NO: 137457 - DNA, 25 bp, SARS Virus
actgtgggaacttttgaccgagtct

SEQ ID NO: 137458 - DNA, 25 bp, SARS Virus
ctgtgggaactcttgaccgagtctc

SEQ ID NO: 137459 - DNA, 25 bp, SARS Virus
tgtgggaactcttgaccgagtctca

SEQ ID NO: 137460 - DNA, 25 bp, SARS Virus
gtgggaactctttaccgagtctcag

SEQ ID NO: 137461 - DNA, 25 bp, SARS Virus
tgggaactcttgtccgagtctcagt

SEQ ID NO: 137462 - DNA, 25 bp, SARS Virus
gggaactcttgatcgagtctcagta

SEQ ID NO: 137463 - DNA, 25 bp, SARS Virus
ggaactcttgactgagtctcagtag

SEQ ID NO: 137464 - DNA, 25 bp, SARS Virus
gaactcttgacctagtctcagtagg

SEQ ID NO: 137465 - DNA, 25 bp, SARS Virus
aactcttgaccgtgtctcagtagga

SEQ ID NO: 137466 - DNA, 25 bp, SARS Virus
actcttgaccgattctcagtaggag

SEQ ID NO: 137467 - DNA, 25 bp, SARS Virus
ctcttgaccgagtctcagtaggagt

SEQ ID NO: 137468 - DNA, 25 bp, SARS Virus
tcttgaccgagtttcagtaggagta

SEQ ID NO: 137469 - DNA, 25 bp, SARS Virus
cttgaccgagtctcagtaggagtag

SEQ ID NO: 137470 - DNA, 25 bp, SARS Virus
ttgaccgagtcttagtaggagtagt

SEQ ID NO: 137471 - DNA, 25 bp, SARS Virus
tgaccgagtctctgtaggagtagtt

SEQ ID NO: 137472 - DNA, 25 bp, SARS Virus
gaccgagtctcattaggagtagttt

SEQ ID NO: 137473 - DNA, 25 bp, SARS Virus
accgagtctcagtaggagtagtttg

SEQ ID NO: 137474 - DNA, 25 bp, SARS Virus
ccgagtctcagttggagtagtttga

SEQ ID NO: 137475 - DNA, 25 bp, SARS Virus
cgagtctcagtatgagtagtttgaa

SEQ ID NO: 137476 - DNA, 25 bp, SARS Virus
gagtctcagtagtagtagtttgaac

SEQ ID NO: 137477 - DNA, 25 bp, SARS Virus
agtctcagtaggtgtagtttgaacg

SEQ ID NO: 137478 - DNA, 25 bp, SARS Virus
gtctcagtaggattagtttgaacgt

SEQ ID NO: 137479 - DNA, 25 bp, SARS Virus
tctcagtaggagtagtttgaacgtc

SEQ ID NO: 137480 - DNA, 25 bp, SARS Virus
ctcagtaggagttgtttgaacgtcg

SEQ ID NO: 137481 - DNA, 25 bp, SARS Virus
tcagtaggagtattttgaacgtcgt

SEQ ID NO: 137482 - DNA, 25 bp, SARS Virus
cagtaggagtagtttgaacgtcgtt

SEQ ID NO: 137483 - DNA, 25 bp, SARS Virus
agtaggagtagtttgaacgtcgttc

SEQ ID NO: 137484 - DNA, 25 bp, SARS Virus
gtaggagtagtttgaacgtcgttct

SEQ ID NO: 137485 - DNA, 25 bp, SARS Virus
taggagtagttttaacgtcgttctt

SEQ ID NO: 137486 - DNA, 25 bp, SARS Virus
aggagtagtttgtacgtcgttcttg

SEQ ID NO: 137487 - DNA, 25 bp, SARS Virus
ggagtagtttgatcgtcgttcttgg

SEQ ID NO: 137488 - DNA, 25 bp, SARS Virus
gagtagtttgaatgtcgttcttggt

SEQ ID NO: 137489 - DNA, 25 bp, SARS Virus
agtagtttgaacttcgttcttggtg

SEQ ID NO: 137490 - DNA, 25 bp, SARS Virus
gtagtttgaacgtcgttcttggtgt

SEQ ID NO: 137491 - DNA, 25 bp, SARS Virus
tagtttgaacgttgttcttggtgtt

SEQ ID NO: 137492 - DNA, 25 bp, SARS Virus
agtttgaacgtctttcttggtgttc

SEQ ID NO: 137493 - DNA, 25 bp, SARS Virus
gtttgaacgtcgttcttggtgttct

SEQ ID NO: 137494 - DNA, 25 bp, SARS Virus
tttgaacgtcgttcttggtgttctc

SEQ ID NO: 137495 - DNA, 25 bp, SARS Virus
ttgaacgtcgtttttggtgttctcg

SEQ ID NO: 137496 - DNA, 25 bp, SARS Virus
tgaacgtcgttcttggtgttctcgt

SEQ ID NO: 137497 - DNA, 25 bp, SARS Virus
gaacgtcgttcttggtgttctcgta

SEQ ID NO: 137498 - DNA, 25 bp, SARS Virus
aacgtcgttctttgtgttctcgtac

SEQ ID NO: 137499 - DNA, 25 bp, SARS Virus
acgtcgttcttgttgttctcgtacg

SEQ ID NO: 137500 - DNA, 25 bp, SARS Virus
cgtcgttcttggtgttctcgtacgt

SEQ ID NO: 137501 - DNA, 25 bp, SARS Virus
gtcgttcttggttttctcgtacgtg

SEQ ID NO: 137502 - DNA, 25 bp, SARS Virus
tcgttcttggtgttctcgtacgtgg

SEQ ID NO: 137503 - DNA, 25 bp, SARS Virus
cgttcttggtgttctcgtacgtggg

SEQ ID NO: 137504 - DNA, 25 bp, SARS Virus
gttcttggtgttttcgtacgtggga

SEQ ID NO: 137505 - DNA, 25 bp, SARS Virus
ttcttggtgttctcgtacgtgggaa

SEQ ID NO: 137506 - DNA, 25 bp, SARS Virus
tcttggtgttcttgtacgtgggaac

SEQ ID NO: 137507 - DNA, 25 bp, SARS Virus
cttggtgttctcttacgtgggaact

SEQ ID NO: 137508 - DNA, 25 bp, SARS Virus
ttggtgttctcgtacgtgggaactc

SEQ ID NO: 137509 - DNA, 25 bp, SARS Virus
tggtgttctcgttcgtgggaactcc

SEQ ID NO: 137510 - DNA, 25 bp, SARS Virus
ggtgttctcgtatgtgggaactccg

SEQ ID NO: 137511 - DNA, 25 bp, SARS Virus
gtgttctcgtacttgggaactccgt

SEQ ID NO: 137512 - DNA, 25 bp, SARS Virus
tgttctcgtacgtgggaactccgtt

SEQ ID NO: 137513 - DNA, 25 bp, SARS Virus
gttctcgtacgttggaactccgttg

SEQ ID NO: 137514 - DNA, 25 bp, SARS Virus
ttctcgtacgtgtgaactccgttga

SEQ ID NO: 137515 - DNA, 25 bp, SARS Virus
tctcgtacgtggtaactccgttgac

SEQ ID NO: 137516 - DNA, 25 bp, SARS Virus
ctcgtacgtgggtactccgttgacg

SEQ ID NO: 137517 - DNA, 25 bp, SARS Virus
tcgtacgtgggatctccgttgacgt

SEQ ID NO: 137518 - DNA, 25 bp, SARS Virus
cgtacgtgggaattccgttgacgtt

SEQ ID NO: 137519 - DNA, 25 bp, SARS Virus
gtacgtgggaactccgttgacgttg

SEQ ID NO: 137520 - DNA, 25 bp, SARS Virus
tacgtgggaacttcgttgacgttgt

SEQ ID NO: 137521 - DNA, 25 bp, SARS Virus
acgtgggaactctgttgacgttgtt

SEQ ID NO: 137522 - DNA, 25 bp, SARS Virus
cgtgggaactcctttgacgttgttg

SEQ ID NO: 137523 - DNA, 25 bp, SARS Virus
gtgggaactccgttgacgttgttga

SEQ ID NO: 137524 - DNA, 25 bp, SARS Virus
tgggaactccgttgacgttgttgat

SEQ ID NO: 137525 - DNA, 25 bp, SARS Virus
gggaactccgtttacgttgttgatc

SEQ ID NO: 137526 - DNA, 25 bp, SARS Virus
ggaactccgttgtcgttgttgatca

SEQ ID NO: 137527 - DNA, 25 bp, SARS Virus
gaactccgttgatgttgttgatcag

SEQ ID NO: 137528 - DNA, 25 bp, SARS Virus
aactccgttgactttgttgatcagt

SEQ ID NO: 137529 - DNA, 25 bp, SARS Virus
actccgttgacgttgttgatcagta

SEQ ID NO: 137530 - DNA, 25 bp, SARS Virus
ctccgttgacgttgttgatcagtac

SEQ ID NO: 137531 - DNA, 25 bp, SARS Virus
tccgttgacgtttttgatcagtacg

SEQ ID NO: 137532 - DNA, 25 bp, SARS Virus
ccgttgacgttgttgatcagtacgt

SEQ ID NO: 137533 - DNA, 25 bp, SARS Virus
cgttgacgttgttgatcagtacgtt

SEQ ID NO: 137534 - DNA, 25 bp, SARS Virus
gttgacgttgtttatcagtacgttg

SEQ ID NO: 137535 - DNA, 25 bp, SARS Virus
ttgacgttgttgttcagtacgttgt

SEQ ID NO: 137536 - DNA, 25 bp, SARS Virus
tgacgttgttgatcagtacgttgtt

SEQ ID NO: 137537 - DNA, 25 bp, SARS Virus
gacgttgttgattagtacgttgttt

SEQ ID NO: 137538 - DNA, 25 bp, SARS Virus
acgttgttgatctgtacgttgtttc

SEQ ID NO: 137539 - DNA, 25 bp, SARS Virus
cgttgttgatcattacgttgtttcg

SEQ ID NO: 137540 - DNA, 25 bp, SARS Virus
gttgttgatcagtacgttgtttcgt

SEQ ID NO: 137541 - DNA, 25 bp, SARS Virus
ttgttgatcagttcgttgtttcgtt

SEQ ID NO: 137542 - DNA, 25 bp, SARS Virus
tgttgatcagtatgttgtttcgttc

SEQ ID NO: 137543 - DNA, 25 bp, SARS Virus
gttgatcagtactttgtttcgttct

SEQ ID NO: 137544 - DNA, 25 bp, SARS Virus
ttgatcagtacgttgtttcgttcta

SEQ ID NO: 137545 - DNA, 25 bp, SARS Virus
tgatcagtacgttgtttcgttctaa

SEQ ID NO: 137546 - DNA, 25 bp, SARS Virus
gatcagtacgttttttcgttctaac

SEQ ID NO: 137547 - DNA, 25 bp, SARS Virus
atcagtacgttgtttcgttctaaca

SEQ ID NO: 137548 - DNA, 25 bp, SARS Virus
tcagtacgttgtttcgttctaacat

SEQ ID NO: 137549 - DNA, 25 bp, SARS Virus
cagtacgttgtttcgttctaacatt

SEQ ID NO: 137550 - DNA, 25 bp, SARS Virus
agtacgttgttttgttctaacattg

SEQ ID NO: 137551 - DNA, 25 bp, SARS Virus
gtacgttgtttctttctaacattgg

SEQ ID NO: 137552 - DNA, 25 bp, SARS Virus
tacgttgtttcgttctaacattggt

SEQ ID NO: 137553 - DNA, 25 bp, SARS Virus
acgttgtttcgttctaacattggta

SEQ ID NO: 137554 - DNA, 25 bp, SARS Virus
cgttgtttcgttttaacattggtac

SEQ ID NO: 137555 - DNA, 25 bp, SARS Virus
gttgtttcgttctaacattggtact

SEQ ID NO: 137556 - DNA, 25 bp, SARS Virus
ttgtttcgttcttacattggtactg

SEQ ID NO: 137557 - DNA, 25 bp, SARS Virus
tgtttcgttctatcattggtactgc

SEQ ID NO: 137558 - DNA, 25 bp, SARS Virus
gtttcgttctaatattggtactgct

SEQ ID NO: 137559 - DNA, 25 bp, SARS Virus
tttcgttctaactttggtactgcta

SEQ ID NO: 137560 - DNA, 25 bp, SARS Virus
ttcgttctaacattggtactgctac

SEQ ID NO: 137561 - DNA, 25 bp, SARS Virus
tcgttctaacattggtactgctacc

SEQ ID NO: 137562 - DNA, 25 bp, SARS Virus
cgttctaacatttgtactgctaccg

SEQ ID NO: 137563 - DNA, 25 bp, SARS Virus
gttctaacattgttactgctaccgt

SEQ ID NO: 137564 - DNA, 25 bp, SARS Virus
ttctaacattggtactgctaccgtt

SEQ ID NO: 137565 - DNA, 25 bp, SARS Virus
tctaacattggttctgctaccgtta

SEQ ID NO: 137566 - DNA, 25 bp, SARS Virus
ctaacattggtattgctaccgttaa

SEQ ID NO: 137567 - DNA, 25 bp, SARS Virus
taacattggtactgctaccgttaat

SEQ ID NO: 137568 - DNA, 25 bp, SARS Virus
aacattggtacttctaccgttaatc

SEQ ID NO: 137569 - DNA, 25 bp, SARS Virus
acattggtactgttaccgttaatca

SEQ ID NO: 137570 - DNA, 25 bp, SARS Virus
cattggtactgctaccgttaatcag

SEQ ID NO: 137571 - DNA, 25 bp, SARS Virus
attggtactgcttccgttaatcagg

SEQ ID NO: 137572 - DNA, 25 bp, SARS Virus
ttggtactgctatcgttaatcaggt

SEQ ID NO: 137573 - DNA, 25 bp, SARS Virus
tggtactgctactgttaatcaggtc

SEQ ID NO: 137574 - DNA, 25 bp, SARS Virus
ggtactgctacctttaatcaggtcg

SEQ ID NO: 137575 - DNA, 25 bp, SARS Virus
gtactgctaccgttaatcaggtcgt

SEQ ID NO: 137576 - DNA, 25 bp, SARS Virus
tactgctaccgttaatcaggtcgtt

SEQ ID NO: 137577 - DNA, 25 bp, SARS Virus
actgctaccgtttatcaggtcgtta

SEQ ID NO: 137578 - DNA, 25 bp, SARS Virus
ctgctaccgttattcaggtcgttac

SEQ ID NO: 137579 - DNA, 25 bp, SARS Virus
tgctaccgttaatcaggtcgttact

SEQ ID NO: 137580 - DNA, 25 bp, SARS Virus
gctaccgttaattaggtcgttactt

SEQ ID NO: 137581 - DNA, 25 bp, SARS Virus
ctaccgttaatctggtcgttacttc

SEQ ID NO: 137582 - DNA, 25 bp, SARS Virus
taccgttaatcatgtcgttacttcg

SEQ ID NO: 137583 - DNA, 25 bp, SARS Virus
accgttaatcagttcgttacttcgg

SEQ ID NO: 137584 - DNA, 25 bp, SARS Virus
ccgttaatcaggtcgttacttcggc

SEQ ID NO: 137585 - DNA, 25 bp, SARS Virus
cgttaatcaggttgttacttcggct

SEQ ID NO: 137586 - DNA, 25 bp, SARS Virus
gttaatcaggtctttacttcggctc

SEQ ID NO: 137587 - DNA, 25 bp, SARS Virus
ttaatcaggtcgttacttcggctcg

SEQ ID NO: 137588 - DNA, 25 bp, SARS Virus
taatcaggtcgttacttcggctcgg

SEQ ID NO: 137589 - DNA, 25 bp, SARS Virus
aatcaggtcgtttcttcggctcggt

SEQ ID NO: 137590 - DNA, 25 bp, SARS Virus
atcaggtcgttatttcggctcggtt

SEQ ID NO: 137591 - DNA, 25 bp, SARS Virus
tcaggtcgttacttcggctcggttt

SEQ ID NO: 137592 - DNA, 25 bp, SARS Virus
caggtcgttacttcggctcggtttg

SEQ ID NO: 137593 - DNA, 25 bp, SARS Virus
aggtcgttactttggctcggtttgt

SEQ ID NO: 137594 - DNA, 25 bp, SARS Virus
ggtcgttacttctgctcggtttgta

SEQ ID NO: 137595 - DNA, 25 bp, SARS Virus
gtcgttacttcgtctcggtttgtat

SEQ ID NO: 137596 - DNA, 25 bp, SARS Virus
tcgttacttcggttcggtttgtatg

SEQ ID NO: 137597 - DNA, 25 bp, SARS Virus
cgttacttcggctcggtttgtatgg

SEQ ID NO: 137598 - DNA, 25 bp, SARS Virus
gttacttcggcttggtttgtatggt

SEQ ID NO: 137599 - DNA, 25 bp, SARS Virus
ttacttcggctctgtttgtatggtt

SEQ ID NO: 137600 - DNA, 25 bp, SARS Virus
tacttcggctcgttttgtatggttc

SEQ ID NO: 137601 - DNA, 25 bp, SARS Virus
acttcggctcggtttgtatggttcc

SEQ ID NO: 137602 - DNA, 25 bp, SARS Virus
cttcggctcggtttgtatggttccg

SEQ ID NO: 137603 - DNA, 25 bp, SARS Virus
ttcggctcggtttgtatggttccgg

SEQ ID NO: 137604 - DNA, 25 bp, SARS Virus
tcggctcggtttttatggttccggt

SEQ ID NO: 137605 - DNA, 25 bp, SARS Virus
cggctcggtttgtatggttccggta

SEQ ID NO: 137606 - DNA, 25 bp, SARS Virus
ggctcggtttgtttggttccggtaa

SEQ ID NO: 137607 - DNA, 25 bp, SARS Virus
gctcggtttgtatggttccggtaaa

SEQ ID NO: 137608 - DNA, 25 bp, SARS Virus
ctcggtttgtattgttccggtaaat

SEQ ID NO: 137609 - DNA, 25 bp, SARS Virus
tcggtttgtatgtttccggtaaatt

SEQ ID NO: 137610 - DNA, 25 bp, SARS Virus
cggtttgtatggttccggtaaatta

SEQ ID NO: 137611 - DNA, 25 bp, SARS Virus
ggtttgtatggttccggtaaattat

SEQ ID NO: 137612 - DNA, 25 bp, SARS Virus
gtttgtatggtttcggtaaattata

SEQ ID NO: 137613 - DNA, 25 bp, SARS Virus
tttgtatggttctggtaaattatat

SEQ ID NO: 137614 - DNA, 25 bp, SARS Virus
ttgtatggttcctgtaaattatata

SEQ ID NO: 137615 - DNA, 25 bp, SARS Virus
tgtatggttccgttaaattatataa

SEQ ID NO: 137616 - DNA, 25 bp, SARS Virus
gtatggttccggtaaattatataac

SEQ ID NO: 137617 - DNA, 25 bp, SARS Virus
tatggttccggttaattatataacg

SEQ ID NO: 137618 - DNA, 25 bp, SARS Virus
atggttccggtatattatataacga

SEQ ID NO: 137619 - DNA, 25 bp, SARS Virus
tggttccggtaatttatataacgag

SEQ ID NO: 137620 - DNA, 25 bp, SARS Virus
ggttccggtaaattatataacgagt

SEQ ID NO: 137621 - DNA, 25 bp, SARS Virus
gttccggtaaattatataacgagta

SEQ ID NO: 137622 - DNA, 25 bp, SARS Virus
ttccggtaaattttataacgagtat

SEQ ID NO: 137623 - DNA, 25 bp, SARS Virus
tccggtaaattatataacgagtata

SEQ ID NO: 137624 - DNA, 25 bp, SARS Virus
ccggtaaattatttaacgagtataa

SEQ ID NO: 137625 - DNA, 25 bp, SARS Virus
cggtaaattatataacgagtataaa

SEQ ID NO: 137626 - DNA, 25 bp, SARS Virus
ggtaaattatattacgagtataaaa

SEQ ID NO: 137627 - DNA, 25 bp, SARS Virus
gtaaattatatatcgagtataaaag

SEQ ID NO: 137628 - DNA, 25 bp, SARS Virus
taaattatataatgagtataaaagg

SEQ ID NO: 137629 - DNA, 25 bp, SARS Virus
aaattatataactagtataaaaggg

SEQ ID NO: 137630 - DNA, 25 bp, SARS Virus
aattatataacgtgtataaaagggt

SEQ ID NO: 137631 - DNA, 25 bp, SARS Virus
attatataacgattataaaagggtt

SEQ ID NO: 137632 - DNA, 25 bp, SARS Virus
ttatataacgagtataaaagggtta

SEQ ID NO: 137633 - DNA, 25 bp, SARS Virus
tatataacgagtttaaaagggttaa

SEQ ID NO: 137634 - DNA, 25 bp, SARS Virus
atataacgagtataaaagggttaag

SEQ ID NO: 137635 - DNA, 25 bp, SARS Virus
tataacgagtattaaagggttaaga

SEQ ID NO: 137636 - DNA, 25 bp, SARS Virus
ataacgagtatataagggttaagaa

SEQ ID NO: 137637 - DNA, 25 bp, SARS Virus
taacgagtataatagggttaagaac

SEQ ID NO: 137638 - DNA, 25 bp, SARS Virus
aacgagtataaatgggttaagaact

SEQ ID NO: 137639 - DNA, 25 bp, SARS Virus
acgagtataaaatggttaagaactt

SEQ ID NO: 137640 - DNA, 25 bp, SARS Virus
cgagtataaaagtgttaagaacttc

SEQ ID NO: 137641 - DNA, 25 bp, SARS Virus
gagtataaaaggtttaagaacttcc

SEQ ID NO: 137642 - DNA, 25 bp, SARS Virus
agtataaaagggttaagaacttcca

SEQ ID NO: 137643 - DNA, 25 bp, SARS Virus
gtataaaagggttaagaacttccag

SEQ ID NO: 137644 - DNA, 25 bp, SARS Virus
tataaaagggtttagaacttccagt

SEQ ID NO: 137645 - DNA, 25 bp, SARS Virus
ataaaagggttatgaacttccagtt

SEQ ID NO: 137646 - DNA, 25 bp, SARS Virus
taaaagggttaataacttccagtta

SEQ ID NO: 137647 - DNA, 25 bp, SARS Virus
aaaagggttaagtacttccagttac

SEQ ID NO: 137648 - DNA, 25 bp, SARS Virus
aaagggttaagatcttccagttact

SEQ ID NO: 137649 - DNA, 25 bp, SARS Virus
aagggttaagaaattccagttactc

SEQ ID NO: 137650 - DNA, 25 bp, SARS Virus
agggttaagaacatccagttactca

SEQ ID NO: 137651 - DNA, 25 bp, SARS Virus
gggttaagaactaccagttactcac

SEQ ID NO: 137652 - DNA, 25 bp, SARS Virus
ggttaagaacttacagttactcact

SEQ ID NO: 137653 - DNA, 25 bp, SARS Virus
gttaagaacttcaagttactcacta

SEQ ID NO: 137654 - DNA, 25 bp, SARS Virus
ttaagaacttccagttactcactaa

SEQ ID NO: 137655 - DNA, 25 bp, SARS Virus
taagaacttccaattactcactaag

SEQ ID NO: 137656 - DNA, 25 bp, SARS Virus
aagaacttccagatactcactaagt

SEQ ID NO: 137657 - DNA, 25 bp, SARS Virus
agaacttccagtaactcactaagta

SEQ ID NO: 137658 - DNA, 25 bp, SARS Virus
gaacttccagttactcactaagtaa

SEQ ID NO: 137659 - DNA, 25 bp, SARS Virus
aacttccagttaatcactaagtaaa

SEQ ID NO: 137660 - DNA, 25 bp, SARS Virus
acttccagttacacactaagtaaat

SEQ ID NO: 137661 - DNA, 25 bp, SARS Virus
cttccagttactaactaagtaaatt

SEQ ID NO: 137662 - DNA, 25 bp, SARS Virus
ttccagttactcactaagtaaattt

SEQ ID NO: 137663 - DNA, 25 bp, SARS Virus
tccagttactcaataagtaaattta

SEQ ID NO: 137664 - DNA, 25 bp, SARS Virus
ccagttactcacaaagtaaatttaa

SEQ ID NO: 137665 - DNA, 25 bp, SARS Virus
cagttactcactaagtaaatttaaa

SEQ ID NO: 137666 - DNA, 25 bp, SARS Virus
agttactcactaagtaaatttaaaa

SEQ ID NO: 137667 - DNA, 25 bp, SARS Virus
gttactcactaaataaatttaaaaa

SEQ ID NO: 137668 - DNA, 25 bp, SARS Virus
ttactcactaagaaaatttaaaaat

SEQ ID NO: 137669 - DNA, 25 bp, SARS Virus
tactcactaagtaaatttaaaaatc

SEQ ID NO: 137670 - DNA, 25 bp, SARS Virus
actcactaagtaaatttaaaaatcg

SEQ ID NO: 137671 - DNA, 25 bp, SARS Virus
ctcactaagtaaatttaaaaatcgc

SEQ ID NO: 137672 - DNA, 25 bp, SARS Virus
tcactaagtaaaattaaaaatcgct

SEQ ID NO: 137673 - DNA, 25 bp, SARS Virus
cactaagtaaatataaaaatcgctg

SEQ ID NO: 137674 - DNA, 25 bp, SARS Virus
actaagtaaattaaaaaatcgctgg

SEQ ID NO: 137675 - DNA, 25 bp, SARS Virus
ctaagtaaatttaaaaatcgctgga

SEQ ID NO: 137676 - DNA, 25 bp, SARS Virus
taagtaaatttaaaaatcgctggag

SEQ ID NO: 137677 - DNA, 25 bp, SARS Virus
aagtaaatttaaaaatcgctggagt

SEQ ID NO: 137678 - DNA, 25 bp, SARS Virus
agtaaatttaaaaatcgctggagta

SEQ ID NO: 137679 - DNA, 25 bp, SARS Virus
gtaaatttaaaaatcgctggagtaa

SEQ ID NO: 137680 - DNA, 25 bp, SARS Virus
taaatttaaaaaacgctggagtaac

SEQ ID NO: 137681 - DNA, 25 bp, SARS Virus
aaatttaaaaatagctggagtaact

SEQ ID NO: 137682 - DNA, 25 bp, SARS Virus
aatttaaaaatcactggagtaactc

SEQ ID NO: 137683 - DNA, 25 bp, SARS Virus
atttaaaaatcgatggagtaactcc

SEQ ID NO: 137684 - DNA, 25 bp, SARS Virus
tttaaaaatcgcaggagtaactccg

SEQ ID NO: 137685 - DNA, 25 bp, SARS Virus
ttaaaaatcgctagagtaactccgc

SEQ ID NO: 137686 - DNA, 25 bp, SARS Virus
taaaaatcgctgaagtaactccgcc

SEQ ID NO: 137687 - DNA, 25 bp, SARS Virus
aaaaatcgctggagtaactccgcca

SEQ ID NO: 137688 - DNA, 25 bp, SARS Virus
aaaatcgctggaataactccgccag

SEQ ID NO: 137689 - DNA, 25 bp, SARS Virus
aaatcgctggagaaactccgccagt

SEQ ID NO: 137690 - DNA, 25 bp, SARS Virus
aatcgctggagtaactccgccagtt

SEQ ID NO: 137691 - DNA, 25 bp, SARS Virus
atcgctggagtaactccgccagtta

SEQ ID NO: 137692 - DNA, 25 bp, SARS Virus
tcgctggagtaaatccgccagttaa

SEQ ID NO: 137693 - DNA, 25 bp, SARS Virus
cgctggagtaacaccgccagttaaa

SEQ ID NO: 137694 - DNA, 25 bp, SARS Virus
gctggagtaactacgccagttaaag

SEQ ID NO: 137695 - DNA, 25 bp, SARS Virus
ctggagtaactcagccagttaaaga

SEQ ID NO: 137696 - DNA, 25 bp, SARS Virus
tggagtaactccaccagttaaagaa

SEQ ID NO: 137697 - DNA, 25 bp, SARS Virus
ggagtaactccgacagttaaagaaa

SEQ ID NO: 137698 - DNA, 25 bp, SARS Virus
gagtaactccgcaagttaaagaaaa

SEQ ID NO: 137699 - DNA, 25 bp, SARS Virus
agtaactccgccagttaaagaaaaa

SEQ ID NO: 137700 - DNA, 25 bp, SARS Virus
gtaactccgccaattaaagaaaaac

SEQ ID NO: 137701 - DNA, 25 bp, SARS Virus
taactccgccagataaagaaaaact

SEQ ID NO: 137702 - DNA, 25 bp, SARS Virus
aactccgccagtaaaagaaaaactt

SEQ ID NO: 137703 - DNA, 25 bp, SARS Virus
actccgccagttaaagaaaaactta

SEQ ID NO: 137704 - DNA, 25 bp, SARS Virus
ctccgccagttaaagaaaaacttac

SEQ ID NO: 137705 - DNA, 25 bp, SARS Virus
tccgccagttaaagaaaaacttaca

SEQ ID NO: 137706 - DNA, 25 bp, SARS Virus
ccgccagttaaaaaaaaacttacaa

SEQ ID NO: 137707 - DNA, 25 bp, SARS Virus
cgccagttaaagaaaaacttacaac

SEQ ID NO: 137708 - DNA, 25 bp, SARS Virus
gccagttaaagaaaaacttacaact

SEQ ID NO: 137709 - DNA, 25 bp, SARS Virus
ccagttaaagaaaaacttacaactg

SEQ ID NO: 137710 - DNA, 25 bp, SARS Virus
cagttaaagaaaaacttacaactgc

SEQ ID NO: 137711 - DNA, 25 bp, SARS Virus
agttaaagaaaaacttacaactgct

SEQ ID NO: 137712 - DNA, 25 bp, SARS Virus
gttaaagaaaaaattacaactgctg

SEQ ID NO: 137713 - DNA, 25 bp, SARS Virus
ttaaagaaaaacatacaactgctgt

SEQ ID NO: 137714 - DNA, 25 bp, SARS Virus
taaagaaaaactaacaactgctgtc

SEQ ID NO: 137715 - DNA, 25 bp, SARS Virus
aaagaaaaacttacaactgctgtct

SEQ ID NO: 137716 - DNA, 25 bp, SARS Virus
aagaaaaacttaaaactgctgtctt

SEQ ID NO: 137717 - DNA, 25 bp, SARS Virus
agaaaaacttacaactgctgtcttc

SEQ ID NO: 137718 - DNA, 25 bp, SARS Virus
gaaaaacttacaactgctgtcttcg

SEQ ID NO: 137719 - DNA, 25 bp, SARS Virus
aaaaacttacaaatgctgtcttcgc

SEQ ID NO: 137720 - DNA, 25 bp, SARS Virus
aaaacttacaacagctgtcttcgca

SEQ ID NO: 137721 - DNA, 25 bp, SARS Virus
aaacttacaactactgtcttcgcaa

SEQ ID NO: 137722 - DNA, 25 bp, SARS Virus
aacttacaactgatgtcttcgcaat

SEQ ID NO: 137723 - DNA, 25 bp, SARS Virus
acttacaactgcagtcttcgcaatt

SEQ ID NO: 137724 - DNA, 25 bp, SARS Virus
cttacaactgctatcttcgcaatta

SEQ ID NO: 137725 - DNA, 25 bp, SARS Virus
ttacaactgctgacttcgcaattac

SEQ ID NO: 137726 - DNA, 25 bp, SARS Virus
tacaactgctgtattcgcaattacg

SEQ ID NO: 137727 - DNA, 25 bp, SARS Virus
acaactgctgtcatcgcaattacgg

SEQ ID NO: 137728 - DNA, 25 bp, SARS Virus
caactgctgtctacgcaattacgga

SEQ ID NO: 137729 - DNA, 25 bp, SARS Virus
aactgctgtcttagcaattacggac

SEQ ID NO: 137730 - DNA, 25 bp, SARS Virus
actgctgtcttcacaattacggact

SEQ ID NO: 137731 - DNA, 25 bp, SARS Virus
ctgctgtcttcgaaattacggactt

SEQ ID NO: 137732 - DNA, 25 bp, SARS Virus
tgctgtcttcgcaattacggacttt

SEQ ID NO: 137733 - DNA, 25 bp, SARS Virus
gctgtcttcgcaattacggacttta

SEQ ID NO: 137734 - DNA, 25 bp, SARS Virus
ctgtcttcgcaaatacggactttac

SEQ ID NO: 137735 - DNA, 25 bp, SARS Virus
tgtcttcgcaataacggactttaca

SEQ ID NO: 137736 - DNA, 25 bp, SARS Virus
gtcttcgcaattacggactttacag

SEQ ID NO: 137737 - DNA, 25 bp, SARS Virus
tcttcgcaattaaggactttacagc

SEQ ID NO: 137738 - DNA, 25 bp, SARS Virus
cttcgcaattacagactttacagcg

SEQ ID NO: 137739 - DNA, 25 bp, SARS Virus
ttcgcaattacgaactttacagcgg

SEQ ID NO: 137740 - DNA, 25 bp, SARS Virus
tcgcaattacggactttacagcggt

SEQ ID NO: 137741 - DNA, 25 bp, SARS Virus
cgcaattacggaatttacagcggtt

SEQ ID NO: 137742 - DNA, 25 bp, SARS Virus
gcaattacggacattacagcggttc

SEQ ID NO: 137743 - DNA, 25 bp, SARS Virus
caattacggactatacagcggttct

SEQ ID NO: 137744 - DNA, 25 bp, SARS Virus
aattacggacttaacagcggttcta

SEQ ID NO: 137745 - DNA, 25 bp, SARS Virus
attacggactttacagcggttctag

SEQ ID NO: 137746 - DNA, 25 bp, SARS Virus
ttacggactttaaagcggttctagt

SEQ ID NO: 137747 - DNA, 25 bp, SARS Virus
tacggactttacagcggttctagtt

SEQ ID NO: 137748 - DNA, 25 bp, SARS Virus
acggactttacaacggttctagttg

SEQ ID NO: 137749 - DNA, 25 bp, SARS Virus
cggactttacagaggttctagttgt

SEQ ID NO: 137750 - DNA, 25 bp, SARS Virus
ggactttacagcagttctagttgta

SEQ ID NO: 137751 - DNA, 25 bp, SARS Virus
gactttacagcgattctagttgtag

SEQ ID NO: 137752 - DNA, 25 bp, SARS Virus
actttacagcggatctagttgtaga

SEQ ID NO: 137753 - DNA, 25 bp, SARS Virus
ctttacagcggtactagttgtagac

SEQ ID NO: 137754 - DNA, 25 bp, SARS Virus
tttacagcggttatagttgtagacc

SEQ ID NO: 137755 - DNA, 25 bp, SARS Virus
ttacagcggttcaagttgtagacca

SEQ ID NO: 137756 - DNA, 25 bp, SARS Virus
tacagcggttctagttgtagaccac

SEQ ID NO: 137757 - DNA, 25 bp, SARS Virus
acagcggttctaattgtagaccact

SEQ ID NO: 137758 - DNA, 25 bp, SARS Virus
cagcggttctagatgtagaccacta

SEQ ID NO: 137759 - DNA, 25 bp, SARS Virus
agcggttctagtagtagaccactac

SEQ ID NO: 137760 - DNA, 25 bp, SARS Virus
gcggttctagttatagaccactaca

SEQ ID NO: 137761 - DNA, 25 bp, SARS Virus
cggttctagttgaagaccactacat

SEQ ID NO: 137762 - DNA, 25 bp, SARS Virus
ggttctagttgtagaccactacata

SEQ ID NO: 137763 - DNA, 25 bp, SARS Virus
gttctagttgtaaaccactacatac

SEQ ID NO: 137764 - DNA, 25 bp, SARS Virus
ttctagttgtagaccactacatact

SEQ ID NO: 137765 - DNA, 25 bp, SARS Virus
tctagttgtagaacactacatacta

SEQ ID NO: 137766 - DNA, 25 bp, SARS Virus
ctagttgtagacaactacatactaa

SEQ ID NO: 137767 - DNA, 25 bp, SARS Virus
tagttgtagaccactacatactaaa

SEQ ID NO: 137768 - DNA, 25 bp, SARS Virus
agttgtagaccaatacatactaaaa

SEQ ID NO: 137769 - DNA, 25 bp, SARS Virus
gttgtagaccacaacatactaaaaa

SEQ ID NO: 137770 - DNA, 25 bp, SARS Virus
ttgtagaccactacatactaaaaac

SEQ ID NO: 137771 - DNA, 25 bp, SARS Virus
tgtagaccactaaatactaaaaact

SEQ ID NO: 137772 - DNA, 25 bp, SARS Virus
gtagaccactacatactaaaaactt

SEQ ID NO: 137773 - DNA, 25 bp, SARS Virus
tagaccactacaaactaaaaacttc

SEQ ID NO: 137774 - DNA, 25 bp, SARS Virus
agaccactacatactaaaaacttca

SEQ ID NO: 137775 - DNA, 25 bp, SARS Virus
gaccactacataataaaaacttcat

SEQ ID NO: 137776 - DNA, 25 bp, SARS Virus
accactacatacaaaaaacttcatg

SEQ ID NO: 137777 - DNA, 25 bp, SARS Virus
ccactacatactaaaaacttcatga

SEQ ID NO: 137778 - DNA, 25 bp, SARS Virus
cactacatactaaaaacttcatgaa

SEQ ID NO: 137779 - DNA, 25 bp, SARS Virus
actacatactaaaaacttcatgaac

SEQ ID NO: 137780 - DNA, 25 bp, SARS Virus
ctacatactaaaaacttcatgaaca

SEQ ID NO: 137781 - DNA, 25 bp, SARS Virus
tacatactaaaaacttcatgaacag

SEQ ID NO: 137782 - DNA, 25 bp, SARS Virus
acatactaaaaaattcatgaacagg

SEQ ID NO: 137783 - DNA, 25 bp, SARS Virus
catactaaaaacatcatgaacaggt

SEQ ID NO: 137784 - DNA, 25 bp, SARS Virus
atactaaaaactacatgaacaggtc

SEQ ID NO: 137785 - DNA, 25 bp, SARS Virus
tactaaaaacttaatgaacaggtcg

SEQ ID NO: 137786 - DNA, 25 bp, SARS Virus
actaaaaacttcatgaacaggtcga

SEQ ID NO: 137787 - DNA, 25 bp, SARS Virus
ctaaaaacttcaagaacaggtcgag

SEQ ID NO: 137788 - DNA, 25 bp, SARS Virus
taaaaacttcataaacaggtcgaga

SEQ ID NO: 137789 - DNA, 25 bp, SARS Virus
aaaaacttcatgaacaggtcgagaa

SEQ ID NO: 137790 - DNA, 25 bp, SARS Virus
aaaacttcatgaacaggtcgagaag

SEQ ID NO: 137791 - DNA, 25 bp, SARS Virus
aaacttcatgaaaaggtcgagaaga

SEQ ID NO: 137792 - DNA, 25 bp, SARS Virus
aacttcatgaacaggtcgagaagaa

SEQ ID NO: 137793 - DNA, 25 bp, SARS Virus
acttcatgaacaagtcgagaagaaa

SEQ ID NO: 137794 - DNA, 25 bp, SARS Virus
cttcatgaacagatcgagaagaaac

SEQ ID NO: 137795 - DNA, 25 bp, SARS Virus
ttcatgaacaggacgagaagaaact

SEQ ID NO: 137796 - DNA, 25 bp, SARS Virus
tcatgaacaggtagagaagaaactt

SEQ ID NO: 137797 - DNA, 25 bp, SARS Virus
catgaacaggtcaagaagaaactta

SEQ ID NO: 137798 - DNA, 25 bp, SARS Virus
atgaacaggtcgagaagaaacttac

SEQ ID NO: 137799 - DNA, 25 bp, SARS Virus
tgaacaggtcgaaaagaaacttact

SEQ ID NO: 137800 - DNA, 25 bp, SARS Virus
gaacaggtcgagaagaaacttactc

SEQ ID NO: 137801 - DNA, 25 bp, SARS Virus
aacaggtcgagaagaaacttactca

SEQ ID NO: 137802 - DNA, 25 bp, SARS Virus
acaggtcgagaaaaaacttactcag

SEQ ID NO: 137803 - DNA, 25 bp, SARS Virus
caggtcgagaagaaacttactcagt

SEQ ID NO: 137804 - DNA, 25 bp, SARS Virus
aggtcgagaagaaacttactcagtt

SEQ ID NO: 137805 - DNA, 25 bp, SARS Virus
ggtcgagaagaaacttactcagttc

SEQ ID NO: 137806 - DNA, 25 bp, SARS Virus
gtcgagaagaaaattactcagttcg

SEQ ID NO: 137807 - DNA, 25 bp, SARS Virus
tcgagaagaaacatactcagttcga

SEQ ID NO: 137808 - DNA, 25 bp, SARS Virus
cgagaagaaactaactcagttcgag

SEQ ID NO: 137809 - DNA, 25 bp, SARS Virus
gagaagaaacttactcagttcgagt

SEQ ID NO: 137810 - DNA, 25 bp, SARS Virus
agaagaaacttaatcagttcgagtc

SEQ ID NO: 137811 - DNA, 25 bp, SARS Virus
gaagaaacttacacagttcgagtcc

SEQ ID NO: 137812 - DNA, 25 bp, SARS Virus
aagaaacttactaagttcgagtcca

SEQ ID NO: 137813 - DNA, 25 bp, SARS Virus
agaaacttactcagttcgagtccaa

SEQ ID NO: 137814 - DNA, 25 bp, SARS Virus
gaaacttactcaattcgagtccaac

SEQ ID NO: 137815 - DNA, 25 bp, SARS Virus
aaacttactcagatcgagtccaacg

SEQ ID NO: 137816 - DNA, 25 bp, SARS Virus
aacttactcagtacgagtccaacgt

SEQ ID NO: 137817 - DNA, 25 bp, SARS Virus
acttactcagttagagtccaacgtc

SEQ ID NO: 137818 - DNA, 25 bp, SARS Virus
cttactcagttcaagtccaacgtct

SEQ ID NO: 137819 - DNA, 25 bp, SARS Virus
ttactcagttcgagtccaacgtctc

SEQ ID NO: 137820 - DNA, 25 bp, SARS Virus
tactcagttcgaatccaacgtctcc

SEQ ID NO: 137821 - DNA, 25 bp, SARS Virus
actcagttcgagaccaacgtctcct

SEQ ID NO: 137822 - DNA, 25 bp, SARS Virus
ctcagttcgagtacaacgtctccta

SEQ ID NO: 137823 - DNA, 25 bp, SARS Virus
tcagttcgagtcaaacgtctcctag

SEQ ID NO: 137824 - DNA, 25 bp, SARS Virus
cagttcgagtccaacgtctcctagt

SEQ ID NO: 137825 - DNA, 25 bp, SARS Virus
agttcgagtccaacgtctcctagta

SEQ ID NO: 137826 - DNA, 25 bp, SARS Virus
gttcgagtccaaagtctcctagtat

SEQ ID NO: 137827 - DNA, 25 bp, SARS Virus
ttcgagtccaacatctcctagtatt

SEQ ID NO: 137828 - DNA, 25 bp, SARS Virus
tcgagtccaacgactcctagtattt

SEQ ID NO: 137829 - DNA, 25 bp, SARS Virus
cgagtccaacgtatcctagtatttg

SEQ ID NO: 137830 - DNA, 25 bp, SARS Virus
gagtccaacgtcacctagtatttga

SEQ ID NO: 137831 - DNA, 25 bp, SARS Virus
agtccaacgtctactagtatttgac

SEQ ID NO: 137832 - DNA, 25 bp, SARS Virus
gtccaacgtctcatagtatttgaca

SEQ ID NO: 137833 - DNA, 25 bp, SARS Virus
tccaacgtctccaagtatttgacac

SEQ ID NO: 137834 - DNA, 25 bp, SARS Virus
ccaacgtctcctagtatttgacaca

SEQ ID NO: 137835 - DNA, 25 bp, SARS Virus
caacgtctcctaatatttgacacaa

SEQ ID NO: 137836 - DNA, 25 bp, SARS Virus
aacgtctcctagaatttgacacaac

SEQ ID NO: 137837 - DNA, 25 bp, SARS Virus
acgtctcctagtatttgacacaaca

SEQ ID NO: 137838 - DNA, 25 bp, SARS Virus
cgtctcctagtaattgacacaacaa

SEQ ID NO: 137839 - DNA, 25 bp, SARS Virus
gtctcctagtatatgacacaacaat

SEQ ID NO: 137840 - DNA, 25 bp, SARS Virus
tctcctagtattagacacaacaatt

SEQ ID NO: 137841 - DNA, 25 bp, SARS Virus
ctcctagtatttaacacaacaatta

SEQ ID NO: 137842 - DNA, 25 bp, SARS Virus
tcctagtatttgacacaacaattac

SEQ ID NO: 137843 - DNA, 25 bp, SARS Virus
cctagtatttgaaacaacaattact

SEQ ID NO: 137844 - DNA, 25 bp, SARS Virus
ctagtatttgacacaacaattacta

SEQ ID NO: 137845 - DNA, 25 bp, SARS Virus
tagtatttgacaaaacaattactac

SEQ ID NO: 137846 - DNA, 25 bp, SARS Virus
agtatttgacacaacaattactacg

SEQ ID NO: 137847 - DNA, 25 bp, SARS Virus
gtatttgacacaacaattactacgg

SEQ ID NO: 137848 - DNA, 25 bp, SARS Virus
tatttgacacaaaaattactacggt

SEQ ID NO: 137849 - DNA, 25 bp, SARS Virus
atttgacacaacaattactacggtt

SEQ ID NO: 137850 - DNA, 25 bp, SARS Virus
tttgacacaacaattactacggtta

SEQ ID NO: 137851 - DNA, 25 bp, SARS Virus
ttgacacaacaaatactacggttat

SEQ ID NO: 137852 - DNA, 25 bp, SARS Virus
tgacacaacaataactacggttatt

SEQ ID NO: 137853 - DNA, 25 bp, SARS Virus
gacacaacaattactacggttattg

SEQ ID NO: 137854 - DNA, 25 bp, SARS Virus
acacaacaattaatacggttattgc

SEQ ID NO: 137855 - DNA, 25 bp, SARS Virus
cacaacaattacaacggttattgct

SEQ ID NO: 137856 - DNA, 25 bp, SARS Virus
acaacaattactacggttattgctg

SEQ ID NO: 137857 - DNA, 25 bp, SARS Virus
caacaattactaaggttattgctgt

SEQ ID NO: 137858 - DNA, 25 bp, SARS Virus
aacaattactacagttattgctgta

SEQ ID NO: 137859 - DNA, 25 bp, SARS Virus
acaattactacgattattgctgtag

SEQ ID NO: 137860 - DNA, 25 bp, SARS Virus
caattactacggatattgctgtagt

SEQ ID NO: 137861 - DNA, 25 bp, SARS Virus
aattactacggtaattgctgtagtg

SEQ ID NO: 137862 - DNA, 25 bp, SARS Virus
attactacggttattgctgtagtgt

SEQ ID NO: 137863 - DNA, 25 bp, SARS Virus
ttactacggttaatgctgtagtgtt

SEQ ID NO: 137864 - DNA, 25 bp, SARS Virus
tactacggttatagctgtagtgtta

SEQ ID NO: 137865 - DNA, 25 bp, SARS Virus
actacggttattactgtagtgttaa

SEQ ID NO: 137866 - DNA, 25 bp, SARS Virus
ctacggttattgatgtagtgttaaa

SEQ ID NO: 137867 - DNA, 25 bp, SARS Virus
tacggttattgcagtagtgttaaag

SEQ ID NO: 137868 - DNA, 25 bp, SARS Virus
acggttattgctatagtgttaaagg

SEQ ID NO: 137869 - DNA, 25 bp, SARS Virus
cggttattgctgaagtgttaaagga

SEQ ID NO: 137870 - DNA, 25 bp, SARS Virus
ggttattgctgtagtgttaaaggac

SEQ ID NO: 137871 - DNA, 25 bp, SARS Virus
gttattgctgtaatgttaaaggact

SEQ ID NO: 137872 - DNA, 25 bp, SARS Virus
ttattgctgtagagttaaaggactc

SEQ ID NO: 137873 - DNA, 25 bp, SARS Virus
tattgctgtagtattaaaggactct

SEQ ID NO: 137874 - DNA, 25 bp, SARS Virus
attgctgtagtgataaaggactctg

SEQ ID NO: 137875 - DNA, 25 bp, SARS Virus
ttgctgtagtgtaaaaggactctgt

SEQ ID NO: 137876 - DNA, 25 bp, SARS Virus
tgctgtagtgttaaaggactctgtt

SEQ ID NO: 137877 - DNA, 25 bp, SARS Virus
gctgtagtgttaaaggactctgttt

SEQ ID NO: 137878 - DNA, 25 bp, SARS Virus
ctgtagtgttaaaggactctgttta

SEQ ID NO: 137879 - DNA, 25 bp, SARS Virus
tgtagtgttaaaagactctgtttac

SEQ ID NO: 137880 - DNA, 25 bp, SARS Virus
gtagtgttaaagaactctgtttaca

SEQ ID NO: 137881 - DNA, 25 bp, SARS Virus
tagtgttaaaggactctgtttacat

SEQ ID NO: 137882 - DNA, 25 bp, SARS Virus
agtgttaaaggaatctgtttacata

SEQ ID NO: 137883 - DNA, 25 bp, SARS Virus
gtgttaaaggacactgtttacataa

SEQ ID NO: 137884 - DNA, 25 bp, SARS Virus
tgttaaaggactatgtttacataac

SEQ ID NO: 137885 - DNA, 25 bp, SARS Virus
gttaaaggactcagtttacataaca

SEQ ID NO: 137886 - DNA, 25 bp, SARS Virus
ttaaaggactctatttacataacag

SEQ ID NO: 137887 - DNA, 25 bp, SARS Virus
taaaggactctgattacataacaga

SEQ ID NO: 137888 - DNA, 25 bp, SARS Virus
aaaggactctgtatacataacagac

SEQ ID NO: 137889 - DNA, 25 bp, SARS Virus
aaggactctgttaacataacagaca

SEQ ID NO: 137890 - DNA, 25 bp, SARS Virus
aggactctgtttacataacagacat

SEQ ID NO: 137891 - DNA, 25 bp, SARS Virus
ggactctgtttaaataacagacatc

SEQ ID NO: 137892 - DNA, 25 bp, SARS Virus
gactctgtttacataacagacatca

SEQ ID NO: 137893 - DNA, 25 bp, SARS Virus
actctgtttacaaaacagacatcat

SEQ ID NO: 137894 - DNA, 25 bp, SARS Virus
ctctgtttacataacagacatcatt

SEQ ID NO: 137895 - DNA, 25 bp, SARS Virus
tctgtttacataacagacatcatta

SEQ ID NO: 137896 - DNA, 25 bp, SARS Virus
ctgtttacataaaagacatcattaa

SEQ ID NO: 137897 - DNA, 25 bp, SARS Virus
tgtttacataacagacatcattaat

SEQ ID NO: 137898 - DNA, 25 bp, SARS Virus
gtttacataacaaacatcattaata

SEQ ID NO: 137899 - DNA, 25 bp, SARS Virus
tttacataacagacatcattaataa

SEQ ID NO: 137900 - DNA, 25 bp, SARS Virus
ttacataacagaaatcattaataaa

SEQ ID NO: 137901 - DNA, 25 bp, SARS Virus
tacataacagacatcattaataaac

SEQ ID NO: 137902 - DNA, 25 bp, SARS Virus
acataacagacaacattaataaaca

SEQ ID NO: 137903 - DNA, 25 bp, SARS Virus
cataacagacataattaataaacac

SEQ ID NO: 137904 - DNA, 25 bp, SARS Virus
ataacagacatcattaataaacacc

SEQ ID NO: 137905 - DNA, 25 bp, SARS Virus
taacagacatcaataataaacacct

SEQ ID NO: 137906 - DNA, 25 bp, SARS Virus
aacagacatcataaataaacacctc

SEQ ID NO: 137907 - DNA, 25 bp, SARS Virus
acagacatcattaataaacacctct

SEQ ID NO: 137908 - DNA, 25 bp, SARS Virus
cagacatcattaataaacacctctt

SEQ ID NO: 137909 - DNA, 25 bp, SARS Virus
agacatcattaaaaaacacctcttt

SEQ ID NO: 137910 - DNA, 25 bp, SARS Virus
gacatcattaataaacacctctttt

SEQ ID NO: 137911 - DNA, 25 bp, SARS Virus
acatcattaataaacacctcttttc

SEQ ID NO: 137912 - DNA, 25 bp, SARS Virus
catcattaataaacacctcttttct

SEQ ID NO: 137913 - DNA, 25 bp, SARS Virus
atcattaataaaaacctcttttctt

SEQ ID NO: 137914 - DNA, 25 bp, SARS Virus
tcattaataaacacctcttttcttc

SEQ ID NO: 137915 - DNA, 25 bp, SARS Virus
cattaataaacaactcttttcttca

SEQ ID NO: 137916 - DNA, 25 bp, SARS Virus
attaataaacacatcttttcttcaa

SEQ ID NO: 137917 - DNA, 25 bp, SARS Virus
ttaataaacaccacttttcttcaag

SEQ ID NO: 137918 - DNA, 25 bp, SARS Virus
taataaacacctattttcttcaagg

SEQ ID NO: 137919 - DNA, 25 bp, SARS Virus
aataaacacctcatttcttcaagga

SEQ ID NO: 137920 - DNA, 25 bp, SARS Virus
ataaacacctctattcttcaaggag

SEQ ID NO: 137921 - DNA, 25 bp, SARS Virus
taaacacctcttatcttcaaggaga

SEQ ID NO: 137922 - DNA, 25 bp, SARS Virus
aaacacctctttacttcaaggagac

SEQ ID NO: 137923 - DNA, 25 bp, SARS Virus
aacacctcttttattcaaggagaca

SEQ ID NO: 137924 - DNA, 25 bp, SARS Virus
acacctcttttcatcaaggagacac

SEQ ID NO: 137925 - DNA, 25 bp, SARS Virus
cacctcttttctacaaggagacaca

SEQ ID NO: 137926 - DNA, 25 bp, SARS Virus
acctcttttcttaaaggagacacat

SEQ ID NO: 137927 - DNA, 25 bp, SARS Virus
cctcttttcttcaaggagacacatt

SEQ ID NO: 137928 - DNA, 25 bp, SARS Virus
ctcttttcttcaaggagacacatta

SEQ ID NO: 137929 - DNA, 25 bp, SARS Virus
tcttttcttcaaagagacacattat

SEQ ID NO: 137930 - DNA, 25 bp, SARS Virus
cttttcttcaagaagacacattatt

SEQ ID NO: 137931 - DNA, 25 bp, SARS Virus
ttttcttcaaggagacacattattt

SEQ ID NO: 137932 - DNA, 25 bp, SARS Virus
tttcttcaaggaaacacattatttg

SEQ ID NO: 137933 - DNA, 25 bp, SARS Virus
ttcttcaaggagacacattatttgg

SEQ ID NO: 137934 - DNA, 25 bp, SARS Virus
tcttcaaggagaaacattatttggt

SEQ ID NO: 137935 - DNA, 25 bp, SARS Virus
cttcaaggagacacattatttggtt

SEQ ID NO: 137936 - DNA, 25 bp, SARS Virus
ttcaaggagacaaattatttggttc

SEQ ID NO: 137937 - DNA, 25 bp, SARS Virus
tcaaggagacacattatttggttct

SEQ ID NO: 137938 - DNA, 25 bp, SARS Virus
caaggagacacaatatttggttctt

SEQ ID NO: 137939 - DNA, 25 bp, SARS Virus
aaggagacacataatttggttcttc

SEQ ID NO: 137940 - DNA, 25 bp, SARS Virus
aggagacacattatttggttcttca

SEQ ID NO: 137941 - DNA, 25 bp, SARS Virus
ggagacacattaattggttcttcac

SEQ ID NO: 137942 - DNA, 25 bp, SARS Virus
gagacacattatatggttcttcacg

SEQ ID NO: 137943 - DNA, 25 bp, SARS Virus
agacacattattaggttcttcacgg

SEQ ID NO: 137944 - DNA, 25 bp, SARS Virus
gacacattatttagttcttcacggt

SEQ ID NO: 137945 - DNA, 25 bp, SARS Virus
acacattatttgattcttcacggta

SEQ ID NO: 137946 - DNA, 25 bp, SARS Virus
cacattatttggatcttcacggtaa

SEQ ID NO: 137947 - DNA, 25 bp, SARS Virus
acattatttggtacttcacggtaat

SEQ ID NO: 137948 - DNA, 25 bp, SARS Virus
cattatttggttattcacggtaatt

SEQ ID NO: 137949 - DNA, 25 bp, SARS Virus
attatttggttcatcacggtaattt

SEQ ID NO: 137950 - DNA, 25 bp, SARS Virus
ttatttggttctacacggtaatttg

SEQ ID NO: 137951 - DNA, 25 bp, SARS Virus
tatttggttcttaacggtaatttgt

SEQ ID NO: 137952 - DNA, 25 bp, SARS Virus
atttggttcttcacggtaatttgtg

SEQ ID NO: 137953 - DNA, 25 bp, SARS Virus
tttggttcttcaaggtaatttgtgt

SEQ ID NO: 137954 - DNA, 25 bp, SARS Virus
ttggttcttcacagtaatttgtgtt

SEQ ID NO: 137955 - DNA, 25 bp, SARS Virus
tggttcttcacgataatttgtgttt

SEQ ID NO: 137956 - DNA, 25 bp, SARS Virus
ggttcttcacggaaatttgtgtttt

SEQ ID NO: 137957 - DNA, 25 bp, SARS Virus
gttcttcacggtaatttgtgttttt

SEQ ID NO: 137958 - DNA, 25 bp, SARS Virus
ttcttcacggtaatttgtgtttttg

SEQ ID NO: 137959 - DNA, 25 bp, SARS Virus
tcttcacggtaaattgtgtttttgt

SEQ ID NO: 137960 - DNA, 25 bp, SARS Virus
cttcacggtaatatgtgtttttgtg

SEQ ID NO: 137961 - DNA, 25 bp, SARS Virus
ttcacggtaattagtgtttttgtgg

SEQ ID NO: 137962 - DNA, 25 bp, SARS Virus
tcacggtaatttatgtttttgtgga

SEQ ID NO: 137963 - DNA, 25 bp, SARS Virus
cacggtaatttgagtttttgtggaa

SEQ ID NO: 137964 - DNA, 25 bp, SARS Virus
acggtaatttgtatttttgtggaag

SEQ ID NO: 137965 - DNA, 25 bp, SARS Virus
cggtaatttgtgattttgtggaagt

SEQ ID NO: 137966 - DNA, 25 bp, SARS Virus
ggtaatttgtgtatttgtggaagtg

SEQ ID NO: 137967 - DNA, 25 bp, SARS Virus
gtaatttgtgttattgtggaagtgc

SEQ ID NO: 137968 - DNA, 25 bp, SARS Virus
taatttgtgtttatgtggaagtgct

SEQ ID NO: 137969 - DNA, 25 bp, SARS Virus
aatttgtgttttagtggaagtgctc

SEQ ID NO: 137970 - DNA, 25 bp, SARS Virus
atttgtgtttttatggaagtgctcc

SEQ ID NO: 137971 - DNA, 25 bp, SARS Virus
tttgtgtttttgaggaagtgctccc

SEQ ID NO: 137972 - DNA, 25 bp, SARS Virus
ttgtgtttttgtagaagtgctccct

SEQ ID NO: 137973 - DNA, 25 bp, SARS Virus
tgtgtttttgtgaaagtgctccctt

SEQ ID NO: 137974 - DNA, 25 bp, SARS Virus
gtgtttttgtggaagtgctcccttc

SEQ ID NO: 137975 - DNA, 25 bp, SARS Virus
tgtttttgtggaagtgctcccttca

SEQ ID NO: 137976 - DNA, 25 bp, SARS Virus
gtttttgtggaaatgctcccttcat

SEQ ID NO: 137977 - DNA, 25 bp, SARS Virus
tttttgtggaagagctcccttcata

SEQ ID NO: 137978 - DNA, 25 bp, SARS Virus
ttttgtggaagtactcccttcatac

SEQ ID NO: 137979 - DNA, 25 bp, SARS Virus
tttgtggaagtgatcccttcatacg

SEQ ID NO: 137980 - DNA, 25 bp, SARS Virus
ttgtggaagtgcacccttcatacga

SEQ ID NO: 137981 - DNA, 25 bp, SARS Virus
tgtggaagtgctaccttcatacgaa

SEQ ID NO: 137982 - DNA, 25 bp, SARS Virus
gtggaagtgctcacttcatacgaaa

SEQ ID NO: 137983 - DNA, 25 bp, SARS Virus
tggaagtgctccattcatacgaaac

SEQ ID NO: 137984 - DNA, 25 bp, SARS Virus
ggaagtgctcccatcatacgaaacg

SEQ ID NO: 137985 - DNA, 25 bp, SARS Virus
gaagtgctccctacatacgaaacgg

SEQ ID NO: 137986 - DNA, 25 bp, SARS Virus
aagtgctcccttaatacgaaacgga

SEQ ID NO: 137987 - DNA, 25 bp, SARS Virus
agtgctcccttcatacgaaacggaa

SEQ ID NO: 137988 - DNA, 25 bp, SARS Virus
gtgctcccttcaaacgaaacggaag

SEQ ID NO: 137989 - DNA, 25 bp, SARS Virus
tgctcccttcatacgaaacggaagt

SEQ ID NO: 137990 - DNA, 25 bp, SARS Virus
gctcccttcataagaaacggaagta

SEQ ID NO: 137991 - DNA, 25 bp, SARS Virus
ctcccttcatacaaaacggaagtac

SEQ ID NO: 137992 - DNA, 25 bp, SARS Virus
tcccttcatacgaaacggaagtact

SEQ ID NO: 137993 - DNA, 25 bp, SARS Virus
cccttcatacgaaacggaagtactg

SEQ ID NO: 137994 - DNA, 25 bp, SARS Virus
ccttcatacgaaacggaagtactgt

SEQ ID NO: 137995 - DNA, 25 bp, SARS Virus
cttcatacgaaaaggaagtactgtt

SEQ ID NO: 137996 - DNA, 25 bp, SARS Virus
ttcatacgaaacagaagtactgttt

SEQ ID NO: 137997 - DNA, 25 bp, SARS Virus
tcatacgaaacgaaagtactgttta

SEQ ID NO: 137998 - DNA, 25 bp, SARS Virus
catacgaaacggaagtactgtttaa

SEQ ID NO: 137999 - DNA, 25 bp, SARS Virus
atacgaaacggaagtactgtttaac

SEQ ID NO: 138000 - DNA, 25 bp, SARS Virus
tacgaaacggaaatactgtttaacg

SEQ ID NO: 138001 - DNA, 25 bp, SARS Virus
acgaaacggaagaactgtttaacga

SEQ ID NO: 138002 - DNA, 25 bp, SARS Virus
cgaaacggaagtactgtttaacgac

SEQ ID NO: 138003 - DNA, 25 bp, SARS Virus
gaaacggaagtaatgtttaacgacc

SEQ ID NO: 138004 - DNA, 25 bp, SARS Virus
aaacggaagtacagtttaacgaccg

SEQ ID NO: 138005 - DNA, 25 bp, SARS Virus
aacggaagtactatttaacgaccgc

SEQ ID NO: 138006 - DNA, 25 bp, SARS Virus
acggaagtactgattaacgaccgcg

SEQ ID NO: 138007 - DNA, 25 bp, SARS Virus
cggaagtactgtataacgaccgcga

SEQ ID NO: 138008 - DNA, 25 bp, SARS Virus
ggaagtactgttaaacgaccgcgac

SEQ ID NO: 138009 - DNA, 25 bp, SARS Virus
gaagtactgtttaacgaccgcgaca

SEQ ID NO: 138010 - DNA, 25 bp, SARS Virus
aagtactgtttaacgaccgcgacac

SEQ ID NO: 138011 - DNA, 25 bp, SARS Virus
agtactgtttaaagaccgcgacacc

SEQ ID NO: 138012 - DNA, 25 bp, SARS Virus
gtactgtttaacaaccgcgacacca

SEQ ID NO: 138013 - DNA, 25 bp, SARS Virus
tactgtttaacgaccgcgacaccac

SEQ ID NO: 138014 - DNA, 25 bp, SARS Virus
actgtttaacgaacgcgacaccact

SEQ ID NO: 138015 - DNA, 25 bp, SARS Virus
ctgtttaacgacagcgacaccactt

SEQ ID NO: 138016 - DNA, 25 bp, SARS Virus
tgtttaacgaccacgacaccacttc

SEQ ID NO: 138017 - DNA, 25 bp, SARS Virus
gtttaacgaccgagacaccacttca

SEQ ID NO: 138018 - DNA, 25 bp, SARS Virus
tttaacgaccgcaacaccacttcaa

SEQ ID NO: 138019 - DNA, 25 bp, SARS Virus
ttaacgaccgcgacaccacttcaag

SEQ ID NO: 138020 - DNA, 25 bp, SARS Virus
taacgaccgcgaaaccacttcaagg

SEQ ID NO: 138021 - DNA, 25 bp, SARS Virus
aacgaccgcgacaccacttcaagga

SEQ ID NO: 138022 - DNA, 25 bp, SARS Virus
acgaccgcgacaacacttcaaggag

SEQ ID NO: 138023 - DNA, 25 bp, SARS Virus
cgaccgcgacacaacttcaaggaga

SEQ ID NO: 138024 - DNA, 25 bp, SARS Virus
gaccgcgacaccacttcaaggagag

SEQ ID NO: 138025 - DNA, 25 bp, SARS Virus
accgcgacaccaattcaaggagagg

SEQ ID NO: 138026 - DNA, 25 bp, SARS Virus
ccgcgacaccacatcaaggagagga

SEQ ID NO: 138027 - DNA, 25 bp, SARS Virus
cgcgacaccactacaaggagaggac

SEQ ID NO: 138028 - DNA, 25 bp, SARS Virus
gcgacaccacttaaaggagaggacc

SEQ ID NO: 138029 - DNA, 25 bp, SARS Virus
cgacaccacttcaaggagaggaccc

SEQ ID NO: 138030 - DNA, 25 bp, SARS Virus
gacaccacttcaaggagaggaccct

SEQ ID NO: 138031 - DNA, 25 bp, SARS Virus
acaccacttcaaagagaggacccta

SEQ ID NO: 138032 - DNA, 25 bp, SARS Virus
caccacttcaagaagaggaccctac

SEQ ID NO: 138033 - DNA, 25 bp, SARS Virus
accacttcaaggagaggaccctacc

SEQ ID NO: 138034 - DNA, 25 bp, SARS Virus
ccacttcaaggaaaggaccctaccg

SEQ ID NO: 138035 - DNA, 25 bp, SARS Virus
cacttcaaggagaggaccctaccgt

SEQ ID NO: 138036 - DNA, 25 bp, SARS Virus
acttcaaggagaagaccctaccgtg

SEQ ID NO: 138037 - DNA, 25 bp, SARS Virus
cttcaaggagagaaccctaccgtgt

SEQ ID NO: 138038 - DNA, 25 bp, SARS Virus
ttcaaggagaggaccctaccgtgta

SEQ ID NO: 138039 - DNA, 25 bp, SARS Virus
tcaaggagaggaacctaccgtgtat

SEQ ID NO: 138040 - DNA, 25 bp, SARS Virus
caaggagaggacactaccgtgtatg

SEQ ID NO: 138041 - DNA, 25 bp, SARS Virus
aaggagaggaccataccgtgtatgc

SEQ ID NO: 138042 - DNA, 25 bp, SARS Virus
aggagaggacccaaccgtgtatgca

SEQ ID NO: 138043 - DNA, 25 bp, SARS Virus
ggagaggaccctaccgtgtatgcac

SEQ ID NO: 138044 - DNA, 25 bp, SARS Virus
gagaggaccctaacgtgtatgcact

SEQ ID NO: 138045 - DNA, 25 bp, SARS Virus
agaggaccctacagtgtatgcactg

SEQ ID NO: 138046 - DNA, 25 bp, SARS Virus
gaggaccctaccatgtatgcactgt

SEQ ID NO: 138047 - DNA, 25 bp, SARS Virus
aggaccctaccgagtatgcactgta

SEQ ID NO: 138048 - DNA, 25 bp, SARS Virus
ggaccctaccgtatatgcactgtac

SEQ ID NO: 138049 - DNA, 25 bp, SARS Virus
gaccctaccgtgaatgcactgtaca

SEQ ID NO: 138050 - DNA, 25 bp, SARS Virus
accctaccgtgtatgcactgtacat

SEQ ID NO: 138051 - DNA, 25 bp, SARS Virus
ccctaccgtgtaagcactgtacatc

SEQ ID NO: 138052 - DNA, 25 bp, SARS Virus
cctaccgtgtatacactgtacatcc

SEQ ID NO: 138053 - DNA, 25 bp, SARS Virus
ctaccgtgtatgaactgtacatcct

SEQ ID NO: 138054 - DNA, 25 bp, SARS Virus
taccgtgtatgcactgtacatcctt

SEQ ID NO: 138055 - DNA, 25 bp, SARS Virus
accgtgtatgcaatgtacatccttc

SEQ ID NO: 138056 - DNA, 25 bp, SARS Virus
ccgtgtatgcacagtacatccttct

SEQ ID NO: 138057 - DNA, 25 bp, SARS Virus
cgtgtatgcactatacatccttctg

SEQ ID NO: 138058 - DNA, 25 bp, SARS Virus
gtgtatgcactgaacatccttctgt

SEQ ID NO: 138059 - DNA, 25 bp, SARS Virus
tgtatgcactgtacatccttctgtt

SEQ ID NO: 138060 - DNA, 25 bp, SARS Virus
gtatgcactgtaaatccttctgttg

SEQ ID NO: 138061 - DNA, 25 bp, SARS Virus
tatgcactgtacatccttctgttgt

SEQ ID NO: 138062 - DNA, 25 bp, SARS Virus
atgcactgtacaaccttctgttgtg

SEQ ID NO: 138063 - DNA, 25 bp, SARS Virus
tgcactgtacatacttctgttgtgg

SEQ ID NO: 138064 - DNA, 25 bp, SARS Virus
gcactgtacatcattctgttgtggt

SEQ ID NO: 138065 - DNA, 25 bp, SARS Virus
cactgtacatccatctgttgtggta

SEQ ID NO: 138066 - DNA, 25 bp, SARS Virus
actgtacatcctactgttgtggtac

SEQ ID NO: 138067 - DNA, 25 bp, SARS Virus
ctgtacatccttatgttgtggtacg

SEQ ID NO: 138068 - DNA, 25 bp, SARS Virus
tgtacatccttcagttgtggtacgc

SEQ ID NO: 138069 - DNA, 25 bp, SARS Virus
gtacatccttctattgtggtacgcc

SEQ ID NO: 138070 - DNA, 25 bp, SARS Virus
tacatccttctgatgtggtacgccc

SEQ ID NO: 138071 - DNA, 25 bp, SARS Virus
acatccttctgtagtggtacgcccc

SEQ ID NO: 138072 - DNA, 25 bp, SARS Virus
catccttctgttatggtacgccccg

SEQ ID NO: 138073 - DNA, 25 bp, SARS Virus
atccttctgttgaggtacgccccga

SEQ ID NO: 138074 - DNA, 25 bp, SARS Virus
tccttctgttgtagtacgccccgac

SEQ ID NO: 138075 - DNA, 25 bp, SARS Virus
ccttctgttgtgatacgccccgacg

SEQ ID NO: 138076 - DNA, 25 bp, SARS Virus
cttctgttgtggaacgccccgacga

SEQ ID NO: 138077 - DNA, 25 bp, SARS Virus
ttctgttgtggtacgccccgacgaa

SEQ ID NO: 138078 - DNA, 25 bp, SARS Virus
tctgttgtggtaagccccgacgaac

SEQ ID NO: 138079 - DNA, 25 bp, SARS Virus
ctgttgtggtacaccccgacgaaca

SEQ ID NO: 138080 - DNA, 25 bp, SARS Virus
tgttgtggtacgacccgacgaacac

SEQ ID NO: 138081 - DNA, 25 bp, SARS Virus
gttgtggtacgcaccgacgaacacc

SEQ ID NO: 138082 - DNA, 25 bp, SARS Virus
ttgtggtacgccacgacgaacaccc

SEQ ID NO: 138083 - DNA, 25 bp, SARS Virus
tgtggtacgcccagacgaacaccct

SEQ ID NO: 138084 - DNA, 25 bp, SARS Virus
gtggtacgccccaacgaacaccctt

SEQ ID NO: 138085 - DNA, 25 bp, SARS Virus
tggtacgccccgacgaacacccttc

SEQ ID NO: 138086 - DNA, 25 bp, SARS Virus
ggtacgccccgaagaacacccttcc

SEQ ID NO: 138087 - DNA, 25 bp, SARS Virus
gtacgccccgacaaacacccttcct

SEQ ID NO: 138088 - DNA, 25 bp, SARS Virus
tacgccccgacgaacacccttcctg

SEQ ID NO: 138089 - DNA, 25 bp, SARS Virus
acgccccgacgaacacccttcctgt

SEQ ID NO: 138090 - DNA, 25 bp, SARS Virus
cgccccgacgaaaacccttcctgta

SEQ ID NO: 138091 - DNA, 25 bp, SARS Virus
gccccgacgaacacccttcctgtat

SEQ ID NO: 138092 - DNA, 25 bp, SARS Virus
ccccgacgaacaaccttcctgtatt

SEQ ID NO: 138093 - DNA, 25 bp, SARS Virus
cccgacgaacacacttcctgtattc

SEQ ID NO: 138094 - DNA, 25 bp, SARS Virus
ccgacgaacaccattcctgtattcc

SEQ ID NO: 138095 - DNA, 25 bp, SARS Virus
cgacgaacacccatcctgtattcca

SEQ ID NO: 138096 - DNA, 25 bp, SARS Virus
gacgaacaccctacctgtattccac

SEQ ID NO: 138097 - DNA, 25 bp, SARS Virus
acgaacacccttactgtattccacc

SEQ ID NO: 138098 - DNA, 25 bp, SARS Virus
cgaacacccttcatgtattccacca

SEQ ID NO: 138099 - DNA, 25 bp, SARS Virus
gaacacccttccagtattccaccat

SEQ ID NO: 138100 - DNA, 25 bp, SARS Virus
aacacccttcctatattccaccatc

SEQ ID NO: 138101 - DNA, 25 bp, SARS Virus
acacccttcctgaattccaccatcg

SEQ ID NO: 138102 - DNA, 25 bp, SARS Virus
cacccttcctgtattccaccatcgg

SEQ ID NO: 138103 - DNA, 25 bp, SARS Virus
acccttcctgtaatccaccatcggg

SEQ ID NO: 138104 - DNA, 25 bp, SARS Virus
cccttcctgtataccaccatcggga

SEQ ID NO: 138105 - DNA, 25 bp, SARS Virus
ccttcctgtattacaccatcgggaa

SEQ ID NO: 138106 - DNA, 25 bp, SARS Virus
cttcctgtattcaaccatcgggaaa

SEQ ID NO: 138107 - DNA, 25 bp, SARS Virus
ttcctgtattccaccatcgggaaag

SEQ ID NO: 138108 - DNA, 25 bp, SARS Virus
tcctgtattccaacatcgggaaagg

SEQ ID NO: 138109 - DNA, 25 bp, SARS Virus
cctgtattccacaatcgggaaaggt

SEQ ID NO: 138110 - DNA, 25 bp, SARS Virus
ctgtattccaccatcgggaaaggtg

SEQ ID NO: 138111 - DNA, 25 bp, SARS Virus
tgtattccaccaacgggaaaggtgt

SEQ ID NO: 138112 - DNA, 25 bp, SARS Virus
gtattccaccatagggaaaggtgtt

SEQ ID NO: 138113 - DNA, 25 bp, SARS Virus
tattccaccatcaggaaaggtgttt

SEQ ID NO: 138114 - DNA, 25 bp, SARS Virus
attccaccatcgagaaaggtgtttt

SEQ ID NO: 138115 - DNA, 25 bp, SARS Virus
ttccaccatcggaaaaggtgttttc

SEQ ID NO: 138116 - DNA, 25 bp, SARS Virus
tccaccatcgggaaaggtgttttca

SEQ ID NO: 138117 - DNA, 25 bp, SARS Virus
ccaccatcgggaaaggtgttttcag

SEQ ID NO: 138118 - DNA, 25 bp, SARS Virus
caccatcgggaaaggtgttttcagt

SEQ ID NO: 138119 - DNA, 25 bp, SARS Virus
accatcgggaaaagtgttttcagtt

SEQ ID NO: 138120 - DNA, 25 bp, SARS Virus
ccatcgggaaagatgttttcagttg

SEQ ID NO: 138121 - DNA, 25 bp, SARS Virus
catcgggaaaggagttttcagttga

SEQ ID NO: 138122 - DNA, 25 bp, SARS Virus
atcgggaaaggtattttcagttgag

SEQ ID NO: 138123 - DNA, 25 bp, SARS Virus
tcgggaaaggtgatttcagttgaga

SEQ ID NO: 138124 - DNA, 25 bp, SARS Virus
cgggaaaggtgtattcagttgagaa

SEQ ID NO: 138125 - DNA, 25 bp, SARS Virus
gggaaaggtgttatcagttgagaaa

SEQ ID NO: 138126 - DNA, 25 bp, SARS Virus
ggaaaggtgtttacagttgagaaaa

SEQ ID NO: 138127 - DNA, 25 bp, SARS Virus
gaaaggtgttttaagttgagaaaaa

SEQ ID NO: 138128 - DNA, 25 bp, SARS Virus
aaaggtgttttcagttgagaaaaac

SEQ ID NO: 138129 - DNA, 25 bp, SARS Virus
aaggtgttttcaattgagaaaaact

SEQ ID NO: 138130 - DNA, 25 bp, SARS Virus
aggtgttttcagatgagaaaaacta

SEQ ID NO: 138131 - DNA, 25 bp, SARS Virus
ggtgttttcagtagagaaaaactaa

SEQ ID NO: 138132 - DNA, 25 bp, SARS Virus
gtgttttcagttaagaaaaactaac

SEQ ID NO: 138133 - DNA, 25 bp, SARS Virus
tgttttcagttgagaaaaactaaca

SEQ ID NO: 138134 - DNA, 25 bp, SARS Virus
gttttcagttgaaaaaaactaacag

SEQ ID NO: 138135 - DNA, 25 bp, SARS Virus
ttttcagttgagaaaaactaacagg

SEQ ID NO: 138136 - DNA, 25 bp, SARS Virus
tttcagttgagaaaaactaacaggt

SEQ ID NO: 138137 - DNA, 25 bp, SARS Virus
aagggttaagaacttccagttactc

SEQ ID NO: 138138 - DNA, 25 bp, SARS Virus
agggttaagaacctccagttactca

SEQ ID NO: 138139 - DNA, 25 bp, SARS Virus
gggttaagaactcccagttactcac

SEQ ID NO: 138140 - DNA, 25 bp, SARS Virus
ggttaagaacttccagttactcact

SEQ ID NO: 138141 - DNA, 25 bp, SARS Virus
gttaagaacttccagttactcacta

SEQ ID NO: 138142 - DNA, 25 bp, SARS Virus
ttaagaacttcccgttactcactaa

SEQ ID NO: 138143 - DNA, 25 bp, SARS Virus
taagaacttccacttactcactaag

SEQ ID NO: 138144 - DNA, 25 bp, SARS Virus
aagaacttccagctactcactaagt

SEQ ID NO: 138145 - DNA, 25 bp, SARS Virus
agaacttccagtcactcactaagta

SEQ ID NO: 138146 - DNA, 25 bp, SARS Virus
gaacttccagttcctcactaagtaa

SEQ ID NO: 138147 - DNA, 25 bp, SARS Virus
aacttccagttactcactaagtaaa

SEQ ID NO: 138148 - DNA, 25 bp, SARS Virus
acttccagttacccactaagtaaat

SEQ ID NO: 138149 - DNA, 25 bp, SARS Virus
cttccagttactcactaagtaaatt

SEQ ID NO: 138150 - DNA, 25 bp, SARS Virus
ttccagttactccctaagtaaattt

SEQ ID NO: 138151 - DNA, 25 bp, SARS Virus
tccagttactcactaagtaaattta

SEQ ID NO: 138152 - DNA, 25 bp, SARS Virus
ccagttactcaccaagtaaatttaa

SEQ ID NO: 138153 - DNA, 25 bp, SARS Virus
cagttactcactcagtaaatttaaa

SEQ ID NO: 138154 - DNA, 25 bp, SARS Virus
agttactcactacgtaaatttaaaa

SEQ ID NO: 138155 - DNA, 25 bp, SARS Virus
gttactcactaactaaatttaaaaa

SEQ ID NO: 138156 - DNA, 25 bp, SARS Virus
ttactcactaagcaaatttaaaaat

SEQ ID NO: 138157 - DNA, 25 bp, SARS Virus
tactcactaagtcaatttaaaaatc

SEQ ID NO: 138158 - DNA, 25 bp, SARS Virus
actcactaagtacatttaaaaatcg

SEQ ID NO: 138159 - DNA, 25 bp, SARS Virus
ctcactaagtaactttaaaaatcgc

SEQ ID NO: 138160 - DNA, 25 bp, SARS Virus
tcactaagtaaacttaaaaatcgct

SEQ ID NO: 138161 - DNA, 25 bp, SARS Virus
cactaagtaaatctaaaaatcgctg

SEQ ID NO: 138162 - DNA, 25 bp, SARS Virus
actaagtaaattcaaaaatcgctgg

SEQ ID NO: 138163 - DNA, 25 bp, SARS Virus
ctaagtaaatttcaaaatcgctgga

SEQ ID NO: 138164 - DNA, 25 bp, SARS Virus
taagtaaatttacaaatcgctggag

SEQ ID NO: 138165 - DNA, 25 bp, SARS Virus
aagtaaatttaacaatcgctggagt

SEQ ID NO: 138166 - DNA, 25 bp, SARS Virus
agtaaatttaaacatcgctggagta

SEQ ID NO: 138167 - DNA, 25 bp, SARS Virus
gtaaatttaaaactcgctggagtaa

SEQ ID NO: 138168 - DNA, 25 bp, SARS Virus
taaatttaaaaaccgctggagtaac

SEQ ID NO: 138169 - DNA, 25 bp, SARS Virus
aaatttaaaaatcgctggagtaact

SEQ ID NO: 138170 - DNA, 25 bp, SARS Virus
aatttaaaaatccctggagtaactc

SEQ ID NO: 138171 - DNA, 25 bp, SARS Virus
atttaaaaatcgctggagtaactcc

SEQ ID NO: 138172 - DNA, 25 bp, SARS Virus
tttaaaaatcgccggagtaactccg

SEQ ID NO: 138173 - DNA, 25 bp, SARS Virus
ttaaaaatcgctcgagtaactccgc

SEQ ID NO: 138174 - DNA, 25 bp, SARS Virus
taaaaatcgctgcagtaactccgcc

SEQ ID NO: 138175 - DNA, 25 bp, SARS Virus
aaaaatcgctggcgtaactccgcca

SEQ ID NO: 138176 - DNA, 25 bp, SARS Virus
aaaatcgctggactaactccgccag

SEQ ID NO: 138177 - DNA, 25 bp, SARS Virus
aaatcgctggagcaactccgccagt

SEQ ID NO: 138178 - DNA, 25 bp, SARS Virus
aatcgctggagtcactccgccagtt

SEQ ID NO: 138179 - DNA, 25 bp, SARS Virus
atcgctggagtacctccgccagtta

SEQ ID NO: 138180 - DNA, 25 bp, SARS Virus
tcgctggagtaactccgccagttaa

SEQ ID NO: 138181 - DNA, 25 bp, SARS Virus
cgctggagtaaccccgccagttaaa

SEQ ID NO: 138182 - DNA, 25 bp, SARS Virus
gctggagtaactccgccagttaaag

SEQ ID NO: 138183 - DNA, 25 bp, SARS Virus
ctggagtaactccgccagttaaaga

SEQ ID NO: 138184 - DNA, 25 bp, SARS Virus
tggagtaactcccccagttaaagaa

SEQ ID NO: 138185 - DNA, 25 bp, SARS Virus
ggagtaactccgccagttaaagaaa

SEQ ID NO: 138186 - DNA, 25 bp, SARS Virus
gagtaactccgccagttaaagaaaa

SEQ ID NO: 138187 - DNA, 25 bp, SARS Virus
agtaactccgcccgttaaagaaaaa

SEQ ID NO: 138188 - DNA, 25 bp, SARS Virus
gtaactccgccacttaaagaaaaac

SEQ ID NO: 138189 - DNA, 25 bp, SARS Virus
taactccgccagctaaagaaaaact

SEQ ID NO: 138190 - DNA, 25 bp, SARS Virus
aactccgccagtcaaagaaaaactt

SEQ ID NO: 138191 - DNA, 25 bp, SARS Virus
actccgccagttcaagaaaaactta

SEQ ID NO: 138192 - DNA, 25 bp, SARS Virus
ctccgccagttacagaaaaacttac

SEQ ID NO: 138193 - DNA, 25 bp, SARS Virus
tccgccagttaacgaaaaacttaca

SEQ ID NO: 138194 - DNA, 25 bp, SARS Virus
ccgccagttaaacaaaaacttacaa

SEQ ID NO: 138195 - DNA, 25 bp, SARS Virus
cgccagttaaagcaaaacttacaac

SEQ ID NO: 138196 - DNA, 25 bp, SARS Virus
gccagttaaagacaaacttacaact

SEQ ID NO: 138197 - DNA, 25 bp, SARS Virus
ccagttaaagaacaacttacaactg

SEQ ID NO: 138198 - DNA, 25 bp, SARS Virus
cagttaaagaaacacttacaactgc

SEQ ID NO: 138199 - DNA, 25 bp, SARS Virus
agttaaagaaaaccttacaactgct

SEQ ID NO: 138200 - DNA, 25 bp, SARS Virus
gttaaagaaaaacttacaactgctg

SEQ ID NO: 138201 - DNA, 25 bp, SARS Virus
ttaaagaaaaacctacaactgctgt

SEQ ID NO: 138202 - DNA, 25 bp, SARS Virus
taaagaaaaactcacaactgctgtc

SEQ ID NO: 138203 - DNA, 25 bp, SARS Virus
aaagaaaaacttccaactgctgtct

SEQ ID NO: 138204 - DNA, 25 bp, SARS Virus
aagaaaaacttacaactgctgtctt

SEQ ID NO: 138205 - DNA, 25 bp, SARS Virus
agaaaaacttaccactgctgtcttc

SEQ ID NO: 138206 - DNA, 25 bp, SARS Virus
gaaaaacttacacctgctgtcttcg

SEQ ID NO: 138207 - DNA, 25 bp, SARS Virus
aaaaacttacaactgctgtcttcgc

SEQ ID NO: 138208 - DNA, 25 bp, SARS Virus
aaaacttacaaccgctgtcttcgca

SEQ ID NO: 138209 - DNA, 25 bp, SARS Virus
aaacttacaactcctgtcttcgcaa

SEQ ID NO: 138210 - DNA, 25 bp, SARS Virus
aacttacaactgctgtcttcgcaat

SEQ ID NO: 138211 - DNA, 25 bp, SARS Virus
acttacaactgccgtcttcgcaatt

SEQ ID NO: 138212 - DNA, 25 bp, SARS Virus
cttacaactgctctcttcgcaatta

SEQ ID NO: 138213 - DNA, 25 bp, SARS Virus
ttacaactgctgccttcgcaattac

SEQ ID NO: 138214 - DNA, 25 bp, SARS Virus
tacaactgctgtcttcgcaattacg

SEQ ID NO: 138215 - DNA, 25 bp, SARS Virus
acaactgctgtcctcgcaattacgg

SEQ ID NO: 138216 - DNA, 25 bp, SARS Virus
caactgctgtctccgcaattacgga

SEQ ID NO: 138217 - DNA, 25 bp, SARS Virus
aactgctgtcttcgcaattacggac

SEQ ID NO: 138218 - DNA, 25 bp, SARS Virus
actgctgtcttcccaattacggact

SEQ ID NO: 138219 - DNA, 25 bp, SARS Virus
ctgctgtcttcgcaattacggactt

SEQ ID NO: 138220 - DNA, 25 bp, SARS Virus
tgctgtcttcgccattacggacttt

SEQ ID NO: 138221 - DNA, 25 bp, SARS Virus
gctgtcttcgcacttacggacttta

SEQ ID NO: 138222 - DNA, 25 bp, SARS Virus
ctgtcttcgcaactacggactttac

SEQ ID NO: 138223 - DNA, 25 bp, SARS Virus
tgtcttcgcaatcacggactttaca

SEQ ID NO: 138224 - DNA, 25 bp, SARS Virus
gtcttcgcaattccggactttacag

SEQ ID NO: 138225 - DNA, 25 bp, SARS Virus
tcttcgcaattacggactttacagc

SEQ ID NO: 138226 - DNA, 25 bp, SARS Virus
cttcgcaattaccgactttacagcg

SEQ ID NO: 138227 - DNA, 25 bp, SARS Virus
ttcgcaattacgcactttacagcgg

SEQ ID NO: 138228 - DNA, 25 bp, SARS Virus
tcgcaattacggcctttacagcggt

SEQ ID NO: 138229 - DNA, 25 bp, SARS Virus
cgcaattacggactttacagcggtt

SEQ ID NO: 138230 - DNA, 25 bp, SARS Virus
gcaattacggaccttacagcggttc

SEQ ID NO: 138231 - DNA, 25 bp, SARS Virus
caattacggactctacagcggttct

SEQ ID NO: 138232 - DNA, 25 bp, SARS Virus
aattacggacttcacagcggttcta

SEQ ID NO: 138233 - DNA, 25 bp, SARS Virus
attacggactttccagcggttctag

SEQ ID NO: 138234 - DNA, 25 bp, SARS Virus
ttacggactttacagcggttctagt

SEQ ID NO: 138235 - DNA, 25 bp, SARS Virus
tacggactttaccgcggttctagtt

SEQ ID NO: 138236 - DNA, 25 bp, SARS Virus
acggactttacaccggttctagttg

SEQ ID NO: 138237 - DNA, 25 bp, SARS Virus
cggactttacagcggttctagttgt

SEQ ID NO: 138238 - DNA, 25 bp, SARS Virus
ggactttacagccgttctagttgta

SEQ ID NO: 138239 - DNA, 25 bp, SARS Virus
gactttacagcgcttctagttgtag

SEQ ID NO: 138240 - DNA, 25 bp, SARS Virus
actttacagcggctctagttgtaga

SEQ ID NO: 138241 - DNA, 25 bp, SARS Virus
ctttacagcggtcctagttgtagac

SEQ ID NO: 138242 - DNA, 25 bp, SARS Virus
tttacagcggttctagttgtagacc

SEQ ID NO: 138243 - DNA, 25 bp, SARS Virus
ttacagcggttccagttgtagacca

SEQ ID NO: 138244 - DNA, 25 bp, SARS Virus
tacagcggttctcgttgtagaccac

SEQ ID NO: 138245 - DNA, 25 bp, SARS Virus
acagcggttctacttgtagaccact

SEQ ID NO: 138246 - DNA, 25 bp, SARS Virus
cagcggttctagctgtagaccacta

SEQ ID NO: 138247 - DNA, 25 bp, SARS Virus
agcggttctagtcgtagaccactac

SEQ ID NO: 138248 - DNA, 25 bp, SARS Virus
gcggttctagttctagaccactaca

SEQ ID NO: 138249 - DNA, 25 bp, SARS Virus
cggttctagttgcagaccactacat

SEQ ID NO: 138250 - DNA, 25 bp, SARS Virus
ggttctagttgtcgaccactacata

SEQ ID NO: 138251 - DNA, 25 bp, SARS Virus
gttctagttgtacaccactacatac

SEQ ID NO: 138252 - DNA, 25 bp, SARS Virus
ttctagttgtagcccactacatact

SEQ ID NO: 138253 - DNA, 25 bp, SARS Virus
tctagttgtagaccactacatacta

SEQ ID NO: 138254 - DNA, 25 bp, SARS Virus
ctagttgtagaccactacatactaa

SEQ ID NO: 138255 - DNA, 25 bp, SARS Virus
tagttgtagacccctacatactaaa

SEQ ID NO: 138256 - DNA, 25 bp, SARS Virus
agttgtagaccactacatactaaaa

SEQ ID NO: 138257 - DNA, 25 bp, SARS Virus
gttgtagaccaccacatactaaaaa

SEQ ID NO: 138258 - DNA, 25 bp, SARS Virus
ttgtagaccactccatactaaaaac

SEQ ID NO: 138259 - DNA, 25 bp, SARS Virus
tgtagaccactacatactaaaaact

SEQ ID NO: 138260 - DNA, 25 bp, SARS Virus
gtagaccactacctactaaaaactt

SEQ ID NO: 138261 - DNA, 25 bp, SARS Virus
tagaccactacacactaaaaacttc

SEQ ID NO: 138262 - DNA, 25 bp, SARS Virus
agaccactacatcctaaaaacttca

SEQ ID NO: 138263 - DNA, 25 bp, SARS Virus
gaccactacatactaaaaacttcat

SEQ ID NO: 138264 - DNA, 25 bp, SARS Virus
accactacataccaaaaacttcatg

SEQ ID NO: 138265 - DNA, 25 bp, SARS Virus
ccactacatactcaaaacttcatga

SEQ ID NO: 138266 - DNA, 25 bp, SARS Virus
cactacatactacaaacttcatgaa

SEQ ID NO: 138267 - DNA, 25 bp, SARS Virus
actacatactaacaacttcatgaac

SEQ ID NO: 138268 - DNA, 25 bp, SARS Virus
ctacatactaaacacttcatgaaca

SEQ ID NO: 138269 - DNA, 25 bp, SARS Virus
tacatactaaaaccttcatgaacag

SEQ ID NO: 138270 - DNA, 25 bp, SARS Virus
acatactaaaaacttcatgaacagg

SEQ ID NO: 138271 - DNA, 25 bp, SARS Virus
catactaaaaacctcatgaacaggt

SEQ ID NO: 138272 - DNA, 25 bp, SARS Virus
atactaaaaactccatgaacaggtc

SEQ ID NO: 138273 - DNA, 25 bp, SARS Virus
tactaaaaacttcatgaacaggtcg

SEQ ID NO: 138274 - DNA, 25 bp, SARS Virus
actaaaaacttcctgaacaggtcga

SEQ ID NO: 138275 - DNA, 25 bp, SARS Virus
ctaaaaacttcacgaacaggtcgag

SEQ ID NO: 138276 - DNA, 25 bp, SARS Virus
taaaaacttcatcaacaggtcgaga

SEQ ID NO: 138277 - DNA, 25 bp, SARS Virus
aaaaacttcatgcacaggtcgagaa

SEQ ID NO: 138278 - DNA, 25 bp, SARS Virus
aaaacttcatgaccaggtcgagaag

SEQ ID NO: 138279 - DNA, 25 bp, SARS Virus
aaacttcatgaacaggtcgagaaga

SEQ ID NO: 138280 - DNA, 25 bp, SARS Virus
aacttcatgaaccggtcgagaagaa

SEQ ID NO: 138281 - DNA, 25 bp, SARS Virus
acttcatgaacacgtcgagaagaaa

SEQ ID NO: 138282 - DNA, 25 bp, SARS Virus
cttcatgaacagctcgagaagaaac

SEQ ID NO: 138283 - DNA, 25 bp, SARS Virus
ttcatgaacaggccgagaagaaact

SEQ ID NO: 138284 - DNA, 25 bp, SARS Virus
tcatgaacaggtcgagaagaaactt

SEQ ID NO: 138285 - DNA, 25 bp, SARS Virus
catgaacaggtccagaagaaactta

SEQ ID NO: 138286 - DNA, 25 bp, SARS Virus
atgaacaggtcgcgaagaaacttac

SEQ ID NO: 138287 - DNA, 25 bp, SARS Virus
tgaacaggtcgacaagaaacttact

SEQ ID NO: 138288 - DNA, 25 bp, SARS Virus
gaacaggtcgagcagaaacttactc

SEQ ID NO: 138289 - DNA, 25 bp, SARS Virus
aacaggtcgagacgaaacttactca

SEQ ID NO: 138290 - DNA, 25 bp, SARS Virus
acaggtcgagaacaaacttactcag

SEQ ID NO: 138291 - DNA, 25 bp, SARS Virus
caggtcgagaagcaacttactcagt

SEQ ID NO: 138292 - DNA, 25 bp, SARS Virus
aggtcgagaagacacttactcagtt

SEQ ID NO: 138293 - DNA, 25 bp, SARS Virus
ggtcgagaagaaccttactcagttc

SEQ ID NO: 138294 - DNA, 25 bp, SARS Virus
gtcgagaagaaacttactcagttcg

SEQ ID NO: 138295 - DNA, 25 bp, SARS Virus
tcgagaagaaacctactcagttcga

SEQ ID NO: 138296 - DNA, 25 bp, SARS Virus
cgagaagaaactcactcagttcgag

SEQ ID NO: 138297 - DNA, 25 bp, SARS Virus
gagaagaaacttcctcagttcgagt

SEQ ID NO: 138298 - DNA, 25 bp, SARS Virus
agaagaaacttactcagttcgagtc

SEQ ID NO: 138299 - DNA, 25 bp, SARS Virus
gaagaaacttacccagttcgagtcc

SEQ ID NO: 138300 - DNA, 25 bp, SARS Virus
aagaaacttactcagttcgagtcca

SEQ ID NO: 138301 - DNA, 25 bp, SARS Virus
agaaacttactccgttcgagtccaa

SEQ ID NO: 138302 - DNA, 25 bp, SARS Virus
gaaacttactcacttcgagtccaac

SEQ ID NO: 138303 - DNA, 25 bp, SARS Virus
aaacttactcagctcgagtccaacg

SEQ ID NO: 138304 - DNA, 25 bp, SARS Virus
aacttactcagtccgagtccaacgt

SEQ ID NO: 138305 - DNA, 25 bp, SARS Virus
acttactcagttcgagtccaacgtc

SEQ ID NO: 138306 - DNA, 25 bp, SARS Virus
cttactcagttccagtccaacgtct

SEQ ID NO: 138307 - DNA, 25 bp, SARS Virus
ttactcagttcgcgtccaacgtctc

SEQ ID NO: 138308 - DNA, 25 bp, SARS Virus
tactcagttcgactccaacgtctcc

SEQ ID NO: 138309 - DNA, 25 bp, SARS Virus
actcagttcgagcccaacgtctcct

SEQ ID NO: 138310 - DNA, 25 bp, SARS Virus
ctcagttcgagtccaacgtctccta

SEQ ID NO: 138311 - DNA, 25 bp, SARS Virus
tcagttcgagtccaacgtctcctag

SEQ ID NO: 138312 - DNA, 25 bp, SARS Virus
cagttcgagtcccacgtctcctagt

SEQ ID NO: 138313 - DNA, 25 bp, SARS Virus
agttcgagtccaccgtctcctagta

SEQ ID NO: 138314 - DNA, 25 bp, SARS Virus
gttcgagtccaacgtctcctagtat

SEQ ID NO: 138315 - DNA, 25 bp, SARS Virus
ttcgagtccaacctctcctagtatt

SEQ ID NO: 138316 - DNA, 25 bp, SARS Virus
tcgagtccaacgcctcctagtattt

SEQ ID NO: 138317 - DNA, 25 bp, SARS Virus
cgagtccaacgtctcctagtatttg

SEQ ID NO: 138318 - DNA, 25 bp, SARS Virus
gagtccaacgtcccctagtatttga

SEQ ID NO: 138319 - DNA, 25 bp, SARS Virus
agtccaacgtctcctagtatttgac

SEQ ID NO: 138320 - DNA, 25 bp, SARS Virus
gtccaacgtctcctagtatttgaca

SEQ ID NO: 138321 - DNA, 25 bp, SARS Virus
tccaacgtctcccagtatttgacac

SEQ ID NO: 138322 - DNA, 25 bp, SARS Virus
ccaacgtctcctcgtatttgacaca

SEQ ID NO: 138323 - DNA, 25 bp, SARS Virus
caacgtctcctactatttgacacaa

SEQ ID NO: 138324 - DNA, 25 bp, SARS Virus
aacgtctcctagcatttgacacaac

SEQ ID NO: 138325 - DNA, 25 bp, SARS Virus
acgtctcctagtctttgacacaaca

SEQ ID NO: 138326 - DNA, 25 bp, SARS Virus
cgtctcctagtacttgacacaacaa

SEQ ID NO: 138327 - DNA, 25 bp, SARS Virus
gtctcctagtatctgacacaacaat

SEQ ID NO: 138328 - DNA, 25 bp, SARS Virus
tctcctagtattcgacacaacaatt

SEQ ID NO: 138329 - DNA, 25 bp, SARS Virus
ctcctagtatttcacacaacaatta

SEQ ID NO: 138330 - DNA, 25 bp, SARS Virus
tcctagtatttgccacaacaattac

SEQ ID NO: 138331 - DNA, 25 bp, SARS Virus
cctagtatttgacacaacaattact

SEQ ID NO: 138332 - DNA, 25 bp, SARS Virus
ctagtatttgacccaacaattacta

SEQ ID NO: 138333 - DNA, 25 bp, SARS Virus
tagtatttgacacaacaattactac

SEQ ID NO: 138334 - DNA, 25 bp, SARS Virus
agtatttgacaccacaattactacg

SEQ ID NO: 138335 - DNA, 25 bp, SARS Virus
gtatttgacacaccaattactacgg

SEQ ID NO: 138336 - DNA, 25 bp, SARS Virus
tatttgacacaacaattactacggt

SEQ ID NO: 138337 - DNA, 25 bp, SARS Virus
atttgacacaaccattactacggtt

SEQ ID NO: 138338 - DNA, 25 bp, SARS Virus
tttgacacaacacttactacggtta

SEQ ID NO: 138339 - DNA, 25 bp, SARS Virus
ttgacacaacaactactacggttat

SEQ ID NO: 138340 - DNA, 25 bp, SARS Virus
tgacacaacaatcactacggttatt

SEQ ID NO: 138341 - DNA, 25 bp, SARS Virus
gacacaacaattcctacggttattg

SEQ ID NO: 138342 - DNA, 25 bp, SARS Virus
acacaacaattactacggttattgc

SEQ ID NO: 138343 - DNA, 25 bp, SARS Virus
cacaacaattaccacggttattgct

SEQ ID NO: 138344 - DNA, 25 bp, SARS Virus
acaacaattactccggttattgctg

SEQ ID NO: 138345 - DNA, 25 bp, SARS Virus
caacaattactacggttattgctgt

SEQ ID NO: 138346 - DNA, 25 bp, SARS Virus
aacaattactaccgttattgctgta

SEQ ID NO: 138347 - DNA, 25 bp, SARS Virus
acaattactacgcttattgctgtag

SEQ ID NO: 138348 - DNA, 25 bp, SARS Virus
caattactacggctattgctgtagt

SEQ ID NO: 138349 - DNA, 25 bp, SARS Virus
aattactacggtcattgctgtagtg

SEQ ID NO: 138350 - DNA, 25 bp, SARS Virus
attactacggttcttgctgtagtgt

SEQ ID NO: 138351 - DNA, 25 bp, SARS Virus
ttactacggttactgctgtagtgtt

SEQ ID NO: 138352 - DNA, 25 bp, SARS Virus
tactacggttatcgctgtagtgtta

SEQ ID NO: 138353 - DNA, 25 bp, SARS Virus
actacggttattcctgtagtgttaa

SEQ ID NO: 138354 - DNA, 25 bp, SARS Virus
ctacggttattgctgtagtgttaaa

SEQ ID NO: 138355 - DNA, 25 bp, SARS Virus
tacggttattgccgtagtgttaaag

SEQ ID NO: 138356 - DNA, 25 bp, SARS Virus
acggttattgctctagtgttaaagg

SEQ ID NO: 138357 - DNA, 25 bp, SARS Virus
cggttattgctgcagtgttaaagga

SEQ ID NO: 138358 - DNA, 25 bp, SARS Virus
ggttattgctgtcgtgttaaaggac

SEQ ID NO: 138359 - DNA, 25 bp, SARS Virus
gttattgctgtactgttaaaggact

SEQ ID NO: 138360 - DNA, 25 bp, SARS Virus
ttattgctgtagcgttaaaggactc

SEQ ID NO: 138361 - DNA, 25 bp, SARS Virus
tattgctgtagtcttaaaggactct

SEQ ID NO: 138362 - DNA, 25 bp, SARS Virus
attgctgtagtgctaaaggactctg

SEQ ID NO: 138363 - DNA, 25 bp, SARS Virus
ttgctgtagtgtcaaaggactctgt

SEQ ID NO: 138364 - DNA, 25 bp, SARS Virus
tgctgtagtgttcaaggactctgtt

SEQ ID NO: 138365 - DNA, 25 bp, SARS Virus
gctgtagtgttacaggactctgttt

SEQ ID NO: 138366 - DNA, 25 bp, SARS Virus
ctgtagtgttaacggactctgttta

SEQ ID NO: 138367 - DNA, 25 bp, SARS Virus
tgtagtgttaaacgactctgtttac

SEQ ID NO: 138368 - DNA, 25 bp, SARS Virus
gtagtgttaaagcactctgtttaca

SEQ ID NO: 138369 - DNA, 25 bp, SARS Virus
tagtgttaaaggcctctgtttacat

SEQ ID NO: 138370 - DNA, 25 bp, SARS Virus
agtgttaaaggactctgtttacata

SEQ ID NO: 138371 - DNA, 25 bp, SARS Virus
gtgttaaaggaccctgtttacataa

SEQ ID NO: 138372 - DNA, 25 bp, SARS Virus
tgttaaaggactctgtttacataac

SEQ ID NO: 138373 - DNA, 25 bp, SARS Virus
gttaaaggactccgtttacataaca

SEQ ID NO: 138374 - DNA, 25 bp, SARS Virus
ttaaaggactctctttacataacag

SEQ ID NO: 138375 - DNA, 25 bp, SARS Virus
taaaggactctgcttacataacaga

SEQ ID NO: 138376 - DNA, 25 bp, SARS Virus
aaaggactctgtctacataacagac

SEQ ID NO: 138377 - DNA, 25 bp, SARS Virus
aaggactctgttcacataacagaca

SEQ ID NO: 138378 - DNA, 25 bp, SARS Virus
aggactctgtttccataacagacat

SEQ ID NO: 138379 - DNA, 25 bp, SARS Virus
ggactctgtttacataacagacatc

SEQ ID NO: 138380 - DNA, 25 bp, SARS Virus
gactctgtttacctaacagacatca

SEQ ID NO: 138381 - DNA, 25 bp, SARS Virus
actctgtttacacaacagacatcat

SEQ ID NO: 138382 - DNA, 25 bp, SARS Virus
ctctgtttacatcacagacatcatt

SEQ ID NO: 138383 - DNA, 25 bp, SARS Virus
tctgtttacataccagacatcatta

SEQ ID NO: 138384 - DNA, 25 bp, SARS Virus
ctgtttacataacagacatcattaa

SEQ ID NO: 138385 - DNA, 25 bp, SARS Virus
tgtttacataaccgacatcattaat

SEQ ID NO: 138386 - DNA, 25 bp, SARS Virus
gtttacataacacacatcattaata

SEQ ID NO: 138387 - DNA, 25 bp, SARS Virus
tttacataacagccatcattaataa

SEQ ID NO: 138388 - DNA, 25 bp, SARS Virus
ttacataacagacatcattaataaa

SEQ ID NO: 138389 - DNA, 25 bp, SARS Virus
tacataacagacctcattaataaac

SEQ ID NO: 138390 - DNA, 25 bp, SARS Virus
acataacagacaccattaataaaca

SEQ ID NO: 138391 - DNA, 25 bp, SARS Virus
cataacagacatcattaataaacac

SEQ ID NO: 138392 - DNA, 25 bp, SARS Virus
ataacagacatccttaataaacacc

SEQ ID NO: 138393 - DNA, 25 bp, SARS Virus
taacagacatcactaataaacacct

SEQ ID NO: 138394 - DNA, 25 bp, SARS Virus
aacagacatcatcaataaacacctc

SEQ ID NO: 138395 - DNA, 25 bp, SARS Virus
acagacatcattcataaacacctct

SEQ ID NO: 138396 - DNA, 25 bp, SARS Virus
cagacatcattactaaacacctctt

SEQ ID NO: 138397 - DNA, 25 bp, SARS Virus
agacatcattaacaaacacctcttt

SEQ ID NO: 138398 - DNA, 25 bp, SARS Virus
gacatcattaatcaacacctctttt

SEQ ID NO: 138399 - DNA, 25 bp, SARS Virus
acatcattaatacacacctcttttc

SEQ ID NO: 138400 - DNA, 25 bp, SARS Virus
catcattaataaccacctcttttct

SEQ ID NO: 138401 - DNA, 25 bp, SARS Virus
atcattaataaacacctcttttctt

SEQ ID NO: 138402 - DNA, 25 bp, SARS Virus
tcattaataaacccctcttttcttc

SEQ ID NO: 138403 - DNA, 25 bp, SARS Virus
cattaataaacacctcttttcttca

SEQ ID NO: 138404 - DNA, 25 bp, SARS Virus
attaataaacacctcttttcttcaa

SEQ ID NO: 138405 - DNA, 25 bp, SARS Virus
ttaataaacaccccttttcttcaag

SEQ ID NO: 138406 - DNA, 25 bp, SARS Virus
taataaacacctcttttcttcaagg

SEQ ID NO: 138407 - DNA, 25 bp, SARS Virus
aataaacacctcctttcttcaagga

SEQ ID NO: 138408 - DNA, 25 bp, SARS Virus
ataaacacctctcttcttcaaggag

SEQ ID NO: 138409 - DNA, 25 bp, SARS Virus
taaacacctcttctcttcaaggaga

SEQ ID NO: 138410 - DNA, 25 bp, SARS Virus
aaacacctctttccttcaaggagac

SEQ ID NO: 138411 - DNA, 25 bp, SARS Virus
aacacctcttttcttcaaggagaca

SEQ ID NO: 138412 - DNA, 25 bp, SARS Virus
acacctcttttcctcaaggagacac

SEQ ID NO: 138413 - DNA, 25 bp, SARS Virus
cacctcttttctccaaggagacaca

SEQ ID NO: 138414 - DNA, 25 bp, SARS Virus
acctcttttcttcaaggagacacat

SEQ ID NO: 138415 - DNA, 25 bp, SARS Virus
cctcttttcttccaggagacacatt

SEQ ID NO: 138416 - DNA, 25 bp, SARS Virus
ctcttttcttcacggagacacatta

SEQ ID NO: 138417 - DNA, 25 bp, SARS Virus
tcttttcttcaacgagacacattat

SEQ ID NO: 138418 - DNA, 25 bp, SARS Virus
cttttcttcaagcagacacattatt

SEQ ID NO: 138419 - DNA, 25 bp, SARS Virus
ttttcttcaaggcgacacattattt

SEQ ID NO: 138420 - DNA, 25 bp, SARS Virus
tttcttcaaggacacacattatttg

SEQ ID NO: 138421 - DNA, 25 bp, SARS Virus
ttcttcaaggagccacattatttgg

SEQ ID NO: 138422 - DNA, 25 bp, SARS Virus
tcttcaaggagacacattatttggt

SEQ ID NO: 138423 - DNA, 25 bp, SARS Virus
cttcaaggagacccattatttggtt

SEQ ID NO: 138424 - DNA, 25 bp, SARS Virus
ttcaaggagacacattatttggttc

SEQ ID NO: 138425 - DNA, 25 bp, SARS Virus
tcaaggagacaccttatttggttct

SEQ ID NO: 138426 - DNA, 25 bp, SARS Virus
caaggagacacactatttggttctt

SEQ ID NO: 138427 - DNA, 25 bp, SARS Virus
aaggagacacatcatttggttcttc

SEQ ID NO: 138428 - DNA, 25 bp, SARS Virus
aggagacacattctttggttcttca

SEQ ID NO: 138429 - DNA, 25 bp, SARS Virus
ggagacacattacttggttcttcac

SEQ ID NO: 138430 - DNA, 25 bp, SARS Virus
gagacacattatctggttcttcacg

SEQ ID NO: 138431 - DNA, 25 bp, SARS Virus
agacacattattcggttcttcacgg

SEQ ID NO: 138432 - DNA, 25 bp, SARS Virus
gacacattatttcgttcttcacggt

SEQ ID NO: 138433 - DNA, 25 bp, SARS Virus
acacattatttgcttcttcacggta

SEQ ID NO: 138434 - DNA, 25 bp, SARS Virus
cacattatttggctcttcacggtaa

SEQ ID NO: 138435 - DNA, 25 bp, SARS Virus
acattatttggtccttcacggtaat

SEQ ID NO: 138436 - DNA, 25 bp, SARS Virus
cattatttggttcttcacggtaatt

SEQ ID NO: 138437 - DNA, 25 bp, SARS Virus
attatttggttcctcacggtaattt

SEQ ID NO: 138438 - DNA, 25 bp, SARS Virus
ttatttggttctccacggtaatttg

SEQ ID NO: 138439 - DNA, 25 bp, SARS Virus
tatttggttcttcacggtaatttgt

SEQ ID NO: 138440 - DNA, 25 bp, SARS Virus
atttggttcttcccggtaatttgtg

SEQ ID NO: 138441 - DNA, 25 bp, SARS Virus
tttggttcttcacggtaatttgtgt

SEQ ID NO: 138442 - DNA, 25 bp, SARS Virus
ttggttcttcaccgtaatttgtgtt

SEQ ID NO: 138443 - DNA, 25 bp, SARS Virus
tggttcttcacgctaatttgtgttt

SEQ ID NO: 138444 - DNA, 25 bp, SARS Virus
ggttcttcacggcaatttgtgtttt

SEQ ID NO: 138445 - DNA, 25 bp, SARS Virus
gttcttcacggtcatttgtgttttt

SEQ ID NO: 138446 - DNA, 25 bp, SARS Virus
ttcttcacggtactttgtgtttttg

SEQ ID NO: 138447 - DNA, 25 bp, SARS Virus
tcttcacggtaacttgtgtttttgt

SEQ ID NO: 138448 - DNA, 25 bp, SARS Virus
cttcacggtaatctgtgtttttgtg

SEQ ID NO: 138449 - DNA, 25 bp, SARS Virus
ttcacggtaattcgtgtttttgtgg

SEQ ID NO: 138450 - DNA, 25 bp, SARS Virus
tcacggtaatttctgtttttgtgga

SEQ ID NO: 138451 - DNA, 25 bp, SARS Virus
cacggtaatttgcgtttttgtggaa

SEQ ID NO: 138452 - DNA, 25 bp, SARS Virus
acggtaatttgtctttttgtggaag

SEQ ID NO: 138453 - DNA, 25 bp, SARS Virus
cggtaatttgtgcttttgtggaagt

SEQ ID NO: 138454 - DNA, 25 bp, SARS Virus
ggtaatttgtgtctttgtggaagtg

SEQ ID NO: 138455 - DNA, 25 bp, SARS Virus
gtaatttgtgttcttgtggaagtgc

SEQ ID NO: 138456 - DNA, 25 bp, SARS Virus
taatttgtgtttctgtggaagtgct

SEQ ID NO: 138457 - DNA, 25 bp, SARS Virus
aatttgtgttttcgtggaagtgctc

SEQ ID NO: 138458 - DNA, 25 bp, SARS Virus
atttgtgtttttctggaagtgctcc

SEQ ID NO: 138459 - DNA, 25 bp, SARS Virus
tttgtgtttttgcggaagtgctccc

SEQ ID NO: 138460 - DNA, 25 bp, SARS Virus
ttgtgtttttgtcgaagtgctccct

SEQ ID NO: 138461 - DNA, 25 bp, SARS Virus
tgtgtttttgtgcaagtgctccctt

SEQ ID NO: 138462 - DNA, 25 bp, SARS Virus
gtgtttttgtggcagtgctcccttc

SEQ ID NO: 138463 - DNA, 25 bp, SARS Virus
tgtttttgtggacgtgctcccttca

SEQ ID NO: 138464 - DNA, 25 bp, SARS Virus
gtttttgtggaactgctcccttcat

SEQ ID NO: 138465 - DNA, 25 bp, SARS Virus
tttttgtggaagcgctcccttcata

SEQ ID NO: 138466 - DNA, 25 bp, SARS Virus
ttttgtggaagtcctcccttcatac

SEQ ID NO: 138467 - DNA, 25 bp, SARS Virus
tttgtggaagtgctcccttcatacg

SEQ ID NO: 138468 - DNA, 25 bp, SARS Virus
ttgtggaagtgcccccttcatacga

SEQ ID NO: 138469 - DNA, 25 bp, SARS Virus
tgtggaagtgctcccttcatacgaa

SEQ ID NO: 138470 - DNA, 25 bp, SARS Virus
gtggaagtgctcccttcatacgaaa

SEQ ID NO: 138471 - DNA, 25 bp, SARS Virus
tggaagtgctcccttcatacgaaac

SEQ ID NO: 138472 - DNA, 25 bp, SARS Virus
ggaagtgctcccctcatacgaaacg

SEQ ID NO: 138473 - DNA, 25 bp, SARS Virus
gaagtgctccctccatacgaaacgg

SEQ ID NO: 138474 - DNA, 25 bp, SARS Virus
aagtgctcccttcatacgaaacgga

SEQ ID NO: 138475 - DNA, 25 bp, SARS Virus
agtgctcccttcctacgaaacggaa

SEQ ID NO: 138476 - DNA, 25 bp, SARS Virus
gtgctcccttcacacgaaacggaag

SEQ ID NO: 138477 - DNA, 25 bp, SARS Virus
tgctcccttcatccgaaacggaagt

SEQ ID NO: 138478 - DNA, 25 bp, SARS Virus
gctcccttcatacgaaacggaagta

SEQ ID NO: 138479 - DNA, 25 bp, SARS Virus
ctcccttcataccaaacggaagtac

SEQ ID NO: 138480 - DNA, 25 bp, SARS Virus
tcccttcatacgcaacggaagtact

SEQ ID NO: 138481 - DNA, 25 bp, SARS Virus
cccttcatacgacacggaagtactg

SEQ ID NO: 138482 - DNA, 25 bp, SARS Virus
ccttcatacgaaccggaagtactgt

SEQ ID NO: 138483 - DNA, 25 bp, SARS Virus
cttcatacgaaacggaagtactgtt

SEQ ID NO: 138484 - DNA, 25 bp, SARS Virus
ttcatacgaaaccgaagtactgttt

SEQ ID NO: 138485 - DNA, 25 bp, SARS Virus
tcatacgaaacgcaagtactgttta

SEQ ID NO: 138486 - DNA, 25 bp, SARS Virus
catacgaaacggcagtactgtttaa

SEQ ID NO: 138487 - DNA, 25 bp, SARS Virus
atacgaaacggacgtactgtttaac

SEQ ID NO: 138488 - DNA, 25 bp, SARS Virus
tacgaaacggaactactgtttaacg

SEQ ID NO: 138489 - DNA, 25 bp, SARS Virus
acgaaacggaagcactgtttaacga

SEQ ID NO: 138490 - DNA, 25 bp, SARS Virus
cgaaacggaagtcctgtttaacgac

SEQ ID NO: 138491 - DNA, 25 bp, SARS Virus
gaaacggaagtactgtttaacgacc

SEQ ID NO: 138492 - DNA, 25 bp, SARS Virus
aaacggaagtaccgtttaacgaccg

SEQ ID NO: 138493 - DNA, 25 bp, SARS Virus
aacggaagtactctttaacgaccgc

SEQ ID NO: 138494 - DNA, 25 bp, SARS Virus
acggaagtactgcttaacgaccgcg

SEQ ID NO: 138495 - DNA, 25 bp, SARS Virus
cggaagtactgtctaacgaccgcga

SEQ ID NO: 138496 - DNA, 25 bp, SARS Virus
ggaagtactgttcaacgaccgcgac

SEQ ID NO: 138497 - DNA, 25 bp, SARS Virus
gaagtactgtttcacgaccgcgaca

SEQ ID NO: 138498 - DNA, 25 bp, SARS Virus
aagtactgtttaccgaccgcgacac

SEQ ID NO: 138499 - DNA, 25 bp, SARS Virus
agtactgtttaacgaccgcgacacc

SEQ ID NO: 138500 - DNA, 25 bp, SARS Virus
gtactgtttaaccaccgcgacacca

SEQ ID NO: 138501 - DNA, 25 bp, SARS Virus
tactgtttaacgcccgcgacaccac

SEQ ID NO: 138502 - DNA, 25 bp, SARS Virus
actgtttaacgaccgcgacaccact

SEQ ID NO: 138503 - DNA, 25 bp, SARS Virus
ctgtttaacgaccgcgacaccactt

SEQ ID NO: 138504 - DNA, 25 bp, SARS Virus
tgtttaacgaccccgacaccacttc

SEQ ID NO: 138505 - DNA, 25 bp, SARS Virus
gtttaacgaccgcgacaccacttca

SEQ ID NO: 138506 - DNA, 25 bp, SARS Virus
tttaacgaccgccacaccacttcaa

SEQ ID NO: 138507 - DNA, 25 bp, SARS Virus
ttaacgaccgcgccaccacttcaag

SEQ ID NO: 138508 - DNA, 25 bp, SARS Virus
taacgaccgcgacaccacttcaagg

SEQ ID NO: 138509 - DNA, 25 bp, SARS Virus
aacgaccgcgaccccacttcaagga

SEQ ID NO: 138510 - DNA, 25 bp, SARS Virus
acgaccgcgacaccacttcaaggag

SEQ ID NO: 138511 - DNA, 25 bp, SARS Virus
cgaccgcgacaccacttcaaggaga

SEQ ID NO: 138512 - DNA, 25 bp, SARS Virus
gaccgcgacaccccttcaaggagag

SEQ ID NO: 138513 - DNA, 25 bp, SARS Virus
accgcgacaccacttcaaggagagg

SEQ ID NO: 138514 - DNA, 25 bp, SARS Virus
ccgcgacaccacctcaaggagagga

SEQ ID NO: 138515 - DNA, 25 bp, SARS Virus
cgcgacaccactccaaggagaggac

SEQ ID NO: 138516 - DNA, 25 bp, SARS Virus
gcgacaccacttcaaggagaggacc

SEQ ID NO: 138517 - DNA, 25 bp, SARS Virus
cgacaccacttccaggagaggaccc

SEQ ID NO: 138518 - DNA, 25 bp, SARS Virus
gacaccacttcacggagaggaccct

SEQ ID NO: 138519 - DNA, 25 bp, SARS Virus
acaccacttcaacgagaggacccta

SEQ ID NO: 138520 - DNA, 25 bp, SARS Virus
caccacttcaagcagaggaccctac

SEQ ID NO: 138521 - DNA, 25 bp, SARS Virus
accacttcaaggcgaggaccctacc

SEQ ID NO: 138522 - DNA, 25 bp, SARS Virus
ccacttcaaggacaggaccctaccg

SEQ ID NO: 138523 - DNA, 25 bp, SARS Virus
cacttcaaggagcggaccctaccgt

SEQ ID NO: 138524 - DNA, 25 bp, SARS Virus
acttcaaggagacgaccctaccgtg

SEQ ID NO: 138525 - DNA, 25 bp, SARS Virus
cttcaaggagagcaccctaccgtgt

SEQ ID NO: 138526 - DNA, 25 bp, SARS Virus
ttcaaggagaggcccctaccgtgta

SEQ ID NO: 138527 - DNA, 25 bp, SARS Virus
tcaaggagaggaccctaccgtgtat

SEQ ID NO: 138528 - DNA, 25 bp, SARS Virus
caaggagaggaccctaccgtgtatg

SEQ ID NO: 138529 - DNA, 25 bp, SARS Virus
aaggagaggaccctaccgtgtatgc

SEQ ID NO: 138530 - DNA, 25 bp, SARS Virus
aggagaggaccccaccgtgtatgca

SEQ ID NO: 138531 - DNA, 25 bp, SARS Virus
ggagaggaccctcccgtgtatgcac

SEQ ID NO: 138532 - DNA, 25 bp, SARS Virus
gagaggaccctaccgtgtatgcact

SEQ ID NO: 138533 - DNA, 25 bp, SARS Virus
agaggaccctaccgtgtatgcactg

SEQ ID NO: 138534 - DNA, 25 bp, SARS Virus
gaggaccctaccctgtatgcactgt

SEQ ID NO: 138535 - DNA, 25 bp, SARS Virus
aggaccctaccgcgtatgcactgta

SEQ ID NO: 138536 - DNA, 25 bp, SARS Virus
ggaccctaccgtctatgcactgtac

SEQ ID NO: 138537 - DNA, 25 bp, SARS Virus
gaccctaccgtgcatgcactgtaca

SEQ ID NO: 138538 - DNA, 25 bp, SARS Virus
accctaccgtgtctgcactgtacat

SEQ ID NO: 138539 - DNA, 25 bp, SARS Virus
ccctaccgtgtacgcactgtacatc

SEQ ID NO: 138540 - DNA, 25 bp, SARS Virus
cctaccgtgtatccactgtacatcc

SEQ ID NO: 138541 - DNA, 25 bp, SARS Virus
ctaccgtgtatgcactgtacatcct

SEQ ID NO: 138542 - DNA, 25 bp, SARS Virus
taccgtgtatgccctgtacatcctt

SEQ ID NO: 138543 - DNA, 25 bp, SARS Virus
accgtgtatgcactgtacatccttc

SEQ ID NO: 138544 - DNA, 25 bp, SARS Virus
ccgtgtatgcaccgtacatccttct

SEQ ID NO: 138545 - DNA, 25 bp, SARS Virus
cgtgtatgcactctacatccttctg

SEQ ID NO: 138546 - DNA, 25 bp, SARS Virus
gtgtatgcactgcacatccttctgt

SEQ ID NO: 138547 - DNA, 25 bp, SARS Virus
tgtatgcactgtccatccttctgtt

SEQ ID NO: 138548 - DNA, 25 bp, SARS Virus
gtatgcactgtacatccttctgttg

SEQ ID NO: 138549 - DNA, 25 bp, SARS Virus
tatgcactgtacctccttctgttgt

SEQ ID NO: 138550 - DNA, 25 bp, SARS Virus
atgcactgtacacccttctgttgtg

SEQ ID NO: 138551 - DNA, 25 bp, SARS Virus
tgcactgtacatccttctgttgtgg

SEQ ID NO: 138552 - DNA, 25 bp, SARS Virus
gcactgtacatccttctgttgtggt

SEQ ID NO: 138553 - DNA, 25 bp, SARS Virus
cactgtacatccctctgttgtggta

SEQ ID NO: 138554 - DNA, 25 bp, SARS Virus
actgtacatcctcctgttgtggtac

SEQ ID NO: 138555 - DNA, 25 bp, SARS Virus
ctgtacatccttctgttgtggtacg

SEQ ID NO: 138556 - DNA, 25 bp, SARS Virus
tgtacatccttccgttgtggtacgc

SEQ ID NO: 138557 - DNA, 25 bp, SARS Virus
gtacatccttctcttgtggtacgcc

SEQ ID NO: 138558 - DNA, 25 bp, SARS Virus
tacatccttctgctgtggtacgccc

SEQ ID NO: 138559 - DNA, 25 bp, SARS Virus
acatccttctgtcgtggtacgcccc

SEQ ID NO: 138560 - DNA, 25 bp, SARS Virus
catccttctgttctggtacgccccg

SEQ ID NO: 138561 - DNA, 25 bp, SARS Virus
atccttctgttgcggtacgccccga

SEQ ID NO: 138562 - DNA, 25 bp, SARS Virus
tccttctgttgtcgtacgccccgac

SEQ ID NO: 138563 - DNA, 25 bp, SARS Virus
ccttctgttgtgctacgccccgacg

SEQ ID NO: 138564 - DNA, 25 bp, SARS Virus
cttctgttgtggcacgccccgacga

SEQ ID NO: 138565 - DNA, 25 bp, SARS Virus
ttctgttgtggtccgccccgacgaa

SEQ ID NO: 138566 - DNA, 25 bp, SARS Virus
tctgttgtggtacgccccgacgaac

SEQ ID NO: 138567 - DNA, 25 bp, SARS Virus
ctgttgtggtaccccccgacgaaca

SEQ ID NO: 138568 - DNA, 25 bp, SARS Virus
tgttgtggtacgccccgacgaacac

SEQ ID NO: 138569 - DNA, 25 bp, SARS Virus
gttgtggtacgccccgacgaacacc

SEQ ID NO: 138570 - DNA, 25 bp, SARS Virus
ttgtggtacgccccgacgaacaccc

SEQ ID NO: 138571 - DNA, 25 bp, SARS Virus
tgtggtacgccccgacgaacaccct

SEQ ID NO: 138572 - DNA, 25 bp, SARS Virus
gtggtacgcccccacgaacaccctt

SEQ ID NO: 138573 - DNA, 25 bp, SARS Virus
tggtacgccccgccgaacacccttc

SEQ ID NO: 138574 - DNA, 25 bp, SARS Virus
ggtacgccccgacgaacacccttcc

SEQ ID NO: 138575 - DNA, 25 bp, SARS Virus
gtacgccccgaccaacacccttcct

SEQ ID NO: 138576 - DNA, 25 bp, SARS Virus
tacgccccgacgcacacccttcctg

SEQ ID NO: 138577 - DNA, 25 bp, SARS Virus
acgccccgacgaccacccttcctgt

SEQ ID NO: 138578 - DNA, 25 bp, SARS Virus
cgccccgacgaacacccttcctgta

SEQ ID NO: 138579 - DNA, 25 bp, SARS Virus
gccccgacgaacccccttcctgtat

SEQ ID NO: 138580 - DNA, 25 bp, SARS Virus
ccccgacgaacacccttcctgtatt

SEQ ID NO: 138581 - DNA, 25 bp, SARS Virus
cccgacgaacacccttcctgtattc

SEQ ID NO: 138582 - DNA, 25 bp, SARS Virus
ccgacgaacacccttcctgtattcc

SEQ ID NO: 138583 - DNA, 25 bp, SARS Virus
cgacgaacacccctcctgtattcca

SEQ ID NO: 138584 - DNA, 25 bp, SARS Virus
gacgaacaccctccctgtattccac

SEQ ID NO: 138585 - DNA, 25 bp, SARS Virus
acgaacacccttcctgtattccacc

SEQ ID NO: 138586 - DNA, 25 bp, SARS Virus
cgaacacccttcctgtattccacca

SEQ ID NO: 138587 - DNA, 25 bp, SARS Virus
gaacacccttcccgtattccaccat

SEQ ID NO: 138588 - DNA, 25 bp, SARS Virus
aacacccttcctctattccaccatc

SEQ ID NO: 138589 - DNA, 25 bp, SARS Virus
acacccttcctgcattccaccatcg

SEQ ID NO: 138590 - DNA, 25 bp, SARS Virus
cacccttcctgtcttccaccatcgg

SEQ ID NO: 138591 - DNA, 25 bp, SARS Virus
acccttcctgtactccaccatcggg

SEQ ID NO: 138592 - DNA, 25 bp, SARS Virus
cccttcctgtatcccaccatcggga

SEQ ID NO: 138593 - DNA, 25 bp, SARS Virus
ccttcctgtattccaccatcgggaa

SEQ ID NO: 138594 - DNA, 25 bp, SARS Virus
cttcctgtattccaccatcgggaaa

SEQ ID NO: 138595 - DNA, 25 bp, SARS Virus
ttcctgtattcccccatcgggaaag

SEQ ID NO: 138596 - DNA, 25 bp, SARS Virus
tcctgtattccaccatcgggaaagg

SEQ ID NO: 138597 - DNA, 25 bp, SARS Virus
cctgtattccaccatcgggaaaggt

SEQ ID NO: 138598 - DNA, 25 bp, SARS Virus
ctgtattccaccctcgggaaaggtg

SEQ ID NO: 138599 - DNA, 25 bp, SARS Virus
tgtattccaccaccgggaaaggtgt

SEQ ID NO: 138600 - DNA, 25 bp, SARS Virus
gtattccaccatcgggaaaggtgtt

SEQ ID NO: 138601 - DNA, 25 bp, SARS Virus
tattccaccatccggaaaggtgttt

SEQ ID NO: 138602 - DNA, 25 bp, SARS Virus
attccaccatcgcgaaaggtgtttt

SEQ ID NO: 138603 - DNA, 25 bp, SARS Virus
ttccaccatcggcaaaggtgttttc

SEQ ID NO: 138604 - DNA, 25 bp, SARS Virus
tccaccatcgggcaaggtgttttca

SEQ ID NO: 138605 - DNA, 25 bp, SARS Virus
ccaccatcgggacaggtgttttcag

SEQ ID NO: 138606 - DNA, 25 bp, SARS Virus
caccatcgggaacggtgttttcagt

SEQ ID NO: 138607 - DNA, 25 bp, SARS Virus
accatcgggaaacgtgttttcagtt

SEQ ID NO: 138608 - DNA, 25 bp, SARS Virus
ccatcgggaaagctgttttcagttg

SEQ ID NO: 138609 - DNA, 25 bp, SARS Virus
catcgggaaaggcgttttcagttga

SEQ ID NO: 138610 - DNA, 25 bp, SARS Virus
atcgggaaaggtcttttcagttgag

SEQ ID NO: 138611 - DNA, 25 bp, SARS Virus
tcgggaaaggtgctttcagttgaga

SEQ ID NO: 138612 - DNA, 25 bp, SARS Virus
cgggaaaggtgtcttcagttgagaa

SEQ ID NO: 138613 - DNA, 25 bp, SARS Virus
gggaaaggtgttctcagttgagaaa

SEQ ID NO: 138614 - DNA, 25 bp, SARS Virus
ggaaaggtgtttccagttgagaaaa

SEQ ID NO: 138615 - DNA, 25 bp, SARS Virus
gaaaggtgttttcagttgagaaaaa

SEQ ID NO: 138616 - DNA, 25 bp, SARS Virus
aaaggtgttttccgttgagaaaaac

SEQ ID NO: 138617 - DNA, 25 bp, SARS Virus
aaggtgttttcacttgagaaaaact

SEQ ID NO: 138618 - DNA, 25 bp, SARS Virus
aggtgttttcagctgagaaaaacta

SEQ ID NO: 138619 - DNA, 25 bp, SARS Virus
ggtgttttcagtcgagaaaaactaa

SEQ ID NO: 138620 - DNA, 25 bp, SARS Virus
gtgttttcagttcagaaaaactaac

SEQ ID NO: 138621 - DNA, 25 bp, SARS Virus
tgttttcagttgcgaaaaactaaca

SEQ ID NO: 138622 - DNA, 25 bp, SARS Virus
gttttcagttgacaaaaactaacag

SEQ ID NO: 138623 - DNA, 25 bp, SARS Virus
ttttcagttgagcaaaactaacagg

SEQ ID NO: 138624 - DNA, 25 bp, SARS Virus
tttcagttgagacaaactaacaggt

SEQ ID NO: 138625 - DNA, 25 bp, SARS Virus
aagggttaagaagttccagttactc

SEQ ID NO: 138626 - DNA, 25 bp, SARS Virus
agggttaagaacgtccagttactca

SEQ ID NO: 138627 - DNA, 25 bp, SARS Virus
gggttaagaactgccagttactcac

SEQ ID NO: 138628 - DNA, 25 bp, SARS Virus
ggttaagaacttgcagttactcact

SEQ ID NO: 138629 - DNA, 25 bp, SARS Virus
gttaagaacttcgagttactcacta

SEQ ID NO: 138630 - DNA, 25 bp, SARS Virus
ttaagaacttccggttactcactaa

SEQ ID NO: 138631 - DNA, 25 bp, SARS Virus
taagaacttccagttactcactaag

SEQ ID NO: 138632 - DNA, 25 bp, SARS Virus
aagaacttccaggtactcactaagt

SEQ ID NO: 138633 - DNA, 25 bp, SARS Virus
agaacttccagtgactcactaagta

SEQ ID NO: 138634 - DNA, 25 bp, SARS Virus
gaacttccagttgctcactaagtaa

SEQ ID NO: 138635 - DNA, 25 bp, SARS Virus
aacttccagttagtcactaagtaaa

SEQ ID NO: 138636 - DNA, 25 bp, SARS Virus
acttccagttacgcactaagtaaat

SEQ ID NO: 138637 - DNA, 25 bp, SARS Virus
cttccagttactgactaagtaaatt

SEQ ID NO: 138638 - DNA, 25 bp, SARS Virus
ttccagttactcgctaagtaaattt

SEQ ID NO: 138639 - DNA, 25 bp, SARS Virus
tccagttactcagtaagtaaattta

SEQ ID NO: 138640 - DNA, 25 bp, SARS Virus
ccagttactcacgaagtaaatttaa

SEQ ID NO: 138641 - DNA, 25 bp, SARS Virus
cagttactcactgagtaaatttaaa

SEQ ID NO: 138642 - DNA, 25 bp, SARS Virus
agttactcactaggtaaatttaaaa

SEQ ID NO: 138643 - DNA, 25 bp, SARS Virus
gttactcactaagtaaatttaaaaa

SEQ ID NO: 138644 - DNA, 25 bp, SARS Virus
ttactcactaaggaaatttaaaaat

SEQ ID NO: 138645 - DNA, 25 bp, SARS Virus
tactcactaagtgaatttaaaaatc

SEQ ID NO: 138646 - DNA, 25 bp, SARS Virus
actcactaagtagatttaaaaatcg

SEQ ID NO: 138647 - DNA, 25 bp, SARS Virus
ctcactaagtaagtttaaaaatcgc

SEQ ID NO: 138648 - DNA, 25 bp, SARS Virus
tcactaagtaaagttaaaaatcgct

SEQ ID NO: 138649 - DNA, 25 bp, SARS Virus
cactaagtaaatgtaaaaatcgctg

SEQ ID NO: 138650 - DNA, 25 bp, SARS Virus
actaagtaaattgaaaaatcgctgg

SEQ ID NO: 138651 - DNA, 25 bp, SARS Virus
ctaagtaaatttgaaaatcgctgga

SEQ ID NO: 138652 - DNA, 25 bp, SARS Virus
taagtaaatttagaaatcgctggag

SEQ ID NO: 138653 - DNA, 25 bp, SARS Virus
aagtaaatttaagaatcgctggagt

SEQ ID NO: 138654 - DNA, 25 bp, SARS Virus
agtaaatttaaagatcgctggagta

SEQ ID NO: 138655 - DNA, 25 bp, SARS Virus
gtaaatttaaaagtcgctggagtaa

SEQ ID NO: 138656 - DNA, 25 bp, SARS Virus
taaatttaaaaagcgctggagtaac

SEQ ID NO: 138657 - DNA, 25 bp, SARS Virus
aaatttaaaaatggctggagtaact

SEQ ID NO: 138658 - DNA, 25 bp, SARS Virus
aatttaaaaatcgctggagtaactc

SEQ ID NO: 138659 - DNA, 25 bp, SARS Virus
atttaaaaatcggtggagtaactcc

SEQ ID NO: 138660 - DNA, 25 bp, SARS Virus
tttaaaaatcgcgggagtaactccg

SEQ ID NO: 138661 - DNA, 25 bp, SARS Virus
ttaaaaatcgctggagtaactccgc

SEQ ID NO: 138662 - DNA, 25 bp, SARS Virus
taaaaatcgctggagtaactccgcc

SEQ ID NO: 138663 - DNA, 25 bp, SARS Virus
aaaaatcgctggggtaactccgcca

SEQ ID NO: 138664 - DNA, 25 bp, SARS Virus
aaaatcgctggagtaactccgccag

SEQ ID NO: 138665 - DNA, 25 bp, SARS Virus
aaatcgctggaggaactccgccagt

SEQ ID NO: 138666 - DNA, 25 bp, SARS Virus
aatcgctggagtgactccgccagtt

SEQ ID NO: 138667 - DNA, 25 bp, SARS Virus
atcgctggagtagctccgccagtta

SEQ ID NO: 138668 - DNA, 25 bp, SARS Virus
tcgctggagtaagtccgccagttaa

SEQ ID NO: 138669 - DNA, 25 bp, SARS Virus
cgctggagtaacgccgccagttaaa

SEQ ID NO: 138670 - DNA, 25 bp, SARS Virus
gctggagtaactgcgccagttaaag

SEQ ID NO: 138671 - DNA, 25 bp, SARS Virus
ctggagtaactcggccagttaaaga

SEQ ID NO: 138672 - DNA, 25 bp, SARS Virus
tggagtaactccgccagttaaagaa

SEQ ID NO: 138673 - DNA, 25 bp, SARS Virus
ggagtaactccggcagttaaagaaa

SEQ ID NO: 138674 - DNA, 25 bp, SARS Virus
gagtaactccgcgagttaaagaaaa

SEQ ID NO: 138675 - DNA, 25 bp, SARS Virus
agtaactccgccggttaaagaaaaa

SEQ ID NO: 138676 - DNA, 25 bp, SARS Virus
gtaactccgccagttaaagaaaaac

SEQ ID NO: 138677 - DNA, 25 bp, SARS Virus
taactccgccaggtaaagaaaaact

SEQ ID NO: 138678 - DNA, 25 bp, SARS Virus
aactccgccagtgaaagaaaaactt

SEQ ID NO: 138679 - DNA, 25 bp, SARS Virus
actccgccagttgaagaaaaactta

SEQ ID NO: 138680 - DNA, 25 bp, SARS Virus
ctccgccagttagagaaaaacttac

SEQ ID NO: 138681 - DNA, 25 bp, SARS Virus
tccgccagttaaggaaaaacttaca

SEQ ID NO: 138682 - DNA, 25 bp, SARS Virus
ccgccagttaaagaaaaacttacaa

SEQ ID NO: 138683 - DNA, 25 bp, SARS Virus
cgccagttaaaggaaaacttacaac

SEQ ID NO: 138684 - DNA, 25 bp, SARS Virus
gccagttaaagagaaacttacaact

SEQ ID NO: 138685 - DNA, 25 bp, SARS Virus
ccagttaaagaagaacttacaactg

SEQ ID NO: 138686 - DNA, 25 bp, SARS Virus
cagttaaagaaagacttacaactgc

SEQ ID NO: 138687 - DNA, 25 bp, SARS Virus
agttaaagaaaagcttacaactgct

SEQ ID NO: 138688 - DNA, 25 bp, SARS Virus
gttaaagaaaaagttacaactgctg

SEQ ID NO: 138689 - DNA, 25 bp, SARS Virus
ttaaagaaaaacgtacaactgctgt

SEQ ID NO: 138690 - DNA, 25 bp, SARS Virus
taaagaaaaactgacaactgctgtc

SEQ ID NO: 138691 - DNA, 25 bp, SARS Virus
aaagaaaaacttgcaactgctgtct

SEQ ID NO: 138692 - DNA, 25 bp, SARS Virus
aagaaaaacttagaactgctgtctt

SEQ ID NO: 138693 - DNA, 25 bp, SARS Virus
agaaaaacttacgactgctgtcttc

SEQ ID NO: 138694 - DNA, 25 bp, SARS Virus
gaaaaacttacagctgctgtcttcg

SEQ ID NO: 138695 - DNA, 25 bp, SARS Virus
aaaaacttacaagtgctgtcttcgc

SEQ ID NO: 138696 - DNA, 25 bp, SARS Virus
aaaacttacaacggctgtcttcgca

SEQ ID NO: 138697 - DNA, 25 bp, SARS Virus
aaacttacaactgctgtcttcgcaa

SEQ ID NO: 138698 - DNA, 25 bp, SARS Virus
aacttacaactggtgtcttcgcaat

SEQ ID NO: 138699 - DNA, 25 bp, SARS Virus
acttacaactgcggtcttcgcaatt

SEQ ID NO: 138700 - DNA, 25 bp, SARS Virus
cttacaactgctgtcttcgcaatta

SEQ ID NO: 138701 - DNA, 25 bp, SARS Virus
ttacaactgctggcttcgcaattac

SEQ ID NO: 138702 - DNA, 25 bp, SARS Virus
tacaactgctgtgttcgcaattacg

SEQ ID NO: 138703 - DNA, 25 bp, SARS Virus
acaactgctgtcgtcgcaattacgg

SEQ ID NO: 138704 - DNA, 25 bp, SARS Virus
caactgctgtctgcgcaattacgga

SEQ ID NO: 138705 - DNA, 25 bp, SARS Virus
aactgctgtcttggcaattacggac

SEQ ID NO: 138706 - DNA, 25 bp, SARS Virus
actgctgtcttcgcaattacggact

SEQ ID NO: 138707 - DNA, 25 bp, SARS Virus
ctgctgtcttcggaattacggactt

SEQ ID NO: 138708 - DNA, 25 bp, SARS Virus
tgctgtcttcgcgattacggacttt

SEQ ID NO: 138709 - DNA, 25 bp, SARS Virus
gctgtcttcgcagttacggacttta

SEQ ID NO: 138710 - DNA, 25 bp, SARS Virus
ctgtcttcgcaagtacggactttac

SEQ ID NO: 138711 - DNA, 25 bp, SARS Virus
tgtcttcgcaatgacggactttaca

SEQ ID NO: 138712 - DNA, 25 bp, SARS Virus
gtcttcgcaattgcggactttacag

SEQ ID NO: 138713 - DNA, 25 bp, SARS Virus
tcttcgcaattagggactttacagc

SEQ ID NO: 138714 - DNA, 25 bp, SARS Virus
cttcgcaattacggactttacagcg

SEQ ID NO: 138715 - DNA, 25 bp, SARS Virus
ttcgcaattacggactttacagcgg

SEQ ID NO: 138716 - DNA, 25 bp, SARS Virus
tcgcaattacgggctttacagcggt

SEQ ID NO: 138717 - DNA, 25 bp, SARS Virus
cgcaattacggagtttacagcggtt

SEQ ID NO: 138718 - DNA, 25 bp, SARS Virus
gcaattacggacgttacagcggttc

SEQ ID NO: 138719 - DNA, 25 bp, SARS Virus
caattacggactgtacagcggttct

SEQ ID NO: 138720 - DNA, 25 bp, SARS Virus
aattacggacttgacagcggttcta

SEQ ID NO: 138721 - DNA, 25 bp, SARS Virus
attacggactttgcagcggttctag

SEQ ID NO: 138722 - DNA, 25 bp, SARS Virus
ttacggactttagagcggttctagt

SEQ ID NO: 138723 - DNA, 25 bp, SARS Virus
tacggactttacggcggttctagtt

SEQ ID NO: 138724 - DNA, 25 bp, SARS Virus
acggactttacagcggttctagttg

SEQ ID NO: 138725 - DNA, 25 bp, SARS Virus
cggactttacaggggttctagttgt

SEQ ID NO: 138726 - DNA, 25 bp, SARS Virus
ggactttacagcggttctagttgta

SEQ ID NO: 138727 - DNA, 25 bp, SARS Virus
gactttacagcggttctagttgtag

SEQ ID NO: 138728 - DNA, 25 bp, SARS Virus
actttacagcgggtctagttgtaga

SEQ ID NO: 138729 - DNA, 25 bp, SARS Virus
ctttacagcggtgctagttgtagac

SEQ ID NO: 138730 - DNA, 25 bp, SARS Virus
tttacagcggttgtagttgtagacc

SEQ ID NO: 138731 - DNA, 25 bp, SARS Virus
ttacagcggttcgagttgtagacca

SEQ ID NO: 138732 - DNA, 25 bp, SARS Virus
tacagcggttctggttgtagaccac

SEQ ID NO: 138733 - DNA, 25 bp, SARS Virus
acagcggttctagttgtagaccact

SEQ ID NO: 138734 - DNA, 25 bp, SARS Virus
cagcggttctaggtgtagaccacta

SEQ ID NO: 138735 - DNA, 25 bp, SARS Virus
agcggttctagtggtagaccactac

SEQ ID NO: 138736 - DNA, 25 bp, SARS Virus
gcggttctagttgtagaccactaca

SEQ ID NO: 138737 - DNA, 25 bp, SARS Virus
cggttctagttggagaccactacat

SEQ ID NO: 138738 - DNA, 25 bp, SARS Virus
ggttctagttgtggaccactacata

SEQ ID NO: 138739 - DNA, 25 bp, SARS Virus
gttctagttgtagaccactacatac

SEQ ID NO: 138740 - DNA, 25 bp, SARS Virus
ttctagttgtaggccactacatact

SEQ ID NO: 138741 - DNA, 25 bp, SARS Virus
tctagttgtagagcactacatacta

SEQ ID NO: 138742 - DNA, 25 bp, SARS Virus
ctagttgtagacgactacatactaa

SEQ ID NO: 138743 - DNA, 25 bp, SARS Virus
tagttgtagaccgctacatactaaa

SEQ ID NO: 138744 - DNA, 25 bp, SARS Virus
agttgtagaccagtacatactaaaa

SEQ ID NO: 138745 - DNA, 25 bp, SARS Virus
gttgtagaccacgacatactaaaaa

SEQ ID NO: 138746 - DNA, 25 bp, SARS Virus
ttgtagaccactgcatactaaaaac

SEQ ID NO: 138747 - DNA, 25 bp, SARS Virus
tgtagaccactagatactaaaaact

SEQ ID NO: 138748 - DNA, 25 bp, SARS Virus
gtagaccactacgtactaaaaactt

SEQ ID NO: 138749 - DNA, 25 bp, SARS Virus
tagaccactacagactaaaaacttc

SEQ ID NO: 138750 - DNA, 25 bp, SARS Virus
agaccactacatgctaaaaacttca

SEQ ID NO: 138751 - DNA, 25 bp, SARS Virus
gaccactacatagtaaaaacttcat

SEQ ID NO: 138752 - DNA, 25 bp, SARS Virus
accactacatacgaaaaacttcatg

SEQ ID NO: 138753 - DNA, 25 bp, SARS Virus
ccactacatactgaaaacttcatga

SEQ ID NO: 138754 - DNA, 25 bp, SARS Virus
cactacatactagaaacttcatgaa

SEQ ID NO: 138755 - DNA, 25 bp, SARS Virus
actacatactaagaacttcatgaac

SEQ ID NO: 138756 - DNA, 25 bp, SARS Virus
ctacatactaaagacttcatgaaca

SEQ ID NO: 138757 - DNA, 25 bp, SARS Virus
tacatactaaaagcttcatgaacag

SEQ ID NO: 138758 - DNA, 25 bp, SARS Virus
acatactaaaaagttcatgaacagg

SEQ ID NO: 138759 - DNA, 25 bp, SARS Virus
catactaaaaacgtcatgaacaggt

SEQ ID NO: 138760 - DNA, 25 bp, SARS Virus
atactaaaaactgcatgaacaggtc

SEQ ID NO: 138761 - DNA, 25 bp, SARS Virus
tactaaaaacttgatgaacaggtcg

SEQ ID NO: 138762 - DNA, 25 bp, SARS Virus
actaaaaacttcgtgaacaggtcga

SEQ ID NO: 138763 - DNA, 25 bp, SARS Virus
ctaaaaacttcaggaacaggtcgag

SEQ ID NO: 138764 - DNA, 25 bp, SARS Virus
taaaaacttcatgaacaggtcgaga

SEQ ID NO: 138765 - DNA, 25 bp, SARS Virus
aaaaacttcatggacaggtcgagaa

SEQ ID NO: 138766 - DNA, 25 bp, SARS Virus
aaaacttcatgagcaggtcgagaag

SEQ ID NO: 138767 - DNA, 25 bp, SARS Virus
aaacttcatgaagaggtcgagaaga

SEQ ID NO: 138768 - DNA, 25 bp, SARS Virus
aacttcatgaacgggtcgagaagaa

SEQ ID NO: 138769 - DNA, 25 bp, SARS Virus
acttcatgaacaggtcgagaagaaa

SEQ ID NO: 138770 - DNA, 25 bp, SARS Virus
cttcatgaacaggtcgagaagaaac

SEQ ID NO: 138771 - DNA, 25 bp, SARS Virus
ttcatgaacagggcgagaagaaact

SEQ ID NO: 138772 - DNA, 25 bp, SARS Virus
tcatgaacaggtggagaagaaactt

SEQ ID NO: 138773 - DNA, 25 bp, SARS Virus
catgaacaggtcgagaagaaactta

SEQ ID NO: 138774 - DNA, 25 bp, SARS Virus
atgaacaggtcgggaagaaacttac

SEQ ID NO: 138775 - DNA, 25 bp, SARS Virus
tgaacaggtcgagaagaaacttact

SEQ ID NO: 138776 - DNA, 25 bp, SARS Virus
gaacaggtcgaggagaaacttactc

SEQ ID NO: 138777 - DNA, 25 bp, SARS Virus
aacaggtcgagaggaaacttactca

SEQ ID NO: 138778 - DNA, 25 bp, SARS Virus
acaggtcgagaagaaacttactcag

SEQ ID NO: 138779 - DNA, 25 bp, SARS Virus
caggtcgagaaggaacttactcagt

SEQ ID NO: 138780 - DNA, 25 bp, SARS Virus
aggtcgagaagagacttactcagtt

SEQ ID NO: 138781 - DNA, 25 bp, SARS Virus
ggtcgagaagaagcttactcagttc

SEQ ID NO: 138782 - DNA, 25 bp, SARS Virus
gtcgagaagaaagttactcagttcg

SEQ ID NO: 138783 - DNA, 25 bp, SARS Virus
tcgagaagaaacgtactcagttcga

SEQ ID NO: 138784 - DNA, 25 bp, SARS Virus
cgagaagaaactgactcagttcgag

SEQ ID NO: 138785 - DNA, 25 bp, SARS Virus
gagaagaaacttgctcagttcgagt

SEQ ID NO: 138786 - DNA, 25 bp, SARS Virus
agaagaaacttagtcagttcgagtc

SEQ ID NO: 138787 - DNA, 25 bp, SARS Virus
gaagaaacttacgcagttcgagtcc

SEQ ID NO: 138788 - DNA, 25 bp, SARS Virus
aagaaacttactgagttcgagtcca

SEQ ID NO: 138789 - DNA, 25 bp, SARS Virus
agaaacttactcggttcgagtccaa

SEQ ID NO: 138790 - DNA, 25 bp, SARS Virus
gaaacttactcagttcgagtccaac

SEQ ID NO: 138791 - DNA, 25 bp, SARS Virus
aaacttactcaggtcgagtccaacg

SEQ ID NO: 138792 - DNA, 25 bp, SARS Virus
aacttactcagtgcgagtccaacgt

SEQ ID NO: 138793 - DNA, 25 bp, SARS Virus
acttactcagttggagtccaacgtc

SEQ ID NO: 138794 - DNA, 25 bp, SARS Virus
cttactcagttcgagtccaacgtct

SEQ ID NO: 138795 - DNA, 25 bp, SARS Virus
ttactcagttcgggtccaacgtctc

SEQ ID NO: 138796 - DNA, 25 bp, SARS Virus
tactcagttcgagtccaacgtctcc

SEQ ID NO: 138797 - DNA, 25 bp, SARS Virus
actcagttcgaggccaacgtctcct

SEQ ID NO: 138798 - DNA, 25 bp, SARS Virus
ctcagttcgagtgcaacgtctccta

SEQ ID NO: 138799 - DNA, 25 bp, SARS Virus
tcagttcgagtcgaacgtctcctag

SEQ ID NO: 138800 - DNA, 25 bp, SARS Virus
cagttcgagtccgacgtctcctagt

SEQ ID NO: 138801 - DNA, 25 bp, SARS Virus
agttcgagtccagcgtctcctagta

SEQ ID NO: 138802 - DNA, 25 bp, SARS Virus
gttcgagtccaaggtctcctagtat

SEQ ID NO: 138803 - DNA, 25 bp, SARS Virus
ttcgagtccaacgtctcctagtatt

SEQ ID NO: 138804 - DNA, 25 bp, SARS Virus
tcgagtccaacggctcctagtattt

SEQ ID NO: 138805 - DNA, 25 bp, SARS Virus
cgagtccaacgtgtcctagtatttg

SEQ ID NO: 138806 - DNA, 25 bp, SARS Virus
gagtccaacgtcgcctagtatttga

SEQ ID NO: 138807 - DNA, 25 bp, SARS Virus
agtccaacgtctgctagtatttgac

SEQ ID NO: 138808 - DNA, 25 bp, SARS Virus
gtccaacgtctcgtagtatttgaca

SEQ ID NO: 138809 - DNA, 25 bp, SARS Virus
tccaacgtctccgagtatttgacac

SEQ ID NO: 138810 - DNA, 25 bp, SARS Virus
ccaacgtctcctggtatttgacaca

SEQ ID NO: 138811 - DNA, 25 bp, SARS Virus
caacgtctcctagtatttgacacaa

SEQ ID NO: 138812 - DNA, 25 bp, SARS Virus
aacgtctcctaggatttgacacaac

SEQ ID NO: 138813 - DNA, 25 bp, SARS Virus
acgtctcctagtgtttgacacaaca

SEQ ID NO: 138814 - DNA, 25 bp, SARS Virus
cgtctcctagtagttgacacaacaa

SEQ ID NO: 138815 - DNA, 25 bp, SARS Virus
gtctcctagtatgtgacacaacaat

SEQ ID NO: 138816 - DNA, 25 bp, SARS Virus
tctcctagtattggacacaacaatt

SEQ ID NO: 138817 - DNA, 25 bp, SARS Virus
ctcctagtatttgacacaacaatta

SEQ ID NO: 138818 - DNA, 25 bp, SARS Virus
tcctagtatttggcacaacaattac

SEQ ID NO: 138819 - DNA, 25 bp, SARS Virus
cctagtatttgagacaacaattact

SEQ ID NO: 138820 - DNA, 25 bp, SARS Virus
ctagtatttgacgcaacaattacta

SEQ ID NO: 138821 - DNA, 25 bp, SARS Virus
tagtatttgacagaacaattactac

SEQ ID NO: 138822 - DNA, 25 bp, SARS Virus
agtatttgacacgacaattactacg

SEQ ID NO: 138823 - DNA, 25 bp, SARS Virus
gtatttgacacagcaattactacgg

SEQ ID NO: 138824 - DNA, 25 bp, SARS Virus
tatttgacacaagaattactacggt

SEQ ID NO: 138825 - DNA, 25 bp, SARS Virus
atttgacacaacgattactacggtt

SEQ ID NO: 138826 - DNA, 25 bp, SARS Virus
tttgacacaacagttactacggtta

SEQ ID NO: 138827 - DNA, 25 bp, SARS Virus
ttgacacaacaagtactacggttat

SEQ ID NO: 138828 - DNA, 25 bp, SARS Virus
tgacacaacaatgactacggttatt

SEQ ID NO: 138829 - DNA, 25 bp, SARS Virus
gacacaacaattgctacggttattg

SEQ ID NO: 138830 - DNA, 25 bp, SARS Virus
acacaacaattagtacggttattgc

SEQ ID NO: 138831 - DNA, 25 bp, SARS Virus
cacaacaattacgacggttattgct

SEQ ID NO: 138832 - DNA, 25 bp, SARS Virus
acaacaattactgcggttattgctg

SEQ ID NO: 138833 - DNA, 25 bp, SARS Virus
caacaattactagggttattgctgt

SEQ ID NO: 138834 - DNA, 25 bp, SARS Virus
aacaattactacggttattgctgta

SEQ ID NO: 138835 - DNA, 25 bp, SARS Virus
acaattactacggttattgctgtag

SEQ ID NO: 138836 - DNA, 25 bp, SARS Virus
caattactacgggtattgctgtagt

SEQ ID NO: 138837 - DNA, 25 bp, SARS Virus
aattactacggtgattgctgtagtg

SEQ ID NO: 138838 - DNA, 25 bp, SARS Virus
attactacggttgttgctgtagtgt

SEQ ID NO: 138839 - DNA, 25 bp, SARS Virus
ttactacggttagtgctgtagtgtt

SEQ ID NO: 138840 - DNA, 25 bp, SARS Virus
tactacggttatggctgtagtgtta

SEQ ID NO: 138841 - DNA, 25 bp, SARS Virus
actacggttattgctgtagtgttaa

SEQ ID NO: 138842 - DNA, 25 bp, SARS Virus
ctacggttattggtgtagtgttaaa

SEQ ID NO: 138843 - DNA, 25 bp, SARS Virus
tacggttattgcggtagtgttaaag

SEQ ID NO: 138844 - DNA, 25 bp, SARS Virus
acggttattgctgtagtgttaaagg

SEQ ID NO: 138845 - DNA, 25 bp, SARS Virus
cggttattgctggagtgttaaagga

SEQ ID NO: 138846 - DNA, 25 bp, SARS Virus
ggttattgctgtggtgttaaaggac

SEQ ID NO: 138847 - DNA, 25 bp, SARS Virus
gttattgctgtagtgttaaaggact

SEQ ID NO: 138848 - DNA, 25 bp, SARS Virus
ttattgctgtagggttaaaggactc

SEQ ID NO: 138849 - DNA, 25 bp, SARS Virus
tattgctgtagtgttaaaggactct

SEQ ID NO: 138850 - DNA, 25 bp, SARS Virus
attgctgtagtggtaaaggactctg

SEQ ID NO: 138851 - DNA, 25 bp, SARS Virus
ttgctgtagtgtgaaaggactctgt

SEQ ID NO: 138852 - DNA, 25 bp, SARS Virus
tgctgtagtgttgaaggactctgtt

SEQ ID NO: 138853 - DNA, 25 bp, SARS Virus
gctgtagtgttagaggactctgttt

SEQ ID NO: 138854 - DNA, 25 bp, SARS Virus
ctgtagtgttaagggactctgttta

SEQ ID NO: 138855 - DNA, 25 bp, SARS Virus
tgtagtgttaaaggactctgtttac

SEQ ID NO: 138856 - DNA, 25 bp, SARS Virus
gtagtgttaaaggactctgtttaca

SEQ ID NO: 138857 - DNA, 25 bp, SARS Virus
tagtgttaaagggctctgtttacat

SEQ ID NO: 138858 - DNA, 25 bp, SARS Virus
agtgttaaaggagtctgtttacata

SEQ ID NO: 138859 - DNA, 25 bp, SARS Virus
gtgttaaaggacgctgtttacataa

SEQ ID NO: 138860 - DNA, 25 bp, SARS Virus
tgttaaaggactgtgtttacataac

SEQ ID NO: 138861 - DNA, 25 bp, SARS Virus
gttaaaggactcggtttacataaca

SEQ ID NO: 138862 - DNA, 25 bp, SARS Virus
ttaaaggactctgtttacataacag

SEQ ID NO: 138863 - DNA, 25 bp, SARS Virus
taaaggactctggttacataacaga

SEQ ID NO: 138864 - DNA, 25 bp, SARS Virus
aaaggactctgtgtacataacagac

SEQ ID NO: 138865 - DNA, 25 bp, SARS Virus
aaggactctgttgacataacagaca

SEQ ID NO: 138866 - DNA, 25 bp, SARS Virus
aggactctgtttgcataacagacat

SEQ ID NO: 138867 - DNA, 25 bp, SARS Virus
ggactctgtttagataacagacatc

SEQ ID NO: 138868 - DNA, 25 bp, SARS Virus
gactctgtttacgtaacagacatca

SEQ ID NO: 138869 - DNA, 25 bp, SARS Virus
actctgtttacagaacagacatcat

SEQ ID NO: 138870 - DNA, 25 bp, SARS Virus
ctctgtttacatgacagacatcatt

SEQ ID NO: 138871 - DNA, 25 bp, SARS Virus
tctgtttacatagcagacatcatta

SEQ ID NO: 138872 - DNA, 25 bp, SARS Virus
ctgtttacataagagacatcattaa

SEQ ID NO: 138873 - DNA, 25 bp, SARS Virus
tgtttacataacggacatcattaat

SEQ ID NO: 138874 - DNA, 25 bp, SARS Virus
gtttacataacagacatcattaata

SEQ ID NO: 138875 - DNA, 25 bp, SARS Virus
tttacataacaggcatcattaataa

SEQ ID NO: 138876 - DNA, 25 bp, SARS Virus
ttacataacagagatcattaataaa

SEQ ID NO: 138877 - DNA, 25 bp, SARS Virus
tacataacagacgtcattaataaac

SEQ ID NO: 138878 - DNA, 25 bp, SARS Virus
acataacagacagcattaataaaca

SEQ ID NO: 138879 - DNA, 25 bp, SARS Virus
cataacagacatgattaataaacac

SEQ ID NO: 138880 - DNA, 25 bp, SARS Virus
ataacagacatcgttaataaacacc

SEQ ID NO: 138881 - DNA, 25 bp, SARS Virus
taacagacatcagtaataaacacct

SEQ ID NO: 138882 - DNA, 25 bp, SARS Virus
aacagacatcatgaataaacacctc

SEQ ID NO: 138883 - DNA, 25 bp, SARS Virus
acagacatcattgataaacacctct

SEQ ID NO: 138884 - DNA, 25 bp, SARS Virus
cagacatcattagtaaacacctctt

SEQ ID NO: 138885 - DNA, 25 bp, SARS Virus
agacatcattaagaaacacctcttt

SEQ ID NO: 138886 - DNA, 25 bp, SARS Virus
gacatcattaatgaacacctctttt

SEQ ID NO: 138887 - DNA, 25 bp, SARS Virus
acatcattaatagacacctcttttc

SEQ ID NO: 138888 - DNA, 25 bp, SARS Virus
catcattaataagcacctcttttct

SEQ ID NO: 138889 - DNA, 25 bp, SARS Virus
atcattaataaagacctcttttctt

SEQ ID NO: 138890 - DNA, 25 bp, SARS Virus
tcattaataaacgcctcttttcttc

SEQ ID NO: 138891 - DNA, 25 bp, SARS Virus
cattaataaacagctcttttcttca

SEQ ID NO: 138892 - DNA, 25 bp, SARS Virus
attaataaacacgtcttttcttcaa

SEQ ID NO: 138893 - DNA, 25 bp, SARS Virus
ttaataaacaccgcttttcttcaag

SEQ ID NO: 138894 - DNA, 25 bp, SARS Virus
taataaacacctgttttcttcaagg

SEQ ID NO: 138895 - DNA, 25 bp, SARS Virus
aataaacacctcgtttcttcaagga

SEQ ID NO: 138896 - DNA, 25 bp, SARS Virus
ataaacacctctgttcttcaaggag

SEQ ID NO: 138897 - DNA, 25 bp, SARS Virus
taaacacctcttgtcttcaaggaga

SEQ ID NO: 138898 - DNA, 25 bp, SARS Virus
aaacacctctttgcttcaaggagac

SEQ ID NO: 138899 - DNA, 25 bp, SARS Virus
aacacctcttttgttcaaggagaca

SEQ ID NO: 138900 - DNA, 25 bp, SARS Virus
acacctcttttcgtcaaggagacac

SEQ ID NO: 138901 - DNA, 25 bp, SARS Virus
cacctcttttctgcaaggagacaca

SEQ ID NO: 138902 - DNA, 25 bp, SARS Virus
acctcttttcttgaaggagacacat

SEQ ID NO: 138903 - DNA, 25 bp, SARS Virus
cctcttttcttcgaggagacacatt

SEQ ID NO: 138904 - DNA, 25 bp, SARS Virus
ctcttttcttcagggagacacatta

SEQ ID NO: 138905 - DNA, 25 bp, SARS Virus
tcttttcttcaaggagacacattat

SEQ ID NO: 138906 - DNA, 25 bp, SARS Virus
cttttcttcaaggagacacattatt

SEQ ID NO: 138907 - DNA, 25 bp, SARS Virus
ttttcttcaaggggacacattattt

SEQ ID NO: 138908 - DNA, 25 bp, SARS Virus
tttcttcaaggagacacattatttg

SEQ ID NO: 138909 - DNA, 25 bp, SARS Virus
ttcttcaaggaggcacattatttgg

SEQ ID NO: 138910 - DNA, 25 bp, SARS Virus
tcttcaaggagagacattatttggt

SEQ ID NO: 138911 - DNA, 25 bp, SARS Virus
cttcaaggagacgcattatttggtt

SEQ ID NO: 138912 - DNA, 25 bp, SARS Virus
ttcaaggagacagattatttggttc

SEQ ID NO: 138913 - DNA, 25 bp, SARS Virus
tcaaggagacacgttatttggttct

SEQ ID NO: 138914 - DNA, 25 bp, SARS Virus
caaggagacacagtatttggttctt

SEQ ID NO: 138915 - DNA, 25 bp, SARS Virus
aaggagacacatgatttggttcttc

SEQ ID NO: 138916 - DNA, 25 bp, SARS Virus
aggagacacattgtttggttcttca

SEQ ID NO: 138917 - DNA, 25 bp, SARS Virus
ggagacacattagttggttcttcac

SEQ ID NO: 138918 - DNA, 25 bp, SARS Virus
gagacacattatgtggttcttcacg

SEQ ID NO: 138919 - DNA, 25 bp, SARS Virus
agacacattattgggttcttcacgg

SEQ ID NO: 138920 - DNA, 25 bp, SARS Virus
gacacattatttggttcttcacggt

SEQ ID NO: 138921 - DNA, 25 bp, SARS Virus
acacattatttggttcttcacggta

SEQ ID NO: 138922 - DNA, 25 bp, SARS Virus
cacattatttgggtcttcacggtaa

SEQ ID NO: 138923 - DNA, 25 bp, SARS Virus
acattatttggtgcttcacggtaat

SEQ ID NO: 138924 - DNA, 25 bp, SARS Virus
cattatttggttgttcacggtaatt

SEQ ID NO: 138925 - DNA, 25 bp, SARS Virus
attatttggttcgtcacggtaattt

SEQ ID NO: 138926 - DNA, 25 bp, SARS Virus
ttatttggttctgcacggtaatttg

SEQ ID NO: 138927 - DNA, 25 bp, SARS Virus
tatttggttcttgacggtaatttgt

SEQ ID NO: 138928 - DNA, 25 bp, SARS Virus
atttggttcttcgcggtaatttgtg

SEQ ID NO: 138929 - DNA, 25 bp, SARS Virus
tttggttcttcagggtaatttgtgt

SEQ ID NO: 138930 - DNA, 25 bp, SARS Virus
ttggttcttcacggtaatttgtgtt

SEQ ID NO: 138931 - DNA, 25 bp, SARS Virus
tggttcttcacggtaatttgtgttt

SEQ ID NO: 138932 - DNA, 25 bp, SARS Virus
ggttcttcacgggaatttgtgtttt

SEQ ID NO: 138933 - DNA, 25 bp, SARS Virus
gttcttcacggtgatttgtgttttt

SEQ ID NO: 138934 - DNA, 25 bp, SARS Virus
ttcttcacggtagtttgtgtttttg

SEQ ID NO: 138935 - DNA, 25 bp, SARS Virus
tcttcacggtaagttgtgtttttgt

SEQ ID NO: 138936 - DNA, 25 bp, SARS Virus
cttcacggtaatgtgtgtttttgtg

SEQ ID NO: 138937 - DNA, 25 bp, SARS Virus
ttcacggtaattggtgtttttgtgg

SEQ ID NO: 138938 - DNA, 25 bp, SARS Virus
tcacggtaatttgtgtttttgtgga

SEQ ID NO: 138939 - DNA, 25 bp, SARS Virus
cacggtaatttgggtttttgtggaa

SEQ ID NO: 138940 - DNA, 25 bp, SARS Virus
acggtaatttgtgtttttgtggaag

SEQ ID NO: 138941 - DNA, 25 bp, SARS Virus
cggtaatttgtggttttgtggaagt

SEQ ID NO: 138942 - DNA, 25 bp, SARS Virus
ggtaatttgtgtgtttgtggaagtg

SEQ ID NO: 138943 - DNA, 25 bp, SARS Virus
gtaatttgtgttgttgtggaagtgc

SEQ ID NO: 138944 - DNA, 25 bp, SARS Virus
taatttgtgtttgtgtggaagtgct

SEQ ID NO: 138945 - DNA, 25 bp, SARS Virus
aatttgtgttttggtggaagtgctc

SEQ ID NO: 138946 - DNA, 25 bp, SARS Virus
atttgtgtttttgtggaagtgctcc

SEQ ID NO: 138947 - DNA, 25 bp, SARS Virus
tttgtgtttttggggaagtgctccc

SEQ ID NO: 138948 - DNA, 25 bp, SARS Virus
ttgtgtttttgtggaagtgctccct

SEQ ID NO: 138949 - DNA, 25 bp, SARS Virus
tgtgtttttgtggaagtgctccctt

SEQ ID NO: 138950 - DNA, 25 bp, SARS Virus
gtgtttttgtgggagtgctcccttc

SEQ ID NO: 138951 - DNA, 25 bp, SARS Virus
tgtttttgtggaggtgctcccttca

SEQ ID NO: 138952 - DNA, 25 bp, SARS Virus
gtttttgtggaagtgctcccttcat

SEQ ID NO: 138953 - DNA, 25 bp, SARS Virus
tttttgtggaagggctcccttcata

SEQ ID NO: 138954 - DNA, 25 bp, SARS Virus
ttttgtggaagtgctcccttcatac

SEQ ID NO: 138955 - DNA, 25 bp, SARS Virus
tttgtggaagtggtcccttcatacg

SEQ ID NO: 138956 - DNA, 25 bp, SARS Virus
ttgtggaagtgcgcccttcatacga

SEQ ID NO: 138957 - DNA, 25 bp, SARS Virus
tgtggaagtgctgccttcatacgaa

SEQ ID NO: 138958 - DNA, 25 bp, SARS Virus
gtggaagtgctcgcttcatacgaaa

SEQ ID NO: 138959 - DNA, 25 bp, SARS Virus
tggaagtgctccgttcatacgaaac

SEQ ID NO: 138960 - DNA, 25 bp, SARS Virus
ggaagtgctcccgtcatacgaaacg

SEQ ID NO: 138961 - DNA, 25 bp, SARS Virus
gaagtgctccctgcatacgaaacgg

SEQ ID NO: 138962 - DNA, 25 bp, SARS Virus
aagtgctcccttgatacgaaacgga

SEQ ID NO: 138963 - DNA, 25 bp, SARS Virus
agtgctcccttcgtacgaaacggaa

SEQ ID NO: 138964 - DNA, 25 bp, SARS Virus
gtgctcccttcagacgaaacggaag

SEQ ID NO: 138965 - DNA, 25 bp, SARS Virus
tgctcccttcatgcgaaacggaagt

SEQ ID NO: 138966 - DNA, 25 bp, SARS Virus
gctcccttcataggaaacggaagta

SEQ ID NO: 138967 - DNA, 25 bp, SARS Virus
ctcccttcatacgaaacggaagtac

SEQ ID NO: 138968 - DNA, 25 bp, SARS Virus
tcccttcatacggaacggaagtact

SEQ ID NO: 138969 - DNA, 25 bp, SARS Virus
cccttcatacgagacggaagtactg

SEQ ID NO: 138970 - DNA, 25 bp, SARS Virus
ccttcatacgaagcggaagtactgt

SEQ ID NO: 138971 - DNA, 25 bp, SARS Virus
cttcatacgaaagggaagtactgtt

SEQ ID NO: 138972 - DNA, 25 bp, SARS Virus
ttcatacgaaacggaagtactgttt

SEQ ID NO: 138973 - DNA, 25 bp, SARS Virus
tcatacgaaacggaagtactgttta

SEQ ID NO: 138974 - DNA, 25 bp, SARS Virus
catacgaaacgggagtactgtttaa

SEQ ID NO: 138975 - DNA, 25 bp, SARS Virus
atacgaaacggaggtactgtttaac

SEQ ID NO: 138976 - DNA, 25 bp, SARS Virus
tacgaaacggaagtactgtttaacg

SEQ ID NO: 138977 - DNA, 25 bp, SARS Virus
acgaaacggaaggactgtttaacga

SEQ ID NO: 138978 - DNA, 25 bp, SARS Virus
cgaaacggaagtgctgtttaacgac

SEQ ID NO: 138979 - DNA, 25 bp, SARS Virus
gaaacggaagtagtgtttaacgacc

SEQ ID NO: 138980 - DNA, 25 bp, SARS Virus
aaacggaagtacggtttaacgaccg

SEQ ID NO: 138981 - DNA, 25 bp, SARS Virus
aacggaagtactgtttaacgaccgc

SEQ ID NO: 138982 - DNA, 25 bp, SARS Virus
acggaagtactggttaacgaccgcg

SEQ ID NO: 138983 - DNA, 25 bp, SARS Virus
cggaagtactgtgtaacgaccgcga

SEQ ID NO: 138984 - DNA, 25 bp, SARS Virus
ggaagtactgttgaacgaccgcgac

SEQ ID NO: 138985 - DNA, 25 bp, SARS Virus
gaagtactgtttgacgaccgcgaca

SEQ ID NO: 138986 - DNA, 25 bp, SARS Virus
aagtactgtttagcgaccgcgacac

SEQ ID NO: 138987 - DNA, 25 bp, SARS Virus
agtactgtttaaggaccgcgacacc

SEQ ID NO: 138988 - DNA, 25 bp, SARS Virus
gtactgtttaacgaccgcgacacca

SEQ ID NO: 138989 - DNA, 25 bp, SARS Virus
tactgtttaacggccgcgacaccac

SEQ ID NO: 138990 - DNA, 25 bp, SARS Virus
actgtttaacgagcgcgacaccact

SEQ ID NO: 138991 - DNA, 25 bp, SARS Virus
ctgtttaacgacggcgacaccactt

SEQ ID NO: 138992 - DNA, 25 bp, SARS Virus
tgtttaacgaccgcgacaccacttc

SEQ ID NO: 138993 - DNA, 25 bp, SARS Virus
gtttaacgaccgggacaccacttca

SEQ ID NO: 138994 - DNA, 25 bp, SARS Virus
tttaacgaccgcgacaccacttcaa

SEQ ID NO: 138995 - DNA, 25 bp, SARS Virus
ttaacgaccgcggcaccacttcaag

SEQ ID NO: 138996 - DNA, 25 bp, SARS Virus
taacgaccgcgagaccacttcaagg

SEQ ID NO: 138997 - DNA, 25 bp, SARS Virus
aacgaccgcgacgccacttcaagga

SEQ ID NO: 138998 - DNA, 25 bp, SARS Virus
acgaccgcgacagcacttcaaggag

SEQ ID NO: 138999 - DNA, 25 bp, SARS Virus
cgaccgcgacacgacttcaaggaga

SEQ ID NO: 139000 - DNA, 25 bp, SARS Virus
gaccgcgacaccgcttcaaggagag

SEQ ID NO: 139001 - DNA, 25 bp, SARS Virus
accgcgacaccagttcaaggagagg

SEQ ID NO: 139002 - DNA, 25 bp, SARS Virus
ccgcgacaccacgtcaaggagagga

SEQ ID NO: 139003 - DNA, 25 bp, SARS Virus
cgcgacaccactgcaaggagaggac

SEQ ID NO: 139004 - DNA, 25 bp, SARS Virus
gcgacaccacttgaaggagaggacc

SEQ ID NO: 139005 - DNA, 25 bp, SARS Virus
cgacaccacttcgaggagaggaccc

SEQ ID NO: 139006 - DNA, 25 bp, SARS Virus
gacaccacttcagggagaggaccct

SEQ ID NO: 139007 - DNA, 25 bp, SARS Virus
acaccacttcaaggagaggacccta

SEQ ID NO: 139008 - DNA, 25 bp, SARS Virus
caccacttcaaggagaggaccctac

SEQ ID NO: 139009 - DNA, 25 bp, SARS Virus
accacttcaaggggaggaccctacc

SEQ ID NO: 139010 - DNA, 25 bp, SARS Virus
ccacttcaaggagaggaccctaccg

SEQ ID NO: 139011 - DNA, 25 bp, SARS Virus
cacttcaaggaggggaccctaccgt

SEQ ID NO: 139012 - DNA, 25 bp, SARS Virus
acttcaaggagaggaccctaccgtg

SEQ ID NO: 139013 - DNA, 25 bp, SARS Virus
cttcaaggagaggaccctaccgtgt

SEQ ID NO: 139014 - DNA, 25 bp, SARS Virus
ttcaaggagagggccctaccgtgta

SEQ ID NO: 139015 - DNA, 25 bp, SARS Virus
tcaaggagaggagcctaccgtgtat

SEQ ID NO: 139016 - DNA, 25 bp, SARS Virus
caaggagaggacgctaccgtgtatg

SEQ ID NO: 139017 - DNA, 25 bp, SARS Virus
aaggagaggaccgtaccgtgtatgc

SEQ ID NO: 139018 - DNA, 25 bp, SARS Virus
aggagaggacccgaccgtgtatgca

SEQ ID NO: 139019 - DNA, 25 bp, SARS Virus
ggagaggaccctgccgtgtatgcac

SEQ ID NO: 139020 - DNA, 25 bp, SARS Virus
gagaggaccctagcgtgtatgcact

SEQ ID NO: 139021 - DNA, 25 bp, SARS Virus
agaggaccctacggtgtatgcactg

SEQ ID NO: 139022 - DNA, 25 bp, SARS Virus
gaggaccctaccgtgtatgcactgt

SEQ ID NO: 139023 - DNA, 25 bp, SARS Virus
aggaccctaccgggtatgcactgta

SEQ ID NO: 139024 - DNA, 25 bp, SARS Virus
ggaccctaccgtgtatgcactgtac

SEQ ID NO: 139025 - DNA, 25 bp, SARS Virus
gaccctaccgtggatgcactgtaca

SEQ ID NO: 139026 - DNA, 25 bp, SARS Virus
accctaccgtgtgtgcactgtacat

SEQ ID NO: 139027 - DNA, 25 bp, SARS Virus
ccctaccgtgtaggcactgtacatc

SEQ ID NO: 139028 - DNA, 25 bp, SARS Virus
cctaccgtgtatgcactgtacatcc

SEQ ID NO: 139029 - DNA, 25 bp, SARS Virus
ctaccgtgtatggactgtacatcct

SEQ ID NO: 139030 - DNA, 25 bp, SARS Virus
taccgtgtatgcgctgtacatcctt

SEQ ID NO: 139031 - DNA, 25 bp, SARS Virus
accgtgtatgcagtgtacatccttc

SEQ ID NO: 139032 - DNA, 25 bp, SARS Virus
ccgtgtatgcacggtacatccttct

SEQ ID NO: 139033 - DNA, 25 bp, SARS Virus
cgtgtatgcactgtacatccttctg

SEQ ID NO: 139034 - DNA, 25 bp, SARS Virus
gtgtatgcactggacatccttctgt

SEQ ID NO: 139035 - DNA, 25 bp, SARS Virus
tgtatgcactgtgcatccttctgtt

SEQ ID NO: 139036 - DNA, 25 bp, SARS Virus
gtatgcactgtagatccttctgttg

SEQ ID NO: 139037 - DNA, 25 bp, SARS Virus
tatgcactgtacgtccttctgttgt

SEQ ID NO: 139038 - DNA, 25 bp, SARS Virus
atgcactgtacagccttctgttgtg

SEQ ID NO: 139039 - DNA, 25 bp, SARS Virus
tgcactgtacatgcttctgttgtgg

SEQ ID NO: 139040 - DNA, 25 bp, SARS Virus
gcactgtacatcgttctgttgtggt

SEQ ID NO: 139041 - DNA, 25 bp, SARS Virus
cactgtacatccgtctgttgtggta

SEQ ID NO: 139042 - DNA, 25 bp, SARS Virus
actgtacatcctgctgttgtggtac

SEQ ID NO: 139043 - DNA, 25 bp, SARS Virus
ctgtacatccttgtgttgtggtacg

SEQ ID NO: 139044 - DNA, 25 bp, SARS Virus
tgtacatccttcggttgtggtacgc

SEQ ID NO: 139045 - DNA, 25 bp, SARS Virus
gtacatccttctgttgtggtacgcc

SEQ ID NO: 139046 - DNA, 25 bp, SARS Virus
tacatccttctggtgtggtacgccc

SEQ ID NO: 139047 - DNA, 25 bp, SARS Virus
acatccttctgtggtggtacgcccc

SEQ ID NO: 139048 - DNA, 25 bp, SARS Virus
catccttctgttgtggtacgccccg

SEQ ID NO: 139049 - DNA, 25 bp, SARS Virus
atccttctgttggggtacgccccga

SEQ ID NO: 139050 - DNA, 25 bp, SARS Virus
tccttctgttgtggtacgccccgac

SEQ ID NO: 139051 - DNA, 25 bp, SARS Virus
ccttctgttgtggtacgccccgacg

SEQ ID NO: 139052 - DNA, 25 bp, SARS Virus
cttctgttgtgggacgccccgacga

SEQ ID NO: 139053 - DNA, 25 bp, SARS Virus
ttctgttgtggtgcgccccgacgaa

SEQ ID NO: 139054 - DNA, 25 bp, SARS Virus
tctgttgtggtaggccccgacgaac

SEQ ID NO: 139055 - DNA, 25 bp, SARS Virus
ctgttgtggtacgccccgacgaaca

SEQ ID NO: 139056 - DNA, 25 bp, SARS Virus
tgttgtggtacggcccgacgaacac

SEQ ID NO: 139057 - DNA, 25 bp, SARS Virus
gttgtggtacgcgccgacgaacacc

SEQ ID NO: 139058 - DNA, 25 bp, SARS Virus
ttgtggtacgccgcgacgaacaccc

SEQ ID NO: 139059 - DNA, 25 bp, SARS Virus
tgtggtacgcccggacgaacaccct

SEQ ID NO: 139060 - DNA, 25 bp, SARS Virus
gtggtacgccccgacgaacaccctt

SEQ ID NO: 139061 - DNA, 25 bp, SARS Virus
tggtacgccccggcgaacacccttc

SEQ ID NO: 139062 - DNA, 25 bp, SARS Virus
ggtacgccccgaggaacacccttcc

SEQ ID NO: 139063 - DNA, 25 bp, SARS Virus
gtacgccccgacgaacacccttcct

SEQ ID NO: 139064 - DNA, 25 bp, SARS Virus
tacgccccgacggacacccttcctg

SEQ ID NO: 139065 - DNA, 25 bp, SARS Virus
acgccccgacgagcacccttcctgt

SEQ ID NO: 139066 - DNA, 25 bp, SARS Virus
cgccccgacgaagacccttcctgta

SEQ ID NO: 139067 - DNA, 25 bp, SARS Virus
gccccgacgaacgcccttcctgtat

SEQ ID NO: 139068 - DNA, 25 bp, SARS Virus
ccccgacgaacagccttcctgtatt

SEQ ID NO: 139069 - DNA, 25 bp, SARS Virus
cccgacgaacacgcttcctgtattc

SEQ ID NO: 139070 - DNA, 25 bp, SARS Virus
ccgacgaacaccgttcctgtattcc

SEQ ID NO: 139071 - DNA, 25 bp, SARS Virus
cgacgaacacccgtcctgtattcca

SEQ ID NO: 139072 - DNA, 25 bp, SARS Virus
gacgaacaccctgcctgtattccac

SEQ ID NO: 139073 - DNA, 25 bp, SARS Virus
acgaacacccttgctgtattccacc

SEQ ID NO: 139074 - DNA, 25 bp, SARS Virus
cgaacacccttcgtgtattccacca

SEQ ID NO: 139075 - DNA, 25 bp, SARS Virus
gaacacccttccggtattccaccat

SEQ ID NO: 139076 - DNA, 25 bp, SARS Virus
aacacccttcctgtattccaccatc

SEQ ID NO: 139077 - DNA, 25 bp, SARS Virus
acacccttcctggattccaccatcg

SEQ ID NO: 139078 - DNA, 25 bp, SARS Virus
cacccttcctgtgttccaccatcgg

SEQ ID NO: 139079 - DNA, 25 bp, SARS Virus
acccttcctgtagtccaccatcggg

SEQ ID NO: 139080 - DNA, 25 bp, SARS Virus
cccttcctgtatgccaccatcggga

SEQ ID NO: 139081 - DNA, 25 bp, SARS Virus
ccttcctgtattgcaccatcgggaa

SEQ ID NO: 139082 - DNA, 25 bp, SARS Virus
cttcctgtattcgaccatcgggaaa

SEQ ID NO: 139083 - DNA, 25 bp, SARS Virus
ttcctgtattccgccatcgggaaag

SEQ ID NO: 139084 - DNA, 25 bp, SARS Virus
tcctgtattccagcatcgggaaagg

SEQ ID NO: 139085 - DNA, 25 bp, SARS Virus
cctgtattccacgatcgggaaaggt

SEQ ID NO: 139086 - DNA, 25 bp, SARS Virus
ctgtattccaccgtcgggaaaggtg

SEQ ID NO: 139087 - DNA, 25 bp, SARS Virus
tgtattccaccagcgggaaaggtgt

SEQ ID NO: 139088 - DNA, 25 bp, SARS Virus
gtattccaccatggggaaaggtgtt

SEQ ID NO: 139089 - DNA, 25 bp, SARS Virus
tattccaccatcgggaaaggtgttt

SEQ ID NO: 139090 - DNA, 25 bp, SARS Virus
attccaccatcgggaaaggtgtttt

SEQ ID NO: 139091 - DNA, 25 bp, SARS Virus
ttccaccatcgggaaaggtgttttc

SEQ ID NO: 139092 - DNA, 25 bp, SARS Virus
tccaccatcggggaaggtgttttca

SEQ ID NO: 139093 - DNA, 25 bp, SARS Virus
ccaccatcgggagaggtgttttcag

SEQ ID NO: 139094 - DNA, 25 bp, SARS Virus
caccatcgggaagggtgttttcagt

SEQ ID NO: 139095 - DNA, 25 bp, SARS Virus
accatcgggaaaggtgttttcagtt

SEQ ID NO: 139096 - DNA, 25 bp, SARS Virus
ccatcgggaaaggtgttttcagttg

SEQ ID NO: 139097 - DNA, 25 bp, SARS Virus
catcgggaaaggggttttcagttga

SEQ ID NO: 139098 - DNA, 25 bp, SARS Virus
atcgggaaaggtgttttcagttgag

SEQ ID NO: 139099 - DNA, 25 bp, SARS Virus
tcgggaaaggtggtttcagttgaga

SEQ ID NO: 139100 - DNA, 25 bp, SARS Virus
cgggaaaggtgtgttcagttgagaa

SEQ ID NO: 139101 - DNA, 25 bp, SARS Virus
gggaaaggtgttgtcagttgagaaa

SEQ ID NO: 139102 - DNA, 25 bp, SARS Virus
ggaaaggtgtttgcagttgagaaaa

SEQ ID NO: 139103 - DNA, 25 bp, SARS Virus
gaaaggtgttttgagttgagaaaaa

SEQ ID NO: 139104 - DNA, 25 bp, SARS Virus
aaaggtgttttcggttgagaaaaac

SEQ ID NO: 139105 - DNA, 25 bp, SARS Virus
aaggtgttttcagttgagaaaaact

SEQ ID NO: 139106 - DNA, 25 bp, SARS Virus
aggtgttttcaggtgagaaaaacta

SEQ ID NO: 139107 - DNA, 25 bp, SARS Virus
ggtgttttcagtggagaaaaactaa

SEQ ID NO: 139108 - DNA, 25 bp, SARS Virus
gtgttttcagttgagaaaaactaac

SEQ ID NO: 139109 - DNA, 25 bp, SARS Virus
tgttttcagttgggaaaaactaaca

SEQ ID NO: 139110 - DNA, 25 bp, SARS Virus
gttttcagttgagaaaaactaacag

SEQ ID NO: 139111 - DNA, 25 bp, SARS Virus
ttttcagttgaggaaaactaacagg

SEQ ID NO: 139112 - DNA, 25 bp, SARS Virus
tttcagttgagagaaactaacaggt

SEQ ID NO: 139113 - DNA, 25 bp, SARS Virus
aagggttaagaatttccagttactc

SEQ ID NO: 139114 - DNA, 25 bp, SARS Virus
agggttaagaacttccagttactca

SEQ ID NO: 139115 - DNA, 25 bp, SARS Virus
gggttaagaacttccagttactcac

SEQ ID NO: 139116 - DNA, 25 bp, SARS Virus
ggttaagaactttcagttactcact

SEQ ID NO: 139117 - DNA, 25 bp, SARS Virus
gttaagaacttctagttactcacta

SEQ ID NO: 139118 - DNA, 25 bp, SARS Virus
ttaagaacttcctgttactcactaa

SEQ ID NO: 139119 - DNA, 25 bp, SARS Virus
taagaacttccatttactcactaag

SEQ ID NO: 139120 - DNA, 25 bp, SARS Virus
aagaacttccagttactcactaagt

SEQ ID NO: 139121 - DNA, 25 bp, SARS Virus
agaacttccagttactcactaagta

SEQ ID NO: 139122 - DNA, 25 bp, SARS Virus
gaacttccagtttctcactaagtaa

SEQ ID NO: 139123 - DNA, 25 bp, SARS Virus
aacttccagttattcactaagtaaa

SEQ ID NO: 139124 - DNA, 25 bp, SARS Virus
acttccagttactcactaagtaaat

SEQ ID NO: 139125 - DNA, 25 bp, SARS Virus
cttccagttacttactaagtaaatt

SEQ ID NO: 139126 - DNA, 25 bp, SARS Virus
ttccagttactctctaagtaaattt

SEQ ID NO: 139127 - DNA, 25 bp, SARS Virus
tccagttactcattaagtaaattta

SEQ ID NO: 139128 - DNA, 25 bp, SARS Virus
ccagttactcactaagtaaatttaa

SEQ ID NO: 139129 - DNA, 25 bp, SARS Virus
cagttactcacttagtaaatttaaa

SEQ ID NO: 139130 - DNA, 25 bp, SARS Virus
agttactcactatgtaaatttaaaa

SEQ ID NO: 139131 - DNA, 25 bp, SARS Virus
gttactcactaattaaatttaaaaa

SEQ ID NO: 139132 - DNA, 25 bp, SARS Virus
ttactcactaagtaaatttaaaaat

SEQ ID NO: 139133 - DNA, 25 bp, SARS Virus
tactcactaagttaatttaaaaatc

SEQ ID NO: 139134 - DNA, 25 bp, SARS Virus
actcactaagtatatttaaaaatcg

SEQ ID NO: 139135 - DNA, 25 bp, SARS Virus
ctcactaagtaattttaaaaatcgc

SEQ ID NO: 139136 - DNA, 25 bp, SARS Virus
tcactaagtaaatttaaaaatcgct

SEQ ID NO: 139137 - DNA, 25 bp, SARS Virus
cactaagtaaatttaaaaatcgctg

SEQ ID NO: 139138 - DNA, 25 bp, SARS Virus
actaagtaaatttaaaaatcgctgg

SEQ ID NO: 139139 - DNA, 25 bp, SARS Virus
ctaagtaaattttaaaatcgctgga

SEQ ID NO: 139140 - DNA, 25 bp, SARS Virus
taagtaaatttataaatcgctggag

SEQ ID NO: 139141 - DNA, 25 bp, SARS Virus
aagtaaatttaataatcgctggagt

SEQ ID NO: 139142 - DNA, 25 bp, SARS Virus
agtaaatttaaatatcgctggagta

SEQ ID NO: 139143 - DNA, 25 bp, SARS Virus
gtaaatttaaaattcgctggagtaa

SEQ ID NO: 139144 - DNA, 25 bp, SARS Virus
taaatttaaaaatcgctggagtaac

SEQ ID NO: 139145 - DNA, 25 bp, SARS Virus
aaatttaaaaattgctggagtaact

SEQ ID NO: 139146 - DNA, 25 bp, SARS Virus
aatttaaaaatctctggagtaactc

SEQ ID NO: 139147 - DNA, 25 bp, SARS Virus
atttaaaaatcgttggagtaactcc

SEQ ID NO: 139148 - DNA, 25 bp, SARS Virus
tttaaaaatcgctggagtaactccg

SEQ ID NO: 139149 - DNA, 25 bp, SARS Virus
ttaaaaatcgcttgagtaactccgc

SEQ ID NO: 139150 - DNA, 25 bp, SARS Virus
taaaaatcgctgtagtaactccgcc

SEQ ID NO: 139151 - DNA, 25 bp, SARS Virus
aaaaatcgctggtgtaactccgcca

SEQ ID NO: 139152 - DNA, 25 bp, SARS Virus
aaaatcgctggattaactccgccag

SEQ ID NO: 139153 - DNA, 25 bp, SARS Virus
aaatcgctggagtaactccgccagt

SEQ ID NO: 139154 - DNA, 25 bp, SARS Virus
aatcgctggagttactccgccagtt

SEQ ID NO: 139155 - DNA, 25 bp, SARS Virus
atcgctggagtatctccgccagtta

SEQ ID NO: 139156 - DNA, 25 bp, SARS Virus
tcgctggagtaattccgccagttaa

SEQ ID NO: 139157 - DNA, 25 bp, SARS Virus
cgctggagtaactccgccagttaaa

SEQ ID NO: 139158 - DNA, 25 bp, SARS Virus
gctggagtaacttcgccagttaaag

SEQ ID NO: 139159 - DNA, 25 bp, SARS Virus
ctggagtaactctgccagttaaaga

SEQ ID NO: 139160 - DNA, 25 bp, SARS Virus
tggagtaactcctccagttaaagaa

SEQ ID NO: 139161 - DNA, 25 bp, SARS Virus
ggagtaactccgtcagttaaagaaa

SEQ ID NO: 139162 - DNA, 25 bp, SARS Virus
gagtaactccgctagttaaagaaaa

SEQ ID NO: 139163 - DNA, 25 bp, SARS Virus
agtaactccgcctgttaaagaaaaa

SEQ ID NO: 139164 - DNA, 25 bp, SARS Virus
gtaactccgccatttaaagaaaaac

SEQ ID NO: 139165 - DNA, 25 bp, SARS Virus
taactccgccagttaaagaaaaact

SEQ ID NO: 139166 - DNA, 25 bp, SARS Virus
aactccgccagttaaagaaaaactt

SEQ ID NO: 139167 - DNA, 25 bp, SARS Virus
actccgccagtttaagaaaaactta

SEQ ID NO: 139168 - DNA, 25 bp, SARS Virus
ctccgccagttatagaaaaacttac

SEQ ID NO: 139169 - DNA, 25 bp, SARS Virus
tccgccagttaatgaaaaacttaca

SEQ ID NO: 139170 - DNA, 25 bp, SARS Virus
ccgccagttaaataaaaacttacaa

SEQ ID NO: 139171 - DNA, 25 bp, SARS Virus
cgccagttaaagtaaaacttacaac

SEQ ID NO: 139172 - DNA, 25 bp, SARS Virus
gccagttaaagataaacttacaact

SEQ ID NO: 139173 - DNA, 25 bp, SARS Virus
ccagttaaagaataacttacaactg

SEQ ID NO: 139174 - DNA, 25 bp, SARS Virus
cagttaaagaaatacttacaactgc

SEQ ID NO: 139175 - DNA, 25 bp, SARS Virus
agttaaagaaaatcttacaactgct

SEQ ID NO: 139176 - DNA, 25 bp, SARS Virus
gttaaagaaaaatttacaactgctg

SEQ ID NO: 139177 - DNA, 25 bp, SARS Virus
ttaaagaaaaacttacaactgctgt

SEQ ID NO: 139178 - DNA, 25 bp, SARS Virus
taaagaaaaacttacaactgctgtc

SEQ ID NO: 139179 - DNA, 25 bp, SARS Virus
aaagaaaaactttcaactgctgtct

SEQ ID NO: 139180 - DNA, 25 bp, SARS Virus
aagaaaaacttataactgctgtctt

SEQ ID NO: 139181 - DNA, 25 bp, SARS Virus
agaaaaacttactactgctgtcttc

SEQ ID NO: 139182 - DNA, 25 bp, SARS Virus
gaaaaacttacatctgctgtcttcg

SEQ ID NO: 139183 - DNA, 25 bp, SARS Virus
aaaaacttacaattgctgtcttcgc

SEQ ID NO: 139184 - DNA, 25 bp, SARS Virus
aaaacttacaactgctgtcttcgca

SEQ ID NO: 139185 - DNA, 25 bp, SARS Virus
aaacttacaacttctgtcttcgcaa

SEQ ID NO: 139186 - DNA, 25 bp, SARS Virus
aacttacaactgttgtcttcgcaat

SEQ ID NO: 139187 - DNA, 25 bp, SARS Virus
acttacaactgctgtcttcgcaatt

SEQ ID NO: 139188 - DNA, 25 bp, SARS Virus
cttacaactgctttcttcgcaatta

SEQ ID NO: 139189 - DNA, 25 bp, SARS Virus
ttacaactgctgtcttcgcaattac

SEQ ID NO: 139190 - DNA, 25 bp, SARS Virus
tacaactgctgttttcgcaattacg

SEQ ID NO: 139191 - DNA, 25 bp, SARS Virus
acaactgctgtcttcgcaattacgg

SEQ ID NO: 139192 - DNA, 25 bp, SARS Virus
caactgctgtcttcgcaattacgga

SEQ ID NO: 139193 - DNA, 25 bp, SARS Virus
aactgctgtctttgcaattacggac

SEQ ID NO: 139194 - DNA, 25 bp, SARS Virus
actgctgtcttctcaattacggact

SEQ ID NO: 139195 - DNA, 25 bp, SARS Virus
ctgctgtcttcgtaattacggactt

SEQ ID NO: 139196 - DNA, 25 bp, SARS Virus
tgctgtcttcgctattacggacttt

SEQ ID NO: 139197 - DNA, 25 bp, SARS Virus
gctgtcttcgcatttacggacttta

SEQ ID NO: 139198 - DNA, 25 bp, SARS Virus
ctgtcttcgcaattacggactttac

SEQ ID NO: 139199 - DNA, 25 bp, SARS Virus
tgtcttcgcaattacggactttaca

SEQ ID NO: 139200 - DNA, 25 bp, SARS Virus
gtcttcgcaatttcggactttacag

SEQ ID NO: 139201 - DNA, 25 bp, SARS Virus
tcttcgcaattatggactttacagc

SEQ ID NO: 139202 - DNA, 25 bp, SARS Virus
cttcgcaattactgactttacagcg

SEQ ID NO: 139203 - DNA, 25 bp, SARS Virus
ttcgcaattacgtactttacagcgg

SEQ ID NO: 139204 - DNA, 25 bp, SARS Virus
tcgcaattacggtctttacagcggt

SEQ ID NO: 139205 - DNA, 25 bp, SARS Virus
cgcaattacggattttacagcggtt

SEQ ID NO: 139206 - DNA, 25 bp, SARS Virus
gcaattacggactttacagcggttc

SEQ ID NO: 139207 - DNA, 25 bp, SARS Virus
caattacggactttacagcggttct

SEQ ID NO: 139208 - DNA, 25 bp, SARS Virus
aattacggactttacagcggttcta

SEQ ID NO: 139209 - DNA, 25 bp, SARS Virus
attacggacttttcagcggttctag

SEQ ID NO: 139210 - DNA, 25 bp, SARS Virus
ttacggactttatagcggttctagt

SEQ ID NO: 139211 - DNA, 25 bp, SARS Virus
tacggactttactgcggttctagtt

SEQ ID NO: 139212 - DNA, 25 bp, SARS Virus
acggactttacatcggttctagttg

SEQ ID NO: 139213 - DNA, 25 bp, SARS Virus
cggactttacagtggttctagttgt

SEQ ID NO: 139214 - DNA, 25 bp, SARS Virus
ggactttacagctgttctagttgta

SEQ ID NO: 139215 - DNA, 25 bp, SARS Virus
gactttacagcgtttctagttgtag

SEQ ID NO: 139216 - DNA, 25 bp, SARS Virus
actttacagcggttctagttgtaga

SEQ ID NO: 139217 - DNA, 25 bp, SARS Virus
ctttacagcggttctagttgtagac

SEQ ID NO: 139218 - DNA, 25 bp, SARS Virus
tttacagcggttttagttgtagacc

SEQ ID NO: 139219 - DNA, 25 bp, SARS Virus
ttacagcggttctagttgtagacca

SEQ ID NO: 139220 - DNA, 25 bp, SARS Virus
tacagcggttcttgttgtagaccac

SEQ ID NO: 139221 - DNA, 25 bp, SARS Virus
acagcggttctatttgtagaccact

SEQ ID NO: 139222 - DNA, 25 bp, SARS Virus
cagcggttctagttgtagaccacta

SEQ ID NO: 139223 - DNA, 25 bp, SARS Virus
agcggttctagttgtagaccactac

SEQ ID NO: 139224 - DNA, 25 bp, SARS Virus
gcggttctagttttagaccactaca

SEQ ID NO: 139225 - DNA, 25 bp, SARS Virus
cggttctagttgtagaccactacat

SEQ ID NO: 139226 - DNA, 25 bp, SARS Virus
ggttctagttgttgaccactacata

SEQ ID NO: 139227 - DNA, 25 bp, SARS Virus
gttctagttgtataccactacatac

SEQ ID NO: 139228 - DNA, 25 bp, SARS Virus
ttctagttgtagtccactacatact

SEQ ID NO: 139229 - DNA, 25 bp, SARS Virus
tctagttgtagatcactacatacta

SEQ ID NO: 139230 - DNA, 25 bp, SARS Virus
ctagttgtagactactacatactaa

SEQ ID NO: 139231 - DNA, 25 bp, SARS Virus
tagttgtagacctctacatactaaa

SEQ ID NO: 139232 - DNA, 25 bp, SARS Virus
agttgtagaccattacatactaaaa

SEQ ID NO: 139233 - DNA, 25 bp, SARS Virus
gttgtagaccactacatactaaaaa

SEQ ID NO: 139234 - DNA, 25 bp, SARS Virus
ttgtagaccacttcatactaaaaac

SEQ ID NO: 139235 - DNA, 25 bp, SARS Virus
tgtagaccactatatactaaaaact

SEQ ID NO: 139236 - DNA, 25 bp, SARS Virus
gtagaccactacttactaaaaactt

SEQ ID NO: 139237 - DNA, 25 bp, SARS Virus
tagaccactacatactaaaaacttc

SEQ ID NO: 139238 - DNA, 25 bp, SARS Virus
agaccactacattctaaaaacttca

SEQ ID NO: 139239 - DNA, 25 bp, SARS Virus
gaccactacatattaaaaacttcat

SEQ ID NO: 139240 - DNA, 25 bp, SARS Virus
accactacatactaaaaacttcatg

SEQ ID NO: 139241 - DNA, 25 bp, SARS Virus
ccactacatacttaaaacttcatga

SEQ ID NO: 139242 - DNA, 25 bp, SARS Virus
cactacatactataaacttcatgaa

SEQ ID NO: 139243 - DNA, 25 bp, SARS Virus
actacatactaataacttcatgaac

SEQ ID NO: 139244 - DNA, 25 bp, SARS Virus
ctacatactaaatacttcatgaaca

SEQ ID NO: 139245 - DNA, 25 bp, SARS Virus
tacatactaaaatcttcatgaacag

SEQ ID NO: 139246 - DNA, 25 bp, SARS Virus
acatactaaaaatttcatgaacagg

SEQ ID NO: 139247 - DNA, 25 bp, SARS Virus
catactaaaaacttcatgaacaggt

SEQ ID NO: 139248 - DNA, 25 bp, SARS Virus
atactaaaaacttcatgaacaggtc

SEQ ID NO: 139249 - DNA, 25 bp, SARS Virus
tactaaaaactttatgaacaggtcg

SEQ ID NO: 139250 - DNA, 25 bp, SARS Virus
actaaaaacttcttgaacaggtcga

SEQ ID NO: 139251 - DNA, 25 bp, SARS Virus
ctaaaaacttcatgaacaggtcgag

SEQ ID NO: 139252 - DNA, 25 bp, SARS Virus
taaaaacttcattaacaggtcgaga

SEQ ID NO: 139253 - DNA, 25 bp, SARS Virus
aaaaacttcatgtacaggtcgagaa

SEQ ID NO: 139254 - DNA, 25 bp, SARS Virus
aaaacttcatgatcaggtcgagaag

SEQ ID NO: 139255 - DNA, 25 bp, SARS Virus
aaacttcatgaataggtcgagaaga

SEQ ID NO: 139256 - DNA, 25 bp, SARS Virus
aacttcatgaactggtcgagaagaa

SEQ ID NO: 139257 - DNA, 25 bp, SARS Virus
acttcatgaacatgtcgagaagaaa

SEQ ID NO: 139258 - DNA, 25 bp, SARS Virus
cttcatgaacagttcgagaagaaac

SEQ ID NO: 139259 - DNA, 25 bp, SARS Virus
ttcatgaacaggtcgagaagaaact

SEQ ID NO: 139260 - DNA, 25 bp, SARS Virus
tcatgaacaggttgagaagaaactt

SEQ ID NO: 139261 - DNA, 25 bp, SARS Virus
catgaacaggtctagaagaaactta

SEQ ID NO: 139262 - DNA, 25 bp, SARS Virus
atgaacaggtcgtgaagaaacttac

SEQ ID NO: 139263 - DNA, 25 bp, SARS Virus
tgaacaggtcgataagaaacttact

SEQ ID NO: 139264 - DNA, 25 bp, SARS Virus
gaacaggtcgagtagaaacttactc

SEQ ID NO: 139265 - DNA, 25 bp, SARS Virus
aacaggtcgagatgaaacttactca

SEQ ID NO: 139266 - DNA, 25 bp, SARS Virus
acaggtcgagaataaacttactcag

SEQ ID NO: 139267 - DNA, 25 bp, SARS Virus
caggtcgagaagtaacttactcagt

SEQ ID NO: 139268 - DNA, 25 bp, SARS Virus
aggtcgagaagatacttactcagtt

SEQ ID NO: 139269 - DNA, 25 bp, SARS Virus
ggtcgagaagaatcttactcagttc

SEQ ID NO: 139270 - DNA, 25 bp, SARS Virus
gtcgagaagaaatttactcagttcg

SEQ ID NO: 139271 - DNA, 25 bp, SARS Virus
tcgagaagaaacttactcagttcga

SEQ ID NO: 139272 - DNA, 25 bp, SARS Virus
cgagaagaaacttactcagttcgag

SEQ ID NO: 139273 - DNA, 25 bp, SARS Virus
gagaagaaactttctcagttcgagt

SEQ ID NO: 139274 - DNA, 25 bp, SARS Virus
agaagaaacttattcagttcgagtc

SEQ ID NO: 139275 - DNA, 25 bp, SARS Virus
gaagaaacttactcagttcgagtcc

SEQ ID NO: 139276 - DNA, 25 bp, SARS Virus
aagaaacttacttagttcgagtcca

SEQ ID NO: 139277 - DNA, 25 bp, SARS Virus
agaaacttactctgttcgagtccaa

SEQ ID NO: 139278 - DNA, 25 bp, SARS Virus
gaaacttactcatttcgagtccaac

SEQ ID NO: 139279 - DNA, 25 bp, SARS Virus
aaacttactcagttcgagtccaacg

SEQ ID NO: 139280 - DNA, 25 bp, SARS Virus
aacttactcagttcgagtccaacgt

SEQ ID NO: 139281 - DNA, 25 bp, SARS Virus
acttactcagtttgagtccaacgtc

SEQ ID NO: 139282 - DNA, 25 bp, SARS Virus
cttactcagttctagtccaacgtct

SEQ ID NO: 139283 - DNA, 25 bp, SARS Virus
ttactcagttcgtgtccaacgtctc

SEQ ID NO: 139284 - DNA, 25 bp, SARS Virus
tactcagttcgattccaacgtctcc

SEQ ID NO: 139285 - DNA, 25 bp, SARS Virus
actcagttcgagtccaacgtctcct

SEQ ID NO: 139286 - DNA, 25 bp, SARS Virus
ctcagttcgagttcaacgtctccta

SEQ ID NO: 139287 - DNA, 25 bp, SARS Virus
tcagttcgagtctaacgtctcctag

SEQ ID NO: 139288 - DNA, 25 bp, SARS Virus
cagttcgagtcctacgtctcctagt

SEQ ID NO: 139289 - DNA, 25 bp, SARS Virus
agttcgagtccatcgtctcctagta

SEQ ID NO: 139290 - DNA, 25 bp, SARS Virus
gttcgagtccaatgtctcctagtat

SEQ ID NO: 139291 - DNA, 25 bp, SARS Virus
ttcgagtccaacttctcctagtatt

SEQ ID NO: 139292 - DNA, 25 bp, SARS Virus
tcgagtccaacgtctcctagtattt

SEQ ID NO: 139293 - DNA, 25 bp, SARS Virus
cgagtccaacgtttcctagtatttg

SEQ ID NO: 139294 - DNA, 25 bp, SARS Virus
gagtccaacgtctcctagtatttga

SEQ ID NO: 139295 - DNA, 25 bp, SARS Virus
agtccaacgtcttctagtatttgac

SEQ ID NO: 139296 - DNA, 25 bp, SARS Virus
gtccaacgtctcttagtatttgaca

SEQ ID NO: 139297 - DNA, 25 bp, SARS Virus
tccaacgtctcctagtatttgacac

SEQ ID NO: 139298 - DNA, 25 bp, SARS Virus
ccaacgtctccttgtatttgacaca

SEQ ID NO: 139299 - DNA, 25 bp, SARS Virus
caacgtctcctattatttgacacaa

SEQ ID NO: 139300 - DNA, 25 bp, SARS Virus
aacgtctcctagtatttgacacaac

SEQ ID NO: 139301 - DNA, 25 bp, SARS Virus
acgtctcctagtttttgacacaaca

SEQ ID NO: 139302 - DNA, 25 bp, SARS Virus
cgtctcctagtatttgacacaacaa

SEQ ID NO: 139303 - DNA, 25 bp, SARS Virus
gtctcctagtatttgacacaacaat

SEQ ID NO: 139304 - DNA, 25 bp, SARS Virus
tctcctagtatttgacacaacaatt

SEQ ID NO: 139305 - DNA, 25 bp, SARS Virus
ctcctagtattttacacaacaatta

SEQ ID NO: 139306 - DNA, 25 bp, SARS Virus
tcctagtatttgtcacaacaattac

SEQ ID NO: 139307 - DNA, 25 bp, SARS Virus
cctagtatttgatacaacaattact

SEQ ID NO: 139308 - DNA, 25 bp, SARS Virus
ctagtatttgactcaacaattacta

SEQ ID NO: 139309 - DNA, 25 bp, SARS Virus
tagtatttgacataacaattactac

SEQ ID NO: 139310 - DNA, 25 bp, SARS Virus
agtatttgacactacaattactacg

SEQ ID NO: 139311 - DNA, 25 bp, SARS Virus
gtatttgacacatcaattactacgg

SEQ ID NO: 139312 - DNA, 25 bp, SARS Virus
tatttgacacaataattactacggt

SEQ ID NO: 139313 - DNA, 25 bp, SARS Virus
atttgacacaactattactacggtt

SEQ ID NO: 139314 - DNA, 25 bp, SARS Virus
tttgacacaacatttactacggtta

SEQ ID NO: 139315 - DNA, 25 bp, SARS Virus
ttgacacaacaattactacggttat

SEQ ID NO: 139316 - DNA, 25 bp, SARS Virus
tgacacaacaattactacggttatt

SEQ ID NO: 139317 - DNA, 25 bp, SARS Virus
gacacaacaatttctacggttattg

SEQ ID NO: 139318 - DNA, 25 bp, SARS Virus
acacaacaattattacggttattgc

SEQ ID NO: 139319 - DNA, 25 bp, SARS Virus
cacaacaattactacggttattgct

SEQ ID NO: 139320 - DNA, 25 bp, SARS Virus
acaacaattacttcggttattgctg

SEQ ID NO: 139321 - DNA, 25 bp, SARS Virus
caacaattactatggttattgctgt

SEQ ID NO: 139322 - DNA, 25 bp, SARS Virus
aacaattactactgttattgctgta

SEQ ID NO: 139323 - DNA, 25 bp, SARS Virus
acaattactacgtttattgctgtag

SEQ ID NO: 139324 - DNA, 25 bp, SARS Virus
caattactacggttattgctgtagt

SEQ ID NO: 139325 - DNA, 25 bp, SARS Virus
aattactacggttattgctgtagtg

SEQ ID NO: 139326 - DNA, 25 bp, SARS Virus
attactacggtttttgctgtagtgt

SEQ ID NO: 139327 - DNA, 25 bp, SARS Virus
ttactacggttattgctgtagtgtt

SEQ ID NO: 139328 - DNA, 25 bp, SARS Virus
tactacggttattgctgtagtgtta

SEQ ID NO: 139329 - DNA, 25 bp, SARS Virus
actacggttatttctgtagtgttaa

SEQ ID NO: 139330 - DNA, 25 bp, SARS Virus
ctacggttattgttgtagtgttaaa

SEQ ID NO: 139331 - DNA, 25 bp, SARS Virus
tacggttattgctgtagtgttaaag

SEQ ID NO: 139332 - DNA, 25 bp, SARS Virus
acggttattgctttagtgttaaagg

SEQ ID NO: 139333 - DNA, 25 bp, SARS Virus
cggttattgctgtagtgttaaagga

SEQ ID NO: 139334 - DNA, 25 bp, SARS Virus
ggttattgctgttgtgttaaaggac

SEQ ID NO: 139335 - DNA, 25 bp, SARS Virus
gttattgctgtattgttaaaggact

SEQ ID NO: 139336 - DNA, 25 bp, SARS Virus
ttattgctgtagtgttaaaggactc

SEQ ID NO: 139337 - DNA, 25 bp, SARS Virus
tattgctgtagttttaaaggactct

SEQ ID NO: 139338 - DNA, 25 bp, SARS Virus
attgctgtagtgttaaaggactctg

SEQ ID NO: 139339 - DNA, 25 bp, SARS Virus
ttgctgtagtgttaaaggactctgt

SEQ ID NO: 139340 - DNA, 25 bp, SARS Virus
tgctgtagtgtttaaggactctgtt

SEQ ID NO: 139341 - DNA, 25 bp, SARS Virus
gctgtagtgttataggactctgttt

SEQ ID NO: 139342 - DNA, 25 bp, SARS Virus
ctgtagtgttaatggactctgttta

SEQ ID NO: 139343 - DNA, 25 bp, SARS Virus
tgtagtgttaaatgactctgtttac

SEQ ID NO: 139344 - DNA, 25 bp, SARS Virus
gtagtgttaaagtactctgtttaca

SEQ ID NO: 139345 - DNA, 25 bp, SARS Virus
tagtgttaaaggtctctgtttacat

SEQ ID NO: 139346 - DNA, 25 bp, SARS Virus
agtgttaaaggattctgtttacata

SEQ ID NO: 139347 - DNA, 25 bp, SARS Virus
gtgttaaaggactctgtttacataa

SEQ ID NO: 139348 - DNA, 25 bp, SARS Virus
tgttaaaggactttgtttacataac

SEQ ID NO: 139349 - DNA, 25 bp, SARS Virus
gttaaaggactctgtttacataaca

SEQ ID NO: 139350 - DNA, 25 bp, SARS Virus
ttaaaggactctttttacataacag

SEQ ID NO: 139351 - DNA, 25 bp, SARS Virus
taaaggactctgtttacataacaga

SEQ ID NO: 139352 - DNA, 25 bp, SARS Virus
aaaggactctgtttacataacagac

SEQ ID NO: 139353 - DNA, 25 bp, SARS Virus
aaggactctgtttacataacagaca

SEQ ID NO: 139354 - DNA, 25 bp, SARS Virus
aggactctgttttcataacagacat

SEQ ID NO: 139355 - DNA, 25 bp, SARS Virus
ggactctgtttatataacagacatc

SEQ ID NO: 139356 - DNA, 25 bp, SARS Virus
gactctgtttacttaacagacatca

SEQ ID NO: 139357 - DNA, 25 bp, SARS Virus
actctgtttacataacagacatcat

SEQ ID NO: 139358 - DNA, 25 bp, SARS Virus
ctctgtttacattacagacatcatt

SEQ ID NO: 139359 - DNA, 25 bp, SARS Virus
tctgtttacatatcagacatcatta

SEQ ID NO: 139360 - DNA, 25 bp, SARS Virus
ctgtttacataatagacatcattaa

SEQ ID NO: 139361 - DNA, 25 bp, SARS Virus
tgtttacataactgacatcattaat

SEQ ID NO: 139362 - DNA, 25 bp, SARS Virus
gtttacataacatacatcattaata

SEQ ID NO: 139363 - DNA, 25 bp, SARS Virus
tttacataacagtcatcattaataa

SEQ ID NO: 139364 - DNA, 25 bp, SARS Virus
ttacataacagatatcattaataaa

SEQ ID NO: 139365 - DNA, 25 bp, SARS Virus
tacataacagacttcattaataaac

SEQ ID NO: 139366 - DNA, 25 bp, SARS Virus
acataacagacatcattaataaaca

SEQ ID NO: 139367 - DNA, 25 bp, SARS Virus
cataacagacattattaataaacac

SEQ ID NO: 139368 - DNA, 25 bp, SARS Virus
ataacagacatctttaataaacacc

SEQ ID NO: 139369 - DNA, 25 bp, SARS Virus
taacagacatcattaataaacacct

SEQ ID NO: 139370 - DNA, 25 bp, SARS Virus
aacagacatcattaataaacacctc

SEQ ID NO: 139371 - DNA, 25 bp, SARS Virus
acagacatcatttataaacacctct

SEQ ID NO: 139372 - DNA, 25 bp, SARS Virus
cagacatcattattaaacacctctt

SEQ ID NO: 139373 - DNA, 25 bp, SARS Virus
agacatcattaataaacacctcttt

SEQ ID NO: 139374 - DNA, 25 bp, SARS Virus
gacatcattaattaacacctctttt

SEQ ID NO: 139375 - DNA, 25 bp, SARS Virus
acatcattaatatacacctcttttc

SEQ ID NO: 139376 - DNA, 25 bp, SARS Virus
catcattaataatcacctcttttct

SEQ ID NO: 139377 - DNA, 25 bp, SARS Virus
atcattaataaatacctcttttctt

SEQ ID NO: 139378 - DNA, 25 bp, SARS Virus
tcattaataaactcctcttttcttc

SEQ ID NO: 139379 - DNA, 25 bp, SARS Virus
cattaataaacatctcttttcttca

SEQ ID NO: 139380 - DNA, 25 bp, SARS Virus
attaataaacacttcttttcttcaa

SEQ ID NO: 139381 - DNA, 25 bp, SARS Virus
ttaataaacacctcttttcttcaag

SEQ ID NO: 139382 - DNA, 25 bp, SARS Virus
taataaacaccttttttcttcaagg

SEQ ID NO: 139383 - DNA, 25 bp, SARS Virus
aataaacacctcttttcttcaagga

SEQ ID NO: 139384 - DNA, 25 bp, SARS Virus
ataaacacctcttttcttcaaggag

SEQ ID NO: 139385 - DNA, 25 bp, SARS Virus
taaacacctcttttcttcaaggaga

SEQ ID NO: 139386 - DNA, 25 bp, SARS Virus
aaacacctcttttcttcaaggagac

SEQ ID NO: 139387 - DNA, 25 bp, SARS Virus
aacacctctttttttcaaggagaca

SEQ ID NO: 139388 - DNA, 25 bp, SARS Virus
acacctcttttcttcaaggagacac

SEQ ID NO: 139389 - DNA, 25 bp, SARS Virus
cacctcttttcttcaaggagacaca

SEQ ID NO: 139390 - DNA, 25 bp, SARS Virus
acctcttttctttaaggagacacat

SEQ ID NO: 139391 - DNA, 25 bp, SARS Virus
cctcttttcttctaggagacacatt

SEQ ID NO: 139392 - DNA, 25 bp, SARS Virus
ctcttttcttcatggagacacatta

SEQ ID NO: 139393 - DNA, 25 bp, SARS Virus
tcttttcttcaatgagacacattat

SEQ ID NO: 139394 - DNA, 25 bp, SARS Virus
cttttcttcaagtagacacattatt

SEQ ID NO: 139395 - DNA, 25 bp, SARS Virus
ttttcttcaaggtgacacattattt

SEQ ID NO: 139396 - DNA, 25 bp, SARS Virus
tttcttcaaggatacacattatttg

SEQ ID NO: 139397 - DNA, 25 bp, SARS Virus
ttcttcaaggagtcacattatttgg

SEQ ID NO: 139398 - DNA, 25 bp, SARS Virus
tcttcaaggagatacattatttggt

SEQ ID NO: 139399 - DNA, 25 bp, SARS Virus
cttcaaggagactcattatttggtt

SEQ ID NO: 139400 - DNA, 25 bp, SARS Virus
ttcaaggagacatattatttggttc

SEQ ID NO: 139401 - DNA, 25 bp, SARS Virus
tcaaggagacactttatttggttct

SEQ ID NO: 139402 - DNA, 25 bp, SARS Virus
caaggagacacattatttggttctt

SEQ ID NO: 139403 - DNA, 25 bp, SARS Virus
aaggagacacattatttggttcttc

SEQ ID NO: 139404 - DNA, 25 bp, SARS Virus
aggagacacattttttggttcttca

SEQ ID NO: 139405 - DNA, 25 bp, SARS Virus
ggagacacattatttggttcttcac

SEQ ID NO: 139406 - DNA, 25 bp, SARS Virus
gagacacattatttggttcttcacg

SEQ ID NO: 139407 - DNA, 25 bp, SARS Virus
agacacattatttggttcttcacgg

SEQ ID NO: 139408 - DNA, 25 bp, SARS Virus
gacacattattttgttcttcacggt

SEQ ID NO: 139409 - DNA, 25 bp, SARS Virus
acacattatttgtttcttcacggta

SEQ ID NO: 139410 - DNA, 25 bp, SARS Virus
cacattatttggttcttcacggtaa

SEQ ID NO: 139411 - DNA, 25 bp, SARS Virus
acattatttggttcttcacggtaat

SEQ ID NO: 139412 - DNA, 25 bp, SARS Virus
cattatttggtttttcacggtaatt

SEQ ID NO: 139413 - DNA, 25 bp, SARS Virus
attatttggttcttcacggtaattt

SEQ ID NO: 139414 - DNA, 25 bp, SARS Virus
ttatttggttcttcacggtaatttg

SEQ ID NO: 139415 - DNA, 25 bp, SARS Virus
tatttggttctttacggtaatttgt

SEQ ID NO: 139416 - DNA, 25 bp, SARS Virus
atttggttcttctcggtaatttgtg

SEQ ID NO: 139417 - DNA, 25 bp, SARS Virus
tttggttcttcatggtaatttgtgt

SEQ ID NO: 139418 - DNA, 25 bp, SARS Virus
ttggttcttcactgtaatttgtgtt

SEQ ID NO: 139419 - DNA, 25 bp, SARS Virus
tggttcttcacgttaatttgtgttt

SEQ ID NO: 139420 - DNA, 25 bp, SARS Virus
ggttcttcacggtaatttgtgtttt

SEQ ID NO: 139421 - DNA, 25 bp, SARS Virus
gttcttcacggttatttgtgttttt

SEQ ID NO: 139422 - DNA, 25 bp, SARS Virus
ttcttcacggtattttgtgtttttg

SEQ ID NO: 139423 - DNA, 25 bp, SARS Virus
tcttcacggtaatttgtgtttttgt

SEQ ID NO: 139424 - DNA, 25 bp, SARS Virus
cttcacggtaatttgtgtttttgtg

SEQ ID NO: 139425 - DNA, 25 bp, SARS Virus
ttcacggtaatttgtgtttttgtgg

SEQ ID NO: 139426 - DNA, 25 bp, SARS Virus
tcacggtaatttttgtttttgtgga

SEQ ID NO: 139427 - DNA, 25 bp, SARS Virus
cacggtaatttgtgtttttgtggaa

SEQ ID NO: 139428 - DNA, 25 bp, SARS Virus
acggtaatttgtttttttgtggaag

SEQ ID NO: 139429 - DNA, 25 bp, SARS Virus
cggtaatttgtgtttttgtggaagt

SEQ ID NO: 139430 - DNA, 25 bp, SARS Virus
ggtaatttgtgtttttgtggaagtg

SEQ ID NO: 139431 - DNA, 25 bp, SARS Virus
gtaatttgtgtttttgtggaagtgc

SEQ ID NO: 139432 - DNA, 25 bp, SARS Virus
taatttgtgtttttgtggaagtgct

SEQ ID NO: 139433 - DNA, 25 bp, SARS Virus
aatttgtgtttttgtggaagtgctc

SEQ ID NO: 139434 - DNA, 25 bp, SARS Virus
atttgtgtttttttggaagtgctcc

SEQ ID NO: 139435 - DNA, 25 bp, SARS Virus
tttgtgtttttgtggaagtgctccc

SEQ ID NO: 139436 - DNA, 25 bp, SARS Virus
ttgtgtttttgttgaagtgctccct

SEQ ID NO: 139437 - DNA, 25 bp, SARS Virus
tgtgtttttgtgtaagtgctccctt

SEQ ID NO: 139438 - DNA, 25 bp, SARS Virus
gtgtttttgtggtagtgctcccttc

SEQ ID NO: 139439 - DNA, 25 bp, SARS Virus
tgtttttgtggatgtgctcccttca

SEQ ID NO: 139440 - DNA, 25 bp, SARS Virus
gtttttgtggaattgctcccttcat

SEQ ID NO: 139441 - DNA, 25 bp, SARS Virus
tttttgtggaagtgctcccttcata

SEQ ID NO: 139442 - DNA, 25 bp, SARS Virus
ttttgtggaagttctcccttcatac

SEQ ID NO: 139443 - DNA, 25 bp, SARS Virus
tttgtggaagtgttcccttcatacg

SEQ ID NO: 139444 - DNA, 25 bp, SARS Virus
ttgtggaagtgctcccttcatacga

SEQ ID NO: 139445 - DNA, 25 bp, SARS Virus
tgtggaagtgcttccttcatacgaa

SEQ ID NO: 139446 - DNA, 25 bp, SARS Virus
gtggaagtgctctcttcatacgaaa

SEQ ID NO: 139447 - DNA, 25 bp, SARS Virus
tggaagtgctcctttcatacgaaac

SEQ ID NO: 139448 - DNA, 25 bp, SARS Virus
ggaagtgctcccttcatacgaaacg

SEQ ID NO: 139449 - DNA, 25 bp, SARS Virus
gaagtgctcccttcatacgaaacgg

SEQ ID NO: 139450 - DNA, 25 bp, SARS Virus
aagtgctccctttatacgaaacgga

SEQ ID NO: 139451 - DNA, 25 bp, SARS Virus
agtgctcccttcttacgaaacggaa

SEQ ID NO: 139452 - DNA, 25 bp, SARS Virus
gtgctcccttcatacgaaacggaag

SEQ ID NO: 139453 - DNA, 25 bp, SARS Virus
tgctcccttcattcgaaacggaagt

SEQ ID NO: 139454 - DNA, 25 bp, SARS Virus
gctcccttcatatgaaacggaagta

SEQ ID NO: 139455 - DNA, 25 bp, SARS Virus
ctcccttcatactaaacggaagtac

SEQ ID NO: 139456 - DNA, 25 bp, SARS Virus
tcccttcatacgtaacggaagtact

SEQ ID NO: 139457 - DNA, 25 bp, SARS Virus
cccttcatacgatacggaagtactg

SEQ ID NO: 139458 - DNA, 25 bp, SARS Virus
ccttcatacgaatcggaagtactgt

SEQ ID NO: 139459 - DNA, 25 bp, SARS Virus
cttcatacgaaatggaagtactgtt

SEQ ID NO: 139460 - DNA, 25 bp, SARS Virus
ttcatacgaaactgaagtactgttt

SEQ ID NO: 139461 - DNA, 25 bp, SARS Virus
tcatacgaaacgtaagtactgttta

SEQ ID NO: 139462 - DNA, 25 bp, SARS Virus
catacgaaacggtagtactgtttaa

SEQ ID NO: 139463 - DNA, 25 bp, SARS Virus
atacgaaacggatgtactgtttaac

SEQ ID NO: 139464 - DNA, 25 bp, SARS Virus
tacgaaacggaattactgtttaacg

SEQ ID NO: 139465 - DNA, 25 bp, SARS Virus
acgaaacggaagtactgtttaacga

SEQ ID NO: 139466 - DNA, 25 bp, SARS Virus
cgaaacggaagttctgtttaacgac

SEQ ID NO: 139467 - DNA, 25 bp, SARS Virus
gaaacggaagtattgtttaacgacc

SEQ ID NO: 139468 - DNA, 25 bp, SARS Virus
aaacggaagtactgtttaacgaccg

SEQ ID NO: 139469 - DNA, 25 bp, SARS Virus
aacggaagtactttttaacgaccgc

SEQ ID NO: 139470 - DNA, 25 bp, SARS Virus
acggaagtactgtttaacgaccgcg

SEQ ID NO: 139471 - DNA, 25 bp, SARS Virus
cggaagtactgtttaacgaccgcga

SEQ ID NO: 139472 - DNA, 25 bp, SARS Virus
ggaagtactgtttaacgaccgcgac

SEQ ID NO: 139473 - DNA, 25 bp, SARS Virus
gaagtactgttttacgaccgcgaca

SEQ ID NO: 139474 - DNA, 25 bp, SARS Virus
aagtactgtttatcgaccgcgacac

SEQ ID NO: 139475 - DNA, 25 bp, SARS Virus
agtactgtttaatgaccgcgacacc

SEQ ID NO: 139476 - DNA, 25 bp, SARS Virus
gtactgtttaactaccgcgacacca

SEQ ID NO: 139477 - DNA, 25 bp, SARS Virus
tactgtttaacgtccgcgacaccac

SEQ ID NO: 139478 - DNA, 25 bp, SARS Virus
actgtttaacgatcgcgacaccact

SEQ ID NO: 139479 - DNA, 25 bp, SARS Virus
ctgtttaacgactgcgacaccactt

SEQ ID NO: 139480 - DNA, 25 bp, SARS Virus
tgtttaacgacctcgacaccacttc

SEQ ID NO: 139481 - DNA, 25 bp, SARS Virus
gtttaacgaccgtgacaccacttca

SEQ ID NO: 139482 - DNA, 25 bp, SARS Virus
tttaacgaccgctacaccacttcaa

SEQ ID NO: 139483 - DNA, 25 bp, SARS Virus
ttaacgaccgcgtcaccacttcaag

SEQ ID NO: 139484 - DNA, 25 bp, SARS Virus
taacgaccgcgataccacttcaagg

SEQ ID NO: 139485 - DNA, 25 bp, SARS Virus
aacgaccgcgactccacttcaagga

SEQ ID NO: 139486 - DNA, 25 bp, SARS Virus
acgaccgcgacatcacttcaaggag

SEQ ID NO: 139487 - DNA, 25 bp, SARS Virus
cgaccgcgacactacttcaaggaga

SEQ ID NO: 139488 - DNA, 25 bp, SARS Virus
gaccgcgacacctcttcaaggagag

SEQ ID NO: 139489 - DNA, 25 bp, SARS Virus
accgcgacaccatttcaaggagagg

SEQ ID NO: 139490 - DNA, 25 bp, SARS Virus
ccgcgacaccacttcaaggagagga

SEQ ID NO: 139491 - DNA, 25 bp, SARS Virus
cgcgacaccacttcaaggagaggac

SEQ ID NO: 139492 - DNA, 25 bp, SARS Virus
gcgacaccactttaaggagaggacc

SEQ ID NO: 139493 - DNA, 25 bp, SARS Virus
cgacaccacttctaggagaggaccc

SEQ ID NO: 139494 - DNA, 25 bp, SARS Virus
gacaccacttcatggagaggaccct

SEQ ID NO: 139495 - DNA, 25 bp, SARS Virus
acaccacttcaatgagaggacccta

SEQ ID NO: 139496 - DNA, 25 bp, SARS Virus
caccacttcaagtagaggaccctac

SEQ ID NO: 139497 - DNA, 25 bp, SARS Virus
accacttcaaggtgaggaccctacc

SEQ ID NO: 139498 - DNA, 25 bp, SARS Virus
ccacttcaaggataggaccctaccg

SEQ ID NO: 139499 - DNA, 25 bp, SARS Virus
cacttcaaggagtggaccctaccgt

SEQ ID NO: 139500 - DNA, 25 bp, SARS Virus
acttcaaggagatgaccctaccgtg

SEQ ID NO: 139501 - DNA, 25 bp, SARS Virus
cttcaaggagagtaccctaccgtgt

SEQ ID NO: 139502 - DNA, 25 bp, SARS Virus
ttcaaggagaggtccctaccgtgta

SEQ ID NO: 139503 - DNA, 25 bp, SARS Virus
tcaaggagaggatcctaccgtgtat

SEQ ID NO: 139504 - DNA, 25 bp, SARS Virus
caaggagaggactctaccgtgtatg

SEQ ID NO: 139505 - DNA, 25 bp, SARS Virus
aaggagaggaccttaccgtgtatgc

SEQ ID NO: 139506 - DNA, 25 bp, SARS Virus
aggagaggaccctaccgtgtatgca

SEQ ID NO: 139507 - DNA, 25 bp, SARS Virus
ggagaggacccttccgtgtatgcac

SEQ ID NO: 139508 - DNA, 25 bp, SARS Virus
gagaggaccctatcgtgtatgcact

SEQ ID NO: 139509 - DNA, 25 bp, SARS Virus
agaggaccctactgtgtatgcactg

SEQ ID NO: 139510 - DNA, 25 bp, SARS Virus
gaggaccctaccttgtatgcactgt

SEQ ID NO: 139511 - DNA, 25 bp, SARS Virus
aggaccctaccgtgtatgcactgta

SEQ ID NO: 139512 - DNA, 25 bp, SARS Virus
ggaccctaccgtttatgcactgtac

SEQ ID NO: 139513 - DNA, 25 bp, SARS Virus
gaccctaccgtgtatgcactgtaca

SEQ ID NO: 139514 - DNA, 25 bp, SARS Virus
accctaccgtgtttgcactgtacat

SEQ ID NO: 139515 - DNA, 25 bp, SARS Virus
ccctaccgtgtatgcactgtacatc

SEQ ID NO: 139516 - DNA, 25 bp, SARS Virus
cctaccgtgtattcactgtacatcc

SEQ ID NO: 139517 - DNA, 25 bp, SARS Virus
ctaccgtgtatgtactgtacatcct

SEQ ID NO: 139518 - DNA, 25 bp, SARS Virus
taccgtgtatgctctgtacatcctt

SEQ ID NO: 139519 - DNA, 25 bp, SARS Virus
accgtgtatgcattgtacatccttc

SEQ ID NO: 139520 - DNA, 25 bp, SARS Virus
ccgtgtatgcactgtacatccttct

SEQ ID NO: 139521 - DNA, 25 bp, SARS Virus
cgtgtatgcactttacatccttctg

SEQ ID NO: 139522 - DNA, 25 bp, SARS Virus
gtgtatgcactgtacatccttctgt

SEQ ID NO: 139523 - DNA, 25 bp, SARS Virus
tgtatgcactgttcatccttctgtt

SEQ ID NO: 139524 - DNA, 25 bp, SARS Virus
gtatgcactgtatatccttctgttg

SEQ ID NO: 139525 - DNA, 25 bp, SARS Virus
tatgcactgtacttccttctgttgt

SEQ ID NO: 139526 - DNA, 25 bp, SARS Virus
atgcactgtacatccttctgttgtg

SEQ ID NO: 139527 - DNA, 25 bp, SARS Virus
tgcactgtacattcttctgttgtgg

SEQ ID NO: 139528 - DNA, 25 bp, SARS Virus
gcactgtacatctttctgttgtggt

SEQ ID NO: 139529 - DNA, 25 bp, SARS Virus
cactgtacatccttctgttgtggta

SEQ ID NO: 139530 - DNA, 25 bp, SARS Virus
actgtacatccttctgttgtggtac

SEQ ID NO: 139531 - DNA, 25 bp, SARS Virus
ctgtacatccttttgttgtggtacg

SEQ ID NO: 139532 - DNA, 25 bp, SARS Virus
tgtacatccttctgttgtggtacgc

SEQ ID NO: 139533 - DNA, 25 bp, SARS Virus
gtacatccttcttttgtggtacgcc

SEQ ID NO: 139534 - DNA, 25 bp, SARS Virus
tacatccttctgttgtggtacgccc

SEQ ID NO: 139535 - DNA, 25 bp, SARS Virus
acatccttctgttgtggtacgcccc

SEQ ID NO: 139536 - DNA, 25 bp, SARS Virus
catccttctgttttggtacgccccg

SEQ ID NO: 139537 - DNA, 25 bp, SARS Virus
atccttctgttgtggtacgccccga

SEQ ID NO: 139538 - DNA, 25 bp, SARS Virus
tccttctgttgttgtacgccccgac

SEQ ID NO: 139539 - DNA, 25 bp, SARS Virus
ccttctgttgtgttacgccccgacg

SEQ ID NO: 139540 - DNA, 25 bp, SARS Virus
cttctgttgtggtacgccccgacga

SEQ ID NO: 139541 - DNA, 25 bp, SARS Virus
ttctgttgtggttcgccccgacgaa

SEQ ID NO: 139542 - DNA, 25 bp, SARS Virus
tctgttgtggtatgccccgacgaac

SEQ ID NO: 139543 - DNA, 25 bp, SARS Virus
ctgttgtggtactccccgacgaaca

SEQ ID NO: 139544 - DNA, 25 bp, SARS Virus
tgttgtggtacgtcccgacgaacac

SEQ ID NO: 139545 - DNA, 25 bp, SARS Virus
gttgtggtacgctccgacgaacacc

SEQ ID NO: 139546 - DNA, 25 bp, SARS Virus
ttgtggtacgcctcgacgaacaccc

SEQ ID NO: 139547 - DNA, 25 bp, SARS Virus
tgtggtacgccctgacgaacaccct

SEQ ID NO: 139548 - DNA, 25 bp, SARS Virus
gtggtacgcccctacgaacaccctt

SEQ ID NO: 139549 - DNA, 25 bp, SARS Virus
tggtacgccccgtcgaacacccttc

SEQ ID NO: 139550 - DNA, 25 bp, SARS Virus
ggtacgccccgatgaacacccttcc

SEQ ID NO: 139551 - DNA, 25 bp, SARS Virus
gtacgccccgactaacacccttcct

SEQ ID NO: 139552 - DNA, 25 bp, SARS Virus
tacgccccgacgtacacccttcctg

SEQ ID NO: 139553 - DNA, 25 bp, SARS Virus
acgccccgacgatcacccttcctgt

SEQ ID NO: 139554 - DNA, 25 bp, SARS Virus
cgccccgacgaatacccttcctgta

SEQ ID NO: 139555 - DNA, 25 bp, SARS Virus
gccccgacgaactcccttcctgtat

SEQ ID NO: 139556 - DNA, 25 bp, SARS Virus
ccccgacgaacatccttcctgtatt

SEQ ID NO: 139557 - DNA, 25 bp, SARS Virus
cccgacgaacactcttcctgtattc

SEQ ID NO: 139558 - DNA, 25 bp, SARS Virus
ccgacgaacacctttcctgtattcc

SEQ ID NO: 139559 - DNA, 25 bp, SARS Virus
cgacgaacacccttcctgtattcca

SEQ ID NO: 139560 - DNA, 25 bp, SARS Virus
gacgaacacccttcctgtattccac

SEQ ID NO: 139561 - DNA, 25 bp, SARS Virus
acgaacaccctttctgtattccacc

SEQ ID NO: 139562 - DNA, 25 bp, SARS Virus
cgaacacccttcttgtattccacca

SEQ ID NO: 139563 - DNA, 25 bp, SARS Virus
gaacacccttcctgtattccaccat

SEQ ID NO: 139564 - DNA, 25 bp, SARS Virus
aacacccttcctttattccaccatc

SEQ ID NO: 139565 - DNA, 25 bp, SARS Virus
acacccttcctgtattccaccatcg

SEQ ID NO: 139566 - DNA, 25 bp, SARS Virus
cacccttcctgttttccaccatcgg

SEQ ID NO: 139567 - DNA, 25 bp, SARS Virus
acccttcctgtattccaccatcggg

SEQ ID NO: 139568 - DNA, 25 bp, SARS Virus
cccttcctgtattccaccatcggga

SEQ ID NO: 139569 - DNA, 25 bp, SARS Virus
ccttcctgtatttcaccatcgggaa

SEQ ID NO: 139570 - DNA, 25 bp, SARS Virus
cttcctgtattctaccatcgggaaa

SEQ ID NO: 139571 - DNA, 25 bp, SARS Virus
ttcctgtattcctccatcgggaaag

SEQ ID NO: 139572 - DNA, 25 bp, SARS Virus
tcctgtattccatcatcgggaaagg

SEQ ID NO: 139573 - DNA, 25 bp, SARS Virus
cctgtattccactatcgggaaaggt

SEQ ID NO: 139574 - DNA, 25 bp, SARS Virus
ctgtattccaccttcgggaaaggtg

SEQ ID NO: 139575 - DNA, 25 bp, SARS Virus
tgtattccaccatcgggaaaggtgt

SEQ ID NO: 139576 - DNA, 25 bp, SARS Virus
gtattccaccattgggaaaggtgtt

SEQ ID NO: 139577 - DNA, 25 bp, SARS Virus
tattccaccatctggaaaggtgttt

SEQ ID NO: 139578 - DNA, 25 bp, SARS Virus
attccaccatcgtgaaaggtgtttt

SEQ ID NO: 139579 - DNA, 25 bp, SARS Virus
ttccaccatcggtaaaggtgttttc

SEQ ID NO: 139580 - DNA, 25 bp, SARS Virus
tccaccatcgggtaaggtgttttca

SEQ ID NO: 139581 - DNA, 25 bp, SARS Virus
ccaccatcgggataggtgttttcag

SEQ ID NO: 139582 - DNA, 25 bp, SARS Virus
caccatcgggaatggtgttttcagt

SEQ ID NO: 139583 - DNA, 25 bp, SARS Virus
accatcgggaaatgtgttttcagtt

SEQ ID NO: 139584 - DNA, 25 bp, SARS Virus
ccatcgggaaagttgttttcagttg

SEQ ID NO: 139585 - DNA, 25 bp, SARS Virus
catcgggaaaggtgttttcagttga

SEQ ID NO: 139586 - DNA, 25 bp, SARS Virus
atcgggaaaggttttttcagttgag

SEQ ID NO: 139587 - DNA, 25 bp, SARS Virus
tcgggaaaggtgttttcagttgaga

SEQ ID NO: 139588 - DNA, 25 bp, SARS Virus
cgggaaaggtgttttcagttgagaa

SEQ ID NO: 139589 - DNA, 25 bp, SARS Virus
gggaaaggtgttttcagttgagaaa

SEQ ID NO: 139590 - DNA, 25 bp, SARS Virus
ggaaaggtgttttcagttgagaaaa

SEQ ID NO: 139591 - DNA, 25 bp, SARS Virus
gaaaggtgtttttagttgagaaaaa

SEQ ID NO: 139592 - DNA, 25 bp, SARS Virus
aaaggtgttttctgttgagaaaaac

SEQ ID NO: 139593 - DNA, 25 bp, SARS Virus
aaggtgttttcatttgagaaaaact

SEQ ID NO: 139594 - DNA, 25 bp, SARS Virus
aggtgttttcagttgagaaaaacta

SEQ ID NO: 139595 - DNA, 25 bp, SARS Virus
ggtgttttcagttgagaaaaactaa

SEQ ID NO: 139596 - DNA, 25 bp, SARS Virus
gtgttttcagtttagaaaaactaac

SEQ ID NO: 139597 - DNA, 25 bp, SARS Virus
tgttttcagttgtgaaaaactaaca

SEQ ID NO: 139598 - DNA, 25 bp, SARS Virus
gttttcagttgataaaaactaacag

SEQ ID NO: 139599 - DNA, 25 bp, SARS Virus
ttttcagttgagtaaaactaacagg

SEQ ID NO: 139600 - DNA, 25 bp, SARS Virus
tttcagttgagataaactaacaggt

SEQ ID NO: 139601 - DNA, 25 bp, SARS Virus
ttcagttgagaaaaactaacaggtt

SEQ ID NO: 139602 - DNA, 25 bp, SARS Virus
tcagttgagaaaaactaacaggttc

SEQ ID NO: 139603 - DNA, 25 bp, SARS Virus
cagttgagaaaaactaacaggttct

SEQ ID NO: 139604 - DNA, 25 bp, SARS Virus
agttgagaaaaaataacaggttctt

SEQ ID NO: 139605 - DNA, 25 bp, SARS Virus
gttgagaaaaacaaacaggttcttg

SEQ ID NO: 139606 - DNA, 25 bp, SARS Virus
ttgagaaaaactaacaggttcttgt

SEQ ID NO: 139607 - DNA, 25 bp, SARS Virus
tgagaaaaactaacaggttcttgtg

SEQ ID NO: 139608 - DNA, 25 bp, SARS Virus
gagaaaaactaaaaggttcttgtgt

SEQ ID NO: 139609 - DNA, 25 bp, SARS Virus
agaaaaactaacaggttcttgtgtg

SEQ ID NO: 139610 - DNA, 25 bp, SARS Virus
gaaaaactaacaagttcttgtgtga

SEQ ID NO: 139611 - DNA, 25 bp, SARS Virus
aaaaactaacagattcttgtgtgag

SEQ ID NO: 139612 - DNA, 25 bp, SARS Virus
aaaactaacaggatcttgtgtgagt

SEQ ID NO: 139613 - DNA, 25 bp, SARS Virus
aaactaacaggtacttgtgtgagtc

SEQ ID NO: 139614 - DNA, 25 bp, SARS Virus
aactaacaggttattgtgtgagtct

SEQ ID NO: 139615 - DNA, 25 bp, SARS Virus
actaacaggttcatgtgtgagtctg

SEQ ID NO: 139616 - DNA, 25 bp, SARS Virus
ctaacaggttctagtgtgagtctgt

SEQ ID NO: 139617 - DNA, 25 bp, SARS Virus
taacaggttcttatgtgagtctgta

SEQ ID NO: 139618 - DNA, 25 bp, SARS Virus
aacaggttcttgagtgagtctgtaa

SEQ ID NO: 139619 - DNA, 25 bp, SARS Virus
acaggttcttgtatgagtctgtaaa

SEQ ID NO: 139620 - DNA, 25 bp, SARS Virus
caggttcttgtgagagtctgtaaaa

SEQ ID NO: 139621 - DNA, 25 bp, SARS Virus
aggttcttgtgtaagtctgtaaaat

SEQ ID NO: 139622 - DNA, 25 bp, SARS Virus
ggttcttgtgtgagtctgtaaaatc

SEQ ID NO: 139623 - DNA, 25 bp, SARS Virus
gttcttgtgtgaatctgtaaaatca

SEQ ID NO: 139624 - DNA, 25 bp, SARS Virus
ttcttgtgtgagactgtaaaatcat

SEQ ID NO: 139625 - DNA, 25 bp, SARS Virus
tcttgtgtgagtatgtaaaatcatc

SEQ ID NO: 139626 - DNA, 25 bp, SARS Virus
cttgtgtgagtcagtaaaatcatcg

SEQ ID NO: 139627 - DNA, 25 bp, SARS Virus
ttgtgtgagtctataaaatcatcgt

SEQ ID NO: 139628 - DNA, 25 bp, SARS Virus
tgtgtgagtctgaaaaatcatcgtc

SEQ ID NO: 139629 - DNA, 25 bp, SARS Virus
gtgtgagtctgtaaaatcatcgtcg

SEQ ID NO: 139630 - DNA, 25 bp, SARS Virus
tgtgagtctgtaaaatcatcgtcgt

SEQ ID NO: 139631 - DNA, 25 bp, SARS Virus
gtgagtctgtaaaatcatcgtcgtt

SEQ ID NO: 139632 - DNA, 25 bp, SARS Virus
tgagtctgtaaaatcatcgtcgttc

SEQ ID NO: 139633 - DNA, 25 bp, SARS Virus
gagtctgtaaaaacatcgtcgttct

SEQ ID NO: 139634 - DNA, 25 bp, SARS Virus
agtctgtaaaataatcgtcgttcta

SEQ ID NO: 139635 - DNA, 25 bp, SARS Virus
gtctgtaaaatcatcgtcgttctaa

SEQ ID NO: 139636 - DNA, 25 bp, SARS Virus
tctgtaaaatcaacgtcgttctaat

SEQ ID NO: 139637 - DNA, 25 bp, SARS Virus
ctgtaaaatcatagtcgttctaatc

SEQ ID NO: 139638 - DNA, 25 bp, SARS Virus
tgtaaaatcatcatcgttctaatcg

SEQ ID NO: 139639 - DNA, 25 bp, SARS Virus
gtaaaatcatcgacgttctaatcgt

SEQ ID NO: 139640 - DNA, 25 bp, SARS Virus
taaaatcatcgtagttctaatcgtc

SEQ ID NO: 139641 - DNA, 25 bp, SARS Virus
aaaatcatcgtcattctaatcgtct

SEQ ID NO: 139642 - DNA, 25 bp, SARS Virus
aaatcatcgtcgatctaatcgtctt

SEQ ID NO: 139643 - DNA, 25 bp, SARS Virus
aatcatcgtcgtactaatcgtcttc

SEQ ID NO: 139644 - DNA, 25 bp, SARS Virus
atcatcgtcgttataatcgtcttcg

SEQ ID NO: 139645 - DNA, 25 bp, SARS Virus
tcatcgtcgttcaaatcgtcttcgg

SEQ ID NO: 139646 - DNA, 25 bp, SARS Virus
catcgtcgttctaatcgtcttcggg

SEQ ID NO: 139647 - DNA, 25 bp, SARS Virus
atcgtcgttctaatcgtcttcggga

SEQ ID NO: 139648 - DNA, 25 bp, SARS Virus
tcgtcgttctaaacgtcttcgggac

SEQ ID NO: 139649 - DNA, 25 bp, SARS Virus
cgtcgttctaatagtcttcgggact

SEQ ID NO: 139650 - DNA, 25 bp, SARS Virus
gtcgttctaatcatcttcgggacta

SEQ ID NO: 139651 - DNA, 25 bp, SARS Virus
tcgttctaatcgacttcgggactaa

SEQ ID NO: 139652 - DNA, 25 bp, SARS Virus
cgttctaatcgtattcgggactaaa

SEQ ID NO: 139653 - DNA, 25 bp, SARS Virus
gttctaatcgtcatcgggactaaag

SEQ ID NO: 139654 - DNA, 25 bp, SARS Virus
ttctaatcgtctacgggactaaagt

SEQ ID NO: 139655 - DNA, 25 bp, SARS Virus
tctaatcgtcttagggactaaagtc

SEQ ID NO: 139656 - DNA, 25 bp, SARS Virus
ctaatcgtcttcaggactaaagtcg

SEQ ID NO: 139657 - DNA, 25 bp, SARS Virus
taatcgtcttcgagactaaagtcgt

SEQ ID NO: 139658 - DNA, 25 bp, SARS Virus
aatcgtcttcggaactaaagtcgtc

SEQ ID NO: 139659 - DNA, 25 bp, SARS Virus
atcgtcttcgggactaaagtcgtcg

SEQ ID NO: 139660 - DNA, 25 bp, SARS Virus
tcgtcttcgggaataaagtcgtcgg

SEQ ID NO: 139661 - DNA, 25 bp, SARS Virus
cgtcttcgggacaaaagtcgtcggg

SEQ ID NO: 139662 - DNA, 25 bp, SARS Virus
gtcttcgggactaaagtcgtcggga

SEQ ID NO: 139663 - DNA, 25 bp, SARS Virus
tcttcgggactaaagtcgtcgggac

SEQ ID NO: 139664 - DNA, 25 bp, SARS Virus
cttcgggactaaagtcgtcgggact

SEQ ID NO: 139665 - DNA, 25 bp, SARS Virus
ttcgggactaaaatcgtcgggacta

SEQ ID NO: 139666 - DNA, 25 bp, SARS Virus
tcgggactaaagacgtcgggactaa

SEQ ID NO: 139667 - DNA, 25 bp, SARS Virus
cgggactaaagtagtcgggactaat

SEQ ID NO: 139668 - DNA, 25 bp, SARS Virus
gggactaaagtcatcgggactaatc

SEQ ID NO: 139669 - DNA, 25 bp, SARS Virus
ggactaaagtcgacgggactaatca

SEQ ID NO: 139670 - DNA, 25 bp, SARS Virus
gactaaagtcgtagggactaatcaa

SEQ ID NO: 139671 - DNA, 25 bp, SARS Virus
actaaagtcgtcaggactaatcaac

SEQ ID NO: 139672 - DNA, 25 bp, SARS Virus
ctaaagtcgtcgagactaatcaaca

SEQ ID NO: 139673 - DNA, 25 bp, SARS Virus
taaagtcgtcggaactaatcaacaa

SEQ ID NO: 139674 - DNA, 25 bp, SARS Virus
aaagtcgtcgggactaatcaacaac

SEQ ID NO: 139675 - DNA, 25 bp, SARS Virus
aagtcgtcgggaataatcaacaaca

SEQ ID NO: 139676 - DNA, 25 bp, SARS Virus
agtcgtcgggacaaatcaacaacac

SEQ ID NO: 139677 - DNA, 25 bp, SARS Virus
gtcgtcgggactaatcaacaacaca

SEQ ID NO: 139678 - DNA, 25 bp, SARS Virus
tcgtcgggactaatcaacaacacaa

SEQ ID NO: 139679 - DNA, 25 bp, SARS Virus
cgtcgggactaaacaacaacacaat

SEQ ID NO: 139680 - DNA, 25 bp, SARS Virus
gtcgggactaataaacaacacaatg

SEQ ID NO: 139681 - DNA, 25 bp, SARS Virus
tcgggactaatcaacaacacaatgt

SEQ ID NO: 139682 - DNA, 25 bp, SARS Virus
cgggactaatcaacaacacaatgta

SEQ ID NO: 139683 - DNA, 25 bp, SARS Virus
gggactaatcaaaaacacaatgtat

SEQ ID NO: 139684 - DNA, 25 bp, SARS Virus
ggactaatcaacaacacaatgtatc

SEQ ID NO: 139685 - DNA, 25 bp, SARS Virus
gactaatcaacaacacaatgtatcc

SEQ ID NO: 139686 - DNA, 25 bp, SARS Virus
actaatcaacaaaacaatgtatcca

SEQ ID NO: 139687 - DNA, 25 bp, SARS Virus
ctaatcaacaacacaatgtatccaa

SEQ ID NO: 139688 - DNA, 25 bp, SARS Virus
taatcaacaacaaaatgtatccaaa

SEQ ID NO: 139689 - DNA, 25 bp, SARS Virus
aatcaacaacacaatgtatccaaac

SEQ ID NO: 139690 - DNA, 25 bp, SARS Virus
atcaacaacacaatgtatccaaact

SEQ ID NO: 139691 - DNA, 25 bp, SARS Virus
tcaacaacacaaagtatccaaactt

SEQ ID NO: 139692 - DNA, 25 bp, SARS Virus
caacaacacaatatatccaaacttc

SEQ ID NO: 139693 - DNA, 25 bp, SARS Virus
aacaacacaatgaatccaaacttcc

SEQ ID NO: 139694 - DNA, 25 bp, SARS Virus
acaacacaatgtatccaaacttccg

SEQ ID NO: 139695 - DNA, 25 bp, SARS Virus
caacacaatgtaaccaaacttccga

SEQ ID NO: 139696 - DNA, 25 bp, SARS Virus
aacacaatgtatacaaacttccgaa

SEQ ID NO: 139697 - DNA, 25 bp, SARS Virus
acacaatgtatcaaaacttccgaaa

SEQ ID NO: 139698 - DNA, 25 bp, SARS Virus
cacaatgtatccaaacttccgaaac

SEQ ID NO: 139699 - DNA, 25 bp, SARS Virus
acaatgtatccaaacttccgaaact

SEQ ID NO: 139700 - DNA, 25 bp, SARS Virus
caatgtatccaaacttccgaaactt

SEQ ID NO: 139701 - DNA, 25 bp, SARS Virus
aatgtatccaaaattccgaaacttc

SEQ ID NO: 139702 - DNA, 25 bp, SARS Virus
atgtatccaaacatccgaaacttca

SEQ ID NO: 139703 - DNA, 25 bp, SARS Virus
tgtatccaaactaccgaaacttcag

SEQ ID NO: 139704 - DNA, 25 bp, SARS Virus
gtatccaaacttacgaaacttcaga

SEQ ID NO: 139705 - DNA, 25 bp, SARS Virus
tatccaaacttcagaaacttcagac

SEQ ID NO: 139706 - DNA, 25 bp, SARS Virus
atccaaacttccaaaacttcagacg

SEQ ID NO: 139707 - DNA, 25 bp, SARS Virus
tccaaacttccgaaacttcagacgg

SEQ ID NO: 139708 - DNA, 25 bp, SARS Virus
ccaaacttccgaaacttcagacgga

SEQ ID NO: 139709 - DNA, 25 bp, SARS Virus
caaacttccgaaacttcagacggac

SEQ ID NO: 139710 - DNA, 25 bp, SARS Virus
aaacttccgaaaattcagacggaca

SEQ ID NO: 139711 - DNA, 25 bp, SARS Virus
aacttccgaaacatcagacggacat

SEQ ID NO: 139712 - DNA, 25 bp, SARS Virus
acttccgaaactacagacggacatt

SEQ ID NO: 139713 - DNA, 25 bp, SARS Virus
cttccgaaacttaagacggacatta

SEQ ID NO: 139714 - DNA, 25 bp, SARS Virus
ttccgaaacttcagacggacattaa

SEQ ID NO: 139715 - DNA, 25 bp, SARS Virus
tccgaaacttcaaacggacattaat

SEQ ID NO: 139716 - DNA, 25 bp, SARS Virus
ccgaaacttcagacggacattaatt

SEQ ID NO: 139717 - DNA, 25 bp, SARS Virus
cgaaacttcagaaggacattaattg

SEQ ID NO: 139718 - DNA, 25 bp, SARS Virus
gaaacttcagacagacattaattgg

SEQ ID NO: 139719 - DNA, 25 bp, SARS Virus
aaacttcagacgaacattaattgga

SEQ ID NO: 139720 - DNA, 25 bp, SARS Virus
aacttcagacggacattaattggac

SEQ ID NO: 139721 - DNA, 25 bp, SARS Virus
acttcagacggaaattaattggaca

SEQ ID NO: 139722 - DNA, 25 bp, SARS Virus
cttcagacggacattaattggacag

SEQ ID NO: 139723 - DNA, 25 bp, SARS Virus
ttcagacggacaataattggacagt

SEQ ID NO: 139724 - DNA, 25 bp, SARS Virus
tcagacggacataaattggacagtt

SEQ ID NO: 139725 - DNA, 25 bp, SARS Virus
cagacggacattaattggacagtta

SEQ ID NO: 139726 - DNA, 25 bp, SARS Virus
agacggacattaattggacagttaa

SEQ ID NO: 139727 - DNA, 25 bp, SARS Virus
gacggacattaaatggacagttaaa

SEQ ID NO: 139728 - DNA, 25 bp, SARS Virus
acggacattaataggacagttaaac

SEQ ID NO: 139729 - DNA, 25 bp, SARS Virus
cggacattaattagacagttaaaca

SEQ ID NO: 139730 - DNA, 25 bp, SARS Virus
ggacattaattgaacagttaaacat

SEQ ID NO: 139731 - DNA, 25 bp, SARS Virus
gacattaattggacagttaaacatg

SEQ ID NO: 139732 - DNA, 25 bp, SARS Virus
acattaattggaaagttaaacatgg

SEQ ID NO: 139733 - DNA, 25 bp, SARS Virus
cattaattggacagttaaacatgga

SEQ ID NO: 139734 - DNA, 25 bp, SARS Virus
attaattggacaattaaacatggag

SEQ ID NO: 139735 - DNA, 25 bp, SARS Virus
ttaattggacagataaacatggagg

SEQ ID NO: 139736 - DNA, 25 bp, SARS Virus
taattggacagtaaaacatggaggc

SEQ ID NO: 139737 - DNA, 25 bp, SARS Virus
aattggacagttaaacatggaggcg

SEQ ID NO: 139738 - DNA, 25 bp, SARS Virus
attggacagttaaacatggaggcgg

SEQ ID NO: 139739 - DNA, 25 bp, SARS Virus
ttggacagttaaacatggaggcgga

SEQ ID NO: 139740 - DNA, 25 bp, SARS Virus
tggacagttaaaaatggaggcggag

SEQ ID NO: 139741 - DNA, 25 bp, SARS Virus
ggacagttaaacatggaggcggagc

SEQ ID NO: 139742 - DNA, 25 bp, SARS Virus
gacagttaaacaaggaggcggagct

SEQ ID NO: 139743 - DNA, 25 bp, SARS Virus
acagttaaacatagaggcggagctg

SEQ ID NO: 139744 - DNA, 25 bp, SARS Virus
cagttaaacatgaaggcggagctga

SEQ ID NO: 139745 - DNA, 25 bp, SARS Virus
agttaaacatggaggcggagctgaa

SEQ ID NO: 139746 - DNA, 25 bp, SARS Virus
gttaaacatggaagcggagctgaaa

SEQ ID NO: 139747 - DNA, 25 bp, SARS Virus
ttaaacatggagacggagctgaaat

SEQ ID NO: 139748 - DNA, 25 bp, SARS Virus
taaacatggaggaggagctgaaata

SEQ ID NO: 139749 - DNA, 25 bp, SARS Virus
aaacatggaggcagagctgaaatag

SEQ ID NO: 139750 - DNA, 25 bp, SARS Virus
aacatggaggcgaagctgaaatagt

SEQ ID NO: 139751 - DNA, 25 bp, SARS Virus
acatggaggcggagctgaaatagtt

SEQ ID NO: 139752 - DNA, 25 bp, SARS Virus
catggaggcggaactgaaatagttc

SEQ ID NO: 139753 - DNA, 25 bp, SARS Virus
atggaggcggagatgaaatagttca

SEQ ID NO: 139754 - DNA, 25 bp, SARS Virus
tggaggcggagcagaaatagttcag

SEQ ID NO: 139755 - DNA, 25 bp, SARS Virus
ggaggcggagctaaaatagttcagc

SEQ ID NO: 139756 - DNA, 25 bp, SARS Virus
gaggcggagctgaaatagttcagcg

SEQ ID NO: 139757 - DNA, 25 bp, SARS Virus
aggcggagctgaaatagttcagcgc

SEQ ID NO: 139758 - DNA, 25 bp, SARS Virus
ggcggagctgaaatagttcagcgct

SEQ ID NO: 139759 - DNA, 25 bp, SARS Virus
gcggagctgaaaaagttcagcgctt

SEQ ID NO: 139760 - DNA, 25 bp, SARS Virus
cggagctgaaatagttcagcgcttt

SEQ ID NO: 139761 - DNA, 25 bp, SARS Virus
ggagctgaaataattcagcgctttc

SEQ ID NO: 139762 - DNA, 25 bp, SARS Virus
gagctgaaatagatcagcgctttcc

SEQ ID NO: 139763 - DNA, 25 bp, SARS Virus
agctgaaatagtacagcgctttcct

SEQ ID NO: 139764 - DNA, 25 bp, SARS Virus
gctgaaatagttaagcgctttccta

SEQ ID NO: 139765 - DNA, 25 bp, SARS Virus
ctgaaatagttcagcgctttcctat

SEQ ID NO: 139766 - DNA, 25 bp, SARS Virus
tgaaatagttcaacgctttcctata

SEQ ID NO: 139767 - DNA, 25 bp, SARS Virus
gaaatagttcagagctttcctatag

SEQ ID NO: 139768 - DNA, 25 bp, SARS Virus
aaatagttcagcactttcctatagt

SEQ ID NO: 139769 - DNA, 25 bp, SARS Virus
aatagttcagcgatttcctatagta

SEQ ID NO: 139770 - DNA, 25 bp, SARS Virus
atagttcagcgcattcctatagtaa

SEQ ID NO: 139771 - DNA, 25 bp, SARS Virus
tagttcagcgctatcctatagtaaa

SEQ ID NO: 139772 - DNA, 25 bp, SARS Virus
agttcagcgcttacctatagtaaat

SEQ ID NO: 139773 - DNA, 25 bp, SARS Virus
gttcagcgctttactatagtaaatc

SEQ ID NO: 139774 - DNA, 25 bp, SARS Virus
ttcagcgctttcatatagtaaatcg

SEQ ID NO: 139775 - DNA, 25 bp, SARS Virus
tcagcgctttccaatagtaaatcgt

SEQ ID NO: 139776 - DNA, 25 bp, SARS Virus
cagcgctttcctatagtaaatcgtg

SEQ ID NO: 139777 - DNA, 25 bp, SARS Virus
agcgctttcctaaagtaaatcgtgt

SEQ ID NO: 139778 - DNA, 25 bp, SARS Virus
gcgctttcctatagtaaatcgtgtg

SEQ ID NO: 139779 - DNA, 25 bp, SARS Virus
cgctttcctataataaatcgtgtga

SEQ ID NO: 139780 - DNA, 25 bp, SARS Virus
gctttcctatagaaaatcgtgtgaa

SEQ ID NO: 139781 - DNA, 25 bp, SARS Virus
ctttcctatagtaaatcgtgtgaac

SEQ ID NO: 139782 - DNA, 25 bp, SARS Virus
tttcctatagtaaatcgtgtgaact

SEQ ID NO: 139783 - DNA, 25 bp, SARS Virus
ttcctatagtaaatcgtgtgaactt

SEQ ID NO: 139784 - DNA, 25 bp, SARS Virus
tcctatagtaaaacgtgtgaacttt

SEQ ID NO: 139785 - DNA, 25 bp, SARS Virus
cctatagtaaatagtgtgaacttta

SEQ ID NO: 139786 - DNA, 25 bp, SARS Virus
ctatagtaaatcatgtgaactttaa

SEQ ID NO: 139787 - DNA, 25 bp, SARS Virus
tatagtaaatcgagtgaactttaac

SEQ ID NO: 139788 - DNA, 25 bp, SARS Virus
atagtaaatcgtatgaactttaacg

SEQ ID NO: 139789 - DNA, 25 bp, SARS Virus
tagtaaatcgtgagaactttaacgt

SEQ ID NO: 139790 - DNA, 25 bp, SARS Virus
agtaaatcgtgtaaactttaacgtg

SEQ ID NO: 139791 - DNA, 25 bp, SARS Virus
gtaaatcgtgtgaactttaacgtgg

SEQ ID NO: 139792 - DNA, 25 bp, SARS Virus
taaatcgtgtgaactttaacgtggt

SEQ ID NO: 139793 - DNA, 25 bp, SARS Virus
aaatcgtgtgaaatttaacgtggtt

SEQ ID NO: 139794 - DNA, 25 bp, SARS Virus
aatcgtgtgaacattaacgtggttt

SEQ ID NO: 139795 - DNA, 25 bp, SARS Virus
atcgtgtgaactataacgtggtttt

SEQ ID NO: 139796 - DNA, 25 bp, SARS Virus
tcgtgtgaacttaaacgtggtttta

SEQ ID NO: 139797 - DNA, 25 bp, SARS Virus
cgtgtgaactttaacgtggttttaa

SEQ ID NO: 139798 - DNA, 25 bp, SARS Virus
gtgtgaactttaacgtggttttaat

SEQ ID NO: 139799 - DNA, 25 bp, SARS Virus
tgtgaactttaaagtggttttaatc

SEQ ID NO: 139800 - DNA, 25 bp, SARS Virus
gtgaactttaacatggttttaatct

SEQ ID NO: 139801 - DNA, 25 bp, SARS Virus
tgaactttaacgaggttttaatctc

SEQ ID NO: 139802 - DNA, 25 bp, SARS Virus
gaactttaacgtagttttaatctcg

SEQ ID NO: 139803 - DNA, 25 bp, SARS Virus
aactttaacgtgattttaatctcga

SEQ ID NO: 139804 - DNA, 25 bp, SARS Virus
actttaacgtggatttaatctcgat

SEQ ID NO: 139805 - DNA, 25 bp, SARS Virus
ctttaacgtggtattaatctcgatt

SEQ ID NO: 139806 - DNA, 25 bp, SARS Virus
tttaacgtggttataatctcgattc

SEQ ID NO: 139807 - DNA, 25 bp, SARS Virus
ttaacgtggtttaaatctcgattca

SEQ ID NO: 139808 - DNA, 25 bp, SARS Virus
taacgtggttttaatctcgattcaa

SEQ ID NO: 139809 - DNA, 25 bp, SARS Virus
aacgtggttttaatctcgattcaac

SEQ ID NO: 139810 - DNA, 25 bp, SARS Virus
acgtggttttaaactcgattcaaca

SEQ ID NO: 139811 - DNA, 25 bp, SARS Virus
cgtggttttaatatcgattcaacaa

SEQ ID NO: 139812 - DNA, 25 bp, SARS Virus
gtggttttaatcacgattcaacaaa

SEQ ID NO: 139813 - DNA, 25 bp, SARS Virus
tggttttaatctagattcaacaaat

SEQ ID NO: 139814 - DNA, 25 bp, SARS Virus
ggttttaatctcaattcaacaaatt

SEQ ID NO: 139815 - DNA, 25 bp, SARS Virus
gttttaatctcgattcaacaaattg

SEQ ID NO: 139816 - DNA, 25 bp, SARS Virus
ttttaatctcgaatcaacaaattgt

SEQ ID NO: 139817 - DNA, 25 bp, SARS Virus
tttaatctcgatacaacaaattgtt

SEQ ID NO: 139818 - DNA, 25 bp, SARS Virus
ttaatctcgattaaacaaattgttc

SEQ ID NO: 139819 - DNA, 25 bp, SARS Virus
taatctcgattcaacaaattgttca

SEQ ID NO: 139820 - DNA, 25 bp, SARS Virus
aatctcgattcaacaaattgttcac

SEQ ID NO: 139821 - DNA, 25 bp, SARS Virus
atctcgattcaaaaaattgttcaca

SEQ ID NO: 139822 - DNA, 25 bp, SARS Virus
tctcgattcaacaaattgttcacac

SEQ ID NO: 139823 - DNA, 25 bp, SARS Virus
ctcgattcaacaaattgttcacaca

SEQ ID NO: 139824 - DNA, 25 bp, SARS Virus
tcgattcaacaaattgttcacacaa

SEQ ID NO: 139825 - DNA, 25 bp, SARS Virus
cgattcaacaaaatgttcacacaaa

SEQ ID NO: 139826 - DNA, 25 bp, SARS Virus
gattcaacaaatagttcacacaaat

SEQ ID NO: 139827 - DNA, 25 bp, SARS Virus
attcaacaaattattcacacaaatt

SEQ ID NO: 139828 - DNA, 25 bp, SARS Virus
ttcaacaaattgatcacacaaatta

SEQ ID NO: 139829 - DNA, 25 bp, SARS Virus
tcaacaaattgtacacacaaattac

SEQ ID NO: 139830 - DNA, 25 bp, SARS Virus
caacaaattgttaacacaaattacg

SEQ ID NO: 139831 - DNA, 25 bp, SARS Virus
aacaaattgttcacacaaattacga

SEQ ID NO: 139832 - DNA, 25 bp, SARS Virus
acaaattgttcaaacaaattacgaa

SEQ ID NO: 139833 - DNA, 25 bp, SARS Virus
caaattgttcacacaaattacgaac

SEQ ID NO: 139834 - DNA, 25 bp, SARS Virus
aaattgttcacaaaaattacgaact

SEQ ID NO: 139835 - DNA, 25 bp, SARS Virus
aattgttcacacaaattacgaactc

SEQ ID NO: 139836 - DNA, 25 bp, SARS Virus
attgttcacacaaattacgaactcg

SEQ ID NO: 139837 - DNA, 25 bp, SARS Virus
ttgttcacacaaattacgaactcgt

SEQ ID NO: 139838 - DNA, 25 bp, SARS Virus
tgttcacacaaaatacgaactcgta

SEQ ID NO: 139839 - DNA, 25 bp, SARS Virus
gttcacacaaataacgaactcgtaa

SEQ ID NO: 139840 - DNA, 25 bp, SARS Virus
ttcacacaaattacgaactcgtaag

SEQ ID NO: 139841 - DNA, 25 bp, SARS Virus
tcacacaaattaagaactcgtaaga

SEQ ID NO: 139842 - DNA, 25 bp, SARS Virus
cacacaaattacaaactcgtaagac

SEQ ID NO: 139843 - DNA, 25 bp, SARS Virus
acacaaattacgaactcgtaagacc

SEQ ID NO: 139844 - DNA, 25 bp, SARS Virus
cacaaattacgaactcgtaagacca

SEQ ID NO: 139845 - DNA, 25 bp, SARS Virus
acaaattacgaaatcgtaagaccaa

SEQ ID NO: 139846 - DNA, 25 bp, SARS Virus
caaattacgaacacgtaagaccaat

SEQ ID NO: 139847 - DNA, 25 bp, SARS Virus
aaattacgaactagtaagaccaatt

SEQ ID NO: 139848 - DNA, 25 bp, SARS Virus
aattacgaactcataagaccaattg

SEQ ID NO: 139849 - DNA, 25 bp, SARS Virus
attacgaactcgaaagaccaattgt

SEQ ID NO: 139850 - DNA, 25 bp, SARS Virus
ttacgaactcgtaagaccaattgtt

SEQ ID NO: 139851 - DNA, 25 bp, SARS Virus
tacgaactcgtaagaccaattgttg

SEQ ID NO: 139852 - DNA, 25 bp, SARS Virus
acgaactcgtaaaaccaattgttgc

SEQ ID NO: 139853 - DNA, 25 bp, SARS Virus
cgaactcgtaagaccaattgttgca

SEQ ID NO: 139854 - DNA, 25 bp, SARS Virus
gaactcgtaagaacaattgttgcag

SEQ ID NO: 139855 - DNA, 25 bp, SARS Virus
aactcgtaagacaaattgttgcaga

SEQ ID NO: 139856 - DNA, 25 bp, SARS Virus
actcgtaagaccaattgttgcagaa

SEQ ID NO: 139857 - DNA, 25 bp, SARS Virus
ctcgtaagaccaattgttgcagaac

SEQ ID NO: 139858 - DNA, 25 bp, SARS Virus
tcgtaagaccaaatgttgcagaacg

SEQ ID NO: 139859 - DNA, 25 bp, SARS Virus
cgtaagaccaatagttgcagaacgt

SEQ ID NO: 139860 - DNA, 25 bp, SARS Virus
gtaagaccaattattgcagaacgtc

SEQ ID NO: 139861 - DNA, 25 bp, SARS Virus
taagaccaattgatgcagaacgtcg

SEQ ID NO: 139862 - DNA, 25 bp, SARS Virus
aagaccaattgtagcagaacgtcga

SEQ ID NO: 139863 - DNA, 25 bp, SARS Virus
agaccaattgttacagaacgtcgaa

SEQ ID NO: 139864 - DNA, 25 bp, SARS Virus
gaccaattgttgaagaacgtcgaac

SEQ ID NO: 139865 - DNA, 25 bp, SARS Virus
accaattgttgcagaacgtcgaacg

SEQ ID NO: 139866 - DNA, 25 bp, SARS Virus
ccaattgttgcaaaacgtcgaacgg

SEQ ID NO: 139867 - DNA, 25 bp, SARS Virus
caattgttgcagaacgtcgaacggg

SEQ ID NO: 139868 - DNA, 25 bp, SARS Virus
aattgttgcagaacgtcgaacgggt

SEQ ID NO: 139869 - DNA, 25 bp, SARS Virus
attgttgcagaaagtcgaacgggtt

SEQ ID NO: 139870 - DNA, 25 bp, SARS Virus
ttgttgcagaacatcgaacgggtta

SEQ ID NO: 139871 - DNA, 25 bp, SARS Virus
tgttgcagaacgacgaacgggttac

SEQ ID NO: 139872 - DNA, 25 bp, SARS Virus
gttgcagaacgtagaacgggttacg

SEQ ID NO: 139873 - DNA, 25 bp, SARS Virus
ttgcagaacgtcaaacgggttacgt

SEQ ID NO: 139874 - DNA, 25 bp, SARS Virus
tgcagaacgtcgaacgggttacgtc

SEQ ID NO: 139875 - DNA, 25 bp, SARS Virus
gcagaacgtcgaacgggttacgtca

SEQ ID NO: 139876 - DNA, 25 bp, SARS Virus
cagaacgtcgaaagggttacgtcaa

SEQ ID NO: 139877 - DNA, 25 bp, SARS Virus
agaacgtcgaacaggttacgtcaac

SEQ ID NO: 139878 - DNA, 25 bp, SARS Virus
gaacgtcgaacgagttacgtcaact

SEQ ID NO: 139879 - DNA, 25 bp, SARS Virus
aacgtcgaacggattacgtcaacta

SEQ ID NO: 139880 - DNA, 25 bp, SARS Virus
acgtcgaacgggatacgtcaactac

SEQ ID NO: 139881 - DNA, 25 bp, SARS Virus
cgtcgaacgggtaacgtcaactaca

SEQ ID NO: 139882 - DNA, 25 bp, SARS Virus
gtcgaacgggttacgtcaactacaa

SEQ ID NO: 139883 - DNA, 25 bp, SARS Virus
tcgaacgggttaagtcaactacaac

SEQ ID NO: 139884 - DNA, 25 bp, SARS Virus
cgaacgggttacatcaactacaaca

SEQ ID NO: 139885 - DNA, 25 bp, SARS Virus
gaacgggttacgacaactacaacaa

SEQ ID NO: 139886 - DNA, 25 bp, SARS Virus
aacgggttacgtaaactacaacaac

SEQ ID NO: 139887 - DNA, 25 bp, SARS Virus
acgggttacgtcaactacaacaaca

SEQ ID NO: 139888 - DNA, 25 bp, SARS Virus
cgggttacgtcaactacaacaacat

SEQ ID NO: 139889 - DNA, 25 bp, SARS Virus
gggttacgtcaaatacaacaacatt

SEQ ID NO: 139890 - DNA, 25 bp, SARS Virus
ggttacgtcaacaacaacaacattc

SEQ ID NO: 139891 - DNA, 25 bp, SARS Virus
gttacgtcaactacaacaacattca

SEQ ID NO: 139892 - DNA, 25 bp, SARS Virus
ttacgtcaactaaaacaacattcac

SEQ ID NO: 139893 - DNA, 25 bp, SARS Virus
tacgtcaactacaacaacattcact

SEQ ID NO: 139894 - DNA, 25 bp, SARS Virus
acgtcaactacaacaacattcacta

SEQ ID NO: 139895 - DNA, 25 bp, SARS Virus
cgtcaactacaaaaacattcactaa

SEQ ID NO: 139896 - DNA, 25 bp, SARS Virus
gtcaactacaacaacattcactaag

SEQ ID NO: 139897 - DNA, 25 bp, SARS Virus
tcaactacaacaacattcactaaga

SEQ ID NO: 139898 - DNA, 25 bp, SARS Virus
caactacaacaaaattcactaagaa

SEQ ID NO: 139899 - DNA, 25 bp, SARS Virus
aactacaacaacattcactaagaac

SEQ ID NO: 139900 - DNA, 25 bp, SARS Virus
actacaacaacaatcactaagaact

SEQ ID NO: 139901 - DNA, 25 bp, SARS Virus
ctacaacaacatacactaagaactt

SEQ ID NO: 139902 - DNA, 25 bp, SARS Virus
tacaacaacattaactaagaactta

SEQ ID NO: 139903 - DNA, 25 bp, SARS Virus
acaacaacattcactaagaacttaa

SEQ ID NO: 139904 - DNA, 25 bp, SARS Virus
caacaacattcaataagaacttaaa

SEQ ID NO: 139905 - DNA, 25 bp, SARS Virus
aacaacattcacaaagaacttaaac

SEQ ID NO: 139906 - DNA, 25 bp, SARS Virus
acaacattcactaagaacttaaact

SEQ ID NO: 139907 - DNA, 25 bp, SARS Virus
caacattcactaagaacttaaactg

SEQ ID NO: 139908 - DNA, 25 bp, SARS Virus
aacattcactaaaaacttaaactga

SEQ ID NO: 139909 - DNA, 25 bp, SARS Virus
acattcactaagaacttaaactgat

SEQ ID NO: 139910 - DNA, 25 bp, SARS Virus
cattcactaagaacttaaactgatt

SEQ ID NO: 139911 - DNA, 25 bp, SARS Virus
attcactaagaaattaaactgatta

SEQ ID NO: 139912 - DNA, 25 bp, SARS Virus
ttcactaagaacataaactgattag

SEQ ID NO: 139913 - DNA, 25 bp, SARS Virus
tcactaagaactaaaactgattagc

SEQ ID NO: 139914 - DNA, 25 bp, SARS Virus
cactaagaacttaaactgattagcg

SEQ ID NO: 139915 - DNA, 25 bp, SARS Virus
actaagaacttaaactgattagcgg

SEQ ID NO: 139916 - DNA, 25 bp, SARS Virus
ctaagaacttaaactgattagcgga

SEQ ID NO: 139917 - DNA, 25 bp, SARS Virus
taagaacttaaaatgattagcggaa

SEQ ID NO: 139918 - DNA, 25 bp, SARS Virus
aagaacttaaacagattagcggaac

SEQ ID NO: 139919 - DNA, 25 bp, SARS Virus
agaacttaaactaattagcggaaca

SEQ ID NO: 139920 - DNA, 25 bp, SARS Virus
gaacttaaactgattagcggaacaa

SEQ ID NO: 139921 - DNA, 25 bp, SARS Virus
aacttaaactgaatagcggaacaat

SEQ ID NO: 139922 - DNA, 25 bp, SARS Virus
acttaaactgataagcggaacaatt

SEQ ID NO: 139923 - DNA, 25 bp, SARS Virus
cttaaactgattagcggaacaattt

SEQ ID NO: 139924 - DNA, 25 bp, SARS Virus
ttaaactgattaacggaacaattta

SEQ ID NO: 139925 - DNA, 25 bp, SARS Virus
taaactgattagaggaacaatttaa

SEQ ID NO: 139926 - DNA, 25 bp, SARS Virus
aaactgattagcagaacaatttaac

SEQ ID NO: 139927 - DNA, 25 bp, SARS Virus
aactgattagcgaaacaatttaacc

SEQ ID NO: 139928 - DNA, 25 bp, SARS Virus
actgattagcggaacaatttaacca

SEQ ID NO: 139929 - DNA, 25 bp, SARS Virus
ctgattagcggaacaatttaaccaa

SEQ ID NO: 139930 - DNA, 25 bp, SARS Virus
tgattagcggaaaaatttaaccaac

SEQ ID NO: 139931 - DNA, 25 bp, SARS Virus
gattagcggaacaatttaaccaacc

SEQ ID NO: 139932 - DNA, 25 bp, SARS Virus
attagcggaacaatttaaccaaccg

SEQ ID NO: 139933 - DNA, 25 bp, SARS Virus
ttagcggaacaaattaaccaaccgc

SEQ ID NO: 139934 - DNA, 25 bp, SARS Virus
tagcggaacaatataaccaaccgct

SEQ ID NO: 139935 - DNA, 25 bp, SARS Virus
agcggaacaattaaaccaaccgcta

SEQ ID NO: 139936 - DNA, 25 bp, SARS Virus
gcggaacaatttaaccaaccgctaa

SEQ ID NO: 139937 - DNA, 25 bp, SARS Virus
cggaacaatttaaccaaccgctaaa

SEQ ID NO: 139938 - DNA, 25 bp, SARS Virus
ggaacaatttaaacaaccgctaaac

SEQ ID NO: 139939 - DNA, 25 bp, SARS Virus
gaacaatttaacaaaccgctaaaca

SEQ ID NO: 139940 - DNA, 25 bp, SARS Virus
aacaatttaaccaaccgctaaacaa

SEQ ID NO: 139941 - DNA, 25 bp, SARS Virus
acaatttaaccaaccgctaaacaaa

SEQ ID NO: 139942 - DNA, 25 bp, SARS Virus
caatttaaccaaacgctaaacaaaa

SEQ ID NO: 139943 - DNA, 25 bp, SARS Virus
aatttaaccaacagctaaacaaaaa

SEQ ID NO: 139944 - DNA, 25 bp, SARS Virus
atttaaccaaccactaaacaaaaac

SEQ ID NO: 139945 - DNA, 25 bp, SARS Virus
tttaaccaaccgataaacaaaaacc

SEQ ID NO: 139946 - DNA, 25 bp, SARS Virus
ttaaccaaccgcaaaacaaaaacca

SEQ ID NO: 139947 - DNA, 25 bp, SARS Virus
taaccaaccgctaaacaaaaaccaa

SEQ ID NO: 139948 - DNA, 25 bp, SARS Virus
aaccaaccgctaaacaaaaaccaag

SEQ ID NO: 139949 - DNA, 25 bp, SARS Virus
accaaccgctaaacaaaaaccaaga

SEQ ID NO: 139950 - DNA, 25 bp, SARS Virus
ccaaccgctaaaaaaaaaccaagag

SEQ ID NO: 139951 - DNA, 25 bp, SARS Virus
caaccgctaaacaaaaaccaagagt

SEQ ID NO: 139952 - DNA, 25 bp, SARS Virus
aaccgctaaacaaaaaccaagagta

SEQ ID NO: 139953 - DNA, 25 bp, SARS Virus
accgctaaacaaaaaccaagagtat

SEQ ID NO: 139954 - DNA, 25 bp, SARS Virus
ccgctaaacaaaaaccaagagtatc

SEQ ID NO: 139955 - DNA, 25 bp, SARS Virus
cgctaaacaaaaaccaagagtatct

SEQ ID NO: 139956 - DNA, 25 bp, SARS Virus
gctaaacaaaaaacaagagtatctc

SEQ ID NO: 139957 - DNA, 25 bp, SARS Virus
ctaaacaaaaacaaagagtatctct

SEQ ID NO: 139958 - DNA, 25 bp, SARS Virus
taaacaaaaaccaagagtatctctt

SEQ ID NO: 139959 - DNA, 25 bp, SARS Virus
aaacaaaaaccaagagtatctcttg

SEQ ID NO: 139960 - DNA, 25 bp, SARS Virus
aacaaaaaccaaaagtatctcttgt

SEQ ID NO: 139961 - DNA, 25 bp, SARS Virus
acaaaaaccaagagtatctcttgta

SEQ ID NO: 139962 - DNA, 25 bp, SARS Virus
caaaaaccaagaatatctcttgtaa

SEQ ID NO: 139963 - DNA, 25 bp, SARS Virus
aaaaaccaagagaatctcttgtaaa

SEQ ID NO: 139964 - DNA, 25 bp, SARS Virus
aaaaccaagagtatctcttgtaaaa

SEQ ID NO: 139965 - DNA, 25 bp, SARS Virus
aaaccaagagtaactcttgtaaaac

SEQ ID NO: 139966 - DNA, 25 bp, SARS Virus
aaccaagagtatatcttgtaaaacc

SEQ ID NO: 139967 - DNA, 25 bp, SARS Virus
accaagagtatcacttgtaaaaccc

SEQ ID NO: 139968 - DNA, 25 bp, SARS Virus
ccaagagtatctattgtaaaaccca

SEQ ID NO: 139969 - DNA, 25 bp, SARS Virus
caagagtatctcatgtaaaacccat

SEQ ID NO: 139970 - DNA, 25 bp, SARS Virus
aagagtatctctagtaaaacccatt

SEQ ID NO: 139971 - DNA, 25 bp, SARS Virus
agagtatctcttataaaacccattg

SEQ ID NO: 139972 - DNA, 25 bp, SARS Virus
gagtatctcttgaaaaacccattga

SEQ ID NO: 139973 - DNA, 25 bp, SARS Virus
agtatctcttgtaaaacccattgag

SEQ ID NO: 139974 - DNA, 25 bp, SARS Virus
gtatctcttgtaaaacccattgagg

SEQ ID NO: 139975 - DNA, 25 bp, SARS Virus
tatctcttgtaaaacccattgaggt

SEQ ID NO: 139976 - DNA, 25 bp, SARS Virus
atctcttgtaaaacccattgaggtt

SEQ ID NO: 139977 - DNA, 25 bp, SARS Virus
tctcttgtaaaaaccattgaggtta

SEQ ID NO: 139978 - DNA, 25 bp, SARS Virus
ctcttgtaaaacacattgaggttac

SEQ ID NO: 139979 - DNA, 25 bp, SARS Virus
tcttgtaaaaccaattgaggttacg

SEQ ID NO: 139980 - DNA, 25 bp, SARS Virus
cttgtaaaacccattgaggttacgg

SEQ ID NO: 139981 - DNA, 25 bp, SARS Virus
ttgtaaaacccaatgaggttacggt

SEQ ID NO: 139982 - DNA, 25 bp, SARS Virus
tgtaaaacccatagaggttacggta

SEQ ID NO: 139983 - DNA, 25 bp, SARS Virus
gtaaaacccattaaggttacggtaa

SEQ ID NO: 139984 - DNA, 25 bp, SARS Virus
taaaacccattgaggttacggtaac

SEQ ID NO: 139985 - DNA, 25 bp, SARS Virus
aaaacccattgaagttacggtaact

SEQ ID NO: 139986 - DNA, 25 bp, SARS Virus
aaacccattgagattacggtaactt

SEQ ID NO: 139987 - DNA, 25 bp, SARS Virus
aacccattgaggatacggtaacttg

SEQ ID NO: 139988 - DNA, 25 bp, SARS Virus
acccattgaggtaacggtaacttgg

SEQ ID NO: 139989 - DNA, 25 bp, SARS Virus
cccattgaggttacggtaacttgga

SEQ ID NO: 139990 - DNA, 25 bp, SARS Virus
ccattgaggttaaggtaacttggat

SEQ ID NO: 139991 - DNA, 25 bp, SARS Virus
cattgaggttacagtaacttggata

SEQ ID NO: 139992 - DNA, 25 bp, SARS Virus
attgaggttacgataacttggatat

SEQ ID NO: 139993 - DNA, 25 bp, SARS Virus
ttgaggttacggaaacttggatata

SEQ ID NO: 139994 - DNA, 25 bp, SARS Virus
tgaggttacggtaacttggatatac

SEQ ID NO: 139995 - DNA, 25 bp, SARS Virus
gaggttacggtaacttggatatacg

SEQ ID NO: 139996 - DNA, 25 bp, SARS Virus
aggttacggtaaattggatatacgg

SEQ ID NO: 139997 - DNA, 25 bp, SARS Virus
ggttacggtaacatggatatacggt

SEQ ID NO: 139998 - DNA, 25 bp, SARS Virus
gttacggtaactaggatatacggta

SEQ ID NO: 139999 - DNA, 25 bp, SARS Virus
ttacggtaacttagatatacggtaa

SEQ ID NO: 140000 - DNA, 25 bp, SARS Virus
tacggtaacttgaatatacggtaaa

SEQ ID NO: 140001 - DNA, 25 bp, SARS Virus
acggtaacttggatatacggtaaac

SEQ ID NO: 140002 - DNA, 25 bp, SARS Virus
cggtaacttggaaatacggtaaacg

SEQ ID NO: 140003 - DNA, 25 bp, SARS Virus
ggtaacttggatatacggtaaacgt

SEQ ID NO: 140004 - DNA, 25 bp, SARS Virus
gtaacttggataaacggtaaacgta

SEQ ID NO: 140005 - DNA, 25 bp, SARS Virus
taacttggatatacggtaaacgtat

SEQ ID NO: 140006 - DNA, 25 bp, SARS Virus
aacttggatataaggtaaacgtatc

SEQ ID NO: 140007 - DNA, 25 bp, SARS Virus
acttggatatacagtaaacgtatcg

SEQ ID NO: 140008 - DNA, 25 bp, SARS Virus
cttggatatacgataaacgtatcgt

SEQ ID NO: 140009 - DNA, 25 bp, SARS Virus
ttggatatacggaaaacgtatcgtt

SEQ ID NO: 140010 - DNA, 25 bp, SARS Virus
tggatatacggtaaacgtatcgttt

SEQ ID NO: 140011 - DNA, 25 bp, SARS Virus
ggatatacggtaaacgtatcgtttt

SEQ ID NO: 140012 - DNA, 25 bp, SARS Virus
gatatacggtaaacgtatcgttttc

SEQ ID NO: 140013 - DNA, 25 bp, SARS Virus
atatacggtaaaagtatcgttttcc

SEQ ID NO: 140014 - DNA, 25 bp, SARS Virus
tatacggtaaacatatcgttttcca

SEQ ID NO: 140015 - DNA, 25 bp, SARS Virus
atacggtaaacgaatcgttttccat

SEQ ID NO: 140016 - DNA, 25 bp, SARS Virus
tacggtaaacgtatcgttttccata

SEQ ID NO: 140017 - DNA, 25 bp, SARS Virus
acggtaaacgtaacgttttccataa

SEQ ID NO: 140018 - DNA, 25 bp, SARS Virus
cggtaaacgtatagttttccataaa

SEQ ID NO: 140019 - DNA, 25 bp, SARS Virus
ggtaaacgtatcattttccataaac

SEQ ID NO: 140020 - DNA, 25 bp, SARS Virus
gtaaacgtatcgatttccataaact

SEQ ID NO: 140021 - DNA, 25 bp, SARS Virus
taaacgtatcgtattccataaactt

SEQ ID NO: 140022 - DNA, 25 bp, SARS Virus
aaacgtatcgttatccataaacttc

SEQ ID NO: 140023 - DNA, 25 bp, SARS Virus
aacgtatcgtttaccataaacttct

SEQ ID NO: 140024 - DNA, 25 bp, SARS Virus
acgtatcgttttacataaacttctc

SEQ ID NO: 140025 - DNA, 25 bp, SARS Virus
cgtatcgttttcaataaacttctcg

SEQ ID NO: 140026 - DNA, 25 bp, SARS Virus
gtatcgttttccataaacttctcgt

SEQ ID NO: 140027 - DNA, 25 bp, SARS Virus
tatcgttttccaaaaacttctcgtc

SEQ ID NO: 140028 - DNA, 25 bp, SARS Virus
atcgttttccataaacttctcgtcg

SEQ ID NO: 140029 - DNA, 25 bp, SARS Virus
tcgttttccataaacttctcgtcgc

SEQ ID NO: 140030 - DNA, 25 bp, SARS Virus
cgttttccataaacttctcgtcgcg

SEQ ID NO: 140031 - DNA, 25 bp, SARS Virus
gttttccataaaattctcgtcgcgg

SEQ ID NO: 140032 - DNA, 25 bp, SARS Virus
ttttccataaacatctcgtcgcggt

SEQ ID NO: 140033 - DNA, 25 bp, SARS Virus
tttccataaactactcgtcgcggtc

SEQ ID NO: 140034 - DNA, 25 bp, SARS Virus
ttccataaacttatcgtcgcggtcg

SEQ ID NO: 140035 - DNA, 25 bp, SARS Virus
tccataaacttcacgtcgcggtcgt

SEQ ID NO: 140036 - DNA, 25 bp, SARS Virus
ccataaacttctagtcgcggtcgtg

SEQ ID NO: 140037 - DNA, 25 bp, SARS Virus
cataaacttctcatcgcggtcgtgg

SEQ ID NO: 140038 - DNA, 25 bp, SARS Virus
ataaacttctcgacgcggtcgtggt

SEQ ID NO: 140039 - DNA, 25 bp, SARS Virus
taaacttctcgtagcggtcgtggtt

SEQ ID NO: 140040 - DNA, 25 bp, SARS Virus
aaacttctcgtcacggtcgtggttt

SEQ ID NO: 140041 - DNA, 25 bp, SARS Virus
aacttctcgtcgaggtcgtggttta

SEQ ID NO: 140042 - DNA, 25 bp, SARS Virus
acttctcgtcgcagtcgtggtttac

SEQ ID NO: 140043 - DNA, 25 bp, SARS Virus
cttctcgtcgcgatcgtggtttaca

SEQ ID NO: 140044 - DNA, 25 bp, SARS Virus
ttctcgtcgcggacgtggtttacag

SEQ ID NO: 140045 - DNA, 25 bp, SARS Virus
tctcgtcgcggtagtggtttacagg

SEQ ID NO: 140046 - DNA, 25 bp, SARS Virus
ctcgtcgcggtcatggtttacaggt

SEQ ID NO: 140047 - DNA, 25 bp, SARS Virus
tcgtcgcggtcgaggtttacaggta

SEQ ID NO: 140048 - DNA, 25 bp, SARS Virus
cgtcgcggtcgtagtttacaggtag

SEQ ID NO: 140049 - DNA, 25 bp, SARS Virus
gtcgcggtcgtgatttacaggtagg

SEQ ID NO: 140050 - DNA, 25 bp, SARS Virus
tcgcggtcgtggattacaggtaggt

SEQ ID NO: 140051 - DNA, 25 bp, SARS Virus
cgcggtcgtggtatacaggtaggtc

SEQ ID NO: 140052 - DNA, 25 bp, SARS Virus
gcggtcgtggttaacaggtaggtcg

SEQ ID NO: 140053 - DNA, 25 bp, SARS Virus
cggtcgtggtttacaggtaggtcgt

SEQ ID NO: 140054 - DNA, 25 bp, SARS Virus
ggtcgtggtttaaaggtaggtcgtc

SEQ ID NO: 140055 - DNA, 25 bp, SARS Virus
gtcgtggtttacaggtaggtcgtca

SEQ ID NO: 140056 - DNA, 25 bp, SARS Virus
tcgtggtttacaagtaggtcgtcac

SEQ ID NO: 140057 - DNA, 25 bp, SARS Virus
cgtggtttacagataggtcgtcacc

SEQ ID NO: 140058 - DNA, 25 bp, SARS Virus
gtggtttacaggaaggtcgtcaccg

SEQ ID NO: 140059 - DNA, 25 bp, SARS Virus
tggtttacaggtaggtcgtcaccgt

SEQ ID NO: 140060 - DNA, 25 bp, SARS Virus
ggtttacaggtaagtcgtcaccgtc

SEQ ID NO: 140061 - DNA, 25 bp, SARS Virus
gtttacaggtagatcgtcaccgtca

SEQ ID NO: 140062 - DNA, 25 bp, SARS Virus
tttacaggtaggacgtcaccgtcat

SEQ ID NO: 140063 - DNA, 25 bp, SARS Virus
ttacaggtaggtagtcaccgtcatg

SEQ ID NO: 140064 - DNA, 25 bp, SARS Virus
tacaggtaggtcatcaccgtcatgg

SEQ ID NO: 140065 - DNA, 25 bp, SARS Virus
acaggtaggtcgacaccgtcatggt

SEQ ID NO: 140066 - DNA, 25 bp, SARS Virus
caggtaggtcgtaaccgtcatggtg

SEQ ID NO: 140067 - DNA, 25 bp, SARS Virus
aggtaggtcgtcaccgtcatggtga

SEQ ID NO: 140068 - DNA, 25 bp, SARS Virus
ggtaggtcgtcaacgtcatggtgat

SEQ ID NO: 140069 - DNA, 25 bp, SARS Virus
gtaggtcgtcacagtcatggtgatt

SEQ ID NO: 140070 - DNA, 25 bp, SARS Virus
taggtcgtcaccatcatggtgattg

SEQ ID NO: 140071 - DNA, 25 bp, SARS Virus
aggtcgtcaccgacatggtgattga

SEQ ID NO: 140072 - DNA, 25 bp, SARS Virus
ggtcgtcaccgtaatggtgattgat

SEQ ID NO: 140073 - DNA, 25 bp, SARS Virus
gtcgtcaccgtcatggtgattgatc

SEQ ID NO: 140074 - DNA, 25 bp, SARS Virus
tcgtcaccgtcaaggtgattgatct

SEQ ID NO: 140075 - DNA, 25 bp, SARS Virus
cgtcaccgtcatagtgattgatctc

SEQ ID NO: 140076 - DNA, 25 bp, SARS Virus
gtcaccgtcatgatgattgatctcg

SEQ ID NO: 140077 - DNA, 25 bp, SARS Virus
tcaccgtcatggagattgatctcgt

SEQ ID NO: 140078 - DNA, 25 bp, SARS Virus
caccgtcatggtaattgatctcgtc

SEQ ID NO: 140079 - DNA, 25 bp, SARS Virus
accgtcatggtgattgatctcgtcg

SEQ ID NO: 140080 - DNA, 25 bp, SARS Virus
ccgtcatggtgaatgatctcgtcgt

SEQ ID NO: 140081 - DNA, 25 bp, SARS Virus
cgtcatggtgatagatctcgtcgtc

SEQ ID NO: 140082 - DNA, 25 bp, SARS Virus
gtcatggtgattaatctcgtcgtca

SEQ ID NO: 140083 - DNA, 25 bp, SARS Virus
tcatggtgattgatctcgtcgtcac

SEQ ID NO: 140084 - DNA, 25 bp, SARS Virus
catggtgattgaactcgtcgtcaca

SEQ ID NO: 140085 - DNA, 25 bp, SARS Virus
atggtgattgatatcgtcgtcacat

SEQ ID NO: 140086 - DNA, 25 bp, SARS Virus
tggtgattgatcacgtcgtcacatc

SEQ ID NO: 140087 - DNA, 25 bp, SARS Virus
ggtgattgatctagtcgtcacatcc

SEQ ID NO: 140088 - DNA, 25 bp, SARS Virus
gtgattgatctcatcgtcacatccg

SEQ ID NO: 140089 - DNA, 25 bp, SARS Virus
ttcagttgagaacaactaacaggtt

SEQ ID NO: 140090 - DNA, 25 bp, SARS Virus
tcagttgagaaacactaacaggttc

SEQ ID NO: 140091 - DNA, 25 bp, SARS Virus
cagttgagaaaacctaacaggttct

SEQ ID NO: 140092 - DNA, 25 bp, SARS Virus
agttgagaaaaactaacaggttctt

SEQ ID NO: 140093 - DNA, 25 bp, SARS Virus
gttgagaaaaaccaacaggttcttg

SEQ ID NO: 140094 - DNA, 25 bp, SARS Virus
ttgagaaaaactcacaggttcttgt

SEQ ID NO: 140095 - DNA, 25 bp, SARS Virus
tgagaaaaactaccaggttcttgtg

SEQ ID NO: 140096 - DNA, 25 bp, SARS Virus
gagaaaaactaacaggttcttgtgt

SEQ ID NO: 140097 - DNA, 25 bp, SARS Virus
agaaaaactaaccggttcttgtgtg

SEQ ID NO: 140098 - DNA, 25 bp, SARS Virus
gaaaaactaacacgttcttgtgtga

SEQ ID NO: 140099 - DNA, 25 bp, SARS Virus
aaaaactaacagcttcttgtgtgag

SEQ ID NO: 140100 - DNA, 25 bp, SARS Virus
aaaactaacaggctcttgtgtgagt

SEQ ID NO: 140101 - DNA, 25 bp, SARS Virus
aaactaacaggtccttgtgtgagtc

SEQ ID NO: 140102 - DNA, 25 bp, SARS Virus
aactaacaggttcttgtgtgagtct

SEQ ID NO: 140103 - DNA, 25 bp, SARS Virus
actaacaggttcctgtgtgagtctg

SEQ ID NO: 140104 - DNA, 25 bp, SARS Virus
ctaacaggttctcgtgtgagtctgt

SEQ ID NO: 140105 - DNA, 25 bp, SARS Virus
taacaggttcttctgtgagtctgta

SEQ ID NO: 140106 - DNA, 25 bp, SARS Virus
aacaggttcttgcgtgagtctgtaa

SEQ ID NO: 140107 - DNA, 25 bp, SARS Virus
acaggttcttgtctgagtctgtaaa

SEQ ID NO: 140108 - DNA, 25 bp, SARS Virus
caggttcttgtgcgagtctgtaaaa

SEQ ID NO: 140109 - DNA, 25 bp, SARS Virus
aggttcttgtgtcagtctgtaaaat

SEQ ID NO: 140110 - DNA, 25 bp, SARS Virus
ggttcttgtgtgcgtctgtaaaatc

SEQ ID NO: 140111 - DNA, 25 bp, SARS Virus
gttcttgtgtgactctgtaaaatca

SEQ ID NO: 140112 - DNA, 25 bp, SARS Virus
ttcttgtgtgagcctgtaaaatcat

SEQ ID NO: 140113 - DNA, 25 bp, SARS Virus
tcttgtgtgagtctgtaaaatcatc

SEQ ID NO: 140114 - DNA, 25 bp, SARS Virus
cttgtgtgagtccgtaaaatcatcg

SEQ ID NO: 140115 - DNA, 25 bp, SARS Virus
ttgtgtgagtctctaaaatcatcgt

SEQ ID NO: 140116 - DNA, 25 bp, SARS Virus
tgtgtgagtctgcaaaatcatcgtc

SEQ ID NO: 140117 - DNA, 25 bp, SARS Virus
gtgtgagtctgtcaaatcatcgtcg

SEQ ID NO: 140118 - DNA, 25 bp, SARS Virus
tgtgagtctgtacaatcatcgtcgt

SEQ ID NO: 140119 - DNA, 25 bp, SARS Virus
gtgagtctgtaacatcatcgtcgtt

SEQ ID NO: 140120 - DNA, 25 bp, SARS Virus
tgagtctgtaaactcatcgtcgttc

SEQ ID NO: 140121 - DNA, 25 bp, SARS Virus
gagtctgtaaaaccatcgtcgttct

SEQ ID NO: 140122 - DNA, 25 bp, SARS Virus
agtctgtaaaatcatcgtcgttcta

SEQ ID NO: 140123 - DNA, 25 bp, SARS Virus
gtctgtaaaatcctcgtcgttctaa

SEQ ID NO: 140124 - DNA, 25 bp, SARS Virus
tctgtaaaatcaccgtcgttctaat

SEQ ID NO: 140125 - DNA, 25 bp, SARS Virus
ctgtaaaatcatcgtcgttctaatc

SEQ ID NO: 140126 - DNA, 25 bp, SARS Virus
tgtaaaatcatcctcgttctaatcg

SEQ ID NO: 140127 - DNA, 25 bp, SARS Virus
gtaaaatcatcgccgttctaatcgt

SEQ ID NO: 140128 - DNA, 25 bp, SARS Virus
taaaatcatcgtcgttctaatcgtc

SEQ ID NO: 140129 - DNA, 25 bp, SARS Virus
aaaatcatcgtccttctaatcgtct

SEQ ID NO: 140130 - DNA, 25 bp, SARS Virus
aaatcatcgtcgctctaatcgtctt

SEQ ID NO: 140131 - DNA, 25 bp, SARS Virus
aatcatcgtcgtcctaatcgtcttc

SEQ ID NO: 140132 - DNA, 25 bp, SARS Virus
atcatcgtcgttctaatcgtcttcg

SEQ ID NO: 140133 - DNA, 25 bp, SARS Virus
tcatcgtcgttccaatcgtcttcgg

SEQ ID NO: 140134 - DNA, 25 bp, SARS Virus
catcgtcgttctcatcgtcttcggg

SEQ ID NO: 140135 - DNA, 25 bp, SARS Virus
atcgtcgttctactcgtcttcggga

SEQ ID NO: 140136 - DNA, 25 bp, SARS Virus
tcgtcgttctaaccgtcttcgggac

SEQ ID NO: 140137 - DNA, 25 bp, SARS Virus
cgtcgttctaatcgtcttcgggact

SEQ ID NO: 140138 - DNA, 25 bp, SARS Virus
gtcgttctaatcctcttcgggacta

SEQ ID NO: 140139 - DNA, 25 bp, SARS Virus
tcgttctaatcgccttcgggactaa

SEQ ID NO: 140140 - DNA, 25 bp, SARS Virus
cgttctaatcgtcttcgggactaaa

SEQ ID NO: 140141 - DNA, 25 bp, SARS Virus
gttctaatcgtcctcgggactaaag

SEQ ID NO: 140142 - DNA, 25 bp, SARS Virus
ttctaatcgtctccgggactaaagt

SEQ ID NO: 140143 - DNA, 25 bp, SARS Virus
tctaatcgtcttcgggactaaagtc

SEQ ID NO: 140144 - DNA, 25 bp, SARS Virus
ctaatcgtcttccggactaaagtcg

SEQ ID NO: 140145 - DNA, 25 bp, SARS Virus
taatcgtcttcgcgactaaagtcgt

SEQ ID NO: 140146 - DNA, 25 bp, SARS Virus
aatcgtcttcggcactaaagtcgtc

SEQ ID NO: 140147 - DNA, 25 bp, SARS Virus
atcgtcttcgggcctaaagtcgtcg

SEQ ID NO: 140148 - DNA, 25 bp, SARS Virus
tcgtcttcgggactaaagtcgtcgg

SEQ ID NO: 140149 - DNA, 25 bp, SARS Virus
cgtcttcgggaccaaagtcgtcggg

SEQ ID NO: 140150 - DNA, 25 bp, SARS Virus
gtcttcgggactcaagtcgtcggga

SEQ ID NO: 140151 - DNA, 25 bp, SARS Virus
tcttcgggactacagtcgtcgggac

SEQ ID NO: 140152 - DNA, 25 bp, SARS Virus
cttcgggactaacgtcgtcgggact

SEQ ID NO: 140153 - DNA, 25 bp, SARS Virus
ttcgggactaaactcgtcgggacta

SEQ ID NO: 140154 - DNA, 25 bp, SARS Virus
tcgggactaaagccgtcgggactaa

SEQ ID NO: 140155 - DNA, 25 bp, SARS Virus
cgggactaaagtcgtcgggactaat

SEQ ID NO: 140156 - DNA, 25 bp, SARS Virus
gggactaaagtcctcgggactaatc

SEQ ID NO: 140157 - DNA, 25 bp, SARS Virus
ggactaaagtcgccgggactaatca

SEQ ID NO: 140158 - DNA, 25 bp, SARS Virus
gactaaagtcgtcgggactaatcaa

SEQ ID NO: 140159 - DNA, 25 bp, SARS Virus
actaaagtcgtccggactaatcaac

SEQ ID NO: 140160 - DNA, 25 bp, SARS Virus
ctaaagtcgtcgcgactaatcaaca

SEQ ID NO: 140161 - DNA, 25 bp, SARS Virus
taaagtcgtcggcactaatcaacaa

SEQ ID NO: 140162 - DNA, 25 bp, SARS Virus
aaagtcgtcgggcctaatcaacaac

SEQ ID NO: 140163 - DNA, 25 bp, SARS Virus
aagtcgtcgggactaatcaacaaca

SEQ ID NO: 140164 - DNA, 25 bp, SARS Virus
agtcgtcgggaccaatcaacaacac

SEQ ID NO: 140165 - DNA, 25 bp, SARS Virus
gtcgtcgggactcatcaacaacaca

SEQ ID NO: 140166 - DNA, 25 bp, SARS Virus
tcgtcgggactactcaacaacacaa

SEQ ID NO: 140167 - DNA, 25 bp, SARS Virus
cgtcgggactaaccaacaacacaat

SEQ ID NO: 140168 - DNA, 25 bp, SARS Virus
gtcgggactaatcaacaacacaatg

SEQ ID NO: 140169 - DNA, 25 bp, SARS Virus
tcgggactaatccacaacacaatgt

SEQ ID NO: 140170 - DNA, 25 bp, SARS Virus
cgggactaatcaccaacacaatgta

SEQ ID NO: 140171 - DNA, 25 bp, SARS Virus
gggactaatcaacaacacaatgtat

SEQ ID NO: 140172 - DNA, 25 bp, SARS Virus
ggactaatcaaccacacaatgtatc

SEQ ID NO: 140173 - DNA, 25 bp, SARS Virus
gactaatcaacaccacaatgtatcc

SEQ ID NO: 140174 - DNA, 25 bp, SARS Virus
actaatcaacaacacaatgtatcca

SEQ ID NO: 140175 - DNA, 25 bp, SARS Virus
ctaatcaacaacccaatgtatccaa

SEQ ID NO: 140176 - DNA, 25 bp, SARS Virus
taatcaacaacacaatgtatccaaa

SEQ ID NO: 140177 - DNA, 25 bp, SARS Virus
aatcaacaacaccatgtatccaaac

SEQ ID NO: 140178 - DNA, 25 bp, SARS Virus
atcaacaacacactgtatccaaact

SEQ ID NO: 140179 - DNA, 25 bp, SARS Virus
tcaacaacacaacgtatccaaactt

SEQ ID NO: 140180 - DNA, 25 bp, SARS Virus
caacaacacaatctatccaaacttc

SEQ ID NO: 140181 - DNA, 25 bp, SARS Virus
aacaacacaatgcatccaaacttcc

SEQ ID NO: 140182 - DNA, 25 bp, SARS Virus
acaacacaatgtctccaaacttccg

SEQ ID NO: 140183 - DNA, 25 bp, SARS Virus
caacacaatgtacccaaacttccga

SEQ ID NO: 140184 - DNA, 25 bp, SARS Virus
aacacaatgtatccaaacttccgaa

SEQ ID NO: 140185 - DNA, 25 bp, SARS Virus
acacaatgtatccaaacttccgaaa

SEQ ID NO: 140186 - DNA, 25 bp, SARS Virus
cacaatgtatcccaacttccgaaac

SEQ ID NO: 140187 - DNA, 25 bp, SARS Virus
acaatgtatccacacttccgaaact

SEQ ID NO: 140188 - DNA, 25 bp, SARS Virus
caatgtatccaaccttccgaaactt

SEQ ID NO: 140189 - DNA, 25 bp, SARS Virus
aatgtatccaaacttccgaaacttc

SEQ ID NO: 140190 - DNA, 25 bp, SARS Virus
atgtatccaaacctccgaaacttca

SEQ ID NO: 140191 - DNA, 25 bp, SARS Virus
tgtatccaaactcccgaaacttcag

SEQ ID NO: 140192 - DNA, 25 bp, SARS Virus
gtatccaaacttccgaaacttcaga

SEQ ID NO: 140193 - DNA, 25 bp, SARS Virus
tatccaaacttccgaaacttcagac

SEQ ID NO: 140194 - DNA, 25 bp, SARS Virus
atccaaacttcccaaacttcagacg

SEQ ID NO: 140195 - DNA, 25 bp, SARS Virus
tccaaacttccgcaacttcagacgg

SEQ ID NO: 140196 - DNA, 25 bp, SARS Virus
ccaaacttccgacacttcagacgga

SEQ ID NO: 140197 - DNA, 25 bp, SARS Virus
caaacttccgaaccttcagacggac

SEQ ID NO: 140198 - DNA, 25 bp, SARS Virus
aaacttccgaaacttcagacggaca

SEQ ID NO: 140199 - DNA, 25 bp, SARS Virus
aacttccgaaacctcagacggacat

SEQ ID NO: 140200 - DNA, 25 bp, SARS Virus
acttccgaaactccagacggacatt

SEQ ID NO: 140201 - DNA, 25 bp, SARS Virus
cttccgaaacttcagacggacatta

SEQ ID NO: 140202 - DNA, 25 bp, SARS Virus
ttccgaaacttccgacggacattaa

SEQ ID NO: 140203 - DNA, 25 bp, SARS Virus
tccgaaacttcacacggacattaat

SEQ ID NO: 140204 - DNA, 25 bp, SARS Virus
ccgaaacttcagccggacattaatt

SEQ ID NO: 140205 - DNA, 25 bp, SARS Virus
cgaaacttcagacggacattaattg

SEQ ID NO: 140206 - DNA, 25 bp, SARS Virus
gaaacttcagaccgacattaattgg

SEQ ID NO: 140207 - DNA, 25 bp, SARS Virus
aaacttcagacgcacattaattgga

SEQ ID NO: 140208 - DNA, 25 bp, SARS Virus
aacttcagacggccattaattggac

SEQ ID NO: 140209 - DNA, 25 bp, SARS Virus
acttcagacggacattaattggaca

SEQ ID NO: 140210 - DNA, 25 bp, SARS Virus
cttcagacggaccttaattggacag

SEQ ID NO: 140211 - DNA, 25 bp, SARS Virus
ttcagacggacactaattggacagt

SEQ ID NO: 140212 - DNA, 25 bp, SARS Virus
tcagacggacatcaattggacagtt

SEQ ID NO: 140213 - DNA, 25 bp, SARS Virus
cagacggacattcattggacagtta

SEQ ID NO: 140214 - DNA, 25 bp, SARS Virus
agacggacattacttggacagttaa

SEQ ID NO: 140215 - DNA, 25 bp, SARS Virus
gacggacattaactggacagttaaa

SEQ ID NO: 140216 - DNA, 25 bp, SARS Virus
acggacattaatcggacagttaaac

SEQ ID NO: 140217 - DNA, 25 bp, SARS Virus
cggacattaattcgacagttaaaca

SEQ ID NO: 140218 - DNA, 25 bp, SARS Virus
ggacattaattgcacagttaaacat

SEQ ID NO: 140219 - DNA, 25 bp, SARS Virus
gacattaattggccagttaaacatg

SEQ ID NO: 140220 - DNA, 25 bp, SARS Virus
acattaattggacagttaaacatgg

SEQ ID NO: 140221 - DNA, 25 bp, SARS Virus
cattaattggaccgttaaacatgga

SEQ ID NO: 140222 - DNA, 25 bp, SARS Virus
attaattggacacttaaacatggag

SEQ ID NO: 140223 - DNA, 25 bp, SARS Virus
ttaattggacagctaaacatggagg

SEQ ID NO: 140224 - DNA, 25 bp, SARS Virus
taattggacagtcaaacatggaggc

SEQ ID NO: 140225 - DNA, 25 bp, SARS Virus
aattggacagttcaacatggaggcg

SEQ ID NO: 140226 - DNA, 25 bp, SARS Virus
attggacagttacacatggaggcgg

SEQ ID NO: 140227 - DNA, 25 bp, SARS Virus
ttggacagttaaccatggaggcgga

SEQ ID NO: 140228 - DNA, 25 bp, SARS Virus
tggacagttaaacatggaggcggag

SEQ ID NO: 140229 - DNA, 25 bp, SARS Virus
ggacagttaaacctggaggcggagc

SEQ ID NO: 140230 - DNA, 25 bp, SARS Virus
gacagttaaacacggaggcggagct

SEQ ID NO: 140231 - DNA, 25 bp, SARS Virus
acagttaaacatcgaggcggagctg

SEQ ID NO: 140232 - DNA, 25 bp, SARS Virus
cagttaaacatgcaggcggagctga

SEQ ID NO: 140233 - DNA, 25 bp, SARS Virus
agttaaacatggcggcggagctgaa

SEQ ID NO: 140234 - DNA, 25 bp, SARS Virus
gttaaacatggacgcggagctgaaa

SEQ ID NO: 140235 - DNA, 25 bp, SARS Virus
ttaaacatggagccggagctgaaat

SEQ ID NO: 140236 - DNA, 25 bp, SARS Virus
taaacatggaggcggagctgaaata

SEQ ID NO: 140237 - DNA, 25 bp, SARS Virus
aaacatggaggccgagctgaaatag

SEQ ID NO: 140238 - DNA, 25 bp, SARS Virus
aacatggaggcgcagctgaaatagt

SEQ ID NO: 140239 - DNA, 25 bp, SARS Virus
acatggaggcggcgctgaaatagtt

SEQ ID NO: 140240 - DNA, 25 bp, SARS Virus
catggaggcggacctgaaatagttc

SEQ ID NO: 140241 - DNA, 25 bp, SARS Virus
atggaggcggagctgaaatagttca

SEQ ID NO: 140242 - DNA, 25 bp, SARS Virus
tggaggcggagccgaaatagttcag

SEQ ID NO: 140243 - DNA, 25 bp, SARS Virus
ggaggcggagctcaaatagttcagc

SEQ ID NO: 140244 - DNA, 25 bp, SARS Virus
gaggcggagctgcaatagttcagcg

SEQ ID NO: 140245 - DNA, 25 bp, SARS Virus
aggcggagctgacatagttcagcgc

SEQ ID NO: 140246 - DNA, 25 bp, SARS Virus
ggcggagctgaactagttcagcgct

SEQ ID NO: 140247 - DNA, 25 bp, SARS Virus
gcggagctgaaacagttcagcgctt

SEQ ID NO: 140248 - DNA, 25 bp, SARS Virus
cggagctgaaatcgttcagcgcttt

SEQ ID NO: 140249 - DNA, 25 bp, SARS Virus
ggagctgaaatacttcagcgctttc

SEQ ID NO: 140250 - DNA, 25 bp, SARS Virus
gagctgaaatagctcagcgctttcc

SEQ ID NO: 140251 - DNA, 25 bp, SARS Virus
agctgaaatagtccagcgctttcct

SEQ ID NO: 140252 - DNA, 25 bp, SARS Virus
gctgaaatagttcagcgctttccta

SEQ ID NO: 140253 - DNA, 25 bp, SARS Virus
ctgaaatagttccgcgctttcctat

SEQ ID NO: 140254 - DNA, 25 bp, SARS Virus
tgaaatagttcaccgctttcctata

SEQ ID NO: 140255 - DNA, 25 bp, SARS Virus
gaaatagttcagcgctttcctatag

SEQ ID NO: 140256 - DNA, 25 bp, SARS Virus
aaatagttcagccctttcctatagt

SEQ ID NO: 140257 - DNA, 25 bp, SARS Virus
aatagttcagcgctttcctatagta

SEQ ID NO: 140258 - DNA, 25 bp, SARS Virus
atagttcagcgccttcctatagtaa

SEQ ID NO: 140259 - DNA, 25 bp, SARS Virus
tagttcagcgctctcctatagtaaa

SEQ ID NO: 140260 - DNA, 25 bp, SARS Virus
agttcagcgcttccctatagtaaat

SEQ ID NO: 140261 - DNA, 25 bp, SARS Virus
gttcagcgctttcctatagtaaatc

SEQ ID NO: 140262 - DNA, 25 bp, SARS Virus
ttcagcgctttcctatagtaaatcg

SEQ ID NO: 140263 - DNA, 25 bp, SARS Virus
tcagcgctttcccatagtaaatcgt

SEQ ID NO: 140264 - DNA, 25 bp, SARS Virus
cagcgctttcctctagtaaatcgtg

SEQ ID NO: 140265 - DNA, 25 bp, SARS Virus
agcgctttcctacagtaaatcgtgt

SEQ ID NO: 140266 - DNA, 25 bp, SARS Virus
gcgctttcctatcgtaaatcgtgtg

SEQ ID NO: 140267 - DNA, 25 bp, SARS Virus
cgctttcctatactaaatcgtgtga

SEQ ID NO: 140268 - DNA, 25 bp, SARS Virus
gctttcctatagcaaatcgtgtgaa

SEQ ID NO: 140269 - DNA, 25 bp, SARS Virus
ctttcctatagtcaatcgtgtgaac

SEQ ID NO: 140270 - DNA, 25 bp, SARS Virus
tttcctatagtacatcgtgtgaact

SEQ ID NO: 140271 - DNA, 25 bp, SARS Virus
ttcctatagtaactcgtgtgaactt

SEQ ID NO: 140272 - DNA, 25 bp, SARS Virus
tcctatagtaaaccgtgtgaacttt

SEQ ID NO: 140273 - DNA, 25 bp, SARS Virus
cctatagtaaatcgtgtgaacttta

SEQ ID NO: 140274 - DNA, 25 bp, SARS Virus
ctatagtaaatcctgtgaactttaa

SEQ ID NO: 140275 - DNA, 25 bp, SARS Virus
tatagtaaatcgcgtgaactttaac

SEQ ID NO: 140276 - DNA, 25 bp, SARS Virus
atagtaaatcgtctgaactttaacg

SEQ ID NO: 140277 - DNA, 25 bp, SARS Virus
tagtaaatcgtgcgaactttaacgt

SEQ ID NO: 140278 - DNA, 25 bp, SARS Virus
agtaaatcgtgtcaactttaacgtg

SEQ ID NO: 140279 - DNA, 25 bp, SARS Virus
gtaaatcgtgtgcactttaacgtgg

SEQ ID NO: 140280 - DNA, 25 bp, SARS Virus
taaatcgtgtgacctttaacgtggt

SEQ ID NO: 140281 - DNA, 25 bp, SARS Virus
aaatcgtgtgaactttaacgtggtt

SEQ ID NO: 140282 - DNA, 25 bp, SARS Virus
aatcgtgtgaaccttaacgtggttt

SEQ ID NO: 140283 - DNA, 25 bp, SARS Virus
atcgtgtgaactctaacgtggtttt

SEQ ID NO: 140284 - DNA, 25 bp, SARS Virus
tcgtgtgaacttcaacgtggtttta

SEQ ID NO: 140285 - DNA, 25 bp, SARS Virus
cgtgtgaactttcacgtggttttaa

SEQ ID NO: 140286 - DNA, 25 bp, SARS Virus
gtgtgaactttaccgtggttttaat

SEQ ID NO: 140287 - DNA, 25 bp, SARS Virus
tgtgaactttaacgtggttttaatc

SEQ ID NO: 140288 - DNA, 25 bp, SARS Virus
gtgaactttaacctggttttaatct

SEQ ID NO: 140289 - DNA, 25 bp, SARS Virus
tgaactttaacgcggttttaatctc

SEQ ID NO: 140290 - DNA, 25 bp, SARS Virus
gaactttaacgtcgttttaatctcg

SEQ ID NO: 140291 - DNA, 25 bp, SARS Virus
aactttaacgtgcttttaatctcga

SEQ ID NO: 140292 - DNA, 25 bp, SARS Virus
actttaacgtggctttaatctcgat

SEQ ID NO: 140293 - DNA, 25 bp, SARS Virus
ctttaacgtggtcttaatctcgatt

SEQ ID NO: 140294 - DNA, 25 bp, SARS Virus
tttaacgtggttctaatctcgattc

SEQ ID NO: 140295 - DNA, 25 bp, SARS Virus
ttaacgtggtttcaatctcgattca

SEQ ID NO: 140296 - DNA, 25 bp, SARS Virus
taacgtggttttcatctcgattcaa

SEQ ID NO: 140297 - DNA, 25 bp, SARS Virus
aacgtggttttactctcgattcaac

SEQ ID NO: 140298 - DNA, 25 bp, SARS Virus
acgtggttttaacctcgattcaaca

SEQ ID NO: 140299 - DNA, 25 bp, SARS Virus
cgtggttttaatctcgattcaacaa

SEQ ID NO: 140300 - DNA, 25 bp, SARS Virus
gtggttttaatcccgattcaacaaa

SEQ ID NO: 140301 - DNA, 25 bp, SARS Virus
tggttttaatctcgattcaacaaat

SEQ ID NO: 140302 - DNA, 25 bp, SARS Virus
ggttttaatctccattcaacaaatt

SEQ ID NO: 140303 - DNA, 25 bp, SARS Virus
gttttaatctcgcttcaacaaattg

SEQ ID NO: 140304 - DNA, 25 bp, SARS Virus
ttttaatctcgactcaacaaattgt

SEQ ID NO: 140305 - DNA, 25 bp, SARS Virus
tttaatctcgatccaacaaattgtt

SEQ ID NO: 140306 - DNA, 25 bp, SARS Virus
ttaatctcgattcaacaaattgttc

SEQ ID NO: 140307 - DNA, 25 bp, SARS Virus
taatctcgattccacaaattgttca

SEQ ID NO: 140308 - DNA, 25 bp, SARS Virus
aatctcgattcaccaaattgttcac

SEQ ID NO: 140309 - DNA, 25 bp, SARS Virus
atctcgattcaacaaattgttcaca

SEQ ID NO: 140310 - DNA, 25 bp, SARS Virus
tctcgattcaaccaattgttcacac

SEQ ID NO: 140311 - DNA, 25 bp, SARS Virus
ctcgattcaacacattgttcacaca

SEQ ID NO: 140312 - DNA, 25 bp, SARS Virus
tcgattcaacaacttgttcacacaa

SEQ ID NO: 140313 - DNA, 25 bp, SARS Virus
cgattcaacaaactgttcacacaaa

SEQ ID NO: 140314 - DNA, 25 bp, SARS Virus
gattcaacaaatcgttcacacaaat

SEQ ID NO: 140315 - DNA, 25 bp, SARS Virus
attcaacaaattcttcacacaaatt

SEQ ID NO: 140316 - DNA, 25 bp, SARS Virus
ttcaacaaattgctcacacaaatta

SEQ ID NO: 140317 - DNA, 25 bp, SARS Virus
tcaacaaattgtccacacaaattac

SEQ ID NO: 140318 - DNA, 25 bp, SARS Virus
caacaaattgttcacacaaattacg

SEQ ID NO: 140319 - DNA, 25 bp, SARS Virus
aacaaattgttcccacaaattacga

SEQ ID NO: 140320 - DNA, 25 bp, SARS Virus
acaaattgttcacacaaattacgaa

SEQ ID NO: 140321 - DNA, 25 bp, SARS Virus
caaattgttcacccaaattacgaac

SEQ ID NO: 140322 - DNA, 25 bp, SARS Virus
aaattgttcacacaaattacgaact

SEQ ID NO: 140323 - DNA, 25 bp, SARS Virus
aattgttcacaccaattacgaactc

SEQ ID NO: 140324 - DNA, 25 bp, SARS Virus
attgttcacacacattacgaactcg

SEQ ID NO: 140325 - DNA, 25 bp, SARS Virus
ttgttcacacaacttacgaactcgt

SEQ ID NO: 140326 - DNA, 25 bp, SARS Virus
tgttcacacaaactacgaactcgta

SEQ ID NO: 140327 - DNA, 25 bp, SARS Virus
gttcacacaaatcacgaactcgtaa

SEQ ID NO: 140328 - DNA, 25 bp, SARS Virus
ttcacacaaattccgaactcgtaag

SEQ ID NO: 140329 - DNA, 25 bp, SARS Virus
tcacacaaattacgaactcgtaaga

SEQ ID NO: 140330 - DNA, 25 bp, SARS Virus
cacacaaattaccaactcgtaagac

SEQ ID NO: 140331 - DNA, 25 bp, SARS Virus
acacaaattacgcactcgtaagacc

SEQ ID NO: 140332 - DNA, 25 bp, SARS Virus
cacaaattacgacctcgtaagacca

SEQ ID NO: 140333 - DNA, 25 bp, SARS Virus
acaaattacgaactcgtaagaccaa

SEQ ID NO: 140334 - DNA, 25 bp, SARS Virus
caaattacgaacccgtaagaccaat

SEQ ID NO: 140335 - DNA, 25 bp, SARS Virus
aaattacgaactcgtaagaccaatt

SEQ ID NO: 140336 - DNA, 25 bp, SARS Virus
aattacgaactcctaagaccaattg

SEQ ID NO: 140337 - DNA, 25 bp, SARS Virus
attacgaactcgcaagaccaattgt

SEQ ID NO: 140338 - DNA, 25 bp, SARS Virus
ttacgaactcgtcagaccaattgtt

SEQ ID NO: 140339 - DNA, 25 bp, SARS Virus
tacgaactcgtacgaccaattgttg

SEQ ID NO: 140340 - DNA, 25 bp, SARS Virus
acgaactcgtaacaccaattgttgc

SEQ ID NO: 140341 - DNA, 25 bp, SARS Virus
cgaactcgtaagcccaattgttgca

SEQ ID NO: 140342 - DNA, 25 bp, SARS Virus
gaactcgtaagaccaattgttgcag

SEQ ID NO: 140343 - DNA, 25 bp, SARS Virus
aactcgtaagaccaattgttgcaga

SEQ ID NO: 140344 - DNA, 25 bp, SARS Virus
actcgtaagacccattgttgcagaa

SEQ ID NO: 140345 - DNA, 25 bp, SARS Virus
ctcgtaagaccacttgttgcagaac

SEQ ID NO: 140346 - DNA, 25 bp, SARS Virus
tcgtaagaccaactgttgcagaacg

SEQ ID NO: 140347 - DNA, 25 bp, SARS Virus
cgtaagaccaatcgttgcagaacgt

SEQ ID NO: 140348 - DNA, 25 bp, SARS Virus
gtaagaccaattcttgcagaacgtc

SEQ ID NO: 140349 - DNA, 25 bp, SARS Virus
taagaccaattgctgcagaacgtcg

SEQ ID NO: 140350 - DNA, 25 bp, SARS Virus
aagaccaattgtcgcagaacgtcga

SEQ ID NO: 140351 - DNA, 25 bp, SARS Virus
agaccaattgttccagaacgtcgaa

SEQ ID NO: 140352 - DNA, 25 bp, SARS Virus
gaccaattgttgcagaacgtcgaac

SEQ ID NO: 140353 - DNA, 25 bp, SARS Virus
accaattgttgccgaacgtcgaacg

SEQ ID NO: 140354 - DNA, 25 bp, SARS Virus
ccaattgttgcacaacgtcgaacgg

SEQ ID NO: 140355 - DNA, 25 bp, SARS Virus
caattgttgcagcacgtcgaacggg

SEQ ID NO: 140356 - DNA, 25 bp, SARS Virus
aattgttgcagaccgtcgaacgggt

SEQ ID NO: 140357 - DNA, 25 bp, SARS Virus
attgttgcagaacgtcgaacgggtt

SEQ ID NO: 140358 - DNA, 25 bp, SARS Virus
ttgttgcagaacctcgaacgggtta

SEQ ID NO: 140359 - DNA, 25 bp, SARS Virus
tgttgcagaacgccgaacgggttac

SEQ ID NO: 140360 - DNA, 25 bp, SARS Virus
gttgcagaacgtcgaacgggttacg

SEQ ID NO: 140361 - DNA, 25 bp, SARS Virus
ttgcagaacgtccaacgggttacgt

SEQ ID NO: 140362 - DNA, 25 bp, SARS Virus
tgcagaacgtcgcacgggttacgtc

SEQ ID NO: 140363 - DNA, 25 bp, SARS Virus
gcagaacgtcgaccgggttacgtca

SEQ ID NO: 140364 - DNA, 25 bp, SARS Virus
cagaacgtcgaacgggttacgtcaa

SEQ ID NO: 140365 - DNA, 25 bp, SARS Virus
agaacgtcgaaccggttacgtcaac

SEQ ID NO: 140366 - DNA, 25 bp, SARS Virus
gaacgtcgaacgcgttacgtcaact

SEQ ID NO: 140367 - DNA, 25 bp, SARS Virus
aacgtcgaacggcttacgtcaacta

SEQ ID NO: 140368 - DNA, 25 bp, SARS Virus
acgtcgaacgggctacgtcaactac

SEQ ID NO: 140369 - DNA, 25 bp, SARS Virus
cgtcgaacgggtcacgtcaactaca

SEQ ID NO: 140370 - DNA, 25 bp, SARS Virus
gtcgaacgggttccgtcaactacaa

SEQ ID NO: 140371 - DNA, 25 bp, SARS Virus
tcgaacgggttacgtcaactacaac

SEQ ID NO: 140372 - DNA, 25 bp, SARS Virus
cgaacgggttacctcaactacaaca

SEQ ID NO: 140373 - DNA, 25 bp, SARS Virus
gaacgggttacgccaactacaacaa

SEQ ID NO: 140374 - DNA, 25 bp, SARS Virus
aacgggttacgtcaactacaacaac

SEQ ID NO: 140375 - DNA, 25 bp, SARS Virus
acgggttacgtccactacaacaaca

SEQ ID NO: 140376 - DNA, 25 bp, SARS Virus
cgggttacgtcacctacaacaacat

SEQ ID NO: 140377 - DNA, 25 bp, SARS Virus
gggttacgtcaactacaacaacatt

SEQ ID NO: 140378 - DNA, 25 bp, SARS Virus
ggttacgtcaaccacaacaacattc

SEQ ID NO: 140379 - DNA, 25 bp, SARS Virus
gttacgtcaactccaacaacattca

SEQ ID NO: 140380 - DNA, 25 bp, SARS Virus
ttacgtcaactacaacaacattcac

SEQ ID NO: 140381 - DNA, 25 bp, SARS Virus
tacgtcaactaccacaacattcact

SEQ ID NO: 140382 - DNA, 25 bp, SARS Virus
acgtcaactacaccaacattcacta

SEQ ID NO: 140383 - DNA, 25 bp, SARS Virus
cgtcaactacaacaacattcactaa

SEQ ID NO: 140384 - DNA, 25 bp, SARS Virus
gtcaactacaaccacattcactaag

SEQ ID NO: 140385 - DNA, 25 bp, SARS Virus
tcaactacaacaccattcactaaga

SEQ ID NO: 140386 - DNA, 25 bp, SARS Virus
caactacaacaacattcactaagaa

SEQ ID NO: 140387 - DNA, 25 bp, SARS Virus
aactacaacaaccttcactaagaac

SEQ ID NO: 140388 - DNA, 25 bp, SARS Virus
actacaacaacactcactaagaact

SEQ ID NO: 140389 - DNA, 25 bp, SARS Virus
ctacaacaacatccactaagaactt

SEQ ID NO: 140390 - DNA, 25 bp, SARS Virus
tacaacaacattcactaagaactta

SEQ ID NO: 140391 - DNA, 25 bp, SARS Virus
acaacaacattccctaagaacttaa

SEQ ID NO: 140392 - DNA, 25 bp, SARS Virus
caacaacattcactaagaacttaaa

SEQ ID NO: 140393 - DNA, 25 bp, SARS Virus
aacaacattcaccaagaacttaaac

SEQ ID NO: 140394 - DNA, 25 bp, SARS Virus
acaacattcactcagaacttaaact

SEQ ID NO: 140395 - DNA, 25 bp, SARS Virus
caacattcactacgaacttaaactg

SEQ ID NO: 140396 - DNA, 25 bp, SARS Virus
aacattcactaacaacttaaactga

SEQ ID NO: 140397 - DNA, 25 bp, SARS Virus
acattcactaagcacttaaactgat

SEQ ID NO: 140398 - DNA, 25 bp, SARS Virus
cattcactaagaccttaaactgatt

SEQ ID NO: 140399 - DNA, 25 bp, SARS Virus
attcactaagaacttaaactgatta

SEQ ID NO: 140400 - DNA, 25 bp, SARS Virus
ttcactaagaacctaaactgattag

SEQ ID NO: 140401 - DNA, 25 bp, SARS Virus
tcactaagaactcaaactgattagc

SEQ ID NO: 140402 - DNA, 25 bp, SARS Virus
cactaagaacttcaactgattagcg

SEQ ID NO: 140403 - DNA, 25 bp, SARS Virus
actaagaacttacactgattagcgg

SEQ ID NO: 140404 - DNA, 25 bp, SARS Virus
ctaagaacttaacctgattagcgga

SEQ ID NO: 140405 - DNA, 25 bp, SARS Virus
taagaacttaaactgattagcggaa

SEQ ID NO: 140406 - DNA, 25 bp, SARS Virus
aagaacttaaaccgattagcggaac

SEQ ID NO: 140407 - DNA, 25 bp, SARS Virus
agaacttaaactcattagcggaaca

SEQ ID NO: 140408 - DNA, 25 bp, SARS Virus
gaacttaaactgcttagcggaacaa

SEQ ID NO: 140409 - DNA, 25 bp, SARS Virus
aacttaaactgactagcggaacaat

SEQ ID NO: 140410 - DNA, 25 bp, SARS Virus
acttaaactgatcagcggaacaatt

SEQ ID NO: 140411 - DNA, 25 bp, SARS Virus
cttaaactgattcgcggaacaattt

SEQ ID NO: 140412 - DNA, 25 bp, SARS Virus
ttaaactgattaccggaacaattta

SEQ ID NO: 140413 - DNA, 25 bp, SARS Virus
taaactgattagcggaacaatttaa

SEQ ID NO: 140414 - DNA, 25 bp, SARS Virus
aaactgattagccgaacaatttaac

SEQ ID NO: 140415 - DNA, 25 bp, SARS Virus
aactgattagcgcaacaatttaacc

SEQ ID NO: 140416 - DNA, 25 bp, SARS Virus
actgattagcggcacaatttaacca

SEQ ID NO: 140417 - DNA, 25 bp, SARS Virus
ctgattagcggaccaatttaaccaa

SEQ ID NO: 140418 - DNA, 25 bp, SARS Virus
tgattagcggaacaatttaaccaac

SEQ ID NO: 140419 - DNA, 25 bp, SARS Virus
gattagcggaaccatttaaccaacc

SEQ ID NO: 140420 - DNA, 25 bp, SARS Virus
attagcggaacactttaaccaaccg

SEQ ID NO: 140421 - DNA, 25 bp, SARS Virus
ttagcggaacaacttaaccaaccgc

SEQ ID NO: 140422 - DNA, 25 bp, SARS Virus
tagcggaacaatctaaccaaccgct

SEQ ID NO: 140423 - DNA, 25 bp, SARS Virus
agcggaacaattcaaccaaccgcta

SEQ ID NO: 140424 - DNA, 25 bp, SARS Virus
gcggaacaatttcaccaaccgctaa

SEQ ID NO: 140425 - DNA, 25 bp, SARS Virus
cggaacaatttacccaaccgctaaa

SEQ ID NO: 140426 - DNA, 25 bp, SARS Virus
ggaacaatttaaccaaccgctaaac

SEQ ID NO: 140427 - DNA, 25 bp, SARS Virus
gaacaatttaaccaaccgctaaaca

SEQ ID NO: 140428 - DNA, 25 bp, SARS Virus
aacaatttaacccaccgctaaacaa

SEQ ID NO: 140429 - DNA, 25 bp, SARS Virus
acaatttaaccacccgctaaacaaa

SEQ ID NO: 140430 - DNA, 25 bp, SARS Virus
caatttaaccaaccgctaaacaaaa

SEQ ID NO: 140431 - DNA, 25 bp, SARS Virus
aatttaaccaaccgctaaacaaaaa

SEQ ID NO: 140432 - DNA, 25 bp, SARS Virus
atttaaccaacccctaaacaaaaac

SEQ ID NO: 140433 - DNA, 25 bp, SARS Virus
tttaaccaaccgctaaacaaaaacc

SEQ ID NO: 140434 - DNA, 25 bp, SARS Virus
ttaaccaaccgccaaacaaaaacca

SEQ ID NO: 140435 - DNA, 25 bp, SARS Virus
taaccaaccgctcaacaaaaaccaa

SEQ ID NO: 140436 - DNA, 25 bp, SARS Virus
aaccaaccgctacacaaaaaccaag

SEQ ID NO: 140437 - DNA, 25 bp, SARS Virus
accaaccgctaaccaaaaaccaaga

SEQ ID NO: 140438 - DNA, 25 bp, SARS Virus
ccaaccgctaaacaaaaaccaagag

SEQ ID NO: 140439 - DNA, 25 bp, SARS Virus
caaccgctaaaccaaaaccaagagt

SEQ ID NO: 140440 - DNA, 25 bp, SARS Virus
aaccgctaaacacaaaccaagagta

SEQ ID NO: 140441 - DNA, 25 bp, SARS Virus
accgctaaacaacaaccaagagtat

SEQ ID NO: 140442 - DNA, 25 bp, SARS Virus
ccgctaaacaaacaccaagagtatc

SEQ ID NO: 140443 - DNA, 25 bp, SARS Virus
cgctaaacaaaacccaagagtatct

SEQ ID NO: 140444 - DNA, 25 bp, SARS Virus
gctaaacaaaaaccaagagtatctc

SEQ ID NO: 140445 - DNA, 25 bp, SARS Virus
ctaaacaaaaaccaagagtatctct

SEQ ID NO: 140446 - DNA, 25 bp, SARS Virus
taaacaaaaacccagagtatctctt

SEQ ID NO: 140447 - DNA, 25 bp, SARS Virus
aaacaaaaaccacgagtatctcttg

SEQ ID NO: 140448 - DNA, 25 bp, SARS Virus
aacaaaaaccaacagtatctcttgt

SEQ ID NO: 140449 - DNA, 25 bp, SARS Virus
acaaaaaccaagcgtatctcttgta

SEQ ID NO: 140450 - DNA, 25 bp, SARS Virus
caaaaaccaagactatctcttgtaa

SEQ ID NO: 140451 - DNA, 25 bp, SARS Virus
aaaaaccaagagcatctcttgtaaa

SEQ ID NO: 140452 - DNA, 25 bp, SARS Virus
aaaaccaagagtctctcttgtaaaa

SEQ ID NO: 140453 - DNA, 25 bp, SARS Virus
aaaccaagagtacctcttgtaaaac

SEQ ID NO: 140454 - DNA, 25 bp, SARS Virus
aaccaagagtatctcttgtaaaacc

SEQ ID NO: 140455 - DNA, 25 bp, SARS Virus
accaagagtatcccttgtaaaaccc

SEQ ID NO: 140456 - DNA, 25 bp, SARS Virus
ccaagagtatctcttgtaaaaccca

SEQ ID NO: 140457 - DNA, 25 bp, SARS Virus
caagagtatctcctgtaaaacccat

SEQ ID NO: 140458 - DNA, 25 bp, SARS Virus
aagagtatctctcgtaaaacccatt

SEQ ID NO: 140459 - DNA, 25 bp, SARS Virus
agagtatctcttctaaaacccattg

SEQ ID NO: 140460 - DNA, 25 bp, SARS Virus
gagtatctcttgcaaaacccattga

SEQ ID NO: 140461 - DNA, 25 bp, SARS Virus
agtatctcttgtcaaacccattgag

SEQ ID NO: 140462 - DNA, 25 bp, SARS Virus
gtatctcttgtacaacccattgagg

SEQ ID NO: 140463 - DNA, 25 bp, SARS Virus
tatctcttgtaacacccattgaggt

SEQ ID NO: 140464 - DNA, 25 bp, SARS Virus
atctcttgtaaaccccattgaggtt

SEQ ID NO: 140465 - DNA, 25 bp, SARS Virus
tctcttgtaaaacccattgaggtta

SEQ ID NO: 140466 - DNA, 25 bp, SARS Virus
ctcttgtaaaacccattgaggttac

SEQ ID NO: 140467 - DNA, 25 bp, SARS Virus
tcttgtaaaacccattgaggttacg

SEQ ID NO: 140468 - DNA, 25 bp, SARS Virus
cttgtaaaaccccttgaggttacgg

SEQ ID NO: 140469 - DNA, 25 bp, SARS Virus
ttgtaaaacccactgaggttacggt

SEQ ID NO: 140470 - DNA, 25 bp, SARS Virus
tgtaaaacccatcgaggttacggta

SEQ ID NO: 140471 - DNA, 25 bp, SARS Virus
gtaaaacccattcaggttacggtaa

SEQ ID NO: 140472 - DNA, 25 bp, SARS Virus
taaaacccattgcggttacggtaac

SEQ ID NO: 140473 - DNA, 25 bp, SARS Virus
aaaacccattgacgttacggtaact

SEQ ID NO: 140474 - DNA, 25 bp, SARS Virus
aaacccattgagcttacggtaactt

SEQ ID NO: 140475 - DNA, 25 bp, SARS Virus
aacccattgaggctacggtaacttg

SEQ ID NO: 140476 - DNA, 25 bp, SARS Virus
acccattgaggtcacggtaacttgg

SEQ ID NO: 140477 - DNA, 25 bp, SARS Virus
cccattgaggttccggtaacttgga

SEQ ID NO: 140478 - DNA, 25 bp, SARS Virus
ccattgaggttacggtaacttggat

SEQ ID NO: 140479 - DNA, 25 bp, SARS Virus
cattgaggttaccgtaacttggata

SEQ ID NO: 140480 - DNA, 25 bp, SARS Virus
attgaggttacgctaacttggatat

SEQ ID NO: 140481 - DNA, 25 bp, SARS Virus
ttgaggttacggcaacttggatata

SEQ ID NO: 140482 - DNA, 25 bp, SARS Virus
tgaggttacggtcacttggatatac

SEQ ID NO: 140483 - DNA, 25 bp, SARS Virus
gaggttacggtaccttggatatacg

SEQ ID NO: 140484 - DNA, 25 bp, SARS Virus
aggttacggtaacttggatatacgg

SEQ ID NO: 140485 - DNA, 25 bp, SARS Virus
ggttacggtaacctggatatacggt

SEQ ID NO: 140486 - DNA, 25 bp, SARS Virus
gttacggtaactcggatatacggta

SEQ ID NO: 140487 - DNA, 25 bp, SARS Virus
ttacggtaacttcgatatacggtaa

SEQ ID NO: 140488 - DNA, 25 bp, SARS Virus
tacggtaacttgcatatacggtaaa

SEQ ID NO: 140489 - DNA, 25 bp, SARS Virus
acggtaacttggctatacggtaaac

SEQ ID NO: 140490 - DNA, 25 bp, SARS Virus
cggtaacttggacatacggtaaacg

SEQ ID NO: 140491 - DNA, 25 bp, SARS Virus
ggtaacttggatctacggtaaacgt

SEQ ID NO: 140492 - DNA, 25 bp, SARS Virus
gtaacttggatacacggtaaacgta

SEQ ID NO: 140493 - DNA, 25 bp, SARS Virus
taacttggatatccggtaaacgtat

SEQ ID NO: 140494 - DNA, 25 bp, SARS Virus
aacttggatatacggtaaacgtatc

SEQ ID NO: 140495 - DNA, 25 bp, SARS Virus
acttggatataccgtaaacgtatcg

SEQ ID NO: 140496 - DNA, 25 bp, SARS Virus
cttggatatacgctaaacgtatcgt

SEQ ID NO: 140497 - DNA, 25 bp, SARS Virus
ttggatatacggcaaacgtatcgtt

SEQ ID NO: 140498 - DNA, 25 bp, SARS Virus
tggatatacggtcaacgtatcgttt

SEQ ID NO: 140499 - DNA, 25 bp, SARS Virus
ggatatacggtacacgtatcgtttt

SEQ ID NO: 140500 - DNA, 25 bp, SARS Virus
gatatacggtaaccgtatcgttttc

SEQ ID NO: 140501 - DNA, 25 bp, SARS Virus
atatacggtaaacgtatcgttttcc

SEQ ID NO: 140502 - DNA, 25 bp, SARS Virus
tatacggtaaacctatcgttttcca

SEQ ID NO: 140503 - DNA, 25 bp, SARS Virus
atacggtaaacgcatcgttttccat

SEQ ID NO: 140504 - DNA, 25 bp, SARS Virus
tacggtaaacgtctcgttttccata

SEQ ID NO: 140505 - DNA, 25 bp, SARS Virus
acggtaaacgtaccgttttccataa

SEQ ID NO: 140506 - DNA, 25 bp, SARS Virus
cggtaaacgtatcgttttccataaa

SEQ ID NO: 140507 - DNA, 25 bp, SARS Virus
ggtaaacgtatccttttccataaac

SEQ ID NO: 140508 - DNA, 25 bp, SARS Virus
gtaaacgtatcgctttccataaact

SEQ ID NO: 140509 - DNA, 25 bp, SARS Virus
taaacgtatcgtcttccataaactt

SEQ ID NO: 140510 - DNA, 25 bp, SARS Virus
aaacgtatcgttctccataaacttc

SEQ ID NO: 140511 - DNA, 25 bp, SARS Virus
aacgtatcgtttcccataaacttct

SEQ ID NO: 140512 - DNA, 25 bp, SARS Virus
acgtatcgttttccataaacttctc

SEQ ID NO: 140513 - DNA, 25 bp, SARS Virus
cgtatcgttttccataaacttctcg

SEQ ID NO: 140514 - DNA, 25 bp, SARS Virus
gtatcgttttccctaaacttctcgt

SEQ ID NO: 140515 - DNA, 25 bp, SARS Virus
tatcgttttccacaaacttctcgtc

SEQ ID NO: 140516 - DNA, 25 bp, SARS Virus
atcgttttccatcaacttctcgtcg

SEQ ID NO: 140517 - DNA, 25 bp, SARS Virus
tcgttttccatacacttctcgtcgc

SEQ ID NO: 140518 - DNA, 25 bp, SARS Virus
cgttttccataaccttctcgtcgcg

SEQ ID NO: 140519 - DNA, 25 bp, SARS Virus
gttttccataaacttctcgtcgcgg

SEQ ID NO: 140520 - DNA, 25 bp, SARS Virus
ttttccataaacctctcgtcgcggt

SEQ ID NO: 140521 - DNA, 25 bp, SARS Virus
tttccataaactcctcgtcgcggtc

SEQ ID NO: 140522 - DNA, 25 bp, SARS Virus
ttccataaacttctcgtcgcggtcg

SEQ ID NO: 140523 - DNA, 25 bp, SARS Virus
tccataaacttcccgtcgcggtcgt

SEQ ID NO: 140524 - DNA, 25 bp, SARS Virus
ccataaacttctcgtcgcggtcgtg

SEQ ID NO: 140525 - DNA, 25 bp, SARS Virus
cataaacttctcctcgcggtcgtgg

SEQ ID NO: 140526 - DNA, 25 bp, SARS Virus
ataaacttctcgccgcggtcgtggt

SEQ ID NO: 140527 - DNA, 25 bp, SARS Virus
taaacttctcgtcgcggtcgtggtt

SEQ ID NO: 140528 - DNA, 25 bp, SARS Virus
aaacttctcgtcccggtcgtggttt

SEQ ID NO: 140529 - DNA, 25 bp, SARS Virus
aacttctcgtcgcggtcgtggttta

SEQ ID NO: 140530 - DNA, 25 bp, SARS Virus
acttctcgtcgccgtcgtggtttac

SEQ ID NO: 140531 - DNA, 25 bp, SARS Virus
cttctcgtcgcgctcgtggtttaca

SEQ ID NO: 140532 - DNA, 25 bp, SARS Virus
ttctcgtcgcggccgtggtttacag

SEQ ID NO: 140533 - DNA, 25 bp, SARS Virus
tctcgtcgcggtcgtggtttacagg

SEQ ID NO: 140534 - DNA, 25 bp, SARS Virus
ctcgtcgcggtcctggtttacaggt

SEQ ID NO: 140535 - DNA, 25 bp, SARS Virus
tcgtcgcggtcgcggtttacaggta

SEQ ID NO: 140536 - DNA, 25 bp, SARS Virus
cgtcgcggtcgtcgtttacaggtag

SEQ ID NO: 140537 - DNA, 25 bp, SARS Virus
gtcgcggtcgtgctttacaggtagg

SEQ ID NO: 140538 - DNA, 25 bp, SARS Virus
tcgcggtcgtggcttacaggtaggt

SEQ ID NO: 140539 - DNA, 25 bp, SARS Virus
cgcggtcgtggtctacaggtaggtc

SEQ ID NO: 140540 - DNA, 25 bp, SARS Virus
gcggtcgtggttcacaggtaggtcg

SEQ ID NO: 140541 - DNA, 25 bp, SARS Virus
cggtcgtggtttccaggtaggtcgt

SEQ ID NO: 140542 - DNA, 25 bp, SARS Virus
ggtcgtggtttacaggtaggtcgtc

SEQ ID NO: 140543 - DNA, 25 bp, SARS Virus
gtcgtggtttaccggtaggtcgtca

SEQ ID NO: 140544 - DNA, 25 bp, SARS Virus
tcgtggtttacacgtaggtcgtcac

SEQ ID NO: 140545 - DNA, 25 bp, SARS Virus
cgtggtttacagctaggtcgtcacc

SEQ ID NO: 140546 - DNA, 25 bp, SARS Virus
gtggtttacaggcaggtcgtcaccg

SEQ ID NO: 140547 - DNA, 25 bp, SARS Virus
tggtttacaggtcggtcgtcaccgt

SEQ ID NO: 140548 - DNA, 25 bp, SARS Virus
ggtttacaggtacgtcgtcaccgtc

SEQ ID NO: 140549 - DNA, 25 bp, SARS Virus
gtttacaggtagctcgtcaccgtca

SEQ ID NO: 140550 - DNA, 25 bp, SARS Virus
tttacaggtaggccgtcaccgtcat

SEQ ID NO: 140551 - DNA, 25 bp, SARS Virus
ttacaggtaggtcgtcaccgtcatg

SEQ ID NO: 140552 - DNA, 25 bp, SARS Virus
tacaggtaggtcctcaccgtcatgg

SEQ ID NO: 140553 - DNA, 25 bp, SARS Virus
acaggtaggtcgccaccgtcatggt

SEQ ID NO: 140554 - DNA, 25 bp, SARS Virus
caggtaggtcgtcaccgtcatggtg

SEQ ID NO: 140555 - DNA, 25 bp, SARS Virus
aggtaggtcgtccccgtcatggtga

SEQ ID NO: 140556 - DNA, 25 bp, SARS Virus
ggtaggtcgtcaccgtcatggtgat

SEQ ID NO: 140557 - DNA, 25 bp, SARS Virus
gtaggtcgtcaccgtcatggtgatt

SEQ ID NO: 140558 - DNA, 25 bp, SARS Virus
taggtcgtcaccctcatggtgattg

SEQ ID NO: 140559 - DNA, 25 bp, SARS Virus
aggtcgtcaccgccatggtgattga

SEQ ID NO: 140560 - DNA, 25 bp, SARS Virus
ggtcgtcaccgtcatggtgattgat

SEQ ID NO: 140561 - DNA, 25 bp, SARS Virus
gtcgtcaccgtcctggtgattgatc

SEQ ID NO: 140562 - DNA, 25 bp, SARS Virus
tcgtcaccgtcacggtgattgatct

SEQ ID NO: 140563 - DNA, 25 bp, SARS Virus
cgtcaccgtcatcgtgattgatctc

SEQ ID NO: 140564 - DNA, 25 bp, SARS Virus
gtcaccgtcatgctgattgatctcg

SEQ ID NO: 140565 - DNA, 25 bp, SARS Virus
tcaccgtcatggcgattgatctcgt

SEQ ID NO: 140566 - DNA, 25 bp, SARS Virus
caccgtcatggtcattgatctcgtc

SEQ ID NO: 140567 - DNA, 25 bp, SARS Virus
accgtcatggtgcttgatctcgtcg

SEQ ID NO: 140568 - DNA, 25 bp, SARS Virus
ccgtcatggtgactgatctcgtcgt

SEQ ID NO: 140569 - DNA, 25 bp, SARS Virus
cgtcatggtgatcgatctcgtcgtc

SEQ ID NO: 140570 - DNA, 25 bp, SARS Virus
gtcatggtgattcatctcgtcgtca

SEQ ID NO: 140571 - DNA, 25 bp, SARS Virus
tcatggtgattgctctcgtcgtcac

SEQ ID NO: 140572 - DNA, 25 bp, SARS Virus
catggtgattgacctcgtcgtcaca

SEQ ID NO: 140573 - DNA, 25 bp, SARS Virus
atggtgattgatctcgtcgtcacat

SEQ ID NO: 140574 - DNA, 25 bp, SARS Virus
tggtgattgatcccgtcgtcacatc

SEQ ID NO: 140575 - DNA, 25 bp, SARS Virus
ggtgattgatctcgtcgtcacatcc

SEQ ID NO: 140576 - DNA, 25 bp, SARS Virus
gtgattgatctcctcgtcacatccg

SEQ ID NO: 140577 - DNA, 25 bp, SARS Virus
ttcagttgagaagaactaacaggtt

SEQ ID NO: 140578 - DNA, 25 bp, SARS Virus
tcagttgagaaagactaacaggttc

SEQ ID NO: 140579 - DNA, 25 bp, SARS Virus
cagttgagaaaagctaacaggttct

SEQ ID NO: 140580 - DNA, 25 bp, SARS Virus
agttgagaaaaagtaacaggttctt

SEQ ID NO: 140581 - DNA, 25 bp, SARS Virus
gttgagaaaaacgaacaggttcttg

SEQ ID NO: 140582 - DNA, 25 bp, SARS Virus
ttgagaaaaactgacaggttcttgt

SEQ ID NO: 140583 - DNA, 25 bp, SARS Virus
tgagaaaaactagcaggttcttgtg

SEQ ID NO: 140584 - DNA, 25 bp, SARS Virus
gagaaaaactaagaggttcttgtgt

SEQ ID NO: 140585 - DNA, 25 bp, SARS Virus
agaaaaactaacgggttcttgtgtg

SEQ ID NO: 140586 - DNA, 25 bp, SARS Virus
gaaaaactaacaggttcttgtgtga

SEQ ID NO: 140587 - DNA, 25 bp, SARS Virus
aaaaactaacaggttcttgtgtgag

SEQ ID NO: 140588 - DNA, 25 bp, SARS Virus
aaaactaacagggtcttgtgtgagt

SEQ ID NO: 140589 - DNA, 25 bp, SARS Virus
aaactaacaggtgcttgtgtgagtc

SEQ ID NO: 140590 - DNA, 25 bp, SARS Virus
aactaacaggttgttgtgtgagtct

SEQ ID NO: 140591 - DNA, 25 bp, SARS Virus
actaacaggttcgtgtgtgagtctg

SEQ ID NO: 140592 - DNA, 25 bp, SARS Virus
ctaacaggttctggtgtgagtctgt

SEQ ID NO: 140593 - DNA, 25 bp, SARS Virus
taacaggttcttgtgtgagtctgta

SEQ ID NO: 140594 - DNA, 25 bp, SARS Virus
aacaggttcttgggtgagtctgtaa

SEQ ID NO: 140595 - DNA, 25 bp, SARS Virus
acaggttcttgtgtgagtctgtaaa

SEQ ID NO: 140596 - DNA, 25 bp, SARS Virus
caggttcttgtgggagtctgtaaaa

SEQ ID NO: 140597 - DNA, 25 bp, SARS Virus
aggttcttgtgtgagtctgtaaaat

SEQ ID NO: 140598 - DNA, 25 bp, SARS Virus
ggttcttgtgtgggtctgtaaaatc

SEQ ID NO: 140599 - DNA, 25 bp, SARS Virus
gttcttgtgtgagtctgtaaaatca

SEQ ID NO: 140600 - DNA, 25 bp, SARS Virus
ttcttgtgtgaggctgtaaaatcat

SEQ ID NO: 140601 - DNA, 25 bp, SARS Virus
tcttgtgtgagtgtgtaaaatcatc

SEQ ID NO: 140602 - DNA, 25 bp, SARS Virus
cttgtgtgagtcggtaaaatcatcg

SEQ ID NO: 140603 - DNA, 25 bp, SARS Virus
ttgtgtgagtctgtaaaatcatcgt

SEQ ID NO: 140604 - DNA, 25 bp, SARS Virus
tgtgtgagtctggaaaatcatcgtc

SEQ ID NO: 140605 - DNA, 25 bp, SARS Virus
gtgtgagtctgtgaaatcatcgtcg

SEQ ID NO: 140606 - DNA, 25 bp, SARS Virus
tgtgagtctgtagaatcatcgtcgt

SEQ ID NO: 140607 - DNA, 25 bp, SARS Virus
gtgagtctgtaagatcatcgtcgtt

SEQ ID NO: 140608 - DNA, 25 bp, SARS Virus
tgagtctgtaaagtcatcgtcgttc

SEQ ID NO: 140609 - DNA, 25 bp, SARS Virus
gagtctgtaaaagcatcgtcgttct

SEQ ID NO: 140610 - DNA, 25 bp, SARS Virus
agtctgtaaaatgatcgtcgttcta

SEQ ID NO: 140611 - DNA, 25 bp, SARS Virus
gtctgtaaaatcgtcgtcgttctaa

SEQ ID NO: 140612 - DNA, 25 bp, SARS Virus
tctgtaaaatcagcgtcgttctaat

SEQ ID NO: 140613 - DNA, 25 bp, SARS Virus
ctgtaaaatcatggtcgttctaatc

SEQ ID NO: 140614 - DNA, 25 bp, SARS Virus
tgtaaaatcatcgtcgttctaatcg

SEQ ID NO: 140615 - DNA, 25 bp, SARS Virus
gtaaaatcatcggcgttctaatcgt

SEQ ID NO: 140616 - DNA, 25 bp, SARS Virus
taaaatcatcgtggttctaatcgtc

SEQ ID NO: 140617 - DNA, 25 bp, SARS Virus
aaaatcatcgtcgttctaatcgtct

SEQ ID NO: 140618 - DNA, 25 bp, SARS Virus
aaatcatcgtcggtctaatcgtctt

SEQ ID NO: 140619 - DNA, 25 bp, SARS Virus
aatcatcgtcgtgctaatcgtcttc

SEQ ID NO: 140620 - DNA, 25 bp, SARS Virus
atcatcgtcgttgtaatcgtcttcg

SEQ ID NO: 140621 - DNA, 25 bp, SARS Virus
tcatcgtcgttcgaatcgtcttcgg

SEQ ID NO: 140622 - DNA, 25 bp, SARS Virus
catcgtcgttctgatcgtcttcggg

SEQ ID NO: 140623 - DNA, 25 bp, SARS Virus
atcgtcgttctagtcgtcttcggga

SEQ ID NO: 140624 - DNA, 25 bp, SARS Virus
tcgtcgttctaagcgtcttcgggac

SEQ ID NO: 140625 - DNA, 25 bp, SARS Virus
cgtcgttctaatggtcttcgggact

SEQ ID NO: 140626 - DNA, 25 bp, SARS Virus
gtcgttctaatcgtcttcgggacta

SEQ ID NO: 140627 - DNA, 25 bp, SARS Virus
tcgttctaatcggcttcgggactaa

SEQ ID NO: 140628 - DNA, 25 bp, SARS Virus
cgttctaatcgtgttcgggactaaa

SEQ ID NO: 140629 - DNA, 25 bp, SARS Virus
gttctaatcgtcgtcgggactaaag

SEQ ID NO: 140630 - DNA, 25 bp, SARS Virus
ttctaatcgtctgcgggactaaagt

SEQ ID NO: 140631 - DNA, 25 bp, SARS Virus
tctaatcgtcttggggactaaagtc

SEQ ID NO: 140632 - DNA, 25 bp, SARS Virus
ctaatcgtcttcgggactaaagtcg

SEQ ID NO: 140633 - DNA, 25 bp, SARS Virus
taatcgtcttcgggactaaagtcgt

SEQ ID NO: 140634 - DNA, 25 bp, SARS Virus
aatcgtcttcgggactaaagtcgtc

SEQ ID NO: 140635 - DNA, 25 bp, SARS Virus
atcgtcttcggggctaaagtcgtcg

SEQ ID NO: 140636 - DNA, 25 bp, SARS Virus
tcgtcttcgggagtaaagtcgtcgg

SEQ ID NO: 140637 - DNA, 25 bp, SARS Virus
cgtcttcgggacgaaagtcgtcggg

SEQ ID NO: 140638 - DNA, 25 bp, SARS Virus
gtcttcgggactgaagtcgtcggga

SEQ ID NO: 140639 - DNA, 25 bp, SARS Virus
tcttcgggactagagtcgtcgggac

SEQ ID NO: 140640 - DNA, 25 bp, SARS Virus
cttcgggactaaggtcgtcgggact

SEQ ID NO: 140641 - DNA, 25 bp, SARS Virus
ttcgggactaaagtcgtcgggacta

SEQ ID NO: 140642 - DNA, 25 bp, SARS Virus
tcgggactaaaggcgtcgggactaa

SEQ ID NO: 140643 - DNA, 25 bp, SARS Virus
cgggactaaagtggtcgggactaat

SEQ ID NO: 140644 - DNA, 25 bp, SARS Virus
gggactaaagtcgtcgggactaatc

SEQ ID NO: 140645 - DNA, 25 bp, SARS Virus
ggactaaagtcggcgggactaatca

SEQ ID NO: 140646 - DNA, 25 bp, SARS Virus
gactaaagtcgtggggactaatcaa

SEQ ID NO: 140647 - DNA, 25 bp, SARS Virus
actaaagtcgtcgggactaatcaac

SEQ ID NO: 140648 - DNA, 25 bp, SARS Virus
ctaaagtcgtcgggactaatcaaca

SEQ ID NO: 140649 - DNA, 25 bp, SARS Virus
taaagtcgtcgggactaatcaacaa

SEQ ID NO: 140650 - DNA, 25 bp, SARS Virus
aaagtcgtcggggctaatcaacaac

SEQ ID NO: 140651 - DNA, 25 bp, SARS Virus
aagtcgtcgggagtaatcaacaaca

SEQ ID NO: 140652 - DNA, 25 bp, SARS Virus
agtcgtcgggacgaatcaacaacac

SEQ ID NO: 140653 - DNA, 25 bp, SARS Virus
gtcgtcgggactgatcaacaacaca

SEQ ID NO: 140654 - DNA, 25 bp, SARS Virus
tcgtcgggactagtcaacaacacaa

SEQ ID NO: 140655 - DNA, 25 bp, SARS Virus
cgtcgggactaagcaacaacacaat

SEQ ID NO: 140656 - DNA, 25 bp, SARS Virus
gtcgggactaatgaacaacacaatg

SEQ ID NO: 140657 - DNA, 25 bp, SARS Virus
tcgggactaatcgacaacacaatgt

SEQ ID NO: 140658 - DNA, 25 bp, SARS Virus
cgggactaatcagcaacacaatgta

SEQ ID NO: 140659 - DNA, 25 bp, SARS Virus
gggactaatcaagaacacaatgtat

SEQ ID NO: 140660 - DNA, 25 bp, SARS Virus
ggactaatcaacgacacaatgtatc

SEQ ID NO: 140661 - DNA, 25 bp, SARS Virus
gactaatcaacagcacaatgtatcc

SEQ ID NO: 140662 - DNA, 25 bp, SARS Virus
actaatcaacaagacaatgtatcca

SEQ ID NO: 140663 - DNA, 25 bp, SARS Virus
ctaatcaacaacgcaatgtatccaa

SEQ ID NO: 140664 - DNA, 25 bp, SARS Virus
taatcaacaacagaatgtatccaaa

SEQ ID NO: 140665 - DNA, 25 bp, SARS Virus
aatcaacaacacgatgtatccaaac

SEQ ID NO: 140666 - DNA, 25 bp, SARS Virus
atcaacaacacagtgtatccaaact

SEQ ID NO: 140667 - DNA, 25 bp, SARS Virus
tcaacaacacaaggtatccaaactt

SEQ ID NO: 140668 - DNA, 25 bp, SARS Virus
caacaacacaatgtatccaaacttc

SEQ ID NO: 140669 - DNA, 25 bp, SARS Virus
aacaacacaatggatccaaacttcc

SEQ ID NO: 140670 - DNA, 25 bp, SARS Virus
acaacacaatgtgtccaaacttccg

SEQ ID NO: 140671 - DNA, 25 bp, SARS Virus
caacacaatgtagccaaacttccga

SEQ ID NO: 140672 - DNA, 25 bp, SARS Virus
aacacaatgtatgcaaacttccgaa

SEQ ID NO: 140673 - DNA, 25 bp, SARS Virus
acacaatgtatcgaaacttccgaaa

SEQ ID NO: 140674 - DNA, 25 bp, SARS Virus
cacaatgtatccgaacttccgaaac

SEQ ID NO: 140675 - DNA, 25 bp, SARS Virus
acaatgtatccagacttccgaaact

SEQ ID NO: 140676 - DNA, 25 bp, SARS Virus
caatgtatccaagcttccgaaactt

SEQ ID NO: 140677 - DNA, 25 bp, SARS Virus
aatgtatccaaagttccgaaacttc

SEQ ID NO: 140678 - DNA, 25 bp, SARS Virus
atgtatccaaacgtccgaaacttca

SEQ ID NO: 140679 - DNA, 25 bp, SARS Virus
tgtatccaaactgccgaaacttcag

SEQ ID NO: 140680 - DNA, 25 bp, SARS Virus
gtatccaaacttgcgaaacttcaga

SEQ ID NO: 140681 - DNA, 25 bp, SARS Virus
tatccaaacttcggaaacttcagac

SEQ ID NO: 140682 - DNA, 25 bp, SARS Virus
atccaaacttccgaaacttcagacg

SEQ ID NO: 140683 - DNA, 25 bp, SARS Virus
tccaaacttccggaacttcagacgg

SEQ ID NO: 140684 - DNA, 25 bp, SARS Virus
ccaaacttccgagacttcagacgga

SEQ ID NO: 140685 - DNA, 25 bp, SARS Virus
caaacttccgaagcttcagacggac

SEQ ID NO: 140686 - DNA, 25 bp, SARS Virus
aaacttccgaaagttcagacggaca

SEQ ID NO: 140687 - DNA, 25 bp, SARS Virus
aacttccgaaacgtcagacggacat

SEQ ID NO: 140688 - DNA, 25 bp, SARS Virus
acttccgaaactgcagacggacatt

SEQ ID NO: 140689 - DNA, 25 bp, SARS Virus
cttccgaaacttgagacggacatta

SEQ ID NO: 140690 - DNA, 25 bp, SARS Virus
ttccgaaacttcggacggacattaa

SEQ ID NO: 140691 - DNA, 25 bp, SARS Virus
tccgaaacttcagacggacattaat

SEQ ID NO: 140692 - DNA, 25 bp, SARS Virus
ccgaaacttcaggcggacattaatt

SEQ ID NO: 140693 - DNA, 25 bp, SARS Virus
cgaaacttcagagggacattaattg

SEQ ID NO: 140694 - DNA, 25 bp, SARS Virus
gaaacttcagacggacattaattgg

SEQ ID NO: 140695 - DNA, 25 bp, SARS Virus
aaacttcagacggacattaattgga

SEQ ID NO: 140696 - DNA, 25 bp, SARS Virus
aacttcagacgggcattaattggac

SEQ ID NO: 140697 - DNA, 25 bp, SARS Virus
acttcagacggagattaattggaca

SEQ ID NO: 140698 - DNA, 25 bp, SARS Virus
cttcagacggacgttaattggacag

SEQ ID NO: 140699 - DNA, 25 bp, SARS Virus
ttcagacggacagtaattggacagt

SEQ ID NO: 140700 - DNA, 25 bp, SARS Virus
tcagacggacatgaattggacagtt

SEQ ID NO: 140701 - DNA, 25 bp, SARS Virus
cagacggacattgattggacagtta

SEQ ID NO: 140702 - DNA, 25 bp, SARS Virus
agacggacattagttggacagttaa

SEQ ID NO: 140703 - DNA, 25 bp, SARS Virus
gacggacattaagtggacagttaaa

SEQ ID NO: 140704 - DNA, 25 bp, SARS Virus
acggacattaatgggacagttaaac

SEQ ID NO: 140705 - DNA, 25 bp, SARS Virus
cggacattaattggacagttaaaca

SEQ ID NO: 140706 - DNA, 25 bp, SARS Virus
ggacattaattggacagttaaacat

SEQ ID NO: 140707 - DNA, 25 bp, SARS Virus
gacattaattgggcagttaaacatg

SEQ ID NO: 140708 - DNA, 25 bp, SARS Virus
acattaattggagagttaaacatgg

SEQ ID NO: 140709 - DNA, 25 bp, SARS Virus
cattaattggacggttaaacatgga

SEQ ID NO: 140710 - DNA, 25 bp, SARS Virus
attaattggacagttaaacatggag

SEQ ID NO: 140711 - DNA, 25 bp, SARS Virus
ttaattggacaggtaaacatggagg

SEQ ID NO: 140712 - DNA, 25 bp, SARS Virus
taattggacagtgaaacatggaggc

SEQ ID NO: 140713 - DNA, 25 bp, SARS Virus
aattggacagttgaacatggaggcg

SEQ ID NO: 140714 - DNA, 25 bp, SARS Virus
attggacagttagacatggaggcgg

SEQ ID NO: 140715 - DNA, 25 bp, SARS Virus
ttggacagttaagcatggaggcgga

SEQ ID NO: 140716 - DNA, 25 bp, SARS Virus
tggacagttaaagatggaggcggag

SEQ ID NO: 140717 - DNA, 25 bp, SARS Virus
ggacagttaaacgtggaggcggagc

SEQ ID NO: 140718 - DNA, 25 bp, SARS Virus
gacagttaaacagggaggcggagct

SEQ ID NO: 140719 - DNA, 25 bp, SARS Virus
acagttaaacatggaggcggagctg

SEQ ID NO: 140720 - DNA, 25 bp, SARS Virus
cagttaaacatggaggcggagctga

SEQ ID NO: 140721 - DNA, 25 bp, SARS Virus
agttaaacatgggggcggagctgaa

SEQ ID NO: 140722 - DNA, 25 bp, SARS Virus
gttaaacatggaggcggagctgaaa

SEQ ID NO: 140723 - DNA, 25 bp, SARS Virus
ttaaacatggaggcggagctgaaat

SEQ ID NO: 140724 - DNA, 25 bp, SARS Virus
taaacatggagggggagctgaaata

SEQ ID NO: 140725 - DNA, 25 bp, SARS Virus
aaacatggaggcggagctgaaatag

SEQ ID NO: 140726 - DNA, 25 bp, SARS Virus
aacatggaggcggagctgaaatagt

SEQ ID NO: 140727 - DNA, 25 bp, SARS Virus
acatggaggcggggctgaaatagtt

SEQ ID NO: 140728 - DNA, 25 bp, SARS Virus
catggaggcggagctgaaatagttc

SEQ ID NO: 140729 - DNA, 25 bp, SARS Virus
atggaggcggaggtgaaatagttca

SEQ ID NO: 140730 - DNA, 25 bp, SARS Virus
tggaggcggagcggaaatagttcag

SEQ ID NO: 140731 - DNA, 25 bp, SARS Virus
ggaggcggagctgaaatagttcagc

SEQ ID NO: 140732 - DNA, 25 bp, SARS Virus
gaggcggagctggaatagttcagcg

SEQ ID NO: 140733 - DNA, 25 bp, SARS Virus
aggcggagctgagatagttcagcgc

SEQ ID NO: 140734 - DNA, 25 bp, SARS Virus
ggcggagctgaagtagttcagcgct

SEQ ID NO: 140735 - DNA, 25 bp, SARS Virus
gcggagctgaaagagttcagcgctt

SEQ ID NO: 140736 - DNA, 25 bp, SARS Virus
cggagctgaaatggttcagcgcttt

SEQ ID NO: 140737 - DNA, 25 bp, SARS Virus
ggagctgaaatagttcagcgctttc

SEQ ID NO: 140738 - DNA, 25 bp, SARS Virus
gagctgaaataggtcagcgctttcc

SEQ ID NO: 140739 - DNA, 25 bp, SARS Virus
agctgaaatagtgcagcgctttcct

SEQ ID NO: 140740 - DNA, 25 bp, SARS Virus
gctgaaatagttgagcgctttccta

SEQ ID NO: 140741 - DNA, 25 bp, SARS Virus
ctgaaatagttcggcgctttcctat

SEQ ID NO: 140742 - DNA, 25 bp, SARS Virus
tgaaatagttcagcgctttcctata

SEQ ID NO: 140743 - DNA, 25 bp, SARS Virus
gaaatagttcagggctttcctatag

SEQ ID NO: 140744 - DNA, 25 bp, SARS Virus
aaatagttcagcgctttcctatagt

SEQ ID NO: 140745 - DNA, 25 bp, SARS Virus
aatagttcagcggtttcctatagta

SEQ ID NO: 140746 - DNA, 25 bp, SARS Virus
atagttcagcgcgttcctatagtaa

SEQ ID NO: 140747 - DNA, 25 bp, SARS Virus
tagttcagcgctgtcctatagtaaa

SEQ ID NO: 140748 - DNA, 25 bp, SARS Virus
agttcagcgcttgcctatagtaaat

SEQ ID NO: 140749 - DNA, 25 bp, SARS Virus
gttcagcgctttgctatagtaaatc

SEQ ID NO: 140750 - DNA, 25 bp, SARS Virus
ttcagcgctttcgtatagtaaatcg

SEQ ID NO: 140751 - DNA, 25 bp, SARS Virus
tcagcgctttccgatagtaaatcgt

SEQ ID NO: 140752 - DNA, 25 bp, SARS Virus
cagcgctttcctgtagtaaatcgtg

SEQ ID NO: 140753 - DNA, 25 bp, SARS Virus
agcgctttcctagagtaaatcgtgt

SEQ ID NO: 140754 - DNA, 25 bp, SARS Virus
gcgctttcctatggtaaatcgtgtg

SEQ ID NO: 140755 - DNA, 25 bp, SARS Virus
cgctttcctatagtaaatcgtgtga

SEQ ID NO: 140756 - DNA, 25 bp, SARS Virus
gctttcctataggaaatcgtgtgaa

SEQ ID NO: 140757 - DNA, 25 bp, SARS Virus
ctttcctatagtgaatcgtgtgaac

SEQ ID NO: 140758 - DNA, 25 bp, SARS Virus
tttcctatagtagatcgtgtgaact

SEQ ID NO: 140759 - DNA, 25 bp, SARS Virus
ttcctatagtaagtcgtgtgaactt

SEQ ID NO: 140760 - DNA, 25 bp, SARS Virus
tcctatagtaaagcgtgtgaacttt

SEQ ID NO: 140761 - DNA, 25 bp, SARS Virus
cctatagtaaatggtgtgaacttta

SEQ ID NO: 140762 - DNA, 25 bp, SARS Virus
ctatagtaaatcgtgtgaactttaa

SEQ ID NO: 140763 - DNA, 25 bp, SARS Virus
tatagtaaatcgggtgaactttaac

SEQ ID NO: 140764 - DNA, 25 bp, SARS Virus
atagtaaatcgtgtgaactttaacg

SEQ ID NO: 140765 - DNA, 25 bp, SARS Virus
tagtaaatcgtgggaactttaacgt

SEQ ID NO: 140766 - DNA, 25 bp, SARS Virus
agtaaatcgtgtgaactttaacgtg

SEQ ID NO: 140767 - DNA, 25 bp, SARS Virus
gtaaatcgtgtggactttaacgtgg

SEQ ID NO: 140768 - DNA, 25 bp, SARS Virus
taaatcgtgtgagctttaacgtggt

SEQ ID NO: 140769 - DNA, 25 bp, SARS Virus
aaatcgtgtgaagtttaacgtggtt

SEQ ID NO: 140770 - DNA, 25 bp, SARS Virus
aatcgtgtgaacgttaacgtggttt

SEQ ID NO: 140771 - DNA, 25 bp, SARS Virus
atcgtgtgaactgtaacgtggtttt

SEQ ID NO: 140772 - DNA, 25 bp, SARS Virus
tcgtgtgaacttgaacgtggtttta

SEQ ID NO: 140773 - DNA, 25 bp, SARS Virus
cgtgtgaactttgacgtggttttaa

SEQ ID NO: 140774 - DNA, 25 bp, SARS Virus
gtgtgaactttagcgtggttttaat

SEQ ID NO: 140775 - DNA, 25 bp, SARS Virus
tgtgaactttaaggtggttttaatc

SEQ ID NO: 140776 - DNA, 25 bp, SARS Virus
gtgaactttaacgtggttttaatct

SEQ ID NO: 140777 - DNA, 25 bp, SARS Virus
tgaactttaacggggttttaatctc

SEQ ID NO: 140778 - DNA, 25 bp, SARS Virus
gaactttaacgtggttttaatctcg

SEQ ID NO: 140779 - DNA, 25 bp, SARS Virus
aactttaacgtggttttaatctcga

SEQ ID NO: 140780 - DNA, 25 bp, SARS Virus
actttaacgtgggtttaatctcgat

SEQ ID NO: 140781 - DNA, 25 bp, SARS Virus
ctttaacgtggtgttaatctcgatt

SEQ ID NO: 140782 - DNA, 25 bp, SARS Virus
tttaacgtggttgtaatctcgattc

SEQ ID NO: 140783 - DNA, 25 bp, SARS Virus
ttaacgtggtttgaatctcgattca

SEQ ID NO: 140784 - DNA, 25 bp, SARS Virus
taacgtggttttgatctcgattcaa

SEQ ID NO: 140785 - DNA, 25 bp, SARS Virus
aacgtggttttagtctcgattcaac

SEQ ID NO: 140786 - DNA, 25 bp, SARS Virus
acgtggttttaagctcgattcaaca

SEQ ID NO: 140787 - DNA, 25 bp, SARS Virus
cgtggttttaatgtcgattcaacaa

SEQ ID NO: 140788 - DNA, 25 bp, SARS Virus
gtggttttaatcgcgattcaacaaa

SEQ ID NO: 140789 - DNA, 25 bp, SARS Virus
tggttttaatctggattcaacaaat

SEQ ID NO: 140790 - DNA, 25 bp, SARS Virus
ggttttaatctcgattcaacaaatt

SEQ ID NO: 140791 - DNA, 25 bp, SARS Virus
gttttaatctcggttcaacaaattg

SEQ ID NO: 140792 - DNA, 25 bp, SARS Virus
ttttaatctcgagtcaacaaattgt

SEQ ID NO: 140793 - DNA, 25 bp, SARS Virus
tttaatctcgatgcaacaaattgtt

SEQ ID NO: 140794 - DNA, 25 bp, SARS Virus
ttaatctcgattgaacaaattgttc

SEQ ID NO: 140795 - DNA, 25 bp, SARS Virus
taatctcgattcgacaaattgttca

SEQ ID NO: 140796 - DNA, 25 bp, SARS Virus
aatctcgattcagcaaattgttcac

SEQ ID NO: 140797 - DNA, 25 bp, SARS Virus
atctcgattcaagaaattgttcaca

SEQ ID NO: 140798 - DNA, 25 bp, SARS Virus
tctcgattcaacgaattgttcacac

SEQ ID NO: 140799 - DNA, 25 bp, SARS Virus
ctcgattcaacagattgttcacaca

SEQ ID NO: 140800 - DNA, 25 bp, SARS Virus
tcgattcaacaagttgttcacacaa

SEQ ID NO: 140801 - DNA, 25 bp, SARS Virus
cgattcaacaaagtgttcacacaaa

SEQ ID NO: 140802 - DNA, 25 bp, SARS Virus
gattcaacaaatggttcacacaaat

SEQ ID NO: 140803 - DNA, 25 bp, SARS Virus
attcaacaaattgttcacacaaatt

SEQ ID NO: 140804 - DNA, 25 bp, SARS Virus
ttcaacaaattggtcacacaaatta

SEQ ID NO: 140805 - DNA, 25 bp, SARS Virus
tcaacaaattgtgcacacaaattac

SEQ ID NO: 140806 - DNA, 25 bp, SARS Virus
caacaaattgttgacacaaattacg

SEQ ID NO: 140807 - DNA, 25 bp, SARS Virus
aacaaattgttcgcacaaattacga

SEQ ID NO: 140808 - DNA, 25 bp, SARS Virus
acaaattgttcagacaaattacgaa

SEQ ID NO: 140809 - DNA, 25 bp, SARS Virus
caaattgttcacgcaaattacgaac

SEQ ID NO: 140810 - DNA, 25 bp, SARS Virus
aaattgttcacagaaattacgaact

SEQ ID NO: 140811 - DNA, 25 bp, SARS Virus
aattgttcacacgaattacgaactc

SEQ ID NO: 140812 - DNA, 25 bp, SARS Virus
attgttcacacagattacgaactcg

SEQ ID NO: 140813 - DNA, 25 bp, SARS Virus
ttgttcacacaagttacgaactcgt

SEQ ID NO: 140814 - DNA, 25 bp, SARS Virus
tgttcacacaaagtacgaactcgta

SEQ ID NO: 140815 - DNA, 25 bp, SARS Virus
gttcacacaaatgacgaactcgtaa

SEQ ID NO: 140816 - DNA, 25 bp, SARS Virus
ttcacacaaattgcgaactcgtaag

SEQ ID NO: 140817 - DNA, 25 bp, SARS Virus
tcacacaaattaggaactcgtaaga

SEQ ID NO: 140818 - DNA, 25 bp, SARS Virus
cacacaaattacgaactcgtaagac

SEQ ID NO: 140819 - DNA, 25 bp, SARS Virus
acacaaattacggactcgtaagacc

SEQ ID NO: 140820 - DNA, 25 bp, SARS Virus
cacaaattacgagctcgtaagacca

SEQ ID NO: 140821 - DNA, 25 bp, SARS Virus
acaaattacgaagtcgtaagaccaa

SEQ ID NO: 140822 - DNA, 25 bp, SARS Virus
caaattacgaacgcgtaagaccaat

SEQ ID NO: 140823 - DNA, 25 bp, SARS Virus
aaattacgaactggtaagaccaatt

SEQ ID NO: 140824 - DNA, 25 bp, SARS Virus
aattacgaactcgtaagaccaattg

SEQ ID NO: 140825 - DNA, 25 bp, SARS Virus
attacgaactcggaagaccaattgt

SEQ ID NO: 140826 - DNA, 25 bp, SARS Virus
ttacgaactcgtgagaccaattgtt

SEQ ID NO: 140827 - DNA, 25 bp, SARS Virus
tacgaactcgtaggaccaattgttg

SEQ ID NO: 140828 - DNA, 25 bp, SARS Virus
acgaactcgtaagaccaattgttgc

SEQ ID NO: 140829 - DNA, 25 bp, SARS Virus
cgaactcgtaaggccaattgttgca

SEQ ID NO: 140830 - DNA, 25 bp, SARS Virus
gaactcgtaagagcaattgttgcag

SEQ ID NO: 140831 - DNA, 25 bp, SARS Virus
aactcgtaagacgaattgttgcaga

SEQ ID NO: 140832 - DNA, 25 bp, SARS Virus
actcgtaagaccgattgttgcagaa

SEQ ID NO: 140833 - DNA, 25 bp, SARS Virus
ctcgtaagaccagttgttgcagaac

SEQ ID NO: 140834 - DNA, 25 bp, SARS Virus
tcgtaagaccaagtgttgcagaacg

SEQ ID NO: 140835 - DNA, 25 bp, SARS Virus
cgtaagaccaatggttgcagaacgt

SEQ ID NO: 140836 - DNA, 25 bp, SARS Virus
gtaagaccaattgttgcagaacgtc

SEQ ID NO: 140837 - DNA, 25 bp, SARS Virus
taagaccaattggtgcagaacgtcg

SEQ ID NO: 140838 - DNA, 25 bp, SARS Virus
aagaccaattgtggcagaacgtcga

SEQ ID NO: 140839 - DNA, 25 bp, SARS Virus
agaccaattgttgcagaacgtcgaa

SEQ ID NO: 140840 - DNA, 25 bp, SARS Virus
gaccaattgttggagaacgtcgaac

SEQ ID NO: 140841 - DNA, 25 bp, SARS Virus
accaattgttgcggaacgtcgaacg

SEQ ID NO: 140842 - DNA, 25 bp, SARS Virus
ccaattgttgcagaacgtcgaacgg

SEQ ID NO: 140843 - DNA, 25 bp, SARS Virus
caattgttgcaggacgtcgaacggg

SEQ ID NO: 140844 - DNA, 25 bp, SARS Virus
aattgttgcagagcgtcgaacgggt

SEQ ID NO: 140845 - DNA, 25 bp, SARS Virus
attgttgcagaaggtcgaacgggtt

SEQ ID NO: 140846 - DNA, 25 bp, SARS Virus
ttgttgcagaacgtcgaacgggtta

SEQ ID NO: 140847 - DNA, 25 bp, SARS Virus
tgttgcagaacggcgaacgggttac

SEQ ID NO: 140848 - DNA, 25 bp, SARS Virus
gttgcagaacgtggaacgggttacg

SEQ ID NO: 140849 - DNA, 25 bp, SARS Virus
ttgcagaacgtcgaacgggttacgt

SEQ ID NO: 140850 - DNA, 25 bp, SARS Virus
tgcagaacgtcggacgggttacgtc

SEQ ID NO: 140851 - DNA, 25 bp, SARS Virus
gcagaacgtcgagcgggttacgtca

SEQ ID NO: 140852 - DNA, 25 bp, SARS Virus
cagaacgtcgaaggggttacgtcaa

SEQ ID NO: 140853 - DNA, 25 bp, SARS Virus
agaacgtcgaacgggttacgtcaac

SEQ ID NO: 140854 - DNA, 25 bp, SARS Virus
gaacgtcgaacgggttacgtcaact

SEQ ID NO: 140855 - DNA, 25 bp, SARS Virus
aacgtcgaacgggttacgtcaacta

SEQ ID NO: 140856 - DNA, 25 bp, SARS Virus
acgtcgaacggggtacgtcaactac

SEQ ID NO: 140857 - DNA, 25 bp, SARS Virus
cgtcgaacgggtgacgtcaactaca

SEQ ID NO: 140858 - DNA, 25 bp, SARS Virus
gtcgaacgggttgcgtcaactacaa

SEQ ID NO: 140859 - DNA, 25 bp, SARS Virus
tcgaacgggttaggtcaactacaac

SEQ ID NO: 140860 - DNA, 25 bp, SARS Virus
cgaacgggttacgtcaactacaaca

SEQ ID NO: 140861 - DNA, 25 bp, SARS Virus
gaacgggttacggcaactacaacaa

SEQ ID NO: 140862 - DNA, 25 bp, SARS Virus
aacgggttacgtgaactacaacaac

SEQ ID NO: 140863 - DNA, 25 bp, SARS Virus
acgggttacgtcgactacaacaaca

SEQ ID NO: 140864 - DNA, 25 bp, SARS Virus
cgggttacgtcagctacaacaacat

SEQ ID NO: 140865 - DNA, 25 bp, SARS Virus
gggttacgtcaagtacaacaacatt

SEQ ID NO: 140866 - DNA, 25 bp, SARS Virus
ggttacgtcaacgacaacaacattc

SEQ ID NO: 140867 - DNA, 25 bp, SARS Virus
gttacgtcaactgcaacaacattca

SEQ ID NO: 140868 - DNA, 25 bp, SARS Virus
ttacgtcaactagaacaacattcac

SEQ ID NO: 140869 - DNA, 25 bp, SARS Virus
tacgtcaactacgacaacattcact

SEQ ID NO: 140870 - DNA, 25 bp, SARS Virus
acgtcaactacagcaacattcacta

SEQ ID NO: 140871 - DNA, 25 bp, SARS Virus
cgtcaactacaagaacattcactaa

SEQ ID NO: 140872 - DNA, 25 bp, SARS Virus
gtcaactacaacgacattcactaag

SEQ ID NO: 140873 - DNA, 25 bp, SARS Virus
tcaactacaacagcattcactaaga

SEQ ID NO: 140874 - DNA, 25 bp, SARS Virus
caactacaacaagattcactaagaa

SEQ ID NO: 140875 - DNA, 25 bp, SARS Virus
aactacaacaacgttcactaagaac

SEQ ID NO: 140876 - DNA, 25 bp, SARS Virus
actacaacaacagtcactaagaact

SEQ ID NO: 140877 - DNA, 25 bp, SARS Virus
ctacaacaacatgcactaagaactt

SEQ ID NO: 140878 - DNA, 25 bp, SARS Virus
tacaacaacattgactaagaactta

SEQ ID NO: 140879 - DNA, 25 bp, SARS Virus
acaacaacattcgctaagaacttaa

SEQ ID NO: 140880 - DNA, 25 bp, SARS Virus
caacaacattcagtaagaacttaaa

SEQ ID NO: 140881 - DNA, 25 bp, SARS Virus
aacaacattcacgaagaacttaaac

SEQ ID NO: 140882 - DNA, 25 bp, SARS Virus
acaacattcactgagaacttaaact

SEQ ID NO: 140883 - DNA, 25 bp, SARS Virus
caacattcactaggaacttaaactg

SEQ ID NO: 140884 - DNA, 25 bp, SARS Virus
aacattcactaagaacttaaactga

SEQ ID NO: 140885 - DNA, 25 bp, SARS Virus
acattcactaaggacttaaactgat

SEQ ID NO: 140886 - DNA, 25 bp, SARS Virus
cattcactaagagcttaaactgatt

SEQ ID NO: 140887 - DNA, 25 bp, SARS Virus
attcactaagaagttaaactgatta

SEQ ID NO: 140888 - DNA, 25 bp, SARS Virus
ttcactaagaacgtaaactgattag

SEQ ID NO: 140889 - DNA, 25 bp, SARS Virus
tcactaagaactgaaactgattagc

SEQ ID NO: 140890 - DNA, 25 bp, SARS Virus
cactaagaacttgaactgattagcg

SEQ ID NO: 140891 - DNA, 25 bp, SARS Virus
actaagaacttagactgattagcgg

SEQ ID NO: 140892 - DNA, 25 bp, SARS Virus
ctaagaacttaagctgattagcgga

SEQ ID NO: 140893 - DNA, 25 bp, SARS Virus
taagaacttaaagtgattagcggaa

SEQ ID NO: 140894 - DNA, 25 bp, SARS Virus
aagaacttaaacggattagcggaac

SEQ ID NO: 140895 - DNA, 25 bp, SARS Virus
agaacttaaactgattagcggaaca

SEQ ID NO: 140896 - DNA, 25 bp, SARS Virus
gaacttaaactggttagcggaacaa

SEQ ID NO: 140897 - DNA, 25 bp, SARS Virus
aacttaaactgagtagcggaacaat

SEQ ID NO: 140898 - DNA, 25 bp, SARS Virus
acttaaactgatgagcggaacaatt

SEQ ID NO: 140899 - DNA, 25 bp, SARS Virus
cttaaactgattggcggaacaattt

SEQ ID NO: 140900 - DNA, 25 bp, SARS Virus
ttaaactgattagcggaacaattta

SEQ ID NO: 140901 - DNA, 25 bp, SARS Virus
taaactgattaggggaacaatttaa

SEQ ID NO: 140902 - DNA, 25 bp, SARS Virus
aaactgattagcggaacaatttaac

SEQ ID NO: 140903 - DNA, 25 bp, SARS Virus
aactgattagcggaacaatttaacc

SEQ ID NO: 140904 - DNA, 25 bp, SARS Virus
actgattagcgggacaatttaacca

SEQ ID NO: 140905 - DNA, 25 bp, SARS Virus
ctgattagcggagcaatttaaccaa

SEQ ID NO: 140906 - DNA, 25 bp, SARS Virus
tgattagcggaagaatttaaccaac

SEQ ID NO: 140907 - DNA, 25 bp, SARS Virus
gattagcggaacgatttaaccaacc

SEQ ID NO: 140908 - DNA, 25 bp, SARS Virus
attagcggaacagtttaaccaaccg

SEQ ID NO: 140909 - DNA, 25 bp, SARS Virus
ttagcggaacaagttaaccaaccgc

SEQ ID NO: 140910 - DNA, 25 bp, SARS Virus
tagcggaacaatgtaaccaaccgct

SEQ ID NO: 140911 - DNA, 25 bp, SARS Virus
agcggaacaattgaaccaaccgcta

SEQ ID NO: 140912 - DNA, 25 bp, SARS Virus
gcggaacaatttgaccaaccgctaa

SEQ ID NO: 140913 - DNA, 25 bp, SARS Virus
cggaacaatttagccaaccgctaaa

SEQ ID NO: 140914 - DNA, 25 bp, SARS Virus
ggaacaatttaagcaaccgctaaac

SEQ ID NO: 140915 - DNA, 25 bp, SARS Virus
gaacaatttaacgaaccgctaaaca

SEQ ID NO: 140916 - DNA, 25 bp, SARS Virus
aacaatttaaccgaccgctaaacaa

SEQ ID NO: 140917 - DNA, 25 bp, SARS Virus
acaatttaaccagccgctaaacaaa

SEQ ID NO: 140918 - DNA, 25 bp, SARS Virus
caatttaaccaagcgctaaacaaaa

SEQ ID NO: 140919 - DNA, 25 bp, SARS Virus
aatttaaccaacggctaaacaaaaa

SEQ ID NO: 140920 - DNA, 25 bp, SARS Virus
atttaaccaaccgctaaacaaaaac

SEQ ID NO: 140921 - DNA, 25 bp, SARS Virus
tttaaccaaccggtaaacaaaaacc

SEQ ID NO: 140922 - DNA, 25 bp, SARS Virus
ttaaccaaccgcgaaacaaaaacca

SEQ ID NO: 140923 - DNA, 25 bp, SARS Virus
taaccaaccgctgaacaaaaaccaa

SEQ ID NO: 140924 - DNA, 25 bp, SARS Virus
aaccaaccgctagacaaaaaccaag

SEQ ID NO: 140925 - DNA, 25 bp, SARS Virus
accaaccgctaagcaaaaaccaaga

SEQ ID NO: 140926 - DNA, 25 bp, SARS Virus
ccaaccgctaaagaaaaaccaagag

SEQ ID NO: 140927 - DNA, 25 bp, SARS Virus
caaccgctaaacgaaaaccaagagt

SEQ ID NO: 140928 - DNA, 25 bp, SARS Virus
aaccgctaaacagaaaccaagagta

SEQ ID NO: 140929 - DNA, 25 bp, SARS Virus
accgctaaacaagaaccaagagtat

SEQ ID NO: 140930 - DNA, 25 bp, SARS Virus
ccgctaaacaaagaccaagagtatc

SEQ ID NO: 140931 - DNA, 25 bp, SARS Virus
cgctaaacaaaagccaagagtatct

SEQ ID NO: 140932 - DNA, 25 bp, SARS Virus
gctaaacaaaaagcaagagtatctc

SEQ ID NO: 140933 - DNA, 25 bp, SARS Virus
ctaaacaaaaacgaagagtatctct

SEQ ID NO: 140934 - DNA, 25 bp, SARS Virus
taaacaaaaaccgagagtatctctt

SEQ ID NO: 140935 - DNA, 25 bp, SARS Virus
aaacaaaaaccaggagtatctcttg

SEQ ID NO: 140936 - DNA, 25 bp, SARS Virus
aacaaaaaccaagagtatctcttgt

SEQ ID NO: 140937 - DNA, 25 bp, SARS Virus
acaaaaaccaagggtatctcttgta

SEQ ID NO: 140938 - DNA, 25 bp, SARS Virus
caaaaaccaagagtatctcttgtaa

SEQ ID NO: 140939 - DNA, 25 bp, SARS Virus
aaaaaccaagaggatctcttgtaaa

SEQ ID NO: 140940 - DNA, 25 bp, SARS Virus
aaaaccaagagtgtctcttgtaaaa

SEQ ID NO: 140941 - DNA, 25 bp, SARS Virus
aaaccaagagtagctcttgtaaaac

SEQ ID NO: 140942 - DNA, 25 bp, SARS Virus
aaccaagagtatgtcttgtaaaacc

SEQ ID NO: 140943 - DNA, 25 bp, SARS Virus
accaagagtatcgcttgtaaaaccc

SEQ ID NO: 140944 - DNA, 25 bp, SARS Virus
ccaagagtatctgttgtaaaaccca

SEQ ID NO: 140945 - DNA, 25 bp, SARS Virus
caagagtatctcgtgtaaaacccat

SEQ ID NO: 140946 - DNA, 25 bp, SARS Virus
aagagtatctctggtaaaacccatt

SEQ ID NO: 140947 - DNA, 25 bp, SARS Virus
agagtatctcttgtaaaacccattg

SEQ ID NO: 140948 - DNA, 25 bp, SARS Virus
gagtatctcttggaaaacccattga

SEQ ID NO: 140949 - DNA, 25 bp, SARS Virus
agtatctcttgtgaaacccattgag

SEQ ID NO: 140950 - DNA, 25 bp, SARS Virus
gtatctcttgtagaacccattgagg

SEQ ID NO: 140951 - DNA, 25 bp, SARS Virus
tatctcttgtaagacccattgaggt

SEQ ID NO: 140952 - DNA, 25 bp, SARS Virus
atctcttgtaaagcccattgaggtt

SEQ ID NO: 140953 - DNA, 25 bp, SARS Virus
tctcttgtaaaagccattgaggtta

SEQ ID NO: 140954 - DNA, 25 bp, SARS Virus
ctcttgtaaaacgcattgaggttac

SEQ ID NO: 140955 - DNA, 25 bp, SARS Virus
tcttgtaaaaccgattgaggttacg

SEQ ID NO: 140956 - DNA, 25 bp, SARS Virus
cttgtaaaacccgttgaggttacgg

SEQ ID NO: 140957 - DNA, 25 bp, SARS Virus
ttgtaaaacccagtgaggttacggt

SEQ ID NO: 140958 - DNA, 25 bp, SARS Virus
tgtaaaacccatggaggttacggta

SEQ ID NO: 140959 - DNA, 25 bp, SARS Virus
gtaaaacccattgaggttacggtaa

SEQ ID NO: 140960 - DNA, 25 bp, SARS Virus
taaaacccattggggttacggtaac

SEQ ID NO: 140961 - DNA, 25 bp, SARS Virus
aaaacccattgaggttacggtaact

SEQ ID NO: 140962 - DNA, 25 bp, SARS Virus
aaacccattgaggttacggtaactt

SEQ ID NO: 140963 - DNA, 25 bp, SARS Virus
aacccattgagggtacggtaacttg

SEQ ID NO: 140964 - DNA, 25 bp, SARS Virus
acccattgaggtgacggtaacttgg

SEQ ID NO: 140965 - DNA, 25 bp, SARS Virus
cccattgaggttgcggtaacttgga

SEQ ID NO: 140966 - DNA, 25 bp, SARS Virus
ccattgaggttagggtaacttggat

SEQ ID NO: 140967 - DNA, 25 bp, SARS Virus
cattgaggttacggtaacttggata

SEQ ID NO: 140968 - DNA, 25 bp, SARS Virus
attgaggttacggtaacttggatat

SEQ ID NO: 140969 - DNA, 25 bp, SARS Virus
ttgaggttacgggaacttggatata

SEQ ID NO: 140970 - DNA, 25 bp, SARS Virus
tgaggttacggtgacttggatatac

SEQ ID NO: 140971 - DNA, 25 bp, SARS Virus
gaggttacggtagcttggatatacg

SEQ ID NO: 140972 - DNA, 25 bp, SARS Virus
aggttacggtaagttggatatacgg

SEQ ID NO: 140973 - DNA, 25 bp, SARS Virus
ggttacggtaacgtggatatacggt

SEQ ID NO: 140974 - DNA, 25 bp, SARS Virus
gttacggtaactgggatatacggta

SEQ ID NO: 140975 - DNA, 25 bp, SARS Virus
ttacggtaacttggatatacggtaa

SEQ ID NO: 140976 - DNA, 25 bp, SARS Virus
tacggtaacttggatatacggtaaa

SEQ ID NO: 140977 - DNA, 25 bp, SARS Virus
acggtaacttgggtatacggtaaac

SEQ ID NO: 140978 - DNA, 25 bp, SARS Virus
cggtaacttggagatacggtaaacg

SEQ ID NO: 140979 - DNA, 25 bp, SARS Virus
ggtaacttggatgtacggtaaacgt

SEQ ID NO: 140980 - DNA, 25 bp, SARS Virus
gtaacttggatagacggtaaacgta

SEQ ID NO: 140981 - DNA, 25 bp, SARS Virus
taacttggatatgcggtaaacgtat

SEQ ID NO: 140982 - DNA, 25 bp, SARS Virus
aacttggatatagggtaaacgtatc

SEQ ID NO: 140983 - DNA, 25 bp, SARS Virus
acttggatatacggtaaacgtatcg

SEQ ID NO: 140984 - DNA, 25 bp, SARS Virus
cttggatatacggtaaacgtatcgt

SEQ ID NO: 140985 - DNA, 25 bp, SARS Virus
ttggatatacgggaaacgtatcgtt

SEQ ID NO: 140986 - DNA, 25 bp, SARS Virus
tggatatacggtgaacgtatcgttt

SEQ ID NO: 140987 - DNA, 25 bp, SARS Virus
ggatatacggtagacgtatcgtttt

SEQ ID NO: 140988 - DNA, 25 bp, SARS Virus
gatatacggtaagcgtatcgttttc

SEQ ID NO: 140989 - DNA, 25 bp, SARS Virus
atatacggtaaaggtatcgttttcc

SEQ ID NO: 140990 - DNA, 25 bp, SARS Virus
tatacggtaaacgtatcgttttcca

SEQ ID NO: 140991 - DNA, 25 bp, SARS Virus
atacggtaaacggatcgttttccat

SEQ ID NO: 140992 - DNA, 25 bp, SARS Virus
tacggtaaacgtgtcgttttccata

SEQ ID NO: 140993 - DNA, 25 bp, SARS Virus
acggtaaacgtagcgttttccataa

SEQ ID NO: 140994 - DNA, 25 bp, SARS Virus
cggtaaacgtatggttttccataaa

SEQ ID NO: 140995 - DNA, 25 bp, SARS Virus
ggtaaacgtatcgttttccataaac

SEQ ID NO: 140996 - DNA, 25 bp, SARS Virus
gtaaacgtatcggtttccataaact

SEQ ID NO: 140997 - DNA, 25 bp, SARS Virus
taaacgtatcgtgttccataaactt

SEQ ID NO: 140998 - DNA, 25 bp, SARS Virus
aaacgtatcgttgtccataaacttc

SEQ ID NO: 140999 - DNA, 25 bp, SARS Virus
aacgtatcgtttgccataaacttct

SEQ ID NO: 141000 - DNA, 25 bp, SARS Virus
acgtatcgttttgcataaacttctc

SEQ ID NO: 141001 - DNA, 25 bp, SARS Virus
cgtatcgttttcgataaacttctcg

SEQ ID NO: 141002 - DNA, 25 bp, SARS Virus
gtatcgttttccgtaaacttctcgt

SEQ ID NO: 141003 - DNA, 25 bp, SARS Virus
tatcgttttccagaaacttctcgtc

SEQ ID NO: 141004 - DNA, 25 bp, SARS Virus
atcgttttccatgaacttctcgtcg

SEQ ID NO: 141005 - DNA, 25 bp, SARS Virus
tcgttttccatagacttctcgtcgc

SEQ ID NO: 141006 - DNA, 25 bp, SARS Virus
cgttttccataagcttctcgtcgcg

SEQ ID NO: 141007 - DNA, 25 bp, SARS Virus
gttttccataaagttctcgtcgcgg

SEQ ID NO: 141008 - DNA, 25 bp, SARS Virus
ttttccataaacgtctcgtcgcggt

SEQ ID NO: 141009 - DNA, 25 bp, SARS Virus
tttccataaactgctcgtcgcggtc

SEQ ID NO: 141010 - DNA, 25 bp, SARS Virus
ttccataaacttgtcgtcgcggtcg

SEQ ID NO: 141011 - DNA, 25 bp, SARS Virus
tccataaacttcgcgtcgcggtcgt

SEQ ID NO: 141012 - DNA, 25 bp, SARS Virus
ccataaacttctggtcgcggtcgtg

SEQ ID NO: 141013 - DNA, 25 bp, SARS Virus
cataaacttctcgtcgcggtcgtgg

SEQ ID NO: 141014 - DNA, 25 bp, SARS Virus
ataaacttctcggcgcggtcgtggt

SEQ ID NO: 141015 - DNA, 25 bp, SARS Virus
taaacttctcgtggcggtcgtggtt

SEQ ID NO: 141016 - DNA, 25 bp, SARS Virus
aaacttctcgtcgcggtcgtggttt

SEQ ID NO: 141017 - DNA, 25 bp, SARS Virus
aacttctcgtcggggtcgtggttta

SEQ ID NO: 141018 - DNA, 25 bp, SARS Virus
acttctcgtcgcggtcgtggtttac

SEQ ID NO: 141019 - DNA, 25 bp, SARS Virus
cttctcgtcgcggtcgtggtttaca

SEQ ID NO: 141020 - DNA, 25 bp, SARS Virus
ttctcgtcgcgggcgtggtttacag

SEQ ID NO: 141021 - DNA, 25 bp, SARS Virus
tctcgtcgcggtggtggtttacagg

SEQ ID NO: 141022 - DNA, 25 bp, SARS Virus
ctcgtcgcggtcgtggtttacaggt

SEQ ID NO: 141023 - DNA, 25 bp, SARS Virus
tcgtcgcggtcggggtttacaggta

SEQ ID NO: 141024 - DNA, 25 bp, SARS Virus
cgtcgcggtcgtggtttacaggtag

SEQ ID NO: 141025 - DNA, 25 bp, SARS Virus
gtcgcggtcgtggtttacaggtagg

SEQ ID NO: 141026 - DNA, 25 bp, SARS Virus
tcgcggtcgtgggttacaggtaggt

SEQ ID NO: 141027 - DNA, 25 bp, SARS Virus
cgcggtcgtggtgtacaggtaggtc

SEQ ID NO: 141028 - DNA, 25 bp, SARS Virus
gcggtcgtggttgacaggtaggtcg

SEQ ID NO: 141029 - DNA, 25 bp, SARS Virus
cggtcgtggtttgcaggtaggtcgt

SEQ ID NO: 141030 - DNA, 25 bp, SARS Virus
ggtcgtggtttagaggtaggtcgtc

SEQ ID NO: 141031 - DNA, 25 bp, SARS Virus
gtcgtggtttacgggtaggtcgtca

SEQ ID NO: 141032 - DNA, 25 bp, SARS Virus
tcgtggtttacaggtaggtcgtcac

SEQ ID NO: 141033 - DNA, 25 bp, SARS Virus
cgtggtttacaggtaggtcgtcacc

SEQ ID NO: 141034 - DNA, 25 bp, SARS Virus
gtggtttacagggaggtcgtcaccg

SEQ ID NO: 141035 - DNA, 25 bp, SARS Virus
tggtttacaggtgggtcgtcaccgt

SEQ ID NO: 141036 - DNA, 25 bp, SARS Virus
ggtttacaggtaggtcgtcaccgtc

SEQ ID NO: 141037 - DNA, 25 bp, SARS Virus
gtttacaggtaggtcgtcaccgtca

SEQ ID NO: 141038 - DNA, 25 bp, SARS Virus
tttacaggtagggcgtcaccgtcat

SEQ ID NO: 141039 - DNA, 25 bp, SARS Virus
ttacaggtaggtggtcaccgtcatg

SEQ ID NO: 141040 - DNA, 25 bp, SARS Virus
tacaggtaggtcgtcaccgtcatgg

SEQ ID NO: 141041 - DNA, 25 bp, SARS Virus
acaggtaggtcggcaccgtcatggt

SEQ ID NO: 141042 - DNA, 25 bp, SARS Virus
caggtaggtcgtgaccgtcatggtg

SEQ ID NO: 141043 - DNA, 25 bp, SARS Virus
aggtaggtcgtcgccgtcatggtga

SEQ ID NO: 141044 - DNA, 25 bp, SARS Virus
ggtaggtcgtcagcgtcatggtgat

SEQ ID NO: 141045 - DNA, 25 bp, SARS Virus
gtaggtcgtcacggtcatggtgatt

SEQ ID NO: 141046 - DNA, 25 bp, SARS Virus
taggtcgtcaccgtcatggtgattg

SEQ ID NO: 141047 - DNA, 25 bp, SARS Virus
aggtcgtcaccggcatggtgattga

SEQ ID NO: 141048 - DNA, 25 bp, SARS Virus
ggtcgtcaccgtgatggtgattgat

SEQ ID NO: 141049 - DNA, 25 bp, SARS Virus
gtcgtcaccgtcgtggtgattgatc

SEQ ID NO: 141050 - DNA, 25 bp, SARS Virus
tcgtcaccgtcagggtgattgatct

SEQ ID NO: 141051 - DNA, 25 bp, SARS Virus
cgtcaccgtcatggtgattgatctc

SEQ ID NO: 141052 - DNA, 25 bp, SARS Virus
gtcaccgtcatggtgattgatctcg

SEQ ID NO: 141053 - DNA, 25 bp, SARS Virus
tcaccgtcatggggattgatctcgt

SEQ ID NO: 141054 - DNA, 25 bp, SARS Virus
caccgtcatggtgattgatctcgtc

SEQ ID NO: 141055 - DNA, 25 bp, SARS Virus
accgtcatggtggttgatctcgtcg

SEQ ID NO: 141056 - DNA, 25 bp, SARS Virus
ccgtcatggtgagtgatctcgtcgt

SEQ ID NO: 141057 - DNA, 25 bp, SARS Virus
cgtcatggtgatggatctcgtcgtc

SEQ ID NO: 141058 - DNA, 25 bp, SARS Virus
gtcatggtgattgatctcgtcgtca

SEQ ID NO: 141059 - DNA, 25 bp, SARS Virus
tcatggtgattggtctcgtcgtcac

SEQ ID NO: 141060 - DNA, 25 bp, SARS Virus
catggtgattgagctcgtcgtcaca

SEQ ID NO: 141061 - DNA, 25 bp, SARS Virus
atggtgattgatgtcgtcgtcacat

SEQ ID NO: 141062 - DNA, 25 bp, SARS Virus
tggtgattgatcgcgtcgtcacatc

SEQ ID NO: 141063 - DNA, 25 bp, SARS Virus
ggtgattgatctggtcgtcacatcc

SEQ ID NO: 141064 - DNA, 25 bp, SARS Virus
gtgattgatctcgtcgtcacatccg

SEQ ID NO: 141065 - DNA, 25 bp, SARS Virus
ttcagttgagaataactaacaggtt

SEQ ID NO: 141066 - DNA, 25 bp, SARS Virus
tcagttgagaaatactaacaggttc

SEQ ID NO: 141067 - DNA, 25 bp, SARS Virus
cagttgagaaaatctaacaggttct

SEQ ID NO: 141068 - DNA, 25 bp, SARS Virus
agttgagaaaaattaacaggttctt

SEQ ID NO: 141069 - DNA, 25 bp, SARS Virus
gttgagaaaaactaacaggttcttg

SEQ ID NO: 141070 - DNA, 25 bp, SARS Virus
ttgagaaaaacttacaggttcttgt

SEQ ID NO: 141071 - DNA, 25 bp, SARS Virus
tgagaaaaactatcaggttcttgtg

SEQ ID NO: 141072 - DNA, 25 bp, SARS Virus
gagaaaaactaataggttcttgtgt

SEQ ID NO: 141073 - DNA, 25 bp, SARS Virus
agaaaaactaactggttcttgtgtg

SEQ ID NO: 141074 - DNA, 25 bp, SARS Virus
gaaaaactaacatgttcttgtgtga

SEQ ID NO: 141075 - DNA, 25 bp, SARS Virus
aaaaactaacagtttcttgtgtgag

SEQ ID NO: 141076 - DNA, 25 bp, SARS Virus
aaaactaacaggttcttgtgtgagt

SEQ ID NO: 141077 - DNA, 25 bp, SARS Virus
aaactaacaggttcttgtgtgagtc

SEQ ID NO: 141078 - DNA, 25 bp, SARS Virus
aactaacaggtttttgtgtgagtct

SEQ ID NO: 141079 - DNA, 25 bp, SARS Virus
actaacaggttcttgtgtgagtctg

SEQ ID NO: 141080 - DNA, 25 bp, SARS Virus
ctaacaggttcttgtgtgagtctgt

SEQ ID NO: 141081 - DNA, 25 bp, SARS Virus
taacaggttcttttgtgagtctgta

SEQ ID NO: 141082 - DNA, 25 bp, SARS Virus
aacaggttcttgtgtgagtctgtaa

SEQ ID NO: 141083 - DNA, 25 bp, SARS Virus
acaggttcttgtttgagtctgtaaa

SEQ ID NO: 141084 - DNA, 25 bp, SARS Virus
caggttcttgtgtgagtctgtaaaa

SEQ ID NO: 141085 - DNA, 25 bp, SARS Virus
aggttcttgtgttagtctgtaaaat

SEQ ID NO: 141086 - DNA, 25 bp, SARS Virus
ggttcttgtgtgtgtctgtaaaatc

SEQ ID NO: 141087 - DNA, 25 bp, SARS Virus
gttcttgtgtgattctgtaaaatca

SEQ ID NO: 141088 - DNA, 25 bp, SARS Virus
ttcttgtgtgagtctgtaaaatcat

SEQ ID NO: 141089 - DNA, 25 bp, SARS Virus
tcttgtgtgagtttgtaaaatcatc

SEQ ID NO: 141090 - DNA, 25 bp, SARS Virus
cttgtgtgagtctgtaaaatcatcg

SEQ ID NO: 141091 - DNA, 25 bp, SARS Virus
ttgtgtgagtctttaaaatcatcgt

SEQ ID NO: 141092 - DNA, 25 bp, SARS Virus
tgtgtgagtctgtaaaatcatcgtc

SEQ ID NO: 141093 - DNA, 25 bp, SARS Virus
gtgtgagtctgttaaatcatcgtcg

SEQ ID NO: 141094 - DNA, 25 bp, SARS Virus
tgtgagtctgtataatcatcgtcgt

SEQ ID NO: 141095 - DNA, 25 bp, SARS Virus
gtgagtctgtaatatcatcgtcgtt

SEQ ID NO: 141096 - DNA, 25 bp, SARS Virus
tgagtctgtaaattcatcgtcgttc

SEQ ID NO: 141097 - DNA, 25 bp, SARS Virus
gagtctgtaaaatcatcgtcgttct

SEQ ID NO: 141098 - DNA, 25 bp, SARS Virus
agtctgtaaaattatcgtcgttcta

SEQ ID NO: 141099 - DNA, 25 bp, SARS Virus
gtctgtaaaatcttcgtcgttctaa

SEQ ID NO: 141100 - DNA, 25 bp, SARS Virus
tctgtaaaatcatcgtcgttctaat

SEQ ID NO: 141101 - DNA, 25 bp, SARS Virus
ctgtaaaatcattgtcgttctaatc

SEQ ID NO: 141102 - DNA, 25 bp, SARS Virus
tgtaaaatcatcttcgttctaatcg

SEQ ID NO: 141103 - DNA, 25 bp, SARS Virus
gtaaaatcatcgtcgttctaatcgt

SEQ ID NO: 141104 - DNA, 25 bp, SARS Virus
taaaatcatcgttgttctaatcgtc

SEQ ID NO: 141105 - DNA, 25 bp, SARS Virus
aaaatcatcgtctttctaatcgtct

SEQ ID NO: 141106 - DNA, 25 bp, SARS Virus
aaatcatcgtcgttctaatcgtctt

SEQ ID NO: 141107 - DNA, 25 bp, SARS Virus
aatcatcgtcgttctaatcgtcttc

SEQ ID NO: 141108 - DNA, 25 bp, SARS Virus
atcatcgtcgttttaatcgtcttcg

SEQ ID NO: 141109 - DNA, 25 bp, SARS Virus
tcatcgtcgttctaatcgtcttcgg

SEQ ID NO: 141110 - DNA, 25 bp, SARS Virus
catcgtcgttcttatcgtcttcggg

SEQ ID NO: 141111 - DNA, 25 bp, SARS Virus
atcgtcgttctattcgtcttcggga

SEQ ID NO: 141112 - DNA, 25 bp, SARS Virus
tcgtcgttctaatcgtcttcgggac

SEQ ID NO: 141113 - DNA, 25 bp, SARS Virus
cgtcgttctaattgtcttcgggact

SEQ ID NO: 141114 - DNA, 25 bp, SARS Virus
gtcgttctaatcttcttcgggacta

SEQ ID NO: 141115 - DNA, 25 bp, SARS Virus
tcgttctaatcgtcttcgggactaa

SEQ ID NO: 141116 - DNA, 25 bp, SARS Virus
cgttctaatcgttttcgggactaaa

SEQ ID NO: 141117 - DNA, 25 bp, SARS Virus
gttctaatcgtcttcgggactaaag

SEQ ID NO: 141118 - DNA, 25 bp, SARS Virus
ttctaatcgtcttcgggactaaagt

SEQ ID NO: 141119 - DNA, 25 bp, SARS Virus
tctaatcgtctttgggactaaagtc

SEQ ID NO: 141120 - DNA, 25 bp, SARS Virus
ctaatcgtcttctggactaaagtcg

SEQ ID NO: 141121 - DNA, 25 bp, SARS Virus
taatcgtcttcgtgactaaagtcgt

SEQ ID NO: 141122 - DNA, 25 bp, SARS Virus
aatcgtcttcggtactaaagtcgtc

SEQ ID NO: 141123 - DNA, 25 bp, SARS Virus
atcgtcttcgggtctaaagtcgtcg

SEQ ID NO: 141124 - DNA, 25 bp, SARS Virus
tcgtcttcgggattaaagtcgtcgg

SEQ ID NO: 141125 - DNA, 25 bp, SARS Virus
cgtcttcgggactaaagtcgtcggg

SEQ ID NO: 141126 - DNA, 25 bp, SARS Virus
gtcttcgggacttaagtcgtcggga

SEQ ID NO: 141127 - DNA, 25 bp, SARS Virus
tcttcgggactatagtcgtcgggac

SEQ ID NO: 141128 - DNA, 25 bp, SARS Virus
cttcgggactaatgtcgtcgggact

SEQ ID NO: 141129 - DNA, 25 bp, SARS Virus
ttcgggactaaattcgtcgggacta

SEQ ID NO: 141130 - DNA, 25 bp, SARS Virus
tcgggactaaagtcgtcgggactaa

SEQ ID NO: 141131 - DNA, 25 bp, SARS Virus
cgggactaaagttgtcgggactaat

SEQ ID NO: 141132 - DNA, 25 bp, SARS Virus
gggactaaagtcttcgggactaatc

SEQ ID NO: 141133 - DNA, 25 bp, SARS Virus
ggactaaagtcgtcgggactaatca

SEQ ID NO: 141134 - DNA, 25 bp, SARS Virus
gactaaagtcgttgggactaatcaa

SEQ ID NO: 141135 - DNA, 25 bp, SARS Virus
actaaagtcgtctggactaatcaac

SEQ ID NO: 141136 - DNA, 25 bp, SARS Virus
ctaaagtcgtcgtgactaatcaaca

SEQ ID NO: 141137 - DNA, 25 bp, SARS Virus
taaagtcgtcggtactaatcaacaa

SEQ ID NO: 141138 - DNA, 25 bp, SARS Virus
aaagtcgtcgggtctaatcaacaac

SEQ ID NO: 141139 - DNA, 25 bp, SARS Virus
aagtcgtcgggattaatcaacaaca

SEQ ID NO: 141140 - DNA, 25 bp, SARS Virus
agtcgtcgggactaatcaacaacac

SEQ ID NO: 141141 - DNA, 25 bp, SARS Virus
gtcgtcgggacttatcaacaacaca

SEQ ID NO: 141142 - DNA, 25 bp, SARS Virus
tcgtcgggactattcaacaacacaa

SEQ ID NO: 141143 - DNA, 25 bp, SARS Virus
cgtcgggactaatcaacaacacaat

SEQ ID NO: 141144 - DNA, 25 bp, SARS Virus
gtcgggactaattaacaacacaatg

SEQ ID NO: 141145 - DNA, 25 bp, SARS Virus
tcgggactaatctacaacacaatgt

SEQ ID NO: 141146 - DNA, 25 bp, SARS Virus
cgggactaatcatcaacacaatgta

SEQ ID NO: 141147 - DNA, 25 bp, SARS Virus
gggactaatcaataacacaatgtat

SEQ ID NO: 141148 - DNA, 25 bp, SARS Virus
ggactaatcaactacacaatgtatc

SEQ ID NO: 141149 - DNA, 25 bp, SARS Virus
gactaatcaacatcacaatgtatcc

SEQ ID NO: 141150 - DNA, 25 bp, SARS Virus
actaatcaacaatacaatgtatcca

SEQ ID NO: 141151 - DNA, 25 bp, SARS Virus
ctaatcaacaactcaatgtatccaa

SEQ ID NO: 141152 - DNA, 25 bp, SARS Virus
taatcaacaacataatgtatccaaa

SEQ ID NO: 141153 - DNA, 25 bp, SARS Virus
aatcaacaacactatgtatccaaac

SEQ ID NO: 141154 - DNA, 25 bp, SARS Virus
atcaacaacacattgtatccaaact

SEQ ID NO: 141155 - DNA, 25 bp, SARS Virus
tcaacaacacaatgtatccaaactt

SEQ ID NO: 141156 - DNA, 25 bp, SARS Virus
caacaacacaatttatccaaacttc

SEQ ID NO: 141157 - DNA, 25 bp, SARS Virus
aacaacacaatgtatccaaacttcc

SEQ ID NO: 141158 - DNA, 25 bp, SARS Virus
acaacacaatgtttccaaacttccg

SEQ ID NO: 141159 - DNA, 25 bp, SARS Virus
caacacaatgtatccaaacttccga

SEQ ID NO: 141160 - DNA, 25 bp, SARS Virus
aacacaatgtattcaaacttccgaa

SEQ ID NO: 141161 - DNA, 25 bp, SARS Virus
acacaatgtatctaaacttccgaaa

SEQ ID NO: 141162 - DNA, 25 bp, SARS Virus
cacaatgtatcctaacttccgaaac

SEQ ID NO: 141163 - DNA, 25 bp, SARS Virus
acaatgtatccatacttccgaaact

SEQ ID NO: 141164 - DNA, 25 bp, SARS Virus
caatgtatccaatcttccgaaactt

SEQ ID NO: 141165 - DNA, 25 bp, SARS Virus
aatgtatccaaatttccgaaacttc

SEQ ID NO: 141166 - DNA, 25 bp, SARS Virus
atgtatccaaacttccgaaacttca

SEQ ID NO: 141167 - DNA, 25 bp, SARS Virus
tgtatccaaacttccgaaacttcag

SEQ ID NO: 141168 - DNA, 25 bp, SARS Virus
gtatccaaactttcgaaacttcaga

SEQ ID NO: 141169 - DNA, 25 bp, SARS Virus
tatccaaacttctgaaacttcagac

SEQ ID NO: 141170 - DNA, 25 bp, SARS Virus
atccaaacttcctaaacttcagacg

SEQ ID NO: 141171 - DNA, 25 bp, SARS Virus
tccaaacttccgtaacttcagacgg

SEQ ID NO: 141172 - DNA, 25 bp, SARS Virus
ccaaacttccgatacttcagacgga

SEQ ID NO: 141173 - DNA, 25 bp, SARS Virus
caaacttccgaatcttcagacggac

SEQ ID NO: 141174 - DNA, 25 bp, SARS Virus
aaacttccgaaatttcagacggaca

SEQ ID NO: 141175 - DNA, 25 bp, SARS Virus
aacttccgaaacttcagacggacat

SEQ ID NO: 141176 - DNA, 25 bp, SARS Virus
acttccgaaacttcagacggacatt

SEQ ID NO: 141177 - DNA, 25 bp, SARS Virus
cttccgaaactttagacggacatta

SEQ ID NO: 141178 - DNA, 25 bp, SARS Virus
ttccgaaacttctgacggacattaa

SEQ ID NO: 141179 - DNA, 25 bp, SARS Virus
tccgaaacttcatacggacattaat

SEQ ID NO: 141180 - DNA, 25 bp, SARS Virus
ccgaaacttcagtcggacattaatt

SEQ ID NO: 141181 - DNA, 25 bp, SARS Virus
cgaaacttcagatggacattaattg

SEQ ID NO: 141182 - DNA, 25 bp, SARS Virus
gaaacttcagactgacattaattgg

SEQ ID NO: 141183 - DNA, 25 bp, SARS Virus
aaacttcagacgtacattaattgga

SEQ ID NO: 141184 - DNA, 25 bp, SARS Virus
aacttcagacggtcattaattggac

SEQ ID NO: 141185 - DNA, 25 bp, SARS Virus
acttcagacggatattaattggaca

SEQ ID NO: 141186 - DNA, 25 bp, SARS Virus
cttcagacggactttaattggacag

SEQ ID NO: 141187 - DNA, 25 bp, SARS Virus
ttcagacggacattaattggacagt

SEQ ID NO: 141188 - DNA, 25 bp, SARS Virus
tcagacggacattaattggacagtt

SEQ ID NO: 141189 - DNA, 25 bp, SARS Virus
cagacggacatttattggacagtta

SEQ ID NO: 141190 - DNA, 25 bp, SARS Virus
agacggacattatttggacagttaa

SEQ ID NO: 141191 - DNA, 25 bp, SARS Virus
gacggacattaattggacagttaaa

SEQ ID NO: 141192 - DNA, 25 bp, SARS Virus
acggacattaattggacagttaaac

SEQ ID NO: 141193 - DNA, 25 bp, SARS Virus
cggacattaatttgacagttaaaca

SEQ ID NO: 141194 - DNA, 25 bp, SARS Virus
ggacattaattgtacagttaaacat

SEQ ID NO: 141195 - DNA, 25 bp, SARS Virus
gacattaattggtcagttaaacatg

SEQ ID NO: 141196 - DNA, 25 bp, SARS Virus
acattaattggatagttaaacatgg

SEQ ID NO: 141197 - DNA, 25 bp, SARS Virus
cattaattggactgttaaacatgga

SEQ ID NO: 141198 - DNA, 25 bp, SARS Virus
attaattggacatttaaacatggag

SEQ ID NO: 141199 - DNA, 25 bp, SARS Virus
ttaattggacagttaaacatggagg

SEQ ID NO: 141200 - DNA, 25 bp, SARS Virus
taattggacagttaaacatggaggc

SEQ ID NO: 141201 - DNA, 25 bp, SARS Virus
aattggacagtttaacatggaggcg

SEQ ID NO: 141202 - DNA, 25 bp, SARS Virus
attggacagttatacatggaggcgg

SEQ ID NO: 141203 - DNA, 25 bp, SARS Virus
ttggacagttaatcatggaggcgga

SEQ ID NO: 141204 - DNA, 25 bp, SARS Virus
tggacagttaaatatggaggcggag

SEQ ID NO: 141205 - DNA, 25 bp, SARS Virus
ggacagttaaacttggaggcggagc

SEQ ID NO: 141206 - DNA, 25 bp, SARS Virus
gacagttaaacatggaggcggagct

SEQ ID NO: 141207 - DNA, 25 bp, SARS Virus
acagttaaacattgaggcggagctg

SEQ ID NO: 141208 - DNA, 25 bp, SARS Virus
cagttaaacatgtaggcggagctga

SEQ ID NO: 141209 - DNA, 25 bp, SARS Virus
agttaaacatggtggcggagctgaa

SEQ ID NO: 141210 - DNA, 25 bp, SARS Virus
gttaaacatggatgcggagctgaaa

SEQ ID NO: 141211 - DNA, 25 bp, SARS Virus
ttaaacatggagtcggagctgaaat

SEQ ID NO: 141212 - DNA, 25 bp, SARS Virus
taaacatggaggtggagctgaaata

SEQ ID NO: 141213 - DNA, 25 bp, SARS Virus
aaacatggaggctgagctgaaatag

SEQ ID NO: 141214 - DNA, 25 bp, SARS Virus
aacatggaggcgtagctgaaatagt

SEQ ID NO: 141215 - DNA, 25 bp, SARS Virus
acatggaggcggtgctgaaatagtt

SEQ ID NO: 141216 - DNA, 25 bp, SARS Virus
catggaggcggatctgaaatagttc

SEQ ID NO: 141217 - DNA, 25 bp, SARS Virus
atggaggcggagttgaaatagttca

SEQ ID NO: 141218 - DNA, 25 bp, SARS Virus
tggaggcggagctgaaatagttcag

SEQ ID NO: 141219 - DNA, 25 bp, SARS Virus
ggaggcggagcttaaatagttcagc

SEQ ID NO: 141220 - DNA, 25 bp, SARS Virus
gaggcggagctgtaatagttcagcg

SEQ ID NO: 141221 - DNA, 25 bp, SARS Virus
aggcggagctgatatagttcagcgc

SEQ ID NO: 141222 - DNA, 25 bp, SARS Virus
ggcggagctgaattagttcagcgct

SEQ ID NO: 141223 - DNA, 25 bp, SARS Virus
gcggagctgaaatagttcagcgctt

SEQ ID NO: 141224 - DNA, 25 bp, SARS Virus
cggagctgaaattgttcagcgcttt

SEQ ID NO: 141225 - DNA, 25 bp, SARS Virus
ggagctgaaatatttcagcgctttc

SEQ ID NO: 141226 - DNA, 25 bp, SARS Virus
gagctgaaatagttcagcgctttcc

SEQ ID NO: 141227 - DNA, 25 bp, SARS Virus
agctgaaatagttcagcgctttcct

SEQ ID NO: 141228 - DNA, 25 bp, SARS Virus
gctgaaatagtttagcgctttccta

SEQ ID NO: 141229 - DNA, 25 bp, SARS Virus
ctgaaatagttctgcgctttcctat

SEQ ID NO: 141230 - DNA, 25 bp, SARS Virus
tgaaatagttcatcgctttcctata

SEQ ID NO: 141231 - DNA, 25 bp, SARS Virus
gaaatagttcagtgctttcctatag

SEQ ID NO: 141232 - DNA, 25 bp, SARS Virus
aaatagttcagctctttcctatagt

SEQ ID NO: 141233 - DNA, 25 bp, SARS Virus
aatagttcagcgttttcctatagta

SEQ ID NO: 141234 - DNA, 25 bp, SARS Virus
atagttcagcgctttcctatagtaa

SEQ ID NO: 141235 - DNA, 25 bp, SARS Virus
tagttcagcgctttcctatagtaaa

SEQ ID NO: 141236 - DNA, 25 bp, SARS Virus
agttcagcgctttcctatagtaaat

SEQ ID NO: 141237 - DNA, 25 bp, SARS Virus
gttcagcgcttttctatagtaaatc

SEQ ID NO: 141238 - DNA, 25 bp, SARS Virus
ttcagcgctttcttatagtaaatcg

SEQ ID NO: 141239 - DNA, 25 bp, SARS Virus
tcagcgctttcctatagtaaatcgt

SEQ ID NO: 141240 - DNA, 25 bp, SARS Virus
cagcgctttcctttagtaaatcgtg

SEQ ID NO: 141241 - DNA, 25 bp, SARS Virus
agcgctttcctatagtaaatcgtgt

SEQ ID NO: 141242 - DNA, 25 bp, SARS Virus
gcgctttcctattgtaaatcgtgtg

SEQ ID NO: 141243 - DNA, 25 bp, SARS Virus
cgctttcctatattaaatcgtgtga

SEQ ID NO: 141244 - DNA, 25 bp, SARS Virus
gctttcctatagtaaatcgtgtgaa

SEQ ID NO: 141245 - DNA, 25 bp, SARS Virus
ctttcctatagttaatcgtgtgaac

SEQ ID NO: 141246 - DNA, 25 bp, SARS Virus
tttcctatagtatatcgtgtgaact

SEQ ID NO: 141247 - DNA, 25 bp, SARS Virus
ttcctatagtaattcgtgtgaactt

SEQ ID NO: 141248 - DNA, 25 bp, SARS Virus
tcctatagtaaatcgtgtgaacttt

SEQ ID NO: 141249 - DNA, 25 bp, SARS Virus
cctatagtaaattgtgtgaacttta

SEQ ID NO: 141250 - DNA, 25 bp, SARS Virus
ctatagtaaatcttgtgaactttaa

SEQ ID NO: 141251 - DNA, 25 bp, SARS Virus
tatagtaaatcgtgtgaactttaac

SEQ ID NO: 141252 - DNA, 25 bp, SARS Virus
atagtaaatcgtttgaactttaacg

SEQ ID NO: 141253 - DNA, 25 bp, SARS Virus
tagtaaatcgtgtgaactttaacgt

SEQ ID NO: 141254 - DNA, 25 bp, SARS Virus
agtaaatcgtgttaactttaacgtg

SEQ ID NO: 141255 - DNA, 25 bp, SARS Virus
gtaaatcgtgtgtactttaacgtgg

SEQ ID NO: 141256 - DNA, 25 bp, SARS Virus
taaatcgtgtgatctttaacgtggt

SEQ ID NO: 141257 - DNA, 25 bp, SARS Virus
aaatcgtgtgaattttaacgtggtt

SEQ ID NO: 141258 - DNA, 25 bp, SARS Virus
aatcgtgtgaactttaacgtggttt

SEQ ID NO: 141259 - DNA, 25 bp, SARS Virus
atcgtgtgaactttaacgtggtttt

SEQ ID NO: 141260 - DNA, 25 bp, SARS Virus
tcgtgtgaactttaacgtggtttta

SEQ ID NO: 141261 - DNA, 25 bp, SARS Virus
cgtgtgaacttttacgtggttttaa

SEQ ID NO: 141262 - DNA, 25 bp, SARS Virus
gtgtgaactttatcgtggttttaat

SEQ ID NO: 141263 - DNA, 25 bp, SARS Virus
tgtgaactttaatgtggttttaatc

SEQ ID NO: 141264 - DNA, 25 bp, SARS Virus
gtgaactttaacttggttttaatct

SEQ ID NO: 141265 - DNA, 25 bp, SARS Virus
tgaactttaacgtggttttaatctc

SEQ ID NO: 141266 - DNA, 25 bp, SARS Virus
gaactttaacgttgttttaatctcg

SEQ ID NO: 141267 - DNA, 25 bp, SARS Virus
aactttaacgtgtttttaatctcga

SEQ ID NO: 141268 - DNA, 25 bp, SARS Virus
actttaacgtggttttaatctcgat

SEQ ID NO: 141269 - DNA, 25 bp, SARS Virus
ctttaacgtggttttaatctcgatt

SEQ ID NO: 141270 - DNA, 25 bp, SARS Virus
tttaacgtggttttaatctcgattc

SEQ ID NO: 141271 - DNA, 25 bp, SARS Virus
ttaacgtggttttaatctcgattca

SEQ ID NO: 141272 - DNA, 25 bp, SARS Virus
taacgtggtttttatctcgattcaa

SEQ ID NO: 141273 - DNA, 25 bp, SARS Virus
aacgtggttttattctcgattcaac

SEQ ID NO: 141274 - DNA, 25 bp, SARS Virus
acgtggttttaatctcgattcaaca

SEQ ID NO: 141275 - DNA, 25 bp, SARS Virus
cgtggttttaatttcgattcaacaa

SEQ ID NO: 141276 - DNA, 25 bp, SARS Virus
gtggttttaatctcgattcaacaaa

SEQ ID NO: 141277 - DNA, 25 bp, SARS Virus
tggttttaatcttgattcaacaaat

SEQ ID NO: 141278 - DNA, 25 bp, SARS Virus
ggttttaatctctattcaacaaatt

SEQ ID NO: 141279 - DNA, 25 bp, SARS Virus
gttttaatctcgtttcaacaaattg

SEQ ID NO: 141280 - DNA, 25 bp, SARS Virus
ttttaatctcgattcaacaaattgt

SEQ ID NO: 141281 - DNA, 25 bp, SARS Virus
tttaatctcgattcaacaaattgtt

SEQ ID NO: 141282 - DNA, 25 bp, SARS Virus
ttaatctcgatttaacaaattgttc

SEQ ID NO: 141283 - DNA, 25 bp, SARS Virus
taatctcgattctacaaattgttca

SEQ ID NO: 141284 - DNA, 25 bp, SARS Virus
aatctcgattcatcaaattgttcac

SEQ ID NO: 141285 - DNA, 25 bp, SARS Virus
atctcgattcaataaattgttcaca

SEQ ID NO: 141286 - DNA, 25 bp, SARS Virus
tctcgattcaactaattgttcacac

SEQ ID NO: 141287 - DNA, 25 bp, SARS Virus
ctcgattcaacatattgttcacaca

SEQ ID NO: 141288 - DNA, 25 bp, SARS Virus
tcgattcaacaatttgttcacacaa

SEQ ID NO: 141289 - DNA, 25 bp, SARS Virus
cgattcaacaaattgttcacacaaa

SEQ ID NO: 141290 - DNA, 25 bp, SARS Virus
gattcaacaaattgttcacacaaat

SEQ ID NO: 141291 - DNA, 25 bp, SARS Virus
attcaacaaatttttcacacaaatt

SEQ ID NO: 141292 - DNA, 25 bp, SARS Virus
ttcaacaaattgttcacacaaatta

SEQ ID NO: 141293 - DNA, 25 bp, SARS Virus
tcaacaaattgttcacacaaattac

SEQ ID NO: 141294 - DNA, 25 bp, SARS Virus
caacaaattgtttacacaaattacg

SEQ ID NO: 141295 - DNA, 25 bp, SARS Virus
aacaaattgttctcacaaattacga

SEQ ID NO: 141296 - DNA, 25 bp, SARS Virus
acaaattgttcatacaaattacgaa

SEQ ID NO: 141297 - DNA, 25 bp, SARS Virus
caaattgttcactcaaattacgaac

SEQ ID NO: 141298 - DNA, 25 bp, SARS Virus
aaattgttcacataaattacgaact

SEQ ID NO: 141299 - DNA, 25 bp, SARS Virus
aattgttcacactaattacgaactc

SEQ ID NO: 141300 - DNA, 25 bp, SARS Virus
attgttcacacatattacgaactcg

SEQ ID NO: 141301 - DNA, 25 bp, SARS Virus
ttgttcacacaatttacgaactcgt

SEQ ID NO: 141302 - DNA, 25 bp, SARS Virus
tgttcacacaaattacgaactcgta

SEQ ID NO: 141303 - DNA, 25 bp, SARS Virus
gttcacacaaattacgaactcgtaa

SEQ ID NO: 141304 - DNA, 25 bp, SARS Virus
ttcacacaaatttcgaactcgtaag

SEQ ID NO: 141305 - DNA, 25 bp, SARS Virus
tcacacaaattatgaactcgtaaga

SEQ ID NO: 141306 - DNA, 25 bp, SARS Virus
cacacaaattactaactcgtaagac

SEQ ID NO: 141307 - DNA, 25 bp, SARS Virus
acacaaattacgtactcgtaagacc

SEQ ID NO: 141308 - DNA, 25 bp, SARS Virus
cacaaattacgatctcgtaagacca

SEQ ID NO: 141309 - DNA, 25 bp, SARS Virus
acaaattacgaattcgtaagaccaa

SEQ ID NO: 141310 - DNA, 25 bp, SARS Virus
caaattacgaactcgtaagaccaat

SEQ ID NO: 141311 - DNA, 25 bp, SARS Virus
aaattacgaacttgtaagaccaatt

SEQ ID NO: 141312 - DNA, 25 bp, SARS Virus
aattacgaactcttaagaccaattg

SEQ ID NO: 141313 - DNA, 25 bp, SARS Virus
attacgaactcgtaagaccaattgt

SEQ ID NO: 141314 - DNA, 25 bp, SARS Virus
ttacgaactcgttagaccaattgtt

SEQ ID NO: 141315 - DNA, 25 bp, SARS Virus
tacgaactcgtatgaccaattgttg

SEQ ID NO: 141316 - DNA, 25 bp, SARS Virus
acgaactcgtaataccaattgttgc

SEQ ID NO: 141317 - DNA, 25 bp, SARS Virus
cgaactcgtaagtccaattgttgca

SEQ ID NO: 141318 - DNA, 25 bp, SARS Virus
gaactcgtaagatcaattgttgcag

SEQ ID NO: 141319 - DNA, 25 bp, SARS Virus
aactcgtaagactaattgttgcaga

SEQ ID NO: 141320 - DNA, 25 bp, SARS Virus
actcgtaagacctattgttgcagaa

SEQ ID NO: 141321 - DNA, 25 bp, SARS Virus
ctcgtaagaccatttgttgcagaac

SEQ ID NO: 141322 - DNA, 25 bp, SARS Virus
tcgtaagaccaattgttgcagaacg

SEQ ID NO: 141323 - DNA, 25 bp, SARS Virus
cgtaagaccaattgttgcagaacgt

SEQ ID NO: 141324 - DNA, 25 bp, SARS Virus
gtaagaccaatttttgcagaacgtc

SEQ ID NO: 141325 - DNA, 25 bp, SARS Virus
taagaccaattgttgcagaacgtcg

SEQ ID NO: 141326 - DNA, 25 bp, SARS Virus
aagaccaattgttgcagaacgtcga

SEQ ID NO: 141327 - DNA, 25 bp, SARS Virus
agaccaattgtttcagaacgtcgaa

SEQ ID NO: 141328 - DNA, 25 bp, SARS Virus
gaccaattgttgtagaacgtcgaac

SEQ ID NO: 141329 - DNA, 25 bp, SARS Virus
accaattgttgctgaacgtcgaacg

SEQ ID NO: 141330 - DNA, 25 bp, SARS Virus
ccaattgttgcataacgtcgaacgg

SEQ ID NO: 141331 - DNA, 25 bp, SARS Virus
caattgttgcagtacgtcgaacggg

SEQ ID NO: 141332 - DNA, 25 bp, SARS Virus
aattgttgcagatcgtcgaacgggt

SEQ ID NO: 141333 - DNA, 25 bp, SARS Virus
attgttgcagaatgtcgaacgggtt

SEQ ID NO: 141334 - DNA, 25 bp, SARS Virus
ttgttgcagaacttcgaacgggtta

SEQ ID NO: 141335 - DNA, 25 bp, SARS Virus
tgttgcagaacgtcgaacgggttac

SEQ ID NO: 141336 - DNA, 25 bp, SARS Virus
gttgcagaacgttgaacgggttacg

SEQ ID NO: 141337 - DNA, 25 bp, SARS Virus
ttgcagaacgtctaacgggttacgt

SEQ ID NO: 141338 - DNA, 25 bp, SARS Virus
tgcagaacgtcgtacgggttacgtc

SEQ ID NO: 141339 - DNA, 25 bp, SARS Virus
gcagaacgtcgatcgggttacgtca

SEQ ID NO: 141340 - DNA, 25 bp, SARS Virus
cagaacgtcgaatgggttacgtcaa

SEQ ID NO: 141341 - DNA, 25 bp, SARS Virus
agaacgtcgaactggttacgtcaac

SEQ ID NO: 141342 - DNA, 25 bp, SARS Virus
gaacgtcgaacgtgttacgtcaact

SEQ ID NO: 141343 - DNA, 25 bp, SARS Virus
aacgtcgaacggtttacgtcaacta

SEQ ID NO: 141344 - DNA, 25 bp, SARS Virus
acgtcgaacgggttacgtcaactac

SEQ ID NO: 141345 - DNA, 25 bp, SARS Virus
cgtcgaacgggttacgtcaactaca

SEQ ID NO: 141346 - DNA, 25 bp, SARS Virus
gtcgaacgggtttcgtcaactacaa

SEQ ID NO: 141347 - DNA, 25 bp, SARS Virus
tcgaacgggttatgtcaactacaac

SEQ ID NO: 141348 - DNA, 25 bp, SARS Virus
cgaacgggttacttcaactacaaca

SEQ ID NO: 141349 - DNA, 25 bp, SARS Virus
gaacgggttacgtcaactacaacaa

SEQ ID NO: 141350 - DNA, 25 bp, SARS Virus
aacgggttacgttaactacaacaac

SEQ ID NO: 141351 - DNA, 25 bp, SARS Virus
acgggttacgtctactacaacaaca

SEQ ID NO: 141352 - DNA, 25 bp, SARS Virus
cgggttacgtcatctacaacaacat

SEQ ID NO: 141353 - DNA, 25 bp, SARS Virus
gggttacgtcaattacaacaacatt

SEQ ID NO: 141354 - DNA, 25 bp, SARS Virus
ggttacgtcaactacaacaacattc

SEQ ID NO: 141355 - DNA, 25 bp, SARS Virus
gttacgtcaacttcaacaacattca

SEQ ID NO: 141356 - DNA, 25 bp, SARS Virus
ttacgtcaactataacaacattcac

SEQ ID NO: 141357 - DNA, 25 bp, SARS Virus
tacgtcaactactacaacattcact

SEQ ID NO: 141358 - DNA, 25 bp, SARS Virus
acgtcaactacatcaacattcacta

SEQ ID NO: 141359 - DNA, 25 bp, SARS Virus
cgtcaactacaataacattcactaa

SEQ ID NO: 141360 - DNA, 25 bp, SARS Virus
gtcaactacaactacattcactaag

SEQ ID NO: 141361 - DNA, 25 bp, SARS Virus
tcaactacaacatcattcactaaga

SEQ ID NO: 141362 - DNA, 25 bp, SARS Virus
caactacaacaatattcactaagaa

SEQ ID NO: 141363 - DNA, 25 bp, SARS Virus
aactacaacaactttcactaagaac

SEQ ID NO: 141364 - DNA, 25 bp, SARS Virus
actacaacaacattcactaagaact

SEQ ID NO: 141365 - DNA, 25 bp, SARS Virus
ctacaacaacattcactaagaactt

SEQ ID NO: 141366 - DNA, 25 bp, SARS Virus
tacaacaacatttactaagaactta

SEQ ID NO: 141367 - DNA, 25 bp, SARS Virus
acaacaacattctctaagaacttaa

SEQ ID NO: 141368 - DNA, 25 bp, SARS Virus
caacaacattcattaagaacttaaa

SEQ ID NO: 141369 - DNA, 25 bp, SARS Virus
aacaacattcactaagaacttaaac

SEQ ID NO: 141370 - DNA, 25 bp, SARS Virus
acaacattcacttagaacttaaact

SEQ ID NO: 141371 - DNA, 25 bp, SARS Virus
caacattcactatgaacttaaactg

SEQ ID NO: 141372 - DNA, 25 bp, SARS Virus
aacattcactaataacttaaactga

SEQ ID NO: 141373 - DNA, 25 bp, SARS Virus
acattcactaagtacttaaactgat

SEQ ID NO: 141374 - DNA, 25 bp, SARS Virus
cattcactaagatcttaaactgatt

SEQ ID NO: 141375 - DNA, 25 bp, SARS Virus
attcactaagaatttaaactgatta

SEQ ID NO: 141376 - DNA, 25 bp, SARS Virus
ttcactaagaacttaaactgattag

SEQ ID NO: 141377 - DNA, 25 bp, SARS Virus
tcactaagaacttaaactgattagc

SEQ ID NO: 141378 - DNA, 25 bp, SARS Virus
cactaagaactttaactgattagcg

SEQ ID NO: 141379 - DNA, 25 bp, SARS Virus
actaagaacttatactgattagcgg

SEQ ID NO: 141380 - DNA, 25 bp, SARS Virus
ctaagaacttaatctgattagcgga

SEQ ID NO: 141381 - DNA, 25 bp, SARS Virus
taagaacttaaattgattagcggaa

SEQ ID NO: 141382 - DNA, 25 bp, SARS Virus
aagaacttaaactgattagcggaac

SEQ ID NO: 141383 - DNA, 25 bp, SARS Virus
agaacttaaacttattagcggaaca

SEQ ID NO: 141384 - DNA, 25 bp, SARS Virus
gaacttaaactgtttagcggaacaa

SEQ ID NO: 141385 - DNA, 25 bp, SARS Virus
aacttaaactgattagcggaacaat

SEQ ID NO: 141386 - DNA, 25 bp, SARS Virus
acttaaactgattagcggaacaatt

SEQ ID NO: 141387 - DNA, 25 bp, SARS Virus
cttaaactgatttgcggaacaattt

SEQ ID NO: 141388 - DNA, 25 bp, SARS Virus
ttaaactgattatcggaacaattta

SEQ ID NO: 141389 - DNA, 25 bp, SARS Virus
taaactgattagtggaacaatttaa

SEQ ID NO: 141390 - DNA, 25 bp, SARS Virus
aaactgattagctgaacaatttaac

SEQ ID NO: 141391 - DNA, 25 bp, SARS Virus
aactgattagcgtaacaatttaacc

SEQ ID NO: 141392 - DNA, 25 bp, SARS Virus
actgattagcggtacaatttaacca

SEQ ID NO: 141393 - DNA, 25 bp, SARS Virus
ctgattagcggatcaatttaaccaa

SEQ ID NO: 141394 - DNA, 25 bp, SARS Virus
tgattagcggaataatttaaccaac

SEQ ID NO: 141395 - DNA, 25 bp, SARS Virus
gattagcggaactatttaaccaacc

SEQ ID NO: 141396 - DNA, 25 bp, SARS Virus
attagcggaacattttaaccaaccg

SEQ ID NO: 141397 - DNA, 25 bp, SARS Virus
ttagcggaacaatttaaccaaccgc

SEQ ID NO: 141398 - DNA, 25 bp, SARS Virus
tagcggaacaatttaaccaaccgct

SEQ ID NO: 141399 - DNA, 25 bp, SARS Virus
agcggaacaatttaaccaaccgcta

SEQ ID NO: 141400 - DNA, 25 bp, SARS Virus
gcggaacaattttaccaaccgctaa

SEQ ID NO: 141401 - DNA, 25 bp, SARS Virus
cggaacaatttatccaaccgctaaa

SEQ ID NO: 141402 - DNA, 25 bp, SARS Virus
ggaacaatttaatcaaccgctaaac

SEQ ID NO: 141403 - DNA, 25 bp, SARS Virus
gaacaatttaactaaccgctaaaca

SEQ ID NO: 141404 - DNA, 25 bp, SARS Virus
aacaatttaacctaccgctaaacaa

SEQ ID NO: 141405 - DNA, 25 bp, SARS Virus
acaatttaaccatccgctaaacaaa

SEQ ID NO: 141406 - DNA, 25 bp, SARS Virus
caatttaaccaatcgctaaacaaaa

SEQ ID NO: 141407 - DNA, 25 bp, SARS Virus
aatttaaccaactgctaaacaaaaa

SEQ ID NO: 141408 - DNA, 25 bp, SARS Virus
atttaaccaacctctaaacaaaaac

SEQ ID NO: 141409 - DNA, 25 bp, SARS Virus
tttaaccaaccgttaaacaaaaacc

SEQ ID NO: 141410 - DNA, 25 bp, SARS Virus
ttaaccaaccgctaaacaaaaacca

SEQ ID NO: 141411 - DNA, 25 bp, SARS Virus
taaccaaccgcttaacaaaaaccaa

SEQ ID NO: 141412 - DNA, 25 bp, SARS Virus
aaccaaccgctatacaaaaaccaag

SEQ ID NO: 141413 - DNA, 25 bp, SARS Virus
accaaccgctaatcaaaaaccaaga

SEQ ID NO: 141414 - DNA, 25 bp, SARS Virus
ccaaccgctaaataaaaaccaagag

SEQ ID NO: 141415 - DNA, 25 bp, SARS Virus
caaccgctaaactaaaaccaagagt

SEQ ID NO: 141416 - DNA, 25 bp, SARS Virus
aaccgctaaacataaaccaagagta

SEQ ID NO: 141417 - DNA, 25 bp, SARS Virus
accgctaaacaataaccaagagtat

SEQ ID NO: 141418 - DNA, 25 bp, SARS Virus
ccgctaaacaaataccaagagtatc

SEQ ID NO: 141419 - DNA, 25 bp, SARS Virus
cgctaaacaaaatccaagagtatct

SEQ ID NO: 141420 - DNA, 25 bp, SARS Virus
gctaaacaaaaatcaagagtatctc

SEQ ID NO: 141421 - DNA, 25 bp, SARS Virus
ctaaacaaaaactaagagtatctct

SEQ ID NO: 141422 - DNA, 25 bp, SARS Virus
taaacaaaaacctagagtatctctt

SEQ ID NO: 141423 - DNA, 25 bp, SARS Virus
aaacaaaaaccatgagtatctcttg

SEQ ID NO: 141424 - DNA, 25 bp, SARS Virus
aacaaaaaccaatagtatctcttgt

SEQ ID NO: 141425 - DNA, 25 bp, SARS Virus
acaaaaaccaagtgtatctcttgta

SEQ ID NO: 141426 - DNA, 25 bp, SARS Virus
caaaaaccaagattatctcttgtaa

SEQ ID NO: 141427 - DNA, 25 bp, SARS Virus
aaaaaccaagagtatctcttgtaaa

SEQ ID NO: 141428 - DNA, 25 bp, SARS Virus
aaaaccaagagtttctcttgtaaaa

SEQ ID NO: 141429 - DNA, 25 bp, SARS Virus
aaaccaagagtatctcttgtaaaac

SEQ ID NO: 141430 - DNA, 25 bp, SARS Virus
aaccaagagtatttcttgtaaaacc

SEQ ID NO: 141431 - DNA, 25 bp, SARS Virus
accaagagtatctcttgtaaaaccc

SEQ ID NO: 141432 - DNA, 25 bp, SARS Virus
ccaagagtatcttttgtaaaaccca

SEQ ID NO: 141433 - DNA, 25 bp, SARS Virus
caagagtatctcttgtaaaacccat

SEQ ID NO: 141434 - DNA, 25 bp, SARS Virus
aagagtatctcttgtaaaacccatt

SEQ ID NO: 141435 - DNA, 25 bp, SARS Virus
agagtatctcttttaaaacccattg

SEQ ID NO: 141436 - DNA, 25 bp, SARS Virus
gagtatctcttgtaaaacccattga

SEQ ID NO: 141437 - DNA, 25 bp, SARS Virus
agtatctcttgttaaacccattgag

SEQ ID NO: 141438 - DNA, 25 bp, SARS Virus
gtatctcttgtataacccattgagg

SEQ ID NO: 141439 - DNA, 25 bp, SARS Virus
tatctcttgtaatacccattgaggt

SEQ ID NO: 141440 - DNA, 25 bp, SARS Virus
atctcttgtaaatcccattgaggtt

SEQ ID NO: 141441 - DNA, 25 bp, SARS Virus
tctcttgtaaaatccattgaggtta

SEQ ID NO: 141442 - DNA, 25 bp, SARS Virus
ctcttgtaaaactcattgaggttac

SEQ ID NO: 141443 - DNA, 25 bp, SARS Virus
tcttgtaaaacctattgaggttacg

SEQ ID NO: 141444 - DNA, 25 bp, SARS Virus
cttgtaaaaccctttgaggttacgg

SEQ ID NO: 141445 - DNA, 25 bp, SARS Virus
ttgtaaaacccattgaggttacggt

SEQ ID NO: 141446 - DNA, 25 bp, SARS Virus
tgtaaaacccattgaggttacggta

SEQ ID NO: 141447 - DNA, 25 bp, SARS Virus
gtaaaacccatttaggttacggtaa

SEQ ID NO: 141448 - DNA, 25 bp, SARS Virus
taaaacccattgtggttacggtaac

SEQ ID NO: 141449 - DNA, 25 bp, SARS Virus
aaaacccattgatgttacggtaact

SEQ ID NO: 141450 - DNA, 25 bp, SARS Virus
aaacccattgagtttacggtaactt

SEQ ID NO: 141451 - DNA, 25 bp, SARS Virus
aacccattgaggttacggtaacttg

SEQ ID NO: 141452 - DNA, 25 bp, SARS Virus
acccattgaggttacggtaacttgg

SEQ ID NO: 141453 - DNA, 25 bp, SARS Virus
cccattgaggtttcggtaacttgga

SEQ ID NO: 141454 - DNA, 25 bp, SARS Virus
ccattgaggttatggtaacttggat

SEQ ID NO: 141455 - DNA, 25 bp, SARS Virus
cattgaggttactgtaacttggata

SEQ ID NO: 141456 - DNA, 25 bp, SARS Virus
attgaggttacgttaacttggatat

SEQ ID NO: 141457 - DNA, 25 bp, SARS Virus
ttgaggttacggtaacttggatata

SEQ ID NO: 141458 - DNA, 25 bp, SARS Virus
tgaggttacggttacttggatatac

SEQ ID NO: 141459 - DNA, 25 bp, SARS Virus
gaggttacggtatcttggatatacg

SEQ ID NO: 141460 - DNA, 25 bp, SARS Virus
aggttacggtaatttggatatacgg

SEQ ID NO: 141461 - DNA, 25 bp, SARS Virus
ggttacggtaacttggatatacggt

SEQ ID NO: 141462 - DNA, 25 bp, SARS Virus
gttacggtaacttggatatacggta

SEQ ID NO: 141463 - DNA, 25 bp, SARS Virus
ttacggtaactttgatatacggtaa

SEQ ID NO: 141464 - DNA, 25 bp, SARS Virus
tacggtaacttgtatatacggtaaa

SEQ ID NO: 141465 - DNA, 25 bp, SARS Virus
acggtaacttggttatacggtaaac

SEQ ID NO: 141466 - DNA, 25 bp, SARS Virus
cggtaacttggatatacggtaaacg

SEQ ID NO: 141467 - DNA, 25 bp, SARS Virus
ggtaacttggatttacggtaaacgt

SEQ ID NO: 141468 - DNA, 25 bp, SARS Virus
gtaacttggatatacggtaaacgta

SEQ ID NO: 141469 - DNA, 25 bp, SARS Virus
taacttggatattcggtaaacgtat

SEQ ID NO: 141470 - DNA, 25 bp, SARS Virus
aacttggatatatggtaaacgtatc

SEQ ID NO: 141471 - DNA, 25 bp, SARS Virus
acttggatatactgtaaacgtatcg

SEQ ID NO: 141472 - DNA, 25 bp, SARS Virus
cttggatatacgttaaacgtatcgt

SEQ ID NO: 141473 - DNA, 25 bp, SARS Virus
ttggatatacggtaaacgtatcgtt

SEQ ID NO: 141474 - DNA, 25 bp, SARS Virus
tggatatacggttaacgtatcgttt

SEQ ID NO: 141475 - DNA, 25 bp, SARS Virus
ggatatacggtatacgtatcgtttt

SEQ ID NO: 141476 - DNA, 25 bp, SARS Virus
gatatacggtaatcgtatcgttttc

SEQ ID NO: 141477 - DNA, 25 bp, SARS Virus
atatacggtaaatgtatcgttttcc

SEQ ID NO: 141478 - DNA, 25 bp, SARS Virus
tatacggtaaacttatcgttttcca

SEQ ID NO: 141479 - DNA, 25 bp, SARS Virus
atacggtaaacgtatcgttttccat

SEQ ID NO: 141480 - DNA, 25 bp, SARS Virus
tacggtaaacgtttcgttttccata

SEQ ID NO: 141481 - DNA, 25 bp, SARS Virus
acggtaaacgtatcgttttccataa

SEQ ID NO: 141482 - DNA, 25 bp, SARS Virus
cggtaaacgtattgttttccataaa

SEQ ID NO: 141483 - DNA, 25 bp, SARS Virus
ggtaaacgtatctttttccataaac

SEQ ID NO: 141484 - DNA, 25 bp, SARS Virus
gtaaacgtatcgttttccataaact

SEQ ID NO: 141485 - DNA, 25 bp, SARS Virus
taaacgtatcgttttccataaactt

SEQ ID NO: 141486 - DNA, 25 bp, SARS Virus
aaacgtatcgttttccataaacttc

SEQ ID NO: 141487 - DNA, 25 bp, SARS Virus
aacgtatcgttttccataaacttct

SEQ ID NO: 141488 - DNA, 25 bp, SARS Virus
acgtatcgtttttcataaacttctc

SEQ ID NO: 141489 - DNA, 25 bp, SARS Virus
cgtatcgttttctataaacttctcg

SEQ ID NO: 141490 - DNA, 25 bp, SARS Virus
gtatcgttttccttaaacttctcgt

SEQ ID NO: 141491 - DNA, 25 bp, SARS Virus
tatcgttttccataaacttctcgtc

SEQ ID NO: 141492 - DNA, 25 bp, SARS Virus
atcgttttccattaacttctcgtcg

SEQ ID NO: 141493 - DNA, 25 bp, SARS Virus
tcgttttccatatacttctcgtcgc

SEQ ID NO: 141494 - DNA, 25 bp, SARS Virus
cgttttccataatcttctcgtcgcg

SEQ ID NO: 141495 - DNA, 25 bp, SARS Virus
gttttccataaatttctcgtcgcgg

SEQ ID NO: 141496 - DNA, 25 bp, SARS Virus
ttttccataaacttctcgtcgcggt

SEQ ID NO: 141497 - DNA, 25 bp, SARS Virus
tttccataaacttctcgtcgcggtc

SEQ ID NO: 141498 - DNA, 25 bp, SARS Virus
ttccataaacttttcgtcgcggtcg

SEQ ID NO: 141499 - DNA, 25 bp, SARS Virus
tccataaacttctcgtcgcggtcgt

SEQ ID NO: 141500 - DNA, 25 bp, SARS Virus
ccataaacttcttgtcgcggtcgtg

SEQ ID NO: 141501 - DNA, 25 bp, SARS Virus
cataaacttctcttcgcggtcgtgg

SEQ ID NO: 141502 - DNA, 25 bp, SARS Virus
ataaacttctcgtcgcggtcgtggt

SEQ ID NO: 141503 - DNA, 25 bp, SARS Virus
taaacttctcgttgcggtcgtggtt

SEQ ID NO: 141504 - DNA, 25 bp, SARS Virus
aaacttctcgtctcggtcgtggttt

SEQ ID NO: 141505 - DNA, 25 bp, SARS Virus
aacttctcgtcgtggtcgtggttta

SEQ ID NO: 141506 - DNA, 25 bp, SARS Virus
acttctcgtcgctgtcgtggtttac

SEQ ID NO: 141507 - DNA, 25 bp, SARS Virus
cttctcgtcgcgttcgtggtttaca

SEQ ID NO: 141508 - DNA, 25 bp, SARS Virus
ttctcgtcgcggtcgtggtttacag

SEQ ID NO: 141509 - DNA, 25 bp, SARS Virus
tctcgtcgcggttgtggtttacagg

SEQ ID NO: 141510 - DNA, 25 bp, SARS Virus
ctcgtcgcggtcttggtttacaggt

SEQ ID NO: 141511 - DNA, 25 bp, SARS Virus
tcgtcgcggtcgtggtttacaggta

SEQ ID NO: 141512 - DNA, 25 bp, SARS Virus
cgtcgcggtcgttgtttacaggtag

SEQ ID NO: 141513 - DNA, 25 bp, SARS Virus
gtcgcggtcgtgttttacaggtagg

SEQ ID NO: 141514 - DNA, 25 bp, SARS Virus
tcgcggtcgtggtttacaggtaggt

SEQ ID NO: 141515 - DNA, 25 bp, SARS Virus
cgcggtcgtggtttacaggtaggtc

SEQ ID NO: 141516 - DNA, 25 bp, SARS Virus
gcggtcgtggtttacaggtaggtcg

SEQ ID NO: 141517 - DNA, 25 bp, SARS Virus
cggtcgtggttttcaggtaggtcgt

SEQ ID NO: 141518 - DNA, 25 bp, SARS Virus
ggtcgtggtttataggtaggtcgtc

SEQ ID NO: 141519 - DNA, 25 bp, SARS Virus
gtcgtggtttactggtaggtcgtca

SEQ ID NO: 141520 - DNA, 25 bp, SARS Virus
tcgtggtttacatgtaggtcgtcac

SEQ ID NO: 141521 - DNA, 25 bp, SARS Virus
cgtggtttacagttaggtcgtcacc

SEQ ID NO: 141522 - DNA, 25 bp, SARS Virus
gtggtttacaggtaggtcgtcaccg

SEQ ID NO: 141523 - DNA, 25 bp, SARS Virus
tggtttacaggttggtcgtcaccgt

SEQ ID NO: 141524 - DNA, 25 bp, SARS Virus
ggtttacaggtatgtcgtcaccgtc

SEQ ID NO: 141525 - DNA, 25 bp, SARS Virus
gtttacaggtagttcgtcaccgtca

SEQ ID NO: 141526 - DNA, 25 bp, SARS Virus
tttacaggtaggtcgtcaccgtcat

SEQ ID NO: 141527 - DNA, 25 bp, SARS Virus
ttacaggtaggttgtcaccgtcatg

SEQ ID NO: 141528 - DNA, 25 bp, SARS Virus
tacaggtaggtcttcaccgtcatgg

SEQ ID NO: 141529 - DNA, 25 bp, SARS Virus
acaggtaggtcgtcaccgtcatggt

SEQ ID NO: 141530 - DNA, 25 bp, SARS Virus
caggtaggtcgttaccgtcatggtg

SEQ ID NO: 141531 - DNA, 25 bp, SARS Virus
aggtaggtcgtctccgtcatggtga

SEQ ID NO: 141532 - DNA, 25 bp, SARS Virus
ggtaggtcgtcatcgtcatggtgat

SEQ ID NO: 141533 - DNA, 25 bp, SARS Virus
gtaggtcgtcactgtcatggtgatt

SEQ ID NO: 141534 - DNA, 25 bp, SARS Virus
taggtcgtcaccttcatggtgattg

SEQ ID NO: 141535 - DNA, 25 bp, SARS Virus
aggtcgtcaccgtcatggtgattga

SEQ ID NO: 141536 - DNA, 25 bp, SARS Virus
ggtcgtcaccgttatggtgattgat

SEQ ID NO: 141537 - DNA, 25 bp, SARS Virus
gtcgtcaccgtcttggtgattgatc

SEQ ID NO: 141538 - DNA, 25 bp, SARS Virus
tcgtcaccgtcatggtgattgatct

SEQ ID NO: 141539 - DNA, 25 bp, SARS Virus
cgtcaccgtcattgtgattgatctc

SEQ ID NO: 141540 - DNA, 25 bp, SARS Virus
gtcaccgtcatgttgattgatctcg

SEQ ID NO: 141541 - DNA, 25 bp, SARS Virus
tcaccgtcatggtgattgatctcgt

SEQ ID NO: 141542 - DNA, 25 bp, SARS Virus
caccgtcatggttattgatctcgtc

SEQ ID NO: 141543 - DNA, 25 bp, SARS Virus
accgtcatggtgtttgatctcgtcg

SEQ ID NO: 141544 - DNA, 25 bp, SARS Virus
ccgtcatggtgattgatctcgtcgt

SEQ ID NO: 141545 - DNA, 25 bp, SARS Virus
cgtcatggtgattgatctcgtcgtc

SEQ ID NO: 141546 - DNA, 25 bp, SARS Virus
gtcatggtgatttatctcgtcgtca

SEQ ID NO: 141547 - DNA, 25 bp, SARS Virus
tcatggtgattgttctcgtcgtcac

SEQ ID NO: 141548 - DNA, 25 bp, SARS Virus
catggtgattgatctcgtcgtcaca

SEQ ID NO: 141549 - DNA, 25 bp, SARS Virus
atggtgattgatttcgtcgtcacat

SEQ ID NO: 141550 - DNA, 25 bp, SARS Virus
tggtgattgatctcgtcgtcacatc

SEQ ID NO: 141551 - DNA, 25 bp, SARS Virus
ggtgattgatcttgtcgtcacatcc

SEQ ID NO: 141552 - DNA, 25 bp, SARS Virus
gtgattgatctcttcgtcacatccg

SEQ ID NO: 141553 - DNA, 25 bp, SARS Virus
tgattgatctcgacgtcacatccgt

SEQ ID NO: 141554 - DNA, 25 bp, SARS Virus
gattgatctcgtagtcacatccgtc

SEQ ID NO: 141555 - DNA, 25 bp, SARS Virus
attgatctcgtcatcacatccgtcg

SEQ ID NO: 141556 - DNA, 25 bp, SARS Virus
ttgatctcgtcgacacatccgtcgt

SEQ ID NO: 141557 - DNA, 25 bp, SARS Virus
tgatctcgtcgtaacatccgtcgtt

SEQ ID NO: 141558 - DNA, 25 bp, SARS Virus
gatctcgtcgtcacatccgtcgtta

SEQ ID NO: 141559 - DNA, 25 bp, SARS Virus
atctcgtcgtcaaatccgtcgttag

SEQ ID NO: 141560 - DNA, 25 bp, SARS Virus
tctcgtcgtcacatccgtcgttagt

SEQ ID NO: 141561 - DNA, 25 bp, SARS Virus
ctcgtcgtcacaaccgtcgttagta

SEQ ID NO: 141562 - DNA, 25 bp, SARS Virus
tcgtcgtcacatacgtcgttagtat

SEQ ID NO: 141563 - DNA, 25 bp, SARS Virus
cgtcgtcacatcagtcgttagtata

SEQ ID NO: 141564 - DNA, 25 bp, SARS Virus
gtcgtcacatccatcgttagtatag

SEQ ID NO: 141565 - DNA, 25 bp, SARS Virus
tcgtcacatccgacgttagtatagt

SEQ ID NO: 141566 - DNA, 25 bp, SARS Virus
cgtcacatccgtagttagtatagta

SEQ ID NO: 141567 - DNA, 25 bp, SARS Virus
gtcacatccgtcattagtatagtag

SEQ ID NO: 141568 - DNA, 25 bp, SARS Virus
tcacatccgtcgatagtatagtagt

SEQ ID NO: 141569 - DNA, 25 bp, SARS Virus
cacatccgtcgtaagtatagtagtc

SEQ ID NO: 141570 - DNA, 25 bp, SARS Virus
acatccgtcgttagtatagtagtca

SEQ ID NO: 141571 - DNA, 25 bp, SARS Virus
catccgtcgttaatatagtagtcac

SEQ ID NO: 141572 - DNA, 25 bp, SARS Virus
atccgtcgttagaatagtagtcact

SEQ ID NO: 141573 - DNA, 25 bp, SARS Virus
tccgtcgttagtatagtagtcactc

SEQ ID NO: 141574 - DNA, 25 bp, SARS Virus
ccgtcgttagtaaagtagtcactcg

SEQ ID NO: 141575 - DNA, 25 bp, SARS Virus
cgtcgttagtatagtagtcactcgt

SEQ ID NO: 141576 - DNA, 25 bp, SARS Virus
gtcgttagtataatagtcactcgtc

SEQ ID NO: 141577 - DNA, 25 bp, SARS Virus
tcgttagtatagaagtcactcgtct

SEQ ID NO: 141578 - DNA, 25 bp, SARS Virus
cgttagtatagtagtcactcgtctc

SEQ ID NO: 141579 - DNA, 25 bp, SARS Virus
gttagtatagtaatcactcgtctcc

SEQ ID NO: 141580 - DNA, 25 bp, SARS Virus
ttagtatagtagacactcgtctcca

SEQ ID NO: 141581 - DNA, 25 bp, SARS Virus
tagtatagtagtaactcgtctccac

SEQ ID NO: 141582 - DNA, 25 bp, SARS Virus
agtatagtagtcactcgtctccacc

SEQ ID NO: 141583 - DNA, 25 bp, SARS Virus
gtatagtagtcaatcgtctccaccg

SEQ ID NO: 141584 - DNA, 25 bp, SARS Virus
tatagtagtcacacgtctccaccgt

SEQ ID NO: 141585 - DNA, 25 bp, SARS Virus
atagtagtcactagtctccaccgtt

SEQ ID NO: 141586 - DNA, 25 bp, SARS Virus
tagtagtcactcatctccaccgttg

SEQ ID NO: 141587 - DNA, 25 bp, SARS Virus
agtagtcactcgactccaccgttgt

SEQ ID NO: 141588 - DNA, 25 bp, SARS Virus
gtagtcactcgtatccaccgttgtg

SEQ ID NO: 141589 - DNA, 25 bp, SARS Virus
tagtcactcgtcaccaccgttgtga

SEQ ID NO: 141590 - DNA, 25 bp, SARS Virus
agtcactcgtctacaccgttgtgac

SEQ ID NO: 141591 - DNA, 25 bp, SARS Virus
gtcactcgtctcaaccgttgtgaca

SEQ ID NO: 141592 - DNA, 25 bp, SARS Virus
tcactcgtctccaccgttgtgacat

SEQ ID NO: 141593 - DNA, 25 bp, SARS Virus
cactcgtctccaacgttgtgacatt

SEQ ID NO: 141594 - DNA, 25 bp, SARS Virus
actcgtctccacagttgtgacattc

SEQ ID NO: 141595 - DNA, 25 bp, SARS Virus
ctcgtctccaccattgtgacattca

SEQ ID NO: 141596 - DNA, 25 bp, SARS Virus
tcgtctccaccgatgtgacattcag

SEQ ID NO: 141597 - DNA, 25 bp, SARS Virus
cgtctccaccgtagtgacattcagg

SEQ ID NO: 141598 - DNA, 25 bp, SARS Virus
gtctccaccgttatgacattcaggt

SEQ ID NO: 141599 - DNA, 25 bp, SARS Virus
tctccaccgttgagacattcaggta

SEQ ID NO: 141600 - DNA, 25 bp, SARS Virus
ctccaccgttgtaacattcaggtaa

SEQ ID NO: 141601 - DNA, 25 bp, SARS Virus
tccaccgttgtgacattcaggtaac

SEQ ID NO: 141602 - DNA, 25 bp, SARS Virus
ccaccgttgtgaaattcaggtaact

SEQ ID NO: 141603 - DNA, 25 bp, SARS Virus
caccgttgtgacattcaggtaactt

SEQ ID NO: 141604 - DNA, 25 bp, SARS Virus
accgttgtgacaatcaggtaacttg

SEQ ID NO: 141605 - DNA, 25 bp, SARS Virus
ccgttgtgacatacaggtaacttga

SEQ ID NO: 141606 - DNA, 25 bp, SARS Virus
cgttgtgacattaaggtaacttgaa

SEQ ID NO: 141607 - DNA, 25 bp, SARS Virus
gttgtgacattcaggtaacttgaag

SEQ ID NO: 141608 - DNA, 25 bp, SARS Virus
ttgtgacattcaagtaacttgaaga

SEQ ID NO: 141609 - DNA, 25 bp, SARS Virus
tgtgacattcagataacttgaagac

SEQ ID NO: 141610 - DNA, 25 bp, SARS Virus
gtgacattcaggaaacttgaagacg

SEQ ID NO: 141611 - DNA, 25 bp, SARS Virus
tgacattcaggtaacttgaagacgc

SEQ ID NO: 141612 - DNA, 25 bp, SARS Virus
gacattcaggtaacttgaagacgcg

SEQ ID NO: 141613 - DNA, 25 bp, SARS Virus
acattcaggtaaattgaagacgcgt

SEQ ID NO: 141614 - DNA, 25 bp, SARS Virus
cattcaggtaacatgaagacgcgtg

SEQ ID NO: 141615 - DNA, 25 bp, SARS Virus
attcaggtaactagaagacgcgtgt

SEQ ID NO: 141616 - DNA, 25 bp, SARS Virus
ttcaggtaacttaaagacgcgtgtt

SEQ ID NO: 141617 - DNA, 25 bp, SARS Virus
tcaggtaacttgaagacgcgtgttt

SEQ ID NO: 141618 - DNA, 25 bp, SARS Virus
caggtaacttgaagacgcgtgttta

SEQ ID NO: 141619 - DNA, 25 bp, SARS Virus
aggtaacttgaaaacgcgtgtttac

SEQ ID NO: 141620 - DNA, 25 bp, SARS Virus
ggtaacttgaagacgcgtgtttact

SEQ ID NO: 141621 - DNA, 25 bp, SARS Virus
gtaacttgaagaagcgtgtttactc

SEQ ID NO: 141622 - DNA, 25 bp, SARS Virus
taacttgaagacacgtgtttactct

SEQ ID NO: 141623 - DNA, 25 bp, SARS Virus
aacttgaagacgagtgtttactcta

SEQ ID NO: 141624 - DNA, 25 bp, SARS Virus
acttgaagacgcatgtttactctag

SEQ ID NO: 141625 - DNA, 25 bp, SARS Virus
cttgaagacgcgagtttactctaga

SEQ ID NO: 141626 - DNA, 25 bp, SARS Virus
ttgaagacgcgtatttactctagag

SEQ ID NO: 141627 - DNA, 25 bp, SARS Virus
tgaagacgcgtgattactctagaga

SEQ ID NO: 141628 - DNA, 25 bp, SARS Virus
gaagacgcgtgtatactctagagat

SEQ ID NO: 141629 - DNA, 25 bp, SARS Virus
aagacgcgtgttaactctagagatc

SEQ ID NO: 141630 - DNA, 25 bp, SARS Virus
agacgcgtgtttactctagagatcg

SEQ ID NO: 141631 - DNA, 25 bp, SARS Virus
gacgcgtgtttaatctagagatcgt

SEQ ID NO: 141632 - DNA, 25 bp, SARS Virus
acgcgtgtttacactagagatcgta

SEQ ID NO: 141633 - DNA, 25 bp, SARS Virus
cgcgtgtttactatagagatcgtaa

SEQ ID NO: 141634 - DNA, 25 bp, SARS Virus
gcgtgtttactcaagagatcgtaat

SEQ ID NO: 141635 - DNA, 25 bp, SARS Virus
cgtgtttactctagagatcgtaatt

SEQ ID NO: 141636 - DNA, 25 bp, SARS Virus
gtgtttactctaaagatcgtaatta

SEQ ID NO: 141637 - DNA, 25 bp, SARS Virus
tgtttactctagagatcgtaattat

SEQ ID NO: 141638 - DNA, 25 bp, SARS Virus
gtttactctagaaatcgtaattata

SEQ ID NO: 141639 - DNA, 25 bp, SARS Virus
tttactctagagatcgtaattatag

SEQ ID NO: 141640 - DNA, 25 bp, SARS Virus
ttactctagagaacgtaattatagt

SEQ ID NO: 141641 - DNA, 25 bp, SARS Virus
tactctagagatagtaattatagtg

SEQ ID NO: 141642 - DNA, 25 bp, SARS Virus
actctagagatcataattatagtgg

SEQ ID NO: 141643 - DNA, 25 bp, SARS Virus
ctctagagatcgaaattatagtgga

SEQ ID NO: 141644 - DNA, 25 bp, SARS Virus
tctagagatcgtaattatagtggat

SEQ ID NO: 141645 - DNA, 25 bp, SARS Virus
ctagagatcgtaattatagtggatc

SEQ ID NO: 141646 - DNA, 25 bp, SARS Virus
tagagatcgtaaatatagtggatcc

SEQ ID NO: 141647 - DNA, 25 bp, SARS Virus
agagatcgtaataatagtggatccg

SEQ ID NO: 141648 - DNA, 25 bp, SARS Virus
gagatcgtaattatagtggatccgt

SEQ ID NO: 141649 - DNA, 25 bp, SARS Virus
agatcgtaattaaagtggatccgta

SEQ ID NO: 141650 - DNA, 25 bp, SARS Virus
gatcgtaattatagtggatccgtaa

SEQ ID NO: 141651 - DNA, 25 bp, SARS Virus
atcgtaattataatggatccgtaag

SEQ ID NO: 141652 - DNA, 25 bp, SARS Virus
tcgtaattatagaggatccgtaagc

SEQ ID NO: 141653 - DNA, 25 bp, SARS Virus
cgtaattatagtagatccgtaagcg

SEQ ID NO: 141654 - DNA, 25 bp, SARS Virus
gtaattatagtgaatccgtaagcgg

SEQ ID NO: 141655 - DNA, 25 bp, SARS Virus
taattatagtggatccgtaagcggt

SEQ ID NO: 141656 - DNA, 25 bp, SARS Virus
aattatagtggaaccgtaagcggta

SEQ ID NO: 141657 - DNA, 25 bp, SARS Virus
attatagtggatacgtaagcggtat

SEQ ID NO: 141658 - DNA, 25 bp, SARS Virus
ttatagtggatcagtaagcggtata

SEQ ID NO: 141659 - DNA, 25 bp, SARS Virus
tatagtggatccataagcggtataa

SEQ ID NO: 141660 - DNA, 25 bp, SARS Virus
atagtggatccgaaagcggtataac

SEQ ID NO: 141661 - DNA, 25 bp, SARS Virus
tagtggatccgtaagcggtataacg

SEQ ID NO: 141662 - DNA, 25 bp, SARS Virus
agtggatccgtaagcggtataacga

SEQ ID NO: 141663 - DNA, 25 bp, SARS Virus
gtggatccgtaaacggtataacgaa

SEQ ID NO: 141664 - DNA, 25 bp, SARS Virus
tggatccgtaagaggtataacgaag

SEQ ID NO: 141665 - DNA, 25 bp, SARS Virus
ggatccgtaagcagtataacgaagt

SEQ ID NO: 141666 - DNA, 25 bp, SARS Virus
gatccgtaagcgatataacgaagta

SEQ ID NO: 141667 - DNA, 25 bp, SARS Virus
atccgtaagcggaataacgaagtac

SEQ ID NO: 141668 - DNA, 25 bp, SARS Virus
tccgtaagcggtataacgaagtact

SEQ ID NO: 141669 - DNA, 25 bp, SARS Virus
ccgtaagcggtaaaacgaagtactt

SEQ ID NO: 141670 - DNA, 25 bp, SARS Virus
cgtaagcggtataacgaagtacttc

SEQ ID NO: 141671 - DNA, 25 bp, SARS Virus
gtaagcggtataacgaagtacttcg

SEQ ID NO: 141672 - DNA, 25 bp, SARS Virus
taagcggtataaagaagtacttcgg

SEQ ID NO: 141673 - DNA, 25 bp, SARS Virus
aagcggtataacaaagtacttcggt

SEQ ID NO: 141674 - DNA, 25 bp, SARS Virus
agcggtataacgaagtacttcggtc

SEQ ID NO: 141675 - DNA, 25 bp, SARS Virus
gcggtataacgaagtacttcggtcg

SEQ ID NO: 141676 - DNA, 25 bp, SARS Virus
cggtataacgaaatacttcggtcgt

SEQ ID NO: 141677 - DNA, 25 bp, SARS Virus
ggtataacgaagaacttcggtcgta

SEQ ID NO: 141678 - DNA, 25 bp, SARS Virus
gtataacgaagtacttcggtcgtag

SEQ ID NO: 141679 - DNA, 25 bp, SARS Virus
tataacgaagtaattcggtcgtagt

SEQ ID NO: 141680 - DNA, 25 bp, SARS Virus
ataacgaagtacatcggtcgtagtc

SEQ ID NO: 141681 - DNA, 25 bp, SARS Virus
taacgaagtactacggtcgtagtcg

SEQ ID NO: 141682 - DNA, 25 bp, SARS Virus
aacgaagtacttaggtcgtagtcgc

SEQ ID NO: 141683 - DNA, 25 bp, SARS Virus
acgaagtacttcagtcgtagtcgct

SEQ ID NO: 141684 - DNA, 25 bp, SARS Virus
cgaagtacttcgatcgtagtcgctc

SEQ ID NO: 141685 - DNA, 25 bp, SARS Virus
gaagtacttcggacgtagtcgctca

SEQ ID NO: 141686 - DNA, 25 bp, SARS Virus
aagtacttcggtagtagtcgctcac

SEQ ID NO: 141687 - DNA, 25 bp, SARS Virus
agtacttcggtcatagtcgctcaca

SEQ ID NO: 141688 - DNA, 25 bp, SARS Virus
gtacttcggtcgaagtcgctcacag

SEQ ID NO: 141689 - DNA, 25 bp, SARS Virus
tacttcggtcgtagtcgctcacagt

SEQ ID NO: 141690 - DNA, 25 bp, SARS Virus
acttcggtcgtaatcgctcacagtg

SEQ ID NO: 141691 - DNA, 25 bp, SARS Virus
cttcggtcgtagacgctcacagtgg

SEQ ID NO: 141692 - DNA, 25 bp, SARS Virus
ttcggtcgtagtagctcacagtgga

SEQ ID NO: 141693 - DNA, 25 bp, SARS Virus
tcggtcgtagtcactcacagtggaa

SEQ ID NO: 141694 - DNA, 25 bp, SARS Virus
cggtcgtagtcgatcacagtggaat

SEQ ID NO: 141695 - DNA, 25 bp, SARS Virus
ggtcgtagtcgcacacagtggaata

SEQ ID NO: 141696 - DNA, 25 bp, SARS Virus
gtcgtagtcgctaacagtggaataa

SEQ ID NO: 141697 - DNA, 25 bp, SARS Virus
tcgtagtcgctcacagtggaataat

SEQ ID NO: 141698 - DNA, 25 bp, SARS Virus
cgtagtcgctcaaagtggaataatt

SEQ ID NO: 141699 - DNA, 25 bp, SARS Virus
gtagtcgctcacagtggaataattt

SEQ ID NO: 141700 - DNA, 25 bp, SARS Virus
tagtcgctcacaatggaataatttc

SEQ ID NO: 141701 - DNA, 25 bp, SARS Virus
agtcgctcacagaggaataatttct

SEQ ID NO: 141702 - DNA, 25 bp, SARS Virus
gtcgctcacagtagaataatttctc

SEQ ID NO: 141703 - DNA, 25 bp, SARS Virus
tcgctcacagtgaaataatttctcg

SEQ ID NO: 141704 - DNA, 25 bp, SARS Virus
cgctcacagtggaataatttctcgt

SEQ ID NO: 141705 - DNA, 25 bp, SARS Virus
gctcacagtggaataatttctcgtt

SEQ ID NO: 141706 - DNA, 25 bp, SARS Virus
ctcacagtggaaaaatttctcgttc

SEQ ID NO: 141707 - DNA, 25 bp, SARS Virus
tcacagtggaataatttctcgttca

SEQ ID NO: 141708 - DNA, 25 bp, SARS Virus
cacagtggaataatttctcgttcag

SEQ ID NO: 141709 - DNA, 25 bp, SARS Virus
acagtggaataaattctcgttcagg

SEQ ID NO: 141710 - DNA, 25 bp, SARS Virus
cagtggaataatatctcgttcagga

SEQ ID NO: 141711 - DNA, 25 bp, SARS Virus
agtggaataattactcgttcaggag

SEQ ID NO: 141712 - DNA, 25 bp, SARS Virus
gtggaataatttatcgttcaggagt

SEQ ID NO: 141713 - DNA, 25 bp, SARS Virus
tggaataatttcacgttcaggagtt

SEQ ID NO: 141714 - DNA, 25 bp, SARS Virus
ggaataatttctagttcaggagtta

SEQ ID NO: 141715 - DNA, 25 bp, SARS Virus
gaataatttctcattcaggagttat

SEQ ID NO: 141716 - DNA, 25 bp, SARS Virus
aataatttctcgatcaggagttatt

SEQ ID NO: 141717 - DNA, 25 bp, SARS Virus
ataatttctcgtacaggagttattt

SEQ ID NO: 141718 - DNA, 25 bp, SARS Virus
taatttctcgttaaggagttatttt

SEQ ID NO: 141719 - DNA, 25 bp, SARS Virus
aatttctcgttcaggagttattttc

SEQ ID NO: 141720 - DNA, 25 bp, SARS Virus
atttctcgttcaagagttattttct

SEQ ID NO: 141721 - DNA, 25 bp, SARS Virus
tttctcgttcagaagttattttctg

SEQ ID NO: 141722 - DNA, 25 bp, SARS Virus
ttctcgttcaggagttattttctgg

SEQ ID NO: 141723 - DNA, 25 bp, SARS Virus
tctcgttcaggaattattttctgga

SEQ ID NO: 141724 - DNA, 25 bp, SARS Virus
ctcgttcaggagatattttctggag

SEQ ID NO: 141725 - DNA, 25 bp, SARS Virus
tcgttcaggagtaattttctggaga

SEQ ID NO: 141726 - DNA, 25 bp, SARS Virus
cgttcaggagttattttctggagaa

SEQ ID NO: 141727 - DNA, 25 bp, SARS Virus
gttcaggagttaatttctggagaat

SEQ ID NO: 141728 - DNA, 25 bp, SARS Virus
ttcaggagttatattctggagaatc

SEQ ID NO: 141729 - DNA, 25 bp, SARS Virus
tcaggagttattatctggagaatca

SEQ ID NO: 141730 - DNA, 25 bp, SARS Virus
caggagttatttactggagaatcaa

SEQ ID NO: 141731 - DNA, 25 bp, SARS Virus
aggagttattttatggagaatcaac

SEQ ID NO: 141732 - DNA, 25 bp, SARS Virus
ggagttattttcaggagaatcaacc

SEQ ID NO: 141733 - DNA, 25 bp, SARS Virus
gagttattttctagagaatcaaccg

SEQ ID NO: 141734 - DNA, 25 bp, SARS Virus
agttattttctgaagaatcaaccga

SEQ ID NO: 141735 - DNA, 25 bp, SARS Virus
gttattttctggagaatcaaccgaa

SEQ ID NO: 141736 - DNA, 25 bp, SARS Virus
ttattttctggaaaatcaaccgaaa

SEQ ID NO: 141737 - DNA, 25 bp, SARS Virus
tattttctggagaatcaaccgaaat

SEQ ID NO: 141738 - DNA, 25 bp, SARS Virus
attttctggagaatcaaccgaaatc

SEQ ID NO: 141739 - DNA, 25 bp, SARS Virus
ttttctggagaaacaaccgaaatct

SEQ ID NO: 141740 - DNA, 25 bp, SARS Virus
tttctggagaataaaccgaaatctc

SEQ ID NO: 141741 - DNA, 25 bp, SARS Virus
ttctggagaatcaaccgaaatctcc

SEQ ID NO: 141742 - DNA, 25 bp, SARS Virus
tctggagaatcaaccgaaatctccc

SEQ ID NO: 141743 - DNA, 25 bp, SARS Virus
ctggagaatcaaacgaaatctccca

SEQ ID NO: 141744 - DNA, 25 bp, SARS Virus
tggagaatcaacagaaatctcccag

SEQ ID NO: 141745 - DNA, 25 bp, SARS Virus
ggagaatcaaccaaaatctcccagt

SEQ ID NO: 141746 - DNA, 25 bp, SARS Virus
gagaatcaaccgaaatctcccagtc

SEQ ID NO: 141747 - DNA, 25 bp, SARS Virus
agaatcaaccgaaatctcccagtcc

SEQ ID NO: 141748 - DNA, 25 bp, SARS Virus
gaatcaaccgaaatctcccagtcca

SEQ ID NO: 141749 - DNA, 25 bp, SARS Virus
aatcaaccgaaaactcccagtccat

SEQ ID NO: 141750 - DNA, 25 bp, SARS Virus
atcaaccgaaatatcccagtccatt

SEQ ID NO: 141751 - DNA, 25 bp, SARS Virus
tcaaccgaaatcacccagtccatta

SEQ ID NO: 141752 - DNA, 25 bp, SARS Virus
caaccgaaatctaccagtccattat

SEQ ID NO: 141753 - DNA, 25 bp, SARS Virus
aaccgaaatctcacagtccattata

SEQ ID NO: 141754 - DNA, 25 bp, SARS Virus
accgaaatctccaagtccattataa

SEQ ID NO: 141755 - DNA, 25 bp, SARS Virus
ccgaaatctcccagtccattataaa

SEQ ID NO: 141756 - DNA, 25 bp, SARS Virus
cgaaatctcccaatccattataaac

SEQ ID NO: 141757 - DNA, 25 bp, SARS Virus
gaaatctcccagaccattataaaca

SEQ ID NO: 141758 - DNA, 25 bp, SARS Virus
aaatctcccagtacattataaacac

SEQ ID NO: 141759 - DNA, 25 bp, SARS Virus
aatctcccagtcaattataaacact

SEQ ID NO: 141760 - DNA, 25 bp, SARS Virus
atctcccagtccattataaacactt

SEQ ID NO: 141761 - DNA, 25 bp, SARS Virus
tctcccagtccaatataaacacttt

SEQ ID NO: 141762 - DNA, 25 bp, SARS Virus
ctcccagtccataataaacactttt

SEQ ID NO: 141763 - DNA, 25 bp, SARS Virus
tcccagtccattataaacacttttt

SEQ ID NO: 141764 - DNA, 25 bp, SARS Virus
cccagtccattaaaaacacttttta

SEQ ID NO: 141765 - DNA, 25 bp, SARS Virus
ccagtccattataaacactttttaa

SEQ ID NO: 141766 - DNA, 25 bp, SARS Virus
cagtccattataaacactttttaat

SEQ ID NO: 141767 - DNA, 25 bp, SARS Virus
agtccattataaacactttttaatt

SEQ ID NO: 141768 - DNA, 25 bp, SARS Virus
gtccattataaaaactttttaattt

SEQ ID NO: 141769 - DNA, 25 bp, SARS Virus
tccattataaacactttttaatttt

SEQ ID NO: 141770 - DNA, 25 bp, SARS Virus
ccattataaacaatttttaattttg

SEQ ID NO: 141771 - DNA, 25 bp, SARS Virus
cattataaacacattttaattttgg

SEQ ID NO: 141772 - DNA, 25 bp, SARS Virus
attataaacactatttaattttggt

SEQ ID NO: 141773 - DNA, 25 bp, SARS Virus
ttataaacacttattaattttggtg

SEQ ID NO: 141774 - DNA, 25 bp, SARS Virus
tataaacactttataattttggtgg

SEQ ID NO: 141775 - DNA, 25 bp, SARS Virus
ataaacacttttaaattttggtggt

SEQ ID NO: 141776 - DNA, 25 bp, SARS Virus
taaacactttttaattttggtggtt

SEQ ID NO: 141777 - DNA, 25 bp, SARS Virus
aaacactttttaattttggtggttt

SEQ ID NO: 141778 - DNA, 25 bp, SARS Virus
aacactttttaaatttggtggtttt

SEQ ID NO: 141779 - DNA, 25 bp, SARS Virus
acactttttaatattggtggtttta

SEQ ID NO: 141780 - DNA, 25 bp, SARS Virus
cactttttaattatggtggttttat

SEQ ID NO: 141781 - DNA, 25 bp, SARS Virus
actttttaatttaggtggttttata

SEQ ID NO: 141782 - DNA, 25 bp, SARS Virus
ctttttaattttagtggttttataa

SEQ ID NO: 141783 - DNA, 25 bp, SARS Virus
tttttaattttgatggttttataaa

SEQ ID NO: 141784 - DNA, 25 bp, SARS Virus
ttttaattttggaggttttataaag

SEQ ID NO: 141785 - DNA, 25 bp, SARS Virus
tttaattttggtagttttataaagt

SEQ ID NO: 141786 - DNA, 25 bp, SARS Virus
ttaattttggtgattttataaagtt

SEQ ID NO: 141787 - DNA, 25 bp, SARS Virus
taattttggtggatttataaagttt

SEQ ID NO: 141788 - DNA, 25 bp, SARS Virus
aattttggtggtattataaagtttc

SEQ ID NO: 141789 - DNA, 25 bp, SARS Virus
attttggtggttatataaagtttca

SEQ ID NO: 141790 - DNA, 25 bp, SARS Virus
ttttggtggtttaataaagtttcaa

SEQ ID NO: 141791 - DNA, 25 bp, SARS Virus
tttggtggttttataaagtttcaac

SEQ ID NO: 141792 - DNA, 25 bp, SARS Virus
ttggtggttttaaaaagtttcaacc

SEQ ID NO: 141793 - DNA, 25 bp, SARS Virus
tggtggttttataaagtttcaaccc

SEQ ID NO: 141794 - DNA, 25 bp, SARS Virus
ggtggttttataaagtttcaacccc

SEQ ID NO: 141795 - DNA, 25 bp, SARS Virus
gtggttttataaagtttcaacccca

SEQ ID NO: 141796 - DNA, 25 bp, SARS Virus
tggttttataaaatttcaaccccaa

SEQ ID NO: 141797 - DNA, 25 bp, SARS Virus
ggttttataaagattcaaccccaaa

SEQ ID NO: 141798 - DNA, 25 bp, SARS Virus
gttttataaagtatcaaccccaaaa

SEQ ID NO: 141799 - DNA, 25 bp, SARS Virus
ttttataaagttacaaccccaaaac

SEQ ID NO: 141800 - DNA, 25 bp, SARS Virus
tttataaagtttaaaccccaaaaca

SEQ ID NO: 141801 - DNA, 25 bp, SARS Virus
ttataaagtttcaaccccaaaacat

SEQ ID NO: 141802 - DNA, 25 bp, SARS Virus
tataaagtttcaaccccaaaacatg

SEQ ID NO: 141803 - DNA, 25 bp, SARS Virus
ataaagtttcaaacccaaaacatgt

SEQ ID NO: 141804 - DNA, 25 bp, SARS Virus
taaagtttcaacaccaaaacatgta

SEQ ID NO: 141805 - DNA, 25 bp, SARS Virus
aaagtttcaaccacaaaacatgtaa

SEQ ID NO: 141806 - DNA, 25 bp, SARS Virus
aagtttcaacccaaaaacatgtaaa

SEQ ID NO: 141807 - DNA, 25 bp, SARS Virus
agtttcaaccccaaaacatgtaaac

SEQ ID NO: 141808 - DNA, 25 bp, SARS Virus
gtttcaaccccaaaacatgtaaaca

SEQ ID NO: 141809 - DNA, 25 bp, SARS Virus
tttcaaccccaaaacatgtaaacaa

SEQ ID NO: 141810 - DNA, 25 bp, SARS Virus
ttcaaccccaaaacatgtaaacaaa

SEQ ID NO: 141811 - DNA, 25 bp, SARS Virus
tcaaccccaaaaaatgtaaacaaac

SEQ ID NO: 141812 - DNA, 25 bp, SARS Virus
caaccccaaaacatgtaaacaaact

SEQ ID NO: 141813 - DNA, 25 bp, SARS Virus
aaccccaaaacaagtaaacaaactg

SEQ ID NO: 141814 - DNA, 25 bp, SARS Virus
accccaaaacatataaacaaactga

SEQ ID NO: 141815 - DNA, 25 bp, SARS Virus
ccccaaaacatgaaaacaaactgaa

SEQ ID NO: 141816 - DNA, 25 bp, SARS Virus
cccaaaacatgtaaacaaactgaac

SEQ ID NO: 141817 - DNA, 25 bp, SARS Virus
ccaaaacatgtaaacaaactgaact

SEQ ID NO: 141818 - DNA, 25 bp, SARS Virus
caaaacatgtaaacaaactgaactc

SEQ ID NO: 141819 - DNA, 25 bp, SARS Virus
aaaacatgtaaaaaaactgaactcg

SEQ ID NO: 141820 - DNA, 25 bp, SARS Virus
aaacatgtaaacaaactgaactcgc

SEQ ID NO: 141821 - DNA, 25 bp, SARS Virus
aacatgtaaacaaactgaactcgct

SEQ ID NO: 141822 - DNA, 25 bp, SARS Virus
acatgtaaacaaactgaactcgctt

SEQ ID NO: 141823 - DNA, 25 bp, SARS Virus
catgtaaacaaaatgaactcgcttg

SEQ ID NO: 141824 - DNA, 25 bp, SARS Virus
atgtaaacaaacagaactcgcttgt

SEQ ID NO: 141825 - DNA, 25 bp, SARS Virus
tgtaaacaaactaaactcgcttgtg

SEQ ID NO: 141826 - DNA, 25 bp, SARS Virus
gtaaacaaactgaactcgcttgtga

SEQ ID NO: 141827 - DNA, 25 bp, SARS Virus
taaacaaactgaactcgcttgtgaa

SEQ ID NO: 141828 - DNA, 25 bp, SARS Virus
aaacaaactgaaatcgcttgtgaag

SEQ ID NO: 141829 - DNA, 25 bp, SARS Virus
aacaaactgaacacgcttgtgaagt

SEQ ID NO: 141830 - DNA, 25 bp, SARS Virus
acaaactgaactagcttgtgaagtg

SEQ ID NO: 141831 - DNA, 25 bp, SARS Virus
caaactgaactcacttgtgaagtgc

SEQ ID NO: 141832 - DNA, 25 bp, SARS Virus
aaactgaactcgattgtgaagtgca

SEQ ID NO: 141833 - DNA, 25 bp, SARS Virus
aactgaactcgcatgtgaagtgcac

SEQ ID NO: 141834 - DNA, 25 bp, SARS Virus
actgaactcgctagtgaagtgcaca

SEQ ID NO: 141835 - DNA, 25 bp, SARS Virus
ctgaactcgcttatgaagtgcacac

SEQ ID NO: 141836 - DNA, 25 bp, SARS Virus
tgaactcgcttgagaagtgcacaca

SEQ ID NO: 141837 - DNA, 25 bp, SARS Virus
gaactcgcttgtaaagtgcacacaa

SEQ ID NO: 141838 - DNA, 25 bp, SARS Virus
aactcgcttgtgaagtgcacacaac

SEQ ID NO: 141839 - DNA, 25 bp, SARS Virus
actcgcttgtgaagtgcacacaacg

SEQ ID NO: 141840 - DNA, 25 bp, SARS Virus
ctcgcttgtgaaatgcacacaacgc

SEQ ID NO: 141841 - DNA, 25 bp, SARS Virus
tcgcttgtgaagagcacacaacgct

SEQ ID NO: 141842 - DNA, 25 bp, SARS Virus
cgcttgtgaagtacacacaacgcta

SEQ ID NO: 141843 - DNA, 25 bp, SARS Virus
gcttgtgaagtgaacacaacgctag

SEQ ID NO: 141844 - DNA, 25 bp, SARS Virus
cttgtgaagtgcacacaacgctagg

SEQ ID NO: 141845 - DNA, 25 bp, SARS Virus
ttgtgaagtgcaaacaacgctagga

SEQ ID NO: 141846 - DNA, 25 bp, SARS Virus
tgtgaagtgcacacaacgctaggac

SEQ ID NO: 141847 - DNA, 25 bp, SARS Virus
gtgaagtgcacaaaacgctaggaca

SEQ ID NO: 141848 - DNA, 25 bp, SARS Virus
tgaagtgcacacaacgctaggacaa

SEQ ID NO: 141849 - DNA, 25 bp, SARS Virus
gaagtgcacacaacgctaggacaag

SEQ ID NO: 141850 - DNA, 25 bp, SARS Virus
aagtgcacacaaagctaggacaagt

SEQ ID NO: 141851 - DNA, 25 bp, SARS Virus
agtgcacacaacactaggacaagtc

SEQ ID NO: 141852 - DNA, 25 bp, SARS Virus
gtgcacacaacgataggacaagtcg

SEQ ID NO: 141853 - DNA, 25 bp, SARS Virus
tgcacacaacgcaaggacaagtcgt

SEQ ID NO: 141854 - DNA, 25 bp, SARS Virus
gcacacaacgctaggacaagtcgtc

SEQ ID NO: 141855 - DNA, 25 bp, SARS Virus
cacacaacgctaagacaagtcgtcg

SEQ ID NO: 141856 - DNA, 25 bp, SARS Virus
acacaacgctagaacaagtcgtcgt

SEQ ID NO: 141857 - DNA, 25 bp, SARS Virus
cacaacgctaggacaagtcgtcgtt

SEQ ID NO: 141858 - DNA, 25 bp, SARS Virus
acaacgctaggaaaagtcgtcgtta

SEQ ID NO: 141859 - DNA, 25 bp, SARS Virus
caacgctaggacaagtcgtcgttat

SEQ ID NO: 141860 - DNA, 25 bp, SARS Virus
aacgctaggacaagtcgtcgttatg

SEQ ID NO: 141861 - DNA, 25 bp, SARS Virus
acgctaggacaaatcgtcgttatgg

SEQ ID NO: 141862 - DNA, 25 bp, SARS Virus
cgctaggacaagacgtcgttatgga

SEQ ID NO: 141863 - DNA, 25 bp, SARS Virus
gctaggacaagtagtcgttatggac

SEQ ID NO: 141864 - DNA, 25 bp, SARS Virus
ctaggacaagtcatcgttatggact

SEQ ID NO: 141865 - DNA, 25 bp, SARS Virus
taggacaagtcgacgttatggactc

SEQ ID NO: 141866 - DNA, 25 bp, SARS Virus
aggacaagtcgtagttatggactct

SEQ ID NO: 141867 - DNA, 25 bp, SARS Virus
ggacaagtcgtcattatggactctc

SEQ ID NO: 141868 - DNA, 25 bp, SARS Virus
gacaagtcgtcgatatggactctca

SEQ ID NO: 141869 - DNA, 25 bp, SARS Virus
acaagtcgtcgtaatggactctcac

SEQ ID NO: 141870 - DNA, 25 bp, SARS Virus
caagtcgtcgttatggactctcacg

SEQ ID NO: 141871 - DNA, 25 bp, SARS Virus
aagtcgtcgttaaggactctcacgt

SEQ ID NO: 141872 - DNA, 25 bp, SARS Virus
agtcgtcgttatagactctcacgtg

SEQ ID NO: 141873 - DNA, 25 bp, SARS Virus
gtcgtcgttatgaactctcacgtgc

SEQ ID NO: 141874 - DNA, 25 bp, SARS Virus
tcgtcgttatggactctcacgtgct

SEQ ID NO: 141875 - DNA, 25 bp, SARS Virus
cgtcgttatggaatctcacgtgcta

SEQ ID NO: 141876 - DNA, 25 bp, SARS Virus
gtcgttatggacactcacgtgctaa

SEQ ID NO: 141877 - DNA, 25 bp, SARS Virus
tcgttatggactatcacgtgctaaa

SEQ ID NO: 141878 - DNA, 25 bp, SARS Virus
cgttatggactcacacgtgctaaat

SEQ ID NO: 141879 - DNA, 25 bp, SARS Virus
gttatggactctaacgtgctaaatc

SEQ ID NO: 141880 - DNA, 25 bp, SARS Virus
ttatggactctcacgtgctaaatca

SEQ ID NO: 141881 - DNA, 25 bp, SARS Virus
tatggactctcaagtgctaaatcaa

SEQ ID NO: 141882 - DNA, 25 bp, SARS Virus
atggactctcacatgctaaatcaac

SEQ ID NO: 141883 - DNA, 25 bp, SARS Virus
tggactctcacgagctaaatcaaca

SEQ ID NO: 141884 - DNA, 25 bp, SARS Virus
ggactctcacgtactaaatcaacac

SEQ ID NO: 141885 - DNA, 25 bp, SARS Virus
gactctcacgtgataaatcaacaca

SEQ ID NO: 141886 - DNA, 25 bp, SARS Virus
actctcacgtgcaaaatcaacacac

SEQ ID NO: 141887 - DNA, 25 bp, SARS Virus
ctctcacgtgctaaatcaacacacg

SEQ ID NO: 141888 - DNA, 25 bp, SARS Virus
tctcacgtgctaaatcaacacacgt

SEQ ID NO: 141889 - DNA, 25 bp, SARS Virus
ctcacgtgctaaatcaacacacgtt

SEQ ID NO: 141890 - DNA, 25 bp, SARS Virus
tcacgtgctaaaacaacacacgttt

SEQ ID NO: 141891 - DNA, 25 bp, SARS Virus
cacgtgctaaataaacacacgtttt

SEQ ID NO: 141892 - DNA, 25 bp, SARS Virus
acgtgctaaatcaacacacgttttc

SEQ ID NO: 141893 - DNA, 25 bp, SARS Virus
cgtgctaaatcaacacacgttttcg

SEQ ID NO: 141894 - DNA, 25 bp, SARS Virus
gtgctaaatcaaaacacgttttcga

SEQ ID NO: 141895 - DNA, 25 bp, SARS Virus
tgctaaatcaacacacgttttcgat

SEQ ID NO: 141896 - DNA, 25 bp, SARS Virus
gctaaatcaacaaacgttttcgatg

SEQ ID NO: 141897 - DNA, 25 bp, SARS Virus
ctaaatcaacacacgttttcgatgg

SEQ ID NO: 141898 - DNA, 25 bp, SARS Virus
taaatcaacacaagttttcgatggt

SEQ ID NO: 141899 - DNA, 25 bp, SARS Virus
aaatcaacacacattttcgatggta

SEQ ID NO: 141900 - DNA, 25 bp, SARS Virus
aatcaacacacgatttcgatggtat

SEQ ID NO: 141901 - DNA, 25 bp, SARS Virus
atcaacacacgtattcgatggtata

SEQ ID NO: 141902 - DNA, 25 bp, SARS Virus
tcaacacacgttatcgatggtataa

SEQ ID NO: 141903 - DNA, 25 bp, SARS Virus
caacacacgtttacgatggtataac

SEQ ID NO: 141904 - DNA, 25 bp, SARS Virus
aacacacgttttagatggtataacc

SEQ ID NO: 141905 - DNA, 25 bp, SARS Virus
acacacgttttcaatggtataacct

SEQ ID NO: 141906 - DNA, 25 bp, SARS Virus
cacacgttttcgatggtataacctc

SEQ ID NO: 141907 - DNA, 25 bp, SARS Virus
acacgttttcgaaggtataacctct

SEQ ID NO: 141908 - DNA, 25 bp, SARS Virus
cacgttttcgatagtataacctctt

SEQ ID NO: 141909 - DNA, 25 bp, SARS Virus
acgttttcgatgatataacctcttc

SEQ ID NO: 141910 - DNA, 25 bp, SARS Virus
cgttttcgatggaataacctcttcg

SEQ ID NO: 141911 - DNA, 25 bp, SARS Virus
gttttcgatggtataacctcttcgt

SEQ ID NO: 141912 - DNA, 25 bp, SARS Virus
ttttcgatggtaaaacctcttcgtt

SEQ ID NO: 141913 - DNA, 25 bp, SARS Virus
tttcgatggtataacctcttcgttt

SEQ ID NO: 141914 - DNA, 25 bp, SARS Virus
ttcgatggtataacctcttcgttta

SEQ ID NO: 141915 - DNA, 25 bp, SARS Virus
tcgatggtataaactcttcgtttaa

SEQ ID NO: 141916 - DNA, 25 bp, SARS Virus
cgatggtataacatcttcgtttaat

SEQ ID NO: 141917 - DNA, 25 bp, SARS Virus
gatggtataaccacttcgtttaatc

SEQ ID NO: 141918 - DNA, 25 bp, SARS Virus
atggtataacctattcgtttaatcg

SEQ ID NO: 141919 - DNA, 25 bp, SARS Virus
tggtataacctcatcgtttaatcgt

SEQ ID NO: 141920 - DNA, 25 bp, SARS Virus
ggtataacctctacgtttaatcgtg

SEQ ID NO: 141921 - DNA, 25 bp, SARS Virus
gtataacctcttagtttaatcgtgt

SEQ ID NO: 141922 - DNA, 25 bp, SARS Virus
tataacctcttcatttaatcgtgta

SEQ ID NO: 141923 - DNA, 25 bp, SARS Virus
ataacctcttcgattaatcgtgtaa

SEQ ID NO: 141924 - DNA, 25 bp, SARS Virus
taacctcttcgtataatcgtgtaag

SEQ ID NO: 141925 - DNA, 25 bp, SARS Virus
aacctcttcgttaaatcgtgtaagt

SEQ ID NO: 141926 - DNA, 25 bp, SARS Virus
acctcttcgtttaatcgtgtaagtc

SEQ ID NO: 141927 - DNA, 25 bp, SARS Virus
cctcttcgtttaatcgtgtaagtca

SEQ ID NO: 141928 - DNA, 25 bp, SARS Virus
ctcttcgtttaaacgtgtaagtcat

SEQ ID NO: 141929 - DNA, 25 bp, SARS Virus
tcttcgtttaatagtgtaagtcatc

SEQ ID NO: 141930 - DNA, 25 bp, SARS Virus
cttcgtttaatcatgtaagtcatct

SEQ ID NO: 141931 - DNA, 25 bp, SARS Virus
ttcgtttaatcgagtaagtcatctt

SEQ ID NO: 141932 - DNA, 25 bp, SARS Virus
tcgtttaatcgtataagtcatctta

SEQ ID NO: 141933 - DNA, 25 bp, SARS Virus
cgtttaatcgtgaaagtcatcttag

SEQ ID NO: 141934 - DNA, 25 bp, SARS Virus
gtttaatcgtgtaagtcatcttaga

SEQ ID NO: 141935 - DNA, 25 bp, SARS Virus
tttaatcgtgtaagtcatcttagag

SEQ ID NO: 141936 - DNA, 25 bp, SARS Virus
ttaatcgtgtaaatcatcttagagg

SEQ ID NO: 141937 - DNA, 25 bp, SARS Virus
taatcgtgtaagacatcttagaggc

SEQ ID NO: 141938 - DNA, 25 bp, SARS Virus
aatcgtgtaagtaatcttagaggcg

SEQ ID NO: 141939 - DNA, 25 bp, SARS Virus
atcgtgtaagtcatcttagaggcgt

SEQ ID NO: 141940 - DNA, 25 bp, SARS Virus
tcgtgtaagtcaacttagaggcgtc

SEQ ID NO: 141941 - DNA, 25 bp, SARS Virus
cgtgtaagtcatattagaggcgtct

SEQ ID NO: 141942 - DNA, 25 bp, SARS Virus
gtgtaagtcatcatagaggcgtcta

SEQ ID NO: 141943 - DNA, 25 bp, SARS Virus
tgtaagtcatctaagaggcgtctac

SEQ ID NO: 141944 - DNA, 25 bp, SARS Virus
gtaagtcatcttagaggcgtctaca

SEQ ID NO: 141945 - DNA, 25 bp, SARS Virus
taagtcatcttaaaggcgtctacat

SEQ ID NO: 141946 - DNA, 25 bp, SARS Virus
aagtcatcttagaggcgtctacatg

SEQ ID NO: 141947 - DNA, 25 bp, SARS Virus
agtcatcttagaagcgtctacatgt

SEQ ID NO: 141948 - DNA, 25 bp, SARS Virus
gtcatcttagagacgtctacatgta

SEQ ID NO: 141949 - DNA, 25 bp, SARS Virus
tcatcttagaggagtctacatgtat

SEQ ID NO: 141950 - DNA, 25 bp, SARS Virus
catcttagaggcatctacatgtata

SEQ ID NO: 141951 - DNA, 25 bp, SARS Virus
atcttagaggcgactacatgtataa

SEQ ID NO: 141952 - DNA, 25 bp, SARS Virus
tcttagaggcgtatacatgtataat

SEQ ID NO: 141953 - DNA, 25 bp, SARS Virus
cttagaggcgtcaacatgtataatg

SEQ ID NO: 141954 - DNA, 25 bp, SARS Virus
ttagaggcgtctacatgtataatgt

SEQ ID NO: 141955 - DNA, 25 bp, SARS Virus
tagaggcgtctaaatgtataatgtt

SEQ ID NO: 141956 - DNA, 25 bp, SARS Virus
agaggcgtctacatgtataatgtta

SEQ ID NO: 141957 - DNA, 25 bp, SARS Virus
gaggcgtctacaagtataatgttag

SEQ ID NO: 141958 - DNA, 25 bp, SARS Virus
aggcgtctacatatataatgttaga

SEQ ID NO: 141959 - DNA, 25 bp, SARS Virus
ggcgtctacatgaataatgttagat

SEQ ID NO: 141960 - DNA, 25 bp, SARS Virus
gcgtctacatgtataatgttagatg

SEQ ID NO: 141961 - DNA, 25 bp, SARS Virus
cgtctacatgtaaaatgttagatgc

SEQ ID NO: 141962 - DNA, 25 bp, SARS Virus
gtctacatgtataatgttagatgcc

SEQ ID NO: 141963 - DNA, 25 bp, SARS Virus
tctacatgtataatgttagatgcct

SEQ ID NO: 141964 - DNA, 25 bp, SARS Virus
ctacatgtataaagttagatgcctc

SEQ ID NO: 141965 - DNA, 25 bp, SARS Virus
tacatgtataatattagatgcctcc

SEQ ID NO: 141966 - DNA, 25 bp, SARS Virus
acatgtataatgatagatgcctcca

SEQ ID NO: 141967 - DNA, 25 bp, SARS Virus
catgtataatgtaagatgcctccaa

SEQ ID NO: 141968 - DNA, 25 bp, SARS Virus
atgtataatgttagatgcctccaaa

SEQ ID NO: 141969 - DNA, 25 bp, SARS Virus
tgtataatgttaaatgcctccaaaa

SEQ ID NO: 141970 - DNA, 25 bp, SARS Virus
gtataatgttagatgcctccaaaat

SEQ ID NO: 141971 - DNA, 25 bp, SARS Virus
tataatgttagaagcctccaaaatc

SEQ ID NO: 141972 - DNA, 25 bp, SARS Virus
ataatgttagatacctccaaaatcg

SEQ ID NO: 141973 - DNA, 25 bp, SARS Virus
taatgttagatgactccaaaatcgg

SEQ ID NO: 141974 - DNA, 25 bp, SARS Virus
aatgttagatgcatccaaaatcggt

SEQ ID NO: 141975 - DNA, 25 bp, SARS Virus
atgttagatgccaccaaaatcggta

SEQ ID NO: 141976 - DNA, 25 bp, SARS Virus
tgttagatgcctacaaaatcggtat

SEQ ID NO: 141977 - DNA, 25 bp, SARS Virus
gttagatgcctcaaaaatcggtatc

SEQ ID NO: 141978 - DNA, 25 bp, SARS Virus
ttagatgcctccaaaatcggtatct

SEQ ID NO: 141979 - DNA, 25 bp, SARS Virus
tagatgcctccaaaatcggtatctt

SEQ ID NO: 141980 - DNA, 25 bp, SARS Virus
agatgcctccaaaatcggtatcttt

SEQ ID NO: 141981 - DNA, 25 bp, SARS Virus
gatgcctccaaaatcggtatctttg

SEQ ID NO: 141982 - DNA, 25 bp, SARS Virus
atgcctccaaaaacggtatctttgt

SEQ ID NO: 141983 - DNA, 25 bp, SARS Virus
tgcctccaaaataggtatctttgtc

SEQ ID NO: 141984 - DNA, 25 bp, SARS Virus
gcctccaaaatcagtatctttgtcc

SEQ ID NO: 141985 - DNA, 25 bp, SARS Virus
cctccaaaatcgatatctttgtccg

SEQ ID NO: 141986 - DNA, 25 bp, SARS Virus
ctccaaaatcggaatctttgtccgt

SEQ ID NO: 141987 - DNA, 25 bp, SARS Virus
tccaaaatcggtatctttgtccgta

SEQ ID NO: 141988 - DNA, 25 bp, SARS Virus
ccaaaatcggtaactttgtccgtaa

SEQ ID NO: 141989 - DNA, 25 bp, SARS Virus
caaaatcggtatatttgtccgtaat

SEQ ID NO: 141990 - DNA, 25 bp, SARS Virus
aaaatcggtatcattgtccgtaatg

SEQ ID NO: 141991 - DNA, 25 bp, SARS Virus
aaatcggtatctatgtccgtaatga

SEQ ID NO: 141992 - DNA, 25 bp, SARS Virus
aatcggtatcttagtccgtaatgaa

SEQ ID NO: 141993 - DNA, 25 bp, SARS Virus
atcggtatctttatccgtaatgaag

SEQ ID NO: 141994 - DNA, 25 bp, SARS Virus
tcggtatctttgaccgtaatgaaga

SEQ ID NO: 141995 - DNA, 25 bp, SARS Virus
cggtatctttgtacgtaatgaagac

SEQ ID NO: 141996 - DNA, 25 bp, SARS Virus
ggtatctttgtcagtaatgaagaca

SEQ ID NO: 141997 - DNA, 25 bp, SARS Virus
gtatctttgtccataatgaagacat

SEQ ID NO: 141998 - DNA, 25 bp, SARS Virus
tatctttgtccgaaatgaagacatc

SEQ ID NO: 141999 - DNA, 25 bp, SARS Virus
atctttgtccgtaatgaagacatca

SEQ ID NO: 142000 - DNA, 25 bp, SARS Virus
tctttgtccgtaatgaagacatcat

SEQ ID NO: 142001 - DNA, 25 bp, SARS Virus
ctttgtccgtaaagaagacatcatt

SEQ ID NO: 142002 - DNA, 25 bp, SARS Virus
tttgtccgtaataaagacatcatta

SEQ ID NO: 142003 - DNA, 25 bp, SARS Virus
ttgtccgtaatgaagacatcattac

SEQ ID NO: 142004 - DNA, 25 bp, SARS Virus
tgtccgtaatgaagacatcattacg

SEQ ID NO: 142005 - DNA, 25 bp, SARS Virus
gtccgtaatgaaaacatcattacga

SEQ ID NO: 142006 - DNA, 25 bp, SARS Virus
tccgtaatgaagacatcattacgat

SEQ ID NO: 142007 - DNA, 25 bp, SARS Virus
ccgtaatgaagaaatcattacgatt

SEQ ID NO: 142008 - DNA, 25 bp, SARS Virus
cgtaatgaagacatcattacgatta

SEQ ID NO: 142009 - DNA, 25 bp, SARS Virus
gtaatgaagacaacattacgattaa

SEQ ID NO: 142010 - DNA, 25 bp, SARS Virus
taatgaagacataattacgattaac

SEQ ID NO: 142011 - DNA, 25 bp, SARS Virus
aatgaagacatcattacgattaact

SEQ ID NO: 142012 - DNA, 25 bp, SARS Virus
atgaagacatcaatacgattaactt

SEQ ID NO: 142013 - DNA, 25 bp, SARS Virus
tgaagacatcataacgattaacttt

SEQ ID NO: 142014 - DNA, 25 bp, SARS Virus
gaagacatcattacgattaactttt

SEQ ID NO: 142015 - DNA, 25 bp, SARS Virus
aagacatcattaagattaacttttc

SEQ ID NO: 142016 - DNA, 25 bp, SARS Virus
agacatcattacaattaacttttca

SEQ ID NO: 142017 - DNA, 25 bp, SARS Virus
gacatcattacgattaacttttcaa

SEQ ID NO: 142018 - DNA, 25 bp, SARS Virus
acatcattacgaataacttttcaat

SEQ ID NO: 142019 - DNA, 25 bp, SARS Virus
catcattacgataaacttttcaatc

SEQ ID NO: 142020 - DNA, 25 bp, SARS Virus
atcattacgattaacttttcaatca

SEQ ID NO: 142021 - DNA, 25 bp, SARS Virus
tcattacgattaacttttcaatcat

SEQ ID NO: 142022 - DNA, 25 bp, SARS Virus
cattacgattaaattttcaatcatc

SEQ ID NO: 142023 - DNA, 25 bp, SARS Virus
attacgattaacatttcaatcatcc

SEQ ID NO: 142024 - DNA, 25 bp, SARS Virus
ttacgattaactattcaatcatcca

SEQ ID NO: 142025 - DNA, 25 bp, SARS Virus
tacgattaacttatcaatcatccat

SEQ ID NO: 142026 - DNA, 25 bp, SARS Virus
acgattaactttacaatcatccata

SEQ ID NO: 142027 - DNA, 25 bp, SARS Virus
cgattaacttttaaatcatccatat

SEQ ID NO: 142028 - DNA, 25 bp, SARS Virus
gattaacttttcaatcatccatatc

SEQ ID NO: 142029 - DNA, 25 bp, SARS Virus
attaacttttcaatcatccatatcg

SEQ ID NO: 142030 - DNA, 25 bp, SARS Virus
ttaacttttcaaacatccatatcgt

SEQ ID NO: 142031 - DNA, 25 bp, SARS Virus
taacttttcaataatccatatcgtt

SEQ ID NO: 142032 - DNA, 25 bp, SARS Virus
aacttttcaatcatccatatcgtta

SEQ ID NO: 142033 - DNA, 25 bp, SARS Virus
acttttcaatcaaccatatcgttac

SEQ ID NO: 142034 - DNA, 25 bp, SARS Virus
cttttcaatcatacatatcgttacc

SEQ ID NO: 142035 - DNA, 25 bp, SARS Virus
ttttcaatcatcaatatcgttacca

SEQ ID NO: 142036 - DNA, 25 bp, SARS Virus
tttcaatcatccatatcgttaccac

SEQ ID NO: 142037 - DNA, 25 bp, SARS Virus
ttcaatcatccaaatcgttaccaca

SEQ ID NO: 142038 - DNA, 25 bp, SARS Virus
tcaatcatccatatcgttaccacaa

SEQ ID NO: 142039 - DNA, 25 bp, SARS Virus
caatcatccataacgttaccacaat

SEQ ID NO: 142040 - DNA, 25 bp, SARS Virus
aatcatccatatagttaccacaata

SEQ ID NO: 142041 - DNA, 25 bp, SARS Virus
tgattgatctcgccgtcacatccgt

SEQ ID NO: 142042 - DNA, 25 bp, SARS Virus
gattgatctcgtcgtcacatccgtc

SEQ ID NO: 142043 - DNA, 25 bp, SARS Virus
attgatctcgtcctcacatccgtcg

SEQ ID NO: 142044 - DNA, 25 bp, SARS Virus
ttgatctcgtcgccacatccgtcgt

SEQ ID NO: 142045 - DNA, 25 bp, SARS Virus
tgatctcgtcgtcacatccgtcgtt

SEQ ID NO: 142046 - DNA, 25 bp, SARS Virus
gatctcgtcgtcccatccgtcgtta

SEQ ID NO: 142047 - DNA, 25 bp, SARS Virus
atctcgtcgtcacatccgtcgttag

SEQ ID NO: 142048 - DNA, 25 bp, SARS Virus
tctcgtcgtcacctccgtcgttagt

SEQ ID NO: 142049 - DNA, 25 bp, SARS Virus
ctcgtcgtcacacccgtcgttagta

SEQ ID NO: 142050 - DNA, 25 bp, SARS Virus
tcgtcgtcacatccgtcgttagtat

SEQ ID NO: 142051 - DNA, 25 bp, SARS Virus
cgtcgtcacatccgtcgttagtata

SEQ ID NO: 142052 - DNA, 25 bp, SARS Virus
gtcgtcacatccctcgttagtatag

SEQ ID NO: 142053 - DNA, 25 bp, SARS Virus
tcgtcacatccgccgttagtatagt

SEQ ID NO: 142054 - DNA, 25 bp, SARS Virus
cgtcacatccgtcgttagtatagta

SEQ ID NO: 142055 - DNA, 25 bp, SARS Virus
gtcacatccgtccttagtatagtag

SEQ ID NO: 142056 - DNA, 25 bp, SARS Virus
tcacatccgtcgctagtatagtagt

SEQ ID NO: 142057 - DNA, 25 bp, SARS Virus
cacatccgtcgtcagtatagtagtc

SEQ ID NO: 142058 - DNA, 25 bp, SARS Virus
acatccgtcgttcgtatagtagtca

SEQ ID NO: 142059 - DNA, 25 bp, SARS Virus
catccgtcgttactatagtagtcac

SEQ ID NO: 142060 - DNA, 25 bp, SARS Virus
atccgtcgttagcatagtagtcact

SEQ ID NO: 142061 - DNA, 25 bp, SARS Virus
tccgtcgttagtctagtagtcactc

SEQ ID NO: 142062 - DNA, 25 bp, SARS Virus
ccgtcgttagtacagtagtcactcg

SEQ ID NO: 142063 - DNA, 25 bp, SARS Virus
cgtcgttagtatcgtagtcactcgt

SEQ ID NO: 142064 - DNA, 25 bp, SARS Virus
gtcgttagtatactagtcactcgtc

SEQ ID NO: 142065 - DNA, 25 bp, SARS Virus
tcgttagtatagcagtcactcgtct

SEQ ID NO: 142066 - DNA, 25 bp, SARS Virus
cgttagtatagtcgtcactcgtctc

SEQ ID NO: 142067 - DNA, 25 bp, SARS Virus
gttagtatagtactcactcgtctcc

SEQ ID NO: 142068 - DNA, 25 bp, SARS Virus
ttagtatagtagccactcgtctcca

SEQ ID NO: 142069 - DNA, 25 bp, SARS Virus
tagtatagtagtcactcgtctccac

SEQ ID NO: 142070 - DNA, 25 bp, SARS Virus
agtatagtagtccctcgtctccacc

SEQ ID NO: 142071 - DNA, 25 bp, SARS Virus
gtatagtagtcactcgtctccaccg

SEQ ID NO: 142072 - DNA, 25 bp, SARS Virus
tatagtagtcacccgtctccaccgt

SEQ ID NO: 142073 - DNA, 25 bp, SARS Virus
atagtagtcactcgtctccaccgtt

SEQ ID NO: 142074 - DNA, 25 bp, SARS Virus
tagtagtcactcctctccaccgttg

SEQ ID NO: 142075 - DNA, 25 bp, SARS Virus
agtagtcactcgcctccaccgttgt

SEQ ID NO: 142076 - DNA, 25 bp, SARS Virus
gtagtcactcgtctccaccgttgtg

SEQ ID NO: 142077 - DNA, 25 bp, SARS Virus
tagtcactcgtccccaccgttgtga

SEQ ID NO: 142078 - DNA, 25 bp, SARS Virus
agtcactcgtctccaccgttgtgac

SEQ ID NO: 142079 - DNA, 25 bp, SARS Virus
gtcactcgtctccaccgttgtgaca

SEQ ID NO: 142080 - DNA, 25 bp, SARS Virus
tcactcgtctcccccgttgtgacat

SEQ ID NO: 142081 - DNA, 25 bp, SARS Virus
cactcgtctccaccgttgtgacatt

SEQ ID NO: 142082 - DNA, 25 bp, SARS Virus
actcgtctccaccgttgtgacattc

SEQ ID NO: 142083 - DNA, 25 bp, SARS Virus
ctcgtctccacccttgtgacattca

SEQ ID NO: 142084 - DNA, 25 bp, SARS Virus
tcgtctccaccgctgtgacattcag

SEQ ID NO: 142085 - DNA, 25 bp, SARS Virus
cgtctccaccgtcgtgacattcagg

SEQ ID NO: 142086 - DNA, 25 bp, SARS Virus
gtctccaccgttctgacattcaggt

SEQ ID NO: 142087 - DNA, 25 bp, SARS Virus
tctccaccgttgcgacattcaggta

SEQ ID NO: 142088 - DNA, 25 bp, SARS Virus
ctccaccgttgtcacattcaggtaa

SEQ ID NO: 142089 - DNA, 25 bp, SARS Virus
tccaccgttgtgccattcaggtaac

SEQ ID NO: 142090 - DNA, 25 bp, SARS Virus
ccaccgttgtgacattcaggtaact

SEQ ID NO: 142091 - DNA, 25 bp, SARS Virus
caccgttgtgaccttcaggtaactt

SEQ ID NO: 142092 - DNA, 25 bp, SARS Virus
accgttgtgacactcaggtaacttg

SEQ ID NO: 142093 - DNA, 25 bp, SARS Virus
ccgttgtgacatccaggtaacttga

SEQ ID NO: 142094 - DNA, 25 bp, SARS Virus
cgttgtgacattcaggtaacttgaa

SEQ ID NO: 142095 - DNA, 25 bp, SARS Virus
gttgtgacattccggtaacttgaag

SEQ ID NO: 142096 - DNA, 25 bp, SARS Virus
ttgtgacattcacgtaacttgaaga

SEQ ID NO: 142097 - DNA, 25 bp, SARS Virus
tgtgacattcagctaacttgaagac

SEQ ID NO: 142098 - DNA, 25 bp, SARS Virus
gtgacattcaggcaacttgaagacg

SEQ ID NO: 142099 - DNA, 25 bp, SARS Virus
tgacattcaggtcacttgaagacgc

SEQ ID NO: 142100 - DNA, 25 bp, SARS Virus
gacattcaggtaccttgaagacgcg

SEQ ID NO: 142101 - DNA, 25 bp, SARS Virus
acattcaggtaacttgaagacgcgt

SEQ ID NO: 142102 - DNA, 25 bp, SARS Virus
cattcaggtaacctgaagacgcgtg

SEQ ID NO: 142103 - DNA, 25 bp, SARS Virus
attcaggtaactcgaagacgcgtgt

SEQ ID NO: 142104 - DNA, 25 bp, SARS Virus
ttcaggtaacttcaagacgcgtgtt

SEQ ID NO: 142105 - DNA, 25 bp, SARS Virus
tcaggtaacttgcagacgcgtgttt

SEQ ID NO: 142106 - DNA, 25 bp, SARS Virus
caggtaacttgacgacgcgtgttta

SEQ ID NO: 142107 - DNA, 25 bp, SARS Virus
aggtaacttgaacacgcgtgtttac

SEQ ID NO: 142108 - DNA, 25 bp, SARS Virus
ggtaacttgaagccgcgtgtttact

SEQ ID NO: 142109 - DNA, 25 bp, SARS Virus
gtaacttgaagacgcgtgtttactc

SEQ ID NO: 142110 - DNA, 25 bp, SARS Virus
taacttgaagacccgtgtttactct

SEQ ID NO: 142111 - DNA, 25 bp, SARS Virus
aacttgaagacgcgtgtttactcta

SEQ ID NO: 142112 - DNA, 25 bp, SARS Virus
acttgaagacgcctgtttactctag

SEQ ID NO: 142113 - DNA, 25 bp, SARS Virus
cttgaagacgcgcgtttactctaga

SEQ ID NO: 142114 - DNA, 25 bp, SARS Virus
ttgaagacgcgtctttactctagag

SEQ ID NO: 142115 - DNA, 25 bp, SARS Virus
tgaagacgcgtgcttactctagaga

SEQ ID NO: 142116 - DNA, 25 bp, SARS Virus
gaagacgcgtgtctactctagagat

SEQ ID NO: 142117 - DNA, 25 bp, SARS Virus
aagacgcgtgttcactctagagatc

SEQ ID NO: 142118 - DNA, 25 bp, SARS Virus
agacgcgtgtttcctctagagatcg

SEQ ID NO: 142119 - DNA, 25 bp, SARS Virus
gacgcgtgtttactctagagatcgt

SEQ ID NO: 142120 - DNA, 25 bp, SARS Virus
acgcgtgtttaccctagagatcgta

SEQ ID NO: 142121 - DNA, 25 bp, SARS Virus
cgcgtgtttactctagagatcgtaa

SEQ ID NO: 142122 - DNA, 25 bp, SARS Virus
gcgtgtttactccagagatcgtaat

SEQ ID NO: 142123 - DNA, 25 bp, SARS Virus
cgtgtttactctcgagatcgtaatt

SEQ ID NO: 142124 - DNA, 25 bp, SARS Virus
gtgtttactctacagatcgtaatta

SEQ ID NO: 142125 - DNA, 25 bp, SARS Virus
tgtttactctagcgatcgtaattat

SEQ ID NO: 142126 - DNA, 25 bp, SARS Virus
gtttactctagacatcgtaattata

SEQ ID NO: 142127 - DNA, 25 bp, SARS Virus
tttactctagagctcgtaattatag

SEQ ID NO: 142128 - DNA, 25 bp, SARS Virus
ttactctagagaccgtaattatagt

SEQ ID NO: 142129 - DNA, 25 bp, SARS Virus
tactctagagatcgtaattatagtg

SEQ ID NO: 142130 - DNA, 25 bp, SARS Virus
actctagagatcctaattatagtgg

SEQ ID NO: 142131 - DNA, 25 bp, SARS Virus
ctctagagatcgcaattatagtgga

SEQ ID NO: 142132 - DNA, 25 bp, SARS Virus
tctagagatcgtcattatagtggat

SEQ ID NO: 142133 - DNA, 25 bp, SARS Virus
ctagagatcgtacttatagtggatc

SEQ ID NO: 142134 - DNA, 25 bp, SARS Virus
tagagatcgtaactatagtggatcc

SEQ ID NO: 142135 - DNA, 25 bp, SARS Virus
agagatcgtaatcatagtggatccg

SEQ ID NO: 142136 - DNA, 25 bp, SARS Virus
gagatcgtaattctagtggatccgt

SEQ ID NO: 142137 - DNA, 25 bp, SARS Virus
agatcgtaattacagtggatccgta

SEQ ID NO: 142138 - DNA, 25 bp, SARS Virus
gatcgtaattatcgtggatccgtaa

SEQ ID NO: 142139 - DNA, 25 bp, SARS Virus
atcgtaattatactggatccgtaag

SEQ ID NO: 142140 - DNA, 25 bp, SARS Virus
tcgtaattatagcggatccgtaagc

SEQ ID NO: 142141 - DNA, 25 bp, SARS Virus
cgtaattatagtcgatccgtaagcg

SEQ ID NO: 142142 - DNA, 25 bp, SARS Virus
gtaattatagtgcatccgtaagcgg

SEQ ID NO: 142143 - DNA, 25 bp, SARS Virus
taattatagtggctccgtaagcggt

SEQ ID NO: 142144 - DNA, 25 bp, SARS Virus
aattatagtggacccgtaagcggta

SEQ ID NO: 142145 - DNA, 25 bp, SARS Virus
attatagtggatccgtaagcggtat

SEQ ID NO: 142146 - DNA, 25 bp, SARS Virus
ttatagtggatccgtaagcggtata

SEQ ID NO: 142147 - DNA, 25 bp, SARS Virus
tatagtggatccctaagcggtataa

SEQ ID NO: 142148 - DNA, 25 bp, SARS Virus
atagtggatccgcaagcggtataac

SEQ ID NO: 142149 - DNA, 25 bp, SARS Virus
tagtggatccgtcagcggtataacg

SEQ ID NO: 142150 - DNA, 25 bp, SARS Virus
agtggatccgtacgcggtataacga

SEQ ID NO: 142151 - DNA, 25 bp, SARS Virus
gtggatccgtaaccggtataacgaa

SEQ ID NO: 142152 - DNA, 25 bp, SARS Virus
tggatccgtaagcggtataacgaag

SEQ ID NO: 142153 - DNA, 25 bp, SARS Virus
ggatccgtaagccgtataacgaagt

SEQ ID NO: 142154 - DNA, 25 bp, SARS Virus
gatccgtaagcgctataacgaagta

SEQ ID NO: 142155 - DNA, 25 bp, SARS Virus
atccgtaagcggcataacgaagtac

SEQ ID NO: 142156 - DNA, 25 bp, SARS Virus
tccgtaagcggtctaacgaagtact

SEQ ID NO: 142157 - DNA, 25 bp, SARS Virus
ccgtaagcggtacaacgaagtactt

SEQ ID NO: 142158 - DNA, 25 bp, SARS Virus
cgtaagcggtatcacgaagtacttc

SEQ ID NO: 142159 - DNA, 25 bp, SARS Virus
gtaagcggtataccgaagtacttcg

SEQ ID NO: 142160 - DNA, 25 bp, SARS Virus
taagcggtataacgaagtacttcgg

SEQ ID NO: 142161 - DNA, 25 bp, SARS Virus
aagcggtataaccaagtacttcggt

SEQ ID NO: 142162 - DNA, 25 bp, SARS Virus
agcggtataacgcagtacttcggtc

SEQ ID NO: 142163 - DNA, 25 bp, SARS Virus
gcggtataacgacgtacttcggtcg

SEQ ID NO: 142164 - DNA, 25 bp, SARS Virus
cggtataacgaactacttcggtcgt

SEQ ID NO: 142165 - DNA, 25 bp, SARS Virus
ggtataacgaagcacttcggtcgta

SEQ ID NO: 142166 - DNA, 25 bp, SARS Virus
gtataacgaagtccttcggtcgtag

SEQ ID NO: 142167 - DNA, 25 bp, SARS Virus
tataacgaagtacttcggtcgtagt

SEQ ID NO: 142168 - DNA, 25 bp, SARS Virus
ataacgaagtacctcggtcgtagtc

SEQ ID NO: 142169 - DNA, 25 bp, SARS Virus
taacgaagtactccggtcgtagtcg

SEQ ID NO: 142170 - DNA, 25 bp, SARS Virus
aacgaagtacttcggtcgtagtcgc

SEQ ID NO: 142171 - DNA, 25 bp, SARS Virus
acgaagtacttccgtcgtagtcgct

SEQ ID NO: 142172 - DNA, 25 bp, SARS Virus
cgaagtacttcgctcgtagtcgctc

SEQ ID NO: 142173 - DNA, 25 bp, SARS Virus
gaagtacttcggccgtagtcgctca

SEQ ID NO: 142174 - DNA, 25 bp, SARS Virus
aagtacttcggtcgtagtcgctcac

SEQ ID NO: 142175 - DNA, 25 bp, SARS Virus
agtacttcggtcctagtcgctcaca

SEQ ID NO: 142176 - DNA, 25 bp, SARS Virus
gtacttcggtcgcagtcgctcacag

SEQ ID NO: 142177 - DNA, 25 bp, SARS Virus
tacttcggtcgtcgtcgctcacagt

SEQ ID NO: 142178 - DNA, 25 bp, SARS Virus
acttcggtcgtactcgctcacagtg

SEQ ID NO: 142179 - DNA, 25 bp, SARS Virus
cttcggtcgtagccgctcacagtgg

SEQ ID NO: 142180 - DNA, 25 bp, SARS Virus
ttcggtcgtagtcgctcacagtgga

SEQ ID NO: 142181 - DNA, 25 bp, SARS Virus
tcggtcgtagtccctcacagtggaa

SEQ ID NO: 142182 - DNA, 25 bp, SARS Virus
cggtcgtagtcgctcacagtggaat

SEQ ID NO: 142183 - DNA, 25 bp, SARS Virus
ggtcgtagtcgcccacagtggaata

SEQ ID NO: 142184 - DNA, 25 bp, SARS Virus
gtcgtagtcgctcacagtggaataa

SEQ ID NO: 142185 - DNA, 25 bp, SARS Virus
tcgtagtcgctcccagtggaataat

SEQ ID NO: 142186 - DNA, 25 bp, SARS Virus
cgtagtcgctcacagtggaataatt

SEQ ID NO: 142187 - DNA, 25 bp, SARS Virus
gtagtcgctcaccgtggaataattt

SEQ ID NO: 142188 - DNA, 25 bp, SARS Virus
tagtcgctcacactggaataatttc

SEQ ID NO: 142189 - DNA, 25 bp, SARS Virus
agtcgctcacagcggaataatttct

SEQ ID NO: 142190 - DNA, 25 bp, SARS Virus
gtcgctcacagtcgaataatttctc

SEQ ID NO: 142191 - DNA, 25 bp, SARS Virus
tcgctcacagtgcaataatttctcg

SEQ ID NO: 142192 - DNA, 25 bp, SARS Virus
cgctcacagtggcataatttctcgt

SEQ ID NO: 142193 - DNA, 25 bp, SARS Virus
gctcacagtggactaatttctcgtt

SEQ ID NO: 142194 - DNA, 25 bp, SARS Virus
ctcacagtggaacaatttctcgttc

SEQ ID NO: 142195 - DNA, 25 bp, SARS Virus
tcacagtggaatcatttctcgttca

SEQ ID NO: 142196 - DNA, 25 bp, SARS Virus
cacagtggaatactttctcgttcag

SEQ ID NO: 142197 - DNA, 25 bp, SARS Virus
acagtggaataacttctcgttcagg

SEQ ID NO: 142198 - DNA, 25 bp, SARS Virus
cagtggaataatctctcgttcagga

SEQ ID NO: 142199 - DNA, 25 bp, SARS Virus
agtggaataattcctcgttcaggag

SEQ ID NO: 142200 - DNA, 25 bp, SARS Virus
gtggaataatttctcgttcaggagt

SEQ ID NO: 142201 - DNA, 25 bp, SARS Virus
tggaataatttcccgttcaggagtt

SEQ ID NO: 142202 - DNA, 25 bp, SARS Virus
ggaataatttctcgttcaggagtta

SEQ ID NO: 142203 - DNA, 25 bp, SARS Virus
gaataatttctccttcaggagttat

SEQ ID NO: 142204 - DNA, 25 bp, SARS Virus
aataatttctcgctcaggagttatt

SEQ ID NO: 142205 - DNA, 25 bp, SARS Virus
ataatttctcgtccaggagttattt

SEQ ID NO: 142206 - DNA, 25 bp, SARS Virus
taatttctcgttcaggagttatttt

SEQ ID NO: 142207 - DNA, 25 bp, SARS Virus
aatttctcgttccggagttattttc

SEQ ID NO: 142208 - DNA, 25 bp, SARS Virus
atttctcgttcacgagttattttct

SEQ ID NO: 142209 - DNA, 25 bp, SARS Virus
tttctcgttcagcagttattttctg

SEQ ID NO: 142210 - DNA, 25 bp, SARS Virus
ttctcgttcaggcgttattttctgg

SEQ ID NO: 142211 - DNA, 25 bp, SARS Virus
tctcgttcaggacttattttctgga

SEQ ID NO: 142212 - DNA, 25 bp, SARS Virus
ctcgttcaggagctattttctggag

SEQ ID NO: 142213 - DNA, 25 bp, SARS Virus
tcgttcaggagtcattttctggaga

SEQ ID NO: 142214 - DNA, 25 bp, SARS Virus
cgttcaggagttcttttctggagaa

SEQ ID NO: 142215 - DNA, 25 bp, SARS Virus
gttcaggagttactttctggagaat

SEQ ID NO: 142216 - DNA, 25 bp, SARS Virus
ttcaggagttatcttctggagaatc

SEQ ID NO: 142217 - DNA, 25 bp, SARS Virus
tcaggagttattctctggagaatca

SEQ ID NO: 142218 - DNA, 25 bp, SARS Virus
caggagttatttcctggagaatcaa

SEQ ID NO: 142219 - DNA, 25 bp, SARS Virus
aggagttattttctggagaatcaac

SEQ ID NO: 142220 - DNA, 25 bp, SARS Virus
ggagttattttccggagaatcaacc

SEQ ID NO: 142221 - DNA, 25 bp, SARS Virus
gagttattttctcgagaatcaaccg

SEQ ID NO: 142222 - DNA, 25 bp, SARS Virus
agttattttctgcagaatcaaccga

SEQ ID NO: 142223 - DNA, 25 bp, SARS Virus
gttattttctggcgaatcaaccgaa

SEQ ID NO: 142224 - DNA, 25 bp, SARS Virus
ttattttctggacaatcaaccgaaa

SEQ ID NO: 142225 - DNA, 25 bp, SARS Virus
tattttctggagcatcaaccgaaat

SEQ ID NO: 142226 - DNA, 25 bp, SARS Virus
attttctggagactcaaccgaaatc

SEQ ID NO: 142227 - DNA, 25 bp, SARS Virus
ttttctggagaaccaaccgaaatct

SEQ ID NO: 142228 - DNA, 25 bp, SARS Virus
tttctggagaatcaaccgaaatctc

SEQ ID NO: 142229 - DNA, 25 bp, SARS Virus
ttctggagaatccaccgaaatctcc

SEQ ID NO: 142230 - DNA, 25 bp, SARS Virus
tctggagaatcacccgaaatctccc

SEQ ID NO: 142231 - DNA, 25 bp, SARS Virus
ctggagaatcaaccgaaatctccca

SEQ ID NO: 142232 - DNA, 25 bp, SARS Virus
tggagaatcaaccgaaatctcccag

SEQ ID NO: 142233 - DNA, 25 bp, SARS Virus
ggagaatcaacccaaatctcccagt

SEQ ID NO: 142234 - DNA, 25 bp, SARS Virus
gagaatcaaccgcaatctcccagtc

SEQ ID NO: 142235 - DNA, 25 bp, SARS Virus
agaatcaaccgacatctcccagtcc

SEQ ID NO: 142236 - DNA, 25 bp, SARS Virus
gaatcaaccgaactctcccagtcca

SEQ ID NO: 142237 - DNA, 25 bp, SARS Virus
aatcaaccgaaacctcccagtccat

SEQ ID NO: 142238 - DNA, 25 bp, SARS Virus
atcaaccgaaatctcccagtccatt

SEQ ID NO: 142239 - DNA, 25 bp, SARS Virus
tcaaccgaaatcccccagtccatta

SEQ ID NO: 142240 - DNA, 25 bp, SARS Virus
caaccgaaatctcccagtccattat

SEQ ID NO: 142241 - DNA, 25 bp, SARS Virus
aaccgaaatctcccagtccattata

SEQ ID NO: 142242 - DNA, 25 bp, SARS Virus
accgaaatctcccagtccattataa

SEQ ID NO: 142243 - DNA, 25 bp, SARS Virus
ccgaaatctccccgtccattataaa

SEQ ID NO: 142244 - DNA, 25 bp, SARS Virus
cgaaatctcccactccattataaac

SEQ ID NO: 142245 - DNA, 25 bp, SARS Virus
gaaatctcccagcccattataaaca

SEQ ID NO: 142246 - DNA, 25 bp, SARS Virus
aaatctcccagtccattataaacac

SEQ ID NO: 142247 - DNA, 25 bp, SARS Virus
aatctcccagtccattataaacact

SEQ ID NO: 142248 - DNA, 25 bp, SARS Virus
atctcccagtcccttataaacactt

SEQ ID NO: 142249 - DNA, 25 bp, SARS Virus
tctcccagtccactataaacacttt

SEQ ID NO: 142250 - DNA, 25 bp, SARS Virus
ctcccagtccatcataaacactttt

SEQ ID NO: 142251 - DNA, 25 bp, SARS Virus
tcccagtccattctaaacacttttt

SEQ ID NO: 142252 - DNA, 25 bp, SARS Virus
cccagtccattacaaacacttttta

SEQ ID NO: 142253 - DNA, 25 bp, SARS Virus
ccagtccattatcaacactttttaa

SEQ ID NO: 142254 - DNA, 25 bp, SARS Virus
cagtccattatacacactttttaat

SEQ ID NO: 142255 - DNA, 25 bp, SARS Virus
agtccattataaccactttttaatt

SEQ ID NO: 142256 - DNA, 25 bp, SARS Virus
gtccattataaacactttttaattt

SEQ ID NO: 142257 - DNA, 25 bp, SARS Virus
tccattataaaccctttttaatttt

SEQ ID NO: 142258 - DNA, 25 bp, SARS Virus
ccattataaacactttttaattttg

SEQ ID NO: 142259 - DNA, 25 bp, SARS Virus
cattataaacaccttttaattttgg

SEQ ID NO: 142260 - DNA, 25 bp, SARS Virus
attataaacactctttaattttggt

SEQ ID NO: 142261 - DNA, 25 bp, SARS Virus
ttataaacacttcttaattttggtg

SEQ ID NO: 142262 - DNA, 25 bp, SARS Virus
tataaacactttctaattttggtgg

SEQ ID NO: 142263 - DNA, 25 bp, SARS Virus
ataaacacttttcaattttggtggt

SEQ ID NO: 142264 - DNA, 25 bp, SARS Virus
taaacactttttcattttggtggtt

SEQ ID NO: 142265 - DNA, 25 bp, SARS Virus
aaacactttttacttttggtggttt

SEQ ID NO: 142266 - DNA, 25 bp, SARS Virus
aacactttttaactttggtggtttt

SEQ ID NO: 142267 - DNA, 25 bp, SARS Virus
acactttttaatcttggtggtttta

SEQ ID NO: 142268 - DNA, 25 bp, SARS Virus
cactttttaattctggtggttttat

SEQ ID NO: 142269 - DNA, 25 bp, SARS Virus
actttttaatttcggtggttttata

SEQ ID NO: 142270 - DNA, 25 bp, SARS Virus
ctttttaattttcgtggttttataa

SEQ ID NO: 142271 - DNA, 25 bp, SARS Virus
tttttaattttgctggttttataaa

SEQ ID NO: 142272 - DNA, 25 bp, SARS Virus
ttttaattttggcggttttataaag

SEQ ID NO: 142273 - DNA, 25 bp, SARS Virus
tttaattttggtcgttttataaagt

SEQ ID NO: 142274 - DNA, 25 bp, SARS Virus
ttaattttggtgcttttataaagtt

SEQ ID NO: 142275 - DNA, 25 bp, SARS Virus
taattttggtggctttataaagttt

SEQ ID NO: 142276 - DNA, 25 bp, SARS Virus
aattttggtggtcttataaagtttc

SEQ ID NO: 142277 - DNA, 25 bp, SARS Virus
attttggtggttctataaagtttca

SEQ ID NO: 142278 - DNA, 25 bp, SARS Virus
ttttggtggtttcataaagtttcaa

SEQ ID NO: 142279 - DNA, 25 bp, SARS Virus
tttggtggttttctaaagtttcaac

SEQ ID NO: 142280 - DNA, 25 bp, SARS Virus
ttggtggttttacaaagtttcaacc

SEQ ID NO: 142281 - DNA, 25 bp, SARS Virus
tggtggttttatcaagtttcaaccc

SEQ ID NO: 142282 - DNA, 25 bp, SARS Virus
ggtggttttatacagtttcaacccc

SEQ ID NO: 142283 - DNA, 25 bp, SARS Virus
gtggttttataacgtttcaacccca

SEQ ID NO: 142284 - DNA, 25 bp, SARS Virus
tggttttataaactttcaaccccaa

SEQ ID NO: 142285 - DNA, 25 bp, SARS Virus
ggttttataaagcttcaaccccaaa

SEQ ID NO: 142286 - DNA, 25 bp, SARS Virus
gttttataaagtctcaaccccaaaa

SEQ ID NO: 142287 - DNA, 25 bp, SARS Virus
ttttataaagttccaaccccaaaac

SEQ ID NO: 142288 - DNA, 25 bp, SARS Virus
tttataaagtttcaaccccaaaaca

SEQ ID NO: 142289 - DNA, 25 bp, SARS Virus
ttataaagtttccaccccaaaacat

SEQ ID NO: 142290 - DNA, 25 bp, SARS Virus
tataaagtttcacccccaaaacatg

SEQ ID NO: 142291 - DNA, 25 bp, SARS Virus
ataaagtttcaaccccaaaacatgt

SEQ ID NO: 142292 - DNA, 25 bp, SARS Virus
taaagtttcaaccccaaaacatgta

SEQ ID NO: 142293 - DNA, 25 bp, SARS Virus
aaagtttcaaccccaaaacatgtaa

SEQ ID NO: 142294 - DNA, 25 bp, SARS Virus
aagtttcaaccccaaaacatgtaaa

SEQ ID NO: 142295 - DNA, 25 bp, SARS Virus
agtttcaacccccaaacatgtaaac

SEQ ID NO: 142296 - DNA, 25 bp, SARS Virus
gtttcaaccccacaacatgtaaaca

SEQ ID NO: 142297 - DNA, 25 bp, SARS Virus
tttcaaccccaacacatgtaaacaa

SEQ ID NO: 142298 - DNA, 25 bp, SARS Virus
ttcaaccccaaaccatgtaaacaaa

SEQ ID NO: 142299 - DNA, 25 bp, SARS Virus
tcaaccccaaaacatgtaaacaaac

SEQ ID NO: 142300 - DNA, 25 bp, SARS Virus
caaccccaaaacctgtaaacaaact

SEQ ID NO: 142301 - DNA, 25 bp, SARS Virus
aaccccaaaacacgtaaacaaactg

SEQ ID NO: 142302 - DNA, 25 bp, SARS Virus
accccaaaacatctaaacaaactga

SEQ ID NO: 142303 - DNA, 25 bp, SARS Virus
ccccaaaacatgcaaacaaactgaa

SEQ ID NO: 142304 - DNA, 25 bp, SARS Virus
cccaaaacatgtcaacaaactgaac

SEQ ID NO: 142305 - DNA, 25 bp, SARS Virus
ccaaaacatgtacacaaactgaact

SEQ ID NO: 142306 - DNA, 25 bp, SARS Virus
caaaacatgtaaccaaactgaactc

SEQ ID NO: 142307 - DNA, 25 bp, SARS Virus
aaaacatgtaaacaaactgaactcg

SEQ ID NO: 142308 - DNA, 25 bp, SARS Virus
aaacatgtaaaccaactgaactcgc

SEQ ID NO: 142309 - DNA, 25 bp, SARS Virus
aacatgtaaacacactgaactcgct

SEQ ID NO: 142310 - DNA, 25 bp, SARS Virus
acatgtaaacaacctgaactcgctt

SEQ ID NO: 142311 - DNA, 25 bp, SARS Virus
catgtaaacaaactgaactcgcttg

SEQ ID NO: 142312 - DNA, 25 bp, SARS Virus
atgtaaacaaaccgaactcgcttgt

SEQ ID NO: 142313 - DNA, 25 bp, SARS Virus
tgtaaacaaactcaactcgcttgtg

SEQ ID NO: 142314 - DNA, 25 bp, SARS Virus
gtaaacaaactgcactcgcttgtga

SEQ ID NO: 142315 - DNA, 25 bp, SARS Virus
taaacaaactgacctcgcttgtgaa

SEQ ID NO: 142316 - DNA, 25 bp, SARS Virus
aaacaaactgaactcgcttgtgaag

SEQ ID NO: 142317 - DNA, 25 bp, SARS Virus
aacaaactgaacccgcttgtgaagt

SEQ ID NO: 142318 - DNA, 25 bp, SARS Virus
acaaactgaactcgcttgtgaagtg

SEQ ID NO: 142319 - DNA, 25 bp, SARS Virus
caaactgaactcccttgtgaagtgc

SEQ ID NO: 142320 - DNA, 25 bp, SARS Virus
aaactgaactcgcttgtgaagtgca

SEQ ID NO: 142321 - DNA, 25 bp, SARS Virus
aactgaactcgcctgtgaagtgcac

SEQ ID NO: 142322 - DNA, 25 bp, SARS Virus
actgaactcgctcgtgaagtgcaca

SEQ ID NO: 142323 - DNA, 25 bp, SARS Virus
ctgaactcgcttctgaagtgcacac

SEQ ID NO: 142324 - DNA, 25 bp, SARS Virus
tgaactcgcttgcgaagtgcacaca

SEQ ID NO: 142325 - DNA, 25 bp, SARS Virus
gaactcgcttgtcaagtgcacacaa

SEQ ID NO: 142326 - DNA, 25 bp, SARS Virus
aactcgcttgtgcagtgcacacaac

SEQ ID NO: 142327 - DNA, 25 bp, SARS Virus
actcgcttgtgacgtgcacacaacg

SEQ ID NO: 142328 - DNA, 25 bp, SARS Virus
ctcgcttgtgaactgcacacaacgc

SEQ ID NO: 142329 - DNA, 25 bp, SARS Virus
tcgcttgtgaagcgcacacaacgct

SEQ ID NO: 142330 - DNA, 25 bp, SARS Virus
cgcttgtgaagtccacacaacgcta

SEQ ID NO: 142331 - DNA, 25 bp, SARS Virus
gcttgtgaagtgcacacaacgctag

SEQ ID NO: 142332 - DNA, 25 bp, SARS Virus
cttgtgaagtgcccacaacgctagg

SEQ ID NO: 142333 - DNA, 25 bp, SARS Virus
ttgtgaagtgcacacaacgctagga

SEQ ID NO: 142334 - DNA, 25 bp, SARS Virus
tgtgaagtgcacccaacgctaggac

SEQ ID NO: 142335 - DNA, 25 bp, SARS Virus
gtgaagtgcacacaacgctaggaca

SEQ ID NO: 142336 - DNA, 25 bp, SARS Virus
tgaagtgcacaccacgctaggacaa

SEQ ID NO: 142337 - DNA, 25 bp, SARS Virus
gaagtgcacacaccgctaggacaag

SEQ ID NO: 142338 - DNA, 25 bp, SARS Virus
aagtgcacacaacgctaggacaagt

SEQ ID NO: 142339 - DNA, 25 bp, SARS Virus
agtgcacacaaccctaggacaagtc

SEQ ID NO: 142340 - DNA, 25 bp, SARS Virus
gtgcacacaacgctaggacaagtcg

SEQ ID NO: 142341 - DNA, 25 bp, SARS Virus
tgcacacaacgccaggacaagtcgt

SEQ ID NO: 142342 - DNA, 25 bp, SARS Virus
gcacacaacgctcggacaagtcgtc

SEQ ID NO: 142343 - DNA, 25 bp, SARS Virus
cacacaacgctacgacaagtcgtcg

SEQ ID NO: 142344 - DNA, 25 bp, SARS Virus
acacaacgctagcacaagtcgtcgt

SEQ ID NO: 142345 - DNA, 25 bp, SARS Virus
cacaacgctaggccaagtcgtcgtt

SEQ ID NO: 142346 - DNA, 25 bp, SARS Virus
acaacgctaggacaagtcgtcgtta

SEQ ID NO: 142347 - DNA, 25 bp, SARS Virus
caacgctaggaccagtcgtcgttat

SEQ ID NO: 142348 - DNA, 25 bp, SARS Virus
aacgctaggacacgtcgtcgttatg

SEQ ID NO: 142349 - DNA, 25 bp, SARS Virus
acgctaggacaactcgtcgttatgg

SEQ ID NO: 142350 - DNA, 25 bp, SARS Virus
cgctaggacaagccgtcgttatgga

SEQ ID NO: 142351 - DNA, 25 bp, SARS Virus
gctaggacaagtcgtcgttatggac

SEQ ID NO: 142352 - DNA, 25 bp, SARS Virus
ctaggacaagtcctcgttatggact

SEQ ID NO: 142353 - DNA, 25 bp, SARS Virus
taggacaagtcgccgttatggactc

SEQ ID NO: 142354 - DNA, 25 bp, SARS Virus
aggacaagtcgtcgttatggactct

SEQ ID NO: 142355 - DNA, 25 bp, SARS Virus
ggacaagtcgtccttatggactctc

SEQ ID NO: 142356 - DNA, 25 bp, SARS Virus
gacaagtcgtcgctatggactctca

SEQ ID NO: 142357 - DNA, 25 bp, SARS Virus
acaagtcgtcgtcatggactctcac

SEQ ID NO: 142358 - DNA, 25 bp, SARS Virus
caagtcgtcgttctggactctcacg

SEQ ID NO: 142359 - DNA, 25 bp, SARS Virus
aagtcgtcgttacggactctcacgt

SEQ ID NO: 142360 - DNA, 25 bp, SARS Virus
agtcgtcgttatcgactctcacgtg

SEQ ID NO: 142361 - DNA, 25 bp, SARS Virus
gtcgtcgttatgcactctcacgtgc

SEQ ID NO: 142362 - DNA, 25 bp, SARS Virus
tcgtcgttatggcctctcacgtgct

SEQ ID NO: 142363 - DNA, 25 bp, SARS Virus
cgtcgttatggactctcacgtgcta

SEQ ID NO: 142364 - DNA, 25 bp, SARS Virus
gtcgttatggaccctcacgtgctaa

SEQ ID NO: 142365 - DNA, 25 bp, SARS Virus
tcgttatggactctcacgtgctaaa

SEQ ID NO: 142366 - DNA, 25 bp, SARS Virus
cgttatggactcccacgtgctaaat

SEQ ID NO: 142367 - DNA, 25 bp, SARS Virus
gttatggactctcacgtgctaaatc

SEQ ID NO: 142368 - DNA, 25 bp, SARS Virus
ttatggactctcccgtgctaaatca

SEQ ID NO: 142369 - DNA, 25 bp, SARS Virus
tatggactctcacgtgctaaatcaa

SEQ ID NO: 142370 - DNA, 25 bp, SARS Virus
atggactctcacctgctaaatcaac

SEQ ID NO: 142371 - DNA, 25 bp, SARS Virus
tggactctcacgcgctaaatcaaca

SEQ ID NO: 142372 - DNA, 25 bp, SARS Virus
ggactctcacgtcctaaatcaacac

SEQ ID NO: 142373 - DNA, 25 bp, SARS Virus
gactctcacgtgctaaatcaacaca

SEQ ID NO: 142374 - DNA, 25 bp, SARS Virus
actctcacgtgccaaatcaacacac

SEQ ID NO: 142375 - DNA, 25 bp, SARS Virus
ctctcacgtgctcaatcaacacacg

SEQ ID NO: 142376 - DNA, 25 bp, SARS Virus
tctcacgtgctacatcaacacacgt

SEQ ID NO: 142377 - DNA, 25 bp, SARS Virus
ctcacgtgctaactcaacacacgtt

SEQ ID NO: 142378 - DNA, 25 bp, SARS Virus
tcacgtgctaaaccaacacacgttt

SEQ ID NO: 142379 - DNA, 25 bp, SARS Virus
cacgtgctaaatcaacacacgtttt

SEQ ID NO: 142380 - DNA, 25 bp, SARS Virus
acgtgctaaatccacacacgttttc

SEQ ID NO: 142381 - DNA, 25 bp, SARS Virus
cgtgctaaatcaccacacgttttcg

SEQ ID NO: 142382 - DNA, 25 bp, SARS Virus
gtgctaaatcaacacacgttttcga

SEQ ID NO: 142383 - DNA, 25 bp, SARS Virus
tgctaaatcaacccacgttttcgat

SEQ ID NO: 142384 - DNA, 25 bp, SARS Virus
gctaaatcaacacacgttttcgatg

SEQ ID NO: 142385 - DNA, 25 bp, SARS Virus
ctaaatcaacacccgttttcgatgg

SEQ ID NO: 142386 - DNA, 25 bp, SARS Virus
taaatcaacacacgttttcgatggt

SEQ ID NO: 142387 - DNA, 25 bp, SARS Virus
aaatcaacacaccttttcgatggta

SEQ ID NO: 142388 - DNA, 25 bp, SARS Virus
aatcaacacacgctttcgatggtat

SEQ ID NO: 142389 - DNA, 25 bp, SARS Virus
atcaacacacgtcttcgatggtata

SEQ ID NO: 142390 - DNA, 25 bp, SARS Virus
tcaacacacgttctcgatggtataa

SEQ ID NO: 142391 - DNA, 25 bp, SARS Virus
caacacacgtttccgatggtataac

SEQ ID NO: 142392 - DNA, 25 bp, SARS Virus
aacacacgttttcgatggtataacc

SEQ ID NO: 142393 - DNA, 25 bp, SARS Virus
acacacgttttccatggtataacct

SEQ ID NO: 142394 - DNA, 25 bp, SARS Virus
cacacgttttcgctggtataacctc

SEQ ID NO: 142395 - DNA, 25 bp, SARS Virus
acacgttttcgacggtataacctct

SEQ ID NO: 142396 - DNA, 25 bp, SARS Virus
cacgttttcgatcgtataacctctt

SEQ ID NO: 142397 - DNA, 25 bp, SARS Virus
acgttttcgatgctataacctcttc

SEQ ID NO: 142398 - DNA, 25 bp, SARS Virus
cgttttcgatggcataacctcttcg

SEQ ID NO: 142399 - DNA, 25 bp, SARS Virus
gttttcgatggtctaacctcttcgt

SEQ ID NO: 142400 - DNA, 25 bp, SARS Virus
ttttcgatggtacaacctcttcgtt

SEQ ID NO: 142401 - DNA, 25 bp, SARS Virus
tttcgatggtatcacctcttcgttt

SEQ ID NO: 142402 - DNA, 25 bp, SARS Virus
ttcgatggtataccctcttcgttta

SEQ ID NO: 142403 - DNA, 25 bp, SARS Virus
tcgatggtataacctcttcgtttaa

SEQ ID NO: 142404 - DNA, 25 bp, SARS Virus
cgatggtataacctcttcgtttaat

SEQ ID NO: 142405 - DNA, 25 bp, SARS Virus
gatggtataaccccttcgtttaatc

SEQ ID NO: 142406 - DNA, 25 bp, SARS Virus
atggtataacctcttcgtttaatcg

SEQ ID NO: 142407 - DNA, 25 bp, SARS Virus
tggtataacctcctcgtttaatcgt

SEQ ID NO: 142408 - DNA, 25 bp, SARS Virus
ggtataacctctccgtttaatcgtg

SEQ ID NO: 142409 - DNA, 25 bp, SARS Virus
gtataacctcttcgtttaatcgtgt

SEQ ID NO: 142410 - DNA, 25 bp, SARS Virus
tataacctcttcctttaatcgtgta

SEQ ID NO: 142411 - DNA, 25 bp, SARS Virus
ataacctcttcgcttaatcgtgtaa

SEQ ID NO: 142412 - DNA, 25 bp, SARS Virus
taacctcttcgtctaatcgtgtaag

SEQ ID NO: 142413 - DNA, 25 bp, SARS Virus
aacctcttcgttcaatcgtgtaagt

SEQ ID NO: 142414 - DNA, 25 bp, SARS Virus
acctcttcgtttcatcgtgtaagtc

SEQ ID NO: 142415 - DNA, 25 bp, SARS Virus
cctcttcgtttactcgtgtaagtca

SEQ ID NO: 142416 - DNA, 25 bp, SARS Virus
ctcttcgtttaaccgtgtaagtcat

SEQ ID NO: 142417 - DNA, 25 bp, SARS Virus
tcttcgtttaatcgtgtaagtcatc

SEQ ID NO: 142418 - DNA, 25 bp, SARS Virus
cttcgtttaatcctgtaagtcatct

SEQ ID NO: 142419 - DNA, 25 bp, SARS Virus
ttcgtttaatcgcgtaagtcatctt

SEQ ID NO: 142420 - DNA, 25 bp, SARS Virus
tcgtttaatcgtctaagtcatctta

SEQ ID NO: 142421 - DNA, 25 bp, SARS Virus
cgtttaatcgtgcaagtcatcttag

SEQ ID NO: 142422 - DNA, 25 bp, SARS Virus
gtttaatcgtgtcagtcatcttaga

SEQ ID NO: 142423 - DNA, 25 bp, SARS Virus
tttaatcgtgtacgtcatcttagag

SEQ ID NO: 142424 - DNA, 25 bp, SARS Virus
ttaatcgtgtaactcatcttagagg

SEQ ID NO: 142425 - DNA, 25 bp, SARS Virus
taatcgtgtaagccatcttagaggc

SEQ ID NO: 142426 - DNA, 25 bp, SARS Virus
aatcgtgtaagtcatcttagaggcg

SEQ ID NO: 142427 - DNA, 25 bp, SARS Virus
atcgtgtaagtcctcttagaggcgt

SEQ ID NO: 142428 - DNA, 25 bp, SARS Virus
tcgtgtaagtcaccttagaggcgtc

SEQ ID NO: 142429 - DNA, 25 bp, SARS Virus
cgtgtaagtcatcttagaggcgtct

SEQ ID NO: 142430 - DNA, 25 bp, SARS Virus
gtgtaagtcatcctagaggcgtcta

SEQ ID NO: 142431 - DNA, 25 bp, SARS Virus
tgtaagtcatctcagaggcgtctac

SEQ ID NO: 142432 - DNA, 25 bp, SARS Virus
gtaagtcatcttcgaggcgtctaca

SEQ ID NO: 142433 - DNA, 25 bp, SARS Virus
taagtcatcttacaggcgtctacat

SEQ ID NO: 142434 - DNA, 25 bp, SARS Virus
aagtcatcttagcggcgtctacatg

SEQ ID NO: 142435 - DNA, 25 bp, SARS Virus
agtcatcttagacgcgtctacatgt

SEQ ID NO: 142436 - DNA, 25 bp, SARS Virus
gtcatcttagagccgtctacatgta

SEQ ID NO: 142437 - DNA, 25 bp, SARS Virus
tcatcttagaggcgtctacatgtat

SEQ ID NO: 142438 - DNA, 25 bp, SARS Virus
catcttagaggcctctacatgtata

SEQ ID NO: 142439 - DNA, 25 bp, SARS Virus
atcttagaggcgcctacatgtataa

SEQ ID NO: 142440 - DNA, 25 bp, SARS Virus
tcttagaggcgtctacatgtataat

SEQ ID NO: 142441 - DNA, 25 bp, SARS Virus
cttagaggcgtccacatgtataatg

SEQ ID NO: 142442 - DNA, 25 bp, SARS Virus
ttagaggcgtctccatgtataatgt

SEQ ID NO: 142443 - DNA, 25 bp, SARS Virus
tagaggcgtctacatgtataatgtt

SEQ ID NO: 142444 - DNA, 25 bp, SARS Virus
agaggcgtctacctgtataatgtta

SEQ ID NO: 142445 - DNA, 25 bp, SARS Virus
gaggcgtctacacgtataatgttag

SEQ ID NO: 142446 - DNA, 25 bp, SARS Virus
aggcgtctacatctataatgttaga

SEQ ID NO: 142447 - DNA, 25 bp, SARS Virus
ggcgtctacatgcataatgttagat

SEQ ID NO: 142448 - DNA, 25 bp, SARS Virus
gcgtctacatgtctaatgttagatg

SEQ ID NO: 142449 - DNA, 25 bp, SARS Virus
cgtctacatgtacaatgttagatgc

SEQ ID NO: 142450 - DNA, 25 bp, SARS Virus
gtctacatgtatcatgttagatgcc

SEQ ID NO: 142451 - DNA, 25 bp, SARS Virus
tctacatgtatactgttagatgcct

SEQ ID NO: 142452 - DNA, 25 bp, SARS Virus
ctacatgtataacgttagatgcctc

SEQ ID NO: 142453 - DNA, 25 bp, SARS Virus
tacatgtataatcttagatgcctcc

SEQ ID NO: 142454 - DNA, 25 bp, SARS Virus
acatgtataatgctagatgcctcca

SEQ ID NO: 142455 - DNA, 25 bp, SARS Virus
catgtataatgtcagatgcctccaa

SEQ ID NO: 142456 - DNA, 25 bp, SARS Virus
atgtataatgttcgatgcctccaaa

SEQ ID NO: 142457 - DNA, 25 bp, SARS Virus
tgtataatgttacatgcctccaaaa

SEQ ID NO: 142458 - DNA, 25 bp, SARS Virus
gtataatgttagctgcctccaaaat

SEQ ID NO: 142459 - DNA, 25 bp, SARS Virus
tataatgttagacgcctccaaaatc

SEQ ID NO: 142460 - DNA, 25 bp, SARS Virus
ataatgttagatccctccaaaatcg

SEQ ID NO: 142461 - DNA, 25 bp, SARS Virus
taatgttagatgcctccaaaatcgg

SEQ ID NO: 142462 - DNA, 25 bp, SARS Virus
aatgttagatgcctccaaaatcggt

SEQ ID NO: 142463 - DNA, 25 bp, SARS Virus
atgttagatgcccccaaaatcggta

SEQ ID NO: 142464 - DNA, 25 bp, SARS Virus
tgttagatgcctccaaaatcggtat

SEQ ID NO: 142465 - DNA, 25 bp, SARS Virus
gttagatgcctccaaaatcggtatc

SEQ ID NO: 142466 - DNA, 25 bp, SARS Virus
ttagatgcctcccaaatcggtatct

SEQ ID NO: 142467 - DNA, 25 bp, SARS Virus
tagatgcctccacaatcggtatctt

SEQ ID NO: 142468 - DNA, 25 bp, SARS Virus
agatgcctccaacatcggtatcttt

SEQ ID NO: 142469 - DNA, 25 bp, SARS Virus
gatgcctccaaactcggtatctttg

SEQ ID NO: 142470 - DNA, 25 bp, SARS Virus
atgcctccaaaaccggtatctttgt

SEQ ID NO: 142471 - DNA, 25 bp, SARS Virus
tgcctccaaaatcggtatctttgtc

SEQ ID NO: 142472 - DNA, 25 bp, SARS Virus
gcctccaaaatccgtatctttgtcc

SEQ ID NO: 142473 - DNA, 25 bp, SARS Virus
cctccaaaatcgctatctttgtccg

SEQ ID NO: 142474 - DNA, 25 bp, SARS Virus
ctccaaaatcggcatctttgtccgt

SEQ ID NO: 142475 - DNA, 25 bp, SARS Virus
tccaaaatcggtctctttgtccgta

SEQ ID NO: 142476 - DNA, 25 bp, SARS Virus
ccaaaatcggtacctttgtccgtaa

SEQ ID NO: 142477 - DNA, 25 bp, SARS Virus
caaaatcggtatctttgtccgtaat

SEQ ID NO: 142478 - DNA, 25 bp, SARS Virus
aaaatcggtatccttgtccgtaatg

SEQ ID NO: 142479 - DNA, 25 bp, SARS Virus
aaatcggtatctctgtccgtaatga

SEQ ID NO: 142480 - DNA, 25 bp, SARS Virus
aatcggtatcttcgtccgtaatgaa

SEQ ID NO: 142481 - DNA, 25 bp, SARS Virus
atcggtatctttctccgtaatgaag

SEQ ID NO: 142482 - DNA, 25 bp, SARS Virus
tcggtatctttgcccgtaatgaaga

SEQ ID NO: 142483 - DNA, 25 bp, SARS Virus
cggtatctttgtccgtaatgaagac

SEQ ID NO: 142484 - DNA, 25 bp, SARS Virus
ggtatctttgtccgtaatgaagaca

SEQ ID NO: 142485 - DNA, 25 bp, SARS Virus
gtatctttgtccctaatgaagacat

SEQ ID NO: 142486 - DNA, 25 bp, SARS Virus
tatctttgtccgcaatgaagacatc

SEQ ID NO: 142487 - DNA, 25 bp, SARS Virus
atctttgtccgtcatgaagacatca

SEQ ID NO: 142488 - DNA, 25 bp, SARS Virus
tctttgtccgtactgaagacatcat

SEQ ID NO: 142489 - DNA, 25 bp, SARS Virus
ctttgtccgtaacgaagacatcatt

SEQ ID NO: 142490 - DNA, 25 bp, SARS Virus
tttgtccgtaatcaagacatcatta

SEQ ID NO: 142491 - DNA, 25 bp, SARS Virus
ttgtccgtaatgcagacatcattac

SEQ ID NO: 142492 - DNA, 25 bp, SARS Virus
tgtccgtaatgacgacatcattacg

SEQ ID NO: 142493 - DNA, 25 bp, SARS Virus
gtccgtaatgaacacatcattacga

SEQ ID NO: 142494 - DNA, 25 bp, SARS Virus
tccgtaatgaagccatcattacgat

SEQ ID NO: 142495 - DNA, 25 bp, SARS Virus
ccgtaatgaagacatcattacgatt

SEQ ID NO: 142496 - DNA, 25 bp, SARS Virus
cgtaatgaagacctcattacgatta

SEQ ID NO: 142497 - DNA, 25 bp, SARS Virus
gtaatgaagacaccattacgattaa

SEQ ID NO: 142498 - DNA, 25 bp, SARS Virus
taatgaagacatcattacgattaac

SEQ ID NO: 142499 - DNA, 25 bp, SARS Virus
aatgaagacatccttacgattaact

SEQ ID NO: 142500 - DNA, 25 bp, SARS Virus
atgaagacatcactacgattaactt

SEQ ID NO: 142501 - DNA, 25 bp, SARS Virus
tgaagacatcatcacgattaacttt

SEQ ID NO: 142502 - DNA, 25 bp, SARS Virus
gaagacatcattccgattaactttt

SEQ ID NO: 142503 - DNA, 25 bp, SARS Virus
aagacatcattacgattaacttttc

SEQ ID NO: 142504 - DNA, 25 bp, SARS Virus
agacatcattaccattaacttttca

SEQ ID NO: 142505 - DNA, 25 bp, SARS Virus
gacatcattacgcttaacttttcaa

SEQ ID NO: 142506 - DNA, 25 bp, SARS Virus
acatcattacgactaacttttcaat

SEQ ID NO: 142507 - DNA, 25 bp, SARS Virus
catcattacgatcaacttttcaatc

SEQ ID NO: 142508 - DNA, 25 bp, SARS Virus
atcattacgattcacttttcaatca

SEQ ID NO: 142509 - DNA, 25 bp, SARS Virus
tcattacgattaccttttcaatcat

SEQ ID NO: 142510 - DNA, 25 bp, SARS Virus
cattacgattaacttttcaatcatc

SEQ ID NO: 142511 - DNA, 25 bp, SARS Virus
attacgattaacctttcaatcatcc

SEQ ID NO: 142512 - DNA, 25 bp, SARS Virus
ttacgattaactcttcaatcatcca

SEQ ID NO: 142513 - DNA, 25 bp, SARS Virus
tacgattaacttctcaatcatccat

SEQ ID NO: 142514 - DNA, 25 bp, SARS Virus
acgattaactttccaatcatccata

SEQ ID NO: 142515 - DNA, 25 bp, SARS Virus
cgattaacttttcaatcatccatat

SEQ ID NO: 142516 - DNA, 25 bp, SARS Virus
gattaacttttccatcatccatatc

SEQ ID NO: 142517 - DNA, 25 bp, SARS Virus
attaacttttcactcatccatatcg

SEQ ID NO: 142518 - DNA, 25 bp, SARS Virus
ttaacttttcaaccatccatatcgt

SEQ ID NO: 142519 - DNA, 25 bp, SARS Virus
taacttttcaatcatccatatcgtt

SEQ ID NO: 142520 - DNA, 25 bp, SARS Virus
aacttttcaatcctccatatcgtta

SEQ ID NO: 142521 - DNA, 25 bp, SARS Virus
acttttcaatcacccatatcgttac

SEQ ID NO: 142522 - DNA, 25 bp, SARS Virus
cttttcaatcatccatatcgttacc

SEQ ID NO: 142523 - DNA, 25 bp, SARS Virus
ttttcaatcatccatatcgttacca

SEQ ID NO: 142524 - DNA, 25 bp, SARS Virus
tttcaatcatccctatcgttaccac

SEQ ID NO: 142525 - DNA, 25 bp, SARS Virus
ttcaatcatccacatcgttaccaca

SEQ ID NO: 142526 - DNA, 25 bp, SARS Virus
tcaatcatccatctcgttaccacaa

SEQ ID NO: 142527 - DNA, 25 bp, SARS Virus
caatcatccataccgttaccacaat

SEQ ID NO: 142528 - DNA, 25 bp, SARS Virus
aatcatccatatcgttaccacaata

SEQ ID NO: 142529 - DNA, 25 bp, SARS Virus
tgattgatctcggcgtcacatccgt

SEQ ID NO: 142530 - DNA, 25 bp, SARS Virus
gattgatctcgtggtcacatccgtc

SEQ ID NO: 142531 - DNA, 25 bp, SARS Virus
attgatctcgtcgtcacatccgtcg

SEQ ID NO: 142532 - DNA, 25 bp, SARS Virus
ttgatctcgtcggcacatccgtcgt

SEQ ID NO: 142533 - DNA, 25 bp, SARS Virus
tgatctcgtcgtgacatccgtcgtt

SEQ ID NO: 142534 - DNA, 25 bp, SARS Virus
gatctcgtcgtcgcatccgtcgtta

SEQ ID NO: 142535 - DNA, 25 bp, SARS Virus
atctcgtcgtcagatccgtcgttag

SEQ ID NO: 142536 - DNA, 25 bp, SARS Virus
tctcgtcgtcacgtccgtcgttagt

SEQ ID NO: 142537 - DNA, 25 bp, SARS Virus
ctcgtcgtcacagccgtcgttagta

SEQ ID NO: 142538 - DNA, 25 bp, SARS Virus
tcgtcgtcacatgcgtcgttagtat

SEQ ID NO: 142539 - DNA, 25 bp, SARS Virus
cgtcgtcacatcggtcgttagtata

SEQ ID NO: 142540 - DNA, 25 bp, SARS Virus
gtcgtcacatccgtcgttagtatag

SEQ ID NO: 142541 - DNA, 25 bp, SARS Virus
tcgtcacatccggcgttagtatagt

SEQ ID NO: 142542 - DNA, 25 bp, SARS Virus
cgtcacatccgtggttagtatagta

SEQ ID NO: 142543 - DNA, 25 bp, SARS Virus
gtcacatccgtcgttagtatagtag

SEQ ID NO: 142544 - DNA, 25 bp, SARS Virus
tcacatccgtcggtagtatagtagt

SEQ ID NO: 142545 - DNA, 25 bp, SARS Virus
cacatccgtcgtgagtatagtagtc

SEQ ID NO: 142546 - DNA, 25 bp, SARS Virus
acatccgtcgttggtatagtagtca

SEQ ID NO: 142547 - DNA, 25 bp, SARS Virus
catccgtcgttagtatagtagtcac

SEQ ID NO: 142548 - DNA, 25 bp, SARS Virus
atccgtcgttaggatagtagtcact

SEQ ID NO: 142549 - DNA, 25 bp, SARS Virus
tccgtcgttagtgtagtagtcactc

SEQ ID NO: 142550 - DNA, 25 bp, SARS Virus
ccgtcgttagtagagtagtcactcg

SEQ ID NO: 142551 - DNA, 25 bp, SARS Virus
cgtcgttagtatggtagtcactcgt

SEQ ID NO: 142552 - DNA, 25 bp, SARS Virus
gtcgttagtatagtagtcactcgtc

SEQ ID NO: 142553 - DNA, 25 bp, SARS Virus
tcgttagtataggagtcactcgtct

SEQ ID NO: 142554 - DNA, 25 bp, SARS Virus
cgttagtatagtggtcactcgtctc

SEQ ID NO: 142555 - DNA, 25 bp, SARS Virus
gttagtatagtagtcactcgtctcc

SEQ ID NO: 142556 - DNA, 25 bp, SARS Virus
ttagtatagtaggcactcgtctcca

SEQ ID NO: 142557 - DNA, 25 bp, SARS Virus
tagtatagtagtgactcgtctccac

SEQ ID NO: 142558 - DNA, 25 bp, SARS Virus
agtatagtagtcgctcgtctccacc

SEQ ID NO: 142559 - DNA, 25 bp, SARS Virus
gtatagtagtcagtcgtctccaccg

SEQ ID NO: 142560 - DNA, 25 bp, SARS Virus
tatagtagtcacgcgtctccaccgt

SEQ ID NO: 142561 - DNA, 25 bp, SARS Virus
atagtagtcactggtctccaccgtt

SEQ ID NO: 142562 - DNA, 25 bp, SARS Virus
tagtagtcactcgtctccaccgttg

SEQ ID NO: 142563 - DNA, 25 bp, SARS Virus
agtagtcactcggctccaccgttgt

SEQ ID NO: 142564 - DNA, 25 bp, SARS Virus
gtagtcactcgtgtccaccgttgtg

SEQ ID NO: 142565 - DNA, 25 bp, SARS Virus
tagtcactcgtcgccaccgttgtga

SEQ ID NO: 142566 - DNA, 25 bp, SARS Virus
agtcactcgtctgcaccgttgtgac

SEQ ID NO: 142567 - DNA, 25 bp, SARS Virus
gtcactcgtctcgaccgttgtgaca

SEQ ID NO: 142568 - DNA, 25 bp, SARS Virus
tcactcgtctccgccgttgtgacat

SEQ ID NO: 142569 - DNA, 25 bp, SARS Virus
cactcgtctccagcgttgtgacatt

SEQ ID NO: 142570 - DNA, 25 bp, SARS Virus
actcgtctccacggttgtgacattc

SEQ ID NO: 142571 - DNA, 25 bp, SARS Virus
ctcgtctccaccgttgtgacattca

SEQ ID NO: 142572 - DNA, 25 bp, SARS Virus
tcgtctccaccggtgtgacattcag

SEQ ID NO: 142573 - DNA, 25 bp, SARS Virus
cgtctccaccgtggtgacattcagg

SEQ ID NO: 142574 - DNA, 25 bp, SARS Virus
gtctccaccgttgtgacattcaggt

SEQ ID NO: 142575 - DNA, 25 bp, SARS Virus
tctccaccgttgggacattcaggta

SEQ ID NO: 142576 - DNA, 25 bp, SARS Virus
ctccaccgttgtgacattcaggtaa

SEQ ID NO: 142577 - DNA, 25 bp, SARS Virus
tccaccgttgtggcattcaggtaac

SEQ ID NO: 142578 - DNA, 25 bp, SARS Virus
ccaccgttgtgagattcaggtaact

SEQ ID NO: 142579 - DNA, 25 bp, SARS Virus
caccgttgtgacgttcaggtaactt

SEQ ID NO: 142580 - DNA, 25 bp, SARS Virus
accgttgtgacagtcaggtaacttg

SEQ ID NO: 142581 - DNA, 25 bp, SARS Virus
ccgttgtgacatgcaggtaacttga

SEQ ID NO: 142582 - DNA, 25 bp, SARS Virus
cgttgtgacattgaggtaacttgaa

SEQ ID NO: 142583 - DNA, 25 bp, SARS Virus
gttgtgacattcgggtaacttgaag

SEQ ID NO: 142584 - DNA, 25 bp, SARS Virus
ttgtgacattcaggtaacttgaaga

SEQ ID NO: 142585 - DNA, 25 bp, SARS Virus
tgtgacattcaggtaacttgaagac

SEQ ID NO: 142586 - DNA, 25 bp, SARS Virus
gtgacattcagggaacttgaagacg

SEQ ID NO: 142587 - DNA, 25 bp, SARS Virus
tgacattcaggtgacttgaagacgc

SEQ ID NO: 142588 - DNA, 25 bp, SARS Virus
gacattcaggtagcttgaagacgcg

SEQ ID NO: 142589 - DNA, 25 bp, SARS Virus
acattcaggtaagttgaagacgcgt

SEQ ID NO: 142590 - DNA, 25 bp, SARS Virus
cattcaggtaacgtgaagacgcgtg

SEQ ID NO: 142591 - DNA, 25 bp, SARS Virus
attcaggtaactggaagacgcgtgt

SEQ ID NO: 142592 - DNA, 25 bp, SARS Virus
ttcaggtaacttgaagacgcgtgtt

SEQ ID NO: 142593 - DNA, 25 bp, SARS Virus
tcaggtaacttggagacgcgtgttt

SEQ ID NO: 142594 - DNA, 25 bp, SARS Virus
caggtaacttgaggacgcgtgttta

SEQ ID NO: 142595 - DNA, 25 bp, SARS Virus
aggtaacttgaagacgcgtgtttac

SEQ ID NO: 142596 - DNA, 25 bp, SARS Virus
ggtaacttgaaggcgcgtgtttact

SEQ ID NO: 142597 - DNA, 25 bp, SARS Virus
gtaacttgaagaggcgtgtttactc

SEQ ID NO: 142598 - DNA, 25 bp, SARS Virus
taacttgaagacgcgtgtttactct

SEQ ID NO: 142599 - DNA, 25 bp, SARS Virus
aacttgaagacgggtgtttactcta

SEQ ID NO: 142600 - DNA, 25 bp, SARS Virus
acttgaagacgcgtgtttactctag

SEQ ID NO: 142601 - DNA, 25 bp, SARS Virus
cttgaagacgcgggtttactctaga

SEQ ID NO: 142602 - DNA, 25 bp, SARS Virus
ttgaagacgcgtgtttactctagag

SEQ ID NO: 142603 - DNA, 25 bp, SARS Virus
tgaagacgcgtggttactctagaga

SEQ ID NO: 142604 - DNA, 25 bp, SARS Virus
gaagacgcgtgtgtactctagagat

SEQ ID NO: 142605 - DNA, 25 bp, SARS Virus
aagacgcgtgttgactctagagatc

SEQ ID NO: 142606 - DNA, 25 bp, SARS Virus
agacgcgtgtttgctctagagatcg

SEQ ID NO: 142607 - DNA, 25 bp, SARS Virus
gacgcgtgtttagtctagagatcgt

SEQ ID NO: 142608 - DNA, 25 bp, SARS Virus
acgcgtgtttacgctagagatcgta

SEQ ID NO: 142609 - DNA, 25 bp, SARS Virus
cgcgtgtttactgtagagatcgtaa

SEQ ID NO: 142610 - DNA, 25 bp, SARS Virus
gcgtgtttactcgagagatcgtaat

SEQ ID NO: 142611 - DNA, 25 bp, SARS Virus
cgtgtttactctggagatcgtaatt

SEQ ID NO: 142612 - DNA, 25 bp, SARS Virus
gtgtttactctagagatcgtaatta

SEQ ID NO: 142613 - DNA, 25 bp, SARS Virus
tgtttactctagggatcgtaattat

SEQ ID NO: 142614 - DNA, 25 bp, SARS Virus
gtttactctagagatcgtaattata

SEQ ID NO: 142615 - DNA, 25 bp, SARS Virus
tttactctagaggtcgtaattatag

SEQ ID NO: 142616 - DNA, 25 bp, SARS Virus
ttactctagagagcgtaattatagt

SEQ ID NO: 142617 - DNA, 25 bp, SARS Virus
tactctagagatggtaattatagtg

SEQ ID NO: 142618 - DNA, 25 bp, SARS Virus
actctagagatcgtaattatagtgg

SEQ ID NO: 142619 - DNA, 25 bp, SARS Virus
ctctagagatcggaattatagtgga

SEQ ID NO: 142620 - DNA, 25 bp, SARS Virus
tctagagatcgtgattatagtggat

SEQ ID NO: 142621 - DNA, 25 bp, SARS Virus
ctagagatcgtagttatagtggatc

SEQ ID NO: 142622 - DNA, 25 bp, SARS Virus
tagagatcgtaagtatagtggatcc

SEQ ID NO: 142623 - DNA, 25 bp, SARS Virus
agagatcgtaatgatagtggatccg

SEQ ID NO: 142624 - DNA, 25 bp, SARS Virus
gagatcgtaattgtagtggatccgt

SEQ ID NO: 142625 - DNA, 25 bp, SARS Virus
agatcgtaattagagtggatccgta

SEQ ID NO: 142626 - DNA, 25 bp, SARS Virus
gatcgtaattatggtggatccgtaa

SEQ ID NO: 142627 - DNA, 25 bp, SARS Virus
atcgtaattatagtggatccgtaag

SEQ ID NO: 142628 - DNA, 25 bp, SARS Virus
tcgtaattataggggatccgtaagc

SEQ ID NO: 142629 - DNA, 25 bp, SARS Virus
cgtaattatagtggatccgtaagcg

SEQ ID NO: 142630 - DNA, 25 bp, SARS Virus
gtaattatagtggatccgtaagcgg

SEQ ID NO: 142631 - DNA, 25 bp, SARS Virus
taattatagtgggtccgtaagcggt

SEQ ID NO: 142632 - DNA, 25 bp, SARS Virus
aattatagtggagccgtaagcggta

SEQ ID NO: 142633 - DNA, 25 bp, SARS Virus
attatagtggatgcgtaagcggtat

SEQ ID NO: 142634 - DNA, 25 bp, SARS Virus
ttatagtggatcggtaagcggtata

SEQ ID NO: 142635 - DNA, 25 bp, SARS Virus
tatagtggatccgtaagcggtataa

SEQ ID NO: 142636 - DNA, 25 bp, SARS Virus
atagtggatccggaagcggtataac

SEQ ID NO: 142637 - DNA, 25 bp, SARS Virus
tagtggatccgtgagcggtataacg

SEQ ID NO: 142638 - DNA, 25 bp, SARS Virus
agtggatccgtaggcggtataacga

SEQ ID NO: 142639 - DNA, 25 bp, SARS Virus
gtggatccgtaagcggtataacgaa

SEQ ID NO: 142640 - DNA, 25 bp, SARS Virus
tggatccgtaaggggtataacgaag

SEQ ID NO: 142641 - DNA, 25 bp, SARS Virus
ggatccgtaagcggtataacgaagt

SEQ ID NO: 142642 - DNA, 25 bp, SARS Virus
gatccgtaagcggtataacgaagta

SEQ ID NO: 142643 - DNA, 25 bp, SARS Virus
atccgtaagcgggataacgaagtac

SEQ ID NO: 142644 - DNA, 25 bp, SARS Virus
tccgtaagcggtgtaacgaagtact

SEQ ID NO: 142645 - DNA, 25 bp, SARS Virus
ccgtaagcggtagaacgaagtactt

SEQ ID NO: 142646 - DNA, 25 bp, SARS Virus
cgtaagcggtatgacgaagtacttc

SEQ ID NO: 142647 - DNA, 25 bp, SARS Virus
gtaagcggtatagcgaagtacttcg

SEQ ID NO: 142648 - DNA, 25 bp, SARS Virus
taagcggtataaggaagtacttcgg

SEQ ID NO: 142649 - DNA, 25 bp, SARS Virus
aagcggtataacgaagtacttcggt

SEQ ID NO: 142650 - DNA, 25 bp, SARS Virus
agcggtataacggagtacttcggtc

SEQ ID NO: 142651 - DNA, 25 bp, SARS Virus
gcggtataacgaggtacttcggtcg

SEQ ID NO: 142652 - DNA, 25 bp, SARS Virus
cggtataacgaagtacttcggtcgt

SEQ ID NO: 142653 - DNA, 25 bp, SARS Virus
ggtataacgaaggacttcggtcgta

SEQ ID NO: 142654 - DNA, 25 bp, SARS Virus
gtataacgaagtgcttcggtcgtag

SEQ ID NO: 142655 - DNA, 25 bp, SARS Virus
tataacgaagtagttcggtcgtagt

SEQ ID NO: 142656 - DNA, 25 bp, SARS Virus
ataacgaagtacgtcggtcgtagtc

SEQ ID NO: 142657 - DNA, 25 bp, SARS Virus
taacgaagtactgcggtcgtagtcg

SEQ ID NO: 142658 - DNA, 25 bp, SARS Virus
aacgaagtacttgggtcgtagtcgc

SEQ ID NO: 142659 - DNA, 25 bp, SARS Virus
acgaagtacttcggtcgtagtcgct

SEQ ID NO: 142660 - DNA, 25 bp, SARS Virus
cgaagtacttcggtcgtagtcgctc

SEQ ID NO: 142661 - DNA, 25 bp, SARS Virus
gaagtacttcgggcgtagtcgctca

SEQ ID NO: 142662 - DNA, 25 bp, SARS Virus
aagtacttcggtggtagtcgctcac

SEQ ID NO: 142663 - DNA, 25 bp, SARS Virus
agtacttcggtcgtagtcgctcaca

SEQ ID NO: 142664 - DNA, 25 bp, SARS Virus
gtacttcggtcggagtcgctcacag

SEQ ID NO: 142665 - DNA, 25 bp, SARS Virus
tacttcggtcgtggtcgctcacagt

SEQ ID NO: 142666 - DNA, 25 bp, SARS Virus
acttcggtcgtagtcgctcacagtg

SEQ ID NO: 142667 - DNA, 25 bp, SARS Virus
cttcggtcgtaggcgctcacagtgg

SEQ ID NO: 142668 - DNA, 25 bp, SARS Virus
ttcggtcgtagtggctcacagtgga

SEQ ID NO: 142669 - DNA, 25 bp, SARS Virus
tcggtcgtagtcgctcacagtggaa

SEQ ID NO: 142670 - DNA, 25 bp, SARS Virus
cggtcgtagtcggtcacagtggaat

SEQ ID NO: 142671 - DNA, 25 bp, SARS Virus
ggtcgtagtcgcgcacagtggaata

SEQ ID NO: 142672 - DNA, 25 bp, SARS Virus
gtcgtagtcgctgacagtggaataa

SEQ ID NO: 142673 - DNA, 25 bp, SARS Virus
tcgtagtcgctcgcagtggaataat

SEQ ID NO: 142674 - DNA, 25 bp, SARS Virus
cgtagtcgctcagagtggaataatt

SEQ ID NO: 142675 - DNA, 25 bp, SARS Virus
gtagtcgctcacggtggaataattt

SEQ ID NO: 142676 - DNA, 25 bp, SARS Virus
tagtcgctcacagtggaataatttc

SEQ ID NO: 142677 - DNA, 25 bp, SARS Virus
agtcgctcacaggggaataatttct

SEQ ID NO: 142678 - DNA, 25 bp, SARS Virus
gtcgctcacagtggaataatttctc

SEQ ID NO: 142679 - DNA, 25 bp, SARS Virus
tcgctcacagtggaataatttctcg

SEQ ID NO: 142680 - DNA, 25 bp, SARS Virus
cgctcacagtgggataatttctcgt

SEQ ID NO: 142681 - DNA, 25 bp, SARS Virus
gctcacagtggagtaatttctcgtt

SEQ ID NO: 142682 - DNA, 25 bp, SARS Virus
ctcacagtggaagaatttctcgttc

SEQ ID NO: 142683 - DNA, 25 bp, SARS Virus
tcacagtggaatgatttctcgttca

SEQ ID NO: 142684 - DNA, 25 bp, SARS Virus
cacagtggaatagtttctcgttcag

SEQ ID NO: 142685 - DNA, 25 bp, SARS Virus
acagtggaataagttctcgttcagg

SEQ ID NO: 142686 - DNA, 25 bp, SARS Virus
cagtggaataatgtctcgttcagga

SEQ ID NO: 142687 - DNA, 25 bp, SARS Virus
agtggaataattgctcgttcaggag

SEQ ID NO: 142688 - DNA, 25 bp, SARS Virus
gtggaataatttgtcgttcaggagt

SEQ ID NO: 142689 - DNA, 25 bp, SARS Virus
tggaataatttcgcgttcaggagtt

SEQ ID NO: 142690 - DNA, 25 bp, SARS Virus
ggaataatttctggttcaggagtta

SEQ ID NO: 142691 - DNA, 25 bp, SARS Virus
gaataatttctcgttcaggagttat

SEQ ID NO: 142692 - DNA, 25 bp, SARS Virus
aataatttctcggtcaggagttatt

SEQ ID NO: 142693 - DNA, 25 bp, SARS Virus
ataatttctcgtgcaggagttattt

SEQ ID NO: 142694 - DNA, 25 bp, SARS Virus
taatttctcgttgaggagttatttt

SEQ ID NO: 142695 - DNA, 25 bp, SARS Virus
aatttctcgttcgggagttattttc

SEQ ID NO: 142696 - DNA, 25 bp, SARS Virus
atttctcgttcaggagttattttct

SEQ ID NO: 142697 - DNA, 25 bp, SARS Virus
tttctcgttcaggagttattttctg

SEQ ID NO: 142698 - DNA, 25 bp, SARS Virus
ttctcgttcaggggttattttctgg

SEQ ID NO: 142699 - DNA, 25 bp, SARS Virus
tctcgttcaggagttattttctgga

SEQ ID NO: 142700 - DNA, 25 bp, SARS Virus
ctcgttcaggaggtattttctggag

SEQ ID NO: 142701 - DNA, 25 bp, SARS Virus
tcgttcaggagtgattttctggaga

SEQ ID NO: 142702 - DNA, 25 bp, SARS Virus
cgttcaggagttgttttctggagaa

SEQ ID NO: 142703 - DNA, 25 bp, SARS Virus
gttcaggagttagtttctggagaat

SEQ ID NO: 142704 - DNA, 25 bp, SARS Virus
ttcaggagttatgttctggagaatc

SEQ ID NO: 142705 - DNA, 25 bp, SARS Virus
tcaggagttattgtctggagaatca

SEQ ID NO: 142706 - DNA, 25 bp, SARS Virus
caggagttatttgctggagaatcaa

SEQ ID NO: 142707 - DNA, 25 bp, SARS Virus
aggagttattttgtggagaatcaac

SEQ ID NO: 142708 - DNA, 25 bp, SARS Virus
ggagttattttcgggagaatcaacc

SEQ ID NO: 142709 - DNA, 25 bp, SARS Virus
gagttattttctggagaatcaaccg

SEQ ID NO: 142710 - DNA, 25 bp, SARS Virus
agttattttctggagaatcaaccga

SEQ ID NO: 142711 - DNA, 25 bp, SARS Virus
gttattttctggggaatcaaccgaa

SEQ ID NO: 142712 - DNA, 25 bp, SARS Virus
ttattttctggagaatcaaccgaaa

SEQ ID NO: 142713 - DNA, 25 bp, SARS Virus
tattttctggaggatcaaccgaaat

SEQ ID NO: 142714 - DNA, 25 bp, SARS Virus
attttctggagagtcaaccgaaatc

SEQ ID NO: 142715 - DNA, 25 bp, SARS Virus
ttttctggagaagcaaccgaaatct

SEQ ID NO: 142716 - DNA, 25 bp, SARS Virus
tttctggagaatgaaccgaaatctc

SEQ ID NO: 142717 - DNA, 25 bp, SARS Virus
ttctggagaatcgaccgaaatctcc

SEQ ID NO: 142718 - DNA, 25 bp, SARS Virus
tctggagaatcagccgaaatctccc

SEQ ID NO: 142719 - DNA, 25 bp, SARS Virus
ctggagaatcaagcgaaatctccca

SEQ ID NO: 142720 - DNA, 25 bp, SARS Virus
tggagaatcaacggaaatctcccag

SEQ ID NO: 142721 - DNA, 25 bp, SARS Virus
ggagaatcaaccgaaatctcccagt

SEQ ID NO: 142722 - DNA, 25 bp, SARS Virus
gagaatcaaccggaatctcccagtc

SEQ ID NO: 142723 - DNA, 25 bp, SARS Virus
agaatcaaccgagatctcccagtcc

SEQ ID NO: 142724 - DNA, 25 bp, SARS Virus
gaatcaaccgaagtctcccagtcca

SEQ ID NO: 142725 - DNA, 25 bp, SARS Virus
aatcaaccgaaagctcccagtccat

SEQ ID NO: 142726 - DNA, 25 bp, SARS Virus
atcaaccgaaatgtcccagtccatt

SEQ ID NO: 142727 - DNA, 25 bp, SARS Virus
tcaaccgaaatcgcccagtccatta

SEQ ID NO: 142728 - DNA, 25 bp, SARS Virus
caaccgaaatctgccagtccattat

SEQ ID NO: 142729 - DNA, 25 bp, SARS Virus
aaccgaaatctcgcagtccattata

SEQ ID NO: 142730 - DNA, 25 bp, SARS Virus
accgaaatctccgagtccattataa

SEQ ID NO: 142731 - DNA, 25 bp, SARS Virus
ccgaaatctcccggtccattataaa

SEQ ID NO: 142732 - DNA, 25 bp, SARS Virus
cgaaatctcccagtccattataaac

SEQ ID NO: 142733 - DNA, 25 bp, SARS Virus
gaaatctcccaggccattataaaca

SEQ ID NO: 142734 - DNA, 25 bp, SARS Virus
aaatctcccagtgcattataaacac

SEQ ID NO: 142735 - DNA, 25 bp, SARS Virus
aatctcccagtcgattataaacact

SEQ ID NO: 142736 - DNA, 25 bp, SARS Virus
atctcccagtccgttataaacactt

SEQ ID NO: 142737 - DNA, 25 bp, SARS Virus
tctcccagtccagtataaacacttt

SEQ ID NO: 142738 - DNA, 25 bp, SARS Virus
ctcccagtccatgataaacactttt

SEQ ID NO: 142739 - DNA, 25 bp, SARS Virus
tcccagtccattgtaaacacttttt

SEQ ID NO: 142740 - DNA, 25 bp, SARS Virus
cccagtccattagaaacacttttta

SEQ ID NO: 142741 - DNA, 25 bp, SARS Virus
ccagtccattatgaacactttttaa

SEQ ID NO: 142742 - DNA, 25 bp, SARS Virus
cagtccattatagacactttttaat

SEQ ID NO: 142743 - DNA, 25 bp, SARS Virus
agtccattataagcactttttaatt

SEQ ID NO: 142744 - DNA, 25 bp, SARS Virus
gtccattataaagactttttaattt

SEQ ID NO: 142745 - DNA, 25 bp, SARS Virus
tccattataaacgctttttaatttt

SEQ ID NO: 142746 - DNA, 25 bp, SARS Virus
ccattataaacagtttttaattttg

SEQ ID NO: 142747 - DNA, 25 bp, SARS Virus
cattataaacacgttttaattttgg

SEQ ID NO: 142748 - DNA, 25 bp, SARS Virus
attataaacactgtttaattttggt

SEQ ID NO: 142749 - DNA, 25 bp, SARS Virus
ttataaacacttgttaattttggtg

SEQ ID NO: 142750 - DNA, 25 bp, SARS Virus
tataaacactttgtaattttggtgg

SEQ ID NO: 142751 - DNA, 25 bp, SARS Virus
ataaacacttttgaattttggtggt

SEQ ID NO: 142752 - DNA, 25 bp, SARS Virus
taaacactttttgattttggtggtt

SEQ ID NO: 142753 - DNA, 25 bp, SARS Virus
aaacactttttagttttggtggttt

SEQ ID NO: 142754 - DNA, 25 bp, SARS Virus
aacactttttaagtttggtggtttt

SEQ ID NO: 142755 - DNA, 25 bp, SARS Virus
acactttttaatgttggtggtttta

SEQ ID NO: 142756 - DNA, 25 bp, SARS Virus
cactttttaattgtggtggttttat

SEQ ID NO: 142757 - DNA, 25 bp, SARS Virus
actttttaatttgggtggttttata

SEQ ID NO: 142758 - DNA, 25 bp, SARS Virus
ctttttaattttggtggttttataa

SEQ ID NO: 142759 - DNA, 25 bp, SARS Virus
tttttaattttggtggttttataaa

SEQ ID NO: 142760 - DNA, 25 bp, SARS Virus
ttttaattttgggggttttataaag

SEQ ID NO: 142761 - DNA, 25 bp, SARS Virus
tttaattttggtggttttataaagt

SEQ ID NO: 142762 - DNA, 25 bp, SARS Virus
ttaattttggtggttttataaagtt

SEQ ID NO: 142763 - DNA, 25 bp, SARS Virus
taattttggtgggtttataaagttt

SEQ ID NO: 142764 - DNA, 25 bp, SARS Virus
aattttggtggtgttataaagtttc

SEQ ID NO: 142765 - DNA, 25 bp, SARS Virus
attttggtggttgtataaagtttca

SEQ ID NO: 142766 - DNA, 25 bp, SARS Virus
ttttggtggtttgataaagtttcaa

SEQ ID NO: 142767 - DNA, 25 bp, SARS Virus
tttggtggttttgtaaagtttcaac

SEQ ID NO: 142768 - DNA, 25 bp, SARS Virus
ttggtggttttagaaagtttcaacc

SEQ ID NO: 142769 - DNA, 25 bp, SARS Virus
tggtggttttatgaagtttcaaccc

SEQ ID NO: 142770 - DNA, 25 bp, SARS Virus
ggtggttttatagagtttcaacccc

SEQ ID NO: 142771 - DNA, 25 bp, SARS Virus
gtggttttataaggtttcaacccca

SEQ ID NO: 142772 - DNA, 25 bp, SARS Virus
tggttttataaagtttcaaccccaa

SEQ ID NO: 142773 - DNA, 25 bp, SARS Virus
ggttttataaaggttcaaccccaaa

SEQ ID NO: 142774 - DNA, 25 bp, SARS Virus
gttttataaagtgtcaaccccaaaa

SEQ ID NO: 142775 - DNA, 25 bp, SARS Virus
ttttataaagttgcaaccccaaaac

SEQ ID NO: 142776 - DNA, 25 bp, SARS Virus
tttataaagtttgaaccccaaaaca

SEQ ID NO: 142777 - DNA, 25 bp, SARS Virus
ttataaagtttcgaccccaaaacat

SEQ ID NO: 142778 - DNA, 25 bp, SARS Virus
tataaagtttcagccccaaaacatg

SEQ ID NO: 142779 - DNA, 25 bp, SARS Virus
ataaagtttcaagcccaaaacatgt

SEQ ID NO: 142780 - DNA, 25 bp, SARS Virus
taaagtttcaacgccaaaacatgta

SEQ ID NO: 142781 - DNA, 25 bp, SARS Virus
aaagtttcaaccgcaaaacatgtaa

SEQ ID NO: 142782 - DNA, 25 bp, SARS Virus
aagtttcaacccgaaaacatgtaaa

SEQ ID NO: 142783 - DNA, 25 bp, SARS Virus
agtttcaaccccgaaacatgtaaac

SEQ ID NO: 142784 - DNA, 25 bp, SARS Virus
gtttcaaccccagaacatgtaaaca

SEQ ID NO: 142785 - DNA, 25 bp, SARS Virus
tttcaaccccaagacatgtaaacaa

SEQ ID NO: 142786 - DNA, 25 bp, SARS Virus
ttcaaccccaaagcatgtaaacaaa

SEQ ID NO: 142787 - DNA, 25 bp, SARS Virus
tcaaccccaaaagatgtaaacaaac

SEQ ID NO: 142788 - DNA, 25 bp, SARS Virus
caaccccaaaacgtgtaaacaaact

SEQ ID NO: 142789 - DNA, 25 bp, SARS Virus
aaccccaaaacaggtaaacaaactg

SEQ ID NO: 142790 - DNA, 25 bp, SARS Virus
accccaaaacatgtaaacaaactga

SEQ ID NO: 142791 - DNA, 25 bp, SARS Virus
ccccaaaacatggaaacaaactgaa

SEQ ID NO: 142792 - DNA, 25 bp, SARS Virus
cccaaaacatgtgaacaaactgaac

SEQ ID NO: 142793 - DNA, 25 bp, SARS Virus
ccaaaacatgtagacaaactgaact

SEQ ID NO: 142794 - DNA, 25 bp, SARS Virus
caaaacatgtaagcaaactgaactc

SEQ ID NO: 142795 - DNA, 25 bp, SARS Virus
aaaacatgtaaagaaactgaactcg

SEQ ID NO: 142796 - DNA, 25 bp, SARS Virus
aaacatgtaaacgaactgaactcgc

SEQ ID NO: 142797 - DNA, 25 bp, SARS Virus
aacatgtaaacagactgaactcgct

SEQ ID NO: 142798 - DNA, 25 bp, SARS Virus
acatgtaaacaagctgaactcgctt

SEQ ID NO: 142799 - DNA, 25 bp, SARS Virus
catgtaaacaaagtgaactcgcttg

SEQ ID NO: 142800 - DNA, 25 bp, SARS Virus
atgtaaacaaacggaactcgcttgt

SEQ ID NO: 142801 - DNA, 25 bp, SARS Virus
tgtaaacaaactgaactcgcttgtg

SEQ ID NO: 142802 - DNA, 25 bp, SARS Virus
gtaaacaaactggactcgcttgtga

SEQ ID NO: 142803 - DNA, 25 bp, SARS Virus
taaacaaactgagctcgcttgtgaa

SEQ ID NO: 142804 - DNA, 25 bp, SARS Virus
aaacaaactgaagtcgcttgtgaag

SEQ ID NO: 142805 - DNA, 25 bp, SARS Virus
aacaaactgaacgcgcttgtgaagt

SEQ ID NO: 142806 - DNA, 25 bp, SARS Virus
acaaactgaactggcttgtgaagtg

SEQ ID NO: 142807 - DNA, 25 bp, SARS Virus
caaactgaactcgcttgtgaagtgc

SEQ ID NO: 142808 - DNA, 25 bp, SARS Virus
aaactgaactcggttgtgaagtgca

SEQ ID NO: 142809 - DNA, 25 bp, SARS Virus
aactgaactcgcgtgtgaagtgcac

SEQ ID NO: 142810 - DNA, 25 bp, SARS Virus
actgaactcgctggtgaagtgcaca

SEQ ID NO: 142811 - DNA, 25 bp, SARS Virus
ctgaactcgcttgtgaagtgcacac

SEQ ID NO: 142812 - DNA, 25 bp, SARS Virus
tgaactcgcttgggaagtgcacaca

SEQ ID NO: 142813 - DNA, 25 bp, SARS Virus
gaactcgcttgtgaagtgcacacaa

SEQ ID NO: 142814 - DNA, 25 bp, SARS Virus
aactcgcttgtggagtgcacacaac

SEQ ID NO: 142815 - DNA, 25 bp, SARS Virus
actcgcttgtgaggtgcacacaacg

SEQ ID NO: 142816 - DNA, 25 bp, SARS Virus
ctcgcttgtgaagtgcacacaacgc

SEQ ID NO: 142817 - DNA, 25 bp, SARS Virus
tcgcttgtgaagggcacacaacgct

SEQ ID NO: 142818 - DNA, 25 bp, SARS Virus
cgcttgtgaagtgcacacaacgcta

SEQ ID NO: 142819 - DNA, 25 bp, SARS Virus
gcttgtgaagtggacacaacgctag

SEQ ID NO: 142820 - DNA, 25 bp, SARS Virus
cttgtgaagtgcgcacaacgctagg

SEQ ID NO: 142821 - DNA, 25 bp, SARS Virus
ttgtgaagtgcagacaacgctagga

SEQ ID NO: 142822 - DNA, 25 bp, SARS Virus
tgtgaagtgcacgcaacgctaggac

SEQ ID NO: 142823 - DNA, 25 bp, SARS Virus
gtgaagtgcacagaacgctaggaca

SEQ ID NO: 142824 - DNA, 25 bp, SARS Virus
tgaagtgcacacgacgctaggacaa

SEQ ID NO: 142825 - DNA, 25 bp, SARS Virus
gaagtgcacacagcgctaggacaag

SEQ ID NO: 142826 - DNA, 25 bp, SARS Virus
aagtgcacacaaggctaggacaagt

SEQ ID NO: 142827 - DNA, 25 bp, SARS Virus
agtgcacacaacgctaggacaagtc

SEQ ID NO: 142828 - DNA, 25 bp, SARS Virus
gtgcacacaacggtaggacaagtcg

SEQ ID NO: 142829 - DNA, 25 bp, SARS Virus
tgcacacaacgcgaggacaagtcgt

SEQ ID NO: 142830 - DNA, 25 bp, SARS Virus
gcacacaacgctgggacaagtcgtc

SEQ ID NO: 142831 - DNA, 25 bp, SARS Virus
cacacaacgctaggacaagtcgtcg

SEQ ID NO: 142832 - DNA, 25 bp, SARS Virus
acacaacgctaggacaagtcgtcgt

SEQ ID NO: 142833 - DNA, 25 bp, SARS Virus
cacaacgctagggcaagtcgtcgtt

SEQ ID NO: 142834 - DNA, 25 bp, SARS Virus
acaacgctaggagaagtcgtcgtta

SEQ ID NO: 142835 - DNA, 25 bp, SARS Virus
caacgctaggacgagtcgtcgttat

SEQ ID NO: 142836 - DNA, 25 bp, SARS Virus
aacgctaggacaggtcgtcgttatg

SEQ ID NO: 142837 - DNA, 25 bp, SARS Virus
acgctaggacaagtcgtcgttatgg

SEQ ID NO: 142838 - DNA, 25 bp, SARS Virus
cgctaggacaaggcgtcgttatgga

SEQ ID NO: 142839 - DNA, 25 bp, SARS Virus
gctaggacaagtggtcgttatggac

SEQ ID NO: 142840 - DNA, 25 bp, SARS Virus
ctaggacaagtcgtcgttatggact

SEQ ID NO: 142841 - DNA, 25 bp, SARS Virus
taggacaagtcggcgttatggactc

SEQ ID NO: 142842 - DNA, 25 bp, SARS Virus
aggacaagtcgtggttatggactct

SEQ ID NO: 142843 - DNA, 25 bp, SARS Virus
ggacaagtcgtcgttatggactctc

SEQ ID NO: 142844 - DNA, 25 bp, SARS Virus
gacaagtcgtcggtatggactctca

SEQ ID NO: 142845 - DNA, 25 bp, SARS Virus
acaagtcgtcgtgatggactctcac

SEQ ID NO: 142846 - DNA, 25 bp, SARS Virus
caagtcgtcgttgtggactctcacg

SEQ ID NO: 142847 - DNA, 25 bp, SARS Virus
aagtcgtcgttagggactctcacgt

SEQ ID NO: 142848 - DNA, 25 bp, SARS Virus
agtcgtcgttatggactctcacgtg

SEQ ID NO: 142849 - DNA, 25 bp, SARS Virus
gtcgtcgttatggactctcacgtgc

SEQ ID NO: 142850 - DNA, 25 bp, SARS Virus
tcgtcgttatgggctctcacgtgct

SEQ ID NO: 142851 - DNA, 25 bp, SARS Virus
cgtcgttatggagtctcacgtgcta

SEQ ID NO: 142852 - DNA, 25 bp, SARS Virus
gtcgttatggacgctcacgtgctaa

SEQ ID NO: 142853 - DNA, 25 bp, SARS Virus
tcgttatggactgtcacgtgctaaa

SEQ ID NO: 142854 - DNA, 25 bp, SARS Virus
cgttatggactcgcacgtgctaaat

SEQ ID NO: 142855 - DNA, 25 bp, SARS Virus
gttatggactctgacgtgctaaatc

SEQ ID NO: 142856 - DNA, 25 bp, SARS Virus
ttatggactctcgcgtgctaaatca

SEQ ID NO: 142857 - DNA, 25 bp, SARS Virus
tatggactctcaggtgctaaatcaa

SEQ ID NO: 142858 - DNA, 25 bp, SARS Virus
atggactctcacgtgctaaatcaac

SEQ ID NO: 142859 - DNA, 25 bp, SARS Virus
tggactctcacgggctaaatcaaca

SEQ ID NO: 142860 - DNA, 25 bp, SARS Virus
ggactctcacgtgctaaatcaacac

SEQ ID NO: 142861 - DNA, 25 bp, SARS Virus
gactctcacgtggtaaatcaacaca

SEQ ID NO: 142862 - DNA, 25 bp, SARS Virus
actctcacgtgcgaaatcaacacac

SEQ ID NO: 142863 - DNA, 25 bp, SARS Virus
ctctcacgtgctgaatcaacacacg

SEQ ID NO: 142864 - DNA, 25 bp, SARS Virus
tctcacgtgctagatcaacacacgt

SEQ ID NO: 142865 - DNA, 25 bp, SARS Virus
ctcacgtgctaagtcaacacacgtt

SEQ ID NO: 142866 - DNA, 25 bp, SARS Virus
tcacgtgctaaagcaacacacgttt

SEQ ID NO: 142867 - DNA, 25 bp, SARS Virus
cacgtgctaaatgaacacacgtttt

SEQ ID NO: 142868 - DNA, 25 bp, SARS Virus
acgtgctaaatcgacacacgttttc

SEQ ID NO: 142869 - DNA, 25 bp, SARS Virus
cgtgctaaatcagcacacgttttcg

SEQ ID NO: 142870 - DNA, 25 bp, SARS Virus
gtgctaaatcaagacacgttttcga

SEQ ID NO: 142871 - DNA, 25 bp, SARS Virus
tgctaaatcaacgcacgttttcgat

SEQ ID NO: 142872 - DNA, 25 bp, SARS Virus
gctaaatcaacagacgttttcgatg

SEQ ID NO: 142873 - DNA, 25 bp, SARS Virus
ctaaatcaacacgcgttttcgatgg

SEQ ID NO: 142874 - DNA, 25 bp, SARS Virus
taaatcaacacaggttttcgatggt

SEQ ID NO: 142875 - DNA, 25 bp, SARS Virus
aaatcaacacacgttttcgatggta

SEQ ID NO: 142876 - DNA, 25 bp, SARS Virus
aatcaacacacggtttcgatggtat

SEQ ID NO: 142877 - DNA, 25 bp, SARS Virus
atcaacacacgtgttcgatggtata

SEQ ID NO: 142878 - DNA, 25 bp, SARS Virus
tcaacacacgttgtcgatggtataa

SEQ ID NO: 142879 - DNA, 25 bp, SARS Virus
caacacacgtttgcgatggtataac

SEQ ID NO: 142880 - DNA, 25 bp, SARS Virus
aacacacgttttggatggtataacc

SEQ ID NO: 142881 - DNA, 25 bp, SARS Virus
acacacgttttcgatggtataacct

SEQ ID NO: 142882 - DNA, 25 bp, SARS Virus
cacacgttttcggtggtataacctc

SEQ ID NO: 142883 - DNA, 25 bp, SARS Virus
acacgttttcgagggtataacctct

SEQ ID NO: 142884 - DNA, 25 bp, SARS Virus
cacgttttcgatggtataacctctt

SEQ ID NO: 142885 - DNA, 25 bp, SARS Virus
acgttttcgatggtataacctcttc

SEQ ID NO: 142886 - DNA, 25 bp, SARS Virus
cgttttcgatgggataacctcttcg

SEQ ID NO: 142887 - DNA, 25 bp, SARS Virus
gttttcgatggtgtaacctcttcgt

SEQ ID NO: 142888 - DNA, 25 bp, SARS Virus
ttttcgatggtagaacctcttcgtt

SEQ ID NO: 142889 - DNA, 25 bp, SARS Virus
tttcgatggtatgacctcttcgttt

SEQ ID NO: 142890 - DNA, 25 bp, SARS Virus
ttcgatggtatagcctcttcgttta

SEQ ID NO: 142891 - DNA, 25 bp, SARS Virus
tcgatggtataagctcttcgtttaa

SEQ ID NO: 142892 - DNA, 25 bp, SARS Virus
cgatggtataacgtcttcgtttaat

SEQ ID NO: 142893 - DNA, 25 bp, SARS Virus
gatggtataaccgcttcgtttaatc

SEQ ID NO: 142894 - DNA, 25 bp, SARS Virus
atggtataacctgttcgtttaatcg

SEQ ID NO: 142895 - DNA, 25 bp, SARS Virus
tggtataacctcgtcgtttaatcgt

SEQ ID NO: 142896 - DNA, 25 bp, SARS Virus
ggtataacctctgcgtttaatcgtg

SEQ ID NO: 142897 - DNA, 25 bp, SARS Virus
gtataacctcttggtttaatcgtgt

SEQ ID NO: 142898 - DNA, 25 bp, SARS Virus
tataacctcttcgtttaatcgtgta

SEQ ID NO: 142899 - DNA, 25 bp, SARS Virus
ataacctcttcggttaatcgtgtaa

SEQ ID NO: 142900 - DNA, 25 bp, SARS Virus
taacctcttcgtgtaatcgtgtaag

SEQ ID NO: 142901 - DNA, 25 bp, SARS Virus
aacctcttcgttgaatcgtgtaagt

SEQ ID NO: 142902 - DNA, 25 bp, SARS Virus
acctcttcgtttgatcgtgtaagtc

SEQ ID NO: 142903 - DNA, 25 bp, SARS Virus
cctcttcgtttagtcgtgtaagtca

SEQ ID NO: 142904 - DNA, 25 bp, SARS Virus
ctcttcgtttaagcgtgtaagtcat

SEQ ID NO: 142905 - DNA, 25 bp, SARS Virus
tcttcgtttaatggtgtaagtcatc

SEQ ID NO: 142906 - DNA, 25 bp, SARS Virus
cttcgtttaatcgtgtaagtcatct

SEQ ID NO: 142907 - DNA, 25 bp, SARS Virus
ttcgtttaatcgggtaagtcatctt

SEQ ID NO: 142908 - DNA, 25 bp, SARS Virus
tcgtttaatcgtgtaagtcatctta

SEQ ID NO: 142909 - DNA, 25 bp, SARS Virus
cgtttaatcgtggaagtcatcttag

SEQ ID NO: 142910 - DNA, 25 bp, SARS Virus
gtttaatcgtgtgagtcatcttaga

SEQ ID NO: 142911 - DNA, 25 bp, SARS Virus
tttaatcgtgtaggtcatcttagag

SEQ ID NO: 142912 - DNA, 25 bp, SARS Virus
ttaatcgtgtaagtcatcttagagg

SEQ ID NO: 142913 - DNA, 25 bp, SARS Virus
taatcgtgtaaggcatcttagaggc

SEQ ID NO: 142914 - DNA, 25 bp, SARS Virus
aatcgtgtaagtgatcttagaggcg

SEQ ID NO: 142915 - DNA, 25 bp, SARS Virus
atcgtgtaagtcgtcttagaggcgt

SEQ ID NO: 142916 - DNA, 25 bp, SARS Virus
tcgtgtaagtcagcttagaggcgtc

SEQ ID NO: 142917 - DNA, 25 bp, SARS Virus
cgtgtaagtcatgttagaggcgtct

SEQ ID NO: 142918 - DNA, 25 bp, SARS Virus
gtgtaagtcatcgtagaggcgtcta

SEQ ID NO: 142919 - DNA, 25 bp, SARS Virus
tgtaagtcatctgagaggcgtctac

SEQ ID NO: 142920 - DNA, 25 bp, SARS Virus
gtaagtcatcttggaggcgtctaca

SEQ ID NO: 142921 - DNA, 25 bp, SARS Virus
taagtcatcttagaggcgtctacat

SEQ ID NO: 142922 - DNA, 25 bp, SARS Virus
aagtcatcttaggggcgtctacatg

SEQ ID NO: 142923 - DNA, 25 bp, SARS Virus
agtcatcttagaggcgtctacatgt

SEQ ID NO: 142924 - DNA, 25 bp, SARS Virus
gtcatcttagaggcgtctacatgta

SEQ ID NO: 142925 - DNA, 25 bp, SARS Virus
tcatcttagaggggtctacatgtat

SEQ ID NO: 142926 - DNA, 25 bp, SARS Virus
catcttagaggcgtctacatgtata

SEQ ID NO: 142927 - DNA, 25 bp, SARS Virus
atcttagaggcggctacatgtataa

SEQ ID NO: 142928 - DNA, 25 bp, SARS Virus
tcttagaggcgtgtacatgtataat

SEQ ID NO: 142929 - DNA, 25 bp, SARS Virus
cttagaggcgtcgacatgtataatg

SEQ ID NO: 142930 - DNA, 25 bp, SARS Virus
ttagaggcgtctgcatgtataatgt

SEQ ID NO: 142931 - DNA, 25 bp, SARS Virus
tagaggcgtctagatgtataatgtt

SEQ ID NO: 142932 - DNA, 25 bp, SARS Virus
agaggcgtctacgtgtataatgtta

SEQ ID NO: 142933 - DNA, 25 bp, SARS Virus
gaggcgtctacaggtataatgttag

SEQ ID NO: 142934 - DNA, 25 bp, SARS Virus
aggcgtctacatgtataatgttaga

SEQ ID NO: 142935 - DNA, 25 bp, SARS Virus
ggcgtctacatggataatgttagat

SEQ ID NO: 142936 - DNA, 25 bp, SARS Virus
gcgtctacatgtgtaatgttagatg

SEQ ID NO: 142937 - DNA, 25 bp, SARS Virus
cgtctacatgtagaatgttagatgc

SEQ ID NO: 142938 - DNA, 25 bp, SARS Virus
gtctacatgtatgatgttagatgcc

SEQ ID NO: 142939 - DNA, 25 bp, SARS Virus
tctacatgtatagtgttagatgcct

SEQ ID NO: 142940 - DNA, 25 bp, SARS Virus
ctacatgtataaggttagatgcctc

SEQ ID NO: 142941 - DNA, 25 bp, SARS Virus
tacatgtataatgttagatgcctcc

SEQ ID NO: 142942 - DNA, 25 bp, SARS Virus
acatgtataatggtagatgcctcca

SEQ ID NO: 142943 - DNA, 25 bp, SARS Virus
catgtataatgtgagatgcctccaa

SEQ ID NO: 142944 - DNA, 25 bp, SARS Virus
atgtataatgttggatgcctccaaa

SEQ ID NO: 142945 - DNA, 25 bp, SARS Virus
tgtataatgttagatgcctccaaaa

SEQ ID NO: 142946 - DNA, 25 bp, SARS Virus
gtataatgttaggtgcctccaaaat

SEQ ID NO: 142947 - DNA, 25 bp, SARS Virus
tataatgttagaggcctccaaaatc

SEQ ID NO: 142948 - DNA, 25 bp, SARS Virus
ataatgttagatgcctccaaaatcg

SEQ ID NO: 142949 - DNA, 25 bp, SARS Virus
taatgttagatggctccaaaatcgg

SEQ ID NO: 142950 - DNA, 25 bp, SARS Virus
aatgttagatgcgtccaaaatcggt

SEQ ID NO: 142951 - DNA, 25 bp, SARS Virus
atgttagatgccgccaaaatcggta

SEQ ID NO: 142952 - DNA, 25 bp, SARS Virus
tgttagatgcctgcaaaatcggtat

SEQ ID NO: 142953 - DNA, 25 bp, SARS Virus
gttagatgcctcgaaaatcggtatc

SEQ ID NO: 142954 - DNA, 25 bp, SARS Virus
ttagatgcctccgaaatcggtatct

SEQ ID NO: 142955 - DNA, 25 bp, SARS Virus
tagatgcctccagaatcggtatctt

SEQ ID NO: 142956 - DNA, 25 bp, SARS Virus
agatgcctccaagatcggtatcttt

SEQ ID NO: 142957 - DNA, 25 bp, SARS Virus
gatgcctccaaagtcggtatctttg

SEQ ID NO: 142958 - DNA, 25 bp, SARS Virus
atgcctccaaaagcggtatctttgt

SEQ ID NO: 142959 - DNA, 25 bp, SARS Virus
tgcctccaaaatgggtatctttgtc

SEQ ID NO: 142960 - DNA, 25 bp, SARS Virus
gcctccaaaatcggtatctttgtcc

SEQ ID NO: 142961 - DNA, 25 bp, SARS Virus
cctccaaaatcggtatctttgtccg

SEQ ID NO: 142962 - DNA, 25 bp, SARS Virus
ctccaaaatcgggatctttgtccgt

SEQ ID NO: 142963 - DNA, 25 bp, SARS Virus
tccaaaatcggtgtctttgtccgta

SEQ ID NO: 142964 - DNA, 25 bp, SARS Virus
ccaaaatcggtagctttgtccgtaa

SEQ ID NO: 142965 - DNA, 25 bp, SARS Virus
caaaatcggtatgtttgtccgtaat

SEQ ID NO: 142966 - DNA, 25 bp, SARS Virus
aaaatcggtatcgttgtccgtaatg

SEQ ID NO: 142967 - DNA, 25 bp, SARS Virus
aaatcggtatctgtgtccgtaatga

SEQ ID NO: 142968 - DNA, 25 bp, SARS Virus
aatcggtatcttggtccgtaatgaa

SEQ ID NO: 142969 - DNA, 25 bp, SARS Virus
atcggtatctttgtccgtaatgaag

SEQ ID NO: 142970 - DNA, 25 bp, SARS Virus
tcggtatctttggccgtaatgaaga

SEQ ID NO: 142971 - DNA, 25 bp, SARS Virus
cggtatctttgtgcgtaatgaagac

SEQ ID NO: 142972 - DNA, 25 bp, SARS Virus
ggtatctttgtcggtaatgaagaca

SEQ ID NO: 142973 - DNA, 25 bp, SARS Virus
gtatctttgtccgtaatgaagacat

SEQ ID NO: 142974 - DNA, 25 bp, SARS Virus
tatctttgtccggaatgaagacatc

SEQ ID NO: 142975 - DNA, 25 bp, SARS Virus
atctttgtccgtgatgaagacatca

SEQ ID NO: 142976 - DNA, 25 bp, SARS Virus
tctttgtccgtagtgaagacatcat

SEQ ID NO: 142977 - DNA, 25 bp, SARS Virus
ctttgtccgtaaggaagacatcatt

SEQ ID NO: 142978 - DNA, 25 bp, SARS Virus
tttgtccgtaatgaagacatcatta

SEQ ID NO: 142979 - DNA, 25 bp, SARS Virus
ttgtccgtaatggagacatcattac

SEQ ID NO: 142980 - DNA, 25 bp, SARS Virus
tgtccgtaatgaggacatcattacg

SEQ ID NO: 142981 - DNA, 25 bp, SARS Virus
gtccgtaatgaagacatcattacga

SEQ ID NO: 142982 - DNA, 25 bp, SARS Virus
tccgtaatgaaggcatcattacgat

SEQ ID NO: 142983 - DNA, 25 bp, SARS Virus
ccgtaatgaagagatcattacgatt

SEQ ID NO: 142984 - DNA, 25 bp, SARS Virus
cgtaatgaagacgtcattacgatta

SEQ ID NO: 142985 - DNA, 25 bp, SARS Virus
gtaatgaagacagcattacgattaa

SEQ ID NO: 142986 - DNA, 25 bp, SARS Virus
taatgaagacatgattacgattaac

SEQ ID NO: 142987 - DNA, 25 bp, SARS Virus
aatgaagacatcgttacgattaact

SEQ ID NO: 142988 - DNA, 25 bp, SARS Virus
atgaagacatcagtacgattaactt

SEQ ID NO: 142989 - DNA, 25 bp, SARS Virus
tgaagacatcatgacgattaacttt

SEQ ID NO: 142990 - DNA, 25 bp, SARS Virus
gaagacatcattgcgattaactttt

SEQ ID NO: 142991 - DNA, 25 bp, SARS Virus
aagacatcattaggattaacttttc

SEQ ID NO: 142992 - DNA, 25 bp, SARS Virus
agacatcattacgattaacttttca

SEQ ID NO: 142993 - DNA, 25 bp, SARS Virus
gacatcattacggttaacttttcaa

SEQ ID NO: 142994 - DNA, 25 bp, SARS Virus
acatcattacgagtaacttttcaat

SEQ ID NO: 142995 - DNA, 25 bp, SARS Virus
catcattacgatgaacttttcaatc

SEQ ID NO: 142996 - DNA, 25 bp, SARS Virus
atcattacgattgacttttcaatca

SEQ ID NO: 142997 - DNA, 25 bp, SARS Virus
tcattacgattagcttttcaatcat

SEQ ID NO: 142998 - DNA, 25 bp, SARS Virus
cattacgattaagttttcaatcatc

SEQ ID NO: 142999 - DNA, 25 bp, SARS Virus
attacgattaacgtttcaatcatcc

SEQ ID NO: 143000 - DNA, 25 bp, SARS Virus
ttacgattaactgttcaatcatcca

SEQ ID NO: 143001 - DNA, 25 bp, SARS Virus
tacgattaacttgtcaatcatccat

SEQ ID NO: 143002 - DNA, 25 bp, SARS Virus
acgattaactttgcaatcatccata

SEQ ID NO: 143003 - DNA, 25 bp, SARS Virus
cgattaacttttgaatcatccatat

SEQ ID NO: 143004 - DNA, 25 bp, SARS Virus
gattaacttttcgatcatccatatc

SEQ ID NO: 143005 - DNA, 25 bp, SARS Virus
attaacttttcagtcatccatatcg

SEQ ID NO: 143006 - DNA, 25 bp, SARS Virus
ttaacttttcaagcatccatatcgt

SEQ ID NO: 143007 - DNA, 25 bp, SARS Virus
taacttttcaatgatccatatcgtt

SEQ ID NO: 143008 - DNA, 25 bp, SARS Virus
aacttttcaatcgtccatatcgtta

SEQ ID NO: 143009 - DNA, 25 bp, SARS Virus
acttttcaatcagccatatcgttac

SEQ ID NO: 143010 - DNA, 25 bp, SARS Virus
cttttcaatcatgcatatcgttacc

SEQ ID NO: 143011 - DNA, 25 bp, SARS Virus
ttttcaatcatcgatatcgttacca

SEQ ID NO: 143012 - DNA, 25 bp, SARS Virus
tttcaatcatccgtatcgttaccac

SEQ ID NO: 143013 - DNA, 25 bp, SARS Virus
ttcaatcatccagatcgttaccaca

SEQ ID NO: 143014 - DNA, 25 bp, SARS Virus
tcaatcatccatgtcgttaccacaa

SEQ ID NO: 143015 - DNA, 25 bp, SARS Virus
caatcatccatagcgttaccacaat

SEQ ID NO: 143016 - DNA, 25 bp, SARS Virus
aatcatccatatggttaccacaata

SEQ ID NO: 143017 - DNA, 25 bp, SARS Virus
tgattgatctcgtcgtcacatccgt

SEQ ID NO: 143018 - DNA, 25 bp, SARS Virus
gattgatctcgttgtcacatccgtc

SEQ ID NO: 143019 - DNA, 25 bp, SARS Virus
attgatctcgtcttcacatccgtcg

SEQ ID NO: 143020 - DNA, 25 bp, SARS Virus
ttgatctcgtcgtcacatccgtcgt

SEQ ID NO: 143021 - DNA, 25 bp, SARS Virus
tgatctcgtcgttacatccgtcgtt

SEQ ID NO: 143022 - DNA, 25 bp, SARS Virus
gatctcgtcgtctcatccgtcgtta

SEQ ID NO: 143023 - DNA, 25 bp, SARS Virus
atctcgtcgtcatatccgtcgttag

SEQ ID NO: 143024 - DNA, 25 bp, SARS Virus
tctcgtcgtcacttccgtcgttagt

SEQ ID NO: 143025 - DNA, 25 bp, SARS Virus
ctcgtcgtcacatccgtcgttagta

SEQ ID NO: 143026 - DNA, 25 bp, SARS Virus
tcgtcgtcacattcgtcgttagtat

SEQ ID NO: 143027 - DNA, 25 bp, SARS Virus
cgtcgtcacatctgtcgttagtata

SEQ ID NO: 143028 - DNA, 25 bp, SARS Virus
gtcgtcacatccttcgttagtatag

SEQ ID NO: 143029 - DNA, 25 bp, SARS Virus
tcgtcacatccgtcgttagtatagt

SEQ ID NO: 143030 - DNA, 25 bp, SARS Virus
cgtcacatccgttgttagtatagta

SEQ ID NO: 143031 - DNA, 25 bp, SARS Virus
gtcacatccgtctttagtatagtag

SEQ ID NO: 143032 - DNA, 25 bp, SARS Virus
tcacatccgtcgttagtatagtagt

SEQ ID NO: 143033 - DNA, 25 bp, SARS Virus
cacatccgtcgttagtatagtagtc

SEQ ID NO: 143034 - DNA, 25 bp, SARS Virus
acatccgtcgtttgtatagtagtca

SEQ ID NO: 143035 - DNA, 25 bp, SARS Virus
catccgtcgttattatagtagtcac

SEQ ID NO: 143036 - DNA, 25 bp, SARS Virus
atccgtcgttagtatagtagtcact

SEQ ID NO: 143037 - DNA, 25 bp, SARS Virus
tccgtcgttagtttagtagtcactc

SEQ ID NO: 143038 - DNA, 25 bp, SARS Virus
ccgtcgttagtatagtagtcactcg

SEQ ID NO: 143039 - DNA, 25 bp, SARS Virus
cgtcgttagtattgtagtcactcgt

SEQ ID NO: 143040 - DNA, 25 bp, SARS Virus
gtcgttagtatattagtcactcgtc

SEQ ID NO: 143041 - DNA, 25 bp, SARS Virus
tcgttagtatagtagtcactcgtct

SEQ ID NO: 143042 - DNA, 25 bp, SARS Virus
cgttagtatagttgtcactcgtctc

SEQ ID NO: 143043 - DNA, 25 bp, SARS Virus
gttagtatagtattcactcgtctcc

SEQ ID NO: 143044 - DNA, 25 bp, SARS Virus
ttagtatagtagtcactcgtctcca

SEQ ID NO: 143045 - DNA, 25 bp, SARS Virus
tagtatagtagttactcgtctccac

SEQ ID NO: 143046 - DNA, 25 bp, SARS Virus
agtatagtagtctctcgtctccacc

SEQ ID NO: 143047 - DNA, 25 bp, SARS Virus
gtatagtagtcattcgtctccaccg

SEQ ID NO: 143048 - DNA, 25 bp, SARS Virus
tatagtagtcactcgtctccaccgt

SEQ ID NO: 143049 - DNA, 25 bp, SARS Virus
atagtagtcacttgtctccaccgtt

SEQ ID NO: 143050 - DNA, 25 bp, SARS Virus
tagtagtcactcttctccaccgttg

SEQ ID NO: 143051 - DNA, 25 bp, SARS Virus
agtagtcactcgtctccaccgttgt

SEQ ID NO: 143052 - DNA, 25 bp, SARS Virus
gtagtcactcgtttccaccgttgtg

SEQ ID NO: 143053 - DNA, 25 bp, SARS Virus
tagtcactcgtctccaccgttgtga

SEQ ID NO: 143054 - DNA, 25 bp, SARS Virus
agtcactcgtcttcaccgttgtgac

SEQ ID NO: 143055 - DNA, 25 bp, SARS Virus
gtcactcgtctctaccgttgtgaca

SEQ ID NO: 143056 - DNA, 25 bp, SARS Virus
tcactcgtctcctccgttgtgacat

SEQ ID NO: 143057 - DNA, 25 bp, SARS Virus
cactcgtctccatcgttgtgacatt

SEQ ID NO: 143058 - DNA, 25 bp, SARS Virus
actcgtctccactgttgtgacattc

SEQ ID NO: 143059 - DNA, 25 bp, SARS Virus
ctcgtctccacctttgtgacattca

SEQ ID NO: 143060 - DNA, 25 bp, SARS Virus
tcgtctccaccgttgtgacattcag

SEQ ID NO: 143061 - DNA, 25 bp, SARS Virus
cgtctccaccgttgtgacattcagg

SEQ ID NO: 143062 - DNA, 25 bp, SARS Virus
gtctccaccgttttgacattcaggt

SEQ ID NO: 143063 - DNA, 25 bp, SARS Virus
tctccaccgttgtgacattcaggta

SEQ ID NO: 143064 - DNA, 25 bp, SARS Virus
ctccaccgttgttacattcaggtaa

SEQ ID NO: 143065 - DNA, 25 bp, SARS Virus
tccaccgttgtgtcattcaggtaac

SEQ ID NO: 143066 - DNA, 25 bp, SARS Virus
ccaccgttgtgatattcaggtaact

SEQ ID NO: 143067 - DNA, 25 bp, SARS Virus
caccgttgtgactttcaggtaactt

SEQ ID NO: 143068 - DNA, 25 bp, SARS Virus
accgttgtgacattcaggtaacttg

SEQ ID NO: 143069 - DNA, 25 bp, SARS Virus
ccgttgtgacattcaggtaacttga

SEQ ID NO: 143070 - DNA, 25 bp, SARS Virus
cgttgtgacatttaggtaacttgaa

SEQ ID NO: 143071 - DNA, 25 bp, SARS Virus
gttgtgacattctggtaacttgaag

SEQ ID NO: 143072 - DNA, 25 bp, SARS Virus
ttgtgacattcatgtaacttgaaga

SEQ ID NO: 143073 - DNA, 25 bp, SARS Virus
tgtgacattcagttaacttgaagac

SEQ ID NO: 143074 - DNA, 25 bp, SARS Virus
gtgacattcaggtaacttgaagacg

SEQ ID NO: 143075 - DNA, 25 bp, SARS Virus
tgacattcaggttacttgaagacgc

SEQ ID NO: 143076 - DNA, 25 bp, SARS Virus
gacattcaggtatcttgaagacgcg

SEQ ID NO: 143077 - DNA, 25 bp, SARS Virus
acattcaggtaatttgaagacgcgt

SEQ ID NO: 143078 - DNA, 25 bp, SARS Virus
cattcaggtaacttgaagacgcgtg

SEQ ID NO: 143079 - DNA, 25 bp, SARS Virus
attcaggtaacttgaagacgcgtgt

SEQ ID NO: 143080 - DNA, 25 bp, SARS Virus
ttcaggtaactttaagacgcgtgtt

SEQ ID NO: 143081 - DNA, 25 bp, SARS Virus
tcaggtaacttgtagacgcgtgttt

SEQ ID NO: 143082 - DNA, 25 bp, SARS Virus
caggtaacttgatgacgcgtgttta

SEQ ID NO: 143083 - DNA, 25 bp, SARS Virus
aggtaacttgaatacgcgtgtttac

SEQ ID NO: 143084 - DNA, 25 bp, SARS Virus
ggtaacttgaagtcgcgtgtttact

SEQ ID NO: 143085 - DNA, 25 bp, SARS Virus
gtaacttgaagatgcgtgtttactc

SEQ ID NO: 143086 - DNA, 25 bp, SARS Virus
taacttgaagactcgtgtttactct

SEQ ID NO: 143087 - DNA, 25 bp, SARS Virus
aacttgaagacgtgtgtttactcta

SEQ ID NO: 143088 - DNA, 25 bp, SARS Virus
acttgaagacgcttgtttactctag

SEQ ID NO: 143089 - DNA, 25 bp, SARS Virus
cttgaagacgcgtgtttactctaga

SEQ ID NO: 143090 - DNA, 25 bp, SARS Virus
ttgaagacgcgtttttactctagag

SEQ ID NO: 143091 - DNA, 25 bp, SARS Virus
tgaagacgcgtgtttactctagaga

SEQ ID NO: 143092 - DNA, 25 bp, SARS Virus
gaagacgcgtgtttactctagagat

SEQ ID NO: 143093 - DNA, 25 bp, SARS Virus
aagacgcgtgtttactctagagatc

SEQ ID NO: 143094 - DNA, 25 bp, SARS Virus
agacgcgtgttttctctagagatcg

SEQ ID NO: 143095 - DNA, 25 bp, SARS Virus
gacgcgtgtttattctagagatcgt

SEQ ID NO: 143096 - DNA, 25 bp, SARS Virus
acgcgtgtttactctagagatcgta

SEQ ID NO: 143097 - DNA, 25 bp, SARS Virus
cgcgtgtttactttagagatcgtaa

SEQ ID NO: 143098 - DNA, 25 bp, SARS Virus
gcgtgtttactctagagatcgtaat

SEQ ID NO: 143099 - DNA, 25 bp, SARS Virus
cgtgtttactcttgagatcgtaatt

SEQ ID NO: 143100 - DNA, 25 bp, SARS Virus
gtgtttactctatagatcgtaatta

SEQ ID NO: 143101 - DNA, 25 bp, SARS Virus
tgtttactctagtgatcgtaattat

SEQ ID NO: 143102 - DNA, 25 bp, SARS Virus
gtttactctagatatcgtaattata

SEQ ID NO: 143103 - DNA, 25 bp, SARS Virus
tttactctagagttcgtaattatag

SEQ ID NO: 143104 - DNA, 25 bp, SARS Virus
ttactctagagatcgtaattatagt

SEQ ID NO: 143105 - DNA, 25 bp, SARS Virus
tactctagagattgtaattatagtg

SEQ ID NO: 143106 - DNA, 25 bp, SARS Virus
actctagagatcttaattatagtgg

SEQ ID NO: 143107 - DNA, 25 bp, SARS Virus
ctctagagatcgtaattatagtgga

SEQ ID NO: 143108 - DNA, 25 bp, SARS Virus
tctagagatcgttattatagtggat

SEQ ID NO: 143109 - DNA, 25 bp, SARS Virus
ctagagatcgtatttatagtggatc

SEQ ID NO: 143110 - DNA, 25 bp, SARS Virus
tagagatcgtaattatagtggatcc

SEQ ID NO: 143111 - DNA, 25 bp, SARS Virus
agagatcgtaattatagtggatccg

SEQ ID NO: 143112 - DNA, 25 bp, SARS Virus
gagatcgtaattttagtggatccgt

SEQ ID NO: 143113 - DNA, 25 bp, SARS Virus
agatcgtaattatagtggatccgta

SEQ ID NO: 143114 - DNA, 25 bp, SARS Virus
gatcgtaattattgtggatccgtaa

SEQ ID NO: 143115 - DNA, 25 bp, SARS Virus
atcgtaattatattggatccgtaag

SEQ ID NO: 143116 - DNA, 25 bp, SARS Virus
tcgtaattatagtggatccgtaagc

SEQ ID NO: 143117 - DNA, 25 bp, SARS Virus
cgtaattatagttgatccgtaagcg

SEQ ID NO: 143118 - DNA, 25 bp, SARS Virus
gtaattatagtgtatccgtaagcgg

SEQ ID NO: 143119 - DNA, 25 bp, SARS Virus
taattatagtggttccgtaagcggt

SEQ ID NO: 143120 - DNA, 25 bp, SARS Virus
aattatagtggatccgtaagcggta

SEQ ID NO: 143121 - DNA, 25 bp, SARS Virus
attatagtggattcgtaagcggtat

SEQ ID NO: 143122 - DNA, 25 bp, SARS Virus
ttatagtggatctgtaagcggtata

SEQ ID NO: 143123 - DNA, 25 bp, SARS Virus
tatagtggatccttaagcggtataa

SEQ ID NO: 143124 - DNA, 25 bp, SARS Virus
atagtggatccgtaagcggtataac

SEQ ID NO: 143125 - DNA, 25 bp, SARS Virus
tagtggatccgttagcggtataacg

SEQ ID NO: 143126 - DNA, 25 bp, SARS Virus
agtggatccgtatgcggtataacga

SEQ ID NO: 143127 - DNA, 25 bp, SARS Virus
gtggatccgtaatcggtataacgaa

SEQ ID NO: 143128 - DNA, 25 bp, SARS Virus
tggatccgtaagtggtataacgaag

SEQ ID NO: 143129 - DNA, 25 bp, SARS Virus
ggatccgtaagctgtataacgaagt

SEQ ID NO: 143130 - DNA, 25 bp, SARS Virus
gatccgtaagcgttataacgaagta

SEQ ID NO: 143131 - DNA, 25 bp, SARS Virus
atccgtaagcggtataacgaagtac

SEQ ID NO: 143132 - DNA, 25 bp, SARS Virus
tccgtaagcggtttaacgaagtact

SEQ ID NO: 143133 - DNA, 25 bp, SARS Virus
ccgtaagcggtataacgaagtactt

SEQ ID NO: 143134 - DNA, 25 bp, SARS Virus
cgtaagcggtattacgaagtacttc

SEQ ID NO: 143135 - DNA, 25 bp, SARS Virus
gtaagcggtatatcgaagtacttcg

SEQ ID NO: 143136 - DNA, 25 bp, SARS Virus
taagcggtataatgaagtacttcgg

SEQ ID NO: 143137 - DNA, 25 bp, SARS Virus
aagcggtataactaagtacttcggt

SEQ ID NO: 143138 - DNA, 25 bp, SARS Virus
agcggtataacgtagtacttcggtc

SEQ ID NO: 143139 - DNA, 25 bp, SARS Virus
gcggtataacgatgtacttcggtcg

SEQ ID NO: 143140 - DNA, 25 bp, SARS Virus
cggtataacgaattacttcggtcgt

SEQ ID NO: 143141 - DNA, 25 bp, SARS Virus
ggtataacgaagtacttcggtcgta

SEQ ID NO: 143142 - DNA, 25 bp, SARS Virus
gtataacgaagttcttcggtcgtag

SEQ ID NO: 143143 - DNA, 25 bp, SARS Virus
tataacgaagtatttcggtcgtagt

SEQ ID NO: 143144 - DNA, 25 bp, SARS Virus
ataacgaagtacttcggtcgtagtc

SEQ ID NO: 143145 - DNA, 25 bp, SARS Virus
taacgaagtacttcggtcgtagtcg

SEQ ID NO: 143146 - DNA, 25 bp, SARS Virus
aacgaagtactttggtcgtagtcgc

SEQ ID NO: 143147 - DNA, 25 bp, SARS Virus
acgaagtacttctgtcgtagtcgct

SEQ ID NO: 143148 - DNA, 25 bp, SARS Virus
cgaagtacttcgttcgtagtcgctc

SEQ ID NO: 143149 - DNA, 25 bp, SARS Virus
gaagtacttcggtcgtagtcgctca

SEQ ID NO: 143150 - DNA, 25 bp, SARS Virus
aagtacttcggttgtagtcgctcac

SEQ ID NO: 143151 - DNA, 25 bp, SARS Virus
agtacttcggtcttagtcgctcaca

SEQ ID NO: 143152 - DNA, 25 bp, SARS Virus
gtacttcggtcgtagtcgctcacag

SEQ ID NO: 143153 - DNA, 25 bp, SARS Virus
tacttcggtcgttgtcgctcacagt

SEQ ID NO: 143154 - DNA, 25 bp, SARS Virus
acttcggtcgtattcgctcacagtg

SEQ ID NO: 143155 - DNA, 25 bp, SARS Virus
cttcggtcgtagtcgctcacagtgg

SEQ ID NO: 143156 - DNA, 25 bp, SARS Virus
ttcggtcgtagttgctcacagtgga

SEQ ID NO: 143157 - DNA, 25 bp, SARS Virus
tcggtcgtagtctctcacagtggaa

SEQ ID NO: 143158 - DNA, 25 bp, SARS Virus
cggtcgtagtcgttcacagtggaat

SEQ ID NO: 143159 - DNA, 25 bp, SARS Virus
ggtcgtagtcgctcacagtggaata

SEQ ID NO: 143160 - DNA, 25 bp, SARS Virus
gtcgtagtcgcttacagtggaataa

SEQ ID NO: 143161 - DNA, 25 bp, SARS Virus
tcgtagtcgctctcagtggaataat

SEQ ID NO: 143162 - DNA, 25 bp, SARS Virus
cgtagtcgctcatagtggaataatt

SEQ ID NO: 143163 - DNA, 25 bp, SARS Virus
gtagtcgctcactgtggaataattt

SEQ ID NO: 143164 - DNA, 25 bp, SARS Virus
tagtcgctcacattggaataatttc

SEQ ID NO: 143165 - DNA, 25 bp, SARS Virus
agtcgctcacagtggaataatttct

SEQ ID NO: 143166 - DNA, 25 bp, SARS Virus
gtcgctcacagttgaataatttctc

SEQ ID NO: 143167 - DNA, 25 bp, SARS Virus
tcgctcacagtgtaataatttctcg

SEQ ID NO: 143168 - DNA, 25 bp, SARS Virus
cgctcacagtggtataatttctcgt

SEQ ID NO: 143169 - DNA, 25 bp, SARS Virus
gctcacagtggattaatttctcgtt

SEQ ID NO: 143170 - DNA, 25 bp, SARS Virus
ctcacagtggaataatttctcgttc

SEQ ID NO: 143171 - DNA, 25 bp, SARS Virus
tcacagtggaattatttctcgttca

SEQ ID NO: 143172 - DNA, 25 bp, SARS Virus
cacagtggaatattttctcgttcag

SEQ ID NO: 143173 - DNA, 25 bp, SARS Virus
acagtggaataatttctcgttcagg

SEQ ID NO: 143174 - DNA, 25 bp, SARS Virus
cagtggaataatttctcgttcagga

SEQ ID NO: 143175 - DNA, 25 bp, SARS Virus
agtggaataatttctcgttcaggag

SEQ ID NO: 143176 - DNA, 25 bp, SARS Virus
gtggaataatttttcgttcaggagt

SEQ ID NO: 143177 - DNA, 25 bp, SARS Virus
tggaataatttctcgttcaggagtt

SEQ ID NO: 143178 - DNA, 25 bp, SARS Virus
ggaataatttcttgttcaggagtta

SEQ ID NO: 143179 - DNA, 25 bp, SARS Virus
gaataatttctctttcaggagttat

SEQ ID NO: 143180 - DNA, 25 bp, SARS Virus
aataatttctcgttcaggagttatt

SEQ ID NO: 143181 - DNA, 25 bp, SARS Virus
ataatttctcgttcaggagttattt

SEQ ID NO: 143182 - DNA, 25 bp, SARS Virus
taatttctcgtttaggagttatttt

SEQ ID NO: 143183 - DNA, 25 bp, SARS Virus
aatttctcgttctggagttattttc

SEQ ID NO: 143184 - DNA, 25 bp, SARS Virus
atttctcgttcatgagttattttct

SEQ ID NO: 143185 - DNA, 25 bp, SARS Virus
tttctcgttcagtagttattttctg

SEQ ID NO: 143186 - DNA, 25 bp, SARS Virus
ttctcgttcaggtgttattttctgg

SEQ ID NO: 143187 - DNA, 25 bp, SARS Virus
tctcgttcaggatttattttctgga

SEQ ID NO: 143188 - DNA, 25 bp, SARS Virus
ctcgttcaggagttattttctggag

SEQ ID NO: 143189 - DNA, 25 bp, SARS Virus
tcgttcaggagttattttctggaga

SEQ ID NO: 143190 - DNA, 25 bp, SARS Virus
cgttcaggagtttttttctggagaa

SEQ ID NO: 143191 - DNA, 25 bp, SARS Virus
gttcaggagttattttctggagaat

SEQ ID NO: 143192 - DNA, 25 bp, SARS Virus
ttcaggagttattttctggagaatc

SEQ ID NO: 143193 - DNA, 25 bp, SARS Virus
tcaggagttattttctggagaatca

SEQ ID NO: 143194 - DNA, 25 bp, SARS Virus
caggagttattttctggagaatcaa

SEQ ID NO: 143195 - DNA, 25 bp, SARS Virus
aggagttattttttggagaatcaac

SEQ ID NO: 143196 - DNA, 25 bp, SARS Virus
ggagttattttctggagaatcaacc

SEQ ID NO: 143197 - DNA, 25 bp, SARS Virus
gagttattttcttgagaatcaaccg

SEQ ID NO: 143198 - DNA, 25 bp, SARS Virus
agttattttctgtagaatcaaccga

SEQ ID NO: 143199 - DNA, 25 bp, SARS Virus
gttattttctggtgaatcaaccgaa

SEQ ID NO: 143200 - DNA, 25 bp, SARS Virus
ttattttctggataatcaaccgaaa

SEQ ID NO: 143201 - DNA, 25 bp, SARS Virus
tattttctggagtatcaaccgaaat

SEQ ID NO: 143202 - DNA, 25 bp, SARS Virus
attttctggagattcaaccgaaatc

SEQ ID NO: 143203 - DNA, 25 bp, SARS Virus
ttttctggagaatcaaccgaaatct

SEQ ID NO: 143204 - DNA, 25 bp, SARS Virus
tttctggagaattaaccgaaatctc

SEQ ID NO: 143205 - DNA, 25 bp, SARS Virus
ttctggagaatctaccgaaatctcc

SEQ ID NO: 143206 - DNA, 25 bp, SARS Virus
tctggagaatcatccgaaatctccc

SEQ ID NO: 143207 - DNA, 25 bp, SARS Virus
ctggagaatcaatcgaaatctccca

SEQ ID NO: 143208 - DNA, 25 bp, SARS Virus
tggagaatcaactgaaatctcccag

SEQ ID NO: 143209 - DNA, 25 bp, SARS Virus
ggagaatcaacctaaatctcccagt

SEQ ID NO: 143210 - DNA, 25 bp, SARS Virus
gagaatcaaccgtaatctcccagtc

SEQ ID NO: 143211 - DNA, 25 bp, SARS Virus
agaatcaaccgatatctcccagtcc

SEQ ID NO: 143212 - DNA, 25 bp, SARS Virus
gaatcaaccgaattctcccagtcca

SEQ ID NO: 143213 - DNA, 25 bp, SARS Virus
aatcaaccgaaatctcccagtccat

SEQ ID NO: 143214 - DNA, 25 bp, SARS Virus
atcaaccgaaatttcccagtccatt

SEQ ID NO: 143215 - DNA, 25 bp, SARS Virus
tcaaccgaaatctcccagtccatta

SEQ ID NO: 143216 - DNA, 25 bp, SARS Virus
caaccgaaatcttccagtccattat

SEQ ID NO: 143217 - DNA, 25 bp, SARS Virus
aaccgaaatctctcagtccattata

SEQ ID NO: 143218 - DNA, 25 bp, SARS Virus
accgaaatctcctagtccattataa

SEQ ID NO: 143219 - DNA, 25 bp, SARS Virus
ccgaaatctccctgtccattataaa

SEQ ID NO: 143220 - DNA, 25 bp, SARS Virus
cgaaatctcccattccattataaac

SEQ ID NO: 143221 - DNA, 25 bp, SARS Virus
gaaatctcccagtccattataaaca

SEQ ID NO: 143222 - DNA, 25 bp, SARS Virus
aaatctcccagttcattataaacac

SEQ ID NO: 143223 - DNA, 25 bp, SARS Virus
aatctcccagtctattataaacact

SEQ ID NO: 143224 - DNA, 25 bp, SARS Virus
atctcccagtcctttataaacactt

SEQ ID NO: 143225 - DNA, 25 bp, SARS Virus
tctcccagtccattataaacacttt

SEQ ID NO: 143226 - DNA, 25 bp, SARS Virus
ctcccagtccattataaacactttt

SEQ ID NO: 143227 - DNA, 25 bp, SARS Virus
tcccagtccattttaaacacttttt

SEQ ID NO: 143228 - DNA, 25 bp, SARS Virus
cccagtccattataaacacttttta

SEQ ID NO: 143229 - DNA, 25 bp, SARS Virus
ccagtccattattaacactttttaa

SEQ ID NO: 143230 - DNA, 25 bp, SARS Virus
cagtccattatatacactttttaat

SEQ ID NO: 143231 - DNA, 25 bp, SARS Virus
agtccattataatcactttttaatt

SEQ ID NO: 143232 - DNA, 25 bp, SARS Virus
gtccattataaatactttttaattt

SEQ ID NO: 143233 - DNA, 25 bp, SARS Virus
tccattataaactctttttaatttt

SEQ ID NO: 143234 - DNA, 25 bp, SARS Virus
ccattataaacattttttaattttg

SEQ ID NO: 143235 - DNA, 25 bp, SARS Virus
cattataaacactttttaattttgg

SEQ ID NO: 143236 - DNA, 25 bp, SARS Virus
attataaacactttttaattttggt

SEQ ID NO: 143237 - DNA, 25 bp, SARS Virus
ttataaacactttttaattttggtg

SEQ ID NO: 143238 - DNA, 25 bp, SARS Virus
tataaacactttttaattttggtgg

SEQ ID NO: 143239 - DNA, 25 bp, SARS Virus
ataaacactttttaattttggtggt

SEQ ID NO: 143240 - DNA, 25 bp, SARS Virus
taaacacttttttattttggtggtt

SEQ ID NO: 143241 - DNA, 25 bp, SARS Virus
aaacactttttatttttggtggttt

SEQ ID NO: 143242 - DNA, 25 bp, SARS Virus
aacactttttaattttggtggtttt

SEQ ID NO: 143243 - DNA, 25 bp, SARS Virus
acactttttaattttggtggtttta

SEQ ID NO: 143244 - DNA, 25 bp, SARS Virus
cactttttaattttggtggttttat

SEQ ID NO: 143245 - DNA, 25 bp, SARS Virus
actttttaattttggtggttttata

SEQ ID NO: 143246 - DNA, 25 bp, SARS Virus
ctttttaatttttgtggttttataa

SEQ ID NO: 143247 - DNA, 25 bp, SARS Virus
tttttaattttgttggttttataaa

SEQ ID NO: 143248 - DNA, 25 bp, SARS Virus
ttttaattttggtggttttataaag

SEQ ID NO: 143249 - DNA, 25 bp, SARS Virus
tttaattttggttgttttataaagt

SEQ ID NO: 143250 - DNA, 25 bp, SARS Virus
ttaattttggtgtttttataaagtt

SEQ ID NO: 143251 - DNA, 25 bp, SARS Virus
taattttggtggttttataaagttt

SEQ ID NO: 143252 - DNA, 25 bp, SARS Virus
aattttggtggttttataaagtttc

SEQ ID NO: 143253 - DNA, 25 bp, SARS Virus
attttggtggttttataaagtttca

SEQ ID NO: 143254 - DNA, 25 bp, SARS Virus
ttttggtggttttataaagtttcaa

SEQ ID NO: 143255 - DNA, 25 bp, SARS Virus
tttggtggttttttaaagtttcaac

SEQ ID NO: 143256 - DNA, 25 bp, SARS Virus
ttggtggttttataaagtttcaacc

SEQ ID NO: 143257 - DNA, 25 bp, SARS Virus
tggtggttttattaagtttcaaccc

SEQ ID NO: 143258 - DNA, 25 bp, SARS Virus
ggtggttttatatagtttcaacccc

SEQ ID NO: 143259 - DNA, 25 bp, SARS Virus
gtggttttataatgtttcaacccca

SEQ ID NO: 143260 - DNA, 25 bp, SARS Virus
tggttttataaattttcaaccccaa

SEQ ID NO: 143261 - DNA, 25 bp, SARS Virus
ggttttataaagtttcaaccccaaa

SEQ ID NO: 143262 - DNA, 25 bp, SARS Virus
gttttataaagtttcaaccccaaaa

SEQ ID NO: 143263 - DNA, 25 bp, SARS Virus
ttttataaagtttcaaccccaaaac

SEQ ID NO: 143264 - DNA, 25 bp, SARS Virus
tttataaagttttaaccccaaaaca

SEQ ID NO: 143265 - DNA, 25 bp, SARS Virus
ttataaagtttctaccccaaaacat

SEQ ID NO: 143266 - DNA, 25 bp, SARS Virus
tataaagtttcatccccaaaacatg

SEQ ID NO: 143267 - DNA, 25 bp, SARS Virus
ataaagtttcaatcccaaaacatgt

SEQ ID NO: 143268 - DNA, 25 bp, SARS Virus
taaagtttcaactccaaaacatgta

SEQ ID NO: 143269 - DNA, 25 bp, SARS Virus
aaagtttcaacctcaaaacatgtaa

SEQ ID NO: 143270 - DNA, 25 bp, SARS Virus
aagtttcaaccctaaaacatgtaaa

SEQ ID NO: 143271 - DNA, 25 bp, SARS Virus
agtttcaacccctaaacatgtaaac

SEQ ID NO: 143272 - DNA, 25 bp, SARS Virus
gtttcaaccccataacatgtaaaca

SEQ ID NO: 143273 - DNA, 25 bp, SARS Virus
tttcaaccccaatacatgtaaacaa

SEQ ID NO: 143274 - DNA, 25 bp, SARS Virus
ttcaaccccaaatcatgtaaacaaa

SEQ ID NO: 143275 - DNA, 25 bp, SARS Virus
tcaaccccaaaatatgtaaacaaac

SEQ ID NO: 143276 - DNA, 25 bp, SARS Virus
caaccccaaaacttgtaaacaaact

SEQ ID NO: 143277 - DNA, 25 bp, SARS Virus
aaccccaaaacatgtaaacaaactg

SEQ ID NO: 143278 - DNA, 25 bp, SARS Virus
accccaaaacatttaaacaaactga

SEQ ID NO: 143279 - DNA, 25 bp, SARS Virus
ccccaaaacatgtaaacaaactgaa

SEQ ID NO: 143280 - DNA, 25 bp, SARS Virus
cccaaaacatgttaacaaactgaac

SEQ ID NO: 143281 - DNA, 25 bp, SARS Virus
ccaaaacatgtatacaaactgaact

SEQ ID NO: 143282 - DNA, 25 bp, SARS Virus
caaaacatgtaatcaaactgaactc

SEQ ID NO: 143283 - DNA, 25 bp, SARS Virus
aaaacatgtaaataaactgaactcg

SEQ ID NO: 143284 - DNA, 25 bp, SARS Virus
aaacatgtaaactaactgaactcgc

SEQ ID NO: 143285 - DNA, 25 bp, SARS Virus
aacatgtaaacatactgaactcgct

SEQ ID NO: 143286 - DNA, 25 bp, SARS Virus
acatgtaaacaatctgaactcgctt

SEQ ID NO: 143287 - DNA, 25 bp, SARS Virus
catgtaaacaaattgaactcgcttg

SEQ ID NO: 143288 - DNA, 25 bp, SARS Virus
atgtaaacaaactgaactcgcttgt

SEQ ID NO: 143289 - DNA, 25 bp, SARS Virus
tgtaaacaaacttaactcgcttgtg

SEQ ID NO: 143290 - DNA, 25 bp, SARS Virus
gtaaacaaactgtactcgcttgtga

SEQ ID NO: 143291 - DNA, 25 bp, SARS Virus
taaacaaactgatctcgcttgtgaa

SEQ ID NO: 143292 - DNA, 25 bp, SARS Virus
aaacaaactgaattcgcttgtgaag

SEQ ID NO: 143293 - DNA, 25 bp, SARS Virus
aacaaactgaactcgcttgtgaagt

SEQ ID NO: 143294 - DNA, 25 bp, SARS Virus
acaaactgaacttgcttgtgaagtg

SEQ ID NO: 143295 - DNA, 25 bp, SARS Virus
caaactgaactctcttgtgaagtgc

SEQ ID NO: 143296 - DNA, 25 bp, SARS Virus
aaactgaactcgtttgtgaagtgca

SEQ ID NO: 143297 - DNA, 25 bp, SARS Virus
aactgaactcgcttgtgaagtgcac

SEQ ID NO: 143298 - DNA, 25 bp, SARS Virus
actgaactcgcttgtgaagtgcaca

SEQ ID NO: 143299 - DNA, 25 bp, SARS Virus
ctgaactcgcttttgaagtgcacac

SEQ ID NO: 143300 - DNA, 25 bp, SARS Virus
tgaactcgcttgtgaagtgcacaca

SEQ ID NO: 143301 - DNA, 25 bp, SARS Virus
gaactcgcttgttaagtgcacacaa

SEQ ID NO: 143302 - DNA, 25 bp, SARS Virus
aactcgcttgtgtagtgcacacaac

SEQ ID NO: 143303 - DNA, 25 bp, SARS Virus
actcgcttgtgatgtgcacacaacg

SEQ ID NO: 143304 - DNA, 25 bp, SARS Virus
ctcgcttgtgaattgcacacaacgc

SEQ ID NO: 143305 - DNA, 25 bp, SARS Virus
tcgcttgtgaagtgcacacaacgct

SEQ ID NO: 143306 - DNA, 25 bp, SARS Virus
cgcttgtgaagttcacacaacgcta

SEQ ID NO: 143307 - DNA, 25 bp, SARS Virus
gcttgtgaagtgtacacaacgctag

SEQ ID NO: 143308 - DNA, 25 bp, SARS Virus
cttgtgaagtgctcacaacgctagg

SEQ ID NO: 143309 - DNA, 25 bp, SARS Virus
ttgtgaagtgcatacaacgctagga

SEQ ID NO: 143310 - DNA, 25 bp, SARS Virus
tgtgaagtgcactcaacgctaggac

SEQ ID NO: 143311 - DNA, 25 bp, SARS Virus
gtgaagtgcacataacgctaggaca

SEQ ID NO: 143312 - DNA, 25 bp, SARS Virus
tgaagtgcacactacgctaggacaa

SEQ ID NO: 143313 - DNA, 25 bp, SARS Virus
gaagtgcacacatcgctaggacaag

SEQ ID NO: 143314 - DNA, 25 bp, SARS Virus
aagtgcacacaatgctaggacaagt

SEQ ID NO: 143315 - DNA, 25 bp, SARS Virus
agtgcacacaactctaggacaagtc

SEQ ID NO: 143316 - DNA, 25 bp, SARS Virus
gtgcacacaacgttaggacaagtcg

SEQ ID NO: 143317 - DNA, 25 bp, SARS Virus
tgcacacaacgctaggacaagtcgt

SEQ ID NO: 143318 - DNA, 25 bp, SARS Virus
gcacacaacgcttggacaagtcgtc

SEQ ID NO: 143319 - DNA, 25 bp, SARS Virus
cacacaacgctatgacaagtcgtcg

SEQ ID NO: 143320 - DNA, 25 bp, SARS Virus
acacaacgctagtacaagtcgtcgt

SEQ ID NO: 143321 - DNA, 25 bp, SARS Virus
cacaacgctaggtcaagtcgtcgtt

SEQ ID NO: 143322 - DNA, 25 bp, SARS Virus
acaacgctaggataagtcgtcgtta

SEQ ID NO: 143323 - DNA, 25 bp, SARS Virus
caacgctaggactagtcgtcgttat

SEQ ID NO: 143324 - DNA, 25 bp, SARS Virus
aacgctaggacatgtcgtcgttatg

SEQ ID NO: 143325 - DNA, 25 bp, SARS Virus
acgctaggacaattcgtcgttatgg

SEQ ID NO: 143326 - DNA, 25 bp, SARS Virus
cgctaggacaagtcgtcgttatgga

SEQ ID NO: 143327 - DNA, 25 bp, SARS Virus
gctaggacaagttgtcgttatggac

SEQ ID NO: 143328 - DNA, 25 bp, SARS Virus
ctaggacaagtcttcgttatggact

SEQ ID NO: 143329 - DNA, 25 bp, SARS Virus
taggacaagtcgtcgttatggactc

SEQ ID NO: 143330 - DNA, 25 bp, SARS Virus
aggacaagtcgttgttatggactct

SEQ ID NO: 143331 - DNA, 25 bp, SARS Virus
ggacaagtcgtctttatggactctc

SEQ ID NO: 143332 - DNA, 25 bp, SARS Virus
gacaagtcgtcgttatggactctca

SEQ ID NO: 143333 - DNA, 25 bp, SARS Virus
acaagtcgtcgttatggactctcac

SEQ ID NO: 143334 - DNA, 25 bp, SARS Virus
caagtcgtcgttttggactctcacg

SEQ ID NO: 143335 - DNA, 25 bp, SARS Virus
aagtcgtcgttatggactctcacgt

SEQ ID NO: 143336 - DNA, 25 bp, SARS Virus
agtcgtcgttattgactctcacgtg

SEQ ID NO: 143337 - DNA, 25 bp, SARS Virus
gtcgtcgttatgtactctcacgtgc

SEQ ID NO: 143338 - DNA, 25 bp, SARS Virus
tcgtcgttatggtctctcacgtgct

SEQ ID NO: 143339 - DNA, 25 bp, SARS Virus
cgtcgttatggattctcacgtgcta

SEQ ID NO: 143340 - DNA, 25 bp, SARS Virus
gtcgttatggactctcacgtgctaa

SEQ ID NO: 143341 - DNA, 25 bp, SARS Virus
tcgttatggactttcacgtgctaaa

SEQ ID NO: 143342 - DNA, 25 bp, SARS Virus
cgttatggactctcacgtgctaaat

SEQ ID NO: 143343 - DNA, 25 bp, SARS Virus
gttatggactcttacgtgctaaatc

SEQ ID NO: 143344 - DNA, 25 bp, SARS Virus
ttatggactctctcgtgctaaatca

SEQ ID NO: 143345 - DNA, 25 bp, SARS Virus
tatggactctcatgtgctaaatcaa

SEQ ID NO: 143346 - DNA, 25 bp, SARS Virus
atggactctcacttgctaaatcaac

SEQ ID NO: 143347 - DNA, 25 bp, SARS Virus
tggactctcacgtgctaaatcaaca

SEQ ID NO: 143348 - DNA, 25 bp, SARS Virus
ggactctcacgttctaaatcaacac

SEQ ID NO: 143349 - DNA, 25 bp, SARS Virus
gactctcacgtgttaaatcaacaca

SEQ ID NO: 143350 - DNA, 25 bp, SARS Virus
actctcacgtgctaaatcaacacac

SEQ ID NO: 143351 - DNA, 25 bp, SARS Virus
ctctcacgtgcttaatcaacacacg

SEQ ID NO: 143352 - DNA, 25 bp, SARS Virus
tctcacgtgctatatcaacacacgt

SEQ ID NO: 143353 - DNA, 25 bp, SARS Virus
ctcacgtgctaattcaacacacgtt

SEQ ID NO: 143354 - DNA, 25 bp, SARS Virus
tcacgtgctaaatcaacacacgttt

SEQ ID NO: 143355 - DNA, 25 bp, SARS Virus
cacgtgctaaattaacacacgtttt

SEQ ID NO: 143356 - DNA, 25 bp, SARS Virus
acgtgctaaatctacacacgttttc

SEQ ID NO: 143357 - DNA, 25 bp, SARS Virus
cgtgctaaatcatcacacgttttcg

SEQ ID NO: 143358 - DNA, 25 bp, SARS Virus
gtgctaaatcaatacacgttttcga

SEQ ID NO: 143359 - DNA, 25 bp, SARS Virus
tgctaaatcaactcacgttttcgat

SEQ ID NO: 143360 - DNA, 25 bp, SARS Virus
gctaaatcaacatacgttttcgatg

SEQ ID NO: 143361 - DNA, 25 bp, SARS Virus
ctaaatcaacactcgttttcgatgg

SEQ ID NO: 143362 - DNA, 25 bp, SARS Virus
taaatcaacacatgttttcgatggt

SEQ ID NO: 143363 - DNA, 25 bp, SARS Virus
aaatcaacacactttttcgatggta

SEQ ID NO: 143364 - DNA, 25 bp, SARS Virus
aatcaacacacgttttcgatggtat

SEQ ID NO: 143365 - DNA, 25 bp, SARS Virus
atcaacacacgttttcgatggtata

SEQ ID NO: 143366 - DNA, 25 bp, SARS Virus
tcaacacacgttttcgatggtataa

SEQ ID NO: 143367 - DNA, 25 bp, SARS Virus
caacacacgttttcgatggtataac

SEQ ID NO: 143368 - DNA, 25 bp, SARS Virus
aacacacgtttttgatggtataacc

SEQ ID NO: 143369 - DNA, 25 bp, SARS Virus
acacacgttttctatggtataacct

SEQ ID NO: 143370 - DNA, 25 bp, SARS Virus
cacacgttttcgttggtataacctc

SEQ ID NO: 143371 - DNA, 25 bp, SARS Virus
acacgttttcgatggtataacctct

SEQ ID NO: 143372 - DNA, 25 bp, SARS Virus
cacgttttcgattgtataacctctt

SEQ ID NO: 143373 - DNA, 25 bp, SARS Virus
acgttttcgatgttataacctcttc

SEQ ID NO: 143374 - DNA, 25 bp, SARS Virus
cgttttcgatggtataacctcttcg

SEQ ID NO: 143375 - DNA, 25 bp, SARS Virus
gttttcgatggtttaacctcttcgt

SEQ ID NO: 143376 - DNA, 25 bp, SARS Virus
ttttcgatggtataacctcttcgtt

SEQ ID NO: 143377 - DNA, 25 bp, SARS Virus
tttcgatggtattacctcttcgttt

SEQ ID NO: 143378 - DNA, 25 bp, SARS Virus
ttcgatggtatatcctcttcgttta

SEQ ID NO: 143379 - DNA, 25 bp, SARS Virus
tcgatggtataatctcttcgtttaa

SEQ ID NO: 143380 - DNA, 25 bp, SARS Virus
cgatggtataacttcttcgtttaat

SEQ ID NO: 143381 - DNA, 25 bp, SARS Virus
gatggtataacctcttcgtttaatc

SEQ ID NO: 143382 - DNA, 25 bp, SARS Virus
atggtataaccttttcgtttaatcg

SEQ ID NO: 143383 - DNA, 25 bp, SARS Virus
tggtataacctcttcgtttaatcgt

SEQ ID NO: 143384 - DNA, 25 bp, SARS Virus
ggtataacctcttcgtttaatcgtg

SEQ ID NO: 143385 - DNA, 25 bp, SARS Virus
gtataacctctttgtttaatcgtgt

SEQ ID NO: 143386 - DNA, 25 bp, SARS Virus
tataacctcttcttttaatcgtgta

SEQ ID NO: 143387 - DNA, 25 bp, SARS Virus
ataacctcttcgtttaatcgtgtaa

SEQ ID NO: 143388 - DNA, 25 bp, SARS Virus
taacctcttcgtttaatcgtgtaag

SEQ ID NO: 143389 - DNA, 25 bp, SARS Virus
aacctcttcgtttaatcgtgtaagt

SEQ ID NO: 143390 - DNA, 25 bp, SARS Virus
acctcttcgttttatcgtgtaagtc

SEQ ID NO: 143391 - DNA, 25 bp, SARS Virus
cctcttcgtttattcgtgtaagtca

SEQ ID NO: 143392 - DNA, 25 bp, SARS Virus
ctcttcgtttaatcgtgtaagtcat

SEQ ID NO: 143393 - DNA, 25 bp, SARS Virus
tcttcgtttaattgtgtaagtcatc

SEQ ID NO: 143394 - DNA, 25 bp, SARS Virus
cttcgtttaatcttgtaagtcatct

SEQ ID NO: 143395 - DNA, 25 bp, SARS Virus
ttcgtttaatcgtgtaagtcatctt

SEQ ID NO: 143396 - DNA, 25 bp, SARS Virus
tcgtttaatcgtttaagtcatctta

SEQ ID NO: 143397 - DNA, 25 bp, SARS Virus
cgtttaatcgtgtaagtcatcttag

SEQ ID NO: 143398 - DNA, 25 bp, SARS Virus
gtttaatcgtgttagtcatcttaga

SEQ ID NO: 143399 - DNA, 25 bp, SARS Virus
tttaatcgtgtatgtcatcttagag

SEQ ID NO: 143400 - DNA, 25 bp, SARS Virus
ttaatcgtgtaattcatcttagagg

SEQ ID NO: 143401 - DNA, 25 bp, SARS Virus
taatcgtgtaagtcatcttagaggc

SEQ ID NO: 143402 - DNA, 25 bp, SARS Virus
aatcgtgtaagttatcttagaggcg

SEQ ID NO: 143403 - DNA, 25 bp, SARS Virus
atcgtgtaagtcttcttagaggcgt

SEQ ID NO: 143404 - DNA, 25 bp, SARS Virus
tcgtgtaagtcatcttagaggcgtc

SEQ ID NO: 143405 - DNA, 25 bp, SARS Virus
cgtgtaagtcattttagaggcgtct

SEQ ID NO: 143406 - DNA, 25 bp, SARS Virus
gtgtaagtcatcttagaggcgtcta

SEQ ID NO: 143407 - DNA, 25 bp, SARS Virus
tgtaagtcatcttagaggcgtctac

SEQ ID NO: 143408 - DNA, 25 bp, SARS Virus
gtaagtcatctttgaggcgtctaca

SEQ ID NO: 143409 - DNA, 25 bp, SARS Virus
taagtcatcttataggcgtctacat

SEQ ID NO: 143410 - DNA, 25 bp, SARS Virus
aagtcatcttagtggcgtctacatg

SEQ ID NO: 143411 - DNA, 25 bp, SARS Virus
agtcatcttagatgcgtctacatgt

SEQ ID NO: 143412 - DNA, 25 bp, SARS Virus
gtcatcttagagtcgtctacatgta

SEQ ID NO: 143413 - DNA, 25 bp, SARS Virus
tcatcttagaggtgtctacatgtat

SEQ ID NO: 143414 - DNA, 25 bp, SARS Virus
catcttagaggcttctacatgtata

SEQ ID NO: 143415 - DNA, 25 bp, SARS Virus
atcttagaggcgtctacatgtataa

SEQ ID NO: 143416 - DNA, 25 bp, SARS Virus
tcttagaggcgtttacatgtataat

SEQ ID NO: 143417 - DNA, 25 bp, SARS Virus
cttagaggcgtctacatgtataatg

SEQ ID NO: 143418 - DNA, 25 bp, SARS Virus
ttagaggcgtcttcatgtataatgt

SEQ ID NO: 143419 - DNA, 25 bp, SARS Virus
tagaggcgtctatatgtataatgtt

SEQ ID NO: 143420 - DNA, 25 bp, SARS Virus
agaggcgtctacttgtataatgtta

SEQ ID NO: 143421 - DNA, 25 bp, SARS Virus
gaggcgtctacatgtataatgttag

SEQ ID NO: 143422 - DNA, 25 bp, SARS Virus
aggcgtctacatttataatgttaga

SEQ ID NO: 143423 - DNA, 25 bp, SARS Virus
ggcgtctacatgtataatgttagat

SEQ ID NO: 143424 - DNA, 25 bp, SARS Virus
gcgtctacatgtttaatgttagatg

SEQ ID NO: 143425 - DNA, 25 bp, SARS Virus
cgtctacatgtataatgttagatgc

SEQ ID NO: 143426 - DNA, 25 bp, SARS Virus
gtctacatgtattatgttagatgcc

SEQ ID NO: 143427 - DNA, 25 bp, SARS Virus
tctacatgtatattgttagatgcct

SEQ ID NO: 143428 - DNA, 25 bp, SARS Virus
ctacatgtataatgttagatgcctc

SEQ ID NO: 143429 - DNA, 25 bp, SARS Virus
tacatgtataattttagatgcctcc

SEQ ID NO: 143430 - DNA, 25 bp, SARS Virus
acatgtataatgttagatgcctcca

SEQ ID NO: 143431 - DNA, 25 bp, SARS Virus
catgtataatgttagatgcctccaa

SEQ ID NO: 143432 - DNA, 25 bp, SARS Virus
atgtataatgtttgatgcctccaaa

SEQ ID NO: 143433 - DNA, 25 bp, SARS Virus
tgtataatgttatatgcctccaaaa

SEQ ID NO: 143434 - DNA, 25 bp, SARS Virus
gtataatgttagttgcctccaaaat

SEQ ID NO: 143435 - DNA, 25 bp, SARS Virus
tataatgttagatgcctccaaaatc

SEQ ID NO: 143436 - DNA, 25 bp, SARS Virus
ataatgttagattcctccaaaatcg

SEQ ID NO: 143437 - DNA, 25 bp, SARS Virus
taatgttagatgtctccaaaatcgg

SEQ ID NO: 143438 - DNA, 25 bp, SARS Virus
aatgttagatgcttccaaaatcggt

SEQ ID NO: 143439 - DNA, 25 bp, SARS Virus
atgttagatgcctccaaaatcggta

SEQ ID NO: 143440 - DNA, 25 bp, SARS Virus
tgttagatgccttcaaaatcggtat

SEQ ID NO: 143441 - DNA, 25 bp, SARS Virus
gttagatgcctctaaaatcggtatc

SEQ ID NO: 143442 - DNA, 25 bp, SARS Virus
ttagatgcctcctaaatcggtatct

SEQ ID NO: 143443 - DNA, 25 bp, SARS Virus
tagatgcctccataatcggtatctt

SEQ ID NO: 143444 - DNA, 25 bp, SARS Virus
agatgcctccaatatcggtatcttt

SEQ ID NO: 143445 - DNA, 25 bp, SARS Virus
gatgcctccaaattcggtatctttg

SEQ ID NO: 143446 - DNA, 25 bp, SARS Virus
atgcctccaaaatcggtatctttgt

SEQ ID NO: 143447 - DNA, 25 bp, SARS Virus
tgcctccaaaattggtatctttgtc

SEQ ID NO: 143448 - DNA, 25 bp, SARS Virus
gcctccaaaatctgtatctttgtcc

SEQ ID NO: 143449 - DNA, 25 bp, SARS Virus
cctccaaaatcgttatctttgtccg

SEQ ID NO: 143450 - DNA, 25 bp, SARS Virus
ctccaaaatcggtatctttgtccgt

SEQ ID NO: 143451 - DNA, 25 bp, SARS Virus
tccaaaatcggtttctttgtccgta

SEQ ID NO: 143452 - DNA, 25 bp, SARS Virus
ccaaaatcggtatctttgtccgtaa

SEQ ID NO: 143453 - DNA, 25 bp, SARS Virus
caaaatcggtatttttgtccgtaat

SEQ ID NO: 143454 - DNA, 25 bp, SARS Virus
aaaatcggtatctttgtccgtaatg

SEQ ID NO: 143455 - DNA, 25 bp, SARS Virus
aaatcggtatctttgtccgtaatga

SEQ ID NO: 143456 - DNA, 25 bp, SARS Virus
aatcggtatctttgtccgtaatgaa

SEQ ID NO: 143457 - DNA, 25 bp, SARS Virus
atcggtatctttttccgtaatgaag

SEQ ID NO: 143458 - DNA, 25 bp, SARS Virus
tcggtatctttgtccgtaatgaaga

SEQ ID NO: 143459 - DNA, 25 bp, SARS Virus
cggtatctttgttcgtaatgaagac

SEQ ID NO: 143460 - DNA, 25 bp, SARS Virus
ggtatctttgtctgtaatgaagaca

SEQ ID NO: 143461 - DNA, 25 bp, SARS Virus
gtatctttgtccttaatgaagacat

SEQ ID NO: 143462 - DNA, 25 bp, SARS Virus
tatctttgtccgtaatgaagacatc

SEQ ID NO: 143463 - DNA, 25 bp, SARS Virus
atctttgtccgttatgaagacatca

SEQ ID NO: 143464 - DNA, 25 bp, SARS Virus
tctttgtccgtattgaagacatcat

SEQ ID NO: 143465 - DNA, 25 bp, SARS Virus
ctttgtccgtaatgaagacatcatt

SEQ ID NO: 143466 - DNA, 25 bp, SARS Virus
tttgtccgtaattaagacatcatta

SEQ ID NO: 143467 - DNA, 25 bp, SARS Virus
ttgtccgtaatgtagacatcattac

SEQ ID NO: 143468 - DNA, 25 bp, SARS Virus
tgtccgtaatgatgacatcattacg

SEQ ID NO: 143469 - DNA, 25 bp, SARS Virus
gtccgtaatgaatacatcattacga

SEQ ID NO: 143470 - DNA, 25 bp, SARS Virus
tccgtaatgaagtcatcattacgat

SEQ ID NO: 143471 - DNA, 25 bp, SARS Virus
ccgtaatgaagatatcattacgatt

SEQ ID NO: 143472 - DNA, 25 bp, SARS Virus
cgtaatgaagacttcattacgatta

SEQ ID NO: 143473 - DNA, 25 bp, SARS Virus
gtaatgaagacatcattacgattaa

SEQ ID NO: 143474 - DNA, 25 bp, SARS Virus
taatgaagacattattacgattaac

SEQ ID NO: 143475 - DNA, 25 bp, SARS Virus
aatgaagacatctttacgattaact

SEQ ID NO: 143476 - DNA, 25 bp, SARS Virus
atgaagacatcattacgattaactt

SEQ ID NO: 143477 - DNA, 25 bp, SARS Virus
tgaagacatcattacgattaacttt

SEQ ID NO: 143478 - DNA, 25 bp, SARS Virus
gaagacatcatttcgattaactttt

SEQ ID NO: 143479 - DNA, 25 bp, SARS Virus
aagacatcattatgattaacttttc

SEQ ID NO: 143480 - DNA, 25 bp, SARS Virus
agacatcattactattaacttttca

SEQ ID NO: 143481 - DNA, 25 bp, SARS Virus
gacatcattacgtttaacttttcaa

SEQ ID NO: 143482 - DNA, 25 bp, SARS Virus
acatcattacgattaacttttcaat

SEQ ID NO: 143483 - DNA, 25 bp, SARS Virus
catcattacgattaacttttcaatc

SEQ ID NO: 143484 - DNA, 25 bp, SARS Virus
atcattacgatttacttttcaatca

SEQ ID NO: 143485 - DNA, 25 bp, SARS Virus
tcattacgattatcttttcaatcat

SEQ ID NO: 143486 - DNA, 25 bp, SARS Virus
cattacgattaatttttcaatcatc

SEQ ID NO: 143487 - DNA, 25 bp, SARS Virus
attacgattaacttttcaatcatcc

SEQ ID NO: 143488 - DNA, 25 bp, SARS Virus
ttacgattaacttttcaatcatcca

SEQ ID NO: 143489 - DNA, 25 bp, SARS Virus
tacgattaacttttcaatcatccat

SEQ ID NO: 143490 - DNA, 25 bp, SARS Virus
acgattaacttttcaatcatccata

SEQ ID NO: 143491 - DNA, 25 bp, SARS Virus
cgattaactttttaatcatccatat

SEQ ID NO: 143492 - DNA, 25 bp, SARS Virus
gattaacttttctatcatccatatc

SEQ ID NO: 143493 - DNA, 25 bp, SARS Virus
attaacttttcattcatccatatcg

SEQ ID NO: 143494 - DNA, 25 bp, SARS Virus
ttaacttttcaatcatccatatcgt

SEQ ID NO: 143495 - DNA, 25 bp, SARS Virus
taacttttcaattatccatatcgtt

SEQ ID NO: 143496 - DNA, 25 bp, SARS Virus
aacttttcaatcttccatatcgtta

SEQ ID NO: 143497 - DNA, 25 bp, SARS Virus
acttttcaatcatccatatcgttac

SEQ ID NO: 143498 - DNA, 25 bp, SARS Virus
cttttcaatcattcatatcgttacc

SEQ ID NO: 143499 - DNA, 25 bp, SARS Virus
ttttcaatcatctatatcgttacca

SEQ ID NO: 143500 - DNA, 25 bp, SARS Virus
tttcaatcatccttatcgttaccac

SEQ ID NO: 143501 - DNA, 25 bp, SARS Virus
ttcaatcatccatatcgttaccaca

SEQ ID NO: 143502 - DNA, 25 bp, SARS Virus
tcaatcatccatttcgttaccacaa

SEQ ID NO: 143503 - DNA, 25 bp, SARS Virus
caatcatccatatcgttaccacaat

SEQ ID NO: 143504 - DNA, 25 bp, SARS Virus
aatcatccatattgttaccacaata

SEQ ID NO: 143505 - DNA, 25 bp, SARS Virus
atcatccatatcattaccacaataa

SEQ ID NO: 143506 - DNA, 25 bp, SARS Virus
tcatccatatcgataccacaataat

SEQ ID NO: 143507 - DNA, 25 bp, SARS Virus
catccatatcgtaaccacaataatc

SEQ ID NO: 143508 - DNA, 25 bp, SARS Virus
atccatatcgttaccacaataatct

SEQ ID NO: 143509 - DNA, 25 bp, SARS Virus
tccatatcgttaacacaataatctc

SEQ ID NO: 143510 - DNA, 25 bp, SARS Virus
ccatatcgttacaacaataatctca

SEQ ID NO: 143511 - DNA, 25 bp, SARS Virus
catatcgttaccacaataatctcat

SEQ ID NO: 143512 - DNA, 25 bp, SARS Virus
atatcgttaccaaaataatctcatt

SEQ ID NO: 143513 - DNA, 25 bp, SARS Virus
tatcgttaccacaataatctcattc

SEQ ID NO: 143514 - DNA, 25 bp, SARS Virus
atcgttaccacaataatctcattcg

SEQ ID NO: 143515 - DNA, 25 bp, SARS Virus
tcgttaccacaaaaatctcattcgt

SEQ ID NO: 143516 - DNA, 25 bp, SARS Virus
cgttaccacaataatctcattcgtt

SEQ ID NO: 143517 - DNA, 25 bp, SARS Virus
gttaccacaataatctcattcgtta

SEQ ID NO: 143518 - DNA, 25 bp, SARS Virus
ttaccacaataaactcattcgttaa

SEQ ID NO: 143519 - DNA, 25 bp, SARS Virus
taccacaataatatcattcgttaac

SEQ ID NO: 143520 - DNA, 25 bp, SARS Virus
accacaataatcacattcgttaact

SEQ ID NO: 143521 - DNA, 25 bp, SARS Virus
ccacaataatctaattcgttaactt

SEQ ID NO: 143522 - DNA, 25 bp, SARS Virus
cacaataatctcattcgttaacttg

SEQ ID NO: 143523 - DNA, 25 bp, SARS Virus
acaataatctcaatcgttaacttga

SEQ ID NO: 143524 - DNA, 25 bp, SARS Virus
caataatctcatacgttaacttgat

SEQ ID NO: 143525 - DNA, 25 bp, SARS Virus
aataatctcattagttaacttgata

SEQ ID NO: 143526 - DNA, 25 bp, SARS Virus
ataatctcattcattaacttgatag

SEQ ID NO: 143527 - DNA, 25 bp, SARS Virus
taatctcattcgataacttgatagt

SEQ ID NO: 143528 - DNA, 25 bp, SARS Virus
aatctcattcgtaaacttgatagtc

SEQ ID NO: 143529 - DNA, 25 bp, SARS Virus
atctcattcgttaacttgatagtcg

SEQ ID NO: 143530 - DNA, 25 bp, SARS Virus
tctcattcgttaacttgatagtcgt

SEQ ID NO: 143531 - DNA, 25 bp, SARS Virus
ctcattcgttaaattgatagtcgtg

SEQ ID NO: 143532 - DNA, 25 bp, SARS Virus
tcattcgttaacatgatagtcgtgg

SEQ ID NO: 143533 - DNA, 25 bp, SARS Virus
cattcgttaactagatagtcgtgga

SEQ ID NO: 143534 - DNA, 25 bp, SARS Virus
attcgttaacttaatagtcgtggat

SEQ ID NO: 143535 - DNA, 25 bp, SARS Virus
ttcgttaacttgatagtcgtggatt

SEQ ID NO: 143536 - DNA, 25 bp, SARS Virus
tcgttaacttgaaagtcgtggattt

SEQ ID NO: 143537 - DNA, 25 bp, SARS Virus
cgttaacttgatagtcgtggatttc

SEQ ID NO: 143538 - DNA, 25 bp, SARS Virus
gttaacttgataatcgtggatttct

SEQ ID NO: 143539 - DNA, 25 bp, SARS Virus
ttaacttgatagacgtggatttctg

SEQ ID NO: 143540 - DNA, 25 bp, SARS Virus
taacttgatagtagtggatttctgt

SEQ ID NO: 143541 - DNA, 25 bp, SARS Virus
aacttgatagtcatggatttctgta

SEQ ID NO: 143542 - DNA, 25 bp, SARS Virus
acttgatagtcgaggatttctgtat

SEQ ID NO: 143543 - DNA, 25 bp, SARS Virus
cttgatagtcgtagatttctgtatc

SEQ ID NO: 143544 - DNA, 25 bp, SARS Virus
ttgatagtcgtgaatttctgtatca

SEQ ID NO: 143545 - DNA, 25 bp, SARS Virus
tgatagtcgtggatttctgtatcat

SEQ ID NO: 143546 - DNA, 25 bp, SARS Virus
gatagtcgtggaattctgtatcata

SEQ ID NO: 143547 - DNA, 25 bp, SARS Virus
atagtcgtggatatctgtatcatat

SEQ ID NO: 143548 - DNA, 25 bp, SARS Virus
tagtcgtggattactgtatcatatt

SEQ ID NO: 143549 - DNA, 25 bp, SARS Virus
agtcgtggatttatgtatcatattc

SEQ ID NO: 143550 - DNA, 25 bp, SARS Virus
gtcgtggatttcagtatcatattcg

SEQ ID NO: 143551 - DNA, 25 bp, SARS Virus
tcgtggatttctatatcatattcgg

SEQ ID NO: 143552 - DNA, 25 bp, SARS Virus
cgtggatttctgaatcatattcggt

SEQ ID NO: 143553 - DNA, 25 bp, SARS Virus
gtggatttctgtatcatattcggtg

SEQ ID NO: 143554 - DNA, 25 bp, SARS Virus
tggatttctgtaacatattcggtgt

SEQ ID NO: 143555 - DNA, 25 bp, SARS Virus
ggatttctgtataatattcggtgtt

SEQ ID NO: 143556 - DNA, 25 bp, SARS Virus
gatttctgtatcatattcggtgtta

SEQ ID NO: 143557 - DNA, 25 bp, SARS Virus
atttctgtatcaaattcggtgttat

SEQ ID NO: 143558 - DNA, 25 bp, SARS Virus
tttctgtatcatattcggtgttatc

SEQ ID NO: 143559 - DNA, 25 bp, SARS Virus
ttctgtatcataatcggtgttatct

SEQ ID NO: 143560 - DNA, 25 bp, SARS Virus
tctgtatcatatacggtgttatcta

SEQ ID NO: 143561 - DNA, 25 bp, SARS Virus
ctgtatcatattaggtgttatctaa

SEQ ID NO: 143562 - DNA, 25 bp, SARS Virus
tgtatcatattcagtgttatctaaa

SEQ ID NO: 143563 - DNA, 25 bp, SARS Virus
gtatcatattcgatgttatctaaaa

SEQ ID NO: 143564 - DNA, 25 bp, SARS Virus
tatcatattcggagttatctaaaaa

SEQ ID NO: 143565 - DNA, 25 bp, SARS Virus
atcatattcggtattatctaaaaac

SEQ ID NO: 143566 - DNA, 25 bp, SARS Virus
tcatattcggtgatatctaaaaacc

SEQ ID NO: 143567 - DNA, 25 bp, SARS Virus
catattcggtgtaatctaaaaaccg

SEQ ID NO: 143568 - DNA, 25 bp, SARS Virus
atattcggtgttatctaaaaaccga

SEQ ID NO: 143569 - DNA, 25 bp, SARS Virus
tattcggtgttaactaaaaaccgat

SEQ ID NO: 143570 - DNA, 25 bp, SARS Virus
attcggtgttatataaaaaccgatc

SEQ ID NO: 143571 - DNA, 25 bp, SARS Virus
ttcggtgttatcaaaaaaccgatca

SEQ ID NO: 143572 - DNA, 25 bp, SARS Virus
tcggtgttatctaaaaaccgatcat

SEQ ID NO: 143573 - DNA, 25 bp, SARS Virus
cggtgttatctaaaaaccgatcatg

SEQ ID NO: 143574 - DNA, 25 bp, SARS Virus
ggtgttatctaaaaaccgatcatga

SEQ ID NO: 143575 - DNA, 25 bp, SARS Virus
gtgttatctaaaaaccgatcatgat

SEQ ID NO: 143576 - DNA, 25 bp, SARS Virus
tgttatctaaaaaccgatcatgatg

SEQ ID NO: 143577 - DNA, 25 bp, SARS Virus
gttatctaaaaaacgatcatgatgc

SEQ ID NO: 143578 - DNA, 25 bp, SARS Virus
ttatctaaaaacagatcatgatgca

SEQ ID NO: 143579 - DNA, 25 bp, SARS Virus
tatctaaaaaccaatcatgatgcat

SEQ ID NO: 143580 - DNA, 25 bp, SARS Virus
atctaaaaaccgatcatgatgcatt

SEQ ID NO: 143581 - DNA, 25 bp, SARS Virus
tctaaaaaccgaacatgatgcatta

SEQ ID NO: 143582 - DNA, 25 bp, SARS Virus
ctaaaaaccgataatgatgcattat

SEQ ID NO: 143583 - DNA, 25 bp, SARS Virus
taaaaaccgatcatgatgcattatt

SEQ ID NO: 143584 - DNA, 25 bp, SARS Virus
aaaaaccgatcaagatgcattattt

SEQ ID NO: 143585 - DNA, 25 bp, SARS Virus
aaaaccgatcataatgcattatttc

SEQ ID NO: 143586 - DNA, 25 bp, SARS Virus
aaaccgatcatgatgcattatttct

SEQ ID NO: 143587 - DNA, 25 bp, SARS Virus
aaccgatcatgaagcattatttctt

SEQ ID NO: 143588 - DNA, 25 bp, SARS Virus
accgatcatgatacattatttcttt

SEQ ID NO: 143589 - DNA, 25 bp, SARS Virus
ccgatcatgatgaattatttctttg

SEQ ID NO: 143590 - DNA, 25 bp, SARS Virus
cgatcatgatgcattatttctttga

SEQ ID NO: 143591 - DNA, 25 bp, SARS Virus
gatcatgatgcaatatttctttgac

SEQ ID NO: 143592 - DNA, 25 bp, SARS Virus
atcatgatgcataatttctttgaca

SEQ ID NO: 143593 - DNA, 25 bp, SARS Virus
tcatgatgcattatttctttgacat

SEQ ID NO: 143594 - DNA, 25 bp, SARS Virus
catgatgcattaattctttgacata

SEQ ID NO: 143595 - DNA, 25 bp, SARS Virus
atgatgcattatatctttgacatac

SEQ ID NO: 143596 - DNA, 25 bp, SARS Virus
tgatgcattattactttgacatacc

SEQ ID NO: 143597 - DNA, 25 bp, SARS Virus
gatgcattatttatttgacatacca

SEQ ID NO: 143598 - DNA, 25 bp, SARS Virus
atgcattatttcattgacataccat

SEQ ID NO: 143599 - DNA, 25 bp, SARS Virus
tgcattatttctatgacataccatt

SEQ ID NO: 143600 - DNA, 25 bp, SARS Virus
gcattatttcttagacataccattg

SEQ ID NO: 143601 - DNA, 25 bp, SARS Virus
cattatttctttaacataccattga

SEQ ID NO: 143602 - DNA, 25 bp, SARS Virus
attatttctttgacataccattgat

SEQ ID NO: 143603 - DNA, 25 bp, SARS Virus
ttatttctttgaaataccattgatc

SEQ ID NO: 143604 - DNA, 25 bp, SARS Virus
tatttctttgacataccattgatcg

SEQ ID NO: 143605 - DNA, 25 bp, SARS Virus
atttctttgacaaaccattgatcgt

SEQ ID NO: 143606 - DNA, 25 bp, SARS Virus
tttctttgacataccattgatcgtg

SEQ ID NO: 143607 - DNA, 25 bp, SARS Virus
ttctttgacataacattgatcgtgt

SEQ ID NO: 143608 - DNA, 25 bp, SARS Virus
tctttgacatacaattgatcgtgtt

SEQ ID NO: 143609 - DNA, 25 bp, SARS Virus
ctttgacataccattgatcgtgttt

SEQ ID NO: 143610 - DNA, 25 bp, SARS Virus
tttgacataccaatgatcgtgttta

SEQ ID NO: 143611 - DNA, 25 bp, SARS Virus
ttgacataccatagatcgtgtttac

SEQ ID NO: 143612 - DNA, 25 bp, SARS Virus
tgacataccattaatcgtgtttacg

SEQ ID NO: 143613 - DNA, 25 bp, SARS Virus
gacataccattgatcgtgtttacgg

SEQ ID NO: 143614 - DNA, 25 bp, SARS Virus
acataccattgaacgtgtttacggt

SEQ ID NO: 143615 - DNA, 25 bp, SARS Virus
cataccattgatagtgtttacggtc

SEQ ID NO: 143616 - DNA, 25 bp, SARS Virus
ataccattgatcatgtttacggtcg

SEQ ID NO: 143617 - DNA, 25 bp, SARS Virus
taccattgatcgagtttacggtcga

SEQ ID NO: 143618 - DNA, 25 bp, SARS Virus
accattgatcgtatttacggtcgag

SEQ ID NO: 143619 - DNA, 25 bp, SARS Virus
ccattgatcgtgattacggtcgagg

SEQ ID NO: 143620 - DNA, 25 bp, SARS Virus
cattgatcgtgtatacggtcgaggt

SEQ ID NO: 143621 - DNA, 25 bp, SARS Virus
attgatcgtgttaacggtcgaggtt

SEQ ID NO: 143622 - DNA, 25 bp, SARS Virus
ttgatcgtgtttacggtcgaggtta

SEQ ID NO: 143623 - DNA, 25 bp, SARS Virus
tgatcgtgtttaaggtcgaggttat

SEQ ID NO: 143624 - DNA, 25 bp, SARS Virus
gatcgtgtttacagtcgaggttatc

SEQ ID NO: 143625 - DNA, 25 bp, SARS Virus
atcgtgtttacgatcgaggttatcc

SEQ ID NO: 143626 - DNA, 25 bp, SARS Virus
tcgtgtttacggacgaggttatcct

SEQ ID NO: 143627 - DNA, 25 bp, SARS Virus
cgtgtttacggtagaggttatcctt

SEQ ID NO: 143628 - DNA, 25 bp, SARS Virus
gtgtttacggtcaaggttatcctta

SEQ ID NO: 143629 - DNA, 25 bp, SARS Virus
tgtttacggtcgaggttatccttac

SEQ ID NO: 143630 - DNA, 25 bp, SARS Virus
gtttacggtcgaagttatccttaca

SEQ ID NO: 143631 - DNA, 25 bp, SARS Virus
tttacggtcgagattatccttacag

SEQ ID NO: 143632 - DNA, 25 bp, SARS Virus
ttacggtcgaggatatccttacagc

SEQ ID NO: 143633 - DNA, 25 bp, SARS Virus
tacggtcgaggtaatccttacagcg

SEQ ID NO: 143634 - DNA, 25 bp, SARS Virus
acggtcgaggttatccttacagcgt

SEQ ID NO: 143635 - DNA, 25 bp, SARS Virus
cggtcgaggttaaccttacagcgtg

SEQ ID NO: 143636 - DNA, 25 bp, SARS Virus
ggtcgaggttatacttacagcgtga

SEQ ID NO: 143637 - DNA, 25 bp, SARS Virus
gtcgaggttatcattacagcgtgag

SEQ ID NO: 143638 - DNA, 25 bp, SARS Virus
tcgaggttatccatacagcgtgagt

SEQ ID NO: 143639 - DNA, 25 bp, SARS Virus
cgaggttatcctaacagcgtgagta

SEQ ID NO: 143640 - DNA, 25 bp, SARS Virus
gaggttatccttacagcgtgagtat

SEQ ID NO: 143641 - DNA, 25 bp, SARS Virus
aggttatccttaaagcgtgagtatt

SEQ ID NO: 143642 - DNA, 25 bp, SARS Virus
ggttatccttacagcgtgagtattc

SEQ ID NO: 143643 - DNA, 25 bp, SARS Virus
gttatccttacaacgtgagtattct

SEQ ID NO: 143644 - DNA, 25 bp, SARS Virus
ttatccttacagagtgagtattctt

SEQ ID NO: 143645 - DNA, 25 bp, SARS Virus
tatccttacagcatgagtattcttc

SEQ ID NO: 143646 - DNA, 25 bp, SARS Virus
atccttacagcgagagtattcttca

SEQ ID NO: 143647 - DNA, 25 bp, SARS Virus
tccttacagcgtaagtattcttcac

SEQ ID NO: 143648 - DNA, 25 bp, SARS Virus
ccttacagcgtgagtattcttcaca

SEQ ID NO: 143649 - DNA, 25 bp, SARS Virus
cttacagcgtgaatattcttcacag

SEQ ID NO: 143650 - DNA, 25 bp, SARS Virus
ttacagcgtgagaattcttcacagc

SEQ ID NO: 143651 - DNA, 25 bp, SARS Virus
tacagcgtgagtattcttcacagct

SEQ ID NO: 143652 - DNA, 25 bp, SARS Virus
acagcgtgagtaatcttcacagctg

SEQ ID NO: 143653 - DNA, 25 bp, SARS Virus
cagcgtgagtatacttcacagctgt

SEQ ID NO: 143654 - DNA, 25 bp, SARS Virus
agcgtgagtattattcacagctgta

SEQ ID NO: 143655 - DNA, 25 bp, SARS Virus
gcgtgagtattcatcacagctgtac

SEQ ID NO: 143656 - DNA, 25 bp, SARS Virus
cgtgagtattctacacagctgtacg

SEQ ID NO: 143657 - DNA, 25 bp, SARS Virus
gtgagtattcttaacagctgtacga

SEQ ID NO: 143658 - DNA, 25 bp, SARS Virus
tgagtattcttcacagctgtacgag

SEQ ID NO: 143659 - DNA, 25 bp, SARS Virus
gagtattcttcaaagctgtacgagt

SEQ ID NO: 143660 - DNA, 25 bp, SARS Virus
agtattcttcacagctgtacgagtc

SEQ ID NO: 143661 - DNA, 25 bp, SARS Virus
gtattcttcacaactgtacgagtcg

SEQ ID NO: 143662 - DNA, 25 bp, SARS Virus
tattcttcacagatgtacgagtcga

SEQ ID NO: 143663 - DNA, 25 bp, SARS Virus
attcttcacagcagtacgagtcgag

SEQ ID NO: 143664 - DNA, 25 bp, SARS Virus
ttcttcacagctatacgagtcgagg

SEQ ID NO: 143665 - DNA, 25 bp, SARS Virus
tcttcacagctgaacgagtcgagga

SEQ ID NO: 143666 - DNA, 25 bp, SARS Virus
cttcacagctgtacgagtcgaggat

SEQ ID NO: 143667 - DNA, 25 bp, SARS Virus
ttcacagctgtaagagtcgaggata

SEQ ID NO: 143668 - DNA, 25 bp, SARS Virus
tcacagctgtacaagtcgaggatat

SEQ ID NO: 143669 - DNA, 25 bp, SARS Virus
cacagctgtacgagtcgaggatatt

SEQ ID NO: 143670 - DNA, 25 bp, SARS Virus
acagctgtacgaatcgaggatattc

SEQ ID NO: 143671 - DNA, 25 bp, SARS Virus
cagctgtacgagacgaggatattct

SEQ ID NO: 143672 - DNA, 25 bp, SARS Virus
agctgtacgagtagaggatattctg

SEQ ID NO: 143673 - DNA, 25 bp, SARS Virus
gctgtacgagtcaaggatattctgt

SEQ ID NO: 143674 - DNA, 25 bp, SARS Virus
ctgtacgagtcgaggatattctgtc

SEQ ID NO: 143675 - DNA, 25 bp, SARS Virus
tgtacgagtcgaagatattctgtcg

SEQ ID NO: 143676 - DNA, 25 bp, SARS Virus
gtacgagtcgagaatattctgtcgg

SEQ ID NO: 143677 - DNA, 25 bp, SARS Virus
tacgagtcgaggatattctgtcgga

SEQ ID NO: 143678 - DNA, 25 bp, SARS Virus
acgagtcgaggaaattctgtcggac

SEQ ID NO: 143679 - DNA, 25 bp, SARS Virus
cgagtcgaggatattctgtcggacg

SEQ ID NO: 143680 - DNA, 25 bp, SARS Virus
gagtcgaggataatctgtcggacga

SEQ ID NO: 143681 - DNA, 25 bp, SARS Virus
agtcgaggatatactgtcggacgaa

SEQ ID NO: 143682 - DNA, 25 bp, SARS Virus
gtcgaggatattatgtcggacgaac

SEQ ID NO: 143683 - DNA, 25 bp, SARS Virus
tcgaggatattcagtcggacgaact

SEQ ID NO: 143684 - DNA, 25 bp, SARS Virus
cgaggatattctatcggacgaactc

SEQ ID NO: 143685 - DNA, 25 bp, SARS Virus
gaggatattctgacggacgaactca

SEQ ID NO: 143686 - DNA, 25 bp, SARS Virus
aggatattctgtaggacgaactcag

SEQ ID NO: 143687 - DNA, 25 bp, SARS Virus
ggatattctgtcagacgaactcaga

SEQ ID NO: 143688 - DNA, 25 bp, SARS Virus
gatattctgtcgaacgaactcagac

SEQ ID NO: 143689 - DNA, 25 bp, SARS Virus
atattctgtcggacgaactcagacc

SEQ ID NO: 143690 - DNA, 25 bp, SARS Virus
tattctgtcggaagaactcagacct

SEQ ID NO: 143691 - DNA, 25 bp, SARS Virus
attctgtcggacaaactcagacctt

SEQ ID NO: 143692 - DNA, 25 bp, SARS Virus
ttctgtcggacgaactcagacctta

SEQ ID NO: 143693 - DNA, 25 bp, SARS Virus
tctgtcggacgaactcagaccttat

SEQ ID NO: 143694 - DNA, 25 bp, SARS Virus
ctgtcggacgaaatcagaccttatg

SEQ ID NO: 143695 - DNA, 25 bp, SARS Virus
tgtcggacgaacacagaccttatgt

SEQ ID NO: 143696 - DNA, 25 bp, SARS Virus
gtcggacgaactaagaccttatgta

SEQ ID NO: 143697 - DNA, 25 bp, SARS Virus
tcggacgaactcagaccttatgtaa

SEQ ID NO: 143698 - DNA, 25 bp, SARS Virus
cggacgaactcaaaccttatgtaac

SEQ ID NO: 143699 - DNA, 25 bp, SARS Virus
ggacgaactcagaccttatgtaaca

SEQ ID NO: 143700 - DNA, 25 bp, SARS Virus
gacgaactcagaacttatgtaacaa

SEQ ID NO: 143701 - DNA, 25 bp, SARS Virus
acgaactcagacattatgtaacaaa

SEQ ID NO: 143702 - DNA, 25 bp, SARS Virus
cgaactcagaccatatgtaacaaag

SEQ ID NO: 143703 - DNA, 25 bp, SARS Virus
gaactcagacctaatgtaacaaagg

SEQ ID NO: 143704 - DNA, 25 bp, SARS Virus
aactcagaccttatgtaacaaaggt

SEQ ID NO: 143705 - DNA, 25 bp, SARS Virus
actcagaccttaagtaacaaaggtc

SEQ ID NO: 143706 - DNA, 25 bp, SARS Virus
ctcagaccttatataacaaaggtca

SEQ ID NO: 143707 - DNA, 25 bp, SARS Virus
tcagaccttatgaaacaaaggtcat

SEQ ID NO: 143708 - DNA, 25 bp, SARS Virus
cagaccttatgtaacaaaggtcatc

SEQ ID NO: 143709 - DNA, 25 bp, SARS Virus
agaccttatgtaacaaaggtcatct

SEQ ID NO: 143710 - DNA, 25 bp, SARS Virus
gaccttatgtaaaaaaggtcatctt

SEQ ID NO: 143711 - DNA, 25 bp, SARS Virus
accttatgtaacaaaggtcatctta

SEQ ID NO: 143712 - DNA, 25 bp, SARS Virus
ccttatgtaacaaaggtcatcttat

SEQ ID NO: 143713 - DNA, 25 bp, SARS Virus
cttatgtaacaaaggtcatcttata

SEQ ID NO: 143714 - DNA, 25 bp, SARS Virus
ttatgtaacaaaagtcatcttatat

SEQ ID NO: 143715 - DNA, 25 bp, SARS Virus
tatgtaacaaagatcatcttatata

SEQ ID NO: 143716 - DNA, 25 bp, SARS Virus
atgtaacaaaggacatcttatatac

SEQ ID NO: 143717 - DNA, 25 bp, SARS Virus
tgtaacaaaggtaatcttatatacg

SEQ ID NO: 143718 - DNA, 25 bp, SARS Virus
gtaacaaaggtcatcttatatacgc

SEQ ID NO: 143719 - DNA, 25 bp, SARS Virus
taacaaaggtcaacttatatacgcg

SEQ ID NO: 143720 - DNA, 25 bp, SARS Virus
aacaaaggtcatattatatacgcgg

SEQ ID NO: 143721 - DNA, 25 bp, SARS Virus
acaaaggtcatcatatatacgcggt

SEQ ID NO: 143722 - DNA, 25 bp, SARS Virus
caaaggtcatctaatatacgcggtt

SEQ ID NO: 143723 - DNA, 25 bp, SARS Virus
aaaggtcatcttatatacgcggttc

SEQ ID NO: 143724 - DNA, 25 bp, SARS Virus
aaggtcatcttaaatacgcggttcg

SEQ ID NO: 143725 - DNA, 25 bp, SARS Virus
aggtcatcttatatacgcggttcga

SEQ ID NO: 143726 - DNA, 25 bp, SARS Virus
ggtcatcttataaacgcggttcgac

SEQ ID NO: 143727 - DNA, 25 bp, SARS Virus
gtcatcttatatacgcggttcgacc

SEQ ID NO: 143728 - DNA, 25 bp, SARS Virus
tcatcttatataagcggttcgacca

SEQ ID NO: 143729 - DNA, 25 bp, SARS Virus
catcttatatacacggttcgaccac

SEQ ID NO: 143730 - DNA, 25 bp, SARS Virus
atcttatatacgaggttcgaccaca

SEQ ID NO: 143731 - DNA, 25 bp, SARS Virus
tcttatatacgcagttcgaccacac

SEQ ID NO: 143732 - DNA, 25 bp, SARS Virus
cttatatacgcgattcgaccacact

SEQ ID NO: 143733 - DNA, 25 bp, SARS Virus
ttatatacgcggatcgaccacactc

SEQ ID NO: 143734 - DNA, 25 bp, SARS Virus
tatatacgcggtacgaccacactca

SEQ ID NO: 143735 - DNA, 25 bp, SARS Virus
atatacgcggttagaccacactcaa

SEQ ID NO: 143736 - DNA, 25 bp, SARS Virus
tatacgcggttcaaccacactcaac

SEQ ID NO: 143737 - DNA, 25 bp, SARS Virus
atacgcggttcgaccacactcaact

SEQ ID NO: 143738 - DNA, 25 bp, SARS Virus
tacgcggttcgaacacactcaacta

SEQ ID NO: 143739 - DNA, 25 bp, SARS Virus
acgcggttcgacaacactcaactag

SEQ ID NO: 143740 - DNA, 25 bp, SARS Virus
cgcggttcgaccacactcaactaga

SEQ ID NO: 143741 - DNA, 25 bp, SARS Virus
gcggttcgaccaaactcaactagac

SEQ ID NO: 143742 - DNA, 25 bp, SARS Virus
cggttcgaccacactcaactagacg

SEQ ID NO: 143743 - DNA, 25 bp, SARS Virus
ggttcgaccacaatcaactagacgt

SEQ ID NO: 143744 - DNA, 25 bp, SARS Virus
gttcgaccacacacaactagacgta

SEQ ID NO: 143745 - DNA, 25 bp, SARS Virus
ttcgaccacactaaactagacgtac

SEQ ID NO: 143746 - DNA, 25 bp, SARS Virus
tcgaccacactcaactagacgtact

SEQ ID NO: 143747 - DNA, 25 bp, SARS Virus
cgaccacactcaactagacgtactt

SEQ ID NO: 143748 - DNA, 25 bp, SARS Virus
gaccacactcaaatagacgtactta

SEQ ID NO: 143749 - DNA, 25 bp, SARS Virus
accacactcaacaagacgtacttaa

SEQ ID NO: 143750 - DNA, 25 bp, SARS Virus
ccacactcaactagacgtacttaac

SEQ ID NO: 143751 - DNA, 25 bp, SARS Virus
cacactcaactaaacgtacttaacg

SEQ ID NO: 143752 - DNA, 25 bp, SARS Virus
acactcaactagacgtacttaacga

SEQ ID NO: 143753 - DNA, 25 bp, SARS Virus
cactcaactagaagtacttaacgac

SEQ ID NO: 143754 - DNA, 25 bp, SARS Virus
actcaactagacatacttaacgaca

SEQ ID NO: 143755 - DNA, 25 bp, SARS Virus
ctcaactagacgaacttaacgacat

SEQ ID NO: 143756 - DNA, 25 bp, SARS Virus
tcaactagacgtacttaacgacatc

SEQ ID NO: 143757 - DNA, 25 bp, SARS Virus
caactagacgtaattaacgacatct

SEQ ID NO: 143758 - DNA, 25 bp, SARS Virus
aactagacgtacataacgacatctt

SEQ ID NO: 143759 - DNA, 25 bp, SARS Virus
actagacgtactaaacgacatcttt

SEQ ID NO: 143760 - DNA, 25 bp, SARS Virus
ctagacgtacttaacgacatctttg

SEQ ID NO: 143761 - DNA, 25 bp, SARS Virus
tagacgtacttaacgacatctttgt

SEQ ID NO: 143762 - DNA, 25 bp, SARS Virus
agacgtacttaaagacatctttgta

SEQ ID NO: 143763 - DNA, 25 bp, SARS Virus
gacgtacttaacaacatctttgtag

SEQ ID NO: 143764 - DNA, 25 bp, SARS Virus
acgtacttaacgacatctttgtagt

SEQ ID NO: 143765 - DNA, 25 bp, SARS Virus
cgtacttaacgaaatctttgtagtc

SEQ ID NO: 143766 - DNA, 25 bp, SARS Virus
gtacttaacgacatctttgtagtca

SEQ ID NO: 143767 - DNA, 25 bp, SARS Virus
tacttaacgacaactttgtagtcac

SEQ ID NO: 143768 - DNA, 25 bp, SARS Virus
acttaacgacatatttgtagtcacg

SEQ ID NO: 143769 - DNA, 25 bp, SARS Virus
cttaacgacatcattgtagtcacgt

SEQ ID NO: 143770 - DNA, 25 bp, SARS Virus
ttaacgacatctatgtagtcacgtc

SEQ ID NO: 143771 - DNA, 25 bp, SARS Virus
taacgacatcttagtagtcacgtca

SEQ ID NO: 143772 - DNA, 25 bp, SARS Virus
aacgacatctttatagtcacgtcaa

SEQ ID NO: 143773 - DNA, 25 bp, SARS Virus
acgacatctttgaagtcacgtcaat

SEQ ID NO: 143774 - DNA, 25 bp, SARS Virus
cgacatctttgtagtcacgtcaatt

SEQ ID NO: 143775 - DNA, 25 bp, SARS Virus
gacatctttgtaatcacgtcaattg

SEQ ID NO: 143776 - DNA, 25 bp, SARS Virus
acatctttgtagacacgtcaattgt

SEQ ID NO: 143777 - DNA, 25 bp, SARS Virus
catctttgtagtaacgtcaattgta

SEQ ID NO: 143778 - DNA, 25 bp, SARS Virus
atctttgtagtcacgtcaattgtag

SEQ ID NO: 143779 - DNA, 25 bp, SARS Virus
tctttgtagtcaagtcaattgtaga

SEQ ID NO: 143780 - DNA, 25 bp, SARS Virus
ctttgtagtcacatcaattgtagaa

SEQ ID NO: 143781 - DNA, 25 bp, SARS Virus
tttgtagtcacgacaattgtagaac

SEQ ID NO: 143782 - DNA, 25 bp, SARS Virus
ttgtagtcacgtaaattgtagaact

SEQ ID NO: 143783 - DNA, 25 bp, SARS Virus
tgtagtcacgtcaattgtagaacta

SEQ ID NO: 143784 - DNA, 25 bp, SARS Virus
gtagtcacgtcaattgtagaactat

SEQ ID NO: 143785 - DNA, 25 bp, SARS Virus
tagtcacgtcaaatgtagaactata

SEQ ID NO: 143786 - DNA, 25 bp, SARS Virus
agtcacgtcaatagtagaactatat

SEQ ID NO: 143787 - DNA, 25 bp, SARS Virus
gtcacgtcaattatagaactatatc

SEQ ID NO: 143788 - DNA, 25 bp, SARS Virus
tcacgtcaattgaagaactatatct

SEQ ID NO: 143789 - DNA, 25 bp, SARS Virus
cacgtcaattgtagaactatatctt

SEQ ID NO: 143790 - DNA, 25 bp, SARS Virus
acgtcaattgtaaaactatatcttg

SEQ ID NO: 143791 - DNA, 25 bp, SARS Virus
cgtcaattgtagaactatatcttgt

SEQ ID NO: 143792 - DNA, 25 bp, SARS Virus
gtcaattgtagaactatatcttgtc

SEQ ID NO: 143793 - DNA, 25 bp, SARS Virus
tcaattgtagaaatatatcttgtcg

SEQ ID NO: 143794 - DNA, 25 bp, SARS Virus
caattgtagaacaatatcttgtcgt

SEQ ID NO: 143795 - DNA, 25 bp, SARS Virus
aattgtagaactatatcttgtcgtt

SEQ ID NO: 143796 - DNA, 25 bp, SARS Virus
attgtagaactaaatcttgtcgttg

SEQ ID NO: 143797 - DNA, 25 bp, SARS Virus
ttgtagaactatatcttgtcgttga

SEQ ID NO: 143798 - DNA, 25 bp, SARS Virus
tgtagaactataacttgtcgttgaa

SEQ ID NO: 143799 - DNA, 25 bp, SARS Virus
gtagaactatatattgtcgttgaag

SEQ ID NO: 143800 - DNA, 25 bp, SARS Virus
tagaactatatcatgtcgttgaagt

SEQ ID NO: 143801 - DNA, 25 bp, SARS Virus
agaactatatctagtcgttgaagtc

SEQ ID NO: 143802 - DNA, 25 bp, SARS Virus
gaactatatcttatcgttgaagtct

SEQ ID NO: 143803 - DNA, 25 bp, SARS Virus
aactatatcttgacgttgaagtcta

SEQ ID NO: 143804 - DNA, 25 bp, SARS Virus
actatatcttgtagttgaagtctac

SEQ ID NO: 143805 - DNA, 25 bp, SARS Virus
ctatatcttgtcattgaagtctact

SEQ ID NO: 143806 - DNA, 25 bp, SARS Virus
tatatcttgtcgatgaagtctactt

SEQ ID NO: 143807 - DNA, 25 bp, SARS Virus
atatcttgtcgtagaagtctacttc

SEQ ID NO: 143808 - DNA, 25 bp, SARS Virus
tatcttgtcgttaaagtctacttcg

SEQ ID NO: 143809 - DNA, 25 bp, SARS Virus
atcttgtcgttgaagtctacttcgt

SEQ ID NO: 143810 - DNA, 25 bp, SARS Virus
tcttgtcgttgaagtctacttcgta

SEQ ID NO: 143811 - DNA, 25 bp, SARS Virus
cttgtcgttgaaatctacttcgtaa

SEQ ID NO: 143812 - DNA, 25 bp, SARS Virus
ttgtcgttgaagactacttcgtaaa

SEQ ID NO: 143813 - DNA, 25 bp, SARS Virus
tgtcgttgaagtatacttcgtaaac

SEQ ID NO: 143814 - DNA, 25 bp, SARS Virus
gtcgttgaagtcaacttcgtaaaca

SEQ ID NO: 143815 - DNA, 25 bp, SARS Virus
tcgttgaagtctacttcgtaaacaa

SEQ ID NO: 143816 - DNA, 25 bp, SARS Virus
cgttgaagtctaattcgtaaacaag

SEQ ID NO: 143817 - DNA, 25 bp, SARS Virus
gttgaagtctacatcgtaaacaagg

SEQ ID NO: 143818 - DNA, 25 bp, SARS Virus
ttgaagtctactacgtaaacaaggt

SEQ ID NO: 143819 - DNA, 25 bp, SARS Virus
tgaagtctacttagtaaacaaggtc

SEQ ID NO: 143820 - DNA, 25 bp, SARS Virus
gaagtctacttcataaacaaggtcc

SEQ ID NO: 143821 - DNA, 25 bp, SARS Virus
aagtctacttcgaaaacaaggtcca

SEQ ID NO: 143822 - DNA, 25 bp, SARS Virus
agtctacttcgtaaacaaggtccac

SEQ ID NO: 143823 - DNA, 25 bp, SARS Virus
gtctacttcgtaaacaaggtccaca

SEQ ID NO: 143824 - DNA, 25 bp, SARS Virus
tctacttcgtaaacaaggtccacat

SEQ ID NO: 143825 - DNA, 25 bp, SARS Virus
ctacttcgtaaaaaaggtccacatt

SEQ ID NO: 143826 - DNA, 25 bp, SARS Virus
tacttcgtaaacaaggtccacatta

SEQ ID NO: 143827 - DNA, 25 bp, SARS Virus
acttcgtaaacaaggtccacattaa

SEQ ID NO: 143828 - DNA, 25 bp, SARS Virus
cttcgtaaacaaagtccacattaat

SEQ ID NO: 143829 - DNA, 25 bp, SARS Virus
ttcgtaaacaagatccacattaatg

SEQ ID NO: 143830 - DNA, 25 bp, SARS Virus
tcgtaaacaaggaccacattaatgt

SEQ ID NO: 143831 - DNA, 25 bp, SARS Virus
cgtaaacaaggtacacattaatgtg

SEQ ID NO: 143832 - DNA, 25 bp, SARS Virus
gtaaacaaggtcaacattaatgtga

SEQ ID NO: 143833 - DNA, 25 bp, SARS Virus
taaacaaggtccacattaatgtgaa

SEQ ID NO: 143834 - DNA, 25 bp, SARS Virus
aaacaaggtccaaattaatgtgaat

SEQ ID NO: 143835 - DNA, 25 bp, SARS Virus
aacaaggtccacattaatgtgaatg

SEQ ID NO: 143836 - DNA, 25 bp, SARS Virus
acaaggtccacaataatgtgaatgt

SEQ ID NO: 143837 - DNA, 25 bp, SARS Virus
caaggtccacataaatgtgaatgtg

SEQ ID NO: 143838 - DNA, 25 bp, SARS Virus
aaggtccacattaatgtgaatgtgg

SEQ ID NO: 143839 - DNA, 25 bp, SARS Virus
aggtccacattaatgtgaatgtggg

SEQ ID NO: 143840 - DNA, 25 bp, SARS Virus
ggtccacattaaagtgaatgtgggg

SEQ ID NO: 143841 - DNA, 25 bp, SARS Virus
gtccacattaatatgaatgtggggg

SEQ ID NO: 143842 - DNA, 25 bp, SARS Virus
tccacattaatgagaatgtgggggt

SEQ ID NO: 143843 - DNA, 25 bp, SARS Virus
ccacattaatgtaaatgtgggggtt

SEQ ID NO: 143844 - DNA, 25 bp, SARS Virus
cacattaatgtgaatgtgggggttt

SEQ ID NO: 143845 - DNA, 25 bp, SARS Virus
acattaatgtgaatgtgggggtttt

SEQ ID NO: 143846 - DNA, 25 bp, SARS Virus
cattaatgtgaaagtgggggttttc

SEQ ID NO: 143847 - DNA, 25 bp, SARS Virus
attaatgtgaatatgggggttttcg

SEQ ID NO: 143848 - DNA, 25 bp, SARS Virus
ttaatgtgaatgagggggttttcgc

SEQ ID NO: 143849 - DNA, 25 bp, SARS Virus
taatgtgaatgtaggggttttcgcg

SEQ ID NO: 143850 - DNA, 25 bp, SARS Virus
aatgtgaatgtgagggttttcgcgt

SEQ ID NO: 143851 - DNA, 25 bp, SARS Virus
atgtgaatgtggaggttttcgcgtt

SEQ ID NO: 143852 - DNA, 25 bp, SARS Virus
tgtgaatgtgggagttttcgcgttc

SEQ ID NO: 143853 - DNA, 25 bp, SARS Virus
gtgaatgtggggattttcgcgttcc

SEQ ID NO: 143854 - DNA, 25 bp, SARS Virus
tgaatgtgggggatttcgcgttcca

SEQ ID NO: 143855 - DNA, 25 bp, SARS Virus
gaatgtgggggtattcgcgttccac

SEQ ID NO: 143856 - DNA, 25 bp, SARS Virus
aatgtgggggttatcgcgttccact

SEQ ID NO: 143857 - DNA, 25 bp, SARS Virus
atgtgggggtttacgcgttccactt

SEQ ID NO: 143858 - DNA, 25 bp, SARS Virus
tgtgggggttttagcgttccacttt

SEQ ID NO: 143859 - DNA, 25 bp, SARS Virus
gtgggggttttcacgttccacttta

SEQ ID NO: 143860 - DNA, 25 bp, SARS Virus
tgggggttttcgagttccactttac

SEQ ID NO: 143861 - DNA, 25 bp, SARS Virus
gggggttttcgcattccactttaca

SEQ ID NO: 143862 - DNA, 25 bp, SARS Virus
ggggttttcgcgatccactttacag

SEQ ID NO: 143863 - DNA, 25 bp, SARS Virus
gggttttcgcgtaccactttacaga

SEQ ID NO: 143864 - DNA, 25 bp, SARS Virus
ggttttcgcgttacactttacagat

SEQ ID NO: 143865 - DNA, 25 bp, SARS Virus
gttttcgcgttcaactttacagatt

SEQ ID NO: 143866 - DNA, 25 bp, SARS Virus
ttttcgcgttccactttacagatta

SEQ ID NO: 143867 - DNA, 25 bp, SARS Virus
tttcgcgttccaatttacagattat

SEQ ID NO: 143868 - DNA, 25 bp, SARS Virus
ttcgcgttccacattacagattata

SEQ ID NO: 143869 - DNA, 25 bp, SARS Virus
tcgcgttccactatacagattataa

SEQ ID NO: 143870 - DNA, 25 bp, SARS Virus
cgcgttccacttaacagattataaa

SEQ ID NO: 143871 - DNA, 25 bp, SARS Virus
gcgttccactttacagattataaag

SEQ ID NO: 143872 - DNA, 25 bp, SARS Virus
cgttccactttaaagattataaagt

SEQ ID NO: 143873 - DNA, 25 bp, SARS Virus
gttccactttacagattataaagtc

SEQ ID NO: 143874 - DNA, 25 bp, SARS Virus
ttccactttacaaattataaagtct

SEQ ID NO: 143875 - DNA, 25 bp, SARS Virus
tccactttacagattataaagtcta

SEQ ID NO: 143876 - DNA, 25 bp, SARS Virus
ccactttacagaatataaagtctac

SEQ ID NO: 143877 - DNA, 25 bp, SARS Virus
cactttacagataataaagtctaca

SEQ ID NO: 143878 - DNA, 25 bp, SARS Virus
actttacagattataaagtctacaa

SEQ ID NO: 143879 - DNA, 25 bp, SARS Virus
ctttacagattaaaaagtctacaaa

SEQ ID NO: 143880 - DNA, 25 bp, SARS Virus
tttacagattataaagtctacaaaa

SEQ ID NO: 143881 - DNA, 25 bp, SARS Virus
ttacagattataaagtctacaaaat

SEQ ID NO: 143882 - DNA, 25 bp, SARS Virus
tacagattataaagtctacaaaatc

SEQ ID NO: 143883 - DNA, 25 bp, SARS Virus
acagattataaaatctacaaaatcc

SEQ ID NO: 143884 - DNA, 25 bp, SARS Virus
cagattataaagactacaaaatcct

SEQ ID NO: 143885 - DNA, 25 bp, SARS Virus
agattataaagtatacaaaatccta

SEQ ID NO: 143886 - DNA, 25 bp, SARS Virus
gattataaagtcaacaaaatcctag

SEQ ID NO: 143887 - DNA, 25 bp, SARS Virus
attataaagtctacaaaatcctaga

SEQ ID NO: 143888 - DNA, 25 bp, SARS Virus
ttataaagtctaaaaaatcctagag

SEQ ID NO: 143889 - DNA, 25 bp, SARS Virus
tataaagtctacaaaatcctagagc

SEQ ID NO: 143890 - DNA, 25 bp, SARS Virus
ataaagtctacaaaatcctagagct

SEQ ID NO: 143891 - DNA, 25 bp, SARS Virus
taaagtctacaaaatcctagagctt

SEQ ID NO: 143892 - DNA, 25 bp, SARS Virus
aaagtctacaaaatcctagagcttg

SEQ ID NO: 143893 - DNA, 25 bp, SARS Virus
aagtctacaaaaacctagagcttgc

SEQ ID NO: 143894 - DNA, 25 bp, SARS Virus
agtctacaaaatactagagcttgcc

SEQ ID NO: 143895 - DNA, 25 bp, SARS Virus
gtctacaaaatcatagagcttgcct

SEQ ID NO: 143896 - DNA, 25 bp, SARS Virus
tctacaaaatccaagagcttgcctt

SEQ ID NO: 143897 - DNA, 25 bp, SARS Virus
ctacaaaatcctagagcttgcctta

SEQ ID NO: 143898 - DNA, 25 bp, SARS Virus
tacaaaatcctaaagcttgccttag

SEQ ID NO: 143899 - DNA, 25 bp, SARS Virus
acaaaatcctagagcttgccttagt

SEQ ID NO: 143900 - DNA, 25 bp, SARS Virus
caaaatcctagaacttgccttagtc

SEQ ID NO: 143901 - DNA, 25 bp, SARS Virus
aaaatcctagagattgccttagtca

SEQ ID NO: 143902 - DNA, 25 bp, SARS Virus
aaatcctagagcatgccttagtcac

SEQ ID NO: 143903 - DNA, 25 bp, SARS Virus
aatcctagagctagccttagtcact

SEQ ID NO: 143904 - DNA, 25 bp, SARS Virus
atcctagagcttaccttagtcactt

SEQ ID NO: 143905 - DNA, 25 bp, SARS Virus
tcctagagcttgacttagtcacttt

SEQ ID NO: 143906 - DNA, 25 bp, SARS Virus
cctagagcttgcattagtcacttta

SEQ ID NO: 143907 - DNA, 25 bp, SARS Virus
ctagagcttgccatagtcactttag

SEQ ID NO: 143908 - DNA, 25 bp, SARS Virus
tagagcttgcctaagtcactttagt

SEQ ID NO: 143909 - DNA, 25 bp, SARS Virus
agagcttgccttagtcactttagtc

SEQ ID NO: 143910 - DNA, 25 bp, SARS Virus
gagcttgccttaatcactttagtct

SEQ ID NO: 143911 - DNA, 25 bp, SARS Virus
agcttgccttagacactttagtctt

SEQ ID NO: 143912 - DNA, 25 bp, SARS Virus
gcttgccttagtaactttagtcttt

SEQ ID NO: 143913 - DNA, 25 bp, SARS Virus
cttgccttagtcactttagtctttg

SEQ ID NO: 143914 - DNA, 25 bp, SARS Virus
ttgccttagtcaatttagtctttgt

SEQ ID NO: 143915 - DNA, 25 bp, SARS Virus
tgccttagtcacattagtctttgta

SEQ ID NO: 143916 - DNA, 25 bp, SARS Virus
gccttagtcactatagtctttgtag

SEQ ID NO: 143917 - DNA, 25 bp, SARS Virus
ccttagtcacttaagtctttgtagt

SEQ ID NO: 143918 - DNA, 25 bp, SARS Virus
cttagtcactttagtctttgtagtg

SEQ ID NO: 143919 - DNA, 25 bp, SARS Virus
ttagtcactttaatctttgtagtgc

SEQ ID NO: 143920 - DNA, 25 bp, SARS Virus
tagtcactttagactttgtagtgcc

SEQ ID NO: 143921 - DNA, 25 bp, SARS Virus
agtcactttagtatttgtagtgccg

SEQ ID NO: 143922 - DNA, 25 bp, SARS Virus
gtcactttagtcattgtagtgccgg

SEQ ID NO: 143923 - DNA, 25 bp, SARS Virus
tcactttagtctatgtagtgccggt

SEQ ID NO: 143924 - DNA, 25 bp, SARS Virus
cactttagtcttagtagtgccggtt

SEQ ID NO: 143925 - DNA, 25 bp, SARS Virus
actttagtctttatagtgccggttt

SEQ ID NO: 143926 - DNA, 25 bp, SARS Virus
ctttagtctttgaagtgccggttta

SEQ ID NO: 143927 - DNA, 25 bp, SARS Virus
tttagtctttgtagtgccggtttaa

SEQ ID NO: 143928 - DNA, 25 bp, SARS Virus
ttagtctttgtaatgccggtttaac

SEQ ID NO: 143929 - DNA, 25 bp, SARS Virus
tagtctttgtagagccggtttaaca

SEQ ID NO: 143930 - DNA, 25 bp, SARS Virus
agtctttgtagtaccggtttaacaa

SEQ ID NO: 143931 - DNA, 25 bp, SARS Virus
gtctttgtagtgacggtttaacaac

SEQ ID NO: 143932 - DNA, 25 bp, SARS Virus
tctttgtagtgcaggtttaacaact

SEQ ID NO: 143933 - DNA, 25 bp, SARS Virus
ctttgtagtgccagtttaacaactt

SEQ ID NO: 143934 - DNA, 25 bp, SARS Virus
tttgtagtgccgatttaacaacttt

SEQ ID NO: 143935 - DNA, 25 bp, SARS Virus
ttgtagtgccggattaacaacttta

SEQ ID NO: 143936 - DNA, 25 bp, SARS Virus
tgtagtgccggtataacaactttac

SEQ ID NO: 143937 - DNA, 25 bp, SARS Virus
gtagtgccggttaaacaactttacc

SEQ ID NO: 143938 - DNA, 25 bp, SARS Virus
tagtgccggtttaacaactttacca

SEQ ID NO: 143939 - DNA, 25 bp, SARS Virus
agtgccggtttaacaactttaccaa

SEQ ID NO: 143940 - DNA, 25 bp, SARS Virus
gtgccggtttaaaaactttaccaac

SEQ ID NO: 143941 - DNA, 25 bp, SARS Virus
tgccggtttaacaactttaccaact

SEQ ID NO: 143942 - DNA, 25 bp, SARS Virus
gccggtttaacaactttaccaactt

SEQ ID NO: 143943 - DNA, 25 bp, SARS Virus
ccggtttaacaaatttaccaacttt

SEQ ID NO: 143944 - DNA, 25 bp, SARS Virus
cggtttaacaacattaccaacttta

SEQ ID NO: 143945 - DNA, 25 bp, SARS Virus
ggtttaacaactataccaactttag

SEQ ID NO: 143946 - DNA, 25 bp, SARS Virus
gtttaacaacttaaccaactttaga

SEQ ID NO: 143947 - DNA, 25 bp, SARS Virus
tttaacaactttaccaactttagag

SEQ ID NO: 143948 - DNA, 25 bp, SARS Virus
ttaacaactttaacaactttagaga

SEQ ID NO: 143949 - DNA, 25 bp, SARS Virus
taacaactttacaaactttagagaa

SEQ ID NO: 143950 - DNA, 25 bp, SARS Virus
aacaactttaccaactttagagaaa

SEQ ID NO: 143951 - DNA, 25 bp, SARS Virus
acaactttaccaactttagagaaac

SEQ ID NO: 143952 - DNA, 25 bp, SARS Virus
caactttaccaaatttagagaaact

SEQ ID NO: 143953 - DNA, 25 bp, SARS Virus
aactttaccaacattagagaaactt

SEQ ID NO: 143954 - DNA, 25 bp, SARS Virus
actttaccaactatagagaaacttc

SEQ ID NO: 143955 - DNA, 25 bp, SARS Virus
ctttaccaacttaagagaaacttct

SEQ ID NO: 143956 - DNA, 25 bp, SARS Virus
tttaccaactttagagaaacttctt

SEQ ID NO: 143957 - DNA, 25 bp, SARS Virus
ttaccaactttaaagaaacttcttc

SEQ ID NO: 143958 - DNA, 25 bp, SARS Virus
taccaactttagagaaacttcttcc

SEQ ID NO: 143959 - DNA, 25 bp, SARS Virus
accaactttagaaaaacttcttcct

SEQ ID NO: 143960 - DNA, 25 bp, SARS Virus
ccaactttagagaaacttcttcctc

SEQ ID NO: 143961 - DNA, 25 bp, SARS Virus
caactttagagaaacttcttcctca

SEQ ID NO: 143962 - DNA, 25 bp, SARS Virus
aactttagagaaacttcttcctcaa

SEQ ID NO: 143963 - DNA, 25 bp, SARS Virus
actttagagaaaattcttcctcaat

SEQ ID NO: 143964 - DNA, 25 bp, SARS Virus
ctttagagaaacatcttcctcaatt

SEQ ID NO: 143965 - DNA, 25 bp, SARS Virus
tttagagaaactacttcctcaattg

SEQ ID NO: 143966 - DNA, 25 bp, SARS Virus
ttagagaaacttattcctcaattgt

SEQ ID NO: 143967 - DNA, 25 bp, SARS Virus
tagagaaacttcatcctcaattgtg

SEQ ID NO: 143968 - DNA, 25 bp, SARS Virus
agagaaacttctacctcaattgtgt

SEQ ID NO: 143969 - DNA, 25 bp, SARS Virus
gagaaacttcttactcaattgtgtg

SEQ ID NO: 143970 - DNA, 25 bp, SARS Virus
agaaacttcttcatcaattgtgtgg

SEQ ID NO: 143971 - DNA, 25 bp, SARS Virus
gaaacttcttccacaattgtgtggt

SEQ ID NO: 143972 - DNA, 25 bp, SARS Virus
aaacttcttcctaaattgtgtggtc

SEQ ID NO: 143973 - DNA, 25 bp, SARS Virus
aacttcttcctcaattgtgtggtca

SEQ ID NO: 143974 - DNA, 25 bp, SARS Virus
acttcttcctcaattgtgtggtcat

SEQ ID NO: 143975 - DNA, 25 bp, SARS Virus
cttcttcctcaaatgtgtggtcatg

SEQ ID NO: 143976 - DNA, 25 bp, SARS Virus
ttcttcctcaatagtgtggtcatgg

SEQ ID NO: 143977 - DNA, 25 bp, SARS Virus
tcttcctcaattatgtggtcatggt

SEQ ID NO: 143978 - DNA, 25 bp, SARS Virus
cttcctcaattgagtggtcatggtc

SEQ ID NO: 143979 - DNA, 25 bp, SARS Virus
ttcctcaattgtatggtcatggtca

SEQ ID NO: 143980 - DNA, 25 bp, SARS Virus
tcctcaattgtgaggtcatggtcac

SEQ ID NO: 143981 - DNA, 25 bp, SARS Virus
cctcaattgtgtagtcatggtcact

SEQ ID NO: 143982 - DNA, 25 bp, SARS Virus
ctcaattgtgtgatcatggtcactc

SEQ ID NO: 143983 - DNA, 25 bp, SARS Virus
tcaattgtgtggacatggtcactca

SEQ ID NO: 143984 - DNA, 25 bp, SARS Virus
caattgtgtggtaatggtcactcag

SEQ ID NO: 143985 - DNA, 25 bp, SARS Virus
aattgtgtggtcatggtcactcagg

SEQ ID NO: 143986 - DNA, 25 bp, SARS Virus
attgtgtggtcaaggtcactcaggt

SEQ ID NO: 143987 - DNA, 25 bp, SARS Virus
ttgtgtggtcatagtcactcaggta

SEQ ID NO: 143988 - DNA, 25 bp, SARS Virus
tgtgtggtcatgatcactcaggtaa

SEQ ID NO: 143989 - DNA, 25 bp, SARS Virus
gtgtggtcatggacactcaggtaat

SEQ ID NO: 143990 - DNA, 25 bp, SARS Virus
tgtggtcatggtaactcaggtaatt

SEQ ID NO: 143991 - DNA, 25 bp, SARS Virus
gtggtcatggtcactcaggtaattt

SEQ ID NO: 143992 - DNA, 25 bp, SARS Virus
tggtcatggtcaatcaggtaatttt

SEQ ID NO: 143993 - DNA, 25 bp, SARS Virus
atcatccatatccttaccacaataa

SEQ ID NO: 143994 - DNA, 25 bp, SARS Virus
tcatccatatcgctaccacaataat

SEQ ID NO: 143995 - DNA, 25 bp, SARS Virus
catccatatcgtcaccacaataatc

SEQ ID NO: 143996 - DNA, 25 bp, SARS Virus
atccatatcgttcccacaataatct

SEQ ID NO: 143997 - DNA, 25 bp, SARS Virus
tccatatcgttaccacaataatctc

SEQ ID NO: 143998 - DNA, 25 bp, SARS Virus
ccatatcgttaccacaataatctca

SEQ ID NO: 143999 - DNA, 25 bp, SARS Virus
catatcgttaccccaataatctcat

SEQ ID NO: 144000 - DNA, 25 bp, SARS Virus
atatcgttaccacaataatctcatt

SEQ ID NO: 144001 - DNA, 25 bp, SARS Virus
tatcgttaccaccataatctcattc

SEQ ID NO: 144002 - DNA, 25 bp, SARS Virus
atcgttaccacactaatctcattcg

SEQ ID NO: 144003 - DNA, 25 bp, SARS Virus
tcgttaccacaacaatctcattcgt

SEQ ID NO: 144004 - DNA, 25 bp, SARS Virus
cgttaccacaatcatctcattcgtt

SEQ ID NO: 144005 - DNA, 25 bp, SARS Virus
gttaccacaatactctcattcgtta

SEQ ID NO: 144006 - DNA, 25 bp, SARS Virus
ttaccacaataacctcattcgttaa

SEQ ID NO: 144007 - DNA, 25 bp, SARS Virus
taccacaataatctcattcgttaac

SEQ ID NO: 144008 - DNA, 25 bp, SARS Virus
accacaataatcccattcgttaact

SEQ ID NO: 144009 - DNA, 25 bp, SARS Virus
ccacaataatctcattcgttaactt

SEQ ID NO: 144010 - DNA, 25 bp, SARS Virus
cacaataatctccttcgttaacttg

SEQ ID NO: 144011 - DNA, 25 bp, SARS Virus
acaataatctcactcgttaacttga

SEQ ID NO: 144012 - DNA, 25 bp, SARS Virus
caataatctcatccgttaacttgat

SEQ ID NO: 144013 - DNA, 25 bp, SARS Virus
aataatctcattcgttaacttgata

SEQ ID NO: 144014 - DNA, 25 bp, SARS Virus
ataatctcattccttaacttgatag

SEQ ID NO: 144015 - DNA, 25 bp, SARS Virus
taatctcattcgctaacttgatagt

SEQ ID NO: 144016 - DNA, 25 bp, SARS Virus
aatctcattcgtcaacttgatagtc

SEQ ID NO: 144017 - DNA, 25 bp, SARS Virus
atctcattcgttcacttgatagtcg

SEQ ID NO: 144018 - DNA, 25 bp, SARS Virus
tctcattcgttaccttgatagtcgt

SEQ ID NO: 144019 - DNA, 25 bp, SARS Virus
ctcattcgttaacttgatagtcgtg

SEQ ID NO: 144020 - DNA, 25 bp, SARS Virus
tcattcgttaacctgatagtcgtgg

SEQ ID NO: 144021 - DNA, 25 bp, SARS Virus
cattcgttaactcgatagtcgtgga

SEQ ID NO: 144022 - DNA, 25 bp, SARS Virus
attcgttaacttcatagtcgtggat

SEQ ID NO: 144023 - DNA, 25 bp, SARS Virus
ttcgttaacttgctagtcgtggatt

SEQ ID NO: 144024 - DNA, 25 bp, SARS Virus
tcgttaacttgacagtcgtggattt

SEQ ID NO: 144025 - DNA, 25 bp, SARS Virus
cgttaacttgatcgtcgtggatttc

SEQ ID NO: 144026 - DNA, 25 bp, SARS Virus
gttaacttgatactcgtggatttct

SEQ ID NO: 144027 - DNA, 25 bp, SARS Virus
ttaacttgatagccgtggatttctg

SEQ ID NO: 144028 - DNA, 25 bp, SARS Virus
taacttgatagtcgtggatttctgt

SEQ ID NO: 144029 - DNA, 25 bp, SARS Virus
aacttgatagtcctggatttctgta

SEQ ID NO: 144030 - DNA, 25 bp, SARS Virus
acttgatagtcgcggatttctgtat

SEQ ID NO: 144031 - DNA, 25 bp, SARS Virus
cttgatagtcgtcgatttctgtatc

SEQ ID NO: 144032 - DNA, 25 bp, SARS Virus
ttgatagtcgtgcatttctgtatca

SEQ ID NO: 144033 - DNA, 25 bp, SARS Virus
tgatagtcgtggctttctgtatcat

SEQ ID NO: 144034 - DNA, 25 bp, SARS Virus
gatagtcgtggacttctgtatcata

SEQ ID NO: 144035 - DNA, 25 bp, SARS Virus
atagtcgtggatctctgtatcatat

SEQ ID NO: 144036 - DNA, 25 bp, SARS Virus
tagtcgtggattcctgtatcatatt

SEQ ID NO: 144037 - DNA, 25 bp, SARS Virus
agtcgtggatttctgtatcatattc

SEQ ID NO: 144038 - DNA, 25 bp, SARS Virus
gtcgtggatttccgtatcatattcg

SEQ ID NO: 144039 - DNA, 25 bp, SARS Virus
tcgtggatttctctatcatattcgg

SEQ ID NO: 144040 - DNA, 25 bp, SARS Virus
cgtggatttctgcatcatattcggt

SEQ ID NO: 144041 - DNA, 25 bp, SARS Virus
gtggatttctgtctcatattcggtg

SEQ ID NO: 144042 - DNA, 25 bp, SARS Virus
tggatttctgtaccatattcggtgt

SEQ ID NO: 144043 - DNA, 25 bp, SARS Virus
ggatttctgtatcatattcggtgtt

SEQ ID NO: 144044 - DNA, 25 bp, SARS Virus
gatttctgtatcctattcggtgtta

SEQ ID NO: 144045 - DNA, 25 bp, SARS Virus
atttctgtatcacattcggtgttat

SEQ ID NO: 144046 - DNA, 25 bp, SARS Virus
tttctgtatcatcttcggtgttatc

SEQ ID NO: 144047 - DNA, 25 bp, SARS Virus
ttctgtatcatactcggtgttatct

SEQ ID NO: 144048 - DNA, 25 bp, SARS Virus
tctgtatcatatccggtgttatcta

SEQ ID NO: 144049 - DNA, 25 bp, SARS Virus
ctgtatcatattcggtgttatctaa

SEQ ID NO: 144050 - DNA, 25 bp, SARS Virus
tgtatcatattccgtgttatctaaa

SEQ ID NO: 144051 - DNA, 25 bp, SARS Virus
gtatcatattcgctgttatctaaaa

SEQ ID NO: 144052 - DNA, 25 bp, SARS Virus
tatcatattcggcgttatctaaaaa

SEQ ID NO: 144053 - DNA, 25 bp, SARS Virus
atcatattcggtcttatctaaaaac

SEQ ID NO: 144054 - DNA, 25 bp, SARS Virus
tcatattcggtgctatctaaaaacc

SEQ ID NO: 144055 - DNA, 25 bp, SARS Virus
catattcggtgtcatctaaaaaccg

SEQ ID NO: 144056 - DNA, 25 bp, SARS Virus
atattcggtgttctctaaaaaccga

SEQ ID NO: 144057 - DNA, 25 bp, SARS Virus
tattcggtgttacctaaaaaccgat

SEQ ID NO: 144058 - DNA, 25 bp, SARS Virus
attcggtgttatctaaaaaccgatc

SEQ ID NO: 144059 - DNA, 25 bp, SARS Virus
ttcggtgttatccaaaaaccgatca

SEQ ID NO: 144060 - DNA, 25 bp, SARS Virus
tcggtgttatctcaaaaccgatcat

SEQ ID NO: 144061 - DNA, 25 bp, SARS Virus
cggtgttatctacaaaccgatcatg

SEQ ID NO: 144062 - DNA, 25 bp, SARS Virus
ggtgttatctaacaaccgatcatga

SEQ ID NO: 144063 - DNA, 25 bp, SARS Virus
gtgttatctaaacaccgatcatgat

SEQ ID NO: 144064 - DNA, 25 bp, SARS Virus
tgttatctaaaacccgatcatgatg

SEQ ID NO: 144065 - DNA, 25 bp, SARS Virus
gttatctaaaaaccgatcatgatgc

SEQ ID NO: 144066 - DNA, 25 bp, SARS Virus
ttatctaaaaaccgatcatgatgca

SEQ ID NO: 144067 - DNA, 25 bp, SARS Virus
tatctaaaaacccatcatgatgcat

SEQ ID NO: 144068 - DNA, 25 bp, SARS Virus
atctaaaaaccgctcatgatgcatt

SEQ ID NO: 144069 - DNA, 25 bp, SARS Virus
tctaaaaaccgaccatgatgcatta

SEQ ID NO: 144070 - DNA, 25 bp, SARS Virus
ctaaaaaccgatcatgatgcattat

SEQ ID NO: 144071 - DNA, 25 bp, SARS Virus
taaaaaccgatcctgatgcattatt

SEQ ID NO: 144072 - DNA, 25 bp, SARS Virus
aaaaaccgatcacgatgcattattt

SEQ ID NO: 144073 - DNA, 25 bp, SARS Virus
aaaaccgatcatcatgcattatttc

SEQ ID NO: 144074 - DNA, 25 bp, SARS Virus
aaaccgatcatgctgcattatttct

SEQ ID NO: 144075 - DNA, 25 bp, SARS Virus
aaccgatcatgacgcattatttctt

SEQ ID NO: 144076 - DNA, 25 bp, SARS Virus
accgatcatgatccattatttcttt

SEQ ID NO: 144077 - DNA, 25 bp, SARS Virus
ccgatcatgatgcattatttctttg

SEQ ID NO: 144078 - DNA, 25 bp, SARS Virus
cgatcatgatgccttatttctttga

SEQ ID NO: 144079 - DNA, 25 bp, SARS Virus
gatcatgatgcactatttctttgac

SEQ ID NO: 144080 - DNA, 25 bp, SARS Virus
atcatgatgcatcatttctttgaca

SEQ ID NO: 144081 - DNA, 25 bp, SARS Virus
tcatgatgcattctttctttgacat

SEQ ID NO: 144082 - DNA, 25 bp, SARS Virus
catgatgcattacttctttgacata

SEQ ID NO: 144083 - DNA, 25 bp, SARS Virus
atgatgcattatctctttgacatac

SEQ ID NO: 144084 - DNA, 25 bp, SARS Virus
tgatgcattattcctttgacatacc

SEQ ID NO: 144085 - DNA, 25 bp, SARS Virus
gatgcattatttctttgacatacca

SEQ ID NO: 144086 - DNA, 25 bp, SARS Virus
atgcattatttccttgacataccat

SEQ ID NO: 144087 - DNA, 25 bp, SARS Virus
tgcattatttctctgacataccatt

SEQ ID NO: 144088 - DNA, 25 bp, SARS Virus
gcattatttcttcgacataccattg

SEQ ID NO: 144089 - DNA, 25 bp, SARS Virus
cattatttctttcacataccattga

SEQ ID NO: 144090 - DNA, 25 bp, SARS Virus
attatttctttgccataccattgat

SEQ ID NO: 144091 - DNA, 25 bp, SARS Virus
ttatttctttgacataccattgatc

SEQ ID NO: 144092 - DNA, 25 bp, SARS Virus
tatttctttgacctaccattgatcg

SEQ ID NO: 144093 - DNA, 25 bp, SARS Virus
atttctttgacacaccattgatcgt

SEQ ID NO: 144094 - DNA, 25 bp, SARS Virus
tttctttgacatcccattgatcgtg

SEQ ID NO: 144095 - DNA, 25 bp, SARS Virus
ttctttgacataccattgatcgtgt

SEQ ID NO: 144096 - DNA, 25 bp, SARS Virus
tctttgacataccattgatcgtgtt

SEQ ID NO: 144097 - DNA, 25 bp, SARS Virus
ctttgacatacccttgatcgtgttt

SEQ ID NO: 144098 - DNA, 25 bp, SARS Virus
tttgacataccactgatcgtgttta

SEQ ID NO: 144099 - DNA, 25 bp, SARS Virus
ttgacataccatcgatcgtgtttac

SEQ ID NO: 144100 - DNA, 25 bp, SARS Virus
tgacataccattcatcgtgtttacg

SEQ ID NO: 144101 - DNA, 25 bp, SARS Virus
gacataccattgctcgtgtttacgg

SEQ ID NO: 144102 - DNA, 25 bp, SARS Virus
acataccattgaccgtgtttacggt

SEQ ID NO: 144103 - DNA, 25 bp, SARS Virus
cataccattgatcgtgtttacggtc

SEQ ID NO: 144104 - DNA, 25 bp, SARS Virus
ataccattgatcctgtttacggtcg

SEQ ID NO: 144105 - DNA, 25 bp, SARS Virus
taccattgatcgcgtttacggtcga

SEQ ID NO: 144106 - DNA, 25 bp, SARS Virus
accattgatcgtctttacggtcgag

SEQ ID NO: 144107 - DNA, 25 bp, SARS Virus
ccattgatcgtgcttacggtcgagg

SEQ ID NO: 144108 - DNA, 25 bp, SARS Virus
cattgatcgtgtctacggtcgaggt

SEQ ID NO: 144109 - DNA, 25 bp, SARS Virus
attgatcgtgttcacggtcgaggtt

SEQ ID NO: 144110 - DNA, 25 bp, SARS Virus
ttgatcgtgtttccggtcgaggtta

SEQ ID NO: 144111 - DNA, 25 bp, SARS Virus
tgatcgtgtttacggtcgaggttat

SEQ ID NO: 144112 - DNA, 25 bp, SARS Virus
gatcgtgtttaccgtcgaggttatc

SEQ ID NO: 144113 - DNA, 25 bp, SARS Virus
atcgtgtttacgctcgaggttatcc

SEQ ID NO: 144114 - DNA, 25 bp, SARS Virus
tcgtgtttacggccgaggttatcct

SEQ ID NO: 144115 - DNA, 25 bp, SARS Virus
cgtgtttacggtcgaggttatcctt

SEQ ID NO: 144116 - DNA, 25 bp, SARS Virus
gtgtttacggtccaggttatcctta

SEQ ID NO: 144117 - DNA, 25 bp, SARS Virus
tgtttacggtcgcggttatccttac

SEQ ID NO: 144118 - DNA, 25 bp, SARS Virus
gtttacggtcgacgttatccttaca

SEQ ID NO: 144119 - DNA, 25 bp, SARS Virus
tttacggtcgagcttatccttacag

SEQ ID NO: 144120 - DNA, 25 bp, SARS Virus
ttacggtcgaggctatccttacagc

SEQ ID NO: 144121 - DNA, 25 bp, SARS Virus
tacggtcgaggtcatccttacagcg

SEQ ID NO: 144122 - DNA, 25 bp, SARS Virus
acggtcgaggttctccttacagcgt

SEQ ID NO: 144123 - DNA, 25 bp, SARS Virus
cggtcgaggttacccttacagcgtg

SEQ ID NO: 144124 - DNA, 25 bp, SARS Virus
ggtcgaggttatccttacagcgtga

SEQ ID NO: 144125 - DNA, 25 bp, SARS Virus
gtcgaggttatccttacagcgtgag

SEQ ID NO: 144126 - DNA, 25 bp, SARS Virus
tcgaggttatccctacagcgtgagt

SEQ ID NO: 144127 - DNA, 25 bp, SARS Virus
cgaggttatcctcacagcgtgagta

SEQ ID NO: 144128 - DNA, 25 bp, SARS Virus
gaggttatccttccagcgtgagtat

SEQ ID NO: 144129 - DNA, 25 bp, SARS Virus
aggttatccttacagcgtgagtatt

SEQ ID NO: 144130 - DNA, 25 bp, SARS Virus
ggttatccttaccgcgtgagtattc

SEQ ID NO: 144131 - DNA, 25 bp, SARS Virus
gttatccttacaccgtgagtattct

SEQ ID NO: 144132 - DNA, 25 bp, SARS Virus
ttatccttacagcgtgagtattctt

SEQ ID NO: 144133 - DNA, 25 bp, SARS Virus
tatccttacagcctgagtattcttc

SEQ ID NO: 144134 - DNA, 25 bp, SARS Virus
atccttacagcgcgagtattcttca

SEQ ID NO: 144135 - DNA, 25 bp, SARS Virus
tccttacagcgtcagtattcttcac

SEQ ID NO: 144136 - DNA, 25 bp, SARS Virus
ccttacagcgtgcgtattcttcaca

SEQ ID NO: 144137 - DNA, 25 bp, SARS Virus
cttacagcgtgactattcttcacag

SEQ ID NO: 144138 - DNA, 25 bp, SARS Virus
ttacagcgtgagcattcttcacagc

SEQ ID NO: 144139 - DNA, 25 bp, SARS Virus
tacagcgtgagtcttcttcacagct

SEQ ID NO: 144140 - DNA, 25 bp, SARS Virus
acagcgtgagtactcttcacagctg

SEQ ID NO: 144141 - DNA, 25 bp, SARS Virus
cagcgtgagtatccttcacagctgt

SEQ ID NO: 144142 - DNA, 25 bp, SARS Virus
agcgtgagtattcttcacagctgta

SEQ ID NO: 144143 - DNA, 25 bp, SARS Virus
gcgtgagtattcctcacagctgtac

SEQ ID NO: 144144 - DNA, 25 bp, SARS Virus
cgtgagtattctccacagctgtacg

SEQ ID NO: 144145 - DNA, 25 bp, SARS Virus
gtgagtattcttcacagctgtacga

SEQ ID NO: 144146 - DNA, 25 bp, SARS Virus
tgagtattcttcccagctgtacgag

SEQ ID NO: 144147 - DNA, 25 bp, SARS Virus
gagtattcttcacagctgtacgagt

SEQ ID NO: 144148 - DNA, 25 bp, SARS Virus
agtattcttcaccgctgtacgagtc

SEQ ID NO: 144149 - DNA, 25 bp, SARS Virus
gtattcttcacacctgtacgagtcg

SEQ ID NO: 144150 - DNA, 25 bp, SARS Virus
tattcttcacagctgtacgagtcga

SEQ ID NO: 144151 - DNA, 25 bp, SARS Virus
attcttcacagccgtacgagtcgag

SEQ ID NO: 144152 - DNA, 25 bp, SARS Virus
ttcttcacagctctacgagtcgagg

SEQ ID NO: 144153 - DNA, 25 bp, SARS Virus
tcttcacagctgcacgagtcgagga

SEQ ID NO: 144154 - DNA, 25 bp, SARS Virus
cttcacagctgtccgagtcgaggat

SEQ ID NO: 144155 - DNA, 25 bp, SARS Virus
ttcacagctgtacgagtcgaggata

SEQ ID NO: 144156 - DNA, 25 bp, SARS Virus
tcacagctgtaccagtcgaggatat

SEQ ID NO: 144157 - DNA, 25 bp, SARS Virus
cacagctgtacgcgtcgaggatatt

SEQ ID NO: 144158 - DNA, 25 bp, SARS Virus
acagctgtacgactcgaggatattc

SEQ ID NO: 144159 - DNA, 25 bp, SARS Virus
cagctgtacgagccgaggatattct

SEQ ID NO: 144160 - DNA, 25 bp, SARS Virus
agctgtacgagtcgaggatattctg

SEQ ID NO: 144161 - DNA, 25 bp, SARS Virus
gctgtacgagtccaggatattctgt

SEQ ID NO: 144162 - DNA, 25 bp, SARS Virus
ctgtacgagtcgcggatattctgtc

SEQ ID NO: 144163 - DNA, 25 bp, SARS Virus
tgtacgagtcgacgatattctgtcg

SEQ ID NO: 144164 - DNA, 25 bp, SARS Virus
gtacgagtcgagcatattctgtcgg

SEQ ID NO: 144165 - DNA, 25 bp, SARS Virus
tacgagtcgaggctattctgtcgga

SEQ ID NO: 144166 - DNA, 25 bp, SARS Virus
acgagtcgaggacattctgtcggac

SEQ ID NO: 144167 - DNA, 25 bp, SARS Virus
cgagtcgaggatcttctgtcggacg

SEQ ID NO: 144168 - DNA, 25 bp, SARS Virus
gagtcgaggatactctgtcggacga

SEQ ID NO: 144169 - DNA, 25 bp, SARS Virus
agtcgaggatatcctgtcggacgaa

SEQ ID NO: 144170 - DNA, 25 bp, SARS Virus
gtcgaggatattctgtcggacgaac

SEQ ID NO: 144171 - DNA, 25 bp, SARS Virus
tcgaggatattccgtcggacgaact

SEQ ID NO: 144172 - DNA, 25 bp, SARS Virus
cgaggatattctctcggacgaactc

SEQ ID NO: 144173 - DNA, 25 bp, SARS Virus
gaggatattctgccggacgaactca

SEQ ID NO: 144174 - DNA, 25 bp, SARS Virus
aggatattctgtcggacgaactcag

SEQ ID NO: 144175 - DNA, 25 bp, SARS Virus
ggatattctgtccgacgaactcaga

SEQ ID NO: 144176 - DNA, 25 bp, SARS Virus
gatattctgtcgcacgaactcagac

SEQ ID NO: 144177 - DNA, 25 bp, SARS Virus
atattctgtcggccgaactcagacc

SEQ ID NO: 144178 - DNA, 25 bp, SARS Virus
tattctgtcggacgaactcagacct

SEQ ID NO: 144179 - DNA, 25 bp, SARS Virus
attctgtcggaccaactcagacctt

SEQ ID NO: 144180 - DNA, 25 bp, SARS Virus
ttctgtcggacgcactcagacctta

SEQ ID NO: 144181 - DNA, 25 bp, SARS Virus
tctgtcggacgacctcagaccttat

SEQ ID NO: 144182 - DNA, 25 bp, SARS Virus
ctgtcggacgaactcagaccttatg

SEQ ID NO: 144183 - DNA, 25 bp, SARS Virus
tgtcggacgaacccagaccttatgt

SEQ ID NO: 144184 - DNA, 25 bp, SARS Virus
gtcggacgaactcagaccttatgta

SEQ ID NO: 144185 - DNA, 25 bp, SARS Virus
tcggacgaactccgaccttatgtaa

SEQ ID NO: 144186 - DNA, 25 bp, SARS Virus
cggacgaactcacaccttatgtaac

SEQ ID NO: 144187 - DNA, 25 bp, SARS Virus
ggacgaactcagcccttatgtaaca

SEQ ID NO: 144188 - DNA, 25 bp, SARS Virus
gacgaactcagaccttatgtaacaa

SEQ ID NO: 144189 - DNA, 25 bp, SARS Virus
acgaactcagaccttatgtaacaaa

SEQ ID NO: 144190 - DNA, 25 bp, SARS Virus
cgaactcagaccctatgtaacaaag

SEQ ID NO: 144191 - DNA, 25 bp, SARS Virus
gaactcagacctcatgtaacaaagg

SEQ ID NO: 144192 - DNA, 25 bp, SARS Virus
aactcagaccttctgtaacaaaggt

SEQ ID NO: 144193 - DNA, 25 bp, SARS Virus
actcagaccttacgtaacaaaggtc

SEQ ID NO: 144194 - DNA, 25 bp, SARS Virus
ctcagaccttatctaacaaaggtca

SEQ ID NO: 144195 - DNA, 25 bp, SARS Virus
tcagaccttatgcaacaaaggtcat

SEQ ID NO: 144196 - DNA, 25 bp, SARS Virus
cagaccttatgtcacaaaggtcatc

SEQ ID NO: 144197 - DNA, 25 bp, SARS Virus
agaccttatgtaccaaaggtcatct

SEQ ID NO: 144198 - DNA, 25 bp, SARS Virus
gaccttatgtaacaaaggtcatctt

SEQ ID NO: 144199 - DNA, 25 bp, SARS Virus
accttatgtaaccaaggtcatctta

SEQ ID NO: 144200 - DNA, 25 bp, SARS Virus
ccttatgtaacacaggtcatcttat

SEQ ID NO: 144201 - DNA, 25 bp, SARS Virus
cttatgtaacaacggtcatcttata

SEQ ID NO: 144202 - DNA, 25 bp, SARS Virus
ttatgtaacaaacgtcatcttatat

SEQ ID NO: 144203 - DNA, 25 bp, SARS Virus
tatgtaacaaagctcatcttatata

SEQ ID NO: 144204 - DNA, 25 bp, SARS Virus
atgtaacaaaggccatcttatatac

SEQ ID NO: 144205 - DNA, 25 bp, SARS Virus
tgtaacaaaggtcatcttatatacg

SEQ ID NO: 144206 - DNA, 25 bp, SARS Virus
gtaacaaaggtcctcttatatacgc

SEQ ID NO: 144207 - DNA, 25 bp, SARS Virus
taacaaaggtcaccttatatacgcg

SEQ ID NO: 144208 - DNA, 25 bp, SARS Virus
aacaaaggtcatcttatatacgcgg

SEQ ID NO: 144209 - DNA, 25 bp, SARS Virus
acaaaggtcatcctatatacgcggt

SEQ ID NO: 144210 - DNA, 25 bp, SARS Virus
caaaggtcatctcatatacgcggtt

SEQ ID NO: 144211 - DNA, 25 bp, SARS Virus
aaaggtcatcttctatacgcggttc

SEQ ID NO: 144212 - DNA, 25 bp, SARS Virus
aaggtcatcttacatacgcggttcg

SEQ ID NO: 144213 - DNA, 25 bp, SARS Virus
aggtcatcttatctacgcggttcga

SEQ ID NO: 144214 - DNA, 25 bp, SARS Virus
ggtcatcttatacacgcggttcgac

SEQ ID NO: 144215 - DNA, 25 bp, SARS Virus
gtcatcttatatccgcggttcgacc

SEQ ID NO: 144216 - DNA, 25 bp, SARS Virus
tcatcttatatacgcggttcgacca

SEQ ID NO: 144217 - DNA, 25 bp, SARS Virus
catcttatatacccggttcgaccac

SEQ ID NO: 144218 - DNA, 25 bp, SARS Virus
atcttatatacgcggttcgaccaca

SEQ ID NO: 144219 - DNA, 25 bp, SARS Virus
tcttatatacgccgttcgaccacac

SEQ ID NO: 144220 - DNA, 25 bp, SARS Virus
cttatatacgcgcttcgaccacact

SEQ ID NO: 144221 - DNA, 25 bp, SARS Virus
ttatatacgcggctcgaccacactc

SEQ ID NO: 144222 - DNA, 25 bp, SARS Virus
tatatacgcggtccgaccacactca

SEQ ID NO: 144223 - DNA, 25 bp, SARS Virus
atatacgcggttcgaccacactcaa

SEQ ID NO: 144224 - DNA, 25 bp, SARS Virus
tatacgcggttccaccacactcaac

SEQ ID NO: 144225 - DNA, 25 bp, SARS Virus
atacgcggttcgcccacactcaact

SEQ ID NO: 144226 - DNA, 25 bp, SARS Virus
tacgcggttcgaccacactcaacta

SEQ ID NO: 144227 - DNA, 25 bp, SARS Virus
acgcggttcgaccacactcaactag

SEQ ID NO: 144228 - DNA, 25 bp, SARS Virus
cgcggttcgaccccactcaactaga

SEQ ID NO: 144229 - DNA, 25 bp, SARS Virus
gcggttcgaccacactcaactagac

SEQ ID NO: 144230 - DNA, 25 bp, SARS Virus
cggttcgaccaccctcaactagacg

SEQ ID NO: 144231 - DNA, 25 bp, SARS Virus
ggttcgaccacactcaactagacgt

SEQ ID NO: 144232 - DNA, 25 bp, SARS Virus
gttcgaccacacccaactagacgta

SEQ ID NO: 144233 - DNA, 25 bp, SARS Virus
ttcgaccacactcaactagacgtac

SEQ ID NO: 144234 - DNA, 25 bp, SARS Virus
tcgaccacactccactagacgtact

SEQ ID NO: 144235 - DNA, 25 bp, SARS Virus
cgaccacactcacctagacgtactt

SEQ ID NO: 144236 - DNA, 25 bp, SARS Virus
gaccacactcaactagacgtactta

SEQ ID NO: 144237 - DNA, 25 bp, SARS Virus
accacactcaaccagacgtacttaa

SEQ ID NO: 144238 - DNA, 25 bp, SARS Virus
ccacactcaactcgacgtacttaac

SEQ ID NO: 144239 - DNA, 25 bp, SARS Virus
cacactcaactacacgtacttaacg

SEQ ID NO: 144240 - DNA, 25 bp, SARS Virus
acactcaactagccgtacttaacga

SEQ ID NO: 144241 - DNA, 25 bp, SARS Virus
cactcaactagacgtacttaacgac

SEQ ID NO: 144242 - DNA, 25 bp, SARS Virus
actcaactagacctacttaacgaca

SEQ ID NO: 144243 - DNA, 25 bp, SARS Virus
ctcaactagacgcacttaacgacat

SEQ ID NO: 144244 - DNA, 25 bp, SARS Virus
tcaactagacgtccttaacgacatc

SEQ ID NO: 144245 - DNA, 25 bp, SARS Virus
caactagacgtacttaacgacatct

SEQ ID NO: 144246 - DNA, 25 bp, SARS Virus
aactagacgtacctaacgacatctt

SEQ ID NO: 144247 - DNA, 25 bp, SARS Virus
actagacgtactcaacgacatcttt

SEQ ID NO: 144248 - DNA, 25 bp, SARS Virus
ctagacgtacttcacgacatctttg

SEQ ID NO: 144249 - DNA, 25 bp, SARS Virus
tagacgtacttaccgacatctttgt

SEQ ID NO: 144250 - DNA, 25 bp, SARS Virus
agacgtacttaacgacatctttgta

SEQ ID NO: 144251 - DNA, 25 bp, SARS Virus
gacgtacttaaccacatctttgtag

SEQ ID NO: 144252 - DNA, 25 bp, SARS Virus
acgtacttaacgccatctttgtagt

SEQ ID NO: 144253 - DNA, 25 bp, SARS Virus
cgtacttaacgacatctttgtagtc

SEQ ID NO: 144254 - DNA, 25 bp, SARS Virus
gtacttaacgacctctttgtagtca

SEQ ID NO: 144255 - DNA, 25 bp, SARS Virus
tacttaacgacacctttgtagtcac

SEQ ID NO: 144256 - DNA, 25 bp, SARS Virus
acttaacgacatctttgtagtcacg

SEQ ID NO: 144257 - DNA, 25 bp, SARS Virus
cttaacgacatccttgtagtcacgt

SEQ ID NO: 144258 - DNA, 25 bp, SARS Virus
ttaacgacatctctgtagtcacgtc

SEQ ID NO: 144259 - DNA, 25 bp, SARS Virus
taacgacatcttcgtagtcacgtca

SEQ ID NO: 144260 - DNA, 25 bp, SARS Virus
aacgacatctttctagtcacgtcaa

SEQ ID NO: 144261 - DNA, 25 bp, SARS Virus
acgacatctttgcagtcacgtcaat

SEQ ID NO: 144262 - DNA, 25 bp, SARS Virus
cgacatctttgtcgtcacgtcaatt

SEQ ID NO: 144263 - DNA, 25 bp, SARS Virus
gacatctttgtactcacgtcaattg

SEQ ID NO: 144264 - DNA, 25 bp, SARS Virus
acatctttgtagccacgtcaattgt

SEQ ID NO: 144265 - DNA, 25 bp, SARS Virus
catctttgtagtcacgtcaattgta

SEQ ID NO: 144266 - DNA, 25 bp, SARS Virus
atctttgtagtcccgtcaattgtag

SEQ ID NO: 144267 - DNA, 25 bp, SARS Virus
tctttgtagtcacgtcaattgtaga

SEQ ID NO: 144268 - DNA, 25 bp, SARS Virus
ctttgtagtcacctcaattgtagaa

SEQ ID NO: 144269 - DNA, 25 bp, SARS Virus
tttgtagtcacgccaattgtagaac

SEQ ID NO: 144270 - DNA, 25 bp, SARS Virus
ttgtagtcacgtcaattgtagaact

SEQ ID NO: 144271 - DNA, 25 bp, SARS Virus
tgtagtcacgtccattgtagaacta

SEQ ID NO: 144272 - DNA, 25 bp, SARS Virus
gtagtcacgtcacttgtagaactat

SEQ ID NO: 144273 - DNA, 25 bp, SARS Virus
tagtcacgtcaactgtagaactata

SEQ ID NO: 144274 - DNA, 25 bp, SARS Virus
agtcacgtcaatcgtagaactatat

SEQ ID NO: 144275 - DNA, 25 bp, SARS Virus
gtcacgtcaattctagaactatatc

SEQ ID NO: 144276 - DNA, 25 bp, SARS Virus
tcacgtcaattgcagaactatatct

SEQ ID NO: 144277 - DNA, 25 bp, SARS Virus
cacgtcaattgtcgaactatatctt

SEQ ID NO: 144278 - DNA, 25 bp, SARS Virus
acgtcaattgtacaactatatcttg

SEQ ID NO: 144279 - DNA, 25 bp, SARS Virus
cgtcaattgtagcactatatcttgt

SEQ ID NO: 144280 - DNA, 25 bp, SARS Virus
gtcaattgtagacctatatcttgtc

SEQ ID NO: 144281 - DNA, 25 bp, SARS Virus
tcaattgtagaactatatcttgtcg

SEQ ID NO: 144282 - DNA, 25 bp, SARS Virus
caattgtagaaccatatcttgtcgt

SEQ ID NO: 144283 - DNA, 25 bp, SARS Virus
aattgtagaactctatcttgtcgtt

SEQ ID NO: 144284 - DNA, 25 bp, SARS Virus
attgtagaactacatcttgtcgttg

SEQ ID NO: 144285 - DNA, 25 bp, SARS Virus
ttgtagaactatctcttgtcgttga

SEQ ID NO: 144286 - DNA, 25 bp, SARS Virus
tgtagaactataccttgtcgttgaa

SEQ ID NO: 144287 - DNA, 25 bp, SARS Virus
gtagaactatatcttgtcgttgaag

SEQ ID NO: 144288 - DNA, 25 bp, SARS Virus
tagaactatatcctgtcgttgaagt

SEQ ID NO: 144289 - DNA, 25 bp, SARS Virus
agaactatatctcgtcgttgaagtc

SEQ ID NO: 144290 - DNA, 25 bp, SARS Virus
gaactatatcttctcgttgaagtct

SEQ ID NO: 144291 - DNA, 25 bp, SARS Virus
aactatatcttgccgttgaagtcta

SEQ ID NO: 144292 - DNA, 25 bp, SARS Virus
actatatcttgtcgttgaagtctac

SEQ ID NO: 144293 - DNA, 25 bp, SARS Virus
ctatatcttgtccttgaagtctact

SEQ ID NO: 144294 - DNA, 25 bp, SARS Virus
tatatcttgtcgctgaagtctactt

SEQ ID NO: 144295 - DNA, 25 bp, SARS Virus
atatcttgtcgtcgaagtctacttc

SEQ ID NO: 144296 - DNA, 25 bp, SARS Virus
tatcttgtcgttcaagtctacttcg

SEQ ID NO: 144297 - DNA, 25 bp, SARS Virus
atcttgtcgttgcagtctacttcgt

SEQ ID NO: 144298 - DNA, 25 bp, SARS Virus
tcttgtcgttgacgtctacttcgta

SEQ ID NO: 144299 - DNA, 25 bp, SARS Virus
cttgtcgttgaactctacttcgtaa

SEQ ID NO: 144300 - DNA, 25 bp, SARS Virus
ttgtcgttgaagcctacttcgtaaa

SEQ ID NO: 144301 - DNA, 25 bp, SARS Virus
tgtcgttgaagtctacttcgtaaac

SEQ ID NO: 144302 - DNA, 25 bp, SARS Virus
gtcgttgaagtccacttcgtaaaca

SEQ ID NO: 144303 - DNA, 25 bp, SARS Virus
tcgttgaagtctccttcgtaaacaa

SEQ ID NO: 144304 - DNA, 25 bp, SARS Virus
cgttgaagtctacttcgtaaacaag

SEQ ID NO: 144305 - DNA, 25 bp, SARS Virus
gttgaagtctacctcgtaaacaagg

SEQ ID NO: 144306 - DNA, 25 bp, SARS Virus
ttgaagtctactccgtaaacaaggt

SEQ ID NO: 144307 - DNA, 25 bp, SARS Virus
tgaagtctacttcgtaaacaaggtc

SEQ ID NO: 144308 - DNA, 25 bp, SARS Virus
gaagtctacttcctaaacaaggtcc

SEQ ID NO: 144309 - DNA, 25 bp, SARS Virus
aagtctacttcgcaaacaaggtcca

SEQ ID NO: 144310 - DNA, 25 bp, SARS Virus
agtctacttcgtcaacaaggtccac

SEQ ID NO: 144311 - DNA, 25 bp, SARS Virus
gtctacttcgtacacaaggtccaca

SEQ ID NO: 144312 - DNA, 25 bp, SARS Virus
tctacttcgtaaccaaggtccacat

SEQ ID NO: 144313 - DNA, 25 bp, SARS Virus
ctacttcgtaaacaaggtccacatt

SEQ ID NO: 144314 - DNA, 25 bp, SARS Virus
tacttcgtaaaccaggtccacatta

SEQ ID NO: 144315 - DNA, 25 bp, SARS Virus
acttcgtaaacacggtccacattaa

SEQ ID NO: 144316 - DNA, 25 bp, SARS Virus
cttcgtaaacaacgtccacattaat

SEQ ID NO: 144317 - DNA, 25 bp, SARS Virus
ttcgtaaacaagctccacattaatg

SEQ ID NO: 144318 - DNA, 25 bp, SARS Virus
tcgtaaacaaggcccacattaatgt

SEQ ID NO: 144319 - DNA, 25 bp, SARS Virus
cgtaaacaaggtccacattaatgtg

SEQ ID NO: 144320 - DNA, 25 bp, SARS Virus
gtaaacaaggtccacattaatgtga

SEQ ID NO: 144321 - DNA, 25 bp, SARS Virus
taaacaaggtccccattaatgtgaa

SEQ ID NO: 144322 - DNA, 25 bp, SARS Virus
aaacaaggtccacattaatgtgaat

SEQ ID NO: 144323 - DNA, 25 bp, SARS Virus
aacaaggtccaccttaatgtgaatg

SEQ ID NO: 144324 - DNA, 25 bp, SARS Virus
acaaggtccacactaatgtgaatgt

SEQ ID NO: 144325 - DNA, 25 bp, SARS Virus
caaggtccacatcaatgtgaatgtg

SEQ ID NO: 144326 - DNA, 25 bp, SARS Virus
aaggtccacattcatgtgaatgtgg

SEQ ID NO: 144327 - DNA, 25 bp, SARS Virus
aggtccacattactgtgaatgtggg

SEQ ID NO: 144328 - DNA, 25 bp, SARS Virus
ggtccacattaacgtgaatgtgggg

SEQ ID NO: 144329 - DNA, 25 bp, SARS Virus
gtccacattaatctgaatgtggggg

SEQ ID NO: 144330 - DNA, 25 bp, SARS Virus
tccacattaatgcgaatgtgggggt

SEQ ID NO: 144331 - DNA, 25 bp, SARS Virus
ccacattaatgtcaatgtgggggtt

SEQ ID NO: 144332 - DNA, 25 bp, SARS Virus
cacattaatgtgcatgtgggggttt

SEQ ID NO: 144333 - DNA, 25 bp, SARS Virus
acattaatgtgactgtgggggtttt

SEQ ID NO: 144334 - DNA, 25 bp, SARS Virus
cattaatgtgaacgtgggggttttc

SEQ ID NO: 144335 - DNA, 25 bp, SARS Virus
attaatgtgaatctgggggttttcg

SEQ ID NO: 144336 - DNA, 25 bp, SARS Virus
ttaatgtgaatgcgggggttttcgc

SEQ ID NO: 144337 - DNA, 25 bp, SARS Virus
taatgtgaatgtcggggttttcgcg

SEQ ID NO: 144338 - DNA, 25 bp, SARS Virus
aatgtgaatgtgcgggttttcgcgt

SEQ ID NO: 144339 - DNA, 25 bp, SARS Virus
atgtgaatgtggcggttttcgcgtt

SEQ ID NO: 144340 - DNA, 25 bp, SARS Virus
tgtgaatgtgggcgttttcgcgttc

SEQ ID NO: 144341 - DNA, 25 bp, SARS Virus
gtgaatgtggggcttttcgcgttcc

SEQ ID NO: 144342 - DNA, 25 bp, SARS Virus
tgaatgtgggggctttcgcgttcca

SEQ ID NO: 144343 - DNA, 25 bp, SARS Virus
gaatgtgggggtcttcgcgttccac

SEQ ID NO: 144344 - DNA, 25 bp, SARS Virus
aatgtgggggttctcgcgttccact

SEQ ID NO: 144345 - DNA, 25 bp, SARS Virus
atgtgggggtttccgcgttccactt

SEQ ID NO: 144346 - DNA, 25 bp, SARS Virus
tgtgggggttttcgcgttccacttt

SEQ ID NO: 144347 - DNA, 25 bp, SARS Virus
gtgggggttttcccgttccacttta

SEQ ID NO: 144348 - DNA, 25 bp, SARS Virus
tgggggttttcgcgttccactttac

SEQ ID NO: 144349 - DNA, 25 bp, SARS Virus
gggggttttcgccttccactttaca

SEQ ID NO: 144350 - DNA, 25 bp, SARS Virus
ggggttttcgcgctccactttacag

SEQ ID NO: 144351 - DNA, 25 bp, SARS Virus
gggttttcgcgtcccactttacaga

SEQ ID NO: 144352 - DNA, 25 bp, SARS Virus
ggttttcgcgttccactttacagat

SEQ ID NO: 144353 - DNA, 25 bp, SARS Virus
gttttcgcgttccactttacagatt

SEQ ID NO: 144354 - DNA, 25 bp, SARS Virus
ttttcgcgttcccctttacagatta

SEQ ID NO: 144355 - DNA, 25 bp, SARS Virus
tttcgcgttccactttacagattat

SEQ ID NO: 144356 - DNA, 25 bp, SARS Virus
ttcgcgttccaccttacagattata

SEQ ID NO: 144357 - DNA, 25 bp, SARS Virus
tcgcgttccactctacagattataa

SEQ ID NO: 144358 - DNA, 25 bp, SARS Virus
cgcgttccacttcacagattataaa

SEQ ID NO: 144359 - DNA, 25 bp, SARS Virus
gcgttccactttccagattataaag

SEQ ID NO: 144360 - DNA, 25 bp, SARS Virus
cgttccactttacagattataaagt

SEQ ID NO: 144361 - DNA, 25 bp, SARS Virus
gttccactttaccgattataaagtc

SEQ ID NO: 144362 - DNA, 25 bp, SARS Virus
ttccactttacacattataaagtct

SEQ ID NO: 144363 - DNA, 25 bp, SARS Virus
tccactttacagcttataaagtcta

SEQ ID NO: 144364 - DNA, 25 bp, SARS Virus
ccactttacagactataaagtctac

SEQ ID NO: 144365 - DNA, 25 bp, SARS Virus
cactttacagatcataaagtctaca

SEQ ID NO: 144366 - DNA, 25 bp, SARS Virus
actttacagattctaaagtctacaa

SEQ ID NO: 144367 - DNA, 25 bp, SARS Virus
ctttacagattacaaagtctacaaa

SEQ ID NO: 144368 - DNA, 25 bp, SARS Virus
tttacagattatcaagtctacaaaa

SEQ ID NO: 144369 - DNA, 25 bp, SARS Virus
ttacagattatacagtctacaaaat

SEQ ID NO: 144370 - DNA, 25 bp, SARS Virus
tacagattataacgtctacaaaatc

SEQ ID NO: 144371 - DNA, 25 bp, SARS Virus
acagattataaactctacaaaatcc

SEQ ID NO: 144372 - DNA, 25 bp, SARS Virus
cagattataaagcctacaaaatcct

SEQ ID NO: 144373 - DNA, 25 bp, SARS Virus
agattataaagtctacaaaatccta

SEQ ID NO: 144374 - DNA, 25 bp, SARS Virus
gattataaagtccacaaaatcctag

SEQ ID NO: 144375 - DNA, 25 bp, SARS Virus
attataaagtctccaaaatcctaga

SEQ ID NO: 144376 - DNA, 25 bp, SARS Virus
ttataaagtctacaaaatcctagag

SEQ ID NO: 144377 - DNA, 25 bp, SARS Virus
tataaagtctaccaaatcctagagc

SEQ ID NO: 144378 - DNA, 25 bp, SARS Virus
ataaagtctacacaatcctagagct

SEQ ID NO: 144379 - DNA, 25 bp, SARS Virus
taaagtctacaacatcctagagctt

SEQ ID NO: 144380 - DNA, 25 bp, SARS Virus
aaagtctacaaactcctagagcttg

SEQ ID NO: 144381 - DNA, 25 bp, SARS Virus
aagtctacaaaaccctagagcttgc

SEQ ID NO: 144382 - DNA, 25 bp, SARS Virus
agtctacaaaatcctagagcttgcc

SEQ ID NO: 144383 - DNA, 25 bp, SARS Virus
gtctacaaaatcctagagcttgcct

SEQ ID NO: 144384 - DNA, 25 bp, SARS Virus
tctacaaaatcccagagcttgcctt

SEQ ID NO: 144385 - DNA, 25 bp, SARS Virus
ctacaaaatcctcgagcttgcctta

SEQ ID NO: 144386 - DNA, 25 bp, SARS Virus
tacaaaatcctacagcttgccttag

SEQ ID NO: 144387 - DNA, 25 bp, SARS Virus
acaaaatcctagcgcttgccttagt

SEQ ID NO: 144388 - DNA, 25 bp, SARS Virus
caaaatcctagaccttgccttagtc

SEQ ID NO: 144389 - DNA, 25 bp, SARS Virus
aaaatcctagagcttgccttagtca

SEQ ID NO: 144390 - DNA, 25 bp, SARS Virus
aaatcctagagcctgccttagtcac

SEQ ID NO: 144391 - DNA, 25 bp, SARS Virus
aatcctagagctcgccttagtcact

SEQ ID NO: 144392 - DNA, 25 bp, SARS Virus
atcctagagcttcccttagtcactt

SEQ ID NO: 144393 - DNA, 25 bp, SARS Virus
tcctagagcttgccttagtcacttt

SEQ ID NO: 144394 - DNA, 25 bp, SARS Virus
cctagagcttgccttagtcacttta

SEQ ID NO: 144395 - DNA, 25 bp, SARS Virus
ctagagcttgccctagtcactttag

SEQ ID NO: 144396 - DNA, 25 bp, SARS Virus
tagagcttgcctcagtcactttagt

SEQ ID NO: 144397 - DNA, 25 bp, SARS Virus
agagcttgccttcgtcactttagtc

SEQ ID NO: 144398 - DNA, 25 bp, SARS Virus
gagcttgccttactcactttagtct

SEQ ID NO: 144399 - DNA, 25 bp, SARS Virus
agcttgccttagccactttagtctt

SEQ ID NO: 144400 - DNA, 25 bp, SARS Virus
gcttgccttagtcactttagtcttt

SEQ ID NO: 144401 - DNA, 25 bp, SARS Virus
cttgccttagtccctttagtctttg

SEQ ID NO: 144402 - DNA, 25 bp, SARS Virus
ttgccttagtcactttagtctttgt

SEQ ID NO: 144403 - DNA, 25 bp, SARS Virus
tgccttagtcaccttagtctttgta

SEQ ID NO: 144404 - DNA, 25 bp, SARS Virus
gccttagtcactctagtctttgtag

SEQ ID NO: 144405 - DNA, 25 bp, SARS Virus
ccttagtcacttcagtctttgtagt

SEQ ID NO: 144406 - DNA, 25 bp, SARS Virus
cttagtcactttcgtctttgtagtg

SEQ ID NO: 144407 - DNA, 25 bp, SARS Virus
ttagtcactttactctttgtagtgc

SEQ ID NO: 144408 - DNA, 25 bp, SARS Virus
tagtcactttagcctttgtagtgcc

SEQ ID NO: 144409 - DNA, 25 bp, SARS Virus
agtcactttagtctttgtagtgccg

SEQ ID NO: 144410 - DNA, 25 bp, SARS Virus
gtcactttagtccttgtagtgccgg

SEQ ID NO: 144411 - DNA, 25 bp, SARS Virus
tcactttagtctctgtagtgccggt

SEQ ID NO: 144412 - DNA, 25 bp, SARS Virus
cactttagtcttcgtagtgccggtt

SEQ ID NO: 144413 - DNA, 25 bp, SARS Virus
actttagtctttctagtgccggttt

SEQ ID NO: 144414 - DNA, 25 bp, SARS Virus
ctttagtctttgcagtgccggttta

SEQ ID NO: 144415 - DNA, 25 bp, SARS Virus
tttagtctttgtcgtgccggtttaa

SEQ ID NO: 144416 - DNA, 25 bp, SARS Virus
ttagtctttgtactgccggtttaac

SEQ ID NO: 144417 - DNA, 25 bp, SARS Virus
tagtctttgtagcgccggtttaaca

SEQ ID NO: 144418 - DNA, 25 bp, SARS Virus
agtctttgtagtcccggtttaacaa

SEQ ID NO: 144419 - DNA, 25 bp, SARS Virus
gtctttgtagtgccggtttaacaac

SEQ ID NO: 144420 - DNA, 25 bp, SARS Virus
tctttgtagtgccggtttaacaact

SEQ ID NO: 144421 - DNA, 25 bp, SARS Virus
ctttgtagtgcccgtttaacaactt

SEQ ID NO: 144422 - DNA, 25 bp, SARS Virus
tttgtagtgccgctttaacaacttt

SEQ ID NO: 144423 - DNA, 25 bp, SARS Virus
ttgtagtgccggcttaacaacttta

SEQ ID NO: 144424 - DNA, 25 bp, SARS Virus
tgtagtgccggtctaacaactttac

SEQ ID NO: 144425 - DNA, 25 bp, SARS Virus
gtagtgccggttcaacaactttacc

SEQ ID NO: 144426 - DNA, 25 bp, SARS Virus
tagtgccggtttcacaactttacca

SEQ ID NO: 144427 - DNA, 25 bp, SARS Virus
agtgccggtttaccaactttaccaa

SEQ ID NO: 144428 - DNA, 25 bp, SARS Virus
gtgccggtttaacaactttaccaac

SEQ ID NO: 144429 - DNA, 25 bp, SARS Virus
tgccggtttaaccactttaccaact

SEQ ID NO: 144430 - DNA, 25 bp, SARS Virus
gccggtttaacacctttaccaactt

SEQ ID NO: 144431 - DNA, 25 bp, SARS Virus
ccggtttaacaactttaccaacttt

SEQ ID NO: 144432 - DNA, 25 bp, SARS Virus
cggtttaacaaccttaccaacttta

SEQ ID NO: 144433 - DNA, 25 bp, SARS Virus
ggtttaacaactctaccaactttag

SEQ ID NO: 144434 - DNA, 25 bp, SARS Virus
gtttaacaacttcaccaactttaga

SEQ ID NO: 144435 - DNA, 25 bp, SARS Virus
tttaacaactttcccaactttagag

SEQ ID NO: 144436 - DNA, 25 bp, SARS Virus
ttaacaactttaccaactttagaga

SEQ ID NO: 144437 - DNA, 25 bp, SARS Virus
taacaactttaccaactttagagaa

SEQ ID NO: 144438 - DNA, 25 bp, SARS Virus
aacaactttacccactttagagaaa

SEQ ID NO: 144439 - DNA, 25 bp, SARS Virus
acaactttaccacctttagagaaac

SEQ ID NO: 144440 - DNA, 25 bp, SARS Virus
caactttaccaactttagagaaact

SEQ ID NO: 144441 - DNA, 25 bp, SARS Virus
aactttaccaaccttagagaaactt

SEQ ID NO: 144442 - DNA, 25 bp, SARS Virus
actttaccaactctagagaaacttc

SEQ ID NO: 144443 - DNA, 25 bp, SARS Virus
ctttaccaacttcagagaaacttct

SEQ ID NO: 144444 - DNA, 25 bp, SARS Virus
tttaccaactttcgagaaacttctt

SEQ ID NO: 144445 - DNA, 25 bp, SARS Virus
ttaccaactttacagaaacttcttc

SEQ ID NO: 144446 - DNA, 25 bp, SARS Virus
taccaactttagcgaaacttcttcc

SEQ ID NO: 144447 - DNA, 25 bp, SARS Virus
accaactttagacaaacttcttcct

SEQ ID NO: 144448 - DNA, 25 bp, SARS Virus
ccaactttagagcaacttcttcctc

SEQ ID NO: 144449 - DNA, 25 bp, SARS Virus
caactttagagacacttcttcctca

SEQ ID NO: 144450 - DNA, 25 bp, SARS Virus
aactttagagaaccttcttcctcaa

SEQ ID NO: 144451 - DNA, 25 bp, SARS Virus
actttagagaaacttcttcctcaat

SEQ ID NO: 144452 - DNA, 25 bp, SARS Virus
ctttagagaaacctcttcctcaatt

SEQ ID NO: 144453 - DNA, 25 bp, SARS Virus
tttagagaaactccttcctcaattg

SEQ ID NO: 144454 - DNA, 25 bp, SARS Virus
ttagagaaacttcttcctcaattgt

SEQ ID NO: 144455 - DNA, 25 bp, SARS Virus
tagagaaacttcctcctcaattgtg

SEQ ID NO: 144456 - DNA, 25 bp, SARS Virus
agagaaacttctccctcaattgtgt

SEQ ID NO: 144457 - DNA, 25 bp, SARS Virus
gagaaacttcttcctcaattgtgtg

SEQ ID NO: 144458 - DNA, 25 bp, SARS Virus
agaaacttcttcctcaattgtgtgg

SEQ ID NO: 144459 - DNA, 25 bp, SARS Virus
gaaacttcttccccaattgtgtggt

SEQ ID NO: 144460 - DNA, 25 bp, SARS Virus
aaacttcttcctcaattgtgtggtc

SEQ ID NO: 144461 - DNA, 25 bp, SARS Virus
aacttcttcctccattgtgtggtca

SEQ ID NO: 144462 - DNA, 25 bp, SARS Virus
acttcttcctcacttgtgtggtcat

SEQ ID NO: 144463 - DNA, 25 bp, SARS Virus
cttcttcctcaactgtgtggtcatg

SEQ ID NO: 144464 - DNA, 25 bp, SARS Virus
ttcttcctcaatcgtgtggtcatgg

SEQ ID NO: 144465 - DNA, 25 bp, SARS Virus
tcttcctcaattctgtggtcatggt

SEQ ID NO: 144466 - DNA, 25 bp, SARS Virus
cttcctcaattgcgtggtcatggtc

SEQ ID NO: 144467 - DNA, 25 bp, SARS Virus
ttcctcaattgtctggtcatggtca

SEQ ID NO: 144468 - DNA, 25 bp, SARS Virus
tcctcaattgtgcggtcatggtcac

SEQ ID NO: 144469 - DNA, 25 bp, SARS Virus
cctcaattgtgtcgtcatggtcact

SEQ ID NO: 144470 - DNA, 25 bp, SARS Virus
ctcaattgtgtgctcatggtcactc

SEQ ID NO: 144471 - DNA, 25 bp, SARS Virus
tcaattgtgtggccatggtcactca

SEQ ID NO: 144472 - DNA, 25 bp, SARS Virus
caattgtgtggtcatggtcactcag

SEQ ID NO: 144473 - DNA, 25 bp, SARS Virus
aattgtgtggtcctggtcactcagg

SEQ ID NO: 144474 - DNA, 25 bp, SARS Virus
attgtgtggtcacggtcactcaggt

SEQ ID NO: 144475 - DNA, 25 bp, SARS Virus
ttgtgtggtcatcgtcactcaggta

SEQ ID NO: 144476 - DNA, 25 bp, SARS Virus
tgtgtggtcatgctcactcaggtaa

SEQ ID NO: 144477 - DNA, 25 bp, SARS Virus
gtgtggtcatggccactcaggtaat

SEQ ID NO: 144478 - DNA, 25 bp, SARS Virus
tgtggtcatggtcactcaggtaatt

SEQ ID NO: 144479 - DNA, 25 bp, SARS Virus
gtggtcatggtccctcaggtaattt

SEQ ID NO: 144480 - DNA, 25 bp, SARS Virus
tggtcatggtcactcaggtaatttt

SEQ ID NO: 144481 - DNA, 25 bp, SARS Virus
atcatccatatcgttaccacaataa

SEQ ID NO: 144482 - DNA, 25 bp, SARS Virus
tcatccatatcggtaccacaataat

SEQ ID NO: 144483 - DNA, 25 bp, SARS Virus
catccatatcgtgaccacaataatc

SEQ ID NO: 144484 - DNA, 25 bp, SARS Virus
atccatatcgttgccacaataatct

SEQ ID NO: 144485 - DNA, 25 bp, SARS Virus
tccatatcgttagcacaataatctc

SEQ ID NO: 144486 - DNA, 25 bp, SARS Virus
ccatatcgttacgacaataatctca

SEQ ID NO: 144487 - DNA, 25 bp, SARS Virus
catatcgttaccgcaataatctcat

SEQ ID NO: 144488 - DNA, 25 bp, SARS Virus
atatcgttaccagaataatctcatt

SEQ ID NO: 144489 - DNA, 25 bp, SARS Virus
tatcgttaccacgataatctcattc

SEQ ID NO: 144490 - DNA, 25 bp, SARS Virus
atcgttaccacagtaatctcattcg

SEQ ID NO: 144491 - DNA, 25 bp, SARS Virus
tcgttaccacaagaatctcattcgt

SEQ ID NO: 144492 - DNA, 25 bp, SARS Virus
cgttaccacaatgatctcattcgtt

SEQ ID NO: 144493 - DNA, 25 bp, SARS Virus
gttaccacaatagtctcattcgtta

SEQ ID NO: 144494 - DNA, 25 bp, SARS Virus
ttaccacaataagctcattcgttaa

SEQ ID NO: 144495 - DNA, 25 bp, SARS Virus
taccacaataatgtcattcgttaac

SEQ ID NO: 144496 - DNA, 25 bp, SARS Virus
accacaataatcgcattcgttaact

SEQ ID NO: 144497 - DNA, 25 bp, SARS Virus
ccacaataatctgattcgttaactt

SEQ ID NO: 144498 - DNA, 25 bp, SARS Virus
cacaataatctcgttcgttaacttg

SEQ ID NO: 144499 - DNA, 25 bp, SARS Virus
acaataatctcagtcgttaacttga

SEQ ID NO: 144500 - DNA, 25 bp, SARS Virus
caataatctcatgcgttaacttgat

SEQ ID NO: 144501 - DNA, 25 bp, SARS Virus
aataatctcattggttaacttgata

SEQ ID NO: 144502 - DNA, 25 bp, SARS Virus
ataatctcattcgttaacttgatag

SEQ ID NO: 144503 - DNA, 25 bp, SARS Virus
taatctcattcggtaacttgatagt

SEQ ID NO: 144504 - DNA, 25 bp, SARS Virus
aatctcattcgtgaacttgatagtc

SEQ ID NO: 144505 - DNA, 25 bp, SARS Virus
atctcattcgttgacttgatagtcg

SEQ ID NO: 144506 - DNA, 25 bp, SARS Virus
tctcattcgttagcttgatagtcgt

SEQ ID NO: 144507 - DNA, 25 bp, SARS Virus
ctcattcgttaagttgatagtcgtg

SEQ ID NO: 144508 - DNA, 25 bp, SARS Virus
tcattcgttaacgtgatagtcgtgg

SEQ ID NO: 144509 - DNA, 25 bp, SARS Virus
cattcgttaactggatagtcgtgga

SEQ ID NO: 144510 - DNA, 25 bp, SARS Virus
attcgttaacttgatagtcgtggat

SEQ ID NO: 144511 - DNA, 25 bp, SARS Virus
ttcgttaacttggtagtcgtggatt

SEQ ID NO: 144512 - DNA, 25 bp, SARS Virus
tcgttaacttgagagtcgtggattt

SEQ ID NO: 144513 - DNA, 25 bp, SARS Virus
cgttaacttgatggtcgtggatttc

SEQ ID NO: 144514 - DNA, 25 bp, SARS Virus
gttaacttgatagtcgtggatttct

SEQ ID NO: 144515 - DNA, 25 bp, SARS Virus
ttaacttgataggcgtggatttctg

SEQ ID NO: 144516 - DNA, 25 bp, SARS Virus
taacttgatagtggtggatttctgt

SEQ ID NO: 144517 - DNA, 25 bp, SARS Virus
aacttgatagtcgtggatttctgta

SEQ ID NO: 144518 - DNA, 25 bp, SARS Virus
acttgatagtcggggatttctgtat

SEQ ID NO: 144519 - DNA, 25 bp, SARS Virus
cttgatagtcgtggatttctgtatc

SEQ ID NO: 144520 - DNA, 25 bp, SARS Virus
ttgatagtcgtggatttctgtatca

SEQ ID NO: 144521 - DNA, 25 bp, SARS Virus
tgatagtcgtgggtttctgtatcat

SEQ ID NO: 144522 - DNA, 25 bp, SARS Virus
gatagtcgtggagttctgtatcata

SEQ ID NO: 144523 - DNA, 25 bp, SARS Virus
atagtcgtggatgtctgtatcatat

SEQ ID NO: 144524 - DNA, 25 bp, SARS Virus
tagtcgtggattgctgtatcatatt

SEQ ID NO: 144525 - DNA, 25 bp, SARS Virus
agtcgtggatttgtgtatcatattc

SEQ ID NO: 144526 - DNA, 25 bp, SARS Virus
gtcgtggatttcggtatcatattcg

SEQ ID NO: 144527 - DNA, 25 bp, SARS Virus
tcgtggatttctgtatcatattcgg

SEQ ID NO: 144528 - DNA, 25 bp, SARS Virus
cgtggatttctggatcatattcggt

SEQ ID NO: 144529 - DNA, 25 bp, SARS Virus
gtggatttctgtgtcatattcggtg

SEQ ID NO: 144530 - DNA, 25 bp, SARS Virus
tggatttctgtagcatattcggtgt

SEQ ID NO: 144531 - DNA, 25 bp, SARS Virus
ggatttctgtatgatattcggtgtt

SEQ ID NO: 144532 - DNA, 25 bp, SARS Virus
gatttctgtatcgtattcggtgtta

SEQ ID NO: 144533 - DNA, 25 bp, SARS Virus
atttctgtatcagattcggtgttat

SEQ ID NO: 144534 - DNA, 25 bp, SARS Virus
tttctgtatcatgttcggtgttatc

SEQ ID NO: 144535 - DNA, 25 bp, SARS Virus
ttctgtatcatagtcggtgttatct

SEQ ID NO: 144536 - DNA, 25 bp, SARS Virus
tctgtatcatatgcggtgttatcta

SEQ ID NO: 144537 - DNA, 25 bp, SARS Virus
ctgtatcatattgggtgttatctaa

SEQ ID NO: 144538 - DNA, 25 bp, SARS Virus
tgtatcatattcggtgttatctaaa

SEQ ID NO: 144539 - DNA, 25 bp, SARS Virus
gtatcatattcggtgttatctaaaa

SEQ ID NO: 144540 - DNA, 25 bp, SARS Virus
tatcatattcggggttatctaaaaa

SEQ ID NO: 144541 - DNA, 25 bp, SARS Virus
atcatattcggtgttatctaaaaac

SEQ ID NO: 144542 - DNA, 25 bp, SARS Virus
tcatattcggtggtatctaaaaacc

SEQ ID NO: 144543 - DNA, 25 bp, SARS Virus
catattcggtgtgatctaaaaaccg

SEQ ID NO: 144544 - DNA, 25 bp, SARS Virus
atattcggtgttgtctaaaaaccga

SEQ ID NO: 144545 - DNA, 25 bp, SARS Virus
tattcggtgttagctaaaaaccgat

SEQ ID NO: 144546 - DNA, 25 bp, SARS Virus
attcggtgttatgtaaaaaccgatc

SEQ ID NO: 144547 - DNA, 25 bp, SARS Virus
ttcggtgttatcgaaaaaccgatca

SEQ ID NO: 144548 - DNA, 25 bp, SARS Virus
tcggtgttatctgaaaaccgatcat

SEQ ID NO: 144549 - DNA, 25 bp, SARS Virus
cggtgttatctagaaaccgatcatg

SEQ ID NO: 144550 - DNA, 25 bp, SARS Virus
ggtgttatctaagaaccgatcatga

SEQ ID NO: 144551 - DNA, 25 bp, SARS Virus
gtgttatctaaagaccgatcatgat

SEQ ID NO: 144552 - DNA, 25 bp, SARS Virus
tgttatctaaaagccgatcatgatg

SEQ ID NO: 144553 - DNA, 25 bp, SARS Virus
gttatctaaaaagcgatcatgatgc

SEQ ID NO: 144554 - DNA, 25 bp, SARS Virus
ttatctaaaaacggatcatgatgca

SEQ ID NO: 144555 - DNA, 25 bp, SARS Virus
tatctaaaaaccgatcatgatgcat

SEQ ID NO: 144556 - DNA, 25 bp, SARS Virus
atctaaaaaccggtcatgatgcatt

SEQ ID NO: 144557 - DNA, 25 bp, SARS Virus
tctaaaaaccgagcatgatgcatta

SEQ ID NO: 144558 - DNA, 25 bp, SARS Virus
ctaaaaaccgatgatgatgcattat

SEQ ID NO: 144559 - DNA, 25 bp, SARS Virus
taaaaaccgatcgtgatgcattatt

SEQ ID NO: 144560 - DNA, 25 bp, SARS Virus
aaaaaccgatcaggatgcattattt

SEQ ID NO: 144561 - DNA, 25 bp, SARS Virus
aaaaccgatcatgatgcattatttc

SEQ ID NO: 144562 - DNA, 25 bp, SARS Virus
aaaccgatcatggtgcattatttct

SEQ ID NO: 144563 - DNA, 25 bp, SARS Virus
aaccgatcatgaggcattatttctt

SEQ ID NO: 144564 - DNA, 25 bp, SARS Virus
accgatcatgatgcattatttcttt

SEQ ID NO: 144565 - DNA, 25 bp, SARS Virus
ccgatcatgatggattatttctttg

SEQ ID NO: 144566 - DNA, 25 bp, SARS Virus
cgatcatgatgcgttatttctttga

SEQ ID NO: 144567 - DNA, 25 bp, SARS Virus
gatcatgatgcagtatttctttgac

SEQ ID NO: 144568 - DNA, 25 bp, SARS Virus
atcatgatgcatgatttctttgaca

SEQ ID NO: 144569 - DNA, 25 bp, SARS Virus
tcatgatgcattgtttctttgacat

SEQ ID NO: 144570 - DNA, 25 bp, SARS Virus
catgatgcattagttctttgacata

SEQ ID NO: 144571 - DNA, 25 bp, SARS Virus
atgatgcattatgtctttgacatac

SEQ ID NO: 144572 - DNA, 25 bp, SARS Virus
tgatgcattattgctttgacatacc

SEQ ID NO: 144573 - DNA, 25 bp, SARS Virus
gatgcattatttgtttgacatacca

SEQ ID NO: 144574 - DNA, 25 bp, SARS Virus
atgcattatttcgttgacataccat

SEQ ID NO: 144575 - DNA, 25 bp, SARS Virus
tgcattatttctgtgacataccatt

SEQ ID NO: 144576 - DNA, 25 bp, SARS Virus
gcattatttcttggacataccattg

SEQ ID NO: 144577 - DNA, 25 bp, SARS Virus
cattatttctttgacataccattga

SEQ ID NO: 144578 - DNA, 25 bp, SARS Virus
attatttctttggcataccattgat

SEQ ID NO: 144579 - DNA, 25 bp, SARS Virus
ttatttctttgagataccattgatc

SEQ ID NO: 144580 - DNA, 25 bp, SARS Virus
tatttctttgacgtaccattgatcg

SEQ ID NO: 144581 - DNA, 25 bp, SARS Virus
atttctttgacagaccattgatcgt

SEQ ID NO: 144582 - DNA, 25 bp, SARS Virus
tttctttgacatgccattgatcgtg

SEQ ID NO: 144583 - DNA, 25 bp, SARS Virus
ttctttgacatagcattgatcgtgt

SEQ ID NO: 144584 - DNA, 25 bp, SARS Virus
tctttgacatacgattgatcgtgtt

SEQ ID NO: 144585 - DNA, 25 bp, SARS Virus
ctttgacataccgttgatcgtgttt

SEQ ID NO: 144586 - DNA, 25 bp, SARS Virus
tttgacataccagtgatcgtgttta

SEQ ID NO: 144587 - DNA, 25 bp, SARS Virus
ttgacataccatggatcgtgtttac

SEQ ID NO: 144588 - DNA, 25 bp, SARS Virus
tgacataccattgatcgtgtttacg

SEQ ID NO: 144589 - DNA, 25 bp, SARS Virus
gacataccattggtcgtgtttacgg

SEQ ID NO: 144590 - DNA, 25 bp, SARS Virus
acataccattgagcgtgtttacggt

SEQ ID NO: 144591 - DNA, 25 bp, SARS Virus
cataccattgatggtgtttacggtc

SEQ ID NO: 144592 - DNA, 25 bp, SARS Virus
ataccattgatcgtgtttacggtcg

SEQ ID NO: 144593 - DNA, 25 bp, SARS Virus
taccattgatcgggtttacggtcga

SEQ ID NO: 144594 - DNA, 25 bp, SARS Virus
accattgatcgtgtttacggtcgag

SEQ ID NO: 144595 - DNA, 25 bp, SARS Virus
ccattgatcgtggttacggtcgagg

SEQ ID NO: 144596 - DNA, 25 bp, SARS Virus
cattgatcgtgtgtacggtcgaggt

SEQ ID NO: 144597 - DNA, 25 bp, SARS Virus
attgatcgtgttgacggtcgaggtt

SEQ ID NO: 144598 - DNA, 25 bp, SARS Virus
ttgatcgtgtttgcggtcgaggtta

SEQ ID NO: 144599 - DNA, 25 bp, SARS Virus
tgatcgtgtttagggtcgaggttat

SEQ ID NO: 144600 - DNA, 25 bp, SARS Virus
gatcgtgtttacggtcgaggttatc

SEQ ID NO: 144601 - DNA, 25 bp, SARS Virus
atcgtgtttacggtcgaggttatcc

SEQ ID NO: 144602 - DNA, 25 bp, SARS Virus
tcgtgtttacgggcgaggttatcct

SEQ ID NO: 144603 - DNA, 25 bp, SARS Virus
cgtgtttacggtggaggttatcctt

SEQ ID NO: 144604 - DNA, 25 bp, SARS Virus
gtgtttacggtcgaggttatcctta

SEQ ID NO: 144605 - DNA, 25 bp, SARS Virus
tgtttacggtcggggttatccttac

SEQ ID NO: 144606 - DNA, 25 bp, SARS Virus
gtttacggtcgaggttatccttaca

SEQ ID NO: 144607 - DNA, 25 bp, SARS Virus
tttacggtcgaggttatccttacag

SEQ ID NO: 144608 - DNA, 25 bp, SARS Virus
ttacggtcgagggtatccttacagc

SEQ ID NO: 144609 - DNA, 25 bp, SARS Virus
tacggtcgaggtgatccttacagcg

SEQ ID NO: 144610 - DNA, 25 bp, SARS Virus
acggtcgaggttgtccttacagcgt

SEQ ID NO: 144611 - DNA, 25 bp, SARS Virus
cggtcgaggttagccttacagcgtg

SEQ ID NO: 144612 - DNA, 25 bp, SARS Virus
ggtcgaggttatgcttacagcgtga

SEQ ID NO: 144613 - DNA, 25 bp, SARS Virus
gtcgaggttatcgttacagcgtgag

SEQ ID NO: 144614 - DNA, 25 bp, SARS Virus
tcgaggttatccgtacagcgtgagt

SEQ ID NO: 144615 - DNA, 25 bp, SARS Virus
cgaggttatcctgacagcgtgagta

SEQ ID NO: 144616 - DNA, 25 bp, SARS Virus
gaggttatccttgcagcgtgagtat

SEQ ID NO: 144617 - DNA, 25 bp, SARS Virus
aggttatccttagagcgtgagtatt

SEQ ID NO: 144618 - DNA, 25 bp, SARS Virus
ggttatccttacggcgtgagtattc

SEQ ID NO: 144619 - DNA, 25 bp, SARS Virus
gttatccttacagcgtgagtattct

SEQ ID NO: 144620 - DNA, 25 bp, SARS Virus
ttatccttacagggtgagtattctt

SEQ ID NO: 144621 - DNA, 25 bp, SARS Virus
tatccttacagcgtgagtattcttc

SEQ ID NO: 144622 - DNA, 25 bp, SARS Virus
atccttacagcgggagtattcttca

SEQ ID NO: 144623 - DNA, 25 bp, SARS Virus
tccttacagcgtgagtattcttcac

SEQ ID NO: 144624 - DNA, 25 bp, SARS Virus
ccttacagcgtgggtattcttcaca

SEQ ID NO: 144625 - DNA, 25 bp, SARS Virus
cttacagcgtgagtattcttcacag

SEQ ID NO: 144626 - DNA, 25 bp, SARS Virus
ttacagcgtgaggattcttcacagc

SEQ ID NO: 144627 - DNA, 25 bp, SARS Virus
tacagcgtgagtgttcttcacagct

SEQ ID NO: 144628 - DNA, 25 bp, SARS Virus
acagcgtgagtagtcttcacagctg

SEQ ID NO: 144629 - DNA, 25 bp, SARS Virus
cagcgtgagtatgcttcacagctgt

SEQ ID NO: 144630 - DNA, 25 bp, SARS Virus
agcgtgagtattgttcacagctgta

SEQ ID NO: 144631 - DNA, 25 bp, SARS Virus
gcgtgagtattcgtcacagctgtac

SEQ ID NO: 144632 - DNA, 25 bp, SARS Virus
cgtgagtattctgcacagctgtacg

SEQ ID NO: 144633 - DNA, 25 bp, SARS Virus
gtgagtattcttgacagctgtacga

SEQ ID NO: 144634 - DNA, 25 bp, SARS Virus
tgagtattcttcgcagctgtacgag

SEQ ID NO: 144635 - DNA, 25 bp, SARS Virus
gagtattcttcagagctgtacgagt

SEQ ID NO: 144636 - DNA, 25 bp, SARS Virus
agtattcttcacggctgtacgagtc

SEQ ID NO: 144637 - DNA, 25 bp, SARS Virus
gtattcttcacagctgtacgagtcg

SEQ ID NO: 144638 - DNA, 25 bp, SARS Virus
tattcttcacaggtgtacgagtcga

SEQ ID NO: 144639 - DNA, 25 bp, SARS Virus
attcttcacagcggtacgagtcgag

SEQ ID NO: 144640 - DNA, 25 bp, SARS Virus
ttcttcacagctgtacgagtcgagg

SEQ ID NO: 144641 - DNA, 25 bp, SARS Virus
tcttcacagctggacgagtcgagga

SEQ ID NO: 144642 - DNA, 25 bp, SARS Virus
cttcacagctgtgcgagtcgaggat

SEQ ID NO: 144643 - DNA, 25 bp, SARS Virus
ttcacagctgtaggagtcgaggata

SEQ ID NO: 144644 - DNA, 25 bp, SARS Virus
tcacagctgtacgagtcgaggatat

SEQ ID NO: 144645 - DNA, 25 bp, SARS Virus
cacagctgtacgggtcgaggatatt

SEQ ID NO: 144646 - DNA, 25 bp, SARS Virus
acagctgtacgagtcgaggatattc

SEQ ID NO: 144647 - DNA, 25 bp, SARS Virus
cagctgtacgaggcgaggatattct

SEQ ID NO: 144648 - DNA, 25 bp, SARS Virus
agctgtacgagtggaggatattctg

SEQ ID NO: 144649 - DNA, 25 bp, SARS Virus
gctgtacgagtcgaggatattctgt

SEQ ID NO: 144650 - DNA, 25 bp, SARS Virus
ctgtacgagtcggggatattctgtc

SEQ ID NO: 144651 - DNA, 25 bp, SARS Virus
tgtacgagtcgaggatattctgtcg

SEQ ID NO: 144652 - DNA, 25 bp, SARS Virus
gtacgagtcgaggatattctgtcgg

SEQ ID NO: 144653 - DNA, 25 bp, SARS Virus
tacgagtcgagggtattctgtcgga

SEQ ID NO: 144654 - DNA, 25 bp, SARS Virus
acgagtcgaggagattctgtcggac

SEQ ID NO: 144655 - DNA, 25 bp, SARS Virus
cgagtcgaggatgttctgtcggacg

SEQ ID NO: 144656 - DNA, 25 bp, SARS Virus
gagtcgaggatagtctgtcggacga

SEQ ID NO: 144657 - DNA, 25 bp, SARS Virus
agtcgaggatatgctgtcggacgaa

SEQ ID NO: 144658 - DNA, 25 bp, SARS Virus
gtcgaggatattgtgtcggacgaac

SEQ ID NO: 144659 - DNA, 25 bp, SARS Virus
tcgaggatattcggtcggacgaact

SEQ ID NO: 144660 - DNA, 25 bp, SARS Virus
cgaggatattctgtcggacgaactc

SEQ ID NO: 144661 - DNA, 25 bp, SARS Virus
gaggatattctggcggacgaactca

SEQ ID NO: 144662 - DNA, 25 bp, SARS Virus
aggatattctgtgggacgaactcag

SEQ ID NO: 144663 - DNA, 25 bp, SARS Virus
ggatattctgtcggacgaactcaga

SEQ ID NO: 144664 - DNA, 25 bp, SARS Virus
gatattctgtcggacgaactcagac

SEQ ID NO: 144665 - DNA, 25 bp, SARS Virus
atattctgtcgggcgaactcagacc

SEQ ID NO: 144666 - DNA, 25 bp, SARS Virus
tattctgtcggaggaactcagacct

SEQ ID NO: 144667 - DNA, 25 bp, SARS Virus
attctgtcggacgaactcagacctt

SEQ ID NO: 144668 - DNA, 25 bp, SARS Virus
ttctgtcggacggactcagacctta

SEQ ID NO: 144669 - DNA, 25 bp, SARS Virus
tctgtcggacgagctcagaccttat

SEQ ID NO: 144670 - DNA, 25 bp, SARS Virus
ctgtcggacgaagtcagaccttatg

SEQ ID NO: 144671 - DNA, 25 bp, SARS Virus
tgtcggacgaacgcagaccttatgt

SEQ ID NO: 144672 - DNA, 25 bp, SARS Virus
gtcggacgaactgagaccttatgta

SEQ ID NO: 144673 - DNA, 25 bp, SARS Virus
tcggacgaactcggaccttatgtaa

SEQ ID NO: 144674 - DNA, 25 bp, SARS Virus
cggacgaactcagaccttatgtaac

SEQ ID NO: 144675 - DNA, 25 bp, SARS Virus
ggacgaactcaggccttatgtaaca

SEQ ID NO: 144676 - DNA, 25 bp, SARS Virus
gacgaactcagagcttatgtaacaa

SEQ ID NO: 144677 - DNA, 25 bp, SARS Virus
acgaactcagacgttatgtaacaaa

SEQ ID NO: 144678 - DNA, 25 bp, SARS Virus
cgaactcagaccgtatgtaacaaag

SEQ ID NO: 144679 - DNA, 25 bp, SARS Virus
gaactcagacctgatgtaacaaagg

SEQ ID NO: 144680 - DNA, 25 bp, SARS Virus
aactcagaccttgtgtaacaaaggt

SEQ ID NO: 144681 - DNA, 25 bp, SARS Virus
actcagaccttaggtaacaaaggtc

SEQ ID NO: 144682 - DNA, 25 bp, SARS Virus
ctcagaccttatgtaacaaaggtca

SEQ ID NO: 144683 - DNA, 25 bp, SARS Virus
tcagaccttatggaacaaaggtcat

SEQ ID NO: 144684 - DNA, 25 bp, SARS Virus
cagaccttatgtgacaaaggtcatc

SEQ ID NO: 144685 - DNA, 25 bp, SARS Virus
agaccttatgtagcaaaggtcatct

SEQ ID NO: 144686 - DNA, 25 bp, SARS Virus
gaccttatgtaagaaaggtcatctt

SEQ ID NO: 144687 - DNA, 25 bp, SARS Virus
accttatgtaacgaaggtcatctta

SEQ ID NO: 144688 - DNA, 25 bp, SARS Virus
ccttatgtaacagaggtcatcttat

SEQ ID NO: 144689 - DNA, 25 bp, SARS Virus
cttatgtaacaagggtcatcttata

SEQ ID NO: 144690 - DNA, 25 bp, SARS Virus
ttatgtaacaaaggtcatcttatat

SEQ ID NO: 144691 - DNA, 25 bp, SARS Virus
tatgtaacaaaggtcatcttatata

SEQ ID NO: 144692 - DNA, 25 bp, SARS Virus
atgtaacaaagggcatcttatatac

SEQ ID NO: 144693 - DNA, 25 bp, SARS Virus
tgtaacaaaggtgatcttatatacg

SEQ ID NO: 144694 - DNA, 25 bp, SARS Virus
gtaacaaaggtcgtcttatatacgc

SEQ ID NO: 144695 - DNA, 25 bp, SARS Virus
taacaaaggtcagcttatatacgcg

SEQ ID NO: 144696 - DNA, 25 bp, SARS Virus
aacaaaggtcatgttatatacgcgg

SEQ ID NO: 144697 - DNA, 25 bp, SARS Virus
acaaaggtcatcgtatatacgcggt

SEQ ID NO: 144698 - DNA, 25 bp, SARS Virus
caaaggtcatctgatatacgcggtt

SEQ ID NO: 144699 - DNA, 25 bp, SARS Virus
aaaggtcatcttgtatacgcggttc

SEQ ID NO: 144700 - DNA, 25 bp, SARS Virus
aaggtcatcttagatacgcggttcg

SEQ ID NO: 144701 - DNA, 25 bp, SARS Virus
aggtcatcttatgtacgcggttcga

SEQ ID NO: 144702 - DNA, 25 bp, SARS Virus
ggtcatcttatagacgcggttcgac

SEQ ID NO: 144703 - DNA, 25 bp, SARS Virus
gtcatcttatatgcgcggttcgacc

SEQ ID NO: 144704 - DNA, 25 bp, SARS Virus
tcatcttatataggcggttcgacca

SEQ ID NO: 144705 - DNA, 25 bp, SARS Virus
catcttatatacgcggttcgaccac

SEQ ID NO: 144706 - DNA, 25 bp, SARS Virus
atcttatatacggggttcgaccaca

SEQ ID NO: 144707 - DNA, 25 bp, SARS Virus
tcttatatacgcggttcgaccacac

SEQ ID NO: 144708 - DNA, 25 bp, SARS Virus
cttatatacgcggttcgaccacact

SEQ ID NO: 144709 - DNA, 25 bp, SARS Virus
ttatatacgcgggtcgaccacactc

SEQ ID NO: 144710 - DNA, 25 bp, SARS Virus
tatatacgcggtgcgaccacactca

SEQ ID NO: 144711 - DNA, 25 bp, SARS Virus
atatacgcggttggaccacactcaa

SEQ ID NO: 144712 - DNA, 25 bp, SARS Virus
tatacgcggttcgaccacactcaac

SEQ ID NO: 144713 - DNA, 25 bp, SARS Virus
atacgcggttcggccacactcaact

SEQ ID NO: 144714 - DNA, 25 bp, SARS Virus
tacgcggttcgagcacactcaacta

SEQ ID NO: 144715 - DNA, 25 bp, SARS Virus
acgcggttcgacgacactcaactag

SEQ ID NO: 144716 - DNA, 25 bp, SARS Virus
cgcggttcgaccgcactcaactaga

SEQ ID NO: 144717 - DNA, 25 bp, SARS Virus
gcggttcgaccagactcaactagac

SEQ ID NO: 144718 - DNA, 25 bp, SARS Virus
cggttcgaccacgctcaactagacg

SEQ ID NO: 144719 - DNA, 25 bp, SARS Virus
ggttcgaccacagtcaactagacgt

SEQ ID NO: 144720 - DNA, 25 bp, SARS Virus
gttcgaccacacgcaactagacgta

SEQ ID NO: 144721 - DNA, 25 bp, SARS Virus
ttcgaccacactgaactagacgtac

SEQ ID NO: 144722 - DNA, 25 bp, SARS Virus
tcgaccacactcgactagacgtact

SEQ ID NO: 144723 - DNA, 25 bp, SARS Virus
cgaccacactcagctagacgtactt

SEQ ID NO: 144724 - DNA, 25 bp, SARS Virus
gaccacactcaagtagacgtactta

SEQ ID NO: 144725 - DNA, 25 bp, SARS Virus
accacactcaacgagacgtacttaa

SEQ ID NO: 144726 - DNA, 25 bp, SARS Virus
ccacactcaactggacgtacttaac

SEQ ID NO: 144727 - DNA, 25 bp, SARS Virus
cacactcaactagacgtacttaacg

SEQ ID NO: 144728 - DNA, 25 bp, SARS Virus
acactcaactaggcgtacttaacga

SEQ ID NO: 144729 - DNA, 25 bp, SARS Virus
cactcaactagaggtacttaacgac

SEQ ID NO: 144730 - DNA, 25 bp, SARS Virus
actcaactagacgtacttaacgaca

SEQ ID NO: 144731 - DNA, 25 bp, SARS Virus
ctcaactagacggacttaacgacat

SEQ ID NO: 144732 - DNA, 25 bp, SARS Virus
tcaactagacgtgcttaacgacatc

SEQ ID NO: 144733 - DNA, 25 bp, SARS Virus
caactagacgtagttaacgacatct

SEQ ID NO: 144734 - DNA, 25 bp, SARS Virus
aactagacgtacgtaacgacatctt

SEQ ID NO: 144735 - DNA, 25 bp, SARS Virus
actagacgtactgaacgacatcttt

SEQ ID NO: 144736 - DNA, 25 bp, SARS Virus
ctagacgtacttgacgacatctttg

SEQ ID NO: 144737 - DNA, 25 bp, SARS Virus
tagacgtacttagcgacatctttgt

SEQ ID NO: 144738 - DNA, 25 bp, SARS Virus
agacgtacttaaggacatctttgta

SEQ ID NO: 144739 - DNA, 25 bp, SARS Virus
gacgtacttaacgacatctttgtag

SEQ ID NO: 144740 - DNA, 25 bp, SARS Virus
acgtacttaacggcatctttgtagt

SEQ ID NO: 144741 - DNA, 25 bp, SARS Virus
cgtacttaacgagatctttgtagtc

SEQ ID NO: 144742 - DNA, 25 bp, SARS Virus
gtacttaacgacgtctttgtagtca

SEQ ID NO: 144743 - DNA, 25 bp, SARS Virus
tacttaacgacagctttgtagtcac

SEQ ID NO: 144744 - DNA, 25 bp, SARS Virus
acttaacgacatgtttgtagtcacg

SEQ ID NO: 144745 - DNA, 25 bp, SARS Virus
cttaacgacatcgttgtagtcacgt

SEQ ID NO: 144746 - DNA, 25 bp, SARS Virus
ttaacgacatctgtgtagtcacgtc

SEQ ID NO: 144747 - DNA, 25 bp, SARS Virus
taacgacatcttggtagtcacgtca

SEQ ID NO: 144748 - DNA, 25 bp, SARS Virus
aacgacatctttgtagtcacgtcaa

SEQ ID NO: 144749 - DNA, 25 bp, SARS Virus
acgacatctttggagtcacgtcaat

SEQ ID NO: 144750 - DNA, 25 bp, SARS Virus
cgacatctttgtggtcacgtcaatt

SEQ ID NO: 144751 - DNA, 25 bp, SARS Virus
gacatctttgtagtcacgtcaattg

SEQ ID NO: 144752 - DNA, 25 bp, SARS Virus
acatctttgtaggcacgtcaattgt

SEQ ID NO: 144753 - DNA, 25 bp, SARS Virus
catctttgtagtgacgtcaattgta

SEQ ID NO: 144754 - DNA, 25 bp, SARS Virus
atctttgtagtcgcgtcaattgtag

SEQ ID NO: 144755 - DNA, 25 bp, SARS Virus
tctttgtagtcaggtcaattgtaga

SEQ ID NO: 144756 - DNA, 25 bp, SARS Virus
ctttgtagtcacgtcaattgtagaa

SEQ ID NO: 144757 - DNA, 25 bp, SARS Virus
tttgtagtcacggcaattgtagaac

SEQ ID NO: 144758 - DNA, 25 bp, SARS Virus
ttgtagtcacgtgaattgtagaact

SEQ ID NO: 144759 - DNA, 25 bp, SARS Virus
tgtagtcacgtcgattgtagaacta

SEQ ID NO: 144760 - DNA, 25 bp, SARS Virus
gtagtcacgtcagttgtagaactat

SEQ ID NO: 144761 - DNA, 25 bp, SARS Virus
tagtcacgtcaagtgtagaactata

SEQ ID NO: 144762 - DNA, 25 bp, SARS Virus
agtcacgtcaatggtagaactatat

SEQ ID NO: 144763 - DNA, 25 bp, SARS Virus
gtcacgtcaattgtagaactatatc

SEQ ID NO: 144764 - DNA, 25 bp, SARS Virus
tcacgtcaattggagaactatatct

SEQ ID NO: 144765 - DNA, 25 bp, SARS Virus
cacgtcaattgtggaactatatctt

SEQ ID NO: 144766 - DNA, 25 bp, SARS Virus
acgtcaattgtagaactatatcttg

SEQ ID NO: 144767 - DNA, 25 bp, SARS Virus
cgtcaattgtaggactatatcttgt

SEQ ID NO: 144768 - DNA, 25 bp, SARS Virus
gtcaattgtagagctatatcttgtc

SEQ ID NO: 144769 - DNA, 25 bp, SARS Virus
tcaattgtagaagtatatcttgtcg

SEQ ID NO: 144770 - DNA, 25 bp, SARS Virus
caattgtagaacgatatcttgtcgt

SEQ ID NO: 144771 - DNA, 25 bp, SARS Virus
aattgtagaactgtatcttgtcgtt

SEQ ID NO: 144772 - DNA, 25 bp, SARS Virus
attgtagaactagatcttgtcgttg

SEQ ID NO: 144773 - DNA, 25 bp, SARS Virus
ttgtagaactatgtcttgtcgttga

SEQ ID NO: 144774 - DNA, 25 bp, SARS Virus
tgtagaactatagcttgtcgttgaa

SEQ ID NO: 144775 - DNA, 25 bp, SARS Virus
gtagaactatatgttgtcgttgaag

SEQ ID NO: 144776 - DNA, 25 bp, SARS Virus
tagaactatatcgtgtcgttgaagt

SEQ ID NO: 144777 - DNA, 25 bp, SARS Virus
agaactatatctggtcgttgaagtc

SEQ ID NO: 144778 - DNA, 25 bp, SARS Virus
gaactatatcttgtcgttgaagtct

SEQ ID NO: 144779 - DNA, 25 bp, SARS Virus
aactatatcttggcgttgaagtcta

SEQ ID NO: 144780 - DNA, 25 bp, SARS Virus
actatatcttgtggttgaagtctac

SEQ ID NO: 144781 - DNA, 25 bp, SARS Virus
ctatatcttgtcgttgaagtctact

SEQ ID NO: 144782 - DNA, 25 bp, SARS Virus
tatatcttgtcggtgaagtctactt

SEQ ID NO: 144783 - DNA, 25 bp, SARS Virus
atatcttgtcgtggaagtctacttc

SEQ ID NO: 144784 - DNA, 25 bp, SARS Virus
tatcttgtcgttgaagtctacttcg

SEQ ID NO: 144785 - DNA, 25 bp, SARS Virus
atcttgtcgttggagtctacttcgt

SEQ ID NO: 144786 - DNA, 25 bp, SARS Virus
tcttgtcgttgaggtctacttcgta

SEQ ID NO: 144787 - DNA, 25 bp, SARS Virus
cttgtcgttgaagtctacttcgtaa

SEQ ID NO: 144788 - DNA, 25 bp, SARS Virus
ttgtcgttgaaggctacttcgtaaa

SEQ ID NO: 144789 - DNA, 25 bp, SARS Virus
tgtcgttgaagtgtacttcgtaaac

SEQ ID NO: 144790 - DNA, 25 bp, SARS Virus
gtcgttgaagtcgacttcgtaaaca

SEQ ID NO: 144791 - DNA, 25 bp, SARS Virus
tcgttgaagtctgcttcgtaaacaa

SEQ ID NO: 144792 - DNA, 25 bp, SARS Virus
cgttgaagtctagttcgtaaacaag

SEQ ID NO: 144793 - DNA, 25 bp, SARS Virus
gttgaagtctacgtcgtaaacaagg

SEQ ID NO: 144794 - DNA, 25 bp, SARS Virus
ttgaagtctactgcgtaaacaaggt

SEQ ID NO: 144795 - DNA, 25 bp, SARS Virus
tgaagtctacttggtaaacaaggtc

SEQ ID NO: 144796 - DNA, 25 bp, SARS Virus
gaagtctacttcgtaaacaaggtcc

SEQ ID NO: 144797 - DNA, 25 bp, SARS Virus
aagtctacttcggaaacaaggtcca

SEQ ID NO: 144798 - DNA, 25 bp, SARS Virus
agtctacttcgtgaacaaggtccac

SEQ ID NO: 144799 - DNA, 25 bp, SARS Virus
gtctacttcgtagacaaggtccaca

SEQ ID NO: 144800 - DNA, 25 bp, SARS Virus
tctacttcgtaagcaaggtccacat

SEQ ID NO: 144801 - DNA, 25 bp, SARS Virus
ctacttcgtaaagaaggtccacatt

SEQ ID NO: 144802 - DNA, 25 bp, SARS Virus
tacttcgtaaacgaggtccacatta

SEQ ID NO: 144803 - DNA, 25 bp, SARS Virus
acttcgtaaacagggtccacattaa

SEQ ID NO: 144804 - DNA, 25 bp, SARS Virus
cttcgtaaacaaggtccacattaat

SEQ ID NO: 144805 - DNA, 25 bp, SARS Virus
ttcgtaaacaaggtccacattaatg

SEQ ID NO: 144806 - DNA, 25 bp, SARS Virus
tcgtaaacaagggccacattaatgt

SEQ ID NO: 144807 - DNA, 25 bp, SARS Virus
cgtaaacaaggtgcacattaatgtg

SEQ ID NO: 144808 - DNA, 25 bp, SARS Virus
gtaaacaaggtcgacattaatgtga

SEQ ID NO: 144809 - DNA, 25 bp, SARS Virus
taaacaaggtccgcattaatgtgaa

SEQ ID NO: 144810 - DNA, 25 bp, SARS Virus
aaacaaggtccagattaatgtgaat

SEQ ID NO: 144811 - DNA, 25 bp, SARS Virus
aacaaggtccacgttaatgtgaatg

SEQ ID NO: 144812 - DNA, 25 bp, SARS Virus
acaaggtccacagtaatgtgaatgt

SEQ ID NO: 144813 - DNA, 25 bp, SARS Virus
caaggtccacatgaatgtgaatgtg

SEQ ID NO: 144814 - DNA, 25 bp, SARS Virus
aaggtccacattgatgtgaatgtgg

SEQ ID NO: 144815 - DNA, 25 bp, SARS Virus
aggtccacattagtgtgaatgtggg

SEQ ID NO: 144816 - DNA, 25 bp, SARS Virus
ggtccacattaaggtgaatgtgggg

SEQ ID NO: 144817 - DNA, 25 bp, SARS Virus
gtccacattaatgtgaatgtggggg

SEQ ID NO: 144818 - DNA, 25 bp, SARS Virus
tccacattaatgggaatgtgggggt

SEQ ID NO: 144819 - DNA, 25 bp, SARS Virus
ccacattaatgtgaatgtgggggtt

SEQ ID NO: 144820 - DNA, 25 bp, SARS Virus
cacattaatgtggatgtgggggttt

SEQ ID NO: 144821 - DNA, 25 bp, SARS Virus
acattaatgtgagtgtgggggtttt

SEQ ID NO: 144822 - DNA, 25 bp, SARS Virus
cattaatgtgaaggtgggggttttc

SEQ ID NO: 144823 - DNA, 25 bp, SARS Virus
attaatgtgaatgtgggggttttcg

SEQ ID NO: 144824 - DNA, 25 bp, SARS Virus
ttaatgtgaatgggggggttttcgc

SEQ ID NO: 144825 - DNA, 25 bp, SARS Virus
taatgtgaatgtgggggttttcgcg

SEQ ID NO: 144826 - DNA, 25 bp, SARS Virus
aatgtgaatgtgggggttttcgcgt

SEQ ID NO: 144827 - DNA, 25 bp, SARS Virus
atgtgaatgtgggggttttcgcgtt

SEQ ID NO: 144828 - DNA, 25 bp, SARS Virus
tgtgaatgtgggggttttcgcgttc

SEQ ID NO: 144829 - DNA, 25 bp, SARS Virus
gtgaatgtgggggttttcgcgttcc

SEQ ID NO: 144830 - DNA, 25 bp, SARS Virus
tgaatgtggggggtttcgcgttcca

SEQ ID NO: 144831 - DNA, 25 bp, SARS Virus
gaatgtgggggtgttcgcgttccac

SEQ ID NO: 144832 - DNA, 25 bp, SARS Virus
aatgtgggggttgtcgcgttccact

SEQ ID NO: 144833 - DNA, 25 bp, SARS Virus
atgtgggggtttgcgcgttccactt

SEQ ID NO: 144834 - DNA, 25 bp, SARS Virus
tgtgggggttttggcgttccacttt

SEQ ID NO: 144835 - DNA, 25 bp, SARS Virus
gtgggggttttcgcgttccacttta

SEQ ID NO: 144836 - DNA, 25 bp, SARS Virus
tgggggttttcgggttccactttac

SEQ ID NO: 144837 - DNA, 25 bp, SARS Virus
gggggttttcgcgttccactttaca

SEQ ID NO: 144838 - DNA, 25 bp, SARS Virus
ggggttttcgcggtccactttacag

SEQ ID NO: 144839 - DNA, 25 bp, SARS Virus
gggttttcgcgtgccactttacaga

SEQ ID NO: 144840 - DNA, 25 bp, SARS Virus
ggttttcgcgttgcactttacagat

SEQ ID NO: 144841 - DNA, 25 bp, SARS Virus
gttttcgcgttcgactttacagatt

SEQ ID NO: 144842 - DNA, 25 bp, SARS Virus
ttttcgcgttccgctttacagatta

SEQ ID NO: 144843 - DNA, 25 bp, SARS Virus
tttcgcgttccagtttacagattat

SEQ ID NO: 144844 - DNA, 25 bp, SARS Virus
ttcgcgttccacgttacagattata

SEQ ID NO: 144845 - DNA, 25 bp, SARS Virus
tcgcgttccactgtacagattataa

SEQ ID NO: 144846 - DNA, 25 bp, SARS Virus
cgcgttccacttgacagattataaa

SEQ ID NO: 144847 - DNA, 25 bp, SARS Virus
gcgttccactttgcagattataaag

SEQ ID NO: 144848 - DNA, 25 bp, SARS Virus
cgttccactttagagattataaagt

SEQ ID NO: 144849 - DNA, 25 bp, SARS Virus
gttccactttacggattataaagtc

SEQ ID NO: 144850 - DNA, 25 bp, SARS Virus
ttccactttacagattataaagtct

SEQ ID NO: 144851 - DNA, 25 bp, SARS Virus
tccactttacaggttataaagtcta

SEQ ID NO: 144852 - DNA, 25 bp, SARS Virus
ccactttacagagtataaagtctac

SEQ ID NO: 144853 - DNA, 25 bp, SARS Virus
cactttacagatgataaagtctaca

SEQ ID NO: 144854 - DNA, 25 bp, SARS Virus
actttacagattgtaaagtctacaa

SEQ ID NO: 144855 - DNA, 25 bp, SARS Virus
ctttacagattagaaagtctacaaa

SEQ ID NO: 144856 - DNA, 25 bp, SARS Virus
tttacagattatgaagtctacaaaa

SEQ ID NO: 144857 - DNA, 25 bp, SARS Virus
ttacagattatagagtctacaaaat

SEQ ID NO: 144858 - DNA, 25 bp, SARS Virus
tacagattataaggtctacaaaatc

SEQ ID NO: 144859 - DNA, 25 bp, SARS Virus
acagattataaagtctacaaaatcc

SEQ ID NO: 144860 - DNA, 25 bp, SARS Virus
cagattataaaggctacaaaatcct

SEQ ID NO: 144861 - DNA, 25 bp, SARS Virus
agattataaagtgtacaaaatccta

SEQ ID NO: 144862 - DNA, 25 bp, SARS Virus
gattataaagtcgacaaaatcctag

SEQ ID NO: 144863 - DNA, 25 bp, SARS Virus
attataaagtctgcaaaatcctaga

SEQ ID NO: 144864 - DNA, 25 bp, SARS Virus
ttataaagtctagaaaatcctagag

SEQ ID NO: 144865 - DNA, 25 bp, SARS Virus
tataaagtctacgaaatcctagagc

SEQ ID NO: 144866 - DNA, 25 bp, SARS Virus
ataaagtctacagaatcctagagct

SEQ ID NO: 144867 - DNA, 25 bp, SARS Virus
taaagtctacaagatcctagagctt

SEQ ID NO: 144868 - DNA, 25 bp, SARS Virus
aaagtctacaaagtcctagagcttg

SEQ ID NO: 144869 - DNA, 25 bp, SARS Virus
aagtctacaaaagcctagagcttgc

SEQ ID NO: 144870 - DNA, 25 bp, SARS Virus
agtctacaaaatgctagagcttgcc

SEQ ID NO: 144871 - DNA, 25 bp, SARS Virus
gtctacaaaatcgtagagcttgcct

SEQ ID NO: 144872 - DNA, 25 bp, SARS Virus
tctacaaaatccgagagcttgcctt

SEQ ID NO: 144873 - DNA, 25 bp, SARS Virus
ctacaaaatcctggagcttgcctta

SEQ ID NO: 144874 - DNA, 25 bp, SARS Virus
tacaaaatcctagagcttgccttag

SEQ ID NO: 144875 - DNA, 25 bp, SARS Virus
acaaaatcctagggcttgccttagt

SEQ ID NO: 144876 - DNA, 25 bp, SARS Virus
caaaatcctagagcttgccttagtc

SEQ ID NO: 144877 - DNA, 25 bp, SARS Virus
aaaatcctagaggttgccttagtca

SEQ ID NO: 144878 - DNA, 25 bp, SARS Virus
aaatcctagagcgtgccttagtcac

SEQ ID NO: 144879 - DNA, 25 bp, SARS Virus
aatcctagagctggccttagtcact

SEQ ID NO: 144880 - DNA, 25 bp, SARS Virus
atcctagagcttgccttagtcactt

SEQ ID NO: 144881 - DNA, 25 bp, SARS Virus
tcctagagcttggcttagtcacttt

SEQ ID NO: 144882 - DNA, 25 bp, SARS Virus
cctagagcttgcgttagtcacttta

SEQ ID NO: 144883 - DNA, 25 bp, SARS Virus
ctagagcttgccgtagtcactttag

SEQ ID NO: 144884 - DNA, 25 bp, SARS Virus
tagagcttgcctgagtcactttagt

SEQ ID NO: 144885 - DNA, 25 bp, SARS Virus
agagcttgccttggtcactttagtc

SEQ ID NO: 144886 - DNA, 25 bp, SARS Virus
gagcttgccttagtcactttagtct

SEQ ID NO: 144887 - DNA, 25 bp, SARS Virus
agcttgccttaggcactttagtctt

SEQ ID NO: 144888 - DNA, 25 bp, SARS Virus
gcttgccttagtgactttagtcttt

SEQ ID NO: 144889 - DNA, 25 bp, SARS Virus
cttgccttagtcgctttagtctttg

SEQ ID NO: 144890 - DNA, 25 bp, SARS Virus
ttgccttagtcagtttagtctttgt

SEQ ID NO: 144891 - DNA, 25 bp, SARS Virus
tgccttagtcacgttagtctttgta

SEQ ID NO: 144892 - DNA, 25 bp, SARS Virus
gccttagtcactgtagtctttgtag

SEQ ID NO: 144893 - DNA, 25 bp, SARS Virus
ccttagtcacttgagtctttgtagt

SEQ ID NO: 144894 - DNA, 25 bp, SARS Virus
cttagtcactttggtctttgtagtg

SEQ ID NO: 144895 - DNA, 25 bp, SARS Virus
ttagtcactttagtctttgtagtgc

SEQ ID NO: 144896 - DNA, 25 bp, SARS Virus
tagtcactttaggctttgtagtgcc

SEQ ID NO: 144897 - DNA, 25 bp, SARS Virus
agtcactttagtgtttgtagtgccg

SEQ ID NO: 144898 - DNA, 25 bp, SARS Virus
gtcactttagtcgttgtagtgccgg

SEQ ID NO: 144899 - DNA, 25 bp, SARS Virus
tcactttagtctgtgtagtgccggt

SEQ ID NO: 144900 - DNA, 25 bp, SARS Virus
cactttagtcttggtagtgccggtt

SEQ ID NO: 144901 - DNA, 25 bp, SARS Virus
actttagtctttgtagtgccggttt

SEQ ID NO: 144902 - DNA, 25 bp, SARS Virus
ctttagtctttggagtgccggttta

SEQ ID NO: 144903 - DNA, 25 bp, SARS Virus
tttagtctttgtggtgccggtttaa

SEQ ID NO: 144904 - DNA, 25 bp, SARS Virus
ttagtctttgtagtgccggtttaac

SEQ ID NO: 144905 - DNA, 25 bp, SARS Virus
tagtctttgtagggccggtttaaca

SEQ ID NO: 144906 - DNA, 25 bp, SARS Virus
agtctttgtagtgccggtttaacaa

SEQ ID NO: 144907 - DNA, 25 bp, SARS Virus
gtctttgtagtggcggtttaacaac

SEQ ID NO: 144908 - DNA, 25 bp, SARS Virus
tctttgtagtgcgggtttaacaact

SEQ ID NO: 144909 - DNA, 25 bp, SARS Virus
ctttgtagtgccggtttaacaactt

SEQ ID NO: 144910 - DNA, 25 bp, SARS Virus
tttgtagtgccggtttaacaacttt

SEQ ID NO: 144911 - DNA, 25 bp, SARS Virus
ttgtagtgccgggttaacaacttta

SEQ ID NO: 144912 - DNA, 25 bp, SARS Virus
tgtagtgccggtgtaacaactttac

SEQ ID NO: 144913 - DNA, 25 bp, SARS Virus
gtagtgccggttgaacaactttacc

SEQ ID NO: 144914 - DNA, 25 bp, SARS Virus
tagtgccggtttgacaactttacca

SEQ ID NO: 144915 - DNA, 25 bp, SARS Virus
agtgccggtttagcaactttaccaa

SEQ ID NO: 144916 - DNA, 25 bp, SARS Virus
gtgccggtttaagaactttaccaac

SEQ ID NO: 144917 - DNA, 25 bp, SARS Virus
tgccggtttaacgactttaccaact

SEQ ID NO: 144918 - DNA, 25 bp, SARS Virus
gccggtttaacagctttaccaactt

SEQ ID NO: 144919 - DNA, 25 bp, SARS Virus
ccggtttaacaagtttaccaacttt

SEQ ID NO: 144920 - DNA, 25 bp, SARS Virus
cggtttaacaacgttaccaacttta

SEQ ID NO: 144921 - DNA, 25 bp, SARS Virus
ggtttaacaactgtaccaactttag

SEQ ID NO: 144922 - DNA, 25 bp, SARS Virus
gtttaacaacttgaccaactttaga

SEQ ID NO: 144923 - DNA, 25 bp, SARS Virus
tttaacaactttgccaactttagag

SEQ ID NO: 144924 - DNA, 25 bp, SARS Virus
ttaacaactttagcaactttagaga

SEQ ID NO: 144925 - DNA, 25 bp, SARS Virus
taacaactttacgaactttagagaa

SEQ ID NO: 144926 - DNA, 25 bp, SARS Virus
aacaactttaccgactttagagaaa

SEQ ID NO: 144927 - DNA, 25 bp, SARS Virus
acaactttaccagctttagagaaac

SEQ ID NO: 144928 - DNA, 25 bp, SARS Virus
caactttaccaagtttagagaaact

SEQ ID NO: 144929 - DNA, 25 bp, SARS Virus
aactttaccaacgttagagaaactt

SEQ ID NO: 144930 - DNA, 25 bp, SARS Virus
actttaccaactgtagagaaacttc

SEQ ID NO: 144931 - DNA, 25 bp, SARS Virus
ctttaccaacttgagagaaacttct

SEQ ID NO: 144932 - DNA, 25 bp, SARS Virus
tttaccaactttggagaaacttctt

SEQ ID NO: 144933 - DNA, 25 bp, SARS Virus
ttaccaactttagagaaacttcttc

SEQ ID NO: 144934 - DNA, 25 bp, SARS Virus
taccaactttagggaaacttcttcc

SEQ ID NO: 144935 - DNA, 25 bp, SARS Virus
accaactttagagaaacttcttcct

SEQ ID NO: 144936 - DNA, 25 bp, SARS Virus
ccaactttagaggaacttcttcctc

SEQ ID NO: 144937 - DNA, 25 bp, SARS Virus
caactttagagagacttcttcctca

SEQ ID NO: 144938 - DNA, 25 bp, SARS Virus
aactttagagaagcttcttcctcaa

SEQ ID NO: 144939 - DNA, 25 bp, SARS Virus
actttagagaaagttcttcctcaat

SEQ ID NO: 144940 - DNA, 25 bp, SARS Virus
ctttagagaaacgtcttcctcaatt

SEQ ID NO: 144941 - DNA, 25 bp, SARS Virus
tttagagaaactgcttcctcaattg

SEQ ID NO: 144942 - DNA, 25 bp, SARS Virus
ttagagaaacttgttcctcaattgt

SEQ ID NO: 144943 - DNA, 25 bp, SARS Virus
tagagaaacttcgtcctcaattgtg

SEQ ID NO: 144944 - DNA, 25 bp, SARS Virus
agagaaacttctgcctcaattgtgt

SEQ ID NO: 144945 - DNA, 25 bp, SARS Virus
gagaaacttcttgctcaattgtgtg

SEQ ID NO: 144946 - DNA, 25 bp, SARS Virus
agaaacttcttcgtcaattgtgtgg

SEQ ID NO: 144947 - DNA, 25 bp, SARS Virus
gaaacttcttccgcaattgtgtggt

SEQ ID NO: 144948 - DNA, 25 bp, SARS Virus
aaacttcttcctgaattgtgtggtc

SEQ ID NO: 144949 - DNA, 25 bp, SARS Virus
aacttcttcctcgattgtgtggtca

SEQ ID NO: 144950 - DNA, 25 bp, SARS Virus
acttcttcctcagttgtgtggtcat

SEQ ID NO: 144951 - DNA, 25 bp, SARS Virus
cttcttcctcaagtgtgtggtcatg

SEQ ID NO: 144952 - DNA, 25 bp, SARS Virus
ttcttcctcaatggtgtggtcatgg

SEQ ID NO: 144953 - DNA, 25 bp, SARS Virus
tcttcctcaattgtgtggtcatggt

SEQ ID NO: 144954 - DNA, 25 bp, SARS Virus
cttcctcaattgggtggtcatggtc

SEQ ID NO: 144955 - DNA, 25 bp, SARS Virus
ttcctcaattgtgtggtcatggtca

SEQ ID NO: 144956 - DNA, 25 bp, SARS Virus
tcctcaattgtggggtcatggtcac

SEQ ID NO: 144957 - DNA, 25 bp, SARS Virus
cctcaattgtgtggtcatggtcact

SEQ ID NO: 144958 - DNA, 25 bp, SARS Virus
ctcaattgtgtggtcatggtcactc

SEQ ID NO: 144959 - DNA, 25 bp, SARS Virus
tcaattgtgtgggcatggtcactca

SEQ ID NO: 144960 - DNA, 25 bp, SARS Virus
caattgtgtggtgatggtcactcag

SEQ ID NO: 144961 - DNA, 25 bp, SARS Virus
aattgtgtggtcgtggtcactcagg

SEQ ID NO: 144962 - DNA, 25 bp, SARS Virus
attgtgtggtcagggtcactcaggt

SEQ ID NO: 144963 - DNA, 25 bp, SARS Virus
ttgtgtggtcatggtcactcaggta

SEQ ID NO: 144964 - DNA, 25 bp, SARS Virus
tgtgtggtcatggtcactcaggtaa

SEQ ID NO: 144965 - DNA, 25 bp, SARS Virus
gtgtggtcatgggcactcaggtaat

SEQ ID NO: 144966 - DNA, 25 bp, SARS Virus
tgtggtcatggtgactcaggtaatt

SEQ ID NO: 144967 - DNA, 25 bp, SARS Virus
gtggtcatggtcgctcaggtaattt

SEQ ID NO: 144968 - DNA, 25 bp, SARS Virus
tggtcatggtcagtcaggtaatttt

SEQ ID NO: 144969 - DNA, 25 bp, SARS Virus
atcatccatatctttaccacaataa

SEQ ID NO: 144970 - DNA, 25 bp, SARS Virus
tcatccatatcgttaccacaataat

SEQ ID NO: 144971 - DNA, 25 bp, SARS Virus
catccatatcgttaccacaataatc

SEQ ID NO: 144972 - DNA, 25 bp, SARS Virus
atccatatcgtttccacaataatct

SEQ ID NO: 144973 - DNA, 25 bp, SARS Virus
tccatatcgttatcacaataatctc

SEQ ID NO: 144974 - DNA, 25 bp, SARS Virus
ccatatcgttactacaataatctca

SEQ ID NO: 144975 - DNA, 25 bp, SARS Virus
catatcgttacctcaataatctcat

SEQ ID NO: 144976 - DNA, 25 bp, SARS Virus
atatcgttaccataataatctcatt

SEQ ID NO: 144977 - DNA, 25 bp, SARS Virus
tatcgttaccactataatctcattc

SEQ ID NO: 144978 - DNA, 25 bp, SARS Virus
atcgttaccacattaatctcattcg

SEQ ID NO: 144979 - DNA, 25 bp, SARS Virus
tcgttaccacaataatctcattcgt

SEQ ID NO: 144980 - DNA, 25 bp, SARS Virus
cgttaccacaattatctcattcgtt

SEQ ID NO: 144981 - DNA, 25 bp, SARS Virus
gttaccacaatattctcattcgtta

SEQ ID NO: 144982 - DNA, 25 bp, SARS Virus
ttaccacaataatctcattcgttaa

SEQ ID NO: 144983 - DNA, 25 bp, SARS Virus
taccacaataatttcattcgttaac

SEQ ID NO: 144984 - DNA, 25 bp, SARS Virus
accacaataatctcattcgttaact

SEQ ID NO: 144985 - DNA, 25 bp, SARS Virus
ccacaataatcttattcgttaactt

SEQ ID NO: 144986 - DNA, 25 bp, SARS Virus
cacaataatctctttcgttaacttg

SEQ ID NO: 144987 - DNA, 25 bp, SARS Virus
acaataatctcattcgttaacttga

SEQ ID NO: 144988 - DNA, 25 bp, SARS Virus
caataatctcattcgttaacttgat

SEQ ID NO: 144989 - DNA, 25 bp, SARS Virus
aataatctcatttgttaacttgata

SEQ ID NO: 144990 - DNA, 25 bp, SARS Virus
ataatctcattctttaacttgatag

SEQ ID NO: 144991 - DNA, 25 bp, SARS Virus
taatctcattcgttaacttgatagt

SEQ ID NO: 144992 - DNA, 25 bp, SARS Virus
aatctcattcgttaacttgatagtc

SEQ ID NO: 144993 - DNA, 25 bp, SARS Virus
atctcattcgtttacttgatagtcg

SEQ ID NO: 144994 - DNA, 25 bp, SARS Virus
tctcattcgttatcttgatagtcgt

SEQ ID NO: 144995 - DNA, 25 bp, SARS Virus
ctcattcgttaatttgatagtcgtg

SEQ ID NO: 144996 - DNA, 25 bp, SARS Virus
tcattcgttaacttgatagtcgtgg

SEQ ID NO: 144997 - DNA, 25 bp, SARS Virus
cattcgttaacttgatagtcgtgga

SEQ ID NO: 144998 - DNA, 25 bp, SARS Virus
attcgttaactttatagtcgtggat

SEQ ID NO: 144999 - DNA, 25 bp, SARS Virus
ttcgttaacttgttagtcgtggatt

SEQ ID NO: 145000 - DNA, 25 bp, SARS Virus
tcgttaacttgatagtcgtggattt

SEQ ID NO: 145001 - DNA, 25 bp, SARS Virus
cgttaacttgattgtcgtggatttc

SEQ ID NO: 145002 - DNA, 25 bp, SARS Virus
gttaacttgatattcgtggatttct

SEQ ID NO: 145003 - DNA, 25 bp, SARS Virus
ttaacttgatagtcgtggatttctg

SEQ ID NO: 145004 - DNA, 25 bp, SARS Virus
taacttgatagttgtggatttctgt

SEQ ID NO: 145005 - DNA, 25 bp, SARS Virus
aacttgatagtcttggatttctgta

SEQ ID NO: 145006 - DNA, 25 bp, SARS Virus
acttgatagtcgtggatttctgtat

SEQ ID NO: 145007 - DNA, 25 bp, SARS Virus
cttgatagtcgttgatttctgtatc

SEQ ID NO: 145008 - DNA, 25 bp, SARS Virus
ttgatagtcgtgtatttctgtatca

SEQ ID NO: 145009 - DNA, 25 bp, SARS Virus
tgatagtcgtggttttctgtatcat

SEQ ID NO: 145010 - DNA, 25 bp, SARS Virus
gatagtcgtggatttctgtatcata

SEQ ID NO: 145011 - DNA, 25 bp, SARS Virus
atagtcgtggatttctgtatcatat

SEQ ID NO: 145012 - DNA, 25 bp, SARS Virus
tagtcgtggatttctgtatcatatt

SEQ ID NO: 145013 - DNA, 25 bp, SARS Virus
agtcgtggatttttgtatcatattc

SEQ ID NO: 145014 - DNA, 25 bp, SARS Virus
gtcgtggatttctgtatcatattcg

SEQ ID NO: 145015 - DNA, 25 bp, SARS Virus
tcgtggatttctttatcatattcgg

SEQ ID NO: 145016 - DNA, 25 bp, SARS Virus
cgtggatttctgtatcatattcggt

SEQ ID NO: 145017 - DNA, 25 bp, SARS Virus
gtggatttctgtttcatattcggtg

SEQ ID NO: 145018 - DNA, 25 bp, SARS Virus
tggatttctgtatcatattcggtgt

SEQ ID NO: 145019 - DNA, 25 bp, SARS Virus
ggatttctgtattatattcggtgtt

SEQ ID NO: 145020 - DNA, 25 bp, SARS Virus
gatttctgtatcttattcggtgtta

SEQ ID NO: 145021 - DNA, 25 bp, SARS Virus
atttctgtatcatattcggtgttat

SEQ ID NO: 145022 - DNA, 25 bp, SARS Virus
tttctgtatcattttcggtgttatc

SEQ ID NO: 145023 - DNA, 25 bp, SARS Virus
ttctgtatcatattcggtgttatct

SEQ ID NO: 145024 - DNA, 25 bp, SARS Virus
tctgtatcatattcggtgttatcta

SEQ ID NO: 145025 - DNA, 25 bp, SARS Virus
ctgtatcatatttggtgttatctaa

SEQ ID NO: 145026 - DNA, 25 bp, SARS Virus
tgtatcatattctgtgttatctaaa

SEQ ID NO: 145027 - DNA, 25 bp, SARS Virus
gtatcatattcgttgttatctaaaa

SEQ ID NO: 145028 - DNA, 25 bp, SARS Virus
tatcatattcggtgttatctaaaaa

SEQ ID NO: 145029 - DNA, 25 bp, SARS Virus
atcatattcggttttatctaaaaac

SEQ ID NO: 145030 - DNA, 25 bp, SARS Virus
tcatattcggtgttatctaaaaacc

SEQ ID NO: 145031 - DNA, 25 bp, SARS Virus
catattcggtgttatctaaaaaccg

SEQ ID NO: 145032 - DNA, 25 bp, SARS Virus
atattcggtgttttctaaaaaccga

SEQ ID NO: 145033 - DNA, 25 bp, SARS Virus
tattcggtgttatctaaaaaccgat

SEQ ID NO: 145034 - DNA, 25 bp, SARS Virus
attcggtgttatttaaaaaccgatc

SEQ ID NO: 145035 - DNA, 25 bp, SARS Virus
ttcggtgttatctaaaaaccgatca

SEQ ID NO: 145036 - DNA, 25 bp, SARS Virus
tcggtgttatcttaaaaccgatcat

SEQ ID NO: 145037 - DNA, 25 bp, SARS Virus
cggtgttatctataaaccgatcatg

SEQ ID NO: 145038 - DNA, 25 bp, SARS Virus
ggtgttatctaataaccgatcatga

SEQ ID NO: 145039 - DNA, 25 bp, SARS Virus
gtgttatctaaataccgatcatgat

SEQ ID NO: 145040 - DNA, 25 bp, SARS Virus
tgttatctaaaatccgatcatgatg

SEQ ID NO: 145041 - DNA, 25 bp, SARS Virus
gttatctaaaaatcgatcatgatgc

SEQ ID NO: 145042 - DNA, 25 bp, SARS Virus
ttatctaaaaactgatcatgatgca

SEQ ID NO: 145043 - DNA, 25 bp, SARS Virus
tatctaaaaacctatcatgatgcat

SEQ ID NO: 145044 - DNA, 25 bp, SARS Virus
atctaaaaaccgttcatgatgcatt

SEQ ID NO: 145045 - DNA, 25 bp, SARS Virus
tctaaaaaccgatcatgatgcatta

SEQ ID NO: 145046 - DNA, 25 bp, SARS Virus
ctaaaaaccgattatgatgcattat

SEQ ID NO: 145047 - DNA, 25 bp, SARS Virus
taaaaaccgatcttgatgcattatt

SEQ ID NO: 145048 - DNA, 25 bp, SARS Virus
aaaaaccgatcatgatgcattattt

SEQ ID NO: 145049 - DNA, 25 bp, SARS Virus
aaaaccgatcattatgcattatttc

SEQ ID NO: 145050 - DNA, 25 bp, SARS Virus
aaaccgatcatgttgcattatttct

SEQ ID NO: 145051 - DNA, 25 bp, SARS Virus
aaccgatcatgatgcattatttctt

SEQ ID NO: 145052 - DNA, 25 bp, SARS Virus
accgatcatgattcattatttcttt

SEQ ID NO: 145053 - DNA, 25 bp, SARS Virus
ccgatcatgatgtattatttctttg

SEQ ID NO: 145054 - DNA, 25 bp, SARS Virus
cgatcatgatgctttatttctttga

SEQ ID NO: 145055 - DNA, 25 bp, SARS Virus
gatcatgatgcattatttctttgac

SEQ ID NO: 145056 - DNA, 25 bp, SARS Virus
atcatgatgcattatttctttgaca

SEQ ID NO: 145057 - DNA, 25 bp, SARS Virus
tcatgatgcattttttctttgacat

SEQ ID NO: 145058 - DNA, 25 bp, SARS Virus
catgatgcattatttctttgacata

SEQ ID NO: 145059 - DNA, 25 bp, SARS Virus
atgatgcattatttctttgacatac

SEQ ID NO: 145060 - DNA, 25 bp, SARS Virus
tgatgcattatttctttgacatacc

SEQ ID NO: 145061 - DNA, 25 bp, SARS Virus
gatgcattatttttttgacatacca

SEQ ID NO: 145062 - DNA, 25 bp, SARS Virus
atgcattatttctttgacataccat

SEQ ID NO: 145063 - DNA, 25 bp, SARS Virus
tgcattatttctttgacataccatt

SEQ ID NO: 145064 - DNA, 25 bp, SARS Virus
gcattatttctttgacataccattg

SEQ ID NO: 145065 - DNA, 25 bp, SARS Virus
cattatttcttttacataccattga

SEQ ID NO: 145066 - DNA, 25 bp, SARS Virus
attatttctttgtcataccattgat

SEQ ID NO: 145067 - DNA, 25 bp, SARS Virus
ttatttctttgatataccattgatc

SEQ ID NO: 145068 - DNA, 25 bp, SARS Virus
tatttctttgacttaccattgatcg

SEQ ID NO: 145069 - DNA, 25 bp, SARS Virus
atttctttgacataccattgatcgt

SEQ ID NO: 145070 - DNA, 25 bp, SARS Virus
tttctttgacattccattgatcgtg

SEQ ID NO: 145071 - DNA, 25 bp, SARS Virus
ttctttgacatatcattgatcgtgt

SEQ ID NO: 145072 - DNA, 25 bp, SARS Virus
tctttgacatactattgatcgtgtt

SEQ ID NO: 145073 - DNA, 25 bp, SARS Virus
ctttgacatacctttgatcgtgttt

SEQ ID NO: 145074 - DNA, 25 bp, SARS Virus
tttgacataccattgatcgtgttta

SEQ ID NO: 145075 - DNA, 25 bp, SARS Virus
ttgacataccattgatcgtgtttac

SEQ ID NO: 145076 - DNA, 25 bp, SARS Virus
tgacataccatttatcgtgtttacg

SEQ ID NO: 145077 - DNA, 25 bp, SARS Virus
gacataccattgttcgtgtttacgg

SEQ ID NO: 145078 - DNA, 25 bp, SARS Virus
acataccattgatcgtgtttacggt

SEQ ID NO: 145079 - DNA, 25 bp, SARS Virus
cataccattgattgtgtttacggtc

SEQ ID NO: 145080 - DNA, 25 bp, SARS Virus
ataccattgatcttgtttacggtcg

SEQ ID NO: 145081 - DNA, 25 bp, SARS Virus
taccattgatcgtgtttacggtcga

SEQ ID NO: 145082 - DNA, 25 bp, SARS Virus
accattgatcgtttttacggtcgag

SEQ ID NO: 145083 - DNA, 25 bp, SARS Virus
ccattgatcgtgtttacggtcgagg

SEQ ID NO: 145084 - DNA, 25 bp, SARS Virus
cattgatcgtgtttacggtcgaggt

SEQ ID NO: 145085 - DNA, 25 bp, SARS Virus
attgatcgtgtttacggtcgaggtt

SEQ ID NO: 145086 - DNA, 25 bp, SARS Virus
ttgatcgtgttttcggtcgaggtta

SEQ ID NO: 145087 - DNA, 25 bp, SARS Virus
tgatcgtgtttatggtcgaggttat

SEQ ID NO: 145088 - DNA, 25 bp, SARS Virus
gatcgtgtttactgtcgaggttatc

SEQ ID NO: 145089 - DNA, 25 bp, SARS Virus
atcgtgtttacgttcgaggttatcc

SEQ ID NO: 145090 - DNA, 25 bp, SARS Virus
tcgtgtttacggtcgaggttatcct

SEQ ID NO: 145091 - DNA, 25 bp, SARS Virus
cgtgtttacggttgaggttatcctt

SEQ ID NO: 145092 - DNA, 25 bp, SARS Virus
gtgtttacggtctaggttatcctta

SEQ ID NO: 145093 - DNA, 25 bp, SARS Virus
tgtttacggtcgtggttatccttac

SEQ ID NO: 145094 - DNA, 25 bp, SARS Virus
gtttacggtcgatgttatccttaca

SEQ ID NO: 145095 - DNA, 25 bp, SARS Virus
tttacggtcgagtttatccttacag

SEQ ID NO: 145096 - DNA, 25 bp, SARS Virus
ttacggtcgaggttatccttacagc

SEQ ID NO: 145097 - DNA, 25 bp, SARS Virus
tacggtcgaggttatccttacagcg

SEQ ID NO: 145098 - DNA, 25 bp, SARS Virus
acggtcgaggttttccttacagcgt

SEQ ID NO: 145099 - DNA, 25 bp, SARS Virus
cggtcgaggttatccttacagcgtg

SEQ ID NO: 145100 - DNA, 25 bp, SARS Virus
ggtcgaggttattcttacagcgtga

SEQ ID NO: 145101 - DNA, 25 bp, SARS Virus
gtcgaggttatctttacagcgtgag

SEQ ID NO: 145102 - DNA, 25 bp, SARS Virus
tcgaggttatccttacagcgtgagt

SEQ ID NO: 145103 - DNA, 25 bp, SARS Virus
cgaggttatccttacagcgtgagta

SEQ ID NO: 145104 - DNA, 25 bp, SARS Virus
gaggttatcctttcagcgtgagtat

SEQ ID NO: 145105 - DNA, 25 bp, SARS Virus
aggttatccttatagcgtgagtatt

SEQ ID NO: 145106 - DNA, 25 bp, SARS Virus
ggttatccttactgcgtgagtattc

SEQ ID NO: 145107 - DNA, 25 bp, SARS Virus
gttatccttacatcgtgagtattct

SEQ ID NO: 145108 - DNA, 25 bp, SARS Virus
ttatccttacagtgtgagtattctt

SEQ ID NO: 145109 - DNA, 25 bp, SARS Virus
tatccttacagcttgagtattcttc

SEQ ID NO: 145110 - DNA, 25 bp, SARS Virus
atccttacagcgtgagtattcttca

SEQ ID NO: 145111 - DNA, 25 bp, SARS Virus
tccttacagcgttagtattcttcac

SEQ ID NO: 145112 - DNA, 25 bp, SARS Virus
ccttacagcgtgtgtattcttcaca

SEQ ID NO: 145113 - DNA, 25 bp, SARS Virus
cttacagcgtgattattcttcacag

SEQ ID NO: 145114 - DNA, 25 bp, SARS Virus
ttacagcgtgagtattcttcacagc

SEQ ID NO: 145115 - DNA, 25 bp, SARS Virus
tacagcgtgagttttcttcacagct

SEQ ID NO: 145116 - DNA, 25 bp, SARS Virus
acagcgtgagtattcttcacagctg

SEQ ID NO: 145117 - DNA, 25 bp, SARS Virus
cagcgtgagtattcttcacagctgt

SEQ ID NO: 145118 - DNA, 25 bp, SARS Virus
agcgtgagtatttttcacagctgta

SEQ ID NO: 145119 - DNA, 25 bp, SARS Virus
gcgtgagtattcttcacagctgtac

SEQ ID NO: 145120 - DNA, 25 bp, SARS Virus
cgtgagtattcttcacagctgtacg

SEQ ID NO: 145121 - DNA, 25 bp, SARS Virus
gtgagtattctttacagctgtacga

SEQ ID NO: 145122 - DNA, 25 bp, SARS Virus
tgagtattcttctcagctgtacgag

SEQ ID NO: 145123 - DNA, 25 bp, SARS Virus
gagtattcttcatagctgtacgagt

SEQ ID NO: 145124 - DNA, 25 bp, SARS Virus
agtattcttcactgctgtacgagtc

SEQ ID NO: 145125 - DNA, 25 bp, SARS Virus
gtattcttcacatctgtacgagtcg

SEQ ID NO: 145126 - DNA, 25 bp, SARS Virus
tattcttcacagttgtacgagtcga

SEQ ID NO: 145127 - DNA, 25 bp, SARS Virus
attcttcacagctgtacgagtcgag

SEQ ID NO: 145128 - DNA, 25 bp, SARS Virus
ttcttcacagctttacgagtcgagg

SEQ ID NO: 145129 - DNA, 25 bp, SARS Virus
tcttcacagctgtacgagtcgagga

SEQ ID NO: 145130 - DNA, 25 bp, SARS Virus
cttcacagctgttcgagtcgaggat

SEQ ID NO: 145131 - DNA, 25 bp, SARS Virus
ttcacagctgtatgagtcgaggata

SEQ ID NO: 145132 - DNA, 25 bp, SARS Virus
tcacagctgtactagtcgaggatat

SEQ ID NO: 145133 - DNA, 25 bp, SARS Virus
cacagctgtacgtgtcgaggatatt

SEQ ID NO: 145134 - DNA, 25 bp, SARS Virus
acagctgtacgattcgaggatattc

SEQ ID NO: 145135 - DNA, 25 bp, SARS Virus
cagctgtacgagtcgaggatattct

SEQ ID NO: 145136 - DNA, 25 bp, SARS Virus
agctgtacgagttgaggatattctg

SEQ ID NO: 145137 - DNA, 25 bp, SARS Virus
gctgtacgagtctaggatattctgt

SEQ ID NO: 145138 - DNA, 25 bp, SARS Virus
ctgtacgagtcgtggatattctgtc

SEQ ID NO: 145139 - DNA, 25 bp, SARS Virus
tgtacgagtcgatgatattctgtcg

SEQ ID NO: 145140 - DNA, 25 bp, SARS Virus
gtacgagtcgagtatattctgtcgg

SEQ ID NO: 145141 - DNA, 25 bp, SARS Virus
tacgagtcgaggttattctgtcgga

SEQ ID NO: 145142 - DNA, 25 bp, SARS Virus
acgagtcgaggatattctgtcggac

SEQ ID NO: 145143 - DNA, 25 bp, SARS Virus
cgagtcgaggattttctgtcggacg

SEQ ID NO: 145144 - DNA, 25 bp, SARS Virus
gagtcgaggatattctgtcggacga

SEQ ID NO: 145145 - DNA, 25 bp, SARS Virus
agtcgaggatattctgtcggacgaa

SEQ ID NO: 145146 - DNA, 25 bp, SARS Virus
gtcgaggatattttgtcggacgaac

SEQ ID NO: 145147 - DNA, 25 bp, SARS Virus
tcgaggatattctgtcggacgaact

SEQ ID NO: 145148 - DNA, 25 bp, SARS Virus
cgaggatattctttcggacgaactc

SEQ ID NO: 145149 - DNA, 25 bp, SARS Virus
gaggatattctgtcggacgaactca

SEQ ID NO: 145150 - DNA, 25 bp, SARS Virus
aggatattctgttggacgaactcag

SEQ ID NO: 145151 - DNA, 25 bp, SARS Virus
ggatattctgtctgacgaactcaga

SEQ ID NO: 145152 - DNA, 25 bp, SARS Virus
gatattctgtcgtacgaactcagac

SEQ ID NO: 145153 - DNA, 25 bp, SARS Virus
atattctgtcggtcgaactcagacc

SEQ ID NO: 145154 - DNA, 25 bp, SARS Virus
tattctgtcggatgaactcagacct

SEQ ID NO: 145155 - DNA, 25 bp, SARS Virus
attctgtcggactaactcagacctt

SEQ ID NO: 145156 - DNA, 25 bp, SARS Virus
ttctgtcggacgtactcagacctta

SEQ ID NO: 145157 - DNA, 25 bp, SARS Virus
tctgtcggacgatctcagaccttat

SEQ ID NO: 145158 - DNA, 25 bp, SARS Virus
ctgtcggacgaattcagaccttatg

SEQ ID NO: 145159 - DNA, 25 bp, SARS Virus
tgtcggacgaactcagaccttatgt

SEQ ID NO: 145160 - DNA, 25 bp, SARS Virus
gtcggacgaacttagaccttatgta

SEQ ID NO: 145161 - DNA, 25 bp, SARS Virus
tcggacgaactctgaccttatgtaa

SEQ ID NO: 145162 - DNA, 25 bp, SARS Virus
cggacgaactcataccttatgtaac

SEQ ID NO: 145163 - DNA, 25 bp, SARS Virus
ggacgaactcagtccttatgtaaca

SEQ ID NO: 145164 - DNA, 25 bp, SARS Virus
gacgaactcagatcttatgtaacaa

SEQ ID NO: 145165 - DNA, 25 bp, SARS Virus
acgaactcagactttatgtaacaaa

SEQ ID NO: 145166 - DNA, 25 bp, SARS Virus
cgaactcagaccttatgtaacaaag

SEQ ID NO: 145167 - DNA, 25 bp, SARS Virus
gaactcagaccttatgtaacaaagg

SEQ ID NO: 145168 - DNA, 25 bp, SARS Virus
aactcagaccttttgtaacaaaggt

SEQ ID NO: 145169 - DNA, 25 bp, SARS Virus
actcagaccttatgtaacaaaggtc

SEQ ID NO: 145170 - DNA, 25 bp, SARS Virus
ctcagaccttatttaacaaaggtca

SEQ ID NO: 145171 - DNA, 25 bp, SARS Virus
tcagaccttatgtaacaaaggtcat

SEQ ID NO: 145172 - DNA, 25 bp, SARS Virus
cagaccttatgttacaaaggtcatc

SEQ ID NO: 145173 - DNA, 25 bp, SARS Virus
agaccttatgtatcaaaggtcatct

SEQ ID NO: 145174 - DNA, 25 bp, SARS Virus
gaccttatgtaataaaggtcatctt

SEQ ID NO: 145175 - DNA, 25 bp, SARS Virus
accttatgtaactaaggtcatctta

SEQ ID NO: 145176 - DNA, 25 bp, SARS Virus
ccttatgtaacataggtcatcttat

SEQ ID NO: 145177 - DNA, 25 bp, SARS Virus
cttatgtaacaatggtcatcttata

SEQ ID NO: 145178 - DNA, 25 bp, SARS Virus
ttatgtaacaaatgtcatcttatat

SEQ ID NO: 145179 - DNA, 25 bp, SARS Virus
tatgtaacaaagttcatcttatata

SEQ ID NO: 145180 - DNA, 25 bp, SARS Virus
atgtaacaaaggtcatcttatatac

SEQ ID NO: 145181 - DNA, 25 bp, SARS Virus
tgtaacaaaggttatcttatatacg

SEQ ID NO: 145182 - DNA, 25 bp, SARS Virus
gtaacaaaggtcttcttatatacgc

SEQ ID NO: 145183 - DNA, 25 bp, SARS Virus
taacaaaggtcatcttatatacgcg

SEQ ID NO: 145184 - DNA, 25 bp, SARS Virus
aacaaaggtcattttatatacgcgg

SEQ ID NO: 145185 - DNA, 25 bp, SARS Virus
acaaaggtcatcttatatacgcggt

SEQ ID NO: 145186 - DNA, 25 bp, SARS Virus
caaaggtcatcttatatacgcggtt

SEQ ID NO: 145187 - DNA, 25 bp, SARS Virus
aaaggtcatcttttatacgcggttc

SEQ ID NO: 145188 - DNA, 25 bp, SARS Virus
aaggtcatcttatatacgcggttcg

SEQ ID NO: 145189 - DNA, 25 bp, SARS Virus
aggtcatcttatttacgcggttcga

SEQ ID NO: 145190 - DNA, 25 bp, SARS Virus
ggtcatcttatatacgcggttcgac

SEQ ID NO: 145191 - DNA, 25 bp, SARS Virus
gtcatcttatattcgcggttcgacc

SEQ ID NO: 145192 - DNA, 25 bp, SARS Virus
tcatcttatatatgcggttcgacca

SEQ ID NO: 145193 - DNA, 25 bp, SARS Virus
catcttatatactcggttcgaccac

SEQ ID NO: 145194 - DNA, 25 bp, SARS Virus
atcttatatacgtggttcgaccaca

SEQ ID NO: 145195 - DNA, 25 bp, SARS Virus
tcttatatacgctgttcgaccacac

SEQ ID NO: 145196 - DNA, 25 bp, SARS Virus
cttatatacgcgtttcgaccacact

SEQ ID NO: 145197 - DNA, 25 bp, SARS Virus
ttatatacgcggttcgaccacactc

SEQ ID NO: 145198 - DNA, 25 bp, SARS Virus
tatatacgcggttcgaccacactca

SEQ ID NO: 145199 - DNA, 25 bp, SARS Virus
atatacgcggtttgaccacactcaa

SEQ ID NO: 145200 - DNA, 25 bp, SARS Virus
tatacgcggttctaccacactcaac

SEQ ID NO: 145201 - DNA, 25 bp, SARS Virus
atacgcggttcgtccacactcaact

SEQ ID NO: 145202 - DNA, 25 bp, SARS Virus
tacgcggttcgatcacactcaacta

SEQ ID NO: 145203 - DNA, 25 bp, SARS Virus
acgcggttcgactacactcaactag

SEQ ID NO: 145204 - DNA, 25 bp, SARS Virus
cgcggttcgacctcactcaactaga

SEQ ID NO: 145205 - DNA, 25 bp, SARS Virus
gcggttcgaccatactcaactagac

SEQ ID NO: 145206 - DNA, 25 bp, SARS Virus
cggttcgaccactctcaactagacg

SEQ ID NO: 145207 - DNA, 25 bp, SARS Virus
ggttcgaccacattcaactagacgt

SEQ ID NO: 145208 - DNA, 25 bp, SARS Virus
gttcgaccacactcaactagacgta

SEQ ID NO: 145209 - DNA, 25 bp, SARS Virus
ttcgaccacacttaactagacgtac

SEQ ID NO: 145210 - DNA, 25 bp, SARS Virus
tcgaccacactctactagacgtact

SEQ ID NO: 145211 - DNA, 25 bp, SARS Virus
cgaccacactcatctagacgtactt

SEQ ID NO: 145212 - DNA, 25 bp, SARS Virus
gaccacactcaattagacgtactta

SEQ ID NO: 145213 - DNA, 25 bp, SARS Virus
accacactcaactagacgtacttaa

SEQ ID NO: 145214 - DNA, 25 bp, SARS Virus
ccacactcaacttgacgtacttaac

SEQ ID NO: 145215 - DNA, 25 bp, SARS Virus
cacactcaactatacgtacttaacg

SEQ ID NO: 145216 - DNA, 25 bp, SARS Virus
acactcaactagtcgtacttaacga

SEQ ID NO: 145217 - DNA, 25 bp, SARS Virus
cactcaactagatgtacttaacgac

SEQ ID NO: 145218 - DNA, 25 bp, SARS Virus
actcaactagacttacttaacgaca

SEQ ID NO: 145219 - DNA, 25 bp, SARS Virus
ctcaactagacgtacttaacgacat

SEQ ID NO: 145220 - DNA, 25 bp, SARS Virus
tcaactagacgttcttaacgacatc

SEQ ID NO: 145221 - DNA, 25 bp, SARS Virus
caactagacgtatttaacgacatct

SEQ ID NO: 145222 - DNA, 25 bp, SARS Virus
aactagacgtacttaacgacatctt

SEQ ID NO: 145223 - DNA, 25 bp, SARS Virus
actagacgtacttaacgacatcttt

SEQ ID NO: 145224 - DNA, 25 bp, SARS Virus
ctagacgtactttacgacatctttg

SEQ ID NO: 145225 - DNA, 25 bp, SARS Virus
tagacgtacttatcgacatctttgt

SEQ ID NO: 145226 - DNA, 25 bp, SARS Virus
agacgtacttaatgacatctttgta

SEQ ID NO: 145227 - DNA, 25 bp, SARS Virus
gacgtacttaactacatctttgtag

SEQ ID NO: 145228 - DNA, 25 bp, SARS Virus
acgtacttaacgtcatctttgtagt

SEQ ID NO: 145229 - DNA, 25 bp, SARS Virus
cgtacttaacgatatctttgtagtc

SEQ ID NO: 145230 - DNA, 25 bp, SARS Virus
gtacttaacgacttctttgtagtca

SEQ ID NO: 145231 - DNA, 25 bp, SARS Virus
tacttaacgacatctttgtagtcac

SEQ ID NO: 145232 - DNA, 25 bp, SARS Virus
acttaacgacatttttgtagtcacg

SEQ ID NO: 145233 - DNA, 25 bp, SARS Virus
cttaacgacatctttgtagtcacgt

SEQ ID NO: 145234 - DNA, 25 bp, SARS Virus
ttaacgacatctttgtagtcacgtc

SEQ ID NO: 145235 - DNA, 25 bp, SARS Virus
taacgacatctttgtagtcacgtca

SEQ ID NO: 145236 - DNA, 25 bp, SARS Virus
aacgacatctttttagtcacgtcaa

SEQ ID NO: 145237 - DNA, 25 bp, SARS Virus
acgacatctttgtagtcacgtcaat

SEQ ID NO: 145238 - DNA, 25 bp, SARS Virus
cgacatctttgttgtcacgtcaatt

SEQ ID NO: 145239 - DNA, 25 bp, SARS Virus
gacatctttgtattcacgtcaattg

SEQ ID NO: 145240 - DNA, 25 bp, SARS Virus
acatctttgtagtcacgtcaattgt

SEQ ID NO: 145241 - DNA, 25 bp, SARS Virus
catctttgtagttacgtcaattgta

SEQ ID NO: 145242 - DNA, 25 bp, SARS Virus
atctttgtagtctcgtcaattgtag

SEQ ID NO: 145243 - DNA, 25 bp, SARS Virus
tctttgtagtcatgtcaattgtaga

SEQ ID NO: 145244 - DNA, 25 bp, SARS Virus
ctttgtagtcacttcaattgtagaa

SEQ ID NO: 145245 - DNA, 25 bp, SARS Virus
tttgtagtcacgtcaattgtagaac

SEQ ID NO: 145246 - DNA, 25 bp, SARS Virus
ttgtagtcacgttaattgtagaact

SEQ ID NO: 145247 - DNA, 25 bp, SARS Virus
tgtagtcacgtctattgtagaacta

SEQ ID NO: 145248 - DNA, 25 bp, SARS Virus
gtagtcacgtcatttgtagaactat

SEQ ID NO: 145249 - DNA, 25 bp, SARS Virus
tagtcacgtcaattgtagaactata

SEQ ID NO: 145250 - DNA, 25 bp, SARS Virus
agtcacgtcaattgtagaactatat

SEQ ID NO: 145251 - DNA, 25 bp, SARS Virus
gtcacgtcaattttagaactatatc

SEQ ID NO: 145252 - DNA, 25 bp, SARS Virus
tcacgtcaattgtagaactatatct

SEQ ID NO: 145253 - DNA, 25 bp, SARS Virus
cacgtcaattgttgaactatatctt

SEQ ID NO: 145254 - DNA, 25 bp, SARS Virus
acgtcaattgtataactatatcttg

SEQ ID NO: 145255 - DNA, 25 bp, SARS Virus
cgtcaattgtagtactatatcttgt

SEQ ID NO: 145256 - DNA, 25 bp, SARS Virus
gtcaattgtagatctatatcttgtc

SEQ ID NO: 145257 - DNA, 25 bp, SARS Virus
tcaattgtagaattatatcttgtcg

SEQ ID NO: 145258 - DNA, 25 bp, SARS Virus
caattgtagaactatatcttgtcgt

SEQ ID NO: 145259 - DNA, 25 bp, SARS Virus
aattgtagaactttatcttgtcgtt

SEQ ID NO: 145260 - DNA, 25 bp, SARS Virus
attgtagaactatatcttgtcgttg

SEQ ID NO: 145261 - DNA, 25 bp, SARS Virus
ttgtagaactatttcttgtcgttga

SEQ ID NO: 145262 - DNA, 25 bp, SARS Virus
tgtagaactatatcttgtcgttgaa

SEQ ID NO: 145263 - DNA, 25 bp, SARS Virus
gtagaactatattttgtcgttgaag

SEQ ID NO: 145264 - DNA, 25 bp, SARS Virus
tagaactatatcttgtcgttgaagt

SEQ ID NO: 145265 - DNA, 25 bp, SARS Virus
agaactatatcttgtcgttgaagtc

SEQ ID NO: 145266 - DNA, 25 bp, SARS Virus
gaactatatcttttcgttgaagtct

SEQ ID NO: 145267 - DNA, 25 bp, SARS Virus
aactatatcttgtcgttgaagtcta

SEQ ID NO: 145268 - DNA, 25 bp, SARS Virus
actatatcttgttgttgaagtctac

SEQ ID NO: 145269 - DNA, 25 bp, SARS Virus
ctatatcttgtctttgaagtctact

SEQ ID NO: 145270 - DNA, 25 bp, SARS Virus
tatatcttgtcgttgaagtctactt

SEQ ID NO: 145271 - DNA, 25 bp, SARS Virus
atatcttgtcgttgaagtctacttc

SEQ ID NO: 145272 - DNA, 25 bp, SARS Virus
tatcttgtcgtttaagtctacttcg

SEQ ID NO: 145273 - DNA, 25 bp, SARS Virus
atcttgtcgttgtagtctacttcgt

SEQ ID NO: 145274 - DNA, 25 bp, SARS Virus
tcttgtcgttgatgtctacttcgta

SEQ ID NO: 145275 - DNA, 25 bp, SARS Virus
cttgtcgttgaattctacttcgtaa

SEQ ID NO: 145276 - DNA, 25 bp, SARS Virus
ttgtcgttgaagtctacttcgtaaa

SEQ ID NO: 145277 - DNA, 25 bp, SARS Virus
tgtcgttgaagtttacttcgtaaac

SEQ ID NO: 145278 - DNA, 25 bp, SARS Virus
gtcgttgaagtctacttcgtaaaca

SEQ ID NO: 145279 - DNA, 25 bp, SARS Virus
tcgttgaagtcttcttcgtaaacaa

SEQ ID NO: 145280 - DNA, 25 bp, SARS Virus
cgttgaagtctatttcgtaaacaag

SEQ ID NO: 145281 - DNA, 25 bp, SARS Virus
gttgaagtctacttcgtaaacaagg

SEQ ID NO: 145282 - DNA, 25 bp, SARS Virus
ttgaagtctacttcgtaaacaaggt

SEQ ID NO: 145283 - DNA, 25 bp, SARS Virus
tgaagtctactttgtaaacaaggtc

SEQ ID NO: 145284 - DNA, 25 bp, SARS Virus
gaagtctacttcttaaacaaggtcc

SEQ ID NO: 145285 - DNA, 25 bp, SARS Virus
aagtctacttcgtaaacaaggtcca

SEQ ID NO: 145286 - DNA, 25 bp, SARS Virus
agtctacttcgttaacaaggtccac

SEQ ID NO: 145287 - DNA, 25 bp, SARS Virus
gtctacttcgtatacaaggtccaca

SEQ ID NO: 145288 - DNA, 25 bp, SARS Virus
tctacttcgtaatcaaggtccacat

SEQ ID NO: 145289 - DNA, 25 bp, SARS Virus
ctacttcgtaaataaggtccacatt

SEQ ID NO: 145290 - DNA, 25 bp, SARS Virus
tacttcgtaaactaggtccacatta

SEQ ID NO: 145291 - DNA, 25 bp, SARS Virus
acttcgtaaacatggtccacattaa

SEQ ID NO: 145292 - DNA, 25 bp, SARS Virus
cttcgtaaacaatgtccacattaat

SEQ ID NO: 145293 - DNA, 25 bp, SARS Virus
ttcgtaaacaagttccacattaatg

SEQ ID NO: 145294 - DNA, 25 bp, SARS Virus
tcgtaaacaaggtccacattaatgt

SEQ ID NO: 145295 - DNA, 25 bp, SARS Virus
cgtaaacaaggttcacattaatgtg

SEQ ID NO: 145296 - DNA, 25 bp, SARS Virus
gtaaacaaggtctacattaatgtga

SEQ ID NO: 145297 - DNA, 25 bp, SARS Virus
taaacaaggtcctcattaatgtgaa

SEQ ID NO: 145298 - DNA, 25 bp, SARS Virus
aaacaaggtccatattaatgtgaat

SEQ ID NO: 145299 - DNA, 25 bp, SARS Virus
aacaaggtccactttaatgtgaatg

SEQ ID NO: 145300 - DNA, 25 bp, SARS Virus
acaaggtccacattaatgtgaatgt

SEQ ID NO: 145301 - DNA, 25 bp, SARS Virus
caaggtccacattaatgtgaatgtg

SEQ ID NO: 145302 - DNA, 25 bp, SARS Virus
aaggtccacatttatgtgaatgtgg

SEQ ID NO: 145303 - DNA, 25 bp, SARS Virus
aggtccacattattgtgaatgtggg

SEQ ID NO: 145304 - DNA, 25 bp, SARS Virus
ggtccacattaatgtgaatgtgggg

SEQ ID NO: 145305 - DNA, 25 bp, SARS Virus
gtccacattaatttgaatgtggggg

SEQ ID NO: 145306 - DNA, 25 bp, SARS Virus
tccacattaatgtgaatgtgggggt

SEQ ID NO: 145307 - DNA, 25 bp, SARS Virus
ccacattaatgttaatgtgggggtt

SEQ ID NO: 145308 - DNA, 25 bp, SARS Virus
cacattaatgtgtatgtgggggttt

SEQ ID NO: 145309 - DNA, 25 bp, SARS Virus
acattaatgtgattgtgggggtttt

SEQ ID NO: 145310 - DNA, 25 bp, SARS Virus
cattaatgtgaatgtgggggttttc

SEQ ID NO: 145311 - DNA, 25 bp, SARS Virus
attaatgtgaatttgggggttttcg

SEQ ID NO: 145312 - DNA, 25 bp, SARS Virus
ttaatgtgaatgtgggggttttcgc

SEQ ID NO: 145313 - DNA, 25 bp, SARS Virus
taatgtgaatgttggggttttcgcg

SEQ ID NO: 145314 - DNA, 25 bp, SARS Virus
aatgtgaatgtgtgggttttcgcgt

SEQ ID NO: 145315 - DNA, 25 bp, SARS Virus
atgtgaatgtggtggttttcgcgtt

SEQ ID NO: 145316 - DNA, 25 bp, SARS Virus
tgtgaatgtgggtgttttcgcgttc

SEQ ID NO: 145317 - DNA, 25 bp, SARS Virus
gtgaatgtggggtttttcgcgttcc

SEQ ID NO: 145318 - DNA, 25 bp, SARS Virus
tgaatgtgggggttttcgcgttcca

SEQ ID NO: 145319 - DNA, 25 bp, SARS Virus
gaatgtgggggttttcgcgttccac

SEQ ID NO: 145320 - DNA, 25 bp, SARS Virus
aatgtgggggttttcgcgttccact

SEQ ID NO: 145321 - DNA, 25 bp, SARS Virus
atgtgggggttttcgcgttccactt

SEQ ID NO: 145322 - DNA, 25 bp, SARS Virus
tgtgggggtttttgcgttccacttt

SEQ ID NO: 145323 - DNA, 25 bp, SARS Virus
gtgggggttttctcgttccacttta

SEQ ID NO: 145324 - DNA, 25 bp, SARS Virus
tgggggttttcgtgttccactttac

SEQ ID NO: 145325 - DNA, 25 bp, SARS Virus
gggggttttcgctttccactttaca

SEQ ID NO: 145326 - DNA, 25 bp, SARS Virus
ggggttttcgcgttccactttacag

SEQ ID NO: 145327 - DNA, 25 bp, SARS Virus
gggttttcgcgttccactttacaga

SEQ ID NO: 145328 - DNA, 25 bp, SARS Virus
ggttttcgcgtttcactttacagat

SEQ ID NO: 145329 - DNA, 25 bp, SARS Virus
gttttcgcgttctactttacagatt

SEQ ID NO: 145330 - DNA, 25 bp, SARS Virus
ttttcgcgttcctctttacagatta

SEQ ID NO: 145331 - DNA, 25 bp, SARS Virus
tttcgcgttccattttacagattat

SEQ ID NO: 145332 - DNA, 25 bp, SARS Virus
ttcgcgttccactttacagattata

SEQ ID NO: 145333 - DNA, 25 bp, SARS Virus
tcgcgttccactttacagattataa

SEQ ID NO: 145334 - DNA, 25 bp, SARS Virus
cgcgttccactttacagattataaa

SEQ ID NO: 145335 - DNA, 25 bp, SARS Virus
gcgttccacttttcagattataaag

SEQ ID NO: 145336 - DNA, 25 bp, SARS Virus
cgttccactttatagattataaagt

SEQ ID NO: 145337 - DNA, 25 bp, SARS Virus
gttccactttactgattataaagtc

SEQ ID NO: 145338 - DNA, 25 bp, SARS Virus
ttccactttacatattataaagtct

SEQ ID NO: 145339 - DNA, 25 bp, SARS Virus
tccactttacagtttataaagtcta

SEQ ID NO: 145340 - DNA, 25 bp, SARS Virus
ccactttacagattataaagtctac

SEQ ID NO: 145341 - DNA, 25 bp, SARS Virus
cactttacagattataaagtctaca

SEQ ID NO: 145342 - DNA, 25 bp, SARS Virus
actttacagattttaaagtctacaa

SEQ ID NO: 145343 - DNA, 25 bp, SARS Virus
ctttacagattataaagtctacaaa

SEQ ID NO: 145344 - DNA, 25 bp, SARS Virus
tttacagattattaagtctacaaaa

SEQ ID NO: 145345 - DNA, 25 bp, SARS Virus
ttacagattatatagtctacaaaat

SEQ ID NO: 145346 - DNA, 25 bp, SARS Virus
tacagattataatgtctacaaaatc

SEQ ID NO: 145347 - DNA, 25 bp, SARS Virus
acagattataaattctacaaaatcc

SEQ ID NO: 145348 - DNA, 25 bp, SARS Virus
cagattataaagtctacaaaatcct

SEQ ID NO: 145349 - DNA, 25 bp, SARS Virus
agattataaagtttacaaaatccta

SEQ ID NO: 145350 - DNA, 25 bp, SARS Virus
gattataaagtctacaaaatcctag

SEQ ID NO: 145351 - DNA, 25 bp, SARS Virus
attataaagtcttcaaaatcctaga

SEQ ID NO: 145352 - DNA, 25 bp, SARS Virus
ttataaagtctataaaatcctagag

SEQ ID NO: 145353 - DNA, 25 bp, SARS Virus
tataaagtctactaaatcctagagc

SEQ ID NO: 145354 - DNA, 25 bp, SARS Virus
ataaagtctacataatcctagagct

SEQ ID NO: 145355 - DNA, 25 bp, SARS Virus
taaagtctacaatatcctagagctt

SEQ ID NO: 145356 - DNA, 25 bp, SARS Virus
aaagtctacaaattcctagagcttg

SEQ ID NO: 145357 - DNA, 25 bp, SARS Virus
aagtctacaaaatcctagagcttgc

SEQ ID NO: 145358 - DNA, 25 bp, SARS Virus
agtctacaaaattctagagcttgcc

SEQ ID NO: 145359 - DNA, 25 bp, SARS Virus
gtctacaaaatcttagagcttgcct

SEQ ID NO: 145360 - DNA, 25 bp, SARS Virus
tctacaaaatcctagagcttgcctt

SEQ ID NO: 145361 - DNA, 25 bp, SARS Virus
ctacaaaatccttgagcttgcctta

SEQ ID NO: 145362 - DNA, 25 bp, SARS Virus
tacaaaatcctatagcttgccttag

SEQ ID NO: 145363 - DNA, 25 bp, SARS Virus
acaaaatcctagtgcttgccttagt

SEQ ID NO: 145364 - DNA, 25 bp, SARS Virus
caaaatcctagatcttgccttagtc

SEQ ID NO: 145365 - DNA, 25 bp, SARS Virus
aaaatcctagagtttgccttagtca

SEQ ID NO: 145366 - DNA, 25 bp, SARS Virus
aaatcctagagcttgccttagtcac

SEQ ID NO: 145367 - DNA, 25 bp, SARS Virus
aatcctagagcttgccttagtcact

SEQ ID NO: 145368 - DNA, 25 bp, SARS Virus
atcctagagctttccttagtcactt

SEQ ID NO: 145369 - DNA, 25 bp, SARS Virus
tcctagagcttgtcttagtcacttt

SEQ ID NO: 145370 - DNA, 25 bp, SARS Virus
cctagagcttgctttagtcacttta

SEQ ID NO: 145371 - DNA, 25 bp, SARS Virus
ctagagcttgccttagtcactttag

SEQ ID NO: 145372 - DNA, 25 bp, SARS Virus
tagagcttgccttagtcactttagt

SEQ ID NO: 145373 - DNA, 25 bp, SARS Virus
agagcttgcctttgtcactttagtc

SEQ ID NO: 145374 - DNA, 25 bp, SARS Virus
gagcttgccttattcactttagtct

SEQ ID NO: 145375 - DNA, 25 bp, SARS Virus
agcttgccttagtcactttagtctt

SEQ ID NO: 145376 - DNA, 25 bp, SARS Virus
gcttgccttagttactttagtcttt

SEQ ID NO: 145377 - DNA, 25 bp, SARS Virus
cttgccttagtctctttagtctttg

SEQ ID NO: 145378 - DNA, 25 bp, SARS Virus
ttgccttagtcattttagtctttgt

SEQ ID NO: 145379 - DNA, 25 bp, SARS Virus
tgccttagtcactttagtctttgta

SEQ ID NO: 145380 - DNA, 25 bp, SARS Virus
gccttagtcactttagtctttgtag

SEQ ID NO: 145381 - DNA, 25 bp, SARS Virus
ccttagtcactttagtctttgtagt

SEQ ID NO: 145382 - DNA, 25 bp, SARS Virus
cttagtcacttttgtctttgtagtg

SEQ ID NO: 145383 - DNA, 25 bp, SARS Virus
ttagtcactttattctttgtagtgc

SEQ ID NO: 145384 - DNA, 25 bp, SARS Virus
tagtcactttagtctttgtagtgcc

SEQ ID NO: 145385 - DNA, 25 bp, SARS Virus
agtcactttagtttttgtagtgccg

SEQ ID NO: 145386 - DNA, 25 bp, SARS Virus
gtcactttagtctttgtagtgccgg

SEQ ID NO: 145387 - DNA, 25 bp, SARS Virus
tcactttagtctttgtagtgccggt

SEQ ID NO: 145388 - DNA, 25 bp, SARS Virus
cactttagtctttgtagtgccggtt

SEQ ID NO: 145389 - DNA, 25 bp, SARS Virus
actttagtctttttagtgccggttt

SEQ ID NO: 145390 - DNA, 25 bp, SARS Virus
ctttagtctttgtagtgccggttta

SEQ ID NO: 145391 - DNA, 25 bp, SARS Virus
tttagtctttgttgtgccggtttaa

SEQ ID NO: 145392 - DNA, 25 bp, SARS Virus
ttagtctttgtattgccggtttaac

SEQ ID NO: 145393 - DNA, 25 bp, SARS Virus
tagtctttgtagtgccggtttaaca

SEQ ID NO: 145394 - DNA, 25 bp, SARS Virus
agtctttgtagttccggtttaacaa

SEQ ID NO: 145395 - DNA, 25 bp, SARS Virus
gtctttgtagtgtcggtttaacaac

SEQ ID NO: 145396 - DNA, 25 bp, SARS Virus
tctttgtagtgctggtttaacaact

SEQ ID NO: 145397 - DNA, 25 bp, SARS Virus
ctttgtagtgcctgtttaacaactt

SEQ ID NO: 145398 - DNA, 25 bp, SARS Virus
tttgtagtgccgttttaacaacttt

SEQ ID NO: 145399 - DNA, 25 bp, SARS Virus
ttgtagtgccggtttaacaacttta

SEQ ID NO: 145400 - DNA, 25 bp, SARS Virus
tgtagtgccggtttaacaactttac

SEQ ID NO: 145401 - DNA, 25 bp, SARS Virus
gtagtgccggtttaacaactttacc

SEQ ID NO: 145402 - DNA, 25 bp, SARS Virus
tagtgccggttttacaactttacca

SEQ ID NO: 145403 - DNA, 25 bp, SARS Virus
agtgccggtttatcaactttaccaa

SEQ ID NO: 145404 - DNA, 25 bp, SARS Virus
gtgccggtttaataactttaccaac

SEQ ID NO: 145405 - DNA, 25 bp, SARS Virus
tgccggtttaactactttaccaact

SEQ ID NO: 145406 - DNA, 25 bp, SARS Virus
gccggtttaacatctttaccaactt

SEQ ID NO: 145407 - DNA, 25 bp, SARS Virus
ccggtttaacaattttaccaacttt

SEQ ID NO: 145408 - DNA, 25 bp, SARS Virus
cggtttaacaactttaccaacttta

SEQ ID NO: 145409 - DNA, 25 bp, SARS Virus
ggtttaacaactttaccaactttag

SEQ ID NO: 145410 - DNA, 25 bp, SARS Virus
gtttaacaactttaccaactttaga

SEQ ID NO: 145411 - DNA, 25 bp, SARS Virus
tttaacaacttttccaactttagag

SEQ ID NO: 145412 - DNA, 25 bp, SARS Virus
ttaacaactttatcaactttagaga

SEQ ID NO: 145413 - DNA, 25 bp, SARS Virus
taacaactttactaactttagagaa

SEQ ID NO: 145414 - DNA, 25 bp, SARS Virus
aacaactttacctactttagagaaa

SEQ ID NO: 145415 - DNA, 25 bp, SARS Virus
acaactttaccatctttagagaaac

SEQ ID NO: 145416 - DNA, 25 bp, SARS Virus
caactttaccaattttagagaaact

SEQ ID NO: 145417 - DNA, 25 bp, SARS Virus
aactttaccaactttagagaaactt

SEQ ID NO: 145418 - DNA, 25 bp, SARS Virus
actttaccaactttagagaaacttc

SEQ ID NO: 145419 - DNA, 25 bp, SARS Virus
ctttaccaactttagagaaacttct

SEQ ID NO: 145420 - DNA, 25 bp, SARS Virus
tttaccaacttttgagaaacttctt

SEQ ID NO: 145421 - DNA, 25 bp, SARS Virus
ttaccaactttatagaaacttcttc

SEQ ID NO: 145422 - DNA, 25 bp, SARS Virus
taccaactttagtgaaacttcttcc

SEQ ID NO: 145423 - DNA, 25 bp, SARS Virus
accaactttagataaacttcttcct

SEQ ID NO: 145424 - DNA, 25 bp, SARS Virus
ccaactttagagtaacttcttcctc

SEQ ID NO: 145425 - DNA, 25 bp, SARS Virus
caactttagagatacttcttcctca

SEQ ID NO: 145426 - DNA, 25 bp, SARS Virus
aactttagagaatcttcttcctcaa

SEQ ID NO: 145427 - DNA, 25 bp, SARS Virus
actttagagaaatttcttcctcaat

SEQ ID NO: 145428 - DNA, 25 bp, SARS Virus
ctttagagaaacttcttcctcaatt

SEQ ID NO: 145429 - DNA, 25 bp, SARS Virus
tttagagaaacttcttcctcaattg

SEQ ID NO: 145430 - DNA, 25 bp, SARS Virus
ttagagaaactttttcctcaattgt

SEQ ID NO: 145431 - DNA, 25 bp, SARS Virus
tagagaaacttcttcctcaattgtg

SEQ ID NO: 145432 - DNA, 25 bp, SARS Virus
agagaaacttcttcctcaattgtgt

SEQ ID NO: 145433 - DNA, 25 bp, SARS Virus
gagaaacttctttctcaattgtgtg

SEQ ID NO: 145434 - DNA, 25 bp, SARS Virus
agaaacttcttcttcaattgtgtgg

SEQ ID NO: 145435 - DNA, 25 bp, SARS Virus
gaaacttcttcctcaattgtgtggt

SEQ ID NO: 145436 - DNA, 25 bp, SARS Virus
aaacttcttccttaattgtgtggtc

SEQ ID NO: 145437 - DNA, 25 bp, SARS Virus
aacttcttcctctattgtgtggtca

SEQ ID NO: 145438 - DNA, 25 bp, SARS Virus
acttcttcctcatttgtgtggtcat

SEQ ID NO: 145439 - DNA, 25 bp, SARS Virus
cttcttcctcaattgtgtggtcatg

SEQ ID NO: 145440 - DNA, 25 bp, SARS Virus
ttcttcctcaattgtgtggtcatgg

SEQ ID NO: 145441 - DNA, 25 bp, SARS Virus
tcttcctcaattttgtggtcatggt

SEQ ID NO: 145442 - DNA, 25 bp, SARS Virus
cttcctcaattgtgtggtcatggtc

SEQ ID NO: 145443 - DNA, 25 bp, SARS Virus
ttcctcaattgtttggtcatggtca

SEQ ID NO: 145444 - DNA, 25 bp, SARS Virus
tcctcaattgtgtggtcatggtcac

SEQ ID NO: 145445 - DNA, 25 bp, SARS Virus
cctcaattgtgttgtcatggtcact

SEQ ID NO: 145446 - DNA, 25 bp, SARS Virus
ctcaattgtgtgttcatggtcactc

SEQ ID NO: 145447 - DNA, 25 bp, SARS Virus
tcaattgtgtggtcatggtcactca

SEQ ID NO: 145448 - DNA, 25 bp, SARS Virus
caattgtgtggttatggtcactcag

SEQ ID NO: 145449 - DNA, 25 bp, SARS Virus
aattgtgtggtcttggtcactcagg

SEQ ID NO: 145450 - DNA, 25 bp, SARS Virus
attgtgtggtcatggtcactcaggt

SEQ ID NO: 145451 - DNA, 25 bp, SARS Virus
ttgtgtggtcattgtcactcaggta

SEQ ID NO: 145452 - DNA, 25 bp, SARS Virus
tgtgtggtcatgttcactcaggtaa

SEQ ID NO: 145453 - DNA, 25 bp, SARS Virus
gtgtggtcatggtcactcaggtaat

SEQ ID NO: 145454 - DNA, 25 bp, SARS Virus
tgtggtcatggttactcaggtaatt

SEQ ID NO: 145455 - DNA, 25 bp, SARS Virus
gtggtcatggtctctcaggtaattt

SEQ ID NO: 145456 - DNA, 25 bp, SARS Virus
tggtcatggtcattcaggtaatttt

SEQ ID NO: 145457 - DNA, 25 bp, SARS Virus
ggtcatggtcacacaggtaatttta

SEQ ID NO: 145458 - DNA, 25 bp, SARS Virus
gtcatggtcactaaggtaattttaa

SEQ ID NO: 145459 - DNA, 25 bp, SARS Virus
tcatggtcactcaggtaattttaat

SEQ ID NO: 145460 - DNA, 25 bp, SARS Virus
catggtcactcaagtaattttaatt

SEQ ID NO: 145461 - DNA, 25 bp, SARS Virus
atggtcactcagataattttaattt

SEQ ID NO: 145462 - DNA, 25 bp, SARS Virus
tggtcactcaggaaattttaatttt

SEQ ID NO: 145463 - DNA, 25 bp, SARS Virus
ggtcactcaggtaattttaatttta

SEQ ID NO: 145464 - DNA, 25 bp, SARS Virus
gtcactcaggtaattttaattttaa

SEQ ID NO: 145465 - DNA, 25 bp, SARS Virus
tcactcaggtaaatttaattttaac

SEQ ID NO: 145466 - DNA, 25 bp, SARS Virus
cactcaggtaatattaattttaact

SEQ ID NO: 145467 - DNA, 25 bp, SARS Virus
actcaggtaattataattttaactg

SEQ ID NO: 145468 - DNA, 25 bp, SARS Virus
ctcaggtaatttaaattttaactgt

SEQ ID NO: 145469 - DNA, 25 bp, SARS Virus
tcaggtaattttaattttaactgtg

SEQ ID NO: 145470 - DNA, 25 bp, SARS Virus
caggtaattttaattttaactgtgt

SEQ ID NO: 145471 - DNA, 25 bp, SARS Virus
aggtaattttaaatttaactgtgtg

SEQ ID NO: 145472 - DNA, 25 bp, SARS Virus
ggtaattttaatattaactgtgtga

SEQ ID NO: 145473 - DNA, 25 bp, SARS Virus
gtaattttaattataactgtgtgac

SEQ ID NO: 145474 - DNA, 25 bp, SARS Virus
taattttaatttaaactgtgtgacc

SEQ ID NO: 145475 - DNA, 25 bp, SARS Virus
aattttaattttaactgtgtgacca

SEQ ID NO: 145476 - DNA, 25 bp, SARS Virus
attttaattttaactgtgtgaccaa

SEQ ID NO: 145477 - DNA, 25 bp, SARS Virus
ttttaattttaaatgtgtgaccaag

SEQ ID NO: 145478 - DNA, 25 bp, SARS Virus
tttaattttaacagtgtgaccaaga

SEQ ID NO: 145479 - DNA, 25 bp, SARS Virus
ttaattttaactatgtgaccaagaa

SEQ ID NO: 145480 - DNA, 25 bp, SARS Virus
taattttaactgagtgaccaagaat

SEQ ID NO: 145481 - DNA, 25 bp, SARS Virus
aattttaactgtatgaccaagaatt

SEQ ID NO: 145482 - DNA, 25 bp, SARS Virus
attttaactgtgagaccaagaatta

SEQ ID NO: 145483 - DNA, 25 bp, SARS Virus
ttttaactgtgtaaccaagaattat

SEQ ID NO: 145484 - DNA, 25 bp, SARS Virus
tttaactgtgtgaccaagaattatt

SEQ ID NO: 145485 - DNA, 25 bp, SARS Virus
ttaactgtgtgaacaagaattattc

SEQ ID NO: 145486 - DNA, 25 bp, SARS Virus
taactgtgtgacaaagaattattcc

SEQ ID NO: 145487 - DNA, 25 bp, SARS Virus
aactgtgtgaccaagaattattcca

SEQ ID NO: 145488 - DNA, 25 bp, SARS Virus
actgtgtgaccaagaattattccag

SEQ ID NO: 145489 - DNA, 25 bp, SARS Virus
ctgtgtgaccaaaaattattccagt

SEQ ID NO: 145490 - DNA, 25 bp, SARS Virus
tgtgtgaccaagaattattccagtc

SEQ ID NO: 145491 - DNA, 25 bp, SARS Virus
gtgtgaccaagaattattccagtca

SEQ ID NO: 145492 - DNA, 25 bp, SARS Virus
tgtgaccaagaaatattccagtcac

SEQ ID NO: 145493 - DNA, 25 bp, SARS Virus
gtgaccaagaataattccagtcacc

SEQ ID NO: 145494 - DNA, 25 bp, SARS Virus
tgaccaagaattattccagtcacct

SEQ ID NO: 145495 - DNA, 25 bp, SARS Virus
gaccaagaattaatccagtcaccta

SEQ ID NO: 145496 - DNA, 25 bp, SARS Virus
accaagaattataccagtcacctat

SEQ ID NO: 145497 - DNA, 25 bp, SARS Virus
ccaagaattattacagtcacctatt

SEQ ID NO: 145498 - DNA, 25 bp, SARS Virus
caagaattattcaagtcacctatta

SEQ ID NO: 145499 - DNA, 25 bp, SARS Virus
aagaattattccagtcacctattaa

SEQ ID NO: 145500 - DNA, 25 bp, SARS Virus
agaattattccaatcacctattaaa

SEQ ID NO: 145501 - DNA, 25 bp, SARS Virus
gaattattccagacacctattaaaa

SEQ ID NO: 145502 - DNA, 25 bp, SARS Virus
aattattccagtaacctattaaaac

SEQ ID NO: 145503 - DNA, 25 bp, SARS Virus
attattccagtcacctattaaaacc

SEQ ID NO: 145504 - DNA, 25 bp, SARS Virus
ttattccagtcaactattaaaacca

SEQ ID NO: 145505 - DNA, 25 bp, SARS Virus
tattccagtcacatattaaaaccag

SEQ ID NO: 145506 - DNA, 25 bp, SARS Virus
attccagtcaccaattaaaaccagg

SEQ ID NO: 145507 - DNA, 25 bp, SARS Virus
ttccagtcacctattaaaaccaggt

SEQ ID NO: 145508 - DNA, 25 bp, SARS Virus
tccagtcacctaataaaaccaggtg

SEQ ID NO: 145509 - DNA, 25 bp, SARS Virus
ccagtcacctataaaaaccaggtgt

SEQ ID NO: 145510 - DNA, 25 bp, SARS Virus
cagtcacctattaaaaccaggtgtt

SEQ ID NO: 145511 - DNA, 25 bp, SARS Virus
agtcacctattaaaaccaggtgttt

SEQ ID NO: 145512 - DNA, 25 bp, SARS Virus
gtcacctattaaaaccaggtgtttg

SEQ ID NO: 145513 - DNA, 25 bp, SARS Virus
tcacctattaaaaccaggtgtttgg

SEQ ID NO: 145514 - DNA, 25 bp, SARS Virus
cacctattaaaaacaggtgtttggc

SEQ ID NO: 145515 - DNA, 25 bp, SARS Virus
acctattaaaacaaggtgtttggca

SEQ ID NO: 145516 - DNA, 25 bp, SARS Virus
cctattaaaaccaggtgtttggcac

SEQ ID NO: 145517 - DNA, 25 bp, SARS Virus
ctattaaaaccaagtgtttggcacc

SEQ ID NO: 145518 - DNA, 25 bp, SARS Virus
tattaaaaccagatgtttggcaccg

SEQ ID NO: 145519 - DNA, 25 bp, SARS Virus
attaaaaccaggagtttggcaccgg

SEQ ID NO: 145520 - DNA, 25 bp, SARS Virus
ttaaaaccaggtatttggcaccggc

SEQ ID NO: 145521 - DNA, 25 bp, SARS Virus
taaaaccaggtgattggcaccggcc

SEQ ID NO: 145522 - DNA, 25 bp, SARS Virus
aaaaccaggtgtatggcaccggcca

SEQ ID NO: 145523 - DNA, 25 bp, SARS Virus
aaaccaggtgttaggcaccggccac

SEQ ID NO: 145524 - DNA, 25 bp, SARS Virus
aaccaggtgtttagcaccggccacg

SEQ ID NO: 145525 - DNA, 25 bp, SARS Virus
accaggtgtttgacaccggccacgt

SEQ ID NO: 145526 - DNA, 25 bp, SARS Virus
ccaggtgtttggaaccggccacgta

SEQ ID NO: 145527 - DNA, 25 bp, SARS Virus
caggtgtttggcaccggccacgtaa

SEQ ID NO: 145528 - DNA, 25 bp, SARS Virus
aggtgtttggcaacggccacgtaaa

SEQ ID NO: 145529 - DNA, 25 bp, SARS Virus
ggtgtttggcacaggccacgtaaat

SEQ ID NO: 145530 - DNA, 25 bp, SARS Virus
gtgtttggcaccagccacgtaaatt

SEQ ID NO: 145531 - DNA, 25 bp, SARS Virus
tgtttggcaccgaccacgtaaattt

SEQ ID NO: 145532 - DNA, 25 bp, SARS Virus
gtttggcaccggacacgtaaatttt

SEQ ID NO: 145533 - DNA, 25 bp, SARS Virus
tttggcaccggcaacgtaaattttc

SEQ ID NO: 145534 - DNA, 25 bp, SARS Virus
ttggcaccggccacgtaaattttca

SEQ ID NO: 145535 - DNA, 25 bp, SARS Virus
tggcaccggccaagtaaattttcaa

SEQ ID NO: 145536 - DNA, 25 bp, SARS Virus
ggcaccggccacataaattttcaag

SEQ ID NO: 145537 - DNA, 25 bp, SARS Virus
gcaccggccacgaaaattttcaagt

SEQ ID NO: 145538 - DNA, 25 bp, SARS Virus
caccggccacgtaaattttcaagtt

SEQ ID NO: 145539 - DNA, 25 bp, SARS Virus
accggccacgtaaattttcaagttt

SEQ ID NO: 145540 - DNA, 25 bp, SARS Virus
ccggccacgtaaattttcaagtttt

SEQ ID NO: 145541 - DNA, 25 bp, SARS Virus
cggccacgtaaaatttcaagttttc

SEQ ID NO: 145542 - DNA, 25 bp, SARS Virus
ggccacgtaaatattcaagttttct

SEQ ID NO: 145543 - DNA, 25 bp, SARS Virus
gccacgtaaattatcaagttttctt

SEQ ID NO: 145544 - DNA, 25 bp, SARS Virus
ccacgtaaatttacaagttttcttt

SEQ ID NO: 145545 - DNA, 25 bp, SARS Virus
cacgtaaattttaaagttttctttc

SEQ ID NO: 145546 - DNA, 25 bp, SARS Virus
acgtaaattttcaagttttctttca

SEQ ID NO: 145547 - DNA, 25 bp, SARS Virus
cgtaaattttcaagttttctttcat

SEQ ID NO: 145548 - DNA, 25 bp, SARS Virus
gtaaattttcaaattttctttcatg

SEQ ID NO: 145549 - DNA, 25 bp, SARS Virus
taaattttcaagatttctttcatga

SEQ ID NO: 145550 - DNA, 25 bp, SARS Virus
aaattttcaagtattctttcatgat

SEQ ID NO: 145551 - DNA, 25 bp, SARS Virus
aattttcaagttatctttcatgatg

SEQ ID NO: 145552 - DNA, 25 bp, SARS Virus
attttcaagtttactttcatgatgt

SEQ ID NO: 145553 - DNA, 25 bp, SARS Virus
ttttcaagttttatttcatgatgtt

SEQ ID NO: 145554 - DNA, 25 bp, SARS Virus
tttcaagttttcattcatgatgttg

SEQ ID NO: 145555 - DNA, 25 bp, SARS Virus
ttcaagttttctatcatgatgttga

SEQ ID NO: 145556 - DNA, 25 bp, SARS Virus
tcaagttttcttacatgatgttgag

SEQ ID NO: 145557 - DNA, 25 bp, SARS Virus
caagttttctttaatgatgttgaga

SEQ ID NO: 145558 - DNA, 25 bp, SARS Virus
aagttttctttcatgatgttgagac

SEQ ID NO: 145559 - DNA, 25 bp, SARS Virus
agttttctttcaagatgttgagaca

SEQ ID NO: 145560 - DNA, 25 bp, SARS Virus
gttttctttcataatgttgagacat

SEQ ID NO: 145561 - DNA, 25 bp, SARS Virus
ttttctttcatgatgttgagacatt

SEQ ID NO: 145562 - DNA, 25 bp, SARS Virus
tttctttcatgaagttgagacattc

SEQ ID NO: 145563 - DNA, 25 bp, SARS Virus
ttctttcatgatattgagacattcc

SEQ ID NO: 145564 - DNA, 25 bp, SARS Virus
tctttcatgatgatgagacattcca

SEQ ID NO: 145565 - DNA, 25 bp, SARS Virus
ctttcatgatgtagagacattccaa

SEQ ID NO: 145566 - DNA, 25 bp, SARS Virus
tttcatgatgttaagacattccaac

SEQ ID NO: 145567 - DNA, 25 bp, SARS Virus
ttcatgatgttgagacattccaacc

SEQ ID NO: 145568 - DNA, 25 bp, SARS Virus
tcatgatgttgaaacattccaacca

SEQ ID NO: 145569 - DNA, 25 bp, SARS Virus
catgatgttgagacattccaaccat

SEQ ID NO: 145570 - DNA, 25 bp, SARS Virus
atgatgttgagaaattccaaccatc

SEQ ID NO: 145571 - DNA, 25 bp, SARS Virus
tgatgttgagacattccaaccatcg

SEQ ID NO: 145572 - DNA, 25 bp, SARS Virus
gatgttgagacaatccaaccatcgg

SEQ ID NO: 145573 - DNA, 25 bp, SARS Virus
atgttgagacataccaaccatcggt

SEQ ID NO: 145574 - DNA, 25 bp, SARS Virus
tgttgagacattacaaccatcggtt

SEQ ID NO: 145575 - DNA, 25 bp, SARS Virus
gttgagacattcaaaccatcggtta

SEQ ID NO: 145576 - DNA, 25 bp, SARS Virus
ttgagacattccaaccatcggttac

SEQ ID NO: 145577 - DNA, 25 bp, SARS Virus
tgagacattccaaccatcggttacg

SEQ ID NO: 145578 - DNA, 25 bp, SARS Virus
gagacattccaaacatcggttacgg

SEQ ID NO: 145579 - DNA, 25 bp, SARS Virus
agacattccaacaatcggttacggt

SEQ ID NO: 145580 - DNA, 25 bp, SARS Virus
gacattccaaccatcggttacggtc

SEQ ID NO: 145581 - DNA, 25 bp, SARS Virus
acattccaaccaacggttacggtca

SEQ ID NO: 145582 - DNA, 25 bp, SARS Virus
cattccaaccataggttacggtcat

SEQ ID NO: 145583 - DNA, 25 bp, SARS Virus
attccaaccatcagttacggtcatc

SEQ ID NO: 145584 - DNA, 25 bp, SARS Virus
ttccaaccatcgattacggtcatca

SEQ ID NO: 145585 - DNA, 25 bp, SARS Virus
tccaaccatcggatacggtcatcac

SEQ ID NO: 145586 - DNA, 25 bp, SARS Virus
ccaaccatcggtaacggtcatcacc

SEQ ID NO: 145587 - DNA, 25 bp, SARS Virus
caaccatcggttacggtcatcacca

SEQ ID NO: 145588 - DNA, 25 bp, SARS Virus
aaccatcggttaaggtcatcaccac

SEQ ID NO: 145589 - DNA, 25 bp, SARS Virus
accatcggttacagtcatcaccaca

SEQ ID NO: 145590 - DNA, 25 bp, SARS Virus
ccatcggttacgatcatcaccacat

SEQ ID NO: 145591 - DNA, 25 bp, SARS Virus
catcggttacggacatcaccacatt

SEQ ID NO: 145592 - DNA, 25 bp, SARS Virus
atcggttacggtaatcaccacattt

SEQ ID NO: 145593 - DNA, 25 bp, SARS Virus
tcggttacggtcatcaccacatttt

SEQ ID NO: 145594 - DNA, 25 bp, SARS Virus
cggttacggtcaacaccacattttt

SEQ ID NO: 145595 - DNA, 25 bp, SARS Virus
ggttacggtcataaccacatttttg

SEQ ID NO: 145596 - DNA, 25 bp, SARS Virus
gttacggtcatcaccacatttttgg

SEQ ID NO: 145597 - DNA, 25 bp, SARS Virus
ttacggtcatcaacacatttttggt

SEQ ID NO: 145598 - DNA, 25 bp, SARS Virus
tacggtcatcacaacatttttggta

SEQ ID NO: 145599 - DNA, 25 bp, SARS Virus
acggtcatcaccacatttttggtat

SEQ ID NO: 145600 - DNA, 25 bp, SARS Virus
cggtcatcaccaaatttttggtatt

SEQ ID NO: 145601 - DNA, 25 bp, SARS Virus
ggtcatcaccacatttttggtatta

SEQ ID NO: 145602 - DNA, 25 bp, SARS Virus
gtcatcaccacaattttggtattag

SEQ ID NO: 145603 - DNA, 25 bp, SARS Virus
tcatcaccacatatttggtattagt

SEQ ID NO: 145604 - DNA, 25 bp, SARS Virus
catcaccacattattggtattagta

SEQ ID NO: 145605 - DNA, 25 bp, SARS Virus
atcaccacatttatggtattagtaa

SEQ ID NO: 145606 - DNA, 25 bp, SARS Virus
tcaccacattttaggtattagtaaa

SEQ ID NO: 145607 - DNA, 25 bp, SARS Virus
caccacatttttagtattagtaaat

SEQ ID NO: 145608 - DNA, 25 bp, SARS Virus
accacatttttgatattagtaaatt

SEQ ID NO: 145609 - DNA, 25 bp, SARS Virus
ccacatttttggaattagtaaatta

SEQ ID NO: 145610 - DNA, 25 bp, SARS Virus
cacatttttggtattagtaaattac

SEQ ID NO: 145611 - DNA, 25 bp, SARS Virus
acatttttggtaatagtaaattacc

SEQ ID NO: 145612 - DNA, 25 bp, SARS Virus
catttttggtataagtaaattaccg

SEQ ID NO: 145613 - DNA, 25 bp, SARS Virus
atttttggtattagtaaattaccgg

SEQ ID NO: 145614 - DNA, 25 bp, SARS Virus
tttttggtattaataaattaccggt

SEQ ID NO: 145615 - DNA, 25 bp, SARS Virus
ttttggtattagaaaattaccggtt

SEQ ID NO: 145616 - DNA, 25 bp, SARS Virus
tttggtattagtaaattaccggtta

SEQ ID NO: 145617 - DNA, 25 bp, SARS Virus
ttggtattagtaaattaccggttat

SEQ ID NO: 145618 - DNA, 25 bp, SARS Virus
tggtattagtaaattaccggttatt

SEQ ID NO: 145619 - DNA, 25 bp, SARS Virus
ggtattagtaaaataccggttattg

SEQ ID NO: 145620 - DNA, 25 bp, SARS Virus
gtattagtaaataaccggttattgt

SEQ ID NO: 145621 - DNA, 25 bp, SARS Virus
tattagtaaattaccggttattgtt

SEQ ID NO: 145622 - DNA, 25 bp, SARS Virus
attagtaaattaacggttattgtta

SEQ ID NO: 145623 - DNA, 25 bp, SARS Virus
ttagtaaattacaggttattgttaa

SEQ ID NO: 145624 - DNA, 25 bp, SARS Virus
tagtaaattaccagttattgttaat

SEQ ID NO: 145625 - DNA, 25 bp, SARS Virus
agtaaattaccgattattgttaatt

SEQ ID NO: 145626 - DNA, 25 bp, SARS Virus
gtaaattaccggatattgttaattc

SEQ ID NO: 145627 - DNA, 25 bp, SARS Virus
taaattaccggtaattgttaattct

SEQ ID NO: 145628 - DNA, 25 bp, SARS Virus
aaattaccggttattgttaattctc

SEQ ID NO: 145629 - DNA, 25 bp, SARS Virus
aattaccggttaatgttaattctcg

SEQ ID NO: 145630 - DNA, 25 bp, SARS Virus
attaccggttatagttaattctcgt

SEQ ID NO: 145631 - DNA, 25 bp, SARS Virus
ttaccggttattattaattctcgtc

SEQ ID NO: 145632 - DNA, 25 bp, SARS Virus
taccggttattgataattctcgtcc

SEQ ID NO: 145633 - DNA, 25 bp, SARS Virus
accggttattgtaaattctcgtcca

SEQ ID NO: 145634 - DNA, 25 bp, SARS Virus
ccggttattgttaattctcgtccac

SEQ ID NO: 145635 - DNA, 25 bp, SARS Virus
cggttattgttaattctcgtccacc

SEQ ID NO: 145636 - DNA, 25 bp, SARS Virus
ggttattgttaaatctcgtccaccc

SEQ ID NO: 145637 - DNA, 25 bp, SARS Virus
gttattgttaatactcgtccacccc

SEQ ID NO: 145638 - DNA, 25 bp, SARS Virus
ttattgttaattatcgtccacccca

SEQ ID NO: 145639 - DNA, 25 bp, SARS Virus
tattgttaattcacgtccaccccac

SEQ ID NO: 145640 - DNA, 25 bp, SARS Virus
attgttaattctagtccaccccacg

SEQ ID NO: 145641 - DNA, 25 bp, SARS Virus
ttgttaattctcatccaccccacgt

SEQ ID NO: 145642 - DNA, 25 bp, SARS Virus
tgttaattctcgaccaccccacgtt

SEQ ID NO: 145643 - DNA, 25 bp, SARS Virus
gttaattctcgtacaccccacgttc

SEQ ID NO: 145644 - DNA, 25 bp, SARS Virus
ttaattctcgtcaaccccacgttcc

SEQ ID NO: 145645 - DNA, 25 bp, SARS Virus
taattctcgtccaccccacgttcca

SEQ ID NO: 145646 - DNA, 25 bp, SARS Virus
aattctcgtccaacccacgttccaa

SEQ ID NO: 145647 - DNA, 25 bp, SARS Virus
attctcgtccacaccacgttccaaa

SEQ ID NO: 145648 - DNA, 25 bp, SARS Virus
ttctcgtccaccacacgttccaaac

SEQ ID NO: 145649 - DNA, 25 bp, SARS Virus
tctcgtccacccaacgttccaaacg

SEQ ID NO: 145650 - DNA, 25 bp, SARS Virus
ctcgtccaccccacgttccaaacgg

SEQ ID NO: 145651 - DNA, 25 bp, SARS Virus
tcgtccaccccaagttccaaacggt

SEQ ID NO: 145652 - DNA, 25 bp, SARS Virus
cgtccaccccacattccaaacggta

SEQ ID NO: 145653 - DNA, 25 bp, SARS Virus
gtccaccccacgatccaaacggtag

SEQ ID NO: 145654 - DNA, 25 bp, SARS Virus
tccaccccacgtaccaaacggtagt

SEQ ID NO: 145655 - DNA, 25 bp, SARS Virus
ccaccccacgttacaaacggtagtc

SEQ ID NO: 145656 - DNA, 25 bp, SARS Virus
caccccacgttcaaaacggtagtcc

SEQ ID NO: 145657 - DNA, 25 bp, SARS Virus
accccacgttccaaacggtagtccc

SEQ ID NO: 145658 - DNA, 25 bp, SARS Virus
ccccacgttccaaacggtagtcccc

SEQ ID NO: 145659 - DNA, 25 bp, SARS Virus
cccacgttccaaacggtagtcccct

SEQ ID NO: 145660 - DNA, 25 bp, SARS Virus
ccacgttccaaaaggtagtcccctc

SEQ ID NO: 145661 - DNA, 25 bp, SARS Virus
cacgttccaaacagtagtcccctct

SEQ ID NO: 145662 - DNA, 25 bp, SARS Virus
acgttccaaacgatagtcccctctt

SEQ ID NO: 145663 - DNA, 25 bp, SARS Virus
cgttccaaacggaagtcccctcttt

SEQ ID NO: 145664 - DNA, 25 bp, SARS Virus
gttccaaacggtagtcccctctttc

SEQ ID NO: 145665 - DNA, 25 bp, SARS Virus
ttccaaacggtaatcccctctttcc

SEQ ID NO: 145666 - DNA, 25 bp, SARS Virus
tccaaacggtagacccctctttccg

SEQ ID NO: 145667 - DNA, 25 bp, SARS Virus
ccaaacggtagtaccctctttccgt

SEQ ID NO: 145668 - DNA, 25 bp, SARS Virus
caaacggtagtcacctctttccgtg

SEQ ID NO: 145669 - DNA, 25 bp, SARS Virus
aaacggtagtccactctttccgtgt

SEQ ID NO: 145670 - DNA, 25 bp, SARS Virus
aacggtagtcccatctttccgtgta

SEQ ID NO: 145671 - DNA, 25 bp, SARS Virus
acggtagtccccactttccgtgtaa

SEQ ID NO: 145672 - DNA, 25 bp, SARS Virus
cggtagtcccctatttccgtgtaat

SEQ ID NO: 145673 - DNA, 25 bp, SARS Virus
ggtagtcccctcattccgtgtaatc

SEQ ID NO: 145674 - DNA, 25 bp, SARS Virus
gtagtcccctctatccgtgtaatct

SEQ ID NO: 145675 - DNA, 25 bp, SARS Virus
tagtcccctcttaccgtgtaatcta

SEQ ID NO: 145676 - DNA, 25 bp, SARS Virus
agtcccctctttacgtgtaatctat

SEQ ID NO: 145677 - DNA, 25 bp, SARS Virus
gtcccctctttcagtgtaatctata

SEQ ID NO: 145678 - DNA, 25 bp, SARS Virus
tcccctctttccatgtaatctatac

SEQ ID NO: 145679 - DNA, 25 bp, SARS Virus
cccctctttccgagtaatctataca

SEQ ID NO: 145680 - DNA, 25 bp, SARS Virus
ccctctttccgtataatctatacag

SEQ ID NO: 145681 - DNA, 25 bp, SARS Virus
cctctttccgtgaaatctatacaga

SEQ ID NO: 145682 - DNA, 25 bp, SARS Virus
ctctttccgtgtaatctatacagag

SEQ ID NO: 145683 - DNA, 25 bp, SARS Virus
tctttccgtgtaatctatacagaga

SEQ ID NO: 145684 - DNA, 25 bp, SARS Virus
ctttccgtgtaaactatacagagag

SEQ ID NO: 145685 - DNA, 25 bp, SARS Virus
tttccgtgtaatatatacagagaga

SEQ ID NO: 145686 - DNA, 25 bp, SARS Virus
ttccgtgtaatcaatacagagagag

SEQ ID NO: 145687 - DNA, 25 bp, SARS Virus
tccgtgtaatctatacagagagagt

SEQ ID NO: 145688 - DNA, 25 bp, SARS Virus
ccgtgtaatctaaacagagagagtt

SEQ ID NO: 145689 - DNA, 25 bp, SARS Virus
cgtgtaatctatacagagagagttt

SEQ ID NO: 145690 - DNA, 25 bp, SARS Virus
gtgtaatctataaagagagagtttc

SEQ ID NO: 145691 - DNA, 25 bp, SARS Virus
tgtaatctatacagagagagtttcc

SEQ ID NO: 145692 - DNA, 25 bp, SARS Virus
gtaatctatacaaagagagtttccc

SEQ ID NO: 145693 - DNA, 25 bp, SARS Virus
taatctatacagagagagtttcccg

SEQ ID NO: 145694 - DNA, 25 bp, SARS Virus
aatctatacagaaagagtttcccgg

SEQ ID NO: 145695 - DNA, 25 bp, SARS Virus
atctatacagagagagtttcccgga

SEQ ID NO: 145696 - DNA, 25 bp, SARS Virus
tctatacagagaaagtttcccggat

SEQ ID NO: 145697 - DNA, 25 bp, SARS Virus
ctatacagagagagtttcccggatt

SEQ ID NO: 145698 - DNA, 25 bp, SARS Virus
tatacagagagaatttcccggattc

SEQ ID NO: 145699 - DNA, 25 bp, SARS Virus
atacagagagagattcccggattcg

SEQ ID NO: 145700 - DNA, 25 bp, SARS Virus
tacagagagagtatcccggattcga

SEQ ID NO: 145701 - DNA, 25 bp, SARS Virus
acagagagagttacccggattcgaa

SEQ ID NO: 145702 - DNA, 25 bp, SARS Virus
cagagagagtttaccggattcgaac

SEQ ID NO: 145703 - DNA, 25 bp, SARS Virus
agagagagtttcacggattcgaacg

SEQ ID NO: 145704 - DNA, 25 bp, SARS Virus
gagagagtttccaggattcgaacgg

SEQ ID NO: 145705 - DNA, 25 bp, SARS Virus
agagagtttcccagattcgaacggt

SEQ ID NO: 145706 - DNA, 25 bp, SARS Virus
gagagtttcccgaattcgaacggta

SEQ ID NO: 145707 - DNA, 25 bp, SARS Virus
agagtttcccggattcgaacggtac

SEQ ID NO: 145708 - DNA, 25 bp, SARS Virus
gagtttcccggaatcgaacggtaca

SEQ ID NO: 145709 - DNA, 25 bp, SARS Virus
agtttcccggatacgaacggtacag

SEQ ID NO: 145710 - DNA, 25 bp, SARS Virus
gtttcccggattagaacggtacaga

SEQ ID NO: 145711 - DNA, 25 bp, SARS Virus
tttcccggattcaaacggtacagat

SEQ ID NO: 145712 - DNA, 25 bp, SARS Virus
ttcccggattcgaacggtacagatt

SEQ ID NO: 145713 - DNA, 25 bp, SARS Virus
tcccggattcgaacggtacagattc

SEQ ID NO: 145714 - DNA, 25 bp, SARS Virus
cccggattcgaaaggtacagattct

SEQ ID NO: 145715 - DNA, 25 bp, SARS Virus
ccggattcgaacagtacagattcta

SEQ ID NO: 145716 - DNA, 25 bp, SARS Virus
cggattcgaacgatacagattctat

SEQ ID NO: 145717 - DNA, 25 bp, SARS Virus
ggattcgaacggaacagattctatg

SEQ ID NO: 145718 - DNA, 25 bp, SARS Virus
gattcgaacggtacagattctatgg

SEQ ID NO: 145719 - DNA, 25 bp, SARS Virus
attcgaacggtaaagattctatgga

SEQ ID NO: 145720 - DNA, 25 bp, SARS Virus
ttcgaacggtacagattctatggat

SEQ ID NO: 145721 - DNA, 25 bp, SARS Virus
tcgaacggtacaaattctatggata

SEQ ID NO: 145722 - DNA, 25 bp, SARS Virus
cgaacggtacagattctatggatat

SEQ ID NO: 145723 - DNA, 25 bp, SARS Virus
gaacggtacagaatctatggatata

SEQ ID NO: 145724 - DNA, 25 bp, SARS Virus
aacggtacagatactatggatataa

SEQ ID NO: 145725 - DNA, 25 bp, SARS Virus
acggtacagattatatggatataaa

SEQ ID NO: 145726 - DNA, 25 bp, SARS Virus
cggtacagattcaatggatataaat

SEQ ID NO: 145727 - DNA, 25 bp, SARS Virus
ggtacagattctatggatataaata

SEQ ID NO: 145728 - DNA, 25 bp, SARS Virus
gtacagattctaaggatataaatat

SEQ ID NO: 145729 - DNA, 25 bp, SARS Virus
tacagattctatagatataaatatt

SEQ ID NO: 145730 - DNA, 25 bp, SARS Virus
acagattctatgaatataaatatta

SEQ ID NO: 145731 - DNA, 25 bp, SARS Virus
cagattctatggatataaatattaa

SEQ ID NO: 145732 - DNA, 25 bp, SARS Virus
agattctatggaaataaatattaat

SEQ ID NO: 145733 - DNA, 25 bp, SARS Virus
gattctatggatataaatattaata

SEQ ID NO: 145734 - DNA, 25 bp, SARS Virus
attctatggataaaaatattaatat

SEQ ID NO: 145735 - DNA, 25 bp, SARS Virus
ttctatggatataaatattaatatt

SEQ ID NO: 145736 - DNA, 25 bp, SARS Virus
tctatggatataaatattaatatta

SEQ ID NO: 145737 - DNA, 25 bp, SARS Virus
ctatggatataaatattaatattaa

SEQ ID NO: 145738 - DNA, 25 bp, SARS Virus
tatggatataaaaattaatattaat

SEQ ID NO: 145739 - DNA, 25 bp, SARS Virus
atggatataaatattaatattaatg

SEQ ID NO: 145740 - DNA, 25 bp, SARS Virus
tggatataaataataatattaatgg

SEQ ID NO: 145741 - DNA, 25 bp, SARS Virus
ggatataaatataaatattaatggt

SEQ ID NO: 145742 - DNA, 25 bp, SARS Virus
gatataaatattaatattaatggtc

SEQ ID NO: 145743 - DNA, 25 bp, SARS Virus
atataaatattaatattaatggtca

SEQ ID NO: 145744 - DNA, 25 bp, SARS Virus
tataaatattaaaattaatggtcaa

SEQ ID NO: 145745 - DNA, 25 bp, SARS Virus
ataaatattaatattaatggtcaac

SEQ ID NO: 145746 - DNA, 25 bp, SARS Virus
taaatattaataataatggtcaact

SEQ ID NO: 145747 - DNA, 25 bp, SARS Virus
aaatattaatataaatggtcaactt

SEQ ID NO: 145748 - DNA, 25 bp, SARS Virus
aatattaatattaatggtcaacttc

SEQ ID NO: 145749 - DNA, 25 bp, SARS Virus
atattaatattaatggtcaacttca

SEQ ID NO: 145750 - DNA, 25 bp, SARS Virus
tattaatattaaaggtcaacttcat

SEQ ID NO: 145751 - DNA, 25 bp, SARS Virus
attaatattaatagtcaacttcatc

SEQ ID NO: 145752 - DNA, 25 bp, SARS Virus
ttaatattaatgatcaacttcatcg

SEQ ID NO: 145753 - DNA, 25 bp, SARS Virus
taatattaatggacaacttcatcgt

SEQ ID NO: 145754 - DNA, 25 bp, SARS Virus
aatattaatggtaaacttcatcgta

SEQ ID NO: 145755 - DNA, 25 bp, SARS Virus
atattaatggtcaacttcatcgtag

SEQ ID NO: 145756 - DNA, 25 bp, SARS Virus
tattaatggtcaacttcatcgtagt

SEQ ID NO: 145757 - DNA, 25 bp, SARS Virus
attaatggtcaaattcatcgtagtt

SEQ ID NO: 145758 - DNA, 25 bp, SARS Virus
ttaatggtcaacatcatcgtagtta

SEQ ID NO: 145759 - DNA, 25 bp, SARS Virus
taatggtcaactacatcgtagttac

SEQ ID NO: 145760 - DNA, 25 bp, SARS Virus
aatggtcaacttaatcgtagttaca

SEQ ID NO: 145761 - DNA, 25 bp, SARS Virus
atggtcaacttcatcgtagttacaa

SEQ ID NO: 145762 - DNA, 25 bp, SARS Virus
tggtcaacttcaacgtagttacaag

SEQ ID NO: 145763 - DNA, 25 bp, SARS Virus
ggtcaacttcatagtagttacaagg

SEQ ID NO: 145764 - DNA, 25 bp, SARS Virus
gtcaacttcatcatagttacaagga

SEQ ID NO: 145765 - DNA, 25 bp, SARS Virus
tcaacttcatcgaagttacaaggat

SEQ ID NO: 145766 - DNA, 25 bp, SARS Virus
caacttcatcgtagttacaaggatc

SEQ ID NO: 145767 - DNA, 25 bp, SARS Virus
aacttcatcgtaattacaaggatca

SEQ ID NO: 145768 - DNA, 25 bp, SARS Virus
acttcatcgtagatacaaggatcat

SEQ ID NO: 145769 - DNA, 25 bp, SARS Virus
cttcatcgtagtaacaaggatcata

SEQ ID NO: 145770 - DNA, 25 bp, SARS Virus
ttcatcgtagttacaaggatcataa

SEQ ID NO: 145771 - DNA, 25 bp, SARS Virus
tcatcgtagttaaaaggatcataag

SEQ ID NO: 145772 - DNA, 25 bp, SARS Virus
catcgtagttacaaggatcataagg

SEQ ID NO: 145773 - DNA, 25 bp, SARS Virus
atcgtagttacaaggatcataaggt

SEQ ID NO: 145774 - DNA, 25 bp, SARS Virus
tcgtagttacaaagatcataaggtt

SEQ ID NO: 145775 - DNA, 25 bp, SARS Virus
cgtagttacaagaatcataaggttc

SEQ ID NO: 145776 - DNA, 25 bp, SARS Virus
gtagttacaaggatcataaggttcg

SEQ ID NO: 145777 - DNA, 25 bp, SARS Virus
tagttacaaggaacataaggttcgt

SEQ ID NO: 145778 - DNA, 25 bp, SARS Virus
agttacaaggataataaggttcgtt

SEQ ID NO: 145779 - DNA, 25 bp, SARS Virus
gttacaaggatcataaggttcgttc

SEQ ID NO: 145780 - DNA, 25 bp, SARS Virus
ttacaaggatcaaaaggttcgttcc

SEQ ID NO: 145781 - DNA, 25 bp, SARS Virus
tacaaggatcataaggttcgttcct

SEQ ID NO: 145782 - DNA, 25 bp, SARS Virus
acaaggatcataaggttcgttcctg

SEQ ID NO: 145783 - DNA, 25 bp, SARS Virus
caaggatcataaagttcgttcctgt

SEQ ID NO: 145784 - DNA, 25 bp, SARS Virus
aaggatcataagattcgttcctgtg

SEQ ID NO: 145785 - DNA, 25 bp, SARS Virus
aggatcataaggatcgttcctgtgt

SEQ ID NO: 145786 - DNA, 25 bp, SARS Virus
ggatcataaggtacgttcctgtgtt

SEQ ID NO: 145787 - DNA, 25 bp, SARS Virus
gatcataaggttagttcctgtgttg

SEQ ID NO: 145788 - DNA, 25 bp, SARS Virus
atcataaggttcattcctgtgttgg

SEQ ID NO: 145789 - DNA, 25 bp, SARS Virus
tcataaggttcgatcctgtgttggg

SEQ ID NO: 145790 - DNA, 25 bp, SARS Virus
cataaggttcgtacctgtgttgggt

SEQ ID NO: 145791 - DNA, 25 bp, SARS Virus
ataaggttcgttactgtgttgggta

SEQ ID NO: 145792 - DNA, 25 bp, SARS Virus
taaggttcgttcatgtgttgggtac

SEQ ID NO: 145793 - DNA, 25 bp, SARS Virus
aaggttcgttccagtgttgggtact

SEQ ID NO: 145794 - DNA, 25 bp, SARS Virus
aggttcgttcctatgttgggtactt

SEQ ID NO: 145795 - DNA, 25 bp, SARS Virus
ggttcgttcctgagttgggtacttt

SEQ ID NO: 145796 - DNA, 25 bp, SARS Virus
gttcgttcctgtattgggtacttta

SEQ ID NO: 145797 - DNA, 25 bp, SARS Virus
ttcgttcctgtgatgggtactttag

SEQ ID NO: 145798 - DNA, 25 bp, SARS Virus
tcgttcctgtgtagggtactttagt

SEQ ID NO: 145799 - DNA, 25 bp, SARS Virus
cgttcctgtgttaggtactttagta

SEQ ID NO: 145800 - DNA, 25 bp, SARS Virus
gttcctgtgttgagtactttagtag

SEQ ID NO: 145801 - DNA, 25 bp, SARS Virus
ttcctgtgttggatactttagtaga

SEQ ID NO: 145802 - DNA, 25 bp, SARS Virus
tcctgtgttgggaactttagtagac

SEQ ID NO: 145803 - DNA, 25 bp, SARS Virus
cctgtgttgggtactttagtagacc

SEQ ID NO: 145804 - DNA, 25 bp, SARS Virus
ctgtgttgggtaatttagtagaccg

SEQ ID NO: 145805 - DNA, 25 bp, SARS Virus
tgtgttgggtacattagtagaccgt

SEQ ID NO: 145806 - DNA, 25 bp, SARS Virus
gtgttgggtactatagtagaccgtt

SEQ ID NO: 145807 - DNA, 25 bp, SARS Virus
tgttgggtacttaagtagaccgtta

SEQ ID NO: 145808 - DNA, 25 bp, SARS Virus
gttgggtactttagtagaccgttaa

SEQ ID NO: 145809 - DNA, 25 bp, SARS Virus
ttgggtactttaatagaccgttaaa

SEQ ID NO: 145810 - DNA, 25 bp, SARS Virus
tgggtactttagaagaccgttaaat

SEQ ID NO: 145811 - DNA, 25 bp, SARS Virus
gggtactttagtagaccgttaaata

SEQ ID NO: 145812 - DNA, 25 bp, SARS Virus
ggtactttagtaaaccgttaaatat

SEQ ID NO: 145813 - DNA, 25 bp, SARS Virus
gtactttagtagaccgttaaatatt

SEQ ID NO: 145814 - DNA, 25 bp, SARS Virus
tactttagtagaacgttaaatatta

SEQ ID NO: 145815 - DNA, 25 bp, SARS Virus
actttagtagacagttaaatattaa

SEQ ID NO: 145816 - DNA, 25 bp, SARS Virus
ctttagtagaccattaaatattaat

SEQ ID NO: 145817 - DNA, 25 bp, SARS Virus
tttagtagaccgataaatattaata

SEQ ID NO: 145818 - DNA, 25 bp, SARS Virus
ttagtagaccgtaaaatattaatat

SEQ ID NO: 145819 - DNA, 25 bp, SARS Virus
tagtagaccgttaaatattaatatt

SEQ ID NO: 145820 - DNA, 25 bp, SARS Virus
agtagaccgttaaatattaatatta

SEQ ID NO: 145821 - DNA, 25 bp, SARS Virus
gtagaccgttaaatattaatattag

SEQ ID NO: 145822 - DNA, 25 bp, SARS Virus
tagaccgttaaaaattaatattagt

SEQ ID NO: 145823 - DNA, 25 bp, SARS Virus
agaccgttaaatattaatattagtc

SEQ ID NO: 145824 - DNA, 25 bp, SARS Virus
gaccgttaaataataatattagtcg

SEQ ID NO: 145825 - DNA, 25 bp, SARS Virus
accgttaaatataaatattagtcgt

SEQ ID NO: 145826 - DNA, 25 bp, SARS Virus
ccgttaaatattaatattagtcgtt

SEQ ID NO: 145827 - DNA, 25 bp, SARS Virus
cgttaaatattaatattagtcgtta

SEQ ID NO: 145828 - DNA, 25 bp, SARS Virus
gttaaatattaaaattagtcgttat

SEQ ID NO: 145829 - DNA, 25 bp, SARS Virus
ttaaatattaatattagtcgttatt

SEQ ID NO: 145830 - DNA, 25 bp, SARS Virus
taaatattaataatagtcgttattg

SEQ ID NO: 145831 - DNA, 25 bp, SARS Virus
aaatattaatataagtcgttattgt

SEQ ID NO: 145832 - DNA, 25 bp, SARS Virus
aatattaatattagtcgttattgtg

SEQ ID NO: 145833 - DNA, 25 bp, SARS Virus
atattaatattaatcgttattgtgg

SEQ ID NO: 145834 - DNA, 25 bp, SARS Virus
tattaatattagacgttattgtggt

SEQ ID NO: 145835 - DNA, 25 bp, SARS Virus
attaatattagtagttattgtggtc

SEQ ID NO: 145836 - DNA, 25 bp, SARS Virus
ttaatattagtcattattgtggtca

SEQ ID NO: 145837 - DNA, 25 bp, SARS Virus
taatattagtcgatattgtggtcaa

SEQ ID NO: 145838 - DNA, 25 bp, SARS Virus
aatattagtcgtaattgtggtcaaa

SEQ ID NO: 145839 - DNA, 25 bp, SARS Virus
atattagtcgttattgtggtcaaac

SEQ ID NO: 145840 - DNA, 25 bp, SARS Virus
tattagtcgttaatgtggtcaaaca

SEQ ID NO: 145841 - DNA, 25 bp, SARS Virus
attagtcgttatagtggtcaaacag

SEQ ID NO: 145842 - DNA, 25 bp, SARS Virus
ttagtcgttattatggtcaaacagg

SEQ ID NO: 145843 - DNA, 25 bp, SARS Virus
tagtcgttattgaggtcaaacagga

SEQ ID NO: 145844 - DNA, 25 bp, SARS Virus
agtcgttattgtagtcaaacaggac

SEQ ID NO: 145845 - DNA, 25 bp, SARS Virus
gtcgttattgtgatcaaacaggacc

SEQ ID NO: 145846 - DNA, 25 bp, SARS Virus
tcgttattgtggacaaacaggaccg

SEQ ID NO: 145847 - DNA, 25 bp, SARS Virus
cgttattgtggtaaaacaggaccgc

SEQ ID NO: 145848 - DNA, 25 bp, SARS Virus
gttattgtggtcaaacaggaccgcg

SEQ ID NO: 145849 - DNA, 25 bp, SARS Virus
ttattgtggtcaaacaggaccgcga

SEQ ID NO: 145850 - DNA, 25 bp, SARS Virus
tattgtggtcaaacaggaccgcgat

SEQ ID NO: 145851 - DNA, 25 bp, SARS Virus
attgtggtcaaaaaggaccgcgata

SEQ ID NO: 145852 - DNA, 25 bp, SARS Virus
ttgtggtcaaacaggaccgcgataa

SEQ ID NO: 145853 - DNA, 25 bp, SARS Virus
tgtggtcaaacaagaccgcgataaa

SEQ ID NO: 145854 - DNA, 25 bp, SARS Virus
gtggtcaaacagaaccgcgataaac

SEQ ID NO: 145855 - DNA, 25 bp, SARS Virus
tggtcaaacaggaccgcgataaaca

SEQ ID NO: 145856 - DNA, 25 bp, SARS Virus
ggtcaaacaggaacgcgataaacag

SEQ ID NO: 145857 - DNA, 25 bp, SARS Virus
gtcaaacaggacagcgataaacaga

SEQ ID NO: 145858 - DNA, 25 bp, SARS Virus
tcaaacaggaccacgataaacagaa

SEQ ID NO: 145859 - DNA, 25 bp, SARS Virus
caaacaggaccgagataaacagaat

SEQ ID NO: 145860 - DNA, 25 bp, SARS Virus
aaacaggaccgcaataaacagaatg

SEQ ID NO: 145861 - DNA, 25 bp, SARS Virus
aacaggaccgcgataaacagaatgt

SEQ ID NO: 145862 - DNA, 25 bp, SARS Virus
acaggaccgcgaaaaacagaatgta

SEQ ID NO: 145863 - DNA, 25 bp, SARS Virus
caggaccgcgataaacagaatgtag

SEQ ID NO: 145864 - DNA, 25 bp, SARS Virus
aggaccgcgataaacagaatgtagt

SEQ ID NO: 145865 - DNA, 25 bp, SARS Virus
ggaccgcgataaacagaatgtagta

SEQ ID NO: 145866 - DNA, 25 bp, SARS Virus
gaccgcgataaaaagaatgtagtag

SEQ ID NO: 145867 - DNA, 25 bp, SARS Virus
accgcgataaacagaatgtagtaga

SEQ ID NO: 145868 - DNA, 25 bp, SARS Virus
ccgcgataaacaaaatgtagtagag

SEQ ID NO: 145869 - DNA, 25 bp, SARS Virus
cgcgataaacagaatgtagtagagg

SEQ ID NO: 145870 - DNA, 25 bp, SARS Virus
gcgataaacagaatgtagtagaggg

SEQ ID NO: 145871 - DNA, 25 bp, SARS Virus
cgataaacagaaagtagtagaggga

SEQ ID NO: 145872 - DNA, 25 bp, SARS Virus
gataaacagaatatagtagagggaa

SEQ ID NO: 145873 - DNA, 25 bp, SARS Virus
ataaacagaatgaagtagagggaac

SEQ ID NO: 145874 - DNA, 25 bp, SARS Virus
taaacagaatgtagtagagggaact

SEQ ID NO: 145875 - DNA, 25 bp, SARS Virus
aaacagaatgtaatagagggaactg

SEQ ID NO: 145876 - DNA, 25 bp, SARS Virus
aacagaatgtagaagagggaactga

SEQ ID NO: 145877 - DNA, 25 bp, SARS Virus
acagaatgtagtagagggaactgat

SEQ ID NO: 145878 - DNA, 25 bp, SARS Virus
cagaatgtagtaaagggaactgatg

SEQ ID NO: 145879 - DNA, 25 bp, SARS Virus
agaatgtagtagagggaactgatgt

SEQ ID NO: 145880 - DNA, 25 bp, SARS Virus
gaatgtagtagaaggaactgatgtt

SEQ ID NO: 145881 - DNA, 25 bp, SARS Virus
aatgtagtagagagaactgatgttt

SEQ ID NO: 145882 - DNA, 25 bp, SARS Virus
atgtagtagaggaaactgatgtttt

SEQ ID NO: 145883 - DNA, 25 bp, SARS Virus
tgtagtagagggaactgatgttttc

SEQ ID NO: 145884 - DNA, 25 bp, SARS Virus
gtagtagagggaactgatgttttct

SEQ ID NO: 145885 - DNA, 25 bp, SARS Virus
tagtagagggaaatgatgttttctt

SEQ ID NO: 145886 - DNA, 25 bp, SARS Virus
agtagagggaacagatgttttctta

SEQ ID NO: 145887 - DNA, 25 bp, SARS Virus
gtagagggaactaatgttttcttag

SEQ ID NO: 145888 - DNA, 25 bp, SARS Virus
tagagggaactgatgttttcttaga

SEQ ID NO: 145889 - DNA, 25 bp, SARS Virus
agagggaactgaagttttcttagac

SEQ ID NO: 145890 - DNA, 25 bp, SARS Virus
gagggaactgatattttcttagacg

SEQ ID NO: 145891 - DNA, 25 bp, SARS Virus
agggaactgatgatttcttagacgt

SEQ ID NO: 145892 - DNA, 25 bp, SARS Virus
gggaactgatgtattcttagacgta

SEQ ID NO: 145893 - DNA, 25 bp, SARS Virus
ggaactgatgttatcttagacgtat

SEQ ID NO: 145894 - DNA, 25 bp, SARS Virus
gaactgatgtttacttagacgtatc

SEQ ID NO: 145895 - DNA, 25 bp, SARS Virus
aactgatgttttattagacgtatct

SEQ ID NO: 145896 - DNA, 25 bp, SARS Virus
actgatgttttcatagacgtatctg

SEQ ID NO: 145897 - DNA, 25 bp, SARS Virus
ctgatgttttctaagacgtatctgt

SEQ ID NO: 145898 - DNA, 25 bp, SARS Virus
tgatgttttcttagacgtatctgta

SEQ ID NO: 145899 - DNA, 25 bp, SARS Virus
gatgttttcttaaacgtatctgtaa

SEQ ID NO: 145900 - DNA, 25 bp, SARS Virus
atgttttcttagacgtatctgtaac

SEQ ID NO: 145901 - DNA, 25 bp, SARS Virus
tgttttcttagaagtatctgtaacc

SEQ ID NO: 145902 - DNA, 25 bp, SARS Virus
gttttcttagacatatctgtaacct

SEQ ID NO: 145903 - DNA, 25 bp, SARS Virus
ttttcttagacgaatctgtaacctc

SEQ ID NO: 145904 - DNA, 25 bp, SARS Virus
tttcttagacgtatctgtaacctct

SEQ ID NO: 145905 - DNA, 25 bp, SARS Virus
ttcttagacgtaactgtaacctctt

SEQ ID NO: 145906 - DNA, 25 bp, SARS Virus
tcttagacgtatatgtaacctcttc

SEQ ID NO: 145907 - DNA, 25 bp, SARS Virus
cttagacgtatcagtaacctcttcg

SEQ ID NO: 145908 - DNA, 25 bp, SARS Virus
ttagacgtatctataacctcttcgt

SEQ ID NO: 145909 - DNA, 25 bp, SARS Virus
tagacgtatctgaaacctcttcgtt

SEQ ID NO: 145910 - DNA, 25 bp, SARS Virus
agacgtatctgtaacctcttcgttt

SEQ ID NO: 145911 - DNA, 25 bp, SARS Virus
gacgtatctgtaacctcttcgtttc

SEQ ID NO: 145912 - DNA, 25 bp, SARS Virus
acgtatctgtaaactcttcgtttct

SEQ ID NO: 145913 - DNA, 25 bp, SARS Virus
cgtatctgtaacatcttcgtttcta

SEQ ID NO: 145914 - DNA, 25 bp, SARS Virus
gtatctgtaaccacttcgtttctag

SEQ ID NO: 145915 - DNA, 25 bp, SARS Virus
tatctgtaacctattcgtttctagt

SEQ ID NO: 145916 - DNA, 25 bp, SARS Virus
atctgtaacctcatcgtttctagta

SEQ ID NO: 145917 - DNA, 25 bp, SARS Virus
tctgtaacctctacgtttctagtaa

SEQ ID NO: 145918 - DNA, 25 bp, SARS Virus
ctgtaacctcttagtttctagtaag

SEQ ID NO: 145919 - DNA, 25 bp, SARS Virus
tgtaacctcttcatttctagtaagt

SEQ ID NO: 145920 - DNA, 25 bp, SARS Virus
gtaacctcttcgattctagtaagtt

SEQ ID NO: 145921 - DNA, 25 bp, SARS Virus
taacctcttcgtatctagtaagttg

SEQ ID NO: 145922 - DNA, 25 bp, SARS Virus
aacctcttcgttactagtaagttga

SEQ ID NO: 145923 - DNA, 25 bp, SARS Virus
acctcttcgtttatagtaagttgaa

SEQ ID NO: 145924 - DNA, 25 bp, SARS Virus
cctcttcgtttcaagtaagttgaat

SEQ ID NO: 145925 - DNA, 25 bp, SARS Virus
ctcttcgtttctagtaagttgaatc

SEQ ID NO: 145926 - DNA, 25 bp, SARS Virus
tcttcgtttctaataagttgaatca

SEQ ID NO: 145927 - DNA, 25 bp, SARS Virus
cttcgtttctagaaagttgaatcac

SEQ ID NO: 145928 - DNA, 25 bp, SARS Virus
ttcgtttctagtaagttgaatcacc

SEQ ID NO: 145929 - DNA, 25 bp, SARS Virus
tcgtttctagtaagttgaatcaccg

SEQ ID NO: 145930 - DNA, 25 bp, SARS Virus
cgtttctagtaaattgaatcaccgt

SEQ ID NO: 145931 - DNA, 25 bp, SARS Virus
gtttctagtaagatgaatcaccgtc

SEQ ID NO: 145932 - DNA, 25 bp, SARS Virus
tttctagtaagtagaatcaccgtct

SEQ ID NO: 145933 - DNA, 25 bp, SARS Virus
ttctagtaagttaaatcaccgtctt

SEQ ID NO: 145934 - DNA, 25 bp, SARS Virus
tctagtaagttgaatcaccgtcttt

SEQ ID NO: 145935 - DNA, 25 bp, SARS Virus
ctagtaagttgaatcaccgtctttg

SEQ ID NO: 145936 - DNA, 25 bp, SARS Virus
tagtaagttgaaacaccgtctttgc

SEQ ID NO: 145937 - DNA, 25 bp, SARS Virus
agtaagttgaataaccgtctttgcg

SEQ ID NO: 145938 - DNA, 25 bp, SARS Virus
gtaagttgaatcaccgtctttgcgg

SEQ ID NO: 145939 - DNA, 25 bp, SARS Virus
taagttgaatcaacgtctttgcggt

SEQ ID NO: 145940 - DNA, 25 bp, SARS Virus
aagttgaatcacagtctttgcggta

SEQ ID NO: 145941 - DNA, 25 bp, SARS Virus
agttgaatcaccatctttgcggtat

SEQ ID NO: 145942 - DNA, 25 bp, SARS Virus
gttgaatcaccgactttgcggtatc

SEQ ID NO: 145943 - DNA, 25 bp, SARS Virus
ttgaatcaccgtatttgcggtatcg

SEQ ID NO: 145944 - DNA, 25 bp, SARS Virus
tgaatcaccgtcattgcggtatcgt

SEQ ID NO: 145945 - DNA, 25 bp, SARS Virus
ggtcatggtcacccaggtaatttta

SEQ ID NO: 145946 - DNA, 25 bp, SARS Virus
gtcatggtcactcaggtaattttaa

SEQ ID NO: 145947 - DNA, 25 bp, SARS Virus
tcatggtcactccggtaattttaat

SEQ ID NO: 145948 - DNA, 25 bp, SARS Virus
catggtcactcacgtaattttaatt

SEQ ID NO: 145949 - DNA, 25 bp, SARS Virus
atggtcactcagctaattttaattt

SEQ ID NO: 145950 - DNA, 25 bp, SARS Virus
tggtcactcaggcaattttaatttt

SEQ ID NO: 145951 - DNA, 25 bp, SARS Virus
ggtcactcaggtcattttaatttta

SEQ ID NO: 145952 - DNA, 25 bp, SARS Virus
gtcactcaggtacttttaattttaa

SEQ ID NO: 145953 - DNA, 25 bp, SARS Virus
tcactcaggtaactttaattttaac

SEQ ID NO: 145954 - DNA, 25 bp, SARS Virus
cactcaggtaatcttaattttaact

SEQ ID NO: 145955 - DNA, 25 bp, SARS Virus
actcaggtaattctaattttaactg

SEQ ID NO: 145956 - DNA, 25 bp, SARS Virus
ctcaggtaatttcaattttaactgt

SEQ ID NO: 145957 - DNA, 25 bp, SARS Virus
tcaggtaattttcattttaactgtg

SEQ ID NO: 145958 - DNA, 25 bp, SARS Virus
caggtaattttacttttaactgtgt

SEQ ID NO: 145959 - DNA, 25 bp, SARS Virus
aggtaattttaactttaactgtgtg

SEQ ID NO: 145960 - DNA, 25 bp, SARS Virus
ggtaattttaatcttaactgtgtga

SEQ ID NO: 145961 - DNA, 25 bp, SARS Virus
gtaattttaattctaactgtgtgac

SEQ ID NO: 145962 - DNA, 25 bp, SARS Virus
taattttaatttcaactgtgtgacc

SEQ ID NO: 145963 - DNA, 25 bp, SARS Virus
aattttaattttcactgtgtgacca

SEQ ID NO: 145964 - DNA, 25 bp, SARS Virus
attttaattttacctgtgtgaccaa

SEQ ID NO: 145965 - DNA, 25 bp, SARS Virus
ttttaattttaactgtgtgaccaag

SEQ ID NO: 145966 - DNA, 25 bp, SARS Virus
tttaattttaaccgtgtgaccaaga

SEQ ID NO: 145967 - DNA, 25 bp, SARS Virus
ttaattttaactctgtgaccaagaa

SEQ ID NO: 145968 - DNA, 25 bp, SARS Virus
taattttaactgcgtgaccaagaat

SEQ ID NO: 145969 - DNA, 25 bp, SARS Virus
aattttaactgtctgaccaagaatt

SEQ ID NO: 145970 - DNA, 25 bp, SARS Virus
attttaactgtgcgaccaagaatta

SEQ ID NO: 145971 - DNA, 25 bp, SARS Virus
ttttaactgtgtcaccaagaattat

SEQ ID NO: 145972 - DNA, 25 bp, SARS Virus
tttaactgtgtgcccaagaattatt

SEQ ID NO: 145973 - DNA, 25 bp, SARS Virus
ttaactgtgtgaccaagaattattc

SEQ ID NO: 145974 - DNA, 25 bp, SARS Virus
taactgtgtgaccaagaattattcc

SEQ ID NO: 145975 - DNA, 25 bp, SARS Virus
aactgtgtgacccagaattattcca

SEQ ID NO: 145976 - DNA, 25 bp, SARS Virus
actgtgtgaccacgaattattccag

SEQ ID NO: 145977 - DNA, 25 bp, SARS Virus
ctgtgtgaccaacaattattccagt

SEQ ID NO: 145978 - DNA, 25 bp, SARS Virus
tgtgtgaccaagcattattccagtc

SEQ ID NO: 145979 - DNA, 25 bp, SARS Virus
gtgtgaccaagacttattccagtca

SEQ ID NO: 145980 - DNA, 25 bp, SARS Virus
tgtgaccaagaactattccagtcac

SEQ ID NO: 145981 - DNA, 25 bp, SARS Virus
gtgaccaagaatcattccagtcacc

SEQ ID NO: 145982 - DNA, 25 bp, SARS Virus
tgaccaagaattcttccagtcacct

SEQ ID NO: 145983 - DNA, 25 bp, SARS Virus
gaccaagaattactccagtcaccta

SEQ ID NO: 145984 - DNA, 25 bp, SARS Virus
accaagaattatcccagtcacctat

SEQ ID NO: 145985 - DNA, 25 bp, SARS Virus
ccaagaattattccagtcacctatt

SEQ ID NO: 145986 - DNA, 25 bp, SARS Virus
caagaattattccagtcacctatta

SEQ ID NO: 145987 - DNA, 25 bp, SARS Virus
aagaattattcccgtcacctattaa

SEQ ID NO: 145988 - DNA, 25 bp, SARS Virus
agaattattccactcacctattaaa

SEQ ID NO: 145989 - DNA, 25 bp, SARS Virus
gaattattccagccacctattaaaa

SEQ ID NO: 145990 - DNA, 25 bp, SARS Virus
aattattccagtcacctattaaaac

SEQ ID NO: 145991 - DNA, 25 bp, SARS Virus
attattccagtcccctattaaaacc

SEQ ID NO: 145992 - DNA, 25 bp, SARS Virus
ttattccagtcacctattaaaacca

SEQ ID NO: 145993 - DNA, 25 bp, SARS Virus
tattccagtcacctattaaaaccag

SEQ ID NO: 145994 - DNA, 25 bp, SARS Virus
attccagtcacccattaaaaccagg

SEQ ID NO: 145995 - DNA, 25 bp, SARS Virus
ttccagtcacctcttaaaaccaggt

SEQ ID NO: 145996 - DNA, 25 bp, SARS Virus
tccagtcacctactaaaaccaggtg

SEQ ID NO: 145997 - DNA, 25 bp, SARS Virus
ccagtcacctatcaaaaccaggtgt

SEQ ID NO: 145998 - DNA, 25 bp, SARS Virus
cagtcacctattcaaaccaggtgtt

SEQ ID NO: 145999 - DNA, 25 bp, SARS Virus
agtcacctattacaaccaggtgttt

SEQ ID NO: 146000 - DNA, 25 bp, SARS Virus
gtcacctattaacaccaggtgtttg

SEQ ID NO: 146001 - DNA, 25 bp, SARS Virus
tcacctattaaacccaggtgtttgg

SEQ ID NO: 146002 - DNA, 25 bp, SARS Virus
cacctattaaaaccaggtgtttggc

SEQ ID NO: 146003 - DNA, 25 bp, SARS Virus
acctattaaaaccaggtgtttggca

SEQ ID NO: 146004 - DNA, 25 bp, SARS Virus
cctattaaaacccggtgtttggcac

SEQ ID NO: 146005 - DNA, 25 bp, SARS Virus
ctattaaaaccacgtgtttggcacc

SEQ ID NO: 146006 - DNA, 25 bp, SARS Virus
tattaaaaccagctgtttggcaccg

SEQ ID NO: 146007 - DNA, 25 bp, SARS Virus
attaaaaccaggcgtttggcaccgg

SEQ ID NO: 146008 - DNA, 25 bp, SARS Virus
ttaaaaccaggtctttggcaccggc

SEQ ID NO: 146009 - DNA, 25 bp, SARS Virus
taaaaccaggtgcttggcaccggcc

SEQ ID NO: 146010 - DNA, 25 bp, SARS Virus
aaaaccaggtgtctggcaccggcca

SEQ ID NO: 146011 - DNA, 25 bp, SARS Virus
aaaccaggtgttcggcaccggccac

SEQ ID NO: 146012 - DNA, 25 bp, SARS Virus
aaccaggtgtttcgcaccggccacg

SEQ ID NO: 146013 - DNA, 25 bp, SARS Virus
accaggtgtttgccaccggccacgt

SEQ ID NO: 146014 - DNA, 25 bp, SARS Virus
ccaggtgtttggcaccggccacgta

SEQ ID NO: 146015 - DNA, 25 bp, SARS Virus
caggtgtttggccccggccacgtaa

SEQ ID NO: 146016 - DNA, 25 bp, SARS Virus
aggtgtttggcaccggccacgtaaa

SEQ ID NO: 146017 - DNA, 25 bp, SARS Virus
ggtgtttggcaccggccacgtaaat

SEQ ID NO: 146018 - DNA, 25 bp, SARS Virus
gtgtttggcacccgccacgtaaatt

SEQ ID NO: 146019 - DNA, 25 bp, SARS Virus
tgtttggcaccgcccacgtaaattt

SEQ ID NO: 146020 - DNA, 25 bp, SARS Virus
gtttggcaccggccacgtaaatttt

SEQ ID NO: 146021 - DNA, 25 bp, SARS Virus
tttggcaccggccacgtaaattttc

SEQ ID NO: 146022 - DNA, 25 bp, SARS Virus
ttggcaccggccccgtaaattttca

SEQ ID NO: 146023 - DNA, 25 bp, SARS Virus
tggcaccggccacgtaaattttcaa

SEQ ID NO: 146024 - DNA, 25 bp, SARS Virus
ggcaccggccacctaaattttcaag

SEQ ID NO: 146025 - DNA, 25 bp, SARS Virus
gcaccggccacgcaaattttcaagt

SEQ ID NO: 146026 - DNA, 25 bp, SARS Virus
caccggccacgtcaattttcaagtt

SEQ ID NO: 146027 - DNA, 25 bp, SARS Virus
accggccacgtacattttcaagttt

SEQ ID NO: 146028 - DNA, 25 bp, SARS Virus
ccggccacgtaacttttcaagtttt

SEQ ID NO: 146029 - DNA, 25 bp, SARS Virus
cggccacgtaaactttcaagttttc

SEQ ID NO: 146030 - DNA, 25 bp, SARS Virus
ggccacgtaaatcttcaagttttct

SEQ ID NO: 146031 - DNA, 25 bp, SARS Virus
gccacgtaaattctcaagttttctt

SEQ ID NO: 146032 - DNA, 25 bp, SARS Virus
ccacgtaaatttccaagttttcttt

SEQ ID NO: 146033 - DNA, 25 bp, SARS Virus
cacgtaaattttcaagttttctttc

SEQ ID NO: 146034 - DNA, 25 bp, SARS Virus
acgtaaattttccagttttctttca

SEQ ID NO: 146035 - DNA, 25 bp, SARS Virus
cgtaaattttcacgttttctttcat

SEQ ID NO: 146036 - DNA, 25 bp, SARS Virus
gtaaattttcaacttttctttcatg

SEQ ID NO: 146037 - DNA, 25 bp, SARS Virus
taaattttcaagctttctttcatga

SEQ ID NO: 146038 - DNA, 25 bp, SARS Virus
aaattttcaagtcttctttcatgat

SEQ ID NO: 146039 - DNA, 25 bp, SARS Virus
aattttcaagttctctttcatgatg

SEQ ID NO: 146040 - DNA, 25 bp, SARS Virus
attttcaagtttcctttcatgatgt

SEQ ID NO: 146041 - DNA, 25 bp, SARS Virus
ttttcaagttttctttcatgatgtt

SEQ ID NO: 146042 - DNA, 25 bp, SARS Virus
tttcaagttttccttcatgatgttg

SEQ ID NO: 146043 - DNA, 25 bp, SARS Virus
ttcaagttttctctcatgatgttga

SEQ ID NO: 146044 - DNA, 25 bp, SARS Virus
tcaagttttcttccatgatgttgag

SEQ ID NO: 146045 - DNA, 25 bp, SARS Virus
caagttttctttcatgatgttgaga

SEQ ID NO: 146046 - DNA, 25 bp, SARS Virus
aagttttctttcctgatgttgagac

SEQ ID NO: 146047 - DNA, 25 bp, SARS Virus
agttttctttcacgatgttgagaca

SEQ ID NO: 146048 - DNA, 25 bp, SARS Virus
gttttctttcatcatgttgagacat

SEQ ID NO: 146049 - DNA, 25 bp, SARS Virus
ttttctttcatgctgttgagacatt

SEQ ID NO: 146050 - DNA, 25 bp, SARS Virus
tttctttcatgacgttgagacattc

SEQ ID NO: 146051 - DNA, 25 bp, SARS Virus
ttctttcatgatcttgagacattcc

SEQ ID NO: 146052 - DNA, 25 bp, SARS Virus
tctttcatgatgctgagacattcca

SEQ ID NO: 146053 - DNA, 25 bp, SARS Virus
ctttcatgatgtcgagacattccaa

SEQ ID NO: 146054 - DNA, 25 bp, SARS Virus
tttcatgatgttcagacattccaac

SEQ ID NO: 146055 - DNA, 25 bp, SARS Virus
ttcatgatgttgcgacattccaacc

SEQ ID NO: 146056 - DNA, 25 bp, SARS Virus
tcatgatgttgacacattccaacca

SEQ ID NO: 146057 - DNA, 25 bp, SARS Virus
catgatgttgagccattccaaccat

SEQ ID NO: 146058 - DNA, 25 bp, SARS Virus
atgatgttgagacattccaaccatc

SEQ ID NO: 146059 - DNA, 25 bp, SARS Virus
tgatgttgagaccttccaaccatcg

SEQ ID NO: 146060 - DNA, 25 bp, SARS Virus
gatgttgagacactccaaccatcgg

SEQ ID NO: 146061 - DNA, 25 bp, SARS Virus
atgttgagacatcccaaccatcggt

SEQ ID NO: 146062 - DNA, 25 bp, SARS Virus
tgttgagacattccaaccatcggtt

SEQ ID NO: 146063 - DNA, 25 bp, SARS Virus
gttgagacattccaaccatcggtta

SEQ ID NO: 146064 - DNA, 25 bp, SARS Virus
ttgagacattcccaccatcggttac

SEQ ID NO: 146065 - DNA, 25 bp, SARS Virus
tgagacattccacccatcggttacg

SEQ ID NO: 146066 - DNA, 25 bp, SARS Virus
gagacattccaaccatcggttacgg

SEQ ID NO: 146067 - DNA, 25 bp, SARS Virus
agacattccaaccatcggttacggt

SEQ ID NO: 146068 - DNA, 25 bp, SARS Virus
gacattccaaccctcggttacggtc

SEQ ID NO: 146069 - DNA, 25 bp, SARS Virus
acattccaaccaccggttacggtca

SEQ ID NO: 146070 - DNA, 25 bp, SARS Virus
cattccaaccatcggttacggtcat

SEQ ID NO: 146071 - DNA, 25 bp, SARS Virus
attccaaccatccgttacggtcatc

SEQ ID NO: 146072 - DNA, 25 bp, SARS Virus
ttccaaccatcgcttacggtcatca

SEQ ID NO: 146073 - DNA, 25 bp, SARS Virus
tccaaccatcggctacggtcatcac

SEQ ID NO: 146074 - DNA, 25 bp, SARS Virus
ccaaccatcggtcacggtcatcacc

SEQ ID NO: 146075 - DNA, 25 bp, SARS Virus
caaccatcggttccggtcatcacca

SEQ ID NO: 146076 - DNA, 25 bp, SARS Virus
aaccatcggttacggtcatcaccac

SEQ ID NO: 146077 - DNA, 25 bp, SARS Virus
accatcggttaccgtcatcaccaca

SEQ ID NO: 146078 - DNA, 25 bp, SARS Virus
ccatcggttacgctcatcaccacat

SEQ ID NO: 146079 - DNA, 25 bp, SARS Virus
catcggttacggccatcaccacatt

SEQ ID NO: 146080 - DNA, 25 bp, SARS Virus
atcggttacggtcatcaccacattt

SEQ ID NO: 146081 - DNA, 25 bp, SARS Virus
tcggttacggtcctcaccacatttt

SEQ ID NO: 146082 - DNA, 25 bp, SARS Virus
cggttacggtcaccaccacattttt

SEQ ID NO: 146083 - DNA, 25 bp, SARS Virus
ggttacggtcatcaccacatttttg

SEQ ID NO: 146084 - DNA, 25 bp, SARS Virus
gttacggtcatccccacatttttgg

SEQ ID NO: 146085 - DNA, 25 bp, SARS Virus
ttacggtcatcaccacatttttggt

SEQ ID NO: 146086 - DNA, 25 bp, SARS Virus
tacggtcatcaccacatttttggta

SEQ ID NO: 146087 - DNA, 25 bp, SARS Virus
acggtcatcaccccatttttggtat

SEQ ID NO: 146088 - DNA, 25 bp, SARS Virus
cggtcatcaccacatttttggtatt

SEQ ID NO: 146089 - DNA, 25 bp, SARS Virus
ggtcatcaccacctttttggtatta

SEQ ID NO: 146090 - DNA, 25 bp, SARS Virus
gtcatcaccacacttttggtattag

SEQ ID NO: 146091 - DNA, 25 bp, SARS Virus
tcatcaccacatctttggtattagt

SEQ ID NO: 146092 - DNA, 25 bp, SARS Virus
catcaccacattcttggtattagta

SEQ ID NO: 146093 - DNA, 25 bp, SARS Virus
atcaccacatttctggtattagtaa

SEQ ID NO: 146094 - DNA, 25 bp, SARS Virus
tcaccacattttcggtattagtaaa

SEQ ID NO: 146095 - DNA, 25 bp, SARS Virus
caccacatttttcgtattagtaaat

SEQ ID NO: 146096 - DNA, 25 bp, SARS Virus
accacatttttgctattagtaaatt

SEQ ID NO: 146097 - DNA, 25 bp, SARS Virus
ccacatttttggcattagtaaatta

SEQ ID NO: 146098 - DNA, 25 bp, SARS Virus
cacatttttggtcttagtaaattac

SEQ ID NO: 146099 - DNA, 25 bp, SARS Virus
acatttttggtactagtaaattacc

SEQ ID NO: 146100 - DNA, 25 bp, SARS Virus
catttttggtatcagtaaattaccg

SEQ ID NO: 146101 - DNA, 25 bp, SARS Virus
atttttggtattcgtaaattaccgg

SEQ ID NO: 146102 - DNA, 25 bp, SARS Virus
tttttggtattactaaattaccggt

SEQ ID NO: 146103 - DNA, 25 bp, SARS Virus
ttttggtattagcaaattaccggtt

SEQ ID NO: 146104 - DNA, 25 bp, SARS Virus
tttggtattagtcaattaccggtta

SEQ ID NO: 146105 - DNA, 25 bp, SARS Virus
ttggtattagtacattaccggttat

SEQ ID NO: 146106 - DNA, 25 bp, SARS Virus
tggtattagtaacttaccggttatt

SEQ ID NO: 146107 - DNA, 25 bp, SARS Virus
ggtattagtaaactaccggttattg

SEQ ID NO: 146108 - DNA, 25 bp, SARS Virus
gtattagtaaatcaccggttattgt

SEQ ID NO: 146109 - DNA, 25 bp, SARS Virus
tattagtaaattcccggttattgtt

SEQ ID NO: 146110 - DNA, 25 bp, SARS Virus
attagtaaattaccggttattgtta

SEQ ID NO: 146111 - DNA, 25 bp, SARS Virus
ttagtaaattaccggttattgttaa

SEQ ID NO: 146112 - DNA, 25 bp, SARS Virus
tagtaaattacccgttattgttaat

SEQ ID NO: 146113 - DNA, 25 bp, SARS Virus
agtaaattaccgcttattgttaatt

SEQ ID NO: 146114 - DNA, 25 bp, SARS Virus
gtaaattaccggctattgttaattc

SEQ ID NO: 146115 - DNA, 25 bp, SARS Virus
taaattaccggtcattgttaattct

SEQ ID NO: 146116 - DNA, 25 bp, SARS Virus
aaattaccggttcttgttaattctc

SEQ ID NO: 146117 - DNA, 25 bp, SARS Virus
aattaccggttactgttaattctcg

SEQ ID NO: 146118 - DNA, 25 bp, SARS Virus
attaccggttatcgttaattctcgt

SEQ ID NO: 146119 - DNA, 25 bp, SARS Virus
ttaccggttattcttaattctcgtc

SEQ ID NO: 146120 - DNA, 25 bp, SARS Virus
taccggttattgctaattctcgtcc

SEQ ID NO: 146121 - DNA, 25 bp, SARS Virus
accggttattgtcaattctcgtcca

SEQ ID NO: 146122 - DNA, 25 bp, SARS Virus
ccggttattgttcattctcgtccac

SEQ ID NO: 146123 - DNA, 25 bp, SARS Virus
cggttattgttacttctcgtccacc

SEQ ID NO: 146124 - DNA, 25 bp, SARS Virus
ggttattgttaactctcgtccaccc

SEQ ID NO: 146125 - DNA, 25 bp, SARS Virus
gttattgttaatcctcgtccacccc

SEQ ID NO: 146126 - DNA, 25 bp, SARS Virus
ttattgttaattctcgtccacccca

SEQ ID NO: 146127 - DNA, 25 bp, SARS Virus
tattgttaattcccgtccaccccac

SEQ ID NO: 146128 - DNA, 25 bp, SARS Virus
attgttaattctcgtccaccccacg

SEQ ID NO: 146129 - DNA, 25 bp, SARS Virus
ttgttaattctcctccaccccacgt

SEQ ID NO: 146130 - DNA, 25 bp, SARS Virus
tgttaattctcgcccaccccacgtt

SEQ ID NO: 146131 - DNA, 25 bp, SARS Virus
gttaattctcgtccaccccacgttc

SEQ ID NO: 146132 - DNA, 25 bp, SARS Virus
ttaattctcgtccaccccacgttcc

SEQ ID NO: 146133 - DNA, 25 bp, SARS Virus
taattctcgtcccccccacgttcca

SEQ ID NO: 146134 - DNA, 25 bp, SARS Virus
aattctcgtccaccccacgttccaa

SEQ ID NO: 146135 - DNA, 25 bp, SARS Virus
attctcgtccaccccacgttccaaa

SEQ ID NO: 146136 - DNA, 25 bp, SARS Virus
ttctcgtccaccccacgttccaaac

SEQ ID NO: 146137 - DNA, 25 bp, SARS Virus
tctcgtccaccccacgttccaaacg

SEQ ID NO: 146138 - DNA, 25 bp, SARS Virus
ctcgtccaccccccgttccaaacgg

SEQ ID NO: 146139 - DNA, 25 bp, SARS Virus
tcgtccaccccacgttccaaacggt

SEQ ID NO: 146140 - DNA, 25 bp, SARS Virus
cgtccaccccaccttccaaacggta

SEQ ID NO: 146141 - DNA, 25 bp, SARS Virus
gtccaccccacgctccaaacggtag

SEQ ID NO: 146142 - DNA, 25 bp, SARS Virus
tccaccccacgtcccaaacggtagt

SEQ ID NO: 146143 - DNA, 25 bp, SARS Virus
ccaccccacgttccaaacggtagtc

SEQ ID NO: 146144 - DNA, 25 bp, SARS Virus
caccccacgttccaaacggtagtcc

SEQ ID NO: 146145 - DNA, 25 bp, SARS Virus
accccacgttcccaacggtagtccc

SEQ ID NO: 146146 - DNA, 25 bp, SARS Virus
ccccacgttccacacggtagtcccc

SEQ ID NO: 146147 - DNA, 25 bp, SARS Virus
cccacgttccaaccggtagtcccct

SEQ ID NO: 146148 - DNA, 25 bp, SARS Virus
ccacgttccaaacggtagtcccctc

SEQ ID NO: 146149 - DNA, 25 bp, SARS Virus
cacgttccaaaccgtagtcccctct

SEQ ID NO: 146150 - DNA, 25 bp, SARS Virus
acgttccaaacgctagtcccctctt

SEQ ID NO: 146151 - DNA, 25 bp, SARS Virus
cgttccaaacggcagtcccctcttt

SEQ ID NO: 146152 - DNA, 25 bp, SARS Virus
gttccaaacggtcgtcccctctttc

SEQ ID NO: 146153 - DNA, 25 bp, SARS Virus
ttccaaacggtactcccctctttcc

SEQ ID NO: 146154 - DNA, 25 bp, SARS Virus
tccaaacggtagccccctctttccg

SEQ ID NO: 146155 - DNA, 25 bp, SARS Virus
ccaaacggtagtcccctctttccgt

SEQ ID NO: 146156 - DNA, 25 bp, SARS Virus
caaacggtagtcccctctttccgtg

SEQ ID NO: 146157 - DNA, 25 bp, SARS Virus
aaacggtagtcccctctttccgtgt

SEQ ID NO: 146158 - DNA, 25 bp, SARS Virus
aacggtagtcccctctttccgtgta

SEQ ID NO: 146159 - DNA, 25 bp, SARS Virus
acggtagtcccccctttccgtgtaa

SEQ ID NO: 146160 - DNA, 25 bp, SARS Virus
cggtagtcccctctttccgtgtaat

SEQ ID NO: 146161 - DNA, 25 bp, SARS Virus
ggtagtcccctccttccgtgtaatc

SEQ ID NO: 146162 - DNA, 25 bp, SARS Virus
gtagtcccctctctccgtgtaatct

SEQ ID NO: 146163 - DNA, 25 bp, SARS Virus
tagtcccctcttcccgtgtaatcta

SEQ ID NO: 146164 - DNA, 25 bp, SARS Virus
agtcccctctttccgtgtaatctat

SEQ ID NO: 146165 - DNA, 25 bp, SARS Virus
gtcccctctttccgtgtaatctata

SEQ ID NO: 146166 - DNA, 25 bp, SARS Virus
tcccctctttccctgtaatctatac

SEQ ID NO: 146167 - DNA, 25 bp, SARS Virus
cccctctttccgcgtaatctataca

SEQ ID NO: 146168 - DNA, 25 bp, SARS Virus
ccctctttccgtctaatctatacag

SEQ ID NO: 146169 - DNA, 25 bp, SARS Virus
cctctttccgtgcaatctatacaga

SEQ ID NO: 146170 - DNA, 25 bp, SARS Virus
ctctttccgtgtcatctatacagag

SEQ ID NO: 146171 - DNA, 25 bp, SARS Virus
tctttccgtgtactctatacagaga

SEQ ID NO: 146172 - DNA, 25 bp, SARS Virus
ctttccgtgtaacctatacagagag

SEQ ID NO: 146173 - DNA, 25 bp, SARS Virus
tttccgtgtaatctatacagagaga

SEQ ID NO: 146174 - DNA, 25 bp, SARS Virus
ttccgtgtaatccatacagagagag

SEQ ID NO: 146175 - DNA, 25 bp, SARS Virus
tccgtgtaatctctacagagagagt

SEQ ID NO: 146176 - DNA, 25 bp, SARS Virus
ccgtgtaatctacacagagagagtt

SEQ ID NO: 146177 - DNA, 25 bp, SARS Virus
cgtgtaatctatccagagagagttt

SEQ ID NO: 146178 - DNA, 25 bp, SARS Virus
gtgtaatctatacagagagagtttc

SEQ ID NO: 146179 - DNA, 25 bp, SARS Virus
tgtaatctataccgagagagtttcc

SEQ ID NO: 146180 - DNA, 25 bp, SARS Virus
gtaatctatacacagagagtttccc

SEQ ID NO: 146181 - DNA, 25 bp, SARS Virus
taatctatacagcgagagtttcccg

SEQ ID NO: 146182 - DNA, 25 bp, SARS Virus
aatctatacagacagagtttcccgg

SEQ ID NO: 146183 - DNA, 25 bp, SARS Virus
atctatacagagcgagtttcccgga

SEQ ID NO: 146184 - DNA, 25 bp, SARS Virus
tctatacagagacagtttcccggat

SEQ ID NO: 146185 - DNA, 25 bp, SARS Virus
ctatacagagagcgtttcccggatt

SEQ ID NO: 146186 - DNA, 25 bp, SARS Virus
tatacagagagactttcccggattc

SEQ ID NO: 146187 - DNA, 25 bp, SARS Virus
atacagagagagcttcccggattcg

SEQ ID NO: 146188 - DNA, 25 bp, SARS Virus
tacagagagagtctcccggattcga

SEQ ID NO: 146189 - DNA, 25 bp, SARS Virus
acagagagagttccccggattcgaa

SEQ ID NO: 146190 - DNA, 25 bp, SARS Virus
cagagagagtttcccggattcgaac

SEQ ID NO: 146191 - DNA, 25 bp, SARS Virus
agagagagtttcccggattcgaacg

SEQ ID NO: 146192 - DNA, 25 bp, SARS Virus
gagagagtttcccggattcgaacgg

SEQ ID NO: 146193 - DNA, 25 bp, SARS Virus
agagagtttccccgattcgaacggt

SEQ ID NO: 146194 - DNA, 25 bp, SARS Virus
gagagtttcccgcattcgaacggta

SEQ ID NO: 146195 - DNA, 25 bp, SARS Virus
agagtttcccggcttcgaacggtac

SEQ ID NO: 146196 - DNA, 25 bp, SARS Virus
gagtttcccggactcgaacggtaca

SEQ ID NO: 146197 - DNA, 25 bp, SARS Virus
agtttcccggatccgaacggtacag

SEQ ID NO: 146198 - DNA, 25 bp, SARS Virus
gtttcccggattcgaacggtacaga

SEQ ID NO: 146199 - DNA, 25 bp, SARS Virus
tttcccggattccaacggtacagat

SEQ ID NO: 146200 - DNA, 25 bp, SARS Virus
ttcccggattcgcacggtacagatt

SEQ ID NO: 146201 - DNA, 25 bp, SARS Virus
tcccggattcgaccggtacagattc

SEQ ID NO: 146202 - DNA, 25 bp, SARS Virus
cccggattcgaacggtacagattct

SEQ ID NO: 146203 - DNA, 25 bp, SARS Virus
ccggattcgaaccgtacagattcta

SEQ ID NO: 146204 - DNA, 25 bp, SARS Virus
cggattcgaacgctacagattctat

SEQ ID NO: 146205 - DNA, 25 bp, SARS Virus
ggattcgaacggcacagattctatg

SEQ ID NO: 146206 - DNA, 25 bp, SARS Virus
gattcgaacggtccagattctatgg

SEQ ID NO: 146207 - DNA, 25 bp, SARS Virus
attcgaacggtacagattctatgga

SEQ ID NO: 146208 - DNA, 25 bp, SARS Virus
ttcgaacggtaccgattctatggat

SEQ ID NO: 146209 - DNA, 25 bp, SARS Virus
tcgaacggtacacattctatggata

SEQ ID NO: 146210 - DNA, 25 bp, SARS Virus
cgaacggtacagcttctatggatat

SEQ ID NO: 146211 - DNA, 25 bp, SARS Virus
gaacggtacagactctatggatata

SEQ ID NO: 146212 - DNA, 25 bp, SARS Virus
aacggtacagatcctatggatataa

SEQ ID NO: 146213 - DNA, 25 bp, SARS Virus
acggtacagattctatggatataaa

SEQ ID NO: 146214 - DNA, 25 bp, SARS Virus
cggtacagattccatggatataaat

SEQ ID NO: 146215 - DNA, 25 bp, SARS Virus
ggtacagattctctggatataaata

SEQ ID NO: 146216 - DNA, 25 bp, SARS Virus
gtacagattctacggatataaatat

SEQ ID NO: 146217 - DNA, 25 bp, SARS Virus
tacagattctatcgatataaatatt

SEQ ID NO: 146218 - DNA, 25 bp, SARS Virus
acagattctatgcatataaatatta

SEQ ID NO: 146219 - DNA, 25 bp, SARS Virus
cagattctatggctataaatattaa

SEQ ID NO: 146220 - DNA, 25 bp, SARS Virus
agattctatggacataaatattaat

SEQ ID NO: 146221 - DNA, 25 bp, SARS Virus
gattctatggatctaaatattaata

SEQ ID NO: 146222 - DNA, 25 bp, SARS Virus
attctatggatacaaatattaatat

SEQ ID NO: 146223 - DNA, 25 bp, SARS Virus
ttctatggatatcaatattaatatt

SEQ ID NO: 146224 - DNA, 25 bp, SARS Virus
tctatggatatacatattaatatta

SEQ ID NO: 146225 - DNA, 25 bp, SARS Virus
ctatggatataactattaatattaa

SEQ ID NO: 146226 - DNA, 25 bp, SARS Virus
tatggatataaacattaatattaat

SEQ ID NO: 146227 - DNA, 25 bp, SARS Virus
atggatataaatcttaatattaatg

SEQ ID NO: 146228 - DNA, 25 bp, SARS Virus
tggatataaatactaatattaatgg

SEQ ID NO: 146229 - DNA, 25 bp, SARS Virus
ggatataaatatcaatattaatggt

SEQ ID NO: 146230 - DNA, 25 bp, SARS Virus
gatataaatattcatattaatggtc

SEQ ID NO: 146231 - DNA, 25 bp, SARS Virus
atataaatattactattaatggtca

SEQ ID NO: 146232 - DNA, 25 bp, SARS Virus
tataaatattaacattaatggtcaa

SEQ ID NO: 146233 - DNA, 25 bp, SARS Virus
ataaatattaatcttaatggtcaac

SEQ ID NO: 146234 - DNA, 25 bp, SARS Virus
taaatattaatactaatggtcaact

SEQ ID NO: 146235 - DNA, 25 bp, SARS Virus
aaatattaatatcaatggtcaactt

SEQ ID NO: 146236 - DNA, 25 bp, SARS Virus
aatattaatattcatggtcaacttc

SEQ ID NO: 146237 - DNA, 25 bp, SARS Virus
atattaatattactggtcaacttca

SEQ ID NO: 146238 - DNA, 25 bp, SARS Virus
tattaatattaacggtcaacttcat

SEQ ID NO: 146239 - DNA, 25 bp, SARS Virus
attaatattaatcgtcaacttcatc

SEQ ID NO: 146240 - DNA, 25 bp, SARS Virus
ttaatattaatgctcaacttcatcg

SEQ ID NO: 146241 - DNA, 25 bp, SARS Virus
taatattaatggccaacttcatcgt

SEQ ID NO: 146242 - DNA, 25 bp, SARS Virus
aatattaatggtcaacttcatcgta

SEQ ID NO: 146243 - DNA, 25 bp, SARS Virus
atattaatggtccacttcatcgtag

SEQ ID NO: 146244 - DNA, 25 bp, SARS Virus
tattaatggtcaccttcatcgtagt

SEQ ID NO: 146245 - DNA, 25 bp, SARS Virus
attaatggtcaacttcatcgtagtt

SEQ ID NO: 146246 - DNA, 25 bp, SARS Virus
ttaatggtcaacctcatcgtagtta

SEQ ID NO: 146247 - DNA, 25 bp, SARS Virus
taatggtcaactccatcgtagttac

SEQ ID NO: 146248 - DNA, 25 bp, SARS Virus
aatggtcaacttcatcgtagttaca

SEQ ID NO: 146249 - DNA, 25 bp, SARS Virus
atggtcaacttcctcgtagttacaa

SEQ ID NO: 146250 - DNA, 25 bp, SARS Virus
tggtcaacttcaccgtagttacaag

SEQ ID NO: 146251 - DNA, 25 bp, SARS Virus
ggtcaacttcatcgtagttacaagg

SEQ ID NO: 146252 - DNA, 25 bp, SARS Virus
gtcaacttcatcctagttacaagga

SEQ ID NO: 146253 - DNA, 25 bp, SARS Virus
tcaacttcatcgcagttacaaggat

SEQ ID NO: 146254 - DNA, 25 bp, SARS Virus
caacttcatcgtcgttacaaggatc

SEQ ID NO: 146255 - DNA, 25 bp, SARS Virus
aacttcatcgtacttacaaggatca

SEQ ID NO: 146256 - DNA, 25 bp, SARS Virus
acttcatcgtagctacaaggatcat

SEQ ID NO: 146257 - DNA, 25 bp, SARS Virus
cttcatcgtagtcacaaggatcata

SEQ ID NO: 146258 - DNA, 25 bp, SARS Virus
ttcatcgtagttccaaggatcataa

SEQ ID NO: 146259 - DNA, 25 bp, SARS Virus
tcatcgtagttacaaggatcataag

SEQ ID NO: 146260 - DNA, 25 bp, SARS Virus
catcgtagttaccaggatcataagg

SEQ ID NO: 146261 - DNA, 25 bp, SARS Virus
atcgtagttacacggatcataaggt

SEQ ID NO: 146262 - DNA, 25 bp, SARS Virus
tcgtagttacaacgatcataaggtt

SEQ ID NO: 146263 - DNA, 25 bp, SARS Virus
cgtagttacaagcatcataaggttc

SEQ ID NO: 146264 - DNA, 25 bp, SARS Virus
gtagttacaaggctcataaggttcg

SEQ ID NO: 146265 - DNA, 25 bp, SARS Virus
tagttacaaggaccataaggttcgt

SEQ ID NO: 146266 - DNA, 25 bp, SARS Virus
agttacaaggatcataaggttcgtt

SEQ ID NO: 146267 - DNA, 25 bp, SARS Virus
gttacaaggatcctaaggttcgttc

SEQ ID NO: 146268 - DNA, 25 bp, SARS Virus
ttacaaggatcacaaggttcgttcc

SEQ ID NO: 146269 - DNA, 25 bp, SARS Virus
tacaaggatcatcaggttcgttcct

SEQ ID NO: 146270 - DNA, 25 bp, SARS Virus
acaaggatcatacggttcgttcctg

SEQ ID NO: 146271 - DNA, 25 bp, SARS Virus
caaggatcataacgttcgttcctgt

SEQ ID NO: 146272 - DNA, 25 bp, SARS Virus
aaggatcataagcttcgttcctgtg

SEQ ID NO: 146273 - DNA, 25 bp, SARS Virus
aggatcataaggctcgttcctgtgt

SEQ ID NO: 146274 - DNA, 25 bp, SARS Virus
ggatcataaggtccgttcctgtgtt

SEQ ID NO: 146275 - DNA, 25 bp, SARS Virus
gatcataaggttcgttcctgtgttg

SEQ ID NO: 146276 - DNA, 25 bp, SARS Virus
atcataaggttccttcctgtgttgg

SEQ ID NO: 146277 - DNA, 25 bp, SARS Virus
tcataaggttcgctcctgtgttggg

SEQ ID NO: 146278 - DNA, 25 bp, SARS Virus
cataaggttcgtccctgtgttgggt

SEQ ID NO: 146279 - DNA, 25 bp, SARS Virus
ataaggttcgttcctgtgttgggta

SEQ ID NO: 146280 - DNA, 25 bp, SARS Virus
taaggttcgttcctgtgttgggtac

SEQ ID NO: 146281 - DNA, 25 bp, SARS Virus
aaggttcgttcccgtgttgggtact

SEQ ID NO: 146282 - DNA, 25 bp, SARS Virus
aggttcgttcctctgttgggtactt

SEQ ID NO: 146283 - DNA, 25 bp, SARS Virus
ggttcgttcctgcgttgggtacttt

SEQ ID NO: 146284 - DNA, 25 bp, SARS Virus
gttcgttcctgtcttgggtacttta

SEQ ID NO: 146285 - DNA, 25 bp, SARS Virus
ttcgttcctgtgctgggtactttag

SEQ ID NO: 146286 - DNA, 25 bp, SARS Virus
tcgttcctgtgtcgggtactttagt

SEQ ID NO: 146287 - DNA, 25 bp, SARS Virus
cgttcctgtgttcggtactttagta

SEQ ID NO: 146288 - DNA, 25 bp, SARS Virus
gttcctgtgttgcgtactttagtag

SEQ ID NO: 146289 - DNA, 25 bp, SARS Virus
ttcctgtgttggctactttagtaga

SEQ ID NO: 146290 - DNA, 25 bp, SARS Virus
tcctgtgttgggcactttagtagac

SEQ ID NO: 146291 - DNA, 25 bp, SARS Virus
cctgtgttgggtcctttagtagacc

SEQ ID NO: 146292 - DNA, 25 bp, SARS Virus
ctgtgttgggtactttagtagaccg

SEQ ID NO: 146293 - DNA, 25 bp, SARS Virus
tgtgttgggtaccttagtagaccgt

SEQ ID NO: 146294 - DNA, 25 bp, SARS Virus
gtgttgggtactctagtagaccgtt

SEQ ID NO: 146295 - DNA, 25 bp, SARS Virus
tgttgggtacttcagtagaccgtta

SEQ ID NO: 146296 - DNA, 25 bp, SARS Virus
gttgggtactttcgtagaccgttaa

SEQ ID NO: 146297 - DNA, 25 bp, SARS Virus
ttgggtactttactagaccgttaaa

SEQ ID NO: 146298 - DNA, 25 bp, SARS Virus
tgggtactttagcagaccgttaaat

SEQ ID NO: 146299 - DNA, 25 bp, SARS Virus
gggtactttagtcgaccgttaaata

SEQ ID NO: 146300 - DNA, 25 bp, SARS Virus
ggtactttagtacaccgttaaatat

SEQ ID NO: 146301 - DNA, 25 bp, SARS Virus
gtactttagtagcccgttaaatatt

SEQ ID NO: 146302 - DNA, 25 bp, SARS Virus
tactttagtagaccgttaaatatta

SEQ ID NO: 146303 - DNA, 25 bp, SARS Virus
actttagtagaccgttaaatattaa

SEQ ID NO: 146304 - DNA, 25 bp, SARS Virus
ctttagtagacccttaaatattaat

SEQ ID NO: 146305 - DNA, 25 bp, SARS Virus
tttagtagaccgctaaatattaata

SEQ ID NO: 146306 - DNA, 25 bp, SARS Virus
ttagtagaccgtcaaatattaatat

SEQ ID NO: 146307 - DNA, 25 bp, SARS Virus
tagtagaccgttcaatattaatatt

SEQ ID NO: 146308 - DNA, 25 bp, SARS Virus
agtagaccgttacatattaatatta

SEQ ID NO: 146309 - DNA, 25 bp, SARS Virus
gtagaccgttaactattaatattag

SEQ ID NO: 146310 - DNA, 25 bp, SARS Virus
tagaccgttaaacattaatattagt

SEQ ID NO: 146311 - DNA, 25 bp, SARS Virus
agaccgttaaatcttaatattagtc

SEQ ID NO: 146312 - DNA, 25 bp, SARS Virus
gaccgttaaatactaatattagtcg

SEQ ID NO: 146313 - DNA, 25 bp, SARS Virus
accgttaaatatcaatattagtcgt

SEQ ID NO: 146314 - DNA, 25 bp, SARS Virus
ccgttaaatattcatattagtcgtt

SEQ ID NO: 146315 - DNA, 25 bp, SARS Virus
cgttaaatattactattagtcgtta

SEQ ID NO: 146316 - DNA, 25 bp, SARS Virus
gttaaatattaacattagtcgttat

SEQ ID NO: 146317 - DNA, 25 bp, SARS Virus
ttaaatattaatcttagtcgttatt

SEQ ID NO: 146318 - DNA, 25 bp, SARS Virus
taaatattaatactagtcgttattg

SEQ ID NO: 146319 - DNA, 25 bp, SARS Virus
aaatattaatatcagtcgttattgt

SEQ ID NO: 146320 - DNA, 25 bp, SARS Virus
aatattaatattcgtcgttattgtg

SEQ ID NO: 146321 - DNA, 25 bp, SARS Virus
atattaatattactcgttattgtgg

SEQ ID NO: 146322 - DNA, 25 bp, SARS Virus
tattaatattagccgttattgtggt

SEQ ID NO: 146323 - DNA, 25 bp, SARS Virus
attaatattagtcgttattgtggtc

SEQ ID NO: 146324 - DNA, 25 bp, SARS Virus
ttaatattagtccttattgtggtca

SEQ ID NO: 146325 - DNA, 25 bp, SARS Virus
taatattagtcgctattgtggtcaa

SEQ ID NO: 146326 - DNA, 25 bp, SARS Virus
aatattagtcgtcattgtggtcaaa

SEQ ID NO: 146327 - DNA, 25 bp, SARS Virus
atattagtcgttcttgtggtcaaac

SEQ ID NO: 146328 - DNA, 25 bp, SARS Virus
tattagtcgttactgtggtcaaaca

SEQ ID NO: 146329 - DNA, 25 bp, SARS Virus
attagtcgttatcgtggtcaaacag

SEQ ID NO: 146330 - DNA, 25 bp, SARS Virus
ttagtcgttattctggtcaaacagg

SEQ ID NO: 146331 - DNA, 25 bp, SARS Virus
tagtcgttattgcggtcaaacagga

SEQ ID NO: 146332 - DNA, 25 bp, SARS Virus
agtcgttattgtcgtcaaacaggac

SEQ ID NO: 146333 - DNA, 25 bp, SARS Virus
gtcgttattgtgctcaaacaggacc

SEQ ID NO: 146334 - DNA, 25 bp, SARS Virus
tcgttattgtggccaaacaggaccg

SEQ ID NO: 146335 - DNA, 25 bp, SARS Virus
cgttattgtggtcaaacaggaccgc

SEQ ID NO: 146336 - DNA, 25 bp, SARS Virus
gttattgtggtccaacaggaccgcg

SEQ ID NO: 146337 - DNA, 25 bp, SARS Virus
ttattgtggtcacacaggaccgcga

SEQ ID NO: 146338 - DNA, 25 bp, SARS Virus
tattgtggtcaaccaggaccgcgat

SEQ ID NO: 146339 - DNA, 25 bp, SARS Virus
attgtggtcaaacaggaccgcgata

SEQ ID NO: 146340 - DNA, 25 bp, SARS Virus
ttgtggtcaaaccggaccgcgataa

SEQ ID NO: 146341 - DNA, 25 bp, SARS Virus
tgtggtcaaacacgaccgcgataaa

SEQ ID NO: 146342 - DNA, 25 bp, SARS Virus
gtggtcaaacagcaccgcgataaac

SEQ ID NO: 146343 - DNA, 25 bp, SARS Virus
tggtcaaacaggcccgcgataaaca

SEQ ID NO: 146344 - DNA, 25 bp, SARS Virus
ggtcaaacaggaccgcgataaacag

SEQ ID NO: 146345 - DNA, 25 bp, SARS Virus
gtcaaacaggaccgcgataaacaga

SEQ ID NO: 146346 - DNA, 25 bp, SARS Virus
tcaaacaggaccccgataaacagaa

SEQ ID NO: 146347 - DNA, 25 bp, SARS Virus
caaacaggaccgcgataaacagaat

SEQ ID NO: 146348 - DNA, 25 bp, SARS Virus
aaacaggaccgccataaacagaatg

SEQ ID NO: 146349 - DNA, 25 bp, SARS Virus
aacaggaccgcgctaaacagaatgt

SEQ ID NO: 146350 - DNA, 25 bp, SARS Virus
acaggaccgcgacaaacagaatgta

SEQ ID NO: 146351 - DNA, 25 bp, SARS Virus
caggaccgcgatcaacagaatgtag

SEQ ID NO: 146352 - DNA, 25 bp, SARS Virus
aggaccgcgatacacagaatgtagt

SEQ ID NO: 146353 - DNA, 25 bp, SARS Virus
ggaccgcgataaccagaatgtagta

SEQ ID NO: 146354 - DNA, 25 bp, SARS Virus
gaccgcgataaacagaatgtagtag

SEQ ID NO: 146355 - DNA, 25 bp, SARS Virus
accgcgataaaccgaatgtagtaga

SEQ ID NO: 146356 - DNA, 25 bp, SARS Virus
ccgcgataaacacaatgtagtagag

SEQ ID NO: 146357 - DNA, 25 bp, SARS Virus
cgcgataaacagcatgtagtagagg

SEQ ID NO: 146358 - DNA, 25 bp, SARS Virus
gcgataaacagactgtagtagaggg

SEQ ID NO: 146359 - DNA, 25 bp, SARS Virus
cgataaacagaacgtagtagaggga

SEQ ID NO: 146360 - DNA, 25 bp, SARS Virus
gataaacagaatctagtagagggaa

SEQ ID NO: 146361 - DNA, 25 bp, SARS Virus
ataaacagaatgcagtagagggaac

SEQ ID NO: 146362 - DNA, 25 bp, SARS Virus
taaacagaatgtcgtagagggaact

SEQ ID NO: 146363 - DNA, 25 bp, SARS Virus
aaacagaatgtactagagggaactg

SEQ ID NO: 146364 - DNA, 25 bp, SARS Virus
aacagaatgtagcagagggaactga

SEQ ID NO: 146365 - DNA, 25 bp, SARS Virus
acagaatgtagtcgagggaactgat

SEQ ID NO: 146366 - DNA, 25 bp, SARS Virus
cagaatgtagtacagggaactgatg

SEQ ID NO: 146367 - DNA, 25 bp, SARS Virus
agaatgtagtagcgggaactgatgt

SEQ ID NO: 146368 - DNA, 25 bp, SARS Virus
gaatgtagtagacggaactgatgtt

SEQ ID NO: 146369 - DNA, 25 bp, SARS Virus
aatgtagtagagcgaactgatgttt

SEQ ID NO: 146370 - DNA, 25 bp, SARS Virus
atgtagtagaggcaactgatgtttt

SEQ ID NO: 146371 - DNA, 25 bp, SARS Virus
tgtagtagagggcactgatgttttc

SEQ ID NO: 146372 - DNA, 25 bp, SARS Virus
gtagtagagggacctgatgttttct

SEQ ID NO: 146373 - DNA, 25 bp, SARS Virus
tagtagagggaactgatgttttctt

SEQ ID NO: 146374 - DNA, 25 bp, SARS Virus
agtagagggaaccgatgttttctta

SEQ ID NO: 146375 - DNA, 25 bp, SARS Virus
gtagagggaactcatgttttcttag

SEQ ID NO: 146376 - DNA, 25 bp, SARS Virus
tagagggaactgctgttttcttaga

SEQ ID NO: 146377 - DNA, 25 bp, SARS Virus
agagggaactgacgttttcttagac

SEQ ID NO: 146378 - DNA, 25 bp, SARS Virus
gagggaactgatcttttcttagacg

SEQ ID NO: 146379 - DNA, 25 bp, SARS Virus
agggaactgatgctttcttagacgt

SEQ ID NO: 146380 - DNA, 25 bp, SARS Virus
gggaactgatgtcttcttagacgta

SEQ ID NO: 146381 - DNA, 25 bp, SARS Virus
ggaactgatgttctcttagacgtat

SEQ ID NO: 146382 - DNA, 25 bp, SARS Virus
gaactgatgtttccttagacgtatc

SEQ ID NO: 146383 - DNA, 25 bp, SARS Virus
aactgatgttttcttagacgtatct

SEQ ID NO: 146384 - DNA, 25 bp, SARS Virus
actgatgttttcctagacgtatctg

SEQ ID NO: 146385 - DNA, 25 bp, SARS Virus
ctgatgttttctcagacgtatctgt

SEQ ID NO: 146386 - DNA, 25 bp, SARS Virus
tgatgttttcttcgacgtatctgta

SEQ ID NO: 146387 - DNA, 25 bp, SARS Virus
gatgttttcttacacgtatctgtaa

SEQ ID NO: 146388 - DNA, 25 bp, SARS Virus
atgttttcttagccgtatctgtaac

SEQ ID NO: 146389 - DNA, 25 bp, SARS Virus
tgttttcttagacgtatctgtaacc

SEQ ID NO: 146390 - DNA, 25 bp, SARS Virus
gttttcttagacctatctgtaacct

SEQ ID NO: 146391 - DNA, 25 bp, SARS Virus
ttttcttagacgcatctgtaacctc

SEQ ID NO: 146392 - DNA, 25 bp, SARS Virus
tttcttagacgtctctgtaacctct

SEQ ID NO: 146393 - DNA, 25 bp, SARS Virus
ttcttagacgtacctgtaacctctt

SEQ ID NO: 146394 - DNA, 25 bp, SARS Virus
tcttagacgtatctgtaacctcttc

SEQ ID NO: 146395 - DNA, 25 bp, SARS Virus
cttagacgtatccgtaacctcttcg

SEQ ID NO: 146396 - DNA, 25 bp, SARS Virus
ttagacgtatctctaacctcttcgt

SEQ ID NO: 146397 - DNA, 25 bp, SARS Virus
tagacgtatctgcaacctcttcgtt

SEQ ID NO: 146398 - DNA, 25 bp, SARS Virus
agacgtatctgtcacctcttcgttt

SEQ ID NO: 146399 - DNA, 25 bp, SARS Virus
gacgtatctgtaccctcttcgtttc

SEQ ID NO: 146400 - DNA, 25 bp, SARS Virus
acgtatctgtaacctcttcgtttct

SEQ ID NO: 146401 - DNA, 25 bp, SARS Virus
cgtatctgtaacctcttcgtttcta

SEQ ID NO: 146402 - DNA, 25 bp, SARS Virus
gtatctgtaaccccttcgtttctag

SEQ ID NO: 146403 - DNA, 25 bp, SARS Virus
tatctgtaacctcttcgtttctagt

SEQ ID NO: 146404 - DNA, 25 bp, SARS Virus
atctgtaacctcctcgtttctagta

SEQ ID NO: 146405 - DNA, 25 bp, SARS Virus
tctgtaacctctccgtttctagtaa

SEQ ID NO: 146406 - DNA, 25 bp, SARS Virus
ctgtaacctcttcgtttctagtaag

SEQ ID NO: 146407 - DNA, 25 bp, SARS Virus
tgtaacctcttcctttctagtaagt

SEQ ID NO: 146408 - DNA, 25 bp, SARS Virus
gtaacctcttcgcttctagtaagtt

SEQ ID NO: 146409 - DNA, 25 bp, SARS Virus
taacctcttcgtctctagtaagttg

SEQ ID NO: 146410 - DNA, 25 bp, SARS Virus
aacctcttcgttcctagtaagttga

SEQ ID NO: 146411 - DNA, 25 bp, SARS Virus
acctcttcgtttctagtaagttgaa

SEQ ID NO: 146412 - DNA, 25 bp, SARS Virus
cctcttcgtttccagtaagttgaat

SEQ ID NO: 146413 - DNA, 25 bp, SARS Virus
ctcttcgtttctcgtaagttgaatc

SEQ ID NO: 146414 - DNA, 25 bp, SARS Virus
tcttcgtttctactaagttgaatca

SEQ ID NO: 146415 - DNA, 25 bp, SARS Virus
cttcgtttctagcaagttgaatcac

SEQ ID NO: 146416 - DNA, 25 bp, SARS Virus
ttcgtttctagtcagttgaatcacc

SEQ ID NO: 146417 - DNA, 25 bp, SARS Virus
tcgtttctagtacgttgaatcaccg

SEQ ID NO: 146418 - DNA, 25 bp, SARS Virus
cgtttctagtaacttgaatcaccgt

SEQ ID NO: 146419 - DNA, 25 bp, SARS Virus
gtttctagtaagctgaatcaccgtc

SEQ ID NO: 146420 - DNA, 25 bp, SARS Virus
tttctagtaagtcgaatcaccgtct

SEQ ID NO: 146421 - DNA, 25 bp, SARS Virus
ttctagtaagttcaatcaccgtctt

SEQ ID NO: 146422 - DNA, 25 bp, SARS Virus
tctagtaagttgcatcaccgtcttt

SEQ ID NO: 146423 - DNA, 25 bp, SARS Virus
ctagtaagttgactcaccgtctttg

SEQ ID NO: 146424 - DNA, 25 bp, SARS Virus
tagtaagttgaaccaccgtctttgc

SEQ ID NO: 146425 - DNA, 25 bp, SARS Virus
agtaagttgaatcaccgtctttgcg

SEQ ID NO: 146426 - DNA, 25 bp, SARS Virus
gtaagttgaatccccgtctttgcgg

SEQ ID NO: 146427 - DNA, 25 bp, SARS Virus
taagttgaatcaccgtctttgcggt

SEQ ID NO: 146428 - DNA, 25 bp, SARS Virus
aagttgaatcaccgtctttgcggta

SEQ ID NO: 146429 - DNA, 25 bp, SARS Virus
agttgaatcaccctctttgcggtat

SEQ ID NO: 146430 - DNA, 25 bp, SARS Virus
gttgaatcaccgcctttgcggtatc

SEQ ID NO: 146431 - DNA, 25 bp, SARS Virus
ttgaatcaccgtctttgcggtatcg

SEQ ID NO: 146432 - DNA, 25 bp, SARS Virus
tgaatcaccgtccttgcggtatcgt

SEQ ID NO: 146433 - DNA, 25 bp, SARS Virus
ggtcatggtcacgcaggtaatttta

SEQ ID NO: 146434 - DNA, 25 bp, SARS Virus
gtcatggtcactgaggtaattttaa

SEQ ID NO: 146435 - DNA, 25 bp, SARS Virus
tcatggtcactcgggtaattttaat

SEQ ID NO: 146436 - DNA, 25 bp, SARS Virus
catggtcactcaggtaattttaatt

SEQ ID NO: 146437 - DNA, 25 bp, SARS Virus
atggtcactcaggtaattttaattt

SEQ ID NO: 146438 - DNA, 25 bp, SARS Virus
tggtcactcagggaattttaatttt

SEQ ID NO: 146439 - DNA, 25 bp, SARS Virus
ggtcactcaggtgattttaatttta

SEQ ID NO: 146440 - DNA, 25 bp, SARS Virus
gtcactcaggtagttttaattttaa

SEQ ID NO: 146441 - DNA, 25 bp, SARS Virus
tcactcaggtaagtttaattttaac

SEQ ID NO: 146442 - DNA, 25 bp, SARS Virus
cactcaggtaatgttaattttaact

SEQ ID NO: 146443 - DNA, 25 bp, SARS Virus
actcaggtaattgtaattttaactg

SEQ ID NO: 146444 - DNA, 25 bp, SARS Virus
ctcaggtaatttgaattttaactgt

SEQ ID NO: 146445 - DNA, 25 bp, SARS Virus
tcaggtaattttgattttaactgtg

SEQ ID NO: 146446 - DNA, 25 bp, SARS Virus
caggtaattttagttttaactgtgt

SEQ ID NO: 146447 - DNA, 25 bp, SARS Virus
aggtaattttaagtttaactgtgtg

SEQ ID NO: 146448 - DNA, 25 bp, SARS Virus
ggtaattttaatgttaactgtgtga

SEQ ID NO: 146449 - DNA, 25 bp, SARS Virus
gtaattttaattgtaactgtgtgac

SEQ ID NO: 146450 - DNA, 25 bp, SARS Virus
taattttaatttgaactgtgtgacc

SEQ ID NO: 146451 - DNA, 25 bp, SARS Virus
aattttaattttgactgtgtgacca

SEQ ID NO: 146452 - DNA, 25 bp, SARS Virus
attttaattttagctgtgtgaccaa

SEQ ID NO: 146453 - DNA, 25 bp, SARS Virus
ttttaattttaagtgtgtgaccaag

SEQ ID NO: 146454 - DNA, 25 bp, SARS Virus
tttaattttaacggtgtgaccaaga

SEQ ID NO: 146455 - DNA, 25 bp, SARS Virus
ttaattttaactgtgtgaccaagaa

SEQ ID NO: 146456 - DNA, 25 bp, SARS Virus
taattttaactgggtgaccaagaat

SEQ ID NO: 146457 - DNA, 25 bp, SARS Virus
aattttaactgtgtgaccaagaatt

SEQ ID NO: 146458 - DNA, 25 bp, SARS Virus
attttaactgtgggaccaagaatta

SEQ ID NO: 146459 - DNA, 25 bp, SARS Virus
ttttaactgtgtgaccaagaattat

SEQ ID NO: 146460 - DNA, 25 bp, SARS Virus
tttaactgtgtggccaagaattatt

SEQ ID NO: 146461 - DNA, 25 bp, SARS Virus
ttaactgtgtgagcaagaattattc

SEQ ID NO: 146462 - DNA, 25 bp, SARS Virus
taactgtgtgacgaagaattattcc

SEQ ID NO: 146463 - DNA, 25 bp, SARS Virus
aactgtgtgaccgagaattattcca

SEQ ID NO: 146464 - DNA, 25 bp, SARS Virus
actgtgtgaccaggaattattccag

SEQ ID NO: 146465 - DNA, 25 bp, SARS Virus
ctgtgtgaccaagaattattccagt

SEQ ID NO: 146466 - DNA, 25 bp, SARS Virus
tgtgtgaccaaggattattccagtc

SEQ ID NO: 146467 - DNA, 25 bp, SARS Virus
gtgtgaccaagagttattccagtca

SEQ ID NO: 146468 - DNA, 25 bp, SARS Virus
tgtgaccaagaagtattccagtcac

SEQ ID NO: 146469 - DNA, 25 bp, SARS Virus
gtgaccaagaatgattccagtcacc

SEQ ID NO: 146470 - DNA, 25 bp, SARS Virus
tgaccaagaattgttccagtcacct

SEQ ID NO: 146471 - DNA, 25 bp, SARS Virus
gaccaagaattagtccagtcaccta

SEQ ID NO: 146472 - DNA, 25 bp, SARS Virus
accaagaattatgccagtcacctat

SEQ ID NO: 146473 - DNA, 25 bp, SARS Virus
ccaagaattattgcagtcacctatt

SEQ ID NO: 146474 - DNA, 25 bp, SARS Virus
caagaattattcgagtcacctatta

SEQ ID NO: 146475 - DNA, 25 bp, SARS Virus
aagaattattccggtcacctattaa

SEQ ID NO: 146476 - DNA, 25 bp, SARS Virus
agaattattccagtcacctattaaa

SEQ ID NO: 146477 - DNA, 25 bp, SARS Virus
gaattattccaggcacctattaaaa

SEQ ID NO: 146478 - DNA, 25 bp, SARS Virus
aattattccagtgacctattaaaac

SEQ ID NO: 146479 - DNA, 25 bp, SARS Virus
attattccagtcgcctattaaaacc

SEQ ID NO: 146480 - DNA, 25 bp, SARS Virus
ttattccagtcagctattaaaacca

SEQ ID NO: 146481 - DNA, 25 bp, SARS Virus
tattccagtcacgtattaaaaccag

SEQ ID NO: 146482 - DNA, 25 bp, SARS Virus
attccagtcaccgattaaaaccagg

SEQ ID NO: 146483 - DNA, 25 bp, SARS Virus
ttccagtcacctgttaaaaccaggt

SEQ ID NO: 146484 - DNA, 25 bp, SARS Virus
tccagtcacctagtaaaaccaggtg

SEQ ID NO: 146485 - DNA, 25 bp, SARS Virus
ccagtcacctatgaaaaccaggtgt

SEQ ID NO: 146486 - DNA, 25 bp, SARS Virus
cagtcacctattgaaaccaggtgtt

SEQ ID NO: 146487 - DNA, 25 bp, SARS Virus
agtcacctattagaaccaggtgttt

SEQ ID NO: 146488 - DNA, 25 bp, SARS Virus
gtcacctattaagaccaggtgtttg

SEQ ID NO: 146489 - DNA, 25 bp, SARS Virus
tcacctattaaagccaggtgtttgg

SEQ ID NO: 146490 - DNA, 25 bp, SARS Virus
cacctattaaaagcaggtgtttggc

SEQ ID NO: 146491 - DNA, 25 bp, SARS Virus
acctattaaaacgaggtgtttggca

SEQ ID NO: 146492 - DNA, 25 bp, SARS Virus
cctattaaaaccgggtgtttggcac

SEQ ID NO: 146493 - DNA, 25 bp, SARS Virus
ctattaaaaccaggtgtttggcacc

SEQ ID NO: 146494 - DNA, 25 bp, SARS Virus
tattaaaaccaggtgtttggcaccg

SEQ ID NO: 146495 - DNA, 25 bp, SARS Virus
attaaaaccaggggtttggcaccgg

SEQ ID NO: 146496 - DNA, 25 bp, SARS Virus
ttaaaaccaggtgtttggcaccggc

SEQ ID NO: 146497 - DNA, 25 bp, SARS Virus
taaaaccaggtggttggcaccggcc

SEQ ID NO: 146498 - DNA, 25 bp, SARS Virus
aaaaccaggtgtgtggcaccggcca

SEQ ID NO: 146499 - DNA, 25 bp, SARS Virus
aaaccaggtgttgggcaccggccac

SEQ ID NO: 146500 - DNA, 25 bp, SARS Virus
aaccaggtgtttggcaccggccacg

SEQ ID NO: 146501 - DNA, 25 bp, SARS Virus
accaggtgtttggcaccggccacgt

SEQ ID NO: 146502 - DNA, 25 bp, SARS Virus
ccaggtgtttgggaccggccacgta

SEQ ID NO: 146503 - DNA, 25 bp, SARS Virus
caggtgtttggcgccggccacgtaa

SEQ ID NO: 146504 - DNA, 25 bp, SARS Virus
aggtgtttggcagcggccacgtaaa

SEQ ID NO: 146505 - DNA, 25 bp, SARS Virus
ggtgtttggcacgggccacgtaaat

SEQ ID NO: 146506 - DNA, 25 bp, SARS Virus
gtgtttggcaccggccacgtaaatt

SEQ ID NO: 146507 - DNA, 25 bp, SARS Virus
tgtttggcaccggccacgtaaattt

SEQ ID NO: 146508 - DNA, 25 bp, SARS Virus
gtttggcaccgggcacgtaaatttt

SEQ ID NO: 146509 - DNA, 25 bp, SARS Virus
tttggcaccggcgacgtaaattttc

SEQ ID NO: 146510 - DNA, 25 bp, SARS Virus
ttggcaccggccgcgtaaattttca

SEQ ID NO: 146511 - DNA, 25 bp, SARS Virus
tggcaccggccaggtaaattttcaa

SEQ ID NO: 146512 - DNA, 25 bp, SARS Virus
ggcaccggccacgtaaattttcaag

SEQ ID NO: 146513 - DNA, 25 bp, SARS Virus
gcaccggccacggaaattttcaagt

SEQ ID NO: 146514 - DNA, 25 bp, SARS Virus
caccggccacgtgaattttcaagtt

SEQ ID NO: 146515 - DNA, 25 bp, SARS Virus
accggccacgtagattttcaagttt

SEQ ID NO: 146516 - DNA, 25 bp, SARS Virus
ccggccacgtaagttttcaagtttt

SEQ ID NO: 146517 - DNA, 25 bp, SARS Virus
cggccacgtaaagtttcaagttttc

SEQ ID NO: 146518 - DNA, 25 bp, SARS Virus
ggccacgtaaatgttcaagttttct

SEQ ID NO: 146519 - DNA, 25 bp, SARS Virus
gccacgtaaattgtcaagttttctt

SEQ ID NO: 146520 - DNA, 25 bp, SARS Virus
ccacgtaaatttgcaagttttcttt

SEQ ID NO: 146521 - DNA, 25 bp, SARS Virus
cacgtaaattttgaagttttctttc

SEQ ID NO: 146522 - DNA, 25 bp, SARS Virus
acgtaaattttcgagttttctttca

SEQ ID NO: 146523 - DNA, 25 bp, SARS Virus
cgtaaattttcaggttttctttcat

SEQ ID NO: 146524 - DNA, 25 bp, SARS Virus
gtaaattttcaagttttctttcatg

SEQ ID NO: 146525 - DNA, 25 bp, SARS Virus
taaattttcaaggtttctttcatga

SEQ ID NO: 146526 - DNA, 25 bp, SARS Virus
aaattttcaagtgttctttcatgat

SEQ ID NO: 146527 - DNA, 25 bp, SARS Virus
aattttcaagttgtctttcatgatg

SEQ ID NO: 146528 - DNA, 25 bp, SARS Virus
attttcaagtttgctttcatgatgt

SEQ ID NO: 146529 - DNA, 25 bp, SARS Virus
ttttcaagttttgtttcatgatgtt

SEQ ID NO: 146530 - DNA, 25 bp, SARS Virus
tttcaagttttcgttcatgatgttg

SEQ ID NO: 146531 - DNA, 25 bp, SARS Virus
ttcaagttttctgtcatgatgttga

SEQ ID NO: 146532 - DNA, 25 bp, SARS Virus
tcaagttttcttgcatgatgttgag

SEQ ID NO: 146533 - DNA, 25 bp, SARS Virus
caagttttctttgatgatgttgaga

SEQ ID NO: 146534 - DNA, 25 bp, SARS Virus
aagttttctttcgtgatgttgagac

SEQ ID NO: 146535 - DNA, 25 bp, SARS Virus
agttttctttcaggatgttgagaca

SEQ ID NO: 146536 - DNA, 25 bp, SARS Virus
gttttctttcatgatgttgagacat

SEQ ID NO: 146537 - DNA, 25 bp, SARS Virus
ttttctttcatggtgttgagacatt

SEQ ID NO: 146538 - DNA, 25 bp, SARS Virus
tttctttcatgaggttgagacattc

SEQ ID NO: 146539 - DNA, 25 bp, SARS Virus
ttctttcatgatgttgagacattcc

SEQ ID NO: 146540 - DNA, 25 bp, SARS Virus
tctttcatgatggtgagacattcca

SEQ ID NO: 146541 - DNA, 25 bp, SARS Virus
ctttcatgatgtggagacattccaa

SEQ ID NO: 146542 - DNA, 25 bp, SARS Virus
tttcatgatgttgagacattccaac

SEQ ID NO: 146543 - DNA, 25 bp, SARS Virus
ttcatgatgttgggacattccaacc

SEQ ID NO: 146544 - DNA, 25 bp, SARS Virus
tcatgatgttgagacattccaacca

SEQ ID NO: 146545 - DNA, 25 bp, SARS Virus
catgatgttgaggcattccaaccat

SEQ ID NO: 146546 - DNA, 25 bp, SARS Virus
atgatgttgagagattccaaccatc

SEQ ID NO: 146547 - DNA, 25 bp, SARS Virus
tgatgttgagacgttccaaccatcg

SEQ ID NO: 146548 - DNA, 25 bp, SARS Virus
gatgttgagacagtccaaccatcgg

SEQ ID NO: 146549 - DNA, 25 bp, SARS Virus
atgttgagacatgccaaccatcggt

SEQ ID NO: 146550 - DNA, 25 bp, SARS Virus
tgttgagacattgcaaccatcggtt

SEQ ID NO: 146551 - DNA, 25 bp, SARS Virus
gttgagacattcgaaccatcggtta

SEQ ID NO: 146552 - DNA, 25 bp, SARS Virus
ttgagacattccgaccatcggttac

SEQ ID NO: 146553 - DNA, 25 bp, SARS Virus
tgagacattccagccatcggttacg

SEQ ID NO: 146554 - DNA, 25 bp, SARS Virus
gagacattccaagcatcggttacgg

SEQ ID NO: 146555 - DNA, 25 bp, SARS Virus
agacattccaacgatcggttacggt

SEQ ID NO: 146556 - DNA, 25 bp, SARS Virus
gacattccaaccgtcggttacggtc

SEQ ID NO: 146557 - DNA, 25 bp, SARS Virus
acattccaaccagcggttacggtca

SEQ ID NO: 146558 - DNA, 25 bp, SARS Virus
cattccaaccatgggttacggtcat

SEQ ID NO: 146559 - DNA, 25 bp, SARS Virus
attccaaccatcggttacggtcatc

SEQ ID NO: 146560 - DNA, 25 bp, SARS Virus
ttccaaccatcggttacggtcatca

SEQ ID NO: 146561 - DNA, 25 bp, SARS Virus
tccaaccatcgggtacggtcatcac

SEQ ID NO: 146562 - DNA, 25 bp, SARS Virus
ccaaccatcggtgacggtcatcacc

SEQ ID NO: 146563 - DNA, 25 bp, SARS Virus
caaccatcggttgcggtcatcacca

SEQ ID NO: 146564 - DNA, 25 bp, SARS Virus
aaccatcggttagggtcatcaccac

SEQ ID NO: 146565 - DNA, 25 bp, SARS Virus
accatcggttacggtcatcaccaca

SEQ ID NO: 146566 - DNA, 25 bp, SARS Virus
ccatcggttacggtcatcaccacat

SEQ ID NO: 146567 - DNA, 25 bp, SARS Virus
catcggttacgggcatcaccacatt

SEQ ID NO: 146568 - DNA, 25 bp, SARS Virus
atcggttacggtgatcaccacattt

SEQ ID NO: 146569 - DNA, 25 bp, SARS Virus
tcggttacggtcgtcaccacatttt

SEQ ID NO: 146570 - DNA, 25 bp, SARS Virus
cggttacggtcagcaccacattttt

SEQ ID NO: 146571 - DNA, 25 bp, SARS Virus
ggttacggtcatgaccacatttttg

SEQ ID NO: 146572 - DNA, 25 bp, SARS Virus
gttacggtcatcgccacatttttgg

SEQ ID NO: 146573 - DNA, 25 bp, SARS Virus
ttacggtcatcagcacatttttggt

SEQ ID NO: 146574 - DNA, 25 bp, SARS Virus
tacggtcatcacgacatttttggta

SEQ ID NO: 146575 - DNA, 25 bp, SARS Virus
acggtcatcaccgcatttttggtat

SEQ ID NO: 146576 - DNA, 25 bp, SARS Virus
cggtcatcaccagatttttggtatt

SEQ ID NO: 146577 - DNA, 25 bp, SARS Virus
ggtcatcaccacgtttttggtatta

SEQ ID NO: 146578 - DNA, 25 bp, SARS Virus
gtcatcaccacagttttggtattag

SEQ ID NO: 146579 - DNA, 25 bp, SARS Virus
tcatcaccacatgtttggtattagt

SEQ ID NO: 146580 - DNA, 25 bp, SARS Virus
catcaccacattgttggtattagta

SEQ ID NO: 146581 - DNA, 25 bp, SARS Virus
atcaccacatttgtggtattagtaa

SEQ ID NO: 146582 - DNA, 25 bp, SARS Virus
tcaccacattttgggtattagtaaa

SEQ ID NO: 146583 - DNA, 25 bp, SARS Virus
caccacatttttggtattagtaaat

SEQ ID NO: 146584 - DNA, 25 bp, SARS Virus
accacatttttggtattagtaaatt

SEQ ID NO: 146585 - DNA, 25 bp, SARS Virus
ccacatttttgggattagtaaatta

SEQ ID NO: 146586 - DNA, 25 bp, SARS Virus
cacatttttggtgttagtaaattac

SEQ ID NO: 146587 - DNA, 25 bp, SARS Virus
acatttttggtagtagtaaattacc

SEQ ID NO: 146588 - DNA, 25 bp, SARS Virus
catttttggtatgagtaaattaccg

SEQ ID NO: 146589 - DNA, 25 bp, SARS Virus
atttttggtattggtaaattaccgg

SEQ ID NO: 146590 - DNA, 25 bp, SARS Virus
tttttggtattagtaaattaccggt

SEQ ID NO: 146591 - DNA, 25 bp, SARS Virus
ttttggtattaggaaattaccggtt

SEQ ID NO: 146592 - DNA, 25 bp, SARS Virus
tttggtattagtgaattaccggtta

SEQ ID NO: 146593 - DNA, 25 bp, SARS Virus
ttggtattagtagattaccggttat

SEQ ID NO: 146594 - DNA, 25 bp, SARS Virus
tggtattagtaagttaccggttatt

SEQ ID NO: 146595 - DNA, 25 bp, SARS Virus
ggtattagtaaagtaccggttattg

SEQ ID NO: 146596 - DNA, 25 bp, SARS Virus
gtattagtaaatgaccggttattgt

SEQ ID NO: 146597 - DNA, 25 bp, SARS Virus
tattagtaaattgccggttattgtt

SEQ ID NO: 146598 - DNA, 25 bp, SARS Virus
attagtaaattagcggttattgtta

SEQ ID NO: 146599 - DNA, 25 bp, SARS Virus
ttagtaaattacgggttattgttaa

SEQ ID NO: 146600 - DNA, 25 bp, SARS Virus
tagtaaattaccggttattgttaat

SEQ ID NO: 146601 - DNA, 25 bp, SARS Virus
agtaaattaccggttattgttaatt

SEQ ID NO: 146602 - DNA, 25 bp, SARS Virus
gtaaattaccgggtattgttaattc

SEQ ID NO: 146603 - DNA, 25 bp, SARS Virus
taaattaccggtgattgttaattct

SEQ ID NO: 146604 - DNA, 25 bp, SARS Virus
aaattaccggttgttgttaattctc

SEQ ID NO: 146605 - DNA, 25 bp, SARS Virus
aattaccggttagtgttaattctcg

SEQ ID NO: 146606 - DNA, 25 bp, SARS Virus
attaccggttatggttaattctcgt

SEQ ID NO: 146607 - DNA, 25 bp, SARS Virus
ttaccggttattgttaattctcgtc

SEQ ID NO: 146608 - DNA, 25 bp, SARS Virus
taccggttattggtaattctcgtcc

SEQ ID NO: 146609 - DNA, 25 bp, SARS Virus
accggttattgtgaattctcgtcca

SEQ ID NO: 146610 - DNA, 25 bp, SARS Virus
ccggttattgttgattctcgtccac

SEQ ID NO: 146611 - DNA, 25 bp, SARS Virus
cggttattgttagttctcgtccacc

SEQ ID NO: 146612 - DNA, 25 bp, SARS Virus
ggttattgttaagtctcgtccaccc

SEQ ID NO: 146613 - DNA, 25 bp, SARS Virus
gttattgttaatgctcgtccacccc

SEQ ID NO: 146614 - DNA, 25 bp, SARS Virus
ttattgttaattgtcgtccacccca

SEQ ID NO: 146615 - DNA, 25 bp, SARS Virus
tattgttaattcgcgtccaccccac

SEQ ID NO: 146616 - DNA, 25 bp, SARS Virus
attgttaattctggtccaccccacg

SEQ ID NO: 146617 - DNA, 25 bp, SARS Virus
ttgttaattctcgtccaccccacgt

SEQ ID NO: 146618 - DNA, 25 bp, SARS Virus
tgttaattctcggccaccccacgtt

SEQ ID NO: 146619 - DNA, 25 bp, SARS Virus
gttaattctcgtgcaccccacgttc

SEQ ID NO: 146620 - DNA, 25 bp, SARS Virus
ttaattctcgtcgaccccacgttcc

SEQ ID NO: 146621 - DNA, 25 bp, SARS Virus
taattctcgtccgccccacgttcca

SEQ ID NO: 146622 - DNA, 25 bp, SARS Virus
aattctcgtccagcccacgttccaa

SEQ ID NO: 146623 - DNA, 25 bp, SARS Virus
attctcgtccacgccacgttccaaa

SEQ ID NO: 146624 - DNA, 25 bp, SARS Virus
ttctcgtccaccgcacgttccaaac

SEQ ID NO: 146625 - DNA, 25 bp, SARS Virus
tctcgtccacccgacgttccaaacg

SEQ ID NO: 146626 - DNA, 25 bp, SARS Virus
ctcgtccaccccgcgttccaaacgg

SEQ ID NO: 146627 - DNA, 25 bp, SARS Virus
tcgtccaccccaggttccaaacggt

SEQ ID NO: 146628 - DNA, 25 bp, SARS Virus
cgtccaccccacgttccaaacggta

SEQ ID NO: 146629 - DNA, 25 bp, SARS Virus
gtccaccccacggtccaaacggtag

SEQ ID NO: 146630 - DNA, 25 bp, SARS Virus
tccaccccacgtgccaaacggtagt

SEQ ID NO: 146631 - DNA, 25 bp, SARS Virus
ccaccccacgttgcaaacggtagtc

SEQ ID NO: 146632 - DNA, 25 bp, SARS Virus
caccccacgttcgaaacggtagtcc

SEQ ID NO: 146633 - DNA, 25 bp, SARS Virus
accccacgttccgaacggtagtccc

SEQ ID NO: 146634 - DNA, 25 bp, SARS Virus
ccccacgttccagacggtagtcccc

SEQ ID NO: 146635 - DNA, 25 bp, SARS Virus
cccacgttccaagcggtagtcccct

SEQ ID NO: 146636 - DNA, 25 bp, SARS Virus
ccacgttccaaagggtagtcccctc

SEQ ID NO: 146637 - DNA, 25 bp, SARS Virus
cacgttccaaacggtagtcccctct

SEQ ID NO: 146638 - DNA, 25 bp, SARS Virus
acgttccaaacggtagtcccctctt

SEQ ID NO: 146639 - DNA, 25 bp, SARS Virus
cgttccaaacgggagtcccctcttt

SEQ ID NO: 146640 - DNA, 25 bp, SARS Virus
gttccaaacggtggtcccctctttc

SEQ ID NO: 146641 - DNA, 25 bp, SARS Virus
ttccaaacggtagtcccctctttcc

SEQ ID NO: 146642 - DNA, 25 bp, SARS Virus
tccaaacggtaggcccctctttccg

SEQ ID NO: 146643 - DNA, 25 bp, SARS Virus
ccaaacggtagtgccctctttccgt

SEQ ID NO: 146644 - DNA, 25 bp, SARS Virus
caaacggtagtcgcctctttccgtg

SEQ ID NO: 146645 - DNA, 25 bp, SARS Virus
aaacggtagtccgctctttccgtgt

SEQ ID NO: 146646 - DNA, 25 bp, SARS Virus
aacggtagtcccgtctttccgtgta

SEQ ID NO: 146647 - DNA, 25 bp, SARS Virus
acggtagtccccgctttccgtgtaa

SEQ ID NO: 146648 - DNA, 25 bp, SARS Virus
cggtagtcccctgtttccgtgtaat

SEQ ID NO: 146649 - DNA, 25 bp, SARS Virus
ggtagtcccctcgttccgtgtaatc

SEQ ID NO: 146650 - DNA, 25 bp, SARS Virus
gtagtcccctctgtccgtgtaatct

SEQ ID NO: 146651 - DNA, 25 bp, SARS Virus
tagtcccctcttgccgtgtaatcta

SEQ ID NO: 146652 - DNA, 25 bp, SARS Virus
agtcccctctttgcgtgtaatctat

SEQ ID NO: 146653 - DNA, 25 bp, SARS Virus
gtcccctctttcggtgtaatctata

SEQ ID NO: 146654 - DNA, 25 bp, SARS Virus
tcccctctttccgtgtaatctatac

SEQ ID NO: 146655 - DNA, 25 bp, SARS Virus
cccctctttccgggtaatctataca

SEQ ID NO: 146656 - DNA, 25 bp, SARS Virus
ccctctttccgtgtaatctatacag

SEQ ID NO: 146657 - DNA, 25 bp, SARS Virus
cctctttccgtggaatctatacaga

SEQ ID NO: 146658 - DNA, 25 bp, SARS Virus
ctctttccgtgtgatctatacagag

SEQ ID NO: 146659 - DNA, 25 bp, SARS Virus
tctttccgtgtagtctatacagaga

SEQ ID NO: 146660 - DNA, 25 bp, SARS Virus
ctttccgtgtaagctatacagagag

SEQ ID NO: 146661 - DNA, 25 bp, SARS Virus
tttccgtgtaatgtatacagagaga

SEQ ID NO: 146662 - DNA, 25 bp, SARS Virus
ttccgtgtaatcgatacagagagag

SEQ ID NO: 146663 - DNA, 25 bp, SARS Virus
tccgtgtaatctgtacagagagagt

SEQ ID NO: 146664 - DNA, 25 bp, SARS Virus
ccgtgtaatctagacagagagagtt

SEQ ID NO: 146665 - DNA, 25 bp, SARS Virus
cgtgtaatctatgcagagagagttt

SEQ ID NO: 146666 - DNA, 25 bp, SARS Virus
gtgtaatctatagagagagagtttc

SEQ ID NO: 146667 - DNA, 25 bp, SARS Virus
tgtaatctatacggagagagtttcc

SEQ ID NO: 146668 - DNA, 25 bp, SARS Virus
gtaatctatacagagagagtttccc

SEQ ID NO: 146669 - DNA, 25 bp, SARS Virus
taatctatacagggagagtttcccg

SEQ ID NO: 146670 - DNA, 25 bp, SARS Virus
aatctatacagagagagtttcccgg

SEQ ID NO: 146671 - DNA, 25 bp, SARS Virus
atctatacagagggagtttcccgga

SEQ ID NO: 146672 - DNA, 25 bp, SARS Virus
tctatacagagagagtttcccggat

SEQ ID NO: 146673 - DNA, 25 bp, SARS Virus
ctatacagagagggtttcccggatt

SEQ ID NO: 146674 - DNA, 25 bp, SARS Virus
tatacagagagagtttcccggattc

SEQ ID NO: 146675 - DNA, 25 bp, SARS Virus
atacagagagaggttcccggattcg

SEQ ID NO: 146676 - DNA, 25 bp, SARS Virus
tacagagagagtgtcccggattcga

SEQ ID NO: 146677 - DNA, 25 bp, SARS Virus
acagagagagttgcccggattcgaa

SEQ ID NO: 146678 - DNA, 25 bp, SARS Virus
cagagagagtttgccggattcgaac

SEQ ID NO: 146679 - DNA, 25 bp, SARS Virus
agagagagtttcgcggattcgaacg

SEQ ID NO: 146680 - DNA, 25 bp, SARS Virus
gagagagtttccgggattcgaacgg

SEQ ID NO: 146681 - DNA, 25 bp, SARS Virus
agagagtttcccggattcgaacggt

SEQ ID NO: 146682 - DNA, 25 bp, SARS Virus
gagagtttcccggattcgaacggta

SEQ ID NO: 146683 - DNA, 25 bp, SARS Virus
agagtttcccgggttcgaacggtac

SEQ ID NO: 146684 - DNA, 25 bp, SARS Virus
gagtttcccggagtcgaacggtaca

SEQ ID NO: 146685 - DNA, 25 bp, SARS Virus
agtttcccggatgcgaacggtacag

SEQ ID NO: 146686 - DNA, 25 bp, SARS Virus
gtttcccggattggaacggtacaga

SEQ ID NO: 146687 - DNA, 25 bp, SARS Virus
tttcccggattcgaacggtacagat

SEQ ID NO: 146688 - DNA, 25 bp, SARS Virus
ttcccggattcggacggtacagatt

SEQ ID NO: 146689 - DNA, 25 bp, SARS Virus
tcccggattcgagcggtacagattc

SEQ ID NO: 146690 - DNA, 25 bp, SARS Virus
cccggattcgaagggtacagattct

SEQ ID NO: 146691 - DNA, 25 bp, SARS Virus
ccggattcgaacggtacagattcta

SEQ ID NO: 146692 - DNA, 25 bp, SARS Virus
cggattcgaacggtacagattctat

SEQ ID NO: 146693 - DNA, 25 bp, SARS Virus
ggattcgaacgggacagattctatg

SEQ ID NO: 146694 - DNA, 25 bp, SARS Virus
gattcgaacggtgcagattctatgg

SEQ ID NO: 146695 - DNA, 25 bp, SARS Virus
attcgaacggtagagattctatgga

SEQ ID NO: 146696 - DNA, 25 bp, SARS Virus
ttcgaacggtacggattctatggat

SEQ ID NO: 146697 - DNA, 25 bp, SARS Virus
tcgaacggtacagattctatggata

SEQ ID NO: 146698 - DNA, 25 bp, SARS Virus
cgaacggtacaggttctatggatat

SEQ ID NO: 146699 - DNA, 25 bp, SARS Virus
gaacggtacagagtctatggatata

SEQ ID NO: 146700 - DNA, 25 bp, SARS Virus
aacggtacagatgctatggatataa

SEQ ID NO: 146701 - DNA, 25 bp, SARS Virus
acggtacagattgtatggatataaa

SEQ ID NO: 146702 - DNA, 25 bp, SARS Virus
cggtacagattcgatggatataaat

SEQ ID NO: 146703 - DNA, 25 bp, SARS Virus
ggtacagattctgtggatataaata

SEQ ID NO: 146704 - DNA, 25 bp, SARS Virus
gtacagattctagggatataaatat

SEQ ID NO: 146705 - DNA, 25 bp, SARS Virus
tacagattctatggatataaatatt

SEQ ID NO: 146706 - DNA, 25 bp, SARS Virus
acagattctatggatataaatatta

SEQ ID NO: 146707 - DNA, 25 bp, SARS Virus
cagattctatgggtataaatattaa

SEQ ID NO: 146708 - DNA, 25 bp, SARS Virus
agattctatggagataaatattaat

SEQ ID NO: 146709 - DNA, 25 bp, SARS Virus
gattctatggatgtaaatattaata

SEQ ID NO: 146710 - DNA, 25 bp, SARS Virus
attctatggatagaaatattaatat

SEQ ID NO: 146711 - DNA, 25 bp, SARS Virus
ttctatggatatgaatattaatatt

SEQ ID NO: 146712 - DNA, 25 bp, SARS Virus
tctatggatatagatattaatatta

SEQ ID NO: 146713 - DNA, 25 bp, SARS Virus
ctatggatataagtattaatattaa

SEQ ID NO: 146714 - DNA, 25 bp, SARS Virus
tatggatataaagattaatattaat

SEQ ID NO: 146715 - DNA, 25 bp, SARS Virus
atggatataaatgttaatattaatg

SEQ ID NO: 146716 - DNA, 25 bp, SARS Virus
tggatataaatagtaatattaatgg

SEQ ID NO: 146717 - DNA, 25 bp, SARS Virus
ggatataaatatgaatattaatggt

SEQ ID NO: 146718 - DNA, 25 bp, SARS Virus
gatataaatattgatattaatggtc

SEQ ID NO: 146719 - DNA, 25 bp, SARS Virus
atataaatattagtattaatggtca

SEQ ID NO: 146720 - DNA, 25 bp, SARS Virus
tataaatattaagattaatggtcaa

SEQ ID NO: 146721 - DNA, 25 bp, SARS Virus
ataaatattaatgttaatggtcaac

SEQ ID NO: 146722 - DNA, 25 bp, SARS Virus
taaatattaatagtaatggtcaact

SEQ ID NO: 146723 - DNA, 25 bp, SARS Virus
aaatattaatatgaatggtcaactt

SEQ ID NO: 146724 - DNA, 25 bp, SARS Virus
aatattaatattgatggtcaacttc

SEQ ID NO: 146725 - DNA, 25 bp, SARS Virus
atattaatattagtggtcaacttca

SEQ ID NO: 146726 - DNA, 25 bp, SARS Virus
tattaatattaagggtcaacttcat

SEQ ID NO: 146727 - DNA, 25 bp, SARS Virus
attaatattaatggtcaacttcatc

SEQ ID NO: 146728 - DNA, 25 bp, SARS Virus
ttaatattaatggtcaacttcatcg

SEQ ID NO: 146729 - DNA, 25 bp, SARS Virus
taatattaatgggcaacttcatcgt

SEQ ID NO: 146730 - DNA, 25 bp, SARS Virus
aatattaatggtgaacttcatcgta

SEQ ID NO: 146731 - DNA, 25 bp, SARS Virus
atattaatggtcgacttcatcgtag

SEQ ID NO: 146732 - DNA, 25 bp, SARS Virus
tattaatggtcagcttcatcgtagt

SEQ ID NO: 146733 - DNA, 25 bp, SARS Virus
attaatggtcaagttcatcgtagtt

SEQ ID NO: 146734 - DNA, 25 bp, SARS Virus
ttaatggtcaacgtcatcgtagtta

SEQ ID NO: 146735 - DNA, 25 bp, SARS Virus
taatggtcaactgcatcgtagttac

SEQ ID NO: 146736 - DNA, 25 bp, SARS Virus
aatggtcaacttgatcgtagttaca

SEQ ID NO: 146737 - DNA, 25 bp, SARS Virus
atggtcaacttcgtcgtagttacaa

SEQ ID NO: 146738 - DNA, 25 bp, SARS Virus
tggtcaacttcagcgtagttacaag

SEQ ID NO: 146739 - DNA, 25 bp, SARS Virus
ggtcaacttcatggtagttacaagg

SEQ ID NO: 146740 - DNA, 25 bp, SARS Virus
gtcaacttcatcgtagttacaagga

SEQ ID NO: 146741 - DNA, 25 bp, SARS Virus
tcaacttcatcggagttacaaggat

SEQ ID NO: 146742 - DNA, 25 bp, SARS Virus
caacttcatcgtggttacaaggatc

SEQ ID NO: 146743 - DNA, 25 bp, SARS Virus
aacttcatcgtagttacaaggatca

SEQ ID NO: 146744 - DNA, 25 bp, SARS Virus
acttcatcgtaggtacaaggatcat

SEQ ID NO: 146745 - DNA, 25 bp, SARS Virus
cttcatcgtagtgacaaggatcata

SEQ ID NO: 146746 - DNA, 25 bp, SARS Virus
ttcatcgtagttgcaaggatcataa

SEQ ID NO: 146747 - DNA, 25 bp, SARS Virus
tcatcgtagttagaaggatcataag

SEQ ID NO: 146748 - DNA, 25 bp, SARS Virus
catcgtagttacgaggatcataagg

SEQ ID NO: 146749 - DNA, 25 bp, SARS Virus
atcgtagttacagggatcataaggt

SEQ ID NO: 146750 - DNA, 25 bp, SARS Virus
tcgtagttacaaggatcataaggtt

SEQ ID NO: 146751 - DNA, 25 bp, SARS Virus
cgtagttacaaggatcataaggttc

SEQ ID NO: 146752 - DNA, 25 bp, SARS Virus
gtagttacaagggtcataaggttcg

SEQ ID NO: 146753 - DNA, 25 bp, SARS Virus
tagttacaaggagcataaggttcgt

SEQ ID NO: 146754 - DNA, 25 bp, SARS Virus
agttacaaggatgataaggttcgtt

SEQ ID NO: 146755 - DNA, 25 bp, SARS Virus
gttacaaggatcgtaaggttcgttc

SEQ ID NO: 146756 - DNA, 25 bp, SARS Virus
ttacaaggatcagaaggttcgttcc

SEQ ID NO: 146757 - DNA, 25 bp, SARS Virus
tacaaggatcatgaggttcgttcct

SEQ ID NO: 146758 - DNA, 25 bp, SARS Virus
acaaggatcatagggttcgttcctg

SEQ ID NO: 146759 - DNA, 25 bp, SARS Virus
caaggatcataaggttcgttcctgt

SEQ ID NO: 146760 - DNA, 25 bp, SARS Virus
aaggatcataaggttcgttcctgtg

SEQ ID NO: 146761 - DNA, 25 bp, SARS Virus
aggatcataagggtcgttcctgtgt

SEQ ID NO: 146762 - DNA, 25 bp, SARS Virus
ggatcataaggtgcgttcctgtgtt

SEQ ID NO: 146763 - DNA, 25 bp, SARS Virus
gatcataaggttggttcctgtgttg

SEQ ID NO: 146764 - DNA, 25 bp, SARS Virus
atcataaggttcgttcctgtgttgg

SEQ ID NO: 146765 - DNA, 25 bp, SARS Virus
tcataaggttcggtcctgtgttggg

SEQ ID NO: 146766 - DNA, 25 bp, SARS Virus
cataaggttcgtgcctgtgttgggt

SEQ ID NO: 146767 - DNA, 25 bp, SARS Virus
ataaggttcgttgctgtgttgggta

SEQ ID NO: 146768 - DNA, 25 bp, SARS Virus
taaggttcgttcgtgtgttgggtac

SEQ ID NO: 146769 - DNA, 25 bp, SARS Virus
aaggttcgttccggtgttgggtact

SEQ ID NO: 146770 - DNA, 25 bp, SARS Virus
aggttcgttcctgtgttgggtactt

SEQ ID NO: 146771 - DNA, 25 bp, SARS Virus
ggttcgttcctgggttgggtacttt

SEQ ID NO: 146772 - DNA, 25 bp, SARS Virus
gttcgttcctgtgttgggtacttta

SEQ ID NO: 146773 - DNA, 25 bp, SARS Virus
ttcgttcctgtggtgggtactttag

SEQ ID NO: 146774 - DNA, 25 bp, SARS Virus
tcgttcctgtgtggggtactttagt

SEQ ID NO: 146775 - DNA, 25 bp, SARS Virus
cgttcctgtgttgggtactttagta

SEQ ID NO: 146776 - DNA, 25 bp, SARS Virus
gttcctgtgttgggtactttagtag

SEQ ID NO: 146777 - DNA, 25 bp, SARS Virus
ttcctgtgttgggtactttagtaga

SEQ ID NO: 146778 - DNA, 25 bp, SARS Virus
tcctgtgttggggactttagtagac

SEQ ID NO: 146779 - DNA, 25 bp, SARS Virus
cctgtgttgggtgctttagtagacc

SEQ ID NO: 146780 - DNA, 25 bp, SARS Virus
ctgtgttgggtagtttagtagaccg

SEQ ID NO: 146781 - DNA, 25 bp, SARS Virus
tgtgttgggtacgttagtagaccgt

SEQ ID NO: 146782 - DNA, 25 bp, SARS Virus
gtgttgggtactgtagtagaccgtt

SEQ ID NO: 146783 - DNA, 25 bp, SARS Virus
tgttgggtacttgagtagaccgtta

SEQ ID NO: 146784 - DNA, 25 bp, SARS Virus
gttgggtactttggtagaccgttaa

SEQ ID NO: 146785 - DNA, 25 bp, SARS Virus
ttgggtactttagtagaccgttaaa

SEQ ID NO: 146786 - DNA, 25 bp, SARS Virus
tgggtactttaggagaccgttaaat

SEQ ID NO: 146787 - DNA, 25 bp, SARS Virus
gggtactttagtggaccgttaaata

SEQ ID NO: 146788 - DNA, 25 bp, SARS Virus
ggtactttagtagaccgttaaatat

SEQ ID NO: 146789 - DNA, 25 bp, SARS Virus
gtactttagtaggccgttaaatatt

SEQ ID NO: 146790 - DNA, 25 bp, SARS Virus
tactttagtagagcgttaaatatta

SEQ ID NO: 146791 - DNA, 25 bp, SARS Virus
actttagtagacggttaaatattaa

SEQ ID NO: 146792 - DNA, 25 bp, SARS Virus
ctttagtagaccgttaaatattaat

SEQ ID NO: 146793 - DNA, 25 bp, SARS Virus
tttagtagaccggtaaatattaata

SEQ ID NO: 146794 - DNA, 25 bp, SARS Virus
ttagtagaccgtgaaatattaatat

SEQ ID NO: 146795 - DNA, 25 bp, SARS Virus
tagtagaccgttgaatattaatatt

SEQ ID NO: 146796 - DNA, 25 bp, SARS Virus
agtagaccgttagatattaatatta

SEQ ID NO: 146797 - DNA, 25 bp, SARS Virus
gtagaccgttaagtattaatattag

SEQ ID NO: 146798 - DNA, 25 bp, SARS Virus
tagaccgttaaagattaatattagt

SEQ ID NO: 146799 - DNA, 25 bp, SARS Virus
agaccgttaaatgttaatattagtc

SEQ ID NO: 146800 - DNA, 25 bp, SARS Virus
gaccgttaaatagtaatattagtcg

SEQ ID NO: 146801 - DNA, 25 bp, SARS Virus
accgttaaatatgaatattagtcgt

SEQ ID NO: 146802 - DNA, 25 bp, SARS Virus
ccgttaaatattgatattagtcgtt

SEQ ID NO: 146803 - DNA, 25 bp, SARS Virus
cgttaaatattagtattagtcgtta

SEQ ID NO: 146804 - DNA, 25 bp, SARS Virus
gttaaatattaagattagtcgttat

SEQ ID NO: 146805 - DNA, 25 bp, SARS Virus
ttaaatattaatgttagtcgttatt

SEQ ID NO: 146806 - DNA, 25 bp, SARS Virus
taaatattaatagtagtcgttattg

SEQ ID NO: 146807 - DNA, 25 bp, SARS Virus
aaatattaatatgagtcgttattgt

SEQ ID NO: 146808 - DNA, 25 bp, SARS Virus
aatattaatattggtcgttattgtg

SEQ ID NO: 146809 - DNA, 25 bp, SARS Virus
atattaatattagtcgttattgtgg

SEQ ID NO: 146810 - DNA, 25 bp, SARS Virus
tattaatattaggcgttattgtggt

SEQ ID NO: 146811 - DNA, 25 bp, SARS Virus
attaatattagtggttattgtggtc

SEQ ID NO: 146812 - DNA, 25 bp, SARS Virus
ttaatattagtcgttattgtggtca

SEQ ID NO: 146813 - DNA, 25 bp, SARS Virus
taatattagtcggtattgtggtcaa

SEQ ID NO: 146814 - DNA, 25 bp, SARS Virus
aatattagtcgtgattgtggtcaaa

SEQ ID NO: 146815 - DNA, 25 bp, SARS Virus
atattagtcgttgttgtggtcaaac

SEQ ID NO: 146816 - DNA, 25 bp, SARS Virus
tattagtcgttagtgtggtcaaaca

SEQ ID NO: 146817 - DNA, 25 bp, SARS Virus
attagtcgttatggtggtcaaacag

SEQ ID NO: 146818 - DNA, 25 bp, SARS Virus
ttagtcgttattgtggtcaaacagg

SEQ ID NO: 146819 - DNA, 25 bp, SARS Virus
tagtcgttattggggtcaaacagga

SEQ ID NO: 146820 - DNA, 25 bp, SARS Virus
agtcgttattgtggtcaaacaggac

SEQ ID NO: 146821 - DNA, 25 bp, SARS Virus
gtcgttattgtggtcaaacaggacc

SEQ ID NO: 146822 - DNA, 25 bp, SARS Virus
tcgttattgtgggcaaacaggaccg

SEQ ID NO: 146823 - DNA, 25 bp, SARS Virus
cgttattgtggtgaaacaggaccgc

SEQ ID NO: 146824 - DNA, 25 bp, SARS Virus
gttattgtggtcgaacaggaccgcg

SEQ ID NO: 146825 - DNA, 25 bp, SARS Virus
ttattgtggtcagacaggaccgcga

SEQ ID NO: 146826 - DNA, 25 bp, SARS Virus
tattgtggtcaagcaggaccgcgat

SEQ ID NO: 146827 - DNA, 25 bp, SARS Virus
attgtggtcaaagaggaccgcgata

SEQ ID NO: 146828 - DNA, 25 bp, SARS Virus
ttgtggtcaaacgggaccgcgataa

SEQ ID NO: 146829 - DNA, 25 bp, SARS Virus
tgtggtcaaacaggaccgcgataaa

SEQ ID NO: 146830 - DNA, 25 bp, SARS Virus
gtggtcaaacaggaccgcgataaac

SEQ ID NO: 146831 - DNA, 25 bp, SARS Virus
tggtcaaacagggccgcgataaaca

SEQ ID NO: 146832 - DNA, 25 bp, SARS Virus
ggtcaaacaggagcgcgataaacag

SEQ ID NO: 146833 - DNA, 25 bp, SARS Virus
gtcaaacaggacggcgataaacaga

SEQ ID NO: 146834 - DNA, 25 bp, SARS Virus
tcaaacaggaccgcgataaacagaa

SEQ ID NO: 146835 - DNA, 25 bp, SARS Virus
caaacaggaccgggataaacagaat

SEQ ID NO: 146836 - DNA, 25 bp, SARS Virus
aaacaggaccgcgataaacagaatg

SEQ ID NO: 146837 - DNA, 25 bp, SARS Virus
aacaggaccgcggtaaacagaatgt

SEQ ID NO: 146838 - DNA, 25 bp, SARS Virus
acaggaccgcgagaaacagaatgta

SEQ ID NO: 146839 - DNA, 25 bp, SARS Virus
caggaccgcgatgaacagaatgtag

SEQ ID NO: 146840 - DNA, 25 bp, SARS Virus
aggaccgcgatagacagaatgtagt

SEQ ID NO: 146841 - DNA, 25 bp, SARS Virus
ggaccgcgataagcagaatgtagta

SEQ ID NO: 146842 - DNA, 25 bp, SARS Virus
gaccgcgataaagagaatgtagtag

SEQ ID NO: 146843 - DNA, 25 bp, SARS Virus
accgcgataaacggaatgtagtaga

SEQ ID NO: 146844 - DNA, 25 bp, SARS Virus
ccgcgataaacagaatgtagtagag

SEQ ID NO: 146845 - DNA, 25 bp, SARS Virus
cgcgataaacaggatgtagtagagg

SEQ ID NO: 146846 - DNA, 25 bp, SARS Virus
gcgataaacagagtgtagtagaggg

SEQ ID NO: 146847 - DNA, 25 bp, SARS Virus
cgataaacagaaggtagtagaggga

SEQ ID NO: 146848 - DNA, 25 bp, SARS Virus
gataaacagaatgtagtagagggaa

SEQ ID NO: 146849 - DNA, 25 bp, SARS Virus
ataaacagaatggagtagagggaac

SEQ ID NO: 146850 - DNA, 25 bp, SARS Virus
taaacagaatgtggtagagggaact

SEQ ID NO: 146851 - DNA, 25 bp, SARS Virus
aaacagaatgtagtagagggaactg

SEQ ID NO: 146852 - DNA, 25 bp, SARS Virus
aacagaatgtaggagagggaactga

SEQ ID NO: 146853 - DNA, 25 bp, SARS Virus
acagaatgtagtggagggaactgat

SEQ ID NO: 146854 - DNA, 25 bp, SARS Virus
cagaatgtagtagagggaactgatg

SEQ ID NO: 146855 - DNA, 25 bp, SARS Virus
agaatgtagtagggggaactgatgt

SEQ ID NO: 146856 - DNA, 25 bp, SARS Virus
gaatgtagtagagggaactgatgtt

SEQ ID NO: 146857 - DNA, 25 bp, SARS Virus
aatgtagtagagggaactgatgttt

SEQ ID NO: 146858 - DNA, 25 bp, SARS Virus
atgtagtagagggaactgatgtttt

SEQ ID NO: 146859 - DNA, 25 bp, SARS Virus
tgtagtagaggggactgatgttttc

SEQ ID NO: 146860 - DNA, 25 bp, SARS Virus
gtagtagagggagctgatgttttct

SEQ ID NO: 146861 - DNA, 25 bp, SARS Virus
tagtagagggaagtgatgttttctt

SEQ ID NO: 146862 - DNA, 25 bp, SARS Virus
agtagagggaacggatgttttctta

SEQ ID NO: 146863 - DNA, 25 bp, SARS Virus
gtagagggaactgatgttttcttag

SEQ ID NO: 146864 - DNA, 25 bp, SARS Virus
tagagggaactggtgttttcttaga

SEQ ID NO: 146865 - DNA, 25 bp, SARS Virus
agagggaactgaggttttcttagac

SEQ ID NO: 146866 - DNA, 25 bp, SARS Virus
gagggaactgatgttttcttagacg

SEQ ID NO: 146867 - DNA, 25 bp, SARS Virus
agggaactgatggtttcttagacgt

SEQ ID NO: 146868 - DNA, 25 bp, SARS Virus
gggaactgatgtgttcttagacgta

SEQ ID NO: 146869 - DNA, 25 bp, SARS Virus
ggaactgatgttgtcttagacgtat

SEQ ID NO: 146870 - DNA, 25 bp, SARS Virus
gaactgatgtttgcttagacgtatc

SEQ ID NO: 146871 - DNA, 25 bp, SARS Virus
aactgatgttttgttagacgtatct

SEQ ID NO: 146872 - DNA, 25 bp, SARS Virus
actgatgttttcgtagacgtatctg

SEQ ID NO: 146873 - DNA, 25 bp, SARS Virus
ctgatgttttctgagacgtatctgt

SEQ ID NO: 146874 - DNA, 25 bp, SARS Virus
tgatgttttcttggacgtatctgta

SEQ ID NO: 146875 - DNA, 25 bp, SARS Virus
gatgttttcttagacgtatctgtaa

SEQ ID NO: 146876 - DNA, 25 bp, SARS Virus
atgttttcttaggcgtatctgtaac

SEQ ID NO: 146877 - DNA, 25 bp, SARS Virus
tgttttcttagaggtatctgtaacc

SEQ ID NO: 146878 - DNA, 25 bp, SARS Virus
gttttcttagacgtatctgtaacct

SEQ ID NO: 146879 - DNA, 25 bp, SARS Virus
ttttcttagacggatctgtaacctc

SEQ ID NO: 146880 - DNA, 25 bp, SARS Virus
tttcttagacgtgtctgtaacctct

SEQ ID NO: 146881 - DNA, 25 bp, SARS Virus
ttcttagacgtagctgtaacctctt

SEQ ID NO: 146882 - DNA, 25 bp, SARS Virus
tcttagacgtatgtgtaacctcttc

SEQ ID NO: 146883 - DNA, 25 bp, SARS Virus
cttagacgtatcggtaacctcttcg

SEQ ID NO: 146884 - DNA, 25 bp, SARS Virus
ttagacgtatctgtaacctcttcgt

SEQ ID NO: 146885 - DNA, 25 bp, SARS Virus
tagacgtatctggaacctcttcgtt

SEQ ID NO: 146886 - DNA, 25 bp, SARS Virus
agacgtatctgtgacctcttcgttt

SEQ ID NO: 146887 - DNA, 25 bp, SARS Virus
gacgtatctgtagcctcttcgtttc

SEQ ID NO: 146888 - DNA, 25 bp, SARS Virus
acgtatctgtaagctcttcgtttct

SEQ ID NO: 146889 - DNA, 25 bp, SARS Virus
cgtatctgtaacgtcttcgtttcta

SEQ ID NO: 146890 - DNA, 25 bp, SARS Virus
gtatctgtaaccgcttcgtttctag

SEQ ID NO: 146891 - DNA, 25 bp, SARS Virus
tatctgtaacctgttcgtttctagt

SEQ ID NO: 146892 - DNA, 25 bp, SARS Virus
atctgtaacctcgtcgtttctagta

SEQ ID NO: 146893 - DNA, 25 bp, SARS Virus
tctgtaacctctgcgtttctagtaa

SEQ ID NO: 146894 - DNA, 25 bp, SARS Virus
ctgtaacctcttggtttctagtaag

SEQ ID NO: 146895 - DNA, 25 bp, SARS Virus
tgtaacctcttcgtttctagtaagt

SEQ ID NO: 146896 - DNA, 25 bp, SARS Virus
gtaacctcttcggttctagtaagtt

SEQ ID NO: 146897 - DNA, 25 bp, SARS Virus
taacctcttcgtgtctagtaagttg

SEQ ID NO: 146898 - DNA, 25 bp, SARS Virus
aacctcttcgttgctagtaagttga

SEQ ID NO: 146899 - DNA, 25 bp, SARS Virus
acctcttcgtttgtagtaagttgaa

SEQ ID NO: 146900 - DNA, 25 bp, SARS Virus
cctcttcgtttcgagtaagttgaat

SEQ ID NO: 146901 - DNA, 25 bp, SARS Virus
ctcttcgtttctggtaagttgaatc

SEQ ID NO: 146902 - DNA, 25 bp, SARS Virus
tcttcgtttctagtaagttgaatca

SEQ ID NO: 146903 - DNA, 25 bp, SARS Virus
cttcgtttctaggaagttgaatcac

SEQ ID NO: 146904 - DNA, 25 bp, SARS Virus
ttcgtttctagtgagttgaatcacc

SEQ ID NO: 146905 - DNA, 25 bp, SARS Virus
tcgtttctagtaggttgaatcaccg

SEQ ID NO: 146906 - DNA, 25 bp, SARS Virus
cgtttctagtaagttgaatcaccgt

SEQ ID NO: 146907 - DNA, 25 bp, SARS Virus
gtttctagtaaggtgaatcaccgtc

SEQ ID NO: 146908 - DNA, 25 bp, SARS Virus
tttctagtaagtggaatcaccgtct

SEQ ID NO: 146909 - DNA, 25 bp, SARS Virus
ttctagtaagttgaatcaccgtctt

SEQ ID NO: 146910 - DNA, 25 bp, SARS Virus
tctagtaagttggatcaccgtcttt

SEQ ID NO: 146911 - DNA, 25 bp, SARS Virus
ctagtaagttgagtcaccgtctttg

SEQ ID NO: 146912 - DNA, 25 bp, SARS Virus
tagtaagttgaagcaccgtctttgc

SEQ ID NO: 146913 - DNA, 25 bp, SARS Virus
agtaagttgaatgaccgtctttgcg

SEQ ID NO: 146914 - DNA, 25 bp, SARS Virus
gtaagttgaatcgccgtctttgcgg

SEQ ID NO: 146915 - DNA, 25 bp, SARS Virus
taagttgaatcagcgtctttgcggt

SEQ ID NO: 146916 - DNA, 25 bp, SARS Virus
aagttgaatcacggtctttgcggta

SEQ ID NO: 146917 - DNA, 25 bp, SARS Virus
agttgaatcaccgtctttgcggtat

SEQ ID NO: 146918 - DNA, 25 bp, SARS Virus
gttgaatcaccggctttgcggtatc

SEQ ID NO: 146919 - DNA, 25 bp, SARS Virus
ttgaatcaccgtgtttgcggtatcg

SEQ ID NO: 146920 - DNA, 25 bp, SARS Virus
tgaatcaccgtcgttgcggtatcgt

SEQ ID NO: 146921 - DNA, 25 bp, SARS Virus
ggtcatggtcactcaggtaatttta

SEQ ID NO: 146922 - DNA, 25 bp, SARS Virus
gtcatggtcacttaggtaattttaa

SEQ ID NO: 146923 - DNA, 25 bp, SARS Virus
tcatggtcactctggtaattttaat

SEQ ID NO: 146924 - DNA, 25 bp, SARS Virus
catggtcactcatgtaattttaatt

SEQ ID NO: 146925 - DNA, 25 bp, SARS Virus
atggtcactcagttaattttaattt

SEQ ID NO: 146926 - DNA, 25 bp, SARS Virus
tggtcactcaggtaattttaatttt

SEQ ID NO: 146927 - DNA, 25 bp, SARS Virus
ggtcactcaggttattttaatttta

SEQ ID NO: 146928 - DNA, 25 bp, SARS Virus
gtcactcaggtatttttaattttaa

SEQ ID NO: 146929 - DNA, 25 bp, SARS Virus
tcactcaggtaattttaattttaac

SEQ ID NO: 146930 - DNA, 25 bp, SARS Virus
cactcaggtaattttaattttaact

SEQ ID NO: 146931 - DNA, 25 bp, SARS Virus
actcaggtaattttaattttaactg

SEQ ID NO: 146932 - DNA, 25 bp, SARS Virus
ctcaggtaattttaattttaactgt

SEQ ID NO: 146933 - DNA, 25 bp, SARS Virus
tcaggtaatttttattttaactgtg

SEQ ID NO: 146934 - DNA, 25 bp, SARS Virus
caggtaattttatttttaactgtgt

SEQ ID NO: 146935 - DNA, 25 bp, SARS Virus
aggtaattttaattttaactgtgtg

SEQ ID NO: 146936 - DNA, 25 bp, SARS Virus
ggtaattttaattttaactgtgtga

SEQ ID NO: 146937 - DNA, 25 bp, SARS Virus
gtaattttaattttaactgtgtgac

SEQ ID NO: 146938 - DNA, 25 bp, SARS Virus
taattttaattttaactgtgtgacc

SEQ ID NO: 146939 - DNA, 25 bp, SARS Virus
aattttaatttttactgtgtgacca

SEQ ID NO: 146940 - DNA, 25 bp, SARS Virus
attttaattttatctgtgtgaccaa

SEQ ID NO: 146941 - DNA, 25 bp, SARS Virus
ttttaattttaattgtgtgaccaag

SEQ ID NO: 146942 - DNA, 25 bp, SARS Virus
tttaattttaactgtgtgaccaaga

SEQ ID NO: 146943 - DNA, 25 bp, SARS Virus
ttaattttaactttgtgaccaagaa

SEQ ID NO: 146944 - DNA, 25 bp, SARS Virus
taattttaactgtgtgaccaagaat

SEQ ID NO: 146945 - DNA, 25 bp, SARS Virus
aattttaactgtttgaccaagaatt

SEQ ID NO: 146946 - DNA, 25 bp, SARS Virus
attttaactgtgtgaccaagaatta

SEQ ID NO: 146947 - DNA, 25 bp, SARS Virus
ttttaactgtgttaccaagaattat

SEQ ID NO: 146948 - DNA, 25 bp, SARS Virus
tttaactgtgtgtccaagaattatt

SEQ ID NO: 146949 - DNA, 25 bp, SARS Virus
ttaactgtgtgatcaagaattattc

SEQ ID NO: 146950 - DNA, 25 bp, SARS Virus
taactgtgtgactaagaattattcc

SEQ ID NO: 146951 - DNA, 25 bp, SARS Virus
aactgtgtgacctagaattattcca

SEQ ID NO: 146952 - DNA, 25 bp, SARS Virus
actgtgtgaccatgaattattccag

SEQ ID NO: 146953 - DNA, 25 bp, SARS Virus
ctgtgtgaccaataattattccagt

SEQ ID NO: 146954 - DNA, 25 bp, SARS Virus
tgtgtgaccaagtattattccagtc

SEQ ID NO: 146955 - DNA, 25 bp, SARS Virus
gtgtgaccaagatttattccagtca

SEQ ID NO: 146956 - DNA, 25 bp, SARS Virus
tgtgaccaagaattattccagtcac

SEQ ID NO: 146957 - DNA, 25 bp, SARS Virus
gtgaccaagaattattccagtcacc

SEQ ID NO: 146958 - DNA, 25 bp, SARS Virus
tgaccaagaatttttccagtcacct

SEQ ID NO: 146959 - DNA, 25 bp, SARS Virus
gaccaagaattattccagtcaccta

SEQ ID NO: 146960 - DNA, 25 bp, SARS Virus
accaagaattattccagtcacctat

SEQ ID NO: 146961 - DNA, 25 bp, SARS Virus
ccaagaattatttcagtcacctatt

SEQ ID NO: 146962 - DNA, 25 bp, SARS Virus
caagaattattctagtcacctatta

SEQ ID NO: 146963 - DNA, 25 bp, SARS Virus
aagaattattcctgtcacctattaa

SEQ ID NO: 146964 - DNA, 25 bp, SARS Virus
agaattattccattcacctattaaa

SEQ ID NO: 146965 - DNA, 25 bp, SARS Virus
gaattattccagtcacctattaaaa

SEQ ID NO: 146966 - DNA, 25 bp, SARS Virus
aattattccagttacctattaaaac

SEQ ID NO: 146967 - DNA, 25 bp, SARS Virus
attattccagtctcctattaaaacc

SEQ ID NO: 146968 - DNA, 25 bp, SARS Virus
ttattccagtcatctattaaaacca

SEQ ID NO: 146969 - DNA, 25 bp, SARS Virus
tattccagtcacttattaaaaccag

SEQ ID NO: 146970 - DNA, 25 bp, SARS Virus
attccagtcacctattaaaaccagg

SEQ ID NO: 146971 - DNA, 25 bp, SARS Virus
ttccagtcaccttttaaaaccaggt

SEQ ID NO: 146972 - DNA, 25 bp, SARS Virus
tccagtcacctattaaaaccaggtg

SEQ ID NO: 146973 - DNA, 25 bp, SARS Virus
ccagtcacctattaaaaccaggtgt

SEQ ID NO: 146974 - DNA, 25 bp, SARS Virus
cagtcacctatttaaaccaggtgtt

SEQ ID NO: 146975 - DNA, 25 bp, SARS Virus
agtcacctattataaccaggtgttt

SEQ ID NO: 146976 - DNA, 25 bp, SARS Virus
gtcacctattaataccaggtgtttg

SEQ ID NO: 146977 - DNA, 25 bp, SARS Virus
tcacctattaaatccaggtgtttgg

SEQ ID NO: 146978 - DNA, 25 bp, SARS Virus
cacctattaaaatcaggtgtttggc

SEQ ID NO: 146979 - DNA, 25 bp, SARS Virus
acctattaaaactaggtgtttggca

SEQ ID NO: 146980 - DNA, 25 bp, SARS Virus
cctattaaaacctggtgtttggcac

SEQ ID NO: 146981 - DNA, 25 bp, SARS Virus
ctattaaaaccatgtgtttggcacc

SEQ ID NO: 146982 - DNA, 25 bp, SARS Virus
tattaaaaccagttgtttggcaccg

SEQ ID NO: 146983 - DNA, 25 bp, SARS Virus
attaaaaccaggtgtttggcaccgg

SEQ ID NO: 146984 - DNA, 25 bp, SARS Virus
ttaaaaccaggtttttggcaccggc

SEQ ID NO: 146985 - DNA, 25 bp, SARS Virus
taaaaccaggtgtttggcaccggcc

SEQ ID NO: 146986 - DNA, 25 bp, SARS Virus
aaaaccaggtgtttggcaccggcca

SEQ ID NO: 146987 - DNA, 25 bp, SARS Virus
aaaccaggtgtttggcaccggccac

SEQ ID NO: 146988 - DNA, 25 bp, SARS Virus
aaccaggtgttttgcaccggccacg

SEQ ID NO: 146989 - DNA, 25 bp, SARS Virus
accaggtgtttgtcaccggccacgt

SEQ ID NO: 146990 - DNA, 25 bp, SARS Virus
ccaggtgtttggtaccggccacgta

SEQ ID NO: 146991 - DNA, 25 bp, SARS Virus
caggtgtttggctccggccacgtaa

SEQ ID NO: 146992 - DNA, 25 bp, SARS Virus
aggtgtttggcatcggccacgtaaa

SEQ ID NO: 146993 - DNA, 25 bp, SARS Virus
ggtgtttggcactggccacgtaaat

SEQ ID NO: 146994 - DNA, 25 bp, SARS Virus
gtgtttggcacctgccacgtaaatt

SEQ ID NO: 146995 - DNA, 25 bp, SARS Virus
tgtttggcaccgtccacgtaaattt

SEQ ID NO: 146996 - DNA, 25 bp, SARS Virus
gtttggcaccggtcacgtaaatttt

SEQ ID NO: 146997 - DNA, 25 bp, SARS Virus
tttggcaccggctacgtaaattttc

SEQ ID NO: 146998 - DNA, 25 bp, SARS Virus
ttggcaccggcctcgtaaattttca

SEQ ID NO: 146999 - DNA, 25 bp, SARS Virus
tggcaccggccatgtaaattttcaa

SEQ ID NO: 147000 - DNA, 25 bp, SARS Virus
ggcaccggccacttaaattttcaag

SEQ ID NO: 147001 - DNA, 25 bp, SARS Virus
gcaccggccacgtaaattttcaagt

SEQ ID NO: 147002 - DNA, 25 bp, SARS Virus
caccggccacgttaattttcaagtt

SEQ ID NO: 147003 - DNA, 25 bp, SARS Virus
accggccacgtatattttcaagttt

SEQ ID NO: 147004 - DNA, 25 bp, SARS Virus
ccggccacgtaatttttcaagtttt

SEQ ID NO: 147005 - DNA, 25 bp, SARS Virus
cggccacgtaaattttcaagttttc

SEQ ID NO: 147006 - DNA, 25 bp, SARS Virus
ggccacgtaaattttcaagttttct

SEQ ID NO: 147007 - DNA, 25 bp, SARS Virus
gccacgtaaattttcaagttttctt

SEQ ID NO: 147008 - DNA, 25 bp, SARS Virus
ccacgtaaattttcaagttttcttt

SEQ ID NO: 147009 - DNA, 25 bp, SARS Virus
cacgtaaatttttaagttttctttc

SEQ ID NO: 147010 - DNA, 25 bp, SARS Virus
acgtaaattttctagttttctttca

SEQ ID NO: 147011 - DNA, 25 bp, SARS Virus
cgtaaattttcatgttttctttcat

SEQ ID NO: 147012 - DNA, 25 bp, SARS Virus
gtaaattttcaatttttctttcatg

SEQ ID NO: 147013 - DNA, 25 bp, SARS Virus
taaattttcaagttttctttcatga

SEQ ID NO: 147014 - DNA, 25 bp, SARS Virus
aaattttcaagttttctttcatgat

SEQ ID NO: 147015 - DNA, 25 bp, SARS Virus
aattttcaagttttctttcatgatg

SEQ ID NO: 147016 - DNA, 25 bp, SARS Virus
attttcaagttttctttcatgatgt

SEQ ID NO: 147017 - DNA, 25 bp, SARS Virus
ttttcaagttttttttcatgatgtt

SEQ ID NO: 147018 - DNA, 25 bp, SARS Virus
tttcaagttttctttcatgatgttg

SEQ ID NO: 147019 - DNA, 25 bp, SARS Virus
ttcaagttttctttcatgatgttga

SEQ ID NO: 147020 - DNA, 25 bp, SARS Virus
tcaagttttctttcatgatgttgag

SEQ ID NO: 147021 - DNA, 25 bp, SARS Virus
caagttttcttttatgatgttgaga

SEQ ID NO: 147022 - DNA, 25 bp, SARS Virus
aagttttctttcttgatgttgagac

SEQ ID NO: 147023 - DNA, 25 bp, SARS Virus
agttttctttcatgatgttgagaca

SEQ ID NO: 147024 - DNA, 25 bp, SARS Virus
gttttctttcattatgttgagacat

SEQ ID NO: 147025 - DNA, 25 bp, SARS Virus
ttttctttcatgttgttgagacatt

SEQ ID NO: 147026 - DNA, 25 bp, SARS Virus
tttctttcatgatgttgagacattc

SEQ ID NO: 147027 - DNA, 25 bp, SARS Virus
ttctttcatgattttgagacattcc

SEQ ID NO: 147028 - DNA, 25 bp, SARS Virus
tctttcatgatgttgagacattcca

SEQ ID NO: 147029 - DNA, 25 bp, SARS Virus
ctttcatgatgttgagacattccaa

SEQ ID NO: 147030 - DNA, 25 bp, SARS Virus
tttcatgatgtttagacattccaac

SEQ ID NO: 147031 - DNA, 25 bp, SARS Virus
ttcatgatgttgtgacattccaacc

SEQ ID NO: 147032 - DNA, 25 bp, SARS Virus
tcatgatgttgatacattccaacca

SEQ ID NO: 147033 - DNA, 25 bp, SARS Virus
catgatgttgagtcattccaaccat

SEQ ID NO: 147034 - DNA, 25 bp, SARS Virus
atgatgttgagatattccaaccatc

SEQ ID NO: 147035 - DNA, 25 bp, SARS Virus
tgatgttgagactttccaaccatcg

SEQ ID NO: 147036 - DNA, 25 bp, SARS Virus
gatgttgagacattccaaccatcgg

SEQ ID NO: 147037 - DNA, 25 bp, SARS Virus
atgttgagacattccaaccatcggt

SEQ ID NO: 147038 - DNA, 25 bp, SARS Virus
tgttgagacatttcaaccatcggtt

SEQ ID NO: 147039 - DNA, 25 bp, SARS Virus
gttgagacattctaaccatcggtta

SEQ ID NO: 147040 - DNA, 25 bp, SARS Virus
ttgagacattcctaccatcggttac

SEQ ID NO: 147041 - DNA, 25 bp, SARS Virus
tgagacattccatccatcggttacg

SEQ ID NO: 147042 - DNA, 25 bp, SARS Virus
gagacattccaatcatcggttacgg

SEQ ID NO: 147043 - DNA, 25 bp, SARS Virus
agacattccaactatcggttacggt

SEQ ID NO: 147044 - DNA, 25 bp, SARS Virus
gacattccaaccttcggttacggtc

SEQ ID NO: 147045 - DNA, 25 bp, SARS Virus
acattccaaccatcggttacggtca

SEQ ID NO: 147046 - DNA, 25 bp, SARS Virus
cattccaaccattggttacggtcat

SEQ ID NO: 147047 - DNA, 25 bp, SARS Virus
attccaaccatctgttacggtcatc

SEQ ID NO: 147048 - DNA, 25 bp, SARS Virus
ttccaaccatcgtttacggtcatca

SEQ ID NO: 147049 - DNA, 25 bp, SARS Virus
tccaaccatcggttacggtcatcac

SEQ ID NO: 147050 - DNA, 25 bp, SARS Virus
ccaaccatcggttacggtcatcacc

SEQ ID NO: 147051 - DNA, 25 bp, SARS Virus
caaccatcggtttcggtcatcacca

SEQ ID NO: 147052 - DNA, 25 bp, SARS Virus
aaccatcggttatggtcatcaccac

SEQ ID NO: 147053 - DNA, 25 bp, SARS Virus
accatcggttactgtcatcaccaca

SEQ ID NO: 147054 - DNA, 25 bp, SARS Virus
ccatcggttacgttcatcaccacat

SEQ ID NO: 147055 - DNA, 25 bp, SARS Virus
catcggttacggtcatcaccacatt

SEQ ID NO: 147056 - DNA, 25 bp, SARS Virus
atcggttacggttatcaccacattt

SEQ ID NO: 147057 - DNA, 25 bp, SARS Virus
tcggttacggtcttcaccacatttt

SEQ ID NO: 147058 - DNA, 25 bp, SARS Virus
cggttacggtcatcaccacattttt

SEQ ID NO: 147059 - DNA, 25 bp, SARS Virus
ggttacggtcattaccacatttttg

SEQ ID NO: 147060 - DNA, 25 bp, SARS Virus
gttacggtcatctccacatttttgg

SEQ ID NO: 147061 - DNA, 25 bp, SARS Virus
ttacggtcatcatcacatttttggt

SEQ ID NO: 147062 - DNA, 25 bp, SARS Virus
tacggtcatcactacatttttggta

SEQ ID NO: 147063 - DNA, 25 bp, SARS Virus
acggtcatcacctcatttttggtat

SEQ ID NO: 147064 - DNA, 25 bp, SARS Virus
cggtcatcaccatatttttggtatt

SEQ ID NO: 147065 - DNA, 25 bp, SARS Virus
ggtcatcaccacttttttggtatta

SEQ ID NO: 147066 - DNA, 25 bp, SARS Virus
gtcatcaccacatttttggtattag

SEQ ID NO: 147067 - DNA, 25 bp, SARS Virus
tcatcaccacatttttggtattagt

SEQ ID NO: 147068 - DNA, 25 bp, SARS Virus
catcaccacatttttggtattagta

SEQ ID NO: 147069 - DNA, 25 bp, SARS Virus
atcaccacatttttggtattagtaa

SEQ ID NO: 147070 - DNA, 25 bp, SARS Virus
tcaccacatttttggtattagtaaa

SEQ ID NO: 147071 - DNA, 25 bp, SARS Virus
caccacattttttgtattagtaaat

SEQ ID NO: 147072 - DNA, 25 bp, SARS Virus
accacatttttgttattagtaaatt

SEQ ID NO: 147073 - DNA, 25 bp, SARS Virus
ccacatttttggtattagtaaatta

SEQ ID NO: 147074 - DNA, 25 bp, SARS Virus
cacatttttggttttagtaaattac

SEQ ID NO: 147075 - DNA, 25 bp, SARS Virus
acatttttggtattagtaaattacc

SEQ ID NO: 147076 - DNA, 25 bp, SARS Virus
catttttggtattagtaaattaccg

SEQ ID NO: 147077 - DNA, 25 bp, SARS Virus
atttttggtatttgtaaattaccgg

SEQ ID NO: 147078 - DNA, 25 bp, SARS Virus
tttttggtattattaaattaccggt

SEQ ID NO: 147079 - DNA, 25 bp, SARS Virus
ttttggtattagtaaattaccggtt

SEQ ID NO: 147080 - DNA, 25 bp, SARS Virus
tttggtattagttaattaccggtta

SEQ ID NO: 147081 - DNA, 25 bp, SARS Virus
ttggtattagtatattaccggttat

SEQ ID NO: 147082 - DNA, 25 bp, SARS Virus
tggtattagtaatttaccggttatt

SEQ ID NO: 147083 - DNA, 25 bp, SARS Virus
ggtattagtaaattaccggttattg

SEQ ID NO: 147084 - DNA, 25 bp, SARS Virus
gtattagtaaattaccggttattgt

SEQ ID NO: 147085 - DNA, 25 bp, SARS Virus
tattagtaaatttccggttattgtt

SEQ ID NO: 147086 - DNA, 25 bp, SARS Virus
attagtaaattatcggttattgtta

SEQ ID NO: 147087 - DNA, 25 bp, SARS Virus
ttagtaaattactggttattgttaa

SEQ ID NO: 147088 - DNA, 25 bp, SARS Virus
tagtaaattacctgttattgttaat

SEQ ID NO: 147089 - DNA, 25 bp, SARS Virus
agtaaattaccgtttattgttaatt

SEQ ID NO: 147090 - DNA, 25 bp, SARS Virus
gtaaattaccggttattgttaattc

SEQ ID NO: 147091 - DNA, 25 bp, SARS Virus
taaattaccggttattgttaattct

SEQ ID NO: 147092 - DNA, 25 bp, SARS Virus
aaattaccggtttttgttaattctc

SEQ ID NO: 147093 - DNA, 25 bp, SARS Virus
aattaccggttattgttaattctcg

SEQ ID NO: 147094 - DNA, 25 bp, SARS Virus
attaccggttattgttaattctcgt

SEQ ID NO: 147095 - DNA, 25 bp, SARS Virus
ttaccggttatttttaattctcgtc

SEQ ID NO: 147096 - DNA, 25 bp, SARS Virus
taccggttattgttaattctcgtcc

SEQ ID NO: 147097 - DNA, 25 bp, SARS Virus
accggttattgttaattctcgtcca

SEQ ID NO: 147098 - DNA, 25 bp, SARS Virus
ccggttattgtttattctcgtccac

SEQ ID NO: 147099 - DNA, 25 bp, SARS Virus
cggttattgttatttctcgtccacc

SEQ ID NO: 147100 - DNA, 25 bp, SARS Virus
ggttattgttaattctcgtccaccc

SEQ ID NO: 147101 - DNA, 25 bp, SARS Virus
gttattgttaattctcgtccacccc

SEQ ID NO: 147102 - DNA, 25 bp, SARS Virus
ttattgttaattttcgtccacccca

SEQ ID NO: 147103 - DNA, 25 bp, SARS Virus
tattgttaattctcgtccaccccac

SEQ ID NO: 147104 - DNA, 25 bp, SARS Virus
attgttaattcttgtccaccccacg

SEQ ID NO: 147105 - DNA, 25 bp, SARS Virus
ttgttaattctcttccaccccacgt

SEQ ID NO: 147106 - DNA, 25 bp, SARS Virus
tgttaattctcgtccaccccacgtt

SEQ ID NO: 147107 - DNA, 25 bp, SARS Virus
gttaattctcgttcaccccacgttc

SEQ ID NO: 147108 - DNA, 25 bp, SARS Virus
ttaattctcgtctaccccacgttcc

SEQ ID NO: 147109 - DNA, 25 bp, SARS Virus
taattctcgtcctccccacgttcca

SEQ ID NO: 147110 - DNA, 25 bp, SARS Virus
aattctcgtccatcccacgttccaa

SEQ ID NO: 147111 - DNA, 25 bp, SARS Virus
attctcgtccactccacgttccaaa

SEQ ID NO: 147112 - DNA, 25 bp, SARS Virus
ttctcgtccacctcacgttccaaac

SEQ ID NO: 147113 - DNA, 25 bp, SARS Virus
tctcgtccaccctacgttccaaacg

SEQ ID NO: 147114 - DNA, 25 bp, SARS Virus
ctcgtccacccctcgttccaaacgg

SEQ ID NO: 147115 - DNA, 25 bp, SARS Virus
tcgtccaccccatgttccaaacggt

SEQ ID NO: 147116 - DNA, 25 bp, SARS Virus
cgtccaccccactttccaaacggta

SEQ ID NO: 147117 - DNA, 25 bp, SARS Virus
gtccaccccacgttccaaacggtag

SEQ ID NO: 147118 - DNA, 25 bp, SARS Virus
tccaccccacgttccaaacggtagt

SEQ ID NO: 147119 - DNA, 25 bp, SARS Virus
ccaccccacgtttcaaacggtagtc

SEQ ID NO: 147120 - DNA, 25 bp, SARS Virus
caccccacgttctaaacggtagtcc

SEQ ID NO: 147121 - DNA, 25 bp, SARS Virus
accccacgttcctaacggtagtccc

SEQ ID NO: 147122 - DNA, 25 bp, SARS Virus
ccccacgttccatacggtagtcccc

SEQ ID NO: 147123 - DNA, 25 bp, SARS Virus
cccacgttccaatcggtagtcccct

SEQ ID NO: 147124 - DNA, 25 bp, SARS Virus
ccacgttccaaatggtagtcccctc

SEQ ID NO: 147125 - DNA, 25 bp, SARS Virus
cacgttccaaactgtagtcccctct

SEQ ID NO: 147126 - DNA, 25 bp, SARS Virus
acgttccaaacgttagtcccctctt

SEQ ID NO: 147127 - DNA, 25 bp, SARS Virus
cgttccaaacggtagtcccctcttt

SEQ ID NO: 147128 - DNA, 25 bp, SARS Virus
gttccaaacggttgtcccctctttc

SEQ ID NO: 147129 - DNA, 25 bp, SARS Virus
ttccaaacggtattcccctctttcc

SEQ ID NO: 147130 - DNA, 25 bp, SARS Virus
tccaaacggtagtcccctctttccg

SEQ ID NO: 147131 - DNA, 25 bp, SARS Virus
ccaaacggtagttccctctttccgt

SEQ ID NO: 147132 - DNA, 25 bp, SARS Virus
caaacggtagtctcctctttccgtg

SEQ ID NO: 147133 - DNA, 25 bp, SARS Virus
aaacggtagtcctctctttccgtgt

SEQ ID NO: 147134 - DNA, 25 bp, SARS Virus
aacggtagtcccttctttccgtgta

SEQ ID NO: 147135 - DNA, 25 bp, SARS Virus
acggtagtcccctctttccgtgtaa

SEQ ID NO: 147136 - DNA, 25 bp, SARS Virus
cggtagtcccctttttccgtgtaat

SEQ ID NO: 147137 - DNA, 25 bp, SARS Virus
ggtagtcccctctttccgtgtaatc

SEQ ID NO: 147138 - DNA, 25 bp, SARS Virus
gtagtcccctctttccgtgtaatct

SEQ ID NO: 147139 - DNA, 25 bp, SARS Virus
tagtcccctctttccgtgtaatcta

SEQ ID NO: 147140 - DNA, 25 bp, SARS Virus
agtcccctcttttcgtgtaatctat

SEQ ID NO: 147141 - DNA, 25 bp, SARS Virus
gtcccctctttctgtgtaatctata

SEQ ID NO: 147142 - DNA, 25 bp, SARS Virus
tcccctctttccttgtaatctatac

SEQ ID NO: 147143 - DNA, 25 bp, SARS Virus
cccctctttccgtgtaatctataca

SEQ ID NO: 147144 - DNA, 25 bp, SARS Virus
ccctctttccgtttaatctatacag

SEQ ID NO: 147145 - DNA, 25 bp, SARS Virus
cctctttccgtgtaatctatacaga

SEQ ID NO: 147146 - DNA, 25 bp, SARS Virus
ctctttccgtgttatctatacagag

SEQ ID NO: 147147 - DNA, 25 bp, SARS Virus
tctttccgtgtattctatacagaga

SEQ ID NO: 147148 - DNA, 25 bp, SARS Virus
ctttccgtgtaatctatacagagag

SEQ ID NO: 147149 - DNA, 25 bp, SARS Virus
tttccgtgtaatttatacagagaga

SEQ ID NO: 147150 - DNA, 25 bp, SARS Virus
ttccgtgtaatctatacagagagag

SEQ ID NO: 147151 - DNA, 25 bp, SARS Virus
tccgtgtaatctttacagagagagt

SEQ ID NO: 147152 - DNA, 25 bp, SARS Virus
ccgtgtaatctatacagagagagtt

SEQ ID NO: 147153 - DNA, 25 bp, SARS Virus
cgtgtaatctattcagagagagttt

SEQ ID NO: 147154 - DNA, 25 bp, SARS Virus
gtgtaatctatatagagagagtttc

SEQ ID NO: 147155 - DNA, 25 bp, SARS Virus
tgtaatctatactgagagagtttcc

SEQ ID NO: 147156 - DNA, 25 bp, SARS Virus
gtaatctatacatagagagtttccc

SEQ ID NO: 147157 - DNA, 25 bp, SARS Virus
taatctatacagtgagagtttcccg

SEQ ID NO: 147158 - DNA, 25 bp, SARS Virus
aatctatacagatagagtttcccgg

SEQ ID NO: 147159 - DNA, 25 bp, SARS Virus
atctatacagagtgagtttcccgga

SEQ ID NO: 147160 - DNA, 25 bp, SARS Virus
tctatacagagatagtttcccggat

SEQ ID NO: 147161 - DNA, 25 bp, SARS Virus
ctatacagagagtgtttcccggatt

SEQ ID NO: 147162 - DNA, 25 bp, SARS Virus
tatacagagagattttcccggattc

SEQ ID NO: 147163 - DNA, 25 bp, SARS Virus
atacagagagagtttcccggattcg

SEQ ID NO: 147164 - DNA, 25 bp, SARS Virus
tacagagagagtttcccggattcga

SEQ ID NO: 147165 - DNA, 25 bp, SARS Virus
acagagagagtttcccggattcgaa

SEQ ID NO: 147166 - DNA, 25 bp, SARS Virus
cagagagagttttccggattcgaac

SEQ ID NO: 147167 - DNA, 25 bp, SARS Virus
agagagagtttctcggattcgaacg

SEQ ID NO: 147168 - DNA, 25 bp, SARS Virus
gagagagtttcctggattcgaacgg

SEQ ID NO: 147169 - DNA, 25 bp, SARS Virus
agagagtttccctgattcgaacggt

SEQ ID NO: 147170 - DNA, 25 bp, SARS Virus
gagagtttcccgtattcgaacggta

SEQ ID NO: 147171 - DNA, 25 bp, SARS Virus
agagtttcccggtttcgaacggtac

SEQ ID NO: 147172 - DNA, 25 bp, SARS Virus
gagtttcccggattcgaacggtaca

SEQ ID NO: 147173 - DNA, 25 bp, SARS Virus
agtttcccggattcgaacggtacag

SEQ ID NO: 147174 - DNA, 25 bp, SARS Virus
gtttcccggatttgaacggtacaga

SEQ ID NO: 147175 - DNA, 25 bp, SARS Virus
tttcccggattctaacggtacagat

SEQ ID NO: 147176 - DNA, 25 bp, SARS Virus
ttcccggattcgtacggtacagatt

SEQ ID NO: 147177 - DNA, 25 bp, SARS Virus
tcccggattcgatcggtacagattc

SEQ ID NO: 147178 - DNA, 25 bp, SARS Virus
cccggattcgaatggtacagattct

SEQ ID NO: 147179 - DNA, 25 bp, SARS Virus
ccggattcgaactgtacagattcta

SEQ ID NO: 147180 - DNA, 25 bp, SARS Virus
cggattcgaacgttacagattctat

SEQ ID NO: 147181 - DNA, 25 bp, SARS Virus
ggattcgaacggtacagattctatg

SEQ ID NO: 147182 - DNA, 25 bp, SARS Virus
gattcgaacggttcagattctatgg

SEQ ID NO: 147183 - DNA, 25 bp, SARS Virus
attcgaacggtatagattctatgga

SEQ ID NO: 147184 - DNA, 25 bp, SARS Virus
ttcgaacggtactgattctatggat

SEQ ID NO: 147185 - DNA, 25 bp, SARS Virus
tcgaacggtacatattctatggata

SEQ ID NO: 147186 - DNA, 25 bp, SARS Virus
cgaacggtacagtttctatggatat

SEQ ID NO: 147187 - DNA, 25 bp, SARS Virus
gaacggtacagattctatggatata

SEQ ID NO: 147188 - DNA, 25 bp, SARS Virus
aacggtacagattctatggatataa

SEQ ID NO: 147189 - DNA, 25 bp, SARS Virus
acggtacagattttatggatataaa

SEQ ID NO: 147190 - DNA, 25 bp, SARS Virus
cggtacagattctatggatataaat

SEQ ID NO: 147191 - DNA, 25 bp, SARS Virus
ggtacagattctttggatataaata

SEQ ID NO: 147192 - DNA, 25 bp, SARS Virus
gtacagattctatggatataaatat

SEQ ID NO: 147193 - DNA, 25 bp, SARS Virus
tacagattctattgatataaatatt

SEQ ID NO: 147194 - DNA, 25 bp, SARS Virus
acagattctatgtatataaatatta

SEQ ID NO: 147195 - DNA, 25 bp, SARS Virus
cagattctatggttataaatattaa

SEQ ID NO: 147196 - DNA, 25 bp, SARS Virus
agattctatggatataaatattaat

SEQ ID NO: 147197 - DNA, 25 bp, SARS Virus
gattctatggatttaaatattaata

SEQ ID NO: 147198 - DNA, 25 bp, SARS Virus
attctatggatataaatattaatat

SEQ ID NO: 147199 - DNA, 25 bp, SARS Virus
ttctatggatattaatattaatatt

SEQ ID NO: 147200 - DNA, 25 bp, SARS Virus
tctatggatatatatattaatatta

SEQ ID NO: 147201 - DNA, 25 bp, SARS Virus
ctatggatataattattaatattaa

SEQ ID NO: 147202 - DNA, 25 bp, SARS Virus
tatggatataaatattaatattaat

SEQ ID NO: 147203 - DNA, 25 bp, SARS Virus
atggatataaattttaatattaatg

SEQ ID NO: 147204 - DNA, 25 bp, SARS Virus
tggatataaatattaatattaatgg

SEQ ID NO: 147205 - DNA, 25 bp, SARS Virus
ggatataaatattaatattaatggt

SEQ ID NO: 147206 - DNA, 25 bp, SARS Virus
gatataaatatttatattaatggtc

SEQ ID NO: 147207 - DNA, 25 bp, SARS Virus
atataaatattattattaatggtca

SEQ ID NO: 147208 - DNA, 25 bp, SARS Virus
tataaatattaatattaatggtcaa

SEQ ID NO: 147209 - DNA, 25 bp, SARS Virus
ataaatattaattttaatggtcaac

SEQ ID NO: 147210 - DNA, 25 bp, SARS Virus
taaatattaatattaatggtcaact

SEQ ID NO: 147211 - DNA, 25 bp, SARS Virus
aaatattaatattaatggtcaactt

SEQ ID NO: 147212 - DNA, 25 bp, SARS Virus
aatattaatatttatggtcaacttc

SEQ ID NO: 147213 - DNA, 25 bp, SARS Virus
atattaatattattggtcaacttca

SEQ ID NO: 147214 - DNA, 25 bp, SARS Virus
tattaatattaatggtcaacttcat

SEQ ID NO: 147215 - DNA, 25 bp, SARS Virus
attaatattaattgtcaacttcatc

SEQ ID NO: 147216 - DNA, 25 bp, SARS Virus
ttaatattaatgttcaacttcatcg

SEQ ID NO: 147217 - DNA, 25 bp, SARS Virus
taatattaatggtcaacttcatcgt

SEQ ID NO: 147218 - DNA, 25 bp, SARS Virus
aatattaatggttaacttcatcgta

SEQ ID NO: 147219 - DNA, 25 bp, SARS Virus
atattaatggtctacttcatcgtag

SEQ ID NO: 147220 - DNA, 25 bp, SARS Virus
tattaatggtcatcttcatcgtagt

SEQ ID NO: 147221 - DNA, 25 bp, SARS Virus
attaatggtcaatttcatcgtagtt

SEQ ID NO: 147222 - DNA, 25 bp, SARS Virus
ttaatggtcaacttcatcgtagtta

SEQ ID NO: 147223 - DNA, 25 bp, SARS Virus
taatggtcaacttcatcgtagttac

SEQ ID NO: 147224 - DNA, 25 bp, SARS Virus
aatggtcaactttatcgtagttaca

SEQ ID NO: 147225 - DNA, 25 bp, SARS Virus
atggtcaacttcttcgtagttacaa

SEQ ID NO: 147226 - DNA, 25 bp, SARS Virus
tggtcaacttcatcgtagttacaag

SEQ ID NO: 147227 - DNA, 25 bp, SARS Virus
ggtcaacttcattgtagttacaagg

SEQ ID NO: 147228 - DNA, 25 bp, SARS Virus
gtcaacttcatcttagttacaagga

SEQ ID NO: 147229 - DNA, 25 bp, SARS Virus
tcaacttcatcgtagttacaaggat

SEQ ID NO: 147230 - DNA, 25 bp, SARS Virus
caacttcatcgttgttacaaggatc

SEQ ID NO: 147231 - DNA, 25 bp, SARS Virus
aacttcatcgtatttacaaggatca

SEQ ID NO: 147232 - DNA, 25 bp, SARS Virus
acttcatcgtagttacaaggatcat

SEQ ID NO: 147233 - DNA, 25 bp, SARS Virus
cttcatcgtagttacaaggatcata

SEQ ID NO: 147234 - DNA, 25 bp, SARS Virus
ttcatcgtagtttcaaggatcataa

SEQ ID NO: 147235 - DNA, 25 bp, SARS Virus
tcatcgtagttataaggatcataag

SEQ ID NO: 147236 - DNA, 25 bp, SARS Virus
catcgtagttactaggatcataagg

SEQ ID NO: 147237 - DNA, 25 bp, SARS Virus
atcgtagttacatggatcataaggt

SEQ ID NO: 147238 - DNA, 25 bp, SARS Virus
tcgtagttacaatgatcataaggtt

SEQ ID NO: 147239 - DNA, 25 bp, SARS Virus
cgtagttacaagtatcataaggttc

SEQ ID NO: 147240 - DNA, 25 bp, SARS Virus
gtagttacaaggttcataaggttcg

SEQ ID NO: 147241 - DNA, 25 bp, SARS Virus
tagttacaaggatcataaggttcgt

SEQ ID NO: 147242 - DNA, 25 bp, SARS Virus
agttacaaggattataaggttcgtt

SEQ ID NO: 147243 - DNA, 25 bp, SARS Virus
gttacaaggatcttaaggttcgttc

SEQ ID NO: 147244 - DNA, 25 bp, SARS Virus
ttacaaggatcataaggttcgttcc

SEQ ID NO: 147245 - DNA, 25 bp, SARS Virus
tacaaggatcattaggttcgttcct

SEQ ID NO: 147246 - DNA, 25 bp, SARS Virus
acaaggatcatatggttcgttcctg

SEQ ID NO: 147247 - DNA, 25 bp, SARS Virus
caaggatcataatgttcgttcctgt

SEQ ID NO: 147248 - DNA, 25 bp, SARS Virus
aaggatcataagtttcgttcctgtg

SEQ ID NO: 147249 - DNA, 25 bp, SARS Virus
aggatcataaggttcgttcctgtgt

SEQ ID NO: 147250 - DNA, 25 bp, SARS Virus
ggatcataaggttcgttcctgtgtt

SEQ ID NO: 147251 - DNA, 25 bp, SARS Virus
gatcataaggtttgttcctgtgttg

SEQ ID NO: 147252 - DNA, 25 bp, SARS Virus
atcataaggttctttcctgtgttgg

SEQ ID NO: 147253 - DNA, 25 bp, SARS Virus
tcataaggttcgttcctgtgttggg

SEQ ID NO: 147254 - DNA, 25 bp, SARS Virus
cataaggttcgttcctgtgttgggt

SEQ ID NO: 147255 - DNA, 25 bp, SARS Virus
ataaggttcgtttctgtgttgggta

SEQ ID NO: 147256 - DNA, 25 bp, SARS Virus
taaggttcgttcttgtgttgggtac

SEQ ID NO: 147257 - DNA, 25 bp, SARS Virus
aaggttcgttcctgtgttgggtact

SEQ ID NO: 147258 - DNA, 25 bp, SARS Virus
aggttcgttcctttgttgggtactt

SEQ ID NO: 147259 - DNA, 25 bp, SARS Virus
ggttcgttcctgtgttgggtacttt

SEQ ID NO: 147260 - DNA, 25 bp, SARS Virus
gttcgttcctgttttgggtacttta

SEQ ID NO: 147261 - DNA, 25 bp, SARS Virus
ttcgttcctgtgttgggtactttag

SEQ ID NO: 147262 - DNA, 25 bp, SARS Virus
tcgttcctgtgttgggtactttagt

SEQ ID NO: 147263 - DNA, 25 bp, SARS Virus
cgttcctgtgtttggtactttagta

SEQ ID NO: 147264 - DNA, 25 bp, SARS Virus
gttcctgtgttgtgtactttagtag

SEQ ID NO: 147265 - DNA, 25 bp, SARS Virus
ttcctgtgttggttactttagtaga

SEQ ID NO: 147266 - DNA, 25 bp, SARS Virus
tcctgtgttgggtactttagtagac

SEQ ID NO: 147267 - DNA, 25 bp, SARS Virus
cctgtgttgggttctttagtagacc

SEQ ID NO: 147268 - DNA, 25 bp, SARS Virus
ctgtgttgggtattttagtagaccg

SEQ ID NO: 147269 - DNA, 25 bp, SARS Virus
tgtgttgggtactttagtagaccgt

SEQ ID NO: 147270 - DNA, 25 bp, SARS Virus
gtgttgggtactttagtagaccgtt

SEQ ID NO: 147271 - DNA, 25 bp, SARS Virus
tgttgggtactttagtagaccgtta

SEQ ID NO: 147272 - DNA, 25 bp, SARS Virus
gttgggtacttttgtagaccgttaa

SEQ ID NO: 147273 - DNA, 25 bp, SARS Virus
ttgggtactttattagaccgttaaa

SEQ ID NO: 147274 - DNA, 25 bp, SARS Virus
tgggtactttagtagaccgttaaat

SEQ ID NO: 147275 - DNA, 25 bp, SARS Virus
gggtactttagttgaccgttaaata

SEQ ID NO: 147276 - DNA, 25 bp, SARS Virus
ggtactttagtataccgttaaatat

SEQ ID NO: 147277 - DNA, 25 bp, SARS Virus
gtactttagtagtccgttaaatatt

SEQ ID NO: 147278 - DNA, 25 bp, SARS Virus
tactttagtagatcgttaaatatta

SEQ ID NO: 147279 - DNA, 25 bp, SARS Virus
actttagtagactgttaaatattaa

SEQ ID NO: 147280 - DNA, 25 bp, SARS Virus
ctttagtagacctttaaatattaat

SEQ ID NO: 147281 - DNA, 25 bp, SARS Virus
tttagtagaccgttaaatattaata

SEQ ID NO: 147282 - DNA, 25 bp, SARS Virus
ttagtagaccgttaaatattaatat

SEQ ID NO: 147283 - DNA, 25 bp, SARS Virus
tagtagaccgtttaatattaatatt

SEQ ID NO: 147284 - DNA, 25 bp, SARS Virus
agtagaccgttatatattaatatta

SEQ ID NO: 147285 - DNA, 25 bp, SARS Virus
gtagaccgttaattattaatattag

SEQ ID NO: 147286 - DNA, 25 bp, SARS Virus
tagaccgttaaatattaatattagt

SEQ ID NO: 147287 - DNA, 25 bp, SARS Virus
agaccgttaaattttaatattagtc

SEQ ID NO: 147288 - DNA, 25 bp, SARS Virus
gaccgttaaatattaatattagtcg

SEQ ID NO: 147289 - DNA, 25 bp, SARS Virus
accgttaaatattaatattagtcgt

SEQ ID NO: 147290 - DNA, 25 bp, SARS Virus
ccgttaaatatttatattagtcgtt

SEQ ID NO: 147291 - DNA, 25 bp, SARS Virus
cgttaaatattattattagtcgtta

SEQ ID NO: 147292 - DNA, 25 bp, SARS Virus
gttaaatattaatattagtcgttat

SEQ ID NO: 147293 - DNA, 25 bp, SARS Virus
ttaaatattaattttagtcgttatt

SEQ ID NO: 147294 - DNA, 25 bp, SARS Virus
taaatattaatattagtcgttattg

SEQ ID NO: 147295 - DNA, 25 bp, SARS Virus
aaatattaatattagtcgttattgt

SEQ ID NO: 147296 - DNA, 25 bp, SARS Virus
aatattaatatttgtcgttattgtg

SEQ ID NO: 147297 - DNA, 25 bp, SARS Virus
atattaatattattcgttattgtgg

SEQ ID NO: 147298 - DNA, 25 bp, SARS Virus
tattaatattagtcgttattgtggt

SEQ ID NO: 147299 - DNA, 25 bp, SARS Virus
attaatattagttgttattgtggtc

SEQ ID NO: 147300 - DNA, 25 bp, SARS Virus
ttaatattagtctttattgtggtca

SEQ ID NO: 147301 - DNA, 25 bp, SARS Virus
taatattagtcgttattgtggtcaa

SEQ ID NO: 147302 - DNA, 25 bp, SARS Virus
aatattagtcgttattgtggtcaaa

SEQ ID NO: 147303 - DNA, 25 bp, SARS Virus
atattagtcgtttttgtggtcaaac

SEQ ID NO: 147304 - DNA, 25 bp, SARS Virus
tattagtcgttattgtggtcaaaca

SEQ ID NO: 147305 - DNA, 25 bp, SARS Virus
attagtcgttattgtggtcaaacag

SEQ ID NO: 147306 - DNA, 25 bp, SARS Virus
ttagtcgttattttggtcaaacagg

SEQ ID NO: 147307 - DNA, 25 bp, SARS Virus
tagtcgttattgtggtcaaacagga

SEQ ID NO: 147308 - DNA, 25 bp, SARS Virus
agtcgttattgttgtcaaacaggac

SEQ ID NO: 147309 - DNA, 25 bp, SARS Virus
gtcgttattgtgttcaaacaggacc

SEQ ID NO: 147310 - DNA, 25 bp, SARS Virus
tcgttattgtggtcaaacaggaccg

SEQ ID NO: 147311 - DNA, 25 bp, SARS Virus
cgttattgtggttaaacaggaccgc

SEQ ID NO: 147312 - DNA, 25 bp, SARS Virus
gttattgtggtctaacaggaccgcg

SEQ ID NO: 147313 - DNA, 25 bp, SARS Virus
ttattgtggtcatacaggaccgcga

SEQ ID NO: 147314 - DNA, 25 bp, SARS Virus
tattgtggtcaatcaggaccgcgat

SEQ ID NO: 147315 - DNA, 25 bp, SARS Virus
attgtggtcaaataggaccgcgata

SEQ ID NO: 147316 - DNA, 25 bp, SARS Virus
ttgtggtcaaactggaccgcgataa

SEQ ID NO: 147317 - DNA, 25 bp, SARS Virus
tgtggtcaaacatgaccgcgataaa

SEQ ID NO: 147318 - DNA, 25 bp, SARS Virus
gtggtcaaacagtaccgcgataaac

SEQ ID NO: 147319 - DNA, 25 bp, SARS Virus
tggtcaaacaggtccgcgataaaca

SEQ ID NO: 147320 - DNA, 25 bp, SARS Virus
ggtcaaacaggatcgcgataaacag

SEQ ID NO: 147321 - DNA, 25 bp, SARS Virus
gtcaaacaggactgcgataaacaga

SEQ ID NO: 147322 - DNA, 25 bp, SARS Virus
tcaaacaggacctcgataaacagaa

SEQ ID NO: 147323 - DNA, 25 bp, SARS Virus
caaacaggaccgtgataaacagaat

SEQ ID NO: 147324 - DNA, 25 bp, SARS Virus
aaacaggaccgctataaacagaatg

SEQ ID NO: 147325 - DNA, 25 bp, SARS Virus
aacaggaccgcgttaaacagaatgt

SEQ ID NO: 147326 - DNA, 25 bp, SARS Virus
acaggaccgcgataaacagaatgta

SEQ ID NO: 147327 - DNA, 25 bp, SARS Virus
caggaccgcgattaacagaatgtag

SEQ ID NO: 147328 - DNA, 25 bp, SARS Virus
aggaccgcgatatacagaatgtagt

SEQ ID NO: 147329 - DNA, 25 bp, SARS Virus
ggaccgcgataatcagaatgtagta

SEQ ID NO: 147330 - DNA, 25 bp, SARS Virus
gaccgcgataaatagaatgtagtag

SEQ ID NO: 147331 - DNA, 25 bp, SARS Virus
accgcgataaactgaatgtagtaga

SEQ ID NO: 147332 - DNA, 25 bp, SARS Virus
ccgcgataaacataatgtagtagag

SEQ ID NO: 147333 - DNA, 25 bp, SARS Virus
cgcgataaacagtatgtagtagagg

SEQ ID NO: 147334 - DNA, 25 bp, SARS Virus
gcgataaacagattgtagtagaggg

SEQ ID NO: 147335 - DNA, 25 bp, SARS Virus
cgataaacagaatgtagtagaggga

SEQ ID NO: 147336 - DNA, 25 bp, SARS Virus
gataaacagaatttagtagagggaa

SEQ ID NO: 147337 - DNA, 25 bp, SARS Virus
ataaacagaatgtagtagagggaac

SEQ ID NO: 147338 - DNA, 25 bp, SARS Virus
taaacagaatgttgtagagggaact

SEQ ID NO: 147339 - DNA, 25 bp, SARS Virus
aaacagaatgtattagagggaactg

SEQ ID NO: 147340 - DNA, 25 bp, SARS Virus
aacagaatgtagtagagggaactga

SEQ ID NO: 147341 - DNA, 25 bp, SARS Virus
acagaatgtagttgagggaactgat

SEQ ID NO: 147342 - DNA, 25 bp, SARS Virus
cagaatgtagtatagggaactgatg

SEQ ID NO: 147343 - DNA, 25 bp, SARS Virus
agaatgtagtagtgggaactgatgt

SEQ ID NO: 147344 - DNA, 25 bp, SARS Virus
gaatgtagtagatggaactgatgtt

SEQ ID NO: 147345 - DNA, 25 bp, SARS Virus
aatgtagtagagtgaactgatgttt

SEQ ID NO: 147346 - DNA, 25 bp, SARS Virus
atgtagtagaggtaactgatgtttt

SEQ ID NO: 147347 - DNA, 25 bp, SARS Virus
tgtagtagagggtactgatgttttc

SEQ ID NO: 147348 - DNA, 25 bp, SARS Virus
gtagtagagggatctgatgttttct

SEQ ID NO: 147349 - DNA, 25 bp, SARS Virus
tagtagagggaattgatgttttctt

SEQ ID NO: 147350 - DNA, 25 bp, SARS Virus
agtagagggaactgatgttttctta

SEQ ID NO: 147351 - DNA, 25 bp, SARS Virus
gtagagggaacttatgttttcttag

SEQ ID NO: 147352 - DNA, 25 bp, SARS Virus
tagagggaactgttgttttcttaga

SEQ ID NO: 147353 - DNA, 25 bp, SARS Virus
agagggaactgatgttttcttagac

SEQ ID NO: 147354 - DNA, 25 bp, SARS Virus
gagggaactgattttttcttagacg

SEQ ID NO: 147355 - DNA, 25 bp, SARS Virus
agggaactgatgttttcttagacgt

SEQ ID NO: 147356 - DNA, 25 bp, SARS Virus
gggaactgatgttttcttagacgta

SEQ ID NO: 147357 - DNA, 25 bp, SARS Virus
ggaactgatgttttcttagacgtat

SEQ ID NO: 147358 - DNA, 25 bp, SARS Virus
gaactgatgttttcttagacgtatc

SEQ ID NO: 147359 - DNA, 25 bp, SARS Virus
aactgatgtttttttagacgtatct

SEQ ID NO: 147360 - DNA, 25 bp, SARS Virus
actgatgttttcttagacgtatctg

SEQ ID NO: 147361 - DNA, 25 bp, SARS Virus
ctgatgttttcttagacgtatctgt

SEQ ID NO: 147362 - DNA, 25 bp, SARS Virus
tgatgttttctttgacgtatctgta

SEQ ID NO: 147363 - DNA, 25 bp, SARS Virus
gatgttttcttatacgtatctgtaa

SEQ ID NO: 147364 - DNA, 25 bp, SARS Virus
atgttttcttagtcgtatctgtaac

SEQ ID NO: 147365 - DNA, 25 bp, SARS Virus
tgttttcttagatgtatctgtaacc

SEQ ID NO: 147366 - DNA, 25 bp, SARS Virus
gttttcttagacttatctgtaacct

SEQ ID NO: 147367 - DNA, 25 bp, SARS Virus
ttttcttagacgtatctgtaacctc

SEQ ID NO: 147368 - DNA, 25 bp, SARS Virus
tttcttagacgtttctgtaacctct

SEQ ID NO: 147369 - DNA, 25 bp, SARS Virus
ttcttagacgtatctgtaacctctt

SEQ ID NO: 147370 - DNA, 25 bp, SARS Virus
tcttagacgtatttgtaacctcttc

SEQ ID NO: 147371 - DNA, 25 bp, SARS Virus
cttagacgtatctgtaacctcttcg

SEQ ID NO: 147372 - DNA, 25 bp, SARS Virus
ttagacgtatctttaacctcttcgt

SEQ ID NO: 147373 - DNA, 25 bp, SARS Virus
tagacgtatctgtaacctcttcgtt

SEQ ID NO: 147374 - DNA, 25 bp, SARS Virus
agacgtatctgttacctcttcgttt

SEQ ID NO: 147375 - DNA, 25 bp, SARS Virus
gacgtatctgtatcctcttcgtttc

SEQ ID NO: 147376 - DNA, 25 bp, SARS Virus
acgtatctgtaatctcttcgtttct

SEQ ID NO: 147377 - DNA, 25 bp, SARS Virus
cgtatctgtaacttcttcgtttcta

SEQ ID NO: 147378 - DNA, 25 bp, SARS Virus
gtatctgtaacctcttcgtttctag

SEQ ID NO: 147379 - DNA, 25 bp, SARS Virus
tatctgtaaccttttcgtttctagt

SEQ ID NO: 147380 - DNA, 25 bp, SARS Virus
atctgtaacctcttcgtttctagta

SEQ ID NO: 147381 - DNA, 25 bp, SARS Virus
tctgtaacctcttcgtttctagtaa

SEQ ID NO: 147382 - DNA, 25 bp, SARS Virus
ctgtaacctctttgtttctagtaag

SEQ ID NO: 147383 - DNA, 25 bp, SARS Virus
tgtaacctcttcttttctagtaagt

SEQ ID NO: 147384 - DNA, 25 bp, SARS Virus
gtaacctcttcgtttctagtaagtt

SEQ ID NO: 147385 - DNA, 25 bp, SARS Virus
taacctcttcgtttctagtaagttg

SEQ ID NO: 147386 - DNA, 25 bp, SARS Virus
aacctcttcgtttctagtaagttga

SEQ ID NO: 147387 - DNA, 25 bp, SARS Virus
acctcttcgtttttagtaagttgaa

SEQ ID NO: 147388 - DNA, 25 bp, SARS Virus
cctcttcgtttctagtaagttgaat

SEQ ID NO: 147389 - DNA, 25 bp, SARS Virus
ctcttcgtttcttgtaagttgaatc

SEQ ID NO: 147390 - DNA, 25 bp, SARS Virus
tcttcgtttctattaagttgaatca

SEQ ID NO: 147391 - DNA, 25 bp, SARS Virus
cttcgtttctagtaagttgaatcac

SEQ ID NO: 147392 - DNA, 25 bp, SARS Virus
ttcgtttctagttagttgaatcacc

SEQ ID NO: 147393 - DNA, 25 bp, SARS Virus
tcgtttctagtatgttgaatcaccg

SEQ ID NO: 147394 - DNA, 25 bp, SARS Virus
cgtttctagtaatttgaatcaccgt

SEQ ID NO: 147395 - DNA, 25 bp, SARS Virus
gtttctagtaagttgaatcaccgtc

SEQ ID NO: 147396 - DNA, 25 bp, SARS Virus
tttctagtaagttgaatcaccgtct

SEQ ID NO: 147397 - DNA, 25 bp, SARS Virus
ttctagtaagtttaatcaccgtctt

SEQ ID NO: 147398 - DNA, 25 bp, SARS Virus
tctagtaagttgtatcaccgtcttt

SEQ ID NO: 147399 - DNA, 25 bp, SARS Virus
ctagtaagttgattcaccgtctttg

SEQ ID NO: 147400 - DNA, 25 bp, SARS Virus
tagtaagttgaatcaccgtctttgc

SEQ ID NO: 147401 - DNA, 25 bp, SARS Virus
agtaagttgaattaccgtctttgcg

SEQ ID NO: 147402 - DNA, 25 bp, SARS Virus
gtaagttgaatctccgtctttgcgg

SEQ ID NO: 147403 - DNA, 25 bp, SARS Virus
taagttgaatcatcgtctttgcggt

SEQ ID NO: 147404 - DNA, 25 bp, SARS Virus
aagttgaatcactgtctttgcggta

SEQ ID NO: 147405 - DNA, 25 bp, SARS Virus
agttgaatcaccttctttgcggtat

SEQ ID NO: 147406 - DNA, 25 bp, SARS Virus
gttgaatcaccgtctttgcggtatc

SEQ ID NO: 147407 - DNA, 25 bp, SARS Virus
ttgaatcaccgtttttgcggtatcg

SEQ ID NO: 147408 - DNA, 25 bp, SARS Virus
tgaatcaccgtctttgcggtatcgt

SEQ ID NO: 147409 - DNA, 25 bp, SARS Virus
gaatcaccgtctatgcggtatcgtg

SEQ ID NO: 147410 - DNA, 25 bp, SARS Virus
aatcaccgtcttagcggtatcgtga

SEQ ID NO: 147411 - DNA, 25 bp, SARS Virus
atcaccgtctttacggtatcgtgaa

SEQ ID NO: 147412 - DNA, 25 bp, SARS Virus
tcaccgtctttgaggtatcgtgaat

SEQ ID NO: 147413 - DNA, 25 bp, SARS Virus
caccgtctttgcagtatcgtgaatt

SEQ ID NO: 147414 - DNA, 25 bp, SARS Virus
accgtctttgcgatatcgtgaattt

SEQ ID NO: 147415 - DNA, 25 bp, SARS Virus
ccgtctttgcggaatcgtgaatttc

SEQ ID NO: 147416 - DNA, 25 bp, SARS Virus
cgtctttgcggtatcgtgaatttcc

SEQ ID NO: 147417 - DNA, 25 bp, SARS Virus
gtctttgcggtaacgtgaatttcca

SEQ ID NO: 147418 - DNA, 25 bp, SARS Virus
tctttgcggtatagtgaatttccaa

SEQ ID NO: 147419 - DNA, 25 bp, SARS Virus
ctttgcggtatcatgaatttccaac

SEQ ID NO: 147420 - DNA, 25 bp, SARS Virus
tttgcggtatcgagaatttccaact

SEQ ID NO: 147421 - DNA, 25 bp, SARS Virus
ttgcggtatcgtaaatttccaactt

SEQ ID NO: 147422 - DNA, 25 bp, SARS Virus
tgcggtatcgtgaatttccaacttt

SEQ ID NO: 147423 - DNA, 25 bp, SARS Virus
gcggtatcgtgaatttccaactttt

SEQ ID NO: 147424 - DNA, 25 bp, SARS Virus
cggtatcgtgaaattccaacttttt

SEQ ID NO: 147425 - DNA, 25 bp, SARS Virus
ggtatcgtgaatatccaactttttt

SEQ ID NO: 147426 - DNA, 25 bp, SARS Virus
gtatcgtgaattaccaacttttttt

SEQ ID NO: 147427 - DNA, 25 bp, SARS Virus
tatcgtgaatttacaacttttttta

SEQ ID NO: 147428 - DNA, 25 bp, SARS Virus
atcgtgaatttcaaactttttttac

SEQ ID NO: 147429 - DNA, 25 bp, SARS Virus
tcgtgaatttccaactttttttaca

SEQ ID NO: 147430 - DNA, 25 bp, SARS Virus
cgtgaatttccaactttttttacaa

SEQ ID NO: 147431 - DNA, 25 bp, SARS Virus
gtgaatttccaaatttttttacaac

SEQ ID NO: 147432 - DNA, 25 bp, SARS Virus
tgaatttccaacattttttacaact

SEQ ID NO: 147433 - DNA, 25 bp, SARS Virus
gaatttccaactatttttacaactc

SEQ ID NO: 147434 - DNA, 25 bp, SARS Virus
aatttccaacttattttacaactca

SEQ ID NO: 147435 - DNA, 25 bp, SARS Virus
atttccaactttatttacaactcaa

SEQ ID NO: 147436 - DNA, 25 bp, SARS Virus
tttccaacttttattacaactcaac

SEQ ID NO: 147437 - DNA, 25 bp, SARS Virus
ttccaactttttatacaactcaaca

SEQ ID NO: 147438 - DNA, 25 bp, SARS Virus
tccaacttttttaacaactcaacat

SEQ ID NO: 147439 - DNA, 25 bp, SARS Virus
ccaactttttttacaactcaacatc

SEQ ID NO: 147440 - DNA, 25 bp, SARS Virus
caactttttttaaaactcaacatct

SEQ ID NO: 147441 - DNA, 25 bp, SARS Virus
aactttttttacaactcaacatctc

SEQ ID NO: 147442 - DNA, 25 bp, SARS Virus
actttttttacaactcaacatctcg

SEQ ID NO: 147443 - DNA, 25 bp, SARS Virus
ctttttttacaaatcaacatctcgt

SEQ ID NO: 147444 - DNA, 25 bp, SARS Virus
tttttttacaacacaacatctcgtg

SEQ ID NO: 147445 - DNA, 25 bp, SARS Virus
ttttttacaactaaacatctcgtgt

SEQ ID NO: 147446 - DNA, 25 bp, SARS Virus
tttttacaactcaacatctcgtgtc

SEQ ID NO: 147447 - DNA, 25 bp, SARS Virus
ttttacaactcaacatctcgtgtct

SEQ ID NO: 147448 - DNA, 25 bp, SARS Virus
tttacaactcaaaatctcgtgtctc

SEQ ID NO: 147449 - DNA, 25 bp, SARS Virus
ttacaactcaacatctcgtgtctca

SEQ ID NO: 147450 - DNA, 25 bp, SARS Virus
tacaactcaacaactcgtgtctcat

SEQ ID NO: 147451 - DNA, 25 bp, SARS Virus
acaactcaacatatcgtgtctcatt

SEQ ID NO: 147452 - DNA, 25 bp, SARS Virus
caactcaacatcacgtgtctcatta

SEQ ID NO: 147453 - DNA, 25 bp, SARS Virus
aactcaacatctagtgtctcattag

SEQ ID NO: 147454 - DNA, 25 bp, SARS Virus
actcaacatctcatgtctcattagt

SEQ ID NO: 147455 - DNA, 25 bp, SARS Virus
ctcaacatctcgagtctcattagtc

SEQ ID NO: 147456 - DNA, 25 bp, SARS Virus
tcaacatctcgtatctcattagtcg

SEQ ID NO: 147457 - DNA, 25 bp, SARS Virus
caacatctcgtgactcattagtcgt

SEQ ID NO: 147458 - DNA, 25 bp, SARS Virus
aacatctcgtgtatcattagtcgtt

SEQ ID NO: 147459 - DNA, 25 bp, SARS Virus
acatctcgtgtcacattagtcgttg

SEQ ID NO: 147460 - DNA, 25 bp, SARS Virus
catctcgtgtctaattagtcgttgt

SEQ ID NO: 147461 - DNA, 25 bp, SARS Virus
atctcgtgtctcattagtcgttgtg

SEQ ID NO: 147462 - DNA, 25 bp, SARS Virus
tctcgtgtctcaatagtcgttgtgt

SEQ ID NO: 147463 - DNA, 25 bp, SARS Virus
ctcgtgtctcataagtcgttgtgtt

SEQ ID NO: 147464 - DNA, 25 bp, SARS Virus
tcgtgtctcattagtcgttgtgtta

SEQ ID NO: 147465 - DNA, 25 bp, SARS Virus
cgtgtctcattaatcgttgtgttaa

SEQ ID NO: 147466 - DNA, 25 bp, SARS Virus
gtgtctcattagacgttgtgttaat

SEQ ID NO: 147467 - DNA, 25 bp, SARS Virus
tgtctcattagtagttgtgttaatc

SEQ ID NO: 147468 - DNA, 25 bp, SARS Virus
gtctcattagtcattgtgttaatct

SEQ ID NO: 147469 - DNA, 25 bp, SARS Virus
tctcattagtcgatgtgttaatctt

SEQ ID NO: 147470 - DNA, 25 bp, SARS Virus
ctcattagtcgtagtgttaatcttt

SEQ ID NO: 147471 - DNA, 25 bp, SARS Virus
tcattagtcgttatgttaatcttta

SEQ ID NO: 147472 - DNA, 25 bp, SARS Virus
cattagtcgttgagttaatctttaa

SEQ ID NO: 147473 - DNA, 25 bp, SARS Virus
attagtcgttgtattaatctttaaa

SEQ ID NO: 147474 - DNA, 25 bp, SARS Virus
ttagtcgttgtgataatctttaaaa

SEQ ID NO: 147475 - DNA, 25 bp, SARS Virus
tagtcgttgtgtaaatctttaaaaa

SEQ ID NO: 147476 - DNA, 25 bp, SARS Virus
agtcgttgtgttaatctttaaaaaa

SEQ ID NO: 147477 - DNA, 25 bp, SARS Virus
gtcgttgtgttaatctttaaaaaaa

SEQ ID NO: 147478 - DNA, 25 bp, SARS Virus
tcgttgtgttaaactttaaaaaaaa

SEQ ID NO: 147479 - DNA, 25 bp, SARS Virus
cgttgtgttaatatttaaaaaaaag

SEQ ID NO: 147480 - DNA, 25 bp, SARS Virus
gttgtgttaatcattaaaaaaaaga

SEQ ID NO: 147481 - DNA, 25 bp, SARS Virus
ttgtgttaatctataaaaaaaagag

SEQ ID NO: 147482 - DNA, 25 bp, SARS Virus
tgtgttaatcttaaaaaaaaagaga

SEQ ID NO: 147483 - DNA, 25 bp, SARS Virus
gtgttaatctttaaaaaaaagagag

SEQ ID NO: 147484 - DNA, 25 bp, SARS Virus
tgttaatctttaaaaaaaagagagg

SEQ ID NO: 147485 - DNA, 25 bp, SARS Virus
gttaatctttaaaaaaaagagaggg

SEQ ID NO: 147486 - DNA, 25 bp, SARS Virus
ttaatctttaaaaaaaagagagggt

SEQ ID NO: 147487 - DNA, 25 bp, SARS Virus
taatctttaaaaaaaagagagggta

SEQ ID NO: 147488 - DNA, 25 bp, SARS Virus
aatctttaaaaaaaagagagggtac

SEQ ID NO: 147489 - DNA, 25 bp, SARS Virus
atctttaaaaaaaagagagggtacg

SEQ ID NO: 147490 - DNA, 25 bp, SARS Virus
tctttaaaaaaaagagagggtacgt

SEQ ID NO: 147491 - DNA, 25 bp, SARS Virus
ctttaaaaaaaaaagagggtacgta

SEQ ID NO: 147492 - DNA, 25 bp, SARS Virus
tttaaaaaaaagagagggtacgtat

SEQ ID NO: 147493 - DNA, 25 bp, SARS Virus
ttaaaaaaaagaaagggtacgtatc

SEQ ID NO: 147494 - DNA, 25 bp, SARS Virus
taaaaaaaagagagggtacgtatct

SEQ ID NO: 147495 - DNA, 25 bp, SARS Virus
aaaaaaaagagaaggtacgtatctg

SEQ ID NO: 147496 - DNA, 25 bp, SARS Virus
aaaaaaagagagagtacgtatctgt

SEQ ID NO: 147497 - DNA, 25 bp, SARS Virus
aaaaaagagaggatacgtatctgtc

SEQ ID NO: 147498 - DNA, 25 bp, SARS Virus
aaaaagagagggaacgtatctgtct

SEQ ID NO: 147499 - DNA, 25 bp, SARS Virus
aaaagagagggtacgtatctgtctt

SEQ ID NO: 147500 - DNA, 25 bp, SARS Virus
aaagagagggtaagtatctgtcttc

SEQ ID NO: 147501 - DNA, 25 bp, SARS Virus
aagagagggtacatatctgtcttcc

SEQ ID NO: 147502 - DNA, 25 bp, SARS Virus
agagagggtacgaatctgtcttccc

SEQ ID NO: 147503 - DNA, 25 bp, SARS Virus
gagagggtacgtatctgtcttccct

SEQ ID NO: 147504 - DNA, 25 bp, SARS Virus
agagggtacgtaactgtcttccctt

SEQ ID NO: 147505 - DNA, 25 bp, SARS Virus
gagggtacgtatatgtcttccctta

SEQ ID NO: 147506 - DNA, 25 bp, SARS Virus
agggtacgtatcagtcttcccttaa

SEQ ID NO: 147507 - DNA, 25 bp, SARS Virus
gggtacgtatctatcttcccttaaa

SEQ ID NO: 147508 - DNA, 25 bp, SARS Virus
ggtacgtatctgacttcccttaaat

SEQ ID NO: 147509 - DNA, 25 bp, SARS Virus
gtacgtatctgtattcccttaaatc

SEQ ID NO: 147510 - DNA, 25 bp, SARS Virus
tacgtatctgtcatcccttaaatca

SEQ ID NO: 147511 - DNA, 25 bp, SARS Virus
acgtatctgtctacccttaaatcat

SEQ ID NO: 147512 - DNA, 25 bp, SARS Virus
cgtatctgtcttaccttaaatcatc

SEQ ID NO: 147513 - DNA, 25 bp, SARS Virus
gtatctgtcttcacttaaatcatcg

SEQ ID NO: 147514 - DNA, 25 bp, SARS Virus
tatctgtcttccattaaatcatcgt

SEQ ID NO: 147515 - DNA, 25 bp, SARS Virus
atctgtcttcccataaatcatcgta

SEQ ID NO: 147516 - DNA, 25 bp, SARS Virus
tctgtcttccctaaaatcatcgtaa

SEQ ID NO: 147517 - DNA, 25 bp, SARS Virus
ctgtcttcccttaaatcatcgtaat

SEQ ID NO: 147518 - DNA, 25 bp, SARS Virus
tgtcttcccttaaatcatcgtaatt

SEQ ID NO: 147519 - DNA, 25 bp, SARS Virus
gtcttcccttaaatcatcgtaattt

SEQ ID NO: 147520 - DNA, 25 bp, SARS Virus
tcttcccttaaaacatcgtaatttt

SEQ ID NO: 147521 - DNA, 25 bp, SARS Virus
cttcccttaaataatcgtaattttt

SEQ ID NO: 147522 - DNA, 25 bp, SARS Virus
ttcccttaaatcatcgtaatttttg

SEQ ID NO: 147523 - DNA, 25 bp, SARS Virus
tcccttaaatcaacgtaatttttgg

SEQ ID NO: 147524 - DNA, 25 bp, SARS Virus
cccttaaatcatagtaatttttgga

SEQ ID NO: 147525 - DNA, 25 bp, SARS Virus
ccttaaatcatcataatttttggag

SEQ ID NO: 147526 - DNA, 25 bp, SARS Virus
cttaaatcatcgaaatttttggaga

SEQ ID NO: 147527 - DNA, 25 bp, SARS Virus
ttaaatcatcgtaatttttggagag

SEQ ID NO: 147528 - DNA, 25 bp, SARS Virus
taaatcatcgtaatttttggagagg

SEQ ID NO: 147529 - DNA, 25 bp, SARS Virus
aaatcatcgtaaattttggagaggt

SEQ ID NO: 147530 - DNA, 25 bp, SARS Virus
aatcatcgtaatatttggagaggtt

SEQ ID NO: 147531 - DNA, 25 bp, SARS Virus
atcatcgtaattattggagaggttt

SEQ ID NO: 147532 - DNA, 25 bp, SARS Virus
tcatcgtaatttatggagaggtttt

SEQ ID NO: 147533 - DNA, 25 bp, SARS Virus
catcgtaattttaggagaggttttc

SEQ ID NO: 147534 - DNA, 25 bp, SARS Virus
atcgtaatttttagagaggttttcc

SEQ ID NO: 147535 - DNA, 25 bp, SARS Virus
tcgtaatttttgaagaggttttcct

SEQ ID NO: 147536 - DNA, 25 bp, SARS Virus
cgtaatttttggagaggttttcctg

SEQ ID NO: 147537 - DNA, 25 bp, SARS Virus
gtaatttttggaaaggttttcctgt

SEQ ID NO: 147538 - DNA, 25 bp, SARS Virus
taatttttggagaggttttcctgtg

SEQ ID NO: 147539 - DNA, 25 bp, SARS Virus
aatttttggagaagttttcctgtgt

SEQ ID NO: 147540 - DNA, 25 bp, SARS Virus
atttttggagagattttcctgtgtt

SEQ ID NO: 147541 - DNA, 25 bp, SARS Virus
tttttggagaggatttcctgtgttc

SEQ ID NO: 147542 - DNA, 25 bp, SARS Virus
ttttggagaggtattcctgtgttca

SEQ ID NO: 147543 - DNA, 25 bp, SARS Virus
tttggagaggttatcctgtgttcaa

SEQ ID NO: 147544 - DNA, 25 bp, SARS Virus
ttggagaggtttacctgtgttcaaa

SEQ ID NO: 147545 - DNA, 25 bp, SARS Virus
tggagaggttttactgtgttcaaac

SEQ ID NO: 147546 - DNA, 25 bp, SARS Virus
ggagaggttttcatgtgttcaaaca

SEQ ID NO: 147547 - DNA, 25 bp, SARS Virus
gagaggttttccagtgttcaaacat

SEQ ID NO: 147548 - DNA, 25 bp, SARS Virus
agaggttttcctatgttcaaacatt

SEQ ID NO: 147549 - DNA, 25 bp, SARS Virus
gaggttttcctgagttcaaacatta

SEQ ID NO: 147550 - DNA, 25 bp, SARS Virus
aggttttcctgtattcaaacattat

SEQ ID NO: 147551 - DNA, 25 bp, SARS Virus
ggttttcctgtgatcaaacattata

SEQ ID NO: 147552 - DNA, 25 bp, SARS Virus
gttttcctgtgtacaaacattataa

SEQ ID NO: 147553 - DNA, 25 bp, SARS Virus
ttttcctgtgttaaaacattataat

SEQ ID NO: 147554 - DNA, 25 bp, SARS Virus
tttcctgtgttcaaacattataatc

SEQ ID NO: 147555 - DNA, 25 bp, SARS Virus
ttcctgtgttcaaacattataatcc

SEQ ID NO: 147556 - DNA, 25 bp, SARS Virus
tcctgtgttcaaacattataatccc

SEQ ID NO: 147557 - DNA, 25 bp, SARS Virus
cctgtgttcaaaaattataatccct

SEQ ID NO: 147558 - DNA, 25 bp, SARS Virus
ctgtgttcaaacattataatccctt

SEQ ID NO: 147559 - DNA, 25 bp, SARS Virus
tgtgttcaaacaatataatccctta

SEQ ID NO: 147560 - DNA, 25 bp, SARS Virus
gtgttcaaacataataatcccttag

SEQ ID NO: 147561 - DNA, 25 bp, SARS Virus
tgttcaaacattataatcccttaga

SEQ ID NO: 147562 - DNA, 25 bp, SARS Virus
gttcaaacattaaaatcccttagag

SEQ ID NO: 147563 - DNA, 25 bp, SARS Virus
ttcaaacattataatcccttagagt

SEQ ID NO: 147564 - DNA, 25 bp, SARS Virus
tcaaacattataatcccttagagtg

SEQ ID NO: 147565 - DNA, 25 bp, SARS Virus
caaacattataaacccttagagtgt

SEQ ID NO: 147566 - DNA, 25 bp, SARS Virus
aaacattataataccttagagtgtt

SEQ ID NO: 147567 - DNA, 25 bp, SARS Virus
aacattataatcacttagagtgttg

SEQ ID NO: 147568 - DNA, 25 bp, SARS Virus
acattataatccattagagtgttgt

SEQ ID NO: 147569 - DNA, 25 bp, SARS Virus
cattataatcccatagagtgttgta

SEQ ID NO: 147570 - DNA, 25 bp, SARS Virus
attataatccctaagagtgttgtag

SEQ ID NO: 147571 - DNA, 25 bp, SARS Virus
ttataatcccttagagtgttgtaga

SEQ ID NO: 147572 - DNA, 25 bp, SARS Virus
tataatcccttaaagtgttgtagag

SEQ ID NO: 147573 - DNA, 25 bp, SARS Virus
ataatcccttagagtgttgtagagg

SEQ ID NO: 147574 - DNA, 25 bp, SARS Virus
taatcccttagaatgttgtagagga

SEQ ID NO: 147575 - DNA, 25 bp, SARS Virus
aatcccttagagagttgtagaggac

SEQ ID NO: 147576 - DNA, 25 bp, SARS Virus
atcccttagagtattgtagaggact

SEQ ID NO: 147577 - DNA, 25 bp, SARS Virus
tcccttagagtgatgtagaggactc

SEQ ID NO: 147578 - DNA, 25 bp, SARS Virus
cccttagagtgtagtagaggactcc

SEQ ID NO: 147579 - DNA, 25 bp, SARS Virus
ccttagagtgttatagaggactccc

SEQ ID NO: 147580 - DNA, 25 bp, SARS Virus
cttagagtgttgaagaggactccct

SEQ ID NO: 147581 - DNA, 25 bp, SARS Virus
ttagagtgttgtagaggactccctt

SEQ ID NO: 147582 - DNA, 25 bp, SARS Virus
tagagtgttgtaaaggactcccttg

SEQ ID NO: 147583 - DNA, 25 bp, SARS Virus
agagtgttgtagaggactcccttgt

SEQ ID NO: 147584 - DNA, 25 bp, SARS Virus
gagtgttgtagaagactcccttgtt

SEQ ID NO: 147585 - DNA, 25 bp, SARS Virus
agtgttgtagagaactcccttgttg

SEQ ID NO: 147586 - DNA, 25 bp, SARS Virus
gtgttgtagaggactcccttgttgg

SEQ ID NO: 147587 - DNA, 25 bp, SARS Virus
tgttgtagaggaatcccttgttggg

SEQ ID NO: 147588 - DNA, 25 bp, SARS Virus
gttgtagaggacacccttgttggga

SEQ ID NO: 147589 - DNA, 25 bp, SARS Virus
ttgtagaggactaccttgttgggac

SEQ ID NO: 147590 - DNA, 25 bp, SARS Virus
tgtagaggactcacttgttgggact

SEQ ID NO: 147591 - DNA, 25 bp, SARS Virus
gtagaggactccattgttgggactt

SEQ ID NO: 147592 - DNA, 25 bp, SARS Virus
tagaggactcccatgttgggacttt

SEQ ID NO: 147593 - DNA, 25 bp, SARS Virus
agaggactccctagttgggacttta

SEQ ID NO: 147594 - DNA, 25 bp, SARS Virus
gaggactcccttattgggactttaa

SEQ ID NO: 147595 - DNA, 25 bp, SARS Virus
aggactcccttgatgggactttaat

SEQ ID NO: 147596 - DNA, 25 bp, SARS Virus
ggactcccttgtagggactttaatc

SEQ ID NO: 147597 - DNA, 25 bp, SARS Virus
gactcccttgttaggactttaatct

SEQ ID NO: 147598 - DNA, 25 bp, SARS Virus
actcccttgttgagactttaatctc

SEQ ID NO: 147599 - DNA, 25 bp, SARS Virus
ctcccttgttggaactttaatctcc

SEQ ID NO: 147600 - DNA, 25 bp, SARS Virus
tcccttgttgggactttaatctcca

SEQ ID NO: 147601 - DNA, 25 bp, SARS Virus
cccttgttgggaatttaatctccag

SEQ ID NO: 147602 - DNA, 25 bp, SARS Virus
ccttgttgggacattaatctccaga

SEQ ID NO: 147603 - DNA, 25 bp, SARS Virus
cttgttgggactataatctccagac

SEQ ID NO: 147604 - DNA, 25 bp, SARS Virus
ttgttgggacttaaatctccagacc

SEQ ID NO: 147605 - DNA, 25 bp, SARS Virus
tgttgggactttaatctccagacca

SEQ ID NO: 147606 - DNA, 25 bp, SARS Virus
gttgggactttaatctccagaccat

SEQ ID NO: 147607 - DNA, 25 bp, SARS Virus
ttgggactttaaactccagaccatt

SEQ ID NO: 147608 - DNA, 25 bp, SARS Virus
tgggactttaatatccagaccattt

SEQ ID NO: 147609 - DNA, 25 bp, SARS Virus
gggactttaatcaccagaccattta

SEQ ID NO: 147610 - DNA, 25 bp, SARS Virus
ggactttaatctacagaccatttaa

SEQ ID NO: 147611 - DNA, 25 bp, SARS Virus
gactttaatctcaagaccatttaag

SEQ ID NO: 147612 - DNA, 25 bp, SARS Virus
actttaatctccagaccatttaagg

SEQ ID NO: 147613 - DNA, 25 bp, SARS Virus
ctttaatctccaaaccatttaagga

SEQ ID NO: 147614 - DNA, 25 bp, SARS Virus
tttaatctccagaccatttaaggaa

SEQ ID NO: 147615 - DNA, 25 bp, SARS Virus
ttaatctccagaacatttaaggaaa

SEQ ID NO: 147616 - DNA, 25 bp, SARS Virus
taatctccagacaatttaaggaaac

SEQ ID NO: 147617 - DNA, 25 bp, SARS Virus
aatctccagaccatttaaggaaaca

SEQ ID NO: 147618 - DNA, 25 bp, SARS Virus
atctccagaccaattaaggaaacag

SEQ ID NO: 147619 - DNA, 25 bp, SARS Virus
tctccagaccatataaggaaacagt

SEQ ID NO: 147620 - DNA, 25 bp, SARS Virus
ctccagaccattaaaggaaacagtt

SEQ ID NO: 147621 - DNA, 25 bp, SARS Virus
tccagaccatttaaggaaacagtta

SEQ ID NO: 147622 - DNA, 25 bp, SARS Virus
ccagaccatttaaggaaacagttag

SEQ ID NO: 147623 - DNA, 25 bp, SARS Virus
cagaccatttaaagaaacagttaga

SEQ ID NO: 147624 - DNA, 25 bp, SARS Virus
agaccatttaagaaaacagttagag

SEQ ID NO: 147625 - DNA, 25 bp, SARS Virus
gaccatttaaggaaacagttagagt

SEQ ID NO: 147626 - DNA, 25 bp, SARS Virus
accatttaaggaaacagttagagtt

SEQ ID NO: 147627 - DNA, 25 bp, SARS Virus
ccatttaaggaaacagttagagttt

SEQ ID NO: 147628 - DNA, 25 bp, SARS Virus
catttaaggaaaaagttagagtttc

SEQ ID NO: 147629 - DNA, 25 bp, SARS Virus
atttaaggaaacagttagagtttcg

SEQ ID NO: 147630 - DNA, 25 bp, SARS Virus
tttaaggaaacaattagagtttcga

SEQ ID NO: 147631 - DNA, 25 bp, SARS Virus
ttaaggaaacagatagagtttcgag

SEQ ID NO: 147632 - DNA, 25 bp, SARS Virus
taaggaaacagtaagagtttcgaga

SEQ ID NO: 147633 - DNA, 25 bp, SARS Virus
aaggaaacagttagagtttcgagaa

SEQ ID NO: 147634 - DNA, 25 bp, SARS Virus
aggaaacagttaaagtttcgagaat

SEQ ID NO: 147635 - DNA, 25 bp, SARS Virus
ggaaacagttagagtttcgagaatt

SEQ ID NO: 147636 - DNA, 25 bp, SARS Virus
gaaacagttagaatttcgagaattg

SEQ ID NO: 147637 - DNA, 25 bp, SARS Virus
aaacagttagagattcgagaattgt

SEQ ID NO: 147638 - DNA, 25 bp, SARS Virus
aacagttagagtatcgagaattgtc

SEQ ID NO: 147639 - DNA, 25 bp, SARS Virus
acagttagagttacgagaattgtct

SEQ ID NO: 147640 - DNA, 25 bp, SARS Virus
cagttagagtttagagaattgtctc

SEQ ID NO: 147641 - DNA, 25 bp, SARS Virus
agttagagtttcaagaattgtctcg

SEQ ID NO: 147642 - DNA, 25 bp, SARS Virus
gttagagtttcgagaattgtctcgt

SEQ ID NO: 147643 - DNA, 25 bp, SARS Virus
ttagagtttcgaaaattgtctcgta

SEQ ID NO: 147644 - DNA, 25 bp, SARS Virus
tagagtttcgagaattgtctcgtaa

SEQ ID NO: 147645 - DNA, 25 bp, SARS Virus
agagtttcgagaattgtctcgtaaa

SEQ ID NO: 147646 - DNA, 25 bp, SARS Virus
gagtttcgagaaatgtctcgtaaac

SEQ ID NO: 147647 - DNA, 25 bp, SARS Virus
agtttcgagaatagtctcgtaaact

SEQ ID NO: 147648 - DNA, 25 bp, SARS Virus
gtttcgagaattatctcgtaaactc

SEQ ID NO: 147649 - DNA, 25 bp, SARS Virus
tttcgagaattgactcgtaaactca

SEQ ID NO: 147650 - DNA, 25 bp, SARS Virus
ttcgagaattgtatcgtaaactcaa

SEQ ID NO: 147651 - DNA, 25 bp, SARS Virus
tcgagaattgtcacgtaaactcaag

SEQ ID NO: 147652 - DNA, 25 bp, SARS Virus
cgagaattgtctagtaaactcaagt

SEQ ID NO: 147653 - DNA, 25 bp, SARS Virus
gagaattgtctcataaactcaagtc

SEQ ID NO: 147654 - DNA, 25 bp, SARS Virus
agaattgtctcgaaaactcaagtcg

SEQ ID NO: 147655 - DNA, 25 bp, SARS Virus
gaattgtctcgtaaactcaagtcgt

SEQ ID NO: 147656 - DNA, 25 bp, SARS Virus
aattgtctcgtaaactcaagtcgtt

SEQ ID NO: 147657 - DNA, 25 bp, SARS Virus
attgtctcgtaaactcaagtcgttc

SEQ ID NO: 147658 - DNA, 25 bp, SARS Virus
ttgtctcgtaaaatcaagtcgttca

SEQ ID NO: 147659 - DNA, 25 bp, SARS Virus
tgtctcgtaaacacaagtcgttcac

SEQ ID NO: 147660 - DNA, 25 bp, SARS Virus
gtctcgtaaactaaagtcgttcacc

SEQ ID NO: 147661 - DNA, 25 bp, SARS Virus
tctcgtaaactcaagtcgttcacct

SEQ ID NO: 147662 - DNA, 25 bp, SARS Virus
ctcgtaaactcaagtcgttcaccta

SEQ ID NO: 147663 - DNA, 25 bp, SARS Virus
tcgtaaactcaaatcgttcacctaa

SEQ ID NO: 147664 - DNA, 25 bp, SARS Virus
cgtaaactcaagacgttcacctaaa

SEQ ID NO: 147665 - DNA, 25 bp, SARS Virus
gtaaactcaagtagttcacctaaaa

SEQ ID NO: 147666 - DNA, 25 bp, SARS Virus
taaactcaagtcattcacctaaaac

SEQ ID NO: 147667 - DNA, 25 bp, SARS Virus
aaactcaagtcgatcacctaaaact

SEQ ID NO: 147668 - DNA, 25 bp, SARS Virus
aactcaagtcgtacacctaaaactc

SEQ ID NO: 147669 - DNA, 25 bp, SARS Virus
actcaagtcgttaacctaaaactct

SEQ ID NO: 147670 - DNA, 25 bp, SARS Virus
ctcaagtcgttcacctaaaactctt

SEQ ID NO: 147671 - DNA, 25 bp, SARS Virus
tcaagtcgttcaactaaaactcttg

SEQ ID NO: 147672 - DNA, 25 bp, SARS Virus
caagtcgttcacataaaactcttgt

SEQ ID NO: 147673 - DNA, 25 bp, SARS Virus
aagtcgttcaccaaaaactcttgtt

SEQ ID NO: 147674 - DNA, 25 bp, SARS Virus
agtcgttcacctaaaactcttgtta

SEQ ID NO: 147675 - DNA, 25 bp, SARS Virus
gtcgttcacctaaaactcttgttag

SEQ ID NO: 147676 - DNA, 25 bp, SARS Virus
tcgttcacctaaaactcttgttagt

SEQ ID NO: 147677 - DNA, 25 bp, SARS Virus
cgttcacctaaaactcttgttagtt

SEQ ID NO: 147678 - DNA, 25 bp, SARS Virus
gttcacctaaaaatcttgttagttg

SEQ ID NO: 147679 - DNA, 25 bp, SARS Virus
ttcacctaaaacacttgttagttgt

SEQ ID NO: 147680 - DNA, 25 bp, SARS Virus
tcacctaaaactattgttagttgtc

SEQ ID NO: 147681 - DNA, 25 bp, SARS Virus
cacctaaaactcatgttagttgtcg

SEQ ID NO: 147682 - DNA, 25 bp, SARS Virus
acctaaaactctagttagttgtcgt

SEQ ID NO: 147683 - DNA, 25 bp, SARS Virus
cctaaaactcttattagttgtcgta

SEQ ID NO: 147684 - DNA, 25 bp, SARS Virus
ctaaaactcttgatagttgtcgtag

SEQ ID NO: 147685 - DNA, 25 bp, SARS Virus
taaaactcttgtaagttgtcgtaga

SEQ ID NO: 147686 - DNA, 25 bp, SARS Virus
aaaactcttgttagttgtcgtagac

SEQ ID NO: 147687 - DNA, 25 bp, SARS Virus
aaactcttgttaattgtcgtagaca

SEQ ID NO: 147688 - DNA, 25 bp, SARS Virus
aactcttgttagatgtcgtagacac

SEQ ID NO: 147689 - DNA, 25 bp, SARS Virus
actcttgttagtagtcgtagacact

SEQ ID NO: 147690 - DNA, 25 bp, SARS Virus
ctcttgttagttatcgtagacacta

SEQ ID NO: 147691 - DNA, 25 bp, SARS Virus
tcttgttagttgacgtagacactaa

SEQ ID NO: 147692 - DNA, 25 bp, SARS Virus
cttgttagttgtagtagacactaac

SEQ ID NO: 147693 - DNA, 25 bp, SARS Virus
ttgttagttgtcatagacactaaca

SEQ ID NO: 147694 - DNA, 25 bp, SARS Virus
tgttagttgtcgaagacactaacat

SEQ ID NO: 147695 - DNA, 25 bp, SARS Virus
gttagttgtcgtagacactaacatg

SEQ ID NO: 147696 - DNA, 25 bp, SARS Virus
ttagttgtcgtaaacactaacatgg

SEQ ID NO: 147697 - DNA, 25 bp, SARS Virus
tagttgtcgtagacactaacatggt

SEQ ID NO: 147698 - DNA, 25 bp, SARS Virus
agttgtcgtagaaactaacatggta

SEQ ID NO: 147699 - DNA, 25 bp, SARS Virus
gttgtcgtagacactaacatggtaa

SEQ ID NO: 147700 - DNA, 25 bp, SARS Virus
ttgtcgtagacaataacatggtaaa

SEQ ID NO: 147701 - DNA, 25 bp, SARS Virus
tgtcgtagacacaaacatggtaaaa

SEQ ID NO: 147702 - DNA, 25 bp, SARS Virus
gtcgtagacactaacatggtaaaag

SEQ ID NO: 147703 - DNA, 25 bp, SARS Virus
tcgtagacactaacatggtaaaagt

SEQ ID NO: 147704 - DNA, 25 bp, SARS Virus
cgtagacactaaaatggtaaaagta

SEQ ID NO: 147705 - DNA, 25 bp, SARS Virus
gtagacactaacatggtaaaagtag

SEQ ID NO: 147706 - DNA, 25 bp, SARS Virus
tagacactaacaaggtaaaagtagt

SEQ ID NO: 147707 - DNA, 25 bp, SARS Virus
agacactaacatagtaaaagtagta

SEQ ID NO: 147708 - DNA, 25 bp, SARS Virus
gacactaacatgataaaagtagtat

SEQ ID NO: 147709 - DNA, 25 bp, SARS Virus
acactaacatggaaaaagtagtatg

SEQ ID NO: 147710 - DNA, 25 bp, SARS Virus
cactaacatggtaaaagtagtatga

SEQ ID NO: 147711 - DNA, 25 bp, SARS Virus
actaacatggtaaaagtagtatgaa

SEQ ID NO: 147712 - DNA, 25 bp, SARS Virus
ctaacatggtaaaagtagtatgaac

SEQ ID NO: 147713 - DNA, 25 bp, SARS Virus
taacatggtaaaagtagtatgaact

SEQ ID NO: 147714 - DNA, 25 bp, SARS Virus
aacatggtaaaaatagtatgaactc

SEQ ID NO: 147715 - DNA, 25 bp, SARS Virus
acatggtaaaagaagtatgaactcg

SEQ ID NO: 147716 - DNA, 25 bp, SARS Virus
catggtaaaagtagtatgaactcgt

SEQ ID NO: 147717 - DNA, 25 bp, SARS Virus
atggtaaaagtaatatgaactcgta

SEQ ID NO: 147718 - DNA, 25 bp, SARS Virus
tggtaaaagtagaatgaactcgtat

SEQ ID NO: 147719 - DNA, 25 bp, SARS Virus
ggtaaaagtagtatgaactcgtatt

SEQ ID NO: 147720 - DNA, 25 bp, SARS Virus
gtaaaagtagtaagaactcgtattt

SEQ ID NO: 147721 - DNA, 25 bp, SARS Virus
taaaagtagtataaactcgtattta

SEQ ID NO: 147722 - DNA, 25 bp, SARS Virus
aaaagtagtatgaactcgtatttac

SEQ ID NO: 147723 - DNA, 25 bp, SARS Virus
aaagtagtatgaactcgtatttaca

SEQ ID NO: 147724 - DNA, 25 bp, SARS Virus
aagtagtatgaaatcgtatttacat

SEQ ID NO: 147725 - DNA, 25 bp, SARS Virus
agtagtatgaacacgtatttacatc

SEQ ID NO: 147726 - DNA, 25 bp, SARS Virus
gtagtatgaactagtatttacatca

SEQ ID NO: 147727 - DNA, 25 bp, SARS Virus
tagtatgaactcatatttacatcaa

SEQ ID NO: 147728 - DNA, 25 bp, SARS Virus
agtatgaactcgaatttacatcaac

SEQ ID NO: 147729 - DNA, 25 bp, SARS Virus
gtatgaactcgtatttacatcaacc

SEQ ID NO: 147730 - DNA, 25 bp, SARS Virus
tatgaactcgtaattacatcaaccg

SEQ ID NO: 147731 - DNA, 25 bp, SARS Virus
atgaactcgtatatacatcaaccga

SEQ ID NO: 147732 - DNA, 25 bp, SARS Virus
tgaactcgtattaacatcaaccgaa

SEQ ID NO: 147733 - DNA, 25 bp, SARS Virus
gaactcgtatttacatcaaccgaaa

SEQ ID NO: 147734 - DNA, 25 bp, SARS Virus
aactcgtatttaaatcaaccgaaat

SEQ ID NO: 147735 - DNA, 25 bp, SARS Virus
actcgtatttacatcaaccgaaatt

SEQ ID NO: 147736 - DNA, 25 bp, SARS Virus
ctcgtatttacaacaaccgaaattt

SEQ ID NO: 147737 - DNA, 25 bp, SARS Virus
tcgtatttacataaaccgaaattta

SEQ ID NO: 147738 - DNA, 25 bp, SARS Virus
cgtatttacatcaaccgaaatttat

SEQ ID NO: 147739 - DNA, 25 bp, SARS Virus
gtatttacatcaaccgaaatttatc

SEQ ID NO: 147740 - DNA, 25 bp, SARS Virus
tatttacatcaaacgaaatttatcg

SEQ ID NO: 147741 - DNA, 25 bp, SARS Virus
atttacatcaacagaaatttatcgg

SEQ ID NO: 147742 - DNA, 25 bp, SARS Virus
tttacatcaaccaaaatttatcggt

SEQ ID NO: 147743 - DNA, 25 bp, SARS Virus
ttacatcaaccgaaatttatcggtt

SEQ ID NO: 147744 - DNA, 25 bp, SARS Virus
tacatcaaccgaaatttatcggttg

SEQ ID NO: 147745 - DNA, 25 bp, SARS Virus
acatcaaccgaaatttatcggttgt

SEQ ID NO: 147746 - DNA, 25 bp, SARS Virus
catcaaccgaaaattatcggttgtt

SEQ ID NO: 147747 - DNA, 25 bp, SARS Virus
atcaaccgaaatatatcggttgttt

SEQ ID NO: 147748 - DNA, 25 bp, SARS Virus
tcaaccgaaattaatcggttgtttt

SEQ ID NO: 147749 - DNA, 25 bp, SARS Virus
caaccgaaatttatcggttgtttta

SEQ ID NO: 147750 - DNA, 25 bp, SARS Virus
aaccgaaatttaacggttgttttat

SEQ ID NO: 147751 - DNA, 25 bp, SARS Virus
accgaaatttataggttgttttatc

SEQ ID NO: 147752 - DNA, 25 bp, SARS Virus
ccgaaatttatcagttgttttatcc

SEQ ID NO: 147753 - DNA, 25 bp, SARS Virus
cgaaatttatcgattgttttatccg

SEQ ID NO: 147754 - DNA, 25 bp, SARS Virus
gaaatttatcggatgttttatccga

SEQ ID NO: 147755 - DNA, 25 bp, SARS Virus
aaatttatcggtagttttatccgac

SEQ ID NO: 147756 - DNA, 25 bp, SARS Virus
aatttatcggttattttatccgacg

SEQ ID NO: 147757 - DNA, 25 bp, SARS Virus
atttatcggttgatttatccgacgt

SEQ ID NO: 147758 - DNA, 25 bp, SARS Virus
tttatcggttgtattatccgacgtc

SEQ ID NO: 147759 - DNA, 25 bp, SARS Virus
ttatcggttgttatatccgacgtcg

SEQ ID NO: 147760 - DNA, 25 bp, SARS Virus
tatcggttgtttaatccgacgtcga

SEQ ID NO: 147761 - DNA, 25 bp, SARS Virus
atcggttgttttatccgacgtcgac

SEQ ID NO: 147762 - DNA, 25 bp, SARS Virus
tcggttgttttaaccgacgtcgact

SEQ ID NO: 147763 - DNA, 25 bp, SARS Virus
cggttgttttatacgacgtcgactg

SEQ ID NO: 147764 - DNA, 25 bp, SARS Virus
ggttgttttatcagacgtcgactgc

SEQ ID NO: 147765 - DNA, 25 bp, SARS Virus
gttgttttatccaacgtcgactgca

SEQ ID NO: 147766 - DNA, 25 bp, SARS Virus
ttgttttatccgacgtcgactgcac

SEQ ID NO: 147767 - DNA, 25 bp, SARS Virus
tgttttatccgaagtcgactgcacg

SEQ ID NO: 147768 - DNA, 25 bp, SARS Virus
gttttatccgacatcgactgcacgg

SEQ ID NO: 147769 - DNA, 25 bp, SARS Virus
ttttatccgacgacgactgcacggg

SEQ ID NO: 147770 - DNA, 25 bp, SARS Virus
tttatccgacgtagactgcacgggg

SEQ ID NO: 147771 - DNA, 25 bp, SARS Virus
ttatccgacgtcaactgcacggggt

SEQ ID NO: 147772 - DNA, 25 bp, SARS Virus
tatccgacgtcgactgcacggggtt

SEQ ID NO: 147773 - DNA, 25 bp, SARS Virus
atccgacgtcgaatgcacggggttt

SEQ ID NO: 147774 - DNA, 25 bp, SARS Virus
tccgacgtcgacagcacggggttta

SEQ ID NO: 147775 - DNA, 25 bp, SARS Virus
ccgacgtcgactacacggggtttac

SEQ ID NO: 147776 - DNA, 25 bp, SARS Virus
cgacgtcgactgaacggggtttaca

SEQ ID NO: 147777 - DNA, 25 bp, SARS Virus
gacgtcgactgcacggggtttacag

SEQ ID NO: 147778 - DNA, 25 bp, SARS Virus
acgtcgactgcaaggggtttacaga

SEQ ID NO: 147779 - DNA, 25 bp, SARS Virus
cgtcgactgcacagggtttacagaa

SEQ ID NO: 147780 - DNA, 25 bp, SARS Virus
gtcgactgcacgaggtttacagaac

SEQ ID NO: 147781 - DNA, 25 bp, SARS Virus
tcgactgcacggagtttacagaact

SEQ ID NO: 147782 - DNA, 25 bp, SARS Virus
cgactgcacgggatttacagaactc

SEQ ID NO: 147783 - DNA, 25 bp, SARS Virus
gactgcacggggattacagaactcg

SEQ ID NO: 147784 - DNA, 25 bp, SARS Virus
actgcacggggtatacagaactcgt

SEQ ID NO: 147785 - DNA, 25 bp, SARS Virus
ctgcacggggttaacagaactcgtc

SEQ ID NO: 147786 - DNA, 25 bp, SARS Virus
tgcacggggtttacagaactcgtcc

SEQ ID NO: 147787 - DNA, 25 bp, SARS Virus
gcacggggtttaaagaactcgtcca

SEQ ID NO: 147788 - DNA, 25 bp, SARS Virus
cacggggtttacagaactcgtccac

SEQ ID NO: 147789 - DNA, 25 bp, SARS Virus
acggggtttacaaaactcgtccact

SEQ ID NO: 147790 - DNA, 25 bp, SARS Virus
cggggtttacagaactcgtccactt

SEQ ID NO: 147791 - DNA, 25 bp, SARS Virus
ggggtttacagaactcgtccacttt

SEQ ID NO: 147792 - DNA, 25 bp, SARS Virus
gggtttacagaaatcgtccactttt

SEQ ID NO: 147793 - DNA, 25 bp, SARS Virus
ggtttacagaacacgtccacttttc

SEQ ID NO: 147794 - DNA, 25 bp, SARS Virus
gtttacagaactagtccacttttcc

SEQ ID NO: 147795 - DNA, 25 bp, SARS Virus
tttacagaactcatccacttttccg

SEQ ID NO: 147796 - DNA, 25 bp, SARS Virus
ttacagaactcgaccacttttccga

SEQ ID NO: 147797 - DNA, 25 bp, SARS Virus
tacagaactcgtacacttttccgac

SEQ ID NO: 147798 - DNA, 25 bp, SARS Virus
acagaactcgtcaacttttccgaca

SEQ ID NO: 147799 - DNA, 25 bp, SARS Virus
cagaactcgtccacttttccgacat

SEQ ID NO: 147800 - DNA, 25 bp, SARS Virus
agaactcgtccaattttccgacatt

SEQ ID NO: 147801 - DNA, 25 bp, SARS Virus
gaactcgtccacatttccgacattc

SEQ ID NO: 147802 - DNA, 25 bp, SARS Virus
aactcgtccactattccgacattct

SEQ ID NO: 147803 - DNA, 25 bp, SARS Virus
actcgtccacttatccgacattctt

SEQ ID NO: 147804 - DNA, 25 bp, SARS Virus
ctcgtccactttaccgacattctta

SEQ ID NO: 147805 - DNA, 25 bp, SARS Virus
tcgtccacttttacgacattcttac

SEQ ID NO: 147806 - DNA, 25 bp, SARS Virus
cgtccacttttcagacattcttacc

SEQ ID NO: 147807 - DNA, 25 bp, SARS Virus
gtccacttttccaacattcttaccg

SEQ ID NO: 147808 - DNA, 25 bp, SARS Virus
tccacttttccgacattcttaccga

SEQ ID NO: 147809 - DNA, 25 bp, SARS Virus
ccacttttccgaaattcttaccgag

SEQ ID NO: 147810 - DNA, 25 bp, SARS Virus
cacttttccgacattcttaccgaga

SEQ ID NO: 147811 - DNA, 25 bp, SARS Virus
acttttccgacaatcttaccgagat

SEQ ID NO: 147812 - DNA, 25 bp, SARS Virus
cttttccgacatacttaccgagatt

SEQ ID NO: 147813 - DNA, 25 bp, SARS Virus
ttttccgacattattaccgagattt

SEQ ID NO: 147814 - DNA, 25 bp, SARS Virus
tttccgacattcataccgagatttt

SEQ ID NO: 147815 - DNA, 25 bp, SARS Virus
ttccgacattctaaccgagatttta

SEQ ID NO: 147816 - DNA, 25 bp, SARS Virus
tccgacattcttaccgagattttaa

SEQ ID NO: 147817 - DNA, 25 bp, SARS Virus
ccgacattcttaacgagattttaaa

SEQ ID NO: 147818 - DNA, 25 bp, SARS Virus
cgacattcttacagagattttaaac

SEQ ID NO: 147819 - DNA, 25 bp, SARS Virus
gacattcttaccaagattttaaaca

SEQ ID NO: 147820 - DNA, 25 bp, SARS Virus
acattcttaccgagattttaaacat

SEQ ID NO: 147821 - DNA, 25 bp, SARS Virus
cattcttaccgaaattttaaacatt

SEQ ID NO: 147822 - DNA, 25 bp, SARS Virus
attcttaccgagattttaaacatta

SEQ ID NO: 147823 - DNA, 25 bp, SARS Virus
ttcttaccgagaatttaaacattac

SEQ ID NO: 147824 - DNA, 25 bp, SARS Virus
tcttaccgagatattaaacattaca

SEQ ID NO: 147825 - DNA, 25 bp, SARS Virus
cttaccgagattataaacattacaa

SEQ ID NO: 147826 - DNA, 25 bp, SARS Virus
ttaccgagatttaaaacattacaat

SEQ ID NO: 147827 - DNA, 25 bp, SARS Virus
taccgagattttaaacattacaatt

SEQ ID NO: 147828 - DNA, 25 bp, SARS Virus
accgagattttaaacattacaatta

SEQ ID NO: 147829 - DNA, 25 bp, SARS Virus
ccgagattttaaacattacaattat

SEQ ID NO: 147830 - DNA, 25 bp, SARS Virus
cgagattttaaaaattacaattatg

SEQ ID NO: 147831 - DNA, 25 bp, SARS Virus
gagattttaaacattacaattatgg

SEQ ID NO: 147832 - DNA, 25 bp, SARS Virus
agattttaaacaatacaattatggt

SEQ ID NO: 147833 - DNA, 25 bp, SARS Virus
gattttaaacataacaattatggtt

SEQ ID NO: 147834 - DNA, 25 bp, SARS Virus
attttaaacattacaattatggttc

SEQ ID NO: 147835 - DNA, 25 bp, SARS Virus
ttttaaacattaaaattatggttct

SEQ ID NO: 147836 - DNA, 25 bp, SARS Virus
tttaaacattacaattatggttctc

SEQ ID NO: 147837 - DNA, 25 bp, SARS Virus
ttaaacattacaattatggttctcc

SEQ ID NO: 147838 - DNA, 25 bp, SARS Virus
taaacattacaaatatggttctccg

SEQ ID NO: 147839 - DNA, 25 bp, SARS Virus
aaacattacaataatggttctccgt

SEQ ID NO: 147840 - DNA, 25 bp, SARS Virus
aacattacaattatggttctccgtt

SEQ ID NO: 147841 - DNA, 25 bp, SARS Virus
acattacaattaaggttctccgttg

SEQ ID NO: 147842 - DNA, 25 bp, SARS Virus
cattacaattatagttctccgttga

SEQ ID NO: 147843 - DNA, 25 bp, SARS Virus
attacaattatgattctccgttgaa

SEQ ID NO: 147844 - DNA, 25 bp, SARS Virus
ttacaattatggatctccgttgaat

SEQ ID NO: 147845 - DNA, 25 bp, SARS Virus
tacaattatggtactccgttgaatt

SEQ ID NO: 147846 - DNA, 25 bp, SARS Virus
acaattatggttatccgttgaattt

SEQ ID NO: 147847 - DNA, 25 bp, SARS Virus
caattatggttcaccgttgaatttt

SEQ ID NO: 147848 - DNA, 25 bp, SARS Virus
aattatggttctacgttgaattttt

SEQ ID NO: 147849 - DNA, 25 bp, SARS Virus
attatggttctcagttgaattttta

SEQ ID NO: 147850 - DNA, 25 bp, SARS Virus
ttatggttctccattgaatttttat

SEQ ID NO: 147851 - DNA, 25 bp, SARS Virus
tatggttctccgatgaatttttatc

SEQ ID NO: 147852 - DNA, 25 bp, SARS Virus
atggttctccgtagaatttttatcc

SEQ ID NO: 147853 - DNA, 25 bp, SARS Virus
tggttctccgttaaatttttatcca

SEQ ID NO: 147854 - DNA, 25 bp, SARS Virus
ggttctccgttgaatttttatccaa

SEQ ID NO: 147855 - DNA, 25 bp, SARS Virus
gttctccgttgaatttttatccaaa

SEQ ID NO: 147856 - DNA, 25 bp, SARS Virus
ttctccgttgaaattttatccaaag

SEQ ID NO: 147857 - DNA, 25 bp, SARS Virus
tctccgttgaatatttatccaaagt

SEQ ID NO: 147858 - DNA, 25 bp, SARS Virus
ctccgttgaattattatccaaagtt

SEQ ID NO: 147859 - DNA, 25 bp, SARS Virus
tccgttgaatttatatccaaagttt

SEQ ID NO: 147860 - DNA, 25 bp, SARS Virus
ccgttgaattttaatccaaagtttc

SEQ ID NO: 147861 - DNA, 25 bp, SARS Virus
cgttgaatttttatccaaagtttca

SEQ ID NO: 147862 - DNA, 25 bp, SARS Virus
gttgaatttttaaccaaagtttcac

SEQ ID NO: 147863 - DNA, 25 bp, SARS Virus
ttgaatttttatacaaagtttcaca

SEQ ID NO: 147864 - DNA, 25 bp, SARS Virus
tgaatttttatcaaaagtttcacaa

SEQ ID NO: 147865 - DNA, 25 bp, SARS Virus
gaatttttatccaaagtttcacaat

SEQ ID NO: 147866 - DNA, 25 bp, SARS Virus
aatttttatccaaagtttcacaatt

SEQ ID NO: 147867 - DNA, 25 bp, SARS Virus
atttttatccaaagtttcacaattt

SEQ ID NO: 147868 - DNA, 25 bp, SARS Virus
tttttatccaaaatttcacaatttt

SEQ ID NO: 147869 - DNA, 25 bp, SARS Virus
ttttatccaaagattcacaattttg

SEQ ID NO: 147870 - DNA, 25 bp, SARS Virus
tttatccaaagtatcacaattttgg

SEQ ID NO: 147871 - DNA, 25 bp, SARS Virus
ttatccaaagttacacaattttggt

SEQ ID NO: 147872 - DNA, 25 bp, SARS Virus
tatccaaagtttaacaattttggtc

SEQ ID NO: 147873 - DNA, 25 bp, SARS Virus
atccaaagtttcacaattttggtct

SEQ ID NO: 147874 - DNA, 25 bp, SARS Virus
tccaaagtttcaaaattttggtctt

SEQ ID NO: 147875 - DNA, 25 bp, SARS Virus
ccaaagtttcacaattttggtcttc

SEQ ID NO: 147876 - DNA, 25 bp, SARS Virus
caaagtttcacaattttggtcttcc

SEQ ID NO: 147877 - DNA, 25 bp, SARS Virus
aaagtttcacaaatttggtcttcca

SEQ ID NO: 147878 - DNA, 25 bp, SARS Virus
aagtttcacaatattggtcttccat

SEQ ID NO: 147879 - DNA, 25 bp, SARS Virus
agtttcacaattatggtcttccatc

SEQ ID NO: 147880 - DNA, 25 bp, SARS Virus
gtttcacaatttaggtcttccatct

SEQ ID NO: 147881 - DNA, 25 bp, SARS Virus
tttcacaattttagtcttccatcta

SEQ ID NO: 147882 - DNA, 25 bp, SARS Virus
ttcacaattttgatcttccatctag

SEQ ID NO: 147883 - DNA, 25 bp, SARS Virus
tcacaattttggacttccatctagt

SEQ ID NO: 147884 - DNA, 25 bp, SARS Virus
cacaattttggtattccatctagtg

SEQ ID NO: 147885 - DNA, 25 bp, SARS Virus
acaattttggtcatccatctagtgc

SEQ ID NO: 147886 - DNA, 25 bp, SARS Virus
caattttggtctaccatctagtgct

SEQ ID NO: 147887 - DNA, 25 bp, SARS Virus
aattttggtcttacatctagtgctt

SEQ ID NO: 147888 - DNA, 25 bp, SARS Virus
attttggtcttcaatctagtgcttg

SEQ ID NO: 147889 - DNA, 25 bp, SARS Virus
ttttggtcttccatctagtgcttga

SEQ ID NO: 147890 - DNA, 25 bp, SARS Virus
tttggtcttccaactagtgcttgat

SEQ ID NO: 147891 - DNA, 25 bp, SARS Virus
ttggtcttccatatagtgcttgatg

SEQ ID NO: 147892 - DNA, 25 bp, SARS Virus
tggtcttccatcaagtgcttgatgt

SEQ ID NO: 147893 - DNA, 25 bp, SARS Virus
ggtcttccatctagtgcttgatgta

SEQ ID NO: 147894 - DNA, 25 bp, SARS Virus
gtcttccatctaatgcttgatgtag

SEQ ID NO: 147895 - DNA, 25 bp, SARS Virus
tcttccatctagagcttgatgtaga

SEQ ID NO: 147896 - DNA, 25 bp, SARS Virus
cttccatctagtacttgatgtagat

SEQ ID NO: 147897 - DNA, 25 bp, SARS Virus
gaatcaccgtctctgcggtatcgtg

SEQ ID NO: 147898 - DNA, 25 bp, SARS Virus
aatcaccgtcttcgcggtatcgtga

SEQ ID NO: 147899 - DNA, 25 bp, SARS Virus
atcaccgtctttccggtatcgtgaa

SEQ ID NO: 147900 - DNA, 25 bp, SARS Virus
tcaccgtctttgcggtatcgtgaat

SEQ ID NO: 147901 - DNA, 25 bp, SARS Virus
caccgtctttgccgtatcgtgaatt

SEQ ID NO: 147902 - DNA, 25 bp, SARS Virus
accgtctttgcgctatcgtgaattt

SEQ ID NO: 147903 - DNA, 25 bp, SARS Virus
ccgtctttgcggcatcgtgaatttc

SEQ ID NO: 147904 - DNA, 25 bp, SARS Virus
cgtctttgcggtctcgtgaatttcc

SEQ ID NO: 147905 - DNA, 25 bp, SARS Virus
gtctttgcggtaccgtgaatttcca

SEQ ID NO: 147906 - DNA, 25 bp, SARS Virus
tctttgcggtatcgtgaatttccaa

SEQ ID NO: 147907 - DNA, 25 bp, SARS Virus
ctttgcggtatcctgaatttccaac

SEQ ID NO: 147908 - DNA, 25 bp, SARS Virus
tttgcggtatcgcgaatttccaact

SEQ ID NO: 147909 - DNA, 25 bp, SARS Virus
ttgcggtatcgtcaatttccaactt

SEQ ID NO: 147910 - DNA, 25 bp, SARS Virus
tgcggtatcgtgcatttccaacttt

SEQ ID NO: 147911 - DNA, 25 bp, SARS Virus
gcggtatcgtgactttccaactttt

SEQ ID NO: 147912 - DNA, 25 bp, SARS Virus
cggtatcgtgaacttccaacttttt

SEQ ID NO: 147913 - DNA, 25 bp, SARS Virus
ggtatcgtgaatctccaactttttt

SEQ ID NO: 147914 - DNA, 25 bp, SARS Virus
gtatcgtgaattcccaacttttttt

SEQ ID NO: 147915 - DNA, 25 bp, SARS Virus
tatcgtgaatttccaacttttttta

SEQ ID NO: 147916 - DNA, 25 bp, SARS Virus
atcgtgaatttccaactttttttac

SEQ ID NO: 147917 - DNA, 25 bp, SARS Virus
tcgtgaatttcccactttttttaca

SEQ ID NO: 147918 - DNA, 25 bp, SARS Virus
cgtgaatttccacctttttttacaa

SEQ ID NO: 147919 - DNA, 25 bp, SARS Virus
gtgaatttccaactttttttacaac

SEQ ID NO: 147920 - DNA, 25 bp, SARS Virus
tgaatttccaaccttttttacaact

SEQ ID NO: 147921 - DNA, 25 bp, SARS Virus
gaatttccaactctttttacaactc

SEQ ID NO: 147922 - DNA, 25 bp, SARS Virus
aatttccaacttcttttacaactca

SEQ ID NO: 147923 - DNA, 25 bp, SARS Virus
atttccaactttctttacaactcaa

SEQ ID NO: 147924 - DNA, 25 bp, SARS Virus
tttccaacttttcttacaactcaac

SEQ ID NO: 147925 - DNA, 25 bp, SARS Virus
ttccaactttttctacaactcaaca

SEQ ID NO: 147926 - DNA, 25 bp, SARS Virus
tccaacttttttcacaactcaacat

SEQ ID NO: 147927 - DNA, 25 bp, SARS Virus
ccaactttttttccaactcaacatc

SEQ ID NO: 147928 - DNA, 25 bp, SARS Virus
caactttttttacaactcaacatct

SEQ ID NO: 147929 - DNA, 25 bp, SARS Virus
aactttttttaccactcaacatctc

SEQ ID NO: 147930 - DNA, 25 bp, SARS Virus
actttttttacacctcaacatctcg

SEQ ID NO: 147931 - DNA, 25 bp, SARS Virus
ctttttttacaactcaacatctcgt

SEQ ID NO: 147932 - DNA, 25 bp, SARS Virus
tttttttacaacccaacatctcgtg

SEQ ID NO: 147933 - DNA, 25 bp, SARS Virus
ttttttacaactcaacatctcgtgt

SEQ ID NO: 147934 - DNA, 25 bp, SARS Virus
tttttacaactccacatctcgtgtc

SEQ ID NO: 147935 - DNA, 25 bp, SARS Virus
ttttacaactcaccatctcgtgtct

SEQ ID NO: 147936 - DNA, 25 bp, SARS Virus
tttacaactcaacatctcgtgtctc

SEQ ID NO: 147937 - DNA, 25 bp, SARS Virus
ttacaactcaacctctcgtgtctca

SEQ ID NO: 147938 - DNA, 25 bp, SARS Virus
tacaactcaacacctcgtgtctcat

SEQ ID NO: 147939 - DNA, 25 bp, SARS Virus
acaactcaacatctcgtgtctcatt

SEQ ID NO: 147940 - DNA, 25 bp, SARS Virus
caactcaacatcccgtgtctcatta

SEQ ID NO: 147941 - DNA, 25 bp, SARS Virus
aactcaacatctcgtgtctcattag

SEQ ID NO: 147942 - DNA, 25 bp, SARS Virus
actcaacatctcctgtctcattagt

SEQ ID NO: 147943 - DNA, 25 bp, SARS Virus
ctcaacatctcgcgtctcattagtc

SEQ ID NO: 147944 - DNA, 25 bp, SARS Virus
tcaacatctcgtctctcattagtcg

SEQ ID NO: 147945 - DNA, 25 bp, SARS Virus
caacatctcgtgcctcattagtcgt

SEQ ID NO: 147946 - DNA, 25 bp, SARS Virus
aacatctcgtgtctcattagtcgtt

SEQ ID NO: 147947 - DNA, 25 bp, SARS Virus
acatctcgtgtcccattagtcgttg

SEQ ID NO: 147948 - DNA, 25 bp, SARS Virus
catctcgtgtctcattagtcgttgt

SEQ ID NO: 147949 - DNA, 25 bp, SARS Virus
atctcgtgtctccttagtcgttgtg

SEQ ID NO: 147950 - DNA, 25 bp, SARS Virus
tctcgtgtctcactagtcgttgtgt

SEQ ID NO: 147951 - DNA, 25 bp, SARS Virus
ctcgtgtctcatcagtcgttgtgtt

SEQ ID NO: 147952 - DNA, 25 bp, SARS Virus
tcgtgtctcattcgtcgttgtgtta

SEQ ID NO: 147953 - DNA, 25 bp, SARS Virus
cgtgtctcattactcgttgtgttaa

SEQ ID NO: 147954 - DNA, 25 bp, SARS Virus
gtgtctcattagccgttgtgttaat

SEQ ID NO: 147955 - DNA, 25 bp, SARS Virus
tgtctcattagtcgttgtgttaatc

SEQ ID NO: 147956 - DNA, 25 bp, SARS Virus
gtctcattagtccttgtgttaatct

SEQ ID NO: 147957 - DNA, 25 bp, SARS Virus
tctcattagtcgctgtgttaatctt

SEQ ID NO: 147958 - DNA, 25 bp, SARS Virus
ctcattagtcgtcgtgttaatcttt

SEQ ID NO: 147959 - DNA, 25 bp, SARS Virus
tcattagtcgttctgttaatcttta

SEQ ID NO: 147960 - DNA, 25 bp, SARS Virus
cattagtcgttgcgttaatctttaa

SEQ ID NO: 147961 - DNA, 25 bp, SARS Virus
attagtcgttgtcttaatctttaaa

SEQ ID NO: 147962 - DNA, 25 bp, SARS Virus
ttagtcgttgtgctaatctttaaaa

SEQ ID NO: 147963 - DNA, 25 bp, SARS Virus
tagtcgttgtgtcaatctttaaaaa

SEQ ID NO: 147964 - DNA, 25 bp, SARS Virus
agtcgttgtgttcatctttaaaaaa

SEQ ID NO: 147965 - DNA, 25 bp, SARS Virus
gtcgttgtgttactctttaaaaaaa

SEQ ID NO: 147966 - DNA, 25 bp, SARS Virus
tcgttgtgttaacctttaaaaaaaa

SEQ ID NO: 147967 - DNA, 25 bp, SARS Virus
cgttgtgttaatctttaaaaaaaag

SEQ ID NO: 147968 - DNA, 25 bp, SARS Virus
gttgtgttaatccttaaaaaaaaga

SEQ ID NO: 147969 - DNA, 25 bp, SARS Virus
ttgtgttaatctctaaaaaaaagag

SEQ ID NO: 147970 - DNA, 25 bp, SARS Virus
tgtgttaatcttcaaaaaaaagaga

SEQ ID NO: 147971 - DNA, 25 bp, SARS Virus
gtgttaatctttcaaaaaaagagag

SEQ ID NO: 147972 - DNA, 25 bp, SARS Virus
tgttaatctttacaaaaaagagagg

SEQ ID NO: 147973 - DNA, 25 bp, SARS Virus
gttaatctttaacaaaaagagaggg

SEQ ID NO: 147974 - DNA, 25 bp, SARS Virus
ttaatctttaaacaaaagagagggt

SEQ ID NO: 147975 - DNA, 25 bp, SARS Virus
taatctttaaaacaaagagagggta

SEQ ID NO: 147976 - DNA, 25 bp, SARS Virus
aatctttaaaaacaagagagggtac

SEQ ID NO: 147977 - DNA, 25 bp, SARS Virus
atctttaaaaaacagagagggtacg

SEQ ID NO: 147978 - DNA, 25 bp, SARS Virus
tctttaaaaaaacgagagggtacgt

SEQ ID NO: 147979 - DNA, 25 bp, SARS Virus
ctttaaaaaaaacagagggtacgta

SEQ ID NO: 147980 - DNA, 25 bp, SARS Virus
tttaaaaaaaagcgagggtacgtat

SEQ ID NO: 147981 - DNA, 25 bp, SARS Virus
ttaaaaaaaagacagggtacgtatc

SEQ ID NO: 147982 - DNA, 25 bp, SARS Virus
taaaaaaaagagcgggtacgtatct

SEQ ID NO: 147983 - DNA, 25 bp, SARS Virus
aaaaaaaagagacggtacgtatctg

SEQ ID NO: 147984 - DNA, 25 bp, SARS Virus
aaaaaaagagagcgtacgtatctgt

SEQ ID NO: 147985 - DNA, 25 bp, SARS Virus
aaaaaagagaggctacgtatctgtc

SEQ ID NO: 147986 - DNA, 25 bp, SARS Virus
aaaaagagagggcacgtatctgtct

SEQ ID NO: 147987 - DNA, 25 bp, SARS Virus
aaaagagagggtccgtatctgtctt

SEQ ID NO: 147988 - DNA, 25 bp, SARS Virus
aaagagagggtacgtatctgtcttc

SEQ ID NO: 147989 - DNA, 25 bp, SARS Virus
aagagagggtacctatctgtcttcc

SEQ ID NO: 147990 - DNA, 25 bp, SARS Virus
agagagggtacgcatctgtcttccc

SEQ ID NO: 147991 - DNA, 25 bp, SARS Virus
gagagggtacgtctctgtcttccct

SEQ ID NO: 147992 - DNA, 25 bp, SARS Virus
agagggtacgtacctgtcttccctt

SEQ ID NO: 147993 - DNA, 25 bp, SARS Virus
gagggtacgtatctgtcttccctta

SEQ ID NO: 147994 - DNA, 25 bp, SARS Virus
agggtacgtatccgtcttcccttaa

SEQ ID NO: 147995 - DNA, 25 bp, SARS Virus
gggtacgtatctctcttcccttaaa

SEQ ID NO: 147996 - DNA, 25 bp, SARS Virus
ggtacgtatctgccttcccttaaat

SEQ ID NO: 147997 - DNA, 25 bp, SARS Virus
gtacgtatctgtcttcccttaaatc

SEQ ID NO: 147998 - DNA, 25 bp, SARS Virus
tacgtatctgtcctcccttaaatca

SEQ ID NO: 147999 - DNA, 25 bp, SARS Virus
acgtatctgtctccccttaaatcat

SEQ ID NO: 148000 - DNA, 25 bp, SARS Virus
cgtatctgtcttcccttaaatcatc

SEQ ID NO: 148001 - DNA, 25 bp, SARS Virus
gtatctgtcttcccttaaatcatcg

SEQ ID NO: 148002 - DNA, 25 bp, SARS Virus
tatctgtcttcccttaaatcatcgt

SEQ ID NO: 148003 - DNA, 25 bp, SARS Virus
atctgtcttcccctaaatcatcgta

SEQ ID NO: 148004 - DNA, 25 bp, SARS Virus
tctgtcttccctcaaatcatcgtaa

SEQ ID NO: 148005 - DNA, 25 bp, SARS Virus
ctgtcttcccttcaatcatcgtaat

SEQ ID NO: 148006 - DNA, 25 bp, SARS Virus
tgtcttcccttacatcatcgtaatt

SEQ ID NO: 148007 - DNA, 25 bp, SARS Virus
gtcttcccttaactcatcgtaattt

SEQ ID NO: 148008 - DNA, 25 bp, SARS Virus
tcttcccttaaaccatcgtaatttt

SEQ ID NO: 148009 - DNA, 25 bp, SARS Virus
cttcccttaaatcatcgtaattttt

SEQ ID NO: 148010 - DNA, 25 bp, SARS Virus
ttcccttaaatcctcgtaatttttg

SEQ ID NO: 148011 - DNA, 25 bp, SARS Virus
tcccttaaatcaccgtaatttttgg

SEQ ID NO: 148012 - DNA, 25 bp, SARS Virus
cccttaaatcatcgtaatttttgga

SEQ ID NO: 148013 - DNA, 25 bp, SARS Virus
ccttaaatcatcctaatttttggag

SEQ ID NO: 148014 - DNA, 25 bp, SARS Virus
cttaaatcatcgcaatttttggaga

SEQ ID NO: 148015 - DNA, 25 bp, SARS Virus
ttaaatcatcgtcatttttggagag

SEQ ID NO: 148016 - DNA, 25 bp, SARS Virus
taaatcatcgtactttttggagagg

SEQ ID NO: 148017 - DNA, 25 bp, SARS Virus
aaatcatcgtaacttttggagaggt

SEQ ID NO: 148018 - DNA, 25 bp, SARS Virus
aatcatcgtaatctttggagaggtt

SEQ ID NO: 148019 - DNA, 25 bp, SARS Virus
atcatcgtaattcttggagaggttt

SEQ ID NO: 148020 - DNA, 25 bp, SARS Virus
tcatcgtaatttctggagaggtttt

SEQ ID NO: 148021 - DNA, 25 bp, SARS Virus
catcgtaattttcggagaggttttc

SEQ ID NO: 148022 - DNA, 25 bp, SARS Virus
atcgtaatttttcgagaggttttcc

SEQ ID NO: 148023 - DNA, 25 bp, SARS Virus
tcgtaatttttgcagaggttttcct

SEQ ID NO: 148024 - DNA, 25 bp, SARS Virus
cgtaatttttggcgaggttttcctg

SEQ ID NO: 148025 - DNA, 25 bp, SARS Virus
gtaatttttggacaggttttcctgt

SEQ ID NO: 148026 - DNA, 25 bp, SARS Virus
taatttttggagcggttttcctgtg

SEQ ID NO: 148027 - DNA, 25 bp, SARS Virus
aatttttggagacgttttcctgtgt

SEQ ID NO: 148028 - DNA, 25 bp, SARS Virus
atttttggagagcttttcctgtgtt

SEQ ID NO: 148029 - DNA, 25 bp, SARS Virus
tttttggagaggctttcctgtgttc

SEQ ID NO: 148030 - DNA, 25 bp, SARS Virus
ttttggagaggtcttcctgtgttca

SEQ ID NO: 148031 - DNA, 25 bp, SARS Virus
tttggagaggttctcctgtgttcaa

SEQ ID NO: 148032 - DNA, 25 bp, SARS Virus
ttggagaggtttccctgtgttcaaa

SEQ ID NO: 148033 - DNA, 25 bp, SARS Virus
tggagaggttttcctgtgttcaaac

SEQ ID NO: 148034 - DNA, 25 bp, SARS Virus
ggagaggttttcctgtgttcaaaca

SEQ ID NO: 148035 - DNA, 25 bp, SARS Virus
gagaggttttcccgtgttcaaacat

SEQ ID NO: 148036 - DNA, 25 bp, SARS Virus
agaggttttcctctgttcaaacatt

SEQ ID NO: 148037 - DNA, 25 bp, SARS Virus
gaggttttcctgcgttcaaacatta

SEQ ID NO: 148038 - DNA, 25 bp, SARS Virus
aggttttcctgtcttcaaacattat

SEQ ID NO: 148039 - DNA, 25 bp, SARS Virus
ggttttcctgtgctcaaacattata

SEQ ID NO: 148040 - DNA, 25 bp, SARS Virus
gttttcctgtgtccaaacattataa

SEQ ID NO: 148041 - DNA, 25 bp, SARS Virus
ttttcctgtgttcaaacattataat

SEQ ID NO: 148042 - DNA, 25 bp, SARS Virus
tttcctgtgttccaacattataatc

SEQ ID NO: 148043 - DNA, 25 bp, SARS Virus
ttcctgtgttcacacattataatcc

SEQ ID NO: 148044 - DNA, 25 bp, SARS Virus
tcctgtgttcaaccattataatccc

SEQ ID NO: 148045 - DNA, 25 bp, SARS Virus
cctgtgttcaaacattataatccct

SEQ ID NO: 148046 - DNA, 25 bp, SARS Virus
ctgtgttcaaaccttataatccctt

SEQ ID NO: 148047 - DNA, 25 bp, SARS Virus
tgtgttcaaacactataatccctta

SEQ ID NO: 148048 - DNA, 25 bp, SARS Virus
gtgttcaaacatcataatcccttag

SEQ ID NO: 148049 - DNA, 25 bp, SARS Virus
tgttcaaacattctaatcccttaga

SEQ ID NO: 148050 - DNA, 25 bp, SARS Virus
gttcaaacattacaatcccttagag

SEQ ID NO: 148051 - DNA, 25 bp, SARS Virus
ttcaaacattatcatcccttagagt

SEQ ID NO: 148052 - DNA, 25 bp, SARS Virus
tcaaacattatactcccttagagtg

SEQ ID NO: 148053 - DNA, 25 bp, SARS Virus
caaacattataaccccttagagtgt

SEQ ID NO: 148054 - DNA, 25 bp, SARS Virus
aaacattataatcccttagagtgtt

SEQ ID NO: 148055 - DNA, 25 bp, SARS Virus
aacattataatcccttagagtgttg

SEQ ID NO: 148056 - DNA, 25 bp, SARS Virus
acattataatcccttagagtgttgt

SEQ ID NO: 148057 - DNA, 25 bp, SARS Virus
cattataatcccctagagtgttgta

SEQ ID NO: 148058 - DNA, 25 bp, SARS Virus
attataatccctcagagtgttgtag

SEQ ID NO: 148059 - DNA, 25 bp, SARS Virus
ttataatcccttcgagtgttgtaga

SEQ ID NO: 148060 - DNA, 25 bp, SARS Virus
tataatcccttacagtgttgtagag

SEQ ID NO: 148061 - DNA, 25 bp, SARS Virus
ataatcccttagcgtgttgtagagg

SEQ ID NO: 148062 - DNA, 25 bp, SARS Virus
taatcccttagactgttgtagagga

SEQ ID NO: 148063 - DNA, 25 bp, SARS Virus
aatcccttagagcgttgtagaggac

SEQ ID NO: 148064 - DNA, 25 bp, SARS Virus
atcccttagagtcttgtagaggact

SEQ ID NO: 148065 - DNA, 25 bp, SARS Virus
tcccttagagtgctgtagaggactc

SEQ ID NO: 148066 - DNA, 25 bp, SARS Virus
cccttagagtgtcgtagaggactcc

SEQ ID NO: 148067 - DNA, 25 bp, SARS Virus
ccttagagtgttctagaggactccc

SEQ ID NO: 148068 - DNA, 25 bp, SARS Virus
cttagagtgttgcagaggactccct

SEQ ID NO: 148069 - DNA, 25 bp, SARS Virus
ttagagtgttgtcgaggactccctt

SEQ ID NO: 148070 - DNA, 25 bp, SARS Virus
tagagtgttgtacaggactcccttg

SEQ ID NO: 148071 - DNA, 25 bp, SARS Virus
agagtgttgtagcggactcccttgt

SEQ ID NO: 148072 - DNA, 25 bp, SARS Virus
gagtgttgtagacgactcccttgtt

SEQ ID NO: 148073 - DNA, 25 bp, SARS Virus
agtgttgtagagcactcccttgttg

SEQ ID NO: 148074 - DNA, 25 bp, SARS Virus
gtgttgtagaggcctcccttgttgg

SEQ ID NO: 148075 - DNA, 25 bp, SARS Virus
tgttgtagaggactcccttgttggg

SEQ ID NO: 148076 - DNA, 25 bp, SARS Virus
gttgtagaggacccccttgttggga

SEQ ID NO: 148077 - DNA, 25 bp, SARS Virus
ttgtagaggactcccttgttgggac

SEQ ID NO: 148078 - DNA, 25 bp, SARS Virus
tgtagaggactcccttgttgggact

SEQ ID NO: 148079 - DNA, 25 bp, SARS Virus
gtagaggactcccttgttgggactt

SEQ ID NO: 148080 - DNA, 25 bp, SARS Virus
tagaggactcccctgttgggacttt

SEQ ID NO: 148081 - DNA, 25 bp, SARS Virus
agaggactccctcgttgggacttta

SEQ ID NO: 148082 - DNA, 25 bp, SARS Virus
gaggactcccttcttgggactttaa

SEQ ID NO: 148083 - DNA, 25 bp, SARS Virus
aggactcccttgctgggactttaat

SEQ ID NO: 148084 - DNA, 25 bp, SARS Virus
ggactcccttgtcgggactttaatc

SEQ ID NO: 148085 - DNA, 25 bp, SARS Virus
gactcccttgttcggactttaatct

SEQ ID NO: 148086 - DNA, 25 bp, SARS Virus
actcccttgttgcgactttaatctc

SEQ ID NO: 148087 - DNA, 25 bp, SARS Virus
ctcccttgttggcactttaatctcc

SEQ ID NO: 148088 - DNA, 25 bp, SARS Virus
tcccttgttgggcctttaatctcca

SEQ ID NO: 148089 - DNA, 25 bp, SARS Virus
cccttgttgggactttaatctccag

SEQ ID NO: 148090 - DNA, 25 bp, SARS Virus
ccttgttgggaccttaatctccaga

SEQ ID NO: 148091 - DNA, 25 bp, SARS Virus
cttgttgggactctaatctccagac

SEQ ID NO: 148092 - DNA, 25 bp, SARS Virus
ttgttgggacttcaatctccagacc

SEQ ID NO: 148093 - DNA, 25 bp, SARS Virus
tgttgggactttcatctccagacca

SEQ ID NO: 148094 - DNA, 25 bp, SARS Virus
gttgggactttactctccagaccat

SEQ ID NO: 148095 - DNA, 25 bp, SARS Virus
ttgggactttaacctccagaccatt

SEQ ID NO: 148096 - DNA, 25 bp, SARS Virus
tgggactttaatctccagaccattt

SEQ ID NO: 148097 - DNA, 25 bp, SARS Virus
gggactttaatccccagaccattta

SEQ ID NO: 148098 - DNA, 25 bp, SARS Virus
ggactttaatctccagaccatttaa

SEQ ID NO: 148099 - DNA, 25 bp, SARS Virus
gactttaatctccagaccatttaag

SEQ ID NO: 148100 - DNA, 25 bp, SARS Virus
actttaatctcccgaccatttaagg

SEQ ID NO: 148101 - DNA, 25 bp, SARS Virus
ctttaatctccacaccatttaagga

SEQ ID NO: 148102 - DNA, 25 bp, SARS Virus
tttaatctccagcccatttaaggaa

SEQ ID NO: 148103 - DNA, 25 bp, SARS Virus
ttaatctccagaccatttaaggaaa

SEQ ID NO: 148104 - DNA, 25 bp, SARS Virus
taatctccagaccatttaaggaaac

SEQ ID NO: 148105 - DNA, 25 bp, SARS Virus
aatctccagaccctttaaggaaaca

SEQ ID NO: 148106 - DNA, 25 bp, SARS Virus
atctccagaccacttaaggaaacag

SEQ ID NO: 148107 - DNA, 25 bp, SARS Virus
tctccagaccatctaaggaaacagt

SEQ ID NO: 148108 - DNA, 25 bp, SARS Virus
ctccagaccattcaaggaaacagtt

SEQ ID NO: 148109 - DNA, 25 bp, SARS Virus
tccagaccatttcaggaaacagtta

SEQ ID NO: 148110 - DNA, 25 bp, SARS Virus
ccagaccatttacggaaacagttag

SEQ ID NO: 148111 - DNA, 25 bp, SARS Virus
cagaccatttaacgaaacagttaga

SEQ ID NO: 148112 - DNA, 25 bp, SARS Virus
agaccatttaagcaaacagttagag

SEQ ID NO: 148113 - DNA, 25 bp, SARS Virus
gaccatttaaggcaacagttagagt

SEQ ID NO: 148114 - DNA, 25 bp, SARS Virus
accatttaaggacacagttagagtt

SEQ ID NO: 148115 - DNA, 25 bp, SARS Virus
ccatttaaggaaccagttagagttt

SEQ ID NO: 148116 - DNA, 25 bp, SARS Virus
catttaaggaaacagttagagtttc

SEQ ID NO: 148117 - DNA, 25 bp, SARS Virus
atttaaggaaaccgttagagtttcg

SEQ ID NO: 148118 - DNA, 25 bp, SARS Virus
tttaaggaaacacttagagtttcga

SEQ ID NO: 148119 - DNA, 25 bp, SARS Virus
ttaaggaaacagctagagtttcgag

SEQ ID NO: 148120 - DNA, 25 bp, SARS Virus
taaggaaacagtcagagtttcgaga

SEQ ID NO: 148121 - DNA, 25 bp, SARS Virus
aaggaaacagttcgagtttcgagaa

SEQ ID NO: 148122 - DNA, 25 bp, SARS Virus
aggaaacagttacagtttcgagaat

SEQ ID NO: 148123 - DNA, 25 bp, SARS Virus
ggaaacagttagcgtttcgagaatt

SEQ ID NO: 148124 - DNA, 25 bp, SARS Virus
gaaacagttagactttcgagaattg

SEQ ID NO: 148125 - DNA, 25 bp, SARS Virus
aaacagttagagcttcgagaattgt

SEQ ID NO: 148126 - DNA, 25 bp, SARS Virus
aacagttagagtctcgagaattgtc

SEQ ID NO: 148127 - DNA, 25 bp, SARS Virus
acagttagagttccgagaattgtct

SEQ ID NO: 148128 - DNA, 25 bp, SARS Virus
cagttagagtttcgagaattgtctc

SEQ ID NO: 148129 - DNA, 25 bp, SARS Virus
agttagagtttccagaattgtctcg

SEQ ID NO: 148130 - DNA, 25 bp, SARS Virus
gttagagtttcgcgaattgtctcgt

SEQ ID NO: 148131 - DNA, 25 bp, SARS Virus
ttagagtttcgacaattgtctcgta

SEQ ID NO: 148132 - DNA, 25 bp, SARS Virus
tagagtttcgagcattgtctcgtaa

SEQ ID NO: 148133 - DNA, 25 bp, SARS Virus
agagtttcgagacttgtctcgtaaa

SEQ ID NO: 148134 - DNA, 25 bp, SARS Virus
gagtttcgagaactgtctcgtaaac

SEQ ID NO: 148135 - DNA, 25 bp, SARS Virus
agtttcgagaatcgtctcgtaaact

SEQ ID NO: 148136 - DNA, 25 bp, SARS Virus
gtttcgagaattctctcgtaaactc

SEQ ID NO: 148137 - DNA, 25 bp, SARS Virus
tttcgagaattgcctcgtaaactca

SEQ ID NO: 148138 - DNA, 25 bp, SARS Virus
ttcgagaattgtctcgtaaactcaa

SEQ ID NO: 148139 - DNA, 25 bp, SARS Virus
tcgagaattgtcccgtaaactcaag

SEQ ID NO: 148140 - DNA, 25 bp, SARS Virus
cgagaattgtctcgtaaactcaagt

SEQ ID NO: 148141 - DNA, 25 bp, SARS Virus
gagaattgtctcctaaactcaagtc

SEQ ID NO: 148142 - DNA, 25 bp, SARS Virus
agaattgtctcgcaaactcaagtcg

SEQ ID NO: 148143 - DNA, 25 bp, SARS Virus
gaattgtctcgtcaactcaagtcgt

SEQ ID NO: 148144 - DNA, 25 bp, SARS Virus
aattgtctcgtacactcaagtcgtt

SEQ ID NO: 148145 - DNA, 25 bp, SARS Virus
attgtctcgtaacctcaagtcgttc

SEQ ID NO: 148146 - DNA, 25 bp, SARS Virus
ttgtctcgtaaactcaagtcgttca

SEQ ID NO: 148147 - DNA, 25 bp, SARS Virus
tgtctcgtaaacccaagtcgttcac

SEQ ID NO: 148148 - DNA, 25 bp, SARS Virus
gtctcgtaaactcaagtcgttcacc

SEQ ID NO: 148149 - DNA, 25 bp, SARS Virus
tctcgtaaactccagtcgttcacct

SEQ ID NO: 148150 - DNA, 25 bp, SARS Virus
ctcgtaaactcacgtcgttcaccta

SEQ ID NO: 148151 - DNA, 25 bp, SARS Virus
tcgtaaactcaactcgttcacctaa

SEQ ID NO: 148152 - DNA, 25 bp, SARS Virus
cgtaaactcaagccgttcacctaaa

SEQ ID NO: 148153 - DNA, 25 bp, SARS Virus
gtaaactcaagtcgttcacctaaaa

SEQ ID NO: 148154 - DNA, 25 bp, SARS Virus
taaactcaagtccttcacctaaaac

SEQ ID NO: 148155 - DNA, 25 bp, SARS Virus
aaactcaagtcgctcacctaaaact

SEQ ID NO: 148156 - DNA, 25 bp, SARS Virus
aactcaagtcgtccacctaaaactc

SEQ ID NO: 148157 - DNA, 25 bp, SARS Virus
actcaagtcgttcacctaaaactct

SEQ ID NO: 148158 - DNA, 25 bp, SARS Virus
ctcaagtcgttcccctaaaactctt

SEQ ID NO: 148159 - DNA, 25 bp, SARS Virus
tcaagtcgttcacctaaaactcttg

SEQ ID NO: 148160 - DNA, 25 bp, SARS Virus
caagtcgttcacctaaaactcttgt

SEQ ID NO: 148161 - DNA, 25 bp, SARS Virus
aagtcgttcacccaaaactcttgtt

SEQ ID NO: 148162 - DNA, 25 bp, SARS Virus
agtcgttcacctcaaactcttgtta

SEQ ID NO: 148163 - DNA, 25 bp, SARS Virus
gtcgttcacctacaactcttgttag

SEQ ID NO: 148164 - DNA, 25 bp, SARS Virus
tcgttcacctaacactcttgttagt

SEQ ID NO: 148165 - DNA, 25 bp, SARS Virus
cgttcacctaaacctcttgttagtt

SEQ ID NO: 148166 - DNA, 25 bp, SARS Virus
gttcacctaaaactcttgttagttg

SEQ ID NO: 148167 - DNA, 25 bp, SARS Virus
ttcacctaaaacccttgttagttgt

SEQ ID NO: 148168 - DNA, 25 bp, SARS Virus
tcacctaaaactcttgttagttgtc

SEQ ID NO: 148169 - DNA, 25 bp, SARS Virus
cacctaaaactcctgttagttgtcg

SEQ ID NO: 148170 - DNA, 25 bp, SARS Virus
acctaaaactctcgttagttgtcgt

SEQ ID NO: 148171 - DNA, 25 bp, SARS Virus
cctaaaactcttcttagttgtcgta

SEQ ID NO: 148172 - DNA, 25 bp, SARS Virus
ctaaaactcttgctagttgtcgtag

SEQ ID NO: 148173 - DNA, 25 bp, SARS Virus
taaaactcttgtcagttgtcgtaga

SEQ ID NO: 148174 - DNA, 25 bp, SARS Virus
aaaactcttgttcgttgtcgtagac

SEQ ID NO: 148175 - DNA, 25 bp, SARS Virus
aaactcttgttacttgtcgtagaca

SEQ ID NO: 148176 - DNA, 25 bp, SARS Virus
aactcttgttagctgtcgtagacac

SEQ ID NO: 148177 - DNA, 25 bp, SARS Virus
actcttgttagtcgtcgtagacact

SEQ ID NO: 148178 - DNA, 25 bp, SARS Virus
ctcttgttagttctcgtagacacta

SEQ ID NO: 148179 - DNA, 25 bp, SARS Virus
tcttgttagttgccgtagacactaa

SEQ ID NO: 148180 - DNA, 25 bp, SARS Virus
cttgttagttgtcgtagacactaac

SEQ ID NO: 148181 - DNA, 25 bp, SARS Virus
ttgttagttgtcctagacactaaca

SEQ ID NO: 148182 - DNA, 25 bp, SARS Virus
tgttagttgtcgcagacactaacat

SEQ ID NO: 148183 - DNA, 25 bp, SARS Virus
gttagttgtcgtcgacactaacatg

SEQ ID NO: 148184 - DNA, 25 bp, SARS Virus
ttagttgtcgtacacactaacatgg

SEQ ID NO: 148185 - DNA, 25 bp, SARS Virus
tagttgtcgtagccactaacatggt

SEQ ID NO: 148186 - DNA, 25 bp, SARS Virus
agttgtcgtagacactaacatggta

SEQ ID NO: 148187 - DNA, 25 bp, SARS Virus
gttgtcgtagaccctaacatggtaa

SEQ ID NO: 148188 - DNA, 25 bp, SARS Virus
ttgtcgtagacactaacatggtaaa

SEQ ID NO: 148189 - DNA, 25 bp, SARS Virus
tgtcgtagacaccaacatggtaaaa

SEQ ID NO: 148190 - DNA, 25 bp, SARS Virus
gtcgtagacactcacatggtaaaag

SEQ ID NO: 148191 - DNA, 25 bp, SARS Virus
tcgtagacactaccatggtaaaagt

SEQ ID NO: 148192 - DNA, 25 bp, SARS Virus
cgtagacactaacatggtaaaagta

SEQ ID NO: 148193 - DNA, 25 bp, SARS Virus
gtagacactaacctggtaaaagtag

SEQ ID NO: 148194 - DNA, 25 bp, SARS Virus
tagacactaacacggtaaaagtagt

SEQ ID NO: 148195 - DNA, 25 bp, SARS Virus
agacactaacatcgtaaaagtagta

SEQ ID NO: 148196 - DNA, 25 bp, SARS Virus
gacactaacatgctaaaagtagtat

SEQ ID NO: 148197 - DNA, 25 bp, SARS Virus
acactaacatggcaaaagtagtatg

SEQ ID NO: 148198 - DNA, 25 bp, SARS Virus
cactaacatggtcaaagtagtatga

SEQ ID NO: 148199 - DNA, 25 bp, SARS Virus
actaacatggtacaagtagtatgaa

SEQ ID NO: 148200 - DNA, 25 bp, SARS Virus
ctaacatggtaacagtagtatgaac

SEQ ID NO: 148201 - DNA, 25 bp, SARS Virus
taacatggtaaacgtagtatgaact

SEQ ID NO: 148202 - DNA, 25 bp, SARS Virus
aacatggtaaaactagtatgaactc

SEQ ID NO: 148203 - DNA, 25 bp, SARS Virus
acatggtaaaagcagtatgaactcg

SEQ ID NO: 148204 - DNA, 25 bp, SARS Virus
catggtaaaagtcgtatgaactcgt

SEQ ID NO: 148205 - DNA, 25 bp, SARS Virus
atggtaaaagtactatgaactcgta

SEQ ID NO: 148206 - DNA, 25 bp, SARS Virus
tggtaaaagtagcatgaactcgtat

SEQ ID NO: 148207 - DNA, 25 bp, SARS Virus
ggtaaaagtagtctgaactcgtatt

SEQ ID NO: 148208 - DNA, 25 bp, SARS Virus
gtaaaagtagtacgaactcgtattt

SEQ ID NO: 148209 - DNA, 25 bp, SARS Virus
taaaagtagtatcaactcgtattta

SEQ ID NO: 148210 - DNA, 25 bp, SARS Virus
aaaagtagtatgcactcgtatttac

SEQ ID NO: 148211 - DNA, 25 bp, SARS Virus
aaagtagtatgacctcgtatttaca

SEQ ID NO: 148212 - DNA, 25 bp, SARS Virus
aagtagtatgaactcgtatttacat

SEQ ID NO: 148213 - DNA, 25 bp, SARS Virus
agtagtatgaacccgtatttacatc

SEQ ID NO: 148214 - DNA, 25 bp, SARS Virus
gtagtatgaactcgtatttacatca

SEQ ID NO: 148215 - DNA, 25 bp, SARS Virus
tagtatgaactcctatttacatcaa

SEQ ID NO: 148216 - DNA, 25 bp, SARS Virus
agtatgaactcgcatttacatcaac

SEQ ID NO: 148217 - DNA, 25 bp, SARS Virus
gtatgaactcgtctttacatcaacc

SEQ ID NO: 148218 - DNA, 25 bp, SARS Virus
tatgaactcgtacttacatcaaccg

SEQ ID NO: 148219 - DNA, 25 bp, SARS Virus
atgaactcgtatctacatcaaccga

SEQ ID NO: 148220 - DNA, 25 bp, SARS Virus
tgaactcgtattcacatcaaccgaa

SEQ ID NO: 148221 - DNA, 25 bp, SARS Virus
gaactcgtatttccatcaaccgaaa

SEQ ID NO: 148222 - DNA, 25 bp, SARS Virus
aactcgtatttacatcaaccgaaat

SEQ ID NO: 148223 - DNA, 25 bp, SARS Virus
actcgtatttacctcaaccgaaatt

SEQ ID NO: 148224 - DNA, 25 bp, SARS Virus
ctcgtatttacaccaaccgaaattt

SEQ ID NO: 148225 - DNA, 25 bp, SARS Virus
tcgtatttacatcaaccgaaattta

SEQ ID NO: 148226 - DNA, 25 bp, SARS Virus
cgtatttacatccaccgaaatttat

SEQ ID NO: 148227 - DNA, 25 bp, SARS Virus
gtatttacatcacccgaaatttatc

SEQ ID NO: 148228 - DNA, 25 bp, SARS Virus
tatttacatcaaccgaaatttatcg

SEQ ID NO: 148229 - DNA, 25 bp, SARS Virus
atttacatcaaccgaaatttatcgg

SEQ ID NO: 148230 - DNA, 25 bp, SARS Virus
tttacatcaacccaaatttatcggt

SEQ ID NO: 148231 - DNA, 25 bp, SARS Virus
ttacatcaaccgcaatttatcggtt

SEQ ID NO: 148232 - DNA, 25 bp, SARS Virus
tacatcaaccgacatttatcggttg

SEQ ID NO: 148233 - DNA, 25 bp, SARS Virus
acatcaaccgaactttatcggttgt

SEQ ID NO: 148234 - DNA, 25 bp, SARS Virus
catcaaccgaaacttatcggttgtt

SEQ ID NO: 148235 - DNA, 25 bp, SARS Virus
atcaaccgaaatctatcggttgttt

SEQ ID NO: 148236 - DNA, 25 bp, SARS Virus
tcaaccgaaattcatcggttgtttt

SEQ ID NO: 148237 - DNA, 25 bp, SARS Virus
caaccgaaatttctcggttgtttta

SEQ ID NO: 148238 - DNA, 25 bp, SARS Virus
aaccgaaatttaccggttgttttat

SEQ ID NO: 148239 - DNA, 25 bp, SARS Virus
accgaaatttatcggttgttttatc

SEQ ID NO: 148240 - DNA, 25 bp, SARS Virus
ccgaaatttatccgttgttttatcc

SEQ ID NO: 148241 - DNA, 25 bp, SARS Virus
cgaaatttatcgcttgttttatccg

SEQ ID NO: 148242 - DNA, 25 bp, SARS Virus
gaaatttatcggctgttttatccga

SEQ ID NO: 148243 - DNA, 25 bp, SARS Virus
aaatttatcggtcgttttatccgac

SEQ ID NO: 148244 - DNA, 25 bp, SARS Virus
aatttatcggttcttttatccgacg

SEQ ID NO: 148245 - DNA, 25 bp, SARS Virus
atttatcggttgctttatccgacgt

SEQ ID NO: 148246 - DNA, 25 bp, SARS Virus
tttatcggttgtcttatccgacgtc

SEQ ID NO: 148247 - DNA, 25 bp, SARS Virus
ttatcggttgttctatccgacgtcg

SEQ ID NO: 148248 - DNA, 25 bp, SARS Virus
tatcggttgtttcatccgacgtcga

SEQ ID NO: 148249 - DNA, 25 bp, SARS Virus
atcggttgttttctccgacgtcgac

SEQ ID NO: 148250 - DNA, 25 bp, SARS Virus
tcggttgttttacccgacgtcgact

SEQ ID NO: 148251 - DNA, 25 bp, SARS Virus
cggttgttttatccgacgtcgactg

SEQ ID NO: 148252 - DNA, 25 bp, SARS Virus
ggttgttttatccgacgtcgactgc

SEQ ID NO: 148253 - DNA, 25 bp, SARS Virus
gttgttttatcccacgtcgactgca

SEQ ID NO: 148254 - DNA, 25 bp, SARS Virus
ttgttttatccgccgtcgactgcac

SEQ ID NO: 148255 - DNA, 25 bp, SARS Virus
tgttttatccgacgtcgactgcacg

SEQ ID NO: 148256 - DNA, 25 bp, SARS Virus
gttttatccgacctcgactgcacgg

SEQ ID NO: 148257 - DNA, 25 bp, SARS Virus
ttttatccgacgccgactgcacggg

SEQ ID NO: 148258 - DNA, 25 bp, SARS Virus
tttatccgacgtcgactgcacgggg

SEQ ID NO: 148259 - DNA, 25 bp, SARS Virus
ttatccgacgtccactgcacggggt

SEQ ID NO: 148260 - DNA, 25 bp, SARS Virus
tatccgacgtcgcctgcacggggtt

SEQ ID NO: 148261 - DNA, 25 bp, SARS Virus
atccgacgtcgactgcacggggttt

SEQ ID NO: 148262 - DNA, 25 bp, SARS Virus
tccgacgtcgaccgcacggggttta

SEQ ID NO: 148263 - DNA, 25 bp, SARS Virus
ccgacgtcgactccacggggtttac

SEQ ID NO: 148264 - DNA, 25 bp, SARS Virus
cgacgtcgactgcacggggtttaca

SEQ ID NO: 148265 - DNA, 25 bp, SARS Virus
gacgtcgactgcccggggtttacag

SEQ ID NO: 148266 - DNA, 25 bp, SARS Virus
acgtcgactgcacggggtttacaga

SEQ ID NO: 148267 - DNA, 25 bp, SARS Virus
cgtcgactgcaccgggtttacagaa

SEQ ID NO: 148268 - DNA, 25 bp, SARS Virus
gtcgactgcacgcggtttacagaac

SEQ ID NO: 148269 - DNA, 25 bp, SARS Virus
tcgactgcacggcgtttacagaact

SEQ ID NO: 148270 - DNA, 25 bp, SARS Virus
cgactgcacgggctttacagaactc

SEQ ID NO: 148271 - DNA, 25 bp, SARS Virus
gactgcacggggcttacagaactcg

SEQ ID NO: 148272 - DNA, 25 bp, SARS Virus
actgcacggggtctacagaactcgt

SEQ ID NO: 148273 - DNA, 25 bp, SARS Virus
ctgcacggggttcacagaactcgtc

SEQ ID NO: 148274 - DNA, 25 bp, SARS Virus
tgcacggggtttccagaactcgtcc

SEQ ID NO: 148275 - DNA, 25 bp, SARS Virus
gcacggggtttacagaactcgtcca

SEQ ID NO: 148276 - DNA, 25 bp, SARS Virus
cacggggtttaccgaactcgtccac

SEQ ID NO: 148277 - DNA, 25 bp, SARS Virus
acggggtttacacaactcgtccact

SEQ ID NO: 148278 - DNA, 25 bp, SARS Virus
cggggtttacagcactcgtccactt

SEQ ID NO: 148279 - DNA, 25 bp, SARS Virus
ggggtttacagacctcgtccacttt

SEQ ID NO: 148280 - DNA, 25 bp, SARS Virus
gggtttacagaactcgtccactttt

SEQ ID NO: 148281 - DNA, 25 bp, SARS Virus
ggtttacagaacccgtccacttttc

SEQ ID NO: 148282 - DNA, 25 bp, SARS Virus
gtttacagaactcgtccacttttcc

SEQ ID NO: 148283 - DNA, 25 bp, SARS Virus
tttacagaactcctccacttttccg

SEQ ID NO: 148284 - DNA, 25 bp, SARS Virus
ttacagaactcgcccacttttccga

SEQ ID NO: 148285 - DNA, 25 bp, SARS Virus
tacagaactcgtccacttttccgac

SEQ ID NO: 148286 - DNA, 25 bp, SARS Virus
acagaactcgtccacttttccgaca

SEQ ID NO: 148287 - DNA, 25 bp, SARS Virus
cagaactcgtccccttttccgacat

SEQ ID NO: 148288 - DNA, 25 bp, SARS Virus
agaactcgtccacttttccgacatt

SEQ ID NO: 148289 - DNA, 25 bp, SARS Virus
gaactcgtccacctttccgacattc

SEQ ID NO: 148290 - DNA, 25 bp, SARS Virus
aactcgtccactcttccgacattct

SEQ ID NO: 148291 - DNA, 25 bp, SARS Virus
actcgtccacttctccgacattctt

SEQ ID NO: 148292 - DNA, 25 bp, SARS Virus
ctcgtccactttcccgacattctta

SEQ ID NO: 148293 - DNA, 25 bp, SARS Virus
tcgtccacttttccgacattcttac

SEQ ID NO: 148294 - DNA, 25 bp, SARS Virus
cgtccacttttccgacattcttacc

SEQ ID NO: 148295 - DNA, 25 bp, SARS Virus
gtccacttttcccacattcttaccg

SEQ ID NO: 148296 - DNA, 25 bp, SARS Virus
tccacttttccgccattcttaccga

SEQ ID NO: 148297 - DNA, 25 bp, SARS Virus
ccacttttccgacattcttaccgag

SEQ ID NO: 148298 - DNA, 25 bp, SARS Virus
cacttttccgaccttcttaccgaga

SEQ ID NO: 148299 - DNA, 25 bp, SARS Virus
acttttccgacactcttaccgagat

SEQ ID NO: 148300 - DNA, 25 bp, SARS Virus
cttttccgacatccttaccgagatt

SEQ ID NO: 148301 - DNA, 25 bp, SARS Virus
ttttccgacattcttaccgagattt

SEQ ID NO: 148302 - DNA, 25 bp, SARS Virus
tttccgacattcctaccgagatttt

SEQ ID NO: 148303 - DNA, 25 bp, SARS Virus
ttccgacattctcaccgagatttta

SEQ ID NO: 148304 - DNA, 25 bp, SARS Virus
tccgacattcttcccgagattttaa

SEQ ID NO: 148305 - DNA, 25 bp, SARS Virus
ccgacattcttaccgagattttaaa

SEQ ID NO: 148306 - DNA, 25 bp, SARS Virus
cgacattcttaccgagattttaaac

SEQ ID NO: 148307 - DNA, 25 bp, SARS Virus
gacattcttacccagattttaaaca

SEQ ID NO: 148308 - DNA, 25 bp, SARS Virus
acattcttaccgcgattttaaacat

SEQ ID NO: 148309 - DNA, 25 bp, SARS Virus
cattcttaccgacattttaaacatt

SEQ ID NO: 148310 - DNA, 25 bp, SARS Virus
attcttaccgagcttttaaacatta

SEQ ID NO: 148311 - DNA, 25 bp, SARS Virus
ttcttaccgagactttaaacattac

SEQ ID NO: 148312 - DNA, 25 bp, SARS Virus
tcttaccgagatcttaaacattaca

SEQ ID NO: 148313 - DNA, 25 bp, SARS Virus
cttaccgagattctaaacattacaa

SEQ ID NO: 148314 - DNA, 25 bp, SARS Virus
ttaccgagatttcaaacattacaat

SEQ ID NO: 148315 - DNA, 25 bp, SARS Virus
taccgagattttcaacattacaatt

SEQ ID NO: 148316 - DNA, 25 bp, SARS Virus
accgagattttacacattacaatta

SEQ ID NO: 148317 - DNA, 25 bp, SARS Virus
ccgagattttaaccattacaattat

SEQ ID NO: 148318 - DNA, 25 bp, SARS Virus
cgagattttaaacattacaattatg

SEQ ID NO: 148319 - DNA, 25 bp, SARS Virus
gagattttaaaccttacaattatgg

SEQ ID NO: 148320 - DNA, 25 bp, SARS Virus
agattttaaacactacaattatggt

SEQ ID NO: 148321 - DNA, 25 bp, SARS Virus
gattttaaacatcacaattatggtt

SEQ ID NO: 148322 - DNA, 25 bp, SARS Virus
attttaaacattccaattatggttc

SEQ ID NO: 148323 - DNA, 25 bp, SARS Virus
ttttaaacattacaattatggttct

SEQ ID NO: 148324 - DNA, 25 bp, SARS Virus
tttaaacattaccattatggttctc

SEQ ID NO: 148325 - DNA, 25 bp, SARS Virus
ttaaacattacacttatggttctcc

SEQ ID NO: 148326 - DNA, 25 bp, SARS Virus
taaacattacaactatggttctccg

SEQ ID NO: 148327 - DNA, 25 bp, SARS Virus
aaacattacaatcatggttctccgt

SEQ ID NO: 148328 - DNA, 25 bp, SARS Virus
aacattacaattctggttctccgtt

SEQ ID NO: 148329 - DNA, 25 bp, SARS Virus
acattacaattacggttctccgttg

SEQ ID NO: 148330 - DNA, 25 bp, SARS Virus
cattacaattatcgttctccgttga

SEQ ID NO: 148331 - DNA, 25 bp, SARS Virus
attacaattatgcttctccgttgaa

SEQ ID NO: 148332 - DNA, 25 bp, SARS Virus
ttacaattatggctctccgttgaat

SEQ ID NO: 148333 - DNA, 25 bp, SARS Virus
tacaattatggtcctccgttgaatt

SEQ ID NO: 148334 - DNA, 25 bp, SARS Virus
acaattatggttctccgttgaattt

SEQ ID NO: 148335 - DNA, 25 bp, SARS Virus
caattatggttccccgttgaatttt

SEQ ID NO: 148336 - DNA, 25 bp, SARS Virus
aattatggttctccgttgaattttt

SEQ ID NO: 148337 - DNA, 25 bp, SARS Virus
attatggttctccgttgaattttta

SEQ ID NO: 148338 - DNA, 25 bp, SARS Virus
ttatggttctcccttgaatttttat

SEQ ID NO: 148339 - DNA, 25 bp, SARS Virus
tatggttctccgctgaatttttatc

SEQ ID NO: 148340 - DNA, 25 bp, SARS Virus
atggttctccgtcgaatttttatcc

SEQ ID NO: 148341 - DNA, 25 bp, SARS Virus
tggttctccgttcaatttttatcca

SEQ ID NO: 148342 - DNA, 25 bp, SARS Virus
ggttctccgttgcatttttatccaa

SEQ ID NO: 148343 - DNA, 25 bp, SARS Virus
gttctccgttgactttttatccaaa

SEQ ID NO: 148344 - DNA, 25 bp, SARS Virus
ttctccgttgaacttttatccaaag

SEQ ID NO: 148345 - DNA, 25 bp, SARS Virus
tctccgttgaatctttatccaaagt

SEQ ID NO: 148346 - DNA, 25 bp, SARS Virus
ctccgttgaattcttatccaaagtt

SEQ ID NO: 148347 - DNA, 25 bp, SARS Virus
tccgttgaatttctatccaaagttt

SEQ ID NO: 148348 - DNA, 25 bp, SARS Virus
ccgttgaattttcatccaaagtttc

SEQ ID NO: 148349 - DNA, 25 bp, SARS Virus
cgttgaatttttctccaaagtttca

SEQ ID NO: 148350 - DNA, 25 bp, SARS Virus
gttgaatttttacccaaagtttcac

SEQ ID NO: 148351 - DNA, 25 bp, SARS Virus
ttgaatttttatccaaagtttcaca

SEQ ID NO: 148352 - DNA, 25 bp, SARS Virus
tgaatttttatccaaagtttcacaa

SEQ ID NO: 148353 - DNA, 25 bp, SARS Virus
gaatttttatcccaagtttcacaat

SEQ ID NO: 148354 - DNA, 25 bp, SARS Virus
aatttttatccacagtttcacaatt

SEQ ID NO: 148355 - DNA, 25 bp, SARS Virus
atttttatccaacgtttcacaattt

SEQ ID NO: 148356 - DNA, 25 bp, SARS Virus
tttttatccaaactttcacaatttt

SEQ ID NO: 148357 - DNA, 25 bp, SARS Virus
ttttatccaaagcttcacaattttg

SEQ ID NO: 148358 - DNA, 25 bp, SARS Virus
tttatccaaagtctcacaattttgg

SEQ ID NO: 148359 - DNA, 25 bp, SARS Virus
ttatccaaagttccacaattttggt

SEQ ID NO: 148360 - DNA, 25 bp, SARS Virus
tatccaaagtttcacaattttggtc

SEQ ID NO: 148361 - DNA, 25 bp, SARS Virus
atccaaagtttcccaattttggtct

SEQ ID NO: 148362 - DNA, 25 bp, SARS Virus
tccaaagtttcacaattttggtctt

SEQ ID NO: 148363 - DNA, 25 bp, SARS Virus
ccaaagtttcaccattttggtcttc

SEQ ID NO: 148364 - DNA, 25 bp, SARS Virus
caaagtttcacacttttggtcttcc

SEQ ID NO: 148365 - DNA, 25 bp, SARS Virus
aaagtttcacaactttggtcttcca

SEQ ID NO: 148366 - DNA, 25 bp, SARS Virus
aagtttcacaatcttggtcttccat

SEQ ID NO: 148367 - DNA, 25 bp, SARS Virus
agtttcacaattctggtcttccatc

SEQ ID NO: 148368 - DNA, 25 bp, SARS Virus
gtttcacaatttcggtcttccatct

SEQ ID NO: 148369 - DNA, 25 bp, SARS Virus
tttcacaattttcgtcttccatcta

SEQ ID NO: 148370 - DNA, 25 bp, SARS Virus
ttcacaattttgctcttccatctag

SEQ ID NO: 148371 - DNA, 25 bp, SARS Virus
tcacaattttggccttccatctagt

SEQ ID NO: 148372 - DNA, 25 bp, SARS Virus
cacaattttggtcttccatctagtg

SEQ ID NO: 148373 - DNA, 25 bp, SARS Virus
acaattttggtcctccatctagtgc

SEQ ID NO: 148374 - DNA, 25 bp, SARS Virus
caattttggtctcccatctagtgct

SEQ ID NO: 148375 - DNA, 25 bp, SARS Virus
aattttggtcttccatctagtgctt

SEQ ID NO: 148376 - DNA, 25 bp, SARS Virus
attttggtcttccatctagtgcttg

SEQ ID NO: 148377 - DNA, 25 bp, SARS Virus
ttttggtcttccctctagtgcttga

SEQ ID NO: 148378 - DNA, 25 bp, SARS Virus
tttggtcttccacctagtgcttgat

SEQ ID NO: 148379 - DNA, 25 bp, SARS Virus
ttggtcttccatctagtgcttgatg

SEQ ID NO: 148380 - DNA, 25 bp, SARS Virus
tggtcttccatccagtgcttgatgt

SEQ ID NO: 148381 - DNA, 25 bp, SARS Virus
ggtcttccatctcgtgcttgatgta

SEQ ID NO: 148382 - DNA, 25 bp, SARS Virus
gtcttccatctactgcttgatgtag

SEQ ID NO: 148383 - DNA, 25 bp, SARS Virus
tcttccatctagcgcttgatgtaga

SEQ ID NO: 148384 - DNA, 25 bp, SARS Virus
cttccatctagtccttgatgtagat

SEQ ID NO: 148385 - DNA, 25 bp, SARS Virus
gaatcaccgtctgtgcggtatcgtg

SEQ ID NO: 148386 - DNA, 25 bp, SARS Virus
aatcaccgtcttggcggtatcgtga

SEQ ID NO: 148387 - DNA, 25 bp, SARS Virus
atcaccgtctttgcggtatcgtgaa

SEQ ID NO: 148388 - DNA, 25 bp, SARS Virus
tcaccgtctttggggtatcgtgaat

SEQ ID NO: 148389 - DNA, 25 bp, SARS Virus
caccgtctttgcggtatcgtgaatt

SEQ ID NO: 148390 - DNA, 25 bp, SARS Virus
accgtctttgcggtatcgtgaattt

SEQ ID NO: 148391 - DNA, 25 bp, SARS Virus
ccgtctttgcgggatcgtgaatttc

SEQ ID NO: 148392 - DNA, 25 bp, SARS Virus
cgtctttgcggtgtcgtgaatttcc

SEQ ID NO: 148393 - DNA, 25 bp, SARS Virus
gtctttgcggtagcgtgaatttcca

SEQ ID NO: 148394 - DNA, 25 bp, SARS Virus
tctttgcggtatggtgaatttccaa

SEQ ID NO: 148395 - DNA, 25 bp, SARS Virus
ctttgcggtatcgtgaatttccaac

SEQ ID NO: 148396 - DNA, 25 bp, SARS Virus
tttgcggtatcgggaatttccaact

SEQ ID NO: 148397 - DNA, 25 bp, SARS Virus
ttgcggtatcgtgaatttccaactt

SEQ ID NO: 148398 - DNA, 25 bp, SARS Virus
tgcggtatcgtggatttccaacttt

SEQ ID NO: 148399 - DNA, 25 bp, SARS Virus
gcggtatcgtgagtttccaactttt

SEQ ID NO: 148400 - DNA, 25 bp, SARS Virus
cggtatcgtgaagttccaacttttt

SEQ ID NO: 148401 - DNA, 25 bp, SARS Virus
ggtatcgtgaatgtccaactttttt

SEQ ID NO: 148402 - DNA, 25 bp, SARS Virus
gtatcgtgaattgccaacttttttt

SEQ ID NO: 148403 - DNA, 25 bp, SARS Virus
tatcgtgaatttgcaacttttttta

SEQ ID NO: 148404 - DNA, 25 bp, SARS Virus
atcgtgaatttcgaactttttttac

SEQ ID NO: 148405 - DNA, 25 bp, SARS Virus
tcgtgaatttccgactttttttaca

SEQ ID NO: 148406 - DNA, 25 bp, SARS Virus
cgtgaatttccagctttttttacaa

SEQ ID NO: 148407 - DNA, 25 bp, SARS Virus
gtgaatttccaagtttttttacaac

SEQ ID NO: 148408 - DNA, 25 bp, SARS Virus
tgaatttccaacgttttttacaact

SEQ ID NO: 148409 - DNA, 25 bp, SARS Virus
gaatttccaactgtttttacaactc

SEQ ID NO: 148410 - DNA, 25 bp, SARS Virus
aatttccaacttgttttacaactca

SEQ ID NO: 148411 - DNA, 25 bp, SARS Virus
atttccaactttgtttacaactcaa

SEQ ID NO: 148412 - DNA, 25 bp, SARS Virus
tttccaacttttgttacaactcaac

SEQ ID NO: 148413 - DNA, 25 bp, SARS Virus
ttccaactttttgtacaactcaaca

SEQ ID NO: 148414 - DNA, 25 bp, SARS Virus
tccaacttttttgacaactcaacat

SEQ ID NO: 148415 - DNA, 25 bp, SARS Virus
ccaactttttttgcaactcaacatc

SEQ ID NO: 148416 - DNA, 25 bp, SARS Virus
caactttttttagaactcaacatct

SEQ ID NO: 148417 - DNA, 25 bp, SARS Virus
aactttttttacgactcaacatctc

SEQ ID NO: 148418 - DNA, 25 bp, SARS Virus
actttttttacagctcaacatctcg

SEQ ID NO: 148419 - DNA, 25 bp, SARS Virus
ctttttttacaagtcaacatctcgt

SEQ ID NO: 148420 - DNA, 25 bp, SARS Virus
tttttttacaacgcaacatctcgtg

SEQ ID NO: 148421 - DNA, 25 bp, SARS Virus
ttttttacaactgaacatctcgtgt

SEQ ID NO: 148422 - DNA, 25 bp, SARS Virus
tttttacaactcgacatctcgtgtc

SEQ ID NO: 148423 - DNA, 25 bp, SARS Virus
ttttacaactcagcatctcgtgtct

SEQ ID NO: 148424 - DNA, 25 bp, SARS Virus
tttacaactcaagatctcgtgtctc

SEQ ID NO: 148425 - DNA, 25 bp, SARS Virus
ttacaactcaacgtctcgtgtctca

SEQ ID NO: 148426 - DNA, 25 bp, SARS Virus
tacaactcaacagctcgtgtctcat

SEQ ID NO: 148427 - DNA, 25 bp, SARS Virus
acaactcaacatgtcgtgtctcatt

SEQ ID NO: 148428 - DNA, 25 bp, SARS Virus
caactcaacatcgcgtgtctcatta

SEQ ID NO: 148429 - DNA, 25 bp, SARS Virus
aactcaacatctggtgtctcattag

SEQ ID NO: 148430 - DNA, 25 bp, SARS Virus
actcaacatctcgtgtctcattagt

SEQ ID NO: 148431 - DNA, 25 bp, SARS Virus
ctcaacatctcgggtctcattagtc

SEQ ID NO: 148432 - DNA, 25 bp, SARS Virus
tcaacatctcgtgtctcattagtcg

SEQ ID NO: 148433 - DNA, 25 bp, SARS Virus
caacatctcgtggctcattagtcgt

SEQ ID NO: 148434 - DNA, 25 bp, SARS Virus
aacatctcgtgtgtcattagtcgtt

SEQ ID NO: 148435 - DNA, 25 bp, SARS Virus
acatctcgtgtcgcattagtcgttg

SEQ ID NO: 148436 - DNA, 25 bp, SARS Virus
catctcgtgtctgattagtcgttgt

SEQ ID NO: 148437 - DNA, 25 bp, SARS Virus
atctcgtgtctcgttagtcgttgtg

SEQ ID NO: 148438 - DNA, 25 bp, SARS Virus
tctcgtgtctcagtagtcgttgtgt

SEQ ID NO: 148439 - DNA, 25 bp, SARS Virus
ctcgtgtctcatgagtcgttgtgtt

SEQ ID NO: 148440 - DNA, 25 bp, SARS Virus
tcgtgtctcattggtcgttgtgtta

SEQ ID NO: 148441 - DNA, 25 bp, SARS Virus
cgtgtctcattagtcgttgtgttaa

SEQ ID NO: 148442 - DNA, 25 bp, SARS Virus
gtgtctcattaggcgttgtgttaat

SEQ ID NO: 148443 - DNA, 25 bp, SARS Virus
tgtctcattagtggttgtgttaatc

SEQ ID NO: 148444 - DNA, 25 bp, SARS Virus
gtctcattagtcgttgtgttaatct

SEQ ID NO: 148445 - DNA, 25 bp, SARS Virus
tctcattagtcggtgtgttaatctt

SEQ ID NO: 148446 - DNA, 25 bp, SARS Virus
ctcattagtcgtggtgttaatcttt

SEQ ID NO: 148447 - DNA, 25 bp, SARS Virus
tcattagtcgttgtgttaatcttta

SEQ ID NO: 148448 - DNA, 25 bp, SARS Virus
cattagtcgttgggttaatctttaa

SEQ ID NO: 148449 - DNA, 25 bp, SARS Virus
attagtcgttgtgttaatctttaaa

SEQ ID NO: 148450 - DNA, 25 bp, SARS Virus
ttagtcgttgtggtaatctttaaaa

SEQ ID NO: 148451 - DNA, 25 bp, SARS Virus
tagtcgttgtgtgaatctttaaaaa

SEQ ID NO: 148452 - DNA, 25 bp, SARS Virus
agtcgttgtgttgatctttaaaaaa

SEQ ID NO: 148453 - DNA, 25 bp, SARS Virus
gtcgttgtgttagtctttaaaaaaa

SEQ ID NO: 148454 - DNA, 25 bp, SARS Virus
tcgttgtgttaagctttaaaaaaaa

SEQ ID NO: 148455 - DNA, 25 bp, SARS Virus
cgttgtgttaatgtttaaaaaaaag

SEQ ID NO: 148456 - DNA, 25 bp, SARS Virus
gttgtgttaatcgttaaaaaaaaga

SEQ ID NO: 148457 - DNA, 25 bp, SARS Virus
ttgtgttaatctgtaaaaaaaagag

SEQ ID NO: 148458 - DNA, 25 bp, SARS Virus
tgtgttaatcttgaaaaaaaagaga

SEQ ID NO: 148459 - DNA, 25 bp, SARS Virus
gtgttaatctttgaaaaaaagagag

SEQ ID NO: 148460 - DNA, 25 bp, SARS Virus
tgttaatctttagaaaaaagagagg

SEQ ID NO: 148461 - DNA, 25 bp, SARS Virus
gttaatctttaagaaaaagagaggg

SEQ ID NO: 148462 - DNA, 25 bp, SARS Virus
ttaatctttaaagaaaagagagggt

SEQ ID NO: 148463 - DNA, 25 bp, SARS Virus
taatctttaaaagaaagagagggta

SEQ ID NO: 148464 - DNA, 25 bp, SARS Virus
aatctttaaaaagaagagagggtac

SEQ ID NO: 148465 - DNA, 25 bp, SARS Virus
atctttaaaaaagagagagggtacg

SEQ ID NO: 148466 - DNA, 25 bp, SARS Virus
tctttaaaaaaaggagagggtacgt

SEQ ID NO: 148467 - DNA, 25 bp, SARS Virus
ctttaaaaaaaagagagggtacgta

SEQ ID NO: 148468 - DNA, 25 bp, SARS Virus
tttaaaaaaaagggagggtacgtat

SEQ ID NO: 148469 - DNA, 25 bp, SARS Virus
ttaaaaaaaagagagggtacgtatc

SEQ ID NO: 148470 - DNA, 25 bp, SARS Virus
taaaaaaaagagggggtacgtatct

SEQ ID NO: 148471 - DNA, 25 bp, SARS Virus
aaaaaaaagagagggtacgtatctg

SEQ ID NO: 148472 - DNA, 25 bp, SARS Virus
aaaaaaagagagggtacgtatctgt

SEQ ID NO: 148473 - DNA, 25 bp, SARS Virus
aaaaaagagagggtacgtatctgtc

SEQ ID NO: 148474 - DNA, 25 bp, SARS Virus
aaaaagagaggggacgtatctgtct

SEQ ID NO: 148475 - DNA, 25 bp, SARS Virus
aaaagagagggtgcgtatctgtctt

SEQ ID NO: 148476 - DNA, 25 bp, SARS Virus
aaagagagggtaggtatctgtcttc

SEQ ID NO: 148477 - DNA, 25 bp, SARS Virus
aagagagggtacgtatctgtcttcc

SEQ ID NO: 148478 - DNA, 25 bp, SARS Virus
agagagggtacggatctgtcttccc

SEQ ID NO: 148479 - DNA, 25 bp, SARS Virus
gagagggtacgtgtctgtcttccct

SEQ ID NO: 148480 - DNA, 25 bp, SARS Virus
agagggtacgtagctgtcttccctt

SEQ ID NO: 148481 - DNA, 25 bp, SARS Virus
gagggtacgtatgtgtcttccctta

SEQ ID NO: 148482 - DNA, 25 bp, SARS Virus
agggtacgtatcggtcttcccttaa

SEQ ID NO: 148483 - DNA, 25 bp, SARS Virus
gggtacgtatctgtcttcccttaaa

SEQ ID NO: 148484 - DNA, 25 bp, SARS Virus
ggtacgtatctggcttcccttaaat

SEQ ID NO: 148485 - DNA, 25 bp, SARS Virus
gtacgtatctgtgttcccttaaatc

SEQ ID NO: 148486 - DNA, 25 bp, SARS Virus
tacgtatctgtcgtcccttaaatca

SEQ ID NO: 148487 - DNA, 25 bp, SARS Virus
acgtatctgtctgcccttaaatcat

SEQ ID NO: 148488 - DNA, 25 bp, SARS Virus
cgtatctgtcttgccttaaatcatc

SEQ ID NO: 148489 - DNA, 25 bp, SARS Virus
gtatctgtcttcgcttaaatcatcg

SEQ ID NO: 148490 - DNA, 25 bp, SARS Virus
tatctgtcttccgttaaatcatcgt

SEQ ID NO: 148491 - DNA, 25 bp, SARS Virus
atctgtcttcccgtaaatcatcgta

SEQ ID NO: 148492 - DNA, 25 bp, SARS Virus
tctgtcttccctgaaatcatcgtaa

SEQ ID NO: 148493 - DNA, 25 bp, SARS Virus
ctgtcttcccttgaatcatcgtaat

SEQ ID NO: 148494 - DNA, 25 bp, SARS Virus
tgtcttcccttagatcatcgtaatt

SEQ ID NO: 148495 - DNA, 25 bp, SARS Virus
gtcttcccttaagtcatcgtaattt

SEQ ID NO: 148496 - DNA, 25 bp, SARS Virus
tcttcccttaaagcatcgtaatttt

SEQ ID NO: 148497 - DNA, 25 bp, SARS Virus
cttcccttaaatgatcgtaattttt

SEQ ID NO: 148498 - DNA, 25 bp, SARS Virus
ttcccttaaatcgtcgtaatttttg

SEQ ID NO: 148499 - DNA, 25 bp, SARS Virus
tcccttaaatcagcgtaatttttgg

SEQ ID NO: 148500 - DNA, 25 bp, SARS Virus
cccttaaatcatggtaatttttgga

SEQ ID NO: 148501 - DNA, 25 bp, SARS Virus
ccttaaatcatcgtaatttttggag

SEQ ID NO: 148502 - DNA, 25 bp, SARS Virus
cttaaatcatcggaatttttggaga

SEQ ID NO: 148503 - DNA, 25 bp, SARS Virus
ttaaatcatcgtgatttttggagag

SEQ ID NO: 148504 - DNA, 25 bp, SARS Virus
taaatcatcgtagtttttggagagg

SEQ ID NO: 148505 - DNA, 25 bp, SARS Virus
aaatcatcgtaagttttggagaggt

SEQ ID NO: 148506 - DNA, 25 bp, SARS Virus
aatcatcgtaatgtttggagaggtt

SEQ ID NO: 148507 - DNA, 25 bp, SARS Virus
atcatcgtaattgttggagaggttt

SEQ ID NO: 148508 - DNA, 25 bp, SARS Virus
tcatcgtaatttgtggagaggtttt

SEQ ID NO: 148509 - DNA, 25 bp, SARS Virus
catcgtaattttgggagaggttttc

SEQ ID NO: 148510 - DNA, 25 bp, SARS Virus
atcgtaatttttggagaggttttcc

SEQ ID NO: 148511 - DNA, 25 bp, SARS Virus
tcgtaatttttggagaggttttcct

SEQ ID NO: 148512 - DNA, 25 bp, SARS Virus
cgtaatttttggggaggttttcctg

SEQ ID NO: 148513 - DNA, 25 bp, SARS Virus
gtaatttttggagaggttttcctgt

SEQ ID NO: 148514 - DNA, 25 bp, SARS Virus
taatttttggaggggttttcctgtg

SEQ ID NO: 148515 - DNA, 25 bp, SARS Virus
aatttttggagaggttttcctgtgt

SEQ ID NO: 148516 - DNA, 25 bp, SARS Virus
atttttggagaggttttcctgtgtt

SEQ ID NO: 148517 - DNA, 25 bp, SARS Virus
tttttggagagggtttcctgtgttc

SEQ ID NO: 148518 - DNA, 25 bp, SARS Virus
ttttggagaggtgttcctgtgttca

SEQ ID NO: 148519 - DNA, 25 bp, SARS Virus
tttggagaggttgtcctgtgttcaa

SEQ ID NO: 148520 - DNA, 25 bp, SARS Virus
ttggagaggtttgcctgtgttcaaa

SEQ ID NO: 148521 - DNA, 25 bp, SARS Virus
tggagaggttttgctgtgttcaaac

SEQ ID NO: 148522 - DNA, 25 bp, SARS Virus
ggagaggttttcgtgtgttcaaaca

SEQ ID NO: 148523 - DNA, 25 bp, SARS Virus
gagaggttttccggtgttcaaacat

SEQ ID NO: 148524 - DNA, 25 bp, SARS Virus
agaggttttcctgtgttcaaacatt

SEQ ID NO: 148525 - DNA, 25 bp, SARS Virus
gaggttttcctgggttcaaacatta

SEQ ID NO: 148526 - DNA, 25 bp, SARS Virus
aggttttcctgtgttcaaacattat

SEQ ID NO: 148527 - DNA, 25 bp, SARS Virus
ggttttcctgtggtcaaacattata

SEQ ID NO: 148528 - DNA, 25 bp, SARS Virus
gttttcctgtgtgcaaacattataa

SEQ ID NO: 148529 - DNA, 25 bp, SARS Virus
ttttcctgtgttgaaacattataat

SEQ ID NO: 148530 - DNA, 25 bp, SARS Virus
tttcctgtgttcgaacattataatc

SEQ ID NO: 148531 - DNA, 25 bp, SARS Virus
ttcctgtgttcagacattataatcc

SEQ ID NO: 148532 - DNA, 25 bp, SARS Virus
tcctgtgttcaagcattataatccc

SEQ ID NO: 148533 - DNA, 25 bp, SARS Virus
cctgtgttcaaagattataatccct

SEQ ID NO: 148534 - DNA, 25 bp, SARS Virus
ctgtgttcaaacgttataatccctt

SEQ ID NO: 148535 - DNA, 25 bp, SARS Virus
tgtgttcaaacagtataatccctta

SEQ ID NO: 148536 - DNA, 25 bp, SARS Virus
gtgttcaaacatgataatcccttag

SEQ ID NO: 148537 - DNA, 25 bp, SARS Virus
tgttcaaacattgtaatcccttaga

SEQ ID NO: 148538 - DNA, 25 bp, SARS Virus
gttcaaacattagaatcccttagag

SEQ ID NO: 148539 - DNA, 25 bp, SARS Virus
ttcaaacattatgatcccttagagt

SEQ ID NO: 148540 - DNA, 25 bp, SARS Virus
tcaaacattatagtcccttagagtg

SEQ ID NO: 148541 - DNA, 25 bp, SARS Virus
caaacattataagcccttagagtgt

SEQ ID NO: 148542 - DNA, 25 bp, SARS Virus
aaacattataatgccttagagtgtt

SEQ ID NO: 148543 - DNA, 25 bp, SARS Virus
aacattataatcgcttagagtgttg

SEQ ID NO: 148544 - DNA, 25 bp, SARS Virus
acattataatccgttagagtgttgt

SEQ ID NO: 148545 - DNA, 25 bp, SARS Virus
cattataatcccgtagagtgttgta

SEQ ID NO: 148546 - DNA, 25 bp, SARS Virus
attataatccctgagagtgttgtag

SEQ ID NO: 148547 - DNA, 25 bp, SARS Virus
ttataatcccttggagtgttgtaga

SEQ ID NO: 148548 - DNA, 25 bp, SARS Virus
tataatcccttagagtgttgtagag

SEQ ID NO: 148549 - DNA, 25 bp, SARS Virus
ataatcccttagggtgttgtagagg

SEQ ID NO: 148550 - DNA, 25 bp, SARS Virus
taatcccttagagtgttgtagagga

SEQ ID NO: 148551 - DNA, 25 bp, SARS Virus
aatcccttagagggttgtagaggac

SEQ ID NO: 148552 - DNA, 25 bp, SARS Virus
atcccttagagtgttgtagaggact

SEQ ID NO: 148553 - DNA, 25 bp, SARS Virus
tcccttagagtggtgtagaggactc

SEQ ID NO: 148554 - DNA, 25 bp, SARS Virus
cccttagagtgtggtagaggactcc

SEQ ID NO: 148555 - DNA, 25 bp, SARS Virus
ccttagagtgttgtagaggactccc

SEQ ID NO: 148556 - DNA, 25 bp, SARS Virus
cttagagtgttggagaggactccct

SEQ ID NO: 148557 - DNA, 25 bp, SARS Virus
ttagagtgttgtggaggactccctt

SEQ ID NO: 148558 - DNA, 25 bp, SARS Virus
tagagtgttgtagaggactcccttg

SEQ ID NO: 148559 - DNA, 25 bp, SARS Virus
agagtgttgtaggggactcccttgt

SEQ ID NO: 148560 - DNA, 25 bp, SARS Virus
gagtgttgtagaggactcccttgtt

SEQ ID NO: 148561 - DNA, 25 bp, SARS Virus
agtgttgtagaggactcccttgttg

SEQ ID NO: 148562 - DNA, 25 bp, SARS Virus
gtgttgtagagggctcccttgttgg

SEQ ID NO: 148563 - DNA, 25 bp, SARS Virus
tgttgtagaggagtcccttgttggg

SEQ ID NO: 148564 - DNA, 25 bp, SARS Virus
gttgtagaggacgcccttgttggga

SEQ ID NO: 148565 - DNA, 25 bp, SARS Virus
ttgtagaggactgccttgttgggac

SEQ ID NO: 148566 - DNA, 25 bp, SARS Virus
tgtagaggactcgcttgttgggact

SEQ ID NO: 148567 - DNA, 25 bp, SARS Virus
gtagaggactccgttgttgggactt

SEQ ID NO: 148568 - DNA, 25 bp, SARS Virus
tagaggactcccgtgttgggacttt

SEQ ID NO: 148569 - DNA, 25 bp, SARS Virus
agaggactccctggttgggacttta

SEQ ID NO: 148570 - DNA, 25 bp, SARS Virus
gaggactcccttgttgggactttaa

SEQ ID NO: 148571 - DNA, 25 bp, SARS Virus
aggactcccttggtgggactttaat

SEQ ID NO: 148572 - DNA, 25 bp, SARS Virus
ggactcccttgtggggactttaatc

SEQ ID NO: 148573 - DNA, 25 bp, SARS Virus
gactcccttgttgggactttaatct

SEQ ID NO: 148574 - DNA, 25 bp, SARS Virus
actcccttgttgggactttaatctc

SEQ ID NO: 148575 - DNA, 25 bp, SARS Virus
ctcccttgttgggactttaatctcc

SEQ ID NO: 148576 - DNA, 25 bp, SARS Virus
tcccttgttggggctttaatctcca

SEQ ID NO: 148577 - DNA, 25 bp, SARS Virus
cccttgttgggagtttaatctccag

SEQ ID NO: 148578 - DNA, 25 bp, SARS Virus
ccttgttgggacgttaatctccaga

SEQ ID NO: 148579 - DNA, 25 bp, SARS Virus
cttgttgggactgtaatctccagac

SEQ ID NO: 148580 - DNA, 25 bp, SARS Virus
ttgttgggacttgaatctccagacc

SEQ ID NO: 148581 - DNA, 25 bp, SARS Virus
tgttgggactttgatctccagacca

SEQ ID NO: 148582 - DNA, 25 bp, SARS Virus
gttgggactttagtctccagaccat

SEQ ID NO: 148583 - DNA, 25 bp, SARS Virus
ttgggactttaagctccagaccatt

SEQ ID NO: 148584 - DNA, 25 bp, SARS Virus
tgggactttaatgtccagaccattt

SEQ ID NO: 148585 - DNA, 25 bp, SARS Virus
gggactttaatcgccagaccattta

SEQ ID NO: 148586 - DNA, 25 bp, SARS Virus
ggactttaatctgcagaccatttaa

SEQ ID NO: 148587 - DNA, 25 bp, SARS Virus
gactttaatctcgagaccatttaag

SEQ ID NO: 148588 - DNA, 25 bp, SARS Virus
actttaatctccggaccatttaagg

SEQ ID NO: 148589 - DNA, 25 bp, SARS Virus
ctttaatctccagaccatttaagga

SEQ ID NO: 148590 - DNA, 25 bp, SARS Virus
tttaatctccaggccatttaaggaa

SEQ ID NO: 148591 - DNA, 25 bp, SARS Virus
ttaatctccagagcatttaaggaaa

SEQ ID NO: 148592 - DNA, 25 bp, SARS Virus
taatctccagacgatttaaggaaac

SEQ ID NO: 148593 - DNA, 25 bp, SARS Virus
aatctccagaccgtttaaggaaaca

SEQ ID NO: 148594 - DNA, 25 bp, SARS Virus
atctccagaccagttaaggaaacag

SEQ ID NO: 148595 - DNA, 25 bp, SARS Virus
tctccagaccatgtaaggaaacagt

SEQ ID NO: 148596 - DNA, 25 bp, SARS Virus
ctccagaccattgaaggaaacagtt

SEQ ID NO: 148597 - DNA, 25 bp, SARS Virus
tccagaccatttgaggaaacagtta

SEQ ID NO: 148598 - DNA, 25 bp, SARS Virus
ccagaccatttagggaaacagttag

SEQ ID NO: 148599 - DNA, 25 bp, SARS Virus
cagaccatttaaggaaacagttaga

SEQ ID NO: 148600 - DNA, 25 bp, SARS Virus
agaccatttaaggaaacagttagag

SEQ ID NO: 148601 - DNA, 25 bp, SARS Virus
gaccatttaagggaacagttagagt

SEQ ID NO: 148602 - DNA, 25 bp, SARS Virus
accatttaaggagacagttagagtt

SEQ ID NO: 148603 - DNA, 25 bp, SARS Virus
ccatttaaggaagcagttagagttt

SEQ ID NO: 148604 - DNA, 25 bp, SARS Virus
catttaaggaaagagttagagtttc

SEQ ID NO: 148605 - DNA, 25 bp, SARS Virus
atttaaggaaacggttagagtttcg

SEQ ID NO: 148606 - DNA, 25 bp, SARS Virus
tttaaggaaacagttagagtttcga

SEQ ID NO: 148607 - DNA, 25 bp, SARS Virus
ttaaggaaacaggtagagtttcgag

SEQ ID NO: 148608 - DNA, 25 bp, SARS Virus
taaggaaacagtgagagtttcgaga

SEQ ID NO: 148609 - DNA, 25 bp, SARS Virus
aaggaaacagttggagtttcgagaa

SEQ ID NO: 148610 - DNA, 25 bp, SARS Virus
aggaaacagttagagtttcgagaat

SEQ ID NO: 148611 - DNA, 25 bp, SARS Virus
ggaaacagttagggtttcgagaatt

SEQ ID NO: 148612 - DNA, 25 bp, SARS Virus
gaaacagttagagtttcgagaattg

SEQ ID NO: 148613 - DNA, 25 bp, SARS Virus
aaacagttagaggttcgagaattgt

SEQ ID NO: 148614 - DNA, 25 bp, SARS Virus
aacagttagagtgtcgagaattgtc

SEQ ID NO: 148615 - DNA, 25 bp, SARS Virus
acagttagagttgcgagaattgtct

SEQ ID NO: 148616 - DNA, 25 bp, SARS Virus
cagttagagtttggagaattgtctc

SEQ ID NO: 148617 - DNA, 25 bp, SARS Virus
agttagagtttcgagaattgtctcg

SEQ ID NO: 148618 - DNA, 25 bp, SARS Virus
gttagagtttcgggaattgtctcgt

SEQ ID NO: 148619 - DNA, 25 bp, SARS Virus
ttagagtttcgagaattgtctcgta

SEQ ID NO: 148620 - DNA, 25 bp, SARS Virus
tagagtttcgaggattgtctcgtaa

SEQ ID NO: 148621 - DNA, 25 bp, SARS Virus
agagtttcgagagttgtctcgtaaa

SEQ ID NO: 148622 - DNA, 25 bp, SARS Virus
gagtttcgagaagtgtctcgtaaac

SEQ ID NO: 148623 - DNA, 25 bp, SARS Virus
agtttcgagaatggtctcgtaaact

SEQ ID NO: 148624 - DNA, 25 bp, SARS Virus
gtttcgagaattgtctcgtaaactc

SEQ ID NO: 148625 - DNA, 25 bp, SARS Virus
tttcgagaattggctcgtaaactca

SEQ ID NO: 148626 - DNA, 25 bp, SARS Virus
ttcgagaattgtgtcgtaaactcaa

SEQ ID NO: 148627 - DNA, 25 bp, SARS Virus
tcgagaattgtcgcgtaaactcaag

SEQ ID NO: 148628 - DNA, 25 bp, SARS Virus
cgagaattgtctggtaaactcaagt

SEQ ID NO: 148629 - DNA, 25 bp, SARS Virus
gagaattgtctcgtaaactcaagtc

SEQ ID NO: 148630 - DNA, 25 bp, SARS Virus
agaattgtctcggaaactcaagtcg

SEQ ID NO: 148631 - DNA, 25 bp, SARS Virus
gaattgtctcgtgaactcaagtcgt

SEQ ID NO: 148632 - DNA, 25 bp, SARS Virus
aattgtctcgtagactcaagtcgtt

SEQ ID NO: 148633 - DNA, 25 bp, SARS Virus
attgtctcgtaagctcaagtcgttc

SEQ ID NO: 148634 - DNA, 25 bp, SARS Virus
ttgtctcgtaaagtcaagtcgttca

SEQ ID NO: 148635 - DNA, 25 bp, SARS Virus
tgtctcgtaaacgcaagtcgttcac

SEQ ID NO: 148636 - DNA, 25 bp, SARS Virus
gtctcgtaaactgaagtcgttcacc

SEQ ID NO: 148637 - DNA, 25 bp, SARS Virus
tctcgtaaactcgagtcgttcacct

SEQ ID NO: 148638 - DNA, 25 bp, SARS Virus
ctcgtaaactcaggtcgttcaccta

SEQ ID NO: 148639 - DNA, 25 bp, SARS Virus
tcgtaaactcaagtcgttcacctaa

SEQ ID NO: 148640 - DNA, 25 bp, SARS Virus
cgtaaactcaaggcgttcacctaaa

SEQ ID NO: 148641 - DNA, 25 bp, SARS Virus
gtaaactcaagtggttcacctaaaa

SEQ ID NO: 148642 - DNA, 25 bp, SARS Virus
taaactcaagtcgttcacctaaaac

SEQ ID NO: 148643 - DNA, 25 bp, SARS Virus
aaactcaagtcggtcacctaaaact

SEQ ID NO: 148644 - DNA, 25 bp, SARS Virus
aactcaagtcgtgcacctaaaactc

SEQ ID NO: 148645 - DNA, 25 bp, SARS Virus
actcaagtcgttgacctaaaactct

SEQ ID NO: 148646 - DNA, 25 bp, SARS Virus
ctcaagtcgttcgcctaaaactctt

SEQ ID NO: 148647 - DNA, 25 bp, SARS Virus
tcaagtcgttcagctaaaactcttg

SEQ ID NO: 148648 - DNA, 25 bp, SARS Virus
caagtcgttcacgtaaaactcttgt

SEQ ID NO: 148649 - DNA, 25 bp, SARS Virus
aagtcgttcaccgaaaactcttgtt

SEQ ID NO: 148650 - DNA, 25 bp, SARS Virus
agtcgttcacctgaaactcttgtta

SEQ ID NO: 148651 - DNA, 25 bp, SARS Virus
gtcgttcacctagaactcttgttag

SEQ ID NO: 148652 - DNA, 25 bp, SARS Virus
tcgttcacctaagactcttgttagt

SEQ ID NO: 148653 - DNA, 25 bp, SARS Virus
cgttcacctaaagctcttgttagtt

SEQ ID NO: 148654 - DNA, 25 bp, SARS Virus
gttcacctaaaagtcttgttagttg

SEQ ID NO: 148655 - DNA, 25 bp, SARS Virus
ttcacctaaaacgcttgttagttgt

SEQ ID NO: 148656 - DNA, 25 bp, SARS Virus
tcacctaaaactgttgttagttgtc

SEQ ID NO: 148657 - DNA, 25 bp, SARS Virus
cacctaaaactcgtgttagttgtcg

SEQ ID NO: 148658 - DNA, 25 bp, SARS Virus
acctaaaactctggttagttgtcgt

SEQ ID NO: 148659 - DNA, 25 bp, SARS Virus
cctaaaactcttgttagttgtcgta

SEQ ID NO: 148660 - DNA, 25 bp, SARS Virus
ctaaaactcttggtagttgtcgtag

SEQ ID NO: 148661 - DNA, 25 bp, SARS Virus
taaaactcttgtgagttgtcgtaga

SEQ ID NO: 148662 - DNA, 25 bp, SARS Virus
aaaactcttgttggttgtcgtagac

SEQ ID NO: 148663 - DNA, 25 bp, SARS Virus
aaactcttgttagttgtcgtagaca

SEQ ID NO: 148664 - DNA, 25 bp, SARS Virus
aactcttgttaggtgtcgtagacac

SEQ ID NO: 148665 - DNA, 25 bp, SARS Virus
actcttgttagtggtcgtagacact

SEQ ID NO: 148666 - DNA, 25 bp, SARS Virus
ctcttgttagttgtcgtagacacta

SEQ ID NO: 148667 - DNA, 25 bp, SARS Virus
tcttgttagttggcgtagacactaa

SEQ ID NO: 148668 - DNA, 25 bp, SARS Virus
cttgttagttgtggtagacactaac

SEQ ID NO: 148669 - DNA, 25 bp, SARS Virus
ttgttagttgtcgtagacactaaca

SEQ ID NO: 148670 - DNA, 25 bp, SARS Virus
tgttagttgtcggagacactaacat

SEQ ID NO: 148671 - DNA, 25 bp, SARS Virus
gttagttgtcgtggacactaacatg

SEQ ID NO: 148672 - DNA, 25 bp, SARS Virus
ttagttgtcgtagacactaacatgg

SEQ ID NO: 148673 - DNA, 25 bp, SARS Virus
tagttgtcgtaggcactaacatggt

SEQ ID NO: 148674 - DNA, 25 bp, SARS Virus
agttgtcgtagagactaacatggta

SEQ ID NO: 148675 - DNA, 25 bp, SARS Virus
gttgtcgtagacgctaacatggtaa

SEQ ID NO: 148676 - DNA, 25 bp, SARS Virus
ttgtcgtagacagtaacatggtaaa

SEQ ID NO: 148677 - DNA, 25 bp, SARS Virus
tgtcgtagacacgaacatggtaaaa

SEQ ID NO: 148678 - DNA, 25 bp, SARS Virus
gtcgtagacactgacatggtaaaag

SEQ ID NO: 148679 - DNA, 25 bp, SARS Virus
tcgtagacactagcatggtaaaagt

SEQ ID NO: 148680 - DNA, 25 bp, SARS Virus
cgtagacactaagatggtaaaagta

SEQ ID NO: 148681 - DNA, 25 bp, SARS Virus
gtagacactaacgtggtaaaagtag

SEQ ID NO: 148682 - DNA, 25 bp, SARS Virus
tagacactaacagggtaaaagtagt

SEQ ID NO: 148683 - DNA, 25 bp, SARS Virus
agacactaacatggtaaaagtagta

SEQ ID NO: 148684 - DNA, 25 bp, SARS Virus
gacactaacatggtaaaagtagtat

SEQ ID NO: 148685 - DNA, 25 bp, SARS Virus
acactaacatgggaaaagtagtatg

SEQ ID NO: 148686 - DNA, 25 bp, SARS Virus
cactaacatggtgaaagtagtatga

SEQ ID NO: 148687 - DNA, 25 bp, SARS Virus
actaacatggtagaagtagtatgaa

SEQ ID NO: 148688 - DNA, 25 bp, SARS Virus
ctaacatggtaagagtagtatgaac

SEQ ID NO: 148689 - DNA, 25 bp, SARS Virus
taacatggtaaaggtagtatgaact

SEQ ID NO: 148690 - DNA, 25 bp, SARS Virus
aacatggtaaaagtagtatgaactc

SEQ ID NO: 148691 - DNA, 25 bp, SARS Virus
acatggtaaaaggagtatgaactcg

SEQ ID NO: 148692 - DNA, 25 bp, SARS Virus
catggtaaaagtggtatgaactcgt

SEQ ID NO: 148693 - DNA, 25 bp, SARS Virus
atggtaaaagtagtatgaactcgta

SEQ ID NO: 148694 - DNA, 25 bp, SARS Virus
tggtaaaagtaggatgaactcgtat

SEQ ID NO: 148695 - DNA, 25 bp, SARS Virus
ggtaaaagtagtgtgaactcgtatt

SEQ ID NO: 148696 - DNA, 25 bp, SARS Virus
gtaaaagtagtaggaactcgtattt

SEQ ID NO: 148697 - DNA, 25 bp, SARS Virus
taaaagtagtatgaactcgtattta

SEQ ID NO: 148698 - DNA, 25 bp, SARS Virus
aaaagtagtatggactcgtatttac

SEQ ID NO: 148699 - DNA, 25 bp, SARS Virus
aaagtagtatgagctcgtatttaca

SEQ ID NO: 148700 - DNA, 25 bp, SARS Virus
aagtagtatgaagtcgtatttacat

SEQ ID NO: 148701 - DNA, 25 bp, SARS Virus
agtagtatgaacgcgtatttacatc

SEQ ID NO: 148702 - DNA, 25 bp, SARS Virus
gtagtatgaactggtatttacatca

SEQ ID NO: 148703 - DNA, 25 bp, SARS Virus
tagtatgaactcgtatttacatcaa

SEQ ID NO: 148704 - DNA, 25 bp, SARS Virus
agtatgaactcggatttacatcaac

SEQ ID NO: 148705 - DNA, 25 bp, SARS Virus
gtatgaactcgtgtttacatcaacc

SEQ ID NO: 148706 - DNA, 25 bp, SARS Virus
tatgaactcgtagttacatcaaccg

SEQ ID NO: 148707 - DNA, 25 bp, SARS Virus
atgaactcgtatgtacatcaaccga

SEQ ID NO: 148708 - DNA, 25 bp, SARS Virus
tgaactcgtattgacatcaaccgaa

SEQ ID NO: 148709 - DNA, 25 bp, SARS Virus
gaactcgtatttgcatcaaccgaaa

SEQ ID NO: 148710 - DNA, 25 bp, SARS Virus
aactcgtatttagatcaaccgaaat

SEQ ID NO: 148711 - DNA, 25 bp, SARS Virus
actcgtatttacgtcaaccgaaatt

SEQ ID NO: 148712 - DNA, 25 bp, SARS Virus
ctcgtatttacagcaaccgaaattt

SEQ ID NO: 148713 - DNA, 25 bp, SARS Virus
tcgtatttacatgaaccgaaattta

SEQ ID NO: 148714 - DNA, 25 bp, SARS Virus
cgtatttacatcgaccgaaatttat

SEQ ID NO: 148715 - DNA, 25 bp, SARS Virus
gtatttacatcagccgaaatttatc

SEQ ID NO: 148716 - DNA, 25 bp, SARS Virus
tatttacatcaagcgaaatttatcg

SEQ ID NO: 148717 - DNA, 25 bp, SARS Virus
atttacatcaacggaaatttatcgg

SEQ ID NO: 148718 - DNA, 25 bp, SARS Virus
tttacatcaaccgaaatttatcggt

SEQ ID NO: 148719 - DNA, 25 bp, SARS Virus
ttacatcaaccggaatttatcggtt

SEQ ID NO: 148720 - DNA, 25 bp, SARS Virus
tacatcaaccgagatttatcggttg

SEQ ID NO: 148721 - DNA, 25 bp, SARS Virus
acatcaaccgaagtttatcggttgt

SEQ ID NO: 148722 - DNA, 25 bp, SARS Virus
catcaaccgaaagttatcggttgtt

SEQ ID NO: 148723 - DNA, 25 bp, SARS Virus
atcaaccgaaatgtatcggttgttt

SEQ ID NO: 148724 - DNA, 25 bp, SARS Virus
tcaaccgaaattgatcggttgtttt

SEQ ID NO: 148725 - DNA, 25 bp, SARS Virus
caaccgaaatttgtcggttgtttta

SEQ ID NO: 148726 - DNA, 25 bp, SARS Virus
aaccgaaatttagcggttgttttat

SEQ ID NO: 148727 - DNA, 25 bp, SARS Virus
accgaaatttatgggttgttttatc

SEQ ID NO: 148728 - DNA, 25 bp, SARS Virus
ccgaaatttatcggttgttttatcc

SEQ ID NO: 148729 - DNA, 25 bp, SARS Virus
cgaaatttatcggttgttttatccg

SEQ ID NO: 148730 - DNA, 25 bp, SARS Virus
gaaatttatcgggtgttttatccga

SEQ ID NO: 148731 - DNA, 25 bp, SARS Virus
aaatttatcggtggttttatccgac

SEQ ID NO: 148732 - DNA, 25 bp, SARS Virus
aatttatcggttgttttatccgacg

SEQ ID NO: 148733 - DNA, 25 bp, SARS Virus
atttatcggttggtttatccgacgt

SEQ ID NO: 148734 - DNA, 25 bp, SARS Virus
tttatcggttgtgttatccgacgtc

SEQ ID NO: 148735 - DNA, 25 bp, SARS Virus
ttatcggttgttgtatccgacgtcg

SEQ ID NO: 148736 - DNA, 25 bp, SARS Virus
tatcggttgtttgatccgacgtcga

SEQ ID NO: 148737 - DNA, 25 bp, SARS Virus
atcggttgttttgtccgacgtcgac

SEQ ID NO: 148738 - DNA, 25 bp, SARS Virus
tcggttgttttagccgacgtcgact

SEQ ID NO: 148739 - DNA, 25 bp, SARS Virus
cggttgttttatgcgacgtcgactg

SEQ ID NO: 148740 - DNA, 25 bp, SARS Virus
ggttgttttatcggacgtcgactgc

SEQ ID NO: 148741 - DNA, 25 bp, SARS Virus
gttgttttatccgacgtcgactgca

SEQ ID NO: 148742 - DNA, 25 bp, SARS Virus
ttgttttatccggcgtcgactgcac

SEQ ID NO: 148743 - DNA, 25 bp, SARS Virus
tgttttatccgaggtcgactgcacg

SEQ ID NO: 148744 - DNA, 25 bp, SARS Virus
gttttatccgacgtcgactgcacgg

SEQ ID NO: 148745 - DNA, 25 bp, SARS Virus
ttttatccgacggcgactgcacggg

SEQ ID NO: 148746 - DNA, 25 bp, SARS Virus
tttatccgacgtggactgcacgggg

SEQ ID NO: 148747 - DNA, 25 bp, SARS Virus
ttatccgacgtcgactgcacggggt

SEQ ID NO: 148748 - DNA, 25 bp, SARS Virus
tatccgacgtcggctgcacggggtt

SEQ ID NO: 148749 - DNA, 25 bp, SARS Virus
atccgacgtcgagtgcacggggttt

SEQ ID NO: 148750 - DNA, 25 bp, SARS Virus
tccgacgtcgacggcacggggttta

SEQ ID NO: 148751 - DNA, 25 bp, SARS Virus
ccgacgtcgactgcacggggtttac

SEQ ID NO: 148752 - DNA, 25 bp, SARS Virus
cgacgtcgactggacggggtttaca

SEQ ID NO: 148753 - DNA, 25 bp, SARS Virus
gacgtcgactgcgcggggtttacag

SEQ ID NO: 148754 - DNA, 25 bp, SARS Virus
acgtcgactgcagggggtttacaga

SEQ ID NO: 148755 - DNA, 25 bp, SARS Virus
cgtcgactgcacggggtttacagaa

SEQ ID NO: 148756 - DNA, 25 bp, SARS Virus
gtcgactgcacggggtttacagaac

SEQ ID NO: 148757 - DNA, 25 bp, SARS Virus
tcgactgcacggggtttacagaact

SEQ ID NO: 148758 - DNA, 25 bp, SARS Virus
cgactgcacggggtttacagaactc

SEQ ID NO: 148759 - DNA, 25 bp, SARS Virus
gactgcacgggggttacagaactcg

SEQ ID NO: 148760 - DNA, 25 bp, SARS Virus
actgcacggggtgtacagaactcgt

SEQ ID NO: 148761 - DNA, 25 bp, SARS Virus
ctgcacggggttgacagaactcgtc

SEQ ID NO: 148762 - DNA, 25 bp, SARS Virus
tgcacggggtttgcagaactcgtcc

SEQ ID NO: 148763 - DNA, 25 bp, SARS Virus
gcacggggtttagagaactcgtcca

SEQ ID NO: 148764 - DNA, 25 bp, SARS Virus
cacggggtttacggaactcgtccac

SEQ ID NO: 148765 - DNA, 25 bp, SARS Virus
acggggtttacagaactcgtccact

SEQ ID NO: 148766 - DNA, 25 bp, SARS Virus
cggggtttacaggactcgtccactt

SEQ ID NO: 148767 - DNA, 25 bp, SARS Virus
ggggtttacagagctcgtccacttt

SEQ ID NO: 148768 - DNA, 25 bp, SARS Virus
gggtttacagaagtcgtccactttt

SEQ ID NO: 148769 - DNA, 25 bp, SARS Virus
ggtttacagaacgcgtccacttttc

SEQ ID NO: 148770 - DNA, 25 bp, SARS Virus
gtttacagaactggtccacttttcc

SEQ ID NO: 148771 - DNA, 25 bp, SARS Virus
tttacagaactcgtccacttttccg

SEQ ID NO: 148772 - DNA, 25 bp, SARS Virus
ttacagaactcggccacttttccga

SEQ ID NO: 148773 - DNA, 25 bp, SARS Virus
tacagaactcgtgcacttttccgac

SEQ ID NO: 148774 - DNA, 25 bp, SARS Virus
acagaactcgtcgacttttccgaca

SEQ ID NO: 148775 - DNA, 25 bp, SARS Virus
cagaactcgtccgcttttccgacat

SEQ ID NO: 148776 - DNA, 25 bp, SARS Virus
agaactcgtccagttttccgacatt

SEQ ID NO: 148777 - DNA, 25 bp, SARS Virus
gaactcgtccacgtttccgacattc

SEQ ID NO: 148778 - DNA, 25 bp, SARS Virus
aactcgtccactgttccgacattct

SEQ ID NO: 148779 - DNA, 25 bp, SARS Virus
actcgtccacttgtccgacattctt

SEQ ID NO: 148780 - DNA, 25 bp, SARS Virus
ctcgtccactttgccgacattctta

SEQ ID NO: 148781 - DNA, 25 bp, SARS Virus
tcgtccacttttgcgacattcttac

SEQ ID NO: 148782 - DNA, 25 bp, SARS Virus
cgtccacttttcggacattcttacc

SEQ ID NO: 148783 - DNA, 25 bp, SARS Virus
gtccacttttccgacattcttaccg

SEQ ID NO: 148784 - DNA, 25 bp, SARS Virus
tccacttttccggcattcttaccga

SEQ ID NO: 148785 - DNA, 25 bp, SARS Virus
ccacttttccgagattcttaccgag

SEQ ID NO: 148786 - DNA, 25 bp, SARS Virus
cacttttccgacgttcttaccgaga

SEQ ID NO: 148787 - DNA, 25 bp, SARS Virus
acttttccgacagtcttaccgagat

SEQ ID NO: 148788 - DNA, 25 bp, SARS Virus
cttttccgacatgcttaccgagatt

SEQ ID NO: 148789 - DNA, 25 bp, SARS Virus
ttttccgacattgttaccgagattt

SEQ ID NO: 148790 - DNA, 25 bp, SARS Virus
tttccgacattcgtaccgagatttt

SEQ ID NO: 148791 - DNA, 25 bp, SARS Virus
ttccgacattctgaccgagatttta

SEQ ID NO: 148792 - DNA, 25 bp, SARS Virus
tccgacattcttgccgagattttaa

SEQ ID NO: 148793 - DNA, 25 bp, SARS Virus
ccgacattcttagcgagattttaaa

SEQ ID NO: 148794 - DNA, 25 bp, SARS Virus
cgacattcttacggagattttaaac

SEQ ID NO: 148795 - DNA, 25 bp, SARS Virus
gacattcttaccgagattttaaaca

SEQ ID NO: 148796 - DNA, 25 bp, SARS Virus
acattcttaccgggattttaaacat

SEQ ID NO: 148797 - DNA, 25 bp, SARS Virus
cattcttaccgagattttaaacatt

SEQ ID NO: 148798 - DNA, 25 bp, SARS Virus
attcttaccgaggttttaaacatta

SEQ ID NO: 148799 - DNA, 25 bp, SARS Virus
ttcttaccgagagtttaaacattac

SEQ ID NO: 148800 - DNA, 25 bp, SARS Virus
tcttaccgagatgttaaacattaca

SEQ ID NO: 148801 - DNA, 25 bp, SARS Virus
cttaccgagattgtaaacattacaa

SEQ ID NO: 148802 - DNA, 25 bp, SARS Virus
ttaccgagatttgaaacattacaat

SEQ ID NO: 148803 - DNA, 25 bp, SARS Virus
taccgagattttgaacattacaatt

SEQ ID NO: 148804 - DNA, 25 bp, SARS Virus
accgagattttagacattacaatta

SEQ ID NO: 148805 - DNA, 25 bp, SARS Virus
ccgagattttaagcattacaattat

SEQ ID NO: 148806 - DNA, 25 bp, SARS Virus
cgagattttaaagattacaattatg

SEQ ID NO: 148807 - DNA, 25 bp, SARS Virus
gagattttaaacgttacaattatgg

SEQ ID NO: 148808 - DNA, 25 bp, SARS Virus
agattttaaacagtacaattatggt

SEQ ID NO: 148809 - DNA, 25 bp, SARS Virus
gattttaaacatgacaattatggtt

SEQ ID NO: 148810 - DNA, 25 bp, SARS Virus
attttaaacattgcaattatggttc

SEQ ID NO: 148811 - DNA, 25 bp, SARS Virus
ttttaaacattagaattatggttct

SEQ ID NO: 148812 - DNA, 25 bp, SARS Virus
tttaaacattacgattatggttctc

SEQ ID NO: 148813 - DNA, 25 bp, SARS Virus
ttaaacattacagttatggttctcc

SEQ ID NO: 148814 - DNA, 25 bp, SARS Virus
taaacattacaagtatggttctccg

SEQ ID NO: 148815 - DNA, 25 bp, SARS Virus
aaacattacaatgatggttctccgt

SEQ ID NO: 148816 - DNA, 25 bp, SARS Virus
aacattacaattgtggttctccgtt

SEQ ID NO: 148817 - DNA, 25 bp, SARS Virus
acattacaattagggttctccgttg

SEQ ID NO: 148818 - DNA, 25 bp, SARS Virus
cattacaattatggttctccgttga

SEQ ID NO: 148819 - DNA, 25 bp, SARS Virus
attacaattatggttctccgttgaa

SEQ ID NO: 148820 - DNA, 25 bp, SARS Virus
ttacaattatgggtctccgttgaat

SEQ ID NO: 148821 - DNA, 25 bp, SARS Virus
tacaattatggtgctccgttgaatt

SEQ ID NO: 148822 - DNA, 25 bp, SARS Virus
acaattatggttgtccgttgaattt

SEQ ID NO: 148823 - DNA, 25 bp, SARS Virus
caattatggttcgccgttgaatttt

SEQ ID NO: 148824 - DNA, 25 bp, SARS Virus
aattatggttctgcgttgaattttt

SEQ ID NO: 148825 - DNA, 25 bp, SARS Virus
attatggttctcggttgaattttta

SEQ ID NO: 148826 - DNA, 25 bp, SARS Virus
ttatggttctccgttgaatttttat

SEQ ID NO: 148827 - DNA, 25 bp, SARS Virus
tatggttctccggtgaatttttatc

SEQ ID NO: 148828 - DNA, 25 bp, SARS Virus
atggttctccgtggaatttttatcc

SEQ ID NO: 148829 - DNA, 25 bp, SARS Virus
tggttctccgttgaatttttatcca

SEQ ID NO: 148830 - DNA, 25 bp, SARS Virus
ggttctccgttggatttttatccaa

SEQ ID NO: 148831 - DNA, 25 bp, SARS Virus
gttctccgttgagtttttatccaaa

SEQ ID NO: 148832 - DNA, 25 bp, SARS Virus
ttctccgttgaagttttatccaaag

SEQ ID NO: 148833 - DNA, 25 bp, SARS Virus
tctccgttgaatgtttatccaaagt

SEQ ID NO: 148834 - DNA, 25 bp, SARS Virus
ctccgttgaattgttatccaaagtt

SEQ ID NO: 148835 - DNA, 25 bp, SARS Virus
tccgttgaatttgtatccaaagttt

SEQ ID NO: 148836 - DNA, 25 bp, SARS Virus
ccgttgaattttgatccaaagtttc

SEQ ID NO: 148837 - DNA, 25 bp, SARS Virus
cgttgaatttttgtccaaagtttca

SEQ ID NO: 148838 - DNA, 25 bp, SARS Virus
gttgaatttttagccaaagtttcac

SEQ ID NO: 148839 - DNA, 25 bp, SARS Virus
ttgaatttttatgcaaagtttcaca

SEQ ID NO: 148840 - DNA, 25 bp, SARS Virus
tgaatttttatcgaaagtttcacaa

SEQ ID NO: 148841 - DNA, 25 bp, SARS Virus
gaatttttatccgaagtttcacaat

SEQ ID NO: 148842 - DNA, 25 bp, SARS Virus
aatttttatccagagtttcacaatt

SEQ ID NO: 148843 - DNA, 25 bp, SARS Virus
atttttatccaaggtttcacaattt

SEQ ID NO: 148844 - DNA, 25 bp, SARS Virus
tttttatccaaagtttcacaatttt

SEQ ID NO: 148845 - DNA, 25 bp, SARS Virus
ttttatccaaaggttcacaattttg

SEQ ID NO: 148846 - DNA, 25 bp, SARS Virus
tttatccaaagtgtcacaattttgg

SEQ ID NO: 148847 - DNA, 25 bp, SARS Virus
ttatccaaagttgcacaattttggt

SEQ ID NO: 148848 - DNA, 25 bp, SARS Virus
tatccaaagtttgacaattttggtc

SEQ ID NO: 148849 - DNA, 25 bp, SARS Virus
atccaaagtttcgcaattttggtct

SEQ ID NO: 148850 - DNA, 25 bp, SARS Virus
tccaaagtttcagaattttggtctt

SEQ ID NO: 148851 - DNA, 25 bp, SARS Virus
ccaaagtttcacgattttggtcttc

SEQ ID NO: 148852 - DNA, 25 bp, SARS Virus
caaagtttcacagttttggtcttcc

SEQ ID NO: 148853 - DNA, 25 bp, SARS Virus
aaagtttcacaagtttggtcttcca

SEQ ID NO: 148854 - DNA, 25 bp, SARS Virus
aagtttcacaatgttggtcttccat

SEQ ID NO: 148855 - DNA, 25 bp, SARS Virus
agtttcacaattgtggtcttccatc

SEQ ID NO: 148856 - DNA, 25 bp, SARS Virus
gtttcacaatttgggtcttccatct

SEQ ID NO: 148857 - DNA, 25 bp, SARS Virus
tttcacaattttggtcttccatcta

SEQ ID NO: 148858 - DNA, 25 bp, SARS Virus
ttcacaattttggtcttccatctag

SEQ ID NO: 148859 - DNA, 25 bp, SARS Virus
tcacaattttgggcttccatctagt

SEQ ID NO: 148860 - DNA, 25 bp, SARS Virus
cacaattttggtgttccatctagtg

SEQ ID NO: 148861 - DNA, 25 bp, SARS Virus
acaattttggtcgtccatctagtgc

SEQ ID NO: 148862 - DNA, 25 bp, SARS Virus
caattttggtctgccatctagtgct

SEQ ID NO: 148863 - DNA, 25 bp, SARS Virus
aattttggtcttgcatctagtgctt

SEQ ID NO: 148864 - DNA, 25 bp, SARS Virus
attttggtcttcgatctagtgcttg

SEQ ID NO: 148865 - DNA, 25 bp, SARS Virus
ttttggtcttccgtctagtgcttga

SEQ ID NO: 148866 - DNA, 25 bp, SARS Virus
tttggtcttccagctagtgcttgat

SEQ ID NO: 148867 - DNA, 25 bp, SARS Virus
ttggtcttccatgtagtgcttgatg

SEQ ID NO: 148868 - DNA, 25 bp, SARS Virus
tggtcttccatcgagtgcttgatgt

SEQ ID NO: 148869 - DNA, 25 bp, SARS Virus
ggtcttccatctggtgcttgatgta

SEQ ID NO: 148870 - DNA, 25 bp, SARS Virus
gtcttccatctagtgcttgatgtag

SEQ ID NO: 148871 - DNA, 25 bp, SARS Virus
tcttccatctagggcttgatgtaga

SEQ ID NO: 148872 - DNA, 25 bp, SARS Virus
cttccatctagtgcttgatgtagat

SEQ ID NO: 148873 - DNA, 25 bp, SARS Virus
gaatcaccgtctttgcggtatcgtg

SEQ ID NO: 148874 - DNA, 25 bp, SARS Virus
aatcaccgtctttgcggtatcgtga

SEQ ID NO: 148875 - DNA, 25 bp, SARS Virus
atcaccgtcttttcggtatcgtgaa

SEQ ID NO: 148876 - DNA, 25 bp, SARS Virus
tcaccgtctttgtggtatcgtgaat

SEQ ID NO: 148877 - DNA, 25 bp, SARS Virus
caccgtctttgctgtatcgtgaatt

SEQ ID NO: 148878 - DNA, 25 bp, SARS Virus
accgtctttgcgttatcgtgaattt

SEQ ID NO: 148879 - DNA, 25 bp, SARS Virus
ccgtctttgcggtatcgtgaatttc

SEQ ID NO: 148880 - DNA, 25 bp, SARS Virus
cgtctttgcggtttcgtgaatttcc

SEQ ID NO: 148881 - DNA, 25 bp, SARS Virus
gtctttgcggtatcgtgaatttcca

SEQ ID NO: 148882 - DNA, 25 bp, SARS Virus
tctttgcggtattgtgaatttccaa

SEQ ID NO: 148883 - DNA, 25 bp, SARS Virus
ctttgcggtatcttgaatttccaac

SEQ ID NO: 148884 - DNA, 25 bp, SARS Virus
tttgcggtatcgtgaatttccaact

SEQ ID NO: 148885 - DNA, 25 bp, SARS Virus
ttgcggtatcgttaatttccaactt

SEQ ID NO: 148886 - DNA, 25 bp, SARS Virus
tgcggtatcgtgtatttccaacttt

SEQ ID NO: 148887 - DNA, 25 bp, SARS Virus
gcggtatcgtgattttccaactttt

SEQ ID NO: 148888 - DNA, 25 bp, SARS Virus
cggtatcgtgaatttccaacttttt

SEQ ID NO: 148889 - DNA, 25 bp, SARS Virus
ggtatcgtgaatttccaactttttt

SEQ ID NO: 148890 - DNA, 25 bp, SARS Virus
gtatcgtgaatttccaacttttttt

SEQ ID NO: 148891 - DNA, 25 bp, SARS Virus
tatcgtgaattttcaacttttttta

SEQ ID NO: 148892 - DNA, 25 bp, SARS Virus
atcgtgaatttctaactttttttac

SEQ ID NO: 148893 - DNA, 25 bp, SARS Virus
tcgtgaatttcctactttttttaca

SEQ ID NO: 148894 - DNA, 25 bp, SARS Virus
cgtgaatttccatctttttttacaa

SEQ ID NO: 148895 - DNA, 25 bp, SARS Virus
gtgaatttccaattttttttacaac

SEQ ID NO: 148896 - DNA, 25 bp, SARS Virus
tgaatttccaactttttttacaact

SEQ ID NO: 148897 - DNA, 25 bp, SARS Virus
gaatttccaactttttttacaactc

SEQ ID NO: 148898 - DNA, 25 bp, SARS Virus
aatttccaactttttttacaactca

SEQ ID NO: 148899 - DNA, 25 bp, SARS Virus
atttccaactttttttacaactcaa

SEQ ID NO: 148900 - DNA, 25 bp, SARS Virus
tttccaactttttttacaactcaac

SEQ ID NO: 148901 - DNA, 25 bp, SARS Virus
ttccaactttttttacaactcaaca

SEQ ID NO: 148902 - DNA, 25 bp, SARS Virus
tccaactttttttacaactcaacat

SEQ ID NO: 148903 - DNA, 25 bp, SARS Virus
ccaacttttttttcaactcaacatc

SEQ ID NO: 148904 - DNA, 25 bp, SARS Virus
caactttttttataactcaacatct

SEQ ID NO: 148905 - DNA, 25 bp, SARS Virus
aactttttttactactcaacatctc

SEQ ID NO: 148906 - DNA, 25 bp, SARS Virus
actttttttacatctcaacatctcg

SEQ ID NO: 148907 - DNA, 25 bp, SARS Virus
ctttttttacaattcaacatctcgt

SEQ ID NO: 148908 - DNA, 25 bp, SARS Virus
tttttttacaactcaacatctcgtg

SEQ ID NO: 148909 - DNA, 25 bp, SARS Virus
ttttttacaacttaacatctcgtgt

SEQ ID NO: 148910 - DNA, 25 bp, SARS Virus
tttttacaactctacatctcgtgtc

SEQ ID NO: 148911 - DNA, 25 bp, SARS Virus
ttttacaactcatcatctcgtgtct

SEQ ID NO: 148912 - DNA, 25 bp, SARS Virus
tttacaactcaatatctcgtgtctc

SEQ ID NO: 148913 - DNA, 25 bp, SARS Virus
ttacaactcaacttctcgtgtctca

SEQ ID NO: 148914 - DNA, 25 bp, SARS Virus
tacaactcaacatctcgtgtctcat

SEQ ID NO: 148915 - DNA, 25 bp, SARS Virus
acaactcaacatttcgtgtctcatt

SEQ ID NO: 148916 - DNA, 25 bp, SARS Virus
caactcaacatctcgtgtctcatta

SEQ ID NO: 148917 - DNA, 25 bp, SARS Virus
aactcaacatcttgtgtctcattag

SEQ ID NO: 148918 - DNA, 25 bp, SARS Virus
actcaacatctcttgtctcattagt

SEQ ID NO: 148919 - DNA, 25 bp, SARS Virus
ctcaacatctcgtgtctcattagtc

SEQ ID NO: 148920 - DNA, 25 bp, SARS Virus
tcaacatctcgtttctcattagtcg

SEQ ID NO: 148921 - DNA, 25 bp, SARS Virus
caacatctcgtgtctcattagtcgt

SEQ ID NO: 148922 - DNA, 25 bp, SARS Virus
aacatctcgtgtttcattagtcgtt

SEQ ID NO: 148923 - DNA, 25 bp, SARS Virus
acatctcgtgtctcattagtcgttg

SEQ ID NO: 148924 - DNA, 25 bp, SARS Virus
catctcgtgtcttattagtcgttgt

SEQ ID NO: 148925 - DNA, 25 bp, SARS Virus
atctcgtgtctctttagtcgttgtg

SEQ ID NO: 148926 - DNA, 25 bp, SARS Virus
tctcgtgtctcattagtcgttgtgt

SEQ ID NO: 148927 - DNA, 25 bp, SARS Virus
ctcgtgtctcattagtcgttgtgtt

SEQ ID NO: 148928 - DNA, 25 bp, SARS Virus
tcgtgtctcatttgtcgttgtgtta

SEQ ID NO: 148929 - DNA, 25 bp, SARS Virus
cgtgtctcattattcgttgtgttaa

SEQ ID NO: 148930 - DNA, 25 bp, SARS Virus
gtgtctcattagtcgttgtgttaat

SEQ ID NO: 148931 - DNA, 25 bp, SARS Virus
tgtctcattagttgttgtgttaatc

SEQ ID NO: 148932 - DNA, 25 bp, SARS Virus
gtctcattagtctttgtgttaatct

SEQ ID NO: 148933 - DNA, 25 bp, SARS Virus
tctcattagtcgttgtgttaatctt

SEQ ID NO: 148934 - DNA, 25 bp, SARS Virus
ctcattagtcgttgtgttaatcttt

SEQ ID NO: 148935 - DNA, 25 bp, SARS Virus
tcattagtcgttttgttaatcttta

SEQ ID NO: 148936 - DNA, 25 bp, SARS Virus
cattagtcgttgtgttaatctttaa

SEQ ID NO: 148937 - DNA, 25 bp, SARS Virus
attagtcgttgttttaatctttaaa

SEQ ID NO: 148938 - DNA, 25 bp, SARS Virus
ttagtcgttgtgttaatctttaaaa

SEQ ID NO: 148939 - DNA, 25 bp, SARS Virus
tagtcgttgtgttaatctttaaaaa

SEQ ID NO: 148940 - DNA, 25 bp, SARS Virus
agtcgttgtgtttatctttaaaaaa

SEQ ID NO: 148941 - DNA, 25 bp, SARS Virus
gtcgttgtgttattctttaaaaaaa

SEQ ID NO: 148942 - DNA, 25 bp, SARS Virus
tcgttgtgttaatctttaaaaaaaa

SEQ ID NO: 148943 - DNA, 25 bp, SARS Virus
cgttgtgttaatttttaaaaaaaag

SEQ ID NO: 148944 - DNA, 25 bp, SARS Virus
gttgtgttaatctttaaaaaaaaga

SEQ ID NO: 148945 - DNA, 25 bp, SARS Virus
ttgtgttaatctttaaaaaaaagag

SEQ ID NO: 148946 - DNA, 25 bp, SARS Virus
tgtgttaatctttaaaaaaaagaga

SEQ ID NO: 148947 - DNA, 25 bp, SARS Virus
gtgttaatcttttaaaaaaagagag

SEQ ID NO: 148948 - DNA, 25 bp, SARS Virus
tgttaatctttataaaaaagagagg

SEQ ID NO: 148949 - DNA, 25 bp, SARS Virus
gttaatctttaataaaaagagaggg

SEQ ID NO: 148950 - DNA, 25 bp, SARS Virus
ttaatctttaaataaaagagagggt

SEQ ID NO: 148951 - DNA, 25 bp, SARS Virus
taatctttaaaataaagagagggta

SEQ ID NO: 148952 - DNA, 25 bp, SARS Virus
aatctttaaaaataagagagggtac

SEQ ID NO: 148953 - DNA, 25 bp, SARS Virus
atctttaaaaaatagagagggtacg

SEQ ID NO: 148954 - DNA, 25 bp, SARS Virus
tctttaaaaaaatgagagggtacgt

SEQ ID NO: 148955 - DNA, 25 bp, SARS Virus
ctttaaaaaaaatagagggtacgta

SEQ ID NO: 148956 - DNA, 25 bp, SARS Virus
tttaaaaaaaagtgagggtacgtat

SEQ ID NO: 148957 - DNA, 25 bp, SARS Virus
ttaaaaaaaagatagggtacgtatc

SEQ ID NO: 148958 - DNA, 25 bp, SARS Virus
taaaaaaaagagtgggtacgtatct

SEQ ID NO: 148959 - DNA, 25 bp, SARS Virus
aaaaaaaagagatggtacgtatctg

SEQ ID NO: 148960 - DNA, 25 bp, SARS Virus
aaaaaaagagagtgtacgtatctgt

SEQ ID NO: 148961 - DNA, 25 bp, SARS Virus
aaaaaagagaggttacgtatctgtc

SEQ ID NO: 148962 - DNA, 25 bp, SARS Virus
aaaaagagagggtacgtatctgtct

SEQ ID NO: 148963 - DNA, 25 bp, SARS Virus
aaaagagagggttcgtatctgtctt

SEQ ID NO: 148964 - DNA, 25 bp, SARS Virus
aaagagagggtatgtatctgtcttc

SEQ ID NO: 148965 - DNA, 25 bp, SARS Virus
aagagagggtacttatctgtcttcc

SEQ ID NO: 148966 - DNA, 25 bp, SARS Virus
agagagggtacgtatctgtcttccc

SEQ ID NO: 148967 - DNA, 25 bp, SARS Virus
gagagggtacgtttctgtcttccct

SEQ ID NO: 148968 - DNA, 25 bp, SARS Virus
agagggtacgtatctgtcttccctt

SEQ ID NO: 148969 - DNA, 25 bp, SARS Virus
gagggtacgtatttgtcttccctta

SEQ ID NO: 148970 - DNA, 25 bp, SARS Virus
agggtacgtatctgtcttcccttaa

SEQ ID NO: 148971 - DNA, 25 bp, SARS Virus
gggtacgtatctttcttcccttaaa

SEQ ID NO: 148972 - DNA, 25 bp, SARS Virus
ggtacgtatctgtcttcccttaaat

SEQ ID NO: 148973 - DNA, 25 bp, SARS Virus
gtacgtatctgttttcccttaaatc

SEQ ID NO: 148974 - DNA, 25 bp, SARS Virus
tacgtatctgtcttcccttaaatca

SEQ ID NO: 148975 - DNA, 25 bp, SARS Virus
acgtatctgtcttcccttaaatcat

SEQ ID NO: 148976 - DNA, 25 bp, SARS Virus
cgtatctgtctttccttaaatcatc

SEQ ID NO: 148977 - DNA, 25 bp, SARS Virus
gtatctgtcttctcttaaatcatcg

SEQ ID NO: 148978 - DNA, 25 bp, SARS Virus
tatctgtcttcctttaaatcatcgt

SEQ ID NO: 148979 - DNA, 25 bp, SARS Virus
atctgtcttcccttaaatcatcgta

SEQ ID NO: 148980 - DNA, 25 bp, SARS Virus
tctgtcttcccttaaatcatcgtaa

SEQ ID NO: 148981 - DNA, 25 bp, SARS Virus
ctgtcttccctttaatcatcgtaat

SEQ ID NO: 148982 - DNA, 25 bp, SARS Virus
tgtcttcccttatatcatcgtaatt

SEQ ID NO: 148983 - DNA, 25 bp, SARS Virus
gtcttcccttaattcatcgtaattt

SEQ ID NO: 148984 - DNA, 25 bp, SARS Virus
tcttcccttaaatcatcgtaatttt

SEQ ID NO: 148985 - DNA, 25 bp, SARS Virus
cttcccttaaattatcgtaattttt

SEQ ID NO: 148986 - DNA, 25 bp, SARS Virus
ttcccttaaatcttcgtaatttttg

SEQ ID NO: 148987 - DNA, 25 bp, SARS Virus
tcccttaaatcatcgtaatttttgg

SEQ ID NO: 148988 - DNA, 25 bp, SARS Virus
cccttaaatcattgtaatttttgga

SEQ ID NO: 148989 - DNA, 25 bp, SARS Virus
ccttaaatcatcttaatttttggag

SEQ ID NO: 148990 - DNA, 25 bp, SARS Virus
cttaaatcatcgtaatttttggaga

SEQ ID NO: 148991 - DNA, 25 bp, SARS Virus
ttaaatcatcgttatttttggagag

SEQ ID NO: 148992 - DNA, 25 bp, SARS Virus
taaatcatcgtattttttggagagg

SEQ ID NO: 148993 - DNA, 25 bp, SARS Virus
aaatcatcgtaatttttggagaggt

SEQ ID NO: 148994 - DNA, 25 bp, SARS Virus
aatcatcgtaatttttggagaggtt

SEQ ID NO: 148995 - DNA, 25 bp, SARS Virus
atcatcgtaatttttggagaggttt

SEQ ID NO: 148996 - DNA, 25 bp, SARS Virus
tcatcgtaatttttggagaggtttt

SEQ ID NO: 148997 - DNA, 25 bp, SARS Virus
catcgtaatttttggagaggttttc

SEQ ID NO: 148998 - DNA, 25 bp, SARS Virus
atcgtaattttttgagaggttttcc

SEQ ID NO: 148999 - DNA, 25 bp, SARS Virus
tcgtaatttttgtagaggttttcct

SEQ ID NO: 149000 - DNA, 25 bp, SARS Virus
cgtaatttttggtgaggttttcctg

SEQ ID NO: 149001 - DNA, 25 bp, SARS Virus
gtaatttttggataggttttcctgt

SEQ ID NO: 149002 - DNA, 25 bp, SARS Virus
taatttttggagtggttttcctgtg

SEQ ID NO: 149003 - DNA, 25 bp, SARS Virus
aatttttggagatgttttcctgtgt

SEQ ID NO: 149004 - DNA, 25 bp, SARS Virus
atttttggagagtttttcctgtgtt

SEQ ID NO: 149005 - DNA, 25 bp, SARS Virus
tttttggagaggttttcctgtgttc

SEQ ID NO: 149006 - DNA, 25 bp, SARS Virus
ttttggagaggttttcctgtgttca

SEQ ID NO: 149007 - DNA, 25 bp, SARS Virus
tttggagaggttttcctgtgttcaa

SEQ ID NO: 149008 - DNA, 25 bp, SARS Virus
ttggagaggttttcctgtgttcaaa

SEQ ID NO: 149009 - DNA, 25 bp, SARS Virus
tggagaggtttttctgtgttcaaac

SEQ ID NO: 149010 - DNA, 25 bp, SARS Virus
ggagaggttttcttgtgttcaaaca

SEQ ID NO: 149011 - DNA, 25 bp, SARS Virus
gagaggttttcctgtgttcaaacat

SEQ ID NO: 149012 - DNA, 25 bp, SARS Virus
agaggttttcctttgttcaaacatt

SEQ ID NO: 149013 - DNA, 25 bp, SARS Virus
gaggttttcctgtgttcaaacatta

SEQ ID NO: 149014 - DNA, 25 bp, SARS Virus
aggttttcctgttttcaaacattat

SEQ ID NO: 149015 - DNA, 25 bp, SARS Virus
ggttttcctgtgttcaaacattata

SEQ ID NO: 149016 - DNA, 25 bp, SARS Virus
gttttcctgtgttcaaacattataa

SEQ ID NO: 149017 - DNA, 25 bp, SARS Virus
ttttcctgtgtttaaacattataat

SEQ ID NO: 149018 - DNA, 25 bp, SARS Virus
tttcctgtgttctaacattataatc

SEQ ID NO: 149019 - DNA, 25 bp, SARS Virus
ttcctgtgttcatacattataatcc

SEQ ID NO: 149020 - DNA, 25 bp, SARS Virus
tcctgtgttcaatcattataatccc

SEQ ID NO: 149021 - DNA, 25 bp, SARS Virus
cctgtgttcaaatattataatccct

SEQ ID NO: 149022 - DNA, 25 bp, SARS Virus
ctgtgttcaaactttataatccctt

SEQ ID NO: 149023 - DNA, 25 bp, SARS Virus
tgtgttcaaacattataatccctta

SEQ ID NO: 149024 - DNA, 25 bp, SARS Virus
gtgttcaaacattataatcccttag

SEQ ID NO: 149025 - DNA, 25 bp, SARS Virus
tgttcaaacattttaatcccttaga

SEQ ID NO: 149026 - DNA, 25 bp, SARS Virus
gttcaaacattataatcccttagag

SEQ ID NO: 149027 - DNA, 25 bp, SARS Virus
ttcaaacattattatcccttagagt

SEQ ID NO: 149028 - DNA, 25 bp, SARS Virus
tcaaacattatattcccttagagtg

SEQ ID NO: 149029 - DNA, 25 bp, SARS Virus
caaacattataatcccttagagtgt

SEQ ID NO: 149030 - DNA, 25 bp, SARS Virus
aaacattataattccttagagtgtt

SEQ ID NO: 149031 - DNA, 25 bp, SARS Virus
aacattataatctcttagagtgttg

SEQ ID NO: 149032 - DNA, 25 bp, SARS Virus
acattataatcctttagagtgttgt

SEQ ID NO: 149033 - DNA, 25 bp, SARS Virus
cattataatcccttagagtgttgta

SEQ ID NO: 149034 - DNA, 25 bp, SARS Virus
attataatcccttagagtgttgtag

SEQ ID NO: 149035 - DNA, 25 bp, SARS Virus
ttataatccctttgagtgttgtaga

SEQ ID NO: 149036 - DNA, 25 bp, SARS Virus
tataatcccttatagtgttgtagag

SEQ ID NO: 149037 - DNA, 25 bp, SARS Virus
ataatcccttagtgtgttgtagagg

SEQ ID NO: 149038 - DNA, 25 bp, SARS Virus
taatcccttagattgttgtagagga

SEQ ID NO: 149039 - DNA, 25 bp, SARS Virus
aatcccttagagtgttgtagaggac

SEQ ID NO: 149040 - DNA, 25 bp, SARS Virus
atcccttagagttttgtagaggact

SEQ ID NO: 149041 - DNA, 25 bp, SARS Virus
tcccttagagtgttgtagaggactc

SEQ ID NO: 149042 - DNA, 25 bp, SARS Virus
cccttagagtgttgtagaggactcc

SEQ ID NO: 149043 - DNA, 25 bp, SARS Virus
ccttagagtgttttagaggactccc

SEQ ID NO: 149044 - DNA, 25 bp, SARS Virus
cttagagtgttgtagaggactccct

SEQ ID NO: 149045 - DNA, 25 bp, SARS Virus
ttagagtgttgttgaggactccctt

SEQ ID NO: 149046 - DNA, 25 bp, SARS Virus
tagagtgttgtataggactcccttg

SEQ ID NO: 149047 - DNA, 25 bp, SARS Virus
agagtgttgtagtggactcccttgt

SEQ ID NO: 149048 - DNA, 25 bp, SARS Virus
gagtgttgtagatgactcccttgtt

SEQ ID NO: 149049 - DNA, 25 bp, SARS Virus
agtgttgtagagtactcccttgttg

SEQ ID NO: 149050 - DNA, 25 bp, SARS Virus
gtgttgtagaggtctcccttgttgg

SEQ ID NO: 149051 - DNA, 25 bp, SARS Virus
tgttgtagaggattcccttgttggg

SEQ ID NO: 149052 - DNA, 25 bp, SARS Virus
gttgtagaggactcccttgttggga

SEQ ID NO: 149053 - DNA, 25 bp, SARS Virus
ttgtagaggacttccttgttgggac

SEQ ID NO: 149054 - DNA, 25 bp, SARS Virus
tgtagaggactctcttgttgggact

SEQ ID NO: 149055 - DNA, 25 bp, SARS Virus
gtagaggactcctttgttgggactt

SEQ ID NO: 149056 - DNA, 25 bp, SARS Virus
tagaggactcccttgttgggacttt

SEQ ID NO: 149057 - DNA, 25 bp, SARS Virus
agaggactcccttgttgggacttta

SEQ ID NO: 149058 - DNA, 25 bp, SARS Virus
gaggactccctttttgggactttaa

SEQ ID NO: 149059 - DNA, 25 bp, SARS Virus
aggactcccttgttgggactttaat

SEQ ID NO: 149060 - DNA, 25 bp, SARS Virus
ggactcccttgttgggactttaatc

SEQ ID NO: 149061 - DNA, 25 bp, SARS Virus
gactcccttgtttggactttaatct

SEQ ID NO: 149062 - DNA, 25 bp, SARS Virus
actcccttgttgtgactttaatctc

SEQ ID NO: 149063 - DNA, 25 bp, SARS Virus
ctcccttgttggtactttaatctcc

SEQ ID NO: 149064 - DNA, 25 bp, SARS Virus
tcccttgttgggtctttaatctcca

SEQ ID NO: 149065 - DNA, 25 bp, SARS Virus
cccttgttgggattttaatctccag

SEQ ID NO: 149066 - DNA, 25 bp, SARS Virus
ccttgttgggactttaatctccaga

SEQ ID NO: 149067 - DNA, 25 bp, SARS Virus
cttgttgggactttaatctccagac

SEQ ID NO: 149068 - DNA, 25 bp, SARS Virus
ttgttgggactttaatctccagacc

SEQ ID NO: 149069 - DNA, 25 bp, SARS Virus
tgttgggacttttatctccagacca

SEQ ID NO: 149070 - DNA, 25 bp, SARS Virus
gttgggactttattctccagaccat

SEQ ID NO: 149071 - DNA, 25 bp, SARS Virus
ttgggactttaatctccagaccatt

SEQ ID NO: 149072 - DNA, 25 bp, SARS Virus
tgggactttaatttccagaccattt

SEQ ID NO: 149073 - DNA, 25 bp, SARS Virus
gggactttaatctccagaccattta

SEQ ID NO: 149074 - DNA, 25 bp, SARS Virus
ggactttaatcttcagaccatttaa

SEQ ID NO: 149075 - DNA, 25 bp, SARS Virus
gactttaatctctagaccatttaag

SEQ ID NO: 149076 - DNA, 25 bp, SARS Virus
actttaatctcctgaccatttaagg

SEQ ID NO: 149077 - DNA, 25 bp, SARS Virus
ctttaatctccataccatttaagga

SEQ ID NO: 149078 - DNA, 25 bp, SARS Virus
tttaatctccagtccatttaaggaa

SEQ ID NO: 149079 - DNA, 25 bp, SARS Virus
ttaatctccagatcatttaaggaaa

SEQ ID NO: 149080 - DNA, 25 bp, SARS Virus
taatctccagactatttaaggaaac

SEQ ID NO: 149081 - DNA, 25 bp, SARS Virus
aatctccagaccttttaaggaaaca

SEQ ID NO: 149082 - DNA, 25 bp, SARS Virus
atctccagaccatttaaggaaacag

SEQ ID NO: 149083 - DNA, 25 bp, SARS Virus
tctccagaccatttaaggaaacagt

SEQ ID NO: 149084 - DNA, 25 bp, SARS Virus
ctccagaccatttaaggaaacagtt

SEQ ID NO: 149085 - DNA, 25 bp, SARS Virus
tccagaccattttaggaaacagtta

SEQ ID NO: 149086 - DNA, 25 bp, SARS Virus
ccagaccatttatggaaacagttag

SEQ ID NO: 149087 - DNA, 25 bp, SARS Virus
cagaccatttaatgaaacagttaga

SEQ ID NO: 149088 - DNA, 25 bp, SARS Virus
agaccatttaagtaaacagttagag

SEQ ID NO: 149089 - DNA, 25 bp, SARS Virus
gaccatttaaggtaacagttagagt

SEQ ID NO: 149090 - DNA, 25 bp, SARS Virus
accatttaaggatacagttagagtt

SEQ ID NO: 149091 - DNA, 25 bp, SARS Virus
ccatttaaggaatcagttagagttt

SEQ ID NO: 149092 - DNA, 25 bp, SARS Virus
catttaaggaaatagttagagtttc

SEQ ID NO: 149093 - DNA, 25 bp, SARS Virus
atttaaggaaactgttagagtttcg

SEQ ID NO: 149094 - DNA, 25 bp, SARS Virus
tttaaggaaacatttagagtttcga

SEQ ID NO: 149095 - DNA, 25 bp, SARS Virus
ttaaggaaacagttagagtttcgag

SEQ ID NO: 149096 - DNA, 25 bp, SARS Virus
taaggaaacagttagagtttcgaga

SEQ ID NO: 149097 - DNA, 25 bp, SARS Virus
aaggaaacagtttgagtttcgagaa

SEQ ID NO: 149098 - DNA, 25 bp, SARS Virus
aggaaacagttatagtttcgagaat

SEQ ID NO: 149099 - DNA, 25 bp, SARS Virus
ggaaacagttagtgtttcgagaatt

SEQ ID NO: 149100 - DNA, 25 bp, SARS Virus
gaaacagttagattttcgagaattg

SEQ ID NO: 149101 - DNA, 25 bp, SARS Virus
aaacagttagagtttcgagaattgt

SEQ ID NO: 149102 - DNA, 25 bp, SARS Virus
aacagttagagtttcgagaattgtc

SEQ ID NO: 149103 - DNA, 25 bp, SARS Virus
acagttagagtttcgagaattgtct

SEQ ID NO: 149104 - DNA, 25 bp, SARS Virus
cagttagagttttgagaattgtctc

SEQ ID NO: 149105 - DNA, 25 bp, SARS Virus
agttagagtttctagaattgtctcg

SEQ ID NO: 149106 - DNA, 25 bp, SARS Virus
gttagagtttcgtgaattgtctcgt

SEQ ID NO: 149107 - DNA, 25 bp, SARS Virus
ttagagtttcgataattgtctcgta

SEQ ID NO: 149108 - DNA, 25 bp, SARS Virus
tagagtttcgagtattgtctcgtaa

SEQ ID NO: 149109 - DNA, 25 bp, SARS Virus
agagtttcgagatttgtctcgtaaa

SEQ ID NO: 149110 - DNA, 25 bp, SARS Virus
gagtttcgagaattgtctcgtaaac

SEQ ID NO: 149111 - DNA, 25 bp, SARS Virus
agtttcgagaattgtctcgtaaact

SEQ ID NO: 149112 - DNA, 25 bp, SARS Virus
gtttcgagaattttctcgtaaactc

SEQ ID NO: 149113 - DNA, 25 bp, SARS Virus
tttcgagaattgtctcgtaaactca

SEQ ID NO: 149114 - DNA, 25 bp, SARS Virus
ttcgagaattgtttcgtaaactcaa

SEQ ID NO: 149115 - DNA, 25 bp, SARS Virus
tcgagaattgtctcgtaaactcaag

SEQ ID NO: 149116 - DNA, 25 bp, SARS Virus
cgagaattgtcttgtaaactcaagt

SEQ ID NO: 149117 - DNA, 25 bp, SARS Virus
gagaattgtctcttaaactcaagtc

SEQ ID NO: 149118 - DNA, 25 bp, SARS Virus
agaattgtctcgtaaactcaagtcg

SEQ ID NO: 149119 - DNA, 25 bp, SARS Virus
gaattgtctcgttaactcaagtcgt

SEQ ID NO: 149120 - DNA, 25 bp, SARS Virus
aattgtctcgtatactcaagtcgtt

SEQ ID NO: 149121 - DNA, 25 bp, SARS Virus
attgtctcgtaatctcaagtcgttc

SEQ ID NO: 149122 - DNA, 25 bp, SARS Virus
ttgtctcgtaaattcaagtcgttca

SEQ ID NO: 149123 - DNA, 25 bp, SARS Virus
tgtctcgtaaactcaagtcgttcac

SEQ ID NO: 149124 - DNA, 25 bp, SARS Virus
gtctcgtaaacttaagtcgttcacc

SEQ ID NO: 149125 - DNA, 25 bp, SARS Virus
tctcgtaaactctagtcgttcacct

SEQ ID NO: 149126 - DNA, 25 bp, SARS Virus
ctcgtaaactcatgtcgttcaccta

SEQ ID NO: 149127 - DNA, 25 bp, SARS Virus
tcgtaaactcaattcgttcacctaa

SEQ ID NO: 149128 - DNA, 25 bp, SARS Virus
cgtaaactcaagtcgttcacctaaa

SEQ ID NO: 149129 - DNA, 25 bp, SARS Virus
gtaaactcaagttgttcacctaaaa

SEQ ID NO: 149130 - DNA, 25 bp, SARS Virus
taaactcaagtctttcacctaaaac

SEQ ID NO: 149131 - DNA, 25 bp, SARS Virus
aaactcaagtcgttcacctaaaact

SEQ ID NO: 149132 - DNA, 25 bp, SARS Virus
aactcaagtcgttcacctaaaactc

SEQ ID NO: 149133 - DNA, 25 bp, SARS Virus
actcaagtcgtttacctaaaactct

SEQ ID NO: 149134 - DNA, 25 bp, SARS Virus
ctcaagtcgttctcctaaaactctt

SEQ ID NO: 149135 - DNA, 25 bp, SARS Virus
tcaagtcgttcatctaaaactcttg

SEQ ID NO: 149136 - DNA, 25 bp, SARS Virus
caagtcgttcacttaaaactcttgt

SEQ ID NO: 149137 - DNA, 25 bp, SARS Virus
aagtcgttcacctaaaactcttgtt

SEQ ID NO: 149138 - DNA, 25 bp, SARS Virus
agtcgttcaccttaaactcttgtta

SEQ ID NO: 149139 - DNA, 25 bp, SARS Virus
gtcgttcacctataactcttgttag

SEQ ID NO: 149140 - DNA, 25 bp, SARS Virus
tcgttcacctaatactcttgttagt

SEQ ID NO: 149141 - DNA, 25 bp, SARS Virus
cgttcacctaaatctcttgttagtt

SEQ ID NO: 149142 - DNA, 25 bp, SARS Virus
gttcacctaaaattcttgttagttg

SEQ ID NO: 149143 - DNA, 25 bp, SARS Virus
ttcacctaaaactcttgttagttgt

SEQ ID NO: 149144 - DNA, 25 bp, SARS Virus
tcacctaaaacttttgttagttgtc

SEQ ID NO: 149145 - DNA, 25 bp, SARS Virus
cacctaaaactcttgttagttgtcg

SEQ ID NO: 149146 - DNA, 25 bp, SARS Virus
acctaaaactcttgttagttgtcgt

SEQ ID NO: 149147 - DNA, 25 bp, SARS Virus
cctaaaactctttttagttgtcgta

SEQ ID NO: 149148 - DNA, 25 bp, SARS Virus
ctaaaactcttgttagttgtcgtag

SEQ ID NO: 149149 - DNA, 25 bp, SARS Virus
taaaactcttgttagttgtcgtaga

SEQ ID NO: 149150 - DNA, 25 bp, SARS Virus
aaaactcttgtttgttgtcgtagac

SEQ ID NO: 149151 - DNA, 25 bp, SARS Virus
aaactcttgttatttgtcgtagaca

SEQ ID NO: 149152 - DNA, 25 bp, SARS Virus
aactcttgttagttgtcgtagacac

SEQ ID NO: 149153 - DNA, 25 bp, SARS Virus
actcttgttagttgtcgtagacact

SEQ ID NO: 149154 - DNA, 25 bp, SARS Virus
ctcttgttagttttcgtagacacta

SEQ ID NO: 149155 - DNA, 25 bp, SARS Virus
tcttgttagttgtcgtagacactaa

SEQ ID NO: 149156 - DNA, 25 bp, SARS Virus
cttgttagttgttgtagacactaac

SEQ ID NO: 149157 - DNA, 25 bp, SARS Virus
ttgttagttgtcttagacactaaca

SEQ ID NO: 149158 - DNA, 25 bp, SARS Virus
tgttagttgtcgtagacactaacat

SEQ ID NO: 149159 - DNA, 25 bp, SARS Virus
gttagttgtcgttgacactaacatg

SEQ ID NO: 149160 - DNA, 25 bp, SARS Virus
ttagttgtcgtatacactaacatgg

SEQ ID NO: 149161 - DNA, 25 bp, SARS Virus
tagttgtcgtagtcactaacatggt

SEQ ID NO: 149162 - DNA, 25 bp, SARS Virus
agttgtcgtagatactaacatggta

SEQ ID NO: 149163 - DNA, 25 bp, SARS Virus
gttgtcgtagactctaacatggtaa

SEQ ID NO: 149164 - DNA, 25 bp, SARS Virus
ttgtcgtagacattaacatggtaaa

SEQ ID NO: 149165 - DNA, 25 bp, SARS Virus
tgtcgtagacactaacatggtaaaa

SEQ ID NO: 149166 - DNA, 25 bp, SARS Virus
gtcgtagacacttacatggtaaaag

SEQ ID NO: 149167 - DNA, 25 bp, SARS Virus
tcgtagacactatcatggtaaaagt

SEQ ID NO: 149168 - DNA, 25 bp, SARS Virus
cgtagacactaatatggtaaaagta

SEQ ID NO: 149169 - DNA, 25 bp, SARS Virus
gtagacactaacttggtaaaagtag

SEQ ID NO: 149170 - DNA, 25 bp, SARS Virus
tagacactaacatggtaaaagtagt

SEQ ID NO: 149171 - DNA, 25 bp, SARS Virus
agacactaacattgtaaaagtagta

SEQ ID NO: 149172 - DNA, 25 bp, SARS Virus
gacactaacatgttaaaagtagtat

SEQ ID NO: 149173 - DNA, 25 bp, SARS Virus
acactaacatggtaaaagtagtatg

SEQ ID NO: 149174 - DNA, 25 bp, SARS Virus
cactaacatggttaaagtagtatga

SEQ ID NO: 149175 - DNA, 25 bp, SARS Virus
actaacatggtataagtagtatgaa

SEQ ID NO: 149176 - DNA, 25 bp, SARS Virus
ctaacatggtaatagtagtatgaac

SEQ ID NO: 149177 - DNA, 25 bp, SARS Virus
taacatggtaaatgtagtatgaact

SEQ ID NO: 149178 - DNA, 25 bp, SARS Virus
aacatggtaaaattagtatgaactc

SEQ ID NO: 149179 - DNA, 25 bp, SARS Virus
acatggtaaaagtagtatgaactcg

SEQ ID NO: 149180 - DNA, 25 bp, SARS Virus
catggtaaaagttgtatgaactcgt

SEQ ID NO: 149181 - DNA, 25 bp, SARS Virus
atggtaaaagtattatgaactcgta

SEQ ID NO: 149182 - DNA, 25 bp, SARS Virus
tggtaaaagtagtatgaactcgtat

SEQ ID NO: 149183 - DNA, 25 bp, SARS Virus
ggtaaaagtagtttgaactcgtatt

SEQ ID NO: 149184 - DNA, 25 bp, SARS Virus
gtaaaagtagtatgaactcgtattt

SEQ ID NO: 149185 - DNA, 25 bp, SARS Virus
taaaagtagtattaactcgtattta

SEQ ID NO: 149186 - DNA, 25 bp, SARS Virus
aaaagtagtatgtactcgtatttac

SEQ ID NO: 149187 - DNA, 25 bp, SARS Virus
aaagtagtatgatctcgtatttaca

SEQ ID NO: 149188 - DNA, 25 bp, SARS Virus
aagtagtatgaattcgtatttacat

SEQ ID NO: 149189 - DNA, 25 bp, SARS Virus
agtagtatgaactcgtatttacatc

SEQ ID NO: 149190 - DNA, 25 bp, SARS Virus
gtagtatgaacttgtatttacatca

SEQ ID NO: 149191 - DNA, 25 bp, SARS Virus
tagtatgaactcttatttacatcaa

SEQ ID NO: 149192 - DNA, 25 bp, SARS Virus
agtatgaactcgtatttacatcaac

SEQ ID NO: 149193 - DNA, 25 bp, SARS Virus
gtatgaactcgtttttacatcaacc

SEQ ID NO: 149194 - DNA, 25 bp, SARS Virus
tatgaactcgtatttacatcaaccg

SEQ ID NO: 149195 - DNA, 25 bp, SARS Virus
atgaactcgtatttacatcaaccga

SEQ ID NO: 149196 - DNA, 25 bp, SARS Virus
tgaactcgtatttacatcaaccgaa

SEQ ID NO: 149197 - DNA, 25 bp, SARS Virus
gaactcgtattttcatcaaccgaaa

SEQ ID NO: 149198 - DNA, 25 bp, SARS Virus
aactcgtatttatatcaaccgaaat

SEQ ID NO: 149199 - DNA, 25 bp, SARS Virus
actcgtatttacttcaaccgaaatt

SEQ ID NO: 149200 - DNA, 25 bp, SARS Virus
ctcgtatttacatcaaccgaaattt

SEQ ID NO: 149201 - DNA, 25 bp, SARS Virus
tcgtatttacattaaccgaaattta

SEQ ID NO: 149202 - DNA, 25 bp, SARS Virus
cgtatttacatctaccgaaatttat

SEQ ID NO: 149203 - DNA, 25 bp, SARS Virus
gtatttacatcatccgaaatttatc

SEQ ID NO: 149204 - DNA, 25 bp, SARS Virus
tatttacatcaatcgaaatttatcg

SEQ ID NO: 149205 - DNA, 25 bp, SARS Virus
atttacatcaactgaaatttatcgg

SEQ ID NO: 149206 - DNA, 25 bp, SARS Virus
tttacatcaacctaaatttatcggt

SEQ ID NO: 149207 - DNA, 25 bp, SARS Virus
ttacatcaaccgtaatttatcggtt

SEQ ID NO: 149208 - DNA, 25 bp, SARS Virus
tacatcaaccgatatttatcggttg

SEQ ID NO: 149209 - DNA, 25 bp, SARS Virus
acatcaaccgaattttatcggttgt

SEQ ID NO: 149210 - DNA, 25 bp, SARS Virus
catcaaccgaaatttatcggttgtt

SEQ ID NO: 149211 - DNA, 25 bp, SARS Virus
atcaaccgaaatttatcggttgttt

SEQ ID NO: 149212 - DNA, 25 bp, SARS Virus
tcaaccgaaatttatcggttgtttt

SEQ ID NO: 149213 - DNA, 25 bp, SARS Virus
caaccgaaatttttcggttgtttta

SEQ ID NO: 149214 - DNA, 25 bp, SARS Virus
aaccgaaatttatcggttgttttat

SEQ ID NO: 149215 - DNA, 25 bp, SARS Virus
accgaaatttattggttgttttatc

SEQ ID NO: 149216 - DNA, 25 bp, SARS Virus
ccgaaatttatctgttgttttatcc

SEQ ID NO: 149217 - DNA, 25 bp, SARS Virus
cgaaatttatcgtttgttttatccg

SEQ ID NO: 149218 - DNA, 25 bp, SARS Virus
gaaatttatcggttgttttatccga

SEQ ID NO: 149219 - DNA, 25 bp, SARS Virus
aaatttatcggttgttttatccgac

SEQ ID NO: 149220 - DNA, 25 bp, SARS Virus
aatttatcggtttttttatccgacg

SEQ ID NO: 149221 - DNA, 25 bp, SARS Virus
atttatcggttgttttatccgacgt

SEQ ID NO: 149222 - DNA, 25 bp, SARS Virus
tttatcggttgttttatccgacgtc

SEQ ID NO: 149223 - DNA, 25 bp, SARS Virus
ttatcggttgttttatccgacgtcg

SEQ ID NO: 149224 - DNA, 25 bp, SARS Virus
tatcggttgttttatccgacgtcga

SEQ ID NO: 149225 - DNA, 25 bp, SARS Virus
atcggttgttttttccgacgtcgac

SEQ ID NO: 149226 - DNA, 25 bp, SARS Virus
tcggttgttttatccgacgtcgact

SEQ ID NO: 149227 - DNA, 25 bp, SARS Virus
cggttgttttattcgacgtcgactg

SEQ ID NO: 149228 - DNA, 25 bp, SARS Virus
ggttgttttatctgacgtcgactgc

SEQ ID NO: 149229 - DNA, 25 bp, SARS Virus
gttgttttatcctacgtcgactgca

SEQ ID NO: 149230 - DNA, 25 bp, SARS Virus
ttgttttatccgtcgtcgactgcac

SEQ ID NO: 149231 - DNA, 25 bp, SARS Virus
tgttttatccgatgtcgactgcacg

SEQ ID NO: 149232 - DNA, 25 bp, SARS Virus
gttttatccgacttcgactgcacgg

SEQ ID NO: 149233 - DNA, 25 bp, SARS Virus
ttttatccgacgtcgactgcacggg

SEQ ID NO: 149234 - DNA, 25 bp, SARS Virus
tttatccgacgttgactgcacgggg

SEQ ID NO: 149235 - DNA, 25 bp, SARS Virus
ttatccgacgtctactgcacggggt

SEQ ID NO: 149236 - DNA, 25 bp, SARS Virus
tatccgacgtcgtctgcacggggtt

SEQ ID NO: 149237 - DNA, 25 bp, SARS Virus
atccgacgtcgattgcacggggttt

SEQ ID NO: 149238 - DNA, 25 bp, SARS Virus
tccgacgtcgactgcacggggttta

SEQ ID NO: 149239 - DNA, 25 bp, SARS Virus
ccgacgtcgacttcacggggtttac

SEQ ID NO: 149240 - DNA, 25 bp, SARS Virus
cgacgtcgactgtacggggtttaca

SEQ ID NO: 149241 - DNA, 25 bp, SARS Virus
gacgtcgactgctcggggtttacag

SEQ ID NO: 149242 - DNA, 25 bp, SARS Virus
acgtcgactgcatggggtttacaga

SEQ ID NO: 149243 - DNA, 25 bp, SARS Virus
cgtcgactgcactgggtttacagaa

SEQ ID NO: 149244 - DNA, 25 bp, SARS Virus
gtcgactgcacgtggtttacagaac

SEQ ID NO: 149245 - DNA, 25 bp, SARS Virus
tcgactgcacggtgtttacagaact

SEQ ID NO: 149246 - DNA, 25 bp, SARS Virus
cgactgcacgggttttacagaactc

SEQ ID NO: 149247 - DNA, 25 bp, SARS Virus
gactgcacggggtttacagaactcg

SEQ ID NO: 149248 - DNA, 25 bp, SARS Virus
actgcacggggtttacagaactcgt

SEQ ID NO: 149249 - DNA, 25 bp, SARS Virus
ctgcacggggtttacagaactcgtc

SEQ ID NO: 149250 - DNA, 25 bp, SARS Virus
tgcacggggttttcagaactcgtcc

SEQ ID NO: 149251 - DNA, 25 bp, SARS Virus
gcacggggtttatagaactcgtcca

SEQ ID NO: 149252 - DNA, 25 bp, SARS Virus
cacggggtttactgaactcgtccac

SEQ ID NO: 149253 - DNA, 25 bp, SARS Virus
acggggtttacataactcgtccact

SEQ ID NO: 149254 - DNA, 25 bp, SARS Virus
cggggtttacagtactcgtccactt

SEQ ID NO: 149255 - DNA, 25 bp, SARS Virus
ggggtttacagatctcgtccacttt

SEQ ID NO: 149256 - DNA, 25 bp, SARS Virus
gggtttacagaattcgtccactttt

SEQ ID NO: 149257 - DNA, 25 bp, SARS Virus
ggtttacagaactcgtccacttttc

SEQ ID NO: 149258 - DNA, 25 bp, SARS Virus
gtttacagaacttgtccacttttcc

SEQ ID NO: 149259 - DNA, 25 bp, SARS Virus
tttacagaactcttccacttttccg

SEQ ID NO: 149260 - DNA, 25 bp, SARS Virus
ttacagaactcgtccacttttccga

SEQ ID NO: 149261 - DNA, 25 bp, SARS Virus
tacagaactcgttcacttttccgac

SEQ ID NO: 149262 - DNA, 25 bp, SARS Virus
acagaactcgtctacttttccgaca

SEQ ID NO: 149263 - DNA, 25 bp, SARS Virus
cagaactcgtcctcttttccgacat

SEQ ID NO: 149264 - DNA, 25 bp, SARS Virus
agaactcgtccatttttccgacatt

SEQ ID NO: 149265 - DNA, 25 bp, SARS Virus
gaactcgtccacttttccgacattc

SEQ ID NO: 149266 - DNA, 25 bp, SARS Virus
aactcgtccacttttccgacattct

SEQ ID NO: 149267 - DNA, 25 bp, SARS Virus
actcgtccacttttccgacattctt

SEQ ID NO: 149268 - DNA, 25 bp, SARS Virus
ctcgtccacttttccgacattctta

SEQ ID NO: 149269 - DNA, 25 bp, SARS Virus
tcgtccactttttcgacattcttac

SEQ ID NO: 149270 - DNA, 25 bp, SARS Virus
cgtccacttttctgacattcttacc

SEQ ID NO: 149271 - DNA, 25 bp, SARS Virus
gtccacttttcctacattcttaccg

SEQ ID NO: 149272 - DNA, 25 bp, SARS Virus
tccacttttccgtcattcttaccga

SEQ ID NO: 149273 - DNA, 25 bp, SARS Virus
ccacttttccgatattcttaccgag

SEQ ID NO: 149274 - DNA, 25 bp, SARS Virus
cacttttccgactttcttaccgaga

SEQ ID NO: 149275 - DNA, 25 bp, SARS Virus
acttttccgacattcttaccgagat

SEQ ID NO: 149276 - DNA, 25 bp, SARS Virus
cttttccgacattcttaccgagatt

SEQ ID NO: 149277 - DNA, 25 bp, SARS Virus
ttttccgacatttttaccgagattt

SEQ ID NO: 149278 - DNA, 25 bp, SARS Virus
tttccgacattcttaccgagatttt

SEQ ID NO: 149279 - DNA, 25 bp, SARS Virus
ttccgacattcttaccgagatttta

SEQ ID NO: 149280 - DNA, 25 bp, SARS Virus
tccgacattctttccgagattttaa

SEQ ID NO: 149281 - DNA, 25 bp, SARS Virus
ccgacattcttatcgagattttaaa

SEQ ID NO: 149282 - DNA, 25 bp, SARS Virus
cgacattcttactgagattttaaac

SEQ ID NO: 149283 - DNA, 25 bp, SARS Virus
gacattcttacctagattttaaaca

SEQ ID NO: 149284 - DNA, 25 bp, SARS Virus
acattcttaccgtgattttaaacat

SEQ ID NO: 149285 - DNA, 25 bp, SARS Virus
cattcttaccgatattttaaacatt

SEQ ID NO: 149286 - DNA, 25 bp, SARS Virus
attcttaccgagtttttaaacatta

SEQ ID NO: 149287 - DNA, 25 bp, SARS Virus
ttcttaccgagattttaaacattac

SEQ ID NO: 149288 - DNA, 25 bp, SARS Virus
tcttaccgagattttaaacattaca

SEQ ID NO: 149289 - DNA, 25 bp, SARS Virus
cttaccgagattttaaacattacaa

SEQ ID NO: 149290 - DNA, 25 bp, SARS Virus
ttaccgagattttaaacattacaat

SEQ ID NO: 149291 - DNA, 25 bp, SARS Virus
taccgagatttttaacattacaatt

SEQ ID NO: 149292 - DNA, 25 bp, SARS Virus
accgagattttatacattacaatta

SEQ ID NO: 149293 - DNA, 25 bp, SARS Virus
ccgagattttaatcattacaattat

SEQ ID NO: 149294 - DNA, 25 bp, SARS Virus
cgagattttaaatattacaattatg

SEQ ID NO: 149295 - DNA, 25 bp, SARS Virus
gagattttaaactttacaattatgg

SEQ ID NO: 149296 - DNA, 25 bp, SARS Virus
agattttaaacattacaattatggt

SEQ ID NO: 149297 - DNA, 25 bp, SARS Virus
gattttaaacattacaattatggtt

SEQ ID NO: 149298 - DNA, 25 bp, SARS Virus
attttaaacatttcaattatggttc

SEQ ID NO: 149299 - DNA, 25 bp, SARS Virus
ttttaaacattataattatggttct

SEQ ID NO: 149300 - DNA, 25 bp, SARS Virus
tttaaacattactattatggttctc

SEQ ID NO: 149301 - DNA, 25 bp, SARS Virus
ttaaacattacatttatggttctcc

SEQ ID NO: 149302 - DNA, 25 bp, SARS Virus
taaacattacaattatggttctccg

SEQ ID NO: 149303 - DNA, 25 bp, SARS Virus
aaacattacaattatggttctccgt

SEQ ID NO: 149304 - DNA, 25 bp, SARS Virus
aacattacaattttggttctccgtt

SEQ ID NO: 149305 - DNA, 25 bp, SARS Virus
acattacaattatggttctccgttg

SEQ ID NO: 149306 - DNA, 25 bp, SARS Virus
cattacaattattgttctccgttga

SEQ ID NO: 149307 - DNA, 25 bp, SARS Virus
attacaattatgtttctccgttgaa

SEQ ID NO: 149308 - DNA, 25 bp, SARS Virus
ttacaattatggttctccgttgaat

SEQ ID NO: 149309 - DNA, 25 bp, SARS Virus
tacaattatggttctccgttgaatt

SEQ ID NO: 149310 - DNA, 25 bp, SARS Virus
acaattatggttttccgttgaattt

SEQ ID NO: 149311 - DNA, 25 bp, SARS Virus
caattatggttctccgttgaatttt

SEQ ID NO: 149312 - DNA, 25 bp, SARS Virus
aattatggttcttcgttgaattttt

SEQ ID NO: 149313 - DNA, 25 bp, SARS Virus
attatggttctctgttgaattttta

SEQ ID NO: 149314 - DNA, 25 bp, SARS Virus
ttatggttctcctttgaatttttat

SEQ ID NO: 149315 - DNA, 25 bp, SARS Virus
tatggttctccgttgaatttttatc

SEQ ID NO: 149316 - DNA, 25 bp, SARS Virus
atggttctccgttgaatttttatcc

SEQ ID NO: 149317 - DNA, 25 bp, SARS Virus
tggttctccgtttaatttttatcca

SEQ ID NO: 149318 - DNA, 25 bp, SARS Virus
ggttctccgttgtatttttatccaa

SEQ ID NO: 149319 - DNA, 25 bp, SARS Virus
gttctccgttgattttttatccaaa

SEQ ID NO: 149320 - DNA, 25 bp, SARS Virus
ttctccgttgaatttttatccaaag

SEQ ID NO: 149321 - DNA, 25 bp, SARS Virus
tctccgttgaatttttatccaaagt

SEQ ID NO: 149322 - DNA, 25 bp, SARS Virus
ctccgttgaatttttatccaaagtt

SEQ ID NO: 149323 - DNA, 25 bp, SARS Virus
tccgttgaatttttatccaaagttt

SEQ ID NO: 149324 - DNA, 25 bp, SARS Virus
ccgttgaatttttatccaaagtttc

SEQ ID NO: 149325 - DNA, 25 bp, SARS Virus
cgttgaatttttttccaaagtttca

SEQ ID NO: 149326 - DNA, 25 bp, SARS Virus
gttgaatttttatccaaagtttcac

SEQ ID NO: 149327 - DNA, 25 bp, SARS Virus
ttgaatttttattcaaagtttcaca

SEQ ID NO: 149328 - DNA, 25 bp, SARS Virus
tgaatttttatctaaagtttcacaa

SEQ ID NO: 149329 - DNA, 25 bp, SARS Virus
gaatttttatcctaagtttcacaat

SEQ ID NO: 149330 - DNA, 25 bp, SARS Virus
aatttttatccatagtttcacaatt

SEQ ID NO: 149331 - DNA, 25 bp, SARS Virus
atttttatccaatgtttcacaattt

SEQ ID NO: 149332 - DNA, 25 bp, SARS Virus
tttttatccaaattttcacaatttt

SEQ ID NO: 149333 - DNA, 25 bp, SARS Virus
ttttatccaaagtttcacaattttg

SEQ ID NO: 149334 - DNA, 25 bp, SARS Virus
tttatccaaagtttcacaattttgg

SEQ ID NO: 149335 - DNA, 25 bp, SARS Virus
ttatccaaagtttcacaattttggt

SEQ ID NO: 149336 - DNA, 25 bp, SARS Virus
tatccaaagttttacaattttggtc

SEQ ID NO: 149337 - DNA, 25 bp, SARS Virus
atccaaagtttctcaattttggtct

SEQ ID NO: 149338 - DNA, 25 bp, SARS Virus
tccaaagtttcataattttggtctt

SEQ ID NO: 149339 - DNA, 25 bp, SARS Virus
ccaaagtttcactattttggtcttc

SEQ ID NO: 149340 - DNA, 25 bp, SARS Virus
caaagtttcacatttttggtcttcc

SEQ ID NO: 149341 - DNA, 25 bp, SARS Virus
aaagtttcacaattttggtcttcca

SEQ ID NO: 149342 - DNA, 25 bp, SARS Virus
aagtttcacaattttggtcttccat

SEQ ID NO: 149343 - DNA, 25 bp, SARS Virus
agtttcacaattttggtcttccatc

SEQ ID NO: 149344 - DNA, 25 bp, SARS Virus
gtttcacaattttggtcttccatct

SEQ ID NO: 149345 - DNA, 25 bp, SARS Virus
tttcacaatttttgtcttccatcta

SEQ ID NO: 149346 - DNA, 25 bp, SARS Virus
ttcacaattttgttcttccatctag

SEQ ID NO: 149347 - DNA, 25 bp, SARS Virus
tcacaattttggtcttccatctagt

SEQ ID NO: 149348 - DNA, 25 bp, SARS Virus
cacaattttggttttccatctagtg

SEQ ID NO: 149349 - DNA, 25 bp, SARS Virus
acaattttggtcttccatctagtgc

SEQ ID NO: 149350 - DNA, 25 bp, SARS Virus
caattttggtcttccatctagtgct

SEQ ID NO: 149351 - DNA, 25 bp, SARS Virus
aattttggtctttcatctagtgctt

SEQ ID NO: 149352 - DNA, 25 bp, SARS Virus
attttggtcttctatctagtgcttg

SEQ ID NO: 149353 - DNA, 25 bp, SARS Virus
ttttggtcttccttctagtgcttga

SEQ ID NO: 149354 - DNA, 25 bp, SARS Virus
tttggtcttccatctagtgcttgat

SEQ ID NO: 149355 - DNA, 25 bp, SARS Virus
ttggtcttccatttagtgcttgatg

SEQ ID NO: 149356 - DNA, 25 bp, SARS Virus
tggtcttccatctagtgcttgatgt

SEQ ID NO: 149357 - DNA, 25 bp, SARS Virus
ggtcttccatcttgtgcttgatgta

SEQ ID NO: 149358 - DNA, 25 bp, SARS Virus
gtcttccatctattgcttgatgtag

SEQ ID NO: 149359 - DNA, 25 bp, SARS Virus
tcttccatctagtgcttgatgtaga

SEQ ID NO: 149360 - DNA, 25 bp, SARS Virus
cttccatctagttcttgatgtagat

SEQ ID NO: 149361 - DNA, 25 bp, SARS Virus
ttccatctagtgattgatgtagata

SEQ ID NO: 149362 - DNA, 25 bp, SARS Virus
tccatctagtgcatgatgtagatat

SEQ ID NO: 149363 - DNA, 25 bp, SARS Virus
ccatctagtgctagatgtagatatc

SEQ ID NO: 149364 - DNA, 25 bp, SARS Virus
catctagtgcttaatgtagatatcc

SEQ ID NO: 149365 - DNA, 25 bp, SARS Virus
atctagtgcttgatgtagatatcca

SEQ ID NO: 149366 - DNA, 25 bp, SARS Virus
tctagtgcttgaagtagatatccaa

SEQ ID NO: 149367 - DNA, 25 bp, SARS Virus
ctagtgcttgatatagatatccaac

SEQ ID NO: 149368 - DNA, 25 bp, SARS Virus
tagtgcttgatgaagatatccaact

SEQ ID NO: 149369 - DNA, 25 bp, SARS Virus
agtgcttgatgtagatatccaacta

SEQ ID NO: 149370 - DNA, 25 bp, SARS Virus
gtgcttgatgtaaatatccaactat

SEQ ID NO: 149371 - DNA, 25 bp, SARS Virus
tgcttgatgtagatatccaactatc

SEQ ID NO: 149372 - DNA, 25 bp, SARS Virus
gcttgatgtagaaatccaactatcg

SEQ ID NO: 149373 - DNA, 25 bp, SARS Virus
cttgatgtagatatccaactatcgg

SEQ ID NO: 149374 - DNA, 25 bp, SARS Virus
ttgatgtagataaccaactatcggg

SEQ ID NO: 149375 - DNA, 25 bp, SARS Virus
tgatgtagatatacaactatcggga

SEQ ID NO: 149376 - DNA, 25 bp, SARS Virus
gatgtagatatcaaactatcgggaa

SEQ ID NO: 149377 - DNA, 25 bp, SARS Virus
atgtagatatccaactatcgggaat

SEQ ID NO: 149378 - DNA, 25 bp, SARS Virus
tgtagatatccaactatcgggaata

SEQ ID NO: 149379 - DNA, 25 bp, SARS Virus
gtagatatccaaatatcgggaatat

SEQ ID NO: 149380 - DNA, 25 bp, SARS Virus
tagatatccaacaatcgggaatatt

SEQ ID NO: 149381 - DNA, 25 bp, SARS Virus
agatatccaactatcgggaatattt

SEQ ID NO: 149382 - DNA, 25 bp, SARS Virus
gatatccaactaacgggaatatttg

SEQ ID NO: 149383 - DNA, 25 bp, SARS Virus
atatccaactatagggaatatttgt

SEQ ID NO: 149384 - DNA, 25 bp, SARS Virus
tatccaactatcaggaatatttgta

SEQ ID NO: 149385 - DNA, 25 bp, SARS Virus
atccaactatcgagaatatttgtat

SEQ ID NO: 149386 - DNA, 25 bp, SARS Virus
tccaactatcggaaatatttgtatc

SEQ ID NO: 149387 - DNA, 25 bp, SARS Virus
ccaactatcgggaatatttgtatct

SEQ ID NO: 149388 - DNA, 25 bp, SARS Virus
caactatcgggaatatttgtatctc

SEQ ID NO: 149389 - DNA, 25 bp, SARS Virus
aactatcgggaaaatttgtatctct

SEQ ID NO: 149390 - DNA, 25 bp, SARS Virus
actatcgggaatatttgtatctctt

SEQ ID NO: 149391 - DNA, 25 bp, SARS Virus
ctatcgggaataattgtatctcttt

SEQ ID NO: 149392 - DNA, 25 bp, SARS Virus
tatcgggaatatatgtatctctttg

SEQ ID NO: 149393 - DNA, 25 bp, SARS Virus
atcgggaatattagtatctctttgg

SEQ ID NO: 149394 - DNA, 25 bp, SARS Virus
tcgggaatatttatatctctttggg

SEQ ID NO: 149395 - DNA, 25 bp, SARS Virus
cgggaatatttgaatctctttgggt

SEQ ID NO: 149396 - DNA, 25 bp, SARS Virus
gggaatatttgtatctctttgggta

SEQ ID NO: 149397 - DNA, 25 bp, SARS Virus
ggaatatttgtaactctttgggtag

SEQ ID NO: 149398 - DNA, 25 bp, SARS Virus
gaatatttgtatatctttgggtaga

SEQ ID NO: 149399 - DNA, 25 bp, SARS Virus
aatatttgtatcactttgggtagaa

SEQ ID NO: 149400 - DNA, 25 bp, SARS Virus
atatttgtatctatttgggtagaaa

SEQ ID NO: 149401 - DNA, 25 bp, SARS Virus
tatttgtatctcattgggtagaaat

SEQ ID NO: 149402 - DNA, 25 bp, SARS Virus
atttgtatctctatgggtagaaata

SEQ ID NO: 149403 - DNA, 25 bp, SARS Virus
tttgtatctcttagggtagaaataa

SEQ ID NO: 149404 - DNA, 25 bp, SARS Virus
ttgtatctctttaggtagaaataaa

SEQ ID NO: 149405 - DNA, 25 bp, SARS Virus
tgtatctctttgagtagaaataaaa

SEQ ID NO: 149406 - DNA, 25 bp, SARS Virus
gtatctctttggatagaaataaaaa

SEQ ID NO: 149407 - DNA, 25 bp, SARS Virus
tatctctttgggaagaaataaaaat

SEQ ID NO: 149408 - DNA, 25 bp, SARS Virus
atctctttgggtagaaataaaaatt

SEQ ID NO: 149409 - DNA, 25 bp, SARS Virus
tctctttgggtaaaaataaaaattt

SEQ ID NO: 149410 - DNA, 25 bp, SARS Virus
ctctttgggtagaaataaaaatttg

SEQ ID NO: 149411 - DNA, 25 bp, SARS Virus
tctttgggtagaaataaaaatttgt

SEQ ID NO: 149412 - DNA, 25 bp, SARS Virus
ctttgggtagaaataaaaatttgtg

SEQ ID NO: 149413 - DNA, 25 bp, SARS Virus
tttgggtagaaaaaaaaatttgtgt

SEQ ID NO: 149414 - DNA, 25 bp, SARS Virus
ttgggtagaaataaaaatttgtgtt

SEQ ID NO: 149415 - DNA, 25 bp, SARS Virus
tgggtagaaataaaaatttgtgttt

SEQ ID NO: 149416 - DNA, 25 bp, SARS Virus
gggtagaaataaaaatttgtgtttg

SEQ ID NO: 149417 - DNA, 25 bp, SARS Virus
ggtagaaataaaaatttgtgtttga

SEQ ID NO: 149418 - DNA, 25 bp, SARS Virus
gtagaaataaaaatttgtgtttgag

SEQ ID NO: 149419 - DNA, 25 bp, SARS Virus
tagaaataaaaaattgtgtttgaga

SEQ ID NO: 149420 - DNA, 25 bp, SARS Virus
agaaataaaaatatgtgtttgagag

SEQ ID NO: 149421 - DNA, 25 bp, SARS Virus
gaaataaaaattagtgtttgagagc

SEQ ID NO: 149422 - DNA, 25 bp, SARS Virus
aaataaaaatttatgtttgagagca

SEQ ID NO: 149423 - DNA, 25 bp, SARS Virus
aataaaaatttgagtttgagagcat

SEQ ID NO: 149424 - DNA, 25 bp, SARS Virus
ataaaaatttgtatttgagagcatt

SEQ ID NO: 149425 - DNA, 25 bp, SARS Virus
taaaaatttgtgattgagagcattc

SEQ ID NO: 149426 - DNA, 25 bp, SARS Virus
aaaaatttgtgtatgagagcattca

SEQ ID NO: 149427 - DNA, 25 bp, SARS Virus
aaaatttgtgttagagagcattcac

SEQ ID NO: 149428 - DNA, 25 bp, SARS Virus
aaatttgtgtttaagagcattcaca

SEQ ID NO: 149429 - DNA, 25 bp, SARS Virus
aatttgtgtttgagagcattcacaa

SEQ ID NO: 149430 - DNA, 25 bp, SARS Virus
atttgtgtttgaaagcattcacaaa

SEQ ID NO: 149431 - DNA, 25 bp, SARS Virus
tttgtgtttgagagcattcacaaat

SEQ ID NO: 149432 - DNA, 25 bp, SARS Virus
ttgtgtttgagaacattcacaaatt

SEQ ID NO: 149433 - DNA, 25 bp, SARS Virus
tgtgtttgagagaattcacaaattt

SEQ ID NO: 149434 - DNA, 25 bp, SARS Virus
gtgtttgagagcattcacaaatttt

SEQ ID NO: 149435 - DNA, 25 bp, SARS Virus
tgtttgagagcaatcacaaatttta

SEQ ID NO: 149436 - DNA, 25 bp, SARS Virus
gtttgagagcatacacaaattttaa

SEQ ID NO: 149437 - DNA, 25 bp, SARS Virus
tttgagagcattaacaaattttaat

SEQ ID NO: 149438 - DNA, 25 bp, SARS Virus
ttgagagcattcacaaattttaatg

SEQ ID NO: 149439 - DNA, 25 bp, SARS Virus
tgagagcattcaaaaattttaatgg

SEQ ID NO: 149440 - DNA, 25 bp, SARS Virus
gagagcattcacaaattttaatgga

SEQ ID NO: 149441 - DNA, 25 bp, SARS Virus
agagcattcacaaattttaatggac

SEQ ID NO: 149442 - DNA, 25 bp, SARS Virus
gagcattcacaaattttaatggact

SEQ ID NO: 149443 - DNA, 25 bp, SARS Virus
agcattcacaaaatttaatggactg

SEQ ID NO: 149444 - DNA, 25 bp, SARS Virus
gcattcacaaatattaatggactga

SEQ ID NO: 149445 - DNA, 25 bp, SARS Virus
cattcacaaattataatggactgaa

SEQ ID NO: 149446 - DNA, 25 bp, SARS Virus
attcacaaatttaaatggactgaaa

SEQ ID NO: 149447 - DNA, 25 bp, SARS Virus
ttcacaaattttaatggactgaaaa

SEQ ID NO: 149448 - DNA, 25 bp, SARS Virus
tcacaaattttaatggactgaaaag

SEQ ID NO: 149449 - DNA, 25 bp, SARS Virus
cacaaattttaaaggactgaaaaga

SEQ ID NO: 149450 - DNA, 25 bp, SARS Virus
acaaattttaatagactgaaaagac

SEQ ID NO: 149451 - DNA, 25 bp, SARS Virus
caaattttaatgaactgaaaagact

SEQ ID NO: 149452 - DNA, 25 bp, SARS Virus
aaattttaatggactgaaaagactt

SEQ ID NO: 149453 - DNA, 25 bp, SARS Virus
aattttaatggaatgaaaagacttt

SEQ ID NO: 149454 - DNA, 25 bp, SARS Virus
attttaatggacagaaaagactttg

SEQ ID NO: 149455 - DNA, 25 bp, SARS Virus
ttttaatggactaaaaagactttgt

SEQ ID NO: 149456 - DNA, 25 bp, SARS Virus
tttaatggactgaaaagactttgta

SEQ ID NO: 149457 - DNA, 25 bp, SARS Virus
ttaatggactgaaaagactttgtag

SEQ ID NO: 149458 - DNA, 25 bp, SARS Virus
taatggactgaaaagactttgtagt

SEQ ID NO: 149459 - DNA, 25 bp, SARS Virus
aatggactgaaaagactttgtagtt

SEQ ID NO: 149460 - DNA, 25 bp, SARS Virus
atggactgaaaaaactttgtagttc

SEQ ID NO: 149461 - DNA, 25 bp, SARS Virus
tggactgaaaagactttgtagttcg

SEQ ID NO: 149462 - DNA, 25 bp, SARS Virus
ggactgaaaagaatttgtagttcgc

SEQ ID NO: 149463 - DNA, 25 bp, SARS Virus
gactgaaaagacattgtagttcgct

SEQ ID NO: 149464 - DNA, 25 bp, SARS Virus
actgaaaagactatgtagttcgctt

SEQ ID NO: 149465 - DNA, 25 bp, SARS Virus
ctgaaaagacttagtagttcgcttt

SEQ ID NO: 149466 - DNA, 25 bp, SARS Virus
tgaaaagactttatagttcgctttt

SEQ ID NO: 149467 - DNA, 25 bp, SARS Virus
gaaaagactttgaagttcgcttttc

SEQ ID NO: 149468 - DNA, 25 bp, SARS Virus
aaaagactttgtagttcgcttttcc

SEQ ID NO: 149469 - DNA, 25 bp, SARS Virus
aaagactttgtaattcgcttttccg

SEQ ID NO: 149470 - DNA, 25 bp, SARS Virus
aagactttgtagatcgcttttccgt

SEQ ID NO: 149471 - DNA, 25 bp, SARS Virus
agactttgtagtacgcttttccgta

SEQ ID NO: 149472 - DNA, 25 bp, SARS Virus
gactttgtagttagcttttccgtag

SEQ ID NO: 149473 - DNA, 25 bp, SARS Virus
actttgtagttcacttttccgtagt

SEQ ID NO: 149474 - DNA, 25 bp, SARS Virus
ctttgtagttcgattttccgtagtc

SEQ ID NO: 149475 - DNA, 25 bp, SARS Virus
tttgtagttcgcatttccgtagtct

SEQ ID NO: 149476 - DNA, 25 bp, SARS Virus
ttgtagttcgctattccgtagtcta

SEQ ID NO: 149477 - DNA, 25 bp, SARS Virus
tgtagttcgcttatccgtagtctat

SEQ ID NO: 149478 - DNA, 25 bp, SARS Virus
gtagttcgctttaccgtagtctata

SEQ ID NO: 149479 - DNA, 25 bp, SARS Virus
tagttcgcttttacgtagtctatac

SEQ ID NO: 149480 - DNA, 25 bp, SARS Virus
agttcgcttttcagtagtctataca

SEQ ID NO: 149481 - DNA, 25 bp, SARS Virus
gttcgcttttccatagtctatacat

SEQ ID NO: 149482 - DNA, 25 bp, SARS Virus
ttcgcttttccgaagtctatacatg

SEQ ID NO: 149483 - DNA, 25 bp, SARS Virus
tcgcttttccgtagtctatacatga

SEQ ID NO: 149484 - DNA, 25 bp, SARS Virus
cgcttttccgtaatctatacatgag

SEQ ID NO: 149485 - DNA, 25 bp, SARS Virus
gcttttccgtagactatacatgagc

SEQ ID NO: 149486 - DNA, 25 bp, SARS Virus
cttttccgtagtatatacatgagct

SEQ ID NO: 149487 - DNA, 25 bp, SARS Virus
ttttccgtagtcaatacatgagctt

SEQ ID NO: 149488 - DNA, 25 bp, SARS Virus
tttccgtagtctatacatgagcttt

SEQ ID NO: 149489 - DNA, 25 bp, SARS Virus
ttccgtagtctaaacatgagctttc

SEQ ID NO: 149490 - DNA, 25 bp, SARS Virus
tccgtagtctatacatgagctttca

SEQ ID NO: 149491 - DNA, 25 bp, SARS Virus
ccgtagtctataaatgagctttcac

SEQ ID NO: 149492 - DNA, 25 bp, SARS Virus
cgtagtctatacatgagctttcacg

SEQ ID NO: 149493 - DNA, 25 bp, SARS Virus
gtagtctatacaagagctttcacgt

SEQ ID NO: 149494 - DNA, 25 bp, SARS Virus
tagtctatacataagctttcacgtt

SEQ ID NO: 149495 - DNA, 25 bp, SARS Virus
agtctatacatgagctttcacgtta

SEQ ID NO: 149496 - DNA, 25 bp, SARS Virus
gtctatacatgaactttcacgttaa

SEQ ID NO: 149497 - DNA, 25 bp, SARS Virus
tctatacatgagatttcacgttaat

SEQ ID NO: 149498 - DNA, 25 bp, SARS Virus
ctatacatgagcattcacgttaatt

SEQ ID NO: 149499 - DNA, 25 bp, SARS Virus
tatacatgagctatcacgttaattt

SEQ ID NO: 149500 - DNA, 25 bp, SARS Virus
atacatgagcttacacgttaattta

SEQ ID NO: 149501 - DNA, 25 bp, SARS Virus
tacatgagctttaacgttaatttac

SEQ ID NO: 149502 - DNA, 25 bp, SARS Virus
acatgagctttcacgttaatttacg

SEQ ID NO: 149503 - DNA, 25 bp, SARS Virus
catgagctttcaagttaatttacgt

SEQ ID NO: 149504 - DNA, 25 bp, SARS Virus
atgagctttcacattaatttacgta

SEQ ID NO: 149505 - DNA, 25 bp, SARS Virus
tgagctttcacgataatttacgtaa

SEQ ID NO: 149506 - DNA, 25 bp, SARS Virus
gagctttcacgtaaatttacgtaat

SEQ ID NO: 149507 - DNA, 25 bp, SARS Virus
agctttcacgttaatttacgtaata

SEQ ID NO: 149508 - DNA, 25 bp, SARS Virus
gctttcacgttaatttacgtaatag

SEQ ID NO: 149509 - DNA, 25 bp, SARS Virus
ctttcacgttaaattacgtaatagc

SEQ ID NO: 149510 - DNA, 25 bp, SARS Virus
tttcacgttaatatacgtaatagct

SEQ ID NO: 149511 - DNA, 25 bp, SARS Virus
ttcacgttaattaacgtaatagctt

SEQ ID NO: 149512 - DNA, 25 bp, SARS Virus
tcacgttaatttacgtaatagctta

SEQ ID NO: 149513 - DNA, 25 bp, SARS Virus
cacgttaatttaagtaatagcttat

SEQ ID NO: 149514 - DNA, 25 bp, SARS Virus
acgttaatttacataatagcttata

SEQ ID NO: 149515 - DNA, 25 bp, SARS Virus
cgttaatttacgaaatagcttatag

SEQ ID NO: 149516 - DNA, 25 bp, SARS Virus
gttaatttacgtaatagcttatagt

SEQ ID NO: 149517 - DNA, 25 bp, SARS Virus
ttaatttacgtaatagcttatagta

SEQ ID NO: 149518 - DNA, 25 bp, SARS Virus
taatttacgtaaaagcttatagtat

SEQ ID NO: 149519 - DNA, 25 bp, SARS Virus
aatttacgtaatagcttatagtatc

SEQ ID NO: 149520 - DNA, 25 bp, SARS Virus
atttacgtaataacttatagtatca

SEQ ID NO: 149521 - DNA, 25 bp, SARS Virus
tttacgtaatagattatagtatcat

SEQ ID NO: 149522 - DNA, 25 bp, SARS Virus
ttacgtaatagcatatagtatcata

SEQ ID NO: 149523 - DNA, 25 bp, SARS Virus
tacgtaatagctaatagtatcatac

SEQ ID NO: 149524 - DNA, 25 bp, SARS Virus
acgtaatagcttatagtatcataca

SEQ ID NO: 149525 - DNA, 25 bp, SARS Virus
cgtaatagcttaaagtatcatacac

SEQ ID NO: 149526 - DNA, 25 bp, SARS Virus
gtaatagcttatagtatcatacaca

SEQ ID NO: 149527 - DNA, 25 bp, SARS Virus
taatagcttataatatcatacacag

SEQ ID NO: 149528 - DNA, 25 bp, SARS Virus
aatagcttatagaatcatacacaga

SEQ ID NO: 149529 - DNA, 25 bp, SARS Virus
atagcttatagtatcatacacagac

SEQ ID NO: 149530 - DNA, 25 bp, SARS Virus
tagcttatagtaacatacacagaca

SEQ ID NO: 149531 - DNA, 25 bp, SARS Virus
agcttatagtataatacacagacac

SEQ ID NO: 149532 - DNA, 25 bp, SARS Virus
gcttatagtatcatacacagacaca

SEQ ID NO: 149533 - DNA, 25 bp, SARS Virus
cttatagtatcaaacacagacacat

SEQ ID NO: 149534 - DNA, 25 bp, SARS Virus
ttatagtatcatacacagacacatg

SEQ ID NO: 149535 - DNA, 25 bp, SARS Virus
tatagtatcataaacagacacatgg

SEQ ID NO: 149536 - DNA, 25 bp, SARS Virus
atagtatcatacacagacacatggg

SEQ ID NO: 149537 - DNA, 25 bp, SARS Virus
tagtatcatacaaagacacatgggt

SEQ ID NO: 149538 - DNA, 25 bp, SARS Virus
agtatcatacacagacacatgggta

SEQ ID NO: 149539 - DNA, 25 bp, SARS Virus
gtatcatacacaaacacatgggtac

SEQ ID NO: 149540 - DNA, 25 bp, SARS Virus
tatcatacacagacacatgggtacc

SEQ ID NO: 149541 - DNA, 25 bp, SARS Virus
atcatacacagaaacatgggtaccc

SEQ ID NO: 149542 - DNA, 25 bp, SARS Virus
tcatacacagacacatgggtaccca

SEQ ID NO: 149543 - DNA, 25 bp, SARS Virus
catacacagacaaatgggtacccaa

SEQ ID NO: 149544 - DNA, 25 bp, SARS Virus
atacacagacacatgggtacccaaa

SEQ ID NO: 149545 - DNA, 25 bp, SARS Virus
tacacagacacaagggtacccaaat

SEQ ID NO: 149546 - DNA, 25 bp, SARS Virus
acacagacacataggtacccaaatc

SEQ ID NO: 149547 - DNA, 25 bp, SARS Virus
cacagacacatgagtacccaaatct

SEQ ID NO: 149548 - DNA, 25 bp, SARS Virus
acagacacatggatacccaaatctt

SEQ ID NO: 149549 - DNA, 25 bp, SARS Virus
cagacacatgggaacccaaatcttt

SEQ ID NO: 149550 - DNA, 25 bp, SARS Virus
agacacatgggtacccaaatctttg

SEQ ID NO: 149551 - DNA, 25 bp, SARS Virus
gacacatgggtaaccaaatctttgt

SEQ ID NO: 149552 - DNA, 25 bp, SARS Virus
acacatgggtacacaaatctttgtc

SEQ ID NO: 149553 - DNA, 25 bp, SARS Virus
cacatgggtaccaaaatctttgtcg

SEQ ID NO: 149554 - DNA, 25 bp, SARS Virus
acatgggtacccaaatctttgtcgt

SEQ ID NO: 149555 - DNA, 25 bp, SARS Virus
catgggtacccaaatctttgtcgtt

SEQ ID NO: 149556 - DNA, 25 bp, SARS Virus
atgggtacccaaatctttgtcgttt

SEQ ID NO: 149557 - DNA, 25 bp, SARS Virus
tgggtacccaaaactttgtcgtttc

SEQ ID NO: 149558 - DNA, 25 bp, SARS Virus
gggtacccaaatatttgtcgtttct

SEQ ID NO: 149559 - DNA, 25 bp, SARS Virus
ggtacccaaatcattgtcgtttctt

SEQ ID NO: 149560 - DNA, 25 bp, SARS Virus
gtacccaaatctatgtcgtttcttt

SEQ ID NO: 149561 - DNA, 25 bp, SARS Virus
tacccaaatcttagtcgtttctttc

SEQ ID NO: 149562 - DNA, 25 bp, SARS Virus
acccaaatctttatcgtttctttcc

SEQ ID NO: 149563 - DNA, 25 bp, SARS Virus
cccaaatctttgacgtttctttccc

SEQ ID NO: 149564 - DNA, 25 bp, SARS Virus
ccaaatctttgtagtttctttccca

SEQ ID NO: 149565 - DNA, 25 bp, SARS Virus
caaatctttgtcatttctttcccaa

SEQ ID NO: 149566 - DNA, 25 bp, SARS Virus
aaatctttgtcgattctttcccaac

SEQ ID NO: 149567 - DNA, 25 bp, SARS Virus
aatctttgtcgtatctttcccaaca

SEQ ID NO: 149568 - DNA, 25 bp, SARS Virus
atctttgtcgttactttcccaacag

SEQ ID NO: 149569 - DNA, 25 bp, SARS Virus
tctttgtcgtttatttcccaacagt

SEQ ID NO: 149570 - DNA, 25 bp, SARS Virus
ctttgtcgtttcattcccaacagtg

SEQ ID NO: 149571 - DNA, 25 bp, SARS Virus
tttgtcgtttctatcccaacagtgt

SEQ ID NO: 149572 - DNA, 25 bp, SARS Virus
ttgtcgtttcttacccaacagtgtg

SEQ ID NO: 149573 - DNA, 25 bp, SARS Virus
tgtcgtttctttaccaacagtgtgt

SEQ ID NO: 149574 - DNA, 25 bp, SARS Virus
gtcgtttctttcacaacagtgtgtt

SEQ ID NO: 149575 - DNA, 25 bp, SARS Virus
tcgtttctttccaaacagtgtgtta

SEQ ID NO: 149576 - DNA, 25 bp, SARS Virus
cgtttctttcccaacagtgtgttaa

SEQ ID NO: 149577 - DNA, 25 bp, SARS Virus
gtttctttcccaacagtgtgttaag

SEQ ID NO: 149578 - DNA, 25 bp, SARS Virus
tttctttcccaaaagtgtgttaagt

SEQ ID NO: 149579 - DNA, 25 bp, SARS Virus
ttctttcccaacagtgtgttaagtt

SEQ ID NO: 149580 - DNA, 25 bp, SARS Virus
tctttcccaacaatgtgttaagttt

SEQ ID NO: 149581 - DNA, 25 bp, SARS Virus
ctttcccaacagagtgttaagtttc

SEQ ID NO: 149582 - DNA, 25 bp, SARS Virus
tttcccaacagtatgttaagtttca

SEQ ID NO: 149583 - DNA, 25 bp, SARS Virus
ttcccaacagtgagttaagtttcaa

SEQ ID NO: 149584 - DNA, 25 bp, SARS Virus
tcccaacagtgtattaagtttcaat

SEQ ID NO: 149585 - DNA, 25 bp, SARS Virus
cccaacagtgtgataagtttcaatg

SEQ ID NO: 149586 - DNA, 25 bp, SARS Virus
ccaacagtgtgtaaagtttcaatgt

SEQ ID NO: 149587 - DNA, 25 bp, SARS Virus
caacagtgtgttaagtttcaatgta

SEQ ID NO: 149588 - DNA, 25 bp, SARS Virus
aacagtgtgttaagtttcaatgtac

SEQ ID NO: 149589 - DNA, 25 bp, SARS Virus
acagtgtgttaaatttcaatgtacg

SEQ ID NO: 149590 - DNA, 25 bp, SARS Virus
cagtgtgttaagattcaatgtacga

SEQ ID NO: 149591 - DNA, 25 bp, SARS Virus
agtgtgttaagtatcaatgtacgag

SEQ ID NO: 149592 - DNA, 25 bp, SARS Virus
gtgtgttaagttacaatgtacgagc

SEQ ID NO: 149593 - DNA, 25 bp, SARS Virus
tgtgttaagtttaaatgtacgagca

SEQ ID NO: 149594 - DNA, 25 bp, SARS Virus
gtgttaagtttcaatgtacgagcat

SEQ ID NO: 149595 - DNA, 25 bp, SARS Virus
tgttaagtttcaatgtacgagcata

SEQ ID NO: 149596 - DNA, 25 bp, SARS Virus
gttaagtttcaaagtacgagcatat

SEQ ID NO: 149597 - DNA, 25 bp, SARS Virus
ttaagtttcaatatacgagcatatt

SEQ ID NO: 149598 - DNA, 25 bp, SARS Virus
taagtttcaatgaacgagcatattg

SEQ ID NO: 149599 - DNA, 25 bp, SARS Virus
aagtttcaatgtacgagcatattgt

SEQ ID NO: 149600 - DNA, 25 bp, SARS Virus
agtttcaatgtaagagcatattgtt

SEQ ID NO: 149601 - DNA, 25 bp, SARS Virus
gtttcaatgtacaagcatattgttg

SEQ ID NO: 149602 - DNA, 25 bp, SARS Virus
tttcaatgtacgagcatattgttgt

SEQ ID NO: 149603 - DNA, 25 bp, SARS Virus
ttcaatgtacgaacatattgttgta

SEQ ID NO: 149604 - DNA, 25 bp, SARS Virus
tcaatgtacgagaatattgttgtaa

SEQ ID NO: 149605 - DNA, 25 bp, SARS Virus
caatgtacgagcatattgttgtaat

SEQ ID NO: 149606 - DNA, 25 bp, SARS Virus
aatgtacgagcaaattgttgtaatc

SEQ ID NO: 149607 - DNA, 25 bp, SARS Virus
atgtacgagcatattgttgtaatca

SEQ ID NO: 149608 - DNA, 25 bp, SARS Virus
tgtacgagcataatgttgtaatcat

SEQ ID NO: 149609 - DNA, 25 bp, SARS Virus
gtacgagcatatagttgtaatcatc

SEQ ID NO: 149610 - DNA, 25 bp, SARS Virus
tacgagcatattattgtaatcatct

SEQ ID NO: 149611 - DNA, 25 bp, SARS Virus
acgagcatattgatgtaatcatctt

SEQ ID NO: 149612 - DNA, 25 bp, SARS Virus
cgagcatattgtagtaatcatctta

SEQ ID NO: 149613 - DNA, 25 bp, SARS Virus
gagcatattgttataatcatcttaa

SEQ ID NO: 149614 - DNA, 25 bp, SARS Virus
agcatattgttgaaatcatcttaac

SEQ ID NO: 149615 - DNA, 25 bp, SARS Virus
gcatattgttgtaatcatcttaaca

SEQ ID NO: 149616 - DNA, 25 bp, SARS Virus
catattgttgtaatcatcttaacaa

SEQ ID NO: 149617 - DNA, 25 bp, SARS Virus
atattgttgtaaacatcttaacaat

SEQ ID NO: 149618 - DNA, 25 bp, SARS Virus
tattgttgtaataatcttaacaatt

SEQ ID NO: 149619 - DNA, 25 bp, SARS Virus
attgttgtaatcatcttaacaatta

SEQ ID NO: 149620 - DNA, 25 bp, SARS Virus
ttgttgtaatcaacttaacaattat

SEQ ID NO: 149621 - DNA, 25 bp, SARS Virus
tgttgtaatcatattaacaattatt

SEQ ID NO: 149622 - DNA, 25 bp, SARS Virus
gttgtaatcatcataacaattatta

SEQ ID NO: 149623 - DNA, 25 bp, SARS Virus
ttgtaatcatctaaacaattattat

SEQ ID NO: 149624 - DNA, 25 bp, SARS Virus
tgtaatcatcttaacaattattatt

SEQ ID NO: 149625 - DNA, 25 bp, SARS Virus
gtaatcatcttaacaattattatta

SEQ ID NO: 149626 - DNA, 25 bp, SARS Virus
taatcatcttaaaaattattattag

SEQ ID NO: 149627 - DNA, 25 bp, SARS Virus
aatcatcttaacaattattattagt

SEQ ID NO: 149628 - DNA, 25 bp, SARS Virus
atcatcttaacaattattattagtg

SEQ ID NO: 149629 - DNA, 25 bp, SARS Virus
tcatcttaacaaatattattagtgg

SEQ ID NO: 149630 - DNA, 25 bp, SARS Virus
catcttaacaataattattagtggc

SEQ ID NO: 149631 - DNA, 25 bp, SARS Virus
atcttaacaattattattagtggct

SEQ ID NO: 149632 - DNA, 25 bp, SARS Virus
tcttaacaattaatattagtggctg

SEQ ID NO: 149633 - DNA, 25 bp, SARS Virus
cttaacaattataattagtggctga

SEQ ID NO: 149634 - DNA, 25 bp, SARS Virus
ttaacaattattattagtggctgac

SEQ ID NO: 149635 - DNA, 25 bp, SARS Virus
taacaattattaatagtggctgaca

SEQ ID NO: 149636 - DNA, 25 bp, SARS Virus
aacaattattataagtggctgacac

SEQ ID NO: 149637 - DNA, 25 bp, SARS Virus
acaattattattagtggctgacact

SEQ ID NO: 149638 - DNA, 25 bp, SARS Virus
caattattattaatggctgacactg

SEQ ID NO: 149639 - DNA, 25 bp, SARS Virus
aattattattagaggctgacactga

SEQ ID NO: 149640 - DNA, 25 bp, SARS Virus
attattattagtagctgacactgaa

SEQ ID NO: 149641 - DNA, 25 bp, SARS Virus
ttattattagtgactgacactgaac

SEQ ID NO: 149642 - DNA, 25 bp, SARS Virus
tattattagtggatgacactgaaca

SEQ ID NO: 149643 - DNA, 25 bp, SARS Virus
attattagtggcagacactgaacaa

SEQ ID NO: 149644 - DNA, 25 bp, SARS Virus
ttattagtggctaacactgaacaac

SEQ ID NO: 149645 - DNA, 25 bp, SARS Virus
tattagtggctgacactgaacaaca

SEQ ID NO: 149646 - DNA, 25 bp, SARS Virus
attagtggctgaaactgaacaacaa

SEQ ID NO: 149647 - DNA, 25 bp, SARS Virus
ttagtggctgacactgaacaacaag

SEQ ID NO: 149648 - DNA, 25 bp, SARS Virus
tagtggctgacaatgaacaacaagt

SEQ ID NO: 149649 - DNA, 25 bp, SARS Virus
agtggctgacacagaacaacaagta

SEQ ID NO: 149650 - DNA, 25 bp, SARS Virus
gtggctgacactaaacaacaagtac

SEQ ID NO: 149651 - DNA, 25 bp, SARS Virus
tggctgacactgaacaacaagtacc

SEQ ID NO: 149652 - DNA, 25 bp, SARS Virus
ggctgacactgaacaacaagtacca

SEQ ID NO: 149653 - DNA, 25 bp, SARS Virus
gctgacactgaaaaacaagtaccat

SEQ ID NO: 149654 - DNA, 25 bp, SARS Virus
ctgacactgaacaacaagtaccatc

SEQ ID NO: 149655 - DNA, 25 bp, SARS Virus
tgacactgaacaacaagtaccatct

SEQ ID NO: 149656 - DNA, 25 bp, SARS Virus
gacactgaacaaaaagtaccatctt

SEQ ID NO: 149657 - DNA, 25 bp, SARS Virus
acactgaacaacaagtaccatcttg

SEQ ID NO: 149658 - DNA, 25 bp, SARS Virus
cactgaacaacaagtaccatcttgg

SEQ ID NO: 149659 - DNA, 25 bp, SARS Virus
actgaacaacaaataccatcttggt

SEQ ID NO: 149660 - DNA, 25 bp, SARS Virus
ctgaacaacaagaaccatcttggtt

SEQ ID NO: 149661 - DNA, 25 bp, SARS Virus
tgaacaacaagtaccatcttggttt

SEQ ID NO: 149662 - DNA, 25 bp, SARS Virus
gaacaacaagtaacatcttggtttt

SEQ ID NO: 149663 - DNA, 25 bp, SARS Virus
aacaacaagtacaatcttggttttt

SEQ ID NO: 149664 - DNA, 25 bp, SARS Virus
acaacaagtaccatcttggtttttg

SEQ ID NO: 149665 - DNA, 25 bp, SARS Virus
caacaagtaccaacttggtttttgg

SEQ ID NO: 149666 - DNA, 25 bp, SARS Virus
aacaagtaccatattggtttttggg

SEQ ID NO: 149667 - DNA, 25 bp, SARS Virus
acaagtaccatcatggtttttgggt

SEQ ID NO: 149668 - DNA, 25 bp, SARS Virus
caagtaccatctaggtttttgggtt

SEQ ID NO: 149669 - DNA, 25 bp, SARS Virus
aagtaccatcttagtttttgggttg

SEQ ID NO: 149670 - DNA, 25 bp, SARS Virus
agtaccatcttgatttttgggttgg

SEQ ID NO: 149671 - DNA, 25 bp, SARS Virus
gtaccatcttggattttgggttggt

SEQ ID NO: 149672 - DNA, 25 bp, SARS Virus
taccatcttggtatttgggttggtg

SEQ ID NO: 149673 - DNA, 25 bp, SARS Virus
accatcttggttattgggttggtgc

SEQ ID NO: 149674 - DNA, 25 bp, SARS Virus
ccatcttggtttatgggttggtgcc

SEQ ID NO: 149675 - DNA, 25 bp, SARS Virus
catcttggttttagggttggtgcct

SEQ ID NO: 149676 - DNA, 25 bp, SARS Virus
atcttggtttttaggttggtgcctg

SEQ ID NO: 149677 - DNA, 25 bp, SARS Virus
tcttggtttttgagttggtgcctgt

SEQ ID NO: 149678 - DNA, 25 bp, SARS Virus
cttggtttttggattggtgcctgtt

SEQ ID NO: 149679 - DNA, 25 bp, SARS Virus
ttggtttttgggatggtgcctgttg

SEQ ID NO: 149680 - DNA, 25 bp, SARS Virus
tggtttttgggtaggtgcctgttgt

SEQ ID NO: 149681 - DNA, 25 bp, SARS Virus
ggtttttgggttagtgcctgttgta

SEQ ID NO: 149682 - DNA, 25 bp, SARS Virus
gtttttgggttgatgcctgttgtaa

SEQ ID NO: 149683 - DNA, 25 bp, SARS Virus
tttttgggttggagcctgttgtaaa

SEQ ID NO: 149684 - DNA, 25 bp, SARS Virus
ttttgggttggtacctgttgtaaac

SEQ ID NO: 149685 - DNA, 25 bp, SARS Virus
tttgggttggtgactgttgtaaact

SEQ ID NO: 149686 - DNA, 25 bp, SARS Virus
ttgggttggtgcatgttgtaaacta

SEQ ID NO: 149687 - DNA, 25 bp, SARS Virus
tgggttggtgccagttgtaaactaa

SEQ ID NO: 149688 - DNA, 25 bp, SARS Virus
gggttggtgcctattgtaaactaaa

SEQ ID NO: 149689 - DNA, 25 bp, SARS Virus
ggttggtgcctgatgtaaactaaag

SEQ ID NO: 149690 - DNA, 25 bp, SARS Virus
gttggtgcctgtagtaaactaaaga

SEQ ID NO: 149691 - DNA, 25 bp, SARS Virus
ttggtgcctgttataaactaaagag

SEQ ID NO: 149692 - DNA, 25 bp, SARS Virus
tggtgcctgttgaaaactaaagaga

SEQ ID NO: 149693 - DNA, 25 bp, SARS Virus
ggtgcctgttgtaaactaaagagac

SEQ ID NO: 149694 - DNA, 25 bp, SARS Virus
gtgcctgttgtaaactaaagagaca

SEQ ID NO: 149695 - DNA, 25 bp, SARS Virus
tgcctgttgtaaactaaagagacac

SEQ ID NO: 149696 - DNA, 25 bp, SARS Virus
gcctgttgtaaaataaagagacacc

SEQ ID NO: 149697 - DNA, 25 bp, SARS Virus
cctgttgtaaacaaaagagacaccg

SEQ ID NO: 149698 - DNA, 25 bp, SARS Virus
ctgttgtaaactaaagagacaccgt

SEQ ID NO: 149699 - DNA, 25 bp, SARS Virus
tgttgtaaactaaagagacaccgtc

SEQ ID NO: 149700 - DNA, 25 bp, SARS Virus
gttgtaaactaaagagacaccgtcg

SEQ ID NO: 149701 - DNA, 25 bp, SARS Virus
ttgtaaactaaaaagacaccgtcgt

SEQ ID NO: 149702 - DNA, 25 bp, SARS Virus
tgtaaactaaagagacaccgtcgtt

SEQ ID NO: 149703 - DNA, 25 bp, SARS Virus
gtaaactaaagaaacaccgtcgttt

SEQ ID NO: 149704 - DNA, 25 bp, SARS Virus
taaactaaagagacaccgtcgtttt

SEQ ID NO: 149705 - DNA, 25 bp, SARS Virus
aaactaaagagaaaccgtcgtttta

SEQ ID NO: 149706 - DNA, 25 bp, SARS Virus
aactaaagagacaccgtcgttttat

SEQ ID NO: 149707 - DNA, 25 bp, SARS Virus
actaaagagacaacgtcgttttatt

SEQ ID NO: 149708 - DNA, 25 bp, SARS Virus
ctaaagagacacagtcgttttattt

SEQ ID NO: 149709 - DNA, 25 bp, SARS Virus
taaagagacaccatcgttttattta

SEQ ID NO: 149710 - DNA, 25 bp, SARS Virus
aaagagacaccgacgttttatttat

SEQ ID NO: 149711 - DNA, 25 bp, SARS Virus
aagagacaccgtagttttatttatg

SEQ ID NO: 149712 - DNA, 25 bp, SARS Virus
agagacaccgtcattttatttatgg

SEQ ID NO: 149713 - DNA, 25 bp, SARS Virus
gagacaccgtcgatttatttatggt

SEQ ID NO: 149714 - DNA, 25 bp, SARS Virus
agacaccgtcgtattatttatggta

SEQ ID NO: 149715 - DNA, 25 bp, SARS Virus
gacaccgtcgttatatttatggtag

SEQ ID NO: 149716 - DNA, 25 bp, SARS Virus
acaccgtcgtttaatttatggtagg

SEQ ID NO: 149717 - DNA, 25 bp, SARS Virus
caccgtcgttttatttatggtagga

SEQ ID NO: 149718 - DNA, 25 bp, SARS Virus
accgtcgttttaattatggtaggaa

SEQ ID NO: 149719 - DNA, 25 bp, SARS Virus
ccgtcgttttatatatggtaggaat

SEQ ID NO: 149720 - DNA, 25 bp, SARS Virus
cgtcgttttattaatggtaggaatt

SEQ ID NO: 149721 - DNA, 25 bp, SARS Virus
gtcgttttatttatggtaggaattt

SEQ ID NO: 149722 - DNA, 25 bp, SARS Virus
tcgttttatttaaggtaggaatttt

SEQ ID NO: 149723 - DNA, 25 bp, SARS Virus
cgttttatttatagtaggaattttc

SEQ ID NO: 149724 - DNA, 25 bp, SARS Virus
gttttatttatgataggaattttcc

SEQ ID NO: 149725 - DNA, 25 bp, SARS Virus
ttttatttatggaaggaattttcca

SEQ ID NO: 149726 - DNA, 25 bp, SARS Virus
tttatttatggtaggaattttccat

SEQ ID NO: 149727 - DNA, 25 bp, SARS Virus
ttatttatggtaagaattttccata

SEQ ID NO: 149728 - DNA, 25 bp, SARS Virus
tatttatggtagaaattttccatac

SEQ ID NO: 149729 - DNA, 25 bp, SARS Virus
atttatggtaggaattttccatact

SEQ ID NO: 149730 - DNA, 25 bp, SARS Virus
tttatggtaggaattttccatactg

SEQ ID NO: 149731 - DNA, 25 bp, SARS Virus
ttatggtaggaaatttccatactgt

SEQ ID NO: 149732 - DNA, 25 bp, SARS Virus
tatggtaggaatattccatactgtc

SEQ ID NO: 149733 - DNA, 25 bp, SARS Virus
atggtaggaattatccatactgtcc

SEQ ID NO: 149734 - DNA, 25 bp, SARS Virus
tggtaggaatttaccatactgtccc

SEQ ID NO: 149735 - DNA, 25 bp, SARS Virus
ggtaggaattttacatactgtccca

SEQ ID NO: 149736 - DNA, 25 bp, SARS Virus
gtaggaattttcaatactgtcccaa

SEQ ID NO: 149737 - DNA, 25 bp, SARS Virus
taggaattttccatactgtcccaac

SEQ ID NO: 149738 - DNA, 25 bp, SARS Virus
aggaattttccaaactgtcccaacg

SEQ ID NO: 149739 - DNA, 25 bp, SARS Virus
ggaattttccatactgtcccaacgg

SEQ ID NO: 149740 - DNA, 25 bp, SARS Virus
gaattttccataatgtcccaacggt

SEQ ID NO: 149741 - DNA, 25 bp, SARS Virus
aattttccatacagtcccaacggtt

SEQ ID NO: 149742 - DNA, 25 bp, SARS Virus
attttccatactatcccaacggttt

SEQ ID NO: 149743 - DNA, 25 bp, SARS Virus
ttttccatactgacccaacggtttg

SEQ ID NO: 149744 - DNA, 25 bp, SARS Virus
tttccatactgtaccaacggtttgc

SEQ ID NO: 149745 - DNA, 25 bp, SARS Virus
ttccatactgtcacaacggtttgca

SEQ ID NO: 149746 - DNA, 25 bp, SARS Virus
tccatactgtccaaacggtttgcat

SEQ ID NO: 149747 - DNA, 25 bp, SARS Virus
ccatactgtcccaacggtttgcata

SEQ ID NO: 149748 - DNA, 25 bp, SARS Virus
catactgtcccaacggtttgcatac

SEQ ID NO: 149749 - DNA, 25 bp, SARS Virus
atactgtcccaaaggtttgcatact

SEQ ID NO: 149750 - DNA, 25 bp, SARS Virus
tactgtcccaacagtttgcatacta

SEQ ID NO: 149751 - DNA, 25 bp, SARS Virus
actgtcccaacgatttgcatactaa

SEQ ID NO: 149752 - DNA, 25 bp, SARS Virus
ctgtcccaacggattgcatactaat

SEQ ID NO: 149753 - DNA, 25 bp, SARS Virus
tgtcccaacggtatgcatactaatt

SEQ ID NO: 149754 - DNA, 25 bp, SARS Virus
gtcccaacggttagcatactaatta

SEQ ID NO: 149755 - DNA, 25 bp, SARS Virus
tcccaacggtttacatactaattat

SEQ ID NO: 149756 - DNA, 25 bp, SARS Virus
cccaacggtttgaatactaattatc

SEQ ID NO: 149757 - DNA, 25 bp, SARS Virus
ccaacggtttgcatactaattatca

SEQ ID NO: 149758 - DNA, 25 bp, SARS Virus
caacggtttgcaaactaattatcat

SEQ ID NO: 149759 - DNA, 25 bp, SARS Virus
aacggtttgcatactaattatcata

SEQ ID NO: 149760 - DNA, 25 bp, SARS Virus
acggtttgcataataattatcatac

SEQ ID NO: 149761 - DNA, 25 bp, SARS Virus
cggtttgcatacaaattatcatact

SEQ ID NO: 149762 - DNA, 25 bp, SARS Virus
ggtttgcatactaattatcatactt

SEQ ID NO: 149763 - DNA, 25 bp, SARS Virus
gtttgcatactaattatcatacttt

SEQ ID NO: 149764 - DNA, 25 bp, SARS Virus
tttgcatactaaatatcatactttg

SEQ ID NO: 149765 - DNA, 25 bp, SARS Virus
ttgcatactaataatcatactttgg

SEQ ID NO: 149766 - DNA, 25 bp, SARS Virus
tgcatactaattatcatactttggg

SEQ ID NO: 149767 - DNA, 25 bp, SARS Virus
gcatactaattaacatactttggga

SEQ ID NO: 149768 - DNA, 25 bp, SARS Virus
catactaattataatactttgggac

SEQ ID NO: 149769 - DNA, 25 bp, SARS Virus
atactaattatcatactttgggaca

SEQ ID NO: 149770 - DNA, 25 bp, SARS Virus
tactaattatcaaactttgggacat

SEQ ID NO: 149771 - DNA, 25 bp, SARS Virus
actaattatcatactttgggacatt

SEQ ID NO: 149772 - DNA, 25 bp, SARS Virus
ctaattatcataatttgggacattg

SEQ ID NO: 149773 - DNA, 25 bp, SARS Virus
taattatcatacattgggacattgt

SEQ ID NO: 149774 - DNA, 25 bp, SARS Virus
aattatcatactatgggacattgta

SEQ ID NO: 149775 - DNA, 25 bp, SARS Virus
attatcatacttagggacattgtaa

SEQ ID NO: 149776 - DNA, 25 bp, SARS Virus
ttatcatactttaggacattgtaat

SEQ ID NO: 149777 - DNA, 25 bp, SARS Virus
tatcatactttgagacattgtaatc

SEQ ID NO: 149778 - DNA, 25 bp, SARS Virus
atcatactttggaacattgtaatct

SEQ ID NO: 149779 - DNA, 25 bp, SARS Virus
tcatactttgggacattgtaatctt

SEQ ID NO: 149780 - DNA, 25 bp, SARS Virus
catactttgggaaattgtaatctta

SEQ ID NO: 149781 - DNA, 25 bp, SARS Virus
atactttgggacattgtaatcttat

SEQ ID NO: 149782 - DNA, 25 bp, SARS Virus
tactttgggacaatgtaatcttatt

SEQ ID NO: 149783 - DNA, 25 bp, SARS Virus
actttgggacatagtaatcttattt

SEQ ID NO: 149784 - DNA, 25 bp, SARS Virus
ctttgggacattataatcttatttt

SEQ ID NO: 149785 - DNA, 25 bp, SARS Virus
tttgggacattgaaatcttatttta

SEQ ID NO: 149786 - DNA, 25 bp, SARS Virus
ttgggacattgtaatcttattttac

SEQ ID NO: 149787 - DNA, 25 bp, SARS Virus
tgggacattgtaatcttattttacc

SEQ ID NO: 149788 - DNA, 25 bp, SARS Virus
gggacattgtaaacttattttacct

SEQ ID NO: 149789 - DNA, 25 bp, SARS Virus
ggacattgtaatattattttacctt

SEQ ID NO: 149790 - DNA, 25 bp, SARS Virus
gacattgtaatcatattttaccttc

SEQ ID NO: 149791 - DNA, 25 bp, SARS Virus
acattgtaatctaattttaccttct

SEQ ID NO: 149792 - DNA, 25 bp, SARS Virus
cattgtaatcttattttaccttctt

SEQ ID NO: 149793 - DNA, 25 bp, SARS Virus
attgtaatcttaatttaccttcttt

SEQ ID NO: 149794 - DNA, 25 bp, SARS Virus
ttgtaatcttatattaccttcttta

SEQ ID NO: 149795 - DNA, 25 bp, SARS Virus
tgtaatcttattataccttctttat

SEQ ID NO: 149796 - DNA, 25 bp, SARS Virus
gtaatcttatttaaccttctttatt

SEQ ID NO: 149797 - DNA, 25 bp, SARS Virus
taatcttattttaccttctttattt

SEQ ID NO: 149798 - DNA, 25 bp, SARS Virus
aatcttattttaacttctttattta

SEQ ID NO: 149799 - DNA, 25 bp, SARS Virus
atcttattttacattctttatttag

SEQ ID NO: 149800 - DNA, 25 bp, SARS Virus
tcttattttaccatctttatttagg

SEQ ID NO: 149801 - DNA, 25 bp, SARS Virus
cttattttacctactttatttagga

SEQ ID NO: 149802 - DNA, 25 bp, SARS Virus
ttattttaccttatttatttaggac

SEQ ID NO: 149803 - DNA, 25 bp, SARS Virus
tattttaccttcattatttaggact

SEQ ID NO: 149804 - DNA, 25 bp, SARS Virus
attttaccttctatatttaggactc

SEQ ID NO: 149805 - DNA, 25 bp, SARS Virus
ttttaccttcttaatttaggactca

SEQ ID NO: 149806 - DNA, 25 bp, SARS Virus
tttaccttctttatttaggactcaa

SEQ ID NO: 149807 - DNA, 25 bp, SARS Virus
ttaccttctttaattaggactcaat

SEQ ID NO: 149808 - DNA, 25 bp, SARS Virus
taccttctttatataggactcaatt

SEQ ID NO: 149809 - DNA, 25 bp, SARS Virus
accttctttattaaggactcaattt

SEQ ID NO: 149810 - DNA, 25 bp, SARS Virus
ccttctttatttaggactcaattta

SEQ ID NO: 149811 - DNA, 25 bp, SARS Virus
cttctttatttaagactcaatttat

SEQ ID NO: 149812 - DNA, 25 bp, SARS Virus
ttctttatttagaactcaatttatt

SEQ ID NO: 149813 - DNA, 25 bp, SARS Virus
tctttatttaggactcaatttattt

SEQ ID NO: 149814 - DNA, 25 bp, SARS Virus
ctttatttaggaatcaatttatttc

SEQ ID NO: 149815 - DNA, 25 bp, SARS Virus
tttatttaggacacaatttatttct

SEQ ID NO: 149816 - DNA, 25 bp, SARS Virus
ttatttaggactaaatttatttctc

SEQ ID NO: 149817 - DNA, 25 bp, SARS Virus
tatttaggactcaatttatttctca

SEQ ID NO: 149818 - DNA, 25 bp, SARS Virus
atttaggactcaatttatttctcac

SEQ ID NO: 149819 - DNA, 25 bp, SARS Virus
tttaggactcaaattatttctcaca

SEQ ID NO: 149820 - DNA, 25 bp, SARS Virus
ttaggactcaatatatttctcacag

SEQ ID NO: 149821 - DNA, 25 bp, SARS Virus
taggactcaattaatttctcacaga

SEQ ID NO: 149822 - DNA, 25 bp, SARS Virus
aggactcaatttatttctcacagac

SEQ ID NO: 149823 - DNA, 25 bp, SARS Virus
ggactcaatttaattctcacagact

SEQ ID NO: 149824 - DNA, 25 bp, SARS Virus
gactcaatttatatctcacagacta

SEQ ID NO: 149825 - DNA, 25 bp, SARS Virus
actcaatttattactcacagactag

SEQ ID NO: 149826 - DNA, 25 bp, SARS Virus
ctcaatttatttatcacagactaga

SEQ ID NO: 149827 - DNA, 25 bp, SARS Virus
tcaatttatttcacacagactagat

SEQ ID NO: 149828 - DNA, 25 bp, SARS Virus
caatttatttctaacagactagatt

SEQ ID NO: 149829 - DNA, 25 bp, SARS Virus
aatttatttctcacagactagattt

SEQ ID NO: 149830 - DNA, 25 bp, SARS Virus
atttatttctcaaagactagatttt

SEQ ID NO: 149831 - DNA, 25 bp, SARS Virus
tttatttctcacagactagattttt

SEQ ID NO: 149832 - DNA, 25 bp, SARS Virus
ttatttctcacaaactagattttta

SEQ ID NO: 149833 - DNA, 25 bp, SARS Virus
tatttctcacagactagatttttaa

SEQ ID NO: 149834 - DNA, 25 bp, SARS Virus
atttctcacagaatagatttttaaa

SEQ ID NO: 149835 - DNA, 25 bp, SARS Virus
tttctcacagacaagatttttaaag

SEQ ID NO: 149836 - DNA, 25 bp, SARS Virus
ttctcacagactagatttttaaagt

SEQ ID NO: 149837 - DNA, 25 bp, SARS Virus
tctcacagactaaatttttaaagta

SEQ ID NO: 149838 - DNA, 25 bp, SARS Virus
ctcacagactagatttttaaagtag

SEQ ID NO: 149839 - DNA, 25 bp, SARS Virus
tcacagactagaattttaaagtagt

SEQ ID NO: 149840 - DNA, 25 bp, SARS Virus
cacagactagatatttaaagtagtc

SEQ ID NO: 149841 - DNA, 25 bp, SARS Virus
acagactagattattaaagtagtcc

SEQ ID NO: 149842 - DNA, 25 bp, SARS Virus
cagactagatttataaagtagtcct

SEQ ID NO: 149843 - DNA, 25 bp, SARS Virus
agactagattttaaaagtagtccta

SEQ ID NO: 149844 - DNA, 25 bp, SARS Virus
gactagatttttaaagtagtcctat

SEQ ID NO: 149845 - DNA, 25 bp, SARS Virus
actagatttttaaagtagtcctatc

SEQ ID NO: 149846 - DNA, 25 bp, SARS Virus
ctagatttttaaagtagtcctatca

SEQ ID NO: 149847 - DNA, 25 bp, SARS Virus
tagatttttaaaatagtcctatcat

SEQ ID NO: 149848 - DNA, 25 bp, SARS Virus
agatttttaaagaagtcctatcatt

SEQ ID NO: 149849 - DNA, 25 bp, SARS Virus
ttccatctagtgcttgatgtagata

SEQ ID NO: 149850 - DNA, 25 bp, SARS Virus
tccatctagtgcctgatgtagatat

SEQ ID NO: 149851 - DNA, 25 bp, SARS Virus
ccatctagtgctcgatgtagatatc

SEQ ID NO: 149852 - DNA, 25 bp, SARS Virus
catctagtgcttcatgtagatatcc

SEQ ID NO: 149853 - DNA, 25 bp, SARS Virus
atctagtgcttgctgtagatatcca

SEQ ID NO: 149854 - DNA, 25 bp, SARS Virus
tctagtgcttgacgtagatatccaa

SEQ ID NO: 149855 - DNA, 25 bp, SARS Virus
ctagtgcttgatctagatatccaac

SEQ ID NO: 149856 - DNA, 25 bp, SARS Virus
tagtgcttgatgcagatatccaact

SEQ ID NO: 149857 - DNA, 25 bp, SARS Virus
agtgcttgatgtcgatatccaacta

SEQ ID NO: 149858 - DNA, 25 bp, SARS Virus
gtgcttgatgtacatatccaactat

SEQ ID NO: 149859 - DNA, 25 bp, SARS Virus
tgcttgatgtagctatccaactatc

SEQ ID NO: 149860 - DNA, 25 bp, SARS Virus
gcttgatgtagacatccaactatcg

SEQ ID NO: 149861 - DNA, 25 bp, SARS Virus
cttgatgtagatctccaactatcgg

SEQ ID NO: 149862 - DNA, 25 bp, SARS Virus
ttgatgtagatacccaactatcggg

SEQ ID NO: 149863 - DNA, 25 bp, SARS Virus
tgatgtagatatccaactatcggga

SEQ ID NO: 149864 - DNA, 25 bp, SARS Virus
gatgtagatatccaactatcgggaa

SEQ ID NO: 149865 - DNA, 25 bp, SARS Virus
atgtagatatcccactatcgggaat

SEQ ID NO: 149866 - DNA, 25 bp, SARS Virus
tgtagatatccacctatcgggaata

SEQ ID NO: 149867 - DNA, 25 bp, SARS Virus
gtagatatccaactatcgggaatat

SEQ ID NO: 149868 - DNA, 25 bp, SARS Virus
tagatatccaaccatcgggaatatt

SEQ ID NO: 149869 - DNA, 25 bp, SARS Virus
agatatccaactctcgggaatattt

SEQ ID NO: 149870 - DNA, 25 bp, SARS Virus
gatatccaactaccgggaatatttg

SEQ ID NO: 149871 - DNA, 25 bp, SARS Virus
atatccaactatcgggaatatttgt

SEQ ID NO: 149872 - DNA, 25 bp, SARS Virus
tatccaactatccggaatatttgta

SEQ ID NO: 149873 - DNA, 25 bp, SARS Virus
atccaactatcgcgaatatttgtat

SEQ ID NO: 149874 - DNA, 25 bp, SARS Virus
tccaactatcggcaatatttgtatc

SEQ ID NO: 149875 - DNA, 25 bp, SARS Virus
ccaactatcgggcatatttgtatct

SEQ ID NO: 149876 - DNA, 25 bp, SARS Virus
caactatcgggactatttgtatctc

SEQ ID NO: 149877 - DNA, 25 bp, SARS Virus
aactatcgggaacatttgtatctct

SEQ ID NO: 149878 - DNA, 25 bp, SARS Virus
actatcgggaatctttgtatctctt

SEQ ID NO: 149879 - DNA, 25 bp, SARS Virus
ctatcgggaatacttgtatctcttt

SEQ ID NO: 149880 - DNA, 25 bp, SARS Virus
tatcgggaatatctgtatctctttg

SEQ ID NO: 149881 - DNA, 25 bp, SARS Virus
atcgggaatattcgtatctctttgg

SEQ ID NO: 149882 - DNA, 25 bp, SARS Virus
tcgggaatatttctatctctttggg

SEQ ID NO: 149883 - DNA, 25 bp, SARS Virus
cgggaatatttgcatctctttgggt

SEQ ID NO: 149884 - DNA, 25 bp, SARS Virus
gggaatatttgtctctctttgggta

SEQ ID NO: 149885 - DNA, 25 bp, SARS Virus
ggaatatttgtacctctttgggtag

SEQ ID NO: 149886 - DNA, 25 bp, SARS Virus
gaatatttgtatctctttgggtaga

SEQ ID NO: 149887 - DNA, 25 bp, SARS Virus
aatatttgtatccctttgggtagaa

SEQ ID NO: 149888 - DNA, 25 bp, SARS Virus
atatttgtatctctttgggtagaaa

SEQ ID NO: 149889 - DNA, 25 bp, SARS Virus
tatttgtatctccttgggtagaaat

SEQ ID NO: 149890 - DNA, 25 bp, SARS Virus
atttgtatctctctgggtagaaata

SEQ ID NO: 149891 - DNA, 25 bp, SARS Virus
tttgtatctcttcgggtagaaataa

SEQ ID NO: 149892 - DNA, 25 bp, SARS Virus
ttgtatctctttcggtagaaataaa

SEQ ID NO: 149893 - DNA, 25 bp, SARS Virus
tgtatctctttgcgtagaaataaaa

SEQ ID NO: 149894 - DNA, 25 bp, SARS Virus
gtatctctttggctagaaataaaaa

SEQ ID NO: 149895 - DNA, 25 bp, SARS Virus
tatctctttgggcagaaataaaaat

SEQ ID NO: 149896 - DNA, 25 bp, SARS Virus
atctctttgggtcgaaataaaaatt

SEQ ID NO: 149897 - DNA, 25 bp, SARS Virus
tctctttgggtacaaataaaaattt

SEQ ID NO: 149898 - DNA, 25 bp, SARS Virus
ctctttgggtagcaataaaaatttg

SEQ ID NO: 149899 - DNA, 25 bp, SARS Virus
tctttgggtagacataaaaatttgt

SEQ ID NO: 149900 - DNA, 25 bp, SARS Virus
ctttgggtagaactaaaaatttgtg

SEQ ID NO: 149901 - DNA, 25 bp, SARS Virus
tttgggtagaaacaaaaatttgtgt

SEQ ID NO: 149902 - DNA, 25 bp, SARS Virus
ttgggtagaaatcaaaatttgtgtt

SEQ ID NO: 149903 - DNA, 25 bp, SARS Virus
tgggtagaaatacaaatttgtgttt

SEQ ID NO: 149904 - DNA, 25 bp, SARS Virus
gggtagaaataacaatttgtgtttg

SEQ ID NO: 149905 - DNA, 25 bp, SARS Virus
ggtagaaataaacatttgtgtttga

SEQ ID NO: 149906 - DNA, 25 bp, SARS Virus
gtagaaataaaactttgtgtttgag

SEQ ID NO: 149907 - DNA, 25 bp, SARS Virus
tagaaataaaaacttgtgtttgaga

SEQ ID NO: 149908 - DNA, 25 bp, SARS Virus
agaaataaaaatctgtgtttgagag

SEQ ID NO: 149909 - DNA, 25 bp, SARS Virus
gaaataaaaattcgtgtttgagagc

SEQ ID NO: 149910 - DNA, 25 bp, SARS Virus
aaataaaaatttctgtttgagagca

SEQ ID NO: 149911 - DNA, 25 bp, SARS Virus
aataaaaatttgcgtttgagagcat

SEQ ID NO: 149912 - DNA, 25 bp, SARS Virus
ataaaaatttgtctttgagagcatt

SEQ ID NO: 149913 - DNA, 25 bp, SARS Virus
taaaaatttgtgcttgagagcattc

SEQ ID NO: 149914 - DNA, 25 bp, SARS Virus
aaaaatttgtgtctgagagcattca

SEQ ID NO: 149915 - DNA, 25 bp, SARS Virus
aaaatttgtgttcgagagcattcac

SEQ ID NO: 149916 - DNA, 25 bp, SARS Virus
aaatttgtgtttcagagcattcaca

SEQ ID NO: 149917 - DNA, 25 bp, SARS Virus
aatttgtgtttgcgagcattcacaa

SEQ ID NO: 149918 - DNA, 25 bp, SARS Virus
atttgtgtttgacagcattcacaaa

SEQ ID NO: 149919 - DNA, 25 bp, SARS Virus
tttgtgtttgagcgcattcacaaat

SEQ ID NO: 149920 - DNA, 25 bp, SARS Virus
ttgtgtttgagaccattcacaaatt

SEQ ID NO: 149921 - DNA, 25 bp, SARS Virus
tgtgtttgagagcattcacaaattt

SEQ ID NO: 149922 - DNA, 25 bp, SARS Virus
gtgtttgagagccttcacaaatttt

SEQ ID NO: 149923 - DNA, 25 bp, SARS Virus
tgtttgagagcactcacaaatttta

SEQ ID NO: 149924 - DNA, 25 bp, SARS Virus
gtttgagagcatccacaaattttaa

SEQ ID NO: 149925 - DNA, 25 bp, SARS Virus
tttgagagcattcacaaattttaat

SEQ ID NO: 149926 - DNA, 25 bp, SARS Virus
ttgagagcattcccaaattttaatg

SEQ ID NO: 149927 - DNA, 25 bp, SARS Virus
tgagagcattcacaaattttaatgg

SEQ ID NO: 149928 - DNA, 25 bp, SARS Virus
gagagcattcaccaattttaatgga

SEQ ID NO: 149929 - DNA, 25 bp, SARS Virus
agagcattcacacattttaatggac

SEQ ID NO: 149930 - DNA, 25 bp, SARS Virus
gagcattcacaacttttaatggact

SEQ ID NO: 149931 - DNA, 25 bp, SARS Virus
agcattcacaaactttaatggactg

SEQ ID NO: 149932 - DNA, 25 bp, SARS Virus
gcattcacaaatcttaatggactga

SEQ ID NO: 149933 - DNA, 25 bp, SARS Virus
cattcacaaattctaatggactgaa

SEQ ID NO: 149934 - DNA, 25 bp, SARS Virus
attcacaaatttcaatggactgaaa

SEQ ID NO: 149935 - DNA, 25 bp, SARS Virus
ttcacaaattttcatggactgaaaa

SEQ ID NO: 149936 - DNA, 25 bp, SARS Virus
tcacaaattttactggactgaaaag

SEQ ID NO: 149937 - DNA, 25 bp, SARS Virus
cacaaattttaacggactgaaaaga

SEQ ID NO: 149938 - DNA, 25 bp, SARS Virus
acaaattttaatcgactgaaaagac

SEQ ID NO: 149939 - DNA, 25 bp, SARS Virus
caaattttaatgcactgaaaagact

SEQ ID NO: 149940 - DNA, 25 bp, SARS Virus
aaattttaatggcctgaaaagactt

SEQ ID NO: 149941 - DNA, 25 bp, SARS Virus
aattttaatggactgaaaagacttt

SEQ ID NO: 149942 - DNA, 25 bp, SARS Virus
attttaatggaccgaaaagactttg

SEQ ID NO: 149943 - DNA, 25 bp, SARS Virus
ttttaatggactcaaaagactttgt

SEQ ID NO: 149944 - DNA, 25 bp, SARS Virus
tttaatggactgcaaagactttgta

SEQ ID NO: 149945 - DNA, 25 bp, SARS Virus
ttaatggactgacaagactttgtag

SEQ ID NO: 149946 - DNA, 25 bp, SARS Virus
taatggactgaacagactttgtagt

SEQ ID NO: 149947 - DNA, 25 bp, SARS Virus
aatggactgaaacgactttgtagtt

SEQ ID NO: 149948 - DNA, 25 bp, SARS Virus
atggactgaaaacactttgtagttc

SEQ ID NO: 149949 - DNA, 25 bp, SARS Virus
tggactgaaaagcctttgtagttcg

SEQ ID NO: 149950 - DNA, 25 bp, SARS Virus
ggactgaaaagactttgtagttcgc

SEQ ID NO: 149951 - DNA, 25 bp, SARS Virus
gactgaaaagaccttgtagttcgct

SEQ ID NO: 149952 - DNA, 25 bp, SARS Virus
actgaaaagactctgtagttcgctt

SEQ ID NO: 149953 - DNA, 25 bp, SARS Virus
ctgaaaagacttcgtagttcgcttt

SEQ ID NO: 149954 - DNA, 25 bp, SARS Virus
tgaaaagactttctagttcgctttt

SEQ ID NO: 149955 - DNA, 25 bp, SARS Virus
gaaaagactttgcagttcgcttttc

SEQ ID NO: 149956 - DNA, 25 bp, SARS Virus
aaaagactttgtcgttcgcttttcc

SEQ ID NO: 149957 - DNA, 25 bp, SARS Virus
aaagactttgtacttcgcttttccg

SEQ ID NO: 149958 - DNA, 25 bp, SARS Virus
aagactttgtagctcgcttttccgt

SEQ ID NO: 149959 - DNA, 25 bp, SARS Virus
agactttgtagtccgcttttccgta

SEQ ID NO: 149960 - DNA, 25 bp, SARS Virus
gactttgtagttcgcttttccgtag

SEQ ID NO: 149961 - DNA, 25 bp, SARS Virus
actttgtagttcccttttccgtagt

SEQ ID NO: 149962 - DNA, 25 bp, SARS Virus
ctttgtagttcgcttttccgtagtc

SEQ ID NO: 149963 - DNA, 25 bp, SARS Virus
tttgtagttcgcctttccgtagtct

SEQ ID NO: 149964 - DNA, 25 bp, SARS Virus
ttgtagttcgctcttccgtagtcta

SEQ ID NO: 149965 - DNA, 25 bp, SARS Virus
tgtagttcgcttctccgtagtctat

SEQ ID NO: 149966 - DNA, 25 bp, SARS Virus
gtagttcgctttcccgtagtctata

SEQ ID NO: 149967 - DNA, 25 bp, SARS Virus
tagttcgcttttccgtagtctatac

SEQ ID NO: 149968 - DNA, 25 bp, SARS Virus
agttcgcttttccgtagtctataca

SEQ ID NO: 149969 - DNA, 25 bp, SARS Virus
gttcgcttttccctagtctatacat

SEQ ID NO: 149970 - DNA, 25 bp, SARS Virus
ttcgcttttccgcagtctatacatg

SEQ ID NO: 149971 - DNA, 25 bp, SARS Virus
tcgcttttccgtcgtctatacatga

SEQ ID NO: 149972 - DNA, 25 bp, SARS Virus
cgcttttccgtactctatacatgag

SEQ ID NO: 149973 - DNA, 25 bp, SARS Virus
gcttttccgtagcctatacatgagc

SEQ ID NO: 149974 - DNA, 25 bp, SARS Virus
cttttccgtagtctatacatgagct

SEQ ID NO: 149975 - DNA, 25 bp, SARS Virus
ttttccgtagtccatacatgagctt

SEQ ID NO: 149976 - DNA, 25 bp, SARS Virus
tttccgtagtctctacatgagcttt

SEQ ID NO: 149977 - DNA, 25 bp, SARS Virus
ttccgtagtctacacatgagctttc

SEQ ID NO: 149978 - DNA, 25 bp, SARS Virus
tccgtagtctatccatgagctttca

SEQ ID NO: 149979 - DNA, 25 bp, SARS Virus
ccgtagtctatacatgagctttcac

SEQ ID NO: 149980 - DNA, 25 bp, SARS Virus
cgtagtctatacctgagctttcacg

SEQ ID NO: 149981 - DNA, 25 bp, SARS Virus
gtagtctatacacgagctttcacgt

SEQ ID NO: 149982 - DNA, 25 bp, SARS Virus
tagtctatacatcagctttcacgtt

SEQ ID NO: 149983 - DNA, 25 bp, SARS Virus
agtctatacatgcgctttcacgtta

SEQ ID NO: 149984 - DNA, 25 bp, SARS Virus
gtctatacatgacctttcacgttaa

SEQ ID NO: 149985 - DNA, 25 bp, SARS Virus
tctatacatgagctttcacgttaat

SEQ ID NO: 149986 - DNA, 25 bp, SARS Virus
ctatacatgagccttcacgttaatt

SEQ ID NO: 149987 - DNA, 25 bp, SARS Virus
tatacatgagctctcacgttaattt

SEQ ID NO: 149988 - DNA, 25 bp, SARS Virus
atacatgagcttccacgttaattta

SEQ ID NO: 149989 - DNA, 25 bp, SARS Virus
tacatgagctttcacgttaatttac

SEQ ID NO: 149990 - DNA, 25 bp, SARS Virus
acatgagctttcccgttaatttacg

SEQ ID NO: 149991 - DNA, 25 bp, SARS Virus
catgagctttcacgttaatttacgt

SEQ ID NO: 149992 - DNA, 25 bp, SARS Virus
atgagctttcaccttaatttacgta

SEQ ID NO: 149993 - DNA, 25 bp, SARS Virus
tgagctttcacgctaatttacgtaa

SEQ ID NO: 149994 - DNA, 25 bp, SARS Virus
gagctttcacgtcaatttacgtaat

SEQ ID NO: 149995 - DNA, 25 bp, SARS Virus
agctttcacgttcatttacgtaata

SEQ ID NO: 149996 - DNA, 25 bp, SARS Virus
gctttcacgttactttacgtaatag

SEQ ID NO: 149997 - DNA, 25 bp, SARS Virus
ctttcacgttaacttacgtaatagc

SEQ ID NO: 149998 - DNA, 25 bp, SARS Virus
tttcacgttaatctacgtaatagct

SEQ ID NO: 149999 - DNA, 25 bp, SARS Virus
ttcacgttaattcacgtaatagctt

SEQ ID NO: 150000 - DNA, 25 bp, SARS Virus
tcacgttaatttccgtaatagctta

SEQ ID NO: 150001 - DNA, 25 bp, SARS Virus
cacgttaatttacgtaatagcttat

SEQ ID NO: 150002 - DNA, 25 bp, SARS Virus
acgttaatttacctaatagcttata

SEQ ID NO: 150003 - DNA, 25 bp, SARS Virus
cgttaatttacgcaatagcttatag

SEQ ID NO: 150004 - DNA, 25 bp, SARS Virus
gttaatttacgtcatagcttatagt

SEQ ID NO: 150005 - DNA, 25 bp, SARS Virus
ttaatttacgtactagcttatagta

SEQ ID NO: 150006 - DNA, 25 bp, SARS Virus
taatttacgtaacagcttatagtat

SEQ ID NO: 150007 - DNA, 25 bp, SARS Virus
aatttacgtaatcgcttatagtatc

SEQ ID NO: 150008 - DNA, 25 bp, SARS Virus
atttacgtaataccttatagtatca

SEQ ID NO: 150009 - DNA, 25 bp, SARS Virus
tttacgtaatagcttatagtatcat

SEQ ID NO: 150010 - DNA, 25 bp, SARS Virus
ttacgtaatagcctatagtatcata

SEQ ID NO: 150011 - DNA, 25 bp, SARS Virus
tacgtaatagctcatagtatcatac

SEQ ID NO: 150012 - DNA, 25 bp, SARS Virus
acgtaatagcttctagtatcataca

SEQ ID NO: 150013 - DNA, 25 bp, SARS Virus
cgtaatagcttacagtatcatacac

SEQ ID NO: 150014 - DNA, 25 bp, SARS Virus
gtaatagcttatcgtatcatacaca

SEQ ID NO: 150015 - DNA, 25 bp, SARS Virus
taatagcttatactatcatacacag

SEQ ID NO: 150016 - DNA, 25 bp, SARS Virus
aatagcttatagcatcatacacaga

SEQ ID NO: 150017 - DNA, 25 bp, SARS Virus
atagcttatagtctcatacacagac

SEQ ID NO: 150018 - DNA, 25 bp, SARS Virus
tagcttatagtaccatacacagaca

SEQ ID NO: 150019 - DNA, 25 bp, SARS Virus
agcttatagtatcatacacagacac

SEQ ID NO: 150020 - DNA, 25 bp, SARS Virus
gcttatagtatcctacacagacaca

SEQ ID NO: 150021 - DNA, 25 bp, SARS Virus
cttatagtatcacacacagacacat

SEQ ID NO: 150022 - DNA, 25 bp, SARS Virus
ttatagtatcatccacagacacatg

SEQ ID NO: 150023 - DNA, 25 bp, SARS Virus
tatagtatcatacacagacacatgg

SEQ ID NO: 150024 - DNA, 25 bp, SARS Virus
atagtatcatacccagacacatggg

SEQ ID NO: 150025 - DNA, 25 bp, SARS Virus
tagtatcatacacagacacatgggt

SEQ ID NO: 150026 - DNA, 25 bp, SARS Virus
agtatcatacaccgacacatgggta

SEQ ID NO: 150027 - DNA, 25 bp, SARS Virus
gtatcatacacacacacatgggtac

SEQ ID NO: 150028 - DNA, 25 bp, SARS Virus
tatcatacacagccacatgggtacc

SEQ ID NO: 150029 - DNA, 25 bp, SARS Virus
atcatacacagacacatgggtaccc

SEQ ID NO: 150030 - DNA, 25 bp, SARS Virus
tcatacacagacccatgggtaccca

SEQ ID NO: 150031 - DNA, 25 bp, SARS Virus
catacacagacacatgggtacccaa

SEQ ID NO: 150032 - DNA, 25 bp, SARS Virus
atacacagacacctgggtacccaaa

SEQ ID NO: 150033 - DNA, 25 bp, SARS Virus
tacacagacacacgggtacccaaat

SEQ ID NO: 150034 - DNA, 25 bp, SARS Virus
acacagacacatcggtacccaaatc

SEQ ID NO: 150035 - DNA, 25 bp, SARS Virus
cacagacacatgcgtacccaaatct

SEQ ID NO: 150036 - DNA, 25 bp, SARS Virus
acagacacatggctacccaaatctt

SEQ ID NO: 150037 - DNA, 25 bp, SARS Virus
cagacacatgggcacccaaatcttt

SEQ ID NO: 150038 - DNA, 25 bp, SARS Virus
agacacatgggtccccaaatctttg

SEQ ID NO: 150039 - DNA, 25 bp, SARS Virus
gacacatgggtacccaaatctttgt

SEQ ID NO: 150040 - DNA, 25 bp, SARS Virus
acacatgggtacccaaatctttgtc

SEQ ID NO: 150041 - DNA, 25 bp, SARS Virus
cacatgggtacccaaatctttgtcg

SEQ ID NO: 150042 - DNA, 25 bp, SARS Virus
acatgggtaccccaatctttgtcgt

SEQ ID NO: 150043 - DNA, 25 bp, SARS Virus
catgggtacccacatctttgtcgtt

SEQ ID NO: 150044 - DNA, 25 bp, SARS Virus
atgggtacccaactctttgtcgttt

SEQ ID NO: 150045 - DNA, 25 bp, SARS Virus
tgggtacccaaacctttgtcgtttc

SEQ ID NO: 150046 - DNA, 25 bp, SARS Virus
gggtacccaaatctttgtcgtttct

SEQ ID NO: 150047 - DNA, 25 bp, SARS Virus
ggtacccaaatccttgtcgtttctt

SEQ ID NO: 150048 - DNA, 25 bp, SARS Virus
gtacccaaatctctgtcgtttcttt

SEQ ID NO: 150049 - DNA, 25 bp, SARS Virus
tacccaaatcttcgtcgtttctttc

SEQ ID NO: 150050 - DNA, 25 bp, SARS Virus
acccaaatctttctcgtttctttcc

SEQ ID NO: 150051 - DNA, 25 bp, SARS Virus
cccaaatctttgccgtttctttccc

SEQ ID NO: 150052 - DNA, 25 bp, SARS Virus
ccaaatctttgtcgtttctttccca

SEQ ID NO: 150053 - DNA, 25 bp, SARS Virus
caaatctttgtcctttctttcccaa

SEQ ID NO: 150054 - DNA, 25 bp, SARS Virus
aaatctttgtcgcttctttcccaac

SEQ ID NO: 150055 - DNA, 25 bp, SARS Virus
aatctttgtcgtctctttcccaaca

SEQ ID NO: 150056 - DNA, 25 bp, SARS Virus
atctttgtcgttcctttcccaacag

SEQ ID NO: 150057 - DNA, 25 bp, SARS Virus
tctttgtcgtttctttcccaacagt

SEQ ID NO: 150058 - DNA, 25 bp, SARS Virus
ctttgtcgtttccttcccaacagtg

SEQ ID NO: 150059 - DNA, 25 bp, SARS Virus
tttgtcgtttctctcccaacagtgt

SEQ ID NO: 150060 - DNA, 25 bp, SARS Virus
ttgtcgtttcttccccaacagtgtg

SEQ ID NO: 150061 - DNA, 25 bp, SARS Virus
tgtcgtttctttcccaacagtgtgt

SEQ ID NO: 150062 - DNA, 25 bp, SARS Virus
gtcgtttctttcccaacagtgtgtt

SEQ ID NO: 150063 - DNA, 25 bp, SARS Virus
tcgtttctttcccaacagtgtgtta

SEQ ID NO: 150064 - DNA, 25 bp, SARS Virus
cgtttctttccccacagtgtgttaa

SEQ ID NO: 150065 - DNA, 25 bp, SARS Virus
gtttctttcccaccagtgtgttaag

SEQ ID NO: 150066 - DNA, 25 bp, SARS Virus
tttctttcccaacagtgtgttaagt

SEQ ID NO: 150067 - DNA, 25 bp, SARS Virus
ttctttcccaaccgtgtgttaagtt

SEQ ID NO: 150068 - DNA, 25 bp, SARS Virus
tctttcccaacactgtgttaagttt

SEQ ID NO: 150069 - DNA, 25 bp, SARS Virus
ctttcccaacagcgtgttaagtttc

SEQ ID NO: 150070 - DNA, 25 bp, SARS Virus
tttcccaacagtctgttaagtttca

SEQ ID NO: 150071 - DNA, 25 bp, SARS Virus
ttcccaacagtgcgttaagtttcaa

SEQ ID NO: 150072 - DNA, 25 bp, SARS Virus
tcccaacagtgtcttaagtttcaat

SEQ ID NO: 150073 - DNA, 25 bp, SARS Virus
cccaacagtgtgctaagtttcaatg

SEQ ID NO: 150074 - DNA, 25 bp, SARS Virus
ccaacagtgtgtcaagtttcaatgt

SEQ ID NO: 150075 - DNA, 25 bp, SARS Virus
caacagtgtgttcagtttcaatgta

SEQ ID NO: 150076 - DNA, 25 bp, SARS Virus
aacagtgtgttacgtttcaatgtac

SEQ ID NO: 150077 - DNA, 25 bp, SARS Virus
acagtgtgttaactttcaatgtacg

SEQ ID NO: 150078 - DNA, 25 bp, SARS Virus
cagtgtgttaagcttcaatgtacga

SEQ ID NO: 150079 - DNA, 25 bp, SARS Virus
agtgtgttaagtctcaatgtacgag

SEQ ID NO: 150080 - DNA, 25 bp, SARS Virus
gtgtgttaagttccaatgtacgagc

SEQ ID NO: 150081 - DNA, 25 bp, SARS Virus
tgtgttaagtttcaatgtacgagca

SEQ ID NO: 150082 - DNA, 25 bp, SARS Virus
gtgttaagtttccatgtacgagcat

SEQ ID NO: 150083 - DNA, 25 bp, SARS Virus
tgttaagtttcactgtacgagcata

SEQ ID NO: 150084 - DNA, 25 bp, SARS Virus
gttaagtttcaacgtacgagcatat

SEQ ID NO: 150085 - DNA, 25 bp, SARS Virus
ttaagtttcaatctacgagcatatt

SEQ ID NO: 150086 - DNA, 25 bp, SARS Virus
taagtttcaatgcacgagcatattg

SEQ ID NO: 150087 - DNA, 25 bp, SARS Virus
aagtttcaatgtccgagcatattgt

SEQ ID NO: 150088 - DNA, 25 bp, SARS Virus
agtttcaatgtacgagcatattgtt

SEQ ID NO: 150089 - DNA, 25 bp, SARS Virus
gtttcaatgtaccagcatattgttg

SEQ ID NO: 150090 - DNA, 25 bp, SARS Virus
tttcaatgtacgcgcatattgttgt

SEQ ID NO: 150091 - DNA, 25 bp, SARS Virus
ttcaatgtacgaccatattgttgta

SEQ ID NO: 150092 - DNA, 25 bp, SARS Virus
tcaatgtacgagcatattgttgtaa

SEQ ID NO: 150093 - DNA, 25 bp, SARS Virus
caatgtacgagcctattgttgtaat

SEQ ID NO: 150094 - DNA, 25 bp, SARS Virus
aatgtacgagcacattgttgtaatc

SEQ ID NO: 150095 - DNA, 25 bp, SARS Virus
atgtacgagcatcttgttgtaatca

SEQ ID NO: 150096 - DNA, 25 bp, SARS Virus
tgtacgagcatactgttgtaatcat

SEQ ID NO: 150097 - DNA, 25 bp, SARS Virus
gtacgagcatatcgttgtaatcatc

SEQ ID NO: 150098 - DNA, 25 bp, SARS Virus
tacgagcatattcttgtaatcatct

SEQ ID NO: 150099 - DNA, 25 bp, SARS Virus
acgagcatattgctgtaatcatctt

SEQ ID NO: 150100 - DNA, 25 bp, SARS Virus
cgagcatattgtcgtaatcatctta

SEQ ID NO: 150101 - DNA, 25 bp, SARS Virus
gagcatattgttctaatcatcttaa

SEQ ID NO: 150102 - DNA, 25 bp, SARS Virus
agcatattgttgcaatcatcttaac

SEQ ID NO: 150103 - DNA, 25 bp, SARS Virus
gcatattgttgtcatcatcttaaca

SEQ ID NO: 150104 - DNA, 25 bp, SARS Virus
catattgttgtactcatcttaacaa

SEQ ID NO: 150105 - DNA, 25 bp, SARS Virus
atattgttgtaaccatcttaacaat

SEQ ID NO: 150106 - DNA, 25 bp, SARS Virus
tattgttgtaatcatcttaacaatt

SEQ ID NO: 150107 - DNA, 25 bp, SARS Virus
attgttgtaatcctcttaacaatta

SEQ ID NO: 150108 - DNA, 25 bp, SARS Virus
ttgttgtaatcaccttaacaattat

SEQ ID NO: 150109 - DNA, 25 bp, SARS Virus
tgttgtaatcatcttaacaattatt

SEQ ID NO: 150110 - DNA, 25 bp, SARS Virus
gttgtaatcatcctaacaattatta

SEQ ID NO: 150111 - DNA, 25 bp, SARS Virus
ttgtaatcatctcaacaattattat

SEQ ID NO: 150112 - DNA, 25 bp, SARS Virus
tgtaatcatcttcacaattattatt

SEQ ID NO: 150113 - DNA, 25 bp, SARS Virus
gtaatcatcttaccaattattatta

SEQ ID NO: 150114 - DNA, 25 bp, SARS Virus
taatcatcttaacaattattattag

SEQ ID NO: 150115 - DNA, 25 bp, SARS Virus
aatcatcttaaccattattattagt

SEQ ID NO: 150116 - DNA, 25 bp, SARS Virus
atcatcttaacacttattattagtg

SEQ ID NO: 150117 - DNA, 25 bp, SARS Virus
tcatcttaacaactattattagtgg

SEQ ID NO: 150118 - DNA, 25 bp, SARS Virus
catcttaacaatcattattagtggc

SEQ ID NO: 150119 - DNA, 25 bp, SARS Virus
atcttaacaattcttattagtggct

SEQ ID NO: 150120 - DNA, 25 bp, SARS Virus
tcttaacaattactattagtggctg

SEQ ID NO: 150121 - DNA, 25 bp, SARS Virus
cttaacaattatcattagtggctga

SEQ ID NO: 150122 - DNA, 25 bp, SARS Virus
ttaacaattattcttagtggctgac

SEQ ID NO: 150123 - DNA, 25 bp, SARS Virus
taacaattattactagtggctgaca

SEQ ID NO: 150124 - DNA, 25 bp, SARS Virus
aacaattattatcagtggctgacac

SEQ ID NO: 150125 - DNA, 25 bp, SARS Virus
acaattattattcgtggctgacact

SEQ ID NO: 150126 - DNA, 25 bp, SARS Virus
caattattattactggctgacactg

SEQ ID NO: 150127 - DNA, 25 bp, SARS Virus
aattattattagcggctgacactga

SEQ ID NO: 150128 - DNA, 25 bp, SARS Virus
attattattagtcgctgacactgaa

SEQ ID NO: 150129 - DNA, 25 bp, SARS Virus
ttattattagtgcctgacactgaac

SEQ ID NO: 150130 - DNA, 25 bp, SARS Virus
tattattagtggctgacactgaaca

SEQ ID NO: 150131 - DNA, 25 bp, SARS Virus
attattagtggccgacactgaacaa

SEQ ID NO: 150132 - DNA, 25 bp, SARS Virus
ttattagtggctcacactgaacaac

SEQ ID NO: 150133 - DNA, 25 bp, SARS Virus
tattagtggctgccactgaacaaca

SEQ ID NO: 150134 - DNA, 25 bp, SARS Virus
attagtggctgacactgaacaacaa

SEQ ID NO: 150135 - DNA, 25 bp, SARS Virus
ttagtggctgaccctgaacaacaag

SEQ ID NO: 150136 - DNA, 25 bp, SARS Virus
tagtggctgacactgaacaacaagt

SEQ ID NO: 150137 - DNA, 25 bp, SARS Virus
agtggctgacaccgaacaacaagta

SEQ ID NO: 150138 - DNA, 25 bp, SARS Virus
gtggctgacactcaacaacaagtac

SEQ ID NO: 150139 - DNA, 25 bp, SARS Virus
tggctgacactgcacaacaagtacc

SEQ ID NO: 150140 - DNA, 25 bp, SARS Virus
ggctgacactgaccaacaagtacca

SEQ ID NO: 150141 - DNA, 25 bp, SARS Virus
gctgacactgaacaacaagtaccat

SEQ ID NO: 150142 - DNA, 25 bp, SARS Virus
ctgacactgaaccacaagtaccatc

SEQ ID NO: 150143 - DNA, 25 bp, SARS Virus
tgacactgaacaccaagtaccatct

SEQ ID NO: 150144 - DNA, 25 bp, SARS Virus
gacactgaacaacaagtaccatctt

SEQ ID NO: 150145 - DNA, 25 bp, SARS Virus
acactgaacaaccagtaccatcttg

SEQ ID NO: 150146 - DNA, 25 bp, SARS Virus
cactgaacaacacgtaccatcttgg

SEQ ID NO: 150147 - DNA, 25 bp, SARS Virus
actgaacaacaactaccatcttggt

SEQ ID NO: 150148 - DNA, 25 bp, SARS Virus
ctgaacaacaagcaccatcttggtt

SEQ ID NO: 150149 - DNA, 25 bp, SARS Virus
tgaacaacaagtcccatcttggttt

SEQ ID NO: 150150 - DNA, 25 bp, SARS Virus
gaacaacaagtaccatcttggtttt

SEQ ID NO: 150151 - DNA, 25 bp, SARS Virus
aacaacaagtaccatcttggttttt

SEQ ID NO: 150152 - DNA, 25 bp, SARS Virus
acaacaagtaccctcttggtttttg

SEQ ID NO: 150153 - DNA, 25 bp, SARS Virus
caacaagtaccaccttggtttttgg

SEQ ID NO: 150154 - DNA, 25 bp, SARS Virus
aacaagtaccatcttggtttttggg

SEQ ID NO: 150155 - DNA, 25 bp, SARS Virus
acaagtaccatcctggtttttgggt

SEQ ID NO: 150156 - DNA, 25 bp, SARS Virus
caagtaccatctcggtttttgggtt

SEQ ID NO: 150157 - DNA, 25 bp, SARS Virus
aagtaccatcttcgtttttgggttg

SEQ ID NO: 150158 - DNA, 25 bp, SARS Virus
agtaccatcttgctttttgggttgg

SEQ ID NO: 150159 - DNA, 25 bp, SARS Virus
gtaccatcttggcttttgggttggt

SEQ ID NO: 150160 - DNA, 25 bp, SARS Virus
taccatcttggtctttgggttggtg

SEQ ID NO: 150161 - DNA, 25 bp, SARS Virus
accatcttggttcttgggttggtgc

SEQ ID NO: 150162 - DNA, 25 bp, SARS Virus
ccatcttggtttctgggttggtgcc

SEQ ID NO: 150163 - DNA, 25 bp, SARS Virus
catcttggttttcgggttggtgcct

SEQ ID NO: 150164 - DNA, 25 bp, SARS Virus
atcttggtttttcggttggtgcctg

SEQ ID NO: 150165 - DNA, 25 bp, SARS Virus
tcttggtttttgcgttggtgcctgt

SEQ ID NO: 150166 - DNA, 25 bp, SARS Virus
cttggtttttggcttggtgcctgtt

SEQ ID NO: 150167 - DNA, 25 bp, SARS Virus
ttggtttttgggctggtgcctgttg

SEQ ID NO: 150168 - DNA, 25 bp, SARS Virus
tggtttttgggtcggtgcctgttgt

SEQ ID NO: 150169 - DNA, 25 bp, SARS Virus
ggtttttgggttcgtgcctgttgta

SEQ ID NO: 150170 - DNA, 25 bp, SARS Virus
gtttttgggttgctgcctgttgtaa

SEQ ID NO: 150171 - DNA, 25 bp, SARS Virus
tttttgggttggcgcctgttgtaaa

SEQ ID NO: 150172 - DNA, 25 bp, SARS Virus
ttttgggttggtccctgttgtaaac

SEQ ID NO: 150173 - DNA, 25 bp, SARS Virus
tttgggttggtgcctgttgtaaact

SEQ ID NO: 150174 - DNA, 25 bp, SARS Virus
ttgggttggtgcctgttgtaaacta

SEQ ID NO: 150175 - DNA, 25 bp, SARS Virus
tgggttggtgcccgttgtaaactaa

SEQ ID NO: 150176 - DNA, 25 bp, SARS Virus
gggttggtgcctcttgtaaactaaa

SEQ ID NO: 150177 - DNA, 25 bp, SARS Virus
ggttggtgcctgctgtaaactaaag

SEQ ID NO: 150178 - DNA, 25 bp, SARS Virus
gttggtgcctgtcgtaaactaaaga

SEQ ID NO: 150179 - DNA, 25 bp, SARS Virus
ttggtgcctgttctaaactaaagag

SEQ ID NO: 150180 - DNA, 25 bp, SARS Virus
tggtgcctgttgcaaactaaagaga

SEQ ID NO: 150181 - DNA, 25 bp, SARS Virus
ggtgcctgttgtcaactaaagagac

SEQ ID NO: 150182 - DNA, 25 bp, SARS Virus
gtgcctgttgtacactaaagagaca

SEQ ID NO: 150183 - DNA, 25 bp, SARS Virus
tgcctgttgtaacctaaagagacac

SEQ ID NO: 150184 - DNA, 25 bp, SARS Virus
gcctgttgtaaactaaagagacacc

SEQ ID NO: 150185 - DNA, 25 bp, SARS Virus
cctgttgtaaaccaaagagacaccg

SEQ ID NO: 150186 - DNA, 25 bp, SARS Virus
ctgttgtaaactcaagagacaccgt

SEQ ID NO: 150187 - DNA, 25 bp, SARS Virus
tgttgtaaactacagagacaccgtc

SEQ ID NO: 150188 - DNA, 25 bp, SARS Virus
gttgtaaactaacgagacaccgtcg

SEQ ID NO: 150189 - DNA, 25 bp, SARS Virus
ttgtaaactaaacagacaccgtcgt

SEQ ID NO: 150190 - DNA, 25 bp, SARS Virus
tgtaaactaaagcgacaccgtcgtt

SEQ ID NO: 150191 - DNA, 25 bp, SARS Virus
gtaaactaaagacacaccgtcgttt

SEQ ID NO: 150192 - DNA, 25 bp, SARS Virus
taaactaaagagccaccgtcgtttt

SEQ ID NO: 150193 - DNA, 25 bp, SARS Virus
aaactaaagagacaccgtcgtttta

SEQ ID NO: 150194 - DNA, 25 bp, SARS Virus
aactaaagagaccccgtcgttttat

SEQ ID NO: 150195 - DNA, 25 bp, SARS Virus
actaaagagacaccgtcgttttatt

SEQ ID NO: 150196 - DNA, 25 bp, SARS Virus
ctaaagagacaccgtcgttttattt

SEQ ID NO: 150197 - DNA, 25 bp, SARS Virus
taaagagacaccctcgttttattta

SEQ ID NO: 150198 - DNA, 25 bp, SARS Virus
aaagagacaccgccgttttatttat

SEQ ID NO: 150199 - DNA, 25 bp, SARS Virus
aagagacaccgtcgttttatttatg

SEQ ID NO: 150200 - DNA, 25 bp, SARS Virus
agagacaccgtccttttatttatgg

SEQ ID NO: 150201 - DNA, 25 bp, SARS Virus
gagacaccgtcgctttatttatggt

SEQ ID NO: 150202 - DNA, 25 bp, SARS Virus
agacaccgtcgtcttatttatggta

SEQ ID NO: 150203 - DNA, 25 bp, SARS Virus
gacaccgtcgttctatttatggtag

SEQ ID NO: 150204 - DNA, 25 bp, SARS Virus
acaccgtcgtttcatttatggtagg

SEQ ID NO: 150205 - DNA, 25 bp, SARS Virus
caccgtcgttttctttatggtagga

SEQ ID NO: 150206 - DNA, 25 bp, SARS Virus
accgtcgttttacttatggtaggaa

SEQ ID NO: 150207 - DNA, 25 bp, SARS Virus
ccgtcgttttatctatggtaggaat

SEQ ID NO: 150208 - DNA, 25 bp, SARS Virus
cgtcgttttattcatggtaggaatt

SEQ ID NO: 150209 - DNA, 25 bp, SARS Virus
gtcgttttatttctggtaggaattt

SEQ ID NO: 150210 - DNA, 25 bp, SARS Virus
tcgttttatttacggtaggaatttt

SEQ ID NO: 150211 - DNA, 25 bp, SARS Virus
cgttttatttatcgtaggaattttc

SEQ ID NO: 150212 - DNA, 25 bp, SARS Virus
gttttatttatgctaggaattttcc

SEQ ID NO: 150213 - DNA, 25 bp, SARS Virus
ttttatttatggcaggaattttcca

SEQ ID NO: 150214 - DNA, 25 bp, SARS Virus
tttatttatggtcggaattttccat

SEQ ID NO: 150215 - DNA, 25 bp, SARS Virus
ttatttatggtacgaattttccata

SEQ ID NO: 150216 - DNA, 25 bp, SARS Virus
tatttatggtagcaattttccatac

SEQ ID NO: 150217 - DNA, 25 bp, SARS Virus
atttatggtaggcattttccatact

SEQ ID NO: 150218 - DNA, 25 bp, SARS Virus
tttatggtaggacttttccatactg

SEQ ID NO: 150219 - DNA, 25 bp, SARS Virus
ttatggtaggaactttccatactgt

SEQ ID NO: 150220 - DNA, 25 bp, SARS Virus
tatggtaggaatcttccatactgtc

SEQ ID NO: 150221 - DNA, 25 bp, SARS Virus
atggtaggaattctccatactgtcc

SEQ ID NO: 150222 - DNA, 25 bp, SARS Virus
tggtaggaatttcccatactgtccc

SEQ ID NO: 150223 - DNA, 25 bp, SARS Virus
ggtaggaattttccatactgtccca

SEQ ID NO: 150224 - DNA, 25 bp, SARS Virus
gtaggaattttccatactgtcccaa

SEQ ID NO: 150225 - DNA, 25 bp, SARS Virus
taggaattttccctactgtcccaac

SEQ ID NO: 150226 - DNA, 25 bp, SARS Virus
aggaattttccacactgtcccaacg

SEQ ID NO: 150227 - DNA, 25 bp, SARS Virus
ggaattttccatcctgtcccaacgg

SEQ ID NO: 150228 - DNA, 25 bp, SARS Virus
gaattttccatactgtcccaacggt

SEQ ID NO: 150229 - DNA, 25 bp, SARS Virus
aattttccataccgtcccaacggtt

SEQ ID NO: 150230 - DNA, 25 bp, SARS Virus
attttccatactctcccaacggttt

SEQ ID NO: 150231 - DNA, 25 bp, SARS Virus
ttttccatactgccccaacggtttg

SEQ ID NO: 150232 - DNA, 25 bp, SARS Virus
tttccatactgtcccaacggtttgc

SEQ ID NO: 150233 - DNA, 25 bp, SARS Virus
ttccatactgtcccaacggtttgca

SEQ ID NO: 150234 - DNA, 25 bp, SARS Virus
tccatactgtcccaacggtttgcat

SEQ ID NO: 150235 - DNA, 25 bp, SARS Virus
ccatactgtccccacggtttgcata

SEQ ID NO: 150236 - DNA, 25 bp, SARS Virus
catactgtcccaccggtttgcatac

SEQ ID NO: 150237 - DNA, 25 bp, SARS Virus
atactgtcccaacggtttgcatact

SEQ ID NO: 150238 - DNA, 25 bp, SARS Virus
tactgtcccaaccgtttgcatacta

SEQ ID NO: 150239 - DNA, 25 bp, SARS Virus
actgtcccaacgctttgcatactaa

SEQ ID NO: 150240 - DNA, 25 bp, SARS Virus
ctgtcccaacggcttgcatactaat

SEQ ID NO: 150241 - DNA, 25 bp, SARS Virus
tgtcccaacggtctgcatactaatt

SEQ ID NO: 150242 - DNA, 25 bp, SARS Virus
gtcccaacggttcgcatactaatta

SEQ ID NO: 150243 - DNA, 25 bp, SARS Virus
tcccaacggtttccatactaattat

SEQ ID NO: 150244 - DNA, 25 bp, SARS Virus
cccaacggtttgcatactaattatc

SEQ ID NO: 150245 - DNA, 25 bp, SARS Virus
ccaacggtttgcctactaattatca

SEQ ID NO: 150246 - DNA, 25 bp, SARS Virus
caacggtttgcacactaattatcat

SEQ ID NO: 150247 - DNA, 25 bp, SARS Virus
aacggtttgcatcctaattatcata

SEQ ID NO: 150248 - DNA, 25 bp, SARS Virus
acggtttgcatactaattatcatac

SEQ ID NO: 150249 - DNA, 25 bp, SARS Virus
cggtttgcataccaattatcatact

SEQ ID NO: 150250 - DNA, 25 bp, SARS Virus
ggtttgcatactcattatcatactt

SEQ ID NO: 150251 - DNA, 25 bp, SARS Virus
gtttgcatactacttatcatacttt

SEQ ID NO: 150252 - DNA, 25 bp, SARS Virus
tttgcatactaactatcatactttg

SEQ ID NO: 150253 - DNA, 25 bp, SARS Virus
ttgcatactaatcatcatactttgg

SEQ ID NO: 150254 - DNA, 25 bp, SARS Virus
tgcatactaattctcatactttggg

SEQ ID NO: 150255 - DNA, 25 bp, SARS Virus
gcatactaattaccatactttggga

SEQ ID NO: 150256 - DNA, 25 bp, SARS Virus
catactaattatcatactttgggac

SEQ ID NO: 150257 - DNA, 25 bp, SARS Virus
atactaattatcctactttgggaca

SEQ ID NO: 150258 - DNA, 25 bp, SARS Virus
tactaattatcacactttgggacat

SEQ ID NO: 150259 - DNA, 25 bp, SARS Virus
actaattatcatcctttgggacatt

SEQ ID NO: 150260 - DNA, 25 bp, SARS Virus
ctaattatcatactttgggacattg

SEQ ID NO: 150261 - DNA, 25 bp, SARS Virus
taattatcataccttgggacattgt

SEQ ID NO: 150262 - DNA, 25 bp, SARS Virus
aattatcatactctgggacattgta

SEQ ID NO: 150263 - DNA, 25 bp, SARS Virus
attatcatacttcgggacattgtaa

SEQ ID NO: 150264 - DNA, 25 bp, SARS Virus
ttatcatactttcggacattgtaat

SEQ ID NO: 150265 - DNA, 25 bp, SARS Virus
tatcatactttgcgacattgtaatc

SEQ ID NO: 150266 - DNA, 25 bp, SARS Virus
atcatactttggcacattgtaatct

SEQ ID NO: 150267 - DNA, 25 bp, SARS Virus
tcatactttgggccattgtaatctt

SEQ ID NO: 150268 - DNA, 25 bp, SARS Virus
catactttgggacattgtaatctta

SEQ ID NO: 150269 - DNA, 25 bp, SARS Virus
atactttgggaccttgtaatcttat

SEQ ID NO: 150270 - DNA, 25 bp, SARS Virus
tactttgggacactgtaatcttatt

SEQ ID NO: 150271 - DNA, 25 bp, SARS Virus
actttgggacatcgtaatcttattt

SEQ ID NO: 150272 - DNA, 25 bp, SARS Virus
ctttgggacattctaatcttatttt

SEQ ID NO: 150273 - DNA, 25 bp, SARS Virus
tttgggacattgcaatcttatttta

SEQ ID NO: 150274 - DNA, 25 bp, SARS Virus
ttgggacattgtcatcttattttac

SEQ ID NO: 150275 - DNA, 25 bp, SARS Virus
tgggacattgtactcttattttacc

SEQ ID NO: 150276 - DNA, 25 bp, SARS Virus
gggacattgtaaccttattttacct

SEQ ID NO: 150277 - DNA, 25 bp, SARS Virus
ggacattgtaatcttattttacctt

SEQ ID NO: 150278 - DNA, 25 bp, SARS Virus
gacattgtaatcctattttaccttc

SEQ ID NO: 150279 - DNA, 25 bp, SARS Virus
acattgtaatctcattttaccttct

SEQ ID NO: 150280 - DNA, 25 bp, SARS Virus
cattgtaatcttcttttaccttctt

SEQ ID NO: 150281 - DNA, 25 bp, SARS Virus
attgtaatcttactttaccttcttt

SEQ ID NO: 150282 - DNA, 25 bp, SARS Virus
ttgtaatcttatcttaccttcttta

SEQ ID NO: 150283 - DNA, 25 bp, SARS Virus
tgtaatcttattctaccttctttat

SEQ ID NO: 150284 - DNA, 25 bp, SARS Virus
gtaatcttatttcaccttctttatt

SEQ ID NO: 150285 - DNA, 25 bp, SARS Virus
taatcttattttcccttctttattt

SEQ ID NO: 150286 - DNA, 25 bp, SARS Virus
aatcttattttaccttctttattta

SEQ ID NO: 150287 - DNA, 25 bp, SARS Virus
atcttattttaccttctttatttag

SEQ ID NO: 150288 - DNA, 25 bp, SARS Virus
tcttattttaccctctttatttagg

SEQ ID NO: 150289 - DNA, 25 bp, SARS Virus
cttattttacctcctttatttagga

SEQ ID NO: 150290 - DNA, 25 bp, SARS Virus
ttattttaccttctttatttaggac

SEQ ID NO: 150291 - DNA, 25 bp, SARS Virus
tattttaccttccttatttaggact

SEQ ID NO: 150292 - DNA, 25 bp, SARS Virus
attttaccttctctatttaggactc

SEQ ID NO: 150293 - DNA, 25 bp, SARS Virus
ttttaccttcttcatttaggactca

SEQ ID NO: 150294 - DNA, 25 bp, SARS Virus
tttaccttctttctttaggactcaa

SEQ ID NO: 150295 - DNA, 25 bp, SARS Virus
ttaccttctttacttaggactcaat

SEQ ID NO: 150296 - DNA, 25 bp, SARS Virus
taccttctttatctaggactcaatt

SEQ ID NO: 150297 - DNA, 25 bp, SARS Virus
accttctttattcaggactcaattt

SEQ ID NO: 150298 - DNA, 25 bp, SARS Virus
ccttctttatttcggactcaattta

SEQ ID NO: 150299 - DNA, 25 bp, SARS Virus
cttctttatttacgactcaatttat

SEQ ID NO: 150300 - DNA, 25 bp, SARS Virus
ttctttatttagcactcaatttatt

SEQ ID NO: 150301 - DNA, 25 bp, SARS Virus
tctttatttaggcctcaatttattt

SEQ ID NO: 150302 - DNA, 25 bp, SARS Virus
ctttatttaggactcaatttatttc

SEQ ID NO: 150303 - DNA, 25 bp, SARS Virus
tttatttaggacccaatttatttct

SEQ ID NO: 150304 - DNA, 25 bp, SARS Virus
ttatttaggactcaatttatttctc

SEQ ID NO: 150305 - DNA, 25 bp, SARS Virus
tatttaggactccatttatttctca

SEQ ID NO: 150306 - DNA, 25 bp, SARS Virus
atttaggactcactttatttctcac

SEQ ID NO: 150307 - DNA, 25 bp, SARS Virus
tttaggactcaacttatttctcaca

SEQ ID NO: 150308 - DNA, 25 bp, SARS Virus
ttaggactcaatctatttctcacag

SEQ ID NO: 150309 - DNA, 25 bp, SARS Virus
taggactcaattcatttctcacaga

SEQ ID NO: 150310 - DNA, 25 bp, SARS Virus
aggactcaatttctttctcacagac

SEQ ID NO: 150311 - DNA, 25 bp, SARS Virus
ggactcaatttacttctcacagact

SEQ ID NO: 150312 - DNA, 25 bp, SARS Virus
gactcaatttatctctcacagacta

SEQ ID NO: 150313 - DNA, 25 bp, SARS Virus
actcaatttattcctcacagactag

SEQ ID NO: 150314 - DNA, 25 bp, SARS Virus
ctcaatttatttctcacagactaga

SEQ ID NO: 150315 - DNA, 25 bp, SARS Virus
tcaatttatttcccacagactagat

SEQ ID NO: 150316 - DNA, 25 bp, SARS Virus
caatttatttctcacagactagatt

SEQ ID NO: 150317 - DNA, 25 bp, SARS Virus
aatttatttctcccagactagattt

SEQ ID NO: 150318 - DNA, 25 bp, SARS Virus
atttatttctcacagactagatttt

SEQ ID NO: 150319 - DNA, 25 bp, SARS Virus
tttatttctcaccgactagattttt

SEQ ID NO: 150320 - DNA, 25 bp, SARS Virus
ttatttctcacacactagattttta

SEQ ID NO: 150321 - DNA, 25 bp, SARS Virus
tatttctcacagcctagatttttaa

SEQ ID NO: 150322 - DNA, 25 bp, SARS Virus
atttctcacagactagatttttaaa

SEQ ID NO: 150323 - DNA, 25 bp, SARS Virus
tttctcacagaccagatttttaaag

SEQ ID NO: 150324 - DNA, 25 bp, SARS Virus
ttctcacagactcgatttttaaagt

SEQ ID NO: 150325 - DNA, 25 bp, SARS Virus
tctcacagactacatttttaaagta

SEQ ID NO: 150326 - DNA, 25 bp, SARS Virus
ctcacagactagctttttaaagtag

SEQ ID NO: 150327 - DNA, 25 bp, SARS Virus
tcacagactagacttttaaagtagt

SEQ ID NO: 150328 - DNA, 25 bp, SARS Virus
cacagactagatctttaaagtagtc

SEQ ID NO: 150329 - DNA, 25 bp, SARS Virus
acagactagattcttaaagtagtcc

SEQ ID NO: 150330 - DNA, 25 bp, SARS Virus
cagactagatttctaaagtagtcct

SEQ ID NO: 150331 - DNA, 25 bp, SARS Virus
agactagattttcaaagtagtccta

SEQ ID NO: 150332 - DNA, 25 bp, SARS Virus
gactagatttttcaagtagtcctat

SEQ ID NO: 150333 - DNA, 25 bp, SARS Virus
actagatttttacagtagtcctatc

SEQ ID NO: 150334 - DNA, 25 bp, SARS Virus
ctagatttttaacgtagtcctatca

SEQ ID NO: 150335 - DNA, 25 bp, SARS Virus
tagatttttaaactagtcctatcat

SEQ ID NO: 150336 - DNA, 25 bp, SARS Virus
agatttttaaagcagtcctatcatt

SEQ ID NO: 150337 - DNA, 25 bp, SARS Virus
ttccatctagtggttgatgtagata

SEQ ID NO: 150338 - DNA, 25 bp, SARS Virus
tccatctagtgcgtgatgtagatat

SEQ ID NO: 150339 - DNA, 25 bp, SARS Virus
ccatctagtgctggatgtagatatc

SEQ ID NO: 150340 - DNA, 25 bp, SARS Virus
catctagtgcttgatgtagatatcc

SEQ ID NO: 150341 - DNA, 25 bp, SARS Virus
atctagtgcttggtgtagatatcca

SEQ ID NO: 150342 - DNA, 25 bp, SARS Virus
tctagtgcttgaggtagatatccaa

SEQ ID NO: 150343 - DNA, 25 bp, SARS Virus
ctagtgcttgatgtagatatccaac

SEQ ID NO: 150344 - DNA, 25 bp, SARS Virus
tagtgcttgatggagatatccaact

SEQ ID NO: 150345 - DNA, 25 bp, SARS Virus
agtgcttgatgtggatatccaacta

SEQ ID NO: 150346 - DNA, 25 bp, SARS Virus
gtgcttgatgtagatatccaactat

SEQ ID NO: 150347 - DNA, 25 bp, SARS Virus
tgcttgatgtaggtatccaactatc

SEQ ID NO: 150348 - DNA, 25 bp, SARS Virus
gcttgatgtagagatccaactatcg

SEQ ID NO: 150349 - DNA, 25 bp, SARS Virus
cttgatgtagatgtccaactatcgg

SEQ ID NO: 150350 - DNA, 25 bp, SARS Virus
ttgatgtagatagccaactatcggg

SEQ ID NO: 150351 - DNA, 25 bp, SARS Virus
tgatgtagatatgcaactatcggga

SEQ ID NO: 150352 - DNA, 25 bp, SARS Virus
gatgtagatatcgaactatcgggaa

SEQ ID NO: 150353 - DNA, 25 bp, SARS Virus
atgtagatatccgactatcgggaat

SEQ ID NO: 150354 - DNA, 25 bp, SARS Virus
tgtagatatccagctatcgggaata

SEQ ID NO: 150355 - DNA, 25 bp, SARS Virus
gtagatatccaagtatcgggaatat

SEQ ID NO: 150356 - DNA, 25 bp, SARS Virus
tagatatccaacgatcgggaatatt

SEQ ID NO: 150357 - DNA, 25 bp, SARS Virus
agatatccaactgtcgggaatattt

SEQ ID NO: 150358 - DNA, 25 bp, SARS Virus
gatatccaactagcgggaatatttg

SEQ ID NO: 150359 - DNA, 25 bp, SARS Virus
atatccaactatggggaatatttgt

SEQ ID NO: 150360 - DNA, 25 bp, SARS Virus
tatccaactatcgggaatatttgta

SEQ ID NO: 150361 - DNA, 25 bp, SARS Virus
atccaactatcgggaatatttgtat

SEQ ID NO: 150362 - DNA, 25 bp, SARS Virus
tccaactatcgggaatatttgtatc

SEQ ID NO: 150363 - DNA, 25 bp, SARS Virus
ccaactatcggggatatttgtatct

SEQ ID NO: 150364 - DNA, 25 bp, SARS Virus
caactatcgggagtatttgtatctc

SEQ ID NO: 150365 - DNA, 25 bp, SARS Virus
aactatcgggaagatttgtatctct

SEQ ID NO: 150366 - DNA, 25 bp, SARS Virus
actatcgggaatgtttgtatctctt

SEQ ID NO: 150367 - DNA, 25 bp, SARS Virus
ctatcgggaatagttgtatctcttt

SEQ ID NO: 150368 - DNA, 25 bp, SARS Virus
tatcgggaatatgtgtatctctttg

SEQ ID NO: 150369 - DNA, 25 bp, SARS Virus
atcgggaatattggtatctctttgg

SEQ ID NO: 150370 - DNA, 25 bp, SARS Virus
tcgggaatatttgtatctctttggg

SEQ ID NO: 150371 - DNA, 25 bp, SARS Virus
cgggaatatttggatctctttgggt

SEQ ID NO: 150372 - DNA, 25 bp, SARS Virus
gggaatatttgtgtctctttgggta

SEQ ID NO: 150373 - DNA, 25 bp, SARS Virus
ggaatatttgtagctctttgggtag

SEQ ID NO: 150374 - DNA, 25 bp, SARS Virus
gaatatttgtatgtctttgggtaga

SEQ ID NO: 150375 - DNA, 25 bp, SARS Virus
aatatttgtatcgctttgggtagaa

SEQ ID NO: 150376 - DNA, 25 bp, SARS Virus
atatttgtatctgtttgggtagaaa

SEQ ID NO: 150377 - DNA, 25 bp, SARS Virus
tatttgtatctcgttgggtagaaat

SEQ ID NO: 150378 - DNA, 25 bp, SARS Virus
atttgtatctctgtgggtagaaata

SEQ ID NO: 150379 - DNA, 25 bp, SARS Virus
tttgtatctcttggggtagaaataa

SEQ ID NO: 150380 - DNA, 25 bp, SARS Virus
ttgtatctctttgggtagaaataaa

SEQ ID NO: 150381 - DNA, 25 bp, SARS Virus
tgtatctctttgggtagaaataaaa

SEQ ID NO: 150382 - DNA, 25 bp, SARS Virus
gtatctctttgggtagaaataaaaa

SEQ ID NO: 150383 - DNA, 25 bp, SARS Virus
tatctctttggggagaaataaaaat

SEQ ID NO: 150384 - DNA, 25 bp, SARS Virus
atctctttgggtggaaataaaaatt

SEQ ID NO: 150385 - DNA, 25 bp, SARS Virus
tctctttgggtagaaataaaaattt

SEQ ID NO: 150386 - DNA, 25 bp, SARS Virus
ctctttgggtaggaataaaaatttg

SEQ ID NO: 150387 - DNA, 25 bp, SARS Virus
tctttgggtagagataaaaatttgt

SEQ ID NO: 150388 - DNA, 25 bp, SARS Virus
ctttgggtagaagtaaaaatttgtg

SEQ ID NO: 150389 - DNA, 25 bp, SARS Virus
tttgggtagaaagaaaaatttgtgt

SEQ ID NO: 150390 - DNA, 25 bp, SARS Virus
ttgggtagaaatgaaaatttgtgtt

SEQ ID NO: 150391 - DNA, 25 bp, SARS Virus
tgggtagaaatagaaatttgtgttt

SEQ ID NO: 150392 - DNA, 25 bp, SARS Virus
gggtagaaataagaatttgtgtttg

SEQ ID NO: 150393 - DNA, 25 bp, SARS Virus
ggtagaaataaagatttgtgtttga

SEQ ID NO: 150394 - DNA, 25 bp, SARS Virus
gtagaaataaaagtttgtgtttgag

SEQ ID NO: 150395 - DNA, 25 bp, SARS Virus
tagaaataaaaagttgtgtttgaga

SEQ ID NO: 150396 - DNA, 25 bp, SARS Virus
agaaataaaaatgtgtgtttgagag

SEQ ID NO: 150397 - DNA, 25 bp, SARS Virus
gaaataaaaattggtgtttgagagc

SEQ ID NO: 150398 - DNA, 25 bp, SARS Virus
aaataaaaatttgtgtttgagagca

SEQ ID NO: 150399 - DNA, 25 bp, SARS Virus
aataaaaatttgggtttgagagcat

SEQ ID NO: 150400 - DNA, 25 bp, SARS Virus
ataaaaatttgtgtttgagagcatt

SEQ ID NO: 150401 - DNA, 25 bp, SARS Virus
taaaaatttgtggttgagagcattc

SEQ ID NO: 150402 - DNA, 25 bp, SARS Virus
aaaaatttgtgtgtgagagcattca

SEQ ID NO: 150403 - DNA, 25 bp, SARS Virus
aaaatttgtgttggagagcattcac

SEQ ID NO: 150404 - DNA, 25 bp, SARS Virus
aaatttgtgtttgagagcattcaca

SEQ ID NO: 150405 - DNA, 25 bp, SARS Virus
aatttgtgtttgggagcattcacaa

SEQ ID NO: 150406 - DNA, 25 bp, SARS Virus
atttgtgtttgagagcattcacaaa

SEQ ID NO: 150407 - DNA, 25 bp, SARS Virus
tttgtgtttgagggcattcacaaat

SEQ ID NO: 150408 - DNA, 25 bp, SARS Virus
ttgtgtttgagagcattcacaaatt

SEQ ID NO: 150409 - DNA, 25 bp, SARS Virus
tgtgtttgagaggattcacaaattt

SEQ ID NO: 150410 - DNA, 25 bp, SARS Virus
gtgtttgagagcgttcacaaatttt

SEQ ID NO: 150411 - DNA, 25 bp, SARS Virus
tgtttgagagcagtcacaaatttta

SEQ ID NO: 150412 - DNA, 25 bp, SARS Virus
gtttgagagcatgcacaaattttaa

SEQ ID NO: 150413 - DNA, 25 bp, SARS Virus
tttgagagcattgacaaattttaat

SEQ ID NO: 150414 - DNA, 25 bp, SARS Virus
ttgagagcattcgcaaattttaatg

SEQ ID NO: 150415 - DNA, 25 bp, SARS Virus
tgagagcattcagaaattttaatgg

SEQ ID NO: 150416 - DNA, 25 bp, SARS Virus
gagagcattcacgaattttaatgga

SEQ ID NO: 150417 - DNA, 25 bp, SARS Virus
agagcattcacagattttaatggac

SEQ ID NO: 150418 - DNA, 25 bp, SARS Virus
gagcattcacaagttttaatggact

SEQ ID NO: 150419 - DNA, 25 bp, SARS Virus
agcattcacaaagtttaatggactg

SEQ ID NO: 150420 - DNA, 25 bp, SARS Virus
gcattcacaaatgttaatggactga

SEQ ID NO: 150421 - DNA, 25 bp, SARS Virus
cattcacaaattgtaatggactgaa

SEQ ID NO: 150422 - DNA, 25 bp, SARS Virus
attcacaaatttgaatggactgaaa

SEQ ID NO: 150423 - DNA, 25 bp, SARS Virus
ttcacaaattttgatggactgaaaa

SEQ ID NO: 150424 - DNA, 25 bp, SARS Virus
tcacaaattttagtggactgaaaag

SEQ ID NO: 150425 - DNA, 25 bp, SARS Virus
cacaaattttaagggactgaaaaga

SEQ ID NO: 150426 - DNA, 25 bp, SARS Virus
acaaattttaatggactgaaaagac

SEQ ID NO: 150427 - DNA, 25 bp, SARS Virus
caaattttaatggactgaaaagact

SEQ ID NO: 150428 - DNA, 25 bp, SARS Virus
aaattttaatgggctgaaaagactt

SEQ ID NO: 150429 - DNA, 25 bp, SARS Virus
aattttaatggagtgaaaagacttt

SEQ ID NO: 150430 - DNA, 25 bp, SARS Virus
attttaatggacggaaaagactttg

SEQ ID NO: 150431 - DNA, 25 bp, SARS Virus
ttttaatggactgaaaagactttgt

SEQ ID NO: 150432 - DNA, 25 bp, SARS Virus
tttaatggactggaaagactttgta

SEQ ID NO: 150433 - DNA, 25 bp, SARS Virus
ttaatggactgagaagactttgtag

SEQ ID NO: 150434 - DNA, 25 bp, SARS Virus
taatggactgaagagactttgtagt

SEQ ID NO: 150435 - DNA, 25 bp, SARS Virus
aatggactgaaaggactttgtagtt

SEQ ID NO: 150436 - DNA, 25 bp, SARS Virus
atggactgaaaagactttgtagttc

SEQ ID NO: 150437 - DNA, 25 bp, SARS Virus
tggactgaaaaggctttgtagttcg

SEQ ID NO: 150438 - DNA, 25 bp, SARS Virus
ggactgaaaagagtttgtagttcgc

SEQ ID NO: 150439 - DNA, 25 bp, SARS Virus
gactgaaaagacgttgtagttcgct

SEQ ID NO: 150440 - DNA, 25 bp, SARS Virus
actgaaaagactgtgtagttcgctt

SEQ ID NO: 150441 - DNA, 25 bp, SARS Virus
ctgaaaagacttggtagttcgcttt

SEQ ID NO: 150442 - DNA, 25 bp, SARS Virus
tgaaaagactttgtagttcgctttt

SEQ ID NO: 150443 - DNA, 25 bp, SARS Virus
gaaaagactttggagttcgcttttc

SEQ ID NO: 150444 - DNA, 25 bp, SARS Virus
aaaagactttgtggttcgcttttcc

SEQ ID NO: 150445 - DNA, 25 bp, SARS Virus
aaagactttgtagttcgcttttccg

SEQ ID NO: 150446 - DNA, 25 bp, SARS Virus
aagactttgtaggtcgcttttccgt

SEQ ID NO: 150447 - DNA, 25 bp, SARS Virus
agactttgtagtgcgcttttccgta

SEQ ID NO: 150448 - DNA, 25 bp, SARS Virus
gactttgtagttggcttttccgtag

SEQ ID NO: 150449 - DNA, 25 bp, SARS Virus
actttgtagttcgcttttccgtagt

SEQ ID NO: 150450 - DNA, 25 bp, SARS Virus
ctttgtagttcggttttccgtagtc

SEQ ID NO: 150451 - DNA, 25 bp, SARS Virus
tttgtagttcgcgtttccgtagtct

SEQ ID NO: 150452 - DNA, 25 bp, SARS Virus
ttgtagttcgctgttccgtagtcta

SEQ ID NO: 150453 - DNA, 25 bp, SARS Virus
tgtagttcgcttgtccgtagtctat

SEQ ID NO: 150454 - DNA, 25 bp, SARS Virus
gtagttcgctttgccgtagtctata

SEQ ID NO: 150455 - DNA, 25 bp, SARS Virus
tagttcgcttttgcgtagtctatac

SEQ ID NO: 150456 - DNA, 25 bp, SARS Virus
agttcgcttttcggtagtctataca

SEQ ID NO: 150457 - DNA, 25 bp, SARS Virus
gttcgcttttccgtagtctatacat

SEQ ID NO: 150458 - DNA, 25 bp, SARS Virus
ttcgcttttccggagtctatacatg

SEQ ID NO: 150459 - DNA, 25 bp, SARS Virus
tcgcttttccgtggtctatacatga

SEQ ID NO: 150460 - DNA, 25 bp, SARS Virus
cgcttttccgtagtctatacatgag

SEQ ID NO: 150461 - DNA, 25 bp, SARS Virus
gcttttccgtaggctatacatgagc

SEQ ID NO: 150462 - DNA, 25 bp, SARS Virus
cttttccgtagtgtatacatgagct

SEQ ID NO: 150463 - DNA, 25 bp, SARS Virus
ttttccgtagtcgatacatgagctt

SEQ ID NO: 150464 - DNA, 25 bp, SARS Virus
tttccgtagtctgtacatgagcttt

SEQ ID NO: 150465 - DNA, 25 bp, SARS Virus
ttccgtagtctagacatgagctttc

SEQ ID NO: 150466 - DNA, 25 bp, SARS Virus
tccgtagtctatgcatgagctttca

SEQ ID NO: 150467 - DNA, 25 bp, SARS Virus
ccgtagtctatagatgagctttcac

SEQ ID NO: 150468 - DNA, 25 bp, SARS Virus
cgtagtctatacgtgagctttcacg

SEQ ID NO: 150469 - DNA, 25 bp, SARS Virus
gtagtctatacaggagctttcacgt

SEQ ID NO: 150470 - DNA, 25 bp, SARS Virus
tagtctatacatgagctttcacgtt

SEQ ID NO: 150471 - DNA, 25 bp, SARS Virus
agtctatacatgggctttcacgtta

SEQ ID NO: 150472 - DNA, 25 bp, SARS Virus
gtctatacatgagctttcacgttaa

SEQ ID NO: 150473 - DNA, 25 bp, SARS Virus
tctatacatgaggtttcacgttaat

SEQ ID NO: 150474 - DNA, 25 bp, SARS Virus
ctatacatgagcgttcacgttaatt

SEQ ID NO: 150475 - DNA, 25 bp, SARS Virus
tatacatgagctgtcacgttaattt

SEQ ID NO: 150476 - DNA, 25 bp, SARS Virus
atacatgagcttgcacgttaattta

SEQ ID NO: 150477 - DNA, 25 bp, SARS Virus
tacatgagctttgacgttaatttac

SEQ ID NO: 150478 - DNA, 25 bp, SARS Virus
acatgagctttcgcgttaatttacg

SEQ ID NO: 150479 - DNA, 25 bp, SARS Virus
catgagctttcaggttaatttacgt

SEQ ID NO: 150480 - DNA, 25 bp, SARS Virus
atgagctttcacgttaatttacgta

SEQ ID NO: 150481 - DNA, 25 bp, SARS Virus
tgagctttcacggtaatttacgtaa

SEQ ID NO: 150482 - DNA, 25 bp, SARS Virus
gagctttcacgtgaatttacgtaat

SEQ ID NO: 150483 - DNA, 25 bp, SARS Virus
agctttcacgttgatttacgtaata

SEQ ID NO: 150484 - DNA, 25 bp, SARS Virus
gctttcacgttagtttacgtaatag

SEQ ID NO: 150485 - DNA, 25 bp, SARS Virus
ctttcacgttaagttacgtaatagc

SEQ ID NO: 150486 - DNA, 25 bp, SARS Virus
tttcacgttaatgtacgtaatagct

SEQ ID NO: 150487 - DNA, 25 bp, SARS Virus
ttcacgttaattgacgtaatagctt

SEQ ID NO: 150488 - DNA, 25 bp, SARS Virus
tcacgttaatttgcgtaatagctta

SEQ ID NO: 150489 - DNA, 25 bp, SARS Virus
cacgttaatttaggtaatagcttat

SEQ ID NO: 150490 - DNA, 25 bp, SARS Virus
acgttaatttacgtaatagcttata

SEQ ID NO: 150491 - DNA, 25 bp, SARS Virus
cgttaatttacggaatagcttatag

SEQ ID NO: 150492 - DNA, 25 bp, SARS Virus
gttaatttacgtgatagcttatagt

SEQ ID NO: 150493 - DNA, 25 bp, SARS Virus
ttaatttacgtagtagcttatagta

SEQ ID NO: 150494 - DNA, 25 bp, SARS Virus
taatttacgtaagagcttatagtat

SEQ ID NO: 150495 - DNA, 25 bp, SARS Virus
aatttacgtaatggcttatagtatc

SEQ ID NO: 150496 - DNA, 25 bp, SARS Virus
atttacgtaatagcttatagtatca

SEQ ID NO: 150497 - DNA, 25 bp, SARS Virus
tttacgtaataggttatagtatcat

SEQ ID NO: 150498 - DNA, 25 bp, SARS Virus
ttacgtaatagcgtatagtatcata

SEQ ID NO: 150499 - DNA, 25 bp, SARS Virus
tacgtaatagctgatagtatcatac

SEQ ID NO: 150500 - DNA, 25 bp, SARS Virus
acgtaatagcttgtagtatcataca

SEQ ID NO: 150501 - DNA, 25 bp, SARS Virus
cgtaatagcttagagtatcatacac

SEQ ID NO: 150502 - DNA, 25 bp, SARS Virus
gtaatagcttatggtatcatacaca

SEQ ID NO: 150503 - DNA, 25 bp, SARS Virus
taatagcttatagtatcatacacag

SEQ ID NO: 150504 - DNA, 25 bp, SARS Virus
aatagcttataggatcatacacaga

SEQ ID NO: 150505 - DNA, 25 bp, SARS Virus
atagcttatagtgtcatacacagac

SEQ ID NO: 150506 - DNA, 25 bp, SARS Virus
tagcttatagtagcatacacagaca

SEQ ID NO: 150507 - DNA, 25 bp, SARS Virus
agcttatagtatgatacacagacac

SEQ ID NO: 150508 - DNA, 25 bp, SARS Virus
gcttatagtatcgtacacagacaca

SEQ ID NO: 150509 - DNA, 25 bp, SARS Virus
cttatagtatcagacacagacacat

SEQ ID NO: 150510 - DNA, 25 bp, SARS Virus
ttatagtatcatgcacagacacatg

SEQ ID NO: 150511 - DNA, 25 bp, SARS Virus
tatagtatcatagacagacacatgg

SEQ ID NO: 150512 - DNA, 25 bp, SARS Virus
atagtatcatacgcagacacatggg

SEQ ID NO: 150513 - DNA, 25 bp, SARS Virus
tagtatcatacagagacacatgggt

SEQ ID NO: 150514 - DNA, 25 bp, SARS Virus
agtatcatacacggacacatgggta

SEQ ID NO: 150515 - DNA, 25 bp, SARS Virus
gtatcatacacagacacatgggtac

SEQ ID NO: 150516 - DNA, 25 bp, SARS Virus
tatcatacacaggcacatgggtacc

SEQ ID NO: 150517 - DNA, 25 bp, SARS Virus
atcatacacagagacatgggtaccc

SEQ ID NO: 150518 - DNA, 25 bp, SARS Virus
tcatacacagacgcatgggtaccca

SEQ ID NO: 150519 - DNA, 25 bp, SARS Virus
catacacagacagatgggtacccaa

SEQ ID NO: 150520 - DNA, 25 bp, SARS Virus
atacacagacacgtgggtacccaaa

SEQ ID NO: 150521 - DNA, 25 bp, SARS Virus
tacacagacacaggggtacccaaat

SEQ ID NO: 150522 - DNA, 25 bp, SARS Virus
acacagacacatgggtacccaaatc

SEQ ID NO: 150523 - DNA, 25 bp, SARS Virus
cacagacacatgggtacccaaatct

SEQ ID NO: 150524 - DNA, 25 bp, SARS Virus
acagacacatgggtacccaaatctt

SEQ ID NO: 150525 - DNA, 25 bp, SARS Virus
cagacacatggggacccaaatcttt

SEQ ID NO: 150526 - DNA, 25 bp, SARS Virus
agacacatgggtgcccaaatctttg

SEQ ID NO: 150527 - DNA, 25 bp, SARS Virus
gacacatgggtagccaaatctttgt

SEQ ID NO: 150528 - DNA, 25 bp, SARS Virus
acacatgggtacgcaaatctttgtc

SEQ ID NO: 150529 - DNA, 25 bp, SARS Virus
cacatgggtaccgaaatctttgtcg

SEQ ID NO: 150530 - DNA, 25 bp, SARS Virus
acatgggtacccgaatctttgtcgt

SEQ ID NO: 150531 - DNA, 25 bp, SARS Virus
catgggtacccagatctttgtcgtt

SEQ ID NO: 150532 - DNA, 25 bp, SARS Virus
atgggtacccaagtctttgtcgttt

SEQ ID NO: 150533 - DNA, 25 bp, SARS Virus
tgggtacccaaagctttgtcgtttc

SEQ ID NO: 150534 - DNA, 25 bp, SARS Virus
gggtacccaaatgtttgtcgtttct

SEQ ID NO: 150535 - DNA, 25 bp, SARS Virus
ggtacccaaatcgttgtcgtttctt

SEQ ID NO: 150536 - DNA, 25 bp, SARS Virus
gtacccaaatctgtgtcgtttcttt

SEQ ID NO: 150537 - DNA, 25 bp, SARS Virus
tacccaaatcttggtcgtttctttc

SEQ ID NO: 150538 - DNA, 25 bp, SARS Virus
acccaaatctttgtcgtttctttcc

SEQ ID NO: 150539 - DNA, 25 bp, SARS Virus
cccaaatctttggcgtttctttccc

SEQ ID NO: 150540 - DNA, 25 bp, SARS Virus
ccaaatctttgtggtttctttccca

SEQ ID NO: 150541 - DNA, 25 bp, SARS Virus
caaatctttgtcgtttctttcccaa

SEQ ID NO: 150542 - DNA, 25 bp, SARS Virus
aaatctttgtcggttctttcccaac

SEQ ID NO: 150543 - DNA, 25 bp, SARS Virus
aatctttgtcgtgtctttcccaaca

SEQ ID NO: 150544 - DNA, 25 bp, SARS Virus
atctttgtcgttgctttcccaacag

SEQ ID NO: 150545 - DNA, 25 bp, SARS Virus
tctttgtcgtttgtttcccaacagt

SEQ ID NO: 150546 - DNA, 25 bp, SARS Virus
ctttgtcgtttcgttcccaacagtg

SEQ ID NO: 150547 - DNA, 25 bp, SARS Virus
tttgtcgtttctgtcccaacagtgt

SEQ ID NO: 150548 - DNA, 25 bp, SARS Virus
ttgtcgtttcttgcccaacagtgtg

SEQ ID NO: 150549 - DNA, 25 bp, SARS Virus
tgtcgtttctttgccaacagtgtgt

SEQ ID NO: 150550 - DNA, 25 bp, SARS Virus
gtcgtttctttcgcaacagtgtgtt

SEQ ID NO: 150551 - DNA, 25 bp, SARS Virus
tcgtttctttccgaacagtgtgtta

SEQ ID NO: 150552 - DNA, 25 bp, SARS Virus
cgtttctttcccgacagtgtgttaa

SEQ ID NO: 150553 - DNA, 25 bp, SARS Virus
gtttctttcccagcagtgtgttaag

SEQ ID NO: 150554 - DNA, 25 bp, SARS Virus
tttctttcccaagagtgtgttaagt

SEQ ID NO: 150555 - DNA, 25 bp, SARS Virus
ttctttcccaacggtgtgttaagtt

SEQ ID NO: 150556 - DNA, 25 bp, SARS Virus
tctttcccaacagtgtgttaagttt

SEQ ID NO: 150557 - DNA, 25 bp, SARS Virus
ctttcccaacagggtgttaagtttc

SEQ ID NO: 150558 - DNA, 25 bp, SARS Virus
tttcccaacagtgtgttaagtttca

SEQ ID NO: 150559 - DNA, 25 bp, SARS Virus
ttcccaacagtgggttaagtttcaa

SEQ ID NO: 150560 - DNA, 25 bp, SARS Virus
tcccaacagtgtgttaagtttcaat

SEQ ID NO: 150561 - DNA, 25 bp, SARS Virus
cccaacagtgtggtaagtttcaatg

SEQ ID NO: 150562 - DNA, 25 bp, SARS Virus
ccaacagtgtgtgaagtttcaatgt

SEQ ID NO: 150563 - DNA, 25 bp, SARS Virus
caacagtgtgttgagtttcaatgta

SEQ ID NO: 150564 - DNA, 25 bp, SARS Virus
aacagtgtgttaggtttcaatgtac

SEQ ID NO: 150565 - DNA, 25 bp, SARS Virus
acagtgtgttaagtttcaatgtacg

SEQ ID NO: 150566 - DNA, 25 bp, SARS Virus
cagtgtgttaaggttcaatgtacga

SEQ ID NO: 150567 - DNA, 25 bp, SARS Virus
agtgtgttaagtgtcaatgtacgag

SEQ ID NO: 150568 - DNA, 25 bp, SARS Virus
gtgtgttaagttgcaatgtacgagc

SEQ ID NO: 150569 - DNA, 25 bp, SARS Virus
tgtgttaagtttgaatgtacgagca

SEQ ID NO: 150570 - DNA, 25 bp, SARS Virus
gtgttaagtttcgatgtacgagcat

SEQ ID NO: 150571 - DNA, 25 bp, SARS Virus
tgttaagtttcagtgtacgagcata

SEQ ID NO: 150572 - DNA, 25 bp, SARS Virus
gttaagtttcaaggtacgagcatat

SEQ ID NO: 150573 - DNA, 25 bp, SARS Virus
ttaagtttcaatgtacgagcatatt

SEQ ID NO: 150574 - DNA, 25 bp, SARS Virus
taagtttcaatggacgagcatattg

SEQ ID NO: 150575 - DNA, 25 bp, SARS Virus
aagtttcaatgtgcgagcatattgt

SEQ ID NO: 150576 - DNA, 25 bp, SARS Virus
agtttcaatgtaggagcatattgtt

SEQ ID NO: 150577 - DNA, 25 bp, SARS Virus
gtttcaatgtacgagcatattgttg

SEQ ID NO: 150578 - DNA, 25 bp, SARS Virus
tttcaatgtacgggcatattgttgt

SEQ ID NO: 150579 - DNA, 25 bp, SARS Virus
ttcaatgtacgagcatattgttgta

SEQ ID NO: 150580 - DNA, 25 bp, SARS Virus
tcaatgtacgaggatattgttgtaa

SEQ ID NO: 150581 - DNA, 25 bp, SARS Virus
caatgtacgagcgtattgttgtaat

SEQ ID NO: 150582 - DNA, 25 bp, SARS Virus
aatgtacgagcagattgttgtaatc

SEQ ID NO: 150583 - DNA, 25 bp, SARS Virus
atgtacgagcatgttgttgtaatca

SEQ ID NO: 150584 - DNA, 25 bp, SARS Virus
tgtacgagcatagtgttgtaatcat

SEQ ID NO: 150585 - DNA, 25 bp, SARS Virus
gtacgagcatatggttgtaatcatc

SEQ ID NO: 150586 - DNA, 25 bp, SARS Virus
tacgagcatattgttgtaatcatct

SEQ ID NO: 150587 - DNA, 25 bp, SARS Virus
acgagcatattggtgtaatcatctt

SEQ ID NO: 150588 - DNA, 25 bp, SARS Virus
cgagcatattgtggtaatcatctta

SEQ ID NO: 150589 - DNA, 25 bp, SARS Virus
gagcatattgttgtaatcatcttaa

SEQ ID NO: 150590 - DNA, 25 bp, SARS Virus
agcatattgttggaatcatcttaac

SEQ ID NO: 150591 - DNA, 25 bp, SARS Virus
gcatattgttgtgatcatcttaaca

SEQ ID NO: 150592 - DNA, 25 bp, SARS Virus
catattgttgtagtcatcttaacaa

SEQ ID NO: 150593 - DNA, 25 bp, SARS Virus
atattgttgtaagcatcttaacaat

SEQ ID NO: 150594 - DNA, 25 bp, SARS Virus
tattgttgtaatgatcttaacaatt

SEQ ID NO: 150595 - DNA, 25 bp, SARS Virus
attgttgtaatcgtcttaacaatta

SEQ ID NO: 150596 - DNA, 25 bp, SARS Virus
ttgttgtaatcagcttaacaattat

SEQ ID NO: 150597 - DNA, 25 bp, SARS Virus
tgttgtaatcatgttaacaattatt

SEQ ID NO: 150598 - DNA, 25 bp, SARS Virus
gttgtaatcatcgtaacaattatta

SEQ ID NO: 150599 - DNA, 25 bp, SARS Virus
ttgtaatcatctgaacaattattat

SEQ ID NO: 150600 - DNA, 25 bp, SARS Virus
tgtaatcatcttgacaattattatt

SEQ ID NO: 150601 - DNA, 25 bp, SARS Virus
gtaatcatcttagcaattattatta

SEQ ID NO: 150602 - DNA, 25 bp, SARS Virus
taatcatcttaagaattattattag

SEQ ID NO: 150603 - DNA, 25 bp, SARS Virus
aatcatcttaacgattattattagt

SEQ ID NO: 150604 - DNA, 25 bp, SARS Virus
atcatcttaacagttattattagtg

SEQ ID NO: 150605 - DNA, 25 bp, SARS Virus
tcatcttaacaagtattattagtgg

SEQ ID NO: 150606 - DNA, 25 bp, SARS Virus
catcttaacaatgattattagtggc

SEQ ID NO: 150607 - DNA, 25 bp, SARS Virus
atcttaacaattgttattagtggct

SEQ ID NO: 150608 - DNA, 25 bp, SARS Virus
tcttaacaattagtattagtggctg

SEQ ID NO: 150609 - DNA, 25 bp, SARS Virus
cttaacaattatgattagtggctga

SEQ ID NO: 150610 - DNA, 25 bp, SARS Virus
ttaacaattattgttagtggctgac

SEQ ID NO: 150611 - DNA, 25 bp, SARS Virus
taacaattattagtagtggctgaca

SEQ ID NO: 150612 - DNA, 25 bp, SARS Virus
aacaattattatgagtggctgacac

SEQ ID NO: 150613 - DNA, 25 bp, SARS Virus
acaattattattggtggctgacact

SEQ ID NO: 150614 - DNA, 25 bp, SARS Virus
caattattattagtggctgacactg

SEQ ID NO: 150615 - DNA, 25 bp, SARS Virus
aattattattaggggctgacactga

SEQ ID NO: 150616 - DNA, 25 bp, SARS Virus
attattattagtggctgacactgaa

SEQ ID NO: 150617 - DNA, 25 bp, SARS Virus
ttattattagtggctgacactgaac

SEQ ID NO: 150618 - DNA, 25 bp, SARS Virus
tattattagtgggtgacactgaaca

SEQ ID NO: 150619 - DNA, 25 bp, SARS Virus
attattagtggcggacactgaacaa

SEQ ID NO: 150620 - DNA, 25 bp, SARS Virus
ttattagtggctgacactgaacaac

SEQ ID NO: 150621 - DNA, 25 bp, SARS Virus
tattagtggctggcactgaacaaca

SEQ ID NO: 150622 - DNA, 25 bp, SARS Virus
attagtggctgagactgaacaacaa

SEQ ID NO: 150623 - DNA, 25 bp, SARS Virus
ttagtggctgacgctgaacaacaag

SEQ ID NO: 150624 - DNA, 25 bp, SARS Virus
tagtggctgacagtgaacaacaagt

SEQ ID NO: 150625 - DNA, 25 bp, SARS Virus
agtggctgacacggaacaacaagta

SEQ ID NO: 150626 - DNA, 25 bp, SARS Virus
gtggctgacactgaacaacaagtac

SEQ ID NO: 150627 - DNA, 25 bp, SARS Virus
tggctgacactggacaacaagtacc

SEQ ID NO: 150628 - DNA, 25 bp, SARS Virus
ggctgacactgagcaacaagtacca

SEQ ID NO: 150629 - DNA, 25 bp, SARS Virus
gctgacactgaagaacaagtaccat

SEQ ID NO: 150630 - DNA, 25 bp, SARS Virus
ctgacactgaacgacaagtaccatc

SEQ ID NO: 150631 - DNA, 25 bp, SARS Virus
tgacactgaacagcaagtaccatct

SEQ ID NO: 150632 - DNA, 25 bp, SARS Virus
gacactgaacaagaagtaccatctt

SEQ ID NO: 150633 - DNA, 25 bp, SARS Virus
acactgaacaacgagtaccatcttg

SEQ ID NO: 150634 - DNA, 25 bp, SARS Virus
cactgaacaacaggtaccatcttgg

SEQ ID NO: 150635 - DNA, 25 bp, SARS Virus
actgaacaacaagtaccatcttggt

SEQ ID NO: 150636 - DNA, 25 bp, SARS Virus
ctgaacaacaaggaccatcttggtt

SEQ ID NO: 150637 - DNA, 25 bp, SARS Virus
tgaacaacaagtgccatcttggttt

SEQ ID NO: 150638 - DNA, 25 bp, SARS Virus
gaacaacaagtagcatcttggtttt

SEQ ID NO: 150639 - DNA, 25 bp, SARS Virus
aacaacaagtacgatcttggttttt

SEQ ID NO: 150640 - DNA, 25 bp, SARS Virus
acaacaagtaccgtcttggtttttg

SEQ ID NO: 150641 - DNA, 25 bp, SARS Virus
caacaagtaccagcttggtttttgg

SEQ ID NO: 150642 - DNA, 25 bp, SARS Virus
aacaagtaccatgttggtttttggg

SEQ ID NO: 150643 - DNA, 25 bp, SARS Virus
acaagtaccatcgtggtttttgggt

SEQ ID NO: 150644 - DNA, 25 bp, SARS Virus
caagtaccatctgggtttttgggtt

SEQ ID NO: 150645 - DNA, 25 bp, SARS Virus
aagtaccatcttggtttttgggttg

SEQ ID NO: 150646 - DNA, 25 bp, SARS Virus
agtaccatcttggtttttgggttgg

SEQ ID NO: 150647 - DNA, 25 bp, SARS Virus
gtaccatcttgggttttgggttggt

SEQ ID NO: 150648 - DNA, 25 bp, SARS Virus
taccatcttggtgtttgggttggtg

SEQ ID NO: 150649 - DNA, 25 bp, SARS Virus
accatcttggttgttgggttggtgc

SEQ ID NO: 150650 - DNA, 25 bp, SARS Virus
ccatcttggtttgtgggttggtgcc

SEQ ID NO: 150651 - DNA, 25 bp, SARS Virus
catcttggttttggggttggtgcct

SEQ ID NO: 150652 - DNA, 25 bp, SARS Virus
atcttggtttttgggttggtgcctg

SEQ ID NO: 150653 - DNA, 25 bp, SARS Virus
tcttggtttttgggttggtgcctgt

SEQ ID NO: 150654 - DNA, 25 bp, SARS Virus
cttggtttttgggttggtgcctgtt

SEQ ID NO: 150655 - DNA, 25 bp, SARS Virus
ttggtttttggggtggtgcctgttg

SEQ ID NO: 150656 - DNA, 25 bp, SARS Virus
tggtttttgggtgggtgcctgttgt

SEQ ID NO: 150657 - DNA, 25 bp, SARS Virus
ggtttttgggttggtgcctgttgta

SEQ ID NO: 150658 - DNA, 25 bp, SARS Virus
gtttttgggttggtgcctgttgtaa

SEQ ID NO: 150659 - DNA, 25 bp, SARS Virus
tttttgggttggggcctgttgtaaa

SEQ ID NO: 150660 - DNA, 25 bp, SARS Virus
ttttgggttggtgcctgttgtaaac

SEQ ID NO: 150661 - DNA, 25 bp, SARS Virus
tttgggttggtggctgttgtaaact

SEQ ID NO: 150662 - DNA, 25 bp, SARS Virus
ttgggttggtgcgtgttgtaaacta

SEQ ID NO: 150663 - DNA, 25 bp, SARS Virus
tgggttggtgccggttgtaaactaa

SEQ ID NO: 150664 - DNA, 25 bp, SARS Virus
gggttggtgcctgttgtaaactaaa

SEQ ID NO: 150665 - DNA, 25 bp, SARS Virus
ggttggtgcctggtgtaaactaaag

SEQ ID NO: 150666 - DNA, 25 bp, SARS Virus
gttggtgcctgtggtaaactaaaga

SEQ ID NO: 150667 - DNA, 25 bp, SARS Virus
ttggtgcctgttgtaaactaaagag

SEQ ID NO: 150668 - DNA, 25 bp, SARS Virus
tggtgcctgttggaaactaaagaga

SEQ ID NO: 150669 - DNA, 25 bp, SARS Virus
ggtgcctgttgtgaactaaagagac

SEQ ID NO: 150670 - DNA, 25 bp, SARS Virus
gtgcctgttgtagactaaagagaca

SEQ ID NO: 150671 - DNA, 25 bp, SARS Virus
tgcctgttgtaagctaaagagacac

SEQ ID NO: 150672 - DNA, 25 bp, SARS Virus
gcctgttgtaaagtaaagagacacc

SEQ ID NO: 150673 - DNA, 25 bp, SARS Virus
cctgttgtaaacgaaagagacaccg

SEQ ID NO: 150674 - DNA, 25 bp, SARS Virus
ctgttgtaaactgaagagacaccgt

SEQ ID NO: 150675 - DNA, 25 bp, SARS Virus
tgttgtaaactagagagacaccgtc

SEQ ID NO: 150676 - DNA, 25 bp, SARS Virus
gttgtaaactaaggagacaccgtcg

SEQ ID NO: 150677 - DNA, 25 bp, SARS Virus
ttgtaaactaaagagacaccgtcgt

SEQ ID NO: 150678 - DNA, 25 bp, SARS Virus
tgtaaactaaagggacaccgtcgtt

SEQ ID NO: 150679 - DNA, 25 bp, SARS Virus
gtaaactaaagagacaccgtcgttt

SEQ ID NO: 150680 - DNA, 25 bp, SARS Virus
taaactaaagaggcaccgtcgtttt

SEQ ID NO: 150681 - DNA, 25 bp, SARS Virus
aaactaaagagagaccgtcgtttta

SEQ ID NO: 150682 - DNA, 25 bp, SARS Virus
aactaaagagacgccgtcgttttat

SEQ ID NO: 150683 - DNA, 25 bp, SARS Virus
actaaagagacagcgtcgttttatt

SEQ ID NO: 150684 - DNA, 25 bp, SARS Virus
ctaaagagacacggtcgttttattt

SEQ ID NO: 150685 - DNA, 25 bp, SARS Virus
taaagagacaccgtcgttttattta

SEQ ID NO: 150686 - DNA, 25 bp, SARS Virus
aaagagacaccggcgttttatttat

SEQ ID NO: 150687 - DNA, 25 bp, SARS Virus
aagagacaccgtggttttatttatg

SEQ ID NO: 150688 - DNA, 25 bp, SARS Virus
agagacaccgtcgttttatttatgg

SEQ ID NO: 150689 - DNA, 25 bp, SARS Virus
gagacaccgtcggtttatttatggt

SEQ ID NO: 150690 - DNA, 25 bp, SARS Virus
agacaccgtcgtgttatttatggta

SEQ ID NO: 150691 - DNA, 25 bp, SARS Virus
gacaccgtcgttgtatttatggtag

SEQ ID NO: 150692 - DNA, 25 bp, SARS Virus
acaccgtcgtttgatttatggtagg

SEQ ID NO: 150693 - DNA, 25 bp, SARS Virus
caccgtcgttttgtttatggtagga

SEQ ID NO: 150694 - DNA, 25 bp, SARS Virus
accgtcgttttagttatggtaggaa

SEQ ID NO: 150695 - DNA, 25 bp, SARS Virus
ccgtcgttttatgtatggtaggaat

SEQ ID NO: 150696 - DNA, 25 bp, SARS Virus
cgtcgttttattgatggtaggaatt

SEQ ID NO: 150697 - DNA, 25 bp, SARS Virus
gtcgttttatttgtggtaggaattt

SEQ ID NO: 150698 - DNA, 25 bp, SARS Virus
tcgttttatttagggtaggaatttt

SEQ ID NO: 150699 - DNA, 25 bp, SARS Virus
cgttttatttatggtaggaattttc

SEQ ID NO: 150700 - DNA, 25 bp, SARS Virus
gttttatttatggtaggaattttcc

SEQ ID NO: 150701 - DNA, 25 bp, SARS Virus
ttttatttatgggaggaattttcca

SEQ ID NO: 150702 - DNA, 25 bp, SARS Virus
tttatttatggtgggaattttccat

SEQ ID NO: 150703 - DNA, 25 bp, SARS Virus
ttatttatggtaggaattttccata

SEQ ID NO: 150704 - DNA, 25 bp, SARS Virus
tatttatggtaggaattttccatac

SEQ ID NO: 150705 - DNA, 25 bp, SARS Virus
atttatggtagggattttccatact

SEQ ID NO: 150706 - DNA, 25 bp, SARS Virus
tttatggtaggagttttccatactg

SEQ ID NO: 150707 - DNA, 25 bp, SARS Virus
ttatggtaggaagtttccatactgt

SEQ ID NO: 150708 - DNA, 25 bp, SARS Virus
tatggtaggaatgttccatactgtc

SEQ ID NO: 150709 - DNA, 25 bp, SARS Virus
atggtaggaattgtccatactgtcc

SEQ ID NO: 150710 - DNA, 25 bp, SARS Virus
tggtaggaatttgccatactgtccc

SEQ ID NO: 150711 - DNA, 25 bp, SARS Virus
ggtaggaattttgcatactgtccca

SEQ ID NO: 150712 - DNA, 25 bp, SARS Virus
gtaggaattttcgatactgtcccaa

SEQ ID NO: 150713 - DNA, 25 bp, SARS Virus
taggaattttccgtactgtcccaac

SEQ ID NO: 150714 - DNA, 25 bp, SARS Virus
aggaattttccagactgtcccaacg

SEQ ID NO: 150715 - DNA, 25 bp, SARS Virus
ggaattttccatgctgtcccaacgg

SEQ ID NO: 150716 - DNA, 25 bp, SARS Virus
gaattttccatagtgtcccaacggt

SEQ ID NO: 150717 - DNA, 25 bp, SARS Virus
aattttccatacggtcccaacggtt

SEQ ID NO: 150718 - DNA, 25 bp, SARS Virus
attttccatactgtcccaacggttt

SEQ ID NO: 150719 - DNA, 25 bp, SARS Virus
ttttccatactggcccaacggtttg

SEQ ID NO: 150720 - DNA, 25 bp, SARS Virus
tttccatactgtgccaacggtttgc

SEQ ID NO: 150721 - DNA, 25 bp, SARS Virus
ttccatactgtcgcaacggtttgca

SEQ ID NO: 150722 - DNA, 25 bp, SARS Virus
tccatactgtccgaacggtttgcat

SEQ ID NO: 150723 - DNA, 25 bp, SARS Virus
ccatactgtcccgacggtttgcata

SEQ ID NO: 150724 - DNA, 25 bp, SARS Virus
catactgtcccagcggtttgcatac

SEQ ID NO: 150725 - DNA, 25 bp, SARS Virus
atactgtcccaagggtttgcatact

SEQ ID NO: 150726 - DNA, 25 bp, SARS Virus
tactgtcccaacggtttgcatacta

SEQ ID NO: 150727 - DNA, 25 bp, SARS Virus
actgtcccaacggtttgcatactaa

SEQ ID NO: 150728 - DNA, 25 bp, SARS Virus
ctgtcccaacgggttgcatactaat

SEQ ID NO: 150729 - DNA, 25 bp, SARS Virus
tgtcccaacggtgtgcatactaatt

SEQ ID NO: 150730 - DNA, 25 bp, SARS Virus
gtcccaacggttggcatactaatta

SEQ ID NO: 150731 - DNA, 25 bp, SARS Virus
tcccaacggtttgcatactaattat

SEQ ID NO: 150732 - DNA, 25 bp, SARS Virus
cccaacggtttggatactaattatc

SEQ ID NO: 150733 - DNA, 25 bp, SARS Virus
ccaacggtttgcgtactaattatca

SEQ ID NO: 150734 - DNA, 25 bp, SARS Virus
caacggtttgcagactaattatcat

SEQ ID NO: 150735 - DNA, 25 bp, SARS Virus
aacggtttgcatgctaattatcata

SEQ ID NO: 150736 - DNA, 25 bp, SARS Virus
acggtttgcatagtaattatcatac

SEQ ID NO: 150737 - DNA, 25 bp, SARS Virus
cggtttgcatacgaattatcatact

SEQ ID NO: 150738 - DNA, 25 bp, SARS Virus
ggtttgcatactgattatcatactt

SEQ ID NO: 150739 - DNA, 25 bp, SARS Virus
gtttgcatactagttatcatacttt

SEQ ID NO: 150740 - DNA, 25 bp, SARS Virus
tttgcatactaagtatcatactttg

SEQ ID NO: 150741 - DNA, 25 bp, SARS Virus
ttgcatactaatgatcatactttgg

SEQ ID NO: 150742 - DNA, 25 bp, SARS Virus
tgcatactaattgtcatactttggg

SEQ ID NO: 150743 - DNA, 25 bp, SARS Virus
gcatactaattagcatactttggga

SEQ ID NO: 150744 - DNA, 25 bp, SARS Virus
catactaattatgatactttgggac

SEQ ID NO: 150745 - DNA, 25 bp, SARS Virus
atactaattatcgtactttgggaca

SEQ ID NO: 150746 - DNA, 25 bp, SARS Virus
tactaattatcagactttgggacat

SEQ ID NO: 150747 - DNA, 25 bp, SARS Virus
actaattatcatgctttgggacatt

SEQ ID NO: 150748 - DNA, 25 bp, SARS Virus
ctaattatcatagtttgggacattg

SEQ ID NO: 150749 - DNA, 25 bp, SARS Virus
taattatcatacgttgggacattgt

SEQ ID NO: 150750 - DNA, 25 bp, SARS Virus
aattatcatactgtgggacattgta

SEQ ID NO: 150751 - DNA, 25 bp, SARS Virus
attatcatacttggggacattgtaa

SEQ ID NO: 150752 - DNA, 25 bp, SARS Virus
ttatcatactttgggacattgtaat

SEQ ID NO: 150753 - DNA, 25 bp, SARS Virus
tatcatactttgggacattgtaatc

SEQ ID NO: 150754 - DNA, 25 bp, SARS Virus
atcatactttgggacattgtaatct

SEQ ID NO: 150755 - DNA, 25 bp, SARS Virus
tcatactttggggcattgtaatctt

SEQ ID NO: 150756 - DNA, 25 bp, SARS Virus
catactttgggagattgtaatctta

SEQ ID NO: 150757 - DNA, 25 bp, SARS Virus
atactttgggacgttgtaatcttat

SEQ ID NO: 150758 - DNA, 25 bp, SARS Virus
tactttgggacagtgtaatcttatt

SEQ ID NO: 150759 - DNA, 25 bp, SARS Virus
actttgggacatggtaatcttattt

SEQ ID NO: 150760 - DNA, 25 bp, SARS Virus
ctttgggacattgtaatcttatttt

SEQ ID NO: 150761 - DNA, 25 bp, SARS Virus
tttgggacattggaatcttatttta

SEQ ID NO: 150762 - DNA, 25 bp, SARS Virus
ttgggacattgtgatcttattttac

SEQ ID NO: 150763 - DNA, 25 bp, SARS Virus
tgggacattgtagtcttattttacc

SEQ ID NO: 150764 - DNA, 25 bp, SARS Virus
gggacattgtaagcttattttacct

SEQ ID NO: 150765 - DNA, 25 bp, SARS Virus
ggacattgtaatgttattttacctt

SEQ ID NO: 150766 - DNA, 25 bp, SARS Virus
gacattgtaatcgtattttaccttc

SEQ ID NO: 150767 - DNA, 25 bp, SARS Virus
acattgtaatctgattttaccttct

SEQ ID NO: 150768 - DNA, 25 bp, SARS Virus
cattgtaatcttgttttaccttctt

SEQ ID NO: 150769 - DNA, 25 bp, SARS Virus
attgtaatcttagtttaccttcttt

SEQ ID NO: 150770 - DNA, 25 bp, SARS Virus
ttgtaatcttatgttaccttcttta

SEQ ID NO: 150771 - DNA, 25 bp, SARS Virus
tgtaatcttattgtaccttctttat

SEQ ID NO: 150772 - DNA, 25 bp, SARS Virus
gtaatcttatttgaccttctttatt

SEQ ID NO: 150773 - DNA, 25 bp, SARS Virus
taatcttattttgccttctttattt

SEQ ID NO: 150774 - DNA, 25 bp, SARS Virus
aatcttattttagcttctttattta

SEQ ID NO: 150775 - DNA, 25 bp, SARS Virus
atcttattttacgttctttatttag

SEQ ID NO: 150776 - DNA, 25 bp, SARS Virus
tcttattttaccgtctttatttagg

SEQ ID NO: 150777 - DNA, 25 bp, SARS Virus
cttattttacctgctttatttagga

SEQ ID NO: 150778 - DNA, 25 bp, SARS Virus
ttattttaccttgtttatttaggac

SEQ ID NO: 150779 - DNA, 25 bp, SARS Virus
tattttaccttcgttatttaggact

SEQ ID NO: 150780 - DNA, 25 bp, SARS Virus
attttaccttctgtatttaggactc

SEQ ID NO: 150781 - DNA, 25 bp, SARS Virus
ttttaccttcttgatttaggactca

SEQ ID NO: 150782 - DNA, 25 bp, SARS Virus
tttaccttctttgtttaggactcaa

SEQ ID NO: 150783 - DNA, 25 bp, SARS Virus
ttaccttctttagttaggactcaat

SEQ ID NO: 150784 - DNA, 25 bp, SARS Virus
taccttctttatgtaggactcaatt

SEQ ID NO: 150785 - DNA, 25 bp, SARS Virus
accttctttattgaggactcaattt

SEQ ID NO: 150786 - DNA, 25 bp, SARS Virus
ccttctttatttgggactcaattta

SEQ ID NO: 150787 - DNA, 25 bp, SARS Virus
cttctttatttaggactcaatttat

SEQ ID NO: 150788 - DNA, 25 bp, SARS Virus
ttctttatttaggactcaatttatt

SEQ ID NO: 150789 - DNA, 25 bp, SARS Virus
tctttatttagggctcaatttattt

SEQ ID NO: 150790 - DNA, 25 bp, SARS Virus
ctttatttaggagtcaatttatttc

SEQ ID NO: 150791 - DNA, 25 bp, SARS Virus
tttatttaggacgcaatttatttct

SEQ ID NO: 150792 - DNA, 25 bp, SARS Virus
ttatttaggactgaatttatttctc

SEQ ID NO: 150793 - DNA, 25 bp, SARS Virus
tatttaggactcgatttatttctca

SEQ ID NO: 150794 - DNA, 25 bp, SARS Virus
atttaggactcagtttatttctcac

SEQ ID NO: 150795 - DNA, 25 bp, SARS Virus
tttaggactcaagttatttctcaca

SEQ ID NO: 150796 - DNA, 25 bp, SARS Virus
ttaggactcaatgtatttctcacag

SEQ ID NO: 150797 - DNA, 25 bp, SARS Virus
taggactcaattgatttctcacaga

SEQ ID NO: 150798 - DNA, 25 bp, SARS Virus
aggactcaatttgtttctcacagac

SEQ ID NO: 150799 - DNA, 25 bp, SARS Virus
ggactcaatttagttctcacagact

SEQ ID NO: 150800 - DNA, 25 bp, SARS Virus
gactcaatttatgtctcacagacta

SEQ ID NO: 150801 - DNA, 25 bp, SARS Virus
actcaatttattgctcacagactag

SEQ ID NO: 150802 - DNA, 25 bp, SARS Virus
ctcaatttatttgtcacagactaga

SEQ ID NO: 150803 - DNA, 25 bp, SARS Virus
tcaatttatttcgcacagactagat

SEQ ID NO: 150804 - DNA, 25 bp, SARS Virus
caatttatttctgacagactagatt

SEQ ID NO: 150805 - DNA, 25 bp, SARS Virus
aatttatttctcgcagactagattt

SEQ ID NO: 150806 - DNA, 25 bp, SARS Virus
atttatttctcagagactagatttt

SEQ ID NO: 150807 - DNA, 25 bp, SARS Virus
tttatttctcacggactagattttt

SEQ ID NO: 150808 - DNA, 25 bp, SARS Virus
ttatttctcacagactagattttta

SEQ ID NO: 150809 - DNA, 25 bp, SARS Virus
tatttctcacaggctagatttttaa

SEQ ID NO: 150810 - DNA, 25 bp, SARS Virus
atttctcacagagtagatttttaaa

SEQ ID NO: 150811 - DNA, 25 bp, SARS Virus
tttctcacagacgagatttttaaag

SEQ ID NO: 150812 - DNA, 25 bp, SARS Virus
ttctcacagactggatttttaaagt

SEQ ID NO: 150813 - DNA, 25 bp, SARS Virus
tctcacagactagatttttaaagta

SEQ ID NO: 150814 - DNA, 25 bp, SARS Virus
ctcacagactaggtttttaaagtag

SEQ ID NO: 150815 - DNA, 25 bp, SARS Virus
tcacagactagagttttaaagtagt

SEQ ID NO: 150816 - DNA, 25 bp, SARS Virus
cacagactagatgtttaaagtagtc

SEQ ID NO: 150817 - DNA, 25 bp, SARS Virus
acagactagattgttaaagtagtcc

SEQ ID NO: 150818 - DNA, 25 bp, SARS Virus
cagactagatttgtaaagtagtcct

SEQ ID NO: 150819 - DNA, 25 bp, SARS Virus
agactagattttgaaagtagtccta

SEQ ID NO: 150820 - DNA, 25 bp, SARS Virus
gactagatttttgaagtagtcctat

SEQ ID NO: 150821 - DNA, 25 bp, SARS Virus
actagatttttagagtagtcctatc

SEQ ID NO: 150822 - DNA, 25 bp, SARS Virus
ctagatttttaaggtagtcctatca

SEQ ID NO: 150823 - DNA, 25 bp, SARS Virus
tagatttttaaagtagtcctatcat

SEQ ID NO: 150824 - DNA, 25 bp, SARS Virus
agatttttaaaggagtcctatcatt

SEQ ID NO: 150825 - DNA, 25 bp, SARS Virus
ttccatctagtgtttgatgtagata

SEQ ID NO: 150826 - DNA, 25 bp, SARS Virus
tccatctagtgcttgatgtagatat

SEQ ID NO: 150827 - DNA, 25 bp, SARS Virus
ccatctagtgcttgatgtagatatc

SEQ ID NO: 150828 - DNA, 25 bp, SARS Virus
catctagtgctttatgtagatatcc

SEQ ID NO: 150829 - DNA, 25 bp, SARS Virus
atctagtgcttgttgtagatatcca

SEQ ID NO: 150830 - DNA, 25 bp, SARS Virus
tctagtgcttgatgtagatatccaa

SEQ ID NO: 150831 - DNA, 25 bp, SARS Virus
ctagtgcttgatttagatatccaac

SEQ ID NO: 150832 - DNA, 25 bp, SARS Virus
tagtgcttgatgtagatatccaact

SEQ ID NO: 150833 - DNA, 25 bp, SARS Virus
agtgcttgatgttgatatccaacta

SEQ ID NO: 150834 - DNA, 25 bp, SARS Virus
gtgcttgatgtatatatccaactat

SEQ ID NO: 150835 - DNA, 25 bp, SARS Virus
tgcttgatgtagttatccaactatc

SEQ ID NO: 150836 - DNA, 25 bp, SARS Virus
gcttgatgtagatatccaactatcg

SEQ ID NO: 150837 - DNA, 25 bp, SARS Virus
cttgatgtagatttccaactatcgg

SEQ ID NO: 150838 - DNA, 25 bp, SARS Virus
ttgatgtagatatccaactatcggg

SEQ ID NO: 150839 - DNA, 25 bp, SARS Virus
tgatgtagatattcaactatcggga

SEQ ID NO: 150840 - DNA, 25 bp, SARS Virus
gatgtagatatctaactatcgggaa

SEQ ID NO: 150841 - DNA, 25 bp, SARS Virus
atgtagatatcctactatcgggaat

SEQ ID NO: 150842 - DNA, 25 bp, SARS Virus
tgtagatatccatctatcgggaata

SEQ ID NO: 150843 - DNA, 25 bp, SARS Virus
gtagatatccaattatcgggaatat

SEQ ID NO: 150844 - DNA, 25 bp, SARS Virus
tagatatccaactatcgggaatatt

SEQ ID NO: 150845 - DNA, 25 bp, SARS Virus
agatatccaactttcgggaatattt

SEQ ID NO: 150846 - DNA, 25 bp, SARS Virus
gatatccaactatcgggaatatttg

SEQ ID NO: 150847 - DNA, 25 bp, SARS Virus
atatccaactattgggaatatttgt

SEQ ID NO: 150848 - DNA, 25 bp, SARS Virus
tatccaactatctggaatatttgta

SEQ ID NO: 150849 - DNA, 25 bp, SARS Virus
atccaactatcgtgaatatttgtat

SEQ ID NO: 150850 - DNA, 25 bp, SARS Virus
tccaactatcggtaatatttgtatc

SEQ ID NO: 150851 - DNA, 25 bp, SARS Virus
ccaactatcgggtatatttgtatct

SEQ ID NO: 150852 - DNA, 25 bp, SARS Virus
caactatcgggattatttgtatctc

SEQ ID NO: 150853 - DNA, 25 bp, SARS Virus
aactatcgggaatatttgtatctct

SEQ ID NO: 150854 - DNA, 25 bp, SARS Virus
actatcgggaatttttgtatctctt

SEQ ID NO: 150855 - DNA, 25 bp, SARS Virus
ctatcgggaatatttgtatctcttt

SEQ ID NO: 150856 - DNA, 25 bp, SARS Virus
tatcgggaatatttgtatctctttg

SEQ ID NO: 150857 - DNA, 25 bp, SARS Virus
atcgggaatatttgtatctctttgg

SEQ ID NO: 150858 - DNA, 25 bp, SARS Virus
tcgggaatatttttatctctttggg

SEQ ID NO: 150859 - DNA, 25 bp, SARS Virus
cgggaatatttgtatctctttgggt

SEQ ID NO: 150860 - DNA, 25 bp, SARS Virus
gggaatatttgtttctctttgggta

SEQ ID NO: 150861 - DNA, 25 bp, SARS Virus
ggaatatttgtatctctttgggtag

SEQ ID NO: 150862 - DNA, 25 bp, SARS Virus
gaatatttgtatttctttgggtaga

SEQ ID NO: 150863 - DNA, 25 bp, SARS Virus
aatatttgtatctctttgggtagaa

SEQ ID NO: 150864 - DNA, 25 bp, SARS Virus
atatttgtatctttttgggtagaaa

SEQ ID NO: 150865 - DNA, 25 bp, SARS Virus
tatttgtatctctttgggtagaaat

SEQ ID NO: 150866 - DNA, 25 bp, SARS Virus
atttgtatctctttgggtagaaata

SEQ ID NO: 150867 - DNA, 25 bp, SARS Virus
tttgtatctctttgggtagaaataa

SEQ ID NO: 150868 - DNA, 25 bp, SARS Virus
ttgtatctcttttggtagaaataaa

SEQ ID NO: 150869 - DNA, 25 bp, SARS Virus
tgtatctctttgtgtagaaataaaa

SEQ ID NO: 150870 - DNA, 25 bp, SARS Virus
gtatctctttggttagaaataaaaa

SEQ ID NO: 150871 - DNA, 25 bp, SARS Virus
tatctctttgggtagaaataaaaat

SEQ ID NO: 150872 - DNA, 25 bp, SARS Virus
atctctttgggttgaaataaaaatt

SEQ ID NO: 150873 - DNA, 25 bp, SARS Virus
tctctttgggtataaataaaaattt

SEQ ID NO: 150874 - DNA, 25 bp, SARS Virus
ctctttgggtagtaataaaaatttg

SEQ ID NO: 150875 - DNA, 25 bp, SARS Virus
tctttgggtagatataaaaatttgt

SEQ ID NO: 150876 - DNA, 25 bp, SARS Virus
ctttgggtagaattaaaaatttgtg

SEQ ID NO: 150877 - DNA, 25 bp, SARS Virus
tttgggtagaaataaaaatttgtgt

SEQ ID NO: 150878 - DNA, 25 bp, SARS Virus
ttgggtagaaattaaaatttgtgtt

SEQ ID NO: 150879 - DNA, 25 bp, SARS Virus
tgggtagaaatataaatttgtgttt

SEQ ID NO: 150880 - DNA, 25 bp, SARS Virus
gggtagaaataataatttgtgtttg

SEQ ID NO: 150881 - DNA, 25 bp, SARS Virus
ggtagaaataaatatttgtgtttga

SEQ ID NO: 150882 - DNA, 25 bp, SARS Virus
gtagaaataaaattttgtgtttgag

SEQ ID NO: 150883 - DNA, 25 bp, SARS Virus
tagaaataaaaatttgtgtttgaga

SEQ ID NO: 150884 - DNA, 25 bp, SARS Virus
agaaataaaaatttgtgtttgagag

SEQ ID NO: 150885 - DNA, 25 bp, SARS Virus
gaaataaaaatttgtgtttgagagc

SEQ ID NO: 150886 - DNA, 25 bp, SARS Virus
aaataaaaatttttgtttgagagca

SEQ ID NO: 150887 - DNA, 25 bp, SARS Virus
aataaaaatttgtgtttgagagcat

SEQ ID NO: 150888 - DNA, 25 bp, SARS Virus
ataaaaatttgtttttgagagcatt

SEQ ID NO: 150889 - DNA, 25 bp, SARS Virus
taaaaatttgtgtttgagagcattc

SEQ ID NO: 150890 - DNA, 25 bp, SARS Virus
aaaaatttgtgtttgagagcattca

SEQ ID NO: 150891 - DNA, 25 bp, SARS Virus
aaaatttgtgtttgagagcattcac

SEQ ID NO: 150892 - DNA, 25 bp, SARS Virus
aaatttgtgttttagagcattcaca

SEQ ID NO: 150893 - DNA, 25 bp, SARS Virus
aatttgtgtttgtgagcattcacaa

SEQ ID NO: 150894 - DNA, 25 bp, SARS Virus
atttgtgtttgatagcattcacaaa

SEQ ID NO: 150895 - DNA, 25 bp, SARS Virus
tttgtgtttgagtgcattcacaaat

SEQ ID NO: 150896 - DNA, 25 bp, SARS Virus
ttgtgtttgagatcattcacaaatt

SEQ ID NO: 150897 - DNA, 25 bp, SARS Virus
tgtgtttgagagtattcacaaattt

SEQ ID NO: 150898 - DNA, 25 bp, SARS Virus
gtgtttgagagctttcacaaatttt

SEQ ID NO: 150899 - DNA, 25 bp, SARS Virus
tgtttgagagcattcacaaatttta

SEQ ID NO: 150900 - DNA, 25 bp, SARS Virus
gtttgagagcattcacaaattttaa

SEQ ID NO: 150901 - DNA, 25 bp, SARS Virus
tttgagagcatttacaaattttaat

SEQ ID NO: 150902 - DNA, 25 bp, SARS Virus
ttgagagcattctcaaattttaatg

SEQ ID NO: 150903 - DNA, 25 bp, SARS Virus
tgagagcattcataaattttaatgg

SEQ ID NO: 150904 - DNA, 25 bp, SARS Virus
gagagcattcactaattttaatgga

SEQ ID NO: 150905 - DNA, 25 bp, SARS Virus
agagcattcacatattttaatggac

SEQ ID NO: 150906 - DNA, 25 bp, SARS Virus
gagcattcacaatttttaatggact

SEQ ID NO: 150907 - DNA, 25 bp, SARS Virus
agcattcacaaattttaatggactg

SEQ ID NO: 150908 - DNA, 25 bp, SARS Virus
gcattcacaaattttaatggactga

SEQ ID NO: 150909 - DNA, 25 bp, SARS Virus
cattcacaaattttaatggactgaa

SEQ ID NO: 150910 - DNA, 25 bp, SARS Virus
attcacaaattttaatggactgaaa

SEQ ID NO: 150911 - DNA, 25 bp, SARS Virus
ttcacaaatttttatggactgaaaa

SEQ ID NO: 150912 - DNA, 25 bp, SARS Virus
tcacaaattttattggactgaaaag

SEQ ID NO: 150913 - DNA, 25 bp, SARS Virus
cacaaattttaatggactgaaaaga

SEQ ID NO: 150914 - DNA, 25 bp, SARS Virus
acaaattttaattgactgaaaagac

SEQ ID NO: 150915 - DNA, 25 bp, SARS Virus
caaattttaatgtactgaaaagact

SEQ ID NO: 150916 - DNA, 25 bp, SARS Virus
aaattttaatggtctgaaaagactt

SEQ ID NO: 150917 - DNA, 25 bp, SARS Virus
aattttaatggattgaaaagacttt

SEQ ID NO: 150918 - DNA, 25 bp, SARS Virus
attttaatggactgaaaagactttg

SEQ ID NO: 150919 - DNA, 25 bp, SARS Virus
ttttaatggacttaaaagactttgt

SEQ ID NO: 150920 - DNA, 25 bp, SARS Virus
tttaatggactgtaaagactttgta

SEQ ID NO: 150921 - DNA, 25 bp, SARS Virus
ttaatggactgataagactttgtag

SEQ ID NO: 150922 - DNA, 25 bp, SARS Virus
taatggactgaatagactttgtagt

SEQ ID NO: 150923 - DNA, 25 bp, SARS Virus
aatggactgaaatgactttgtagtt

SEQ ID NO: 150924 - DNA, 25 bp, SARS Virus
atggactgaaaatactttgtagttc

SEQ ID NO: 150925 - DNA, 25 bp, SARS Virus
tggactgaaaagtctttgtagttcg

SEQ ID NO: 150926 - DNA, 25 bp, SARS Virus
ggactgaaaagattttgtagttcgc

SEQ ID NO: 150927 - DNA, 25 bp, SARS Virus
gactgaaaagactttgtagttcgct

SEQ ID NO: 150928 - DNA, 25 bp, SARS Virus
actgaaaagactttgtagttcgctt

SEQ ID NO: 150929 - DNA, 25 bp, SARS Virus
ctgaaaagactttgtagttcgcttt

SEQ ID NO: 150930 - DNA, 25 bp, SARS Virus
tgaaaagactttttagttcgctttt

SEQ ID NO: 150931 - DNA, 25 bp, SARS Virus
gaaaagactttgtagttcgcttttc

SEQ ID NO: 150932 - DNA, 25 bp, SARS Virus
aaaagactttgttgttcgcttttcc

SEQ ID NO: 150933 - DNA, 25 bp, SARS Virus
aaagactttgtatttcgcttttccg

SEQ ID NO: 150934 - DNA, 25 bp, SARS Virus
aagactttgtagttcgcttttccgt

SEQ ID NO: 150935 - DNA, 25 bp, SARS Virus
agactttgtagttcgcttttccgta

SEQ ID NO: 150936 - DNA, 25 bp, SARS Virus
gactttgtagtttgcttttccgtag

SEQ ID NO: 150937 - DNA, 25 bp, SARS Virus
actttgtagttctcttttccgtagt

SEQ ID NO: 150938 - DNA, 25 bp, SARS Virus
ctttgtagttcgtttttccgtagtc

SEQ ID NO: 150939 - DNA, 25 bp, SARS Virus
tttgtagttcgcttttccgtagtct

SEQ ID NO: 150940 - DNA, 25 bp, SARS Virus
ttgtagttcgcttttccgtagtcta

SEQ ID NO: 150941 - DNA, 25 bp, SARS Virus
tgtagttcgcttttccgtagtctat

SEQ ID NO: 150942 - DNA, 25 bp, SARS Virus
gtagttcgcttttccgtagtctata

SEQ ID NO: 150943 - DNA, 25 bp, SARS Virus
tagttcgctttttcgtagtctatac

SEQ ID NO: 150944 - DNA, 25 bp, SARS Virus
agttcgcttttctgtagtctataca

SEQ ID NO: 150945 - DNA, 25 bp, SARS Virus
gttcgcttttccttagtctatacat

SEQ ID NO: 150946 - DNA, 25 bp, SARS Virus
ttcgcttttccgtagtctatacatg

SEQ ID NO: 150947 - DNA, 25 bp, SARS Virus
tcgcttttccgttgtctatacatga

SEQ ID NO: 150948 - DNA, 25 bp, SARS Virus
cgcttttccgtattctatacatgag

SEQ ID NO: 150949 - DNA, 25 bp, SARS Virus
gcttttccgtagtctatacatgagc

SEQ ID NO: 150950 - DNA, 25 bp, SARS Virus
cttttccgtagtttatacatgagct

SEQ ID NO: 150951 - DNA, 25 bp, SARS Virus
ttttccgtagtctatacatgagctt

SEQ ID NO: 150952 - DNA, 25 bp, SARS Virus
tttccgtagtctttacatgagcttt

SEQ ID NO: 150953 - DNA, 25 bp, SARS Virus
ttccgtagtctatacatgagctttc

SEQ ID NO: 150954 - DNA, 25 bp, SARS Virus
tccgtagtctattcatgagctttca

SEQ ID NO: 150955 - DNA, 25 bp, SARS Virus
ccgtagtctatatatgagctttcac

SEQ ID NO: 150956 - DNA, 25 bp, SARS Virus
cgtagtctatacttgagctttcacg

SEQ ID NO: 150957 - DNA, 25 bp, SARS Virus
gtagtctatacatgagctttcacgt

SEQ ID NO: 150958 - DNA, 25 bp, SARS Virus
tagtctatacattagctttcacgtt

SEQ ID NO: 150959 - DNA, 25 bp, SARS Virus
agtctatacatgtgctttcacgtta

SEQ ID NO: 150960 - DNA, 25 bp, SARS Virus
gtctatacatgatctttcacgttaa

SEQ ID NO: 150961 - DNA, 25 bp, SARS Virus
tctatacatgagttttcacgttaat

SEQ ID NO: 150962 - DNA, 25 bp, SARS Virus
ctatacatgagctttcacgttaatt

SEQ ID NO: 150963 - DNA, 25 bp, SARS Virus
tatacatgagctttcacgttaattt

SEQ ID NO: 150964 - DNA, 25 bp, SARS Virus
atacatgagctttcacgttaattta

SEQ ID NO: 150965 - DNA, 25 bp, SARS Virus
tacatgagcttttacgttaatttac

SEQ ID NO: 150966 - DNA, 25 bp, SARS Virus
acatgagctttctcgttaatttacg

SEQ ID NO: 150967 - DNA, 25 bp, SARS Virus
catgagctttcatgttaatttacgt

SEQ ID NO: 150968 - DNA, 25 bp, SARS Virus
atgagctttcactttaatttacgta

SEQ ID NO: 150969 - DNA, 25 bp, SARS Virus
tgagctttcacgttaatttacgtaa

SEQ ID NO: 150970 - DNA, 25 bp, SARS Virus
gagctttcacgttaatttacgtaat

SEQ ID NO: 150971 - DNA, 25 bp, SARS Virus
agctttcacgtttatttacgtaata

SEQ ID NO: 150972 - DNA, 25 bp, SARS Virus
gctttcacgttattttacgtaatag

SEQ ID NO: 150973 - DNA, 25 bp, SARS Virus
ctttcacgttaatttacgtaatagc

SEQ ID NO: 150974 - DNA, 25 bp, SARS Virus
tttcacgttaatttacgtaatagct

SEQ ID NO: 150975 - DNA, 25 bp, SARS Virus
ttcacgttaatttacgtaatagctt

SEQ ID NO: 150976 - DNA, 25 bp, SARS Virus
tcacgttaattttcgtaatagctta

SEQ ID NO: 150977 - DNA, 25 bp, SARS Virus
cacgttaatttatgtaatagcttat

SEQ ID NO: 150978 - DNA, 25 bp, SARS Virus
acgttaatttacttaatagcttata

SEQ ID NO: 150979 - DNA, 25 bp, SARS Virus
cgttaatttacgtaatagcttatag

SEQ ID NO: 150980 - DNA, 25 bp, SARS Virus
gttaatttacgttatagcttatagt

SEQ ID NO: 150981 - DNA, 25 bp, SARS Virus
ttaatttacgtattagcttatagta

SEQ ID NO: 150982 - DNA, 25 bp, SARS Virus
taatttacgtaatagcttatagtat

SEQ ID NO: 150983 - DNA, 25 bp, SARS Virus
aatttacgtaattgcttatagtatc

SEQ ID NO: 150984 - DNA, 25 bp, SARS Virus
atttacgtaatatcttatagtatca

SEQ ID NO: 150985 - DNA, 25 bp, SARS Virus
tttacgtaatagtttatagtatcat

SEQ ID NO: 150986 - DNA, 25 bp, SARS Virus
ttacgtaatagcttatagtatcata

SEQ ID NO: 150987 - DNA, 25 bp, SARS Virus
tacgtaatagcttatagtatcatac

SEQ ID NO: 150988 - DNA, 25 bp, SARS Virus
acgtaatagcttttagtatcataca

SEQ ID NO: 150989 - DNA, 25 bp, SARS Virus
cgtaatagcttatagtatcatacac

SEQ ID NO: 150990 - DNA, 25 bp, SARS Virus
gtaatagcttattgtatcatacaca

SEQ ID NO: 150991 - DNA, 25 bp, SARS Virus
taatagcttatattatcatacacag

SEQ ID NO: 150992 - DNA, 25 bp, SARS Virus
aatagcttatagtatcatacacaga

SEQ ID NO: 150993 - DNA, 25 bp, SARS Virus
atagcttatagtttcatacacagac

SEQ ID NO: 150994 - DNA, 25 bp, SARS Virus
tagcttatagtatcatacacagaca

SEQ ID NO: 150995 - DNA, 25 bp, SARS Virus
agcttatagtattatacacagacac

SEQ ID NO: 150996 - DNA, 25 bp, SARS Virus
gcttatagtatcttacacagacaca

SEQ ID NO: 150997 - DNA, 25 bp, SARS Virus
cttatagtatcatacacagacacat

SEQ ID NO: 150998 - DNA, 25 bp, SARS Virus
ttatagtatcattcacagacacatg

SEQ ID NO: 150999 - DNA, 25 bp, SARS Virus
tatagtatcatatacagacacatgg

SEQ ID NO: 151000 - DNA, 25 bp, SARS Virus
atagtatcatactcagacacatggg

SEQ ID NO: 151001 - DNA, 25 bp, SARS Virus
tagtatcatacatagacacatgggt

SEQ ID NO: 151002 - DNA, 25 bp, SARS Virus
agtatcatacactgacacatgggta

SEQ ID NO: 151003 - DNA, 25 bp, SARS Virus
gtatcatacacatacacatgggtac

SEQ ID NO: 151004 - DNA, 25 bp, SARS Virus
tatcatacacagtcacatgggtacc

SEQ ID NO: 151005 - DNA, 25 bp, SARS Virus
atcatacacagatacatgggtaccc

SEQ ID NO: 151006 - DNA, 25 bp, SARS Virus
tcatacacagactcatgggtaccca

SEQ ID NO: 151007 - DNA, 25 bp, SARS Virus
catacacagacatatgggtacccaa

SEQ ID NO: 151008 - DNA, 25 bp, SARS Virus
atacacagacacttgggtacccaaa

SEQ ID NO: 151009 - DNA, 25 bp, SARS Virus
tacacagacacatgggtacccaaat

SEQ ID NO: 151010 - DNA, 25 bp, SARS Virus
acacagacacattggtacccaaatc

SEQ ID NO: 151011 - DNA, 25 bp, SARS Virus
cacagacacatgtgtacccaaatct

SEQ ID NO: 151012 - DNA, 25 bp, SARS Virus
acagacacatggttacccaaatctt

SEQ ID NO: 151013 - DNA, 25 bp, SARS Virus
cagacacatgggtacccaaatcttt

SEQ ID NO: 151014 - DNA, 25 bp, SARS Virus
agacacatgggttcccaaatctttg

SEQ ID NO: 151015 - DNA, 25 bp, SARS Virus
gacacatgggtatccaaatctttgt

SEQ ID NO: 151016 - DNA, 25 bp, SARS Virus
acacatgggtactcaaatctttgtc

SEQ ID NO: 151017 - DNA, 25 bp, SARS Virus
cacatgggtacctaaatctttgtcg

SEQ ID NO: 151018 - DNA, 25 bp, SARS Virus
acatgggtaccctaatctttgtcgt

SEQ ID NO: 151019 - DNA, 25 bp, SARS Virus
catgggtacccatatctttgtcgtt

SEQ ID NO: 151020 - DNA, 25 bp, SARS Virus
atgggtacccaattctttgtcgttt

SEQ ID NO: 151021 - DNA, 25 bp, SARS Virus
tgggtacccaaatctttgtcgtttc

SEQ ID NO: 151022 - DNA, 25 bp, SARS Virus
gggtacccaaatttttgtcgtttct

SEQ ID NO: 151023 - DNA, 25 bp, SARS Virus
ggtacccaaatctttgtcgtttctt

SEQ ID NO: 151024 - DNA, 25 bp, SARS Virus
gtacccaaatctttgtcgtttcttt

SEQ ID NO: 151025 - DNA, 25 bp, SARS Virus
tacccaaatctttgtcgtttctttc

SEQ ID NO: 151026 - DNA, 25 bp, SARS Virus
acccaaatctttttcgtttctttcc

SEQ ID NO: 151027 - DNA, 25 bp, SARS Virus
cccaaatctttgtcgtttctttccc

SEQ ID NO: 151028 - DNA, 25 bp, SARS Virus
ccaaatctttgttgtttctttccca

SEQ ID NO: 151029 - DNA, 25 bp, SARS Virus
caaatctttgtcttttctttcccaa

SEQ ID NO: 151030 - DNA, 25 bp, SARS Virus
aaatctttgtcgtttctttcccaac

SEQ ID NO: 151031 - DNA, 25 bp, SARS Virus
aatctttgtcgtttctttcccaaca

SEQ ID NO: 151032 - DNA, 25 bp, SARS Virus
atctttgtcgtttctttcccaacag

SEQ ID NO: 151033 - DNA, 25 bp, SARS Virus
tctttgtcgtttttttcccaacagt

SEQ ID NO: 151034 - DNA, 25 bp, SARS Virus
ctttgtcgtttctttcccaacagtg

SEQ ID NO: 151035 - DNA, 25 bp, SARS Virus
tttgtcgtttctttcccaacagtgt

SEQ ID NO: 151036 - DNA, 25 bp, SARS Virus
ttgtcgtttctttcccaacagtgtg

SEQ ID NO: 151037 - DNA, 25 bp, SARS Virus
tgtcgtttcttttccaacagtgtgt

SEQ ID NO: 151038 - DNA, 25 bp, SARS Virus
gtcgtttctttctcaacagtgtgtt

SEQ ID NO: 151039 - DNA, 25 bp, SARS Virus
tcgtttctttcctaacagtgtgtta

SEQ ID NO: 151040 - DNA, 25 bp, SARS Virus
cgtttctttccctacagtgtgttaa

SEQ ID NO: 151041 - DNA, 25 bp, SARS Virus
gtttctttcccatcagtgtgttaag

SEQ ID NO: 151042 - DNA, 25 bp, SARS Virus
tttctttcccaatagtgtgttaagt

SEQ ID NO: 151043 - DNA, 25 bp, SARS Virus
ttctttcccaactgtgtgttaagtt

SEQ ID NO: 151044 - DNA, 25 bp, SARS Virus
tctttcccaacattgtgttaagttt

SEQ ID NO: 151045 - DNA, 25 bp, SARS Virus
ctttcccaacagtgtgttaagtttc

SEQ ID NO: 151046 - DNA, 25 bp, SARS Virus
tttcccaacagtttgttaagtttca

SEQ ID NO: 151047 - DNA, 25 bp, SARS Virus
ttcccaacagtgtgttaagtttcaa

SEQ ID NO: 151048 - DNA, 25 bp, SARS Virus
tcccaacagtgttttaagtttcaat

SEQ ID NO: 151049 - DNA, 25 bp, SARS Virus
cccaacagtgtgttaagtttcaatg

SEQ ID NO: 151050 - DNA, 25 bp, SARS Virus
ccaacagtgtgttaagtttcaatgt

SEQ ID NO: 151051 - DNA, 25 bp, SARS Virus
caacagtgtgtttagtttcaatgta

SEQ ID NO: 151052 - DNA, 25 bp, SARS Virus
aacagtgtgttatgtttcaatgtac

SEQ ID NO: 151053 - DNA, 25 bp, SARS Virus
acagtgtgttaattttcaatgtacg

SEQ ID NO: 151054 - DNA, 25 bp, SARS Virus
cagtgtgttaagtttcaatgtacga

SEQ ID NO: 151055 - DNA, 25 bp, SARS Virus
agtgtgttaagtttcaatgtacgag

SEQ ID NO: 151056 - DNA, 25 bp, SARS Virus
gtgtgttaagtttcaatgtacgagc

SEQ ID NO: 151057 - DNA, 25 bp, SARS Virus
tgtgttaagttttaatgtacgagca

SEQ ID NO: 151058 - DNA, 25 bp, SARS Virus
gtgttaagtttctatgtacgagcat

SEQ ID NO: 151059 - DNA, 25 bp, SARS Virus
tgttaagtttcattgtacgagcata

SEQ ID NO: 151060 - DNA, 25 bp, SARS Virus
gttaagtttcaatgtacgagcatat

SEQ ID NO: 151061 - DNA, 25 bp, SARS Virus
ttaagtttcaatttacgagcatatt

SEQ ID NO: 151062 - DNA, 25 bp, SARS Virus
taagtttcaatgtacgagcatattg

SEQ ID NO: 151063 - DNA, 25 bp, SARS Virus
aagtttcaatgttcgagcatattgt

SEQ ID NO: 151064 - DNA, 25 bp, SARS Virus
agtttcaatgtatgagcatattgtt

SEQ ID NO: 151065 - DNA, 25 bp, SARS Virus
gtttcaatgtactagcatattgttg

SEQ ID NO: 151066 - DNA, 25 bp, SARS Virus
tttcaatgtacgtgcatattgttgt

SEQ ID NO: 151067 - DNA, 25 bp, SARS Virus
ttcaatgtacgatcatattgttgta

SEQ ID NO: 151068 - DNA, 25 bp, SARS Virus
tcaatgtacgagtatattgttgtaa

SEQ ID NO: 151069 - DNA, 25 bp, SARS Virus
caatgtacgagcttattgttgtaat

SEQ ID NO: 151070 - DNA, 25 bp, SARS Virus
aatgtacgagcatattgttgtaatc

SEQ ID NO: 151071 - DNA, 25 bp, SARS Virus
atgtacgagcattttgttgtaatca

SEQ ID NO: 151072 - DNA, 25 bp, SARS Virus
tgtacgagcatattgttgtaatcat

SEQ ID NO: 151073 - DNA, 25 bp, SARS Virus
gtacgagcatattgttgtaatcatc

SEQ ID NO: 151074 - DNA, 25 bp, SARS Virus
tacgagcatatttttgtaatcatct

SEQ ID NO: 151075 - DNA, 25 bp, SARS Virus
acgagcatattgttgtaatcatctt

SEQ ID NO: 151076 - DNA, 25 bp, SARS Virus
cgagcatattgttgtaatcatctta

SEQ ID NO: 151077 - DNA, 25 bp, SARS Virus
gagcatattgttttaatcatcttaa

SEQ ID NO: 151078 - DNA, 25 bp, SARS Virus
agcatattgttgtaatcatcttaac

SEQ ID NO: 151079 - DNA, 25 bp, SARS Virus
gcatattgttgttatcatcttaaca

SEQ ID NO: 151080 - DNA, 25 bp, SARS Virus
catattgttgtattcatcttaacaa

SEQ ID NO: 151081 - DNA, 25 bp, SARS Virus
atattgttgtaatcatcttaacaat

SEQ ID NO: 151082 - DNA, 25 bp, SARS Virus
tattgttgtaattatcttaacaatt

SEQ ID NO: 151083 - DNA, 25 bp, SARS Virus
attgttgtaatcttcttaacaatta

SEQ ID NO: 151084 - DNA, 25 bp, SARS Virus
ttgttgtaatcatcttaacaattat

SEQ ID NO: 151085 - DNA, 25 bp, SARS Virus
tgttgtaatcattttaacaattatt

SEQ ID NO: 151086 - DNA, 25 bp, SARS Virus
gttgtaatcatcttaacaattatta

SEQ ID NO: 151087 - DNA, 25 bp, SARS Virus
ttgtaatcatcttaacaattattat

SEQ ID NO: 151088 - DNA, 25 bp, SARS Virus
tgtaatcatctttacaattattatt

SEQ ID NO: 151089 - DNA, 25 bp, SARS Virus
gtaatcatcttatcaattattatta

SEQ ID NO: 151090 - DNA, 25 bp, SARS Virus
taatcatcttaataattattattag

SEQ ID NO: 151091 - DNA, 25 bp, SARS Virus
aatcatcttaactattattattagt

SEQ ID NO: 151092 - DNA, 25 bp, SARS Virus
atcatcttaacatttattattagtg

SEQ ID NO: 151093 - DNA, 25 bp, SARS Virus
tcatcttaacaattattattagtgg

SEQ ID NO: 151094 - DNA, 25 bp, SARS Virus
catcttaacaattattattagtggc

SEQ ID NO: 151095 - DNA, 25 bp, SARS Virus
atcttaacaatttttattagtggct

SEQ ID NO: 151096 - DNA, 25 bp, SARS Virus
tcttaacaattattattagtggctg

SEQ ID NO: 151097 - DNA, 25 bp, SARS Virus
cttaacaattattattagtggctga

SEQ ID NO: 151098 - DNA, 25 bp, SARS Virus
ttaacaattatttttagtggctgac

SEQ ID NO: 151099 - DNA, 25 bp, SARS Virus
taacaattattattagtggctgaca

SEQ ID NO: 151100 - DNA, 25 bp, SARS Virus
aacaattattattagtggctgacac

SEQ ID NO: 151101 - DNA, 25 bp, SARS Virus
acaattattatttgtggctgacact

SEQ ID NO: 151102 - DNA, 25 bp, SARS Virus
caattattattattggctgacactg

SEQ ID NO: 151103 - DNA, 25 bp, SARS Virus
aattattattagtggctgacactga

SEQ ID NO: 151104 - DNA, 25 bp, SARS Virus
attattattagttgctgacactgaa

SEQ ID NO: 151105 - DNA, 25 bp, SARS Virus
ttattattagtgtctgacactgaac

SEQ ID NO: 151106 - DNA, 25 bp, SARS Virus
tattattagtggttgacactgaaca

SEQ ID NO: 151107 - DNA, 25 bp, SARS Virus
attattagtggctgacactgaacaa

SEQ ID NO: 151108 - DNA, 25 bp, SARS Virus
ttattagtggcttacactgaacaac

SEQ ID NO: 151109 - DNA, 25 bp, SARS Virus
tattagtggctgtcactgaacaaca

SEQ ID NO: 151110 - DNA, 25 bp, SARS Virus
attagtggctgatactgaacaacaa

SEQ ID NO: 151111 - DNA, 25 bp, SARS Virus
ttagtggctgactctgaacaacaag

SEQ ID NO: 151112 - DNA, 25 bp, SARS Virus
tagtggctgacattgaacaacaagt

SEQ ID NO: 151113 - DNA, 25 bp, SARS Virus
agtggctgacactgaacaacaagta

SEQ ID NO: 151114 - DNA, 25 bp, SARS Virus
gtggctgacacttaacaacaagtac

SEQ ID NO: 151115 - DNA, 25 bp, SARS Virus
tggctgacactgtacaacaagtacc

SEQ ID NO: 151116 - DNA, 25 bp, SARS Virus
ggctgacactgatcaacaagtacca

SEQ ID NO: 151117 - DNA, 25 bp, SARS Virus
gctgacactgaataacaagtaccat

SEQ ID NO: 151118 - DNA, 25 bp, SARS Virus
ctgacactgaactacaagtaccatc

SEQ ID NO: 151119 - DNA, 25 bp, SARS Virus
tgacactgaacatcaagtaccatct

SEQ ID NO: 151120 - DNA, 25 bp, SARS Virus
gacactgaacaataagtaccatctt

SEQ ID NO: 151121 - DNA, 25 bp, SARS Virus
acactgaacaactagtaccatcttg

SEQ ID NO: 151122 - DNA, 25 bp, SARS Virus
cactgaacaacatgtaccatcttgg

SEQ ID NO: 151123 - DNA, 25 bp, SARS Virus
actgaacaacaattaccatcttggt

SEQ ID NO: 151124 - DNA, 25 bp, SARS Virus
ctgaacaacaagtaccatcttggtt

SEQ ID NO: 151125 - DNA, 25 bp, SARS Virus
tgaacaacaagttccatcttggttt

SEQ ID NO: 151126 - DNA, 25 bp, SARS Virus
gaacaacaagtatcatcttggtttt

SEQ ID NO: 151127 - DNA, 25 bp, SARS Virus
aacaacaagtactatcttggttttt

SEQ ID NO: 151128 - DNA, 25 bp, SARS Virus
acaacaagtaccttcttggtttttg

SEQ ID NO: 151129 - DNA, 25 bp, SARS Virus
caacaagtaccatcttggtttttgg

SEQ ID NO: 151130 - DNA, 25 bp, SARS Virus
aacaagtaccattttggtttttggg

SEQ ID NO: 151131 - DNA, 25 bp, SARS Virus
acaagtaccatcttggtttttgggt

SEQ ID NO: 151132 - DNA, 25 bp, SARS Virus
caagtaccatcttggtttttgggtt

SEQ ID NO: 151133 - DNA, 25 bp, SARS Virus
aagtaccatctttgtttttgggttg

SEQ ID NO: 151134 - DNA, 25 bp, SARS Virus
agtaccatcttgttttttgggttgg

SEQ ID NO: 151135 - DNA, 25 bp, SARS Virus
gtaccatcttggtttttgggttggt

SEQ ID NO: 151136 - DNA, 25 bp, SARS Virus
taccatcttggtttttgggttggtg

SEQ ID NO: 151137 - DNA, 25 bp, SARS Virus
accatcttggtttttgggttggtgc

SEQ ID NO: 151138 - DNA, 25 bp, SARS Virus
ccatcttggtttttgggttggtgcc

SEQ ID NO: 151139 - DNA, 25 bp, SARS Virus
catcttggtttttgggttggtgcct

SEQ ID NO: 151140 - DNA, 25 bp, SARS Virus
atcttggttttttggttggtgcctg

SEQ ID NO: 151141 - DNA, 25 bp, SARS Virus
tcttggtttttgtgttggtgcctgt

SEQ ID NO: 151142 - DNA, 25 bp, SARS Virus
cttggtttttggtttggtgcctgtt

SEQ ID NO: 151143 - DNA, 25 bp, SARS Virus
ttggtttttgggttggtgcctgttg

SEQ ID NO: 151144 - DNA, 25 bp, SARS Virus
tggtttttgggttggtgcctgttgt

SEQ ID NO: 151145 - DNA, 25 bp, SARS Virus
ggtttttgggtttgtgcctgttgta

SEQ ID NO: 151146 - DNA, 25 bp, SARS Virus
gtttttgggttgttgcctgttgtaa

SEQ ID NO: 151147 - DNA, 25 bp, SARS Virus
tttttgggttggtgcctgttgtaaa

SEQ ID NO: 151148 - DNA, 25 bp, SARS Virus
ttttgggttggttcctgttgtaaac

SEQ ID NO: 151149 - DNA, 25 bp, SARS Virus
tttgggttggtgtctgttgtaaact

SEQ ID NO: 151150 - DNA, 25 bp, SARS Virus
ttgggttggtgcttgttgtaaacta

SEQ ID NO: 151151 - DNA, 25 bp, SARS Virus
tgggttggtgcctgttgtaaactaa

SEQ ID NO: 151152 - DNA, 25 bp, SARS Virus
gggttggtgccttttgtaaactaaa

SEQ ID NO: 151153 - DNA, 25 bp, SARS Virus
ggttggtgcctgttgtaaactaaag

SEQ ID NO: 151154 - DNA, 25 bp, SARS Virus
gttggtgcctgttgtaaactaaaga

SEQ ID NO: 151155 - DNA, 25 bp, SARS Virus
ttggtgcctgttttaaactaaagag

SEQ ID NO: 151156 - DNA, 25 bp, SARS Virus
tggtgcctgttgtaaactaaagaga

SEQ ID NO: 151157 - DNA, 25 bp, SARS Virus
ggtgcctgttgttaactaaagagac

SEQ ID NO: 151158 - DNA, 25 bp, SARS Virus
gtgcctgttgtatactaaagagaca

SEQ ID NO: 151159 - DNA, 25 bp, SARS Virus
tgcctgttgtaatctaaagagacac

SEQ ID NO: 151160 - DNA, 25 bp, SARS Virus
gcctgttgtaaattaaagagacacc

SEQ ID NO: 151161 - DNA, 25 bp, SARS Virus
cctgttgtaaactaaagagacaccg

SEQ ID NO: 151162 - DNA, 25 bp, SARS Virus
ctgttgtaaacttaagagacaccgt

SEQ ID NO: 151163 - DNA, 25 bp, SARS Virus
tgttgtaaactatagagacaccgtc

SEQ ID NO: 151164 - DNA, 25 bp, SARS Virus
gttgtaaactaatgagacaccgtcg

SEQ ID NO: 151165 - DNA, 25 bp, SARS Virus
ttgtaaactaaatagacaccgtcgt

SEQ ID NO: 151166 - DNA, 25 bp, SARS Virus
tgtaaactaaagtgacaccgtcgtt

SEQ ID NO: 151167 - DNA, 25 bp, SARS Virus
gtaaactaaagatacaccgtcgttt

SEQ ID NO: 151168 - DNA, 25 bp, SARS Virus
taaactaaagagtcaccgtcgtttt

SEQ ID NO: 151169 - DNA, 25 bp, SARS Virus
aaactaaagagataccgtcgtttta

SEQ ID NO: 151170 - DNA, 25 bp, SARS Virus
aactaaagagactccgtcgttttat

SEQ ID NO: 151171 - DNA, 25 bp, SARS Virus
actaaagagacatcgtcgttttatt

SEQ ID NO: 151172 - DNA, 25 bp, SARS Virus
ctaaagagacactgtcgttttattt

SEQ ID NO: 151173 - DNA, 25 bp, SARS Virus
taaagagacaccttcgttttattta

SEQ ID NO: 151174 - DNA, 25 bp, SARS Virus
aaagagacaccgtcgttttatttat

SEQ ID NO: 151175 - DNA, 25 bp, SARS Virus
aagagacaccgttgttttatttatg

SEQ ID NO: 151176 - DNA, 25 bp, SARS Virus
agagacaccgtctttttatttatgg

SEQ ID NO: 151177 - DNA, 25 bp, SARS Virus
gagacaccgtcgttttatttatggt

SEQ ID NO: 151178 - DNA, 25 bp, SARS Virus
agacaccgtcgttttatttatggta

SEQ ID NO: 151179 - DNA, 25 bp, SARS Virus
gacaccgtcgttttatttatggtag

SEQ ID NO: 151180 - DNA, 25 bp, SARS Virus
acaccgtcgttttatttatggtagg

SEQ ID NO: 151181 - DNA, 25 bp, SARS Virus
caccgtcgttttttttatggtagga

SEQ ID NO: 151182 - DNA, 25 bp, SARS Virus
accgtcgttttatttatggtaggaa

SEQ ID NO: 151183 - DNA, 25 bp, SARS Virus
ccgtcgttttatttatggtaggaat

SEQ ID NO: 151184 - DNA, 25 bp, SARS Virus
cgtcgttttatttatggtaggaatt

SEQ ID NO: 151185 - DNA, 25 bp, SARS Virus
gtcgttttatttttggtaggaattt

SEQ ID NO: 151186 - DNA, 25 bp, SARS Virus
tcgttttatttatggtaggaatttt

SEQ ID NO: 151187 - DNA, 25 bp, SARS Virus
cgttttatttattgtaggaattttc

SEQ ID NO: 151188 - DNA, 25 bp, SARS Virus
gttttatttatgttaggaattttcc

SEQ ID NO: 151189 - DNA, 25 bp, SARS Virus
ttttatttatggtaggaattttcca

SEQ ID NO: 151190 - DNA, 25 bp, SARS Virus
tttatttatggttggaattttccat

SEQ ID NO: 151191 - DNA, 25 bp, SARS Virus
ttatttatggtatgaattttccata

SEQ ID NO: 151192 - DNA, 25 bp, SARS Virus
tatttatggtagtaattttccatac

SEQ ID NO: 151193 - DNA, 25 bp, SARS Virus
atttatggtaggtattttccatact

SEQ ID NO: 151194 - DNA, 25 bp, SARS Virus
tttatggtaggatttttccatactg

SEQ ID NO: 151195 - DNA, 25 bp, SARS Virus
ttatggtaggaattttccatactgt

SEQ ID NO: 151196 - DNA, 25 bp, SARS Virus
tatggtaggaattttccatactgtc

SEQ ID NO: 151197 - DNA, 25 bp, SARS Virus
atggtaggaattttccatactgtcc

SEQ ID NO: 151198 - DNA, 25 bp, SARS Virus
tggtaggaattttccatactgtccc

SEQ ID NO: 151199 - DNA, 25 bp, SARS Virus
ggtaggaatttttcatactgtccca

SEQ ID NO: 151200 - DNA, 25 bp, SARS Virus
gtaggaattttctatactgtcccaa

SEQ ID NO: 151201 - DNA, 25 bp, SARS Virus
taggaattttccttactgtcccaac

SEQ ID NO: 151202 - DNA, 25 bp, SARS Virus
aggaattttccatactgtcccaacg

SEQ ID NO: 151203 - DNA, 25 bp, SARS Virus
ggaattttccattctgtcccaacgg

SEQ ID NO: 151204 - DNA, 25 bp, SARS Virus
gaattttccatattgtcccaacggt

SEQ ID NO: 151205 - DNA, 25 bp, SARS Virus
aattttccatactgtcccaacggtt

SEQ ID NO: 151206 - DNA, 25 bp, SARS Virus
attttccatactttcccaacggttt

SEQ ID NO: 151207 - DNA, 25 bp, SARS Virus
ttttccatactgtcccaacggtttg

SEQ ID NO: 151208 - DNA, 25 bp, SARS Virus
tttccatactgttccaacggtttgc

SEQ ID NO: 151209 - DNA, 25 bp, SARS Virus
ttccatactgtctcaacggtttgca

SEQ ID NO: 151210 - DNA, 25 bp, SARS Virus
tccatactgtcctaacggtttgcat

SEQ ID NO: 151211 - DNA, 25 bp, SARS Virus
ccatactgtccctacggtttgcata

SEQ ID NO: 151212 - DNA, 25 bp, SARS Virus
catactgtcccatcggtttgcatac

SEQ ID NO: 151213 - DNA, 25 bp, SARS Virus
atactgtcccaatggtttgcatact

SEQ ID NO: 151214 - DNA, 25 bp, SARS Virus
tactgtcccaactgtttgcatacta

SEQ ID NO: 151215 - DNA, 25 bp, SARS Virus
actgtcccaacgttttgcatactaa

SEQ ID NO: 151216 - DNA, 25 bp, SARS Virus
ctgtcccaacggtttgcatactaat

SEQ ID NO: 151217 - DNA, 25 bp, SARS Virus
tgtcccaacggtttgcatactaatt

SEQ ID NO: 151218 - DNA, 25 bp, SARS Virus
gtcccaacggtttgcatactaatta

SEQ ID NO: 151219 - DNA, 25 bp, SARS Virus
tcccaacggttttcatactaattat

SEQ ID NO: 151220 - DNA, 25 bp, SARS Virus
cccaacggtttgtatactaattatc

SEQ ID NO: 151221 - DNA, 25 bp, SARS Virus
ccaacggtttgcttactaattatca

SEQ ID NO: 151222 - DNA, 25 bp, SARS Virus
caacggtttgcatactaattatcat

SEQ ID NO: 151223 - DNA, 25 bp, SARS Virus
aacggtttgcattctaattatcata

SEQ ID NO: 151224 - DNA, 25 bp, SARS Virus
acggtttgcatattaattatcatac

SEQ ID NO: 151225 - DNA, 25 bp, SARS Virus
cggtttgcatactaattatcatact

SEQ ID NO: 151226 - DNA, 25 bp, SARS Virus
ggtttgcatacttattatcatactt

SEQ ID NO: 151227 - DNA, 25 bp, SARS Virus
gtttgcatactatttatcatacttt

SEQ ID NO: 151228 - DNA, 25 bp, SARS Virus
tttgcatactaattatcatactttg

SEQ ID NO: 151229 - DNA, 25 bp, SARS Virus
ttgcatactaattatcatactttgg

SEQ ID NO: 151230 - DNA, 25 bp, SARS Virus
tgcatactaattttcatactttggg

SEQ ID NO: 151231 - DNA, 25 bp, SARS Virus
gcatactaattatcatactttggga

SEQ ID NO: 151232 - DNA, 25 bp, SARS Virus
catactaattattatactttgggac

SEQ ID NO: 151233 - DNA, 25 bp, SARS Virus
atactaattatcttactttgggaca

SEQ ID NO: 151234 - DNA, 25 bp, SARS Virus
tactaattatcatactttgggacat

SEQ ID NO: 151235 - DNA, 25 bp, SARS Virus
actaattatcattctttgggacatt

SEQ ID NO: 151236 - DNA, 25 bp, SARS Virus
ctaattatcatattttgggacattg

SEQ ID NO: 151237 - DNA, 25 bp, SARS Virus
taattatcatactttgggacattgt

SEQ ID NO: 151238 - DNA, 25 bp, SARS Virus
aattatcatactttgggacattgta

SEQ ID NO: 151239 - DNA, 25 bp, SARS Virus
attatcatactttgggacattgtaa

SEQ ID NO: 151240 - DNA, 25 bp, SARS Virus
ttatcatacttttggacattgtaat

SEQ ID NO: 151241 - DNA, 25 bp, SARS Virus
tatcatactttgtgacattgtaatc

SEQ ID NO: 151242 - DNA, 25 bp, SARS Virus
atcatactttggtacattgtaatct

SEQ ID NO: 151243 - DNA, 25 bp, SARS Virus
tcatactttgggtcattgtaatctt

SEQ ID NO: 151244 - DNA, 25 bp, SARS Virus
catactttgggatattgtaatctta

SEQ ID NO: 151245 - DNA, 25 bp, SARS Virus
atactttgggactttgtaatcttat

SEQ ID NO: 151246 - DNA, 25 bp, SARS Virus
tactttgggacattgtaatcttatt

SEQ ID NO: 151247 - DNA, 25 bp, SARS Virus
actttgggacattgtaatcttattt

SEQ ID NO: 151248 - DNA, 25 bp, SARS Virus
ctttgggacattttaatcttatttt

SEQ ID NO: 151249 - DNA, 25 bp, SARS Virus
tttgggacattgtaatcttatttta

SEQ ID NO: 151250 - DNA, 25 bp, SARS Virus
ttgggacattgttatcttattttac

SEQ ID NO: 151251 - DNA, 25 bp, SARS Virus
tgggacattgtattcttattttacc

SEQ ID NO: 151252 - DNA, 25 bp, SARS Virus
gggacattgtaatcttattttacct

SEQ ID NO: 151253 - DNA, 25 bp, SARS Virus
ggacattgtaattttattttacctt

SEQ ID NO: 151254 - DNA, 25 bp, SARS Virus
gacattgtaatcttattttaccttc

SEQ ID NO: 151255 - DNA, 25 bp, SARS Virus
acattgtaatcttattttaccttct

SEQ ID NO: 151256 - DNA, 25 bp, SARS Virus
cattgtaatctttttttaccttctt

SEQ ID NO: 151257 - DNA, 25 bp, SARS Virus
attgtaatcttattttaccttcttt

SEQ ID NO: 151258 - DNA, 25 bp, SARS Virus
ttgtaatcttattttaccttcttta

SEQ ID NO: 151259 - DNA, 25 bp, SARS Virus
tgtaatcttattttaccttctttat

SEQ ID NO: 151260 - DNA, 25 bp, SARS Virus
gtaatcttattttaccttctttatt

SEQ ID NO: 151261 - DNA, 25 bp, SARS Virus
taatcttatttttccttctttattt

SEQ ID NO: 151262 - DNA, 25 bp, SARS Virus
aatcttattttatcttctttattta

SEQ ID NO: 151263 - DNA, 25 bp, SARS Virus
atcttattttactttctttatttag

SEQ ID NO: 151264 - DNA, 25 bp, SARS Virus
tcttattttaccttctttatttagg

SEQ ID NO: 151265 - DNA, 25 bp, SARS Virus
cttattttaccttctttatttagga

SEQ ID NO: 151266 - DNA, 25 bp, SARS Virus
ttattttaccttttttatttaggac

SEQ ID NO: 151267 - DNA, 25 bp, SARS Virus
tattttaccttctttatttaggact

SEQ ID NO: 151268 - DNA, 25 bp, SARS Virus
attttaccttctttatttaggactc

SEQ ID NO: 151269 - DNA, 25 bp, SARS Virus
ttttaccttctttatttaggactca

SEQ ID NO: 151270 - DNA, 25 bp, SARS Virus
tttaccttctttttttaggactcaa

SEQ ID NO: 151271 - DNA, 25 bp, SARS Virus
ttaccttctttatttaggactcaat

SEQ ID NO: 151272 - DNA, 25 bp, SARS Virus
taccttctttatttaggactcaatt

SEQ ID NO: 151273 - DNA, 25 bp, SARS Virus
accttctttatttaggactcaattt

SEQ ID NO: 151274 - DNA, 25 bp, SARS Virus
ccttctttattttggactcaattta

SEQ ID NO: 151275 - DNA, 25 bp, SARS Virus
cttctttatttatgactcaatttat

SEQ ID NO: 151276 - DNA, 25 bp, SARS Virus
ttctttatttagtactcaatttatt

SEQ ID NO: 151277 - DNA, 25 bp, SARS Virus
tctttatttaggtctcaatttattt

SEQ ID NO: 151278 - DNA, 25 bp, SARS Virus
ctttatttaggattcaatttatttc

SEQ ID NO: 151279 - DNA, 25 bp, SARS Virus
tttatttaggactcaatttatttct

SEQ ID NO: 151280 - DNA, 25 bp, SARS Virus
ttatttaggacttaatttatttctc

SEQ ID NO: 151281 - DNA, 25 bp, SARS Virus
tatttaggactctatttatttctca

SEQ ID NO: 151282 - DNA, 25 bp, SARS Virus
atttaggactcattttatttctcac

SEQ ID NO: 151283 - DNA, 25 bp, SARS Virus
tttaggactcaatttatttctcaca

SEQ ID NO: 151284 - DNA, 25 bp, SARS Virus
ttaggactcaatttatttctcacag

SEQ ID NO: 151285 - DNA, 25 bp, SARS Virus
taggactcaatttatttctcacaga

SEQ ID NO: 151286 - DNA, 25 bp, SARS Virus
aggactcaatttttttctcacagac

SEQ ID NO: 151287 - DNA, 25 bp, SARS Virus
ggactcaatttatttctcacagact

SEQ ID NO: 151288 - DNA, 25 bp, SARS Virus
gactcaatttatttctcacagacta

SEQ ID NO: 151289 - DNA, 25 bp, SARS Virus
actcaatttatttctcacagactag

SEQ ID NO: 151290 - DNA, 25 bp, SARS Virus
ctcaatttatttttcacagactaga

SEQ ID NO: 151291 - DNA, 25 bp, SARS Virus
tcaatttatttctcacagactagat

SEQ ID NO: 151292 - DNA, 25 bp, SARS Virus
caatttatttcttacagactagatt

SEQ ID NO: 151293 - DNA, 25 bp, SARS Virus
aatttatttctctcagactagattt

SEQ ID NO: 151294 - DNA, 25 bp, SARS Virus
atttatttctcatagactagatttt

SEQ ID NO: 151295 - DNA, 25 bp, SARS Virus
tttatttctcactgactagattttt

SEQ ID NO: 151296 - DNA, 25 bp, SARS Virus
ttatttctcacatactagattttta

SEQ ID NO: 151297 - DNA, 25 bp, SARS Virus
tatttctcacagtctagatttttaa

SEQ ID NO: 151298 - DNA, 25 bp, SARS Virus
atttctcacagattagatttttaaa

SEQ ID NO: 151299 - DNA, 25 bp, SARS Virus
tttctcacagactagatttttaaag

SEQ ID NO: 151300 - DNA, 25 bp, SARS Virus
ttctcacagacttgatttttaaagt

SEQ ID NO: 151301 - DNA, 25 bp, SARS Virus
tctcacagactatatttttaaagta

SEQ ID NO: 151302 - DNA, 25 bp, SARS Virus
ctcacagactagttttttaaagtag

SEQ ID NO: 151303 - DNA, 25 bp, SARS Virus
tcacagactagatttttaaagtagt

SEQ ID NO: 151304 - DNA, 25 bp, SARS Virus
cacagactagatttttaaagtagtc

SEQ ID NO: 151305 - DNA, 25 bp, SARS Virus
acagactagatttttaaagtagtcc

SEQ ID NO: 151306 - DNA, 25 bp, SARS Virus
cagactagatttttaaagtagtcct

SEQ ID NO: 151307 - DNA, 25 bp, SARS Virus
agactagatttttaaagtagtccta

SEQ ID NO: 151308 - DNA, 25 bp, SARS Virus
gactagattttttaagtagtcctat

SEQ ID NO: 151309 - DNA, 25 bp, SARS Virus
actagatttttatagtagtcctatc

SEQ ID NO: 151310 - DNA, 25 bp, SARS Virus
ctagatttttaatgtagtcctatca

SEQ ID NO: 151311 - DNA, 25 bp, SARS Virus
tagatttttaaattagtcctatcat

SEQ ID NO: 151312 - DNA, 25 bp, SARS Virus
agatttttaaagtagtcctatcatt

SEQ ID NO: 151313 - DNA, 25 bp, SARS Virus
gatttttaaagtagtcctatcattt

SEQ ID NO: 151314 - DNA, 25 bp, SARS Virus
atttttaaagtaatcctatcatttg

SEQ ID NO: 151315 - DNA, 25 bp, SARS Virus
tttttaaagtagacctatcatttgg

SEQ ID NO: 151316 - DNA, 25 bp, SARS Virus
ttttaaagtagtactatcatttggg

SEQ ID NO: 151317 - DNA, 25 bp, SARS Virus
tttaaagtagtcatatcatttgggg

SEQ ID NO: 151318 - DNA, 25 bp, SARS Virus
ttaaagtagtccaatcatttggggg

SEQ ID NO: 151319 - DNA, 25 bp, SARS Virus
taaagtagtcctatcatttgggggg

SEQ ID NO: 151320 - DNA, 25 bp, SARS Virus
aaagtagtcctaacatttgggggga

SEQ ID NO: 151321 - DNA, 25 bp, SARS Virus
aagtagtcctataatttggggggag

SEQ ID NO: 151322 - DNA, 25 bp, SARS Virus
agtagtcctatcatttggggggagt

SEQ ID NO: 151323 - DNA, 25 bp, SARS Virus
gtagtcctatcaattggggggagta

SEQ ID NO: 151324 - DNA, 25 bp, SARS Virus
tagtcctatcatatggggggagtat

SEQ ID NO: 151325 - DNA, 25 bp, SARS Virus
agtcctatcattaggggggagtatc

SEQ ID NO: 151326 - DNA, 25 bp, SARS Virus
gtcctatcatttagggggagtatct

SEQ ID NO: 151327 - DNA, 25 bp, SARS Virus
tcctatcatttgaggggagtatcta

SEQ ID NO: 151328 - DNA, 25 bp, SARS Virus
cctatcatttggagggagtatctac

SEQ ID NO: 151329 - DNA, 25 bp, SARS Virus
ctatcatttgggaggagtatctact

SEQ ID NO: 151330 - DNA, 25 bp, SARS Virus
tatcatttggggagagtatctactt

SEQ ID NO: 151331 - DNA, 25 bp, SARS Virus
atcatttgggggaagtatctacttc

SEQ ID NO: 151332 - DNA, 25 bp, SARS Virus
tcatttggggggagtatctacttca

SEQ ID NO: 151333 - DNA, 25 bp, SARS Virus
catttggggggaatatctacttcat

SEQ ID NO: 151334 - DNA, 25 bp, SARS Virus
atttggggggagaatctacttcata

SEQ ID NO: 151335 - DNA, 25 bp, SARS Virus
tttggggggagtatctacttcatac

SEQ ID NO: 151336 - DNA, 25 bp, SARS Virus
ttggggggagtaactacttcataca

SEQ ID NO: 151337 - DNA, 25 bp, SARS Virus
tggggggagtatatacttcatacaa

SEQ ID NO: 151338 - DNA, 25 bp, SARS Virus
ggggggagtatcaacttcatacaac

SEQ ID NO: 151339 - DNA, 25 bp, SARS Virus
gggggagtatctacttcatacaact

SEQ ID NO: 151340 - DNA, 25 bp, SARS Virus
ggggagtatctaattcatacaactc

SEQ ID NO: 151341 - DNA, 25 bp, SARS Virus
gggagtatctacatcatacaactca

SEQ ID NO: 151342 - DNA, 25 bp, SARS Virus
ggagtatctactacatacaactcac

SEQ ID NO: 151343 - DNA, 25 bp, SARS Virus
gagtatctacttaatacaactcaca

SEQ ID NO: 151344 - DNA, 25 bp, SARS Virus
agtatctacttcatacaactcacat

SEQ ID NO: 151345 - DNA, 25 bp, SARS Virus
gtatctacttcaaacaactcacatt

SEQ ID NO: 151346 - DNA, 25 bp, SARS Virus
tatctacttcatacaactcacatta

SEQ ID NO: 151347 - DNA, 25 bp, SARS Virus
atctacttcataaaactcacattaa

SEQ ID NO: 151348 - DNA, 25 bp, SARS Virus
tctacttcatacaactcacattaat

SEQ ID NO: 151349 - DNA, 25 bp, SARS Virus
ctacttcatacaactcacattaatc

SEQ ID NO: 151350 - DNA, 25 bp, SARS Virus
tacttcatacaaatcacattaatcc

SEQ ID NO: 151351 - DNA, 25 bp, SARS Virus
acttcatacaacacacattaatcct

SEQ ID NO: 151352 - DNA, 25 bp, SARS Virus
cttcatacaactaacattaatcctc

SEQ ID NO: 151353 - DNA, 25 bp, SARS Virus
ttcatacaactcacattaatcctcg

SEQ ID NO: 151354 - DNA, 25 bp, SARS Virus
tcatacaactcaaattaatcctcga

SEQ ID NO: 151355 - DNA, 25 bp, SARS Virus
catacaactcacattaatcctcgaa

SEQ ID NO: 151356 - DNA, 25 bp, SARS Virus
atacaactcacaataatcctcgaac

SEQ ID NO: 151357 - DNA, 25 bp, SARS Virus
tacaactcacataaatcctcgaact

SEQ ID NO: 151358 - DNA, 25 bp, SARS Virus
acaactcacattaatcctcgaactt

SEQ ID NO: 151359 - DNA, 25 bp, SARS Virus
caactcacattaatcctcgaacttg

SEQ ID NO: 151360 - DNA, 25 bp, SARS Virus
aactcacattaaacctcgaacttgt

SEQ ID NO: 151361 - DNA, 25 bp, SARS Virus
actcacattaatactcgaacttgta

SEQ ID NO: 151362 - DNA, 25 bp, SARS Virus
ctcacattaatcatcgaacttgtag

SEQ ID NO: 151363 - DNA, 25 bp, SARS Virus
tcacattaatccacgaacttgtagt

SEQ ID NO: 151364 - DNA, 25 bp, SARS Virus
cacattaatcctagaacttgtagta

SEQ ID NO: 151365 - DNA, 25 bp, SARS Virus
acattaatcctcaaacttgtagtag

SEQ ID NO: 151366 - DNA, 25 bp, SARS Virus
cattaatcctcgaacttgtagtagt

SEQ ID NO: 151367 - DNA, 25 bp, SARS Virus
attaatcctcgaacttgtagtagtt

SEQ ID NO: 151368 - DNA, 25 bp, SARS Virus
ttaatcctcgaaattgtagtagttt

SEQ ID NO: 151369 - DNA, 25 bp, SARS Virus
taatcctcgaacatgtagtagtttt

SEQ ID NO: 151370 - DNA, 25 bp, SARS Virus
aatcctcgaactagtagtagttttc

SEQ ID NO: 151371 - DNA, 25 bp, SARS Virus
atcctcgaacttatagtagttttca

SEQ ID NO: 151372 - DNA, 25 bp, SARS Virus
tcctcgaacttgaagtagttttcac

SEQ ID NO: 151373 - DNA, 25 bp, SARS Virus
cctcgaacttgtagtagttttcacc

SEQ ID NO: 151374 - DNA, 25 bp, SARS Virus
ctcgaacttgtaatagttttcacca

SEQ ID NO: 151375 - DNA, 25 bp, SARS Virus
tcgaacttgtagaagttttcaccac

SEQ ID NO: 151376 - DNA, 25 bp, SARS Virus
cgaacttgtagtagttttcaccacg

SEQ ID NO: 151377 - DNA, 25 bp, SARS Virus
gaacttgtagtaattttcaccacgt

SEQ ID NO: 151378 - DNA, 25 bp, SARS Virus
aacttgtagtagatttcaccacgtg

SEQ ID NO: 151379 - DNA, 25 bp, SARS Virus
acttgtagtagtattcaccacgtgg

SEQ ID NO: 151380 - DNA, 25 bp, SARS Virus
cttgtagtagttatcaccacgtggc

SEQ ID NO: 151381 - DNA, 25 bp, SARS Virus
ttgtagtagtttacaccacgtggcc

SEQ ID NO: 151382 - DNA, 25 bp, SARS Virus
tgtagtagttttaaccacgtggcca

SEQ ID NO: 151383 - DNA, 25 bp, SARS Virus
gtagtagttttcaccacgtggccag

SEQ ID NO: 151384 - DNA, 25 bp, SARS Virus
tagtagttttcaacacgtggccagt

SEQ ID NO: 151385 - DNA, 25 bp, SARS Virus
agtagttttcacaacgtggccagtt

SEQ ID NO: 151386 - DNA, 25 bp, SARS Virus
gtagttttcaccacgtggccagttc

SEQ ID NO: 151387 - DNA, 25 bp, SARS Virus
tagttttcaccaagtggccagttcc

SEQ ID NO: 151388 - DNA, 25 bp, SARS Virus
agttttcaccacatggccagttcca

SEQ ID NO: 151389 - DNA, 25 bp, SARS Virus
gttttcaccacgaggccagttccag

SEQ ID NO: 151390 - DNA, 25 bp, SARS Virus
ttttcaccacgtagccagttccagt

SEQ ID NO: 151391 - DNA, 25 bp, SARS Virus
tttcaccacgtgaccagttccagtg

SEQ ID NO: 151392 - DNA, 25 bp, SARS Virus
ttcaccacgtggacagttccagtga

SEQ ID NO: 151393 - DNA, 25 bp, SARS Virus
tcaccacgtggcaagttccagtgat

SEQ ID NO: 151394 - DNA, 25 bp, SARS Virus
caccacgtggccagttccagtgatg

SEQ ID NO: 151395 - DNA, 25 bp, SARS Virus
accacgtggccaattccagtgatgg

SEQ ID NO: 151396 - DNA, 25 bp, SARS Virus
ccacgtggccagatccagtgatggt

SEQ ID NO: 151397 - DNA, 25 bp, SARS Virus
cacgtggccagtaccagtgatggtg

SEQ ID NO: 151398 - DNA, 25 bp, SARS Virus
acgtggccagttacagtgatggtga

SEQ ID NO: 151399 - DNA, 25 bp, SARS Virus
cgtggccagttcaagtgatggtgat

SEQ ID NO: 151400 - DNA, 25 bp, SARS Virus
gtggccagttccagtgatggtgatc

SEQ ID NO: 151401 - DNA, 25 bp, SARS Virus
tggccagttccaatgatggtgatca

SEQ ID NO: 151402 - DNA, 25 bp, SARS Virus
ggccagttccagagatggtgatcac

SEQ ID NO: 151403 - DNA, 25 bp, SARS Virus
gccagttccagtaatggtgatcact

SEQ ID NO: 151404 - DNA, 25 bp, SARS Virus
ccagttccagtgatggtgatcactc

SEQ ID NO: 151405 - DNA, 25 bp, SARS Virus
cagttccagtgaaggtgatcactct

SEQ ID NO: 151406 - DNA, 25 bp, SARS Virus
agttccagtgatagtgatcactctc

SEQ ID NO: 151407 - DNA, 25 bp, SARS Virus
gttccagtgatgatgatcactctca

SEQ ID NO: 151408 - DNA, 25 bp, SARS Virus
ttccagtgatggagatcactctcat

SEQ ID NO: 151409 - DNA, 25 bp, SARS Virus
tccagtgatggtaatcactctcatt

SEQ ID NO: 151410 - DNA, 25 bp, SARS Virus
ccagtgatggtgatcactctcattc

SEQ ID NO: 151411 - DNA, 25 bp, SARS Virus
cagtgatggtgaacactctcattct

SEQ ID NO: 151412 - DNA, 25 bp, SARS Virus
agtgatggtgataactctcattctt

SEQ ID NO: 151413 - DNA, 25 bp, SARS Virus
gtgatggtgatcactctcattcttt

SEQ ID NO: 151414 - DNA, 25 bp, SARS Virus
tgatggtgatcaatctcattcttta

SEQ ID NO: 151415 - DNA, 25 bp, SARS Virus
gatggtgatcacactcattctttat

SEQ ID NO: 151416 - DNA, 25 bp, SARS Virus
atggtgatcactatcattctttatt

SEQ ID NO: 151417 - DNA, 25 bp, SARS Virus
tggtgatcactcacattctttatta

SEQ ID NO: 151418 - DNA, 25 bp, SARS Virus
ggtgatcactctaattctttattat

SEQ ID NO: 151419 - DNA, 25 bp, SARS Virus
gtgatcactctcattctttattatt

SEQ ID NO: 151420 - DNA, 25 bp, SARS Virus
tgatcactctcaatctttattattc

SEQ ID NO: 151421 - DNA, 25 bp, SARS Virus
gatcactctcatactttattattct

SEQ ID NO: 151422 - DNA, 25 bp, SARS Virus
atcactctcattatttattattctt

SEQ ID NO: 151423 - DNA, 25 bp, SARS Virus
tcactctcattcattattattcttt

SEQ ID NO: 151424 - DNA, 25 bp, SARS Virus
cactctcattctatattattctttt

SEQ ID NO: 151425 - DNA, 25 bp, SARS Virus
actctcattcttaattattctttta

SEQ ID NO: 151426 - DNA, 25 bp, SARS Virus
ctctcattctttattattcttttat

SEQ ID NO: 151427 - DNA, 25 bp, SARS Virus
tctcattctttaatattcttttatt

SEQ ID NO: 151428 - DNA, 25 bp, SARS Virus
ctcattctttataattcttttattt

SEQ ID NO: 151429 - DNA, 25 bp, SARS Virus
tcattctttattattcttttatttg

SEQ ID NO: 151430 - DNA, 25 bp, SARS Virus
cattctttattaatcttttatttgt

SEQ ID NO: 151431 - DNA, 25 bp, SARS Virus
attctttattatacttttatttgta

SEQ ID NO: 151432 - DNA, 25 bp, SARS Virus
ttctttattattattttatttgtac

SEQ ID NO: 151433 - DNA, 25 bp, SARS Virus
tctttattattcatttatttgtaca

SEQ ID NO: 151434 - DNA, 25 bp, SARS Virus
ctttattattctattatttgtacaa

SEQ ID NO: 151435 - DNA, 25 bp, SARS Virus
tttattattcttatatttgtacaag

SEQ ID NO: 151436 - DNA, 25 bp, SARS Virus
ttattattctttaatttgtacaagc

SEQ ID NO: 151437 - DNA, 25 bp, SARS Virus
tattattcttttatttgtacaagca

SEQ ID NO: 151438 - DNA, 25 bp, SARS Virus
attattcttttaattgtacaagcaa

SEQ ID NO: 151439 - DNA, 25 bp, SARS Virus
ttattcttttatatgtacaagcaaa

SEQ ID NO: 151440 - DNA, 25 bp, SARS Virus
tattcttttattagtacaagcaaat

SEQ ID NO: 151441 - DNA, 25 bp, SARS Virus
attcttttatttatacaagcaaatc

SEQ ID NO: 151442 - DNA, 25 bp, SARS Virus
ttcttttatttgaacaagcaaatca

SEQ ID NO: 151443 - DNA, 25 bp, SARS Virus
tcttttatttgtacaagcaaatcaa

SEQ ID NO: 151444 - DNA, 25 bp, SARS Virus
cttttatttgtaaaagcaaatcaac

SEQ ID NO: 151445 - DNA, 25 bp, SARS Virus
ttttatttgtacaagcaaatcaaca

SEQ ID NO: 151446 - DNA, 25 bp, SARS Virus
tttatttgtacaagcaaatcaacaa

SEQ ID NO: 151447 - DNA, 25 bp, SARS Virus
ttatttgtacaaacaaatcaacaat

SEQ ID NO: 151448 - DNA, 25 bp, SARS Virus
tatttgtacaagaaaatcaacaatt

SEQ ID NO: 151449 - DNA, 25 bp, SARS Virus
atttgtacaagcaaatcaacaattg

SEQ ID NO: 151450 - DNA, 25 bp, SARS Virus
tttgtacaagcaaatcaacaattgt

SEQ ID NO: 151451 - DNA, 25 bp, SARS Virus
ttgtacaagcaaatcaacaattgtt

SEQ ID NO: 151452 - DNA, 25 bp, SARS Virus
tgtacaagcaaaacaacaattgttc

SEQ ID NO: 151453 - DNA, 25 bp, SARS Virus
gtacaagcaaataaacaattgttct

SEQ ID NO: 151454 - DNA, 25 bp, SARS Virus
tacaagcaaatcaacaattgttctt

SEQ ID NO: 151455 - DNA, 25 bp, SARS Virus
acaagcaaatcaacaattgttctta

SEQ ID NO: 151456 - DNA, 25 bp, SARS Virus
caagcaaatcaaaaattgttcttat

SEQ ID NO: 151457 - DNA, 25 bp, SARS Virus
aagcaaatcaacaattgttcttata

SEQ ID NO: 151458 - DNA, 25 bp, SARS Virus
agcaaatcaacaattgttcttatag

SEQ ID NO: 151459 - DNA, 25 bp, SARS Virus
gcaaatcaacaaatgttcttatagt

SEQ ID NO: 151460 - DNA, 25 bp, SARS Virus
caaatcaacaatagttcttatagtg

SEQ ID NO: 151461 - DNA, 25 bp, SARS Virus
aaatcaacaattattcttatagtga

SEQ ID NO: 151462 - DNA, 25 bp, SARS Virus
aatcaacaattgatcttatagtgaa

SEQ ID NO: 151463 - DNA, 25 bp, SARS Virus
atcaacaattgtacttatagtgaac

SEQ ID NO: 151464 - DNA, 25 bp, SARS Virus
tcaacaattgttattatagtgaact

SEQ ID NO: 151465 - DNA, 25 bp, SARS Virus
caacaattgttcatatagtgaactt

SEQ ID NO: 151466 - DNA, 25 bp, SARS Virus
aacaattgttctaatagtgaacttt

SEQ ID NO: 151467 - DNA, 25 bp, SARS Virus
acaattgttcttatagtgaactttg

SEQ ID NO: 151468 - DNA, 25 bp, SARS Virus
caattgttcttaaagtgaactttgg

SEQ ID NO: 151469 - DNA, 25 bp, SARS Virus
aattgttcttatagtgaactttggt

SEQ ID NO: 151470 - DNA, 25 bp, SARS Virus
attgttcttataatgaactttggtg

SEQ ID NO: 151471 - DNA, 25 bp, SARS Virus
ttgttcttatagagaactttggtgt

SEQ ID NO: 151472 - DNA, 25 bp, SARS Virus
tgttcttatagtaaactttggtgtt

SEQ ID NO: 151473 - DNA, 25 bp, SARS Virus
gttcttatagtgaactttggtgttg

SEQ ID NO: 151474 - DNA, 25 bp, SARS Virus
ttcttatagtgaactttggtgttga

SEQ ID NO: 151475 - DNA, 25 bp, SARS Virus
tcttatagtgaaatttggtgttgag

SEQ ID NO: 151476 - DNA, 25 bp, SARS Virus
cttatagtgaacattggtgttgaga

SEQ ID NO: 151477 - DNA, 25 bp, SARS Virus
ttatagtgaactatggtgttgagac

SEQ ID NO: 151478 - DNA, 25 bp, SARS Virus
tatagtgaacttaggtgttgagaca

SEQ ID NO: 151479 - DNA, 25 bp, SARS Virus
atagtgaactttagtgttgagacaa

SEQ ID NO: 151480 - DNA, 25 bp, SARS Virus
tagtgaactttgatgttgagacaac

SEQ ID NO: 151481 - DNA, 25 bp, SARS Virus
agtgaactttggagttgagacaaca

SEQ ID NO: 151482 - DNA, 25 bp, SARS Virus
gtgaactttggtattgagacaacaa

SEQ ID NO: 151483 - DNA, 25 bp, SARS Virus
tgaactttggtgatgagacaacaaa

SEQ ID NO: 151484 - DNA, 25 bp, SARS Virus
gaactttggtgtagagacaacaaaa

SEQ ID NO: 151485 - DNA, 25 bp, SARS Virus
aactttggtgttaagacaacaaaag

SEQ ID NO: 151486 - DNA, 25 bp, SARS Virus
actttggtgttgagacaacaaaaga

SEQ ID NO: 151487 - DNA, 25 bp, SARS Virus
ctttggtgttgaaacaacaaaagag

SEQ ID NO: 151488 - DNA, 25 bp, SARS Virus
tttggtgttgagacaacaaaagaga

SEQ ID NO: 151489 - DNA, 25 bp, SARS Virus
ttggtgttgagaaaacaaaagagat

SEQ ID NO: 151490 - DNA, 25 bp, SARS Virus
tggtgttgagacaacaaaagagatt

SEQ ID NO: 151491 - DNA, 25 bp, SARS Virus
ggtgttgagacaacaaaagagatta

SEQ ID NO: 151492 - DNA, 25 bp, SARS Virus
gtgttgagacaaaaaaagagattac

SEQ ID NO: 151493 - DNA, 25 bp, SARS Virus
tgttgagacaacaaaagagattact

SEQ ID NO: 151494 - DNA, 25 bp, SARS Virus
gttgagacaacaaaagagattacta

SEQ ID NO: 151495 - DNA, 25 bp, SARS Virus
ttgagacaacaaaagagattactat

SEQ ID NO: 151496 - DNA, 25 bp, SARS Virus
tgagacaacaaaagagattactatt

SEQ ID NO: 151497 - DNA, 25 bp, SARS Virus
gagacaacaaaaaagattactattc

SEQ ID NO: 151498 - DNA, 25 bp, SARS Virus
agacaacaaaagagattactattcg

SEQ ID NO: 151499 - DNA, 25 bp, SARS Virus
gacaacaaaagaaattactattcgg

SEQ ID NO: 151500 - DNA, 25 bp, SARS Virus
acaacaaaagagattactattcgga

SEQ ID NO: 151501 - DNA, 25 bp, SARS Virus
caacaaaagagaatactattcggat

SEQ ID NO: 151502 - DNA, 25 bp, SARS Virus
aacaaaagagataactattcggatg

SEQ ID NO: 151503 - DNA, 25 bp, SARS Virus
acaaaagagattactattcggatgg

SEQ ID NO: 151504 - DNA, 25 bp, SARS Virus
caaaagagattaatattcggatgga

SEQ ID NO: 151505 - DNA, 25 bp, SARS Virus
aaaagagattacaattcggatggaa

SEQ ID NO: 151506 - DNA, 25 bp, SARS Virus
aaagagattactattcggatggaaa

SEQ ID NO: 151507 - DNA, 25 bp, SARS Virus
aagagattactaatcggatggaaaa

SEQ ID NO: 151508 - DNA, 25 bp, SARS Virus
agagattactatacggatggaaaaa

SEQ ID NO: 151509 - DNA, 25 bp, SARS Virus
gagattactattaggatggaaaaag

SEQ ID NO: 151510 - DNA, 25 bp, SARS Virus
agattactattcagatggaaaaagg

SEQ ID NO: 151511 - DNA, 25 bp, SARS Virus
gattactattcgaatggaaaaaggt

SEQ ID NO: 151512 - DNA, 25 bp, SARS Virus
attactattcggatggaaaaaggtc

SEQ ID NO: 151513 - DNA, 25 bp, SARS Virus
ttactattcggaaggaaaaaggtct

SEQ ID NO: 151514 - DNA, 25 bp, SARS Virus
tactattcggatagaaaaaggtctt

SEQ ID NO: 151515 - DNA, 25 bp, SARS Virus
actattcggatgaaaaaaggtcttc

SEQ ID NO: 151516 - DNA, 25 bp, SARS Virus
ctattcggatggaaaaaggtcttct

SEQ ID NO: 151517 - DNA, 25 bp, SARS Virus
tattcggatggaaaaaggtcttctc

SEQ ID NO: 151518 - DNA, 25 bp, SARS Virus
attcggatggaaaaaggtcttctct

SEQ ID NO: 151519 - DNA, 25 bp, SARS Virus
ttcggatggaaaaaggtcttctctt

SEQ ID NO: 151520 - DNA, 25 bp, SARS Virus
tcggatggaaaaaggtcttctctta

SEQ ID NO: 151521 - DNA, 25 bp, SARS Virus
cggatggaaaaaagtcttctcttat

SEQ ID NO: 151522 - DNA, 25 bp, SARS Virus
ggatggaaaaagatcttctcttatt

SEQ ID NO: 151523 - DNA, 25 bp, SARS Virus
gatggaaaaaggacttctcttattt

SEQ ID NO: 151524 - DNA, 25 bp, SARS Virus
atggaaaaaggtattctcttattta

SEQ ID NO: 151525 - DNA, 25 bp, SARS Virus
tggaaaaaggtcatctcttatttag

SEQ ID NO: 151526 - DNA, 25 bp, SARS Virus
ggaaaaaggtctactcttatttagt

SEQ ID NO: 151527 - DNA, 25 bp, SARS Virus
gaaaaaggtcttatcttatttagta

SEQ ID NO: 151528 - DNA, 25 bp, SARS Virus
aaaaaggtcttcacttatttagtat

SEQ ID NO: 151529 - DNA, 25 bp, SARS Virus
aaaaggtcttctattatttagtata

SEQ ID NO: 151530 - DNA, 25 bp, SARS Virus
aaaggtcttctcatatttagtatag

SEQ ID NO: 151531 - DNA, 25 bp, SARS Virus
aaggtcttctctaatttagtatagt

SEQ ID NO: 151532 - DNA, 25 bp, SARS Virus
aggtcttctcttatttagtatagta

SEQ ID NO: 151533 - DNA, 25 bp, SARS Virus
ggtcttctcttaattagtatagtaa

SEQ ID NO: 151534 - DNA, 25 bp, SARS Virus
gtcttctcttatatagtatagtaac

SEQ ID NO: 151535 - DNA, 25 bp, SARS Virus
tcttctcttattaagtatagtaact

SEQ ID NO: 151536 - DNA, 25 bp, SARS Virus
cttctcttatttagtatagtaacta

SEQ ID NO: 151537 - DNA, 25 bp, SARS Virus
ttctcttatttaatatagtaactaa

SEQ ID NO: 151538 - DNA, 25 bp, SARS Virus
tctcttatttagaatagtaactaaa

SEQ ID NO: 151539 - DNA, 25 bp, SARS Virus
ctcttatttagtatagtaactaaac

SEQ ID NO: 151540 - DNA, 25 bp, SARS Virus
tcttatttagtaaagtaactaaact

SEQ ID NO: 151541 - DNA, 25 bp, SARS Virus
cttatttagtatagtaactaaacta

SEQ ID NO: 151542 - DNA, 25 bp, SARS Virus
ttatttagtataataactaaactaa

SEQ ID NO: 151543 - DNA, 25 bp, SARS Virus
tatttagtatagaaactaaactaag

SEQ ID NO: 151544 - DNA, 25 bp, SARS Virus
atttagtatagtaactaaactaaga

SEQ ID NO: 151545 - DNA, 25 bp, SARS Virus
tttagtatagtaactaaactaagag

SEQ ID NO: 151546 - DNA, 25 bp, SARS Virus
ttagtatagtaaataaactaagagg

SEQ ID NO: 151547 - DNA, 25 bp, SARS Virus
tagtatagtaacaaaactaagagga

SEQ ID NO: 151548 - DNA, 25 bp, SARS Virus
agtatagtaactaaactaagaggaa

SEQ ID NO: 151549 - DNA, 25 bp, SARS Virus
gtatagtaactaaactaagaggaat

SEQ ID NO: 151550 - DNA, 25 bp, SARS Virus
tatagtaactaaactaagaggaatt

SEQ ID NO: 151551 - DNA, 25 bp, SARS Virus
atagtaactaaaataagaggaattc

SEQ ID NO: 151552 - DNA, 25 bp, SARS Virus
tagtaactaaacaaagaggaattct

SEQ ID NO: 151553 - DNA, 25 bp, SARS Virus
agtaactaaactaagaggaattctc

SEQ ID NO: 151554 - DNA, 25 bp, SARS Virus
gtaactaaactaagaggaattctct

SEQ ID NO: 151555 - DNA, 25 bp, SARS Virus
taactaaactaaaaggaattctctg

SEQ ID NO: 151556 - DNA, 25 bp, SARS Virus
aactaaactaagaggaattctctgt

SEQ ID NO: 151557 - DNA, 25 bp, SARS Virus
actaaactaagaagaattctctgta

SEQ ID NO: 151558 - DNA, 25 bp, SARS Virus
ctaaactaagagaaattctctgtaa

SEQ ID NO: 151559 - DNA, 25 bp, SARS Virus
taaactaagaggaattctctgtaat

SEQ ID NO: 151560 - DNA, 25 bp, SARS Virus
aaactaagaggaattctctgtaatg

SEQ ID NO: 151561 - DNA, 25 bp, SARS Virus
aactaagaggaaatctctgtaatgt

SEQ ID NO: 151562 - DNA, 25 bp, SARS Virus
actaagaggaatactctgtaatgtc

SEQ ID NO: 151563 - DNA, 25 bp, SARS Virus
ctaagaggaattatctgtaatgtcg

SEQ ID NO: 151564 - DNA, 25 bp, SARS Virus
taagaggaattcactgtaatgtcgt

SEQ ID NO: 151565 - DNA, 25 bp, SARS Virus
aagaggaattctatgtaatgtcgtc

SEQ ID NO: 151566 - DNA, 25 bp, SARS Virus
agaggaattctcagtaatgtcgtca

SEQ ID NO: 151567 - DNA, 25 bp, SARS Virus
gaggaattctctataatgtcgtcaa

SEQ ID NO: 151568 - DNA, 25 bp, SARS Virus
aggaattctctgaaatgtcgtcaag

SEQ ID NO: 151569 - DNA, 25 bp, SARS Virus
ggaattctctgtaatgtcgtcaagg

SEQ ID NO: 151570 - DNA, 25 bp, SARS Virus
gaattctctgtaatgtcgtcaagga

SEQ ID NO: 151571 - DNA, 25 bp, SARS Virus
aattctctgtaaagtcgtcaaggag

SEQ ID NO: 151572 - DNA, 25 bp, SARS Virus
attctctgtaatatcgtcaaggaga

SEQ ID NO: 151573 - DNA, 25 bp, SARS Virus
ttctctgtaatgacgtcaaggagaa

SEQ ID NO: 151574 - DNA, 25 bp, SARS Virus
tctctgtaatgtagtcaaggagaat

SEQ ID NO: 151575 - DNA, 25 bp, SARS Virus
ctctgtaatgtcatcaaggagaatt

SEQ ID NO: 151576 - DNA, 25 bp, SARS Virus
tctgtaatgtcgacaaggagaatta

SEQ ID NO: 151577 - DNA, 25 bp, SARS Virus
ctgtaatgtcgtaaaggagaattaa

SEQ ID NO: 151578 - DNA, 25 bp, SARS Virus
tgtaatgtcgtcaaggagaattaaa

SEQ ID NO: 151579 - DNA, 25 bp, SARS Virus
gtaatgtcgtcaaggagaattaaat

SEQ ID NO: 151580 - DNA, 25 bp, SARS Virus
taatgtcgtcaaagagaattaaatt

SEQ ID NO: 151581 - DNA, 25 bp, SARS Virus
aatgtcgtcaagaagaattaaattc

SEQ ID NO: 151582 - DNA, 25 bp, SARS Virus
atgtcgtcaaggagaattaaattct

SEQ ID NO: 151583 - DNA, 25 bp, SARS Virus
tgtcgtcaaggaaaattaaattctc

SEQ ID NO: 151584 - DNA, 25 bp, SARS Virus
gtcgtcaaggagaattaaattctcc

SEQ ID NO: 151585 - DNA, 25 bp, SARS Virus
tcgtcaaggagaattaaattctcct

SEQ ID NO: 151586 - DNA, 25 bp, SARS Virus
cgtcaaggagaaataaattctcctt

SEQ ID NO: 151587 - DNA, 25 bp, SARS Virus
gtcaaggagaataaaattctccttt

SEQ ID NO: 151588 - DNA, 25 bp, SARS Virus
tcaaggagaattaaattctccttta

SEQ ID NO: 151589 - DNA, 25 bp, SARS Virus
caaggagaattaaattctcctttaa

SEQ ID NO: 151590 - DNA, 25 bp, SARS Virus
aaggagaattaaattctcctttaaa

SEQ ID NO: 151591 - DNA, 25 bp, SARS Virus
aggagaattaaaatctcctttaaac

SEQ ID NO: 151592 - DNA, 25 bp, SARS Virus
ggagaattaaatactcctttaaacg

SEQ ID NO: 151593 - DNA, 25 bp, SARS Virus
gagaattaaattatcctttaaacga

SEQ ID NO: 151594 - DNA, 25 bp, SARS Virus
agaattaaattcacctttaaacgag

SEQ ID NO: 151595 - DNA, 25 bp, SARS Virus
gaattaaattctactttaaacgagt

SEQ ID NO: 151596 - DNA, 25 bp, SARS Virus
aattaaattctcatttaaacgagta

SEQ ID NO: 151597 - DNA, 25 bp, SARS Virus
attaaattctccattaaacgagtac

SEQ ID NO: 151598 - DNA, 25 bp, SARS Virus
ttaaattctcctataaacgagtaca

SEQ ID NO: 151599 - DNA, 25 bp, SARS Virus
taaattctccttaaaacgagtacag

SEQ ID NO: 151600 - DNA, 25 bp, SARS Virus
aaattctcctttaaacgagtacagt

SEQ ID NO: 151601 - DNA, 25 bp, SARS Virus
aattctcctttaaacgagtacagtt

SEQ ID NO: 151602 - DNA, 25 bp, SARS Virus
attctcctttaaacgagtacagttt

SEQ ID NO: 151603 - DNA, 25 bp, SARS Virus
ttctcctttaaaagagtacagtttc

SEQ ID NO: 151604 - DNA, 25 bp, SARS Virus
tctcctttaaacaagtacagtttct

SEQ ID NO: 151605 - DNA, 25 bp, SARS Virus
ctcctttaaacgagtacagtttctc

SEQ ID NO: 151606 - DNA, 25 bp, SARS Virus
tcctttaaacgaatacagtttctca

SEQ ID NO: 151607 - DNA, 25 bp, SARS Virus
cctttaaacgagaacagtttctcac

SEQ ID NO: 151608 - DNA, 25 bp, SARS Virus
ctttaaacgagtacagtttctcact

SEQ ID NO: 151609 - DNA, 25 bp, SARS Virus
tttaaacgagtaaagtttctcactt

SEQ ID NO: 151610 - DNA, 25 bp, SARS Virus
ttaaacgagtacagtttctcactta

SEQ ID NO: 151611 - DNA, 25 bp, SARS Virus
taaacgagtacaatttctcacttat

SEQ ID NO: 151612 - DNA, 25 bp, SARS Virus
aaacgagtacagattctcacttatc

SEQ ID NO: 151613 - DNA, 25 bp, SARS Virus
aacgagtacagtatctcacttatcc

SEQ ID NO: 151614 - DNA, 25 bp, SARS Virus
acgagtacagttactcacttatcct

SEQ ID NO: 151615 - DNA, 25 bp, SARS Virus
cgagtacagtttatcacttatcctt

SEQ ID NO: 151616 - DNA, 25 bp, SARS Virus
gagtacagtttcacacttatccttc

SEQ ID NO: 151617 - DNA, 25 bp, SARS Virus
agtacagtttctaacttatccttct

SEQ ID NO: 151618 - DNA, 25 bp, SARS Virus
gtacagtttctcacttatccttctg

SEQ ID NO: 151619 - DNA, 25 bp, SARS Virus
tacagtttctcaattatccttctgt

SEQ ID NO: 151620 - DNA, 25 bp, SARS Virus
acagtttctcacatatccttctgtt

SEQ ID NO: 151621 - DNA, 25 bp, SARS Virus
cagtttctcactaatccttctgttg

SEQ ID NO: 151622 - DNA, 25 bp, SARS Virus
agtttctcacttatccttctgttga

SEQ ID NO: 151623 - DNA, 25 bp, SARS Virus
gtttctcacttaaccttctgttgac

SEQ ID NO: 151624 - DNA, 25 bp, SARS Virus
tttctcacttatacttctgttgacc

SEQ ID NO: 151625 - DNA, 25 bp, SARS Virus
ttctcacttatcattctgttgacct

SEQ ID NO: 151626 - DNA, 25 bp, SARS Virus
tctcacttatccatctgttgaccta

SEQ ID NO: 151627 - DNA, 25 bp, SARS Virus
ctcacttatcctactgttgacctat

SEQ ID NO: 151628 - DNA, 25 bp, SARS Virus
tcacttatccttatgttgacctatc

SEQ ID NO: 151629 - DNA, 25 bp, SARS Virus
cacttatccttcagttgacctatcc

SEQ ID NO: 151630 - DNA, 25 bp, SARS Virus
acttatccttctattgacctatcct

SEQ ID NO: 151631 - DNA, 25 bp, SARS Virus
cttatccttctgatgacctatccta

SEQ ID NO: 151632 - DNA, 25 bp, SARS Virus
ttatccttctgtagacctatcctaa

SEQ ID NO: 151633 - DNA, 25 bp, SARS Virus
tatccttctgttaacctatcctaaa

SEQ ID NO: 151634 - DNA, 25 bp, SARS Virus
atccttctgttgacctatcctaaac

SEQ ID NO: 151635 - DNA, 25 bp, SARS Virus
tccttctgttgaactatcctaaaca

SEQ ID NO: 151636 - DNA, 25 bp, SARS Virus
ccttctgttgacatatcctaaacac

SEQ ID NO: 151637 - DNA, 25 bp, SARS Virus
cttctgttgaccaatcctaaacaca

SEQ ID NO: 151638 - DNA, 25 bp, SARS Virus
ttctgttgacctatcctaaacacaa

SEQ ID NO: 151639 - DNA, 25 bp, SARS Virus
tctgttgacctaacctaaacacaag

SEQ ID NO: 151640 - DNA, 25 bp, SARS Virus
ctgttgacctatactaaacacaagg

SEQ ID NO: 151641 - DNA, 25 bp, SARS Virus
tgttgacctatcataaacacaagga

SEQ ID NO: 151642 - DNA, 25 bp, SARS Virus
gttgacctatccaaaacacaaggag

SEQ ID NO: 151643 - DNA, 25 bp, SARS Virus
ttgacctatcctaaacacaaggagg

SEQ ID NO: 151644 - DNA, 25 bp, SARS Virus
tgacctatcctaaacacaaggaggt

SEQ ID NO: 151645 - DNA, 25 bp, SARS Virus
gacctatcctaaacacaaggaggtc

SEQ ID NO: 151646 - DNA, 25 bp, SARS Virus
acctatcctaaaaacaaggaggtct

SEQ ID NO: 151647 - DNA, 25 bp, SARS Virus
cctatcctaaacacaaggaggtctt

SEQ ID NO: 151648 - DNA, 25 bp, SARS Virus
ctatcctaaacaaaaggaggtcttt

SEQ ID NO: 151649 - DNA, 25 bp, SARS Virus
tatcctaaacacaaggaggtctttt

SEQ ID NO: 151650 - DNA, 25 bp, SARS Virus
atcctaaacacaaggaggtctttta

SEQ ID NO: 151651 - DNA, 25 bp, SARS Virus
tcctaaacacaaagaggtcttttac

SEQ ID NO: 151652 - DNA, 25 bp, SARS Virus
cctaaacacaagaaggtcttttaca

SEQ ID NO: 151653 - DNA, 25 bp, SARS Virus
ctaaacacaaggaggtcttttacat

SEQ ID NO: 151654 - DNA, 25 bp, SARS Virus
taaacacaaggaagtcttttacatc

SEQ ID NO: 151655 - DNA, 25 bp, SARS Virus
aaacacaaggagatcttttacatca

SEQ ID NO: 151656 - DNA, 25 bp, SARS Virus
aacacaaggaggacttttacatcaa

SEQ ID NO: 151657 - DNA, 25 bp, SARS Virus
acacaaggaggtattttacatcaat

SEQ ID NO: 151658 - DNA, 25 bp, SARS Virus
cacaaggaggtcatttacatcaatc

SEQ ID NO: 151659 - DNA, 25 bp, SARS Virus
acaaggaggtctattacatcaatcg

SEQ ID NO: 151660 - DNA, 25 bp, SARS Virus
caaggaggtcttatacatcaatcgt

SEQ ID NO: 151661 - DNA, 25 bp, SARS Virus
aaggaggtctttaacatcaatcgta

SEQ ID NO: 151662 - DNA, 25 bp, SARS Virus
aggaggtcttttacatcaatcgtac

SEQ ID NO: 151663 - DNA, 25 bp, SARS Virus
ggaggtcttttaaatcaatcgtacg

SEQ ID NO: 151664 - DNA, 25 bp, SARS Virus
gaggtcttttacatcaatcgtacgt

SEQ ID NO: 151665 - DNA, 25 bp, SARS Virus
aggtcttttacaacaatcgtacgta

SEQ ID NO: 151666 - DNA, 25 bp, SARS Virus
ggtcttttacataaatcgtacgtac

SEQ ID NO: 151667 - DNA, 25 bp, SARS Virus
gtcttttacatcaatcgtacgtacc

SEQ ID NO: 151668 - DNA, 25 bp, SARS Virus
tcttttacatcaatcgtacgtacca

SEQ ID NO: 151669 - DNA, 25 bp, SARS Virus
cttttacatcaaacgtacgtaccat

SEQ ID NO: 151670 - DNA, 25 bp, SARS Virus
ttttacatcaatagtacgtaccata

SEQ ID NO: 151671 - DNA, 25 bp, SARS Virus
tttacatcaatcatacgtaccatat

SEQ ID NO: 151672 - DNA, 25 bp, SARS Virus
ttacatcaatcgaacgtaccatatc

SEQ ID NO: 151673 - DNA, 25 bp, SARS Virus
tacatcaatcgtacgtaccatatcg

SEQ ID NO: 151674 - DNA, 25 bp, SARS Virus
acatcaatcgtaagtaccatatcgg

SEQ ID NO: 151675 - DNA, 25 bp, SARS Virus
catcaatcgtacataccatatcggt

SEQ ID NO: 151676 - DNA, 25 bp, SARS Virus
atcaatcgtacgaaccatatcggta

SEQ ID NO: 151677 - DNA, 25 bp, SARS Virus
tcaatcgtacgtaccatatcggtag

SEQ ID NO: 151678 - DNA, 25 bp, SARS Virus
caatcgtacgtaacatatcggtagt

SEQ ID NO: 151679 - DNA, 25 bp, SARS Virus
aatcgtacgtacaatatcggtagtt

SEQ ID NO: 151680 - DNA, 25 bp, SARS Virus
atcgtacgtaccatatcggtagtta

SEQ ID NO: 151681 - DNA, 25 bp, SARS Virus
tcgtacgtaccaaatcggtagttaa

SEQ ID NO: 151682 - DNA, 25 bp, SARS Virus
cgtacgtaccatatcggtagttaaa

SEQ ID NO: 151683 - DNA, 25 bp, SARS Virus
gtacgtaccataacggtagttaaac

SEQ ID NO: 151684 - DNA, 25 bp, SARS Virus
tacgtaccatataggtagttaaaca

SEQ ID NO: 151685 - DNA, 25 bp, SARS Virus
acgtaccatatcagtagttaaacaa

SEQ ID NO: 151686 - DNA, 25 bp, SARS Virus
cgtaccatatcgatagttaaacaag

SEQ ID NO: 151687 - DNA, 25 bp, SARS Virus
gtaccatatcggaagttaaacaagg

SEQ ID NO: 151688 - DNA, 25 bp, SARS Virus
taccatatcggtagttaaacaagga

SEQ ID NO: 151689 - DNA, 25 bp, SARS Virus
accatatcggtaattaaacaaggaa

SEQ ID NO: 151690 - DNA, 25 bp, SARS Virus
ccatatcggtagataaacaaggaag

SEQ ID NO: 151691 - DNA, 25 bp, SARS Virus
catatcggtagtaaaacaaggaagc

SEQ ID NO: 151692 - DNA, 25 bp, SARS Virus
atatcggtagttaaacaaggaagcc

SEQ ID NO: 151693 - DNA, 25 bp, SARS Virus
tatcggtagttaaacaaggaagccg

SEQ ID NO: 151694 - DNA, 25 bp, SARS Virus
atcggtagttaaacaaggaagccga

SEQ ID NO: 151695 - DNA, 25 bp, SARS Virus
tcggtagttaaaaaaggaagccgaa

SEQ ID NO: 151696 - DNA, 25 bp, SARS Virus
cggtagttaaacaaggaagccgaac

SEQ ID NO: 151697 - DNA, 25 bp, SARS Virus
ggtagttaaacaaggaagccgaacg

SEQ ID NO: 151698 - DNA, 25 bp, SARS Virus
gtagttaaacaaagaagccgaacgg

SEQ ID NO: 151699 - DNA, 25 bp, SARS Virus
tagttaaacaagaaagccgaacggt

SEQ ID NO: 151700 - DNA, 25 bp, SARS Virus
agttaaacaaggaagccgaacggtt

SEQ ID NO: 151701 - DNA, 25 bp, SARS Virus
gttaaacaaggaagccgaacggttc

SEQ ID NO: 151702 - DNA, 25 bp, SARS Virus
ttaaacaaggaaaccgaacggttct

SEQ ID NO: 151703 - DNA, 25 bp, SARS Virus
taaacaaggaagacgaacggttcta

SEQ ID NO: 151704 - DNA, 25 bp, SARS Virus
aaacaaggaagcagaacggttctat

SEQ ID NO: 151705 - DNA, 25 bp, SARS Virus
aacaaggaagccaaacggttctatc

SEQ ID NO: 151706 - DNA, 25 bp, SARS Virus
acaaggaagccgaacggttctatca

SEQ ID NO: 151707 - DNA, 25 bp, SARS Virus
caaggaagccgaacggttctatcaa

SEQ ID NO: 151708 - DNA, 25 bp, SARS Virus
aaggaagccgaaaggttctatcaat

SEQ ID NO: 151709 - DNA, 25 bp, SARS Virus
aggaagccgaacagttctatcaatc

SEQ ID NO: 151710 - DNA, 25 bp, SARS Virus
ggaagccgaacgattctatcaatcg

SEQ ID NO: 151711 - DNA, 25 bp, SARS Virus
gaagccgaacggatctatcaatcgg

SEQ ID NO: 151712 - DNA, 25 bp, SARS Virus
aagccgaacggtactatcaatcggg

SEQ ID NO: 151713 - DNA, 25 bp, SARS Virus
agccgaacggttatatcaatcgggg

SEQ ID NO: 151714 - DNA, 25 bp, SARS Virus
gccgaacggttcaatcaatcggggt

SEQ ID NO: 151715 - DNA, 25 bp, SARS Virus
ccgaacggttctatcaatcggggtt

SEQ ID NO: 151716 - DNA, 25 bp, SARS Virus
cgaacggttctaacaatcggggtta

SEQ ID NO: 151717 - DNA, 25 bp, SARS Virus
gaacggttctataaatcggggttaa

SEQ ID NO: 151718 - DNA, 25 bp, SARS Virus
aacggttctatcaatcggggttaat

SEQ ID NO: 151719 - DNA, 25 bp, SARS Virus
acggttctatcaatcggggttaatt

SEQ ID NO: 151720 - DNA, 25 bp, SARS Virus
cggttctatcaaacggggttaattt

SEQ ID NO: 151721 - DNA, 25 bp, SARS Virus
ggttctatcaataggggttaatttt

SEQ ID NO: 151722 - DNA, 25 bp, SARS Virus
gttctatcaatcagggttaattttt

SEQ ID NO: 151723 - DNA, 25 bp, SARS Virus
ttctatcaatcgaggttaattttta

SEQ ID NO: 151724 - DNA, 25 bp, SARS Virus
tctatcaatcggagttaatttttac

SEQ ID NO: 151725 - DNA, 25 bp, SARS Virus
ctatcaatcgggattaatttttacg

SEQ ID NO: 151726 - DNA, 25 bp, SARS Virus
tatcaatcggggataatttttacga

SEQ ID NO: 151727 - DNA, 25 bp, SARS Virus
atcaatcggggtaaatttttacgaa

SEQ ID NO: 151728 - DNA, 25 bp, SARS Virus
tcaatcggggttaatttttacgaag

SEQ ID NO: 151729 - DNA, 25 bp, SARS Virus
caatcggggttaatttttacgaagg

SEQ ID NO: 151730 - DNA, 25 bp, SARS Virus
aatcggggttaaattttacgaaggc

SEQ ID NO: 151731 - DNA, 25 bp, SARS Virus
atcggggttaatatttacgaaggct

SEQ ID NO: 151732 - DNA, 25 bp, SARS Virus
tcggggttaattattacgaaggcta

SEQ ID NO: 151733 - DNA, 25 bp, SARS Virus
cggggttaatttatacgaaggctac

SEQ ID NO: 151734 - DNA, 25 bp, SARS Virus
ggggttaattttaacgaaggctact

SEQ ID NO: 151735 - DNA, 25 bp, SARS Virus
gggttaatttttacgaaggctacta

SEQ ID NO: 151736 - DNA, 25 bp, SARS Virus
ggttaatttttaagaaggctactac

SEQ ID NO: 151737 - DNA, 25 bp, SARS Virus
gttaatttttacaaaggctactact

SEQ ID NO: 151738 - DNA, 25 bp, SARS Virus
ttaatttttacgaaggctactacta

SEQ ID NO: 151739 - DNA, 25 bp, SARS Virus
taatttttacgaaggctactactac

SEQ ID NO: 151740 - DNA, 25 bp, SARS Virus
aatttttacgaaagctactactacg

SEQ ID NO: 151741 - DNA, 25 bp, SARS Virus
atttttacgaagactactactacgt

SEQ ID NO: 151742 - DNA, 25 bp, SARS Virus
tttttacgaaggatactactacgta

SEQ ID NO: 151743 - DNA, 25 bp, SARS Virus
ttttacgaaggcaactactacgtaa

SEQ ID NO: 151744 - DNA, 25 bp, SARS Virus
tttacgaaggctactactacgtaaa

SEQ ID NO: 151745 - DNA, 25 bp, SARS Virus
ttacgaaggctaatactacgtaaat

SEQ ID NO: 151746 - DNA, 25 bp, SARS Virus
tacgaaggctacaactacgtaaatg

SEQ ID NO: 151747 - DNA, 25 bp, SARS Virus
acgaaggctactactacgtaaatgt

SEQ ID NO: 151748 - DNA, 25 bp, SARS Virus
cgaaggctactaatacgtaaatgta

SEQ ID NO: 151749 - DNA, 25 bp, SARS Virus
gaaggctactacaacgtaaatgtaa

SEQ ID NO: 151750 - DNA, 25 bp, SARS Virus
aaggctactactacgtaaatgtaaa

SEQ ID NO: 151751 - DNA, 25 bp, SARS Virus
aggctactactaagtaaatgtaaac

SEQ ID NO: 151752 - DNA, 25 bp, SARS Virus
ggctactactacataaatgtaaaca

SEQ ID NO: 151753 - DNA, 25 bp, SARS Virus
gctactactacgaaaatgtaaacat

SEQ ID NO: 151754 - DNA, 25 bp, SARS Virus
ctactactacgtaaatgtaaacatt

SEQ ID NO: 151755 - DNA, 25 bp, SARS Virus
tactactacgtaaatgtaaacattg

SEQ ID NO: 151756 - DNA, 25 bp, SARS Virus
actactacgtaaatgtaaacattgt

SEQ ID NO: 151757 - DNA, 25 bp, SARS Virus
ctactacgtaaaagtaaacattgtt

SEQ ID NO: 151758 - DNA, 25 bp, SARS Virus
tactacgtaaatataaacattgttt

SEQ ID NO: 151759 - DNA, 25 bp, SARS Virus
actacgtaaatgaaaacattgtttt

SEQ ID NO: 151760 - DNA, 25 bp, SARS Virus
ctacgtaaatgtaaacattgttttc

SEQ ID NO: 151761 - DNA, 25 bp, SARS Virus
tacgtaaatgtaaacattgttttcg

SEQ ID NO: 151762 - DNA, 25 bp, SARS Virus
acgtaaatgtaaacattgttttcga

SEQ ID NO: 151763 - DNA, 25 bp, SARS Virus
cgtaaatgtaaaaattgttttcgac

SEQ ID NO: 151764 - DNA, 25 bp, SARS Virus
gtaaatgtaaacattgttttcgaca

SEQ ID NO: 151765 - DNA, 25 bp, SARS Virus
taaatgtaaacaatgttttcgacag

SEQ ID NO: 151766 - DNA, 25 bp, SARS Virus
aaatgtaaacatagttttcgacagg

SEQ ID NO: 151767 - DNA, 25 bp, SARS Virus
aatgtaaacattattttcgacaggt

SEQ ID NO: 151768 - DNA, 25 bp, SARS Virus
atgtaaacattgatttcgacaggtg

SEQ ID NO: 151769 - DNA, 25 bp, SARS Virus
tgtaaacattgtattcgacaggtgg

SEQ ID NO: 151770 - DNA, 25 bp, SARS Virus
gtaaacattgttatcgacaggtggt

SEQ ID NO: 151771 - DNA, 25 bp, SARS Virus
taaacattgtttacgacaggtggta

SEQ ID NO: 151772 - DNA, 25 bp, SARS Virus
aaacattgttttagacaggtggtac

SEQ ID NO: 151773 - DNA, 25 bp, SARS Virus
aacattgttttcaacaggtggtact

SEQ ID NO: 151774 - DNA, 25 bp, SARS Virus
acattgttttcgacaggtggtactc

SEQ ID NO: 151775 - DNA, 25 bp, SARS Virus
cattgttttcgaaaggtggtactct

SEQ ID NO: 151776 - DNA, 25 bp, SARS Virus
attgttttcgacaggtggtactctt

SEQ ID NO: 151777 - DNA, 25 bp, SARS Virus
ttgttttcgacaagtggtactcttt

SEQ ID NO: 151778 - DNA, 25 bp, SARS Virus
tgttttcgacagatggtactcttta

SEQ ID NO: 151779 - DNA, 25 bp, SARS Virus
gttttcgacaggaggtactctttac

SEQ ID NO: 151780 - DNA, 25 bp, SARS Virus
ttttcgacaggtagtactctttacc

SEQ ID NO: 151781 - DNA, 25 bp, SARS Virus
tttcgacaggtgatactctttaccg

SEQ ID NO: 151782 - DNA, 25 bp, SARS Virus
ttcgacaggtggaactctttaccgg

SEQ ID NO: 151783 - DNA, 25 bp, SARS Virus
tcgacaggtggtactctttaccggg

SEQ ID NO: 151784 - DNA, 25 bp, SARS Virus
cgacaggtggtaatctttaccgggt

SEQ ID NO: 151785 - DNA, 25 bp, SARS Virus
gacaggtggtacactttaccgggta

SEQ ID NO: 151786 - DNA, 25 bp, SARS Virus
acaggtggtactatttaccgggtat

SEQ ID NO: 151787 - DNA, 25 bp, SARS Virus
caggtggtactcattaccgggtatt

SEQ ID NO: 151788 - DNA, 25 bp, SARS Virus
aggtggtactctataccgggtattc

SEQ ID NO: 151789 - DNA, 25 bp, SARS Virus
ggtggtactcttaaccgggtattcg

SEQ ID NO: 151790 - DNA, 25 bp, SARS Virus
gtggtactctttaccgggtattcga

SEQ ID NO: 151791 - DNA, 25 bp, SARS Virus
tggtactctttaacgggtattcgaa

SEQ ID NO: 151792 - DNA, 25 bp, SARS Virus
ggtactctttacagggtattcgaac

SEQ ID NO: 151793 - DNA, 25 bp, SARS Virus
gtactctttaccaggtattcgaaca

SEQ ID NO: 151794 - DNA, 25 bp, SARS Virus
tactctttaccgagtattcgaacat

SEQ ID NO: 151795 - DNA, 25 bp, SARS Virus
actctttaccggatattcgaacatt

SEQ ID NO: 151796 - DNA, 25 bp, SARS Virus
ctctttaccgggaattcgaacattt

SEQ ID NO: 151797 - DNA, 25 bp, SARS Virus
tctttaccgggtattcgaacatttc

SEQ ID NO: 151798 - DNA, 25 bp, SARS Virus
ctttaccgggtaatcgaacatttcc

SEQ ID NO: 151799 - DNA, 25 bp, SARS Virus
tttaccgggtatacgaacatttcca

SEQ ID NO: 151800 - DNA, 25 bp, SARS Virus
ttaccgggtattagaacatttccag

SEQ ID NO: 151801 - DNA, 25 bp, SARS Virus
gatttttaaagtcgtcctatcattt

SEQ ID NO: 151802 - DNA, 25 bp, SARS Virus
atttttaaagtactcctatcatttg

SEQ ID NO: 151803 - DNA, 25 bp, SARS Virus
tttttaaagtagccctatcatttgg

SEQ ID NO: 151804 - DNA, 25 bp, SARS Virus
ttttaaagtagtcctatcatttggg

SEQ ID NO: 151805 - DNA, 25 bp, SARS Virus
tttaaagtagtcctatcatttgggg

SEQ ID NO: 151806 - DNA, 25 bp, SARS Virus
ttaaagtagtcccatcatttggggg

SEQ ID NO: 151807 - DNA, 25 bp, SARS Virus
taaagtagtcctctcatttgggggg

SEQ ID NO: 151808 - DNA, 25 bp, SARS Virus
aaagtagtcctaccatttgggggga

SEQ ID NO: 151809 - DNA, 25 bp, SARS Virus
aagtagtcctatcatttggggggag

SEQ ID NO: 151810 - DNA, 25 bp, SARS Virus
agtagtcctatcctttggggggagt

SEQ ID NO: 151811 - DNA, 25 bp, SARS Virus
gtagtcctatcacttggggggagta

SEQ ID NO: 151812 - DNA, 25 bp, SARS Virus
tagtcctatcatctggggggagtat

SEQ ID NO: 151813 - DNA, 25 bp, SARS Virus
agtcctatcattcggggggagtatc

SEQ ID NO: 151814 - DNA, 25 bp, SARS Virus
gtcctatcatttcgggggagtatct

SEQ ID NO: 151815 - DNA, 25 bp, SARS Virus
tcctatcatttgcggggagtatcta

SEQ ID NO: 151816 - DNA, 25 bp, SARS Virus
cctatcatttggcgggagtatctac

SEQ ID NO: 151817 - DNA, 25 bp, SARS Virus
ctatcatttgggcggagtatctact

SEQ ID NO: 151818 - DNA, 25 bp, SARS Virus
tatcatttggggcgagtatctactt

SEQ ID NO: 151819 - DNA, 25 bp, SARS Virus
atcatttgggggcagtatctacttc

SEQ ID NO: 151820 - DNA, 25 bp, SARS Virus
tcatttggggggcgtatctacttca

SEQ ID NO: 151821 - DNA, 25 bp, SARS Virus
catttggggggactatctacttcat

SEQ ID NO: 151822 - DNA, 25 bp, SARS Virus
atttggggggagcatctacttcata

SEQ ID NO: 151823 - DNA, 25 bp, SARS Virus
tttggggggagtctctacttcatac

SEQ ID NO: 151824 - DNA, 25 bp, SARS Virus
ttggggggagtacctacttcataca

SEQ ID NO: 151825 - DNA, 25 bp, SARS Virus
tggggggagtatctacttcatacaa

SEQ ID NO: 151826 - DNA, 25 bp, SARS Virus
ggggggagtatccacttcatacaac

SEQ ID NO: 151827 - DNA, 25 bp, SARS Virus
gggggagtatctccttcatacaact

SEQ ID NO: 151828 - DNA, 25 bp, SARS Virus
ggggagtatctacttcatacaactc

SEQ ID NO: 151829 - DNA, 25 bp, SARS Virus
gggagtatctacctcatacaactca

SEQ ID NO: 151830 - DNA, 25 bp, SARS Virus
ggagtatctactccatacaactcac

SEQ ID NO: 151831 - DNA, 25 bp, SARS Virus
gagtatctacttcatacaactcaca

SEQ ID NO: 151832 - DNA, 25 bp, SARS Virus
agtatctacttcctacaactcacat

SEQ ID NO: 151833 - DNA, 25 bp, SARS Virus
gtatctacttcacacaactcacatt

SEQ ID NO: 151834 - DNA, 25 bp, SARS Virus
tatctacttcatccaactcacatta

SEQ ID NO: 151835 - DNA, 25 bp, SARS Virus
atctacttcatacaactcacattaa

SEQ ID NO: 151836 - DNA, 25 bp, SARS Virus
tctacttcataccactcacattaat

SEQ ID NO: 151837 - DNA, 25 bp, SARS Virus
ctacttcatacacctcacattaatc

SEQ ID NO: 151838 - DNA, 25 bp, SARS Virus
tacttcatacaactcacattaatcc

SEQ ID NO: 151839 - DNA, 25 bp, SARS Virus
acttcatacaacccacattaatcct

SEQ ID NO: 151840 - DNA, 25 bp, SARS Virus
cttcatacaactcacattaatcctc

SEQ ID NO: 151841 - DNA, 25 bp, SARS Virus
ttcatacaactcccattaatcctcg

SEQ ID NO: 151842 - DNA, 25 bp, SARS Virus
tcatacaactcacattaatcctcga

SEQ ID NO: 151843 - DNA, 25 bp, SARS Virus
catacaactcaccttaatcctcgaa

SEQ ID NO: 151844 - DNA, 25 bp, SARS Virus
atacaactcacactaatcctcgaac

SEQ ID NO: 151845 - DNA, 25 bp, SARS Virus
tacaactcacatcaatcctcgaact

SEQ ID NO: 151846 - DNA, 25 bp, SARS Virus
acaactcacattcatcctcgaactt

SEQ ID NO: 151847 - DNA, 25 bp, SARS Virus
caactcacattactcctcgaacttg

SEQ ID NO: 151848 - DNA, 25 bp, SARS Virus
aactcacattaaccctcgaacttgt

SEQ ID NO: 151849 - DNA, 25 bp, SARS Virus
actcacattaatcctcgaacttgta

SEQ ID NO: 151850 - DNA, 25 bp, SARS Virus
ctcacattaatcctcgaacttgtag

SEQ ID NO: 151851 - DNA, 25 bp, SARS Virus
tcacattaatccccgaacttgtagt

SEQ ID NO: 151852 - DNA, 25 bp, SARS Virus
cacattaatcctcgaacttgtagta

SEQ ID NO: 151853 - DNA, 25 bp, SARS Virus
acattaatcctccaacttgtagtag

SEQ ID NO: 151854 - DNA, 25 bp, SARS Virus
cattaatcctcgcacttgtagtagt

SEQ ID NO: 151855 - DNA, 25 bp, SARS Virus
attaatcctcgaccttgtagtagtt

SEQ ID NO: 151856 - DNA, 25 bp, SARS Virus
ttaatcctcgaacttgtagtagttt

SEQ ID NO: 151857 - DNA, 25 bp, SARS Virus
taatcctcgaacctgtagtagtttt

SEQ ID NO: 151858 - DNA, 25 bp, SARS Virus
aatcctcgaactcgtagtagttttc

SEQ ID NO: 151859 - DNA, 25 bp, SARS Virus
atcctcgaacttctagtagttttca

SEQ ID NO: 151860 - DNA, 25 bp, SARS Virus
tcctcgaacttgcagtagttttcac

SEQ ID NO: 151861 - DNA, 25 bp, SARS Virus
cctcgaacttgtcgtagttttcacc

SEQ ID NO: 151862 - DNA, 25 bp, SARS Virus
ctcgaacttgtactagttttcacca

SEQ ID NO: 151863 - DNA, 25 bp, SARS Virus
tcgaacttgtagcagttttcaccac

SEQ ID NO: 151864 - DNA, 25 bp, SARS Virus
cgaacttgtagtcgttttcaccacg

SEQ ID NO: 151865 - DNA, 25 bp, SARS Virus
gaacttgtagtacttttcaccacgt

SEQ ID NO: 151866 - DNA, 25 bp, SARS Virus
aacttgtagtagctttcaccacgtg

SEQ ID NO: 151867 - DNA, 25 bp, SARS Virus
acttgtagtagtcttcaccacgtgg

SEQ ID NO: 151868 - DNA, 25 bp, SARS Virus
cttgtagtagttctcaccacgtggc

SEQ ID NO: 151869 - DNA, 25 bp, SARS Virus
ttgtagtagtttccaccacgtggcc

SEQ ID NO: 151870 - DNA, 25 bp, SARS Virus
tgtagtagttttcaccacgtggcca

SEQ ID NO: 151871 - DNA, 25 bp, SARS Virus
gtagtagttttccccacgtggccag

SEQ ID NO: 151872 - DNA, 25 bp, SARS Virus
tagtagttttcaccacgtggccagt

SEQ ID NO: 151873 - DNA, 25 bp, SARS Virus
agtagttttcaccacgtggccagtt

SEQ ID NO: 151874 - DNA, 25 bp, SARS Virus
gtagttttcaccccgtggccagttc

SEQ ID NO: 151875 - DNA, 25 bp, SARS Virus
tagttttcaccacgtggccagttcc

SEQ ID NO: 151876 - DNA, 25 bp, SARS Virus
agttttcaccacctggccagttcca

SEQ ID NO: 151877 - DNA, 25 bp, SARS Virus
gttttcaccacgcggccagttccag

SEQ ID NO: 151878 - DNA, 25 bp, SARS Virus
ttttcaccacgtcgccagttccagt

SEQ ID NO: 151879 - DNA, 25 bp, SARS Virus
tttcaccacgtgcccagttccagtg

SEQ ID NO: 151880 - DNA, 25 bp, SARS Virus
ttcaccacgtggccagttccagtga

SEQ ID NO: 151881 - DNA, 25 bp, SARS Virus
tcaccacgtggccagttccagtgat

SEQ ID NO: 151882 - DNA, 25 bp, SARS Virus
caccacgtggcccgttccagtgatg

SEQ ID NO: 151883 - DNA, 25 bp, SARS Virus
accacgtggccacttccagtgatgg

SEQ ID NO: 151884 - DNA, 25 bp, SARS Virus
ccacgtggccagctccagtgatggt

SEQ ID NO: 151885 - DNA, 25 bp, SARS Virus
cacgtggccagtcccagtgatggtg

SEQ ID NO: 151886 - DNA, 25 bp, SARS Virus
acgtggccagttccagtgatggtga

SEQ ID NO: 151887 - DNA, 25 bp, SARS Virus
cgtggccagttccagtgatggtgat

SEQ ID NO: 151888 - DNA, 25 bp, SARS Virus
gtggccagttcccgtgatggtgatc

SEQ ID NO: 151889 - DNA, 25 bp, SARS Virus
tggccagttccactgatggtgatca

SEQ ID NO: 151890 - DNA, 25 bp, SARS Virus
ggccagttccagcgatggtgatcac

SEQ ID NO: 151891 - DNA, 25 bp, SARS Virus
gccagttccagtcatggtgatcact

SEQ ID NO: 151892 - DNA, 25 bp, SARS Virus
ccagttccagtgctggtgatcactc

SEQ ID NO: 151893 - DNA, 25 bp, SARS Virus
cagttccagtgacggtgatcactct

SEQ ID NO: 151894 - DNA, 25 bp, SARS Virus
agttccagtgatcgtgatcactctc

SEQ ID NO: 151895 - DNA, 25 bp, SARS Virus
gttccagtgatgctgatcactctca

SEQ ID NO: 151896 - DNA, 25 bp, SARS Virus
ttccagtgatggcgatcactctcat

SEQ ID NO: 151897 - DNA, 25 bp, SARS Virus
tccagtgatggtcatcactctcatt

SEQ ID NO: 151898 - DNA, 25 bp, SARS Virus
ccagtgatggtgctcactctcattc

SEQ ID NO: 151899 - DNA, 25 bp, SARS Virus
cagtgatggtgaccactctcattct

SEQ ID NO: 151900 - DNA, 25 bp, SARS Virus
agtgatggtgatcactctcattctt

SEQ ID NO: 151901 - DNA, 25 bp, SARS Virus
gtgatggtgatccctctcattcttt

SEQ ID NO: 151902 - DNA, 25 bp, SARS Virus
tgatggtgatcactctcattcttta

SEQ ID NO: 151903 - DNA, 25 bp, SARS Virus
gatggtgatcaccctcattctttat

SEQ ID NO: 151904 - DNA, 25 bp, SARS Virus
atggtgatcactctcattctttatt

SEQ ID NO: 151905 - DNA, 25 bp, SARS Virus
tggtgatcactcccattctttatta

SEQ ID NO: 151906 - DNA, 25 bp, SARS Virus
ggtgatcactctcattctttattat

SEQ ID NO: 151907 - DNA, 25 bp, SARS Virus
gtgatcactctccttctttattatt

SEQ ID NO: 151908 - DNA, 25 bp, SARS Virus
tgatcactctcactctttattattc

SEQ ID NO: 151909 - DNA, 25 bp, SARS Virus
gatcactctcatcctttattattct

SEQ ID NO: 151910 - DNA, 25 bp, SARS Virus
atcactctcattctttattattctt

SEQ ID NO: 151911 - DNA, 25 bp, SARS Virus
tcactctcattccttattattcttt

SEQ ID NO: 151912 - DNA, 25 bp, SARS Virus
cactctcattctctattattctttt

SEQ ID NO: 151913 - DNA, 25 bp, SARS Virus
actctcattcttcattattctttta

SEQ ID NO: 151914 - DNA, 25 bp, SARS Virus
ctctcattctttcttattcttttat

SEQ ID NO: 151915 - DNA, 25 bp, SARS Virus
tctcattctttactattcttttatt

SEQ ID NO: 151916 - DNA, 25 bp, SARS Virus
ctcattctttatcattcttttattt

SEQ ID NO: 151917 - DNA, 25 bp, SARS Virus
tcattctttattcttcttttatttg

SEQ ID NO: 151918 - DNA, 25 bp, SARS Virus
cattctttattactcttttatttgt

SEQ ID NO: 151919 - DNA, 25 bp, SARS Virus
attctttattatccttttatttgta

SEQ ID NO: 151920 - DNA, 25 bp, SARS Virus
ttctttattattcttttatttgtac

SEQ ID NO: 151921 - DNA, 25 bp, SARS Virus
tctttattattcctttatttgtaca

SEQ ID NO: 151922 - DNA, 25 bp, SARS Virus
ctttattattctcttatttgtacaa

SEQ ID NO: 151923 - DNA, 25 bp, SARS Virus
tttattattcttctatttgtacaag

SEQ ID NO: 151924 - DNA, 25 bp, SARS Virus
ttattattctttcatttgtacaagc

SEQ ID NO: 151925 - DNA, 25 bp, SARS Virus
tattattcttttctttgtacaagca

SEQ ID NO: 151926 - DNA, 25 bp, SARS Virus
attattcttttacttgtacaagcaa

SEQ ID NO: 151927 - DNA, 25 bp, SARS Virus
ttattcttttatctgtacaagcaaa

SEQ ID NO: 151928 - DNA, 25 bp, SARS Virus
tattcttttattcgtacaagcaaat

SEQ ID NO: 151929 - DNA, 25 bp, SARS Virus
attcttttatttctacaagcaaatc

SEQ ID NO: 151930 - DNA, 25 bp, SARS Virus
ttcttttatttgcacaagcaaatca

SEQ ID NO: 151931 - DNA, 25 bp, SARS Virus
tcttttatttgtccaagcaaatcaa

SEQ ID NO: 151932 - DNA, 25 bp, SARS Virus
cttttatttgtacaagcaaatcaac

SEQ ID NO: 151933 - DNA, 25 bp, SARS Virus
ttttatttgtaccagcaaatcaaca

SEQ ID NO: 151934 - DNA, 25 bp, SARS Virus
tttatttgtacacgcaaatcaacaa

SEQ ID NO: 151935 - DNA, 25 bp, SARS Virus
ttatttgtacaaccaaatcaacaat

SEQ ID NO: 151936 - DNA, 25 bp, SARS Virus
tatttgtacaagcaaatcaacaatt

SEQ ID NO: 151937 - DNA, 25 bp, SARS Virus
atttgtacaagccaatcaacaattg

SEQ ID NO: 151938 - DNA, 25 bp, SARS Virus
tttgtacaagcacatcaacaattgt

SEQ ID NO: 151939 - DNA, 25 bp, SARS Virus
ttgtacaagcaactcaacaattgtt

SEQ ID NO: 151940 - DNA, 25 bp, SARS Virus
tgtacaagcaaaccaacaattgttc

SEQ ID NO: 151941 - DNA, 25 bp, SARS Virus
gtacaagcaaatcaacaattgttct

SEQ ID NO: 151942 - DNA, 25 bp, SARS Virus
tacaagcaaatccacaattgttctt

SEQ ID NO: 151943 - DNA, 25 bp, SARS Virus
acaagcaaatcaccaattgttctta

SEQ ID NO: 151944 - DNA, 25 bp, SARS Virus
caagcaaatcaacaattgttcttat

SEQ ID NO: 151945 - DNA, 25 bp, SARS Virus
aagcaaatcaaccattgttcttata

SEQ ID NO: 151946 - DNA, 25 bp, SARS Virus
agcaaatcaacacttgttcttatag

SEQ ID NO: 151947 - DNA, 25 bp, SARS Virus
gcaaatcaacaactgttcttatagt

SEQ ID NO: 151948 - DNA, 25 bp, SARS Virus
caaatcaacaatcgttcttatagtg

SEQ ID NO: 151949 - DNA, 25 bp, SARS Virus
aaatcaacaattcttcttatagtga

SEQ ID NO: 151950 - DNA, 25 bp, SARS Virus
aatcaacaattgctcttatagtgaa

SEQ ID NO: 151951 - DNA, 25 bp, SARS Virus
atcaacaattgtccttatagtgaac

SEQ ID NO: 151952 - DNA, 25 bp, SARS Virus
tcaacaattgttcttatagtgaact

SEQ ID NO: 151953 - DNA, 25 bp, SARS Virus
caacaattgttcctatagtgaactt

SEQ ID NO: 151954 - DNA, 25 bp, SARS Virus
aacaattgttctcatagtgaacttt

SEQ ID NO: 151955 - DNA, 25 bp, SARS Virus
acaattgttcttctagtgaactttg

SEQ ID NO: 151956 - DNA, 25 bp, SARS Virus
caattgttcttacagtgaactttgg

SEQ ID NO: 151957 - DNA, 25 bp, SARS Virus
aattgttcttatcgtgaactttggt

SEQ ID NO: 151958 - DNA, 25 bp, SARS Virus
attgttcttatactgaactttggtg

SEQ ID NO: 151959 - DNA, 25 bp, SARS Virus
ttgttcttatagcgaactttggtgt

SEQ ID NO: 151960 - DNA, 25 bp, SARS Virus
tgttcttatagtcaactttggtgtt

SEQ ID NO: 151961 - DNA, 25 bp, SARS Virus
gttcttatagtgcactttggtgttg

SEQ ID NO: 151962 - DNA, 25 bp, SARS Virus
ttcttatagtgacctttggtgttga

SEQ ID NO: 151963 - DNA, 25 bp, SARS Virus
tcttatagtgaactttggtgttgag

SEQ ID NO: 151964 - DNA, 25 bp, SARS Virus
cttatagtgaaccttggtgttgaga

SEQ ID NO: 151965 - DNA, 25 bp, SARS Virus
ttatagtgaactctggtgttgagac

SEQ ID NO: 151966 - DNA, 25 bp, SARS Virus
tatagtgaacttcggtgttgagaca

SEQ ID NO: 151967 - DNA, 25 bp, SARS Virus
atagtgaactttcgtgttgagacaa

SEQ ID NO: 151968 - DNA, 25 bp, SARS Virus
tagtgaactttgctgttgagacaac

SEQ ID NO: 151969 - DNA, 25 bp, SARS Virus
agtgaactttggcgttgagacaaca

SEQ ID NO: 151970 - DNA, 25 bp, SARS Virus
gtgaactttggtcttgagacaacaa

SEQ ID NO: 151971 - DNA, 25 bp, SARS Virus
tgaactttggtgctgagacaacaaa

SEQ ID NO: 151972 - DNA, 25 bp, SARS Virus
gaactttggtgtcgagacaacaaaa

SEQ ID NO: 151973 - DNA, 25 bp, SARS Virus
aactttggtgttcagacaacaaaag

SEQ ID NO: 151974 - DNA, 25 bp, SARS Virus
actttggtgttgcgacaacaaaaga

SEQ ID NO: 151975 - DNA, 25 bp, SARS Virus
ctttggtgttgacacaacaaaagag

SEQ ID NO: 151976 - DNA, 25 bp, SARS Virus
tttggtgttgagccaacaaaagaga

SEQ ID NO: 151977 - DNA, 25 bp, SARS Virus
ttggtgttgagacaacaaaagagat

SEQ ID NO: 151978 - DNA, 25 bp, SARS Virus
tggtgttgagaccacaaaagagatt

SEQ ID NO: 151979 - DNA, 25 bp, SARS Virus
ggtgttgagacaccaaaagagatta

SEQ ID NO: 151980 - DNA, 25 bp, SARS Virus
gtgttgagacaacaaaagagattac

SEQ ID NO: 151981 - DNA, 25 bp, SARS Virus
tgttgagacaaccaaagagattact

SEQ ID NO: 151982 - DNA, 25 bp, SARS Virus
gttgagacaacacaagagattacta

SEQ ID NO: 151983 - DNA, 25 bp, SARS Virus
ttgagacaacaacagagattactat

SEQ ID NO: 151984 - DNA, 25 bp, SARS Virus
tgagacaacaaacgagattactatt

SEQ ID NO: 151985 - DNA, 25 bp, SARS Virus
gagacaacaaaacagattactattc

SEQ ID NO: 151986 - DNA, 25 bp, SARS Virus
agacaacaaaagcgattactattcg

SEQ ID NO: 151987 - DNA, 25 bp, SARS Virus
gacaacaaaagacattactattcgg

SEQ ID NO: 151988 - DNA, 25 bp, SARS Virus
acaacaaaagagcttactattcgga

SEQ ID NO: 151989 - DNA, 25 bp, SARS Virus
caacaaaagagactactattcggat

SEQ ID NO: 151990 - DNA, 25 bp, SARS Virus
aacaaaagagatcactattcggatg

SEQ ID NO: 151991 - DNA, 25 bp, SARS Virus
acaaaagagattcctattcggatgg

SEQ ID NO: 151992 - DNA, 25 bp, SARS Virus
caaaagagattactattcggatgga

SEQ ID NO: 151993 - DNA, 25 bp, SARS Virus
aaaagagattaccattcggatggaa

SEQ ID NO: 151994 - DNA, 25 bp, SARS Virus
aaagagattactcttcggatggaaa

SEQ ID NO: 151995 - DNA, 25 bp, SARS Virus
aagagattactactcggatggaaaa

SEQ ID NO: 151996 - DNA, 25 bp, SARS Virus
agagattactatccggatggaaaaa

SEQ ID NO: 151997 - DNA, 25 bp, SARS Virus
gagattactattcggatggaaaaag

SEQ ID NO: 151998 - DNA, 25 bp, SARS Virus
agattactattccgatggaaaaagg

SEQ ID NO: 151999 - DNA, 25 bp, SARS Virus
gattactattcgcatggaaaaaggt

SEQ ID NO: 152000 - DNA, 25 bp, SARS Virus
attactattcggctggaaaaaggtc

SEQ ID NO: 152001 - DNA, 25 bp, SARS Virus
ttactattcggacggaaaaaggtct

SEQ ID NO: 152002 - DNA, 25 bp, SARS Virus
tactattcggatcgaaaaaggtctt

SEQ ID NO: 152003 - DNA, 25 bp, SARS Virus
actattcggatgcaaaaaggtcttc

SEQ ID NO: 152004 - DNA, 25 bp, SARS Virus
ctattcggatggcaaaaggtcttct

SEQ ID NO: 152005 - DNA, 25 bp, SARS Virus
tattcggatggacaaaggtcttctc

SEQ ID NO: 152006 - DNA, 25 bp, SARS Virus
attcggatggaacaaggtcttctct

SEQ ID NO: 152007 - DNA, 25 bp, SARS Virus
ttcggatggaaacaggtcttctctt

SEQ ID NO: 152008 - DNA, 25 bp, SARS Virus
tcggatggaaaacggtcttctctta

SEQ ID NO: 152009 - DNA, 25 bp, SARS Virus
cggatggaaaaacgtcttctcttat

SEQ ID NO: 152010 - DNA, 25 bp, SARS Virus
ggatggaaaaagctcttctcttatt

SEQ ID NO: 152011 - DNA, 25 bp, SARS Virus
gatggaaaaaggccttctcttattt

SEQ ID NO: 152012 - DNA, 25 bp, SARS Virus
atggaaaaaggtcttctcttattta

SEQ ID NO: 152013 - DNA, 25 bp, SARS Virus
tggaaaaaggtcctctcttatttag

SEQ ID NO: 152014 - DNA, 25 bp, SARS Virus
ggaaaaaggtctcctcttatttagt

SEQ ID NO: 152015 - DNA, 25 bp, SARS Virus
gaaaaaggtcttctcttatttagta

SEQ ID NO: 152016 - DNA, 25 bp, SARS Virus
aaaaaggtcttcccttatttagtat

SEQ ID NO: 152017 - DNA, 25 bp, SARS Virus
aaaaggtcttctcttatttagtata

SEQ ID NO: 152018 - DNA, 25 bp, SARS Virus
aaaggtcttctcctatttagtatag

SEQ ID NO: 152019 - DNA, 25 bp, SARS Virus
aaggtcttctctcatttagtatagt

SEQ ID NO: 152020 - DNA, 25 bp, SARS Virus
aggtcttctcttctttagtatagta

SEQ ID NO: 152021 - DNA, 25 bp, SARS Virus
ggtcttctcttacttagtatagtaa

SEQ ID NO: 152022 - DNA, 25 bp, SARS Virus
gtcttctcttatctagtatagtaac

SEQ ID NO: 152023 - DNA, 25 bp, SARS Virus
tcttctcttattcagtatagtaact

SEQ ID NO: 152024 - DNA, 25 bp, SARS Virus
cttctcttatttcgtatagtaacta

SEQ ID NO: 152025 - DNA, 25 bp, SARS Virus
ttctcttatttactatagtaactaa

SEQ ID NO: 152026 - DNA, 25 bp, SARS Virus
tctcttatttagcatagtaactaaa

SEQ ID NO: 152027 - DNA, 25 bp, SARS Virus
ctcttatttagtctagtaactaaac

SEQ ID NO: 152028 - DNA, 25 bp, SARS Virus
tcttatttagtacagtaactaaact

SEQ ID NO: 152029 - DNA, 25 bp, SARS Virus
cttatttagtatcgtaactaaacta

SEQ ID NO: 152030 - DNA, 25 bp, SARS Virus
ttatttagtatactaactaaactaa

SEQ ID NO: 152031 - DNA, 25 bp, SARS Virus
tatttagtatagcaactaaactaag

SEQ ID NO: 152032 - DNA, 25 bp, SARS Virus
atttagtatagtcactaaactaaga

SEQ ID NO: 152033 - DNA, 25 bp, SARS Virus
tttagtatagtacctaaactaagag

SEQ ID NO: 152034 - DNA, 25 bp, SARS Virus
ttagtatagtaactaaactaagagg

SEQ ID NO: 152035 - DNA, 25 bp, SARS Virus
tagtatagtaaccaaactaagagga

SEQ ID NO: 152036 - DNA, 25 bp, SARS Virus
agtatagtaactcaactaagaggaa

SEQ ID NO: 152037 - DNA, 25 bp, SARS Virus
gtatagtaactacactaagaggaat

SEQ ID NO: 152038 - DNA, 25 bp, SARS Virus
tatagtaactaacctaagaggaatt

SEQ ID NO: 152039 - DNA, 25 bp, SARS Virus
atagtaactaaactaagaggaattc

SEQ ID NO: 152040 - DNA, 25 bp, SARS Virus
tagtaactaaaccaagaggaattct

SEQ ID NO: 152041 - DNA, 25 bp, SARS Virus
agtaactaaactcagaggaattctc

SEQ ID NO: 152042 - DNA, 25 bp, SARS Virus
gtaactaaactacgaggaattctct

SEQ ID NO: 152043 - DNA, 25 bp, SARS Virus
taactaaactaacaggaattctctg

SEQ ID NO: 152044 - DNA, 25 bp, SARS Virus
aactaaactaagcggaattctctgt

SEQ ID NO: 152045 - DNA, 25 bp, SARS Virus
actaaactaagacgaattctctgta

SEQ ID NO: 152046 - DNA, 25 bp, SARS Virus
ctaaactaagagcaattctctgtaa

SEQ ID NO: 152047 - DNA, 25 bp, SARS Virus
taaactaagaggcattctctgtaat

SEQ ID NO: 152048 - DNA, 25 bp, SARS Virus
aaactaagaggacttctctgtaatg

SEQ ID NO: 152049 - DNA, 25 bp, SARS Virus
aactaagaggaactctctgtaatgt

SEQ ID NO: 152050 - DNA, 25 bp, SARS Virus
actaagaggaatcctctgtaatgtc

SEQ ID NO: 152051 - DNA, 25 bp, SARS Virus
ctaagaggaattctctgtaatgtcg

SEQ ID NO: 152052 - DNA, 25 bp, SARS Virus
taagaggaattccctgtaatgtcgt

SEQ ID NO: 152053 - DNA, 25 bp, SARS Virus
aagaggaattctctgtaatgtcgtc

SEQ ID NO: 152054 - DNA, 25 bp, SARS Virus
agaggaattctccgtaatgtcgtca

SEQ ID NO: 152055 - DNA, 25 bp, SARS Virus
gaggaattctctctaatgtcgtcaa

SEQ ID NO: 152056 - DNA, 25 bp, SARS Virus
aggaattctctgcaatgtcgtcaag

SEQ ID NO: 152057 - DNA, 25 bp, SARS Virus
ggaattctctgtcatgtcgtcaagg

SEQ ID NO: 152058 - DNA, 25 bp, SARS Virus
gaattctctgtactgtcgtcaagga

SEQ ID NO: 152059 - DNA, 25 bp, SARS Virus
aattctctgtaacgtcgtcaaggag

SEQ ID NO: 152060 - DNA, 25 bp, SARS Virus
attctctgtaatctcgtcaaggaga

SEQ ID NO: 152061 - DNA, 25 bp, SARS Virus
ttctctgtaatgccgtcaaggagaa

SEQ ID NO: 152062 - DNA, 25 bp, SARS Virus
tctctgtaatgtcgtcaaggagaat

SEQ ID NO: 152063 - DNA, 25 bp, SARS Virus
ctctgtaatgtcctcaaggagaatt

SEQ ID NO: 152064 - DNA, 25 bp, SARS Virus
tctgtaatgtcgccaaggagaatta

SEQ ID NO: 152065 - DNA, 25 bp, SARS Virus
ctgtaatgtcgtcaaggagaattaa

SEQ ID NO: 152066 - DNA, 25 bp, SARS Virus
tgtaatgtcgtccaggagaattaaa

SEQ ID NO: 152067 - DNA, 25 bp, SARS Virus
gtaatgtcgtcacggagaattaaat

SEQ ID NO: 152068 - DNA, 25 bp, SARS Virus
taatgtcgtcaacgagaattaaatt

SEQ ID NO: 152069 - DNA, 25 bp, SARS Virus
aatgtcgtcaagcagaattaaattc

SEQ ID NO: 152070 - DNA, 25 bp, SARS Virus
atgtcgtcaaggcgaattaaattct

SEQ ID NO: 152071 - DNA, 25 bp, SARS Virus
tgtcgtcaaggacaattaaattctc

SEQ ID NO: 152072 - DNA, 25 bp, SARS Virus
gtcgtcaaggagcattaaattctcc

SEQ ID NO: 152073 - DNA, 25 bp, SARS Virus
tcgtcaaggagacttaaattctcct

SEQ ID NO: 152074 - DNA, 25 bp, SARS Virus
cgtcaaggagaactaaattctcctt

SEQ ID NO: 152075 - DNA, 25 bp, SARS Virus
gtcaaggagaatcaaattctccttt

SEQ ID NO: 152076 - DNA, 25 bp, SARS Virus
tcaaggagaattcaattctccttta

SEQ ID NO: 152077 - DNA, 25 bp, SARS Virus
caaggagaattacattctcctttaa

SEQ ID NO: 152078 - DNA, 25 bp, SARS Virus
aaggagaattaacttctcctttaaa

SEQ ID NO: 152079 - DNA, 25 bp, SARS Virus
aggagaattaaactctcctttaaac

SEQ ID NO: 152080 - DNA, 25 bp, SARS Virus
ggagaattaaatcctcctttaaacg

SEQ ID NO: 152081 - DNA, 25 bp, SARS Virus
gagaattaaattctcctttaaacga

SEQ ID NO: 152082 - DNA, 25 bp, SARS Virus
agaattaaattcccctttaaacgag

SEQ ID NO: 152083 - DNA, 25 bp, SARS Virus
gaattaaattctcctttaaacgagt

SEQ ID NO: 152084 - DNA, 25 bp, SARS Virus
aattaaattctcctttaaacgagta

SEQ ID NO: 152085 - DNA, 25 bp, SARS Virus
attaaattctcccttaaacgagtac

SEQ ID NO: 152086 - DNA, 25 bp, SARS Virus
ttaaattctcctctaaacgagtaca

SEQ ID NO: 152087 - DNA, 25 bp, SARS Virus
taaattctccttcaaacgagtacag

SEQ ID NO: 152088 - DNA, 25 bp, SARS Virus
aaattctcctttcaacgagtacagt

SEQ ID NO: 152089 - DNA, 25 bp, SARS Virus
aattctcctttacacgagtacagtt

SEQ ID NO: 152090 - DNA, 25 bp, SARS Virus
attctcctttaaccgagtacagttt

SEQ ID NO: 152091 - DNA, 25 bp, SARS Virus
ttctcctttaaacgagtacagtttc

SEQ ID NO: 152092 - DNA, 25 bp, SARS Virus
tctcctttaaaccagtacagtttct

SEQ ID NO: 152093 - DNA, 25 bp, SARS Virus
ctcctttaaacgcgtacagtttctc

SEQ ID NO: 152094 - DNA, 25 bp, SARS Virus
tcctttaaacgactacagtttctca

SEQ ID NO: 152095 - DNA, 25 bp, SARS Virus
cctttaaacgagcacagtttctcac

SEQ ID NO: 152096 - DNA, 25 bp, SARS Virus
ctttaaacgagtccagtttctcact

SEQ ID NO: 152097 - DNA, 25 bp, SARS Virus
tttaaacgagtacagtttctcactt

SEQ ID NO: 152098 - DNA, 25 bp, SARS Virus
ttaaacgagtaccgtttctcactta

SEQ ID NO: 152099 - DNA, 25 bp, SARS Virus
taaacgagtacactttctcacttat

SEQ ID NO: 152100 - DNA, 25 bp, SARS Virus
aaacgagtacagcttctcacttatc

SEQ ID NO: 152101 - DNA, 25 bp, SARS Virus
aacgagtacagtctctcacttatcc

SEQ ID NO: 152102 - DNA, 25 bp, SARS Virus
acgagtacagttcctcacttatcct

SEQ ID NO: 152103 - DNA, 25 bp, SARS Virus
cgagtacagtttctcacttatcctt

SEQ ID NO: 152104 - DNA, 25 bp, SARS Virus
gagtacagtttcccacttatccttc

SEQ ID NO: 152105 - DNA, 25 bp, SARS Virus
agtacagtttctcacttatccttct

SEQ ID NO: 152106 - DNA, 25 bp, SARS Virus
gtacagtttctcccttatccttctg

SEQ ID NO: 152107 - DNA, 25 bp, SARS Virus
tacagtttctcacttatccttctgt

SEQ ID NO: 152108 - DNA, 25 bp, SARS Virus
acagtttctcacctatccttctgtt

SEQ ID NO: 152109 - DNA, 25 bp, SARS Virus
cagtttctcactcatccttctgttg

SEQ ID NO: 152110 - DNA, 25 bp, SARS Virus
agtttctcacttctccttctgttga

SEQ ID NO: 152111 - DNA, 25 bp, SARS Virus
gtttctcacttacccttctgttgac

SEQ ID NO: 152112 - DNA, 25 bp, SARS Virus
tttctcacttatccttctgttgacc

SEQ ID NO: 152113 - DNA, 25 bp, SARS Virus
ttctcacttatccttctgttgacct

SEQ ID NO: 152114 - DNA, 25 bp, SARS Virus
tctcacttatccctctgttgaccta

SEQ ID NO: 152115 - DNA, 25 bp, SARS Virus
ctcacttatcctcctgttgacctat

SEQ ID NO: 152116 - DNA, 25 bp, SARS Virus
tcacttatccttctgttgacctatc

SEQ ID NO: 152117 - DNA, 25 bp, SARS Virus
cacttatccttccgttgacctatcc

SEQ ID NO: 152118 - DNA, 25 bp, SARS Virus
acttatccttctcttgacctatcct

SEQ ID NO: 152119 - DNA, 25 bp, SARS Virus
cttatccttctgctgacctatccta

SEQ ID NO: 152120 - DNA, 25 bp, SARS Virus
ttatccttctgtcgacctatcctaa

SEQ ID NO: 152121 - DNA, 25 bp, SARS Virus
tatccttctgttcacctatcctaaa

SEQ ID NO: 152122 - DNA, 25 bp, SARS Virus
atccttctgttgccctatcctaaac

SEQ ID NO: 152123 - DNA, 25 bp, SARS Virus
tccttctgttgacctatcctaaaca

SEQ ID NO: 152124 - DNA, 25 bp, SARS Virus
ccttctgttgacctatcctaaacac

SEQ ID NO: 152125 - DNA, 25 bp, SARS Virus
cttctgttgacccatcctaaacaca

SEQ ID NO: 152126 - DNA, 25 bp, SARS Virus
ttctgttgacctctcctaaacacaa

SEQ ID NO: 152127 - DNA, 25 bp, SARS Virus
tctgttgacctaccctaaacacaag

SEQ ID NO: 152128 - DNA, 25 bp, SARS Virus
ctgttgacctatcctaaacacaagg

SEQ ID NO: 152129 - DNA, 25 bp, SARS Virus
tgttgacctatcctaaacacaagga

SEQ ID NO: 152130 - DNA, 25 bp, SARS Virus
gttgacctatcccaaacacaaggag

SEQ ID NO: 152131 - DNA, 25 bp, SARS Virus
ttgacctatcctcaacacaaggagg

SEQ ID NO: 152132 - DNA, 25 bp, SARS Virus
tgacctatcctacacacaaggaggt

SEQ ID NO: 152133 - DNA, 25 bp, SARS Virus
gacctatcctaaccacaaggaggtc

SEQ ID NO: 152134 - DNA, 25 bp, SARS Virus
acctatcctaaacacaaggaggtct

SEQ ID NO: 152135 - DNA, 25 bp, SARS Virus
cctatcctaaacccaaggaggtctt

SEQ ID NO: 152136 - DNA, 25 bp, SARS Virus
ctatcctaaacacaaggaggtcttt

SEQ ID NO: 152137 - DNA, 25 bp, SARS Virus
tatcctaaacaccaggaggtctttt

SEQ ID NO: 152138 - DNA, 25 bp, SARS Virus
atcctaaacacacggaggtctttta

SEQ ID NO: 152139 - DNA, 25 bp, SARS Virus
tcctaaacacaacgaggtcttttac

SEQ ID NO: 152140 - DNA, 25 bp, SARS Virus
cctaaacacaagcaggtcttttaca

SEQ ID NO: 152141 - DNA, 25 bp, SARS Virus
ctaaacacaaggcggtcttttacat

SEQ ID NO: 152142 - DNA, 25 bp, SARS Virus
taaacacaaggacgtcttttacatc

SEQ ID NO: 152143 - DNA, 25 bp, SARS Virus
aaacacaaggagctcttttacatca

SEQ ID NO: 152144 - DNA, 25 bp, SARS Virus
aacacaaggaggccttttacatcaa

SEQ ID NO: 152145 - DNA, 25 bp, SARS Virus
acacaaggaggtcttttacatcaat

SEQ ID NO: 152146 - DNA, 25 bp, SARS Virus
cacaaggaggtcctttacatcaatc

SEQ ID NO: 152147 - DNA, 25 bp, SARS Virus
acaaggaggtctcttacatcaatcg

SEQ ID NO: 152148 - DNA, 25 bp, SARS Virus
caaggaggtcttctacatcaatcgt

SEQ ID NO: 152149 - DNA, 25 bp, SARS Virus
aaggaggtctttcacatcaatcgta

SEQ ID NO: 152150 - DNA, 25 bp, SARS Virus
aggaggtcttttccatcaatcgtac

SEQ ID NO: 152151 - DNA, 25 bp, SARS Virus
ggaggtcttttacatcaatcgtacg

SEQ ID NO: 152152 - DNA, 25 bp, SARS Virus
gaggtcttttacctcaatcgtacgt

SEQ ID NO: 152153 - DNA, 25 bp, SARS Virus
aggtcttttacaccaatcgtacgta

SEQ ID NO: 152154 - DNA, 25 bp, SARS Virus
ggtcttttacatcaatcgtacgtac

SEQ ID NO: 152155 - DNA, 25 bp, SARS Virus
gtcttttacatccatcgtacgtacc

SEQ ID NO: 152156 - DNA, 25 bp, SARS Virus
tcttttacatcactcgtacgtacca

SEQ ID NO: 152157 - DNA, 25 bp, SARS Virus
cttttacatcaaccgtacgtaccat

SEQ ID NO: 152158 - DNA, 25 bp, SARS Virus
ttttacatcaatcgtacgtaccata

SEQ ID NO: 152159 - DNA, 25 bp, SARS Virus
tttacatcaatcctacgtaccatat

SEQ ID NO: 152160 - DNA, 25 bp, SARS Virus
ttacatcaatcgcacgtaccatatc

SEQ ID NO: 152161 - DNA, 25 bp, SARS Virus
tacatcaatcgtccgtaccatatcg

SEQ ID NO: 152162 - DNA, 25 bp, SARS Virus
acatcaatcgtacgtaccatatcgg

SEQ ID NO: 152163 - DNA, 25 bp, SARS Virus
catcaatcgtacctaccatatcggt

SEQ ID NO: 152164 - DNA, 25 bp, SARS Virus
atcaatcgtacgcaccatatcggta

SEQ ID NO: 152165 - DNA, 25 bp, SARS Virus
tcaatcgtacgtcccatatcggtag

SEQ ID NO: 152166 - DNA, 25 bp, SARS Virus
caatcgtacgtaccatatcggtagt

SEQ ID NO: 152167 - DNA, 25 bp, SARS Virus
aatcgtacgtaccatatcggtagtt

SEQ ID NO: 152168 - DNA, 25 bp, SARS Virus
atcgtacgtaccctatcggtagtta

SEQ ID NO: 152169 - DNA, 25 bp, SARS Virus
tcgtacgtaccacatcggtagttaa

SEQ ID NO: 152170 - DNA, 25 bp, SARS Virus
cgtacgtaccatctcggtagttaaa

SEQ ID NO: 152171 - DNA, 25 bp, SARS Virus
gtacgtaccataccggtagttaaac

SEQ ID NO: 152172 - DNA, 25 bp, SARS Virus
tacgtaccatatcggtagttaaaca

SEQ ID NO: 152173 - DNA, 25 bp, SARS Virus
acgtaccatatccgtagttaaacaa

SEQ ID NO: 152174 - DNA, 25 bp, SARS Virus
cgtaccatatcgctagttaaacaag

SEQ ID NO: 152175 - DNA, 25 bp, SARS Virus
gtaccatatcggcagttaaacaagg

SEQ ID NO: 152176 - DNA, 25 bp, SARS Virus
taccatatcggtcgttaaacaagga

SEQ ID NO: 152177 - DNA, 25 bp, SARS Virus
accatatcggtacttaaacaaggaa

SEQ ID NO: 152178 - DNA, 25 bp, SARS Virus
ccatatcggtagctaaacaaggaag

SEQ ID NO: 152179 - DNA, 25 bp, SARS Virus
catatcggtagtcaaacaaggaagc

SEQ ID NO: 152180 - DNA, 25 bp, SARS Virus
atatcggtagttcaacaaggaagcc

SEQ ID NO: 152181 - DNA, 25 bp, SARS Virus
tatcggtagttacacaaggaagccg

SEQ ID NO: 152182 - DNA, 25 bp, SARS Virus
atcggtagttaaccaaggaagccga

SEQ ID NO: 152183 - DNA, 25 bp, SARS Virus
tcggtagttaaacaaggaagccgaa

SEQ ID NO: 152184 - DNA, 25 bp, SARS Virus
cggtagttaaaccaggaagccgaac

SEQ ID NO: 152185 - DNA, 25 bp, SARS Virus
ggtagttaaacacggaagccgaacg

SEQ ID NO: 152186 - DNA, 25 bp, SARS Virus
gtagttaaacaacgaagccgaacgg

SEQ ID NO: 152187 - DNA, 25 bp, SARS Virus
tagttaaacaagcaagccgaacggt

SEQ ID NO: 152188 - DNA, 25 bp, SARS Virus
agttaaacaaggcagccgaacggtt

SEQ ID NO: 152189 - DNA, 25 bp, SARS Virus
gttaaacaaggacgccgaacggttc

SEQ ID NO: 152190 - DNA, 25 bp, SARS Virus
ttaaacaaggaacccgaacggttct

SEQ ID NO: 152191 - DNA, 25 bp, SARS Virus
taaacaaggaagccgaacggttcta

SEQ ID NO: 152192 - DNA, 25 bp, SARS Virus
aaacaaggaagccgaacggttctat

SEQ ID NO: 152193 - DNA, 25 bp, SARS Virus
aacaaggaagcccaacggttctatc

SEQ ID NO: 152194 - DNA, 25 bp, SARS Virus
acaaggaagccgcacggttctatca

SEQ ID NO: 152195 - DNA, 25 bp, SARS Virus
caaggaagccgaccggttctatcaa

SEQ ID NO: 152196 - DNA, 25 bp, SARS Virus
aaggaagccgaacggttctatcaat

SEQ ID NO: 152197 - DNA, 25 bp, SARS Virus
aggaagccgaaccgttctatcaatc

SEQ ID NO: 152198 - DNA, 25 bp, SARS Virus
ggaagccgaacgcttctatcaatcg

SEQ ID NO: 152199 - DNA, 25 bp, SARS Virus
gaagccgaacggctctatcaatcgg

SEQ ID NO: 152200 - DNA, 25 bp, SARS Virus
aagccgaacggtcctatcaatcggg

SEQ ID NO: 152201 - DNA, 25 bp, SARS Virus
agccgaacggttctatcaatcgggg

SEQ ID NO: 152202 - DNA, 25 bp, SARS Virus
gccgaacggttccatcaatcggggt

SEQ ID NO: 152203 - DNA, 25 bp, SARS Virus
ccgaacggttctctcaatcggggtt

SEQ ID NO: 152204 - DNA, 25 bp, SARS Virus
cgaacggttctaccaatcggggtta

SEQ ID NO: 152205 - DNA, 25 bp, SARS Virus
gaacggttctatcaatcggggttaa

SEQ ID NO: 152206 - DNA, 25 bp, SARS Virus
aacggttctatccatcggggttaat

SEQ ID NO: 152207 - DNA, 25 bp, SARS Virus
acggttctatcactcggggttaatt

SEQ ID NO: 152208 - DNA, 25 bp, SARS Virus
cggttctatcaaccggggttaattt

SEQ ID NO: 152209 - DNA, 25 bp, SARS Virus
ggttctatcaatcggggttaatttt

SEQ ID NO: 152210 - DNA, 25 bp, SARS Virus
gttctatcaatccgggttaattttt

SEQ ID NO: 152211 - DNA, 25 bp, SARS Virus
ttctatcaatcgcggttaattttta

SEQ ID NO: 152212 - DNA, 25 bp, SARS Virus
tctatcaatcggcgttaatttttac

SEQ ID NO: 152213 - DNA, 25 bp, SARS Virus
ctatcaatcgggcttaatttttacg

SEQ ID NO: 152214 - DNA, 25 bp, SARS Virus
tatcaatcggggctaatttttacga

SEQ ID NO: 152215 - DNA, 25 bp, SARS Virus
atcaatcggggtcaatttttacgaa

SEQ ID NO: 152216 - DNA, 25 bp, SARS Virus
tcaatcggggttcatttttacgaag

SEQ ID NO: 152217 - DNA, 25 bp, SARS Virus
caatcggggttactttttacgaagg

SEQ ID NO: 152218 - DNA, 25 bp, SARS Virus
aatcggggttaacttttacgaaggc

SEQ ID NO: 152219 - DNA, 25 bp, SARS Virus
atcggggttaatctttacgaaggct

SEQ ID NO: 152220 - DNA, 25 bp, SARS Virus
tcggggttaattcttacgaaggcta

SEQ ID NO: 152221 - DNA, 25 bp, SARS Virus
cggggttaatttctacgaaggctac

SEQ ID NO: 152222 - DNA, 25 bp, SARS Virus
ggggttaattttcacgaaggctact

SEQ ID NO: 152223 - DNA, 25 bp, SARS Virus
gggttaatttttccgaaggctacta

SEQ ID NO: 152224 - DNA, 25 bp, SARS Virus
ggttaatttttacgaaggctactac

SEQ ID NO: 152225 - DNA, 25 bp, SARS Virus
gttaatttttaccaaggctactact

SEQ ID NO: 152226 - DNA, 25 bp, SARS Virus
ttaatttttacgcaggctactacta

SEQ ID NO: 152227 - DNA, 25 bp, SARS Virus
taatttttacgacggctactactac

SEQ ID NO: 152228 - DNA, 25 bp, SARS Virus
aatttttacgaacgctactactacg

SEQ ID NO: 152229 - DNA, 25 bp, SARS Virus
atttttacgaagcctactactacgt

SEQ ID NO: 152230 - DNA, 25 bp, SARS Virus
tttttacgaaggctactactacgta

SEQ ID NO: 152231 - DNA, 25 bp, SARS Virus
ttttacgaaggccactactacgtaa

SEQ ID NO: 152232 - DNA, 25 bp, SARS Virus
tttacgaaggctcctactacgtaaa

SEQ ID NO: 152233 - DNA, 25 bp, SARS Virus
ttacgaaggctactactacgtaaat

SEQ ID NO: 152234 - DNA, 25 bp, SARS Virus
tacgaaggctaccactacgtaaatg

SEQ ID NO: 152235 - DNA, 25 bp, SARS Virus
acgaaggctactcctacgtaaatgt

SEQ ID NO: 152236 - DNA, 25 bp, SARS Virus
cgaaggctactactacgtaaatgta

SEQ ID NO: 152237 - DNA, 25 bp, SARS Virus
gaaggctactaccacgtaaatgtaa

SEQ ID NO: 152238 - DNA, 25 bp, SARS Virus
aaggctactactccgtaaatgtaaa

SEQ ID NO: 152239 - DNA, 25 bp, SARS Virus
aggctactactacgtaaatgtaaac

SEQ ID NO: 152240 - DNA, 25 bp, SARS Virus
ggctactactacctaaatgtaaaca

SEQ ID NO: 152241 - DNA, 25 bp, SARS Virus
gctactactacgcaaatgtaaacat

SEQ ID NO: 152242 - DNA, 25 bp, SARS Virus
ctactactacgtcaatgtaaacatt

SEQ ID NO: 152243 - DNA, 25 bp, SARS Virus
tactactacgtacatgtaaacattg

SEQ ID NO: 152244 - DNA, 25 bp, SARS Virus
actactacgtaactgtaaacattgt

SEQ ID NO: 152245 - DNA, 25 bp, SARS Virus
ctactacgtaaacgtaaacattgtt

SEQ ID NO: 152246 - DNA, 25 bp, SARS Virus
tactacgtaaatctaaacattgttt

SEQ ID NO: 152247 - DNA, 25 bp, SARS Virus
actacgtaaatgcaaacattgtttt

SEQ ID NO: 152248 - DNA, 25 bp, SARS Virus
ctacgtaaatgtcaacattgttttc

SEQ ID NO: 152249 - DNA, 25 bp, SARS Virus
tacgtaaatgtacacattgttttcg

SEQ ID NO: 152250 - DNA, 25 bp, SARS Virus
acgtaaatgtaaccattgttttcga

SEQ ID NO: 152251 - DNA, 25 bp, SARS Virus
cgtaaatgtaaacattgttttcgac

SEQ ID NO: 152252 - DNA, 25 bp, SARS Virus
gtaaatgtaaaccttgttttcgaca

SEQ ID NO: 152253 - DNA, 25 bp, SARS Virus
taaatgtaaacactgttttcgacag

SEQ ID NO: 152254 - DNA, 25 bp, SARS Virus
aaatgtaaacatcgttttcgacagg

SEQ ID NO: 152255 - DNA, 25 bp, SARS Virus
aatgtaaacattcttttcgacaggt

SEQ ID NO: 152256 - DNA, 25 bp, SARS Virus
atgtaaacattgctttcgacaggtg

SEQ ID NO: 152257 - DNA, 25 bp, SARS Virus
tgtaaacattgtcttcgacaggtgg

SEQ ID NO: 152258 - DNA, 25 bp, SARS Virus
gtaaacattgttctcgacaggtggt

SEQ ID NO: 152259 - DNA, 25 bp, SARS Virus
taaacattgtttccgacaggtggta

SEQ ID NO: 152260 - DNA, 25 bp, SARS Virus
aaacattgttttcgacaggtggtac

SEQ ID NO: 152261 - DNA, 25 bp, SARS Virus
aacattgttttccacaggtggtact

SEQ ID NO: 152262 - DNA, 25 bp, SARS Virus
acattgttttcgccaggtggtactc

SEQ ID NO: 152263 - DNA, 25 bp, SARS Virus
cattgttttcgacaggtggtactct

SEQ ID NO: 152264 - DNA, 25 bp, SARS Virus
attgttttcgaccggtggtactctt

SEQ ID NO: 152265 - DNA, 25 bp, SARS Virus
ttgttttcgacacgtggtactcttt

SEQ ID NO: 152266 - DNA, 25 bp, SARS Virus
tgttttcgacagctggtactcttta

SEQ ID NO: 152267 - DNA, 25 bp, SARS Virus
gttttcgacaggcggtactctttac

SEQ ID NO: 152268 - DNA, 25 bp, SARS Virus
ttttcgacaggtcgtactctttacc

SEQ ID NO: 152269 - DNA, 25 bp, SARS Virus
tttcgacaggtgctactctttaccg

SEQ ID NO: 152270 - DNA, 25 bp, SARS Virus
ttcgacaggtggcactctttaccgg

SEQ ID NO: 152271 - DNA, 25 bp, SARS Virus
tcgacaggtggtcctctttaccggg

SEQ ID NO: 152272 - DNA, 25 bp, SARS Virus
cgacaggtggtactctttaccgggt

SEQ ID NO: 152273 - DNA, 25 bp, SARS Virus
gacaggtggtaccctttaccgggta

SEQ ID NO: 152274 - DNA, 25 bp, SARS Virus
acaggtggtactctttaccgggtat

SEQ ID NO: 152275 - DNA, 25 bp, SARS Virus
caggtggtactccttaccgggtatt

SEQ ID NO: 152276 - DNA, 25 bp, SARS Virus
aggtggtactctctaccgggtattc

SEQ ID NO: 152277 - DNA, 25 bp, SARS Virus
ggtggtactcttcaccgggtattcg

SEQ ID NO: 152278 - DNA, 25 bp, SARS Virus
gtggtactctttcccgggtattcga

SEQ ID NO: 152279 - DNA, 25 bp, SARS Virus
tggtactctttaccgggtattcgaa

SEQ ID NO: 152280 - DNA, 25 bp, SARS Virus
ggtactctttaccgggtattcgaac

SEQ ID NO: 152281 - DNA, 25 bp, SARS Virus
gtactctttacccggtattcgaaca

SEQ ID NO: 152282 - DNA, 25 bp, SARS Virus
tactctttaccgcgtattcgaacat

SEQ ID NO: 152283 - DNA, 25 bp, SARS Virus
actctttaccggctattcgaacatt

SEQ ID NO: 152284 - DNA, 25 bp, SARS Virus
ctctttaccgggcattcgaacattt

SEQ ID NO: 152285 - DNA, 25 bp, SARS Virus
tctttaccgggtcttcgaacatttc

SEQ ID NO: 152286 - DNA, 25 bp, SARS Virus
ctttaccgggtactcgaacatttcc

SEQ ID NO: 152287 - DNA, 25 bp, SARS Virus
tttaccgggtatccgaacatttcca

SEQ ID NO: 152288 - DNA, 25 bp, SARS Virus
ttaccgggtattcgaacatttccag

SEQ ID NO: 152289 - DNA, 25 bp, SARS Virus
gatttttaaagtggtcctatcattt

SEQ ID NO: 152290 - DNA, 25 bp, SARS Virus
atttttaaagtagtcctatcatttg

SEQ ID NO: 152291 - DNA, 25 bp, SARS Virus
tttttaaagtaggcctatcatttgg

SEQ ID NO: 152292 - DNA, 25 bp, SARS Virus
ttttaaagtagtgctatcatttggg

SEQ ID NO: 152293 - DNA, 25 bp, SARS Virus
tttaaagtagtcgtatcatttgggg

SEQ ID NO: 152294 - DNA, 25 bp, SARS Virus
ttaaagtagtccgatcatttggggg

SEQ ID NO: 152295 - DNA, 25 bp, SARS Virus
taaagtagtcctgtcatttgggggg

SEQ ID NO: 152296 - DNA, 25 bp, SARS Virus
aaagtagtcctagcatttgggggga

SEQ ID NO: 152297 - DNA, 25 bp, SARS Virus
aagtagtcctatgatttggggggag

SEQ ID NO: 152298 - DNA, 25 bp, SARS Virus
agtagtcctatcgtttggggggagt

SEQ ID NO: 152299 - DNA, 25 bp, SARS Virus
gtagtcctatcagttggggggagta

SEQ ID NO: 152300 - DNA, 25 bp, SARS Virus
tagtcctatcatgtggggggagtat

SEQ ID NO: 152301 - DNA, 25 bp, SARS Virus
agtcctatcattgggggggagtatc

SEQ ID NO: 152302 - DNA, 25 bp, SARS Virus
gtcctatcatttggggggagtatct

SEQ ID NO: 152303 - DNA, 25 bp, SARS Virus
tcctatcatttggggggagtatcta

SEQ ID NO: 152304 - DNA, 25 bp, SARS Virus
cctatcatttggggggagtatctac

SEQ ID NO: 152305 - DNA, 25 bp, SARS Virus
ctatcatttggggggagtatctact

SEQ ID NO: 152306 - DNA, 25 bp, SARS Virus
tatcatttggggggagtatctactt

SEQ ID NO: 152307 - DNA, 25 bp, SARS Virus
atcatttggggggagtatctacttc

SEQ ID NO: 152308 - DNA, 25 bp, SARS Virus
tcatttggggggggtatctacttca

SEQ ID NO: 152309 - DNA, 25 bp, SARS Virus
catttggggggagtatctacttcat

SEQ ID NO: 152310 - DNA, 25 bp, SARS Virus
atttggggggaggatctacttcata

SEQ ID NO: 152311 - DNA, 25 bp, SARS Virus
tttggggggagtgtctacttcatac

SEQ ID NO: 152312 - DNA, 25 bp, SARS Virus
ttggggggagtagctacttcataca

SEQ ID NO: 152313 - DNA, 25 bp, SARS Virus
tggggggagtatgtacttcatacaa

SEQ ID NO: 152314 - DNA, 25 bp, SARS Virus
ggggggagtatcgacttcatacaac

SEQ ID NO: 152315 - DNA, 25 bp, SARS Virus
gggggagtatctgcttcatacaact

SEQ ID NO: 152316 - DNA, 25 bp, SARS Virus
ggggagtatctagttcatacaactc

SEQ ID NO: 152317 - DNA, 25 bp, SARS Virus
gggagtatctacgtcatacaactca

SEQ ID NO: 152318 - DNA, 25 bp, SARS Virus
ggagtatctactgcatacaactcac

SEQ ID NO: 152319 - DNA, 25 bp, SARS Virus
gagtatctacttgatacaactcaca

SEQ ID NO: 152320 - DNA, 25 bp, SARS Virus
agtatctacttcgtacaactcacat

SEQ ID NO: 152321 - DNA, 25 bp, SARS Virus
gtatctacttcagacaactcacatt

SEQ ID NO: 152322 - DNA, 25 bp, SARS Virus
tatctacttcatgcaactcacatta

SEQ ID NO: 152323 - DNA, 25 bp, SARS Virus
atctacttcatagaactcacattaa

SEQ ID NO: 152324 - DNA, 25 bp, SARS Virus
tctacttcatacgactcacattaat

SEQ ID NO: 152325 - DNA, 25 bp, SARS Virus
ctacttcatacagctcacattaatc

SEQ ID NO: 152326 - DNA, 25 bp, SARS Virus
tacttcatacaagtcacattaatcc

SEQ ID NO: 152327 - DNA, 25 bp, SARS Virus
acttcatacaacgcacattaatcct

SEQ ID NO: 152328 - DNA, 25 bp, SARS Virus
cttcatacaactgacattaatcctc

SEQ ID NO: 152329 - DNA, 25 bp, SARS Virus
ttcatacaactcgcattaatcctcg

SEQ ID NO: 152330 - DNA, 25 bp, SARS Virus
tcatacaactcagattaatcctcga

SEQ ID NO: 152331 - DNA, 25 bp, SARS Virus
catacaactcacgttaatcctcgaa

SEQ ID NO: 152332 - DNA, 25 bp, SARS Virus
atacaactcacagtaatcctcgaac

SEQ ID NO: 152333 - DNA, 25 bp, SARS Virus
tacaactcacatgaatcctcgaact

SEQ ID NO: 152334 - DNA, 25 bp, SARS Virus
acaactcacattgatcctcgaactt

SEQ ID NO: 152335 - DNA, 25 bp, SARS Virus
caactcacattagtcctcgaacttg

SEQ ID NO: 152336 - DNA, 25 bp, SARS Virus
aactcacattaagcctcgaacttgt

SEQ ID NO: 152337 - DNA, 25 bp, SARS Virus
actcacattaatgctcgaacttgta

SEQ ID NO: 152338 - DNA, 25 bp, SARS Virus
ctcacattaatcgtcgaacttgtag

SEQ ID NO: 152339 - DNA, 25 bp, SARS Virus
tcacattaatccgcgaacttgtagt

SEQ ID NO: 152340 - DNA, 25 bp, SARS Virus
cacattaatcctggaacttgtagta

SEQ ID NO: 152341 - DNA, 25 bp, SARS Virus
acattaatcctcgaacttgtagtag

SEQ ID NO: 152342 - DNA, 25 bp, SARS Virus
cattaatcctcggacttgtagtagt

SEQ ID NO: 152343 - DNA, 25 bp, SARS Virus
attaatcctcgagcttgtagtagtt

SEQ ID NO: 152344 - DNA, 25 bp, SARS Virus
ttaatcctcgaagttgtagtagttt

SEQ ID NO: 152345 - DNA, 25 bp, SARS Virus
taatcctcgaacgtgtagtagtttt

SEQ ID NO: 152346 - DNA, 25 bp, SARS Virus
aatcctcgaactggtagtagttttc

SEQ ID NO: 152347 - DNA, 25 bp, SARS Virus
atcctcgaacttgtagtagttttca

SEQ ID NO: 152348 - DNA, 25 bp, SARS Virus
tcctcgaacttggagtagttttcac

SEQ ID NO: 152349 - DNA, 25 bp, SARS Virus
cctcgaacttgtggtagttttcacc

SEQ ID NO: 152350 - DNA, 25 bp, SARS Virus
ctcgaacttgtagtagttttcacca

SEQ ID NO: 152351 - DNA, 25 bp, SARS Virus
tcgaacttgtaggagttttcaccac

SEQ ID NO: 152352 - DNA, 25 bp, SARS Virus
cgaacttgtagtggttttcaccacg

SEQ ID NO: 152353 - DNA, 25 bp, SARS Virus
gaacttgtagtagttttcaccacgt

SEQ ID NO: 152354 - DNA, 25 bp, SARS Virus
aacttgtagtaggtttcaccacgtg

SEQ ID NO: 152355 - DNA, 25 bp, SARS Virus
acttgtagtagtgttcaccacgtgg

SEQ ID NO: 152356 - DNA, 25 bp, SARS Virus
cttgtagtagttgtcaccacgtggc

SEQ ID NO: 152357 - DNA, 25 bp, SARS Virus
ttgtagtagtttgcaccacgtggcc

SEQ ID NO: 152358 - DNA, 25 bp, SARS Virus
tgtagtagttttgaccacgtggcca

SEQ ID NO: 152359 - DNA, 25 bp, SARS Virus
gtagtagttttcgccacgtggccag

SEQ ID NO: 152360 - DNA, 25 bp, SARS Virus
tagtagttttcagcacgtggccagt

SEQ ID NO: 152361 - DNA, 25 bp, SARS Virus
agtagttttcacgacgtggccagtt

SEQ ID NO: 152362 - DNA, 25 bp, SARS Virus
gtagttttcaccgcgtggccagttc

SEQ ID NO: 152363 - DNA, 25 bp, SARS Virus
tagttttcaccaggtggccagttcc

SEQ ID NO: 152364 - DNA, 25 bp, SARS Virus
agttttcaccacgtggccagttcca

SEQ ID NO: 152365 - DNA, 25 bp, SARS Virus
gttttcaccacggggccagttccag

SEQ ID NO: 152366 - DNA, 25 bp, SARS Virus
ttttcaccacgtggccagttccagt

SEQ ID NO: 152367 - DNA, 25 bp, SARS Virus
tttcaccacgtggccagttccagtg

SEQ ID NO: 152368 - DNA, 25 bp, SARS Virus
ttcaccacgtgggcagttccagtga

SEQ ID NO: 152369 - DNA, 25 bp, SARS Virus
tcaccacgtggcgagttccagtgat

SEQ ID NO: 152370 - DNA, 25 bp, SARS Virus
caccacgtggccggttccagtgatg

SEQ ID NO: 152371 - DNA, 25 bp, SARS Virus
accacgtggccagttccagtgatgg

SEQ ID NO: 152372 - DNA, 25 bp, SARS Virus
ccacgtggccaggtccagtgatggt

SEQ ID NO: 152373 - DNA, 25 bp, SARS Virus
cacgtggccagtgccagtgatggtg

SEQ ID NO: 152374 - DNA, 25 bp, SARS Virus
acgtggccagttgcagtgatggtga

SEQ ID NO: 152375 - DNA, 25 bp, SARS Virus
cgtggccagttcgagtgatggtgat

SEQ ID NO: 152376 - DNA, 25 bp, SARS Virus
gtggccagttccggtgatggtgatc

SEQ ID NO: 152377 - DNA, 25 bp, SARS Virus
tggccagttccagtgatggtgatca

SEQ ID NO: 152378 - DNA, 25 bp, SARS Virus
ggccagttccagggatggtgatcac

SEQ ID NO: 152379 - DNA, 25 bp, SARS Virus
gccagttccagtgatggtgatcact

SEQ ID NO: 152380 - DNA, 25 bp, SARS Virus
ccagttccagtggtggtgatcactc

SEQ ID NO: 152381 - DNA, 25 bp, SARS Virus
cagttccagtgagggtgatcactct

SEQ ID NO: 152382 - DNA, 25 bp, SARS Virus
agttccagtgatggtgatcactctc

SEQ ID NO: 152383 - DNA, 25 bp, SARS Virus
gttccagtgatggtgatcactctca

SEQ ID NO: 152384 - DNA, 25 bp, SARS Virus
ttccagtgatggggatcactctcat

SEQ ID NO: 152385 - DNA, 25 bp, SARS Virus
tccagtgatggtgatcactctcatt

SEQ ID NO: 152386 - DNA, 25 bp, SARS Virus
ccagtgatggtggtcactctcattc

SEQ ID NO: 152387 - DNA, 25 bp, SARS Virus
cagtgatggtgagcactctcattct

SEQ ID NO: 152388 - DNA, 25 bp, SARS Virus
agtgatggtgatgactctcattctt

SEQ ID NO: 152389 - DNA, 25 bp, SARS Virus
gtgatggtgatcgctctcattcttt

SEQ ID NO: 152390 - DNA, 25 bp, SARS Virus
tgatggtgatcagtctcattcttta

SEQ ID NO: 152391 - DNA, 25 bp, SARS Virus
gatggtgatcacgctcattctttat

SEQ ID NO: 152392 - DNA, 25 bp, SARS Virus
atggtgatcactgtcattctttatt

SEQ ID NO: 152393 - DNA, 25 bp, SARS Virus
tggtgatcactcgcattctttatta

SEQ ID NO: 152394 - DNA, 25 bp, SARS Virus
ggtgatcactctgattctttattat

SEQ ID NO: 152395 - DNA, 25 bp, SARS Virus
gtgatcactctcgttctttattatt

SEQ ID NO: 152396 - DNA, 25 bp, SARS Virus
tgatcactctcagtctttattattc

SEQ ID NO: 152397 - DNA, 25 bp, SARS Virus
gatcactctcatgctttattattct

SEQ ID NO: 152398 - DNA, 25 bp, SARS Virus
atcactctcattgtttattattctt

SEQ ID NO: 152399 - DNA, 25 bp, SARS Virus
tcactctcattcgttattattcttt

SEQ ID NO: 152400 - DNA, 25 bp, SARS Virus
cactctcattctgtattattctttt

SEQ ID NO: 152401 - DNA, 25 bp, SARS Virus
actctcattcttgattattctttta

SEQ ID NO: 152402 - DNA, 25 bp, SARS Virus
ctctcattctttgttattcttttat

SEQ ID NO: 152403 - DNA, 25 bp, SARS Virus
tctcattctttagtattcttttatt

SEQ ID NO: 152404 - DNA, 25 bp, SARS Virus
ctcattctttatgattcttttattt

SEQ ID NO: 152405 - DNA, 25 bp, SARS Virus
tcattctttattgttcttttatttg

SEQ ID NO: 152406 - DNA, 25 bp, SARS Virus
cattctttattagtcttttatttgt

SEQ ID NO: 152407 - DNA, 25 bp, SARS Virus
attctttattatgcttttatttgta

SEQ ID NO: 152408 - DNA, 25 bp, SARS Virus
ttctttattattgttttatttgtac

SEQ ID NO: 152409 - DNA, 25 bp, SARS Virus
tctttattattcgtttatttgtaca

SEQ ID NO: 152410 - DNA, 25 bp, SARS Virus
ctttattattctgttatttgtacaa

SEQ ID NO: 152411 - DNA, 25 bp, SARS Virus
tttattattcttgtatttgtacaag

SEQ ID NO: 152412 - DNA, 25 bp, SARS Virus
ttattattctttgatttgtacaagc

SEQ ID NO: 152413 - DNA, 25 bp, SARS Virus
tattattcttttgtttgtacaagca

SEQ ID NO: 152414 - DNA, 25 bp, SARS Virus
attattcttttagttgtacaagcaa

SEQ ID NO: 152415 - DNA, 25 bp, SARS Virus
ttattcttttatgtgtacaagcaaa

SEQ ID NO: 152416 - DNA, 25 bp, SARS Virus
tattcttttattggtacaagcaaat

SEQ ID NO: 152417 - DNA, 25 bp, SARS Virus
attcttttatttgtacaagcaaatc

SEQ ID NO: 152418 - DNA, 25 bp, SARS Virus
ttcttttatttggacaagcaaatca

SEQ ID NO: 152419 - DNA, 25 bp, SARS Virus
tcttttatttgtgcaagcaaatcaa

SEQ ID NO: 152420 - DNA, 25 bp, SARS Virus
cttttatttgtagaagcaaatcaac

SEQ ID NO: 152421 - DNA, 25 bp, SARS Virus
ttttatttgtacgagcaaatcaaca

SEQ ID NO: 152422 - DNA, 25 bp, SARS Virus
tttatttgtacaggcaaatcaacaa

SEQ ID NO: 152423 - DNA, 25 bp, SARS Virus
ttatttgtacaagcaaatcaacaat

SEQ ID NO: 152424 - DNA, 25 bp, SARS Virus
tatttgtacaaggaaatcaacaatt

SEQ ID NO: 152425 - DNA, 25 bp, SARS Virus
atttgtacaagcgaatcaacaattg

SEQ ID NO: 152426 - DNA, 25 bp, SARS Virus
tttgtacaagcagatcaacaattgt

SEQ ID NO: 152427 - DNA, 25 bp, SARS Virus
ttgtacaagcaagtcaacaattgtt

SEQ ID NO: 152428 - DNA, 25 bp, SARS Virus
tgtacaagcaaagcaacaattgttc

SEQ ID NO: 152429 - DNA, 25 bp, SARS Virus
gtacaagcaaatgaacaattgttct

SEQ ID NO: 152430 - DNA, 25 bp, SARS Virus
tacaagcaaatcgacaattgttctt

SEQ ID NO: 152431 - DNA, 25 bp, SARS Virus
acaagcaaatcagcaattgttctta

SEQ ID NO: 152432 - DNA, 25 bp, SARS Virus
caagcaaatcaagaattgttcttat

SEQ ID NO: 152433 - DNA, 25 bp, SARS Virus
aagcaaatcaacgattgttcttata

SEQ ID NO: 152434 - DNA, 25 bp, SARS Virus
agcaaatcaacagttgttcttatag

SEQ ID NO: 152435 - DNA, 25 bp, SARS Virus
gcaaatcaacaagtgttcttatagt

SEQ ID NO: 152436 - DNA, 25 bp, SARS Virus
caaatcaacaatggttcttatagtg

SEQ ID NO: 152437 - DNA, 25 bp, SARS Virus
aaatcaacaattgttcttatagtga

SEQ ID NO: 152438 - DNA, 25 bp, SARS Virus
aatcaacaattggtcttatagtgaa

SEQ ID NO: 152439 - DNA, 25 bp, SARS Virus
atcaacaattgtgcttatagtgaac

SEQ ID NO: 152440 - DNA, 25 bp, SARS Virus
tcaacaattgttgttatagtgaact

SEQ ID NO: 152441 - DNA, 25 bp, SARS Virus
caacaattgttcgtatagtgaactt

SEQ ID NO: 152442 - DNA, 25 bp, SARS Virus
aacaattgttctgatagtgaacttt

SEQ ID NO: 152443 - DNA, 25 bp, SARS Virus
acaattgttcttgtagtgaactttg

SEQ ID NO: 152444 - DNA, 25 bp, SARS Virus
caattgttcttagagtgaactttgg

SEQ ID NO: 152445 - DNA, 25 bp, SARS Virus
aattgttcttatggtgaactttggt

SEQ ID NO: 152446 - DNA, 25 bp, SARS Virus
attgttcttatagtgaactttggtg

SEQ ID NO: 152447 - DNA, 25 bp, SARS Virus
ttgttcttatagggaactttggtgt

SEQ ID NO: 152448 - DNA, 25 bp, SARS Virus
tgttcttatagtgaactttggtgtt

SEQ ID NO: 152449 - DNA, 25 bp, SARS Virus
gttcttatagtggactttggtgttg

SEQ ID NO: 152450 - DNA, 25 bp, SARS Virus
ttcttatagtgagctttggtgttga

SEQ ID NO: 152451 - DNA, 25 bp, SARS Virus
tcttatagtgaagtttggtgttgag

SEQ ID NO: 152452 - DNA, 25 bp, SARS Virus
cttatagtgaacgttggtgttgaga

SEQ ID NO: 152453 - DNA, 25 bp, SARS Virus
ttatagtgaactgtggtgttgagac

SEQ ID NO: 152454 - DNA, 25 bp, SARS Virus
tatagtgaacttgggtgttgagaca

SEQ ID NO: 152455 - DNA, 25 bp, SARS Virus
atagtgaactttggtgttgagacaa

SEQ ID NO: 152456 - DNA, 25 bp, SARS Virus
tagtgaactttggtgttgagacaac

SEQ ID NO: 152457 - DNA, 25 bp, SARS Virus
agtgaactttggggttgagacaaca

SEQ ID NO: 152458 - DNA, 25 bp, SARS Virus
gtgaactttggtgttgagacaacaa

SEQ ID NO: 152459 - DNA, 25 bp, SARS Virus
tgaactttggtggtgagacaacaaa

SEQ ID NO: 152460 - DNA, 25 bp, SARS Virus
gaactttggtgtggagacaacaaaa

SEQ ID NO: 152461 - DNA, 25 bp, SARS Virus
aactttggtgttgagacaacaaaag

SEQ ID NO: 152462 - DNA, 25 bp, SARS Virus
actttggtgttgggacaacaaaaga

SEQ ID NO: 152463 - DNA, 25 bp, SARS Virus
ctttggtgttgagacaacaaaagag

SEQ ID NO: 152464 - DNA, 25 bp, SARS Virus
tttggtgttgaggcaacaaaagaga

SEQ ID NO: 152465 - DNA, 25 bp, SARS Virus
ttggtgttgagagaacaaaagagat

SEQ ID NO: 152466 - DNA, 25 bp, SARS Virus
tggtgttgagacgacaaaagagatt

SEQ ID NO: 152467 - DNA, 25 bp, SARS Virus
ggtgttgagacagcaaaagagatta

SEQ ID NO: 152468 - DNA, 25 bp, SARS Virus
gtgttgagacaagaaaagagattac

SEQ ID NO: 152469 - DNA, 25 bp, SARS Virus
tgttgagacaacgaaagagattact

SEQ ID NO: 152470 - DNA, 25 bp, SARS Virus
gttgagacaacagaagagattacta

SEQ ID NO: 152471 - DNA, 25 bp, SARS Virus
ttgagacaacaagagagattactat

SEQ ID NO: 152472 - DNA, 25 bp, SARS Virus
tgagacaacaaaggagattactatt

SEQ ID NO: 152473 - DNA, 25 bp, SARS Virus
gagacaacaaaagagattactattc

SEQ ID NO: 152474 - DNA, 25 bp, SARS Virus
agacaacaaaagggattactattcg

SEQ ID NO: 152475 - DNA, 25 bp, SARS Virus
gacaacaaaagagattactattcgg

SEQ ID NO: 152476 - DNA, 25 bp, SARS Virus
acaacaaaagaggttactattcgga

SEQ ID NO: 152477 - DNA, 25 bp, SARS Virus
caacaaaagagagtactattcggat

SEQ ID NO: 152478 - DNA, 25 bp, SARS Virus
aacaaaagagatgactattcggatg

SEQ ID NO: 152479 - DNA, 25 bp, SARS Virus
acaaaagagattgctattcggatgg

SEQ ID NO: 152480 - DNA, 25 bp, SARS Virus
caaaagagattagtattcggatgga

SEQ ID NO: 152481 - DNA, 25 bp, SARS Virus
aaaagagattacgattcggatggaa

SEQ ID NO: 152482 - DNA, 25 bp, SARS Virus
aaagagattactgttcggatggaaa

SEQ ID NO: 152483 - DNA, 25 bp, SARS Virus
aagagattactagtcggatggaaaa

SEQ ID NO: 152484 - DNA, 25 bp, SARS Virus
agagattactatgcggatggaaaaa

SEQ ID NO: 152485 - DNA, 25 bp, SARS Virus
gagattactattgggatggaaaaag

SEQ ID NO: 152486 - DNA, 25 bp, SARS Virus
agattactattcggatggaaaaagg

SEQ ID NO: 152487 - DNA, 25 bp, SARS Virus
gattactattcggatggaaaaaggt

SEQ ID NO: 152488 - DNA, 25 bp, SARS Virus
attactattcgggtggaaaaaggtc

SEQ ID NO: 152489 - DNA, 25 bp, SARS Virus
ttactattcggagggaaaaaggtct

SEQ ID NO: 152490 - DNA, 25 bp, SARS Virus
tactattcggatggaaaaaggtctt

SEQ ID NO: 152491 - DNA, 25 bp, SARS Virus
actattcggatggaaaaaggtcttc

SEQ ID NO: 152492 - DNA, 25 bp, SARS Virus
ctattcggatgggaaaaggtcttct

SEQ ID NO: 152493 - DNA, 25 bp, SARS Virus
tattcggatggagaaaggtcttctc

SEQ ID NO: 152494 - DNA, 25 bp, SARS Virus
attcggatggaagaaggtcttctct

SEQ ID NO: 152495 - DNA, 25 bp, SARS Virus
ttcggatggaaagaggtcttctctt

SEQ ID NO: 152496 - DNA, 25 bp, SARS Virus
tcggatggaaaagggtcttctctta

SEQ ID NO: 152497 - DNA, 25 bp, SARS Virus
cggatggaaaaaggtcttctcttat

SEQ ID NO: 152498 - DNA, 25 bp, SARS Virus
ggatggaaaaaggtcttctcttatt

SEQ ID NO: 152499 - DNA, 25 bp, SARS Virus
gatggaaaaagggcttctcttattt

SEQ ID NO: 152500 - DNA, 25 bp, SARS Virus
atggaaaaaggtgttctcttattta

SEQ ID NO: 152501 - DNA, 25 bp, SARS Virus
tggaaaaaggtcgtctcttatttag

SEQ ID NO: 152502 - DNA, 25 bp, SARS Virus
ggaaaaaggtctgctcttatttagt

SEQ ID NO: 152503 - DNA, 25 bp, SARS Virus
gaaaaaggtcttgtcttatttagta

SEQ ID NO: 152504 - DNA, 25 bp, SARS Virus
aaaaaggtcttcgcttatttagtat

SEQ ID NO: 152505 - DNA, 25 bp, SARS Virus
aaaaggtcttctgttatttagtata

SEQ ID NO: 152506 - DNA, 25 bp, SARS Virus
aaaggtcttctcgtatttagtatag

SEQ ID NO: 152507 - DNA, 25 bp, SARS Virus
aaggtcttctctgatttagtatagt

SEQ ID NO: 152508 - DNA, 25 bp, SARS Virus
aggtcttctcttgtttagtatagta

SEQ ID NO: 152509 - DNA, 25 bp, SARS Virus
ggtcttctcttagttagtatagtaa

SEQ ID NO: 152510 - DNA, 25 bp, SARS Virus
gtcttctcttatgtagtatagtaac

SEQ ID NO: 152511 - DNA, 25 bp, SARS Virus
tcttctcttattgagtatagtaact

SEQ ID NO: 152512 - DNA, 25 bp, SARS Virus
cttctcttatttggtatagtaacta

SEQ ID NO: 152513 - DNA, 25 bp, SARS Virus
ttctcttatttagtatagtaactaa

SEQ ID NO: 152514 - DNA, 25 bp, SARS Virus
tctcttatttaggatagtaactaaa

SEQ ID NO: 152515 - DNA, 25 bp, SARS Virus
ctcttatttagtgtagtaactaaac

SEQ ID NO: 152516 - DNA, 25 bp, SARS Virus
tcttatttagtagagtaactaaact

SEQ ID NO: 152517 - DNA, 25 bp, SARS Virus
cttatttagtatggtaactaaacta

SEQ ID NO: 152518 - DNA, 25 bp, SARS Virus
ttatttagtatagtaactaaactaa

SEQ ID NO: 152519 - DNA, 25 bp, SARS Virus
tatttagtataggaactaaactaag

SEQ ID NO: 152520 - DNA, 25 bp, SARS Virus
atttagtatagtgactaaactaaga

SEQ ID NO: 152521 - DNA, 25 bp, SARS Virus
tttagtatagtagctaaactaagag

SEQ ID NO: 152522 - DNA, 25 bp, SARS Virus
ttagtatagtaagtaaactaagagg

SEQ ID NO: 152523 - DNA, 25 bp, SARS Virus
tagtatagtaacgaaactaagagga

SEQ ID NO: 152524 - DNA, 25 bp, SARS Virus
agtatagtaactgaactaagaggaa

SEQ ID NO: 152525 - DNA, 25 bp, SARS Virus
gtatagtaactagactaagaggaat

SEQ ID NO: 152526 - DNA, 25 bp, SARS Virus
tatagtaactaagctaagaggaatt

SEQ ID NO: 152527 - DNA, 25 bp, SARS Virus
atagtaactaaagtaagaggaattc

SEQ ID NO: 152528 - DNA, 25 bp, SARS Virus
tagtaactaaacgaagaggaattct

SEQ ID NO: 152529 - DNA, 25 bp, SARS Virus
agtaactaaactgagaggaattctc

SEQ ID NO: 152530 - DNA, 25 bp, SARS Virus
gtaactaaactaggaggaattctct

SEQ ID NO: 152531 - DNA, 25 bp, SARS Virus
taactaaactaagaggaattctctg

SEQ ID NO: 152532 - DNA, 25 bp, SARS Virus
aactaaactaaggggaattctctgt

SEQ ID NO: 152533 - DNA, 25 bp, SARS Virus
actaaactaagaggaattctctgta

SEQ ID NO: 152534 - DNA, 25 bp, SARS Virus
ctaaactaagaggaattctctgtaa

SEQ ID NO: 152535 - DNA, 25 bp, SARS Virus
taaactaagagggattctctgtaat

SEQ ID NO: 152536 - DNA, 25 bp, SARS Virus
aaactaagaggagttctctgtaatg

SEQ ID NO: 152537 - DNA, 25 bp, SARS Virus
aactaagaggaagtctctgtaatgt

SEQ ID NO: 152538 - DNA, 25 bp, SARS Virus
actaagaggaatgctctgtaatgtc

SEQ ID NO: 152539 - DNA, 25 bp, SARS Virus
ctaagaggaattgtctgtaatgtcg

SEQ ID NO: 152540 - DNA, 25 bp, SARS Virus
taagaggaattcgctgtaatgtcgt

SEQ ID NO: 152541 - DNA, 25 bp, SARS Virus
aagaggaattctgtgtaatgtcgtc

SEQ ID NO: 152542 - DNA, 25 bp, SARS Virus
agaggaattctcggtaatgtcgtca

SEQ ID NO: 152543 - DNA, 25 bp, SARS Virus
gaggaattctctgtaatgtcgtcaa

SEQ ID NO: 152544 - DNA, 25 bp, SARS Virus
aggaattctctggaatgtcgtcaag

SEQ ID NO: 152545 - DNA, 25 bp, SARS Virus
ggaattctctgtgatgtcgtcaagg

SEQ ID NO: 152546 - DNA, 25 bp, SARS Virus
gaattctctgtagtgtcgtcaagga

SEQ ID NO: 152547 - DNA, 25 bp, SARS Virus
aattctctgtaaggtcgtcaaggag

SEQ ID NO: 152548 - DNA, 25 bp, SARS Virus
attctctgtaatgtcgtcaaggaga

SEQ ID NO: 152549 - DNA, 25 bp, SARS Virus
ttctctgtaatggcgtcaaggagaa

SEQ ID NO: 152550 - DNA, 25 bp, SARS Virus
tctctgtaatgtggtcaaggagaat

SEQ ID NO: 152551 - DNA, 25 bp, SARS Virus
ctctgtaatgtcgtcaaggagaatt

SEQ ID NO: 152552 - DNA, 25 bp, SARS Virus
tctgtaatgtcggcaaggagaatta

SEQ ID NO: 152553 - DNA, 25 bp, SARS Virus
ctgtaatgtcgtgaaggagaattaa

SEQ ID NO: 152554 - DNA, 25 bp, SARS Virus
tgtaatgtcgtcgaggagaattaaa

SEQ ID NO: 152555 - DNA, 25 bp, SARS Virus
gtaatgtcgtcagggagaattaaat

SEQ ID NO: 152556 - DNA, 25 bp, SARS Virus
taatgtcgtcaaggagaattaaatt

SEQ ID NO: 152557 - DNA, 25 bp, SARS Virus
aatgtcgtcaaggagaattaaattc

SEQ ID NO: 152558 - DNA, 25 bp, SARS Virus
atgtcgtcaaggggaattaaattct

SEQ ID NO: 152559 - DNA, 25 bp, SARS Virus
tgtcgtcaaggagaattaaattctc

SEQ ID NO: 152560 - DNA, 25 bp, SARS Virus
gtcgtcaaggaggattaaattctcc

SEQ ID NO: 152561 - DNA, 25 bp, SARS Virus
tcgtcaaggagagttaaattctcct

SEQ ID NO: 152562 - DNA, 25 bp, SARS Virus
cgtcaaggagaagtaaattctcctt

SEQ ID NO: 152563 - DNA, 25 bp, SARS Virus
gtcaaggagaatgaaattctccttt

SEQ ID NO: 152564 - DNA, 25 bp, SARS Virus
tcaaggagaattgaattctccttta

SEQ ID NO: 152565 - DNA, 25 bp, SARS Virus
caaggagaattagattctcctttaa

SEQ ID NO: 152566 - DNA, 25 bp, SARS Virus
aaggagaattaagttctcctttaaa

SEQ ID NO: 152567 - DNA, 25 bp, SARS Virus
aggagaattaaagtctcctttaaac

SEQ ID NO: 152568 - DNA, 25 bp, SARS Virus
ggagaattaaatgctcctttaaacg

SEQ ID NO: 152569 - DNA, 25 bp, SARS Virus
gagaattaaattgtcctttaaacga

SEQ ID NO: 152570 - DNA, 25 bp, SARS Virus
agaattaaattcgcctttaaacgag

SEQ ID NO: 152571 - DNA, 25 bp, SARS Virus
gaattaaattctgctttaaacgagt

SEQ ID NO: 152572 - DNA, 25 bp, SARS Virus
aattaaattctcgtttaaacgagta

SEQ ID NO: 152573 - DNA, 25 bp, SARS Virus
attaaattctccgttaaacgagtac

SEQ ID NO: 152574 - DNA, 25 bp, SARS Virus
ttaaattctcctgtaaacgagtaca

SEQ ID NO: 152575 - DNA, 25 bp, SARS Virus
taaattctccttgaaacgagtacag

SEQ ID NO: 152576 - DNA, 25 bp, SARS Virus
aaattctcctttgaacgagtacagt

SEQ ID NO: 152577 - DNA, 25 bp, SARS Virus
aattctcctttagacgagtacagtt

SEQ ID NO: 152578 - DNA, 25 bp, SARS Virus
attctcctttaagcgagtacagttt

SEQ ID NO: 152579 - DNA, 25 bp, SARS Virus
ttctcctttaaaggagtacagtttc

SEQ ID NO: 152580 - DNA, 25 bp, SARS Virus
tctcctttaaacgagtacagtttct

SEQ ID NO: 152581 - DNA, 25 bp, SARS Virus
ctcctttaaacgggtacagtttctc

SEQ ID NO: 152582 - DNA, 25 bp, SARS Virus
tcctttaaacgagtacagtttctca

SEQ ID NO: 152583 - DNA, 25 bp, SARS Virus
cctttaaacgaggacagtttctcac

SEQ ID NO: 152584 - DNA, 25 bp, SARS Virus
ctttaaacgagtgcagtttctcact

SEQ ID NO: 152585 - DNA, 25 bp, SARS Virus
tttaaacgagtagagtttctcactt

SEQ ID NO: 152586 - DNA, 25 bp, SARS Virus
ttaaacgagtacggtttctcactta

SEQ ID NO: 152587 - DNA, 25 bp, SARS Virus
taaacgagtacagtttctcacttat

SEQ ID NO: 152588 - DNA, 25 bp, SARS Virus
aaacgagtacaggttctcacttatc

SEQ ID NO: 152589 - DNA, 25 bp, SARS Virus
aacgagtacagtgtctcacttatcc

SEQ ID NO: 152590 - DNA, 25 bp, SARS Virus
acgagtacagttgctcacttatcct

SEQ ID NO: 152591 - DNA, 25 bp, SARS Virus
cgagtacagtttgtcacttatcctt

SEQ ID NO: 152592 - DNA, 25 bp, SARS Virus
gagtacagtttcgcacttatccttc

SEQ ID NO: 152593 - DNA, 25 bp, SARS Virus
agtacagtttctgacttatccttct

SEQ ID NO: 152594 - DNA, 25 bp, SARS Virus
gtacagtttctcgcttatccttctg

SEQ ID NO: 152595 - DNA, 25 bp, SARS Virus
tacagtttctcagttatccttctgt

SEQ ID NO: 152596 - DNA, 25 bp, SARS Virus
acagtttctcacgtatccttctgtt

SEQ ID NO: 152597 - DNA, 25 bp, SARS Virus
cagtttctcactgatccttctgttg

SEQ ID NO: 152598 - DNA, 25 bp, SARS Virus
agtttctcacttgtccttctgttga

SEQ ID NO: 152599 - DNA, 25 bp, SARS Virus
gtttctcacttagccttctgttgac

SEQ ID NO: 152600 - DNA, 25 bp, SARS Virus
tttctcacttatgcttctgttgacc

SEQ ID NO: 152601 - DNA, 25 bp, SARS Virus
ttctcacttatcgttctgttgacct

SEQ ID NO: 152602 - DNA, 25 bp, SARS Virus
tctcacttatccgtctgttgaccta

SEQ ID NO: 152603 - DNA, 25 bp, SARS Virus
ctcacttatcctgctgttgacctat

SEQ ID NO: 152604 - DNA, 25 bp, SARS Virus
tcacttatccttgtgttgacctatc

SEQ ID NO: 152605 - DNA, 25 bp, SARS Virus
cacttatccttcggttgacctatcc

SEQ ID NO: 152606 - DNA, 25 bp, SARS Virus
acttatccttctgttgacctatcct

SEQ ID NO: 152607 - DNA, 25 bp, SARS Virus
cttatccttctggtgacctatccta

SEQ ID NO: 152608 - DNA, 25 bp, SARS Virus
ttatccttctgtggacctatcctaa

SEQ ID NO: 152609 - DNA, 25 bp, SARS Virus
tatccttctgttgacctatcctaaa

SEQ ID NO: 152610 - DNA, 25 bp, SARS Virus
atccttctgttggcctatcctaaac

SEQ ID NO: 152611 - DNA, 25 bp, SARS Virus
tccttctgttgagctatcctaaaca

SEQ ID NO: 152612 - DNA, 25 bp, SARS Virus
ccttctgttgacgtatcctaaacac

SEQ ID NO: 152613 - DNA, 25 bp, SARS Virus
cttctgttgaccgatcctaaacaca

SEQ ID NO: 152614 - DNA, 25 bp, SARS Virus
ttctgttgacctgtcctaaacacaa

SEQ ID NO: 152615 - DNA, 25 bp, SARS Virus
tctgttgacctagcctaaacacaag

SEQ ID NO: 152616 - DNA, 25 bp, SARS Virus
ctgttgacctatgctaaacacaagg

SEQ ID NO: 152617 - DNA, 25 bp, SARS Virus
tgttgacctatcgtaaacacaagga

SEQ ID NO: 152618 - DNA, 25 bp, SARS Virus
gttgacctatccgaaacacaaggag

SEQ ID NO: 152619 - DNA, 25 bp, SARS Virus
ttgacctatcctgaacacaaggagg

SEQ ID NO: 152620 - DNA, 25 bp, SARS Virus
tgacctatcctagacacaaggaggt

SEQ ID NO: 152621 - DNA, 25 bp, SARS Virus
gacctatcctaagcacaaggaggtc

SEQ ID NO: 152622 - DNA, 25 bp, SARS Virus
acctatcctaaagacaaggaggtct

SEQ ID NO: 152623 - DNA, 25 bp, SARS Virus
cctatcctaaacgcaaggaggtctt

SEQ ID NO: 152624 - DNA, 25 bp, SARS Virus
ctatcctaaacagaaggaggtcttt

SEQ ID NO: 152625 - DNA, 25 bp, SARS Virus
tatcctaaacacgaggaggtctttt

SEQ ID NO: 152626 - DNA, 25 bp, SARS Virus
atcctaaacacagggaggtctttta

SEQ ID NO: 152627 - DNA, 25 bp, SARS Virus
tcctaaacacaaggaggtcttttac

SEQ ID NO: 152628 - DNA, 25 bp, SARS Virus
cctaaacacaaggaggtcttttaca

SEQ ID NO: 152629 - DNA, 25 bp, SARS Virus
ctaaacacaagggggtcttttacat

SEQ ID NO: 152630 - DNA, 25 bp, SARS Virus
taaacacaaggaggtcttttacatc

SEQ ID NO: 152631 - DNA, 25 bp, SARS Virus
aaacacaaggaggtcttttacatca

SEQ ID NO: 152632 - DNA, 25 bp, SARS Virus
aacacaaggagggcttttacatcaa

SEQ ID NO: 152633 - DNA, 25 bp, SARS Virus
acacaaggaggtgttttacatcaat

SEQ ID NO: 152634 - DNA, 25 bp, SARS Virus
cacaaggaggtcgtttacatcaatc

SEQ ID NO: 152635 - DNA, 25 bp, SARS Virus
acaaggaggtctgttacatcaatcg

SEQ ID NO: 152636 - DNA, 25 bp, SARS Virus
caaggaggtcttgtacatcaatcgt

SEQ ID NO: 152637 - DNA, 25 bp, SARS Virus
aaggaggtctttgacatcaatcgta

SEQ ID NO: 152638 - DNA, 25 bp, SARS Virus
aggaggtcttttgcatcaatcgtac

SEQ ID NO: 152639 - DNA, 25 bp, SARS Virus
ggaggtcttttagatcaatcgtacg

SEQ ID NO: 152640 - DNA, 25 bp, SARS Virus
gaggtcttttacgtcaatcgtacgt

SEQ ID NO: 152641 - DNA, 25 bp, SARS Virus
aggtcttttacagcaatcgtacgta

SEQ ID NO: 152642 - DNA, 25 bp, SARS Virus
ggtcttttacatgaatcgtacgtac

SEQ ID NO: 152643 - DNA, 25 bp, SARS Virus
gtcttttacatcgatcgtacgtacc

SEQ ID NO: 152644 - DNA, 25 bp, SARS Virus
tcttttacatcagtcgtacgtacca

SEQ ID NO: 152645 - DNA, 25 bp, SARS Virus
cttttacatcaagcgtacgtaccat

SEQ ID NO: 152646 - DNA, 25 bp, SARS Virus
ttttacatcaatggtacgtaccata

SEQ ID NO: 152647 - DNA, 25 bp, SARS Virus
tttacatcaatcgtacgtaccatat

SEQ ID NO: 152648 - DNA, 25 bp, SARS Virus
ttacatcaatcggacgtaccatatc

SEQ ID NO: 152649 - DNA, 25 bp, SARS Virus
tacatcaatcgtgcgtaccatatcg

SEQ ID NO: 152650 - DNA, 25 bp, SARS Virus
acatcaatcgtaggtaccatatcgg

SEQ ID NO: 152651 - DNA, 25 bp, SARS Virus
catcaatcgtacgtaccatatcggt

SEQ ID NO: 152652 - DNA, 25 bp, SARS Virus
atcaatcgtacggaccatatcggta

SEQ ID NO: 152653 - DNA, 25 bp, SARS Virus
tcaatcgtacgtgccatatcggtag

SEQ ID NO: 152654 - DNA, 25 bp, SARS Virus
caatcgtacgtagcatatcggtagt

SEQ ID NO: 152655 - DNA, 25 bp, SARS Virus
aatcgtacgtacgatatcggtagtt

SEQ ID NO: 152656 - DNA, 25 bp, SARS Virus
atcgtacgtaccgtatcggtagtta

SEQ ID NO: 152657 - DNA, 25 bp, SARS Virus
tcgtacgtaccagatcggtagttaa

SEQ ID NO: 152658 - DNA, 25 bp, SARS Virus
cgtacgtaccatgtcggtagttaaa

SEQ ID NO: 152659 - DNA, 25 bp, SARS Virus
gtacgtaccatagcggtagttaaac

SEQ ID NO: 152660 - DNA, 25 bp, SARS Virus
tacgtaccatatgggtagttaaaca

SEQ ID NO: 152661 - DNA, 25 bp, SARS Virus
acgtaccatatcggtagttaaacaa

SEQ ID NO: 152662 - DNA, 25 bp, SARS Virus
cgtaccatatcggtagttaaacaag

SEQ ID NO: 152663 - DNA, 25 bp, SARS Virus
gtaccatatcgggagttaaacaagg

SEQ ID NO: 152664 - DNA, 25 bp, SARS Virus
taccatatcggtggttaaacaagga

SEQ ID NO: 152665 - DNA, 25 bp, SARS Virus
accatatcggtagttaaacaaggaa

SEQ ID NO: 152666 - DNA, 25 bp, SARS Virus
ccatatcggtaggtaaacaaggaag

SEQ ID NO: 152667 - DNA, 25 bp, SARS Virus
catatcggtagtgaaacaaggaagc

SEQ ID NO: 152668 - DNA, 25 bp, SARS Virus
atatcggtagttgaacaaggaagcc

SEQ ID NO: 152669 - DNA, 25 bp, SARS Virus
tatcggtagttagacaaggaagccg

SEQ ID NO: 152670 - DNA, 25 bp, SARS Virus
atcggtagttaagcaaggaagccga

SEQ ID NO: 152671 - DNA, 25 bp, SARS Virus
tcggtagttaaagaaggaagccgaa

SEQ ID NO: 152672 - DNA, 25 bp, SARS Virus
cggtagttaaacgaggaagccgaac

SEQ ID NO: 152673 - DNA, 25 bp, SARS Virus
ggtagttaaacagggaagccgaacg

SEQ ID NO: 152674 - DNA, 25 bp, SARS Virus
gtagttaaacaaggaagccgaacgg

SEQ ID NO: 152675 - DNA, 25 bp, SARS Virus
tagttaaacaaggaagccgaacggt

SEQ ID NO: 152676 - DNA, 25 bp, SARS Virus
agttaaacaagggagccgaacggtt

SEQ ID NO: 152677 - DNA, 25 bp, SARS Virus
gttaaacaaggaggccgaacggttc

SEQ ID NO: 152678 - DNA, 25 bp, SARS Virus
ttaaacaaggaagccgaacggttct

SEQ ID NO: 152679 - DNA, 25 bp, SARS Virus
taaacaaggaaggcgaacggttcta

SEQ ID NO: 152680 - DNA, 25 bp, SARS Virus
aaacaaggaagcggaacggttctat

SEQ ID NO: 152681 - DNA, 25 bp, SARS Virus
aacaaggaagccgaacggttctatc

SEQ ID NO: 152682 - DNA, 25 bp, SARS Virus
acaaggaagccggacggttctatca

SEQ ID NO: 152683 - DNA, 25 bp, SARS Virus
caaggaagccgagcggttctatcaa

SEQ ID NO: 152684 - DNA, 25 bp, SARS Virus
aaggaagccgaagggttctatcaat

SEQ ID NO: 152685 - DNA, 25 bp, SARS Virus
aggaagccgaacggttctatcaatc

SEQ ID NO: 152686 - DNA, 25 bp, SARS Virus
ggaagccgaacggttctatcaatcg

SEQ ID NO: 152687 - DNA, 25 bp, SARS Virus
gaagccgaacgggtctatcaatcgg

SEQ ID NO: 152688 - DNA, 25 bp, SARS Virus
aagccgaacggtgctatcaatcggg

SEQ ID NO: 152689 - DNA, 25 bp, SARS Virus
agccgaacggttgtatcaatcgggg

SEQ ID NO: 152690 - DNA, 25 bp, SARS Virus
gccgaacggttcgatcaatcggggt

SEQ ID NO: 152691 - DNA, 25 bp, SARS Virus
ccgaacggttctgtcaatcggggtt

SEQ ID NO: 152692 - DNA, 25 bp, SARS Virus
cgaacggttctagcaatcggggtta

SEQ ID NO: 152693 - DNA, 25 bp, SARS Virus
gaacggttctatgaatcggggttaa

SEQ ID NO: 152694 - DNA, 25 bp, SARS Virus
aacggttctatcgatcggggttaat

SEQ ID NO: 152695 - DNA, 25 bp, SARS Virus
acggttctatcagtcggggttaatt

SEQ ID NO: 152696 - DNA, 25 bp, SARS Virus
cggttctatcaagcggggttaattt

SEQ ID NO: 152697 - DNA, 25 bp, SARS Virus
ggttctatcaatgggggttaatttt

SEQ ID NO: 152698 - DNA, 25 bp, SARS Virus
gttctatcaatcggggttaattttt

SEQ ID NO: 152699 - DNA, 25 bp, SARS Virus
ttctatcaatcggggttaattttta

SEQ ID NO: 152700 - DNA, 25 bp, SARS Virus
tctatcaatcggggttaatttttac

SEQ ID NO: 152701 - DNA, 25 bp, SARS Virus
ctatcaatcggggttaatttttacg

SEQ ID NO: 152702 - DNA, 25 bp, SARS Virus
tatcaatcgggggtaatttttacga

SEQ ID NO: 152703 - DNA, 25 bp, SARS Virus
atcaatcggggtgaatttttacgaa

SEQ ID NO: 152704 - DNA, 25 bp, SARS Virus
tcaatcggggttgatttttacgaag

SEQ ID NO: 152705 - DNA, 25 bp, SARS Virus
caatcggggttagtttttacgaagg

SEQ ID NO: 152706 - DNA, 25 bp, SARS Virus
aatcggggttaagttttacgaaggc

SEQ ID NO: 152707 - DNA, 25 bp, SARS Virus
atcggggttaatgtttacgaaggct

SEQ ID NO: 152708 - DNA, 25 bp, SARS Virus
tcggggttaattgttacgaaggcta

SEQ ID NO: 152709 - DNA, 25 bp, SARS Virus
cggggttaatttgtacgaaggctac

SEQ ID NO: 152710 - DNA, 25 bp, SARS Virus
ggggttaattttgacgaaggctact

SEQ ID NO: 152711 - DNA, 25 bp, SARS Virus
gggttaatttttgcgaaggctacta

SEQ ID NO: 152712 - DNA, 25 bp, SARS Virus
ggttaatttttaggaaggctactac

SEQ ID NO: 152713 - DNA, 25 bp, SARS Virus
gttaatttttacgaaggctactact

SEQ ID NO: 152714 - DNA, 25 bp, SARS Virus
ttaatttttacggaggctactacta

SEQ ID NO: 152715 - DNA, 25 bp, SARS Virus
taatttttacgagggctactactac

SEQ ID NO: 152716 - DNA, 25 bp, SARS Virus
aatttttacgaaggctactactacg

SEQ ID NO: 152717 - DNA, 25 bp, SARS Virus
atttttacgaaggctactactacgt

SEQ ID NO: 152718 - DNA, 25 bp, SARS Virus
tttttacgaagggtactactacgta

SEQ ID NO: 152719 - DNA, 25 bp, SARS Virus
ttttacgaaggcgactactacgtaa

SEQ ID NO: 152720 - DNA, 25 bp, SARS Virus
tttacgaaggctgctactacgtaaa

SEQ ID NO: 152721 - DNA, 25 bp, SARS Virus
ttacgaaggctagtactacgtaaat

SEQ ID NO: 152722 - DNA, 25 bp, SARS Virus
tacgaaggctacgactacgtaaatg

SEQ ID NO: 152723 - DNA, 25 bp, SARS Virus
acgaaggctactgctacgtaaatgt

SEQ ID NO: 152724 - DNA, 25 bp, SARS Virus
cgaaggctactagtacgtaaatgta

SEQ ID NO: 152725 - DNA, 25 bp, SARS Virus
gaaggctactacgacgtaaatgtaa

SEQ ID NO: 152726 - DNA, 25 bp, SARS Virus
aaggctactactgcgtaaatgtaaa

SEQ ID NO: 152727 - DNA, 25 bp, SARS Virus
aggctactactaggtaaatgtaaac

SEQ ID NO: 152728 - DNA, 25 bp, SARS Virus
ggctactactacgtaaatgtaaaca

SEQ ID NO: 152729 - DNA, 25 bp, SARS Virus
gctactactacggaaatgtaaacat

SEQ ID NO: 152730 - DNA, 25 bp, SARS Virus
ctactactacgtgaatgtaaacatt

SEQ ID NO: 152731 - DNA, 25 bp, SARS Virus
tactactacgtagatgtaaacattg

SEQ ID NO: 152732 - DNA, 25 bp, SARS Virus
actactacgtaagtgtaaacattgt

SEQ ID NO: 152733 - DNA, 25 bp, SARS Virus
ctactacgtaaaggtaaacattgtt

SEQ ID NO: 152734 - DNA, 25 bp, SARS Virus
tactacgtaaatgtaaacattgttt

SEQ ID NO: 152735 - DNA, 25 bp, SARS Virus
actacgtaaatggaaacattgtttt

SEQ ID NO: 152736 - DNA, 25 bp, SARS Virus
ctacgtaaatgtgaacattgttttc

SEQ ID NO: 152737 - DNA, 25 bp, SARS Virus
tacgtaaatgtagacattgttttcg

SEQ ID NO: 152738 - DNA, 25 bp, SARS Virus
acgtaaatgtaagcattgttttcga

SEQ ID NO: 152739 - DNA, 25 bp, SARS Virus
cgtaaatgtaaagattgttttcgac

SEQ ID NO: 152740 - DNA, 25 bp, SARS Virus
gtaaatgtaaacgttgttttcgaca

SEQ ID NO: 152741 - DNA, 25 bp, SARS Virus
taaatgtaaacagtgttttcgacag

SEQ ID NO: 152742 - DNA, 25 bp, SARS Virus
aaatgtaaacatggttttcgacagg

SEQ ID NO: 152743 - DNA, 25 bp, SARS Virus
aatgtaaacattgttttcgacaggt

SEQ ID NO: 152744 - DNA, 25 bp, SARS Virus
atgtaaacattggtttcgacaggtg

SEQ ID NO: 152745 - DNA, 25 bp, SARS Virus
tgtaaacattgtgttcgacaggtgg

SEQ ID NO: 152746 - DNA, 25 bp, SARS Virus
gtaaacattgttgtcgacaggtggt

SEQ ID NO: 152747 - DNA, 25 bp, SARS Virus
taaacattgtttgcgacaggtggta

SEQ ID NO: 152748 - DNA, 25 bp, SARS Virus
aaacattgttttggacaggtggtac

SEQ ID NO: 152749 - DNA, 25 bp, SARS Virus
aacattgttttcgacaggtggtact

SEQ ID NO: 152750 - DNA, 25 bp, SARS Virus
acattgttttcggcaggtggtactc

SEQ ID NO: 152751 - DNA, 25 bp, SARS Virus
cattgttttcgagaggtggtactct

SEQ ID NO: 152752 - DNA, 25 bp, SARS Virus
attgttttcgacgggtggtactctt

SEQ ID NO: 152753 - DNA, 25 bp, SARS Virus
ttgttttcgacaggtggtactcttt

SEQ ID NO: 152754 - DNA, 25 bp, SARS Virus
tgttttcgacaggtggtactcttta

SEQ ID NO: 152755 - DNA, 25 bp, SARS Virus
gttttcgacagggggtactctttac

SEQ ID NO: 152756 - DNA, 25 bp, SARS Virus
ttttcgacaggtggtactctttacc

SEQ ID NO: 152757 - DNA, 25 bp, SARS Virus
tttcgacaggtggtactctttaccg

SEQ ID NO: 152758 - DNA, 25 bp, SARS Virus
ttcgacaggtgggactctttaccgg

SEQ ID NO: 152759 - DNA, 25 bp, SARS Virus
tcgacaggtggtgctctttaccggg

SEQ ID NO: 152760 - DNA, 25 bp, SARS Virus
cgacaggtggtagtctttaccgggt

SEQ ID NO: 152761 - DNA, 25 bp, SARS Virus
gacaggtggtacgctttaccgggta

SEQ ID NO: 152762 - DNA, 25 bp, SARS Virus
acaggtggtactgtttaccgggtat

SEQ ID NO: 152763 - DNA, 25 bp, SARS Virus
caggtggtactcgttaccgggtatt

SEQ ID NO: 152764 - DNA, 25 bp, SARS Virus
aggtggtactctgtaccgggtattc

SEQ ID NO: 152765 - DNA, 25 bp, SARS Virus
ggtggtactcttgaccgggtattcg

SEQ ID NO: 152766 - DNA, 25 bp, SARS Virus
gtggtactctttgccgggtattcga

SEQ ID NO: 152767 - DNA, 25 bp, SARS Virus
tggtactctttagcgggtattcgaa

SEQ ID NO: 152768 - DNA, 25 bp, SARS Virus
ggtactctttacggggtattcgaac

SEQ ID NO: 152769 - DNA, 25 bp, SARS Virus
gtactctttaccgggtattcgaaca

SEQ ID NO: 152770 - DNA, 25 bp, SARS Virus
tactctttaccgggtattcgaacat

SEQ ID NO: 152771 - DNA, 25 bp, SARS Virus
actctttaccgggtattcgaacatt

SEQ ID NO: 152772 - DNA, 25 bp, SARS Virus
ctctttaccggggattcgaacattt

SEQ ID NO: 152773 - DNA, 25 bp, SARS Virus
tctttaccgggtgttcgaacatttc

SEQ ID NO: 152774 - DNA, 25 bp, SARS Virus
ctttaccgggtagtcgaacatttcc

SEQ ID NO: 152775 - DNA, 25 bp, SARS Virus
tttaccgggtatgcgaacatttcca

SEQ ID NO: 152776 - DNA, 25 bp, SARS Virus
ttaccgggtattggaacatttccag

SEQ ID NO: 152777 - DNA, 25 bp, SARS Virus
gatttttaaagttgtcctatcattt

SEQ ID NO: 152778 - DNA, 25 bp, SARS Virus
atttttaaagtattcctatcatttg

SEQ ID NO: 152779 - DNA, 25 bp, SARS Virus
tttttaaagtagtcctatcatttgg

SEQ ID NO: 152780 - DNA, 25 bp, SARS Virus
ttttaaagtagttctatcatttggg

SEQ ID NO: 152781 - DNA, 25 bp, SARS Virus
tttaaagtagtcttatcatttgggg

SEQ ID NO: 152782 - DNA, 25 bp, SARS Virus
ttaaagtagtcctatcatttggggg

SEQ ID NO: 152783 - DNA, 25 bp, SARS Virus
taaagtagtcctttcatttgggggg

SEQ ID NO: 152784 - DNA, 25 bp, SARS Virus
aaagtagtcctatcatttgggggga

SEQ ID NO: 152785 - DNA, 25 bp, SARS Virus
aagtagtcctattatttggggggag

SEQ ID NO: 152786 - DNA, 25 bp, SARS Virus
agtagtcctatcttttggggggagt

SEQ ID NO: 152787 - DNA, 25 bp, SARS Virus
gtagtcctatcatttggggggagta

SEQ ID NO: 152788 - DNA, 25 bp, SARS Virus
tagtcctatcatttggggggagtat

SEQ ID NO: 152789 - DNA, 25 bp, SARS Virus
agtcctatcatttggggggagtatc

SEQ ID NO: 152790 - DNA, 25 bp, SARS Virus
gtcctatcattttgggggagtatct

SEQ ID NO: 152791 - DNA, 25 bp, SARS Virus
tcctatcatttgtggggagtatcta

SEQ ID NO: 152792 - DNA, 25 bp, SARS Virus
cctatcatttggtgggagtatctac

SEQ ID NO: 152793 - DNA, 25 bp, SARS Virus
ctatcatttgggtggagtatctact

SEQ ID NO: 152794 - DNA, 25 bp, SARS Virus
tatcatttggggtgagtatctactt

SEQ ID NO: 152795 - DNA, 25 bp, SARS Virus
atcatttgggggtagtatctacttc

SEQ ID NO: 152796 - DNA, 25 bp, SARS Virus
tcatttggggggtgtatctacttca

SEQ ID NO: 152797 - DNA, 25 bp, SARS Virus
catttggggggattatctacttcat

SEQ ID NO: 152798 - DNA, 25 bp, SARS Virus
atttggggggagtatctacttcata

SEQ ID NO: 152799 - DNA, 25 bp, SARS Virus
tttggggggagtttctacttcatac

SEQ ID NO: 152800 - DNA, 25 bp, SARS Virus
ttggggggagtatctacttcataca

SEQ ID NO: 152801 - DNA, 25 bp, SARS Virus
tggggggagtatttacttcatacaa

SEQ ID NO: 152802 - DNA, 25 bp, SARS Virus
ggggggagtatctacttcatacaac

SEQ ID NO: 152803 - DNA, 25 bp, SARS Virus
gggggagtatcttcttcatacaact

SEQ ID NO: 152804 - DNA, 25 bp, SARS Virus
ggggagtatctatttcatacaactc

SEQ ID NO: 152805 - DNA, 25 bp, SARS Virus
gggagtatctacttcatacaactca

SEQ ID NO: 152806 - DNA, 25 bp, SARS Virus
ggagtatctacttcatacaactcac

SEQ ID NO: 152807 - DNA, 25 bp, SARS Virus
gagtatctactttatacaactcaca

SEQ ID NO: 152808 - DNA, 25 bp, SARS Virus
agtatctacttcttacaactcacat

SEQ ID NO: 152809 - DNA, 25 bp, SARS Virus
gtatctacttcatacaactcacatt

SEQ ID NO: 152810 - DNA, 25 bp, SARS Virus
tatctacttcattcaactcacatta

SEQ ID NO: 152811 - DNA, 25 bp, SARS Virus
atctacttcatataactcacattaa

SEQ ID NO: 152812 - DNA, 25 bp, SARS Virus
tctacttcatactactcacattaat

SEQ ID NO: 152813 - DNA, 25 bp, SARS Virus
ctacttcatacatctcacattaatc

SEQ ID NO: 152814 - DNA, 25 bp, SARS Virus
tacttcatacaattcacattaatcc

SEQ ID NO: 152815 - DNA, 25 bp, SARS Virus
acttcatacaactcacattaatcct

SEQ ID NO: 152816 - DNA, 25 bp, SARS Virus
cttcatacaacttacattaatcctc

SEQ ID NO: 152817 - DNA, 25 bp, SARS Virus
ttcatacaactctcattaatcctcg

SEQ ID NO: 152818 - DNA, 25 bp, SARS Virus
tcatacaactcatattaatcctcga

SEQ ID NO: 152819 - DNA, 25 bp, SARS Virus
catacaactcactttaatcctcgaa

SEQ ID NO: 152820 - DNA, 25 bp, SARS Virus
atacaactcacattaatcctcgaac

SEQ ID NO: 152821 - DNA, 25 bp, SARS Virus
tacaactcacattaatcctcgaact

SEQ ID NO: 152822 - DNA, 25 bp, SARS Virus
acaactcacatttatcctcgaactt

SEQ ID NO: 152823 - DNA, 25 bp, SARS Virus
caactcacattattcctcgaacttg

SEQ ID NO: 152824 - DNA, 25 bp, SARS Virus
aactcacattaatcctcgaacttgt

SEQ ID NO: 152825 - DNA, 25 bp, SARS Virus
actcacattaattctcgaacttgta

SEQ ID NO: 152826 - DNA, 25 bp, SARS Virus
ctcacattaatcttcgaacttgtag

SEQ ID NO: 152827 - DNA, 25 bp, SARS Virus
tcacattaatcctcgaacttgtagt

SEQ ID NO: 152828 - DNA, 25 bp, SARS Virus
cacattaatccttgaacttgtagta

SEQ ID NO: 152829 - DNA, 25 bp, SARS Virus
acattaatcctctaacttgtagtag

SEQ ID NO: 152830 - DNA, 25 bp, SARS Virus
cattaatcctcgtacttgtagtagt

SEQ ID NO: 152831 - DNA, 25 bp, SARS Virus
attaatcctcgatcttgtagtagtt

SEQ ID NO: 152832 - DNA, 25 bp, SARS Virus
ttaatcctcgaatttgtagtagttt

SEQ ID NO: 152833 - DNA, 25 bp, SARS Virus
taatcctcgaacttgtagtagtttt

SEQ ID NO: 152834 - DNA, 25 bp, SARS Virus
aatcctcgaacttgtagtagttttc

SEQ ID NO: 152835 - DNA, 25 bp, SARS Virus
atcctcgaacttttagtagttttca

SEQ ID NO: 152836 - DNA, 25 bp, SARS Virus
tcctcgaacttgtagtagttttcac

SEQ ID NO: 152837 - DNA, 25 bp, SARS Virus
cctcgaacttgttgtagttttcacc

SEQ ID NO: 152838 - DNA, 25 bp, SARS Virus
ctcgaacttgtattagttttcacca

SEQ ID NO: 152839 - DNA, 25 bp, SARS Virus
tcgaacttgtagtagttttcaccac

SEQ ID NO: 152840 - DNA, 25 bp, SARS Virus
cgaacttgtagttgttttcaccacg

SEQ ID NO: 152841 - DNA, 25 bp, SARS Virus
gaacttgtagtatttttcaccacgt

SEQ ID NO: 152842 - DNA, 25 bp, SARS Virus
aacttgtagtagttttcaccacgtg

SEQ ID NO: 152843 - DNA, 25 bp, SARS Virus
acttgtagtagttttcaccacgtgg

SEQ ID NO: 152844 - DNA, 25 bp, SARS Virus
cttgtagtagttttcaccacgtggc

SEQ ID NO: 152845 - DNA, 25 bp, SARS Virus
ttgtagtagttttcaccacgtggcc

SEQ ID NO: 152846 - DNA, 25 bp, SARS Virus
tgtagtagtttttaccacgtggcca

SEQ ID NO: 152847 - DNA, 25 bp, SARS Virus
gtagtagttttctccacgtggccag

SEQ ID NO: 152848 - DNA, 25 bp, SARS Virus
tagtagttttcatcacgtggccagt

SEQ ID NO: 152849 - DNA, 25 bp, SARS Virus
agtagttttcactacgtggccagtt

SEQ ID NO: 152850 - DNA, 25 bp, SARS Virus
gtagttttcacctcgtggccagttc

SEQ ID NO: 152851 - DNA, 25 bp, SARS Virus
tagttttcaccatgtggccagttcc

SEQ ID NO: 152852 - DNA, 25 bp, SARS Virus
agttttcaccacttggccagttcca

SEQ ID NO: 152853 - DNA, 25 bp, SARS Virus
gttttcaccacgtggccagttccag

SEQ ID NO: 152854 - DNA, 25 bp, SARS Virus
ttttcaccacgttgccagttccagt

SEQ ID NO: 152855 - DNA, 25 bp, SARS Virus
tttcaccacgtgtccagttccagtg

SEQ ID NO: 152856 - DNA, 25 bp, SARS Virus
ttcaccacgtggtcagttccagtga

SEQ ID NO: 152857 - DNA, 25 bp, SARS Virus
tcaccacgtggctagttccagtgat

SEQ ID NO: 152858 - DNA, 25 bp, SARS Virus
caccacgtggcctgttccagtgatg

SEQ ID NO: 152859 - DNA, 25 bp, SARS Virus
accacgtggccatttccagtgatgg

SEQ ID NO: 152860 - DNA, 25 bp, SARS Virus
ccacgtggccagttccagtgatggt

SEQ ID NO: 152861 - DNA, 25 bp, SARS Virus
cacgtggccagttccagtgatggtg

SEQ ID NO: 152862 - DNA, 25 bp, SARS Virus
acgtggccagtttcagtgatggtga

SEQ ID NO: 152863 - DNA, 25 bp, SARS Virus
cgtggccagttctagtgatggtgat

SEQ ID NO: 152864 - DNA, 25 bp, SARS Virus
gtggccagttcctgtgatggtgatc

SEQ ID NO: 152865 - DNA, 25 bp, SARS Virus
tggccagttccattgatggtgatca

SEQ ID NO: 152866 - DNA, 25 bp, SARS Virus
ggccagttccagtgatggtgatcac

SEQ ID NO: 152867 - DNA, 25 bp, SARS Virus
gccagttccagttatggtgatcact

SEQ ID NO: 152868 - DNA, 25 bp, SARS Virus
ccagttccagtgttggtgatcactc

SEQ ID NO: 152869 - DNA, 25 bp, SARS Virus
cagttccagtgatggtgatcactct

SEQ ID NO: 152870 - DNA, 25 bp, SARS Virus
agttccagtgattgtgatcactctc

SEQ ID NO: 152871 - DNA, 25 bp, SARS Virus
gttccagtgatgttgatcactctca

SEQ ID NO: 152872 - DNA, 25 bp, SARS Virus
ttccagtgatggtgatcactctcat

SEQ ID NO: 152873 - DNA, 25 bp, SARS Virus
tccagtgatggttatcactctcatt

SEQ ID NO: 152874 - DNA, 25 bp, SARS Virus
ccagtgatggtgttcactctcattc

SEQ ID NO: 152875 - DNA, 25 bp, SARS Virus
cagtgatggtgatcactctcattct

SEQ ID NO: 152876 - DNA, 25 bp, SARS Virus
agtgatggtgattactctcattctt

SEQ ID NO: 152877 - DNA, 25 bp, SARS Virus
gtgatggtgatctctctcattcttt

SEQ ID NO: 152878 - DNA, 25 bp, SARS Virus
tgatggtgatcattctcattcttta

SEQ ID NO: 152879 - DNA, 25 bp, SARS Virus
gatggtgatcactctcattctttat

SEQ ID NO: 152880 - DNA, 25 bp, SARS Virus
atggtgatcactttcattctttatt

SEQ ID NO: 152881 - DNA, 25 bp, SARS Virus
tggtgatcactctcattctttatta

SEQ ID NO: 152882 - DNA, 25 bp, SARS Virus
ggtgatcactcttattctttattat

SEQ ID NO: 152883 - DNA, 25 bp, SARS Virus
gtgatcactctctttctttattatt

SEQ ID NO: 152884 - DNA, 25 bp, SARS Virus
tgatcactctcattctttattattc

SEQ ID NO: 152885 - DNA, 25 bp, SARS Virus
gatcactctcattctttattattct

SEQ ID NO: 152886 - DNA, 25 bp, SARS Virus
atcactctcattttttattattctt

SEQ ID NO: 152887 - DNA, 25 bp, SARS Virus
tcactctcattctttattattcttt

SEQ ID NO: 152888 - DNA, 25 bp, SARS Virus
cactctcattctttattattctttt

SEQ ID NO: 152889 - DNA, 25 bp, SARS Virus
actctcattctttattattctttta

SEQ ID NO: 152890 - DNA, 25 bp, SARS Virus
ctctcattcttttttattcttttat

SEQ ID NO: 152891 - DNA, 25 bp, SARS Virus
tctcattctttattattcttttatt

SEQ ID NO: 152892 - DNA, 25 bp, SARS Virus
ctcattctttattattcttttattt

SEQ ID NO: 152893 - DNA, 25 bp, SARS Virus
tcattctttatttttcttttatttg

SEQ ID NO: 152894 - DNA, 25 bp, SARS Virus
cattctttattattcttttatttgt

SEQ ID NO: 152895 - DNA, 25 bp, SARS Virus
attctttattattcttttatttgta

SEQ ID NO: 152896 - DNA, 25 bp, SARS Virus
ttctttattatttttttatttgtac

SEQ ID NO: 152897 - DNA, 25 bp, SARS Virus
tctttattattcttttatttgtaca

SEQ ID NO: 152898 - DNA, 25 bp, SARS Virus
ctttattattcttttatttgtacaa

SEQ ID NO: 152899 - DNA, 25 bp, SARS Virus
tttattattcttttatttgtacaag

SEQ ID NO: 152900 - DNA, 25 bp, SARS Virus
ttattattcttttatttgtacaagc

SEQ ID NO: 152901 - DNA, 25 bp, SARS Virus
tattattcttttttttgtacaagca

SEQ ID NO: 152902 - DNA, 25 bp, SARS Virus
attattcttttatttgtacaagcaa

SEQ ID NO: 152903 - DNA, 25 bp, SARS Virus
ttattcttttatttgtacaagcaaa

SEQ ID NO: 152904 - DNA, 25 bp, SARS Virus
tattcttttatttgtacaagcaaat

SEQ ID NO: 152905 - DNA, 25 bp, SARS Virus
attcttttatttttacaagcaaatc

SEQ ID NO: 152906 - DNA, 25 bp, SARS Virus
ttcttttatttgtacaagcaaatca

SEQ ID NO: 152907 - DNA, 25 bp, SARS Virus
tcttttatttgttcaagcaaatcaa

SEQ ID NO: 152908 - DNA, 25 bp, SARS Virus
cttttatttgtataagcaaatcaac

SEQ ID NO: 152909 - DNA, 25 bp, SARS Virus
ttttatttgtactagcaaatcaaca

SEQ ID NO: 152910 - DNA, 25 bp, SARS Virus
tttatttgtacatgcaaatcaacaa

SEQ ID NO: 152911 - DNA, 25 bp, SARS Virus
ttatttgtacaatcaaatcaacaat

SEQ ID NO: 152912 - DNA, 25 bp, SARS Virus
tatttgtacaagtaaatcaacaatt

SEQ ID NO: 152913 - DNA, 25 bp, SARS Virus
atttgtacaagctaatcaacaattg

SEQ ID NO: 152914 - DNA, 25 bp, SARS Virus
tttgtacaagcatatcaacaattgt

SEQ ID NO: 152915 - DNA, 25 bp, SARS Virus
ttgtacaagcaattcaacaattgtt

SEQ ID NO: 152916 - DNA, 25 bp, SARS Virus
tgtacaagcaaatcaacaattgttc

SEQ ID NO: 152917 - DNA, 25 bp, SARS Virus
gtacaagcaaattaacaattgttct

SEQ ID NO: 152918 - DNA, 25 bp, SARS Virus
tacaagcaaatctacaattgttctt

SEQ ID NO: 152919 - DNA, 25 bp, SARS Virus
acaagcaaatcatcaattgttctta

SEQ ID NO: 152920 - DNA, 25 bp, SARS Virus
caagcaaatcaataattgttcttat

SEQ ID NO: 152921 - DNA, 25 bp, SARS Virus
aagcaaatcaactattgttcttata

SEQ ID NO: 152922 - DNA, 25 bp, SARS Virus
agcaaatcaacatttgttcttatag

SEQ ID NO: 152923 - DNA, 25 bp, SARS Virus
gcaaatcaacaattgttcttatagt

SEQ ID NO: 152924 - DNA, 25 bp, SARS Virus
caaatcaacaattgttcttatagtg

SEQ ID NO: 152925 - DNA, 25 bp, SARS Virus
aaatcaacaatttttcttatagtga

SEQ ID NO: 152926 - DNA, 25 bp, SARS Virus
aatcaacaattgttcttatagtgaa

SEQ ID NO: 152927 - DNA, 25 bp, SARS Virus
atcaacaattgttcttatagtgaac

SEQ ID NO: 152928 - DNA, 25 bp, SARS Virus
tcaacaattgtttttatagtgaact

SEQ ID NO: 152929 - DNA, 25 bp, SARS Virus
caacaattgttcttatagtgaactt

SEQ ID NO: 152930 - DNA, 25 bp, SARS Virus
aacaattgttcttatagtgaacttt

SEQ ID NO: 152931 - DNA, 25 bp, SARS Virus
acaattgttcttttagtgaactttg

SEQ ID NO: 152932 - DNA, 25 bp, SARS Virus
caattgttcttatagtgaactttgg

SEQ ID NO: 152933 - DNA, 25 bp, SARS Virus
aattgttcttattgtgaactttggt

SEQ ID NO: 152934 - DNA, 25 bp, SARS Virus
attgttcttatattgaactttggtg

SEQ ID NO: 152935 - DNA, 25 bp, SARS Virus
ttgttcttatagtgaactttggtgt

SEQ ID NO: 152936 - DNA, 25 bp, SARS Virus
tgttcttatagttaactttggtgtt

SEQ ID NO: 152937 - DNA, 25 bp, SARS Virus
gttcttatagtgtactttggtgttg

SEQ ID NO: 152938 - DNA, 25 bp, SARS Virus
ttcttatagtgatctttggtgttga

SEQ ID NO: 152939 - DNA, 25 bp, SARS Virus
tcttatagtgaattttggtgttgag

SEQ ID NO: 152940 - DNA, 25 bp, SARS Virus
cttatagtgaactttggtgttgaga

SEQ ID NO: 152941 - DNA, 25 bp, SARS Virus
ttatagtgaactttggtgttgagac

SEQ ID NO: 152942 - DNA, 25 bp, SARS Virus
tatagtgaactttggtgttgagaca

SEQ ID NO: 152943 - DNA, 25 bp, SARS Virus
atagtgaacttttgtgttgagacaa

SEQ ID NO: 152944 - DNA, 25 bp, SARS Virus
tagtgaactttgttgttgagacaac

SEQ ID NO: 152945 - DNA, 25 bp, SARS Virus
agtgaactttggtgttgagacaaca

SEQ ID NO: 152946 - DNA, 25 bp, SARS Virus
gtgaactttggttttgagacaacaa

SEQ ID NO: 152947 - DNA, 25 bp, SARS Virus
tgaactttggtgttgagacaacaaa

SEQ ID NO: 152948 - DNA, 25 bp, SARS Virus
gaactttggtgttgagacaacaaaa

SEQ ID NO: 152949 - DNA, 25 bp, SARS Virus
aactttggtgtttagacaacaaaag

SEQ ID NO: 152950 - DNA, 25 bp, SARS Virus
actttggtgttgtgacaacaaaaga

SEQ ID NO: 152951 - DNA, 25 bp, SARS Virus
ctttggtgttgatacaacaaaagag

SEQ ID NO: 152952 - DNA, 25 bp, SARS Virus
tttggtgttgagtcaacaaaagaga

SEQ ID NO: 152953 - DNA, 25 bp, SARS Virus
ttggtgttgagataacaaaagagat

SEQ ID NO: 152954 - DNA, 25 bp, SARS Virus
tggtgttgagactacaaaagagatt

SEQ ID NO: 152955 - DNA, 25 bp, SARS Virus
ggtgttgagacatcaaaagagatta

SEQ ID NO: 152956 - DNA, 25 bp, SARS Virus
gtgttgagacaataaaagagattac

SEQ ID NO: 152957 - DNA, 25 bp, SARS Virus
tgttgagacaactaaagagattact

SEQ ID NO: 152958 - DNA, 25 bp, SARS Virus
gttgagacaacataagagattacta

SEQ ID NO: 152959 - DNA, 25 bp, SARS Virus
ttgagacaacaatagagattactat

SEQ ID NO: 152960 - DNA, 25 bp, SARS Virus
tgagacaacaaatgagattactatt

SEQ ID NO: 152961 - DNA, 25 bp, SARS Virus
gagacaacaaaatagattactattc

SEQ ID NO: 152962 - DNA, 25 bp, SARS Virus
agacaacaaaagtgattactattcg

SEQ ID NO: 152963 - DNA, 25 bp, SARS Virus
gacaacaaaagatattactattcgg

SEQ ID NO: 152964 - DNA, 25 bp, SARS Virus
acaacaaaagagtttactattcgga

SEQ ID NO: 152965 - DNA, 25 bp, SARS Virus
caacaaaagagattactattcggat

SEQ ID NO: 152966 - DNA, 25 bp, SARS Virus
aacaaaagagattactattcggatg

SEQ ID NO: 152967 - DNA, 25 bp, SARS Virus
acaaaagagatttctattcggatgg

SEQ ID NO: 152968 - DNA, 25 bp, SARS Virus
caaaagagattattattcggatgga

SEQ ID NO: 152969 - DNA, 25 bp, SARS Virus
aaaagagattactattcggatggaa

SEQ ID NO: 152970 - DNA, 25 bp, SARS Virus
aaagagattacttttcggatggaaa

SEQ ID NO: 152971 - DNA, 25 bp, SARS Virus
aagagattactattcggatggaaaa

SEQ ID NO: 152972 - DNA, 25 bp, SARS Virus
agagattactattcggatggaaaaa

SEQ ID NO: 152973 - DNA, 25 bp, SARS Virus
gagattactatttggatggaaaaag

SEQ ID NO: 152974 - DNA, 25 bp, SARS Virus
agattactattctgatggaaaaagg

SEQ ID NO: 152975 - DNA, 25 bp, SARS Virus
gattactattcgtatggaaaaaggt

SEQ ID NO: 152976 - DNA, 25 bp, SARS Virus
attactattcggttggaaaaaggtc

SEQ ID NO: 152977 - DNA, 25 bp, SARS Virus
ttactattcggatggaaaaaggtct

SEQ ID NO: 152978 - DNA, 25 bp, SARS Virus
tactattcggattgaaaaaggtctt

SEQ ID NO: 152979 - DNA, 25 bp, SARS Virus
actattcggatgtaaaaaggtcttc

SEQ ID NO: 152980 - DNA, 25 bp, SARS Virus
ctattcggatggtaaaaggtcttct

SEQ ID NO: 152981 - DNA, 25 bp, SARS Virus
tattcggatggataaaggtcttctc

SEQ ID NO: 152982 - DNA, 25 bp, SARS Virus
attcggatggaataaggtcttctct

SEQ ID NO: 152983 - DNA, 25 bp, SARS Virus
ttcggatggaaataggtcttctctt

SEQ ID NO: 152984 - DNA, 25 bp, SARS Virus
tcggatggaaaatggtcttctctta

SEQ ID NO: 152985 - DNA, 25 bp, SARS Virus
cggatggaaaaatgtcttctcttat

SEQ ID NO: 152986 - DNA, 25 bp, SARS Virus
ggatggaaaaagttcttctcttatt

SEQ ID NO: 152987 - DNA, 25 bp, SARS Virus
gatggaaaaaggtcttctcttattt

SEQ ID NO: 152988 - DNA, 25 bp, SARS Virus
atggaaaaaggttttctcttattta

SEQ ID NO: 152989 - DNA, 25 bp, SARS Virus
tggaaaaaggtcttctcttatttag

SEQ ID NO: 152990 - DNA, 25 bp, SARS Virus
ggaaaaaggtcttctcttatttagt

SEQ ID NO: 152991 - DNA, 25 bp, SARS Virus
gaaaaaggtcttttcttatttagta

SEQ ID NO: 152992 - DNA, 25 bp, SARS Virus
aaaaaggtcttctcttatttagtat

SEQ ID NO: 152993 - DNA, 25 bp, SARS Virus
aaaaggtcttcttttatttagtata

SEQ ID NO: 152994 - DNA, 25 bp, SARS Virus
aaaggtcttctcttatttagtatag

SEQ ID NO: 152995 - DNA, 25 bp, SARS Virus
aaggtcttctcttatttagtatagt

SEQ ID NO: 152996 - DNA, 25 bp, SARS Virus
aggtcttctcttttttagtatagta

SEQ ID NO: 152997 - DNA, 25 bp, SARS Virus
ggtcttctcttatttagtatagtaa

SEQ ID NO: 152998 - DNA, 25 bp, SARS Virus
gtcttctcttatttagtatagtaac

SEQ ID NO: 152999 - DNA, 25 bp, SARS Virus
tcttctcttatttagtatagtaact

SEQ ID NO: 153000 - DNA, 25 bp, SARS Virus
cttctcttattttgtatagtaacta

SEQ ID NO: 153001 - DNA, 25 bp, SARS Virus
ttctcttatttattatagtaactaa

SEQ ID NO: 153002 - DNA, 25 bp, SARS Virus
tctcttatttagtatagtaactaaa

SEQ ID NO: 153003 - DNA, 25 bp, SARS Virus
ctcttatttagtttagtaactaaac

SEQ ID NO: 153004 - DNA, 25 bp, SARS Virus
tcttatttagtatagtaactaaact

SEQ ID NO: 153005 - DNA, 25 bp, SARS Virus
cttatttagtattgtaactaaacta

SEQ ID NO: 153006 - DNA, 25 bp, SARS Virus
ttatttagtatattaactaaactaa

SEQ ID NO: 153007 - DNA, 25 bp, SARS Virus
tatttagtatagtaactaaactaag

SEQ ID NO: 153008 - DNA, 25 bp, SARS Virus
atttagtatagttactaaactaaga

SEQ ID NO: 153009 - DNA, 25 bp, SARS Virus
tttagtatagtatctaaactaagag

SEQ ID NO: 153010 - DNA, 25 bp, SARS Virus
ttagtatagtaattaaactaagagg

SEQ ID NO: 153011 - DNA, 25 bp, SARS Virus
tagtatagtaactaaactaagagga

SEQ ID NO: 153012 - DNA, 25 bp, SARS Virus
agtatagtaacttaactaagaggaa

SEQ ID NO: 153013 - DNA, 25 bp, SARS Virus
gtatagtaactatactaagaggaat

SEQ ID NO: 153014 - DNA, 25 bp, SARS Virus
tatagtaactaatctaagaggaatt

SEQ ID NO: 153015 - DNA, 25 bp, SARS Virus
atagtaactaaattaagaggaattc

SEQ ID NO: 153016 - DNA, 25 bp, SARS Virus
tagtaactaaactaagaggaattct

SEQ ID NO: 153017 - DNA, 25 bp, SARS Virus
agtaactaaacttagaggaattctc

SEQ ID NO: 153018 - DNA, 25 bp, SARS Virus
gtaactaaactatgaggaattctct

SEQ ID NO: 153019 - DNA, 25 bp, SARS Virus
taactaaactaataggaattctctg

SEQ ID NO: 153020 - DNA, 25 bp, SARS Virus
aactaaactaagtggaattctctgt

SEQ ID NO: 153021 - DNA, 25 bp, SARS Virus
actaaactaagatgaattctctgta

SEQ ID NO: 153022 - DNA, 25 bp, SARS Virus
ctaaactaagagtaattctctgtaa

SEQ ID NO: 153023 - DNA, 25 bp, SARS Virus
taaactaagaggtattctctgtaat

SEQ ID NO: 153024 - DNA, 25 bp, SARS Virus
aaactaagaggatttctctgtaatg

SEQ ID NO: 153025 - DNA, 25 bp, SARS Virus
aactaagaggaattctctgtaatgt

SEQ ID NO: 153026 - DNA, 25 bp, SARS Virus
actaagaggaattctctgtaatgtc

SEQ ID NO: 153027 - DNA, 25 bp, SARS Virus
ctaagaggaattttctgtaatgtcg

SEQ ID NO: 153028 - DNA, 25 bp, SARS Virus
taagaggaattctctgtaatgtcgt

SEQ ID NO: 153029 - DNA, 25 bp, SARS Virus
aagaggaattctttgtaatgtcgtc

SEQ ID NO: 153030 - DNA, 25 bp, SARS Virus
agaggaattctctgtaatgtcgtca

SEQ ID NO: 153031 - DNA, 25 bp, SARS Virus
gaggaattctctttaatgtcgtcaa

SEQ ID NO: 153032 - DNA, 25 bp, SARS Virus
aggaattctctgtaatgtcgtcaag

SEQ ID NO: 153033 - DNA, 25 bp, SARS Virus
ggaattctctgttatgtcgtcaagg

SEQ ID NO: 153034 - DNA, 25 bp, SARS Virus
gaattctctgtattgtcgtcaagga

SEQ ID NO: 153035 - DNA, 25 bp, SARS Virus
aattctctgtaatgtcgtcaaggag

SEQ ID NO: 153036 - DNA, 25 bp, SARS Virus
attctctgtaatttcgtcaaggaga

SEQ ID NO: 153037 - DNA, 25 bp, SARS Virus
ttctctgtaatgtcgtcaaggagaa

SEQ ID NO: 153038 - DNA, 25 bp, SARS Virus
tctctgtaatgttgtcaaggagaat

SEQ ID NO: 153039 - DNA, 25 bp, SARS Virus
ctctgtaatgtcttcaaggagaatt

SEQ ID NO: 153040 - DNA, 25 bp, SARS Virus
tctgtaatgtcgtcaaggagaatta

SEQ ID NO: 153041 - DNA, 25 bp, SARS Virus
ctgtaatgtcgttaaggagaattaa

SEQ ID NO: 153042 - DNA, 25 bp, SARS Virus
tgtaatgtcgtctaggagaattaaa

SEQ ID NO: 153043 - DNA, 25 bp, SARS Virus
gtaatgtcgtcatggagaattaaat

SEQ ID NO: 153044 - DNA, 25 bp, SARS Virus
taatgtcgtcaatgagaattaaatt

SEQ ID NO: 153045 - DNA, 25 bp, SARS Virus
aatgtcgtcaagtagaattaaattc

SEQ ID NO: 153046 - DNA, 25 bp, SARS Virus
atgtcgtcaaggtgaattaaattct

SEQ ID NO: 153047 - DNA, 25 bp, SARS Virus
tgtcgtcaaggataattaaattctc

SEQ ID NO: 153048 - DNA, 25 bp, SARS Virus
gtcgtcaaggagtattaaattctcc

SEQ ID NO: 153049 - DNA, 25 bp, SARS Virus
tcgtcaaggagatttaaattctcct

SEQ ID NO: 153050 - DNA, 25 bp, SARS Virus
cgtcaaggagaattaaattctcctt

SEQ ID NO: 153051 - DNA, 25 bp, SARS Virus
gtcaaggagaattaaattctccttt

SEQ ID NO: 153052 - DNA, 25 bp, SARS Virus
tcaaggagaatttaattctccttta

SEQ ID NO: 153053 - DNA, 25 bp, SARS Virus
caaggagaattatattctcctttaa

SEQ ID NO: 153054 - DNA, 25 bp, SARS Virus
aaggagaattaatttctcctttaaa

SEQ ID NO: 153055 - DNA, 25 bp, SARS Virus
aggagaattaaattctcctttaaac

SEQ ID NO: 153056 - DNA, 25 bp, SARS Virus
ggagaattaaattctcctttaaacg

SEQ ID NO: 153057 - DNA, 25 bp, SARS Virus
gagaattaaattttcctttaaacga

SEQ ID NO: 153058 - DNA, 25 bp, SARS Virus
agaattaaattctcctttaaacgag

SEQ ID NO: 153059 - DNA, 25 bp, SARS Virus
gaattaaattcttctttaaacgagt

SEQ ID NO: 153060 - DNA, 25 bp, SARS Virus
aattaaattctcttttaaacgagta

SEQ ID NO: 153061 - DNA, 25 bp, SARS Virus
attaaattctcctttaaacgagtac

SEQ ID NO: 153062 - DNA, 25 bp, SARS Virus
ttaaattctcctttaaacgagtaca

SEQ ID NO: 153063 - DNA, 25 bp, SARS Virus
taaattctcctttaaacgagtacag

SEQ ID NO: 153064 - DNA, 25 bp, SARS Virus
aaattctccttttaacgagtacagt

SEQ ID NO: 153065 - DNA, 25 bp, SARS Virus
aattctcctttatacgagtacagtt

SEQ ID NO: 153066 - DNA, 25 bp, SARS Virus
attctcctttaatcgagtacagttt

SEQ ID NO: 153067 - DNA, 25 bp, SARS Virus
ttctcctttaaatgagtacagtttc

SEQ ID NO: 153068 - DNA, 25 bp, SARS Virus
tctcctttaaactagtacagtttct

SEQ ID NO: 153069 - DNA, 25 bp, SARS Virus
ctcctttaaacgtgtacagtttctc

SEQ ID NO: 153070 - DNA, 25 bp, SARS Virus
tcctttaaacgattacagtttctca

SEQ ID NO: 153071 - DNA, 25 bp, SARS Virus
cctttaaacgagtacagtttctcac

SEQ ID NO: 153072 - DNA, 25 bp, SARS Virus
ctttaaacgagttcagtttctcact

SEQ ID NO: 153073 - DNA, 25 bp, SARS Virus
tttaaacgagtatagtttctcactt

SEQ ID NO: 153074 - DNA, 25 bp, SARS Virus
ttaaacgagtactgtttctcactta

SEQ ID NO: 153075 - DNA, 25 bp, SARS Virus
taaacgagtacattttctcacttat

SEQ ID NO: 153076 - DNA, 25 bp, SARS Virus
aaacgagtacagtttctcacttatc

SEQ ID NO: 153077 - DNA, 25 bp, SARS Virus
aacgagtacagtttctcacttatcc

SEQ ID NO: 153078 - DNA, 25 bp, SARS Virus
acgagtacagtttctcacttatcct

SEQ ID NO: 153079 - DNA, 25 bp, SARS Virus
cgagtacagtttttcacttatcctt

SEQ ID NO: 153080 - DNA, 25 bp, SARS Virus
gagtacagtttctcacttatccttc

SEQ ID NO: 153081 - DNA, 25 bp, SARS Virus
agtacagtttcttacttatccttct

SEQ ID NO: 153082 - DNA, 25 bp, SARS Virus
gtacagtttctctcttatccttctg

SEQ ID NO: 153083 - DNA, 25 bp, SARS Virus
tacagtttctcatttatccttctgt

SEQ ID NO: 153084 - DNA, 25 bp, SARS Virus
acagtttctcacttatccttctgtt

SEQ ID NO: 153085 - DNA, 25 bp, SARS Virus
cagtttctcacttatccttctgttg

SEQ ID NO: 153086 - DNA, 25 bp, SARS Virus
agtttctcacttttccttctgttga

SEQ ID NO: 153087 - DNA, 25 bp, SARS Virus
gtttctcacttatccttctgttgac

SEQ ID NO: 153088 - DNA, 25 bp, SARS Virus
tttctcacttattcttctgttgacc

SEQ ID NO: 153089 - DNA, 25 bp, SARS Virus
ttctcacttatctttctgttgacct

SEQ ID NO: 153090 - DNA, 25 bp, SARS Virus
tctcacttatccttctgttgaccta

SEQ ID NO: 153091 - DNA, 25 bp, SARS Virus
ctcacttatccttctgttgacctat

SEQ ID NO: 153092 - DNA, 25 bp, SARS Virus
tcacttatccttttgttgacctatc

SEQ ID NO: 153093 - DNA, 25 bp, SARS Virus
cacttatccttctgttgacctatcc

SEQ ID NO: 153094 - DNA, 25 bp, SARS Virus
acttatccttcttttgacctatcct

SEQ ID NO: 153095 - DNA, 25 bp, SARS Virus
cttatccttctgttgacctatccta

SEQ ID NO: 153096 - DNA, 25 bp, SARS Virus
ttatccttctgttgacctatcctaa

SEQ ID NO: 153097 - DNA, 25 bp, SARS Virus
tatccttctgtttacctatcctaaa

SEQ ID NO: 153098 - DNA, 25 bp, SARS Virus
atccttctgttgtcctatcctaaac

SEQ ID NO: 153099 - DNA, 25 bp, SARS Virus
tccttctgttgatctatcctaaaca

SEQ ID NO: 153100 - DNA, 25 bp, SARS Virus
ccttctgttgacttatcctaaacac

SEQ ID NO: 153101 - DNA, 25 bp, SARS Virus
cttctgttgacctatcctaaacaca

SEQ ID NO: 153102 - DNA, 25 bp, SARS Virus
ttctgttgacctttcctaaacacaa

SEQ ID NO: 153103 - DNA, 25 bp, SARS Virus
tctgttgacctatcctaaacacaag

SEQ ID NO: 153104 - DNA, 25 bp, SARS Virus
ctgttgacctattctaaacacaagg

SEQ ID NO: 153105 - DNA, 25 bp, SARS Virus
tgttgacctatcttaaacacaagga

SEQ ID NO: 153106 - DNA, 25 bp, SARS Virus
gttgacctatcctaaacacaaggag

SEQ ID NO: 153107 - DNA, 25 bp, SARS Virus
ttgacctatccttaacacaaggagg

SEQ ID NO: 153108 - DNA, 25 bp, SARS Virus
tgacctatcctatacacaaggaggt

SEQ ID NO: 153109 - DNA, 25 bp, SARS Virus
gacctatcctaatcacaaggaggtc

SEQ ID NO: 153110 - DNA, 25 bp, SARS Virus
acctatcctaaatacaaggaggtct

SEQ ID NO: 153111 - DNA, 25 bp, SARS Virus
cctatcctaaactcaaggaggtctt

SEQ ID NO: 153112 - DNA, 25 bp, SARS Virus
ctatcctaaacataaggaggtcttt

SEQ ID NO: 153113 - DNA, 25 bp, SARS Virus
tatcctaaacactaggaggtctttt

SEQ ID NO: 153114 - DNA, 25 bp, SARS Virus
atcctaaacacatggaggtctttta

SEQ ID NO: 153115 - DNA, 25 bp, SARS Virus
tcctaaacacaatgaggtcttttac

SEQ ID NO: 153116 - DNA, 25 bp, SARS Virus
cctaaacacaagtaggtcttttaca

SEQ ID NO: 153117 - DNA, 25 bp, SARS Virus
ctaaacacaaggtggtcttttacat

SEQ ID NO: 153118 - DNA, 25 bp, SARS Virus
taaacacaaggatgtcttttacatc

SEQ ID NO: 153119 - DNA, 25 bp, SARS Virus
aaacacaaggagttcttttacatca

SEQ ID NO: 153120 - DNA, 25 bp, SARS Virus
aacacaaggaggtcttttacatcaa

SEQ ID NO: 153121 - DNA, 25 bp, SARS Virus
acacaaggaggttttttacatcaat

SEQ ID NO: 153122 - DNA, 25 bp, SARS Virus
cacaaggaggtcttttacatcaatc

SEQ ID NO: 153123 - DNA, 25 bp, SARS Virus
acaaggaggtcttttacatcaatcg

SEQ ID NO: 153124 - DNA, 25 bp, SARS Virus
caaggaggtcttttacatcaatcgt

SEQ ID NO: 153125 - DNA, 25 bp, SARS Virus
aaggaggtcttttacatcaatcgta

SEQ ID NO: 153126 - DNA, 25 bp, SARS Virus
aggaggtctttttcatcaatcgtac

SEQ ID NO: 153127 - DNA, 25 bp, SARS Virus
ggaggtcttttatatcaatcgtacg

SEQ ID NO: 153128 - DNA, 25 bp, SARS Virus
gaggtcttttacttcaatcgtacgt

SEQ ID NO: 153129 - DNA, 25 bp, SARS Virus
aggtcttttacatcaatcgtacgta

SEQ ID NO: 153130 - DNA, 25 bp, SARS Virus
ggtcttttacattaatcgtacgtac

SEQ ID NO: 153131 - DNA, 25 bp, SARS Virus
gtcttttacatctatcgtacgtacc

SEQ ID NO: 153132 - DNA, 25 bp, SARS Virus
tcttttacatcattcgtacgtacca

SEQ ID NO: 153133 - DNA, 25 bp, SARS Virus
cttttacatcaatcgtacgtaccat

SEQ ID NO: 153134 - DNA, 25 bp, SARS Virus
ttttacatcaattgtacgtaccata

SEQ ID NO: 153135 - DNA, 25 bp, SARS Virus
tttacatcaatcttacgtaccatat

SEQ ID NO: 153136 - DNA, 25 bp, SARS Virus
ttacatcaatcgtacgtaccatatc

SEQ ID NO: 153137 - DNA, 25 bp, SARS Virus
tacatcaatcgttcgtaccatatcg

SEQ ID NO: 153138 - DNA, 25 bp, SARS Virus
acatcaatcgtatgtaccatatcgg

SEQ ID NO: 153139 - DNA, 25 bp, SARS Virus
catcaatcgtacttaccatatcggt

SEQ ID NO: 153140 - DNA, 25 bp, SARS Virus
atcaatcgtacgtaccatatcggta

SEQ ID NO: 153141 - DNA, 25 bp, SARS Virus
tcaatcgtacgttccatatcggtag

SEQ ID NO: 153142 - DNA, 25 bp, SARS Virus
caatcgtacgtatcatatcggtagt

SEQ ID NO: 153143 - DNA, 25 bp, SARS Virus
aatcgtacgtactatatcggtagtt

SEQ ID NO: 153144 - DNA, 25 bp, SARS Virus
atcgtacgtaccttatcggtagtta

SEQ ID NO: 153145 - DNA, 25 bp, SARS Virus
tcgtacgtaccatatcggtagttaa

SEQ ID NO: 153146 - DNA, 25 bp, SARS Virus
cgtacgtaccatttcggtagttaaa

SEQ ID NO: 153147 - DNA, 25 bp, SARS Virus
gtacgtaccatatcggtagttaaac

SEQ ID NO: 153148 - DNA, 25 bp, SARS Virus
tacgtaccatattggtagttaaaca

SEQ ID NO: 153149 - DNA, 25 bp, SARS Virus
acgtaccatatctgtagttaaacaa

SEQ ID NO: 153150 - DNA, 25 bp, SARS Virus
cgtaccatatcgttagttaaacaag

SEQ ID NO: 153151 - DNA, 25 bp, SARS Virus
gtaccatatcggtagttaaacaagg

SEQ ID NO: 153152 - DNA, 25 bp, SARS Virus
taccatatcggttgttaaacaagga

SEQ ID NO: 153153 - DNA, 25 bp, SARS Virus
accatatcggtatttaaacaaggaa

SEQ ID NO: 153154 - DNA, 25 bp, SARS Virus
ccatatcggtagttaaacaaggaag

SEQ ID NO: 153155 - DNA, 25 bp, SARS Virus
catatcggtagttaaacaaggaagc

SEQ ID NO: 153156 - DNA, 25 bp, SARS Virus
atatcggtagtttaacaaggaagcc

SEQ ID NO: 153157 - DNA, 25 bp, SARS Virus
tatcggtagttatacaaggaagccg

SEQ ID NO: 153158 - DNA, 25 bp, SARS Virus
atcggtagttaatcaaggaagccga

SEQ ID NO: 153159 - DNA, 25 bp, SARS Virus
tcggtagttaaataaggaagccgaa

SEQ ID NO: 153160 - DNA, 25 bp, SARS Virus
cggtagttaaactaggaagccgaac

SEQ ID NO: 153161 - DNA, 25 bp, SARS Virus
ggtagttaaacatggaagccgaacg

SEQ ID NO: 153162 - DNA, 25 bp, SARS Virus
gtagttaaacaatgaagccgaacgg

SEQ ID NO: 153163 - DNA, 25 bp, SARS Virus
tagttaaacaagtaagccgaacggt

SEQ ID NO: 153164 - DNA, 25 bp, SARS Virus
agttaaacaaggtagccgaacggtt

SEQ ID NO: 153165 - DNA, 25 bp, SARS Virus
gttaaacaaggatgccgaacggttc

SEQ ID NO: 153166 - DNA, 25 bp, SARS Virus
ttaaacaaggaatccgaacggttct

SEQ ID NO: 153167 - DNA, 25 bp, SARS Virus
taaacaaggaagtcgaacggttcta

SEQ ID NO: 153168 - DNA, 25 bp, SARS Virus
aaacaaggaagctgaacggttctat

SEQ ID NO: 153169 - DNA, 25 bp, SARS Virus
aacaaggaagcctaacggttctatc

SEQ ID NO: 153170 - DNA, 25 bp, SARS Virus
acaaggaagccgtacggttctatca

SEQ ID NO: 153171 - DNA, 25 bp, SARS Virus
caaggaagccgatcggttctatcaa

SEQ ID NO: 153172 - DNA, 25 bp, SARS Virus
aaggaagccgaatggttctatcaat

SEQ ID NO: 153173 - DNA, 25 bp, SARS Virus
aggaagccgaactgttctatcaatc

SEQ ID NO: 153174 - DNA, 25 bp, SARS Virus
ggaagccgaacgtttctatcaatcg

SEQ ID NO: 153175 - DNA, 25 bp, SARS Virus
gaagccgaacggttctatcaatcgg

SEQ ID NO: 153176 - DNA, 25 bp, SARS Virus
aagccgaacggttctatcaatcggg

SEQ ID NO: 153177 - DNA, 25 bp, SARS Virus
agccgaacggttttatcaatcgggg

SEQ ID NO: 153178 - DNA, 25 bp, SARS Virus
gccgaacggttctatcaatcggggt

SEQ ID NO: 153179 - DNA, 25 bp, SARS Virus
ccgaacggttctttcaatcggggtt

SEQ ID NO: 153180 - DNA, 25 bp, SARS Virus
cgaacggttctatcaatcggggtta

SEQ ID NO: 153181 - DNA, 25 bp, SARS Virus
gaacggttctattaatcggggttaa

SEQ ID NO: 153182 - DNA, 25 bp, SARS Virus
aacggttctatctatcggggttaat

SEQ ID NO: 153183 - DNA, 25 bp, SARS Virus
acggttctatcattcggggttaatt

SEQ ID NO: 153184 - DNA, 25 bp, SARS Virus
cggttctatcaatcggggttaattt

SEQ ID NO: 153185 - DNA, 25 bp, SARS Virus
ggttctatcaattggggttaatttt

SEQ ID NO: 153186 - DNA, 25 bp, SARS Virus
gttctatcaatctgggttaattttt

SEQ ID NO: 153187 - DNA, 25 bp, SARS Virus
ttctatcaatcgtggttaattttta

SEQ ID NO: 153188 - DNA, 25 bp, SARS Virus
tctatcaatcggtgttaatttttac

SEQ ID NO: 153189 - DNA, 25 bp, SARS Virus
ctatcaatcgggtttaatttttacg

SEQ ID NO: 153190 - DNA, 25 bp, SARS Virus
tatcaatcggggttaatttttacga

SEQ ID NO: 153191 - DNA, 25 bp, SARS Virus
atcaatcggggttaatttttacgaa

SEQ ID NO: 153192 - DNA, 25 bp, SARS Virus
tcaatcggggtttatttttacgaag

SEQ ID NO: 153193 - DNA, 25 bp, SARS Virus
caatcggggttattttttacgaagg

SEQ ID NO: 153194 - DNA, 25 bp, SARS Virus
aatcggggttaatttttacgaaggc

SEQ ID NO: 153195 - DNA, 25 bp, SARS Virus
atcggggttaatttttacgaaggct

SEQ ID NO: 153196 - DNA, 25 bp, SARS Virus
tcggggttaatttttacgaaggcta

SEQ ID NO: 153197 - DNA, 25 bp, SARS Virus
cggggttaatttttacgaaggctac

SEQ ID NO: 153198 - DNA, 25 bp, SARS Virus
ggggttaatttttacgaaggctact

SEQ ID NO: 153199 - DNA, 25 bp, SARS Virus
gggttaattttttcgaaggctacta

SEQ ID NO: 153200 - DNA, 25 bp, SARS Virus
ggttaatttttatgaaggctactac

SEQ ID NO: 153201 - DNA, 25 bp, SARS Virus
gttaatttttactaaggctactact

SEQ ID NO: 153202 - DNA, 25 bp, SARS Virus
ttaatttttacgtaggctactacta

SEQ ID NO: 153203 - DNA, 25 bp, SARS Virus
taatttttacgatggctactactac

SEQ ID NO: 153204 - DNA, 25 bp, SARS Virus
aatttttacgaatgctactactacg

SEQ ID NO: 153205 - DNA, 25 bp, SARS Virus
atttttacgaagtctactactacgt

SEQ ID NO: 153206 - DNA, 25 bp, SARS Virus
tttttacgaaggttactactacgta

SEQ ID NO: 153207 - DNA, 25 bp, SARS Virus
ttttacgaaggctactactacgtaa

SEQ ID NO: 153208 - DNA, 25 bp, SARS Virus
tttacgaaggcttctactacgtaaa

SEQ ID NO: 153209 - DNA, 25 bp, SARS Virus
ttacgaaggctattactacgtaaat

SEQ ID NO: 153210 - DNA, 25 bp, SARS Virus
tacgaaggctactactacgtaaatg

SEQ ID NO: 153211 - DNA, 25 bp, SARS Virus
acgaaggctacttctacgtaaatgt

SEQ ID NO: 153212 - DNA, 25 bp, SARS Virus
cgaaggctactattacgtaaatgta

SEQ ID NO: 153213 - DNA, 25 bp, SARS Virus
gaaggctactactacgtaaatgtaa

SEQ ID NO: 153214 - DNA, 25 bp, SARS Virus
aaggctactacttcgtaaatgtaaa

SEQ ID NO: 153215 - DNA, 25 bp, SARS Virus
aggctactactatgtaaatgtaaac

SEQ ID NO: 153216 - DNA, 25 bp, SARS Virus
ggctactactacttaaatgtaaaca

SEQ ID NO: 153217 - DNA, 25 bp, SARS Virus
gctactactacgtaaatgtaaacat

SEQ ID NO: 153218 - DNA, 25 bp, SARS Virus
ctactactacgttaatgtaaacatt

SEQ ID NO: 153219 - DNA, 25 bp, SARS Virus
tactactacgtatatgtaaacattg

SEQ ID NO: 153220 - DNA, 25 bp, SARS Virus
actactacgtaattgtaaacattgt

SEQ ID NO: 153221 - DNA, 25 bp, SARS Virus
ctactacgtaaatgtaaacattgtt

SEQ ID NO: 153222 - DNA, 25 bp, SARS Virus
tactacgtaaatttaaacattgttt

SEQ ID NO: 153223 - DNA, 25 bp, SARS Virus
actacgtaaatgtaaacattgtttt

SEQ ID NO: 153224 - DNA, 25 bp, SARS Virus
ctacgtaaatgttaacattgttttc

SEQ ID NO: 153225 - DNA, 25 bp, SARS Virus
tacgtaaatgtatacattgttttcg

SEQ ID NO: 153226 - DNA, 25 bp, SARS Virus
acgtaaatgtaatcattgttttcga

SEQ ID NO: 153227 - DNA, 25 bp, SARS Virus
cgtaaatgtaaatattgttttcgac

SEQ ID NO: 153228 - DNA, 25 bp, SARS Virus
gtaaatgtaaactttgttttcgaca

SEQ ID NO: 153229 - DNA, 25 bp, SARS Virus
taaatgtaaacattgttttcgacag

SEQ ID NO: 153230 - DNA, 25 bp, SARS Virus
aaatgtaaacattgttttcgacagg

SEQ ID NO: 153231 - DNA, 25 bp, SARS Virus
aatgtaaacatttttttcgacaggt

SEQ ID NO: 153232 - DNA, 25 bp, SARS Virus
atgtaaacattgttttcgacaggtg

SEQ ID NO: 153233 - DNA, 25 bp, SARS Virus
tgtaaacattgttttcgacaggtgg

SEQ ID NO: 153234 - DNA, 25 bp, SARS Virus
gtaaacattgttttcgacaggtggt

SEQ ID NO: 153235 - DNA, 25 bp, SARS Virus
taaacattgttttcgacaggtggta

SEQ ID NO: 153236 - DNA, 25 bp, SARS Virus
aaacattgtttttgacaggtggtac

SEQ ID NO: 153237 - DNA, 25 bp, SARS Virus
aacattgttttctacaggtggtact

SEQ ID NO: 153238 - DNA, 25 bp, SARS Virus
acattgttttcgtcaggtggtactc

SEQ ID NO: 153239 - DNA, 25 bp, SARS Virus
cattgttttcgataggtggtactct

SEQ ID NO: 153240 - DNA, 25 bp, SARS Virus
attgttttcgactggtggtactctt

SEQ ID NO: 153241 - DNA, 25 bp, SARS Virus
ttgttttcgacatgtggtactcttt

SEQ ID NO: 153242 - DNA, 25 bp, SARS Virus
tgttttcgacagttggtactcttta

SEQ ID NO: 153243 - DNA, 25 bp, SARS Virus
gttttcgacaggtggtactctttac

SEQ ID NO: 153244 - DNA, 25 bp, SARS Virus
ttttcgacaggttgtactctttacc

SEQ ID NO: 153245 - DNA, 25 bp, SARS Virus
tttcgacaggtgttactctttaccg

SEQ ID NO: 153246 - DNA, 25 bp, SARS Virus
ttcgacaggtggtactctttaccgg

SEQ ID NO: 153247 - DNA, 25 bp, SARS Virus
tcgacaggtggttctctttaccggg

SEQ ID NO: 153248 - DNA, 25 bp, SARS Virus
cgacaggtggtattctttaccgggt

SEQ ID NO: 153249 - DNA, 25 bp, SARS Virus
gacaggtggtactctttaccgggta

SEQ ID NO: 153250 - DNA, 25 bp, SARS Virus
acaggtggtactttttaccgggtat

SEQ ID NO: 153251 - DNA, 25 bp, SARS Virus
caggtggtactctttaccgggtatt

SEQ ID NO: 153252 - DNA, 25 bp, SARS Virus
aggtggtactctttaccgggtattc

SEQ ID NO: 153253 - DNA, 25 bp, SARS Virus
ggtggtactctttaccgggtattcg

SEQ ID NO: 153254 - DNA, 25 bp, SARS Virus
gtggtactcttttccgggtattcga

SEQ ID NO: 153255 - DNA, 25 bp, SARS Virus
tggtactctttatcgggtattcgaa

SEQ ID NO: 153256 - DNA, 25 bp, SARS Virus
ggtactctttactgggtattcgaac

SEQ ID NO: 153257 - DNA, 25 bp, SARS Virus
gtactctttacctggtattcgaaca

SEQ ID NO: 153258 - DNA, 25 bp, SARS Virus
tactctttaccgtgtattcgaacat

SEQ ID NO: 153259 - DNA, 25 bp, SARS Virus
actctttaccggttattcgaacatt

SEQ ID NO: 153260 - DNA, 25 bp, SARS Virus
ctctttaccgggtattcgaacattt

SEQ ID NO: 153261 - DNA, 25 bp, SARS Virus
tctttaccgggttttcgaacatttc

SEQ ID NO: 153262 - DNA, 25 bp, SARS Virus
ctttaccgggtattcgaacatttcc

SEQ ID NO: 153263 - DNA, 25 bp, SARS Virus
tttaccgggtattcgaacatttcca

SEQ ID NO: 153264 - DNA, 25 bp, SARS Virus
ttaccgggtatttgaacatttccag

SEQ ID NO: 153265 - DNA, 25 bp, SARS Virus
taccgggtattcaaacatttccagt

SEQ ID NO: 153266 - DNA, 25 bp, SARS Virus
accgggtattcgaacatttccagtc

SEQ ID NO: 153267 - DNA, 25 bp, SARS Virus
ccgggtattcgaacatttccagtcg

SEQ ID NO: 153268 - DNA, 25 bp, SARS Virus
cgggtattcgaaaatttccagtcgt

SEQ ID NO: 153269 - DNA, 25 bp, SARS Virus
gggtattcgaacatttccagtcgta

SEQ ID NO: 153270 - DNA, 25 bp, SARS Virus
ggtattcgaacaattccagtcgtaa

SEQ ID NO: 153271 - DNA, 25 bp, SARS Virus
gtattcgaacatatccagtcgtaag

SEQ ID NO: 153272 - DNA, 25 bp, SARS Virus
tattcgaacattaccagtcgtaagg

SEQ ID NO: 153273 - DNA, 25 bp, SARS Virus
attcgaacatttacagtcgtaaggt

SEQ ID NO: 153274 - DNA, 25 bp, SARS Virus
ttcgaacatttcaagtcgtaaggtt

SEQ ID NO: 153275 - DNA, 25 bp, SARS Virus
tcgaacatttccagtcgtaaggttc

SEQ ID NO: 153276 - DNA, 25 bp, SARS Virus
cgaacatttccaatcgtaaggttct

SEQ ID NO: 153277 - DNA, 25 bp, SARS Virus
gaacatttccagacgtaaggttctt

SEQ ID NO: 153278 - DNA, 25 bp, SARS Virus
aacatttccagtagtaaggttctta

SEQ ID NO: 153279 - DNA, 25 bp, SARS Virus
acatttccagtcataaggttcttac

SEQ ID NO: 153280 - DNA, 25 bp, SARS Virus
catttccagtcgaaaggttcttacg

SEQ ID NO: 153281 - DNA, 25 bp, SARS Virus
atttccagtcgtaaggttcttacga

SEQ ID NO: 153282 - DNA, 25 bp, SARS Virus
tttccagtcgtaaggttcttacgag

SEQ ID NO: 153283 - DNA, 25 bp, SARS Virus
ttccagtcgtaaagttcttacgaga

SEQ ID NO: 153284 - DNA, 25 bp, SARS Virus
tccagtcgtaagattcttacgagac

SEQ ID NO: 153285 - DNA, 25 bp, SARS Virus
ccagtcgtaaggatcttacgagaca

SEQ ID NO: 153286 - DNA, 25 bp, SARS Virus
cagtcgtaaggtacttacgagacaa

SEQ ID NO: 153287 - DNA, 25 bp, SARS Virus
agtcgtaaggttattacgagacaat

SEQ ID NO: 153288 - DNA, 25 bp, SARS Virus
gtcgtaaggttcatacgagacaata

SEQ ID NO: 153289 - DNA, 25 bp, SARS Virus
tcgtaaggttctaacgagacaatag

SEQ ID NO: 153290 - DNA, 25 bp, SARS Virus
cgtaaggttcttacgagacaataga

SEQ ID NO: 153291 - DNA, 25 bp, SARS Virus
gtaaggttcttaagagacaatagaa

SEQ ID NO: 153292 - DNA, 25 bp, SARS Virus
taaggttcttacaagacaatagaaa

SEQ ID NO: 153293 - DNA, 25 bp, SARS Virus
aaggttcttacgagacaatagaaat

SEQ ID NO: 153294 - DNA, 25 bp, SARS Virus
aggttcttacgaaacaatagaaatg

SEQ ID NO: 153295 - DNA, 25 bp, SARS Virus
ggttcttacgagacaatagaaatgt

SEQ ID NO: 153296 - DNA, 25 bp, SARS Virus
gttcttacgagaaaatagaaatgtc

SEQ ID NO: 153297 - DNA, 25 bp, SARS Virus
ttcttacgagacaatagaaatgtcg

SEQ ID NO: 153298 - DNA, 25 bp, SARS Virus
tcttacgagacaatagaaatgtcga

SEQ ID NO: 153299 - DNA, 25 bp, SARS Virus
cttacgagacaaaagaaatgtcgat

SEQ ID NO: 153300 - DNA, 25 bp, SARS Virus
ttacgagacaatagaaatgtcgata

SEQ ID NO: 153301 - DNA, 25 bp, SARS Virus
tacgagacaataaaaatgtcgatat

SEQ ID NO: 153302 - DNA, 25 bp, SARS Virus
acgagacaatagaaatgtcgatatc

SEQ ID NO: 153303 - DNA, 25 bp, SARS Virus
cgagacaatagaaatgtcgatatct

SEQ ID NO: 153304 - DNA, 25 bp, SARS Virus
gagacaatagaaatgtcgatatctt

SEQ ID NO: 153305 - DNA, 25 bp, SARS Virus
agacaatagaaaagtcgatatcttg

SEQ ID NO: 153306 - DNA, 25 bp, SARS Virus
gacaatagaaatatcgatatcttgg

SEQ ID NO: 153307 - DNA, 25 bp, SARS Virus
acaatagaaatgacgatatcttggt

SEQ ID NO: 153308 - DNA, 25 bp, SARS Virus
caatagaaatgtagatatcttggtg

SEQ ID NO: 153309 - DNA, 25 bp, SARS Virus
aatagaaatgtcaatatcttggtgg

SEQ ID NO: 153310 - DNA, 25 bp, SARS Virus
atagaaatgtcgatatcttggtggg

SEQ ID NO: 153311 - DNA, 25 bp, SARS Virus
tagaaatgtcgaaatcttggtgggt

SEQ ID NO: 153312 - DNA, 25 bp, SARS Virus
agaaatgtcgatatcttggtgggtc

SEQ ID NO: 153313 - DNA, 25 bp, SARS Virus
gaaatgtcgataacttggtgggtcc

SEQ ID NO: 153314 - DNA, 25 bp, SARS Virus
aaatgtcgatatattggtgggtccc

SEQ ID NO: 153315 - DNA, 25 bp, SARS Virus
aatgtcgatatcatggtgggtcccg

SEQ ID NO: 153316 - DNA, 25 bp, SARS Virus
atgtcgatatctaggtgggtcccga

SEQ ID NO: 153317 - DNA, 25 bp, SARS Virus
tgtcgatatcttagtgggtcccgat

SEQ ID NO: 153318 - DNA, 25 bp, SARS Virus
gtcgatatcttgatgggtcccgatc

SEQ ID NO: 153319 - DNA, 25 bp, SARS Virus
tcgatatcttggagggtcccgatca

SEQ ID NO: 153320 - DNA, 25 bp, SARS Virus
cgatatcttggtaggtcccgatcaa

SEQ ID NO: 153321 - DNA, 25 bp, SARS Virus
gatatcttggtgagtcccgatcaaa

SEQ ID NO: 153322 - DNA, 25 bp, SARS Virus
atatcttggtggatcccgatcaaaa

SEQ ID NO: 153323 - DNA, 25 bp, SARS Virus
tatcttggtgggacccgatcaaaaa

SEQ ID NO: 153324 - DNA, 25 bp, SARS Virus
atcttggtgggtaccgatcaaaaac

SEQ ID NO: 153325 - DNA, 25 bp, SARS Virus
tcttggtgggtcacgatcaaaaacg

SEQ ID NO: 153326 - DNA, 25 bp, SARS Virus
cttggtgggtccagatcaaaaacga

SEQ ID NO: 153327 - DNA, 25 bp, SARS Virus
ttggtgggtcccaatcaaaaacgaa

SEQ ID NO: 153328 - DNA, 25 bp, SARS Virus
tggtgggtcccgatcaaaaacgaaa

SEQ ID NO: 153329 - DNA, 25 bp, SARS Virus
ggtgggtcccgaacaaaaacgaaat

SEQ ID NO: 153330 - DNA, 25 bp, SARS Virus
gtgggtcccgataaaaaacgaaata

SEQ ID NO: 153331 - DNA, 25 bp, SARS Virus
tgggtcccgatcaaaaacgaaatat

SEQ ID NO: 153332 - DNA, 25 bp, SARS Virus
gggtcccgatcaaaaacgaaatatt

SEQ ID NO: 153333 - DNA, 25 bp, SARS Virus
ggtcccgatcaaaaacgaaatattt

SEQ ID NO: 153334 - DNA, 25 bp, SARS Virus
gtcccgatcaaaaacgaaatattta

SEQ ID NO: 153335 - DNA, 25 bp, SARS Virus
tcccgatcaaaaacgaaatatttag

SEQ ID NO: 153336 - DNA, 25 bp, SARS Virus
cccgatcaaaaaagaaatatttagg

SEQ ID NO: 153337 - DNA, 25 bp, SARS Virus
ccgatcaaaaacaaaatatttaggt

SEQ ID NO: 153338 - DNA, 25 bp, SARS Virus
cgatcaaaaacgaaatatttaggtg

SEQ ID NO: 153339 - DNA, 25 bp, SARS Virus
gatcaaaaacgaaatatttaggtgt

SEQ ID NO: 153340 - DNA, 25 bp, SARS Virus
atcaaaaacgaaatatttaggtgtg

SEQ ID NO: 153341 - DNA, 25 bp, SARS Virus
tcaaaaacgaaaaatttaggtgtgt

SEQ ID NO: 153342 - DNA, 25 bp, SARS Virus
caaaaacgaaatatttaggtgtgtc

SEQ ID NO: 153343 - DNA, 25 bp, SARS Virus
aaaaacgaaataattaggtgtgtct

SEQ ID NO: 153344 - DNA, 25 bp, SARS Virus
aaaacgaaatatataggtgtgtcta

SEQ ID NO: 153345 - DNA, 25 bp, SARS Virus
aaacgaaatattaaggtgtgtctat

SEQ ID NO: 153346 - DNA, 25 bp, SARS Virus
aacgaaatatttaggtgtgtctatt

SEQ ID NO: 153347 - DNA, 25 bp, SARS Virus
acgaaatatttaagtgtgtctattc

SEQ ID NO: 153348 - DNA, 25 bp, SARS Virus
cgaaatatttagatgtgtctattca

SEQ ID NO: 153349 - DNA, 25 bp, SARS Virus
gaaatatttaggagtgtctattcac

SEQ ID NO: 153350 - DNA, 25 bp, SARS Virus
aaatatttaggtatgtctattcact

SEQ ID NO: 153351 - DNA, 25 bp, SARS Virus
aatatttaggtgagtctattcactt

SEQ ID NO: 153352 - DNA, 25 bp, SARS Virus
atatttaggtgtatctattcacttt

SEQ ID NO: 153353 - DNA, 25 bp, SARS Virus
tatttaggtgtgactattcactttt

SEQ ID NO: 153354 - DNA, 25 bp, SARS Virus
atttaggtgtgtatattcacttttt

SEQ ID NO: 153355 - DNA, 25 bp, SARS Virus
tttaggtgtgtcaattcactttttg

SEQ ID NO: 153356 - DNA, 25 bp, SARS Virus
ttaggtgtgtctattcactttttgg

SEQ ID NO: 153357 - DNA, 25 bp, SARS Virus
taggtgtgtctaatcactttttggg

SEQ ID NO: 153358 - DNA, 25 bp, SARS Virus
aggtgtgtctatacactttttggga

SEQ ID NO: 153359 - DNA, 25 bp, SARS Virus
ggtgtgtctattaactttttgggaa

SEQ ID NO: 153360 - DNA, 25 bp, SARS Virus
gtgtgtctattcactttttgggaag

SEQ ID NO: 153361 - DNA, 25 bp, SARS Virus
tgtgtctattcaatttttgggaaga

SEQ ID NO: 153362 - DNA, 25 bp, SARS Virus
gtgtctattcacattttgggaagaa

SEQ ID NO: 153363 - DNA, 25 bp, SARS Virus
tgtctattcactatttgggaagaaa

SEQ ID NO: 153364 - DNA, 25 bp, SARS Virus
gtctattcacttattgggaagaaat

SEQ ID NO: 153365 - DNA, 25 bp, SARS Virus
tctattcactttatgggaagaaatc

SEQ ID NO: 153366 - DNA, 25 bp, SARS Virus
ctattcacttttagggaagaaatct

SEQ ID NO: 153367 - DNA, 25 bp, SARS Virus
tattcactttttaggaagaaatctc

SEQ ID NO: 153368 - DNA, 25 bp, SARS Virus
attcactttttgagaagaaatctca

SEQ ID NO: 153369 - DNA, 25 bp, SARS Virus
ttcactttttggaaagaaatctcag

SEQ ID NO: 153370 - DNA, 25 bp, SARS Virus
tcactttttgggaagaaatctcagt

SEQ ID NO: 153371 - DNA, 25 bp, SARS Virus
cactttttgggaagaaatctcagta

SEQ ID NO: 153372 - DNA, 25 bp, SARS Virus
actttttgggaaaaaatctcagtaa

SEQ ID NO: 153373 - DNA, 25 bp, SARS Virus
ctttttgggaagaaatctcagtaag

SEQ ID NO: 153374 - DNA, 25 bp, SARS Virus
tttttgggaagaaatctcagtaaga

SEQ ID NO: 153375 - DNA, 25 bp, SARS Virus
ttttgggaagaaatctcagtaagag

SEQ ID NO: 153376 - DNA, 25 bp, SARS Virus
tttgggaagaaaactcagtaagaga

SEQ ID NO: 153377 - DNA, 25 bp, SARS Virus
ttgggaagaaatatcagtaagagaa

SEQ ID NO: 153378 - DNA, 25 bp, SARS Virus
tgggaagaaatcacagtaagagaaa

SEQ ID NO: 153379 - DNA, 25 bp, SARS Virus
gggaagaaatctaagtaagagaaaa

SEQ ID NO: 153380 - DNA, 25 bp, SARS Virus
ggaagaaatctcagtaagagaaaac

SEQ ID NO: 153381 - DNA, 25 bp, SARS Virus
gaagaaatctcaataagagaaaaca

SEQ ID NO: 153382 - DNA, 25 bp, SARS Virus
aagaaatctcagaaagagaaaacag

SEQ ID NO: 153383 - DNA, 25 bp, SARS Virus
agaaatctcagtaagagaaaacagt

SEQ ID NO: 153384 - DNA, 25 bp, SARS Virus
gaaatctcagtaagagaaaacagtg

SEQ ID NO: 153385 - DNA, 25 bp, SARS Virus
aaatctcagtaaaagaaaacagtgt

SEQ ID NO: 153386 - DNA, 25 bp, SARS Virus
aatctcagtaagagaaaacagtgta

SEQ ID NO: 153387 - DNA, 25 bp, SARS Virus
atctcagtaagaaaaaacagtgtac

SEQ ID NO: 153388 - DNA, 25 bp, SARS Virus
tctcagtaagagaaaacagtgtaca

SEQ ID NO: 153389 - DNA, 25 bp, SARS Virus
ctcagtaagagaaaacagtgtacaa

SEQ ID NO: 153390 - DNA, 25 bp, SARS Virus
tcagtaagagaaaacagtgtacaaa

SEQ ID NO: 153391 - DNA, 25 bp, SARS Virus
cagtaagagaaaacagtgtacaaac

SEQ ID NO: 153392 - DNA, 25 bp, SARS Virus
agtaagagaaaaaagtgtacaaacc

SEQ ID NO: 153393 - DNA, 25 bp, SARS Virus
gtaagagaaaacagtgtacaaacca

SEQ ID NO: 153394 - DNA, 25 bp, SARS Virus
taagagaaaacaatgtacaaaccag

SEQ ID NO: 153395 - DNA, 25 bp, SARS Virus
aagagaaaacagagtacaaaccagg

SEQ ID NO: 153396 - DNA, 25 bp, SARS Virus
agagaaaacagtatacaaaccagga

SEQ ID NO: 153397 - DNA, 25 bp, SARS Virus
gagaaaacagtgaacaaaccaggat

SEQ ID NO: 153398 - DNA, 25 bp, SARS Virus
agaaaacagtgtacaaaccaggatc

SEQ ID NO: 153399 - DNA, 25 bp, SARS Virus
gaaaacagtgtaaaaaccaggatcc

SEQ ID NO: 153400 - DNA, 25 bp, SARS Virus
aaaacagtgtacaaaccaggatccc

SEQ ID NO: 153401 - DNA, 25 bp, SARS Virus
aaacagtgtacaaaccaggatccca

SEQ ID NO: 153402 - DNA, 25 bp, SARS Virus
aacagtgtacaaaccaggatcccag

SEQ ID NO: 153403 - DNA, 25 bp, SARS Virus
acagtgtacaaaacaggatcccagt

SEQ ID NO: 153404 - DNA, 25 bp, SARS Virus
cagtgtacaaacaaggatcccagta

SEQ ID NO: 153405 - DNA, 25 bp, SARS Virus
agtgtacaaaccaggatcccagtat

SEQ ID NO: 153406 - DNA, 25 bp, SARS Virus
gtgtacaaaccaagatcccagtatg

SEQ ID NO: 153407 - DNA, 25 bp, SARS Virus
tgtacaaaccagaatcccagtatgt

SEQ ID NO: 153408 - DNA, 25 bp, SARS Virus
gtacaaaccaggatcccagtatgta

SEQ ID NO: 153409 - DNA, 25 bp, SARS Virus
tacaaaccaggaacccagtatgtat

SEQ ID NO: 153410 - DNA, 25 bp, SARS Virus
acaaaccaggataccagtatgtata

SEQ ID NO: 153411 - DNA, 25 bp, SARS Virus
caaaccaggatcacagtatgtatag

SEQ ID NO: 153412 - DNA, 25 bp, SARS Virus
aaaccaggatccaagtatgtatagc

SEQ ID NO: 153413 - DNA, 25 bp, SARS Virus
aaccaggatcccagtatgtatagcg

SEQ ID NO: 153414 - DNA, 25 bp, SARS Virus
accaggatcccaatatgtatagcga

SEQ ID NO: 153415 - DNA, 25 bp, SARS Virus
ccaggatcccagaatgtatagcgat

SEQ ID NO: 153416 - DNA, 25 bp, SARS Virus
caggatcccagtatgtatagcgatt

SEQ ID NO: 153417 - DNA, 25 bp, SARS Virus
aggatcccagtaagtatagcgatta

SEQ ID NO: 153418 - DNA, 25 bp, SARS Virus
ggatcccagtatatatagcgattat

SEQ ID NO: 153419 - DNA, 25 bp, SARS Virus
gatcccagtatgaatagcgattatt

SEQ ID NO: 153420 - DNA, 25 bp, SARS Virus
atcccagtatgtatagcgattatta

SEQ ID NO: 153421 - DNA, 25 bp, SARS Virus
tcccagtatgtaaagcgattattat

SEQ ID NO: 153422 - DNA, 25 bp, SARS Virus
cccagtatgtatagcgattattatt

SEQ ID NO: 153423 - DNA, 25 bp, SARS Virus
ccagtatgtataacgattattattc

SEQ ID NO: 153424 - DNA, 25 bp, SARS Virus
cagtatgtatagagattattattcc

SEQ ID NO: 153425 - DNA, 25 bp, SARS Virus
agtatgtatagcaattattattcca

SEQ ID NO: 153426 - DNA, 25 bp, SARS Virus
gtatgtatagcgattattattccag

SEQ ID NO: 153427 - DNA, 25 bp, SARS Virus
tatgtatagcgaatattattccagg

SEQ ID NO: 153428 - DNA, 25 bp, SARS Virus
atgtatagcgataattattccaggg

SEQ ID NO: 153429 - DNA, 25 bp, SARS Virus
tgtatagcgattattattccagggt

SEQ ID NO: 153430 - DNA, 25 bp, SARS Virus
gtatagcgattaatattccagggta

SEQ ID NO: 153431 - DNA, 25 bp, SARS Virus
tatagcgattataattccagggtaa

SEQ ID NO: 153432 - DNA, 25 bp, SARS Virus
atagcgattattattccagggtaaa

SEQ ID NO: 153433 - DNA, 25 bp, SARS Virus
tagcgattattaatccagggtaaat

SEQ ID NO: 153434 - DNA, 25 bp, SARS Virus
agcgattattataccagggtaaata

SEQ ID NO: 153435 - DNA, 25 bp, SARS Virus
gcgattattattacagggtaaataa

SEQ ID NO: 153436 - DNA, 25 bp, SARS Virus
cgattattattcaagggtaaataat

SEQ ID NO: 153437 - DNA, 25 bp, SARS Virus
gattattattccagggtaaataatc

SEQ ID NO: 153438 - DNA, 25 bp, SARS Virus
attattattccaaggtaaataatcg

SEQ ID NO: 153439 - DNA, 25 bp, SARS Virus
ttattattccagagtaaataatcgg

SEQ ID NO: 153440 - DNA, 25 bp, SARS Virus
tattattccaggataaataatcggc

SEQ ID NO: 153441 - DNA, 25 bp, SARS Virus
attattccagggaaaataatcggca

SEQ ID NO: 153442 - DNA, 25 bp, SARS Virus
ttattccagggtaaataatcggcat

SEQ ID NO: 153443 - DNA, 25 bp, SARS Virus
tattccagggtaaataatcggcata

SEQ ID NO: 153444 - DNA, 25 bp, SARS Virus
attccagggtaaataatcggcatac

SEQ ID NO: 153445 - DNA, 25 bp, SARS Virus
ttccagggtaaaaaatcggcataca

SEQ ID NO: 153446 - DNA, 25 bp, SARS Virus
tccagggtaaataatcggcatacat

SEQ ID NO: 153447 - DNA, 25 bp, SARS Virus
ccagggtaaataatcggcatacatg

SEQ ID NO: 153448 - DNA, 25 bp, SARS Virus
cagggtaaataaacggcatacatga

SEQ ID NO: 153449 - DNA, 25 bp, SARS Virus
agggtaaataataggcatacatgac

SEQ ID NO: 153450 - DNA, 25 bp, SARS Virus
gggtaaataatcagcatacatgaca

SEQ ID NO: 153451 - DNA, 25 bp, SARS Virus
ggtaaataatcgacatacatgacaa

SEQ ID NO: 153452 - DNA, 25 bp, SARS Virus
gtaaataatcggaatacatgacaac

SEQ ID NO: 153453 - DNA, 25 bp, SARS Virus
taaataatcggcatacatgacaacg

SEQ ID NO: 153454 - DNA, 25 bp, SARS Virus
aaataatcggcaaacatgacaacgt

SEQ ID NO: 153455 - DNA, 25 bp, SARS Virus
aataatcggcatacatgacaacgtg

SEQ ID NO: 153456 - DNA, 25 bp, SARS Virus
ataatcggcataaatgacaacgtgt

SEQ ID NO: 153457 - DNA, 25 bp, SARS Virus
taatcggcatacatgacaacgtgtc

SEQ ID NO: 153458 - DNA, 25 bp, SARS Virus
aatcggcatacaagacaacgtgtca

SEQ ID NO: 153459 - DNA, 25 bp, SARS Virus
atcggcatacataacaacgtgtcag

SEQ ID NO: 153460 - DNA, 25 bp, SARS Virus
tcggcatacatgacaacgtgtcaga

SEQ ID NO: 153461 - DNA, 25 bp, SARS Virus
cggcatacatgaaaacgtgtcagag

SEQ ID NO: 153462 - DNA, 25 bp, SARS Virus
ggcatacatgacaacgtgtcagagg

SEQ ID NO: 153463 - DNA, 25 bp, SARS Virus
gcatacatgacaacgtgtcagaggt

SEQ ID NO: 153464 - DNA, 25 bp, SARS Virus
catacatgacaaagtgtcagaggtt

SEQ ID NO: 153465 - DNA, 25 bp, SARS Virus
atacatgacaacatgtcagaggtta

SEQ ID NO: 153466 - DNA, 25 bp, SARS Virus
tacatgacaacgagtcagaggttaa

SEQ ID NO: 153467 - DNA, 25 bp, SARS Virus
acatgacaacgtatcagaggttaat

SEQ ID NO: 153468 - DNA, 25 bp, SARS Virus
catgacaacgtgacagaggttaatt

SEQ ID NO: 153469 - DNA, 25 bp, SARS Virus
atgacaacgtgtaagaggttaattt

SEQ ID NO: 153470 - DNA, 25 bp, SARS Virus
tgacaacgtgtcagaggttaatttc

SEQ ID NO: 153471 - DNA, 25 bp, SARS Virus
gacaacgtgtcaaaggttaatttca

SEQ ID NO: 153472 - DNA, 25 bp, SARS Virus
acaacgtgtcagaggttaatttcat

SEQ ID NO: 153473 - DNA, 25 bp, SARS Virus
caacgtgtcagaagttaatttcatc

SEQ ID NO: 153474 - DNA, 25 bp, SARS Virus
aacgtgtcagagattaatttcatct

SEQ ID NO: 153475 - DNA, 25 bp, SARS Virus
acgtgtcagaggataatttcatctt

SEQ ID NO: 153476 - DNA, 25 bp, SARS Virus
cgtgtcagaggtaaatttcatctta

SEQ ID NO: 153477 - DNA, 25 bp, SARS Virus
gtgtcagaggttaatttcatcttag

SEQ ID NO: 153478 - DNA, 25 bp, SARS Virus
tgtcagaggttaatttcatcttaga

SEQ ID NO: 153479 - DNA, 25 bp, SARS Virus
gtcagaggttaaattcatcttagac

SEQ ID NO: 153480 - DNA, 25 bp, SARS Virus
tcagaggttaatatcatcttagacg

SEQ ID NO: 153481 - DNA, 25 bp, SARS Virus
cagaggttaattacatcttagacgc

SEQ ID NO: 153482 - DNA, 25 bp, SARS Virus
agaggttaatttaatcttagacgca

SEQ ID NO: 153483 - DNA, 25 bp, SARS Virus
gaggttaatttcatcttagacgcag

SEQ ID NO: 153484 - DNA, 25 bp, SARS Virus
aggttaatttcaacttagacgcagc

SEQ ID NO: 153485 - DNA, 25 bp, SARS Virus
ggttaatttcatattagacgcagcc

SEQ ID NO: 153486 - DNA, 25 bp, SARS Virus
gttaatttcatcatagacgcagcct

SEQ ID NO: 153487 - DNA, 25 bp, SARS Virus
ttaatttcatctaagacgcagcctc

SEQ ID NO: 153488 - DNA, 25 bp, SARS Virus
taatttcatcttagacgcagcctct

SEQ ID NO: 153489 - DNA, 25 bp, SARS Virus
aatttcatcttaaacgcagcctctg

SEQ ID NO: 153490 - DNA, 25 bp, SARS Virus
atttcatcttagacgcagcctctgc

SEQ ID NO: 153491 - DNA, 25 bp, SARS Virus
tttcatcttagaagcagcctctgct

SEQ ID NO: 153492 - DNA, 25 bp, SARS Virus
ttcatcttagacacagcctctgctt

SEQ ID NO: 153493 - DNA, 25 bp, SARS Virus
tcatcttagacgaagcctctgcttc

SEQ ID NO: 153494 - DNA, 25 bp, SARS Virus
catcttagacgcagcctctgcttca

SEQ ID NO: 153495 - DNA, 25 bp, SARS Virus
atcttagacgcaacctctgcttcag

SEQ ID NO: 153496 - DNA, 25 bp, SARS Virus
tcttagacgcagactctgcttcagt

SEQ ID NO: 153497 - DNA, 25 bp, SARS Virus
cttagacgcagcatctgcttcagta

SEQ ID NO: 153498 - DNA, 25 bp, SARS Virus
ttagacgcagccactgcttcagtaa

SEQ ID NO: 153499 - DNA, 25 bp, SARS Virus
tagacgcagcctatgcttcagtaat

SEQ ID NO: 153500 - DNA, 25 bp, SARS Virus
agacgcagcctcagcttcagtaatt

SEQ ID NO: 153501 - DNA, 25 bp, SARS Virus
gacgcagcctctacttcagtaattc

SEQ ID NO: 153502 - DNA, 25 bp, SARS Virus
acgcagcctctgattcagtaattct

SEQ ID NO: 153503 - DNA, 25 bp, SARS Virus
cgcagcctctgcatcagtaattcta

SEQ ID NO: 153504 - DNA, 25 bp, SARS Virus
gcagcctctgctacagtaattctag

SEQ ID NO: 153505 - DNA, 25 bp, SARS Virus
cagcctctgcttaagtaattctaga

SEQ ID NO: 153506 - DNA, 25 bp, SARS Virus
agcctctgcttcagtaattctagac

SEQ ID NO: 153507 - DNA, 25 bp, SARS Virus
gcctctgcttcaataattctagact

SEQ ID NO: 153508 - DNA, 25 bp, SARS Virus
cctctgcttcagaaattctagactt

SEQ ID NO: 153509 - DNA, 25 bp, SARS Virus
ctctgcttcagtaattctagactta

SEQ ID NO: 153510 - DNA, 25 bp, SARS Virus
tctgcttcagtaattctagacttag

SEQ ID NO: 153511 - DNA, 25 bp, SARS Virus
ctgcttcagtaaatctagacttagc

SEQ ID NO: 153512 - DNA, 25 bp, SARS Virus
tgcttcagtaatactagacttagct

SEQ ID NO: 153513 - DNA, 25 bp, SARS Virus
gcttcagtaattatagacttagctg

SEQ ID NO: 153514 - DNA, 25 bp, SARS Virus
cttcagtaattcaagacttagctgt

SEQ ID NO: 153515 - DNA, 25 bp, SARS Virus
ttcagtaattctagacttagctgtt

SEQ ID NO: 153516 - DNA, 25 bp, SARS Virus
tcagtaattctaaacttagctgttc

SEQ ID NO: 153517 - DNA, 25 bp, SARS Virus
cagtaattctagacttagctgttca

SEQ ID NO: 153518 - DNA, 25 bp, SARS Virus
agtaattctagaattagctgttcat

SEQ ID NO: 153519 - DNA, 25 bp, SARS Virus
gtaattctagacatagctgttcatc

SEQ ID NO: 153520 - DNA, 25 bp, SARS Virus
taattctagactaagctgttcatca

SEQ ID NO: 153521 - DNA, 25 bp, SARS Virus
aattctagacttagctgttcatcac

SEQ ID NO: 153522 - DNA, 25 bp, SARS Virus
attctagacttaactgttcatcaca

SEQ ID NO: 153523 - DNA, 25 bp, SARS Virus
ttctagacttagatgttcatcacac

SEQ ID NO: 153524 - DNA, 25 bp, SARS Virus
tctagacttagcagttcatcacacg

SEQ ID NO: 153525 - DNA, 25 bp, SARS Virus
ctagacttagctattcatcacacgg

SEQ ID NO: 153526 - DNA, 25 bp, SARS Virus
tagacttagctgatcatcacacggt

SEQ ID NO: 153527 - DNA, 25 bp, SARS Virus
agacttagctgtacatcacacggtc

SEQ ID NO: 153528 - DNA, 25 bp, SARS Virus
gacttagctgttaatcacacggtca

SEQ ID NO: 153529 - DNA, 25 bp, SARS Virus
acttagctgttcatcacacggtcaa

SEQ ID NO: 153530 - DNA, 25 bp, SARS Virus
cttagctgttcaacacacggtcaac

SEQ ID NO: 153531 - DNA, 25 bp, SARS Virus
ttagctgttcataacacggtcaacc

SEQ ID NO: 153532 - DNA, 25 bp, SARS Virus
tagctgttcatcacacggtcaaccg

SEQ ID NO: 153533 - DNA, 25 bp, SARS Virus
agctgttcatcaaacggtcaaccgt

SEQ ID NO: 153534 - DNA, 25 bp, SARS Virus
gctgttcatcacacggtcaaccgtt

SEQ ID NO: 153535 - DNA, 25 bp, SARS Virus
ctgttcatcacaaggtcaaccgttg

SEQ ID NO: 153536 - DNA, 25 bp, SARS Virus
tgttcatcacacagtcaaccgttgg

SEQ ID NO: 153537 - DNA, 25 bp, SARS Virus
gttcatcacacgatcaaccgttggt

SEQ ID NO: 153538 - DNA, 25 bp, SARS Virus
ttcatcacacggacaaccgttggta

SEQ ID NO: 153539 - DNA, 25 bp, SARS Virus
tcatcacacggtaaaccgttggtaa

SEQ ID NO: 153540 - DNA, 25 bp, SARS Virus
catcacacggtcaaccgttggtaac

SEQ ID NO: 153541 - DNA, 25 bp, SARS Virus
atcacacggtcaaccgttggtaaca

SEQ ID NO: 153542 - DNA, 25 bp, SARS Virus
tcacacggtcaaacgttggtaacag

SEQ ID NO: 153543 - DNA, 25 bp, SARS Virus
cacacggtcaacagttggtaacaga

SEQ ID NO: 153544 - DNA, 25 bp, SARS Virus
acacggtcaaccattggtaacagac

SEQ ID NO: 153545 - DNA, 25 bp, SARS Virus
cacggtcaaccgatggtaacagact

SEQ ID NO: 153546 - DNA, 25 bp, SARS Virus
acggtcaaccgtaggtaacagactc

SEQ ID NO: 153547 - DNA, 25 bp, SARS Virus
cggtcaaccgttagtaacagactcg

SEQ ID NO: 153548 - DNA, 25 bp, SARS Virus
ggtcaaccgttgataacagactcgt

SEQ ID NO: 153549 - DNA, 25 bp, SARS Virus
gtcaaccgttggaaacagactcgtg

SEQ ID NO: 153550 - DNA, 25 bp, SARS Virus
tcaaccgttggtaacagactcgtgt

SEQ ID NO: 153551 - DNA, 25 bp, SARS Virus
caaccgttggtaacagactcgtgtc

SEQ ID NO: 153552 - DNA, 25 bp, SARS Virus
aaccgttggtaaaagactcgtgtcg

SEQ ID NO: 153553 - DNA, 25 bp, SARS Virus
accgttggtaacagactcgtgtcga

SEQ ID NO: 153554 - DNA, 25 bp, SARS Virus
ccgttggtaacaaactcgtgtcgac

SEQ ID NO: 153555 - DNA, 25 bp, SARS Virus
cgttggtaacagactcgtgtcgaca

SEQ ID NO: 153556 - DNA, 25 bp, SARS Virus
gttggtaacagaatcgtgtcgacat

SEQ ID NO: 153557 - DNA, 25 bp, SARS Virus
ttggtaacagacacgtgtcgacatg

SEQ ID NO: 153558 - DNA, 25 bp, SARS Virus
tggtaacagactagtgtcgacatgg

SEQ ID NO: 153559 - DNA, 25 bp, SARS Virus
ggtaacagactcatgtcgacatgga

SEQ ID NO: 153560 - DNA, 25 bp, SARS Virus
gtaacagactcgagtcgacatggac

SEQ ID NO: 153561 - DNA, 25 bp, SARS Virus
taacagactcgtatcgacatggacc

SEQ ID NO: 153562 - DNA, 25 bp, SARS Virus
aacagactcgtgacgacatggacca

SEQ ID NO: 153563 - DNA, 25 bp, SARS Virus
acagactcgtgtagacatggaccac

SEQ ID NO: 153564 - DNA, 25 bp, SARS Virus
cagactcgtgtcaacatggaccacg

SEQ ID NO: 153565 - DNA, 25 bp, SARS Virus
agactcgtgtcgacatggaccacgt

SEQ ID NO: 153566 - DNA, 25 bp, SARS Virus
gactcgtgtcgaaatggaccacgtt

SEQ ID NO: 153567 - DNA, 25 bp, SARS Virus
actcgtgtcgacatggaccacgttg

SEQ ID NO: 153568 - DNA, 25 bp, SARS Virus
ctcgtgtcgacaaggaccacgttga

SEQ ID NO: 153569 - DNA, 25 bp, SARS Virus
tcgtgtcgacatagaccacgttgag

SEQ ID NO: 153570 - DNA, 25 bp, SARS Virus
cgtgtcgacatgaaccacgttgagg

SEQ ID NO: 153571 - DNA, 25 bp, SARS Virus
gtgtcgacatggaccacgttgagga

SEQ ID NO: 153572 - DNA, 25 bp, SARS Virus
tgtcgacatggaacacgttgaggaa

SEQ ID NO: 153573 - DNA, 25 bp, SARS Virus
gtcgacatggacaacgttgaggaaa

SEQ ID NO: 153574 - DNA, 25 bp, SARS Virus
tcgacatggaccacgttgaggaaat

SEQ ID NO: 153575 - DNA, 25 bp, SARS Virus
cgacatggaccaagttgaggaaata

SEQ ID NO: 153576 - DNA, 25 bp, SARS Virus
gacatggaccacattgaggaaatag

SEQ ID NO: 153577 - DNA, 25 bp, SARS Virus
acatggaccacgatgaggaaatagt

SEQ ID NO: 153578 - DNA, 25 bp, SARS Virus
catggaccacgtagaggaaatagtc

SEQ ID NO: 153579 - DNA, 25 bp, SARS Virus
atggaccacgttaaggaaatagtct

SEQ ID NO: 153580 - DNA, 25 bp, SARS Virus
tggaccacgttgaggaaatagtctc

SEQ ID NO: 153581 - DNA, 25 bp, SARS Virus
ggaccacgttgaagaaatagtctcg

SEQ ID NO: 153582 - DNA, 25 bp, SARS Virus
gaccacgttgagaaaatagtctcgg

SEQ ID NO: 153583 - DNA, 25 bp, SARS Virus
accacgttgaggaaatagtctcggt

SEQ ID NO: 153584 - DNA, 25 bp, SARS Virus
ccacgttgaggaaatagtctcggtc

SEQ ID NO: 153585 - DNA, 25 bp, SARS Virus
cacgttgaggaaatagtctcggtcg

SEQ ID NO: 153586 - DNA, 25 bp, SARS Virus
acgttgaggaaaaagtctcggtcgt

SEQ ID NO: 153587 - DNA, 25 bp, SARS Virus
cgttgaggaaatagtctcggtcgtg

SEQ ID NO: 153588 - DNA, 25 bp, SARS Virus
gttgaggaaataatctcggtcgtgg

SEQ ID NO: 153589 - DNA, 25 bp, SARS Virus
ttgaggaaatagactcggtcgtggt

SEQ ID NO: 153590 - DNA, 25 bp, SARS Virus
tgaggaaatagtatcggtcgtggtt

SEQ ID NO: 153591 - DNA, 25 bp, SARS Virus
gaggaaatagtcacggtcgtggttt

SEQ ID NO: 153592 - DNA, 25 bp, SARS Virus
aggaaatagtctaggtcgtggtttc

SEQ ID NO: 153593 - DNA, 25 bp, SARS Virus
ggaaatagtctcagtcgtggtttca

SEQ ID NO: 153594 - DNA, 25 bp, SARS Virus
gaaatagtctcgatcgtggtttcac

SEQ ID NO: 153595 - DNA, 25 bp, SARS Virus
aaatagtctcggacgtggtttcact

SEQ ID NO: 153596 - DNA, 25 bp, SARS Virus
aatagtctcggtagtggtttcactt

SEQ ID NO: 153597 - DNA, 25 bp, SARS Virus
atagtctcggtcatggtttcactta

SEQ ID NO: 153598 - DNA, 25 bp, SARS Virus
tagtctcggtcgaggtttcacttat

SEQ ID NO: 153599 - DNA, 25 bp, SARS Virus
agtctcggtcgtagtttcacttatt

SEQ ID NO: 153600 - DNA, 25 bp, SARS Virus
gtctcggtcgtgatttcacttattg

SEQ ID NO: 153601 - DNA, 25 bp, SARS Virus
tctcggtcgtggattcacttattga

SEQ ID NO: 153602 - DNA, 25 bp, SARS Virus
ctcggtcgtggtatcacttattgag

SEQ ID NO: 153603 - DNA, 25 bp, SARS Virus
tcggtcgtggttacacttattgaga

SEQ ID NO: 153604 - DNA, 25 bp, SARS Virus
cggtcgtggtttaacttattgagag

SEQ ID NO: 153605 - DNA, 25 bp, SARS Virus
ggtcgtggtttcacttattgagagt

SEQ ID NO: 153606 - DNA, 25 bp, SARS Virus
gtcgtggtttcaattattgagagta

SEQ ID NO: 153607 - DNA, 25 bp, SARS Virus
tcgtggtttcacatattgagagtac

SEQ ID NO: 153608 - DNA, 25 bp, SARS Virus
cgtggtttcactaattgagagtaca

SEQ ID NO: 153609 - DNA, 25 bp, SARS Virus
gtggtttcacttattgagagtacaa

SEQ ID NO: 153610 - DNA, 25 bp, SARS Virus
tggtttcacttaatgagagtacaac

SEQ ID NO: 153611 - DNA, 25 bp, SARS Virus
ggtttcacttatagagagtacaaca

SEQ ID NO: 153612 - DNA, 25 bp, SARS Virus
gtttcacttattaagagtacaacat

SEQ ID NO: 153613 - DNA, 25 bp, SARS Virus
tttcacttattgagagtacaacatc

SEQ ID NO: 153614 - DNA, 25 bp, SARS Virus
ttcacttattgaaagtacaacatcc

SEQ ID NO: 153615 - DNA, 25 bp, SARS Virus
tcacttattgagagtacaacatccc

SEQ ID NO: 153616 - DNA, 25 bp, SARS Virus
cacttattgagaatacaacatccca

SEQ ID NO: 153617 - DNA, 25 bp, SARS Virus
acttattgagagaacaacatcccat

SEQ ID NO: 153618 - DNA, 25 bp, SARS Virus
cttattgagagtacaacatcccatg

SEQ ID NO: 153619 - DNA, 25 bp, SARS Virus
ttattgagagtaaaacatcccatgt

SEQ ID NO: 153620 - DNA, 25 bp, SARS Virus
tattgagagtacaacatcccatgtc

SEQ ID NO: 153621 - DNA, 25 bp, SARS Virus
attgagagtacaacatcccatgtcg

SEQ ID NO: 153622 - DNA, 25 bp, SARS Virus
ttgagagtacaaaatcccatgtcga

SEQ ID NO: 153623 - DNA, 25 bp, SARS Virus
tgagagtacaacatcccatgtcgat

SEQ ID NO: 153624 - DNA, 25 bp, SARS Virus
gagagtacaacaacccatgtcgatt

SEQ ID NO: 153625 - DNA, 25 bp, SARS Virus
agagtacaacataccatgtcgattt

SEQ ID NO: 153626 - DNA, 25 bp, SARS Virus
gagtacaacatcacatgtcgatttc

SEQ ID NO: 153627 - DNA, 25 bp, SARS Virus
agtacaacatccaatgtcgatttca

SEQ ID NO: 153628 - DNA, 25 bp, SARS Virus
gtacaacatcccatgtcgatttcat

SEQ ID NO: 153629 - DNA, 25 bp, SARS Virus
tacaacatcccaagtcgatttcatt

SEQ ID NO: 153630 - DNA, 25 bp, SARS Virus
acaacatcccatatcgatttcattc

SEQ ID NO: 153631 - DNA, 25 bp, SARS Virus
caacatcccatgacgatttcattca

SEQ ID NO: 153632 - DNA, 25 bp, SARS Virus
aacatcccatgtagatttcattcac

SEQ ID NO: 153633 - DNA, 25 bp, SARS Virus
acatcccatgtcaatttcattcaca

SEQ ID NO: 153634 - DNA, 25 bp, SARS Virus
catcccatgtcgatttcattcacat

SEQ ID NO: 153635 - DNA, 25 bp, SARS Virus
atcccatgtcgaattcattcacata

SEQ ID NO: 153636 - DNA, 25 bp, SARS Virus
tcccatgtcgatatcattcacataa

SEQ ID NO: 153637 - DNA, 25 bp, SARS Virus
cccatgtcgattacattcacataaa

SEQ ID NO: 153638 - DNA, 25 bp, SARS Virus
ccatgtcgatttaattcacataaat

SEQ ID NO: 153639 - DNA, 25 bp, SARS Virus
catgtcgatttcattcacataaatt

SEQ ID NO: 153640 - DNA, 25 bp, SARS Virus
atgtcgatttcaatcacataaattc

SEQ ID NO: 153641 - DNA, 25 bp, SARS Virus
tgtcgatttcatacacataaattca

SEQ ID NO: 153642 - DNA, 25 bp, SARS Virus
gtcgatttcattaacataaattcat

SEQ ID NO: 153643 - DNA, 25 bp, SARS Virus
tcgatttcattcacataaattcata

SEQ ID NO: 153644 - DNA, 25 bp, SARS Virus
cgatttcattcaaataaattcataa

SEQ ID NO: 153645 - DNA, 25 bp, SARS Virus
gatttcattcacataaattcataac

SEQ ID NO: 153646 - DNA, 25 bp, SARS Virus
atttcattcacaaaaattcataact

SEQ ID NO: 153647 - DNA, 25 bp, SARS Virus
tttcattcacataaattcataactg

SEQ ID NO: 153648 - DNA, 25 bp, SARS Virus
ttcattcacataaattcataactgt

SEQ ID NO: 153649 - DNA, 25 bp, SARS Virus
tcattcacataaattcataactgtg

SEQ ID NO: 153650 - DNA, 25 bp, SARS Virus
cattcacataaaatcataactgtgt

SEQ ID NO: 153651 - DNA, 25 bp, SARS Virus
attcacataaatacataactgtgtc

SEQ ID NO: 153652 - DNA, 25 bp, SARS Virus
ttcacataaattaataactgtgtca

SEQ ID NO: 153653 - DNA, 25 bp, SARS Virus
tcacataaattcataactgtgtcaa

SEQ ID NO: 153654 - DNA, 25 bp, SARS Virus
cacataaattcaaaactgtgtcaac

SEQ ID NO: 153655 - DNA, 25 bp, SARS Virus
acataaattcataactgtgtcaact

SEQ ID NO: 153656 - DNA, 25 bp, SARS Virus
cataaattcataactgtgtcaactc

SEQ ID NO: 153657 - DNA, 25 bp, SARS Virus
ataaattcataaatgtgtcaactca

SEQ ID NO: 153658 - DNA, 25 bp, SARS Virus
taaattcataacagtgtcaactcat

SEQ ID NO: 153659 - DNA, 25 bp, SARS Virus
aaattcataactatgtcaactcata

SEQ ID NO: 153660 - DNA, 25 bp, SARS Virus
aattcataactgagtcaactcatat

SEQ ID NO: 153661 - DNA, 25 bp, SARS Virus
attcataactgtatcaactcatatg

SEQ ID NO: 153662 - DNA, 25 bp, SARS Virus
ttcataactgtgacaactcatatga

SEQ ID NO: 153663 - DNA, 25 bp, SARS Virus
tcataactgtgtaaactcatatgaa

SEQ ID NO: 153664 - DNA, 25 bp, SARS Virus
cataactgtgtcaactcatatgaaa

SEQ ID NO: 153665 - DNA, 25 bp, SARS Virus
ataactgtgtcaactcatatgaaac

SEQ ID NO: 153666 - DNA, 25 bp, SARS Virus
taactgtgtcaaatcatatgaaacg

SEQ ID NO: 153667 - DNA, 25 bp, SARS Virus
aactgtgtcaacacatatgaaacgc

SEQ ID NO: 153668 - DNA, 25 bp, SARS Virus
actgtgtcaactaatatgaaacgct

SEQ ID NO: 153669 - DNA, 25 bp, SARS Virus
ctgtgtcaactcatatgaaacgctg

SEQ ID NO: 153670 - DNA, 25 bp, SARS Virus
tgtgtcaactcaaatgaaacgctgt

SEQ ID NO: 153671 - DNA, 25 bp, SARS Virus
gtgtcaactcatatgaaacgctgta

SEQ ID NO: 153672 - DNA, 25 bp, SARS Virus
tgtcaactcataagaaacgctgtaa

SEQ ID NO: 153673 - DNA, 25 bp, SARS Virus
gtcaactcatataaaacgctgtaag

SEQ ID NO: 153674 - DNA, 25 bp, SARS Virus
tcaactcatatgaaacgctgtaagt

SEQ ID NO: 153675 - DNA, 25 bp, SARS Virus
caactcatatgaaacgctgtaagta

SEQ ID NO: 153676 - DNA, 25 bp, SARS Virus
aactcatatgaaacgctgtaagtag

SEQ ID NO: 153677 - DNA, 25 bp, SARS Virus
actcatatgaaaagctgtaagtagt

SEQ ID NO: 153678 - DNA, 25 bp, SARS Virus
ctcatatgaaacactgtaagtagta

SEQ ID NO: 153679 - DNA, 25 bp, SARS Virus
tcatatgaaacgatgtaagtagtaa

SEQ ID NO: 153680 - DNA, 25 bp, SARS Virus
catatgaaacgcagtaagtagtaat

SEQ ID NO: 153681 - DNA, 25 bp, SARS Virus
atatgaaacgctataagtagtaata

SEQ ID NO: 153682 - DNA, 25 bp, SARS Virus
tatgaaacgctgaaagtagtaataa

SEQ ID NO: 153683 - DNA, 25 bp, SARS Virus
atgaaacgctgtaagtagtaataag

SEQ ID NO: 153684 - DNA, 25 bp, SARS Virus
tgaaacgctgtaagtagtaataagg

SEQ ID NO: 153685 - DNA, 25 bp, SARS Virus
gaaacgctgtaaatagtaataagga

SEQ ID NO: 153686 - DNA, 25 bp, SARS Virus
aaacgctgtaagaagtaataaggaa

SEQ ID NO: 153687 - DNA, 25 bp, SARS Virus
aacgctgtaagtagtaataaggaaa

SEQ ID NO: 153688 - DNA, 25 bp, SARS Virus
acgctgtaagtaataataaggaaaa

SEQ ID NO: 153689 - DNA, 25 bp, SARS Virus
cgctgtaagtagaaataaggaaaac

SEQ ID NO: 153690 - DNA, 25 bp, SARS Virus
gctgtaagtagtaataaggaaaacc

SEQ ID NO: 153691 - DNA, 25 bp, SARS Virus
ctgtaagtagtaataaggaaaacca

SEQ ID NO: 153692 - DNA, 25 bp, SARS Virus
tgtaagtagtaaaaaggaaaaccat

SEQ ID NO: 153693 - DNA, 25 bp, SARS Virus
gtaagtagtaataaggaaaaccata

SEQ ID NO: 153694 - DNA, 25 bp, SARS Virus
taagtagtaataaggaaaaccatat

SEQ ID NO: 153695 - DNA, 25 bp, SARS Virus
aagtagtaataaagaaaaccatatt

SEQ ID NO: 153696 - DNA, 25 bp, SARS Virus
agtagtaataagaaaaaccatattg

SEQ ID NO: 153697 - DNA, 25 bp, SARS Virus
gtagtaataaggaaaaccatattgt

SEQ ID NO: 153698 - DNA, 25 bp, SARS Virus
tagtaataaggaaaaccatattgtc

SEQ ID NO: 153699 - DNA, 25 bp, SARS Virus
agtaataaggaaaaccatattgtcg

SEQ ID NO: 153700 - DNA, 25 bp, SARS Virus
gtaataaggaaaaccatattgtcgt

SEQ ID NO: 153701 - DNA, 25 bp, SARS Virus
taataaggaaaaacatattgtcgta

SEQ ID NO: 153702 - DNA, 25 bp, SARS Virus
aataaggaaaacaatattgtcgtaa

SEQ ID NO: 153703 - DNA, 25 bp, SARS Virus
ataaggaaaaccatattgtcgtaaa

SEQ ID NO: 153704 - DNA, 25 bp, SARS Virus
taaggaaaaccaaattgtcgtaaaa

SEQ ID NO: 153705 - DNA, 25 bp, SARS Virus
aaggaaaaccatattgtcgtaaaag

SEQ ID NO: 153706 - DNA, 25 bp, SARS Virus
aggaaaaccataatgtcgtaaaagt

SEQ ID NO: 153707 - DNA, 25 bp, SARS Virus
ggaaaaccatatagtcgtaaaagtg

SEQ ID NO: 153708 - DNA, 25 bp, SARS Virus
gaaaaccatattatcgtaaaagtgg

SEQ ID NO: 153709 - DNA, 25 bp, SARS Virus
aaaaccatattgacgtaaaagtggt

SEQ ID NO: 153710 - DNA, 25 bp, SARS Virus
aaaccatattgtagtaaaagtggta

SEQ ID NO: 153711 - DNA, 25 bp, SARS Virus
aaccatattgtcataaaagtggtat

SEQ ID NO: 153712 - DNA, 25 bp, SARS Virus
accatattgtcgaaaaagtggtatt

SEQ ID NO: 153713 - DNA, 25 bp, SARS Virus
ccatattgtcgtaaaagtggtatta

SEQ ID NO: 153714 - DNA, 25 bp, SARS Virus
catattgtcgtaaaagtggtattaa

SEQ ID NO: 153715 - DNA, 25 bp, SARS Virus
atattgtcgtaaaagtggtattaag

SEQ ID NO: 153716 - DNA, 25 bp, SARS Virus
tattgtcgtaaaagtggtattaaga

SEQ ID NO: 153717 - DNA, 25 bp, SARS Virus
attgtcgtaaaaatggtattaagac

SEQ ID NO: 153718 - DNA, 25 bp, SARS Virus
ttgtcgtaaaagaggtattaagact

SEQ ID NO: 153719 - DNA, 25 bp, SARS Virus
tgtcgtaaaagtagtattaagactt

SEQ ID NO: 153720 - DNA, 25 bp, SARS Virus
gtcgtaaaagtgatattaagacttc

SEQ ID NO: 153721 - DNA, 25 bp, SARS Virus
tcgtaaaagtggaattaagacttcc

SEQ ID NO: 153722 - DNA, 25 bp, SARS Virus
cgtaaaagtggtattaagacttcca

SEQ ID NO: 153723 - DNA, 25 bp, SARS Virus
gtaaaagtggtaataagacttccag

SEQ ID NO: 153724 - DNA, 25 bp, SARS Virus
taaaagtggtataaagacttccagt

SEQ ID NO: 153725 - DNA, 25 bp, SARS Virus
aaaagtggtattaagacttccagtg

SEQ ID NO: 153726 - DNA, 25 bp, SARS Virus
aaagtggtattaagacttccagtgt

SEQ ID NO: 153727 - DNA, 25 bp, SARS Virus
aagtggtattaaaacttccagtgtg

SEQ ID NO: 153728 - DNA, 25 bp, SARS Virus
agtggtattaagacttccagtgtga

SEQ ID NO: 153729 - DNA, 25 bp, SARS Virus
gtggtattaagaattccagtgtgaa

SEQ ID NO: 153730 - DNA, 25 bp, SARS Virus
tggtattaagacatccagtgtgaaa

SEQ ID NO: 153731 - DNA, 25 bp, SARS Virus
ggtattaagactaccagtgtgaaaa

SEQ ID NO: 153732 - DNA, 25 bp, SARS Virus
gtattaagacttacagtgtgaaaag

SEQ ID NO: 153733 - DNA, 25 bp, SARS Virus
tattaagacttcaagtgtgaaaagt

SEQ ID NO: 153734 - DNA, 25 bp, SARS Virus
attaagacttccagtgtgaaaagtt

SEQ ID NO: 153735 - DNA, 25 bp, SARS Virus
ttaagacttccaatgtgaaaagttc

SEQ ID NO: 153736 - DNA, 25 bp, SARS Virus
taagacttccagagtgaaaagttct

SEQ ID NO: 153737 - DNA, 25 bp, SARS Virus
aagacttccagtatgaaaagttctt

SEQ ID NO: 153738 - DNA, 25 bp, SARS Virus
agacttccagtgagaaaagttcttc

SEQ ID NO: 153739 - DNA, 25 bp, SARS Virus
gacttccagtgtaaaaagttcttcg

SEQ ID NO: 153740 - DNA, 25 bp, SARS Virus
acttccagtgtgaaaagttcttcgt

SEQ ID NO: 153741 - DNA, 25 bp, SARS Virus
cttccagtgtgaaaagttcttcgta

SEQ ID NO: 153742 - DNA, 25 bp, SARS Virus
ttccagtgtgaaaagttcttcgtaa

SEQ ID NO: 153743 - DNA, 25 bp, SARS Virus
tccagtgtgaaaagttcttcgtaag

SEQ ID NO: 153744 - DNA, 25 bp, SARS Virus
ccagtgtgaaaaattcttcgtaaga

SEQ ID NO: 153745 - DNA, 25 bp, SARS Virus
cagtgtgaaaagatcttcgtaagaa

SEQ ID NO: 153746 - DNA, 25 bp, SARS Virus
agtgtgaaaagtacttcgtaagaaa

SEQ ID NO: 153747 - DNA, 25 bp, SARS Virus
gtgtgaaaagttattcgtaagaaac

SEQ ID NO: 153748 - DNA, 25 bp, SARS Virus
tgtgaaaagttcatcgtaagaaacg

SEQ ID NO: 153749 - DNA, 25 bp, SARS Virus
gtgaaaagttctacgtaagaaacgt

SEQ ID NO: 153750 - DNA, 25 bp, SARS Virus
tgaaaagttcttagtaagaaacgta

SEQ ID NO: 153751 - DNA, 25 bp, SARS Virus
gaaaagttcttcataagaaacgtag

SEQ ID NO: 153752 - DNA, 25 bp, SARS Virus
aaaagttcttcgaaagaaacgtaga

SEQ ID NO: 153753 - DNA, 25 bp, SARS Virus
taccgggtattccaacatttccagt

SEQ ID NO: 153754 - DNA, 25 bp, SARS Virus
accgggtattcgcacatttccagtc

SEQ ID NO: 153755 - DNA, 25 bp, SARS Virus
ccgggtattcgaccatttccagtcg

SEQ ID NO: 153756 - DNA, 25 bp, SARS Virus
cgggtattcgaacatttccagtcgt

SEQ ID NO: 153757 - DNA, 25 bp, SARS Virus
gggtattcgaacctttccagtcgta

SEQ ID NO: 153758 - DNA, 25 bp, SARS Virus
ggtattcgaacacttccagtcgtaa

SEQ ID NO: 153759 - DNA, 25 bp, SARS Virus
gtattcgaacatctccagtcgtaag

SEQ ID NO: 153760 - DNA, 25 bp, SARS Virus
tattcgaacattcccagtcgtaagg

SEQ ID NO: 153761 - DNA, 25 bp, SARS Virus
attcgaacatttccagtcgtaaggt

SEQ ID NO: 153762 - DNA, 25 bp, SARS Virus
ttcgaacatttccagtcgtaaggtt

SEQ ID NO: 153763 - DNA, 25 bp, SARS Virus
tcgaacatttcccgtcgtaaggttc

SEQ ID NO: 153764 - DNA, 25 bp, SARS Virus
cgaacatttccactcgtaaggttct

SEQ ID NO: 153765 - DNA, 25 bp, SARS Virus
gaacatttccagccgtaaggttctt

SEQ ID NO: 153766 - DNA, 25 bp, SARS Virus
aacatttccagtcgtaaggttctta

SEQ ID NO: 153767 - DNA, 25 bp, SARS Virus
acatttccagtcctaaggttcttac

SEQ ID NO: 153768 - DNA, 25 bp, SARS Virus
catttccagtcgcaaggttcttacg

SEQ ID NO: 153769 - DNA, 25 bp, SARS Virus
atttccagtcgtcaggttcttacga

SEQ ID NO: 153770 - DNA, 25 bp, SARS Virus
tttccagtcgtacggttcttacgag

SEQ ID NO: 153771 - DNA, 25 bp, SARS Virus
ttccagtcgtaacgttcttacgaga

SEQ ID NO: 153772 - DNA, 25 bp, SARS Virus
tccagtcgtaagcttcttacgagac

SEQ ID NO: 153773 - DNA, 25 bp, SARS Virus
ccagtcgtaaggctcttacgagaca

SEQ ID NO: 153774 - DNA, 25 bp, SARS Virus
cagtcgtaaggtccttacgagacaa

SEQ ID NO: 153775 - DNA, 25 bp, SARS Virus
agtcgtaaggttcttacgagacaat

SEQ ID NO: 153776 - DNA, 25 bp, SARS Virus
gtcgtaaggttcctacgagacaata

SEQ ID NO: 153777 - DNA, 25 bp, SARS Virus
tcgtaaggttctcacgagacaatag

SEQ ID NO: 153778 - DNA, 25 bp, SARS Virus
cgtaaggttcttccgagacaataga

SEQ ID NO: 153779 - DNA, 25 bp, SARS Virus
gtaaggttcttacgagacaatagaa

SEQ ID NO: 153780 - DNA, 25 bp, SARS Virus
taaggttcttaccagacaatagaaa

SEQ ID NO: 153781 - DNA, 25 bp, SARS Virus
aaggttcttacgcgacaatagaaat

SEQ ID NO: 153782 - DNA, 25 bp, SARS Virus
aggttcttacgacacaatagaaatg

SEQ ID NO: 153783 - DNA, 25 bp, SARS Virus
ggttcttacgagccaatagaaatgt

SEQ ID NO: 153784 - DNA, 25 bp, SARS Virus
gttcttacgagacaatagaaatgtc

SEQ ID NO: 153785 - DNA, 25 bp, SARS Virus
ttcttacgagaccatagaaatgtcg

SEQ ID NO: 153786 - DNA, 25 bp, SARS Virus
tcttacgagacactagaaatgtcga

SEQ ID NO: 153787 - DNA, 25 bp, SARS Virus
cttacgagacaacagaaatgtcgat

SEQ ID NO: 153788 - DNA, 25 bp, SARS Virus
ttacgagacaatcgaaatgtcgata

SEQ ID NO: 153789 - DNA, 25 bp, SARS Virus
tacgagacaatacaaatgtcgatat

SEQ ID NO: 153790 - DNA, 25 bp, SARS Virus
acgagacaatagcaatgtcgatatc

SEQ ID NO: 153791 - DNA, 25 bp, SARS Virus
cgagacaatagacatgtcgatatct

SEQ ID NO: 153792 - DNA, 25 bp, SARS Virus
gagacaatagaactgtcgatatctt

SEQ ID NO: 153793 - DNA, 25 bp, SARS Virus
agacaatagaaacgtcgatatcttg

SEQ ID NO: 153794 - DNA, 25 bp, SARS Virus
gacaatagaaatctcgatatcttgg

SEQ ID NO: 153795 - DNA, 25 bp, SARS Virus
acaatagaaatgccgatatcttggt

SEQ ID NO: 153796 - DNA, 25 bp, SARS Virus
caatagaaatgtcgatatcttggtg

SEQ ID NO: 153797 - DNA, 25 bp, SARS Virus
aatagaaatgtccatatcttggtgg

SEQ ID NO: 153798 - DNA, 25 bp, SARS Virus
atagaaatgtcgctatcttggtggg

SEQ ID NO: 153799 - DNA, 25 bp, SARS Virus
tagaaatgtcgacatcttggtgggt

SEQ ID NO: 153800 - DNA, 25 bp, SARS Virus
agaaatgtcgatctcttggtgggtc

SEQ ID NO: 153801 - DNA, 25 bp, SARS Virus
gaaatgtcgataccttggtgggtcc

SEQ ID NO: 153802 - DNA, 25 bp, SARS Virus
aaatgtcgatatcttggtgggtccc

SEQ ID NO: 153803 - DNA, 25 bp, SARS Virus
aatgtcgatatcctggtgggtcccg

SEQ ID NO: 153804 - DNA, 25 bp, SARS Virus
atgtcgatatctcggtgggtcccga

SEQ ID NO: 153805 - DNA, 25 bp, SARS Virus
tgtcgatatcttcgtgggtcccgat

SEQ ID NO: 153806 - DNA, 25 bp, SARS Virus
gtcgatatcttgctgggtcccgatc

SEQ ID NO: 153807 - DNA, 25 bp, SARS Virus
tcgatatcttggcgggtcccgatca

SEQ ID NO: 153808 - DNA, 25 bp, SARS Virus
cgatatcttggtcggtcccgatcaa

SEQ ID NO: 153809 - DNA, 25 bp, SARS Virus
gatatcttggtgcgtcccgatcaaa

SEQ ID NO: 153810 - DNA, 25 bp, SARS Virus
atatcttggtggctcccgatcaaaa

SEQ ID NO: 153811 - DNA, 25 bp, SARS Virus
tatcttggtgggccccgatcaaaaa

SEQ ID NO: 153812 - DNA, 25 bp, SARS Virus
atcttggtgggtcccgatcaaaaac

SEQ ID NO: 153813 - DNA, 25 bp, SARS Virus
tcttggtgggtcccgatcaaaaacg

SEQ ID NO: 153814 - DNA, 25 bp, SARS Virus
cttggtgggtcccgatcaaaaacga

SEQ ID NO: 153815 - DNA, 25 bp, SARS Virus
ttggtgggtccccatcaaaaacgaa

SEQ ID NO: 153816 - DNA, 25 bp, SARS Virus
tggtgggtcccgctcaaaaacgaaa

SEQ ID NO: 153817 - DNA, 25 bp, SARS Virus
ggtgggtcccgaccaaaaacgaaat

SEQ ID NO: 153818 - DNA, 25 bp, SARS Virus
gtgggtcccgatcaaaaacgaaata

SEQ ID NO: 153819 - DNA, 25 bp, SARS Virus
tgggtcccgatccaaaacgaaatat

SEQ ID NO: 153820 - DNA, 25 bp, SARS Virus
gggtcccgatcacaaacgaaatatt

SEQ ID NO: 153821 - DNA, 25 bp, SARS Virus
ggtcccgatcaacaacgaaatattt

SEQ ID NO: 153822 - DNA, 25 bp, SARS Virus
gtcccgatcaaacacgaaatattta

SEQ ID NO: 153823 - DNA, 25 bp, SARS Virus
tcccgatcaaaaccgaaatatttag

SEQ ID NO: 153824 - DNA, 25 bp, SARS Virus
cccgatcaaaaacgaaatatttagg

SEQ ID NO: 153825 - DNA, 25 bp, SARS Virus
ccgatcaaaaaccaaatatttaggt

SEQ ID NO: 153826 - DNA, 25 bp, SARS Virus
cgatcaaaaacgcaatatttaggtg

SEQ ID NO: 153827 - DNA, 25 bp, SARS Virus
gatcaaaaacgacatatttaggtgt

SEQ ID NO: 153828 - DNA, 25 bp, SARS Virus
atcaaaaacgaactatttaggtgtg

SEQ ID NO: 153829 - DNA, 25 bp, SARS Virus
tcaaaaacgaaacatttaggtgtgt

SEQ ID NO: 153830 - DNA, 25 bp, SARS Virus
caaaaacgaaatctttaggtgtgtc

SEQ ID NO: 153831 - DNA, 25 bp, SARS Virus
aaaaacgaaatacttaggtgtgtct

SEQ ID NO: 153832 - DNA, 25 bp, SARS Virus
aaaacgaaatatctaggtgtgtcta

SEQ ID NO: 153833 - DNA, 25 bp, SARS Virus
aaacgaaatattcaggtgtgtctat

SEQ ID NO: 153834 - DNA, 25 bp, SARS Virus
aacgaaatatttcggtgtgtctatt

SEQ ID NO: 153835 - DNA, 25 bp, SARS Virus
acgaaatatttacgtgtgtctattc

SEQ ID NO: 153836 - DNA, 25 bp, SARS Virus
cgaaatatttagctgtgtctattca

SEQ ID NO: 153837 - DNA, 25 bp, SARS Virus
gaaatatttaggcgtgtctattcac

SEQ ID NO: 153838 - DNA, 25 bp, SARS Virus
aaatatttaggtctgtctattcact

SEQ ID NO: 153839 - DNA, 25 bp, SARS Virus
aatatttaggtgcgtctattcactt

SEQ ID NO: 153840 - DNA, 25 bp, SARS Virus
atatttaggtgtctctattcacttt

SEQ ID NO: 153841 - DNA, 25 bp, SARS Virus
tatttaggtgtgcctattcactttt

SEQ ID NO: 153842 - DNA, 25 bp, SARS Virus
atttaggtgtgtctattcacttttt

SEQ ID NO: 153843 - DNA, 25 bp, SARS Virus
tttaggtgtgtccattcactttttg

SEQ ID NO: 153844 - DNA, 25 bp, SARS Virus
ttaggtgtgtctcttcactttttgg

SEQ ID NO: 153845 - DNA, 25 bp, SARS Virus
taggtgtgtctactcactttttggg

SEQ ID NO: 153846 - DNA, 25 bp, SARS Virus
aggtgtgtctatccactttttggga

SEQ ID NO: 153847 - DNA, 25 bp, SARS Virus
ggtgtgtctattcactttttgggaa

SEQ ID NO: 153848 - DNA, 25 bp, SARS Virus
gtgtgtctattccctttttgggaag

SEQ ID NO: 153849 - DNA, 25 bp, SARS Virus
tgtgtctattcactttttgggaaga

SEQ ID NO: 153850 - DNA, 25 bp, SARS Virus
gtgtctattcaccttttgggaagaa

SEQ ID NO: 153851 - DNA, 25 bp, SARS Virus
tgtctattcactctttgggaagaaa

SEQ ID NO: 153852 - DNA, 25 bp, SARS Virus
gtctattcacttcttgggaagaaat

SEQ ID NO: 153853 - DNA, 25 bp, SARS Virus
tctattcactttctgggaagaaatc

SEQ ID NO: 153854 - DNA, 25 bp, SARS Virus
ctattcacttttcgggaagaaatct

SEQ ID NO: 153855 - DNA, 25 bp, SARS Virus
tattcactttttcggaagaaatctc

SEQ ID NO: 153856 - DNA, 25 bp, SARS Virus
attcactttttgcgaagaaatctca

SEQ ID NO: 153857 - DNA, 25 bp, SARS Virus
ttcactttttggcaagaaatctcag

SEQ ID NO: 153858 - DNA, 25 bp, SARS Virus
tcactttttgggcagaaatctcagt

SEQ ID NO: 153859 - DNA, 25 bp, SARS Virus
cactttttgggacgaaatctcagta

SEQ ID NO: 153860 - DNA, 25 bp, SARS Virus
actttttgggaacaaatctcagtaa

SEQ ID NO: 153861 - DNA, 25 bp, SARS Virus
ctttttgggaagcaatctcagtaag

SEQ ID NO: 153862 - DNA, 25 bp, SARS Virus
tttttgggaagacatctcagtaaga

SEQ ID NO: 153863 - DNA, 25 bp, SARS Virus
ttttgggaagaactctcagtaagag

SEQ ID NO: 153864 - DNA, 25 bp, SARS Virus
tttgggaagaaacctcagtaagaga

SEQ ID NO: 153865 - DNA, 25 bp, SARS Virus
ttgggaagaaatctcagtaagagaa

SEQ ID NO: 153866 - DNA, 25 bp, SARS Virus
tgggaagaaatcccagtaagagaaa

SEQ ID NO: 153867 - DNA, 25 bp, SARS Virus
gggaagaaatctcagtaagagaaaa

SEQ ID NO: 153868 - DNA, 25 bp, SARS Virus
ggaagaaatctccgtaagagaaaac

SEQ ID NO: 153869 - DNA, 25 bp, SARS Virus
gaagaaatctcactaagagaaaaca

SEQ ID NO: 153870 - DNA, 25 bp, SARS Virus
aagaaatctcagcaagagaaaacag

SEQ ID NO: 153871 - DNA, 25 bp, SARS Virus
agaaatctcagtcagagaaaacagt

SEQ ID NO: 153872 - DNA, 25 bp, SARS Virus
gaaatctcagtacgagaaaacagtg

SEQ ID NO: 153873 - DNA, 25 bp, SARS Virus
aaatctcagtaacagaaaacagtgt

SEQ ID NO: 153874 - DNA, 25 bp, SARS Virus
aatctcagtaagcgaaaacagtgta

SEQ ID NO: 153875 - DNA, 25 bp, SARS Virus
atctcagtaagacaaaacagtgtac

SEQ ID NO: 153876 - DNA, 25 bp, SARS Virus
tctcagtaagagcaaacagtgtaca

SEQ ID NO: 153877 - DNA, 25 bp, SARS Virus
ctcagtaagagacaacagtgtacaa

SEQ ID NO: 153878 - DNA, 25 bp, SARS Virus
tcagtaagagaacacagtgtacaaa

SEQ ID NO: 153879 - DNA, 25 bp, SARS Virus
cagtaagagaaaccagtgtacaaac

SEQ ID NO: 153880 - DNA, 25 bp, SARS Virus
agtaagagaaaacagtgtacaaacc

SEQ ID NO: 153881 - DNA, 25 bp, SARS Virus
gtaagagaaaaccgtgtacaaacca

SEQ ID NO: 153882 - DNA, 25 bp, SARS Virus
taagagaaaacactgtacaaaccag

SEQ ID NO: 153883 - DNA, 25 bp, SARS Virus
aagagaaaacagcgtacaaaccagg

SEQ ID NO: 153884 - DNA, 25 bp, SARS Virus
agagaaaacagtctacaaaccagga

SEQ ID NO: 153885 - DNA, 25 bp, SARS Virus
gagaaaacagtgcacaaaccaggat

SEQ ID NO: 153886 - DNA, 25 bp, SARS Virus
agaaaacagtgtccaaaccaggatc

SEQ ID NO: 153887 - DNA, 25 bp, SARS Virus
gaaaacagtgtacaaaccaggatcc

SEQ ID NO: 153888 - DNA, 25 bp, SARS Virus
aaaacagtgtaccaaccaggatccc

SEQ ID NO: 153889 - DNA, 25 bp, SARS Virus
aaacagtgtacacaccaggatccca

SEQ ID NO: 153890 - DNA, 25 bp, SARS Virus
aacagtgtacaacccaggatcccag

SEQ ID NO: 153891 - DNA, 25 bp, SARS Virus
acagtgtacaaaccaggatcccagt

SEQ ID NO: 153892 - DNA, 25 bp, SARS Virus
cagtgtacaaaccaggatcccagta

SEQ ID NO: 153893 - DNA, 25 bp, SARS Virus
agtgtacaaacccggatcccagtat

SEQ ID NO: 153894 - DNA, 25 bp, SARS Virus
gtgtacaaaccacgatcccagtatg

SEQ ID NO: 153895 - DNA, 25 bp, SARS Virus
tgtacaaaccagcatcccagtatgt

SEQ ID NO: 153896 - DNA, 25 bp, SARS Virus
gtacaaaccaggctcccagtatgta

SEQ ID NO: 153897 - DNA, 25 bp, SARS Virus
tacaaaccaggaccccagtatgtat

SEQ ID NO: 153898 - DNA, 25 bp, SARS Virus
acaaaccaggatcccagtatgtata

SEQ ID NO: 153899 - DNA, 25 bp, SARS Virus
caaaccaggatcccagtatgtatag

SEQ ID NO: 153900 - DNA, 25 bp, SARS Virus
aaaccaggatcccagtatgtatagc

SEQ ID NO: 153901 - DNA, 25 bp, SARS Virus
aaccaggatccccgtatgtatagcg

SEQ ID NO: 153902 - DNA, 25 bp, SARS Virus
accaggatcccactatgtatagcga

SEQ ID NO: 153903 - DNA, 25 bp, SARS Virus
ccaggatcccagcatgtatagcgat

SEQ ID NO: 153904 - DNA, 25 bp, SARS Virus
caggatcccagtctgtatagcgatt

SEQ ID NO: 153905 - DNA, 25 bp, SARS Virus
aggatcccagtacgtatagcgatta

SEQ ID NO: 153906 - DNA, 25 bp, SARS Virus
ggatcccagtatctatagcgattat

SEQ ID NO: 153907 - DNA, 25 bp, SARS Virus
gatcccagtatgcatagcgattatt

SEQ ID NO: 153908 - DNA, 25 bp, SARS Virus
atcccagtatgtctagcgattatta

SEQ ID NO: 153909 - DNA, 25 bp, SARS Virus
tcccagtatgtacagcgattattat

SEQ ID NO: 153910 - DNA, 25 bp, SARS Virus
cccagtatgtatcgcgattattatt

SEQ ID NO: 153911 - DNA, 25 bp, SARS Virus
ccagtatgtataccgattattattc

SEQ ID NO: 153912 - DNA, 25 bp, SARS Virus
cagtatgtatagcgattattattcc

SEQ ID NO: 153913 - DNA, 25 bp, SARS Virus
agtatgtatagccattattattcca

SEQ ID NO: 153914 - DNA, 25 bp, SARS Virus
gtatgtatagcgcttattattccag

SEQ ID NO: 153915 - DNA, 25 bp, SARS Virus
tatgtatagcgactattattccagg

SEQ ID NO: 153916 - DNA, 25 bp, SARS Virus
atgtatagcgatcattattccaggg

SEQ ID NO: 153917 - DNA, 25 bp, SARS Virus
tgtatagcgattcttattccagggt

SEQ ID NO: 153918 - DNA, 25 bp, SARS Virus
gtatagcgattactattccagggta

SEQ ID NO: 153919 - DNA, 25 bp, SARS Virus
tatagcgattatcattccagggtaa

SEQ ID NO: 153920 - DNA, 25 bp, SARS Virus
atagcgattattcttccagggtaaa

SEQ ID NO: 153921 - DNA, 25 bp, SARS Virus
tagcgattattactccagggtaaat

SEQ ID NO: 153922 - DNA, 25 bp, SARS Virus
agcgattattatcccagggtaaata

SEQ ID NO: 153923 - DNA, 25 bp, SARS Virus
gcgattattattccagggtaaataa

SEQ ID NO: 153924 - DNA, 25 bp, SARS Virus
cgattattattccagggtaaataat

SEQ ID NO: 153925 - DNA, 25 bp, SARS Virus
gattattattcccgggtaaataatc

SEQ ID NO: 153926 - DNA, 25 bp, SARS Virus
attattattccacggtaaataatcg

SEQ ID NO: 153927 - DNA, 25 bp, SARS Virus
ttattattccagcgtaaataatcgg

SEQ ID NO: 153928 - DNA, 25 bp, SARS Virus
tattattccaggctaaataatcggc

SEQ ID NO: 153929 - DNA, 25 bp, SARS Virus
attattccagggcaaataatcggca

SEQ ID NO: 153930 - DNA, 25 bp, SARS Virus
ttattccagggtcaataatcggcat

SEQ ID NO: 153931 - DNA, 25 bp, SARS Virus
tattccagggtacataatcggcata

SEQ ID NO: 153932 - DNA, 25 bp, SARS Virus
attccagggtaactaatcggcatac

SEQ ID NO: 153933 - DNA, 25 bp, SARS Virus
ttccagggtaaacaatcggcataca

SEQ ID NO: 153934 - DNA, 25 bp, SARS Virus
tccagggtaaatcatcggcatacat

SEQ ID NO: 153935 - DNA, 25 bp, SARS Virus
ccagggtaaatactcggcatacatg

SEQ ID NO: 153936 - DNA, 25 bp, SARS Virus
cagggtaaataaccggcatacatga

SEQ ID NO: 153937 - DNA, 25 bp, SARS Virus
agggtaaataatcggcatacatgac

SEQ ID NO: 153938 - DNA, 25 bp, SARS Virus
gggtaaataatccgcatacatgaca

SEQ ID NO: 153939 - DNA, 25 bp, SARS Virus
ggtaaataatcgccatacatgacaa

SEQ ID NO: 153940 - DNA, 25 bp, SARS Virus
gtaaataatcggcatacatgacaac

SEQ ID NO: 153941 - DNA, 25 bp, SARS Virus
taaataatcggcctacatgacaacg

SEQ ID NO: 153942 - DNA, 25 bp, SARS Virus
aaataatcggcacacatgacaacgt

SEQ ID NO: 153943 - DNA, 25 bp, SARS Virus
aataatcggcatccatgacaacgtg

SEQ ID NO: 153944 - DNA, 25 bp, SARS Virus
ataatcggcatacatgacaacgtgt

SEQ ID NO: 153945 - DNA, 25 bp, SARS Virus
taatcggcatacctgacaacgtgtc

SEQ ID NO: 153946 - DNA, 25 bp, SARS Virus
aatcggcatacacgacaacgtgtca

SEQ ID NO: 153947 - DNA, 25 bp, SARS Virus
atcggcatacatcacaacgtgtcag

SEQ ID NO: 153948 - DNA, 25 bp, SARS Virus
tcggcatacatgccaacgtgtcaga

SEQ ID NO: 153949 - DNA, 25 bp, SARS Virus
cggcatacatgacaacgtgtcagag

SEQ ID NO: 153950 - DNA, 25 bp, SARS Virus
ggcatacatgaccacgtgtcagagg

SEQ ID NO: 153951 - DNA, 25 bp, SARS Virus
gcatacatgacaccgtgtcagaggt

SEQ ID NO: 153952 - DNA, 25 bp, SARS Virus
catacatgacaacgtgtcagaggtt

SEQ ID NO: 153953 - DNA, 25 bp, SARS Virus
atacatgacaacctgtcagaggtta

SEQ ID NO: 153954 - DNA, 25 bp, SARS Virus
tacatgacaacgcgtcagaggttaa

SEQ ID NO: 153955 - DNA, 25 bp, SARS Virus
acatgacaacgtctcagaggttaat

SEQ ID NO: 153956 - DNA, 25 bp, SARS Virus
catgacaacgtgccagaggttaatt

SEQ ID NO: 153957 - DNA, 25 bp, SARS Virus
atgacaacgtgtcagaggttaattt

SEQ ID NO: 153958 - DNA, 25 bp, SARS Virus
tgacaacgtgtccgaggttaatttc

SEQ ID NO: 153959 - DNA, 25 bp, SARS Virus
gacaacgtgtcacaggttaatttca

SEQ ID NO: 153960 - DNA, 25 bp, SARS Virus
acaacgtgtcagcggttaatttcat

SEQ ID NO: 153961 - DNA, 25 bp, SARS Virus
caacgtgtcagacgttaatttcatc

SEQ ID NO: 153962 - DNA, 25 bp, SARS Virus
aacgtgtcagagcttaatttcatct

SEQ ID NO: 153963 - DNA, 25 bp, SARS Virus
acgtgtcagaggctaatttcatctt

SEQ ID NO: 153964 - DNA, 25 bp, SARS Virus
cgtgtcagaggtcaatttcatctta

SEQ ID NO: 153965 - DNA, 25 bp, SARS Virus
gtgtcagaggttcatttcatcttag

SEQ ID NO: 153966 - DNA, 25 bp, SARS Virus
tgtcagaggttactttcatcttaga

SEQ ID NO: 153967 - DNA, 25 bp, SARS Virus
gtcagaggttaacttcatcttagac

SEQ ID NO: 153968 - DNA, 25 bp, SARS Virus
tcagaggttaatctcatcttagacg

SEQ ID NO: 153969 - DNA, 25 bp, SARS Virus
cagaggttaattccatcttagacgc

SEQ ID NO: 153970 - DNA, 25 bp, SARS Virus
agaggttaatttcatcttagacgca

SEQ ID NO: 153971 - DNA, 25 bp, SARS Virus
gaggttaatttcctcttagacgcag

SEQ ID NO: 153972 - DNA, 25 bp, SARS Virus
aggttaatttcaccttagacgcagc

SEQ ID NO: 153973 - DNA, 25 bp, SARS Virus
ggttaatttcatcttagacgcagcc

SEQ ID NO: 153974 - DNA, 25 bp, SARS Virus
gttaatttcatcctagacgcagcct

SEQ ID NO: 153975 - DNA, 25 bp, SARS Virus
ttaatttcatctcagacgcagcctc

SEQ ID NO: 153976 - DNA, 25 bp, SARS Virus
taatttcatcttcgacgcagcctct

SEQ ID NO: 153977 - DNA, 25 bp, SARS Virus
aatttcatcttacacgcagcctctg

SEQ ID NO: 153978 - DNA, 25 bp, SARS Virus
atttcatcttagccgcagcctctgc

SEQ ID NO: 153979 - DNA, 25 bp, SARS Virus
tttcatcttagacgcagcctctgct

SEQ ID NO: 153980 - DNA, 25 bp, SARS Virus
ttcatcttagacccagcctctgctt

SEQ ID NO: 153981 - DNA, 25 bp, SARS Virus
tcatcttagacgcagcctctgcttc

SEQ ID NO: 153982 - DNA, 25 bp, SARS Virus
catcttagacgccgcctctgcttca

SEQ ID NO: 153983 - DNA, 25 bp, SARS Virus
atcttagacgcaccctctgcttcag

SEQ ID NO: 153984 - DNA, 25 bp, SARS Virus
tcttagacgcagcctctgcttcagt

SEQ ID NO: 153985 - DNA, 25 bp, SARS Virus
cttagacgcagcctctgcttcagta

SEQ ID NO: 153986 - DNA, 25 bp, SARS Virus
ttagacgcagcccctgcttcagtaa

SEQ ID NO: 153987 - DNA, 25 bp, SARS Virus
tagacgcagcctctgcttcagtaat

SEQ ID NO: 153988 - DNA, 25 bp, SARS Virus
agacgcagcctccgcttcagtaatt

SEQ ID NO: 153989 - DNA, 25 bp, SARS Virus
gacgcagcctctccttcagtaattc

SEQ ID NO: 153990 - DNA, 25 bp, SARS Virus
acgcagcctctgcttcagtaattct

SEQ ID NO: 153991 - DNA, 25 bp, SARS Virus
cgcagcctctgcctcagtaattcta

SEQ ID NO: 153992 - DNA, 25 bp, SARS Virus
gcagcctctgctccagtaattctag

SEQ ID NO: 153993 - DNA, 25 bp, SARS Virus
cagcctctgcttcagtaattctaga

SEQ ID NO: 153994 - DNA, 25 bp, SARS Virus
agcctctgcttccgtaattctagac

SEQ ID NO: 153995 - DNA, 25 bp, SARS Virus
gcctctgcttcactaattctagact

SEQ ID NO: 153996 - DNA, 25 bp, SARS Virus
cctctgcttcagcaattctagactt

SEQ ID NO: 153997 - DNA, 25 bp, SARS Virus
ctctgcttcagtcattctagactta

SEQ ID NO: 153998 - DNA, 25 bp, SARS Virus
tctgcttcagtacttctagacttag

SEQ ID NO: 153999 - DNA, 25 bp, SARS Virus
ctgcttcagtaactctagacttagc

SEQ ID NO: 154000 - DNA, 25 bp, SARS Virus
tgcttcagtaatcctagacttagct

SEQ ID NO: 154001 - DNA, 25 bp, SARS Virus
gcttcagtaattctagacttagctg

SEQ ID NO: 154002 - DNA, 25 bp, SARS Virus
cttcagtaattccagacttagctgt

SEQ ID NO: 154003 - DNA, 25 bp, SARS Virus
ttcagtaattctcgacttagctgtt

SEQ ID NO: 154004 - DNA, 25 bp, SARS Virus
tcagtaattctacacttagctgttc

SEQ ID NO: 154005 - DNA, 25 bp, SARS Virus
cagtaattctagccttagctgttca

SEQ ID NO: 154006 - DNA, 25 bp, SARS Virus
agtaattctagacttagctgttcat

SEQ ID NO: 154007 - DNA, 25 bp, SARS Virus
gtaattctagacctagctgttcatc

SEQ ID NO: 154008 - DNA, 25 bp, SARS Virus
taattctagactcagctgttcatca

SEQ ID NO: 154009 - DNA, 25 bp, SARS Virus
aattctagacttcgctgttcatcac

SEQ ID NO: 154010 - DNA, 25 bp, SARS Virus
attctagacttacctgttcatcaca

SEQ ID NO: 154011 - DNA, 25 bp, SARS Virus
ttctagacttagctgttcatcacac

SEQ ID NO: 154012 - DNA, 25 bp, SARS Virus
tctagacttagccgttcatcacacg

SEQ ID NO: 154013 - DNA, 25 bp, SARS Virus
ctagacttagctcttcatcacacgg

SEQ ID NO: 154014 - DNA, 25 bp, SARS Virus
tagacttagctgctcatcacacggt

SEQ ID NO: 154015 - DNA, 25 bp, SARS Virus
agacttagctgtccatcacacggtc

SEQ ID NO: 154016 - DNA, 25 bp, SARS Virus
gacttagctgttcatcacacggtca

SEQ ID NO: 154017 - DNA, 25 bp, SARS Virus
acttagctgttcctcacacggtcaa

SEQ ID NO: 154018 - DNA, 25 bp, SARS Virus
cttagctgttcaccacacggtcaac

SEQ ID NO: 154019 - DNA, 25 bp, SARS Virus
ttagctgttcatcacacggtcaacc

SEQ ID NO: 154020 - DNA, 25 bp, SARS Virus
tagctgttcatcccacggtcaaccg

SEQ ID NO: 154021 - DNA, 25 bp, SARS Virus
agctgttcatcacacggtcaaccgt

SEQ ID NO: 154022 - DNA, 25 bp, SARS Virus
gctgttcatcacccggtcaaccgtt

SEQ ID NO: 154023 - DNA, 25 bp, SARS Virus
ctgttcatcacacggtcaaccgttg

SEQ ID NO: 154024 - DNA, 25 bp, SARS Virus
tgttcatcacaccgtcaaccgttgg

SEQ ID NO: 154025 - DNA, 25 bp, SARS Virus
gttcatcacacgctcaaccgttggt

SEQ ID NO: 154026 - DNA, 25 bp, SARS Virus
ttcatcacacggccaaccgttggta

SEQ ID NO: 154027 - DNA, 25 bp, SARS Virus
tcatcacacggtcaaccgttggtaa

SEQ ID NO: 154028 - DNA, 25 bp, SARS Virus
catcacacggtccaccgttggtaac

SEQ ID NO: 154029 - DNA, 25 bp, SARS Virus
atcacacggtcacccgttggtaaca

SEQ ID NO: 154030 - DNA, 25 bp, SARS Virus
tcacacggtcaaccgttggtaacag

SEQ ID NO: 154031 - DNA, 25 bp, SARS Virus
cacacggtcaaccgttggtaacaga

SEQ ID NO: 154032 - DNA, 25 bp, SARS Virus
acacggtcaacccttggtaacagac

SEQ ID NO: 154033 - DNA, 25 bp, SARS Virus
cacggtcaaccgctggtaacagact

SEQ ID NO: 154034 - DNA, 25 bp, SARS Virus
acggtcaaccgtcggtaacagactc

SEQ ID NO: 154035 - DNA, 25 bp, SARS Virus
cggtcaaccgttcgtaacagactcg

SEQ ID NO: 154036 - DNA, 25 bp, SARS Virus
ggtcaaccgttgctaacagactcgt

SEQ ID NO: 154037 - DNA, 25 bp, SARS Virus
gtcaaccgttggcaacagactcgtg

SEQ ID NO: 154038 - DNA, 25 bp, SARS Virus
tcaaccgttggtcacagactcgtgt

SEQ ID NO: 154039 - DNA, 25 bp, SARS Virus
caaccgttggtaccagactcgtgtc

SEQ ID NO: 154040 - DNA, 25 bp, SARS Virus
aaccgttggtaacagactcgtgtcg

SEQ ID NO: 154041 - DNA, 25 bp, SARS Virus
accgttggtaaccgactcgtgtcga

SEQ ID NO: 154042 - DNA, 25 bp, SARS Virus
ccgttggtaacacactcgtgtcgac

SEQ ID NO: 154043 - DNA, 25 bp, SARS Virus
cgttggtaacagcctcgtgtcgaca

SEQ ID NO: 154044 - DNA, 25 bp, SARS Virus
gttggtaacagactcgtgtcgacat

SEQ ID NO: 154045 - DNA, 25 bp, SARS Virus
ttggtaacagacccgtgtcgacatg

SEQ ID NO: 154046 - DNA, 25 bp, SARS Virus
tggtaacagactcgtgtcgacatgg

SEQ ID NO: 154047 - DNA, 25 bp, SARS Virus
ggtaacagactcctgtcgacatgga

SEQ ID NO: 154048 - DNA, 25 bp, SARS Virus
gtaacagactcgcgtcgacatggac

SEQ ID NO: 154049 - DNA, 25 bp, SARS Virus
taacagactcgtctcgacatggacc

SEQ ID NO: 154050 - DNA, 25 bp, SARS Virus
aacagactcgtgccgacatggacca

SEQ ID NO: 154051 - DNA, 25 bp, SARS Virus
acagactcgtgtcgacatggaccac

SEQ ID NO: 154052 - DNA, 25 bp, SARS Virus
cagactcgtgtccacatggaccacg

SEQ ID NO: 154053 - DNA, 25 bp, SARS Virus
agactcgtgtcgccatggaccacgt

SEQ ID NO: 154054 - DNA, 25 bp, SARS Virus
gactcgtgtcgacatggaccacgtt

SEQ ID NO: 154055 - DNA, 25 bp, SARS Virus
actcgtgtcgacctggaccacgttg

SEQ ID NO: 154056 - DNA, 25 bp, SARS Virus
ctcgtgtcgacacggaccacgttga

SEQ ID NO: 154057 - DNA, 25 bp, SARS Virus
tcgtgtcgacatcgaccacgttgag

SEQ ID NO: 154058 - DNA, 25 bp, SARS Virus
cgtgtcgacatgcaccacgttgagg

SEQ ID NO: 154059 - DNA, 25 bp, SARS Virus
gtgtcgacatggcccacgttgagga

SEQ ID NO: 154060 - DNA, 25 bp, SARS Virus
tgtcgacatggaccacgttgaggaa

SEQ ID NO: 154061 - DNA, 25 bp, SARS Virus
gtcgacatggaccacgttgaggaaa

SEQ ID NO: 154062 - DNA, 25 bp, SARS Virus
tcgacatggaccccgttgaggaaat

SEQ ID NO: 154063 - DNA, 25 bp, SARS Virus
cgacatggaccacgttgaggaaata

SEQ ID NO: 154064 - DNA, 25 bp, SARS Virus
gacatggaccaccttgaggaaatag

SEQ ID NO: 154065 - DNA, 25 bp, SARS Virus
acatggaccacgctgaggaaatagt

SEQ ID NO: 154066 - DNA, 25 bp, SARS Virus
catggaccacgtcgaggaaatagtc

SEQ ID NO: 154067 - DNA, 25 bp, SARS Virus
atggaccacgttcaggaaatagtct

SEQ ID NO: 154068 - DNA, 25 bp, SARS Virus
tggaccacgttgcggaaatagtctc

SEQ ID NO: 154069 - DNA, 25 bp, SARS Virus
ggaccacgttgacgaaatagtctcg

SEQ ID NO: 154070 - DNA, 25 bp, SARS Virus
gaccacgttgagcaaatagtctcgg

SEQ ID NO: 154071 - DNA, 25 bp, SARS Virus
accacgttgaggcaatagtctcggt

SEQ ID NO: 154072 - DNA, 25 bp, SARS Virus
ccacgttgaggacatagtctcggtc

SEQ ID NO: 154073 - DNA, 25 bp, SARS Virus
cacgttgaggaactagtctcggtcg

SEQ ID NO: 154074 - DNA, 25 bp, SARS Virus
acgttgaggaaacagtctcggtcgt

SEQ ID NO: 154075 - DNA, 25 bp, SARS Virus
cgttgaggaaatcgtctcggtcgtg

SEQ ID NO: 154076 - DNA, 25 bp, SARS Virus
gttgaggaaatactctcggtcgtgg

SEQ ID NO: 154077 - DNA, 25 bp, SARS Virus
ttgaggaaatagcctcggtcgtggt

SEQ ID NO: 154078 - DNA, 25 bp, SARS Virus
tgaggaaatagtctcggtcgtggtt

SEQ ID NO: 154079 - DNA, 25 bp, SARS Virus
gaggaaatagtcccggtcgtggttt

SEQ ID NO: 154080 - DNA, 25 bp, SARS Virus
aggaaatagtctcggtcgtggtttc

SEQ ID NO: 154081 - DNA, 25 bp, SARS Virus
ggaaatagtctccgtcgtggtttca

SEQ ID NO: 154082 - DNA, 25 bp, SARS Virus
gaaatagtctcgctcgtggtttcac

SEQ ID NO: 154083 - DNA, 25 bp, SARS Virus
aaatagtctcggccgtggtttcact

SEQ ID NO: 154084 - DNA, 25 bp, SARS Virus
aatagtctcggtcgtggtttcactt

SEQ ID NO: 154085 - DNA, 25 bp, SARS Virus
atagtctcggtcctggtttcactta

SEQ ID NO: 154086 - DNA, 25 bp, SARS Virus
tagtctcggtcgcggtttcacttat

SEQ ID NO: 154087 - DNA, 25 bp, SARS Virus
agtctcggtcgtcgtttcacttatt

SEQ ID NO: 154088 - DNA, 25 bp, SARS Virus
gtctcggtcgtgctttcacttattg

SEQ ID NO: 154089 - DNA, 25 bp, SARS Virus
tctcggtcgtggcttcacttattga

SEQ ID NO: 154090 - DNA, 25 bp, SARS Virus
ctcggtcgtggtctcacttattgag

SEQ ID NO: 154091 - DNA, 25 bp, SARS Virus
tcggtcgtggttccacttattgaga

SEQ ID NO: 154092 - DNA, 25 bp, SARS Virus
cggtcgtggtttcacttattgagag

SEQ ID NO: 154093 - DNA, 25 bp, SARS Virus
ggtcgtggtttcccttattgagagt

SEQ ID NO: 154094 - DNA, 25 bp, SARS Virus
gtcgtggtttcacttattgagagta

SEQ ID NO: 154095 - DNA, 25 bp, SARS Virus
tcgtggtttcacctattgagagtac

SEQ ID NO: 154096 - DNA, 25 bp, SARS Virus
cgtggtttcactcattgagagtaca

SEQ ID NO: 154097 - DNA, 25 bp, SARS Virus
gtggtttcacttcttgagagtacaa

SEQ ID NO: 154098 - DNA, 25 bp, SARS Virus
tggtttcacttactgagagtacaac

SEQ ID NO: 154099 - DNA, 25 bp, SARS Virus
ggtttcacttatcgagagtacaaca

SEQ ID NO: 154100 - DNA, 25 bp, SARS Virus
gtttcacttattcagagtacaacat

SEQ ID NO: 154101 - DNA, 25 bp, SARS Virus
tttcacttattgcgagtacaacatc

SEQ ID NO: 154102 - DNA, 25 bp, SARS Virus
ttcacttattgacagtacaacatcc

SEQ ID NO: 154103 - DNA, 25 bp, SARS Virus
tcacttattgagcgtacaacatccc

SEQ ID NO: 154104 - DNA, 25 bp, SARS Virus
cacttattgagactacaacatccca

SEQ ID NO: 154105 - DNA, 25 bp, SARS Virus
acttattgagagcacaacatcccat

SEQ ID NO: 154106 - DNA, 25 bp, SARS Virus
cttattgagagtccaacatcccatg

SEQ ID NO: 154107 - DNA, 25 bp, SARS Virus
ttattgagagtacaacatcccatgt

SEQ ID NO: 154108 - DNA, 25 bp, SARS Virus
tattgagagtaccacatcccatgtc

SEQ ID NO: 154109 - DNA, 25 bp, SARS Virus
attgagagtacaccatcccatgtcg

SEQ ID NO: 154110 - DNA, 25 bp, SARS Virus
ttgagagtacaacatcccatgtcga

SEQ ID NO: 154111 - DNA, 25 bp, SARS Virus
tgagagtacaacctcccatgtcgat

SEQ ID NO: 154112 - DNA, 25 bp, SARS Virus
gagagtacaacaccccatgtcgatt

SEQ ID NO: 154113 - DNA, 25 bp, SARS Virus
agagtacaacatcccatgtcgattt

SEQ ID NO: 154114 - DNA, 25 bp, SARS Virus
gagtacaacatcccatgtcgatttc

SEQ ID NO: 154115 - DNA, 25 bp, SARS Virus
agtacaacatcccatgtcgatttca

SEQ ID NO: 154116 - DNA, 25 bp, SARS Virus
gtacaacatcccctgtcgatttcat

SEQ ID NO: 154117 - DNA, 25 bp, SARS Virus
tacaacatcccacgtcgatttcatt

SEQ ID NO: 154118 - DNA, 25 bp, SARS Virus
acaacatcccatctcgatttcattc

SEQ ID NO: 154119 - DNA, 25 bp, SARS Virus
caacatcccatgccgatttcattca

SEQ ID NO: 154120 - DNA, 25 bp, SARS Virus
aacatcccatgtcgatttcattcac

SEQ ID NO: 154121 - DNA, 25 bp, SARS Virus
acatcccatgtccatttcattcaca

SEQ ID NO: 154122 - DNA, 25 bp, SARS Virus
catcccatgtcgctttcattcacat

SEQ ID NO: 154123 - DNA, 25 bp, SARS Virus
atcccatgtcgacttcattcacata

SEQ ID NO: 154124 - DNA, 25 bp, SARS Virus
tcccatgtcgatctcattcacataa

SEQ ID NO: 154125 - DNA, 25 bp, SARS Virus
cccatgtcgattccattcacataaa

SEQ ID NO: 154126 - DNA, 25 bp, SARS Virus
ccatgtcgatttcattcacataaat

SEQ ID NO: 154127 - DNA, 25 bp, SARS Virus
catgtcgatttccttcacataaatt

SEQ ID NO: 154128 - DNA, 25 bp, SARS Virus
atgtcgatttcactcacataaattc

SEQ ID NO: 154129 - DNA, 25 bp, SARS Virus
tgtcgatttcatccacataaattca

SEQ ID NO: 154130 - DNA, 25 bp, SARS Virus
gtcgatttcattcacataaattcat

SEQ ID NO: 154131 - DNA, 25 bp, SARS Virus
tcgatttcattcccataaattcata

SEQ ID NO: 154132 - DNA, 25 bp, SARS Virus
cgatttcattcacataaattcataa

SEQ ID NO: 154133 - DNA, 25 bp, SARS Virus
gatttcattcacctaaattcataac

SEQ ID NO: 154134 - DNA, 25 bp, SARS Virus
atttcattcacacaaattcataact

SEQ ID NO: 154135 - DNA, 25 bp, SARS Virus
tttcattcacatcaattcataactg

SEQ ID NO: 154136 - DNA, 25 bp, SARS Virus
ttcattcacatacattcataactgt

SEQ ID NO: 154137 - DNA, 25 bp, SARS Virus
tcattcacataacttcataactgtg

SEQ ID NO: 154138 - DNA, 25 bp, SARS Virus
cattcacataaactcataactgtgt

SEQ ID NO: 154139 - DNA, 25 bp, SARS Virus
attcacataaatccataactgtgtc

SEQ ID NO: 154140 - DNA, 25 bp, SARS Virus
ttcacataaattcataactgtgtca

SEQ ID NO: 154141 - DNA, 25 bp, SARS Virus
tcacataaattcctaactgtgtcaa

SEQ ID NO: 154142 - DNA, 25 bp, SARS Virus
cacataaattcacaactgtgtcaac

SEQ ID NO: 154143 - DNA, 25 bp, SARS Virus
acataaattcatcactgtgtcaact

SEQ ID NO: 154144 - DNA, 25 bp, SARS Virus
cataaattcatacctgtgtcaactc

SEQ ID NO: 154145 - DNA, 25 bp, SARS Virus
ataaattcataactgtgtcaactca

SEQ ID NO: 154146 - DNA, 25 bp, SARS Virus
taaattcataaccgtgtcaactcat

SEQ ID NO: 154147 - DNA, 25 bp, SARS Virus
aaattcataactctgtcaactcata

SEQ ID NO: 154148 - DNA, 25 bp, SARS Virus
aattcataactgcgtcaactcatat

SEQ ID NO: 154149 - DNA, 25 bp, SARS Virus
attcataactgtctcaactcatatg

SEQ ID NO: 154150 - DNA, 25 bp, SARS Virus
ttcataactgtgccaactcatatga

SEQ ID NO: 154151 - DNA, 25 bp, SARS Virus
tcataactgtgtcaactcatatgaa

SEQ ID NO: 154152 - DNA, 25 bp, SARS Virus
cataactgtgtccactcatatgaaa

SEQ ID NO: 154153 - DNA, 25 bp, SARS Virus
ataactgtgtcacctcatatgaaac

SEQ ID NO: 154154 - DNA, 25 bp, SARS Virus
taactgtgtcaactcatatgaaacg

SEQ ID NO: 154155 - DNA, 25 bp, SARS Virus
aactgtgtcaacccatatgaaacgc

SEQ ID NO: 154156 - DNA, 25 bp, SARS Virus
actgtgtcaactcatatgaaacgct

SEQ ID NO: 154157 - DNA, 25 bp, SARS Virus
ctgtgtcaactcctatgaaacgctg

SEQ ID NO: 154158 - DNA, 25 bp, SARS Virus
tgtgtcaactcacatgaaacgctgt

SEQ ID NO: 154159 - DNA, 25 bp, SARS Virus
gtgtcaactcatctgaaacgctgta

SEQ ID NO: 154160 - DNA, 25 bp, SARS Virus
tgtcaactcatacgaaacgctgtaa

SEQ ID NO: 154161 - DNA, 25 bp, SARS Virus
gtcaactcatatcaaacgctgtaag

SEQ ID NO: 154162 - DNA, 25 bp, SARS Virus
tcaactcatatgcaacgctgtaagt

SEQ ID NO: 154163 - DNA, 25 bp, SARS Virus
caactcatatgacacgctgtaagta

SEQ ID NO: 154164 - DNA, 25 bp, SARS Virus
aactcatatgaaccgctgtaagtag

SEQ ID NO: 154165 - DNA, 25 bp, SARS Virus
actcatatgaaacgctgtaagtagt

SEQ ID NO: 154166 - DNA, 25 bp, SARS Virus
ctcatatgaaaccctgtaagtagta

SEQ ID NO: 154167 - DNA, 25 bp, SARS Virus
tcatatgaaacgctgtaagtagtaa

SEQ ID NO: 154168 - DNA, 25 bp, SARS Virus
catatgaaacgccgtaagtagtaat

SEQ ID NO: 154169 - DNA, 25 bp, SARS Virus
atatgaaacgctctaagtagtaata

SEQ ID NO: 154170 - DNA, 25 bp, SARS Virus
tatgaaacgctgcaagtagtaataa

SEQ ID NO: 154171 - DNA, 25 bp, SARS Virus
atgaaacgctgtcagtagtaataag

SEQ ID NO: 154172 - DNA, 25 bp, SARS Virus
tgaaacgctgtacgtagtaataagg

SEQ ID NO: 154173 - DNA, 25 bp, SARS Virus
gaaacgctgtaactagtaataagga

SEQ ID NO: 154174 - DNA, 25 bp, SARS Virus
aaacgctgtaagcagtaataaggaa

SEQ ID NO: 154175 - DNA, 25 bp, SARS Virus
aacgctgtaagtcgtaataaggaaa

SEQ ID NO: 154176 - DNA, 25 bp, SARS Virus
acgctgtaagtactaataaggaaaa

SEQ ID NO: 154177 - DNA, 25 bp, SARS Virus
cgctgtaagtagcaataaggaaaac

SEQ ID NO: 154178 - DNA, 25 bp, SARS Virus
gctgtaagtagtcataaggaaaacc

SEQ ID NO: 154179 - DNA, 25 bp, SARS Virus
ctgtaagtagtactaaggaaaacca

SEQ ID NO: 154180 - DNA, 25 bp, SARS Virus
tgtaagtagtaacaaggaaaaccat

SEQ ID NO: 154181 - DNA, 25 bp, SARS Virus
gtaagtagtaatcaggaaaaccata

SEQ ID NO: 154182 - DNA, 25 bp, SARS Virus
taagtagtaatacggaaaaccatat

SEQ ID NO: 154183 - DNA, 25 bp, SARS Virus
aagtagtaataacgaaaaccatatt

SEQ ID NO: 154184 - DNA, 25 bp, SARS Virus
agtagtaataagcaaaaccatattg

SEQ ID NO: 154185 - DNA, 25 bp, SARS Virus
gtagtaataaggcaaaccatattgt

SEQ ID NO: 154186 - DNA, 25 bp, SARS Virus
tagtaataaggacaaccatattgtc

SEQ ID NO: 154187 - DNA, 25 bp, SARS Virus
agtaataaggaacaccatattgtcg

SEQ ID NO: 154188 - DNA, 25 bp, SARS Virus
gtaataaggaaacccatattgtcgt

SEQ ID NO: 154189 - DNA, 25 bp, SARS Virus
taataaggaaaaccatattgtcgta

SEQ ID NO: 154190 - DNA, 25 bp, SARS Virus
aataaggaaaaccatattgtcgtaa

SEQ ID NO: 154191 - DNA, 25 bp, SARS Virus
ataaggaaaaccctattgtcgtaaa

SEQ ID NO: 154192 - DNA, 25 bp, SARS Virus
taaggaaaaccacattgtcgtaaaa

SEQ ID NO: 154193 - DNA, 25 bp, SARS Virus
aaggaaaaccatcttgtcgtaaaag

SEQ ID NO: 154194 - DNA, 25 bp, SARS Virus
aggaaaaccatactgtcgtaaaagt

SEQ ID NO: 154195 - DNA, 25 bp, SARS Virus
ggaaaaccatatcgtcgtaaaagtg

SEQ ID NO: 154196 - DNA, 25 bp, SARS Virus
gaaaaccatattctcgtaaaagtgg

SEQ ID NO: 154197 - DNA, 25 bp, SARS Virus
aaaaccatattgccgtaaaagtggt

SEQ ID NO: 154198 - DNA, 25 bp, SARS Virus
aaaccatattgtcgtaaaagtggta

SEQ ID NO: 154199 - DNA, 25 bp, SARS Virus
aaccatattgtcctaaaagtggtat

SEQ ID NO: 154200 - DNA, 25 bp, SARS Virus
accatattgtcgcaaaagtggtatt

SEQ ID NO: 154201 - DNA, 25 bp, SARS Virus
ccatattgtcgtcaaagtggtatta

SEQ ID NO: 154202 - DNA, 25 bp, SARS Virus
catattgtcgtacaagtggtattaa

SEQ ID NO: 154203 - DNA, 25 bp, SARS Virus
atattgtcgtaacagtggtattaag

SEQ ID NO: 154204 - DNA, 25 bp, SARS Virus
tattgtcgtaaacgtggtattaaga

SEQ ID NO: 154205 - DNA, 25 bp, SARS Virus
attgtcgtaaaactggtattaagac

SEQ ID NO: 154206 - DNA, 25 bp, SARS Virus
ttgtcgtaaaagcggtattaagact

SEQ ID NO: 154207 - DNA, 25 bp, SARS Virus
tgtcgtaaaagtcgtattaagactt

SEQ ID NO: 154208 - DNA, 25 bp, SARS Virus
gtcgtaaaagtgctattaagacttc

SEQ ID NO: 154209 - DNA, 25 bp, SARS Virus
tcgtaaaagtggcattaagacttcc

SEQ ID NO: 154210 - DNA, 25 bp, SARS Virus
cgtaaaagtggtcttaagacttcca

SEQ ID NO: 154211 - DNA, 25 bp, SARS Virus
gtaaaagtggtactaagacttccag

SEQ ID NO: 154212 - DNA, 25 bp, SARS Virus
taaaagtggtatcaagacttccagt

SEQ ID NO: 154213 - DNA, 25 bp, SARS Virus
aaaagtggtattcagacttccagtg

SEQ ID NO: 154214 - DNA, 25 bp, SARS Virus
aaagtggtattacgacttccagtgt

SEQ ID NO: 154215 - DNA, 25 bp, SARS Virus
aagtggtattaacacttccagtgtg

SEQ ID NO: 154216 - DNA, 25 bp, SARS Virus
agtggtattaagccttccagtgtga

SEQ ID NO: 154217 - DNA, 25 bp, SARS Virus
gtggtattaagacttccagtgtgaa

SEQ ID NO: 154218 - DNA, 25 bp, SARS Virus
tggtattaagacctccagtgtgaaa

SEQ ID NO: 154219 - DNA, 25 bp, SARS Virus
ggtattaagactcccagtgtgaaaa

SEQ ID NO: 154220 - DNA, 25 bp, SARS Virus
gtattaagacttccagtgtgaaaag

SEQ ID NO: 154221 - DNA, 25 bp, SARS Virus
tattaagacttccagtgtgaaaagt

SEQ ID NO: 154222 - DNA, 25 bp, SARS Virus
attaagacttcccgtgtgaaaagtt

SEQ ID NO: 154223 - DNA, 25 bp, SARS Virus
ttaagacttccactgtgaaaagttc

SEQ ID NO: 154224 - DNA, 25 bp, SARS Virus
taagacttccagcgtgaaaagttct

SEQ ID NO: 154225 - DNA, 25 bp, SARS Virus
aagacttccagtctgaaaagttctt

SEQ ID NO: 154226 - DNA, 25 bp, SARS Virus
agacttccagtgcgaaaagttcttc

SEQ ID NO: 154227 - DNA, 25 bp, SARS Virus
gacttccagtgtcaaaagttcttcg

SEQ ID NO: 154228 - DNA, 25 bp, SARS Virus
acttccagtgtgcaaagttcttcgt

SEQ ID NO: 154229 - DNA, 25 bp, SARS Virus
cttccagtgtgacaagttcttcgta

SEQ ID NO: 154230 - DNA, 25 bp, SARS Virus
ttccagtgtgaacagttcttcgtaa

SEQ ID NO: 154231 - DNA, 25 bp, SARS Virus
tccagtgtgaaacgttcttcgtaag

SEQ ID NO: 154232 - DNA, 25 bp, SARS Virus
ccagtgtgaaaacttcttcgtaaga

SEQ ID NO: 154233 - DNA, 25 bp, SARS Virus
cagtgtgaaaagctcttcgtaagaa

SEQ ID NO: 154234 - DNA, 25 bp, SARS Virus
agtgtgaaaagtccttcgtaagaaa

SEQ ID NO: 154235 - DNA, 25 bp, SARS Virus
gtgtgaaaagttcttcgtaagaaac

SEQ ID NO: 154236 - DNA, 25 bp, SARS Virus
tgtgaaaagttcctcgtaagaaacg

SEQ ID NO: 154237 - DNA, 25 bp, SARS Virus
gtgaaaagttctccgtaagaaacgt

SEQ ID NO: 154238 - DNA, 25 bp, SARS Virus
tgaaaagttcttcgtaagaaacgta

SEQ ID NO: 154239 - DNA, 25 bp, SARS Virus
gaaaagttcttcctaagaaacgtag

SEQ ID NO: 154240 - DNA, 25 bp, SARS Virus
aaaagttcttcgcaagaaacgtaga

SEQ ID NO: 154241 - DNA, 25 bp, SARS Virus
taccgggtattcgaacatttccagt

SEQ ID NO: 154242 - DNA, 25 bp, SARS Virus
accgggtattcggacatttccagtc

SEQ ID NO: 154243 - DNA, 25 bp, SARS Virus
ccgggtattcgagcatttccagtcg

SEQ ID NO: 154244 - DNA, 25 bp, SARS Virus
cgggtattcgaagatttccagtcgt

SEQ ID NO: 154245 - DNA, 25 bp, SARS Virus
gggtattcgaacgtttccagtcgta

SEQ ID NO: 154246 - DNA, 25 bp, SARS Virus
ggtattcgaacagttccagtcgtaa

SEQ ID NO: 154247 - DNA, 25 bp, SARS Virus
gtattcgaacatgtccagtcgtaag

SEQ ID NO: 154248 - DNA, 25 bp, SARS Virus
tattcgaacattgccagtcgtaagg

SEQ ID NO: 154249 - DNA, 25 bp, SARS Virus
attcgaacatttgcagtcgtaaggt

SEQ ID NO: 154250 - DNA, 25 bp, SARS Virus
ttcgaacatttcgagtcgtaaggtt

SEQ ID NO: 154251 - DNA, 25 bp, SARS Virus
tcgaacatttccggtcgtaaggttc

SEQ ID NO: 154252 - DNA, 25 bp, SARS Virus
cgaacatttccagtcgtaaggttct

SEQ ID NO: 154253 - DNA, 25 bp, SARS Virus
gaacatttccaggcgtaaggttctt

SEQ ID NO: 154254 - DNA, 25 bp, SARS Virus
aacatttccagtggtaaggttctta

SEQ ID NO: 154255 - DNA, 25 bp, SARS Virus
acatttccagtcgtaaggttcttac

SEQ ID NO: 154256 - DNA, 25 bp, SARS Virus
catttccagtcggaaggttcttacg

SEQ ID NO: 154257 - DNA, 25 bp, SARS Virus
atttccagtcgtgaggttcttacga

SEQ ID NO: 154258 - DNA, 25 bp, SARS Virus
tttccagtcgtagggttcttacgag

SEQ ID NO: 154259 - DNA, 25 bp, SARS Virus
ttccagtcgtaaggttcttacgaga

SEQ ID NO: 154260 - DNA, 25 bp, SARS Virus
tccagtcgtaaggttcttacgagac

SEQ ID NO: 154261 - DNA, 25 bp, SARS Virus
ccagtcgtaagggtcttacgagaca

SEQ ID NO: 154262 - DNA, 25 bp, SARS Virus
cagtcgtaaggtgcttacgagacaa

SEQ ID NO: 154263 - DNA, 25 bp, SARS Virus
agtcgtaaggttgttacgagacaat

SEQ ID NO: 154264 - DNA, 25 bp, SARS Virus
gtcgtaaggttcgtacgagacaata

SEQ ID NO: 154265 - DNA, 25 bp, SARS Virus
tcgtaaggttctgacgagacaatag

SEQ ID NO: 154266 - DNA, 25 bp, SARS Virus
cgtaaggttcttgcgagacaataga

SEQ ID NO: 154267 - DNA, 25 bp, SARS Virus
gtaaggttcttaggagacaatagaa

SEQ ID NO: 154268 - DNA, 25 bp, SARS Virus
taaggttcttacgagacaatagaaa

SEQ ID NO: 154269 - DNA, 25 bp, SARS Virus
aaggttcttacgggacaatagaaat

SEQ ID NO: 154270 - DNA, 25 bp, SARS Virus
aggttcttacgagacaatagaaatg

SEQ ID NO: 154271 - DNA, 25 bp, SARS Virus
ggttcttacgaggcaatagaaatgt

SEQ ID NO: 154272 - DNA, 25 bp, SARS Virus
gttcttacgagagaatagaaatgtc

SEQ ID NO: 154273 - DNA, 25 bp, SARS Virus
ttcttacgagacgatagaaatgtcg

SEQ ID NO: 154274 - DNA, 25 bp, SARS Virus
tcttacgagacagtagaaatgtcga

SEQ ID NO: 154275 - DNA, 25 bp, SARS Virus
cttacgagacaagagaaatgtcgat

SEQ ID NO: 154276 - DNA, 25 bp, SARS Virus
ttacgagacaatggaaatgtcgata

SEQ ID NO: 154277 - DNA, 25 bp, SARS Virus
tacgagacaatagaaatgtcgatat

SEQ ID NO: 154278 - DNA, 25 bp, SARS Virus
acgagacaataggaatgtcgatatc

SEQ ID NO: 154279 - DNA, 25 bp, SARS Virus
cgagacaatagagatgtcgatatct

SEQ ID NO: 154280 - DNA, 25 bp, SARS Virus
gagacaatagaagtgtcgatatctt

SEQ ID NO: 154281 - DNA, 25 bp, SARS Virus
agacaatagaaaggtcgatatcttg

SEQ ID NO: 154282 - DNA, 25 bp, SARS Virus
gacaatagaaatgtcgatatcttgg

SEQ ID NO: 154283 - DNA, 25 bp, SARS Virus
acaatagaaatggcgatatcttggt

SEQ ID NO: 154284 - DNA, 25 bp, SARS Virus
caatagaaatgtggatatcttggtg

SEQ ID NO: 154285 - DNA, 25 bp, SARS Virus
aatagaaatgtcgatatcttggtgg

SEQ ID NO: 154286 - DNA, 25 bp, SARS Virus
atagaaatgtcggtatcttggtggg

SEQ ID NO: 154287 - DNA, 25 bp, SARS Virus
tagaaatgtcgagatcttggtgggt

SEQ ID NO: 154288 - DNA, 25 bp, SARS Virus
agaaatgtcgatgtcttggtgggtc

SEQ ID NO: 154289 - DNA, 25 bp, SARS Virus
gaaatgtcgatagcttggtgggtcc

SEQ ID NO: 154290 - DNA, 25 bp, SARS Virus
aaatgtcgatatgttggtgggtccc

SEQ ID NO: 154291 - DNA, 25 bp, SARS Virus
aatgtcgatatcgtggtgggtcccg

SEQ ID NO: 154292 - DNA, 25 bp, SARS Virus
atgtcgatatctgggtgggtcccga

SEQ ID NO: 154293 - DNA, 25 bp, SARS Virus
tgtcgatatcttggtgggtcccgat

SEQ ID NO: 154294 - DNA, 25 bp, SARS Virus
gtcgatatcttggtgggtcccgatc

SEQ ID NO: 154295 - DNA, 25 bp, SARS Virus
tcgatatcttggggggtcccgatca

SEQ ID NO: 154296 - DNA, 25 bp, SARS Virus
cgatatcttggtgggtcccgatcaa

SEQ ID NO: 154297 - DNA, 25 bp, SARS Virus
gatatcttggtgggtcccgatcaaa

SEQ ID NO: 154298 - DNA, 25 bp, SARS Virus
atatcttggtgggtcccgatcaaaa

SEQ ID NO: 154299 - DNA, 25 bp, SARS Virus
tatcttggtggggcccgatcaaaaa

SEQ ID NO: 154300 - DNA, 25 bp, SARS Virus
atcttggtgggtgccgatcaaaaac

SEQ ID NO: 154301 - DNA, 25 bp, SARS Virus
tcttggtgggtcgcgatcaaaaacg

SEQ ID NO: 154302 - DNA, 25 bp, SARS Virus
cttggtgggtccggatcaaaaacga

SEQ ID NO: 154303 - DNA, 25 bp, SARS Virus
ttggtgggtcccgatcaaaaacgaa

SEQ ID NO: 154304 - DNA, 25 bp, SARS Virus
tggtgggtcccggtcaaaaacgaaa

SEQ ID NO: 154305 - DNA, 25 bp, SARS Virus
ggtgggtcccgagcaaaaacgaaat

SEQ ID NO: 154306 - DNA, 25 bp, SARS Virus
gtgggtcccgatgaaaaacgaaata

SEQ ID NO: 154307 - DNA, 25 bp, SARS Virus
tgggtcccgatcgaaaacgaaatat

SEQ ID NO: 154308 - DNA, 25 bp, SARS Virus
gggtcccgatcagaaacgaaatatt

SEQ ID NO: 154309 - DNA, 25 bp, SARS Virus
ggtcccgatcaagaacgaaatattt

SEQ ID NO: 154310 - DNA, 25 bp, SARS Virus
gtcccgatcaaagacgaaatattta

SEQ ID NO: 154311 - DNA, 25 bp, SARS Virus
tcccgatcaaaagcgaaatatttag

SEQ ID NO: 154312 - DNA, 25 bp, SARS Virus
cccgatcaaaaaggaaatatttagg

SEQ ID NO: 154313 - DNA, 25 bp, SARS Virus
ccgatcaaaaacgaaatatttaggt

SEQ ID NO: 154314 - DNA, 25 bp, SARS Virus
cgatcaaaaacggaatatttaggtg

SEQ ID NO: 154315 - DNA, 25 bp, SARS Virus
gatcaaaaacgagatatttaggtgt

SEQ ID NO: 154316 - DNA, 25 bp, SARS Virus
atcaaaaacgaagtatttaggtgtg

SEQ ID NO: 154317 - DNA, 25 bp, SARS Virus
tcaaaaacgaaagatttaggtgtgt

SEQ ID NO: 154318 - DNA, 25 bp, SARS Virus
caaaaacgaaatgtttaggtgtgtc

SEQ ID NO: 154319 - DNA, 25 bp, SARS Virus
aaaaacgaaatagttaggtgtgtct

SEQ ID NO: 154320 - DNA, 25 bp, SARS Virus
aaaacgaaatatgtaggtgtgtcta

SEQ ID NO: 154321 - DNA, 25 bp, SARS Virus
aaacgaaatattgaggtgtgtctat

SEQ ID NO: 154322 - DNA, 25 bp, SARS Virus
aacgaaatatttgggtgtgtctatt

SEQ ID NO: 154323 - DNA, 25 bp, SARS Virus
acgaaatatttaggtgtgtctattc

SEQ ID NO: 154324 - DNA, 25 bp, SARS Virus
cgaaatatttaggtgtgtctattca

SEQ ID NO: 154325 - DNA, 25 bp, SARS Virus
gaaatatttaggggtgtctattcac

SEQ ID NO: 154326 - DNA, 25 bp, SARS Virus
aaatatttaggtgtgtctattcact

SEQ ID NO: 154327 - DNA, 25 bp, SARS Virus
aatatttaggtgggtctattcactt

SEQ ID NO: 154328 - DNA, 25 bp, SARS Virus
atatttaggtgtgtctattcacttt

SEQ ID NO: 154329 - DNA, 25 bp, SARS Virus
tatttaggtgtggctattcactttt

SEQ ID NO: 154330 - DNA, 25 bp, SARS Virus
atttaggtgtgtgtattcacttttt

SEQ ID NO: 154331 - DNA, 25 bp, SARS Virus
tttaggtgtgtcgattcactttttg

SEQ ID NO: 154332 - DNA, 25 bp, SARS Virus
ttaggtgtgtctgttcactttttgg

SEQ ID NO: 154333 - DNA, 25 bp, SARS Virus
taggtgtgtctagtcactttttggg

SEQ ID NO: 154334 - DNA, 25 bp, SARS Virus
aggtgtgtctatgcactttttggga

SEQ ID NO: 154335 - DNA, 25 bp, SARS Virus
ggtgtgtctattgactttttgggaa

SEQ ID NO: 154336 - DNA, 25 bp, SARS Virus
gtgtgtctattcgctttttgggaag

SEQ ID NO: 154337 - DNA, 25 bp, SARS Virus
tgtgtctattcagtttttgggaaga

SEQ ID NO: 154338 - DNA, 25 bp, SARS Virus
gtgtctattcacgttttgggaagaa

SEQ ID NO: 154339 - DNA, 25 bp, SARS Virus
tgtctattcactgtttgggaagaaa

SEQ ID NO: 154340 - DNA, 25 bp, SARS Virus
gtctattcacttgttgggaagaaat

SEQ ID NO: 154341 - DNA, 25 bp, SARS Virus
tctattcactttgtgggaagaaatc

SEQ ID NO: 154342 - DNA, 25 bp, SARS Virus
ctattcacttttggggaagaaatct

SEQ ID NO: 154343 - DNA, 25 bp, SARS Virus
tattcactttttgggaagaaatctc

SEQ ID NO: 154344 - DNA, 25 bp, SARS Virus
attcactttttgggaagaaatctca

SEQ ID NO: 154345 - DNA, 25 bp, SARS Virus
ttcactttttgggaagaaatctcag

SEQ ID NO: 154346 - DNA, 25 bp, SARS Virus
tcactttttggggagaaatctcagt

SEQ ID NO: 154347 - DNA, 25 bp, SARS Virus
cactttttgggaggaaatctcagta

SEQ ID NO: 154348 - DNA, 25 bp, SARS Virus
actttttgggaagaaatctcagtaa

SEQ ID NO: 154349 - DNA, 25 bp, SARS Virus
ctttttgggaaggaatctcagtaag

SEQ ID NO: 154350 - DNA, 25 bp, SARS Virus
tttttgggaagagatctcagtaaga

SEQ ID NO: 154351 - DNA, 25 bp, SARS Virus
ttttgggaagaagtctcagtaagag

SEQ ID NO: 154352 - DNA, 25 bp, SARS Virus
tttgggaagaaagctcagtaagaga

SEQ ID NO: 154353 - DNA, 25 bp, SARS Virus
ttgggaagaaatgtcagtaagagaa

SEQ ID NO: 154354 - DNA, 25 bp, SARS Virus
tgggaagaaatcgcagtaagagaaa

SEQ ID NO: 154355 - DNA, 25 bp, SARS Virus
gggaagaaatctgagtaagagaaaa

SEQ ID NO: 154356 - DNA, 25 bp, SARS Virus
ggaagaaatctcggtaagagaaaac

SEQ ID NO: 154357 - DNA, 25 bp, SARS Virus
gaagaaatctcagtaagagaaaaca

SEQ ID NO: 154358 - DNA, 25 bp, SARS Virus
aagaaatctcaggaagagaaaacag

SEQ ID NO: 154359 - DNA, 25 bp, SARS Virus
agaaatctcagtgagagaaaacagt

SEQ ID NO: 154360 - DNA, 25 bp, SARS Virus
gaaatctcagtaggagaaaacagtg

SEQ ID NO: 154361 - DNA, 25 bp, SARS Virus
aaatctcagtaagagaaaacagtgt

SEQ ID NO: 154362 - DNA, 25 bp, SARS Virus
aatctcagtaagggaaaacagtgta

SEQ ID NO: 154363 - DNA, 25 bp, SARS Virus
atctcagtaagagaaaacagtgtac

SEQ ID NO: 154364 - DNA, 25 bp, SARS Virus
tctcagtaagaggaaacagtgtaca

SEQ ID NO: 154365 - DNA, 25 bp, SARS Virus
ctcagtaagagagaacagtgtacaa

SEQ ID NO: 154366 - DNA, 25 bp, SARS Virus
tcagtaagagaagacagtgtacaaa

SEQ ID NO: 154367 - DNA, 25 bp, SARS Virus
cagtaagagaaagcagtgtacaaac

SEQ ID NO: 154368 - DNA, 25 bp, SARS Virus
agtaagagaaaagagtgtacaaacc

SEQ ID NO: 154369 - DNA, 25 bp, SARS Virus
gtaagagaaaacggtgtacaaacca

SEQ ID NO: 154370 - DNA, 25 bp, SARS Virus
taagagaaaacagtgtacaaaccag

SEQ ID NO: 154371 - DNA, 25 bp, SARS Virus
aagagaaaacagggtacaaaccagg

SEQ ID NO: 154372 - DNA, 25 bp, SARS Virus
agagaaaacagtgtacaaaccagga

SEQ ID NO: 154373 - DNA, 25 bp, SARS Virus
gagaaaacagtggacaaaccaggat

SEQ ID NO: 154374 - DNA, 25 bp, SARS Virus
agaaaacagtgtgcaaaccaggatc

SEQ ID NO: 154375 - DNA, 25 bp, SARS Virus
gaaaacagtgtagaaaccaggatcc

SEQ ID NO: 154376 - DNA, 25 bp, SARS Virus
aaaacagtgtacgaaccaggatccc

SEQ ID NO: 154377 - DNA, 25 bp, SARS Virus
aaacagtgtacagaccaggatccca

SEQ ID NO: 154378 - DNA, 25 bp, SARS Virus
aacagtgtacaagccaggatcccag

SEQ ID NO: 154379 - DNA, 25 bp, SARS Virus
acagtgtacaaagcaggatcccagt

SEQ ID NO: 154380 - DNA, 25 bp, SARS Virus
cagtgtacaaacgaggatcccagta

SEQ ID NO: 154381 - DNA, 25 bp, SARS Virus
agtgtacaaaccgggatcccagtat

SEQ ID NO: 154382 - DNA, 25 bp, SARS Virus
gtgtacaaaccaggatcccagtatg

SEQ ID NO: 154383 - DNA, 25 bp, SARS Virus
tgtacaaaccaggatcccagtatgt

SEQ ID NO: 154384 - DNA, 25 bp, SARS Virus
gtacaaaccagggtcccagtatgta

SEQ ID NO: 154385 - DNA, 25 bp, SARS Virus
tacaaaccaggagcccagtatgtat

SEQ ID NO: 154386 - DNA, 25 bp, SARS Virus
acaaaccaggatgccagtatgtata

SEQ ID NO: 154387 - DNA, 25 bp, SARS Virus
caaaccaggatcgcagtatgtatag

SEQ ID NO: 154388 - DNA, 25 bp, SARS Virus
aaaccaggatccgagtatgtatagc

SEQ ID NO: 154389 - DNA, 25 bp, SARS Virus
aaccaggatcccggtatgtatagcg

SEQ ID NO: 154390 - DNA, 25 bp, SARS Virus
accaggatcccagtatgtatagcga

SEQ ID NO: 154391 - DNA, 25 bp, SARS Virus
ccaggatcccaggatgtatagcgat

SEQ ID NO: 154392 - DNA, 25 bp, SARS Virus
caggatcccagtgtgtatagcgatt

SEQ ID NO: 154393 - DNA, 25 bp, SARS Virus
aggatcccagtaggtatagcgatta

SEQ ID NO: 154394 - DNA, 25 bp, SARS Virus
ggatcccagtatgtatagcgattat

SEQ ID NO: 154395 - DNA, 25 bp, SARS Virus
gatcccagtatggatagcgattatt

SEQ ID NO: 154396 - DNA, 25 bp, SARS Virus
atcccagtatgtgtagcgattatta

SEQ ID NO: 154397 - DNA, 25 bp, SARS Virus
tcccagtatgtagagcgattattat

SEQ ID NO: 154398 - DNA, 25 bp, SARS Virus
cccagtatgtatggcgattattatt

SEQ ID NO: 154399 - DNA, 25 bp, SARS Virus
ccagtatgtatagcgattattattc

SEQ ID NO: 154400 - DNA, 25 bp, SARS Virus
cagtatgtatagggattattattcc

SEQ ID NO: 154401 - DNA, 25 bp, SARS Virus
agtatgtatagcgattattattcca

SEQ ID NO: 154402 - DNA, 25 bp, SARS Virus
gtatgtatagcggttattattccag

SEQ ID NO: 154403 - DNA, 25 bp, SARS Virus
tatgtatagcgagtattattccagg

SEQ ID NO: 154404 - DNA, 25 bp, SARS Virus
atgtatagcgatgattattccaggg

SEQ ID NO: 154405 - DNA, 25 bp, SARS Virus
tgtatagcgattgttattccagggt

SEQ ID NO: 154406 - DNA, 25 bp, SARS Virus
gtatagcgattagtattccagggta

SEQ ID NO: 154407 - DNA, 25 bp, SARS Virus
tatagcgattatgattccagggtaa

SEQ ID NO: 154408 - DNA, 25 bp, SARS Virus
atagcgattattgttccagggtaaa

SEQ ID NO: 154409 - DNA, 25 bp, SARS Virus
tagcgattattagtccagggtaaat

SEQ ID NO: 154410 - DNA, 25 bp, SARS Virus
agcgattattatgccagggtaaata

SEQ ID NO: 154411 - DNA, 25 bp, SARS Virus
gcgattattattgcagggtaaataa

SEQ ID NO: 154412 - DNA, 25 bp, SARS Virus
cgattattattcgagggtaaataat

SEQ ID NO: 154413 - DNA, 25 bp, SARS Virus
gattattattccggggtaaataatc

SEQ ID NO: 154414 - DNA, 25 bp, SARS Virus
attattattccagggtaaataatcg

SEQ ID NO: 154415 - DNA, 25 bp, SARS Virus
ttattattccagggtaaataatcgg

SEQ ID NO: 154416 - DNA, 25 bp, SARS Virus
tattattccagggtaaataatcggc

SEQ ID NO: 154417 - DNA, 25 bp, SARS Virus
attattccaggggaaataatcggca

SEQ ID NO: 154418 - DNA, 25 bp, SARS Virus
ttattccagggtgaataatcggcat

SEQ ID NO: 154419 - DNA, 25 bp, SARS Virus
tattccagggtagataatcggcata

SEQ ID NO: 154420 - DNA, 25 bp, SARS Virus
attccagggtaagtaatcggcatac

SEQ ID NO: 154421 - DNA, 25 bp, SARS Virus
ttccagggtaaagaatcggcataca

SEQ ID NO: 154422 - DNA, 25 bp, SARS Virus
tccagggtaaatgatcggcatacat

SEQ ID NO: 154423 - DNA, 25 bp, SARS Virus
ccagggtaaatagtcggcatacatg

SEQ ID NO: 154424 - DNA, 25 bp, SARS Virus
cagggtaaataagcggcatacatga

SEQ ID NO: 154425 - DNA, 25 bp, SARS Virus
agggtaaataatgggcatacatgac

SEQ ID NO: 154426 - DNA, 25 bp, SARS Virus
gggtaaataatcggcatacatgaca

SEQ ID NO: 154427 - DNA, 25 bp, SARS Virus
ggtaaataatcggcatacatgacaa

SEQ ID NO: 154428 - DNA, 25 bp, SARS Virus
gtaaataatcgggatacatgacaac

SEQ ID NO: 154429 - DNA, 25 bp, SARS Virus
taaataatcggcgtacatgacaacg

SEQ ID NO: 154430 - DNA, 25 bp, SARS Virus
aaataatcggcagacatgacaacgt

SEQ ID NO: 154431 - DNA, 25 bp, SARS Virus
aataatcggcatgcatgacaacgtg

SEQ ID NO: 154432 - DNA, 25 bp, SARS Virus
ataatcggcatagatgacaacgtgt

SEQ ID NO: 154433 - DNA, 25 bp, SARS Virus
taatcggcatacgtgacaacgtgtc

SEQ ID NO: 154434 - DNA, 25 bp, SARS Virus
aatcggcatacaggacaacgtgtca

SEQ ID NO: 154435 - DNA, 25 bp, SARS Virus
atcggcatacatgacaacgtgtcag

SEQ ID NO: 154436 - DNA, 25 bp, SARS Virus
tcggcatacatggcaacgtgtcaga

SEQ ID NO: 154437 - DNA, 25 bp, SARS Virus
cggcatacatgagaacgtgtcagag

SEQ ID NO: 154438 - DNA, 25 bp, SARS Virus
ggcatacatgacgacgtgtcagagg

SEQ ID NO: 154439 - DNA, 25 bp, SARS Virus
gcatacatgacagcgtgtcagaggt

SEQ ID NO: 154440 - DNA, 25 bp, SARS Virus
catacatgacaaggtgtcagaggtt

SEQ ID NO: 154441 - DNA, 25 bp, SARS Virus
atacatgacaacgtgtcagaggtta

SEQ ID NO: 154442 - DNA, 25 bp, SARS Virus
tacatgacaacgggtcagaggttaa

SEQ ID NO: 154443 - DNA, 25 bp, SARS Virus
acatgacaacgtgtcagaggttaat

SEQ ID NO: 154444 - DNA, 25 bp, SARS Virus
catgacaacgtggcagaggttaatt

SEQ ID NO: 154445 - DNA, 25 bp, SARS Virus
atgacaacgtgtgagaggttaattt

SEQ ID NO: 154446 - DNA, 25 bp, SARS Virus
tgacaacgtgtcggaggttaatttc

SEQ ID NO: 154447 - DNA, 25 bp, SARS Virus
gacaacgtgtcagaggttaatttca

SEQ ID NO: 154448 - DNA, 25 bp, SARS Virus
acaacgtgtcaggggttaatttcat

SEQ ID NO: 154449 - DNA, 25 bp, SARS Virus
caacgtgtcagaggttaatttcatc

SEQ ID NO: 154450 - DNA, 25 bp, SARS Virus
aacgtgtcagaggttaatttcatct

SEQ ID NO: 154451 - DNA, 25 bp, SARS Virus
acgtgtcagagggtaatttcatctt

SEQ ID NO: 154452 - DNA, 25 bp, SARS Virus
cgtgtcagaggtgaatttcatctta

SEQ ID NO: 154453 - DNA, 25 bp, SARS Virus
gtgtcagaggttgatttcatcttag

SEQ ID NO: 154454 - DNA, 25 bp, SARS Virus
tgtcagaggttagtttcatcttaga

SEQ ID NO: 154455 - DNA, 25 bp, SARS Virus
gtcagaggttaagttcatcttagac

SEQ ID NO: 154456 - DNA, 25 bp, SARS Virus
tcagaggttaatgtcatcttagacg

SEQ ID NO: 154457 - DNA, 25 bp, SARS Virus
cagaggttaattgcatcttagacgc

SEQ ID NO: 154458 - DNA, 25 bp, SARS Virus
agaggttaatttgatcttagacgca

SEQ ID NO: 154459 - DNA, 25 bp, SARS Virus
gaggttaatttcgtcttagacgcag

SEQ ID NO: 154460 - DNA, 25 bp, SARS Virus
aggttaatttcagcttagacgcagc

SEQ ID NO: 154461 - DNA, 25 bp, SARS Virus
ggttaatttcatgttagacgcagcc

SEQ ID NO: 154462 - DNA, 25 bp, SARS Virus
gttaatttcatcgtagacgcagcct

SEQ ID NO: 154463 - DNA, 25 bp, SARS Virus
ttaatttcatctgagacgcagcctc

SEQ ID NO: 154464 - DNA, 25 bp, SARS Virus
taatttcatcttggacgcagcctct

SEQ ID NO: 154465 - DNA, 25 bp, SARS Virus
aatttcatcttagacgcagcctctg

SEQ ID NO: 154466 - DNA, 25 bp, SARS Virus
atttcatcttaggcgcagcctctgc

SEQ ID NO: 154467 - DNA, 25 bp, SARS Virus
tttcatcttagaggcagcctctgct

SEQ ID NO: 154468 - DNA, 25 bp, SARS Virus
ttcatcttagacgcagcctctgctt

SEQ ID NO: 154469 - DNA, 25 bp, SARS Virus
tcatcttagacggagcctctgcttc

SEQ ID NO: 154470 - DNA, 25 bp, SARS Virus
catcttagacgcggcctctgcttca

SEQ ID NO: 154471 - DNA, 25 bp, SARS Virus
atcttagacgcagcctctgcttcag

SEQ ID NO: 154472 - DNA, 25 bp, SARS Virus
tcttagacgcaggctctgcttcagt

SEQ ID NO: 154473 - DNA, 25 bp, SARS Virus
cttagacgcagcgtctgcttcagta

SEQ ID NO: 154474 - DNA, 25 bp, SARS Virus
ttagacgcagccgctgcttcagtaa

SEQ ID NO: 154475 - DNA, 25 bp, SARS Virus
tagacgcagcctgtgcttcagtaat

SEQ ID NO: 154476 - DNA, 25 bp, SARS Virus
agacgcagcctcggcttcagtaatt

SEQ ID NO: 154477 - DNA, 25 bp, SARS Virus
gacgcagcctctgcttcagtaattc

SEQ ID NO: 154478 - DNA, 25 bp, SARS Virus
acgcagcctctggttcagtaattct

SEQ ID NO: 154479 - DNA, 25 bp, SARS Virus
cgcagcctctgcgtcagtaattcta

SEQ ID NO: 154480 - DNA, 25 bp, SARS Virus
gcagcctctgctgcagtaattctag

SEQ ID NO: 154481 - DNA, 25 bp, SARS Virus
cagcctctgcttgagtaattctaga

SEQ ID NO: 154482 - DNA, 25 bp, SARS Virus
agcctctgcttcggtaattctagac

SEQ ID NO: 154483 - DNA, 25 bp, SARS Virus
gcctctgcttcagtaattctagact

SEQ ID NO: 154484 - DNA, 25 bp, SARS Virus
cctctgcttcaggaattctagactt

SEQ ID NO: 154485 - DNA, 25 bp, SARS Virus
ctctgcttcagtgattctagactta

SEQ ID NO: 154486 - DNA, 25 bp, SARS Virus
tctgcttcagtagttctagacttag

SEQ ID NO: 154487 - DNA, 25 bp, SARS Virus
ctgcttcagtaagtctagacttagc

SEQ ID NO: 154488 - DNA, 25 bp, SARS Virus
tgcttcagtaatgctagacttagct

SEQ ID NO: 154489 - DNA, 25 bp, SARS Virus
gcttcagtaattgtagacttagctg

SEQ ID NO: 154490 - DNA, 25 bp, SARS Virus
cttcagtaattcgagacttagctgt

SEQ ID NO: 154491 - DNA, 25 bp, SARS Virus
ttcagtaattctggacttagctgtt

SEQ ID NO: 154492 - DNA, 25 bp, SARS Virus
tcagtaattctagacttagctgttc

SEQ ID NO: 154493 - DNA, 25 bp, SARS Virus
cagtaattctaggcttagctgttca

SEQ ID NO: 154494 - DNA, 25 bp, SARS Virus
agtaattctagagttagctgttcat

SEQ ID NO: 154495 - DNA, 25 bp, SARS Virus
gtaattctagacgtagctgttcatc

SEQ ID NO: 154496 - DNA, 25 bp, SARS Virus
taattctagactgagctgttcatca

SEQ ID NO: 154497 - DNA, 25 bp, SARS Virus
aattctagacttggctgttcatcac

SEQ ID NO: 154498 - DNA, 25 bp, SARS Virus
attctagacttagctgttcatcaca

SEQ ID NO: 154499 - DNA, 25 bp, SARS Virus
ttctagacttaggtgttcatcacac

SEQ ID NO: 154500 - DNA, 25 bp, SARS Virus
tctagacttagcggttcatcacacg

SEQ ID NO: 154501 - DNA, 25 bp, SARS Virus
ctagacttagctgttcatcacacgg

SEQ ID NO: 154502 - DNA, 25 bp, SARS Virus
tagacttagctggtcatcacacggt

SEQ ID NO: 154503 - DNA, 25 bp, SARS Virus
agacttagctgtgcatcacacggtc

SEQ ID NO: 154504 - DNA, 25 bp, SARS Virus
gacttagctgttgatcacacggtca

SEQ ID NO: 154505 - DNA, 25 bp, SARS Virus
acttagctgttcgtcacacggtcaa

SEQ ID NO: 154506 - DNA, 25 bp, SARS Virus
cttagctgttcagcacacggtcaac

SEQ ID NO: 154507 - DNA, 25 bp, SARS Virus
ttagctgttcatgacacggtcaacc

SEQ ID NO: 154508 - DNA, 25 bp, SARS Virus
tagctgttcatcgcacggtcaaccg

SEQ ID NO: 154509 - DNA, 25 bp, SARS Virus
agctgttcatcagacggtcaaccgt

SEQ ID NO: 154510 - DNA, 25 bp, SARS Virus
gctgttcatcacgcggtcaaccgtt

SEQ ID NO: 154511 - DNA, 25 bp, SARS Virus
ctgttcatcacagggtcaaccgttg

SEQ ID NO: 154512 - DNA, 25 bp, SARS Virus
tgttcatcacacggtcaaccgttgg

SEQ ID NO: 154513 - DNA, 25 bp, SARS Virus
gttcatcacacggtcaaccgttggt

SEQ ID NO: 154514 - DNA, 25 bp, SARS Virus
ttcatcacacgggcaaccgttggta

SEQ ID NO: 154515 - DNA, 25 bp, SARS Virus
tcatcacacggtgaaccgttggtaa

SEQ ID NO: 154516 - DNA, 25 bp, SARS Virus
catcacacggtcgaccgttggtaac

SEQ ID NO: 154517 - DNA, 25 bp, SARS Virus
atcacacggtcagccgttggtaaca

SEQ ID NO: 154518 - DNA, 25 bp, SARS Virus
tcacacggtcaagcgttggtaacag

SEQ ID NO: 154519 - DNA, 25 bp, SARS Virus
cacacggtcaacggttggtaacaga

SEQ ID NO: 154520 - DNA, 25 bp, SARS Virus
acacggtcaaccgttggtaacagac

SEQ ID NO: 154521 - DNA, 25 bp, SARS Virus
cacggtcaaccggtggtaacagact

SEQ ID NO: 154522 - DNA, 25 bp, SARS Virus
acggtcaaccgtgggtaacagactc

SEQ ID NO: 154523 - DNA, 25 bp, SARS Virus
cggtcaaccgttggtaacagactcg

SEQ ID NO: 154524 - DNA, 25 bp, SARS Virus
ggtcaaccgttggtaacagactcgt

SEQ ID NO: 154525 - DNA, 25 bp, SARS Virus
gtcaaccgttgggaacagactcgtg

SEQ ID NO: 154526 - DNA, 25 bp, SARS Virus
tcaaccgttggtgacagactcgtgt

SEQ ID NO: 154527 - DNA, 25 bp, SARS Virus
caaccgttggtagcagactcgtgtc

SEQ ID NO: 154528 - DNA, 25 bp, SARS Virus
aaccgttggtaagagactcgtgtcg

SEQ ID NO: 154529 - DNA, 25 bp, SARS Virus
accgttggtaacggactcgtgtcga

SEQ ID NO: 154530 - DNA, 25 bp, SARS Virus
ccgttggtaacagactcgtgtcgac

SEQ ID NO: 154531 - DNA, 25 bp, SARS Virus
cgttggtaacaggctcgtgtcgaca

SEQ ID NO: 154532 - DNA, 25 bp, SARS Virus
gttggtaacagagtcgtgtcgacat

SEQ ID NO: 154533 - DNA, 25 bp, SARS Virus
ttggtaacagacgcgtgtcgacatg

SEQ ID NO: 154534 - DNA, 25 bp, SARS Virus
tggtaacagactggtgtcgacatgg

SEQ ID NO: 154535 - DNA, 25 bp, SARS Virus
ggtaacagactcgtgtcgacatgga

SEQ ID NO: 154536 - DNA, 25 bp, SARS Virus
gtaacagactcgggtcgacatggac

SEQ ID NO: 154537 - DNA, 25 bp, SARS Virus
taacagactcgtgtcgacatggacc

SEQ ID NO: 154538 - DNA, 25 bp, SARS Virus
aacagactcgtggcgacatggacca

SEQ ID NO: 154539 - DNA, 25 bp, SARS Virus
acagactcgtgtggacatggaccac

SEQ ID NO: 154540 - DNA, 25 bp, SARS Virus
cagactcgtgtcgacatggaccacg

SEQ ID NO: 154541 - DNA, 25 bp, SARS Virus
agactcgtgtcggcatggaccacgt

SEQ ID NO: 154542 - DNA, 25 bp, SARS Virus
gactcgtgtcgagatggaccacgtt

SEQ ID NO: 154543 - DNA, 25 bp, SARS Virus
actcgtgtcgacgtggaccacgttg

SEQ ID NO: 154544 - DNA, 25 bp, SARS Virus
ctcgtgtcgacagggaccacgttga

SEQ ID NO: 154545 - DNA, 25 bp, SARS Virus
tcgtgtcgacatggaccacgttgag

SEQ ID NO: 154546 - DNA, 25 bp, SARS Virus
cgtgtcgacatggaccacgttgagg

SEQ ID NO: 154547 - DNA, 25 bp, SARS Virus
gtgtcgacatgggccacgttgagga

SEQ ID NO: 154548 - DNA, 25 bp, SARS Virus
tgtcgacatggagcacgttgaggaa

SEQ ID NO: 154549 - DNA, 25 bp, SARS Virus
gtcgacatggacgacgttgaggaaa

SEQ ID NO: 154550 - DNA, 25 bp, SARS Virus
tcgacatggaccgcgttgaggaaat

SEQ ID NO: 154551 - DNA, 25 bp, SARS Virus
cgacatggaccaggttgaggaaata

SEQ ID NO: 154552 - DNA, 25 bp, SARS Virus
gacatggaccacgttgaggaaatag

SEQ ID NO: 154553 - DNA, 25 bp, SARS Virus
acatggaccacggtgaggaaatagt

SEQ ID NO: 154554 - DNA, 25 bp, SARS Virus
catggaccacgtggaggaaatagtc

SEQ ID NO: 154555 - DNA, 25 bp, SARS Virus
atggaccacgttgaggaaatagtct

SEQ ID NO: 154556 - DNA, 25 bp, SARS Virus
tggaccacgttggggaaatagtctc

SEQ ID NO: 154557 - DNA, 25 bp, SARS Virus
ggaccacgttgaggaaatagtctcg

SEQ ID NO: 154558 - DNA, 25 bp, SARS Virus
gaccacgttgaggaaatagtctcgg

SEQ ID NO: 154559 - DNA, 25 bp, SARS Virus
accacgttgagggaatagtctcggt

SEQ ID NO: 154560 - DNA, 25 bp, SARS Virus
ccacgttgaggagatagtctcggtc

SEQ ID NO: 154561 - DNA, 25 bp, SARS Virus
cacgttgaggaagtagtctcggtcg

SEQ ID NO: 154562 - DNA, 25 bp, SARS Virus
acgttgaggaaagagtctcggtcgt

SEQ ID NO: 154563 - DNA, 25 bp, SARS Virus
cgttgaggaaatggtctcggtcgtg

SEQ ID NO: 154564 - DNA, 25 bp, SARS Virus
gttgaggaaatagtctcggtcgtgg

SEQ ID NO: 154565 - DNA, 25 bp, SARS Virus
ttgaggaaataggctcggtcgtggt

SEQ ID NO: 154566 - DNA, 25 bp, SARS Virus
tgaggaaatagtgtcggtcgtggtt

SEQ ID NO: 154567 - DNA, 25 bp, SARS Virus
gaggaaatagtcgcggtcgtggttt

SEQ ID NO: 154568 - DNA, 25 bp, SARS Virus
aggaaatagtctgggtcgtggtttc

SEQ ID NO: 154569 - DNA, 25 bp, SARS Virus
ggaaatagtctcggtcgtggtttca

SEQ ID NO: 154570 - DNA, 25 bp, SARS Virus
gaaatagtctcggtcgtggtttcac

SEQ ID NO: 154571 - DNA, 25 bp, SARS Virus
aaatagtctcgggcgtggtttcact

SEQ ID NO: 154572 - DNA, 25 bp, SARS Virus
aatagtctcggtggtggtttcactt

SEQ ID NO: 154573 - DNA, 25 bp, SARS Virus
atagtctcggtcgtggtttcactta

SEQ ID NO: 154574 - DNA, 25 bp, SARS Virus
tagtctcggtcggggtttcacttat

SEQ ID NO: 154575 - DNA, 25 bp, SARS Virus
agtctcggtcgtggtttcacttatt

SEQ ID NO: 154576 - DNA, 25 bp, SARS Virus
gtctcggtcgtggtttcacttattg

SEQ ID NO: 154577 - DNA, 25 bp, SARS Virus
tctcggtcgtgggttcacttattga

SEQ ID NO: 154578 - DNA, 25 bp, SARS Virus
ctcggtcgtggtgtcacttattgag

SEQ ID NO: 154579 - DNA, 25 bp, SARS Virus
tcggtcgtggttgcacttattgaga

SEQ ID NO: 154580 - DNA, 25 bp, SARS Virus
cggtcgtggtttgacttattgagag

SEQ ID NO: 154581 - DNA, 25 bp, SARS Virus
ggtcgtggtttcgcttattgagagt

SEQ ID NO: 154582 - DNA, 25 bp, SARS Virus
gtcgtggtttcagttattgagagta

SEQ ID NO: 154583 - DNA, 25 bp, SARS Virus
tcgtggtttcacgtattgagagtac

SEQ ID NO: 154584 - DNA, 25 bp, SARS Virus
cgtggtttcactgattgagagtaca

SEQ ID NO: 154585 - DNA, 25 bp, SARS Virus
gtggtttcacttgttgagagtacaa

SEQ ID NO: 154586 - DNA, 25 bp, SARS Virus
tggtttcacttagtgagagtacaac

SEQ ID NO: 154587 - DNA, 25 bp, SARS Virus
ggtttcacttatggagagtacaaca

SEQ ID NO: 154588 - DNA, 25 bp, SARS Virus
gtttcacttattgagagtacaacat

SEQ ID NO: 154589 - DNA, 25 bp, SARS Virus
tttcacttattgggagtacaacatc

SEQ ID NO: 154590 - DNA, 25 bp, SARS Virus
ttcacttattgagagtacaacatcc

SEQ ID NO: 154591 - DNA, 25 bp, SARS Virus
tcacttattgagggtacaacatccc

SEQ ID NO: 154592 - DNA, 25 bp, SARS Virus
cacttattgagagtacaacatccca

SEQ ID NO: 154593 - DNA, 25 bp, SARS Virus
acttattgagaggacaacatcccat

SEQ ID NO: 154594 - DNA, 25 bp, SARS Virus
cttattgagagtgcaacatcccatg

SEQ ID NO: 154595 - DNA, 25 bp, SARS Virus
ttattgagagtagaacatcccatgt

SEQ ID NO: 154596 - DNA, 25 bp, SARS Virus
tattgagagtacgacatcccatgtc

SEQ ID NO: 154597 - DNA, 25 bp, SARS Virus
attgagagtacagcatcccatgtcg

SEQ ID NO: 154598 - DNA, 25 bp, SARS Virus
ttgagagtacaagatcccatgtcga

SEQ ID NO: 154599 - DNA, 25 bp, SARS Virus
tgagagtacaacgtcccatgtcgat

SEQ ID NO: 154600 - DNA, 25 bp, SARS Virus
gagagtacaacagcccatgtcgatt

SEQ ID NO: 154601 - DNA, 25 bp, SARS Virus
agagtacaacatgccatgtcgattt

SEQ ID NO: 154602 - DNA, 25 bp, SARS Virus
gagtacaacatcgcatgtcgatttc

SEQ ID NO: 154603 - DNA, 25 bp, SARS Virus
agtacaacatccgatgtcgatttca

SEQ ID NO: 154604 - DNA, 25 bp, SARS Virus
gtacaacatcccgtgtcgatttcat

SEQ ID NO: 154605 - DNA, 25 bp, SARS Virus
tacaacatcccaggtcgatttcatt

SEQ ID NO: 154606 - DNA, 25 bp, SARS Virus
acaacatcccatgtcgatttcattc

SEQ ID NO: 154607 - DNA, 25 bp, SARS Virus
caacatcccatggcgatttcattca

SEQ ID NO: 154608 - DNA, 25 bp, SARS Virus
aacatcccatgtggatttcattcac

SEQ ID NO: 154609 - DNA, 25 bp, SARS Virus
acatcccatgtcgatttcattcaca

SEQ ID NO: 154610 - DNA, 25 bp, SARS Virus
catcccatgtcggtttcattcacat

SEQ ID NO: 154611 - DNA, 25 bp, SARS Virus
atcccatgtcgagttcattcacata

SEQ ID NO: 154612 - DNA, 25 bp, SARS Virus
tcccatgtcgatgtcattcacataa

SEQ ID NO: 154613 - DNA, 25 bp, SARS Virus
cccatgtcgattgcattcacataaa

SEQ ID NO: 154614 - DNA, 25 bp, SARS Virus
ccatgtcgatttgattcacataaat

SEQ ID NO: 154615 - DNA, 25 bp, SARS Virus
catgtcgatttcgttcacataaatt

SEQ ID NO: 154616 - DNA, 25 bp, SARS Virus
atgtcgatttcagtcacataaattc

SEQ ID NO: 154617 - DNA, 25 bp, SARS Virus
tgtcgatttcatgcacataaattca

SEQ ID NO: 154618 - DNA, 25 bp, SARS Virus
gtcgatttcattgacataaattcat

SEQ ID NO: 154619 - DNA, 25 bp, SARS Virus
tcgatttcattcgcataaattcata

SEQ ID NO: 154620 - DNA, 25 bp, SARS Virus
cgatttcattcagataaattcataa

SEQ ID NO: 154621 - DNA, 25 bp, SARS Virus
gatttcattcacgtaaattcataac

SEQ ID NO: 154622 - DNA, 25 bp, SARS Virus
atttcattcacagaaattcataact

SEQ ID NO: 154623 - DNA, 25 bp, SARS Virus
tttcattcacatgaattcataactg

SEQ ID NO: 154624 - DNA, 25 bp, SARS Virus
ttcattcacatagattcataactgt

SEQ ID NO: 154625 - DNA, 25 bp, SARS Virus
tcattcacataagttcataactgtg

SEQ ID NO: 154626 - DNA, 25 bp, SARS Virus
cattcacataaagtcataactgtgt

SEQ ID NO: 154627 - DNA, 25 bp, SARS Virus
attcacataaatgcataactgtgtc

SEQ ID NO: 154628 - DNA, 25 bp, SARS Virus
ttcacataaattgataactgtgtca

SEQ ID NO: 154629 - DNA, 25 bp, SARS Virus
tcacataaattcgtaactgtgtcaa

SEQ ID NO: 154630 - DNA, 25 bp, SARS Virus
cacataaattcagaactgtgtcaac

SEQ ID NO: 154631 - DNA, 25 bp, SARS Virus
acataaattcatgactgtgtcaact

SEQ ID NO: 154632 - DNA, 25 bp, SARS Virus
cataaattcatagctgtgtcaactc

SEQ ID NO: 154633 - DNA, 25 bp, SARS Virus
ataaattcataagtgtgtcaactca

SEQ ID NO: 154634 - DNA, 25 bp, SARS Virus
taaattcataacggtgtcaactcat

SEQ ID NO: 154635 - DNA, 25 bp, SARS Virus
aaattcataactgtgtcaactcata

SEQ ID NO: 154636 - DNA, 25 bp, SARS Virus
aattcataactgggtcaactcatat

SEQ ID NO: 154637 - DNA, 25 bp, SARS Virus
attcataactgtgtcaactcatatg

SEQ ID NO: 154638 - DNA, 25 bp, SARS Virus
ttcataactgtggcaactcatatga

SEQ ID NO: 154639 - DNA, 25 bp, SARS Virus
tcataactgtgtgaactcatatgaa

SEQ ID NO: 154640 - DNA, 25 bp, SARS Virus
cataactgtgtcgactcatatgaaa

SEQ ID NO: 154641 - DNA, 25 bp, SARS Virus
ataactgtgtcagctcatatgaaac

SEQ ID NO: 154642 - DNA, 25 bp, SARS Virus
taactgtgtcaagtcatatgaaacg

SEQ ID NO: 154643 - DNA, 25 bp, SARS Virus
aactgtgtcaacgcatatgaaacgc

SEQ ID NO: 154644 - DNA, 25 bp, SARS Virus
actgtgtcaactgatatgaaacgct

SEQ ID NO: 154645 - DNA, 25 bp, SARS Virus
ctgtgtcaactcgtatgaaacgctg

SEQ ID NO: 154646 - DNA, 25 bp, SARS Virus
tgtgtcaactcagatgaaacgctgt

SEQ ID NO: 154647 - DNA, 25 bp, SARS Virus
gtgtcaactcatgtgaaacgctgta

SEQ ID NO: 154648 - DNA, 25 bp, SARS Virus
tgtcaactcataggaaacgctgtaa

SEQ ID NO: 154649 - DNA, 25 bp, SARS Virus
gtcaactcatatgaaacgctgtaag

SEQ ID NO: 154650 - DNA, 25 bp, SARS Virus
tcaactcatatggaacgctgtaagt

SEQ ID NO: 154651 - DNA, 25 bp, SARS Virus
caactcatatgagacgctgtaagta

SEQ ID NO: 154652 - DNA, 25 bp, SARS Virus
aactcatatgaagcgctgtaagtag

SEQ ID NO: 154653 - DNA, 25 bp, SARS Virus
actcatatgaaaggctgtaagtagt

SEQ ID NO: 154654 - DNA, 25 bp, SARS Virus
ctcatatgaaacgctgtaagtagta

SEQ ID NO: 154655 - DNA, 25 bp, SARS Virus
tcatatgaaacggtgtaagtagtaa

SEQ ID NO: 154656 - DNA, 25 bp, SARS Virus
catatgaaacgcggtaagtagtaat

SEQ ID NO: 154657 - DNA, 25 bp, SARS Virus
atatgaaacgctgtaagtagtaata

SEQ ID NO: 154658 - DNA, 25 bp, SARS Virus
tatgaaacgctggaagtagtaataa

SEQ ID NO: 154659 - DNA, 25 bp, SARS Virus
atgaaacgctgtgagtagtaataag

SEQ ID NO: 154660 - DNA, 25 bp, SARS Virus
tgaaacgctgtaggtagtaataagg

SEQ ID NO: 154661 - DNA, 25 bp, SARS Virus
gaaacgctgtaagtagtaataagga

SEQ ID NO: 154662 - DNA, 25 bp, SARS Virus
aaacgctgtaaggagtaataaggaa

SEQ ID NO: 154663 - DNA, 25 bp, SARS Virus
aacgctgtaagtggtaataaggaaa

SEQ ID NO: 154664 - DNA, 25 bp, SARS Virus
acgctgtaagtagtaataaggaaaa

SEQ ID NO: 154665 - DNA, 25 bp, SARS Virus
cgctgtaagtaggaataaggaaaac

SEQ ID NO: 154666 - DNA, 25 bp, SARS Virus
gctgtaagtagtgataaggaaaacc

SEQ ID NO: 154667 - DNA, 25 bp, SARS Virus
ctgtaagtagtagtaaggaaaacca

SEQ ID NO: 154668 - DNA, 25 bp, SARS Virus
tgtaagtagtaagaaggaaaaccat

SEQ ID NO: 154669 - DNA, 25 bp, SARS Virus
gtaagtagtaatgaggaaaaccata

SEQ ID NO: 154670 - DNA, 25 bp, SARS Virus
taagtagtaatagggaaaaccatat

SEQ ID NO: 154671 - DNA, 25 bp, SARS Virus
aagtagtaataaggaaaaccatatt

SEQ ID NO: 154672 - DNA, 25 bp, SARS Virus
agtagtaataaggaaaaccatattg

SEQ ID NO: 154673 - DNA, 25 bp, SARS Virus
gtagtaataagggaaaccatattgt

SEQ ID NO: 154674 - DNA, 25 bp, SARS Virus
tagtaataaggagaaccatattgtc

SEQ ID NO: 154675 - DNA, 25 bp, SARS Virus
agtaataaggaagaccatattgtcg

SEQ ID NO: 154676 - DNA, 25 bp, SARS Virus
gtaataaggaaagccatattgtcgt

SEQ ID NO: 154677 - DNA, 25 bp, SARS Virus
taataaggaaaagcatattgtcgta

SEQ ID NO: 154678 - DNA, 25 bp, SARS Virus
aataaggaaaacgatattgtcgtaa

SEQ ID NO: 154679 - DNA, 25 bp, SARS Virus
ataaggaaaaccgtattgtcgtaaa

SEQ ID NO: 154680 - DNA, 25 bp, SARS Virus
taaggaaaaccagattgtcgtaaaa

SEQ ID NO: 154681 - DNA, 25 bp, SARS Virus
aaggaaaaccatgttgtcgtaaaag

SEQ ID NO: 154682 - DNA, 25 bp, SARS Virus
aggaaaaccatagtgtcgtaaaagt

SEQ ID NO: 154683 - DNA, 25 bp, SARS Virus
ggaaaaccatatggtcgtaaaagtg

SEQ ID NO: 154684 - DNA, 25 bp, SARS Virus
gaaaaccatattgtcgtaaaagtgg

SEQ ID NO: 154685 - DNA, 25 bp, SARS Virus
aaaaccatattggcgtaaaagtggt

SEQ ID NO: 154686 - DNA, 25 bp, SARS Virus
aaaccatattgtggtaaaagtggta

SEQ ID NO: 154687 - DNA, 25 bp, SARS Virus
aaccatattgtcgtaaaagtggtat

SEQ ID NO: 154688 - DNA, 25 bp, SARS Virus
accatattgtcggaaaagtggtatt

SEQ ID NO: 154689 - DNA, 25 bp, SARS Virus
ccatattgtcgtgaaagtggtatta

SEQ ID NO: 154690 - DNA, 25 bp, SARS Virus
catattgtcgtagaagtggtattaa

SEQ ID NO: 154691 - DNA, 25 bp, SARS Virus
atattgtcgtaagagtggtattaag

SEQ ID NO: 154692 - DNA, 25 bp, SARS Virus
tattgtcgtaaaggtggtattaaga

SEQ ID NO: 154693 - DNA, 25 bp, SARS Virus
attgtcgtaaaagtggtattaagac

SEQ ID NO: 154694 - DNA, 25 bp, SARS Virus
ttgtcgtaaaaggggtattaagact

SEQ ID NO: 154695 - DNA, 25 bp, SARS Virus
tgtcgtaaaagtggtattaagactt

SEQ ID NO: 154696 - DNA, 25 bp, SARS Virus
gtcgtaaaagtggtattaagacttc

SEQ ID NO: 154697 - DNA, 25 bp, SARS Virus
tcgtaaaagtgggattaagacttcc

SEQ ID NO: 154698 - DNA, 25 bp, SARS Virus
cgtaaaagtggtgttaagacttcca

SEQ ID NO: 154699 - DNA, 25 bp, SARS Virus
gtaaaagtggtagtaagacttccag

SEQ ID NO: 154700 - DNA, 25 bp, SARS Virus
taaaagtggtatgaagacttccagt

SEQ ID NO: 154701 - DNA, 25 bp, SARS Virus
aaaagtggtattgagacttccagtg

SEQ ID NO: 154702 - DNA, 25 bp, SARS Virus
aaagtggtattaggacttccagtgt

SEQ ID NO: 154703 - DNA, 25 bp, SARS Virus
aagtggtattaagacttccagtgtg

SEQ ID NO: 154704 - DNA, 25 bp, SARS Virus
agtggtattaaggcttccagtgtga

SEQ ID NO: 154705 - DNA, 25 bp, SARS Virus
gtggtattaagagttccagtgtgaa

SEQ ID NO: 154706 - DNA, 25 bp, SARS Virus
tggtattaagacgtccagtgtgaaa

SEQ ID NO: 154707 - DNA, 25 bp, SARS Virus
ggtattaagactgccagtgtgaaaa

SEQ ID NO: 154708 - DNA, 25 bp, SARS Virus
gtattaagacttgcagtgtgaaaag

SEQ ID NO: 154709 - DNA, 25 bp, SARS Virus
tattaagacttcgagtgtgaaaagt

SEQ ID NO: 154710 - DNA, 25 bp, SARS Virus
attaagacttccggtgtgaaaagtt

SEQ ID NO: 154711 - DNA, 25 bp, SARS Virus
ttaagacttccagtgtgaaaagttc

SEQ ID NO: 154712 - DNA, 25 bp, SARS Virus
taagacttccagggtgaaaagttct

SEQ ID NO: 154713 - DNA, 25 bp, SARS Virus
aagacttccagtgtgaaaagttctt

SEQ ID NO: 154714 - DNA, 25 bp, SARS Virus
agacttccagtgggaaaagttcttc

SEQ ID NO: 154715 - DNA, 25 bp, SARS Virus
gacttccagtgtgaaaagttcttcg

SEQ ID NO: 154716 - DNA, 25 bp, SARS Virus
acttccagtgtggaaagttcttcgt

SEQ ID NO: 154717 - DNA, 25 bp, SARS Virus
cttccagtgtgagaagttcttcgta

SEQ ID NO: 154718 - DNA, 25 bp, SARS Virus
ttccagtgtgaagagttcttcgtaa

SEQ ID NO: 154719 - DNA, 25 bp, SARS Virus
tccagtgtgaaaggttcttcgtaag

SEQ ID NO: 154720 - DNA, 25 bp, SARS Virus
ccagtgtgaaaagttcttcgtaaga

SEQ ID NO: 154721 - DNA, 25 bp, SARS Virus
cagtgtgaaaaggtcttcgtaagaa

SEQ ID NO: 154722 - DNA, 25 bp, SARS Virus
agtgtgaaaagtgcttcgtaagaaa

SEQ ID NO: 154723 - DNA, 25 bp, SARS Virus
gtgtgaaaagttgttcgtaagaaac

SEQ ID NO: 154724 - DNA, 25 bp, SARS Virus
tgtgaaaagttcgtcgtaagaaacg

SEQ ID NO: 154725 - DNA, 25 bp, SARS Virus
gtgaaaagttctgcgtaagaaacgt

SEQ ID NO: 154726 - DNA, 25 bp, SARS Virus
tgaaaagttcttggtaagaaacgta

SEQ ID NO: 154727 - DNA, 25 bp, SARS Virus
gaaaagttcttcgtaagaaacgtag

SEQ ID NO: 154728 - DNA, 25 bp, SARS Virus
aaaagttcttcggaagaaacgtaga

SEQ ID NO: 154729 - DNA, 25 bp, SARS Virus
taccgggtattctaacatttccagt

SEQ ID NO: 154730 - DNA, 25 bp, SARS Virus
accgggtattcgtacatttccagtc

SEQ ID NO: 154731 - DNA, 25 bp, SARS Virus
ccgggtattcgatcatttccagtcg

SEQ ID NO: 154732 - DNA, 25 bp, SARS Virus
cgggtattcgaatatttccagtcgt

SEQ ID NO: 154733 - DNA, 25 bp, SARS Virus
gggtattcgaacttttccagtcgta

SEQ ID NO: 154734 - DNA, 25 bp, SARS Virus
ggtattcgaacatttccagtcgtaa

SEQ ID NO: 154735 - DNA, 25 bp, SARS Virus
gtattcgaacatttccagtcgtaag

SEQ ID NO: 154736 - DNA, 25 bp, SARS Virus
tattcgaacatttccagtcgtaagg

SEQ ID NO: 154737 - DNA, 25 bp, SARS Virus
attcgaacattttcagtcgtaaggt

SEQ ID NO: 154738 - DNA, 25 bp, SARS Virus
ttcgaacatttctagtcgtaaggtt

SEQ ID NO: 154739 - DNA, 25 bp, SARS Virus
tcgaacatttcctgtcgtaaggttc

SEQ ID NO: 154740 - DNA, 25 bp, SARS Virus
cgaacatttccattcgtaaggttct

SEQ ID NO: 154741 - DNA, 25 bp, SARS Virus
gaacatttccagtcgtaaggttctt

SEQ ID NO: 154742 - DNA, 25 bp, SARS Virus
aacatttccagttgtaaggttctta

SEQ ID NO: 154743 - DNA, 25 bp, SARS Virus
acatttccagtcttaaggttcttac

SEQ ID NO: 154744 - DNA, 25 bp, SARS Virus
catttccagtcgtaaggttcttacg

SEQ ID NO: 154745 - DNA, 25 bp, SARS Virus
atttccagtcgttaggttcttacga

SEQ ID NO: 154746 - DNA, 25 bp, SARS Virus
tttccagtcgtatggttcttacgag

SEQ ID NO: 154747 - DNA, 25 bp, SARS Virus
ttccagtcgtaatgttcttacgaga

SEQ ID NO: 154748 - DNA, 25 bp, SARS Virus
tccagtcgtaagtttcttacgagac

SEQ ID NO: 154749 - DNA, 25 bp, SARS Virus
ccagtcgtaaggttcttacgagaca

SEQ ID NO: 154750 - DNA, 25 bp, SARS Virus
cagtcgtaaggttcttacgagacaa

SEQ ID NO: 154751 - DNA, 25 bp, SARS Virus
agtcgtaaggtttttacgagacaat

SEQ ID NO: 154752 - DNA, 25 bp, SARS Virus
gtcgtaaggttcttacgagacaata

SEQ ID NO: 154753 - DNA, 25 bp, SARS Virus
tcgtaaggttcttacgagacaatag

SEQ ID NO: 154754 - DNA, 25 bp, SARS Virus
cgtaaggttctttcgagacaataga

SEQ ID NO: 154755 - DNA, 25 bp, SARS Virus
gtaaggttcttatgagacaatagaa

SEQ ID NO: 154756 - DNA, 25 bp, SARS Virus
taaggttcttactagacaatagaaa

SEQ ID NO: 154757 - DNA, 25 bp, SARS Virus
aaggttcttacgtgacaatagaaat

SEQ ID NO: 154758 - DNA, 25 bp, SARS Virus
aggttcttacgatacaatagaaatg

SEQ ID NO: 154759 - DNA, 25 bp, SARS Virus
ggttcttacgagtcaatagaaatgt

SEQ ID NO: 154760 - DNA, 25 bp, SARS Virus
gttcttacgagataatagaaatgtc

SEQ ID NO: 154761 - DNA, 25 bp, SARS Virus
ttcttacgagactatagaaatgtcg

SEQ ID NO: 154762 - DNA, 25 bp, SARS Virus
tcttacgagacattagaaatgtcga

SEQ ID NO: 154763 - DNA, 25 bp, SARS Virus
cttacgagacaatagaaatgtcgat

SEQ ID NO: 154764 - DNA, 25 bp, SARS Virus
ttacgagacaattgaaatgtcgata

SEQ ID NO: 154765 - DNA, 25 bp, SARS Virus
tacgagacaatataaatgtcgatat

SEQ ID NO: 154766 - DNA, 25 bp, SARS Virus
acgagacaatagtaatgtcgatatc

SEQ ID NO: 154767 - DNA, 25 bp, SARS Virus
cgagacaatagatatgtcgatatct

SEQ ID NO: 154768 - DNA, 25 bp, SARS Virus
gagacaatagaattgtcgatatctt

SEQ ID NO: 154769 - DNA, 25 bp, SARS Virus
agacaatagaaatgtcgatatcttg

SEQ ID NO: 154770 - DNA, 25 bp, SARS Virus
gacaatagaaatttcgatatcttgg

SEQ ID NO: 154771 - DNA, 25 bp, SARS Virus
acaatagaaatgtcgatatcttggt

SEQ ID NO: 154772 - DNA, 25 bp, SARS Virus
caatagaaatgttgatatcttggtg

SEQ ID NO: 154773 - DNA, 25 bp, SARS Virus
aatagaaatgtctatatcttggtgg

SEQ ID NO: 154774 - DNA, 25 bp, SARS Virus
atagaaatgtcgttatcttggtggg

SEQ ID NO: 154775 - DNA, 25 bp, SARS Virus
tagaaatgtcgatatcttggtgggt

SEQ ID NO: 154776 - DNA, 25 bp, SARS Virus
agaaatgtcgatttcttggtgggtc

SEQ ID NO: 154777 - DNA, 25 bp, SARS Virus
gaaatgtcgatatcttggtgggtcc

SEQ ID NO: 154778 - DNA, 25 bp, SARS Virus
aaatgtcgatattttggtgggtccc

SEQ ID NO: 154779 - DNA, 25 bp, SARS Virus
aatgtcgatatcttggtgggtcccg

SEQ ID NO: 154780 - DNA, 25 bp, SARS Virus
atgtcgatatcttggtgggtcccga

SEQ ID NO: 154781 - DNA, 25 bp, SARS Virus
tgtcgatatctttgtgggtcccgat

SEQ ID NO: 154782 - DNA, 25 bp, SARS Virus
gtcgatatcttgttgggtcccgatc

SEQ ID NO: 154783 - DNA, 25 bp, SARS Virus
tcgatatcttggtgggtcccgatca

SEQ ID NO: 154784 - DNA, 25 bp, SARS Virus
cgatatcttggttggtcccgatcaa

SEQ ID NO: 154785 - DNA, 25 bp, SARS Virus
gatatcttggtgtgtcccgatcaaa

SEQ ID NO: 154786 - DNA, 25 bp, SARS Virus
atatcttggtggttcccgatcaaaa

SEQ ID NO: 154787 - DNA, 25 bp, SARS Virus
tatcttggtgggtcccgatcaaaaa

SEQ ID NO: 154788 - DNA, 25 bp, SARS Virus
atcttggtgggttccgatcaaaaac

SEQ ID NO: 154789 - DNA, 25 bp, SARS Virus
tcttggtgggtctcgatcaaaaacg

SEQ ID NO: 154790 - DNA, 25 bp, SARS Virus
cttggtgggtcctgatcaaaaacga

SEQ ID NO: 154791 - DNA, 25 bp, SARS Virus
ttggtgggtccctatcaaaaacgaa

SEQ ID NO: 154792 - DNA, 25 bp, SARS Virus
tggtgggtcccgttcaaaaacgaaa

SEQ ID NO: 154793 - DNA, 25 bp, SARS Virus
ggtgggtcccgatcaaaaacgaaat

SEQ ID NO: 154794 - DNA, 25 bp, SARS Virus
gtgggtcccgattaaaaacgaaata

SEQ ID NO: 154795 - DNA, 25 bp, SARS Virus
tgggtcccgatctaaaacgaaatat

SEQ ID NO: 154796 - DNA, 25 bp, SARS Virus
gggtcccgatcataaacgaaatatt

SEQ ID NO: 154797 - DNA, 25 bp, SARS Virus
ggtcccgatcaataacgaaatattt

SEQ ID NO: 154798 - DNA, 25 bp, SARS Virus
gtcccgatcaaatacgaaatattta

SEQ ID NO: 154799 - DNA, 25 bp, SARS Virus
tcccgatcaaaatcgaaatatttag

SEQ ID NO: 154800 - DNA, 25 bp, SARS Virus
cccgatcaaaaatgaaatatttagg

SEQ ID NO: 154801 - DNA, 25 bp, SARS Virus
ccgatcaaaaactaaatatttaggt

SEQ ID NO: 154802 - DNA, 25 bp, SARS Virus
cgatcaaaaacgtaatatttaggtg

SEQ ID NO: 154803 - DNA, 25 bp, SARS Virus
gatcaaaaacgatatatttaggtgt

SEQ ID NO: 154804 - DNA, 25 bp, SARS Virus
atcaaaaacgaattatttaggtgtg

SEQ ID NO: 154805 - DNA, 25 bp, SARS Virus
tcaaaaacgaaatatttaggtgtgt

SEQ ID NO: 154806 - DNA, 25 bp, SARS Virus
caaaaacgaaatttttaggtgtgtc

SEQ ID NO: 154807 - DNA, 25 bp, SARS Virus
aaaaacgaaatatttaggtgtgtct

SEQ ID NO: 154808 - DNA, 25 bp, SARS Virus
aaaacgaaatatttaggtgtgtcta

SEQ ID NO: 154809 - DNA, 25 bp, SARS Virus
aaacgaaatatttaggtgtgtctat

SEQ ID NO: 154810 - DNA, 25 bp, SARS Virus
aacgaaatattttggtgtgtctatt

SEQ ID NO: 154811 - DNA, 25 bp, SARS Virus
acgaaatatttatgtgtgtctattc

SEQ ID NO: 154812 - DNA, 25 bp, SARS Virus
cgaaatatttagttgtgtctattca

SEQ ID NO: 154813 - DNA, 25 bp, SARS Virus
gaaatatttaggtgtgtctattcac

SEQ ID NO: 154814 - DNA, 25 bp, SARS Virus
aaatatttaggtttgtctattcact

SEQ ID NO: 154815 - DNA, 25 bp, SARS Virus
aatatttaggtgtgtctattcactt

SEQ ID NO: 154816 - DNA, 25 bp, SARS Virus
atatttaggtgtttctattcacttt

SEQ ID NO: 154817 - DNA, 25 bp, SARS Virus
tatttaggtgtgtctattcactttt

SEQ ID NO: 154818 - DNA, 25 bp, SARS Virus
atttaggtgtgtttattcacttttt

SEQ ID NO: 154819 - DNA, 25 bp, SARS Virus
tttaggtgtgtctattcactttttg

SEQ ID NO: 154820 - DNA, 25 bp, SARS Virus
ttaggtgtgtcttttcactttttgg

SEQ ID NO: 154821 - DNA, 25 bp, SARS Virus
taggtgtgtctattcactttttggg

SEQ ID NO: 154822 - DNA, 25 bp, SARS Virus
aggtgtgtctattcactttttggga

SEQ ID NO: 154823 - DNA, 25 bp, SARS Virus
ggtgtgtctatttactttttgggaa

SEQ ID NO: 154824 - DNA, 25 bp, SARS Virus
gtgtgtctattctctttttgggaag

SEQ ID NO: 154825 - DNA, 25 bp, SARS Virus
tgtgtctattcattttttgggaaga

SEQ ID NO: 154826 - DNA, 25 bp, SARS Virus
gtgtctattcactttttgggaagaa

SEQ ID NO: 154827 - DNA, 25 bp, SARS Virus
tgtctattcactttttgggaagaaa

SEQ ID NO: 154828 - DNA, 25 bp, SARS Virus
gtctattcactttttgggaagaaat

SEQ ID NO: 154829 - DNA, 25 bp, SARS Virus
tctattcactttttgggaagaaatc

SEQ ID NO: 154830 - DNA, 25 bp, SARS Virus
ctattcactttttgggaagaaatct

SEQ ID NO: 154831 - DNA, 25 bp, SARS Virus
tattcacttttttggaagaaatctc

SEQ ID NO: 154832 - DNA, 25 bp, SARS Virus
attcactttttgtgaagaaatctca

SEQ ID NO: 154833 - DNA, 25 bp, SARS Virus
ttcactttttggtaagaaatctcag

SEQ ID NO: 154834 - DNA, 25 bp, SARS Virus
tcactttttgggtagaaatctcagt

SEQ ID NO: 154835 - DNA, 25 bp, SARS Virus
cactttttgggatgaaatctcagta

SEQ ID NO: 154836 - DNA, 25 bp, SARS Virus
actttttgggaataaatctcagtaa

SEQ ID NO: 154837 - DNA, 25 bp, SARS Virus
ctttttgggaagtaatctcagtaag

SEQ ID NO: 154838 - DNA, 25 bp, SARS Virus
tttttgggaagatatctcagtaaga

SEQ ID NO: 154839 - DNA, 25 bp, SARS Virus
ttttgggaagaattctcagtaagag

SEQ ID NO: 154840 - DNA, 25 bp, SARS Virus
tttgggaagaaatctcagtaagaga

SEQ ID NO: 154841 - DNA, 25 bp, SARS Virus
ttgggaagaaatttcagtaagagaa

SEQ ID NO: 154842 - DNA, 25 bp, SARS Virus
tgggaagaaatctcagtaagagaaa

SEQ ID NO: 154843 - DNA, 25 bp, SARS Virus
gggaagaaatcttagtaagagaaaa

SEQ ID NO: 154844 - DNA, 25 bp, SARS Virus
ggaagaaatctctgtaagagaaaac

SEQ ID NO: 154845 - DNA, 25 bp, SARS Virus
gaagaaatctcattaagagaaaaca

SEQ ID NO: 154846 - DNA, 25 bp, SARS Virus
aagaaatctcagtaagagaaaacag

SEQ ID NO: 154847 - DNA, 25 bp, SARS Virus
agaaatctcagttagagaaaacagt

SEQ ID NO: 154848 - DNA, 25 bp, SARS Virus
gaaatctcagtatgagaaaacagtg

SEQ ID NO: 154849 - DNA, 25 bp, SARS Virus
aaatctcagtaatagaaaacagtgt

SEQ ID NO: 154850 - DNA, 25 bp, SARS Virus
aatctcagtaagtgaaaacagtgta

SEQ ID NO: 154851 - DNA, 25 bp, SARS Virus
atctcagtaagataaaacagtgtac

SEQ ID NO: 154852 - DNA, 25 bp, SARS Virus
tctcagtaagagtaaacagtgtaca

SEQ ID NO: 154853 - DNA, 25 bp, SARS Virus
ctcagtaagagataacagtgtacaa

SEQ ID NO: 154854 - DNA, 25 bp, SARS Virus
tcagtaagagaatacagtgtacaaa

SEQ ID NO: 154855 - DNA, 25 bp, SARS Virus
cagtaagagaaatcagtgtacaaac

SEQ ID NO: 154856 - DNA, 25 bp, SARS Virus
agtaagagaaaatagtgtacaaacc

SEQ ID NO: 154857 - DNA, 25 bp, SARS Virus
gtaagagaaaactgtgtacaaacca

SEQ ID NO: 154858 - DNA, 25 bp, SARS Virus
taagagaaaacattgtacaaaccag

SEQ ID NO: 154859 - DNA, 25 bp, SARS Virus
aagagaaaacagtgtacaaaccagg

SEQ ID NO: 154860 - DNA, 25 bp, SARS Virus
agagaaaacagtttacaaaccagga

SEQ ID NO: 154861 - DNA, 25 bp, SARS Virus
gagaaaacagtgtacaaaccaggat

SEQ ID NO: 154862 - DNA, 25 bp, SARS Virus
agaaaacagtgttcaaaccaggatc

SEQ ID NO: 154863 - DNA, 25 bp, SARS Virus
gaaaacagtgtataaaccaggatcc

SEQ ID NO: 154864 - DNA, 25 bp, SARS Virus
aaaacagtgtactaaccaggatccc

SEQ ID NO: 154865 - DNA, 25 bp, SARS Virus
aaacagtgtacataccaggatccca

SEQ ID NO: 154866 - DNA, 25 bp, SARS Virus
aacagtgtacaatccaggatcccag

SEQ ID NO: 154867 - DNA, 25 bp, SARS Virus
acagtgtacaaatcaggatcccagt

SEQ ID NO: 154868 - DNA, 25 bp, SARS Virus
cagtgtacaaactaggatcccagta

SEQ ID NO: 154869 - DNA, 25 bp, SARS Virus
agtgtacaaacctggatcccagtat

SEQ ID NO: 154870 - DNA, 25 bp, SARS Virus
gtgtacaaaccatgatcccagtatg

SEQ ID NO: 154871 - DNA, 25 bp, SARS Virus
tgtacaaaccagtatcccagtatgt

SEQ ID NO: 154872 - DNA, 25 bp, SARS Virus
gtacaaaccaggttcccagtatgta

SEQ ID NO: 154873 - DNA, 25 bp, SARS Virus
tacaaaccaggatcccagtatgtat

SEQ ID NO: 154874 - DNA, 25 bp, SARS Virus
acaaaccaggattccagtatgtata

SEQ ID NO: 154875 - DNA, 25 bp, SARS Virus
caaaccaggatctcagtatgtatag

SEQ ID NO: 154876 - DNA, 25 bp, SARS Virus
aaaccaggatcctagtatgtatagc

SEQ ID NO: 154877 - DNA, 25 bp, SARS Virus
aaccaggatccctgtatgtatagcg

SEQ ID NO: 154878 - DNA, 25 bp, SARS Virus
accaggatcccattatgtatagcga

SEQ ID NO: 154879 - DNA, 25 bp, SARS Virus
ccaggatcccagtatgtatagcgat

SEQ ID NO: 154880 - DNA, 25 bp, SARS Virus
caggatcccagtttgtatagcgatt

SEQ ID NO: 154881 - DNA, 25 bp, SARS Virus
aggatcccagtatgtatagcgatta

SEQ ID NO: 154882 - DNA, 25 bp, SARS Virus
ggatcccagtatttatagcgattat

SEQ ID NO: 154883 - DNA, 25 bp, SARS Virus
gatcccagtatgtatagcgattatt

SEQ ID NO: 154884 - DNA, 25 bp, SARS Virus
atcccagtatgtttagcgattatta

SEQ ID NO: 154885 - DNA, 25 bp, SARS Virus
tcccagtatgtatagcgattattat

SEQ ID NO: 154886 - DNA, 25 bp, SARS Virus
cccagtatgtattgcgattattatt

SEQ ID NO: 154887 - DNA, 25 bp, SARS Virus
ccagtatgtatatcgattattattc

SEQ ID NO: 154888 - DNA, 25 bp, SARS Virus
cagtatgtatagtgattattattcc

SEQ ID NO: 154889 - DNA, 25 bp, SARS Virus
agtatgtatagctattattattcca

SEQ ID NO: 154890 - DNA, 25 bp, SARS Virus
gtatgtatagcgtttattattccag

SEQ ID NO: 154891 - DNA, 25 bp, SARS Virus
tatgtatagcgattattattccagg

SEQ ID NO: 154892 - DNA, 25 bp, SARS Virus
atgtatagcgattattattccaggg

SEQ ID NO: 154893 - DNA, 25 bp, SARS Virus
tgtatagcgatttttattccagggt

SEQ ID NO: 154894 - DNA, 25 bp, SARS Virus
gtatagcgattattattccagggta

SEQ ID NO: 154895 - DNA, 25 bp, SARS Virus
tatagcgattattattccagggtaa

SEQ ID NO: 154896 - DNA, 25 bp, SARS Virus
atagcgattatttttccagggtaaa

SEQ ID NO: 154897 - DNA, 25 bp, SARS Virus
tagcgattattattccagggtaaat

SEQ ID NO: 154898 - DNA, 25 bp, SARS Virus
agcgattattattccagggtaaata

SEQ ID NO: 154899 - DNA, 25 bp, SARS Virus
gcgattattatttcagggtaaataa

SEQ ID NO: 154900 - DNA, 25 bp, SARS Virus
cgattattattctagggtaaataat

SEQ ID NO: 154901 - DNA, 25 bp, SARS Virus
gattattattcctgggtaaataatc

SEQ ID NO: 154902 - DNA, 25 bp, SARS Virus
attattattccatggtaaataatcg

SEQ ID NO: 154903 - DNA, 25 bp, SARS Virus
ttattattccagtgtaaataatcgg

SEQ ID NO: 154904 - DNA, 25 bp, SARS Virus
tattattccaggttaaataatcggc

SEQ ID NO: 154905 - DNA, 25 bp, SARS Virus
attattccagggtaaataatcggca

SEQ ID NO: 154906 - DNA, 25 bp, SARS Virus
ttattccagggttaataatcggcat

SEQ ID NO: 154907 - DNA, 25 bp, SARS Virus
tattccagggtatataatcggcata

SEQ ID NO: 154908 - DNA, 25 bp, SARS Virus
attccagggtaattaatcggcatac

SEQ ID NO: 154909 - DNA, 25 bp, SARS Virus
ttccagggtaaataatcggcataca

SEQ ID NO: 154910 - DNA, 25 bp, SARS Virus
tccagggtaaattatcggcatacat

SEQ ID NO: 154911 - DNA, 25 bp, SARS Virus
ccagggtaaatattcggcatacatg

SEQ ID NO: 154912 - DNA, 25 bp, SARS Virus
cagggtaaataatcggcatacatga

SEQ ID NO: 154913 - DNA, 25 bp, SARS Virus
agggtaaataattggcatacatgac

SEQ ID NO: 154914 - DNA, 25 bp, SARS Virus
gggtaaataatctgcatacatgaca

SEQ ID NO: 154915 - DNA, 25 bp, SARS Virus
ggtaaataatcgtcatacatgacaa

SEQ ID NO: 154916 - DNA, 25 bp, SARS Virus
gtaaataatcggtatacatgacaac

SEQ ID NO: 154917 - DNA, 25 bp, SARS Virus
taaataatcggcttacatgacaacg

SEQ ID NO: 154918 - DNA, 25 bp, SARS Virus
aaataatcggcatacatgacaacgt

SEQ ID NO: 154919 - DNA, 25 bp, SARS Virus
aataatcggcattcatgacaacgtg

SEQ ID NO: 154920 - DNA, 25 bp, SARS Virus
ataatcggcatatatgacaacgtgt

SEQ ID NO: 154921 - DNA, 25 bp, SARS Virus
taatcggcatacttgacaacgtgtc

SEQ ID NO: 154922 - DNA, 25 bp, SARS Virus
aatcggcatacatgacaacgtgtca

SEQ ID NO: 154923 - DNA, 25 bp, SARS Virus
atcggcatacattacaacgtgtcag

SEQ ID NO: 154924 - DNA, 25 bp, SARS Virus
tcggcatacatgtcaacgtgtcaga

SEQ ID NO: 154925 - DNA, 25 bp, SARS Virus
cggcatacatgataacgtgtcagag

SEQ ID NO: 154926 - DNA, 25 bp, SARS Virus
ggcatacatgactacgtgtcagagg

SEQ ID NO: 154927 - DNA, 25 bp, SARS Virus
gcatacatgacatcgtgtcagaggt

SEQ ID NO: 154928 - DNA, 25 bp, SARS Virus
catacatgacaatgtgtcagaggtt

SEQ ID NO: 154929 - DNA, 25 bp, SARS Virus
atacatgacaacttgtcagaggtta

SEQ ID NO: 154930 - DNA, 25 bp, SARS Virus
tacatgacaacgtgtcagaggttaa

SEQ ID NO: 154931 - DNA, 25 bp, SARS Virus
acatgacaacgtttcagaggttaat

SEQ ID NO: 154932 - DNA, 25 bp, SARS Virus
catgacaacgtgtcagaggttaatt

SEQ ID NO: 154933 - DNA, 25 bp, SARS Virus
atgacaacgtgttagaggttaattt

SEQ ID NO: 154934 - DNA, 25 bp, SARS Virus
tgacaacgtgtctgaggttaatttc

SEQ ID NO: 154935 - DNA, 25 bp, SARS Virus
gacaacgtgtcataggttaatttca

SEQ ID NO: 154936 - DNA, 25 bp, SARS Virus
acaacgtgtcagtggttaatttcat

SEQ ID NO: 154937 - DNA, 25 bp, SARS Virus
caacgtgtcagatgttaatttcatc

SEQ ID NO: 154938 - DNA, 25 bp, SARS Virus
aacgtgtcagagtttaatttcatct

SEQ ID NO: 154939 - DNA, 25 bp, SARS Virus
acgtgtcagaggttaatttcatctt

SEQ ID NO: 154940 - DNA, 25 bp, SARS Virus
cgtgtcagaggttaatttcatctta

SEQ ID NO: 154941 - DNA, 25 bp, SARS Virus
gtgtcagaggtttatttcatcttag

SEQ ID NO: 154942 - DNA, 25 bp, SARS Virus
tgtcagaggttattttcatcttaga

SEQ ID NO: 154943 - DNA, 25 bp, SARS Virus
gtcagaggttaatttcatcttagac

SEQ ID NO: 154944 - DNA, 25 bp, SARS Virus
tcagaggttaatttcatcttagacg

SEQ ID NO: 154945 - DNA, 25 bp, SARS Virus
cagaggttaatttcatcttagacgc

SEQ ID NO: 154946 - DNA, 25 bp, SARS Virus
agaggttaattttatcttagacgca

SEQ ID NO: 154947 - DNA, 25 bp, SARS Virus
gaggttaatttcttcttagacgcag

SEQ ID NO: 154948 - DNA, 25 bp, SARS Virus
aggttaatttcatcttagacgcagc

SEQ ID NO: 154949 - DNA, 25 bp, SARS Virus
ggttaatttcattttagacgcagcc

SEQ ID NO: 154950 - DNA, 25 bp, SARS Virus
gttaatttcatcttagacgcagcct

SEQ ID NO: 154951 - DNA, 25 bp, SARS Virus
ttaatttcatcttagacgcagcctc

SEQ ID NO: 154952 - DNA, 25 bp, SARS Virus
taatttcatctttgacgcagcctct

SEQ ID NO: 154953 - DNA, 25 bp, SARS Virus
aatttcatcttatacgcagcctctg

SEQ ID NO: 154954 - DNA, 25 bp, SARS Virus
atttcatcttagtcgcagcctctgc

SEQ ID NO: 154955 - DNA, 25 bp, SARS Virus
tttcatcttagatgcagcctctgct

SEQ ID NO: 154956 - DNA, 25 bp, SARS Virus
ttcatcttagactcagcctctgctt

SEQ ID NO: 154957 - DNA, 25 bp, SARS Virus
tcatcttagacgtagcctctgcttc

SEQ ID NO: 154958 - DNA, 25 bp, SARS Virus
catcttagacgctgcctctgcttca

SEQ ID NO: 154959 - DNA, 25 bp, SARS Virus
atcttagacgcatcctctgcttcag

SEQ ID NO: 154960 - DNA, 25 bp, SARS Virus
tcttagacgcagtctctgcttcagt

SEQ ID NO: 154961 - DNA, 25 bp, SARS Virus
cttagacgcagcttctgcttcagta

SEQ ID NO: 154962 - DNA, 25 bp, SARS Virus
ttagacgcagcctctgcttcagtaa

SEQ ID NO: 154963 - DNA, 25 bp, SARS Virus
tagacgcagcctttgcttcagtaat

SEQ ID NO: 154964 - DNA, 25 bp, SARS Virus
agacgcagcctctgcttcagtaatt

SEQ ID NO: 154965 - DNA, 25 bp, SARS Virus
gacgcagcctcttcttcagtaattc

SEQ ID NO: 154966 - DNA, 25 bp, SARS Virus
acgcagcctctgtttcagtaattct

SEQ ID NO: 154967 - DNA, 25 bp, SARS Virus
cgcagcctctgcttcagtaattcta

SEQ ID NO: 154968 - DNA, 25 bp, SARS Virus
gcagcctctgcttcagtaattctag

SEQ ID NO: 154969 - DNA, 25 bp, SARS Virus
cagcctctgctttagtaattctaga

SEQ ID NO: 154970 - DNA, 25 bp, SARS Virus
agcctctgcttctgtaattctagac

SEQ ID NO: 154971 - DNA, 25 bp, SARS Virus
gcctctgcttcattaattctagact

SEQ ID NO: 154972 - DNA, 25 bp, SARS Virus
cctctgcttcagtaattctagactt

SEQ ID NO: 154973 - DNA, 25 bp, SARS Virus
ctctgcttcagttattctagactta

SEQ ID NO: 154974 - DNA, 25 bp, SARS Virus
tctgcttcagtatttctagacttag

SEQ ID NO: 154975 - DNA, 25 bp, SARS Virus
ctgcttcagtaattctagacttagc

SEQ ID NO: 154976 - DNA, 25 bp, SARS Virus
tgcttcagtaattctagacttagct

SEQ ID NO: 154977 - DNA, 25 bp, SARS Virus
gcttcagtaattttagacttagctg

SEQ ID NO: 154978 - DNA, 25 bp, SARS Virus
cttcagtaattctagacttagctgt

SEQ ID NO: 154979 - DNA, 25 bp, SARS Virus
ttcagtaattcttgacttagctgtt

SEQ ID NO: 154980 - DNA, 25 bp, SARS Virus
tcagtaattctatacttagctgttc

SEQ ID NO: 154981 - DNA, 25 bp, SARS Virus
cagtaattctagtcttagctgttca

SEQ ID NO: 154982 - DNA, 25 bp, SARS Virus
agtaattctagatttagctgttcat

SEQ ID NO: 154983 - DNA, 25 bp, SARS Virus
gtaattctagacttagctgttcatc

SEQ ID NO: 154984 - DNA, 25 bp, SARS Virus
taattctagacttagctgttcatca

SEQ ID NO: 154985 - DNA, 25 bp, SARS Virus
aattctagactttgctgttcatcac

SEQ ID NO: 154986 - DNA, 25 bp, SARS Virus
attctagacttatctgttcatcaca

SEQ ID NO: 154987 - DNA, 25 bp, SARS Virus
ttctagacttagttgttcatcacac

SEQ ID NO: 154988 - DNA, 25 bp, SARS Virus
tctagacttagctgttcatcacacg

SEQ ID NO: 154989 - DNA, 25 bp, SARS Virus
ctagacttagcttttcatcacacgg

SEQ ID NO: 154990 - DNA, 25 bp, SARS Virus
tagacttagctgttcatcacacggt

SEQ ID NO: 154991 - DNA, 25 bp, SARS Virus
agacttagctgttcatcacacggtc

SEQ ID NO: 154992 - DNA, 25 bp, SARS Virus
gacttagctgtttatcacacggtca

SEQ ID NO: 154993 - DNA, 25 bp, SARS Virus
acttagctgttcttcacacggtcaa

SEQ ID NO: 154994 - DNA, 25 bp, SARS Virus
cttagctgttcatcacacggtcaac

SEQ ID NO: 154995 - DNA, 25 bp, SARS Virus
ttagctgttcattacacggtcaacc

SEQ ID NO: 154996 - DNA, 25 bp, SARS Virus
tagctgttcatctcacggtcaaccg

SEQ ID NO: 154997 - DNA, 25 bp, SARS Virus
agctgttcatcatacggtcaaccgt

SEQ ID NO: 154998 - DNA, 25 bp, SARS Virus
gctgttcatcactcggtcaaccgtt

SEQ ID NO: 154999 - DNA, 25 bp, SARS Virus
ctgttcatcacatggtcaaccgttg

SEQ ID NO: 155000 - DNA, 25 bp, SARS Virus
tgttcatcacactgtcaaccgttgg

SEQ ID NO: 155001 - DNA, 25 bp, SARS Virus
gttcatcacacgttcaaccgttggt

SEQ ID NO: 155002 - DNA, 25 bp, SARS Virus
ttcatcacacggtcaaccgttggta

SEQ ID NO: 155003 - DNA, 25 bp, SARS Virus
tcatcacacggttaaccgttggtaa

SEQ ID NO: 155004 - DNA, 25 bp, SARS Virus
catcacacggtctaccgttggtaac

SEQ ID NO: 155005 - DNA, 25 bp, SARS Virus
atcacacggtcatccgttggtaaca

SEQ ID NO: 155006 - DNA, 25 bp, SARS Virus
tcacacggtcaatcgttggtaacag

SEQ ID NO: 155007 - DNA, 25 bp, SARS Virus
cacacggtcaactgttggtaacaga

SEQ ID NO: 155008 - DNA, 25 bp, SARS Virus
acacggtcaacctttggtaacagac

SEQ ID NO: 155009 - DNA, 25 bp, SARS Virus
cacggtcaaccgttggtaacagact

SEQ ID NO: 155010 - DNA, 25 bp, SARS Virus
acggtcaaccgttggtaacagactc

SEQ ID NO: 155011 - DNA, 25 bp, SARS Virus
cggtcaaccgtttgtaacagactcg

SEQ ID NO: 155012 - DNA, 25 bp, SARS Virus
ggtcaaccgttgttaacagactcgt

SEQ ID NO: 155013 - DNA, 25 bp, SARS Virus
gtcaaccgttggtaacagactcgtg

SEQ ID NO: 155014 - DNA, 25 bp, SARS Virus
tcaaccgttggttacagactcgtgt

SEQ ID NO: 155015 - DNA, 25 bp, SARS Virus
caaccgttggtatcagactcgtgtc

SEQ ID NO: 155016 - DNA, 25 bp, SARS Virus
aaccgttggtaatagactcgtgtcg

SEQ ID NO: 155017 - DNA, 25 bp, SARS Virus
accgttggtaactgactcgtgtcga

SEQ ID NO: 155018 - DNA, 25 bp, SARS Virus
ccgttggtaacatactcgtgtcgac

SEQ ID NO: 155019 - DNA, 25 bp, SARS Virus
cgttggtaacagtctcgtgtcgaca

SEQ ID NO: 155020 - DNA, 25 bp, SARS Virus
gttggtaacagattcgtgtcgacat

SEQ ID NO: 155021 - DNA, 25 bp, SARS Virus
ttggtaacagactcgtgtcgacatg

SEQ ID NO: 155022 - DNA, 25 bp, SARS Virus
tggtaacagacttgtgtcgacatgg

SEQ ID NO: 155023 - DNA, 25 bp, SARS Virus
ggtaacagactcttgtcgacatgga

SEQ ID NO: 155024 - DNA, 25 bp, SARS Virus
gtaacagactcgtgtcgacatggac

SEQ ID NO: 155025 - DNA, 25 bp, SARS Virus
taacagactcgtttcgacatggacc

SEQ ID NO: 155026 - DNA, 25 bp, SARS Virus
aacagactcgtgtcgacatggacca

SEQ ID NO: 155027 - DNA, 25 bp, SARS Virus
acagactcgtgttgacatggaccac

SEQ ID NO: 155028 - DNA, 25 bp, SARS Virus
cagactcgtgtctacatggaccacg

SEQ ID NO: 155029 - DNA, 25 bp, SARS Virus
agactcgtgtcgtcatggaccacgt

SEQ ID NO: 155030 - DNA, 25 bp, SARS Virus
gactcgtgtcgatatggaccacgtt

SEQ ID NO: 155031 - DNA, 25 bp, SARS Virus
actcgtgtcgacttggaccacgttg

SEQ ID NO: 155032 - DNA, 25 bp, SARS Virus
ctcgtgtcgacatggaccacgttga

SEQ ID NO: 155033 - DNA, 25 bp, SARS Virus
tcgtgtcgacattgaccacgttgag

SEQ ID NO: 155034 - DNA, 25 bp, SARS Virus
cgtgtcgacatgtaccacgttgagg

SEQ ID NO: 155035 - DNA, 25 bp, SARS Virus
gtgtcgacatggtccacgttgagga

SEQ ID NO: 155036 - DNA, 25 bp, SARS Virus
tgtcgacatggatcacgttgaggaa

SEQ ID NO: 155037 - DNA, 25 bp, SARS Virus
gtcgacatggactacgttgaggaaa

SEQ ID NO: 155038 - DNA, 25 bp, SARS Virus
tcgacatggacctcgttgaggaaat

SEQ ID NO: 155039 - DNA, 25 bp, SARS Virus
cgacatggaccatgttgaggaaata

SEQ ID NO: 155040 - DNA, 25 bp, SARS Virus
gacatggaccactttgaggaaatag

SEQ ID NO: 155041 - DNA, 25 bp, SARS Virus
acatggaccacgttgaggaaatagt

SEQ ID NO: 155042 - DNA, 25 bp, SARS Virus
catggaccacgttgaggaaatagtc

SEQ ID NO: 155043 - DNA, 25 bp, SARS Virus
atggaccacgtttaggaaatagtct

SEQ ID NO: 155044 - DNA, 25 bp, SARS Virus
tggaccacgttgtggaaatagtctc

SEQ ID NO: 155045 - DNA, 25 bp, SARS Virus
ggaccacgttgatgaaatagtctcg

SEQ ID NO: 155046 - DNA, 25 bp, SARS Virus
gaccacgttgagtaaatagtctcgg

SEQ ID NO: 155047 - DNA, 25 bp, SARS Virus
accacgttgaggtaatagtctcggt

SEQ ID NO: 155048 - DNA, 25 bp, SARS Virus
ccacgttgaggatatagtctcggtc

SEQ ID NO: 155049 - DNA, 25 bp, SARS Virus
cacgttgaggaattagtctcggtcg

SEQ ID NO: 155050 - DNA, 25 bp, SARS Virus
acgttgaggaaatagtctcggtcgt

SEQ ID NO: 155051 - DNA, 25 bp, SARS Virus
cgttgaggaaattgtctcggtcgtg

SEQ ID NO: 155052 - DNA, 25 bp, SARS Virus
gttgaggaaatattctcggtcgtgg

SEQ ID NO: 155053 - DNA, 25 bp, SARS Virus
ttgaggaaatagtctcggtcgtggt

SEQ ID NO: 155054 - DNA, 25 bp, SARS Virus
tgaggaaatagtttcggtcgtggtt

SEQ ID NO: 155055 - DNA, 25 bp, SARS Virus
gaggaaatagtctcggtcgtggttt

SEQ ID NO: 155056 - DNA, 25 bp, SARS Virus
aggaaatagtcttggtcgtggtttc

SEQ ID NO: 155057 - DNA, 25 bp, SARS Virus
ggaaatagtctctgtcgtggtttca

SEQ ID NO: 155058 - DNA, 25 bp, SARS Virus
gaaatagtctcgttcgtggtttcac

SEQ ID NO: 155059 - DNA, 25 bp, SARS Virus
aaatagtctcggtcgtggtttcact

SEQ ID NO: 155060 - DNA, 25 bp, SARS Virus
aatagtctcggttgtggtttcactt

SEQ ID NO: 155061 - DNA, 25 bp, SARS Virus
atagtctcggtcttggtttcactta

SEQ ID NO: 155062 - DNA, 25 bp, SARS Virus
tagtctcggtcgtggtttcacttat

SEQ ID NO: 155063 - DNA, 25 bp, SARS Virus
agtctcggtcgttgtttcacttatt

SEQ ID NO: 155064 - DNA, 25 bp, SARS Virus
gtctcggtcgtgttttcacttattg

SEQ ID NO: 155065 - DNA, 25 bp, SARS Virus
tctcggtcgtggtttcacttattga

SEQ ID NO: 155066 - DNA, 25 bp, SARS Virus
ctcggtcgtggtttcacttattgag

SEQ ID NO: 155067 - DNA, 25 bp, SARS Virus
tcggtcgtggtttcacttattgaga

SEQ ID NO: 155068 - DNA, 25 bp, SARS Virus
cggtcgtggttttacttattgagag

SEQ ID NO: 155069 - DNA, 25 bp, SARS Virus
ggtcgtggtttctcttattgagagt

SEQ ID NO: 155070 - DNA, 25 bp, SARS Virus
gtcgtggtttcatttattgagagta

SEQ ID NO: 155071 - DNA, 25 bp, SARS Virus
tcgtggtttcacttattgagagtac

SEQ ID NO: 155072 - DNA, 25 bp, SARS Virus
cgtggtttcacttattgagagtaca

SEQ ID NO: 155073 - DNA, 25 bp, SARS Virus
gtggtttcactttttgagagtacaa

SEQ ID NO: 155074 - DNA, 25 bp, SARS Virus
tggtttcacttattgagagtacaac

SEQ ID NO: 155075 - DNA, 25 bp, SARS Virus
ggtttcacttattgagagtacaaca

SEQ ID NO: 155076 - DNA, 25 bp, SARS Virus
gtttcacttatttagagtacaacat

SEQ ID NO: 155077 - DNA, 25 bp, SARS Virus
tttcacttattgtgagtacaacatc

SEQ ID NO: 155078 - DNA, 25 bp, SARS Virus
ttcacttattgatagtacaacatcc

SEQ ID NO: 155079 - DNA, 25 bp, SARS Virus
tcacttattgagtgtacaacatccc

SEQ ID NO: 155080 - DNA, 25 bp, SARS Virus
cacttattgagattacaacatccca

SEQ ID NO: 155081 - DNA, 25 bp, SARS Virus
acttattgagagtacaacatcccat

SEQ ID NO: 155082 - DNA, 25 bp, SARS Virus
cttattgagagttcaacatcccatg

SEQ ID NO: 155083 - DNA, 25 bp, SARS Virus
ttattgagagtataacatcccatgt

SEQ ID NO: 155084 - DNA, 25 bp, SARS Virus
tattgagagtactacatcccatgtc

SEQ ID NO: 155085 - DNA, 25 bp, SARS Virus
attgagagtacatcatcccatgtcg

SEQ ID NO: 155086 - DNA, 25 bp, SARS Virus
ttgagagtacaatatcccatgtcga

SEQ ID NO: 155087 - DNA, 25 bp, SARS Virus
tgagagtacaacttcccatgtcgat

SEQ ID NO: 155088 - DNA, 25 bp, SARS Virus
gagagtacaacatcccatgtcgatt

SEQ ID NO: 155089 - DNA, 25 bp, SARS Virus
agagtacaacattccatgtcgattt

SEQ ID NO: 155090 - DNA, 25 bp, SARS Virus
gagtacaacatctcatgtcgatttc

SEQ ID NO: 155091 - DNA, 25 bp, SARS Virus
agtacaacatcctatgtcgatttca

SEQ ID NO: 155092 - DNA, 25 bp, SARS Virus
gtacaacatcccttgtcgatttcat

SEQ ID NO: 155093 - DNA, 25 bp, SARS Virus
tacaacatcccatgtcgatttcatt

SEQ ID NO: 155094 - DNA, 25 bp, SARS Virus
acaacatcccatttcgatttcattc

SEQ ID NO: 155095 - DNA, 25 bp, SARS Virus
caacatcccatgtcgatttcattca

SEQ ID NO: 155096 - DNA, 25 bp, SARS Virus
aacatcccatgttgatttcattcac

SEQ ID NO: 155097 - DNA, 25 bp, SARS Virus
acatcccatgtctatttcattcaca

SEQ ID NO: 155098 - DNA, 25 bp, SARS Virus
catcccatgtcgttttcattcacat

SEQ ID NO: 155099 - DNA, 25 bp, SARS Virus
atcccatgtcgatttcattcacata

SEQ ID NO: 155100 - DNA, 25 bp, SARS Virus
tcccatgtcgatttcattcacataa

SEQ ID NO: 155101 - DNA, 25 bp, SARS Virus
cccatgtcgatttcattcacataaa

SEQ ID NO: 155102 - DNA, 25 bp, SARS Virus
ccatgtcgattttattcacataaat

SEQ ID NO: 155103 - DNA, 25 bp, SARS Virus
catgtcgatttctttcacataaatt

SEQ ID NO: 155104 - DNA, 25 bp, SARS Virus
atgtcgatttcattcacataaattc

SEQ ID NO: 155105 - DNA, 25 bp, SARS Virus
tgtcgatttcattcacataaattca

SEQ ID NO: 155106 - DNA, 25 bp, SARS Virus
gtcgatttcatttacataaattcat

SEQ ID NO: 155107 - DNA, 25 bp, SARS Virus
tcgatttcattctcataaattcata

SEQ ID NO: 155108 - DNA, 25 bp, SARS Virus
cgatttcattcatataaattcataa

SEQ ID NO: 155109 - DNA, 25 bp, SARS Virus
gatttcattcacttaaattcataac

SEQ ID NO: 155110 - DNA, 25 bp, SARS Virus
atttcattcacataaattcataact

SEQ ID NO: 155111 - DNA, 25 bp, SARS Virus
tttcattcacattaattcataactg

SEQ ID NO: 155112 - DNA, 25 bp, SARS Virus
ttcattcacatatattcataactgt

SEQ ID NO: 155113 - DNA, 25 bp, SARS Virus
tcattcacataatttcataactgtg

SEQ ID NO: 155114 - DNA, 25 bp, SARS Virus
cattcacataaattcataactgtgt

SEQ ID NO: 155115 - DNA, 25 bp, SARS Virus
attcacataaattcataactgtgtc

SEQ ID NO: 155116 - DNA, 25 bp, SARS Virus
ttcacataaatttataactgtgtca

SEQ ID NO: 155117 - DNA, 25 bp, SARS Virus
tcacataaattcttaactgtgtcaa

SEQ ID NO: 155118 - DNA, 25 bp, SARS Virus
cacataaattcataactgtgtcaac

SEQ ID NO: 155119 - DNA, 25 bp, SARS Virus
acataaattcattactgtgtcaact

SEQ ID NO: 155120 - DNA, 25 bp, SARS Virus
cataaattcatatctgtgtcaactc

SEQ ID NO: 155121 - DNA, 25 bp, SARS Virus
ataaattcataattgtgtcaactca

SEQ ID NO: 155122 - DNA, 25 bp, SARS Virus
taaattcataactgtgtcaactcat

SEQ ID NO: 155123 - DNA, 25 bp, SARS Virus
aaattcataactttgtcaactcata

SEQ ID NO: 155124 - DNA, 25 bp, SARS Virus
aattcataactgtgtcaactcatat

SEQ ID NO: 155125 - DNA, 25 bp, SARS Virus
attcataactgtttcaactcatatg

SEQ ID NO: 155126 - DNA, 25 bp, SARS Virus
ttcataactgtgtcaactcatatga

SEQ ID NO: 155127 - DNA, 25 bp, SARS Virus
tcataactgtgttaactcatatgaa

SEQ ID NO: 155128 - DNA, 25 bp, SARS Virus
cataactgtgtctactcatatgaaa

SEQ ID NO: 155129 - DNA, 25 bp, SARS Virus
ataactgtgtcatctcatatgaaac

SEQ ID NO: 155130 - DNA, 25 bp, SARS Virus
taactgtgtcaattcatatgaaacg

SEQ ID NO: 155131 - DNA, 25 bp, SARS Virus
aactgtgtcaactcatatgaaacgc

SEQ ID NO: 155132 - DNA, 25 bp, SARS Virus
actgtgtcaacttatatgaaacgct

SEQ ID NO: 155133 - DNA, 25 bp, SARS Virus
ctgtgtcaactcttatgaaacgctg

SEQ ID NO: 155134 - DNA, 25 bp, SARS Virus
tgtgtcaactcatatgaaacgctgt

SEQ ID NO: 155135 - DNA, 25 bp, SARS Virus
gtgtcaactcatttgaaacgctgta

SEQ ID NO: 155136 - DNA, 25 bp, SARS Virus
tgtcaactcatatgaaacgctgtaa

SEQ ID NO: 155137 - DNA, 25 bp, SARS Virus
gtcaactcatattaaacgctgtaag

SEQ ID NO: 155138 - DNA, 25 bp, SARS Virus
tcaactcatatgtaacgctgtaagt

SEQ ID NO: 155139 - DNA, 25 bp, SARS Virus
caactcatatgatacgctgtaagta

SEQ ID NO: 155140 - DNA, 25 bp, SARS Virus
aactcatatgaatcgctgtaagtag

SEQ ID NO: 155141 - DNA, 25 bp, SARS Virus
actcatatgaaatgctgtaagtagt

SEQ ID NO: 155142 - DNA, 25 bp, SARS Virus
ctcatatgaaactctgtaagtagta

SEQ ID NO: 155143 - DNA, 25 bp, SARS Virus
tcatatgaaacgttgtaagtagtaa

SEQ ID NO: 155144 - DNA, 25 bp, SARS Virus
catatgaaacgctgtaagtagtaat

SEQ ID NO: 155145 - DNA, 25 bp, SARS Virus
atatgaaacgctttaagtagtaata

SEQ ID NO: 155146 - DNA, 25 bp, SARS Virus
tatgaaacgctgtaagtagtaataa

SEQ ID NO: 155147 - DNA, 25 bp, SARS Virus
atgaaacgctgttagtagtaataag

SEQ ID NO: 155148 - DNA, 25 bp, SARS Virus
tgaaacgctgtatgtagtaataagg

SEQ ID NO: 155149 - DNA, 25 bp, SARS Virus
gaaacgctgtaattagtaataagga

SEQ ID NO: 155150 - DNA, 25 bp, SARS Virus
aaacgctgtaagtagtaataaggaa

SEQ ID NO: 155151 - DNA, 25 bp, SARS Virus
aacgctgtaagttgtaataaggaaa

SEQ ID NO: 155152 - DNA, 25 bp, SARS Virus
acgctgtaagtattaataaggaaaa

SEQ ID NO: 155153 - DNA, 25 bp, SARS Virus
cgctgtaagtagtaataaggaaaac

SEQ ID NO: 155154 - DNA, 25 bp, SARS Virus
gctgtaagtagttataaggaaaacc

SEQ ID NO: 155155 - DNA, 25 bp, SARS Virus
ctgtaagtagtattaaggaaaacca

SEQ ID NO: 155156 - DNA, 25 bp, SARS Virus
tgtaagtagtaataaggaaaaccat

SEQ ID NO: 155157 - DNA, 25 bp, SARS Virus
gtaagtagtaattaggaaaaccata

SEQ ID NO: 155158 - DNA, 25 bp, SARS Virus
taagtagtaatatggaaaaccatat

SEQ ID NO: 155159 - DNA, 25 bp, SARS Virus
aagtagtaataatgaaaaccatatt

SEQ ID NO: 155160 - DNA, 25 bp, SARS Virus
agtagtaataagtaaaaccatattg

SEQ ID NO: 155161 - DNA, 25 bp, SARS Virus
gtagtaataaggtaaaccatattgt

SEQ ID NO: 155162 - DNA, 25 bp, SARS Virus
tagtaataaggataaccatattgtc

SEQ ID NO: 155163 - DNA, 25 bp, SARS Virus
agtaataaggaataccatattgtcg

SEQ ID NO: 155164 - DNA, 25 bp, SARS Virus
gtaataaggaaatccatattgtcgt

SEQ ID NO: 155165 - DNA, 25 bp, SARS Virus
taataaggaaaatcatattgtcgta

SEQ ID NO: 155166 - DNA, 25 bp, SARS Virus
aataaggaaaactatattgtcgtaa

SEQ ID NO: 155167 - DNA, 25 bp, SARS Virus
ataaggaaaaccttattgtcgtaaa

SEQ ID NO: 155168 - DNA, 25 bp, SARS Virus
taaggaaaaccatattgtcgtaaaa

SEQ ID NO: 155169 - DNA, 25 bp, SARS Virus
aaggaaaaccattttgtcgtaaaag

SEQ ID NO: 155170 - DNA, 25 bp, SARS Virus
aggaaaaccatattgtcgtaaaagt

SEQ ID NO: 155171 - DNA, 25 bp, SARS Virus
ggaaaaccatattgtcgtaaaagtg

SEQ ID NO: 155172 - DNA, 25 bp, SARS Virus
gaaaaccatattttcgtaaaagtgg

SEQ ID NO: 155173 - DNA, 25 bp, SARS Virus
aaaaccatattgtcgtaaaagtggt

SEQ ID NO: 155174 - DNA, 25 bp, SARS Virus
aaaccatattgttgtaaaagtggta

SEQ ID NO: 155175 - DNA, 25 bp, SARS Virus
aaccatattgtcttaaaagtggtat

SEQ ID NO: 155176 - DNA, 25 bp, SARS Virus
accatattgtcgtaaaagtggtatt

SEQ ID NO: 155177 - DNA, 25 bp, SARS Virus
ccatattgtcgttaaagtggtatta

SEQ ID NO: 155178 - DNA, 25 bp, SARS Virus
catattgtcgtataagtggtattaa

SEQ ID NO: 155179 - DNA, 25 bp, SARS Virus
atattgtcgtaatagtggtattaag

SEQ ID NO: 155180 - DNA, 25 bp, SARS Virus
tattgtcgtaaatgtggtattaaga

SEQ ID NO: 155181 - DNA, 25 bp, SARS Virus
attgtcgtaaaattggtattaagac

SEQ ID NO: 155182 - DNA, 25 bp, SARS Virus
ttgtcgtaaaagtggtattaagact

SEQ ID NO: 155183 - DNA, 25 bp, SARS Virus
tgtcgtaaaagttgtattaagactt

SEQ ID NO: 155184 - DNA, 25 bp, SARS Virus
gtcgtaaaagtgttattaagacttc

SEQ ID NO: 155185 - DNA, 25 bp, SARS Virus
tcgtaaaagtggtattaagacttcc

SEQ ID NO: 155186 - DNA, 25 bp, SARS Virus
cgtaaaagtggttttaagacttcca

SEQ ID NO: 155187 - DNA, 25 bp, SARS Virus
gtaaaagtggtattaagacttccag

SEQ ID NO: 155188 - DNA, 25 bp, SARS Virus
taaaagtggtattaagacttccagt

SEQ ID NO: 155189 - DNA, 25 bp, SARS Virus
aaaagtggtatttagacttccagtg

SEQ ID NO: 155190 - DNA, 25 bp, SARS Virus
aaagtggtattatgacttccagtgt

SEQ ID NO: 155191 - DNA, 25 bp, SARS Virus
aagtggtattaatacttccagtgtg

SEQ ID NO: 155192 - DNA, 25 bp, SARS Virus
agtggtattaagtcttccagtgtga

SEQ ID NO: 155193 - DNA, 25 bp, SARS Virus
gtggtattaagatttccagtgtgaa

SEQ ID NO: 155194 - DNA, 25 bp, SARS Virus
tggtattaagacttccagtgtgaaa

SEQ ID NO: 155195 - DNA, 25 bp, SARS Virus
ggtattaagacttccagtgtgaaaa

SEQ ID NO: 155196 - DNA, 25 bp, SARS Virus
gtattaagactttcagtgtgaaaag

SEQ ID NO: 155197 - DNA, 25 bp, SARS Virus
tattaagacttctagtgtgaaaagt

SEQ ID NO: 155198 - DNA, 25 bp, SARS Virus
attaagacttcctgtgtgaaaagtt

SEQ ID NO: 155199 - DNA, 25 bp, SARS Virus
ttaagacttccattgtgaaaagttc

SEQ ID NO: 155200 - DNA, 25 bp, SARS Virus
taagacttccagtgtgaaaagttct

SEQ ID NO: 155201 - DNA, 25 bp, SARS Virus
aagacttccagtttgaaaagttctt

SEQ ID NO: 155202 - DNA, 25 bp, SARS Virus
agacttccagtgtgaaaagttcttc

SEQ ID NO: 155203 - DNA, 25 bp, SARS Virus
gacttccagtgttaaaagttcttcg

SEQ ID NO: 155204 - DNA, 25 bp, SARS Virus
acttccagtgtgtaaagttcttcgt

SEQ ID NO: 155205 - DNA, 25 bp, SARS Virus
cttccagtgtgataagttcttcgta

SEQ ID NO: 155206 - DNA, 25 bp, SARS Virus
ttccagtgtgaatagttcttcgtaa

SEQ ID NO: 155207 - DNA, 25 bp, SARS Virus
tccagtgtgaaatgttcttcgtaag

SEQ ID NO: 155208 - DNA, 25 bp, SARS Virus
ccagtgtgaaaatttcttcgtaaga

SEQ ID NO: 155209 - DNA, 25 bp, SARS Virus
cagtgtgaaaagttcttcgtaagaa

SEQ ID NO: 155210 - DNA, 25 bp, SARS Virus
agtgtgaaaagttcttcgtaagaaa

SEQ ID NO: 155211 - DNA, 25 bp, SARS Virus
gtgtgaaaagtttttcgtaagaaac

SEQ ID NO: 155212 - DNA, 25 bp, SARS Virus
tgtgaaaagttcttcgtaagaaacg

SEQ ID NO: 155213 - DNA, 25 bp, SARS Virus
gtgaaaagttcttcgtaagaaacgt

SEQ ID NO: 155214 - DNA, 25 bp, SARS Virus
tgaaaagttctttgtaagaaacgta

SEQ ID NO: 155215 - DNA, 25 bp, SARS Virus
gaaaagttcttcttaagaaacgtag

SEQ ID NO: 155216 - DNA, 25 bp, SARS Virus
aaaagttcttcgtaagaaacgtaga

SEQ ID NO: 155217 - DNA, 25 bp, SARS Virus
aaagttcttcgtaagaaacgtagaa

SEQ ID NO: 155218 - DNA, 25 bp, SARS Virus
aagttcttcgtaagaaacgtagaac

SEQ ID NO: 155219 - DNA, 25 bp, SARS Virus
agttcttcgtaaaaaacgtagaaca

SEQ ID NO: 155220 - DNA, 25 bp, SARS Virus
gttcttcgtaagaaacgtagaacat

SEQ ID NO: 155221 - DNA, 25 bp, SARS Virus
ttcttcgtaagaaacgtagaacatg

SEQ ID NO: 155222 - DNA, 25 bp, SARS Virus
tcttcgtaagaaacgtagaacatgt

SEQ ID NO: 155223 - DNA, 25 bp, SARS Virus
cttcgtaagaaaagtagaacatgtt

SEQ ID NO: 155224 - DNA, 25 bp, SARS Virus
ttcgtaagaaacatagaacatgttc

SEQ ID NO: 155225 - DNA, 25 bp, SARS Virus
tcgtaagaaacgaagaacatgttca

SEQ ID NO: 155226 - DNA, 25 bp, SARS Virus
cgtaagaaacgtagaacatgttcaa

SEQ ID NO: 155227 - DNA, 25 bp, SARS Virus
gtaagaaacgtaaaacatgttcaat

SEQ ID NO: 155228 - DNA, 25 bp, SARS Virus
taagaaacgtagaacatgttcaatc

SEQ ID NO: 155229 - DNA, 25 bp, SARS Virus
aagaaacgtagaacatgttcaatcc

SEQ ID NO: 155230 - DNA, 25 bp, SARS Virus
agaaacgtagaaaatgttcaatccg

SEQ ID NO: 155231 - DNA, 25 bp, SARS Virus
gaaacgtagaacatgttcaatccgt

SEQ ID NO: 155232 - DNA, 25 bp, SARS Virus
aaacgtagaacaagttcaatccgta

SEQ ID NO: 155233 - DNA, 25 bp, SARS Virus
aacgtagaacatattcaatccgtag

SEQ ID NO: 155234 - DNA, 25 bp, SARS Virus
acgtagaacatgatcaatccgtagc

SEQ ID NO: 155235 - DNA, 25 bp, SARS Virus
cgtagaacatgtacaatccgtagcg

SEQ ID NO: 155236 - DNA, 25 bp, SARS Virus
gtagaacatgttaaatccgtagcgt

SEQ ID NO: 155237 - DNA, 25 bp, SARS Virus
tagaacatgttcaatccgtagcgtt

SEQ ID NO: 155238 - DNA, 25 bp, SARS Virus
agaacatgttcaatccgtagcgttg

SEQ ID NO: 155239 - DNA, 25 bp, SARS Virus
gaacatgttcaaaccgtagcgttgt

SEQ ID NO: 155240 - DNA, 25 bp, SARS Virus
aacatgttcaatacgtagcgttgtg

SEQ ID NO: 155241 - DNA, 25 bp, SARS Virus
acatgttcaatcagtagcgttgtgg

SEQ ID NO: 155242 - DNA, 25 bp, SARS Virus
catgttcaatccatagcgttgtgga

SEQ ID NO: 155243 - DNA, 25 bp, SARS Virus
atgttcaatccgaagcgttgtggac

SEQ ID NO: 155244 - DNA, 25 bp, SARS Virus
tgttcaatccgtagcgttgtggacc

SEQ ID NO: 155245 - DNA, 25 bp, SARS Virus
gttcaatccgtaacgttgtggacca

SEQ ID NO: 155246 - DNA, 25 bp, SARS Virus
ttcaatccgtagagttgtggaccaa

SEQ ID NO: 155247 - DNA, 25 bp, SARS Virus
tcaatccgtagcattgtggaccaac

SEQ ID NO: 155248 - DNA, 25 bp, SARS Virus
caatccgtagcgatgtggaccaacg

SEQ ID NO: 155249 - DNA, 25 bp, SARS Virus
aatccgtagcgtagtggaccaacgg

SEQ ID NO: 155250 - DNA, 25 bp, SARS Virus
atccgtagcgttatggaccaacggt

SEQ ID NO: 155251 - DNA, 25 bp, SARS Virus
tccgtagcgttgaggaccaacggtg

SEQ ID NO: 155252 - DNA, 25 bp, SARS Virus
ccgtagcgttgtagaccaacggtgc

SEQ ID NO: 155253 - DNA, 25 bp, SARS Virus
cgtagcgttgtgaaccaacggtgcg

SEQ ID NO: 155254 - DNA, 25 bp, SARS Virus
gtagcgttgtggaccaacggtgcga

SEQ ID NO: 155255 - DNA, 25 bp, SARS Virus
tagcgttgtggaacaacggtgcgaa

SEQ ID NO: 155256 - DNA, 25 bp, SARS Virus
agcgttgtggacaaacggtgcgaac

SEQ ID NO: 155257 - DNA, 25 bp, SARS Virus
gcgttgtggaccaacggtgcgaact

SEQ ID NO: 155258 - DNA, 25 bp, SARS Virus
cgttgtggaccaacggtgcgaactg

SEQ ID NO: 155259 - DNA, 25 bp, SARS Virus
gttgtggaccaaaggtgcgaactga

SEQ ID NO: 155260 - DNA, 25 bp, SARS Virus
ttgtggaccaacagtgcgaactgaa

SEQ ID NO: 155261 - DNA, 25 bp, SARS Virus
tgtggaccaacgatgcgaactgaac

SEQ ID NO: 155262 - DNA, 25 bp, SARS Virus
gtggaccaacggagcgaactgaacg

SEQ ID NO: 155263 - DNA, 25 bp, SARS Virus
tggaccaacggtacgaactgaacga

SEQ ID NO: 155264 - DNA, 25 bp, SARS Virus
ggaccaacggtgagaactgaacgaa

SEQ ID NO: 155265 - DNA, 25 bp, SARS Virus
gaccaacggtgcaaactgaacgaac

SEQ ID NO: 155266 - DNA, 25 bp, SARS Virus
accaacggtgcgaactgaacgaaca

SEQ ID NO: 155267 - DNA, 25 bp, SARS Virus
ccaacggtgcgaactgaacgaacat

SEQ ID NO: 155268 - DNA, 25 bp, SARS Virus
caacggtgcgaaatgaacgaacatc

SEQ ID NO: 155269 - DNA, 25 bp, SARS Virus
aacggtgcgaacagaacgaacatca

SEQ ID NO: 155270 - DNA, 25 bp, SARS Virus
acggtgcgaactaaacgaacatcaa

SEQ ID NO: 155271 - DNA, 25 bp, SARS Virus
cggtgcgaactgaacgaacatcaaa

SEQ ID NO: 155272 - DNA, 25 bp, SARS Virus
ggtgcgaactgaacgaacatcaaaa

SEQ ID NO: 155273 - DNA, 25 bp, SARS Virus
gtgcgaactgaaagaacatcaaaac

SEQ ID NO: 155274 - DNA, 25 bp, SARS Virus
tgcgaactgaacaaacatcaaaacc

SEQ ID NO: 155275 - DNA, 25 bp, SARS Virus
gcgaactgaacgaacatcaaaaccc

SEQ ID NO: 155276 - DNA, 25 bp, SARS Virus
cgaactgaacgaacatcaaaaccca

SEQ ID NO: 155277 - DNA, 25 bp, SARS Virus
gaactgaacgaaaatcaaaacccat

SEQ ID NO: 155278 - DNA, 25 bp, SARS Virus
aactgaacgaacatcaaaacccatc

SEQ ID NO: 155279 - DNA, 25 bp, SARS Virus
actgaacgaacaacaaaacccatct

SEQ ID NO: 155280 - DNA, 25 bp, SARS Virus
ctgaacgaacataaaaacccatctt

SEQ ID NO: 155281 - DNA, 25 bp, SARS Virus
tgaacgaacatcaaaacccatcttc

SEQ ID NO: 155282 - DNA, 25 bp, SARS Virus
gaacgaacatcaaaacccatcttcc

SEQ ID NO: 155283 - DNA, 25 bp, SARS Virus
aacgaacatcaaaacccatcttcca

SEQ ID NO: 155284 - DNA, 25 bp, SARS Virus
acgaacatcaaaacccatcttccaa

SEQ ID NO: 155285 - DNA, 25 bp, SARS Virus
cgaacatcaaaaaccatcttccaaa

SEQ ID NO: 155286 - DNA, 25 bp, SARS Virus
gaacatcaaaacacatcttccaaag

SEQ ID NO: 155287 - DNA, 25 bp, SARS Virus
aacatcaaaaccaatcttccaaagt

SEQ ID NO: 155288 - DNA, 25 bp, SARS Virus
acatcaaaacccatcttccaaagtt

SEQ ID NO: 155289 - DNA, 25 bp, SARS Virus
catcaaaacccaacttccaaagttg

SEQ ID NO: 155290 - DNA, 25 bp, SARS Virus
atcaaaacccatattccaaagttgt

SEQ ID NO: 155291 - DNA, 25 bp, SARS Virus
tcaaaacccatcatccaaagttgta

SEQ ID NO: 155292 - DNA, 25 bp, SARS Virus
caaaacccatctaccaaagttgtac

SEQ ID NO: 155293 - DNA, 25 bp, SARS Virus
aaaacccatcttacaaagttgtaca

SEQ ID NO: 155294 - DNA, 25 bp, SARS Virus
aaacccatcttcaaaagttgtacag

SEQ ID NO: 155295 - DNA, 25 bp, SARS Virus
aacccatcttccaaagttgtacagg

SEQ ID NO: 155296 - DNA, 25 bp, SARS Virus
acccatcttccaaagttgtacaggt

SEQ ID NO: 155297 - DNA, 25 bp, SARS Virus
cccatcttccaaagttgtacaggta

SEQ ID NO: 155298 - DNA, 25 bp, SARS Virus
ccatcttccaaaattgtacaggtag

SEQ ID NO: 155299 - DNA, 25 bp, SARS Virus
catcttccaaagatgtacaggtagg

SEQ ID NO: 155300 - DNA, 25 bp, SARS Virus
atcttccaaagtagtacaggtagga

SEQ ID NO: 155301 - DNA, 25 bp, SARS Virus
tcttccaaagttatacaggtaggaa

SEQ ID NO: 155302 - DNA, 25 bp, SARS Virus
cttccaaagttgaacaggtaggaat

SEQ ID NO: 155303 - DNA, 25 bp, SARS Virus
ttccaaagttgtacaggtaggaatg

SEQ ID NO: 155304 - DNA, 25 bp, SARS Virus
tccaaagttgtaaaggtaggaatgt

SEQ ID NO: 155305 - DNA, 25 bp, SARS Virus
ccaaagttgtacaggtaggaatgtg

SEQ ID NO: 155306 - DNA, 25 bp, SARS Virus
caaagttgtacaagtaggaatgtgg

SEQ ID NO: 155307 - DNA, 25 bp, SARS Virus
aaagttgtacagataggaatgtggt

SEQ ID NO: 155308 - DNA, 25 bp, SARS Virus
aagttgtacaggaaggaatgtggtt

SEQ ID NO: 155309 - DNA, 25 bp, SARS Virus
agttgtacaggtaggaatgtggttt

SEQ ID NO: 155310 - DNA, 25 bp, SARS Virus
gttgtacaggtaagaatgtggtttc

SEQ ID NO: 155311 - DNA, 25 bp, SARS Virus
ttgtacaggtagaaatgtggtttcg

SEQ ID NO: 155312 - DNA, 25 bp, SARS Virus
tgtacaggtaggaatgtggtttcgt

SEQ ID NO: 155313 - DNA, 25 bp, SARS Virus
gtacaggtaggaatgtggtttcgta

SEQ ID NO: 155314 - DNA, 25 bp, SARS Virus
tacaggtaggaaagtggtttcgtac

SEQ ID NO: 155315 - DNA, 25 bp, SARS Virus
acaggtaggaatatggtttcgtact

SEQ ID NO: 155316 - DNA, 25 bp, SARS Virus
caggtaggaatgaggtttcgtactt

SEQ ID NO: 155317 - DNA, 25 bp, SARS Virus
aggtaggaatgtagtttcgtactta

SEQ ID NO: 155318 - DNA, 25 bp, SARS Virus
ggtaggaatgtgatttcgtacttac

SEQ ID NO: 155319 - DNA, 25 bp, SARS Virus
gtaggaatgtggattcgtacttact

SEQ ID NO: 155320 - DNA, 25 bp, SARS Virus
taggaatgtggtatcgtacttactt

SEQ ID NO: 155321 - DNA, 25 bp, SARS Virus
aggaatgtggttacgtacttacttt

SEQ ID NO: 155322 - DNA, 25 bp, SARS Virus
ggaatgtggtttagtacttacttta

SEQ ID NO: 155323 - DNA, 25 bp, SARS Virus
gaatgtggtttcatacttactttaa

SEQ ID NO: 155324 - DNA, 25 bp, SARS Virus
aatgtggtttcgaacttactttaaa

SEQ ID NO: 155325 - DNA, 25 bp, SARS Virus
atgtggtttcgtacttactttaaag

SEQ ID NO: 155326 - DNA, 25 bp, SARS Virus
tgtggtttcgtaattactttaaagt

SEQ ID NO: 155327 - DNA, 25 bp, SARS Virus
gtggtttcgtacatactttaaagtc

SEQ ID NO: 155328 - DNA, 25 bp, SARS Virus
tggtttcgtactaactttaaagtcg

SEQ ID NO: 155329 - DNA, 25 bp, SARS Virus
ggtttcgtacttactttaaagtcgt

SEQ ID NO: 155330 - DNA, 25 bp, SARS Virus
gtttcgtacttaatttaaagtcgta

SEQ ID NO: 155331 - DNA, 25 bp, SARS Virus
tttcgtacttacattaaagtcgtat

SEQ ID NO: 155332 - DNA, 25 bp, SARS Virus
ttcgtacttactataaagtcgtatc

SEQ ID NO: 155333 - DNA, 25 bp, SARS Virus
tcgtacttacttaaaagtcgtatca

SEQ ID NO: 155334 - DNA, 25 bp, SARS Virus
cgtacttactttaaagtcgtatcag

SEQ ID NO: 155335 - DNA, 25 bp, SARS Virus
gtacttactttaaagtcgtatcagt

SEQ ID NO: 155336 - DNA, 25 bp, SARS Virus
tacttactttaaagtcgtatcagtt

SEQ ID NO: 155337 - DNA, 25 bp, SARS Virus
acttactttaaaatcgtatcagtta

SEQ ID NO: 155338 - DNA, 25 bp, SARS Virus
cttactttaaagacgtatcagttaa

SEQ ID NO: 155339 - DNA, 25 bp, SARS Virus
ttactttaaagtagtatcagttaac

SEQ ID NO: 155340 - DNA, 25 bp, SARS Virus
tactttaaagtcatatcagttaaca

SEQ ID NO: 155341 - DNA, 25 bp, SARS Virus
actttaaagtcgaatcagttaacat

SEQ ID NO: 155342 - DNA, 25 bp, SARS Virus
ctttaaagtcgtatcagttaacatt

SEQ ID NO: 155343 - DNA, 25 bp, SARS Virus
tttaaagtcgtaacagttaacattg

SEQ ID NO: 155344 - DNA, 25 bp, SARS Virus
ttaaagtcgtataagttaacattgg

SEQ ID NO: 155345 - DNA, 25 bp, SARS Virus
taaagtcgtatcagttaacattgga

SEQ ID NO: 155346 - DNA, 25 bp, SARS Virus
aaagtcgtatcaattaacattggaa

SEQ ID NO: 155347 - DNA, 25 bp, SARS Virus
aagtcgtatcagataacattggaac

SEQ ID NO: 155348 - DNA, 25 bp, SARS Virus
agtcgtatcagtaaacattggaact

SEQ ID NO: 155349 - DNA, 25 bp, SARS Virus
gtcgtatcagttaacattggaactg

SEQ ID NO: 155350 - DNA, 25 bp, SARS Virus
tcgtatcagttaacattggaactgg

SEQ ID NO: 155351 - DNA, 25 bp, SARS Virus
cgtatcagttaaaattggaactggt

SEQ ID NO: 155352 - DNA, 25 bp, SARS Virus
gtatcagttaacattggaactggtg

SEQ ID NO: 155353 - DNA, 25 bp, SARS Virus
tatcagttaacaatggaactggtga

SEQ ID NO: 155354 - DNA, 25 bp, SARS Virus
atcagttaacataggaactggtgaa

SEQ ID NO: 155355 - DNA, 25 bp, SARS Virus
tcagttaacattagaactggtgaaa

SEQ ID NO: 155356 - DNA, 25 bp, SARS Virus
cagttaacattgaaactggtgaaaa

SEQ ID NO: 155357 - DNA, 25 bp, SARS Virus
agttaacattggaactggtgaaaac

SEQ ID NO: 155358 - DNA, 25 bp, SARS Virus
gttaacattggaactggtgaaaact

SEQ ID NO: 155359 - DNA, 25 bp, SARS Virus
ttaacattggaaatggtgaaaactt

SEQ ID NO: 155360 - DNA, 25 bp, SARS Virus
taacattggaacaggtgaaaacttt

SEQ ID NO: 155361 - DNA, 25 bp, SARS Virus
aacattggaactagtgaaaacttta

SEQ ID NO: 155362 - DNA, 25 bp, SARS Virus
acattggaactgatgaaaactttag

SEQ ID NO: 155363 - DNA, 25 bp, SARS Virus
cattggaactggagaaaactttagt

SEQ ID NO: 155364 - DNA, 25 bp, SARS Virus
attggaactggtaaaaactttagtg

SEQ ID NO: 155365 - DNA, 25 bp, SARS Virus
ttggaactggtgaaaactttagtga

SEQ ID NO: 155366 - DNA, 25 bp, SARS Virus
tggaactggtgaaaactttagtgac

SEQ ID NO: 155367 - DNA, 25 bp, SARS Virus
ggaactggtgaaaactttagtgact

SEQ ID NO: 155368 - DNA, 25 bp, SARS Virus
gaactggtgaaaactttagtgactg

SEQ ID NO: 155369 - DNA, 25 bp, SARS Virus
aactggtgaaaaatttagtgactgt

SEQ ID NO: 155370 - DNA, 25 bp, SARS Virus
actggtgaaaacattagtgactgtt

SEQ ID NO: 155371 - DNA, 25 bp, SARS Virus
ctggtgaaaactatagtgactgttt

SEQ ID NO: 155372 - DNA, 25 bp, SARS Virus
tggtgaaaacttaagtgactgttta

SEQ ID NO: 155373 - DNA, 25 bp, SARS Virus
ggtgaaaactttagtgactgtttag

SEQ ID NO: 155374 - DNA, 25 bp, SARS Virus
gtgaaaactttaatgactgtttaga

SEQ ID NO: 155375 - DNA, 25 bp, SARS Virus
tgaaaactttagagactgtttagaa

SEQ ID NO: 155376 - DNA, 25 bp, SARS Virus
gaaaactttagtaactgtttagaac

SEQ ID NO: 155377 - DNA, 25 bp, SARS Virus
aaaactttagtgactgtttagaaca

SEQ ID NO: 155378 - DNA, 25 bp, SARS Virus
aaactttagtgaatgtttagaacac

SEQ ID NO: 155379 - DNA, 25 bp, SARS Virus
aactttagtgacagtttagaacact

SEQ ID NO: 155380 - DNA, 25 bp, SARS Virus
actttagtgactatttagaacactg

SEQ ID NO: 155381 - DNA, 25 bp, SARS Virus
ctttagtgactgattagaacactga

SEQ ID NO: 155382 - DNA, 25 bp, SARS Virus
tttagtgactgtatagaacactgaa

SEQ ID NO: 155383 - DNA, 25 bp, SARS Virus
ttagtgactgttaagaacactgaaa

SEQ ID NO: 155384 - DNA, 25 bp, SARS Virus
tagtgactgtttagaacactgaaat

SEQ ID NO: 155385 - DNA, 25 bp, SARS Virus
agtgactgtttaaaacactgaaata

SEQ ID NO: 155386 - DNA, 25 bp, SARS Virus
gtgactgtttagaacactgaaataa

SEQ ID NO: 155387 - DNA, 25 bp, SARS Virus
tgactgtttagaacactgaaataat

SEQ ID NO: 155388 - DNA, 25 bp, SARS Virus
gactgtttagaaaactgaaataata

SEQ ID NO: 155389 - DNA, 25 bp, SARS Virus
actgtttagaacactgaaataatag

SEQ ID NO: 155390 - DNA, 25 bp, SARS Virus
ctgtttagaacaatgaaataataga

SEQ ID NO: 155391 - DNA, 25 bp, SARS Virus
tgtttagaacacagaaataatagag

SEQ ID NO: 155392 - DNA, 25 bp, SARS Virus
gtttagaacactaaaataatagagc

SEQ ID NO: 155393 - DNA, 25 bp, SARS Virus
tttagaacactgaaataatagagct

SEQ ID NO: 155394 - DNA, 25 bp, SARS Virus
ttagaacactgaaataatagagctg

SEQ ID NO: 155395 - DNA, 25 bp, SARS Virus
tagaacactgaaataatagagctgt

SEQ ID NO: 155396 - DNA, 25 bp, SARS Virus
agaacactgaaaaaatagagctgtt

SEQ ID NO: 155397 - DNA, 25 bp, SARS Virus
gaacactgaaataatagagctgttt

SEQ ID NO: 155398 - DNA, 25 bp, SARS Virus
aacactgaaataatagagctgtttc

SEQ ID NO: 155399 - DNA, 25 bp, SARS Virus
acactgaaataaaagagctgtttca

SEQ ID NO: 155400 - DNA, 25 bp, SARS Virus
cactgaaataatagagctgtttcag

SEQ ID NO: 155401 - DNA, 25 bp, SARS Virus
actgaaataataaagctgtttcagt

SEQ ID NO: 155402 - DNA, 25 bp, SARS Virus
ctgaaataatagagctgtttcagta

SEQ ID NO: 155403 - DNA, 25 bp, SARS Virus
tgaaataatagaactgtttcagtag

SEQ ID NO: 155404 - DNA, 25 bp, SARS Virus
gaaataatagagatgtttcagtagt

SEQ ID NO: 155405 - DNA, 25 bp, SARS Virus
aaataatagagcagtttcagtagtt

SEQ ID NO: 155406 - DNA, 25 bp, SARS Virus
aataatagagctatttcagtagttc

SEQ ID NO: 155407 - DNA, 25 bp, SARS Virus
ataatagagctgattcagtagttca

SEQ ID NO: 155408 - DNA, 25 bp, SARS Virus
taatagagctgtatcagtagttcat

SEQ ID NO: 155409 - DNA, 25 bp, SARS Virus
aatagagctgttacagtagttcatt

SEQ ID NO: 155410 - DNA, 25 bp, SARS Virus
atagagctgtttaagtagttcattt

SEQ ID NO: 155411 - DNA, 25 bp, SARS Virus
tagagctgtttcagtagttcatttt

SEQ ID NO: 155412 - DNA, 25 bp, SARS Virus
agagctgtttcaatagttcattttc

SEQ ID NO: 155413 - DNA, 25 bp, SARS Virus
gagctgtttcagaagttcattttct

SEQ ID NO: 155414 - DNA, 25 bp, SARS Virus
agctgtttcagtagttcattttcta

SEQ ID NO: 155415 - DNA, 25 bp, SARS Virus
gctgtttcagtaattcattttctag

SEQ ID NO: 155416 - DNA, 25 bp, SARS Virus
ctgtttcagtagatcattttctagt

SEQ ID NO: 155417 - DNA, 25 bp, SARS Virus
tgtttcagtagtacattttctagtt

SEQ ID NO: 155418 - DNA, 25 bp, SARS Virus
gtttcagtagttaattttctagtta

SEQ ID NO: 155419 - DNA, 25 bp, SARS Virus
tttcagtagttcattttctagttag

SEQ ID NO: 155420 - DNA, 25 bp, SARS Virus
ttcagtagttcaatttctagttagt

SEQ ID NO: 155421 - DNA, 25 bp, SARS Virus
tcagtagttcatattctagttagtg

SEQ ID NO: 155422 - DNA, 25 bp, SARS Virus
cagtagttcattatctagttagtgt

SEQ ID NO: 155423 - DNA, 25 bp, SARS Virus
agtagttcatttactagttagtgtc

SEQ ID NO: 155424 - DNA, 25 bp, SARS Virus
gtagttcattttatagttagtgtct

SEQ ID NO: 155425 - DNA, 25 bp, SARS Virus
tagttcattttcaagttagtgtctt

SEQ ID NO: 155426 - DNA, 25 bp, SARS Virus
agttcattttctagttagtgtcttg

SEQ ID NO: 155427 - DNA, 25 bp, SARS Virus
gttcattttctaattagtgtcttgt

SEQ ID NO: 155428 - DNA, 25 bp, SARS Virus
ttcattttctagatagtgtcttgtg

SEQ ID NO: 155429 - DNA, 25 bp, SARS Virus
tcattttctagtaagtgtcttgtgt

SEQ ID NO: 155430 - DNA, 25 bp, SARS Virus
cattttctagttagtgtcttgtgtg

SEQ ID NO: 155431 - DNA, 25 bp, SARS Virus
attttctagttaatgtcttgtgtgt

SEQ ID NO: 155432 - DNA, 25 bp, SARS Virus
ttttctagttagagtcttgtgtgtg

SEQ ID NO: 155433 - DNA, 25 bp, SARS Virus
tttctagttagtatcttgtgtgtgt

SEQ ID NO: 155434 - DNA, 25 bp, SARS Virus
ttctagttagtgacttgtgtgtgta

SEQ ID NO: 155435 - DNA, 25 bp, SARS Virus
tctagttagtgtattgtgtgtgtaa

SEQ ID NO: 155436 - DNA, 25 bp, SARS Virus
ctagttagtgtcatgtgtgtgtaaa

SEQ ID NO: 155437 - DNA, 25 bp, SARS Virus
tagttagtgtctagtgtgtgtaaaa

SEQ ID NO: 155438 - DNA, 25 bp, SARS Virus
agttagtgtcttatgtgtgtaaaac

SEQ ID NO: 155439 - DNA, 25 bp, SARS Virus
gttagtgtcttgagtgtgtaaaact

SEQ ID NO: 155440 - DNA, 25 bp, SARS Virus
ttagtgtcttgtatgtgtaaaacta

SEQ ID NO: 155441 - DNA, 25 bp, SARS Virus
tagtgtcttgtgagtgtaaaactac

SEQ ID NO: 155442 - DNA, 25 bp, SARS Virus
agtgtcttgtgtatgtaaaactact

SEQ ID NO: 155443 - DNA, 25 bp, SARS Virus
gtgtcttgtgtgagtaaaactactt

SEQ ID NO: 155444 - DNA, 25 bp, SARS Virus
tgtcttgtgtgtataaaactacttg

SEQ ID NO: 155445 - DNA, 25 bp, SARS Virus
gtcttgtgtgtgaaaaactacttgg

SEQ ID NO: 155446 - DNA, 25 bp, SARS Virus
tcttgtgtgtgtaaaactacttgga

SEQ ID NO: 155447 - DNA, 25 bp, SARS Virus
cttgtgtgtgtaaaactacttggac

SEQ ID NO: 155448 - DNA, 25 bp, SARS Virus
ttgtgtgtgtaaaactacttggaca

SEQ ID NO: 155449 - DNA, 25 bp, SARS Virus
tgtgtgtgtaaaactacttggacaa

SEQ ID NO: 155450 - DNA, 25 bp, SARS Virus
gtgtgtgtaaaaatacttggacaaa

SEQ ID NO: 155451 - DNA, 25 bp, SARS Virus
tgtgtgtaaaacaacttggacaaac

SEQ ID NO: 155452 - DNA, 25 bp, SARS Virus
gtgtgtaaaactacttggacaaacg

SEQ ID NO: 155453 - DNA, 25 bp, SARS Virus
tgtgtaaaactaattggacaaacgc

SEQ ID NO: 155454 - DNA, 25 bp, SARS Virus
gtgtaaaactacatggacaaacgcg

SEQ ID NO: 155455 - DNA, 25 bp, SARS Virus
tgtaaaactactaggacaaacgcgt

SEQ ID NO: 155456 - DNA, 25 bp, SARS Virus
gtaaaactacttagacaaacgcgta

SEQ ID NO: 155457 - DNA, 25 bp, SARS Virus
taaaactacttgaacaaacgcgtag

SEQ ID NO: 155458 - DNA, 25 bp, SARS Virus
aaaactacttggacaaacgcgtaga

SEQ ID NO: 155459 - DNA, 25 bp, SARS Virus
aaactacttggaaaaacgcgtagac

SEQ ID NO: 155460 - DNA, 25 bp, SARS Virus
aactacttggacaaacgcgtagaca

SEQ ID NO: 155461 - DNA, 25 bp, SARS Virus
actacttggacaaacgcgtagacaa

SEQ ID NO: 155462 - DNA, 25 bp, SARS Virus
ctacttggacaaacgcgtagacaat

SEQ ID NO: 155463 - DNA, 25 bp, SARS Virus
tacttggacaaaagcgtagacaata

SEQ ID NO: 155464 - DNA, 25 bp, SARS Virus
acttggacaaacacgtagacaatac

SEQ ID NO: 155465 - DNA, 25 bp, SARS Virus
cttggacaaacgagtagacaatact

SEQ ID NO: 155466 - DNA, 25 bp, SARS Virus
ttggacaaacgcatagacaatactt

SEQ ID NO: 155467 - DNA, 25 bp, SARS Virus
tggacaaacgcgaagacaatacttc

SEQ ID NO: 155468 - DNA, 25 bp, SARS Virus
ggacaaacgcgtagacaatacttca

SEQ ID NO: 155469 - DNA, 25 bp, SARS Virus
gacaaacgcgtaaacaatacttcat

SEQ ID NO: 155470 - DNA, 25 bp, SARS Virus
acaaacgcgtagacaatacttcatt

SEQ ID NO: 155471 - DNA, 25 bp, SARS Virus
caaacgcgtagaaaatacttcatta

SEQ ID NO: 155472 - DNA, 25 bp, SARS Virus
aaacgcgtagacaatacttcattaa

SEQ ID NO: 155473 - DNA, 25 bp, SARS Virus
aacgcgtagacaatacttcattaaa

SEQ ID NO: 155474 - DNA, 25 bp, SARS Virus
acgcgtagacaaaacttcattaaaa

SEQ ID NO: 155475 - DNA, 25 bp, SARS Virus
cgcgtagacaatacttcattaaaaa

SEQ ID NO: 155476 - DNA, 25 bp, SARS Virus
gcgtagacaataattcattaaaaag

SEQ ID NO: 155477 - DNA, 25 bp, SARS Virus
cgtagacaatacatcattaaaaagt

SEQ ID NO: 155478 - DNA, 25 bp, SARS Virus
gtagacaatactacattaaaaagtg

SEQ ID NO: 155479 - DNA, 25 bp, SARS Virus
tagacaatacttaattaaaaagtga

SEQ ID NO: 155480 - DNA, 25 bp, SARS Virus
agacaatacttcattaaaaagtgac

SEQ ID NO: 155481 - DNA, 25 bp, SARS Virus
gacaatacttcaataaaaagtgaca

SEQ ID NO: 155482 - DNA, 25 bp, SARS Virus
acaatacttcataaaaaagtgacac

SEQ ID NO: 155483 - DNA, 25 bp, SARS Virus
caatacttcattaaaaagtgacacg

SEQ ID NO: 155484 - DNA, 25 bp, SARS Virus
aatacttcattaaaaagtgacacga

SEQ ID NO: 155485 - DNA, 25 bp, SARS Virus
atacttcattaaaaagtgacacgac

SEQ ID NO: 155486 - DNA, 25 bp, SARS Virus
tacttcattaaaaagtgacacgaca

SEQ ID NO: 155487 - DNA, 25 bp, SARS Virus
acttcattaaaaagtgacacgacag

SEQ ID NO: 155488 - DNA, 25 bp, SARS Virus
cttcattaaaaaatgacacgacagg

SEQ ID NO: 155489 - DNA, 25 bp, SARS Virus
ttcattaaaaagagacacgacaggt

SEQ ID NO: 155490 - DNA, 25 bp, SARS Virus
tcattaaaaagtaacacgacaggta

SEQ ID NO: 155491 - DNA, 25 bp, SARS Virus
cattaaaaagtgacacgacaggtat

SEQ ID NO: 155492 - DNA, 25 bp, SARS Virus
attaaaaagtgaaacgacaggtatc

SEQ ID NO: 155493 - DNA, 25 bp, SARS Virus
ttaaaaagtgacacgacaggtatcc

SEQ ID NO: 155494 - DNA, 25 bp, SARS Virus
taaaaagtgacaagacaggtatccc

SEQ ID NO: 155495 - DNA, 25 bp, SARS Virus
aaaaagtgacacaacaggtatccct

SEQ ID NO: 155496 - DNA, 25 bp, SARS Virus
aaaagtgacacgacaggtatcccta

SEQ ID NO: 155497 - DNA, 25 bp, SARS Virus
aaagtgacacgaaaggtatccctat

SEQ ID NO: 155498 - DNA, 25 bp, SARS Virus
aagtgacacgacaggtatccctatt

SEQ ID NO: 155499 - DNA, 25 bp, SARS Virus
agtgacacgacaagtatccctattt

SEQ ID NO: 155500 - DNA, 25 bp, SARS Virus
gtgacacgacagatatccctatttt

SEQ ID NO: 155501 - DNA, 25 bp, SARS Virus
tgacacgacaggaatccctatttta

SEQ ID NO: 155502 - DNA, 25 bp, SARS Virus
gacacgacaggtatccctattttag

SEQ ID NO: 155503 - DNA, 25 bp, SARS Virus
acacgacaggtaaccctattttagg

SEQ ID NO: 155504 - DNA, 25 bp, SARS Virus
cacgacaggtatacctattttagga

SEQ ID NO: 155505 - DNA, 25 bp, SARS Virus
acgacaggtatcactattttaggag

SEQ ID NO: 155506 - DNA, 25 bp, SARS Virus
cgacaggtatccatattttaggaga

SEQ ID NO: 155507 - DNA, 25 bp, SARS Virus
gacaggtatcccaattttaggagat

SEQ ID NO: 155508 - DNA, 25 bp, SARS Virus
acaggtatccctattttaggagatt

SEQ ID NO: 155509 - DNA, 25 bp, SARS Virus
caggtatccctaatttaggagatta

SEQ ID NO: 155510 - DNA, 25 bp, SARS Virus
aggtatccctatattaggagattaa

SEQ ID NO: 155511 - DNA, 25 bp, SARS Virus
ggtatccctattataggagattaaa

SEQ ID NO: 155512 - DNA, 25 bp, SARS Virus
gtatccctatttaaggagattaaat

SEQ ID NO: 155513 - DNA, 25 bp, SARS Virus
tatccctattttaggagattaaatt

SEQ ID NO: 155514 - DNA, 25 bp, SARS Virus
atccctattttaagagattaaattc

SEQ ID NO: 155515 - DNA, 25 bp, SARS Virus
tccctattttagaagattaaattca

SEQ ID NO: 155516 - DNA, 25 bp, SARS Virus
ccctattttaggagattaaattcac

SEQ ID NO: 155517 - DNA, 25 bp, SARS Virus
cctattttaggaaattaaattcacc

SEQ ID NO: 155518 - DNA, 25 bp, SARS Virus
ctattttaggagattaaattcacca

SEQ ID NO: 155519 - DNA, 25 bp, SARS Virus
tattttaggagaataaattcaccac

SEQ ID NO: 155520 - DNA, 25 bp, SARS Virus
attttaggagataaaattcaccact

SEQ ID NO: 155521 - DNA, 25 bp, SARS Virus
ttttaggagattaaattcaccactt

SEQ ID NO: 155522 - DNA, 25 bp, SARS Virus
tttaggagattaaattcaccactta

SEQ ID NO: 155523 - DNA, 25 bp, SARS Virus
ttaggagattaaattcaccacttag

SEQ ID NO: 155524 - DNA, 25 bp, SARS Virus
taggagattaaaatcaccacttaga

SEQ ID NO: 155525 - DNA, 25 bp, SARS Virus
aggagattaaatacaccacttagaa

SEQ ID NO: 155526 - DNA, 25 bp, SARS Virus
ggagattaaattaaccacttagaac

SEQ ID NO: 155527 - DNA, 25 bp, SARS Virus
gagattaaattcaccacttagaaca

SEQ ID NO: 155528 - DNA, 25 bp, SARS Virus
agattaaattcaacacttagaacac

SEQ ID NO: 155529 - DNA, 25 bp, SARS Virus
gattaaattcacaacttagaacact

SEQ ID NO: 155530 - DNA, 25 bp, SARS Virus
attaaattcaccacttagaacactc

SEQ ID NO: 155531 - DNA, 25 bp, SARS Virus
ttaaattcaccaattagaacactcg

SEQ ID NO: 155532 - DNA, 25 bp, SARS Virus
taaattcaccacatagaacactcgc

SEQ ID NO: 155533 - DNA, 25 bp, SARS Virus
aaattcaccactaagaacactcgcg

SEQ ID NO: 155534 - DNA, 25 bp, SARS Virus
aattcaccacttagaacactcgcga

SEQ ID NO: 155535 - DNA, 25 bp, SARS Virus
attcaccacttaaaacactcgcgaa

SEQ ID NO: 155536 - DNA, 25 bp, SARS Virus
ttcaccacttagaacactcgcgaac

SEQ ID NO: 155537 - DNA, 25 bp, SARS Virus
tcaccacttagaacactcgcgaacc

SEQ ID NO: 155538 - DNA, 25 bp, SARS Virus
caccacttagaaaactcgcgaaccg

SEQ ID NO: 155539 - DNA, 25 bp, SARS Virus
accacttagaacactcgcgaaccga

SEQ ID NO: 155540 - DNA, 25 bp, SARS Virus
ccacttagaacaatcgcgaaccgat

SEQ ID NO: 155541 - DNA, 25 bp, SARS Virus
cacttagaacacacgcgaaccgatt

SEQ ID NO: 155542 - DNA, 25 bp, SARS Virus
acttagaacactagcgaaccgattc

SEQ ID NO: 155543 - DNA, 25 bp, SARS Virus
cttagaacactcacgaaccgattcg

SEQ ID NO: 155544 - DNA, 25 bp, SARS Virus
ttagaacactcgagaaccgattcgg

SEQ ID NO: 155545 - DNA, 25 bp, SARS Virus
tagaacactcgcaaaccgattcgga

SEQ ID NO: 155546 - DNA, 25 bp, SARS Virus
agaacactcgcgaaccgattcggat

SEQ ID NO: 155547 - DNA, 25 bp, SARS Virus
gaacactcgcgaaccgattcggata

SEQ ID NO: 155548 - DNA, 25 bp, SARS Virus
aacactcgcgaaacgattcggatag

SEQ ID NO: 155549 - DNA, 25 bp, SARS Virus
acactcgcgaacagattcggatagt

SEQ ID NO: 155550 - DNA, 25 bp, SARS Virus
cactcgcgaaccaattcggatagta

SEQ ID NO: 155551 - DNA, 25 bp, SARS Virus
actcgcgaaccgattcggatagtaa

SEQ ID NO: 155552 - DNA, 25 bp, SARS Virus
ctcgcgaaccgaatcggatagtaat

SEQ ID NO: 155553 - DNA, 25 bp, SARS Virus
tcgcgaaccgatacggatagtaatt

SEQ ID NO: 155554 - DNA, 25 bp, SARS Virus
cgcgaaccgattaggatagtaattt

SEQ ID NO: 155555 - DNA, 25 bp, SARS Virus
gcgaaccgattcagatagtaattta

SEQ ID NO: 155556 - DNA, 25 bp, SARS Virus
cgaaccgattcgaatagtaatttac

SEQ ID NO: 155557 - DNA, 25 bp, SARS Virus
gaaccgattcggatagtaatttact

SEQ ID NO: 155558 - DNA, 25 bp, SARS Virus
aaccgattcggaaagtaatttactt

SEQ ID NO: 155559 - DNA, 25 bp, SARS Virus
accgattcggatagtaatttacttc

SEQ ID NO: 155560 - DNA, 25 bp, SARS Virus
ccgattcggataataatttacttct

SEQ ID NO: 155561 - DNA, 25 bp, SARS Virus
cgattcggatagaaatttacttctg

SEQ ID NO: 155562 - DNA, 25 bp, SARS Virus
gattcggatagtaatttacttctgg

SEQ ID NO: 155563 - DNA, 25 bp, SARS Virus
attcggatagtaatttacttctggc

SEQ ID NO: 155564 - DNA, 25 bp, SARS Virus
ttcggatagtaaattacttctggcg

SEQ ID NO: 155565 - DNA, 25 bp, SARS Virus
tcggatagtaatatacttctggcgg

SEQ ID NO: 155566 - DNA, 25 bp, SARS Virus
cggatagtaattaacttctggcggt

SEQ ID NO: 155567 - DNA, 25 bp, SARS Virus
ggatagtaatttacttctggcggtt

SEQ ID NO: 155568 - DNA, 25 bp, SARS Virus
gatagtaatttaattctggcggttc

SEQ ID NO: 155569 - DNA, 25 bp, SARS Virus
atagtaatttacatctggcggttca

SEQ ID NO: 155570 - DNA, 25 bp, SARS Virus
tagtaatttactactggcggttcaa

SEQ ID NO: 155571 - DNA, 25 bp, SARS Virus
agtaatttacttatggcggttcaac

SEQ ID NO: 155572 - DNA, 25 bp, SARS Virus
gtaatttacttcaggcggttcaaca

SEQ ID NO: 155573 - DNA, 25 bp, SARS Virus
taatttacttctagcggttcaacag

SEQ ID NO: 155574 - DNA, 25 bp, SARS Virus
aatttacttctgacggttcaacagg

SEQ ID NO: 155575 - DNA, 25 bp, SARS Virus
atttacttctggaggttcaacaggt

SEQ ID NO: 155576 - DNA, 25 bp, SARS Virus
tttacttctggcagttcaacaggta

SEQ ID NO: 155577 - DNA, 25 bp, SARS Virus
ttacttctggcgattcaacaggtac

SEQ ID NO: 155578 - DNA, 25 bp, SARS Virus
tacttctggcggatcaacaggtact

SEQ ID NO: 155579 - DNA, 25 bp, SARS Virus
acttctggcggtacaacaggtactg

SEQ ID NO: 155580 - DNA, 25 bp, SARS Virus
cttctggcggttaaacaggtactga

SEQ ID NO: 155581 - DNA, 25 bp, SARS Virus
ttctggcggttcaacaggtactgac

SEQ ID NO: 155582 - DNA, 25 bp, SARS Virus
tctggcggttcaacaggtactgact

SEQ ID NO: 155583 - DNA, 25 bp, SARS Virus
ctggcggttcaaaaggtactgactt

SEQ ID NO: 155584 - DNA, 25 bp, SARS Virus
tggcggttcaacaggtactgacttt

SEQ ID NO: 155585 - DNA, 25 bp, SARS Virus
ggcggttcaacaagtactgacttta

SEQ ID NO: 155586 - DNA, 25 bp, SARS Virus
gcggttcaacagatactgactttag

SEQ ID NO: 155587 - DNA, 25 bp, SARS Virus
cggttcaacaggaactgactttaga

SEQ ID NO: 155588 - DNA, 25 bp, SARS Virus
ggttcaacaggtactgactttagag

SEQ ID NO: 155589 - DNA, 25 bp, SARS Virus
gttcaacaggtaatgactttagagg

SEQ ID NO: 155590 - DNA, 25 bp, SARS Virus
ttcaacaggtacagactttagaggt

SEQ ID NO: 155591 - DNA, 25 bp, SARS Virus
tcaacaggtactaactttagaggta

SEQ ID NO: 155592 - DNA, 25 bp, SARS Virus
caacaggtactgactttagaggtat

SEQ ID NO: 155593 - DNA, 25 bp, SARS Virus
aacaggtactgaatttagaggtatt

SEQ ID NO: 155594 - DNA, 25 bp, SARS Virus
acaggtactgacattagaggtattt

SEQ ID NO: 155595 - DNA, 25 bp, SARS Virus
caggtactgactatagaggtatttg

SEQ ID NO: 155596 - DNA, 25 bp, SARS Virus
aggtactgacttaagaggtatttgc

SEQ ID NO: 155597 - DNA, 25 bp, SARS Virus
ggtactgactttagaggtatttgct

SEQ ID NO: 155598 - DNA, 25 bp, SARS Virus
gtactgactttaaaggtatttgcta

SEQ ID NO: 155599 - DNA, 25 bp, SARS Virus
tactgactttagaggtatttgctac

SEQ ID NO: 155600 - DNA, 25 bp, SARS Virus
actgactttagaagtatttgctaca

SEQ ID NO: 155601 - DNA, 25 bp, SARS Virus
ctgactttagagatatttgctacac

SEQ ID NO: 155602 - DNA, 25 bp, SARS Virus
tgactttagaggaatttgctacaca

SEQ ID NO: 155603 - DNA, 25 bp, SARS Virus
gactttagaggtatttgctacacaa

SEQ ID NO: 155604 - DNA, 25 bp, SARS Virus
actttagaggtaattgctacacaag

SEQ ID NO: 155605 - DNA, 25 bp, SARS Virus
ctttagaggtatatgctacacaagc

SEQ ID NO: 155606 - DNA, 25 bp, SARS Virus
tttagaggtattagctacacaagct

SEQ ID NO: 155607 - DNA, 25 bp, SARS Virus
ttagaggtatttactacacaagctt

SEQ ID NO: 155608 - DNA, 25 bp, SARS Virus
tagaggtatttgatacacaagcttc

SEQ ID NO: 155609 - DNA, 25 bp, SARS Virus
agaggtatttgcaacacaagcttcc

SEQ ID NO: 155610 - DNA, 25 bp, SARS Virus
gaggtatttgctacacaagcttccg

SEQ ID NO: 155611 - DNA, 25 bp, SARS Virus
aggtatttgctaaacaagcttccgt

SEQ ID NO: 155612 - DNA, 25 bp, SARS Virus
ggtatttgctacacaagcttccgta

SEQ ID NO: 155613 - DNA, 25 bp, SARS Virus
gtatttgctacaaaagcttccgtat

SEQ ID NO: 155614 - DNA, 25 bp, SARS Virus
tatttgctacacaagcttccgtatc

SEQ ID NO: 155615 - DNA, 25 bp, SARS Virus
atttgctacacaagcttccgtatcg

SEQ ID NO: 155616 - DNA, 25 bp, SARS Virus
tttgctacacaaacttccgtatcgg

SEQ ID NO: 155617 - DNA, 25 bp, SARS Virus
ttgctacacaagattccgtatcggg

SEQ ID NO: 155618 - DNA, 25 bp, SARS Virus
tgctacacaagcatccgtatcggga

SEQ ID NO: 155619 - DNA, 25 bp, SARS Virus
gctacacaagctaccgtatcgggag

SEQ ID NO: 155620 - DNA, 25 bp, SARS Virus
ctacacaagcttacgtatcgggagc

SEQ ID NO: 155621 - DNA, 25 bp, SARS Virus
tacacaagcttcagtatcgggagct

SEQ ID NO: 155622 - DNA, 25 bp, SARS Virus
acacaagcttccatatcgggagctc

SEQ ID NO: 155623 - DNA, 25 bp, SARS Virus
cacaagcttccgaatcgggagctcg

SEQ ID NO: 155624 - DNA, 25 bp, SARS Virus
acaagcttccgtatcgggagctcga

SEQ ID NO: 155625 - DNA, 25 bp, SARS Virus
caagcttccgtaacgggagctcgaa

SEQ ID NO: 155626 - DNA, 25 bp, SARS Virus
aagcttccgtatagggagctcgaat

SEQ ID NO: 155627 - DNA, 25 bp, SARS Virus
agcttccgtatcaggagctcgaata

SEQ ID NO: 155628 - DNA, 25 bp, SARS Virus
gcttccgtatcgagagctcgaatat

SEQ ID NO: 155629 - DNA, 25 bp, SARS Virus
cttccgtatcggaagctcgaatata

SEQ ID NO: 155630 - DNA, 25 bp, SARS Virus
ttccgtatcgggagctcgaatatag

SEQ ID NO: 155631 - DNA, 25 bp, SARS Virus
tccgtatcgggaactcgaatatagc

SEQ ID NO: 155632 - DNA, 25 bp, SARS Virus
ccgtatcgggagatcgaatatagcg

SEQ ID NO: 155633 - DNA, 25 bp, SARS Virus
cgtatcgggagcacgaatatagcga

SEQ ID NO: 155634 - DNA, 25 bp, SARS Virus
gtatcgggagctagaatatagcgac

SEQ ID NO: 155635 - DNA, 25 bp, SARS Virus
tatcgggagctcaaatatagcgaca

SEQ ID NO: 155636 - DNA, 25 bp, SARS Virus
atcgggagctcgaatatagcgacat

SEQ ID NO: 155637 - DNA, 25 bp, SARS Virus
tcgggagctcgaatatagcgacata

SEQ ID NO: 155638 - DNA, 25 bp, SARS Virus
cgggagctcgaaaatagcgacatac

SEQ ID NO: 155639 - DNA, 25 bp, SARS Virus
gggagctcgaatatagcgacatact

SEQ ID NO: 155640 - DNA, 25 bp, SARS Virus
ggagctcgaataaagcgacatactt

SEQ ID NO: 155641 - DNA, 25 bp, SARS Virus
gagctcgaatatagcgacatactta

SEQ ID NO: 155642 - DNA, 25 bp, SARS Virus
agctcgaatataacgacatacttaa

SEQ ID NO: 155643 - DNA, 25 bp, SARS Virus
gctcgaatatagagacatacttaag

SEQ ID NO: 155644 - DNA, 25 bp, SARS Virus
ctcgaatatagcaacatacttaagt

SEQ ID NO: 155645 - DNA, 25 bp, SARS Virus
tcgaatatagcgacatacttaagta

SEQ ID NO: 155646 - DNA, 25 bp, SARS Virus
cgaatatagcgaaatacttaagtag

SEQ ID NO: 155647 - DNA, 25 bp, SARS Virus
gaatatagcgacatacttaagtagg

SEQ ID NO: 155648 - DNA, 25 bp, SARS Virus
aatatagcgacaaacttaagtaggt

SEQ ID NO: 155649 - DNA, 25 bp, SARS Virus
atatagcgacatacttaagtaggta

SEQ ID NO: 155650 - DNA, 25 bp, SARS Virus
tatagcgacataattaagtaggtat

SEQ ID NO: 155651 - DNA, 25 bp, SARS Virus
atagcgacatacataagtaggtatc

SEQ ID NO: 155652 - DNA, 25 bp, SARS Virus
tagcgacatactaaagtaggtatcg

SEQ ID NO: 155653 - DNA, 25 bp, SARS Virus
agcgacatacttaagtaggtatcgc

SEQ ID NO: 155654 - DNA, 25 bp, SARS Virus
gcgacatacttaagtaggtatcgct

SEQ ID NO: 155655 - DNA, 25 bp, SARS Virus
cgacatacttaaataggtatcgctc

SEQ ID NO: 155656 - DNA, 25 bp, SARS Virus
gacatacttaagaaggtatcgctcg

SEQ ID NO: 155657 - DNA, 25 bp, SARS Virus
acatacttaagtaggtatcgctcga

SEQ ID NO: 155658 - DNA, 25 bp, SARS Virus
catacttaagtaagtatcgctcgag

SEQ ID NO: 155659 - DNA, 25 bp, SARS Virus
atacttaagtagatatcgctcgagc

SEQ ID NO: 155660 - DNA, 25 bp, SARS Virus
tacttaagtaggaatcgctcgagct

SEQ ID NO: 155661 - DNA, 25 bp, SARS Virus
acttaagtaggtatcgctcgagctc

SEQ ID NO: 155662 - DNA, 25 bp, SARS Virus
cttaagtaggtaacgctcgagctct

SEQ ID NO: 155663 - DNA, 25 bp, SARS Virus
ttaagtaggtatagctcgagctctt

SEQ ID NO: 155664 - DNA, 25 bp, SARS Virus
taagtaggtatcactcgagctcttt

SEQ ID NO: 155665 - DNA, 25 bp, SARS Virus
aagtaggtatcgatcgagctctttc

SEQ ID NO: 155666 - DNA, 25 bp, SARS Virus
agtaggtatcgcacgagctctttca

SEQ ID NO: 155667 - DNA, 25 bp, SARS Virus
gtaggtatcgctagagctctttcag

SEQ ID NO: 155668 - DNA, 25 bp, SARS Virus
taggtatcgctcaagctctttcagt

SEQ ID NO: 155669 - DNA, 25 bp, SARS Virus
aggtatcgctcgagctctttcagtc

SEQ ID NO: 155670 - DNA, 25 bp, SARS Virus
ggtatcgctcgaactctttcagtca

SEQ ID NO: 155671 - DNA, 25 bp, SARS Virus
gtatcgctcgagatctttcagtcaa

SEQ ID NO: 155672 - DNA, 25 bp, SARS Virus
tatcgctcgagcactttcagtcaaa

SEQ ID NO: 155673 - DNA, 25 bp, SARS Virus
atcgctcgagctatttcagtcaaag

SEQ ID NO: 155674 - DNA, 25 bp, SARS Virus
tcgctcgagctcattcagtcaaagg

SEQ ID NO: 155675 - DNA, 25 bp, SARS Virus
cgctcgagctctatcagtcaaaggt

SEQ ID NO: 155676 - DNA, 25 bp, SARS Virus
gctcgagctcttacagtcaaaggta

SEQ ID NO: 155677 - DNA, 25 bp, SARS Virus
ctcgagctctttaagtcaaaggtaa

SEQ ID NO: 155678 - DNA, 25 bp, SARS Virus
tcgagctctttcagtcaaaggtaaa

SEQ ID NO: 155679 - DNA, 25 bp, SARS Virus
cgagctctttcaatcaaaggtaaac

SEQ ID NO: 155680 - DNA, 25 bp, SARS Virus
gagctctttcagacaaaggtaaaca

SEQ ID NO: 155681 - DNA, 25 bp, SARS Virus
agctctttcagtaaaaggtaaacac

SEQ ID NO: 155682 - DNA, 25 bp, SARS Virus
gctctttcagtcaaaggtaaacact

SEQ ID NO: 155683 - DNA, 25 bp, SARS Virus
ctctttcagtcaaaggtaaacacta

SEQ ID NO: 155684 - DNA, 25 bp, SARS Virus
tctttcagtcaaaggtaaacactag

SEQ ID NO: 155685 - DNA, 25 bp, SARS Virus
ctttcagtcaaaagtaaacactaga

SEQ ID NO: 155686 - DNA, 25 bp, SARS Virus
tttcagtcaaagataaacactagac

SEQ ID NO: 155687 - DNA, 25 bp, SARS Virus
ttcagtcaaaggaaaacactagacc

SEQ ID NO: 155688 - DNA, 25 bp, SARS Virus
tcagtcaaaggtaaacactagaccc

SEQ ID NO: 155689 - DNA, 25 bp, SARS Virus
cagtcaaaggtaaacactagacccg

SEQ ID NO: 155690 - DNA, 25 bp, SARS Virus
agtcaaaggtaaacactagacccga

SEQ ID NO: 155691 - DNA, 25 bp, SARS Virus
gtcaaaggtaaaaactagacccgaa

SEQ ID NO: 155692 - DNA, 25 bp, SARS Virus
tcaaaggtaaacactagacccgaat

SEQ ID NO: 155693 - DNA, 25 bp, SARS Virus
caaaggtaaacaatagacccgaatt

SEQ ID NO: 155694 - DNA, 25 bp, SARS Virus
aaaggtaaacacaagacccgaattt

SEQ ID NO: 155695 - DNA, 25 bp, SARS Virus
aaggtaaacactagacccgaatttt

SEQ ID NO: 155696 - DNA, 25 bp, SARS Virus
aggtaaacactaaacccgaatttta

SEQ ID NO: 155697 - DNA, 25 bp, SARS Virus
ggtaaacactagacccgaattttag

SEQ ID NO: 155698 - DNA, 25 bp, SARS Virus
gtaaacactagaaccgaattttagg

SEQ ID NO: 155699 - DNA, 25 bp, SARS Virus
taaacactagacacgaattttagga

SEQ ID NO: 155700 - DNA, 25 bp, SARS Virus
aaacactagaccagaattttaggag

SEQ ID NO: 155701 - DNA, 25 bp, SARS Virus
aacactagacccaaattttaggaga

SEQ ID NO: 155702 - DNA, 25 bp, SARS Virus
acactagacccgaattttaggagat

SEQ ID NO: 155703 - DNA, 25 bp, SARS Virus
cactagacccgaattttaggagatt

SEQ ID NO: 155704 - DNA, 25 bp, SARS Virus
actagacccgaaatttaggagattc

SEQ ID NO: 155705 - DNA, 25 bp, SARS Virus
aaagttcttcgtcagaaacgtagaa

SEQ ID NO: 155706 - DNA, 25 bp, SARS Virus
aagttcttcgtacgaaacgtagaac

SEQ ID NO: 155707 - DNA, 25 bp, SARS Virus
agttcttcgtaacaaacgtagaaca

SEQ ID NO: 155708 - DNA, 25 bp, SARS Virus
gttcttcgtaagcaacgtagaacat

SEQ ID NO: 155709 - DNA, 25 bp, SARS Virus
ttcttcgtaagacacgtagaacatg

SEQ ID NO: 155710 - DNA, 25 bp, SARS Virus
tcttcgtaagaaccgtagaacatgt

SEQ ID NO: 155711 - DNA, 25 bp, SARS Virus
cttcgtaagaaacgtagaacatgtt

SEQ ID NO: 155712 - DNA, 25 bp, SARS Virus
ttcgtaagaaacctagaacatgttc

SEQ ID NO: 155713 - DNA, 25 bp, SARS Virus
tcgtaagaaacgcagaacatgttca

SEQ ID NO: 155714 - DNA, 25 bp, SARS Virus
cgtaagaaacgtcgaacatgttcaa

SEQ ID NO: 155715 - DNA, 25 bp, SARS Virus
gtaagaaacgtacaacatgttcaat

SEQ ID NO: 155716 - DNA, 25 bp, SARS Virus
taagaaacgtagcacatgttcaatc

SEQ ID NO: 155717 - DNA, 25 bp, SARS Virus
aagaaacgtagaccatgttcaatcc

SEQ ID NO: 155718 - DNA, 25 bp, SARS Virus
agaaacgtagaacatgttcaatccg

SEQ ID NO: 155719 - DNA, 25 bp, SARS Virus
gaaacgtagaacctgttcaatccgt

SEQ ID NO: 155720 - DNA, 25 bp, SARS Virus
aaacgtagaacacgttcaatccgta

SEQ ID NO: 155721 - DNA, 25 bp, SARS Virus
aacgtagaacatcttcaatccgtag

SEQ ID NO: 155722 - DNA, 25 bp, SARS Virus
acgtagaacatgctcaatccgtagc

SEQ ID NO: 155723 - DNA, 25 bp, SARS Virus
cgtagaacatgtccaatccgtagcg

SEQ ID NO: 155724 - DNA, 25 bp, SARS Virus
gtagaacatgttcaatccgtagcgt

SEQ ID NO: 155725 - DNA, 25 bp, SARS Virus
tagaacatgttccatccgtagcgtt

SEQ ID NO: 155726 - DNA, 25 bp, SARS Virus
agaacatgttcactccgtagcgttg

SEQ ID NO: 155727 - DNA, 25 bp, SARS Virus
gaacatgttcaacccgtagcgttgt

SEQ ID NO: 155728 - DNA, 25 bp, SARS Virus
aacatgttcaatccgtagcgttgtg

SEQ ID NO: 155729 - DNA, 25 bp, SARS Virus
acatgttcaatccgtagcgttgtgg

SEQ ID NO: 155730 - DNA, 25 bp, SARS Virus
catgttcaatccctagcgttgtgga

SEQ ID NO: 155731 - DNA, 25 bp, SARS Virus
atgttcaatccgcagcgttgtggac

SEQ ID NO: 155732 - DNA, 25 bp, SARS Virus
tgttcaatccgtcgcgttgtggacc

SEQ ID NO: 155733 - DNA, 25 bp, SARS Virus
gttcaatccgtaccgttgtggacca

SEQ ID NO: 155734 - DNA, 25 bp, SARS Virus
ttcaatccgtagcgttgtggaccaa

SEQ ID NO: 155735 - DNA, 25 bp, SARS Virus
tcaatccgtagccttgtggaccaac

SEQ ID NO: 155736 - DNA, 25 bp, SARS Virus
caatccgtagcgctgtggaccaacg

SEQ ID NO: 155737 - DNA, 25 bp, SARS Virus
aatccgtagcgtcgtggaccaacgg

SEQ ID NO: 155738 - DNA, 25 bp, SARS Virus
atccgtagcgttctggaccaacggt

SEQ ID NO: 155739 - DNA, 25 bp, SARS Virus
tccgtagcgttgcggaccaacggtg

SEQ ID NO: 155740 - DNA, 25 bp, SARS Virus
ccgtagcgttgtcgaccaacggtgc

SEQ ID NO: 155741 - DNA, 25 bp, SARS Virus
cgtagcgttgtgcaccaacggtgcg

SEQ ID NO: 155742 - DNA, 25 bp, SARS Virus
gtagcgttgtggcccaacggtgcga

SEQ ID NO: 155743 - DNA, 25 bp, SARS Virus
tagcgttgtggaccaacggtgcgaa

SEQ ID NO: 155744 - DNA, 25 bp, SARS Virus
agcgttgtggaccaacggtgcgaac

SEQ ID NO: 155745 - DNA, 25 bp, SARS Virus
gcgttgtggacccacggtgcgaact

SEQ ID NO: 155746 - DNA, 25 bp, SARS Virus
cgttgtggaccaccggtgcgaactg

SEQ ID NO: 155747 - DNA, 25 bp, SARS Virus
gttgtggaccaacggtgcgaactga

SEQ ID NO: 155748 - DNA, 25 bp, SARS Virus
ttgtggaccaaccgtgcgaactgaa

SEQ ID NO: 155749 - DNA, 25 bp, SARS Virus
tgtggaccaacgctgcgaactgaac

SEQ ID NO: 155750 - DNA, 25 bp, SARS Virus
gtggaccaacggcgcgaactgaacg

SEQ ID NO: 155751 - DNA, 25 bp, SARS Virus
tggaccaacggtccgaactgaacga

SEQ ID NO: 155752 - DNA, 25 bp, SARS Virus
ggaccaacggtgcgaactgaacgaa

SEQ ID NO: 155753 - DNA, 25 bp, SARS Virus
gaccaacggtgccaactgaacgaac

SEQ ID NO: 155754 - DNA, 25 bp, SARS Virus
accaacggtgcgcactgaacgaaca

SEQ ID NO: 155755 - DNA, 25 bp, SARS Virus
ccaacggtgcgacctgaacgaacat

SEQ ID NO: 155756 - DNA, 25 bp, SARS Virus
caacggtgcgaactgaacgaacatc

SEQ ID NO: 155757 - DNA, 25 bp, SARS Virus
aacggtgcgaaccgaacgaacatca

SEQ ID NO: 155758 - DNA, 25 bp, SARS Virus
acggtgcgaactcaacgaacatcaa

SEQ ID NO: 155759 - DNA, 25 bp, SARS Virus
cggtgcgaactgcacgaacatcaaa

SEQ ID NO: 155760 - DNA, 25 bp, SARS Virus
ggtgcgaactgaccgaacatcaaaa

SEQ ID NO: 155761 - DNA, 25 bp, SARS Virus
gtgcgaactgaacgaacatcaaaac

SEQ ID NO: 155762 - DNA, 25 bp, SARS Virus
tgcgaactgaaccaacatcaaaacc

SEQ ID NO: 155763 - DNA, 25 bp, SARS Virus
gcgaactgaacgcacatcaaaaccc

SEQ ID NO: 155764 - DNA, 25 bp, SARS Virus
cgaactgaacgaccatcaaaaccca

SEQ ID NO: 155765 - DNA, 25 bp, SARS Virus
gaactgaacgaacatcaaaacccat

SEQ ID NO: 155766 - DNA, 25 bp, SARS Virus
aactgaacgaacctcaaaacccatc

SEQ ID NO: 155767 - DNA, 25 bp, SARS Virus
actgaacgaacaccaaaacccatct

SEQ ID NO: 155768 - DNA, 25 bp, SARS Virus
ctgaacgaacatcaaaacccatctt

SEQ ID NO: 155769 - DNA, 25 bp, SARS Virus
tgaacgaacatccaaacccatcttc

SEQ ID NO: 155770 - DNA, 25 bp, SARS Virus
gaacgaacatcacaacccatcttcc

SEQ ID NO: 155771 - DNA, 25 bp, SARS Virus
aacgaacatcaacacccatcttcca

SEQ ID NO: 155772 - DNA, 25 bp, SARS Virus
acgaacatcaaaccccatcttccaa

SEQ ID NO: 155773 - DNA, 25 bp, SARS Virus
cgaacatcaaaacccatcttccaaa

SEQ ID NO: 155774 - DNA, 25 bp, SARS Virus
gaacatcaaaacccatcttccaaag

SEQ ID NO: 155775 - DNA, 25 bp, SARS Virus
aacatcaaaacccatcttccaaagt

SEQ ID NO: 155776 - DNA, 25 bp, SARS Virus
acatcaaaacccctcttccaaagtt

SEQ ID NO: 155777 - DNA, 25 bp, SARS Virus
catcaaaacccaccttccaaagttg

SEQ ID NO: 155778 - DNA, 25 bp, SARS Virus
atcaaaacccatcttccaaagttgt

SEQ ID NO: 155779 - DNA, 25 bp, SARS Virus
tcaaaacccatcctccaaagttgta

SEQ ID NO: 155780 - DNA, 25 bp, SARS Virus
caaaacccatctcccaaagttgtac

SEQ ID NO: 155781 - DNA, 25 bp, SARS Virus
aaaacccatcttccaaagttgtaca

SEQ ID NO: 155782 - DNA, 25 bp, SARS Virus
aaacccatcttccaaagttgtacag

SEQ ID NO: 155783 - DNA, 25 bp, SARS Virus
aacccatcttcccaagttgtacagg

SEQ ID NO: 155784 - DNA, 25 bp, SARS Virus
acccatcttccacagttgtacaggt

SEQ ID NO: 155785 - DNA, 25 bp, SARS Virus
cccatcttccaacgttgtacaggta

SEQ ID NO: 155786 - DNA, 25 bp, SARS Virus
ccatcttccaaacttgtacaggtag

SEQ ID NO: 155787 - DNA, 25 bp, SARS Virus
catcttccaaagctgtacaggtagg

SEQ ID NO: 155788 - DNA, 25 bp, SARS Virus
atcttccaaagtcgtacaggtagga

SEQ ID NO: 155789 - DNA, 25 bp, SARS Virus
tcttccaaagttctacaggtaggaa

SEQ ID NO: 155790 - DNA, 25 bp, SARS Virus
cttccaaagttgcacaggtaggaat

SEQ ID NO: 155791 - DNA, 25 bp, SARS Virus
ttccaaagttgtccaggtaggaatg

SEQ ID NO: 155792 - DNA, 25 bp, SARS Virus
tccaaagttgtacaggtaggaatgt

SEQ ID NO: 155793 - DNA, 25 bp, SARS Virus
ccaaagttgtaccggtaggaatgtg

SEQ ID NO: 155794 - DNA, 25 bp, SARS Virus
caaagttgtacacgtaggaatgtgg

SEQ ID NO: 155795 - DNA, 25 bp, SARS Virus
aaagttgtacagctaggaatgtggt

SEQ ID NO: 155796 - DNA, 25 bp, SARS Virus
aagttgtacaggcaggaatgtggtt

SEQ ID NO: 155797 - DNA, 25 bp, SARS Virus
agttgtacaggtcggaatgtggttt

SEQ ID NO: 155798 - DNA, 25 bp, SARS Virus
gttgtacaggtacgaatgtggtttc

SEQ ID NO: 155799 - DNA, 25 bp, SARS Virus
ttgtacaggtagcaatgtggtttcg

SEQ ID NO: 155800 - DNA, 25 bp, SARS Virus
tgtacaggtaggcatgtggtttcgt

SEQ ID NO: 155801 - DNA, 25 bp, SARS Virus
gtacaggtaggactgtggtttcgta

SEQ ID NO: 155802 - DNA, 25 bp, SARS Virus
tacaggtaggaacgtggtttcgtac

SEQ ID NO: 155803 - DNA, 25 bp, SARS Virus
acaggtaggaatctggtttcgtact

SEQ ID NO: 155804 - DNA, 25 bp, SARS Virus
caggtaggaatgcggtttcgtactt

SEQ ID NO: 155805 - DNA, 25 bp, SARS Virus
aggtaggaatgtcgtttcgtactta

SEQ ID NO: 155806 - DNA, 25 bp, SARS Virus
ggtaggaatgtgctttcgtacttac

SEQ ID NO: 155807 - DNA, 25 bp, SARS Virus
gtaggaatgtggcttcgtacttact

SEQ ID NO: 155808 - DNA, 25 bp, SARS Virus
taggaatgtggtctcgtacttactt

SEQ ID NO: 155809 - DNA, 25 bp, SARS Virus
aggaatgtggttccgtacttacttt

SEQ ID NO: 155810 - DNA, 25 bp, SARS Virus
ggaatgtggtttcgtacttacttta

SEQ ID NO: 155811 - DNA, 25 bp, SARS Virus
gaatgtggtttcctacttactttaa

SEQ ID NO: 155812 - DNA, 25 bp, SARS Virus
aatgtggtttcgcacttactttaaa

SEQ ID NO: 155813 - DNA, 25 bp, SARS Virus
atgtggtttcgtccttactttaaag

SEQ ID NO: 155814 - DNA, 25 bp, SARS Virus
tgtggtttcgtacttactttaaagt

SEQ ID NO: 155815 - DNA, 25 bp, SARS Virus
gtggtttcgtacctactttaaagtc

SEQ ID NO: 155816 - DNA, 25 bp, SARS Virus
tggtttcgtactcactttaaagtcg

SEQ ID NO: 155817 - DNA, 25 bp, SARS Virus
ggtttcgtacttcctttaaagtcgt

SEQ ID NO: 155818 - DNA, 25 bp, SARS Virus
gtttcgtacttactttaaagtcgta

SEQ ID NO: 155819 - DNA, 25 bp, SARS Virus
tttcgtacttaccttaaagtcgtat

SEQ ID NO: 155820 - DNA, 25 bp, SARS Virus
ttcgtacttactctaaagtcgtatc

SEQ ID NO: 155821 - DNA, 25 bp, SARS Virus
tcgtacttacttcaaagtcgtatca

SEQ ID NO: 155822 - DNA, 25 bp, SARS Virus
cgtacttactttcaagtcgtatcag

SEQ ID NO: 155823 - DNA, 25 bp, SARS Virus
gtacttactttacagtcgtatcagt

SEQ ID NO: 155824 - DNA, 25 bp, SARS Virus
tacttactttaacgtcgtatcagtt

SEQ ID NO: 155825 - DNA, 25 bp, SARS Virus
acttactttaaactcgtatcagtta

SEQ ID NO: 155826 - DNA, 25 bp, SARS Virus
cttactttaaagccgtatcagttaa

SEQ ID NO: 155827 - DNA, 25 bp, SARS Virus
ttactttaaagtcgtatcagttaac

SEQ ID NO: 155828 - DNA, 25 bp, SARS Virus
tactttaaagtcctatcagttaaca

SEQ ID NO: 155829 - DNA, 25 bp, SARS Virus
actttaaagtcgcatcagttaacat

SEQ ID NO: 155830 - DNA, 25 bp, SARS Virus
ctttaaagtcgtctcagttaacatt

SEQ ID NO: 155831 - DNA, 25 bp, SARS Virus
tttaaagtcgtaccagttaacattg

SEQ ID NO: 155832 - DNA, 25 bp, SARS Virus
ttaaagtcgtatcagttaacattgg

SEQ ID NO: 155833 - DNA, 25 bp, SARS Virus
taaagtcgtatccgttaacattgga

SEQ ID NO: 155834 - DNA, 25 bp, SARS Virus
aaagtcgtatcacttaacattggaa

SEQ ID NO: 155835 - DNA, 25 bp, SARS Virus
aagtcgtatcagctaacattggaac

SEQ ID NO: 155836 - DNA, 25 bp, SARS Virus
agtcgtatcagtcaacattggaact

SEQ ID NO: 155837 - DNA, 25 bp, SARS Virus
gtcgtatcagttcacattggaactg

SEQ ID NO: 155838 - DNA, 25 bp, SARS Virus
tcgtatcagttaccattggaactgg

SEQ ID NO: 155839 - DNA, 25 bp, SARS Virus
cgtatcagttaacattggaactggt

SEQ ID NO: 155840 - DNA, 25 bp, SARS Virus
gtatcagttaaccttggaactggtg

SEQ ID NO: 155841 - DNA, 25 bp, SARS Virus
tatcagttaacactggaactggtga

SEQ ID NO: 155842 - DNA, 25 bp, SARS Virus
atcagttaacatcggaactggtgaa

SEQ ID NO: 155843 - DNA, 25 bp, SARS Virus
tcagttaacattcgaactggtgaaa

SEQ ID NO: 155844 - DNA, 25 bp, SARS Virus
cagttaacattgcaactggtgaaaa

SEQ ID NO: 155845 - DNA, 25 bp, SARS Virus
agttaacattggcactggtgaaaac

SEQ ID NO: 155846 - DNA, 25 bp, SARS Virus
gttaacattggacctggtgaaaact

SEQ ID NO: 155847 - DNA, 25 bp, SARS Virus
ttaacattggaactggtgaaaactt

SEQ ID NO: 155848 - DNA, 25 bp, SARS Virus
taacattggaaccggtgaaaacttt

SEQ ID NO: 155849 - DNA, 25 bp, SARS Virus
aacattggaactcgtgaaaacttta

SEQ ID NO: 155850 - DNA, 25 bp, SARS Virus
acattggaactgctgaaaactttag

SEQ ID NO: 155851 - DNA, 25 bp, SARS Virus
cattggaactggcgaaaactttagt

SEQ ID NO: 155852 - DNA, 25 bp, SARS Virus
attggaactggtcaaaactttagtg

SEQ ID NO: 155853 - DNA, 25 bp, SARS Virus
ttggaactggtgcaaactttagtga

SEQ ID NO: 155854 - DNA, 25 bp, SARS Virus
tggaactggtgacaactttagtgac

SEQ ID NO: 155855 - DNA, 25 bp, SARS Virus
ggaactggtgaacactttagtgact

SEQ ID NO: 155856 - DNA, 25 bp, SARS Virus
gaactggtgaaacctttagtgactg

SEQ ID NO: 155857 - DNA, 25 bp, SARS Virus
aactggtgaaaactttagtgactgt

SEQ ID NO: 155858 - DNA, 25 bp, SARS Virus
actggtgaaaaccttagtgactgtt

SEQ ID NO: 155859 - DNA, 25 bp, SARS Virus
ctggtgaaaactctagtgactgttt

SEQ ID NO: 155860 - DNA, 25 bp, SARS Virus
tggtgaaaacttcagtgactgttta

SEQ ID NO: 155861 - DNA, 25 bp, SARS Virus
ggtgaaaactttcgtgactgtttag

SEQ ID NO: 155862 - DNA, 25 bp, SARS Virus
gtgaaaactttactgactgtttaga

SEQ ID NO: 155863 - DNA, 25 bp, SARS Virus
tgaaaactttagcgactgtttagaa

SEQ ID NO: 155864 - DNA, 25 bp, SARS Virus
gaaaactttagtcactgtttagaac

SEQ ID NO: 155865 - DNA, 25 bp, SARS Virus
aaaactttagtgcctgtttagaaca

SEQ ID NO: 155866 - DNA, 25 bp, SARS Virus
aaactttagtgactgtttagaacac

SEQ ID NO: 155867 - DNA, 25 bp, SARS Virus
aactttagtgaccgtttagaacact

SEQ ID NO: 155868 - DNA, 25 bp, SARS Virus
actttagtgactctttagaacactg

SEQ ID NO: 155869 - DNA, 25 bp, SARS Virus
ctttagtgactgcttagaacactga

SEQ ID NO: 155870 - DNA, 25 bp, SARS Virus
tttagtgactgtctagaacactgaa

SEQ ID NO: 155871 - DNA, 25 bp, SARS Virus
ttagtgactgttcagaacactgaaa

SEQ ID NO: 155872 - DNA, 25 bp, SARS Virus
tagtgactgtttcgaacactgaaat

SEQ ID NO: 155873 - DNA, 25 bp, SARS Virus
agtgactgtttacaacactgaaata

SEQ ID NO: 155874 - DNA, 25 bp, SARS Virus
gtgactgtttagcacactgaaataa

SEQ ID NO: 155875 - DNA, 25 bp, SARS Virus
tgactgtttagaccactgaaataat

SEQ ID NO: 155876 - DNA, 25 bp, SARS Virus
gactgtttagaacactgaaataata

SEQ ID NO: 155877 - DNA, 25 bp, SARS Virus
actgtttagaaccctgaaataatag

SEQ ID NO: 155878 - DNA, 25 bp, SARS Virus
ctgtttagaacactgaaataataga

SEQ ID NO: 155879 - DNA, 25 bp, SARS Virus
tgtttagaacaccgaaataatagag

SEQ ID NO: 155880 - DNA, 25 bp, SARS Virus
gtttagaacactcaaataatagagc

SEQ ID NO: 155881 - DNA, 25 bp, SARS Virus
tttagaacactgcaataatagagct

SEQ ID NO: 155882 - DNA, 25 bp, SARS Virus
ttagaacactgacataatagagctg

SEQ ID NO: 155883 - DNA, 25 bp, SARS Virus
tagaacactgaactaatagagctgt

SEQ ID NO: 155884 - DNA, 25 bp, SARS Virus
agaacactgaaacaatagagctgtt

SEQ ID NO: 155885 - DNA, 25 bp, SARS Virus
gaacactgaaatcatagagctgttt

SEQ ID NO: 155886 - DNA, 25 bp, SARS Virus
aacactgaaatactagagctgtttc

SEQ ID NO: 155887 - DNA, 25 bp, SARS Virus
acactgaaataacagagctgtttca

SEQ ID NO: 155888 - DNA, 25 bp, SARS Virus
cactgaaataatcgagctgtttcag

SEQ ID NO: 155889 - DNA, 25 bp, SARS Virus
actgaaataatacagctgtttcagt

SEQ ID NO: 155890 - DNA, 25 bp, SARS Virus
ctgaaataatagcgctgtttcagta

SEQ ID NO: 155891 - DNA, 25 bp, SARS Virus
tgaaataatagacctgtttcagtag

SEQ ID NO: 155892 - DNA, 25 bp, SARS Virus
gaaataatagagctgtttcagtagt

SEQ ID NO: 155893 - DNA, 25 bp, SARS Virus
aaataatagagccgtttcagtagtt

SEQ ID NO: 155894 - DNA, 25 bp, SARS Virus
aataatagagctctttcagtagttc

SEQ ID NO: 155895 - DNA, 25 bp, SARS Virus
ataatagagctgcttcagtagttca

SEQ ID NO: 155896 - DNA, 25 bp, SARS Virus
taatagagctgtctcagtagttcat

SEQ ID NO: 155897 - DNA, 25 bp, SARS Virus
aatagagctgttccagtagttcatt

SEQ ID NO: 155898 - DNA, 25 bp, SARS Virus
atagagctgtttcagtagttcattt

SEQ ID NO: 155899 - DNA, 25 bp, SARS Virus
tagagctgtttccgtagttcatttt

SEQ ID NO: 155900 - DNA, 25 bp, SARS Virus
agagctgtttcactagttcattttc

SEQ ID NO: 155901 - DNA, 25 bp, SARS Virus
gagctgtttcagcagttcattttct

SEQ ID NO: 155902 - DNA, 25 bp, SARS Virus
agctgtttcagtcgttcattttcta

SEQ ID NO: 155903 - DNA, 25 bp, SARS Virus
gctgtttcagtacttcattttctag

SEQ ID NO: 155904 - DNA, 25 bp, SARS Virus
ctgtttcagtagctcattttctagt

SEQ ID NO: 155905 - DNA, 25 bp, SARS Virus
tgtttcagtagtccattttctagtt

SEQ ID NO: 155906 - DNA, 25 bp, SARS Virus
gtttcagtagttcattttctagtta

SEQ ID NO: 155907 - DNA, 25 bp, SARS Virus
tttcagtagttccttttctagttag

SEQ ID NO: 155908 - DNA, 25 bp, SARS Virus
ttcagtagttcactttctagttagt

SEQ ID NO: 155909 - DNA, 25 bp, SARS Virus
tcagtagttcatcttctagttagtg

SEQ ID NO: 155910 - DNA, 25 bp, SARS Virus
cagtagttcattctctagttagtgt

SEQ ID NO: 155911 - DNA, 25 bp, SARS Virus
agtagttcatttcctagttagtgtc

SEQ ID NO: 155912 - DNA, 25 bp, SARS Virus
gtagttcattttctagttagtgtct

SEQ ID NO: 155913 - DNA, 25 bp, SARS Virus
tagttcattttccagttagtgtctt

SEQ ID NO: 155914 - DNA, 25 bp, SARS Virus
agttcattttctcgttagtgtcttg

SEQ ID NO: 155915 - DNA, 25 bp, SARS Virus
gttcattttctacttagtgtcttgt

SEQ ID NO: 155916 - DNA, 25 bp, SARS Virus
ttcattttctagctagtgtcttgtg

SEQ ID NO: 155917 - DNA, 25 bp, SARS Virus
tcattttctagtcagtgtcttgtgt

SEQ ID NO: 155918 - DNA, 25 bp, SARS Virus
cattttctagttcgtgtcttgtgtg

SEQ ID NO: 155919 - DNA, 25 bp, SARS Virus
attttctagttactgtcttgtgtgt

SEQ ID NO: 155920 - DNA, 25 bp, SARS Virus
ttttctagttagcgtcttgtgtgtg

SEQ ID NO: 155921 - DNA, 25 bp, SARS Virus
tttctagttagtctcttgtgtgtgt

SEQ ID NO: 155922 - DNA, 25 bp, SARS Virus
ttctagttagtgccttgtgtgtgta

SEQ ID NO: 155923 - DNA, 25 bp, SARS Virus
tctagttagtgtcttgtgtgtgtaa

SEQ ID NO: 155924 - DNA, 25 bp, SARS Virus
ctagttagtgtcctgtgtgtgtaaa

SEQ ID NO: 155925 - DNA, 25 bp, SARS Virus
tagttagtgtctcgtgtgtgtaaaa

SEQ ID NO: 155926 - DNA, 25 bp, SARS Virus
agttagtgtcttctgtgtgtaaaac

SEQ ID NO: 155927 - DNA, 25 bp, SARS Virus
gttagtgtcttgcgtgtgtaaaact

SEQ ID NO: 155928 - DNA, 25 bp, SARS Virus
ttagtgtcttgtctgtgtaaaacta

SEQ ID NO: 155929 - DNA, 25 bp, SARS Virus
tagtgtcttgtgcgtgtaaaactac

SEQ ID NO: 155930 - DNA, 25 bp, SARS Virus
agtgtcttgtgtctgtaaaactact

SEQ ID NO: 155931 - DNA, 25 bp, SARS Virus
gtgtcttgtgtgcgtaaaactactt

SEQ ID NO: 155932 - DNA, 25 bp, SARS Virus
tgtcttgtgtgtctaaaactacttg

SEQ ID NO: 155933 - DNA, 25 bp, SARS Virus
gtcttgtgtgtgcaaaactacttgg

SEQ ID NO: 155934 - DNA, 25 bp, SARS Virus
tcttgtgtgtgtcaaactacttgga

SEQ ID NO: 155935 - DNA, 25 bp, SARS Virus
cttgtgtgtgtacaactacttggac

SEQ ID NO: 155936 - DNA, 25 bp, SARS Virus
ttgtgtgtgtaacactacttggaca

SEQ ID NO: 155937 - DNA, 25 bp, SARS Virus
tgtgtgtgtaaacctacttggacaa

SEQ ID NO: 155938 - DNA, 25 bp, SARS Virus
gtgtgtgtaaaactacttggacaaa

SEQ ID NO: 155939 - DNA, 25 bp, SARS Virus
tgtgtgtaaaaccacttggacaaac

SEQ ID NO: 155940 - DNA, 25 bp, SARS Virus
gtgtgtaaaactccttggacaaacg

SEQ ID NO: 155941 - DNA, 25 bp, SARS Virus
tgtgtaaaactacttggacaaacgc

SEQ ID NO: 155942 - DNA, 25 bp, SARS Virus
gtgtaaaactacctggacaaacgcg

SEQ ID NO: 155943 - DNA, 25 bp, SARS Virus
tgtaaaactactcggacaaacgcgt

SEQ ID NO: 155944 - DNA, 25 bp, SARS Virus
gtaaaactacttcgacaaacgcgta

SEQ ID NO: 155945 - DNA, 25 bp, SARS Virus
taaaactacttgcacaaacgcgtag

SEQ ID NO: 155946 - DNA, 25 bp, SARS Virus
aaaactacttggccaaacgcgtaga

SEQ ID NO: 155947 - DNA, 25 bp, SARS Virus
aaactacttggacaaacgcgtagac

SEQ ID NO: 155948 - DNA, 25 bp, SARS Virus
aactacttggaccaacgcgtagaca

SEQ ID NO: 155949 - DNA, 25 bp, SARS Virus
actacttggacacacgcgtagacaa

SEQ ID NO: 155950 - DNA, 25 bp, SARS Virus
ctacttggacaaccgcgtagacaat

SEQ ID NO: 155951 - DNA, 25 bp, SARS Virus
tacttggacaaacgcgtagacaata

SEQ ID NO: 155952 - DNA, 25 bp, SARS Virus
acttggacaaacccgtagacaatac

SEQ ID NO: 155953 - DNA, 25 bp, SARS Virus
cttggacaaacgcgtagacaatact

SEQ ID NO: 155954 - DNA, 25 bp, SARS Virus
ttggacaaacgcctagacaatactt

SEQ ID NO: 155955 - DNA, 25 bp, SARS Virus
tggacaaacgcgcagacaatacttc

SEQ ID NO: 155956 - DNA, 25 bp, SARS Virus
ggacaaacgcgtcgacaatacttca

SEQ ID NO: 155957 - DNA, 25 bp, SARS Virus
gacaaacgcgtacacaatacttcat

SEQ ID NO: 155958 - DNA, 25 bp, SARS Virus
acaaacgcgtagccaatacttcatt

SEQ ID NO: 155959 - DNA, 25 bp, SARS Virus
caaacgcgtagacaatacttcatta

SEQ ID NO: 155960 - DNA, 25 bp, SARS Virus
aaacgcgtagaccatacttcattaa

SEQ ID NO: 155961 - DNA, 25 bp, SARS Virus
aacgcgtagacactacttcattaaa

SEQ ID NO: 155962 - DNA, 25 bp, SARS Virus
acgcgtagacaacacttcattaaaa

SEQ ID NO: 155963 - DNA, 25 bp, SARS Virus
cgcgtagacaatccttcattaaaaa

SEQ ID NO: 155964 - DNA, 25 bp, SARS Virus
gcgtagacaatacttcattaaaaag

SEQ ID NO: 155965 - DNA, 25 bp, SARS Virus
cgtagacaatacctcattaaaaagt

SEQ ID NO: 155966 - DNA, 25 bp, SARS Virus
gtagacaatactccattaaaaagtg

SEQ ID NO: 155967 - DNA, 25 bp, SARS Virus
tagacaatacttcattaaaaagtga

SEQ ID NO: 155968 - DNA, 25 bp, SARS Virus
agacaatacttccttaaaaagtgac

SEQ ID NO: 155969 - DNA, 25 bp, SARS Virus
gacaatacttcactaaaaagtgaca

SEQ ID NO: 155970 - DNA, 25 bp, SARS Virus
acaatacttcatcaaaaagtgacac

SEQ ID NO: 155971 - DNA, 25 bp, SARS Virus
caatacttcattcaaaagtgacacg

SEQ ID NO: 155972 - DNA, 25 bp, SARS Virus
aatacttcattacaaagtgacacga

SEQ ID NO: 155973 - DNA, 25 bp, SARS Virus
atacttcattaacaagtgacacgac

SEQ ID NO: 155974 - DNA, 25 bp, SARS Virus
tacttcattaaacagtgacacgaca

SEQ ID NO: 155975 - DNA, 25 bp, SARS Virus
acttcattaaaacgtgacacgacag

SEQ ID NO: 155976 - DNA, 25 bp, SARS Virus
cttcattaaaaactgacacgacagg

SEQ ID NO: 155977 - DNA, 25 bp, SARS Virus
ttcattaaaaagcgacacgacaggt

SEQ ID NO: 155978 - DNA, 25 bp, SARS Virus
tcattaaaaagtcacacgacaggta

SEQ ID NO: 155979 - DNA, 25 bp, SARS Virus
cattaaaaagtgccacgacaggtat

SEQ ID NO: 155980 - DNA, 25 bp, SARS Virus
attaaaaagtgacacgacaggtatc

SEQ ID NO: 155981 - DNA, 25 bp, SARS Virus
ttaaaaagtgacccgacaggtatcc

SEQ ID NO: 155982 - DNA, 25 bp, SARS Virus
taaaaagtgacacgacaggtatccc

SEQ ID NO: 155983 - DNA, 25 bp, SARS Virus
aaaaagtgacaccacaggtatccct

SEQ ID NO: 155984 - DNA, 25 bp, SARS Virus
aaaagtgacacgccaggtatcccta

SEQ ID NO: 155985 - DNA, 25 bp, SARS Virus
aaagtgacacgacaggtatccctat

SEQ ID NO: 155986 - DNA, 25 bp, SARS Virus
aagtgacacgaccggtatccctatt

SEQ ID NO: 155987 - DNA, 25 bp, SARS Virus
agtgacacgacacgtatccctattt

SEQ ID NO: 155988 - DNA, 25 bp, SARS Virus
gtgacacgacagctatccctatttt

SEQ ID NO: 155989 - DNA, 25 bp, SARS Virus
tgacacgacaggcatccctatttta

SEQ ID NO: 155990 - DNA, 25 bp, SARS Virus
gacacgacaggtctccctattttag

SEQ ID NO: 155991 - DNA, 25 bp, SARS Virus
acacgacaggtacccctattttagg

SEQ ID NO: 155992 - DNA, 25 bp, SARS Virus
cacgacaggtatccctattttagga

SEQ ID NO: 155993 - DNA, 25 bp, SARS Virus
acgacaggtatccctattttaggag

SEQ ID NO: 155994 - DNA, 25 bp, SARS Virus
cgacaggtatccctattttaggaga

SEQ ID NO: 155995 - DNA, 25 bp, SARS Virus
gacaggtatccccattttaggagat

SEQ ID NO: 155996 - DNA, 25 bp, SARS Virus
acaggtatccctcttttaggagatt

SEQ ID NO: 155997 - DNA, 25 bp, SARS Virus
caggtatccctactttaggagatta

SEQ ID NO: 155998 - DNA, 25 bp, SARS Virus
aggtatccctatcttaggagattaa

SEQ ID NO: 155999 - DNA, 25 bp, SARS Virus
ggtatccctattctaggagattaaa

SEQ ID NO: 156000 - DNA, 25 bp, SARS Virus
gtatccctatttcaggagattaaat

SEQ ID NO: 156001 - DNA, 25 bp, SARS Virus
tatccctattttcggagattaaatt

SEQ ID NO: 156002 - DNA, 25 bp, SARS Virus
atccctattttacgagattaaattc

SEQ ID NO: 156003 - DNA, 25 bp, SARS Virus
tccctattttagcagattaaattca

SEQ ID NO: 156004 - DNA, 25 bp, SARS Virus
ccctattttaggcgattaaattcac

SEQ ID NO: 156005 - DNA, 25 bp, SARS Virus
cctattttaggacattaaattcacc

SEQ ID NO: 156006 - DNA, 25 bp, SARS Virus
ctattttaggagcttaaattcacca

SEQ ID NO: 156007 - DNA, 25 bp, SARS Virus
tattttaggagactaaattcaccac

SEQ ID NO: 156008 - DNA, 25 bp, SARS Virus
attttaggagatcaaattcaccact

SEQ ID NO: 156009 - DNA, 25 bp, SARS Virus
ttttaggagattcaattcaccactt

SEQ ID NO: 156010 - DNA, 25 bp, SARS Virus
tttaggagattacattcaccactta

SEQ ID NO: 156011 - DNA, 25 bp, SARS Virus
ttaggagattaacttcaccacttag

SEQ ID NO: 156012 - DNA, 25 bp, SARS Virus
taggagattaaactcaccacttaga

SEQ ID NO: 156013 - DNA, 25 bp, SARS Virus
aggagattaaatccaccacttagaa

SEQ ID NO: 156014 - DNA, 25 bp, SARS Virus
ggagattaaattcaccacttagaac

SEQ ID NO: 156015 - DNA, 25 bp, SARS Virus
gagattaaattccccacttagaaca

SEQ ID NO: 156016 - DNA, 25 bp, SARS Virus
agattaaattcaccacttagaacac

SEQ ID NO: 156017 - DNA, 25 bp, SARS Virus
gattaaattcaccacttagaacact

SEQ ID NO: 156018 - DNA, 25 bp, SARS Virus
attaaattcaccccttagaacactc

SEQ ID NO: 156019 - DNA, 25 bp, SARS Virus
ttaaattcaccacttagaacactcg

SEQ ID NO: 156020 - DNA, 25 bp, SARS Virus
taaattcaccacctagaacactcgc

SEQ ID NO: 156021 - DNA, 25 bp, SARS Virus
aaattcaccactcagaacactcgcg

SEQ ID NO: 156022 - DNA, 25 bp, SARS Virus
aattcaccacttcgaacactcgcga

SEQ ID NO: 156023 - DNA, 25 bp, SARS Virus
attcaccacttacaacactcgcgaa

SEQ ID NO: 156024 - DNA, 25 bp, SARS Virus
ttcaccacttagcacactcgcgaac

SEQ ID NO: 156025 - DNA, 25 bp, SARS Virus
tcaccacttagaccactcgcgaacc

SEQ ID NO: 156026 - DNA, 25 bp, SARS Virus
caccacttagaacactcgcgaaccg

SEQ ID NO: 156027 - DNA, 25 bp, SARS Virus
accacttagaaccctcgcgaaccga

SEQ ID NO: 156028 - DNA, 25 bp, SARS Virus
ccacttagaacactcgcgaaccgat

SEQ ID NO: 156029 - DNA, 25 bp, SARS Virus
cacttagaacacccgcgaaccgatt

SEQ ID NO: 156030 - DNA, 25 bp, SARS Virus
acttagaacactcgcgaaccgattc

SEQ ID NO: 156031 - DNA, 25 bp, SARS Virus
cttagaacactcccgaaccgattcg

SEQ ID NO: 156032 - DNA, 25 bp, SARS Virus
ttagaacactcgcgaaccgattcgg

SEQ ID NO: 156033 - DNA, 25 bp, SARS Virus
tagaacactcgccaaccgattcgga

SEQ ID NO: 156034 - DNA, 25 bp, SARS Virus
agaacactcgcgcaccgattcggat

SEQ ID NO: 156035 - DNA, 25 bp, SARS Virus
gaacactcgcgacccgattcggata

SEQ ID NO: 156036 - DNA, 25 bp, SARS Virus
aacactcgcgaaccgattcggatag

SEQ ID NO: 156037 - DNA, 25 bp, SARS Virus
acactcgcgaaccgattcggatagt

SEQ ID NO: 156038 - DNA, 25 bp, SARS Virus
cactcgcgaacccattcggatagta

SEQ ID NO: 156039 - DNA, 25 bp, SARS Virus
actcgcgaaccgcttcggatagtaa

SEQ ID NO: 156040 - DNA, 25 bp, SARS Virus
ctcgcgaaccgactcggatagtaat

SEQ ID NO: 156041 - DNA, 25 bp, SARS Virus
tcgcgaaccgatccggatagtaatt

SEQ ID NO: 156042 - DNA, 25 bp, SARS Virus
cgcgaaccgattcggatagtaattt

SEQ ID NO: 156043 - DNA, 25 bp, SARS Virus
gcgaaccgattccgatagtaattta

SEQ ID NO: 156044 - DNA, 25 bp, SARS Virus
cgaaccgattcgcatagtaatttac

SEQ ID NO: 156045 - DNA, 25 bp, SARS Virus
gaaccgattcggctagtaatttact

SEQ ID NO: 156046 - DNA, 25 bp, SARS Virus
aaccgattcggacagtaatttactt

SEQ ID NO: 156047 - DNA, 25 bp, SARS Virus
accgattcggatcgtaatttacttc

SEQ ID NO: 156048 - DNA, 25 bp, SARS Virus
ccgattcggatactaatttacttct

SEQ ID NO: 156049 - DNA, 25 bp, SARS Virus
cgattcggatagcaatttacttctg

SEQ ID NO: 156050 - DNA, 25 bp, SARS Virus
gattcggatagtcatttacttctgg

SEQ ID NO: 156051 - DNA, 25 bp, SARS Virus
attcggatagtactttacttctggc

SEQ ID NO: 156052 - DNA, 25 bp, SARS Virus
ttcggatagtaacttacttctggcg

SEQ ID NO: 156053 - DNA, 25 bp, SARS Virus
tcggatagtaatctacttctggcgg

SEQ ID NO: 156054 - DNA, 25 bp, SARS Virus
cggatagtaattcacttctggcggt

SEQ ID NO: 156055 - DNA, 25 bp, SARS Virus
ggatagtaatttccttctggcggtt

SEQ ID NO: 156056 - DNA, 25 bp, SARS Virus
gatagtaatttacttctggcggttc

SEQ ID NO: 156057 - DNA, 25 bp, SARS Virus
atagtaatttacctctggcggttca

SEQ ID NO: 156058 - DNA, 25 bp, SARS Virus
tagtaatttactcctggcggttcaa

SEQ ID NO: 156059 - DNA, 25 bp, SARS Virus
agtaatttacttctggcggttcaac

SEQ ID NO: 156060 - DNA, 25 bp, SARS Virus
gtaatttacttccggcggttcaaca

SEQ ID NO: 156061 - DNA, 25 bp, SARS Virus
taatttacttctcgcggttcaacag

SEQ ID NO: 156062 - DNA, 25 bp, SARS Virus
aatttacttctgccggttcaacagg

SEQ ID NO: 156063 - DNA, 25 bp, SARS Virus
atttacttctggcggttcaacaggt

SEQ ID NO: 156064 - DNA, 25 bp, SARS Virus
tttacttctggccgttcaacaggta

SEQ ID NO: 156065 - DNA, 25 bp, SARS Virus
ttacttctggcgcttcaacaggtac

SEQ ID NO: 156066 - DNA, 25 bp, SARS Virus
tacttctggcggctcaacaggtact

SEQ ID NO: 156067 - DNA, 25 bp, SARS Virus
acttctggcggtccaacaggtactg

SEQ ID NO: 156068 - DNA, 25 bp, SARS Virus
cttctggcggttcaacaggtactga

SEQ ID NO: 156069 - DNA, 25 bp, SARS Virus
ttctggcggttccacaggtactgac

SEQ ID NO: 156070 - DNA, 25 bp, SARS Virus
tctggcggttcaccaggtactgact

SEQ ID NO: 156071 - DNA, 25 bp, SARS Virus
ctggcggttcaacaggtactgactt

SEQ ID NO: 156072 - DNA, 25 bp, SARS Virus
tggcggttcaaccggtactgacttt

SEQ ID NO: 156073 - DNA, 25 bp, SARS Virus
ggcggttcaacacgtactgacttta

SEQ ID NO: 156074 - DNA, 25 bp, SARS Virus
gcggttcaacagctactgactttag

SEQ ID NO: 156075 - DNA, 25 bp, SARS Virus
cggttcaacaggcactgactttaga

SEQ ID NO: 156076 - DNA, 25 bp, SARS Virus
ggttcaacaggtcctgactttagag

SEQ ID NO: 156077 - DNA, 25 bp, SARS Virus
gttcaacaggtactgactttagagg

SEQ ID NO: 156078 - DNA, 25 bp, SARS Virus
ttcaacaggtaccgactttagaggt

SEQ ID NO: 156079 - DNA, 25 bp, SARS Virus
tcaacaggtactcactttagaggta

SEQ ID NO: 156080 - DNA, 25 bp, SARS Virus
caacaggtactgcctttagaggtat

SEQ ID NO: 156081 - DNA, 25 bp, SARS Virus
aacaggtactgactttagaggtatt

SEQ ID NO: 156082 - DNA, 25 bp, SARS Virus
acaggtactgaccttagaggtattt

SEQ ID NO: 156083 - DNA, 25 bp, SARS Virus
caggtactgactctagaggtatttg

SEQ ID NO: 156084 - DNA, 25 bp, SARS Virus
aggtactgacttcagaggtatttgc

SEQ ID NO: 156085 - DNA, 25 bp, SARS Virus
ggtactgactttcgaggtatttgct

SEQ ID NO: 156086 - DNA, 25 bp, SARS Virus
gtactgactttacaggtatttgcta

SEQ ID NO: 156087 - DNA, 25 bp, SARS Virus
tactgactttagcggtatttgctac

SEQ ID NO: 156088 - DNA, 25 bp, SARS Virus
actgactttagacgtatttgctaca

SEQ ID NO: 156089 - DNA, 25 bp, SARS Virus
ctgactttagagctatttgctacac

SEQ ID NO: 156090 - DNA, 25 bp, SARS Virus
tgactttagaggcatttgctacaca

SEQ ID NO: 156091 - DNA, 25 bp, SARS Virus
gactttagaggtctttgctacacaa

SEQ ID NO: 156092 - DNA, 25 bp, SARS Virus
actttagaggtacttgctacacaag

SEQ ID NO: 156093 - DNA, 25 bp, SARS Virus
ctttagaggtatctgctacacaagc

SEQ ID NO: 156094 - DNA, 25 bp, SARS Virus
tttagaggtattcgctacacaagct

SEQ ID NO: 156095 - DNA, 25 bp, SARS Virus
ttagaggtatttcctacacaagctt

SEQ ID NO: 156096 - DNA, 25 bp, SARS Virus
tagaggtatttgctacacaagcttc

SEQ ID NO: 156097 - DNA, 25 bp, SARS Virus
agaggtatttgccacacaagcttcc

SEQ ID NO: 156098 - DNA, 25 bp, SARS Virus
gaggtatttgctccacaagcttccg

SEQ ID NO: 156099 - DNA, 25 bp, SARS Virus
aggtatttgctacacaagcttccgt

SEQ ID NO: 156100 - DNA, 25 bp, SARS Virus
ggtatttgctacccaagcttccgta

SEQ ID NO: 156101 - DNA, 25 bp, SARS Virus
gtatttgctacacaagcttccgtat

SEQ ID NO: 156102 - DNA, 25 bp, SARS Virus
tatttgctacaccagcttccgtatc

SEQ ID NO: 156103 - DNA, 25 bp, SARS Virus
atttgctacacacgcttccgtatcg

SEQ ID NO: 156104 - DNA, 25 bp, SARS Virus
tttgctacacaaccttccgtatcgg

SEQ ID NO: 156105 - DNA, 25 bp, SARS Virus
ttgctacacaagcttccgtatcggg

SEQ ID NO: 156106 - DNA, 25 bp, SARS Virus
tgctacacaagcctccgtatcggga

SEQ ID NO: 156107 - DNA, 25 bp, SARS Virus
gctacacaagctcccgtatcgggag

SEQ ID NO: 156108 - DNA, 25 bp, SARS Virus
ctacacaagcttccgtatcgggagc

SEQ ID NO: 156109 - DNA, 25 bp, SARS Virus
tacacaagcttccgtatcgggagct

SEQ ID NO: 156110 - DNA, 25 bp, SARS Virus
acacaagcttccctatcgggagctc

SEQ ID NO: 156111 - DNA, 25 bp, SARS Virus
cacaagcttccgcatcgggagctcg

SEQ ID NO: 156112 - DNA, 25 bp, SARS Virus
acaagcttccgtctcgggagctcga

SEQ ID NO: 156113 - DNA, 25 bp, SARS Virus
caagcttccgtaccgggagctcgaa

SEQ ID NO: 156114 - DNA, 25 bp, SARS Virus
aagcttccgtatcgggagctcgaat

SEQ ID NO: 156115 - DNA, 25 bp, SARS Virus
agcttccgtatccggagctcgaata

SEQ ID NO: 156116 - DNA, 25 bp, SARS Virus
gcttccgtatcgcgagctcgaatat

SEQ ID NO: 156117 - DNA, 25 bp, SARS Virus
cttccgtatcggcagctcgaatata

SEQ ID NO: 156118 - DNA, 25 bp, SARS Virus
ttccgtatcgggcgctcgaatatag

SEQ ID NO: 156119 - DNA, 25 bp, SARS Virus
tccgtatcgggacctcgaatatagc

SEQ ID NO: 156120 - DNA, 25 bp, SARS Virus
ccgtatcgggagctcgaatatagcg

SEQ ID NO: 156121 - DNA, 25 bp, SARS Virus
cgtatcgggagcccgaatatagcga

SEQ ID NO: 156122 - DNA, 25 bp, SARS Virus
gtatcgggagctcgaatatagcgac

SEQ ID NO: 156123 - DNA, 25 bp, SARS Virus
tatcgggagctccaatatagcgaca

SEQ ID NO: 156124 - DNA, 25 bp, SARS Virus
atcgggagctcgcatatagcgacat

SEQ ID NO: 156125 - DNA, 25 bp, SARS Virus
tcgggagctcgactatagcgacata

SEQ ID NO: 156126 - DNA, 25 bp, SARS Virus
cgggagctcgaacatagcgacatac

SEQ ID NO: 156127 - DNA, 25 bp, SARS Virus
gggagctcgaatctagcgacatact

SEQ ID NO: 156128 - DNA, 25 bp, SARS Virus
ggagctcgaatacagcgacatactt

SEQ ID NO: 156129 - DNA, 25 bp, SARS Virus
gagctcgaatatcgcgacatactta

SEQ ID NO: 156130 - DNA, 25 bp, SARS Virus
agctcgaatataccgacatacttaa

SEQ ID NO: 156131 - DNA, 25 bp, SARS Virus
gctcgaatatagcgacatacttaag

SEQ ID NO: 156132 - DNA, 25 bp, SARS Virus
ctcgaatatagccacatacttaagt

SEQ ID NO: 156133 - DNA, 25 bp, SARS Virus
tcgaatatagcgccatacttaagta

SEQ ID NO: 156134 - DNA, 25 bp, SARS Virus
cgaatatagcgacatacttaagtag

SEQ ID NO: 156135 - DNA, 25 bp, SARS Virus
gaatatagcgacctacttaagtagg

SEQ ID NO: 156136 - DNA, 25 bp, SARS Virus
aatatagcgacacacttaagtaggt

SEQ ID NO: 156137 - DNA, 25 bp, SARS Virus
atatagcgacatccttaagtaggta

SEQ ID NO: 156138 - DNA, 25 bp, SARS Virus
tatagcgacatacttaagtaggtat

SEQ ID NO: 156139 - DNA, 25 bp, SARS Virus
atagcgacatacctaagtaggtatc

SEQ ID NO: 156140 - DNA, 25 bp, SARS Virus
tagcgacatactcaagtaggtatcg

SEQ ID NO: 156141 - DNA, 25 bp, SARS Virus
agcgacatacttcagtaggtatcgc

SEQ ID NO: 156142 - DNA, 25 bp, SARS Virus
gcgacatacttacgtaggtatcgct

SEQ ID NO: 156143 - DNA, 25 bp, SARS Virus
cgacatacttaactaggtatcgctc

SEQ ID NO: 156144 - DNA, 25 bp, SARS Virus
gacatacttaagcaggtatcgctcg

SEQ ID NO: 156145 - DNA, 25 bp, SARS Virus
acatacttaagtcggtatcgctcga

SEQ ID NO: 156146 - DNA, 25 bp, SARS Virus
catacttaagtacgtatcgctcgag

SEQ ID NO: 156147 - DNA, 25 bp, SARS Virus
atacttaagtagctatcgctcgagc

SEQ ID NO: 156148 - DNA, 25 bp, SARS Virus
tacttaagtaggcatcgctcgagct

SEQ ID NO: 156149 - DNA, 25 bp, SARS Virus
acttaagtaggtctcgctcgagctc

SEQ ID NO: 156150 - DNA, 25 bp, SARS Virus
cttaagtaggtaccgctcgagctct

SEQ ID NO: 156151 - DNA, 25 bp, SARS Virus
ttaagtaggtatcgctcgagctctt

SEQ ID NO: 156152 - DNA, 25 bp, SARS Virus
taagtaggtatccctcgagctcttt

SEQ ID NO: 156153 - DNA, 25 bp, SARS Virus
aagtaggtatcgctcgagctctttc

SEQ ID NO: 156154 - DNA, 25 bp, SARS Virus
agtaggtatcgcccgagctctttca

SEQ ID NO: 156155 - DNA, 25 bp, SARS Virus
gtaggtatcgctcgagctctttcag

SEQ ID NO: 156156 - DNA, 25 bp, SARS Virus
taggtatcgctccagctctttcagt

SEQ ID NO: 156157 - DNA, 25 bp, SARS Virus
aggtatcgctcgcgctctttcagtc

SEQ ID NO: 156158 - DNA, 25 bp, SARS Virus
ggtatcgctcgacctctttcagtca

SEQ ID NO: 156159 - DNA, 25 bp, SARS Virus
gtatcgctcgagctctttcagtcaa

SEQ ID NO: 156160 - DNA, 25 bp, SARS Virus
tatcgctcgagccctttcagtcaaa

SEQ ID NO: 156161 - DNA, 25 bp, SARS Virus
atcgctcgagctctttcagtcaaag

SEQ ID NO: 156162 - DNA, 25 bp, SARS Virus
tcgctcgagctccttcagtcaaagg

SEQ ID NO: 156163 - DNA, 25 bp, SARS Virus
cgctcgagctctctcagtcaaaggt

SEQ ID NO: 156164 - DNA, 25 bp, SARS Virus
gctcgagctcttccagtcaaaggta

SEQ ID NO: 156165 - DNA, 25 bp, SARS Virus
ctcgagctctttcagtcaaaggtaa

SEQ ID NO: 156166 - DNA, 25 bp, SARS Virus
tcgagctctttccgtcaaaggtaaa

SEQ ID NO: 156167 - DNA, 25 bp, SARS Virus
cgagctctttcactcaaaggtaaac

SEQ ID NO: 156168 - DNA, 25 bp, SARS Virus
gagctctttcagccaaaggtaaaca

SEQ ID NO: 156169 - DNA, 25 bp, SARS Virus
agctctttcagtcaaaggtaaacac

SEQ ID NO: 156170 - DNA, 25 bp, SARS Virus
gctctttcagtccaaggtaaacact

SEQ ID NO: 156171 - DNA, 25 bp, SARS Virus
ctctttcagtcacaggtaaacacta

SEQ ID NO: 156172 - DNA, 25 bp, SARS Virus
tctttcagtcaacggtaaacactag

SEQ ID NO: 156173 - DNA, 25 bp, SARS Virus
ctttcagtcaaacgtaaacactaga

SEQ ID NO: 156174 - DNA, 25 bp, SARS Virus
tttcagtcaaagctaaacactagac

SEQ ID NO: 156175 - DNA, 25 bp, SARS Virus
ttcagtcaaaggcaaacactagacc

SEQ ID NO: 156176 - DNA, 25 bp, SARS Virus
tcagtcaaaggtcaacactagaccc

SEQ ID NO: 156177 - DNA, 25 bp, SARS Virus
cagtcaaaggtacacactagacccg

SEQ ID NO: 156178 - DNA, 25 bp, SARS Virus
agtcaaaggtaaccactagacccga

SEQ ID NO: 156179 - DNA, 25 bp, SARS Virus
gtcaaaggtaaacactagacccgaa

SEQ ID NO: 156180 - DNA, 25 bp, SARS Virus
tcaaaggtaaaccctagacccgaat

SEQ ID NO: 156181 - DNA, 25 bp, SARS Virus
caaaggtaaacactagacccgaatt

SEQ ID NO: 156182 - DNA, 25 bp, SARS Virus
aaaggtaaacaccagacccgaattt

SEQ ID NO: 156183 - DNA, 25 bp, SARS Virus
aaggtaaacactcgacccgaatttt

SEQ ID NO: 156184 - DNA, 25 bp, SARS Virus
aggtaaacactacacccgaatttta

SEQ ID NO: 156185 - DNA, 25 bp, SARS Virus
ggtaaacactagccccgaattttag

SEQ ID NO: 156186 - DNA, 25 bp, SARS Virus
gtaaacactagacccgaattttagg

SEQ ID NO: 156187 - DNA, 25 bp, SARS Virus
taaacactagacccgaattttagga

SEQ ID NO: 156188 - DNA, 25 bp, SARS Virus
aaacactagacccgaattttaggag

SEQ ID NO: 156189 - DNA, 25 bp, SARS Virus
aacactagaccccaattttaggaga

SEQ ID NO: 156190 - DNA, 25 bp, SARS Virus
acactagacccgcattttaggagat

SEQ ID NO: 156191 - DNA, 25 bp, SARS Virus
cactagacccgacttttaggagatt

SEQ ID NO: 156192 - DNA, 25 bp, SARS Virus
actagacccgaactttaggagattc

SEQ ID NO: 156193 - DNA, 25 bp, SARS Virus
aaagttcttcgtgagaaacgtagaa

SEQ ID NO: 156194 - DNA, 25 bp, SARS Virus
aagttcttcgtaggaaacgtagaac

SEQ ID NO: 156195 - DNA, 25 bp, SARS Virus
agttcttcgtaagaaacgtagaaca

SEQ ID NO: 156196 - DNA, 25 bp, SARS Virus
gttcttcgtaaggaacgtagaacat

SEQ ID NO: 156197 - DNA, 25 bp, SARS Virus
ttcttcgtaagagacgtagaacatg

SEQ ID NO: 156198 - DNA, 25 bp, SARS Virus
tcttcgtaagaagcgtagaacatgt

SEQ ID NO: 156199 - DNA, 25 bp, SARS Virus
cttcgtaagaaaggtagaacatgtt

SEQ ID NO: 156200 - DNA, 25 bp, SARS Virus
ttcgtaagaaacgtagaacatgttc

SEQ ID NO: 156201 - DNA, 25 bp, SARS Virus
tcgtaagaaacggagaacatgttca

SEQ ID NO: 156202 - DNA, 25 bp, SARS Virus
cgtaagaaacgtggaacatgttcaa

SEQ ID NO: 156203 - DNA, 25 bp, SARS Virus
gtaagaaacgtagaacatgttcaat

SEQ ID NO: 156204 - DNA, 25 bp, SARS Virus
taagaaacgtaggacatgttcaatc

SEQ ID NO: 156205 - DNA, 25 bp, SARS Virus
aagaaacgtagagcatgttcaatcc

SEQ ID NO: 156206 - DNA, 25 bp, SARS Virus
agaaacgtagaagatgttcaatccg

SEQ ID NO: 156207 - DNA, 25 bp, SARS Virus
gaaacgtagaacgtgttcaatccgt

SEQ ID NO: 156208 - DNA, 25 bp, SARS Virus
aaacgtagaacaggttcaatccgta

SEQ ID NO: 156209 - DNA, 25 bp, SARS Virus
aacgtagaacatgttcaatccgtag

SEQ ID NO: 156210 - DNA, 25 bp, SARS Virus
acgtagaacatggtcaatccgtagc

SEQ ID NO: 156211 - DNA, 25 bp, SARS Virus
cgtagaacatgtgcaatccgtagcg

SEQ ID NO: 156212 - DNA, 25 bp, SARS Virus
gtagaacatgttgaatccgtagcgt

SEQ ID NO: 156213 - DNA, 25 bp, SARS Virus
tagaacatgttcgatccgtagcgtt

SEQ ID NO: 156214 - DNA, 25 bp, SARS Virus
agaacatgttcagtccgtagcgttg

SEQ ID NO: 156215 - DNA, 25 bp, SARS Virus
gaacatgttcaagccgtagcgttgt

SEQ ID NO: 156216 - DNA, 25 bp, SARS Virus
aacatgttcaatgcgtagcgttgtg

SEQ ID NO: 156217 - DNA, 25 bp, SARS Virus
acatgttcaatcggtagcgttgtgg

SEQ ID NO: 156218 - DNA, 25 bp, SARS Virus
catgttcaatccgtagcgttgtgga

SEQ ID NO: 156219 - DNA, 25 bp, SARS Virus
atgttcaatccggagcgttgtggac

SEQ ID NO: 156220 - DNA, 25 bp, SARS Virus
tgttcaatccgtggcgttgtggacc

SEQ ID NO: 156221 - DNA, 25 bp, SARS Virus
gttcaatccgtagcgttgtggacca

SEQ ID NO: 156222 - DNA, 25 bp, SARS Virus
ttcaatccgtagggttgtggaccaa

SEQ ID NO: 156223 - DNA, 25 bp, SARS Virus
tcaatccgtagcgttgtggaccaac

SEQ ID NO: 156224 - DNA, 25 bp, SARS Virus
caatccgtagcggtgtggaccaacg

SEQ ID NO: 156225 - DNA, 25 bp, SARS Virus
aatccgtagcgtggtggaccaacgg

SEQ ID NO: 156226 - DNA, 25 bp, SARS Virus
atccgtagcgttgtggaccaacggt

SEQ ID NO: 156227 - DNA, 25 bp, SARS Virus
tccgtagcgttggggaccaacggtg

SEQ ID NO: 156228 - DNA, 25 bp, SARS Virus
ccgtagcgttgtggaccaacggtgc

SEQ ID NO: 156229 - DNA, 25 bp, SARS Virus
cgtagcgttgtggaccaacggtgcg

SEQ ID NO: 156230 - DNA, 25 bp, SARS Virus
gtagcgttgtgggccaacggtgcga

SEQ ID NO: 156231 - DNA, 25 bp, SARS Virus
tagcgttgtggagcaacggtgcgaa

SEQ ID NO: 156232 - DNA, 25 bp, SARS Virus
agcgttgtggacgaacggtgcgaac

SEQ ID NO: 156233 - DNA, 25 bp, SARS Virus
gcgttgtggaccgacggtgcgaact

SEQ ID NO: 156234 - DNA, 25 bp, SARS Virus
cgttgtggaccagcggtgcgaactg

SEQ ID NO: 156235 - DNA, 25 bp, SARS Virus
gttgtggaccaagggtgcgaactga

SEQ ID NO: 156236 - DNA, 25 bp, SARS Virus
ttgtggaccaacggtgcgaactgaa

SEQ ID NO: 156237 - DNA, 25 bp, SARS Virus
tgtggaccaacggtgcgaactgaac

SEQ ID NO: 156238 - DNA, 25 bp, SARS Virus
gtggaccaacggggcgaactgaacg

SEQ ID NO: 156239 - DNA, 25 bp, SARS Virus
tggaccaacggtgcgaactgaacga

SEQ ID NO: 156240 - DNA, 25 bp, SARS Virus
ggaccaacggtgggaactgaacgaa

SEQ ID NO: 156241 - DNA, 25 bp, SARS Virus
gaccaacggtgcgaactgaacgaac

SEQ ID NO: 156242 - DNA, 25 bp, SARS Virus
accaacggtgcggactgaacgaaca

SEQ ID NO: 156243 - DNA, 25 bp, SARS Virus
ccaacggtgcgagctgaacgaacat

SEQ ID NO: 156244 - DNA, 25 bp, SARS Virus
caacggtgcgaagtgaacgaacatc

SEQ ID NO: 156245 - DNA, 25 bp, SARS Virus
aacggtgcgaacggaacgaacatca

SEQ ID NO: 156246 - DNA, 25 bp, SARS Virus
acggtgcgaactgaacgaacatcaa

SEQ ID NO: 156247 - DNA, 25 bp, SARS Virus
cggtgcgaactggacgaacatcaaa

SEQ ID NO: 156248 - DNA, 25 bp, SARS Virus
ggtgcgaactgagcgaacatcaaaa

SEQ ID NO: 156249 - DNA, 25 bp, SARS Virus
gtgcgaactgaaggaacatcaaaac

SEQ ID NO: 156250 - DNA, 25 bp, SARS Virus
tgcgaactgaacgaacatcaaaacc

SEQ ID NO: 156251 - DNA, 25 bp, SARS Virus
gcgaactgaacggacatcaaaaccc

SEQ ID NO: 156252 - DNA, 25 bp, SARS Virus
cgaactgaacgagcatcaaaaccca

SEQ ID NO: 156253 - DNA, 25 bp, SARS Virus
gaactgaacgaagatcaaaacccat

SEQ ID NO: 156254 - DNA, 25 bp, SARS Virus
aactgaacgaacgtcaaaacccatc

SEQ ID NO: 156255 - DNA, 25 bp, SARS Virus
actgaacgaacagcaaaacccatct

SEQ ID NO: 156256 - DNA, 25 bp, SARS Virus
ctgaacgaacatgaaaacccatctt

SEQ ID NO: 156257 - DNA, 25 bp, SARS Virus
tgaacgaacatcgaaacccatcttc

SEQ ID NO: 156258 - DNA, 25 bp, SARS Virus
gaacgaacatcagaacccatcttcc

SEQ ID NO: 156259 - DNA, 25 bp, SARS Virus
aacgaacatcaagacccatcttcca

SEQ ID NO: 156260 - DNA, 25 bp, SARS Virus
acgaacatcaaagcccatcttccaa

SEQ ID NO: 156261 - DNA, 25 bp, SARS Virus
cgaacatcaaaagccatcttccaaa

SEQ ID NO: 156262 - DNA, 25 bp, SARS Virus
gaacatcaaaacgcatcttccaaag

SEQ ID NO: 156263 - DNA, 25 bp, SARS Virus
aacatcaaaaccgatcttccaaagt

SEQ ID NO: 156264 - DNA, 25 bp, SARS Virus
acatcaaaacccgtcttccaaagtt

SEQ ID NO: 156265 - DNA, 25 bp, SARS Virus
catcaaaacccagcttccaaagttg

SEQ ID NO: 156266 - DNA, 25 bp, SARS Virus
atcaaaacccatgttccaaagttgt

SEQ ID NO: 156267 - DNA, 25 bp, SARS Virus
tcaaaacccatcgtccaaagttgta

SEQ ID NO: 156268 - DNA, 25 bp, SARS Virus
caaaacccatctgccaaagttgtac

SEQ ID NO: 156269 - DNA, 25 bp, SARS Virus
aaaacccatcttgcaaagttgtaca

SEQ ID NO: 156270 - DNA, 25 bp, SARS Virus
aaacccatcttcgaaagttgtacag

SEQ ID NO: 156271 - DNA, 25 bp, SARS Virus
aacccatcttccgaagttgtacagg

SEQ ID NO: 156272 - DNA, 25 bp, SARS Virus
acccatcttccagagttgtacaggt

SEQ ID NO: 156273 - DNA, 25 bp, SARS Virus
cccatcttccaaggttgtacaggta

SEQ ID NO: 156274 - DNA, 25 bp, SARS Virus
ccatcttccaaagttgtacaggtag

SEQ ID NO: 156275 - DNA, 25 bp, SARS Virus
catcttccaaaggtgtacaggtagg

SEQ ID NO: 156276 - DNA, 25 bp, SARS Virus
atcttccaaagtggtacaggtagga

SEQ ID NO: 156277 - DNA, 25 bp, SARS Virus
tcttccaaagttgtacaggtaggaa

SEQ ID NO: 156278 - DNA, 25 bp, SARS Virus
cttccaaagttggacaggtaggaat

SEQ ID NO: 156279 - DNA, 25 bp, SARS Virus
ttccaaagttgtgcaggtaggaatg

SEQ ID NO: 156280 - DNA, 25 bp, SARS Virus
tccaaagttgtagaggtaggaatgt

SEQ ID NO: 156281 - DNA, 25 bp, SARS Virus
ccaaagttgtacgggtaggaatgtg

SEQ ID NO: 156282 - DNA, 25 bp, SARS Virus
caaagttgtacaggtaggaatgtgg

SEQ ID NO: 156283 - DNA, 25 bp, SARS Virus
aaagttgtacaggtaggaatgtggt

SEQ ID NO: 156284 - DNA, 25 bp, SARS Virus
aagttgtacagggaggaatgtggtt

SEQ ID NO: 156285 - DNA, 25 bp, SARS Virus
agttgtacaggtgggaatgtggttt

SEQ ID NO: 156286 - DNA, 25 bp, SARS Virus
gttgtacaggtaggaatgtggtttc

SEQ ID NO: 156287 - DNA, 25 bp, SARS Virus
ttgtacaggtaggaatgtggtttcg

SEQ ID NO: 156288 - DNA, 25 bp, SARS Virus
tgtacaggtagggatgtggtttcgt

SEQ ID NO: 156289 - DNA, 25 bp, SARS Virus
gtacaggtaggagtgtggtttcgta

SEQ ID NO: 156290 - DNA, 25 bp, SARS Virus
tacaggtaggaaggtggtttcgtac

SEQ ID NO: 156291 - DNA, 25 bp, SARS Virus
acaggtaggaatgtggtttcgtact

SEQ ID NO: 156292 - DNA, 25 bp, SARS Virus
caggtaggaatggggtttcgtactt

SEQ ID NO: 156293 - DNA, 25 bp, SARS Virus
aggtaggaatgtggtttcgtactta

SEQ ID NO: 156294 - DNA, 25 bp, SARS Virus
ggtaggaatgtggtttcgtacttac

SEQ ID NO: 156295 - DNA, 25 bp, SARS Virus
gtaggaatgtgggttcgtacttact

SEQ ID NO: 156296 - DNA, 25 bp, SARS Virus
taggaatgtggtgtcgtacttactt

SEQ ID NO: 156297 - DNA, 25 bp, SARS Virus
aggaatgtggttgcgtacttacttt

SEQ ID NO: 156298 - DNA, 25 bp, SARS Virus
ggaatgtggtttggtacttacttta

SEQ ID NO: 156299 - DNA, 25 bp, SARS Virus
gaatgtggtttcgtacttactttaa

SEQ ID NO: 156300 - DNA, 25 bp, SARS Virus
aatgtggtttcggacttactttaaa

SEQ ID NO: 156301 - DNA, 25 bp, SARS Virus
atgtggtttcgtgcttactttaaag

SEQ ID NO: 156302 - DNA, 25 bp, SARS Virus
tgtggtttcgtagttactttaaagt

SEQ ID NO: 156303 - DNA, 25 bp, SARS Virus
gtggtttcgtacgtactttaaagtc

SEQ ID NO: 156304 - DNA, 25 bp, SARS Virus
tggtttcgtactgactttaaagtcg

SEQ ID NO: 156305 - DNA, 25 bp, SARS Virus
ggtttcgtacttgctttaaagtcgt

SEQ ID NO: 156306 - DNA, 25 bp, SARS Virus
gtttcgtacttagtttaaagtcgta

SEQ ID NO: 156307 - DNA, 25 bp, SARS Virus
tttcgtacttacgttaaagtcgtat

SEQ ID NO: 156308 - DNA, 25 bp, SARS Virus
ttcgtacttactgtaaagtcgtatc

SEQ ID NO: 156309 - DNA, 25 bp, SARS Virus
tcgtacttacttgaaagtcgtatca

SEQ ID NO: 156310 - DNA, 25 bp, SARS Virus
cgtacttactttgaagtcgtatcag

SEQ ID NO: 156311 - DNA, 25 bp, SARS Virus
gtacttactttagagtcgtatcagt

SEQ ID NO: 156312 - DNA, 25 bp, SARS Virus
tacttactttaaggtcgtatcagtt

SEQ ID NO: 156313 - DNA, 25 bp, SARS Virus
acttactttaaagtcgtatcagtta

SEQ ID NO: 156314 - DNA, 25 bp, SARS Virus
cttactttaaaggcgtatcagttaa

SEQ ID NO: 156315 - DNA, 25 bp, SARS Virus
ttactttaaagtggtatcagttaac

SEQ ID NO: 156316 - DNA, 25 bp, SARS Virus
tactttaaagtcgtatcagttaaca

SEQ ID NO: 156317 - DNA, 25 bp, SARS Virus
actttaaagtcggatcagttaacat

SEQ ID NO: 156318 - DNA, 25 bp, SARS Virus
ctttaaagtcgtgtcagttaacatt

SEQ ID NO: 156319 - DNA, 25 bp, SARS Virus
tttaaagtcgtagcagttaacattg

SEQ ID NO: 156320 - DNA, 25 bp, SARS Virus
ttaaagtcgtatgagttaacattgg

SEQ ID NO: 156321 - DNA, 25 bp, SARS Virus
taaagtcgtatcggttaacattgga

SEQ ID NO: 156322 - DNA, 25 bp, SARS Virus
aaagtcgtatcagttaacattggaa

SEQ ID NO: 156323 - DNA, 25 bp, SARS Virus
aagtcgtatcaggtaacattggaac

SEQ ID NO: 156324 - DNA, 25 bp, SARS Virus
agtcgtatcagtgaacattggaact

SEQ ID NO: 156325 - DNA, 25 bp, SARS Virus
gtcgtatcagttgacattggaactg

SEQ ID NO: 156326 - DNA, 25 bp, SARS Virus
tcgtatcagttagcattggaactgg

SEQ ID NO: 156327 - DNA, 25 bp, SARS Virus
cgtatcagttaagattggaactggt

SEQ ID NO: 156328 - DNA, 25 bp, SARS Virus
gtatcagttaacgttggaactggtg

SEQ ID NO: 156329 - DNA, 25 bp, SARS Virus
tatcagttaacagtggaactggtga

SEQ ID NO: 156330 - DNA, 25 bp, SARS Virus
atcagttaacatgggaactggtgaa

SEQ ID NO: 156331 - DNA, 25 bp, SARS Virus
tcagttaacattggaactggtgaaa

SEQ ID NO: 156332 - DNA, 25 bp, SARS Virus
cagttaacattggaactggtgaaaa

SEQ ID NO: 156333 - DNA, 25 bp, SARS Virus
agttaacattgggactggtgaaaac

SEQ ID NO: 156334 - DNA, 25 bp, SARS Virus
gttaacattggagctggtgaaaact

SEQ ID NO: 156335 - DNA, 25 bp, SARS Virus
ttaacattggaagtggtgaaaactt

SEQ ID NO: 156336 - DNA, 25 bp, SARS Virus
taacattggaacgggtgaaaacttt

SEQ ID NO: 156337 - DNA, 25 bp, SARS Virus
aacattggaactggtgaaaacttta

SEQ ID NO: 156338 - DNA, 25 bp, SARS Virus
acattggaactggtgaaaactttag

SEQ ID NO: 156339 - DNA, 25 bp, SARS Virus
cattggaactggggaaaactttagt

SEQ ID NO: 156340 - DNA, 25 bp, SARS Virus
attggaactggtgaaaactttagtg

SEQ ID NO: 156341 - DNA, 25 bp, SARS Virus
ttggaactggtggaaactttagtga

SEQ ID NO: 156342 - DNA, 25 bp, SARS Virus
tggaactggtgagaactttagtgac

SEQ ID NO: 156343 - DNA, 25 bp, SARS Virus
ggaactggtgaagactttagtgact

SEQ ID NO: 156344 - DNA, 25 bp, SARS Virus
gaactggtgaaagctttagtgactg

SEQ ID NO: 156345 - DNA, 25 bp, SARS Virus
aactggtgaaaagtttagtgactgt

SEQ ID NO: 156346 - DNA, 25 bp, SARS Virus
actggtgaaaacgttagtgactgtt

SEQ ID NO: 156347 - DNA, 25 bp, SARS Virus
ctggtgaaaactgtagtgactgttt

SEQ ID NO: 156348 - DNA, 25 bp, SARS Virus
tggtgaaaacttgagtgactgttta

SEQ ID NO: 156349 - DNA, 25 bp, SARS Virus
ggtgaaaactttggtgactgtttag

SEQ ID NO: 156350 - DNA, 25 bp, SARS Virus
gtgaaaactttagtgactgtttaga

SEQ ID NO: 156351 - DNA, 25 bp, SARS Virus
tgaaaactttagggactgtttagaa

SEQ ID NO: 156352 - DNA, 25 bp, SARS Virus
gaaaactttagtgactgtttagaac

SEQ ID NO: 156353 - DNA, 25 bp, SARS Virus
aaaactttagtggctgtttagaaca

SEQ ID NO: 156354 - DNA, 25 bp, SARS Virus
aaactttagtgagtgtttagaacac

SEQ ID NO: 156355 - DNA, 25 bp, SARS Virus
aactttagtgacggtttagaacact

SEQ ID NO: 156356 - DNA, 25 bp, SARS Virus
actttagtgactgtttagaacactg

SEQ ID NO: 156357 - DNA, 25 bp, SARS Virus
ctttagtgactggttagaacactga

SEQ ID NO: 156358 - DNA, 25 bp, SARS Virus
tttagtgactgtgtagaacactgaa

SEQ ID NO: 156359 - DNA, 25 bp, SARS Virus
ttagtgactgttgagaacactgaaa

SEQ ID NO: 156360 - DNA, 25 bp, SARS Virus
tagtgactgtttggaacactgaaat

SEQ ID NO: 156361 - DNA, 25 bp, SARS Virus
agtgactgtttagaacactgaaata

SEQ ID NO: 156362 - DNA, 25 bp, SARS Virus
gtgactgtttaggacactgaaataa

SEQ ID NO: 156363 - DNA, 25 bp, SARS Virus
tgactgtttagagcactgaaataat

SEQ ID NO: 156364 - DNA, 25 bp, SARS Virus
gactgtttagaagactgaaataata

SEQ ID NO: 156365 - DNA, 25 bp, SARS Virus
actgtttagaacgctgaaataatag

SEQ ID NO: 156366 - DNA, 25 bp, SARS Virus
ctgtttagaacagtgaaataataga

SEQ ID NO: 156367 - DNA, 25 bp, SARS Virus
tgtttagaacacggaaataatagag

SEQ ID NO: 156368 - DNA, 25 bp, SARS Virus
gtttagaacactgaaataatagagc

SEQ ID NO: 156369 - DNA, 25 bp, SARS Virus
tttagaacactggaataatagagct

SEQ ID NO: 156370 - DNA, 25 bp, SARS Virus
ttagaacactgagataatagagctg

SEQ ID NO: 156371 - DNA, 25 bp, SARS Virus
tagaacactgaagtaatagagctgt

SEQ ID NO: 156372 - DNA, 25 bp, SARS Virus
agaacactgaaagaatagagctgtt

SEQ ID NO: 156373 - DNA, 25 bp, SARS Virus
gaacactgaaatgatagagctgttt

SEQ ID NO: 156374 - DNA, 25 bp, SARS Virus
aacactgaaatagtagagctgtttc

SEQ ID NO: 156375 - DNA, 25 bp, SARS Virus
acactgaaataagagagctgtttca

SEQ ID NO: 156376 - DNA, 25 bp, SARS Virus
cactgaaataatggagctgtttcag

SEQ ID NO: 156377 - DNA, 25 bp, SARS Virus
actgaaataatagagctgtttcagt

SEQ ID NO: 156378 - DNA, 25 bp, SARS Virus
ctgaaataatagggctgtttcagta

SEQ ID NO: 156379 - DNA, 25 bp, SARS Virus
tgaaataatagagctgtttcagtag

SEQ ID NO: 156380 - DNA, 25 bp, SARS Virus
gaaataatagaggtgtttcagtagt

SEQ ID NO: 156381 - DNA, 25 bp, SARS Virus
aaataatagagcggtttcagtagtt

SEQ ID NO: 156382 - DNA, 25 bp, SARS Virus
aataatagagctgtttcagtagttc

SEQ ID NO: 156383 - DNA, 25 bp, SARS Virus
ataatagagctggttcagtagttca

SEQ ID NO: 156384 - DNA, 25 bp, SARS Virus
taatagagctgtgtcagtagttcat

SEQ ID NO: 156385 - DNA, 25 bp, SARS Virus
aatagagctgttgcagtagttcatt

SEQ ID NO: 156386 - DNA, 25 bp, SARS Virus
atagagctgtttgagtagttcattt

SEQ ID NO: 156387 - DNA, 25 bp, SARS Virus
tagagctgtttcggtagttcatttt

SEQ ID NO: 156388 - DNA, 25 bp, SARS Virus
agagctgtttcagtagttcattttc

SEQ ID NO: 156389 - DNA, 25 bp, SARS Virus
gagctgtttcaggagttcattttct

SEQ ID NO: 156390 - DNA, 25 bp, SARS Virus
agctgtttcagtggttcattttcta

SEQ ID NO: 156391 - DNA, 25 bp, SARS Virus
gctgtttcagtagttcattttctag

SEQ ID NO: 156392 - DNA, 25 bp, SARS Virus
ctgtttcagtaggtcattttctagt

SEQ ID NO: 156393 - DNA, 25 bp, SARS Virus
tgtttcagtagtgcattttctagtt

SEQ ID NO: 156394 - DNA, 25 bp, SARS Virus
gtttcagtagttgattttctagtta

SEQ ID NO: 156395 - DNA, 25 bp, SARS Virus
tttcagtagttcgttttctagttag

SEQ ID NO: 156396 - DNA, 25 bp, SARS Virus
ttcagtagttcagtttctagttagt

SEQ ID NO: 156397 - DNA, 25 bp, SARS Virus
tcagtagttcatgttctagttagtg

SEQ ID NO: 156398 - DNA, 25 bp, SARS Virus
cagtagttcattgtctagttagtgt

SEQ ID NO: 156399 - DNA, 25 bp, SARS Virus
agtagttcatttgctagttagtgtc

SEQ ID NO: 156400 - DNA, 25 bp, SARS Virus
gtagttcattttgtagttagtgtct

SEQ ID NO: 156401 - DNA, 25 bp, SARS Virus
tagttcattttcgagttagtgtctt

SEQ ID NO: 156402 - DNA, 25 bp, SARS Virus
agttcattttctggttagtgtcttg

SEQ ID NO: 156403 - DNA, 25 bp, SARS Virus
gttcattttctagttagtgtcttgt

SEQ ID NO: 156404 - DNA, 25 bp, SARS Virus
ttcattttctaggtagtgtcttgtg

SEQ ID NO: 156405 - DNA, 25 bp, SARS Virus
tcattttctagtgagtgtcttgtgt

SEQ ID NO: 156406 - DNA, 25 bp, SARS Virus
cattttctagttggtgtcttgtgtg

SEQ ID NO: 156407 - DNA, 25 bp, SARS Virus
attttctagttagtgtcttgtgtgt

SEQ ID NO: 156408 - DNA, 25 bp, SARS Virus
ttttctagttagggtcttgtgtgtg

SEQ ID NO: 156409 - DNA, 25 bp, SARS Virus
tttctagttagtgtcttgtgtgtgt

SEQ ID NO: 156410 - DNA, 25 bp, SARS Virus
ttctagttagtggcttgtgtgtgta

SEQ ID NO: 156411 - DNA, 25 bp, SARS Virus
tctagttagtgtgttgtgtgtgtaa

SEQ ID NO: 156412 - DNA, 25 bp, SARS Virus
ctagttagtgtcgtgtgtgtgtaaa

SEQ ID NO: 156413 - DNA, 25 bp, SARS Virus
tagttagtgtctggtgtgtgtaaaa

SEQ ID NO: 156414 - DNA, 25 bp, SARS Virus
agttagtgtcttgtgtgtgtaaaac

SEQ ID NO: 156415 - DNA, 25 bp, SARS Virus
gttagtgtcttgggtgtgtaaaact

SEQ ID NO: 156416 - DNA, 25 bp, SARS Virus
ttagtgtcttgtgtgtgtaaaacta

SEQ ID NO: 156417 - DNA, 25 bp, SARS Virus
tagtgtcttgtgggtgtaaaactac

SEQ ID NO: 156418 - DNA, 25 bp, SARS Virus
agtgtcttgtgtgtgtaaaactact

SEQ ID NO: 156419 - DNA, 25 bp, SARS Virus
gtgtcttgtgtgggtaaaactactt

SEQ ID NO: 156420 - DNA, 25 bp, SARS Virus
tgtcttgtgtgtgtaaaactacttg

SEQ ID NO: 156421 - DNA, 25 bp, SARS Virus
gtcttgtgtgtggaaaactacttgg

SEQ ID NO: 156422 - DNA, 25 bp, SARS Virus
tcttgtgtgtgtgaaactacttgga

SEQ ID NO: 156423 - DNA, 25 bp, SARS Virus
cttgtgtgtgtagaactacttggac

SEQ ID NO: 156424 - DNA, 25 bp, SARS Virus
ttgtgtgtgtaagactacttggaca

SEQ ID NO: 156425 - DNA, 25 bp, SARS Virus
tgtgtgtgtaaagctacttggacaa

SEQ ID NO: 156426 - DNA, 25 bp, SARS Virus
gtgtgtgtaaaagtacttggacaaa

SEQ ID NO: 156427 - DNA, 25 bp, SARS Virus
tgtgtgtaaaacgacttggacaaac

SEQ ID NO: 156428 - DNA, 25 bp, SARS Virus
gtgtgtaaaactgcttggacaaacg

SEQ ID NO: 156429 - DNA, 25 bp, SARS Virus
tgtgtaaaactagttggacaaacgc

SEQ ID NO: 156430 - DNA, 25 bp, SARS Virus
gtgtaaaactacgtggacaaacgcg

SEQ ID NO: 156431 - DNA, 25 bp, SARS Virus
tgtaaaactactgggacaaacgcgt

SEQ ID NO: 156432 - DNA, 25 bp, SARS Virus
gtaaaactacttggacaaacgcgta

SEQ ID NO: 156433 - DNA, 25 bp, SARS Virus
taaaactacttggacaaacgcgtag

SEQ ID NO: 156434 - DNA, 25 bp, SARS Virus
aaaactacttgggcaaacgcgtaga

SEQ ID NO: 156435 - DNA, 25 bp, SARS Virus
aaactacttggagaaacgcgtagac

SEQ ID NO: 156436 - DNA, 25 bp, SARS Virus
aactacttggacgaacgcgtagaca

SEQ ID NO: 156437 - DNA, 25 bp, SARS Virus
actacttggacagacgcgtagacaa

SEQ ID NO: 156438 - DNA, 25 bp, SARS Virus
ctacttggacaagcgcgtagacaat

SEQ ID NO: 156439 - DNA, 25 bp, SARS Virus
tacttggacaaaggcgtagacaata

SEQ ID NO: 156440 - DNA, 25 bp, SARS Virus
acttggacaaacgcgtagacaatac

SEQ ID NO: 156441 - DNA, 25 bp, SARS Virus
cttggacaaacgggtagacaatact

SEQ ID NO: 156442 - DNA, 25 bp, SARS Virus
ttggacaaacgcgtagacaatactt

SEQ ID NO: 156443 - DNA, 25 bp, SARS Virus
tggacaaacgcggagacaatacttc

SEQ ID NO: 156444 - DNA, 25 bp, SARS Virus
ggacaaacgcgtggacaatacttca

SEQ ID NO: 156445 - DNA, 25 bp, SARS Virus
gacaaacgcgtagacaatacttcat

SEQ ID NO: 156446 - DNA, 25 bp, SARS Virus
acaaacgcgtaggcaatacttcatt

SEQ ID NO: 156447 - DNA, 25 bp, SARS Virus
caaacgcgtagagaatacttcatta

SEQ ID NO: 156448 - DNA, 25 bp, SARS Virus
aaacgcgtagacgatacttcattaa

SEQ ID NO: 156449 - DNA, 25 bp, SARS Virus
aacgcgtagacagtacttcattaaa

SEQ ID NO: 156450 - DNA, 25 bp, SARS Virus
acgcgtagacaagacttcattaaaa

SEQ ID NO: 156451 - DNA, 25 bp, SARS Virus
cgcgtagacaatgcttcattaaaaa

SEQ ID NO: 156452 - DNA, 25 bp, SARS Virus
gcgtagacaatagttcattaaaaag

SEQ ID NO: 156453 - DNA, 25 bp, SARS Virus
cgtagacaatacgtcattaaaaagt

SEQ ID NO: 156454 - DNA, 25 bp, SARS Virus
gtagacaatactgcattaaaaagtg

SEQ ID NO: 156455 - DNA, 25 bp, SARS Virus
tagacaatacttgattaaaaagtga

SEQ ID NO: 156456 - DNA, 25 bp, SARS Virus
agacaatacttcgttaaaaagtgac

SEQ ID NO: 156457 - DNA, 25 bp, SARS Virus
gacaatacttcagtaaaaagtgaca

SEQ ID NO: 156458 - DNA, 25 bp, SARS Virus
acaatacttcatgaaaaagtgacac

SEQ ID NO: 156459 - DNA, 25 bp, SARS Virus
caatacttcattgaaaagtgacacg

SEQ ID NO: 156460 - DNA, 25 bp, SARS Virus
aatacttcattagaaagtgacacga

SEQ ID NO: 156461 - DNA, 25 bp, SARS Virus
atacttcattaagaagtgacacgac

SEQ ID NO: 156462 - DNA, 25 bp, SARS Virus
tacttcattaaagagtgacacgaca

SEQ ID NO: 156463 - DNA, 25 bp, SARS Virus
acttcattaaaaggtgacacgacag

SEQ ID NO: 156464 - DNA, 25 bp, SARS Virus
cttcattaaaaagtgacacgacagg

SEQ ID NO: 156465 - DNA, 25 bp, SARS Virus
ttcattaaaaagggacacgacaggt

SEQ ID NO: 156466 - DNA, 25 bp, SARS Virus
tcattaaaaagtgacacgacaggta

SEQ ID NO: 156467 - DNA, 25 bp, SARS Virus
cattaaaaagtggcacgacaggtat

SEQ ID NO: 156468 - DNA, 25 bp, SARS Virus
attaaaaagtgagacgacaggtatc

SEQ ID NO: 156469 - DNA, 25 bp, SARS Virus
ttaaaaagtgacgcgacaggtatcc

SEQ ID NO: 156470 - DNA, 25 bp, SARS Virus
taaaaagtgacaggacaggtatccc

SEQ ID NO: 156471 - DNA, 25 bp, SARS Virus
aaaaagtgacacgacaggtatccct

SEQ ID NO: 156472 - DNA, 25 bp, SARS Virus
aaaagtgacacggcaggtatcccta

SEQ ID NO: 156473 - DNA, 25 bp, SARS Virus
aaagtgacacgagaggtatccctat

SEQ ID NO: 156474 - DNA, 25 bp, SARS Virus
aagtgacacgacgggtatccctatt

SEQ ID NO: 156475 - DNA, 25 bp, SARS Virus
agtgacacgacaggtatccctattt

SEQ ID NO: 156476 - DNA, 25 bp, SARS Virus
gtgacacgacaggtatccctatttt

SEQ ID NO: 156477 - DNA, 25 bp, SARS Virus
tgacacgacagggatccctatttta

SEQ ID NO: 156478 - DNA, 25 bp, SARS Virus
gacacgacaggtgtccctattttag

SEQ ID NO: 156479 - DNA, 25 bp, SARS Virus
acacgacaggtagccctattttagg

SEQ ID NO: 156480 - DNA, 25 bp, SARS Virus
cacgacaggtatgcctattttagga

SEQ ID NO: 156481 - DNA, 25 bp, SARS Virus
acgacaggtatcgctattttaggag

SEQ ID NO: 156482 - DNA, 25 bp, SARS Virus
cgacaggtatccgtattttaggaga

SEQ ID NO: 156483 - DNA, 25 bp, SARS Virus
gacaggtatcccgattttaggagat

SEQ ID NO: 156484 - DNA, 25 bp, SARS Virus
acaggtatccctgttttaggagatt

SEQ ID NO: 156485 - DNA, 25 bp, SARS Virus
caggtatccctagtttaggagatta

SEQ ID NO: 156486 - DNA, 25 bp, SARS Virus
aggtatccctatgttaggagattaa

SEQ ID NO: 156487 - DNA, 25 bp, SARS Virus
ggtatccctattgtaggagattaaa

SEQ ID NO: 156488 - DNA, 25 bp, SARS Virus
gtatccctatttgaggagattaaat

SEQ ID NO: 156489 - DNA, 25 bp, SARS Virus
tatccctattttgggagattaaatt

SEQ ID NO: 156490 - DNA, 25 bp, SARS Virus
atccctattttaggagattaaattc

SEQ ID NO: 156491 - DNA, 25 bp, SARS Virus
tccctattttaggagattaaattca

SEQ ID NO: 156492 - DNA, 25 bp, SARS Virus
ccctattttaggggattaaattcac

SEQ ID NO: 156493 - DNA, 25 bp, SARS Virus
cctattttaggagattaaattcacc

SEQ ID NO: 156494 - DNA, 25 bp, SARS Virus
ctattttaggaggttaaattcacca

SEQ ID NO: 156495 - DNA, 25 bp, SARS Virus
tattttaggagagtaaattcaccac

SEQ ID NO: 156496 - DNA, 25 bp, SARS Virus
attttaggagatgaaattcaccact

SEQ ID NO: 156497 - DNA, 25 bp, SARS Virus
ttttaggagattgaattcaccactt

SEQ ID NO: 156498 - DNA, 25 bp, SARS Virus
tttaggagattagattcaccactta

SEQ ID NO: 156499 - DNA, 25 bp, SARS Virus
ttaggagattaagttcaccacttag

SEQ ID NO: 156500 - DNA, 25 bp, SARS Virus
taggagattaaagtcaccacttaga

SEQ ID NO: 156501 - DNA, 25 bp, SARS Virus
aggagattaaatgcaccacttagaa

SEQ ID NO: 156502 - DNA, 25 bp, SARS Virus
ggagattaaattgaccacttagaac

SEQ ID NO: 156503 - DNA, 25 bp, SARS Virus
gagattaaattcgccacttagaaca

SEQ ID NO: 156504 - DNA, 25 bp, SARS Virus
agattaaattcagcacttagaacac

SEQ ID NO: 156505 - DNA, 25 bp, SARS Virus
gattaaattcacgacttagaacact

SEQ ID NO: 156506 - DNA, 25 bp, SARS Virus
attaaattcaccgcttagaacactc

SEQ ID NO: 156507 - DNA, 25 bp, SARS Virus
ttaaattcaccagttagaacactcg

SEQ ID NO: 156508 - DNA, 25 bp, SARS Virus
taaattcaccacgtagaacactcgc

SEQ ID NO: 156509 - DNA, 25 bp, SARS Virus
aaattcaccactgagaacactcgcg

SEQ ID NO: 156510 - DNA, 25 bp, SARS Virus
aattcaccacttggaacactcgcga

SEQ ID NO: 156511 - DNA, 25 bp, SARS Virus
attcaccacttagaacactcgcgaa

SEQ ID NO: 156512 - DNA, 25 bp, SARS Virus
ttcaccacttaggacactcgcgaac

SEQ ID NO: 156513 - DNA, 25 bp, SARS Virus
tcaccacttagagcactcgcgaacc

SEQ ID NO: 156514 - DNA, 25 bp, SARS Virus
caccacttagaagactcgcgaaccg

SEQ ID NO: 156515 - DNA, 25 bp, SARS Virus
accacttagaacgctcgcgaaccga

SEQ ID NO: 156516 - DNA, 25 bp, SARS Virus
ccacttagaacagtcgcgaaccgat

SEQ ID NO: 156517 - DNA, 25 bp, SARS Virus
cacttagaacacgcgcgaaccgatt

SEQ ID NO: 156518 - DNA, 25 bp, SARS Virus
acttagaacactggcgaaccgattc

SEQ ID NO: 156519 - DNA, 25 bp, SARS Virus
cttagaacactcgcgaaccgattcg

SEQ ID NO: 156520 - DNA, 25 bp, SARS Virus
ttagaacactcgggaaccgattcgg

SEQ ID NO: 156521 - DNA, 25 bp, SARS Virus
tagaacactcgcgaaccgattcgga

SEQ ID NO: 156522 - DNA, 25 bp, SARS Virus
agaacactcgcggaccgattcggat

SEQ ID NO: 156523 - DNA, 25 bp, SARS Virus
gaacactcgcgagccgattcggata

SEQ ID NO: 156524 - DNA, 25 bp, SARS Virus
aacactcgcgaagcgattcggatag

SEQ ID NO: 156525 - DNA, 25 bp, SARS Virus
acactcgcgaacggattcggatagt

SEQ ID NO: 156526 - DNA, 25 bp, SARS Virus
cactcgcgaaccgattcggatagta

SEQ ID NO: 156527 - DNA, 25 bp, SARS Virus
actcgcgaaccggttcggatagtaa

SEQ ID NO: 156528 - DNA, 25 bp, SARS Virus
ctcgcgaaccgagtcggatagtaat

SEQ ID NO: 156529 - DNA, 25 bp, SARS Virus
tcgcgaaccgatgcggatagtaatt

SEQ ID NO: 156530 - DNA, 25 bp, SARS Virus
cgcgaaccgattgggatagtaattt

SEQ ID NO: 156531 - DNA, 25 bp, SARS Virus
gcgaaccgattcggatagtaattta

SEQ ID NO: 156532 - DNA, 25 bp, SARS Virus
cgaaccgattcggatagtaatttac

SEQ ID NO: 156533 - DNA, 25 bp, SARS Virus
gaaccgattcgggtagtaatttact

SEQ ID NO: 156534 - DNA, 25 bp, SARS Virus
aaccgattcggagagtaatttactt

SEQ ID NO: 156535 - DNA, 25 bp, SARS Virus
accgattcggatggtaatttacttc

SEQ ID NO: 156536 - DNA, 25 bp, SARS Virus
ccgattcggatagtaatttacttct

SEQ ID NO: 156537 - DNA, 25 bp, SARS Virus
cgattcggataggaatttacttctg

SEQ ID NO: 156538 - DNA, 25 bp, SARS Virus
gattcggatagtgatttacttctgg

SEQ ID NO: 156539 - DNA, 25 bp, SARS Virus
attcggatagtagtttacttctggc

SEQ ID NO: 156540 - DNA, 25 bp, SARS Virus
ttcggatagtaagttacttctggcg

SEQ ID NO: 156541 - DNA, 25 bp, SARS Virus
tcggatagtaatgtacttctggcgg

SEQ ID NO: 156542 - DNA, 25 bp, SARS Virus
cggatagtaattgacttctggcggt

SEQ ID NO: 156543 - DNA, 25 bp, SARS Virus
ggatagtaatttgcttctggcggtt

SEQ ID NO: 156544 - DNA, 25 bp, SARS Virus
gatagtaatttagttctggcggttc

SEQ ID NO: 156545 - DNA, 25 bp, SARS Virus
atagtaatttacgtctggcggttca

SEQ ID NO: 156546 - DNA, 25 bp, SARS Virus
tagtaatttactgctggcggttcaa

SEQ ID NO: 156547 - DNA, 25 bp, SARS Virus
agtaatttacttgtggcggttcaac

SEQ ID NO: 156548 - DNA, 25 bp, SARS Virus
gtaatttacttcgggcggttcaaca

SEQ ID NO: 156549 - DNA, 25 bp, SARS Virus
taatttacttctggcggttcaacag

SEQ ID NO: 156550 - DNA, 25 bp, SARS Virus
aatttacttctggcggttcaacagg

SEQ ID NO: 156551 - DNA, 25 bp, SARS Virus
atttacttctgggggttcaacaggt

SEQ ID NO: 156552 - DNA, 25 bp, SARS Virus
tttacttctggcggttcaacaggta

SEQ ID NO: 156553 - DNA, 25 bp, SARS Virus
ttacttctggcggttcaacaggtac

SEQ ID NO: 156554 - DNA, 25 bp, SARS Virus
tacttctggcgggtcaacaggtact

SEQ ID NO: 156555 - DNA, 25 bp, SARS Virus
acttctggcggtgcaacaggtactg

SEQ ID NO: 156556 - DNA, 25 bp, SARS Virus
cttctggcggttgaacaggtactga

SEQ ID NO: 156557 - DNA, 25 bp, SARS Virus
ttctggcggttcgacaggtactgac

SEQ ID NO: 156558 - DNA, 25 bp, SARS Virus
tctggcggttcagcaggtactgact

SEQ ID NO: 156559 - DNA, 25 bp, SARS Virus
ctggcggttcaagaggtactgactt

SEQ ID NO: 156560 - DNA, 25 bp, SARS Virus
tggcggttcaacgggtactgacttt

SEQ ID NO: 156561 - DNA, 25 bp, SARS Virus
ggcggttcaacaggtactgacttta

SEQ ID NO: 156562 - DNA, 25 bp, SARS Virus
gcggttcaacaggtactgactttag

SEQ ID NO: 156563 - DNA, 25 bp, SARS Virus
cggttcaacagggactgactttaga

SEQ ID NO: 156564 - DNA, 25 bp, SARS Virus
ggttcaacaggtgctgactttagag

SEQ ID NO: 156565 - DNA, 25 bp, SARS Virus
gttcaacaggtagtgactttagagg

SEQ ID NO: 156566 - DNA, 25 bp, SARS Virus
ttcaacaggtacggactttagaggt

SEQ ID NO: 156567 - DNA, 25 bp, SARS Virus
tcaacaggtactgactttagaggta

SEQ ID NO: 156568 - DNA, 25 bp, SARS Virus
caacaggtactggctttagaggtat

SEQ ID NO: 156569 - DNA, 25 bp, SARS Virus
aacaggtactgagtttagaggtatt

SEQ ID NO: 156570 - DNA, 25 bp, SARS Virus
acaggtactgacgttagaggtattt

SEQ ID NO: 156571 - DNA, 25 bp, SARS Virus
caggtactgactgtagaggtatttg

SEQ ID NO: 156572 - DNA, 25 bp, SARS Virus
aggtactgacttgagaggtatttgc

SEQ ID NO: 156573 - DNA, 25 bp, SARS Virus
ggtactgactttggaggtatttgct

SEQ ID NO: 156574 - DNA, 25 bp, SARS Virus
gtactgactttagaggtatttgcta

SEQ ID NO: 156575 - DNA, 25 bp, SARS Virus
tactgactttaggggtatttgctac

SEQ ID NO: 156576 - DNA, 25 bp, SARS Virus
actgactttagaggtatttgctaca

SEQ ID NO: 156577 - DNA, 25 bp, SARS Virus
ctgactttagaggtatttgctacac

SEQ ID NO: 156578 - DNA, 25 bp, SARS Virus
tgactttagagggatttgctacaca

SEQ ID NO: 156579 - DNA, 25 bp, SARS Virus
gactttagaggtgtttgctacacaa

SEQ ID NO: 156580 - DNA, 25 bp, SARS Virus
actttagaggtagttgctacacaag

SEQ ID NO: 156581 - DNA, 25 bp, SARS Virus
ctttagaggtatgtgctacacaagc

SEQ ID NO: 156582 - DNA, 25 bp, SARS Virus
tttagaggtattggctacacaagct

SEQ ID NO: 156583 - DNA, 25 bp, SARS Virus
ttagaggtatttgctacacaagctt

SEQ ID NO: 156584 - DNA, 25 bp, SARS Virus
tagaggtatttggtacacaagcttc

SEQ ID NO: 156585 - DNA, 25 bp, SARS Virus
agaggtatttgcgacacaagcttcc

SEQ ID NO: 156586 - DNA, 25 bp, SARS Virus
gaggtatttgctgcacaagcttccg

SEQ ID NO: 156587 - DNA, 25 bp, SARS Virus
aggtatttgctagacaagcttccgt

SEQ ID NO: 156588 - DNA, 25 bp, SARS Virus
ggtatttgctacgcaagcttccgta

SEQ ID NO: 156589 - DNA, 25 bp, SARS Virus
gtatttgctacagaagcttccgtat

SEQ ID NO: 156590 - DNA, 25 bp, SARS Virus
tatttgctacacgagcttccgtatc

SEQ ID NO: 156591 - DNA, 25 bp, SARS Virus
atttgctacacaggcttccgtatcg

SEQ ID NO: 156592 - DNA, 25 bp, SARS Virus
tttgctacacaagcttccgtatcgg

SEQ ID NO: 156593 - DNA, 25 bp, SARS Virus
ttgctacacaaggttccgtatcggg

SEQ ID NO: 156594 - DNA, 25 bp, SARS Virus
tgctacacaagcgtccgtatcggga

SEQ ID NO: 156595 - DNA, 25 bp, SARS Virus
gctacacaagctgccgtatcgggag

SEQ ID NO: 156596 - DNA, 25 bp, SARS Virus
ctacacaagcttgcgtatcgggagc

SEQ ID NO: 156597 - DNA, 25 bp, SARS Virus
tacacaagcttcggtatcgggagct

SEQ ID NO: 156598 - DNA, 25 bp, SARS Virus
acacaagcttccgtatcgggagctc

SEQ ID NO: 156599 - DNA, 25 bp, SARS Virus
cacaagcttccggatcgggagctcg

SEQ ID NO: 156600 - DNA, 25 bp, SARS Virus
acaagcttccgtgtcgggagctcga

SEQ ID NO: 156601 - DNA, 25 bp, SARS Virus
caagcttccgtagcgggagctcgaa

SEQ ID NO: 156602 - DNA, 25 bp, SARS Virus
aagcttccgtatggggagctcgaat

SEQ ID NO: 156603 - DNA, 25 bp, SARS Virus
agcttccgtatcgggagctcgaata

SEQ ID NO: 156604 - DNA, 25 bp, SARS Virus
gcttccgtatcgggagctcgaatat

SEQ ID NO: 156605 - DNA, 25 bp, SARS Virus
cttccgtatcgggagctcgaatata

SEQ ID NO: 156606 - DNA, 25 bp, SARS Virus
ttccgtatcgggggctcgaatatag

SEQ ID NO: 156607 - DNA, 25 bp, SARS Virus
tccgtatcgggagctcgaatatagc

SEQ ID NO: 156608 - DNA, 25 bp, SARS Virus
ccgtatcgggaggtcgaatatagcg

SEQ ID NO: 156609 - DNA, 25 bp, SARS Virus
cgtatcgggagcgcgaatatagcga

SEQ ID NO: 156610 - DNA, 25 bp, SARS Virus
gtatcgggagctggaatatagcgac

SEQ ID NO: 156611 - DNA, 25 bp, SARS Virus
tatcgggagctcgaatatagcgaca

SEQ ID NO: 156612 - DNA, 25 bp, SARS Virus
atcgggagctcggatatagcgacat

SEQ ID NO: 156613 - DNA, 25 bp, SARS Virus
tcgggagctcgagtatagcgacata

SEQ ID NO: 156614 - DNA, 25 bp, SARS Virus
cgggagctcgaagatagcgacatac

SEQ ID NO: 156615 - DNA, 25 bp, SARS Virus
gggagctcgaatgtagcgacatact

SEQ ID NO: 156616 - DNA, 25 bp, SARS Virus
ggagctcgaatagagcgacatactt

SEQ ID NO: 156617 - DNA, 25 bp, SARS Virus
gagctcgaatatggcgacatactta

SEQ ID NO: 156618 - DNA, 25 bp, SARS Virus
agctcgaatatagcgacatacttaa

SEQ ID NO: 156619 - DNA, 25 bp, SARS Virus
gctcgaatatagggacatacttaag

SEQ ID NO: 156620 - DNA, 25 bp, SARS Virus
ctcgaatatagcgacatacttaagt

SEQ ID NO: 156621 - DNA, 25 bp, SARS Virus
tcgaatatagcggcatacttaagta

SEQ ID NO: 156622 - DNA, 25 bp, SARS Virus
cgaatatagcgagatacttaagtag

SEQ ID NO: 156623 - DNA, 25 bp, SARS Virus
gaatatagcgacgtacttaagtagg

SEQ ID NO: 156624 - DNA, 25 bp, SARS Virus
aatatagcgacagacttaagtaggt

SEQ ID NO: 156625 - DNA, 25 bp, SARS Virus
atatagcgacatgcttaagtaggta

SEQ ID NO: 156626 - DNA, 25 bp, SARS Virus
tatagcgacatagttaagtaggtat

SEQ ID NO: 156627 - DNA, 25 bp, SARS Virus
atagcgacatacgtaagtaggtatc

SEQ ID NO: 156628 - DNA, 25 bp, SARS Virus
tagcgacatactgaagtaggtatcg

SEQ ID NO: 156629 - DNA, 25 bp, SARS Virus
agcgacatacttgagtaggtatcgc

SEQ ID NO: 156630 - DNA, 25 bp, SARS Virus
gcgacatacttaggtaggtatcgct

SEQ ID NO: 156631 - DNA, 25 bp, SARS Virus
cgacatacttaagtaggtatcgctc

SEQ ID NO: 156632 - DNA, 25 bp, SARS Virus
gacatacttaaggaggtatcgctcg

SEQ ID NO: 156633 - DNA, 25 bp, SARS Virus
acatacttaagtgggtatcgctcga

SEQ ID NO: 156634 - DNA, 25 bp, SARS Virus
catacttaagtaggtatcgctcgag

SEQ ID NO: 156635 - DNA, 25 bp, SARS Virus
atacttaagtaggtatcgctcgagc

SEQ ID NO: 156636 - DNA, 25 bp, SARS Virus
tacttaagtagggatcgctcgagct

SEQ ID NO: 156637 - DNA, 25 bp, SARS Virus
acttaagtaggtgtcgctcgagctc

SEQ ID NO: 156638 - DNA, 25 bp, SARS Virus
cttaagtaggtagcgctcgagctct

SEQ ID NO: 156639 - DNA, 25 bp, SARS Virus
ttaagtaggtatggctcgagctctt

SEQ ID NO: 156640 - DNA, 25 bp, SARS Virus
taagtaggtatcgctcgagctcttt

SEQ ID NO: 156641 - DNA, 25 bp, SARS Virus
aagtaggtatcggtcgagctctttc

SEQ ID NO: 156642 - DNA, 25 bp, SARS Virus
agtaggtatcgcgcgagctctttca

SEQ ID NO: 156643 - DNA, 25 bp, SARS Virus
gtaggtatcgctggagctctttcag

SEQ ID NO: 156644 - DNA, 25 bp, SARS Virus
taggtatcgctcgagctctttcagt

SEQ ID NO: 156645 - DNA, 25 bp, SARS Virus
aggtatcgctcgggctctttcagtc

SEQ ID NO: 156646 - DNA, 25 bp, SARS Virus
ggtatcgctcgagctctttcagtca

SEQ ID NO: 156647 - DNA, 25 bp, SARS Virus
gtatcgctcgaggtctttcagtcaa

SEQ ID NO: 156648 - DNA, 25 bp, SARS Virus
tatcgctcgagcgctttcagtcaaa

SEQ ID NO: 156649 - DNA, 25 bp, SARS Virus
atcgctcgagctgtttcagtcaaag

SEQ ID NO: 156650 - DNA, 25 bp, SARS Virus
tcgctcgagctcgttcagtcaaagg

SEQ ID NO: 156651 - DNA, 25 bp, SARS Virus
cgctcgagctctgtcagtcaaaggt

SEQ ID NO: 156652 - DNA, 25 bp, SARS Virus
gctcgagctcttgcagtcaaaggta

SEQ ID NO: 156653 - DNA, 25 bp, SARS Virus
ctcgagctctttgagtcaaaggtaa

SEQ ID NO: 156654 - DNA, 25 bp, SARS Virus
tcgagctctttcggtcaaaggtaaa

SEQ ID NO: 156655 - DNA, 25 bp, SARS Virus
cgagctctttcagtcaaaggtaaac

SEQ ID NO: 156656 - DNA, 25 bp, SARS Virus
gagctctttcaggcaaaggtaaaca

SEQ ID NO: 156657 - DNA, 25 bp, SARS Virus
agctctttcagtgaaaggtaaacac

SEQ ID NO: 156658 - DNA, 25 bp, SARS Virus
gctctttcagtcgaaggtaaacact

SEQ ID NO: 156659 - DNA, 25 bp, SARS Virus
ctctttcagtcagaggtaaacacta

SEQ ID NO: 156660 - DNA, 25 bp, SARS Virus
tctttcagtcaagggtaaacactag

SEQ ID NO: 156661 - DNA, 25 bp, SARS Virus
ctttcagtcaaaggtaaacactaga

SEQ ID NO: 156662 - DNA, 25 bp, SARS Virus
tttcagtcaaaggtaaacactagac

SEQ ID NO: 156663 - DNA, 25 bp, SARS Virus
ttcagtcaaagggaaacactagacc

SEQ ID NO: 156664 - DNA, 25 bp, SARS Virus
tcagtcaaaggtgaacactagaccc

SEQ ID NO: 156665 - DNA, 25 bp, SARS Virus
cagtcaaaggtagacactagacccg

SEQ ID NO: 156666 - DNA, 25 bp, SARS Virus
agtcaaaggtaagcactagacccga

SEQ ID NO: 156667 - DNA, 25 bp, SARS Virus
gtcaaaggtaaagactagacccgaa

SEQ ID NO: 156668 - DNA, 25 bp, SARS Virus
tcaaaggtaaacgctagacccgaat

SEQ ID NO: 156669 - DNA, 25 bp, SARS Virus
caaaggtaaacagtagacccgaatt

SEQ ID NO: 156670 - DNA, 25 bp, SARS Virus
aaaggtaaacacgagacccgaattt

SEQ ID NO: 156671 - DNA, 25 bp, SARS Virus
aaggtaaacactggacccgaatttt

SEQ ID NO: 156672 - DNA, 25 bp, SARS Virus
aggtaaacactagacccgaatttta

SEQ ID NO: 156673 - DNA, 25 bp, SARS Virus
ggtaaacactaggcccgaattttag

SEQ ID NO: 156674 - DNA, 25 bp, SARS Virus
gtaaacactagagccgaattttagg

SEQ ID NO: 156675 - DNA, 25 bp, SARS Virus
taaacactagacgcgaattttagga

SEQ ID NO: 156676 - DNA, 25 bp, SARS Virus
aaacactagaccggaattttaggag

SEQ ID NO: 156677 - DNA, 25 bp, SARS Virus
aacactagacccgaattttaggaga

SEQ ID NO: 156678 - DNA, 25 bp, SARS Virus
acactagacccggattttaggagat

SEQ ID NO: 156679 - DNA, 25 bp, SARS Virus
cactagacccgagttttaggagatt

SEQ ID NO: 156680 - DNA, 25 bp, SARS Virus
actagacccgaagtttaggagattc

SEQ ID NO: 156681 - DNA, 25 bp, SARS Virus
aaagttcttcgttagaaacgtagaa

SEQ ID NO: 156682 - DNA, 25 bp, SARS Virus
aagttcttcgtatgaaacgtagaac

SEQ ID NO: 156683 - DNA, 25 bp, SARS Virus
agttcttcgtaataaacgtagaaca

SEQ ID NO: 156684 - DNA, 25 bp, SARS Virus
gttcttcgtaagtaacgtagaacat

SEQ ID NO: 156685 - DNA, 25 bp, SARS Virus
ttcttcgtaagatacgtagaacatg

SEQ ID NO: 156686 - DNA, 25 bp, SARS Virus
tcttcgtaagaatcgtagaacatgt

SEQ ID NO: 156687 - DNA, 25 bp, SARS Virus
cttcgtaagaaatgtagaacatgtt

SEQ ID NO: 156688 - DNA, 25 bp, SARS Virus
ttcgtaagaaacttagaacatgttc

SEQ ID NO: 156689 - DNA, 25 bp, SARS Virus
tcgtaagaaacgtagaacatgttca

SEQ ID NO: 156690 - DNA, 25 bp, SARS Virus
cgtaagaaacgttgaacatgttcaa

SEQ ID NO: 156691 - DNA, 25 bp, SARS Virus
gtaagaaacgtataacatgttcaat

SEQ ID NO: 156692 - DNA, 25 bp, SARS Virus
taagaaacgtagtacatgttcaatc

SEQ ID NO: 156693 - DNA, 25 bp, SARS Virus
aagaaacgtagatcatgttcaatcc

SEQ ID NO: 156694 - DNA, 25 bp, SARS Virus
agaaacgtagaatatgttcaatccg

SEQ ID NO: 156695 - DNA, 25 bp, SARS Virus
gaaacgtagaacttgttcaatccgt

SEQ ID NO: 156696 - DNA, 25 bp, SARS Virus
aaacgtagaacatgttcaatccgta

SEQ ID NO: 156697 - DNA, 25 bp, SARS Virus
aacgtagaacattttcaatccgtag

SEQ ID NO: 156698 - DNA, 25 bp, SARS Virus
acgtagaacatgttcaatccgtagc

SEQ ID NO: 156699 - DNA, 25 bp, SARS Virus
cgtagaacatgttcaatccgtagcg

SEQ ID NO: 156700 - DNA, 25 bp, SARS Virus
gtagaacatgtttaatccgtagcgt

SEQ ID NO: 156701 - DNA, 25 bp, SARS Virus
tagaacatgttctatccgtagcgtt

SEQ ID NO: 156702 - DNA, 25 bp, SARS Virus
agaacatgttcattccgtagcgttg

SEQ ID NO: 156703 - DNA, 25 bp, SARS Virus
gaacatgttcaatccgtagcgttgt

SEQ ID NO: 156704 - DNA, 25 bp, SARS Virus
aacatgttcaattcgtagcgttgtg

SEQ ID NO: 156705 - DNA, 25 bp, SARS Virus
acatgttcaatctgtagcgttgtgg

SEQ ID NO: 156706 - DNA, 25 bp, SARS Virus
catgttcaatccttagcgttgtgga

SEQ ID NO: 156707 - DNA, 25 bp, SARS Virus
atgttcaatccgtagcgttgtggac

SEQ ID NO: 156708 - DNA, 25 bp, SARS Virus
tgttcaatccgttgcgttgtggacc

SEQ ID NO: 156709 - DNA, 25 bp, SARS Virus
gttcaatccgtatcgttgtggacca

SEQ ID NO: 156710 - DNA, 25 bp, SARS Virus
ttcaatccgtagtgttgtggaccaa

SEQ ID NO: 156711 - DNA, 25 bp, SARS Virus
tcaatccgtagctttgtggaccaac

SEQ ID NO: 156712 - DNA, 25 bp, SARS Virus
caatccgtagcgttgtggaccaacg

SEQ ID NO: 156713 - DNA, 25 bp, SARS Virus
aatccgtagcgttgtggaccaacgg

SEQ ID NO: 156714 - DNA, 25 bp, SARS Virus
atccgtagcgttttggaccaacggt

SEQ ID NO: 156715 - DNA, 25 bp, SARS Virus
tccgtagcgttgtggaccaacggtg

SEQ ID NO: 156716 - DNA, 25 bp, SARS Virus
ccgtagcgttgttgaccaacggtgc

SEQ ID NO: 156717 - DNA, 25 bp, SARS Virus
cgtagcgttgtgtaccaacggtgcg

SEQ ID NO: 156718 - DNA, 25 bp, SARS Virus
gtagcgttgtggtccaacggtgcga

SEQ ID NO: 156719 - DNA, 25 bp, SARS Virus
tagcgttgtggatcaacggtgcgaa

SEQ ID NO: 156720 - DNA, 25 bp, SARS Virus
agcgttgtggactaacggtgcgaac

SEQ ID NO: 156721 - DNA, 25 bp, SARS Virus
gcgttgtggacctacggtgcgaact

SEQ ID NO: 156722 - DNA, 25 bp, SARS Virus
cgttgtggaccatcggtgcgaactg

SEQ ID NO: 156723 - DNA, 25 bp, SARS Virus
gttgtggaccaatggtgcgaactga

SEQ ID NO: 156724 - DNA, 25 bp, SARS Virus
ttgtggaccaactgtgcgaactgaa

SEQ ID NO: 156725 - DNA, 25 bp, SARS Virus
tgtggaccaacgttgcgaactgaac

SEQ ID NO: 156726 - DNA, 25 bp, SARS Virus
gtggaccaacggtgcgaactgaacg

SEQ ID NO: 156727 - DNA, 25 bp, SARS Virus
tggaccaacggttcgaactgaacga

SEQ ID NO: 156728 - DNA, 25 bp, SARS Virus
ggaccaacggtgtgaactgaacgaa

SEQ ID NO: 156729 - DNA, 25 bp, SARS Virus
gaccaacggtgctaactgaacgaac

SEQ ID NO: 156730 - DNA, 25 bp, SARS Virus
accaacggtgcgtactgaacgaaca

SEQ ID NO: 156731 - DNA, 25 bp, SARS Virus
ccaacggtgcgatctgaacgaacat

SEQ ID NO: 156732 - DNA, 25 bp, SARS Virus
caacggtgcgaattgaacgaacatc

SEQ ID NO: 156733 - DNA, 25 bp, SARS Virus
aacggtgcgaactgaacgaacatca

SEQ ID NO: 156734 - DNA, 25 bp, SARS Virus
acggtgcgaacttaacgaacatcaa

SEQ ID NO: 156735 - DNA, 25 bp, SARS Virus
cggtgcgaactgtacgaacatcaaa

SEQ ID NO: 156736 - DNA, 25 bp, SARS Virus
ggtgcgaactgatcgaacatcaaaa

SEQ ID NO: 156737 - DNA, 25 bp, SARS Virus
gtgcgaactgaatgaacatcaaaac

SEQ ID NO: 156738 - DNA, 25 bp, SARS Virus
tgcgaactgaactaacatcaaaacc

SEQ ID NO: 156739 - DNA, 25 bp, SARS Virus
gcgaactgaacgtacatcaaaaccc

SEQ ID NO: 156740 - DNA, 25 bp, SARS Virus
cgaactgaacgatcatcaaaaccca

SEQ ID NO: 156741 - DNA, 25 bp, SARS Virus
gaactgaacgaatatcaaaacccat

SEQ ID NO: 156742 - DNA, 25 bp, SARS Virus
aactgaacgaacttcaaaacccatc

SEQ ID NO: 156743 - DNA, 25 bp, SARS Virus
actgaacgaacatcaaaacccatct

SEQ ID NO: 156744 - DNA, 25 bp, SARS Virus
ctgaacgaacattaaaacccatctt

SEQ ID NO: 156745 - DNA, 25 bp, SARS Virus
tgaacgaacatctaaacccatcttc

SEQ ID NO: 156746 - DNA, 25 bp, SARS Virus
gaacgaacatcataacccatcttcc

SEQ ID NO: 156747 - DNA, 25 bp, SARS Virus
aacgaacatcaatacccatcttcca

SEQ ID NO: 156748 - DNA, 25 bp, SARS Virus
acgaacatcaaatcccatcttccaa

SEQ ID NO: 156749 - DNA, 25 bp, SARS Virus
cgaacatcaaaatccatcttccaaa

SEQ ID NO: 156750 - DNA, 25 bp, SARS Virus
gaacatcaaaactcatcttccaaag

SEQ ID NO: 156751 - DNA, 25 bp, SARS Virus
aacatcaaaacctatcttccaaagt

SEQ ID NO: 156752 - DNA, 25 bp, SARS Virus
acatcaaaacccttcttccaaagtt

SEQ ID NO: 156753 - DNA, 25 bp, SARS Virus
catcaaaacccatcttccaaagttg

SEQ ID NO: 156754 - DNA, 25 bp, SARS Virus
atcaaaacccattttccaaagttgt

SEQ ID NO: 156755 - DNA, 25 bp, SARS Virus
tcaaaacccatcttccaaagttgta

SEQ ID NO: 156756 - DNA, 25 bp, SARS Virus
caaaacccatcttccaaagttgtac

SEQ ID NO: 156757 - DNA, 25 bp, SARS Virus
aaaacccatctttcaaagttgtaca

SEQ ID NO: 156758 - DNA, 25 bp, SARS Virus
aaacccatcttctaaagttgtacag

SEQ ID NO: 156759 - DNA, 25 bp, SARS Virus
aacccatcttcctaagttgtacagg

SEQ ID NO: 156760 - DNA, 25 bp, SARS Virus
acccatcttccatagttgtacaggt

SEQ ID NO: 156761 - DNA, 25 bp, SARS Virus
cccatcttccaatgttgtacaggta

SEQ ID NO: 156762 - DNA, 25 bp, SARS Virus
ccatcttccaaatttgtacaggtag

SEQ ID NO: 156763 - DNA, 25 bp, SARS Virus
catcttccaaagttgtacaggtagg

SEQ ID NO: 156764 - DNA, 25 bp, SARS Virus
atcttccaaagttgtacaggtagga

SEQ ID NO: 156765 - DNA, 25 bp, SARS Virus
tcttccaaagttttacaggtaggaa

SEQ ID NO: 156766 - DNA, 25 bp, SARS Virus
cttccaaagttgtacaggtaggaat

SEQ ID NO: 156767 - DNA, 25 bp, SARS Virus
ttccaaagttgttcaggtaggaatg

SEQ ID NO: 156768 - DNA, 25 bp, SARS Virus
tccaaagttgtataggtaggaatgt

SEQ ID NO: 156769 - DNA, 25 bp, SARS Virus
ccaaagttgtactggtaggaatgtg

SEQ ID NO: 156770 - DNA, 25 bp, SARS Virus
caaagttgtacatgtaggaatgtgg

SEQ ID NO: 156771 - DNA, 25 bp, SARS Virus
aaagttgtacagttaggaatgtggt

SEQ ID NO: 156772 - DNA, 25 bp, SARS Virus
aagttgtacaggtaggaatgtggtt

SEQ ID NO: 156773 - DNA, 25 bp, SARS Virus
agttgtacaggttggaatgtggttt

SEQ ID NO: 156774 - DNA, 25 bp, SARS Virus
gttgtacaggtatgaatgtggtttc

SEQ ID NO: 156775 - DNA, 25 bp, SARS Virus
ttgtacaggtagtaatgtggtttcg

SEQ ID NO: 156776 - DNA, 25 bp, SARS Virus
tgtacaggtaggtatgtggtttcgt

SEQ ID NO: 156777 - DNA, 25 bp, SARS Virus
gtacaggtaggattgtggtttcgta

SEQ ID NO: 156778 - DNA, 25 bp, SARS Virus
tacaggtaggaatgtggtttcgtac

SEQ ID NO: 156779 - DNA, 25 bp, SARS Virus
acaggtaggaatttggtttcgtact

SEQ ID NO: 156780 - DNA, 25 bp, SARS Virus
caggtaggaatgtggtttcgtactt

SEQ ID NO: 156781 - DNA, 25 bp, SARS Virus
aggtaggaatgttgtttcgtactta

SEQ ID NO: 156782 - DNA, 25 bp, SARS Virus
ggtaggaatgtgttttcgtacttac

SEQ ID NO: 156783 - DNA, 25 bp, SARS Virus
gtaggaatgtggtttcgtacttact

SEQ ID NO: 156784 - DNA, 25 bp, SARS Virus
taggaatgtggtttcgtacttactt

SEQ ID NO: 156785 - DNA, 25 bp, SARS Virus
aggaatgtggtttcgtacttacttt

SEQ ID NO: 156786 - DNA, 25 bp, SARS Virus
ggaatgtggttttgtacttacttta

SEQ ID NO: 156787 - DNA, 25 bp, SARS Virus
gaatgtggtttcttacttactttaa

SEQ ID NO: 156788 - DNA, 25 bp, SARS Virus
aatgtggtttcgtacttactttaaa

SEQ ID NO: 156789 - DNA, 25 bp, SARS Virus
atgtggtttcgttcttactttaaag

SEQ ID NO: 156790 - DNA, 25 bp, SARS Virus
tgtggtttcgtatttactttaaagt

SEQ ID NO: 156791 - DNA, 25 bp, SARS Virus
gtggtttcgtacttactttaaagtc

SEQ ID NO: 156792 - DNA, 25 bp, SARS Virus
tggtttcgtacttactttaaagtcg

SEQ ID NO: 156793 - DNA, 25 bp, SARS Virus
ggtttcgtactttctttaaagtcgt

SEQ ID NO: 156794 - DNA, 25 bp, SARS Virus
gtttcgtacttattttaaagtcgta

SEQ ID NO: 156795 - DNA, 25 bp, SARS Virus
tttcgtacttactttaaagtcgtat

SEQ ID NO: 156796 - DNA, 25 bp, SARS Virus
ttcgtacttactttaaagtcgtatc

SEQ ID NO: 156797 - DNA, 25 bp, SARS Virus
tcgtacttactttaaagtcgtatca

SEQ ID NO: 156798 - DNA, 25 bp, SARS Virus
cgtacttacttttaagtcgtatcag

SEQ ID NO: 156799 - DNA, 25 bp, SARS Virus
gtacttactttatagtcgtatcagt

SEQ ID NO: 156800 - DNA, 25 bp, SARS Virus
tacttactttaatgtcgtatcagtt

SEQ ID NO: 156801 - DNA, 25 bp, SARS Virus
acttactttaaattcgtatcagtta

SEQ ID NO: 156802 - DNA, 25 bp, SARS Virus
cttactttaaagtcgtatcagttaa

SEQ ID NO: 156803 - DNA, 25 bp, SARS Virus
ttactttaaagttgtatcagttaac

SEQ ID NO: 156804 - DNA, 25 bp, SARS Virus
tactttaaagtcttatcagttaaca

SEQ ID NO: 156805 - DNA, 25 bp, SARS Virus
actttaaagtcgtatcagttaacat

SEQ ID NO: 156806 - DNA, 25 bp, SARS Virus
ctttaaagtcgtttcagttaacatt

SEQ ID NO: 156807 - DNA, 25 bp, SARS Virus
tttaaagtcgtatcagttaacattg

SEQ ID NO: 156808 - DNA, 25 bp, SARS Virus
ttaaagtcgtattagttaacattgg

SEQ ID NO: 156809 - DNA, 25 bp, SARS Virus
taaagtcgtatctgttaacattgga

SEQ ID NO: 156810 - DNA, 25 bp, SARS Virus
aaagtcgtatcatttaacattggaa

SEQ ID NO: 156811 - DNA, 25 bp, SARS Virus
aagtcgtatcagttaacattggaac

SEQ ID NO: 156812 - DNA, 25 bp, SARS Virus
agtcgtatcagttaacattggaact

SEQ ID NO: 156813 - DNA, 25 bp, SARS Virus
gtcgtatcagtttacattggaactg

SEQ ID NO: 156814 - DNA, 25 bp, SARS Virus
tcgtatcagttatcattggaactgg

SEQ ID NO: 156815 - DNA, 25 bp, SARS Virus
cgtatcagttaatattggaactggt

SEQ ID NO: 156816 - DNA, 25 bp, SARS Virus
gtatcagttaactttggaactggtg

SEQ ID NO: 156817 - DNA, 25 bp, SARS Virus
tatcagttaacattggaactggtga

SEQ ID NO: 156818 - DNA, 25 bp, SARS Virus
atcagttaacattggaactggtgaa

SEQ ID NO: 156819 - DNA, 25 bp, SARS Virus
tcagttaacatttgaactggtgaaa

SEQ ID NO: 156820 - DNA, 25 bp, SARS Virus
cagttaacattgtaactggtgaaaa

SEQ ID NO: 156821 - DNA, 25 bp, SARS Virus
agttaacattggtactggtgaaaac

SEQ ID NO: 156822 - DNA, 25 bp, SARS Virus
gttaacattggatctggtgaaaact

SEQ ID NO: 156823 - DNA, 25 bp, SARS Virus
ttaacattggaattggtgaaaactt

SEQ ID NO: 156824 - DNA, 25 bp, SARS Virus
taacattggaactggtgaaaacttt

SEQ ID NO: 156825 - DNA, 25 bp, SARS Virus
aacattggaacttgtgaaaacttta

SEQ ID NO: 156826 - DNA, 25 bp, SARS Virus
acattggaactgttgaaaactttag

SEQ ID NO: 156827 - DNA, 25 bp, SARS Virus
cattggaactggtgaaaactttagt

SEQ ID NO: 156828 - DNA, 25 bp, SARS Virus
attggaactggttaaaactttagtg

SEQ ID NO: 156829 - DNA, 25 bp, SARS Virus
ttggaactggtgtaaactttagtga

SEQ ID NO: 156830 - DNA, 25 bp, SARS Virus
tggaactggtgataactttagtgac

SEQ ID NO: 156831 - DNA, 25 bp, SARS Virus
ggaactggtgaatactttagtgact

SEQ ID NO: 156832 - DNA, 25 bp, SARS Virus
gaactggtgaaatctttagtgactg

SEQ ID NO: 156833 - DNA, 25 bp, SARS Virus
aactggtgaaaattttagtgactgt

SEQ ID NO: 156834 - DNA, 25 bp, SARS Virus
actggtgaaaactttagtgactgtt

SEQ ID NO: 156835 - DNA, 25 bp, SARS Virus
ctggtgaaaactttagtgactgttt

SEQ ID NO: 156836 - DNA, 25 bp, SARS Virus
tggtgaaaactttagtgactgttta

SEQ ID NO: 156837 - DNA, 25 bp, SARS Virus
ggtgaaaacttttgtgactgtttag

SEQ ID NO: 156838 - DNA, 25 bp, SARS Virus
gtgaaaactttattgactgtttaga

SEQ ID NO: 156839 - DNA, 25 bp, SARS Virus
tgaaaactttagtgactgtttagaa

SEQ ID NO: 156840 - DNA, 25 bp, SARS Virus
gaaaactttagttactgtttagaac

SEQ ID NO: 156841 - DNA, 25 bp, SARS Virus
aaaactttagtgtctgtttagaaca

SEQ ID NO: 156842 - DNA, 25 bp, SARS Virus
aaactttagtgattgtttagaacac

SEQ ID NO: 156843 - DNA, 25 bp, SARS Virus
aactttagtgactgtttagaacact

SEQ ID NO: 156844 - DNA, 25 bp, SARS Virus
actttagtgactttttagaacactg

SEQ ID NO: 156845 - DNA, 25 bp, SARS Virus
ctttagtgactgtttagaacactga

SEQ ID NO: 156846 - DNA, 25 bp, SARS Virus
tttagtgactgtttagaacactgaa

SEQ ID NO: 156847 - DNA, 25 bp, SARS Virus
ttagtgactgtttagaacactgaaa

SEQ ID NO: 156848 - DNA, 25 bp, SARS Virus
tagtgactgttttgaacactgaaat

SEQ ID NO: 156849 - DNA, 25 bp, SARS Virus
agtgactgtttataacactgaaata

SEQ ID NO: 156850 - DNA, 25 bp, SARS Virus
gtgactgtttagtacactgaaataa

SEQ ID NO: 156851 - DNA, 25 bp, SARS Virus
tgactgtttagatcactgaaataat

SEQ ID NO: 156852 - DNA, 25 bp, SARS Virus
gactgtttagaatactgaaataata

SEQ ID NO: 156853 - DNA, 25 bp, SARS Virus
actgtttagaactctgaaataatag

SEQ ID NO: 156854 - DNA, 25 bp, SARS Virus
ctgtttagaacattgaaataataga

SEQ ID NO: 156855 - DNA, 25 bp, SARS Virus
tgtttagaacactgaaataatagag

SEQ ID NO: 156856 - DNA, 25 bp, SARS Virus
gtttagaacacttaaataatagagc

SEQ ID NO: 156857 - DNA, 25 bp, SARS Virus
tttagaacactgtaataatagagct

SEQ ID NO: 156858 - DNA, 25 bp, SARS Virus
ttagaacactgatataatagagctg

SEQ ID NO: 156859 - DNA, 25 bp, SARS Virus
tagaacactgaattaatagagctgt

SEQ ID NO: 156860 - DNA, 25 bp, SARS Virus
agaacactgaaataatagagctgtt

SEQ ID NO: 156861 - DNA, 25 bp, SARS Virus
gaacactgaaattatagagctgttt

SEQ ID NO: 156862 - DNA, 25 bp, SARS Virus
aacactgaaatattagagctgtttc

SEQ ID NO: 156863 - DNA, 25 bp, SARS Virus
acactgaaataatagagctgtttca

SEQ ID NO: 156864 - DNA, 25 bp, SARS Virus
cactgaaataattgagctgtttcag

SEQ ID NO: 156865 - DNA, 25 bp, SARS Virus
actgaaataatatagctgtttcagt

SEQ ID NO: 156866 - DNA, 25 bp, SARS Virus
ctgaaataatagtgctgtttcagta

SEQ ID NO: 156867 - DNA, 25 bp, SARS Virus
tgaaataatagatctgtttcagtag

SEQ ID NO: 156868 - DNA, 25 bp, SARS Virus
gaaataatagagttgtttcagtagt

SEQ ID NO: 156869 - DNA, 25 bp, SARS Virus
aaataatagagctgtttcagtagtt

SEQ ID NO: 156870 - DNA, 25 bp, SARS Virus
aataatagagctttttcagtagttc

SEQ ID NO: 156871 - DNA, 25 bp, SARS Virus
ataatagagctgtttcagtagttca

SEQ ID NO: 156872 - DNA, 25 bp, SARS Virus
taatagagctgtttcagtagttcat

SEQ ID NO: 156873 - DNA, 25 bp, SARS Virus
aatagagctgtttcagtagttcatt

SEQ ID NO: 156874 - DNA, 25 bp, SARS Virus
atagagctgttttagtagttcattt

SEQ ID NO: 156875 - DNA, 25 bp, SARS Virus
tagagctgtttctgtagttcatttt

SEQ ID NO: 156876 - DNA, 25 bp, SARS Virus
agagctgtttcattagttcattttc

SEQ ID NO: 156877 - DNA, 25 bp, SARS Virus
gagctgtttcagtagttcattttct

SEQ ID NO: 156878 - DNA, 25 bp, SARS Virus
agctgtttcagttgttcattttcta

SEQ ID NO: 156879 - DNA, 25 bp, SARS Virus
gctgtttcagtatttcattttctag

SEQ ID NO: 156880 - DNA, 25 bp, SARS Virus
ctgtttcagtagttcattttctagt

SEQ ID NO: 156881 - DNA, 25 bp, SARS Virus
tgtttcagtagttcattttctagtt

SEQ ID NO: 156882 - DNA, 25 bp, SARS Virus
gtttcagtagtttattttctagtta

SEQ ID NO: 156883 - DNA, 25 bp, SARS Virus
tttcagtagttctttttctagttag

SEQ ID NO: 156884 - DNA, 25 bp, SARS Virus
ttcagtagttcattttctagttagt

SEQ ID NO: 156885 - DNA, 25 bp, SARS Virus
tcagtagttcattttctagttagtg

SEQ ID NO: 156886 - DNA, 25 bp, SARS Virus
cagtagttcattttctagttagtgt

SEQ ID NO: 156887 - DNA, 25 bp, SARS Virus
agtagttcattttctagttagtgtc

SEQ ID NO: 156888 - DNA, 25 bp, SARS Virus
gtagttcattttttagttagtgtct

SEQ ID NO: 156889 - DNA, 25 bp, SARS Virus
tagttcattttctagttagtgtctt

SEQ ID NO: 156890 - DNA, 25 bp, SARS Virus
agttcattttcttgttagtgtcttg

SEQ ID NO: 156891 - DNA, 25 bp, SARS Virus
gttcattttctatttagtgtcttgt

SEQ ID NO: 156892 - DNA, 25 bp, SARS Virus
ttcattttctagttagtgtcttgtg

SEQ ID NO: 156893 - DNA, 25 bp, SARS Virus
tcattttctagttagtgtcttgtgt

SEQ ID NO: 156894 - DNA, 25 bp, SARS Virus
cattttctagtttgtgtcttgtgtg

SEQ ID NO: 156895 - DNA, 25 bp, SARS Virus
attttctagttattgtcttgtgtgt

SEQ ID NO: 156896 - DNA, 25 bp, SARS Virus
ttttctagttagtgtcttgtgtgtg

SEQ ID NO: 156897 - DNA, 25 bp, SARS Virus
tttctagttagtttcttgtgtgtgt

SEQ ID NO: 156898 - DNA, 25 bp, SARS Virus
ttctagttagtgtcttgtgtgtgta

SEQ ID NO: 156899 - DNA, 25 bp, SARS Virus
tctagttagtgttttgtgtgtgtaa

SEQ ID NO: 156900 - DNA, 25 bp, SARS Virus
ctagttagtgtcttgtgtgtgtaaa

SEQ ID NO: 156901 - DNA, 25 bp, SARS Virus
tagttagtgtcttgtgtgtgtaaaa

SEQ ID NO: 156902 - DNA, 25 bp, SARS Virus
agttagtgtcttttgtgtgtaaaac

SEQ ID NO: 156903 - DNA, 25 bp, SARS Virus
gttagtgtcttgtgtgtgtaaaact

SEQ ID NO: 156904 - DNA, 25 bp, SARS Virus
ttagtgtcttgtttgtgtaaaacta

SEQ ID NO: 156905 - DNA, 25 bp, SARS Virus
tagtgtcttgtgtgtgtaaaactac

SEQ ID NO: 156906 - DNA, 25 bp, SARS Virus
agtgtcttgtgtttgtaaaactact

SEQ ID NO: 156907 - DNA, 25 bp, SARS Virus
gtgtcttgtgtgtgtaaaactactt

SEQ ID NO: 156908 - DNA, 25 bp, SARS Virus
tgtcttgtgtgtttaaaactacttg

SEQ ID NO: 156909 - DNA, 25 bp, SARS Virus
gtcttgtgtgtgtaaaactacttgg

SEQ ID NO: 156910 - DNA, 25 bp, SARS Virus
tcttgtgtgtgttaaactacttgga

SEQ ID NO: 156911 - DNA, 25 bp, SARS Virus
cttgtgtgtgtataactacttggac

SEQ ID NO: 156912 - DNA, 25 bp, SARS Virus
ttgtgtgtgtaatactacttggaca

SEQ ID NO: 156913 - DNA, 25 bp, SARS Virus
tgtgtgtgtaaatctacttggacaa

SEQ ID NO: 156914 - DNA, 25 bp, SARS Virus
gtgtgtgtaaaattacttggacaaa

SEQ ID NO: 156915 - DNA, 25 bp, SARS Virus
tgtgtgtaaaactacttggacaaac

SEQ ID NO: 156916 - DNA, 25 bp, SARS Virus
gtgtgtaaaacttcttggacaaacg

SEQ ID NO: 156917 - DNA, 25 bp, SARS Virus
tgtgtaaaactatttggacaaacgc

SEQ ID NO: 156918 - DNA, 25 bp, SARS Virus
gtgtaaaactacttggacaaacgcg

SEQ ID NO: 156919 - DNA, 25 bp, SARS Virus
tgtaaaactacttggacaaacgcgt

SEQ ID NO: 156920 - DNA, 25 bp, SARS Virus
gtaaaactactttgacaaacgcgta

SEQ ID NO: 156921 - DNA, 25 bp, SARS Virus
taaaactacttgtacaaacgcgtag

SEQ ID NO: 156922 - DNA, 25 bp, SARS Virus
aaaactacttggtcaaacgcgtaga

SEQ ID NO: 156923 - DNA, 25 bp, SARS Virus
aaactacttggataaacgcgtagac

SEQ ID NO: 156924 - DNA, 25 bp, SARS Virus
aactacttggactaacgcgtagaca

SEQ ID NO: 156925 - DNA, 25 bp, SARS Virus
actacttggacatacgcgtagacaa

SEQ ID NO: 156926 - DNA, 25 bp, SARS Virus
ctacttggacaatcgcgtagacaat

SEQ ID NO: 156927 - DNA, 25 bp, SARS Virus
tacttggacaaatgcgtagacaata

SEQ ID NO: 156928 - DNA, 25 bp, SARS Virus
acttggacaaactcgtagacaatac

SEQ ID NO: 156929 - DNA, 25 bp, SARS Virus
cttggacaaacgtgtagacaatact

SEQ ID NO: 156930 - DNA, 25 bp, SARS Virus
ttggacaaacgcttagacaatactt

SEQ ID NO: 156931 - DNA, 25 bp, SARS Virus
tggacaaacgcgtagacaatacttc

SEQ ID NO: 156932 - DNA, 25 bp, SARS Virus
ggacaaacgcgttgacaatacttca

SEQ ID NO: 156933 - DNA, 25 bp, SARS Virus
gacaaacgcgtatacaatacttcat

SEQ ID NO: 156934 - DNA, 25 bp, SARS Virus
acaaacgcgtagtcaatacttcatt

SEQ ID NO: 156935 - DNA, 25 bp, SARS Virus
caaacgcgtagataatacttcatta

SEQ ID NO: 156936 - DNA, 25 bp, SARS Virus
aaacgcgtagactatacttcattaa

SEQ ID NO: 156937 - DNA, 25 bp, SARS Virus
aacgcgtagacattacttcattaaa

SEQ ID NO: 156938 - DNA, 25 bp, SARS Virus
acgcgtagacaatacttcattaaaa

SEQ ID NO: 156939 - DNA, 25 bp, SARS Virus
cgcgtagacaattcttcattaaaaa

SEQ ID NO: 156940 - DNA, 25 bp, SARS Virus
gcgtagacaatatttcattaaaaag

SEQ ID NO: 156941 - DNA, 25 bp, SARS Virus
cgtagacaatacttcattaaaaagt

SEQ ID NO: 156942 - DNA, 25 bp, SARS Virus
gtagacaatacttcattaaaaagtg

SEQ ID NO: 156943 - DNA, 25 bp, SARS Virus
tagacaatactttattaaaaagtga

SEQ ID NO: 156944 - DNA, 25 bp, SARS Virus
agacaatacttctttaaaaagtgac

SEQ ID NO: 156945 - DNA, 25 bp, SARS Virus
gacaatacttcattaaaaagtgaca

SEQ ID NO: 156946 - DNA, 25 bp, SARS Virus
acaatacttcattaaaaagtgacac

SEQ ID NO: 156947 - DNA, 25 bp, SARS Virus
caatacttcatttaaaagtgacacg

SEQ ID NO: 156948 - DNA, 25 bp, SARS Virus
aatacttcattataaagtgacacga

SEQ ID NO: 156949 - DNA, 25 bp, SARS Virus
atacttcattaataagtgacacgac

SEQ ID NO: 156950 - DNA, 25 bp, SARS Virus
tacttcattaaatagtgacacgaca

SEQ ID NO: 156951 - DNA, 25 bp, SARS Virus
acttcattaaaatgtgacacgacag

SEQ ID NO: 156952 - DNA, 25 bp, SARS Virus
cttcattaaaaattgacacgacagg

SEQ ID NO: 156953 - DNA, 25 bp, SARS Virus
ttcattaaaaagtgacacgacaggt

SEQ ID NO: 156954 - DNA, 25 bp, SARS Virus
tcattaaaaagttacacgacaggta

SEQ ID NO: 156955 - DNA, 25 bp, SARS Virus
cattaaaaagtgtcacgacaggtat

SEQ ID NO: 156956 - DNA, 25 bp, SARS Virus
attaaaaagtgatacgacaggtatc

SEQ ID NO: 156957 - DNA, 25 bp, SARS Virus
ttaaaaagtgactcgacaggtatcc

SEQ ID NO: 156958 - DNA, 25 bp, SARS Virus
taaaaagtgacatgacaggtatccc

SEQ ID NO: 156959 - DNA, 25 bp, SARS Virus
aaaaagtgacactacaggtatccct

SEQ ID NO: 156960 - DNA, 25 bp, SARS Virus
aaaagtgacacgtcaggtatcccta

SEQ ID NO: 156961 - DNA, 25 bp, SARS Virus
aaagtgacacgataggtatccctat

SEQ ID NO: 156962 - DNA, 25 bp, SARS Virus
aagtgacacgactggtatccctatt

SEQ ID NO: 156963 - DNA, 25 bp, SARS Virus
agtgacacgacatgtatccctattt

SEQ ID NO: 156964 - DNA, 25 bp, SARS Virus
gtgacacgacagttatccctatttt

SEQ ID NO: 156965 - DNA, 25 bp, SARS Virus
tgacacgacaggtatccctatttta

SEQ ID NO: 156966 - DNA, 25 bp, SARS Virus
gacacgacaggtttccctattttag

SEQ ID NO: 156967 - DNA, 25 bp, SARS Virus
acacgacaggtatccctattttagg

SEQ ID NO: 156968 - DNA, 25 bp, SARS Virus
cacgacaggtattcctattttagga

SEQ ID NO: 156969 - DNA, 25 bp, SARS Virus
acgacaggtatctctattttaggag

SEQ ID NO: 156970 - DNA, 25 bp, SARS Virus
cgacaggtatccttattttaggaga

SEQ ID NO: 156971 - DNA, 25 bp, SARS Virus
gacaggtatccctattttaggagat

SEQ ID NO: 156972 - DNA, 25 bp, SARS Virus
acaggtatcccttttttaggagatt

SEQ ID NO: 156973 - DNA, 25 bp, SARS Virus
caggtatccctattttaggagatta

SEQ ID NO: 156974 - DNA, 25 bp, SARS Virus
aggtatccctattttaggagattaa

SEQ ID NO: 156975 - DNA, 25 bp, SARS Virus
ggtatccctattttaggagattaaa

SEQ ID NO: 156976 - DNA, 25 bp, SARS Virus
gtatccctattttaggagattaaat

SEQ ID NO: 156977 - DNA, 25 bp, SARS Virus
tatccctatttttggagattaaatt

SEQ ID NO: 156978 - DNA, 25 bp, SARS Virus
atccctattttatgagattaaattc

SEQ ID NO: 156979 - DNA, 25 bp, SARS Virus
tccctattttagtagattaaattca

SEQ ID NO: 156980 - DNA, 25 bp, SARS Virus
ccctattttaggtgattaaattcac

SEQ ID NO: 156981 - DNA, 25 bp, SARS Virus
cctattttaggatattaaattcacc

SEQ ID NO: 156982 - DNA, 25 bp, SARS Virus
ctattttaggagtttaaattcacca

SEQ ID NO: 156983 - DNA, 25 bp, SARS Virus
tattttaggagattaaattcaccac

SEQ ID NO: 156984 - DNA, 25 bp, SARS Virus
attttaggagattaaattcaccact

SEQ ID NO: 156985 - DNA, 25 bp, SARS Virus
ttttaggagatttaattcaccactt

SEQ ID NO: 156986 - DNA, 25 bp, SARS Virus
tttaggagattatattcaccactta

SEQ ID NO: 156987 - DNA, 25 bp, SARS Virus
ttaggagattaatttcaccacttag

SEQ ID NO: 156988 - DNA, 25 bp, SARS Virus
taggagattaaattcaccacttaga

SEQ ID NO: 156989 - DNA, 25 bp, SARS Virus
aggagattaaattcaccacttagaa

SEQ ID NO: 156990 - DNA, 25 bp, SARS Virus
ggagattaaatttaccacttagaac

SEQ ID NO: 156991 - DNA, 25 bp, SARS Virus
gagattaaattctccacttagaaca

SEQ ID NO: 156992 - DNA, 25 bp, SARS Virus
agattaaattcatcacttagaacac

SEQ ID NO: 156993 - DNA, 25 bp, SARS Virus
gattaaattcactacttagaacact

SEQ ID NO: 156994 - DNA, 25 bp, SARS Virus
attaaattcacctcttagaacactc

SEQ ID NO: 156995 - DNA, 25 bp, SARS Virus
ttaaattcaccatttagaacactcg

SEQ ID NO: 156996 - DNA, 25 bp, SARS Virus
taaattcaccacttagaacactcgc

SEQ ID NO: 156997 - DNA, 25 bp, SARS Virus
aaattcaccacttagaacactcgcg

SEQ ID NO: 156998 - DNA, 25 bp, SARS Virus
aattcaccactttgaacactcgcga

SEQ ID NO: 156999 - DNA, 25 bp, SARS Virus
attcaccacttataacactcgcgaa

SEQ ID NO: 157000 - DNA, 25 bp, SARS Virus
ttcaccacttagtacactcgcgaac

SEQ ID NO: 157001 - DNA, 25 bp, SARS Virus
tcaccacttagatcactcgcgaacc

SEQ ID NO: 157002 - DNA, 25 bp, SARS Virus
caccacttagaatactcgcgaaccg

SEQ ID NO: 157003 - DNA, 25 bp, SARS Virus
accacttagaactctcgcgaaccga

SEQ ID NO: 157004 - DNA, 25 bp, SARS Virus
ccacttagaacattcgcgaaccgat

SEQ ID NO: 157005 - DNA, 25 bp, SARS Virus
cacttagaacactcgcgaaccgatt

SEQ ID NO: 157006 - DNA, 25 bp, SARS Virus
acttagaacacttgcgaaccgattc

SEQ ID NO: 157007 - DNA, 25 bp, SARS Virus
cttagaacactctcgaaccgattcg

SEQ ID NO: 157008 - DNA, 25 bp, SARS Virus
ttagaacactcgtgaaccgattcgg

SEQ ID NO: 157009 - DNA, 25 bp, SARS Virus
tagaacactcgctaaccgattcgga

SEQ ID NO: 157010 - DNA, 25 bp, SARS Virus
agaacactcgcgtaccgattcggat

SEQ ID NO: 157011 - DNA, 25 bp, SARS Virus
gaacactcgcgatccgattcggata

SEQ ID NO: 157012 - DNA, 25 bp, SARS Virus
aacactcgcgaatcgattcggatag

SEQ ID NO: 157013 - DNA, 25 bp, SARS Virus
acactcgcgaactgattcggatagt

SEQ ID NO: 157014 - DNA, 25 bp, SARS Virus
cactcgcgaacctattcggatagta

SEQ ID NO: 157015 - DNA, 25 bp, SARS Virus
actcgcgaaccgtttcggatagtaa

SEQ ID NO: 157016 - DNA, 25 bp, SARS Virus
ctcgcgaaccgattcggatagtaat

SEQ ID NO: 157017 - DNA, 25 bp, SARS Virus
tcgcgaaccgattcggatagtaatt

SEQ ID NO: 157018 - DNA, 25 bp, SARS Virus
cgcgaaccgatttggatagtaattt

SEQ ID NO: 157019 - DNA, 25 bp, SARS Virus
gcgaaccgattctgatagtaattta

SEQ ID NO: 157020 - DNA, 25 bp, SARS Virus
cgaaccgattcgtatagtaatttac

SEQ ID NO: 157021 - DNA, 25 bp, SARS Virus
gaaccgattcggttagtaatttact

SEQ ID NO: 157022 - DNA, 25 bp, SARS Virus
aaccgattcggatagtaatttactt

SEQ ID NO: 157023 - DNA, 25 bp, SARS Virus
accgattcggattgtaatttacttc

SEQ ID NO: 157024 - DNA, 25 bp, SARS Virus
ccgattcggatattaatttacttct

SEQ ID NO: 157025 - DNA, 25 bp, SARS Virus
cgattcggatagtaatttacttctg

SEQ ID NO: 157026 - DNA, 25 bp, SARS Virus
gattcggatagttatttacttctgg

SEQ ID NO: 157027 - DNA, 25 bp, SARS Virus
attcggatagtattttacttctggc

SEQ ID NO: 157028 - DNA, 25 bp, SARS Virus
ttcggatagtaatttacttctggcg

SEQ ID NO: 157029 - DNA, 25 bp, SARS Virus
tcggatagtaatttacttctggcgg

SEQ ID NO: 157030 - DNA, 25 bp, SARS Virus
cggatagtaatttacttctggcggt

SEQ ID NO: 157031 - DNA, 25 bp, SARS Virus
ggatagtaattttcttctggcggtt

SEQ ID NO: 157032 - DNA, 25 bp, SARS Virus
gatagtaatttatttctggcggttc

SEQ ID NO: 157033 - DNA, 25 bp, SARS Virus
atagtaatttacttctggcggttca

SEQ ID NO: 157034 - DNA, 25 bp, SARS Virus
tagtaatttacttctggcggttcaa

SEQ ID NO: 157035 - DNA, 25 bp, SARS Virus
agtaatttacttttggcggttcaac

SEQ ID NO: 157036 - DNA, 25 bp, SARS Virus
gtaatttacttctggcggttcaaca

SEQ ID NO: 157037 - DNA, 25 bp, SARS Virus
taatttacttcttgcggttcaacag

SEQ ID NO: 157038 - DNA, 25 bp, SARS Virus
aatttacttctgtcggttcaacagg

SEQ ID NO: 157039 - DNA, 25 bp, SARS Virus
atttacttctggtggttcaacaggt

SEQ ID NO: 157040 - DNA, 25 bp, SARS Virus
tttacttctggctgttcaacaggta

SEQ ID NO: 157041 - DNA, 25 bp, SARS Virus
ttacttctggcgtttcaacaggtac

SEQ ID NO: 157042 - DNA, 25 bp, SARS Virus
tacttctggcggttcaacaggtact

SEQ ID NO: 157043 - DNA, 25 bp, SARS Virus
acttctggcggttcaacaggtactg

SEQ ID NO: 157044 - DNA, 25 bp, SARS Virus
cttctggcggtttaacaggtactga

SEQ ID NO: 157045 - DNA, 25 bp, SARS Virus
ttctggcggttctacaggtactgac

SEQ ID NO: 157046 - DNA, 25 bp, SARS Virus
tctggcggttcatcaggtactgact

SEQ ID NO: 157047 - DNA, 25 bp, SARS Virus
ctggcggttcaataggtactgactt

SEQ ID NO: 157048 - DNA, 25 bp, SARS Virus
tggcggttcaactggtactgacttt

SEQ ID NO: 157049 - DNA, 25 bp, SARS Virus
ggcggttcaacatgtactgacttta

SEQ ID NO: 157050 - DNA, 25 bp, SARS Virus
gcggttcaacagttactgactttag

SEQ ID NO: 157051 - DNA, 25 bp, SARS Virus
cggttcaacaggtactgactttaga

SEQ ID NO: 157052 - DNA, 25 bp, SARS Virus
ggttcaacaggttctgactttagag

SEQ ID NO: 157053 - DNA, 25 bp, SARS Virus
gttcaacaggtattgactttagagg

SEQ ID NO: 157054 - DNA, 25 bp, SARS Virus
ttcaacaggtactgactttagaggt

SEQ ID NO: 157055 - DNA, 25 bp, SARS Virus
tcaacaggtacttactttagaggta

SEQ ID NO: 157056 - DNA, 25 bp, SARS Virus
caacaggtactgtctttagaggtat

SEQ ID NO: 157057 - DNA, 25 bp, SARS Virus
aacaggtactgattttagaggtatt

SEQ ID NO: 157058 - DNA, 25 bp, SARS Virus
acaggtactgactttagaggtattt

SEQ ID NO: 157059 - DNA, 25 bp, SARS Virus
caggtactgactttagaggtatttg

SEQ ID NO: 157060 - DNA, 25 bp, SARS Virus
aggtactgactttagaggtatttgc

SEQ ID NO: 157061 - DNA, 25 bp, SARS Virus
ggtactgacttttgaggtatttgct

SEQ ID NO: 157062 - DNA, 25 bp, SARS Virus
gtactgactttataggtatttgcta

SEQ ID NO: 157063 - DNA, 25 bp, SARS Virus
tactgactttagtggtatttgctac

SEQ ID NO: 157064 - DNA, 25 bp, SARS Virus
actgactttagatgtatttgctaca

SEQ ID NO: 157065 - DNA, 25 bp, SARS Virus
ctgactttagagttatttgctacac

SEQ ID NO: 157066 - DNA, 25 bp, SARS Virus
tgactttagaggtatttgctacaca

SEQ ID NO: 157067 - DNA, 25 bp, SARS Virus
gactttagaggtttttgctacacaa

SEQ ID NO: 157068 - DNA, 25 bp, SARS Virus
actttagaggtatttgctacacaag

SEQ ID NO: 157069 - DNA, 25 bp, SARS Virus
ctttagaggtatttgctacacaagc

SEQ ID NO: 157070 - DNA, 25 bp, SARS Virus
tttagaggtatttgctacacaagct

SEQ ID NO: 157071 - DNA, 25 bp, SARS Virus
ttagaggtattttctacacaagctt

SEQ ID NO: 157072 - DNA, 25 bp, SARS Virus
tagaggtatttgttacacaagcttc

SEQ ID NO: 157073 - DNA, 25 bp, SARS Virus
agaggtatttgctacacaagcttcc

SEQ ID NO: 157074 - DNA, 25 bp, SARS Virus
gaggtatttgcttcacaagcttccg

SEQ ID NO: 157075 - DNA, 25 bp, SARS Virus
aggtatttgctatacaagcttccgt

SEQ ID NO: 157076 - DNA, 25 bp, SARS Virus
ggtatttgctactcaagcttccgta

SEQ ID NO: 157077 - DNA, 25 bp, SARS Virus
gtatttgctacataagcttccgtat

SEQ ID NO: 157078 - DNA, 25 bp, SARS Virus
tatttgctacactagcttccgtatc

SEQ ID NO: 157079 - DNA, 25 bp, SARS Virus
atttgctacacatgcttccgtatcg

SEQ ID NO: 157080 - DNA, 25 bp, SARS Virus
tttgctacacaatcttccgtatcgg

SEQ ID NO: 157081 - DNA, 25 bp, SARS Virus
ttgctacacaagtttccgtatcggg

SEQ ID NO: 157082 - DNA, 25 bp, SARS Virus
tgctacacaagcttccgtatcggga

SEQ ID NO: 157083 - DNA, 25 bp, SARS Virus
gctacacaagcttccgtatcgggag

SEQ ID NO: 157084 - DNA, 25 bp, SARS Virus
ctacacaagctttcgtatcgggagc

SEQ ID NO: 157085 - DNA, 25 bp, SARS Virus
tacacaagcttctgtatcgggagct

SEQ ID NO: 157086 - DNA, 25 bp, SARS Virus
acacaagcttccttatcgggagctc

SEQ ID NO: 157087 - DNA, 25 bp, SARS Virus
cacaagcttccgtatcgggagctcg

SEQ ID NO: 157088 - DNA, 25 bp, SARS Virus
acaagcttccgtttcgggagctcga

SEQ ID NO: 157089 - DNA, 25 bp, SARS Virus
caagcttccgtatcgggagctcgaa

SEQ ID NO: 157090 - DNA, 25 bp, SARS Virus
aagcttccgtattgggagctcgaat

SEQ ID NO: 157091 - DNA, 25 bp, SARS Virus
agcttccgtatctggagctcgaata

SEQ ID NO: 157092 - DNA, 25 bp, SARS Virus
gcttccgtatcgtgagctcgaatat

SEQ ID NO: 157093 - DNA, 25 bp, SARS Virus
cttccgtatcggtagctcgaatata

SEQ ID NO: 157094 - DNA, 25 bp, SARS Virus
ttccgtatcgggtgctcgaatatag

SEQ ID NO: 157095 - DNA, 25 bp, SARS Virus
tccgtatcgggatctcgaatatagc

SEQ ID NO: 157096 - DNA, 25 bp, SARS Virus
ccgtatcgggagttcgaatatagcg

SEQ ID NO: 157097 - DNA, 25 bp, SARS Virus
cgtatcgggagctcgaatatagcga

SEQ ID NO: 157098 - DNA, 25 bp, SARS Virus
gtatcgggagcttgaatatagcgac

SEQ ID NO: 157099 - DNA, 25 bp, SARS Virus
tatcgggagctctaatatagcgaca

SEQ ID NO: 157100 - DNA, 25 bp, SARS Virus
atcgggagctcgtatatagcgacat

SEQ ID NO: 157101 - DNA, 25 bp, SARS Virus
tcgggagctcgattatagcgacata

SEQ ID NO: 157102 - DNA, 25 bp, SARS Virus
cgggagctcgaatatagcgacatac

SEQ ID NO: 157103 - DNA, 25 bp, SARS Virus
gggagctcgaatttagcgacatact

SEQ ID NO: 157104 - DNA, 25 bp, SARS Virus
ggagctcgaatatagcgacatactt

SEQ ID NO: 157105 - DNA, 25 bp, SARS Virus
gagctcgaatattgcgacatactta

SEQ ID NO: 157106 - DNA, 25 bp, SARS Virus
agctcgaatatatcgacatacttaa

SEQ ID NO: 157107 - DNA, 25 bp, SARS Virus
gctcgaatatagtgacatacttaag

SEQ ID NO: 157108 - DNA, 25 bp, SARS Virus
ctcgaatatagctacatacttaagt

SEQ ID NO: 157109 - DNA, 25 bp, SARS Virus
tcgaatatagcgtcatacttaagta

SEQ ID NO: 157110 - DNA, 25 bp, SARS Virus
cgaatatagcgatatacttaagtag

SEQ ID NO: 157111 - DNA, 25 bp, SARS Virus
gaatatagcgacttacttaagtagg

SEQ ID NO: 157112 - DNA, 25 bp, SARS Virus
aatatagcgacatacttaagtaggt

SEQ ID NO: 157113 - DNA, 25 bp, SARS Virus
atatagcgacattcttaagtaggta

SEQ ID NO: 157114 - DNA, 25 bp, SARS Virus
tatagcgacatatttaagtaggtat

SEQ ID NO: 157115 - DNA, 25 bp, SARS Virus
atagcgacatacttaagtaggtatc

SEQ ID NO: 157116 - DNA, 25 bp, SARS Virus
tagcgacatacttaagtaggtatcg

SEQ ID NO: 157117 - DNA, 25 bp, SARS Virus
agcgacatactttagtaggtatcgc

SEQ ID NO: 157118 - DNA, 25 bp, SARS Virus
gcgacatacttatgtaggtatcgct

SEQ ID NO: 157119 - DNA, 25 bp, SARS Virus
cgacatacttaattaggtatcgctc

SEQ ID NO: 157120 - DNA, 25 bp, SARS Virus
gacatacttaagtaggtatcgctcg

SEQ ID NO: 157121 - DNA, 25 bp, SARS Virus
acatacttaagttggtatcgctcga

SEQ ID NO: 157122 - DNA, 25 bp, SARS Virus
catacttaagtatgtatcgctcgag

SEQ ID NO: 157123 - DNA, 25 bp, SARS Virus
atacttaagtagttatcgctcgagc

SEQ ID NO: 157124 - DNA, 25 bp, SARS Virus
tacttaagtaggtatcgctcgagct

SEQ ID NO: 157125 - DNA, 25 bp, SARS Virus
acttaagtaggtttcgctcgagctc

SEQ ID NO: 157126 - DNA, 25 bp, SARS Virus
cttaagtaggtatcgctcgagctct

SEQ ID NO: 157127 - DNA, 25 bp, SARS Virus
ttaagtaggtattgctcgagctctt

SEQ ID NO: 157128 - DNA, 25 bp, SARS Virus
taagtaggtatctctcgagctcttt

SEQ ID NO: 157129 - DNA, 25 bp, SARS Virus
aagtaggtatcgttcgagctctttc

SEQ ID NO: 157130 - DNA, 25 bp, SARS Virus
agtaggtatcgctcgagctctttca

SEQ ID NO: 157131 - DNA, 25 bp, SARS Virus
gtaggtatcgcttgagctctttcag

SEQ ID NO: 157132 - DNA, 25 bp, SARS Virus
taggtatcgctctagctctttcagt

SEQ ID NO: 157133 - DNA, 25 bp, SARS Virus
aggtatcgctcgtgctctttcagtc

SEQ ID NO: 157134 - DNA, 25 bp, SARS Virus
ggtatcgctcgatctctttcagtca

SEQ ID NO: 157135 - DNA, 25 bp, SARS Virus
gtatcgctcgagttctttcagtcaa

SEQ ID NO: 157136 - DNA, 25 bp, SARS Virus
tatcgctcgagctctttcagtcaaa

SEQ ID NO: 157137 - DNA, 25 bp, SARS Virus
atcgctcgagctttttcagtcaaag

SEQ ID NO: 157138 - DNA, 25 bp, SARS Virus
tcgctcgagctctttcagtcaaagg

SEQ ID NO: 157139 - DNA, 25 bp, SARS Virus
cgctcgagctctttcagtcaaaggt

SEQ ID NO: 157140 - DNA, 25 bp, SARS Virus
gctcgagctctttcagtcaaaggta

SEQ ID NO: 157141 - DNA, 25 bp, SARS Virus
ctcgagctcttttagtcaaaggtaa

SEQ ID NO: 157142 - DNA, 25 bp, SARS Virus
tcgagctctttctgtcaaaggtaaa

SEQ ID NO: 157143 - DNA, 25 bp, SARS Virus
cgagctctttcattcaaaggtaaac

SEQ ID NO: 157144 - DNA, 25 bp, SARS Virus
gagctctttcagtcaaaggtaaaca

SEQ ID NO: 157145 - DNA, 25 bp, SARS Virus
agctctttcagttaaaggtaaacac

SEQ ID NO: 157146 - DNA, 25 bp, SARS Virus
gctctttcagtctaaggtaaacact

SEQ ID NO: 157147 - DNA, 25 bp, SARS Virus
ctctttcagtcataggtaaacacta

SEQ ID NO: 157148 - DNA, 25 bp, SARS Virus
tctttcagtcaatggtaaacactag

SEQ ID NO: 157149 - DNA, 25 bp, SARS Virus
ctttcagtcaaatgtaaacactaga

SEQ ID NO: 157150 - DNA, 25 bp, SARS Virus
tttcagtcaaagttaaacactagac

SEQ ID NO: 157151 - DNA, 25 bp, SARS Virus
ttcagtcaaaggtaaacactagacc

SEQ ID NO: 157152 - DNA, 25 bp, SARS Virus
tcagtcaaaggttaacactagaccc

SEQ ID NO: 157153 - DNA, 25 bp, SARS Virus
cagtcaaaggtatacactagacccg

SEQ ID NO: 157154 - DNA, 25 bp, SARS Virus
agtcaaaggtaatcactagacccga

SEQ ID NO: 157155 - DNA, 25 bp, SARS Virus
gtcaaaggtaaatactagacccgaa

SEQ ID NO: 157156 - DNA, 25 bp, SARS Virus
tcaaaggtaaactctagacccgaat

SEQ ID NO: 157157 - DNA, 25 bp, SARS Virus
caaaggtaaacattagacccgaatt

SEQ ID NO: 157158 - DNA, 25 bp, SARS Virus
aaaggtaaacactagacccgaattt

SEQ ID NO: 157159 - DNA, 25 bp, SARS Virus
aaggtaaacacttgacccgaatttt

SEQ ID NO: 157160 - DNA, 25 bp, SARS Virus
aggtaaacactatacccgaatttta

SEQ ID NO: 157161 - DNA, 25 bp, SARS Virus
ggtaaacactagtcccgaattttag

SEQ ID NO: 157162 - DNA, 25 bp, SARS Virus
gtaaacactagatccgaattttagg

SEQ ID NO: 157163 - DNA, 25 bp, SARS Virus
taaacactagactcgaattttagga

SEQ ID NO: 157164 - DNA, 25 bp, SARS Virus
aaacactagacctgaattttaggag

SEQ ID NO: 157165 - DNA, 25 bp, SARS Virus
aacactagaccctaattttaggaga

SEQ ID NO: 157166 - DNA, 25 bp, SARS Virus
acactagacccgtattttaggagat

SEQ ID NO: 157167 - DNA, 25 bp, SARS Virus
cactagacccgatttttaggagatt

SEQ ID NO: 157168 - DNA, 25 bp, SARS Virus
actagacccgaattttaggagattc

SEQ ID NO: 157169 - DNA, 25 bp, SARS Virus
ctagacccgaatattaggagattca

SEQ ID NO: 157170 - DNA, 25 bp, SARS Virus
tagacccgaattataggagattcag

SEQ ID NO: 157171 - DNA, 25 bp, SARS Virus
agacccgaatttaaggagattcaga

SEQ ID NO: 157172 - DNA, 25 bp, SARS Virus
gacccgaattttaggagattcagag

SEQ ID NO: 157173 - DNA, 25 bp, SARS Virus
acccgaattttaagagattcagaga

SEQ ID NO: 157174 - DNA, 25 bp, SARS Virus
cccgaattttagaagattcagagac

SEQ ID NO: 157175 - DNA, 25 bp, SARS Virus
ccgaattttaggagattcagagacg

SEQ ID NO: 157176 - DNA, 25 bp, SARS Virus
cgaattttaggaaattcagagacga

SEQ ID NO: 157177 - DNA, 25 bp, SARS Virus
gaattttaggagattcagagacgag

SEQ ID NO: 157178 - DNA, 25 bp, SARS Virus
aattttaggagaatcagagacgaga

SEQ ID NO: 157179 - DNA, 25 bp, SARS Virus
attttaggagatacagagacgagac

SEQ ID NO: 157180 - DNA, 25 bp, SARS Virus
ttttaggagattaagagacgagact

SEQ ID NO: 157181 - DNA, 25 bp, SARS Virus
tttaggagattcagagacgagactc

SEQ ID NO: 157182 - DNA, 25 bp, SARS Virus
ttaggagattcaaagacgagactca

SEQ ID NO: 157183 - DNA, 25 bp, SARS Virus
taggagattcagagacgagactcat

SEQ ID NO: 157184 - DNA, 25 bp, SARS Virus
aggagattcagaaacgagactcatt

SEQ ID NO: 157185 - DNA, 25 bp, SARS Virus
ggagattcagagacgagactcattt

SEQ ID NO: 157186 - DNA, 25 bp, SARS Virus
gagattcagagaagagactcatttc

SEQ ID NO: 157187 - DNA, 25 bp, SARS Virus
agattcagagacaagactcatttca

SEQ ID NO: 157188 - DNA, 25 bp, SARS Virus
gattcagagacgagactcatttcat

SEQ ID NO: 157189 - DNA, 25 bp, SARS Virus
attcagagacgaaactcatttcatc

SEQ ID NO: 157190 - DNA, 25 bp, SARS Virus
ttcagagacgagactcatttcatcc

SEQ ID NO: 157191 - DNA, 25 bp, SARS Virus
tcagagacgagaatcatttcatcca

SEQ ID NO: 157192 - DNA, 25 bp, SARS Virus
cagagacgagacacatttcatccaa

SEQ ID NO: 157193 - DNA, 25 bp, SARS Virus
agagacgagactaatttcatccaaa

SEQ ID NO: 157194 - DNA, 25 bp, SARS Virus
gagacgagactcatttcatccaaag

SEQ ID NO: 157195 - DNA, 25 bp, SARS Virus
agacgagactcaattcatccaaagt

SEQ ID NO: 157196 - DNA, 25 bp, SARS Virus
gacgagactcatatcatccaaagtc

SEQ ID NO: 157197 - DNA, 25 bp, SARS Virus
acgagactcattacatccaaagtcc

SEQ ID NO: 157198 - DNA, 25 bp, SARS Virus
cgagactcatttaatccaaagtccg

SEQ ID NO: 157199 - DNA, 25 bp, SARS Virus
gagactcatttcatccaaagtccgt

SEQ ID NO: 157200 - DNA, 25 bp, SARS Virus
agactcatttcaaccaaagtccgtt

SEQ ID NO: 157201 - DNA, 25 bp, SARS Virus
gactcatttcatacaaagtccgttg

SEQ ID NO: 157202 - DNA, 25 bp, SARS Virus
actcatttcatcaaaagtccgttga

SEQ ID NO: 157203 - DNA, 25 bp, SARS Virus
ctcatttcatccaaagtccgttgac

SEQ ID NO: 157204 - DNA, 25 bp, SARS Virus
tcatttcatccaaagtccgttgaca

SEQ ID NO: 157205 - DNA, 25 bp, SARS Virus
catttcatccaaagtccgttgacaa

SEQ ID NO: 157206 - DNA, 25 bp, SARS Virus
atttcatccaaaatccgttgacaac

SEQ ID NO: 157207 - DNA, 25 bp, SARS Virus
tttcatccaaagaccgttgacaact

SEQ ID NO: 157208 - DNA, 25 bp, SARS Virus
ttcatccaaagtacgttgacaactt

SEQ ID NO: 157209 - DNA, 25 bp, SARS Virus
tcatccaaagtcagttgacaactta

SEQ ID NO: 157210 - DNA, 25 bp, SARS Virus
catccaaagtccattgacaacttat

SEQ ID NO: 157211 - DNA, 25 bp, SARS Virus
atccaaagtccgatgacaacttatt

SEQ ID NO: 157212 - DNA, 25 bp, SARS Virus
tccaaagtccgtagacaacttatta

SEQ ID NO: 157213 - DNA, 25 bp, SARS Virus
ccaaagtccgttaacaacttattac

SEQ ID NO: 157214 - DNA, 25 bp, SARS Virus
caaagtccgttgacaacttattacg

SEQ ID NO: 157215 - DNA, 25 bp, SARS Virus
aaagtccgttgaaaacttattacgg

SEQ ID NO: 157216 - DNA, 25 bp, SARS Virus
aagtccgttgacaacttattacggc

SEQ ID NO: 157217 - DNA, 25 bp, SARS Virus
agtccgttgacaacttattacggca

SEQ ID NO: 157218 - DNA, 25 bp, SARS Virus
gtccgttgacaaattattacggcag

SEQ ID NO: 157219 - DNA, 25 bp, SARS Virus
tccgttgacaacatattacggcaga

SEQ ID NO: 157220 - DNA, 25 bp, SARS Virus
ccgttgacaactaattacggcagat

SEQ ID NO: 157221 - DNA, 25 bp, SARS Virus
cgttgacaacttattacggcagatg

SEQ ID NO: 157222 - DNA, 25 bp, SARS Virus
gttgacaacttaatacggcagatga

SEQ ID NO: 157223 - DNA, 25 bp, SARS Virus
ttgacaacttataacggcagatgaa

SEQ ID NO: 157224 - DNA, 25 bp, SARS Virus
tgacaacttattacggcagatgaaa

SEQ ID NO: 157225 - DNA, 25 bp, SARS Virus
gacaacttattaaggcagatgaaag

SEQ ID NO: 157226 - DNA, 25 bp, SARS Virus
acaacttattacagcagatgaaaga

SEQ ID NO: 157227 - DNA, 25 bp, SARS Virus
caacttattacgacagatgaaagaa

SEQ ID NO: 157228 - DNA, 25 bp, SARS Virus
aacttattacggaagatgaaagaat

SEQ ID NO: 157229 - DNA, 25 bp, SARS Virus
acttattacggcagatgaaagaatt

SEQ ID NO: 157230 - DNA, 25 bp, SARS Virus
cttattacggcaaatgaaagaattt

SEQ ID NO: 157231 - DNA, 25 bp, SARS Virus
ttattacggcagatgaaagaatttc

SEQ ID NO: 157232 - DNA, 25 bp, SARS Virus
tattacggcagaagaaagaatttca

SEQ ID NO: 157233 - DNA, 25 bp, SARS Virus
attacggcagataaaagaatttcat

SEQ ID NO: 157234 - DNA, 25 bp, SARS Virus
ttacggcagatgaaagaatttcatc

SEQ ID NO: 157235 - DNA, 25 bp, SARS Virus
tacggcagatgaaagaatttcatca

SEQ ID NO: 157236 - DNA, 25 bp, SARS Virus
acggcagatgaaagaatttcatcaa

SEQ ID NO: 157237 - DNA, 25 bp, SARS Virus
cggcagatgaaaaaatttcatcaat

SEQ ID NO: 157238 - DNA, 25 bp, SARS Virus
ggcagatgaaagaatttcatcaatt

SEQ ID NO: 157239 - DNA, 25 bp, SARS Virus
gcagatgaaagaatttcatcaattt

SEQ ID NO: 157240 - DNA, 25 bp, SARS Virus
cagatgaaagaaattcatcaatttg

SEQ ID NO: 157241 - DNA, 25 bp, SARS Virus
agatgaaagaatatcatcaatttga

SEQ ID NO: 157242 - DNA, 25 bp, SARS Virus
gatgaaagaattacatcaatttgac

SEQ ID NO: 157243 - DNA, 25 bp, SARS Virus
atgaaagaatttaatcaatttgaca

SEQ ID NO: 157244 - DNA, 25 bp, SARS Virus
tgaaagaatttcatcaatttgacac

SEQ ID NO: 157245 - DNA, 25 bp, SARS Virus
gaaagaatttcaacaatttgacaca

SEQ ID NO: 157246 - DNA, 25 bp, SARS Virus
aaagaatttcataaatttgacacaa

SEQ ID NO: 157247 - DNA, 25 bp, SARS Virus
aagaatttcatcaatttgacacaaa

SEQ ID NO: 157248 - DNA, 25 bp, SARS Virus
agaatttcatcaatttgacacaaaa

SEQ ID NO: 157249 - DNA, 25 bp, SARS Virus
gaatttcatcaaattgacacaaaaa

SEQ ID NO: 157250 - DNA, 25 bp, SARS Virus
aatttcatcaatatgacacaaaaat

SEQ ID NO: 157251 - DNA, 25 bp, SARS Virus
atttcatcaattagacacaaaaatg

SEQ ID NO: 157252 - DNA, 25 bp, SARS Virus
tttcatcaatttaacacaaaaatga

SEQ ID NO: 157253 - DNA, 25 bp, SARS Virus
ttcatcaatttgacacaaaaatgac

SEQ ID NO: 157254 - DNA, 25 bp, SARS Virus
tcatcaatttgaaacaaaaatgact

SEQ ID NO: 157255 - DNA, 25 bp, SARS Virus
catcaatttgacacaaaaatgacta

SEQ ID NO: 157256 - DNA, 25 bp, SARS Virus
atcaatttgacaaaaaaatgactaa

SEQ ID NO: 157257 - DNA, 25 bp, SARS Virus
tcaatttgacacaaaaatgactaag

SEQ ID NO: 157258 - DNA, 25 bp, SARS Virus
caatttgacacaaaaatgactaaga

SEQ ID NO: 157259 - DNA, 25 bp, SARS Virus
aatttgacacaaaaatgactaagag

SEQ ID NO: 157260 - DNA, 25 bp, SARS Virus
atttgacacaaaaatgactaagagg

SEQ ID NO: 157261 - DNA, 25 bp, SARS Virus
tttgacacaaaaatgactaagaggt

SEQ ID NO: 157262 - DNA, 25 bp, SARS Virus
ttgacacaaaaaagactaagaggtt

SEQ ID NO: 157263 - DNA, 25 bp, SARS Virus
tgacacaaaaataactaagaggtta

SEQ ID NO: 157264 - DNA, 25 bp, SARS Virus
gacacaaaaatgactaagaggttaa

SEQ ID NO: 157265 - DNA, 25 bp, SARS Virus
acacaaaaatgaataagaggttaat

SEQ ID NO: 157266 - DNA, 25 bp, SARS Virus
cacaaaaatgacaaagaggttaatt

SEQ ID NO: 157267 - DNA, 25 bp, SARS Virus
acaaaaatgactaagaggttaatta

SEQ ID NO: 157268 - DNA, 25 bp, SARS Virus
caaaaatgactaagaggttaattac

SEQ ID NO: 157269 - DNA, 25 bp, SARS Virus
aaaaatgactaaaaggttaattaca

SEQ ID NO: 157270 - DNA, 25 bp, SARS Virus
aaaatgactaagaggttaattacac

SEQ ID NO: 157271 - DNA, 25 bp, SARS Virus
aaatgactaagaagttaattacact

SEQ ID NO: 157272 - DNA, 25 bp, SARS Virus
aatgactaagagattaattacactg

SEQ ID NO: 157273 - DNA, 25 bp, SARS Virus
atgactaagaggataattacactga

SEQ ID NO: 157274 - DNA, 25 bp, SARS Virus
tgactaagaggtaaattacactgag

SEQ ID NO: 157275 - DNA, 25 bp, SARS Virus
gactaagaggttaattacactgagg

SEQ ID NO: 157276 - DNA, 25 bp, SARS Virus
actaagaggttaattacactgaggt

SEQ ID NO: 157277 - DNA, 25 bp, SARS Virus
ctaagaggttaaatacactgaggta

SEQ ID NO: 157278 - DNA, 25 bp, SARS Virus
taagaggttaataacactgaggtaa

SEQ ID NO: 157279 - DNA, 25 bp, SARS Virus
aagaggttaattacactgaggtaac

SEQ ID NO: 157280 - DNA, 25 bp, SARS Virus
agaggttaattaaactgaggtaact

SEQ ID NO: 157281 - DNA, 25 bp, SARS Virus
gaggttaattacactgaggtaactg

SEQ ID NO: 157282 - DNA, 25 bp, SARS Virus
aggttaattacaatgaggtaactgc

SEQ ID NO: 157283 - DNA, 25 bp, SARS Virus
ggttaattacacagaggtaactgcg

SEQ ID NO: 157284 - DNA, 25 bp, SARS Virus
gttaattacactaaggtaactgcga

SEQ ID NO: 157285 - DNA, 25 bp, SARS Virus
ttaattacactgaggtaactgcgat

SEQ ID NO: 157286 - DNA, 25 bp, SARS Virus
taattacactgaagtaactgcgatc

SEQ ID NO: 157287 - DNA, 25 bp, SARS Virus
aattacactgagataactgcgatcg

SEQ ID NO: 157288 - DNA, 25 bp, SARS Virus
attacactgaggaaactgcgatcga

SEQ ID NO: 157289 - DNA, 25 bp, SARS Virus
ttacactgaggtaactgcgatcgaa

SEQ ID NO: 157290 - DNA, 25 bp, SARS Virus
tacactgaggtaactgcgatcgaac

SEQ ID NO: 157291 - DNA, 25 bp, SARS Virus
acactgaggtaaatgcgatcgaaca

SEQ ID NO: 157292 - DNA, 25 bp, SARS Virus
cactgaggtaacagcgatcgaacac

SEQ ID NO: 157293 - DNA, 25 bp, SARS Virus
actgaggtaactacgatcgaacacg

SEQ ID NO: 157294 - DNA, 25 bp, SARS Virus
ctgaggtaactgagatcgaacacga

SEQ ID NO: 157295 - DNA, 25 bp, SARS Virus
tgaggtaactgcaatcgaacacgac

SEQ ID NO: 157296 - DNA, 25 bp, SARS Virus
gaggtaactgcgatcgaacacgacc

SEQ ID NO: 157297 - DNA, 25 bp, SARS Virus
aggtaactgcgaacgaacacgacca

SEQ ID NO: 157298 - DNA, 25 bp, SARS Virus
ggtaactgcgatagaacacgaccag

SEQ ID NO: 157299 - DNA, 25 bp, SARS Virus
gtaactgcgatcaaacacgaccagg

SEQ ID NO: 157300 - DNA, 25 bp, SARS Virus
taactgcgatcgaacacgaccaggg

SEQ ID NO: 157301 - DNA, 25 bp, SARS Virus
aactgcgatcgaacacgaccaggga

SEQ ID NO: 157302 - DNA, 25 bp, SARS Virus
actgcgatcgaaaacgaccagggaa

SEQ ID NO: 157303 - DNA, 25 bp, SARS Virus
ctgcgatcgaacacgaccagggaaa

SEQ ID NO: 157304 - DNA, 25 bp, SARS Virus
tgcgatcgaacaagaccagggaaac

SEQ ID NO: 157305 - DNA, 25 bp, SARS Virus
gcgatcgaacacaaccagggaaact

SEQ ID NO: 157306 - DNA, 25 bp, SARS Virus
cgatcgaacacgaccagggaaactt

SEQ ID NO: 157307 - DNA, 25 bp, SARS Virus
gatcgaacacgaacagggaaacttc

SEQ ID NO: 157308 - DNA, 25 bp, SARS Virus
atcgaacacgacaagggaaacttcc

SEQ ID NO: 157309 - DNA, 25 bp, SARS Virus
tcgaacacgaccagggaaacttcca

SEQ ID NO: 157310 - DNA, 25 bp, SARS Virus
cgaacacgaccaaggaaacttccac

SEQ ID NO: 157311 - DNA, 25 bp, SARS Virus
gaacacgaccagagaaacttccaca

SEQ ID NO: 157312 - DNA, 25 bp, SARS Virus
aacacgaccaggaaaacttccacaa

SEQ ID NO: 157313 - DNA, 25 bp, SARS Virus
acacgaccagggaaacttccacaat

SEQ ID NO: 157314 - DNA, 25 bp, SARS Virus
cacgaccagggaaacttccacaatc

SEQ ID NO: 157315 - DNA, 25 bp, SARS Virus
acgaccagggaaacttccacaatct

SEQ ID NO: 157316 - DNA, 25 bp, SARS Virus
cgaccagggaaaattccacaatctg

SEQ ID NO: 157317 - DNA, 25 bp, SARS Virus
gaccagggaaacatccacaatctgg

SEQ ID NO: 157318 - DNA, 25 bp, SARS Virus
accagggaaactaccacaatctgga

SEQ ID NO: 157319 - DNA, 25 bp, SARS Virus
ccagggaaacttacacaatctggaa

SEQ ID NO: 157320 - DNA, 25 bp, SARS Virus
cagggaaacttcaacaatctggaaa

SEQ ID NO: 157321 - DNA, 25 bp, SARS Virus
agggaaacttccacaatctggaaac

SEQ ID NO: 157322 - DNA, 25 bp, SARS Virus
gggaaacttccaaaatctggaaact

SEQ ID NO: 157323 - DNA, 25 bp, SARS Virus
ggaaacttccacaatctggaaactg

SEQ ID NO: 157324 - DNA, 25 bp, SARS Virus
gaaacttccacaatctggaaactga

SEQ ID NO: 157325 - DNA, 25 bp, SARS Virus
aaacttccacaaactggaaactgac

SEQ ID NO: 157326 - DNA, 25 bp, SARS Virus
aacttccacaatatggaaactgact

SEQ ID NO: 157327 - DNA, 25 bp, SARS Virus
acttccacaatcaggaaactgactt

SEQ ID NO: 157328 - DNA, 25 bp, SARS Virus
cttccacaatctagaaactgacttg

SEQ ID NO: 157329 - DNA, 25 bp, SARS Virus
ttccacaatctgaaaactgacttgg

SEQ ID NO: 157330 - DNA, 25 bp, SARS Virus
tccacaatctggaaactgacttgga

SEQ ID NO: 157331 - DNA, 25 bp, SARS Virus
ccacaatctggaaactgacttggaa

SEQ ID NO: 157332 - DNA, 25 bp, SARS Virus
cacaatctggaaactgacttggaag

SEQ ID NO: 157333 - DNA, 25 bp, SARS Virus
acaatctggaaaatgacttggaaga

SEQ ID NO: 157334 - DNA, 25 bp, SARS Virus
caatctggaaacagacttggaagac

SEQ ID NO: 157335 - DNA, 25 bp, SARS Virus
aatctggaaactaacttggaagaca

SEQ ID NO: 157336 - DNA, 25 bp, SARS Virus
atctggaaactgacttggaagacaa

SEQ ID NO: 157337 - DNA, 25 bp, SARS Virus
tctggaaactgaattggaagacaat

SEQ ID NO: 157338 - DNA, 25 bp, SARS Virus
ctggaaactgacatggaagacaata

SEQ ID NO: 157339 - DNA, 25 bp, SARS Virus
tggaaactgactaggaagacaataa

SEQ ID NO: 157340 - DNA, 25 bp, SARS Virus
ggaaactgacttagaagacaataat

SEQ ID NO: 157341 - DNA, 25 bp, SARS Virus
gaaactgacttgaaagacaataatt

SEQ ID NO: 157342 - DNA, 25 bp, SARS Virus
aaactgacttggaagacaataattt

SEQ ID NO: 157343 - DNA, 25 bp, SARS Virus
aactgacttggaagacaataatttt

SEQ ID NO: 157344 - DNA, 25 bp, SARS Virus
actgacttggaaaacaataattttg

SEQ ID NO: 157345 - DNA, 25 bp, SARS Virus
ctgacttggaagacaataattttgt

SEQ ID NO: 157346 - DNA, 25 bp, SARS Virus
tgacttggaagaaaataattttgtg

SEQ ID NO: 157347 - DNA, 25 bp, SARS Virus
gacttggaagacaataattttgtgg

SEQ ID NO: 157348 - DNA, 25 bp, SARS Virus
acttggaagacaataattttgtggt

SEQ ID NO: 157349 - DNA, 25 bp, SARS Virus
cttggaagacaaaaattttgtggta

SEQ ID NO: 157350 - DNA, 25 bp, SARS Virus
ttggaagacaataattttgtggtaa

SEQ ID NO: 157351 - DNA, 25 bp, SARS Virus
tggaagacaataattttgtggtaat

SEQ ID NO: 157352 - DNA, 25 bp, SARS Virus
ggaagacaataaatttgtggtaatg

SEQ ID NO: 157353 - DNA, 25 bp, SARS Virus
gaagacaataatattgtggtaatgc

SEQ ID NO: 157354 - DNA, 25 bp, SARS Virus
aagacaataattatgtggtaatgcc

SEQ ID NO: 157355 - DNA, 25 bp, SARS Virus
agacaataatttagtggtaatgccc

SEQ ID NO: 157356 - DNA, 25 bp, SARS Virus
gacaataattttatggtaatgcccg

SEQ ID NO: 157357 - DNA, 25 bp, SARS Virus
acaataattttgaggtaatgcccgc

SEQ ID NO: 157358 - DNA, 25 bp, SARS Virus
caataattttgtagtaatgcccgca

SEQ ID NO: 157359 - DNA, 25 bp, SARS Virus
aataattttgtgataatgcccgcaa

SEQ ID NO: 157360 - DNA, 25 bp, SARS Virus
ataattttgtggaaatgcccgcaaa

SEQ ID NO: 157361 - DNA, 25 bp, SARS Virus
taattttgtggtaatgcccgcaaag

SEQ ID NO: 157362 - DNA, 25 bp, SARS Virus
aattttgtggtaatgcccgcaaaga

SEQ ID NO: 157363 - DNA, 25 bp, SARS Virus
attttgtggtaaagcccgcaaagat

SEQ ID NO: 157364 - DNA, 25 bp, SARS Virus
ttttgtggtaatacccgcaaagatt

SEQ ID NO: 157365 - DNA, 25 bp, SARS Virus
tttgtggtaatgaccgcaaagattt

SEQ ID NO: 157366 - DNA, 25 bp, SARS Virus
ttgtggtaatgcacgcaaagatttt

SEQ ID NO: 157367 - DNA, 25 bp, SARS Virus
tgtggtaatgccagcaaagattttt

SEQ ID NO: 157368 - DNA, 25 bp, SARS Virus
gtggtaatgcccacaaagatttttc

SEQ ID NO: 157369 - DNA, 25 bp, SARS Virus
tggtaatgcccgaaaagatttttcc

SEQ ID NO: 157370 - DNA, 25 bp, SARS Virus
ggtaatgcccgcaaagatttttcca

SEQ ID NO: 157371 - DNA, 25 bp, SARS Virus
gtaatgcccgcaaagatttttccag

SEQ ID NO: 157372 - DNA, 25 bp, SARS Virus
taatgcccgcaaagatttttccaga

SEQ ID NO: 157373 - DNA, 25 bp, SARS Virus
aatgcccgcaaaaatttttccagat

SEQ ID NO: 157374 - DNA, 25 bp, SARS Virus
atgcccgcaaagatttttccagatg

SEQ ID NO: 157375 - DNA, 25 bp, SARS Virus
tgcccgcaaagaattttccagatgg

SEQ ID NO: 157376 - DNA, 25 bp, SARS Virus
gcccgcaaagatatttccagatgga

SEQ ID NO: 157377 - DNA, 25 bp, SARS Virus
cccgcaaagattattccagatggac

SEQ ID NO: 157378 - DNA, 25 bp, SARS Virus
ccgcaaagatttatccagatggaca

SEQ ID NO: 157379 - DNA, 25 bp, SARS Virus
cgcaaagattttaccagatggacag

SEQ ID NO: 157380 - DNA, 25 bp, SARS Virus
gcaaagatttttacagatggacagg

SEQ ID NO: 157381 - DNA, 25 bp, SARS Virus
caaagatttttcaagatggacagga

SEQ ID NO: 157382 - DNA, 25 bp, SARS Virus
aaagatttttccagatggacaggaa

SEQ ID NO: 157383 - DNA, 25 bp, SARS Virus
aagatttttccaaatggacaggaag

SEQ ID NO: 157384 - DNA, 25 bp, SARS Virus
agatttttccagatggacaggaagg

SEQ ID NO: 157385 - DNA, 25 bp, SARS Virus
gatttttccagaaggacaggaaggt

SEQ ID NO: 157386 - DNA, 25 bp, SARS Virus
atttttccagatagacaggaaggtg

SEQ ID NO: 157387 - DNA, 25 bp, SARS Virus
tttttccagatgaacaggaaggtga

SEQ ID NO: 157388 - DNA, 25 bp, SARS Virus
ttttccagatggacaggaaggtgag

SEQ ID NO: 157389 - DNA, 25 bp, SARS Virus
tttccagatggaaaggaaggtgaga

SEQ ID NO: 157390 - DNA, 25 bp, SARS Virus
ttccagatggacaggaaggtgagat

SEQ ID NO: 157391 - DNA, 25 bp, SARS Virus
tccagatggacaagaaggtgagatg

SEQ ID NO: 157392 - DNA, 25 bp, SARS Virus
ccagatggacagaaaggtgagatgg

SEQ ID NO: 157393 - DNA, 25 bp, SARS Virus
cagatggacaggaaggtgagatggt

SEQ ID NO: 157394 - DNA, 25 bp, SARS Virus
agatggacaggaaggtgagatggta

SEQ ID NO: 157395 - DNA, 25 bp, SARS Virus
gatggacaggaaagtgagatggtag

SEQ ID NO: 157396 - DNA, 25 bp, SARS Virus
atggacaggaagatgagatggtagt

SEQ ID NO: 157397 - DNA, 25 bp, SARS Virus
tggacaggaaggagagatggtagtt

SEQ ID NO: 157398 - DNA, 25 bp, SARS Virus
ggacaggaaggtaagatggtagttt

SEQ ID NO: 157399 - DNA, 25 bp, SARS Virus
gacaggaaggtgagatggtagtttg

SEQ ID NO: 157400 - DNA, 25 bp, SARS Virus
acaggaaggtgaaatggtagtttgt

SEQ ID NO: 157401 - DNA, 25 bp, SARS Virus
caggaaggtgagatggtagtttgtt

SEQ ID NO: 157402 - DNA, 25 bp, SARS Virus
aggaaggtgagaaggtagtttgttc

SEQ ID NO: 157403 - DNA, 25 bp, SARS Virus
ggaaggtgagatagtagtttgttct

SEQ ID NO: 157404 - DNA, 25 bp, SARS Virus
gaaggtgagatgatagtttgttctg

SEQ ID NO: 157405 - DNA, 25 bp, SARS Virus
aaggtgagatggaagtttgttctgt

SEQ ID NO: 157406 - DNA, 25 bp, SARS Virus
aggtgagatggtagtttgttctgtc

SEQ ID NO: 157407 - DNA, 25 bp, SARS Virus
ggtgagatggtaatttgttctgtca

SEQ ID NO: 157408 - DNA, 25 bp, SARS Virus
gtgagatggtagattgttctgtcat

SEQ ID NO: 157409 - DNA, 25 bp, SARS Virus
tgagatggtagtatgttctgtcatt

SEQ ID NO: 157410 - DNA, 25 bp, SARS Virus
gagatggtagttagttctgtcattc

SEQ ID NO: 157411 - DNA, 25 bp, SARS Virus
agatggtagtttattctgtcattca

SEQ ID NO: 157412 - DNA, 25 bp, SARS Virus
gatggtagtttgatctgtcattcac

SEQ ID NO: 157413 - DNA, 25 bp, SARS Virus
atggtagtttgtactgtcattcact

SEQ ID NO: 157414 - DNA, 25 bp, SARS Virus
tggtagtttgttatgtcattcactt

SEQ ID NO: 157415 - DNA, 25 bp, SARS Virus
ggtagtttgttcagtcattcacttc

SEQ ID NO: 157416 - DNA, 25 bp, SARS Virus
gtagtttgttctatcattcacttct

SEQ ID NO: 157417 - DNA, 25 bp, SARS Virus
tagtttgttctgacattcacttctt

SEQ ID NO: 157418 - DNA, 25 bp, SARS Virus
agtttgttctgtaattcacttcttg

SEQ ID NO: 157419 - DNA, 25 bp, SARS Virus
gtttgttctgtcattcacttcttgt

SEQ ID NO: 157420 - DNA, 25 bp, SARS Virus
tttgttctgtcaatcacttcttgtt

SEQ ID NO: 157421 - DNA, 25 bp, SARS Virus
ttgttctgtcatacacttcttgttc

SEQ ID NO: 157422 - DNA, 25 bp, SARS Virus
tgttctgtcattaacttcttgttcg

SEQ ID NO: 157423 - DNA, 25 bp, SARS Virus
gttctgtcattcacttcttgttcgt

SEQ ID NO: 157424 - DNA, 25 bp, SARS Virus
ttctgtcattcaattcttgttcgtg

SEQ ID NO: 157425 - DNA, 25 bp, SARS Virus
tctgtcattcacatcttgttcgtga

SEQ ID NO: 157426 - DNA, 25 bp, SARS Virus
ctgtcattcactacttgttcgtgag

SEQ ID NO: 157427 - DNA, 25 bp, SARS Virus
tgtcattcacttattgttcgtgaga

SEQ ID NO: 157428 - DNA, 25 bp, SARS Virus
gtcattcacttcatgttcgtgagag

SEQ ID NO: 157429 - DNA, 25 bp, SARS Virus
tcattcacttctagttcgtgagagt

SEQ ID NO: 157430 - DNA, 25 bp, SARS Virus
cattcacttcttattcgtgagagtc

SEQ ID NO: 157431 - DNA, 25 bp, SARS Virus
attcacttcttgatcgtgagagtca

SEQ ID NO: 157432 - DNA, 25 bp, SARS Virus
ttcacttcttgtacgtgagagtcat

SEQ ID NO: 157433 - DNA, 25 bp, SARS Virus
tcacttcttgttagtgagagtcatc

SEQ ID NO: 157434 - DNA, 25 bp, SARS Virus
cacttcttgttcatgagagtcatcc

SEQ ID NO: 157435 - DNA, 25 bp, SARS Virus
acttcttgttcgagagagtcatcca

SEQ ID NO: 157436 - DNA, 25 bp, SARS Virus
cttcttgttcgtaagagtcatccaa

SEQ ID NO: 157437 - DNA, 25 bp, SARS Virus
ttcttgttcgtgagagtcatccaaa

SEQ ID NO: 157438 - DNA, 25 bp, SARS Virus
tcttgttcgtgaaagtcatccaaag

SEQ ID NO: 157439 - DNA, 25 bp, SARS Virus
cttgttcgtgagagtcatccaaaga

SEQ ID NO: 157440 - DNA, 25 bp, SARS Virus
ttgttcgtgagaatcatccaaagaa

SEQ ID NO: 157441 - DNA, 25 bp, SARS Virus
tgttcgtgagagacatccaaagaac

SEQ ID NO: 157442 - DNA, 25 bp, SARS Virus
gttcgtgagagtaatccaaagaacc

SEQ ID NO: 157443 - DNA, 25 bp, SARS Virus
ttcgtgagagtcatccaaagaaccg

SEQ ID NO: 157444 - DNA, 25 bp, SARS Virus
tcgtgagagtcaaccaaagaaccgt

SEQ ID NO: 157445 - DNA, 25 bp, SARS Virus
cgtgagagtcatacaaagaaccgtt

SEQ ID NO: 157446 - DNA, 25 bp, SARS Virus
gtgagagtcatcaaaagaaccgtta

SEQ ID NO: 157447 - DNA, 25 bp, SARS Virus
tgagagtcatccaaagaaccgttac

SEQ ID NO: 157448 - DNA, 25 bp, SARS Virus
gagagtcatccaaagaaccgttaca

SEQ ID NO: 157449 - DNA, 25 bp, SARS Virus
agagtcatccaaagaaccgttacag

SEQ ID NO: 157450 - DNA, 25 bp, SARS Virus
gagtcatccaaaaaaccgttacagt

SEQ ID NO: 157451 - DNA, 25 bp, SARS Virus
agtcatccaaagaaccgttacagtc

SEQ ID NO: 157452 - DNA, 25 bp, SARS Virus
gtcatccaaagaaccgttacagtca

SEQ ID NO: 157453 - DNA, 25 bp, SARS Virus
tcatccaaagaaacgttacagtcag

SEQ ID NO: 157454 - DNA, 25 bp, SARS Virus
catccaaagaacagttacagtcagt

SEQ ID NO: 157455 - DNA, 25 bp, SARS Virus
atccaaagaaccattacagtcagta

SEQ ID NO: 157456 - DNA, 25 bp, SARS Virus
tccaaagaaccgatacagtcagtaa

SEQ ID NO: 157457 - DNA, 25 bp, SARS Virus
ccaaagaaccgtaacagtcagtaac

SEQ ID NO: 157458 - DNA, 25 bp, SARS Virus
caaagaaccgttacagtcagtaaca

SEQ ID NO: 157459 - DNA, 25 bp, SARS Virus
aaagaaccgttaaagtcagtaacac

SEQ ID NO: 157460 - DNA, 25 bp, SARS Virus
aagaaccgttacagtcagtaacacg

SEQ ID NO: 157461 - DNA, 25 bp, SARS Virus
agaaccgttacaatcagtaacacgt

SEQ ID NO: 157462 - DNA, 25 bp, SARS Virus
gaaccgttacagacagtaacacgtc

SEQ ID NO: 157463 - DNA, 25 bp, SARS Virus
aaccgttacagtaagtaacacgtct

SEQ ID NO: 157464 - DNA, 25 bp, SARS Virus
accgttacagtcagtaacacgtctg

SEQ ID NO: 157465 - DNA, 25 bp, SARS Virus
ccgttacagtcaataacacgtctgt

SEQ ID NO: 157466 - DNA, 25 bp, SARS Virus
cgttacagtcagaaacacgtctgtg

SEQ ID NO: 157467 - DNA, 25 bp, SARS Virus
gttacagtcagtaacacgtctgtgg

SEQ ID NO: 157468 - DNA, 25 bp, SARS Virus
ttacagtcagtaacacgtctgtgga

SEQ ID NO: 157469 - DNA, 25 bp, SARS Virus
tacagtcagtaaaacgtctgtggat

SEQ ID NO: 157470 - DNA, 25 bp, SARS Virus
acagtcagtaacacgtctgtggata

SEQ ID NO: 157471 - DNA, 25 bp, SARS Virus
cagtcagtaacaagtctgtggataa

SEQ ID NO: 157472 - DNA, 25 bp, SARS Virus
agtcagtaacacatctgtggataac

SEQ ID NO: 157473 - DNA, 25 bp, SARS Virus
gtcagtaacacgactgtggataaca

SEQ ID NO: 157474 - DNA, 25 bp, SARS Virus
tcagtaacacgtatgtggataacat

SEQ ID NO: 157475 - DNA, 25 bp, SARS Virus
cagtaacacgtcagtggataacatc

SEQ ID NO: 157476 - DNA, 25 bp, SARS Virus
agtaacacgtctatggataacatct

SEQ ID NO: 157477 - DNA, 25 bp, SARS Virus
gtaacacgtctgaggataacatcta

SEQ ID NO: 157478 - DNA, 25 bp, SARS Virus
taacacgtctgtagataacatctat

SEQ ID NO: 157479 - DNA, 25 bp, SARS Virus
aacacgtctgtgaataacatctatg

SEQ ID NO: 157480 - DNA, 25 bp, SARS Virus
acacgtctgtggataacatctatgt

SEQ ID NO: 157481 - DNA, 25 bp, SARS Virus
cacgtctgtggaaaacatctatgta

SEQ ID NO: 157482 - DNA, 25 bp, SARS Virus
acgtctgtggataacatctatgtac

SEQ ID NO: 157483 - DNA, 25 bp, SARS Virus
cgtctgtggataacatctatgtaca

SEQ ID NO: 157484 - DNA, 25 bp, SARS Virus
gtctgtggataaaatctatgtacac

SEQ ID NO: 157485 - DNA, 25 bp, SARS Virus
tctgtggataacatctatgtacacg

SEQ ID NO: 157486 - DNA, 25 bp, SARS Virus
ctgtggataacaactatgtacacga

SEQ ID NO: 157487 - DNA, 25 bp, SARS Virus
tgtggataacatatatgtacacgac

SEQ ID NO: 157488 - DNA, 25 bp, SARS Virus
gtggataacatcaatgtacacgacc

SEQ ID NO: 157489 - DNA, 25 bp, SARS Virus
tggataacatctatgtacacgaccc

SEQ ID NO: 157490 - DNA, 25 bp, SARS Virus
ggataacatctaagtacacgacccc

SEQ ID NO: 157491 - DNA, 25 bp, SARS Virus
gataacatctatatacacgaccccg

SEQ ID NO: 157492 - DNA, 25 bp, SARS Virus
ataacatctatgaacacgaccccga

SEQ ID NO: 157493 - DNA, 25 bp, SARS Virus
taacatctatgtacacgaccccgaa

SEQ ID NO: 157494 - DNA, 25 bp, SARS Virus
aacatctatgtaaacgaccccgaag

SEQ ID NO: 157495 - DNA, 25 bp, SARS Virus
acatctatgtacacgaccccgaaga

SEQ ID NO: 157496 - DNA, 25 bp, SARS Virus
catctatgtacaagaccccgaagag

SEQ ID NO: 157497 - DNA, 25 bp, SARS Virus
atctatgtacacaaccccgaagaga

SEQ ID NO: 157498 - DNA, 25 bp, SARS Virus
tctatgtacacgaccccgaagagaa

SEQ ID NO: 157499 - DNA, 25 bp, SARS Virus
ctatgtacacgaacccgaagagaaa

SEQ ID NO: 157500 - DNA, 25 bp, SARS Virus
tatgtacacgacaccgaagagaaaa

SEQ ID NO: 157501 - DNA, 25 bp, SARS Virus
atgtacacgaccacgaagagaaaac

SEQ ID NO: 157502 - DNA, 25 bp, SARS Virus
tgtacacgacccagaagagaaaaca

SEQ ID NO: 157503 - DNA, 25 bp, SARS Virus
gtacacgaccccaaagagaaaacat

SEQ ID NO: 157504 - DNA, 25 bp, SARS Virus
tacacgaccccgaagagaaaacatc

SEQ ID NO: 157505 - DNA, 25 bp, SARS Virus
acacgaccccgaagagaaaacatca

SEQ ID NO: 157506 - DNA, 25 bp, SARS Virus
cacgaccccgaaaagaaaacatcag

SEQ ID NO: 157507 - DNA, 25 bp, SARS Virus
acgaccccgaagagaaaacatcagg

SEQ ID NO: 157508 - DNA, 25 bp, SARS Virus
cgaccccgaagaaaaaacatcaggg

SEQ ID NO: 157509 - DNA, 25 bp, SARS Virus
gaccccgaagagaaaacatcagggt

SEQ ID NO: 157510 - DNA, 25 bp, SARS Virus
accccgaagagaaaacatcagggtc

SEQ ID NO: 157511 - DNA, 25 bp, SARS Virus
ccccgaagagaaaacatcagggtct

SEQ ID NO: 157512 - DNA, 25 bp, SARS Virus
cccgaagagaaaacatcagggtcta

SEQ ID NO: 157513 - DNA, 25 bp, SARS Virus
ccgaagagaaaaaatcagggtctaa

SEQ ID NO: 157514 - DNA, 25 bp, SARS Virus
cgaagagaaaacatcagggtctaat

SEQ ID NO: 157515 - DNA, 25 bp, SARS Virus
gaagagaaaacaacagggtctaatg

SEQ ID NO: 157516 - DNA, 25 bp, SARS Virus
aagagaaaacataagggtctaatgt

SEQ ID NO: 157517 - DNA, 25 bp, SARS Virus
agagaaaacatcagggtctaatgtc

SEQ ID NO: 157518 - DNA, 25 bp, SARS Virus
gagaaaacatcaaggtctaatgtca

SEQ ID NO: 157519 - DNA, 25 bp, SARS Virus
agaaaacatcagagtctaatgtcat

SEQ ID NO: 157520 - DNA, 25 bp, SARS Virus
gaaaacatcaggatctaatgtcata

SEQ ID NO: 157521 - DNA, 25 bp, SARS Virus
aaaacatcagggactaatgtcataa

SEQ ID NO: 157522 - DNA, 25 bp, SARS Virus
aaacatcagggtataatgtcataat

SEQ ID NO: 157523 - DNA, 25 bp, SARS Virus
aacatcagggtcaaatgtcataatc

SEQ ID NO: 157524 - DNA, 25 bp, SARS Virus
acatcagggtctaatgtcataatcg

SEQ ID NO: 157525 - DNA, 25 bp, SARS Virus
catcagggtctaatgtcataatcgt

SEQ ID NO: 157526 - DNA, 25 bp, SARS Virus
atcagggtctaaagtcataatcgtc

SEQ ID NO: 157527 - DNA, 25 bp, SARS Virus
tcagggtctaatatcataatcgtcg

SEQ ID NO: 157528 - DNA, 25 bp, SARS Virus
cagggtctaatgacataatcgtcgc

SEQ ID NO: 157529 - DNA, 25 bp, SARS Virus
agggtctaatgtaataatcgtcgct

SEQ ID NO: 157530 - DNA, 25 bp, SARS Virus
gggtctaatgtcataatcgtcgcta

SEQ ID NO: 157531 - DNA, 25 bp, SARS Virus
ggtctaatgtcaaaatcgtcgctat

SEQ ID NO: 157532 - DNA, 25 bp, SARS Virus
gtctaatgtcataatcgtcgctata

SEQ ID NO: 157533 - DNA, 25 bp, SARS Virus
tctaatgtcataatcgtcgctatag

SEQ ID NO: 157534 - DNA, 25 bp, SARS Virus
ctaatgtcataaacgtcgctatagt

SEQ ID NO: 157535 - DNA, 25 bp, SARS Virus
taatgtcataatagtcgctatagtt

SEQ ID NO: 157536 - DNA, 25 bp, SARS Virus
aatgtcataatcatcgctatagttg

SEQ ID NO: 157537 - DNA, 25 bp, SARS Virus
atgtcataatcgacgctatagttgt

SEQ ID NO: 157538 - DNA, 25 bp, SARS Virus
tgtcataatcgtagctatagttgtg

SEQ ID NO: 157539 - DNA, 25 bp, SARS Virus
gtcataatcgtcactatagttgtgg

SEQ ID NO: 157540 - DNA, 25 bp, SARS Virus
tcataatcgtcgatatagttgtggg

SEQ ID NO: 157541 - DNA, 25 bp, SARS Virus
cataatcgtcgcaatagttgtgggt

SEQ ID NO: 157542 - DNA, 25 bp, SARS Virus
ataatcgtcgctatagttgtgggtt

SEQ ID NO: 157543 - DNA, 25 bp, SARS Virus
taatcgtcgctaaagttgtgggttt

SEQ ID NO: 157544 - DNA, 25 bp, SARS Virus
aatcgtcgctatagttgtgggttta

SEQ ID NO: 157545 - DNA, 25 bp, SARS Virus
atcgtcgctataattgtgggtttaa

SEQ ID NO: 157546 - DNA, 25 bp, SARS Virus
tcgtcgctatagatgtgggtttaat

SEQ ID NO: 157547 - DNA, 25 bp, SARS Virus
cgtcgctatagtagtgggtttaata

SEQ ID NO: 157548 - DNA, 25 bp, SARS Virus
gtcgctatagttatgggtttaataa

SEQ ID NO: 157549 - DNA, 25 bp, SARS Virus
tcgctatagttgagggtttaataac

SEQ ID NO: 157550 - DNA, 25 bp, SARS Virus
cgctatagttgtaggtttaataact

SEQ ID NO: 157551 - DNA, 25 bp, SARS Virus
gctatagttgtgagtttaataactc

SEQ ID NO: 157552 - DNA, 25 bp, SARS Virus
ctatagttgtggatttaataactca

SEQ ID NO: 157553 - DNA, 25 bp, SARS Virus
tatagttgtgggattaataactcat

SEQ ID NO: 157554 - DNA, 25 bp, SARS Virus
atagttgtgggtataataactcata

SEQ ID NO: 157555 - DNA, 25 bp, SARS Virus
tagttgtgggttaaataactcatag

SEQ ID NO: 157556 - DNA, 25 bp, SARS Virus
agttgtgggtttaataactcataga

SEQ ID NO: 157557 - DNA, 25 bp, SARS Virus
gttgtgggtttaataactcatagaa

SEQ ID NO: 157558 - DNA, 25 bp, SARS Virus
ttgtgggtttaaaaactcatagaat

SEQ ID NO: 157559 - DNA, 25 bp, SARS Virus
tgtgggtttaataactcatagaatt

SEQ ID NO: 157560 - DNA, 25 bp, SARS Virus
gtgggtttaataactcatagaatta

SEQ ID NO: 157561 - DNA, 25 bp, SARS Virus
tgggtttaataaatcatagaattag

SEQ ID NO: 157562 - DNA, 25 bp, SARS Virus
gggtttaataacacatagaattaga

SEQ ID NO: 157563 - DNA, 25 bp, SARS Virus
ggtttaataactaatagaattagag

SEQ ID NO: 157564 - DNA, 25 bp, SARS Virus
gtttaataactcatagaattagaga

SEQ ID NO: 157565 - DNA, 25 bp, SARS Virus
tttaataactcaaagaattagagac

SEQ ID NO: 157566 - DNA, 25 bp, SARS Virus
ttaataactcatagaattagagacc

SEQ ID NO: 157567 - DNA, 25 bp, SARS Virus
taataactcataaaattagagaccg

SEQ ID NO: 157568 - DNA, 25 bp, SARS Virus
aataactcatagaattagagaccgt

SEQ ID NO: 157569 - DNA, 25 bp, SARS Virus
ataactcatagaattagagaccgtg

SEQ ID NO: 157570 - DNA, 25 bp, SARS Virus
taactcatagaaatagagaccgtga

SEQ ID NO: 157571 - DNA, 25 bp, SARS Virus
aactcatagaataagagaccgtgac

SEQ ID NO: 157572 - DNA, 25 bp, SARS Virus
actcatagaattagagaccgtgacc

SEQ ID NO: 157573 - DNA, 25 bp, SARS Virus
ctcatagaattaaagaccgtgacca

SEQ ID NO: 157574 - DNA, 25 bp, SARS Virus
tcatagaattagagaccgtgaccaa

SEQ ID NO: 157575 - DNA, 25 bp, SARS Virus
catagaattagaaaccgtgaccaaa

SEQ ID NO: 157576 - DNA, 25 bp, SARS Virus
atagaattagagaccgtgaccaaat

SEQ ID NO: 157577 - DNA, 25 bp, SARS Virus
tagaattagagaacgtgaccaaatt

SEQ ID NO: 157578 - DNA, 25 bp, SARS Virus
agaattagagacagtgaccaaatta

SEQ ID NO: 157579 - DNA, 25 bp, SARS Virus
gaattagagaccatgaccaaattac

SEQ ID NO: 157580 - DNA, 25 bp, SARS Virus
aattagagaccgagaccaaattaca

SEQ ID NO: 157581 - DNA, 25 bp, SARS Virus
attagagaccgtaaccaaattacaa

SEQ ID NO: 157582 - DNA, 25 bp, SARS Virus
ttagagaccgtgaccaaattacaat

SEQ ID NO: 157583 - DNA, 25 bp, SARS Virus
tagagaccgtgaacaaattacaatg

SEQ ID NO: 157584 - DNA, 25 bp, SARS Virus
agagaccgtgacaaaattacaatgc

SEQ ID NO: 157585 - DNA, 25 bp, SARS Virus
gagaccgtgaccaaattacaatgcg

SEQ ID NO: 157586 - DNA, 25 bp, SARS Virus
agaccgtgaccaaattacaatgcga

SEQ ID NO: 157587 - DNA, 25 bp, SARS Virus
gaccgtgaccaaattacaatgcgaa

SEQ ID NO: 157588 - DNA, 25 bp, SARS Virus
accgtgaccaaaatacaatgcgaat

SEQ ID NO: 157589 - DNA, 25 bp, SARS Virus
ccgtgaccaaataacaatgcgaatc

SEQ ID NO: 157590 - DNA, 25 bp, SARS Virus
cgtgaccaaattacaatgcgaatcg

SEQ ID NO: 157591 - DNA, 25 bp, SARS Virus
gtgaccaaattaaaatgcgaatcgg

SEQ ID NO: 157592 - DNA, 25 bp, SARS Virus
tgaccaaattacaatgcgaatcggg

SEQ ID NO: 157593 - DNA, 25 bp, SARS Virus
gaccaaattacaatgcgaatcgggt

SEQ ID NO: 157594 - DNA, 25 bp, SARS Virus
accaaattacaaagcgaatcgggtt

SEQ ID NO: 157595 - DNA, 25 bp, SARS Virus
ccaaattacaatacgaatcgggttt

SEQ ID NO: 157596 - DNA, 25 bp, SARS Virus
caaattacaatgagaatcgggtttc

SEQ ID NO: 157597 - DNA, 25 bp, SARS Virus
aaattacaatgcaaatcgggtttcg

SEQ ID NO: 157598 - DNA, 25 bp, SARS Virus
aattacaatgcgaatcgggtttcga

SEQ ID NO: 157599 - DNA, 25 bp, SARS Virus
attacaatgcgaatcgggtttcgag

SEQ ID NO: 157600 - DNA, 25 bp, SARS Virus
ttacaatgcgaaacgggtttcgagt

SEQ ID NO: 157601 - DNA, 25 bp, SARS Virus
tacaatgcgaatagggtttcgagtt

SEQ ID NO: 157602 - DNA, 25 bp, SARS Virus
acaatgcgaatcaggtttcgagttt

SEQ ID NO: 157603 - DNA, 25 bp, SARS Virus
caatgcgaatcgagtttcgagttta

SEQ ID NO: 157604 - DNA, 25 bp, SARS Virus
aatgcgaatcggatttcgagtttac

SEQ ID NO: 157605 - DNA, 25 bp, SARS Virus
atgcgaatcgggattcgagtttacg

SEQ ID NO: 157606 - DNA, 25 bp, SARS Virus
tgcgaatcgggtatcgagtttacgt

SEQ ID NO: 157607 - DNA, 25 bp, SARS Virus
gcgaatcgggttacgagtttacgtt

SEQ ID NO: 157608 - DNA, 25 bp, SARS Virus
cgaatcgggtttagagtttacgttg

SEQ ID NO: 157609 - DNA, 25 bp, SARS Virus
gaatcgggtttcaagtttacgttgt

SEQ ID NO: 157610 - DNA, 25 bp, SARS Virus
aatcgggtttcgagtttacgttgta

SEQ ID NO: 157611 - DNA, 25 bp, SARS Virus
atcgggtttcgaatttacgttgtaa

SEQ ID NO: 157612 - DNA, 25 bp, SARS Virus
tcgggtttcgagattacgttgtaat

SEQ ID NO: 157613 - DNA, 25 bp, SARS Virus
cgggtttcgagtatacgttgtaatt

SEQ ID NO: 157614 - DNA, 25 bp, SARS Virus
gggtttcgagttaacgttgtaattg

SEQ ID NO: 157615 - DNA, 25 bp, SARS Virus
ggtttcgagtttacgttgtaattgt

SEQ ID NO: 157616 - DNA, 25 bp, SARS Virus
gtttcgagtttaagttgtaattgtc

SEQ ID NO: 157617 - DNA, 25 bp, SARS Virus
tttcgagtttacattgtaattgtcc

SEQ ID NO: 157618 - DNA, 25 bp, SARS Virus
ttcgagtttacgatgtaattgtcct

SEQ ID NO: 157619 - DNA, 25 bp, SARS Virus
tcgagtttacgtagtaattgtcctt

SEQ ID NO: 157620 - DNA, 25 bp, SARS Virus
cgagtttacgttataattgtccttc

SEQ ID NO: 157621 - DNA, 25 bp, SARS Virus
gagtttacgttgaaattgtccttca

SEQ ID NO: 157622 - DNA, 25 bp, SARS Virus
agtttacgttgtaattgtccttcac

SEQ ID NO: 157623 - DNA, 25 bp, SARS Virus
gtttacgttgtaattgtccttcaca

SEQ ID NO: 157624 - DNA, 25 bp, SARS Virus
tttacgttgtaaatgtccttcacaa

SEQ ID NO: 157625 - DNA, 25 bp, SARS Virus
ttacgttgtaatagtccttcacaac

SEQ ID NO: 157626 - DNA, 25 bp, SARS Virus
tacgttgtaattatccttcacaaca

SEQ ID NO: 157627 - DNA, 25 bp, SARS Virus
acgttgtaattgaccttcacaacag

SEQ ID NO: 157628 - DNA, 25 bp, SARS Virus
cgttgtaattgtacttcacaacaga

SEQ ID NO: 157629 - DNA, 25 bp, SARS Virus
gttgtaattgtcattcacaacagaa

SEQ ID NO: 157630 - DNA, 25 bp, SARS Virus
ttgtaattgtccatcacaacagaat

SEQ ID NO: 157631 - DNA, 25 bp, SARS Virus
tgtaattgtcctacacaacagaata

SEQ ID NO: 157632 - DNA, 25 bp, SARS Virus
gtaattgtccttaacaacagaataa

SEQ ID NO: 157633 - DNA, 25 bp, SARS Virus
taattgtccttcacaacagaataaa

SEQ ID NO: 157634 - DNA, 25 bp, SARS Virus
aattgtccttcaaaacagaataaaa

SEQ ID NO: 157635 - DNA, 25 bp, SARS Virus
attgtccttcacaacagaataaaag

SEQ ID NO: 157636 - DNA, 25 bp, SARS Virus
ttgtccttcacaacagaataaaagt

SEQ ID NO: 157637 - DNA, 25 bp, SARS Virus
tgtccttcacaaaagaataaaagtt

SEQ ID NO: 157638 - DNA, 25 bp, SARS Virus
gtccttcacaacagaataaaagttt

SEQ ID NO: 157639 - DNA, 25 bp, SARS Virus
tccttcacaacaaaataaaagtttc

SEQ ID NO: 157640 - DNA, 25 bp, SARS Virus
ccttcacaacagaataaaagtttct

SEQ ID NO: 157641 - DNA, 25 bp, SARS Virus
cttcacaacagaataaaagtttcta

SEQ ID NO: 157642 - DNA, 25 bp, SARS Virus
ttcacaacagaaaaaaagtttctag

SEQ ID NO: 157643 - DNA, 25 bp, SARS Virus
tcacaacagaataaaagtttctaga

SEQ ID NO: 157644 - DNA, 25 bp, SARS Virus
cacaacagaataaaagtttctagag

SEQ ID NO: 157645 - DNA, 25 bp, SARS Virus
acaacagaataaaagtttctagagg

SEQ ID NO: 157646 - DNA, 25 bp, SARS Virus
caacagaataaaagtttctagaggt

SEQ ID NO: 157647 - DNA, 25 bp, SARS Virus
aacagaataaaaatttctagaggtg

SEQ ID NO: 157648 - DNA, 25 bp, SARS Virus
acagaataaaagattctagaggtgt

SEQ ID NO: 157649 - DNA, 25 bp, SARS Virus
cagaataaaagtatctagaggtgta

SEQ ID NO: 157650 - DNA, 25 bp, SARS Virus
agaataaaagttactagaggtgtag

SEQ ID NO: 157651 - DNA, 25 bp, SARS Virus
gaataaaagtttatagaggtgtagt

SEQ ID NO: 157652 - DNA, 25 bp, SARS Virus
aataaaagtttcaagaggtgtagtt

SEQ ID NO: 157653 - DNA, 25 bp, SARS Virus
ataaaagtttctagaggtgtagtta

SEQ ID NO: 157654 - DNA, 25 bp, SARS Virus
taaaagtttctaaaggtgtagttat

SEQ ID NO: 157655 - DNA, 25 bp, SARS Virus
aaaagtttctagaggtgtagttatg

SEQ ID NO: 157656 - DNA, 25 bp, SARS Virus
aaagtttctagaagtgtagttatgg

SEQ ID NO: 157657 - DNA, 25 bp, SARS Virus
ctagacccgaatcttaggagattca

SEQ ID NO: 157658 - DNA, 25 bp, SARS Virus
tagacccgaattctaggagattcag

SEQ ID NO: 157659 - DNA, 25 bp, SARS Virus
agacccgaatttcaggagattcaga

SEQ ID NO: 157660 - DNA, 25 bp, SARS Virus
gacccgaattttcggagattcagag

SEQ ID NO: 157661 - DNA, 25 bp, SARS Virus
acccgaattttacgagattcagaga

SEQ ID NO: 157662 - DNA, 25 bp, SARS Virus
cccgaattttagcagattcagagac

SEQ ID NO: 157663 - DNA, 25 bp, SARS Virus
ccgaattttaggcgattcagagacg

SEQ ID NO: 157664 - DNA, 25 bp, SARS Virus
cgaattttaggacattcagagacga

SEQ ID NO: 157665 - DNA, 25 bp, SARS Virus
gaattttaggagcttcagagacgag

SEQ ID NO: 157666 - DNA, 25 bp, SARS Virus
aattttaggagactcagagacgaga

SEQ ID NO: 157667 - DNA, 25 bp, SARS Virus
attttaggagatccagagacgagac

SEQ ID NO: 157668 - DNA, 25 bp, SARS Virus
ttttaggagattcagagacgagact

SEQ ID NO: 157669 - DNA, 25 bp, SARS Virus
tttaggagattccgagacgagactc

SEQ ID NO: 157670 - DNA, 25 bp, SARS Virus
ttaggagattcacagacgagactca

SEQ ID NO: 157671 - DNA, 25 bp, SARS Virus
taggagattcagcgacgagactcat

SEQ ID NO: 157672 - DNA, 25 bp, SARS Virus
aggagattcagacacgagactcatt

SEQ ID NO: 157673 - DNA, 25 bp, SARS Virus
ggagattcagagccgagactcattt

SEQ ID NO: 157674 - DNA, 25 bp, SARS Virus
gagattcagagacgagactcatttc

SEQ ID NO: 157675 - DNA, 25 bp, SARS Virus
agattcagagaccagactcatttca

SEQ ID NO: 157676 - DNA, 25 bp, SARS Virus
gattcagagacgcgactcatttcat

SEQ ID NO: 157677 - DNA, 25 bp, SARS Virus
attcagagacgacactcatttcatc

SEQ ID NO: 157678 - DNA, 25 bp, SARS Virus
ttcagagacgagcctcatttcatcc

SEQ ID NO: 157679 - DNA, 25 bp, SARS Virus
tcagagacgagactcatttcatcca

SEQ ID NO: 157680 - DNA, 25 bp, SARS Virus
cagagacgagacccatttcatccaa

SEQ ID NO: 157681 - DNA, 25 bp, SARS Virus
agagacgagactcatttcatccaaa

SEQ ID NO: 157682 - DNA, 25 bp, SARS Virus
gagacgagactcctttcatccaaag

SEQ ID NO: 157683 - DNA, 25 bp, SARS Virus
agacgagactcacttcatccaaagt

SEQ ID NO: 157684 - DNA, 25 bp, SARS Virus
gacgagactcatctcatccaaagtc

SEQ ID NO: 157685 - DNA, 25 bp, SARS Virus
acgagactcattccatccaaagtcc

SEQ ID NO: 157686 - DNA, 25 bp, SARS Virus
cgagactcatttcatccaaagtccg

SEQ ID NO: 157687 - DNA, 25 bp, SARS Virus
gagactcatttcctccaaagtccgt

SEQ ID NO: 157688 - DNA, 25 bp, SARS Virus
agactcatttcacccaaagtccgtt

SEQ ID NO: 157689 - DNA, 25 bp, SARS Virus
gactcatttcatccaaagtccgttg

SEQ ID NO: 157690 - DNA, 25 bp, SARS Virus
actcatttcatccaaagtccgttga

SEQ ID NO: 157691 - DNA, 25 bp, SARS Virus
ctcatttcatcccaagtccgttgac

SEQ ID NO: 157692 - DNA, 25 bp, SARS Virus
tcatttcatccacagtccgttgaca

SEQ ID NO: 157693 - DNA, 25 bp, SARS Virus
catttcatccaacgtccgttgacaa

SEQ ID NO: 157694 - DNA, 25 bp, SARS Virus
atttcatccaaactccgttgacaac

SEQ ID NO: 157695 - DNA, 25 bp, SARS Virus
tttcatccaaagcccgttgacaact

SEQ ID NO: 157696 - DNA, 25 bp, SARS Virus
ttcatccaaagtccgttgacaactt

SEQ ID NO: 157697 - DNA, 25 bp, SARS Virus
tcatccaaagtccgttgacaactta

SEQ ID NO: 157698 - DNA, 25 bp, SARS Virus
catccaaagtcccttgacaacttat

SEQ ID NO: 157699 - DNA, 25 bp, SARS Virus
atccaaagtccgctgacaacttatt

SEQ ID NO: 157700 - DNA, 25 bp, SARS Virus
tccaaagtccgtcgacaacttatta

SEQ ID NO: 157701 - DNA, 25 bp, SARS Virus
ccaaagtccgttcacaacttattac

SEQ ID NO: 157702 - DNA, 25 bp, SARS Virus
caaagtccgttgccaacttattacg

SEQ ID NO: 157703 - DNA, 25 bp, SARS Virus
aaagtccgttgacaacttattacgg

SEQ ID NO: 157704 - DNA, 25 bp, SARS Virus
aagtccgttgaccacttattacggc

SEQ ID NO: 157705 - DNA, 25 bp, SARS Virus
agtccgttgacaccttattacggca

SEQ ID NO: 157706 - DNA, 25 bp, SARS Virus
gtccgttgacaacttattacggcag

SEQ ID NO: 157707 - DNA, 25 bp, SARS Virus
tccgttgacaacctattacggcaga

SEQ ID NO: 157708 - DNA, 25 bp, SARS Virus
ccgttgacaactcattacggcagat

SEQ ID NO: 157709 - DNA, 25 bp, SARS Virus
cgttgacaacttcttacggcagatg

SEQ ID NO: 157710 - DNA, 25 bp, SARS Virus
gttgacaacttactacggcagatga

SEQ ID NO: 157711 - DNA, 25 bp, SARS Virus
ttgacaacttatcacggcagatgaa

SEQ ID NO: 157712 - DNA, 25 bp, SARS Virus
tgacaacttattccggcagatgaaa

SEQ ID NO: 157713 - DNA, 25 bp, SARS Virus
gacaacttattacggcagatgaaag

SEQ ID NO: 157714 - DNA, 25 bp, SARS Virus
acaacttattaccgcagatgaaaga

SEQ ID NO: 157715 - DNA, 25 bp, SARS Virus
caacttattacgccagatgaaagaa

SEQ ID NO: 157716 - DNA, 25 bp, SARS Virus
aacttattacggcagatgaaagaat

SEQ ID NO: 157717 - DNA, 25 bp, SARS Virus
acttattacggccgatgaaagaatt

SEQ ID NO: 157718 - DNA, 25 bp, SARS Virus
cttattacggcacatgaaagaattt

SEQ ID NO: 157719 - DNA, 25 bp, SARS Virus
ttattacggcagctgaaagaatttc

SEQ ID NO: 157720 - DNA, 25 bp, SARS Virus
tattacggcagacgaaagaatttca

SEQ ID NO: 157721 - DNA, 25 bp, SARS Virus
attacggcagatcaaagaatttcat

SEQ ID NO: 157722 - DNA, 25 bp, SARS Virus
ttacggcagatgcaagaatttcatc

SEQ ID NO: 157723 - DNA, 25 bp, SARS Virus
tacggcagatgacagaatttcatca

SEQ ID NO: 157724 - DNA, 25 bp, SARS Virus
acggcagatgaacgaatttcatcaa

SEQ ID NO: 157725 - DNA, 25 bp, SARS Virus
cggcagatgaaacaatttcatcaat

SEQ ID NO: 157726 - DNA, 25 bp, SARS Virus
ggcagatgaaagcatttcatcaatt

SEQ ID NO: 157727 - DNA, 25 bp, SARS Virus
gcagatgaaagactttcatcaattt

SEQ ID NO: 157728 - DNA, 25 bp, SARS Virus
cagatgaaagaacttcatcaatttg

SEQ ID NO: 157729 - DNA, 25 bp, SARS Virus
agatgaaagaatctcatcaatttga

SEQ ID NO: 157730 - DNA, 25 bp, SARS Virus
gatgaaagaattccatcaatttgac

SEQ ID NO: 157731 - DNA, 25 bp, SARS Virus
atgaaagaatttcatcaatttgaca

SEQ ID NO: 157732 - DNA, 25 bp, SARS Virus
tgaaagaatttcctcaatttgacac

SEQ ID NO: 157733 - DNA, 25 bp, SARS Virus
gaaagaatttcaccaatttgacaca

SEQ ID NO: 157734 - DNA, 25 bp, SARS Virus
aaagaatttcatcaatttgacacaa

SEQ ID NO: 157735 - DNA, 25 bp, SARS Virus
aagaatttcatccatttgacacaaa

SEQ ID NO: 157736 - DNA, 25 bp, SARS Virus
agaatttcatcactttgacacaaaa

SEQ ID NO: 157737 - DNA, 25 bp, SARS Virus
gaatttcatcaacttgacacaaaaa

SEQ ID NO: 157738 - DNA, 25 bp, SARS Virus
aatttcatcaatctgacacaaaaat

SEQ ID NO: 157739 - DNA, 25 bp, SARS Virus
atttcatcaattcgacacaaaaatg

SEQ ID NO: 157740 - DNA, 25 bp, SARS Virus
tttcatcaatttcacacaaaaatga

SEQ ID NO: 157741 - DNA, 25 bp, SARS Virus
ttcatcaatttgccacaaaaatgac

SEQ ID NO: 157742 - DNA, 25 bp, SARS Virus
tcatcaatttgacacaaaaatgact

SEQ ID NO: 157743 - DNA, 25 bp, SARS Virus
catcaatttgacccaaaaatgacta

SEQ ID NO: 157744 - DNA, 25 bp, SARS Virus
atcaatttgacacaaaaatgactaa

SEQ ID NO: 157745 - DNA, 25 bp, SARS Virus
tcaatttgacaccaaaatgactaag

SEQ ID NO: 157746 - DNA, 25 bp, SARS Virus
caatttgacacacaaatgactaaga

SEQ ID NO: 157747 - DNA, 25 bp, SARS Virus
aatttgacacaacaatgactaagag

SEQ ID NO: 157748 - DNA, 25 bp, SARS Virus
atttgacacaaacatgactaagagg

SEQ ID NO: 157749 - DNA, 25 bp, SARS Virus
tttgacacaaaactgactaagaggt

SEQ ID NO: 157750 - DNA, 25 bp, SARS Virus
ttgacacaaaaacgactaagaggtt

SEQ ID NO: 157751 - DNA, 25 bp, SARS Virus
tgacacaaaaatcactaagaggtta

SEQ ID NO: 157752 - DNA, 25 bp, SARS Virus
gacacaaaaatgcctaagaggttaa

SEQ ID NO: 157753 - DNA, 25 bp, SARS Virus
acacaaaaatgactaagaggttaat

SEQ ID NO: 157754 - DNA, 25 bp, SARS Virus
cacaaaaatgaccaagaggttaatt

SEQ ID NO: 157755 - DNA, 25 bp, SARS Virus
acaaaaatgactcagaggttaatta

SEQ ID NO: 157756 - DNA, 25 bp, SARS Virus
caaaaatgactacgaggttaattac

SEQ ID NO: 157757 - DNA, 25 bp, SARS Virus
aaaaatgactaacaggttaattaca

SEQ ID NO: 157758 - DNA, 25 bp, SARS Virus
aaaatgactaagcggttaattacac

SEQ ID NO: 157759 - DNA, 25 bp, SARS Virus
aaatgactaagacgttaattacact

SEQ ID NO: 157760 - DNA, 25 bp, SARS Virus
aatgactaagagcttaattacactg

SEQ ID NO: 157761 - DNA, 25 bp, SARS Virus
atgactaagaggctaattacactga

SEQ ID NO: 157762 - DNA, 25 bp, SARS Virus
tgactaagaggtcaattacactgag

SEQ ID NO: 157763 - DNA, 25 bp, SARS Virus
gactaagaggttcattacactgagg

SEQ ID NO: 157764 - DNA, 25 bp, SARS Virus
actaagaggttacttacactgaggt

SEQ ID NO: 157765 - DNA, 25 bp, SARS Virus
ctaagaggttaactacactgaggta

SEQ ID NO: 157766 - DNA, 25 bp, SARS Virus
taagaggttaatcacactgaggtaa

SEQ ID NO: 157767 - DNA, 25 bp, SARS Virus
aagaggttaattccactgaggtaac

SEQ ID NO: 157768 - DNA, 25 bp, SARS Virus
agaggttaattacactgaggtaact

SEQ ID NO: 157769 - DNA, 25 bp, SARS Virus
gaggttaattaccctgaggtaactg

SEQ ID NO: 157770 - DNA, 25 bp, SARS Virus
aggttaattacactgaggtaactgc

SEQ ID NO: 157771 - DNA, 25 bp, SARS Virus
ggttaattacaccgaggtaactgcg

SEQ ID NO: 157772 - DNA, 25 bp, SARS Virus
gttaattacactcaggtaactgcga

SEQ ID NO: 157773 - DNA, 25 bp, SARS Virus
ttaattacactgcggtaactgcgat

SEQ ID NO: 157774 - DNA, 25 bp, SARS Virus
taattacactgacgtaactgcgatc

SEQ ID NO: 157775 - DNA, 25 bp, SARS Virus
aattacactgagctaactgcgatcg

SEQ ID NO: 157776 - DNA, 25 bp, SARS Virus
attacactgaggcaactgcgatcga

SEQ ID NO: 157777 - DNA, 25 bp, SARS Virus
ttacactgaggtcactgcgatcgaa

SEQ ID NO: 157778 - DNA, 25 bp, SARS Virus
tacactgaggtacctgcgatcgaac

SEQ ID NO: 157779 - DNA, 25 bp, SARS Virus
acactgaggtaactgcgatcgaaca

SEQ ID NO: 157780 - DNA, 25 bp, SARS Virus
cactgaggtaaccgcgatcgaacac

SEQ ID NO: 157781 - DNA, 25 bp, SARS Virus
actgaggtaactccgatcgaacacg

SEQ ID NO: 157782 - DNA, 25 bp, SARS Virus
ctgaggtaactgcgatcgaacacga

SEQ ID NO: 157783 - DNA, 25 bp, SARS Virus
tgaggtaactgccatcgaacacgac

SEQ ID NO: 157784 - DNA, 25 bp, SARS Virus
gaggtaactgcgctcgaacacgacc

SEQ ID NO: 157785 - DNA, 25 bp, SARS Virus
aggtaactgcgaccgaacacgacca

SEQ ID NO: 157786 - DNA, 25 bp, SARS Virus
ggtaactgcgatcgaacacgaccag

SEQ ID NO: 157787 - DNA, 25 bp, SARS Virus
gtaactgcgatccaacacgaccagg

SEQ ID NO: 157788 - DNA, 25 bp, SARS Virus
taactgcgatcgcacacgaccaggg

SEQ ID NO: 157789 - DNA, 25 bp, SARS Virus
aactgcgatcgaccacgaccaggga

SEQ ID NO: 157790 - DNA, 25 bp, SARS Virus
actgcgatcgaacacgaccagggaa

SEQ ID NO: 157791 - DNA, 25 bp, SARS Virus
ctgcgatcgaacccgaccagggaaa

SEQ ID NO: 157792 - DNA, 25 bp, SARS Virus
tgcgatcgaacacgaccagggaaac

SEQ ID NO: 157793 - DNA, 25 bp, SARS Virus
gcgatcgaacaccaccagggaaact

SEQ ID NO: 157794 - DNA, 25 bp, SARS Virus
cgatcgaacacgcccagggaaactt

SEQ ID NO: 157795 - DNA, 25 bp, SARS Virus
gatcgaacacgaccagggaaacttc

SEQ ID NO: 157796 - DNA, 25 bp, SARS Virus
atcgaacacgaccagggaaacttcc

SEQ ID NO: 157797 - DNA, 25 bp, SARS Virus
tcgaacacgacccgggaaacttcca

SEQ ID NO: 157798 - DNA, 25 bp, SARS Virus
cgaacacgaccacggaaacttccac

SEQ ID NO: 157799 - DNA, 25 bp, SARS Virus
gaacacgaccagcgaaacttccaca

SEQ ID NO: 157800 - DNA, 25 bp, SARS Virus
aacacgaccaggcaaacttccacaa

SEQ ID NO: 157801 - DNA, 25 bp, SARS Virus
acacgaccagggcaacttccacaat

SEQ ID NO: 157802 - DNA, 25 bp, SARS Virus
cacgaccagggacacttccacaatc

SEQ ID NO: 157803 - DNA, 25 bp, SARS Virus
acgaccagggaaccttccacaatct

SEQ ID NO: 157804 - DNA, 25 bp, SARS Virus
cgaccagggaaacttccacaatctg

SEQ ID NO: 157805 - DNA, 25 bp, SARS Virus
gaccagggaaacctccacaatctgg

SEQ ID NO: 157806 - DNA, 25 bp, SARS Virus
accagggaaactcccacaatctgga

SEQ ID NO: 157807 - DNA, 25 bp, SARS Virus
ccagggaaacttccacaatctggaa

SEQ ID NO: 157808 - DNA, 25 bp, SARS Virus
cagggaaacttccacaatctggaaa

SEQ ID NO: 157809 - DNA, 25 bp, SARS Virus
agggaaacttccccaatctggaaac

SEQ ID NO: 157810 - DNA, 25 bp, SARS Virus
gggaaacttccacaatctggaaact

SEQ ID NO: 157811 - DNA, 25 bp, SARS Virus
ggaaacttccaccatctggaaactg

SEQ ID NO: 157812 - DNA, 25 bp, SARS Virus
gaaacttccacactctggaaactga

SEQ ID NO: 157813 - DNA, 25 bp, SARS Virus
aaacttccacaacctggaaactgac

SEQ ID NO: 157814 - DNA, 25 bp, SARS Virus
aacttccacaatctggaaactgact

SEQ ID NO: 157815 - DNA, 25 bp, SARS Virus
acttccacaatccggaaactgactt

SEQ ID NO: 157816 - DNA, 25 bp, SARS Virus
cttccacaatctcgaaactgacttg

SEQ ID NO: 157817 - DNA, 25 bp, SARS Virus
ttccacaatctgcaaactgacttgg

SEQ ID NO: 157818 - DNA, 25 bp, SARS Virus
tccacaatctggcaactgacttgga

SEQ ID NO: 157819 - DNA, 25 bp, SARS Virus
ccacaatctggacactgacttggaa

SEQ ID NO: 157820 - DNA, 25 bp, SARS Virus
cacaatctggaacctgacttggaag

SEQ ID NO: 157821 - DNA, 25 bp, SARS Virus
acaatctggaaactgacttggaaga

SEQ ID NO: 157822 - DNA, 25 bp, SARS Virus
caatctggaaaccgacttggaagac

SEQ ID NO: 157823 - DNA, 25 bp, SARS Virus
aatctggaaactcacttggaagaca

SEQ ID NO: 157824 - DNA, 25 bp, SARS Virus
atctggaaactgccttggaagacaa

SEQ ID NO: 157825 - DNA, 25 bp, SARS Virus
tctggaaactgacttggaagacaat

SEQ ID NO: 157826 - DNA, 25 bp, SARS Virus
ctggaaactgacctggaagacaata

SEQ ID NO: 157827 - DNA, 25 bp, SARS Virus
tggaaactgactcggaagacaataa

SEQ ID NO: 157828 - DNA, 25 bp, SARS Virus
ggaaactgacttcgaagacaataat

SEQ ID NO: 157829 - DNA, 25 bp, SARS Virus
gaaactgacttgcaagacaataatt

SEQ ID NO: 157830 - DNA, 25 bp, SARS Virus
aaactgacttggcagacaataattt

SEQ ID NO: 157831 - DNA, 25 bp, SARS Virus
aactgacttggacgacaataatttt

SEQ ID NO: 157832 - DNA, 25 bp, SARS Virus
actgacttggaacacaataattttg

SEQ ID NO: 157833 - DNA, 25 bp, SARS Virus
ctgacttggaagccaataattttgt

SEQ ID NO: 157834 - DNA, 25 bp, SARS Virus
tgacttggaagacaataattttgtg

SEQ ID NO: 157835 - DNA, 25 bp, SARS Virus
gacttggaagaccataattttgtgg

SEQ ID NO: 157836 - DNA, 25 bp, SARS Virus
acttggaagacactaattttgtggt

SEQ ID NO: 157837 - DNA, 25 bp, SARS Virus
cttggaagacaacaattttgtggta

SEQ ID NO: 157838 - DNA, 25 bp, SARS Virus
ttggaagacaatcattttgtggtaa

SEQ ID NO: 157839 - DNA, 25 bp, SARS Virus
tggaagacaatacttttgtggtaat

SEQ ID NO: 157840 - DNA, 25 bp, SARS Virus
ggaagacaataactttgtggtaatg

SEQ ID NO: 157841 - DNA, 25 bp, SARS Virus
gaagacaataatcttgtggtaatgc

SEQ ID NO: 157842 - DNA, 25 bp, SARS Virus
aagacaataattctgtggtaatgcc

SEQ ID NO: 157843 - DNA, 25 bp, SARS Virus
agacaataatttcgtggtaatgccc

SEQ ID NO: 157844 - DNA, 25 bp, SARS Virus
gacaataattttctggtaatgcccg

SEQ ID NO: 157845 - DNA, 25 bp, SARS Virus
acaataattttgcggtaatgcccgc

SEQ ID NO: 157846 - DNA, 25 bp, SARS Virus
caataattttgtcgtaatgcccgca

SEQ ID NO: 157847 - DNA, 25 bp, SARS Virus
aataattttgtgctaatgcccgcaa

SEQ ID NO: 157848 - DNA, 25 bp, SARS Virus
ataattttgtggcaatgcccgcaaa

SEQ ID NO: 157849 - DNA, 25 bp, SARS Virus
taattttgtggtcatgcccgcaaag

SEQ ID NO: 157850 - DNA, 25 bp, SARS Virus
aattttgtggtactgcccgcaaaga

SEQ ID NO: 157851 - DNA, 25 bp, SARS Virus
attttgtggtaacgcccgcaaagat

SEQ ID NO: 157852 - DNA, 25 bp, SARS Virus
ttttgtggtaatccccgcaaagatt

SEQ ID NO: 157853 - DNA, 25 bp, SARS Virus
tttgtggtaatgcccgcaaagattt

SEQ ID NO: 157854 - DNA, 25 bp, SARS Virus
ttgtggtaatgcccgcaaagatttt

SEQ ID NO: 157855 - DNA, 25 bp, SARS Virus
tgtggtaatgcccgcaaagattttt

SEQ ID NO: 157856 - DNA, 25 bp, SARS Virus
gtggtaatgcccccaaagatttttc

SEQ ID NO: 157857 - DNA, 25 bp, SARS Virus
tggtaatgcccgcaaagatttttcc

SEQ ID NO: 157858 - DNA, 25 bp, SARS Virus
ggtaatgcccgccaagatttttcca

SEQ ID NO: 157859 - DNA, 25 bp, SARS Virus
gtaatgcccgcacagatttttccag

SEQ ID NO: 157860 - DNA, 25 bp, SARS Virus
taatgcccgcaacgatttttccaga

SEQ ID NO: 157861 - DNA, 25 bp, SARS Virus
aatgcccgcaaacatttttccagat

SEQ ID NO: 157862 - DNA, 25 bp, SARS Virus
atgcccgcaaagctttttccagatg

SEQ ID NO: 157863 - DNA, 25 bp, SARS Virus
tgcccgcaaagacttttccagatgg

SEQ ID NO: 157864 - DNA, 25 bp, SARS Virus
gcccgcaaagatctttccagatgga

SEQ ID NO: 157865 - DNA, 25 bp, SARS Virus
cccgcaaagattcttccagatggac

SEQ ID NO: 157866 - DNA, 25 bp, SARS Virus
ccgcaaagatttctccagatggaca

SEQ ID NO: 157867 - DNA, 25 bp, SARS Virus
cgcaaagattttcccagatggacag

SEQ ID NO: 157868 - DNA, 25 bp, SARS Virus
gcaaagatttttccagatggacagg

SEQ ID NO: 157869 - DNA, 25 bp, SARS Virus
caaagatttttccagatggacagga

SEQ ID NO: 157870 - DNA, 25 bp, SARS Virus
aaagatttttcccgatggacaggaa

SEQ ID NO: 157871 - DNA, 25 bp, SARS Virus
aagatttttccacatggacaggaag

SEQ ID NO: 157872 - DNA, 25 bp, SARS Virus
agatttttccagctggacaggaagg

SEQ ID NO: 157873 - DNA, 25 bp, SARS Virus
gatttttccagacggacaggaaggt

SEQ ID NO: 157874 - DNA, 25 bp, SARS Virus
atttttccagatcgacaggaaggtg

SEQ ID NO: 157875 - DNA, 25 bp, SARS Virus
tttttccagatgcacaggaaggtga

SEQ ID NO: 157876 - DNA, 25 bp, SARS Virus
ttttccagatggccaggaaggtgag

SEQ ID NO: 157877 - DNA, 25 bp, SARS Virus
tttccagatggacaggaaggtgaga

SEQ ID NO: 157878 - DNA, 25 bp, SARS Virus
ttccagatggaccggaaggtgagat

SEQ ID NO: 157879 - DNA, 25 bp, SARS Virus
tccagatggacacgaaggtgagatg

SEQ ID NO: 157880 - DNA, 25 bp, SARS Virus
ccagatggacagcaaggtgagatgg

SEQ ID NO: 157881 - DNA, 25 bp, SARS Virus
cagatggacaggcaggtgagatggt

SEQ ID NO: 157882 - DNA, 25 bp, SARS Virus
agatggacaggacggtgagatggta

SEQ ID NO: 157883 - DNA, 25 bp, SARS Virus
gatggacaggaacgtgagatggtag

SEQ ID NO: 157884 - DNA, 25 bp, SARS Virus
atggacaggaagctgagatggtagt

SEQ ID NO: 157885 - DNA, 25 bp, SARS Virus
tggacaggaaggcgagatggtagtt

SEQ ID NO: 157886 - DNA, 25 bp, SARS Virus
ggacaggaaggtcagatggtagttt

SEQ ID NO: 157887 - DNA, 25 bp, SARS Virus
gacaggaaggtgcgatggtagtttg

SEQ ID NO: 157888 - DNA, 25 bp, SARS Virus
acaggaaggtgacatggtagtttgt

SEQ ID NO: 157889 - DNA, 25 bp, SARS Virus
caggaaggtgagctggtagtttgtt

SEQ ID NO: 157890 - DNA, 25 bp, SARS Virus
aggaaggtgagacggtagtttgttc

SEQ ID NO: 157891 - DNA, 25 bp, SARS Virus
ggaaggtgagatcgtagtttgttct

SEQ ID NO: 157892 - DNA, 25 bp, SARS Virus
gaaggtgagatgctagtttgttctg

SEQ ID NO: 157893 - DNA, 25 bp, SARS Virus
aaggtgagatggcagtttgttctgt

SEQ ID NO: 157894 - DNA, 25 bp, SARS Virus
aggtgagatggtcgtttgttctgtc

SEQ ID NO: 157895 - DNA, 25 bp, SARS Virus
ggtgagatggtactttgttctgtca

SEQ ID NO: 157896 - DNA, 25 bp, SARS Virus
gtgagatggtagcttgttctgtcat

SEQ ID NO: 157897 - DNA, 25 bp, SARS Virus
tgagatggtagtctgttctgtcatt

SEQ ID NO: 157898 - DNA, 25 bp, SARS Virus
gagatggtagttcgttctgtcattc

SEQ ID NO: 157899 - DNA, 25 bp, SARS Virus
agatggtagtttcttctgtcattca

SEQ ID NO: 157900 - DNA, 25 bp, SARS Virus
gatggtagtttgctctgtcattcac

SEQ ID NO: 157901 - DNA, 25 bp, SARS Virus
atggtagtttgtcctgtcattcact

SEQ ID NO: 157902 - DNA, 25 bp, SARS Virus
tggtagtttgttctgtcattcactt

SEQ ID NO: 157903 - DNA, 25 bp, SARS Virus
ggtagtttgttccgtcattcacttc

SEQ ID NO: 157904 - DNA, 25 bp, SARS Virus
gtagtttgttctctcattcacttct

SEQ ID NO: 157905 - DNA, 25 bp, SARS Virus
tagtttgttctgccattcacttctt

SEQ ID NO: 157906 - DNA, 25 bp, SARS Virus
agtttgttctgtcattcacttcttg

SEQ ID NO: 157907 - DNA, 25 bp, SARS Virus
gtttgttctgtccttcacttcttgt

SEQ ID NO: 157908 - DNA, 25 bp, SARS Virus
tttgttctgtcactcacttcttgtt

SEQ ID NO: 157909 - DNA, 25 bp, SARS Virus
ttgttctgtcatccacttcttgttc

SEQ ID NO: 157910 - DNA, 25 bp, SARS Virus
tgttctgtcattcacttcttgttcg

SEQ ID NO: 157911 - DNA, 25 bp, SARS Virus
gttctgtcattcccttcttgttcgt

SEQ ID NO: 157912 - DNA, 25 bp, SARS Virus
ttctgtcattcacttcttgttcgtg

SEQ ID NO: 157913 - DNA, 25 bp, SARS Virus
tctgtcattcacctcttgttcgtga

SEQ ID NO: 157914 - DNA, 25 bp, SARS Virus
ctgtcattcactccttgttcgtgag

SEQ ID NO: 157915 - DNA, 25 bp, SARS Virus
tgtcattcacttcttgttcgtgaga

SEQ ID NO: 157916 - DNA, 25 bp, SARS Virus
gtcattcacttcctgttcgtgagag

SEQ ID NO: 157917 - DNA, 25 bp, SARS Virus
tcattcacttctcgttcgtgagagt

SEQ ID NO: 157918 - DNA, 25 bp, SARS Virus
cattcacttcttcttcgtgagagtc

SEQ ID NO: 157919 - DNA, 25 bp, SARS Virus
attcacttcttgctcgtgagagtca

SEQ ID NO: 157920 - DNA, 25 bp, SARS Virus
ttcacttcttgtccgtgagagtcat

SEQ ID NO: 157921 - DNA, 25 bp, SARS Virus
tcacttcttgttcgtgagagtcatc

SEQ ID NO: 157922 - DNA, 25 bp, SARS Virus
cacttcttgttcctgagagtcatcc

SEQ ID NO: 157923 - DNA, 25 bp, SARS Virus
acttcttgttcgcgagagtcatcca

SEQ ID NO: 157924 - DNA, 25 bp, SARS Virus
cttcttgttcgtcagagtcatccaa

SEQ ID NO: 157925 - DNA, 25 bp, SARS Virus
ttcttgttcgtgcgagtcatccaaa

SEQ ID NO: 157926 - DNA, 25 bp, SARS Virus
tcttgttcgtgacagtcatccaaag

SEQ ID NO: 157927 - DNA, 25 bp, SARS Virus
cttgttcgtgagcgtcatccaaaga

SEQ ID NO: 157928 - DNA, 25 bp, SARS Virus
ttgttcgtgagactcatccaaagaa

SEQ ID NO: 157929 - DNA, 25 bp, SARS Virus
tgttcgtgagagccatccaaagaac

SEQ ID NO: 157930 - DNA, 25 bp, SARS Virus
gttcgtgagagtcatccaaagaacc

SEQ ID NO: 157931 - DNA, 25 bp, SARS Virus
ttcgtgagagtcctccaaagaaccg

SEQ ID NO: 157932 - DNA, 25 bp, SARS Virus
tcgtgagagtcacccaaagaaccgt

SEQ ID NO: 157933 - DNA, 25 bp, SARS Virus
cgtgagagtcatccaaagaaccgtt

SEQ ID NO: 157934 - DNA, 25 bp, SARS Virus
gtgagagtcatccaaagaaccgtta

SEQ ID NO: 157935 - DNA, 25 bp, SARS Virus
tgagagtcatcccaagaaccgttac

SEQ ID NO: 157936 - DNA, 25 bp, SARS Virus
gagagtcatccacagaaccgttaca

SEQ ID NO: 157937 - DNA, 25 bp, SARS Virus
agagtcatccaacgaaccgttacag

SEQ ID NO: 157938 - DNA, 25 bp, SARS Virus
gagtcatccaaacaaccgttacagt

SEQ ID NO: 157939 - DNA, 25 bp, SARS Virus
agtcatccaaagcaccgttacagtc

SEQ ID NO: 157940 - DNA, 25 bp, SARS Virus
gtcatccaaagacccgttacagtca

SEQ ID NO: 157941 - DNA, 25 bp, SARS Virus
tcatccaaagaaccgttacagtcag

SEQ ID NO: 157942 - DNA, 25 bp, SARS Virus
catccaaagaaccgttacagtcagt

SEQ ID NO: 157943 - DNA, 25 bp, SARS Virus
atccaaagaacccttacagtcagta

SEQ ID NO: 157944 - DNA, 25 bp, SARS Virus
tccaaagaaccgctacagtcagtaa

SEQ ID NO: 157945 - DNA, 25 bp, SARS Virus
ccaaagaaccgtcacagtcagtaac

SEQ ID NO: 157946 - DNA, 25 bp, SARS Virus
caaagaaccgttccagtcagtaaca

SEQ ID NO: 157947 - DNA, 25 bp, SARS Virus
aaagaaccgttacagtcagtaacac

SEQ ID NO: 157948 - DNA, 25 bp, SARS Virus
aagaaccgttaccgtcagtaacacg

SEQ ID NO: 157949 - DNA, 25 bp, SARS Virus
agaaccgttacactcagtaacacgt

SEQ ID NO: 157950 - DNA, 25 bp, SARS Virus
gaaccgttacagccagtaacacgtc

SEQ ID NO: 157951 - DNA, 25 bp, SARS Virus
aaccgttacagtcagtaacacgtct

SEQ ID NO: 157952 - DNA, 25 bp, SARS Virus
accgttacagtccgtaacacgtctg

SEQ ID NO: 157953 - DNA, 25 bp, SARS Virus
ccgttacagtcactaacacgtctgt

SEQ ID NO: 157954 - DNA, 25 bp, SARS Virus
cgttacagtcagcaacacgtctgtg

SEQ ID NO: 157955 - DNA, 25 bp, SARS Virus
gttacagtcagtcacacgtctgtgg

SEQ ID NO: 157956 - DNA, 25 bp, SARS Virus
ttacagtcagtaccacgtctgtgga

SEQ ID NO: 157957 - DNA, 25 bp, SARS Virus
tacagtcagtaacacgtctgtggat

SEQ ID NO: 157958 - DNA, 25 bp, SARS Virus
acagtcagtaacccgtctgtggata

SEQ ID NO: 157959 - DNA, 25 bp, SARS Virus
cagtcagtaacacgtctgtggataa

SEQ ID NO: 157960 - DNA, 25 bp, SARS Virus
agtcagtaacacctctgtggataac

SEQ ID NO: 157961 - DNA, 25 bp, SARS Virus
gtcagtaacacgcctgtggataaca

SEQ ID NO: 157962 - DNA, 25 bp, SARS Virus
tcagtaacacgtctgtggataacat

SEQ ID NO: 157963 - DNA, 25 bp, SARS Virus
cagtaacacgtccgtggataacatc

SEQ ID NO: 157964 - DNA, 25 bp, SARS Virus
agtaacacgtctctggataacatct

SEQ ID NO: 157965 - DNA, 25 bp, SARS Virus
gtaacacgtctgcggataacatcta

SEQ ID NO: 157966 - DNA, 25 bp, SARS Virus
taacacgtctgtcgataacatctat

SEQ ID NO: 157967 - DNA, 25 bp, SARS Virus
aacacgtctgtgcataacatctatg

SEQ ID NO: 157968 - DNA, 25 bp, SARS Virus
acacgtctgtggctaacatctatgt

SEQ ID NO: 157969 - DNA, 25 bp, SARS Virus
cacgtctgtggacaacatctatgta

SEQ ID NO: 157970 - DNA, 25 bp, SARS Virus
acgtctgtggatcacatctatgtac

SEQ ID NO: 157971 - DNA, 25 bp, SARS Virus
cgtctgtggataccatctatgtaca

SEQ ID NO: 157972 - DNA, 25 bp, SARS Virus
gtctgtggataacatctatgtacac

SEQ ID NO: 157973 - DNA, 25 bp, SARS Virus
tctgtggataacctctatgtacacg

SEQ ID NO: 157974 - DNA, 25 bp, SARS Virus
ctgtggataacacctatgtacacga

SEQ ID NO: 157975 - DNA, 25 bp, SARS Virus
tgtggataacatctatgtacacgac

SEQ ID NO: 157976 - DNA, 25 bp, SARS Virus
gtggataacatccatgtacacgacc

SEQ ID NO: 157977 - DNA, 25 bp, SARS Virus
tggataacatctctgtacacgaccc

SEQ ID NO: 157978 - DNA, 25 bp, SARS Virus
ggataacatctacgtacacgacccc

SEQ ID NO: 157979 - DNA, 25 bp, SARS Virus
gataacatctatctacacgaccccg

SEQ ID NO: 157980 - DNA, 25 bp, SARS Virus
ataacatctatgcacacgaccccga

SEQ ID NO: 157981 - DNA, 25 bp, SARS Virus
taacatctatgtccacgaccccgaa

SEQ ID NO: 157982 - DNA, 25 bp, SARS Virus
aacatctatgtacacgaccccgaag

SEQ ID NO: 157983 - DNA, 25 bp, SARS Virus
acatctatgtacccgaccccgaaga

SEQ ID NO: 157984 - DNA, 25 bp, SARS Virus
catctatgtacacgaccccgaagag

SEQ ID NO: 157985 - DNA, 25 bp, SARS Virus
atctatgtacaccaccccgaagaga

SEQ ID NO: 157986 - DNA, 25 bp, SARS Virus
tctatgtacacgcccccgaagagaa

SEQ ID NO: 157987 - DNA, 25 bp, SARS Virus
ctatgtacacgaccccgaagagaaa

SEQ ID NO: 157988 - DNA, 25 bp, SARS Virus
tatgtacacgaccccgaagagaaaa

SEQ ID NO: 157989 - DNA, 25 bp, SARS Virus
atgtacacgaccccgaagagaaaac

SEQ ID NO: 157990 - DNA, 25 bp, SARS Virus
tgtacacgaccccgaagagaaaaca

SEQ ID NO: 157991 - DNA, 25 bp, SARS Virus
gtacacgacccccaagagaaaacat

SEQ ID NO: 157992 - DNA, 25 bp, SARS Virus
tacacgaccccgcagagaaaacatc

SEQ ID NO: 157993 - DNA, 25 bp, SARS Virus
acacgaccccgacgagaaaacatca

SEQ ID NO: 157994 - DNA, 25 bp, SARS Virus
cacgaccccgaacagaaaacatcag

SEQ ID NO: 157995 - DNA, 25 bp, SARS Virus
acgaccccgaagcgaaaacatcagg

SEQ ID NO: 157996 - DNA, 25 bp, SARS Virus
cgaccccgaagacaaaacatcaggg

SEQ ID NO: 157997 - DNA, 25 bp, SARS Virus
gaccccgaagagcaaacatcagggt

SEQ ID NO: 157998 - DNA, 25 bp, SARS Virus
accccgaagagacaacatcagggtc

SEQ ID NO: 157999 - DNA, 25 bp, SARS Virus
ccccgaagagaacacatcagggtct

SEQ ID NO: 158000 - DNA, 25 bp, SARS Virus
cccgaagagaaaccatcagggtcta

SEQ ID NO: 158001 - DNA, 25 bp, SARS Virus
ccgaagagaaaacatcagggtctaa

SEQ ID NO: 158002 - DNA, 25 bp, SARS Virus
cgaagagaaaacctcagggtctaat

SEQ ID NO: 158003 - DNA, 25 bp, SARS Virus
gaagagaaaacaccagggtctaatg

SEQ ID NO: 158004 - DNA, 25 bp, SARS Virus
aagagaaaacatcagggtctaatgt

SEQ ID NO: 158005 - DNA, 25 bp, SARS Virus
agagaaaacatccgggtctaatgtc

SEQ ID NO: 158006 - DNA, 25 bp, SARS Virus
gagaaaacatcacggtctaatgtca

SEQ ID NO: 158007 - DNA, 25 bp, SARS Virus
agaaaacatcagcgtctaatgtcat

SEQ ID NO: 158008 - DNA, 25 bp, SARS Virus
gaaaacatcaggctctaatgtcata

SEQ ID NO: 158009 - DNA, 25 bp, SARS Virus
aaaacatcagggcctaatgtcataa

SEQ ID NO: 158010 - DNA, 25 bp, SARS Virus
aaacatcagggtctaatgtcataat

SEQ ID NO: 158011 - DNA, 25 bp, SARS Virus
aacatcagggtccaatgtcataatc

SEQ ID NO: 158012 - DNA, 25 bp, SARS Virus
acatcagggtctcatgtcataatcg

SEQ ID NO: 158013 - DNA, 25 bp, SARS Virus
catcagggtctactgtcataatcgt

SEQ ID NO: 158014 - DNA, 25 bp, SARS Virus
atcagggtctaacgtcataatcgtc

SEQ ID NO: 158015 - DNA, 25 bp, SARS Virus
tcagggtctaatctcataatcgtcg

SEQ ID NO: 158016 - DNA, 25 bp, SARS Virus
cagggtctaatgccataatcgtcgc

SEQ ID NO: 158017 - DNA, 25 bp, SARS Virus
agggtctaatgtcataatcgtcgct

SEQ ID NO: 158018 - DNA, 25 bp, SARS Virus
gggtctaatgtcctaatcgtcgcta

SEQ ID NO: 158019 - DNA, 25 bp, SARS Virus
ggtctaatgtcacaatcgtcgctat

SEQ ID NO: 158020 - DNA, 25 bp, SARS Virus
gtctaatgtcatcatcgtcgctata

SEQ ID NO: 158021 - DNA, 25 bp, SARS Virus
tctaatgtcatactcgtcgctatag

SEQ ID NO: 158022 - DNA, 25 bp, SARS Virus
ctaatgtcataaccgtcgctatagt

SEQ ID NO: 158023 - DNA, 25 bp, SARS Virus
taatgtcataatcgtcgctatagtt

SEQ ID NO: 158024 - DNA, 25 bp, SARS Virus
aatgtcataatcctcgctatagttg

SEQ ID NO: 158025 - DNA, 25 bp, SARS Virus
atgtcataatcgccgctatagttgt

SEQ ID NO: 158026 - DNA, 25 bp, SARS Virus
tgtcataatcgtcgctatagttgtg

SEQ ID NO: 158027 - DNA, 25 bp, SARS Virus
gtcataatcgtccctatagttgtgg

SEQ ID NO: 158028 - DNA, 25 bp, SARS Virus
tcataatcgtcgctatagttgtggg

SEQ ID NO: 158029 - DNA, 25 bp, SARS Virus
cataatcgtcgccatagttgtgggt

SEQ ID NO: 158030 - DNA, 25 bp, SARS Virus
ataatcgtcgctctagttgtgggtt

SEQ ID NO: 158031 - DNA, 25 bp, SARS Virus
taatcgtcgctacagttgtgggttt

SEQ ID NO: 158032 - DNA, 25 bp, SARS Virus
aatcgtcgctatcgttgtgggttta

SEQ ID NO: 158033 - DNA, 25 bp, SARS Virus
atcgtcgctatacttgtgggtttaa

SEQ ID NO: 158034 - DNA, 25 bp, SARS Virus
tcgtcgctatagctgtgggtttaat

SEQ ID NO: 158035 - DNA, 25 bp, SARS Virus
cgtcgctatagtcgtgggtttaata

SEQ ID NO: 158036 - DNA, 25 bp, SARS Virus
gtcgctatagttctgggtttaataa

SEQ ID NO: 158037 - DNA, 25 bp, SARS Virus
tcgctatagttgcgggtttaataac

SEQ ID NO: 158038 - DNA, 25 bp, SARS Virus
cgctatagttgtcggtttaataact

SEQ ID NO: 158039 - DNA, 25 bp, SARS Virus
gctatagttgtgcgtttaataactc

SEQ ID NO: 158040 - DNA, 25 bp, SARS Virus
ctatagttgtggctttaataactca

SEQ ID NO: 158041 - DNA, 25 bp, SARS Virus
tatagttgtgggcttaataactcat

SEQ ID NO: 158042 - DNA, 25 bp, SARS Virus
atagttgtgggtctaataactcata

SEQ ID NO: 158043 - DNA, 25 bp, SARS Virus
tagttgtgggttcaataactcatag

SEQ ID NO: 158044 - DNA, 25 bp, SARS Virus
agttgtgggtttcataactcataga

SEQ ID NO: 158045 - DNA, 25 bp, SARS Virus
gttgtgggtttactaactcatagaa

SEQ ID NO: 158046 - DNA, 25 bp, SARS Virus
ttgtgggtttaacaactcatagaat

SEQ ID NO: 158047 - DNA, 25 bp, SARS Virus
tgtgggtttaatcactcatagaatt

SEQ ID NO: 158048 - DNA, 25 bp, SARS Virus
gtgggtttaatacctcatagaatta

SEQ ID NO: 158049 - DNA, 25 bp, SARS Virus
tgggtttaataactcatagaattag

SEQ ID NO: 158050 - DNA, 25 bp, SARS Virus
gggtttaataacccatagaattaga

SEQ ID NO: 158051 - DNA, 25 bp, SARS Virus
ggtttaataactcatagaattagag

SEQ ID NO: 158052 - DNA, 25 bp, SARS Virus
gtttaataactcctagaattagaga

SEQ ID NO: 158053 - DNA, 25 bp, SARS Virus
tttaataactcacagaattagagac

SEQ ID NO: 158054 - DNA, 25 bp, SARS Virus
ttaataactcatcgaattagagacc

SEQ ID NO: 158055 - DNA, 25 bp, SARS Virus
taataactcatacaattagagaccg

SEQ ID NO: 158056 - DNA, 25 bp, SARS Virus
aataactcatagcattagagaccgt

SEQ ID NO: 158057 - DNA, 25 bp, SARS Virus
ataactcatagacttagagaccgtg

SEQ ID NO: 158058 - DNA, 25 bp, SARS Virus
taactcatagaactagagaccgtga

SEQ ID NO: 158059 - DNA, 25 bp, SARS Virus
aactcatagaatcagagaccgtgac

SEQ ID NO: 158060 - DNA, 25 bp, SARS Virus
actcatagaattcgagaccgtgacc

SEQ ID NO: 158061 - DNA, 25 bp, SARS Virus
ctcatagaattacagaccgtgacca

SEQ ID NO: 158062 - DNA, 25 bp, SARS Virus
tcatagaattagcgaccgtgaccaa

SEQ ID NO: 158063 - DNA, 25 bp, SARS Virus
catagaattagacaccgtgaccaaa

SEQ ID NO: 158064 - DNA, 25 bp, SARS Virus
atagaattagagcccgtgaccaaat

SEQ ID NO: 158065 - DNA, 25 bp, SARS Virus
tagaattagagaccgtgaccaaatt

SEQ ID NO: 158066 - DNA, 25 bp, SARS Virus
agaattagagaccgtgaccaaatta

SEQ ID NO: 158067 - DNA, 25 bp, SARS Virus
gaattagagaccctgaccaaattac

SEQ ID NO: 158068 - DNA, 25 bp, SARS Virus
aattagagaccgcgaccaaattaca

SEQ ID NO: 158069 - DNA, 25 bp, SARS Virus
attagagaccgtcaccaaattacaa

SEQ ID NO: 158070 - DNA, 25 bp, SARS Virus
ttagagaccgtgcccaaattacaat

SEQ ID NO: 158071 - DNA, 25 bp, SARS Virus
tagagaccgtgaccaaattacaatg

SEQ ID NO: 158072 - DNA, 25 bp, SARS Virus
agagaccgtgaccaaattacaatgc

SEQ ID NO: 158073 - DNA, 25 bp, SARS Virus
gagaccgtgacccaattacaatgcg

SEQ ID NO: 158074 - DNA, 25 bp, SARS Virus
agaccgtgaccacattacaatgcga

SEQ ID NO: 158075 - DNA, 25 bp, SARS Virus
gaccgtgaccaacttacaatgcgaa

SEQ ID NO: 158076 - DNA, 25 bp, SARS Virus
accgtgaccaaactacaatgcgaat

SEQ ID NO: 158077 - DNA, 25 bp, SARS Virus
ccgtgaccaaatcacaatgcgaatc

SEQ ID NO: 158078 - DNA, 25 bp, SARS Virus
cgtgaccaaattccaatgcgaatcg

SEQ ID NO: 158079 - DNA, 25 bp, SARS Virus
gtgaccaaattacaatgcgaatcgg

SEQ ID NO: 158080 - DNA, 25 bp, SARS Virus
tgaccaaattaccatgcgaatcggg

SEQ ID NO: 158081 - DNA, 25 bp, SARS Virus
gaccaaattacactgcgaatcgggt

SEQ ID NO: 158082 - DNA, 25 bp, SARS Virus
accaaattacaacgcgaatcgggtt

SEQ ID NO: 158083 - DNA, 25 bp, SARS Virus
ccaaattacaatccgaatcgggttt

SEQ ID NO: 158084 - DNA, 25 bp, SARS Virus
caaattacaatgcgaatcgggtttc

SEQ ID NO: 158085 - DNA, 25 bp, SARS Virus
aaattacaatgccaatcgggtttcg

SEQ ID NO: 158086 - DNA, 25 bp, SARS Virus
aattacaatgcgcatcgggtttcga

SEQ ID NO: 158087 - DNA, 25 bp, SARS Virus
attacaatgcgactcgggtttcgag

SEQ ID NO: 158088 - DNA, 25 bp, SARS Virus
ttacaatgcgaaccgggtttcgagt

SEQ ID NO: 158089 - DNA, 25 bp, SARS Virus
tacaatgcgaatcgggtttcgagtt

SEQ ID NO: 158090 - DNA, 25 bp, SARS Virus
acaatgcgaatccggtttcgagttt

SEQ ID NO: 158091 - DNA, 25 bp, SARS Virus
caatgcgaatcgcgtttcgagttta

SEQ ID NO: 158092 - DNA, 25 bp, SARS Virus
aatgcgaatcggctttcgagtttac

SEQ ID NO: 158093 - DNA, 25 bp, SARS Virus
atgcgaatcgggcttcgagtttacg

SEQ ID NO: 158094 - DNA, 25 bp, SARS Virus
tgcgaatcgggtctcgagtttacgt

SEQ ID NO: 158095 - DNA, 25 bp, SARS Virus
gcgaatcgggttccgagtttacgtt

SEQ ID NO: 158096 - DNA, 25 bp, SARS Virus
cgaatcgggtttcgagtttacgttg

SEQ ID NO: 158097 - DNA, 25 bp, SARS Virus
gaatcgggtttccagtttacgttgt

SEQ ID NO: 158098 - DNA, 25 bp, SARS Virus
aatcgggtttcgcgtttacgttgta

SEQ ID NO: 158099 - DNA, 25 bp, SARS Virus
atcgggtttcgactttacgttgtaa

SEQ ID NO: 158100 - DNA, 25 bp, SARS Virus
tcgggtttcgagcttacgttgtaat

SEQ ID NO: 158101 - DNA, 25 bp, SARS Virus
cgggtttcgagtctacgttgtaatt

SEQ ID NO: 158102 - DNA, 25 bp, SARS Virus
gggtttcgagttcacgttgtaattg

SEQ ID NO: 158103 - DNA, 25 bp, SARS Virus
ggtttcgagtttccgttgtaattgt

SEQ ID NO: 158104 - DNA, 25 bp, SARS Virus
gtttcgagtttacgttgtaattgtc

SEQ ID NO: 158105 - DNA, 25 bp, SARS Virus
tttcgagtttaccttgtaattgtcc

SEQ ID NO: 158106 - DNA, 25 bp, SARS Virus
ttcgagtttacgctgtaattgtcct

SEQ ID NO: 158107 - DNA, 25 bp, SARS Virus
tcgagtttacgtcgtaattgtcctt

SEQ ID NO: 158108 - DNA, 25 bp, SARS Virus
cgagtttacgttctaattgtccttc

SEQ ID NO: 158109 - DNA, 25 bp, SARS Virus
gagtttacgttgcaattgtccttca

SEQ ID NO: 158110 - DNA, 25 bp, SARS Virus
agtttacgttgtcattgtccttcac

SEQ ID NO: 158111 - DNA, 25 bp, SARS Virus
gtttacgttgtacttgtccttcaca

SEQ ID NO: 158112 - DNA, 25 bp, SARS Virus
tttacgttgtaactgtccttcacaa

SEQ ID NO: 158113 - DNA, 25 bp, SARS Virus
ttacgttgtaatcgtccttcacaac

SEQ ID NO: 158114 - DNA, 25 bp, SARS Virus
tacgttgtaattctccttcacaaca

SEQ ID NO: 158115 - DNA, 25 bp, SARS Virus
acgttgtaattgcccttcacaacag

SEQ ID NO: 158116 - DNA, 25 bp, SARS Virus
cgttgtaattgtccttcacaacaga

SEQ ID NO: 158117 - DNA, 25 bp, SARS Virus
gttgtaattgtccttcacaacagaa

SEQ ID NO: 158118 - DNA, 25 bp, SARS Virus
ttgtaattgtccctcacaacagaat

SEQ ID NO: 158119 - DNA, 25 bp, SARS Virus
tgtaattgtcctccacaacagaata

SEQ ID NO: 158120 - DNA, 25 bp, SARS Virus
gtaattgtccttcacaacagaataa

SEQ ID NO: 158121 - DNA, 25 bp, SARS Virus
taattgtccttcccaacagaataaa

SEQ ID NO: 158122 - DNA, 25 bp, SARS Virus
aattgtccttcacaacagaataaaa

SEQ ID NO: 158123 - DNA, 25 bp, SARS Virus
attgtccttcaccacagaataaaag

SEQ ID NO: 158124 - DNA, 25 bp, SARS Virus
ttgtccttcacaccagaataaaagt

SEQ ID NO: 158125 - DNA, 25 bp, SARS Virus
tgtccttcacaacagaataaaagtt

SEQ ID NO: 158126 - DNA, 25 bp, SARS Virus
gtccttcacaaccgaataaaagttt

SEQ ID NO: 158127 - DNA, 25 bp, SARS Virus
tccttcacaacacaataaaagtttc

SEQ ID NO: 158128 - DNA, 25 bp, SARS Virus
ccttcacaacagcataaaagtttct

SEQ ID NO: 158129 - DNA, 25 bp, SARS Virus
cttcacaacagactaaaagtttcta

SEQ ID NO: 158130 - DNA, 25 bp, SARS Virus
ttcacaacagaacaaaagtttctag

SEQ ID NO: 158131 - DNA, 25 bp, SARS Virus
tcacaacagaatcaaagtttctaga

SEQ ID NO: 158132 - DNA, 25 bp, SARS Virus
cacaacagaatacaagtttctagag

SEQ ID NO: 158133 - DNA, 25 bp, SARS Virus
acaacagaataacagtttctagagg

SEQ ID NO: 158134 - DNA, 25 bp, SARS Virus
caacagaataaacgtttctagaggt

SEQ ID NO: 158135 - DNA, 25 bp, SARS Virus
aacagaataaaactttctagaggtg

SEQ ID NO: 158136 - DNA, 25 bp, SARS Virus
acagaataaaagcttctagaggtgt

SEQ ID NO: 158137 - DNA, 25 bp, SARS Virus
cagaataaaagtctctagaggtgta

SEQ ID NO: 158138 - DNA, 25 bp, SARS Virus
agaataaaagttcctagaggtgtag

SEQ ID NO: 158139 - DNA, 25 bp, SARS Virus
gaataaaagtttctagaggtgtagt

SEQ ID NO: 158140 - DNA, 25 bp, SARS Virus
aataaaagtttccagaggtgtagtt

SEQ ID NO: 158141 - DNA, 25 bp, SARS Virus
ataaaagtttctcgaggtgtagtta

SEQ ID NO: 158142 - DNA, 25 bp, SARS Virus
taaaagtttctacaggtgtagttat

SEQ ID NO: 158143 - DNA, 25 bp, SARS Virus
aaaagtttctagcggtgtagttatg

SEQ ID NO: 158144 - DNA, 25 bp, SARS Virus
aaagtttctagacgtgtagttatgg

SEQ ID NO: 158145 - DNA, 25 bp, SARS Virus
ctagacccgaatgttaggagattca

SEQ ID NO: 158146 - DNA, 25 bp, SARS Virus
tagacccgaattgtaggagattcag

SEQ ID NO: 158147 - DNA, 25 bp, SARS Virus
agacccgaatttgaggagattcaga

SEQ ID NO: 158148 - DNA, 25 bp, SARS Virus
gacccgaattttgggagattcagag

SEQ ID NO: 158149 - DNA, 25 bp, SARS Virus
acccgaattttaggagattcagaga

SEQ ID NO: 158150 - DNA, 25 bp, SARS Virus
cccgaattttaggagattcagagac

SEQ ID NO: 158151 - DNA, 25 bp, SARS Virus
ccgaattttaggggattcagagacg

SEQ ID NO: 158152 - DNA, 25 bp, SARS Virus
cgaattttaggagattcagagacga

SEQ ID NO: 158153 - DNA, 25 bp, SARS Virus
gaattttaggaggttcagagacgag

SEQ ID NO: 158154 - DNA, 25 bp, SARS Virus
aattttaggagagtcagagacgaga

SEQ ID NO: 158155 - DNA, 25 bp, SARS Virus
attttaggagatgcagagacgagac

SEQ ID NO: 158156 - DNA, 25 bp, SARS Virus
ttttaggagattgagagacgagact

SEQ ID NO: 158157 - DNA, 25 bp, SARS Virus
tttaggagattcggagacgagactc

SEQ ID NO: 158158 - DNA, 25 bp, SARS Virus
ttaggagattcagagacgagactca

SEQ ID NO: 158159 - DNA, 25 bp, SARS Virus
taggagattcagggacgagactcat

SEQ ID NO: 158160 - DNA, 25 bp, SARS Virus
aggagattcagagacgagactcatt

SEQ ID NO: 158161 - DNA, 25 bp, SARS Virus
ggagattcagaggcgagactcattt

SEQ ID NO: 158162 - DNA, 25 bp, SARS Virus
gagattcagagaggagactcatttc

SEQ ID NO: 158163 - DNA, 25 bp, SARS Virus
agattcagagacgagactcatttca

SEQ ID NO: 158164 - DNA, 25 bp, SARS Virus
gattcagagacgggactcatttcat

SEQ ID NO: 158165 - DNA, 25 bp, SARS Virus
attcagagacgagactcatttcatc

SEQ ID NO: 158166 - DNA, 25 bp, SARS Virus
ttcagagacgaggctcatttcatcc

SEQ ID NO: 158167 - DNA, 25 bp, SARS Virus
tcagagacgagagtcatttcatcca

SEQ ID NO: 158168 - DNA, 25 bp, SARS Virus
cagagacgagacgcatttcatccaa

SEQ ID NO: 158169 - DNA, 25 bp, SARS Virus
agagacgagactgatttcatccaaa

SEQ ID NO: 158170 - DNA, 25 bp, SARS Virus
gagacgagactcgtttcatccaaag

SEQ ID NO: 158171 - DNA, 25 bp, SARS Virus
agacgagactcagttcatccaaagt

SEQ ID NO: 158172 - DNA, 25 bp, SARS Virus
gacgagactcatgtcatccaaagtc

SEQ ID NO: 158173 - DNA, 25 bp, SARS Virus
acgagactcattgcatccaaagtcc

SEQ ID NO: 158174 - DNA, 25 bp, SARS Virus
cgagactcatttgatccaaagtccg

SEQ ID NO: 158175 - DNA, 25 bp, SARS Virus
gagactcatttcgtccaaagtccgt

SEQ ID NO: 158176 - DNA, 25 bp, SARS Virus
agactcatttcagccaaagtccgtt

SEQ ID NO: 158177 - DNA, 25 bp, SARS Virus
gactcatttcatgcaaagtccgttg

SEQ ID NO: 158178 - DNA, 25 bp, SARS Virus
actcatttcatcgaaagtccgttga

SEQ ID NO: 158179 - DNA, 25 bp, SARS Virus
ctcatttcatccgaagtccgttgac

SEQ ID NO: 158180 - DNA, 25 bp, SARS Virus
tcatttcatccagagtccgttgaca

SEQ ID NO: 158181 - DNA, 25 bp, SARS Virus
catttcatccaaggtccgttgacaa

SEQ ID NO: 158182 - DNA, 25 bp, SARS Virus
atttcatccaaagtccgttgacaac

SEQ ID NO: 158183 - DNA, 25 bp, SARS Virus
tttcatccaaaggccgttgacaact

SEQ ID NO: 158184 - DNA, 25 bp, SARS Virus
ttcatccaaagtgcgttgacaactt

SEQ ID NO: 158185 - DNA, 25 bp, SARS Virus
tcatccaaagtcggttgacaactta

SEQ ID NO: 158186 - DNA, 25 bp, SARS Virus
catccaaagtccgttgacaacttat

SEQ ID NO: 158187 - DNA, 25 bp, SARS Virus
atccaaagtccggtgacaacttatt

SEQ ID NO: 158188 - DNA, 25 bp, SARS Virus
tccaaagtccgtggacaacttatta

SEQ ID NO: 158189 - DNA, 25 bp, SARS Virus
ccaaagtccgttgacaacttattac

SEQ ID NO: 158190 - DNA, 25 bp, SARS Virus
caaagtccgttggcaacttattacg

SEQ ID NO: 158191 - DNA, 25 bp, SARS Virus
aaagtccgttgagaacttattacgg

SEQ ID NO: 158192 - DNA, 25 bp, SARS Virus
aagtccgttgacgacttattacggc

SEQ ID NO: 158193 - DNA, 25 bp, SARS Virus
agtccgttgacagcttattacggca

SEQ ID NO: 158194 - DNA, 25 bp, SARS Virus
gtccgttgacaagttattacggcag

SEQ ID NO: 158195 - DNA, 25 bp, SARS Virus
tccgttgacaacgtattacggcaga

SEQ ID NO: 158196 - DNA, 25 bp, SARS Virus
ccgttgacaactgattacggcagat

SEQ ID NO: 158197 - DNA, 25 bp, SARS Virus
cgttgacaacttgttacggcagatg

SEQ ID NO: 158198 - DNA, 25 bp, SARS Virus
gttgacaacttagtacggcagatga

SEQ ID NO: 158199 - DNA, 25 bp, SARS Virus
ttgacaacttatgacggcagatgaa

SEQ ID NO: 158200 - DNA, 25 bp, SARS Virus
tgacaacttattgcggcagatgaaa

SEQ ID NO: 158201 - DNA, 25 bp, SARS Virus
gacaacttattagggcagatgaaag

SEQ ID NO: 158202 - DNA, 25 bp, SARS Virus
acaacttattacggcagatgaaaga

SEQ ID NO: 158203 - DNA, 25 bp, SARS Virus
caacttattacggcagatgaaagaa

SEQ ID NO: 158204 - DNA, 25 bp, SARS Virus
aacttattacgggagatgaaagaat

SEQ ID NO: 158205 - DNA, 25 bp, SARS Virus
acttattacggcggatgaaagaatt

SEQ ID NO: 158206 - DNA, 25 bp, SARS Virus
cttattacggcagatgaaagaattt

SEQ ID NO: 158207 - DNA, 25 bp, SARS Virus
ttattacggcaggtgaaagaatttc

SEQ ID NO: 158208 - DNA, 25 bp, SARS Virus
tattacggcagaggaaagaatttca

SEQ ID NO: 158209 - DNA, 25 bp, SARS Virus
attacggcagatgaaagaatttcat

SEQ ID NO: 158210 - DNA, 25 bp, SARS Virus
ttacggcagatggaagaatttcatc

SEQ ID NO: 158211 - DNA, 25 bp, SARS Virus
tacggcagatgagagaatttcatca

SEQ ID NO: 158212 - DNA, 25 bp, SARS Virus
acggcagatgaaggaatttcatcaa

SEQ ID NO: 158213 - DNA, 25 bp, SARS Virus
cggcagatgaaagaatttcatcaat

SEQ ID NO: 158214 - DNA, 25 bp, SARS Virus
ggcagatgaaaggatttcatcaatt

SEQ ID NO: 158215 - DNA, 25 bp, SARS Virus
gcagatgaaagagtttcatcaattt

SEQ ID NO: 158216 - DNA, 25 bp, SARS Virus
cagatgaaagaagttcatcaatttg

SEQ ID NO: 158217 - DNA, 25 bp, SARS Virus
agatgaaagaatgtcatcaatttga

SEQ ID NO: 158218 - DNA, 25 bp, SARS Virus
gatgaaagaattgcatcaatttgac

SEQ ID NO: 158219 - DNA, 25 bp, SARS Virus
atgaaagaatttgatcaatttgaca

SEQ ID NO: 158220 - DNA, 25 bp, SARS Virus
tgaaagaatttcgtcaatttgacac

SEQ ID NO: 158221 - DNA, 25 bp, SARS Virus
gaaagaatttcagcaatttgacaca

SEQ ID NO: 158222 - DNA, 25 bp, SARS Virus
aaagaatttcatgaatttgacacaa

SEQ ID NO: 158223 - DNA, 25 bp, SARS Virus
aagaatttcatcgatttgacacaaa

SEQ ID NO: 158224 - DNA, 25 bp, SARS Virus
agaatttcatcagtttgacacaaaa

SEQ ID NO: 158225 - DNA, 25 bp, SARS Virus
gaatttcatcaagttgacacaaaaa

SEQ ID NO: 158226 - DNA, 25 bp, SARS Virus
aatttcatcaatgtgacacaaaaat

SEQ ID NO: 158227 - DNA, 25 bp, SARS Virus
atttcatcaattggacacaaaaatg

SEQ ID NO: 158228 - DNA, 25 bp, SARS Virus
tttcatcaatttgacacaaaaatga

SEQ ID NO: 158229 - DNA, 25 bp, SARS Virus
ttcatcaatttggcacaaaaatgac

SEQ ID NO: 158230 - DNA, 25 bp, SARS Virus
tcatcaatttgagacaaaaatgact

SEQ ID NO: 158231 - DNA, 25 bp, SARS Virus
catcaatttgacgcaaaaatgacta

SEQ ID NO: 158232 - DNA, 25 bp, SARS Virus
atcaatttgacagaaaaatgactaa

SEQ ID NO: 158233 - DNA, 25 bp, SARS Virus
tcaatttgacacgaaaatgactaag

SEQ ID NO: 158234 - DNA, 25 bp, SARS Virus
caatttgacacagaaatgactaaga

SEQ ID NO: 158235 - DNA, 25 bp, SARS Virus
aatttgacacaagaatgactaagag

SEQ ID NO: 158236 - DNA, 25 bp, SARS Virus
atttgacacaaagatgactaagagg

SEQ ID NO: 158237 - DNA, 25 bp, SARS Virus
tttgacacaaaagtgactaagaggt

SEQ ID NO: 158238 - DNA, 25 bp, SARS Virus
ttgacacaaaaaggactaagaggtt

SEQ ID NO: 158239 - DNA, 25 bp, SARS Virus
tgacacaaaaatgactaagaggtta

SEQ ID NO: 158240 - DNA, 25 bp, SARS Virus
gacacaaaaatggctaagaggttaa

SEQ ID NO: 158241 - DNA, 25 bp, SARS Virus
acacaaaaatgagtaagaggttaat

SEQ ID NO: 158242 - DNA, 25 bp, SARS Virus
cacaaaaatgacgaagaggttaatt

SEQ ID NO: 158243 - DNA, 25 bp, SARS Virus
acaaaaatgactgagaggttaatta

SEQ ID NO: 158244 - DNA, 25 bp, SARS Virus
caaaaatgactaggaggttaattac

SEQ ID NO: 158245 - DNA, 25 bp, SARS Virus
aaaaatgactaagaggttaattaca

SEQ ID NO: 158246 - DNA, 25 bp, SARS Virus
aaaatgactaaggggttaattacac

SEQ ID NO: 158247 - DNA, 25 bp, SARS Virus
aaatgactaagaggttaattacact

SEQ ID NO: 158248 - DNA, 25 bp, SARS Virus
aatgactaagaggttaattacactg

SEQ ID NO: 158249 - DNA, 25 bp, SARS Virus
atgactaagagggtaattacactga

SEQ ID NO: 158250 - DNA, 25 bp, SARS Virus
tgactaagaggtgaattacactgag

SEQ ID NO: 158251 - DNA, 25 bp, SARS Virus
gactaagaggttgattacactgagg

SEQ ID NO: 158252 - DNA, 25 bp, SARS Virus
actaagaggttagttacactgaggt

SEQ ID NO: 158253 - DNA, 25 bp, SARS Virus
ctaagaggttaagtacactgaggta

SEQ ID NO: 158254 - DNA, 25 bp, SARS Virus
taagaggttaatgacactgaggtaa

SEQ ID NO: 158255 - DNA, 25 bp, SARS Virus
aagaggttaattgcactgaggtaac

SEQ ID NO: 158256 - DNA, 25 bp, SARS Virus
agaggttaattagactgaggtaact

SEQ ID NO: 158257 - DNA, 25 bp, SARS Virus
gaggttaattacgctgaggtaactg

SEQ ID NO: 158258 - DNA, 25 bp, SARS Virus
aggttaattacagtgaggtaactgc

SEQ ID NO: 158259 - DNA, 25 bp, SARS Virus
ggttaattacacggaggtaactgcg

SEQ ID NO: 158260 - DNA, 25 bp, SARS Virus
gttaattacactgaggtaactgcga

SEQ ID NO: 158261 - DNA, 25 bp, SARS Virus
ttaattacactggggtaactgcgat

SEQ ID NO: 158262 - DNA, 25 bp, SARS Virus
taattacactgaggtaactgcgatc

SEQ ID NO: 158263 - DNA, 25 bp, SARS Virus
aattacactgaggtaactgcgatcg

SEQ ID NO: 158264 - DNA, 25 bp, SARS Virus
attacactgagggaactgcgatcga

SEQ ID NO: 158265 - DNA, 25 bp, SARS Virus
ttacactgaggtgactgcgatcgaa

SEQ ID NO: 158266 - DNA, 25 bp, SARS Virus
tacactgaggtagctgcgatcgaac

SEQ ID NO: 158267 - DNA, 25 bp, SARS Virus
acactgaggtaagtgcgatcgaaca

SEQ ID NO: 158268 - DNA, 25 bp, SARS Virus
cactgaggtaacggcgatcgaacac

SEQ ID NO: 158269 - DNA, 25 bp, SARS Virus
actgaggtaactgcgatcgaacacg

SEQ ID NO: 158270 - DNA, 25 bp, SARS Virus
ctgaggtaactgggatcgaacacga

SEQ ID NO: 158271 - DNA, 25 bp, SARS Virus
tgaggtaactgcgatcgaacacgac

SEQ ID NO: 158272 - DNA, 25 bp, SARS Virus
gaggtaactgcggtcgaacacgacc

SEQ ID NO: 158273 - DNA, 25 bp, SARS Virus
aggtaactgcgagcgaacacgacca

SEQ ID NO: 158274 - DNA, 25 bp, SARS Virus
ggtaactgcgatggaacacgaccag

SEQ ID NO: 158275 - DNA, 25 bp, SARS Virus
gtaactgcgatcgaacacgaccagg

SEQ ID NO: 158276 - DNA, 25 bp, SARS Virus
taactgcgatcggacacgaccaggg

SEQ ID NO: 158277 - DNA, 25 bp, SARS Virus
aactgcgatcgagcacgaccaggga

SEQ ID NO: 158278 - DNA, 25 bp, SARS Virus
actgcgatcgaagacgaccagggaa

SEQ ID NO: 158279 - DNA, 25 bp, SARS Virus
ctgcgatcgaacgcgaccagggaaa

SEQ ID NO: 158280 - DNA, 25 bp, SARS Virus
tgcgatcgaacaggaccagggaaac

SEQ ID NO: 158281 - DNA, 25 bp, SARS Virus
gcgatcgaacacgaccagggaaact

SEQ ID NO: 158282 - DNA, 25 bp, SARS Virus
cgatcgaacacggccagggaaactt

SEQ ID NO: 158283 - DNA, 25 bp, SARS Virus
gatcgaacacgagcagggaaacttc

SEQ ID NO: 158284 - DNA, 25 bp, SARS Virus
atcgaacacgacgagggaaacttcc

SEQ ID NO: 158285 - DNA, 25 bp, SARS Virus
tcgaacacgaccggggaaacttcca

SEQ ID NO: 158286 - DNA, 25 bp, SARS Virus
cgaacacgaccagggaaacttccac

SEQ ID NO: 158287 - DNA, 25 bp, SARS Virus
gaacacgaccagggaaacttccaca

SEQ ID NO: 158288 - DNA, 25 bp, SARS Virus
aacacgaccagggaaacttccacaa

SEQ ID NO: 158289 - DNA, 25 bp, SARS Virus
acacgaccaggggaacttccacaat

SEQ ID NO: 158290 - DNA, 25 bp, SARS Virus
cacgaccagggagacttccacaatc

SEQ ID NO: 158291 - DNA, 25 bp, SARS Virus
acgaccagggaagcttccacaatct

SEQ ID NO: 158292 - DNA, 25 bp, SARS Virus
cgaccagggaaagttccacaatctg

SEQ ID NO: 158293 - DNA, 25 bp, SARS Virus
gaccagggaaacgtccacaatctgg

SEQ ID NO: 158294 - DNA, 25 bp, SARS Virus
accagggaaactgccacaatctgga

SEQ ID NO: 158295 - DNA, 25 bp, SARS Virus
ccagggaaacttgcacaatctggaa

SEQ ID NO: 158296 - DNA, 25 bp, SARS Virus
cagggaaacttcgacaatctggaaa

SEQ ID NO: 158297 - DNA, 25 bp, SARS Virus
agggaaacttccgcaatctggaaac

SEQ ID NO: 158298 - DNA, 25 bp, SARS Virus
gggaaacttccagaatctggaaact

SEQ ID NO: 158299 - DNA, 25 bp, SARS Virus
ggaaacttccacgatctggaaactg

SEQ ID NO: 158300 - DNA, 25 bp, SARS Virus
gaaacttccacagtctggaaactga

SEQ ID NO: 158301 - DNA, 25 bp, SARS Virus
aaacttccacaagctggaaactgac

SEQ ID NO: 158302 - DNA, 25 bp, SARS Virus
aacttccacaatgtggaaactgact

SEQ ID NO: 158303 - DNA, 25 bp, SARS Virus
acttccacaatcgggaaactgactt

SEQ ID NO: 158304 - DNA, 25 bp, SARS Virus
cttccacaatctggaaactgacttg

SEQ ID NO: 158305 - DNA, 25 bp, SARS Virus
ttccacaatctggaaactgacttgg

SEQ ID NO: 158306 - DNA, 25 bp, SARS Virus
tccacaatctgggaactgacttgga

SEQ ID NO: 158307 - DNA, 25 bp, SARS Virus
ccacaatctggagactgacttggaa

SEQ ID NO: 158308 - DNA, 25 bp, SARS Virus
cacaatctggaagctgacttggaag

SEQ ID NO: 158309 - DNA, 25 bp, SARS Virus
acaatctggaaagtgacttggaaga

SEQ ID NO: 158310 - DNA, 25 bp, SARS Virus
caatctggaaacggacttggaagac

SEQ ID NO: 158311 - DNA, 25 bp, SARS Virus
aatctggaaactgacttggaagaca

SEQ ID NO: 158312 - DNA, 25 bp, SARS Virus
atctggaaactggcttggaagacaa

SEQ ID NO: 158313 - DNA, 25 bp, SARS Virus
tctggaaactgagttggaagacaat

SEQ ID NO: 158314 - DNA, 25 bp, SARS Virus
ctggaaactgacgtggaagacaata

SEQ ID NO: 158315 - DNA, 25 bp, SARS Virus
tggaaactgactgggaagacaataa

SEQ ID NO: 158316 - DNA, 25 bp, SARS Virus
ggaaactgacttggaagacaataat

SEQ ID NO: 158317 - DNA, 25 bp, SARS Virus
gaaactgacttggaagacaataatt

SEQ ID NO: 158318 - DNA, 25 bp, SARS Virus
aaactgacttgggagacaataattt

SEQ ID NO: 158319 - DNA, 25 bp, SARS Virus
aactgacttggaggacaataatttt

SEQ ID NO: 158320 - DNA, 25 bp, SARS Virus
actgacttggaagacaataattttg

SEQ ID NO: 158321 - DNA, 25 bp, SARS Virus
ctgacttggaaggcaataattttgt

SEQ ID NO: 158322 - DNA, 25 bp, SARS Virus
tgacttggaagagaataattttgtg

SEQ ID NO: 158323 - DNA, 25 bp, SARS Virus
gacttggaagacgataattttgtgg

SEQ ID NO: 158324 - DNA, 25 bp, SARS Virus
acttggaagacagtaattttgtggt

SEQ ID NO: 158325 - DNA, 25 bp, SARS Virus
cttggaagacaagaattttgtggta

SEQ ID NO: 158326 - DNA, 25 bp, SARS Virus
ttggaagacaatgattttgtggtaa

SEQ ID NO: 158327 - DNA, 25 bp, SARS Virus
tggaagacaatagttttgtggtaat

SEQ ID NO: 158328 - DNA, 25 bp, SARS Virus
ggaagacaataagtttgtggtaatg

SEQ ID NO: 158329 - DNA, 25 bp, SARS Virus
gaagacaataatgttgtggtaatgc

SEQ ID NO: 158330 - DNA, 25 bp, SARS Virus
aagacaataattgtgtggtaatgcc

SEQ ID NO: 158331 - DNA, 25 bp, SARS Virus
agacaataatttggtggtaatgccc

SEQ ID NO: 158332 - DNA, 25 bp, SARS Virus
gacaataattttgtggtaatgcccg

SEQ ID NO: 158333 - DNA, 25 bp, SARS Virus
acaataattttggggtaatgcccgc

SEQ ID NO: 158334 - DNA, 25 bp, SARS Virus
caataattttgtggtaatgcccgca

SEQ ID NO: 158335 - DNA, 25 bp, SARS Virus
aataattttgtggtaatgcccgcaa

SEQ ID NO: 158336 - DNA, 25 bp, SARS Virus
ataattttgtgggaatgcccgcaaa

SEQ ID NO: 158337 - DNA, 25 bp, SARS Virus
taattttgtggtgatgcccgcaaag

SEQ ID NO: 158338 - DNA, 25 bp, SARS Virus
aattttgtggtagtgcccgcaaaga

SEQ ID NO: 158339 - DNA, 25 bp, SARS Virus
attttgtggtaaggcccgcaaagat

SEQ ID NO: 158340 - DNA, 25 bp, SARS Virus
ttttgtggtaatgcccgcaaagatt

SEQ ID NO: 158341 - DNA, 25 bp, SARS Virus
tttgtggtaatggccgcaaagattt

SEQ ID NO: 158342 - DNA, 25 bp, SARS Virus
ttgtggtaatgcgcgcaaagatttt

SEQ ID NO: 158343 - DNA, 25 bp, SARS Virus
tgtggtaatgccggcaaagattttt

SEQ ID NO: 158344 - DNA, 25 bp, SARS Virus
gtggtaatgcccgcaaagatttttc

SEQ ID NO: 158345 - DNA, 25 bp, SARS Virus
tggtaatgcccggaaagatttttcc

SEQ ID NO: 158346 - DNA, 25 bp, SARS Virus
ggtaatgcccgcgaagatttttcca

SEQ ID NO: 158347 - DNA, 25 bp, SARS Virus
gtaatgcccgcagagatttttccag

SEQ ID NO: 158348 - DNA, 25 bp, SARS Virus
taatgcccgcaaggatttttccaga

SEQ ID NO: 158349 - DNA, 25 bp, SARS Virus
aatgcccgcaaagatttttccagat

SEQ ID NO: 158350 - DNA, 25 bp, SARS Virus
atgcccgcaaaggtttttccagatg

SEQ ID NO: 158351 - DNA, 25 bp, SARS Virus
tgcccgcaaagagttttccagatgg

SEQ ID NO: 158352 - DNA, 25 bp, SARS Virus
gcccgcaaagatgtttccagatgga

SEQ ID NO: 158353 - DNA, 25 bp, SARS Virus
cccgcaaagattgttccagatggac

SEQ ID NO: 158354 - DNA, 25 bp, SARS Virus
ccgcaaagatttgtccagatggaca

SEQ ID NO: 158355 - DNA, 25 bp, SARS Virus
cgcaaagattttgccagatggacag

SEQ ID NO: 158356 - DNA, 25 bp, SARS Virus
gcaaagatttttgcagatggacagg

SEQ ID NO: 158357 - DNA, 25 bp, SARS Virus
caaagatttttcgagatggacagga

SEQ ID NO: 158358 - DNA, 25 bp, SARS Virus
aaagatttttccggatggacaggaa

SEQ ID NO: 158359 - DNA, 25 bp, SARS Virus
aagatttttccagatggacaggaag

SEQ ID NO: 158360 - DNA, 25 bp, SARS Virus
agatttttccaggtggacaggaagg

SEQ ID NO: 158361 - DNA, 25 bp, SARS Virus
gatttttccagagggacaggaaggt

SEQ ID NO: 158362 - DNA, 25 bp, SARS Virus
atttttccagatggacaggaaggtg

SEQ ID NO: 158363 - DNA, 25 bp, SARS Virus
tttttccagatggacaggaaggtga

SEQ ID NO: 158364 - DNA, 25 bp, SARS Virus
ttttccagatgggcaggaaggtgag

SEQ ID NO: 158365 - DNA, 25 bp, SARS Virus
tttccagatggagaggaaggtgaga

SEQ ID NO: 158366 - DNA, 25 bp, SARS Virus
ttccagatggacgggaaggtgagat

SEQ ID NO: 158367 - DNA, 25 bp, SARS Virus
tccagatggacaggaaggtgagatg

SEQ ID NO: 158368 - DNA, 25 bp, SARS Virus
ccagatggacaggaaggtgagatgg

SEQ ID NO: 158369 - DNA, 25 bp, SARS Virus
cagatggacagggaggtgagatggt

SEQ ID NO: 158370 - DNA, 25 bp, SARS Virus
agatggacaggagggtgagatggta

SEQ ID NO: 158371 - DNA, 25 bp, SARS Virus
gatggacaggaaggtgagatggtag

SEQ ID NO: 158372 - DNA, 25 bp, SARS Virus
atggacaggaaggtgagatggtagt

SEQ ID NO: 158373 - DNA, 25 bp, SARS Virus
tggacaggaaggggagatggtagtt

SEQ ID NO: 158374 - DNA, 25 bp, SARS Virus
ggacaggaaggtgagatggtagttt

SEQ ID NO: 158375 - DNA, 25 bp, SARS Virus
gacaggaaggtgggatggtagtttg

SEQ ID NO: 158376 - DNA, 25 bp, SARS Virus
acaggaaggtgagatggtagtttgt

SEQ ID NO: 158377 - DNA, 25 bp, SARS Virus
caggaaggtgaggtggtagtttgtt

SEQ ID NO: 158378 - DNA, 25 bp, SARS Virus
aggaaggtgagagggtagtttgttc

SEQ ID NO: 158379 - DNA, 25 bp, SARS Virus
ggaaggtgagatggtagtttgttct

SEQ ID NO: 158380 - DNA, 25 bp, SARS Virus
gaaggtgagatggtagtttgttctg

SEQ ID NO: 158381 - DNA, 25 bp, SARS Virus
aaggtgagatgggagtttgttctgt

SEQ ID NO: 158382 - DNA, 25 bp, SARS Virus
aggtgagatggtggtttgttctgtc

SEQ ID NO: 158383 - DNA, 25 bp, SARS Virus
ggtgagatggtagtttgttctgtca

SEQ ID NO: 158384 - DNA, 25 bp, SARS Virus
gtgagatggtaggttgttctgtcat

SEQ ID NO: 158385 - DNA, 25 bp, SARS Virus
tgagatggtagtgtgttctgtcatt

SEQ ID NO: 158386 - DNA, 25 bp, SARS Virus
gagatggtagttggttctgtcattc

SEQ ID NO: 158387 - DNA, 25 bp, SARS Virus
agatggtagtttgttctgtcattca

SEQ ID NO: 158388 - DNA, 25 bp, SARS Virus
gatggtagtttggtctgtcattcac

SEQ ID NO: 158389 - DNA, 25 bp, SARS Virus
atggtagtttgtgctgtcattcact

SEQ ID NO: 158390 - DNA, 25 bp, SARS Virus
tggtagtttgttgtgtcattcactt

SEQ ID NO: 158391 - DNA, 25 bp, SARS Virus
ggtagtttgttcggtcattcacttc

SEQ ID NO: 158392 - DNA, 25 bp, SARS Virus
gtagtttgttctgtcattcacttct

SEQ ID NO: 158393 - DNA, 25 bp, SARS Virus
tagtttgttctggcattcacttctt

SEQ ID NO: 158394 - DNA, 25 bp, SARS Virus
agtttgttctgtgattcacttcttg

SEQ ID NO: 158395 - DNA, 25 bp, SARS Virus
gtttgttctgtcgttcacttcttgt

SEQ ID NO: 158396 - DNA, 25 bp, SARS Virus
tttgttctgtcagtcacttcttgtt

SEQ ID NO: 158397 - DNA, 25 bp, SARS Virus
ttgttctgtcatgcacttcttgttc

SEQ ID NO: 158398 - DNA, 25 bp, SARS Virus
tgttctgtcattgacttcttgttcg

SEQ ID NO: 158399 - DNA, 25 bp, SARS Virus
gttctgtcattcgcttcttgttcgt

SEQ ID NO: 158400 - DNA, 25 bp, SARS Virus
ttctgtcattcagttcttgttcgtg

SEQ ID NO: 158401 - DNA, 25 bp, SARS Virus
tctgtcattcacgtcttgttcgtga

SEQ ID NO: 158402 - DNA, 25 bp, SARS Virus
ctgtcattcactgcttgttcgtgag

SEQ ID NO: 158403 - DNA, 25 bp, SARS Virus
tgtcattcacttgttgttcgtgaga

SEQ ID NO: 158404 - DNA, 25 bp, SARS Virus
gtcattcacttcgtgttcgtgagag

SEQ ID NO: 158405 - DNA, 25 bp, SARS Virus
tcattcacttctggttcgtgagagt

SEQ ID NO: 158406 - DNA, 25 bp, SARS Virus
cattcacttcttgttcgtgagagtc

SEQ ID NO: 158407 - DNA, 25 bp, SARS Virus
attcacttcttggtcgtgagagtca

SEQ ID NO: 158408 - DNA, 25 bp, SARS Virus
ttcacttcttgtgcgtgagagtcat

SEQ ID NO: 158409 - DNA, 25 bp, SARS Virus
tcacttcttgttggtgagagtcatc

SEQ ID NO: 158410 - DNA, 25 bp, SARS Virus
cacttcttgttcgtgagagtcatcc

SEQ ID NO: 158411 - DNA, 25 bp, SARS Virus
acttcttgttcgggagagtcatcca

SEQ ID NO: 158412 - DNA, 25 bp, SARS Virus
cttcttgttcgtgagagtcatccaa

SEQ ID NO: 158413 - DNA, 25 bp, SARS Virus
ttcttgttcgtgggagtcatccaaa

SEQ ID NO: 158414 - DNA, 25 bp, SARS Virus
tcttgttcgtgagagtcatccaaag

SEQ ID NO: 158415 - DNA, 25 bp, SARS Virus
cttgttcgtgagggtcatccaaaga

SEQ ID NO: 158416 - DNA, 25 bp, SARS Virus
ttgttcgtgagagtcatccaaagaa

SEQ ID NO: 158417 - DNA, 25 bp, SARS Virus
tgttcgtgagaggcatccaaagaac

SEQ ID NO: 158418 - DNA, 25 bp, SARS Virus
gttcgtgagagtgatccaaagaacc

SEQ ID NO: 158419 - DNA, 25 bp, SARS Virus
ttcgtgagagtcgtccaaagaaccg

SEQ ID NO: 158420 - DNA, 25 bp, SARS Virus
tcgtgagagtcagccaaagaaccgt

SEQ ID NO: 158421 - DNA, 25 bp, SARS Virus
cgtgagagtcatgcaaagaaccgtt

SEQ ID NO: 158422 - DNA, 25 bp, SARS Virus
gtgagagtcatcgaaagaaccgtta

SEQ ID NO: 158423 - DNA, 25 bp, SARS Virus
tgagagtcatccgaagaaccgttac

SEQ ID NO: 158424 - DNA, 25 bp, SARS Virus
gagagtcatccagagaaccgttaca

SEQ ID NO: 158425 - DNA, 25 bp, SARS Virus
agagtcatccaaggaaccgttacag

SEQ ID NO: 158426 - DNA, 25 bp, SARS Virus
gagtcatccaaagaaccgttacagt

SEQ ID NO: 158427 - DNA, 25 bp, SARS Virus
agtcatccaaaggaccgttacagtc

SEQ ID NO: 158428 - DNA, 25 bp, SARS Virus
gtcatccaaagagccgttacagtca

SEQ ID NO: 158429 - DNA, 25 bp, SARS Virus
tcatccaaagaagcgttacagtcag

SEQ ID NO: 158430 - DNA, 25 bp, SARS Virus
catccaaagaacggttacagtcagt

SEQ ID NO: 158431 - DNA, 25 bp, SARS Virus
atccaaagaaccgttacagtcagta

SEQ ID NO: 158432 - DNA, 25 bp, SARS Virus
tccaaagaaccggtacagtcagtaa

SEQ ID NO: 158433 - DNA, 25 bp, SARS Virus
ccaaagaaccgtgacagtcagtaac

SEQ ID NO: 158434 - DNA, 25 bp, SARS Virus
caaagaaccgttgcagtcagtaaca

SEQ ID NO: 158435 - DNA, 25 bp, SARS Virus
aaagaaccgttagagtcagtaacac

SEQ ID NO: 158436 - DNA, 25 bp, SARS Virus
aagaaccgttacggtcagtaacacg

SEQ ID NO: 158437 - DNA, 25 bp, SARS Virus
agaaccgttacagtcagtaacacgt

SEQ ID NO: 158438 - DNA, 25 bp, SARS Virus
gaaccgttacaggcagtaacacgtc

SEQ ID NO: 158439 - DNA, 25 bp, SARS Virus
aaccgttacagtgagtaacacgtct

SEQ ID NO: 158440 - DNA, 25 bp, SARS Virus
accgttacagtcggtaacacgtctg

SEQ ID NO: 158441 - DNA, 25 bp, SARS Virus
ccgttacagtcagtaacacgtctgt

SEQ ID NO: 158442 - DNA, 25 bp, SARS Virus
cgttacagtcaggaacacgtctgtg

SEQ ID NO: 158443 - DNA, 25 bp, SARS Virus
gttacagtcagtgacacgtctgtgg

SEQ ID NO: 158444 - DNA, 25 bp, SARS Virus
ttacagtcagtagcacgtctgtgga

SEQ ID NO: 158445 - DNA, 25 bp, SARS Virus
tacagtcagtaagacgtctgtggat

SEQ ID NO: 158446 - DNA, 25 bp, SARS Virus
acagtcagtaacgcgtctgtggata

SEQ ID NO: 158447 - DNA, 25 bp, SARS Virus
cagtcagtaacaggtctgtggataa

SEQ ID NO: 158448 - DNA, 25 bp, SARS Virus
agtcagtaacacgtctgtggataac

SEQ ID NO: 158449 - DNA, 25 bp, SARS Virus
gtcagtaacacggctgtggataaca

SEQ ID NO: 158450 - DNA, 25 bp, SARS Virus
tcagtaacacgtgtgtggataacat

SEQ ID NO: 158451 - DNA, 25 bp, SARS Virus
cagtaacacgtcggtggataacatc

SEQ ID NO: 158452 - DNA, 25 bp, SARS Virus
agtaacacgtctgtggataacatct

SEQ ID NO: 158453 - DNA, 25 bp, SARS Virus
gtaacacgtctggggataacatcta

SEQ ID NO: 158454 - DNA, 25 bp, SARS Virus
taacacgtctgtggataacatctat

SEQ ID NO: 158455 - DNA, 25 bp, SARS Virus
aacacgtctgtggataacatctatg

SEQ ID NO: 158456 - DNA, 25 bp, SARS Virus
acacgtctgtgggtaacatctatgt

SEQ ID NO: 158457 - DNA, 25 bp, SARS Virus
cacgtctgtggagaacatctatgta

SEQ ID NO: 158458 - DNA, 25 bp, SARS Virus
acgtctgtggatgacatctatgtac

SEQ ID NO: 158459 - DNA, 25 bp, SARS Virus
cgtctgtggatagcatctatgtaca

SEQ ID NO: 158460 - DNA, 25 bp, SARS Virus
gtctgtggataagatctatgtacac

SEQ ID NO: 158461 - DNA, 25 bp, SARS Virus
tctgtggataacgtctatgtacacg

SEQ ID NO: 158462 - DNA, 25 bp, SARS Virus
ctgtggataacagctatgtacacga

SEQ ID NO: 158463 - DNA, 25 bp, SARS Virus
tgtggataacatgtatgtacacgac

SEQ ID NO: 158464 - DNA, 25 bp, SARS Virus
gtggataacatcgatgtacacgacc

SEQ ID NO: 158465 - DNA, 25 bp, SARS Virus
tggataacatctgtgtacacgaccc

SEQ ID NO: 158466 - DNA, 25 bp, SARS Virus
ggataacatctaggtacacgacccc

SEQ ID NO: 158467 - DNA, 25 bp, SARS Virus
gataacatctatgtacacgaccccg

SEQ ID NO: 158468 - DNA, 25 bp, SARS Virus
ataacatctatggacacgaccccga

SEQ ID NO: 158469 - DNA, 25 bp, SARS Virus
taacatctatgtgcacgaccccgaa

SEQ ID NO: 158470 - DNA, 25 bp, SARS Virus
aacatctatgtagacgaccccgaag

SEQ ID NO: 158471 - DNA, 25 bp, SARS Virus
acatctatgtacgcgaccccgaaga

SEQ ID NO: 158472 - DNA, 25 bp, SARS Virus
catctatgtacaggaccccgaagag

SEQ ID NO: 158473 - DNA, 25 bp, SARS Virus
atctatgtacacgaccccgaagaga

SEQ ID NO: 158474 - DNA, 25 bp, SARS Virus
tctatgtacacggccccgaagagaa

SEQ ID NO: 158475 - DNA, 25 bp, SARS Virus
ctatgtacacgagcccgaagagaaa

SEQ ID NO: 158476 - DNA, 25 bp, SARS Virus
tatgtacacgacgccgaagagaaaa

SEQ ID NO: 158477 - DNA, 25 bp, SARS Virus
atgtacacgaccgcgaagagaaaac

SEQ ID NO: 158478 - DNA, 25 bp, SARS Virus
tgtacacgacccggaagagaaaaca

SEQ ID NO: 158479 - DNA, 25 bp, SARS Virus
gtacacgaccccgaagagaaaacat

SEQ ID NO: 158480 - DNA, 25 bp, SARS Virus
tacacgaccccggagagaaaacatc

SEQ ID NO: 158481 - DNA, 25 bp, SARS Virus
acacgaccccgaggagaaaacatca

SEQ ID NO: 158482 - DNA, 25 bp, SARS Virus
cacgaccccgaagagaaaacatcag

SEQ ID NO: 158483 - DNA, 25 bp, SARS Virus
acgaccccgaagggaaaacatcagg

SEQ ID NO: 158484 - DNA, 25 bp, SARS Virus
cgaccccgaagagaaaacatcaggg

SEQ ID NO: 158485 - DNA, 25 bp, SARS Virus
gaccccgaagaggaaacatcagggt

SEQ ID NO: 158486 - DNA, 25 bp, SARS Virus
accccgaagagagaacatcagggtc

SEQ ID NO: 158487 - DNA, 25 bp, SARS Virus
ccccgaagagaagacatcagggtct

SEQ ID NO: 158488 - DNA, 25 bp, SARS Virus
cccgaagagaaagcatcagggtcta

SEQ ID NO: 158489 - DNA, 25 bp, SARS Virus
ccgaagagaaaagatcagggtctaa

SEQ ID NO: 158490 - DNA, 25 bp, SARS Virus
cgaagagaaaacgtcagggtctaat

SEQ ID NO: 158491 - DNA, 25 bp, SARS Virus
gaagagaaaacagcagggtctaatg

SEQ ID NO: 158492 - DNA, 25 bp, SARS Virus
aagagaaaacatgagggtctaatgt

SEQ ID NO: 158493 - DNA, 25 bp, SARS Virus
agagaaaacatcggggtctaatgtc

SEQ ID NO: 158494 - DNA, 25 bp, SARS Virus
gagaaaacatcagggtctaatgtca

SEQ ID NO: 158495 - DNA, 25 bp, SARS Virus
agaaaacatcagggtctaatgtcat

SEQ ID NO: 158496 - DNA, 25 bp, SARS Virus
gaaaacatcagggtctaatgtcata

SEQ ID NO: 158497 - DNA, 25 bp, SARS Virus
aaaacatcaggggctaatgtcataa

SEQ ID NO: 158498 - DNA, 25 bp, SARS Virus
aaacatcagggtgtaatgtcataat

SEQ ID NO: 158499 - DNA, 25 bp, SARS Virus
aacatcagggtcgaatgtcataatc

SEQ ID NO: 158500 - DNA, 25 bp, SARS Virus
acatcagggtctgatgtcataatcg

SEQ ID NO: 158501 - DNA, 25 bp, SARS Virus
catcagggtctagtgtcataatcgt

SEQ ID NO: 158502 - DNA, 25 bp, SARS Virus
atcagggtctaaggtcataatcgtc

SEQ ID NO: 158503 - DNA, 25 bp, SARS Virus
tcagggtctaatgtcataatcgtcg

SEQ ID NO: 158504 - DNA, 25 bp, SARS Virus
cagggtctaatggcataatcgtcgc

SEQ ID NO: 158505 - DNA, 25 bp, SARS Virus
agggtctaatgtgataatcgtcgct

SEQ ID NO: 158506 - DNA, 25 bp, SARS Virus
gggtctaatgtcgtaatcgtcgcta

SEQ ID NO: 158507 - DNA, 25 bp, SARS Virus
ggtctaatgtcagaatcgtcgctat

SEQ ID NO: 158508 - DNA, 25 bp, SARS Virus
gtctaatgtcatgatcgtcgctata

SEQ ID NO: 158509 - DNA, 25 bp, SARS Virus
tctaatgtcatagtcgtcgctatag

SEQ ID NO: 158510 - DNA, 25 bp, SARS Virus
ctaatgtcataagcgtcgctatagt

SEQ ID NO: 158511 - DNA, 25 bp, SARS Virus
taatgtcataatggtcgctatagtt

SEQ ID NO: 158512 - DNA, 25 bp, SARS Virus
aatgtcataatcgtcgctatagttg

SEQ ID NO: 158513 - DNA, 25 bp, SARS Virus
atgtcataatcggcgctatagttgt

SEQ ID NO: 158514 - DNA, 25 bp, SARS Virus
tgtcataatcgtggctatagttgtg

SEQ ID NO: 158515 - DNA, 25 bp, SARS Virus
gtcataatcgtcgctatagttgtgg

SEQ ID NO: 158516 - DNA, 25 bp, SARS Virus
tcataatcgtcggtatagttgtggg

SEQ ID NO: 158517 - DNA, 25 bp, SARS Virus
cataatcgtcgcgatagttgtgggt

SEQ ID NO: 158518 - DNA, 25 bp, SARS Virus
ataatcgtcgctgtagttgtgggtt

SEQ ID NO: 158519 - DNA, 25 bp, SARS Virus
taatcgtcgctagagttgtgggttt

SEQ ID NO: 158520 - DNA, 25 bp, SARS Virus
aatcgtcgctatggttgtgggttta

SEQ ID NO: 158521 - DNA, 25 bp, SARS Virus
atcgtcgctatagttgtgggtttaa

SEQ ID NO: 158522 - DNA, 25 bp, SARS Virus
tcgtcgctataggtgtgggtttaat

SEQ ID NO: 158523 - DNA, 25 bp, SARS Virus
cgtcgctatagtggtgggtttaata

SEQ ID NO: 158524 - DNA, 25 bp, SARS Virus
gtcgctatagttgtgggtttaataa

SEQ ID NO: 158525 - DNA, 25 bp, SARS Virus
tcgctatagttgggggtttaataac

SEQ ID NO: 158526 - DNA, 25 bp, SARS Virus
cgctatagttgtgggtttaataact

SEQ ID NO: 158527 - DNA, 25 bp, SARS Virus
gctatagttgtgggtttaataactc

SEQ ID NO: 158528 - DNA, 25 bp, SARS Virus
ctatagttgtgggtttaataactca

SEQ ID NO: 158529 - DNA, 25 bp, SARS Virus
tatagttgtggggttaataactcat

SEQ ID NO: 158530 - DNA, 25 bp, SARS Virus
atagttgtgggtgtaataactcata

SEQ ID NO: 158531 - DNA, 25 bp, SARS Virus
tagttgtgggttgaataactcatag

SEQ ID NO: 158532 - DNA, 25 bp, SARS Virus
agttgtgggtttgataactcataga

SEQ ID NO: 158533 - DNA, 25 bp, SARS Virus
gttgtgggtttagtaactcatagaa

SEQ ID NO: 158534 - DNA, 25 bp, SARS Virus
ttgtgggtttaagaactcatagaat

SEQ ID NO: 158535 - DNA, 25 bp, SARS Virus
tgtgggtttaatgactcatagaatt

SEQ ID NO: 158536 - DNA, 25 bp, SARS Virus
gtgggtttaatagctcatagaatta

SEQ ID NO: 158537 - DNA, 25 bp, SARS Virus
tgggtttaataagtcatagaattag

SEQ ID NO: 158538 - DNA, 25 bp, SARS Virus
gggtttaataacgcatagaattaga

SEQ ID NO: 158539 - DNA, 25 bp, SARS Virus
ggtttaataactgatagaattagag

SEQ ID NO: 158540 - DNA, 25 bp, SARS Virus
gtttaataactcgtagaattagaga

SEQ ID NO: 158541 - DNA, 25 bp, SARS Virus
tttaataactcagagaattagagac

SEQ ID NO: 158542 - DNA, 25 bp, SARS Virus
ttaataactcatggaattagagacc

SEQ ID NO: 158543 - DNA, 25 bp, SARS Virus
taataactcatagaattagagaccg

SEQ ID NO: 158544 - DNA, 25 bp, SARS Virus
aataactcataggattagagaccgt

SEQ ID NO: 158545 - DNA, 25 bp, SARS Virus
ataactcatagagttagagaccgtg

SEQ ID NO: 158546 - DNA, 25 bp, SARS Virus
taactcatagaagtagagaccgtga

SEQ ID NO: 158547 - DNA, 25 bp, SARS Virus
aactcatagaatgagagaccgtgac

SEQ ID NO: 158548 - DNA, 25 bp, SARS Virus
actcatagaattggagaccgtgacc

SEQ ID NO: 158549 - DNA, 25 bp, SARS Virus
ctcatagaattagagaccgtgacca

SEQ ID NO: 158550 - DNA, 25 bp, SARS Virus
tcatagaattagggaccgtgaccaa

SEQ ID NO: 158551 - DNA, 25 bp, SARS Virus
catagaattagagaccgtgaccaaa

SEQ ID NO: 158552 - DNA, 25 bp, SARS Virus
atagaattagaggccgtgaccaaat

SEQ ID NO: 158553 - DNA, 25 bp, SARS Virus
tagaattagagagcgtgaccaaatt

SEQ ID NO: 158554 - DNA, 25 bp, SARS Virus
agaattagagacggtgaccaaatta

SEQ ID NO: 158555 - DNA, 25 bp, SARS Virus
gaattagagaccgtgaccaaattac

SEQ ID NO: 158556 - DNA, 25 bp, SARS Virus
aattagagaccgggaccaaattaca

SEQ ID NO: 158557 - DNA, 25 bp, SARS Virus
attagagaccgtgaccaaattacaa

SEQ ID NO: 158558 - DNA, 25 bp, SARS Virus
ttagagaccgtggccaaattacaat

SEQ ID NO: 158559 - DNA, 25 bp, SARS Virus
tagagaccgtgagcaaattacaatg

SEQ ID NO: 158560 - DNA, 25 bp, SARS Virus
agagaccgtgacgaaattacaatgc

SEQ ID NO: 158561 - DNA, 25 bp, SARS Virus
gagaccgtgaccgaattacaatgcg

SEQ ID NO: 158562 - DNA, 25 bp, SARS Virus
agaccgtgaccagattacaatgcga

SEQ ID NO: 158563 - DNA, 25 bp, SARS Virus
gaccgtgaccaagttacaatgcgaa

SEQ ID NO: 158564 - DNA, 25 bp, SARS Virus
accgtgaccaaagtacaatgcgaat

SEQ ID NO: 158565 - DNA, 25 bp, SARS Virus
ccgtgaccaaatgacaatgcgaatc

SEQ ID NO: 158566 - DNA, 25 bp, SARS Virus
cgtgaccaaattgcaatgcgaatcg

SEQ ID NO: 158567 - DNA, 25 bp, SARS Virus
gtgaccaaattagaatgcgaatcgg

SEQ ID NO: 158568 - DNA, 25 bp, SARS Virus
tgaccaaattacgatgcgaatcggg

SEQ ID NO: 158569 - DNA, 25 bp, SARS Virus
gaccaaattacagtgcgaatcgggt

SEQ ID NO: 158570 - DNA, 25 bp, SARS Virus
accaaattacaaggcgaatcgggtt

SEQ ID NO: 158571 - DNA, 25 bp, SARS Virus
ccaaattacaatgcgaatcgggttt

SEQ ID NO: 158572 - DNA, 25 bp, SARS Virus
caaattacaatgggaatcgggtttc

SEQ ID NO: 158573 - DNA, 25 bp, SARS Virus
aaattacaatgcgaatcgggtttcg

SEQ ID NO: 158574 - DNA, 25 bp, SARS Virus
aattacaatgcggatcgggtttcga

SEQ ID NO: 158575 - DNA, 25 bp, SARS Virus
attacaatgcgagtcgggtttcgag

SEQ ID NO: 158576 - DNA, 25 bp, SARS Virus
ttacaatgcgaagcgggtttcgagt

SEQ ID NO: 158577 - DNA, 25 bp, SARS Virus
tacaatgcgaatggggtttcgagtt

SEQ ID NO: 158578 - DNA, 25 bp, SARS Virus
acaatgcgaatcgggtttcgagttt

SEQ ID NO: 158579 - DNA, 25 bp, SARS Virus
caatgcgaatcgggtttcgagttta

SEQ ID NO: 158580 - DNA, 25 bp, SARS Virus
aatgcgaatcgggtttcgagtttac

SEQ ID NO: 158581 - DNA, 25 bp, SARS Virus
atgcgaatcggggttcgagtttacg

SEQ ID NO: 158582 - DNA, 25 bp, SARS Virus
tgcgaatcgggtgtcgagtttacgt

SEQ ID NO: 158583 - DNA, 25 bp, SARS Virus
gcgaatcgggttgcgagtttacgtt

SEQ ID NO: 158584 - DNA, 25 bp, SARS Virus
cgaatcgggtttggagtttacgttg

SEQ ID NO: 158585 - DNA, 25 bp, SARS Virus
gaatcgggtttcgagtttacgttgt

SEQ ID NO: 158586 - DNA, 25 bp, SARS Virus
aatcgggtttcgggtttacgttgta

SEQ ID NO: 158587 - DNA, 25 bp, SARS Virus
atcgggtttcgagtttacgttgtaa

SEQ ID NO: 158588 - DNA, 25 bp, SARS Virus
tcgggtttcgaggttacgttgtaat

SEQ ID NO: 158589 - DNA, 25 bp, SARS Virus
cgggtttcgagtgtacgttgtaatt

SEQ ID NO: 158590 - DNA, 25 bp, SARS Virus
gggtttcgagttgacgttgtaattg

SEQ ID NO: 158591 - DNA, 25 bp, SARS Virus
ggtttcgagtttgcgttgtaattgt

SEQ ID NO: 158592 - DNA, 25 bp, SARS Virus
gtttcgagtttaggttgtaattgtc

SEQ ID NO: 158593 - DNA, 25 bp, SARS Virus
tttcgagtttacgttgtaattgtcc

SEQ ID NO: 158594 - DNA, 25 bp, SARS Virus
ttcgagtttacggtgtaattgtcct

SEQ ID NO: 158595 - DNA, 25 bp, SARS Virus
tcgagtttacgtggtaattgtcctt

SEQ ID NO: 158596 - DNA, 25 bp, SARS Virus
cgagtttacgttgtaattgtccttc

SEQ ID NO: 158597 - DNA, 25 bp, SARS Virus
gagtttacgttggaattgtccttca

SEQ ID NO: 158598 - DNA, 25 bp, SARS Virus
agtttacgttgtgattgtccttcac

SEQ ID NO: 158599 - DNA, 25 bp, SARS Virus
gtttacgttgtagttgtccttcaca

SEQ ID NO: 158600 - DNA, 25 bp, SARS Virus
tttacgttgtaagtgtccttcacaa

SEQ ID NO: 158601 - DNA, 25 bp, SARS Virus
ttacgttgtaatggtccttcacaac

SEQ ID NO: 158602 - DNA, 25 bp, SARS Virus
tacgttgtaattgtccttcacaaca

SEQ ID NO: 158603 - DNA, 25 bp, SARS Virus
acgttgtaattggccttcacaacag

SEQ ID NO: 158604 - DNA, 25 bp, SARS Virus
cgttgtaattgtgcttcacaacaga

SEQ ID NO: 158605 - DNA, 25 bp, SARS Virus
gttgtaattgtcgttcacaacagaa

SEQ ID NO: 158606 - DNA, 25 bp, SARS Virus
ttgtaattgtccgtcacaacagaat

SEQ ID NO: 158607 - DNA, 25 bp, SARS Virus
tgtaattgtcctgcacaacagaata

SEQ ID NO: 158608 - DNA, 25 bp, SARS Virus
gtaattgtccttgacaacagaataa

SEQ ID NO: 158609 - DNA, 25 bp, SARS Virus
taattgtccttcgcaacagaataaa

SEQ ID NO: 158610 - DNA, 25 bp, SARS Virus
aattgtccttcagaacagaataaaa

SEQ ID NO: 158611 - DNA, 25 bp, SARS Virus
attgtccttcacgacagaataaaag

SEQ ID NO: 158612 - DNA, 25 bp, SARS Virus
ttgtccttcacagcagaataaaagt

SEQ ID NO: 158613 - DNA, 25 bp, SARS Virus
tgtccttcacaagagaataaaagtt

SEQ ID NO: 158614 - DNA, 25 bp, SARS Virus
gtccttcacaacggaataaaagttt

SEQ ID NO: 158615 - DNA, 25 bp, SARS Virus
tccttcacaacagaataaaagtttc

SEQ ID NO: 158616 - DNA, 25 bp, SARS Virus
ccttcacaacaggataaaagtttct

SEQ ID NO: 158617 - DNA, 25 bp, SARS Virus
cttcacaacagagtaaaagtttcta

SEQ ID NO: 158618 - DNA, 25 bp, SARS Virus
ttcacaacagaagaaaagtttctag

SEQ ID NO: 158619 - DNA, 25 bp, SARS Virus
tcacaacagaatgaaagtttctaga

SEQ ID NO: 158620 - DNA, 25 bp, SARS Virus
cacaacagaatagaagtttctagag

SEQ ID NO: 158621 - DNA, 25 bp, SARS Virus
acaacagaataagagtttctagagg

SEQ ID NO: 158622 - DNA, 25 bp, SARS Virus
caacagaataaaggtttctagaggt

SEQ ID NO: 158623 - DNA, 25 bp, SARS Virus
aacagaataaaagtttctagaggtg

SEQ ID NO: 158624 - DNA, 25 bp, SARS Virus
acagaataaaaggttctagaggtgt

SEQ ID NO: 158625 - DNA, 25 bp, SARS Virus
cagaataaaagtgtctagaggtgta

SEQ ID NO: 158626 - DNA, 25 bp, SARS Virus
agaataaaagttgctagaggtgtag

SEQ ID NO: 158627 - DNA, 25 bp, SARS Virus
gaataaaagtttgtagaggtgtagt

SEQ ID NO: 158628 - DNA, 25 bp, SARS Virus
aataaaagtttcgagaggtgtagtt

SEQ ID NO: 158629 - DNA, 25 bp, SARS Virus
ataaaagtttctggaggtgtagtta

SEQ ID NO: 158630 - DNA, 25 bp, SARS Virus
taaaagtttctagaggtgtagttat

SEQ ID NO: 158631 - DNA, 25 bp, SARS Virus
aaaagtttctaggggtgtagttatg

SEQ ID NO: 158632 - DNA, 25 bp, SARS Virus
aaagtttctagaggtgtagttatgg

SEQ ID NO: 158633 - DNA, 25 bp, SARS Virus
ctagacccgaattttaggagattca

SEQ ID NO: 158634 - DNA, 25 bp, SARS Virus
tagacccgaattttaggagattcag

SEQ ID NO: 158635 - DNA, 25 bp, SARS Virus
agacccgaattttaggagattcaga

SEQ ID NO: 158636 - DNA, 25 bp, SARS Virus
gacccgaatttttggagattcagag

SEQ ID NO: 158637 - DNA, 25 bp, SARS Virus
acccgaattttatgagattcagaga

SEQ ID NO: 158638 - DNA, 25 bp, SARS Virus
cccgaattttagtagattcagagac

SEQ ID NO: 158639 - DNA, 25 bp, SARS Virus
ccgaattttaggtgattcagagacg

SEQ ID NO: 158640 - DNA, 25 bp, SARS Virus
cgaattttaggatattcagagacga

SEQ ID NO: 158641 - DNA, 25 bp, SARS Virus
gaattttaggagtttcagagacgag

SEQ ID NO: 158642 - DNA, 25 bp, SARS Virus
aattttaggagattcagagacgaga

SEQ ID NO: 158643 - DNA, 25 bp, SARS Virus
attttaggagattcagagacgagac

SEQ ID NO: 158644 - DNA, 25 bp, SARS Virus
ttttaggagatttagagacgagact

SEQ ID NO: 158645 - DNA, 25 bp, SARS Virus
tttaggagattctgagacgagactc

SEQ ID NO: 158646 - DNA, 25 bp, SARS Virus
ttaggagattcatagacgagactca

SEQ ID NO: 158647 - DNA, 25 bp, SARS Virus
taggagattcagtgacgagactcat

SEQ ID NO: 158648 - DNA, 25 bp, SARS Virus
aggagattcagatacgagactcatt

SEQ ID NO: 158649 - DNA, 25 bp, SARS Virus
ggagattcagagtcgagactcattt

SEQ ID NO: 158650 - DNA, 25 bp, SARS Virus
gagattcagagatgagactcatttc

SEQ ID NO: 158651 - DNA, 25 bp, SARS Virus
agattcagagactagactcatttca

SEQ ID NO: 158652 - DNA, 25 bp, SARS Virus
gattcagagacgtgactcatttcat

SEQ ID NO: 158653 - DNA, 25 bp, SARS Virus
attcagagacgatactcatttcatc

SEQ ID NO: 158654 - DNA, 25 bp, SARS Virus
ttcagagacgagtctcatttcatcc

SEQ ID NO: 158655 - DNA, 25 bp, SARS Virus
tcagagacgagattcatttcatcca

SEQ ID NO: 158656 - DNA, 25 bp, SARS Virus
cagagacgagactcatttcatccaa

SEQ ID NO: 158657 - DNA, 25 bp, SARS Virus
agagacgagacttatttcatccaaa

SEQ ID NO: 158658 - DNA, 25 bp, SARS Virus
gagacgagactcttttcatccaaag

SEQ ID NO: 158659 - DNA, 25 bp, SARS Virus
agacgagactcatttcatccaaagt

SEQ ID NO: 158660 - DNA, 25 bp, SARS Virus
gacgagactcatttcatccaaagtc

SEQ ID NO: 158661 - DNA, 25 bp, SARS Virus
acgagactcatttcatccaaagtcc

SEQ ID NO: 158662 - DNA, 25 bp, SARS Virus
cgagactcattttatccaaagtccg

SEQ ID NO: 158663 - DNA, 25 bp, SARS Virus
gagactcatttcttccaaagtccgt

SEQ ID NO: 158664 - DNA, 25 bp, SARS Virus
agactcatttcatccaaagtccgtt

SEQ ID NO: 158665 - DNA, 25 bp, SARS Virus
gactcatttcattcaaagtccgttg

SEQ ID NO: 158666 - DNA, 25 bp, SARS Virus
actcatttcatctaaagtccgttga

SEQ ID NO: 158667 - DNA, 25 bp, SARS Virus
ctcatttcatcctaagtccgttgac

SEQ ID NO: 158668 - DNA, 25 bp, SARS Virus
tcatttcatccatagtccgttgaca

SEQ ID NO: 158669 - DNA, 25 bp, SARS Virus
catttcatccaatgtccgttgacaa

SEQ ID NO: 158670 - DNA, 25 bp, SARS Virus
atttcatccaaattccgttgacaac

SEQ ID NO: 158671 - DNA, 25 bp, SARS Virus
tttcatccaaagtccgttgacaact

SEQ ID NO: 158672 - DNA, 25 bp, SARS Virus
ttcatccaaagttcgttgacaactt

SEQ ID NO: 158673 - DNA, 25 bp, SARS Virus
tcatccaaagtctgttgacaactta

SEQ ID NO: 158674 - DNA, 25 bp, SARS Virus
catccaaagtcctttgacaacttat

SEQ ID NO: 158675 - DNA, 25 bp, SARS Virus
atccaaagtccgttgacaacttatt

SEQ ID NO: 158676 - DNA, 25 bp, SARS Virus
tccaaagtccgttgacaacttatta

SEQ ID NO: 158677 - DNA, 25 bp, SARS Virus
ccaaagtccgtttacaacttattac

SEQ ID NO: 158678 - DNA, 25 bp, SARS Virus
caaagtccgttgtcaacttattacg

SEQ ID NO: 158679 - DNA, 25 bp, SARS Virus
aaagtccgttgataacttattacgg

SEQ ID NO: 158680 - DNA, 25 bp, SARS Virus
aagtccgttgactacttattacggc

SEQ ID NO: 158681 - DNA, 25 bp, SARS Virus
agtccgttgacatcttattacggca

SEQ ID NO: 158682 - DNA, 25 bp, SARS Virus
gtccgttgacaatttattacggcag

SEQ ID NO: 158683 - DNA, 25 bp, SARS Virus
tccgttgacaacttattacggcaga

SEQ ID NO: 158684 - DNA, 25 bp, SARS Virus
ccgttgacaacttattacggcagat

SEQ ID NO: 158685 - DNA, 25 bp, SARS Virus
cgttgacaactttttacggcagatg

SEQ ID NO: 158686 - DNA, 25 bp, SARS Virus
gttgacaacttattacggcagatga

SEQ ID NO: 158687 - DNA, 25 bp, SARS Virus
ttgacaacttattacggcagatgaa

SEQ ID NO: 158688 - DNA, 25 bp, SARS Virus
tgacaacttatttcggcagatgaaa

SEQ ID NO: 158689 - DNA, 25 bp, SARS Virus
gacaacttattatggcagatgaaag

SEQ ID NO: 158690 - DNA, 25 bp, SARS Virus
acaacttattactgcagatgaaaga

SEQ ID NO: 158691 - DNA, 25 bp, SARS Virus
caacttattacgtcagatgaaagaa

SEQ ID NO: 158692 - DNA, 25 bp, SARS Virus
aacttattacggtagatgaaagaat

SEQ ID NO: 158693 - DNA, 25 bp, SARS Virus
acttattacggctgatgaaagaatt

SEQ ID NO: 158694 - DNA, 25 bp, SARS Virus
cttattacggcatatgaaagaattt

SEQ ID NO: 158695 - DNA, 25 bp, SARS Virus
ttattacggcagttgaaagaatttc

SEQ ID NO: 158696 - DNA, 25 bp, SARS Virus
tattacggcagatgaaagaatttca

SEQ ID NO: 158697 - DNA, 25 bp, SARS Virus
attacggcagattaaagaatttcat

SEQ ID NO: 158698 - DNA, 25 bp, SARS Virus
ttacggcagatgtaagaatttcatc

SEQ ID NO: 158699 - DNA, 25 bp, SARS Virus
tacggcagatgatagaatttcatca

SEQ ID NO: 158700 - DNA, 25 bp, SARS Virus
acggcagatgaatgaatttcatcaa

SEQ ID NO: 158701 - DNA, 25 bp, SARS Virus
cggcagatgaaataatttcatcaat

SEQ ID NO: 158702 - DNA, 25 bp, SARS Virus
ggcagatgaaagtatttcatcaatt

SEQ ID NO: 158703 - DNA, 25 bp, SARS Virus
gcagatgaaagattttcatcaattt

SEQ ID NO: 158704 - DNA, 25 bp, SARS Virus
cagatgaaagaatttcatcaatttg

SEQ ID NO: 158705 - DNA, 25 bp, SARS Virus
agatgaaagaatttcatcaatttga

SEQ ID NO: 158706 - DNA, 25 bp, SARS Virus
gatgaaagaatttcatcaatttgac

SEQ ID NO: 158707 - DNA, 25 bp, SARS Virus
atgaaagaattttatcaatttgaca

SEQ ID NO: 158708 - DNA, 25 bp, SARS Virus
tgaaagaatttcttcaatttgacac

SEQ ID NO: 158709 - DNA, 25 bp, SARS Virus
gaaagaatttcatcaatttgacaca

SEQ ID NO: 158710 - DNA, 25 bp, SARS Virus
aaagaatttcattaatttgacacaa

SEQ ID NO: 158711 - DNA, 25 bp, SARS Virus
aagaatttcatctatttgacacaaa

SEQ ID NO: 158712 - DNA, 25 bp, SARS Virus
agaatttcatcattttgacacaaaa

SEQ ID NO: 158713 - DNA, 25 bp, SARS Virus
gaatttcatcaatttgacacaaaaa

SEQ ID NO: 158714 - DNA, 25 bp, SARS Virus
aatttcatcaatttgacacaaaaat

SEQ ID NO: 158715 - DNA, 25 bp, SARS Virus
atttcatcaatttgacacaaaaatg

SEQ ID NO: 158716 - DNA, 25 bp, SARS Virus
tttcatcaattttacacaaaaatga

SEQ ID NO: 158717 - DNA, 25 bp, SARS Virus
ttcatcaatttgtcacaaaaatgac

SEQ ID NO: 158718 - DNA, 25 bp, SARS Virus
tcatcaatttgatacaaaaatgact

SEQ ID NO: 158719 - DNA, 25 bp, SARS Virus
catcaatttgactcaaaaatgacta

SEQ ID NO: 158720 - DNA, 25 bp, SARS Virus
atcaatttgacataaaaatgactaa

SEQ ID NO: 158721 - DNA, 25 bp, SARS Virus
tcaatttgacactaaaatgactaag

SEQ ID NO: 158722 - DNA, 25 bp, SARS Virus
caatttgacacataaatgactaaga

SEQ ID NO: 158723 - DNA, 25 bp, SARS Virus
aatttgacacaataatgactaagag

SEQ ID NO: 158724 - DNA, 25 bp, SARS Virus
atttgacacaaatatgactaagagg

SEQ ID NO: 158725 - DNA, 25 bp, SARS Virus
tttgacacaaaattgactaagaggt

SEQ ID NO: 158726 - DNA, 25 bp, SARS Virus
ttgacacaaaaatgactaagaggtt

SEQ ID NO: 158727 - DNA, 25 bp, SARS Virus
tgacacaaaaattactaagaggtta

SEQ ID NO: 158728 - DNA, 25 bp, SARS Virus
gacacaaaaatgtctaagaggttaa

SEQ ID NO: 158729 - DNA, 25 bp, SARS Virus
acacaaaaatgattaagaggttaat

SEQ ID NO: 158730 - DNA, 25 bp, SARS Virus
cacaaaaatgactaagaggttaatt

SEQ ID NO: 158731 - DNA, 25 bp, SARS Virus
acaaaaatgacttagaggttaatta

SEQ ID NO: 158732 - DNA, 25 bp, SARS Virus
caaaaatgactatgaggttaattac

SEQ ID NO: 158733 - DNA, 25 bp, SARS Virus
aaaaatgactaataggttaattaca

SEQ ID NO: 158734 - DNA, 25 bp, SARS Virus
aaaatgactaagtggttaattacac

SEQ ID NO: 158735 - DNA, 25 bp, SARS Virus
aaatgactaagatgttaattacact

SEQ ID NO: 158736 - DNA, 25 bp, SARS Virus
aatgactaagagtttaattacactg

SEQ ID NO: 158737 - DNA, 25 bp, SARS Virus
atgactaagaggttaattacactga

SEQ ID NO: 158738 - DNA, 25 bp, SARS Virus
tgactaagaggttaattacactgag

SEQ ID NO: 158739 - DNA, 25 bp, SARS Virus
gactaagaggtttattacactgagg

SEQ ID NO: 158740 - DNA, 25 bp, SARS Virus
actaagaggttatttacactgaggt

SEQ ID NO: 158741 - DNA, 25 bp, SARS Virus
ctaagaggttaattacactgaggta

SEQ ID NO: 158742 - DNA, 25 bp, SARS Virus
taagaggttaattacactgaggtaa

SEQ ID NO: 158743 - DNA, 25 bp, SARS Virus
aagaggttaatttcactgaggtaac

SEQ ID NO: 158744 - DNA, 25 bp, SARS Virus
agaggttaattatactgaggtaact

SEQ ID NO: 158745 - DNA, 25 bp, SARS Virus
gaggttaattactctgaggtaactg

SEQ ID NO: 158746 - DNA, 25 bp, SARS Virus
aggttaattacattgaggtaactgc

SEQ ID NO: 158747 - DNA, 25 bp, SARS Virus
ggttaattacactgaggtaactgcg

SEQ ID NO: 158748 - DNA, 25 bp, SARS Virus
gttaattacacttaggtaactgcga

SEQ ID NO: 158749 - DNA, 25 bp, SARS Virus
ttaattacactgtggtaactgcgat

SEQ ID NO: 158750 - DNA, 25 bp, SARS Virus
taattacactgatgtaactgcgatc

SEQ ID NO: 158751 - DNA, 25 bp, SARS Virus
aattacactgagttaactgcgatcg

SEQ ID NO: 158752 - DNA, 25 bp, SARS Virus
attacactgaggtaactgcgatcga

SEQ ID NO: 158753 - DNA, 25 bp, SARS Virus
ttacactgaggttactgcgatcgaa

SEQ ID NO: 158754 - DNA, 25 bp, SARS Virus
tacactgaggtatctgcgatcgaac

SEQ ID NO: 158755 - DNA, 25 bp, SARS Virus
acactgaggtaattgcgatcgaaca

SEQ ID NO: 158756 - DNA, 25 bp, SARS Virus
cactgaggtaactgcgatcgaacac

SEQ ID NO: 158757 - DNA, 25 bp, SARS Virus
actgaggtaacttcgatcgaacacg

SEQ ID NO: 158758 - DNA, 25 bp, SARS Virus
ctgaggtaactgtgatcgaacacga

SEQ ID NO: 158759 - DNA, 25 bp, SARS Virus
tgaggtaactgctatcgaacacgac

SEQ ID NO: 158760 - DNA, 25 bp, SARS Virus
gaggtaactgcgttcgaacacgacc

SEQ ID NO: 158761 - DNA, 25 bp, SARS Virus
aggtaactgcgatcgaacacgacca

SEQ ID NO: 158762 - DNA, 25 bp, SARS Virus
ggtaactgcgattgaacacgaccag

SEQ ID NO: 158763 - DNA, 25 bp, SARS Virus
gtaactgcgatctaacacgaccagg

SEQ ID NO: 158764 - DNA, 25 bp, SARS Virus
taactgcgatcgtacacgaccaggg

SEQ ID NO: 158765 - DNA, 25 bp, SARS Virus
aactgcgatcgatcacgaccaggga

SEQ ID NO: 158766 - DNA, 25 bp, SARS Virus
actgcgatcgaatacgaccagggaa

SEQ ID NO: 158767 - DNA, 25 bp, SARS Virus
ctgcgatcgaactcgaccagggaaa

SEQ ID NO: 158768 - DNA, 25 bp, SARS Virus
tgcgatcgaacatgaccagggaaac

SEQ ID NO: 158769 - DNA, 25 bp, SARS Virus
gcgatcgaacactaccagggaaact

SEQ ID NO: 158770 - DNA, 25 bp, SARS Virus
cgatcgaacacgtccagggaaactt

SEQ ID NO: 158771 - DNA, 25 bp, SARS Virus
gatcgaacacgatcagggaaacttc

SEQ ID NO: 158772 - DNA, 25 bp, SARS Virus
atcgaacacgactagggaaacttcc

SEQ ID NO: 158773 - DNA, 25 bp, SARS Virus
tcgaacacgacctgggaaacttcca

SEQ ID NO: 158774 - DNA, 25 bp, SARS Virus
cgaacacgaccatggaaacttccac

SEQ ID NO: 158775 - DNA, 25 bp, SARS Virus
gaacacgaccagtgaaacttccaca

SEQ ID NO: 158776 - DNA, 25 bp, SARS Virus
aacacgaccaggtaaacttccacaa

SEQ ID NO: 158777 - DNA, 25 bp, SARS Virus
acacgaccagggtaacttccacaat

SEQ ID NO: 158778 - DNA, 25 bp, SARS Virus
cacgaccagggatacttccacaatc

SEQ ID NO: 158779 - DNA, 25 bp, SARS Virus
acgaccagggaatcttccacaatct

SEQ ID NO: 158780 - DNA, 25 bp, SARS Virus
cgaccagggaaatttccacaatctg

SEQ ID NO: 158781 - DNA, 25 bp, SARS Virus
gaccagggaaacttccacaatctgg

SEQ ID NO: 158782 - DNA, 25 bp, SARS Virus
accagggaaacttccacaatctgga

SEQ ID NO: 158783 - DNA, 25 bp, SARS Virus
ccagggaaactttcacaatctggaa

SEQ ID NO: 158784 - DNA, 25 bp, SARS Virus
cagggaaacttctacaatctggaaa

SEQ ID NO: 158785 - DNA, 25 bp, SARS Virus
agggaaacttcctcaatctggaaac

SEQ ID NO: 158786 - DNA, 25 bp, SARS Virus
gggaaacttccataatctggaaact

SEQ ID NO: 158787 - DNA, 25 bp, SARS Virus
ggaaacttccactatctggaaactg

SEQ ID NO: 158788 - DNA, 25 bp, SARS Virus
gaaacttccacattctggaaactga

SEQ ID NO: 158789 - DNA, 25 bp, SARS Virus
aaacttccacaatctggaaactgac

SEQ ID NO: 158790 - DNA, 25 bp, SARS Virus
aacttccacaatttggaaactgact

SEQ ID NO: 158791 - DNA, 25 bp, SARS Virus
acttccacaatctggaaactgactt

SEQ ID NO: 158792 - DNA, 25 bp, SARS Virus
cttccacaatcttgaaactgacttg

SEQ ID NO: 158793 - DNA, 25 bp, SARS Virus
ttccacaatctgtaaactgacttgg

SEQ ID NO: 158794 - DNA, 25 bp, SARS Virus
tccacaatctggtaactgacttgga

SEQ ID NO: 158795 - DNA, 25 bp, SARS Virus
ccacaatctggatactgacttggaa

SEQ ID NO: 158796 - DNA, 25 bp, SARS Virus
cacaatctggaatctgacttggaag

SEQ ID NO: 158797 - DNA, 25 bp, SARS Virus
acaatctggaaattgacttggaaga

SEQ ID NO: 158798 - DNA, 25 bp, SARS Virus
caatctggaaactgacttggaagac

SEQ ID NO: 158799 - DNA, 25 bp, SARS Virus
aatctggaaacttacttggaagaca

SEQ ID NO: 158800 - DNA, 25 bp, SARS Virus
atctggaaactgtcttggaagacaa

SEQ ID NO: 158801 - DNA, 25 bp, SARS Virus
tctggaaactgatttggaagacaat

SEQ ID NO: 158802 - DNA, 25 bp, SARS Virus
ctggaaactgacttggaagacaata

SEQ ID NO: 158803 - DNA, 25 bp, SARS Virus
tggaaactgacttggaagacaataa

SEQ ID NO: 158804 - DNA, 25 bp, SARS Virus
ggaaactgactttgaagacaataat

SEQ ID NO: 158805 - DNA, 25 bp, SARS Virus
gaaactgacttgtaagacaataatt

SEQ ID NO: 158806 - DNA, 25 bp, SARS Virus
aaactgacttggtagacaataattt

SEQ ID NO: 158807 - DNA, 25 bp, SARS Virus
aactgacttggatgacaataatttt

SEQ ID NO: 158808 - DNA, 25 bp, SARS Virus
actgacttggaatacaataattttg

SEQ ID NO: 158809 - DNA, 25 bp, SARS Virus
ctgacttggaagtcaataattttgt

SEQ ID NO: 158810 - DNA, 25 bp, SARS Virus
tgacttggaagataataattttgtg

SEQ ID NO: 158811 - DNA, 25 bp, SARS Virus
gacttggaagactataattttgtgg

SEQ ID NO: 158812 - DNA, 25 bp, SARS Virus
acttggaagacattaattttgtggt

SEQ ID NO: 158813 - DNA, 25 bp, SARS Virus
cttggaagacaataattttgtggta

SEQ ID NO: 158814 - DNA, 25 bp, SARS Virus
ttggaagacaattattttgtggtaa

SEQ ID NO: 158815 - DNA, 25 bp, SARS Virus
tggaagacaatatttttgtggtaat

SEQ ID NO: 158816 - DNA, 25 bp, SARS Virus
ggaagacaataattttgtggtaatg

SEQ ID NO: 158817 - DNA, 25 bp, SARS Virus
gaagacaataattttgtggtaatgc

SEQ ID NO: 158818 - DNA, 25 bp, SARS Virus
aagacaataattttgtggtaatgcc

SEQ ID NO: 158819 - DNA, 25 bp, SARS Virus
agacaataattttgtggtaatgccc

SEQ ID NO: 158820 - DNA, 25 bp, SARS Virus
gacaataattttttggtaatgcccg

SEQ ID NO: 158821 - DNA, 25 bp, SARS Virus
acaataattttgtggtaatgcccgc

SEQ ID NO: 158822 - DNA, 25 bp, SARS Virus
caataattttgttgtaatgcccgca

SEQ ID NO: 158823 - DNA, 25 bp, SARS Virus
aataattttgtgttaatgcccgcaa

SEQ ID NO: 158824 - DNA, 25 bp, SARS Virus
ataattttgtggtaatgcccgcaaa

SEQ ID NO: 158825 - DNA, 25 bp, SARS Virus
taattttgtggttatgcccgcaaag

SEQ ID NO: 158826 - DNA, 25 bp, SARS Virus
aattttgtggtattgcccgcaaaga

SEQ ID NO: 158827 - DNA, 25 bp, SARS Virus
attttgtggtaatgcccgcaaagat

SEQ ID NO: 158828 - DNA, 25 bp, SARS Virus
ttttgtggtaattcccgcaaagatt

SEQ ID NO: 158829 - DNA, 25 bp, SARS Virus
tttgtggtaatgtccgcaaagattt

SEQ ID NO: 158830 - DNA, 25 bp, SARS Virus
ttgtggtaatgctcgcaaagatttt

SEQ ID NO: 158831 - DNA, 25 bp, SARS Virus
tgtggtaatgcctgcaaagattttt

SEQ ID NO: 158832 - DNA, 25 bp, SARS Virus
gtggtaatgccctcaaagatttttc

SEQ ID NO: 158833 - DNA, 25 bp, SARS Virus
tggtaatgcccgtaaagatttttcc

SEQ ID NO: 158834 - DNA, 25 bp, SARS Virus
ggtaatgcccgctaagatttttcca

SEQ ID NO: 158835 - DNA, 25 bp, SARS Virus
gtaatgcccgcatagatttttccag

SEQ ID NO: 158836 - DNA, 25 bp, SARS Virus
taatgcccgcaatgatttttccaga

SEQ ID NO: 158837 - DNA, 25 bp, SARS Virus
aatgcccgcaaatatttttccagat

SEQ ID NO: 158838 - DNA, 25 bp, SARS Virus
atgcccgcaaagttttttccagatg

SEQ ID NO: 158839 - DNA, 25 bp, SARS Virus
tgcccgcaaagatttttccagatgg

SEQ ID NO: 158840 - DNA, 25 bp, SARS Virus
gcccgcaaagatttttccagatgga

SEQ ID NO: 158841 - DNA, 25 bp, SARS Virus
cccgcaaagatttttccagatggac

SEQ ID NO: 158842 - DNA, 25 bp, SARS Virus
ccgcaaagatttttccagatggaca

SEQ ID NO: 158843 - DNA, 25 bp, SARS Virus
cgcaaagatttttccagatggacag

SEQ ID NO: 158844 - DNA, 25 bp, SARS Virus
gcaaagattttttcagatggacagg

SEQ ID NO: 158845 - DNA, 25 bp, SARS Virus
caaagatttttctagatggacagga

SEQ ID NO: 158846 - DNA, 25 bp, SARS Virus
aaagatttttcctgatggacaggaa

SEQ ID NO: 158847 - DNA, 25 bp, SARS Virus
aagatttttccatatggacaggaag

SEQ ID NO: 158848 - DNA, 25 bp, SARS Virus
agatttttccagttggacaggaagg

SEQ ID NO: 158849 - DNA, 25 bp, SARS Virus
gatttttccagatggacaggaaggt

SEQ ID NO: 158850 - DNA, 25 bp, SARS Virus
atttttccagattgacaggaaggtg

SEQ ID NO: 158851 - DNA, 25 bp, SARS Virus
tttttccagatgtacaggaaggtga

SEQ ID NO: 158852 - DNA, 25 bp, SARS Virus
ttttccagatggtcaggaaggtgag

SEQ ID NO: 158853 - DNA, 25 bp, SARS Virus
tttccagatggataggaaggtgaga

SEQ ID NO: 158854 - DNA, 25 bp, SARS Virus
ttccagatggactggaaggtgagat

SEQ ID NO: 158855 - DNA, 25 bp, SARS Virus
tccagatggacatgaaggtgagatg

SEQ ID NO: 158856 - DNA, 25 bp, SARS Virus
ccagatggacagtaaggtgagatgg

SEQ ID NO: 158857 - DNA, 25 bp, SARS Virus
cagatggacaggtaggtgagatggt

SEQ ID NO: 158858 - DNA, 25 bp, SARS Virus
agatggacaggatggtgagatggta

SEQ ID NO: 158859 - DNA, 25 bp, SARS Virus
gatggacaggaatgtgagatggtag

SEQ ID NO: 158860 - DNA, 25 bp, SARS Virus
atggacaggaagttgagatggtagt

SEQ ID NO: 158861 - DNA, 25 bp, SARS Virus
tggacaggaaggtgagatggtagtt

SEQ ID NO: 158862 - DNA, 25 bp, SARS Virus
ggacaggaaggttagatggtagttt

SEQ ID NO: 158863 - DNA, 25 bp, SARS Virus
gacaggaaggtgtgatggtagtttg

SEQ ID NO: 158864 - DNA, 25 bp, SARS Virus
acaggaaggtgatatggtagtttgt

SEQ ID NO: 158865 - DNA, 25 bp, SARS Virus
caggaaggtgagttggtagtttgtt

SEQ ID NO: 158866 - DNA, 25 bp, SARS Virus
aggaaggtgagatggtagtttgttc

SEQ ID NO: 158867 - DNA, 25 bp, SARS Virus
ggaaggtgagattgtagtttgttct

SEQ ID NO: 158868 - DNA, 25 bp, SARS Virus
gaaggtgagatgttagtttgttctg

SEQ ID NO: 158869 - DNA, 25 bp, SARS Virus
aaggtgagatggtagtttgttctgt

SEQ ID NO: 158870 - DNA, 25 bp, SARS Virus
aggtgagatggttgtttgttctgtc

SEQ ID NO: 158871 - DNA, 25 bp, SARS Virus
ggtgagatggtattttgttctgtca

SEQ ID NO: 158872 - DNA, 25 bp, SARS Virus
gtgagatggtagtttgttctgtcat

SEQ ID NO: 158873 - DNA, 25 bp, SARS Virus
tgagatggtagtttgttctgtcatt

SEQ ID NO: 158874 - DNA, 25 bp, SARS Virus
gagatggtagtttgttctgtcattc

SEQ ID NO: 158875 - DNA, 25 bp, SARS Virus
agatggtagttttttctgtcattca

SEQ ID NO: 158876 - DNA, 25 bp, SARS Virus
gatggtagtttgttctgtcattcac

SEQ ID NO: 158877 - DNA, 25 bp, SARS Virus
atggtagtttgttctgtcattcact

SEQ ID NO: 158878 - DNA, 25 bp, SARS Virus
tggtagtttgttttgtcattcactt

SEQ ID NO: 158879 - DNA, 25 bp, SARS Virus
ggtagtttgttctgtcattcacttc

SEQ ID NO: 158880 - DNA, 25 bp, SARS Virus
gtagtttgttctttcattcacttct

SEQ ID NO: 158881 - DNA, 25 bp, SARS Virus
tagtttgttctgtcattcacttctt

SEQ ID NO: 158882 - DNA, 25 bp, SARS Virus
agtttgttctgttattcacttcttg

SEQ ID NO: 158883 - DNA, 25 bp, SARS Virus
gtttgttctgtctttcacttcttgt

SEQ ID NO: 158884 - DNA, 25 bp, SARS Virus
tttgttctgtcattcacttcttgtt

SEQ ID NO: 158885 - DNA, 25 bp, SARS Virus
ttgttctgtcattcacttcttgttc

SEQ ID NO: 158886 - DNA, 25 bp, SARS Virus
tgttctgtcatttacttcttgttcg

SEQ ID NO: 158887 - DNA, 25 bp, SARS Virus
gttctgtcattctcttcttgttcgt

SEQ ID NO: 158888 - DNA, 25 bp, SARS Virus
ttctgtcattcatttcttgttcgtg

SEQ ID NO: 158889 - DNA, 25 bp, SARS Virus
tctgtcattcacttcttgttcgtga

SEQ ID NO: 158890 - DNA, 25 bp, SARS Virus
ctgtcattcacttcttgttcgtgag

SEQ ID NO: 158891 - DNA, 25 bp, SARS Virus
tgtcattcactttttgttcgtgaga

SEQ ID NO: 158892 - DNA, 25 bp, SARS Virus
gtcattcacttcttgttcgtgagag

SEQ ID NO: 158893 - DNA, 25 bp, SARS Virus
tcattcacttcttgttcgtgagagt

SEQ ID NO: 158894 - DNA, 25 bp, SARS Virus
cattcacttctttttcgtgagagtc

SEQ ID NO: 158895 - DNA, 25 bp, SARS Virus
attcacttcttgttcgtgagagtca

SEQ ID NO: 158896 - DNA, 25 bp, SARS Virus
ttcacttcttgttcgtgagagtcat

SEQ ID NO: 158897 - DNA, 25 bp, SARS Virus
tcacttcttgtttgtgagagtcatc

SEQ ID NO: 158898 - DNA, 25 bp, SARS Virus
cacttcttgttcttgagagtcatcc

SEQ ID NO: 158899 - DNA, 25 bp, SARS Virus
acttcttgttcgtgagagtcatcca

SEQ ID NO: 158900 - DNA, 25 bp, SARS Virus
cttcttgttcgttagagtcatccaa

SEQ ID NO: 158901 - DNA, 25 bp, SARS Virus
ttcttgttcgtgtgagtcatccaaa

SEQ ID NO: 158902 - DNA, 25 bp, SARS Virus
tcttgttcgtgatagtcatccaaag

SEQ ID NO: 158903 - DNA, 25 bp, SARS Virus
cttgttcgtgagtgtcatccaaaga

SEQ ID NO: 158904 - DNA, 25 bp, SARS Virus
ttgttcgtgagattcatccaaagaa

SEQ ID NO: 158905 - DNA, 25 bp, SARS Virus
tgttcgtgagagtcatccaaagaac

SEQ ID NO: 158906 - DNA, 25 bp, SARS Virus
gttcgtgagagttatccaaagaacc

SEQ ID NO: 158907 - DNA, 25 bp, SARS Virus
ttcgtgagagtcttccaaagaaccg

SEQ ID NO: 158908 - DNA, 25 bp, SARS Virus
tcgtgagagtcatccaaagaaccgt

SEQ ID NO: 158909 - DNA, 25 bp, SARS Virus
cgtgagagtcattcaaagaaccgtt

SEQ ID NO: 158910 - DNA, 25 bp, SARS Virus
gtgagagtcatctaaagaaccgtta

SEQ ID NO: 158911 - DNA, 25 bp, SARS Virus
tgagagtcatcctaagaaccgttac

SEQ ID NO: 158912 - DNA, 25 bp, SARS Virus
gagagtcatccatagaaccgttaca

SEQ ID NO: 158913 - DNA, 25 bp, SARS Virus
agagtcatccaatgaaccgttacag

SEQ ID NO: 158914 - DNA, 25 bp, SARS Virus
gagtcatccaaataaccgttacagt

SEQ ID NO: 158915 - DNA, 25 bp, SARS Virus
agtcatccaaagtaccgttacagtc

SEQ ID NO: 158916 - DNA, 25 bp, SARS Virus
gtcatccaaagatccgttacagtca

SEQ ID NO: 158917 - DNA, 25 bp, SARS Virus
tcatccaaagaatcgttacagtcag

SEQ ID NO: 158918 - DNA, 25 bp, SARS Virus
catccaaagaactgttacagtcagt

SEQ ID NO: 158919 - DNA, 25 bp, SARS Virus
atccaaagaacctttacagtcagta

SEQ ID NO: 158920 - DNA, 25 bp, SARS Virus
tccaaagaaccgttacagtcagtaa

SEQ ID NO: 158921 - DNA, 25 bp, SARS Virus
ccaaagaaccgttacagtcagtaac

SEQ ID NO: 158922 - DNA, 25 bp, SARS Virus
caaagaaccgtttcagtcagtaaca

SEQ ID NO: 158923 - DNA, 25 bp, SARS Virus
aaagaaccgttatagtcagtaacac

SEQ ID NO: 158924 - DNA, 25 bp, SARS Virus
aagaaccgttactgtcagtaacacg

SEQ ID NO: 158925 - DNA, 25 bp, SARS Virus
agaaccgttacattcagtaacacgt

SEQ ID NO: 158926 - DNA, 25 bp, SARS Virus
gaaccgttacagtcagtaacacgtc

SEQ ID NO: 158927 - DNA, 25 bp, SARS Virus
aaccgttacagttagtaacacgtct

SEQ ID NO: 158928 - DNA, 25 bp, SARS Virus
accgttacagtctgtaacacgtctg

SEQ ID NO: 158929 - DNA, 25 bp, SARS Virus
ccgttacagtcattaacacgtctgt

SEQ ID NO: 158930 - DNA, 25 bp, SARS Virus
cgttacagtcagtaacacgtctgtg

SEQ ID NO: 158931 - DNA, 25 bp, SARS Virus
gttacagtcagttacacgtctgtgg

SEQ ID NO: 158932 - DNA, 25 bp, SARS Virus
ttacagtcagtatcacgtctgtgga

SEQ ID NO: 158933 - DNA, 25 bp, SARS Virus
tacagtcagtaatacgtctgtggat

SEQ ID NO: 158934 - DNA, 25 bp, SARS Virus
acagtcagtaactcgtctgtggata

SEQ ID NO: 158935 - DNA, 25 bp, SARS Virus
cagtcagtaacatgtctgtggataa

SEQ ID NO: 158936 - DNA, 25 bp, SARS Virus
agtcagtaacacttctgtggataac

SEQ ID NO: 158937 - DNA, 25 bp, SARS Virus
gtcagtaacacgtctgtggataaca

SEQ ID NO: 158938 - DNA, 25 bp, SARS Virus
tcagtaacacgtttgtggataacat

SEQ ID NO: 158939 - DNA, 25 bp, SARS Virus
cagtaacacgtctgtggataacatc

SEQ ID NO: 158940 - DNA, 25 bp, SARS Virus
agtaacacgtctttggataacatct

SEQ ID NO: 158941 - DNA, 25 bp, SARS Virus
gtaacacgtctgtggataacatcta

SEQ ID NO: 158942 - DNA, 25 bp, SARS Virus
taacacgtctgttgataacatctat

SEQ ID NO: 158943 - DNA, 25 bp, SARS Virus
aacacgtctgtgtataacatctatg

SEQ ID NO: 158944 - DNA, 25 bp, SARS Virus
acacgtctgtggttaacatctatgt

SEQ ID NO: 158945 - DNA, 25 bp, SARS Virus
cacgtctgtggataacatctatgta

SEQ ID NO: 158946 - DNA, 25 bp, SARS Virus
acgtctgtggattacatctatgtac

SEQ ID NO: 158947 - DNA, 25 bp, SARS Virus
cgtctgtggatatcatctatgtaca

SEQ ID NO: 158948 - DNA, 25 bp, SARS Virus
gtctgtggataatatctatgtacac

SEQ ID NO: 158949 - DNA, 25 bp, SARS Virus
tctgtggataacttctatgtacacg

SEQ ID NO: 158950 - DNA, 25 bp, SARS Virus
ctgtggataacatctatgtacacga

SEQ ID NO: 158951 - DNA, 25 bp, SARS Virus
tgtggataacatttatgtacacgac

SEQ ID NO: 158952 - DNA, 25 bp, SARS Virus
gtggataacatctatgtacacgacc

SEQ ID NO: 158953 - DNA, 25 bp, SARS Virus
tggataacatctttgtacacgaccc

SEQ ID NO: 158954 - DNA, 25 bp, SARS Virus
ggataacatctatgtacacgacccc

SEQ ID NO: 158955 - DNA, 25 bp, SARS Virus
gataacatctatttacacgaccccg

SEQ ID NO: 158956 - DNA, 25 bp, SARS Virus
ataacatctatgtacacgaccccga

SEQ ID NO: 158957 - DNA, 25 bp, SARS Virus
taacatctatgttcacgaccccgaa

SEQ ID NO: 158958 - DNA, 25 bp, SARS Virus
aacatctatgtatacgaccccgaag

SEQ ID NO: 158959 - DNA, 25 bp, SARS Virus
acatctatgtactcgaccccgaaga

SEQ ID NO: 158960 - DNA, 25 bp, SARS Virus
catctatgtacatgaccccgaagag

SEQ ID NO: 158961 - DNA, 25 bp, SARS Virus
atctatgtacactaccccgaagaga

SEQ ID NO: 158962 - DNA, 25 bp, SARS Virus
tctatgtacacgtccccgaagagaa

SEQ ID NO: 158963 - DNA, 25 bp, SARS Virus
ctatgtacacgatcccgaagagaaa

SEQ ID NO: 158964 - DNA, 25 bp, SARS Virus
tatgtacacgactccgaagagaaaa

SEQ ID NO: 158965 - DNA, 25 bp, SARS Virus
atgtacacgacctcgaagagaaaac

SEQ ID NO: 158966 - DNA, 25 bp, SARS Virus
tgtacacgaccctgaagagaaaaca

SEQ ID NO: 158967 - DNA, 25 bp, SARS Virus
gtacacgacccctaagagaaaacat

SEQ ID NO: 158968 - DNA, 25 bp, SARS Virus
tacacgaccccgtagagaaaacatc

SEQ ID NO: 158969 - DNA, 25 bp, SARS Virus
acacgaccccgatgagaaaacatca

SEQ ID NO: 158970 - DNA, 25 bp, SARS Virus
cacgaccccgaatagaaaacatcag

SEQ ID NO: 158971 - DNA, 25 bp, SARS Virus
acgaccccgaagtgaaaacatcagg

SEQ ID NO: 158972 - DNA, 25 bp, SARS Virus
cgaccccgaagataaaacatcaggg

SEQ ID NO: 158973 - DNA, 25 bp, SARS Virus
gaccccgaagagtaaacatcagggt

SEQ ID NO: 158974 - DNA, 25 bp, SARS Virus
accccgaagagataacatcagggtc

SEQ ID NO: 158975 - DNA, 25 bp, SARS Virus
ccccgaagagaatacatcagggtct

SEQ ID NO: 158976 - DNA, 25 bp, SARS Virus
cccgaagagaaatcatcagggtcta

SEQ ID NO: 158977 - DNA, 25 bp, SARS Virus
ccgaagagaaaatatcagggtctaa

SEQ ID NO: 158978 - DNA, 25 bp, SARS Virus
cgaagagaaaacttcagggtctaat

SEQ ID NO: 158979 - DNA, 25 bp, SARS Virus
gaagagaaaacatcagggtctaatg

SEQ ID NO: 158980 - DNA, 25 bp, SARS Virus
aagagaaaacattagggtctaatgt

SEQ ID NO: 158981 - DNA, 25 bp, SARS Virus
agagaaaacatctgggtctaatgtc

SEQ ID NO: 158982 - DNA, 25 bp, SARS Virus
gagaaaacatcatggtctaatgtca

SEQ ID NO: 158983 - DNA, 25 bp, SARS Virus
agaaaacatcagtgtctaatgtcat

SEQ ID NO: 158984 - DNA, 25 bp, SARS Virus
gaaaacatcaggttctaatgtcata

SEQ ID NO: 158985 - DNA, 25 bp, SARS Virus
aaaacatcagggtctaatgtcataa

SEQ ID NO: 158986 - DNA, 25 bp, SARS Virus
aaacatcagggtttaatgtcataat

SEQ ID NO: 158987 - DNA, 25 bp, SARS Virus
aacatcagggtctaatgtcataatc

SEQ ID NO: 158988 - DNA, 25 bp, SARS Virus
acatcagggtcttatgtcataatcg

SEQ ID NO: 158989 - DNA, 25 bp, SARS Virus
catcagggtctattgtcataatcgt

SEQ ID NO: 158990 - DNA, 25 bp, SARS Virus
atcagggtctaatgtcataatcgtc

SEQ ID NO: 158991 - DNA, 25 bp, SARS Virus
tcagggtctaatttcataatcgtcg

SEQ ID NO: 158992 - DNA, 25 bp, SARS Virus
cagggtctaatgtcataatcgtcgc

SEQ ID NO: 158993 - DNA, 25 bp, SARS Virus
agggtctaatgttataatcgtcgct

SEQ ID NO: 158994 - DNA, 25 bp, SARS Virus
gggtctaatgtcttaatcgtcgcta

SEQ ID NO: 158995 - DNA, 25 bp, SARS Virus
ggtctaatgtcataatcgtcgctat

SEQ ID NO: 158996 - DNA, 25 bp, SARS Virus
gtctaatgtcattatcgtcgctata

SEQ ID NO: 158997 - DNA, 25 bp, SARS Virus
tctaatgtcatattcgtcgctatag

SEQ ID NO: 158998 - DNA, 25 bp, SARS Virus
ctaatgtcataatcgtcgctatagt

SEQ ID NO: 158999 - DNA, 25 bp, SARS Virus
taatgtcataattgtcgctatagtt

SEQ ID NO: 159000 - DNA, 25 bp, SARS Virus
aatgtcataatcttcgctatagttg

SEQ ID NO: 159001 - DNA, 25 bp, SARS Virus
atgtcataatcgtcgctatagttgt

SEQ ID NO: 159002 - DNA, 25 bp, SARS Virus
tgtcataatcgttgctatagttgtg

SEQ ID NO: 159003 - DNA, 25 bp, SARS Virus
gtcataatcgtctctatagttgtgg

SEQ ID NO: 159004 - DNA, 25 bp, SARS Virus
tcataatcgtcgttatagttgtggg

SEQ ID NO: 159005 - DNA, 25 bp, SARS Virus
cataatcgtcgctatagttgtgggt

SEQ ID NO: 159006 - DNA, 25 bp, SARS Virus
ataatcgtcgctttagttgtgggtt

SEQ ID NO: 159007 - DNA, 25 bp, SARS Virus
taatcgtcgctatagttgtgggttt

SEQ ID NO: 159008 - DNA, 25 bp, SARS Virus
aatcgtcgctattgttgtgggttta

SEQ ID NO: 159009 - DNA, 25 bp, SARS Virus
atcgtcgctatatttgtgggtttaa

SEQ ID NO: 159010 - DNA, 25 bp, SARS Virus
tcgtcgctatagttgtgggtttaat

SEQ ID NO: 159011 - DNA, 25 bp, SARS Virus
cgtcgctatagttgtgggtttaata

SEQ ID NO: 159012 - DNA, 25 bp, SARS Virus
gtcgctatagttttgggtttaataa

SEQ ID NO: 159013 - DNA, 25 bp, SARS Virus
tcgctatagttgtgggtttaataac

SEQ ID NO: 159014 - DNA, 25 bp, SARS Virus
cgctatagttgttggtttaataact

SEQ ID NO: 159015 - DNA, 25 bp, SARS Virus
gctatagttgtgtgtttaataactc

SEQ ID NO: 159016 - DNA, 25 bp, SARS Virus
ctatagttgtggttttaataactca

SEQ ID NO: 159017 - DNA, 25 bp, SARS Virus
tatagttgtgggtttaataactcat

SEQ ID NO: 159018 - DNA, 25 bp, SARS Virus
atagttgtgggtttaataactcata

SEQ ID NO: 159019 - DNA, 25 bp, SARS Virus
tagttgtgggtttaataactcatag

SEQ ID NO: 159020 - DNA, 25 bp, SARS Virus
agttgtgggttttataactcataga

SEQ ID NO: 159021 - DNA, 25 bp, SARS Virus
gttgtgggtttattaactcatagaa

SEQ ID NO: 159022 - DNA, 25 bp, SARS Virus
ttgtgggtttaataactcatagaat

SEQ ID NO: 159023 - DNA, 25 bp, SARS Virus
tgtgggtttaattactcatagaatt

SEQ ID NO: 159024 - DNA, 25 bp, SARS Virus
gtgggtttaatatctcatagaatta

SEQ ID NO: 159025 - DNA, 25 bp, SARS Virus
tgggtttaataattcatagaattag

SEQ ID NO: 159026 - DNA, 25 bp, SARS Virus
gggtttaataactcatagaattaga

SEQ ID NO: 159027 - DNA, 25 bp, SARS Virus
ggtttaataacttatagaattagag

SEQ ID NO: 159028 - DNA, 25 bp, SARS Virus
gtttaataactcttagaattagaga

SEQ ID NO: 159029 - DNA, 25 bp, SARS Virus
tttaataactcatagaattagagac

SEQ ID NO: 159030 - DNA, 25 bp, SARS Virus
ttaataactcattgaattagagacc

SEQ ID NO: 159031 - DNA, 25 bp, SARS Virus
taataactcatataattagagaccg

SEQ ID NO: 159032 - DNA, 25 bp, SARS Virus
aataactcatagtattagagaccgt

SEQ ID NO: 159033 - DNA, 25 bp, SARS Virus
ataactcatagatttagagaccgtg

SEQ ID NO: 159034 - DNA, 25 bp, SARS Virus
taactcatagaattagagaccgtga

SEQ ID NO: 159035 - DNA, 25 bp, SARS Virus
aactcatagaattagagaccgtgac

SEQ ID NO: 159036 - DNA, 25 bp, SARS Virus
actcatagaatttgagaccgtgacc

SEQ ID NO: 159037 - DNA, 25 bp, SARS Virus
ctcatagaattatagaccgtgacca

SEQ ID NO: 159038 - DNA, 25 bp, SARS Virus
tcatagaattagtgaccgtgaccaa

SEQ ID NO: 159039 - DNA, 25 bp, SARS Virus
catagaattagataccgtgaccaaa

SEQ ID NO: 159040 - DNA, 25 bp, SARS Virus
atagaattagagtccgtgaccaaat

SEQ ID NO: 159041 - DNA, 25 bp, SARS Virus
tagaattagagatcgtgaccaaatt

SEQ ID NO: 159042 - DNA, 25 bp, SARS Virus
agaattagagactgtgaccaaatta

SEQ ID NO: 159043 - DNA, 25 bp, SARS Virus
gaattagagaccttgaccaaattac

SEQ ID NO: 159044 - DNA, 25 bp, SARS Virus
aattagagaccgtgaccaaattaca

SEQ ID NO: 159045 - DNA, 25 bp, SARS Virus
attagagaccgttaccaaattacaa

SEQ ID NO: 159046 - DNA, 25 bp, SARS Virus
ttagagaccgtgtccaaattacaat

SEQ ID NO: 159047 - DNA, 25 bp, SARS Virus
tagagaccgtgatcaaattacaatg

SEQ ID NO: 159048 - DNA, 25 bp, SARS Virus
agagaccgtgactaaattacaatgc

SEQ ID NO: 159049 - DNA, 25 bp, SARS Virus
gagaccgtgacctaattacaatgcg

SEQ ID NO: 159050 - DNA, 25 bp, SARS Virus
agaccgtgaccatattacaatgcga

SEQ ID NO: 159051 - DNA, 25 bp, SARS Virus
gaccgtgaccaatttacaatgcgaa

SEQ ID NO: 159052 - DNA, 25 bp, SARS Virus
accgtgaccaaattacaatgcgaat

SEQ ID NO: 159053 - DNA, 25 bp, SARS Virus
ccgtgaccaaattacaatgcgaatc

SEQ ID NO: 159054 - DNA, 25 bp, SARS Virus
cgtgaccaaatttcaatgcgaatcg

SEQ ID NO: 159055 - DNA, 25 bp, SARS Virus
gtgaccaaattataatgcgaatcgg

SEQ ID NO: 159056 - DNA, 25 bp, SARS Virus
tgaccaaattactatgcgaatcggg

SEQ ID NO: 159057 - DNA, 25 bp, SARS Virus
gaccaaattacattgcgaatcgggt

SEQ ID NO: 159058 - DNA, 25 bp, SARS Virus
accaaattacaatgcgaatcgggtt

SEQ ID NO: 159059 - DNA, 25 bp, SARS Virus
ccaaattacaattcgaatcgggttt

SEQ ID NO: 159060 - DNA, 25 bp, SARS Virus
caaattacaatgtgaatcgggtttc

SEQ ID NO: 159061 - DNA, 25 bp, SARS Virus
aaattacaatgctaatcgggtttcg

SEQ ID NO: 159062 - DNA, 25 bp, SARS Virus
aattacaatgcgtatcgggtttcga

SEQ ID NO: 159063 - DNA, 25 bp, SARS Virus
attacaatgcgattcgggtttcgag

SEQ ID NO: 159064 - DNA, 25 bp, SARS Virus
ttacaatgcgaatcgggtttcgagt

SEQ ID NO: 159065 - DNA, 25 bp, SARS Virus
tacaatgcgaattgggtttcgagtt

SEQ ID NO: 159066 - DNA, 25 bp, SARS Virus
acaatgcgaatctggtttcgagttt

SEQ ID NO: 159067 - DNA, 25 bp, SARS Virus
caatgcgaatcgtgtttcgagttta

SEQ ID NO: 159068 - DNA, 25 bp, SARS Virus
aatgcgaatcggttttcgagtttac

SEQ ID NO: 159069 - DNA, 25 bp, SARS Virus
atgcgaatcgggtttcgagtttacg

SEQ ID NO: 159070 - DNA, 25 bp, SARS Virus
tgcgaatcgggtttcgagtttacgt

SEQ ID NO: 159071 - DNA, 25 bp, SARS Virus
gcgaatcgggtttcgagtttacgtt

SEQ ID NO: 159072 - DNA, 25 bp, SARS Virus
cgaatcgggttttgagtttacgttg

SEQ ID NO: 159073 - DNA, 25 bp, SARS Virus
gaatcgggtttctagtttacgttgt

SEQ ID NO: 159074 - DNA, 25 bp, SARS Virus
aatcgggtttcgtgtttacgttgta

SEQ ID NO: 159075 - DNA, 25 bp, SARS Virus
atcgggtttcgattttacgttgtaa

SEQ ID NO: 159076 - DNA, 25 bp, SARS Virus
tcgggtttcgagtttacgttgtaat

SEQ ID NO: 159077 - DNA, 25 bp, SARS Virus
cgggtttcgagtttacgttgtaatt

SEQ ID NO: 159078 - DNA, 25 bp, SARS Virus
gggtttcgagtttacgttgtaattg

SEQ ID NO: 159079 - DNA, 25 bp, SARS Virus
ggtttcgagttttcgttgtaattgt

SEQ ID NO: 159080 - DNA, 25 bp, SARS Virus
gtttcgagtttatgttgtaattgtc

SEQ ID NO: 159081 - DNA, 25 bp, SARS Virus
tttcgagtttactttgtaattgtcc

SEQ ID NO: 159082 - DNA, 25 bp, SARS Virus
ttcgagtttacgttgtaattgtcct

SEQ ID NO: 159083 - DNA, 25 bp, SARS Virus
tcgagtttacgttgtaattgtcctt

SEQ ID NO: 159084 - DNA, 25 bp, SARS Virus
cgagtttacgttttaattgtccttc

SEQ ID NO: 159085 - DNA, 25 bp, SARS Virus
gagtttacgttgtaattgtccttca

SEQ ID NO: 159086 - DNA, 25 bp, SARS Virus
agtttacgttgttattgtccttcac

SEQ ID NO: 159087 - DNA, 25 bp, SARS Virus
gtttacgttgtatttgtccttcaca

SEQ ID NO: 159088 - DNA, 25 bp, SARS Virus
tttacgttgtaattgtccttcacaa

SEQ ID NO: 159089 - DNA, 25 bp, SARS Virus
ttacgttgtaattgtccttcacaac

SEQ ID NO: 159090 - DNA, 25 bp, SARS Virus
tacgttgtaattttccttcacaaca

SEQ ID NO: 159091 - DNA, 25 bp, SARS Virus
acgttgtaattgtccttcacaacag

SEQ ID NO: 159092 - DNA, 25 bp, SARS Virus
cgttgtaattgttcttcacaacaga

SEQ ID NO: 159093 - DNA, 25 bp, SARS Virus
gttgtaattgtctttcacaacagaa

SEQ ID NO: 159094 - DNA, 25 bp, SARS Virus
ttgtaattgtccttcacaacagaat

SEQ ID NO: 159095 - DNA, 25 bp, SARS Virus
tgtaattgtccttcacaacagaata

SEQ ID NO: 159096 - DNA, 25 bp, SARS Virus
gtaattgtcctttacaacagaataa

SEQ ID NO: 159097 - DNA, 25 bp, SARS Virus
taattgtccttctcaacagaataaa

SEQ ID NO: 159098 - DNA, 25 bp, SARS Virus
aattgtccttcataacagaataaaa

SEQ ID NO: 159099 - DNA, 25 bp, SARS Virus
attgtccttcactacagaataaaag

SEQ ID NO: 159100 - DNA, 25 bp, SARS Virus
ttgtccttcacatcagaataaaagt

SEQ ID NO: 159101 - DNA, 25 bp, SARS Virus
tgtccttcacaatagaataaaagtt

SEQ ID NO: 159102 - DNA, 25 bp, SARS Virus
gtccttcacaactgaataaaagttt

SEQ ID NO: 159103 - DNA, 25 bp, SARS Virus
tccttcacaacataataaaagtttc

SEQ ID NO: 159104 - DNA, 25 bp, SARS Virus
ccttcacaacagtataaaagtttct

SEQ ID NO: 159105 - DNA, 25 bp, SARS Virus
cttcacaacagattaaaagtttcta

SEQ ID NO: 159106 - DNA, 25 bp, SARS Virus
ttcacaacagaataaaagtttctag

SEQ ID NO: 159107 - DNA, 25 bp, SARS Virus
tcacaacagaattaaagtttctaga

SEQ ID NO: 159108 - DNA, 25 bp, SARS Virus
cacaacagaatataagtttctagag

SEQ ID NO: 159109 - DNA, 25 bp, SARS Virus
acaacagaataatagtttctagagg

SEQ ID NO: 159110 - DNA, 25 bp, SARS Virus
caacagaataaatgtttctagaggt

SEQ ID NO: 159111 - DNA, 25 bp, SARS Virus
aacagaataaaattttctagaggtg

SEQ ID NO: 159112 - DNA, 25 bp, SARS Virus
acagaataaaagtttctagaggtgt

SEQ ID NO: 159113 - DNA, 25 bp, SARS Virus
cagaataaaagtttctagaggtgta

SEQ ID NO: 159114 - DNA, 25 bp, SARS Virus
agaataaaagtttctagaggtgtag

SEQ ID NO: 159115 - DNA, 25 bp, SARS Virus
gaataaaagtttttagaggtgtagt

SEQ ID NO: 159116 - DNA, 25 bp, SARS Virus
aataaaagtttctagaggtgtagtt

SEQ ID NO: 159117 - DNA, 25 bp, SARS Virus
ataaaagtttcttgaggtgtagtta

SEQ ID NO: 159118 - DNA, 25 bp, SARS Virus
taaaagtttctataggtgtagttat

SEQ ID NO: 159119 - DNA, 25 bp, SARS Virus
aaaagtttctagtggtgtagttatg

SEQ ID NO: 159120 - DNA, 25 bp, SARS Virus
aaagtttctagatgtgtagttatgg

SEQ ID NO: 159121 - DNA, 25 bp, SARS Virus
aagtttctagagatgtagttatggt

SEQ ID NO: 159122 - DNA, 25 bp, SARS Virus
agtttctagaggagtagttatggta

SEQ ID NO: 159123 - DNA, 25 bp, SARS Virus
gtttctagaggtatagttatggtag

SEQ ID NO: 159124 - DNA, 25 bp, SARS Virus
tttctagaggtgaagttatggtaga

SEQ ID NO: 159125 - DNA, 25 bp, SARS Virus
ttctagaggtgtagttatggtagat

SEQ ID NO: 159126 - DNA, 25 bp, SARS Virus
tctagaggtgtaattatggtagatg

SEQ ID NO: 159127 - DNA, 25 bp, SARS Virus
ctagaggtgtagatatggtagatgg

SEQ ID NO: 159128 - DNA, 25 bp, SARS Virus
tagaggtgtagtaatggtagatgga

SEQ ID NO: 159129 - DNA, 25 bp, SARS Virus
agaggtgtagttatggtagatggaa

SEQ ID NO: 159130 - DNA, 25 bp, SARS Virus
gaggtgtagttaaggtagatggaaa

SEQ ID NO: 159131 - DNA, 25 bp, SARS Virus
aggtgtagttatagtagatggaaac

SEQ ID NO: 159132 - DNA, 25 bp, SARS Virus
ggtgtagttatgatagatggaaaca

SEQ ID NO: 159133 - DNA, 25 bp, SARS Virus
gtgtagttatggaagatggaaacac

SEQ ID NO: 159134 - DNA, 25 bp, SARS Virus
tgtagttatggtagatggaaacaca

SEQ ID NO: 159135 - DNA, 25 bp, SARS Virus
gtagttatggtaaatggaaacacat

SEQ ID NO: 159136 - DNA, 25 bp, SARS Virus
tagttatggtagatggaaacacatt

SEQ ID NO: 159137 - DNA, 25 bp, SARS Virus
agttatggtagaaggaaacacattt

SEQ ID NO: 159138 - DNA, 25 bp, SARS Virus
gttatggtagatagaaacacatttg

SEQ ID NO: 159139 - DNA, 25 bp, SARS Virus
ttatggtagatgaaaacacatttgt

SEQ ID NO: 159140 - DNA, 25 bp, SARS Virus
tatggtagatggaaacacatttgtc

SEQ ID NO: 159141 - DNA, 25 bp, SARS Virus
atggtagatggaaacacatttgtcg

SEQ ID NO: 159142 - DNA, 25 bp, SARS Virus
tggtagatggaaacacatttgtcgt

SEQ ID NO: 159143 - DNA, 25 bp, SARS Virus
ggtagatggaaaaacatttgtcgta

SEQ ID NO: 159144 - DNA, 25 bp, SARS Virus
gtagatggaaacacatttgtcgtaa

SEQ ID NO: 159145 - DNA, 25 bp, SARS Virus
tagatggaaacaaatttgtcgtaat

SEQ ID NO: 159146 - DNA, 25 bp, SARS Virus
agatggaaacacatttgtcgtaata

SEQ ID NO: 159147 - DNA, 25 bp, SARS Virus
gatggaaacacaattgtcgtaataa

SEQ ID NO: 159148 - DNA, 25 bp, SARS Virus
atggaaacacatatgtcgtaataat

SEQ ID NO: 159149 - DNA, 25 bp, SARS Virus
tggaaacacattagtcgtaataatt

SEQ ID NO: 159150 - DNA, 25 bp, SARS Virus
ggaaacacatttatcgtaataatta

SEQ ID NO: 159151 - DNA, 25 bp, SARS Virus
gaaacacatttgacgtaataattac

SEQ ID NO: 159152 - DNA, 25 bp, SARS Virus
aaacacatttgtagtaataattact

SEQ ID NO: 159153 - DNA, 25 bp, SARS Virus
aacacatttgtcataataattacta

SEQ ID NO: 159154 - DNA, 25 bp, SARS Virus
acacatttgtcgaaataattactac

SEQ ID NO: 159155 - DNA, 25 bp, SARS Virus
cacatttgtcgtaataattactacc

SEQ ID NO: 159156 - DNA, 25 bp, SARS Virus
acatttgtcgtaataattactacct

SEQ ID NO: 159157 - DNA, 25 bp, SARS Virus
catttgtcgtaaaaattactacctt

SEQ ID NO: 159158 - DNA, 25 bp, SARS Virus
atttgtcgtaataattactaccttt

SEQ ID NO: 159159 - DNA, 25 bp, SARS Virus
tttgtcgtaataattactacctttg

SEQ ID NO: 159160 - DNA, 25 bp, SARS Virus
ttgtcgtaataaatactacctttgt

SEQ ID NO: 159161 - DNA, 25 bp, SARS Virus
tgtcgtaataataactacctttgtc

SEQ ID NO: 159162 - DNA, 25 bp, SARS Virus
gtcgtaataattactacctttgtcc

SEQ ID NO: 159163 - DNA, 25 bp, SARS Virus
tcgtaataattaatacctttgtcca

SEQ ID NO: 159164 - DNA, 25 bp, SARS Virus
cgtaataattacaacctttgtccac

SEQ ID NO: 159165 - DNA, 25 bp, SARS Virus
gtaataattactacctttgtccacg

SEQ ID NO: 159166 - DNA, 25 bp, SARS Virus
taataattactaactttgtccacga

SEQ ID NO: 159167 - DNA, 25 bp, SARS Virus
aataattactacatttgtccacgaa

SEQ ID NO: 159168 - DNA, 25 bp, SARS Virus
ataattactaccattgtccacgaag

SEQ ID NO: 159169 - DNA, 25 bp, SARS Virus
taattactacctatgtccacgaagc

SEQ ID NO: 159170 - DNA, 25 bp, SARS Virus
aattactaccttagtccacgaagcg

SEQ ID NO: 159171 - DNA, 25 bp, SARS Virus
attactacctttatccacgaagcgg

SEQ ID NO: 159172 - DNA, 25 bp, SARS Virus
ttactacctttgaccacgaagcggc

SEQ ID NO: 159173 - DNA, 25 bp, SARS Virus
tactacctttgtacacgaagcggcc

SEQ ID NO: 159174 - DNA, 25 bp, SARS Virus
actacctttgtcaacgaagcggccg

SEQ ID NO: 159175 - DNA, 25 bp, SARS Virus
ctacctttgtccacgaagcggccgc

SEQ ID NO: 159176 - DNA, 25 bp, SARS Virus
tacctttgtccaagaagcggccgca

SEQ ID NO: 159177 - DNA, 25 bp, SARS Virus
acctttgtccacaaagcggccgcac

SEQ ID NO: 159178 - DNA, 25 bp, SARS Virus
cctttgtccacgaagcggccgcaca

SEQ ID NO: 159179 - DNA, 25 bp, SARS Virus
ctttgtccacgaagcggccgcacag

SEQ ID NO: 159180 - DNA, 25 bp, SARS Virus
tttgtccacgaaacggccgcacagg

SEQ ID NO: 159181 - DNA, 25 bp, SARS Virus
ttgtccacgaagaggccgcacaggt

SEQ ID NO: 159182 - DNA, 25 bp, SARS Virus
tgtccacgaagcagccgcacaggta

SEQ ID NO: 159183 - DNA, 25 bp, SARS Virus
gtccacgaagcgaccgcacaggtag

SEQ ID NO: 159184 - DNA, 25 bp, SARS Virus
tccacgaagcggacgcacaggtagt

SEQ ID NO: 159185 - DNA, 25 bp, SARS Virus
ccacgaagcggcagcacaggtagtt

SEQ ID NO: 159186 - DNA, 25 bp, SARS Virus
cacgaagcggccacacaggtagttt

SEQ ID NO: 159187 - DNA, 25 bp, SARS Virus
acgaagcggccgaacaggtagtttc

SEQ ID NO: 159188 - DNA, 25 bp, SARS Virus
cgaagcggccgcacaggtagtttca

SEQ ID NO: 159189 - DNA, 25 bp, SARS Virus
gaagcggccgcaaaggtagtttcac

SEQ ID NO: 159190 - DNA, 25 bp, SARS Virus
aagcggccgcacaggtagtttcaca

SEQ ID NO: 159191 - DNA, 25 bp, SARS Virus
agcggccgcacaagtagtttcacag

SEQ ID NO: 159192 - DNA, 25 bp, SARS Virus
gcggccgcacagatagtttcacagg

SEQ ID NO: 159193 - DNA, 25 bp, SARS Virus
cggccgcacaggaagtttcacagga

SEQ ID NO: 159194 - DNA, 25 bp, SARS Virus
ggccgcacaggtagtttcacaggaa

SEQ ID NO: 159195 - DNA, 25 bp, SARS Virus
gccgcacaggtaatttcacaggaaa

SEQ ID NO: 159196 - DNA, 25 bp, SARS Virus
ccgcacaggtagattcacaggaaat

SEQ ID NO: 159197 - DNA, 25 bp, SARS Virus
cgcacaggtagtatcacaggaaata

SEQ ID NO: 159198 - DNA, 25 bp, SARS Virus
gcacaggtagttacacaggaaataa

SEQ ID NO: 159199 - DNA, 25 bp, SARS Virus
cacaggtagtttaacaggaaataat

SEQ ID NO: 159200 - DNA, 25 bp, SARS Virus
acaggtagtttcacaggaaataatt

SEQ ID NO: 159201 - DNA, 25 bp, SARS Virus
caggtagtttcaaaggaaataattg

SEQ ID NO: 159202 - DNA, 25 bp, SARS Virus
aggtagtttcacaggaaataattgt

SEQ ID NO: 159203 - DNA, 25 bp, SARS Virus
ggtagtttcacaagaaataattgtt

SEQ ID NO: 159204 - DNA, 25 bp, SARS Virus
gtagtttcacagaaaataattgttg

SEQ ID NO: 159205 - DNA, 25 bp, SARS Virus
tagtttcacaggaaataattgttgt

SEQ ID NO: 159206 - DNA, 25 bp, SARS Virus
agtttcacaggaaataattgttgta

SEQ ID NO: 159207 - DNA, 25 bp, SARS Virus
gtttcacaggaaataattgttgtaa

SEQ ID NO: 159208 - DNA, 25 bp, SARS Virus
tttcacaggaaaaaattgttgtaat

SEQ ID NO: 159209 - DNA, 25 bp, SARS Virus
ttcacaggaaataattgttgtaata

SEQ ID NO: 159210 - DNA, 25 bp, SARS Virus
tcacaggaaataattgttgtaatat

SEQ ID NO: 159211 - DNA, 25 bp, SARS Virus
cacaggaaataaatgttgtaatatt

SEQ ID NO: 159212 - DNA, 25 bp, SARS Virus
acaggaaataatagttgtaatattc

SEQ ID NO: 159213 - DNA, 25 bp, SARS Virus
caggaaataattattgtaatattcg

SEQ ID NO: 159214 - DNA, 25 bp, SARS Virus
aggaaataattgatgtaatattcgg

SEQ ID NO: 159215 - DNA, 25 bp, SARS Virus
ggaaataattgtagtaatattcggt

SEQ ID NO: 159216 - DNA, 25 bp, SARS Virus
gaaataattgttataatattcggtg

SEQ ID NO: 159217 - DNA, 25 bp, SARS Virus
aaataattgttgaaatattcggtgt

SEQ ID NO: 159218 - DNA, 25 bp, SARS Virus
aataattgttgtaatattcggtgta

SEQ ID NO: 159219 - DNA, 25 bp, SARS Virus
ataattgttgtaatattcggtgtaa

SEQ ID NO: 159220 - DNA, 25 bp, SARS Virus
taattgttgtaaaattcggtgtaaa

SEQ ID NO: 159221 - DNA, 25 bp, SARS Virus
aattgttgtaatattcggtgtaaaa

SEQ ID NO: 159222 - DNA, 25 bp, SARS Virus
attgttgtaataatcggtgtaaaag

SEQ ID NO: 159223 - DNA, 25 bp, SARS Virus
ttgttgtaatatacggtgtaaaaga

SEQ ID NO: 159224 - DNA, 25 bp, SARS Virus
tgttgtaatattaggtgtaaaagat

SEQ ID NO: 159225 - DNA, 25 bp, SARS Virus
gttgtaatattcagtgtaaaagatt

SEQ ID NO: 159226 - DNA, 25 bp, SARS Virus
ttgtaatattcgatgtaaaagattt

SEQ ID NO: 159227 - DNA, 25 bp, SARS Virus
tgtaatattcggagtaaaagatttg

SEQ ID NO: 159228 - DNA, 25 bp, SARS Virus
gtaatattcggtataaaagatttga

SEQ ID NO: 159229 - DNA, 25 bp, SARS Virus
taatattcggtgaaaaagatttgag

SEQ ID NO: 159230 - DNA, 25 bp, SARS Virus
aatattcggtgtaaaagatttgaga

SEQ ID NO: 159231 - DNA, 25 bp, SARS Virus
atattcggtgtaaaagatttgagac

SEQ ID NO: 159232 - DNA, 25 bp, SARS Virus
tattcggtgtaaaagatttgagaca

SEQ ID NO: 159233 - DNA, 25 bp, SARS Virus
attcggtgtaaaagatttgagacat

SEQ ID NO: 159234 - DNA, 25 bp, SARS Virus
ttcggtgtaaaaaatttgagacatt

SEQ ID NO: 159235 - DNA, 25 bp, SARS Virus
tcggtgtaaaagatttgagacattg

SEQ ID NO: 159236 - DNA, 25 bp, SARS Virus
cggtgtaaaagaattgagacattgg

SEQ ID NO: 159237 - DNA, 25 bp, SARS Virus
ggtgtaaaagatatgagacattgga

SEQ ID NO: 159238 - DNA, 25 bp, SARS Virus
gtgtaaaagattagagacattggac

SEQ ID NO: 159239 - DNA, 25 bp, SARS Virus
tgtaaaagatttaagacattggacc

SEQ ID NO: 159240 - DNA, 25 bp, SARS Virus
gtaaaagatttgagacattggacca

SEQ ID NO: 159241 - DNA, 25 bp, SARS Virus
taaaagatttgaaacattggaccat

SEQ ID NO: 159242 - DNA, 25 bp, SARS Virus
aaaagatttgagacattggaccatt

SEQ ID NO: 159243 - DNA, 25 bp, SARS Virus
aaagatttgagaaattggaccattt

SEQ ID NO: 159244 - DNA, 25 bp, SARS Virus
aagatttgagacattggaccattta

SEQ ID NO: 159245 - DNA, 25 bp, SARS Virus
agatttgagacaatggaccatttac

SEQ ID NO: 159246 - DNA, 25 bp, SARS Virus
gatttgagacataggaccatttaca

SEQ ID NO: 159247 - DNA, 25 bp, SARS Virus
atttgagacattagaccatttacat

SEQ ID NO: 159248 - DNA, 25 bp, SARS Virus
tttgagacattgaaccatttacata

SEQ ID NO: 159249 - DNA, 25 bp, SARS Virus
ttgagacattggaccatttacataa

SEQ ID NO: 159250 - DNA, 25 bp, SARS Virus
tgagacattggaacatttacataag

SEQ ID NO: 159251 - DNA, 25 bp, SARS Virus
gagacattggacaatttacataagg

SEQ ID NO: 159252 - DNA, 25 bp, SARS Virus
agacattggaccatttacataaggt

SEQ ID NO: 159253 - DNA, 25 bp, SARS Virus
gacattggaccaattacataaggtg

SEQ ID NO: 159254 - DNA, 25 bp, SARS Virus
acattggaccatatacataaggtgt

SEQ ID NO: 159255 - DNA, 25 bp, SARS Virus
cattggaccattaacataaggtgtc

SEQ ID NO: 159256 - DNA, 25 bp, SARS Virus
attggaccatttacataaggtgtcc

SEQ ID NO: 159257 - DNA, 25 bp, SARS Virus
ttggaccatttaaataaggtgtcca

SEQ ID NO: 159258 - DNA, 25 bp, SARS Virus
tggaccatttacataaggtgtccaa

SEQ ID NO: 159259 - DNA, 25 bp, SARS Virus
ggaccatttacaaaaggtgtccaat

SEQ ID NO: 159260 - DNA, 25 bp, SARS Virus
gaccatttacataaggtgtccaata

SEQ ID NO: 159261 - DNA, 25 bp, SARS Virus
accatttacataaggtgtccaatat

SEQ ID NO: 159262 - DNA, 25 bp, SARS Virus
ccatttacataaagtgtccaatatt

SEQ ID NO: 159263 - DNA, 25 bp, SARS Virus
catttacataagatgtccaatattc

SEQ ID NO: 159264 - DNA, 25 bp, SARS Virus
atttacataaggagtccaatattca

SEQ ID NO: 159265 - DNA, 25 bp, SARS Virus
tttacataaggtatccaatattcat

SEQ ID NO: 159266 - DNA, 25 bp, SARS Virus
ttacataaggtgaccaatattcata

SEQ ID NO: 159267 - DNA, 25 bp, SARS Virus
tacataaggtgtacaatattcatag

SEQ ID NO: 159268 - DNA, 25 bp, SARS Virus
acataaggtgtcaaatattcatagt

SEQ ID NO: 159269 - DNA, 25 bp, SARS Virus
cataaggtgtccaatattcatagtt

SEQ ID NO: 159270 - DNA, 25 bp, SARS Virus
ataaggtgtccaatattcatagttt

SEQ ID NO: 159271 - DNA, 25 bp, SARS Virus
taaggtgtccaaaattcatagttta

SEQ ID NO: 159272 - DNA, 25 bp, SARS Virus
aaggtgtccaatattcatagtttaa

SEQ ID NO: 159273 - DNA, 25 bp, SARS Virus
aggtgtccaataatcatagtttaac

SEQ ID NO: 159274 - DNA, 25 bp, SARS Virus
ggtgtccaatatacatagtttaaca

SEQ ID NO: 159275 - DNA, 25 bp, SARS Virus
gtgtccaatattaatagtttaacaa

SEQ ID NO: 159276 - DNA, 25 bp, SARS Virus
tgtccaatattcatagtttaacaaa

SEQ ID NO: 159277 - DNA, 25 bp, SARS Virus
gtccaatattcaaagtttaacaaac

SEQ ID NO: 159278 - DNA, 25 bp, SARS Virus
tccaatattcatagtttaacaaaca

SEQ ID NO: 159279 - DNA, 25 bp, SARS Virus
ccaatattcataatttaacaaacat

SEQ ID NO: 159280 - DNA, 25 bp, SARS Virus
caatattcatagattaacaaacatt

SEQ ID NO: 159281 - DNA, 25 bp, SARS Virus
aatattcatagtataacaaacattt

SEQ ID NO: 159282 - DNA, 25 bp, SARS Virus
atattcatagttaaacaaacattta

SEQ ID NO: 159283 - DNA, 25 bp, SARS Virus
tattcatagtttaacaaacatttag

SEQ ID NO: 159284 - DNA, 25 bp, SARS Virus
attcatagtttaacaaacatttagg

SEQ ID NO: 159285 - DNA, 25 bp, SARS Virus
ttcatagtttaaaaaacatttaggt

SEQ ID NO: 159286 - DNA, 25 bp, SARS Virus
tcatagtttaacaaacatttaggta

SEQ ID NO: 159287 - DNA, 25 bp, SARS Virus
catagtttaacaaacatttaggtat

SEQ ID NO: 159288 - DNA, 25 bp, SARS Virus
atagtttaacaaacatttaggtatc

SEQ ID NO: 159289 - DNA, 25 bp, SARS Virus
tagtttaacaaaaatttaggtatcc

SEQ ID NO: 159290 - DNA, 25 bp, SARS Virus
agtttaacaaacatttaggtatccg

SEQ ID NO: 159291 - DNA, 25 bp, SARS Virus
gtttaacaaacaattaggtatccga

SEQ ID NO: 159292 - DNA, 25 bp, SARS Virus
tttaacaaacatataggtatccgat

SEQ ID NO: 159293 - DNA, 25 bp, SARS Virus
ttaacaaacattaaggtatccgatt

SEQ ID NO: 159294 - DNA, 25 bp, SARS Virus
taacaaacatttaggtatccgattt

SEQ ID NO: 159295 - DNA, 25 bp, SARS Virus
aacaaacatttaagtatccgattta

SEQ ID NO: 159296 - DNA, 25 bp, SARS Virus
acaaacatttagatatccgatttag

SEQ ID NO: 159297 - DNA, 25 bp, SARS Virus
caaacatttaggaatccgatttagg

SEQ ID NO: 159298 - DNA, 25 bp, SARS Virus
aaacatttaggtatccgatttaggt

SEQ ID NO: 159299 - DNA, 25 bp, SARS Virus
aacatttaggtaaccgatttaggtc

SEQ ID NO: 159300 - DNA, 25 bp, SARS Virus
acatttaggtatacgatttaggtcg

SEQ ID NO: 159301 - DNA, 25 bp, SARS Virus
catttaggtatcagatttaggtcgt

SEQ ID NO: 159302 - DNA, 25 bp, SARS Virus
atttaggtatccaatttaggtcgtc

SEQ ID NO: 159303 - DNA, 25 bp, SARS Virus
tttaggtatccgatttaggtcgtct

SEQ ID NO: 159304 - DNA, 25 bp, SARS Virus
ttaggtatccgaattaggtcgtctt

SEQ ID NO: 159305 - DNA, 25 bp, SARS Virus
taggtatccgatataggtcgtcttt

SEQ ID NO: 159306 - DNA, 25 bp, SARS Virus
aggtatccgattaaggtcgtcttta

SEQ ID NO: 159307 - DNA, 25 bp, SARS Virus
ggtatccgatttaggtcgtctttag

SEQ ID NO: 159308 - DNA, 25 bp, SARS Virus
gtatccgatttaagtcgtctttagt

SEQ ID NO: 159309 - DNA, 25 bp, SARS Virus
tatccgatttagatcgtctttagta

SEQ ID NO: 159310 - DNA, 25 bp, SARS Virus
atccgatttaggacgtctttagtag

SEQ ID NO: 159311 - DNA, 25 bp, SARS Virus
tccgatttaggtagtctttagtagt

SEQ ID NO: 159312 - DNA, 25 bp, SARS Virus
ccgatttaggtcatctttagtagta

SEQ ID NO: 159313 - DNA, 25 bp, SARS Virus
cgatttaggtcgactttagtagtat

SEQ ID NO: 159314 - DNA, 25 bp, SARS Virus
gatttaggtcgtatttagtagtata

SEQ ID NO: 159315 - DNA, 25 bp, SARS Virus
atttaggtcgtcattagtagtataa

SEQ ID NO: 159316 - DNA, 25 bp, SARS Virus
tttaggtcgtctatagtagtataat

SEQ ID NO: 159317 - DNA, 25 bp, SARS Virus
ttaggtcgtcttaagtagtataata
